United States Patent Application Publication US 2018/0305689 A1 - sequence listing, part 16

SEQ ID NO: 192685 - RNA, 19 nt, Artificial Sequence
  Description of Artificial Sequence: Synthetic oligonucleotide
  Antisense strand to SEQ ID NO: 192684
uucaucagacuuuaucaaa

SEQ ID NO: 192686 - RNA, 19 nt, Artificial Sequence
  Description of Artificial Sequence: Synthetic oligonucleotide
  Sense strand starting at position 2420 of SEQ ID NO: 2484
agcaauggucaccagugau

SEQ ID NO: 192687 - RNA, 19 nt, Artificial Sequence
  Description of Artificial Sequence: Synthetic oligonucleotide
  Antisense strand to SEQ ID NO: 192686
aucacuggugaccauugcu

SEQ ID NO: 192688 - RNA, 19 nt, Artificial Sequence
  Description of Artificial Sequence: Synthetic oligonucleotide
  Sense strand starting at position 2402 of SEQ ID NO: 2484
uuaagaaugggccacugua

SEQ ID NO: 192689 - RNA, 19 nt, Artificial Sequence
  Description of Artificial Sequence: Synthetic oligonucleotide
  Antisense strand to SEQ ID NO: 192688
uacaguggcccauucuuaa

SEQ ID NO: 192690 - RNA, 19 nt, Artificial Sequence
  Description of Artificial Sequence: Synthetic oligonucleotide
  Sense strand starting at position 2375 of SEQ ID NO: 2484
uugcucauaggucaaguaa

SEQ ID NO: 192691 - RNA, 19 nt, Artificial Sequence
  Description of Artificial Sequence: Synthetic oligonucleotide
  Antisense strand to SEQ ID NO: 192690
uuacuugaccuaugagcaa

SEQ ID NO: 192692 - RNA, 19 nt, Artificial Sequence
  Description of Artificial Sequence: Synthetic oligonucleotide
  Sense strand starting at position 2368 of SEQ ID NO: 2484
ucaaauguugcucauaggu

SEQ ID NO: 192693 - RNA, 19 nt, Artificial Sequence
  Description of Artificial Sequence: Synthetic oligonucleotide
  Antisense strand to SEQ ID NO: 192692
accuaugagcaacauuuga

SEQ ID NO: 192694 - RNA, 19 nt, Artificial Sequence
  Description of Artificial Sequence: Synthetic oligonucleotide
  Sense strand starting at position 2354 of SEQ ID NO: 2484
agugacccauugucucaaa

SEQ ID NO: 192695 - RNA, 19 nt, Artificial Sequence
  Description of Artificial Sequence: Synthetic oligonucleotide
  Antisense strand to SEQ ID NO: 192694
uuugagacaaugggucacu

SEQ ID NO: 192696 - RNA, 19 nt, Artificial Sequence
  Description of Artificial Sequence: Synthetic oligonucleotide
  Sense strand starting at position 2229 of SEQ ID NO: 2484
gguuaagucggagagguga

SEQ ID NO: 192697 - RNA, 19 nt, Artificial Sequence
  Description of Artificial Sequence: Synthetic oligonucleotide
  Antisense strand to SEQ ID NO: 192696
ucaccucuccgacuuaacc

SEQ ID NO: 192698 - RNA, 19 nt, Artificial Sequence
  Description of Artificial Sequence: Synthetic oligonucleotide
  Sense strand starting at position 2014 of SEQ ID NO: 2484
gcucguuuccggaagacgu

SEQ ID NO: 192699 - RNA, 19 nt, Artificial Sequence
  Description of Artificial Sequence: Synthetic oligonucleotide
  Antisense strand to SEQ ID NO: 192698
acgucuuccggaaacgagc

SEQ ID NO: 192700 - RNA, 19 nt, Artificial Sequence
  Description of Artificial Sequence: Synthetic oligonucleotide
  Sense strand starting at position 1401 of SEQ ID NO: 2484
cuugaaauagcuuacaguu

SEQ ID NO: 192701 - RNA, 19 nt, Artificial Sequence
  Description of Artificial Sequence: Synthetic oligonucleotide
  Antisense strand to SEQ ID NO: 192700
aacuguaagcuauuucaag

SEQ ID NO: 192702 - RNA, 19 nt, Artificial Sequence
  Description of Artificial Sequence: Synthetic oligonucleotide
  Sense strand starting at position 1389 of SEQ ID NO: 2484
cuuccuggaucccuugaaa

SEQ ID NO: 192703 - RNA, 19 nt, Artificial Sequence
  Description of Artificial Sequence: Synthetic oligonucleotide
  Antisense strand to SEQ ID NO: 192702
uuucaagggauccaggaag

SEQ ID NO: 192704 - RNA, 19 nt, Artificial Sequence
  Description of Artificial Sequence: Synthetic oligonucleotide
  Sense strand starting at position 1342 of SEQ ID NO: 2484
ugcugagaauacccuucua

SEQ ID NO: 192705 - RNA, 19 nt, Artificial Sequence
  Description of Artificial Sequence: Synthetic oligonucleotide
  Antisense strand to SEQ ID NO: 192704
uagaaggguauucucagca

SEQ ID NO: 192706 - RNA, 19 nt, Artificial Sequence
  Description of Artificial Sequence: Synthetic oligonucleotide
  Sense strand starting at position 1216 of SEQ ID NO: 2484
aaauguaucugaguuugaa

SEQ ID NO: 192707 - RNA, 19 nt, Artificial Sequence
  Description of Artificial Sequence: Synthetic oligonucleotide
  Antisense strand to SEQ ID NO: 192706
uucaaacucagauacauuu

SEQ ID NO: 192708 - RNA, 19 nt, Artificial Sequence
  Description of Artificial Sequence: Synthetic oligonucleotide
  Sense strand starting at position 1171 of SEQ ID NO: 2484
gcaggaaugcuauacugua

SEQ ID NO: 192709 - RNA, 19 nt, Artificial Sequence
  Description of Artificial Sequence: Synthetic oligonucleotide
  Antisense strand to SEQ ID NO: 192708
uacaguauagcauuccugc

SEQ ID NO: 192710 - RNA, 19 nt, Artificial Sequence
  Description of Artificial Sequence: Synthetic oligonucleotide
  Sense strand starting at position 1059 of SEQ ID NO: 2484
acuggaagaucugcagaua

SEQ ID NO: 192711 - RNA, 19 nt, Artificial Sequence
  Description of Artificial Sequence: Synthetic oligonucleotide
  Antisense strand to SEQ ID NO: 192710
uaucugcagaucuuccagu

SEQ ID NO: 192712 - RNA, 19 nt, Artificial Sequence
  Description of Artificial Sequence: Synthetic oligonucleotide
  Sense strand starting at position 1050 of SEQ ID NO: 2484
acagucugcacuggaagau

SEQ ID NO: 192713 - RNA, 19 nt, Artificial Sequence
  Description of Artificial Sequence: Synthetic oligonucleotide
  Antisense strand to SEQ ID NO: 192712
aucuuccagugcagacugu

SEQ ID NO: 192714 - RNA, 19 nt, Artificial Sequence
  Description of Artificial Sequence: Synthetic oligonucleotide
  Sense strand starting at position 1049 of SEQ ID NO: 2484
cacagucugcacuggaaga

SEQ ID NO: 192715 - RNA, 19 nt, Artificial Sequence
  Description of Artificial Sequence: Synthetic oligonucleotide
  Antisense strand to SEQ ID NO: 192714
ucuuccagugcagacugug

SEQ ID NO: 192716 - RNA, 19 nt, Artificial Sequence
  Description of Artificial Sequence: Synthetic oligonucleotide
  Sense strand starting at position 999 of SEQ ID NO: 2484
ggcucuagaaaggguauaa

SEQ ID NO: 192717 - RNA, 19 nt, Artificial Sequence
  Description of Artificial Sequence: Synthetic oligonucleotide
  Antisense strand to SEQ ID NO: 192716
uuauacccuuucuagagcc

SEQ ID NO: 192718 - RNA, 19 nt, Artificial Sequence
  Description of Artificial Sequence: Synthetic oligonucleotide
  Sense strand starting at position 998 of SEQ ID NO: 2484
gggcucuagaaaggguaua

SEQ ID NO: 192719 - RNA, 19 nt, Artificial Sequence
  Description of Artificial Sequence: Synthetic oligonucleotide
  Antisense strand to SEQ ID NO: 192718
uauacccuuucuagagccc

SEQ ID NO: 192720 - RNA, 19 nt, Artificial Sequence
  Description of Artificial Sequence: Synthetic oligonucleotide
  Sense strand starting at position 975 of SEQ ID NO: 2484
cuccuaugagcuuagaacu

SEQ ID NO: 192721 - RNA, 19 nt, Artificial Sequence
  Description of Artificial Sequence: Synthetic oligonucleotide
  Antisense strand to SEQ ID NO: 192720
aguucuaagcucauaggag

SEQ ID NO: 192722 - RNA, 19 nt, Artificial Sequence
  Description of Artificial Sequence: Synthetic oligonucleotide
  Sense strand starting at position 949 of SEQ ID NO: 2484
uguuucucucuguagaaac

SEQ ID NO: 192723 - RNA, 19 nt, Artificial Sequence
  Description of Artificial Sequence: Synthetic oligonucleotide
  Antisense strand to SEQ ID NO: 192722
guuucuacagagagaaaca

SEQ ID NO: 192724 - RNA, 19 nt, Artificial Sequence
  Description of Artificial Sequence: Synthetic oligonucleotide
  Sense strand starting at position 948 of SEQ ID NO: 2484
auguuucucucuguagaaa

SEQ ID NO: 192725 - RNA, 19 nt, Artificial Sequence
  Description of Artificial Sequence: Synthetic oligonucleotide
  Antisense strand to SEQ ID NO: 192724
uuucuacagagagaaacau

SEQ ID NO: 192726 - RNA, 19 nt, Artificial Sequence
  Description of Artificial Sequence: Synthetic oligonucleotide
  Sense strand starting at position 820 of SEQ ID NO: 2484
uacucugacgcugggauaa

SEQ ID NO: 192727 - RNA, 19 nt, Artificial Sequence
  Description of Artificial Sequence: Synthetic oligonucleotide
  Antisense strand to SEQ ID NO: 192726
uuaucccagcgucagagua

SEQ ID NO: 192728 - RNA, 19 nt, Artificial Sequence
  Description of Artificial Sequence: Synthetic oligonucleotide
  Sense strand starting at position 631 of SEQ ID NO: 2484
cuuagauaaggauguuaua

SEQ ID NO: 192729 - RNA, 19 nt, Artificial Sequence
  Description of Artificial Sequence: Synthetic oligonucleotide
  Antisense strand to SEQ ID NO: 192728
uauaacauccuuaucuaag

SEQ ID NO: 192730 - RNA, 19 nt, Artificial Sequence
  Description of Artificial Sequence: Synthetic oligonucleotide
  Sense strand starting at position 594 of SEQ ID NO: 2484
acagaucucuacuugugau

SEQ ID NO: 192731 - RNA, 19 nt, Artificial Sequence
  Description of Artificial Sequence: Synthetic oligonucleotide
  Antisense strand to SEQ ID NO: 192730
aucacaaguagagaucugu

SEQ ID NO: 192732 - RNA, 19 nt, Artificial Sequence
  Description of Artificial Sequence: Synthetic oligonucleotide
  Sense strand starting at position 591 of SEQ ID NO: 2484
agcacagaucucuacuugu

SEQ ID NO: 192733 - RNA, 19 nt, Artificial Sequence
  Description of Artificial Sequence: Synthetic oligonucleotide
  Antisense strand to SEQ ID NO: 192732
acaaguagagaucugugcu

SEQ ID NO: 192734 - RNA, 19 nt, Artificial Sequence
  Description of Artificial Sequence: Synthetic oligonucleotide
  Sense strand starting at position 553 of SEQ ID NO: 2484
ugacauuucuagcaagaca

SEQ ID NO: 192735 - RNA, 19 nt, Artificial Sequence
  Description of Artificial Sequence: Synthetic oligonucleotide
  Antisense strand to SEQ ID NO: 192734
ugucuugcuagaaauguca

SEQ ID NO: 192736 - RNA, 19 nt, Artificial Sequence
  Description of Artificial Sequence: Synthetic oligonucleotide
  Sense strand starting at position 491 of SEQ ID NO: 2484
gcucuaucagaccauaagu

SEQ ID NO: 192737 - RNA, 19 nt, Artificial Sequence
  Description of Artificial Sequence: Synthetic oligonucleotide
  Antisense strand to SEQ ID NO: 192736
acuuauggucugauagagc

SEQ ID NO: 192738 - RNA, 19 nt, Artificial Sequence
  Description of Artificial Sequence: Synthetic oligonucleotide
  Sense strand starting at position 483 of SEQ ID NO: 2484
agaacccugcucuaucaga

SEQ ID NO: 192739 - RNA, 19 nt, Artificial Sequence
  Description of Artificial Sequence: Synthetic oligonucleotide
  Antisense strand to SEQ ID NO: 192738
ucugauagagcaggguucu

SEQ ID NO: 192740 - RNA, 19 nt, Artificial Sequence
  Description of Artificial Sequence: Synthetic oligonucleotide
  Sense strand starting at position 145 of SEQ ID NO: 2484
cuggcugguuauccauuua

SEQ ID NO: 192741 - RNA, 19 nt, Artificial Sequence
  Description of Artificial Sequence: Synthetic oligonucleotide
  Antisense strand to SEQ ID NO: 192740
uaaauggauaaccagccag

SEQ ID NO: 192742 - RNA, 19 nt, Artificial Sequence
  Description of Artificial Sequence: Synthetic oligonucleotide
  Sense strand starting at position 3292 of SEQ ID NO: 2485
gccaaaucgcccugcuaac

SEQ ID NO: 192743 - RNA, 19 nt, Artificial Sequence
  Description of Artificial Sequence: Synthetic oligonucleotide
  Antisense strand to SEQ ID NO: 192742
guuagcagggcgauuuggc

SEQ ID NO: 192744 - RNA, 19 nt, Artificial Sequence
  Description of Artificial Sequence: Synthetic oligonucleotide
  Sense strand starting at position 3291 of SEQ ID NO: 2485
cgccaaaucgcccugcuaa

SEQ ID NO: 192745 - RNA, 19 nt, Artificial Sequence
  Description of Artificial Sequence: Synthetic oligonucleotide
  Antisense strand to SEQ ID NO: 192744
uuagcagggcgauuuggcg

SEQ ID NO: 192746 - RNA, 19 nt, Artificial Sequence
  Description of Artificial Sequence: Synthetic oligonucleotide
  Sense strand starting at position 3290 of SEQ ID NO: 2485
gcgccaaaucgcccugcua

SEQ ID NO: 192747 - RNA, 19 nt, Artificial Sequence
  Description of Artificial Sequence: Synthetic oligonucleotide
  Antisense strand to SEQ ID NO: 192746
uagcagggcgauuuggcgc

SEQ ID NO: 192748 - RNA, 19 nt, Artificial Sequence
  Description of Artificial Sequence: Synthetic oligonucleotide
  Sense strand starting at position 3074 of SEQ ID NO: 2485
gcagaauucguaugcaagc

SEQ ID NO: 192749 - RNA, 19 nt, Artificial Sequence
  Description of Artificial Sequence: Synthetic oligonucleotide
  Antisense strand to SEQ ID NO: 192748
gcuugcauacgaauucugc

SEQ ID NO: 192750 - RNA, 19 nt, Artificial Sequence
  Description of Artificial Sequence: Synthetic oligonucleotide
  Sense strand starting at position 3063 of SEQ ID NO: 2485
agcacucacuggcagaauu

SEQ ID NO: 192751 - RNA, 19 nt, Artificial Sequence
  Description of Artificial Sequence: Synthetic oligonucleotide
  Antisense strand to SEQ ID NO: 192750
aauucugccagugagugcu

SEQ ID NO: 192752 - RNA, 19 nt, Artificial Sequence
  Description of Artificial Sequence: Synthetic oligonucleotide
  Sense strand starting at position 2861 of SEQ ID NO: 2485
gcaacugauaggcguccua

SEQ ID NO: 192753 - RNA, 19 nt, Artificial Sequence
  Description of Artificial Sequence: Synthetic oligonucleotide
  Antisense strand to SEQ ID NO: 192752
uaggacgccuaucaguugc

SEQ ID NO: 192754 - RNA, 19 nt, Artificial Sequence
  Description of Artificial Sequence: Synthetic oligonucleotide
  Sense strand starting at position 2640 of SEQ ID NO: 2485
gccauauaaucugauggau

SEQ ID NO: 192755 - RNA, 19 nt, Artificial Sequence
  Description of Artificial Sequence: Synthetic oligonucleotide
  Antisense strand to SEQ ID NO: 192754
auccaucagauuauauggc

SEQ ID NO: 192756 - RNA, 19 nt, Artificial Sequence
  Description of Artificial Sequence: Synthetic oligonucleotide
  Sense strand starting at position 2639 of SEQ ID NO: 2485
cgccauauaaucugaugga

SEQ ID NO: 192757 - RNA, 19 nt, Artificial Sequence
  Description of Artificial Sequence: Synthetic oligonucleotide
  Antisense strand to SEQ ID NO: 192756
uccaucagauuauauggcg

SEQ ID NO: 192758 - RNA, 19 nt, Artificial Sequence
  Description of Artificial Sequence: Synthetic oligonucleotide
  Sense strand starting at position 2630 of SEQ ID NO: 2485
cgucuaaaucgccauauaa

SEQ ID NO: 192759 - RNA, 19 nt, Artificial Sequence
  Description of Artificial Sequence: Synthetic oligonucleotide
  Antisense strand to SEQ ID NO: 192758
uuauauggcgauuuagacg

SEQ ID NO: 192760 - RNA, 19 nt, Artificial Sequence
  Description of Artificial Sequence: Synthetic oligonucleotide
  Sense strand starting at position 2629 of SEQ ID NO: 2485
ccgucuaaaucgccauaua

SEQ ID NO: 192761 - RNA, 19 nt, Artificial Sequence
  Description of Artificial Sequence: Synthetic oligonucleotide
  Antisense strand to SEQ ID NO: 192760
uauauggcgauuuagacgg

SEQ ID NO: 192762 - RNA, 19 nt, Artificial Sequence
  Description of Artificial Sequence: Synthetic oligonucleotide
  Sense strand starting at position 2593 of SEQ ID NO: 2485
acgucauccgcugaccauu

SEQ ID NO: 192763 - RNA, 19 nt, Artificial Sequence
  Description of Artificial Sequence: Synthetic oligonucleotide
  Antisense strand to SEQ ID NO: 192762
aauggucagcggaugacgu

SEQ ID NO: 192764 - RNA, 19 nt, Artificial Sequence
  Description of Artificial Sequence: Synthetic oligonucleotide
  Sense strand starting at position 2530 of SEQ ID NO: 2485
aagcuaaacccgugucacu

SEQ ID NO: 192765 - RNA, 19 nt, Artificial Sequence
  Description of Artificial Sequence: Synthetic oligonucleotide
  Antisense strand to SEQ ID NO: 192764
agugacacggguuuagcuu

SEQ ID NO: 192766 - RNA, 19 nt, Artificial Sequence
  Description of Artificial Sequence: Synthetic oligonucleotide
  Sense strand starting at position 2420 of SEQ ID NO: 2485
guucacuuucgcgaaugua

SEQ ID NO: 192767 - RNA, 19 nt, Artificial Sequence
  Description of Artificial Sequence: Synthetic oligonucleotide
  Antisense strand to SEQ ID NO: 192766
uacauucgcgaaagugaac

SEQ ID NO: 192768 - RNA, 19 nt, Artificial Sequence
  Description of Artificial Sequence: Synthetic oligonucleotide
  Sense strand starting at position 2419 of SEQ ID NO: 2485
aguucacuuucgcgaaugu

SEQ ID NO: 192769 - RNA, 19 nt, Artificial Sequence
  Description of Artificial Sequence: Synthetic oligonucleotide
  Antisense strand to SEQ ID NO: 192768
acauucgcgaaagugaacu

SEQ ID NO: 192770 - RNA, 19 nt, Artificial Sequence
  Description of Artificial Sequence: Synthetic oligonucleotide
  Sense strand starting at position 2417 of SEQ ID NO: 2485
gcaguucacuuucgcgaau

SEQ ID NO: 192771 - RNA, 19 nt, Artificial Sequence
  Description of Artificial Sequence: Synthetic oligonucleotide
  Antisense strand to SEQ ID NO: 192770
auucgcgaaagugaacugc

SEQ ID NO: 192772 - RNA, 19 nt, Artificial Sequence
  Description of Artificial Sequence: Synthetic oligonucleotide
  Sense strand starting at position 2416 of SEQ ID NO: 2485
ugcaguucacuuucgcgaa

SEQ ID NO: 192773 - RNA, 19 nt, Artificial Sequence
  Description of Artificial Sequence: Synthetic oligonucleotide
  Antisense strand to SEQ ID NO: 192772
uucgcgaaagugaacugca

SEQ ID NO: 192774 - RNA, 19 nt, Artificial Sequence
  Description of Artificial Sequence: Synthetic oligonucleotide
  Sense strand starting at position 2305 of SEQ ID NO: 2485
cacugucgcuuagaaagaa

SEQ ID NO: 192775 - RNA, 19 nt, Artificial Sequence
  Description of Artificial Sequence: Synthetic oligonucleotide
  Antisense strand to SEQ ID NO: 192774
uucuuucuaagcgacagug

SEQ ID NO: 192776 - RNA, 19 nt, Artificial Sequence
  Description of Artificial Sequence: Synthetic oligonucleotide
  Sense strand starting at position 2303 of SEQ ID NO: 2485
gccacugucgcuuagaaag

SEQ ID NO: 192777 - RNA, 19 nt, Artificial Sequence
  Description of Artificial Sequence: Synthetic oligonucleotide
  Antisense strand to SEQ ID NO: 192776
cuuucuaagcgacaguggc

SEQ ID NO: 192778 - RNA, 19 nt, Artificial Sequence
  Description of Artificial Sequence: Synthetic oligonucleotide
  Sense strand starting at position 2302 of SEQ ID NO: 2485
cgccacugucgcuuagaaa

SEQ ID NO: 192779 - RNA, 19 nt, Artificial Sequence
  Description of Artificial Sequence: Synthetic oligonucleotide
  Antisense strand to SEQ ID NO: 192778
uuucuaagcgacaguggcg

SEQ ID NO: 192780 - RNA, 19 nt, Artificial Sequence
  Description of Artificial Sequence: Synthetic oligonucleotide
  Sense strand starting at position 2301 of SEQ ID NO: 2485
ccgccacugucgcuuagaa

SEQ ID NO: 192781 - RNA, 19 nt, Artificial Sequence
  Description of Artificial Sequence: Synthetic oligonucleotide
  Antisense strand to SEQ ID NO: 192780
uucuaagcgacaguggcgg

SEQ ID NO: 192782 - RNA, 19 nt, Artificial Sequence
  Description of Artificial Sequence: Synthetic oligonucleotide
  Sense strand starting at position 2275 of SEQ ID NO: 2485
cuacgagucucguaaacga

SEQ ID NO: 192783 - RNA, 19 nt, Artificial Sequence
  Description of Artificial Sequence: Synthetic oligonucleotide
  Antisense strand to SEQ ID NO: 192782
ucguuuacgagacucguag

SEQ ID NO: 192784 - RNA, 19 nt, Artificial Sequence
  Description of Artificial Sequence: Synthetic oligonucleotide
  Sense strand starting at position 2194 of SEQ ID NO: 2485
ucuuaugcucauugggcaa

SEQ ID NO: 192785 - RNA, 19 nt, Artificial Sequence
  Description of Artificial Sequence: Synthetic oligonucleotide
  Antisense strand to SEQ ID NO: 192784
uugcccaaugagcauaaga

SEQ ID NO: 192786 - RNA, 19 nt, Artificial Sequence
  Description of Artificial Sequence: Synthetic oligonucleotide
  Sense strand starting at position 2146 of SEQ ID NO: 2485
cuggguuggcccuaaauac

SEQ ID NO: 192787 - RNA, 19 nt, Artificial Sequence
  Description of Artificial Sequence: Synthetic oligonucleotide
  Antisense strand to SEQ ID NO: 192786
guauuuagggccaacccag

SEQ ID NO: 192788 - RNA, 19 nt, Artificial Sequence
  Description of Artificial Sequence: Synthetic oligonucleotide
  Sense strand starting at position 1719 of SEQ ID NO: 2485
acggacugugcuuacaaca

SEQ ID NO: 192789 - RNA, 19 nt, Artificial Sequence
  Description of Artificial Sequence: Synthetic oligonucleotide
  Antisense strand to SEQ ID NO: 192788
uguuguaagcacaguccgu

SEQ ID NO: 192790 - RNA, 19 nt, Artificial Sequence
  Description of Artificial Sequence: Synthetic oligonucleotide
  Sense strand starting at position 1152 of SEQ ID NO: 2485
guguacacaugagaaacua

SEQ ID NO: 192791 - RNA, 19 nt, Artificial Sequence
  Description of Artificial Sequence: Synthetic oligonucleotide
  Antisense strand to SEQ ID NO: 192790
uaguuucucauguguacac

SEQ ID NO: 192792 - RNA, 19 nt, Artificial Sequence
  Description of Artificial Sequence: Synthetic oligonucleotide
  Sense strand starting at position 1118 of SEQ ID NO: 2485
gggagcaaguccuggguuu

SEQ ID NO: 192793 - RNA, 19 nt, Artificial Sequence
  Description of Artificial Sequence: Synthetic oligonucleotide
  Antisense strand to SEQ ID NO: 192792
aaacccaggacuugcuccc

SEQ ID NO: 192794 - RNA, 19 nt, Artificial Sequence
  Description of Artificial Sequence: Synthetic oligonucleotide
  Sense strand starting at position 1081 of SEQ ID NO: 2485
ggaauuaagucccugccau

SEQ ID NO: 192795 - RNA, 19 nt, Artificial Sequence
  Description of Artificial Sequence: Synthetic oligonucleotide
  Antisense strand to SEQ ID NO: 192794
auggcagggacuuaauucc

SEQ ID NO: 192796 - RNA, 19 nt, Artificial Sequence
  Description of Artificial Sequence: Synthetic oligonucleotide
  Sense strand starting at position 776 of SEQ ID NO: 2485
ugacuuagaggucauccga

SEQ ID NO: 192797 - RNA, 19 nt, Artificial Sequence
  Description of Artificial Sequence: Synthetic oligonucleotide
  Antisense strand to SEQ ID NO: 192796
ucggaugaccucuaaguca

SEQ ID NO: 192798 - RNA, 19 nt, Artificial Sequence
  Description of Artificial Sequence: Synthetic oligonucleotide
  Sense strand starting at position 656 of SEQ ID NO: 2485
ccacucagguacucagaaa

SEQ ID NO: 192799 - RNA, 19 nt, Artificial Sequence
  Description of Artificial Sequence: Synthetic oligonucleotide
  Antisense strand to SEQ ID NO: 192798
uuucugaguaccugagugg

SEQ ID NO: 192800 - RNA, 19 nt, Artificial Sequence
  Description of Artificial Sequence: Synthetic oligonucleotide
  Sense strand starting at position 566 of SEQ ID NO: 2485
ugcagaaucuggguuuaaa

SEQ ID NO: 192801 - RNA, 19 nt, Artificial Sequence
  Description of Artificial Sequence: Synthetic oligonucleotide
  Antisense strand to SEQ ID NO: 192800
uuuaaacccagauucugca

SEQ ID NO: 192802 - RNA, 19 nt, Artificial Sequence
  Description of Artificial Sequence: Synthetic oligonucleotide
  Sense strand starting at position 486 of SEQ ID NO: 2485
cugggauugcugggaccaa

SEQ ID NO: 192803 - RNA, 19 nt, Artificial Sequence
  Description of Artificial Sequence: Synthetic oligonucleotide
  Antisense strand to SEQ ID NO: 192802
uuggucccagcaaucccag

SEQ ID NO: 192804 - RNA, 19 nt, Artificial Sequence
  Description of Artificial Sequence: Synthetic oligonucleotide
  Sense strand starting at position 374 of SEQ ID NO: 2485
agagucuaucccuauccau

SEQ ID NO: 192805 - RNA, 19 nt, Artificial Sequence
  Description of Artificial Sequence: Synthetic oligonucleotide
  Antisense strand to SEQ ID NO: 192804
auggauagggauagacucu

SEQ ID NO: 192806 - RNA, 19 nt, Artificial Sequence
  Description of Artificial Sequence: Synthetic oligonucleotide
  Sense strand starting at position 348 of SEQ ID NO: 2485
uucuguaucuacgaagaag

SEQ ID NO: 192807 - RNA, 19 nt, Artificial Sequence
  Description of Artificial Sequence: Synthetic oligonucleotide
  Antisense strand to SEQ ID NO: 192806
cuucuucguagauacagaa

SEQ ID NO: 192808 - RNA, 19 nt, Artificial Sequence
  Description of Artificial Sequence: Synthetic oligonucleotide
  Sense strand starting at position 344 of SEQ ID NO: 2485
guguuucuguaucuacgaa

SEQ ID NO: 192809 - RNA, 19 nt, Artificial Sequence
  Description of Artificial Sequence: Synthetic oligonucleotide
  Antisense strand to SEQ ID NO: 192808
uucguagauacagaaacac

SEQ ID NO: 192810 - RNA, 19 nt, Artificial Sequence
  Description of Artificial Sequence: Synthetic oligonucleotide
  Sense strand starting at position 340 of SEQ ID NO: 2485
augaguguuucuguaucua

SEQ ID NO: 192811 - RNA, 19 nt, Artificial Sequence
  Description of Artificial Sequence: Synthetic oligonucleotide
  Antisense strand to SEQ ID NO: 192810
uagauacagaaacacucau

SEQ ID NO: 192812 - RNA, 19 nt, Artificial Sequence
  Description of Artificial Sequence: Synthetic oligonucleotide
  Sense strand starting at position 338 of SEQ ID NO: 2485
ccaugaguguuucuguauc

SEQ ID NO: 192813 - RNA, 19 nt, Artificial Sequence
  Description of Artificial Sequence: Synthetic oligonucleotide
  Antisense strand to SEQ ID NO: 192812
gauacagaaacacucaugg

SEQ ID NO: 192814 - RNA, 19 nt, Artificial Sequence
  Description of Artificial Sequence: Synthetic oligonucleotide
  Sense strand starting at position 257 of SEQ ID NO: 2485
agaauuauguggcacuaau

SEQ ID NO: 192815 - RNA, 19 nt, Artificial Sequence
  Description of Artificial Sequence: Synthetic oligonucleotide
  Antisense strand to SEQ ID NO: 192814
auuagugccacauaauucu

SEQ ID NO: 192816 - RNA, 19 nt, Artificial Sequence
  Description of Artificial Sequence: Synthetic oligonucleotide
  Sense strand starting at position 255 of SEQ ID NO: 2485
caagaauuauguggcacua

SEQ ID NO: 192817 - RNA, 19 nt, Artificial Sequence
  Description of Artificial Sequence: Synthetic oligonucleotide
  Antisense strand to SEQ ID NO: 192816
uagugccacauaauucuug

SEQ ID NO: 192818 - RNA, 19 nt, Artificial Sequence
  Description of Artificial Sequence: Synthetic oligonucleotide
  Sense strand starting at position 15 of SEQ ID NO: 2485
uugcuuucccgaggcuaaa

SEQ ID NO: 192819 - RNA, 19 nt, Artificial Sequence
  Description of Artificial Sequence: Synthetic oligonucleotide
  Antisense strand to SEQ ID NO: 192818
uuuagccucgggaaagcaa

SEQ ID NO: 192820 - RNA, 19 nt, Artificial Sequence
  Description of Artificial Sequence: Synthetic oligonucleotide
  Sense strand starting at position 13 of SEQ ID NO: 2485
ucuugcuuucccgaggcua

SEQ ID NO: 192821 - RNA, 19 nt, Artificial Sequence
  Description of Artificial Sequence: Synthetic oligonucleotide
  Antisense strand to SEQ ID NO: 192820
uagccucgggaaagcaaga

SEQ ID NO: 192822 - RNA, 19 nt, Artificial Sequence
  Description of Artificial Sequence: Synthetic oligonucleotide
  Sense strand starting at position 3512 of SEQ ID NO: 2486
cucaaagcucuuuggaaac

SEQ ID NO: 192823 - RNA, 19 nt, Artificial Sequence
  Description of Artificial Sequence: Synthetic oligonucleotide
  Antisense strand to SEQ ID NO: 192822
guuuccaaagagcuuugag

SEQ ID NO: 192824 - RNA, 19 nt, Artificial Sequence
  Description of Artificial Sequence: Synthetic oligonucleotide
  Sense strand starting at position 3511 of SEQ ID NO: 2486
acucaaagcucuuuggaaa

SEQ ID NO: 192825 - RNA, 19 nt, Artificial Sequence
  Description of Artificial Sequence: Synthetic oligonucleotide
  Antisense strand to SEQ ID NO: 192824
uuuccaaagagcuuugagu

SEQ ID NO: 192826 - RNA, 19 nt, Artificial Sequence
  Description of Artificial Sequence: Synthetic oligonucleotide
  Sense strand starting at position 3465 of SEQ ID NO: 2486
aaacuauggcuuuaguaug

SEQ ID NO: 192827 - RNA, 19 nt, Artificial Sequence
  Description of Artificial Sequence: Synthetic oligonucleotide
  Antisense strand to SEQ ID NO: 192826
cauacuaaagccauaguuu

SEQ ID NO: 192828 - RNA, 19 nt, Artificial Sequence
  Description of Artificial Sequence: Synthetic oligonucleotide
  Sense strand starting at position 3398 of SEQ ID NO: 2486
gugccuuaugaacacuauu

SEQ ID NO: 192829 - RNA, 19 nt, Artificial Sequence
  Description of Artificial Sequence: Synthetic oligonucleotide
  Antisense strand to SEQ ID NO: 192828
aauaguguucauaaggcac

SEQ ID NO: 192830 - RNA, 19 nt, Artificial Sequence
  Description of Artificial Sequence: Synthetic oligonucleotide
  Sense strand starting at position 3392 of SEQ ID NO: 2486
auaugugugccuuaugaac

SEQ ID NO: 192831 - RNA, 19 nt, Artificial Sequence
  Description of Artificial Sequence: Synthetic oligonucleotide
  Antisense strand to SEQ ID NO: 192830
guucauaaggcacacauau

SEQ ID NO: 192832 - RNA, 19 nt, Artificial Sequence
  Description of Artificial Sequence: Synthetic oligonucleotide
  Sense strand starting at position 3381 of SEQ ID NO: 2486
gguugagugaaauaugugu

SEQ ID NO: 192833 - RNA, 19 nt, Artificial Sequence
  Description of Artificial Sequence: Synthetic oligonucleotide
  Antisense strand to SEQ ID NO: 192832
acacauauuucacucaacc

SEQ ID NO: 192834 - RNA, 19 nt, Artificial Sequence
  Description of Artificial Sequence: Synthetic oligonucleotide
  Sense strand starting at position 3375 of SEQ ID NO: 2486
gaauaugguugagugaaau

SEQ ID NO: 192835 - RNA, 19 nt, Artificial Sequence
  Description of Artificial Sequence: Synthetic oligonucleotide
  Antisense strand to SEQ ID NO: 192834
auuucacucaaccauauuc

SEQ ID NO: 192836 - RNA, 19 nt, Artificial Sequence
  Description of Artificial Sequence: Synthetic oligonucleotide
  Sense strand starting at position 3372 of SEQ ID NO: 2486
acugaauaugguugaguga

SEQ ID NO: 192837 - RNA, 19 nt, Artificial Sequence
  Description of Artificial Sequence: Synthetic oligonucleotide
  Antisense strand to SEQ ID NO: 192836
ucacucaaccauauucagu

SEQ ID NO: 192838 - RNA, 19 nt, Artificial Sequence
  Description of Artificial Sequence: Synthetic oligonucleotide
  Sense strand starting at position 3189 of SEQ ID NO: 2486
guaguacagauauguauau

SEQ ID NO: 192839 - RNA, 19 nt, Artificial Sequence
  Description of Artificial Sequence: Synthetic oligonucleotide
  Antisense strand to SEQ ID NO: 192838
auauacauaucuguacuac

SEQ ID NO: 192840 - RNA, 19 nt, Artificial Sequence
  Description of Artificial Sequence: Synthetic oligonucleotide
  Sense strand starting at position 3185 of SEQ ID NO: 2486
cuauguaguacagauaugu

SEQ ID NO: 192841 - RNA, 19 nt, Artificial Sequence
  Description of Artificial Sequence: Synthetic oligonucleotide
  Antisense strand to SEQ ID NO: 192840
acauaucuguacuacauag

SEQ ID NO: 192842 - RNA, 19 nt, Artificial Sequence
  Description of Artificial Sequence: Synthetic oligonucleotide
  Sense strand starting at position 3183 of SEQ ID NO: 2486
accuauguaguacagauau

SEQ ID NO: 192843 - RNA, 19 nt, Artificial Sequence
  Description of Artificial Sequence: Synthetic oligonucleotide
  Antisense strand to SEQ ID NO: 192842
auaucuguacuacauaggu

SEQ ID NO: 192844 - RNA, 19 nt, Artificial Sequence
  Description of Artificial Sequence: Synthetic oligonucleotide
  Sense strand starting at position 3006 of SEQ ID NO: 2486
acugauauguauguacaua

SEQ ID NO: 192845 - RNA, 19 nt, Artificial Sequence
  Description of Artificial Sequence: Synthetic oligonucleotide
  Antisense strand to SEQ ID NO: 192844
uauguacauacauaucagu

SEQ ID NO: 192846 - RNA, 19 nt, Artificial Sequence
  Description of Artificial Sequence: Synthetic oligonucleotide
  Sense strand starting at position 3005 of SEQ ID NO: 2486
gacugauauguauguacau

SEQ ID NO: 192847 - RNA, 19 nt, Artificial Sequence
  Description of Artificial Sequence: Synthetic oligonucleotide
  Antisense strand to SEQ ID NO: 192846
auguacauacauaucaguc

SEQ ID NO: 192848 - RNA, 19 nt, Artificial Sequence
  Description of Artificial Sequence: Synthetic oligonucleotide
  Sense strand starting at position 3002 of SEQ ID NO: 2486
guagacugauauguaugua

SEQ ID NO: 192849 - RNA, 19 nt, Artificial Sequence
  Description of Artificial Sequence: Synthetic oligonucleotide
  Antisense strand to SEQ ID NO: 192848
uacauacauaucagucuac

SEQ ID NO: 192850 - RNA, 19 nt, Artificial Sequence
  Description of Artificial Sequence: Synthetic oligonucleotide
  Sense strand starting at position 2840 of SEQ ID NO: 2486
gcagaauuacugugaggau

SEQ ID NO: 192851 - RNA, 19 nt, Artificial Sequence
  Description of Artificial Sequence: Synthetic oligonucleotide
  Antisense strand to SEQ ID NO: 192850
auccucacaguaauucugc

SEQ ID NO: 192852 - RNA, 19 nt, Artificial Sequence
  Description of Artificial Sequence: Synthetic oligonucleotide
  Sense strand starting at position 2678 of SEQ ID NO: 2486
aggcuaaugaaauacguaa

SEQ ID NO: 192853 - RNA, 19 nt, Artificial Sequence
  Description of Artificial Sequence: Synthetic oligonucleotide
  Antisense strand to SEQ ID NO: 192852
uuacguauuucauuagccu

SEQ ID NO: 192854 - RNA, 19 nt, Artificial Sequence
  Description of Artificial Sequence: Synthetic oligonucleotide
  Sense strand starting at position 2583 of SEQ ID NO: 2486
gccugacacguguucguca

SEQ ID NO: 192855 - RNA, 19 nt, Artificial Sequence
  Description of Artificial Sequence: Synthetic oligonucleotide
  Antisense strand to SEQ ID NO: 192854
ugacgaacacgugucaggc

SEQ ID NO: 192856 - RNA, 19 nt, Artificial Sequence
  Description of Artificial Sequence: Synthetic oligonucleotide
  Sense strand starting at position 2575 of SEQ ID NO: 2486
cuaauuaagccugacacgu

SEQ ID NO: 192857 - RNA, 19 nt, Artificial Sequence
  Description of Artificial Sequence: Synthetic oligonucleotide
  Antisense strand to SEQ ID NO: 192856
acgugucaggcuuaauuag

SEQ ID NO: 192858 - RNA, 19 nt, Artificial Sequence
  Description of Artificial Sequence: Synthetic oligonucleotide
  Sense strand starting at position 2477 of SEQ ID NO: 2486
cuccuuaucggagaagcua

SEQ ID NO: 192859 - RNA, 19 nt, Artificial Sequence
  Description of Artificial Sequence: Synthetic oligonucleotide
  Antisense strand to SEQ ID NO: 192858
uagcuucuccgauaaggag

SEQ ID NO: 192860 - RNA, 19 nt, Artificial Sequence
  Description of Artificial Sequence: Synthetic oligonucleotide
  Sense strand starting at position 2472 of SEQ ID NO: 2486
ccaaucuccuuaucggaga

SEQ ID NO: 192861 - RNA, 19 nt, Artificial Sequence
  Description of Artificial Sequence: Synthetic oligonucleotide
  Antisense strand to SEQ ID NO: 192860
ucuccgauaaggagauugg

SEQ ID NO: 192862 - RNA, 19 nt, Artificial Sequence
  Description of Artificial Sequence: Synthetic oligonucleotide
  Sense strand starting at position 2470 of SEQ ID NO: 2486
acccaaucuccuuaucgga

SEQ ID NO: 192863 - RNA, 19 nt, Artificial Sequence
  Description of Artificial Sequence: Synthetic oligonucleotide
  Antisense strand to SEQ ID NO: 192862
uccgauaaggagauugggu

SEQ ID NO: 192864 - RNA, 19 nt, Artificial Sequence
  Description of Artificial Sequence: Synthetic oligonucleotide
  Sense strand starting at position 2345 of SEQ ID NO: 2486
uugaguugguaauccuuga

SEQ ID NO: 192865 - RNA, 19 nt, Artificial Sequence
  Description of Artificial Sequence: Synthetic oligonucleotide
  Antisense strand to SEQ ID NO: 192864
ucaaggauuaccaacucaa

SEQ ID NO: 192866 - RNA, 19 nt, Artificial Sequence
  Description of Artificial Sequence: Synthetic oligonucleotide
  Sense strand starting at position 2279 of SEQ ID NO: 2486
guagaaucuguauagccaa

SEQ ID NO: 192867 - RNA, 19 nt, Artificial Sequence
  Description of Artificial Sequence: Synthetic oligonucleotide
  Antisense strand to SEQ ID NO: 192866
uuggcuauacagauucuac

SEQ ID NO: 192868 - RNA, 19 nt, Artificial Sequence
  Description of Artificial Sequence: Synthetic oligonucleotide
  Sense strand starting at position 2148 of SEQ ID NO: 2486
gcgcguagacucagagaaa

SEQ ID NO: 192869 - RNA, 19 nt, Artificial Sequence
  Description of Artificial Sequence: Synthetic oligonucleotide
  Antisense strand to SEQ ID NO: 192868
uuucucugagucuacgcgc

SEQ ID NO: 192870 - RNA, 19 nt, Artificial Sequence
  Description of Artificial Sequence: Synthetic oligonucleotide
  Sense strand starting at position 2118 of SEQ ID NO: 2486
uggcaugcugggaguugua

SEQ ID NO: 192871 - RNA, 19 nt, Artificial Sequence
  Description of Artificial Sequence: Synthetic oligonucleotide
  Antisense strand to SEQ ID NO: 192870
uacaacucccagcaugcca

SEQ ID NO: 192872 - RNA, 19 nt, Artificial Sequence
  Description of Artificial Sequence: Synthetic oligonucleotide
  Sense strand starting at position 2023 of SEQ ID NO: 2486
gguuucuugggauaauucu

SEQ ID NO: 192873 - RNA, 19 nt, Artificial Sequence
  Description of Artificial Sequence: Synthetic oligonucleotide
  Antisense strand to SEQ ID NO: 192872
agaauuaucccaagaaacc

SEQ ID NO: 192874 - RNA, 19 nt, Artificial Sequence
  Description of Artificial Sequence: Synthetic oligonucleotide
  Sense strand starting at position 2017 of SEQ ID NO: 2486
aggauugguuucuugggau

SEQ ID NO: 192875 - RNA, 19 nt, Artificial Sequence
  Description of Artificial Sequence: Synthetic oligonucleotide
  Antisense strand to SEQ ID NO: 192874
aucccaagaaaccaauccu

SEQ ID NO: 192876 - RNA, 19 nt, Artificial Sequence
  Description of Artificial Sequence: Synthetic oligonucleotide
  Sense strand starting at position 2004 of SEQ ID NO: 2486
gcccuacuacuccaggauu

SEQ ID NO: 192877 - RNA, 19 nt, Artificial Sequence
  Description of Artificial Sequence: Synthetic oligonucleotide
  Antisense strand to SEQ ID NO: 192876
aauccuggaguaguagggc

SEQ ID NO: 192878 - RNA, 19 nt, Artificial Sequence
  Description of Artificial Sequence: Synthetic oligonucleotide
  Sense strand starting at position 1392 of SEQ ID NO: 2486
ggguaauuguacagggaag

SEQ ID NO: 192879 - RNA, 19 nt, Artificial Sequence
  Description of Artificial Sequence: Synthetic oligonucleotide
  Antisense strand to SEQ ID NO: 192878
cuucccuguacaauuaccc

SEQ ID NO: 192880 - RNA, 19 nt, Artificial Sequence
  Description of Artificial Sequence: Synthetic oligonucleotide
  Sense strand starting at position 1248 of SEQ ID NO: 2486
ggugaagcgccuagguuaa

SEQ ID NO: 192881 - RNA, 19 nt, Artificial Sequence
  Description of Artificial Sequence: Synthetic oligonucleotide
  Antisense strand to SEQ ID NO: 192880
uuaaccuaggcgcuucacc

SEQ ID NO: 192882 - RNA, 19 nt, Artificial Sequence
  Description of Artificial Sequence: Synthetic oligonucleotide
  Sense strand starting at position 979 of SEQ ID NO: 2486
gaccuaagguuugcaggau

SEQ ID NO: 192883 - RNA, 19 nt, Artificial Sequence
  Description of Artificial Sequence: Synthetic oligonucleotide
  Antisense strand to SEQ ID NO: 192882
auccugcaaaccuuagguc

SEQ ID NO: 192884 - RNA, 19 nt, Artificial Sequence
  Description of Artificial Sequence: Synthetic oligonucleotide
  Sense strand starting at position 923 of SEQ ID NO: 2486
gauguaucucccugaugaa

SEQ ID NO: 192885 - RNA, 19 nt, Artificial Sequence
  Description of Artificial Sequence: Synthetic oligonucleotide
  Antisense strand to SEQ ID NO: 192884
uucaucagggagauacauc

SEQ ID NO: 192886 - RNA, 19 nt, Artificial Sequence
  Description of Artificial Sequence: Synthetic oligonucleotide
  Sense strand starting at position 922 of SEQ ID NO: 2486
agauguaucucccugauga

SEQ ID NO: 192887 - RNA, 19 nt, Artificial Sequence
  Description of Artificial Sequence: Synthetic oligonucleotide
  Antisense strand to SEQ ID NO: 192886
ucaucagggagauacaucu

SEQ ID NO: 192888 - RNA, 19 nt, Artificial Sequence
  Description of Artificial Sequence: Synthetic oligonucleotide
  Sense strand starting at position 920 of SEQ ID NO: 2486
acagauguaucucccugau

SEQ ID NO: 192889 - RNA, 19 nt, Artificial Sequence
  Description of Artificial Sequence: Synthetic oligonucleotide
  Antisense strand to SEQ ID NO: 192888
aucagggagauacaucugu

SEQ ID NO: 192890 - RNA, 19 nt, Artificial Sequence
  Description of Artificial Sequence: Synthetic oligonucleotide
  Sense strand starting at position 526 of SEQ ID NO: 2486
auugucauacaaugcagaa

SEQ ID NO: 192891 - RNA, 19 nt, Artificial Sequence
  Description of Artificial Sequence: Synthetic oligonucleotide
  Antisense strand to SEQ ID NO: 192890
uucugcauuguaugacaau

SEQ ID NO: 192892 - RNA, 19 nt, Artificial Sequence
  Description of Artificial Sequence: Synthetic oligonucleotide
  Sense strand starting at position 511 of SEQ ID NO: 2486
ccgugaacuccagaaauug

SEQ ID NO: 192893 - RNA, 19 nt, Artificial Sequence
  Description of Artificial Sequence: Synthetic oligonucleotide
  Antisense strand to SEQ ID NO: 192892
caauuucuggaguucacgg

SEQ ID NO: 192894 - RNA, 19 nt, Artificial Sequence
  Description of Artificial Sequence: Synthetic oligonucleotide
  Sense strand starting at position 487 of SEQ ID NO: 2486
ugugauacaguguacugaa

SEQ ID NO: 192895 - RNA, 19 nt, Artificial Sequence
  Description of Artificial Sequence: Synthetic oligonucleotide
  Antisense strand to SEQ ID NO: 192894
uucaguacacuguaucaca

SEQ ID NO: 192896 - RNA, 19 nt, Artificial Sequence
  Description of Artificial Sequence: Synthetic oligonucleotide
  Sense strand starting at position 459 of SEQ ID NO: 2486
gauuuaggauuaugauuac

SEQ ID NO: 192897 - RNA, 19 nt, Artificial Sequence
  Description of Artificial Sequence: Synthetic oligonucleotide
  Antisense strand to SEQ ID NO: 192896
guaaucauaauccuaaauc

SEQ ID NO: 192898 - RNA, 19 nt, Artificial Sequence
  Description of Artificial Sequence: Synthetic oligonucleotide
  Sense strand starting at position 433 of SEQ ID NO: 2486
augcuaggucaauguaaga

SEQ ID NO: 192899 - RNA, 19 nt, Artificial Sequence
  Description of Artificial Sequence: Synthetic oligonucleotide
  Antisense strand to SEQ ID NO: 192898
ucuuacauugaccuagcau

SEQ ID NO: 192900 - RNA, 19 nt, Artificial Sequence
  Description of Artificial Sequence: Synthetic oligonucleotide
  Sense strand starting at position 375 of SEQ ID NO: 2486
cgaaacugcuauucugaga

SEQ ID NO: 192901 - RNA, 19 nt, Artificial Sequence
  Description of Artificial Sequence: Synthetic oligonucleotide
  Antisense strand to SEQ ID NO: 192900
ucucagaauagcaguuucg

SEQ ID NO: 192902 - RNA, 19 nt, Artificial Sequence
  Description of Artificial Sequence: Synthetic oligonucleotide
  Sense strand starting at position 29 of SEQ ID NO: 2488
augugccuuccagagauau

SEQ ID NO: 192903 - RNA, 19 nt, Artificial Sequence
  Description of Artificial Sequence: Synthetic oligonucleotide
  Antisense strand to SEQ ID NO: 192902
auaucucuggaaggcacau

SEQ ID NO: 192904 - RNA, 19 nt, Artificial Sequence
  Description of Artificial Sequence: Synthetic oligonucleotide
  Sense strand starting at position 31 of SEQ ID NO: 2488
gugccuuccagagauaugu

SEQ ID NO: 192905 - RNA, 19 nt, Artificial Sequence
  Description of Artificial Sequence: Synthetic oligonucleotide
  Antisense strand to SEQ ID NO: 192904
acauaucucuggaaggcac

SEQ ID NO: 192906 - RNA, 19 nt, Artificial Sequence
  Description of Artificial Sequence: Synthetic oligonucleotide
  Sense strand starting at position 339 of SEQ ID NO: 2488
acaccaacuucuccgagua

SEQ ID NO: 192907 - RNA, 19 nt, Artificial Sequence
  Description of Artificial Sequence: Synthetic oligonucleotide
  Antisense strand to SEQ ID NO: 192906
uacucggagaaguuggugu

SEQ ID NO: 192908 - RNA, 19 nt, Artificial Sequence
  Description of Artificial Sequence: Synthetic oligonucleotide
  Sense strand starting at position 344 of SEQ ID NO: 2488
aacuucuccgaguaguaug

SEQ ID NO: 192909 - RNA, 19 nt, Artificial Sequence
  Description of Artificial Sequence: Synthetic oligonucleotide
  Antisense strand to SEQ ID NO: 192908
cauacuacucggagaaguu

SEQ ID NO: 192910 - RNA, 19 nt, Artificial Sequence
  Description of Artificial Sequence: Synthetic oligonucleotide
  Sense strand starting at position 349 of SEQ ID NO: 2488
cuccgaguaguauguggaa

SEQ ID NO: 192911 - RNA, 19 nt, Artificial Sequence
  Description of Artificial Sequence: Synthetic oligonucleotide
  Antisense strand to SEQ ID NO: 192910
uuccacauacuacucggag

SEQ ID NO: 192912 - RNA, 19 nt, Artificial Sequence
  Description of Artificial Sequence: Synthetic oligonucleotide
  Sense strand starting at position 604 of SEQ ID NO: 2488
ugggaagucuccuccucuu

SEQ ID NO: 192913 - RNA, 19 nt, Artificial Sequence
  Description of Artificial Sequence: Synthetic oligonucleotide
  Antisense strand to SEQ ID NO: 192912
aagaggaggagacuuccca

SEQ ID NO: 192914 - RNA, 19 nt, Artificial Sequence
  Description of Artificial Sequence: Synthetic oligonucleotide
  Sense strand starting at position 644 of SEQ ID NO: 2488
ggagcccuguucccucaaa

SEQ ID NO: 192915 - RNA, 19 nt, Artificial Sequence
  Description of Artificial Sequence: Synthetic oligonucleotide
  Antisense strand to SEQ ID NO: 192914
uuugagggaacagggcucc

SEQ ID NO: 192916 - RNA, 19 nt, Artificial Sequence
  Description of Artificial Sequence: Synthetic oligonucleotide
  Sense strand starting at position 751 of SEQ ID NO: 2488
agagguugccuccaucaaa

SEQ ID NO: 192917 - RNA, 19 nt, Artificial Sequence
  Description of Artificial Sequence: Synthetic oligonucleotide
  Antisense strand to SEQ ID NO: 192916
uuugauggaggcaaccucu

SEQ ID NO: 192918 - RNA, 19 nt, Artificial Sequence
  Description of Artificial Sequence: Synthetic oligonucleotide
  Sense strand starting at position 754 of SEQ ID NO: 2488
gguugccuccaucaaacua

SEQ ID NO: 192919 - RNA, 19 nt, Artificial Sequence
  Description of Artificial Sequence: Synthetic oligonucleotide
  Antisense strand to SEQ ID NO: 192918
uaguuugauggaggcaacc

SEQ ID NO: 192920 - RNA, 19 nt, Artificial Sequence
  Description of Artificial Sequence: Synthetic oligonucleotide
  Sense strand starting at position 1477 of SEQ ID NO: 2488
guuuccucaucagugaacu

SEQ ID NO: 192921 - RNA, 19 nt, Artificial Sequence
  Description of Artificial Sequence: Synthetic oligonucleotide
  Antisense strand to SEQ ID NO: 192920
aguucacugaugaggaaac

SEQ ID NO: 192922 - RNA, 19 nt, Artificial Sequence
  Description of Artificial Sequence: Synthetic oligonucleotide
  Sense strand starting at position 1545 of SEQ ID NO: 2488
cccguccuucuaugauaca

SEQ ID NO: 192923 - RNA, 19 nt, Artificial Sequence
  Description of Artificial Sequence: Synthetic oligonucleotide
  Antisense strand to SEQ ID NO: 192922
uguaucauagaaggacggg

SEQ ID NO: 192924 - RNA, 19 nt, Artificial Sequence
  Description of Artificial Sequence: Synthetic oligonucleotide
  Sense strand starting at position 1555 of SEQ ID NO: 2488
uaugauacaggguguugaa

SEQ ID NO: 192925 - RNA, 19 nt, Artificial Sequence
  Description of Artificial Sequence: Synthetic oligonucleotide
  Antisense strand to SEQ ID NO: 192924
uucaacacccuguaucaua

SEQ ID NO: 192926 - RNA, 19 nt, Artificial Sequence
  Description of Artificial Sequence: Synthetic oligonucleotide
  Sense strand starting at position 1910 of SEQ ID NO: 2488
gugaguggagcggacuaau

SEQ ID NO: 192927 - RNA, 19 nt, Artificial Sequence
  Description of Artificial Sequence: Synthetic oligonucleotide
  Antisense strand to SEQ ID NO: 192926
auuaguccgcuccacucac

SEQ ID NO: 192928 - RNA, 19 nt, Artificial Sequence
  Description of Artificial Sequence: Synthetic oligonucleotide
  Sense strand starting at position 1922 of SEQ ID NO: 2488
gacuaaucccaauggcagu

SEQ ID NO: 192929 - RNA, 19 nt, Artificial Sequence
  Description of Artificial Sequence: Synthetic oligonucleotide
  Antisense strand to SEQ ID NO: 192928
acugccauugggauuaguc

SEQ ID NO: 192930 - RNA, 19 nt, Artificial Sequence
  Description of Artificial Sequence: Synthetic oligonucleotide
  Sense strand starting at position 2340 of SEQ ID NO: 2488
gaccaaagguuugagggaa

SEQ ID NO: 192931 - RNA, 19 nt, Artificial Sequence
  Description of Artificial Sequence: Synthetic oligonucleotide
  Antisense strand to SEQ ID NO: 192930
uucccucaaaccuuugguc

SEQ ID NO: 192932 - RNA, 19 nt, Artificial Sequence
  Description of Artificial Sequence: Synthetic oligonucleotide
  Sense strand starting at position 2714 of SEQ ID NO: 2488
gucacuugagacggucaua

SEQ ID NO: 192933 - RNA, 19 nt, Artificial Sequence
  Description of Artificial Sequence: Synthetic oligonucleotide
  Antisense strand to SEQ ID NO: 192932
uaugaccgucucaagugac

SEQ ID NO: 192934 - RNA, 19 nt, Artificial Sequence
  Description of Artificial Sequence: Synthetic oligonucleotide
  Sense strand starting at position 2717 of SEQ ID NO: 2488
acuugagacggucauauug

SEQ ID NO: 192935 - RNA, 19 nt, Artificial Sequence
  Description of Artificial Sequence: Synthetic oligonucleotide
  Antisense strand to SEQ ID NO: 192934
caauaugaccgucucaagu

SEQ ID NO: 192936 - RNA, 19 nt, Artificial Sequence
  Description of Artificial Sequence: Synthetic oligonucleotide
  Sense strand starting at position 2724 of SEQ ID NO: 2488
acggucauauugcuacaua

SEQ ID NO: 192937 - RNA, 19 nt, Artificial Sequence
  Description of Artificial Sequence: Synthetic oligonucleotide
  Antisense strand to SEQ ID NO: 192936
uauguagcaauaugaccgu

SEQ ID NO: 192938 - RNA, 19 nt, Artificial Sequence
  Description of Artificial Sequence: Synthetic oligonucleotide
  Sense strand starting at position 2727 of SEQ ID NO: 2488
gucauauugcuacauagca

SEQ ID NO: 192939 - RNA, 19 nt, Artificial Sequence
  Description of Artificial Sequence: Synthetic oligonucleotide
  Antisense strand to SEQ ID NO: 192938
ugcuauguagcaauaugac

SEQ ID NO: 192940 - RNA, 19 nt, Artificial Sequence
  Description of Artificial Sequence: Synthetic oligonucleotide
  Sense strand starting at position 2990 of SEQ ID NO: 2488
auauguucuccugggugau

SEQ ID NO: 192941 - RNA, 19 nt, Artificial Sequence
  Description of Artificial Sequence: Synthetic oligonucleotide
  Antisense strand to SEQ ID NO: 192940
aucacccaggagaacauau

SEQ ID NO: 192942 - RNA, 19 nt, Artificial Sequence
  Description of Artificial Sequence: Synthetic oligonucleotide
  Sense strand starting at position 2991 of SEQ ID NO: 2488
uauguucuccugggugauc

SEQ ID NO: 192943 - RNA, 19 nt, Artificial Sequence
  Description of Artificial Sequence: Synthetic oligonucleotide
  Antisense strand to SEQ ID NO: 192942
gaucacccaggagaacaua

SEQ ID NO: 192944 - RNA, 19 nt, Artificial Sequence
  Description of Artificial Sequence: Synthetic oligonucleotide
  Sense strand starting at position 2993 of SEQ ID NO: 2488
uguucuccugggugaucua

SEQ ID NO: 192945 - RNA, 19 nt, Artificial Sequence
  Description of Artificial Sequence: Synthetic oligonucleotide
  Antisense strand to SEQ ID NO: 192944
uagaucacccaggagaaca

SEQ ID NO: 192946 - RNA, 19 nt, Artificial Sequence
  Description of Artificial Sequence: Synthetic oligonucleotide
  Sense strand starting at position 2994 of SEQ ID NO: 2488
guucuccugggugaucuaa

SEQ ID NO: 192947 - RNA, 19 nt, Artificial Sequence
  Description of Artificial Sequence: Synthetic oligonucleotide
  Antisense strand to SEQ ID NO: 192946
uuagaucacccaggagaac

SEQ ID NO: 192948 - RNA, 19 nt, Artificial Sequence
  Description of Artificial Sequence: Synthetic oligonucleotide
  Sense strand starting at position 2996 of SEQ ID NO: 2488
ucuccugggugaucuaauu

SEQ ID NO: 192949 - RNA, 19 nt, Artificial Sequence
  Description of Artificial Sequence: Synthetic oligonucleotide
  Antisense strand to SEQ ID NO: 192948
aauuagaucacccaggaga

SEQ ID NO: 192950 - RNA, 19 nt, Artificial Sequence
  Description of Artificial Sequence: Synthetic oligonucleotide
  Sense strand starting at position 3004 of SEQ ID NO: 2488
gugaucuaauuaguuccau

SEQ ID NO: 192951 - RNA, 19 nt, Artificial Sequence
  Description of Artificial Sequence: Synthetic oligonucleotide
  Antisense strand to SEQ ID NO: 192950
auggaacuaauuagaucac

SEQ ID NO: 192952 - RNA, 19 nt, Artificial Sequence
  Description of Artificial Sequence: Synthetic oligonucleotide
  Sense strand starting at position 3093 of SEQ ID NO: 2488
ugacuuacauguguuaacu

SEQ ID NO: 192953 - RNA, 19 nt, Artificial Sequence
  Description of Artificial Sequence: Synthetic oligonucleotide
  Antisense strand to SEQ ID NO: 192952
aguuaacacauguaaguca

SEQ ID NO: 192954 - RNA, 19 nt, Artificial Sequence
  Description of Artificial Sequence: Synthetic oligonucleotide
  Sense strand starting at position 3102 of SEQ ID NO: 2488
uguguuaacugagcuaaca

SEQ ID NO: 192955 - RNA, 19 nt, Artificial Sequence
  Description of Artificial Sequence: Synthetic oligonucleotide
  Antisense strand to SEQ ID NO: 192954
uguuagcucaguuaacaca

SEQ ID NO: 192956 - RNA, 19 nt, Artificial Sequence
  Description of Artificial Sequence: Synthetic oligonucleotide
  Sense strand starting at position 3111 of SEQ ID NO: 2488
ugagcuaacacguguaaag

SEQ ID NO: 192957 - RNA, 19 nt, Artificial Sequence
  Description of Artificial Sequence: Synthetic oligonucleotide
  Antisense strand to SEQ ID NO: 192956
cuuuacacguguuagcuca

SEQ ID NO: 192958 - RNA, 19 nt, Artificial Sequence
  Description of Artificial Sequence: Synthetic oligonucleotide
  Sense strand starting at position 3113 of SEQ ID NO: 2488
agcuaacacguguaaagaa

SEQ ID NO: 192959 - RNA, 19 nt, Artificial Sequence
  Description of Artificial Sequence: Synthetic oligonucleotide
  Antisense strand to SEQ ID NO: 192958
uucuuuacacguguuagcu

SEQ ID NO: 192960 - RNA, 19 nt, Artificial Sequence
  Description of Artificial Sequence: Synthetic oligonucleotide
  Sense strand starting at position 3120 of SEQ ID NO: 2488
acguguaaagaauguagga

SEQ ID NO: 192961 - RNA, 19 nt, Artificial Sequence
  Description of Artificial Sequence: Synthetic oligonucleotide
  Antisense strand to SEQ ID NO: 192960
uccuacauucuuuacacgu

SEQ ID NO: 192962 - RNA, 19 nt, Artificial Sequence
  Description of Artificial Sequence: Synthetic oligonucleotide
  Sense strand starting at position 3164 of SEQ ID NO: 2488
gacacaugauagcugauau

SEQ ID NO: 192963 - RNA, 19 nt, Artificial Sequence
  Description of Artificial Sequence: Synthetic oligonucleotide
  Antisense strand to SEQ ID NO: 192962
auaucagcuaucauguguc

SEQ ID NO: 192964 - RNA, 19 nt, Artificial Sequence
  Description of Artificial Sequence: Synthetic oligonucleotide
  Sense strand starting at position 3239 of SEQ ID NO: 2488
gccaguaaacuaugucauc

SEQ ID NO: 192965 - RNA, 19 nt, Artificial Sequence
  Description of Artificial Sequence: Synthetic oligonucleotide
  Antisense strand to SEQ ID NO: 192964
gaugacauaguuuacuggc

SEQ ID NO: 192966 - RNA, 19 nt, Artificial Sequence
  Description of Artificial Sequence: Synthetic oligonucleotide
  Sense strand starting at position 3240 of SEQ ID NO: 2488
ccaguaaacuaugucauca

SEQ ID NO: 192967 - RNA, 19 nt, Artificial Sequence
  Description of Artificial Sequence: Synthetic oligonucleotide
  Antisense strand to SEQ ID NO: 192966
ugaugacauaguuuacugg

SEQ ID NO: 192968 - RNA, 19 nt, Artificial Sequence
  Description of Artificial Sequence: Synthetic oligonucleotide
  Sense strand starting at position 3282 of SEQ ID NO: 2488
gggaaucagccuugauucu

SEQ ID NO: 192969 - RNA, 19 nt, Artificial Sequence
  Description of Artificial Sequence: Synthetic oligonucleotide
  Antisense strand to SEQ ID NO: 192968
agaaucaaggcugauuccc

SEQ ID NO: 192970 - RNA, 19 nt, Artificial Sequence
  Description of Artificial Sequence: Synthetic oligonucleotide
  Sense strand starting at position 3283 of SEQ ID NO: 2488
ggaaucagccuugauucuu

SEQ ID NO: 192971 - RNA, 19 nt, Artificial Sequence
  Description of Artificial Sequence: Synthetic oligonucleotide
  Antisense strand to SEQ ID NO: 192970
aagaaucaaggcugauucc

SEQ ID NO: 192972 - RNA, 19 nt, Artificial Sequence
  Description of Artificial Sequence: Synthetic oligonucleotide
  Sense strand starting at position 3570 of SEQ ID NO: 2488
ggagaauccuuuccuugcu

SEQ ID NO: 192973 - RNA, 19 nt, Artificial Sequence
  Description of Artificial Sequence: Synthetic oligonucleotide
  Antisense strand to SEQ ID NO: 192972
agcaaggaaaggauucucc

SEQ ID NO: 192974 - RNA, 19 nt, Artificial Sequence
  Description of Artificial Sequence: Synthetic oligonucleotide
  Sense strand starting at position 3703 of SEQ ID NO: 2488
uuacaaggaugcuugugaa

SEQ ID NO: 192975 - RNA, 19 nt, Artificial Sequence
  Description of Artificial Sequence: Synthetic oligonucleotide
  Antisense strand to SEQ ID NO: 192974
uucacaagcauccuuguaa

SEQ ID NO: 192976 - RNA, 19 nt, Artificial Sequence
  Description of Artificial Sequence: Synthetic oligonucleotide
  Sense strand starting at position 3710 of SEQ ID NO: 2488
gaugcuugugaaugcauuu

SEQ ID NO: 192977 - RNA, 19 nt, Artificial Sequence
  Description of Artificial Sequence: Synthetic oligonucleotide
  Antisense strand to SEQ ID NO: 192976
aaaugcauucacaagcauc

SEQ ID NO: 192978 - RNA, 19 nt, Artificial Sequence
  Description of Artificial Sequence: Synthetic oligonucleotide
  Sense strand starting at position 3787 of SEQ ID NO: 2488
ucuguaaaguauuugccau

SEQ ID NO: 192979 - RNA, 19 nt, Artificial Sequence
  Description of Artificial Sequence: Synthetic oligonucleotide
  Antisense strand to SEQ ID NO: 192978
auggcaaauacuuuacaga

SEQ ID NO: 192980 - RNA, 19 nt, Artificial Sequence
  Description of Artificial Sequence: Synthetic oligonucleotide
  Sense strand starting at position 3898 of SEQ ID NO: 2488
agaugugccugcccaacau

SEQ ID NO: 192981 - RNA, 19 nt, Artificial Sequence
  Description of Artificial Sequence: Synthetic oligonucleotide
  Antisense strand to SEQ ID NO: 192980
auguugggcaggcacaucu

SEQ ID NO: 192982 - RNA, 19 nt, Artificial Sequence
  Description of Artificial Sequence: Synthetic oligonucleotide
  Sense strand starting at position 149 of SEQ ID NO: 2487
acaccaacuucuccgagua

SEQ ID NO: 192983 - RNA, 19 nt, Artificial Sequence
  Description of Artificial Sequence: Synthetic oligonucleotide
  Antisense strand to SEQ ID NO: 192982
uacucggagaaguuggugu

SEQ ID NO: 192984 - RNA, 19 nt, Artificial Sequence
  Description of Artificial Sequence: Synthetic oligonucleotide
  Sense strand starting at position 154 of SEQ ID NO: 2487
aacuucuccgaguaguaug

SEQ ID NO: 192985 - RNA, 19 nt, Artificial Sequence
  Description of Artificial Sequence: Synthetic oligonucleotide
  Antisense strand to SEQ ID NO: 192984
cauacuacucggagaaguu

SEQ ID NO: 192986 - RNA, 19 nt, Artificial Sequence
  Description of Artificial Sequence: Synthetic oligonucleotide
  Sense strand starting at position 159 of SEQ ID NO: 2487
cuccgaguaguauguggaa

SEQ ID NO: 192987 - RNA, 19 nt, Artificial Sequence
  Description of Artificial Sequence: Synthetic oligonucleotide
  Antisense strand to SEQ ID NO: 192986
uuccacauacuacucggag

SEQ ID NO: 192988 - RNA, 19 nt, Artificial Sequence
  Description of Artificial Sequence: Synthetic oligonucleotide
  Sense strand starting at position 414 of SEQ ID NO: 2487
ugggaagucuccuccucuu

SEQ ID NO: 192989 - RNA, 19 nt, Artificial Sequence
  Description of Artificial Sequence: Synthetic oligonucleotide
  Antisense strand to SEQ ID NO: 192988
aagaggaggagacuuccca

SEQ ID NO: 192990 - RNA, 19 nt, Artificial Sequence
  Description of Artificial Sequence: Synthetic oligonucleotide
  Sense strand starting at position 454 of SEQ ID NO: 2487
ggagcccuguucccucaaa

SEQ ID NO: 192991 - RNA, 19 nt, Artificial Sequence
  Description of Artificial Sequence: Synthetic oligonucleotide
  Antisense strand to SEQ ID NO: 192990
uuugagggaacagggcucc

SEQ ID NO: 192992 - RNA, 19 nt, Artificial Sequence
  Description of Artificial Sequence: Synthetic oligonucleotide
  Sense strand starting at position 561 of SEQ ID NO: 2487
agagguugccuccaucaaa

SEQ ID NO: 192993 - RNA, 19 nt, Artificial Sequence
  Description of Artificial Sequence: Synthetic oligonucleotide
  Antisense strand to SEQ ID NO: 192992
uuugauggaggcaaccucu

SEQ ID NO: 192994 - RNA, 19 nt, Artificial Sequence
  Description of Artificial Sequence: Synthetic oligonucleotide
  Sense strand starting at position 564 of SEQ ID NO: 2487
gguugccuccaucaaacua

SEQ ID NO: 192995 - RNA, 19 nt, Artificial Sequence
  Description of Artificial Sequence: Synthetic oligonucleotide
  Antisense strand to SEQ ID NO: 192994
uaguuugauggaggcaacc

SEQ ID NO: 192996 - RNA, 19 nt, Artificial Sequence
  Description of Artificial Sequence: Synthetic oligonucleotide
  Sense strand starting at position 835 of SEQ ID NO: 2487
ccgcuauucgcugagacca

SEQ ID NO: 192997 - RNA, 19 nt, Artificial Sequence
  Description of Artificial Sequence: Synthetic oligonucleotide
  Antisense strand to SEQ ID NO: 192996
uggucucagcgaauagcgg

SEQ ID NO: 192998 - RNA, 19 nt, Artificial Sequence
  Description of Artificial Sequence: Synthetic oligonucleotide
  Sense strand starting at position 1287 of SEQ ID NO: 2487
guuuccucaucagugaacu

SEQ ID NO: 192999 - RNA, 19 nt, Artificial Sequence
  Description of Artificial Sequence: Synthetic oligonucleotide
  Antisense strand to SEQ ID NO: 192998
aguucacugaugaggaaac

SEQ ID NO: 193000 - RNA, 19 nt, Artificial Sequence
  Description of Artificial Sequence: Synthetic oligonucleotide
  Sense strand starting at position 1355 of SEQ ID NO: 2487
cccguccuucuaugauaca

SEQ ID NO: 193001 - RNA, 19 nt, Artificial Sequence
  Description of Artificial Sequence: Synthetic oligonucleotide
  Antisense strand to SEQ ID NO: 193000
uguaucauagaaggacggg

SEQ ID NO: 193002 - RNA, 19 nt, Artificial Sequence
  Description of Artificial Sequence: Synthetic oligonucleotide
  Sense strand starting at position 1365 of SEQ ID NO: 2487
uaugauacaggguguugaa

SEQ ID NO: 193003 - RNA, 19 nt, Artificial Sequence
  Description of Artificial Sequence: Synthetic oligonucleotide
  Antisense strand to SEQ ID NO: 193002
uucaacacccuguaucaua

SEQ ID NO: 193004 - RNA, 19 nt, Artificial Sequence
  Description of Artificial Sequence: Synthetic oligonucleotide
  Sense strand starting at position 1720 of SEQ ID NO: 2487
gugaguggagcggacuaau

SEQ ID NO: 193005 - RNA, 19 nt, Artificial Sequence
  Description of Artificial Sequence: Synthetic oligonucleotide
  Antisense strand to SEQ ID NO: 193004
auuaguccgcuccacucac

SEQ ID NO: 193006 - RNA, 19 nt, Artificial Sequence
  Description of Artificial Sequence: Synthetic oligonucleotide
  Sense strand starting at position 1732 of SEQ ID NO: 2487
gacuaaucccaauggcagu

SEQ ID NO: 193007 - RNA, 19 nt, Artificial Sequence
  Description of Artificial Sequence: Synthetic oligonucleotide
  Antisense strand to SEQ ID NO: 193006
acugccauugggauuaguc

SEQ ID NO: 193008 - RNA, 19 nt, Artificial Sequence
  Description of Artificial Sequence: Synthetic oligonucleotide
  Sense strand starting at position 2150 of SEQ ID NO: 2487
gaccaaagguuugagggaa

SEQ ID NO: 193009 - RNA, 19 nt, Artificial Sequence
  Description of Artificial Sequence: Synthetic oligonucleotide
  Antisense strand to SEQ ID NO: 193008
uucccucaaaccuuugguc

SEQ ID NO: 193010 - RNA, 19 nt, Artificial Sequence
  Description of Artificial Sequence: Synthetic oligonucleotide
  Sense strand starting at position 2524 of SEQ ID NO: 2487
gucacuugagacggucaua

SEQ ID NO: 193011 - RNA, 19 nt, Artificial Sequence
  Description of Artificial Sequence: Synthetic oligonucleotide
  Antisense strand to SEQ ID NO: 193010
uaugaccgucucaagugac

SEQ ID NO: 193012 - RNA, 19 nt, Artificial Sequence
  Description of Artificial Sequence: Synthetic oligonucleotide
  Sense strand starting at position 2527 of SEQ ID NO: 2487
acuugagacggucauauug

SEQ ID NO: 193013 - RNA, 19 nt, Artificial Sequence
  Description of Artificial Sequence: Synthetic oligonucleotide
  Antisense strand to SEQ ID NO: 193012
caauaugaccgucucaagu

SEQ ID NO: 193014 - RNA, 19 nt, Artificial Sequence
  Description of Artificial Sequence: Synthetic oligonucleotide
  Sense strand starting at position 2534 of SEQ ID NO: 2487
acggucauauugcuacaua

SEQ ID NO: 193015 - RNA, 19 nt, Artificial Sequence
  Description of Artificial Sequence: Synthetic oligonucleotide
  Antisense strand to SEQ ID NO: 193014
uauguagcaauaugaccgu

SEQ ID NO: 193016 - RNA, 19 nt, Artificial Sequence
  Description of Artificial Sequence: Synthetic oligonucleotide
  Sense strand starting at position 2537 of SEQ ID NO: 2487
gucauauugcuacauagca

SEQ ID NO: 193017 - RNA, 19 nt, Artificial Sequence
  Description of Artificial Sequence: Synthetic oligonucleotide
  Antisense strand to SEQ ID NO: 193016
ugcuauguagcaauaugac

SEQ ID NO: 193018 - RNA, 19 nt, Artificial Sequence
  Description of Artificial Sequence: Synthetic oligonucleotide
  Sense strand starting at position 2800 of SEQ ID NO: 2487
auauguucuccugggugau

SEQ ID NO: 193019 - RNA, 19 nt, Artificial Sequence
  Description of Artificial Sequence: Synthetic oligonucleotide
  Antisense strand to SEQ ID NO: 193018
aucacccaggagaacauau

SEQ ID NO: 193020 - RNA, 19 nt, Artificial Sequence
  Description of Artificial Sequence: Synthetic oligonucleotide
  Sense strand starting at position 2801 of SEQ ID NO: 2487
uauguucuccugggugauc

SEQ ID NO: 193021 - RNA, 19 nt, Artificial Sequence
  Description of Artificial Sequence: Synthetic oligonucleotide
  Antisense strand to SEQ ID NO: 193020
gaucacccaggagaacaua

SEQ ID NO: 193022 - RNA, 19 nt, Artificial Sequence
  Description of Artificial Sequence: Synthetic oligonucleotide
  Sense strand starting at position 2803 of SEQ ID NO: 2487
uguucuccugggugaucua

SEQ ID NO: 193023 - RNA, 19 nt, Artificial Sequence
  Description of Artificial Sequence: Synthetic oligonucleotide
  Antisense strand to SEQ ID NO: 193022
uagaucacccaggagaaca

SEQ ID NO: 193024 - RNA, 19 nt, Artificial Sequence
  Description of Artificial Sequence: Synthetic oligonucleotide
  Sense strand starting at position 2804 of SEQ ID NO: 2487
guucuccugggugaucuaa

SEQ ID NO: 193025 - RNA, 19 nt, Artificial Sequence
  Description of Artificial Sequence: Synthetic oligonucleotide
  Antisense strand to SEQ ID NO: 193024
uuagaucacccaggagaac

SEQ ID NO: 193026 - RNA, 19 nt, Artificial Sequence
  Description of Artificial Sequence: Synthetic oligonucleotide
  Sense strand starting at position 2806 of SEQ ID NO: 2487
ucuccugggugaucuaauu

SEQ ID NO: 193027 - RNA, 19 nt, Artificial Sequence
  Description of Artificial Sequence: Synthetic oligonucleotide
  Antisense strand to SEQ ID NO: 193026
aauuagaucacccaggaga

SEQ ID NO: 193028 - RNA, 19 nt, Artificial Sequence
  Description of Artificial Sequence: Synthetic oligonucleotide
  Sense strand starting at position 2814 of SEQ ID NO: 2487
gugaucuaauuaguuccau

SEQ ID NO: 193029 - RNA, 19 nt, Artificial Sequence
  Description of Artificial Sequence: Synthetic oligonucleotide
  Antisense strand to SEQ ID NO: 193028
auggaacuaauuagaucac

SEQ ID NO: 193030 - RNA, 19 nt, Artificial Sequence
  Description of Artificial Sequence: Synthetic oligonucleotide
  Sense strand starting at position 2903 of SEQ ID NO: 2487
ugacuuacauguguuaacu

SEQ ID NO: 193031 - RNA, 19 nt, Artificial Sequence
  Description of Artificial Sequence: Synthetic oligonucleotide
  Antisense strand to SEQ ID NO: 193030
aguuaacacauguaaguca

SEQ ID NO: 193032 - RNA, 19 nt, Artificial Sequence
  Description of Artificial Sequence: Synthetic oligonucleotide
  Sense strand starting at position 2912 of SEQ ID NO: 2487
uguguuaacugagcuaaca

SEQ ID NO: 193033 - RNA, 19 nt, Artificial Sequence
  Description of Artificial Sequence: Synthetic oligonucleotide
  Antisense strand to SEQ ID NO: 193032
uguuagcucaguuaacaca

SEQ ID NO: 193034 - RNA, 19 nt, Artificial Sequence
  Description of Artificial Sequence: Synthetic oligonucleotide
  Sense strand starting at position 2921 of SEQ ID NO: 2487
ugagcuaacacguguaaag

SEQ ID NO: 193035 - RNA, 19 nt, Artificial Sequence
  Description of Artificial Sequence: Synthetic oligonucleotide
  Antisense strand to SEQ ID NO: 193034
cuuuacacguguuagcuca

SEQ ID NO: 193036 - RNA, 19 nt, Artificial Sequence
  Description of Artificial Sequence: Synthetic oligonucleotide
  Sense strand starting at position 2923 of SEQ ID NO: 2487
agcuaacacguguaaagaa

SEQ ID NO: 193037 - RNA, 19 nt, Artificial Sequence
  Description of Artificial Sequence: Synthetic oligonucleotide
  Antisense strand to SEQ ID NO: 193036
uucuuuacacguguuagcu

SEQ ID NO: 193038 - RNA, 19 nt, Artificial Sequence
  Description of Artificial Sequence: Synthetic oligonucleotide
  Sense strand starting at position 2930 of SEQ ID NO: 2487
acguguaaagaauguagga

SEQ ID NO: 193039 - RNA, 19 nt, Artificial Sequence
  Description of Artificial Sequence: Synthetic oligonucleotide
  Antisense strand to SEQ ID NO: 193038
uccuacauucuuuacacgu

SEQ ID NO: 193040 - RNA, 19 nt, Artificial Sequence
  Description of Artificial Sequence: Synthetic oligonucleotide
  Sense strand starting at position 2974 of SEQ ID NO: 2487
gacacaugauagcugauau

SEQ ID NO: 193041 - RNA, 19 nt, Artificial Sequence
  Description of Artificial Sequence: Synthetic oligonucleotide
  Antisense strand to SEQ ID NO: 193040
auaucagcuaucauguguc

SEQ ID NO: 193042 - RNA, 19 nt, Artificial Sequence
  Description of Artificial Sequence: Synthetic oligonucleotide
  Sense strand starting at position 3049 of SEQ ID NO: 2487
gccaguaaacuaugucauc

SEQ ID NO: 193043 - RNA, 19 nt, Artificial Sequence
  Description of Artificial Sequence: Synthetic oligonucleotide
  Antisense strand to SEQ ID NO: 193042
gaugacauaguuuacuggc

SEQ ID NO: 193044 - RNA, 19 nt, Artificial Sequence
  Description of Artificial Sequence: Synthetic oligonucleotide
  Sense strand starting at position 3050 of SEQ ID NO: 2487
ccaguaaacuaugucauca

SEQ ID NO: 193045 - RNA, 19 nt, Artificial Sequence
  Description of Artificial Sequence: Synthetic oligonucleotide
  Antisense strand to SEQ ID NO: 193044
ugaugacauaguuuacugg

SEQ ID NO: 193046 - RNA, 19 nt, Artificial Sequence
  Description of Artificial Sequence: Synthetic oligonucleotide
  Sense strand starting at position 3092 of SEQ ID NO: 2487
gggaaucagccuugauucu

SEQ ID NO: 193047 - RNA, 19 nt, Artificial Sequence
  Description of Artificial Sequence: Synthetic oligonucleotide
  Antisense strand to SEQ ID NO: 193046
agaaucaaggcugauuccc

SEQ ID NO: 193048 - RNA, 19 nt, Artificial Sequence
  Description of Artificial Sequence: Synthetic oligonucleotide
  Sense strand starting at position 3093 of SEQ ID NO: 2487
ggaaucagccuugauucuu

SEQ ID NO: 193049 - RNA, 19 nt, Artificial Sequence
  Description of Artificial Sequence: Synthetic oligonucleotide
  Antisense strand to SEQ ID NO: 193048
aagaaucaaggcugauucc

SEQ ID NO: 193050 - RNA, 19 nt, Artificial Sequence
  Description of Artificial Sequence: Synthetic oligonucleotide
  Sense strand starting at position 3380 of SEQ ID NO: 2487
ggagaauccuuuccuugcu

SEQ ID NO: 193051 - RNA, 19 nt, Artificial Sequence
  Description of Artificial Sequence: Synthetic oligonucleotide
  Antisense strand to SEQ ID NO: 193050
agcaaggaaaggauucucc

SEQ ID NO: 193052 - RNA, 19 nt, Artificial Sequence
  Description of Artificial Sequence: Synthetic oligonucleotide
  Sense strand starting at position 3513 of SEQ ID NO: 2487
uuacaaggaugcuugugaa

SEQ ID NO: 193053 - RNA, 19 nt, Artificial Sequence
  Description of Artificial Sequence: Synthetic oligonucleotide
  Antisense strand to SEQ ID NO: 193052
uucacaagcauccuuguaa

SEQ ID NO: 193054 - RNA, 19 nt, Artificial Sequence
  Description of Artificial Sequence: Synthetic oligonucleotide
  Sense strand starting at position 3520 of SEQ ID NO: 2487
gaugcuugugaaugcauuu

SEQ ID NO: 193055 - RNA, 19 nt, Artificial Sequence
  Description of Artificial Sequence: Synthetic oligonucleotide
  Antisense strand to SEQ ID NO: 193054
aaaugcauucacaagcauc

SEQ ID NO: 193056 - RNA, 19 nt, Artificial Sequence
  Description of Artificial Sequence: Synthetic oligonucleotide
  Sense strand starting at position 3597 of SEQ ID NO: 2487
ucuguaaaguauuugccau

SEQ ID NO: 193057 - RNA, 19 nt, Artificial Sequence
  Description of Artificial Sequence: Synthetic oligonucleotide
  Antisense strand to SEQ ID NO: 193056
auggcaaauacuuuacaga

SEQ ID NO: 193058 - RNA, 19 nt, Artificial Sequence
  Description of Artificial Sequence: Synthetic oligonucleotide
  Sense strand starting at position 3618 of SEQ ID NO: 2487
aaaguaaucggcugcacac

SEQ ID NO: 193059 - RNA, 19 nt, Artificial Sequence
  Description of Artificial Sequence: Synthetic oligonucleotide
  Antisense strand to SEQ ID NO: 193058
gugugcagccgauuacuuu

SEQ ID NO: 193060 - RNA, 19 nt, Artificial Sequence
  Description of Artificial Sequence: Synthetic oligonucleotide
  Sense strand starting at position 3708 of SEQ ID NO: 2487
agaugugccugcccaacau

SEQ ID NO: 193061 - RNA, 19 nt, Artificial Sequence
  Description of Artificial Sequence: Synthetic oligonucleotide
  Antisense strand to SEQ ID NO: 193060
auguugggcaggcacaucu

SEQ ID NO: 193062 - RNA, 19 nt, Artificial Sequence
  Description of Artificial Sequence: Synthetic oligonucleotide
  Sense strand starting at position 560 of SEQ ID NO: 2489
ugauaauguuguguuugga

SEQ ID NO: 193063 - RNA, 19 nt, Artificial Sequence
  Description of Artificial Sequence: Synthetic oligonucleotide
  Antisense strand to SEQ ID NO: 193062
uccaaacacaacauuauca

SEQ ID NO: 193064 - RNA, 19 nt, Artificial Sequence
  Description of Artificial Sequence: Synthetic oligonucleotide
  Sense strand starting at position 563 of SEQ ID NO: 2489
uaauguuguguuuggagag

SEQ ID NO: 193065 - RNA, 19 nt, Artificial Sequence
  Description of Artificial Sequence: Synthetic oligonucleotide
  Antisense strand to SEQ ID NO: 193064
cucuccaaacacaacauua

SEQ ID NO: 193066 - RNA, 19 nt, Artificial Sequence
  Description of Artificial Sequence: Synthetic oligonucleotide
  Sense strand starting at position 564 of SEQ ID NO: 2489
aauguuguguuuggagaga

SEQ ID NO: 193067 - RNA, 19 nt, Artificial Sequence
  Description of Artificial Sequence: Synthetic oligonucleotide
  Antisense strand to SEQ ID NO: 193066
ucucuccaaacacaacauu

SEQ ID NO: 193068 - RNA, 19 nt, Artificial Sequence
  Description of Artificial Sequence: Synthetic oligonucleotide
  Sense strand starting at position 587 of SEQ ID NO: 2489
guuagcauuugggaaugua

SEQ ID NO: 193069 - RNA, 19 nt, Artificial Sequence
  Description of Artificial Sequence: Synthetic oligonucleotide
  Antisense strand to SEQ ID NO: 193068
uacauucccaaaugcuaac

SEQ ID NO: 193070 - RNA, 19 nt, Artificial Sequence
  Description of Artificial Sequence: Synthetic oligonucleotide
  Sense strand starting at position 677 of SEQ ID NO: 2489
ugagguccugcuugccaua

SEQ ID NO: 193071 - RNA, 19 nt, Artificial Sequence
  Description of Artificial Sequence: Synthetic oligonucleotide
  Antisense strand to SEQ ID NO: 193070
uauggcaagcaggaccuca

SEQ ID NO: 193072 - RNA, 19 nt, Artificial Sequence
  Description of Artificial Sequence: Synthetic oligonucleotide
  Sense strand starting at position 728 of SEQ ID NO: 2489
uguggaguguuagaauacu

SEQ ID NO: 193073 - RNA, 19 nt, Artificial Sequence
  Description of Artificial Sequence: Synthetic oligonucleotide
  Antisense strand to SEQ ID NO: 193072
aguauucuaacacuccaca

SEQ ID NO: 193074 - RNA, 19 nt, Artificial Sequence
  Description of Artificial Sequence: Synthetic oligonucleotide
  Sense strand starting at position 734 of SEQ ID NO: 2489
guguuagaauacuuaaaug

SEQ ID NO: 193075 - RNA, 19 nt, Artificial Sequence
  Description of Artificial Sequence: Synthetic oligonucleotide
  Antisense strand to SEQ ID NO: 193074
cauuuaaguauucuaacac

SEQ ID NO: 193076 - RNA, 19 nt, Artificial Sequence
  Description of Artificial Sequence: Synthetic oligonucleotide
  Sense strand starting at position 742 of SEQ ID NO: 2489
auacuuaaauggcagacaa

SEQ ID NO: 193077 - RNA, 19 nt, Artificial Sequence
  Description of Artificial Sequence: Synthetic oligonucleotide
  Antisense strand to SEQ ID NO: 193076
uugucugccauuuaaguau

SEQ ID NO: 193078 - RNA, 19 nt, Artificial Sequence
  Description of Artificial Sequence: Synthetic oligonucleotide
  Sense strand starting at position 774 of SEQ ID NO: 2489
cuuugauguccugggauuc

SEQ ID NO: 193079 - RNA, 19 nt, Artificial Sequence
  Description of Artificial Sequence: Synthetic oligonucleotide
  Antisense strand to SEQ ID NO: 193078
gaaucccaggacaucaaag

SEQ ID NO: 193080 - RNA, 19 nt, Artificial Sequence
  Description of Artificial Sequence: Synthetic oligonucleotide
  Sense strand starting at position 775 of SEQ ID NO: 2489
uuugauguccugggauucu

SEQ ID NO: 193081 - RNA, 19 nt, Artificial Sequence
  Description of Artificial Sequence: Synthetic oligonucleotide
  Antisense strand to SEQ ID NO: 193080
agaaucccaggacaucaaa

SEQ ID NO: 193082 - RNA, 19 nt, Artificial Sequence
  Description of Artificial Sequence: Synthetic oligonucleotide
  Sense strand starting at position 806 of SEQ ID NO: 2489
cuagcuaacuuagaugaau

SEQ ID NO: 193083 - RNA, 19 nt, Artificial Sequence
  Description of Artificial Sequence: Synthetic oligonucleotide
  Antisense strand to SEQ ID NO: 193082
auucaucuaaguuagcuag

SEQ ID NO: 193084 - RNA, 19 nt, Artificial Sequence
  Description of Artificial Sequence: Synthetic oligonucleotide
  Sense strand starting at position 951 of SEQ ID NO: 2489
auggcaaccgaucaauuau

SEQ ID NO: 193085 - RNA, 19 nt, Artificial Sequence
  Description of Artificial Sequence: Synthetic oligonucleotide
  Antisense strand to SEQ ID NO: 193084
auaauugaucgguugccau

SEQ ID NO: 193086 - RNA, 19 nt, Artificial Sequence
  Description of Artificial Sequence: Synthetic oligonucleotide
  Sense strand starting at position 1056 of SEQ ID NO: 2489
aaaucacuguuugcuggaa

SEQ ID NO: 193087 - RNA, 19 nt, Artificial Sequence
  Description of Artificial Sequence: Synthetic oligonucleotide
  Antisense strand to SEQ ID NO: 193086
uuccagcaaacagugauuu

SEQ ID NO: 193088 - RNA, 19 nt, Artificial Sequence
  Description of Artificial Sequence: Synthetic oligonucleotide
  Sense strand starting at position 1219 of SEQ ID NO: 2489
uggugaaaucuccguuucu

SEQ ID NO: 193089 - RNA, 19 nt, Artificial Sequence
  Description of Artificial Sequence: Synthetic oligonucleotide
  Antisense strand to SEQ ID NO: 193088
agaaacggagauuucacca

SEQ ID NO: 193090 - RNA, 19 nt, Artificial Sequence
  Description of Artificial Sequence: Synthetic oligonucleotide
  Sense strand starting at position 1220 of SEQ ID NO: 2489
ggugaaaucuccguuucua

SEQ ID NO: 193091 - RNA, 19 nt, Artificial Sequence
  Description of Artificial Sequence: Synthetic oligonucleotide
  Antisense strand to SEQ ID NO: 193090
uagaaacggagauuucacc

SEQ ID NO: 193092 - RNA, 19 nt, Artificial Sequence
  Description of Artificial Sequence: Synthetic oligonucleotide
  Sense strand starting at position 1838 of SEQ ID NO: 2489
gcguccucccuauaaaucu

SEQ ID NO: 193093 - RNA, 19 nt, Artificial Sequence
  Description of Artificial Sequence: Synthetic oligonucleotide
  Antisense strand to SEQ ID NO: 193092
agauuuauagggaggacgc

SEQ ID NO: 193094 - RNA, 19 nt, Artificial Sequence
  Description of Artificial Sequence: Synthetic oligonucleotide
  Sense strand starting at position 2847 of SEQ ID NO: 2489
agucauucuuugguucuua

SEQ ID NO: 193095 - RNA, 19 nt, Artificial Sequence
  Description of Artificial Sequence: Synthetic oligonucleotide
  Antisense strand to SEQ ID NO: 193094
uaagaaccaaagaaugacu

SEQ ID NO: 193096 - RNA, 19 nt, Artificial Sequence
  Description of Artificial Sequence: Synthetic oligonucleotide
  Sense strand starting at position 2848 of SEQ ID NO: 2489
gucauucuuugguucuuaa

SEQ ID NO: 193097 - RNA, 19 nt, Artificial Sequence
  Description of Artificial Sequence: Synthetic oligonucleotide
  Antisense strand to SEQ ID NO: 193096
uuaagaaccaaagaaugac

SEQ ID NO: 193098 - RNA, 19 nt, Artificial Sequence
  Description of Artificial Sequence: Synthetic oligonucleotide
  Sense strand starting at position 2857 of SEQ ID NO: 2489
ugguucuuaacagggcaaa

SEQ ID NO: 193099 - RNA, 19 nt, Artificial Sequence
  Description of Artificial Sequence: Synthetic oligonucleotide
  Antisense strand to SEQ ID NO: 193098
uuugcccuguuaagaacca

SEQ ID NO: 193100 - RNA, 19 nt, Artificial Sequence
  Description of Artificial Sequence: Synthetic oligonucleotide
  Sense strand starting at position 2971 of SEQ ID NO: 2489
accagugguugcuacuaau

SEQ ID NO: 193101 - RNA, 19 nt, Artificial Sequence
  Description of Artificial Sequence: Synthetic oligonucleotide
  Antisense strand to SEQ ID NO: 193100
auuaguagcaaccacuggu

SEQ ID NO: 193102 - RNA, 19 nt, Artificial Sequence
  Description of Artificial Sequence: Synthetic oligonucleotide
  Sense strand starting at position 3057 of SEQ ID NO: 2489
ggccuuggugaacaucauu

SEQ ID NO: 193103 - RNA, 19 nt, Artificial Sequence
  Description of Artificial Sequence: Synthetic oligonucleotide
  Antisense strand to SEQ ID NO: 193102
aaugauguucaccaaggcc

SEQ ID NO: 193104 - RNA, 19 nt, Artificial Sequence
  Description of Artificial Sequence: Synthetic oligonucleotide
  Sense strand starting at position 3192 of SEQ ID NO: 2489
augaauagcucagaauauu

SEQ ID NO: 193105 - RNA, 19 nt, Artificial Sequence
  Description of Artificial Sequence: Synthetic oligonucleotide
  Antisense strand to SEQ ID NO: 193104
aauauucugagcuauucau

SEQ ID NO: 193106 - RNA, 19 nt, Artificial Sequence
  Description of Artificial Sequence: Synthetic oligonucleotide
  Sense strand starting at position 3215 of SEQ ID NO: 2489
gucauuugaugguaucaug

SEQ ID NO: 193107 - RNA, 19 nt, Artificial Sequence
  Description of Artificial Sequence: Synthetic oligonucleotide
  Antisense strand to SEQ ID NO: 193106
caugauaccaucaaaugac

SEQ ID NO: 193108 - RNA, 19 nt, Artificial Sequence
  Description of Artificial Sequence: Synthetic oligonucleotide
  Sense strand starting at position 3222 of SEQ ID NO: 2489
gaugguaucaugggugagu

SEQ ID NO: 193109 - RNA, 19 nt, Artificial Sequence
  Description of Artificial Sequence: Synthetic oligonucleotide
  Antisense strand to SEQ ID NO: 193108
acucacccaugauaccauc

SEQ ID NO: 193110 - RNA, 19 nt, Artificial Sequence
  Description of Artificial Sequence: Synthetic oligonucleotide
  Sense strand starting at position 3224 of SEQ ID NO: 2489
ugguaucaugggugagugu

SEQ ID NO: 193111 - RNA, 19 nt, Artificial Sequence
  Description of Artificial Sequence: Synthetic oligonucleotide
  Antisense strand to SEQ ID NO: 193110
acacucacccaugauacca

SEQ ID NO: 193112 - RNA, 19 nt, Artificial Sequence
  Description of Artificial Sequence: Synthetic oligonucleotide
  Sense strand starting at position 3226 of SEQ ID NO: 2489
guaucaugggugagugugu

SEQ ID NO: 193113 - RNA, 19 nt, Artificial Sequence
  Description of Artificial Sequence: Synthetic oligonucleotide
  Antisense strand to SEQ ID NO: 193112
acacacucacccaugauac

SEQ ID NO: 193114 - RNA, 19 nt, Artificial Sequence
  Description of Artificial Sequence: Synthetic oligonucleotide
  Sense strand starting at position 3233 of SEQ ID NO: 2489
gggugagugugucucacuu

SEQ ID NO: 193115 - RNA, 19 nt, Artificial Sequence
  Description of Artificial Sequence: Synthetic oligonucleotide
  Antisense strand to SEQ ID NO: 193114
aagugagacacacucaccc

SEQ ID NO: 193116 - RNA, 19 nt, Artificial Sequence
  Description of Artificial Sequence: Synthetic oligonucleotide
  Sense strand starting at position 3271 of SEQ ID NO: 2489
cuguuauucugagauucua

SEQ ID NO: 193117 - RNA, 19 nt, Artificial Sequence
  Description of Artificial Sequence: Synthetic oligonucleotide
  Antisense strand to SEQ ID NO: 193116
uagaaucucagaauaacag

SEQ ID NO: 193118 - RNA, 19 nt, Artificial Sequence
  Description of Artificial Sequence: Synthetic oligonucleotide
  Sense strand starting at position 3279 of SEQ ID NO: 2489
cugagauucuaaguuagga

SEQ ID NO: 193119 - RNA, 19 nt, Artificial Sequence
  Description of Artificial Sequence: Synthetic oligonucleotide
  Antisense strand to SEQ ID NO: 193118
uccuaacuuagaaucucag

SEQ ID NO: 193120 - RNA, 19 nt, Artificial Sequence
  Description of Artificial Sequence: Synthetic oligonucleotide
  Sense strand starting at position 3283 of SEQ ID NO: 2489
gauucuaaguuaggauuua

SEQ ID NO: 193121 - RNA, 19 nt, Artificial Sequence
  Description of Artificial Sequence: Synthetic oligonucleotide
  Antisense strand to SEQ ID NO: 193120
uaaauccuaacuuagaauc

SEQ ID NO: 193122 - RNA, 19 nt, Artificial Sequence
  Description of Artificial Sequence: Synthetic oligonucleotide
  Sense strand starting at position 3363 of SEQ ID NO: 2489
cauguaaagcucugugagu

SEQ ID NO: 193123 - RNA, 19 nt, Artificial Sequence
  Description of Artificial Sequence: Synthetic oligonucleotide
  Antisense strand to SEQ ID NO: 193122
acucacagagcuuuacaug

SEQ ID NO: 193124 - RNA, 19 nt, Artificial Sequence
  Description of Artificial Sequence: Synthetic oligonucleotide
  Sense strand starting at position 3364 of SEQ ID NO: 2489
auguaaagcucugugaguu

SEQ ID NO: 193125 - RNA, 19 nt, Artificial Sequence
  Description of Artificial Sequence: Synthetic oligonucleotide
  Antisense strand to SEQ ID NO: 193124
aacucacagagcuuuacau

SEQ ID NO: 193126 - RNA, 19 nt, Artificial Sequence
  Description of Artificial Sequence: Synthetic oligonucleotide
  Sense strand starting at position 3365 of SEQ ID NO: 2489
uguaaagcucugugaguua

SEQ ID NO: 193127 - RNA, 19 nt, Artificial Sequence
  Description of Artificial Sequence: Synthetic oligonucleotide
  Antisense strand to SEQ ID NO: 193126
uaacucacagagcuuuaca

SEQ ID NO: 193128 - RNA, 19 nt, Artificial Sequence
  Description of Artificial Sequence: Synthetic oligonucleotide
  Sense strand starting at position 3368 of SEQ ID NO: 2489
aaagcucugugaguuauua

SEQ ID NO: 193129 - RNA, 19 nt, Artificial Sequence
  Description of Artificial Sequence: Synthetic oligonucleotide
  Antisense strand to SEQ ID NO: 193128
uaauaacucacagagcuuu

SEQ ID NO: 193130 - RNA, 19 nt, Artificial Sequence
  Description of Artificial Sequence: Synthetic oligonucleotide
  Sense strand starting at position 3372 of SEQ ID NO: 2489
cucugugaguuauuacaaa

SEQ ID NO: 193131 - RNA, 19 nt, Artificial Sequence
  Description of Artificial Sequence: Synthetic oligonucleotide
  Antisense strand to SEQ ID NO: 193130
uuuguaauaacucacagag

SEQ ID NO: 193132 - RNA, 19 nt, Artificial Sequence
  Description of Artificial Sequence: Synthetic oligonucleotide
  Sense strand starting at position 3397 of SEQ ID NO: 2489
acaguuguauaaccaagaa

SEQ ID NO: 193133 - RNA, 19 nt, Artificial Sequence
  Description of Artificial Sequence: Synthetic oligonucleotide
  Antisense strand to SEQ ID NO: 193132
uucuugguuauacaacugu

SEQ ID NO: 193134 - RNA, 19 nt, Artificial Sequence
  Description of Artificial Sequence: Synthetic oligonucleotide
  Sense strand starting at position 3473 of SEQ ID NO: 2489
cccagugguaaguaagauu

SEQ ID NO: 193135 - RNA, 19 nt, Artificial Sequence
  Description of Artificial Sequence: Synthetic oligonucleotide
  Antisense strand to SEQ ID NO: 193134
aaucuuacuuaccacuggg

SEQ ID NO: 193136 - RNA, 19 nt, Artificial Sequence
  Description of Artificial Sequence: Synthetic oligonucleotide
  Sense strand starting at position 3476 of SEQ ID NO: 2489
agugguaaguaagauuauu

SEQ ID NO: 193137 - RNA, 19 nt, Artificial Sequence
  Description of Artificial Sequence: Synthetic oligonucleotide
  Antisense strand to SEQ ID NO: 193136
aauaaucuuacuuaccacu

SEQ ID NO: 193138 - RNA, 19 nt, Artificial Sequence
  Description of Artificial Sequence: Synthetic oligonucleotide
  Sense strand starting at position 3606 of SEQ ID NO: 2489
cccggaaucgagcgauucu

SEQ ID NO: 193139 - RNA, 19 nt, Artificial Sequence
  Description of Artificial Sequence: Synthetic oligonucleotide
  Antisense strand to SEQ ID NO: 193138
agaaucgcucgauuccggg

SEQ ID NO: 193140 - RNA, 19 nt, Artificial Sequence
  Description of Artificial Sequence: Synthetic oligonucleotide
  Sense strand starting at position 3898 of SEQ ID NO: 2489
aacugaguaguugggacua

SEQ ID NO: 193141 - RNA, 19 nt, Artificial Sequence
  Description of Artificial Sequence: Synthetic oligonucleotide
  Antisense strand to SEQ ID NO: 193140
uagucccaacuacucaguu

SEQ ID NO: 193142 - RNA, 19 nt, Artificial Sequence
  Description of Artificial Sequence: Synthetic oligonucleotide
  Sense strand starting at position 220 of SEQ ID NO: 2490
aauguagauucugaggaaa

SEQ ID NO: 193143 - RNA, 19 nt, Artificial Sequence
  Description of Artificial Sequence: Synthetic oligonucleotide
  Antisense strand to SEQ ID NO: 193142
uuuccucagaaucuacauu

SEQ ID NO: 193144 - RNA, 19 nt, Artificial Sequence
  Description of Artificial Sequence: Synthetic oligonucleotide
  Sense strand starting at position 282 of SEQ ID NO: 2490
cuccaugagccuuagucau

SEQ ID NO: 193145 - RNA, 19 nt, Artificial Sequence
  Description of Artificial Sequence: Synthetic oligonucleotide
  Antisense strand to SEQ ID NO: 193144
augacuaaggcucauggag

SEQ ID NO: 193146 - RNA, 19 nt, Artificial Sequence
  Description of Artificial Sequence: Synthetic oligonucleotide
  Sense strand starting at position 290 of SEQ ID NO: 2490
gccuuagucaugcugcuga

SEQ ID NO: 193147 - RNA, 19 nt, Artificial Sequence
  Description of Artificial Sequence: Synthetic oligonucleotide
  Antisense strand to SEQ ID NO: 193146
ucagcagcaugacuaaggc

SEQ ID NO: 193148 - RNA, 19 nt, Artificial Sequence
  Description of Artificial Sequence: Synthetic oligonucleotide
  Sense strand starting at position 356 of SEQ ID NO: 2490
gguucuucugucugacuag

SEQ ID NO: 193149 - RNA, 19 nt, Artificial Sequence
  Description of Artificial Sequence: Synthetic oligonucleotide
  Antisense strand to SEQ ID NO: 193148
cuagucagacagaagaacc

SEQ ID NO: 193150 - RNA, 19 nt, Artificial Sequence
  Description of Artificial Sequence: Synthetic oligonucleotide
  Sense strand starting at position 387 of SEQ ID NO: 2490
ccucuaucccaguaguucu

SEQ ID NO: 193151 - RNA, 19 nt, Artificial Sequence
  Description of Artificial Sequence: Synthetic oligonucleotide
  Antisense strand to SEQ ID NO: 193150
agaacuacugggauagagg

SEQ ID NO: 193152 - RNA, 19 nt, Artificial Sequence
  Description of Artificial Sequence: Synthetic oligonucleotide
  Sense strand starting at position 421 of SEQ ID NO: 2490
uguuccuuuguguaaugua

SEQ ID NO: 193153 - RNA, 19 nt, Artificial Sequence
  Description of Artificial Sequence: Synthetic oligonucleotide
  Antisense strand to SEQ ID NO: 193152
uacauuacacaaaggaaca

SEQ ID NO: 193154 - RNA, 19 nt, Artificial Sequence
  Description of Artificial Sequence: Synthetic oligonucleotide
  Sense strand starting at position 597 of SEQ ID NO: 2490
cggccaauauguucuaacu

SEQ ID NO: 193155 - RNA, 19 nt, Artificial Sequence
  Description of Artificial Sequence: Synthetic oligonucleotide
  Antisense strand to SEQ ID NO: 193154
aguuagaacauauuggccg

SEQ ID NO: 193156 - RNA, 19 nt, Artificial Sequence
  Description of Artificial Sequence: Synthetic oligonucleotide
  Sense strand starting at position 833 of SEQ ID NO: 2490
gaccaugagccuugcauac

SEQ ID NO: 193157 - RNA, 19 nt, Artificial Sequence
  Description of Artificial Sequence: Synthetic oligonucleotide
  Antisense strand to SEQ ID NO: 193156
guaugcaaggcucaugguc

SEQ ID NO: 193158 - RNA, 19 nt, Artificial Sequence
  Description of Artificial Sequence: Synthetic oligonucleotide
  Sense strand starting at position 853 of SEQ ID NO: 2490
ccugccuggccauauaagu

SEQ ID NO: 193159 - RNA, 19 nt, Artificial Sequence
  Description of Artificial Sequence: Synthetic oligonucleotide
  Antisense strand to SEQ ID NO: 193158
acuuauauggccaggcagg

SEQ ID NO: 193160 - RNA, 19 nt, Artificial Sequence
  Description of Artificial Sequence: Synthetic oligonucleotide
  Sense strand starting at position 859 of SEQ ID NO: 2490
uggccauauaaguggcauu

SEQ ID NO: 193161 - RNA, 19 nt, Artificial Sequence
  Description of Artificial Sequence: Synthetic oligonucleotide
  Antisense strand to SEQ ID NO: 193160
aaugccacuuauauggcca

SEQ ID NO: 193162 - RNA, 19 nt, Artificial Sequence
  Description of Artificial Sequence: Synthetic oligonucleotide
  Sense strand starting at position 1104 of SEQ ID NO: 2490
acauuuaacucgcuagcca

SEQ ID NO: 193163 - RNA, 19 nt, Artificial Sequence
  Description of Artificial Sequence: Synthetic oligonucleotide
  Antisense strand to SEQ ID NO: 193162
uggcuagcgaguuaaaugu

SEQ ID NO: 193164 - RNA, 19 nt, Artificial Sequence
  Description of Artificial Sequence: Synthetic oligonucleotide
  Sense strand starting at position 1112 of SEQ ID NO: 2490
cucgcuagccauuauccaa

SEQ ID NO: 193165 - RNA, 19 nt, Artificial Sequence
  Description of Artificial Sequence: Synthetic oligonucleotide
  Antisense strand to SEQ ID NO: 193164
uuggauaauggcuagcgag

SEQ ID NO: 193166 - RNA, 19 nt, Artificial Sequence
  Description of Artificial Sequence: Synthetic oligonucleotide
  Sense strand starting at position 1194 of SEQ ID NO: 2490
ggugucauccuacagguua

SEQ ID NO: 193167 - RNA, 19 nt, Artificial Sequence
  Description of Artificial Sequence: Synthetic oligonucleotide
  Antisense strand to SEQ ID NO: 193166
uaaccuguaggaugacacc

SEQ ID NO: 193168 - RNA, 19 nt, Artificial Sequence
  Description of Artificial Sequence: Synthetic oligonucleotide
  Sense strand starting at position 1383 of SEQ ID NO: 2490
uagucaguucccgaugcau

SEQ ID NO: 193169 - RNA, 19 nt, Artificial Sequence
  Description of Artificial Sequence: Synthetic oligonucleotide
  Antisense strand to SEQ ID NO: 193168
augcaucgggaacugacua

SEQ ID NO: 193170 - RNA, 19 nt, Artificial Sequence
  Description of Artificial Sequence: Synthetic oligonucleotide
  Sense strand starting at position 1395 of SEQ ID NO: 2490
gaugcauggccauaaugua

SEQ ID NO: 193171 - RNA, 19 nt, Artificial Sequence
  Description of Artificial Sequence: Synthetic oligonucleotide
  Antisense strand to SEQ ID NO: 193170
uacauuauggccaugcauc

SEQ ID NO: 193172 - RNA, 19 nt, Artificial Sequence
  Description of Artificial Sequence: Synthetic oligonucleotide
  Sense strand starting at position 1411 of SEQ ID NO: 2490
guacauuggccauaaggua

SEQ ID NO: 193173 - RNA, 19 nt, Artificial Sequence
  Description of Artificial Sequence: Synthetic oligonucleotide
  Antisense strand to SEQ ID NO: 193172
uaccuuauggccaauguac

SEQ ID NO: 193174 - RNA, 19 nt, Artificial Sequence
  Description of Artificial Sequence: Synthetic oligonucleotide
  Sense strand starting at position 1588 of SEQ ID NO: 2490
ggacacgugugguuggaau

SEQ ID NO: 193175 - RNA, 19 nt, Artificial Sequence
  Description of Artificial Sequence: Synthetic oligonucleotide
  Antisense strand to SEQ ID NO: 193174
auuccaaccacacgugucc

SEQ ID NO: 193176 - RNA, 19 nt, Artificial Sequence
  Description of Artificial Sequence: Synthetic oligonucleotide
  Sense strand starting at position 1671 of SEQ ID NO: 2490
cguccuuauugugucauuu

SEQ ID NO: 193177 - RNA, 19 nt, Artificial Sequence
  Description of Artificial Sequence: Synthetic oligonucleotide
  Antisense strand to SEQ ID NO: 193176
aaaugacacaauaaggacg

SEQ ID NO: 193178 - RNA, 19 nt, Artificial Sequence
  Description of Artificial Sequence: Synthetic oligonucleotide
  Sense strand starting at position 1682 of SEQ ID NO: 2490
ugucauuugcccggucuga

SEQ ID NO: 193179 - RNA, 19 nt, Artificial Sequence
  Description of Artificial Sequence: Synthetic oligonucleotide
  Antisense strand to SEQ ID NO: 193178
ucagaccgggcaaaugaca

SEQ ID NO: 193180 - RNA, 19 nt, Artificial Sequence
  Description of Artificial Sequence: Synthetic oligonucleotide
  Sense strand starting at position 1716 of SEQ ID NO: 2490
cgcucauuugagugggcua

SEQ ID NO: 193181 - RNA, 19 nt, Artificial Sequence
  Description of Artificial Sequence: Synthetic oligonucleotide
  Antisense strand to SEQ ID NO: 193180
uagcccacucaaaugagcg

SEQ ID NO: 193182 - RNA, 19 nt, Artificial Sequence
  Description of Artificial Sequence: Synthetic oligonucleotide
  Sense strand starting at position 2506 of SEQ ID NO: 2490
uccuguagggcuggacaaa

SEQ ID NO: 193183 - RNA, 19 nt, Artificial Sequence
  Description of Artificial Sequence: Synthetic oligonucleotide
  Antisense strand to SEQ ID NO: 193182
uuuguccagcccuacagga

SEQ ID NO: 193184 - RNA, 19 nt, Artificial Sequence
  Description of Artificial Sequence: Synthetic oligonucleotide
  Sense strand starting at position 2545 of SEQ ID NO: 2490
gggagaauguucccagcau

SEQ ID NO: 193185 - RNA, 19 nt, Artificial Sequence
  Description of Artificial Sequence: Synthetic oligonucleotide
  Antisense strand to SEQ ID NO: 193184
augcugggaacauucuccc

SEQ ID NO: 193186 - RNA, 19 nt, Artificial Sequence
  Description of Artificial Sequence: Synthetic oligonucleotide
  Sense strand starting at position 2549 of SEQ ID NO: 2490
gaauguucccagcaugccu

SEQ ID NO: 193187 - RNA, 19 nt, Artificial Sequence
  Description of Artificial Sequence: Synthetic oligonucleotide
  Antisense strand to SEQ ID NO: 193186
aggcaugcugggaacauuc

SEQ ID NO: 193188 - RNA, 19 nt, Artificial Sequence
  Description of Artificial Sequence: Synthetic oligonucleotide
  Sense strand starting at position 2557 of SEQ ID NO: 2490
ccagcaugccucgauuugu

SEQ ID NO: 193189 - RNA, 19 nt, Artificial Sequence
  Description of Artificial Sequence: Synthetic oligonucleotide
  Antisense strand to SEQ ID NO: 193188
acaaaucgaggcaugcugg

SEQ ID NO: 193190 - RNA, 19 nt, Artificial Sequence
  Description of Artificial Sequence: Synthetic oligonucleotide
  Sense strand starting at position 3011 of SEQ ID NO: 2490
cuugauugcucaccaggaa

SEQ ID NO: 193191 - RNA, 19 nt, Artificial Sequence
  Description of Artificial Sequence: Synthetic oligonucleotide
  Antisense strand to SEQ ID NO: 193190
uuccuggugagcaaucaag

SEQ ID NO: 193192 - RNA, 19 nt, Artificial Sequence
  Description of Artificial Sequence: Synthetic oligonucleotide
  Sense strand starting at position 3012 of SEQ ID NO: 2490
uugauugcucaccaggaau

SEQ ID NO: 193193 - RNA, 19 nt, Artificial Sequence
  Description of Artificial Sequence: Synthetic oligonucleotide
  Antisense strand to SEQ ID NO: 193192
auuccuggugagcaaucaa

SEQ ID NO: 193194 - RNA, 19 nt, Artificial Sequence
  Description of Artificial Sequence: Synthetic oligonucleotide
  Sense strand starting at position 3074 of SEQ ID NO: 2490
agagcugauuguuuccaga

SEQ ID NO: 193195 - RNA, 19 nt, Artificial Sequence
  Description of Artificial Sequence: Synthetic oligonucleotide
  Antisense strand to SEQ ID NO: 193194
ucuggaaacaaucagcucu

SEQ ID NO: 193196 - RNA, 19 nt, Artificial Sequence
  Description of Artificial Sequence: Synthetic oligonucleotide
  Sense strand starting at position 3076 of SEQ ID NO: 2490
agcugauuguuuccagauc

SEQ ID NO: 193197 - RNA, 19 nt, Artificial Sequence
  Description of Artificial Sequence: Synthetic oligonucleotide
  Antisense strand to SEQ ID NO: 193196
gaucuggaaacaaucagcu

SEQ ID NO: 193198 - RNA, 19 nt, Artificial Sequence
  Description of Artificial Sequence: Synthetic oligonucleotide
  Sense strand starting at position 3101 of SEQ ID NO: 2490
cggugacauuccucccuca

SEQ ID NO: 193199 - RNA, 19 nt, Artificial Sequence
  Description of Artificial Sequence: Synthetic oligonucleotide
  Antisense strand to SEQ ID NO: 193198
ugagggaggaaugucaccg

SEQ ID NO: 193200 - RNA, 19 nt, Artificial Sequence
  Description of Artificial Sequence: Synthetic oligonucleotide
  Sense strand starting at position 3227 of SEQ ID NO: 2490
uaggaaagugcuggacuuu

SEQ ID NO: 193201 - RNA, 19 nt, Artificial Sequence
  Description of Artificial Sequence: Synthetic oligonucleotide
  Antisense strand to SEQ ID NO: 193200
aaaguccagcacuuuccua

SEQ ID NO: 193202 - RNA, 19 nt, Artificial Sequence
  Description of Artificial Sequence: Synthetic oligonucleotide
  Sense strand starting at position 3239 of SEQ ID NO: 2490
ggacuuucugcguaucuuu

SEQ ID NO: 193203 - RNA, 19 nt, Artificial Sequence
  Description of Artificial Sequence: Synthetic oligonucleotide
  Antisense strand to SEQ ID NO: 193202
aaagauacgcagaaagucc

SEQ ID NO: 193204 - RNA, 19 nt, Artificial Sequence
  Description of Artificial Sequence: Synthetic oligonucleotide
  Sense strand starting at position 3278 of SEQ ID NO: 2490
ucagcuucuuggucccaua

SEQ ID NO: 193205 - RNA, 19 nt, Artificial Sequence
  Description of Artificial Sequence: Synthetic oligonucleotide
  Antisense strand to SEQ ID NO: 193204
uaugggaccaagaagcuga

SEQ ID NO: 193206 - RNA, 19 nt, Artificial Sequence
  Description of Artificial Sequence: Synthetic oligonucleotide
  Sense strand starting at position 3399 of SEQ ID NO: 2490
cuagcaagagucuaugaug

SEQ ID NO: 193207 - RNA, 19 nt, Artificial Sequence
  Description of Artificial Sequence: Synthetic oligonucleotide
  Antisense strand to SEQ ID NO: 193206
caucauagacucuugcuag

SEQ ID NO: 193208 - RNA, 19 nt, Artificial Sequence
  Description of Artificial Sequence: Synthetic oligonucleotide
  Sense strand starting at position 3434 of SEQ ID NO: 2490
gucuauuucugggaccaca

SEQ ID NO: 193209 - RNA, 19 nt, Artificial Sequence
  Description of Artificial Sequence: Synthetic oligonucleotide
  Antisense strand to SEQ ID NO: 193208
uguggucccagaaauagac

SEQ ID NO: 193210 - RNA, 19 nt, Artificial Sequence
  Description of Artificial Sequence: Synthetic oligonucleotide
  Sense strand starting at position 3509 of SEQ ID NO: 2490
gcuauauucucuccuggag

SEQ ID NO: 193211 - RNA, 19 nt, Artificial Sequence
  Description of Artificial Sequence: Synthetic oligonucleotide
  Antisense strand to SEQ ID NO: 193210
cuccaggagagaauauagc

SEQ ID NO: 193212 - RNA, 19 nt, Artificial Sequence
  Description of Artificial Sequence: Synthetic oligonucleotide
  Sense strand starting at position 3512 of SEQ ID NO: 2490
auauucucuccuggagcau

SEQ ID NO: 193213 - RNA, 19 nt, Artificial Sequence
  Description of Artificial Sequence: Synthetic oligonucleotide
  Antisense strand to SEQ ID NO: 193212
augcuccaggagagaauau

SEQ ID NO: 193214 - RNA, 19 nt, Artificial Sequence
  Description of Artificial Sequence: Synthetic oligonucleotide
  Sense strand starting at position 3524 of SEQ ID NO: 2490
ggagcaugagcagaaagua

SEQ ID NO: 193215 - RNA, 19 nt, Artificial Sequence
  Description of Artificial Sequence: Synthetic oligonucleotide
  Antisense strand to SEQ ID NO: 193214
uacuuucugcucaugcucc

SEQ ID NO: 193216 - RNA, 19 nt, Artificial Sequence
  Description of Artificial Sequence: Synthetic oligonucleotide
  Sense strand starting at position 3561 of SEQ ID NO: 2490
ggacaaguucuaggaugcu

SEQ ID NO: 193217 - RNA, 19 nt, Artificial Sequence
  Description of Artificial Sequence: Synthetic oligonucleotide
  Antisense strand to SEQ ID NO: 193216
agcauccuagaacuugucc

SEQ ID NO: 193218 - RNA, 19 nt, Artificial Sequence
  Description of Artificial Sequence: Synthetic oligonucleotide
  Sense strand starting at position 3567 of SEQ ID NO: 2490
guucuaggaugcucuagaa

SEQ ID NO: 193219 - RNA, 19 nt, Artificial Sequence
  Description of Artificial Sequence: Synthetic oligonucleotide
  Antisense strand to SEQ ID NO: 193218
uucuagagcauccuagaac

SEQ ID NO: 193220 - RNA, 19 nt, Artificial Sequence
  Description of Artificial Sequence: Synthetic oligonucleotide
  Sense strand starting at position 3574 of SEQ ID NO: 2490
gaugcucuagaauguguuu

SEQ ID NO: 193221 - RNA, 19 nt, Artificial Sequence
  Description of Artificial Sequence: Synthetic oligonucleotide
  Antisense strand to SEQ ID NO: 193220
aaacacauucuagagcauc

SEQ ID NO: 193222 - RNA, 19 nt, Artificial Sequence
  Description of Artificial Sequence: Synthetic oligonucleotide
  Sense strand starting at position 243 of SEQ ID NO: 2491
cuacauuuccaauguuguu

SEQ ID NO: 193223 - RNA, 19 nt, Artificial Sequence
  Description of Artificial Sequence: Synthetic oligonucleotide
  Antisense strand to SEQ ID NO: 193222
aacaacauuggaaauguag

SEQ ID NO: 193224 - RNA, 19 nt, Artificial Sequence
  Description of Artificial Sequence: Synthetic oligonucleotide
  Sense strand starting at position 259 of SEQ ID NO: 2491
guuagugauauguaacuca

SEQ ID NO: 193225 - RNA, 19 nt, Artificial Sequence
  Description of Artificial Sequence: Synthetic oligonucleotide
  Antisense strand to SEQ ID NO: 193224
ugaguuacauaucacuaac

SEQ ID NO: 193226 - RNA, 19 nt, Artificial Sequence
  Description of Artificial Sequence: Synthetic oligonucleotide
  Sense strand starting at position 262 of SEQ ID NO: 2491
agugauauguaacucagga

SEQ ID NO: 193227 - RNA, 19 nt, Artificial Sequence
  Description of Artificial Sequence: Synthetic oligonucleotide
  Antisense strand to SEQ ID NO: 193226
uccugaguuacauaucacu

SEQ ID NO: 193228 - RNA, 19 nt, Artificial Sequence
  Description of Artificial Sequence: Synthetic oligonucleotide
  Sense strand starting at position 370 of SEQ ID NO: 2491
uugugauuccuggaaaugu

SEQ ID NO: 193229 - RNA, 19 nt, Artificial Sequence
  Description of Artificial Sequence: Synthetic oligonucleotide
  Antisense strand to SEQ ID NO: 193228
acauuuccaggaaucacaa

SEQ ID NO: 193230 - RNA, 19 nt, Artificial Sequence
  Description of Artificial Sequence: Synthetic oligonucleotide
  Sense strand starting at position 374 of SEQ ID NO: 2491
gauuccuggaaauguggua

SEQ ID NO: 193231 - RNA, 19 nt, Artificial Sequence
  Description of Artificial Sequence: Synthetic oligonucleotide
  Antisense strand to SEQ ID NO: 193230
uaccacauuuccaggaauc

SEQ ID NO: 193232 - RNA, 19 nt, Artificial Sequence
  Description of Artificial Sequence: Synthetic oligonucleotide
  Sense strand starting at position 428 of SEQ ID NO: 2491
augagcuauguuuagauau

SEQ ID NO: 193233 - RNA, 19 nt, Artificial Sequence
  Description of Artificial Sequence: Synthetic oligonucleotide
  Antisense strand to SEQ ID NO: 193232
auaucuaaacauagcucau

SEQ ID NO: 193234 - RNA, 19 nt, Artificial Sequence
  Description of Artificial Sequence: Synthetic oligonucleotide
  Sense strand starting at position 482 of SEQ ID NO: 2491
aagugaaauuuagagagua

SEQ ID NO: 193235 - RNA, 19 nt, Artificial Sequence
  Description of Artificial Sequence: Synthetic oligonucleotide
  Antisense strand to SEQ ID NO: 193234
uacucucuaaauuucacuu

SEQ ID NO: 193236 - RNA, 19 nt, Artificial Sequence
  Description of Artificial Sequence: Synthetic oligonucleotide
  Sense strand starting at position 531 of SEQ ID NO: 2491
ccuaaucuagaaugagcau

SEQ ID NO: 193237 - RNA, 19 nt, Artificial Sequence
  Description of Artificial Sequence: Synthetic oligonucleotide
  Antisense strand to SEQ ID NO: 193236
augcucauucuagauuagg

SEQ ID NO: 193238 - RNA, 19 nt, Artificial Sequence
  Description of Artificial Sequence: Synthetic oligonucleotide
  Sense strand starting at position 538 of SEQ ID NO: 2491
uagaaugagcaucgaaaua

SEQ ID NO: 193239 - RNA, 19 nt, Artificial Sequence
  Description of Artificial Sequence: Synthetic oligonucleotide
  Antisense strand to SEQ ID NO: 193238
uauuucgaugcucauucua

SEQ ID NO: 193240 - RNA, 19 nt, Artificial Sequence
  Description of Artificial Sequence: Synthetic oligonucleotide
  Sense strand starting at position 652 of SEQ ID NO: 2491
cacuguguucuagacggga

SEQ ID NO: 193241 - RNA, 19 nt, Artificial Sequence
  Description of Artificial Sequence: Synthetic oligonucleotide
  Antisense strand to SEQ ID NO: 193240
ucccgucuagaacacagug

SEQ ID NO: 193242 - RNA, 19 nt, Artificial Sequence
  Description of Artificial Sequence: Synthetic oligonucleotide
  Sense strand starting at position 657 of SEQ ID NO: 2491
uguucuagacgggaauauu

SEQ ID NO: 193243 - RNA, 19 nt, Artificial Sequence
  Description of Artificial Sequence: Synthetic oligonucleotide
  Antisense strand to SEQ ID NO: 193242
aauauucccgucuagaaca

SEQ ID NO: 193244 - RNA, 19 nt, Artificial Sequence
  Description of Artificial Sequence: Synthetic oligonucleotide
  Sense strand starting at position 777 of SEQ ID NO: 2491
gauaauugaggucaagugu

SEQ ID NO: 193245 - RNA, 19 nt, Artificial Sequence
  Description of Artificial Sequence: Synthetic oligonucleotide
  Antisense strand to SEQ ID NO: 193244
acacuugaccucaauuauc

SEQ ID NO: 193246 - RNA, 19 nt, Artificial Sequence
  Description of Artificial Sequence: Synthetic oligonucleotide
  Sense strand starting at position 880 of SEQ ID NO: 2491
ccgaguaaagagcauauua

SEQ ID NO: 193247 - RNA, 19 nt, Artificial Sequence
  Description of Artificial Sequence: Synthetic oligonucleotide
  Antisense strand to SEQ ID NO: 193246
uaauaugcucuuuacucgg

SEQ ID NO: 193248 - RNA, 19 nt, Artificial Sequence
  Description of Artificial Sequence: Synthetic oligonucleotide
  Sense strand starting at position 1003 of SEQ ID NO: 2491
ugaauuuguuguguuguca

SEQ ID NO: 193249 - RNA, 19 nt, Artificial Sequence
  Description of Artificial Sequence: Synthetic oligonucleotide
  Antisense strand to SEQ ID NO: 193248
ugacaacacaacaaauuca

SEQ ID NO: 193250 - RNA, 19 nt, Artificial Sequence
  Description of Artificial Sequence: Synthetic oligonucleotide
  Sense strand starting at position 1260 of SEQ ID NO: 2491
uuguaucauccacgauuuc

SEQ ID NO: 193251 - RNA, 19 nt, Artificial Sequence
  Description of Artificial Sequence: Synthetic oligonucleotide
  Antisense strand to SEQ ID NO: 193250
gaaaucguggaugauacaa

SEQ ID NO: 193252 - RNA, 19 nt, Artificial Sequence
  Description of Artificial Sequence: Synthetic oligonucleotide
  Sense strand starting at position 1622 of SEQ ID NO: 2491
accguuagguccaucggua

SEQ ID NO: 193253 - RNA, 19 nt, Artificial Sequence
  Description of Artificial Sequence: Synthetic oligonucleotide
  Antisense strand to SEQ ID NO: 193252
uaccgauggaccuaacggu

SEQ ID NO: 193254 - RNA, 19 nt, Artificial Sequence
  Description of Artificial Sequence: Synthetic oligonucleotide
  Sense strand starting at position 2220 of SEQ ID NO: 2491
guguaaagaguguaggaga

SEQ ID NO: 193255 - RNA, 19 nt, Artificial Sequence
  Description of Artificial Sequence: Synthetic oligonucleotide
  Antisense strand to SEQ ID NO: 193254
ucuccuacacucuuuacac

SEQ ID NO: 193256 - RNA, 19 nt, Artificial Sequence
  Description of Artificial Sequence: Synthetic oligonucleotide
  Sense strand starting at position 2334 of SEQ ID NO: 2491
ggaggacacaccugauguu

SEQ ID NO: 193257 - RNA, 19 nt, Artificial Sequence
  Description of Artificial Sequence: Synthetic oligonucleotide
  Antisense strand to SEQ ID NO: 193256
aacaucagguguguccucc

SEQ ID NO: 193258 - RNA, 19 nt, Artificial Sequence
  Description of Artificial Sequence: Synthetic oligonucleotide
  Sense strand starting at position 2447 of SEQ ID NO: 2491
ugagaucaugcauggaaau

SEQ ID NO: 193259 - RNA, 19 nt, Artificial Sequence
  Description of Artificial Sequence: Synthetic oligonucleotide
  Antisense strand to SEQ ID NO: 193258
auuuccaugcaugaucuca

SEQ ID NO: 193260 - RNA, 19 nt, Artificial Sequence
  Description of Artificial Sequence: Synthetic oligonucleotide
  Sense strand starting at position 2448 of SEQ ID NO: 2491
gagaucaugcauggaaauc

SEQ ID NO: 193261 - RNA, 19 nt, Artificial Sequence
  Description of Artificial Sequence: Synthetic oligonucleotide
  Antisense strand to SEQ ID NO: 193260
gauuuccaugcaugaucuc

SEQ ID NO: 193262 - RNA, 19 nt, Artificial Sequence
  Description of Artificial Sequence: Synthetic oligonucleotide
  Sense strand starting at position 2479 of SEQ ID NO: 2491
cggacacaaacucgauaua

SEQ ID NO: 193263 - RNA, 19 nt, Artificial Sequence
  Description of Artificial Sequence: Synthetic oligonucleotide
  Antisense strand to SEQ ID NO: 193262
uauaucgaguuuguguccg

SEQ ID NO: 193264 - RNA, 19 nt, Artificial Sequence
  Description of Artificial Sequence: Synthetic oligonucleotide
  Sense strand starting at position 2489 of SEQ ID NO: 2491
cucgauauauaacugggaa

SEQ ID NO: 193265 - RNA, 19 nt, Artificial Sequence
  Description of Artificial Sequence: Synthetic oligonucleotide
  Antisense strand to SEQ ID NO: 193264
uucccaguuauauaucgag

SEQ ID NO: 193266 - RNA, 19 nt, Artificial Sequence
  Description of Artificial Sequence: Synthetic oligonucleotide
  Sense strand starting at position 2805 of SEQ ID NO: 2491
ugucauugcgaagauaaua

SEQ ID NO: 193267 - RNA, 19 nt, Artificial Sequence
  Description of Artificial Sequence: Synthetic oligonucleotide
  Antisense strand to SEQ ID NO: 193266
uauuaucuucgcaaugaca

SEQ ID NO: 193268 - RNA, 19 nt, Artificial Sequence
  Description of Artificial Sequence: Synthetic oligonucleotide
  Sense strand starting at position 2841 of SEQ ID NO: 2491
aucaacugucagugacaga

SEQ ID NO: 193269 - RNA, 19 nt, Artificial Sequence
  Description of Artificial Sequence: Synthetic oligonucleotide
  Antisense strand to SEQ ID NO: 193268
ucugucacugacaguugau

SEQ ID NO: 193270 - RNA, 19 nt, Artificial Sequence
  Description of Artificial Sequence: Synthetic oligonucleotide
  Sense strand starting at position 2859 of SEQ ID NO: 2491
acacaaacucaguguauaa

SEQ ID NO: 193271 - RNA, 19 nt, Artificial Sequence
  Description of Artificial Sequence: Synthetic oligonucleotide
  Antisense strand to SEQ ID NO: 193270
uuauacacugaguuugugu

SEQ ID NO: 193272 - RNA, 19 nt, Artificial Sequence
  Description of Artificial Sequence: Synthetic oligonucleotide
  Sense strand starting at position 2869 of SEQ ID NO: 2491
aguguauaacugggaauca

SEQ ID NO: 193273 - RNA, 19 nt, Artificial Sequence
  Description of Artificial Sequence: Synthetic oligonucleotide
  Antisense strand to SEQ ID NO: 193272
ugauucccaguuauacacu

SEQ ID NO: 193274 - RNA, 19 nt, Artificial Sequence
  Description of Artificial Sequence: Synthetic oligonucleotide
  Sense strand starting at position 2892 of SEQ ID NO: 2491
ggguuucaaguaggaaaga

SEQ ID NO: 193275 - RNA, 19 nt, Artificial Sequence
  Description of Artificial Sequence: Synthetic oligonucleotide
  Antisense strand to SEQ ID NO: 193274
ucuuuccuacuugaaaccc

SEQ ID NO: 193276 - RNA, 19 nt, Artificial Sequence
  Description of Artificial Sequence: Synthetic oligonucleotide
  Sense strand starting at position 3007 of SEQ ID NO: 2491
uaaauauauuaggcgaaag

SEQ ID NO: 193277 - RNA, 19 nt, Artificial Sequence
  Description of Artificial Sequence: Synthetic oligonucleotide
  Antisense strand to SEQ ID NO: 193276
cuuucgccuaauauauuua

SEQ ID NO: 193278 - RNA, 19 nt, Artificial Sequence
  Description of Artificial Sequence: Synthetic oligonucleotide
  Sense strand starting at position 3038 of SEQ ID NO: 2491
gguauugcugaauaacauu

SEQ ID NO: 193279 - RNA, 19 nt, Artificial Sequence
  Description of Artificial Sequence: Synthetic oligonucleotide
  Antisense strand to SEQ ID NO: 193278
aauguuauucagcaauacc

SEQ ID NO: 193280 - RNA, 19 nt, Artificial Sequence
  Description of Artificial Sequence: Synthetic oligonucleotide
  Sense strand starting at position 3182 of SEQ ID NO: 2491
uguuuacauuucccguuaa

SEQ ID NO: 193281 - RNA, 19 nt, Artificial Sequence
  Description of Artificial Sequence: Synthetic oligonucleotide
  Antisense strand to SEQ ID NO: 193280
uuaacgggaaauguaaaca

SEQ ID NO: 193282 - RNA, 19 nt, Artificial Sequence
  Description of Artificial Sequence: Synthetic oligonucleotide
  Sense strand starting at position 3220 of SEQ ID NO: 2491
auugcugggccauauaaau

SEQ ID NO: 193283 - RNA, 19 nt, Artificial Sequence
  Description of Artificial Sequence: Synthetic oligonucleotide
  Antisense strand to SEQ ID NO: 193282
auuuauauggcccagcaau

SEQ ID NO: 193284 - RNA, 19 nt, Artificial Sequence
  Description of Artificial Sequence: Synthetic oligonucleotide
  Sense strand starting at position 3380 of SEQ ID NO: 2491
ggguacgucauugagaauu

SEQ ID NO: 193285 - RNA, 19 nt, Artificial Sequence
  Description of Artificial Sequence: Synthetic oligonucleotide
  Antisense strand to SEQ ID NO: 193284
aauucucaaugacguaccc

SEQ ID NO: 193286 - RNA, 19 nt, Artificial Sequence
  Description of Artificial Sequence: Synthetic oligonucleotide
  Sense strand starting at position 3641 of SEQ ID NO: 2491
gcaucaucccaggauuggu

SEQ ID NO: 193287 - RNA, 19 nt, Artificial Sequence
  Description of Artificial Sequence: Synthetic oligonucleotide
  Antisense strand to SEQ ID NO: 193286
accaauccugggaugaugc

SEQ ID NO: 193288 - RNA, 19 nt, Artificial Sequence
  Description of Artificial Sequence: Synthetic oligonucleotide
  Sense strand starting at position 3684 of SEQ ID NO: 2491
gaaguaauacguuaccucu

SEQ ID NO: 193289 - RNA, 19 nt, Artificial Sequence
  Description of Artificial Sequence: Synthetic oligonucleotide
  Antisense strand to SEQ ID NO: 193288
agagguaacguauuacuuc

SEQ ID NO: 193290 - RNA, 19 nt, Artificial Sequence
  Description of Artificial Sequence: Synthetic oligonucleotide
  Sense strand starting at position 3690 of SEQ ID NO: 2491
auacguuaccucuaagauu

SEQ ID NO: 193291 - RNA, 19 nt, Artificial Sequence
  Description of Artificial Sequence: Synthetic oligonucleotide
  Antisense strand to SEQ ID NO: 193290
aaucuuagagguaacguau

SEQ ID NO: 193292 - RNA, 19 nt, Artificial Sequence
  Description of Artificial Sequence: Synthetic oligonucleotide
  Sense strand starting at position 3699 of SEQ ID NO: 2491
cucuaagauuagguuugga

SEQ ID NO: 193293 - RNA, 19 nt, Artificial Sequence
  Description of Artificial Sequence: Synthetic oligonucleotide
  Antisense strand to SEQ ID NO: 193292
uccaaaccuaaucuuagag

SEQ ID NO: 193294 - RNA, 19 nt, Artificial Sequence
  Description of Artificial Sequence: Synthetic oligonucleotide
  Sense strand starting at position 3757 of SEQ ID NO: 2491
gucuccuuccuagaucauu

SEQ ID NO: 193295 - RNA, 19 nt, Artificial Sequence
  Description of Artificial Sequence: Synthetic oligonucleotide
  Antisense strand to SEQ ID NO: 193294
aaugaucuaggaaggagac

SEQ ID NO: 193296 - RNA, 19 nt, Artificial Sequence
  Description of Artificial Sequence: Synthetic oligonucleotide
  Sense strand starting at position 3879 of SEQ ID NO: 2491
ucguguguuaaauccguaa

SEQ ID NO: 193297 - RNA, 19 nt, Artificial Sequence
  Description of Artificial Sequence: Synthetic oligonucleotide
  Antisense strand to SEQ ID NO: 193296
uuacggauuuaacacacga

SEQ ID NO: 193298 - RNA, 19 nt, Artificial Sequence
  Description of Artificial Sequence: Synthetic oligonucleotide
  Sense strand starting at position 3934 of SEQ ID NO: 2491
aggaccuuuaaaggugauu

SEQ ID NO: 193299 - RNA, 19 nt, Artificial Sequence
  Description of Artificial Sequence: Synthetic oligonucleotide
  Antisense strand to SEQ ID NO: 193298
aaucaccuuuaaagguccu

SEQ ID NO: 193300 - RNA, 19 nt, Artificial Sequence
  Description of Artificial Sequence: Synthetic oligonucleotide
  Sense strand starting at position 3939 of SEQ ID NO: 2491
cuuuaaaggugauuucguu

SEQ ID NO: 193301 - RNA, 19 nt, Artificial Sequence
  Description of Artificial Sequence: Synthetic oligonucleotide
  Antisense strand to SEQ ID NO: 193300
aacgaaaucaccuuuaaag

SEQ ID NO: 193302 - RNA, 19 nt, Artificial Sequence
  Description of Artificial Sequence: Synthetic oligonucleotide
  Sense strand starting at position 115 of SEQ ID NO: 2492
ucuaaaguugaguaggcau

SEQ ID NO: 193303 - RNA, 19 nt, Artificial Sequence
  Description of Artificial Sequence: Synthetic oligonucleotide
  Antisense strand to SEQ ID NO: 193302
augccuacucaacuuuaga

SEQ ID NO: 193304 - RNA, 19 nt, Artificial Sequence
  Description of Artificial Sequence: Synthetic oligonucleotide
  Sense strand starting at position 118 of SEQ ID NO: 2492
aaaguugaguaggcaucau

SEQ ID NO: 193305 - RNA, 19 nt, Artificial Sequence
  Description of Artificial Sequence: Synthetic oligonucleotide
  Antisense strand to SEQ ID NO: 193304
augaugccuacucaacuuu

SEQ ID NO: 193306 - RNA, 19 nt, Artificial Sequence
  Description of Artificial Sequence: Synthetic oligonucleotide
  Sense strand starting at position 122 of SEQ ID NO: 2492
uugaguaggcaucauacuu

SEQ ID NO: 193307 - RNA, 19 nt, Artificial Sequence
  Description of Artificial Sequence: Synthetic oligonucleotide
  Antisense strand to SEQ ID NO: 193306
aaguaugaugccuacucaa

SEQ ID NO: 193308 - RNA, 19 nt, Artificial Sequence
  Description of Artificial Sequence: Synthetic oligonucleotide
  Sense strand starting at position 178 of SEQ ID NO: 2492
cagcuugugggauggaaga

SEQ ID NO: 193309 - RNA, 19 nt, Artificial Sequence
  Description of Artificial Sequence: Synthetic oligonucleotide
  Antisense strand to SEQ ID NO: 193308
ucuuccaucccacaagcug

SEQ ID NO: 193310 - RNA, 19 nt, Artificial Sequence
  Description of Artificial Sequence: Synthetic oligonucleotide
  Sense strand starting at position 311 of SEQ ID NO: 2492
cugggagaguucuuugaau

SEQ ID NO: 193311 - RNA, 19 nt, Artificial Sequence
  Description of Artificial Sequence: Synthetic oligonucleotide
  Antisense strand to SEQ ID NO: 193310
auucaaagaacucucccag

SEQ ID NO: 193312 - RNA, 19 nt, Artificial Sequence
  Description of Artificial Sequence: Synthetic oligonucleotide
  Sense strand starting at position 313 of SEQ ID NO: 2492
gggagaguucuuugaaucc

SEQ ID NO: 193313 - RNA, 19 nt, Artificial Sequence
  Description of Artificial Sequence: Synthetic oligonucleotide
  Antisense strand to SEQ ID NO: 193312
ggauucaaagaacucuccc

SEQ ID NO: 193314 - RNA, 19 nt, Artificial Sequence
  Description of Artificial Sequence: Synthetic oligonucleotide
  Sense strand starting at position 350 of SEQ ID NO: 2492
gugauaggcccuugggaaa

SEQ ID NO: 193315 - RNA, 19 nt, Artificial Sequence
  Description of Artificial Sequence: Synthetic oligonucleotide
  Antisense strand to SEQ ID NO: 193314
uuucccaagggccuaucac

SEQ ID NO: 193316 - RNA, 19 nt, Artificial Sequence
  Description of Artificial Sequence: Synthetic oligonucleotide
  Sense strand starting at position 375 of SEQ ID NO: 2492
uggcaagagauagguugua

SEQ ID NO: 193317 - RNA, 19 nt, Artificial Sequence
  Description of Artificial Sequence: Synthetic oligonucleotide
  Antisense strand to SEQ ID NO: 193316
uacaaccuaucucuugcca

SEQ ID NO: 193318 - RNA, 19 nt, Artificial Sequence
  Description of Artificial Sequence: Synthetic oligonucleotide
  Sense strand starting at position 794 of SEQ ID NO: 2492
aaggauugcccauggaggu

SEQ ID NO: 193319 - RNA, 19 nt, Artificial Sequence
  Description of Artificial Sequence: Synthetic oligonucleotide
  Antisense strand to SEQ ID NO: 193318
accuccaugggcaauccuu

SEQ ID NO: 193320 - RNA, 19 nt, Artificial Sequence
  Description of Artificial Sequence: Synthetic oligonucleotide
  Sense strand starting at position 936 of SEQ ID NO: 2492
agccuuuaccuagaagauc

SEQ ID NO: 193321 - RNA, 19 nt, Artificial Sequence
  Description of Artificial Sequence: Synthetic oligonucleotide
  Antisense strand to SEQ ID NO: 193320
gaucuucuagguaaaggcu

SEQ ID NO: 193322 - RNA, 19 nt, Artificial Sequence
  Description of Artificial Sequence: Synthetic oligonucleotide
  Sense strand starting at position 1038 of SEQ ID NO: 2492
agugggaguccuggagaga

SEQ ID NO: 193323 - RNA, 19 nt, Artificial Sequence
  Description of Artificial Sequence: Synthetic oligonucleotide
  Antisense strand to SEQ ID NO: 193322
ucucuccaggacucccacu

SEQ ID NO: 193324 - RNA, 19 nt, Artificial Sequence
  Description of Artificial Sequence: Synthetic oligonucleotide
  Sense strand starting at position 1129 of SEQ ID NO: 2492
ucacccacucagugacaua

SEQ ID NO: 193325 - RNA, 19 nt, Artificial Sequence
  Description of Artificial Sequence: Synthetic oligonucleotide
  Antisense strand to SEQ ID NO: 193324
uaugucacugaguggguga

SEQ ID NO: 193326 - RNA, 19 nt, Artificial Sequence
  Description of Artificial Sequence: Synthetic oligonucleotide
  Sense strand starting at position 1450 of SEQ ID NO: 2492
aguaucaauacgggaagau

SEQ ID NO: 193327 - RNA, 19 nt, Artificial Sequence
  Description of Artificial Sequence: Synthetic oligonucleotide
  Antisense strand to SEQ ID NO: 193326
aucuucccguauugauacu

SEQ ID NO: 193328 - RNA, 19 nt, Artificial Sequence
  Description of Artificial Sequence: Synthetic oligonucleotide
  Sense strand starting at position 1472 of SEQ ID NO: 2492
gagacaucuuagguaguag

SEQ ID NO: 193329 - RNA, 19 nt, Artificial Sequence
  Description of Artificial Sequence: Synthetic oligonucleotide
  Antisense strand to SEQ ID NO: 193328
cuacuaccuaagaugucuc

SEQ ID NO: 193330 - RNA, 19 nt, Artificial Sequence
  Description of Artificial Sequence: Synthetic oligonucleotide
  Sense strand starting at position 1846 of SEQ ID NO: 2492
gugggaugccuucagaaag

SEQ ID NO: 193331 - RNA, 19 nt, Artificial Sequence
  Description of Artificial Sequence: Synthetic oligonucleotide
  Antisense strand to SEQ ID NO: 193330
cuuucugaaggcaucccac

SEQ ID NO: 193332 - RNA, 19 nt, Artificial Sequence
  Description of Artificial Sequence: Synthetic oligonucleotide
  Sense strand starting at position 1992 of SEQ ID NO: 2492
aagaaagcuuccucagggu

SEQ ID NO: 193333 - RNA, 19 nt, Artificial Sequence
  Description of Artificial Sequence: Synthetic oligonucleotide
  Antisense strand to SEQ ID NO: 193332
acccugaggaagcuuucuu

SEQ ID NO: 193334 - RNA, 19 nt, Artificial Sequence
  Description of Artificial Sequence: Synthetic oligonucleotide
  Sense strand starting at position 2197 of SEQ ID NO: 2492
gugcuugaggauuaagcaa

SEQ ID NO: 193335 - RNA, 19 nt, Artificial Sequence
  Description of Artificial Sequence: Synthetic oligonucleotide
  Antisense strand to SEQ ID NO: 193334
uugcuuaauccucaagcac

SEQ ID NO: 193336 - RNA, 19 nt, Artificial Sequence
  Description of Artificial Sequence: Synthetic oligonucleotide
  Sense strand starting at position 2349 of SEQ ID NO: 2492
auuagagccugucuugaaa

SEQ ID NO: 193337 - RNA, 19 nt, Artificial Sequence
  Description of Artificial Sequence: Synthetic oligonucleotide
  Antisense strand to SEQ ID NO: 193336
uuucaagacaggcucuaau

SEQ ID NO: 193338 - RNA, 19 nt, Artificial Sequence
  Description of Artificial Sequence: Synthetic oligonucleotide
  Sense strand starting at position 2387 of SEQ ID NO: 2492
cuuauuuccugagaaaggu

SEQ ID NO: 193339 - RNA, 19 nt, Artificial Sequence
  Description of Artificial Sequence: Synthetic oligonucleotide
  Antisense strand to SEQ ID NO: 193338
accuuucucaggaaauaag

SEQ ID NO: 193340 - RNA, 19 nt, Artificial Sequence
  Description of Artificial Sequence: Synthetic oligonucleotide
  Sense strand starting at position 2391 of SEQ ID NO: 2492
uuuccugagaaagguugau

SEQ ID NO: 193341 - RNA, 19 nt, Artificial Sequence
  Description of Artificial Sequence: Synthetic oligonucleotide
  Antisense strand to SEQ ID NO: 193340
aucaaccuuucucaggaaa

SEQ ID NO: 193342 - RNA, 19 nt, Artificial Sequence
  Description of Artificial Sequence: Synthetic oligonucleotide
  Sense strand starting at position 2486 of SEQ ID NO: 2492
auaacuguccuacaguguu

SEQ ID NO: 193343 - RNA, 19 nt, Artificial Sequence
  Description of Artificial Sequence: Synthetic oligonucleotide
  Antisense strand to SEQ ID NO: 193342
aacacuguaggacaguuau

SEQ ID NO: 193344 - RNA, 19 nt, Artificial Sequence
  Description of Artificial Sequence: Synthetic oligonucleotide
  Sense strand starting at position 2527 of SEQ ID NO: 2492
uguggauuaggccaugaau

SEQ ID NO: 193345 - RNA, 19 nt, Artificial Sequence
  Description of Artificial Sequence: Synthetic oligonucleotide
  Antisense strand to SEQ ID NO: 193344
auucauggccuaauccaca

SEQ ID NO: 193346 - RNA, 19 nt, Artificial Sequence
  Description of Artificial Sequence: Synthetic oligonucleotide
  Sense strand starting at position 2529 of SEQ ID NO: 2492
uggauuaggccaugaauuc

SEQ ID NO: 193347 - RNA, 19 nt, Artificial Sequence
  Description of Artificial Sequence: Synthetic oligonucleotide
  Antisense strand to SEQ ID NO: 193346
gaauucauggccuaaucca

SEQ ID NO: 193348 - RNA, 19 nt, Artificial Sequence
  Description of Artificial Sequence: Synthetic oligonucleotide
  Sense strand starting at position 2536 of SEQ ID NO: 2492
ggccaugaauuccucaaac

SEQ ID NO: 193349 - RNA, 19 nt, Artificial Sequence
  Description of Artificial Sequence: Synthetic oligonucleotide
  Antisense strand to SEQ ID NO: 193348
guuugaggaauucauggcc

SEQ ID NO: 193350 - RNA, 19 nt, Artificial Sequence
  Description of Artificial Sequence: Synthetic oligonucleotide
  Sense strand starting at position 2682 of SEQ ID NO: 2492
auacuuuggucacucuuua

SEQ ID NO: 193351 - RNA, 19 nt, Artificial Sequence
  Description of Artificial Sequence: Synthetic oligonucleotide
  Antisense strand to SEQ ID NO: 193350
uaaagagugaccaaaguau

SEQ ID NO: 193352 - RNA, 19 nt, Artificial Sequence
  Description of Artificial Sequence: Synthetic oligonucleotide
  Sense strand starting at position 2687 of SEQ ID NO: 2492
uuggucacucuuuaagcua

SEQ ID NO: 193353 - RNA, 19 nt, Artificial Sequence
  Description of Artificial Sequence: Synthetic oligonucleotide
  Antisense strand to SEQ ID NO: 193352
uagcuuaaagagugaccaa

SEQ ID NO: 193354 - RNA, 19 nt, Artificial Sequence
  Description of Artificial Sequence: Synthetic oligonucleotide
  Sense strand starting at position 2883 of SEQ ID NO: 2492
aagcacugagaauguguaa

SEQ ID NO: 193355 - RNA, 19 nt, Artificial Sequence
  Description of Artificial Sequence: Synthetic oligonucleotide
  Antisense strand to SEQ ID NO: 193354
uuacacauucucagugcuu

SEQ ID NO: 193356 - RNA, 19 nt, Artificial Sequence
  Description of Artificial Sequence: Synthetic oligonucleotide
  Sense strand starting at position 2886 of SEQ ID NO: 2492
cacugagaauguguaacua

SEQ ID NO: 193357 - RNA, 19 nt, Artificial Sequence
  Description of Artificial Sequence: Synthetic oligonucleotide
  Antisense strand to SEQ ID NO: 193356
uaguuacacauucucagug

SEQ ID NO: 193358 - RNA, 19 nt, Artificial Sequence
  Description of Artificial Sequence: Synthetic oligonucleotide
  Sense strand starting at position 2890 of SEQ ID NO: 2492
gagaauguguaacuaggua

SEQ ID NO: 193359 - RNA, 19 nt, Artificial Sequence
  Description of Artificial Sequence: Synthetic oligonucleotide
  Antisense strand to SEQ ID NO: 193358
uaccuaguuacacauucuc

SEQ ID NO: 193360 - RNA, 19 nt, Artificial Sequence
  Description of Artificial Sequence: Synthetic oligonucleotide
  Sense strand starting at position 3065 of SEQ ID NO: 2492
ggauuaggugcucaccacu

SEQ ID NO: 193361 - RNA, 19 nt, Artificial Sequence
  Description of Artificial Sequence: Synthetic oligonucleotide
  Antisense strand to SEQ ID NO: 193360
aguggugagcaccuaaucc

SEQ ID NO: 193362 - RNA, 19 nt, Artificial Sequence
  Description of Artificial Sequence: Synthetic oligonucleotide
  Sense strand starting at position 3229 of SEQ ID NO: 2492
aguguucucugaguaaaga

SEQ ID NO: 193363 - RNA, 19 nt, Artificial Sequence
  Description of Artificial Sequence: Synthetic oligonucleotide
  Antisense strand to SEQ ID NO: 193362
ucuuuacucagagaacacu

SEQ ID NO: 193364 - RNA, 19 nt, Artificial Sequence
  Description of Artificial Sequence: Synthetic oligonucleotide
  Sense strand starting at position 3230 of SEQ ID NO: 2492
guguucucugaguaaagac

SEQ ID NO: 193365 - RNA, 19 nt, Artificial Sequence
  Description of Artificial Sequence: Synthetic oligonucleotide
  Antisense strand to SEQ ID NO: 193364
gucuuuacucagagaacac

SEQ ID NO: 193366 - RNA, 19 nt, Artificial Sequence
  Description of Artificial Sequence: Synthetic oligonucleotide
  Sense strand starting at position 3342 of SEQ ID NO: 2492
ccuuuaugaugagcucaaa

SEQ ID NO: 193367 - RNA, 19 nt, Artificial Sequence
  Description of Artificial Sequence: Synthetic oligonucleotide
  Antisense strand to SEQ ID NO: 193366
uuugagcucaucauaaagg

SEQ ID NO: 193368 - RNA, 19 nt, Artificial Sequence
  Description of Artificial Sequence: Synthetic oligonucleotide
  Sense strand starting at position 3415 of SEQ ID NO: 2492
aagaaagaaucugaggauu

SEQ ID NO: 193369 - RNA, 19 nt, Artificial Sequence
  Description of Artificial Sequence: Synthetic oligonucleotide
  Antisense strand to SEQ ID NO: 193368
aauccucagauucuuucuu

SEQ ID NO: 193370 - RNA, 19 nt, Artificial Sequence
  Description of Artificial Sequence: Synthetic oligonucleotide
  Sense strand starting at position 3417 of SEQ ID NO: 2492
gaaagaaucugaggauuug

SEQ ID NO: 193371 - RNA, 19 nt, Artificial Sequence
  Description of Artificial Sequence: Synthetic oligonucleotide
  Antisense strand to SEQ ID NO: 193370
caaauccucagauucuuuc

SEQ ID NO: 193372 - RNA, 19 nt, Artificial Sequence
  Description of Artificial Sequence: Synthetic oligonucleotide
  Sense strand starting at position 3423 of SEQ ID NO: 2492
aucugaggauuugacucau

SEQ ID NO: 193373 - RNA, 19 nt, Artificial Sequence
  Description of Artificial Sequence: Synthetic oligonucleotide
  Antisense strand to SEQ ID NO: 193372
augagucaaauccucagau

SEQ ID NO: 193374 - RNA, 19 nt, Artificial Sequence
  Description of Artificial Sequence: Synthetic oligonucleotide
  Sense strand starting at position 3467 of SEQ ID NO: 2492
ccagucuccugacuagacu

SEQ ID NO: 193375 - RNA, 19 nt, Artificial Sequence
  Description of Artificial Sequence: Synthetic oligonucleotide
  Antisense strand to SEQ ID NO: 193374
agucuagucaggagacugg

SEQ ID NO: 193376 - RNA, 19 nt, Artificial Sequence
  Description of Artificial Sequence: Synthetic oligonucleotide
  Sense strand starting at position 3494 of SEQ ID NO: 2492
uugcuuuaugcugagacca

SEQ ID NO: 193377 - RNA, 19 nt, Artificial Sequence
  Description of Artificial Sequence: Synthetic oligonucleotide
  Antisense strand to SEQ ID NO: 193376
uggucucagcauaaagcaa

SEQ ID NO: 193378 - RNA, 19 nt, Artificial Sequence
  Description of Artificial Sequence: Synthetic oligonucleotide
  Sense strand starting at position 3812 of SEQ ID NO: 2492
ugcuauuugugguuuaaga

SEQ ID NO: 193379 - RNA, 19 nt, Artificial Sequence
  Description of Artificial Sequence: Synthetic oligonucleotide
  Antisense strand to SEQ ID NO: 193378
ucuuaaaccacaaauagca

SEQ ID NO: 193380 - RNA, 19 nt, Artificial Sequence
  Description of Artificial Sequence: Synthetic oligonucleotide
  Sense strand starting at position 3885 of SEQ ID NO: 2492
ccgguagacccauaaccuu

SEQ ID NO: 193381 - RNA, 19 nt, Artificial Sequence
  Description of Artificial Sequence: Synthetic oligonucleotide
  Antisense strand to SEQ ID NO: 193380
aagguuaugggucuaccgg

SEQ ID NO: 193382 - RNA, 19 nt, Artificial Sequence
  Description of Artificial Sequence: Synthetic oligonucleotide
  Sense strand starting at position 30 of SEQ ID NO: 2493
cauguaguacaguaagacu

SEQ ID NO: 193383 - RNA, 19 nt, Artificial Sequence
  Description of Artificial Sequence: Synthetic oligonucleotide
  Antisense strand to SEQ ID NO: 193382
agucuuacuguacuacaug

SEQ ID NO: 193384 - RNA, 19 nt, Artificial Sequence
  Description of Artificial Sequence: Synthetic oligonucleotide
  Sense strand starting at position 38 of SEQ ID NO: 2493
acaguaagacuuuaugcuu

SEQ ID NO: 193385 - RNA, 19 nt, Artificial Sequence
  Description of Artificial Sequence: Synthetic oligonucleotide
  Antisense strand to SEQ ID NO: 193384
aagcauaaagucuuacugu

SEQ ID NO: 193386 - RNA, 19 nt, Artificial Sequence
  Description of Artificial Sequence: Synthetic oligonucleotide
  Sense strand starting at position 41 of SEQ ID NO: 2493
guaagacuuuaugcuuaua

SEQ ID NO: 193387 - RNA, 19 nt, Artificial Sequence
  Description of Artificial Sequence: Synthetic oligonucleotide
  Antisense strand to SEQ ID NO: 193386
uauaagcauaaagucuuac

SEQ ID NO: 193388 - RNA, 19 nt, Artificial Sequence
  Description of Artificial Sequence: Synthetic oligonucleotide
  Sense strand starting at position 112 of SEQ ID NO: 2493
guguacguguauauuggua

SEQ ID NO: 193389 - RNA, 19 nt, Artificial Sequence
  Description of Artificial Sequence: Synthetic oligonucleotide
  Antisense strand to SEQ ID NO: 193388
uaccaauauacacguacac

SEQ ID NO: 193390 - RNA, 19 nt, Artificial Sequence
  Description of Artificial Sequence: Synthetic oligonucleotide
  Sense strand starting at position 137 of SEQ ID NO: 2493
uguuaaaugcucuggauaa

SEQ ID NO: 193391 - RNA, 19 nt, Artificial Sequence
  Description of Artificial Sequence: Synthetic oligonucleotide
  Antisense strand to SEQ ID NO: 193390
uuauccagagcauuuaaca

SEQ ID NO: 193392 - RNA, 19 nt, Artificial Sequence
  Description of Artificial Sequence: Synthetic oligonucleotide
  Sense strand starting at position 381 of SEQ ID NO: 2493
uuguaaaugaguugaaaug

SEQ ID NO: 193393 - RNA, 19 nt, Artificial Sequence
  Description of Artificial Sequence: Synthetic oligonucleotide
  Antisense strand to SEQ ID NO: 193392
cauuucaacucauuuacaa

SEQ ID NO: 193394 - RNA, 19 nt, Artificial Sequence
  Description of Artificial Sequence: Synthetic oligonucleotide
  Sense strand starting at position 397 of SEQ ID NO: 2493
augaacucucauugagagu

SEQ ID NO: 193395 - RNA, 19 nt, Artificial Sequence
  Description of Artificial Sequence: Synthetic oligonucleotide
  Antisense strand to SEQ ID NO: 193394
acucucaaugagaguucau

SEQ ID NO: 193396 - RNA, 19 nt, Artificial Sequence
  Description of Artificial Sequence: Synthetic oligonucleotide
  Sense strand starting at position 806 of SEQ ID NO: 2493
accuauuuguggcuaacuu

SEQ ID NO: 193397 - RNA, 19 nt, Artificial Sequence
  Description of Artificial Sequence: Synthetic oligonucleotide
  Antisense strand to SEQ ID NO: 193396
aaguuagccacaaauaggu

SEQ ID NO: 193398 - RNA, 19 nt, Artificial Sequence
  Description of Artificial Sequence: Synthetic oligonucleotide
  Sense strand starting at position 851 of SEQ ID NO: 2493
gugaacaugaguuguacau

SEQ ID NO: 193399 - RNA, 19 nt, Artificial Sequence
  Description of Artificial Sequence: Synthetic oligonucleotide
  Antisense strand to SEQ ID NO: 193398
auguacaacucauguucac

SEQ ID NO: 193400 - RNA, 19 nt, Artificial Sequence
  Description of Artificial Sequence: Synthetic oligonucleotide
  Sense strand starting at position 1254 of SEQ ID NO: 2493
uuccgugaacaagaguaaa

SEQ ID NO: 193401 - RNA, 19 nt, Artificial Sequence
  Description of Artificial Sequence: Synthetic oligonucleotide
  Antisense strand to SEQ ID NO: 193400
uuuacucuuguucacggaa

SEQ ID NO: 193402 - RNA, 19 nt, Artificial Sequence
  Description of Artificial Sequence: Synthetic oligonucleotide
  Sense strand starting at position 1257 of SEQ ID NO: 2493
cgugaacaagaguaaaguu

SEQ ID NO: 193403 - RNA, 19 nt, Artificial Sequence
  Description of Artificial Sequence: Synthetic oligonucleotide
  Antisense strand to SEQ ID NO: 193402
aacuuuacucuuguucacg

SEQ ID NO: 193404 - RNA, 19 nt, Artificial Sequence
  Description of Artificial Sequence: Synthetic oligonucleotide
  Sense strand starting at position 1266 of SEQ ID NO: 2493
gaguaaaguucugcagaga

SEQ ID NO: 193405 - RNA, 19 nt, Artificial Sequence
  Description of Artificial Sequence: Synthetic oligonucleotide
  Antisense strand to SEQ ID NO: 193404
ucucugcagaacuuuacuc

SEQ ID NO: 193406 - RNA, 19 nt, Artificial Sequence
  Description of Artificial Sequence: Synthetic oligonucleotide
  Sense strand starting at position 1267 of SEQ ID NO: 2493
aguaaaguucugcagagaa

SEQ ID NO: 193407 - RNA, 19 nt, Artificial Sequence
  Description of Artificial Sequence: Synthetic oligonucleotide
  Antisense strand to SEQ ID NO: 193406
uucucugcagaacuuuacu

SEQ ID NO: 193408 - RNA, 19 nt, Artificial Sequence
  Description of Artificial Sequence: Synthetic oligonucleotide
  Sense strand starting at position 1480 of SEQ ID NO: 2493
gaccucucucgugaggaga

SEQ ID NO: 193409 - RNA, 19 nt, Artificial Sequence
  Description of Artificial Sequence: Synthetic oligonucleotide
  Antisense strand to SEQ ID NO: 193408
ucuccucacgagagagguc

SEQ ID NO: 193410 - RNA, 19 nt, Artificial Sequence
  Description of Artificial Sequence: Synthetic oligonucleotide
  Sense strand starting at position 1688 of SEQ ID NO: 2493
ggaaauucuuggucgacau

SEQ ID NO: 193411 - RNA, 19 nt, Artificial Sequence
  Description of Artificial Sequence: Synthetic oligonucleotide
  Antisense strand to SEQ ID NO: 193410
augucgaccaagaauuucc

SEQ ID NO: 193412 - RNA, 19 nt, Artificial Sequence
  Description of Artificial Sequence: Synthetic oligonucleotide
  Sense strand starting at position 1689 of SEQ ID NO: 2493
gaaauucuuggucgacauc

SEQ ID NO: 193413 - RNA, 19 nt, Artificial Sequence
  Description of Artificial Sequence: Synthetic oligonucleotide
  Antisense strand to SEQ ID NO: 193412
gaugucgaccaagaauuuc

SEQ ID NO: 193414 - RNA, 19 nt, Artificial Sequence
  Description of Artificial Sequence: Synthetic oligonucleotide
  Sense strand starting at position 2275 of SEQ ID NO: 2493
augggaaccagcugguaau

SEQ ID NO: 193415 - RNA, 19 nt, Artificial Sequence
  Description of Artificial Sequence: Synthetic oligonucleotide
  Antisense strand to SEQ ID NO: 193414
auuaccagcugguucccau

SEQ ID NO: 193416 - RNA, 19 nt, Artificial Sequence
  Description of Artificial Sequence: Synthetic oligonucleotide
  Sense strand starting at position 2276 of SEQ ID NO: 2493
ugggaaccagcugguaauu

SEQ ID NO: 193417 - RNA, 19 nt, Artificial Sequence
  Description of Artificial Sequence: Synthetic oligonucleotide
  Antisense strand to SEQ ID NO: 193416
aauuaccagcugguuccca

SEQ ID NO: 193418 - RNA, 19 nt, Artificial Sequence
  Description of Artificial Sequence: Synthetic oligonucleotide
  Sense strand starting at position 2304 of SEQ ID NO: 2493
agacauugucaacacuguu

SEQ ID NO: 193419 - RNA, 19 nt, Artificial Sequence
  Description of Artificial Sequence: Synthetic oligonucleotide
  Antisense strand to SEQ ID NO: 193418
aacaguguugacaaugucu

SEQ ID NO: 193420 - RNA, 19 nt, Artificial Sequence
  Description of Artificial Sequence: Synthetic oligonucleotide
  Sense strand starting at position 2310 of SEQ ID NO: 2493
ugucaacacuguuuaaauu

SEQ ID NO: 193421 - RNA, 19 nt, Artificial Sequence
  Description of Artificial Sequence: Synthetic oligonucleotide
  Antisense strand to SEQ ID NO: 193420
aauuuaaacaguguugaca

SEQ ID NO: 193422 - RNA, 19 nt, Artificial Sequence
  Description of Artificial Sequence: Synthetic oligonucleotide
  Sense strand starting at position 2311 of SEQ ID NO: 2493
gucaacacuguuuaaauua

SEQ ID NO: 193423 - RNA, 19 nt, Artificial Sequence
  Description of Artificial Sequence: Synthetic oligonucleotide
  Antisense strand to SEQ ID NO: 193422
uaauuuaaacaguguugac

SEQ ID NO: 193424 - RNA, 19 nt, Artificial Sequence
  Description of Artificial Sequence: Synthetic oligonucleotide
  Sense strand starting at position 2380 of SEQ ID NO: 2493
uucccauauuugggauuua

SEQ ID NO: 193425 - RNA, 19 nt, Artificial Sequence
  Description of Artificial Sequence: Synthetic oligonucleotide
  Antisense strand to SEQ ID NO: 193424
uaaaucccaaauaugggaa

SEQ ID NO: 193426 - RNA, 19 nt, Artificial Sequence
  Description of Artificial Sequence: Synthetic oligonucleotide
  Sense strand starting at position 2417 of SEQ ID NO: 2493
auuuauguacguuguuagu

SEQ ID NO: 193427 - RNA, 19 nt, Artificial Sequence
  Description of Artificial Sequence: Synthetic oligonucleotide
  Antisense strand to SEQ ID NO: 193426
acuaacaacguacauaaau

SEQ ID NO: 193428 - RNA, 19 nt, Artificial Sequence
  Description of Artificial Sequence: Synthetic oligonucleotide
  Sense strand starting at position 2534 of SEQ ID NO: 2493
uuauacucugcugggagaa

SEQ ID NO: 193429 - RNA, 19 nt, Artificial Sequence
  Description of Artificial Sequence: Synthetic oligonucleotide
  Antisense strand to SEQ ID NO: 193428
uucucccagcagaguauaa

SEQ ID NO: 193430 - RNA, 19 nt, Artificial Sequence
  Description of Artificial Sequence: Synthetic oligonucleotide
  Sense strand starting at position 2535 of SEQ ID NO: 2493
uauacucugcugggagaaa

SEQ ID NO: 193431 - RNA, 19 nt, Artificial Sequence
  Description of Artificial Sequence: Synthetic oligonucleotide
  Antisense strand to SEQ ID NO: 193430
uuucucccagcagaguaua

SEQ ID NO: 193432 - RNA, 19 nt, Artificial Sequence
  Description of Artificial Sequence: Synthetic oligonucleotide
  Sense strand starting at position 2731 of SEQ ID NO: 2493
ucuuaugcuggacauaaau

SEQ ID NO: 193433 - RNA, 19 nt, Artificial Sequence
  Description of Artificial Sequence: Synthetic oligonucleotide
  Antisense strand to SEQ ID NO: 193432
auuuauguccagcauaaga

SEQ ID NO: 193434 - RNA, 19 nt, Artificial Sequence
  Description of Artificial Sequence: Synthetic oligonucleotide
  Sense strand starting at position 2889 of SEQ ID NO: 2493
aauuaauccuagguaguug

SEQ ID NO: 193435 - RNA, 19 nt, Artificial Sequence
  Description of Artificial Sequence: Synthetic oligonucleotide
  Antisense strand to SEQ ID NO: 193434
caacuaccuaggauuaauu

SEQ ID NO: 193436 - RNA, 19 nt, Artificial Sequence
  Description of Artificial Sequence: Synthetic oligonucleotide
  Sense strand starting at position 2913 of SEQ ID NO: 2493
agaaguguauagguguaau

SEQ ID NO: 193437 - RNA, 19 nt, Artificial Sequence
  Description of Artificial Sequence: Synthetic oligonucleotide
  Antisense strand to SEQ ID NO: 193436
auuacaccuauacacuucu

SEQ ID NO: 193438 - RNA, 19 nt, Artificial Sequence
  Description of Artificial Sequence: Synthetic oligonucleotide
  Sense strand starting at position 3036 of SEQ ID NO: 2493
gagcauucuuaugcauaga

SEQ ID NO: 193439 - RNA, 19 nt, Artificial Sequence
  Description of Artificial Sequence: Synthetic oligonucleotide
  Antisense strand to SEQ ID NO: 193438
ucuaugcauaagaaugcuc

SEQ ID NO: 193440 - RNA, 19 nt, Artificial Sequence
  Description of Artificial Sequence: Synthetic oligonucleotide
  Sense strand starting at position 3151 of SEQ ID NO: 2493
ggcaauugugcuguugugu

SEQ ID NO: 193441 - RNA, 19 nt, Artificial Sequence
  Description of Artificial Sequence: Synthetic oligonucleotide
  Antisense strand to SEQ ID NO: 193440
acacaacagcacaauugcc

SEQ ID NO: 193442 - RNA, 19 nt, Artificial Sequence
  Description of Artificial Sequence: Synthetic oligonucleotide
  Sense strand starting at position 3177 of SEQ ID NO: 2493
auagaaugugcuuacacag

SEQ ID NO: 193443 - RNA, 19 nt, Artificial Sequence
  Description of Artificial Sequence: Synthetic oligonucleotide
  Antisense strand to SEQ ID NO: 193442
cuguguaagcacauucuau

SEQ ID NO: 193444 - RNA, 19 nt, Artificial Sequence
  Description of Artificial Sequence: Synthetic oligonucleotide
  Sense strand starting at position 3201 of SEQ ID NO: 2493
gcagguauagccuacuaca

SEQ ID NO: 193445 - RNA, 19 nt, Artificial Sequence
  Description of Artificial Sequence: Synthetic oligonucleotide
  Antisense strand to SEQ ID NO: 193444
uguaguaggcuauaccugc

SEQ ID NO: 193446 - RNA, 19 nt, Artificial Sequence
  Description of Artificial Sequence: Synthetic oligonucleotide
  Sense strand starting at position 3405 of SEQ ID NO: 2493
acugaaaugucuuuaugca

SEQ ID NO: 193447 - RNA, 19 nt, Artificial Sequence
  Description of Artificial Sequence: Synthetic oligonucleotide
  Antisense strand to SEQ ID NO: 193446
ugcauaaagacauuucagu

SEQ ID NO: 193448 - RNA, 19 nt, Artificial Sequence
  Description of Artificial Sequence: Synthetic oligonucleotide
  Sense strand starting at position 3406 of SEQ ID NO: 2493
cugaaaugucuuuaugcaa

SEQ ID NO: 193449 - RNA, 19 nt, Artificial Sequence
  Description of Artificial Sequence: Synthetic oligonucleotide
  Antisense strand to SEQ ID NO: 193448
uugcauaaagacauuucag

SEQ ID NO: 193450 - RNA, 19 nt, Artificial Sequence
  Description of Artificial Sequence: Synthetic oligonucleotide
  Sense strand starting at position 3425 of SEQ ID NO: 2493
guaugauuauguuuaggag

SEQ ID NO: 193451 - RNA, 19 nt, Artificial Sequence
  Description of Artificial Sequence: Synthetic oligonucleotide
  Antisense strand to SEQ ID NO: 193450
cuccuaaacauaaucauac

SEQ ID NO: 193452 - RNA, 19 nt, Artificial Sequence
  Description of Artificial Sequence: Synthetic oligonucleotide
  Sense strand starting at position 3456 of SEQ ID NO: 2493
acuacucucuaguuaugau

SEQ ID NO: 193453 - RNA, 19 nt, Artificial Sequence
  Description of Artificial Sequence: Synthetic oligonucleotide
  Antisense strand to SEQ ID NO: 193452
aucauaacuagagaguagu

SEQ ID NO: 193454 - RNA, 19 nt, Artificial Sequence
  Description of Artificial Sequence: Synthetic oligonucleotide
  Sense strand starting at position 3503 of SEQ ID NO: 2493
uuuggucaucuaggaguua

SEQ ID NO: 193455 - RNA, 19 nt, Artificial Sequence
  Description of Artificial Sequence: Synthetic oligonucleotide
  Antisense strand to SEQ ID NO: 193454
uaacuccuagaugaccaaa

SEQ ID NO: 193456 - RNA, 19 nt, Artificial Sequence
  Description of Artificial Sequence: Synthetic oligonucleotide
  Sense strand starting at position 3519 of SEQ ID NO: 2493
uuagcagguguugauuaua

SEQ ID NO: 193457 - RNA, 19 nt, Artificial Sequence
  Description of Artificial Sequence: Synthetic oligonucleotide
  Antisense strand to SEQ ID NO: 193456
uauaaucaacaccugcuaa

SEQ ID NO: 193458 - RNA, 19 nt, Artificial Sequence
  Description of Artificial Sequence: Synthetic oligonucleotide
  Sense strand starting at position 3767 of SEQ ID NO: 2493
ggcuuugcuguguccuaua

SEQ ID NO: 193459 - RNA, 19 nt, Artificial Sequence
  Description of Artificial Sequence: Synthetic oligonucleotide
  Antisense strand to SEQ ID NO: 193458
uauaggacacagcaaagcc

SEQ ID NO: 193460 - RNA, 19 nt, Artificial Sequence
  Description of Artificial Sequence: Synthetic oligonucleotide
  Sense strand starting at position 3871 of SEQ ID NO: 2493
gcacguguucaguuuaggu

SEQ ID NO: 193461 - RNA, 19 nt, Artificial Sequence
  Description of Artificial Sequence: Synthetic oligonucleotide
  Antisense strand to SEQ ID NO: 193460
accuaaacugaacacgugc

SEQ ID NO: 193462 - RNA, 19 nt, Artificial Sequence
  Description of Artificial Sequence: Synthetic oligonucleotide
  Sense strand starting at position 3707 of SEQ ID NO: 2494
cuaggcaugugacuccaaa

SEQ ID NO: 193463 - RNA, 19 nt, Artificial Sequence
  Description of Artificial Sequence: Synthetic oligonucleotide
  Antisense strand to SEQ ID NO: 193462
uuuggagucacaugccuag

SEQ ID NO: 193464 - RNA, 19 nt, Artificial Sequence
  Description of Artificial Sequence: Synthetic oligonucleotide
  Sense strand starting at position 3629 of SEQ ID NO: 2494
gaaugagacuuagagaaac

SEQ ID NO: 193465 - RNA, 19 nt, Artificial Sequence
  Description of Artificial Sequence: Synthetic oligonucleotide
  Antisense strand to SEQ ID NO: 193464
guuucucuaagucucauuc

SEQ ID NO: 193466 - RNA, 19 nt, Artificial Sequence
  Description of Artificial Sequence: Synthetic oligonucleotide
  Sense strand starting at position 3581 of SEQ ID NO: 2494
acaguagcccuaugagauu

SEQ ID NO: 193467 - RNA, 19 nt, Artificial Sequence
  Description of Artificial Sequence: Synthetic oligonucleotide
  Antisense strand to SEQ ID NO: 193466
aaucucauagggcuacugu

SEQ ID NO: 193468 - RNA, 19 nt, Artificial Sequence
  Description of Artificial Sequence: Synthetic oligonucleotide
  Sense strand starting at position 3493 of SEQ ID NO: 2494
guuccaacuuauuuguagu

SEQ ID NO: 193469 - RNA, 19 nt, Artificial Sequence
  Description of Artificial Sequence: Synthetic oligonucleotide
  Antisense strand to SEQ ID NO: 193468
acuacaaauaaguuggaac

SEQ ID NO: 193470 - RNA, 19 nt, Artificial Sequence
  Description of Artificial Sequence: Synthetic oligonucleotide
  Sense strand starting at position 3483 of SEQ ID NO: 2494
ugugaaacauguuccaacu

SEQ ID NO: 193471 - RNA, 19 nt, Artificial Sequence
  Description of Artificial Sequence: Synthetic oligonucleotide
  Antisense strand to SEQ ID NO: 193470
aguuggaacauguuucaca

SEQ ID NO: 193472 - RNA, 19 nt, Artificial Sequence
  Description of Artificial Sequence: Synthetic oligonucleotide
  Sense strand starting at position 3441 of SEQ ID NO: 2494
ggagaauucuuagcuuuaa

SEQ ID NO: 193473 - RNA, 19 nt, Artificial Sequence
  Description of Artificial Sequence: Synthetic oligonucleotide
  Antisense strand to SEQ ID NO: 193472
uuaaagcuaagaauucucc

SEQ ID NO: 193474 - RNA, 19 nt, Artificial Sequence
  Description of Artificial Sequence: Synthetic oligonucleotide
  Sense strand starting at position 3438 of SEQ ID NO: 2494
auaggagaauucuuagcuu

SEQ ID NO: 193475 - RNA, 19 nt, Artificial Sequence
  Description of Artificial Sequence: Synthetic oligonucleotide
  Antisense strand to SEQ ID NO: 193474
aagcuaagaauucuccuau

SEQ ID NO: 193476 - RNA, 19 nt, Artificial Sequence
  Description of Artificial Sequence: Synthetic oligonucleotide
  Sense strand starting at position 3402 of SEQ ID NO: 2494
cugguaagagcucaaugca

SEQ ID NO: 193477 - RNA, 19 nt, Artificial Sequence
  Description of Artificial Sequence: Synthetic oligonucleotide
  Antisense strand to SEQ ID NO: 193476
ugcauugagcucuuaccag

SEQ ID NO: 193478 - RNA, 19 nt, Artificial Sequence
  Description of Artificial Sequence: Synthetic oligonucleotide
  Sense strand starting at position 3139 of SEQ ID NO: 2494
gugacacaugucugacaca

SEQ ID NO: 193479 - RNA, 19 nt, Artificial Sequence
  Description of Artificial Sequence: Synthetic oligonucleotide
  Antisense strand to SEQ ID NO: 193478
ugugucagacaugugucac

SEQ ID NO: 193480 - RNA, 19 nt, Artificial Sequence
  Description of Artificial Sequence: Synthetic oligonucleotide
  Sense strand starting at position 3129 of SEQ ID NO: 2494
uguaaagagcgugacacau

SEQ ID NO: 193481 - RNA, 19 nt, Artificial Sequence
  Description of Artificial Sequence: Synthetic oligonucleotide
  Antisense strand to SEQ ID NO: 193480
augugucacgcucuuuaca

SEQ ID NO: 193482 - RNA, 19 nt, Artificial Sequence
  Description of Artificial Sequence: Synthetic oligonucleotide
  Sense strand starting at position 3006 of SEQ ID NO: 2494
uugugaaaccuugggcaaa

SEQ ID NO: 193483 - RNA, 19 nt, Artificial Sequence
  Description of Artificial Sequence: Synthetic oligonucleotide
  Antisense strand to SEQ ID NO: 193482
uuugcccaagguuucacaa

SEQ ID NO: 193484 - RNA, 19 nt, Artificial Sequence
  Description of Artificial Sequence: Synthetic oligonucleotide
  Sense strand starting at position 2895 of SEQ ID NO: 2494
ggguguuaugaagguuaaa

SEQ ID NO: 193485 - RNA, 19 nt, Artificial Sequence
  Description of Artificial Sequence: Synthetic oligonucleotide
  Antisense strand to SEQ ID NO: 193484
uuuaaccuucauaacaccc

SEQ ID NO: 193486 - RNA, 19 nt, Artificial Sequence
  Description of Artificial Sequence: Synthetic oligonucleotide
  Sense strand starting at position 2884 of SEQ ID NO: 2494
cuuacaucacaggguguua

SEQ ID NO: 193487 - RNA, 19 nt, Artificial Sequence
  Description of Artificial Sequence: Synthetic oligonucleotide
  Antisense strand to SEQ ID NO: 193486
uaacacccugugauguaag

SEQ ID NO: 193488 - RNA, 19 nt, Artificial Sequence
  Description of Artificial Sequence: Synthetic oligonucleotide
  Sense strand starting at position 2758 of SEQ ID NO: 2494
uuuguagucagacauggau

SEQ ID NO: 193489 - RNA, 19 nt, Artificial Sequence
  Description of Artificial Sequence: Synthetic oligonucleotide
  Antisense strand to SEQ ID NO: 193488
auccaugucugacuacaaa

SEQ ID NO: 193490 - RNA, 19 nt, Artificial Sequence
  Description of Artificial Sequence: Synthetic oligonucleotide
  Sense strand starting at position 2754 of SEQ ID NO: 2494
gggcuuuguagucagacau

SEQ ID NO: 193491 - RNA, 19 nt, Artificial Sequence
  Description of Artificial Sequence: Synthetic oligonucleotide
  Antisense strand to SEQ ID NO: 193490
augucugacuacaaagccc

SEQ ID NO: 193492 - RNA, 19 nt, Artificial Sequence
  Description of Artificial Sequence: Synthetic oligonucleotide
  Sense strand starting at position 2734 of SEQ ID NO: 2494
uaaugugguguugagaaug

SEQ ID NO: 193493 - RNA, 19 nt, Artificial Sequence
  Description of Artificial Sequence: Synthetic oligonucleotide
  Antisense strand to SEQ ID NO: 193492
cauucucaacaccacauua

SEQ ID NO: 193494 - RNA, 19 nt, Artificial Sequence
  Description of Artificial Sequence: Synthetic oligonucleotide
  Sense strand starting at position 2634 of SEQ ID NO: 2494
uuccuagguguuggaagaa

SEQ ID NO: 193495 - RNA, 19 nt, Artificial Sequence
  Description of Artificial Sequence: Synthetic oligonucleotide
  Antisense strand to SEQ ID NO: 193494
uucuuccaacaccuaggaa

SEQ ID NO: 193496 - RNA, 19 nt, Artificial Sequence
  Description of Artificial Sequence: Synthetic oligonucleotide
  Sense strand starting at position 2606 of SEQ ID NO: 2494
guaaaucaguuaguacaga

SEQ ID NO: 193497 - RNA, 19 nt, Artificial Sequence
  Description of Artificial Sequence: Synthetic oligonucleotide
  Antisense strand to SEQ ID NO: 193496
ucuguacuaacugauuuac

SEQ ID NO: 193498 - RNA, 19 nt, Artificial Sequence
  Description of Artificial Sequence: Synthetic oligonucleotide
  Sense strand starting at position 2127 of SEQ ID NO: 2494
auagauaugucaucuucua

SEQ ID NO: 193499 - RNA, 19 nt, Artificial Sequence
  Description of Artificial Sequence: Synthetic oligonucleotide
  Antisense strand to SEQ ID NO: 193498
uagaagaugacauaucuau

SEQ ID NO: 193500 - RNA, 19 nt, Artificial Sequence
  Description of Artificial Sequence: Synthetic oligonucleotide
  Sense strand starting at position 2123 of SEQ ID NO: 2494
gccaauagauaugucaucu

SEQ ID NO: 193501 - RNA, 19 nt, Artificial Sequence
  Description of Artificial Sequence: Synthetic oligonucleotide
  Antisense strand to SEQ ID NO: 193500
agaugacauaucuauuggc

SEQ ID NO: 193502 - RNA, 19 nt, Artificial Sequence
  Description of Artificial Sequence: Synthetic oligonucleotide
  Sense strand starting at position 1527 of SEQ ID NO: 2494
gcuuguucuagaugggaag

SEQ ID NO: 193503 - RNA, 19 nt, Artificial Sequence
  Description of Artificial Sequence: Synthetic oligonucleotide
  Antisense strand to SEQ ID NO: 193502
cuucccaucuagaacaagc

SEQ ID NO: 193504 - RNA, 19 nt, Artificial Sequence
  Description of Artificial Sequence: Synthetic oligonucleotide
  Sense strand starting at position 1525 of SEQ ID NO: 2494
augcuuguucuagauggga

SEQ ID NO: 193505 - RNA, 19 nt, Artificial Sequence
  Description of Artificial Sequence: Synthetic oligonucleotide
  Antisense strand to SEQ ID NO: 193504
ucccaucuagaacaagcau

SEQ ID NO: 193506 - RNA, 19 nt, Artificial Sequence
  Description of Artificial Sequence: Synthetic oligonucleotide
  Sense strand starting at position 1520 of SEQ ID NO: 2494
uagauaugcuuguucuaga

SEQ ID NO: 193507 - RNA, 19 nt, Artificial Sequence
  Description of Artificial Sequence: Synthetic oligonucleotide
  Antisense strand to SEQ ID NO: 193506
ucuagaacaagcauaucua

SEQ ID NO: 193508 - RNA, 19 nt, Artificial Sequence
  Description of Artificial Sequence: Synthetic oligonucleotide
  Sense strand starting at position 1359 of SEQ ID NO: 2494
aggaaucaguggguaagua

SEQ ID NO: 193509 - RNA, 19 nt, Artificial Sequence
  Description of Artificial Sequence: Synthetic oligonucleotide
  Antisense strand to SEQ ID NO: 193508
uacuuacccacugauuccu

SEQ ID NO: 193510 - RNA, 19 nt, Artificial Sequence
  Description of Artificial Sequence: Synthetic oligonucleotide
  Sense strand starting at position 1358 of SEQ ID NO: 2494
gaggaaucaguggguaagu

SEQ ID NO: 193511 - RNA, 19 nt, Artificial Sequence
  Description of Artificial Sequence: Synthetic oligonucleotide
  Antisense strand to SEQ ID NO: 193510
acuuacccacugauuccuc

SEQ ID NO: 193512 - RNA, 19 nt, Artificial Sequence
  Description of Artificial Sequence: Synthetic oligonucleotide
  Sense strand starting at position 1333 of SEQ ID NO: 2494
gauccuuggacguggaaga

SEQ ID NO: 193513 - RNA, 19 nt, Artificial Sequence
  Description of Artificial Sequence: Synthetic oligonucleotide
  Antisense strand to SEQ ID NO: 193512
ucuuccacguccaaggauc

SEQ ID NO: 193514 - RNA, 19 nt, Artificial Sequence
  Description of Artificial Sequence: Synthetic oligonucleotide
  Sense strand starting at position 1197 of SEQ ID NO: 2494
uaaucagauuuguagguga

SEQ ID NO: 193515 - RNA, 19 nt, Artificial Sequence
  Description of Artificial Sequence: Synthetic oligonucleotide
  Antisense strand to SEQ ID NO: 193514
ucaccuacaaaucugauua

SEQ ID NO: 193516 - RNA, 19 nt, Artificial Sequence
  Description of Artificial Sequence: Synthetic oligonucleotide
  Sense strand starting at position 1163 of SEQ ID NO: 2494
cugggugccaaugaaaguu

SEQ ID NO: 193517 - RNA, 19 nt, Artificial Sequence
  Description of Artificial Sequence: Synthetic oligonucleotide
  Antisense strand to SEQ ID NO: 193516
aacuuucauuggcacccag

SEQ ID NO: 193518 - RNA, 19 nt, Artificial Sequence
  Description of Artificial Sequence: Synthetic oligonucleotide
  Sense strand starting at position 1136 of SEQ ID NO: 2494
ggacaagguguuuggacuu

SEQ ID NO: 193519 - RNA, 19 nt, Artificial Sequence
  Description of Artificial Sequence: Synthetic oligonucleotide
  Antisense strand to SEQ ID NO: 193518
aaguccaaacaccuugucc

SEQ ID NO: 193520 - RNA, 19 nt, Artificial Sequence
  Description of Artificial Sequence: Synthetic oligonucleotide
  Sense strand starting at position 967 of SEQ ID NO: 2494
gaaguucucuuggcaaaga

SEQ ID NO: 193521 - RNA, 19 nt, Artificial Sequence
  Description of Artificial Sequence: Synthetic oligonucleotide
  Antisense strand to SEQ ID NO: 193520
ucuuugccaagagaacuuc

SEQ ID NO: 193522 - RNA, 19 nt, Artificial Sequence
  Description of Artificial Sequence: Synthetic oligonucleotide
  Sense strand starting at position 966 of SEQ ID NO: 2494
agaaguucucuuggcaaag

SEQ ID NO: 193523 - RNA, 19 nt, Artificial Sequence
  Description of Artificial Sequence: Synthetic oligonucleotide
  Antisense strand to SEQ ID NO: 193522
cuuugccaagagaacuucu

SEQ ID NO: 193524 - RNA, 19 nt, Artificial Sequence
  Description of Artificial Sequence: Synthetic oligonucleotide
  Sense strand starting at position 963 of SEQ ID NO: 2494
uaaagaaguucucuuggca

SEQ ID NO: 193525 - RNA, 19 nt, Artificial Sequence
  Description of Artificial Sequence: Synthetic oligonucleotide
  Antisense strand to SEQ ID NO: 193524
ugccaagagaacuucuuua

SEQ ID NO: 193526 - RNA, 19 nt, Artificial Sequence
  Description of Artificial Sequence: Synthetic oligonucleotide
  Sense strand starting at position 919 of SEQ ID NO: 2494
gcuuaagggaauugagcaa

SEQ ID NO: 193527 - RNA, 19 nt, Artificial Sequence
  Description of Artificial Sequence: Synthetic oligonucleotide
  Antisense strand to SEQ ID NO: 193526
uugcucaauucccuuaagc

SEQ ID NO: 193528 - RNA, 19 nt, Artificial Sequence
  Description of Artificial Sequence: Synthetic oligonucleotide
  Sense strand starting at position 784 of SEQ ID NO: 2494
aggugauugagacacuguu

SEQ ID NO: 193529 - RNA, 19 nt, Artificial Sequence
  Description of Artificial Sequence: Synthetic oligonucleotide
  Antisense strand to SEQ ID NO: 193528
aacagugucucaaucaccu

SEQ ID NO: 193530 - RNA, 19 nt, Artificial Sequence
  Description of Artificial Sequence: Synthetic oligonucleotide
  Sense strand starting at position 640 of SEQ ID NO: 2494
cuggaaauccacuggcaau

SEQ ID NO: 193531 - RNA, 19 nt, Artificial Sequence
  Description of Artificial Sequence: Synthetic oligonucleotide
  Antisense strand to SEQ ID NO: 193530
auugccaguggauuuccag

SEQ ID NO: 193532 - RNA, 19 nt, Artificial Sequence
  Description of Artificial Sequence: Synthetic oligonucleotide
  Sense strand starting at position 452 of SEQ ID NO: 2494
cugaguacagugugaauau

SEQ ID NO: 193533 - RNA, 19 nt, Artificial Sequence
  Description of Artificial Sequence: Synthetic oligonucleotide
  Antisense strand to SEQ ID NO: 193532
auauucacacuguacucag

SEQ ID NO: 193534 - RNA, 19 nt, Artificial Sequence
  Description of Artificial Sequence: Synthetic oligonucleotide
  Sense strand starting at position 299 of SEQ ID NO: 2494
ggcccauuuggcugacagu

SEQ ID NO: 193535 - RNA, 19 nt, Artificial Sequence
  Description of Artificial Sequence: Synthetic oligonucleotide
  Antisense strand to SEQ ID NO: 193534
acugucagccaaaugggcc

SEQ ID NO: 193536 - RNA, 19 nt, Artificial Sequence
  Description of Artificial Sequence: Synthetic oligonucleotide
  Sense strand starting at position 251 of SEQ ID NO: 2494
gucugugaccuccaaagag

SEQ ID NO: 193537 - RNA, 19 nt, Artificial Sequence
  Description of Artificial Sequence: Synthetic oligonucleotide
  Antisense strand to SEQ ID NO: 193536
cucuuuggaggucacagac

SEQ ID NO: 193538 - RNA, 19 nt, Artificial Sequence
  Description of Artificial Sequence: Synthetic oligonucleotide
  Sense strand starting at position 154 of SEQ ID NO: 2494
cuccuagggcaguaaguau

SEQ ID NO: 193539 - RNA, 19 nt, Artificial Sequence
  Description of Artificial Sequence: Synthetic oligonucleotide
  Antisense strand to SEQ ID NO: 193538
auacuuacugcccuaggag

SEQ ID NO: 193540 - RNA, 19 nt, Artificial Sequence
  Description of Artificial Sequence: Synthetic oligonucleotide
  Sense strand starting at position 8 of SEQ ID NO: 2494
ucagcuaagugaucucaaa

SEQ ID NO: 193541 - RNA, 19 nt, Artificial Sequence
  Description of Artificial Sequence: Synthetic oligonucleotide
  Antisense strand to SEQ ID NO: 193540
uuugagaucacuuagcuga

SEQ ID NO: 193542 - RNA, 19 nt, Artificial Sequence
  Description of Artificial Sequence: Synthetic oligonucleotide
  Sense strand starting at position 93 of SEQ ID NO: 2495
ucuuucugugcuuguuuaa

SEQ ID NO: 193543 - RNA, 19 nt, Artificial Sequence
  Description of Artificial Sequence: Synthetic oligonucleotide
  Antisense strand to SEQ ID NO: 193542
uuaaacaagcacagaaaga

SEQ ID NO: 193544 - RNA, 19 nt, Artificial Sequence
  Description of Artificial Sequence: Synthetic oligonucleotide
  Sense strand starting at position 100 of SEQ ID NO: 2495
gugcuuguuuaauucuaaa

SEQ ID NO: 193545 - RNA, 19 nt, Artificial Sequence
  Description of Artificial Sequence: Synthetic oligonucleotide
  Antisense strand to SEQ ID NO: 193544
uuuagaauuaaacaagcac

SEQ ID NO: 193546 - RNA, 19 nt, Artificial Sequence
  Description of Artificial Sequence: Synthetic oligonucleotide
  Sense strand starting at position 171 of SEQ ID NO: 2495
gagcauauaguguacaaua

SEQ ID NO: 193547 - RNA, 19 nt, Artificial Sequence
  Description of Artificial Sequence: Synthetic oligonucleotide
  Antisense strand to SEQ ID NO: 193546
uauuguacacuauaugcuc

SEQ ID NO: 193548 - RNA, 19 nt, Artificial Sequence
  Description of Artificial Sequence: Synthetic oligonucleotide
  Sense strand starting at position 173 of SEQ ID NO: 2495
gcauauaguguacaauaaa

SEQ ID NO: 193549 - RNA, 19 nt, Artificial Sequence
  Description of Artificial Sequence: Synthetic oligonucleotide
  Antisense strand to SEQ ID NO: 193548
uuuauuguacacuauaugc

SEQ ID NO: 193550 - RNA, 19 nt, Artificial Sequence
  Description of Artificial Sequence: Synthetic oligonucleotide
  Sense strand starting at position 206 of SEQ ID NO: 2495
guacuuccagaaugccaua

SEQ ID NO: 193551 - RNA, 19 nt, Artificial Sequence
  Description of Artificial Sequence: Synthetic oligonucleotide
  Antisense strand to SEQ ID NO: 193550
uauggcauucuggaaguac

SEQ ID NO: 193552 - RNA, 19 nt, Artificial Sequence
  Description of Artificial Sequence: Synthetic oligonucleotide
  Sense strand starting at position 598 of SEQ ID NO: 2495
uccaucuucgguuauuguu

SEQ ID NO: 193553 - RNA, 19 nt, Artificial Sequence
  Description of Artificial Sequence: Synthetic oligonucleotide
  Antisense strand to SEQ ID NO: 193552
aacaauaaccgaagaugga

SEQ ID NO: 193554 - RNA, 19 nt, Artificial Sequence
  Description of Artificial Sequence: Synthetic oligonucleotide
  Sense strand starting at position 611 of SEQ ID NO: 2495
auuguuaguccgcagccua

SEQ ID NO: 193555 - RNA, 19 nt, Artificial Sequence
  Description of Artificial Sequence: Synthetic oligonucleotide
  Antisense strand to SEQ ID NO: 193554
uaggcugcggacuaacaau

SEQ ID NO: 193556 - RNA, 19 nt, Artificial Sequence
  Description of Artificial Sequence: Synthetic oligonucleotide
  Sense strand starting at position 755 of SEQ ID NO: 2495
ggcuauagauugccucuga

SEQ ID NO: 193557 - RNA, 19 nt, Artificial Sequence
  Description of Artificial Sequence: Synthetic oligonucleotide
  Antisense strand to SEQ ID NO: 193556
ucagaggcaaucuauagcc

SEQ ID NO: 193558 - RNA, 19 nt, Artificial Sequence
  Description of Artificial Sequence: Synthetic oligonucleotide
  Sense strand starting at position 759 of SEQ ID NO: 2495
auagauugccucugacagu

SEQ ID NO: 193559 - RNA, 19 nt, Artificial Sequence
  Description of Artificial Sequence: Synthetic oligonucleotide
  Antisense strand to SEQ ID NO: 193558
acugucagaggcaaucuau

SEQ ID NO: 193560 - RNA, 19 nt, Artificial Sequence
  Description of Artificial Sequence: Synthetic oligonucleotide
  Sense strand starting at position 802 of SEQ ID NO: 2495
aaccgcuuguuccagauuu

SEQ ID NO: 193561 - RNA, 19 nt, Artificial Sequence
  Description of Artificial Sequence: Synthetic oligonucleotide
  Antisense strand to SEQ ID NO: 193560
aaaucuggaacaagcgguu

SEQ ID NO: 193562 - RNA, 19 nt, Artificial Sequence
  Description of Artificial Sequence: Synthetic oligonucleotide
  Sense strand starting at position 804 of SEQ ID NO: 2495
ccgcuuguuccagauuuac

SEQ ID NO: 193563 - RNA, 19 nt, Artificial Sequence
  Description of Artificial Sequence: Synthetic oligonucleotide
  Antisense strand to SEQ ID NO: 193562
guaaaucuggaacaagcgg

SEQ ID NO: 193564 - RNA, 19 nt, Artificial Sequence
  Description of Artificial Sequence: Synthetic oligonucleotide
  Sense strand starting at position 1006 of SEQ ID NO: 2495
agugguggaccugagugaa

SEQ ID NO: 193565 - RNA, 19 nt, Artificial Sequence
  Description of Artificial Sequence: Synthetic oligonucleotide
  Antisense strand to SEQ ID NO: 193564
uucacucagguccaccacu

SEQ ID NO: 193566 - RNA, 19 nt, Artificial Sequence
  Description of Artificial Sequence: Synthetic oligonucleotide
  Sense strand starting at position 1014 of SEQ ID NO: 2495
accugagugaaagguugaa

SEQ ID NO: 193567 - RNA, 19 nt, Artificial Sequence
  Description of Artificial Sequence: Synthetic oligonucleotide
  Antisense strand to SEQ ID NO: 193566
uucaaccuuucacucaggu

SEQ ID NO: 193568 - RNA, 19 nt, Artificial Sequence
  Description of Artificial Sequence: Synthetic oligonucleotide
  Sense strand starting at position 1041 of SEQ ID NO: 2495
uugugacuuguucguccuu

SEQ ID NO: 193569 - RNA, 19 nt, Artificial Sequence
  Description of Artificial Sequence: Synthetic oligonucleotide
  Antisense strand to SEQ ID NO: 193568
aaggacgaacaagucacaa

SEQ ID NO: 193570 - RNA, 19 nt, Artificial Sequence
  Description of Artificial Sequence: Synthetic oligonucleotide
  Sense strand starting at position 1454 of SEQ ID NO: 2495
gcucauuccgcgggaagga

SEQ ID NO: 193571 - RNA, 19 nt, Artificial Sequence
  Description of Artificial Sequence: Synthetic oligonucleotide
  Antisense strand to SEQ ID NO: 193570
uccuucccgcggaaugagc

SEQ ID NO: 193572 - RNA, 19 nt, Artificial Sequence
  Description of Artificial Sequence: Synthetic oligonucleotide
  Sense strand starting at position 1566 of SEQ ID NO: 2495
ggcgcaguccaguaaggaa

SEQ ID NO: 193573 - RNA, 19 nt, Artificial Sequence
  Description of Artificial Sequence: Synthetic oligonucleotide
  Antisense strand to SEQ ID NO: 193572
uuccuuacuggacugcgcc

SEQ ID NO: 193574 - RNA, 19 nt, Artificial Sequence
  Description of Artificial Sequence: Synthetic oligonucleotide
  Sense strand starting at position 2195 of SEQ ID NO: 2495
acaggaauggacuguguga

SEQ ID NO: 193575 - RNA, 19 nt, Artificial Sequence
  Description of Artificial Sequence: Synthetic oligonucleotide
  Antisense strand to SEQ ID NO: 193574
ucacacaguccauuccugu

SEQ ID NO: 193576 - RNA, 19 nt, Artificial Sequence
  Description of Artificial Sequence: Synthetic oligonucleotide
  Sense strand starting at position 2249 of SEQ ID NO: 2495
agccgccuccgugaaguua

SEQ ID NO: 193577 - RNA, 19 nt, Artificial Sequence
  Description of Artificial Sequence: Synthetic oligonucleotide
  Antisense strand to SEQ ID NO: 193576
uaacuucacggaggcggcu

SEQ ID NO: 193578 - RNA, 19 nt, Artificial Sequence
  Description of Artificial Sequence: Synthetic oligonucleotide
  Sense strand starting at position 2396 of SEQ ID NO: 2495
ucagaaaguucggaugaug

SEQ ID NO: 193579 - RNA, 19 nt, Artificial Sequence
  Description of Artificial Sequence: Synthetic oligonucleotide
  Antisense strand to SEQ ID NO: 193578
caucauccgaacuuucuga

SEQ ID NO: 193580 - RNA, 19 nt, Artificial Sequence
  Description of Artificial Sequence: Synthetic oligonucleotide
  Sense strand starting at position 2608 of SEQ ID NO: 2495
gguagaauucucugauccc

SEQ ID NO: 193581 - RNA, 19 nt, Artificial Sequence
  Description of Artificial Sequence: Synthetic oligonucleotide
  Antisense strand to SEQ ID NO: 193580
gggaucagagaauucuacc

SEQ ID NO: 193582 - RNA, 19 nt, Artificial Sequence
  Description of Artificial Sequence: Synthetic oligonucleotide
  Sense strand starting at position 2684 of SEQ ID NO: 2495
accuuuacauaguuguauu

SEQ ID NO: 193583 - RNA, 19 nt, Artificial Sequence
  Description of Artificial Sequence: Synthetic oligonucleotide
  Antisense strand to SEQ ID NO: 193582
aauacaacuauguaaaggu

SEQ ID NO: 193584 - RNA, 19 nt, Artificial Sequence
  Description of Artificial Sequence: Synthetic oligonucleotide
  Sense strand starting at position 2712 of SEQ ID NO: 2495
uuguuuaaugucugacugu

SEQ ID NO: 193585 - RNA, 19 nt, Artificial Sequence
  Description of Artificial Sequence: Synthetic oligonucleotide
  Antisense strand to SEQ ID NO: 193584
acagucagacauuaaacaa

SEQ ID NO: 193586 - RNA, 19 nt, Artificial Sequence
  Description of Artificial Sequence: Synthetic oligonucleotide
  Sense strand starting at position 2715 of SEQ ID NO: 2495
uuuaaugucugacugucaa

SEQ ID NO: 193587 - RNA, 19 nt, Artificial Sequence
  Description of Artificial Sequence: Synthetic oligonucleotide
  Antisense strand to SEQ ID NO: 193586
uugacagucagacauuaaa

SEQ ID NO: 193588 - RNA, 19 nt, Artificial Sequence
  Description of Artificial Sequence: Synthetic oligonucleotide
  Sense strand starting at position 2736 of SEQ ID NO: 2495
ccaugagagugagaaucau

SEQ ID NO: 193589 - RNA, 19 nt, Artificial Sequence
  Description of Artificial Sequence: Synthetic oligonucleotide
  Antisense strand to SEQ ID NO: 193588
augauucucacucucaugg

SEQ ID NO: 193590 - RNA, 19 nt, Artificial Sequence
  Description of Artificial Sequence: Synthetic oligonucleotide
  Sense strand starting at position 2858 of SEQ ID NO: 2495
acuguuucuugcucgauca

SEQ ID NO: 193591 - RNA, 19 nt, Artificial Sequence
  Description of Artificial Sequence: Synthetic oligonucleotide
  Antisense strand to SEQ ID NO: 193590
ugaucgagcaagaaacagu

SEQ ID NO: 193592 - RNA, 19 nt, Artificial Sequence
  Description of Artificial Sequence: Synthetic oligonucleotide
  Sense strand starting at position 2859 of SEQ ID NO: 2495
cuguuucuugcucgaucaa

SEQ ID NO: 193593 - RNA, 19 nt, Artificial Sequence
  Description of Artificial Sequence: Synthetic oligonucleotide
  Antisense strand to SEQ ID NO: 193592
uugaucgagcaagaaacag

SEQ ID NO: 193594 - RNA, 19 nt, Artificial Sequence
  Description of Artificial Sequence: Synthetic oligonucleotide
  Sense strand starting at position 2860 of SEQ ID NO: 2495
uguuucuugcucgaucaag

SEQ ID NO: 193595 - RNA, 19 nt, Artificial Sequence
  Description of Artificial Sequence: Synthetic oligonucleotide
  Antisense strand to SEQ ID NO: 193594
cuugaucgagcaagaaaca

SEQ ID NO: 193596 - RNA, 19 nt, Artificial Sequence
  Description of Artificial Sequence: Synthetic oligonucleotide
  Sense strand starting at position 2896 of SEQ ID NO: 2495
agaauuugcugacaaacua

SEQ ID NO: 193597 - RNA, 19 nt, Artificial Sequence
  Description of Artificial Sequence: Synthetic oligonucleotide
  Antisense strand to SEQ ID NO: 193596
uaguuugucagcaaauucu

SEQ ID NO: 193598 - RNA, 19 nt, Artificial Sequence
  Description of Artificial Sequence: Synthetic oligonucleotide
  Sense strand starting at position 2955 of SEQ ID NO: 2495
gaguuucuauaguugaguu

SEQ ID NO: 193599 - RNA, 19 nt, Artificial Sequence
  Description of Artificial Sequence: Synthetic oligonucleotide
  Antisense strand to SEQ ID NO: 193598
aacucaacuauagaaacuc

SEQ ID NO: 193600 - RNA, 19 nt, Artificial Sequence
  Description of Artificial Sequence: Synthetic oligonucleotide
  Sense strand starting at position 2956 of SEQ ID NO: 2495
aguuucuauaguugaguuu

SEQ ID NO: 193601 - RNA, 19 nt, Artificial Sequence
  Description of Artificial Sequence: Synthetic oligonucleotide
  Antisense strand to SEQ ID NO: 193600
aaacucaacuauagaaacu

SEQ ID NO: 193602 - RNA, 19 nt, Artificial Sequence
  Description of Artificial Sequence: Synthetic oligonucleotide
  Sense strand starting at position 2987 of SEQ ID NO: 2495
aagagagauuuagagugua

SEQ ID NO: 193603 - RNA, 19 nt, Artificial Sequence
  Description of Artificial Sequence: Synthetic oligonucleotide
  Antisense strand to SEQ ID NO: 193602
uacacucuaaaucucucuu

SEQ ID NO: 193604 - RNA, 19 nt, Artificial Sequence
  Description of Artificial Sequence: Synthetic oligonucleotide
  Sense strand starting at position 3070 of SEQ ID NO: 2495
gcuguaaucucagaauuaa

SEQ ID NO: 193605 - RNA, 19 nt, Artificial Sequence
  Description of Artificial Sequence: Synthetic oligonucleotide
  Antisense strand to SEQ ID NO: 193604
uuaauucugagauuacagc

SEQ ID NO: 193606 - RNA, 19 nt, Artificial Sequence
  Description of Artificial Sequence: Synthetic oligonucleotide
  Sense strand starting at position 3097 of SEQ ID NO: 2495
ggcagaauugggugugaau

SEQ ID NO: 193607 - RNA, 19 nt, Artificial Sequence
  Description of Artificial Sequence: Synthetic oligonucleotide
  Antisense strand to SEQ ID NO: 193606
auucacacccaauucugcc

SEQ ID NO: 193608 - RNA, 19 nt, Artificial Sequence
  Description of Artificial Sequence: Synthetic oligonucleotide
  Sense strand starting at position 3099 of SEQ ID NO: 2495
cagaauugggugugaauca

SEQ ID NO: 193609 - RNA, 19 nt, Artificial Sequence
  Description of Artificial Sequence: Synthetic oligonucleotide
  Antisense strand to SEQ ID NO: 193608
ugauucacacccaauucug

SEQ ID NO: 193610 - RNA, 19 nt, Artificial Sequence
  Description of Artificial Sequence: Synthetic oligonucleotide
  Sense strand starting at position 3190 of SEQ ID NO: 2495
acacauaaauguuguaaga

SEQ ID NO: 193611 - RNA, 19 nt, Artificial Sequence
  Description of Artificial Sequence: Synthetic oligonucleotide
  Antisense strand to SEQ ID NO: 193610
ucuuacaacauuuaugugu

SEQ ID NO: 193612 - RNA, 19 nt, Artificial Sequence
  Description of Artificial Sequence: Synthetic oligonucleotide
  Sense strand starting at position 3472 of SEQ ID NO: 2495
guaguagguacucaauaag

SEQ ID NO: 193613 - RNA, 19 nt, Artificial Sequence
  Description of Artificial Sequence: Synthetic oligonucleotide
  Antisense strand to SEQ ID NO: 193612
cuuauugaguaccuacuac

SEQ ID NO: 193614 - RNA, 19 nt, Artificial Sequence
  Description of Artificial Sequence: Synthetic oligonucleotide
  Sense strand starting at position 3482 of SEQ ID NO: 2495
cucaauaaguaucuguuua

SEQ ID NO: 193615 - RNA, 19 nt, Artificial Sequence
  Description of Artificial Sequence: Synthetic oligonucleotide
  Antisense strand to SEQ ID NO: 193614
uaaacagauacuuauugag

SEQ ID NO: 193616 - RNA, 19 nt, Artificial Sequence
  Description of Artificial Sequence: Synthetic oligonucleotide
  Sense strand starting at position 3490 of SEQ ID NO: 2495
guaucuguuuaggccagau

SEQ ID NO: 193617 - RNA, 19 nt, Artificial Sequence
  Description of Artificial Sequence: Synthetic oligonucleotide
  Antisense strand to SEQ ID NO: 193616
aucuggccuaaacagauac

SEQ ID NO: 193618 - RNA, 19 nt, Artificial Sequence
  Description of Artificial Sequence: Synthetic oligonucleotide
  Sense strand starting at position 3818 of SEQ ID NO: 2495
cuguuuauauugguaaaug

SEQ ID NO: 193619 - RNA, 19 nt, Artificial Sequence
  Description of Artificial Sequence: Synthetic oligonucleotide
  Antisense strand to SEQ ID NO: 193618
cauuuaccaauauaaacag

SEQ ID NO: 193620 - RNA, 19 nt, Artificial Sequence
  Description of Artificial Sequence: Synthetic oligonucleotide
  Sense strand starting at position 3897 of SEQ ID NO: 2495
ccuugaaucugguaccaca

SEQ ID NO: 193621 - RNA, 19 nt, Artificial Sequence
  Description of Artificial Sequence: Synthetic oligonucleotide
  Antisense strand to SEQ ID NO: 193620
ugugguaccagauucaagg

SEQ ID NO: 193622 - RNA, 19 nt, Artificial Sequence
  Description of Artificial Sequence: Synthetic oligonucleotide
  Sense strand starting at position 3628 of SEQ ID NO: 2496
gcauaugucccaggccuua

SEQ ID NO: 193623 - RNA, 19 nt, Artificial Sequence
  Description of Artificial Sequence: Synthetic oligonucleotide
  Antisense strand to SEQ ID NO: 193622
uaaggccugggacauaugc

SEQ ID NO: 193624 - RNA, 19 nt, Artificial Sequence
  Description of Artificial Sequence: Synthetic oligonucleotide
  Sense strand starting at position 3601 of SEQ ID NO: 2496
ccagcauaucuagaggugu

SEQ ID NO: 193625 - RNA, 19 nt, Artificial Sequence
  Description of Artificial Sequence: Synthetic oligonucleotide
  Antisense strand to SEQ ID NO: 193624
acaccucuagauaugcugg

SEQ ID NO: 193626 - RNA, 19 nt, Artificial Sequence
  Description of Artificial Sequence: Synthetic oligonucleotide
  Sense strand starting at position 3580 of SEQ ID NO: 2496
ucucauaagguuugacuau

SEQ ID NO: 193627 - RNA, 19 nt, Artificial Sequence
  Description of Artificial Sequence: Synthetic oligonucleotide
  Antisense strand to SEQ ID NO: 193626
auagucaaaccuuaugaga

SEQ ID NO: 193628 - RNA, 19 nt, Artificial Sequence
  Description of Artificial Sequence: Synthetic oligonucleotide
  Sense strand starting at position 3566 of SEQ ID NO: 2496
cugguaaguuauguucuca

SEQ ID NO: 193629 - RNA, 19 nt, Artificial Sequence
  Description of Artificial Sequence: Synthetic oligonucleotide
  Antisense strand to SEQ ID NO: 193628
ugagaacauaacuuaccag

SEQ ID NO: 193630 - RNA, 19 nt, Artificial Sequence
  Description of Artificial Sequence: Synthetic oligonucleotide
  Sense strand starting at position 3558 of SEQ ID NO: 2496
uauagaaccugguaaguua

SEQ ID NO: 193631 - RNA, 19 nt, Artificial Sequence
  Description of Artificial Sequence: Synthetic oligonucleotide
  Antisense strand to SEQ ID NO: 193630
uaacuuaccagguucuaua

SEQ ID NO: 193632 - RNA, 19 nt, Artificial Sequence
  Description of Artificial Sequence: Synthetic oligonucleotide
  Sense strand starting at position 3556 of SEQ ID NO: 2496
aauauagaaccugguaagu

SEQ ID NO: 193633 - RNA, 19 nt, Artificial Sequence
  Description of Artificial Sequence: Synthetic oligonucleotide
  Antisense strand to SEQ ID NO: 193632
acuuaccagguucuauauu

SEQ ID NO: 193634 - RNA, 19 nt, Artificial Sequence
  Description of Artificial Sequence: Synthetic oligonucleotide
  Sense strand starting at position 3495 of SEQ ID NO: 2496
gcccaauggagaggauauu

SEQ ID NO: 193635 - RNA, 19 nt, Artificial Sequence
  Description of Artificial Sequence: Synthetic oligonucleotide
  Antisense strand to SEQ ID NO: 193634
aauauccucuccauugggc

SEQ ID NO: 193636 - RNA, 19 nt, Artificial Sequence
  Description of Artificial Sequence: Synthetic oligonucleotide
  Sense strand starting at position 3475 of SEQ ID NO: 2496
cagucauuuccucggcuuu

SEQ ID NO: 193637 - RNA, 19 nt, Artificial Sequence
  Description of Artificial Sequence: Synthetic oligonucleotide
  Antisense strand to SEQ ID NO: 193636
aaagccgaggaaaugacug

SEQ ID NO: 193638 - RNA, 19 nt, Artificial Sequence
  Description of Artificial Sequence: Synthetic oligonucleotide
  Sense strand starting at position 3474 of SEQ ID NO: 2496
acagucauuuccucggcuu

SEQ ID NO: 193639 - RNA, 19 nt, Artificial Sequence
  Description of Artificial Sequence: Synthetic oligonucleotide
  Antisense strand to SEQ ID NO: 193638
aagccgaggaaaugacugu

SEQ ID NO: 193640 - RNA, 19 nt, Artificial Sequence
  Description of Artificial Sequence: Synthetic oligonucleotide
  Sense strand starting at position 3463 of SEQ ID NO: 2496
gaaggaaaguuacagucau

SEQ ID NO: 193641 - RNA, 19 nt, Artificial Sequence
  Description of Artificial Sequence: Synthetic oligonucleotide
  Antisense strand to SEQ ID NO: 193640
augacuguaacuuuccuuc

SEQ ID NO: 193642 - RNA, 19 nt, Artificial Sequence
  Description of Artificial Sequence: Synthetic oligonucleotide
  Sense strand starting at position 3245 of SEQ ID NO: 2496
gguggaggguguucauguu

SEQ ID NO: 193643 - RNA, 19 nt, Artificial Sequence
  Description of Artificial Sequence: Synthetic oligonucleotide
  Antisense strand to SEQ ID NO: 193642
aacaugaacacccuccacc

SEQ ID NO: 193644 - RNA, 19 nt, Artificial Sequence
  Description of Artificial Sequence: Synthetic oligonucleotide
  Sense strand starting at position 2776 of SEQ ID NO: 2496
aauccugugcuguagguau

SEQ ID NO: 193645 - RNA, 19 nt, Artificial Sequence
  Description of Artificial Sequence: Synthetic oligonucleotide
  Antisense strand to SEQ ID NO: 193644
auaccuacagcacaggauu

SEQ ID NO: 193646 - RNA, 19 nt, Artificial Sequence
  Description of Artificial Sequence: Synthetic oligonucleotide
  Sense strand starting at position 2701 of SEQ ID NO: 2496
uuaaguacuuugccuaaug

SEQ ID NO: 193647 - RNA, 19 nt, Artificial Sequence
  Description of Artificial Sequence: Synthetic oligonucleotide
  Antisense strand to SEQ ID NO: 193646
cauuaggcaaaguacuuaa

SEQ ID NO: 193648 - RNA, 19 nt, Artificial Sequence
  Description of Artificial Sequence: Synthetic oligonucleotide
  Sense strand starting at position 2659 of SEQ ID NO: 2496
aguccuugauaaguggauu

SEQ ID NO: 193649 - RNA, 19 nt, Artificial Sequence
  Description of Artificial Sequence: Synthetic oligonucleotide
  Antisense strand to SEQ ID NO: 193648
aauccacuuaucaaggacu

SEQ ID NO: 193650 - RNA, 19 nt, Artificial Sequence
  Description of Artificial Sequence: Synthetic oligonucleotide
  Sense strand starting at position 2654 of SEQ ID NO: 2496
uaguaaguccuugauaagu

SEQ ID NO: 193651 - RNA, 19 nt, Artificial Sequence
  Description of Artificial Sequence: Synthetic oligonucleotide
  Antisense strand to SEQ ID NO: 193650
acuuaucaaggacuuacua

SEQ ID NO: 193652 - RNA, 19 nt, Artificial Sequence
  Description of Artificial Sequence: Synthetic oligonucleotide
  Sense strand starting at position 2653 of SEQ ID NO: 2496
auaguaaguccuugauaag

SEQ ID NO: 193653 - RNA, 19 nt, Artificial Sequence
  Description of Artificial Sequence: Synthetic oligonucleotide
  Antisense strand to SEQ ID NO: 193652
cuuaucaaggacuuacuau

SEQ ID NO: 193654 - RNA, 19 nt, Artificial Sequence
  Description of Artificial Sequence: Synthetic oligonucleotide
  Sense strand starting at position 2578 of SEQ ID NO: 2496
augagaaugcuuuaucuca

SEQ ID NO: 193655 - RNA, 19 nt, Artificial Sequence
  Description of Artificial Sequence: Synthetic oligonucleotide
  Antisense strand to SEQ ID NO: 193654
ugagauaaagcauucucau

SEQ ID NO: 193656 - RNA, 19 nt, Artificial Sequence
  Description of Artificial Sequence: Synthetic oligonucleotide
  Sense strand starting at position 2573 of SEQ ID NO: 2496
auagaaugagaaugcuuua

SEQ ID NO: 193657 - RNA, 19 nt, Artificial Sequence
  Description of Artificial Sequence: Synthetic oligonucleotide
  Antisense strand to SEQ ID NO: 193656
uaaagcauucucauucuau

SEQ ID NO: 193658 - RNA, 19 nt, Artificial Sequence
  Description of Artificial Sequence: Synthetic oligonucleotide
  Sense strand starting at position 2535 of SEQ ID NO: 2496
ucuugaugucucugaagcu

SEQ ID NO: 193659 - RNA, 19 nt, Artificial Sequence
  Description of Artificial Sequence: Synthetic oligonucleotide
  Antisense strand to SEQ ID NO: 193658
agcuucagagacaucaaga

SEQ ID NO: 193660 - RNA, 19 nt, Artificial Sequence
  Description of Artificial Sequence: Synthetic oligonucleotide
  Sense strand starting at position 2532 of SEQ ID NO: 2496
gauucuugaugucucugaa

SEQ ID NO: 193661 - RNA, 19 nt, Artificial Sequence
  Description of Artificial Sequence: Synthetic oligonucleotide
  Antisense strand to SEQ ID NO: 193660
uucagagacaucaagaauc

SEQ ID NO: 193662 - RNA, 19 nt, Artificial Sequence
  Description of Artificial Sequence: Synthetic oligonucleotide
  Sense strand starting at position 2525 of SEQ ID NO: 2496
ggagcaagauucuugaugu

SEQ ID NO: 193663 - RNA, 19 nt, Artificial Sequence
  Description of Artificial Sequence: Synthetic oligonucleotide
  Antisense strand to SEQ ID NO: 193662
acaucaagaaucuugcucc

SEQ ID NO: 193664 - RNA, 19 nt, Artificial Sequence
  Description of Artificial Sequence: Synthetic oligonucleotide
  Sense strand starting at position 2513 of SEQ ID NO: 2496
guuugagaaccuggagcaa

SEQ ID NO: 193665 - RNA, 19 nt, Artificial Sequence
  Description of Artificial Sequence: Synthetic oligonucleotide
  Antisense strand to SEQ ID NO: 193664
uugcuccagguucucaaac

SEQ ID NO: 193666 - RNA, 19 nt, Artificial Sequence
  Description of Artificial Sequence: Synthetic oligonucleotide
  Sense strand starting at position 2504 of SEQ ID NO: 2496
ccaucuaguguuugagaac

SEQ ID NO: 193667 - RNA, 19 nt, Artificial Sequence
  Description of Artificial Sequence: Synthetic oligonucleotide
  Antisense strand to SEQ ID NO: 193666
guucucaaacacuagaugg

SEQ ID NO: 193668 - RNA, 19 nt, Artificial Sequence
  Description of Artificial Sequence: Synthetic oligonucleotide
  Sense strand starting at position 2503 of SEQ ID NO: 2496
gccaucuaguguuugagaa

SEQ ID NO: 193669 - RNA, 19 nt, Artificial Sequence
  Description of Artificial Sequence: Synthetic oligonucleotide
  Antisense strand to SEQ ID NO: 193668
uucucaaacacuagauggc

SEQ ID NO: 193670 - RNA, 19 nt, Artificial Sequence
  Description of Artificial Sequence: Synthetic oligonucleotide
  Sense strand starting at position 2497 of SEQ ID NO: 2496
cgcucagccaucuaguguu

SEQ ID NO: 193671 - RNA, 19 nt, Artificial Sequence
  Description of Artificial Sequence: Synthetic oligonucleotide
  Antisense strand to SEQ ID NO: 193670
aacacuagauggcugagcg

SEQ ID NO: 193672 - RNA, 19 nt, Artificial Sequence
  Description of Artificial Sequence: Synthetic oligonucleotide
  Sense strand starting at position 2457 of SEQ ID NO: 2496
gagcaugagccuuggaguu

SEQ ID NO: 193673 - RNA, 19 nt, Artificial Sequence
  Description of Artificial Sequence: Synthetic oligonucleotide
  Antisense strand to SEQ ID NO: 193672
aacuccaaggcucaugcuc

SEQ ID NO: 193674 - RNA, 19 nt, Artificial Sequence
  Description of Artificial Sequence: Synthetic oligonucleotide
  Sense strand starting at position 2398 of SEQ ID NO: 2496
guuaguacacauuagcuaa

SEQ ID NO: 193675 - RNA, 19 nt, Artificial Sequence
  Description of Artificial Sequence: Synthetic oligonucleotide
  Antisense strand to SEQ ID NO: 193674
uuagcuaauguguacuaac

SEQ ID NO: 193676 - RNA, 19 nt, Artificial Sequence
  Description of Artificial Sequence: Synthetic oligonucleotide
  Sense strand starting at position 2290 of SEQ ID NO: 2496
uuagcuuucuuguuacuua

SEQ ID NO: 193677 - RNA, 19 nt, Artificial Sequence
  Description of Artificial Sequence: Synthetic oligonucleotide
  Antisense strand to SEQ ID NO: 193676
uaaguaacaagaaagcuaa

SEQ ID NO: 193678 - RNA, 19 nt, Artificial Sequence
  Description of Artificial Sequence: Synthetic oligonucleotide
  Sense strand starting at position 2286 of SEQ ID NO: 2496
cuauuuagcuuucuuguua

SEQ ID NO: 193679 - RNA, 19 nt, Artificial Sequence
  Description of Artificial Sequence: Synthetic oligonucleotide
  Antisense strand to SEQ ID NO: 193678
uaacaagaaagcuaaauag

SEQ ID NO: 193680 - RNA, 19 nt, Artificial Sequence
  Description of Artificial Sequence: Synthetic oligonucleotide
  Sense strand starting at position 2217 of SEQ ID NO: 2496
uccuuagaguaucuggaua

SEQ ID NO: 193681 - RNA, 19 nt, Artificial Sequence
  Description of Artificial Sequence: Synthetic oligonucleotide
  Antisense strand to SEQ ID NO: 193680
uauccagauacucuaagga

SEQ ID NO: 193682 - RNA, 19 nt, Artificial Sequence
  Description of Artificial Sequence: Synthetic oligonucleotide
  Sense strand starting at position 1126 of SEQ ID NO: 2496
ggcguuuggguucaugacu

SEQ ID NO: 193683 - RNA, 19 nt, Artificial Sequence
  Description of Artificial Sequence: Synthetic oligonucleotide
  Antisense strand to SEQ ID NO: 193682
agucaugaacccaaacgcc

SEQ ID NO: 193684 - RNA, 19 nt, Artificial Sequence
  Description of Artificial Sequence: Synthetic oligonucleotide
  Sense strand starting at position 968 of SEQ ID NO: 2496
cugaaagaaucucagacuu

SEQ ID NO: 193685 - RNA, 19 nt, Artificial Sequence
  Description of Artificial Sequence: Synthetic oligonucleotide
  Antisense strand to SEQ ID NO: 193684
aagucugagauucuuucag

SEQ ID NO: 193686 - RNA, 19 nt, Artificial Sequence
  Description of Artificial Sequence: Synthetic oligonucleotide
  Sense strand starting at position 910 of SEQ ID NO: 2496
guaacaggcauucggcaaa

SEQ ID NO: 193687 - RNA, 19 nt, Artificial Sequence
  Description of Artificial Sequence: Synthetic oligonucleotide
  Antisense strand to SEQ ID NO: 193686
uuugccgaaugccuguuac

SEQ ID NO: 193688 - RNA, 19 nt, Artificial Sequence
  Description of Artificial Sequence: Synthetic oligonucleotide
  Sense strand starting at position 497 of SEQ ID NO: 2496
uuaccagacugcuuuagaa

SEQ ID NO: 193689 - RNA, 19 nt, Artificial Sequence
  Description of Artificial Sequence: Synthetic oligonucleotide
  Antisense strand to SEQ ID NO: 193688
uucuaaagcagucugguaa

SEQ ID NO: 193690 - RNA, 19 nt, Artificial Sequence
  Description of Artificial Sequence: Synthetic oligonucleotide
  Sense strand starting at position 494 of SEQ ID NO: 2496
ggguuaccagacugcuuua

SEQ ID NO: 193691 - RNA, 19 nt, Artificial Sequence
  Description of Artificial Sequence: Synthetic oligonucleotide
  Antisense strand to SEQ ID NO: 193690
uaaagcagucugguaaccc

SEQ ID NO: 193692 - RNA, 19 nt, Artificial Sequence
  Description of Artificial Sequence: Synthetic oligonucleotide
  Sense strand starting at position 245 of SEQ ID NO: 2496
ggcguuaauauguaaagca

SEQ ID NO: 193693 - RNA, 19 nt, Artificial Sequence
  Description of Artificial Sequence: Synthetic oligonucleotide
  Antisense strand to SEQ ID NO: 193692
ugcuuuacauauuaacgcc

SEQ ID NO: 193694 - RNA, 19 nt, Artificial Sequence
  Description of Artificial Sequence: Synthetic oligonucleotide
  Sense strand starting at position 238 of SEQ ID NO: 2496
ccaacaaggcguuaauaug

SEQ ID NO: 193695 - RNA, 19 nt, Artificial Sequence
  Description of Artificial Sequence: Synthetic oligonucleotide
  Antisense strand to SEQ ID NO: 193694
cauauuaacgccuuguugg

SEQ ID NO: 193696 - RNA, 19 nt, Artificial Sequence
  Description of Artificial Sequence: Synthetic oligonucleotide
  Sense strand starting at position 225 of SEQ ID NO: 2496
ggcacaaagucuuccaaca

SEQ ID NO: 193697 - RNA, 19 nt, Artificial Sequence
  Description of Artificial Sequence: Synthetic oligonucleotide
  Antisense strand to SEQ ID NO: 193696
uguuggaagacuuugugcc

SEQ ID NO: 193698 - RNA, 19 nt, Artificial Sequence
  Description of Artificial Sequence: Synthetic oligonucleotide
  Sense strand starting at position 72 of SEQ ID NO: 2496
aagaaaucuuguuucgauu

SEQ ID NO: 193699 - RNA, 19 nt, Artificial Sequence
  Description of Artificial Sequence: Synthetic oligonucleotide
  Antisense strand to SEQ ID NO: 193698
aaucgaaacaagauuucuu

SEQ ID NO: 193700 - RNA, 19 nt, Artificial Sequence
  Description of Artificial Sequence: Synthetic oligonucleotide
  Sense strand starting at position 71 of SEQ ID NO: 2496
aaagaaaucuuguuucgau

SEQ ID NO: 193701 - RNA, 19 nt, Artificial Sequence
  Description of Artificial Sequence: Synthetic oligonucleotide
  Antisense strand to SEQ ID NO: 193700
aucgaaacaagauuucuuu

SEQ ID NO: 193702 - RNA, 19 nt, Artificial Sequence
  Description of Artificial Sequence: Synthetic oligonucleotide
  Sense strand starting at position 3500 of SEQ ID NO: 2497
ucucaagcaucugugcuaa

SEQ ID NO: 193703 - RNA, 19 nt, Artificial Sequence
  Description of Artificial Sequence: Synthetic oligonucleotide
  Antisense strand to SEQ ID NO: 193702
uuagcacagaugcuugaga

SEQ ID NO: 193704 - RNA, 19 nt, Artificial Sequence
  Description of Artificial Sequence: Synthetic oligonucleotide
  Sense strand starting at position 3410 of SEQ ID NO: 2497
cuguaacucugcuuugaug

SEQ ID NO: 193705 - RNA, 19 nt, Artificial Sequence
  Description of Artificial Sequence: Synthetic oligonucleotide
  Antisense strand to SEQ ID NO: 193704
caucaaagcagaguuacag

SEQ ID NO: 193706 - RNA, 19 nt, Artificial Sequence
  Description of Artificial Sequence: Synthetic oligonucleotide
  Sense strand starting at position 3408 of SEQ ID NO: 2497
accuguaacucugcuuuga

SEQ ID NO: 193707 - RNA, 19 nt, Artificial Sequence
  Description of Artificial Sequence: Synthetic oligonucleotide
  Antisense strand to SEQ ID NO: 193706
ucaaagcagaguuacaggu

SEQ ID NO: 193708 - RNA, 19 nt, Artificial Sequence
  Description of Artificial Sequence: Synthetic oligonucleotide
  Sense strand starting at position 3165 of SEQ ID NO: 2497
ccguaaauuugagaucauu

SEQ ID NO: 193709 - RNA, 19 nt, Artificial Sequence
  Description of Artificial Sequence: Synthetic oligonucleotide
  Antisense strand to SEQ ID NO: 193708
aaugaucucaaauuuacgg

SEQ ID NO: 193710 - RNA, 19 nt, Artificial Sequence
  Description of Artificial Sequence: Synthetic oligonucleotide
  Sense strand starting at position 3090 of SEQ ID NO: 2497
ucugcuuucuuuguacuga

SEQ ID NO: 193711 - RNA, 19 nt, Artificial Sequence
  Description of Artificial Sequence: Synthetic oligonucleotide
  Antisense strand to SEQ ID NO: 193710
ucaguacaaagaaagcaga

SEQ ID NO: 193712 - RNA, 19 nt, Artificial Sequence
  Description of Artificial Sequence: Synthetic oligonucleotide
  Sense strand starting at position 2972 of SEQ ID NO: 2497
ucuaucguccgucaugaaa

SEQ ID NO: 193713 - RNA, 19 nt, Artificial Sequence
  Description of Artificial Sequence: Synthetic oligonucleotide
  Antisense strand to SEQ ID NO: 193712
uuucaugacggacgauaga

SEQ ID NO: 193714 - RNA, 19 nt, Artificial Sequence
  Description of Artificial Sequence: Synthetic oligonucleotide
  Sense strand starting at position 2970 of SEQ ID NO: 2497
auucuaucguccgucauga

SEQ ID NO: 193715 - RNA, 19 nt, Artificial Sequence
  Description of Artificial Sequence: Synthetic oligonucleotide
  Antisense strand to SEQ ID NO: 193714
ucaugacggacgauagaau

SEQ ID NO: 193716 - RNA, 19 nt, Artificial Sequence
  Description of Artificial Sequence: Synthetic oligonucleotide
  Sense strand starting at position 2967 of SEQ ID NO: 2497
uagauucuaucguccguca

SEQ ID NO: 193717 - RNA, 19 nt, Artificial Sequence
  Description of Artificial Sequence: Synthetic oligonucleotide
  Antisense strand to SEQ ID NO: 193716
ugacggacgauagaaucua

SEQ ID NO: 193718 - RNA, 19 nt, Artificial Sequence
  Description of Artificial Sequence: Synthetic oligonucleotide
  Sense strand starting at position 2933 of SEQ ID NO: 2497
ggccuuauguacucacuuu

SEQ ID NO: 193719 - RNA, 19 nt, Artificial Sequence
  Description of Artificial Sequence: Synthetic oligonucleotide
  Antisense strand to SEQ ID NO: 193718
aaagugaguacauaaggcc

SEQ ID NO: 193720 - RNA, 19 nt, Artificial Sequence
  Description of Artificial Sequence: Synthetic oligonucleotide
  Sense strand starting at position 2836 of SEQ ID NO: 2497
gcucacucugucugauaau

SEQ ID NO: 193721 - RNA, 19 nt, Artificial Sequence
  Description of Artificial Sequence: Synthetic oligonucleotide
  Antisense strand to SEQ ID NO: 193720
auuaucagacagagugagc

SEQ ID NO: 193722 - RNA, 19 nt, Artificial Sequence
  Description of Artificial Sequence: Synthetic oligonucleotide
  Sense strand starting at position 2835 of SEQ ID NO: 2497
agcucacucugucugauaa

SEQ ID NO: 193723 - RNA, 19 nt, Artificial Sequence
  Description of Artificial Sequence: Synthetic oligonucleotide
  Antisense strand to SEQ ID NO: 193722
uuaucagacagagugagcu

SEQ ID NO: 193724 - RNA, 19 nt, Artificial Sequence
  Description of Artificial Sequence: Synthetic oligonucleotide
  Sense strand starting at position 2419 of SEQ ID NO: 2497
ugcucauacgaauaauugu

SEQ ID NO: 193725 - RNA, 19 nt, Artificial Sequence
  Description of Artificial Sequence: Synthetic oligonucleotide
  Antisense strand to SEQ ID NO: 193724
acaauuauucguaugagca

SEQ ID NO: 193726 - RNA, 19 nt, Artificial Sequence
  Description of Artificial Sequence: Synthetic oligonucleotide
  Sense strand starting at position 2375 of SEQ ID NO: 2497
gauucuucucuagggauca

SEQ ID NO: 193727 - RNA, 19 nt, Artificial Sequence
  Description of Artificial Sequence: Synthetic oligonucleotide
  Antisense strand to SEQ ID NO: 193726
ugaucccuagagaagaauc

SEQ ID NO: 193728 - RNA, 19 nt, Artificial Sequence
  Description of Artificial Sequence: Synthetic oligonucleotide
  Sense strand starting at position 2372 of SEQ ID NO: 2497
ucagauucuucucuaggga

SEQ ID NO: 193729 - RNA, 19 nt, Artificial Sequence
  Description of Artificial Sequence: Synthetic oligonucleotide
  Antisense strand to SEQ ID NO: 193728
ucccuagagaagaaucuga

SEQ ID NO: 193730 - RNA, 19 nt, Artificial Sequence
  Description of Artificial Sequence: Synthetic oligonucleotide
  Sense strand starting at position 2317 of SEQ ID NO: 2497
gucauaacucuugguuauu

SEQ ID NO: 193731 - RNA, 19 nt, Artificial Sequence
  Description of Artificial Sequence: Synthetic oligonucleotide
  Antisense strand to SEQ ID NO: 193730
aauaaccaagaguuaugac

SEQ ID NO: 193732 - RNA, 19 nt, Artificial Sequence
  Description of Artificial Sequence: Synthetic oligonucleotide
  Sense strand starting at position 2240 of SEQ ID NO: 2497
ccuauagacuccucuguca

SEQ ID NO: 193733 - RNA, 19 nt, Artificial Sequence
  Description of Artificial Sequence: Synthetic oligonucleotide
  Antisense strand to SEQ ID NO: 193732
ugacagaggagucuauagg

SEQ ID NO: 193734 - RNA, 19 nt, Artificial Sequence
  Description of Artificial Sequence: Synthetic oligonucleotide
  Sense strand starting at position 2210 of SEQ ID NO: 2497
gagagauuagagcaucgcu

SEQ ID NO: 193735 - RNA, 19 nt, Artificial Sequence
  Description of Artificial Sequence: Synthetic oligonucleotide
  Antisense strand to SEQ ID NO: 193734
agcgaugcucuaaucucuc

SEQ ID NO: 193736 - RNA, 19 nt, Artificial Sequence
  Description of Artificial Sequence: Synthetic oligonucleotide
  Sense strand starting at position 996 of SEQ ID NO: 2497
uagaucucuccugagguca

SEQ ID NO: 193737 - RNA, 19 nt, Artificial Sequence
  Description of Artificial Sequence: Synthetic oligonucleotide
  Antisense strand to SEQ ID NO: 193736
ugaccucaggagagaucua

SEQ ID NO: 193738 - RNA, 19 nt, Artificial Sequence
  Description of Artificial Sequence: Synthetic oligonucleotide
  Sense strand starting at position 837 of SEQ ID NO: 2497
ggucucugccuccaaauga

SEQ ID NO: 193739 - RNA, 19 nt, Artificial Sequence
  Description of Artificial Sequence: Synthetic oligonucleotide
  Antisense strand to SEQ ID NO: 193738
ucauuuggaggcagagacc

SEQ ID NO: 193740 - RNA, 19 nt, Artificial Sequence
  Description of Artificial Sequence: Synthetic oligonucleotide
  Sense strand starting at position 834 of SEQ ID NO: 2497
cuuggucucugccuccaaa

SEQ ID NO: 193741 - RNA, 19 nt, Artificial Sequence
  Description of Artificial Sequence: Synthetic oligonucleotide
  Antisense strand to SEQ ID NO: 193740
uuuggaggcagagaccaag

SEQ ID NO: 193742 - RNA, 19 nt, Artificial Sequence
  Description of Artificial Sequence: Synthetic oligonucleotide
  Sense strand starting at position 813 of SEQ ID NO: 2497
gauugucaguccucaaaug

SEQ ID NO: 193743 - RNA, 19 nt, Artificial Sequence
  Description of Artificial Sequence: Synthetic oligonucleotide
  Antisense strand to SEQ ID NO: 193742
cauuugaggacugacaauc

SEQ ID NO: 193744 - RNA, 19 nt, Artificial Sequence
  Description of Artificial Sequence: Synthetic oligonucleotide
  Sense strand starting at position 809 of SEQ ID NO: 2497
accugauugucaguccuca

SEQ ID NO: 193745 - RNA, 19 nt, Artificial Sequence
  Description of Artificial Sequence: Synthetic oligonucleotide
  Antisense strand to SEQ ID NO: 193744
ugaggacugacaaucaggu

SEQ ID NO: 193746 - RNA, 19 nt, Artificial Sequence
  Description of Artificial Sequence: Synthetic oligonucleotide
  Sense strand starting at position 782 of SEQ ID NO: 2497
guuuaaagagacugucaca

SEQ ID NO: 193747 - RNA, 19 nt, Artificial Sequence
  Description of Artificial Sequence: Synthetic oligonucleotide
  Antisense strand to SEQ ID NO: 193746
ugugacagucucuuuaaac

SEQ ID NO: 193748 - RNA, 19 nt, Artificial Sequence
  Description of Artificial Sequence: Synthetic oligonucleotide
  Sense strand starting at position 766 of SEQ ID NO: 2497
augaacucuuuagaagguu

SEQ ID NO: 193749 - RNA, 19 nt, Artificial Sequence
  Description of Artificial Sequence: Synthetic oligonucleotide
  Antisense strand to SEQ ID NO: 193748
aaccuucuaaagaguucau

SEQ ID NO: 193750 - RNA, 19 nt, Artificial Sequence
  Description of Artificial Sequence: Synthetic oligonucleotide
  Sense strand starting at position 609 of SEQ ID NO: 2497
uugcauaugauggagcaau

SEQ ID NO: 193751 - RNA, 19 nt, Artificial Sequence
  Description of Artificial Sequence: Synthetic oligonucleotide
  Antisense strand to SEQ ID NO: 193750
auugcuccaucauaugcaa

SEQ ID NO: 193752 - RNA, 19 nt, Artificial Sequence
  Description of Artificial Sequence: Synthetic oligonucleotide
  Sense strand starting at position 608 of SEQ ID NO: 2497
guugcauaugauggagcaa

SEQ ID NO: 193753 - RNA, 19 nt, Artificial Sequence
  Description of Artificial Sequence: Synthetic oligonucleotide
  Antisense strand to SEQ ID NO: 193752
uugcuccaucauaugcaac

SEQ ID NO: 193754 - RNA, 19 nt, Artificial Sequence
  Description of Artificial Sequence: Synthetic oligonucleotide
  Sense strand starting at position 604 of SEQ ID NO: 2497
gcuuguugcauaugaugga

SEQ ID NO: 193755 - RNA, 19 nt, Artificial Sequence
  Description of Artificial Sequence: Synthetic oligonucleotide
  Antisense strand to SEQ ID NO: 193754
uccaucauaugcaacaagc

SEQ ID NO: 193756 - RNA, 19 nt, Artificial Sequence
  Description of Artificial Sequence: Synthetic oligonucleotide
  Sense strand starting at position 602 of SEQ ID NO: 2497
uagcuuguugcauaugaug

SEQ ID NO: 193757 - RNA, 19 nt, Artificial Sequence
  Description of Artificial Sequence: Synthetic oligonucleotide
  Antisense strand to SEQ ID NO: 193756
caucauaugcaacaagcua

SEQ ID NO: 193758 - RNA, 19 nt, Artificial Sequence
  Description of Artificial Sequence: Synthetic oligonucleotide
  Sense strand starting at position 386 of SEQ ID NO: 2497
acaacaacagugugugaaa

SEQ ID NO: 193759 - RNA, 19 nt, Artificial Sequence
  Description of Artificial Sequence: Synthetic oligonucleotide
  Antisense strand to SEQ ID NO: 193758
uuucacacacuguuguugu

SEQ ID NO: 193760 - RNA, 19 nt, Artificial Sequence
  Description of Artificial Sequence: Synthetic oligonucleotide
  Sense strand starting at position 371 of SEQ ID NO: 2497
gaaacagguuagcauacaa

SEQ ID NO: 193761 - RNA, 19 nt, Artificial Sequence
  Description of Artificial Sequence: Synthetic oligonucleotide
  Antisense strand to SEQ ID NO: 193760
uuguaugcuaaccuguuuc

SEQ ID NO: 193762 - RNA, 19 nt, Artificial Sequence
  Description of Artificial Sequence: Synthetic oligonucleotide
  Sense strand starting at position 339 of SEQ ID NO: 2497
gguugcuaccuagaacuua

SEQ ID NO: 193763 - RNA, 19 nt, Artificial Sequence
  Description of Artificial Sequence: Synthetic oligonucleotide
  Antisense strand to SEQ ID NO: 193762
uaaguucuagguagcaacc

SEQ ID NO: 193764 - RNA, 19 nt, Artificial Sequence
  Description of Artificial Sequence: Synthetic oligonucleotide
  Sense strand starting at position 337 of SEQ ID NO: 2497
acgguugcuaccuagaacu

SEQ ID NO: 193765 - RNA, 19 nt, Artificial Sequence
  Description of Artificial Sequence: Synthetic oligonucleotide
  Antisense strand to SEQ ID NO: 193764
aguucuagguagcaaccgu

SEQ ID NO: 193766 - RNA, 19 nt, Artificial Sequence
  Description of Artificial Sequence: Synthetic oligonucleotide
  Sense strand starting at position 253 of SEQ ID NO: 2497
auauuagucaggugggaaa

SEQ ID NO: 193767 - RNA, 19 nt, Artificial Sequence
  Description of Artificial Sequence: Synthetic oligonucleotide
  Antisense strand to SEQ ID NO: 193766
uuucccaccugacuaauau

SEQ ID NO: 193768 - RNA, 19 nt, Artificial Sequence
  Description of Artificial Sequence: Synthetic oligonucleotide
  Sense strand starting at position 248 of SEQ ID NO: 2497
aguuuauauuagucaggug

SEQ ID NO: 193769 - RNA, 19 nt, Artificial Sequence
  Description of Artificial Sequence: Synthetic oligonucleotide
  Antisense strand to SEQ ID NO: 193768
caccugacuaauauaaacu

SEQ ID NO: 193770 - RNA, 19 nt, Artificial Sequence
  Description of Artificial Sequence: Synthetic oligonucleotide
  Sense strand starting at position 219 of SEQ ID NO: 2497
guccacuaguuaccucaaa

SEQ ID NO: 193771 - RNA, 19 nt, Artificial Sequence
  Description of Artificial Sequence: Synthetic oligonucleotide
  Antisense strand to SEQ ID NO: 193770
uuugagguaacuaguggac

SEQ ID NO: 193772 - RNA, 19 nt, Artificial Sequence
  Description of Artificial Sequence: Synthetic oligonucleotide
  Sense strand starting at position 213 of SEQ ID NO: 2497
uguguaguccacuaguuac

SEQ ID NO: 193773 - RNA, 19 nt, Artificial Sequence
  Description of Artificial Sequence: Synthetic oligonucleotide
  Antisense strand to SEQ ID NO: 193772
guaacuaguggacuacaca

SEQ ID NO: 193774 - RNA, 19 nt, Artificial Sequence
  Description of Artificial Sequence: Synthetic oligonucleotide
  Sense strand starting at position 208 of SEQ ID NO: 2497
cuuucuguguaguccacua

SEQ ID NO: 193775 - RNA, 19 nt, Artificial Sequence
  Description of Artificial Sequence: Synthetic oligonucleotide
  Antisense strand to SEQ ID NO: 193774
uaguggacuacacagaaag

SEQ ID NO: 193776 - RNA, 19 nt, Artificial Sequence
  Description of Artificial Sequence: Synthetic oligonucleotide
  Sense strand starting at position 171 of SEQ ID NO: 2497
gcaagaucgucuccaaaca

SEQ ID NO: 193777 - RNA, 19 nt, Artificial Sequence
  Description of Artificial Sequence: Synthetic oligonucleotide
  Antisense strand to SEQ ID NO: 193776
uguuuggagacgaucuugc

SEQ ID NO: 193778 - RNA, 19 nt, Artificial Sequence
  Description of Artificial Sequence: Synthetic oligonucleotide
  Sense strand starting at position 124 of SEQ ID NO: 2497
ugcaaagagccaugauugu

SEQ ID NO: 193779 - RNA, 19 nt, Artificial Sequence
  Description of Artificial Sequence: Synthetic oligonucleotide
  Antisense strand to SEQ ID NO: 193778
acaaucauggcucuuugca

SEQ ID NO: 193780 - RNA, 19 nt, Artificial Sequence
  Description of Artificial Sequence: Synthetic oligonucleotide
  Sense strand starting at position 112 of SEQ ID NO: 2497
ggaguucaagguugcaaag

SEQ ID NO: 193781 - RNA, 19 nt, Artificial Sequence
  Description of Artificial Sequence: Synthetic oligonucleotide
  Antisense strand to SEQ ID NO: 193780
cuuugcaaccuugaacucc

SEQ ID NO: 193782 - RNA, 19 nt, Artificial Sequence
  Description of Artificial Sequence: Synthetic oligonucleotide
  Sense strand starting at position 34 of SEQ ID NO: 2498
ugagaucacuaaguugcau

SEQ ID NO: 193783 - RNA, 19 nt, Artificial Sequence
  Description of Artificial Sequence: Synthetic oligonucleotide
  Antisense strand to SEQ ID NO: 193782
augcaacuuagugaucuca

SEQ ID NO: 193784 - RNA, 19 nt, Artificial Sequence
  Description of Artificial Sequence: Synthetic oligonucleotide
  Sense strand starting at position 40 of SEQ ID NO: 2498
cacuaaguugcauggucaa

SEQ ID NO: 193785 - RNA, 19 nt, Artificial Sequence
  Description of Artificial Sequence: Synthetic oligonucleotide
  Antisense strand to SEQ ID NO: 193784
uugaccaugcaacuuagug

SEQ ID NO: 193786 - RNA, 19 nt, Artificial Sequence
  Description of Artificial Sequence: Synthetic oligonucleotide
  Sense strand starting at position 43 of SEQ ID NO: 2498
uaaguugcauggucaaacu

SEQ ID NO: 193787 - RNA, 19 nt, Artificial Sequence
  Description of Artificial Sequence: Synthetic oligonucleotide
  Antisense strand to SEQ ID NO: 193786
aguuugaccaugcaacuua

SEQ ID NO: 193788 - RNA, 19 nt, Artificial Sequence
  Description of Artificial Sequence: Synthetic oligonucleotide
  Sense strand starting at position 104 of SEQ ID NO: 2498
acuccuauauaguuagguu

SEQ ID NO: 193789 - RNA, 19 nt, Artificial Sequence
  Description of Artificial Sequence: Synthetic oligonucleotide
  Antisense strand to SEQ ID NO: 193788
aaccuaacuauauaggagu

SEQ ID NO: 193790 - RNA, 19 nt, Artificial Sequence
  Description of Artificial Sequence: Synthetic oligonucleotide
  Sense strand starting at position 233 of SEQ ID NO: 2498
acuuucuuucugugcaaag

SEQ ID NO: 193791 - RNA, 19 nt, Artificial Sequence
  Description of Artificial Sequence: Synthetic oligonucleotide
  Antisense strand to SEQ ID NO: 193790
cuuugcacagaaagaaagu

SEQ ID NO: 193792 - RNA, 19 nt, Artificial Sequence
  Description of Artificial Sequence: Synthetic oligonucleotide
  Sense strand starting at position 366 of SEQ ID NO: 2498
uacguaagucuugacaaac

SEQ ID NO: 193793 - RNA, 19 nt, Artificial Sequence
  Description of Artificial Sequence: Synthetic oligonucleotide
  Antisense strand to SEQ ID NO: 193792
guuugucaagacuuacgua

SEQ ID NO: 193794 - RNA, 19 nt, Artificial Sequence
  Description of Artificial Sequence: Synthetic oligonucleotide
  Sense strand starting at position 425 of SEQ ID NO: 2498
auguuuacugauugccaau

SEQ ID NO: 193795 - RNA, 19 nt, Artificial Sequence
  Description of Artificial Sequence: Synthetic oligonucleotide
  Antisense strand to SEQ ID NO: 193794
auuggcaaucaguaaacau

SEQ ID NO: 193796 - RNA, 19 nt, Artificial Sequence
  Description of Artificial Sequence: Synthetic oligonucleotide
  Sense strand starting at position 427 of SEQ ID NO: 2498
guuuacugauugccaauau

SEQ ID NO: 193797 - RNA, 19 nt, Artificial Sequence
  Description of Artificial Sequence: Synthetic oligonucleotide
  Antisense strand to SEQ ID NO: 193796
auauuggcaaucaguaaac

SEQ ID NO: 193798 - RNA, 19 nt, Artificial Sequence
  Description of Artificial Sequence: Synthetic oligonucleotide
  Sense strand starting at position 597 of SEQ ID NO: 2498
ugaaacaagcacuguguua

SEQ ID NO: 193799 - RNA, 19 nt, Artificial Sequence
  Description of Artificial Sequence: Synthetic oligonucleotide
  Antisense strand to SEQ ID NO: 193798
uaacacagugcuuguuuca

SEQ ID NO: 193800 - RNA, 19 nt, Artificial Sequence
  Description of Artificial Sequence: Synthetic oligonucleotide
  Sense strand starting at position 609 of SEQ ID NO: 2498
uguguuacucuauacuaua

SEQ ID NO: 193801 - RNA, 19 nt, Artificial Sequence
  Description of Artificial Sequence: Synthetic oligonucleotide
  Antisense strand to SEQ ID NO: 193800
uauaguauagaguaacaca

SEQ ID NO: 193802 - RNA, 19 nt, Artificial Sequence
  Description of Artificial Sequence: Synthetic oligonucleotide
  Sense strand starting at position 905 of SEQ ID NO: 2498
auuuaugaguuugcucuuu

SEQ ID NO: 193803 - RNA, 19 nt, Artificial Sequence
  Description of Artificial Sequence: Synthetic oligonucleotide
  Antisense strand to SEQ ID NO: 193802
aaagagcaaacucauaaau

SEQ ID NO: 193804 - RNA, 19 nt, Artificial Sequence
  Description of Artificial Sequence: Synthetic oligonucleotide
  Sense strand starting at position 910 of SEQ ID NO: 2498
ugaguuugcucuuuacuaa

SEQ ID NO: 193805 - RNA, 19 nt, Artificial Sequence
  Description of Artificial Sequence: Synthetic oligonucleotide
  Antisense strand to SEQ ID NO: 193804
uuaguaaagagcaaacuca

SEQ ID NO: 193806 - RNA, 19 nt, Artificial Sequence
  Description of Artificial Sequence: Synthetic oligonucleotide
  Sense strand starting at position 1270 of SEQ ID NO: 2498
acagucuguuaccuuaaau

SEQ ID NO: 193807 - RNA, 19 nt, Artificial Sequence
  Description of Artificial Sequence: Synthetic oligonucleotide
  Antisense strand to SEQ ID NO: 193806
auuuaagguaacagacugu

SEQ ID NO: 193808 - RNA, 19 nt, Artificial Sequence
  Description of Artificial Sequence: Synthetic oligonucleotide
  Sense strand starting at position 1333 of SEQ ID NO: 2498
ucaguaacacaguaguaau

SEQ ID NO: 193809 - RNA, 19 nt, Artificial Sequence
  Description of Artificial Sequence: Synthetic oligonucleotide
  Antisense strand to SEQ ID NO: 193808
auuacuacuguguuacuga

SEQ ID NO: 193810 - RNA, 19 nt, Artificial Sequence
  Description of Artificial Sequence: Synthetic oligonucleotide
  Sense strand starting at position 1361 of SEQ ID NO: 2498
accgauaacugaguuaaua

SEQ ID NO: 193811 - RNA, 19 nt, Artificial Sequence
  Description of Artificial Sequence: Synthetic oligonucleotide
  Antisense strand to SEQ ID NO: 193810
uauuaacucaguuaucggu

SEQ ID NO: 193812 - RNA, 19 nt, Artificial Sequence
  Description of Artificial Sequence: Synthetic oligonucleotide
  Sense strand starting at position 1372 of SEQ ID NO: 2498
aguuaauaggcacguacaa

SEQ ID NO: 193813 - RNA, 19 nt, Artificial Sequence
  Description of Artificial Sequence: Synthetic oligonucleotide
  Antisense strand to SEQ ID NO: 193812
uuguacgugccuauuaacu

SEQ ID NO: 193814 - RNA, 19 nt, Artificial Sequence
  Description of Artificial Sequence: Synthetic oligonucleotide
  Sense strand starting at position 1424 of SEQ ID NO: 2498
gguguugucagagacauaa

SEQ ID NO: 193815 - RNA, 19 nt, Artificial Sequence
  Description of Artificial Sequence: Synthetic oligonucleotide
  Antisense strand to SEQ ID NO: 193814
uuaugucucugacaacacc

SEQ ID NO: 193816 - RNA, 19 nt, Artificial Sequence
  Description of Artificial Sequence: Synthetic oligonucleotide
  Sense strand starting at position 1583 of SEQ ID NO: 2498
aguuaaccggucuggaaua

SEQ ID NO: 193817 - RNA, 19 nt, Artificial Sequence
  Description of Artificial Sequence: Synthetic oligonucleotide
  Antisense strand to SEQ ID NO: 193816
uauuccagaccgguuaacu

SEQ ID NO: 193818 - RNA, 19 nt, Artificial Sequence
  Description of Artificial Sequence: Synthetic oligonucleotide
  Sense strand starting at position 1588 of SEQ ID NO: 2498
accggucuggaauacuuua

SEQ ID NO: 193819 - RNA, 19 nt, Artificial Sequence
  Description of Artificial Sequence: Synthetic oligonucleotide
  Antisense strand to SEQ ID NO: 193818
uaaaguauuccagaccggu

SEQ ID NO: 193820 - RNA, 19 nt, Artificial Sequence
  Description of Artificial Sequence: Synthetic oligonucleotide
  Sense strand starting at position 1656 of SEQ ID NO: 2498
aacgguauccaauggaauc

SEQ ID NO: 193821 - RNA, 19 nt, Artificial Sequence
  Description of Artificial Sequence: Synthetic oligonucleotide
  Antisense strand to SEQ ID NO: 193820
gauuccauuggauaccguu

SEQ ID NO: 193822 - RNA, 19 nt, Artificial Sequence
  Description of Artificial Sequence: Synthetic oligonucleotide
  Sense strand starting at position 1657 of SEQ ID NO: 2498
acgguauccaauggaauca

SEQ ID NO: 193823 - RNA, 19 nt, Artificial Sequence
  Description of Artificial Sequence: Synthetic oligonucleotide
  Antisense strand to SEQ ID NO: 193822
ugauuccauuggauaccgu

SEQ ID NO: 193824 - RNA, 19 nt, Artificial Sequence
  Description of Artificial Sequence: Synthetic oligonucleotide
  Sense strand starting at position 1872 of SEQ ID NO: 2498
gcacguaucccggcaccaa

SEQ ID NO: 193825 - RNA, 19 nt, Artificial Sequence
  Description of Artificial Sequence: Synthetic oligonucleotide
  Antisense strand to SEQ ID NO: 193824
uuggugccgggauacgugc

SEQ ID NO: 193826 - RNA, 19 nt, Artificial Sequence
  Description of Artificial Sequence: Synthetic oligonucleotide
  Sense strand starting at position 1917 of SEQ ID NO: 2498
aacgacuugccuuguagaa

SEQ ID NO: 193827 - RNA, 19 nt, Artificial Sequence
  Description of Artificial Sequence: Synthetic oligonucleotide
  Antisense strand to SEQ ID NO: 193826
uucuacaaggcaagucguu

SEQ ID NO: 193828 - RNA, 19 nt, Artificial Sequence
  Description of Artificial Sequence: Synthetic oligonucleotide
  Sense strand starting at position 1982 of SEQ ID NO: 2498
ggacaacugcucugccaac

SEQ ID NO: 193829 - RNA, 19 nt, Artificial Sequence
  Description of Artificial Sequence: Synthetic oligonucleotide
  Antisense strand to SEQ ID NO: 193828
guuggcagagcaguugucc

SEQ ID NO: 193830 - RNA, 19 nt, Artificial Sequence
  Description of Artificial Sequence: Synthetic oligonucleotide
  Sense strand starting at position 2018 of SEQ ID NO: 2498
gagagaucucgcgauacaa

SEQ ID NO: 193831 - RNA, 19 nt, Artificial Sequence
  Description of Artificial Sequence: Synthetic oligonucleotide
  Antisense strand to SEQ ID NO: 193830
uuguaucgcgagaucucuc

SEQ ID NO: 193832 - RNA, 19 nt, Artificial Sequence
  Description of Artificial Sequence: Synthetic oligonucleotide
  Sense strand starting at position 2020 of SEQ ID NO: 2498
gagaucucgcgauacaaac

SEQ ID NO: 193833 - RNA, 19 nt, Artificial Sequence
  Description of Artificial Sequence: Synthetic oligonucleotide
  Antisense strand to SEQ ID NO: 193832
guuuguaucgcgagaucuc

SEQ ID NO: 193834 - RNA, 19 nt, Artificial Sequence
  Description of Artificial Sequence: Synthetic oligonucleotide
  Sense strand starting at position 2092 of SEQ ID NO: 2498
aucaguauuucggaacuua

SEQ ID NO: 193835 - RNA, 19 nt, Artificial Sequence
  Description of Artificial Sequence: Synthetic oligonucleotide
  Antisense strand to SEQ ID NO: 193834
uaaguuccgaaauacugau

SEQ ID NO: 193836 - RNA, 19 nt, Artificial Sequence
  Description of Artificial Sequence: Synthetic oligonucleotide
  Sense strand starting at position 2120 of SEQ ID NO: 2498
ucacuaacggaguagugaa

SEQ ID NO: 193837 - RNA, 19 nt, Artificial Sequence
  Description of Artificial Sequence: Synthetic oligonucleotide
  Antisense strand to SEQ ID NO: 193836
uucacuacuccguuaguga

SEQ ID NO: 193838 - RNA, 19 nt, Artificial Sequence
  Description of Artificial Sequence: Synthetic oligonucleotide
  Sense strand starting at position 2227 of SEQ ID NO: 2498
cuccgauuaccacgauuau

SEQ ID NO: 193839 - RNA, 19 nt, Artificial Sequence
  Description of Artificial Sequence: Synthetic oligonucleotide
  Antisense strand to SEQ ID NO: 193838
auaaucgugguaaucggag

SEQ ID NO: 193840 - RNA, 19 nt, Artificial Sequence
  Description of Artificial Sequence: Synthetic oligonucleotide
  Sense strand starting at position 2228 of SEQ ID NO: 2498
uccgauuaccacgauuaua

SEQ ID NO: 193841 - RNA, 19 nt, Artificial Sequence
  Description of Artificial Sequence: Synthetic oligonucleotide
  Antisense strand to SEQ ID NO: 193840
uauaaucgugguaaucgga

SEQ ID NO: 193842 - RNA, 19 nt, Artificial Sequence
  Description of Artificial Sequence: Synthetic oligonucleotide
  Sense strand starting at position 2286 of SEQ ID NO: 2498
cccugucacguggaaacau

SEQ ID NO: 193843 - RNA, 19 nt, Artificial Sequence
  Description of Artificial Sequence: Synthetic oligonucleotide
  Antisense strand to SEQ ID NO: 193842
auguuuccacgugacaggg

SEQ ID NO: 193844 - RNA, 19 nt, Artificial Sequence
  Description of Artificial Sequence: Synthetic oligonucleotide
  Sense strand starting at position 3166 of SEQ ID NO: 2498
uguauuuaugaucgugcuu

SEQ ID NO: 193845 - RNA, 19 nt, Artificial Sequence
  Description of Artificial Sequence: Synthetic oligonucleotide
  Antisense strand to SEQ ID NO: 193844
aagcacgaucauaaauaca

SEQ ID NO: 193846 - RNA, 19 nt, Artificial Sequence
  Description of Artificial Sequence: Synthetic oligonucleotide
  Sense strand starting at position 3244 of SEQ ID NO: 2498
gccuuugugcuugccgauu

SEQ ID NO: 193847 - RNA, 19 nt, Artificial Sequence
  Description of Artificial Sequence: Synthetic oligonucleotide
  Antisense strand to SEQ ID NO: 193846
aaucggcaagcacaaaggc

SEQ ID NO: 193848 - RNA, 19 nt, Artificial Sequence
  Description of Artificial Sequence: Synthetic oligonucleotide
  Sense strand starting at position 3255 of SEQ ID NO: 2498
ugccgauuucucuggcaga

SEQ ID NO: 193849 - RNA, 19 nt, Artificial Sequence
  Description of Artificial Sequence: Synthetic oligonucleotide
  Antisense strand to SEQ ID NO: 193848
ucugccagagaaaucggca

SEQ ID NO: 193850 - RNA, 19 nt, Artificial Sequence
  Description of Artificial Sequence: Synthetic oligonucleotide
  Sense strand starting at position 3303 of SEQ ID NO: 2498
cgauguucgaugcauauuu

SEQ ID NO: 193851 - RNA, 19 nt, Artificial Sequence
  Description of Artificial Sequence: Synthetic oligonucleotide
  Antisense strand to SEQ ID NO: 193850
aaauaugcaucgaacaucg

SEQ ID NO: 193852 - RNA, 19 nt, Artificial Sequence
  Description of Artificial Sequence: Synthetic oligonucleotide
  Sense strand starting at position 3436 of SEQ ID NO: 2498
ccuuauuugucaguauccu

SEQ ID NO: 193853 - RNA, 19 nt, Artificial Sequence
  Description of Artificial Sequence: Synthetic oligonucleotide
  Antisense strand to SEQ ID NO: 193852
aggauacugacaaauaagg

SEQ ID NO: 193854 - RNA, 19 nt, Artificial Sequence
  Description of Artificial Sequence: Synthetic oligonucleotide
  Sense strand starting at position 3523 of SEQ ID NO: 2498
cagaauugugucuggcaca

SEQ ID NO: 193855 - RNA, 19 nt, Artificial Sequence
  Description of Artificial Sequence: Synthetic oligonucleotide
  Antisense strand to SEQ ID NO: 193854
ugugccagacacaauucug

SEQ ID NO: 193856 - RNA, 19 nt, Artificial Sequence
  Description of Artificial Sequence: Synthetic oligonucleotide
  Sense strand starting at position 3540 of SEQ ID NO: 2498
caaagcagugcucaguaau

SEQ ID NO: 193857 - RNA, 19 nt, Artificial Sequence
  Description of Artificial Sequence: Synthetic oligonucleotide
  Antisense strand to SEQ ID NO: 193856
auuacugagcacugcuuug

SEQ ID NO: 193858 - RNA, 19 nt, Artificial Sequence
  Description of Artificial Sequence: Synthetic oligonucleotide
  Sense strand starting at position 3543 of SEQ ID NO: 2498
agcagugcucaguaauauc

SEQ ID NO: 193859 - RNA, 19 nt, Artificial Sequence
  Description of Artificial Sequence: Synthetic oligonucleotide
  Antisense strand to SEQ ID NO: 193858
gauauuacugagcacugcu

SEQ ID NO: 193860 - RNA, 19 nt, Artificial Sequence
  Description of Artificial Sequence: Synthetic oligonucleotide
  Sense strand starting at position 3578 of SEQ ID NO: 2498
cuauauugagcauguagga

SEQ ID NO: 193861 - RNA, 19 nt, Artificial Sequence
  Description of Artificial Sequence: Synthetic oligonucleotide
  Antisense strand to SEQ ID NO: 193860
uccuacaugcucaauauag

SEQ ID NO: 193862 - RNA, 19 nt, Artificial Sequence
  Description of Artificial Sequence: Synthetic oligonucleotide
  Sense strand starting at position 58 of SEQ ID NO: 2499
auccaaucagucugaauug

SEQ ID NO: 193863 - RNA, 19 nt, Artificial Sequence
  Description of Artificial Sequence: Synthetic oligonucleotide
  Antisense strand to SEQ ID NO: 193862
caauucagacugauuggau

SEQ ID NO: 193864 - RNA, 19 nt, Artificial Sequence
  Description of Artificial Sequence: Synthetic oligonucleotide
  Sense strand starting at position 144 of SEQ ID NO: 2499
aaaguaugagucuggcaua

SEQ ID NO: 193865 - RNA, 19 nt, Artificial Sequence
  Description of Artificial Sequence: Synthetic oligonucleotide
  Antisense strand to SEQ ID NO: 193864
uaugccagacucauacuuu

SEQ ID NO: 193866 - RNA, 19 nt, Artificial Sequence
  Description of Artificial Sequence: Synthetic oligonucleotide
  Sense strand starting at position 149 of SEQ ID NO: 2499
augagucuggcauaauuau

SEQ ID NO: 193867 - RNA, 19 nt, Artificial Sequence
  Description of Artificial Sequence: Synthetic oligonucleotide
  Antisense strand to SEQ ID NO: 193866
auaauuaugccagacucau

SEQ ID NO: 193868 - RNA, 19 nt, Artificial Sequence
  Description of Artificial Sequence: Synthetic oligonucleotide
  Sense strand starting at position 174 of SEQ ID NO: 2499
cgagguuaagguuaccaaa

SEQ ID NO: 193869 - RNA, 19 nt, Artificial Sequence
  Description of Artificial Sequence: Synthetic oligonucleotide
  Antisense strand to SEQ ID NO: 193868
uuugguaaccuuaaccucg

SEQ ID NO: 193870 - RNA, 19 nt, Artificial Sequence
  Description of Artificial Sequence: Synthetic oligonucleotide
  Sense strand starting at position 236 of SEQ ID NO: 2499
guauaucuacgugaguaua

SEQ ID NO: 193871 - RNA, 19 nt, Artificial Sequence
  Description of Artificial Sequence: Synthetic oligonucleotide
  Antisense strand to SEQ ID NO: 193870
uauacucacguagauauac

SEQ ID NO: 193872 - RNA, 19 nt, Artificial Sequence
  Description of Artificial Sequence: Synthetic oligonucleotide
  Sense strand starting at position 238 of SEQ ID NO: 2499
auaucuacgugaguauaga

SEQ ID NO: 193873 - RNA, 19 nt, Artificial Sequence
  Description of Artificial Sequence: Synthetic oligonucleotide
  Antisense strand to SEQ ID NO: 193872
ucuauacucacguagauau

SEQ ID NO: 193874 - RNA, 19 nt, Artificial Sequence
  Description of Artificial Sequence: Synthetic oligonucleotide
  Sense strand starting at position 479 of SEQ ID NO: 2499
ccugauuacaguuggguca

SEQ ID NO: 193875 - RNA, 19 nt, Artificial Sequence
  Description of Artificial Sequence: Synthetic oligonucleotide
  Antisense strand to SEQ ID NO: 193874
ugacccaacuguaaucagg

SEQ ID NO: 193876 - RNA, 19 nt, Artificial Sequence
  Description of Artificial Sequence: Synthetic oligonucleotide
  Sense strand starting at position 721 of SEQ ID NO: 2499
ggcauaaagcuuuacacuu

SEQ ID NO: 193877 - RNA, 19 nt, Artificial Sequence
  Description of Artificial Sequence: Synthetic oligonucleotide
  Antisense strand to SEQ ID NO: 193876
aaguguaaagcuuuaugcc

SEQ ID NO: 193878 - RNA, 19 nt, Artificial Sequence
  Description of Artificial Sequence: Synthetic oligonucleotide
  Sense strand starting at position 752 of SEQ ID NO: 2499
uuucuugugugauccucaa

SEQ ID NO: 193879 - RNA, 19 nt, Artificial Sequence
  Description of Artificial Sequence: Synthetic oligonucleotide
  Antisense strand to SEQ ID NO: 193878
uugaggaucacacaagaaa

SEQ ID NO: 193880 - RNA, 19 nt, Artificial Sequence
  Description of Artificial Sequence: Synthetic oligonucleotide
  Sense strand starting at position 1224 of SEQ ID NO: 2499
uaccgaugguuucuagauu

SEQ ID NO: 193881 - RNA, 19 nt, Artificial Sequence
  Description of Artificial Sequence: Synthetic oligonucleotide
  Antisense strand to SEQ ID NO: 193880
aaucuagaaaccaucggua

SEQ ID NO: 193882 - RNA, 19 nt, Artificial Sequence
  Description of Artificial Sequence: Synthetic oligonucleotide
  Sense strand starting at position 1359 of SEQ ID NO: 2499
auaggaauaugcgugucaa

SEQ ID NO: 193883 - RNA, 19 nt, Artificial Sequence
  Description of Artificial Sequence: Synthetic oligonucleotide
  Antisense strand to SEQ ID NO: 193882
uugacacgcauauuccuau

SEQ ID NO: 193884 - RNA, 19 nt, Artificial Sequence
  Description of Artificial Sequence: Synthetic oligonucleotide
  Sense strand starting at position 1421 of SEQ ID NO: 2499
aguuuaaaccugugaugac

SEQ ID NO: 193885 - RNA, 19 nt, Artificial Sequence
  Description of Artificial Sequence: Synthetic oligonucleotide
  Antisense strand to SEQ ID NO: 193884
gucaucacagguuuaaacu

SEQ ID NO: 193886 - RNA, 19 nt, Artificial Sequence
  Description of Artificial Sequence: Synthetic oligonucleotide
  Sense strand starting at position 2491 of SEQ ID NO: 2499
gacgucuccugggcugaaa

SEQ ID NO: 193887 - RNA, 19 nt, Artificial Sequence
  Description of Artificial Sequence: Synthetic oligonucleotide
  Antisense strand to SEQ ID NO: 193886
uuucagcccaggagacguc

SEQ ID NO: 193888 - RNA, 19 nt, Artificial Sequence
  Description of Artificial Sequence: Synthetic oligonucleotide
  Sense strand starting at position 2514 of SEQ ID NO: 2499
agcgagaagugaucgggaa

SEQ ID NO: 193889 - RNA, 19 nt, Artificial Sequence
  Description of Artificial Sequence: Synthetic oligonucleotide
  Antisense strand to SEQ ID NO: 193888
uucccgaucacuucucgcu

SEQ ID NO: 193890 - RNA, 19 nt, Artificial Sequence
  Description of Artificial Sequence: Synthetic oligonucleotide
  Sense strand starting at position 2515 of SEQ ID NO: 2499
gcgagaagugaucgggaac

SEQ ID NO: 193891 - RNA, 19 nt, Artificial Sequence
  Description of Artificial Sequence: Synthetic oligonucleotide
  Antisense strand to SEQ ID NO: 193890
guucccgaucacuucucgc

SEQ ID NO: 193892 - RNA, 19 nt, Artificial Sequence
  Description of Artificial Sequence: Synthetic oligonucleotide
  Sense strand starting at position 2516 of SEQ ID NO: 2499
cgagaagugaucgggaaca

SEQ ID NO: 193893 - RNA, 19 nt, Artificial Sequence
  Description of Artificial Sequence: Synthetic oligonucleotide
  Antisense strand to SEQ ID NO: 193892
uguucccgaucacuucucg

SEQ ID NO: 193894 - RNA, 19 nt, Artificial Sequence
  Description of Artificial Sequence: Synthetic oligonucleotide
  Sense strand starting at position 2565 of SEQ ID NO: 2499
agcgccagccuugaaauaa

SEQ ID NO: 193895 - RNA, 19 nt, Artificial Sequence
  Description of Artificial Sequence: Synthetic oligonucleotide
  Antisense strand to SEQ ID NO: 193894
uuauuucaaggcuggcgcu

SEQ ID NO: 193896 - RNA, 19 nt, Artificial Sequence
  Description of Artificial Sequence: Synthetic oligonucleotide
  Sense strand starting at position 2627 of SEQ ID NO: 2499
ugcgucucgauguuauuga

SEQ ID NO: 193897 - RNA, 19 nt, Artificial Sequence
  Description of Artificial Sequence: Synthetic oligonucleotide
  Antisense strand to SEQ ID NO: 193896
ucaauaacaucgagacgca

SEQ ID NO: 193898 - RNA, 19 nt, Artificial Sequence
  Description of Artificial Sequence: Synthetic oligonucleotide
  Sense strand starting at position 2682 of SEQ ID NO: 2499
ugagaacgcucaguaagac

SEQ ID NO: 193899 - RNA, 19 nt, Artificial Sequence
  Description of Artificial Sequence: Synthetic oligonucleotide
  Antisense strand to SEQ ID NO: 193898
gucuuacugagcguucuca

SEQ ID NO: 193900 - RNA, 19 nt, Artificial Sequence
  Description of Artificial Sequence: Synthetic oligonucleotide
  Sense strand starting at position 2683 of SEQ ID NO: 2499
gagaacgcucaguaagaca

SEQ ID NO: 193901 - RNA, 19 nt, Artificial Sequence
  Description of Artificial Sequence: Synthetic oligonucleotide
  Antisense strand to SEQ ID NO: 193900
ugucuuacugagcguucuc

SEQ ID NO: 193902 - RNA, 19 nt, Artificial Sequence
  Description of Artificial Sequence: Synthetic oligonucleotide
  Sense strand starting at position 2712 of SEQ ID NO: 2499
uggaaauguacaggcgaga

SEQ ID NO: 193903 - RNA, 19 nt, Artificial Sequence
  Description of Artificial Sequence: Synthetic oligonucleotide
  Antisense strand to SEQ ID NO: 193902
ucucgccuguacauuucca

SEQ ID NO: 193904 - RNA, 19 nt, Artificial Sequence
  Description of Artificial Sequence: Synthetic oligonucleotide
  Sense strand starting at position 2973 of SEQ ID NO: 2499
auacuuacguuucccugau

SEQ ID NO: 193905 - RNA, 19 nt, Artificial Sequence
  Description of Artificial Sequence: Synthetic oligonucleotide
  Antisense strand to SEQ ID NO: 193904
aucagggaaacguaaguau

SEQ ID NO: 193906 - RNA, 19 nt, Artificial Sequence
  Description of Artificial Sequence: Synthetic oligonucleotide
  Sense strand starting at position 3017 of SEQ ID NO: 2499
uggacugugugauuugcau

SEQ ID NO: 193907 - RNA, 19 nt, Artificial Sequence
  Description of Artificial Sequence: Synthetic oligonucleotide
  Antisense strand to SEQ ID NO: 193906
augcaaaucacacagucca

SEQ ID NO: 193908 - RNA, 19 nt, Artificial Sequence
  Description of Artificial Sequence: Synthetic oligonucleotide
  Sense strand starting at position 3085 of SEQ ID NO: 2499
uagauuuccugauggauga

SEQ ID NO: 193909 - RNA, 19 nt, Artificial Sequence
  Description of Artificial Sequence: Synthetic oligonucleotide
  Antisense strand to SEQ ID NO: 193908
ucauccaucaggaaaucua

SEQ ID NO: 193910 - RNA, 19 nt, Artificial Sequence
  Description of Artificial Sequence: Synthetic oligonucleotide
  Sense strand starting at position 3179 of SEQ ID NO: 2499
cccugaauauggguuauug

SEQ ID NO: 193911 - RNA, 19 nt, Artificial Sequence
  Description of Artificial Sequence: Synthetic oligonucleotide
  Antisense strand to SEQ ID NO: 193910
caauaacccauauucaggg

SEQ ID NO: 193912 - RNA, 19 nt, Artificial Sequence
  Description of Artificial Sequence: Synthetic oligonucleotide
  Sense strand starting at position 3181 of SEQ ID NO: 2499
cugaauauggguuauuguu

SEQ ID NO: 193913 - RNA, 19 nt, Artificial Sequence
  Description of Artificial Sequence: Synthetic oligonucleotide
  Antisense strand to SEQ ID NO: 193912
aacaauaacccauauucag

SEQ ID NO: 193914 - RNA, 19 nt, Artificial Sequence
  Description of Artificial Sequence: Synthetic oligonucleotide
  Sense strand starting at position 3315 of SEQ ID NO: 2499
ugaauauugagcugagcug

SEQ ID NO: 193915 - RNA, 19 nt, Artificial Sequence
  Description of Artificial Sequence: Synthetic oligonucleotide
  Antisense strand to SEQ ID NO: 193914
cagcucagcucaauauuca

SEQ ID NO: 193916 - RNA, 19 nt, Artificial Sequence
  Description of Artificial Sequence: Synthetic oligonucleotide
  Sense strand starting at position 3327 of SEQ ID NO: 2499
ugagcugugacuggguuaa

SEQ ID NO: 193917 - RNA, 19 nt, Artificial Sequence
  Description of Artificial Sequence: Synthetic oligonucleotide
  Antisense strand to SEQ ID NO: 193916
uuaacccagucacagcuca

SEQ ID NO: 193918 - RNA, 19 nt, Artificial Sequence
  Description of Artificial Sequence: Synthetic oligonucleotide
  Sense strand starting at position 3329 of SEQ ID NO: 2499
agcugugacuggguuaaca

SEQ ID NO: 193919 - RNA, 19 nt, Artificial Sequence
  Description of Artificial Sequence: Synthetic oligonucleotide
  Antisense strand to SEQ ID NO: 193918
uguuaacccagucacagcu

SEQ ID NO: 193920 - RNA, 19 nt, Artificial Sequence
  Description of Artificial Sequence: Synthetic oligonucleotide
  Sense strand starting at position 3331 of SEQ ID NO: 2499
cugugacuggguuaacagu

SEQ ID NO: 193921 - RNA, 19 nt, Artificial Sequence
  Description of Artificial Sequence: Synthetic oligonucleotide
  Antisense strand to SEQ ID NO: 193920
acuguuaacccagucacag

SEQ ID NO: 193922 - RNA, 19 nt, Artificial Sequence
  Description of Artificial Sequence: Synthetic oligonucleotide
  Sense strand starting at position 3389 of SEQ ID NO: 2499
gugccauuguaauuaaacu

SEQ ID NO: 193923 - RNA, 19 nt, Artificial Sequence
  Description of Artificial Sequence: Synthetic oligonucleotide
  Antisense strand to SEQ ID NO: 193922
aguuuaauuacaauggcac

SEQ ID NO: 193924 - RNA, 19 nt, Artificial Sequence
  Description of Artificial Sequence: Synthetic oligonucleotide
  Sense strand starting at position 3397 of SEQ ID NO: 2499
guaauuaaacuccgugaag

SEQ ID NO: 193925 - RNA, 19 nt, Artificial Sequence
  Description of Artificial Sequence: Synthetic oligonucleotide
  Antisense strand to SEQ ID NO: 193924
cuucacggaguuuaauuac

SEQ ID NO: 193926 - RNA, 19 nt, Artificial Sequence
  Description of Artificial Sequence: Synthetic oligonucleotide
  Sense strand starting at position 3399 of SEQ ID NO: 2499
aauuaaacuccgugaagag

SEQ ID NO: 193927 - RNA, 19 nt, Artificial Sequence
  Description of Artificial Sequence: Synthetic oligonucleotide
  Antisense strand to SEQ ID NO: 193926
cucuucacggaguuuaauu

SEQ ID NO: 193928 - RNA, 19 nt, Artificial Sequence
  Description of Artificial Sequence: Synthetic oligonucleotide
  Sense strand starting at position 3576 of SEQ ID NO: 2499
aaguuugaagcagaucuua

SEQ ID NO: 193929 - RNA, 19 nt, Artificial Sequence
  Description of Artificial Sequence: Synthetic oligonucleotide
  Antisense strand to SEQ ID NO: 193928
uaagaucugcuucaaacuu

SEQ ID NO: 193930 - RNA, 19 nt, Artificial Sequence
  Description of Artificial Sequence: Synthetic oligonucleotide
  Sense strand starting at position 3649 of SEQ ID NO: 2499
gcacuuauuugucuugacu

SEQ ID NO: 193931 - RNA, 19 nt, Artificial Sequence
  Description of Artificial Sequence: Synthetic oligonucleotide
  Antisense strand to SEQ ID NO: 193930
agucaagacaaauaagugc

SEQ ID NO: 193932 - RNA, 19 nt, Artificial Sequence
  Description of Artificial Sequence: Synthetic oligonucleotide
  Sense strand starting at position 3705 of SEQ ID NO: 2499
aucugaugcuaucucaguu

SEQ ID NO: 193933 - RNA, 19 nt, Artificial Sequence
  Description of Artificial Sequence: Synthetic oligonucleotide
  Antisense strand to SEQ ID NO: 193932
aacugagauagcaucagau

SEQ ID NO: 193934 - RNA, 19 nt, Artificial Sequence
  Description of Artificial Sequence: Synthetic oligonucleotide
  Sense strand starting at position 3730 of SEQ ID NO: 2499
uuucuagacuucucuggua

SEQ ID NO: 193935 - RNA, 19 nt, Artificial Sequence
  Description of Artificial Sequence: Synthetic oligonucleotide
  Antisense strand to SEQ ID NO: 193934
uaccagagaagucuagaaa

SEQ ID NO: 193936 - RNA, 19 nt, Artificial Sequence
  Description of Artificial Sequence: Synthetic oligonucleotide
  Sense strand starting at position 3804 of SEQ ID NO: 2499
ucccaauaugcuuaaggua

SEQ ID NO: 193937 - RNA, 19 nt, Artificial Sequence
  Description of Artificial Sequence: Synthetic oligonucleotide
  Antisense strand to SEQ ID NO: 193936
uaccuuaagcauauuggga

SEQ ID NO: 193938 - RNA, 19 nt, Artificial Sequence
  Description of Artificial Sequence: Synthetic oligonucleotide
  Sense strand starting at position 3812 of SEQ ID NO: 2499
ugcuuaagguagcuaacau

SEQ ID NO: 193939 - RNA, 19 nt, Artificial Sequence
  Description of Artificial Sequence: Synthetic oligonucleotide
  Antisense strand to SEQ ID NO: 193938
auguuagcuaccuuaagca

SEQ ID NO: 193940 - RNA, 19 nt, Artificial Sequence
  Description of Artificial Sequence: Synthetic oligonucleotide
  Sense strand starting at position 3848 of SEQ ID NO: 2499
acgugaaugcucugaucag

SEQ ID NO: 193941 - RNA, 19 nt, Artificial Sequence
  Description of Artificial Sequence: Synthetic oligonucleotide
  Antisense strand to SEQ ID NO: 193940
cugaucagagcauucacgu

SEQ ID NO: 193942 - RNA, 19 nt, Artificial Sequence
  Description of Artificial Sequence: Synthetic oligonucleotide
  Sense strand starting at position 53 of SEQ ID NO: 2500
uggcaacaguuucuuacua

SEQ ID NO: 193943 - RNA, 19 nt, Artificial Sequence
  Description of Artificial Sequence: Synthetic oligonucleotide
  Antisense strand to SEQ ID NO: 193942
uaguaagaaacuguugcca

SEQ ID NO: 193944 - RNA, 19 nt, Artificial Sequence
  Description of Artificial Sequence: Synthetic oligonucleotide
  Sense strand starting at position 54 of SEQ ID NO: 2500
ggcaacaguuucuuacuaa

SEQ ID NO: 193945 - RNA, 19 nt, Artificial Sequence
  Description of Artificial Sequence: Synthetic oligonucleotide
  Antisense strand to SEQ ID NO: 193944
uuaguaagaaacuguugcc

SEQ ID NO: 193946 - RNA, 19 nt, Artificial Sequence
  Description of Artificial Sequence: Synthetic oligonucleotide
  Sense strand starting at position 947 of SEQ ID NO: 2500
cuaagagguuaaucaaggu

SEQ ID NO: 193947 - RNA, 19 nt, Artificial Sequence
  Description of Artificial Sequence: Synthetic oligonucleotide
  Antisense strand to SEQ ID NO: 193946
accuugauuaaccucuuag

SEQ ID NO: 193948 - RNA, 19 nt, Artificial Sequence
  Description of Artificial Sequence: Synthetic oligonucleotide
  Sense strand starting at position 951 of SEQ ID NO: 2500
gagguuaaucaagguuaac

SEQ ID NO: 193949 - RNA, 19 nt, Artificial Sequence
  Description of Artificial Sequence: Synthetic oligonucleotide
  Antisense strand to SEQ ID NO: 193948
guuaaccuugauuaaccuc

SEQ ID NO: 193950 - RNA, 19 nt, Artificial Sequence
  Description of Artificial Sequence: Synthetic oligonucleotide
  Sense strand starting at position 1147 of SEQ ID NO: 2500
ugagguggaucgccucaaa

SEQ ID NO: 193951 - RNA, 19 nt, Artificial Sequence
  Description of Artificial Sequence: Synthetic oligonucleotide
  Antisense strand to SEQ ID NO: 193950
uuugaggcgauccaccuca

SEQ ID NO: 193952 - RNA, 19 nt, Artificial Sequence
  Description of Artificial Sequence: Synthetic oligonucleotide
  Sense strand starting at position 1150 of SEQ ID NO: 2500
gguggaucgccucaaagac

SEQ ID NO: 193953 - RNA, 19 nt, Artificial Sequence
  Description of Artificial Sequence: Synthetic oligonucleotide
  Antisense strand to SEQ ID NO: 193952
gucuuugaggcgauccacc

SEQ ID NO: 193954 - RNA, 19 nt, Artificial Sequence
  Description of Artificial Sequence: Synthetic oligonucleotide
  Sense strand starting at position 1165 of SEQ ID NO: 2500
agaccuaccugagugcaau

SEQ ID NO: 193955 - RNA, 19 nt, Artificial Sequence
  Description of Artificial Sequence: Synthetic oligonucleotide
  Antisense strand to SEQ ID NO: 193954
auugcacucagguaggucu

SEQ ID NO: 193956 - RNA, 19 nt, Artificial Sequence
  Description of Artificial Sequence: Synthetic oligonucleotide
  Sense strand starting at position 1644 of SEQ ID NO: 2500
gggauaucgguaggaauga

SEQ ID NO: 193957 - RNA, 19 nt, Artificial Sequence
  Description of Artificial Sequence: Synthetic oligonucleotide
  Antisense strand to SEQ ID NO: 193956
ucauuccuaccgauauccc

SEQ ID NO: 193958 - RNA, 19 nt, Artificial Sequence
  Description of Artificial Sequence: Synthetic oligonucleotide
  Sense strand starting at position 1781 of SEQ ID NO: 2500
guucuaccaccucgauaau

SEQ ID NO: 193959 - RNA, 19 nt, Artificial Sequence
  Description of Artificial Sequence: Synthetic oligonucleotide
  Antisense strand to SEQ ID NO: 193958
auuaucgaggugguagaac

SEQ ID NO: 193960 - RNA, 19 nt, Artificial Sequence
  Description of Artificial Sequence: Synthetic oligonucleotide
  Sense strand starting at position 1896 of SEQ ID NO: 2500
ccacuucucugggcccaaa

SEQ ID NO: 193961 - RNA, 19 nt, Artificial Sequence
  Description of Artificial Sequence: Synthetic oligonucleotide
  Antisense strand to SEQ ID NO: 193960
uuugggcccagagaagugg

SEQ ID NO: 193962 - RNA, 19 nt, Artificial Sequence
  Description of Artificial Sequence: Synthetic oligonucleotide
  Sense strand starting at position 2181 of SEQ ID NO: 2500
aagaguaguucuccugggu

SEQ ID NO: 193963 - RNA, 19 nt, Artificial Sequence
  Description of Artificial Sequence: Synthetic oligonucleotide
  Antisense strand to SEQ ID NO: 193962
acccaggagaacuacucuu

SEQ ID NO: 193964 - RNA, 19 nt, Artificial Sequence
  Description of Artificial Sequence: Synthetic oligonucleotide
  Sense strand starting at position 2529 of SEQ ID NO: 2500
cagagaugcucuuuagagg

SEQ ID NO: 193965 - RNA, 19 nt, Artificial Sequence
  Description of Artificial Sequence: Synthetic oligonucleotide
  Antisense strand to SEQ ID NO: 193964
ccucuaaagagcaucucug

SEQ ID NO: 193966 - RNA, 19 nt, Artificial Sequence
  Description of Artificial Sequence: Synthetic oligonucleotide
  Sense strand starting at position 2530 of SEQ ID NO: 2500
agagaugcucuuuagaggu

SEQ ID NO: 193967 - RNA, 19 nt, Artificial Sequence
  Description of Artificial Sequence: Synthetic oligonucleotide
  Antisense strand to SEQ ID NO: 193966
accucuaaagagcaucucu

SEQ ID NO: 193968 - RNA, 19 nt, Artificial Sequence
  Description of Artificial Sequence: Synthetic oligonucleotide
  Sense strand starting at position 2711 of SEQ ID NO: 2500
cccggauaauuagcaguuu

SEQ ID NO: 193969 - RNA, 19 nt, Artificial Sequence
  Description of Artificial Sequence: Synthetic oligonucleotide
  Antisense strand to SEQ ID NO: 193968
aaacugcuaauuauccggg

SEQ ID NO: 193970 - RNA, 19 nt, Artificial Sequence
  Description of Artificial Sequence: Synthetic oligonucleotide
  Sense strand starting at position 2724 of SEQ ID NO: 2500
caguuugaccuugggcaaa

SEQ ID NO: 193971 - RNA, 19 nt, Artificial Sequence
  Description of Artificial Sequence: Synthetic oligonucleotide
  Antisense strand to SEQ ID NO: 193970
uuugcccaaggucaaacug

SEQ ID NO: 193972 - RNA, 19 nt, Artificial Sequence
  Description of Artificial Sequence: Synthetic oligonucleotide
  Sense strand starting at position 2794 of SEQ ID NO: 2500
ggaguagacuaucuuuaag

SEQ ID NO: 193973 - RNA, 19 nt, Artificial Sequence
  Description of Artificial Sequence: Synthetic oligonucleotide
  Antisense strand to SEQ ID NO: 193972
cuuaaagauagucuacucc

SEQ ID NO: 193974 - RNA, 19 nt, Artificial Sequence
  Description of Artificial Sequence: Synthetic oligonucleotide
  Sense strand starting at position 2796 of SEQ ID NO: 2500
aguagacuaucuuuaaggu

SEQ ID NO: 193975 - RNA, 19 nt, Artificial Sequence
  Description of Artificial Sequence: Synthetic oligonucleotide
  Antisense strand to SEQ ID NO: 193974
accuuaaagauagucuacu

SEQ ID NO: 193976 - RNA, 19 nt, Artificial Sequence
  Description of Artificial Sequence: Synthetic oligonucleotide
  Sense strand starting at position 2823 of SEQ ID NO: 2500
gugcuaacauuugcaguuu

SEQ ID NO: 193977 - RNA, 19 nt, Artificial Sequence
  Description of Artificial Sequence: Synthetic oligonucleotide
  Antisense strand to SEQ ID NO: 193976
aaacugcaaauguuagcac

SEQ ID NO: 193978 - RNA, 19 nt, Artificial Sequence
  Description of Artificial Sequence: Synthetic oligonucleotide
  Sense strand starting at position 3022 of SEQ ID NO: 2500
uuggauucuccuuggcacu

SEQ ID NO: 193979 - RNA, 19 nt, Artificial Sequence
  Description of Artificial Sequence: Synthetic oligonucleotide
  Antisense strand to SEQ ID NO: 193978
agugccaaggagaauccaa

SEQ ID NO: 193980 - RNA, 19 nt, Artificial Sequence
  Description of Artificial Sequence: Synthetic oligonucleotide
  Sense strand starting at position 3023 of SEQ ID NO: 2500
uggauucuccuuggcacuu

SEQ ID NO: 193981 - RNA, 19 nt, Artificial Sequence
  Description of Artificial Sequence: Synthetic oligonucleotide
  Antisense strand to SEQ ID NO: 193980
aagugccaaggagaaucca

SEQ ID NO: 193982 - RNA, 19 nt, Artificial Sequence
  Description of Artificial Sequence: Synthetic oligonucleotide
  Sense strand starting at position 3427 of SEQ ID NO: 2500
gcgagcugaauccaaaguu

SEQ ID NO: 193983 - RNA, 19 nt, Artificial Sequence
  Description of Artificial Sequence: Synthetic oligonucleotide
  Antisense strand to SEQ ID NO: 193982
aacuuuggauucagcucgc

SEQ ID NO: 193984 - RNA, 19 nt, Artificial Sequence
  Description of Artificial Sequence: Synthetic oligonucleotide
  Sense strand starting at position 3449 of SEQ ID NO: 2500
ggaacagaauuguuggguu

SEQ ID NO: 193985 - RNA, 19 nt, Artificial Sequence
  Description of Artificial Sequence: Synthetic oligonucleotide
  Antisense strand to SEQ ID NO: 193984
aacccaacaauucuguucc

SEQ ID NO: 193986 - RNA, 19 nt, Artificial Sequence
  Description of Artificial Sequence: Synthetic oligonucleotide
  Sense strand starting at position 3453 of SEQ ID NO: 2500
cagaauuguuggguucgau

SEQ ID NO: 193987 - RNA, 19 nt, Artificial Sequence
  Description of Artificial Sequence: Synthetic oligonucleotide
  Antisense strand to SEQ ID NO: 193986
aucgaacccaacaauucug

SEQ ID NO: 193988 - RNA, 19 nt, Artificial Sequence
  Description of Artificial Sequence: Synthetic oligonucleotide
  Sense strand starting at position 3500 of SEQ ID NO: 2500
ggugggaaaguauguggaa

SEQ ID NO: 193989 - RNA, 19 nt, Artificial Sequence
  Description of Artificial Sequence: Synthetic oligonucleotide
  Antisense strand to SEQ ID NO: 193988
uuccacauacuuucccacc

SEQ ID NO: 193990 - RNA, 19 nt, Artificial Sequence
  Description of Artificial Sequence: Synthetic oligonucleotide
  Sense strand starting at position 3501 of SEQ ID NO: 2500
gugggaaaguauguggaau

SEQ ID NO: 193991 - RNA, 19 nt, Artificial Sequence
  Description of Artificial Sequence: Synthetic oligonucleotide
  Antisense strand to SEQ ID NO: 193990
auuccacauacuuucccac

SEQ ID NO: 193992 - RNA, 19 nt, Artificial Sequence
  Description of Artificial Sequence: Synthetic oligonucleotide
  Sense strand starting at position 3502 of SEQ ID NO: 2500
ugggaaaguauguggaauu

SEQ ID NO: 193993 - RNA, 19 nt, Artificial Sequence
  Description of Artificial Sequence: Synthetic oligonucleotide
  Antisense strand to SEQ ID NO: 193992
aauuccacauacuuuccca

SEQ ID NO: 193994 - RNA, 19 nt, Artificial Sequence
  Description of Artificial Sequence: Synthetic oligonucleotide
  Sense strand starting at position 3520 of SEQ ID NO: 2500
ugagaagacaguggguuua

SEQ ID NO: 193995 - RNA, 19 nt, Artificial Sequence
  Description of Artificial Sequence: Synthetic oligonucleotide
  Antisense strand to SEQ ID NO: 193994
uaaacccacugucuucuca

SEQ ID NO: 193996 - RNA, 19 nt, Artificial Sequence
  Description of Artificial Sequence: Synthetic oligonucleotide
  Sense strand starting at position 3532 of SEQ ID NO: 2500
ggguuuacuguggaguaag

SEQ ID NO: 193997 - RNA, 19 nt, Artificial Sequence
  Description of Artificial Sequence: Synthetic oligonucleotide
  Antisense strand to SEQ ID NO: 193996
cuuacuccacaguaaaccc

SEQ ID NO: 193998 - RNA, 19 nt, Artificial Sequence
  Description of Artificial Sequence: Synthetic oligonucleotide
  Sense strand starting at position 3543 of SEQ ID NO: 2500
ggaguaagcugaguugauc

SEQ ID NO: 193999 - RNA, 19 nt, Artificial Sequence
  Description of Artificial Sequence: Synthetic oligonucleotide
  Antisense strand to SEQ ID NO: 193998
gaucaacucagcuuacucc

SEQ ID NO: 194000 - RNA, 19 nt, Artificial Sequence
  Description of Artificial Sequence: Synthetic oligonucleotide
  Sense strand starting at position 3607 of SEQ ID NO: 2500
uggagugagacccaaguuu

SEQ ID NO: 194001 - RNA, 19 nt, Artificial Sequence
  Description of Artificial Sequence: Synthetic oligonucleotide
  Antisense strand to SEQ ID NO: 194000
aaacuugggucucacucca

SEQ ID NO: 194002 - RNA, 19 nt, Artificial Sequence
  Description of Artificial Sequence: Synthetic oligonucleotide
  Sense strand starting at position 3616 of SEQ ID NO: 2500
acccaaguuuaaguaagua

SEQ ID NO: 194003 - RNA, 19 nt, Artificial Sequence
  Description of Artificial Sequence: Synthetic oligonucleotide
  Antisense strand to SEQ ID NO: 194002
uacuuacuuaaacuugggu

SEQ ID NO: 194004 - RNA, 19 nt, Artificial Sequence
  Description of Artificial Sequence: Synthetic oligonucleotide
  Sense strand starting at position 3635 of SEQ ID NO: 2500
guucguugagaucauguga

SEQ ID NO: 194005 - RNA, 19 nt, Artificial Sequence
  Description of Artificial Sequence: Synthetic oligonucleotide
  Antisense strand to SEQ ID NO: 194004
ucacaugaucucaacgaac

SEQ ID NO: 194006 - RNA, 19 nt, Artificial Sequence
  Description of Artificial Sequence: Synthetic oligonucleotide
  Sense strand starting at position 3642 of SEQ ID NO: 2500
gagaucaugugagcuugua

SEQ ID NO: 194007 - RNA, 19 nt, Artificial Sequence
  Description of Artificial Sequence: Synthetic oligonucleotide
  Antisense strand to SEQ ID NO: 194006
uacaagcucacaugaucuc

SEQ ID NO: 194008 - RNA, 19 nt, Artificial Sequence
  Description of Artificial Sequence: Synthetic oligonucleotide
  Sense strand starting at position 3658 of SEQ ID NO: 2500
guacuaguuguauaguagu

SEQ ID NO: 194009 - RNA, 19 nt, Artificial Sequence
  Description of Artificial Sequence: Synthetic oligonucleotide
  Antisense strand to SEQ ID NO: 194008
acuacuauacaacuaguac

SEQ ID NO: 194010 - RNA, 19 nt, Artificial Sequence
  Description of Artificial Sequence: Synthetic oligonucleotide
  Sense strand starting at position 3678 of SEQ ID NO: 2500
cucagaaggcguuaugaac

SEQ ID NO: 194011 - RNA, 19 nt, Artificial Sequence
  Description of Artificial Sequence: Synthetic oligonucleotide
  Antisense strand to SEQ ID NO: 194010
guucauaacgccuucugag

SEQ ID NO: 194012 - RNA, 19 nt, Artificial Sequence
  Description of Artificial Sequence: Synthetic oligonucleotide
  Sense strand starting at position 3687 of SEQ ID NO: 2500
cguuaugaacauugugauu

SEQ ID NO: 194013 - RNA, 19 nt, Artificial Sequence
  Description of Artificial Sequence: Synthetic oligonucleotide
  Antisense strand to SEQ ID NO: 194012
aaucacaauguucauaacg

SEQ ID NO: 194014 - RNA, 19 nt, Artificial Sequence
  Description of Artificial Sequence: Synthetic oligonucleotide
  Sense strand starting at position 3696 of SEQ ID NO: 2500
cauugugauugggcucuga

SEQ ID NO: 194015 - RNA, 19 nt, Artificial Sequence
  Description of Artificial Sequence: Synthetic oligonucleotide
  Antisense strand to SEQ ID NO: 194014
ucagagcccaaucacaaug

SEQ ID NO: 194016 - RNA, 19 nt, Artificial Sequence
  Description of Artificial Sequence: Synthetic oligonucleotide
  Sense strand starting at position 3875 of SEQ ID NO: 2500
gagcuaggauucucaccua

SEQ ID NO: 194017 - RNA, 19 nt, Artificial Sequence
  Description of Artificial Sequence: Synthetic oligonucleotide
  Antisense strand to SEQ ID NO: 194016
uaggugagaauccuagcuc

SEQ ID NO: 194018 - RNA, 19 nt, Artificial Sequence
  Description of Artificial Sequence: Synthetic oligonucleotide
  Sense strand starting at position 3878 of SEQ ID NO: 2500
cuaggauucucaccuaguc

SEQ ID NO: 194019 - RNA, 19 nt, Artificial Sequence
  Description of Artificial Sequence: Synthetic oligonucleotide
  Antisense strand to SEQ ID NO: 194018
gacuaggugagaauccuag

SEQ ID NO: 194020 - RNA, 19 nt, Artificial Sequence
  Description of Artificial Sequence: Synthetic oligonucleotide
  Sense strand starting at position 3942 of SEQ ID NO: 2500
gugguuacuuagcuuaaga

SEQ ID NO: 194021 - RNA, 19 nt, Artificial Sequence
  Description of Artificial Sequence: Synthetic oligonucleotide
  Antisense strand to SEQ ID NO: 194020
ucuuaagcuaaguaaccac

SEQ ID NO: 194022 - RNA, 19 nt, Artificial Sequence
  Description of Artificial Sequence: Synthetic oligonucleotide
  Sense strand starting at position 54 of SEQ ID NO: 2501
guggaauuugcaggucugu

SEQ ID NO: 194023 - RNA, 19 nt, Artificial Sequence
  Description of Artificial Sequence: Synthetic oligonucleotide
  Antisense strand to SEQ ID NO: 194022
acagaccugcaaauuccac

SEQ ID NO: 194024 - RNA, 19 nt, Artificial Sequence
  Description of Artificial Sequence: Synthetic oligonucleotide
  Sense strand starting at position 78 of SEQ ID NO: 2501
ugacauuaucaaugcuaug

SEQ ID NO: 194025 - RNA, 19 nt, Artificial Sequence
  Description of Artificial Sequence: Synthetic oligonucleotide
  Antisense strand to SEQ ID NO: 194024
cauagcauugauaauguca

SEQ ID NO: 194026 - RNA, 19 nt, Artificial Sequence
  Description of Artificial Sequence: Synthetic oligonucleotide
  Sense strand starting at position 147 of SEQ ID NO: 2501
guuaucucaguuuaaaggu

SEQ ID NO: 194027 - RNA, 19 nt, Artificial Sequence
  Description of Artificial Sequence: Synthetic oligonucleotide
  Antisense strand to SEQ ID NO: 194026
accuuuaaacugagauaac

SEQ ID NO: 194028 - RNA, 19 nt, Artificial Sequence
  Description of Artificial Sequence: Synthetic oligonucleotide
  Sense strand starting at position 191 of SEQ ID NO: 2501
cuauauagggaauguguuu

SEQ ID NO: 194029 - RNA, 19 nt, Artificial Sequence
  Description of Artificial Sequence: Synthetic oligonucleotide
  Antisense strand to SEQ ID NO: 194028
aaacacauucccuauauag

SEQ ID NO: 194030 - RNA, 19 nt, Artificial Sequence
  Description of Artificial Sequence: Synthetic oligonucleotide
  Sense strand starting at position 703 of SEQ ID NO: 2501
gagaacuucucguuaaaua

SEQ ID NO: 194031 - RNA, 19 nt, Artificial Sequence
  Description of Artificial Sequence: Synthetic oligonucleotide
  Antisense strand to SEQ ID NO: 194030
uauuuaacgagaaguucuc

SEQ ID NO: 194032 - RNA, 19 nt, Artificial Sequence
  Description of Artificial Sequence: Synthetic oligonucleotide
  Sense strand starting at position 832 of SEQ ID NO: 2501
acagauguauccuuuggga

SEQ ID NO: 194033 - RNA, 19 nt, Artificial Sequence
  Description of Artificial Sequence: Synthetic oligonucleotide
  Antisense strand to SEQ ID NO: 194032
ucccaaaggauacaucugu

SEQ ID NO: 194034 - RNA, 19 nt, Artificial Sequence
  Description of Artificial Sequence: Synthetic oligonucleotide
  Sense strand starting at position 834 of SEQ ID NO: 2501
agauguauccuuugggacu

SEQ ID NO: 194035 - RNA, 19 nt, Artificial Sequence
  Description of Artificial Sequence: Synthetic oligonucleotide
  Antisense strand to SEQ ID NO: 194034
agucccaaaggauacaucu

SEQ ID NO: 194036 - RNA, 19 nt, Artificial Sequence
  Description of Artificial Sequence: Synthetic oligonucleotide
  Sense strand starting at position 1014 of SEQ ID NO: 2501
ucaggaucugcuuacauua

SEQ ID NO: 194037 - RNA, 19 nt, Artificial Sequence
  Description of Artificial Sequence: Synthetic oligonucleotide
  Antisense strand to SEQ ID NO: 194036
uaauguaagcagauccuga

SEQ ID NO: 194038 - RNA, 19 nt, Artificial Sequence
  Description of Artificial Sequence: Synthetic oligonucleotide
  Sense strand starting at position 1060 of SEQ ID NO: 2501
uguuauuuccacugccuau

SEQ ID NO: 194039 - RNA, 19 nt, Artificial Sequence
  Description of Artificial Sequence: Synthetic oligonucleotide
  Antisense strand to SEQ ID NO: 194038
auaggcaguggaaauaaca

SEQ ID NO: 194040 - RNA, 19 nt, Artificial Sequence
  Description of Artificial Sequence: Synthetic oligonucleotide
  Sense strand starting at position 1331 of SEQ ID NO: 2501
uuauaagcuggucagauua

SEQ ID NO: 194041 - RNA, 19 nt, Artificial Sequence
  Description of Artificial Sequence: Synthetic oligonucleotide
  Antisense strand to SEQ ID NO: 194040
uaaucugaccagcuuauaa

SEQ ID NO: 194042 - RNA, 19 nt, Artificial Sequence
  Description of Artificial Sequence: Synthetic oligonucleotide
  Sense strand starting at position 1398 of SEQ ID NO: 2501
acuguuuguggugaaagaa

SEQ ID NO: 194043 - RNA, 19 nt, Artificial Sequence
  Description of Artificial Sequence: Synthetic oligonucleotide
  Antisense strand to SEQ ID NO: 194042
uucuuucaccacaaacagu

SEQ ID NO: 194044 - RNA, 19 nt, Artificial Sequence
  Description of Artificial Sequence: Synthetic oligonucleotide
  Sense strand starting at position 1436 of SEQ ID NO: 2501
gcuagaucauccucauagg

SEQ ID NO: 194045 - RNA, 19 nt, Artificial Sequence
  Description of Artificial Sequence: Synthetic oligonucleotide
  Antisense strand to SEQ ID NO: 194044
ccuaugaggaugaucuagc

SEQ ID NO: 194046 - RNA, 19 nt, Artificial Sequence
  Description of Artificial Sequence: Synthetic oligonucleotide
  Sense strand starting at position 1445 of SEQ ID NO: 2501
uccucauaggcauaaggua

SEQ ID NO: 194047 - RNA, 19 nt, Artificial Sequence
  Description of Artificial Sequence: Synthetic oligonucleotide
  Antisense strand to SEQ ID NO: 194046
uaccuuaugccuaugagga

SEQ ID NO: 194048 - RNA, 19 nt, Artificial Sequence
  Description of Artificial Sequence: Synthetic oligonucleotide
  Sense strand starting at position 1639 of SEQ ID NO: 2501
gcuuauauacacugauaag

SEQ ID NO: 194049 - RNA, 19 nt, Artificial Sequence
  Description of Artificial Sequence: Synthetic oligonucleotide
  Antisense strand to SEQ ID NO: 194048
cuuaucaguguauauaagc

SEQ ID NO: 194050 - RNA, 19 nt, Artificial Sequence
  Description of Artificial Sequence: Synthetic oligonucleotide
  Sense strand starting at position 1651 of SEQ ID NO: 2501
ugauaagcgaauuauguuu

SEQ ID NO: 194051 - RNA, 19 nt, Artificial Sequence
  Description of Artificial Sequence: Synthetic oligonucleotide
  Antisense strand to SEQ ID NO: 194050
aaacauaauucgcuuauca

SEQ ID NO: 194052 - RNA, 19 nt, Artificial Sequence
  Description of Artificial Sequence: Synthetic oligonucleotide
  Sense strand starting at position 1656 of SEQ ID NO: 2501
agcgaauuauguuuagaaa

SEQ ID NO: 194053 - RNA, 19 nt, Artificial Sequence
  Description of Artificial Sequence: Synthetic oligonucleotide
  Antisense strand to SEQ ID NO: 194052
uuucuaaacauaauucgcu

SEQ ID NO: 194054 - RNA, 19 nt, Artificial Sequence
  Description of Artificial Sequence: Synthetic oligonucleotide
  Sense strand starting at position 1657 of SEQ ID NO: 2501
gcgaauuauguuuagaaau

SEQ ID NO: 194055 - RNA, 19 nt, Artificial Sequence
  Description of Artificial Sequence: Synthetic oligonucleotide
  Antisense strand to SEQ ID NO: 194054
auuucuaaacauaauucgc

SEQ ID NO: 194056 - RNA, 19 nt, Artificial Sequence
  Description of Artificial Sequence: Synthetic oligonucleotide
  Sense strand starting at position 1753 of SEQ ID NO: 2501
ggagauaaggucuguccau

SEQ ID NO: 194057 - RNA, 19 nt, Artificial Sequence
  Description of Artificial Sequence: Synthetic oligonucleotide
  Antisense strand to SEQ ID NO: 194056
auggacagaccuuaucucc

SEQ ID NO: 194058 - RNA, 19 nt, Artificial Sequence
  Description of Artificial Sequence: Synthetic oligonucleotide
  Sense strand starting at position 1754 of SEQ ID NO: 2501
gagauaaggucuguccauc

SEQ ID NO: 194059 - RNA, 19 nt, Artificial Sequence
  Description of Artificial Sequence: Synthetic oligonucleotide
  Antisense strand to SEQ ID NO: 194058
gauggacagaccuuaucuc

SEQ ID NO: 194060 - RNA, 19 nt, Artificial Sequence
  Description of Artificial Sequence: Synthetic oligonucleotide
  Sense strand starting at position 1911 of SEQ ID NO: 2501
ugcagaaaucugcagaauc

SEQ ID NO: 194061 - RNA, 19 nt, Artificial Sequence
  Description of Artificial Sequence: Synthetic oligonucleotide
  Antisense strand to SEQ ID NO: 194060
gauucugcagauuucugca

SEQ ID NO: 194062 - RNA, 19 nt, Artificial Sequence
  Description of Artificial Sequence: Synthetic oligonucleotide
  Sense strand starting at position 1995 of SEQ ID NO: 2501
ggaaauagaugccuacuga

SEQ ID NO: 194063 - RNA, 19 nt, Artificial Sequence
  Description of Artificial Sequence: Synthetic oligonucleotide
  Antisense strand to SEQ ID NO: 194062
ucaguaggcaucuauuucc

SEQ ID NO: 194064 - RNA, 19 nt, Artificial Sequence
  Description of Artificial Sequence: Synthetic oligonucleotide
  Sense strand starting at position 2118 of SEQ ID NO: 2501
ugcuaaguacuauaaugaa

SEQ ID NO: 194065 - RNA, 19 nt, Artificial Sequence
  Description of Artificial Sequence: Synthetic oligonucleotide
  Antisense strand to SEQ ID NO: 194064
uucauuauaguacuuagca

SEQ ID NO: 194066 - RNA, 19 nt, Artificial Sequence
  Description of Artificial Sequence: Synthetic oligonucleotide
  Sense strand starting at position 2142 of SEQ ID NO: 2501
acuaccacgugauuuguua

SEQ ID NO: 194067 - RNA, 19 nt, Artificial Sequence
  Description of Artificial Sequence: Synthetic oligonucleotide
  Antisense strand to SEQ ID NO: 194066
uaacaaaucacgugguagu

SEQ ID NO: 194068 - RNA, 19 nt, Artificial Sequence
  Description of Artificial Sequence: Synthetic oligonucleotide
  Sense strand starting at position 2146 of SEQ ID NO: 2501
ccacgugauuuguuaauca

SEQ ID NO: 194069 - RNA, 19 nt, Artificial Sequence
  Description of Artificial Sequence: Synthetic oligonucleotide
  Antisense strand to SEQ ID NO: 194068
ugauuaacaaaucacgugg

SEQ ID NO: 194070 - RNA, 19 nt, Artificial Sequence
  Description of Artificial Sequence: Synthetic oligonucleotide
  Sense strand starting at position 2180 of SEQ ID NO: 2501
agucuuaugggucacugga

SEQ ID NO: 194071 - RNA, 19 nt, Artificial Sequence
  Description of Artificial Sequence: Synthetic oligonucleotide
  Antisense strand to SEQ ID NO: 194070
uccagugacccauaagacu

SEQ ID NO: 194072 - RNA, 19 nt, Artificial Sequence
  Description of Artificial Sequence: Synthetic oligonucleotide
  Sense strand starting at position 2182 of SEQ ID NO: 2501
ucuuaugggucacuggauu

SEQ ID NO: 194073 - RNA, 19 nt, Artificial Sequence
  Description of Artificial Sequence: Synthetic oligonucleotide
  Antisense strand to SEQ ID NO: 194072
aauccagugacccauaaga

SEQ ID NO: 194074 - RNA, 19 nt, Artificial Sequence
  Description of Artificial Sequence: Synthetic oligonucleotide
  Sense strand starting at position 2341 of SEQ ID NO: 2501
acagaacugcucugagagu

SEQ ID NO: 194075 - RNA, 19 nt, Artificial Sequence
  Description of Artificial Sequence: Synthetic oligonucleotide
  Antisense strand to SEQ ID NO: 194074
acucucagagcaguucugu

SEQ ID NO: 194076 - RNA, 19 nt, Artificial Sequence
  Description of Artificial Sequence: Synthetic oligonucleotide
  Sense strand starting at position 2350 of SEQ ID NO: 2501
cucugagaguucucaaaua

SEQ ID NO: 194077 - RNA, 19 nt, Artificial Sequence
  Description of Artificial Sequence: Synthetic oligonucleotide
  Antisense strand to SEQ ID NO: 194076
uauuugagaacucucagag

SEQ ID NO: 194078 - RNA, 19 nt, Artificial Sequence
  Description of Artificial Sequence: Synthetic oligonucleotide
  Sense strand starting at position 2364 of SEQ ID NO: 2501
aaauaauaugagggugcau

SEQ ID NO: 194079 - RNA, 19 nt, Artificial Sequence
  Description of Artificial Sequence: Synthetic oligonucleotide
  Antisense strand to SEQ ID NO: 194078
augcacccucauauuauuu

SEQ ID NO: 194080 - RNA, 19 nt, Artificial Sequence
  Description of Artificial Sequence: Synthetic oligonucleotide
  Sense strand starting at position 2389 of SEQ ID NO: 2501
gaaggcagucacuaaguuu

SEQ ID NO: 194081 - RNA, 19 nt, Artificial Sequence
  Description of Artificial Sequence: Synthetic oligonucleotide
  Antisense strand to SEQ ID NO: 194080
aaacuuagugacugccuuc

SEQ ID NO: 194082 - RNA, 19 nt, Artificial Sequence
  Description of Artificial Sequence: Synthetic oligonucleotide
  Sense strand starting at position 2400 of SEQ ID NO: 2501
cuaaguuuggucuaaugga

SEQ ID NO: 194083 - RNA, 19 nt, Artificial Sequence
  Description of Artificial Sequence: Synthetic oligonucleotide
  Antisense strand to SEQ ID NO: 194082
uccauuagaccaaacuuag

SEQ ID NO: 194084 - RNA, 19 nt, Artificial Sequence
  Description of Artificial Sequence: Synthetic oligonucleotide
  Sense strand starting at position 2462 of SEQ ID NO: 2501
gaaguuaaauaggucccua

SEQ ID NO: 194085 - RNA, 19 nt, Artificial Sequence
  Description of Artificial Sequence: Synthetic oligonucleotide
  Antisense strand to SEQ ID NO: 194084
uagggaccuauuuaacuuc

SEQ ID NO: 194086 - RNA, 19 nt, Artificial Sequence
  Description of Artificial Sequence: Synthetic oligonucleotide
  Sense strand starting at position 2842 of SEQ ID NO: 2501
gcugguccugauuauuaac

SEQ ID NO: 194087 - RNA, 19 nt, Artificial Sequence
  Description of Artificial Sequence: Synthetic oligonucleotide
  Antisense strand to SEQ ID NO: 194086
guuaauaaucaggaccagc

SEQ ID NO: 194088 - RNA, 19 nt, Artificial Sequence
  Description of Artificial Sequence: Synthetic oligonucleotide
  Sense strand starting at position 2929 of SEQ ID NO: 2501
aucagucauguuuaaguaa

SEQ ID NO: 194089 - RNA, 19 nt, Artificial Sequence
  Description of Artificial Sequence: Synthetic oligonucleotide
  Antisense strand to SEQ ID NO: 194088
uuacuuaaacaugacugau

SEQ ID NO: 194090 - RNA, 19 nt, Artificial Sequence
  Description of Artificial Sequence: Synthetic oligonucleotide
  Sense strand starting at position 3195 of SEQ ID NO: 2501
ugagauuuaugccuuugca

SEQ ID NO: 194091 - RNA, 19 nt, Artificial Sequence
  Description of Artificial Sequence: Synthetic oligonucleotide
  Antisense strand to SEQ ID NO: 194090
ugcaaaggcauaaaucuca

SEQ ID NO: 194092 - RNA, 19 nt, Artificial Sequence
  Description of Artificial Sequence: Synthetic oligonucleotide
  Sense strand starting at position 3261 of SEQ ID NO: 2501
uuugaacuccuaugugaug

SEQ ID NO: 194093 - RNA, 19 nt, Artificial Sequence
  Description of Artificial Sequence: Synthetic oligonucleotide
  Antisense strand to SEQ ID NO: 194092
caucacauaggaguucaaa

SEQ ID NO: 194094 - RNA, 19 nt, Artificial Sequence
  Description of Artificial Sequence: Synthetic oligonucleotide
  Sense strand starting at position 3288 of SEQ ID NO: 2501
gcuaauugguauuuguaau

SEQ ID NO: 194095 - RNA, 19 nt, Artificial Sequence
  Description of Artificial Sequence: Synthetic oligonucleotide
  Antisense strand to SEQ ID NO: 194094
auuacaaauaccaauuagc

SEQ ID NO: 194096 - RNA, 19 nt, Artificial Sequence
  Description of Artificial Sequence: Synthetic oligonucleotide
  Sense strand starting at position 3304 of SEQ ID NO: 2501
aauacuaugugguuauaga

SEQ ID NO: 194097 - RNA, 19 nt, Artificial Sequence
  Description of Artificial Sequence: Synthetic oligonucleotide
  Antisense strand to SEQ ID NO: 194096
ucuauaaccacauaguauu

SEQ ID NO: 194098 - RNA, 19 nt, Artificial Sequence
  Description of Artificial Sequence: Synthetic oligonucleotide
  Sense strand starting at position 3422 of SEQ ID NO: 2501
ucccuuuggucacuaagga

SEQ ID NO: 194099 - RNA, 19 nt, Artificial Sequence
  Description of Artificial Sequence: Synthetic oligonucleotide
  Antisense strand to SEQ ID NO: 194098
uccuuagugaccaaaggga

SEQ ID NO: 194100 - RNA, 19 nt, Artificial Sequence
  Description of Artificial Sequence: Synthetic oligonucleotide
  Sense strand starting at position 3539 of SEQ ID NO: 2501
uuguaagauuaggcauacu

SEQ ID NO: 194101 - RNA, 19 nt, Artificial Sequence
  Description of Artificial Sequence: Synthetic oligonucleotide
  Antisense strand to SEQ ID NO: 194100
aguaugccuaaucuuacaa

SEQ ID NO: 194102 - RNA, 19 nt, Artificial Sequence
  Description of Artificial Sequence: Synthetic oligonucleotide
  Sense strand starting at position 286 of SEQ ID NO: 2502
cuauuugcuaaguguguca

SEQ ID NO: 194103 - RNA, 19 nt, Artificial Sequence
  Description of Artificial Sequence: Synthetic oligonucleotide
  Antisense strand to SEQ ID NO: 194102
ugacacacuuagcaaauag

SEQ ID NO: 194104 - RNA, 19 nt, Artificial Sequence
  Description of Artificial Sequence: Synthetic oligonucleotide
  Sense strand starting at position 352 of SEQ ID NO: 2502
caaugaguuagauguggca

SEQ ID NO: 194105 - RNA, 19 nt, Artificial Sequence
  Description of Artificial Sequence: Synthetic oligonucleotide
  Antisense strand to SEQ ID NO: 194104
ugccacaucuaacucauug

SEQ ID NO: 194106 - RNA, 19 nt, Artificial Sequence
  Description of Artificial Sequence: Synthetic oligonucleotide
  Sense strand starting at position 394 of SEQ ID NO: 2502
ucaugucacgucuaacuca

SEQ ID NO: 194107 - RNA, 19 nt, Artificial Sequence
  Description of Artificial Sequence: Synthetic oligonucleotide
  Antisense strand to SEQ ID NO: 194106
ugaguuagacgugacauga

SEQ ID NO: 194108 - RNA, 19 nt, Artificial Sequence
  Description of Artificial Sequence: Synthetic oligonucleotide
  Sense strand starting at position 445 of SEQ ID NO: 2502
uagagaaacugucuuaagc

SEQ ID NO: 194109 - RNA, 19 nt, Artificial Sequence
  Description of Artificial Sequence: Synthetic oligonucleotide
  Antisense strand to SEQ ID NO: 194108
gcuuaagacaguuucucua

SEQ ID NO: 194110 - RNA, 19 nt, Artificial Sequence
  Description of Artificial Sequence: Synthetic oligonucleotide
  Sense strand starting at position 552 of SEQ ID NO: 2502
cugcuuaugccacacagaa

SEQ ID NO: 194111 - RNA, 19 nt, Artificial Sequence
  Description of Artificial Sequence: Synthetic oligonucleotide
  Antisense strand to SEQ ID NO: 194110
uucuguguggcauaagcag

SEQ ID NO: 194112 - RNA, 19 nt, Artificial Sequence
  Description of Artificial Sequence: Synthetic oligonucleotide
  Sense strand starting at position 684 of SEQ ID NO: 2502
gcaaucacaugccuuagaa

SEQ ID NO: 194113 - RNA, 19 nt, Artificial Sequence
  Description of Artificial Sequence: Synthetic oligonucleotide
  Antisense strand to SEQ ID NO: 194112
uucuaaggcaugugauugc

SEQ ID NO: 194114 - RNA, 19 nt, Artificial Sequence
  Description of Artificial Sequence: Synthetic oligonucleotide
  Sense strand starting at position 817 of SEQ ID NO: 2502
cgagauaaggugcauagau

SEQ ID NO: 194115 - RNA, 19 nt, Artificial Sequence
  Description of Artificial Sequence: Synthetic oligonucleotide
  Antisense strand to SEQ ID NO: 194114
aucuaugcaccuuaucucg

SEQ ID NO: 194116 - RNA, 19 nt, Artificial Sequence
  Description of Artificial Sequence: Synthetic oligonucleotide
  Sense strand starting at position 849 of SEQ ID NO: 2502
cugugugaugcauauuauu

SEQ ID NO: 194117 - RNA, 19 nt, Artificial Sequence
  Description of Artificial Sequence: Synthetic oligonucleotide
  Antisense strand to SEQ ID NO: 194116
aauaauaugcaucacacag

SEQ ID NO: 194118 - RNA, 19 nt, Artificial Sequence
  Description of Artificial Sequence: Synthetic oligonucleotide
  Sense strand starting at position 1171 of SEQ ID NO: 2502
acauacucuuguuugguau

SEQ ID NO: 194119 - RNA, 19 nt, Artificial Sequence
  Description of Artificial Sequence: Synthetic oligonucleotide
  Antisense strand to SEQ ID NO: 194118
auaccaaacaagaguaugu

SEQ ID NO: 194120 - RNA, 19 nt, Artificial Sequence
  Description of Artificial Sequence: Synthetic oligonucleotide
  Sense strand starting at position 1184 of SEQ ID NO: 2502
ugguauucccaguaaauga

SEQ ID NO: 194121 - RNA, 19 nt, Artificial Sequence
  Description of Artificial Sequence: Synthetic oligonucleotide
  Antisense strand to SEQ ID NO: 194120
ucauuuacugggaauacca

SEQ ID NO: 194122 - RNA, 19 nt, Artificial Sequence
  Description of Artificial Sequence: Synthetic oligonucleotide
  Sense strand starting at position 1441 of SEQ ID NO: 2502
ccaguaaugagucauguuc

SEQ ID NO: 194123 - RNA, 19 nt, Artificial Sequence
  Description of Artificial Sequence: Synthetic oligonucleotide
  Antisense strand to SEQ ID NO: 194122
gaacaugacucauuacugg

SEQ ID NO: 194124 - RNA, 19 nt, Artificial Sequence
  Description of Artificial Sequence: Synthetic oligonucleotide
  Sense strand starting at position 1588 of SEQ ID NO: 2502
cuuacuuccugcuuuggaa

SEQ ID NO: 194125 - RNA, 19 nt, Artificial Sequence
  Description of Artificial Sequence: Synthetic oligonucleotide
  Antisense strand to SEQ ID NO: 194124
uuccaaagcaggaaguaag

SEQ ID NO: 194126 - RNA, 19 nt, Artificial Sequence
  Description of Artificial Sequence: Synthetic oligonucleotide
  Sense strand starting at position 1915 of SEQ ID NO: 2502
guaagaaacccacaguucu

SEQ ID NO: 194127 - RNA, 19 nt, Artificial Sequence
  Description of Artificial Sequence: Synthetic oligonucleotide
  Antisense strand to SEQ ID NO: 194126
agaacuguggguuucuuac

SEQ ID NO: 194128 - RNA, 19 nt, Artificial Sequence
  Description of Artificial Sequence: Synthetic oligonucleotide
  Sense strand starting at position 1954 of SEQ ID NO: 2502
cccugugguuaauccuuaa

SEQ ID NO: 194129 - RNA, 19 nt, Artificial Sequence
  Description of Artificial Sequence: Synthetic oligonucleotide
  Antisense strand to SEQ ID NO: 194128
uuaaggauuaaccacaggg

SEQ ID NO: 194130 - RNA, 19 nt, Artificial Sequence
  Description of Artificial Sequence: Synthetic oligonucleotide
  Sense strand starting at position 1957 of SEQ ID NO: 2502
ugugguuaauccuuaacca

SEQ ID NO: 194131 - RNA, 19 nt, Artificial Sequence
  Description of Artificial Sequence: Synthetic oligonucleotide
  Antisense strand to SEQ ID NO: 194130
ugguuaaggauuaaccaca

SEQ ID NO: 194132 - RNA, 19 nt, Artificial Sequence
  Description of Artificial Sequence: Synthetic oligonucleotide
  Sense strand starting at position 1958 of SEQ ID NO: 2502
gugguuaauccuuaaccaa

SEQ ID NO: 194133 - RNA, 19 nt, Artificial Sequence
  Description of Artificial Sequence: Synthetic oligonucleotide
  Antisense strand to SEQ ID NO: 194132
uugguuaaggauuaaccac

SEQ ID NO: 194134 - RNA, 19 nt, Artificial Sequence
  Description of Artificial Sequence: Synthetic oligonucleotide
  Sense strand starting at position 2078 of SEQ ID NO: 2502
gcacgaaguccagacucaa

SEQ ID NO: 194135 - RNA, 19 nt, Artificial Sequence
  Description of Artificial Sequence: Synthetic oligonucleotide
  Antisense strand to SEQ ID NO: 194134
uugagucuggacuucgugc

SEQ ID NO: 194136 - RNA, 19 nt, Artificial Sequence
  Description of Artificial Sequence: Synthetic oligonucleotide
  Sense strand starting at position 2225 of SEQ ID NO: 2502
ggaugcgucacagggacua

SEQ ID NO: 194137 - RNA, 19 nt, Artificial Sequence
  Description of Artificial Sequence: Synthetic oligonucleotide
  Antisense strand to SEQ ID NO: 194136
uagucccugugacgcaucc

SEQ ID NO: 194138 - RNA, 19 nt, Artificial Sequence
  Description of Artificial Sequence: Synthetic oligonucleotide
  Sense strand starting at position 2406 of SEQ ID NO: 2502
ucaauaaggccagagcuua

SEQ ID NO: 194139 - RNA, 19 nt, Artificial Sequence
  Description of Artificial Sequence: Synthetic oligonucleotide
  Antisense strand to SEQ ID NO: 194138
uaagcucuggccuuauuga

SEQ ID NO: 194140 - RNA, 19 nt, Artificial Sequence
  Description of Artificial Sequence: Synthetic oligonucleotide
  Sense strand starting at position 2440 of SEQ ID NO: 2502
gccucagcccaucauuaga

SEQ ID NO: 194141 - RNA, 19 nt, Artificial Sequence
  Description of Artificial Sequence: Synthetic oligonucleotide
  Antisense strand to SEQ ID NO: 194140
ucuaaugaugggcugaggc

SEQ ID NO: 194142 - RNA, 19 nt, Artificial Sequence
  Description of Artificial Sequence: Synthetic oligonucleotide
  Sense strand starting at position 2465 of SEQ ID NO: 2502
agggaaaguguccaccuuu

SEQ ID NO: 194143 - RNA, 19 nt, Artificial Sequence
  Description of Artificial Sequence: Synthetic oligonucleotide
  Antisense strand to SEQ ID NO: 194142
aaagguggacacuuucccu

SEQ ID NO: 194144 - RNA, 19 nt, Artificial Sequence
  Description of Artificial Sequence: Synthetic oligonucleotide
  Sense strand starting at position 2489 of SEQ ID NO: 2502
aaaguugaauguuucgauu

SEQ ID NO: 194145 - RNA, 19 nt, Artificial Sequence
  Description of Artificial Sequence: Synthetic oligonucleotide
  Antisense strand to SEQ ID NO: 194144
aaucgaaacauucaacuuu

SEQ ID NO: 194146 - RNA, 19 nt, Artificial Sequence
  Description of Artificial Sequence: Synthetic oligonucleotide
  Sense strand starting at position 2622 of SEQ ID NO: 2502
cccucaauucgugagugga

SEQ ID NO: 194147 - RNA, 19 nt, Artificial Sequence
  Description of Artificial Sequence: Synthetic oligonucleotide
  Antisense strand to SEQ ID NO: 194146
uccacucacgaauugaggg

SEQ ID NO: 194148 - RNA, 19 nt, Artificial Sequence
  Description of Artificial Sequence: Synthetic oligonucleotide
  Sense strand starting at position 2624 of SEQ ID NO: 2502
cucaauucgugaguggaga

SEQ ID NO: 194149 - RNA, 19 nt, Artificial Sequence
  Description of Artificial Sequence: Synthetic oligonucleotide
  Antisense strand to SEQ ID NO: 194148
ucuccacucacgaauugag

SEQ ID NO: 194150 - RNA, 19 nt, Artificial Sequence
  Description of Artificial Sequence: Synthetic oligonucleotide
  Sense strand starting at position 2625 of SEQ ID NO: 2502
ucaauucgugaguggagau

SEQ ID NO: 194151 - RNA, 19 nt, Artificial Sequence
  Description of Artificial Sequence: Synthetic oligonucleotide
  Antisense strand to SEQ ID NO: 194150
aucuccacucacgaauuga

SEQ ID NO: 194152 - RNA, 19 nt, Artificial Sequence
  Description of Artificial Sequence: Synthetic oligonucleotide
  Sense strand starting at position 2626 of SEQ ID NO: 2502
caauucgugaguggagauu

SEQ ID NO: 194153 - RNA, 19 nt, Artificial Sequence
  Description of Artificial Sequence: Synthetic oligonucleotide
  Antisense strand to SEQ ID NO: 194152
aaucuccacucacgaauug

SEQ ID NO: 194154 - RNA, 19 nt, Artificial Sequence
  Description of Artificial Sequence: Synthetic oligonucleotide
  Sense strand starting at position 2826 of SEQ ID NO: 2502
aggauagauucucuugccu

SEQ ID NO: 194155 - RNA, 19 nt, Artificial Sequence
  Description of Artificial Sequence: Synthetic oligonucleotide
  Antisense strand to SEQ ID NO: 194154
aggcaagagaaucuauccu

SEQ ID NO: 194156 - RNA, 19 nt, Artificial Sequence
  Description of Artificial Sequence: Synthetic oligonucleotide
  Sense strand starting at position 2831 of SEQ ID NO: 2502
agauucucuugccuuugaa

SEQ ID NO: 194157 - RNA, 19 nt, Artificial Sequence
  Description of Artificial Sequence: Synthetic oligonucleotide
  Antisense strand to SEQ ID NO: 194156
uucaaaggcaagagaaucu

SEQ ID NO: 194158 - RNA, 19 nt, Artificial Sequence
  Description of Artificial Sequence: Synthetic oligonucleotide
  Sense strand starting at position 2973 of SEQ ID NO: 2502
cuuuacauaucauuagugu

SEQ ID NO: 194159 - RNA, 19 nt, Artificial Sequence
  Description of Artificial Sequence: Synthetic oligonucleotide
  Antisense strand to SEQ ID NO: 194158
acacuaaugauauguaaag

SEQ ID NO: 194160 - RNA, 19 nt, Artificial Sequence
  Description of Artificial Sequence: Synthetic oligonucleotide
  Sense strand starting at position 2995 of SEQ ID NO: 2502
auacuugcugcugaaugua

SEQ ID NO: 194161 - RNA, 19 nt, Artificial Sequence
  Description of Artificial Sequence: Synthetic oligonucleotide
  Antisense strand to SEQ ID NO: 194160
uacauucagcagcaaguau

SEQ ID NO: 194162 - RNA, 19 nt, Artificial Sequence
  Description of Artificial Sequence: Synthetic oligonucleotide
  Sense strand starting at position 3003 of SEQ ID NO: 2502
ugcugaauguaauugaaua

SEQ ID NO: 194163 - RNA, 19 nt, Artificial Sequence
  Description of Artificial Sequence: Synthetic oligonucleotide
  Antisense strand to SEQ ID NO: 194162
uauucaauuacauucagca

SEQ ID NO: 194164 - RNA, 19 nt, Artificial Sequence
  Description of Artificial Sequence: Synthetic oligonucleotide
  Sense strand starting at position 3107 of SEQ ID NO: 2502
ccguuaaagcauuaagagu

SEQ ID NO: 194165 - RNA, 19 nt, Artificial Sequence
  Description of Artificial Sequence: Synthetic oligonucleotide
  Antisense strand to SEQ ID NO: 194164
acucuuaaugcuuuaacgg

SEQ ID NO: 194166 - RNA, 19 nt, Artificial Sequence
  Description of Artificial Sequence: Synthetic oligonucleotide
  Sense strand starting at position 3473 of SEQ ID NO: 2502
ucuauuaauuggguagcaa

SEQ ID NO: 194167 - RNA, 19 nt, Artificial Sequence
  Description of Artificial Sequence: Synthetic oligonucleotide
  Antisense strand to SEQ ID NO: 194166
uugcuacccaauuaauaga

SEQ ID NO: 194168 - RNA, 19 nt, Artificial Sequence
  Description of Artificial Sequence: Synthetic oligonucleotide
  Sense strand starting at position 3474 of SEQ ID NO: 2502
cuauuaauuggguagcaau

SEQ ID NO: 194169 - RNA, 19 nt, Artificial Sequence
  Description of Artificial Sequence: Synthetic oligonucleotide
  Antisense strand to SEQ ID NO: 194168
auugcuacccaauuaauag

SEQ ID NO: 194170 - RNA, 19 nt, Artificial Sequence
  Description of Artificial Sequence: Synthetic oligonucleotide
  Sense strand starting at position 3580 of SEQ ID NO: 2502
uuagaagugccauaacuug

SEQ ID NO: 194171 - RNA, 19 nt, Artificial Sequence
  Description of Artificial Sequence: Synthetic oligonucleotide
  Antisense strand to SEQ ID NO: 194170
caaguuauggcacuucuaa

SEQ ID NO: 194172 - RNA, 19 nt, Artificial Sequence
  Description of Artificial Sequence: Synthetic oligonucleotide
  Sense strand starting at position 3610 of SEQ ID NO: 2502
cuaguuagcagugaggaca

SEQ ID NO: 194173 - RNA, 19 nt, Artificial Sequence
  Description of Artificial Sequence: Synthetic oligonucleotide
  Antisense strand to SEQ ID NO: 194172
uguccucacugcuaacuag

SEQ ID NO: 194174 - RNA, 19 nt, Artificial Sequence
  Description of Artificial Sequence: Synthetic oligonucleotide
  Sense strand starting at position 3767 of SEQ ID NO: 2502
uaggcaggucuauaaauca

SEQ ID NO: 194175 - RNA, 19 nt, Artificial Sequence
  Description of Artificial Sequence: Synthetic oligonucleotide
  Antisense strand to SEQ ID NO: 194174
ugauuuauagaccugccua

SEQ ID NO: 194176 - RNA, 19 nt, Artificial Sequence
  Description of Artificial Sequence: Synthetic oligonucleotide
  Sense strand starting at position 3845 of SEQ ID NO: 2502
aagaguaguugcuccagga

SEQ ID NO: 194177 - RNA, 19 nt, Artificial Sequence
  Description of Artificial Sequence: Synthetic oligonucleotide
  Antisense strand to SEQ ID NO: 194176
uccuggagcaacuacucuu

SEQ ID NO: 194178 - RNA, 19 nt, Artificial Sequence
  Description of Artificial Sequence: Synthetic oligonucleotide
  Sense strand starting at position 3977 of SEQ ID NO: 2502
ugccaucugcuagaauacu

SEQ ID NO: 194179 - RNA, 19 nt, Artificial Sequence
  Description of Artificial Sequence: Synthetic oligonucleotide
  Antisense strand to SEQ ID NO: 194178
aguauucuagcagauggca

SEQ ID NO: 194180 - RNA, 19 nt, Artificial Sequence
  Description of Artificial Sequence: Synthetic oligonucleotide
  Sense strand starting at position 3983 of SEQ ID NO: 2502
cugcuagaauacuuuagau

SEQ ID NO: 194181 - RNA, 19 nt, Artificial Sequence
  Description of Artificial Sequence: Synthetic oligonucleotide
  Antisense strand to SEQ ID NO: 194180
aucuaaaguauucuagcag

SEQ ID NO: 194182 - RNA, 19 nt, Artificial Sequence
  Description of Artificial Sequence: Synthetic oligonucleotide
  Sense strand starting at position 369 of SEQ ID NO: 2503
auucuuugucucuaaaugu

SEQ ID NO: 194183 - RNA, 19 nt, Artificial Sequence
  Description of Artificial Sequence: Synthetic oligonucleotide
  Antisense strand to SEQ ID NO: 194182
acauuuagagacaaagaau

SEQ ID NO: 194184 - RNA, 19 nt, Artificial Sequence
  Description of Artificial Sequence: Synthetic oligonucleotide
  Sense strand starting at position 753 of SEQ ID NO: 2503
guauuugauuucugcaaug

SEQ ID NO: 194185 - RNA, 19 nt, Artificial Sequence
  Description of Artificial Sequence: Synthetic oligonucleotide
  Antisense strand to SEQ ID NO: 194184
cauugcagaaaucaaauac

SEQ ID NO: 194186 - RNA, 19 nt, Artificial Sequence
  Description of Artificial Sequence: Synthetic oligonucleotide
  Sense strand starting at position 883 of SEQ ID NO: 2503
accauuauucuugguacua

SEQ ID NO: 194187 - RNA, 19 nt, Artificial Sequence
  Description of Artificial Sequence: Synthetic oligonucleotide
  Antisense strand to SEQ ID NO: 194186
uaguaccaagaauaauggu

SEQ ID NO: 194188 - RNA, 19 nt, Artificial Sequence
  Description of Artificial Sequence: Synthetic oligonucleotide
  Sense strand starting at position 884 of SEQ ID NO: 2503
ccauuauucuugguacuag

SEQ ID NO: 194189 - RNA, 19 nt, Artificial Sequence
  Description of Artificial Sequence: Synthetic oligonucleotide
  Antisense strand to SEQ ID NO: 194188
cuaguaccaagaauaaugg

SEQ ID NO: 194190 - RNA, 19 nt, Artificial Sequence
  Description of Artificial Sequence: Synthetic oligonucleotide
  Sense strand starting at position 993 of SEQ ID NO: 2503
agacaaucacaguguuaca

SEQ ID NO: 194191 - RNA, 19 nt, Artificial Sequence
  Description of Artificial Sequence: Synthetic oligonucleotide
  Antisense strand to SEQ ID NO: 194190
uguaacacugugauugucu

SEQ ID NO: 194192 - RNA, 19 nt, Artificial Sequence
  Description of Artificial Sequence: Synthetic oligonucleotide
  Sense strand starting at position 1250 of SEQ ID NO: 2503
cagucugaagugugaauaa

SEQ ID NO: 194193 - RNA, 19 nt, Artificial Sequence
  Description of Artificial Sequence: Synthetic oligonucleotide
  Antisense strand to SEQ ID NO: 194192
uuauucacacuucagacug

SEQ ID NO: 194194 - RNA, 19 nt, Artificial Sequence
  Description of Artificial Sequence: Synthetic oligonucleotide
  Sense strand starting at position 1270 of SEQ ID NO: 2503
auuugaucucugugcucaa

SEQ ID NO: 194195 - RNA, 19 nt, Artificial Sequence
  Description of Artificial Sequence: Synthetic oligonucleotide
  Antisense strand to SEQ ID NO: 194194
uugagcacagagaucaaau

SEQ ID NO: 194196 - RNA, 19 nt, Artificial Sequence
  Description of Artificial Sequence: Synthetic oligonucleotide
  Sense strand starting at position 1288 of SEQ ID NO: 2503
agccauuagcaauauguga

SEQ ID NO: 194197 - RNA, 19 nt, Artificial Sequence
  Description of Artificial Sequence: Synthetic oligonucleotide
  Antisense strand to SEQ ID NO: 194196
ucacauauugcuaauggcu

SEQ ID NO: 194198 - RNA, 19 nt, Artificial Sequence
  Description of Artificial Sequence: Synthetic oligonucleotide
  Sense strand starting at position 1437 of SEQ ID NO: 2503
gaguacgguguuggagaaa

SEQ ID NO: 194199 - RNA, 19 nt, Artificial Sequence
  Description of Artificial Sequence: Synthetic oligonucleotide
  Antisense strand to SEQ ID NO: 194198
uuucuccaacaccguacuc

SEQ ID NO: 194200 - RNA, 19 nt, Artificial Sequence
  Description of Artificial Sequence: Synthetic oligonucleotide
  Sense strand starting at position 1463 of SEQ ID NO: 2503
gucgguguaguucugcauu

SEQ ID NO: 194201 - RNA, 19 nt, Artificial Sequence
  Description of Artificial Sequence: Synthetic oligonucleotide
  Antisense strand to SEQ ID NO: 194200
aaugcagaacuacaccgac

SEQ ID NO: 194202 - RNA, 19 nt, Artificial Sequence
  Description of Artificial Sequence: Synthetic oligonucleotide
  Sense strand starting at position 1469 of SEQ ID NO: 2503
guaguucugcauuaaacca

SEQ ID NO: 194203 - RNA, 19 nt, Artificial Sequence
  Description of Artificial Sequence: Synthetic oligonucleotide
  Antisense strand to SEQ ID NO: 194202
ugguuuaaugcagaacuac

SEQ ID NO: 194204 - RNA, 19 nt, Artificial Sequence
  Description of Artificial Sequence: Synthetic oligonucleotide
  Sense strand starting at position 1510 of SEQ ID NO: 2503
aucauugaaucugugauua

SEQ ID NO: 194205 - RNA, 19 nt, Artificial Sequence
  Description of Artificial Sequence: Synthetic oligonucleotide
  Antisense strand to SEQ ID NO: 194204
uaaucacagauucaaugau

SEQ ID NO: 194206 - RNA, 19 nt, Artificial Sequence
  Description of Artificial Sequence: Synthetic oligonucleotide
  Sense strand starting at position 1514 of SEQ ID NO: 2503
uugaaucugugauuaucag

SEQ ID NO: 194207 - RNA, 19 nt, Artificial Sequence
  Description of Artificial Sequence: Synthetic oligonucleotide
  Antisense strand to SEQ ID NO: 194206
cugauaaucacagauucaa

SEQ ID NO: 194208 - RNA, 19 nt, Artificial Sequence
  Description of Artificial Sequence: Synthetic oligonucleotide
  Sense strand starting at position 1570 of SEQ ID NO: 2503
aaagaagcccacugguauu

SEQ ID NO: 194209 - RNA, 19 nt, Artificial Sequence
  Description of Artificial Sequence: Synthetic oligonucleotide
  Antisense strand to SEQ ID NO: 194208
aauaccagugggcuucuuu

SEQ ID NO: 194210 - RNA, 19 nt, Artificial Sequence
  Description of Artificial Sequence: Synthetic oligonucleotide
  Sense strand starting at position 1590 of SEQ ID NO: 2503
uuacuuugagcagauuauu

SEQ ID NO: 194211 - RNA, 19 nt, Artificial Sequence
  Description of Artificial Sequence: Synthetic oligonucleotide
  Antisense strand to SEQ ID NO: 194210
aauaaucugcucaaaguaa

SEQ ID NO: 194212 - RNA, 19 nt, Artificial Sequence
  Description of Artificial Sequence: Synthetic oligonucleotide
  Sense strand starting at position 1608 of SEQ ID NO: 2503
ucaaucuauucggccauuu

SEQ ID NO: 194213 - RNA, 19 nt, Artificial Sequence
  Description of Artificial Sequence: Synthetic oligonucleotide
  Antisense strand to SEQ ID NO: 194212
aaauggccgaauagauuga

SEQ ID NO: 194214 - RNA, 19 nt, Artificial Sequence
  Description of Artificial Sequence: Synthetic oligonucleotide
  Sense strand starting at position 1677 of SEQ ID NO: 2503
augaaauagcauugcuaua

SEQ ID NO: 194215 - RNA, 19 nt, Artificial Sequence
  Description of Artificial Sequence: Synthetic oligonucleotide
  Antisense strand to SEQ ID NO: 194214
uauagcaaugcuauuucau

SEQ ID NO: 194216 - RNA, 19 nt, Artificial Sequence
  Description of Artificial Sequence: Synthetic oligonucleotide
  Sense strand starting at position 1718 of SEQ ID NO: 2503
aucuguauuguauacaaug

SEQ ID NO: 194217 - RNA, 19 nt, Artificial Sequence
  Description of Artificial Sequence: Synthetic oligonucleotide
  Antisense strand to SEQ ID NO: 194216
cauuguauacaauacagau

SEQ ID NO: 194218 - RNA, 19 nt, Artificial Sequence
  Description of Artificial Sequence: Synthetic oligonucleotide
  Sense strand starting at position 1737 of SEQ ID NO: 2503
uugugaaaucauuaaugca

SEQ ID NO: 194219 - RNA, 19 nt, Artificial Sequence
  Description of Artificial Sequence: Synthetic oligonucleotide
  Antisense strand to SEQ ID NO: 194218
ugcauuaaugauuucacaa

SEQ ID NO: 194220 - RNA, 19 nt, Artificial Sequence
  Description of Artificial Sequence: Synthetic oligonucleotide
  Sense strand starting at position 1775 of SEQ ID NO: 2503
aguauuguagcguuguuua

SEQ ID NO: 194221 - RNA, 19 nt, Artificial Sequence
  Description of Artificial Sequence: Synthetic oligonucleotide
  Antisense strand to SEQ ID NO: 194220
uaaacaacgcuacaauacu

SEQ ID NO: 194222 - RNA, 19 nt, Artificial Sequence
  Description of Artificial Sequence: Synthetic oligonucleotide
  Sense strand starting at position 1777 of SEQ ID NO: 2503
uauuguagcguuguuuaca

SEQ ID NO: 194223 - RNA, 19 nt, Artificial Sequence
  Description of Artificial Sequence: Synthetic oligonucleotide
  Antisense strand to SEQ ID NO: 194222
uguaaacaacgcuacaaua

SEQ ID NO: 194224 - RNA, 19 nt, Artificial Sequence
  Description of Artificial Sequence: Synthetic oligonucleotide
  Sense strand starting at position 1786 of SEQ ID NO: 2503
guuguuuacacuggacaag

SEQ ID NO: 194225 - RNA, 19 nt, Artificial Sequence
  Description of Artificial Sequence: Synthetic oligonucleotide
  Antisense strand to SEQ ID NO: 194224
cuuguccaguguaaacaac

SEQ ID NO: 194226 - RNA, 19 nt, Artificial Sequence
  Description of Artificial Sequence: Synthetic oligonucleotide
  Sense strand starting at position 1876 of SEQ ID NO: 2503
ugcagagacaaguauaagu

SEQ ID NO: 194227 - RNA, 19 nt, Artificial Sequence
  Description of Artificial Sequence: Synthetic oligonucleotide
  Antisense strand to SEQ ID NO: 194226
acuuauacuugucucugca

SEQ ID NO: 194228 - RNA, 19 nt, Artificial Sequence
  Description of Artificial Sequence: Synthetic oligonucleotide
  Sense strand starting at position 1889 of SEQ ID NO: 2503
auaaguuacuuaccuguga

SEQ ID NO: 194229 - RNA, 19 nt, Artificial Sequence
  Description of Artificial Sequence: Synthetic oligonucleotide
  Antisense strand to SEQ ID NO: 194228
ucacagguaaguaacuuau

SEQ ID NO: 194230 - RNA, 19 nt, Artificial Sequence
  Description of Artificial Sequence: Synthetic oligonucleotide
  Sense strand starting at position 2130 of SEQ ID NO: 2503
cacagagugugcuugggaa

SEQ ID NO: 194231 - RNA, 19 nt, Artificial Sequence
  Description of Artificial Sequence: Synthetic oligonucleotide
  Antisense strand to SEQ ID NO: 194230
uucccaagcacacucugug

SEQ ID NO: 194232 - RNA, 19 nt, Artificial Sequence
  Description of Artificial Sequence: Synthetic oligonucleotide
  Sense strand starting at position 2162 of SEQ ID NO: 2503
gucaacaggccuuggaaau

SEQ ID NO: 194233 - RNA, 19 nt, Artificial Sequence
  Description of Artificial Sequence: Synthetic oligonucleotide
  Antisense strand to SEQ ID NO: 194232
auuuccaaggccuguugac

SEQ ID NO: 194234 - RNA, 19 nt, Artificial Sequence
  Description of Artificial Sequence: Synthetic oligonucleotide
  Sense strand starting at position 2163 of SEQ ID NO: 2503
ucaacaggccuuggaaauu

SEQ ID NO: 194235 - RNA, 19 nt, Artificial Sequence
  Description of Artificial Sequence: Synthetic oligonucleotide
  Antisense strand to SEQ ID NO: 194234
aauuuccaaggccuguuga

SEQ ID NO: 194236 - RNA, 19 nt, Artificial Sequence
  Description of Artificial Sequence: Synthetic oligonucleotide
  Sense strand starting at position 2226 of SEQ ID NO: 2503
cagcaagagcccuggaauu

SEQ ID NO: 194237 - RNA, 19 nt, Artificial Sequence
  Description of Artificial Sequence: Synthetic oligonucleotide
  Antisense strand to SEQ ID NO: 194236
aauuccagggcucuugcug

SEQ ID NO: 194238 - RNA, 19 nt, Artificial Sequence
  Description of Artificial Sequence: Synthetic oligonucleotide
  Sense strand starting at position 2511 of SEQ ID NO: 2503
agaugaagcucuguauaag

SEQ ID NO: 194239 - RNA, 19 nt, Artificial Sequence
  Description of Artificial Sequence: Synthetic oligonucleotide
  Antisense strand to SEQ ID NO: 194238
cuuauacagagcuucaucu

SEQ ID NO: 194240 - RNA, 19 nt, Artificial Sequence
  Description of Artificial Sequence: Synthetic oligonucleotide
  Sense strand starting at position 2514 of SEQ ID NO: 2503
ugaagcucuguauaagcaa

SEQ ID NO: 194241 - RNA, 19 nt, Artificial Sequence
  Description of Artificial Sequence: Synthetic oligonucleotide
  Antisense strand to SEQ ID NO: 194240
uugcuuauacagagcuuca

SEQ ID NO: 194242 - RNA, 19 nt, Artificial Sequence
  Description of Artificial Sequence: Synthetic oligonucleotide
  Sense strand starting at position 2740 of SEQ ID NO: 2503
ggcaacauuggucaagacu

SEQ ID NO: 194243 - RNA, 19 nt, Artificial Sequence
  Description of Artificial Sequence: Synthetic oligonucleotide
  Antisense strand to SEQ ID NO: 194242
agucuugaccaauguugcc

SEQ ID NO: 194244 - RNA, 19 nt, Artificial Sequence
  Description of Artificial Sequence: Synthetic oligonucleotide
  Sense strand starting at position 2838 of SEQ ID NO: 2503
gcuaucaugucauuucuau

SEQ ID NO: 194245 - RNA, 19 nt, Artificial Sequence
  Description of Artificial Sequence: Synthetic oligonucleotide
  Antisense strand to SEQ ID NO: 194244
auagaaaugacaugauagc

SEQ ID NO: 194246 - RNA, 19 nt, Artificial Sequence
  Description of Artificial Sequence: Synthetic oligonucleotide
  Sense strand starting at position 3111 of SEQ ID NO: 2503
uguauaagaugguuuauga

SEQ ID NO: 194247 - RNA, 19 nt, Artificial Sequence
  Description of Artificial Sequence: Synthetic oligonucleotide
  Antisense strand to SEQ ID NO: 194246
ucauaaaccaucuuauaca

SEQ ID NO: 194248 - RNA, 19 nt, Artificial Sequence
  Description of Artificial Sequence: Synthetic oligonucleotide
  Sense strand starting at position 3227 of SEQ ID NO: 2503
ucuagauguuuccucuaug

SEQ ID NO: 194249 - RNA, 19 nt, Artificial Sequence
  Description of Artificial Sequence: Synthetic oligonucleotide
  Antisense strand to SEQ ID NO: 194248
cauagaggaaacaucuaga

SEQ ID NO: 194250 - RNA, 19 nt, Artificial Sequence
  Description of Artificial Sequence: Synthetic oligonucleotide
  Sense strand starting at position 3230 of SEQ ID NO: 2503
agauguuuccucuaugcaa

SEQ ID NO: 194251 - RNA, 19 nt, Artificial Sequence
  Description of Artificial Sequence: Synthetic oligonucleotide
  Antisense strand to SEQ ID NO: 194250
uugcauagaggaaacaucu

SEQ ID NO: 194252 - RNA, 19 nt, Artificial Sequence
  Description of Artificial Sequence: Synthetic oligonucleotide
  Sense strand starting at position 3261 of SEQ ID NO: 2503
gacuucugaguugacgcaa

SEQ ID NO: 194253 - RNA, 19 nt, Artificial Sequence
  Description of Artificial Sequence: Synthetic oligonucleotide
  Antisense strand to SEQ ID NO: 194252
uugcgucaacucagaaguc

SEQ ID NO: 194254 - RNA, 19 nt, Artificial Sequence
  Description of Artificial Sequence: Synthetic oligonucleotide
  Sense strand starting at position 3369 of SEQ ID NO: 2503
uguagcuuugauugggaaa

SEQ ID NO: 194255 - RNA, 19 nt, Artificial Sequence
  Description of Artificial Sequence: Synthetic oligonucleotide
  Antisense strand to SEQ ID NO: 194254
uuucccaaucaaagcuaca

SEQ ID NO: 194256 - RNA, 19 nt, Artificial Sequence
  Description of Artificial Sequence: Synthetic oligonucleotide
  Sense strand starting at position 3426 of SEQ ID NO: 2503
aguuauugacagcagucaa

SEQ ID NO: 194257 - RNA, 19 nt, Artificial Sequence
  Description of Artificial Sequence: Synthetic oligonucleotide
  Antisense strand to SEQ ID NO: 194256
uugacugcugucaauaacu

SEQ ID NO: 194258 - RNA, 19 nt, Artificial Sequence
  Description of Artificial Sequence: Synthetic oligonucleotide
  Sense strand starting at position 3434 of SEQ ID NO: 2503
acagcagucaaaggguaaa

SEQ ID NO: 194259 - RNA, 19 nt, Artificial Sequence
  Description of Artificial Sequence: Synthetic oligonucleotide
  Antisense strand to SEQ ID NO: 194258
uuuacccuuugacugcugu

SEQ ID NO: 194260 - RNA, 19 nt, Artificial Sequence
  Description of Artificial Sequence: Synthetic oligonucleotide
  Sense strand starting at position 3915 of SEQ ID NO: 2503
gagaaucucugccucagga

SEQ ID NO: 194261 - RNA, 19 nt, Artificial Sequence
  Description of Artificial Sequence: Synthetic oligonucleotide
  Antisense strand to SEQ ID NO: 194260
uccugaggcagagauucuc

SEQ ID NO: 194262 - RNA, 19 nt, Artificial Sequence
  Description of Artificial Sequence: Synthetic oligonucleotide
  Sense strand starting at position 225 of SEQ ID NO: 2504
cggguacacaccuguaauc

SEQ ID NO: 194263 - RNA, 19 nt, Artificial Sequence
  Description of Artificial Sequence: Synthetic oligonucleotide
  Antisense strand to SEQ ID NO: 194262
gauuacagguguguacccg

SEQ ID NO: 194264 - RNA, 19 nt, Artificial Sequence
  Description of Artificial Sequence: Synthetic oligonucleotide
  Sense strand starting at position 343 of SEQ ID NO: 2504
ggagcaagauuccgucuua

SEQ ID NO: 194265 - RNA, 19 nt, Artificial Sequence
  Description of Artificial Sequence: Synthetic oligonucleotide
  Antisense strand to SEQ ID NO: 194264
uaagacggaaucuugcucc

SEQ ID NO: 194266 - RNA, 19 nt, Artificial Sequence
  Description of Artificial Sequence: Synthetic oligonucleotide
  Sense strand starting at position 841 of SEQ ID NO: 2504
gaguaucauugaggauaaa

SEQ ID NO: 194267 - RNA, 19 nt, Artificial Sequence
  Description of Artificial Sequence: Synthetic oligonucleotide
  Antisense strand to SEQ ID NO: 194266
uuuauccucaaugauacuc

SEQ ID NO: 194268 - RNA, 19 nt, Artificial Sequence
  Description of Artificial Sequence: Synthetic oligonucleotide
  Sense strand starting at position 1025 of SEQ ID NO: 2504
ucccuuugcuuagaggcau

SEQ ID NO: 194269 - RNA, 19 nt, Artificial Sequence
  Description of Artificial Sequence: Synthetic oligonucleotide
  Antisense strand to SEQ ID NO: 194268
augccucuaagcaaaggga

SEQ ID NO: 194270 - RNA, 19 nt, Artificial Sequence
  Description of Artificial Sequence: Synthetic oligonucleotide
  Sense strand starting at position 1248 of SEQ ID NO: 2504
gccugaacuugauccagau

SEQ ID NO: 194271 - RNA, 19 nt, Artificial Sequence
  Description of Artificial Sequence: Synthetic oligonucleotide
  Antisense strand to SEQ ID NO: 194270
aucuggaucaaguucaggc

SEQ ID NO: 194272 - RNA, 19 nt, Artificial Sequence
  Description of Artificial Sequence: Synthetic oligonucleotide
  Sense strand starting at position 1963 of SEQ ID NO: 2504
gggaaugcucgguguugga

SEQ ID NO: 194273 - RNA, 19 nt, Artificial Sequence
  Description of Artificial Sequence: Synthetic oligonucleotide
  Antisense strand to SEQ ID NO: 194272
uccaacaccgagcauuccc

SEQ ID NO: 194274 - RNA, 19 nt, Artificial Sequence
  Description of Artificial Sequence: Synthetic oligonucleotide
  Sense strand starting at position 2156 of SEQ ID NO: 2504
gcuggaaaccuccacggaa

SEQ ID NO: 194275 - RNA, 19 nt, Artificial Sequence
  Description of Artificial Sequence: Synthetic oligonucleotide
  Antisense strand to SEQ ID NO: 194274
uuccguggagguuuccagc

SEQ ID NO: 194276 - RNA, 19 nt, Artificial Sequence
  Description of Artificial Sequence: Synthetic oligonucleotide
  Sense strand starting at position 2347 of SEQ ID NO: 2504
uucucuuguucccaggauu

SEQ ID NO: 194277 - RNA, 19 nt, Artificial Sequence
  Description of Artificial Sequence: Synthetic oligonucleotide
  Antisense strand to SEQ ID NO: 194276
aauccugggaacaagagaa

SEQ ID NO: 194278 - RNA, 19 nt, Artificial Sequence
  Description of Artificial Sequence: Synthetic oligonucleotide
  Sense strand starting at position 2350 of SEQ ID NO: 2504
ucuuguucccaggauucua

SEQ ID NO: 194279 - RNA, 19 nt, Artificial Sequence
  Description of Artificial Sequence: Synthetic oligonucleotide
  Antisense strand to SEQ ID NO: 194278
uagaauccugggaacaaga

SEQ ID NO: 194280 - RNA, 19 nt, Artificial Sequence
  Description of Artificial Sequence: Synthetic oligonucleotide
  Sense strand starting at position 2361 of SEQ ID NO: 2504
ggauucuagccgcgcgaga

SEQ ID NO: 194281 - RNA, 19 nt, Artificial Sequence
  Description of Artificial Sequence: Synthetic oligonucleotide
  Antisense strand to SEQ ID NO: 194280
ucucgcgcggcuagaaucc

SEQ ID NO: 194282 - RNA, 19 nt, Artificial Sequence
  Description of Artificial Sequence: Synthetic oligonucleotide
  Sense strand starting at position 2380 of SEQ ID NO: 2504
caacaagaagucuggucaa

SEQ ID NO: 194283 - RNA, 19 nt, Artificial Sequence
  Description of Artificial Sequence: Synthetic oligonucleotide
  Antisense strand to SEQ ID NO: 194282
uugaccagacuucuuguug

SEQ ID NO: 194284 - RNA, 19 nt, Artificial Sequence
  Description of Artificial Sequence: Synthetic oligonucleotide
  Sense strand starting at position 2383 of SEQ ID NO: 2504
caagaagucuggucaaacu

SEQ ID NO: 194285 - RNA, 19 nt, Artificial Sequence
  Description of Artificial Sequence: Synthetic oligonucleotide
  Antisense strand to SEQ ID NO: 194284
aguuugaccagacuucuug

SEQ ID NO: 194286 - RNA, 19 nt, Artificial Sequence
  Description of Artificial Sequence: Synthetic oligonucleotide
  Sense strand starting at position 2409 of SEQ ID NO: 2504
uauuaaggguuaucaagcu

SEQ ID NO: 194287 - RNA, 19 nt, Artificial Sequence
  Description of Artificial Sequence: Synthetic oligonucleotide
  Antisense strand to SEQ ID NO: 194286
agcuugauaacccuuaaua

SEQ ID NO: 194288 - RNA, 19 nt, Artificial Sequence
  Description of Artificial Sequence: Synthetic oligonucleotide
  Sense strand starting at position 2415 of SEQ ID NO: 2504
ggguuaucaagcuguacac

SEQ ID NO: 194289 - RNA, 19 nt, Artificial Sequence
  Description of Artificial Sequence: Synthetic oligonucleotide
  Antisense strand to SEQ ID NO: 194288
guguacagcuugauaaccc

SEQ ID NO: 194290 - RNA, 19 nt, Artificial Sequence
  Description of Artificial Sequence: Synthetic oligonucleotide
  Sense strand starting at position 2928 of SEQ ID NO: 2504
aggccagugaugugcaaga

SEQ ID NO: 194291 - RNA, 19 nt, Artificial Sequence
  Description of Artificial Sequence: Synthetic oligonucleotide
  Antisense strand to SEQ ID NO: 194290
ucuugcacaucacuggccu

SEQ ID NO: 194292 - RNA, 19 nt, Artificial Sequence
  Description of Artificial Sequence: Synthetic oligonucleotide
  Sense strand starting at position 2930 of SEQ ID NO: 2504
gccagugaugugcaagaag

SEQ ID NO: 194293 - RNA, 19 nt, Artificial Sequence
  Description of Artificial Sequence: Synthetic oligonucleotide
  Antisense strand to SEQ ID NO: 194292
cuucuugcacaucacuggc

SEQ ID NO: 194294 - RNA, 19 nt, Artificial Sequence
  Description of Artificial Sequence: Synthetic oligonucleotide
  Sense strand starting at position 3009 of SEQ ID NO: 2504
gccugaccugcucaucuau

SEQ ID NO: 194295 - RNA, 19 nt, Artificial Sequence
  Description of Artificial Sequence: Synthetic oligonucleotide
  Antisense strand to SEQ ID NO: 194294
auagaugagcaggucaggc

SEQ ID NO: 194296 - RNA, 19 nt, Artificial Sequence
  Description of Artificial Sequence: Synthetic oligonucleotide
  Sense strand starting at position 3190 of SEQ ID NO: 2504
gccaguuucuagcaccaca

SEQ ID NO: 194297 - RNA, 19 nt, Artificial Sequence
  Description of Artificial Sequence: Synthetic oligonucleotide
  Antisense strand to SEQ ID NO: 194296
uguggugcuagaaacuggc

SEQ ID NO: 194298 - RNA, 19 nt, Artificial Sequence
  Description of Artificial Sequence: Synthetic oligonucleotide
  Sense strand starting at position 3474 of SEQ ID NO: 2504
aaggguugguaauggagau

SEQ ID NO: 194299 - RNA, 19 nt, Artificial Sequence
  Description of Artificial Sequence: Synthetic oligonucleotide
  Antisense strand to SEQ ID NO: 194298
aucuccauuaccaacccuu

SEQ ID NO: 194300 - RNA, 19 nt, Artificial Sequence
  Description of Artificial Sequence: Synthetic oligonucleotide
  Sense strand starting at position 3475 of SEQ ID NO: 2504
aggguugguaauggagaua

SEQ ID NO: 194301 - RNA, 19 nt, Artificial Sequence
  Description of Artificial Sequence: Synthetic oligonucleotide
  Antisense strand to SEQ ID NO: 194300
uaucuccauuaccaacccu

SEQ ID NO: 194302 - RNA, 19 nt, Artificial Sequence
  Description of Artificial Sequence: Synthetic oligonucleotide
  Sense strand starting at position 3480 of SEQ ID NO: 2504
ugguaauggagauagucuu

SEQ ID NO: 194303 - RNA, 19 nt, Artificial Sequence
  Description of Artificial Sequence: Synthetic oligonucleotide
  Antisense strand to SEQ ID NO: 194302
aagacuaucuccauuacca

SEQ ID NO: 194304 - RNA, 19 nt, Artificial Sequence
  Description of Artificial Sequence: Synthetic oligonucleotide
  Sense strand starting at position 3707 of SEQ ID NO: 2504
ccuggaaguuacuauuucu

SEQ ID NO: 194305 - RNA, 19 nt, Artificial Sequence
  Description of Artificial Sequence: Synthetic oligonucleotide
  Antisense strand to SEQ ID NO: 194304
agaaauaguaacuuccagg

SEQ ID NO: 194306 - RNA, 19 nt, Artificial Sequence
  Description of Artificial Sequence: Synthetic oligonucleotide
  Sense strand starting at position 3713 of SEQ ID NO: 2504
aguuacuauuucuggcagu

SEQ ID NO: 194307 - RNA, 19 nt, Artificial Sequence
  Description of Artificial Sequence: Synthetic oligonucleotide
  Antisense strand to SEQ ID NO: 194306
acugccagaaauaguaacu

SEQ ID NO: 194308 - RNA, 19 nt, Artificial Sequence
  Description of Artificial Sequence: Synthetic oligonucleotide
  Sense strand starting at position 3714 of SEQ ID NO: 2504
guuacuauuucuggcaguu

SEQ ID NO: 194309 - RNA, 19 nt, Artificial Sequence
  Description of Artificial Sequence: Synthetic oligonucleotide
  Antisense strand to SEQ ID NO: 194308
aacugccagaaauaguaac

SEQ ID NO: 194310 - RNA, 19 nt, Artificial Sequence
  Description of Artificial Sequence: Synthetic oligonucleotide
  Sense strand starting at position 3854 of SEQ ID NO: 2504
agaggcagccgagagaaau

SEQ ID NO: 194311 - RNA, 19 nt, Artificial Sequence
  Description of Artificial Sequence: Synthetic oligonucleotide
  Antisense strand to SEQ ID NO: 194310
auuucucucggcugccucu

SEQ ID NO: 194312 - RNA, 19 nt, Artificial Sequence
  Description of Artificial Sequence: Synthetic oligonucleotide
  Sense strand starting at position 3919 of SEQ ID NO: 2504
gaguaagcauacucauaga

SEQ ID NO: 194313 - RNA, 19 nt, Artificial Sequence
  Description of Artificial Sequence: Synthetic oligonucleotide
  Antisense strand to SEQ ID NO: 194312
ucuaugaguaugcuuacuc

SEQ ID NO: 194314 - RNA, 19 nt, Artificial Sequence
  Description of Artificial Sequence: Synthetic oligonucleotide
  Sense strand starting at position 3982 of SEQ ID NO: 2504
gugagucuuugggccuguu

SEQ ID NO: 194315 - RNA, 19 nt, Artificial Sequence
  Description of Artificial Sequence: Synthetic oligonucleotide
  Antisense strand to SEQ ID NO: 194314
aacaggcccaaagacucac

SEQ ID NO: 194316 - RNA, 19 nt, Artificial Sequence
  Description of Artificial Sequence: Synthetic oligonucleotide
  Sense strand starting at position 241 of SEQ ID NO: 2505
cagauaagaucugauaagg

SEQ ID NO: 194317 - RNA, 19 nt, Artificial Sequence
  Description of Artificial Sequence: Synthetic oligonucleotide
  Antisense strand to SEQ ID NO: 194316
ccuuaucagaucuuaucug

SEQ ID NO: 194318 - RNA, 19 nt, Artificial Sequence
  Description of Artificial Sequence: Synthetic oligonucleotide
  Sense strand starting at position 251 of SEQ ID NO: 2505
cugauaaggcccgauguua

SEQ ID NO: 194319 - RNA, 19 nt, Artificial Sequence
  Description of Artificial Sequence: Synthetic oligonucleotide
  Antisense strand to SEQ ID NO: 194318
uaacaucgggccuuaucag

SEQ ID NO: 194320 - RNA, 19 nt, Artificial Sequence
  Description of Artificial Sequence: Synthetic oligonucleotide
  Sense strand starting at position 604 of SEQ ID NO: 2505
uucucuauucuugauugua

SEQ ID NO: 194321 - RNA, 19 nt, Artificial Sequence
  Description of Artificial Sequence: Synthetic oligonucleotide
  Antisense strand to SEQ ID NO: 194320
uacaaucaagaauagagaa

SEQ ID NO: 194322 - RNA, 19 nt, Artificial Sequence
  Description of Artificial Sequence: Synthetic oligonucleotide
  Sense strand starting at position 606 of SEQ ID NO: 2505
cucuauucuugauuguaug

SEQ ID NO: 194323 - RNA, 19 nt, Artificial Sequence
  Description of Artificial Sequence: Synthetic oligonucleotide
  Antisense strand to SEQ ID NO: 194322
cauacaaucaagaauagag

SEQ ID NO: 194324 - RNA, 19 nt, Artificial Sequence
  Description of Artificial Sequence: Synthetic oligonucleotide
  Sense strand starting at position 607 of SEQ ID NO: 2505
ucuauucuugauuguaugu

SEQ ID NO: 194325 - RNA, 19 nt, Artificial Sequence
  Description of Artificial Sequence: Synthetic oligonucleotide
  Antisense strand to SEQ ID NO: 194324
acauacaaucaagaauaga

SEQ ID NO: 194326 - RNA, 19 nt, Artificial Sequence
  Description of Artificial Sequence: Synthetic oligonucleotide
  Sense strand starting at position 612 of SEQ ID NO: 2505
ucuugauuguauguccaaa

SEQ ID NO: 194327 - RNA, 19 nt, Artificial Sequence
  Description of Artificial Sequence: Synthetic oligonucleotide
  Antisense strand to SEQ ID NO: 194326
uuuggacauacaaucaaga

SEQ ID NO: 194328 - RNA, 19 nt, Artificial Sequence
  Description of Artificial Sequence: Synthetic oligonucleotide
  Sense strand starting at position 735 of SEQ ID NO: 2505
gggaaauuguguuuccuga

SEQ ID NO: 194329 - RNA, 19 nt, Artificial Sequence
  Description of Artificial Sequence: Synthetic oligonucleotide
  Antisense strand to SEQ ID NO: 194328
ucaggaaacacaauuuccc

SEQ ID NO: 194330 - RNA, 19 nt, Artificial Sequence
  Description of Artificial Sequence: Synthetic oligonucleotide
  Sense strand starting at position 737 of SEQ ID NO: 2505
gaaauuguguuuccugagu

SEQ ID NO: 194331 - RNA, 19 nt, Artificial Sequence
  Description of Artificial Sequence: Synthetic oligonucleotide
  Antisense strand to SEQ ID NO: 194330
acucaggaaacacaauuuc

SEQ ID NO: 194332 - RNA, 19 nt, Artificial Sequence
  Description of Artificial Sequence: Synthetic oligonucleotide
  Sense strand starting at position 811 of SEQ ID NO: 2505
cguacauguuaggcagaau

SEQ ID NO: 194333 - RNA, 19 nt, Artificial Sequence
  Description of Artificial Sequence: Synthetic oligonucleotide
  Antisense strand to SEQ ID NO: 194332
auucugccuaacauguacg

SEQ ID NO: 194334 - RNA, 19 nt, Artificial Sequence
  Description of Artificial Sequence: Synthetic oligonucleotide
  Sense strand starting at position 812 of SEQ ID NO: 2505
guacauguuaggcagaauu

SEQ ID NO: 194335 - RNA, 19 nt, Artificial Sequence
  Description of Artificial Sequence: Synthetic oligonucleotide
  Antisense strand to SEQ ID NO: 194334
aauucugccuaacauguac

SEQ ID NO: 194336 - RNA, 19 nt, Artificial Sequence
  Description of Artificial Sequence: Synthetic oligonucleotide
  Sense strand starting at position 914 of SEQ ID NO: 2505
auaucaaaccuguggcuuu

SEQ ID NO: 194337 - RNA, 19 nt, Artificial Sequence
  Description of Artificial Sequence: Synthetic oligonucleotide
  Antisense strand to SEQ ID NO: 194336
aaagccacagguuugauau

SEQ ID NO: 194338 - RNA, 19 nt, Artificial Sequence
  Description of Artificial Sequence: Synthetic oligonucleotide
  Sense strand starting at position 936 of SEQ ID NO: 2505
guuacaacuuaaucuguuu

SEQ ID NO: 194339 - RNA, 19 nt, Artificial Sequence
  Description of Artificial Sequence: Synthetic oligonucleotide
  Antisense strand to SEQ ID NO: 194338
aaacagauuaaguuguaac

SEQ ID NO: 194340 - RNA, 19 nt, Artificial Sequence
  Description of Artificial Sequence: Synthetic oligonucleotide
  Sense strand starting at position 958 of SEQ ID NO: 2505
caauguggaguuuaacuca

SEQ ID NO: 194341 - RNA, 19 nt, Artificial Sequence
  Description of Artificial Sequence: Synthetic oligonucleotide
  Antisense strand to SEQ ID NO: 194340
ugaguuaaacuccacauug

SEQ ID NO: 194342 - RNA, 19 nt, Artificial Sequence
  Description of Artificial Sequence: Synthetic oligonucleotide
  Sense strand starting at position 1629 of SEQ ID NO: 2505
gcacuuaaagagugaagaa

SEQ ID NO: 194343 - RNA, 19 nt, Artificial Sequence
  Description of Artificial Sequence: Synthetic oligonucleotide
  Antisense strand to SEQ ID NO: 194342
uucuucacucuuuaagugc

SEQ ID NO: 194344 - RNA, 19 nt, Artificial Sequence
  Description of Artificial Sequence: Synthetic oligonucleotide
  Sense strand starting at position 1801 of SEQ ID NO: 2505
gccucuguuuacuuggaga

SEQ ID NO: 194345 - RNA, 19 nt, Artificial Sequence
  Description of Artificial Sequence: Synthetic oligonucleotide
  Antisense strand to SEQ ID NO: 194344
ucuccaaguaaacagaggc

SEQ ID NO: 194346 - RNA, 19 nt, Artificial Sequence
  Description of Artificial Sequence: Synthetic oligonucleotide
  Sense strand starting at position 2138 of SEQ ID NO: 2505
gucccugcuccaggaaaca

SEQ ID NO: 194347 - RNA, 19 nt, Artificial Sequence
  Description of Artificial Sequence: Synthetic oligonucleotide
  Antisense strand to SEQ ID NO: 194346
uguuuccuggagcagggac

SEQ ID NO: 194348 - RNA, 19 nt, Artificial Sequence
  Description of Artificial Sequence: Synthetic oligonucleotide
  Sense strand starting at position 2285 of SEQ ID NO: 2505
ccaggauaccucggugagu

SEQ ID NO: 194349 - RNA, 19 nt, Artificial Sequence
  Description of Artificial Sequence: Synthetic oligonucleotide
  Antisense strand to SEQ ID NO: 194348
acucaccgagguauccugg

SEQ ID NO: 194350 - RNA, 19 nt, Artificial Sequence
  Description of Artificial Sequence: Synthetic oligonucleotide
  Sense strand starting at position 2287 of SEQ ID NO: 2505
aggauaccucggugaguga

SEQ ID NO: 194351 - RNA, 19 nt, Artificial Sequence
  Description of Artificial Sequence: Synthetic oligonucleotide
  Antisense strand to SEQ ID NO: 194350
ucacucaccgagguauccu

SEQ ID NO: 194352 - RNA, 19 nt, Artificial Sequence
  Description of Artificial Sequence: Synthetic oligonucleotide
  Sense strand starting at position 2429 of SEQ ID NO: 2505
gacuguuuccugcauguca

SEQ ID NO: 194353 - RNA, 19 nt, Artificial Sequence
  Description of Artificial Sequence: Synthetic oligonucleotide
  Antisense strand to SEQ ID NO: 194352
ugacaugcaggaaacaguc

SEQ ID NO: 194354 - RNA, 19 nt, Artificial Sequence
  Description of Artificial Sequence: Synthetic oligonucleotide
  Sense strand starting at position 2491 of SEQ ID NO: 2505
gucacuuccugcccuaaga

SEQ ID NO: 194355 - RNA, 19 nt, Artificial Sequence
  Description of Artificial Sequence: Synthetic oligonucleotide
  Antisense strand to SEQ ID NO: 194354
ucuuagggcaggaagugac

SEQ ID NO: 194356 - RNA, 19 nt, Artificial Sequence
  Description of Artificial Sequence: Synthetic oligonucleotide
  Sense strand starting at position 2538 of SEQ ID NO: 2505
uugugugaugugggacaau

SEQ ID NO: 194357 - RNA, 19 nt, Artificial Sequence
  Description of Artificial Sequence: Synthetic oligonucleotide
  Antisense strand to SEQ ID NO: 194356
auugucccacaucacacaa

SEQ ID NO: 194358 - RNA, 19 nt, Artificial Sequence
  Description of Artificial Sequence: Synthetic oligonucleotide
  Sense strand starting at position 2933 of SEQ ID NO: 2505
auagaaaugugcucacaca

SEQ ID NO: 194359 - RNA, 19 nt, Artificial Sequence
  Description of Artificial Sequence: Synthetic oligonucleotide
  Antisense strand to SEQ ID NO: 194358
ugugugagcacauuucuau

SEQ ID NO: 194360 - RNA, 19 nt, Artificial Sequence
  Description of Artificial Sequence: Synthetic oligonucleotide
  Sense strand starting at position 2967 of SEQ ID NO: 2505
uggugucuccuccauccau

SEQ ID NO: 194361 - RNA, 19 nt, Artificial Sequence
  Description of Artificial Sequence: Synthetic oligonucleotide
  Antisense strand to SEQ ID NO: 194360
auggauggaggagacacca

SEQ ID NO: 194362 - RNA, 19 nt, Artificial Sequence
  Description of Artificial Sequence: Synthetic oligonucleotide
  Sense strand starting at position 3000 of SEQ ID NO: 2505
ggucucaguaaugaaguga

SEQ ID NO: 194363 - RNA, 19 nt, Artificial Sequence
  Description of Artificial Sequence: Synthetic oligonucleotide
  Antisense strand to SEQ ID NO: 194362
ucacuucauuacugagacc

SEQ ID NO: 194364 - RNA, 19 nt, Artificial Sequence
  Description of Artificial Sequence: Synthetic oligonucleotide
  Sense strand starting at position 3011 of SEQ ID NO: 2505
ugaagugaugggugagaca

SEQ ID NO: 194365 - RNA, 19 nt, Artificial Sequence
  Description of Artificial Sequence: Synthetic oligonucleotide
  Antisense strand to SEQ ID NO: 194364
ugucucacccaucacuuca

SEQ ID NO: 194366 - RNA, 19 nt, Artificial Sequence
  Description of Artificial Sequence: Synthetic oligonucleotide
  Sense strand starting at position 3086 of SEQ ID NO: 2505
uaaguucugcgagaaagcu

SEQ ID NO: 194367 - RNA, 19 nt, Artificial Sequence
  Description of Artificial Sequence: Synthetic oligonucleotide
  Antisense strand to SEQ ID NO: 194366
agcuuucucgcagaacuua

SEQ ID NO: 194368 - RNA, 19 nt, Artificial Sequence
  Description of Artificial Sequence: Synthetic oligonucleotide
  Sense strand starting at position 3095 of SEQ ID NO: 2505
cgagaaagcuggaaggagu

SEQ ID NO: 194369 - RNA, 19 nt, Artificial Sequence
  Description of Artificial Sequence: Synthetic oligonucleotide
  Antisense strand to SEQ ID NO: 194368
acuccuuccagcuuucucg

SEQ ID NO: 194370 - RNA, 19 nt, Artificial Sequence
  Description of Artificial Sequence: Synthetic oligonucleotide
  Sense strand starting at position 3138 of SEQ ID NO: 2505
ggagguauguuuccuuccu

SEQ ID NO: 194371 - RNA, 19 nt, Artificial Sequence
  Description of Artificial Sequence: Synthetic oligonucleotide
  Antisense strand to SEQ ID NO: 194370
aggaaggaaacauaccucc

SEQ ID NO: 194372 - RNA, 19 nt, Artificial Sequence
  Description of Artificial Sequence: Synthetic oligonucleotide
  Sense strand starting at position 3140 of SEQ ID NO: 2505
agguauguuuccuuccuca

SEQ ID NO: 194373 - RNA, 19 nt, Artificial Sequence
  Description of Artificial Sequence: Synthetic oligonucleotide
  Antisense strand to SEQ ID NO: 194372
ugaggaaggaaacauaccu

SEQ ID NO: 194374 - RNA, 19 nt, Artificial Sequence
  Description of Artificial Sequence: Synthetic oligonucleotide
  Sense strand starting at position 3165 of SEQ ID NO: 2505
cugagaaguguuuacucaa

SEQ ID NO: 194375 - RNA, 19 nt, Artificial Sequence
  Description of Artificial Sequence: Synthetic oligonucleotide
  Antisense strand to SEQ ID NO: 194374
uugaguaaacacuucucag

SEQ ID NO: 194376 - RNA, 19 nt, Artificial Sequence
  Description of Artificial Sequence: Synthetic oligonucleotide
  Sense strand starting at position 3168 of SEQ ID NO: 2505
agaaguguuuacucaagaa

SEQ ID NO: 194377 - RNA, 19 nt, Artificial Sequence
  Description of Artificial Sequence: Synthetic oligonucleotide
  Antisense strand to SEQ ID NO: 194376
uucuugaguaaacacuucu

SEQ ID NO: 194378 - RNA, 19 nt, Artificial Sequence
  Description of Artificial Sequence: Synthetic oligonucleotide
  Sense strand starting at position 3183 of SEQ ID NO: 2505
agaaauagccuuugacuga

SEQ ID NO: 194379 - RNA, 19 nt, Artificial Sequence
  Description of Artificial Sequence: Synthetic oligonucleotide
  Antisense strand to SEQ ID NO: 194378
ucagucaaaggcuauuucu

SEQ ID NO: 194380 - RNA, 19 nt, Artificial Sequence
  Description of Artificial Sequence: Synthetic oligonucleotide
  Sense strand starting at position 3198 of SEQ ID NO: 2505
cugaauucgggauguggca

SEQ ID NO: 194381 - RNA, 19 nt, Artificial Sequence
  Description of Artificial Sequence: Synthetic oligonucleotide
  Antisense strand to SEQ ID NO: 194380
ugccacaucccgaauucag

SEQ ID NO: 194382 - RNA, 19 nt, Artificial Sequence
  Description of Artificial Sequence: Synthetic oligonucleotide
  Sense strand starting at position 3378 of SEQ ID NO: 2505
cuggacuggccuugaguuu

SEQ ID NO: 194383 - RNA, 19 nt, Artificial Sequence
  Description of Artificial Sequence: Synthetic oligonucleotide
  Antisense strand to SEQ ID NO: 194382
aaacucaaggccaguccag

SEQ ID NO: 194384 - RNA, 19 nt, Artificial Sequence
  Description of Artificial Sequence: Synthetic oligonucleotide
  Sense strand starting at position 3399 of SEQ ID NO: 2505
aggacuugacucggccaga

SEQ ID NO: 194385 - RNA, 19 nt, Artificial Sequence
  Description of Artificial Sequence: Synthetic oligonucleotide
  Antisense strand to SEQ ID NO: 194384
ucuggccgagucaaguccu

SEQ ID NO: 194386 - RNA, 19 nt, Artificial Sequence
  Description of Artificial Sequence: Synthetic oligonucleotide
  Sense strand starting at position 3497 of SEQ ID NO: 2505
ccaccacuucgggaaaugu

SEQ ID NO: 194387 - RNA, 19 nt, Artificial Sequence
  Description of Artificial Sequence: Synthetic oligonucleotide
  Antisense strand to SEQ ID NO: 194386
acauuucccgaaguggugg

SEQ ID NO: 194388 - RNA, 19 nt, Artificial Sequence
  Description of Artificial Sequence: Synthetic oligonucleotide
  Sense strand starting at position 3512 of SEQ ID NO: 2505
auguuuaaagccugaauag

SEQ ID NO: 194389 - RNA, 19 nt, Artificial Sequence
  Description of Artificial Sequence: Synthetic oligonucleotide
  Antisense strand to SEQ ID NO: 194388
cuauucaggcuuuaaacau

SEQ ID NO: 194390 - RNA, 19 nt, Artificial Sequence
  Description of Artificial Sequence: Synthetic oligonucleotide
  Sense strand starting at position 3513 of SEQ ID NO: 2505
uguuuaaagccugaauaga

SEQ ID NO: 194391 - RNA, 19 nt, Artificial Sequence
  Description of Artificial Sequence: Synthetic oligonucleotide
  Antisense strand to SEQ ID NO: 194390
ucuauucaggcuuuaaaca

SEQ ID NO: 194392 - RNA, 19 nt, Artificial Sequence
  Description of Artificial Sequence: Synthetic oligonucleotide
  Sense strand starting at position 3849 of SEQ ID NO: 2505
ccugaaaggccauguguaa

SEQ ID NO: 194393 - RNA, 19 nt, Artificial Sequence
  Description of Artificial Sequence: Synthetic oligonucleotide
  Antisense strand to SEQ ID NO: 194392
uuacacauggccuuucagg

SEQ ID NO: 194394 - RNA, 19 nt, Artificial Sequence
  Description of Artificial Sequence: Synthetic oligonucleotide
  Sense strand starting at position 3881 of SEQ ID NO: 2505
aaggcaacuuggcuagaau

SEQ ID NO: 194395 - RNA, 19 nt, Artificial Sequence
  Description of Artificial Sequence: Synthetic oligonucleotide
  Antisense strand to SEQ ID NO: 194394
auucuagccaaguugccuu

SEQ ID NO: 194396 - RNA, 19 nt, Artificial Sequence
  Description of Artificial Sequence: Synthetic oligonucleotide
  Sense strand starting at position 83 of SEQ ID NO: 2506
gccagagaaguauaugucu

SEQ ID NO: 194397 - RNA, 19 nt, Artificial Sequence
  Description of Artificial Sequence: Synthetic oligonucleotide
  Antisense strand to SEQ ID NO: 194396
agacauauacuucucuggc

SEQ ID NO: 194398 - RNA, 19 nt, Artificial Sequence
  Description of Artificial Sequence: Synthetic oligonucleotide
  Sense strand starting at position 88 of SEQ ID NO: 2506
agaaguauaugucugugca

SEQ ID NO: 194399 - RNA, 19 nt, Artificial Sequence
  Description of Artificial Sequence: Synthetic oligonucleotide
  Antisense strand to SEQ ID NO: 194398
ugcacagacauauacuucu

SEQ ID NO: 194400 - RNA, 19 nt, Artificial Sequence
  Description of Artificial Sequence: Synthetic oligonucleotide
  Sense strand starting at position 89 of SEQ ID NO: 2506
gaaguauaugucugugcag

SEQ ID NO: 194401 - RNA, 19 nt, Artificial Sequence
  Description of Artificial Sequence: Synthetic oligonucleotide
  Antisense strand to SEQ ID NO: 194400
cugcacagacauauacuuc

SEQ ID NO: 194402 - RNA, 19 nt, Artificial Sequence
  Description of Artificial Sequence: Synthetic oligonucleotide
  Sense strand starting at position 251 of SEQ ID NO: 2506
uagccaaguugccuuagaa

SEQ ID NO: 194403 - RNA, 19 nt, Artificial Sequence
  Description of Artificial Sequence: Synthetic oligonucleotide
  Antisense strand to SEQ ID NO: 194402
uucuaaggcaacuuggcua

SEQ ID NO: 194404 - RNA, 19 nt, Artificial Sequence
  Description of Artificial Sequence: Synthetic oligonucleotide
  Sense strand starting at position 296 of SEQ ID NO: 2506
gguugugaggaagauaugu

SEQ ID NO: 194405 - RNA, 19 nt, Artificial Sequence
  Description of Artificial Sequence: Synthetic oligonucleotide
  Antisense strand to SEQ ID NO: 194404
acauaucuuccucacaacc

SEQ ID NO: 194406 - RNA, 19 nt, Artificial Sequence
  Description of Artificial Sequence: Synthetic oligonucleotide
  Sense strand starting at position 349 of SEQ ID NO: 2506
guucuuauagcuugacuga

SEQ ID NO: 194407 - RNA, 19 nt, Artificial Sequence
  Description of Artificial Sequence: Synthetic oligonucleotide
  Antisense strand to SEQ ID NO: 194406
ucagucaagcuauaagaac

SEQ ID NO: 194408 - RNA, 19 nt, Artificial Sequence
  Description of Artificial Sequence: Synthetic oligonucleotide
  Sense strand starting at position 350 of SEQ ID NO: 2506
uucuuauagcuugacugau

SEQ ID NO: 194409 - RNA, 19 nt, Artificial Sequence
  Description of Artificial Sequence: Synthetic oligonucleotide
  Antisense strand to SEQ ID NO: 194408
aucagucaagcuauaagaa

SEQ ID NO: 194410 - RNA, 19 nt, Artificial Sequence
  Description of Artificial Sequence: Synthetic oligonucleotide
  Sense strand starting at position 352 of SEQ ID NO: 2506
cuuauagcuugacugauga

SEQ ID NO: 194411 - RNA, 19 nt, Artificial Sequence
  Description of Artificial Sequence: Synthetic oligonucleotide
  Antisense strand to SEQ ID NO: 194410
ucaucagucaagcuauaag

SEQ ID NO: 194412 - RNA, 19 nt, Artificial Sequence
  Description of Artificial Sequence: Synthetic oligonucleotide
  Sense strand starting at position 389 of SEQ ID NO: 2506
uaggaaaugugacccucau

SEQ ID NO: 194413 - RNA, 19 nt, Artificial Sequence
  Description of Artificial Sequence: Synthetic oligonucleotide
  Antisense strand to SEQ ID NO: 194412
augagggucacauuuccua

SEQ ID NO: 194414 - RNA, 19 nt, Artificial Sequence
  Description of Artificial Sequence: Synthetic oligonucleotide
  Sense strand starting at position 580 of SEQ ID NO: 2506
caggaaguguucccaaagu

SEQ ID NO: 194415 - RNA, 19 nt, Artificial Sequence
  Description of Artificial Sequence: Synthetic oligonucleotide
  Antisense strand to SEQ ID NO: 194414
acuuugggaacacuuccug

SEQ ID NO: 194416 - RNA, 19 nt, Artificial Sequence
  Description of Artificial Sequence: Synthetic oligonucleotide
  Sense strand starting at position 683 of SEQ ID NO: 2506
agauguggugguugcagaa

SEQ ID NO: 194417 - RNA, 19 nt, Artificial Sequence
  Description of Artificial Sequence: Synthetic oligonucleotide
  Antisense strand to SEQ ID NO: 194416
uucugcaaccaccacaucu

SEQ ID NO: 194418 - RNA, 19 nt, Artificial Sequence
  Description of Artificial Sequence: Synthetic oligonucleotide
  Sense strand starting at position 736 of SEQ ID NO: 2506
gagucaaguccuggaaacu

SEQ ID NO: 194419 - RNA, 19 nt, Artificial Sequence
  Description of Artificial Sequence: Synthetic oligonucleotide
  Antisense strand to SEQ ID NO: 194418
aguuuccaggacuugacuc

SEQ ID NO: 194420 - RNA, 19 nt, Artificial Sequence
  Description of Artificial Sequence: Synthetic oligonucleotide
  Sense strand starting at position 737 of SEQ ID NO: 2506
agucaaguccuggaaacuc

SEQ ID NO: 194421 - RNA, 19 nt, Artificial Sequence
  Description of Artificial Sequence: Synthetic oligonucleotide
  Antisense strand to SEQ ID NO: 194420
gaguuuccaggacuugacu

SEQ ID NO: 194422 - RNA, 19 nt, Artificial Sequence
  Description of Artificial Sequence: Synthetic oligonucleotide
  Sense strand starting at position 787 of SEQ ID NO: 2506
uguggaauccucgaucaug

SEQ ID NO: 194423 - RNA, 19 nt, Artificial Sequence
  Description of Artificial Sequence: Synthetic oligonucleotide
  Antisense strand to SEQ ID NO: 194422
caugaucgaggauuccaca

SEQ ID NO: 194424 - RNA, 19 nt, Artificial Sequence
  Description of Artificial Sequence: Synthetic oligonucleotide
  Sense strand starting at position 790 of SEQ ID NO: 2506
ggaauccucgaucaugcuu

SEQ ID NO: 194425 - RNA, 19 nt, Artificial Sequence
  Description of Artificial Sequence: Synthetic oligonucleotide
  Antisense strand to SEQ ID NO: 194424
aagcaugaucgaggauucc

SEQ ID NO: 194426 - RNA, 19 nt, Artificial Sequence
  Description of Artificial Sequence: Synthetic oligonucleotide
  Sense strand starting at position 952 of SEQ ID NO: 2506
aaggcuauuucuugaguaa

SEQ ID NO: 194427 - RNA, 19 nt, Artificial Sequence
  Description of Artificial Sequence: Synthetic oligonucleotide
  Antisense strand to SEQ ID NO: 194426
uuacucaagaaauagccuu

SEQ ID NO: 194428 - RNA, 19 nt, Artificial Sequence
  Description of Artificial Sequence: Synthetic oligonucleotide
  Sense strand starting at position 966 of SEQ ID NO: 2506
aguaaacacuucucaggua

SEQ ID NO: 194429 - RNA, 19 nt, Artificial Sequence
  Description of Artificial Sequence: Synthetic oligonucleotide
  Antisense strand to SEQ ID NO: 194428
uaccugagaaguguuuacu

SEQ ID NO: 194430 - RNA, 19 nt, Artificial Sequence
  Description of Artificial Sequence: Synthetic oligonucleotide
  Sense strand starting at position 1042 of SEQ ID NO: 2506
agcuuucucgcagaacuua

SEQ ID NO: 194431 - RNA, 19 nt, Artificial Sequence
  Description of Artificial Sequence: Synthetic oligonucleotide
  Antisense strand to SEQ ID NO: 194430
uaaguucugcgagaaagcu

SEQ ID NO: 194432 - RNA, 19 nt, Artificial Sequence
  Description of Artificial Sequence: Synthetic oligonucleotide
  Sense strand starting at position 1190 of SEQ ID NO: 2506
uggcaugugugagcacauu

SEQ ID NO: 194433 - RNA, 19 nt, Artificial Sequence
  Description of Artificial Sequence: Synthetic oligonucleotide
  Antisense strand to SEQ ID NO: 194432
aaugugcucacacaugcca

SEQ ID NO: 194434 - RNA, 19 nt, Artificial Sequence
  Description of Artificial Sequence: Synthetic oligonucleotide
  Sense strand starting at position 1199 of SEQ ID NO: 2506
ugagcacauuucuaugaug

SEQ ID NO: 194435 - RNA, 19 nt, Artificial Sequence
  Description of Artificial Sequence: Synthetic oligonucleotide
  Antisense strand to SEQ ID NO: 194434
caucauagaaaugugcuca

SEQ ID NO: 194436 - RNA, 19 nt, Artificial Sequence
  Description of Artificial Sequence: Synthetic oligonucleotide
  Sense strand starting at position 1202 of SEQ ID NO: 2506
gcacauuucuaugauggag

SEQ ID NO: 194437 - RNA, 19 nt, Artificial Sequence
  Description of Artificial Sequence: Synthetic oligonucleotide
  Antisense strand to SEQ ID NO: 194436
cuccaucauagaaaugugc

SEQ ID NO: 194438 - RNA, 19 nt, Artificial Sequence
  Description of Artificial Sequence: Synthetic oligonucleotide
  Sense strand starting at position 1214 of SEQ ID NO: 2506
gauggagucucauucggaa

SEQ ID NO: 194439 - RNA, 19 nt, Artificial Sequence
  Description of Artificial Sequence: Synthetic oligonucleotide
  Antisense strand to SEQ ID NO: 194438
uuccgaaugagacuccauc

SEQ ID NO: 194440 - RNA, 19 nt, Artificial Sequence
  Description of Artificial Sequence: Synthetic oligonucleotide
  Sense strand starting at position 1628 of SEQ ID NO: 2506
aagagcauuucuuagggca

SEQ ID NO: 194441 - RNA, 19 nt, Artificial Sequence
  Description of Artificial Sequence: Synthetic oligonucleotide
  Antisense strand to SEQ ID NO: 194440
ugcccuaagaaaugcucuu

SEQ ID NO: 194442 - RNA, 19 nt, Artificial Sequence
  Description of Artificial Sequence: Synthetic oligonucleotide
  Sense strand starting at position 1838 of SEQ ID NO: 2506
ugcucacucaccgagguau

SEQ ID NO: 194443 - RNA, 19 nt, Artificial Sequence
  Description of Artificial Sequence: Synthetic oligonucleotide
  Antisense strand to SEQ ID NO: 194442
auaccucggugagugagca

SEQ ID NO: 194444 - RNA, 19 nt, Artificial Sequence
  Description of Artificial Sequence: Synthetic oligonucleotide
  Sense strand starting at position 2115 of SEQ ID NO: 2506
aaagguacaucagauaaug

SEQ ID NO: 194445 - RNA, 19 nt, Artificial Sequence
  Description of Artificial Sequence: Synthetic oligonucleotide
  Antisense strand to SEQ ID NO: 194444
cauuaucugauguaccuuu

SEQ ID NO: 194446 - RNA, 19 nt, Artificial Sequence
  Description of Artificial Sequence: Synthetic oligonucleotide
  Sense strand starting at position 2289 of SEQ ID NO: 2506
ggugaccucucaucuuuga

SEQ ID NO: 194447 - RNA, 19 nt, Artificial Sequence
  Description of Artificial Sequence: Synthetic oligonucleotide
  Antisense strand to SEQ ID NO: 194446
ucaaagaugagaggucacc

SEQ ID NO: 194448 - RNA, 19 nt, Artificial Sequence
  Description of Artificial Sequence: Synthetic oligonucleotide
  Sense strand starting at position 2318 of SEQ ID NO: 2506
guccaugggucuccaagua

SEQ ID NO: 194449 - RNA, 19 nt, Artificial Sequence
  Description of Artificial Sequence: Synthetic oligonucleotide
  Antisense strand to SEQ ID NO: 194448
uacuuggagacccauggac

SEQ ID NO: 194450 - RNA, 19 nt, Artificial Sequence
  Description of Artificial Sequence: Synthetic oligonucleotide
  Sense strand starting at position 2691 of SEQ ID NO: 2506
gcccucuguggaugggaau

SEQ ID NO: 194451 - RNA, 19 nt, Artificial Sequence
  Description of Artificial Sequence: Synthetic oligonucleotide
  Antisense strand to SEQ ID NO: 194450
auucccauccacagagggc

SEQ ID NO: 194452 - RNA, 19 nt, Artificial Sequence
  Description of Artificial Sequence: Synthetic oligonucleotide
  Sense strand starting at position 3060 of SEQ ID NO: 2506
ccaggcagauccucaaaga

SEQ ID NO: 194453 - RNA, 19 nt, Artificial Sequence
  Description of Artificial Sequence: Synthetic oligonucleotide
  Antisense strand to SEQ ID NO: 194452
ucuuugaggaucugccugg

SEQ ID NO: 194454 - RNA, 19 nt, Artificial Sequence
  Description of Artificial Sequence: Synthetic oligonucleotide
  Sense strand starting at position 3103 of SEQ ID NO: 2506
gcagaucaugugcauccua

SEQ ID NO: 194455 - RNA, 19 nt, Artificial Sequence
  Description of Artificial Sequence: Synthetic oligonucleotide
  Antisense strand to SEQ ID NO: 194454
uaggaugcacaugaucugc

SEQ ID NO: 194456 - RNA, 19 nt, Artificial Sequence
  Description of Artificial Sequence: Synthetic oligonucleotide
  Sense strand starting at position 3215 of SEQ ID NO: 2506
aagccacagguuugauauu

SEQ ID NO: 194457 - RNA, 19 nt, Artificial Sequence
  Description of Artificial Sequence: Synthetic oligonucleotide
  Antisense strand to SEQ ID NO: 194456
aauaucaaaccuguggcuu

SEQ ID NO: 194458 - RNA, 19 nt, Artificial Sequence
  Description of Artificial Sequence: Synthetic oligonucleotide
  Sense strand starting at position 3246 of SEQ ID NO: 2506
auugauaucugacugugaa

SEQ ID NO: 194459 - RNA, 19 nt, Artificial Sequence
  Description of Artificial Sequence: Synthetic oligonucleotide
  Antisense strand to SEQ ID NO: 194458
uucacagucagauaucaau

SEQ ID NO: 194460 - RNA, 19 nt, Artificial Sequence
  Description of Artificial Sequence: Synthetic oligonucleotide
  Sense strand starting at position 3247 of SEQ ID NO: 2506
uugauaucugacugugaau

SEQ ID NO: 194461 - RNA, 19 nt, Artificial Sequence
  Description of Artificial Sequence: Synthetic oligonucleotide
  Antisense strand to SEQ ID NO: 194460
auucacagucagauaucaa

SEQ ID NO: 194462 - RNA, 19 nt, Artificial Sequence
  Description of Artificial Sequence: Synthetic oligonucleotide
  Sense strand starting at position 3322 of SEQ ID NO: 2506
gccuaacauguacgugaau

SEQ ID NO: 194463 - RNA, 19 nt, Artificial Sequence
  Description of Artificial Sequence: Synthetic oligonucleotide
  Antisense strand to SEQ ID NO: 194462
auucacguacauguuaggc

SEQ ID NO: 194464 - RNA, 19 nt, Artificial Sequence
  Description of Artificial Sequence: Synthetic oligonucleotide
  Sense strand starting at position 3323 of SEQ ID NO: 2506
ccuaacauguacgugaauu

SEQ ID NO: 194465 - RNA, 19 nt, Artificial Sequence
  Description of Artificial Sequence: Synthetic oligonucleotide
  Antisense strand to SEQ ID NO: 194464
aauucacguacauguuagg

SEQ ID NO: 194466 - RNA, 19 nt, Artificial Sequence
  Description of Artificial Sequence: Synthetic oligonucleotide
  Sense strand starting at position 3365 of SEQ ID NO: 2506
cccacaguuccauggcaua

SEQ ID NO: 194467 - RNA, 19 nt, Artificial Sequence
  Description of Artificial Sequence: Synthetic oligonucleotide
  Antisense strand to SEQ ID NO: 194466
uaugccauggaacuguggg

SEQ ID NO: 194468 - RNA, 19 nt, Artificial Sequence
  Description of Artificial Sequence: Synthetic oligonucleotide
  Sense strand starting at position 3474 of SEQ ID NO: 2506
cccuaucuuugauuccagu

SEQ ID NO: 194469 - RNA, 19 nt, Artificial Sequence
  Description of Artificial Sequence: Synthetic oligonucleotide
  Antisense strand to SEQ ID NO: 194468
acuggaaucaaagauaggg

SEQ ID NO: 194470 - RNA, 19 nt, Artificial Sequence
  Description of Artificial Sequence: Synthetic oligonucleotide
  Sense strand starting at position 3537 of SEQ ID NO: 2506
agagaauaggcuggucaca

SEQ ID NO: 194471 - RNA, 19 nt, Artificial Sequence
  Description of Artificial Sequence: Synthetic oligonucleotide
  Antisense strand to SEQ ID NO: 194470
ugugaccagccuauucucu

SEQ ID NO: 194472 - RNA, 19 nt, Artificial Sequence
  Description of Artificial Sequence: Synthetic oligonucleotide
  Sense strand starting at position 3539 of SEQ ID NO: 2506
agaauaggcuggucacagu

SEQ ID NO: 194473 - RNA, 19 nt, Artificial Sequence
  Description of Artificial Sequence: Synthetic oligonucleotide
  Antisense strand to SEQ ID NO: 194472
acugugaccagccuauucu

SEQ ID NO: 194474 - RNA, 19 nt, Artificial Sequence
  Description of Artificial Sequence: Synthetic oligonucleotide
  Sense strand starting at position 3878 of SEQ ID NO: 2506
aacaucgggccuuaucaga

SEQ ID NO: 194475 - RNA, 19 nt, Artificial Sequence
  Description of Artificial Sequence: Synthetic oligonucleotide
  Antisense strand to SEQ ID NO: 194474
ucugauaaggcccgauguu

SEQ ID NO: 194476 - RNA, 19 nt, Artificial Sequence
  Description of Artificial Sequence: Synthetic oligonucleotide
  Sense strand starting at position 249 of SEQ ID NO: 2507
guuugauuuauguggguua

SEQ ID NO: 194477 - RNA, 19 nt, Artificial Sequence
  Description of Artificial Sequence: Synthetic oligonucleotide
  Antisense strand to SEQ ID NO: 194476
uaacccacauaaaucaaac

SEQ ID NO: 194478 - RNA, 19 nt, Artificial Sequence
  Description of Artificial Sequence: Synthetic oligonucleotide
  Sense strand starting at position 302 of SEQ ID NO: 2507
cccuccugagaaugaauua

SEQ ID NO: 194479 - RNA, 19 nt, Artificial Sequence
  Description of Artificial Sequence: Synthetic oligonucleotide
  Antisense strand to SEQ ID NO: 194478
uaauucauucucaggaggg

SEQ ID NO: 194480 - RNA, 19 nt, Artificial Sequence
  Description of Artificial Sequence: Synthetic oligonucleotide
  Sense strand starting at position 318 of SEQ ID NO: 2507
uuaguauuacaauauggca

SEQ ID NO: 194481 - RNA, 19 nt, Artificial Sequence
  Description of Artificial Sequence: Synthetic oligonucleotide
  Antisense strand to SEQ ID NO: 194480
ugccauauuguaauacuaa

SEQ ID NO: 194482 - RNA, 19 nt, Artificial Sequence
  Description of Artificial Sequence: Synthetic oligonucleotide
  Sense strand starting at position 339 of SEQ ID NO: 2507
gguugcuaugcuuaaauca

SEQ ID NO: 194483 - RNA, 19 nt, Artificial Sequence
  Description of Artificial Sequence: Synthetic oligonucleotide
  Antisense strand to SEQ ID NO: 194482
ugauuuaagcauagcaacc

SEQ ID NO: 194484 - RNA, 19 nt, Artificial Sequence
  Description of Artificial Sequence: Synthetic oligonucleotide
  Sense strand starting at position 346 of SEQ ID NO: 2507
augcuuaaaucaguauaga

SEQ ID NO: 194485 - RNA, 19 nt, Artificial Sequence
  Description of Artificial Sequence: Synthetic oligonucleotide
  Antisense strand to SEQ ID NO: 194484
ucuauacugauuuaagcau

SEQ ID NO: 194486 - RNA, 19 nt, Artificial Sequence
  Description of Artificial Sequence: Synthetic oligonucleotide
  Sense strand starting at position 347 of SEQ ID NO: 2507
ugcuuaaaucaguauagau

SEQ ID NO: 194487 - RNA, 19 nt, Artificial Sequence
  Description of Artificial Sequence: Synthetic oligonucleotide
  Antisense strand to SEQ ID NO: 194486
aucuauacugauuuaagca

SEQ ID NO: 194488 - RNA, 19 nt, Artificial Sequence
  Description of Artificial Sequence: Synthetic oligonucleotide
  Sense strand starting at position 437 of SEQ ID NO: 2507
accaguauucguuagcuua

SEQ ID NO: 194489 - RNA, 19 nt, Artificial Sequence
  Description of Artificial Sequence: Synthetic oligonucleotide
  Antisense strand to SEQ ID NO: 194488
uaagcuaacgaauacuggu

SEQ ID NO: 194490 - RNA, 19 nt, Artificial Sequence
  Description of Artificial Sequence: Synthetic oligonucleotide
  Sense strand starting at position 453 of SEQ ID NO: 2507
uuauaaaggguuuagucua

SEQ ID NO: 194491 - RNA, 19 nt, Artificial Sequence
  Description of Artificial Sequence: Synthetic oligonucleotide
  Antisense strand to SEQ ID NO: 194490
uagacuaaacccuuuauaa

SEQ ID NO: 194492 - RNA, 19 nt, Artificial Sequence
  Description of Artificial Sequence: Synthetic oligonucleotide
  Sense strand starting at position 460 of SEQ ID NO: 2507
ggguuuagucuauaaagca

SEQ ID NO: 194493 - RNA, 19 nt, Artificial Sequence
  Description of Artificial Sequence: Synthetic oligonucleotide
  Antisense strand to SEQ ID NO: 194492
ugcuuuauagacuaaaccc

SEQ ID NO: 194494 - RNA, 19 nt, Artificial Sequence
  Description of Artificial Sequence: Synthetic oligonucleotide
  Sense strand starting at position 486 of SEQ ID NO: 2507
cccagauuucugugcagcu

SEQ ID NO: 194495 - RNA, 19 nt, Artificial Sequence
  Description of Artificial Sequence: Synthetic oligonucleotide
  Antisense strand to SEQ ID NO: 194494
agcugcacagaaaucuggg

SEQ ID NO: 194496 - RNA, 19 nt, Artificial Sequence
  Description of Artificial Sequence: Synthetic oligonucleotide
  Sense strand starting at position 502 of SEQ ID NO: 2507
gcuaguugcaaguaaagga

SEQ ID NO: 194497 - RNA, 19 nt, Artificial Sequence
  Description of Artificial Sequence: Synthetic oligonucleotide
  Antisense strand to SEQ ID NO: 194496
uccuuuacuugcaacuagc

SEQ ID NO: 194498 - RNA, 19 nt, Artificial Sequence
  Description of Artificial Sequence: Synthetic oligonucleotide
  Sense strand starting at position 515 of SEQ ID NO: 2507
aaaggaaaguguuuccuua

SEQ ID NO: 194499 - RNA, 19 nt, Artificial Sequence
  Description of Artificial Sequence: Synthetic oligonucleotide
  Antisense strand to SEQ ID NO: 194498
uaaggaaacacuuuccuuu

SEQ ID NO: 194500 - RNA, 19 nt, Artificial Sequence
  Description of Artificial Sequence: Synthetic oligonucleotide
  Sense strand starting at position 577 of SEQ ID NO: 2507
aagugaggccuacagagua

SEQ ID NO: 194501 - RNA, 19 nt, Artificial Sequence
  Description of Artificial Sequence: Synthetic oligonucleotide
  Antisense strand to SEQ ID NO: 194500
uacucuguaggccucacuu

SEQ ID NO: 194502 - RNA, 19 nt, Artificial Sequence
  Description of Artificial Sequence: Synthetic oligonucleotide
  Sense strand starting at position 594 of SEQ ID NO: 2507
uauugugaggcuuggaguu

SEQ ID NO: 194503 - RNA, 19 nt, Artificial Sequence
  Description of Artificial Sequence: Synthetic oligonucleotide
  Antisense strand to SEQ ID NO: 194502
aacuccaagccucacaaua

SEQ ID NO: 194504 - RNA, 19 nt, Artificial Sequence
  Description of Artificial Sequence: Synthetic oligonucleotide
  Sense strand starting at position 1107 of SEQ ID NO: 2507
uuuccuggauauguaaauu

SEQ ID NO: 194505 - RNA, 19 nt, Artificial Sequence
  Description of Artificial Sequence: Synthetic oligonucleotide
  Antisense strand to SEQ ID NO: 194504
aauuuacauauccaggaaa

SEQ ID NO: 194506 - RNA, 19 nt, Artificial Sequence
  Description of Artificial Sequence: Synthetic oligonucleotide
  Sense strand starting at position 1256 of SEQ ID NO: 2507
ggucauccaucaguucuga

SEQ ID NO: 194507 - RNA, 19 nt, Artificial Sequence
  Description of Artificial Sequence: Synthetic oligonucleotide
  Antisense strand to SEQ ID NO: 194506
ucagaacugauggaugacc

SEQ ID NO: 194508 - RNA, 19 nt, Artificial Sequence
  Description of Artificial Sequence: Synthetic oligonucleotide
  Sense strand starting at position 1346 of SEQ ID NO: 2507
gguauugggaguuagccau

SEQ ID NO: 194509 - RNA, 19 nt, Artificial Sequence
  Description of Artificial Sequence: Synthetic oligonucleotide
  Antisense strand to SEQ ID NO: 194508
auggcuaacucccaauacc

SEQ ID NO: 194510 - RNA, 19 nt, Artificial Sequence
  Description of Artificial Sequence: Synthetic oligonucleotide
  Sense strand starting at position 1352 of SEQ ID NO: 2507
gggaguuagccaugaccca

SEQ ID NO: 194511 - RNA, 19 nt, Artificial Sequence
  Description of Artificial Sequence: Synthetic oligonucleotide
  Antisense strand to SEQ ID NO: 194510
ugggucauggcuaacuccc

SEQ ID NO: 194512 - RNA, 19 nt, Artificial Sequence
  Description of Artificial Sequence: Synthetic oligonucleotide
  Sense strand starting at position 1400 of SEQ ID NO: 2507
cugaaagacucagcuaaac

SEQ ID NO: 194513 - RNA, 19 nt, Artificial Sequence
  Description of Artificial Sequence: Synthetic oligonucleotide
  Antisense strand to SEQ ID NO: 194512
guuuagcugagucuuucag

SEQ ID NO: 194514 - RNA, 19 nt, Artificial Sequence
  Description of Artificial Sequence: Synthetic oligonucleotide
  Sense strand starting at position 2290 of SEQ ID NO: 2507
cuacuccugcagugacauu

SEQ ID NO: 194515 - RNA, 19 nt, Artificial Sequence
  Description of Artificial Sequence: Synthetic oligonucleotide
  Antisense strand to SEQ ID NO: 194514
aaugucacugcaggaguag

SEQ ID NO: 194516 - RNA, 19 nt, Artificial Sequence
  Description of Artificial Sequence: Synthetic oligonucleotide
  Sense strand starting at position 2476 of SEQ ID NO: 2507
guccucguacaguagauaa

SEQ ID NO: 194517 - RNA, 19 nt, Artificial Sequence
  Description of Artificial Sequence: Synthetic oligonucleotide
  Antisense strand to SEQ ID NO: 194516
uuaucuacuguacgaggac

SEQ ID NO: 194518 - RNA, 19 nt, Artificial Sequence
  Description of Artificial Sequence: Synthetic oligonucleotide
  Sense strand starting at position 2478 of SEQ ID NO: 2507
ccucguacaguagauaauu

SEQ ID NO: 194519 - RNA, 19 nt, Artificial Sequence
  Description of Artificial Sequence: Synthetic oligonucleotide
  Antisense strand to SEQ ID NO: 194518
aauuaucuacuguacgagg

SEQ ID NO: 194520 - RNA, 19 nt, Artificial Sequence
  Description of Artificial Sequence: Synthetic oligonucleotide
  Sense strand starting at position 2695 of SEQ ID NO: 2507
guaucaauacaccguaaag

SEQ ID NO: 194521 - RNA, 19 nt, Artificial Sequence
  Description of Artificial Sequence: Synthetic oligonucleotide
  Antisense strand to SEQ ID NO: 194520
cuuuacgguguauugauac

SEQ ID NO: 194522 - RNA, 19 nt, Artificial Sequence
  Description of Artificial Sequence: Synthetic oligonucleotide
  Sense strand starting at position 2728 of SEQ ID NO: 2507
acaagucaucagggcuuaa

SEQ ID NO: 194523 - RNA, 19 nt, Artificial Sequence
  Description of Artificial Sequence: Synthetic oligonucleotide
  Antisense strand to SEQ ID NO: 194522
uuaagcccugaugacuugu

SEQ ID NO: 194524 - RNA, 19 nt, Artificial Sequence
  Description of Artificial Sequence: Synthetic oligonucleotide
  Sense strand starting at position 2852 of SEQ ID NO: 2507
ggaggugaaggaugucuua

SEQ ID NO: 194525 - RNA, 19 nt, Artificial Sequence
  Description of Artificial Sequence: Synthetic oligonucleotide
  Antisense strand to SEQ ID NO: 194524
uaagacauccuucaccucc

SEQ ID NO: 194526 - RNA, 19 nt, Artificial Sequence
  Description of Artificial Sequence: Synthetic oligonucleotide
  Sense strand starting at position 2897 of SEQ ID NO: 2507
ggagcauguggguggucaa

SEQ ID NO: 194527 - RNA, 19 nt, Artificial Sequence
  Description of Artificial Sequence: Synthetic oligonucleotide
  Antisense strand to SEQ ID NO: 194526
uugaccacccacaugcucc

SEQ ID NO: 194528 - RNA, 19 nt, Artificial Sequence
  Description of Artificial Sequence: Synthetic oligonucleotide
  Sense strand starting at position 2900 of SEQ ID NO: 2507
gcauguggguggucaagga

SEQ ID NO: 194529 - RNA, 19 nt, Artificial Sequence
  Description of Artificial Sequence: Synthetic oligonucleotide
  Antisense strand to SEQ ID NO: 194528
uccuugaccacccacaugc

SEQ ID NO: 194530 - RNA, 19 nt, Artificial Sequence
  Description of Artificial Sequence: Synthetic oligonucleotide
  Sense strand starting at position 2921 of SEQ ID NO: 2507
acauaauugcugcaguuua

SEQ ID NO: 194531 - RNA, 19 nt, Artificial Sequence
  Description of Artificial Sequence: Synthetic oligonucleotide
  Antisense strand to SEQ ID NO: 194530
uaaacugcagcaauuaugu

SEQ ID NO: 194532 - RNA, 19 nt, Artificial Sequence
  Description of Artificial Sequence: Synthetic oligonucleotide
  Sense strand starting at position 3163 of SEQ ID NO: 2507
auugauaggaccugguagu

SEQ ID NO: 194533 - RNA, 19 nt, Artificial Sequence
  Description of Artificial Sequence: Synthetic oligonucleotide
  Antisense strand to SEQ ID NO: 194532
acuaccagguccuaucaau

SEQ ID NO: 194534 - RNA, 19 nt, Artificial Sequence
  Description of Artificial Sequence: Synthetic oligonucleotide
  Sense strand starting at position 3164 of SEQ ID NO: 2507
uugauaggaccugguagua

SEQ ID NO: 194535 - RNA, 19 nt, Artificial Sequence
  Description of Artificial Sequence: Synthetic oligonucleotide
  Antisense strand to SEQ ID NO: 194534
uacuaccagguccuaucaa

SEQ ID NO: 194536 - RNA, 19 nt, Artificial Sequence
  Description of Artificial Sequence: Synthetic oligonucleotide
  Sense strand starting at position 3222 of SEQ ID NO: 2507
ccagguuucugacugcaca

SEQ ID NO: 194537 - RNA, 19 nt, Artificial Sequence
  Description of Artificial Sequence: Synthetic oligonucleotide
  Antisense strand to SEQ ID NO: 194536
ugugcagucagaaaccugg

SEQ ID NO: 194538 - RNA, 19 nt, Artificial Sequence
  Description of Artificial Sequence: Synthetic oligonucleotide
  Sense strand starting at position 3225 of SEQ ID NO: 2507
gguuucugacugcacagau

SEQ ID NO: 194539 - RNA, 19 nt, Artificial Sequence
  Description of Artificial Sequence: Synthetic oligonucleotide
  Antisense strand to SEQ ID NO: 194538
aucugugcagucagaaacc

SEQ ID NO: 194540 - RNA, 19 nt, Artificial Sequence
  Description of Artificial Sequence: Synthetic oligonucleotide
  Sense strand starting at position 3293 of SEQ ID NO: 2507
agaggaagaugaugcauuu

SEQ ID NO: 194541 - RNA, 19 nt, Artificial Sequence
  Description of Artificial Sequence: Synthetic oligonucleotide
  Antisense strand to SEQ ID NO: 194540
aaaugcaucaucuuccucu

SEQ ID NO: 194542 - RNA, 19 nt, Artificial Sequence
  Description of Artificial Sequence: Synthetic oligonucleotide
  Sense strand starting at position 3366 of SEQ ID NO: 2507
uagguucuguauuugucua

SEQ ID NO: 194543 - RNA, 19 nt, Artificial Sequence
  Description of Artificial Sequence: Synthetic oligonucleotide
  Antisense strand to SEQ ID NO: 194542
uagacaaauacagaaccua

SEQ ID NO: 194544 - RNA, 19 nt, Artificial Sequence
  Description of Artificial Sequence: Synthetic oligonucleotide
  Sense strand starting at position 3558 of SEQ ID NO: 2507
cccagagcacucuggaauu

SEQ ID NO: 194545 - RNA, 19 nt, Artificial Sequence
  Description of Artificial Sequence: Synthetic oligonucleotide
  Antisense strand to SEQ ID NO: 194544
aauuccagagugcucuggg

SEQ ID NO: 194546 - RNA, 19 nt, Artificial Sequence
  Description of Artificial Sequence: Synthetic oligonucleotide
  Sense strand starting at position 3848 of SEQ ID NO: 2507
gggcuuagagauuggaggu

SEQ ID NO: 194547 - RNA, 19 nt, Artificial Sequence
  Description of Artificial Sequence: Synthetic oligonucleotide
  Antisense strand to SEQ ID NO: 194546
accuccaaucucuaagccc

SEQ ID NO: 194548 - RNA, 19 nt, Artificial Sequence
  Description of Artificial Sequence: Synthetic oligonucleotide
  Sense strand starting at position 3864 of SEQ ID NO: 2507
gguggagaauuggcaauca

SEQ ID NO: 194549 - RNA, 19 nt, Artificial Sequence
  Description of Artificial Sequence: Synthetic oligonucleotide
  Antisense strand to SEQ ID NO: 194548
ugauugccaauucuccacc

SEQ ID NO: 194550 - RNA, 19 nt, Artificial Sequence
  Description of Artificial Sequence: Synthetic oligonucleotide
  Sense strand starting at position 3883 of SEQ ID NO: 2507
ucagcauuuagguggugua

SEQ ID NO: 194551 - RNA, 19 nt, Artificial Sequence
  Description of Artificial Sequence: Synthetic oligonucleotide
  Antisense strand to SEQ ID NO: 194550
uacaccaccuaaaugcuga

SEQ ID NO: 194552 - RNA, 19 nt, Artificial Sequence
  Description of Artificial Sequence: Synthetic oligonucleotide
  Sense strand starting at position 3884 of SEQ ID NO: 2507
cagcauuuaggugguguau

SEQ ID NO: 194553 - RNA, 19 nt, Artificial Sequence
  Description of Artificial Sequence: Synthetic oligonucleotide
  Antisense strand to SEQ ID NO: 194552
auacaccaccuaaaugcug

SEQ ID NO: 194554 - RNA, 19 nt, Artificial Sequence
  Description of Artificial Sequence: Synthetic oligonucleotide
  Sense strand starting at position 3908 of SEQ ID NO: 2507
ggcaguuugcuguaagaaa

SEQ ID NO: 194555 - RNA, 19 nt, Artificial Sequence
  Description of Artificial Sequence: Synthetic oligonucleotide
  Antisense strand to SEQ ID NO: 194554
uuucuuacagcaaacugcc

SEQ ID NO: 194556 - RNA, 19 nt, Artificial Sequence
  Description of Artificial Sequence: Synthetic oligonucleotide
  Sense strand starting at position 24 of SEQ ID NO: 2508
ugguucgggucauucucaa

SEQ ID NO: 194557 - RNA, 19 nt, Artificial Sequence
  Description of Artificial Sequence: Synthetic oligonucleotide
  Antisense strand to SEQ ID NO: 194556
uugagaaugacccgaacca

SEQ ID NO: 194558 - RNA, 19 nt, Artificial Sequence
  Description of Artificial Sequence: Synthetic oligonucleotide
  Sense strand starting at position 43 of SEQ ID NO: 2508
auacaaauguugucuacaa

SEQ ID NO: 194559 - RNA, 19 nt, Artificial Sequence
  Description of Artificial Sequence: Synthetic oligonucleotide
  Antisense strand to SEQ ID NO: 194558
uuguagacaacauuuguau

SEQ ID NO: 194560 - RNA, 19 nt, Artificial Sequence
  Description of Artificial Sequence: Synthetic oligonucleotide
  Sense strand starting at position 50 of SEQ ID NO: 2508
uguugucuacaagauaaca

SEQ ID NO: 194561 - RNA, 19 nt, Artificial Sequence
  Description of Artificial Sequence: Synthetic oligonucleotide
  Antisense strand to SEQ ID NO: 194560
uguuaucuuguagacaaca

SEQ ID NO: 194562 - RNA, 19 nt, Artificial Sequence
  Description of Artificial Sequence: Synthetic oligonucleotide
  Sense strand starting at position 61 of SEQ ID NO: 2508
agauaacaguaugucuaau

SEQ ID NO: 194563 - RNA, 19 nt, Artificial Sequence
  Description of Artificial Sequence: Synthetic oligonucleotide
  Antisense strand to SEQ ID NO: 194562
auuagacauacuguuaucu

SEQ ID NO: 194564 - RNA, 19 nt, Artificial Sequence
  Description of Artificial Sequence: Synthetic oligonucleotide
  Sense strand starting at position 63 of SEQ ID NO: 2508
auaacaguaugucuaauca

SEQ ID NO: 194565 - RNA, 19 nt, Artificial Sequence
  Description of Artificial Sequence: Synthetic oligonucleotide
  Antisense strand to SEQ ID NO: 194564
ugauuagacauacuguuau

SEQ ID NO: 194566 - RNA, 19 nt, Artificial Sequence
  Description of Artificial Sequence: Synthetic oligonucleotide
  Sense strand starting at position 88 of SEQ ID NO: 2508
aucucacuuccgcgaucaa

SEQ ID NO: 194567 - RNA, 19 nt, Artificial Sequence
  Description of Artificial Sequence: Synthetic oligonucleotide
  Antisense strand to SEQ ID NO: 194566
uugaucgcggaagugagau

SEQ ID NO: 194568 - RNA, 19 nt, Artificial Sequence
  Description of Artificial Sequence: Synthetic oligonucleotide
  Sense strand starting at position 469 of SEQ ID NO: 2508
gaacgagguugugucucaa

SEQ ID NO: 194569 - RNA, 19 nt, Artificial Sequence
  Description of Artificial Sequence: Synthetic oligonucleotide
  Antisense strand to SEQ ID NO: 194568
uugagacacaaccucguuc

SEQ ID NO: 194570 - RNA, 19 nt, Artificial Sequence
  Description of Artificial Sequence: Synthetic oligonucleotide
  Sense strand starting at position 1260 of SEQ ID NO: 2508
gcaggauuccgucaaacag

SEQ ID NO: 194571 - RNA, 19 nt, Artificial Sequence
  Description of Artificial Sequence: Synthetic oligonucleotide
  Antisense strand to SEQ ID NO: 194570
cuguuugacggaauccugc

SEQ ID NO: 194572 - RNA, 19 nt, Artificial Sequence
  Description of Artificial Sequence: Synthetic oligonucleotide
  Sense strand starting at position 1431 of SEQ ID NO: 2508
aguuucuccagccggagaa

SEQ ID NO: 194573 - RNA, 19 nt, Artificial Sequence
  Description of Artificial Sequence: Synthetic oligonucleotide
  Antisense strand to SEQ ID NO: 194572
uucuccggcuggagaaacu

SEQ ID NO: 194574 - RNA, 19 nt, Artificial Sequence
  Description of Artificial Sequence: Synthetic oligonucleotide
  Sense strand starting at position 1432 of SEQ ID NO: 2508
guuucuccagccggagaau

SEQ ID NO: 194575 - RNA, 19 nt, Artificial Sequence
  Description of Artificial Sequence: Synthetic oligonucleotide
  Antisense strand to SEQ ID NO: 194574
auucuccggcuggagaaac

SEQ ID NO: 194576 - RNA, 19 nt, Artificial Sequence
  Description of Artificial Sequence: Synthetic oligonucleotide
  Sense strand starting at position 1433 of SEQ ID NO: 2508
uuucuccagccggagaauu

SEQ ID NO: 194577 - RNA, 19 nt, Artificial Sequence
  Description of Artificial Sequence: Synthetic oligonucleotide
  Antisense strand to SEQ ID NO: 194576
aauucuccggcuggagaaa

SEQ ID NO: 194578 - RNA, 19 nt, Artificial Sequence
  Description of Artificial Sequence: Synthetic oligonucleotide
  Sense strand starting at position 2248 of SEQ ID NO: 2508
aggucaucggccuagggaa

SEQ ID NO: 194579 - RNA, 19 nt, Artificial Sequence
  Description of Artificial Sequence: Synthetic oligonucleotide
  Antisense strand to SEQ ID NO: 194578
uucccuaggccgaugaccu

SEQ ID NO: 194580 - RNA, 19 nt, Artificial Sequence
  Description of Artificial Sequence: Synthetic oligonucleotide
  Sense strand starting at position 2261 of SEQ ID NO: 2508
agggaacuucucgaggcuu

SEQ ID NO: 194581 - RNA, 19 nt, Artificial Sequence
  Description of Artificial Sequence: Synthetic oligonucleotide
  Antisense strand to SEQ ID NO: 194580
aagccucgagaaguucccu

SEQ ID NO: 194582 - RNA, 19 nt, Artificial Sequence
  Description of Artificial Sequence: Synthetic oligonucleotide
  Sense strand starting at position 2332 of SEQ ID NO: 2508
gggacccuccucugugaaa

SEQ ID NO: 194583 - RNA, 19 nt, Artificial Sequence
  Description of Artificial Sequence: Synthetic oligonucleotide
  Antisense strand to SEQ ID NO: 194582
uuucacagaggaggguccc

SEQ ID NO: 194584 - RNA, 19 nt, Artificial Sequence
  Description of Artificial Sequence: Synthetic oligonucleotide
  Sense strand starting at position 2334 of SEQ ID NO: 2508
gacccuccucugugaaaga

SEQ ID NO: 194585 - RNA, 19 nt, Artificial Sequence
  Description of Artificial Sequence: Synthetic oligonucleotide
  Antisense strand to SEQ ID NO: 194584
ucuuucacagaggaggguc

SEQ ID NO: 194586 - RNA, 19 nt, Artificial Sequence
  Description of Artificial Sequence: Synthetic oligonucleotide
  Sense strand starting at position 2748 of SEQ ID NO: 2508
aaucaacguuuauugugaa

SEQ ID NO: 194587 - RNA, 19 nt, Artificial Sequence
  Description of Artificial Sequence: Synthetic oligonucleotide
  Antisense strand to SEQ ID NO: 194586
uucacaauaaacguugauu

SEQ ID NO: 194588 - RNA, 19 nt, Artificial Sequence
  Description of Artificial Sequence: Synthetic oligonucleotide
  Sense strand starting at position 2815 of SEQ ID NO: 2508
uuuccucuugcagaguuau

SEQ ID NO: 194589 - RNA, 19 nt, Artificial Sequence
  Description of Artificial Sequence: Synthetic oligonucleotide
  Antisense strand to SEQ ID NO: 194588
auaacucugcaagaggaaa

SEQ ID NO: 194590 - RNA, 19 nt, Artificial Sequence
  Description of Artificial Sequence: Synthetic oligonucleotide
  Sense strand starting at position 2852 of SEQ ID NO: 2508
cagauacugugucuuguuu

SEQ ID NO: 194591 - RNA, 19 nt, Artificial Sequence
  Description of Artificial Sequence: Synthetic oligonucleotide
  Antisense strand to SEQ ID NO: 194590
aaacaagacacaguaucug

SEQ ID NO: 194592 - RNA, 19 nt, Artificial Sequence
  Description of Artificial Sequence: Synthetic oligonucleotide
  Sense strand starting at position 2918 of SEQ ID NO: 2508
uccugaccauugcugagau

SEQ ID NO: 194593 - RNA, 19 nt, Artificial Sequence
  Description of Artificial Sequence: Synthetic oligonucleotide
  Antisense strand to SEQ ID NO: 194592
aucucagcaauggucagga

SEQ ID NO: 194594 - RNA, 19 nt, Artificial Sequence
  Description of Artificial Sequence: Synthetic oligonucleotide
  Sense strand starting at position 2920 of SEQ ID NO: 2508
cugaccauugcugagauau

SEQ ID NO: 194595 - RNA, 19 nt, Artificial Sequence
  Description of Artificial Sequence: Synthetic oligonucleotide
  Antisense strand to SEQ ID NO: 194594
auaucucagcaauggucag

SEQ ID NO: 194596 - RNA, 19 nt, Artificial Sequence
  Description of Artificial Sequence: Synthetic oligonucleotide
  Sense strand starting at position 2997 of SEQ ID NO: 2508
cuuagacuuguguaguuag

SEQ ID NO: 194597 - RNA, 19 nt, Artificial Sequence
  Description of Artificial Sequence: Synthetic oligonucleotide
  Antisense strand to SEQ ID NO: 194596
cuaacuacacaagucuaag

SEQ ID NO: 194598 - RNA, 19 nt, Artificial Sequence
  Description of Artificial Sequence: Synthetic oligonucleotide
  Sense strand starting at position 3000 of SEQ ID NO: 2508
agacuuguguaguuagaac

SEQ ID NO: 194599 - RNA, 19 nt, Artificial Sequence
  Description of Artificial Sequence: Synthetic oligonucleotide
  Antisense strand to SEQ ID NO: 194598
guucuaacuacacaagucu

SEQ ID NO: 194600 - RNA, 19 nt, Artificial Sequence
  Description of Artificial Sequence: Synthetic oligonucleotide
  Sense strand starting at position 3042 of SEQ ID NO: 2508
ucuuaaucuggugaucucu

SEQ ID NO: 194601 - RNA, 19 nt, Artificial Sequence
  Description of Artificial Sequence: Synthetic oligonucleotide
  Antisense strand to SEQ ID NO: 194600
agagaucaccagauuaaga

SEQ ID NO: 194602 - RNA, 19 nt, Artificial Sequence
  Description of Artificial Sequence: Synthetic oligonucleotide
  Sense strand starting at position 3063 of SEQ ID NO: 2508
gcccuccuacagugaauuu

SEQ ID NO: 194603 - RNA, 19 nt, Artificial Sequence
  Description of Artificial Sequence: Synthetic oligonucleotide
  Antisense strand to SEQ ID NO: 194602
aaauucacuguaggagggc

SEQ ID NO: 194604 - RNA, 19 nt, Artificial Sequence
  Description of Artificial Sequence: Synthetic oligonucleotide
  Sense strand starting at position 3097 of SEQ ID NO: 2508
ugaggaaacuuauacuuuc

SEQ ID NO: 194605 - RNA, 19 nt, Artificial Sequence
  Description of Artificial Sequence: Synthetic oligonucleotide
  Antisense strand to SEQ ID NO: 194604
gaaaguauaaguuuccuca

SEQ ID NO: 194606 - RNA, 19 nt, Artificial Sequence
  Description of Artificial Sequence: Synthetic oligonucleotide
  Sense strand starting at position 3326 of SEQ ID NO: 2508
gaagaauggcgucauccug

SEQ ID NO: 194607 - RNA, 19 nt, Artificial Sequence
  Description of Artificial Sequence: Synthetic oligonucleotide
  Antisense strand to SEQ ID NO: 194606
caggaugacgccauucuuc

SEQ ID NO: 194608 - RNA, 19 nt, Artificial Sequence
  Description of Artificial Sequence: Synthetic oligonucleotide
  Sense strand starting at position 3332 of SEQ ID NO: 2508
uggcgucauccugggagaa

SEQ ID NO: 194609 - RNA, 19 nt, Artificial Sequence
  Description of Artificial Sequence: Synthetic oligonucleotide
  Antisense strand to SEQ ID NO: 194608
uucucccaggaugacgcca

SEQ ID NO: 194610 - RNA, 19 nt, Artificial Sequence
  Description of Artificial Sequence: Synthetic oligonucleotide
  Sense strand starting at position 3333 of SEQ ID NO: 2508
ggcgucauccugggagaag

SEQ ID NO: 194611 - RNA, 19 nt, Artificial Sequence
  Description of Artificial Sequence: Synthetic oligonucleotide
  Antisense strand to SEQ ID NO: 194610
cuucucccaggaugacgcc

SEQ ID NO: 194612 - RNA, 19 nt, Artificial Sequence
  Description of Artificial Sequence: Synthetic oligonucleotide
  Sense strand starting at position 3462 of SEQ ID NO: 2508
uggagcaaacccuaauguu

SEQ ID NO: 194613 - RNA, 19 nt, Artificial Sequence
  Description of Artificial Sequence: Synthetic oligonucleotide
  Antisense strand to SEQ ID NO: 194612
aacauuaggguuugcucca

SEQ ID NO: 194614 - RNA, 19 nt, Artificial Sequence
  Description of Artificial Sequence: Synthetic oligonucleotide
  Sense strand starting at position 3501 of SEQ ID NO: 2508
acauuagcagaauguauga

SEQ ID NO: 194615 - RNA, 19 nt, Artificial Sequence
  Description of Artificial Sequence: Synthetic oligonucleotide
  Antisense strand to SEQ ID NO: 194614
ucauacauucugcuaaugu

SEQ ID NO: 194616 - RNA, 19 nt, Artificial Sequence
  Description of Artificial Sequence: Synthetic oligonucleotide
  Sense strand starting at position 3631 of SEQ ID NO: 2508
gugugaggagcuuguuaaa

SEQ ID NO: 194617 - RNA, 19 nt, Artificial Sequence
  Description of Artificial Sequence: Synthetic oligonucleotide
  Antisense strand to SEQ ID NO: 194616
uuuaacaagcuccucacac

SEQ ID NO: 194618 - RNA, 19 nt, Artificial Sequence
  Description of Artificial Sequence: Synthetic oligonucleotide
  Sense strand starting at position 3685 of SEQ ID NO: 2508
uuaguuugagagcaugagu

SEQ ID NO: 194619 - RNA, 19 nt, Artificial Sequence
  Description of Artificial Sequence: Synthetic oligonucleotide
  Antisense strand to SEQ ID NO: 194618
acucaugcucucaaacuaa

SEQ ID NO: 194620 - RNA, 19 nt, Artificial Sequence
  Description of Artificial Sequence: Synthetic oligonucleotide
  Sense strand starting at position 3688 of SEQ ID NO: 2508
guuugagagcaugagugau

SEQ ID NO: 194621 - RNA, 19 nt, Artificial Sequence
  Description of Artificial Sequence: Synthetic oligonucleotide
  Antisense strand to SEQ ID NO: 194620
aucacucaugcucucaaac

SEQ ID NO: 194622 - RNA, 19 nt, Artificial Sequence
  Description of Artificial Sequence: Synthetic oligonucleotide
  Sense strand starting at position 3853 of SEQ ID NO: 2508
cucaucaggugaguuaaau

SEQ ID NO: 194623 - RNA, 19 nt, Artificial Sequence
  Description of Artificial Sequence: Synthetic oligonucleotide
  Antisense strand to SEQ ID NO: 194622
auuuaacucaccugaugag

SEQ ID NO: 194624 - RNA, 19 nt, Artificial Sequence
  Description of Artificial Sequence: Synthetic oligonucleotide
  Sense strand starting at position 3859 of SEQ ID NO: 2508
aggugaguuaaaugguaga

SEQ ID NO: 194625 - RNA, 19 nt, Artificial Sequence
  Description of Artificial Sequence: Synthetic oligonucleotide
  Antisense strand to SEQ ID NO: 194624
ucuaccauuuaacucaccu

SEQ ID NO: 194626 - RNA, 19 nt, Artificial Sequence
  Description of Artificial Sequence: Synthetic oligonucleotide
  Sense strand starting at position 3921 of SEQ ID NO: 2508
ucaacuauggcuuagcaau

SEQ ID NO: 194627 - RNA, 19 nt, Artificial Sequence
  Description of Artificial Sequence: Synthetic oligonucleotide
  Antisense strand to SEQ ID NO: 194626
auugcuaagccauaguuga

SEQ ID NO: 194628 - RNA, 19 nt, Artificial Sequence
  Description of Artificial Sequence: Synthetic oligonucleotide
  Sense strand starting at position 3963 of SEQ ID NO: 2508
cugggauguuucgucauuc

SEQ ID NO: 194629 - RNA, 19 nt, Artificial Sequence
  Description of Artificial Sequence: Synthetic oligonucleotide
  Antisense strand to SEQ ID NO: 194628
gaaugacgaaacaucccag

SEQ ID NO: 194630 - RNA, 19 nt, Artificial Sequence
  Description of Artificial Sequence: Synthetic oligonucleotide
  Sense strand starting at position 3964 of SEQ ID NO: 2508
ugggauguuucgucauucu

SEQ ID NO: 194631 - RNA, 19 nt, Artificial Sequence
  Description of Artificial Sequence: Synthetic oligonucleotide
  Antisense strand to SEQ ID NO: 194630
agaaugacgaaacauccca

SEQ ID NO: 194632 - RNA, 19 nt, Artificial Sequence
  Description of Artificial Sequence: Synthetic oligonucleotide
  Sense strand starting at position 3967 of SEQ ID NO: 2508
gauguuucgucauucuaga

SEQ ID NO: 194633 - RNA, 19 nt, Artificial Sequence
  Description of Artificial Sequence: Synthetic oligonucleotide
  Antisense strand to SEQ ID NO: 194632
ucuagaaugacgaaacauc

SEQ ID NO: 194634 - RNA, 19 nt, Artificial Sequence
  Description of Artificial Sequence: Synthetic oligonucleotide
  Sense strand starting at position 3972 of SEQ ID NO: 2508
uucgucauucuagaaauua

SEQ ID NO: 194635 - RNA, 19 nt, Artificial Sequence
  Description of Artificial Sequence: Synthetic oligonucleotide
  Antisense strand to SEQ ID NO: 194634
uaauuucuagaaugacgaa

SEQ ID NO: 194636 - RNA, 19 nt, Artificial Sequence
  Description of Artificial Sequence: Synthetic oligonucleotide
  Sense strand starting at position 200 of SEQ ID NO: 2509
aaugauaugucugcagaag

SEQ ID NO: 194637 - RNA, 19 nt, Artificial Sequence
  Description of Artificial Sequence: Synthetic oligonucleotide
  Antisense strand to SEQ ID NO: 194636
cuucugcagacauaucauu

SEQ ID NO: 194638 - RNA, 19 nt, Artificial Sequence
  Description of Artificial Sequence: Synthetic oligonucleotide
  Sense strand starting at position 201 of SEQ ID NO: 2509
augauaugucugcagaagu

SEQ ID NO: 194639 - RNA, 19 nt, Artificial Sequence
  Description of Artificial Sequence: Synthetic oligonucleotide
  Antisense strand to SEQ ID NO: 194638
acuucugcagacauaucau

SEQ ID NO: 194640 - RNA, 19 nt, Artificial Sequence
  Description of Artificial Sequence: Synthetic oligonucleotide
  Sense strand starting at position 293 of SEQ ID NO: 2509
ucucuaaauuggucugaca

SEQ ID NO: 194641 - RNA, 19 nt, Artificial Sequence
  Description of Artificial Sequence: Synthetic oligonucleotide
  Antisense strand to SEQ ID NO: 194640
ugucagaccaauuuagaga

SEQ ID NO: 194642 - RNA, 19 nt, Artificial Sequence
  Description of Artificial Sequence: Synthetic oligonucleotide
  Sense strand starting at position 295 of SEQ ID NO: 2509
ucuaaauuggucugacaaa

SEQ ID NO: 194643 - RNA, 19 nt, Artificial Sequence
  Description of Artificial Sequence: Synthetic oligonucleotide
  Antisense strand to SEQ ID NO: 194642
uuugucagaccaauuuaga

SEQ ID NO: 194644 - RNA, 19 nt, Artificial Sequence
  Description of Artificial Sequence: Synthetic oligonucleotide
  Sense strand starting at position 728 of SEQ ID NO: 2509
uuaugcagccacugagaau

SEQ ID NO: 194645 - RNA, 19 nt, Artificial Sequence
  Description of Artificial Sequence: Synthetic oligonucleotide
  Antisense strand to SEQ ID NO: 194644
auucucaguggcugcauaa

SEQ ID NO: 194646 - RNA, 19 nt, Artificial Sequence
  Description of Artificial Sequence: Synthetic oligonucleotide
  Sense strand starting at position 734 of SEQ ID NO: 2509
agccacugagaauguuuau

SEQ ID NO: 194647 - RNA, 19 nt, Artificial Sequence
  Description of Artificial Sequence: Synthetic oligonucleotide
  Antisense strand to SEQ ID NO: 194646
auaaacauucucaguggcu

SEQ ID NO: 194648 - RNA, 19 nt, Artificial Sequence
  Description of Artificial Sequence: Synthetic oligonucleotide
  Sense strand starting at position 737 of SEQ ID NO: 2509
cacugagaauguuuaugaa

SEQ ID NO: 194649 - RNA, 19 nt, Artificial Sequence
  Description of Artificial Sequence: Synthetic oligonucleotide
  Antisense strand to SEQ ID NO: 194648
uucauaaacauucucagug

SEQ ID NO: 194650 - RNA, 19 nt, Artificial Sequence
  Description of Artificial Sequence: Synthetic oligonucleotide
  Sense strand starting at position 770 of SEQ ID NO: 2509
aagagauuauguuugccuu

SEQ ID NO: 194651 - RNA, 19 nt, Artificial Sequence
  Description of Artificial Sequence: Synthetic oligonucleotide
  Antisense strand to SEQ ID NO: 194650
aaggcaaacauaaucucuu

SEQ ID NO: 194652 - RNA, 19 nt, Artificial Sequence
  Description of Artificial Sequence: Synthetic oligonucleotide
  Sense strand starting at position 771 of SEQ ID NO: 2509
agagauuauguuugccuua

SEQ ID NO: 194653 - RNA, 19 nt, Artificial Sequence
  Description of Artificial Sequence: Synthetic oligonucleotide
  Antisense strand to SEQ ID NO: 194652
uaaggcaaacauaaucucu

SEQ ID NO: 194654 - RNA, 19 nt, Artificial Sequence
  Description of Artificial Sequence: Synthetic oligonucleotide
  Sense strand starting at position 772 of SEQ ID NO: 2509
gagauuauguuugccuuaa

SEQ ID NO: 194655 - RNA, 19 nt, Artificial Sequence
  Description of Artificial Sequence: Synthetic oligonucleotide
  Antisense strand to SEQ ID NO: 194654
uuaaggcaaacauaaucuc

SEQ ID NO: 194656 - RNA, 19 nt, Artificial Sequence
  Description of Artificial Sequence: Synthetic oligonucleotide
  Sense strand starting at position 773 of SEQ ID NO: 2509
agauuauguuugccuuaac

SEQ ID NO: 194657 - RNA, 19 nt, Artificial Sequence
  Description of Artificial Sequence: Synthetic oligonucleotide
  Antisense strand to SEQ ID NO: 194656
guuaaggcaaacauaaucu

SEQ ID NO: 194658 - RNA, 19 nt, Artificial Sequence
  Description of Artificial Sequence: Synthetic oligonucleotide
  Sense strand starting at position 1231 of SEQ ID NO: 2509
aagcuugggaagugguaaa

SEQ ID NO: 194659 - RNA, 19 nt, Artificial Sequence
  Description of Artificial Sequence: Synthetic oligonucleotide
  Antisense strand to SEQ ID NO: 194658
uuuaccacuucccaagcuu

SEQ ID NO: 194660 - RNA, 19 nt, Artificial Sequence
  Description of Artificial Sequence: Synthetic oligonucleotide
  Sense strand starting at position 1342 of SEQ ID NO: 2509
uuuacaagcccaugaagua

SEQ ID NO: 194661 - RNA, 19 nt, Artificial Sequence
  Description of Artificial Sequence: Synthetic oligonucleotide
  Antisense strand to SEQ ID NO: 194660
uacuucaugggcuuguaaa

SEQ ID NO: 194662 - RNA, 19 nt, Artificial Sequence
  Description of Artificial Sequence: Synthetic oligonucleotide
  Sense strand starting at position 1437 of SEQ ID NO: 2509
guaccaucccaguaaacau

SEQ ID NO: 194663 - RNA, 19 nt, Artificial Sequence
  Description of Artificial Sequence: Synthetic oligonucleotide
  Antisense strand to SEQ ID NO: 194662
auguuuacugggaugguac

SEQ ID NO: 194664 - RNA, 19 nt, Artificial Sequence
  Description of Artificial Sequence: Synthetic oligonucleotide
  Sense strand starting at position 1583 of SEQ ID NO: 2509
ucauuauagggcugauuau

SEQ ID NO: 194665 - RNA, 19 nt, Artificial Sequence
  Description of Artificial Sequence: Synthetic oligonucleotide
  Antisense strand to SEQ ID NO: 194664
auaaucagcccuauaauga

SEQ ID NO: 194666 - RNA, 19 nt, Artificial Sequence
  Description of Artificial Sequence: Synthetic oligonucleotide
  Sense strand starting at position 1726 of SEQ ID NO: 2509
uuccaaaucguacauguga

SEQ ID NO: 194667 - RNA, 19 nt, Artificial Sequence
  Description of Artificial Sequence: Synthetic oligonucleotide
  Antisense strand to SEQ ID NO: 194666
ucacauguacgauuuggaa

SEQ ID NO: 194668 - RNA, 19 nt, Artificial Sequence
  Description of Artificial Sequence: Synthetic oligonucleotide
  Sense strand starting at position 1735 of SEQ ID NO: 2509
guacaugugaguuaacuua

SEQ ID NO: 194669 - RNA, 19 nt, Artificial Sequence
  Description of Artificial Sequence: Synthetic oligonucleotide
  Antisense strand to SEQ ID NO: 194668
uaaguuaacucacauguac

SEQ ID NO: 194670 - RNA, 19 nt, Artificial Sequence
  Description of Artificial Sequence: Synthetic oligonucleotide
  Sense strand starting at position 1801 of SEQ ID NO: 2509
ggguuccucauaggcaaau

SEQ ID NO: 194671 - RNA, 19 nt, Artificial Sequence
  Description of Artificial Sequence: Synthetic oligonucleotide
  Antisense strand to SEQ ID NO: 194670
auuugccuaugaggaaccc

SEQ ID NO: 194672 - RNA, 19 nt, Artificial Sequence
  Description of Artificial Sequence: Synthetic oligonucleotide
  Sense strand starting at position 1802 of SEQ ID NO: 2509
gguuccucauaggcaaaua

SEQ ID NO: 194673 - RNA, 19 nt, Artificial Sequence
  Description of Artificial Sequence: Synthetic oligonucleotide
  Antisense strand to SEQ ID NO: 194672
uauuugccuaugaggaacc

SEQ ID NO: 194674 - RNA, 19 nt, Artificial Sequence
  Description of Artificial Sequence: Synthetic oligonucleotide
  Sense strand starting at position 1998 of SEQ ID NO: 2509
uuaucugcugacugggaaa

SEQ ID NO: 194675 - RNA, 19 nt, Artificial Sequence
  Description of Artificial Sequence: Synthetic oligonucleotide
  Antisense strand to SEQ ID NO: 194674
uuucccagucagcagauaa

SEQ ID NO: 194676 - RNA, 19 nt, Artificial Sequence
  Description of Artificial Sequence: Synthetic oligonucleotide
  Sense strand starting at position 2098 of SEQ ID NO: 2509
ugcugaguccaccagaaag

SEQ ID NO: 194677 - RNA, 19 nt, Artificial Sequence
  Description of Artificial Sequence: Synthetic oligonucleotide
  Antisense strand to SEQ ID NO: 194676
cuuucugguggacucagca

SEQ ID NO: 194678 - RNA, 19 nt, Artificial Sequence
  Description of Artificial Sequence: Synthetic oligonucleotide
  Sense strand starting at position 2212 of SEQ ID NO: 2509
agacacaucuuugcacaga

SEQ ID NO: 194679 - RNA, 19 nt, Artificial Sequence
  Description of Artificial Sequence: Synthetic oligonucleotide
  Antisense strand to SEQ ID NO: 194678
ucugugcaaagaugugucu

SEQ ID NO: 194680 - RNA, 19 nt, Artificial Sequence
  Description of Artificial Sequence: Synthetic oligonucleotide
  Sense strand starting at position 2290 of SEQ ID NO: 2509
guggcagcaaaguauauau

SEQ ID NO: 194681 - RNA, 19 nt, Artificial Sequence
  Description of Artificial Sequence: Synthetic oligonucleotide
  Antisense strand to SEQ ID NO: 194680
auauauacuuugcugccac

SEQ ID NO: 194682 - RNA, 19 nt, Artificial Sequence
  Description of Artificial Sequence: Synthetic oligonucleotide
  Sense strand starting at position 2299 of SEQ ID NO: 2509
aaguauauauugcuuggaa

SEQ ID NO: 194683 - RNA, 19 nt, Artificial Sequence
  Description of Artificial Sequence: Synthetic oligonucleotide
  Antisense strand to SEQ ID NO: 194682
uuccaagcaauauauacuu

SEQ ID NO: 194684 - RNA, 19 nt, Artificial Sequence
  Description of Artificial Sequence: Synthetic oligonucleotide
  Sense strand starting at position 2300 of SEQ ID NO: 2509
aguauauauugcuuggaaa

SEQ ID NO: 194685 - RNA, 19 nt, Artificial Sequence
  Description of Artificial Sequence: Synthetic oligonucleotide
  Antisense strand to SEQ ID NO: 194684
uuuccaagcaauauauacu

SEQ ID NO: 194686 - RNA, 19 nt, Artificial Sequence
  Description of Artificial Sequence: Synthetic oligonucleotide
  Sense strand starting at position 2301 of SEQ ID NO: 2509
guauauauugcuuggaaag

SEQ ID NO: 194687 - RNA, 19 nt, Artificial Sequence
  Description of Artificial Sequence: Synthetic oligonucleotide
  Antisense strand to SEQ ID NO: 194686
cuuuccaagcaauauauac

SEQ ID NO: 194688 - RNA, 19 nt, Artificial Sequence
  Description of Artificial Sequence: Synthetic oligonucleotide
  Sense strand starting at position 2320 of SEQ ID NO: 2509
guagcacugauuugaacgu

SEQ ID NO: 194689 - RNA, 19 nt, Artificial Sequence
  Description of Artificial Sequence: Synthetic oligonucleotide
  Antisense strand to SEQ ID NO: 194688
acguucaaaucagugcuac

SEQ ID NO: 194690 - RNA, 19 nt, Artificial Sequence
  Description of Artificial Sequence: Synthetic oligonucleotide
  Sense strand starting at position 2396 of SEQ ID NO: 2509
auaugugaaauguggccau

SEQ ID NO: 194691 - RNA, 19 nt, Artificial Sequence
  Description of Artificial Sequence: Synthetic oligonucleotide
  Antisense strand to SEQ ID NO: 194690
auggccacauuucacauau

SEQ ID NO: 194692 - RNA, 19 nt, Artificial Sequence
  Description of Artificial Sequence: Synthetic oligonucleotide
  Sense strand starting at position 2399 of SEQ ID NO: 2509
ugugaaauguggccauaac

SEQ ID NO: 194693 - RNA, 19 nt, Artificial Sequence
  Description of Artificial Sequence: Synthetic oligonucleotide
  Antisense strand to SEQ ID NO: 194692
guuauggccacauuucaca

SEQ ID NO: 194694 - RNA, 19 nt, Artificial Sequence
  Description of Artificial Sequence: Synthetic oligonucleotide
  Sense strand starting at position 2596 of SEQ ID NO: 2509
agauguaaauugccauguu

SEQ ID NO: 194695 - RNA, 19 nt, Artificial Sequence
  Description of Artificial Sequence: Synthetic oligonucleotide
  Antisense strand to SEQ ID NO: 194694
aacauggcaauuuacaucu

SEQ ID NO: 194696 - RNA, 19 nt, Artificial Sequence
  Description of Artificial Sequence: Synthetic oligonucleotide
  Sense strand starting at position 2930 of SEQ ID NO: 2509
uccuguaagcauuaagaua

SEQ ID NO: 194697 - RNA, 19 nt, Artificial Sequence
  Description of Artificial Sequence: Synthetic oligonucleotide
  Antisense strand to SEQ ID NO: 194696
uaucuuaaugcuuacagga

SEQ ID NO: 194698 - RNA, 19 nt, Artificial Sequence
  Description of Artificial Sequence: Synthetic oligonucleotide
  Sense strand starting at position 3479 of SEQ ID NO: 2509
cucauuuaaugaugaaaga

SEQ ID NO: 194699 - RNA, 19 nt, Artificial Sequence
  Description of Artificial Sequence: Synthetic oligonucleotide
  Antisense strand to SEQ ID NO: 194698
ucuuucaucauuaaaugag

SEQ ID NO: 194700 - RNA, 19 nt, Artificial Sequence
  Description of Artificial Sequence: Synthetic oligonucleotide
  Sense strand starting at position 3501 of SEQ ID NO: 2509
aaagcaugaggcugacuaa

SEQ ID NO: 194701 - RNA, 19 nt, Artificial Sequence
  Description of Artificial Sequence: Synthetic oligonucleotide
  Antisense strand to SEQ ID NO: 194700
uuagucagccucaugcuuu

SEQ ID NO: 194702 - RNA, 19 nt, Artificial Sequence
  Description of Artificial Sequence: Synthetic oligonucleotide
  Sense strand starting at position 3504 of SEQ ID NO: 2509
gcaugaggcugacuaaaca

SEQ ID NO: 194703 - RNA, 19 nt, Artificial Sequence
  Description of Artificial Sequence: Synthetic oligonucleotide
  Antisense strand to SEQ ID NO: 194702
uguuuagucagccucaugc

SEQ ID NO: 194704 - RNA, 19 nt, Artificial Sequence
  Description of Artificial Sequence: Synthetic oligonucleotide
  Sense strand starting at position 3559 of SEQ ID NO: 2509
augguauuacuaugcauua

SEQ ID NO: 194705 - RNA, 19 nt, Artificial Sequence
  Description of Artificial Sequence: Synthetic oligonucleotide
  Antisense strand to SEQ ID NO: 194704
uaaugcauaguaauaccau

SEQ ID NO: 194706 - RNA, 19 nt, Artificial Sequence
  Description of Artificial Sequence: Synthetic oligonucleotide
  Sense strand starting at position 3583 of SEQ ID NO: 2509
auguaaagauaucuacgau

SEQ ID NO: 194707 - RNA, 19 nt, Artificial Sequence
  Description of Artificial Sequence: Synthetic oligonucleotide
  Antisense strand to SEQ ID NO: 194706
aucguagauaucuuuacau

SEQ ID NO: 194708 - RNA, 19 nt, Artificial Sequence
  Description of Artificial Sequence: Synthetic oligonucleotide
  Sense strand starting at position 3800 of SEQ ID NO: 2509
uuaacuugggcauguauua

SEQ ID NO: 194709 - RNA, 19 nt, Artificial Sequence
  Description of Artificial Sequence: Synthetic oligonucleotide
  Antisense strand to SEQ ID NO: 194708
uaauacaugcccaaguuaa

SEQ ID NO: 194710 - RNA, 19 nt, Artificial Sequence
  Description of Artificial Sequence: Synthetic oligonucleotide
  Sense strand starting at position 3868 of SEQ ID NO: 2509
ucaugucuguaauuccaca

SEQ ID NO: 194711 - RNA, 19 nt, Artificial Sequence
  Description of Artificial Sequence: Synthetic oligonucleotide
  Antisense strand to SEQ ID NO: 194710
uguggaauuacagacauga

SEQ ID NO: 194712 - RNA, 19 nt, Artificial Sequence
  Description of Artificial Sequence: Synthetic oligonucleotide
  Sense strand starting at position 3873 of SEQ ID NO: 2509
ucuguaauuccacaacguu

SEQ ID NO: 194713 - RNA, 19 nt, Artificial Sequence
  Description of Artificial Sequence: Synthetic oligonucleotide
  Antisense strand to SEQ ID NO: 194712
aacguuguggaauuacaga

SEQ ID NO: 194714 - RNA, 19 nt, Artificial Sequence
  Description of Artificial Sequence: Synthetic oligonucleotide
  Sense strand starting at position 3905 of SEQ ID NO: 2509
gggagcauugcuuaaagac

SEQ ID NO: 194715 - RNA, 19 nt, Artificial Sequence
  Description of Artificial Sequence: Synthetic oligonucleotide
  Antisense strand to SEQ ID NO: 194714
gucuuuaagcaaugcuccc

SEQ ID NO: 194716 - RNA, 19 nt, Artificial Sequence
  Description of Artificial Sequence: Synthetic oligonucleotide
  Sense strand starting at position 101 of SEQ ID NO: 2510
guguucucuauuugagggu

SEQ ID NO: 194717 - RNA, 19 nt, Artificial Sequence
  Description of Artificial Sequence: Synthetic oligonucleotide
  Antisense strand to SEQ ID NO: 194716
acccucaaauagagaacac

SEQ ID NO: 194718 - RNA, 19 nt, Artificial Sequence
  Description of Artificial Sequence: Synthetic oligonucleotide
  Sense strand starting at position 176 of SEQ ID NO: 2510
cagauauaguuaucugguu

SEQ ID NO: 194719 - RNA, 19 nt, Artificial Sequence
  Description of Artificial Sequence: Synthetic oligonucleotide
  Antisense strand to SEQ ID NO: 194718
aaccagauaacuauaucug

SEQ ID NO: 194720 - RNA, 19 nt, Artificial Sequence
  Description of Artificial Sequence: Synthetic oligonucleotide
  Sense strand starting at position 177 of SEQ ID NO: 2510
agauauaguuaucugguua

SEQ ID NO: 194721 - RNA, 19 nt, Artificial Sequence
  Description of Artificial Sequence: Synthetic oligonucleotide
  Antisense strand to SEQ ID NO: 194720
uaaccagauaacuauaucu

SEQ ID NO: 194722 - RNA, 19 nt, Artificial Sequence
  Description of Artificial Sequence: Synthetic oligonucleotide
  Sense strand starting at position 363 of SEQ ID NO: 2510
uuucucaguuauguagaua

SEQ ID NO: 194723 - RNA, 19 nt, Artificial Sequence
  Description of Artificial Sequence: Synthetic oligonucleotide
  Antisense strand to SEQ ID NO: 194722
uaucuacauaacugagaaa

SEQ ID NO: 194724 - RNA, 19 nt, Artificial Sequence
  Description of Artificial Sequence: Synthetic oligonucleotide
  Sense strand starting at position 758 of SEQ ID NO: 2510
guuugaggaucacugucuu

SEQ ID NO: 194725 - RNA, 19 nt, Artificial Sequence
  Description of Artificial Sequence: Synthetic oligonucleotide
  Antisense strand to SEQ ID NO: 194724
aagacagugauccucaaac

SEQ ID NO: 194726 - RNA, 19 nt, Artificial Sequence
  Description of Artificial Sequence: Synthetic oligonucleotide
  Sense strand starting at position 762 of SEQ ID NO: 2510
gaggaucacugucuuauaa

SEQ ID NO: 194727 - RNA, 19 nt, Artificial Sequence
  Description of Artificial Sequence: Synthetic oligonucleotide
  Antisense strand to SEQ ID NO: 194726
uuauaagacagugauccuc

SEQ ID NO: 194728 - RNA, 19 nt, Artificial Sequence
  Description of Artificial Sequence: Synthetic oligonucleotide
  Sense strand starting at position 789 of SEQ ID NO: 2510
ggaagaguuaaguauguau

SEQ ID NO: 194729 - RNA, 19 nt, Artificial Sequence
  Description of Artificial Sequence: Synthetic oligonucleotide
  Antisense strand to SEQ ID NO: 194728
auacauacuuaacucuucc

SEQ ID NO: 194730 - RNA, 19 nt, Artificial Sequence
  Description of Artificial Sequence: Synthetic oligonucleotide
  Sense strand starting at position 796 of SEQ ID NO: 2510
uuaaguauguauccuaaag

SEQ ID NO: 194731 - RNA, 19 nt, Artificial Sequence
  Description of Artificial Sequence: Synthetic oligonucleotide
  Antisense strand to SEQ ID NO: 194730
cuuuaggauacauacuuaa

SEQ ID NO: 194732 - RNA, 19 nt, Artificial Sequence
  Description of Artificial Sequence: Synthetic oligonucleotide
  Sense strand starting at position 1047 of SEQ ID NO: 2510
ccaccuuaguagucacuga

SEQ ID NO: 194733 - RNA, 19 nt, Artificial Sequence
  Description of Artificial Sequence: Synthetic oligonucleotide
  Antisense strand to SEQ ID NO: 194732
ucagugacuacuaaggugg

SEQ ID NO: 194734 - RNA, 19 nt, Artificial Sequence
  Description of Artificial Sequence: Synthetic oligonucleotide
  Sense strand starting at position 1051 of SEQ ID NO: 2510
cuuaguagucacugaacua

SEQ ID NO: 194735 - RNA, 19 nt, Artificial Sequence
  Description of Artificial Sequence: Synthetic oligonucleotide
  Antisense strand to SEQ ID NO: 194734
uaguucagugacuacuaag

SEQ ID NO: 194736 - RNA, 19 nt, Artificial Sequence
  Description of Artificial Sequence: Synthetic oligonucleotide
  Sense strand starting at position 1127 of SEQ ID NO: 2510
agcuaauuuccuuguuuga

SEQ ID NO: 194737 - RNA, 19 nt, Artificial Sequence
  Description of Artificial Sequence: Synthetic oligonucleotide
  Antisense strand to SEQ ID NO: 194736
ucaaacaaggaaauuagcu

SEQ ID NO: 194738 - RNA, 19 nt, Artificial Sequence
  Description of Artificial Sequence: Synthetic oligonucleotide
  Sense strand starting at position 1160 of SEQ ID NO: 2510
ggucauuucuagcccaguu

SEQ ID NO: 194739 - RNA, 19 nt, Artificial Sequence
  Description of Artificial Sequence: Synthetic oligonucleotide
  Antisense strand to SEQ ID NO: 194738
aacugggcuagaaaugacc

SEQ ID NO: 194740 - RNA, 19 nt, Artificial Sequence
  Description of Artificial Sequence: Synthetic oligonucleotide
  Sense strand starting at position 1173 of SEQ ID NO: 2510
ccaguuuguccuggacaau

SEQ ID NO: 194741 - RNA, 19 nt, Artificial Sequence
  Description of Artificial Sequence: Synthetic oligonucleotide
  Antisense strand to SEQ ID NO: 194740
auuguccaggacaaacugg

SEQ ID NO: 194742 - RNA, 19 nt, Artificial Sequence
  Description of Artificial Sequence: Synthetic oligonucleotide
  Sense strand starting at position 1174 of SEQ ID NO: 2510
caguuuguccuggacaauu

SEQ ID NO: 194743 - RNA, 19 nt, Artificial Sequence
  Description of Artificial Sequence: Synthetic oligonucleotide
  Antisense strand to SEQ ID NO: 194742
aauuguccaggacaaacug

SEQ ID NO: 194744 - RNA, 19 nt, Artificial Sequence
  Description of Artificial Sequence: Synthetic oligonucleotide
  Sense strand starting at position 1959 of SEQ ID NO: 2510
ccgucuuggcugucagcaa

SEQ ID NO: 194745 - RNA, 19 nt, Artificial Sequence
  Description of Artificial Sequence: Synthetic oligonucleotide
  Antisense strand to SEQ ID NO: 194744
uugcugacagccaagacgg

SEQ ID NO: 194746 - RNA, 19 nt, Artificial Sequence
  Description of Artificial Sequence: Synthetic oligonucleotide
  Sense strand starting at position 1966 of SEQ ID NO: 2510
ggcugucagcaauaggauu

SEQ ID NO: 194747 - RNA, 19 nt, Artificial Sequence
  Description of Artificial Sequence: Synthetic oligonucleotide
  Antisense strand to SEQ ID NO: 194746
aauccuauugcugacagcc

SEQ ID NO: 194748 - RNA, 19 nt, Artificial Sequence
  Description of Artificial Sequence: Synthetic oligonucleotide
  Sense strand starting at position 2017 of SEQ ID NO: 2510
uucuuucuuguuuaucgaa

SEQ ID NO: 194749 - RNA, 19 nt, Artificial Sequence
  Description of Artificial Sequence: Synthetic oligonucleotide
  Antisense strand to SEQ ID NO: 194748
uucgauaaacaagaaagaa

SEQ ID NO: 194750 - RNA, 19 nt, Artificial Sequence
  Description of Artificial Sequence: Synthetic oligonucleotide
  Sense strand starting at position 2179 of SEQ ID NO: 2510
ggcugaauaguuugagcaa

SEQ ID NO: 194751 - RNA, 19 nt, Artificial Sequence
  Description of Artificial Sequence: Synthetic oligonucleotide
  Antisense strand to SEQ ID NO: 194750
uugcucaaacuauucagcc

SEQ ID NO: 194752 - RNA, 19 nt, Artificial Sequence
  Description of Artificial Sequence: Synthetic oligonucleotide
  Sense strand starting at position 2191 of SEQ ID NO: 2510
ugagcaaacccuugaaggu

SEQ ID NO: 194753 - RNA, 19 nt, Artificial Sequence
  Description of Artificial Sequence: Synthetic oligonucleotide
  Antisense strand to SEQ ID NO: 194752
accuucaaggguuugcuca

SEQ ID NO: 194754 - RNA, 19 nt, Artificial Sequence
  Description of Artificial Sequence: Synthetic oligonucleotide
  Sense strand starting at position 2260 of SEQ ID NO: 2510
uagcaaguagaacgaauua

SEQ ID NO: 194755 - RNA, 19 nt, Artificial Sequence
  Description of Artificial Sequence: Synthetic oligonucleotide
  Antisense strand to SEQ ID NO: 194754
uaauucguucuacuugcua

SEQ ID NO: 194756 - RNA, 19 nt, Artificial Sequence
  Description of Artificial Sequence: Synthetic oligonucleotide
  Sense strand starting at position 2423 of SEQ ID NO: 2510
auucuuaaauguccaaguu

SEQ ID NO: 194757 - RNA, 19 nt, Artificial Sequence
  Description of Artificial Sequence: Synthetic oligonucleotide
  Antisense strand to SEQ ID NO: 194756
aacuuggacauuuaagaau

SEQ ID NO: 194758 - RNA, 19 nt, Artificial Sequence
  Description of Artificial Sequence: Synthetic oligonucleotide
  Sense strand starting at position 2443 of SEQ ID NO: 2510
aaguacauccguugaacaa

SEQ ID NO: 194759 - RNA, 19 nt, Artificial Sequence
  Description of Artificial Sequence: Synthetic oligonucleotide
  Antisense strand to SEQ ID NO: 194758
uuguucaacggauguacuu

SEQ ID NO: 194760 - RNA, 19 nt, Artificial Sequence
  Description of Artificial Sequence: Synthetic oligonucleotide
  Sense strand starting at position 2444 of SEQ ID NO: 2510
aguacauccguugaacaau

SEQ ID NO: 194761 - RNA, 19 nt, Artificial Sequence
  Description of Artificial Sequence: Synthetic oligonucleotide
  Antisense strand to SEQ ID NO: 194760
auuguucaacggauguacu

SEQ ID NO: 194762 - RNA, 19 nt, Artificial Sequence
  Description of Artificial Sequence: Synthetic oligonucleotide
  Sense strand starting at position 2496 of SEQ ID NO: 2510
aagcaugcccuguagaacu

SEQ ID NO: 194763 - RNA, 19 nt, Artificial Sequence
  Description of Artificial Sequence: Synthetic oligonucleotide
  Antisense strand to SEQ ID NO: 194762
aguucuacagggcaugcuu

SEQ ID NO: 194764 - RNA, 19 nt, Artificial Sequence
  Description of Artificial Sequence: Synthetic oligonucleotide
  Sense strand starting at position 2528 of SEQ ID NO: 2510
ugugaaauaucccucaagg

SEQ ID NO: 194765 - RNA, 19 nt, Artificial Sequence
  Description of Artificial Sequence: Synthetic oligonucleotide
  Antisense strand to SEQ ID NO: 194764
ccuugagggauauuucaca

SEQ ID NO: 194766 - RNA, 19 nt, Artificial Sequence
  Description of Artificial Sequence: Synthetic oligonucleotide
  Sense strand starting at position 2570 of SEQ ID NO: 2510
ucaugaaauccugggugau

SEQ ID NO: 194767 - RNA, 19 nt, Artificial Sequence
  Description of Artificial Sequence: Synthetic oligonucleotide
  Antisense strand to SEQ ID NO: 194766
aucacccaggauuucauga

SEQ ID NO: 194768 - RNA, 19 nt, Artificial Sequence
  Description of Artificial Sequence: Synthetic oligonucleotide
  Sense strand starting at position 2571 of SEQ ID NO: 2510
caugaaauccugggugauu

SEQ ID NO: 194769 - RNA, 19 nt, Artificial Sequence
  Description of Artificial Sequence: Synthetic oligonucleotide
  Antisense strand to SEQ ID NO: 194768
aaucacccaggauuucaug

SEQ ID NO: 194770 - RNA, 19 nt, Artificial Sequence
  Description of Artificial Sequence: Synthetic oligonucleotide
  Sense strand starting at position 2572 of SEQ ID NO: 2510
augaaauccugggugauug

SEQ ID NO: 194771 - RNA, 19 nt, Artificial Sequence
  Description of Artificial Sequence: Synthetic oligonucleotide
  Antisense strand to SEQ ID NO: 194770
caaucacccaggauuucau

SEQ ID NO: 194772 - RNA, 19 nt, Artificial Sequence
  Description of Artificial Sequence: Synthetic oligonucleotide
  Sense strand starting at position 2582 of SEQ ID NO: 2510
gggugauuggcuuaaacua

SEQ ID NO: 194773 - RNA, 19 nt, Artificial Sequence
  Description of Artificial Sequence: Synthetic oligonucleotide
  Antisense strand to SEQ ID NO: 194772
uaguuuaagccaaucaccc

SEQ ID NO: 194774 - RNA, 19 nt, Artificial Sequence
  Description of Artificial Sequence: Synthetic oligonucleotide
  Sense strand starting at position 2590 of SEQ ID NO: 2510
ggcuuaaacuaucugggua

SEQ ID NO: 194775 - RNA, 19 nt, Artificial Sequence
  Description of Artificial Sequence: Synthetic oligonucleotide
  Antisense strand to SEQ ID NO: 194774
uacccagauaguuuaagcc

SEQ ID NO: 194776 - RNA, 19 nt, Artificial Sequence
  Description of Artificial Sequence: Synthetic oligonucleotide
  Sense strand starting at position 2591 of SEQ ID NO: 2510
gcuuaaacuaucuggguag

SEQ ID NO: 194777 - RNA, 19 nt, Artificial Sequence
  Description of Artificial Sequence: Synthetic oligonucleotide
  Antisense strand to SEQ ID NO: 194776
cuacccagauaguuuaagc

SEQ ID NO: 194778 - RNA, 19 nt, Artificial Sequence
  Description of Artificial Sequence: Synthetic oligonucleotide
  Sense strand starting at position 2593 of SEQ ID NO: 2510
uuaaacuaucuggguaguu

SEQ ID NO: 194779 - RNA, 19 nt, Artificial Sequence
  Description of Artificial Sequence: Synthetic oligonucleotide
  Antisense strand to SEQ ID NO: 194778
aacuacccagauaguuuaa

SEQ ID NO: 194780 - RNA, 19 nt, Artificial Sequence
  Description of Artificial Sequence: Synthetic oligonucleotide
  Sense strand starting at position 2594 of SEQ ID NO: 2510
uaaacuaucuggguaguuu

SEQ ID NO: 194781 - RNA, 19 nt, Artificial Sequence
  Description of Artificial Sequence: Synthetic oligonucleotide
  Antisense strand to SEQ ID NO: 194780
aaacuacccagauaguuua

SEQ ID NO: 194782 - RNA, 19 nt, Artificial Sequence
  Description of Artificial Sequence: Synthetic oligonucleotide
  Sense strand starting at position 3020 of SEQ ID NO: 2510
augucauaggguuguugga

SEQ ID NO: 194783 - RNA, 19 nt, Artificial Sequence
  Description of Artificial Sequence: Synthetic oligonucleotide
  Antisense strand to SEQ ID NO: 194782
uccaacaacccuaugacau

SEQ ID NO: 194784 - RNA, 19 nt, Artificial Sequence
  Description of Artificial Sequence: Synthetic oligonucleotide
  Sense strand starting at position 3022 of SEQ ID NO: 2510
gucauaggguuguuggaaa

SEQ ID NO: 194785 - RNA, 19 nt, Artificial Sequence
  Description of Artificial Sequence: Synthetic oligonucleotide
  Antisense strand to SEQ ID NO: 194784
uuuccaacaacccuaugac

SEQ ID NO: 194786 - RNA, 19 nt, Artificial Sequence
  Description of Artificial Sequence: Synthetic oligonucleotide
  Sense strand starting at position 3275 of SEQ ID NO: 2510
aguaaaugucauggacuac

SEQ ID NO: 194787 - RNA, 19 nt, Artificial Sequence
  Description of Artificial Sequence: Synthetic oligonucleotide
  Antisense strand to SEQ ID NO: 194786
guaguccaugacauuuacu

SEQ ID NO: 194788 - RNA, 19 nt, Artificial Sequence
  Description of Artificial Sequence: Synthetic oligonucleotide
  Sense strand starting at position 3483 of SEQ ID NO: 2510
uguuaaaugugucugaaau

SEQ ID NO: 194789 - RNA, 19 nt, Artificial Sequence
  Description of Artificial Sequence: Synthetic oligonucleotide
  Antisense strand to SEQ ID NO: 194788
auuucagacacauuuaaca

SEQ ID NO: 194790 - RNA, 19 nt, Artificial Sequence
  Description of Artificial Sequence: Synthetic oligonucleotide
  Sense strand starting at position 3484 of SEQ ID NO: 2510
guuaaaugugucugaaaua

SEQ ID NO: 194791 - RNA, 19 nt, Artificial Sequence
  Description of Artificial Sequence: Synthetic oligonucleotide
  Antisense strand to SEQ ID NO: 194790
uauuucagacacauuuaac

SEQ ID NO: 194792 - RNA, 19 nt, Artificial Sequence
  Description of Artificial Sequence: Synthetic oligonucleotide
  Sense strand starting at position 3837 of SEQ ID NO: 2510
guauacagagcucauuaga

SEQ ID NO: 194793 - RNA, 19 nt, Artificial Sequence
  Description of Artificial Sequence: Synthetic oligonucleotide
  Antisense strand to SEQ ID NO: 194792
ucuaaugagcucuguauac

SEQ ID NO: 194794 - RNA, 19 nt, Artificial Sequence
  Description of Artificial Sequence: Synthetic oligonucleotide
  Sense strand starting at position 3910 of SEQ ID NO: 2510
agaaguguugcauaaguuu

SEQ ID NO: 194795 - RNA, 19 nt, Artificial Sequence
  Description of Artificial Sequence: Synthetic oligonucleotide
  Antisense strand to SEQ ID NO: 194794
aaacuuaugcaacacuucu

SEQ ID NO: 194796 - RNA, 19 nt, Artificial Sequence
  Description of Artificial Sequence: Synthetic oligonucleotide
  Sense strand starting at position 58 of SEQ ID NO: 2511
gccacuguuccugauuaag

SEQ ID NO: 194797 - RNA, 19 nt, Artificial Sequence
  Description of Artificial Sequence: Synthetic oligonucleotide
  Antisense strand to SEQ ID NO: 194796
cuuaaucaggaacaguggc

SEQ ID NO: 194798 - RNA, 19 nt, Artificial Sequence
  Description of Artificial Sequence: Synthetic oligonucleotide
  Sense strand starting at position 144 of SEQ ID NO: 2511
uguucugggccugauuaga

SEQ ID NO: 194799 - RNA, 19 nt, Artificial Sequence
  Description of Artificial Sequence: Synthetic oligonucleotide
  Antisense strand to SEQ ID NO: 194798
ucuaaucaggcccagaaca

SEQ ID NO: 194800 - RNA, 19 nt, Artificial Sequence
  Description of Artificial Sequence: Synthetic oligonucleotide
  Sense strand starting at position 574 of SEQ ID NO: 2511
gggcaagcaguuuauccau

SEQ ID NO: 194801 - RNA, 19 nt, Artificial Sequence
  Description of Artificial Sequence: Synthetic oligonucleotide
  Antisense strand to SEQ ID NO: 194800
auggauaaacugcuugccc

SEQ ID NO: 194802 - RNA, 19 nt, Artificial Sequence
  Description of Artificial Sequence: Synthetic oligonucleotide
  Sense strand starting at position 744 of SEQ ID NO: 2511
uguugagacuuugcagacu

SEQ ID NO: 194803 - RNA, 19 nt, Artificial Sequence
  Description of Artificial Sequence: Synthetic oligonucleotide
  Antisense strand to SEQ ID NO: 194802
agucugcaaagucucaaca

SEQ ID NO: 194804 - RNA, 19 nt, Artificial Sequence
  Description of Artificial Sequence: Synthetic oligonucleotide
  Sense strand starting at position 750 of SEQ ID NO: 2511
gacuuugcagacugaaguu

SEQ ID NO: 194805 - RNA, 19 nt, Artificial Sequence
  Description of Artificial Sequence: Synthetic oligonucleotide
  Antisense strand to SEQ ID NO: 194804
aacuucagucugcaaaguc

SEQ ID NO: 194806 - RNA, 19 nt, Artificial Sequence
  Description of Artificial Sequence: Synthetic oligonucleotide
  Sense strand starting at position 935 of SEQ ID NO: 2511
ucucauucucccuggaagu

SEQ ID NO: 194807 - RNA, 19 nt, Artificial Sequence
  Description of Artificial Sequence: Synthetic oligonucleotide
  Antisense strand to SEQ ID NO: 194806
acuuccagggagaaugaga

SEQ ID NO: 194808 - RNA, 19 nt, Artificial Sequence
  Description of Artificial Sequence: Synthetic oligonucleotide
  Sense strand starting at position 936 of SEQ ID NO: 2511
cucauucucccuggaaguu

SEQ ID NO: 194809 - RNA, 19 nt, Artificial Sequence
  Description of Artificial Sequence: Synthetic oligonucleotide
  Antisense strand to SEQ ID NO: 194808
aacuuccagggagaaugag

SEQ ID NO: 194810 - RNA, 19 nt, Artificial Sequence
  Description of Artificial Sequence: Synthetic oligonucleotide
  Sense strand starting at position 937 of SEQ ID NO: 2511
ucauucucccuggaaguua

SEQ ID NO: 194811 - RNA, 19 nt, Artificial Sequence
  Description of Artificial Sequence: Synthetic oligonucleotide
  Antisense strand to SEQ ID NO: 194810
uaacuuccagggagaauga

SEQ ID NO: 194812 - RNA, 19 nt, Artificial Sequence
  Description of Artificial Sequence: Synthetic oligonucleotide
  Sense strand starting at position 988 of SEQ ID NO: 2511
acuccaaaguucucucagu

SEQ ID NO: 194813 - RNA, 19 nt, Artificial Sequence
  Description of Artificial Sequence: Synthetic oligonucleotide
  Antisense strand to SEQ ID NO: 194812
acugagagaacuuuggagu

SEQ ID NO: 194814 - RNA, 19 nt, Artificial Sequence
  Description of Artificial Sequence: Synthetic oligonucleotide
  Sense strand starting at position 1011 of SEQ ID NO: 2511
ccuugaaucuuugcacaug

SEQ ID NO: 194815 - RNA, 19 nt, Artificial Sequence
  Description of Artificial Sequence: Synthetic oligonucleotide
  Antisense strand to SEQ ID NO: 194814
caugugcaaagauucaagg

SEQ ID NO: 194816 - RNA, 19 nt, Artificial Sequence
  Description of Artificial Sequence: Synthetic oligonucleotide
  Sense strand starting at position 1118 of SEQ ID NO: 2511
ccaauugaaguuggacuua

SEQ ID NO: 194817 - RNA, 19 nt, Artificial Sequence
  Description of Artificial Sequence: Synthetic oligonucleotide
  Antisense strand to SEQ ID NO: 194816
uaaguccaacuucaauugg

SEQ ID NO: 194818 - RNA, 19 nt, Artificial Sequence
  Description of Artificial Sequence: Synthetic oligonucleotide
  Sense strand starting at position 1176 of SEQ ID NO: 2511
gcgugccaucaagagaaga

SEQ ID NO: 194819 - RNA, 19 nt, Artificial Sequence
  Description of Artificial Sequence: Synthetic oligonucleotide
  Antisense strand to SEQ ID NO: 194818
ucuucucuugauggcacgc

SEQ ID NO: 194820 - RNA, 19 nt, Artificial Sequence
  Description of Artificial Sequence: Synthetic oligonucleotide
  Sense strand starting at position 1237 of SEQ ID NO: 2511
acuuacagacucugguaaa

SEQ ID NO: 194821 - RNA, 19 nt, Artificial Sequence
  Description of Artificial Sequence: Synthetic oligonucleotide
  Antisense strand to SEQ ID NO: 194820
uuuaccagagucuguaagu

SEQ ID NO: 194822 - RNA, 19 nt, Artificial Sequence
  Description of Artificial Sequence: Synthetic oligonucleotide
  Sense strand starting at position 1468 of SEQ ID NO: 2511
aauggauagucuguguucu

SEQ ID NO: 194823 - RNA, 19 nt, Artificial Sequence
  Description of Artificial Sequence: Synthetic oligonucleotide
  Antisense strand to SEQ ID NO: 194822
agaacacagacuauccauu

SEQ ID NO: 194824 - RNA, 19 nt, Artificial Sequence
  Description of Artificial Sequence: Synthetic oligonucleotide
  Sense strand starting at position 1476 of SEQ ID NO: 2511
gucuguguucuugcaaagu

SEQ ID NO: 194825 - RNA, 19 nt, Artificial Sequence
  Description of Artificial Sequence: Synthetic oligonucleotide
  Antisense strand to SEQ ID NO: 194824
acuuugcaagaacacagac

SEQ ID NO: 194826 - RNA, 19 nt, Artificial Sequence
  Description of Artificial Sequence: Synthetic oligonucleotide
  Sense strand starting at position 1616 of SEQ ID NO: 2511
ggugaagcccuccgaauua

SEQ ID NO: 194827 - RNA, 19 nt, Artificial Sequence
  Description of Artificial Sequence: Synthetic oligonucleotide
  Antisense strand to SEQ ID NO: 194826
uaauucggagggcuucacc

SEQ ID NO: 194828 - RNA, 19 nt, Artificial Sequence
  Description of Artificial Sequence: Synthetic oligonucleotide
  Sense strand starting at position 1703 of SEQ ID NO: 2511
gcacccaucugagcgauuu

SEQ ID NO: 194829 - RNA, 19 nt, Artificial Sequence
  Description of Artificial Sequence: Synthetic oligonucleotide
  Antisense strand to SEQ ID NO: 194828
aaaucgcucagaugggugc

SEQ ID NO: 194830 - RNA, 19 nt, Artificial Sequence
  Description of Artificial Sequence: Synthetic oligonucleotide
  Sense strand starting at position 2057 of SEQ ID NO: 2511
ucuuguaaaccucacuagu

SEQ ID NO: 194831 - RNA, 19 nt, Artificial Sequence
  Description of Artificial Sequence: Synthetic oligonucleotide
  Antisense strand to SEQ ID NO: 194830
acuagugagguuuacaaga

SEQ ID NO: 194832 - RNA, 19 nt, Artificial Sequence
  Description of Artificial Sequence: Synthetic oligonucleotide
  Sense strand starting at position 2059 of SEQ ID NO: 2511
uuguaaaccucacuagucu

SEQ ID NO: 194833 - RNA, 19 nt, Artificial Sequence
  Description of Artificial Sequence: Synthetic oligonucleotide
  Antisense strand to SEQ ID NO: 194832
agacuagugagguuuacaa

SEQ ID NO: 194834 - RNA, 19 nt, Artificial Sequence
  Description of Artificial Sequence: Synthetic oligonucleotide
  Sense strand starting at position 2092 of SEQ ID NO: 2511
aaguguacucuugggaaac

SEQ ID NO: 194835 - RNA, 19 nt, Artificial Sequence
  Description of Artificial Sequence: Synthetic oligonucleotide
  Antisense strand to SEQ ID NO: 194834
guuucccaagaguacacuu

SEQ ID NO: 194836 - RNA, 19 nt, Artificial Sequence
  Description of Artificial Sequence: Synthetic oligonucleotide
  Sense strand starting at position 2201 of SEQ ID NO: 2511
aacccuagugcuuggcaaa

SEQ ID NO: 194837 - RNA, 19 nt, Artificial Sequence
  Description of Artificial Sequence: Synthetic oligonucleotide
  Antisense strand to SEQ ID NO: 194836
uuugccaagcacuaggguu

SEQ ID NO: 194838 - RNA, 19 nt, Artificial Sequence
  Description of Artificial Sequence: Synthetic oligonucleotide
  Sense strand starting at position 2282 of SEQ ID NO: 2511
cugugaaugccucuucgcu

SEQ ID NO: 194839 - RNA, 19 nt, Artificial Sequence
  Description of Artificial Sequence: Synthetic oligonucleotide
  Antisense strand to SEQ ID NO: 194838
agcgaagaggcauucacag

SEQ ID NO: 194840 - RNA, 19 nt, Artificial Sequence
  Description of Artificial Sequence: Synthetic oligonucleotide
  Sense strand starting at position 2305 of SEQ ID NO: 2511
ggaggacuuuguucccaag

SEQ ID NO: 194841 - RNA, 19 nt, Artificial Sequence
  Description of Artificial Sequence: Synthetic oligonucleotide
  Antisense strand to SEQ ID NO: 194840
cuugggaacaaaguccucc

SEQ ID NO: 194842 - RNA, 19 nt, Artificial Sequence
  Description of Artificial Sequence: Synthetic oligonucleotide
  Sense strand starting at position 2341 of SEQ ID NO: 2511
ucugaacuucgauguugau

SEQ ID NO: 194843 - RNA, 19 nt, Artificial Sequence
  Description of Artificial Sequence: Synthetic oligonucleotide
  Antisense strand to SEQ ID NO: 194842
aucaacaucgaaguucaga

SEQ ID NO: 194844 - RNA, 19 nt, Artificial Sequence
  Description of Artificial Sequence: Synthetic oligonucleotide
  Sense strand starting at position 2540 of SEQ ID NO: 2511
ucaagauaguauucuacag

SEQ ID NO: 194845 - RNA, 19 nt, Artificial Sequence
  Description of Artificial Sequence: Synthetic oligonucleotide
  Antisense strand to SEQ ID NO: 194844
cuguagaauacuaucuuga

SEQ ID NO: 194846 - RNA, 19 nt, Artificial Sequence
  Description of Artificial Sequence: Synthetic oligonucleotide
  Sense strand starting at position 2544 of SEQ ID NO: 2511
gauaguauucuacaguguc

SEQ ID NO: 194847 - RNA, 19 nt, Artificial Sequence
  Description of Artificial Sequence: Synthetic oligonucleotide
  Antisense strand to SEQ ID NO: 194846
gacacuguagaauacuauc

SEQ ID NO: 194848 - RNA, 19 nt, Artificial Sequence
  Description of Artificial Sequence: Synthetic oligonucleotide
  Sense strand starting at position 2621 of SEQ ID NO: 2511
cugagaugagucuggcaaa

SEQ ID NO: 194849 - RNA, 19 nt, Artificial Sequence
  Description of Artificial Sequence: Synthetic oligonucleotide
  Antisense strand to SEQ ID NO: 194848
uuugccagacucaucucag

SEQ ID NO: 194850 - RNA, 19 nt, Artificial Sequence
  Description of Artificial Sequence: Synthetic oligonucleotide
  Sense strand starting at position 2668 of SEQ ID NO: 2511
uucuuauuuggaugcguau

SEQ ID NO: 194851 - RNA, 19 nt, Artificial Sequence
  Description of Artificial Sequence: Synthetic oligonucleotide
  Antisense strand to SEQ ID NO: 194850
auacgcauccaaauaagaa

SEQ ID NO: 194852 - RNA, 19 nt, Artificial Sequence
  Description of Artificial Sequence: Synthetic oligonucleotide
  Sense strand starting at position 2722 of SEQ ID NO: 2511
aaaugugauccaggugaua

SEQ ID NO: 194853 - RNA, 19 nt, Artificial Sequence
  Description of Artificial Sequence: Synthetic oligonucleotide
  Antisense strand to SEQ ID NO: 194852
uaucaccuggaucacauuu

SEQ ID NO: 194854 - RNA, 19 nt, Artificial Sequence
  Description of Artificial Sequence: Synthetic oligonucleotide
  Sense strand starting at position 2724 of SEQ ID NO: 2511
augugauccaggugauacu

SEQ ID NO: 194855 - RNA, 19 nt, Artificial Sequence
  Description of Artificial Sequence: Synthetic oligonucleotide
  Antisense strand to SEQ ID NO: 194854
aguaucaccuggaucacau

SEQ ID NO: 194856 - RNA, 19 nt, Artificial Sequence
  Description of Artificial Sequence: Synthetic oligonucleotide
  Sense strand starting at position 2733 of SEQ ID NO: 2511
aggugauacucaucuccaa

SEQ ID NO: 194857 - RNA, 19 nt, Artificial Sequence
  Description of Artificial Sequence: Synthetic oligonucleotide
  Antisense strand to SEQ ID NO: 194856
uuggagaugaguaucaccu

SEQ ID NO: 194858 - RNA, 19 nt, Artificial Sequence
  Description of Artificial Sequence: Synthetic oligonucleotide
  Sense strand starting at position 2819 of SEQ ID NO: 2511
caaugcucuggcuuucgua

SEQ ID NO: 194859 - RNA, 19 nt, Artificial Sequence
  Description of Artificial Sequence: Synthetic oligonucleotide
  Antisense strand to SEQ ID NO: 194858
uacgaaagccagagcauug

SEQ ID NO: 194860 - RNA, 19 nt, Artificial Sequence
  Description of Artificial Sequence: Synthetic oligonucleotide
  Sense strand starting at position 2843 of SEQ ID NO: 2511
uucugaucuccuggaguuc

SEQ ID NO: 194861 - RNA, 19 nt, Artificial Sequence
  Description of Artificial Sequence: Synthetic oligonucleotide
  Antisense strand to SEQ ID NO: 194860
gaacuccaggagaucagaa

SEQ ID NO: 194862 - RNA, 19 nt, Artificial Sequence
  Description of Artificial Sequence: Synthetic oligonucleotide
  Sense strand starting at position 2872 of SEQ ID NO: 2511
gcucaaguggaguguauga

SEQ ID NO: 194863 - RNA, 19 nt, Artificial Sequence
  Description of Artificial Sequence: Synthetic oligonucleotide
  Antisense strand to SEQ ID NO: 194862
ucauacacuccacuugagc

SEQ ID NO: 194864 - RNA, 19 nt, Artificial Sequence
  Description of Artificial Sequence: Synthetic oligonucleotide
  Sense strand starting at position 2908 of SEQ ID NO: 2511
acgccuucuccagagcuaa

SEQ ID NO: 194865 - RNA, 19 nt, Artificial Sequence
  Description of Artificial Sequence: Synthetic oligonucleotide
  Antisense strand to SEQ ID NO: 194864
uuagcucuggagaaggcgu

SEQ ID NO: 194866 - RNA, 19 nt, Artificial Sequence
  Description of Artificial Sequence: Synthetic oligonucleotide
  Sense strand starting at position 3027 of SEQ ID NO: 2511
uagaaagucuccgugugga

SEQ ID NO: 194867 - RNA, 19 nt, Artificial Sequence
  Description of Artificial Sequence: Synthetic oligonucleotide
  Antisense strand to SEQ ID NO: 194866
uccacacggagacuuucua

SEQ ID NO: 194868 - RNA, 19 nt, Artificial Sequence
  Description of Artificial Sequence: Synthetic oligonucleotide
  Sense strand starting at position 3030 of SEQ ID NO: 2511
aaagucuccguguggagaa

SEQ ID NO: 194869 - RNA, 19 nt, Artificial Sequence
  Description of Artificial Sequence: Synthetic oligonucleotide
  Antisense strand to SEQ ID NO: 194868
uucuccacacggagacuuu

SEQ ID NO: 194870 - RNA, 19 nt, Artificial Sequence
  Description of Artificial Sequence: Synthetic oligonucleotide
  Sense strand starting at position 3225 of SEQ ID NO: 2511
gcgcaaucacucuucgugu

SEQ ID NO: 194871 - RNA, 19 nt, Artificial Sequence
  Description of Artificial Sequence: Synthetic oligonucleotide
  Antisense strand to SEQ ID NO: 194870
acacgaagagugauugcgc

SEQ ID NO: 194872 - RNA, 19 nt, Artificial Sequence
  Description of Artificial Sequence: Synthetic oligonucleotide
  Sense strand starting at position 3491 of SEQ ID NO: 2511
gggccuguccuucagagaa

SEQ ID NO: 194873 - RNA, 19 nt, Artificial Sequence
  Description of Artificial Sequence: Synthetic oligonucleotide
  Antisense strand to SEQ ID NO: 194872
uucucugaaggacaggccc

SEQ ID NO: 194874 - RNA, 19 nt, Artificial Sequence
  Description of Artificial Sequence: Synthetic oligonucleotide
  Sense strand starting at position 3558 of SEQ ID NO: 2511
gugucaauccguucugagc

SEQ ID NO: 194875 - RNA, 19 nt, Artificial Sequence
  Description of Artificial Sequence: Synthetic oligonucleotide
  Antisense strand to SEQ ID NO: 194874
gcucagaacggauugacac

SEQ ID NO: 194876 - RNA, 19 nt, Artificial Sequence
  Description of Artificial Sequence: Synthetic oligonucleotide
  Sense strand starting at position 287 of SEQ ID NO: 2512
gcuagcuagcuuucucagu

SEQ ID NO: 194877 - RNA, 19 nt, Artificial Sequence
  Description of Artificial Sequence: Synthetic oligonucleotide
  Antisense strand to SEQ ID NO: 194876
acugagaaagcuagcuagc

SEQ ID NO: 194878 - RNA, 19 nt, Artificial Sequence
  Description of Artificial Sequence: Synthetic oligonucleotide
  Sense strand starting at position 294 of SEQ ID NO: 2512
agcuuucucagugggauag

SEQ ID NO: 194879 - RNA, 19 nt, Artificial Sequence
  Description of Artificial Sequence: Synthetic oligonucleotide
  Antisense strand to SEQ ID NO: 194878
cuaucccacugagaaagcu

SEQ ID NO: 194880 - RNA, 19 nt, Artificial Sequence
  Description of Artificial Sequence: Synthetic oligonucleotide
  Sense strand starting at position 401 of SEQ ID NO: 2512
agcuguaacagaggaauua

SEQ ID NO: 194881 - RNA, 19 nt, Artificial Sequence
  Description of Artificial Sequence: Synthetic oligonucleotide
  Antisense strand to SEQ ID NO: 194880
uaauuccucuguuacagcu

SEQ ID NO: 194882 - RNA, 19 nt, Artificial Sequence
  Description of Artificial Sequence: Synthetic oligonucleotide
  Sense strand starting at position 522 of SEQ ID NO: 2512
gggaguauaaucuauugcu

SEQ ID NO: 194883 - RNA, 19 nt, Artificial Sequence
  Description of Artificial Sequence: Synthetic oligonucleotide
  Antisense strand to SEQ ID NO: 194882
agcaauagauuauacuccc

SEQ ID NO: 194884 - RNA, 19 nt, Artificial Sequence
  Description of Artificial Sequence: Synthetic oligonucleotide
  Sense strand starting at position 553 of SEQ ID NO: 2512
aucacaaguuagucaaugu

SEQ ID NO: 194885 - RNA, 19 nt, Artificial Sequence
  Description of Artificial Sequence: Synthetic oligonucleotide
  Antisense strand to SEQ ID NO: 194884
acauugacuaacuugugau

SEQ ID NO: 194886 - RNA, 19 nt, Artificial Sequence
  Description of Artificial Sequence: Synthetic oligonucleotide
  Sense strand starting at position 629 of SEQ ID NO: 2512
cgccauaagauguaagaaa

SEQ ID NO: 194887 - RNA, 19 nt, Artificial Sequence
  Description of Artificial Sequence: Synthetic oligonucleotide
  Antisense strand to SEQ ID NO: 194886
uuucuuacaucuuauggcg

SEQ ID NO: 194888 - RNA, 19 nt, Artificial Sequence
  Description of Artificial Sequence: Synthetic oligonucleotide
  Sense strand starting at position 725 of SEQ ID NO: 2512
ugugaagugguuuacacuu

SEQ ID NO: 194889 - RNA, 19 nt, Artificial Sequence
  Description of Artificial Sequence: Synthetic oligonucleotide
  Antisense strand to SEQ ID NO: 194888
aaguguaaaccacuucaca

SEQ ID NO: 194890 - RNA, 19 nt, Artificial Sequence
  Description of Artificial Sequence: Synthetic oligonucleotide
  Sense strand starting at position 789 of SEQ ID NO: 2512
uguguaaacauguagaguc

SEQ ID NO: 194891 - RNA, 19 nt, Artificial Sequence
  Description of Artificial Sequence: Synthetic oligonucleotide
  Antisense strand to SEQ ID NO: 194890
gacucuacauguuuacaca

SEQ ID NO: 194892 - RNA, 19 nt, Artificial Sequence
  Description of Artificial Sequence: Synthetic oligonucleotide
  Sense strand starting at position 823 of SEQ ID NO: 2512
gguugagagguuuaucuuu

SEQ ID NO: 194893 - RNA, 19 nt, Artificial Sequence
  Description of Artificial Sequence: Synthetic oligonucleotide
  Antisense strand to SEQ ID NO: 194892
aaagauaaaccucucaacc

SEQ ID NO: 194894 - RNA, 19 nt, Artificial Sequence
  Description of Artificial Sequence: Synthetic oligonucleotide
  Sense strand starting at position 963 of SEQ ID NO: 2512
ugagacaacuaugagaaga

SEQ ID NO: 194895 - RNA, 19 nt, Artificial Sequence
  Description of Artificial Sequence: Synthetic oligonucleotide
  Antisense strand to SEQ ID NO: 194894
ucuucucauaguugucuca

SEQ ID NO: 194896 - RNA, 19 nt, Artificial Sequence
  Description of Artificial Sequence: Synthetic oligonucleotide
  Sense strand starting at position 965 of SEQ ID NO: 2512
agacaacuaugagaagaaa

SEQ ID NO: 194897 - RNA, 19 nt, Artificial Sequence
  Description of Artificial Sequence: Synthetic oligonucleotide
  Antisense strand to SEQ ID NO: 194896
uuucuucucauaguugucu

SEQ ID NO: 194898 - RNA, 19 nt, Artificial Sequence
  Description of Artificial Sequence: Synthetic oligonucleotide
  Sense strand starting at position 1083 of SEQ ID NO: 2512
ugugaaaguacuggcagaa

SEQ ID NO: 194899 - RNA, 19 nt, Artificial Sequence
  Description of Artificial Sequence: Synthetic oligonucleotide
  Antisense strand to SEQ ID NO: 194898
uucugccaguacuuucaca

SEQ ID NO: 194900 - RNA, 19 nt, Artificial Sequence
  Description of Artificial Sequence: Synthetic oligonucleotide
  Sense strand starting at position 1120 of SEQ ID NO: 2512
accugauauuaagccugaa

SEQ ID NO: 194901 - RNA, 19 nt, Artificial Sequence
  Description of Artificial Sequence: Synthetic oligonucleotide
  Antisense strand to SEQ ID NO: 194900
uucaggcuuaauaucaggu

SEQ ID NO: 194902 - RNA, 19 nt, Artificial Sequence
  Description of Artificial Sequence: Synthetic oligonucleotide
  Sense strand starting at position 1123 of SEQ ID NO: 2512
ugauauuaagccugaacaa

SEQ ID NO: 194903 - RNA, 19 nt, Artificial Sequence
  Description of Artificial Sequence: Synthetic oligonucleotide
  Antisense strand to SEQ ID NO: 194902
uuguucaggcuuaauauca

SEQ ID NO: 194904 - RNA, 19 nt, Artificial Sequence
  Description of Artificial Sequence: Synthetic oligonucleotide
  Sense strand starting at position 1263 of SEQ ID NO: 2512
aggagaugucacugugcaa

SEQ ID NO: 194905 - RNA, 19 nt, Artificial Sequence
  Description of Artificial Sequence: Synthetic oligonucleotide
  Antisense strand to SEQ ID NO: 194904
uugcacagugacaucuccu

SEQ ID NO: 194906 - RNA, 19 nt, Artificial Sequence
  Description of Artificial Sequence: Synthetic oligonucleotide
  Sense strand starting at position 1290 of SEQ ID NO: 2512
ugucauuuauucucggguu

SEQ ID NO: 194907 - RNA, 19 nt, Artificial Sequence
  Description of Artificial Sequence: Synthetic oligonucleotide
  Antisense strand to SEQ ID NO: 194906
aacccgagaauaaaugaca

SEQ ID NO: 194908 - RNA, 19 nt, Artificial Sequence
  Description of Artificial Sequence: Synthetic oligonucleotide
  Sense strand starting at position 1475 of SEQ ID NO: 2512
uuuagaaguccuugaaacc

SEQ ID NO: 194909 - RNA, 19 nt, Artificial Sequence
  Description of Artificial Sequence: Synthetic oligonucleotide
  Antisense strand to SEQ ID NO: 194908
gguuucaaggacuucuaaa

SEQ ID NO: 194910 - RNA, 19 nt, Artificial Sequence
  Description of Artificial Sequence: Synthetic oligonucleotide
  Sense strand starting at position 1569 of SEQ ID NO: 2512
gcagcugaauaugugauuu

SEQ ID NO: 194911 - RNA, 19 nt, Artificial Sequence
  Description of Artificial Sequence: Synthetic oligonucleotide
  Antisense strand to SEQ ID NO: 194910
aaaucacauauucagcugc

SEQ ID NO: 194912 - RNA, 19 nt, Artificial Sequence
  Description of Artificial Sequence: Synthetic oligonucleotide
  Sense strand starting at position 2069 of SEQ ID NO: 2512
ccagucuagguccauuaga

SEQ ID NO: 194913 - RNA, 19 nt, Artificial Sequence
  Description of Artificial Sequence: Synthetic oligonucleotide
  Antisense strand to SEQ ID NO: 194912
ucuaauggaccuagacugg

SEQ ID NO: 194914 - RNA, 19 nt, Artificial Sequence
  Description of Artificial Sequence: Synthetic oligonucleotide
  Sense strand starting at position 2085 of SEQ ID NO: 2512
agaacugcuuuauuaaagu

SEQ ID NO: 194915 - RNA, 19 nt, Artificial Sequence
  Description of Artificial Sequence: Synthetic oligonucleotide
  Antisense strand to SEQ ID NO: 194914
acuuuaauaaagcaguucu

SEQ ID NO: 194916 - RNA, 19 nt, Artificial Sequence
  Description of Artificial Sequence: Synthetic oligonucleotide
  Sense strand starting at position 2127 of SEQ ID NO: 2512
ccaagcuuugguuaaccaa

SEQ ID NO: 194917 - RNA, 19 nt, Artificial Sequence
  Description of Artificial Sequence: Synthetic oligonucleotide
  Antisense strand to SEQ ID NO: 194916
uugguuaaccaaagcuugg

SEQ ID NO: 194918 - RNA, 19 nt, Artificial Sequence
  Description of Artificial Sequence: Synthetic oligonucleotide
  Sense strand starting at position 2161 of SEQ ID NO: 2512
caagcuuugggucaacaca

SEQ ID NO: 194919 - RNA, 19 nt, Artificial Sequence
  Description of Artificial Sequence: Synthetic oligonucleotide
  Antisense strand to SEQ ID NO: 194918
uguguugacccaaagcuug

SEQ ID NO: 194920 - RNA, 19 nt, Artificial Sequence
  Description of Artificial Sequence: Synthetic oligonucleotide
  Sense strand starting at position 2189 of SEQ ID NO: 2512
ucaggacucuuggcacaaa

SEQ ID NO: 194921 - RNA, 19 nt, Artificial Sequence
  Description of Artificial Sequence: Synthetic oligonucleotide
  Antisense strand to SEQ ID NO: 194920
uuugugccaagaguccuga

SEQ ID NO: 194922 - RNA, 19 nt, Artificial Sequence
  Description of Artificial Sequence: Synthetic oligonucleotide
  Sense strand starting at position 2290 of SEQ ID NO: 2512
ugacuuacagcaggucaaa

SEQ ID NO: 194923 - RNA, 19 nt, Artificial Sequence
  Description of Artificial Sequence: Synthetic oligonucleotide
  Antisense strand to SEQ ID NO: 194922
uuugaccugcuguaaguca

SEQ ID NO: 194924 - RNA, 19 nt, Artificial Sequence
  Description of Artificial Sequence: Synthetic oligonucleotide
  Sense strand starting at position 2527 of SEQ ID NO: 2512
auuuaacaguugucuuguu

SEQ ID NO: 194925 - RNA, 19 nt, Artificial Sequence
  Description of Artificial Sequence: Synthetic oligonucleotide
  Antisense strand to SEQ ID NO: 194924
aacaagacaacuguuaaau

SEQ ID NO: 194926 - RNA, 19 nt, Artificial Sequence
  Description of Artificial Sequence: Synthetic oligonucleotide
  Sense strand starting at position 2843 of SEQ ID NO: 2512
ggagaacugcuauaugcug

SEQ ID NO: 194927 - RNA, 19 nt, Artificial Sequence
  Description of Artificial Sequence: Synthetic oligonucleotide
  Antisense strand to SEQ ID NO: 194926
cagcauauagcaguucucc

SEQ ID NO: 194928 - RNA, 19 nt, Artificial Sequence
  Description of Artificial Sequence: Synthetic oligonucleotide
  Sense strand starting at position 2852 of SEQ ID NO: 2512
cuauaugcugacgauguaa

SEQ ID NO: 194929 - RNA, 19 nt, Artificial Sequence
  Description of Artificial Sequence: Synthetic oligonucleotide
  Antisense strand to SEQ ID NO: 194928
uuacaucgucagcauauag

SEQ ID NO: 194930 - RNA, 19 nt, Artificial Sequence
  Description of Artificial Sequence: Synthetic oligonucleotide
  Sense strand starting at position 2880 of SEQ ID NO: 2512
agagaaagaugauacauau

SEQ ID NO: 194931 - RNA, 19 nt, Artificial Sequence
  Description of Artificial Sequence: Synthetic oligonucleotide
  Antisense strand to SEQ ID NO: 194930
auauguaucaucuuucucu

SEQ ID NO: 194932 - RNA, 19 nt, Artificial Sequence
  Description of Artificial Sequence: Synthetic oligonucleotide
  Sense strand starting at position 2941 of SEQ ID NO: 2512
gcauuaucagagcagucag

SEQ ID NO: 194933 - RNA, 19 nt, Artificial Sequence
  Description of Artificial Sequence: Synthetic oligonucleotide
  Antisense strand to SEQ ID NO: 194932
cugacugcucugauaaugc

SEQ ID NO: 194934 - RNA, 19 nt, Artificial Sequence
  Description of Artificial Sequence: Synthetic oligonucleotide
  Sense strand starting at position 2961 of SEQ ID NO: 2512
gagggcuuccaauauagca

SEQ ID NO: 194935 - RNA, 19 nt, Artificial Sequence
  Description of Artificial Sequence: Synthetic oligonucleotide
  Antisense strand to SEQ ID NO: 194934
ugcuauauuggaagcccuc

SEQ ID NO: 194936 - RNA, 19 nt, Artificial Sequence
  Description of Artificial Sequence: Synthetic oligonucleotide
  Sense strand starting at position 2996 of SEQ ID NO: 2512
uggucaugccucuaaagag

SEQ ID NO: 194937 - RNA, 19 nt, Artificial Sequence
  Description of Artificial Sequence: Synthetic oligonucleotide
  Antisense strand to SEQ ID NO: 194936
cucuuuagaggcaugacca

SEQ ID NO: 194938 - RNA, 19 nt, Artificial Sequence
  Description of Artificial Sequence: Synthetic oligonucleotide
  Sense strand starting at position 3288 of SEQ ID NO: 2512
cugaaugaguaagccuuaa

SEQ ID NO: 194939 - RNA, 19 nt, Artificial Sequence
  Description of Artificial Sequence: Synthetic oligonucleotide
  Antisense strand to SEQ ID NO: 194938
uuaaggcuuacucauucag

SEQ ID NO: 194940 - RNA, 19 nt, Artificial Sequence
  Description of Artificial Sequence: Synthetic oligonucleotide
  Sense strand starting at position 3292 of SEQ ID NO: 2512
augaguaagccuuaaacua

SEQ ID NO: 194941 - RNA, 19 nt, Artificial Sequence
  Description of Artificial Sequence: Synthetic oligonucleotide
  Antisense strand to SEQ ID NO: 194940
uaguuuaaggcuuacucau

SEQ ID NO: 194942 - RNA, 19 nt, Artificial Sequence
  Description of Artificial Sequence: Synthetic oligonucleotide
  Sense strand starting at position 3324 of SEQ ID NO: 2512
ugcuaauacugaguaagua

SEQ ID NO: 194943 - RNA, 19 nt, Artificial Sequence
  Description of Artificial Sequence: Synthetic oligonucleotide
  Antisense strand to SEQ ID NO: 194942
uacuuacucaguauuagca

SEQ ID NO: 194944 - RNA, 19 nt, Artificial Sequence
  Description of Artificial Sequence: Synthetic oligonucleotide
  Sense strand starting at position 3325 of SEQ ID NO: 2512
gcuaauacugaguaaguaa

SEQ ID NO: 194945 - RNA, 19 nt, Artificial Sequence
  Description of Artificial Sequence: Synthetic oligonucleotide
  Antisense strand to SEQ ID NO: 194944
uuacuuacucaguauuagc

SEQ ID NO: 194946 - RNA, 19 nt, Artificial Sequence
  Description of Artificial Sequence: Synthetic oligonucleotide
  Sense strand starting at position 3376 of SEQ ID NO: 2512
caggcacugguccaugaau

SEQ ID NO: 194947 - RNA, 19 nt, Artificial Sequence
  Description of Artificial Sequence: Synthetic oligonucleotide
  Antisense strand to SEQ ID NO: 194946
auucauggaccagugccug

SEQ ID NO: 194948 - RNA, 19 nt, Artificial Sequence
  Description of Artificial Sequence: Synthetic oligonucleotide
  Sense strand starting at position 3512 of SEQ ID NO: 2512
cacaauagugugugggaga

SEQ ID NO: 194949 - RNA, 19 nt, Artificial Sequence
  Description of Artificial Sequence: Synthetic oligonucleotide
  Antisense strand to SEQ ID NO: 194948
ucucccacacacuauugug

SEQ ID NO: 194950 - RNA, 19 nt, Artificial Sequence
  Description of Artificial Sequence: Synthetic oligonucleotide
  Sense strand starting at position 3608 of SEQ ID NO: 2512
auaauaauaugggcuugua

SEQ ID NO: 194951 - RNA, 19 nt, Artificial Sequence
  Description of Artificial Sequence: Synthetic oligonucleotide
  Antisense strand to SEQ ID NO: 194950
uacaagcccauauuauuau

SEQ ID NO: 194952 - RNA, 19 nt, Artificial Sequence
  Description of Artificial Sequence: Synthetic oligonucleotide
  Sense strand starting at position 3611 of SEQ ID NO: 2512
auaauaugggcuuguacaa

SEQ ID NO: 194953 - RNA, 19 nt, Artificial Sequence
  Description of Artificial Sequence: Synthetic oligonucleotide
  Antisense strand to SEQ ID NO: 194952
uuguacaagcccauauuau

SEQ ID NO: 194954 - RNA, 19 nt, Artificial Sequence
  Description of Artificial Sequence: Synthetic oligonucleotide
  Sense strand starting at position 3898 of SEQ ID NO: 2512
uagaauaccugagucugga

SEQ ID NO: 194955 - RNA, 19 nt, Artificial Sequence
  Description of Artificial Sequence: Synthetic oligonucleotide
  Antisense strand to SEQ ID NO: 194954
uccagacucagguauucua

SEQ ID NO: 194956 - RNA, 19 nt, Artificial Sequence
  Description of Artificial Sequence: Synthetic oligonucleotide
  Sense strand starting at position 342 of SEQ ID NO: 2513
acugauauuucccguauua

SEQ ID NO: 194957 - RNA, 19 nt, Artificial Sequence
  Description of Artificial Sequence: Synthetic oligonucleotide
  Antisense strand to SEQ ID NO: 194956
uaauacgggaaauaucagu

SEQ ID NO: 194958 - RNA, 19 nt, Artificial Sequence
  Description of Artificial Sequence: Synthetic oligonucleotide
  Sense strand starting at position 477 of SEQ ID NO: 2513
agaguagcaucguucuaua

SEQ ID NO: 194959 - RNA, 19 nt, Artificial Sequence
  Description of Artificial Sequence: Synthetic oligonucleotide
  Antisense strand to SEQ ID NO: 194958
uauagaacgaugcuacucu

SEQ ID NO: 194960 - RNA, 19 nt, Artificial Sequence
  Description of Artificial Sequence: Synthetic oligonucleotide
  Sense strand starting at position 507 of SEQ ID NO: 2513
cccuuuacugucugucuua

SEQ ID NO: 194961 - RNA, 19 nt, Artificial Sequence
  Description of Artificial Sequence: Synthetic oligonucleotide
  Antisense strand to SEQ ID NO: 194960
uaagacagacaguaaaggg

SEQ ID NO: 194962 - RNA, 19 nt, Artificial Sequence
  Description of Artificial Sequence: Synthetic oligonucleotide
  Sense strand starting at position 508 of SEQ ID NO: 2513
ccuuuacugucugucuuaa

SEQ ID NO: 194963 - RNA, 19 nt, Artificial Sequence
  Description of Artificial Sequence: Synthetic oligonucleotide
  Antisense strand to SEQ ID NO: 194962
uuaagacagacaguaaagg

SEQ ID NO: 194964 - RNA, 19 nt, Artificial Sequence
  Description of Artificial Sequence: Synthetic oligonucleotide
  Sense strand starting at position 586 of SEQ ID NO: 2513
ucauguggucucuggaaac

SEQ ID NO: 194965 - RNA, 19 nt, Artificial Sequence
  Description of Artificial Sequence: Synthetic oligonucleotide
  Antisense strand to SEQ ID NO: 194964
guuuccagagaccacauga

SEQ ID NO: 194966 - RNA, 19 nt, Artificial Sequence
  Description of Artificial Sequence: Synthetic oligonucleotide
  Sense strand starting at position 599 of SEQ ID NO: 2513
ggaaacugccacuguacau

SEQ ID NO: 194967 - RNA, 19 nt, Artificial Sequence
  Description of Artificial Sequence: Synthetic oligonucleotide
  Antisense strand to SEQ ID NO: 194966
auguacaguggcaguuucc

SEQ ID NO: 194968 - RNA, 19 nt, Artificial Sequence
  Description of Artificial Sequence: Synthetic oligonucleotide
  Sense strand starting at position 612 of SEQ ID NO: 2513
guacauuagugagagaaug

SEQ ID NO: 194969 - RNA, 19 nt, Artificial Sequence
  Description of Artificial Sequence: Synthetic oligonucleotide
  Antisense strand to SEQ ID NO: 194968
cauucucucacuaauguac

SEQ ID NO: 194970 - RNA, 19 nt, Artificial Sequence
  Description of Artificial Sequence: Synthetic oligonucleotide
  Sense strand starting at position 683 of SEQ ID NO: 2513
ucaugaaccgccugaaaug

SEQ ID NO: 194971 - RNA, 19 nt, Artificial Sequence
  Description of Artificial Sequence: Synthetic oligonucleotide
  Antisense strand to SEQ ID NO: 194970
cauuucaggcgguucauga

SEQ ID NO: 194972 - RNA, 19 nt, Artificial Sequence
  Description of Artificial Sequence: Synthetic oligonucleotide
  Sense strand starting at position 779 of SEQ ID NO: 2513
aagagaagucggcgagaca

SEQ ID NO: 194973 - RNA, 19 nt, Artificial Sequence
  Description of Artificial Sequence: Synthetic oligonucleotide
  Antisense strand to SEQ ID NO: 194972
ugucucgccgacuucucuu

SEQ ID NO: 194974 - RNA, 19 nt, Artificial Sequence
  Description of Artificial Sequence: Synthetic oligonucleotide
  Sense strand starting at position 788 of SEQ ID NO: 2513
cggcgagacacugauggau

SEQ ID NO: 194975 - RNA, 19 nt, Artificial Sequence
  Description of Artificial Sequence: Synthetic oligonucleotide
  Antisense strand to SEQ ID NO: 194974
auccaucagugucucgccg

SEQ ID NO: 194976 - RNA, 19 nt, Artificial Sequence
  Description of Artificial Sequence: Synthetic oligonucleotide
  Sense strand starting at position 952 of SEQ ID NO: 2513
uaaauuaaacgagggcuaa

SEQ ID NO: 194977 - RNA, 19 nt, Artificial Sequence
  Description of Artificial Sequence: Synthetic oligonucleotide
  Antisense strand to SEQ ID NO: 194976
uuagcccucguuuaauuua

SEQ ID NO: 194978 - RNA, 19 nt, Artificial Sequence
  Description of Artificial Sequence: Synthetic oligonucleotide
  Sense strand starting at position 973 of SEQ ID NO: 2513
gggcauggcuaaccaauua

SEQ ID NO: 194979 - RNA, 19 nt, Artificial Sequence
  Description of Artificial Sequence: Synthetic oligonucleotide
  Antisense strand to SEQ ID NO: 194978
uaauugguuagccaugccc

SEQ ID NO: 194980 - RNA, 19 nt, Artificial Sequence
  Description of Artificial Sequence: Synthetic oligonucleotide
  Sense strand starting at position 1026 of SEQ ID NO: 2513
ggccuuucuuaagcuagaa

SEQ ID NO: 194981 - RNA, 19 nt, Artificial Sequence
  Description of Artificial Sequence: Synthetic oligonucleotide
  Antisense strand to SEQ ID NO: 194980
uucuagcuuaagaaaggcc

SEQ ID NO: 194982 - RNA, 19 nt, Artificial Sequence
  Description of Artificial Sequence: Synthetic oligonucleotide
  Sense strand starting at position 1078 of SEQ ID NO: 2513
cugcuugaaauggguauga

SEQ ID NO: 194983 - RNA, 19 nt, Artificial Sequence
  Description of Artificial Sequence: Synthetic oligonucleotide
  Antisense strand to SEQ ID NO: 194982
ucauacccauuucaagcag

SEQ ID NO: 194984 - RNA, 19 nt, Artificial Sequence
  Description of Artificial Sequence: Synthetic oligonucleotide
  Sense strand starting at position 1138 of SEQ ID NO: 2513
cugacuguccggugacuga

SEQ ID NO: 194985 - RNA, 19 nt, Artificial Sequence
  Description of Artificial Sequence: Synthetic oligonucleotide
  Antisense strand to SEQ ID NO: 194984
ucagucaccggacagucag

SEQ ID NO: 194986 - RNA, 19 nt, Artificial Sequence
  Description of Artificial Sequence: Synthetic oligonucleotide
  Sense strand starting at position 1240 of SEQ ID NO: 2513
ggaccugaguucuucuuau

SEQ ID NO: 194987 - RNA, 19 nt, Artificial Sequence
  Description of Artificial Sequence: Synthetic oligonucleotide
  Antisense strand to SEQ ID NO: 194986
auaagaagaacucaggucc

SEQ ID NO: 194988 - RNA, 19 nt, Artificial Sequence
  Description of Artificial Sequence: Synthetic oligonucleotide
  Sense strand starting at position 2190 of SEQ ID NO: 2513
guuaucaacugucccucaa

SEQ ID NO: 194989 - RNA, 19 nt, Artificial Sequence
  Description of Artificial Sequence: Synthetic oligonucleotide
  Antisense strand to SEQ ID NO: 194988
uugagggacaguugauaac

SEQ ID NO: 194990 - RNA, 19 nt, Artificial Sequence
  Description of Artificial Sequence: Synthetic oligonucleotide
  Sense strand starting at position 2206 of SEQ ID NO: 2513
caagauuugugagccguaa

SEQ ID NO: 194991 - RNA, 19 nt, Artificial Sequence
  Description of Artificial Sequence: Synthetic oligonucleotide
  Antisense strand to SEQ ID NO: 194990
uuacggcucacaaaucuug

SEQ ID NO: 194992 - RNA, 19 nt, Artificial Sequence
  Description of Artificial Sequence: Synthetic oligonucleotide
  Sense strand starting at position 2208 of SEQ ID NO: 2513
agauuugugagccguaaga

SEQ ID NO: 194993 - RNA, 19 nt, Artificial Sequence
  Description of Artificial Sequence: Synthetic oligonucleotide
  Antisense strand to SEQ ID NO: 194992
ucuuacggcucacaaaucu

SEQ ID NO: 194994 - RNA, 19 nt, Artificial Sequence
  Description of Artificial Sequence: Synthetic oligonucleotide
  Sense strand starting at position 2419 of SEQ ID NO: 2513
ugggcauuacugugaacuc

SEQ ID NO: 194995 - RNA, 19 nt, Artificial Sequence
  Description of Artificial Sequence: Synthetic oligonucleotide
  Antisense strand to SEQ ID NO: 194994
gaguucacaguaaugccca

SEQ ID NO: 194996 - RNA, 19 nt, Artificial Sequence
  Description of Artificial Sequence: Synthetic oligonucleotide
  Sense strand starting at position 2435 of SEQ ID NO: 2513
cucuaauaucacgguaauc

SEQ ID NO: 194997 - RNA, 19 nt, Artificial Sequence
  Description of Artificial Sequence: Synthetic oligonucleotide
  Antisense strand to SEQ ID NO: 194996
gauuaccgugauauuagag

SEQ ID NO: 194998 - RNA, 19 nt, Artificial Sequence
  Description of Artificial Sequence: Synthetic oligonucleotide
  Sense strand starting at position 2437 of SEQ ID NO: 2513
cuaauaucacgguaaucua

SEQ ID NO: 194999 - RNA, 19 nt, Artificial Sequence
  Description of Artificial Sequence: Synthetic oligonucleotide
  Antisense strand to SEQ ID NO: 194998
uagauuaccgugauauuag

SEQ ID NO: 195000 - RNA, 19 nt, Artificial Sequence
  Description of Artificial Sequence: Synthetic oligonucleotide
  Sense strand starting at position 2562 of SEQ ID NO: 2513
uuuguuguggcuggaggaa

SEQ ID NO: 195001 - RNA, 19 nt, Artificial Sequence
  Description of Artificial Sequence: Synthetic oligonucleotide
  Antisense strand to SEQ ID NO: 195000
uuccuccagccacaacaaa

SEQ ID NO: 195002 - RNA, 19 nt, Artificial Sequence
  Description of Artificial Sequence: Synthetic oligonucleotide
  Sense strand starting at position 2586 of SEQ ID NO: 2513
guuauaaccuaaguggaaa

SEQ ID NO: 195003 - RNA, 19 nt, Artificial Sequence
  Description of Artificial Sequence: Synthetic oligonucleotide
  Antisense strand to SEQ ID NO: 195002
uuuccacuuagguuauaac

SEQ ID NO: 195004 - RNA, 19 nt, Artificial Sequence
  Description of Artificial Sequence: Synthetic oligonucleotide
  Sense strand starting at position 2633 of SEQ ID NO: 2513
ucauauaccuuguugauuc

SEQ ID NO: 195005 - RNA, 19 nt, Artificial Sequence
  Description of Artificial Sequence: Synthetic oligonucleotide
  Antisense strand to SEQ ID NO: 195004
gaaucaacaagguauauga

SEQ ID NO: 195006 - RNA, 19 nt, Artificial Sequence
  Description of Artificial Sequence: Synthetic oligonucleotide
  Sense strand starting at position 2730 of SEQ ID NO: 2513
ugucgugagguuaguggau

SEQ ID NO: 195007 - RNA, 19 nt, Artificial Sequence
  Description of Artificial Sequence: Synthetic oligonucleotide
  Antisense strand to SEQ ID NO: 195006
auccacuaaccucacgaca

SEQ ID NO: 195008 - RNA, 19 nt, Artificial Sequence
  Description of Artificial Sequence: Synthetic oligonucleotide
  Sense strand starting at position 2743 of SEQ ID NO: 2513
guggaugccaucuguauuc

SEQ ID NO: 195009 - RNA, 19 nt, Artificial Sequence
  Description of Artificial Sequence: Synthetic oligonucleotide
  Antisense strand to SEQ ID NO: 195008
gaauacagauggcauccac

SEQ ID NO: 195010 - RNA, 19 nt, Artificial Sequence
  Description of Artificial Sequence: Synthetic oligonucleotide
  Sense strand starting at position 2754 of SEQ ID NO: 2513
cuguauucguuuccaguaa

SEQ ID NO: 195011 - RNA, 19 nt, Artificial Sequence
  Description of Artificial Sequence: Synthetic oligonucleotide
  Antisense strand to SEQ ID NO: 195010
uuacuggaaacgaauacag

SEQ ID NO: 195012 - RNA, 19 nt, Artificial Sequence
  Description of Artificial Sequence: Synthetic oligonucleotide
  Sense strand starting at position 2758 of SEQ ID NO: 2513
auucguuuccaguaacaaa

SEQ ID NO: 195013 - RNA, 19 nt, Artificial Sequence
  Description of Artificial Sequence: Synthetic oligonucleotide
  Antisense strand to SEQ ID NO: 195012
uuuguuacuggaaacgaau

SEQ ID NO: 195014 - RNA, 19 nt, Artificial Sequence
  Description of Artificial Sequence: Synthetic oligonucleotide
  Sense strand starting at position 2783 of SEQ ID NO: 2513
caaagugaguggcuuaaga

SEQ ID NO: 195015 - RNA, 19 nt, Artificial Sequence
  Description of Artificial Sequence: Synthetic oligonucleotide
  Antisense strand to SEQ ID NO: 195014
ucuuaagccacucacuuug

SEQ ID NO: 195016 - RNA, 19 nt, Artificial Sequence
  Description of Artificial Sequence: Synthetic oligonucleotide
  Sense strand starting at position 2785 of SEQ ID NO: 2513
aagugaguggcuuaagaua

SEQ ID NO: 195017 - RNA, 19 nt, Artificial Sequence
  Description of Artificial Sequence: Synthetic oligonucleotide
  Antisense strand to SEQ ID NO: 195016
uaucuuaagccacucacuu

SEQ ID NO: 195018 - RNA, 19 nt, Artificial Sequence
  Description of Artificial Sequence: Synthetic oligonucleotide
  Sense strand starting at position 3084 of SEQ ID NO: 2513
ggaauaauccauggucaau

SEQ ID NO: 195019 - RNA, 19 nt, Artificial Sequence
  Description of Artificial Sequence: Synthetic oligonucleotide
  Antisense strand to SEQ ID NO: 195018
auugaccauggauuauucc

SEQ ID NO: 195020 - RNA, 19 nt, Artificial Sequence
  Description of Artificial Sequence: Synthetic oligonucleotide
  Sense strand starting at position 3090 of SEQ ID NO: 2513
auccauggucaaugggaau

SEQ ID NO: 195021 - RNA, 19 nt, Artificial Sequence
  Description of Artificial Sequence: Synthetic oligonucleotide
  Antisense strand to SEQ ID NO: 195020
auucccauugaccauggau

SEQ ID NO: 195022 - RNA, 19 nt, Artificial Sequence
  Description of Artificial Sequence: Synthetic oligonucleotide
  Sense strand starting at position 3093 of SEQ ID NO: 2513
cauggucaaugggaauaau

SEQ ID NO: 195023 - RNA, 19 nt, Artificial Sequence
  Description of Artificial Sequence: Synthetic oligonucleotide
  Antisense strand to SEQ ID NO: 195022
auuauucccauugaccaug

SEQ ID NO: 195024 - RNA, 19 nt, Artificial Sequence
  Description of Artificial Sequence: Synthetic oligonucleotide
  Sense strand starting at position 3244 of SEQ ID NO: 2513
ugcagcugcgaguaauaau

SEQ ID NO: 195025 - RNA, 19 nt, Artificial Sequence
  Description of Artificial Sequence: Synthetic oligonucleotide
  Antisense strand to SEQ ID NO: 195024
auuauuacucgcagcugca

SEQ ID NO: 195026 - RNA, 19 nt, Artificial Sequence
  Description of Artificial Sequence: Synthetic oligonucleotide
  Sense strand starting at position 3335 of SEQ ID NO: 2513
gggugaauuugauggcucu

SEQ ID NO: 195027 - RNA, 19 nt, Artificial Sequence
  Description of Artificial Sequence: Synthetic oligonucleotide
  Antisense strand to SEQ ID NO: 195026
agagccaucaaauucaccc

SEQ ID NO: 195028 - RNA, 19 nt, Artificial Sequence
  Description of Artificial Sequence: Synthetic oligonucleotide
  Sense strand starting at position 3408 of SEQ ID NO: 2513
cucuauauguaaucguuac

SEQ ID NO: 195029 - RNA, 19 nt, Artificial Sequence
  Description of Artificial Sequence: Synthetic oligonucleotide
  Antisense strand to SEQ ID NO: 195028
guaacgauuacauauagag

SEQ ID NO: 195030 - RNA, 19 nt, Artificial Sequence
  Description of Artificial Sequence: Synthetic oligonucleotide
  Sense strand starting at position 3412 of SEQ ID NO: 2513
auauguaaucguuaccuuu

SEQ ID NO: 195031 - RNA, 19 nt, Artificial Sequence
  Description of Artificial Sequence: Synthetic oligonucleotide
  Antisense strand to SEQ ID NO: 195030
aaagguaacgauuacauau

SEQ ID NO: 195032 - RNA, 19 nt, Artificial Sequence
  Description of Artificial Sequence: Synthetic oligonucleotide
  Sense strand starting at position 3676 of SEQ ID NO: 2513
acagaacagccaugauugu

SEQ ID NO: 195033 - RNA, 19 nt, Artificial Sequence
  Description of Artificial Sequence: Synthetic oligonucleotide
  Antisense strand to SEQ ID NO: 195032
acaaucauggcuguucugu

SEQ ID NO: 195034 - RNA, 19 nt, Artificial Sequence
  Description of Artificial Sequence: Synthetic oligonucleotide
  Sense strand starting at position 3850 of SEQ ID NO: 2513
agcagagcuagugacuauu

SEQ ID NO: 195035 - RNA, 19 nt, Artificial Sequence
  Description of Artificial Sequence: Synthetic oligonucleotide
  Antisense strand to SEQ ID NO: 195034
aauagucacuagcucugcu

SEQ ID NO: 195036 - RNA, 19 nt, Artificial Sequence
  Description of Artificial Sequence: Synthetic oligonucleotide
  Sense strand starting at position 75 of SEQ ID NO: 2514
aacuuauaccgagguuacu

SEQ ID NO: 195037 - RNA, 19 nt, Artificial Sequence
  Description of Artificial Sequence: Synthetic oligonucleotide
  Antisense strand to SEQ ID NO: 195036
aguaaccucgguauaaguu

SEQ ID NO: 195038 - RNA, 19 nt, Artificial Sequence
  Description of Artificial Sequence: Synthetic oligonucleotide
  Sense strand starting at position 147 of SEQ ID NO: 2514
agaaauuccugaucgucug

SEQ ID NO: 195039 - RNA, 19 nt, Artificial Sequence
  Description of Artificial Sequence: Synthetic oligonucleotide
  Antisense strand to SEQ ID NO: 195038
cagacgaucaggaauuucu

SEQ ID NO: 195040 - RNA, 19 nt, Artificial Sequence
  Description of Artificial Sequence: Synthetic oligonucleotide
  Sense strand starting at position 258 of SEQ ID NO: 2514
gcagacacauguuccaauu

SEQ ID NO: 195041 - RNA, 19 nt, Artificial Sequence
  Description of Artificial Sequence: Synthetic oligonucleotide
  Antisense strand to SEQ ID NO: 195040
aauuggaacaugugucugc

SEQ ID NO: 195042 - RNA, 19 nt, Artificial Sequence
  Description of Artificial Sequence: Synthetic oligonucleotide
  Sense strand starting at position 356 of SEQ ID NO: 2514
gggacuacuguauaugcaa

SEQ ID NO: 195043 - RNA, 19 nt, Artificial Sequence
  Description of Artificial Sequence: Synthetic oligonucleotide
  Antisense strand to SEQ ID NO: 195042
uugcauauacaguaguccc

SEQ ID NO: 195044 - RNA, 19 nt, Artificial Sequence
  Description of Artificial Sequence: Synthetic oligonucleotide
  Sense strand starting at position 363 of SEQ ID NO: 2514
cuguauaugcaaggauaca

SEQ ID NO: 195045 - RNA, 19 nt, Artificial Sequence
  Description of Artificial Sequence: Synthetic oligonucleotide
  Antisense strand to SEQ ID NO: 195044
uguauccuugcauauacag

SEQ ID NO: 195046 - RNA, 19 nt, Artificial Sequence
  Description of Artificial Sequence: Synthetic oligonucleotide
  Sense strand starting at position 407 of SEQ ID NO: 2514
gcauuaugccagcauaauc

SEQ ID NO: 195047 - RNA, 19 nt, Artificial Sequence
  Description of Artificial Sequence: Synthetic oligonucleotide
  Antisense strand to SEQ ID NO: 195046
gauuaugcuggcauaaugc

SEQ ID NO: 195048 - RNA, 19 nt, Artificial Sequence
  Description of Artificial Sequence: Synthetic oligonucleotide
  Sense strand starting at position 554 of SEQ ID NO: 2514
gcccacuaccaaugugaaa

SEQ ID NO: 195049 - RNA, 19 nt, Artificial Sequence
  Description of Artificial Sequence: Synthetic oligonucleotide
  Antisense strand to SEQ ID NO: 195048
uuucacauugguagugggc

SEQ ID NO: 195050 - RNA, 19 nt, Artificial Sequence
  Description of Artificial Sequence: Synthetic oligonucleotide
  Sense strand starting at position 623 of SEQ ID NO: 2514
cuagucagcguuuaucaua

SEQ ID NO: 195051 - RNA, 19 nt, Artificial Sequence
  Description of Artificial Sequence: Synthetic oligonucleotide
  Antisense strand to SEQ ID NO: 195050
uaugauaaacgcugacuag

SEQ ID NO: 195052 - RNA, 19 nt, Artificial Sequence
  Description of Artificial Sequence: Synthetic oligonucleotide
  Sense strand starting at position 682 of SEQ ID NO: 2514
aguuauugccaucgacaaa

SEQ ID NO: 195053 - RNA, 19 nt, Artificial Sequence
  Description of Artificial Sequence: Synthetic oligonucleotide
  Antisense strand to SEQ ID NO: 195052
uuugucgauggcaauaacu

SEQ ID NO: 195054 - RNA, 19 nt, Artificial Sequence
  Description of Artificial Sequence: Synthetic oligonucleotide
  Sense strand starting at position 888 of SEQ ID NO: 2514
aggaaauauuuagguuuga

SEQ ID NO: 195055 - RNA, 19 nt, Artificial Sequence
  Description of Artificial Sequence: Synthetic oligonucleotide
  Antisense strand to SEQ ID NO: 195054
ucaaaccuaaauauuuccu

SEQ ID NO: 195056 - RNA, 19 nt, Artificial Sequence
  Description of Artificial Sequence: Synthetic oligonucleotide
  Sense strand starting at position 967 of SEQ ID NO: 2514
ucaguaagcaugugaagug

SEQ ID NO: 195057 - RNA, 19 nt, Artificial Sequence
  Description of Artificial Sequence: Synthetic oligonucleotide
  Antisense strand to SEQ ID NO: 195056
cacuucacaugcuuacuga

SEQ ID NO: 195058 - RNA, 19 nt, Artificial Sequence
  Description of Artificial Sequence: Synthetic oligonucleotide
  Sense strand starting at position 1122 of SEQ ID NO: 2514
ccggacuacugacaauuua

SEQ ID NO: 195059 - RNA, 19 nt, Artificial Sequence
  Description of Artificial Sequence: Synthetic oligonucleotide
  Antisense strand to SEQ ID NO: 195058
uaaauugucaguaguccgg

SEQ ID NO: 195060 - RNA, 19 nt, Artificial Sequence
  Description of Artificial Sequence: Synthetic oligonucleotide
  Sense strand starting at position 1166 of SEQ ID NO: 2514
cgaggaauauaaccuugua

SEQ ID NO: 195061 - RNA, 19 nt, Artificial Sequence
  Description of Artificial Sequence: Synthetic oligonucleotide
  Antisense strand to SEQ ID NO: 195060
uacaagguuauauuccucg

SEQ ID NO: 195062 - RNA, 19 nt, Artificial Sequence
  Description of Artificial Sequence: Synthetic oligonucleotide
  Sense strand starting at position 1169 of SEQ ID NO: 2514
ggaauauaaccuuguagug

SEQ ID NO: 195063 - RNA, 19 nt, Artificial Sequence
  Description of Artificial Sequence: Synthetic oligonucleotide
  Antisense strand to SEQ ID NO: 195062
cacuacaagguuauauucc

SEQ ID NO: 195064 - RNA, 19 nt, Artificial Sequence
  Description of Artificial Sequence: Synthetic oligonucleotide
  Sense strand starting at position 1179 of SEQ ID NO: 2514
cuuguagugcuacaccaaa

SEQ ID NO: 195065 - RNA, 19 nt, Artificial Sequence
  Description of Artificial Sequence: Synthetic oligonucleotide
  Antisense strand to SEQ ID NO: 195064
uuugguguagcacuacaag

SEQ ID NO: 195066 - RNA, 19 nt, Artificial Sequence
  Description of Artificial Sequence: Synthetic oligonucleotide
  Sense strand starting at position 1230 of SEQ ID NO: 2514
uuauguuugaaguaaggca

SEQ ID NO: 195067 - RNA, 19 nt, Artificial Sequence
  Description of Artificial Sequence: Synthetic oligonucleotide
  Antisense strand to SEQ ID NO: 195066
ugccuuacuucaaacauaa

SEQ ID NO: 195068 - RNA, 19 nt, Artificial Sequence
  Description of Artificial Sequence: Synthetic oligonucleotide
  Sense strand starting at position 1244 of SEQ ID NO: 2514
aggcaagcuaaguguugaa

SEQ ID NO: 195069 - RNA, 19 nt, Artificial Sequence
  Description of Artificial Sequence: Synthetic oligonucleotide
  Antisense strand to SEQ ID NO: 195068
uucaacacuuagcuugccu

SEQ ID NO: 195070 - RNA, 19 nt, Artificial Sequence
  Description of Artificial Sequence: Synthetic oligonucleotide
  Sense strand starting at position 1248 of SEQ ID NO: 2514
aagcuaaguguugaaauuc

SEQ ID NO: 195071 - RNA, 19 nt, Artificial Sequence
  Description of Artificial Sequence: Synthetic oligonucleotide
  Antisense strand to SEQ ID NO: 195070
gaauuucaacacuuagcuu

SEQ ID NO: 195072 - RNA, 19 nt, Artificial Sequence
  Description of Artificial Sequence: Synthetic oligonucleotide
  Sense strand starting at position 1257 of SEQ ID NO: 2514
guugaaauucuaggaguga

SEQ ID NO: 195073 - RNA, 19 nt, Artificial Sequence
  Description of Artificial Sequence: Synthetic oligonucleotide
  Antisense strand to SEQ ID NO: 195072
ucacuccuagaauuucaac

SEQ ID NO: 195074 - RNA, 19 nt, Artificial Sequence
  Description of Artificial Sequence: Synthetic oligonucleotide
  Sense strand starting at position 1258 of SEQ ID NO: 2514
uugaaauucuaggagugaa

SEQ ID NO: 195075 - RNA, 19 nt, Artificial Sequence
  Description of Artificial Sequence: Synthetic oligonucleotide
  Antisense strand to SEQ ID NO: 195074
uucacuccuagaauuucaa

SEQ ID NO: 195076 - RNA, 19 nt, Artificial Sequence
  Description of Artificial Sequence: Synthetic oligonucleotide
  Sense strand starting at position 1565 of SEQ ID NO: 2514
ggauucuaguagucgcaaa

SEQ ID NO: 195077 - RNA, 19 nt, Artificial Sequence
  Description of Artificial Sequence: Synthetic oligonucleotide
  Antisense strand to SEQ ID NO: 195076
uuugcgacuacuagaaucc

SEQ ID NO: 195078 - RNA, 19 nt, Artificial Sequence
  Description of Artificial Sequence: Synthetic oligonucleotide
  Sense strand starting at position 1566 of SEQ ID NO: 2514
gauucuaguagucgcaaag

SEQ ID NO: 195079 - RNA, 19 nt, Artificial Sequence
  Description of Artificial Sequence: Synthetic oligonucleotide
  Antisense strand to SEQ ID NO: 195078
cuuugcgacuacuagaauc

SEQ ID NO: 195080 - RNA, 19 nt, Artificial Sequence
  Description of Artificial Sequence: Synthetic oligonucleotide
  Sense strand starting at position 1572 of SEQ ID NO: 2514
aguagucgcaaagaaagua

SEQ ID NO: 195081 - RNA, 19 nt, Artificial Sequence
  Description of Artificial Sequence: Synthetic oligonucleotide
  Antisense strand to SEQ ID NO: 195080
uacuuucuuugcgacuacu

SEQ ID NO: 195082 - RNA, 19 nt, Artificial Sequence
  Description of Artificial Sequence: Synthetic oligonucleotide
  Sense strand starting at position 1584 of SEQ ID NO: 2514
gaaaguaccuuggcuugua

SEQ ID NO: 195083 - RNA, 19 nt, Artificial Sequence
  Description of Artificial Sequence: Synthetic oligonucleotide
  Antisense strand to SEQ ID NO: 195082
uacaagccaagguacuuuc

SEQ ID NO: 195084 - RNA, 19 nt, Artificial Sequence
  Description of Artificial Sequence: Synthetic oligonucleotide
  Sense strand starting at position 2491 of SEQ ID NO: 2514
ugucguucgaguucgcaua

SEQ ID NO: 195085 - RNA, 19 nt, Artificial Sequence
  Description of Artificial Sequence: Synthetic oligonucleotide
  Antisense strand to SEQ ID NO: 195084
uaugcgaacucgaacgaca

SEQ ID NO: 195086 - RNA, 19 nt, Artificial Sequence
  Description of Artificial Sequence: Synthetic oligonucleotide
  Sense strand starting at position 2991 of SEQ ID NO: 2514
cuaggucgcgcgucuguua

SEQ ID NO: 195087 - RNA, 19 nt, Artificial Sequence
  Description of Artificial Sequence: Synthetic oligonucleotide
  Antisense strand to SEQ ID NO: 195086
uaacagacgcgcgaccuag

SEQ ID NO: 195088 - RNA, 19 nt, Artificial Sequence
  Description of Artificial Sequence: Synthetic oligonucleotide
  Sense strand starting at position 3119 of SEQ ID NO: 2514
cgaaguuuggaaugaugac

SEQ ID NO: 195089 - RNA, 19 nt, Artificial Sequence
  Description of Artificial Sequence: Synthetic oligonucleotide
  Antisense strand to SEQ ID NO: 195088
gucaucauuccaaacuucg

SEQ ID NO: 195090 - RNA, 19 nt, Artificial Sequence
  Description of Artificial Sequence: Synthetic oligonucleotide
  Sense strand starting at position 3206 of SEQ ID NO: 2514
acagaagcgucucugaagu

SEQ ID NO: 195091 - RNA, 19 nt, Artificial Sequence
  Description of Artificial Sequence: Synthetic oligonucleotide
  Antisense strand to SEQ ID NO: 195090
acuucagagacgcuucugu

SEQ ID NO: 195092 - RNA, 19 nt, Artificial Sequence
  Description of Artificial Sequence: Synthetic oligonucleotide
  Sense strand starting at position 3217 of SEQ ID NO: 2514
ucugaaguuugggucgaau

SEQ ID NO: 195093 - RNA, 19 nt, Artificial Sequence
  Description of Artificial Sequence: Synthetic oligonucleotide
  Antisense strand to SEQ ID NO: 195092
auucgacccaaacuucaga

SEQ ID NO: 195094 - RNA, 19 nt, Artificial Sequence
  Description of Artificial Sequence: Synthetic oligonucleotide
  Sense strand starting at position 3302 of SEQ ID NO: 2514
gcgagguucgaguuugcca

SEQ ID NO: 195095 - RNA, 19 nt, Artificial Sequence
  Description of Artificial Sequence: Synthetic oligonucleotide
  Antisense strand to SEQ ID NO: 195094
uggcaaacucgaaccucgc

SEQ ID NO: 195096 - RNA, 19 nt, Artificial Sequence
  Description of Artificial Sequence: Synthetic oligonucleotide
  Sense strand starting at position 3490 of SEQ ID NO: 2514
ucuuuaaggaaguguggaa

SEQ ID NO: 195097 - RNA, 19 nt, Artificial Sequence
  Description of Artificial Sequence: Synthetic oligonucleotide
  Antisense strand to SEQ ID NO: 195096
uuccacacuuccuuaaaga

SEQ ID NO: 195098 - RNA, 19 nt, Artificial Sequence
  Description of Artificial Sequence: Synthetic oligonucleotide
  Sense strand starting at position 3544 of SEQ ID NO: 2514
gauuuacacuguggacaga

SEQ ID NO: 195099 - RNA, 19 nt, Artificial Sequence
  Description of Artificial Sequence: Synthetic oligonucleotide
  Antisense strand to SEQ ID NO: 195098
ucuguccacaguguaaauc

SEQ ID NO: 195100 - RNA, 19 nt, Artificial Sequence
  Description of Artificial Sequence: Synthetic oligonucleotide
  Sense strand starting at position 3555 of SEQ ID NO: 2514
uggacagagauguguccuu

SEQ ID NO: 195101 - RNA, 19 nt, Artificial Sequence
  Description of Artificial Sequence: Synthetic oligonucleotide
  Antisense strand to SEQ ID NO: 195100
aaggacacaucucugucca

SEQ ID NO: 195102 - RNA, 19 nt, Artificial Sequence
  Description of Artificial Sequence: Synthetic oligonucleotide
  Sense strand starting at position 3560 of SEQ ID NO: 2514
agagauguguccuuuacac

SEQ ID NO: 195103 - RNA, 19 nt, Artificial Sequence
  Description of Artificial Sequence: Synthetic oligonucleotide
  Antisense strand to SEQ ID NO: 195102
guguaaaggacacaucucu

SEQ ID NO: 195104 - RNA, 19 nt, Artificial Sequence
  Description of Artificial Sequence: Synthetic oligonucleotide
  Sense strand starting at position 3664 of SEQ ID NO: 2514
ucgguuucucuucugcuua

SEQ ID NO: 195105 - RNA, 19 nt, Artificial Sequence
  Description of Artificial Sequence: Synthetic oligonucleotide
  Antisense strand to SEQ ID NO: 195104
uaagcagaagagaaaccga

SEQ ID NO: 195106 - RNA, 19 nt, Artificial Sequence
  Description of Artificial Sequence: Synthetic oligonucleotide
  Sense strand starting at position 3685 of SEQ ID NO: 2514
ggagaugcauguccugauu

SEQ ID NO: 195107 - RNA, 19 nt, Artificial Sequence
  Description of Artificial Sequence: Synthetic oligonucleotide
  Antisense strand to SEQ ID NO: 195106
aaucaggacaugcaucucc

SEQ ID NO: 195108 - RNA, 19 nt, Artificial Sequence
  Description of Artificial Sequence: Synthetic oligonucleotide
  Sense strand starting at position 3854 of SEQ ID NO: 2514
agcgacugauguuuacaaa

SEQ ID NO: 195109 - RNA, 19 nt, Artificial Sequence
  Description of Artificial Sequence: Synthetic oligonucleotide
  Antisense strand to SEQ ID NO: 195108
uuuguaaacaucagucgcu

SEQ ID NO: 195110 - RNA, 19 nt, Artificial Sequence
  Description of Artificial Sequence: Synthetic oligonucleotide
  Sense strand starting at position 3855 of SEQ ID NO: 2514
gcgacugauguuuacaaau

SEQ ID NO: 195111 - RNA, 19 nt, Artificial Sequence
  Description of Artificial Sequence: Synthetic oligonucleotide
  Antisense strand to SEQ ID NO: 195110
auuuguaaacaucagucgc

SEQ ID NO: 195112 - RNA, 19 nt, Artificial Sequence
  Description of Artificial Sequence: Synthetic oligonucleotide
  Sense strand starting at position 3874 of SEQ ID NO: 2514
uacuauguuggagguuaaa

SEQ ID NO: 195113 - RNA, 19 nt, Artificial Sequence
  Description of Artificial Sequence: Synthetic oligonucleotide
  Antisense strand to SEQ ID NO: 195112
uuuaaccuccaacauagua

SEQ ID NO: 195114 - RNA, 19 nt, Artificial Sequence
  Description of Artificial Sequence: Synthetic oligonucleotide
  Sense strand starting at position 3919 of SEQ ID NO: 2514
gucuaucauguuugaggag

SEQ ID NO: 195115 - RNA, 19 nt, Artificial Sequence
  Description of Artificial Sequence: Synthetic oligonucleotide
  Antisense strand to SEQ ID NO: 195114
cuccucaaacaugauagac

SEQ ID NO: 195116 - RNA, 19 nt, Artificial Sequence
  Description of Artificial Sequence: Synthetic oligonucleotide
  Sense strand starting at position 22 of SEQ ID NO: 2515
aacagaccucgaggcuuua

SEQ ID NO: 195117 - RNA, 19 nt, Artificial Sequence
  Description of Artificial Sequence: Synthetic oligonucleotide
  Antisense strand to SEQ ID NO: 195116
uaaagccucgaggucuguu

SEQ ID NO: 195118 - RNA, 19 nt, Artificial Sequence
  Description of Artificial Sequence: Synthetic oligonucleotide
  Sense strand starting at position 85 of SEQ ID NO: 2515
uuauaauuugugcguucuu

SEQ ID NO: 195119 - RNA, 19 nt, Artificial Sequence
  Description of Artificial Sequence: Synthetic oligonucleotide
  Antisense strand to SEQ ID NO: 195118
aagaacgcacaaauuauaa

SEQ ID NO: 195120 - RNA, 19 nt, Artificial Sequence
  Description of Artificial Sequence: Synthetic oligonucleotide
  Sense strand starting at position 166 of SEQ ID NO: 2515
gcuuuaagucacugagucu

SEQ ID NO: 195121 - RNA, 19 nt, Artificial Sequence
  Description of Artificial Sequence: Synthetic oligonucleotide
  Antisense strand to SEQ ID NO: 195120
agacucagugacuuaaagc

SEQ ID NO: 195122 - RNA, 19 nt, Artificial Sequence
  Description of Artificial Sequence: Synthetic oligonucleotide
  Sense strand starting at position 169 of SEQ ID NO: 2515
uuaagucacugagucuaaa

SEQ ID NO: 195123 - RNA, 19 nt, Artificial Sequence
  Description of Artificial Sequence: Synthetic oligonucleotide
  Antisense strand to SEQ ID NO: 195122
uuuagacucagugacuuaa

SEQ ID NO: 195124 - RNA, 19 nt, Artificial Sequence
  Description of Artificial Sequence: Synthetic oligonucleotide
  Sense strand starting at position 222 of SEQ ID NO: 2515
cgaggugacuugucaccuu

SEQ ID NO: 195125 - RNA, 19 nt, Artificial Sequence
  Description of Artificial Sequence: Synthetic oligonucleotide
  Antisense strand to SEQ ID NO: 195124
aaggugacaagucaccucg

SEQ ID NO: 195126 - RNA, 19 nt, Artificial Sequence
  Description of Artificial Sequence: Synthetic oligonucleotide
  Sense strand starting at position 701 of SEQ ID NO: 2515
gcuucuuacuagcugagau

SEQ ID NO: 195127 - RNA, 19 nt, Artificial Sequence
  Description of Artificial Sequence: Synthetic oligonucleotide
  Antisense strand to SEQ ID NO: 195126
aucucagcuaguaagaagc

SEQ ID NO: 195128 - RNA, 19 nt, Artificial Sequence
  Description of Artificial Sequence: Synthetic oligonucleotide
  Sense strand starting at position 714 of SEQ ID NO: 2515
ugagaucugaggcaagcua

SEQ ID NO: 195129 - RNA, 19 nt, Artificial Sequence
  Description of Artificial Sequence: Synthetic oligonucleotide
  Antisense strand to SEQ ID NO: 195128
uagcuugccucagaucuca

SEQ ID NO: 195130 - RNA, 19 nt, Artificial Sequence
  Description of Artificial Sequence: Synthetic oligonucleotide
  Sense strand starting at position 726 of SEQ ID NO: 2515
caagcuaagucguccaauc

SEQ ID NO: 195131 - RNA, 19 nt, Artificial Sequence
  Description of Artificial Sequence: Synthetic oligonucleotide
  Antisense strand to SEQ ID NO: 195130
gauuggacgacuuagcuug

SEQ ID NO: 195132 - RNA, 19 nt, Artificial Sequence
  Description of Artificial Sequence: Synthetic oligonucleotide
  Sense strand starting at position 746 of SEQ ID NO: 2515
gcaguuucucccgcuguaa

SEQ ID NO: 195133 - RNA, 19 nt, Artificial Sequence
  Description of Artificial Sequence: Synthetic oligonucleotide
  Antisense strand to SEQ ID NO: 195132
uuacagcgggagaaacugc

SEQ ID NO: 195134 - RNA, 19 nt, Artificial Sequence
  Description of Artificial Sequence: Synthetic oligonucleotide
  Sense strand starting at position 790 of SEQ ID NO: 2515
gacuguuaacagugugaag

SEQ ID NO: 195135 - RNA, 19 nt, Artificial Sequence
  Description of Artificial Sequence: Synthetic oligonucleotide
  Antisense strand to SEQ ID NO: 195134
cuucacacuguuaacaguc

SEQ ID NO: 195136 - RNA, 19 nt, Artificial Sequence
  Description of Artificial Sequence: Synthetic oligonucleotide
  Sense strand starting at position 801 of SEQ ID NO: 2515
gugugaagacacuguacau

SEQ ID NO: 195137 - RNA, 19 nt, Artificial Sequence
  Description of Artificial Sequence: Synthetic oligonucleotide
  Antisense strand to SEQ ID NO: 195136
auguacagugucuucacac

SEQ ID NO: 195138 - RNA, 19 nt, Artificial Sequence
  Description of Artificial Sequence: Synthetic oligonucleotide
  Sense strand starting at position 835 of SEQ ID NO: 2515
gugcguggcauguaauaaa

SEQ ID NO: 195139 - RNA, 19 nt, Artificial Sequence
  Description of Artificial Sequence: Synthetic oligonucleotide
  Antisense strand to SEQ ID NO: 195138
uuuauuacaugccacgcac

SEQ ID NO: 195140 - RNA, 19 nt, Artificial Sequence
  Description of Artificial Sequence: Synthetic oligonucleotide
  Sense strand starting at position 866 of SEQ ID NO: 2515
gucagcuauuugucauucu

SEQ ID NO: 195141 - RNA, 19 nt, Artificial Sequence
  Description of Artificial Sequence: Synthetic oligonucleotide
  Antisense strand to SEQ ID NO: 195140
agaaugacaaauagcugac

SEQ ID NO: 195142 - RNA, 19 nt, Artificial Sequence
  Description of Artificial Sequence: Synthetic oligonucleotide
  Sense strand starting at position 995 of SEQ ID NO: 2515
agagcacacuuucuaguau

SEQ ID NO: 195143 - RNA, 19 nt, Artificial Sequence
  Description of Artificial Sequence: Synthetic oligonucleotide
  Antisense strand to SEQ ID NO: 195142
auacuagaaagugugcucu

SEQ ID NO: 195144 - RNA, 19 nt, Artificial Sequence
  Description of Artificial Sequence: Synthetic oligonucleotide
  Sense strand starting at position 1010 of SEQ ID NO: 2515
guaucagacuuccugcgaa

SEQ ID NO: 195145 - RNA, 19 nt, Artificial Sequence
  Description of Artificial Sequence: Synthetic oligonucleotide
  Antisense strand to SEQ ID NO: 195144
uucgcaggaagucugauac

SEQ ID NO: 195146 - RNA, 19 nt, Artificial Sequence
  Description of Artificial Sequence: Synthetic oligonucleotide
  Sense strand starting at position 1052 of SEQ ID NO: 2515
gggcuccucaucugugaaa

SEQ ID NO: 195147 - RNA, 19 nt, Artificial Sequence
  Description of Artificial Sequence: Synthetic oligonucleotide
  Antisense strand to SEQ ID NO: 195146
uuucacagaugaggagccc

SEQ ID NO: 195148 - RNA, 19 nt, Artificial Sequence
  Description of Artificial Sequence: Synthetic oligonucleotide
  Sense strand starting at position 1065 of SEQ ID NO: 2515
gugaaacgagccugauaac

SEQ ID NO: 195149 - RNA, 19 nt, Artificial Sequence
  Description of Artificial Sequence: Synthetic oligonucleotide
  Antisense strand to SEQ ID NO: 195148
guuaucaggcucguuucac

SEQ ID NO: 195150 - RNA, 19 nt, Artificial Sequence
  Description of Artificial Sequence: Synthetic oligonucleotide
  Sense strand starting at position 2135 of SEQ ID NO: 2515
gagguuacuacgggucauu

SEQ ID NO: 195151 - RNA, 19 nt, Artificial Sequence
  Description of Artificial Sequence: Synthetic oligonucleotide
  Antisense strand to SEQ ID NO: 195150
aaugacccguaguaaccuc

SEQ ID NO: 195152 - RNA, 19 nt, Artificial Sequence
  Description of Artificial Sequence: Synthetic oligonucleotide
  Sense strand starting at position 2362 of SEQ ID NO: 2515
auuacagucgcacaauuau

SEQ ID NO: 195153 - RNA, 19 nt, Artificial Sequence
  Description of Artificial Sequence: Synthetic oligonucleotide
  Antisense strand to SEQ ID NO: 195152
auaauugugcgacuguaau

SEQ ID NO: 195154 - RNA, 19 nt, Artificial Sequence
  Description of Artificial Sequence: Synthetic oligonucleotide
  Sense strand starting at position 2371 of SEQ ID NO: 2515
gcacaauuauugcuguaau

SEQ ID NO: 195155 - RNA, 19 nt, Artificial Sequence
  Description of Artificial Sequence: Synthetic oligonucleotide
  Antisense strand to SEQ ID NO: 195154
auuacagcaauaauugugc

SEQ ID NO: 195156 - RNA, 19 nt, Artificial Sequence
  Description of Artificial Sequence: Synthetic oligonucleotide
  Sense strand starting at position 2445 of SEQ ID NO: 2515
cuggauuaguuaucccguu

SEQ ID NO: 195157 - RNA, 19 nt, Artificial Sequence
  Description of Artificial Sequence: Synthetic oligonucleotide
  Antisense strand to SEQ ID NO: 195156
aacgggauaacuaauccag

SEQ ID NO: 195158 - RNA, 19 nt, Artificial Sequence
  Description of Artificial Sequence: Synthetic oligonucleotide
  Sense strand starting at position 2458 of SEQ ID NO: 2515
cccguucuugcagaaauug

SEQ ID NO: 195159 - RNA, 19 nt, Artificial Sequence
  Description of Artificial Sequence: Synthetic oligonucleotide
  Antisense strand to SEQ ID NO: 195158
caauuucugcaagaacggg

SEQ ID NO: 195160 - RNA, 19 nt, Artificial Sequence
  Description of Artificial Sequence: Synthetic oligonucleotide
  Sense strand starting at position 2860 of SEQ ID NO: 2515
ccaacauauuguuuaguuu

SEQ ID NO: 195161 - RNA, 19 nt, Artificial Sequence
  Description of Artificial Sequence: Synthetic oligonucleotide
  Antisense strand to SEQ ID NO: 195160
aaacuaaacaauauguugg

SEQ ID NO: 195162 - RNA, 19 nt, Artificial Sequence
  Description of Artificial Sequence: Synthetic oligonucleotide
  Sense strand starting at position 2890 of SEQ ID NO: 2515
uuuccuuaaguaggugaaa

SEQ ID NO: 195163 - RNA, 19 nt, Artificial Sequence
  Description of Artificial Sequence: Synthetic oligonucleotide
  Antisense strand to SEQ ID NO: 195162
uuucaccuacuuaaggaaa

SEQ ID NO: 195164 - RNA, 19 nt, Artificial Sequence
  Description of Artificial Sequence: Synthetic oligonucleotide
  Sense strand starting at position 2943 of SEQ ID NO: 2515
ggccucauuucccaagaga

SEQ ID NO: 195165 - RNA, 19 nt, Artificial Sequence
  Description of Artificial Sequence: Synthetic oligonucleotide
  Antisense strand to SEQ ID NO: 195164
ucucuugggaaaugaggcc

SEQ ID NO: 195166 - RNA, 19 nt, Artificial Sequence
  Description of Artificial Sequence: Synthetic oligonucleotide
  Sense strand starting at position 3084 of SEQ ID NO: 2515
ggcaaacuguucucccacu

SEQ ID NO: 195167 - RNA, 19 nt, Artificial Sequence
  Description of Artificial Sequence: Synthetic oligonucleotide
  Antisense strand to SEQ ID NO: 195166
agugggagaacaguuugcc

SEQ ID NO: 195168 - RNA, 19 nt, Artificial Sequence
  Description of Artificial Sequence: Synthetic oligonucleotide
  Sense strand starting at position 3124 of SEQ ID NO: 2515
gcucauuaaucuguugaaa

SEQ ID NO: 195169 - RNA, 19 nt, Artificial Sequence
  Description of Artificial Sequence: Synthetic oligonucleotide
  Antisense strand to SEQ ID NO: 195168
uuucaacagauuaaugagc

SEQ ID NO: 195170 - RNA, 19 nt, Artificial Sequence
  Description of Artificial Sequence: Synthetic oligonucleotide
  Sense strand starting at position 3136 of SEQ ID NO: 2515
guugaaaucuuaucaaagg

SEQ ID NO: 195171 - RNA, 19 nt, Artificial Sequence
  Description of Artificial Sequence: Synthetic oligonucleotide
  Antisense strand to SEQ ID NO: 195170
ccuuugauaagauuucaac

SEQ ID NO: 195172 - RNA, 19 nt, Artificial Sequence
  Description of Artificial Sequence: Synthetic oligonucleotide
  Sense strand starting at position 3137 of SEQ ID NO: 2515
uugaaaucuuaucaaagga

SEQ ID NO: 195173 - RNA, 19 nt, Artificial Sequence
  Description of Artificial Sequence: Synthetic oligonucleotide
  Antisense strand to SEQ ID NO: 195172
uccuuugauaagauuucaa

SEQ ID NO: 195174 - RNA, 19 nt, Artificial Sequence
  Description of Artificial Sequence: Synthetic oligonucleotide
  Sense strand starting at position 3178 of SEQ ID NO: 2515
ugcagaauuucuuaucuga

SEQ ID NO: 195175 - RNA, 19 nt, Artificial Sequence
  Description of Artificial Sequence: Synthetic oligonucleotide
  Antisense strand to SEQ ID NO: 195174
ucagauaagaaauucugca

SEQ ID NO: 195176 - RNA, 19 nt, Artificial Sequence
  Description of Artificial Sequence: Synthetic oligonucleotide
  Sense strand starting at position 3206 of SEQ ID NO: 2515
cgcagcucugcagagagaa

SEQ ID NO: 195177 - RNA, 19 nt, Artificial Sequence
  Description of Artificial Sequence: Synthetic oligonucleotide
  Antisense strand to SEQ ID NO: 195176
uucucucugcagagcugcg

SEQ ID NO: 195178 - RNA, 19 nt, Artificial Sequence
  Description of Artificial Sequence: Synthetic oligonucleotide
  Sense strand starting at position 3221 of SEQ ID NO: 2515
agaagcaggcuuuagaagu

SEQ ID NO: 195179 - RNA, 19 nt, Artificial Sequence
  Description of Artificial Sequence: Synthetic oligonucleotide
  Antisense strand to SEQ ID NO: 195178
acuucuaaagccugcuucu

SEQ ID NO: 195180 - RNA, 19 nt, Artificial Sequence
  Description of Artificial Sequence: Synthetic oligonucleotide
  Sense strand starting at position 3227 of SEQ ID NO: 2515
aggcuuuagaaguaguacu

SEQ ID NO: 195181 - RNA, 19 nt, Artificial Sequence
  Description of Artificial Sequence: Synthetic oligonucleotide
  Antisense strand to SEQ ID NO: 195180
aguacuacuucuaaagccu

SEQ ID NO: 195182 - RNA, 19 nt, Artificial Sequence
  Description of Artificial Sequence: Synthetic oligonucleotide
  Sense strand starting at position 3238 of SEQ ID NO: 2515
guaguacuucuagaaccau

SEQ ID NO: 195183 - RNA, 19 nt, Artificial Sequence
  Description of Artificial Sequence: Synthetic oligonucleotide
  Antisense strand to SEQ ID NO: 195182
augguucuagaaguacuac

SEQ ID NO: 195184 - RNA, 19 nt, Artificial Sequence
  Description of Artificial Sequence: Synthetic oligonucleotide
  Sense strand starting at position 3460 of SEQ ID NO: 2515
cuuguuugcuguuuaacaa

SEQ ID NO: 195185 - RNA, 19 nt, Artificial Sequence
  Description of Artificial Sequence: Synthetic oligonucleotide
  Antisense strand to SEQ ID NO: 195184
uuguuaaacagcaaacaag

SEQ ID NO: 195186 - RNA, 19 nt, Artificial Sequence
  Description of Artificial Sequence: Synthetic oligonucleotide
  Sense strand starting at position 3572 of SEQ ID NO: 2515
acaugaauuguuugguuuc

SEQ ID NO: 195187 - RNA, 19 nt, Artificial Sequence
  Description of Artificial Sequence: Synthetic oligonucleotide
  Antisense strand to SEQ ID NO: 195186
gaaaccaaacaauucaugu

SEQ ID NO: 195188 - RNA, 19 nt, Artificial Sequence
  Description of Artificial Sequence: Synthetic oligonucleotide
  Sense strand starting at position 3575 of SEQ ID NO: 2515
ugaauuguuugguuuccca

SEQ ID NO: 195189 - RNA, 19 nt, Artificial Sequence
  Description of Artificial Sequence: Synthetic oligonucleotide
  Antisense strand to SEQ ID NO: 195188
ugggaaaccaaacaauuca

SEQ ID NO: 195190 - RNA, 19 nt, Artificial Sequence
  Description of Artificial Sequence: Synthetic oligonucleotide
  Sense strand starting at position 3579 of SEQ ID NO: 2515
uuguuugguuucccaguaa

SEQ ID NO: 195191 - RNA, 19 nt, Artificial Sequence
  Description of Artificial Sequence: Synthetic oligonucleotide
  Antisense strand to SEQ ID NO: 195190
uuacugggaaaccaaacaa

SEQ ID NO: 195192 - RNA, 19 nt, Artificial Sequence
  Description of Artificial Sequence: Synthetic oligonucleotide
  Sense strand starting at position 3877 of SEQ ID NO: 2515
aagagugaacugcaucuca

SEQ ID NO: 195193 - RNA, 19 nt, Artificial Sequence
  Description of Artificial Sequence: Synthetic oligonucleotide
  Antisense strand to SEQ ID NO: 195192
ugagaugcaguucacucuu

SEQ ID NO: 195194 - RNA, 19 nt, Artificial Sequence
  Description of Artificial Sequence: Synthetic oligonucleotide
  Sense strand starting at position 3920 of SEQ ID NO: 2515
uacuauaaagcgugcaaua

SEQ ID NO: 195195 - RNA, 19 nt, Artificial Sequence
  Description of Artificial Sequence: Synthetic oligonucleotide
  Antisense strand to SEQ ID NO: 195194
uauugcacgcuuuauagua

SEQ ID NO: 195196 - RNA, 19 nt, Artificial Sequence
  Description of Artificial Sequence: Synthetic oligonucleotide
  Sense strand starting at position 176 of SEQ ID NO: 2516
guggaauugagccacuuga

SEQ ID NO: 195197 - RNA, 19 nt, Artificial Sequence
  Description of Artificial Sequence: Synthetic oligonucleotide
  Antisense strand to SEQ ID NO: 195196
ucaaguggcucaauuccac

SEQ ID NO: 195198 - RNA, 19 nt, Artificial Sequence
  Description of Artificial Sequence: Synthetic oligonucleotide
  Sense strand starting at position 228 of SEQ ID NO: 2516
ggaccaagcuugguccuua

SEQ ID NO: 195199 - RNA, 19 nt, Artificial Sequence
  Description of Artificial Sequence: Synthetic oligonucleotide
  Antisense strand to SEQ ID NO: 195198
uaaggaccaagcuuggucc

SEQ ID NO: 195200 - RNA, 19 nt, Artificial Sequence
  Description of Artificial Sequence: Synthetic oligonucleotide
  Sense strand starting at position 280 of SEQ ID NO: 2516
ggaagucuucccugauaac

SEQ ID NO: 195201 - RNA, 19 nt, Artificial Sequence
  Description of Artificial Sequence: Synthetic oligonucleotide
  Antisense strand to SEQ ID NO: 195200
guuaucagggaagacuucc

SEQ ID NO: 195202 - RNA, 19 nt, Artificial Sequence
  Description of Artificial Sequence: Synthetic oligonucleotide
  Sense strand starting at position 291 of SEQ ID NO: 2516
cugauaacuccuggguuga

SEQ ID NO: 195203 - RNA, 19 nt, Artificial Sequence
  Description of Artificial Sequence: Synthetic oligonucleotide
  Antisense strand to SEQ ID NO: 195202
ucaacccaggaguuaucag

SEQ ID NO: 195204 - RNA, 19 nt, Artificial Sequence
  Description of Artificial Sequence: Synthetic oligonucleotide
  Sense strand starting at position 293 of SEQ ID NO: 2516
gauaacuccuggguugagu

SEQ ID NO: 195205 - RNA, 19 nt, Artificial Sequence
  Description of Artificial Sequence: Synthetic oligonucleotide
  Antisense strand to SEQ ID NO: 195204
acucaacccaggaguuauc

SEQ ID NO: 195206 - RNA, 19 nt, Artificial Sequence
  Description of Artificial Sequence: Synthetic oligonucleotide
  Sense strand starting at position 698 of SEQ ID NO: 2516
uacaaaguguggucccaga

SEQ ID NO: 195207 - RNA, 19 nt, Artificial Sequence
  Description of Artificial Sequence: Synthetic oligonucleotide
  Antisense strand to SEQ ID NO: 195206
ucugggaccacacuuugua

SEQ ID NO: 195208 - RNA, 19 nt, Artificial Sequence
  Description of Artificial Sequence: Synthetic oligonucleotide
  Sense strand starting at position 844 of SEQ ID NO: 2516
auucuuaaaguuugagaac

SEQ ID NO: 195209 - RNA, 19 nt, Artificial Sequence
  Description of Artificial Sequence: Synthetic oligonucleotide
  Antisense strand to SEQ ID NO: 195208
guucucaaacuuuaagaau

SEQ ID NO: 195210 - RNA, 19 nt, Artificial Sequence
  Description of Artificial Sequence: Synthetic oligonucleotide
  Sense strand starting at position 888 of SEQ ID NO: 2516
agcugagugcuguauauac

SEQ ID NO: 195211 - RNA, 19 nt, Artificial Sequence
  Description of Artificial Sequence: Synthetic oligonucleotide
  Antisense strand to SEQ ID NO: 195210
guauauacagcacucagcu

SEQ ID NO: 195212 - RNA, 19 nt, Artificial Sequence
  Description of Artificial Sequence: Synthetic oligonucleotide
  Sense strand starting at position 1183 of SEQ ID NO: 2516
cugcaaaugggucacaguu

SEQ ID NO: 195213 - RNA, 19 nt, Artificial Sequence
  Description of Artificial Sequence: Synthetic oligonucleotide
  Antisense strand to SEQ ID NO: 195212
aacugugacccauuugcag

SEQ ID NO: 195214 - RNA, 19 nt, Artificial Sequence
  Description of Artificial Sequence: Synthetic oligonucleotide
  Sense strand starting at position 1249 of SEQ ID NO: 2516
guccucaucagaggagaau

SEQ ID NO: 195215 - RNA, 19 nt, Artificial Sequence
  Description of Artificial Sequence: Synthetic oligonucleotide
  Antisense strand to SEQ ID NO: 195214
auucuccucugaugaggac

SEQ ID NO: 195216 - RNA, 19 nt, Artificial Sequence
  Description of Artificial Sequence: Synthetic oligonucleotide
  Sense strand starting at position 1515 of SEQ ID NO: 2516
ugacucaaguauucugaaa

SEQ ID NO: 195217 - RNA, 19 nt, Artificial Sequence
  Description of Artificial Sequence: Synthetic oligonucleotide
  Antisense strand to SEQ ID NO: 195216
uuucagaauacuugaguca

SEQ ID NO: 195218 - RNA, 19 nt, Artificial Sequence
  Description of Artificial Sequence: Synthetic oligonucleotide
  Sense strand starting at position 1647 of SEQ ID NO: 2516
agagacugcaggcauuaua

SEQ ID NO: 195219 - RNA, 19 nt, Artificial Sequence
  Description of Artificial Sequence: Synthetic oligonucleotide
  Antisense strand to SEQ ID NO: 195218
uauaaugccugcagucucu

SEQ ID NO: 195220 - RNA, 19 nt, Artificial Sequence
  Description of Artificial Sequence: Synthetic oligonucleotide
  Sense strand starting at position 1803 of SEQ ID NO: 2516
gugugaucugggccagcgu

SEQ ID NO: 195221 - RNA, 19 nt, Artificial Sequence
  Description of Artificial Sequence: Synthetic oligonucleotide
  Antisense strand to SEQ ID NO: 195220
acgcuggcccagaucacac

SEQ ID NO: 195222 - RNA, 19 nt, Artificial Sequence
  Description of Artificial Sequence: Synthetic oligonucleotide
  Sense strand starting at position 1905 of SEQ ID NO: 2516
acaguacuuaccgagggua

SEQ ID NO: 195223 - RNA, 19 nt, Artificial Sequence
  Description of Artificial Sequence: Synthetic oligonucleotide
  Antisense strand to SEQ ID NO: 195222
uacccucgguaaguacugu

SEQ ID NO: 195224 - RNA, 19 nt, Artificial Sequence
  Description of Artificial Sequence: Synthetic oligonucleotide
  Sense strand starting at position 1908 of SEQ ID NO: 2516
guacuuaccgaggguauga

SEQ ID NO: 195225 - RNA, 19 nt, Artificial Sequence
  Description of Artificial Sequence: Synthetic oligonucleotide
  Antisense strand to SEQ ID NO: 195224
ucauacccucgguaaguac

SEQ ID NO: 195226 - RNA, 19 nt, Artificial Sequence
  Description of Artificial Sequence: Synthetic oligonucleotide
  Sense strand starting at position 1996 of SEQ ID NO: 2516
agaggcggaucuucuuuaa

SEQ ID NO: 195227 - RNA, 19 nt, Artificial Sequence
  Description of Artificial Sequence: Synthetic oligonucleotide
  Antisense strand to SEQ ID NO: 195226
uuaaagaagauccgccucu

SEQ ID NO: 195228 - RNA, 19 nt, Artificial Sequence
  Description of Artificial Sequence: Synthetic oligonucleotide
  Sense strand starting at position 1999 of SEQ ID NO: 2516
ggcggaucuucuuuaaaca

SEQ ID NO: 195229 - RNA, 19 nt, Artificial Sequence
  Description of Artificial Sequence: Synthetic oligonucleotide
  Antisense strand to SEQ ID NO: 195228
uguuuaaagaagauccgcc

SEQ ID NO: 195230 - RNA, 19 nt, Artificial Sequence
  Description of Artificial Sequence: Synthetic oligonucleotide
  Sense strand starting at position 2000 of SEQ ID NO: 2516
gcggaucuucuuuaaacaa

SEQ ID NO: 195231 - RNA, 19 nt, Artificial Sequence
  Description of Artificial Sequence: Synthetic oligonucleotide
  Antisense strand to SEQ ID NO: 195230
uuguuuaaagaagauccgc

SEQ ID NO: 195232 - RNA, 19 nt, Artificial Sequence
  Description of Artificial Sequence: Synthetic oligonucleotide
  Sense strand starting at position 2043 of SEQ ID NO: 2516
guguguuagcaauauuacc

SEQ ID NO: 195233 - RNA, 19 nt, Artificial Sequence
  Description of Artificial Sequence: Synthetic oligonucleotide
  Antisense strand to SEQ ID NO: 195232
gguaauauugcuaacacac

SEQ ID NO: 195234 - RNA, 19 nt, Artificial Sequence
  Description of Artificial Sequence: Synthetic oligonucleotide
  Sense strand starting at position 2111 of SEQ ID NO: 2516
uggguagagugaguuauca

SEQ ID NO: 195235 - RNA, 19 nt, Artificial Sequence
  Description of Artificial Sequence: Synthetic oligonucleotide
  Antisense strand to SEQ ID NO: 195234
ugauaacucacucuaccca

SEQ ID NO: 195236 - RNA, 19 nt, Artificial Sequence
  Description of Artificial Sequence: Synthetic oligonucleotide
  Sense strand starting at position 2113 of SEQ ID NO: 2516
gguagagugaguuaucauu

SEQ ID NO: 195237 - RNA, 19 nt, Artificial Sequence
  Description of Artificial Sequence: Synthetic oligonucleotide
  Antisense strand to SEQ ID NO: 195236
aaugauaacucacucuacc

SEQ ID NO: 195238 - RNA, 19 nt, Artificial Sequence
  Description of Artificial Sequence: Synthetic oligonucleotide
  Sense strand starting at position 2175 of SEQ ID NO: 2516
cugguagauuuguuccuuu

SEQ ID NO: 195239 - RNA, 19 nt, Artificial Sequence
  Description of Artificial Sequence: Synthetic oligonucleotide
  Antisense strand to SEQ ID NO: 195238
aaaggaacaaaucuaccag

SEQ ID NO: 195240 - RNA, 19 nt, Artificial Sequence
  Description of Artificial Sequence: Synthetic oligonucleotide
  Sense strand starting at position 2197 of SEQ ID NO: 2516
gcugcacuugcauaaacaa

SEQ ID NO: 195241 - RNA, 19 nt, Artificial Sequence
  Description of Artificial Sequence: Synthetic oligonucleotide
  Antisense strand to SEQ ID NO: 195240
uuguuuaugcaagugcagc

SEQ ID NO: 195242 - RNA, 19 nt, Artificial Sequence
  Description of Artificial Sequence: Synthetic oligonucleotide
  Sense strand starting at position 2277 of SEQ ID NO: 2516
ugagaaccauaccaagaau

SEQ ID NO: 195243 - RNA, 19 nt, Artificial Sequence
  Description of Artificial Sequence: Synthetic oligonucleotide
  Antisense strand to SEQ ID NO: 195242
auucuugguaugguucuca

SEQ ID NO: 195244 - RNA, 19 nt, Artificial Sequence
  Description of Artificial Sequence: Synthetic oligonucleotide
  Sense strand starting at position 2528 of SEQ ID NO: 2516
gaguucucugagggucuca

SEQ ID NO: 195245 - RNA, 19 nt, Artificial Sequence
  Description of Artificial Sequence: Synthetic oligonucleotide
  Antisense strand to SEQ ID NO: 195244
ugagacccucagagaacuc

SEQ ID NO: 195246 - RNA, 19 nt, Artificial Sequence
  Description of Artificial Sequence: Synthetic oligonucleotide
  Sense strand starting at position 2652 of SEQ ID NO: 2516
acaagacucuuggccugua

SEQ ID NO: 195247 - RNA, 19 nt, Artificial Sequence
  Description of Artificial Sequence: Synthetic oligonucleotide
  Antisense strand to SEQ ID NO: 195246
uacaggccaagagucuugu

SEQ ID NO: 195248 - RNA, 19 nt, Artificial Sequence
  Description of Artificial Sequence: Synthetic oligonucleotide
  Sense strand starting at position 2655 of SEQ ID NO: 2516
agacucuuggccuguagga

SEQ ID NO: 195249 - RNA, 19 nt, Artificial Sequence
  Description of Artificial Sequence: Synthetic oligonucleotide
  Antisense strand to SEQ ID NO: 195248
uccuacaggccaagagucu

SEQ ID NO: 195250 - RNA, 19 nt, Artificial Sequence
  Description of Artificial Sequence: Synthetic oligonucleotide
  Sense strand starting at position 2657 of SEQ ID NO: 2516
acucuuggccuguaggauu

SEQ ID NO: 195251 - RNA, 19 nt, Artificial Sequence
  Description of Artificial Sequence: Synthetic oligonucleotide
  Antisense strand to SEQ ID NO: 195250
aauccuacaggccaagagu

SEQ ID NO: 195252 - RNA, 19 nt, Artificial Sequence
  Description of Artificial Sequence: Synthetic oligonucleotide
  Sense strand starting at position 3180 of SEQ ID NO: 2516
cuaccagcucugcaguauu

SEQ ID NO: 195253 - RNA, 19 nt, Artificial Sequence
  Description of Artificial Sequence: Synthetic oligonucleotide
  Antisense strand to SEQ ID NO: 195252
aauacugcagagcugguag

SEQ ID NO: 195254 - RNA, 19 nt, Artificial Sequence
  Description of Artificial Sequence: Synthetic oligonucleotide
  Sense strand starting at position 3254 of SEQ ID NO: 2516
ugaucaauugccuauugga

SEQ ID NO: 195255 - RNA, 19 nt, Artificial Sequence
  Description of Artificial Sequence: Synthetic oligonucleotide
  Antisense strand to SEQ ID NO: 195254
uccaauaggcaauugauca

SEQ ID NO: 195256 - RNA, 19 nt, Artificial Sequence
  Description of Artificial Sequence: Synthetic oligonucleotide
  Sense strand starting at position 3403 of SEQ ID NO: 2516
cuagaagucagucagucua

SEQ ID NO: 195257 - RNA, 19 nt, Artificial Sequence
  Description of Artificial Sequence: Synthetic oligonucleotide
  Antisense strand to SEQ ID NO: 195256
uagacugacugacuucuag

SEQ ID NO: 195258 - RNA, 19 nt, Artificial Sequence
  Description of Artificial Sequence: Synthetic oligonucleotide
  Sense strand starting at position 3405 of SEQ ID NO: 2516
agaagucagucagucuaga

SEQ ID NO: 195259 - RNA, 19 nt, Artificial Sequence
  Description of Artificial Sequence: Synthetic oligonucleotide
  Antisense strand to SEQ ID NO: 195258
ucuagacugacugacuucu

SEQ ID NO: 195260 - RNA, 19 nt, Artificial Sequence
  Description of Artificial Sequence: Synthetic oligonucleotide
  Sense strand starting at position 3657 of SEQ ID NO: 2516
agcagcaugauaugggaau

SEQ ID NO: 195261 - RNA, 19 nt, Artificial Sequence
  Description of Artificial Sequence: Synthetic oligonucleotide
  Antisense strand to SEQ ID NO: 195260
auucccauaucaugcugcu

SEQ ID NO: 195262 - RNA, 19 nt, Artificial Sequence
  Description of Artificial Sequence: Synthetic oligonucleotide
  Sense strand starting at position 3668 of SEQ ID NO: 2516
augggaaugugcucacaau

SEQ ID NO: 195263 - RNA, 19 nt, Artificial Sequence
  Description of Artificial Sequence: Synthetic oligonucleotide
  Antisense strand to SEQ ID NO: 195262
auugugagcacauucccau

SEQ ID NO: 195264 - RNA, 19 nt, Artificial Sequence
  Description of Artificial Sequence: Synthetic oligonucleotide
  Sense strand starting at position 3669 of SEQ ID NO: 2516
ugggaaugugcucacaaug

SEQ ID NO: 195265 - RNA, 19 nt, Artificial Sequence
  Description of Artificial Sequence: Synthetic oligonucleotide
  Antisense strand to SEQ ID NO: 195264
cauugugagcacauuccca

SEQ ID NO: 195266 - RNA, 19 nt, Artificial Sequence
  Description of Artificial Sequence: Synthetic oligonucleotide
  Sense strand starting at position 3701 of SEQ ID NO: 2516
gucaccuagcccuauugaa

SEQ ID NO: 195267 - RNA, 19 nt, Artificial Sequence
  Description of Artificial Sequence: Synthetic oligonucleotide
  Antisense strand to SEQ ID NO: 195266
uucaauagggcuaggugac

SEQ ID NO: 195268 - RNA, 19 nt, Artificial Sequence
  Description of Artificial Sequence: Synthetic oligonucleotide
  Sense strand starting at position 3731 of SEQ ID NO: 2516
gugaauaggccucagccau

SEQ ID NO: 195269 - RNA, 19 nt, Artificial Sequence
  Description of Artificial Sequence: Synthetic oligonucleotide
  Antisense strand to SEQ ID NO: 195268
auggcugaggccuauucac

SEQ ID NO: 195270 - RNA, 19 nt, Artificial Sequence
  Description of Artificial Sequence: Synthetic oligonucleotide
  Sense strand starting at position 3746 of SEQ ID NO: 2516
ccaucuguguuucuuaaac

SEQ ID NO: 195271 - RNA, 19 nt, Artificial Sequence
  Description of Artificial Sequence: Synthetic oligonucleotide
  Antisense strand to SEQ ID NO: 195270
guuuaagaaacacagaugg

SEQ ID NO: 195272 - RNA, 19 nt, Artificial Sequence
  Description of Artificial Sequence: Synthetic oligonucleotide
  Sense strand starting at position 3836 of SEQ ID NO: 2516
cagggaguuccaggugguu

SEQ ID NO: 195273 - RNA, 19 nt, Artificial Sequence
  Description of Artificial Sequence: Synthetic oligonucleotide
  Antisense strand to SEQ ID NO: 195272
aaccaccuggaacucccug

SEQ ID NO: 195274 - RNA, 19 nt, Artificial Sequence
  Description of Artificial Sequence: Synthetic oligonucleotide
  Sense strand starting at position 3889 of SEQ ID NO: 2516
uggcuuccucauuaacuga

SEQ ID NO: 195275 - RNA, 19 nt, Artificial Sequence
  Description of Artificial Sequence: Synthetic oligonucleotide
  Antisense strand to SEQ ID NO: 195274
ucaguuaaugaggaagcca

SEQ ID NO: 195276 - RNA, 19 nt, Artificial Sequence
  Description of Artificial Sequence: Synthetic oligonucleotide
  Sense strand starting at position 428 of SEQ ID NO: 2517
ucaaguggcuucccagaga

SEQ ID NO: 195277 - RNA, 19 nt, Artificial Sequence
  Description of Artificial Sequence: Synthetic oligonucleotide
  Antisense strand to SEQ ID NO: 195276
ucucugggaagccacuuga

SEQ ID NO: 195278 - RNA, 19 nt, Artificial Sequence
  Description of Artificial Sequence: Synthetic oligonucleotide
  Sense strand starting at position 431 of SEQ ID NO: 2517
aguggcuucccagagacua

SEQ ID NO: 195279 - RNA, 19 nt, Artificial Sequence
  Description of Artificial Sequence: Synthetic oligonucleotide
  Antisense strand to SEQ ID NO: 195278
uagucucugggaagccacu

SEQ ID NO: 195280 - RNA, 19 nt, Artificial Sequence
  Description of Artificial Sequence: Synthetic oligonucleotide
  Sense strand starting at position 450 of SEQ ID NO: 2517
cuaggagaacuugguccua

SEQ ID NO: 195281 - RNA, 19 nt, Artificial Sequence
  Description of Artificial Sequence: Synthetic oligonucleotide
  Antisense strand to SEQ ID NO: 195280
uaggaccaaguucuccuag

SEQ ID NO: 195282 - RNA, 19 nt, Artificial Sequence
  Description of Artificial Sequence: Synthetic oligonucleotide
  Sense strand starting at position 452 of SEQ ID NO: 2517
aggagaacuugguccuauc

SEQ ID NO: 195283 - RNA, 19 nt, Artificial Sequence
  Description of Artificial Sequence: Synthetic oligonucleotide
  Antisense strand to SEQ ID NO: 195282
gauaggaccaaguucuccu

SEQ ID NO: 195284 - RNA, 19 nt, Artificial Sequence
  Description of Artificial Sequence: Synthetic oligonucleotide
  Sense strand starting at position 545 of SEQ ID NO: 2517
gggauaagcuucucaacuc

SEQ ID NO: 195285 - RNA, 19 nt, Artificial Sequence
  Description of Artificial Sequence: Synthetic oligonucleotide
  Antisense strand to SEQ ID NO: 195284
gaguugagaagcuuauccc

SEQ ID NO: 195286 - RNA, 19 nt, Artificial Sequence
  Description of Artificial Sequence: Synthetic oligonucleotide
  Sense strand starting at position 684 of SEQ ID NO: 2517
uguugauuagccuauacga

SEQ ID NO: 195287 - RNA, 19 nt, Artificial Sequence
  Description of Artificial Sequence: Synthetic oligonucleotide
  Antisense strand to SEQ ID NO: 195286
ucguauaggcuaaucaaca

SEQ ID NO: 195288 - RNA, 19 nt, Artificial Sequence
  Description of Artificial Sequence: Synthetic oligonucleotide
  Sense strand starting at position 686 of SEQ ID NO: 2517
uugauuagccuauacgagu

SEQ ID NO: 195289 - RNA, 19 nt, Artificial Sequence
  Description of Artificial Sequence: Synthetic oligonucleotide
  Antisense strand to SEQ ID NO: 195288
acucguauaggcuaaucaa

SEQ ID NO: 195290 - RNA, 19 nt, Artificial Sequence
  Description of Artificial Sequence: Synthetic oligonucleotide
  Sense strand starting at position 697 of SEQ ID NO: 2517
auacgaguuauuugcacgu

SEQ ID NO: 195291 - RNA, 19 nt, Artificial Sequence
  Description of Artificial Sequence: Synthetic oligonucleotide
  Antisense strand to SEQ ID NO: 195290
acgugcaaauaacucguau

SEQ ID NO: 195292 - RNA, 19 nt, Artificial Sequence
  Description of Artificial Sequence: Synthetic oligonucleotide
  Sense strand starting at position 701 of SEQ ID NO: 2517
gaguuauuugcacgucaag

SEQ ID NO: 195293 - RNA, 19 nt, Artificial Sequence
  Description of Artificial Sequence: Synthetic oligonucleotide
  Antisense strand to SEQ ID NO: 195292
cuugacgugcaaauaacuc

SEQ ID NO: 195294 - RNA, 19 nt, Artificial Sequence
  Description of Artificial Sequence: Synthetic oligonucleotide
  Sense strand starting at position 808 of SEQ ID NO: 2517
ccugcugugacucagggaa

SEQ ID NO: 195295 - RNA, 19 nt, Artificial Sequence
  Description of Artificial Sequence: Synthetic oligonucleotide
  Antisense strand to SEQ ID NO: 195294
uucccugagucacagcagg

SEQ ID NO: 195296 - RNA, 19 nt, Artificial Sequence
  Description of Artificial Sequence: Synthetic oligonucleotide
  Sense strand starting at position 900 of SEQ ID NO: 2517
gagcacaagugagucauua

SEQ ID NO: 195297 - RNA, 19 nt, Artificial Sequence
  Description of Artificial Sequence: Synthetic oligonucleotide
  Antisense strand to SEQ ID NO: 195296
uaaugacucacuugugcuc

SEQ ID NO: 195298 - RNA, 19 nt, Artificial Sequence
  Description of Artificial Sequence: Synthetic oligonucleotide
  Sense strand starting at position 1026 of SEQ ID NO: 2517
cuuccuaaggcaggugaaa

SEQ ID NO: 195299 - RNA, 19 nt, Artificial Sequence
  Description of Artificial Sequence: Synthetic oligonucleotide
  Antisense strand to SEQ ID NO: 195298
uuucaccugccuuaggaag

SEQ ID NO: 195300 - RNA, 19 nt, Artificial Sequence
  Description of Artificial Sequence: Synthetic oligonucleotide
  Sense strand starting at position 1258 of SEQ ID NO: 2517
uggacaugugggugacaga

SEQ ID NO: 195301 - RNA, 19 nt, Artificial Sequence
  Description of Artificial Sequence: Synthetic oligonucleotide
  Antisense strand to SEQ ID NO: 195300
ucugucacccacaugucca

SEQ ID NO: 195302 - RNA, 19 nt, Artificial Sequence
  Description of Artificial Sequence: Synthetic oligonucleotide
  Sense strand starting at position 2192 of SEQ ID NO: 2517
gucuguggagcuggaaauu

SEQ ID NO: 195303 - RNA, 19 nt, Artificial Sequence
  Description of Artificial Sequence: Synthetic oligonucleotide
  Antisense strand to SEQ ID NO: 195302
aauuuccagcuccacagac

SEQ ID NO: 195304 - RNA, 19 nt, Artificial Sequence
  Description of Artificial Sequence: Synthetic oligonucleotide
  Sense strand starting at position 2401 of SEQ ID NO: 2517
gcuggaaaucuugggcuca

SEQ ID NO: 195305 - RNA, 19 nt, Artificial Sequence
  Description of Artificial Sequence: Synthetic oligonucleotide
  Antisense strand to SEQ ID NO: 195304
ugagcccaagauuuccagc

SEQ ID NO: 195306 - RNA, 19 nt, Artificial Sequence
  Description of Artificial Sequence: Synthetic oligonucleotide
  Sense strand starting at position 2484 of SEQ ID NO: 2517
cugaaauagucuccguaga

SEQ ID NO: 195307 - RNA, 19 nt, Artificial Sequence
  Description of Artificial Sequence: Synthetic oligonucleotide
  Antisense strand to SEQ ID NO: 195306
ucuacggagacuauuucag

SEQ ID NO: 195308 - RNA, 19 nt, Artificial Sequence
  Description of Artificial Sequence: Synthetic oligonucleotide
  Sense strand starting at position 2485 of SEQ ID NO: 2517
ugaaauagucuccguagag

SEQ ID NO: 195309 - RNA, 19 nt, Artificial Sequence
  Description of Artificial Sequence: Synthetic oligonucleotide
  Antisense strand to SEQ ID NO: 195308
cucuacggagacuauuuca

SEQ ID NO: 195310 - RNA, 19 nt, Artificial Sequence
  Description of Artificial Sequence: Synthetic oligonucleotide
  Sense strand starting at position 2486 of SEQ ID NO: 2517
gaaauagucuccguagaga

SEQ ID NO: 195311 - RNA, 19 nt, Artificial Sequence
  Description of Artificial Sequence: Synthetic oligonucleotide
  Antisense strand to SEQ ID NO: 195310
ucucuacggagacuauuuc

SEQ ID NO: 195312 - RNA, 19 nt, Artificial Sequence
  Description of Artificial Sequence: Synthetic oligonucleotide
  Sense strand starting at position 2494 of SEQ ID NO: 2517
cuccguagagacuguuaaa

SEQ ID NO: 195313 - RNA, 19 nt, Artificial Sequence
  Description of Artificial Sequence: Synthetic oligonucleotide
  Antisense strand to SEQ ID NO: 195312
uuuaacagucucuacggag

SEQ ID NO: 195314 - RNA, 19 nt, Artificial Sequence
  Description of Artificial Sequence: Synthetic oligonucleotide
  Sense strand starting at position 2576 of SEQ ID NO: 2517
gcaauaaucgcgcuucgga

SEQ ID NO: 195315 - RNA, 19 nt, Artificial Sequence
  Description of Artificial Sequence: Synthetic oligonucleotide
  Antisense strand to SEQ ID NO: 195314
uccgaagcgcgauuauugc

SEQ ID NO: 195316 - RNA, 19 nt, Artificial Sequence
  Description of Artificial Sequence: Synthetic oligonucleotide
  Sense strand starting at position 2577 of SEQ ID NO: 2517
caauaaucgcgcuucggau

SEQ ID NO: 195317 - RNA, 19 nt, Artificial Sequence
  Description of Artificial Sequence: Synthetic oligonucleotide
  Antisense strand to SEQ ID NO: 195316
auccgaagcgcgauuauug

SEQ ID NO: 195318 - RNA, 19 nt, Artificial Sequence
  Description of Artificial Sequence: Synthetic oligonucleotide
  Sense strand starting at position 2592 of SEQ ID NO: 2517
ggauaaaccucauuggcca

SEQ ID NO: 195319 - RNA, 19 nt, Artificial Sequence
  Description of Artificial Sequence: Synthetic oligonucleotide
  Antisense strand to SEQ ID NO: 195318
uggccaaugagguuuaucc

SEQ ID NO: 195320 - RNA, 19 nt, Artificial Sequence
  Description of Artificial Sequence: Synthetic oligonucleotide
  Sense strand starting at position 2664 of SEQ ID NO: 2517
aagggaucucgcuauguuc

SEQ ID NO: 195321 - RNA, 19 nt, Artificial Sequence
  Description of Artificial Sequence: Synthetic oligonucleotide
  Antisense strand to SEQ ID NO: 195320
gaacauagcgagaucccuu

SEQ ID NO: 195322 - RNA, 19 nt, Artificial Sequence
  Description of Artificial Sequence: Synthetic oligonucleotide
  Sense strand starting at position 2781 of SEQ ID NO: 2517
aauauuuccucguugagca

SEQ ID NO: 195323 - RNA, 19 nt, Artificial Sequence
  Description of Artificial Sequence: Synthetic oligonucleotide
  Antisense strand to SEQ ID NO: 195322
ugcucaacgaggaaauauu

SEQ ID NO: 195324 - RNA, 19 nt, Artificial Sequence
  Description of Artificial Sequence: Synthetic oligonucleotide
  Sense strand starting at position 2789 of SEQ ID NO: 2517
cucguugagcacugaagaa

SEQ ID NO: 195325 - RNA, 19 nt, Artificial Sequence
  Description of Artificial Sequence: Synthetic oligonucleotide
  Antisense strand to SEQ ID NO: 195324
uucuucagugcucaacgag

SEQ ID NO: 195326 - RNA, 19 nt, Artificial Sequence
  Description of Artificial Sequence: Synthetic oligonucleotide
  Sense strand starting at position 2935 of SEQ ID NO: 2517
auaucagguaguuguauua

SEQ ID NO: 195327 - RNA, 19 nt, Artificial Sequence
  Description of Artificial Sequence: Synthetic oligonucleotide
  Antisense strand to SEQ ID NO: 195326
uaauacaacuaccugauau

SEQ ID NO: 195328 - RNA, 19 nt, Artificial Sequence
  Description of Artificial Sequence: Synthetic oligonucleotide
  Sense strand starting at position 2987 of SEQ ID NO: 2517
uugguaaccugcccaagau

SEQ ID NO: 195329 - RNA, 19 nt, Artificial Sequence
  Description of Artificial Sequence: Synthetic oligonucleotide
  Antisense strand to SEQ ID NO: 195328
aucuugggcagguuaccaa

SEQ ID NO: 195330 - RNA, 19 nt, Artificial Sequence
  Description of Artificial Sequence: Synthetic oligonucleotide
  Sense strand starting at position 2988 of SEQ ID NO: 2517
ugguaaccugcccaagauu

SEQ ID NO: 195331 - RNA, 19 nt, Artificial Sequence
  Description of Artificial Sequence: Synthetic oligonucleotide
  Antisense strand to SEQ ID NO: 195330
aaucuugggcagguuacca

SEQ ID NO: 195332 - RNA, 19 nt, Artificial Sequence
  Description of Artificial Sequence: Synthetic oligonucleotide
  Sense strand starting at position 3000 of SEQ ID NO: 2517
caagauuauugggugugga

SEQ ID NO: 195333 - RNA, 19 nt, Artificial Sequence
  Description of Artificial Sequence: Synthetic oligonucleotide
  Antisense strand to SEQ ID NO: 195332
uccacacccaauaaucuug

SEQ ID NO: 195334 - RNA, 19 nt, Artificial Sequence
  Description of Artificial Sequence: Synthetic oligonucleotide
  Sense strand starting at position 3001 of SEQ ID NO: 2517
aagauuauuggguguggaa

SEQ ID NO: 195335 - RNA, 19 nt, Artificial Sequence
  Description of Artificial Sequence: Synthetic oligonucleotide
  Antisense strand to SEQ ID NO: 195334
uuccacacccaauaaucuu

SEQ ID NO: 195336 - RNA, 19 nt, Artificial Sequence
  Description of Artificial Sequence: Synthetic oligonucleotide
  Sense strand starting at position 3003 of SEQ ID NO: 2517
gauuauuggguguggaauu

SEQ ID NO: 195337 - RNA, 19 nt, Artificial Sequence
  Description of Artificial Sequence: Synthetic oligonucleotide
  Antisense strand to SEQ ID NO: 195336
aauuccacacccaauaauc

SEQ ID NO: 195338 - RNA, 19 nt, Artificial Sequence
  Description of Artificial Sequence: Synthetic oligonucleotide
  Sense strand starting at position 3049 of SEQ ID NO: 2517
ggagucagcugcuucaaga

SEQ ID NO: 195339 - RNA, 19 nt, Artificial Sequence
  Description of Artificial Sequence: Synthetic oligonucleotide
  Antisense strand to SEQ ID NO: 195338
ucuugaagcagcugacucc

SEQ ID NO: 195340 - RNA, 19 nt, Artificial Sequence
  Description of Artificial Sequence: Synthetic oligonucleotide
  Sense strand starting at position 3059 of SEQ ID NO: 2517
gcuucaagagugcaggaua

SEQ ID NO: 195341 - RNA, 19 nt, Artificial Sequence
  Description of Artificial Sequence: Synthetic oligonucleotide
  Antisense strand to SEQ ID NO: 195340
uauccugcacucuugaagc

SEQ ID NO: 195342 - RNA, 19 nt, Artificial Sequence
  Description of Artificial Sequence: Synthetic oligonucleotide
  Sense strand starting at position 3062 of SEQ ID NO: 2517
ucaagagugcaggauaguu

SEQ ID NO: 195343 - RNA, 19 nt, Artificial Sequence
  Description of Artificial Sequence: Synthetic oligonucleotide
  Antisense strand to SEQ ID NO: 195342
aacuauccugcacucuuga

SEQ ID NO: 195344 - RNA, 19 nt, Artificial Sequence
  Description of Artificial Sequence: Synthetic oligonucleotide
  Sense strand starting at position 3264 of SEQ ID NO: 2517
acaauauuguugcuggaaa

SEQ ID NO: 195345 - RNA, 19 nt, Artificial Sequence
  Description of Artificial Sequence: Synthetic oligonucleotide
  Antisense strand to SEQ ID NO: 195344
uuuccagcaacaauauugu

SEQ ID NO: 195346 - RNA, 19 nt, Artificial Sequence
  Description of Artificial Sequence: Synthetic oligonucleotide
  Sense strand starting at position 3315 of SEQ ID NO: 2517
auuggaucuugcccagaag

SEQ ID NO: 195347 - RNA, 19 nt, Artificial Sequence
  Description of Artificial Sequence: Synthetic oligonucleotide
  Antisense strand to SEQ ID NO: 195346
cuucugggcaagauccaau

SEQ ID NO: 195348 - RNA, 19 nt, Artificial Sequence
  Description of Artificial Sequence: Synthetic oligonucleotide
  Sense strand starting at position 3363 of SEQ ID NO: 2517
agaagcgauuguuuauuga

SEQ ID NO: 195349 - RNA, 19 nt, Artificial Sequence
  Description of Artificial Sequence: Synthetic oligonucleotide
  Antisense strand to SEQ ID NO: 195348
ucaauaaacaaucgcuucu

SEQ ID NO: 195350 - RNA, 19 nt, Artificial Sequence
  Description of Artificial Sequence: Synthetic oligonucleotide
  Sense strand starting at position 3366 of SEQ ID NO: 2517
agcgauuguuuauugaaag

SEQ ID NO: 195351 - RNA, 19 nt, Artificial Sequence
  Description of Artificial Sequence: Synthetic oligonucleotide
  Antisense strand to SEQ ID NO: 195350
cuuucaauaaacaaucgcu

SEQ ID NO: 195352 - RNA, 19 nt, Artificial Sequence
  Description of Artificial Sequence: Synthetic oligonucleotide
  Sense strand starting at position 3485 of SEQ ID NO: 2517
cuaagcuaugucuacauga

SEQ ID NO: 195353 - RNA, 19 nt, Artificial Sequence
  Description of Artificial Sequence: Synthetic oligonucleotide
  Antisense strand to SEQ ID NO: 195352
ucauguagacauagcuuag

SEQ ID NO: 195354 - RNA, 19 nt, Artificial Sequence
  Description of Artificial Sequence: Synthetic oligonucleotide
  Sense strand starting at position 3968 of SEQ ID NO: 2517
caucgaguccuguaacuau

SEQ ID NO: 195355 - RNA, 19 nt, Artificial Sequence
  Description of Artificial Sequence: Synthetic oligonucleotide
  Antisense strand to SEQ ID NO: 195354
auaguuacaggacucgaug

SEQ ID NO: 195356 - RNA, 19 nt, Artificial Sequence
  Description of Artificial Sequence: Synthetic oligonucleotide
  Sense strand starting at position 220 of SEQ ID NO: 2518
gccucaauguacguuaaca

SEQ ID NO: 195357 - RNA, 19 nt, Artificial Sequence
  Description of Artificial Sequence: Synthetic oligonucleotide
  Antisense strand to SEQ ID NO: 195356
uguuaacguacauugaggc

SEQ ID NO: 195358 - RNA, 19 nt, Artificial Sequence
  Description of Artificial Sequence: Synthetic oligonucleotide
  Sense strand starting at position 222 of SEQ ID NO: 2518
cucaauguacguuaacacu

SEQ ID NO: 195359 - RNA, 19 nt, Artificial Sequence
  Description of Artificial Sequence: Synthetic oligonucleotide
  Antisense strand to SEQ ID NO: 195358
aguguuaacguacauugag

SEQ ID NO: 195360 - RNA, 19 nt, Artificial Sequence
  Description of Artificial Sequence: Synthetic oligonucleotide
  Sense strand starting at position 273 of SEQ ID NO: 2518
agaugaagcuaccauaauu

SEQ ID NO: 195361 - RNA, 19 nt, Artificial Sequence
  Description of Artificial Sequence: Synthetic oligonucleotide
  Antisense strand to SEQ ID NO: 195360
aauuaugguagcuucaucu

SEQ ID NO: 195362 - RNA, 19 nt, Artificial Sequence
  Description of Artificial Sequence: Synthetic oligonucleotide
  Sense strand starting at position 331 of SEQ ID NO: 2518
guauuauggcaguaaauac

SEQ ID NO: 195363 - RNA, 19 nt, Artificial Sequence
  Description of Artificial Sequence: Synthetic oligonucleotide
  Antisense strand to SEQ ID NO: 195362
guauuuacugccauaauac

SEQ ID NO: 195364 - RNA, 19 nt, Artificial Sequence
  Description of Artificial Sequence: Synthetic oligonucleotide
  Sense strand starting at position 894 of SEQ ID NO: 2518
guuucuaaaucagugcuuu

SEQ ID NO: 195365 - RNA, 19 nt, Artificial Sequence
  Description of Artificial Sequence: Synthetic oligonucleotide
  Antisense strand to SEQ ID NO: 195364
aaagcacugauuuagaaac

SEQ ID NO: 195366 - RNA, 19 nt, Artificial Sequence
  Description of Artificial Sequence: Synthetic oligonucleotide
  Sense strand starting at position 902 of SEQ ID NO: 2518
aucagugcuuuagucagau

SEQ ID NO: 195367 - RNA, 19 nt, Artificial Sequence
  Description of Artificial Sequence: Synthetic oligonucleotide
  Antisense strand to SEQ ID NO: 195366
aucugacuaaagcacugau

SEQ ID NO: 195368 - RNA, 19 nt, Artificial Sequence
  Description of Artificial Sequence: Synthetic oligonucleotide
  Sense strand starting at position 943 of SEQ ID NO: 2518
ggcuaacauuaccuguaua

SEQ ID NO: 195369 - RNA, 19 nt, Artificial Sequence
  Description of Artificial Sequence: Synthetic oligonucleotide
  Antisense strand to SEQ ID NO: 195368
uauacagguaauguuagcc

SEQ ID NO: 195370 - RNA, 19 nt, Artificial Sequence
  Description of Artificial Sequence: Synthetic oligonucleotide
  Sense strand starting at position 1044 of SEQ ID NO: 2518
ugagucuugcgggauccua

SEQ ID NO: 195371 - RNA, 19 nt, Artificial Sequence
  Description of Artificial Sequence: Synthetic oligonucleotide
  Antisense strand to SEQ ID NO: 195370
uaggaucccgcaagacuca

SEQ ID NO: 195372 - RNA, 19 nt, Artificial Sequence
  Description of Artificial Sequence: Synthetic oligonucleotide
  Sense strand starting at position 1104 of SEQ ID NO: 2518
ggccuacuccugggccaaa

SEQ ID NO: 195373 - RNA, 19 nt, Artificial Sequence
  Description of Artificial Sequence: Synthetic oligonucleotide
  Antisense strand to SEQ ID NO: 195372
uuuggcccaggaguaggcc

SEQ ID NO: 195374 - RNA, 19 nt, Artificial Sequence
  Description of Artificial Sequence: Synthetic oligonucleotide
  Sense strand starting at position 1105 of SEQ ID NO: 2518
gccuacuccugggccaaau

SEQ ID NO: 195375 - RNA, 19 nt, Artificial Sequence
  Description of Artificial Sequence: Synthetic oligonucleotide
  Antisense strand to SEQ ID NO: 195374
auuuggcccaggaguaggc

SEQ ID NO: 195376 - RNA, 19 nt, Artificial Sequence
  Description of Artificial Sequence: Synthetic oligonucleotide
  Sense strand starting at position 1990 of SEQ ID NO: 2518
agcggugagcuccaauaaa

SEQ ID NO: 195377 - RNA, 19 nt, Artificial Sequence
  Description of Artificial Sequence: Synthetic oligonucleotide
  Antisense strand to SEQ ID NO: 195376
uuuauuggagcucaccgcu

SEQ ID NO: 195378 - RNA, 19 nt, Artificial Sequence
  Description of Artificial Sequence: Synthetic oligonucleotide
  Sense strand starting at position 2079 of SEQ ID NO: 2518
ggguucuucgcugcuucua

SEQ ID NO: 195379 - RNA, 19 nt, Artificial Sequence
  Description of Artificial Sequence: Synthetic oligonucleotide
  Antisense strand to SEQ ID NO: 195378
uagaagcagcgaagaaccc

SEQ ID NO: 195380 - RNA, 19 nt, Artificial Sequence
  Description of Artificial Sequence: Synthetic oligonucleotide
  Sense strand starting at position 2105 of SEQ ID NO: 2518
gcgcuuugccgggcguuaa

SEQ ID NO: 195381 - RNA, 19 nt, Artificial Sequence
  Description of Artificial Sequence: Synthetic oligonucleotide
  Antisense strand to SEQ ID NO: 195380
uuaacgcccggcaaagcgc

SEQ ID NO: 195382 - RNA, 19 nt, Artificial Sequence
  Description of Artificial Sequence: Synthetic oligonucleotide
  Sense strand starting at position 2148 of SEQ ID NO: 2518
cggcuuucucccuaaagug

SEQ ID NO: 195383 - RNA, 19 nt, Artificial Sequence
  Description of Artificial Sequence: Synthetic oligonucleotide
  Antisense strand to SEQ ID NO: 195382
cacuuuagggagaaagccg

SEQ ID NO: 195384 - RNA, 19 nt, Artificial Sequence
  Description of Artificial Sequence: Synthetic oligonucleotide
  Sense strand starting at position 2391 of SEQ ID NO: 2518
aaaucaugcguuuguucca

SEQ ID NO: 195385 - RNA, 19 nt, Artificial Sequence
  Description of Artificial Sequence: Synthetic oligonucleotide
  Antisense strand to SEQ ID NO: 195384
uggaacaaacgcaugauuu

SEQ ID NO: 195386 - RNA, 19 nt, Artificial Sequence
  Description of Artificial Sequence: Synthetic oligonucleotide
  Sense strand starting at position 2398 of SEQ ID NO: 2518
gcguuuguuccauacucca

SEQ ID NO: 195387 - RNA, 19 nt, Artificial Sequence
  Description of Artificial Sequence: Synthetic oligonucleotide
  Antisense strand to SEQ ID NO: 195386
uggaguauggaacaaacgc

SEQ ID NO: 195388 - RNA, 19 nt, Artificial Sequence
  Description of Artificial Sequence: Synthetic oligonucleotide
  Sense strand starting at position 2441 of SEQ ID NO: 2518
caaguugcucuauggucaa

SEQ ID NO: 195389 - RNA, 19 nt, Artificial Sequence
  Description of Artificial Sequence: Synthetic oligonucleotide
  Antisense strand to SEQ ID NO: 195388
uugaccauagagcaacuug

SEQ ID NO: 195390 - RNA, 19 nt, Artificial Sequence
  Description of Artificial Sequence: Synthetic oligonucleotide
  Sense strand starting at position 2445 of SEQ ID NO: 2518
uugcucuauggucaaguga

SEQ ID NO: 195391 - RNA, 19 nt, Artificial Sequence
  Description of Artificial Sequence: Synthetic oligonucleotide
  Antisense strand to SEQ ID NO: 195390
ucacuugaccauagagcaa

SEQ ID NO: 195392 - RNA, 19 nt, Artificial Sequence
  Description of Artificial Sequence: Synthetic oligonucleotide
  Sense strand starting at position 2567 of SEQ ID NO: 2518
gagccuuggcuuugaaauc

SEQ ID NO: 195393 - RNA, 19 nt, Artificial Sequence
  Description of Artificial Sequence: Synthetic oligonucleotide
  Antisense strand to SEQ ID NO: 195392
gauuucaaagccaaggcuc

SEQ ID NO: 195394 - RNA, 19 nt, Artificial Sequence
  Description of Artificial Sequence: Synthetic oligonucleotide
  Sense strand starting at position 2668 of SEQ ID NO: 2518
cuucuaucuccauaggugu

SEQ ID NO: 195395 - RNA, 19 nt, Artificial Sequence
  Description of Artificial Sequence: Synthetic oligonucleotide
  Antisense strand to SEQ ID NO: 195394
acaccuauggagauagaag

SEQ ID NO: 195396 - RNA, 19 nt, Artificial Sequence
  Description of Artificial Sequence: Synthetic oligonucleotide
  Sense strand starting at position 2698 of SEQ ID NO: 2518
aagucuaugcauggaggaa

SEQ ID NO: 195397 - RNA, 19 nt, Artificial Sequence
  Description of Artificial Sequence: Synthetic oligonucleotide
  Antisense strand to SEQ ID NO: 195396
uuccuccaugcauagacuu

SEQ ID NO: 195398 - RNA, 19 nt, Artificial Sequence
  Description of Artificial Sequence: Synthetic oligonucleotide
  Sense strand starting at position 2727 of SEQ ID NO: 2518
agugguagcuauuucuaau

SEQ ID NO: 195399 - RNA, 19 nt, Artificial Sequence
  Description of Artificial Sequence: Synthetic oligonucleotide
  Antisense strand to SEQ ID NO: 195398
auuagaaauagcuaccacu

SEQ ID NO: 195400 - RNA, 19 nt, Artificial Sequence
  Description of Artificial Sequence: Synthetic oligonucleotide
  Sense strand starting at position 2730 of SEQ ID NO: 2518
gguagcuauuucuaauucu

SEQ ID NO: 195401 - RNA, 19 nt, Artificial Sequence
  Description of Artificial Sequence: Synthetic oligonucleotide
  Antisense strand to SEQ ID NO: 195400
agaauuagaaauagcuacc

SEQ ID NO: 195402 - RNA, 19 nt, Artificial Sequence
  Description of Artificial Sequence: Synthetic oligonucleotide
  Sense strand starting at position 2746 of SEQ ID NO: 2518
ucuguucuucuggaccuau

SEQ ID NO: 195403 - RNA, 19 nt, Artificial Sequence
  Description of Artificial Sequence: Synthetic oligonucleotide
  Antisense strand to SEQ ID NO: 195402
auagguccagaagaacaga

SEQ ID NO: 195404 - RNA, 19 nt, Artificial Sequence
  Description of Artificial Sequence: Synthetic oligonucleotide
  Sense strand starting at position 2761 of SEQ ID NO: 2518
cuaugauucuaucuacgau

SEQ ID NO: 195405 - RNA, 19 nt, Artificial Sequence
  Description of Artificial Sequence: Synthetic oligonucleotide
  Antisense strand to SEQ ID NO: 195404
aucguagauagaaucauag

SEQ ID NO: 195406 - RNA, 19 nt, Artificial Sequence
  Description of Artificial Sequence: Synthetic oligonucleotide
  Sense strand starting at position 2808 of SEQ ID NO: 2518
uggcaaacuugugcucuga

SEQ ID NO: 195407 - RNA, 19 nt, Artificial Sequence
  Description of Artificial Sequence: Synthetic oligonucleotide
  Antisense strand to SEQ ID NO: 195406
ucagagcacaaguuugcca

SEQ ID NO: 195408 - RNA, 19 nt, Artificial Sequence
  Description of Artificial Sequence: Synthetic oligonucleotide
  Sense strand starting at position 2810 of SEQ ID NO: 2518
gcaaacuugugcucugaga

SEQ ID NO: 195409 - RNA, 19 nt, Artificial Sequence
  Description of Artificial Sequence: Synthetic oligonucleotide
  Antisense strand to SEQ ID NO: 195408
ucucagagcacaaguuugc

SEQ ID NO: 195410 - RNA, 19 nt, Artificial Sequence
  Description of Artificial Sequence: Synthetic oligonucleotide
  Sense strand starting at position 2835 of SEQ ID NO: 2518
uuguuacaucucugaugac

SEQ ID NO: 195411 - RNA, 19 nt, Artificial Sequence
  Description of Artificial Sequence: Synthetic oligonucleotide
  Antisense strand to SEQ ID NO: 195410
gucaucagagauguaacaa

SEQ ID NO: 195412 - RNA, 19 nt, Artificial Sequence
  Description of Artificial Sequence: Synthetic oligonucleotide
  Sense strand starting at position 2990 of SEQ ID NO: 2518
uccuuuaugagaggugaga

SEQ ID NO: 195413 - RNA, 19 nt, Artificial Sequence
  Description of Artificial Sequence: Synthetic oligonucleotide
  Antisense strand to SEQ ID NO: 195412
ucucaccucucauaaagga

SEQ ID NO: 195414 - RNA, 19 nt, Artificial Sequence
  Description of Artificial Sequence: Synthetic oligonucleotide
  Sense strand starting at position 3022 of SEQ ID NO: 2518
cuucgacauggcuguacau

SEQ ID NO: 195415 - RNA, 19 nt, Artificial Sequence
  Description of Artificial Sequence: Synthetic oligonucleotide
  Antisense strand to SEQ ID NO: 195414
auguacagccaugucgaag

SEQ ID NO: 195416 - RNA, 19 nt, Artificial Sequence
  Description of Artificial Sequence: Synthetic oligonucleotide
  Sense strand starting at position 3100 of SEQ ID NO: 2518
uauagcugccugucaguuu

SEQ ID NO: 195417 - RNA, 19 nt, Artificial Sequence
  Description of Artificial Sequence: Synthetic oligonucleotide
  Antisense strand to SEQ ID NO: 195416
aaacugacaggcagcuaua

SEQ ID NO: 195418 - RNA, 19 nt, Artificial Sequence
  Description of Artificial Sequence: Synthetic oligonucleotide
  Sense strand starting at position 3253 of SEQ ID NO: 2518
agaaguuugagagguuaga

SEQ ID NO: 195419 - RNA, 19 nt, Artificial Sequence
  Description of Artificial Sequence: Synthetic oligonucleotide
  Antisense strand to SEQ ID NO: 195418
ucuaaccucucaaacuucu

SEQ ID NO: 195420 - RNA, 19 nt, Artificial Sequence
  Description of Artificial Sequence: Synthetic oligonucleotide
  Sense strand starting at position 3276 of SEQ ID NO: 2518
guaggaagucucggaggaa

SEQ ID NO: 195421 - RNA, 19 nt, Artificial Sequence
  Description of Artificial Sequence: Synthetic oligonucleotide
  Antisense strand to SEQ ID NO: 195420
uuccuccgagacuuccuac

SEQ ID NO: 195422 - RNA, 19 nt, Artificial Sequence
  Description of Artificial Sequence: Synthetic oligonucleotide
  Sense strand starting at position 3279 of SEQ ID NO: 2518
ggaagucucggaggaacau

SEQ ID NO: 195423 - RNA, 19 nt, Artificial Sequence
  Description of Artificial Sequence: Synthetic oligonucleotide
  Antisense strand to SEQ ID NO: 195422
auguuccuccgagacuucc

SEQ ID NO: 195424 - RNA, 19 nt, Artificial Sequence
  Description of Artificial Sequence: Synthetic oligonucleotide
  Sense strand starting at position 3374 of SEQ ID NO: 2518
gaguauagaguccguaucu

SEQ ID NO: 195425 - RNA, 19 nt, Artificial Sequence
  Description of Artificial Sequence: Synthetic oligonucleotide
  Antisense strand to SEQ ID NO: 195424
agauacggacucuauacuc

SEQ ID NO: 195426 - RNA, 19 nt, Artificial Sequence
  Description of Artificial Sequence: Synthetic oligonucleotide
  Sense strand starting at position 3375 of SEQ ID NO: 2518
aguauagaguccguaucuu

SEQ ID NO: 195427 - RNA, 19 nt, Artificial Sequence
  Description of Artificial Sequence: Synthetic oligonucleotide
  Antisense strand to SEQ ID NO: 195426
aagauacggacucuauacu

SEQ ID NO: 195428 - RNA, 19 nt, Artificial Sequence
  Description of Artificial Sequence: Synthetic oligonucleotide
  Sense strand starting at position 3379 of SEQ ID NO: 2518
uagaguccguaucuuauuu

SEQ ID NO: 195429 - RNA, 19 nt, Artificial Sequence
  Description of Artificial Sequence: Synthetic oligonucleotide
  Antisense strand to SEQ ID NO: 195428
aaauaagauacggacucua

SEQ ID NO: 195430 - RNA, 19 nt, Artificial Sequence
  Description of Artificial Sequence: Synthetic oligonucleotide
  Sense strand starting at position 3494 of SEQ ID NO: 2518
uuccucuuuguggaauuaa

SEQ ID NO: 195431 - RNA, 19 nt, Artificial Sequence
  Description of Artificial Sequence: Synthetic oligonucleotide
  Antisense strand to SEQ ID NO: 195430
uuaauuccacaaagaggaa

SEQ ID NO: 195432 - RNA, 19 nt, Artificial Sequence
  Description of Artificial Sequence: Synthetic oligonucleotide
  Sense strand starting at position 3848 of SEQ ID NO: 2518
uggcaaguuuggcccuaaa

SEQ ID NO: 195433 - RNA, 19 nt, Artificial Sequence
  Description of Artificial Sequence: Synthetic oligonucleotide
  Antisense strand to SEQ ID NO: 195432
uuuagggccaaacuugcca

SEQ ID NO: 195434 - RNA, 19 nt, Artificial Sequence
  Description of Artificial Sequence: Synthetic oligonucleotide
  Sense strand starting at position 3966 of SEQ ID NO: 2518
aguaaugaagacuguaaua

SEQ ID NO: 195435 - RNA, 19 nt, Artificial Sequence
  Description of Artificial Sequence: Synthetic oligonucleotide
  Antisense strand to SEQ ID NO: 195434
uauuacagucuucauuacu

SEQ ID NO: 195436 - RNA, 19 nt, Artificial Sequence
  Description of Artificial Sequence: Synthetic oligonucleotide
  Sense strand starting at position 142 of SEQ ID NO: 2520
cuaggagaauauuaagaag

SEQ ID NO: 195437 - RNA, 19 nt, Artificial Sequence
  Description of Artificial Sequence: Synthetic oligonucleotide
  Antisense strand to SEQ ID NO: 195436
cuucuuaauauucuccuag

SEQ ID NO: 195438 - RNA, 19 nt, Artificial Sequence
  Description of Artificial Sequence: Synthetic oligonucleotide
  Sense strand starting at position 164 of SEQ ID NO: 2520
gugguuucucucuaccuaa

SEQ ID NO: 195439 - RNA, 19 nt, Artificial Sequence
  Description of Artificial Sequence: Synthetic oligonucleotide
  Antisense strand to SEQ ID NO: 195438
uuagguagagagaaaccac

SEQ ID NO: 195440 - RNA, 19 nt, Artificial Sequence
  Description of Artificial Sequence: Synthetic oligonucleotide
  Sense strand starting at position 368 of SEQ ID NO: 2520
gggaguguucugggaauug

SEQ ID NO: 195441 - RNA, 19 nt, Artificial Sequence
  Description of Artificial Sequence: Synthetic oligonucleotide
  Antisense strand to SEQ ID NO: 195440
caauucccagaacacuccc

SEQ ID NO: 195442 - RNA, 19 nt, Artificial Sequence
  Description of Artificial Sequence: Synthetic oligonucleotide
  Sense strand starting at position 463 of SEQ ID NO: 2520
aggguagucuauucucuau

SEQ ID NO: 195443 - RNA, 19 nt, Artificial Sequence
  Description of Artificial Sequence: Synthetic oligonucleotide
  Antisense strand to SEQ ID NO: 195442
auagagaauagacuacccu

SEQ ID NO: 195444 - RNA, 19 nt, Artificial Sequence
  Description of Artificial Sequence: Synthetic oligonucleotide
  Sense strand starting at position 574 of SEQ ID NO: 2520
ccuacauaucuacgaguaa

SEQ ID NO: 195445 - RNA, 19 nt, Artificial Sequence
  Description of Artificial Sequence: Synthetic oligonucleotide
  Antisense strand to SEQ ID NO: 195444
uuacucguagauauguagg

SEQ ID NO: 195446 - RNA, 19 nt, Artificial Sequence
  Description of Artificial Sequence: Synthetic oligonucleotide
  Sense strand starting at position 809 of SEQ ID NO: 2520
guaagaugugcucagguug

SEQ ID NO: 195447 - RNA, 19 nt, Artificial Sequence
  Description of Artificial Sequence: Synthetic oligonucleotide
  Antisense strand to SEQ ID NO: 195446
caaccugagcacaucuuac

SEQ ID NO: 195448 - RNA, 19 nt, Artificial Sequence
  Description of Artificial Sequence: Synthetic oligonucleotide
  Sense strand starting at position 1039 of SEQ ID NO: 2520
gaagguggguggucaaaug

SEQ ID NO: 195449 - RNA, 19 nt, Artificial Sequence
  Description of Artificial Sequence: Synthetic oligonucleotide
  Antisense strand to SEQ ID NO: 195448
cauuugaccacccaccuuc

SEQ ID NO: 195450 - RNA, 19 nt, Artificial Sequence
  Description of Artificial Sequence: Synthetic oligonucleotide
  Sense strand starting at position 2096 of SEQ ID NO: 2520
gauccugaaguuggugaaa

SEQ ID NO: 195451 - RNA, 19 nt, Artificial Sequence
  Description of Artificial Sequence: Synthetic oligonucleotide
  Antisense strand to SEQ ID NO: 195450
uuucaccaacuucaggauc

SEQ ID NO: 195452 - RNA, 19 nt, Artificial Sequence
  Description of Artificial Sequence: Synthetic oligonucleotide
  Sense strand starting at position 2143 of SEQ ID NO: 2520
ggcggagaagucuauccga

SEQ ID NO: 195453 - RNA, 19 nt, Artificial Sequence
  Description of Artificial Sequence: Synthetic oligonucleotide
  Antisense strand to SEQ ID NO: 195452
ucggauagacuucuccgcc

SEQ ID NO: 195454 - RNA, 19 nt, Artificial Sequence
  Description of Artificial Sequence: Synthetic oligonucleotide
  Sense strand starting at position 2146 of SEQ ID NO: 2520
ggagaagucuauccgagcu

SEQ ID NO: 195455 - RNA, 19 nt, Artificial Sequence
  Description of Artificial Sequence: Synthetic oligonucleotide
  Antisense strand to SEQ ID NO: 195454
agcucggauagacuucucc

SEQ ID NO: 195456 - RNA, 19 nt, Artificial Sequence
  Description of Artificial Sequence: Synthetic oligonucleotide
  Sense strand starting at position 2232 of SEQ ID NO: 2520
cuuugcuagguugaggaaa

SEQ ID NO: 195457 - RNA, 19 nt, Artificial Sequence
  Description of Artificial Sequence: Synthetic oligonucleotide
  Antisense strand to SEQ ID NO: 195456
uuuccucaaccuagcaaag

SEQ ID NO: 195458 - RNA, 19 nt, Artificial Sequence
  Description of Artificial Sequence: Synthetic oligonucleotide
  Sense strand starting at position 2552 of SEQ ID NO: 2520
gcaaaccucccaggaauau

SEQ ID NO: 195459 - RNA, 19 nt, Artificial Sequence
  Description of Artificial Sequence: Synthetic oligonucleotide
  Antisense strand to SEQ ID NO: 195458
auauuccugggagguuugc

SEQ ID NO: 195460 - RNA, 19 nt, Artificial Sequence
  Description of Artificial Sequence: Synthetic oligonucleotide
  Sense strand starting at position 2561 of SEQ ID NO: 2520
ccaggaauauauucugcau

SEQ ID NO: 195461 - RNA, 19 nt, Artificial Sequence
  Description of Artificial Sequence: Synthetic oligonucleotide
  Antisense strand to SEQ ID NO: 195460
augcagaauauauuccugg

SEQ ID NO: 195462 - RNA, 19 nt, Artificial Sequence
  Description of Artificial Sequence: Synthetic oligonucleotide
  Sense strand starting at position 2564 of SEQ ID NO: 2520
ggaauauauucugcauaac

SEQ ID NO: 195463 - RNA, 19 nt, Artificial Sequence
  Description of Artificial Sequence: Synthetic oligonucleotide
  Antisense strand to SEQ ID NO: 195462
guuaugcagaauauauucc

SEQ ID NO: 195464 - RNA, 19 nt, Artificial Sequence
  Description of Artificial Sequence: Synthetic oligonucleotide
  Sense strand starting at position 2648 of SEQ ID NO: 2520
auucuacuagcaggauaau

SEQ ID NO: 195465 - RNA, 19 nt, Artificial Sequence
  Description of Artificial Sequence: Synthetic oligonucleotide
  Antisense strand to SEQ ID NO: 195464
auuauccugcuaguagaau

SEQ ID NO: 195466 - RNA, 19 nt, Artificial Sequence
  Description of Artificial Sequence: Synthetic oligonucleotide
  Sense strand starting at position 2778 of SEQ ID NO: 2520
auaggauagcuugaggcua

SEQ ID NO: 195467 - RNA, 19 nt, Artificial Sequence
  Description of Artificial Sequence: Synthetic oligonucleotide
  Antisense strand to SEQ ID NO: 195466
uagccucaagcuauccuau

SEQ ID NO: 195468 - RNA, 19 nt, Artificial Sequence
  Description of Artificial Sequence: Synthetic oligonucleotide
  Sense strand starting at position 2930 of SEQ ID NO: 2520
aacagauugcugggccaua

SEQ ID NO: 195469 - RNA, 19 nt, Artificial Sequence
  Description of Artificial Sequence: Synthetic oligonucleotide
  Antisense strand to SEQ ID NO: 195468
uauggcccagcaaucuguu

SEQ ID NO: 195470 - RNA, 19 nt, Artificial Sequence
  Description of Artificial Sequence: Synthetic oligonucleotide
  Sense strand starting at position 2955 of SEQ ID NO: 2520
gaauucucugacugggcua

SEQ ID NO: 195471 - RNA, 19 nt, Artificial Sequence
  Description of Artificial Sequence: Synthetic oligonucleotide
  Antisense strand to SEQ ID NO: 195470
uagcccagucagagaauuc

SEQ ID NO: 195472 - RNA, 19 nt, Artificial Sequence
  Description of Artificial Sequence: Synthetic oligonucleotide
  Sense strand starting at position 2975 of SEQ ID NO: 2520
cggaaauaaugccugagaa

SEQ ID NO: 195473 - RNA, 19 nt, Artificial Sequence
  Description of Artificial Sequence: Synthetic oligonucleotide
  Antisense strand to SEQ ID NO: 195472
uucucaggcauuauuuccg

SEQ ID NO: 195474 - RNA, 19 nt, Artificial Sequence
  Description of Artificial Sequence: Synthetic oligonucleotide
  Sense strand starting at position 2988 of SEQ ID NO: 2520
ugagaaugugcauaucuaa

SEQ ID NO: 195475 - RNA, 19 nt, Artificial Sequence
  Description of Artificial Sequence: Synthetic oligonucleotide
  Antisense strand to SEQ ID NO: 195474
uuagauaugcacauucuca

SEQ ID NO: 195476 - RNA, 19 nt, Artificial Sequence
  Description of Artificial Sequence: Synthetic oligonucleotide
  Sense strand starting at position 3032 of SEQ ID NO: 2520
ccuagaagguuaguaucuu

SEQ ID NO: 195477 - RNA, 19 nt, Artificial Sequence
  Description of Artificial Sequence: Synthetic oligonucleotide
  Antisense strand to SEQ ID NO: 195476
aagauacuaaccuucuagg

SEQ ID NO: 195478 - RNA, 19 nt, Artificial Sequence
  Description of Artificial Sequence: Synthetic oligonucleotide
  Sense strand starting at position 3185 of SEQ ID NO: 2520
ggaugaaucggguguuuca

SEQ ID NO: 195479 - RNA, 19 nt, Artificial Sequence
  Description of Artificial Sequence: Synthetic oligonucleotide
  Antisense strand to SEQ ID NO: 195478
ugaaacacccgauucaucc

SEQ ID NO: 195480 - RNA, 19 nt, Artificial Sequence
  Description of Artificial Sequence: Synthetic oligonucleotide
  Sense strand starting at position 3266 of SEQ ID NO: 2520
ccgaauauucggugggaug

SEQ ID NO: 195481 - RNA, 19 nt, Artificial Sequence
  Description of Artificial Sequence: Synthetic oligonucleotide
  Antisense strand to SEQ ID NO: 195480
caucccaccgaauauucgg

SEQ ID NO: 195482 - RNA, 19 nt, Artificial Sequence
  Description of Artificial Sequence: Synthetic oligonucleotide
  Sense strand starting at position 3268 of SEQ ID NO: 2520
gaauauucggugggaugca

SEQ ID NO: 195483 - RNA, 19 nt, Artificial Sequence
  Description of Artificial Sequence: Synthetic oligonucleotide
  Antisense strand to SEQ ID NO: 195482
ugcaucccaccgaauauuc

SEQ ID NO: 195484 - RNA, 19 nt, Artificial Sequence
  Description of Artificial Sequence: Synthetic oligonucleotide
  Sense strand starting at position 3301 of SEQ ID NO: 2520
ucuuguagaguuuacagau

SEQ ID NO: 195485 - RNA, 19 nt, Artificial Sequence
  Description of Artificial Sequence: Synthetic oligonucleotide
  Antisense strand to SEQ ID NO: 195484
aucuguaaacucuacaaga

SEQ ID NO: 195486 - RNA, 19 nt, Artificial Sequence
  Description of Artificial Sequence: Synthetic oligonucleotide
  Sense strand starting at position 3330 of SEQ ID NO: 2520
cagacaaauuguguuaaga

SEQ ID NO: 195487 - RNA, 19 nt, Artificial Sequence
  Description of Artificial Sequence: Synthetic oligonucleotide
  Antisense strand to SEQ ID NO: 195486
ucuuaacacaauuugucug

SEQ ID NO: 195488 - RNA, 19 nt, Artificial Sequence
  Description of Artificial Sequence: Synthetic oligonucleotide
  Sense strand starting at position 3338 of SEQ ID NO: 2520
uuguguuaagagcaauaga

SEQ ID NO: 195489 - RNA, 19 nt, Artificial Sequence
  Description of Artificial Sequence: Synthetic oligonucleotide
  Antisense strand to SEQ ID NO: 195488
ucuauugcucuuaacacaa

SEQ ID NO: 195490 - RNA, 19 nt, Artificial Sequence
  Description of Artificial Sequence: Synthetic oligonucleotide
  Sense strand starting at position 3365 of SEQ ID NO: 2520
agcggaggacucugagaaa

SEQ ID NO: 195491 - RNA, 19 nt, Artificial Sequence
  Description of Artificial Sequence: Synthetic oligonucleotide
  Antisense strand to SEQ ID NO: 195490
uuucucagaguccuccgcu

SEQ ID NO: 195492 - RNA, 19 nt, Artificial Sequence
  Description of Artificial Sequence: Synthetic oligonucleotide
  Sense strand starting at position 3470 of SEQ ID NO: 2520
aagagucucccaggagagu

SEQ ID NO: 195493 - RNA, 19 nt, Artificial Sequence
  Description of Artificial Sequence: Synthetic oligonucleotide
  Antisense strand to SEQ ID NO: 195492
acucuccugggagacucuu

SEQ ID NO: 195494 - RNA, 19 nt, Artificial Sequence
  Description of Artificial Sequence: Synthetic oligonucleotide
  Sense strand starting at position 3559 of SEQ ID NO: 2520
augaaagagucagagaaga

SEQ ID NO: 195495 - RNA, 19 nt, Artificial Sequence
  Description of Artificial Sequence: Synthetic oligonucleotide
  Antisense strand to SEQ ID NO: 195494
ucuucucugacucuuucau

SEQ ID NO: 195496 - RNA, 19 nt, Artificial Sequence
  Description of Artificial Sequence: Synthetic oligonucleotide
  Sense strand starting at position 3588 of SEQ ID NO: 2520
gaugaagacugagagauaa

SEQ ID NO: 195497 - RNA, 19 nt, Artificial Sequence
  Description of Artificial Sequence: Synthetic oligonucleotide
  Antisense strand to SEQ ID NO: 195496
uuaucucucagucuucauc

SEQ ID NO: 195498 - RNA, 19 nt, Artificial Sequence
  Description of Artificial Sequence: Synthetic oligonucleotide
  Sense strand starting at position 3632 of SEQ ID NO: 2520
uguagacugcucuaagcau

SEQ ID NO: 195499 - RNA, 19 nt, Artificial Sequence
  Description of Artificial Sequence: Synthetic oligonucleotide
  Antisense strand to SEQ ID NO: 195498
augcuuagagcagucuaca

SEQ ID NO: 195500 - RNA, 19 nt, Artificial Sequence
  Description of Artificial Sequence: Synthetic oligonucleotide
  Sense strand starting at position 3754 of SEQ ID NO: 2520
gucugcuuuguagagaaug

SEQ ID NO: 195501 - RNA, 19 nt, Artificial Sequence
  Description of Artificial Sequence: Synthetic oligonucleotide
  Antisense strand to SEQ ID NO: 195500
cauucucuacaaagcagac

SEQ ID NO: 195502 - RNA, 19 nt, Artificial Sequence
  Description of Artificial Sequence: Synthetic oligonucleotide
  Sense strand starting at position 3780 of SEQ ID NO: 2520
cagaguccagauugaauca

SEQ ID NO: 195503 - RNA, 19 nt, Artificial Sequence
  Description of Artificial Sequence: Synthetic oligonucleotide
  Antisense strand to SEQ ID NO: 195502
ugauucaaucuggacucug

SEQ ID NO: 195504 - RNA, 19 nt, Artificial Sequence
  Description of Artificial Sequence: Synthetic oligonucleotide
  Sense strand starting at position 3792 of SEQ ID NO: 2520
ugaaucauacauuguauga

SEQ ID NO: 195505 - RNA, 19 nt, Artificial Sequence
  Description of Artificial Sequence: Synthetic oligonucleotide
  Antisense strand to SEQ ID NO: 195504
ucauacaauguaugauuca

SEQ ID NO: 195506 - RNA, 19 nt, Artificial Sequence
  Description of Artificial Sequence: Synthetic oligonucleotide
  Sense strand starting at position 3824 of SEQ ID NO: 2520
ggaguucgcagauagaagu

SEQ ID NO: 195507 - RNA, 19 nt, Artificial Sequence
  Description of Artificial Sequence: Synthetic oligonucleotide
  Antisense strand to SEQ ID NO: 195506
acuucuaucugcgaacucc

SEQ ID NO: 195508 - RNA, 19 nt, Artificial Sequence
  Description of Artificial Sequence: Synthetic oligonucleotide
  Sense strand starting at position 3830 of SEQ ID NO: 2520
cgcagauagaaguauguga

SEQ ID NO: 195509 - RNA, 19 nt, Artificial Sequence
  Description of Artificial Sequence: Synthetic oligonucleotide
  Antisense strand to SEQ ID NO: 195508
ucacauacuucuaucugcg

SEQ ID NO: 195510 - RNA, 19 nt, Artificial Sequence
  Description of Artificial Sequence: Synthetic oligonucleotide
  Sense strand starting at position 3870 of SEQ ID NO: 2520
cagguaugugcagaggaga

SEQ ID NO: 195511 - RNA, 19 nt, Artificial Sequence
  Description of Artificial Sequence: Synthetic oligonucleotide
  Antisense strand to SEQ ID NO: 195510
ucuccucugcacauaccug

SEQ ID NO: 195512 - RNA, 19 nt, Artificial Sequence
  Description of Artificial Sequence: Synthetic oligonucleotide
  Sense strand starting at position 3897 of SEQ ID NO: 2520
agggcaucaucaucaauua

SEQ ID NO: 195513 - RNA, 19 nt, Artificial Sequence
  Description of Artificial Sequence: Synthetic oligonucleotide
  Antisense strand to SEQ ID NO: 195512
uaauugaugaugaugcccu

SEQ ID NO: 195514 - RNA, 19 nt, Artificial Sequence
  Description of Artificial Sequence: Synthetic oligonucleotide
  Sense strand starting at position 3983 of SEQ ID NO: 2520
aacaacugguugucucaga

SEQ ID NO: 195515 - RNA, 19 nt, Artificial Sequence
  Description of Artificial Sequence: Synthetic oligonucleotide
  Antisense strand to SEQ ID NO: 195514
ucugagacaaccaguuguu

SEQ ID NO: 195516 - RNA, 19 nt, Artificial Sequence
  Description of Artificial Sequence: Synthetic oligonucleotide
  Sense strand starting at position 208 of SEQ ID NO: 2519
aucaucaaugugcaguuaa

SEQ ID NO: 195517 - RNA, 19 nt, Artificial Sequence
  Description of Artificial Sequence: Synthetic oligonucleotide
  Antisense strand to SEQ ID NO: 195516
uuaacugcacauugaugau

SEQ ID NO: 195518 - RNA, 19 nt, Artificial Sequence
  Description of Artificial Sequence: Synthetic oligonucleotide
  Sense strand starting at position 300 of SEQ ID NO: 2519
agaaauagccuagguuaaa

SEQ ID NO: 195519 - RNA, 19 nt, Artificial Sequence
  Description of Artificial Sequence: Synthetic oligonucleotide
  Antisense strand to SEQ ID NO: 195518
uuuaaccuaggcuauuucu

SEQ ID NO: 195520 - RNA, 19 nt, Artificial Sequence
  Description of Artificial Sequence: Synthetic oligonucleotide
  Sense strand starting at position 301 of SEQ ID NO: 2519
gaaauagccuagguuaaau

SEQ ID NO: 195521 - RNA, 19 nt, Artificial Sequence
  Description of Artificial Sequence: Synthetic oligonucleotide
  Antisense strand to SEQ ID NO: 195520
auuuaaccuaggcuauuuc

SEQ ID NO: 195522 - RNA, 19 nt, Artificial Sequence
  Description of Artificial Sequence: Synthetic oligonucleotide
  Sense strand starting at position 368 of SEQ ID NO: 2519
aagguugcccuuuaggaaa

SEQ ID NO: 195523 - RNA, 19 nt, Artificial Sequence
  Description of Artificial Sequence: Synthetic oligonucleotide
  Antisense strand to SEQ ID NO: 195522
uuuccuaaagggcaaccuu

SEQ ID NO: 195524 - RNA, 19 nt, Artificial Sequence
  Description of Artificial Sequence: Synthetic oligonucleotide
  Sense strand starting at position 391 of SEQ ID NO: 2519
gucacuuaaggacaguuua

SEQ ID NO: 195525 - RNA, 19 nt, Artificial Sequence
  Description of Artificial Sequence: Synthetic oligonucleotide
  Antisense strand to SEQ ID NO: 195524
uaaacuguccuuaagugac

SEQ ID NO: 195526 - RNA, 19 nt, Artificial Sequence
  Description of Artificial Sequence: Synthetic oligonucleotide
  Sense strand starting at position 399 of SEQ ID NO: 2519
aggacaguuuaucucaaug

SEQ ID NO: 195527 - RNA, 19 nt, Artificial Sequence
  Description of Artificial Sequence: Synthetic oligonucleotide
  Antisense strand to SEQ ID NO: 195526
cauugagauaaacuguccu

SEQ ID NO: 195528 - RNA, 19 nt, Artificial Sequence
  Description of Artificial Sequence: Synthetic oligonucleotide
  Sense strand starting at position 424 of SEQ ID NO: 2519
cuuguauacuaauucgaaa

SEQ ID NO: 195529 - RNA, 19 nt, Artificial Sequence
  Description of Artificial Sequence: Synthetic oligonucleotide
  Antisense strand to SEQ ID NO: 195528
uuucgaauuaguauacaag

SEQ ID NO: 195530 - RNA, 19 nt, Artificial Sequence
  Description of Artificial Sequence: Synthetic oligonucleotide
  Sense strand starting at position 477 of SEQ ID NO: 2519
guaacauacuacuugagau

SEQ ID NO: 195531 - RNA, 19 nt, Artificial Sequence
  Description of Artificial Sequence: Synthetic oligonucleotide
  Antisense strand to SEQ ID NO: 195530
aucucaaguaguauguuac

SEQ ID NO: 195532 - RNA, 19 nt, Artificial Sequence
  Description of Artificial Sequence: Synthetic oligonucleotide
  Sense strand starting at position 563 of SEQ ID NO: 2519
agcauuaauuauguagcaa

SEQ ID NO: 195533 - RNA, 19 nt, Artificial Sequence
  Description of Artificial Sequence: Synthetic oligonucleotide
  Antisense strand to SEQ ID NO: 195532
uugcuacauaauuaaugcu

SEQ ID NO: 195534 - RNA, 19 nt, Artificial Sequence
  Description of Artificial Sequence: Synthetic oligonucleotide
  Sense strand starting at position 577 of SEQ ID NO: 2519
agcaauauucgucacuuua

SEQ ID NO: 195535 - RNA, 19 nt, Artificial Sequence
  Description of Artificial Sequence: Synthetic oligonucleotide
  Antisense strand to SEQ ID NO: 195534
uaaagugacgaauauugcu

SEQ ID NO: 195536 - RNA, 19 nt, Artificial Sequence
  Description of Artificial Sequence: Synthetic oligonucleotide
  Sense strand starting at position 806 of SEQ ID NO: 2519
cuaggagaauauuaagaag

SEQ ID NO: 195537 - RNA, 19 nt, Artificial Sequence
  Description of Artificial Sequence: Synthetic oligonucleotide
  Antisense strand to SEQ ID NO: 195536
cuucuuaauauucuccuag

SEQ ID NO: 195538 - RNA, 19 nt, Artificial Sequence
  Description of Artificial Sequence: Synthetic oligonucleotide
  Sense strand starting at position 809 of SEQ ID NO: 2519
ggagaauauuaagaaguug

SEQ ID NO: 195539 - RNA, 19 nt, Artificial Sequence
  Description of Artificial Sequence: Synthetic oligonucleotide
  Antisense strand to SEQ ID NO: 195538
caacuucuuaauauucucc

SEQ ID NO: 195540 - RNA, 19 nt, Artificial Sequence
  Description of Artificial Sequence: Synthetic oligonucleotide
  Sense strand starting at position 828 of SEQ ID NO: 2519
gugguuucucucuaccuaa

SEQ ID NO: 195541 - RNA, 19 nt, Artificial Sequence
  Description of Artificial Sequence: Synthetic oligonucleotide
  Antisense strand to SEQ ID NO: 195540
uuagguagagagaaaccac

SEQ ID NO: 195542 - RNA, 19 nt, Artificial Sequence
  Description of Artificial Sequence: Synthetic oligonucleotide
  Sense strand starting at position 1032 of SEQ ID NO: 2519
gggaguguucugggaauug

SEQ ID NO: 195543 - RNA, 19 nt, Artificial Sequence
  Description of Artificial Sequence: Synthetic oligonucleotide
  Antisense strand to SEQ ID NO: 195542
caauucccagaacacuccc

SEQ ID NO: 195544 - RNA, 19 nt, Artificial Sequence
  Description of Artificial Sequence: Synthetic oligonucleotide
  Sense strand starting at position 1127 of SEQ ID NO: 2519
aggguagucuauucucuau

SEQ ID NO: 195545 - RNA, 19 nt, Artificial Sequence
  Description of Artificial Sequence: Synthetic oligonucleotide
  Antisense strand to SEQ ID NO: 195544
auagagaauagacuacccu

SEQ ID NO: 195546 - RNA, 19 nt, Artificial Sequence
  Description of Artificial Sequence: Synthetic oligonucleotide
  Sense strand starting at position 1147 of SEQ ID NO: 2519
caguuaugagugugguaca

SEQ ID NO: 195547 - RNA, 19 nt, Artificial Sequence
  Description of Artificial Sequence: Synthetic oligonucleotide
  Antisense strand to SEQ ID NO: 195546
uguaccacacucauaacug

SEQ ID NO: 195548 - RNA, 19 nt, Artificial Sequence
  Description of Artificial Sequence: Synthetic oligonucleotide
  Sense strand starting at position 1238 of SEQ ID NO: 2519
ccuacauaucuacgaguaa

SEQ ID NO: 195549 - RNA, 19 nt, Artificial Sequence
  Description of Artificial Sequence: Synthetic oligonucleotide
  Antisense strand to SEQ ID NO: 195548
uuacucguagauauguagg

SEQ ID NO: 195550 - RNA, 19 nt, Artificial Sequence
  Description of Artificial Sequence: Synthetic oligonucleotide
  Sense strand starting at position 1473 of SEQ ID NO: 2519
guaagaugugcucagguug

SEQ ID NO: 195551 - RNA, 19 nt, Artificial Sequence
  Description of Artificial Sequence: Synthetic oligonucleotide
  Antisense strand to SEQ ID NO: 195550
caaccugagcacaucuuac

SEQ ID NO: 195552 - RNA, 19 nt, Artificial Sequence
  Description of Artificial Sequence: Synthetic oligonucleotide
  Sense strand starting at position 1703 of SEQ ID NO: 2519
gaagguggguggucaaaug

SEQ ID NO: 195553 - RNA, 19 nt, Artificial Sequence
  Description of Artificial Sequence: Synthetic oligonucleotide
  Antisense strand to SEQ ID NO: 195552
cauuugaccacccaccuuc

SEQ ID NO: 195554 - RNA, 19 nt, Artificial Sequence
  Description of Artificial Sequence: Synthetic oligonucleotide
  Sense strand starting at position 2721 of SEQ ID NO: 2519
gagcaugcgcaauaaggua

SEQ ID NO: 195555 - RNA, 19 nt, Artificial Sequence
  Description of Artificial Sequence: Synthetic oligonucleotide
  Antisense strand to SEQ ID NO: 195554
uaccuuauugcgcaugcuc

SEQ ID NO: 195556 - RNA, 19 nt, Artificial Sequence
  Description of Artificial Sequence: Synthetic oligonucleotide
  Sense strand starting at position 2760 of SEQ ID NO: 2519
gauccugaaguuggugaaa

SEQ ID NO: 195557 - RNA, 19 nt, Artificial Sequence
  Description of Artificial Sequence: Synthetic oligonucleotide
  Antisense strand to SEQ ID NO: 195556
uuucaccaacuucaggauc

SEQ ID NO: 195558 - RNA, 19 nt, Artificial Sequence
  Description of Artificial Sequence: Synthetic oligonucleotide
  Sense strand starting at position 2807 of SEQ ID NO: 2519
ggcggagaagucuauccga

SEQ ID NO: 195559 - RNA, 19 nt, Artificial Sequence
  Description of Artificial Sequence: Synthetic oligonucleotide
  Antisense strand to SEQ ID NO: 195558
ucggauagacuucuccgcc

SEQ ID NO: 195560 - RNA, 19 nt, Artificial Sequence
  Description of Artificial Sequence: Synthetic oligonucleotide
  Sense strand starting at position 2810 of SEQ ID NO: 2519
ggagaagucuauccgagcu

SEQ ID NO: 195561 - RNA, 19 nt, Artificial Sequence
  Description of Artificial Sequence: Synthetic oligonucleotide
  Antisense strand to SEQ ID NO: 195560
agcucggauagacuucucc

SEQ ID NO: 195562 - RNA, 19 nt, Artificial Sequence
  Description of Artificial Sequence: Synthetic oligonucleotide
  Sense strand starting at position 2896 of SEQ ID NO: 2519
cuuugcuagguugaggaaa

SEQ ID NO: 195563 - RNA, 19 nt, Artificial Sequence
  Description of Artificial Sequence: Synthetic oligonucleotide
  Antisense strand to SEQ ID NO: 195562
uuuccucaaccuagcaaag

SEQ ID NO: 195564 - RNA, 19 nt, Artificial Sequence
  Description of Artificial Sequence: Synthetic oligonucleotide
  Sense strand starting at position 3216 of SEQ ID NO: 2519
gcaaaccucccaggaauau

SEQ ID NO: 195565 - RNA, 19 nt, Artificial Sequence
  Description of Artificial Sequence: Synthetic oligonucleotide
  Antisense strand to SEQ ID NO: 195564
auauuccugggagguuugc

SEQ ID NO: 195566 - RNA, 19 nt, Artificial Sequence
  Description of Artificial Sequence: Synthetic oligonucleotide
  Sense strand starting at position 3225 of SEQ ID NO: 2519
ccaggaauauauucugcau

SEQ ID NO: 195567 - RNA, 19 nt, Artificial Sequence
  Description of Artificial Sequence: Synthetic oligonucleotide
  Antisense strand to SEQ ID NO: 195566
augcagaauauauuccugg

SEQ ID NO: 195568 - RNA, 19 nt, Artificial Sequence
  Description of Artificial Sequence: Synthetic oligonucleotide
  Sense strand starting at position 3228 of SEQ ID NO: 2519
ggaauauauucugcauaac

SEQ ID NO: 195569 - RNA, 19 nt, Artificial Sequence
  Description of Artificial Sequence: Synthetic oligonucleotide
  Antisense strand to SEQ ID NO: 195568
guuaugcagaauauauucc

SEQ ID NO: 195570 - RNA, 19 nt, Artificial Sequence
  Description of Artificial Sequence: Synthetic oligonucleotide
  Sense strand starting at position 3312 of SEQ ID NO: 2519
auucuacuagcaggauaau

SEQ ID NO: 195571 - RNA, 19 nt, Artificial Sequence
  Description of Artificial Sequence: Synthetic oligonucleotide
  Antisense strand to SEQ ID NO: 195570
auuauccugcuaguagaau

SEQ ID NO: 195572 - RNA, 19 nt, Artificial Sequence
  Description of Artificial Sequence: Synthetic oligonucleotide
  Sense strand starting at position 3442 of SEQ ID NO: 2519
auaggauagcuugaggcua

SEQ ID NO: 195573 - RNA, 19 nt, Artificial Sequence
  Description of Artificial Sequence: Synthetic oligonucleotide
  Antisense strand to SEQ ID NO: 195572
uagccucaagcuauccuau

SEQ ID NO: 195574 - RNA, 19 nt, Artificial Sequence
  Description of Artificial Sequence: Synthetic oligonucleotide
  Sense strand starting at position 3594 of SEQ ID NO: 2519
aacagauugcugggccaua

SEQ ID NO: 195575 - RNA, 19 nt, Artificial Sequence
  Description of Artificial Sequence: Synthetic oligonucleotide
  Antisense strand to SEQ ID NO: 195574
uauggcccagcaaucuguu

SEQ ID NO: 195576 - RNA, 19 nt, Artificial Sequence
  Description of Artificial Sequence: Synthetic oligonucleotide
  Sense strand starting at position 3619 of SEQ ID NO: 2519
gaauucucugacugggcua

SEQ ID NO: 195577 - RNA, 19 nt, Artificial Sequence
  Description of Artificial Sequence: Synthetic oligonucleotide
  Antisense strand to SEQ ID NO: 195576
uagcccagucagagaauuc

SEQ ID NO: 195578 - RNA, 19 nt, Artificial Sequence
  Description of Artificial Sequence: Synthetic oligonucleotide
  Sense strand starting at position 3639 of SEQ ID NO: 2519
cggaaauaaugccugagaa

SEQ ID NO: 195579 - RNA, 19 nt, Artificial Sequence
  Description of Artificial Sequence: Synthetic oligonucleotide
  Antisense strand to SEQ ID NO: 195578
uucucaggcauuauuuccg

SEQ ID NO: 195580 - RNA, 19 nt, Artificial Sequence
  Description of Artificial Sequence: Synthetic oligonucleotide
  Sense strand starting at position 3652 of SEQ ID NO: 2519
ugagaaugugcauaucuaa

SEQ ID NO: 195581 - RNA, 19 nt, Artificial Sequence
  Description of Artificial Sequence: Synthetic oligonucleotide
  Antisense strand to SEQ ID NO: 195580
uuagauaugcacauucuca

SEQ ID NO: 195582 - RNA, 19 nt, Artificial Sequence
  Description of Artificial Sequence: Synthetic oligonucleotide
  Sense strand starting at position 3696 of SEQ ID NO: 2519
ccuagaagguuaguaucuu

SEQ ID NO: 195583 - RNA, 19 nt, Artificial Sequence
  Description of Artificial Sequence: Synthetic oligonucleotide
  Antisense strand to SEQ ID NO: 195582
aagauacuaaccuucuagg

SEQ ID NO: 195584 - RNA, 19 nt, Artificial Sequence
  Description of Artificial Sequence: Synthetic oligonucleotide
  Sense strand starting at position 3849 of SEQ ID NO: 2519
ggaugaaucggguguuuca

SEQ ID NO: 195585 - RNA, 19 nt, Artificial Sequence
  Description of Artificial Sequence: Synthetic oligonucleotide
  Antisense strand to SEQ ID NO: 195584
ugaaacacccgauucaucc

SEQ ID NO: 195586 - RNA, 19 nt, Artificial Sequence
  Description of Artificial Sequence: Synthetic oligonucleotide
  Sense strand starting at position 3929 of SEQ ID NO: 2519
uccgaauauucggugggau

SEQ ID NO: 195587 - RNA, 19 nt, Artificial Sequence
  Description of Artificial Sequence: Synthetic oligonucleotide
  Antisense strand to SEQ ID NO: 195586
aucccaccgaauauucgga

SEQ ID NO: 195588 - RNA, 19 nt, Artificial Sequence
  Description of Artificial Sequence: Synthetic oligonucleotide
  Sense strand starting at position 3930 of SEQ ID NO: 2519
ccgaauauucggugggaug

SEQ ID NO: 195589 - RNA, 19 nt, Artificial Sequence
  Description of Artificial Sequence: Synthetic oligonucleotide
  Antisense strand to SEQ ID NO: 195588
caucccaccgaauauucgg

SEQ ID NO: 195590 - RNA, 19 nt, Artificial Sequence
  Description of Artificial Sequence: Synthetic oligonucleotide
  Sense strand starting at position 3932 of SEQ ID NO: 2519
gaauauucggugggaugca

SEQ ID NO: 195591 - RNA, 19 nt, Artificial Sequence
  Description of Artificial Sequence: Synthetic oligonucleotide
  Antisense strand to SEQ ID NO: 195590
ugcaucccaccgaauauuc

SEQ ID NO: 195592 - RNA, 19 nt, Artificial Sequence
  Description of Artificial Sequence: Synthetic oligonucleotide
  Sense strand starting at position 3960 of SEQ ID NO: 2519
agugcucuuguagaguuua

SEQ ID NO: 195593 - RNA, 19 nt, Artificial Sequence
  Description of Artificial Sequence: Synthetic oligonucleotide
  Antisense strand to SEQ ID NO: 195592
uaaacucuacaagagcacu

SEQ ID NO: 195594 - RNA, 19 nt, Artificial Sequence
  Description of Artificial Sequence: Synthetic oligonucleotide
  Sense strand starting at position 3965 of SEQ ID NO: 2519
ucuuguagaguuuacagau

SEQ ID NO: 195595 - RNA, 19 nt, Artificial Sequence
  Description of Artificial Sequence: Synthetic oligonucleotide
  Antisense strand to SEQ ID NO: 195594
aucuguaaacucuacaaga

SEQ ID NO: 195596 - RNA, 19 nt, Artificial Sequence
  Description of Artificial Sequence: Synthetic oligonucleotide
  Sense strand starting at position 21 of SEQ ID NO: 2521
gugggacucagccauggua

SEQ ID NO: 195597 - RNA, 19 nt, Artificial Sequence
  Description of Artificial Sequence: Synthetic oligonucleotide
  Antisense strand to SEQ ID NO: 195596
uaccauggcugagucccac

SEQ ID NO: 195598 - RNA, 19 nt, Artificial Sequence
  Description of Artificial Sequence: Synthetic oligonucleotide
  Sense strand starting at position 23 of SEQ ID NO: 2521
gggacucagccaugguaaa

SEQ ID NO: 195599 - RNA, 19 nt, Artificial Sequence
  Description of Artificial Sequence: Synthetic oligonucleotide
  Antisense strand to SEQ ID NO: 195598
uuuaccauggcugaguccc

SEQ ID NO: 195600 - RNA, 19 nt, Artificial Sequence
  Description of Artificial Sequence: Synthetic oligonucleotide
  Sense strand starting at position 24 of SEQ ID NO: 2521
ggacucagccaugguaaac

SEQ ID NO: 195601 - RNA, 19 nt, Artificial Sequence
  Description of Artificial Sequence: Synthetic oligonucleotide
  Antisense strand to SEQ ID NO: 195600
guuuaccauggcugagucc

SEQ ID NO: 195602 - RNA, 19 nt, Artificial Sequence
  Description of Artificial Sequence: Synthetic oligonucleotide
  Sense strand starting at position 50 of SEQ ID NO: 2521
gacaguaugugagugaaug

SEQ ID NO: 195603 - RNA, 19 nt, Artificial Sequence
  Description of Artificial Sequence: Synthetic oligonucleotide
  Antisense strand to SEQ ID NO: 195602
cauucacucacauacuguc

SEQ ID NO: 195604 - RNA, 19 nt, Artificial Sequence
  Description of Artificial Sequence: Synthetic oligonucleotide
  Sense strand starting at position 51 of SEQ ID NO: 2521
acaguaugugagugaauga

SEQ ID NO: 195605 - RNA, 19 nt, Artificial Sequence
  Description of Artificial Sequence: Synthetic oligonucleotide
  Antisense strand to SEQ ID NO: 195604
ucauucacucacauacugu

SEQ ID NO: 195606 - RNA, 19 nt, Artificial Sequence
  Description of Artificial Sequence: Synthetic oligonucleotide
  Sense strand starting at position 52 of SEQ ID NO: 2521
caguaugugagugaaugaa

SEQ ID NO: 195607 - RNA, 19 nt, Artificial Sequence
  Description of Artificial Sequence: Synthetic oligonucleotide
  Antisense strand to SEQ ID NO: 195606
uucauucacucacauacug

SEQ ID NO: 195608 - RNA, 19 nt, Artificial Sequence
  Description of Artificial Sequence: Synthetic oligonucleotide
  Sense strand starting at position 62 of SEQ ID NO: 2521
gugaaugaacuuugacaau

SEQ ID NO: 195609 - RNA, 19 nt, Artificial Sequence
  Description of Artificial Sequence: Synthetic oligonucleotide
  Antisense strand to SEQ ID NO: 195608
auugucaaaguucauucac

SEQ ID NO: 195610 - RNA, 19 nt, Artificial Sequence
  Description of Artificial Sequence: Synthetic oligonucleotide
  Sense strand starting at position 72 of SEQ ID NO: 2521
uuugacaaucacuggcaaa

SEQ ID NO: 195611 - RNA, 19 nt, Artificial Sequence
  Description of Artificial Sequence: Synthetic oligonucleotide
  Antisense strand to SEQ ID NO: 195610
uuugccagugauugucaaa

SEQ ID NO: 195612 - RNA, 19 nt, Artificial Sequence
  Description of Artificial Sequence: Synthetic oligonucleotide
  Sense strand starting at position 96 of SEQ ID NO: 2521
ccaagaacaugaguucuga

SEQ ID NO: 195613 - RNA, 19 nt, Artificial Sequence
  Description of Artificial Sequence: Synthetic oligonucleotide
  Antisense strand to SEQ ID NO: 195612
ucagaacucauguucuugg

SEQ ID NO: 195614 - RNA, 19 nt, Artificial Sequence
  Description of Artificial Sequence: Synthetic oligonucleotide
  Sense strand starting at position 170 of SEQ ID NO: 2521
ucaauuucuuauuguagga

SEQ ID NO: 195615 - RNA, 19 nt, Artificial Sequence
  Description of Artificial Sequence: Synthetic oligonucleotide
  Antisense strand to SEQ ID NO: 195614
uccuacaauaagaaauuga

SEQ ID NO: 195616 - RNA, 19 nt, Artificial Sequence
  Description of Artificial Sequence: Synthetic oligonucleotide
  Sense strand starting at position 177 of SEQ ID NO: 2521
cuuauuguaggacgguaaa

SEQ ID NO: 195617 - RNA, 19 nt, Artificial Sequence
  Description of Artificial Sequence: Synthetic oligonucleotide
  Antisense strand to SEQ ID NO: 195616
uuuaccguccuacaauaag

SEQ ID NO: 195618 - RNA, 19 nt, Artificial Sequence
  Description of Artificial Sequence: Synthetic oligonucleotide
  Sense strand starting at position 206 of SEQ ID NO: 2521
gacauaugguguuugugga

SEQ ID NO: 195619 - RNA, 19 nt, Artificial Sequence
  Description of Artificial Sequence: Synthetic oligonucleotide
  Antisense strand to SEQ ID NO: 195618
uccacaaacaccauauguc

SEQ ID NO: 195620 - RNA, 19 nt, Artificial Sequence
  Description of Artificial Sequence: Synthetic oligonucleotide
  Sense strand starting at position 207 of SEQ ID NO: 2521
acauaugguguuuguggaa

SEQ ID NO: 195621 - RNA, 19 nt, Artificial Sequence
  Description of Artificial Sequence: Synthetic oligonucleotide
  Antisense strand to SEQ ID NO: 195620
uuccacaaacaccauaugu

SEQ ID NO: 195622 - RNA, 19 nt, Artificial Sequence
  Description of Artificial Sequence: Synthetic oligonucleotide
  Sense strand starting at position 343 of SEQ ID NO: 2521
gugguuugcuucuccagaa

SEQ ID NO: 195623 - RNA, 19 nt, Artificial Sequence
  Description of Artificial Sequence: Synthetic oligonucleotide
  Antisense strand to SEQ ID NO: 195622
uucuggagaagcaaaccac

SEQ ID NO: 195624 - RNA, 19 nt, Artificial Sequence
  Description of Artificial Sequence: Synthetic oligonucleotide
  Sense strand starting at position 344 of SEQ ID NO: 2521
ugguuugcuucuccagaau

SEQ ID NO: 195625 - RNA, 19 nt, Artificial Sequence
  Description of Artificial Sequence: Synthetic oligonucleotide
  Antisense strand to SEQ ID NO: 195624
auucuggagaagcaaacca

SEQ ID NO: 195626 - RNA, 19 nt, Artificial Sequence
  Description of Artificial Sequence: Synthetic oligonucleotide
  Sense strand starting at position 366 of SEQ ID NO: 2521
uacugaguugggcaugaga

SEQ ID NO: 195627 - RNA, 19 nt, Artificial Sequence
  Description of Artificial Sequence: Synthetic oligonucleotide
  Antisense strand to SEQ ID NO: 195626
ucucaugcccaacucagua

SEQ ID NO: 195628 - RNA, 19 nt, Artificial Sequence
  Description of Artificial Sequence: Synthetic oligonucleotide
  Sense strand starting at position 368 of SEQ ID NO: 2521
cugaguugggcaugagauc

SEQ ID NO: 195629 - RNA, 19 nt, Artificial Sequence
  Description of Artificial Sequence: Synthetic oligonucleotide
  Antisense strand to SEQ ID NO: 195628
gaucucaugcccaacucag

SEQ ID NO: 195630 - RNA, 19 nt, Artificial Sequence
  Description of Artificial Sequence: Synthetic oligonucleotide
  Sense strand starting at position 557 of SEQ ID NO: 2521
ucaauccaagccugagaau

SEQ ID NO: 195631 - RNA, 19 nt, Artificial Sequence
  Description of Artificial Sequence: Synthetic oligonucleotide
  Antisense strand to SEQ ID NO: 195630
auucucaggcuuggauuga

SEQ ID NO: 195632 - RNA, 19 nt, Artificial Sequence
  Description of Artificial Sequence: Synthetic oligonucleotide
  Sense strand starting at position 566 of SEQ ID NO: 2521
gccugagaauuaccuagaa

SEQ ID NO: 195633 - RNA, 19 nt, Artificial Sequence
  Description of Artificial Sequence: Synthetic oligonucleotide
  Antisense strand to SEQ ID NO: 195632
uucuagguaauucucaggc

SEQ ID NO: 195634 - RNA, 19 nt, Artificial Sequence
  Description of Artificial Sequence: Synthetic oligonucleotide
  Sense strand starting at position 668 of SEQ ID NO: 2521
guuauaccuuccuuggaca

SEQ ID NO: 195635 - RNA, 19 nt, Artificial Sequence
  Description of Artificial Sequence: Synthetic oligonucleotide
  Antisense strand to SEQ ID NO: 195634
uguccaaggaagguauaac

SEQ ID NO: 195636 - RNA, 19 nt, Artificial Sequence
  Description of Artificial Sequence: Synthetic oligonucleotide
  Sense strand starting at position 791 of SEQ ID NO: 2521
auggcaucuuuacucugaa

SEQ ID NO: 195637 - RNA, 19 nt, Artificial Sequence
  Description of Artificial Sequence: Synthetic oligonucleotide
  Antisense strand to SEQ ID NO: 195636
uucagaguaaagaugccau

SEQ ID NO: 195638 - RNA, 19 nt, Artificial Sequence
  Description of Artificial Sequence: Synthetic oligonucleotide
  Sense strand starting at position 792 of SEQ ID NO: 2521
uggcaucuuuacucugaau

SEQ ID NO: 195639 - RNA, 19 nt, Artificial Sequence
  Description of Artificial Sequence: Synthetic oligonucleotide
  Antisense strand to SEQ ID NO: 195638
auucagaguaaagaugcca

SEQ ID NO: 195640 - RNA, 19 nt, Artificial Sequence
  Description of Artificial Sequence: Synthetic oligonucleotide
  Sense strand starting at position 1056 of SEQ ID NO: 2521
accugugaguaccugcaua

SEQ ID NO: 195641 - RNA, 19 nt, Artificial Sequence
  Description of Artificial Sequence: Synthetic oligonucleotide
  Antisense strand to SEQ ID NO: 195640
uaugcagguacucacaggu

SEQ ID NO: 195642 - RNA, 19 nt, Artificial Sequence
  Description of Artificial Sequence: Synthetic oligonucleotide
  Sense strand starting at position 1202 of SEQ ID NO: 2521
auaagugaucgagguccca

SEQ ID NO: 195643 - RNA, 19 nt, Artificial Sequence
  Description of Artificial Sequence: Synthetic oligonucleotide
  Antisense strand to SEQ ID NO: 195642
ugggaccucgaucacuuau

SEQ ID NO: 195644 - RNA, 19 nt, Artificial Sequence
  Description of Artificial Sequence: Synthetic oligonucleotide
  Sense strand starting at position 1333 of SEQ ID NO: 2521
gucugaggucagcacaagu

SEQ ID NO: 195645 - RNA, 19 nt, Artificial Sequence
  Description of Artificial Sequence: Synthetic oligonucleotide
  Antisense strand to SEQ ID NO: 195644
acuugugcugaccucagac

SEQ ID NO: 195646 - RNA, 19 nt, Artificial Sequence
  Description of Artificial Sequence: Synthetic oligonucleotide
  Sense strand starting at position 1406 of SEQ ID NO: 2521
agacaagugccaggacaua

SEQ ID NO: 195647 - RNA, 19 nt, Artificial Sequence
  Description of Artificial Sequence: Synthetic oligonucleotide
  Antisense strand to SEQ ID NO: 195646
uauguccuggcacuugucu

SEQ ID NO: 195648 - RNA, 19 nt, Artificial Sequence
  Description of Artificial Sequence: Synthetic oligonucleotide
  Sense strand starting at position 1422 of SEQ ID NO: 2521
auacuauaguguuuccauu

SEQ ID NO: 195649 - RNA, 19 nt, Artificial Sequence
  Description of Artificial Sequence: Synthetic oligonucleotide
  Antisense strand to SEQ ID NO: 195648
aauggaaacacuauaguau

SEQ ID NO: 195650 - RNA, 19 nt, Artificial Sequence
  Description of Artificial Sequence: Synthetic oligonucleotide
  Sense strand starting at position 1574 of SEQ ID NO: 2521
gcaucucugggacaggauu

SEQ ID NO: 195651 - RNA, 19 nt, Artificial Sequence
  Description of Artificial Sequence: Synthetic oligonucleotide
  Antisense strand to SEQ ID NO: 195650
aauccugucccagagaugc

SEQ ID NO: 195652 - RNA, 19 nt, Artificial Sequence
  Description of Artificial Sequence: Synthetic oligonucleotide
  Sense strand starting at position 1987 of SEQ ID NO: 2521
gcccacaucucuucuuagu

SEQ ID NO: 195653 - RNA, 19 nt, Artificial Sequence
  Description of Artificial Sequence: Synthetic oligonucleotide
  Antisense strand to SEQ ID NO: 195652
acuaagaagagaugugggc

SEQ ID NO: 195654 - RNA, 19 nt, Artificial Sequence
  Description of Artificial Sequence: Synthetic oligonucleotide
  Sense strand starting at position 2034 of SEQ ID NO: 2521
gguuacaguguugaaggaa

SEQ ID NO: 195655 - RNA, 19 nt, Artificial Sequence
  Description of Artificial Sequence: Synthetic oligonucleotide
  Antisense strand to SEQ ID NO: 195654
uuccuucaacacuguaacc

SEQ ID NO: 195656 - RNA, 19 nt, Artificial Sequence
  Description of Artificial Sequence: Synthetic oligonucleotide
  Sense strand starting at position 2126 of SEQ ID NO: 2521
ccacauuccuggcuuugaa

SEQ ID NO: 195657 - RNA, 19 nt, Artificial Sequence
  Description of Artificial Sequence: Synthetic oligonucleotide
  Antisense strand to SEQ ID NO: 195656
uucaaagccaggaaugugg

SEQ ID NO: 195658 - RNA, 19 nt, Artificial Sequence
  Description of Artificial Sequence: Synthetic oligonucleotide
  Sense strand starting at position 2182 of SEQ ID NO: 2521
gagggaguugagcagaguu

SEQ ID NO: 195659 - RNA, 19 nt, Artificial Sequence
  Description of Artificial Sequence: Synthetic oligonucleotide
  Antisense strand to SEQ ID NO: 195658
aacucugcucaacucccuc

SEQ ID NO: 195660 - RNA, 19 nt, Artificial Sequence
  Description of Artificial Sequence: Synthetic oligonucleotide
  Sense strand starting at position 2184 of SEQ ID NO: 2521
gggaguugagcagaguuua

SEQ ID NO: 195661 - RNA, 19 nt, Artificial Sequence
  Description of Artificial Sequence: Synthetic oligonucleotide
  Antisense strand to SEQ ID NO: 195660
uaaacucugcucaacuccc

SEQ ID NO: 195662 - RNA, 19 nt, Artificial Sequence
  Description of Artificial Sequence: Synthetic oligonucleotide
  Sense strand starting at position 2260 of SEQ ID NO: 2521
gggaaauucgccuaucuau

SEQ ID NO: 195663 - RNA, 19 nt, Artificial Sequence
  Description of Artificial Sequence: Synthetic oligonucleotide
  Antisense strand to SEQ ID NO: 195662
auagauaggcgaauuuccc

SEQ ID NO: 195664 - RNA, 19 nt, Artificial Sequence
  Description of Artificial Sequence: Synthetic oligonucleotide
  Sense strand starting at position 3298 of SEQ ID NO: 2521
ugugauuaaccaggcagca

SEQ ID NO: 195665 - RNA, 19 nt, Artificial Sequence
  Description of Artificial Sequence: Synthetic oligonucleotide
  Antisense strand to SEQ ID NO: 195664
ugcugccugguuaaucaca

SEQ ID NO: 195666 - RNA, 19 nt, Artificial Sequence
  Description of Artificial Sequence: Synthetic oligonucleotide
  Sense strand starting at position 3741 of SEQ ID NO: 2521
ugggcuggauucucagaga

SEQ ID NO: 195667 - RNA, 19 nt, Artificial Sequence
  Description of Artificial Sequence: Synthetic oligonucleotide
  Antisense strand to SEQ ID NO: 195666
ucucugagaauccagccca

SEQ ID NO: 195668 - RNA, 19 nt, Artificial Sequence
  Description of Artificial Sequence: Synthetic oligonucleotide
  Sense strand starting at position 3830 of SEQ ID NO: 2521
uugcaaggucuaggguuau

SEQ ID NO: 195669 - RNA, 19 nt, Artificial Sequence
  Description of Artificial Sequence: Synthetic oligonucleotide
  Antisense strand to SEQ ID NO: 195668
auaacccuagaccuugcaa

SEQ ID NO: 195670 - RNA, 19 nt, Artificial Sequence
  Description of Artificial Sequence: Synthetic oligonucleotide
  Sense strand starting at position 3905 of SEQ ID NO: 2521
gggcuucugcagugaucua

SEQ ID NO: 195671 - RNA, 19 nt, Artificial Sequence
  Description of Artificial Sequence: Synthetic oligonucleotide
  Antisense strand to SEQ ID NO: 195670
uagaucacugcagaagccc

SEQ ID NO: 195672 - RNA, 19 nt, Artificial Sequence
  Description of Artificial Sequence: Synthetic oligonucleotide
  Sense strand starting at position 3943 of SEQ ID NO: 2521
gggagcuuacaguggaaau

SEQ ID NO: 195673 - RNA, 19 nt, Artificial Sequence
  Description of Artificial Sequence: Synthetic oligonucleotide
  Antisense strand to SEQ ID NO: 195672
auuuccacuguaagcuccc

SEQ ID NO: 195674 - RNA, 19 nt, Artificial Sequence
  Description of Artificial Sequence: Synthetic oligonucleotide
  Sense strand starting at position 3944 of SEQ ID NO: 2521
ggagcuuacaguggaaaug

SEQ ID NO: 195675 - RNA, 19 nt, Artificial Sequence
  Description of Artificial Sequence: Synthetic oligonucleotide
  Antisense strand to SEQ ID NO: 195674
cauuuccacuguaagcucc

SEQ ID NO: 195676 - RNA, 19 nt, Artificial Sequence
  Description of Artificial Sequence: Synthetic oligonucleotide
  Sense strand starting at position 40 of SEQ ID NO: 2522
auggcaucuuuacucugaa

SEQ ID NO: 195677 - RNA, 19 nt, Artificial Sequence
  Description of Artificial Sequence: Synthetic oligonucleotide
  Antisense strand to SEQ ID NO: 195676
uucagaguaaagaugccau

SEQ ID NO: 195678 - RNA, 19 nt, Artificial Sequence
  Description of Artificial Sequence: Synthetic oligonucleotide
  Sense strand starting at position 41 of SEQ ID NO: 2522
uggcaucuuuacucugaau

SEQ ID NO: 195679 - RNA, 19 nt, Artificial Sequence
  Description of Artificial Sequence: Synthetic oligonucleotide
  Antisense strand to SEQ ID NO: 195678
auucagaguaaagaugcca

SEQ ID NO: 195680 - RNA, 19 nt, Artificial Sequence
  Description of Artificial Sequence: Synthetic oligonucleotide
  Sense strand starting at position 305 of SEQ ID NO: 2522
accugugaguaccugcaua

SEQ ID NO: 195681 - RNA, 19 nt, Artificial Sequence
  Description of Artificial Sequence: Synthetic oligonucleotide
  Antisense strand to SEQ ID NO: 195680
uaugcagguacucacaggu

SEQ ID NO: 195682 - RNA, 19 nt, Artificial Sequence
  Description of Artificial Sequence: Synthetic oligonucleotide
  Sense strand starting at position 451 of SEQ ID NO: 2522
auaagugaucgagguccca

SEQ ID NO: 195683 - RNA, 19 nt, Artificial Sequence
  Description of Artificial Sequence: Synthetic oligonucleotide
  Antisense strand to SEQ ID NO: 195682
ugggaccucgaucacuuau

SEQ ID NO: 195684 - RNA, 19 nt, Artificial Sequence
  Description of Artificial Sequence: Synthetic oligonucleotide
  Sense strand starting at position 582 of SEQ ID NO: 2522
gucugaggucagcacaagu

SEQ ID NO: 195685 - RNA, 19 nt, Artificial Sequence
  Description of Artificial Sequence: Synthetic oligonucleotide
  Antisense strand to SEQ ID NO: 195684
acuugugcugaccucagac

SEQ ID NO: 195686 - RNA, 19 nt, Artificial Sequence
  Description of Artificial Sequence: Synthetic oligonucleotide
  Sense strand starting at position 655 of SEQ ID NO: 2522
agacaagugccaggacaua

SEQ ID NO: 195687 - RNA, 19 nt, Artificial Sequence
  Description of Artificial Sequence: Synthetic oligonucleotide
  Antisense strand to SEQ ID NO: 195686
uauguccuggcacuugucu

SEQ ID NO: 195688 - RNA, 19 nt, Artificial Sequence
  Description of Artificial Sequence: Synthetic oligonucleotide
  Sense strand starting at position 671 of SEQ ID NO: 2522
auacuauaguguuuccauu

SEQ ID NO: 195689 - RNA, 19 nt, Artificial Sequence
  Description of Artificial Sequence: Synthetic oligonucleotide
  Antisense strand to SEQ ID NO: 195688
aauggaaacacuauaguau

SEQ ID NO: 195690 - RNA, 19 nt, Artificial Sequence
  Description of Artificial Sequence: Synthetic oligonucleotide
  Sense strand starting at position 823 of SEQ ID NO: 2522
gcaucucugggacaggauu

SEQ ID NO: 195691 - RNA, 19 nt, Artificial Sequence
  Description of Artificial Sequence: Synthetic oligonucleotide
  Antisense strand to SEQ ID NO: 195690
aauccugucccagagaugc

SEQ ID NO: 195692 - RNA, 19 nt, Artificial Sequence
  Description of Artificial Sequence: Synthetic oligonucleotide
  Sense strand starting at position 1236 of SEQ ID NO: 2522
gcccacaucucuucuuagu

SEQ ID NO: 195693 - RNA, 19 nt, Artificial Sequence
  Description of Artificial Sequence: Synthetic oligonucleotide
  Antisense strand to SEQ ID NO: 195692
acuaagaagagaugugggc

SEQ ID NO: 195694 - RNA, 19 nt, Artificial Sequence
  Description of Artificial Sequence: Synthetic oligonucleotide
  Sense strand starting at position 1283 of SEQ ID NO: 2522
gguuacaguguugaaggaa

SEQ ID NO: 195695 - RNA, 19 nt, Artificial Sequence
  Description of Artificial Sequence: Synthetic oligonucleotide
  Antisense strand to SEQ ID NO: 195694
uuccuucaacacuguaacc

SEQ ID NO: 195696 - RNA, 19 nt, Artificial Sequence
  Description of Artificial Sequence: Synthetic oligonucleotide
  Sense strand starting at position 1375 of SEQ ID NO: 2522
ccacauuccuggcuuugaa

SEQ ID NO: 195697 - RNA, 19 nt, Artificial Sequence
  Description of Artificial Sequence: Synthetic oligonucleotide
  Antisense strand to SEQ ID NO: 195696
uucaaagccaggaaugugg

SEQ ID NO: 195698 - RNA, 19 nt, Artificial Sequence
  Description of Artificial Sequence: Synthetic oligonucleotide
  Sense strand starting at position 1431 of SEQ ID NO: 2522
gagggaguugagcagaguu

SEQ ID NO: 195699 - RNA, 19 nt, Artificial Sequence
  Description of Artificial Sequence: Synthetic oligonucleotide
  Antisense strand to SEQ ID NO: 195698
aacucugcucaacucccuc

SEQ ID NO: 195700 - RNA, 19 nt, Artificial Sequence
  Description of Artificial Sequence: Synthetic oligonucleotide
  Sense strand starting at position 1433 of SEQ ID NO: 2522
gggaguugagcagaguuua

SEQ ID NO: 195701 - RNA, 19 nt, Artificial Sequence
  Description of Artificial Sequence: Synthetic oligonucleotide
  Antisense strand to SEQ ID NO: 195700
uaaacucugcucaacuccc

SEQ ID NO: 195702 - RNA, 19 nt, Artificial Sequence
  Description of Artificial Sequence: Synthetic oligonucleotide
  Sense strand starting at position 1445 of SEQ ID NO: 2522
gaguuuauuggcugucucu

SEQ ID NO: 195703 - RNA, 19 nt, Artificial Sequence
  Description of Artificial Sequence: Synthetic oligonucleotide
  Antisense strand to SEQ ID NO: 195702
agagacagccaauaaacuc

SEQ ID NO: 195704 - RNA, 19 nt, Artificial Sequence
  Description of Artificial Sequence: Synthetic oligonucleotide
  Sense strand starting at position 1509 of SEQ ID NO: 2522
gggaaauucgccuaucuau

SEQ ID NO: 195705 - RNA, 19 nt, Artificial Sequence
  Description of Artificial Sequence: Synthetic oligonucleotide
  Antisense strand to SEQ ID NO: 195704
auagauaggcgaauuuccc

SEQ ID NO: 195706 - RNA, 19 nt, Artificial Sequence
  Description of Artificial Sequence: Synthetic oligonucleotide
  Sense strand starting at position 2535 of SEQ ID NO: 2522
agugucuggagcugugauu

SEQ ID NO: 195707 - RNA, 19 nt, Artificial Sequence
  Description of Artificial Sequence: Synthetic oligonucleotide
  Antisense strand to SEQ ID NO: 195706
aaucacagcuccagacacu

SEQ ID NO: 195708 - RNA, 19 nt, Artificial Sequence
  Description of Artificial Sequence: Synthetic oligonucleotide
  Sense strand starting at position 2547 of SEQ ID NO: 2522
ugugauuaaccaggcagca

SEQ ID NO: 195709 - RNA, 19 nt, Artificial Sequence
  Description of Artificial Sequence: Synthetic oligonucleotide
  Antisense strand to SEQ ID NO: 195708
ugcugccugguuaaucaca

SEQ ID NO: 195710 - RNA, 19 nt, Artificial Sequence
  Description of Artificial Sequence: Synthetic oligonucleotide
  Sense strand starting at position 2990 of SEQ ID NO: 2522
ugggcuggauucucagaga

SEQ ID NO: 195711 - RNA, 19 nt, Artificial Sequence
  Description of Artificial Sequence: Synthetic oligonucleotide
  Antisense strand to SEQ ID NO: 195710
ucucugagaauccagccca

SEQ ID NO: 195712 - RNA, 19 nt, Artificial Sequence
  Description of Artificial Sequence: Synthetic oligonucleotide
  Sense strand starting at position 3079 of SEQ ID NO: 2522
uugcaaggucuaggguuau

SEQ ID NO: 195713 - RNA, 19 nt, Artificial Sequence
  Description of Artificial Sequence: Synthetic oligonucleotide
  Antisense strand to SEQ ID NO: 195712
auaacccuagaccuugcaa

SEQ ID NO: 195714 - RNA, 19 nt, Artificial Sequence
  Description of Artificial Sequence: Synthetic oligonucleotide
  Sense strand starting at position 3154 of SEQ ID NO: 2522
gggcuucugcagugaucua

SEQ ID NO: 195715 - RNA, 19 nt, Artificial Sequence
  Description of Artificial Sequence: Synthetic oligonucleotide
  Antisense strand to SEQ ID NO: 195714
uagaucacugcagaagccc

SEQ ID NO: 195716 - RNA, 19 nt, Artificial Sequence
  Description of Artificial Sequence: Synthetic oligonucleotide
  Sense strand starting at position 3165 of SEQ ID NO: 2522
gugaucuagcccuguccua

SEQ ID NO: 195717 - RNA, 19 nt, Artificial Sequence
  Description of Artificial Sequence: Synthetic oligonucleotide
  Antisense strand to SEQ ID NO: 195716
uaggacagggcuagaucac

SEQ ID NO: 195718 - RNA, 19 nt, Artificial Sequence
  Description of Artificial Sequence: Synthetic oligonucleotide
  Sense strand starting at position 3192 of SEQ ID NO: 2522
gggagcuuacaguggaaau

SEQ ID NO: 195719 - RNA, 19 nt, Artificial Sequence
  Description of Artificial Sequence: Synthetic oligonucleotide
  Antisense strand to SEQ ID NO: 195718
auuuccacuguaagcuccc

SEQ ID NO: 195720 - RNA, 19 nt, Artificial Sequence
  Description of Artificial Sequence: Synthetic oligonucleotide
  Sense strand starting at position 3193 of SEQ ID NO: 2522
ggagcuuacaguggaaaug

SEQ ID NO: 195721 - RNA, 19 nt, Artificial Sequence
  Description of Artificial Sequence: Synthetic oligonucleotide
  Antisense strand to SEQ ID NO: 195720
cauuuccacuguaagcucc

SEQ ID NO: 195722 - RNA, 19 nt, Artificial Sequence
  Description of Artificial Sequence: Synthetic oligonucleotide
  Sense strand starting at position 3238 of SEQ ID NO: 2522
cugauaaccucgguccuua

SEQ ID NO: 195723 - RNA, 19 nt, Artificial Sequence
  Description of Artificial Sequence: Synthetic oligonucleotide
  Antisense strand to SEQ ID NO: 195722
uaaggaccgagguuaucag

SEQ ID NO: 195724 - RNA, 19 nt, Artificial Sequence
  Description of Artificial Sequence: Synthetic oligonucleotide
  Sense strand starting at position 3242 of SEQ ID NO: 2522
uaaccucgguccuuagaua

SEQ ID NO: 195725 - RNA, 19 nt, Artificial Sequence
  Description of Artificial Sequence: Synthetic oligonucleotide
  Antisense strand to SEQ ID NO: 195724
uaucuaaggaccgagguua

SEQ ID NO: 195726 - RNA, 19 nt, Artificial Sequence
  Description of Artificial Sequence: Synthetic oligonucleotide
  Sense strand starting at position 3331 of SEQ ID NO: 2522
gguuccugcugaguguaaa

SEQ ID NO: 195727 - RNA, 19 nt, Artificial Sequence
  Description of Artificial Sequence: Synthetic oligonucleotide
  Antisense strand to SEQ ID NO: 195726
uuuacacucagcaggaacc

SEQ ID NO: 195728 - RNA, 19 nt, Artificial Sequence
  Description of Artificial Sequence: Synthetic oligonucleotide
  Sense strand starting at position 3332 of SEQ ID NO: 2522
guuccugcugaguguaaag

SEQ ID NO: 195729 - RNA, 19 nt, Artificial Sequence
  Description of Artificial Sequence: Synthetic oligonucleotide
  Antisense strand to SEQ ID NO: 195728
cuuuacacucagcaggaac

SEQ ID NO: 195730 - RNA, 19 nt, Artificial Sequence
  Description of Artificial Sequence: Synthetic oligonucleotide
  Sense strand starting at position 3376 of SEQ ID NO: 2522
ccucuagaagcuuauaaug

SEQ ID NO: 195731 - RNA, 19 nt, Artificial Sequence
  Description of Artificial Sequence: Synthetic oligonucleotide
  Antisense strand to SEQ ID NO: 195730
cauuauaagcuucuagagg

SEQ ID NO: 195732 - RNA, 19 nt, Artificial Sequence
  Description of Artificial Sequence: Synthetic oligonucleotide
  Sense strand starting at position 3485 of SEQ ID NO: 2522
gagggcauuuauuggguga

SEQ ID NO: 195733 - RNA, 19 nt, Artificial Sequence
  Description of Artificial Sequence: Synthetic oligonucleotide
  Antisense strand to SEQ ID NO: 195732
ucacccaauaaaugcccuc

SEQ ID NO: 195734 - RNA, 19 nt, Artificial Sequence
  Description of Artificial Sequence: Synthetic oligonucleotide
  Sense strand starting at position 3661 of SEQ ID NO: 2522
uaaagagagcuuuguaccu

SEQ ID NO: 195735 - RNA, 19 nt, Artificial Sequence
  Description of Artificial Sequence: Synthetic oligonucleotide
  Antisense strand to SEQ ID NO: 195734
agguacaaagcucucuuua

SEQ ID NO: 195736 - RNA, 19 nt, Artificial Sequence
  Description of Artificial Sequence: Synthetic oligonucleotide
  Sense strand starting at position 3674 of SEQ ID NO: 2522
guaccuguaugauugguga

SEQ ID NO: 195737 - RNA, 19 nt, Artificial Sequence
  Description of Artificial Sequence: Synthetic oligonucleotide
  Antisense strand to SEQ ID NO: 195736
ucaccaaucauacagguac

SEQ ID NO: 195738 - RNA, 19 nt, Artificial Sequence
  Description of Artificial Sequence: Synthetic oligonucleotide
  Sense strand starting at position 3677 of SEQ ID NO: 2522
ccuguaugauuggugagga

SEQ ID NO: 195739 - RNA, 19 nt, Artificial Sequence
  Description of Artificial Sequence: Synthetic oligonucleotide
  Antisense strand to SEQ ID NO: 195738
uccucaccaaucauacagg

SEQ ID NO: 195740 - RNA, 19 nt, Artificial Sequence
  Description of Artificial Sequence: Synthetic oligonucleotide
  Sense strand starting at position 3742 of SEQ ID NO: 2522
guaucccugcucuauagaa

SEQ ID NO: 195741 - RNA, 19 nt, Artificial Sequence
  Description of Artificial Sequence: Synthetic oligonucleotide
  Antisense strand to SEQ ID NO: 195740
uucuauagagcagggauac

SEQ ID NO: 195742 - RNA, 19 nt, Artificial Sequence
  Description of Artificial Sequence: Synthetic oligonucleotide
  Sense strand starting at position 3749 of SEQ ID NO: 2522
ugcucuauagaaugaugua

SEQ ID NO: 195743 - RNA, 19 nt, Artificial Sequence
  Description of Artificial Sequence: Synthetic oligonucleotide
  Antisense strand to SEQ ID NO: 195742
uacaucauucuauagagca

SEQ ID NO: 195744 - RNA, 19 nt, Artificial Sequence
  Description of Artificial Sequence: Synthetic oligonucleotide
  Sense strand starting at position 3796 of SEQ ID NO: 2522
gugucagcucugccacuua

SEQ ID NO: 195745 - RNA, 19 nt, Artificial Sequence
  Description of Artificial Sequence: Synthetic oligonucleotide
  Antisense strand to SEQ ID NO: 195744
uaaguggcagagcugacac

SEQ ID NO: 195746 - RNA, 19 nt, Artificial Sequence
  Description of Artificial Sequence: Synthetic oligonucleotide
  Sense strand starting at position 3879 of SEQ ID NO: 2522
gguugugcaguucaaauga

SEQ ID NO: 195747 - RNA, 19 nt, Artificial Sequence
  Description of Artificial Sequence: Synthetic oligonucleotide
  Antisense strand to SEQ ID NO: 195746
ucauuugaacugcacaacc

SEQ ID NO: 195748 - RNA, 19 nt, Artificial Sequence
  Description of Artificial Sequence: Synthetic oligonucleotide
  Sense strand starting at position 3914 of SEQ ID NO: 2522
gcuugugaagcucaaugau

SEQ ID NO: 195749 - RNA, 19 nt, Artificial Sequence
  Description of Artificial Sequence: Synthetic oligonucleotide
  Antisense strand to SEQ ID NO: 195748
aucauugagcuucacaagc

SEQ ID NO: 195750 - RNA, 19 nt, Artificial Sequence
  Description of Artificial Sequence: Synthetic oligonucleotide
  Sense strand starting at position 3917 of SEQ ID NO: 2522
ugugaagcucaaugaugua

SEQ ID NO: 195751 - RNA, 19 nt, Artificial Sequence
  Description of Artificial Sequence: Synthetic oligonucleotide
  Antisense strand to SEQ ID NO: 195750
uacaucauugagcuucaca

SEQ ID NO: 195752 - RNA, 19 nt, Artificial Sequence
  Description of Artificial Sequence: Synthetic oligonucleotide
  Sense strand starting at position 3942 of SEQ ID NO: 2522
uggaguccucauuguacaa

SEQ ID NO: 195753 - RNA, 19 nt, Artificial Sequence
  Description of Artificial Sequence: Synthetic oligonucleotide
  Antisense strand to SEQ ID NO: 195752
uuguacaaugaggacucca

SEQ ID NO: 195754 - RNA, 19 nt, Artificial Sequence
  Description of Artificial Sequence: Synthetic oligonucleotide
  Sense strand starting at position 3971 of SEQ ID NO: 2522
cuugguaaccuuuagaguu

SEQ ID NO: 195755 - RNA, 19 nt, Artificial Sequence
  Description of Artificial Sequence: Synthetic oligonucleotide
  Antisense strand to SEQ ID NO: 195754
aacucuaaagguuaccaag

SEQ ID NO: 195756 - RNA, 19 nt, Artificial Sequence
  Description of Artificial Sequence: Synthetic oligonucleotide
  Sense strand starting at position 35 of SEQ ID NO: 2523
uugucuccugcuuaggaga

SEQ ID NO: 195757 - RNA, 19 nt, Artificial Sequence
  Description of Artificial Sequence: Synthetic oligonucleotide
  Antisense strand to SEQ ID NO: 195756
ucuccuaagcaggagacaa

SEQ ID NO: 195758 - RNA, 19 nt, Artificial Sequence
  Description of Artificial Sequence: Synthetic oligonucleotide
  Sense strand starting at position 40 of SEQ ID NO: 2523
uccugcuuaggagaauauu

SEQ ID NO: 195759 - RNA, 19 nt, Artificial Sequence
  Description of Artificial Sequence: Synthetic oligonucleotide
  Antisense strand to SEQ ID NO: 195758
aauauucuccuaagcagga

SEQ ID NO: 195760 - RNA, 19 nt, Artificial Sequence
  Description of Artificial Sequence: Synthetic oligonucleotide
  Sense strand starting at position 48 of SEQ ID NO: 2523
aggagaauauugguguuua

SEQ ID NO: 195761 - RNA, 19 nt, Artificial Sequence
  Description of Artificial Sequence: Synthetic oligonucleotide
  Antisense strand to SEQ ID NO: 195760
uaaacaccaauauucuccu

SEQ ID NO: 195762 - RNA, 19 nt, Artificial Sequence
  Description of Artificial Sequence: Synthetic oligonucleotide
  Sense strand starting at position 52 of SEQ ID NO: 2523
gaauauugguguuuaaugg

SEQ ID NO: 195763 - RNA, 19 nt, Artificial Sequence
  Description of Artificial Sequence: Synthetic oligonucleotide
  Antisense strand to SEQ ID NO: 195762
ccauuaaacaccaauauuc

SEQ ID NO: 195764 - RNA, 19 nt, Artificial Sequence
  Description of Artificial Sequence: Synthetic oligonucleotide
  Sense strand starting at position 58 of SEQ ID NO: 2523
ugguguuuaauggauucca

SEQ ID NO: 195765 - RNA, 19 nt, Artificial Sequence
  Description of Artificial Sequence: Synthetic oligonucleotide
  Antisense strand to SEQ ID NO: 195764
uggaauccauuaaacacca

SEQ ID NO: 195766 - RNA, 19 nt, Artificial Sequence
  Description of Artificial Sequence: Synthetic oligonucleotide
  Sense strand starting at position 381 of SEQ ID NO: 2523
guaucacaaucuguaauuc

SEQ ID NO: 195767 - RNA, 19 nt, Artificial Sequence
  Description of Artificial Sequence: Synthetic oligonucleotide
  Antisense strand to SEQ ID NO: 195766
gaauuacagauugugauac

SEQ ID NO: 195768 - RNA, 19 nt, Artificial Sequence
  Description of Artificial Sequence: Synthetic oligonucleotide
  Sense strand starting at position 489 of SEQ ID NO: 2523
uagaauagggucugucagu

SEQ ID NO: 195769 - RNA, 19 nt, Artificial Sequence
  Description of Artificial Sequence: Synthetic oligonucleotide
  Antisense strand to SEQ ID NO: 195768
acugacagacccuauucua

SEQ ID NO: 195770 - RNA, 19 nt, Artificial Sequence
  Description of Artificial Sequence: Synthetic oligonucleotide
  Sense strand starting at position 496 of SEQ ID NO: 2523
gggucugucagugcgguaa

SEQ ID NO: 195771 - RNA, 19 nt, Artificial Sequence
  Description of Artificial Sequence: Synthetic oligonucleotide
  Antisense strand to SEQ ID NO: 195770
uuaccgcacugacagaccc

SEQ ID NO: 195772 - RNA, 19 nt, Artificial Sequence
  Description of Artificial Sequence: Synthetic oligonucleotide
  Sense strand starting at position 587 of SEQ ID NO: 2523
auuuaucucuuggaugaau

SEQ ID NO: 195773 - RNA, 19 nt, Artificial Sequence
  Description of Artificial Sequence: Synthetic oligonucleotide
  Antisense strand to SEQ ID NO: 195772
auucauccaagagauaaau

SEQ ID NO: 195774 - RNA, 19 nt, Artificial Sequence
  Description of Artificial Sequence: Synthetic oligonucleotide
  Sense strand starting at position 682 of SEQ ID NO: 2523
agaaauccuuugucauaug

SEQ ID NO: 195775 - RNA, 19 nt, Artificial Sequence
  Description of Artificial Sequence: Synthetic oligonucleotide
  Antisense strand to SEQ ID NO: 195774
cauaugacaaaggauuucu

SEQ ID NO: 195776 - RNA, 19 nt, Artificial Sequence
  Description of Artificial Sequence: Synthetic oligonucleotide
  Sense strand starting at position 902 of SEQ ID NO: 2523
caaauauuacuccguggag

SEQ ID NO: 195777 - RNA, 19 nt, Artificial Sequence
  Description of Artificial Sequence: Synthetic oligonucleotide
  Antisense strand to SEQ ID NO: 195776
cuccacggaguaauauuug

SEQ ID NO: 195778 - RNA, 19 nt, Artificial Sequence
  Description of Artificial Sequence: Synthetic oligonucleotide
  Sense strand starting at position 903 of SEQ ID NO: 2523
aaauauuacuccguggagu

SEQ ID NO: 195779 - RNA, 19 nt, Artificial Sequence
  Description of Artificial Sequence: Synthetic oligonucleotide
  Antisense strand to SEQ ID NO: 195778
acuccacggaguaauauuu

SEQ ID NO: 195780 - RNA, 19 nt, Artificial Sequence
  Description of Artificial Sequence: Synthetic oligonucleotide
  Sense strand starting at position 927 of SEQ ID NO: 2523
acuagauaugcauagugau

SEQ ID NO: 195781 - RNA, 19 nt, Artificial Sequence
  Description of Artificial Sequence: Synthetic oligonucleotide
  Antisense strand to SEQ ID NO: 195780
aucacuaugcauaucuagu

SEQ ID NO: 195782 - RNA, 19 nt, Artificial Sequence
  Description of Artificial Sequence: Synthetic oligonucleotide
  Sense strand starting at position 973 of SEQ ID NO: 2523
agacauaaacugugucuau

SEQ ID NO: 195783 - RNA, 19 nt, Artificial Sequence
  Description of Artificial Sequence: Synthetic oligonucleotide
  Antisense strand to SEQ ID NO: 195782
auagacacaguuuaugucu

SEQ ID NO: 195784 - RNA, 19 nt, Artificial Sequence
  Description of Artificial Sequence: Synthetic oligonucleotide
  Sense strand starting at position 977 of SEQ ID NO: 2523
auaaacugugucuaucaau

SEQ ID NO: 195785 - RNA, 19 nt, Artificial Sequence
  Description of Artificial Sequence: Synthetic oligonucleotide
  Antisense strand to SEQ ID NO: 195784
auugauagacacaguuuau

SEQ ID NO: 195786 - RNA, 19 nt, Artificial Sequence
  Description of Artificial Sequence: Synthetic oligonucleotide
  Sense strand starting at position 1158 of SEQ ID NO: 2523
ucuccuugacaguaguaaa

SEQ ID NO: 195787 - RNA, 19 nt, Artificial Sequence
  Description of Artificial Sequence: Synthetic oligonucleotide
  Antisense strand to SEQ ID NO: 195786
uuuacuacugucaaggaga

SEQ ID NO: 195788 - RNA, 19 nt, Artificial Sequence
  Description of Artificial Sequence: Synthetic oligonucleotide
  Sense strand starting at position 1187 of SEQ ID NO: 2523
uauggcaagucuuuagaua

SEQ ID NO: 195789 - RNA, 19 nt, Artificial Sequence
  Description of Artificial Sequence: Synthetic oligonucleotide
  Antisense strand to SEQ ID NO: 195788
uaucuaaagacuugccaua

SEQ ID NO: 195790 - RNA, 19 nt, Artificial Sequence
  Description of Artificial Sequence: Synthetic oligonucleotide
  Sense strand starting at position 1188 of SEQ ID NO: 2523
auggcaagucuuuagauaa

SEQ ID NO: 195791 - RNA, 19 nt, Artificial Sequence
  Description of Artificial Sequence: Synthetic oligonucleotide
  Antisense strand to SEQ ID NO: 195790
uuaucuaaagacuugccau

SEQ ID NO: 195792 - RNA, 19 nt, Artificial Sequence
  Description of Artificial Sequence: Synthetic oligonucleotide
  Sense strand starting at position 1246 of SEQ ID NO: 2523
ccaaacucuuuggcaaaga

SEQ ID NO: 195793 - RNA, 19 nt, Artificial Sequence
  Description of Artificial Sequence: Synthetic oligonucleotide
  Antisense strand to SEQ ID NO: 195792
ucuuugccaaagaguuugg

SEQ ID NO: 195794 - RNA, 19 nt, Artificial Sequence
  Description of Artificial Sequence: Synthetic oligonucleotide
  Sense strand starting at position 1322 of SEQ ID NO: 2523
ggccuuguagguuaaagga

SEQ ID NO: 195795 - RNA, 19 nt, Artificial Sequence
  Description of Artificial Sequence: Synthetic oligonucleotide
  Antisense strand to SEQ ID NO: 195794
uccuuuaaccuacaaggcc

SEQ ID NO: 195796 - RNA, 19 nt, Artificial Sequence
  Description of Artificial Sequence: Synthetic oligonucleotide
  Sense strand starting at position 1467 of SEQ ID NO: 2523
agguuucuuggaggugaau

SEQ ID NO: 195797 - RNA, 19 nt, Artificial Sequence
  Description of Artificial Sequence: Synthetic oligonucleotide
  Antisense strand to SEQ ID NO: 195796
auucaccuccaagaaaccu

SEQ ID NO: 195798 - RNA, 19 nt, Artificial Sequence
  Description of Artificial Sequence: Synthetic oligonucleotide
  Sense strand starting at position 1469 of SEQ ID NO: 2523
guuucuuggaggugaaucu

SEQ ID NO: 195799 - RNA, 19 nt, Artificial Sequence
  Description of Artificial Sequence: Synthetic oligonucleotide
  Antisense strand to SEQ ID NO: 195798
agauucaccuccaagaaac

SEQ ID NO: 195800 - RNA, 19 nt, Artificial Sequence
  Description of Artificial Sequence: Synthetic oligonucleotide
  Sense strand starting at position 1871 of SEQ ID NO: 2523
ugaugaauuugcgaaggga

SEQ ID NO: 195801 - RNA, 19 nt, Artificial Sequence
  Description of Artificial Sequence: Synthetic oligonucleotide
  Antisense strand to SEQ ID NO: 195800
ucccuucgcaaauucauca

SEQ ID NO: 195802 - RNA, 19 nt, Artificial Sequence
  Description of Artificial Sequence: Synthetic oligonucleotide
  Sense strand starting at position 1926 of SEQ ID NO: 2523
ggaccuuggcgcagugaau

SEQ ID NO: 195803 - RNA, 19 nt, Artificial Sequence
  Description of Artificial Sequence: Synthetic oligonucleotide
  Antisense strand to SEQ ID NO: 195802
auucacugcgccaaggucc

SEQ ID NO: 195804 - RNA, 19 nt, Artificial Sequence
  Description of Artificial Sequence: Synthetic oligonucleotide
  Sense strand starting at position 2203 of SEQ ID NO: 2523
augccuugucuagaagcaa

SEQ ID NO: 195805 - RNA, 19 nt, Artificial Sequence
  Description of Artificial Sequence: Synthetic oligonucleotide
  Antisense strand to SEQ ID NO: 195804
uugcuucuagacaaggcau

SEQ ID NO: 195806 - RNA, 19 nt, Artificial Sequence
  Description of Artificial Sequence: Synthetic oligonucleotide
  Sense strand starting at position 2220 of SEQ ID NO: 2523
aaaucaaugcagugaugau

SEQ ID NO: 195807 - RNA, 19 nt, Artificial Sequence
  Description of Artificial Sequence: Synthetic oligonucleotide
  Antisense strand to SEQ ID NO: 195806
aucaucacugcauugauuu

SEQ ID NO: 195808 - RNA, 19 nt, Artificial Sequence
  Description of Artificial Sequence: Synthetic oligonucleotide
  Sense strand starting at position 2302 of SEQ ID NO: 2523
auucuagcccgggaggauu

SEQ ID NO: 195809 - RNA, 19 nt, Artificial Sequence
  Description of Artificial Sequence: Synthetic oligonucleotide
  Antisense strand to SEQ ID NO: 195808
aauccucccgggcuagaau

SEQ ID NO: 195810 - RNA, 19 nt, Artificial Sequence
  Description of Artificial Sequence: Synthetic oligonucleotide
  Sense strand starting at position 2330 of SEQ ID NO: 2523
gguauuuauugagagaaau

SEQ ID NO: 195811 - RNA, 19 nt, Artificial Sequence
  Description of Artificial Sequence: Synthetic oligonucleotide
  Antisense strand to SEQ ID NO: 195810
auuucucucaauaaauacc

SEQ ID NO: 195812 - RNA, 19 nt, Artificial Sequence
  Description of Artificial Sequence: Synthetic oligonucleotide
  Sense strand starting at position 2377 of SEQ ID NO: 2523
auccaaauauugccaguga

SEQ ID NO: 195813 - RNA, 19 nt, Artificial Sequence
  Description of Artificial Sequence: Synthetic oligonucleotide
  Antisense strand to SEQ ID NO: 195812
ucacuggcaauauuuggau

SEQ ID NO: 195814 - RNA, 19 nt, Artificial Sequence
  Description of Artificial Sequence: Synthetic oligonucleotide
  Sense strand starting at position 2381 of SEQ ID NO: 2523
aaauauugccagugaaguc

SEQ ID NO: 195815 - RNA, 19 nt, Artificial Sequence
  Description of Artificial Sequence: Synthetic oligonucleotide
  Antisense strand to SEQ ID NO: 195814
gacuucacuggcaauauuu

SEQ ID NO: 195816 - RNA, 19 nt, Artificial Sequence
  Description of Artificial Sequence: Synthetic oligonucleotide
  Sense strand starting at position 2391 of SEQ ID NO: 2523
agugaagucuuucuaaauu

SEQ ID NO: 195817 - RNA, 19 nt, Artificial Sequence
  Description of Artificial Sequence: Synthetic oligonucleotide
  Antisense strand to SEQ ID NO: 195816
aauuuagaaagacuucacu

SEQ ID NO: 195818 - RNA, 19 nt, Artificial Sequence
  Description of Artificial Sequence: Synthetic oligonucleotide
  Sense strand starting at position 2474 of SEQ ID NO: 2523
agguccuauuggucuuaua

SEQ ID NO: 195819 - RNA, 19 nt, Artificial Sequence
  Description of Artificial Sequence: Synthetic oligonucleotide
  Antisense strand to SEQ ID NO: 195818
uauaagaccaauaggaccu

SEQ ID NO: 195820 - RNA, 19 nt, Artificial Sequence
  Description of Artificial Sequence: Synthetic oligonucleotide
  Sense strand starting at position 2617 of SEQ ID NO: 2523
uuguguugucaaggaagaa

SEQ ID NO: 195821 - RNA, 19 nt, Artificial Sequence
  Description of Artificial Sequence: Synthetic oligonucleotide
  Antisense strand to SEQ ID NO: 195820
uucuuccuugacaacacaa

SEQ ID NO: 195822 - RNA, 19 nt, Artificial Sequence
  Description of Artificial Sequence: Synthetic oligonucleotide
  Sense strand starting at position 2618 of SEQ ID NO: 2523
uguguugucaaggaagaac

SEQ ID NO: 195823 - RNA, 19 nt, Artificial Sequence
  Description of Artificial Sequence: Synthetic oligonucleotide
  Antisense strand to SEQ ID NO: 195822
guucuuccuugacaacaca

SEQ ID NO: 195824 - RNA, 19 nt, Artificial Sequence
  Description of Artificial Sequence: Synthetic oligonucleotide
  Sense strand starting at position 2877 of SEQ ID NO: 2523
agaauuaaggucugacuuu

SEQ ID NO: 195825 - RNA, 19 nt, Artificial Sequence
  Description of Artificial Sequence: Synthetic oligonucleotide
  Antisense strand to SEQ ID NO: 195824
aaagucagaccuuaauucu

SEQ ID NO: 195826 - RNA, 19 nt, Artificial Sequence
  Description of Artificial Sequence: Synthetic oligonucleotide
  Sense strand starting at position 3363 of SEQ ID NO: 2523
ccaaccuauuguguuaaca

SEQ ID NO: 195827 - RNA, 19 nt, Artificial Sequence
  Description of Artificial Sequence: Synthetic oligonucleotide
  Antisense strand to SEQ ID NO: 195826
uguuaacacaauagguugg

SEQ ID NO: 195828 - RNA, 19 nt, Artificial Sequence
  Description of Artificial Sequence: Synthetic oligonucleotide
  Sense strand starting at position 3401 of SEQ ID NO: 2523
auggaaauguugucucaag

SEQ ID NO: 195829 - RNA, 19 nt, Artificial Sequence
  Description of Artificial Sequence: Synthetic oligonucleotide
  Antisense strand to SEQ ID NO: 195828
cuugagacaacauuuccau

SEQ ID NO: 195830 - RNA, 19 nt, Artificial Sequence
  Description of Artificial Sequence: Synthetic oligonucleotide
  Sense strand starting at position 3402 of SEQ ID NO: 2523
uggaaauguugucucaagu

SEQ ID NO: 195831 - RNA, 19 nt, Artificial Sequence
  Description of Artificial Sequence: Synthetic oligonucleotide
  Antisense strand to SEQ ID NO: 195830
acuugagacaacauuucca

SEQ ID NO: 195832 - RNA, 19 nt, Artificial Sequence
  Description of Artificial Sequence: Synthetic oligonucleotide
  Sense strand starting at position 3846 of SEQ ID NO: 2523
agaccaggugucuagcuaa

SEQ ID NO: 195833 - RNA, 19 nt, Artificial Sequence
  Description of Artificial Sequence: Synthetic oligonucleotide
  Antisense strand to SEQ ID NO: 195832
uuagcuagacaccuggucu

SEQ ID NO: 195834 - RNA, 19 nt, Artificial Sequence
  Description of Artificial Sequence: Synthetic oligonucleotide
  Sense strand starting at position 3973 of SEQ ID NO: 2523
ucaguacuggagcacaaau

SEQ ID NO: 195835 - RNA, 19 nt, Artificial Sequence
  Description of Artificial Sequence: Synthetic oligonucleotide
  Antisense strand to SEQ ID NO: 195834
auuugugcuccaguacuga

SEQ ID NO: 195836 - RNA, 19 nt, Artificial Sequence
  Description of Artificial Sequence: Synthetic oligonucleotide
  Sense strand starting at position 32 of SEQ ID NO: 2524
agcgacuuugaauggauua

SEQ ID NO: 195837 - RNA, 19 nt, Artificial Sequence
  Description of Artificial Sequence: Synthetic oligonucleotide
  Antisense strand to SEQ ID NO: 195836
uaauccauucaaagucgcu

SEQ ID NO: 195838 - RNA, 19 nt, Artificial Sequence
  Description of Artificial Sequence: Synthetic oligonucleotide
  Sense strand starting at position 33 of SEQ ID NO: 2524
gcgacuuugaauggauuau

SEQ ID NO: 195839 - RNA, 19 nt, Artificial Sequence
  Description of Artificial Sequence: Synthetic oligonucleotide
  Antisense strand to SEQ ID NO: 195838
auaauccauucaaagucgc

SEQ ID NO: 195840 - RNA, 19 nt, Artificial Sequence
  Description of Artificial Sequence: Synthetic oligonucleotide
  Sense strand starting at position 125 of SEQ ID NO: 2524
ugcucaaggucucugaaau

SEQ ID NO: 195841 - RNA, 19 nt, Artificial Sequence
  Description of Artificial Sequence: Synthetic oligonucleotide
  Antisense strand to SEQ ID NO: 195840
auuucagagaccuugagca

SEQ ID NO: 195842 - RNA, 19 nt, Artificial Sequence
  Description of Artificial Sequence: Synthetic oligonucleotide
  Sense strand starting at position 126 of SEQ ID NO: 2524
gcucaaggucucugaaauu

SEQ ID NO: 195843 - RNA, 19 nt, Artificial Sequence
  Description of Artificial Sequence: Synthetic oligonucleotide
  Antisense strand to SEQ ID NO: 195842
aauuucagagaccuugagc

SEQ ID NO: 195844 - RNA, 19 nt, Artificial Sequence
  Description of Artificial Sequence: Synthetic oligonucleotide
  Sense strand starting at position 148 of SEQ ID NO: 2524
uaaagauucuggguauaca

SEQ ID NO: 195845 - RNA, 19 nt, Artificial Sequence
  Description of Artificial Sequence: Synthetic oligonucleotide
  Antisense strand to SEQ ID NO: 195844
uguauacccagaaucuuua

SEQ ID NO: 195846 - RNA, 19 nt, Artificial Sequence
  Description of Artificial Sequence: Synthetic oligonucleotide
  Sense strand starting at position 216 of SEQ ID NO: 2524
uagaaaugugugcagccaa

SEQ ID NO: 195847 - RNA, 19 nt, Artificial Sequence
  Description of Artificial Sequence: Synthetic oligonucleotide
  Antisense strand to SEQ ID NO: 195846
uuggcugcacacauuucua

SEQ ID NO: 195848 - RNA, 19 nt, Artificial Sequence
  Description of Artificial Sequence: Synthetic oligonucleotide
  Sense strand starting at position 335 of SEQ ID NO: 2524
ucuauuaaauugucaagag

SEQ ID NO: 195849 - RNA, 19 nt, Artificial Sequence
  Description of Artificial Sequence: Synthetic oligonucleotide
  Antisense strand to SEQ ID NO: 195848
cucuugacaauuuaauaga

SEQ ID NO: 195850 - RNA, 19 nt, Artificial Sequence
  Description of Artificial Sequence: Synthetic oligonucleotide
  Sense strand starting at position 339 of SEQ ID NO: 2524
uuaaauugucaagagcacu

SEQ ID NO: 195851 - RNA, 19 nt, Artificial Sequence
  Description of Artificial Sequence: Synthetic oligonucleotide
  Antisense strand to SEQ ID NO: 195850
agugcucuugacaauuuaa

SEQ ID NO: 195852 - RNA, 19 nt, Artificial Sequence
  Description of Artificial Sequence: Synthetic oligonucleotide
  Sense strand starting at position 473 of SEQ ID NO: 2524
ucaucuuuccgacagucuu

SEQ ID NO: 195853 - RNA, 19 nt, Artificial Sequence
  Description of Artificial Sequence: Synthetic oligonucleotide
  Antisense strand to SEQ ID NO: 195852
aagacugucggaaagauga

SEQ ID NO: 195854 - RNA, 19 nt, Artificial Sequence
  Description of Artificial Sequence: Synthetic oligonucleotide
  Sense strand starting at position 624 of SEQ ID NO: 2524
uguacaugacagcaaucau

SEQ ID NO: 195855 - RNA, 19 nt, Artificial Sequence
  Description of Artificial Sequence: Synthetic oligonucleotide
  Antisense strand to SEQ ID NO: 195854
augauugcugucauguaca

SEQ ID NO: 195856 - RNA, 19 nt, Artificial Sequence
  Description of Artificial Sequence: Synthetic oligonucleotide
  Sense strand starting at position 711 of SEQ ID NO: 2524
ugucaaacagauugucauc

SEQ ID NO: 195857 - RNA, 19 nt, Artificial Sequence
  Description of Artificial Sequence: Synthetic oligonucleotide
  Antisense strand to SEQ ID NO: 195856
gaugacaaucuguuugaca

SEQ ID NO: 195858 - RNA, 19 nt, Artificial Sequence
  Description of Artificial Sequence: Synthetic oligonucleotide
  Sense strand starting at position 716 of SEQ ID NO: 2524
aacagauugucaucuggga

SEQ ID NO: 195859 - RNA, 19 nt, Artificial Sequence
  Description of Artificial Sequence: Synthetic oligonucleotide
  Antisense strand to SEQ ID NO: 195858
ucccagaugacaaucuguu

SEQ ID NO: 195860 - RNA, 19 nt, Artificial Sequence
  Description of Artificial Sequence: Synthetic oligonucleotide
  Sense strand starting at position 868 of SEQ ID NO: 2524
cugcauaauccaggacaau

SEQ ID NO: 195861 - RNA, 19 nt, Artificial Sequence
  Description of Artificial Sequence: Synthetic oligonucleotide
  Antisense strand to SEQ ID NO: 195860
auuguccuggauuaugcag

SEQ ID NO: 195862 - RNA, 19 nt, Artificial Sequence
  Description of Artificial Sequence: Synthetic oligonucleotide
  Sense strand starting at position 994 of SEQ ID NO: 2524
ggcuucuagauuggguaga

SEQ ID NO: 195863 - RNA, 19 nt, Artificial Sequence
  Description of Artificial Sequence: Synthetic oligonucleotide
  Antisense strand to SEQ ID NO: 195862
ucuacccaaucuagaagcc

SEQ ID NO: 195864 - RNA, 19 nt, Artificial Sequence
  Description of Artificial Sequence: Synthetic oligonucleotide
  Sense strand starting at position 1014 of SEQ ID NO: 2524
ggcucuauuuagccuauca

SEQ ID NO: 195865 - RNA, 19 nt, Artificial Sequence
  Description of Artificial Sequence: Synthetic oligonucleotide
  Antisense strand to SEQ ID NO: 195864
ugauaggcuaaauagagcc

SEQ ID NO: 195866 - RNA, 19 nt, Artificial Sequence
  Description of Artificial Sequence: Synthetic oligonucleotide
  Sense strand starting at position 1096 of SEQ ID NO: 2524
uaaagaucguaccucgaaa

SEQ ID NO: 195867 - RNA, 19 nt, Artificial Sequence
  Description of Artificial Sequence: Synthetic oligonucleotide
  Antisense strand to SEQ ID NO: 195866
uuucgagguacgaucuuua

SEQ ID NO: 195868 - RNA, 19 nt, Artificial Sequence
  Description of Artificial Sequence: Synthetic oligonucleotide
  Sense strand starting at position 1113 of SEQ ID NO: 2524
aagcaaugugcguugcaaa

SEQ ID NO: 195869 - RNA, 19 nt, Artificial Sequence
  Description of Artificial Sequence: Synthetic oligonucleotide
  Antisense strand to SEQ ID NO: 195868
uuugcaacgcacauugcuu

SEQ ID NO: 195870 - RNA, 19 nt, Artificial Sequence
  Description of Artificial Sequence: Synthetic oligonucleotide
  Sense strand starting at position 1884 of SEQ ID NO: 2524
gcgcgguuggcucuaguca

SEQ ID NO: 195871 - RNA, 19 nt, Artificial Sequence
  Description of Artificial Sequence: Synthetic oligonucleotide
  Antisense strand to SEQ ID NO: 195870
ugacuagagccaaccgcgc

SEQ ID NO: 195872 - RNA, 19 nt, Artificial Sequence
  Description of Artificial Sequence: Synthetic oligonucleotide
  Sense strand starting at position 2203 of SEQ ID NO: 2524
gggcuucucacgggaggaa

SEQ ID NO: 195873 - RNA, 19 nt, Artificial Sequence
  Description of Artificial Sequence: Synthetic oligonucleotide
  Antisense strand to SEQ ID NO: 195872
uuccucccgugagaagccc

SEQ ID NO: 195874 - RNA, 19 nt, Artificial Sequence
  Description of Artificial Sequence: Synthetic oligonucleotide
  Sense strand starting at position 2204 of SEQ ID NO: 2524
ggcuucucacgggaggaaa

SEQ ID NO: 195875 - RNA, 19 nt, Artificial Sequence
  Description of Artificial Sequence: Synthetic oligonucleotide
  Antisense strand to SEQ ID NO: 195874
uuuccucccgugagaagcc

SEQ ID NO: 195876 - RNA, 19 nt, Artificial Sequence
  Description of Artificial Sequence: Synthetic oligonucleotide
  Sense strand starting at position 2491 of SEQ ID NO: 2524
accuauaagcuuugguuua

SEQ ID NO: 195877 - RNA, 19 nt, Artificial Sequence
  Description of Artificial Sequence: Synthetic oligonucleotide
  Antisense strand to SEQ ID NO: 195876
uaaaccaaagcuuauaggu

SEQ ID NO: 195878 - RNA, 19 nt, Artificial Sequence
  Description of Artificial Sequence: Synthetic oligonucleotide
  Sense strand starting at position 2493 of SEQ ID NO: 2524
cuauaagcuuugguuuaac

SEQ ID NO: 195879 - RNA, 19 nt, Artificial Sequence
  Description of Artificial Sequence: Synthetic oligonucleotide
  Antisense strand to SEQ ID NO: 195878
guuaaaccaaagcuuauag

SEQ ID NO: 195880 - RNA, 19 nt, Artificial Sequence
  Description of Artificial Sequence: Synthetic oligonucleotide
  Sense strand starting at position 2598 of SEQ ID NO: 2524
ggccaucuacaauguguga

SEQ ID NO: 195881 - RNA, 19 nt, Artificial Sequence
  Description of Artificial Sequence: Synthetic oligonucleotide
  Antisense strand to SEQ ID NO: 195880
ucacacauuguagauggcc

SEQ ID NO: 195882 - RNA, 19 nt, Artificial Sequence
  Description of Artificial Sequence: Synthetic oligonucleotide
  Sense strand starting at position 2787 of SEQ ID NO: 2524
aaacuuguuugaguauugu

SEQ ID NO: 195883 - RNA, 19 nt, Artificial Sequence
  Description of Artificial Sequence: Synthetic oligonucleotide
  Antisense strand to SEQ ID NO: 195882
acaauacucaaacaaguuu

SEQ ID NO: 195884 - RNA, 19 nt, Artificial Sequence
  Description of Artificial Sequence: Synthetic oligonucleotide
  Sense strand starting at position 2804 of SEQ ID NO: 2524
guuuaaucccuagaggcua

SEQ ID NO: 195885 - RNA, 19 nt, Artificial Sequence
  Description of Artificial Sequence: Synthetic oligonucleotide
  Antisense strand to SEQ ID NO: 195884
uagccucuagggauuaaac

SEQ ID NO: 195886 - RNA, 19 nt, Artificial Sequence
  Description of Artificial Sequence: Synthetic oligonucleotide
  Sense strand starting at position 2844 of SEQ ID NO: 2524
aauauaaggccuggauugu

SEQ ID NO: 195887 - RNA, 19 nt, Artificial Sequence
  Description of Artificial Sequence: Synthetic oligonucleotide
  Antisense strand to SEQ ID NO: 195886
acaauccaggccuuauauu

SEQ ID NO: 195888 - RNA, 19 nt, Artificial Sequence
  Description of Artificial Sequence: Synthetic oligonucleotide
  Sense strand starting at position 2921 of SEQ ID NO: 2524
accuauggagccugaacau

SEQ ID NO: 195889 - RNA, 19 nt, Artificial Sequence
  Description of Artificial Sequence: Synthetic oligonucleotide
  Antisense strand to SEQ ID NO: 195888
auguucaggcuccauaggu

SEQ ID NO: 195890 - RNA, 19 nt, Artificial Sequence
  Description of Artificial Sequence: Synthetic oligonucleotide
  Sense strand starting at position 3113 of SEQ ID NO: 2524
uucuaaguucuaugaaaga

SEQ ID NO: 195891 - RNA, 19 nt, Artificial Sequence
  Description of Artificial Sequence: Synthetic oligonucleotide
  Antisense strand to SEQ ID NO: 195890
ucuuucauagaacuuagaa

SEQ ID NO: 195892 - RNA, 19 nt, Artificial Sequence
  Description of Artificial Sequence: Synthetic oligonucleotide
  Sense strand starting at position 3185 of SEQ ID NO: 2524
gggagaugagaugguuguu

SEQ ID NO: 195893 - RNA, 19 nt, Artificial Sequence
  Description of Artificial Sequence: Synthetic oligonucleotide
  Antisense strand to SEQ ID NO: 195892
aacaaccaucucaucuccc

SEQ ID NO: 195894 - RNA, 19 nt, Artificial Sequence
  Description of Artificial Sequence: Synthetic oligonucleotide
  Sense strand starting at position 3190 of SEQ ID NO: 2524
augagaugguuguuggacu

SEQ ID NO: 195895 - RNA, 19 nt, Artificial Sequence
  Description of Artificial Sequence: Synthetic oligonucleotide
  Antisense strand to SEQ ID NO: 195894
aguccaacaaccaucucau

SEQ ID NO: 195896 - RNA, 19 nt, Artificial Sequence
  Description of Artificial Sequence: Synthetic oligonucleotide
  Sense strand starting at position 3198 of SEQ ID NO: 2524
guuguuggacuuugagaug

SEQ ID NO: 195897 - RNA, 19 nt, Artificial Sequence
  Description of Artificial Sequence: Synthetic oligonucleotide
  Antisense strand to SEQ ID NO: 195896
caucucaaaguccaacaac

SEQ ID NO: 195898 - RNA, 19 nt, Artificial Sequence
  Description of Artificial Sequence: Synthetic oligonucleotide
  Sense strand starting at position 3203 of SEQ ID NO: 2524
uggacuuugagaugugggu

SEQ ID NO: 195899 - RNA, 19 nt, Artificial Sequence
  Description of Artificial Sequence: Synthetic oligonucleotide
  Antisense strand to SEQ ID NO: 195898
acccacaucucaaagucca

SEQ ID NO: 195900 - RNA, 19 nt, Artificial Sequence
  Description of Artificial Sequence: Synthetic oligonucleotide
  Sense strand starting at position 3326 of SEQ ID NO: 2524
ggacaaaucugagcccuuu

SEQ ID NO: 195901 - RNA, 19 nt, Artificial Sequence
  Description of Artificial Sequence: Synthetic oligonucleotide
  Antisense strand to SEQ ID NO: 195900
aaagggcucagauuugucc

SEQ ID NO: 195902 - RNA, 19 nt, Artificial Sequence
  Description of Artificial Sequence: Synthetic oligonucleotide
  Sense strand starting at position 3445 of SEQ ID NO: 2524
cuuaaauugugaucugcca

SEQ ID NO: 195903 - RNA, 19 nt, Artificial Sequence
  Description of Artificial Sequence: Synthetic oligonucleotide
  Antisense strand to SEQ ID NO: 195902
uggcagaucacaauuuaag

SEQ ID NO: 195904 - RNA, 19 nt, Artificial Sequence
  Description of Artificial Sequence: Synthetic oligonucleotide
  Sense strand starting at position 3453 of SEQ ID NO: 2524
gugaucugccaauagauca

SEQ ID NO: 195905 - RNA, 19 nt, Artificial Sequence
  Description of Artificial Sequence: Synthetic oligonucleotide
  Antisense strand to SEQ ID NO: 195904
ugaucuauuggcagaucac

SEQ ID NO: 195906 - RNA, 19 nt, Artificial Sequence
  Description of Artificial Sequence: Synthetic oligonucleotide
  Sense strand starting at position 3469 of SEQ ID NO: 2524
ucaugauaccgggagccua

SEQ ID NO: 195907 - RNA, 19 nt, Artificial Sequence
  Description of Artificial Sequence: Synthetic oligonucleotide
  Antisense strand to SEQ ID NO: 195906
uaggcucccgguaucauga

SEQ ID NO: 195908 - RNA, 19 nt, Artificial Sequence
  Description of Artificial Sequence: Synthetic oligonucleotide
  Sense strand starting at position 3483 of SEQ ID NO: 2524
gccuaaauagcagaaugua

SEQ ID NO: 195909 - RNA, 19 nt, Artificial Sequence
  Description of Artificial Sequence: Synthetic oligonucleotide
  Antisense strand to SEQ ID NO: 195908
uacauucugcuauuuaggc

SEQ ID NO: 195910 - RNA, 19 nt, Artificial Sequence
  Description of Artificial Sequence: Synthetic oligonucleotide
  Sense strand starting at position 3583 of SEQ ID NO: 2524
aaggguaguguaugagaga

SEQ ID NO: 195911 - RNA, 19 nt, Artificial Sequence
  Description of Artificial Sequence: Synthetic oligonucleotide
  Antisense strand to SEQ ID NO: 195910
ucucucauacacuacccuu

SEQ ID NO: 195912 - RNA, 19 nt, Artificial Sequence
  Description of Artificial Sequence: Synthetic oligonucleotide
  Sense strand starting at position 3588 of SEQ ID NO: 2524
uaguguaugagagagcauu

SEQ ID NO: 195913 - RNA, 19 nt, Artificial Sequence
  Description of Artificial Sequence: Synthetic oligonucleotide
  Antisense strand to SEQ ID NO: 195912
aaugcucucucauacacua

SEQ ID NO: 195914 - RNA, 19 nt, Artificial Sequence
  Description of Artificial Sequence: Synthetic oligonucleotide
  Sense strand starting at position 3594 of SEQ ID NO: 2524
augagagagcauuguuaaa

SEQ ID NO: 195915 - RNA, 19 nt, Artificial Sequence
  Description of Artificial Sequence: Synthetic oligonucleotide
  Antisense strand to SEQ ID NO: 195914
uuuaacaaugcucucucau

SEQ ID NO: 195916 - RNA, 19 nt, Artificial Sequence
  Description of Artificial Sequence: Synthetic oligonucleotide
  Sense strand starting at position 258 of SEQ ID NO: 2525
acaagcuuguaacugaaua

SEQ ID NO: 195917 - RNA, 19 nt, Artificial Sequence
  Description of Artificial Sequence: Synthetic oligonucleotide
  Antisense strand to SEQ ID NO: 195916
uauucaguuacaagcuugu

SEQ ID NO: 195918 - RNA, 19 nt, Artificial Sequence
  Description of Artificial Sequence: Synthetic oligonucleotide
  Sense strand starting at position 555 of SEQ ID NO: 2525
ucacauggguuguucuaaa

SEQ ID NO: 195919 - RNA, 19 nt, Artificial Sequence
  Description of Artificial Sequence: Synthetic oligonucleotide
  Antisense strand to SEQ ID NO: 195918
uuuagaacaacccauguga

SEQ ID NO: 195920 - RNA, 19 nt, Artificial Sequence
  Description of Artificial Sequence: Synthetic oligonucleotide
  Sense strand starting at position 607 of SEQ ID NO: 2525
auaaguauuccguagguaa

SEQ ID NO: 195921 - RNA, 19 nt, Artificial Sequence
  Description of Artificial Sequence: Synthetic oligonucleotide
  Antisense strand to SEQ ID NO: 195920
uuaccuacggaauacuuau

SEQ ID NO: 195922 - RNA, 19 nt, Artificial Sequence
  Description of Artificial Sequence: Synthetic oligonucleotide
  Sense strand starting at position 808 of SEQ ID NO: 2525
gcugauaggauguauuguu

SEQ ID NO: 195923 - RNA, 19 nt, Artificial Sequence
  Description of Artificial Sequence: Synthetic oligonucleotide
  Antisense strand to SEQ ID NO: 195922
aacaauacauccuaucagc

SEQ ID NO: 195924 - RNA, 19 nt, Artificial Sequence
  Description of Artificial Sequence: Synthetic oligonucleotide
  Sense strand starting at position 847 of SEQ ID NO: 2525
agcaacuggcuugaucuau

SEQ ID NO: 195925 - RNA, 19 nt, Artificial Sequence
  Description of Artificial Sequence: Synthetic oligonucleotide
  Antisense strand to SEQ ID NO: 195924
auagaucaagccaguugcu

SEQ ID NO: 195926 - RNA, 19 nt, Artificial Sequence
  Description of Artificial Sequence: Synthetic oligonucleotide
  Sense strand starting at position 859 of SEQ ID NO: 2525
gaucuaugucgugauauuc

SEQ ID NO: 195927 - RNA, 19 nt, Artificial Sequence
  Description of Artificial Sequence: Synthetic oligonucleotide
  Antisense strand to SEQ ID NO: 195926
gaauaucacgacauagauc

SEQ ID NO: 195928 - RNA, 19 nt, Artificial Sequence
  Description of Artificial Sequence: Synthetic oligonucleotide
  Sense strand starting at position 1016 of SEQ ID NO: 2525
cgcugucauccaguguuau

SEQ ID NO: 195929 - RNA, 19 nt, Artificial Sequence
  Description of Artificial Sequence: Synthetic oligonucleotide
  Antisense strand to SEQ ID NO: 195928
auaacacuggaugacagcg

SEQ ID NO: 195930 - RNA, 19 nt, Artificial Sequence
  Description of Artificial Sequence: Synthetic oligonucleotide
  Sense strand starting at position 1653 of SEQ ID NO: 2525
ggguuuaaaucacugucaa

SEQ ID NO: 195931 - RNA, 19 nt, Artificial Sequence
  Description of Artificial Sequence: Synthetic oligonucleotide
  Antisense strand to SEQ ID NO: 195930
uugacagugauuuaaaccc

SEQ ID NO: 195932 - RNA, 19 nt, Artificial Sequence
  Description of Artificial Sequence: Synthetic oligonucleotide
  Sense strand starting at position 1654 of SEQ ID NO: 2525
gguuuaaaucacugucaaa

SEQ ID NO: 195933 - RNA, 19 nt, Artificial Sequence
  Description of Artificial Sequence: Synthetic oligonucleotide
  Antisense strand to SEQ ID NO: 195932
uuugacagugauuuaaacc

SEQ ID NO: 195934 - RNA, 19 nt, Artificial Sequence
  Description of Artificial Sequence: Synthetic oligonucleotide
  Sense strand starting at position 2284 of SEQ ID NO: 2525
uagagauaccgcgacaaag

SEQ ID NO: 195935 - RNA, 19 nt, Artificial Sequence
  Description of Artificial Sequence: Synthetic oligonucleotide
  Antisense strand to SEQ ID NO: 195934
cuuugucgcgguaucucua

SEQ ID NO: 195936 - RNA, 19 nt, Artificial Sequence
  Description of Artificial Sequence: Synthetic oligonucleotide
  Sense strand starting at position 2692 of SEQ ID NO: 2525
ugcugucuuggugacuaga

SEQ ID NO: 195937 - RNA, 19 nt, Artificial Sequence
  Description of Artificial Sequence: Synthetic oligonucleotide
  Antisense strand to SEQ ID NO: 195936
ucuagucaccaagacagca

SEQ ID NO: 195938 - RNA, 19 nt, Artificial Sequence
  Description of Artificial Sequence: Synthetic oligonucleotide
  Sense strand starting at position 2694 of SEQ ID NO: 2525
cugucuuggugacuagaaa

SEQ ID NO: 195939 - RNA, 19 nt, Artificial Sequence
  Description of Artificial Sequence: Synthetic oligonucleotide
  Antisense strand to SEQ ID NO: 195938
uuucuagucaccaagacag

SEQ ID NO: 195940 - RNA, 19 nt, Artificial Sequence
  Description of Artificial Sequence: Synthetic oligonucleotide
  Sense strand starting at position 2769 of SEQ ID NO: 2525
cauuuaucacgaugcgcaa

SEQ ID NO: 195941 - RNA, 19 nt, Artificial Sequence
  Description of Artificial Sequence: Synthetic oligonucleotide
  Antisense strand to SEQ ID NO: 195940
uugcgcaucgugauaaaug

SEQ ID NO: 195942 - RNA, 19 nt, Artificial Sequence
  Description of Artificial Sequence: Synthetic oligonucleotide
  Sense strand starting at position 2869 of SEQ ID NO: 2525
uuguuuacugcgcuuugaa

SEQ ID NO: 195943 - RNA, 19 nt, Artificial Sequence
  Description of Artificial Sequence: Synthetic oligonucleotide
  Antisense strand to SEQ ID NO: 195942
uucaaagcgcaguaaacaa

SEQ ID NO: 195944 - RNA, 19 nt, Artificial Sequence
  Description of Artificial Sequence: Synthetic oligonucleotide
  Sense strand starting at position 2915 of SEQ ID NO: 2525
auuugaugaucagacaagu

SEQ ID NO: 195945 - RNA, 19 nt, Artificial Sequence
  Description of Artificial Sequence: Synthetic oligonucleotide
  Antisense strand to SEQ ID NO: 195944
acuugucugaucaucaaau

SEQ ID NO: 195946 - RNA, 19 nt, Artificial Sequence
  Description of Artificial Sequence: Synthetic oligonucleotide
  Sense strand starting at position 2928 of SEQ ID NO: 2525
acaagugauuacuugucaa

SEQ ID NO: 195947 - RNA, 19 nt, Artificial Sequence
  Description of Artificial Sequence: Synthetic oligonucleotide
  Antisense strand to SEQ ID NO: 195946
uugacaaguaaucacuugu

SEQ ID NO: 195948 - RNA, 19 nt, Artificial Sequence
  Description of Artificial Sequence: Synthetic oligonucleotide
  Sense strand starting at position 3114 of SEQ ID NO: 2525
gagacuauugaagguaguu

SEQ ID NO: 195949 - RNA, 19 nt, Artificial Sequence
  Description of Artificial Sequence: Synthetic oligonucleotide
  Antisense strand to SEQ ID NO: 195948
aacuaccuucaauagucuc

SEQ ID NO: 195950 - RNA, 19 nt, Artificial Sequence
  Description of Artificial Sequence: Synthetic oligonucleotide
  Sense strand starting at position 3126 of SEQ ID NO: 2525
gguaguugcucugucauuu

SEQ ID NO: 195951 - RNA, 19 nt, Artificial Sequence
  Description of Artificial Sequence: Synthetic oligonucleotide
  Antisense strand to SEQ ID NO: 195950
aaaugacagagcaacuacc

SEQ ID NO: 195952 - RNA, 19 nt, Artificial Sequence
  Description of Artificial Sequence: Synthetic oligonucleotide
  Sense strand starting at position 3130 of SEQ ID NO: 2525
guugcucugucauuuacca

SEQ ID NO: 195953 - RNA, 19 nt, Artificial Sequence
  Description of Artificial Sequence: Synthetic oligonucleotide
  Antisense strand to SEQ ID NO: 195952
ugguaaaugacagagcaac

SEQ ID NO: 195954 - RNA, 19 nt, Artificial Sequence
  Description of Artificial Sequence: Synthetic oligonucleotide
  Sense strand starting at position 3295 of SEQ ID NO: 2525
cuguuaauguacucuacaa

SEQ ID NO: 195955 - RNA, 19 nt, Artificial Sequence
  Description of Artificial Sequence: Synthetic oligonucleotide
  Antisense strand to SEQ ID NO: 195954
uuguagaguacauuaacag

SEQ ID NO: 195956 - RNA, 19 nt, Artificial Sequence
  Description of Artificial Sequence: Synthetic oligonucleotide
  Sense strand starting at position 3297 of SEQ ID NO: 2525
guuaauguacucuacaaag

SEQ ID NO: 195957 - RNA, 19 nt, Artificial Sequence
  Description of Artificial Sequence: Synthetic oligonucleotide
  Antisense strand to SEQ ID NO: 195956
cuuuguagaguacauuaac

SEQ ID NO: 195958 - RNA, 19 nt, Artificial Sequence
  Description of Artificial Sequence: Synthetic oligonucleotide
  Sense strand starting at position 3338 of SEQ ID NO: 2525
uguauaauauggcuaauuc

SEQ ID NO: 195959 - RNA, 19 nt, Artificial Sequence
  Description of Artificial Sequence: Synthetic oligonucleotide
  Antisense strand to SEQ ID NO: 195958
gaauuagccauauuauaca

SEQ ID NO: 195960 - RNA, 19 nt, Artificial Sequence
  Description of Artificial Sequence: Synthetic oligonucleotide
  Sense strand starting at position 3448 of SEQ ID NO: 2525
cucuguauuucugucuauu

SEQ ID NO: 195961 - RNA, 19 nt, Artificial Sequence
  Description of Artificial Sequence: Synthetic oligonucleotide
  Antisense strand to SEQ ID NO: 195960
aauagacagaaauacagag

SEQ ID NO: 195962 - RNA, 19 nt, Artificial Sequence
  Description of Artificial Sequence: Synthetic oligonucleotide
  Sense strand starting at position 3498 of SEQ ID NO: 2525
acaacuuaucaggguuauu

SEQ ID NO: 195963 - RNA, 19 nt, Artificial Sequence
  Description of Artificial Sequence: Synthetic oligonucleotide
  Antisense strand to SEQ ID NO: 195962
aauaacccugauaaguugu

SEQ ID NO: 195964 - RNA, 19 nt, Artificial Sequence
  Description of Artificial Sequence: Synthetic oligonucleotide
  Sense strand starting at position 3510 of SEQ ID NO: 2525
gguuauuaauaaucaacgu

SEQ ID NO: 195965 - RNA, 19 nt, Artificial Sequence
  Description of Artificial Sequence: Synthetic oligonucleotide
  Antisense strand to SEQ ID NO: 195964
acguugauuauuaauaacc

SEQ ID NO: 195966 - RNA, 19 nt, Artificial Sequence
  Description of Artificial Sequence: Synthetic oligonucleotide
  Sense strand starting at position 3564 of SEQ ID NO: 2525
aaucgugaugcucagaauu

SEQ ID NO: 195967 - RNA, 19 nt, Artificial Sequence
  Description of Artificial Sequence: Synthetic oligonucleotide
  Antisense strand to SEQ ID NO: 195966
aauucugagcaucacgauu

SEQ ID NO: 195968 - RNA, 19 nt, Artificial Sequence
  Description of Artificial Sequence: Synthetic oligonucleotide
  Sense strand starting at position 3608 of SEQ ID NO: 2525
gucccaagucgguauuaaa

SEQ ID NO: 195969 - RNA, 19 nt, Artificial Sequence
  Description of Artificial Sequence: Synthetic oligonucleotide
  Antisense strand to SEQ ID NO: 195968
uuuaauaccgacuugggac

SEQ ID NO: 195970 - RNA, 19 nt, Artificial Sequence
  Description of Artificial Sequence: Synthetic oligonucleotide
  Sense strand starting at position 3620 of SEQ ID NO: 2525
uauuaaaggugucugaaug

SEQ ID NO: 195971 - RNA, 19 nt, Artificial Sequence
  Description of Artificial Sequence: Synthetic oligonucleotide
  Antisense strand to SEQ ID NO: 195970
cauucagacaccuuuaaua

SEQ ID NO: 195972 - RNA, 19 nt, Artificial Sequence
  Description of Artificial Sequence: Synthetic oligonucleotide
  Sense strand starting at position 3621 of SEQ ID NO: 2525
auuaaaggugucugaauga

SEQ ID NO: 195973 - RNA, 19 nt, Artificial Sequence
  Description of Artificial Sequence: Synthetic oligonucleotide
  Antisense strand to SEQ ID NO: 195972
ucauucagacaccuuuaau

SEQ ID NO: 195974 - RNA, 19 nt, Artificial Sequence
  Description of Artificial Sequence: Synthetic oligonucleotide
  Sense strand starting at position 3626 of SEQ ID NO: 2525
aggugucugaaugaucuca

SEQ ID NO: 195975 - RNA, 19 nt, Artificial Sequence
  Description of Artificial Sequence: Synthetic oligonucleotide
  Antisense strand to SEQ ID NO: 195974
ugagaucauucagacaccu

SEQ ID NO: 195976 - RNA, 19 nt, Artificial Sequence
  Description of Artificial Sequence: Synthetic oligonucleotide
  Sense strand starting at position 3628 of SEQ ID NO: 2525
gugucugaaugaucucaug

SEQ ID NO: 195977 - RNA, 19 nt, Artificial Sequence
  Description of Artificial Sequence: Synthetic oligonucleotide
  Antisense strand to SEQ ID NO: 195976
caugagaucauucagacac

SEQ ID NO: 195978 - RNA, 19 nt, Artificial Sequence
  Description of Artificial Sequence: Synthetic oligonucleotide
  Sense strand starting at position 3650 of SEQ ID NO: 2525
uucuccuaucuuuaugagu

SEQ ID NO: 195979 - RNA, 19 nt, Artificial Sequence
  Description of Artificial Sequence: Synthetic oligonucleotide
  Antisense strand to SEQ ID NO: 195978
acucauaaagauaggagaa

SEQ ID NO: 195980 - RNA, 19 nt, Artificial Sequence
  Description of Artificial Sequence: Synthetic oligonucleotide
  Sense strand starting at position 3658 of SEQ ID NO: 2525
ucuuuaugaguuggucaaa

SEQ ID NO: 195981 - RNA, 19 nt, Artificial Sequence
  Description of Artificial Sequence: Synthetic oligonucleotide
  Antisense strand to SEQ ID NO: 195980
uuugaccaacucauaaaga

SEQ ID NO: 195982 - RNA, 19 nt, Artificial Sequence
  Description of Artificial Sequence: Synthetic oligonucleotide
  Sense strand starting at position 3659 of SEQ ID NO: 2525
cuuuaugaguuggucaaag

SEQ ID NO: 195983 - RNA, 19 nt, Artificial Sequence
  Description of Artificial Sequence: Synthetic oligonucleotide
  Antisense strand to SEQ ID NO: 195982
cuuugaccaacucauaaag

SEQ ID NO: 195984 - RNA, 19 nt, Artificial Sequence
  Description of Artificial Sequence: Synthetic oligonucleotide
  Sense strand starting at position 3671 of SEQ ID NO: 2525
gucaaaggaauauguguaa

SEQ ID NO: 195985 - RNA, 19 nt, Artificial Sequence
  Description of Artificial Sequence: Synthetic oligonucleotide
  Antisense strand to SEQ ID NO: 195984
uuacacauauuccuuugac

SEQ ID NO: 195986 - RNA, 19 nt, Artificial Sequence
  Description of Artificial Sequence: Synthetic oligonucleotide
  Sense strand starting at position 3675 of SEQ ID NO: 2525
aaggaauauguguaagccu

SEQ ID NO: 195987 - RNA, 19 nt, Artificial Sequence
  Description of Artificial Sequence: Synthetic oligonucleotide
  Antisense strand to SEQ ID NO: 195986
aggcuuacacauauuccuu

SEQ ID NO: 195988 - RNA, 19 nt, Artificial Sequence
  Description of Artificial Sequence: Synthetic oligonucleotide
  Sense strand starting at position 3726 of SEQ ID NO: 2525
acgguucuggaauggaaga

SEQ ID NO: 195989 - RNA, 19 nt, Artificial Sequence
  Description of Artificial Sequence: Synthetic oligonucleotide
  Antisense strand to SEQ ID NO: 195988
ucuuccauuccagaaccgu

SEQ ID NO: 195990 - RNA, 19 nt, Artificial Sequence
  Description of Artificial Sequence: Synthetic oligonucleotide
  Sense strand starting at position 3776 of SEQ ID NO: 2525
auuagagaauuugauguca

SEQ ID NO: 195991 - RNA, 19 nt, Artificial Sequence
  Description of Artificial Sequence: Synthetic oligonucleotide
  Antisense strand to SEQ ID NO: 195990
ugacaucaaauucucuaau

SEQ ID NO: 195992 - RNA, 19 nt, Artificial Sequence
  Description of Artificial Sequence: Synthetic oligonucleotide
  Sense strand starting at position 3781 of SEQ ID NO: 2525
agaauuugaugucaguuag

SEQ ID NO: 195993 - RNA, 19 nt, Artificial Sequence
  Description of Artificial Sequence: Synthetic oligonucleotide
  Antisense strand to SEQ ID NO: 195992
cuaacugacaucaaauucu

SEQ ID NO: 195994 - RNA, 19 nt, Artificial Sequence
  Description of Artificial Sequence: Synthetic oligonucleotide
  Sense strand starting at position 3878 of SEQ ID NO: 2525
uggaauagcgaguaauaca

SEQ ID NO: 195995 - RNA, 19 nt, Artificial Sequence
  Description of Artificial Sequence: Synthetic oligonucleotide
  Antisense strand to SEQ ID NO: 195994
uguauuacucgcuauucca

SEQ ID NO: 195996 - RNA, 19 nt, Artificial Sequence
  Description of Artificial Sequence: Synthetic oligonucleotide
  Sense strand starting at position 17 of SEQ ID NO: 2526
gaaguaauaccuugagacu

SEQ ID NO: 195997 - RNA, 19 nt, Artificial Sequence
  Description of Artificial Sequence: Synthetic oligonucleotide
  Antisense strand to SEQ ID NO: 195996
agucucaagguauuacuuc

SEQ ID NO: 195998 - RNA, 19 nt, Artificial Sequence
  Description of Artificial Sequence: Synthetic oligonucleotide
  Sense strand starting at position 23 of SEQ ID NO: 2526
auaccuugagacugcucaa

SEQ ID NO: 195999 - RNA, 19 nt, Artificial Sequence
  Description of Artificial Sequence: Synthetic oligonucleotide
  Antisense strand to SEQ ID NO: 195998
uugagcagucucaagguau

SEQ ID NO: 196000 - RNA, 19 nt, Artificial Sequence
  Description of Artificial Sequence: Synthetic oligonucleotide
  Sense strand starting at position 26 of SEQ ID NO: 2526
ccuugagacugcucaagaa

SEQ ID NO: 196001 - RNA, 19 nt, Artificial Sequence
  Description of Artificial Sequence: Synthetic oligonucleotide
  Antisense strand to SEQ ID NO: 196000
uucuugagcagucucaagg

SEQ ID NO: 196002 - RNA, 19 nt, Artificial Sequence
  Description of Artificial Sequence: Synthetic oligonucleotide
  Sense strand starting at position 58 of SEQ ID NO: 2526
caauuagugugacucaggu

SEQ ID NO: 196003 - RNA, 19 nt, Artificial Sequence
  Description of Artificial Sequence: Synthetic oligonucleotide
  Antisense strand to SEQ ID NO: 196002
accugagucacacuaauug

SEQ ID NO: 196004 - RNA, 19 nt, Artificial Sequence
  Description of Artificial Sequence: Synthetic oligonucleotide
  Sense strand starting at position 75 of SEQ ID NO: 2526
guggguuugagagggaaua

SEQ ID NO: 196005 - RNA, 19 nt, Artificial Sequence
  Description of Artificial Sequence: Synthetic oligonucleotide
  Antisense strand to SEQ ID NO: 196004
uauucccucucaaacccac

SEQ ID NO: 196006 - RNA, 19 nt, Artificial Sequence
  Description of Artificial Sequence: Synthetic oligonucleotide
  Sense strand starting at position 96 of SEQ ID NO: 2526
guccacaauuccuugguca

SEQ ID NO: 196007 - RNA, 19 nt, Artificial Sequence
  Description of Artificial Sequence: Synthetic oligonucleotide
  Antisense strand to SEQ ID NO: 196006
ugaccaaggaauuguggac

SEQ ID NO: 196008 - RNA, 19 nt, Artificial Sequence
  Description of Artificial Sequence: Synthetic oligonucleotide
  Sense strand starting at position 262 of SEQ ID NO: 2526
aagcaagagguuuaauguu

SEQ ID NO: 196009 - RNA, 19 nt, Artificial Sequence
  Description of Artificial Sequence: Synthetic oligonucleotide
  Antisense strand to SEQ ID NO: 196008
aacauuaaaccucuugcuu

SEQ ID NO: 196010 - RNA, 19 nt, Artificial Sequence
  Description of Artificial Sequence: Synthetic oligonucleotide
  Sense strand starting at position 402 of SEQ ID NO: 2526
uuugguuaaucucuggcaa

SEQ ID NO: 196011 - RNA, 19 nt, Artificial Sequence
  Description of Artificial Sequence: Synthetic oligonucleotide
  Antisense strand to SEQ ID NO: 196010
uugccagagauuaaccaaa

SEQ ID NO: 196012 - RNA, 19 nt, Artificial Sequence
  Description of Artificial Sequence: Synthetic oligonucleotide
  Sense strand starting at position 415 of SEQ ID NO: 2526
uggcaaugaucgccauuuc

SEQ ID NO: 196013 - RNA, 19 nt, Artificial Sequence
  Description of Artificial Sequence: Synthetic oligonucleotide
  Antisense strand to SEQ ID NO: 196012
gaaauggcgaucauugcca

SEQ ID NO: 196014 - RNA, 19 nt, Artificial Sequence
  Description of Artificial Sequence: Synthetic oligonucleotide
  Sense strand starting at position 653 of SEQ ID NO: 2526
uccuguggcaaacgagaua

SEQ ID NO: 196015 - RNA, 19 nt, Artificial Sequence
  Description of Artificial Sequence: Synthetic oligonucleotide
  Antisense strand to SEQ ID NO: 196014
uaucucguuugccacagga

SEQ ID NO: 196016 - RNA, 19 nt, Artificial Sequence
  Description of Artificial Sequence: Synthetic oligonucleotide
  Sense strand starting at position 736 of SEQ ID NO: 2526
acaagcuuguaacugaaua

SEQ ID NO: 196017 - RNA, 19 nt, Artificial Sequence
  Description of Artificial Sequence: Synthetic oligonucleotide
  Antisense strand to SEQ ID NO: 196016
uauucaguuacaagcuugu

SEQ ID NO: 196018 - RNA, 19 nt, Artificial Sequence
  Description of Artificial Sequence: Synthetic oligonucleotide
  Sense strand starting at position 1033 of SEQ ID NO: 2526
ucacauggguuguucuaaa

SEQ ID NO: 196019 - RNA, 19 nt, Artificial Sequence
  Description of Artificial Sequence: Synthetic oligonucleotide
  Antisense strand to SEQ ID NO: 196018
uuuagaacaacccauguga

SEQ ID NO: 196020 - RNA, 19 nt, Artificial Sequence
  Description of Artificial Sequence: Synthetic oligonucleotide
  Sense strand starting at position 1085 of SEQ ID NO: 2526
auaaguauuccguagguaa

SEQ ID NO: 196021 - RNA, 19 nt, Artificial Sequence
  Description of Artificial Sequence: Synthetic oligonucleotide
  Antisense strand to SEQ ID NO: 196020
uuaccuacggaauacuuau

SEQ ID NO: 196022 - RNA, 19 nt, Artificial Sequence
  Description of Artificial Sequence: Synthetic oligonucleotide
  Sense strand starting at position 1286 of SEQ ID NO: 2526
gcugauaggauguauuguu

SEQ ID NO: 196023 - RNA, 19 nt, Artificial Sequence
  Description of Artificial Sequence: Synthetic oligonucleotide
  Antisense strand to SEQ ID NO: 196022
aacaauacauccuaucagc

SEQ ID NO: 196024 - RNA, 19 nt, Artificial Sequence
  Description of Artificial Sequence: Synthetic oligonucleotide
  Sense strand starting at position 1294 of SEQ ID NO: 2526
gauguauuguuucccacag

SEQ ID NO: 196025 - RNA, 19 nt, Artificial Sequence
  Description of Artificial Sequence: Synthetic oligonucleotide
  Antisense strand to SEQ ID NO: 196024
cugugggaaacaauacauc

SEQ ID NO: 196026 - RNA, 19 nt, Artificial Sequence
  Description of Artificial Sequence: Synthetic oligonucleotide
  Sense strand starting at position 1325 of SEQ ID NO: 2526
agcaacuggcuugaucuau

SEQ ID NO: 196027 - RNA, 19 nt, Artificial Sequence
  Description of Artificial Sequence: Synthetic oligonucleotide
  Antisense strand to SEQ ID NO: 196026
auagaucaagccaguugcu

SEQ ID NO: 196028 - RNA, 19 nt, Artificial Sequence
  Description of Artificial Sequence: Synthetic oligonucleotide
  Sense strand starting at position 1337 of SEQ ID NO: 2526
gaucuaugucgugauauuc

SEQ ID NO: 196029 - RNA, 19 nt, Artificial Sequence
  Description of Artificial Sequence: Synthetic oligonucleotide
  Antisense strand to SEQ ID NO: 196028
gaauaucacgacauagauc

SEQ ID NO: 196030 - RNA, 19 nt, Artificial Sequence
  Description of Artificial Sequence: Synthetic oligonucleotide
  Sense strand starting at position 1494 of SEQ ID NO: 2526
cgcugucauccaguguuau

SEQ ID NO: 196031 - RNA, 19 nt, Artificial Sequence
  Description of Artificial Sequence: Synthetic oligonucleotide
  Antisense strand to SEQ ID NO: 196030
auaacacuggaugacagcg

SEQ ID NO: 196032 - RNA, 19 nt, Artificial Sequence
  Description of Artificial Sequence: Synthetic oligonucleotide
  Sense strand starting at position 1993 of SEQ ID NO: 2526
aaacgcucacuggguuaaa

SEQ ID NO: 196033 - RNA, 19 nt, Artificial Sequence
  Description of Artificial Sequence: Synthetic oligonucleotide
  Antisense strand to SEQ ID NO: 196032
uuuaacccagugagcguuu

SEQ ID NO: 196034 - RNA, 19 nt, Artificial Sequence
  Description of Artificial Sequence: Synthetic oligonucleotide
  Sense strand starting at position 2131 of SEQ ID NO: 2526
ggguuuaaaucacugucaa

SEQ ID NO: 196035 - RNA, 19 nt, Artificial Sequence
  Description of Artificial Sequence: Synthetic oligonucleotide
  Antisense strand to SEQ ID NO: 196034
uugacagugauuuaaaccc

SEQ ID NO: 196036 - RNA, 19 nt, Artificial Sequence
  Description of Artificial Sequence: Synthetic oligonucleotide
  Sense strand starting at position 2132 of SEQ ID NO: 2526
gguuuaaaucacugucaaa

SEQ ID NO: 196037 - RNA, 19 nt, Artificial Sequence
  Description of Artificial Sequence: Synthetic oligonucleotide
  Antisense strand to SEQ ID NO: 196036
uuugacagugauuuaaacc

SEQ ID NO: 196038 - RNA, 19 nt, Artificial Sequence
  Description of Artificial Sequence: Synthetic oligonucleotide
  Sense strand starting at position 2750 of SEQ ID NO: 2526
gccugcuugggcuagagau

SEQ ID NO: 196039 - RNA, 19 nt, Artificial Sequence
  Description of Artificial Sequence: Synthetic oligonucleotide
  Antisense strand to SEQ ID NO: 196038
aucucuagcccaagcaggc

SEQ ID NO: 196040 - RNA, 19 nt, Artificial Sequence
  Description of Artificial Sequence: Synthetic oligonucleotide
  Sense strand starting at position 2762 of SEQ ID NO: 2526
uagagauaccgcgacaaag

SEQ ID NO: 196041 - RNA, 19 nt, Artificial Sequence
  Description of Artificial Sequence: Synthetic oligonucleotide
  Antisense strand to SEQ ID NO: 196040
cuuugucgcgguaucucua

SEQ ID NO: 196042 - RNA, 19 nt, Artificial Sequence
  Description of Artificial Sequence: Synthetic oligonucleotide
  Sense strand starting at position 3010 of SEQ ID NO: 2526
cgccucguccgcucugaua

SEQ ID NO: 196043 - RNA, 19 nt, Artificial Sequence
  Description of Artificial Sequence: Synthetic oligonucleotide
  Antisense strand to SEQ ID NO: 196042
uaucagagcggacgaggcg

SEQ ID NO: 196044 - RNA, 19 nt, Artificial Sequence
  Description of Artificial Sequence: Synthetic oligonucleotide
  Sense strand starting at position 3019 of SEQ ID NO: 2526
cgcucugauaccgaggagu

SEQ ID NO: 196045 - RNA, 19 nt, Artificial Sequence
  Description of Artificial Sequence: Synthetic oligonucleotide
  Antisense strand to SEQ ID NO: 196044
acuccucgguaucagagcg

SEQ ID NO: 196046 - RNA, 19 nt, Artificial Sequence
  Description of Artificial Sequence: Synthetic oligonucleotide
  Sense strand starting at position 3170 of SEQ ID NO: 2526
ugcugucuuggugacuaga

SEQ ID NO: 196047 - RNA, 19 nt, Artificial Sequence
  Description of Artificial Sequence: Synthetic oligonucleotide
  Antisense strand to SEQ ID NO: 196046
ucuagucaccaagacagca

SEQ ID NO: 196048 - RNA, 19 nt, Artificial Sequence
  Description of Artificial Sequence: Synthetic oligonucleotide
  Sense strand starting at position 3172 of SEQ ID NO: 2526
cugucuuggugacuagaaa

SEQ ID NO: 196049 - RNA, 19 nt, Artificial Sequence
  Description of Artificial Sequence: Synthetic oligonucleotide
  Antisense strand to SEQ ID NO: 196048
uuucuagucaccaagacag

SEQ ID NO: 196050 - RNA, 19 nt, Artificial Sequence
  Description of Artificial Sequence: Synthetic oligonucleotide
  Sense strand starting at position 3247 of SEQ ID NO: 2526
cauuuaucacgaugcgcaa

SEQ ID NO: 196051 - RNA, 19 nt, Artificial Sequence
  Description of Artificial Sequence: Synthetic oligonucleotide
  Antisense strand to SEQ ID NO: 196050
uugcgcaucgugauaaaug

SEQ ID NO: 196052 - RNA, 19 nt, Artificial Sequence
  Description of Artificial Sequence: Synthetic oligonucleotide
  Sense strand starting at position 3347 of SEQ ID NO: 2526
uuguuuacugcgcuuugaa

SEQ ID NO: 196053 - RNA, 19 nt, Artificial Sequence
  Description of Artificial Sequence: Synthetic oligonucleotide
  Antisense strand to SEQ ID NO: 196052
uucaaagcgcaguaaacaa

SEQ ID NO: 196054 - RNA, 19 nt, Artificial Sequence
  Description of Artificial Sequence: Synthetic oligonucleotide
  Sense strand starting at position 3371 of SEQ ID NO: 2526
aaaugaggauuucgaacga

SEQ ID NO: 196055 - RNA, 19 nt, Artificial Sequence
  Description of Artificial Sequence: Synthetic oligonucleotide
  Antisense strand to SEQ ID NO: 196054
ucguucgaaauccucauuu

SEQ ID NO: 196056 - RNA, 19 nt, Artificial Sequence
  Description of Artificial Sequence: Synthetic oligonucleotide
  Sense strand starting at position 3393 of SEQ ID NO: 2526
auuugaugaucagacaagu

SEQ ID NO: 196057 - RNA, 19 nt, Artificial Sequence
  Description of Artificial Sequence: Synthetic oligonucleotide
  Antisense strand to SEQ ID NO: 196056
acuugucugaucaucaaau

SEQ ID NO: 196058 - RNA, 19 nt, Artificial Sequence
  Description of Artificial Sequence: Synthetic oligonucleotide
  Sense strand starting at position 3406 of SEQ ID NO: 2526
acaagugauuacuugucaa

SEQ ID NO: 196059 - RNA, 19 nt, Artificial Sequence
  Description of Artificial Sequence: Synthetic oligonucleotide
  Antisense strand to SEQ ID NO: 196058
uugacaaguaaucacuugu

SEQ ID NO: 196060 - RNA, 19 nt, Artificial Sequence
  Description of Artificial Sequence: Synthetic oligonucleotide
  Sense strand starting at position 3592 of SEQ ID NO: 2526
gagacuauugaagguaguu

SEQ ID NO: 196061 - RNA, 19 nt, Artificial Sequence
  Description of Artificial Sequence: Synthetic oligonucleotide
  Antisense strand to SEQ ID NO: 196060
aacuaccuucaauagucuc

SEQ ID NO: 196062 - RNA, 19 nt, Artificial Sequence
  Description of Artificial Sequence: Synthetic oligonucleotide
  Sense strand starting at position 3604 of SEQ ID NO: 2526
gguaguugcucugucauuu

SEQ ID NO: 196063 - RNA, 19 nt, Artificial Sequence
  Description of Artificial Sequence: Synthetic oligonucleotide
  Antisense strand to SEQ ID NO: 196062
aaaugacagagcaacuacc

SEQ ID NO: 196064 - RNA, 19 nt, Artificial Sequence
  Description of Artificial Sequence: Synthetic oligonucleotide
  Sense strand starting at position 3608 of SEQ ID NO: 2526
guugcucugucauuuacca

SEQ ID NO: 196065 - RNA, 19 nt, Artificial Sequence
  Description of Artificial Sequence: Synthetic oligonucleotide
  Antisense strand to SEQ ID NO: 196064
ugguaaaugacagagcaac

SEQ ID NO: 196066 - RNA, 19 nt, Artificial Sequence
  Description of Artificial Sequence: Synthetic oligonucleotide
  Sense strand starting at position 3773 of SEQ ID NO: 2526
cuguuaauguacucuacaa

SEQ ID NO: 196067 - RNA, 19 nt, Artificial Sequence
  Description of Artificial Sequence: Synthetic oligonucleotide
  Antisense strand to SEQ ID NO: 196066
uuguagaguacauuaacag

SEQ ID NO: 196068 - RNA, 19 nt, Artificial Sequence
  Description of Artificial Sequence: Synthetic oligonucleotide
  Sense strand starting at position 3775 of SEQ ID NO: 2526
guuaauguacucuacaaag

SEQ ID NO: 196069 - RNA, 19 nt, Artificial Sequence
  Description of Artificial Sequence: Synthetic oligonucleotide
  Antisense strand to SEQ ID NO: 196068
cuuuguagaguacauuaac

SEQ ID NO: 196070 - RNA, 19 nt, Artificial Sequence
  Description of Artificial Sequence: Synthetic oligonucleotide
  Sense strand starting at position 3816 of SEQ ID NO: 2526
uguauaauauggcuaauuc

SEQ ID NO: 196071 - RNA, 19 nt, Artificial Sequence
  Description of Artificial Sequence: Synthetic oligonucleotide
  Antisense strand to SEQ ID NO: 196070
gaauuagccauauuauaca

SEQ ID NO: 196072 - RNA, 19 nt, Artificial Sequence
  Description of Artificial Sequence: Synthetic oligonucleotide
  Sense strand starting at position 3926 of SEQ ID NO: 2526
cucuguauuucugucuauu

SEQ ID NO: 196073 - RNA, 19 nt, Artificial Sequence
  Description of Artificial Sequence: Synthetic oligonucleotide
  Antisense strand to SEQ ID NO: 196072
aauagacagaaauacagag

SEQ ID NO: 196074 - RNA, 19 nt, Artificial Sequence
  Description of Artificial Sequence: Synthetic oligonucleotide
  Sense strand starting at position 3976 of SEQ ID NO: 2526
acaacuuaucaggguuauu

SEQ ID NO: 196075 - RNA, 19 nt, Artificial Sequence
  Description of Artificial Sequence: Synthetic oligonucleotide
  Antisense strand to SEQ ID NO: 196074
aauaacccugauaaguugu

SEQ ID NO: 196076 - RNA, 19 nt, Artificial Sequence
  Description of Artificial Sequence: Synthetic oligonucleotide
  Sense strand starting at position 108 of SEQ ID NO: 2527
cuuggagcuguugaauaca

SEQ ID NO: 196077 - RNA, 19 nt, Artificial Sequence
  Description of Artificial Sequence: Synthetic oligonucleotide
  Antisense strand to SEQ ID NO: 196076
uguauucaacagcuccaag

SEQ ID NO: 196078 - RNA, 19 nt, Artificial Sequence
  Description of Artificial Sequence: Synthetic oligonucleotide
  Sense strand starting at position 116 of SEQ ID NO: 2527
uguugaauacaaugaguuc

SEQ ID NO: 196079 - RNA, 19 nt, Artificial Sequence
  Description of Artificial Sequence: Synthetic oligonucleotide
  Antisense strand to SEQ ID NO: 196078
gaacucauuguauucaaca

SEQ ID NO: 196080 - RNA, 19 nt, Artificial Sequence
  Description of Artificial Sequence: Synthetic oligonucleotide
  Sense strand starting at position 172 of SEQ ID NO: 2527
cgguucuuugcgcucuaaa

SEQ ID NO: 196081 - RNA, 19 nt, Artificial Sequence
  Description of Artificial Sequence: Synthetic oligonucleotide
  Antisense strand to SEQ ID NO: 196080
uuuagagcgcaaagaaccg

SEQ ID NO: 196082 - RNA, 19 nt, Artificial Sequence
  Description of Artificial Sequence: Synthetic oligonucleotide
  Sense strand starting at position 174 of SEQ ID NO: 2527
guucuuugcgcucuaaagu

SEQ ID NO: 196083 - RNA, 19 nt, Artificial Sequence
  Description of Artificial Sequence: Synthetic oligonucleotide
  Antisense strand to SEQ ID NO: 196082
acuuuagagcgcaaagaac

SEQ ID NO: 196084 - RNA, 19 nt, Artificial Sequence
  Description of Artificial Sequence: Synthetic oligonucleotide
  Sense strand starting at position 638 of SEQ ID NO: 2527
agcauuuguuucuaagaga

SEQ ID NO: 196085 - RNA, 19 nt, Artificial Sequence
  Description of Artificial Sequence: Synthetic oligonucleotide
  Antisense strand to SEQ ID NO: 196084
ucucuuagaaacaaaugcu

SEQ ID NO: 196086 - RNA, 19 nt, Artificial Sequence
  Description of Artificial Sequence: Synthetic oligonucleotide
  Sense strand starting at position 649 of SEQ ID NO: 2527
cuaagagagccuuauuguc

SEQ ID NO: 196087 - RNA, 19 nt, Artificial Sequence
  Description of Artificial Sequence: Synthetic oligonucleotide
  Antisense strand to SEQ ID NO: 196086
gacaauaaggcucucuuag

SEQ ID NO: 196088 - RNA, 19 nt, Artificial Sequence
  Description of Artificial Sequence: Synthetic oligonucleotide
  Sense strand starting at position 651 of SEQ ID NO: 2527
aagagagccuuauugucaa

SEQ ID NO: 196089 - RNA, 19 nt, Artificial Sequence
  Description of Artificial Sequence: Synthetic oligonucleotide
  Antisense strand to SEQ ID NO: 196088
uugacaauaaggcucucuu

SEQ ID NO: 196090 - RNA, 19 nt, Artificial Sequence
  Description of Artificial Sequence: Synthetic oligonucleotide
  Sense strand starting at position 740 of SEQ ID NO: 2527
guaugauagggugagcaaa

SEQ ID NO: 196091 - RNA, 19 nt, Artificial Sequence
  Description of Artificial Sequence: Synthetic oligonucleotide
  Antisense strand to SEQ ID NO: 196090
uuugcucacccuaucauac

SEQ ID NO: 196092 - RNA, 19 nt, Artificial Sequence
  Description of Artificial Sequence: Synthetic oligonucleotide
  Sense strand starting at position 884 of SEQ ID NO: 2527
gaagaugguggauguuaaa

SEQ ID NO: 196093 - RNA, 19 nt, Artificial Sequence
  Description of Artificial Sequence: Synthetic oligonucleotide
  Antisense strand to SEQ ID NO: 196092
uuuaacauccaccaucuuc

SEQ ID NO: 196094 - RNA, 19 nt, Artificial Sequence
  Description of Artificial Sequence: Synthetic oligonucleotide
  Sense strand starting at position 933 of SEQ ID NO: 2527
aucucagagugacuuaaua

SEQ ID NO: 196095 - RNA, 19 nt, Artificial Sequence
  Description of Artificial Sequence: Synthetic oligonucleotide
  Antisense strand to SEQ ID NO: 196094
uauuaagucacucugagau

SEQ ID NO: 196096 - RNA, 19 nt, Artificial Sequence
  Description of Artificial Sequence: Synthetic oligonucleotide
  Sense strand starting at position 1009 of SEQ ID NO: 2527
acuuaaacuuaggaugaaa

SEQ ID NO: 196097 - RNA, 19 nt, Artificial Sequence
  Description of Artificial Sequence: Synthetic oligonucleotide
  Antisense strand to SEQ ID NO: 196096
uuucauccuaaguuuaagu

SEQ ID NO: 196098 - RNA, 19 nt, Artificial Sequence
  Description of Artificial Sequence: Synthetic oligonucleotide
  Sense strand starting at position 1114 of SEQ ID NO: 2527
aucuaaguguccuuccuaa

SEQ ID NO: 196099 - RNA, 19 nt, Artificial Sequence
  Description of Artificial Sequence: Synthetic oligonucleotide
  Antisense strand to SEQ ID NO: 196098
uuaggaaggacacuuagau

SEQ ID NO: 196100 - RNA, 19 nt, Artificial Sequence
  Description of Artificial Sequence: Synthetic oligonucleotide
  Sense strand starting at position 2029 of SEQ ID NO: 2527
gugaaaugauuacaucaau

SEQ ID NO: 196101 - RNA, 19 nt, Artificial Sequence
  Description of Artificial Sequence: Synthetic oligonucleotide
  Antisense strand to SEQ ID NO: 196100
auugauguaaucauuucac

SEQ ID NO: 196102 - RNA, 19 nt, Artificial Sequence
  Description of Artificial Sequence: Synthetic oligonucleotide
  Sense strand starting at position 2133 of SEQ ID NO: 2527
uaucgcagucaccauguua

SEQ ID NO: 196103 - RNA, 19 nt, Artificial Sequence
  Description of Artificial Sequence: Synthetic oligonucleotide
  Antisense strand to SEQ ID NO: 196102
uaacauggugacugcgaua

SEQ ID NO: 196104 - RNA, 19 nt, Artificial Sequence
  Description of Artificial Sequence: Synthetic oligonucleotide
  Sense strand starting at position 2339 of SEQ ID NO: 2527
ugaaauguuuaggugacua

SEQ ID NO: 196105 - RNA, 19 nt, Artificial Sequence
  Description of Artificial Sequence: Synthetic oligonucleotide
  Antisense strand to SEQ ID NO: 196104
uagucaccuaaacauuuca

SEQ ID NO: 196106 - RNA, 19 nt, Artificial Sequence
  Description of Artificial Sequence: Synthetic oligonucleotide
  Sense strand starting at position 2343 of SEQ ID NO: 2527
auguuuaggugacuaccaa

SEQ ID NO: 196107 - RNA, 19 nt, Artificial Sequence
  Description of Artificial Sequence: Synthetic oligonucleotide
  Antisense strand to SEQ ID NO: 196106
uugguagucaccuaaacau

SEQ ID NO: 196108 - RNA, 19 nt, Artificial Sequence
  Description of Artificial Sequence: Synthetic oligonucleotide
  Sense strand starting at position 2373 of SEQ ID NO: 2527
agauaaggucugcaacauc

SEQ ID NO: 196109 - RNA, 19 nt, Artificial Sequence
  Description of Artificial Sequence: Synthetic oligonucleotide
  Antisense strand to SEQ ID NO: 196108
gauguugcagaccuuaucu

SEQ ID NO: 196110 - RNA, 19 nt, Artificial Sequence
  Description of Artificial Sequence: Synthetic oligonucleotide
  Sense strand starting at position 2416 of SEQ ID NO: 2527
aggaauugagccugaacuc

SEQ ID NO: 196111 - RNA, 19 nt, Artificial Sequence
  Description of Artificial Sequence: Synthetic oligonucleotide
  Antisense strand to SEQ ID NO: 196110
gaguucaggcucaauuccu

SEQ ID NO: 196112 - RNA, 19 nt, Artificial Sequence
  Description of Artificial Sequence: Synthetic oligonucleotide
  Sense strand starting at position 2427 of SEQ ID NO: 2527
cugaacucguauucuaaac

SEQ ID NO: 196113 - RNA, 19 nt, Artificial Sequence
  Description of Artificial Sequence: Synthetic oligonucleotide
  Antisense strand to SEQ ID NO: 196112
guuuagaauacgaguucag

SEQ ID NO: 196114 - RNA, 19 nt, Artificial Sequence
  Description of Artificial Sequence: Synthetic oligonucleotide
  Sense strand starting at position 2438 of SEQ ID NO: 2527
uucuaaacggauugugaua

SEQ ID NO: 196115 - RNA, 19 nt, Artificial Sequence
  Description of Artificial Sequence: Synthetic oligonucleotide
  Antisense strand to SEQ ID NO: 196114
uaucacaauccguuuagaa

SEQ ID NO: 196116 - RNA, 19 nt, Artificial Sequence
  Description of Artificial Sequence: Synthetic oligonucleotide
  Sense strand starting at position 2921 of SEQ ID NO: 2527
cccaauugccuagaagguu

SEQ ID NO: 196117 - RNA, 19 nt, Artificial Sequence
  Description of Artificial Sequence: Synthetic oligonucleotide
  Antisense strand to SEQ ID NO: 196116
aaccuucuaggcaauuggg

SEQ ID NO: 196118 - RNA, 19 nt, Artificial Sequence
  Description of Artificial Sequence: Synthetic oligonucleotide
  Sense strand starting at position 3058 of SEQ ID NO: 2527
guuuacuugugagaauuug

SEQ ID NO: 196119 - RNA, 19 nt, Artificial Sequence
  Description of Artificial Sequence: Synthetic oligonucleotide
  Antisense strand to SEQ ID NO: 196118
caaauucucacaaguaaac

SEQ ID NO: 196120 - RNA, 19 nt, Artificial Sequence
  Description of Artificial Sequence: Synthetic oligonucleotide
  Sense strand starting at position 3082 of SEQ ID NO: 2527
cucuauuuguuggccucaa

SEQ ID NO: 196121 - RNA, 19 nt, Artificial Sequence
  Description of Artificial Sequence: Synthetic oligonucleotide
  Antisense strand to SEQ ID NO: 196120
uugaggccaacaaauagag

SEQ ID NO: 196122 - RNA, 19 nt, Artificial Sequence
  Description of Artificial Sequence: Synthetic oligonucleotide
  Sense strand starting at position 3083 of SEQ ID NO: 2527
ucuauuuguuggccucaau

SEQ ID NO: 196123 - RNA, 19 nt, Artificial Sequence
  Description of Artificial Sequence: Synthetic oligonucleotide
  Antisense strand to SEQ ID NO: 196122
auugaggccaacaaauaga

SEQ ID NO: 196124 - RNA, 19 nt, Artificial Sequence
  Description of Artificial Sequence: Synthetic oligonucleotide
  Sense strand starting at position 3094 of SEQ ID NO: 2527
gccucaauaccuuggcaua

SEQ ID NO: 196125 - RNA, 19 nt, Artificial Sequence
  Description of Artificial Sequence: Synthetic oligonucleotide
  Antisense strand to SEQ ID NO: 196124
uaugccaagguauugaggc

SEQ ID NO: 196126 - RNA, 19 nt, Artificial Sequence
  Description of Artificial Sequence: Synthetic oligonucleotide
  Sense strand starting at position 3105 of SEQ ID NO: 2527
uuggcauauuucucugcau

SEQ ID NO: 196127 - RNA, 19 nt, Artificial Sequence
  Description of Artificial Sequence: Synthetic oligonucleotide
  Antisense strand to SEQ ID NO: 196126
augcagagaaauaugccaa

SEQ ID NO: 196128 - RNA, 19 nt, Artificial Sequence
  Description of Artificial Sequence: Synthetic oligonucleotide
  Sense strand starting at position 3106 of SEQ ID NO: 2527
uggcauauuucucugcauc

SEQ ID NO: 196129 - RNA, 19 nt, Artificial Sequence
  Description of Artificial Sequence: Synthetic oligonucleotide
  Antisense strand to SEQ ID NO: 196128
gaugcagagaaauaugcca

SEQ ID NO: 196130 - RNA, 19 nt, Artificial Sequence
  Description of Artificial Sequence: Synthetic oligonucleotide
  Sense strand starting at position 3107 of SEQ ID NO: 2527
ggcauauuucucugcaucu

SEQ ID NO: 196131 - RNA, 19 nt, Artificial Sequence
  Description of Artificial Sequence: Synthetic oligonucleotide
  Antisense strand to SEQ ID NO: 196130
agaugcagagaaauaugcc

SEQ ID NO: 196132 - RNA, 19 nt, Artificial Sequence
  Description of Artificial Sequence: Synthetic oligonucleotide
  Sense strand starting at position 3108 of SEQ ID NO: 2527
gcauauuucucugcaucug

SEQ ID NO: 196133 - RNA, 19 nt, Artificial Sequence
  Description of Artificial Sequence: Synthetic oligonucleotide
  Antisense strand to SEQ ID NO: 196132
cagaugcagagaaauaugc

SEQ ID NO: 196134 - RNA, 19 nt, Artificial Sequence
  Description of Artificial Sequence: Synthetic oligonucleotide
  Sense strand starting at position 3211 of SEQ ID NO: 2527
uugguuagaauaugguuaa

SEQ ID NO: 196135 - RNA, 19 nt, Artificial Sequence
  Description of Artificial Sequence: Synthetic oligonucleotide
  Antisense strand to SEQ ID NO: 196134
uuaaccauauucuaaccaa

SEQ ID NO: 196136 - RNA, 19 nt, Artificial Sequence
  Description of Artificial Sequence: Synthetic oligonucleotide
  Sense strand starting at position 3214 of SEQ ID NO: 2527
guuagaauaugguuaaauc

SEQ ID NO: 196137 - RNA, 19 nt, Artificial Sequence
  Description of Artificial Sequence: Synthetic oligonucleotide
  Antisense strand to SEQ ID NO: 196136
gauuuaaccauauucuaac

SEQ ID NO: 196138 - RNA, 19 nt, Artificial Sequence
  Description of Artificial Sequence: Synthetic oligonucleotide
  Sense strand starting at position 3277 of SEQ ID NO: 2527
uuauguagugaaggucuua

SEQ ID NO: 196139 - RNA, 19 nt, Artificial Sequence
  Description of Artificial Sequence: Synthetic oligonucleotide
  Antisense strand to SEQ ID NO: 196138
uaagaccuucacuacauaa

SEQ ID NO: 196140 - RNA, 19 nt, Artificial Sequence
  Description of Artificial Sequence: Synthetic oligonucleotide
  Sense strand starting at position 3289 of SEQ ID NO: 2527
ggucuuaguuuauugcaga

SEQ ID NO: 196141 - RNA, 19 nt, Artificial Sequence
  Description of Artificial Sequence: Synthetic oligonucleotide
  Antisense strand to SEQ ID NO: 196140
ucugcaauaaacuaagacc

SEQ ID NO: 196142 - RNA, 19 nt, Artificial Sequence
  Description of Artificial Sequence: Synthetic oligonucleotide
  Sense strand starting at position 3294 of SEQ ID NO: 2527
uaguuuauugcagagaccu

SEQ ID NO: 196143 - RNA, 19 nt, Artificial Sequence
  Description of Artificial Sequence: Synthetic oligonucleotide
  Antisense strand to SEQ ID NO: 196142
aggucucugcaauaaacua

SEQ ID NO: 196144 - RNA, 19 nt, Artificial Sequence
  Description of Artificial Sequence: Synthetic oligonucleotide
  Sense strand starting at position 3306 of SEQ ID NO: 2527
gagaccucguaacuuaacu

SEQ ID NO: 196145 - RNA, 19 nt, Artificial Sequence
  Description of Artificial Sequence: Synthetic oligonucleotide
  Antisense strand to SEQ ID NO: 196144
aguuaaguuacgaggucuc

SEQ ID NO: 196146 - RNA, 19 nt, Artificial Sequence
  Description of Artificial Sequence: Synthetic oligonucleotide
  Sense strand starting at position 3465 of SEQ ID NO: 2527
caagacacucucgguuauu

SEQ ID NO: 196147 - RNA, 19 nt, Artificial Sequence
  Description of Artificial Sequence: Synthetic oligonucleotide
  Antisense strand to SEQ ID NO: 196146
aauaaccgagagugucuug

SEQ ID NO: 196148 - RNA, 19 nt, Artificial Sequence
  Description of Artificial Sequence: Synthetic oligonucleotide
  Sense strand starting at position 3479 of SEQ ID NO: 2527
uuauucugcucucucagua

SEQ ID NO: 196149 - RNA, 19 nt, Artificial Sequence
  Description of Artificial Sequence: Synthetic oligonucleotide
  Antisense strand to SEQ ID NO: 196148
uacugagagagcagaauaa

SEQ ID NO: 196150 - RNA, 19 nt, Artificial Sequence
  Description of Artificial Sequence: Synthetic oligonucleotide
  Sense strand starting at position 3483 of SEQ ID NO: 2527
ucugcucucucaguacaga

SEQ ID NO: 196151 - RNA, 19 nt, Artificial Sequence
  Description of Artificial Sequence: Synthetic oligonucleotide
  Antisense strand to SEQ ID NO: 196150
ucuguacugagagagcaga

SEQ ID NO: 196152 - RNA, 19 nt, Artificial Sequence
  Description of Artificial Sequence: Synthetic oligonucleotide
  Sense strand starting at position 3530 of SEQ ID NO: 2527
ggucuacucuaucuggaau

SEQ ID NO: 196153 - RNA, 19 nt, Artificial Sequence
  Description of Artificial Sequence: Synthetic oligonucleotide
  Antisense strand to SEQ ID NO: 196152
auuccagauagaguagacc

SEQ ID NO: 196154 - RNA, 19 nt, Artificial Sequence
  Description of Artificial Sequence: Synthetic oligonucleotide
  Sense strand starting at position 3581 of SEQ ID NO: 2527
cgcucagucaucucugcga

SEQ ID NO: 196155 - RNA, 19 nt, Artificial Sequence
  Description of Artificial Sequence: Synthetic oligonucleotide
  Antisense strand to SEQ ID NO: 196154
ucgcagagaugacugagcg

SEQ ID NO: 196156 - RNA, 19 nt, Artificial Sequence
  Description of Artificial Sequence: Synthetic oligonucleotide
  Sense strand starting at position 353 of SEQ ID NO: 2528
acuguaugcuuccuuggga

SEQ ID NO: 196157 - RNA, 19 nt, Artificial Sequence
  Description of Artificial Sequence: Synthetic oligonucleotide
  Antisense strand to SEQ ID NO: 196156
ucccaaggaagcauacagu

SEQ ID NO: 196158 - RNA, 19 nt, Artificial Sequence
  Description of Artificial Sequence: Synthetic oligonucleotide
  Sense strand starting at position 642 of SEQ ID NO: 2528
cggaaagaaucauaagaca

SEQ ID NO: 196159 - RNA, 19 nt, Artificial Sequence
  Description of Artificial Sequence: Synthetic oligonucleotide
  Antisense strand to SEQ ID NO: 196158
ugucuuaugauucuuuccg

SEQ ID NO: 196160 - RNA, 19 nt, Artificial Sequence
  Description of Artificial Sequence: Synthetic oligonucleotide
  Sense strand starting at position 764 of SEQ ID NO: 2528
uggugaaauuugggaacca

SEQ ID NO: 196161 - RNA, 19 nt, Artificial Sequence
  Description of Artificial Sequence: Synthetic oligonucleotide
  Antisense strand to SEQ ID NO: 196160
ugguucccaaauuucacca

SEQ ID NO: 196162 - RNA, 19 nt, Artificial Sequence
  Description of Artificial Sequence: Synthetic oligonucleotide
  Sense strand starting at position 765 of SEQ ID NO: 2528
ggugaaauuugggaaccag

SEQ ID NO: 196163 - RNA, 19 nt, Artificial Sequence
  Description of Artificial Sequence: Synthetic oligonucleotide
  Antisense strand to SEQ ID NO: 196162
cugguucccaaauuucacc

SEQ ID NO: 196164 - RNA, 19 nt, Artificial Sequence
  Description of Artificial Sequence: Synthetic oligonucleotide
  Sense strand starting at position 1031 of SEQ ID NO: 2528
cucgucacucuugauaauu

SEQ ID NO: 196165 - RNA, 19 nt, Artificial Sequence
  Description of Artificial Sequence: Synthetic oligonucleotide
  Antisense strand to SEQ ID NO: 196164
aauuaucaagagugacgag

SEQ ID NO: 196166 - RNA, 19 nt, Artificial Sequence
  Description of Artificial Sequence: Synthetic oligonucleotide
  Sense strand starting at position 1165 of SEQ ID NO: 2528
ccaagaacgugcuuaggau

SEQ ID NO: 196167 - RNA, 19 nt, Artificial Sequence
  Description of Artificial Sequence: Synthetic oligonucleotide
  Antisense strand to SEQ ID NO: 196166
auccuaagcacguucuugg

SEQ ID NO: 196168 - RNA, 19 nt, Artificial Sequence
  Description of Artificial Sequence: Synthetic oligonucleotide
  Sense strand starting at position 1174 of SEQ ID NO: 2528
ugcuuaggauguucgcaaa

SEQ ID NO: 196169 - RNA, 19 nt, Artificial Sequence
  Description of Artificial Sequence: Synthetic oligonucleotide
  Antisense strand to SEQ ID NO: 196168
uuugcgaacauccuaagca

SEQ ID NO: 196170 - RNA, 19 nt, Artificial Sequence
  Description of Artificial Sequence: Synthetic oligonucleotide
  Sense strand starting at position 1234 of SEQ ID NO: 2528
acgagauuacugcauaagu

SEQ ID NO: 196171 - RNA, 19 nt, Artificial Sequence
  Description of Artificial Sequence: Synthetic oligonucleotide
  Antisense strand to SEQ ID NO: 196170
acuuaugcaguaaucucgu

SEQ ID NO: 196172 - RNA, 19 nt, Artificial Sequence
  Description of Artificial Sequence: Synthetic oligonucleotide
  Sense strand starting at position 1236 of SEQ ID NO: 2528
gagauuacugcauaaguac

SEQ ID NO: 196173 - RNA, 19 nt, Artificial Sequence
  Description of Artificial Sequence: Synthetic oligonucleotide
  Antisense strand to SEQ ID NO: 196172
guacuuaugcaguaaucuc

SEQ ID NO: 196174 - RNA, 19 nt, Artificial Sequence
  Description of Artificial Sequence: Synthetic oligonucleotide
  Sense strand starting at position 1803 of SEQ ID NO: 2528
gagagacugccucauguuc

SEQ ID NO: 196175 - RNA, 19 nt, Artificial Sequence
  Description of Artificial Sequence: Synthetic oligonucleotide
  Antisense strand to SEQ ID NO: 196174
gaacaugaggcagucucuc

SEQ ID NO: 196176 - RNA, 19 nt, Artificial Sequence
  Description of Artificial Sequence: Synthetic oligonucleotide
  Sense strand starting at position 2674 of SEQ ID NO: 2528
uccgucugucgucacgaaa

SEQ ID NO: 196177 - RNA, 19 nt, Artificial Sequence
  Description of Artificial Sequence: Synthetic oligonucleotide
  Antisense strand to SEQ ID NO: 196176
uuucgugacgacagacgga

SEQ ID NO: 196178 - RNA, 19 nt, Artificial Sequence
  Description of Artificial Sequence: Synthetic oligonucleotide
  Sense strand starting at position 2783 of SEQ ID NO: 2528
auagaauccuaggaccuua

SEQ ID NO: 196179 - RNA, 19 nt, Artificial Sequence
  Description of Artificial Sequence: Synthetic oligonucleotide
  Antisense strand to SEQ ID NO: 196178
uaagguccuaggauucuau

SEQ ID NO: 196180 - RNA, 19 nt, Artificial Sequence
  Description of Artificial Sequence: Synthetic oligonucleotide
  Sense strand starting at position 2794 of SEQ ID NO: 2528
ggaccuuaccugugaguac

SEQ ID NO: 196181 - RNA, 19 nt, Artificial Sequence
  Description of Artificial Sequence: Synthetic oligonucleotide
  Antisense strand to SEQ ID NO: 196180
guacucacagguaaggucc

SEQ ID NO: 196182 - RNA, 19 nt, Artificial Sequence
  Description of Artificial Sequence: Synthetic oligonucleotide
  Sense strand starting at position 2798 of SEQ ID NO: 2528
cuuaccugugaguacaaga

SEQ ID NO: 196183 - RNA, 19 nt, Artificial Sequence
  Description of Artificial Sequence: Synthetic oligonucleotide
  Antisense strand to SEQ ID NO: 196182
ucuuguacucacagguaag

SEQ ID NO: 196184 - RNA, 19 nt, Artificial Sequence
  Description of Artificial Sequence: Synthetic oligonucleotide
  Sense strand starting at position 2809 of SEQ ID NO: 2528
guacaagagcuggaaucuu

SEQ ID NO: 196185 - RNA, 19 nt, Artificial Sequence
  Description of Artificial Sequence: Synthetic oligonucleotide
  Antisense strand to SEQ ID NO: 196184
aagauuccagcucuuguac

SEQ ID NO: 196186 - RNA, 19 nt, Artificial Sequence
  Description of Artificial Sequence: Synthetic oligonucleotide
  Sense strand starting at position 2817 of SEQ ID NO: 2528
gcuggaaucuucccaccaa

SEQ ID NO: 196187 - RNA, 19 nt, Artificial Sequence
  Description of Artificial Sequence: Synthetic oligonucleotide
  Antisense strand to SEQ ID NO: 196186
uuggugggaagauuccagc

SEQ ID NO: 196188 - RNA, 19 nt, Artificial Sequence
  Description of Artificial Sequence: Synthetic oligonucleotide
  Sense strand starting at position 2850 of SEQ ID NO: 2528
auccuauacuugguccauu

SEQ ID NO: 196189 - RNA, 19 nt, Artificial Sequence
  Description of Artificial Sequence: Synthetic oligonucleotide
  Antisense strand to SEQ ID NO: 196188
aauggaccaaguauaggau

SEQ ID NO: 196190 - RNA, 19 nt, Artificial Sequence
  Description of Artificial Sequence: Synthetic oligonucleotide
  Sense strand starting at position 2864 of SEQ ID NO: 2528
ccauuuagcuuagacugga

SEQ ID NO: 196191 - RNA, 19 nt, Artificial Sequence
  Description of Artificial Sequence: Synthetic oligonucleotide
  Antisense strand to SEQ ID NO: 196190
uccagucuaagcuaaaugg

SEQ ID NO: 196192 - RNA, 19 nt, Artificial Sequence
  Description of Artificial Sequence: Synthetic oligonucleotide
  Sense strand starting at position 2867 of SEQ ID NO: 2528
uuuagcuuagacuggaaau

SEQ ID NO: 196193 - RNA, 19 nt, Artificial Sequence
  Description of Artificial Sequence: Synthetic oligonucleotide
  Antisense strand to SEQ ID NO: 196192
auuuccagucuaagcuaaa

SEQ ID NO: 196194 - RNA, 19 nt, Artificial Sequence
  Description of Artificial Sequence: Synthetic oligonucleotide
  Sense strand starting at position 2878 of SEQ ID NO: 2528
cuggaaauuucccaaggca

SEQ ID NO: 196195 - RNA, 19 nt, Artificial Sequence
  Description of Artificial Sequence: Synthetic oligonucleotide
  Antisense strand to SEQ ID NO: 196194
ugccuugggaaauuuccag

SEQ ID NO: 196196 - RNA, 19 nt, Artificial Sequence
  Description of Artificial Sequence: Synthetic oligonucleotide
  Sense strand starting at position 2923 of SEQ ID NO: 2528
uuuagcucuguauaguuua

SEQ ID NO: 196197 - RNA, 19 nt, Artificial Sequence
  Description of Artificial Sequence: Synthetic oligonucleotide
  Antisense strand to SEQ ID NO: 196196
uaaacuauacagagcuaaa

SEQ ID NO: 196198 - RNA, 19 nt, Artificial Sequence
  Description of Artificial Sequence: Synthetic oligonucleotide
  Sense strand starting at position 2928 of SEQ ID NO: 2528
cucuguauaguuuagugaa

SEQ ID NO: 196199 - RNA, 19 nt, Artificial Sequence
  Description of Artificial Sequence: Synthetic oligonucleotide
  Antisense strand to SEQ ID NO: 196198
uucacuaaacuauacagag

SEQ ID NO: 196200 - RNA, 19 nt, Artificial Sequence
  Description of Artificial Sequence: Synthetic oligonucleotide
  Sense strand starting at position 2930 of SEQ ID NO: 2528
cuguauaguuuagugaaug

SEQ ID NO: 196201 - RNA, 19 nt, Artificial Sequence
  Description of Artificial Sequence: Synthetic oligonucleotide
  Antisense strand to SEQ ID NO: 196200
cauucacuaaacuauacag

SEQ ID NO: 196202 - RNA, 19 nt, Artificial Sequence
  Description of Artificial Sequence: Synthetic oligonucleotide
  Sense strand starting at position 3046 of SEQ ID NO: 2528
uccacuuaagagugagaca

SEQ ID NO: 196203 - RNA, 19 nt, Artificial Sequence
  Description of Artificial Sequence: Synthetic oligonucleotide
  Antisense strand to SEQ ID NO: 196202
ugucucacucuuaagugga

SEQ ID NO: 196204 - RNA, 19 nt, Artificial Sequence
  Description of Artificial Sequence: Synthetic oligonucleotide
  Sense strand starting at position 3058 of SEQ ID NO: 2528
ugagacagccuuuauuaug

SEQ ID NO: 196205 - RNA, 19 nt, Artificial Sequence
  Description of Artificial Sequence: Synthetic oligonucleotide
  Antisense strand to SEQ ID NO: 196204
cauaauaaaggcugucuca

SEQ ID NO: 196206 - RNA, 19 nt, Artificial Sequence
  Description of Artificial Sequence: Synthetic oligonucleotide
  Sense strand starting at position 3078 of SEQ ID NO: 2528
aacgguaaauuguuaggaa

SEQ ID NO: 196207 - RNA, 19 nt, Artificial Sequence
  Description of Artificial Sequence: Synthetic oligonucleotide
  Antisense strand to SEQ ID NO: 196206
uuccuaacaauuuaccguu

SEQ ID NO: 196208 - RNA, 19 nt, Artificial Sequence
  Description of Artificial Sequence: Synthetic oligonucleotide
  Sense strand starting at position 3082 of SEQ ID NO: 2528
guaaauuguuaggaauacu

SEQ ID NO: 196209 - RNA, 19 nt, Artificial Sequence
  Description of Artificial Sequence: Synthetic oligonucleotide
  Antisense strand to SEQ ID NO: 196208
aguauuccuaacaauuuac

SEQ ID NO: 196210 - RNA, 19 nt, Artificial Sequence
  Description of Artificial Sequence: Synthetic oligonucleotide
  Sense strand starting at position 3137 of SEQ ID NO: 2528
auacucaaacugugguuaa

SEQ ID NO: 196211 - RNA, 19 nt, Artificial Sequence
  Description of Artificial Sequence: Synthetic oligonucleotide
  Antisense strand to SEQ ID NO: 196210
uuaaccacaguuugaguau

SEQ ID NO: 196212 - RNA, 19 nt, Artificial Sequence
  Description of Artificial Sequence: Synthetic oligonucleotide
  Sense strand starting at position 3169 of SEQ ID NO: 2528
ggugguuugccgcaguaaa

SEQ ID NO: 196213 - RNA, 19 nt, Artificial Sequence
  Description of Artificial Sequence: Synthetic oligonucleotide
  Antisense strand to SEQ ID NO: 196212
uuuacugcggcaaaccacc

SEQ ID NO: 196214 - RNA, 19 nt, Artificial Sequence
  Description of Artificial Sequence: Synthetic oligonucleotide
  Sense strand starting at position 3359 of SEQ ID NO: 2528
auaagaaugugacaguuga

SEQ ID NO: 196215 - RNA, 19 nt, Artificial Sequence
  Description of Artificial Sequence: Synthetic oligonucleotide
  Antisense strand to SEQ ID NO: 196214
ucaacugucacauucuuau

SEQ ID NO: 196216 - RNA, 19 nt, Artificial Sequence
  Description of Artificial Sequence: Synthetic oligonucleotide
  Sense strand starting at position 3363 of SEQ ID NO: 2528
gaaugugacaguugaguac

SEQ ID NO: 196217 - RNA, 19 nt, Artificial Sequence
  Description of Artificial Sequence: Synthetic oligonucleotide
  Antisense strand to SEQ ID NO: 196216
guacucaacugucacauuc

SEQ ID NO: 196218 - RNA, 19 nt, Artificial Sequence
  Description of Artificial Sequence: Synthetic oligonucleotide
  Sense strand starting at position 3399 of SEQ ID NO: 2528
uuugguguaccauaauaau

SEQ ID NO: 196219 - RNA, 19 nt, Artificial Sequence
  Description of Artificial Sequence: Synthetic oligonucleotide
  Antisense strand to SEQ ID NO: 196218
auuauuaugguacaccaaa

SEQ ID NO: 196220 - RNA, 19 nt, Artificial Sequence
  Description of Artificial Sequence: Synthetic oligonucleotide
  Sense strand starting at position 3410 of SEQ ID NO: 2528
auaauaaugucaucugguu

SEQ ID NO: 196221 - RNA, 19 nt, Artificial Sequence
  Description of Artificial Sequence: Synthetic oligonucleotide
  Antisense strand to SEQ ID NO: 196220
aaccagaugacauuauuau

SEQ ID NO: 196222 - RNA, 19 nt, Artificial Sequence
  Description of Artificial Sequence: Synthetic oligonucleotide
  Sense strand starting at position 3453 of SEQ ID NO: 2528
uaauguccggcuuguaacu

SEQ ID NO: 196223 - RNA, 19 nt, Artificial Sequence
  Description of Artificial Sequence: Synthetic oligonucleotide
  Antisense strand to SEQ ID NO: 196222
aguuacaagccggacauua

SEQ ID NO: 196224 - RNA, 19 nt, Artificial Sequence
  Description of Artificial Sequence: Synthetic oligonucleotide
  Sense strand starting at position 3463 of SEQ ID NO: 2528
cuuguaacuuuaguagauc

SEQ ID NO: 196225 - RNA, 19 nt, Artificial Sequence
  Description of Artificial Sequence: Synthetic oligonucleotide
  Antisense strand to SEQ ID NO: 196224
gaucuacuaaaguuacaag

SEQ ID NO: 196226 - RNA, 19 nt, Artificial Sequence
  Description of Artificial Sequence: Synthetic oligonucleotide
  Sense strand starting at position 3466 of SEQ ID NO: 2528
guaacuuuaguagaucgua

SEQ ID NO: 196227 - RNA, 19 nt, Artificial Sequence
  Description of Artificial Sequence: Synthetic oligonucleotide
  Antisense strand to SEQ ID NO: 196226
uacgaucuacuaaaguuac

SEQ ID NO: 196228 - RNA, 19 nt, Artificial Sequence
  Description of Artificial Sequence: Synthetic oligonucleotide
  Sense strand starting at position 3469 of SEQ ID NO: 2528
acuuuaguagaucguagau

SEQ ID NO: 196229 - RNA, 19 nt, Artificial Sequence
  Description of Artificial Sequence: Synthetic oligonucleotide
  Antisense strand to SEQ ID NO: 196228
aucuacgaucuacuaaagu

SEQ ID NO: 196230 - RNA, 19 nt, Artificial Sequence
  Description of Artificial Sequence: Synthetic oligonucleotide
  Sense strand starting at position 3476 of SEQ ID NO: 2528
uagaucguagauuguauua

SEQ ID NO: 196231 - RNA, 19 nt, Artificial Sequence
  Description of Artificial Sequence: Synthetic oligonucleotide
  Antisense strand to SEQ ID NO: 196230
uaauacaaucuacgaucua

SEQ ID NO: 196232 - RNA, 19 nt, Artificial Sequence
  Description of Artificial Sequence: Synthetic oligonucleotide
  Sense strand starting at position 3537 of SEQ ID NO: 2528
gaagguacuuagcuguuua

SEQ ID NO: 196233 - RNA, 19 nt, Artificial Sequence
  Description of Artificial Sequence: Synthetic oligonucleotide
  Antisense strand to SEQ ID NO: 196232
uaaacagcuaaguaccuuc

SEQ ID NO: 196234 - RNA, 19 nt, Artificial Sequence
  Description of Artificial Sequence: Synthetic oligonucleotide
  Sense strand starting at position 3541 of SEQ ID NO: 2528
guacuuagcuguuuaguaa

SEQ ID NO: 196235 - RNA, 19 nt, Artificial Sequence
  Description of Artificial Sequence: Synthetic oligonucleotide
  Antisense strand to SEQ ID NO: 196234
uuacuaaacagcuaaguac

SEQ ID NO: 196236 - RNA, 19 nt, Artificial Sequence
  Description of Artificial Sequence: Synthetic oligonucleotide
  Sense strand starting at position 487 of SEQ ID NO: 2529
gcuagaguaaagcaaguua

SEQ ID NO: 196237 - RNA, 19 nt, Artificial Sequence
  Description of Artificial Sequence: Synthetic oligonucleotide
  Antisense strand to SEQ ID NO: 196236
uaacuugcuuuacucuagc

SEQ ID NO: 196238 - RNA, 19 nt, Artificial Sequence
  Description of Artificial Sequence: Synthetic oligonucleotide
  Sense strand starting at position 525 of SEQ ID NO: 2529
uggagaaguuaauaaauag

SEQ ID NO: 196239 - RNA, 19 nt, Artificial Sequence
  Description of Artificial Sequence: Synthetic oligonucleotide
  Antisense strand to SEQ ID NO: 196238
cuauuuauuaacuucucca

SEQ ID NO: 196240 - RNA, 19 nt, Artificial Sequence
  Description of Artificial Sequence: Synthetic oligonucleotide
  Sense strand starting at position 543 of SEQ ID NO: 2529
gccaauaaggcuuauacaa

SEQ ID NO: 196241 - RNA, 19 nt, Artificial Sequence
  Description of Artificial Sequence: Synthetic oligonucleotide
  Antisense strand to SEQ ID NO: 196240
uuguauaagccuuauuggc

SEQ ID NO: 196242 - RNA, 19 nt, Artificial Sequence
  Description of Artificial Sequence: Synthetic oligonucleotide
  Sense strand starting at position 649 of SEQ ID NO: 2529
gaaugaacuugagggaaga

SEQ ID NO: 196243 - RNA, 19 nt, Artificial Sequence
  Description of Artificial Sequence: Synthetic oligonucleotide
  Antisense strand to SEQ ID NO: 196242
ucuucccucaaguucauuc

SEQ ID NO: 196244 - RNA, 19 nt, Artificial Sequence
  Description of Artificial Sequence: Synthetic oligonucleotide
  Sense strand starting at position 784 of SEQ ID NO: 2529
cuccuaagauaacuugagu

SEQ ID NO: 196245 - RNA, 19 nt, Artificial Sequence
  Description of Artificial Sequence: Synthetic oligonucleotide
  Antisense strand to SEQ ID NO: 196244
acucaaguuaucuuaggag

SEQ ID NO: 196246 - RNA, 19 nt, Artificial Sequence
  Description of Artificial Sequence: Synthetic oligonucleotide
  Sense strand starting at position 808 of SEQ ID NO: 2529
auuuauggauaccgaauau

SEQ ID NO: 196247 - RNA, 19 nt, Artificial Sequence
  Description of Artificial Sequence: Synthetic oligonucleotide
  Antisense strand to SEQ ID NO: 196246
auauucgguauccauaaau

SEQ ID NO: 196248 - RNA, 19 nt, Artificial Sequence
  Description of Artificial Sequence: Synthetic oligonucleotide
  Sense strand starting at position 1027 of SEQ ID NO: 2529
ugacaagcacuuugagaaa

SEQ ID NO: 196249 - RNA, 19 nt, Artificial Sequence
  Description of Artificial Sequence: Synthetic oligonucleotide
  Antisense strand to SEQ ID NO: 196248
uuucucaaagugcuuguca

SEQ ID NO: 196250 - RNA, 19 nt, Artificial Sequence
  Description of Artificial Sequence: Synthetic oligonucleotide
  Sense strand starting at position 1054 of SEQ ID NO: 2529
aaaggucgugcaugaagua

SEQ ID NO: 196251 - RNA, 19 nt, Artificial Sequence
  Description of Artificial Sequence: Synthetic oligonucleotide
  Antisense strand to SEQ ID NO: 196250
uacuucaugcacgaccuuu

SEQ ID NO: 196252 - RNA, 19 nt, Artificial Sequence
  Description of Artificial Sequence: Synthetic oligonucleotide
  Sense strand starting at position 1278 of SEQ ID NO: 2529
ccgcaaguugcacagagau

SEQ ID NO: 196253 - RNA, 19 nt, Artificial Sequence
  Description of Artificial Sequence: Synthetic oligonucleotide
  Antisense strand to SEQ ID NO: 196252
aucucugugcaacuugcgg

SEQ ID NO: 196254 - RNA, 19 nt, Artificial Sequence
  Description of Artificial Sequence: Synthetic oligonucleotide
  Sense strand starting at position 1288 of SEQ ID NO: 2529
cacagagaucgcugaggga

SEQ ID NO: 196255 - RNA, 19 nt, Artificial Sequence
  Description of Artificial Sequence: Synthetic oligonucleotide
  Antisense strand to SEQ ID NO: 196254
ucccucagcgaucucugug

SEQ ID NO: 196256 - RNA, 19 nt, Artificial Sequence
  Description of Artificial Sequence: Synthetic oligonucleotide
  Sense strand starting at position 1362 of SEQ ID NO: 2529
ucgcgaaugcaacagaaau

SEQ ID NO: 196257 - RNA, 19 nt, Artificial Sequence
  Description of Artificial Sequence: Synthetic oligonucleotide
  Antisense strand to SEQ ID NO: 196256
auuucuguugcauucgcga

SEQ ID NO: 196258 - RNA, 19 nt, Artificial Sequence
  Description of Artificial Sequence: Synthetic oligonucleotide
  Sense strand starting at position 2545 of SEQ ID NO: 2529
cucuuccugcucuggauaa

SEQ ID NO: 196259 - RNA, 19 nt, Artificial Sequence
  Description of Artificial Sequence: Synthetic oligonucleotide
  Antisense strand to SEQ ID NO: 196258
uuauccagagcaggaagag

SEQ ID NO: 196260 - RNA, 19 nt, Artificial Sequence
  Description of Artificial Sequence: Synthetic oligonucleotide
  Sense strand starting at position 2549 of SEQ ID NO: 2529
uccugcucuggauaaacua

SEQ ID NO: 196261 - RNA, 19 nt, Artificial Sequence
  Description of Artificial Sequence: Synthetic oligonucleotide
  Antisense strand to SEQ ID NO: 196260
uaguuuauccagagcagga

SEQ ID NO: 196262 - RNA, 19 nt, Artificial Sequence
  Description of Artificial Sequence: Synthetic oligonucleotide
  Sense strand starting at position 2600 of SEQ ID NO: 2529
auuugcuuccugcauguaa

SEQ ID NO: 196263 - RNA, 19 nt, Artificial Sequence
  Description of Artificial Sequence: Synthetic oligonucleotide
  Antisense strand to SEQ ID NO: 196262
uuacaugcaggaagcaaau

SEQ ID NO: 196264 - RNA, 19 nt, Artificial Sequence
  Description of Artificial Sequence: Synthetic oligonucleotide
  Sense strand starting at position 2846 of SEQ ID NO: 2529
aaaguaugacugggcauau

SEQ ID NO: 196265 - RNA, 19 nt, Artificial Sequence
  Description of Artificial Sequence: Synthetic oligonucleotide
  Antisense strand to SEQ ID NO: 196264
auaugcccagucauacuuu

SEQ ID NO: 196266 - RNA, 19 nt, Artificial Sequence
  Description of Artificial Sequence: Synthetic oligonucleotide
  Sense strand starting at position 2847 of SEQ ID NO: 2529
aaguaugacugggcauauu

SEQ ID NO: 196267 - RNA, 19 nt, Artificial Sequence
  Description of Artificial Sequence: Synthetic oligonucleotide
  Antisense strand to SEQ ID NO: 196266
aauaugcccagucauacuu

SEQ ID NO: 196268 - RNA, 19 nt, Artificial Sequence
  Description of Artificial Sequence: Synthetic oligonucleotide
  Sense strand starting at position 2866 of SEQ ID NO: 2529
cgggaaggacuucgacauu

SEQ ID NO: 196269 - RNA, 19 nt, Artificial Sequence
  Description of Artificial Sequence: Synthetic oligonucleotide
  Antisense strand to SEQ ID NO: 196268
aaugucgaaguccuucccg

SEQ ID NO: 196270 - RNA, 19 nt, Artificial Sequence
  Description of Artificial Sequence: Synthetic oligonucleotide
  Sense strand starting at position 2925 of SEQ ID NO: 2529
ggcagcuaucuugggaaau

SEQ ID NO: 196271 - RNA, 19 nt, Artificial Sequence
  Description of Artificial Sequence: Synthetic oligonucleotide
  Antisense strand to SEQ ID NO: 196270
auuucccaagauagcugcc

SEQ ID NO: 196272 - RNA, 19 nt, Artificial Sequence
  Description of Artificial Sequence: Synthetic oligonucleotide
  Sense strand starting at position 2938 of SEQ ID NO: 2529
ggaaauccguuguuuguca

SEQ ID NO: 196273 - RNA, 19 nt, Artificial Sequence
  Description of Artificial Sequence: Synthetic oligonucleotide
  Antisense strand to SEQ ID NO: 196272
ugacaaacaacggauuucc

SEQ ID NO: 196274 - RNA, 19 nt, Artificial Sequence
  Description of Artificial Sequence: Synthetic oligonucleotide
  Sense strand starting at position 2939 of SEQ ID NO: 2529
gaaauccguuguuugucaa

SEQ ID NO: 196275 - RNA, 19 nt, Artificial Sequence
  Description of Artificial Sequence: Synthetic oligonucleotide
  Antisense strand to SEQ ID NO: 196274
uugacaaacaacggauuuc

SEQ ID NO: 196276 - RNA, 19 nt, Artificial Sequence
  Description of Artificial Sequence: Synthetic oligonucleotide
  Sense strand starting at position 3011 of SEQ ID NO: 2529
uccugacuucugcagagga

SEQ ID NO: 196277 - RNA, 19 nt, Artificial Sequence
  Description of Artificial Sequence: Synthetic oligonucleotide
  Antisense strand to SEQ ID NO: 196276
uccucugcagaagucagga

SEQ ID NO: 196278 - RNA, 19 nt, Artificial Sequence
  Description of Artificial Sequence: Synthetic oligonucleotide
  Sense strand starting at position 3112 of SEQ ID NO: 2529
agauaagagucuguggcau

SEQ ID NO: 196279 - RNA, 19 nt, Artificial Sequence
  Description of Artificial Sequence: Synthetic oligonucleotide
  Antisense strand to SEQ ID NO: 196278
augccacagacucuuaucu

SEQ ID NO: 196280 - RNA, 19 nt, Artificial Sequence
  Description of Artificial Sequence: Synthetic oligonucleotide
  Sense strand starting at position 3116 of SEQ ID NO: 2529
aagagucuguggcauauuu

SEQ ID NO: 196281 - RNA, 19 nt, Artificial Sequence
  Description of Artificial Sequence: Synthetic oligonucleotide
  Antisense strand to SEQ ID NO: 196280
aaauaugccacagacucuu

SEQ ID NO: 196282 - RNA, 19 nt, Artificial Sequence
  Description of Artificial Sequence: Synthetic oligonucleotide
  Sense strand starting at position 3184 of SEQ ID NO: 2529
ugacaaucugagugauaac

SEQ ID NO: 196283 - RNA, 19 nt, Artificial Sequence
  Description of Artificial Sequence: Synthetic oligonucleotide
  Antisense strand to SEQ ID NO: 196282
guuaucacucagauuguca

SEQ ID NO: 196284 - RNA, 19 nt, Artificial Sequence
  Description of Artificial Sequence: Synthetic oligonucleotide
  Sense strand starting at position 3193 of SEQ ID NO: 2529
gagugauaacaauguuguc

SEQ ID NO: 196285 - RNA, 19 nt, Artificial Sequence
  Description of Artificial Sequence: Synthetic oligonucleotide
  Antisense strand to SEQ ID NO: 196284
gacaacauuguuaucacuc

SEQ ID NO: 196286 - RNA, 19 nt, Artificial Sequence
  Description of Artificial Sequence: Synthetic oligonucleotide
  Sense strand starting at position 3198 of SEQ ID NO: 2529
auaacaauguugucuuacu

SEQ ID NO: 196287 - RNA, 19 nt, Artificial Sequence
  Description of Artificial Sequence: Synthetic oligonucleotide
  Antisense strand to SEQ ID NO: 196286
aguaagacaacauuguuau

SEQ ID NO: 196288 - RNA, 19 nt, Artificial Sequence
  Description of Artificial Sequence: Synthetic oligonucleotide
  Sense strand starting at position 3285 of SEQ ID NO: 2529
gugccauggccaugacaga

SEQ ID NO: 196289 - RNA, 19 nt, Artificial Sequence
  Description of Artificial Sequence: Synthetic oligonucleotide
  Antisense strand to SEQ ID NO: 196288
ucugucauggccauggcac

SEQ ID NO: 196290 - RNA, 19 nt, Artificial Sequence
  Description of Artificial Sequence: Synthetic oligonucleotide
  Sense strand starting at position 3298 of SEQ ID NO: 2529
gacagaacucaguguuagc

SEQ ID NO: 196291 - RNA, 19 nt, Artificial Sequence
  Description of Artificial Sequence: Synthetic oligonucleotide
  Antisense strand to SEQ ID NO: 196290
gcuaacacugaguucuguc

SEQ ID NO: 196292 - RNA, 19 nt, Artificial Sequence
  Description of Artificial Sequence: Synthetic oligonucleotide
  Sense strand starting at position 3421 of SEQ ID NO: 2529
uuucuauguugagcuagga

SEQ ID NO: 196293 - RNA, 19 nt, Artificial Sequence
  Description of Artificial Sequence: Synthetic oligonucleotide
  Antisense strand to SEQ ID NO: 196292
uccuagcucaacauagaaa

SEQ ID NO: 196294 - RNA, 19 nt, Artificial Sequence
  Description of Artificial Sequence: Synthetic oligonucleotide
  Sense strand starting at position 3425 of SEQ ID NO: 2529
uauguugagcuaggauauu

SEQ ID NO: 196295 - RNA, 19 nt, Artificial Sequence
  Description of Artificial Sequence: Synthetic oligonucleotide
  Antisense strand to SEQ ID NO: 196294
aauauccuagcucaacaua

SEQ ID NO: 196296 - RNA, 19 nt, Artificial Sequence
  Description of Artificial Sequence: Synthetic oligonucleotide
  Sense strand starting at position 3684 of SEQ ID NO: 2529
aggucaauguucuuagggu

SEQ ID NO: 196297 - RNA, 19 nt, Artificial Sequence
  Description of Artificial Sequence: Synthetic oligonucleotide
  Antisense strand to SEQ ID NO: 196296
acccuaagaacauugaccu

SEQ ID NO: 196298 - RNA, 19 nt, Artificial Sequence
  Description of Artificial Sequence: Synthetic oligonucleotide
  Sense strand starting at position 3698 of SEQ ID NO: 2529
aggguugucucccucaagu

SEQ ID NO: 196299 - RNA, 19 nt, Artificial Sequence
  Description of Artificial Sequence: Synthetic oligonucleotide
  Antisense strand to SEQ ID NO: 196298
acuugagggagacaacccu

SEQ ID NO: 196300 - RNA, 19 nt, Artificial Sequence
  Description of Artificial Sequence: Synthetic oligonucleotide
  Sense strand starting at position 3700 of SEQ ID NO: 2529
gguugucucccucaaguca

SEQ ID NO: 196301 - RNA, 19 nt, Artificial Sequence
  Description of Artificial Sequence: Synthetic oligonucleotide
  Antisense strand to SEQ ID NO: 196300
ugacuugagggagacaacc

SEQ ID NO: 196302 - RNA, 19 nt, Artificial Sequence
  Description of Artificial Sequence: Synthetic oligonucleotide
  Sense strand starting at position 3716 of SEQ ID NO: 2529
ucaaguauucucuggcuag

SEQ ID NO: 196303 - RNA, 19 nt, Artificial Sequence
  Description of Artificial Sequence: Synthetic oligonucleotide
  Antisense strand to SEQ ID NO: 196302
cuagccagagaauacuuga

SEQ ID NO: 196304 - RNA, 19 nt, Artificial Sequence
  Description of Artificial Sequence: Synthetic oligonucleotide
  Sense strand starting at position 3719 of SEQ ID NO: 2529
aguauucucuggcuagguu

SEQ ID NO: 196305 - RNA, 19 nt, Artificial Sequence
  Description of Artificial Sequence: Synthetic oligonucleotide
  Antisense strand to SEQ ID NO: 196304
aaccuagccagagaauacu

SEQ ID NO: 196306 - RNA, 19 nt, Artificial Sequence
  Description of Artificial Sequence: Synthetic oligonucleotide
  Sense strand starting at position 3720 of SEQ ID NO: 2529
guauucucuggcuagguuu

SEQ ID NO: 196307 - RNA, 19 nt, Artificial Sequence
  Description of Artificial Sequence: Synthetic oligonucleotide
  Antisense strand to SEQ ID NO: 196306
aaaccuagccagagaauac

SEQ ID NO: 196308 - RNA, 19 nt, Artificial Sequence
  Description of Artificial Sequence: Synthetic oligonucleotide
  Sense strand starting at position 3856 of SEQ ID NO: 2529
agaugcaaguuacuugaaa

SEQ ID NO: 196309 - RNA, 19 nt, Artificial Sequence
  Description of Artificial Sequence: Synthetic oligonucleotide
  Antisense strand to SEQ ID NO: 196308
uuucaaguaacuugcaucu

SEQ ID NO: 196310 - RNA, 19 nt, Artificial Sequence
  Description of Artificial Sequence: Synthetic oligonucleotide
  Sense strand starting at position 3857 of SEQ ID NO: 2529
gaugcaaguuacuugaaag

SEQ ID NO: 196311 - RNA, 19 nt, Artificial Sequence
  Description of Artificial Sequence: Synthetic oligonucleotide
  Antisense strand to SEQ ID NO: 196310
cuuucaaguaacuugcauc

SEQ ID NO: 196312 - RNA, 19 nt, Artificial Sequence
  Description of Artificial Sequence: Synthetic oligonucleotide
  Sense strand starting at position 3901 of SEQ ID NO: 2529
cucuuaaagucuguucuga

SEQ ID NO: 196313 - RNA, 19 nt, Artificial Sequence
  Description of Artificial Sequence: Synthetic oligonucleotide
  Antisense strand to SEQ ID NO: 196312
ucagaacagacuuuaagag

SEQ ID NO: 196314 - RNA, 19 nt, Artificial Sequence
  Description of Artificial Sequence: Synthetic oligonucleotide
  Sense strand starting at position 3903 of SEQ ID NO: 2529
cuuaaagucuguucugaua

SEQ ID NO: 196315 - RNA, 19 nt, Artificial Sequence
  Description of Artificial Sequence: Synthetic oligonucleotide
  Antisense strand to SEQ ID NO: 196314
uaucagaacagacuuuaag

SEQ ID NO: 196316 - RNA, 19 nt, Artificial Sequence
  Description of Artificial Sequence: Synthetic oligonucleotide
  Sense strand starting at position 125 of SEQ ID NO: 2530
uggcgugggaguuaagaca

SEQ ID NO: 196317 - RNA, 19 nt, Artificial Sequence
  Description of Artificial Sequence: Synthetic oligonucleotide
  Antisense strand to SEQ ID NO: 196316
ugucuuaacucccacgcca

SEQ ID NO: 196318 - RNA, 19 nt, Artificial Sequence
  Description of Artificial Sequence: Synthetic oligonucleotide
  Sense strand starting at position 240 of SEQ ID NO: 2530
gcagacaucuccgccucau

SEQ ID NO: 196319 - RNA, 19 nt, Artificial Sequence
  Description of Artificial Sequence: Synthetic oligonucleotide
  Antisense strand to SEQ ID NO: 196318
augaggcggagaugucugc

SEQ ID NO: 196320 - RNA, 19 nt, Artificial Sequence
  Description of Artificial Sequence: Synthetic oligonucleotide
  Sense strand starting at position 433 of SEQ ID NO: 2530
cagaaugcgugcuuuagga

SEQ ID NO: 196321 - RNA, 19 nt, Artificial Sequence
  Description of Artificial Sequence: Synthetic oligonucleotide
  Antisense strand to SEQ ID NO: 196320
uccuaaagcacgcauucug

SEQ ID NO: 196322 - RNA, 19 nt, Artificial Sequence
  Description of Artificial Sequence: Synthetic oligonucleotide
  Sense strand starting at position 441 of SEQ ID NO: 2530
gugcuuuaggaccaggaga

SEQ ID NO: 196323 - RNA, 19 nt, Artificial Sequence
  Description of Artificial Sequence: Synthetic oligonucleotide
  Antisense strand to SEQ ID NO: 196322
ucuccugguccuaaagcac

SEQ ID NO: 196324 - RNA, 19 nt, Artificial Sequence
  Description of Artificial Sequence: Synthetic oligonucleotide
  Sense strand starting at position 821 of SEQ ID NO: 2530
ggacaaugcugccucaaga

SEQ ID NO: 196325 - RNA, 19 nt, Artificial Sequence
  Description of Artificial Sequence: Synthetic oligonucleotide
  Antisense strand to SEQ ID NO: 196324
ucuugaggcagcauugucc

SEQ ID NO: 196326 - RNA, 19 nt, Artificial Sequence
  Description of Artificial Sequence: Synthetic oligonucleotide
  Sense strand starting at position 1343 of SEQ ID NO: 2530
ggagaagaucugggcgguu

SEQ ID NO: 196327 - RNA, 19 nt, Artificial Sequence
  Description of Artificial Sequence: Synthetic oligonucleotide
  Antisense strand to SEQ ID NO: 196326
aaccgcccagaucuucucc

SEQ ID NO: 196328 - RNA, 19 nt, Artificial Sequence
  Description of Artificial Sequence: Synthetic oligonucleotide
  Sense strand starting at position 1345 of SEQ ID NO: 2530
agaagaucugggcgguuau

SEQ ID NO: 196329 - RNA, 19 nt, Artificial Sequence
  Description of Artificial Sequence: Synthetic oligonucleotide
  Antisense strand to SEQ ID NO: 196328
auaaccgcccagaucuucu

SEQ ID NO: 196330 - RNA, 19 nt, Artificial Sequence
  Description of Artificial Sequence: Synthetic oligonucleotide
  Sense strand starting at position 1346 of SEQ ID NO: 2530
gaagaucugggcgguuaug

SEQ ID NO: 196331 - RNA, 19 nt, Artificial Sequence
  Description of Artificial Sequence: Synthetic oligonucleotide
  Antisense strand to SEQ ID NO: 196330
cauaaccgcccagaucuuc

SEQ ID NO: 196332 - RNA, 19 nt, Artificial Sequence
  Description of Artificial Sequence: Synthetic oligonucleotide
  Sense strand starting at position 1485 of SEQ ID NO: 2530
gccagcuugucgcuggaga

SEQ ID NO: 196333 - RNA, 19 nt, Artificial Sequence
  Description of Artificial Sequence: Synthetic oligonucleotide
  Antisense strand to SEQ ID NO: 196332
ucuccagcgacaagcuggc

SEQ ID NO: 196334 - RNA, 19 nt, Artificial Sequence
  Description of Artificial Sequence: Synthetic oligonucleotide
  Sense strand starting at position 1486 of SEQ ID NO: 2530
ccagcuugucgcuggagaa

SEQ ID NO: 196335 - RNA, 19 nt, Artificial Sequence
  Description of Artificial Sequence: Synthetic oligonucleotide
  Antisense strand to SEQ ID NO: 196334
uucuccagcgacaagcugg

SEQ ID NO: 196336 - RNA, 19 nt, Artificial Sequence
  Description of Artificial Sequence: Synthetic oligonucleotide
  Sense strand starting at position 1487 of SEQ ID NO: 2530
cagcuugucgcuggagaag

SEQ ID NO: 196337 - RNA, 19 nt, Artificial Sequence
  Description of Artificial Sequence: Synthetic oligonucleotide
  Antisense strand to SEQ ID NO: 196336
cuucuccagcgacaagcug

SEQ ID NO: 196338 - RNA, 19 nt, Artificial Sequence
  Description of Artificial Sequence: Synthetic oligonucleotide
  Sense strand starting at position 1603 of SEQ ID NO: 2530
gguagagguucuccaagga

SEQ ID NO: 196339 - RNA, 19 nt, Artificial Sequence
  Description of Artificial Sequence: Synthetic oligonucleotide
  Antisense strand to SEQ ID NO: 196338
uccuuggagaaccucuacc

SEQ ID NO: 196340 - RNA, 19 nt, Artificial Sequence
  Description of Artificial Sequence: Synthetic oligonucleotide
  Sense strand starting at position 1673 of SEQ ID NO: 2530
cgaguuccggaccgagauu

SEQ ID NO: 196341 - RNA, 19 nt, Artificial Sequence
  Description of Artificial Sequence: Synthetic oligonucleotide
  Antisense strand to SEQ ID NO: 196340
aaucucgguccggaacucg

SEQ ID NO: 196342 - RNA, 19 nt, Artificial Sequence
  Description of Artificial Sequence: Synthetic oligonucleotide
  Sense strand starting at position 1737 of SEQ ID NO: 2530
acggaguacucggcugagu

SEQ ID NO: 196343 - RNA, 19 nt, Artificial Sequence
  Description of Artificial Sequence: Synthetic oligonucleotide
  Antisense strand to SEQ ID NO: 196342
acucagccgaguacuccgu

SEQ ID NO: 196344 - RNA, 19 nt, Artificial Sequence
  Description of Artificial Sequence: Synthetic oligonucleotide
  Sense strand starting at position 1739 of SEQ ID NO: 2530
ggaguacucggcugaguac

SEQ ID NO: 196345 - RNA, 19 nt, Artificial Sequence
  Description of Artificial Sequence: Synthetic oligonucleotide
  Antisense strand to SEQ ID NO: 196344
guacucagccgaguacucc

SEQ ID NO: 196346 - RNA, 19 nt, Artificial Sequence
  Description of Artificial Sequence: Synthetic oligonucleotide
  Sense strand starting at position 1740 of SEQ ID NO: 2530
gaguacucggcugaguacu

SEQ ID NO: 196347 - RNA, 19 nt, Artificial Sequence
  Description of Artificial Sequence: Synthetic oligonucleotide
  Antisense strand to SEQ ID NO: 196346
aguacucagccgaguacuc

SEQ ID NO: 196348 - RNA, 19 nt, Artificial Sequence
  Description of Artificial Sequence: Synthetic oligonucleotide
  Sense strand starting at position 1749 of SEQ ID NO: 2530
gcugaguacucggccgagu

SEQ ID NO: 196349 - RNA, 19 nt, Artificial Sequence
  Description of Artificial Sequence: Synthetic oligonucleotide
  Antisense strand to SEQ ID NO: 196348
acucggccgaguacucagc

SEQ ID NO: 196350 - RNA, 19 nt, Artificial Sequence
  Description of Artificial Sequence: Synthetic oligonucleotide
  Sense strand starting at position 1751 of SEQ ID NO: 2530
ugaguacucggccgaguau

SEQ ID NO: 196351 - RNA, 19 nt, Artificial Sequence
  Description of Artificial Sequence: Synthetic oligonucleotide
  Antisense strand to SEQ ID NO: 196350
auacucggccgaguacuca

SEQ ID NO: 196352 - RNA, 19 nt, Artificial Sequence
  Description of Artificial Sequence: Synthetic oligonucleotide
  Sense strand starting at position 1752 of SEQ ID NO: 2530
gaguacucggccgaguauu

SEQ ID NO: 196353 - RNA, 19 nt, Artificial Sequence
  Description of Artificial Sequence: Synthetic oligonucleotide
  Antisense strand to SEQ ID NO: 196352
aauacucggccgaguacuc

SEQ ID NO: 196354 - RNA, 19 nt, Artificial Sequence
  Description of Artificial Sequence: Synthetic oligonucleotide
  Sense strand starting at position 1765 of SEQ ID NO: 2530
aguauucgggcucggagaa

SEQ ID NO: 196355 - RNA, 19 nt, Artificial Sequence
  Description of Artificial Sequence: Synthetic oligonucleotide
  Antisense strand to SEQ ID NO: 196354
uucuccgagcccgaauacu

SEQ ID NO: 196356 - RNA, 19 nt, Artificial Sequence
  Description of Artificial Sequence: Synthetic oligonucleotide
  Sense strand starting at position 1815 of SEQ ID NO: 2530
ugcuacuggcccuagagaa

SEQ ID NO: 196357 - RNA, 19 nt, Artificial Sequence
  Description of Artificial Sequence: Synthetic oligonucleotide
  Antisense strand to SEQ ID NO: 196356
uucucuagggccaguagca

SEQ ID NO: 196358 - RNA, 19 nt, Artificial Sequence
  Description of Artificial Sequence: Synthetic oligonucleotide
  Sense strand starting at position 2004 of SEQ ID NO: 2530
aagggcauugcugaguaga

SEQ ID NO: 196359 - RNA, 19 nt, Artificial Sequence
  Description of Artificial Sequence: Synthetic oligonucleotide
  Antisense strand to SEQ ID NO: 196358
ucuacucagcaaugcccuu

SEQ ID NO: 196360 - RNA, 19 nt, Artificial Sequence
  Description of Artificial Sequence: Synthetic oligonucleotide
  Sense strand starting at position 2006 of SEQ ID NO: 2530
gggcauugcugaguagaag

SEQ ID NO: 196361 - RNA, 19 nt, Artificial Sequence
  Description of Artificial Sequence: Synthetic oligonucleotide
  Antisense strand to SEQ ID NO: 196360
cuucuacucagcaaugccc

SEQ ID NO: 196362 - RNA, 19 nt, Artificial Sequence
  Description of Artificial Sequence: Synthetic oligonucleotide
  Sense strand starting at position 2221 of SEQ ID NO: 2530
gccuuuccaucccugguaa

SEQ ID NO: 196363 - RNA, 19 nt, Artificial Sequence
  Description of Artificial Sequence: Synthetic oligonucleotide
  Antisense strand to SEQ ID NO: 196362
uuaccagggauggaaaggc

SEQ ID NO: 196364 - RNA, 19 nt, Artificial Sequence
  Description of Artificial Sequence: Synthetic oligonucleotide
  Sense strand starting at position 2239 of SEQ ID NO: 2530
accgguuucucucugucau

SEQ ID NO: 196365 - RNA, 19 nt, Artificial Sequence
  Description of Artificial Sequence: Synthetic oligonucleotide
  Antisense strand to SEQ ID NO: 196364
augacagagagaaaccggu

SEQ ID NO: 196366 - RNA, 19 nt, Artificial Sequence
  Description of Artificial Sequence: Synthetic oligonucleotide
  Sense strand starting at position 2240 of SEQ ID NO: 2530
ccgguuucucucugucauc

SEQ ID NO: 196367 - RNA, 19 nt, Artificial Sequence
  Description of Artificial Sequence: Synthetic oligonucleotide
  Antisense strand to SEQ ID NO: 196366
gaugacagagagaaaccgg

SEQ ID NO: 196368 - RNA, 19 nt, Artificial Sequence
  Description of Artificial Sequence: Synthetic oligonucleotide
  Sense strand starting at position 2489 of SEQ ID NO: 2530
gcguuuaccugugcgggaa

SEQ ID NO: 196369 - RNA, 19 nt, Artificial Sequence
  Description of Artificial Sequence: Synthetic oligonucleotide
  Antisense strand to SEQ ID NO: 196368
uucccgcacagguaaacgc

SEQ ID NO: 196370 - RNA, 19 nt, Artificial Sequence
  Description of Artificial Sequence: Synthetic oligonucleotide
  Sense strand starting at position 3655 of SEQ ID NO: 2530
agacccugcuucgaagaga

SEQ ID NO: 196371 - RNA, 19 nt, Artificial Sequence
  Description of Artificial Sequence: Synthetic oligonucleotide
  Antisense strand to SEQ ID NO: 196370
ucucuucgaagcagggucu

SEQ ID NO: 196372 - RNA, 19 nt, Artificial Sequence
  Description of Artificial Sequence: Synthetic oligonucleotide
  Sense strand starting at position 3666 of SEQ ID NO: 2530
cgaagagauuucccgugca

SEQ ID NO: 196373 - RNA, 19 nt, Artificial Sequence
  Description of Artificial Sequence: Synthetic oligonucleotide
  Antisense strand to SEQ ID NO: 196372
ugcacgggaaaucucuucg

SEQ ID NO: 196374 - RNA, 19 nt, Artificial Sequence
  Description of Artificial Sequence: Synthetic oligonucleotide
  Sense strand starting at position 3669 of SEQ ID NO: 2530
agagauuucccgugcacau

SEQ ID NO: 196375 - RNA, 19 nt, Artificial Sequence
  Description of Artificial Sequence: Synthetic oligonucleotide
  Antisense strand to SEQ ID NO: 196374
augugcacgggaaaucucu

SEQ ID NO: 196376 - RNA, 19 nt, Artificial Sequence
  Description of Artificial Sequence: Synthetic oligonucleotide
  Sense strand starting at position 3686 of SEQ ID NO: 2530
auucuacccguuugagaug

SEQ ID NO: 196377 - RNA, 19 nt, Artificial Sequence
  Description of Artificial Sequence: Synthetic oligonucleotide
  Antisense strand to SEQ ID NO: 196376
caucucaaacggguagaau

SEQ ID NO: 196378 - RNA, 19 nt, Artificial Sequence
  Description of Artificial Sequence: Synthetic oligonucleotide
  Sense strand starting at position 3691 of SEQ ID NO: 2530
acccguuugagauguguuu

SEQ ID NO: 196379 - RNA, 19 nt, Artificial Sequence
  Description of Artificial Sequence: Synthetic oligonucleotide
  Antisense strand to SEQ ID NO: 196378
aaacacaucucaaacgggu

SEQ ID NO: 196380 - RNA, 19 nt, Artificial Sequence
  Description of Artificial Sequence: Synthetic oligonucleotide
  Sense strand starting at position 3693 of SEQ ID NO: 2530
ccguuugagauguguuuga

SEQ ID NO: 196381 - RNA, 19 nt, Artificial Sequence
  Description of Artificial Sequence: Synthetic oligonucleotide
  Antisense strand to SEQ ID NO: 196380
ucaaacacaucucaaacgg

SEQ ID NO: 196382 - RNA, 19 nt, Artificial Sequence
  Description of Artificial Sequence: Synthetic oligonucleotide
  Sense strand starting at position 3697 of SEQ ID NO: 2530
uugagauguguuugaguuc

SEQ ID NO: 196383 - RNA, 19 nt, Artificial Sequence
  Description of Artificial Sequence: Synthetic oligonucleotide
  Antisense strand to SEQ ID NO: 196382
gaacucaaacacaucucaa

SEQ ID NO: 196384 - RNA, 19 nt, Artificial Sequence
  Description of Artificial Sequence: Synthetic oligonucleotide
  Sense strand starting at position 3723 of SEQ ID NO: 2530
gucccuuaaagaugcgaau

SEQ ID NO: 196385 - RNA, 19 nt, Artificial Sequence
  Description of Artificial Sequence: Synthetic oligonucleotide
  Antisense strand to SEQ ID NO: 196384
auucgcaucuuuaagggac

SEQ ID NO: 196386 - RNA, 19 nt, Artificial Sequence
  Description of Artificial Sequence: Synthetic oligonucleotide
  Sense strand starting at position 3735 of SEQ ID NO: 2530
ugcgaaugcuccuuugaau

SEQ ID NO: 196387 - RNA, 19 nt, Artificial Sequence
  Description of Artificial Sequence: Synthetic oligonucleotide
  Antisense strand to SEQ ID NO: 196386
auucaaaggagcauucgca

SEQ ID NO: 196388 - RNA, 19 nt, Artificial Sequence
  Description of Artificial Sequence: Synthetic oligonucleotide
  Sense strand starting at position 3741 of SEQ ID NO: 2530
ugcuccuuugaauaguuaa

SEQ ID NO: 196389 - RNA, 19 nt, Artificial Sequence
  Description of Artificial Sequence: Synthetic oligonucleotide
  Antisense strand to SEQ ID NO: 196388
uuaacuauucaaaggagca

SEQ ID NO: 196390 - RNA, 19 nt, Artificial Sequence
  Description of Artificial Sequence: Synthetic oligonucleotide
  Sense strand starting at position 3767 of SEQ ID NO: 2530
agucucuuacaccauagua

SEQ ID NO: 196391 - RNA, 19 nt, Artificial Sequence
  Description of Artificial Sequence: Synthetic oligonucleotide
  Antisense strand to SEQ ID NO: 196390
uacuaugguguaagagacu

SEQ ID NO: 196392 - RNA, 19 nt, Artificial Sequence
  Description of Artificial Sequence: Synthetic oligonucleotide
  Sense strand starting at position 3795 of SEQ ID NO: 2530
uuccuugcauuugacagaa

SEQ ID NO: 196393 - RNA, 19 nt, Artificial Sequence
  Description of Artificial Sequence: Synthetic oligonucleotide
  Antisense strand to SEQ ID NO: 196392
uucugucaaaugcaaggaa

SEQ ID NO: 196394 - RNA, 19 nt, Artificial Sequence
  Description of Artificial Sequence: Synthetic oligonucleotide
  Sense strand starting at position 3797 of SEQ ID NO: 2530
ccuugcauuugacagaaca

SEQ ID NO: 196395 - RNA, 19 nt, Artificial Sequence
  Description of Artificial Sequence: Synthetic oligonucleotide
  Antisense strand to SEQ ID NO: 196394
uguucugucaaaugcaagg

SEQ ID NO: 196396 - RNA, 19 nt, Artificial Sequence
  Description of Artificial Sequence: Synthetic oligonucleotide
  Sense strand starting at position 140 of SEQ ID NO: 2531
gcugccuugccauauuuau

SEQ ID NO: 196397 - RNA, 19 nt, Artificial Sequence
  Description of Artificial Sequence: Synthetic oligonucleotide
  Antisense strand to SEQ ID NO: 196396
auaaauauggcaaggcagc

SEQ ID NO: 196398 - RNA, 19 nt, Artificial Sequence
  Description of Artificial Sequence: Synthetic oligonucleotide
  Sense strand starting at position 175 of SEQ ID NO: 2531
ucuuaaaucccuuguggaa

SEQ ID NO: 196399 - RNA, 19 nt, Artificial Sequence
  Description of Artificial Sequence: Synthetic oligonucleotide
  Antisense strand to SEQ ID NO: 196398
uuccacaagggauuuaaga

SEQ ID NO: 196400 - RNA, 19 nt, Artificial Sequence
  Description of Artificial Sequence: Synthetic oligonucleotide
  Sense strand starting at position 294 of SEQ ID NO: 2531
ccuuaagaauagcugagau

SEQ ID NO: 196401 - RNA, 19 nt, Artificial Sequence
  Description of Artificial Sequence: Synthetic oligonucleotide
  Antisense strand to SEQ ID NO: 196400
aucucagcuauucuuaagg

SEQ ID NO: 196402 - RNA, 19 nt, Artificial Sequence
  Description of Artificial Sequence: Synthetic oligonucleotide
  Sense strand starting at position 394 of SEQ ID NO: 2531
uuguacauuguguauauga

SEQ ID NO: 196403 - RNA, 19 nt, Artificial Sequence
  Description of Artificial Sequence: Synthetic oligonucleotide
  Antisense strand to SEQ ID NO: 196402
ucauauacacaauguacaa

SEQ ID NO: 196404 - RNA, 19 nt, Artificial Sequence
  Description of Artificial Sequence: Synthetic oligonucleotide
  Sense strand starting at position 396 of SEQ ID NO: 2531
guacauuguguauaugaca

SEQ ID NO: 196405 - RNA, 19 nt, Artificial Sequence
  Description of Artificial Sequence: Synthetic oligonucleotide
  Antisense strand to SEQ ID NO: 196404
ugucauauacacaauguac

SEQ ID NO: 196406 - RNA, 19 nt, Artificial Sequence
  Description of Artificial Sequence: Synthetic oligonucleotide
  Sense strand starting at position 424 of SEQ ID NO: 2531
cuaauaaggcuaggcaauu

SEQ ID NO: 196407 - RNA, 19 nt, Artificial Sequence
  Description of Artificial Sequence: Synthetic oligonucleotide
  Antisense strand to SEQ ID NO: 196406
aauugccuagccuuauuag

SEQ ID NO: 196408 - RNA, 19 nt, Artificial Sequence
  Description of Artificial Sequence: Synthetic oligonucleotide
  Sense strand starting at position 530 of SEQ ID NO: 2531
auguguugacaucauacca

SEQ ID NO: 196409 - RNA, 19 nt, Artificial Sequence
  Description of Artificial Sequence: Synthetic oligonucleotide
  Antisense strand to SEQ ID NO: 196408
ugguaugaugucaacacau

SEQ ID NO: 196410 - RNA, 19 nt, Artificial Sequence
  Description of Artificial Sequence: Synthetic oligonucleotide
  Sense strand starting at position 610 of SEQ ID NO: 2531
gcaagauccugaucuauag

SEQ ID NO: 196411 - RNA, 19 nt, Artificial Sequence
  Description of Artificial Sequence: Synthetic oligonucleotide
  Antisense strand to SEQ ID NO: 196410
cuauagaucaggaucuugc

SEQ ID NO: 196412 - RNA, 19 nt, Artificial Sequence
  Description of Artificial Sequence: Synthetic oligonucleotide
  Sense strand starting at position 790 of SEQ ID NO: 2531
ucucuucuuuggucagauu

SEQ ID NO: 196413 - RNA, 19 nt, Artificial Sequence
  Description of Artificial Sequence: Synthetic oligonucleotide
  Antisense strand to SEQ ID NO: 196412
aaucugaccaaagaagaga

SEQ ID NO: 196414 - RNA, 19 nt, Artificial Sequence
  Description of Artificial Sequence: Synthetic oligonucleotide
  Sense strand starting at position 872 of SEQ ID NO: 2531
uucuaaugccauuaaugag

SEQ ID NO: 196415 - RNA, 19 nt, Artificial Sequence
  Description of Artificial Sequence: Synthetic oligonucleotide
  Antisense strand to SEQ ID NO: 196414
cucauuaauggcauuagaa

SEQ ID NO: 196416 - RNA, 19 nt, Artificial Sequence
  Description of Artificial Sequence: Synthetic oligonucleotide
  Sense strand starting at position 1072 of SEQ ID NO: 2531
uucuauuaucgauaaagcu

SEQ ID NO: 196417 - RNA, 19 nt, Artificial Sequence
  Description of Artificial Sequence: Synthetic oligonucleotide
  Antisense strand to SEQ ID NO: 196416
agcuuuaucgauaauagaa

SEQ ID NO: 196418 - RNA, 19 nt, Artificial Sequence
  Description of Artificial Sequence: Synthetic oligonucleotide
  Sense strand starting at position 1079 of SEQ ID NO: 2531
aucgauaaagcucaucuga

SEQ ID NO: 196419 - RNA, 19 nt, Artificial Sequence
  Description of Artificial Sequence: Synthetic oligonucleotide
  Antisense strand to SEQ ID NO: 196418
ucagaugagcuuuaucgau

SEQ ID NO: 196420 - RNA, 19 nt, Artificial Sequence
  Description of Artificial Sequence: Synthetic oligonucleotide
  Sense strand starting at position 1081 of SEQ ID NO: 2531
cgauaaagcucaucugagu

SEQ ID NO: 196421 - RNA, 19 nt, Artificial Sequence
  Description of Artificial Sequence: Synthetic oligonucleotide
  Antisense strand to SEQ ID NO: 196420
acucagaugagcuuuaucg

SEQ ID NO: 196422 - RNA, 19 nt, Artificial Sequence
  Description of Artificial Sequence: Synthetic oligonucleotide
  Sense strand starting at position 1088 of SEQ ID NO: 2531
gcucaucugagucaguuga

SEQ ID NO: 196423 - RNA, 19 nt, Artificial Sequence
  Description of Artificial Sequence: Synthetic oligonucleotide
  Antisense strand to SEQ ID NO: 196422
ucaacugacucagaugagc

SEQ ID NO: 196424 - RNA, 19 nt, Artificial Sequence
  Description of Artificial Sequence: Synthetic oligonucleotide
  Sense strand starting at position 1090 of SEQ ID NO: 2531
ucaucugagucaguugaau

SEQ ID NO: 196425 - RNA, 19 nt, Artificial Sequence
  Description of Artificial Sequence: Synthetic oligonucleotide
  Antisense strand to SEQ ID NO: 196424
auucaacugacucagauga

SEQ ID NO: 196426 - RNA, 19 nt, Artificial Sequence
  Description of Artificial Sequence: Synthetic oligonucleotide
  Sense strand starting at position 1155 of SEQ ID NO: 2531
auggguauuaaucaugugu

SEQ ID NO: 196427 - RNA, 19 nt, Artificial Sequence
  Description of Artificial Sequence: Synthetic oligonucleotide
  Antisense strand to SEQ ID NO: 196426
acacaugauuaauacccau

SEQ ID NO: 196428 - RNA, 19 nt, Artificial Sequence
  Description of Artificial Sequence: Synthetic oligonucleotide
  Sense strand starting at position 1160 of SEQ ID NO: 2531
uauuaaucaugugucagag

SEQ ID NO: 196429 - RNA, 19 nt, Artificial Sequence
  Description of Artificial Sequence: Synthetic oligonucleotide
  Antisense strand to SEQ ID NO: 196428
cucugacacaugauuaaua

SEQ ID NO: 196430 - RNA, 19 nt, Artificial Sequence
  Description of Artificial Sequence: Synthetic oligonucleotide
  Sense strand starting at position 1172 of SEQ ID NO: 2531
gucagagauaaaugacagu

SEQ ID NO: 196431 - RNA, 19 nt, Artificial Sequence
  Description of Artificial Sequence: Synthetic oligonucleotide
  Antisense strand to SEQ ID NO: 196430
acugucauuuaucucugac

SEQ ID NO: 196432 - RNA, 19 nt, Artificial Sequence
  Description of Artificial Sequence: Synthetic oligonucleotide
  Sense strand starting at position 1195 of SEQ ID NO: 2531
uaaagaauuugauagggug

SEQ ID NO: 196433 - RNA, 19 nt, Artificial Sequence
  Description of Artificial Sequence: Synthetic oligonucleotide
  Antisense strand to SEQ ID NO: 196432
cacccuaucaaauucuuua

SEQ ID NO: 196434 - RNA, 19 nt, Artificial Sequence
  Description of Artificial Sequence: Synthetic oligonucleotide
  Sense strand starting at position 1344 of SEQ ID NO: 2531
gagccugaucugcauccua

SEQ ID NO: 196435 - RNA, 19 nt, Artificial Sequence
  Description of Artificial Sequence: Synthetic oligonucleotide
  Antisense strand to SEQ ID NO: 196434
uaggaugcagaucaggcuc

SEQ ID NO: 196436 - RNA, 19 nt, Artificial Sequence
  Description of Artificial Sequence: Synthetic oligonucleotide
  Sense strand starting at position 1402 of SEQ ID NO: 2531
uaggcuguggugugauuua

SEQ ID NO: 196437 - RNA, 19 nt, Artificial Sequence
  Description of Artificial Sequence: Synthetic oligonucleotide
  Antisense strand to SEQ ID NO: 196436
uaaaucacaccacagccua

SEQ ID NO: 196438 - RNA, 19 nt, Artificial Sequence
  Description of Artificial Sequence: Synthetic oligonucleotide
  Sense strand starting at position 2759 of SEQ ID NO: 2531
ccgggauggccagagcuaa

SEQ ID NO: 196439 - RNA, 19 nt, Artificial Sequence
  Description of Artificial Sequence: Synthetic oligonucleotide
  Antisense strand to SEQ ID NO: 196438
uuagcucuggccaucccgg

SEQ ID NO: 196440 - RNA, 19 nt, Artificial Sequence
  Description of Artificial Sequence: Synthetic oligonucleotide
  Sense strand starting at position 2782 of SEQ ID NO: 2531
gggagucuguuacuaggga

SEQ ID NO: 196441 - RNA, 19 nt, Artificial Sequence
  Description of Artificial Sequence: Synthetic oligonucleotide
  Antisense strand to SEQ ID NO: 196440
ucccuaguaacagacuccc

SEQ ID NO: 196442 - RNA, 19 nt, Artificial Sequence
  Description of Artificial Sequence: Synthetic oligonucleotide
  Sense strand starting at position 2830 of SEQ ID NO: 2531
aauguauucucccuggaag

SEQ ID NO: 196443 - RNA, 19 nt, Artificial Sequence
  Description of Artificial Sequence: Synthetic oligonucleotide
  Antisense strand to SEQ ID NO: 196442
cuuccagggagaauacauu

SEQ ID NO: 196444 - RNA, 19 nt, Artificial Sequence
  Description of Artificial Sequence: Synthetic oligonucleotide
  Sense strand starting at position 2831 of SEQ ID NO: 2531
auguauucucccuggaagg

SEQ ID NO: 196445 - RNA, 19 nt, Artificial Sequence
  Description of Artificial Sequence: Synthetic oligonucleotide
  Antisense strand to SEQ ID NO: 196444
ccuuccagggagaauacau

SEQ ID NO: 196446 - RNA, 19 nt, Artificial Sequence
  Description of Artificial Sequence: Synthetic oligonucleotide
  Sense strand starting at position 2861 of SEQ ID NO: 2531
agucuuagacuuggaauau

SEQ ID NO: 196447 - RNA, 19 nt, Artificial Sequence
  Description of Artificial Sequence: Synthetic oligonucleotide
  Antisense strand to SEQ ID NO: 196446
auauuccaagucuaagacu

SEQ ID NO: 196448 - RNA, 19 nt, Artificial Sequence
  Description of Artificial Sequence: Synthetic oligonucleotide
  Sense strand starting at position 2904 of SEQ ID NO: 2531
uagccuucggaagauaauu

SEQ ID NO: 196449 - RNA, 19 nt, Artificial Sequence
  Description of Artificial Sequence: Synthetic oligonucleotide
  Antisense strand to SEQ ID NO: 196448
aauuaucuuccgaaggcua

SEQ ID NO: 196450 - RNA, 19 nt, Artificial Sequence
  Description of Artificial Sequence: Synthetic oligonucleotide
  Sense strand starting at position 2909 of SEQ ID NO: 2531
uucggaagauaauucuauu

SEQ ID NO: 196451 - RNA, 19 nt, Artificial Sequence
  Description of Artificial Sequence: Synthetic oligonucleotide
  Antisense strand to SEQ ID NO: 196450
aauagaauuaucuuccgaa

SEQ ID NO: 196452 - RNA, 19 nt, Artificial Sequence
  Description of Artificial Sequence: Synthetic oligonucleotide
  Sense strand starting at position 2938 of SEQ ID NO: 2531
auagcaauuguuugacuga

SEQ ID NO: 196453 - RNA, 19 nt, Artificial Sequence
  Description of Artificial Sequence: Synthetic oligonucleotide
  Antisense strand to SEQ ID NO: 196452
ucagucaaacaauugcuau

SEQ ID NO: 196454 - RNA, 19 nt, Artificial Sequence
  Description of Artificial Sequence: Synthetic oligonucleotide
  Sense strand starting at position 2941 of SEQ ID NO: 2531
gcaauuguuugacugaauu

SEQ ID NO: 196455 - RNA, 19 nt, Artificial Sequence
  Description of Artificial Sequence: Synthetic oligonucleotide
  Antisense strand to SEQ ID NO: 196454
aauucagucaaacaauugc

SEQ ID NO: 196456 - RNA, 19 nt, Artificial Sequence
  Description of Artificial Sequence: Synthetic oligonucleotide
  Sense strand starting at position 3174 of SEQ ID NO: 2531
cgucucagagcugcucuua

SEQ ID NO: 196457 - RNA, 19 nt, Artificial Sequence
  Description of Artificial Sequence: Synthetic oligonucleotide
  Antisense strand to SEQ ID NO: 196456
uaagagcagcucugagacg

SEQ ID NO: 196458 - RNA, 19 nt, Artificial Sequence
  Description of Artificial Sequence: Synthetic oligonucleotide
  Sense strand starting at position 3322 of SEQ ID NO: 2531
gguguuaagagauagcucu

SEQ ID NO: 196459 - RNA, 19 nt, Artificial Sequence
  Description of Artificial Sequence: Synthetic oligonucleotide
  Antisense strand to SEQ ID NO: 196458
agagcuaucucuuaacacc

SEQ ID NO: 196460 - RNA, 19 nt, Artificial Sequence
  Description of Artificial Sequence: Synthetic oligonucleotide
  Sense strand starting at position 3328 of SEQ ID NO: 2531
aagagauagcucuggacuu

SEQ ID NO: 196461 - RNA, 19 nt, Artificial Sequence
  Description of Artificial Sequence: Synthetic oligonucleotide
  Antisense strand to SEQ ID NO: 196460
aaguccagagcuaucucuu

SEQ ID NO: 196462 - RNA, 19 nt, Artificial Sequence
  Description of Artificial Sequence: Synthetic oligonucleotide
  Sense strand starting at position 3453 of SEQ ID NO: 2531
ucuggccacugaucugaaa

SEQ ID NO: 196463 - RNA, 19 nt, Artificial Sequence
  Description of Artificial Sequence: Synthetic oligonucleotide
  Antisense strand to SEQ ID NO: 196462
uuucagaucaguggccaga

SEQ ID NO: 196464 - RNA, 19 nt, Artificial Sequence
  Description of Artificial Sequence: Synthetic oligonucleotide
  Sense strand starting at position 3587 of SEQ ID NO: 2531
uaggcucaggauugguaau

SEQ ID NO: 196465 - RNA, 19 nt, Artificial Sequence
  Description of Artificial Sequence: Synthetic oligonucleotide
  Antisense strand to SEQ ID NO: 196464
auuaccaauccugagccua

SEQ ID NO: 196466 - RNA, 19 nt, Artificial Sequence
  Description of Artificial Sequence: Synthetic oligonucleotide
  Sense strand starting at position 3588 of SEQ ID NO: 2531
aggcucaggauugguaauu

SEQ ID NO: 196467 - RNA, 19 nt, Artificial Sequence
  Description of Artificial Sequence: Synthetic oligonucleotide
  Antisense strand to SEQ ID NO: 196466
aauuaccaauccugagccu

SEQ ID NO: 196468 - RNA, 19 nt, Artificial Sequence
  Description of Artificial Sequence: Synthetic oligonucleotide
  Sense strand starting at position 3715 of SEQ ID NO: 2531
aggauaaacuugucuuucu

SEQ ID NO: 196469 - RNA, 19 nt, Artificial Sequence
  Description of Artificial Sequence: Synthetic oligonucleotide
  Antisense strand to SEQ ID NO: 196468
agaaagacaaguuuauccu

SEQ ID NO: 196470 - RNA, 19 nt, Artificial Sequence
  Description of Artificial Sequence: Synthetic oligonucleotide
  Sense strand starting at position 3716 of SEQ ID NO: 2531
ggauaaacuugucuuucug

SEQ ID NO: 196471 - RNA, 19 nt, Artificial Sequence
  Description of Artificial Sequence: Synthetic oligonucleotide
  Antisense strand to SEQ ID NO: 196470
cagaaagacaaguuuaucc

SEQ ID NO: 196472 - RNA, 19 nt, Artificial Sequence
  Description of Artificial Sequence: Synthetic oligonucleotide
  Sense strand starting at position 3937 of SEQ ID NO: 2531
aggucugucuggucaaaga

SEQ ID NO: 196473 - RNA, 19 nt, Artificial Sequence
  Description of Artificial Sequence: Synthetic oligonucleotide
  Antisense strand to SEQ ID NO: 196472
ucuuugaccagacagaccu

SEQ ID NO: 196474 - RNA, 19 nt, Artificial Sequence
  Description of Artificial Sequence: Synthetic oligonucleotide
  Sense strand starting at position 3963 of SEQ ID NO: 2531
acguguuauguuuauugag

SEQ ID NO: 196475 - RNA, 19 nt, Artificial Sequence
  Description of Artificial Sequence: Synthetic oligonucleotide
  Antisense strand to SEQ ID NO: 196474
cucaauaaacauaacacgu

SEQ ID NO: 196476 - RNA, 19 nt, Artificial Sequence
  Description of Artificial Sequence: Synthetic oligonucleotide
  Sense strand starting at position 2 of SEQ ID NO: 2532
auguguugacaucauacca

SEQ ID NO: 196477 - RNA, 19 nt, Artificial Sequence
  Description of Artificial Sequence: Synthetic oligonucleotide
  Antisense strand to SEQ ID NO: 196476
ugguaugaugucaacacau

SEQ ID NO: 196478 - RNA, 19 nt, Artificial Sequence
  Description of Artificial Sequence: Synthetic oligonucleotide
  Sense strand starting at position 82 of SEQ ID NO: 2532
gcaagauccugaucuauag

SEQ ID NO: 196479 - RNA, 19 nt, Artificial Sequence
  Description of Artificial Sequence: Synthetic oligonucleotide
  Antisense strand to SEQ ID NO: 196478
cuauagaucaggaucuugc

SEQ ID NO: 196480 - RNA, 19 nt, Artificial Sequence
  Description of Artificial Sequence: Synthetic oligonucleotide
  Sense strand starting at position 261 of SEQ ID NO: 2532
uucucuucuuuggucagau

SEQ ID NO: 196481 - RNA, 19 nt, Artificial Sequence
  Description of Artificial Sequence: Synthetic oligonucleotide
  Antisense strand to SEQ ID NO: 196480
aucugaccaaagaagagaa

SEQ ID NO: 196482 - RNA, 19 nt, Artificial Sequence
  Description of Artificial Sequence: Synthetic oligonucleotide
  Sense strand starting at position 262 of SEQ ID NO: 2532
ucucuucuuuggucagauu

SEQ ID NO: 196483 - RNA, 19 nt, Artificial Sequence
  Description of Artificial Sequence: Synthetic oligonucleotide
  Antisense strand to SEQ ID NO: 196482
aaucugaccaaagaagaga

SEQ ID NO: 196484 - RNA, 19 nt, Artificial Sequence
  Description of Artificial Sequence: Synthetic oligonucleotide
  Sense strand starting at position 344 of SEQ ID NO: 2532
uucuaaugccauuaaugag

SEQ ID NO: 196485 - RNA, 19 nt, Artificial Sequence
  Description of Artificial Sequence: Synthetic oligonucleotide
  Antisense strand to SEQ ID NO: 196484
cucauuaauggcauuagaa

SEQ ID NO: 196486 - RNA, 19 nt, Artificial Sequence
  Description of Artificial Sequence: Synthetic oligonucleotide
  Sense strand starting at position 544 of SEQ ID NO: 2532
uucuauuaucgauaaagcu

SEQ ID NO: 196487 - RNA, 19 nt, Artificial Sequence
  Description of Artificial Sequence: Synthetic oligonucleotide
  Antisense strand to SEQ ID NO: 196486
agcuuuaucgauaauagaa

SEQ ID NO: 196488 - RNA, 19 nt, Artificial Sequence
  Description of Artificial Sequence: Synthetic oligonucleotide
  Sense strand starting at position 551 of SEQ ID NO: 2532
aucgauaaagcucaucuga

SEQ ID NO: 196489 - RNA, 19 nt, Artificial Sequence
  Description of Artificial Sequence: Synthetic oligonucleotide
  Antisense strand to SEQ ID NO: 196488
ucagaugagcuuuaucgau

SEQ ID NO: 196490 - RNA, 19 nt, Artificial Sequence
  Description of Artificial Sequence: Synthetic oligonucleotide
  Sense strand starting at position 553 of SEQ ID NO: 2532
cgauaaagcucaucugagu

SEQ ID NO: 196491 - RNA, 19 nt, Artificial Sequence
  Description of Artificial Sequence: Synthetic oligonucleotide
  Antisense strand to SEQ ID NO: 196490
acucagaugagcuuuaucg

SEQ ID NO: 196492 - RNA, 19 nt, Artificial Sequence
  Description of Artificial Sequence: Synthetic oligonucleotide
  Sense strand starting at position 560 of SEQ ID NO: 2532
gcucaucugagucaguuga

SEQ ID NO: 196493 - RNA, 19 nt, Artificial Sequence
  Description of Artificial Sequence: Synthetic oligonucleotide
  Antisense strand to SEQ ID NO: 196492
ucaacugacucagaugagc

SEQ ID NO: 196494 - RNA, 19 nt, Artificial Sequence
  Description of Artificial Sequence: Synthetic oligonucleotide
  Sense strand starting at position 562 of SEQ ID NO: 2532
ucaucugagucaguugaau

SEQ ID NO: 196495 - RNA, 19 nt, Artificial Sequence
  Description of Artificial Sequence: Synthetic oligonucleotide
  Antisense strand to SEQ ID NO: 196494
auucaacugacucagauga

SEQ ID NO: 196496 - RNA, 19 nt, Artificial Sequence
  Description of Artificial Sequence: Synthetic oligonucleotide
  Sense strand starting at position 627 of SEQ ID NO: 2532
auggguauuaaucaugugu

SEQ ID NO: 196497 - RNA, 19 nt, Artificial Sequence
  Description of Artificial Sequence: Synthetic oligonucleotide
  Antisense strand to SEQ ID NO: 196496
acacaugauuaauacccau

SEQ ID NO: 196498 - RNA, 19 nt, Artificial Sequence
  Description of Artificial Sequence: Synthetic oligonucleotide
  Sense strand starting at position 632 of SEQ ID NO: 2532
uauuaaucaugugucagag

SEQ ID NO: 196499 - RNA, 19 nt, Artificial Sequence
  Description of Artificial Sequence: Synthetic oligonucleotide
  Antisense strand to SEQ ID NO: 196498
cucugacacaugauuaaua

SEQ ID NO: 196500 - RNA, 19 nt, Artificial Sequence
  Description of Artificial Sequence: Synthetic oligonucleotide
  Sense strand starting at position 644 of SEQ ID NO: 2532
gucagagauaaaugacagu

SEQ ID NO: 196501 - RNA, 19 nt, Artificial Sequence
  Description of Artificial Sequence: Synthetic oligonucleotide
  Antisense strand to SEQ ID NO: 196500
acugucauuuaucucugac

SEQ ID NO: 196502 - RNA, 19 nt, Artificial Sequence
  Description of Artificial Sequence: Synthetic oligonucleotide
  Sense strand starting at position 667 of SEQ ID NO: 2532
uaaagaauuugauagggug

SEQ ID NO: 196503 - RNA, 19 nt, Artificial Sequence
  Description of Artificial Sequence: Synthetic oligonucleotide
  Antisense strand to SEQ ID NO: 196502
cacccuaucaaauucuuua

SEQ ID NO: 196504 - RNA, 19 nt, Artificial Sequence
  Description of Artificial Sequence: Synthetic oligonucleotide
  Sense strand starting at position 816 of SEQ ID NO: 2532
gagccugaucugcauccua

SEQ ID NO: 196505 - RNA, 19 nt, Artificial Sequence
  Description of Artificial Sequence: Synthetic oligonucleotide
  Antisense strand to SEQ ID NO: 196504
uaggaugcagaucaggcuc

SEQ ID NO: 196506 - RNA, 19 nt, Artificial Sequence
  Description of Artificial Sequence: Synthetic oligonucleotide
  Sense strand starting at position 874 of SEQ ID NO: 2532
uaggcuguggugugauuua

SEQ ID NO: 196507 - RNA, 19 nt, Artificial Sequence
  Description of Artificial Sequence: Synthetic oligonucleotide
  Antisense strand to SEQ ID NO: 196506
uaaaucacaccacagccua

SEQ ID NO: 196508 - RNA, 19 nt, Artificial Sequence
  Description of Artificial Sequence: Synthetic oligonucleotide
  Sense strand starting at position 2231 of SEQ ID NO: 2532
ccgggauggccagagcuaa

SEQ ID NO: 196509 - RNA, 19 nt, Artificial Sequence
  Description of Artificial Sequence: Synthetic oligonucleotide
  Antisense strand to SEQ ID NO: 196508
uuagcucuggccaucccgg

SEQ ID NO: 196510 - RNA, 19 nt, Artificial Sequence
  Description of Artificial Sequence: Synthetic oligonucleotide
  Sense strand starting at position 2254 of SEQ ID NO: 2532
gggagucuguuacuaggga

SEQ ID NO: 196511 - RNA, 19 nt, Artificial Sequence
  Description of Artificial Sequence: Synthetic oligonucleotide
  Antisense strand to SEQ ID NO: 196510
ucccuaguaacagacuccc

SEQ ID NO: 196512 - RNA, 19 nt, Artificial Sequence
  Description of Artificial Sequence: Synthetic oligonucleotide
  Sense strand starting at position 2302 of SEQ ID NO: 2532
aauguauucucccuggaag

SEQ ID NO: 196513 - RNA, 19 nt, Artificial Sequence
  Description of Artificial Sequence: Synthetic oligonucleotide
  Antisense strand to SEQ ID NO: 196512
cuuccagggagaauacauu

SEQ ID NO: 196514 - RNA, 19 nt, Artificial Sequence
  Description of Artificial Sequence: Synthetic oligonucleotide
  Sense strand starting at position 2303 of SEQ ID NO: 2532
auguauucucccuggaagg

SEQ ID NO: 196515 - RNA, 19 nt, Artificial Sequence
  Description of Artificial Sequence: Synthetic oligonucleotide
  Antisense strand to SEQ ID NO: 196514
ccuuccagggagaauacau

SEQ ID NO: 196516 - RNA, 19 nt, Artificial Sequence
  Description of Artificial Sequence: Synthetic oligonucleotide
  Sense strand starting at position 2333 of SEQ ID NO: 2532
agucuuagacuuggaauau

SEQ ID NO: 196517 - RNA, 19 nt, Artificial Sequence
  Description of Artificial Sequence: Synthetic oligonucleotide
  Antisense strand to SEQ ID NO: 196516
auauuccaagucuaagacu

SEQ ID NO: 196518 - RNA, 19 nt, Artificial Sequence
  Description of Artificial Sequence: Synthetic oligonucleotide
  Sense strand starting at position 2371 of SEQ ID NO: 2532
acagcuagccuucggaaga

SEQ ID NO: 196519 - RNA, 19 nt, Artificial Sequence
  Description of Artificial Sequence: Synthetic oligonucleotide
  Antisense strand to SEQ ID NO: 196518
ucuuccgaaggcuagcugu

SEQ ID NO: 196520 - RNA, 19 nt, Artificial Sequence
  Description of Artificial Sequence: Synthetic oligonucleotide
  Sense strand starting at position 2376 of SEQ ID NO: 2532
uagccuucggaagauaauu

SEQ ID NO: 196521 - RNA, 19 nt, Artificial Sequence
  Description of Artificial Sequence: Synthetic oligonucleotide
  Antisense strand to SEQ ID NO: 196520
aauuaucuuccgaaggcua

SEQ ID NO: 196522 - RNA, 19 nt, Artificial Sequence
  Description of Artificial Sequence: Synthetic oligonucleotide
  Sense strand starting at position 2381 of SEQ ID NO: 2532
uucggaagauaauucuauu

SEQ ID NO: 196523 - RNA, 19 nt, Artificial Sequence
  Description of Artificial Sequence: Synthetic oligonucleotide
  Antisense strand to SEQ ID NO: 196522
aauagaauuaucuuccgaa

SEQ ID NO: 196524 - RNA, 19 nt, Artificial Sequence
  Description of Artificial Sequence: Synthetic oligonucleotide
  Sense strand starting at position 2410 of SEQ ID NO: 2532
auagcaauuguuugacuga

SEQ ID NO: 196525 - RNA, 19 nt, Artificial Sequence
  Description of Artificial Sequence: Synthetic oligonucleotide
  Antisense strand to SEQ ID NO: 196524
ucagucaaacaauugcuau

SEQ ID NO: 196526 - RNA, 19 nt, Artificial Sequence
  Description of Artificial Sequence: Synthetic oligonucleotide
  Sense strand starting at position 2413 of SEQ ID NO: 2532
gcaauuguuugacugaauu

SEQ ID NO: 196527 - RNA, 19 nt, Artificial Sequence
  Description of Artificial Sequence: Synthetic oligonucleotide
  Antisense strand to SEQ ID NO: 196526
aauucagucaaacaauugc

SEQ ID NO: 196528 - RNA, 19 nt, Artificial Sequence
  Description of Artificial Sequence: Synthetic oligonucleotide
  Sense strand starting at position 2646 of SEQ ID NO: 2532
cgucucagagcugcucuua

SEQ ID NO: 196529 - RNA, 19 nt, Artificial Sequence
  Description of Artificial Sequence: Synthetic oligonucleotide
  Antisense strand to SEQ ID NO: 196528
uaagagcagcucugagacg

SEQ ID NO: 196530 - RNA, 19 nt, Artificial Sequence
  Description of Artificial Sequence: Synthetic oligonucleotide
  Sense strand starting at position 2794 of SEQ ID NO: 2532
gguguuaagagauagcucu

SEQ ID NO: 196531 - RNA, 19 nt, Artificial Sequence
  Description of Artificial Sequence: Synthetic oligonucleotide
  Antisense strand to SEQ ID NO: 196530
agagcuaucucuuaacacc

SEQ ID NO: 196532 - RNA, 19 nt, Artificial Sequence
  Description of Artificial Sequence: Synthetic oligonucleotide
  Sense strand starting at position 2800 of SEQ ID NO: 2532
aagagauagcucuggacuu

SEQ ID NO: 196533 - RNA, 19 nt, Artificial Sequence
  Description of Artificial Sequence: Synthetic oligonucleotide
  Antisense strand to SEQ ID NO: 196532
aaguccagagcuaucucuu

SEQ ID NO: 196534 - RNA, 19 nt, Artificial Sequence
  Description of Artificial Sequence: Synthetic oligonucleotide
  Sense strand starting at position 2925 of SEQ ID NO: 2532
ucuggccacugaucugaaa

SEQ ID NO: 196535 - RNA, 19 nt, Artificial Sequence
  Description of Artificial Sequence: Synthetic oligonucleotide
  Antisense strand to SEQ ID NO: 196534
uuucagaucaguggccaga

SEQ ID NO: 196536 - RNA, 19 nt, Artificial Sequence
  Description of Artificial Sequence: Synthetic oligonucleotide
  Sense strand starting at position 3059 of SEQ ID NO: 2532
uaggcucaggauugguaau

SEQ ID NO: 196537 - RNA, 19 nt, Artificial Sequence
  Description of Artificial Sequence: Synthetic oligonucleotide
  Antisense strand to SEQ ID NO: 196536
auuaccaauccugagccua

SEQ ID NO: 196538 - RNA, 19 nt, Artificial Sequence
  Description of Artificial Sequence: Synthetic oligonucleotide
  Sense strand starting at position 3060 of SEQ ID NO: 2532
aggcucaggauugguaauu

SEQ ID NO: 196539 - RNA, 19 nt, Artificial Sequence
  Description of Artificial Sequence: Synthetic oligonucleotide
  Antisense strand to SEQ ID NO: 196538
aauuaccaauccugagccu

SEQ ID NO: 196540 - RNA, 19 nt, Artificial Sequence
  Description of Artificial Sequence: Synthetic oligonucleotide
  Sense strand starting at position 3187 of SEQ ID NO: 2532
aggauaaacuugucuuucu

SEQ ID NO: 196541 - RNA, 19 nt, Artificial Sequence
  Description of Artificial Sequence: Synthetic oligonucleotide
  Antisense strand to SEQ ID NO: 196540
agaaagacaaguuuauccu

SEQ ID NO: 196542 - RNA, 19 nt, Artificial Sequence
  Description of Artificial Sequence: Synthetic oligonucleotide
  Sense strand starting at position 3188 of SEQ ID NO: 2532
ggauaaacuugucuuucug

SEQ ID NO: 196543 - RNA, 19 nt, Artificial Sequence
  Description of Artificial Sequence: Synthetic oligonucleotide
  Antisense strand to SEQ ID NO: 196542
cagaaagacaaguuuaucc

SEQ ID NO: 196544 - RNA, 19 nt, Artificial Sequence
  Description of Artificial Sequence: Synthetic oligonucleotide
  Sense strand starting at position 3409 of SEQ ID NO: 2532
aggucugucuggucaaaga

SEQ ID NO: 196545 - RNA, 19 nt, Artificial Sequence
  Description of Artificial Sequence: Synthetic oligonucleotide
  Antisense strand to SEQ ID NO: 196544
ucuuugaccagacagaccu

SEQ ID NO: 196546 - RNA, 19 nt, Artificial Sequence
  Description of Artificial Sequence: Synthetic oligonucleotide
  Sense strand starting at position 3435 of SEQ ID NO: 2532
acguguuauguuuauugag

SEQ ID NO: 196547 - RNA, 19 nt, Artificial Sequence
  Description of Artificial Sequence: Synthetic oligonucleotide
  Antisense strand to SEQ ID NO: 196546
cucaauaaacauaacacgu

SEQ ID NO: 196548 - RNA, 19 nt, Artificial Sequence
  Description of Artificial Sequence: Synthetic oligonucleotide
  Sense strand starting at position 3481 of SEQ ID NO: 2532
gugcuaaugggugaugaga

SEQ ID NO: 196549 - RNA, 19 nt, Artificial Sequence
  Description of Artificial Sequence: Synthetic oligonucleotide
  Antisense strand to SEQ ID NO: 196548
ucucaucacccauuagcac

SEQ ID NO: 196550 - RNA, 19 nt, Artificial Sequence
  Description of Artificial Sequence: Synthetic oligonucleotide
  Sense strand starting at position 3550 of SEQ ID NO: 2532
ugggcucuauaucuuaaua

SEQ ID NO: 196551 - RNA, 19 nt, Artificial Sequence
  Description of Artificial Sequence: Synthetic oligonucleotide
  Antisense strand to SEQ ID NO: 196550
uauuaagauauagagccca

SEQ ID NO: 196552 - RNA, 19 nt, Artificial Sequence
  Description of Artificial Sequence: Synthetic oligonucleotide
  Sense strand starting at position 3861 of SEQ ID NO: 2532
guggcugagcaaugaauca

SEQ ID NO: 196553 - RNA, 19 nt, Artificial Sequence
  Description of Artificial Sequence: Synthetic oligonucleotide
  Antisense strand to SEQ ID NO: 196552
ugauucauugcucagccac

SEQ ID NO: 196554 - RNA, 19 nt, Artificial Sequence
  Description of Artificial Sequence: Synthetic oligonucleotide
  Sense strand starting at position 3899 of SEQ ID NO: 2532
cagaguuugugggcccuaa

SEQ ID NO: 196555 - RNA, 19 nt, Artificial Sequence
  Description of Artificial Sequence: Synthetic oligonucleotide
  Antisense strand to SEQ ID NO: 196554
uuagggcccacaaacucug

SEQ ID NO: 196556 - RNA, 19 nt, Artificial Sequence
  Description of Artificial Sequence: Synthetic oligonucleotide
  Sense strand starting at position 49 of SEQ ID NO: 2533
ggugcugugcaccuuguaa

SEQ ID NO: 196557 - RNA, 19 nt, Artificial Sequence
  Description of Artificial Sequence: Synthetic oligonucleotide
  Antisense strand to SEQ ID NO: 196556
uuacaaggugcacagcacc

SEQ ID NO: 196558 - RNA, 19 nt, Artificial Sequence
  Description of Artificial Sequence: Synthetic oligonucleotide
  Sense strand starting at position 100 of SEQ ID NO: 2533
uggcuugaacucgggaaga

SEQ ID NO: 196559 - RNA, 19 nt, Artificial Sequence
  Description of Artificial Sequence: Synthetic oligonucleotide
  Antisense strand to SEQ ID NO: 196558
ucuucccgaguucaagcca

SEQ ID NO: 196560 - RNA, 19 nt, Artificial Sequence
  Description of Artificial Sequence: Synthetic oligonucleotide
  Sense strand starting at position 102 of SEQ ID NO: 2533
gcuugaacucgggaagaug

SEQ ID NO: 196561 - RNA, 19 nt, Artificial Sequence
  Description of Artificial Sequence: Synthetic oligonucleotide
  Antisense strand to SEQ ID NO: 196560
caucuucccgaguucaagc

SEQ ID NO: 196562 - RNA, 19 nt, Artificial Sequence
  Description of Artificial Sequence: Synthetic oligonucleotide
  Sense strand starting at position 290 of SEQ ID NO: 2533
uauguuugagcccauguaa

SEQ ID NO: 196563 - RNA, 19 nt, Artificial Sequence
  Description of Artificial Sequence: Synthetic oligonucleotide
  Antisense strand to SEQ ID NO: 196562
uuacaugggcucaaacaua

SEQ ID NO: 196564 - RNA, 19 nt, Artificial Sequence
  Description of Artificial Sequence: Synthetic oligonucleotide
  Sense strand starting at position 364 of SEQ ID NO: 2533
gaagcugaccuguaaucuc

SEQ ID NO: 196565 - RNA, 19 nt, Artificial Sequence
  Description of Artificial Sequence: Synthetic oligonucleotide
  Antisense strand to SEQ ID NO: 196564
gagauuacaggucagcuuc

SEQ ID NO: 196566 - RNA, 19 nt, Artificial Sequence
  Description of Artificial Sequence: Synthetic oligonucleotide
  Sense strand starting at position 372 of SEQ ID NO: 2533
ccuguaaucucacucuugu

SEQ ID NO: 196567 - RNA, 19 nt, Artificial Sequence
  Description of Artificial Sequence: Synthetic oligonucleotide
  Antisense strand to SEQ ID NO: 196566
acaagagugagauuacagg

SEQ ID NO: 196568 - RNA, 19 nt, Artificial Sequence
  Description of Artificial Sequence: Synthetic oligonucleotide
  Sense strand starting at position 385 of SEQ ID NO: 2533
ucuuguucuuguucuuaaa

SEQ ID NO: 196569 - RNA, 19 nt, Artificial Sequence
  Description of Artificial Sequence: Synthetic oligonucleotide
  Antisense strand to SEQ ID NO: 196568
uuuaagaacaagaacaaga

SEQ ID NO: 196570 - RNA, 19 nt, Artificial Sequence
  Description of Artificial Sequence: Synthetic oligonucleotide
  Sense strand starting at position 405 of SEQ ID NO: 2533
ccgucaaaugcacaaugaa

SEQ ID NO: 196571 - RNA, 19 nt, Artificial Sequence
  Description of Artificial Sequence: Synthetic oligonucleotide
  Antisense strand to SEQ ID NO: 196570
uucauugugcauuugacgg

SEQ ID NO: 196572 - RNA, 19 nt, Artificial Sequence
  Description of Artificial Sequence: Synthetic oligonucleotide
  Sense strand starting at position 454 of SEQ ID NO: 2533
gguuguuuggauuguggau

SEQ ID NO: 196573 - RNA, 19 nt, Artificial Sequence
  Description of Artificial Sequence: Synthetic oligonucleotide
  Antisense strand to SEQ ID NO: 196572
auccacaauccaaacaacc

SEQ ID NO: 196574 - RNA, 19 nt, Artificial Sequence
  Description of Artificial Sequence: Synthetic oligonucleotide
  Sense strand starting at position 469 of SEQ ID NO: 2533
ggauaaacauaauaaguca

SEQ ID NO: 196575 - RNA, 19 nt, Artificial Sequence
  Description of Artificial Sequence: Synthetic oligonucleotide
  Antisense strand to SEQ ID NO: 196574
ugacuuauuauguuuaucc

SEQ ID NO: 196576 - RNA, 19 nt, Artificial Sequence
  Description of Artificial Sequence: Synthetic oligonucleotide
  Sense strand starting at position 523 of SEQ ID NO: 2533
accacuugauugcuuugaa

SEQ ID NO: 196577 - RNA, 19 nt, Artificial Sequence
  Description of Artificial Sequence: Synthetic oligonucleotide
  Antisense strand to SEQ ID NO: 196576
uucaaagcaaucaaguggu

SEQ ID NO: 196578 - RNA, 19 nt, Artificial Sequence
  Description of Artificial Sequence: Synthetic oligonucleotide
  Sense strand starting at position 524 of SEQ ID NO: 2533
ccacuugauugcuuugaag

SEQ ID NO: 196579 - RNA, 19 nt, Artificial Sequence
  Description of Artificial Sequence: Synthetic oligonucleotide
  Antisense strand to SEQ ID NO: 196578
cuucaaagcaaucaagugg

SEQ ID NO: 196580 - RNA, 19 nt, Artificial Sequence
  Description of Artificial Sequence: Synthetic oligonucleotide
  Sense strand starting at position 526 of SEQ ID NO: 2533
acuugauugcuuugaagaa

SEQ ID NO: 196581 - RNA, 19 nt, Artificial Sequence
  Description of Artificial Sequence: Synthetic oligonucleotide
  Antisense strand to SEQ ID NO: 196580
uucuucaaagcaaucaagu

SEQ ID NO: 196582 - RNA, 19 nt, Artificial Sequence
  Description of Artificial Sequence: Synthetic oligonucleotide
  Sense strand starting at position 563 of SEQ ID NO: 2533
aguguuaaaccuuauccua

SEQ ID NO: 196583 - RNA, 19 nt, Artificial Sequence
  Description of Artificial Sequence: Synthetic oligonucleotide
  Antisense strand to SEQ ID NO: 196582
uaggauaagguuuaacacu

SEQ ID NO: 196584 - RNA, 19 nt, Artificial Sequence
  Description of Artificial Sequence: Synthetic oligonucleotide
  Sense strand starting at position 566 of SEQ ID NO: 2533
guuaaaccuuauccuagga

SEQ ID NO: 196585 - RNA, 19 nt, Artificial Sequence
  Description of Artificial Sequence: Synthetic oligonucleotide
  Antisense strand to SEQ ID NO: 196584
uccuaggauaagguuuaac

SEQ ID NO: 196586 - RNA, 19 nt, Artificial Sequence
  Description of Artificial Sequence: Synthetic oligonucleotide
  Sense strand starting at position 619 of SEQ ID NO: 2533
cccuguuucgcacugguau

SEQ ID NO: 196587 - RNA, 19 nt, Artificial Sequence
  Description of Artificial Sequence: Synthetic oligonucleotide
  Antisense strand to SEQ ID NO: 196586
auaccagugcgaaacaggg

SEQ ID NO: 196588 - RNA, 19 nt, Artificial Sequence
  Description of Artificial Sequence: Synthetic oligonucleotide
  Sense strand starting at position 657 of SEQ ID NO: 2533
uucuguuauuuaggauaga

SEQ ID NO: 196589 - RNA, 19 nt, Artificial Sequence
  Description of Artificial Sequence: Synthetic oligonucleotide
  Antisense strand to SEQ ID NO: 196588
ucuauccuaaauaacagaa

SEQ ID NO: 196590 - RNA, 19 nt, Artificial Sequence
  Description of Artificial Sequence: Synthetic oligonucleotide
  Sense strand starting at position 658 of SEQ ID NO: 2533
ucuguuauuuaggauagaa

SEQ ID NO: 196591 - RNA, 19 nt, Artificial Sequence
  Description of Artificial Sequence: Synthetic oligonucleotide
  Antisense strand to SEQ ID NO: 196590
uucuauccuaaauaacaga

SEQ ID NO: 196592 - RNA, 19 nt, Artificial Sequence
  Description of Artificial Sequence: Synthetic oligonucleotide
  Sense strand starting at position 673 of SEQ ID NO: 2533
agaacaagaugauauccaa

SEQ ID NO: 196593 - RNA, 19 nt, Artificial Sequence
  Description of Artificial Sequence: Synthetic oligonucleotide
  Antisense strand to SEQ ID NO: 196592
uuggauaucaucuuguucu

SEQ ID NO: 196594 - RNA, 19 nt, Artificial Sequence
  Description of Artificial Sequence: Synthetic oligonucleotide
  Sense strand starting at position 735 of SEQ ID NO: 2533
aagugugguguccagguaa

SEQ ID NO: 196595 - RNA, 19 nt, Artificial Sequence
  Description of Artificial Sequence: Synthetic oligonucleotide
  Antisense strand to SEQ ID NO: 196594
uuaccuggacaccacacuu

SEQ ID NO: 196596 - RNA, 19 nt, Artificial Sequence
  Description of Artificial Sequence: Synthetic oligonucleotide
  Sense strand starting at position 747 of SEQ ID NO: 2533
cagguaacccuguguauuu

SEQ ID NO: 196597 - RNA, 19 nt, Artificial Sequence
  Description of Artificial Sequence: Synthetic oligonucleotide
  Antisense strand to SEQ ID NO: 196596
aaauacacaggguuaccug

SEQ ID NO: 196598 - RNA, 19 nt, Artificial Sequence
  Description of Artificial Sequence: Synthetic oligonucleotide
  Sense strand starting at position 844 of SEQ ID NO: 2533
gcaguaaaccuuuguuacu

SEQ ID NO: 196599 - RNA, 19 nt, Artificial Sequence
  Description of Artificial Sequence: Synthetic oligonucleotide
  Antisense strand to SEQ ID NO: 196598
aguaacaaagguuuacugc

SEQ ID NO: 196600 - RNA, 19 nt, Artificial Sequence
  Description of Artificial Sequence: Synthetic oligonucleotide
  Sense strand starting at position 1147 of SEQ ID NO: 2533
cccuuccuccgauagaaga

SEQ ID NO: 196601 - RNA, 19 nt, Artificial Sequence
  Description of Artificial Sequence: Synthetic oligonucleotide
  Antisense strand to SEQ ID NO: 196600
ucuucuaucggaggaaggg

SEQ ID NO: 196602 - RNA, 19 nt, Artificial Sequence
  Description of Artificial Sequence: Synthetic oligonucleotide
  Sense strand starting at position 1173 of SEQ ID NO: 2533
gggccuuugaccgagguua

SEQ ID NO: 196603 - RNA, 19 nt, Artificial Sequence
  Description of Artificial Sequence: Synthetic oligonucleotide
  Antisense strand to SEQ ID NO: 196602
uaaccucggucaaaggccc

SEQ ID NO: 196604 - RNA, 19 nt, Artificial Sequence
  Description of Artificial Sequence: Synthetic oligonucleotide
  Sense strand starting at position 2260 of SEQ ID NO: 2533
guuaaacguguuuagagua

SEQ ID NO: 196605 - RNA, 19 nt, Artificial Sequence
  Description of Artificial Sequence: Synthetic oligonucleotide
  Antisense strand to SEQ ID NO: 196604
uacucuaaacacguuuaac

SEQ ID NO: 196606 - RNA, 19 nt, Artificial Sequence
  Description of Artificial Sequence: Synthetic oligonucleotide
  Sense strand starting at position 2265 of SEQ ID NO: 2533
acguguuuagaguauggaa

SEQ ID NO: 196607 - RNA, 19 nt, Artificial Sequence
  Description of Artificial Sequence: Synthetic oligonucleotide
  Antisense strand to SEQ ID NO: 196606
uuccauacucuaaacacgu

SEQ ID NO: 196608 - RNA, 19 nt, Artificial Sequence
  Description of Artificial Sequence: Synthetic oligonucleotide
  Sense strand starting at position 2267 of SEQ ID NO: 2533
guguuuagaguauggaaag

SEQ ID NO: 196609 - RNA, 19 nt, Artificial Sequence
  Description of Artificial Sequence: Synthetic oligonucleotide
  Antisense strand to SEQ ID NO: 196608
cuuuccauacucuaaacac

SEQ ID NO: 196610 - RNA, 19 nt, Artificial Sequence
  Description of Artificial Sequence: Synthetic oligonucleotide
  Sense strand starting at position 2688 of SEQ ID NO: 2533
ggauuuaaaugagacugcu

SEQ ID NO: 196611 - RNA, 19 nt, Artificial Sequence
  Description of Artificial Sequence: Synthetic oligonucleotide
  Antisense strand to SEQ ID NO: 196610
agcagucucauuuaaaucc

SEQ ID NO: 196612 - RNA, 19 nt, Artificial Sequence
  Description of Artificial Sequence: Synthetic oligonucleotide
  Sense strand starting at position 2691 of SEQ ID NO: 2533
uuuaaaugagacugcugua

SEQ ID NO: 196613 - RNA, 19 nt, Artificial Sequence
  Description of Artificial Sequence: Synthetic oligonucleotide
  Antisense strand to SEQ ID NO: 196612
uacagcagucucauuuaaa

SEQ ID NO: 196614 - RNA, 19 nt, Artificial Sequence
  Description of Artificial Sequence: Synthetic oligonucleotide
  Sense strand starting at position 2749 of SEQ ID NO: 2533
ccagaaauauugcaagaaa

SEQ ID NO: 196615 - RNA, 19 nt, Artificial Sequence
  Description of Artificial Sequence: Synthetic oligonucleotide
  Antisense strand to SEQ ID NO: 196614
uuucuugcaauauuucugg

SEQ ID NO: 196616 - RNA, 19 nt, Artificial Sequence
  Description of Artificial Sequence: Synthetic oligonucleotide
  Sense strand starting at position 2799 of SEQ ID NO: 2533
cucuaauggcuuugcaaau

SEQ ID NO: 196617 - RNA, 19 nt, Artificial Sequence
  Description of Artificial Sequence: Synthetic oligonucleotide
  Antisense strand to SEQ ID NO: 196616
auuugcaaagccauuagag

SEQ ID NO: 196618 - RNA, 19 nt, Artificial Sequence
  Description of Artificial Sequence: Synthetic oligonucleotide
  Sense strand starting at position 2800 of SEQ ID NO: 2533
ucuaauggcuuugcaaaua

SEQ ID NO: 196619 - RNA, 19 nt, Artificial Sequence
  Description of Artificial Sequence: Synthetic oligonucleotide
  Antisense strand to SEQ ID NO: 196618
uauuugcaaagccauuaga

SEQ ID NO: 196620 - RNA, 19 nt, Artificial Sequence
  Description of Artificial Sequence: Synthetic oligonucleotide
  Sense strand starting at position 3020 of SEQ ID NO: 2533
acugcuaaugacugccaua

SEQ ID NO: 196621 - RNA, 19 nt, Artificial Sequence
  Description of Artificial Sequence: Synthetic oligonucleotide
  Antisense strand to SEQ ID NO: 196620
uauggcagucauuagcagu

SEQ ID NO: 196622 - RNA, 19 nt, Artificial Sequence
  Description of Artificial Sequence: Synthetic oligonucleotide
  Sense strand starting at position 3033 of SEQ ID NO: 2533
gccauauugccagauccaa

SEQ ID NO: 196623 - RNA, 19 nt, Artificial Sequence
  Description of Artificial Sequence: Synthetic oligonucleotide
  Antisense strand to SEQ ID NO: 196622
uuggaucuggcaauauggc

SEQ ID NO: 196624 - RNA, 19 nt, Artificial Sequence
  Description of Artificial Sequence: Synthetic oligonucleotide
  Sense strand starting at position 3074 of SEQ ID NO: 2533
agcaacauucgucacaguu

SEQ ID NO: 196625 - RNA, 19 nt, Artificial Sequence
  Description of Artificial Sequence: Synthetic oligonucleotide
  Antisense strand to SEQ ID NO: 196624
aacugugacgaauguugcu

SEQ ID NO: 196626 - RNA, 19 nt, Artificial Sequence
  Description of Artificial Sequence: Synthetic oligonucleotide
  Sense strand starting at position 3307 of SEQ ID NO: 2533
gaaccucaggcuugaguau

SEQ ID NO: 196627 - RNA, 19 nt, Artificial Sequence
  Description of Artificial Sequence: Synthetic oligonucleotide
  Antisense strand to SEQ ID NO: 196626
auacucaagccugagguuc

SEQ ID NO: 196628 - RNA, 19 nt, Artificial Sequence
  Description of Artificial Sequence: Synthetic oligonucleotide
  Sense strand starting at position 3349 of SEQ ID NO: 2533
ggcuaaucagugugucaaa

SEQ ID NO: 196629 - RNA, 19 nt, Artificial Sequence
  Description of Artificial Sequence: Synthetic oligonucleotide
  Antisense strand to SEQ ID NO: 196628
uuugacacacugauuagcc

SEQ ID NO: 196630 - RNA, 19 nt, Artificial Sequence
  Description of Artificial Sequence: Synthetic oligonucleotide
  Sense strand starting at position 3350 of SEQ ID NO: 2533
gcuaaucagugugucaaac

SEQ ID NO: 196631 - RNA, 19 nt, Artificial Sequence
  Description of Artificial Sequence: Synthetic oligonucleotide
  Antisense strand to SEQ ID NO: 196630
guuugacacacugauuagc

SEQ ID NO: 196632 - RNA, 19 nt, Artificial Sequence
  Description of Artificial Sequence: Synthetic oligonucleotide
  Sense strand starting at position 3459 of SEQ ID NO: 2533
ugcccaguggcuuaauaaa

SEQ ID NO: 196633 - RNA, 19 nt, Artificial Sequence
  Description of Artificial Sequence: Synthetic oligonucleotide
  Antisense strand to SEQ ID NO: 196632
uuuauuaagccacugggca

SEQ ID NO: 196634 - RNA, 19 nt, Artificial Sequence
  Description of Artificial Sequence: Synthetic oligonucleotide
  Sense strand starting at position 3551 of SEQ ID NO: 2533
ugcuuugaccuucgaaaca

SEQ ID NO: 196635 - RNA, 19 nt, Artificial Sequence
  Description of Artificial Sequence: Synthetic oligonucleotide
  Antisense strand to SEQ ID NO: 196634
uguuucgaaggucaaagca

SEQ ID NO: 196636 - RNA, 19 nt, Artificial Sequence
  Description of Artificial Sequence: Synthetic oligonucleotide
  Sense strand starting at position 48 of SEQ ID NO: 2534
ggugaucagucuucguuuc

SEQ ID NO: 196637 - RNA, 19 nt, Artificial Sequence
  Description of Artificial Sequence: Synthetic oligonucleotide
  Antisense strand to SEQ ID NO: 196636
gaaacgaagacugaucacc

SEQ ID NO: 196638 - RNA, 19 nt, Artificial Sequence
  Description of Artificial Sequence: Synthetic oligonucleotide
  Sense strand starting at position 49 of SEQ ID NO: 2534
gugaucagucuucguuucu

SEQ ID NO: 196639 - RNA, 19 nt, Artificial Sequence
  Description of Artificial Sequence: Synthetic oligonucleotide
  Antisense strand to SEQ ID NO: 196638
agaaacgaagacugaucac

SEQ ID NO: 196640 - RNA, 19 nt, Artificial Sequence
  Description of Artificial Sequence: Synthetic oligonucleotide
  Sense strand starting at position 50 of SEQ ID NO: 2534
ugaucagucuucguuucuu

SEQ ID NO: 196641 - RNA, 19 nt, Artificial Sequence
  Description of Artificial Sequence: Synthetic oligonucleotide
  Antisense strand to SEQ ID NO: 196640
aagaaacgaagacugauca

SEQ ID NO: 196642 - RNA, 19 nt, Artificial Sequence
  Description of Artificial Sequence: Synthetic oligonucleotide
  Sense strand starting at position 213 of SEQ ID NO: 2534
cagacauuggucuggagag

SEQ ID NO: 196643 - RNA, 19 nt, Artificial Sequence
  Description of Artificial Sequence: Synthetic oligonucleotide
  Antisense strand to SEQ ID NO: 196642
cucuccagaccaaugucug

SEQ ID NO: 196644 - RNA, 19 nt, Artificial Sequence
  Description of Artificial Sequence: Synthetic oligonucleotide
  Sense strand starting at position 215 of SEQ ID NO: 2534
gacauuggucuggagagca

SEQ ID NO: 196645 - RNA, 19 nt, Artificial Sequence
  Description of Artificial Sequence: Synthetic oligonucleotide
  Antisense strand to SEQ ID NO: 196644
ugcucuccagaccaauguc

SEQ ID NO: 196646 - RNA, 19 nt, Artificial Sequence
  Description of Artificial Sequence: Synthetic oligonucleotide
  Sense strand starting at position 273 of SEQ ID NO: 2534
uuggcuauguuccagagga

SEQ ID NO: 196647 - RNA, 19 nt, Artificial Sequence
  Description of Artificial Sequence: Synthetic oligonucleotide
  Antisense strand to SEQ ID NO: 196646
uccucuggaacauagccaa

SEQ ID NO: 196648 - RNA, 19 nt, Artificial Sequence
  Description of Artificial Sequence: Synthetic oligonucleotide
  Sense strand starting at position 275 of SEQ ID NO: 2534
ggcuauguuccagaggauu

SEQ ID NO: 196649 - RNA, 19 nt, Artificial Sequence
  Description of Artificial Sequence: Synthetic oligonucleotide
  Antisense strand to SEQ ID NO: 196648
aauccucuggaacauagcc

SEQ ID NO: 196650 - RNA, 19 nt, Artificial Sequence
  Description of Artificial Sequence: Synthetic oligonucleotide
  Sense strand starting at position 601 of SEQ ID NO: 2534
cggcggaaguccugguuga

SEQ ID NO: 196651 - RNA, 19 nt, Artificial Sequence
  Description of Artificial Sequence: Synthetic oligonucleotide
  Antisense strand to SEQ ID NO: 196650
ucaaccaggacuuccgccg

SEQ ID NO: 196652 - RNA, 19 nt, Artificial Sequence
  Description of Artificial Sequence: Synthetic oligonucleotide
  Sense strand starting at position 602 of SEQ ID NO: 2534
ggcggaaguccugguugaa

SEQ ID NO: 196653 - RNA, 19 nt, Artificial Sequence
  Description of Artificial Sequence: Synthetic oligonucleotide
  Antisense strand to SEQ ID NO: 196652
uucaaccaggacuuccgcc

SEQ ID NO: 196654 - RNA, 19 nt, Artificial Sequence
  Description of Artificial Sequence: Synthetic oligonucleotide
  Sense strand starting at position 605 of SEQ ID NO: 2534
ggaaguccugguugaagau

SEQ ID NO: 196655 - RNA, 19 nt, Artificial Sequence
  Description of Artificial Sequence: Synthetic oligonucleotide
  Antisense strand to SEQ ID NO: 196654
aucuucaaccaggacuucc

SEQ ID NO: 196656 - RNA, 19 nt, Artificial Sequence
  Description of Artificial Sequence: Synthetic oligonucleotide
  Sense strand starting at position 614 of SEQ ID NO: 2534
gguugaagaugguguagau

SEQ ID NO: 196657 - RNA, 19 nt, Artificial Sequence
  Description of Artificial Sequence: Synthetic oligonucleotide
  Antisense strand to SEQ ID NO: 196656
aucuacaccaucuucaacc

SEQ ID NO: 196658 - RNA, 19 nt, Artificial Sequence
  Description of Artificial Sequence: Synthetic oligonucleotide
  Sense strand starting at position 640 of SEQ ID NO: 2534
uucagugagcuguugcagu

SEQ ID NO: 196659 - RNA, 19 nt, Artificial Sequence
  Description of Artificial Sequence: Synthetic oligonucleotide
  Antisense strand to SEQ ID NO: 196658
acugcaacagcucacugaa

SEQ ID NO: 196660 - RNA, 19 nt, Artificial Sequence
  Description of Artificial Sequence: Synthetic oligonucleotide
  Sense strand starting at position 701 of SEQ ID NO: 2534
ugcagugcuucgggcagau

SEQ ID NO: 196661 - RNA, 19 nt, Artificial Sequence
  Description of Artificial Sequence: Synthetic oligonucleotide
  Antisense strand to SEQ ID NO: 196660
aucugcccgaagcacugca

SEQ ID NO: 196662 - RNA, 19 nt, Artificial Sequence
  Description of Artificial Sequence: Synthetic oligonucleotide
  Sense strand starting at position 1163 of SEQ ID NO: 2534
cguugaccucucuggcaga

SEQ ID NO: 196663 - RNA, 19 nt, Artificial Sequence
  Description of Artificial Sequence: Synthetic oligonucleotide
  Antisense strand to SEQ ID NO: 196662
ucugccagagaggucaacg

SEQ ID NO: 196664 - RNA, 19 nt, Artificial Sequence
  Description of Artificial Sequence: Synthetic oligonucleotide
  Sense strand starting at position 1164 of SEQ ID NO: 2534
guugaccucucuggcagaa

SEQ ID NO: 196665 - RNA, 19 nt, Artificial Sequence
  Description of Artificial Sequence: Synthetic oligonucleotide
  Antisense strand to SEQ ID NO: 196664
uucugccagagaggucaac

SEQ ID NO: 196666 - RNA, 19 nt, Artificial Sequence
  Description of Artificial Sequence: Synthetic oligonucleotide
  Sense strand starting at position 1301 of SEQ ID NO: 2534
ugcguuuggcgaucaggua

SEQ ID NO: 196667 - RNA, 19 nt, Artificial Sequence
  Description of Artificial Sequence: Synthetic oligonucleotide
  Antisense strand to SEQ ID NO: 196666
uaccugaucgccaaacgca

SEQ ID NO: 196668 - RNA, 19 nt, Artificial Sequence
  Description of Artificial Sequence: Synthetic oligonucleotide
  Sense strand starting at position 1442 of SEQ ID NO: 2534
ccuggucgcccuuguagau

SEQ ID NO: 196669 - RNA, 19 nt, Artificial Sequence
  Description of Artificial Sequence: Synthetic oligonucleotide
  Antisense strand to SEQ ID NO: 196668
aucuacaagggcgaccagg

SEQ ID NO: 196670 - RNA, 19 nt, Artificial Sequence
  Description of Artificial Sequence: Synthetic oligonucleotide
  Sense strand starting at position 1529 of SEQ ID NO: 2534
gggugcgcuuggaguugua

SEQ ID NO: 196671 - RNA, 19 nt, Artificial Sequence
  Description of Artificial Sequence: Synthetic oligonucleotide
  Antisense strand to SEQ ID NO: 196670
uacaacuccaagcgcaccc

SEQ ID NO: 196672 - RNA, 19 nt, Artificial Sequence
  Description of Artificial Sequence: Synthetic oligonucleotide
  Sense strand starting at position 1685 of SEQ ID NO: 2534
gcucguuggccagcgagaa

SEQ ID NO: 196673 - RNA, 19 nt, Artificial Sequence
  Description of Artificial Sequence: Synthetic oligonucleotide
  Antisense strand to SEQ ID NO: 196672
uucucgcuggccaacgagc

SEQ ID NO: 196674 - RNA, 19 nt, Artificial Sequence
  Description of Artificial Sequence: Synthetic oligonucleotide
  Sense strand starting at position 1686 of SEQ ID NO: 2534
cucguuggccagcgagaaa

SEQ ID NO: 196675 - RNA, 19 nt, Artificial Sequence
  Description of Artificial Sequence: Synthetic oligonucleotide
  Antisense strand to SEQ ID NO: 196674
uuucucgcuggccaacgag

SEQ ID NO: 196676 - RNA, 19 nt, Artificial Sequence
  Description of Artificial Sequence: Synthetic oligonucleotide
  Sense strand starting at position 1811 of SEQ ID NO: 2534
gagcguugccgaagauggu

SEQ ID NO: 196677 - RNA, 19 nt, Artificial Sequence
  Description of Artificial Sequence: Synthetic oligonucleotide
  Antisense strand to SEQ ID NO: 196676
accaucuucggcaacgcuc

SEQ ID NO: 196678 - RNA, 19 nt, Artificial Sequence
  Description of Artificial Sequence: Synthetic oligonucleotide
  Sense strand starting at position 2132 of SEQ ID NO: 2534
cagagaaguuucccaaguu

SEQ ID NO: 196679 - RNA, 19 nt, Artificial Sequence
  Description of Artificial Sequence: Synthetic oligonucleotide
  Antisense strand to SEQ ID NO: 196678
aacuugggaaacuucucug

SEQ ID NO: 196680 - RNA, 19 nt, Artificial Sequence
  Description of Artificial Sequence: Synthetic oligonucleotide
  Sense strand starting at position 2133 of SEQ ID NO: 2534
agagaaguuucccaaguug

SEQ ID NO: 196681 - RNA, 19 nt, Artificial Sequence
  Description of Artificial Sequence: Synthetic oligonucleotide
  Antisense strand to SEQ ID NO: 196680
caacuugggaaacuucucu

SEQ ID NO: 196682 - RNA, 19 nt, Artificial Sequence
  Description of Artificial Sequence: Synthetic oligonucleotide
  Sense strand starting at position 3031 of SEQ ID NO: 2534
gccucaguuuccuccauua

SEQ ID NO: 196683 - RNA, 19 nt, Artificial Sequence
  Description of Artificial Sequence: Synthetic oligonucleotide
  Antisense strand to SEQ ID NO: 196682
uaauggaggaaacugaggc

SEQ ID NO: 196684 - RNA, 19 nt, Artificial Sequence
  Description of Artificial Sequence: Synthetic oligonucleotide
  Sense strand starting at position 3074 of SEQ ID NO: 2534
cuggcuuggacucgaauca

SEQ ID NO: 196685 - RNA, 19 nt, Artificial Sequence
  Description of Artificial Sequence: Synthetic oligonucleotide
  Antisense strand to SEQ ID NO: 196684
ugauucgaguccaagccag

SEQ ID NO: 196686 - RNA, 19 nt, Artificial Sequence
  Description of Artificial Sequence: Synthetic oligonucleotide
  Sense strand starting at position 3204 of SEQ ID NO: 2534
gggacuuugucacacagcu

SEQ ID NO: 196687 - RNA, 19 nt, Artificial Sequence
  Description of Artificial Sequence: Synthetic oligonucleotide
  Antisense strand to SEQ ID NO: 196686
agcugugugacaaaguccc

SEQ ID NO: 196688 - RNA, 19 nt, Artificial Sequence
  Description of Artificial Sequence: Synthetic oligonucleotide
  Sense strand starting at position 3212 of SEQ ID NO: 2534
gucacacagcuccgagaaa

SEQ ID NO: 196689 - RNA, 19 nt, Artificial Sequence
  Description of Artificial Sequence: Synthetic oligonucleotide
  Antisense strand to SEQ ID NO: 196688
uuucucggagcugugugac

SEQ ID NO: 196690 - RNA, 19 nt, Artificial Sequence
  Description of Artificial Sequence: Synthetic oligonucleotide
  Sense strand starting at position 3595 of SEQ ID NO: 2534
aggcauccucuguauaaau

SEQ ID NO: 196691 - RNA, 19 nt, Artificial Sequence
  Description of Artificial Sequence: Synthetic oligonucleotide
  Antisense strand to SEQ ID NO: 196690
auuuauacagaggaugccu

SEQ ID NO: 196692 - RNA, 19 nt, Artificial Sequence
  Description of Artificial Sequence: Synthetic oligonucleotide
  Sense strand starting at position 3808 of SEQ ID NO: 2534
ggguguguugggaguaggu

SEQ ID NO: 196693 - RNA, 19 nt, Artificial Sequence
  Description of Artificial Sequence: Synthetic oligonucleotide
  Antisense strand to SEQ ID NO: 196692
accuacucccaacacaccc

SEQ ID NO: 196694 - RNA, 19 nt, Artificial Sequence
  Description of Artificial Sequence: Synthetic oligonucleotide
  Sense strand starting at position 3848 of SEQ ID NO: 2534
cugucauucugccagacuc

SEQ ID NO: 196695 - RNA, 19 nt, Artificial Sequence
  Description of Artificial Sequence: Synthetic oligonucleotide
  Antisense strand to SEQ ID NO: 196694
gagucuggcagaaugacag

SEQ ID NO: 196696 - RNA, 19 nt, Artificial Sequence
  Description of Artificial Sequence: Synthetic oligonucleotide
  Sense strand starting at position 1770 of SEQ ID NO: 2535
cccgcaaguucagcgaaau

SEQ ID NO: 196697 - RNA, 19 nt, Artificial Sequence
  Description of Artificial Sequence: Synthetic oligonucleotide
  Antisense strand to SEQ ID NO: 196696
auuucgcugaacuugcggg

SEQ ID NO: 196698 - RNA, 19 nt, Artificial Sequence
  Description of Artificial Sequence: Synthetic oligonucleotide
  Sense strand starting at position 1771 of SEQ ID NO: 2535
ccgcaaguucagcgaaaua

SEQ ID NO: 196699 - RNA, 19 nt, Artificial Sequence
  Description of Artificial Sequence: Synthetic oligonucleotide
  Antisense strand to SEQ ID NO: 196698
uauuucgcugaacuugcgg

SEQ ID NO: 196700 - RNA, 19 nt, Artificial Sequence
  Description of Artificial Sequence: Synthetic oligonucleotide
  Sense strand starting at position 1946 of SEQ ID NO: 2535
gggugucgacuucaaacuu

SEQ ID NO: 196701 - RNA, 19 nt, Artificial Sequence
  Description of Artificial Sequence: Synthetic oligonucleotide
  Antisense strand to SEQ ID NO: 196700
aaguuugaagucgacaccc

SEQ ID NO: 196702 - RNA, 19 nt, Artificial Sequence
  Description of Artificial Sequence: Synthetic oligonucleotide
  Sense strand starting at position 2001 of SEQ ID NO: 2535
cuagaagggugauaagagu

SEQ ID NO: 196703 - RNA, 19 nt, Artificial Sequence
  Description of Artificial Sequence: Synthetic oligonucleotide
  Antisense strand to SEQ ID NO: 196702
acucuuaucacccuucuag

SEQ ID NO: 196704 - RNA, 19 nt, Artificial Sequence
  Description of Artificial Sequence: Synthetic oligonucleotide
  Sense strand starting at position 2018 of SEQ ID NO: 2535
guaucaucguggcuccuaa

SEQ ID NO: 196705 - RNA, 19 nt, Artificial Sequence
  Description of Artificial Sequence: Synthetic oligonucleotide
  Antisense strand to SEQ ID NO: 196704
uuaggagccacgaugauac

SEQ ID NO: 196706 - RNA, 19 nt, Artificial Sequence
  Description of Artificial Sequence: Synthetic oligonucleotide
  Sense strand starting at position 2026 of SEQ ID NO: 2535
guggcuccuaaagaguaau

SEQ ID NO: 196707 - RNA, 19 nt, Artificial Sequence
  Description of Artificial Sequence: Synthetic oligonucleotide
  Antisense strand to SEQ ID NO: 196706
auuacucuuuaggagccac

SEQ ID NO: 196708 - RNA, 19 nt, Artificial Sequence
  Description of Artificial Sequence: Synthetic oligonucleotide
  Sense strand starting at position 2029 of SEQ ID NO: 2535
gcuccuaaagaguaauaau

SEQ ID NO: 196709 - RNA, 19 nt, Artificial Sequence
  Description of Artificial Sequence: Synthetic oligonucleotide
  Antisense strand to SEQ ID NO: 196708
auuauuacucuuuaggagc

SEQ ID NO: 196710 - RNA, 19 nt, Artificial Sequence
  Description of Artificial Sequence: Synthetic oligonucleotide
  Sense strand starting at position 2211 of SEQ ID NO: 2535
uccggauucucaccaggga

SEQ ID NO: 196711 - RNA, 19 nt, Artificial Sequence
  Description of Artificial Sequence: Synthetic oligonucleotide
  Antisense strand to SEQ ID NO: 196710
ucccuggugagaauccgga

SEQ ID NO: 196712 - RNA, 19 nt, Artificial Sequence
  Description of Artificial Sequence: Synthetic oligonucleotide
  Sense strand starting at position 2214 of SEQ ID NO: 2535
ggauucucaccagggauuc

SEQ ID NO: 196713 - RNA, 19 nt, Artificial Sequence
  Description of Artificial Sequence: Synthetic oligonucleotide
  Antisense strand to SEQ ID NO: 196712
gaaucccuggugagaaucc

SEQ ID NO: 196714 - RNA, 19 nt, Artificial Sequence
  Description of Artificial Sequence: Synthetic oligonucleotide
  Sense strand starting at position 2420 of SEQ ID NO: 2535
gcgucaagccgaagaguca

SEQ ID NO: 196715 - RNA, 19 nt, Artificial Sequence
  Description of Artificial Sequence: Synthetic oligonucleotide
  Antisense strand to SEQ ID NO: 196714
ugacucuucggcuugacgc

SEQ ID NO: 196716 - RNA, 19 nt, Artificial Sequence
  Description of Artificial Sequence: Synthetic oligonucleotide
  Sense strand starting at position 2524 of SEQ ID NO: 2535
uuuccuauuugagaucgga

SEQ ID NO: 196717 - RNA, 19 nt, Artificial Sequence
  Description of Artificial Sequence: Synthetic oligonucleotide
  Antisense strand to SEQ ID NO: 196716
uccgaucucaaauaggaaa

SEQ ID NO: 196718 - RNA, 19 nt, Artificial Sequence
  Description of Artificial Sequence: Synthetic oligonucleotide
  Sense strand starting at position 2648 of SEQ ID NO: 2535
cagaguuggcaucaacaua

SEQ ID NO: 196719 - RNA, 19 nt, Artificial Sequence
  Description of Artificial Sequence: Synthetic oligonucleotide
  Antisense strand to SEQ ID NO: 196718
uauguugaugccaacucug

SEQ ID NO: 196720 - RNA, 19 nt, Artificial Sequence
  Description of Artificial Sequence: Synthetic oligonucleotide
  Sense strand starting at position 2656 of SEQ ID NO: 2535
gcaucaacauagucugaga

SEQ ID NO: 196721 - RNA, 19 nt, Artificial Sequence
  Description of Artificial Sequence: Synthetic oligonucleotide
  Antisense strand to SEQ ID NO: 196720
ucucagacuauguugaugc

SEQ ID NO: 196722 - RNA, 19 nt, Artificial Sequence
  Description of Artificial Sequence: Synthetic oligonucleotide
  Sense strand starting at position 2725 of SEQ ID NO: 2535
cucucauuagcugaaggua

SEQ ID NO: 196723 - RNA, 19 nt, Artificial Sequence
  Description of Artificial Sequence: Synthetic oligonucleotide
  Antisense strand to SEQ ID NO: 196722
uaccuucagcuaaugagag

SEQ ID NO: 196724 - RNA, 19 nt, Artificial Sequence
  Description of Artificial Sequence: Synthetic oligonucleotide
  Sense strand starting at position 2894 of SEQ ID NO: 2535
uagcauacgccuuguugga

SEQ ID NO: 196725 - RNA, 19 nt, Artificial Sequence
  Description of Artificial Sequence: Synthetic oligonucleotide
  Antisense strand to SEQ ID NO: 196724
uccaacaaggcguaugcua

SEQ ID NO: 196726 - RNA, 19 nt, Artificial Sequence
  Description of Artificial Sequence: Synthetic oligonucleotide
  Sense strand starting at position 2896 of SEQ ID NO: 2535
gcauacgccuuguuggaaa

SEQ ID NO: 196727 - RNA, 19 nt, Artificial Sequence
  Description of Artificial Sequence: Synthetic oligonucleotide
  Antisense strand to SEQ ID NO: 196726
uuuccaacaaggcguaugc

SEQ ID NO: 196728 - RNA, 19 nt, Artificial Sequence
  Description of Artificial Sequence: Synthetic oligonucleotide
  Sense strand starting at position 2907 of SEQ ID NO: 2535
guuggaaauguuugcuuug

SEQ ID NO: 196729 - RNA, 19 nt, Artificial Sequence
  Description of Artificial Sequence: Synthetic oligonucleotide
  Antisense strand to SEQ ID NO: 196728
caaagcaaacauuuccaac

SEQ ID NO: 196730 - RNA, 19 nt, Artificial Sequence
  Description of Artificial Sequence: Synthetic oligonucleotide
  Sense strand starting at position 2912 of SEQ ID NO: 2535
aaauguuugcuuuggcgaa

SEQ ID NO: 196731 - RNA, 19 nt, Artificial Sequence
  Description of Artificial Sequence: Synthetic oligonucleotide
  Antisense strand to SEQ ID NO: 196730
uucgccaaagcaaacauuu

SEQ ID NO: 196732 - RNA, 19 nt, Artificial Sequence
  Description of Artificial Sequence: Synthetic oligonucleotide
  Sense strand starting at position 2914 of SEQ ID NO: 2535
auguuugcuuuggcgaaag

SEQ ID NO: 196733 - RNA, 19 nt, Artificial Sequence
  Description of Artificial Sequence: Synthetic oligonucleotide
  Antisense strand to SEQ ID NO: 196732
cuuucgccaaagcaaacau

SEQ ID NO: 196734 - RNA, 19 nt, Artificial Sequence
  Description of Artificial Sequence: Synthetic oligonucleotide
  Sense strand starting at position 2948 of SEQ ID NO: 2535
gagacagcauucccaggaa

SEQ ID NO: 196735 - RNA, 19 nt, Artificial Sequence
  Description of Artificial Sequence: Synthetic oligonucleotide
  Antisense strand to SEQ ID NO: 196734
uuccugggaaugcugucuc

SEQ ID NO: 196736 - RNA, 19 nt, Artificial Sequence
  Description of Artificial Sequence: Synthetic oligonucleotide
  Sense strand starting at position 2951 of SEQ ID NO: 2535
acagcauucccaggaacaa

SEQ ID NO: 196737 - RNA, 19 nt, Artificial Sequence
  Description of Artificial Sequence: Synthetic oligonucleotide
  Antisense strand to SEQ ID NO: 196736
uuguuccugggaaugcugu

SEQ ID NO: 196738 - RNA, 19 nt, Artificial Sequence
  Description of Artificial Sequence: Synthetic oligonucleotide
  Sense strand starting at position 3029 of SEQ ID NO: 2535
aguucugaggccugaacaa

SEQ ID NO: 196739 - RNA, 19 nt, Artificial Sequence
  Description of Artificial Sequence: Synthetic oligonucleotide
  Antisense strand to SEQ ID NO: 196738
uuguucaggccucagaacu

SEQ ID NO: 196740 - RNA, 19 nt, Artificial Sequence
  Description of Artificial Sequence: Synthetic oligonucleotide
  Sense strand starting at position 3045 of SEQ ID NO: 2535
caagaaauguguccuguuc

SEQ ID NO: 196741 - RNA, 19 nt, Artificial Sequence
  Description of Artificial Sequence: Synthetic oligonucleotide
  Antisense strand to SEQ ID NO: 196740
gaacaggacacauuucuug

SEQ ID NO: 196742 - RNA, 19 nt, Artificial Sequence
  Description of Artificial Sequence: Synthetic oligonucleotide
  Sense strand starting at position 3309 of SEQ ID NO: 2535
augguauagagcugguuga

SEQ ID NO: 196743 - RNA, 19 nt, Artificial Sequence
  Description of Artificial Sequence: Synthetic oligonucleotide
  Antisense strand to SEQ ID NO: 196742
ucaaccagcucuauaccau

SEQ ID NO: 196744 - RNA, 19 nt, Artificial Sequence
  Description of Artificial Sequence: Synthetic oligonucleotide
  Sense strand starting at position 3362 of SEQ ID NO: 2535
cauguaguaacgggcagau

SEQ ID NO: 196745 - RNA, 19 nt, Artificial Sequence
  Description of Artificial Sequence: Synthetic oligonucleotide
  Antisense strand to SEQ ID NO: 196744
aucugcccguuacuacaug

SEQ ID NO: 196746 - RNA, 19 nt, Artificial Sequence
  Description of Artificial Sequence: Synthetic oligonucleotide
  Sense strand starting at position 3409 of SEQ ID NO: 2535
uguguuaauauaugagagu

SEQ ID NO: 196747 - RNA, 19 nt, Artificial Sequence
  Description of Artificial Sequence: Synthetic oligonucleotide
  Antisense strand to SEQ ID NO: 196746
acucucauauauuaacaca

SEQ ID NO: 196748 - RNA, 19 nt, Artificial Sequence
  Description of Artificial Sequence: Synthetic oligonucleotide
  Sense strand starting at position 3526 of SEQ ID NO: 2535
auugauuauuuccaguguu

SEQ ID NO: 196749 - RNA, 19 nt, Artificial Sequence
  Description of Artificial Sequence: Synthetic oligonucleotide
  Antisense strand to SEQ ID NO: 196748
aacacuggaaauaaucaau

SEQ ID NO: 196750 - RNA, 19 nt, Artificial Sequence
  Description of Artificial Sequence: Synthetic oligonucleotide
  Sense strand starting at position 3532 of SEQ ID NO: 2535
uauuuccaguguuauguuu

SEQ ID NO: 196751 - RNA, 19 nt, Artificial Sequence
  Description of Artificial Sequence: Synthetic oligonucleotide
  Antisense strand to SEQ ID NO: 196750
aaacauaacacuggaaaua

SEQ ID NO: 196752 - RNA, 19 nt, Artificial Sequence
  Description of Artificial Sequence: Synthetic oligonucleotide
  Sense strand starting at position 3553 of SEQ ID NO: 2535
auguaauagugucuuggag

SEQ ID NO: 196753 - RNA, 19 nt, Artificial Sequence
  Description of Artificial Sequence: Synthetic oligonucleotide
  Antisense strand to SEQ ID NO: 196752
cuccaagacacuauuacau

SEQ ID NO: 196754 - RNA, 19 nt, Artificial Sequence
  Description of Artificial Sequence: Synthetic oligonucleotide
  Sense strand starting at position 3557 of SEQ ID NO: 2535
aauagugucuuggagaaug

SEQ ID NO: 196755 - RNA, 19 nt, Artificial Sequence
  Description of Artificial Sequence: Synthetic oligonucleotide
  Antisense strand to SEQ ID NO: 196754
cauucuccaagacacuauu

SEQ ID NO: 196756 - RNA, 19 nt, Artificial Sequence
  Description of Artificial Sequence: Synthetic oligonucleotide
  Sense strand starting at position 3592 of SEQ ID NO: 2535
cccaaauaguaguugcaga

SEQ ID NO: 196757 - RNA, 19 nt, Artificial Sequence
  Description of Artificial Sequence: Synthetic oligonucleotide
  Antisense strand to SEQ ID NO: 196756
ucugcaacuacuauuuggg

SEQ ID NO: 196758 - RNA, 19 nt, Artificial Sequence
  Description of Artificial Sequence: Synthetic oligonucleotide
  Sense strand starting at position 3623 of SEQ ID NO: 2535
cuaagcugucauggagaua

SEQ ID NO: 196759 - RNA, 19 nt, Artificial Sequence
  Description of Artificial Sequence: Synthetic oligonucleotide
  Antisense strand to SEQ ID NO: 196758
uaucuccaugacagcuuag

SEQ ID NO: 196760 - RNA, 19 nt, Artificial Sequence
  Description of Artificial Sequence: Synthetic oligonucleotide
  Sense strand starting at position 3686 of SEQ ID NO: 2535
gagccuuuaugggagaucu

SEQ ID NO: 196761 - RNA, 19 nt, Artificial Sequence
  Description of Artificial Sequence: Synthetic oligonucleotide
  Antisense strand to SEQ ID NO: 196760
agaucucccauaaaggcuc

SEQ ID NO: 196762 - RNA, 19 nt, Artificial Sequence
  Description of Artificial Sequence: Synthetic oligonucleotide
  Sense strand starting at position 3688 of SEQ ID NO: 2535
gccuuuaugggagaucuuu

SEQ ID NO: 196763 - RNA, 19 nt, Artificial Sequence
  Description of Artificial Sequence: Synthetic oligonucleotide
  Antisense strand to SEQ ID NO: 196762
aaagaucucccauaaaggc

SEQ ID NO: 196764 - RNA, 19 nt, Artificial Sequence
  Description of Artificial Sequence: Synthetic oligonucleotide
  Sense strand starting at position 3718 of SEQ ID NO: 2535
gguuuaugaagauguuccu

SEQ ID NO: 196765 - RNA, 19 nt, Artificial Sequence
  Description of Artificial Sequence: Synthetic oligonucleotide
  Antisense strand to SEQ ID NO: 196764
aggaacaucuucauaaacc

SEQ ID NO: 196766 - RNA, 19 nt, Artificial Sequence
  Description of Artificial Sequence: Synthetic oligonucleotide
  Sense strand starting at position 3721 of SEQ ID NO: 2535
uuaugaagauguuccuauu

SEQ ID NO: 196767 - RNA, 19 nt, Artificial Sequence
  Description of Artificial Sequence: Synthetic oligonucleotide
  Antisense strand to SEQ ID NO: 196766
aauaggaacaucuucauaa

SEQ ID NO: 196768 - RNA, 19 nt, Artificial Sequence
  Description of Artificial Sequence: Synthetic oligonucleotide
  Sense strand starting at position 3724 of SEQ ID NO: 2535
ugaagauguuccuauuauc

SEQ ID NO: 196769 - RNA, 19 nt, Artificial Sequence
  Description of Artificial Sequence: Synthetic oligonucleotide
  Antisense strand to SEQ ID NO: 196768
gauaauaggaacaucuuca

SEQ ID NO: 196770 - RNA, 19 nt, Artificial Sequence
  Description of Artificial Sequence: Synthetic oligonucleotide
  Sense strand starting at position 3841 of SEQ ID NO: 2535
ggauuagaaugucagaacu

SEQ ID NO: 196771 - RNA, 19 nt, Artificial Sequence
  Description of Artificial Sequence: Synthetic oligonucleotide
  Antisense strand to SEQ ID NO: 196770
aguucugacauucuaaucc

SEQ ID NO: 196772 - RNA, 19 nt, Artificial Sequence
  Description of Artificial Sequence: Synthetic oligonucleotide
  Sense strand starting at position 3843 of SEQ ID NO: 2535
auuagaaugucagaacuaa

SEQ ID NO: 196773 - RNA, 19 nt, Artificial Sequence
  Description of Artificial Sequence: Synthetic oligonucleotide
  Antisense strand to SEQ ID NO: 196772
uuaguucugacauucuaau

SEQ ID NO: 196774 - RNA, 19 nt, Artificial Sequence
  Description of Artificial Sequence: Synthetic oligonucleotide
  Sense strand starting at position 3962 of SEQ ID NO: 2535
gugcuugugaccugagggu

SEQ ID NO: 196775 - RNA, 19 nt, Artificial Sequence
  Description of Artificial Sequence: Synthetic oligonucleotide
  Antisense strand to SEQ ID NO: 196774
acccucaggucacaagcac

SEQ ID NO: 196776 - RNA, 19 nt, Artificial Sequence
  Description of Artificial Sequence: Synthetic oligonucleotide
  Sense strand starting at position 118 of SEQ ID NO: 2536
ccugguuugcuguacaaga

SEQ ID NO: 196777 - RNA, 19 nt, Artificial Sequence
  Description of Artificial Sequence: Synthetic oligonucleotide
  Antisense strand to SEQ ID NO: 196776
ucuuguacagcaaaccagg

SEQ ID NO: 196778 - RNA, 19 nt, Artificial Sequence
  Description of Artificial Sequence: Synthetic oligonucleotide
  Sense strand starting at position 127 of SEQ ID NO: 2536
cuguacaagauguguauga

SEQ ID NO: 196779 - RNA, 19 nt, Artificial Sequence
  Description of Artificial Sequence: Synthetic oligonucleotide
  Antisense strand to SEQ ID NO: 196778
ucauacacaucuuguacag

SEQ ID NO: 196780 - RNA, 19 nt, Artificial Sequence
  Description of Artificial Sequence: Synthetic oligonucleotide
  Sense strand starting at position 129 of SEQ ID NO: 2536
guacaagauguguaugagu

SEQ ID NO: 196781 - RNA, 19 nt, Artificial Sequence
  Description of Artificial Sequence: Synthetic oligonucleotide
  Antisense strand to SEQ ID NO: 196780
acucauacacaucuuguac

SEQ ID NO: 196782 - RNA, 19 nt, Artificial Sequence
  Description of Artificial Sequence: Synthetic oligonucleotide
  Sense strand starting at position 131 of SEQ ID NO: 2536
acaagauguguaugaguac

SEQ ID NO: 196783 - RNA, 19 nt, Artificial Sequence
  Description of Artificial Sequence: Synthetic oligonucleotide
  Antisense strand to SEQ ID NO: 196782
guacucauacacaucuugu

SEQ ID NO: 196784 - RNA, 19 nt, Artificial Sequence
  Description of Artificial Sequence: Synthetic oligonucleotide
  Sense strand starting at position 134 of SEQ ID NO: 2536
agauguguaugaguacaug

SEQ ID NO: 196785 - RNA, 19 nt, Artificial Sequence
  Description of Artificial Sequence: Synthetic oligonucleotide
  Antisense strand to SEQ ID NO: 196784
cauguacucauacacaucu

SEQ ID NO: 196786 - RNA, 19 nt, Artificial Sequence
  Description of Artificial Sequence: Synthetic oligonucleotide
  Sense strand starting at position 137 of SEQ ID NO: 2536
uguguaugaguacauguca

SEQ ID NO: 196787 - RNA, 19 nt, Artificial Sequence
  Description of Artificial Sequence: Synthetic oligonucleotide
  Antisense strand to SEQ ID NO: 196786
ugacauguacucauacaca

SEQ ID NO: 196788 - RNA, 19 nt, Artificial Sequence
  Description of Artificial Sequence: Synthetic oligonucleotide
  Sense strand starting at position 260 of SEQ ID NO: 2536
caguguaaggacuguaaug

SEQ ID NO: 196789 - RNA, 19 nt, Artificial Sequence
  Description of Artificial Sequence: Synthetic oligonucleotide
  Antisense strand to SEQ ID NO: 196788
cauuacaguccuuacacug

SEQ ID NO: 196790 - RNA, 19 nt, Artificial Sequence
  Description of Artificial Sequence: Synthetic oligonucleotide
  Sense strand starting at position 262 of SEQ ID NO: 2536
guguaaggacuguaauguc

SEQ ID NO: 196791 - RNA, 19 nt, Artificial Sequence
  Description of Artificial Sequence: Synthetic oligonucleotide
  Antisense strand to SEQ ID NO: 196790
gacauuacaguccuuacac

SEQ ID NO: 196792 - RNA, 19 nt, Artificial Sequence
  Description of Artificial Sequence: Synthetic oligonucleotide
  Sense strand starting at position 372 of SEQ ID NO: 2536
caaguuugauggcuuaauu

SEQ ID NO: 196793 - RNA, 19 nt, Artificial Sequence
  Description of Artificial Sequence: Synthetic oligonucleotide
  Antisense strand to SEQ ID NO: 196792
aauuaagccaucaaacuug

SEQ ID NO: 196794 - RNA, 19 nt, Artificial Sequence
  Description of Artificial Sequence: Synthetic oligonucleotide
  Sense strand starting at position 552 of SEQ ID NO: 2536
guguuacagaugugggaac

SEQ ID NO: 196795 - RNA, 19 nt, Artificial Sequence
  Description of Artificial Sequence: Synthetic oligonucleotide
  Antisense strand to SEQ ID NO: 196794
guucccacaucuguaacac

SEQ ID NO: 196796 - RNA, 19 nt, Artificial Sequence
  Description of Artificial Sequence: Synthetic oligonucleotide
  Sense strand starting at position 570 of SEQ ID NO: 2536
cuccgaugcagagauguau

SEQ ID NO: 196797 - RNA, 19 nt, Artificial Sequence
  Description of Artificial Sequence: Synthetic oligonucleotide
  Antisense strand to SEQ ID NO: 196796
auacaucucugcaucggag

SEQ ID NO: 196798 - RNA, 19 nt, Artificial Sequence
  Description of Artificial Sequence: Synthetic oligonucleotide
  Sense strand starting at position 608 of SEQ ID NO: 2536
ucauguuagagugggaauu

SEQ ID NO: 196799 - RNA, 19 nt, Artificial Sequence
  Description of Artificial Sequence: Synthetic oligonucleotide
  Antisense strand to SEQ ID NO: 196798
aauucccacucuaacauga

SEQ ID NO: 196800 - RNA, 19 nt, Artificial Sequence
  Description of Artificial Sequence: Synthetic oligonucleotide
  Sense strand starting at position 610 of SEQ ID NO: 2536
auguuagagugggaauuua

SEQ ID NO: 196801 - RNA, 19 nt, Artificial Sequence
  Description of Artificial Sequence: Synthetic oligonucleotide
  Antisense strand to SEQ ID NO: 196800
uaaauucccacucuaacau

SEQ ID NO: 196802 - RNA, 19 nt, Artificial Sequence
  Description of Artificial Sequence: Synthetic oligonucleotide
  Sense strand starting at position 723 of SEQ ID NO: 2536
ugcaguuacgccuagaaca

SEQ ID NO: 196803 - RNA, 19 nt, Artificial Sequence
  Description of Artificial Sequence: Synthetic oligonucleotide
  Antisense strand to SEQ ID NO: 196802
uguucuaggcguaacugca

SEQ ID NO: 196804 - RNA, 19 nt, Artificial Sequence
  Description of Artificial Sequence: Synthetic oligonucleotide
  Sense strand starting at position 743 of SEQ ID NO: 2536
gggaauagcaguugacaga

SEQ ID NO: 196805 - RNA, 19 nt, Artificial Sequence
  Description of Artificial Sequence: Synthetic oligonucleotide
  Antisense strand to SEQ ID NO: 196804
ucugucaacugcuauuccc

SEQ ID NO: 196806 - RNA, 19 nt, Artificial Sequence
  Description of Artificial Sequence: Synthetic oligonucleotide
  Sense strand starting at position 835 of SEQ ID NO: 2536
gggauagcccuagguaaag

SEQ ID NO: 196807 - RNA, 19 nt, Artificial Sequence
  Description of Artificial Sequence: Synthetic oligonucleotide
  Antisense strand to SEQ ID NO: 196806
cuuuaccuagggcuauccc

SEQ ID NO: 196808 - RNA, 19 nt, Artificial Sequence
  Description of Artificial Sequence: Synthetic oligonucleotide
  Sense strand starting at position 850 of SEQ ID NO: 2536
aaaggaaggugcucuugua

SEQ ID NO: 196809 - RNA, 19 nt, Artificial Sequence
  Description of Artificial Sequence: Synthetic oligonucleotide
  Antisense strand to SEQ ID NO: 196808
uacaagagcaccuuccuuu

SEQ ID NO: 196810 - RNA, 19 nt, Artificial Sequence
  Description of Artificial Sequence: Synthetic oligonucleotide
  Sense strand starting at position 985 of SEQ ID NO: 2536
accacuuuguuauuguaaa

SEQ ID NO: 196811 - RNA, 19 nt, Artificial Sequence
  Description of Artificial Sequence: Synthetic oligonucleotide
  Antisense strand to SEQ ID NO: 196810
uuuacaauaacaaaguggu

SEQ ID NO: 196812 - RNA, 19 nt, Artificial Sequence
  Description of Artificial Sequence: Synthetic oligonucleotide
  Sense strand starting at position 1088 of SEQ ID NO: 2536
auaugugagacucgaauag

SEQ ID NO: 196813 - RNA, 19 nt, Artificial Sequence
  Description of Artificial Sequence: Synthetic oligonucleotide
  Antisense strand to SEQ ID NO: 196812
cuauucgagucucacauau

SEQ ID NO: 196814 - RNA, 19 nt, Artificial Sequence
  Description of Artificial Sequence: Synthetic oligonucleotide
  Sense strand starting at position 1170 of SEQ ID NO: 2536
aaaucuggucacuguguau

SEQ ID NO: 196815 - RNA, 19 nt, Artificial Sequence
  Description of Artificial Sequence: Synthetic oligonucleotide
  Antisense strand to SEQ ID NO: 196814
auacacagugaccagauuu

SEQ ID NO: 196816 - RNA, 19 nt, Artificial Sequence
  Description of Artificial Sequence: Synthetic oligonucleotide
  Sense strand starting at position 1249 of SEQ ID NO: 2536
augucauguguauaaauac

SEQ ID NO: 196817 - RNA, 19 nt, Artificial Sequence
  Description of Artificial Sequence: Synthetic oligonucleotide
  Antisense strand to SEQ ID NO: 196816
guauuuauacacaugacau

SEQ ID NO: 196818 - RNA, 19 nt, Artificial Sequence
  Description of Artificial Sequence: Synthetic oligonucleotide
  Sense strand starting at position 1266 of SEQ ID NO: 2536
acaugauguguuuaugcac

SEQ ID NO: 196819 - RNA, 19 nt, Artificial Sequence
  Description of Artificial Sequence: Synthetic oligonucleotide
  Antisense strand to SEQ ID NO: 196818
gugcauaaacacaucaugu

SEQ ID NO: 196820 - RNA, 19 nt, Artificial Sequence
  Description of Artificial Sequence: Synthetic oligonucleotide
  Sense strand starting at position 1683 of SEQ ID NO: 2536
ugaccaacuuuggucacau

SEQ ID NO: 196821 - RNA, 19 nt, Artificial Sequence
  Description of Artificial Sequence: Synthetic oligonucleotide
  Antisense strand to SEQ ID NO: 196820
augugaccaaaguugguca

SEQ ID NO: 196822 - RNA, 19 nt, Artificial Sequence
  Description of Artificial Sequence: Synthetic oligonucleotide
  Sense strand starting at position 2000 of SEQ ID NO: 2536
gagcuuucugaauggcacu

SEQ ID NO: 196823 - RNA, 19 nt, Artificial Sequence
  Description of Artificial Sequence: Synthetic oligonucleotide
  Antisense strand to SEQ ID NO: 196822
agugccauucagaaagcuc

SEQ ID NO: 196824 - RNA, 19 nt, Artificial Sequence
  Description of Artificial Sequence: Synthetic oligonucleotide
  Sense strand starting at position 2011 of SEQ ID NO: 2536
auggcacuuucuguacaaa

SEQ ID NO: 196825 - RNA, 19 nt, Artificial Sequence
  Description of Artificial Sequence: Synthetic oligonucleotide
  Antisense strand to SEQ ID NO: 196824
uuuguacagaaagugccau

SEQ ID NO: 196826 - RNA, 19 nt, Artificial Sequence
  Description of Artificial Sequence: Synthetic oligonucleotide
  Sense strand starting at position 2069 of SEQ ID NO: 2536
guugauagaggaugugaaa

SEQ ID NO: 196827 - RNA, 19 nt, Artificial Sequence
  Description of Artificial Sequence: Synthetic oligonucleotide
  Antisense strand to SEQ ID NO: 196826
uuucacauccucuaucaac

SEQ ID NO: 196828 - RNA, 19 nt, Artificial Sequence
  Description of Artificial Sequence: Synthetic oligonucleotide
  Sense strand starting at position 2239 of SEQ ID NO: 2536
gggagaaggucucuuugac

SEQ ID NO: 196829 - RNA, 19 nt, Artificial Sequence
  Description of Artificial Sequence: Synthetic oligonucleotide
  Antisense strand to SEQ ID NO: 196828
gucaaagagaccuucuccc

SEQ ID NO: 196830 - RNA, 19 nt, Artificial Sequence
  Description of Artificial Sequence: Synthetic oligonucleotide
  Sense strand starting at position 2329 of SEQ ID NO: 2536
gauuaucaagaauguugau

SEQ ID NO: 196831 - RNA, 19 nt, Artificial Sequence
  Description of Artificial Sequence: Synthetic oligonucleotide
  Antisense strand to SEQ ID NO: 196830
aucaacauucuugauaauc

SEQ ID NO: 196832 - RNA, 19 nt, Artificial Sequence
  Description of Artificial Sequence: Synthetic oligonucleotide
  Sense strand starting at position 2357 of SEQ ID NO: 2536
cugcuuaacuuguccaaag

SEQ ID NO: 196833 - RNA, 19 nt, Artificial Sequence
  Description of Artificial Sequence: Synthetic oligonucleotide
  Antisense strand to SEQ ID NO: 196832
cuuuggacaaguuaagcag

SEQ ID NO: 196834 - RNA, 19 nt, Artificial Sequence
  Description of Artificial Sequence: Synthetic oligonucleotide
  Sense strand starting at position 2359 of SEQ ID NO: 2536
gcuuaacuuguccaaagcu

SEQ ID NO: 196835 - RNA, 19 nt, Artificial Sequence
  Description of Artificial Sequence: Synthetic oligonucleotide
  Antisense strand to SEQ ID NO: 196834
agcuuuggacaaguuaagc

SEQ ID NO: 196836 - RNA, 19 nt, Artificial Sequence
  Description of Artificial Sequence: Synthetic oligonucleotide
  Sense strand starting at position 2433 of SEQ ID NO: 2536
cugcauuggaacugugaca

SEQ ID NO: 196837 - RNA, 19 nt, Artificial Sequence
  Description of Artificial Sequence: Synthetic oligonucleotide
  Antisense strand to SEQ ID NO: 196836
ugucacaguuccaaugcag

SEQ ID NO: 196838 - RNA, 19 nt, Artificial Sequence
  Description of Artificial Sequence: Synthetic oligonucleotide
  Sense strand starting at position 2496 of SEQ ID NO: 2536
agucuuaggcaaggaauca

SEQ ID NO: 196839 - RNA, 19 nt, Artificial Sequence
  Description of Artificial Sequence: Synthetic oligonucleotide
  Antisense strand to SEQ ID NO: 196838
ugauuccuugccuaagacu

SEQ ID NO: 196840 - RNA, 19 nt, Artificial Sequence
  Description of Artificial Sequence: Synthetic oligonucleotide
  Sense strand starting at position 2719 of SEQ ID NO: 2536
uugacuucccuguaguguu

SEQ ID NO: 196841 - RNA, 19 nt, Artificial Sequence
  Description of Artificial Sequence: Synthetic oligonucleotide
  Antisense strand to SEQ ID NO: 196840
aacacuacagggaagucaa

SEQ ID NO: 196842 - RNA, 19 nt, Artificial Sequence
  Description of Artificial Sequence: Synthetic oligonucleotide
  Sense strand starting at position 2726 of SEQ ID NO: 2536
cccuguaguguugaccauu

SEQ ID NO: 196843 - RNA, 19 nt, Artificial Sequence
  Description of Artificial Sequence: Synthetic oligonucleotide
  Antisense strand to SEQ ID NO: 196842
aauggucaacacuacaggg

SEQ ID NO: 196844 - RNA, 19 nt, Artificial Sequence
  Description of Artificial Sequence: Synthetic oligonucleotide
  Sense strand starting at position 2965 of SEQ ID NO: 2536
gcuguucuccuggaacauc

SEQ ID NO: 196845 - RNA, 19 nt, Artificial Sequence
  Description of Artificial Sequence: Synthetic oligonucleotide
  Antisense strand to SEQ ID NO: 196844
gauguuccaggagaacagc

SEQ ID NO: 196846 - RNA, 19 nt, Artificial Sequence
  Description of Artificial Sequence: Synthetic oligonucleotide
  Sense strand starting at position 3205 of SEQ ID NO: 2536
cguccuuauccugagaaug

SEQ ID NO: 196847 - RNA, 19 nt, Artificial Sequence
  Description of Artificial Sequence: Synthetic oligonucleotide
  Antisense strand to SEQ ID NO: 196846
cauucucaggauaaggacg

SEQ ID NO: 196848 - RNA, 19 nt, Artificial Sequence
  Description of Artificial Sequence: Synthetic oligonucleotide
  Sense strand starting at position 3254 of SEQ ID NO: 2536
ucccaagcccugggaaauu

SEQ ID NO: 196849 - RNA, 19 nt, Artificial Sequence
  Description of Artificial Sequence: Synthetic oligonucleotide
  Antisense strand to SEQ ID NO: 196848
aauuucccagggcuuggga

SEQ ID NO: 196850 - RNA, 19 nt, Artificial Sequence
  Description of Artificial Sequence: Synthetic oligonucleotide
  Sense strand starting at position 3263 of SEQ ID NO: 2536
cugggaaauuaucccagua

SEQ ID NO: 196851 - RNA, 19 nt, Artificial Sequence
  Description of Artificial Sequence: Synthetic oligonucleotide
  Antisense strand to SEQ ID NO: 196850
uacugggauaauuucccag

SEQ ID NO: 196852 - RNA, 19 nt, Artificial Sequence
  Description of Artificial Sequence: Synthetic oligonucleotide
  Sense strand starting at position 3563 of SEQ ID NO: 2536
ggaauugaaugucuaucua

SEQ ID NO: 196853 - RNA, 19 nt, Artificial Sequence
  Description of Artificial Sequence: Synthetic oligonucleotide
  Antisense strand to SEQ ID NO: 196852
uagauagacauucaauucc

SEQ ID NO: 196854 - RNA, 19 nt, Artificial Sequence
  Description of Artificial Sequence: Synthetic oligonucleotide
  Sense strand starting at position 3781 of SEQ ID NO: 2536
ugugaauacaguuguauug

SEQ ID NO: 196855 - RNA, 19 nt, Artificial Sequence
  Description of Artificial Sequence: Synthetic oligonucleotide
  Antisense strand to SEQ ID NO: 196854
caauacaacuguauucaca

SEQ ID NO: 196856 - RNA, 19 nt, Artificial Sequence
  Description of Artificial Sequence: Synthetic oligonucleotide
  Sense strand starting at position 121 of SEQ ID NO: 2537
uggauucggcaagauguau

SEQ ID NO: 196857 - RNA, 19 nt, Artificial Sequence
  Description of Artificial Sequence: Synthetic oligonucleotide
  Antisense strand to SEQ ID NO: 196856
auacaucuugccgaaucca

SEQ ID NO: 196858 - RNA, 19 nt, Artificial Sequence
  Description of Artificial Sequence: Synthetic oligonucleotide
  Sense strand starting at position 151 of SEQ ID NO: 2537
aggacauauuauccuuguu

SEQ ID NO: 196859 - RNA, 19 nt, Artificial Sequence
  Description of Artificial Sequence: Synthetic oligonucleotide
  Antisense strand to SEQ ID NO: 196858
aacaaggauaauauguccu

SEQ ID NO: 196860 - RNA, 19 nt, Artificial Sequence
  Description of Artificial Sequence: Synthetic oligonucleotide
  Sense strand starting at position 294 of SEQ ID NO: 2537
auauauguguacuuugaag

SEQ ID NO: 196861 - RNA, 19 nt, Artificial Sequence
  Description of Artificial Sequence: Synthetic oligonucleotide
  Antisense strand to SEQ ID NO: 196860
cuucaaaguacacauauau

SEQ ID NO: 196862 - RNA, 19 nt, Artificial Sequence
  Description of Artificial Sequence: Synthetic oligonucleotide
  Sense strand starting at position 296 of SEQ ID NO: 2537
auauguguacuuugaagau

SEQ ID NO: 196863 - RNA, 19 nt, Artificial Sequence
  Description of Artificial Sequence: Synthetic oligonucleotide
  Antisense strand to SEQ ID NO: 196862
aucuucaaaguacacauau

SEQ ID NO: 196864 - RNA, 19 nt, Artificial Sequence
  Description of Artificial Sequence: Synthetic oligonucleotide
  Sense strand starting at position 300 of SEQ ID NO: 2537
guguacuuugaagaucaac

SEQ ID NO: 196865 - RNA, 19 nt, Artificial Sequence
  Description of Artificial Sequence: Synthetic oligonucleotide
  Antisense strand to SEQ ID NO: 196864
guugaucuucaaaguacac

SEQ ID NO: 196866 - RNA, 19 nt, Artificial Sequence
  Description of Artificial Sequence: Synthetic oligonucleotide
  Sense strand starting at position 358 of SEQ ID NO: 2537
uaaugaauaucugcuaggu

SEQ ID NO: 196867 - RNA, 19 nt, Artificial Sequence
  Description of Artificial Sequence: Synthetic oligonucleotide
  Antisense strand to SEQ ID NO: 196866
accuagcagauauucauua

SEQ ID NO: 196868 - RNA, 19 nt, Artificial Sequence
  Description of Artificial Sequence: Synthetic oligonucleotide
  Sense strand starting at position 589 of SEQ ID NO: 2537
uguugaaacauuuguuguc

SEQ ID NO: 196869 - RNA, 19 nt, Artificial Sequence
  Description of Artificial Sequence: Synthetic oligonucleotide
  Antisense strand to SEQ ID NO: 196868
gacaacaaauguuucaaca

SEQ ID NO: 196870 - RNA, 19 nt, Artificial Sequence
  Description of Artificial Sequence: Synthetic oligonucleotide
  Sense strand starting at position 605 of SEQ ID NO: 2537
gucccuagaguuuagcaua

SEQ ID NO: 196871 - RNA, 19 nt, Artificial Sequence
  Description of Artificial Sequence: Synthetic oligonucleotide
  Antisense strand to SEQ ID NO: 196870
uaugcuaaacucuagggac

SEQ ID NO: 196872 - RNA, 19 nt, Artificial Sequence
  Description of Artificial Sequence: Synthetic oligonucleotide
  Sense strand starting at position 850 of SEQ ID NO: 2537
acauguaugagucaguucu

SEQ ID NO: 196873 - RNA, 19 nt, Artificial Sequence
  Description of Artificial Sequence: Synthetic oligonucleotide
  Antisense strand to SEQ ID NO: 196872
agaacugacucauacaugu

SEQ ID NO: 196874 - RNA, 19 nt, Artificial Sequence
  Description of Artificial Sequence: Synthetic oligonucleotide
  Sense strand starting at position 1101 of SEQ ID NO: 2537
uuucuugaagagugcaaga

SEQ ID NO: 196875 - RNA, 19 nt, Artificial Sequence
  Description of Artificial Sequence: Synthetic oligonucleotide
  Antisense strand to SEQ ID NO: 196874
ucuugcacucuucaagaaa

SEQ ID NO: 196876 - RNA, 19 nt, Artificial Sequence
  Description of Artificial Sequence: Synthetic oligonucleotide
  Sense strand starting at position 1338 of SEQ ID NO: 2537
ugaacagcucccuggagaa

SEQ ID NO: 196877 - RNA, 19 nt, Artificial Sequence
  Description of Artificial Sequence: Synthetic oligonucleotide
  Antisense strand to SEQ ID NO: 196876
uucuccagggagcuguuca

SEQ ID NO: 196878 - RNA, 19 nt, Artificial Sequence
  Description of Artificial Sequence: Synthetic oligonucleotide
  Sense strand starting at position 1369 of SEQ ID NO: 2537
ggagcuuugggagguggaa

SEQ ID NO: 196879 - RNA, 19 nt, Artificial Sequence
  Description of Artificial Sequence: Synthetic oligonucleotide
  Antisense strand to SEQ ID NO: 196878
uuccaccucccaaagcucc

SEQ ID NO: 196880 - RNA, 19 nt, Artificial Sequence
  Description of Artificial Sequence: Synthetic oligonucleotide
  Sense strand starting at position 2326 of SEQ ID NO: 2537
auuguaaagguuuggaaau

SEQ ID NO: 196881 - RNA, 19 nt, Artificial Sequence
  Description of Artificial Sequence: Synthetic oligonucleotide
  Antisense strand to SEQ ID NO: 196880
auuuccaaaccuuuacaau

SEQ ID NO: 196882 - RNA, 19 nt, Artificial Sequence
  Description of Artificial Sequence: Synthetic oligonucleotide
  Sense strand starting at position 2468 of SEQ ID NO: 2537
ggaagaagcugauauuuaa

SEQ ID NO: 196883 - RNA, 19 nt, Artificial Sequence
  Description of Artificial Sequence: Synthetic oligonucleotide
  Antisense strand to SEQ ID NO: 196882
uuaaauaucagcuucuucc

SEQ ID NO: 196884 - RNA, 19 nt, Artificial Sequence
  Description of Artificial Sequence: Synthetic oligonucleotide
  Sense strand starting at position 2490 of SEQ ID NO: 2537
auaacaagagguugcgaua

SEQ ID NO: 196885 - RNA, 19 nt, Artificial Sequence
  Description of Artificial Sequence: Synthetic oligonucleotide
  Antisense strand to SEQ ID NO: 196884
uaucgcaaccucuuguuau

SEQ ID NO: 196886 - RNA, 19 nt, Artificial Sequence
  Description of Artificial Sequence: Synthetic oligonucleotide
  Sense strand starting at position 2499 of SEQ ID NO: 2537
gguugcgauaaauagaauu

SEQ ID NO: 196887 - RNA, 19 nt, Artificial Sequence
  Description of Artificial Sequence: Synthetic oligonucleotide
  Antisense strand to SEQ ID NO: 196886
aauucuauuuaucgcaacc

SEQ ID NO: 196888 - RNA, 19 nt, Artificial Sequence
  Description of Artificial Sequence: Synthetic oligonucleotide
  Sense strand starting at position 2509 of SEQ ID NO: 2537
aauagaauuuaagguggga

SEQ ID NO: 196889 - RNA, 19 nt, Artificial Sequence
  Description of Artificial Sequence: Synthetic oligonucleotide
  Antisense strand to SEQ ID NO: 196888
ucccaccuuaaauucuauu

SEQ ID NO: 196890 - RNA, 19 nt, Artificial Sequence
  Description of Artificial Sequence: Synthetic oligonucleotide
  Sense strand starting at position 2588 of SEQ ID NO: 2537
uuggcuaauggauggagaa

SEQ ID NO: 196891 - RNA, 19 nt, Artificial Sequence
  Description of Artificial Sequence: Synthetic oligonucleotide
  Antisense strand to SEQ ID NO: 196890
uucuccauccauuagccaa

SEQ ID NO: 196892 - RNA, 19 nt, Artificial Sequence
  Description of Artificial Sequence: Synthetic oligonucleotide
  Sense strand starting at position 2723 of SEQ ID NO: 2537
aucaucaguccugaacagu

SEQ ID NO: 196893 - RNA, 19 nt, Artificial Sequence
  Description of Artificial Sequence: Synthetic oligonucleotide
  Antisense strand to SEQ ID NO: 196892
acuguucaggacugaugau

SEQ ID NO: 196894 - RNA, 19 nt, Artificial Sequence
  Description of Artificial Sequence: Synthetic oligonucleotide
  Sense strand starting at position 2731 of SEQ ID NO: 2537
uccugaacaguugauuauu

SEQ ID NO: 196895 - RNA, 19 nt, Artificial Sequence
  Description of Artificial Sequence: Synthetic oligonucleotide
  Antisense strand to SEQ ID NO: 196894
aauaaucaacuguucagga

SEQ ID NO: 196896 - RNA, 19 nt, Artificial Sequence
  Description of Artificial Sequence: Synthetic oligonucleotide
  Sense strand starting at position 2862 of SEQ ID NO: 2537
acaggauuaugauuacugu

SEQ ID NO: 196897 - RNA, 19 nt, Artificial Sequence
  Description of Artificial Sequence: Synthetic oligonucleotide
  Antisense strand to SEQ ID NO: 196896
acaguaaucauaauccugu

SEQ ID NO: 196898 - RNA, 19 nt, Artificial Sequence
  Description of Artificial Sequence: Synthetic oligonucleotide
  Sense strand starting at position 2872 of SEQ ID NO: 2537
gauuacugucucggaugau

SEQ ID NO: 196899 - RNA, 19 nt, Artificial Sequence
  Description of Artificial Sequence: Synthetic oligonucleotide
  Antisense strand to SEQ ID NO: 196898
aucauccgagacaguaauc

SEQ ID NO: 196900 - RNA, 19 nt, Artificial Sequence
  Description of Artificial Sequence: Synthetic oligonucleotide
  Sense strand starting at position 2952 of SEQ ID NO: 2537
acgucugcaucaguaauuu

SEQ ID NO: 196901 - RNA, 19 nt, Artificial Sequence
  Description of Artificial Sequence: Synthetic oligonucleotide
  Antisense strand to SEQ ID NO: 196900
aaauuacugaugcagacgu

SEQ ID NO: 196902 - RNA, 19 nt, Artificial Sequence
  Description of Artificial Sequence: Synthetic oligonucleotide
  Sense strand starting at position 3004 of SEQ ID NO: 2537
ucagcaguuacgcaaagaa

SEQ ID NO: 196903 - RNA, 19 nt, Artificial Sequence
  Description of Artificial Sequence: Synthetic oligonucleotide
  Antisense strand to SEQ ID NO: 196902
uucuuugcguaacugcuga

SEQ ID NO: 196904 - RNA, 19 nt, Artificial Sequence
  Description of Artificial Sequence: Synthetic oligonucleotide
  Sense strand starting at position 3142 of SEQ ID NO: 2537
ugcaauguucuagacaaau

SEQ ID NO: 196905 - RNA, 19 nt, Artificial Sequence
  Description of Artificial Sequence: Synthetic oligonucleotide
  Antisense strand to SEQ ID NO: 196904
auuugucuagaacauugca

SEQ ID NO: 196906 - RNA, 19 nt, Artificial Sequence
  Description of Artificial Sequence: Synthetic oligonucleotide
  Sense strand starting at position 3182 of SEQ ID NO: 2537
acccgcauuugucucuuua

SEQ ID NO: 196907 - RNA, 19 nt, Artificial Sequence
  Description of Artificial Sequence: Synthetic oligonucleotide
  Antisense strand to SEQ ID NO: 196906
uaaagagacaaaugcgggu

SEQ ID NO: 196908 - RNA, 19 nt, Artificial Sequence
  Description of Artificial Sequence: Synthetic oligonucleotide
  Sense strand starting at position 3186 of SEQ ID NO: 2537
gcauuugucucuuuacuau

SEQ ID NO: 196909 - RNA, 19 nt, Artificial Sequence
  Description of Artificial Sequence: Synthetic oligonucleotide
  Antisense strand to SEQ ID NO: 196908
auaguaaagagacaaaugc

SEQ ID NO: 196910 - RNA, 19 nt, Artificial Sequence
  Description of Artificial Sequence: Synthetic oligonucleotide
  Sense strand starting at position 3224 of SEQ ID NO: 2537
cggagacugcaucacuuua

SEQ ID NO: 196911 - RNA, 19 nt, Artificial Sequence
  Description of Artificial Sequence: Synthetic oligonucleotide
  Antisense strand to SEQ ID NO: 196910
uaaagugaugcagucuccg

SEQ ID NO: 196912 - RNA, 19 nt, Artificial Sequence
  Description of Artificial Sequence: Synthetic oligonucleotide
  Sense strand starting at position 3288 of SEQ ID NO: 2537
uugcucagucacuaaagua

SEQ ID NO: 196913 - RNA, 19 nt, Artificial Sequence
  Description of Artificial Sequence: Synthetic oligonucleotide
  Antisense strand to SEQ ID NO: 196912
uacuuuagugacugagcaa

SEQ ID NO: 196914 - RNA, 19 nt, Artificial Sequence
  Description of Artificial Sequence: Synthetic oligonucleotide
  Sense strand starting at position 3361 of SEQ ID NO: 2537
gguuuagcucgugugcaag

SEQ ID NO: 196915 - RNA, 19 nt, Artificial Sequence
  Description of Artificial Sequence: Synthetic oligonucleotide
  Antisense strand to SEQ ID NO: 196914
cuugcacacgagcuaaacc

SEQ ID NO: 196916 - RNA, 19 nt, Artificial Sequence
  Description of Artificial Sequence: Synthetic oligonucleotide
  Sense strand starting at position 3367 of SEQ ID NO: 2537
gcucgugugcaagcuugaa

SEQ ID NO: 196917 - RNA, 19 nt, Artificial Sequence
  Description of Artificial Sequence: Synthetic oligonucleotide
  Antisense strand to SEQ ID NO: 196916
uucaagcuugcacacgagc

SEQ ID NO: 196918 - RNA, 19 nt, Artificial Sequence
  Description of Artificial Sequence: Synthetic oligonucleotide
  Sense strand starting at position 3369 of SEQ ID NO: 2537
ucgugugcaagcuugaauu

SEQ ID NO: 196919 - RNA, 19 nt, Artificial Sequence
  Description of Artificial Sequence: Synthetic oligonucleotide
  Antisense strand to SEQ ID NO: 196918
aauucaagcuugcacacga

SEQ ID NO: 196920 - RNA, 19 nt, Artificial Sequence
  Description of Artificial Sequence: Synthetic oligonucleotide
  Sense strand starting at position 3660 of SEQ ID NO: 2537
acuaacuuguaauugguaa

SEQ ID NO: 196921 - RNA, 19 nt, Artificial Sequence
  Description of Artificial Sequence: Synthetic oligonucleotide
  Antisense strand to SEQ ID NO: 196920
uuaccaauuacaaguuagu

SEQ ID NO: 196922 - RNA, 19 nt, Artificial Sequence
  Description of Artificial Sequence: Synthetic oligonucleotide
  Sense strand starting at position 3667 of SEQ ID NO: 2537
uguaauugguaaucuuaca

SEQ ID NO: 196923 - RNA, 19 nt, Artificial Sequence
  Description of Artificial Sequence: Synthetic oligonucleotide
  Antisense strand to SEQ ID NO: 196922
uguaagauuaccaauuaca

SEQ ID NO: 196924 - RNA, 19 nt, Artificial Sequence
  Description of Artificial Sequence: Synthetic oligonucleotide
  Sense strand starting at position 3679 of SEQ ID NO: 2537
ucuuacauguaauuccgaa

SEQ ID NO: 196925 - RNA, 19 nt, Artificial Sequence
  Description of Artificial Sequence: Synthetic oligonucleotide
  Antisense strand to SEQ ID NO: 196924
uucggaauuacauguaaga

SEQ ID NO: 196926 - RNA, 19 nt, Artificial Sequence
  Description of Artificial Sequence: Synthetic oligonucleotide
  Sense strand starting at position 3703 of SEQ ID NO: 2537
ugcccuaaugcucaugaca

SEQ ID NO: 196927 - RNA, 19 nt, Artificial Sequence
  Description of Artificial Sequence: Synthetic oligonucleotide
  Antisense strand to SEQ ID NO: 196926
ugucaugagcauuagggca

SEQ ID NO: 196928 - RNA, 19 nt, Artificial Sequence
  Description of Artificial Sequence: Synthetic oligonucleotide
  Sense strand starting at position 3757 of SEQ ID NO: 2537
aggugauaaaucuguggga

SEQ ID NO: 196929 - RNA, 19 nt, Artificial Sequence
  Description of Artificial Sequence: Synthetic oligonucleotide
  Antisense strand to SEQ ID NO: 196928
ucccacagauuuaucaccu

SEQ ID NO: 196930 - RNA, 19 nt, Artificial Sequence
  Description of Artificial Sequence: Synthetic oligonucleotide
  Sense strand starting at position 3758 of SEQ ID NO: 2537
ggugauaaaucugugggaa

SEQ ID NO: 196931 - RNA, 19 nt, Artificial Sequence
  Description of Artificial Sequence: Synthetic oligonucleotide
  Antisense strand to SEQ ID NO: 196930
uucccacagauuuaucacc

SEQ ID NO: 196932 - RNA, 19 nt, Artificial Sequence
  Description of Artificial Sequence: Synthetic oligonucleotide
  Sense strand starting at position 3759 of SEQ ID NO: 2537
gugauaaaucugugggaaa

SEQ ID NO: 196933 - RNA, 19 nt, Artificial Sequence
  Description of Artificial Sequence: Synthetic oligonucleotide
  Antisense strand to SEQ ID NO: 196932
uuucccacagauuuaucac

SEQ ID NO: 196934 - RNA, 19 nt, Artificial Sequence
  Description of Artificial Sequence: Synthetic oligonucleotide
  Sense strand starting at position 3909 of SEQ ID NO: 2537
uguuguauuuacuucuagu

SEQ ID NO: 196935 - RNA, 19 nt, Artificial Sequence
  Description of Artificial Sequence: Synthetic oligonucleotide
  Antisense strand to SEQ ID NO: 196934
acuagaaguaaauacaaca

SEQ ID NO: 196936 - RNA, 19 nt, Artificial Sequence
  Description of Artificial Sequence: Synthetic oligonucleotide
  Sense strand starting at position 12 of SEQ ID NO: 2538
ggguuaguaguucagacua

SEQ ID NO: 196937 - RNA, 19 nt, Artificial Sequence
  Description of Artificial Sequence: Synthetic oligonucleotide
  Antisense strand to SEQ ID NO: 196936
uagucugaacuacuaaccc

SEQ ID NO: 196938 - RNA, 19 nt, Artificial Sequence
  Description of Artificial Sequence: Synthetic oligonucleotide
  Sense strand starting at position 48 of SEQ ID NO: 2538
gccucucugugggcugaua

SEQ ID NO: 196939 - RNA, 19 nt, Artificial Sequence
  Description of Artificial Sequence: Synthetic oligonucleotide
  Antisense strand to SEQ ID NO: 196938
uaucagcccacagagaggc

SEQ ID NO: 196940 - RNA, 19 nt, Artificial Sequence
  Description of Artificial Sequence: Synthetic oligonucleotide
  Sense strand starting at position 150 of SEQ ID NO: 2538
aauguuccucaauagaggu

SEQ ID NO: 196941 - RNA, 19 nt, Artificial Sequence
  Description of Artificial Sequence: Synthetic oligonucleotide
  Antisense strand to SEQ ID NO: 196940
accucuauugaggaacauu

SEQ ID NO: 196942 - RNA, 19 nt, Artificial Sequence
  Description of Artificial Sequence: Synthetic oligonucleotide
  Sense strand starting at position 182 of SEQ ID NO: 2538
cuguauuauggacaagcca

SEQ ID NO: 196943 - RNA, 19 nt, Artificial Sequence
  Description of Artificial Sequence: Synthetic oligonucleotide
  Antisense strand to SEQ ID NO: 196942
uggcuuguccauaauacag

SEQ ID NO: 196944 - RNA, 19 nt, Artificial Sequence
  Description of Artificial Sequence: Synthetic oligonucleotide
  Sense strand starting at position 243 of SEQ ID NO: 2538
gggagaaagugcugaucaa

SEQ ID NO: 196945 - RNA, 19 nt, Artificial Sequence
  Description of Artificial Sequence: Synthetic oligonucleotide
  Antisense strand to SEQ ID NO: 196944
uugaucagcacuuucuccc

SEQ ID NO: 196946 - RNA, 19 nt, Artificial Sequence
  Description of Artificial Sequence: Synthetic oligonucleotide
  Sense strand starting at position 247 of SEQ ID NO: 2538
gaaagugcugaucaacugu

SEQ ID NO: 196947 - RNA, 19 nt, Artificial Sequence
  Description of Artificial Sequence: Synthetic oligonucleotide
  Antisense strand to SEQ ID NO: 196946
acaguugaucagcacuuuc

SEQ ID NO: 196948 - RNA, 19 nt, Artificial Sequence
  Description of Artificial Sequence: Synthetic oligonucleotide
  Sense strand starting at position 253 of SEQ ID NO: 2538
gcugaucaacuguggcuaa

SEQ ID NO: 196949 - RNA, 19 nt, Artificial Sequence
  Description of Artificial Sequence: Synthetic oligonucleotide
  Antisense strand to SEQ ID NO: 196948
uuagccacaguugaucagc

SEQ ID NO: 196950 - RNA, 19 nt, Artificial Sequence
  Description of Artificial Sequence: Synthetic oligonucleotide
  Sense strand starting at position 256 of SEQ ID NO: 2538
gaucaacuguggcuaagau

SEQ ID NO: 196951 - RNA, 19 nt, Artificial Sequence
  Description of Artificial Sequence: Synthetic oligonucleotide
  Antisense strand to SEQ ID NO: 196950
aucuuagccacaguugauc

SEQ ID NO: 196952 - RNA, 19 nt, Artificial Sequence
  Description of Artificial Sequence: Synthetic oligonucleotide
  Sense strand starting at position 257 of SEQ ID NO: 2538
aucaacuguggcuaagaua

SEQ ID NO: 196953 - RNA, 19 nt, Artificial Sequence
  Description of Artificial Sequence: Synthetic oligonucleotide
  Antisense strand to SEQ ID NO: 196952
uaucuuagccacaguugau

SEQ ID NO: 196954 - RNA, 19 nt, Artificial Sequence
  Description of Artificial Sequence: Synthetic oligonucleotide
  Sense strand starting at position 260 of SEQ ID NO: 2538
aacuguggcuaagauauga

SEQ ID NO: 196955 - RNA, 19 nt, Artificial Sequence
  Description of Artificial Sequence: Synthetic oligonucleotide
  Antisense strand to SEQ ID NO: 196954
ucauaucuuagccacaguu

SEQ ID NO: 196956 - RNA, 19 nt, Artificial Sequence
  Description of Artificial Sequence: Synthetic oligonucleotide
  Sense strand starting at position 317 of SEQ ID NO: 2538
gugagucuuggccggacca

SEQ ID NO: 196957 - RNA, 19 nt, Artificial Sequence
  Description of Artificial Sequence: Synthetic oligonucleotide
  Antisense strand to SEQ ID NO: 196956
ugguccggccaagacucac

SEQ ID NO: 196958 - RNA, 19 nt, Artificial Sequence
  Description of Artificial Sequence: Synthetic oligonucleotide
  Sense strand starting at position 318 of SEQ ID NO: 2538
ugagucuuggccggaccaa

SEQ ID NO: 196959 - RNA, 19 nt, Artificial Sequence
  Description of Artificial Sequence: Synthetic oligonucleotide
  Antisense strand to SEQ ID NO: 196958
uugguccggccaagacuca

SEQ ID NO: 196960 - RNA, 19 nt, Artificial Sequence
  Description of Artificial Sequence: Synthetic oligonucleotide
  Sense strand starting at position 319 of SEQ ID NO: 2538
gagucuuggccggaccaaa

SEQ ID NO: 196961 - RNA, 19 nt, Artificial Sequence
  Description of Artificial Sequence: Synthetic oligonucleotide
  Antisense strand to SEQ ID NO: 196960
uuugguccggccaagacuc

SEQ ID NO: 196962 - RNA, 19 nt, Artificial Sequence
  Description of Artificial Sequence: Synthetic oligonucleotide
  Sense strand starting at position 608 of SEQ ID NO: 2538
ggguucuuccucuaaucca

SEQ ID NO: 196963 - RNA, 19 nt, Artificial Sequence
  Description of Artificial Sequence: Synthetic oligonucleotide
  Antisense strand to SEQ ID NO: 196962
uggauuagaggaagaaccc

SEQ ID NO: 196964 - RNA, 19 nt, Artificial Sequence
  Description of Artificial Sequence: Synthetic oligonucleotide
  Sense strand starting at position 823 of SEQ ID NO: 2538
ggcagcacuucucagaaca

SEQ ID NO: 196965 - RNA, 19 nt, Artificial Sequence
  Description of Artificial Sequence: Synthetic oligonucleotide
  Antisense strand to SEQ ID NO: 196964
uguucugagaagugcugcc

SEQ ID NO: 196966 - RNA, 19 nt, Artificial Sequence
  Description of Artificial Sequence: Synthetic oligonucleotide
  Sense strand starting at position 978 of SEQ ID NO: 2538
gccacuuucccgcaggaga

SEQ ID NO: 196967 - RNA, 19 nt, Artificial Sequence
  Description of Artificial Sequence: Synthetic oligonucleotide
  Antisense strand to SEQ ID NO: 196966
ucuccugcgggaaaguggc

SEQ ID NO: 196968 - RNA, 19 nt, Artificial Sequence
  Description of Artificial Sequence: Synthetic oligonucleotide
  Sense strand starting at position 993 of SEQ ID NO: 2538
gagagacucuauuguccac

SEQ ID NO: 196969 - RNA, 19 nt, Artificial Sequence
  Description of Artificial Sequence: Synthetic oligonucleotide
  Antisense strand to SEQ ID NO: 196968
guggacaauagagucucuc

SEQ ID NO: 196970 - RNA, 19 nt, Artificial Sequence
  Description of Artificial Sequence: Synthetic oligonucleotide
  Sense strand starting at position 996 of SEQ ID NO: 2538
agacucuauuguccacgau

SEQ ID NO: 196971 - RNA, 19 nt, Artificial Sequence
  Description of Artificial Sequence: Synthetic oligonucleotide
  Antisense strand to SEQ ID NO: 196970
aucguggacaauagagucu

SEQ ID NO: 196972 - RNA, 19 nt, Artificial Sequence
  Description of Artificial Sequence: Synthetic oligonucleotide
  Sense strand starting at position 999 of SEQ ID NO: 2538
cucuauuguccacgaucaa

SEQ ID NO: 196973 - RNA, 19 nt, Artificial Sequence
  Description of Artificial Sequence: Synthetic oligonucleotide
  Antisense strand to SEQ ID NO: 196972
uugaucguggacaauagag

SEQ ID NO: 196974 - RNA, 19 nt, Artificial Sequence
  Description of Artificial Sequence: Synthetic oligonucleotide
  Sense strand starting at position 1000 of SEQ ID NO: 2538
ucuauuguccacgaucaaa

SEQ ID NO: 196975 - RNA, 19 nt, Artificial Sequence
  Description of Artificial Sequence: Synthetic oligonucleotide
  Antisense strand to SEQ ID NO: 196974
uuugaucguggacaauaga

SEQ ID NO: 196976 - RNA, 19 nt, Artificial Sequence
  Description of Artificial Sequence: Synthetic oligonucleotide
  Sense strand starting at position 1003 of SEQ ID NO: 2538
auuguccacgaucaaauua

SEQ ID NO: 196977 - RNA, 19 nt, Artificial Sequence
  Description of Artificial Sequence: Synthetic oligonucleotide
  Antisense strand to SEQ ID NO: 196976
uaauuugaucguggacaau

SEQ ID NO: 196978 - RNA, 19 nt, Artificial Sequence
  Description of Artificial Sequence: Synthetic oligonucleotide
  Sense strand starting at position 1014 of SEQ ID NO: 2538
ucaaauuaacgcugacgau

SEQ ID NO: 196979 - RNA, 19 nt, Artificial Sequence
  Description of Artificial Sequence: Synthetic oligonucleotide
  Antisense strand to SEQ ID NO: 196978
aucgucagcguuaauuuga

SEQ ID NO: 196980 - RNA, 19 nt, Artificial Sequence
  Description of Artificial Sequence: Synthetic oligonucleotide
  Sense strand starting at position 2406 of SEQ ID NO: 2538
cguuguuguuuguuuccaa

SEQ ID NO: 196981 - RNA, 19 nt, Artificial Sequence
  Description of Artificial Sequence: Synthetic oligonucleotide
  Antisense strand to SEQ ID NO: 196980
uuggaaacaaacaacaacg

SEQ ID NO: 196982 - RNA, 19 nt, Artificial Sequence
  Description of Artificial Sequence: Synthetic oligonucleotide
  Sense strand starting at position 2536 of SEQ ID NO: 2538
acacgugcuuucccuuaau

SEQ ID NO: 196983 - RNA, 19 nt, Artificial Sequence
  Description of Artificial Sequence: Synthetic oligonucleotide
  Antisense strand to SEQ ID NO: 196982
auuaagggaaagcacgugu

SEQ ID NO: 196984 - RNA, 19 nt, Artificial Sequence
  Description of Artificial Sequence: Synthetic oligonucleotide
  Sense strand starting at position 2539 of SEQ ID NO: 2538
cgugcuuucccuuaauaca

SEQ ID NO: 196985 - RNA, 19 nt, Artificial Sequence
  Description of Artificial Sequence: Synthetic oligonucleotide
  Antisense strand to SEQ ID NO: 196984
uguauuaagggaaagcacg

SEQ ID NO: 196986 - RNA, 19 nt, Artificial Sequence
  Description of Artificial Sequence: Synthetic oligonucleotide
  Sense strand starting at position 2618 of SEQ ID NO: 2538
ccacgaguggacugaaguu

SEQ ID NO: 196987 - RNA, 19 nt, Artificial Sequence
  Description of Artificial Sequence: Synthetic oligonucleotide
  Antisense strand to SEQ ID NO: 196986
aacuucaguccacucgugg

SEQ ID NO: 196988 - RNA, 19 nt, Artificial Sequence
  Description of Artificial Sequence: Synthetic oligonucleotide
  Sense strand starting at position 2938 of SEQ ID NO: 2538
ccacaagguccuggauuga

SEQ ID NO: 196989 - RNA, 19 nt, Artificial Sequence
  Description of Artificial Sequence: Synthetic oligonucleotide
  Antisense strand to SEQ ID NO: 196988
ucaauccaggaccuugugg

SEQ ID NO: 196990 - RNA, 19 nt, Artificial Sequence
  Description of Artificial Sequence: Synthetic oligonucleotide
  Sense strand starting at position 3065 of SEQ ID NO: 2538
ugcaguuugcuauggccua

SEQ ID NO: 196991 - RNA, 19 nt, Artificial Sequence
  Description of Artificial Sequence: Synthetic oligonucleotide
  Antisense strand to SEQ ID NO: 196990
uaggccauagcaaacugca

SEQ ID NO: 196992 - RNA, 19 nt, Artificial Sequence
  Description of Artificial Sequence: Synthetic oligonucleotide
  Sense strand starting at position 3173 of SEQ ID NO: 2538
uugucuucuccuugacacu

SEQ ID NO: 196993 - RNA, 19 nt, Artificial Sequence
  Description of Artificial Sequence: Synthetic oligonucleotide
  Antisense strand to SEQ ID NO: 196992
agugucaaggagaagacaa

SEQ ID NO: 196994 - RNA, 19 nt, Artificial Sequence
  Description of Artificial Sequence: Synthetic oligonucleotide
  Sense strand starting at position 3174 of SEQ ID NO: 2538
ugucuucuccuugacacuu

SEQ ID NO: 196995 - RNA, 19 nt, Artificial Sequence
  Description of Artificial Sequence: Synthetic oligonucleotide
  Antisense strand to SEQ ID NO: 196994
aagugucaaggagaagaca

SEQ ID NO: 196996 - RNA, 19 nt, Artificial Sequence
  Description of Artificial Sequence: Synthetic oligonucleotide
  Sense strand starting at position 3221 of SEQ ID NO: 2538
gcuguccacgcauaaguaa

SEQ ID NO: 196997 - RNA, 19 nt, Artificial Sequence
  Description of Artificial Sequence: Synthetic oligonucleotide
  Antisense strand to SEQ ID NO: 196996
uuacuuaugcguggacagc

SEQ ID NO: 196998 - RNA, 19 nt, Artificial Sequence
  Description of Artificial Sequence: Synthetic oligonucleotide
  Sense strand starting at position 3471 of SEQ ID NO: 2538
ccugucuuauggcuuugaa

SEQ ID NO: 196999 - RNA, 19 nt, Artificial Sequence
  Description of Artificial Sequence: Synthetic oligonucleotide
  Antisense strand to SEQ ID NO: 196998
uucaaagccauaagacagg

SEQ ID NO: 197000 - RNA, 19 nt, Artificial Sequence
  Description of Artificial Sequence: Synthetic oligonucleotide
  Sense strand starting at position 3474 of SEQ ID NO: 2538
gucuuauggcuuugaauau

SEQ ID NO: 197001 - RNA, 19 nt, Artificial Sequence
  Description of Artificial Sequence: Synthetic oligonucleotide
  Antisense strand to SEQ ID NO: 197000
auauucaaagccauaagac

SEQ ID NO: 197002 - RNA, 19 nt, Artificial Sequence
  Description of Artificial Sequence: Synthetic oligonucleotide
  Sense strand starting at position 3475 of SEQ ID NO: 2538
ucuuauggcuuugaauauc

SEQ ID NO: 197003 - RNA, 19 nt, Artificial Sequence
  Description of Artificial Sequence: Synthetic oligonucleotide
  Antisense strand to SEQ ID NO: 197002
gauauucaaagccauaaga

SEQ ID NO: 197004 - RNA, 19 nt, Artificial Sequence
  Description of Artificial Sequence: Synthetic oligonucleotide
  Sense strand starting at position 3502 of SEQ ID NO: 2538
guuaaugaagcucauaugu

SEQ ID NO: 197005 - RNA, 19 nt, Artificial Sequence
  Description of Artificial Sequence: Synthetic oligonucleotide
  Antisense strand to SEQ ID NO: 197004
acauaugagcuucauuaac

SEQ ID NO: 197006 - RNA, 19 nt, Artificial Sequence
  Description of Artificial Sequence: Synthetic oligonucleotide
  Sense strand starting at position 3697 of SEQ ID NO: 2538
accauuugcuuaggcgaaa

SEQ ID NO: 197007 - RNA, 19 nt, Artificial Sequence
  Description of Artificial Sequence: Synthetic oligonucleotide
  Antisense strand to SEQ ID NO: 197006
uuucgccuaagcaaauggu

SEQ ID NO: 197008 - RNA, 19 nt, Artificial Sequence
  Description of Artificial Sequence: Synthetic oligonucleotide
  Sense strand starting at position 3814 of SEQ ID NO: 2538
ggcugaagucaggaucauc

SEQ ID NO: 197009 - RNA, 19 nt, Artificial Sequence
  Description of Artificial Sequence: Synthetic oligonucleotide
  Antisense strand to SEQ ID NO: 197008
gaugauccugacuucagcc

SEQ ID NO: 197010 - RNA, 19 nt, Artificial Sequence
  Description of Artificial Sequence: Synthetic oligonucleotide
  Sense strand starting at position 3825 of SEQ ID NO: 2538
ggaucaucuagcuggacca

SEQ ID NO: 197011 - RNA, 19 nt, Artificial Sequence
  Description of Artificial Sequence: Synthetic oligonucleotide
  Antisense strand to SEQ ID NO: 197010
ugguccagcuagaugaucc

SEQ ID NO: 197012 - RNA, 19 nt, Artificial Sequence
  Description of Artificial Sequence: Synthetic oligonucleotide
  Sense strand starting at position 3874 of SEQ ID NO: 2538
ugcuuccuaccuggugaaa

SEQ ID NO: 197013 - RNA, 19 nt, Artificial Sequence
  Description of Artificial Sequence: Synthetic oligonucleotide
  Antisense strand to SEQ ID NO: 197012
uuucaccagguaggaagca

SEQ ID NO: 197014 - RNA, 19 nt, Artificial Sequence
  Description of Artificial Sequence: Synthetic oligonucleotide
  Sense strand starting at position 3877 of SEQ ID NO: 2538
uuccuaccuggugaaacuu

SEQ ID NO: 197015 - RNA, 19 nt, Artificial Sequence
  Description of Artificial Sequence: Synthetic oligonucleotide
  Antisense strand to SEQ ID NO: 197014
aaguuucaccagguaggaa

SEQ ID NO: 197016 - RNA, 19 nt, Artificial Sequence
  Description of Artificial Sequence: Synthetic oligonucleotide
  Sense strand starting at position 239 of SEQ ID NO: 2539
gagagaggucauuacgugu

SEQ ID NO: 197017 - RNA, 19 nt, Artificial Sequence
  Description of Artificial Sequence: Synthetic oligonucleotide
  Antisense strand to SEQ ID NO: 197016
acacguaaugaccucucuc

SEQ ID NO: 197018 - RNA, 19 nt, Artificial Sequence
  Description of Artificial Sequence: Synthetic oligonucleotide
  Sense strand starting at position 243 of SEQ ID NO: 2539
gaggucauuacguguggaa

SEQ ID NO: 197019 - RNA, 19 nt, Artificial Sequence
  Description of Artificial Sequence: Synthetic oligonucleotide
  Antisense strand to SEQ ID NO: 197018
uuccacacguaaugaccuc

SEQ ID NO: 197020 - RNA, 19 nt, Artificial Sequence
  Description of Artificial Sequence: Synthetic oligonucleotide
  Sense strand starting at position 245 of SEQ ID NO: 2539
ggucauuacguguggaagg

SEQ ID NO: 197021 - RNA, 19 nt, Artificial Sequence
  Description of Artificial Sequence: Synthetic oligonucleotide
  Antisense strand to SEQ ID NO: 197020
ccuuccacacguaaugacc

SEQ ID NO: 197022 - RNA, 19 nt, Artificial Sequence
  Description of Artificial Sequence: Synthetic oligonucleotide
  Sense strand starting at position 254 of SEQ ID NO: 2539
guguggaaggguuggagau

SEQ ID NO: 197023 - RNA, 19 nt, Artificial Sequence
  Description of Artificial Sequence: Synthetic oligonucleotide
  Antisense strand to SEQ ID NO: 197022
aucuccaacccuuccacac

SEQ ID NO: 197024 - RNA, 19 nt, Artificial Sequence
  Description of Artificial Sequence: Synthetic oligonucleotide
  Sense strand starting at position 255 of SEQ ID NO: 2539
uguggaaggguuggagaua

SEQ ID NO: 197025 - RNA, 19 nt, Artificial Sequence
  Description of Artificial Sequence: Synthetic oligonucleotide
  Antisense strand to SEQ ID NO: 197024
uaucuccaacccuuccaca

SEQ ID NO: 197026 - RNA, 19 nt, Artificial Sequence
  Description of Artificial Sequence: Synthetic oligonucleotide
  Sense strand starting at position 267 of SEQ ID NO: 2539
ggagauauggucuguggga

SEQ ID NO: 197027 - RNA, 19 nt, Artificial Sequence
  Description of Artificial Sequence: Synthetic oligonucleotide
  Antisense strand to SEQ ID NO: 197026
ucccacagaccauaucucc

SEQ ID NO: 197028 - RNA, 19 nt, Artificial Sequence
  Description of Artificial Sequence: Synthetic oligonucleotide
  Sense strand starting at position 268 of SEQ ID NO: 2539
gagauauggucugugggag

SEQ ID NO: 197029 - RNA, 19 nt, Artificial Sequence
  Description of Artificial Sequence: Synthetic oligonucleotide
  Antisense strand to SEQ ID NO: 197028
cucccacagaccauaucuc

SEQ ID NO: 197030 - RNA, 19 nt, Artificial Sequence
  Description of Artificial Sequence: Synthetic oligonucleotide
  Sense strand starting at position 269 of SEQ ID NO: 2539
agauauggucugugggaga

SEQ ID NO: 197031 - RNA, 19 nt, Artificial Sequence
  Description of Artificial Sequence: Synthetic oligonucleotide
  Antisense strand to SEQ ID NO: 197030
ucucccacagaccauaucu

SEQ ID NO: 197032 - RNA, 19 nt, Artificial Sequence
  Description of Artificial Sequence: Synthetic oligonucleotide
  Sense strand starting at position 360 of SEQ ID NO: 2539
gggaguaugcuggguauga

SEQ ID NO: 197033 - RNA, 19 nt, Artificial Sequence
  Description of Artificial Sequence: Synthetic oligonucleotide
  Antisense strand to SEQ ID NO: 197032
ucauacccagcauacuccc

SEQ ID NO: 197034 - RNA, 19 nt, Artificial Sequence
  Description of Artificial Sequence: Synthetic oligonucleotide
  Sense strand starting at position 361 of SEQ ID NO: 2539
ggaguaugcuggguaugaa

SEQ ID NO: 197035 - RNA, 19 nt, Artificial Sequence
  Description of Artificial Sequence: Synthetic oligonucleotide
  Antisense strand to SEQ ID NO: 197034
uucauacccagcauacucc

SEQ ID NO: 197036 - RNA, 19 nt, Artificial Sequence
  Description of Artificial Sequence: Synthetic oligonucleotide
  Sense strand starting at position 362 of SEQ ID NO: 2539
gaguaugcuggguaugaac

SEQ ID NO: 197037 - RNA, 19 nt, Artificial Sequence
  Description of Artificial Sequence: Synthetic oligonucleotide
  Antisense strand to SEQ ID NO: 197036
guucauacccagcauacuc

SEQ ID NO: 197038 - RNA, 19 nt, Artificial Sequence
  Description of Artificial Sequence: Synthetic oligonucleotide
  Sense strand starting at position 381 of SEQ ID NO: 2539
agauaagucagagggcuaa

SEQ ID NO: 197039 - RNA, 19 nt, Artificial Sequence
  Description of Artificial Sequence: Synthetic oligonucleotide
  Antisense strand to SEQ ID NO: 197038
uuagcccucugacuuaucu

SEQ ID NO: 197040 - RNA, 19 nt, Artificial Sequence
  Description of Artificial Sequence: Synthetic oligonucleotide
  Sense strand starting at position 429 of SEQ ID NO: 2539
cccuccauuucguuccaua

SEQ ID NO: 197041 - RNA, 19 nt, Artificial Sequence
  Description of Artificial Sequence: Synthetic oligonucleotide
  Antisense strand to SEQ ID NO: 197040
uauggaacgaaauggaggg

SEQ ID NO: 197042 - RNA, 19 nt, Artificial Sequence
  Description of Artificial Sequence: Synthetic oligonucleotide
  Sense strand starting at position 803 of SEQ ID NO: 2539
gggagugcccuaugaaaca

SEQ ID NO: 197043 - RNA, 19 nt, Artificial Sequence
  Description of Artificial Sequence: Synthetic oligonucleotide
  Antisense strand to SEQ ID NO: 197042
uguuucauagggcacuccc

SEQ ID NO: 197044 - RNA, 19 nt, Artificial Sequence
  Description of Artificial Sequence: Synthetic oligonucleotide
  Sense strand starting at position 898 of SEQ ID NO: 2539
aacacuaaggguuguaaau

SEQ ID NO: 197045 - RNA, 19 nt, Artificial Sequence
  Description of Artificial Sequence: Synthetic oligonucleotide
  Antisense strand to SEQ ID NO: 197044
auuuacaacccuuaguguu

SEQ ID NO: 197046 - RNA, 19 nt, Artificial Sequence
  Description of Artificial Sequence: Synthetic oligonucleotide
  Sense strand starting at position 907 of SEQ ID NO: 2539
gguuguaaaugaccuaaag

SEQ ID NO: 197047 - RNA, 19 nt, Artificial Sequence
  Description of Artificial Sequence: Synthetic oligonucleotide
  Antisense strand to SEQ ID NO: 197046
cuuuaggucauuuacaacc

SEQ ID NO: 197048 - RNA, 19 nt, Artificial Sequence
  Description of Artificial Sequence: Synthetic oligonucleotide
  Sense strand starting at position 970 of SEQ ID NO: 2539
guggcuuaacuauguugaa

SEQ ID NO: 197049 - RNA, 19 nt, Artificial Sequence
  Description of Artificial Sequence: Synthetic oligonucleotide
  Antisense strand to SEQ ID NO: 197048
uucaacauaguuaagccac

SEQ ID NO: 197050 - RNA, 19 nt, Artificial Sequence
  Description of Artificial Sequence: Synthetic oligonucleotide
  Sense strand starting at position 971 of SEQ ID NO: 2539
uggcuuaacuauguugaaa

SEQ ID NO: 197051 - RNA, 19 nt, Artificial Sequence
  Description of Artificial Sequence: Synthetic oligonucleotide
  Antisense strand to SEQ ID NO: 197050
uuucaacauaguuaagcca

SEQ ID NO: 197052 - RNA, 19 nt, Artificial Sequence
  Description of Artificial Sequence: Synthetic oligonucleotide
  Sense strand starting at position 1007 of SEQ ID NO: 2539
ugcuuugcagcccaaagau

SEQ ID NO: 197053 - RNA, 19 nt, Artificial Sequence
  Description of Artificial Sequence: Synthetic oligonucleotide
  Antisense strand to SEQ ID NO: 197052
aucuuugggcugcaaagca

SEQ ID NO: 197054 - RNA, 19 nt, Artificial Sequence
  Description of Artificial Sequence: Synthetic oligonucleotide
  Sense strand starting at position 1029 of SEQ ID NO: 2539
agaauauaaucagagaggu

SEQ ID NO: 197055 - RNA, 19 nt, Artificial Sequence
  Description of Artificial Sequence: Synthetic oligonucleotide
  Antisense strand to SEQ ID NO: 197054
accucucugauuauauucu

SEQ ID NO: 197056 - RNA, 19 nt, Artificial Sequence
  Description of Artificial Sequence: Synthetic oligonucleotide
  Sense strand starting at position 1088 of SEQ ID NO: 2539
cauggccaccuuuagagau

SEQ ID NO: 197057 - RNA, 19 nt, Artificial Sequence
  Description of Artificial Sequence: Synthetic oligonucleotide
  Antisense strand to SEQ ID NO: 197056
aucucuaaagguggccaug

SEQ ID NO: 197058 - RNA, 19 nt, Artificial Sequence
  Description of Artificial Sequence: Synthetic oligonucleotide
  Sense strand starting at position 1416 of SEQ ID NO: 2539
agcacugcacccugagaaa

SEQ ID NO: 197059 - RNA, 19 nt, Artificial Sequence
  Description of Artificial Sequence: Synthetic oligonucleotide
  Antisense strand to SEQ ID NO: 197058
uuucucagggugcagugcu

SEQ ID NO: 197060 - RNA, 19 nt, Artificial Sequence
  Description of Artificial Sequence: Synthetic oligonucleotide
  Sense strand starting at position 1428 of SEQ ID NO: 2539
ugagaaagcuacccuagua

SEQ ID NO: 197061 - RNA, 19 nt, Artificial Sequence
  Description of Artificial Sequence: Synthetic oligonucleotide
  Antisense strand to SEQ ID NO: 197060
uacuaggguagcuuucuca

SEQ ID NO: 197062 - RNA, 19 nt, Artificial Sequence
  Description of Artificial Sequence: Synthetic oligonucleotide
  Sense strand starting at position 1443 of SEQ ID NO: 2539
aguagcuguggaugaguaa

SEQ ID NO: 197063 - RNA, 19 nt, Artificial Sequence
  Description of Artificial Sequence: Synthetic oligonucleotide
  Antisense strand to SEQ ID NO: 197062
uuacucauccacagcuacu

SEQ ID NO: 197064 - RNA, 19 nt, Artificial Sequence
  Description of Artificial Sequence: Synthetic oligonucleotide
  Sense strand starting at position 1444 of SEQ ID NO: 2539
guagcuguggaugaguaau

SEQ ID NO: 197065 - RNA, 19 nt, Artificial Sequence
  Description of Artificial Sequence: Synthetic oligonucleotide
  Antisense strand to SEQ ID NO: 197064
auuacucauccacagcuac

SEQ ID NO: 197066 - RNA, 19 nt, Artificial Sequence
  Description of Artificial Sequence: Synthetic oligonucleotide
  Sense strand starting at position 1452 of SEQ ID NO: 2539
ggaugaguaauggguguuc

SEQ ID NO: 197067 - RNA, 19 nt, Artificial Sequence
  Description of Artificial Sequence: Synthetic oligonucleotide
  Antisense strand to SEQ ID NO: 197066
gaacacccauuacucaucc

SEQ ID NO: 197068 - RNA, 19 nt, Artificial Sequence
  Description of Artificial Sequence: Synthetic oligonucleotide
  Sense strand starting at position 2014 of SEQ ID NO: 2539
aguaaagcucgcuaccauu

SEQ ID NO: 197069 - RNA, 19 nt, Artificial Sequence
  Description of Artificial Sequence: Synthetic oligonucleotide
  Antisense strand to SEQ ID NO: 197068
aaugguagcgagcuuuacu

SEQ ID NO: 197070 - RNA, 19 nt, Artificial Sequence
  Description of Artificial Sequence: Synthetic oligonucleotide
  Sense strand starting at position 2191 of SEQ ID NO: 2539
cugggacucaacugcgaaa

SEQ ID NO: 197071 - RNA, 19 nt, Artificial Sequence
  Description of Artificial Sequence: Synthetic oligonucleotide
  Antisense strand to SEQ ID NO: 197070
uuucgcaguugagucccag

SEQ ID NO: 197072 - RNA, 19 nt, Artificial Sequence
  Description of Artificial Sequence: Synthetic oligonucleotide
  Sense strand starting at position 2193 of SEQ ID NO: 2539
gggacucaacugcgaaaua

SEQ ID NO: 197073 - RNA, 19 nt, Artificial Sequence
  Description of Artificial Sequence: Synthetic oligonucleotide
  Antisense strand to SEQ ID NO: 197072
uauuucgcaguugaguccc

SEQ ID NO: 197074 - RNA, 19 nt, Artificial Sequence
  Description of Artificial Sequence: Synthetic oligonucleotide
  Sense strand starting at position 2213 of SEQ ID NO: 2539
aaagacaucgugugaaacu

SEQ ID NO: 197075 - RNA, 19 nt, Artificial Sequence
  Description of Artificial Sequence: Synthetic oligonucleotide
  Antisense strand to SEQ ID NO: 197074
aguuucacacgaugucuuu

SEQ ID NO: 197076 - RNA, 19 nt, Artificial Sequence
  Description of Artificial Sequence: Synthetic oligonucleotide
  Sense strand starting at position 2223 of SEQ ID NO: 2539
ugugaaacuccuuaucgcu

SEQ ID NO: 197077 - RNA, 19 nt, Artificial Sequence
  Description of Artificial Sequence: Synthetic oligonucleotide
  Antisense strand to SEQ ID NO: 197076
agcgauaaggaguuucaca

SEQ ID NO: 197078 - RNA, 19 nt, Artificial Sequence
  Description of Artificial Sequence: Synthetic oligonucleotide
  Sense strand starting at position 2225 of SEQ ID NO: 2539
ugaaacuccuuaucgcuua

SEQ ID NO: 197079 - RNA, 19 nt, Artificial Sequence
  Description of Artificial Sequence: Synthetic oligonucleotide
  Antisense strand to SEQ ID NO: 197078
uaagcgauaaggaguuuca

SEQ ID NO: 197080 - RNA, 19 nt, Artificial Sequence
  Description of Artificial Sequence: Synthetic oligonucleotide
  Sense strand starting at position 2230 of SEQ ID NO: 2539
cuccuuaucgcuuaacagu

SEQ ID NO: 197081 - RNA, 19 nt, Artificial Sequence
  Description of Artificial Sequence: Synthetic oligonucleotide
  Antisense strand to SEQ ID NO: 197080
acuguuaagcgauaaggag

SEQ ID NO: 197082 - RNA, 19 nt, Artificial Sequence
  Description of Artificial Sequence: Synthetic oligonucleotide
  Sense strand starting at position 2244 of SEQ ID NO: 2539
acagucuugugucucuaaa

SEQ ID NO: 197083 - RNA, 19 nt, Artificial Sequence
  Description of Artificial Sequence: Synthetic oligonucleotide
  Antisense strand to SEQ ID NO: 197082
uuuagagacacaagacugu

SEQ ID NO: 197084 - RNA, 19 nt, Artificial Sequence
  Description of Artificial Sequence: Synthetic oligonucleotide
  Sense strand starting at position 2518 of SEQ ID NO: 2539
ggcauccaugugcaagauu

SEQ ID NO: 197085 - RNA, 19 nt, Artificial Sequence
  Description of Artificial Sequence: Synthetic oligonucleotide
  Antisense strand to SEQ ID NO: 197084
aaucuugcacauggaugcc

SEQ ID NO: 197086 - RNA, 19 nt, Artificial Sequence
  Description of Artificial Sequence: Synthetic oligonucleotide
  Sense strand starting at position 2521 of SEQ ID NO: 2539
auccaugugcaagauucua

SEQ ID NO: 197087 - RNA, 19 nt, Artificial Sequence
  Description of Artificial Sequence: Synthetic oligonucleotide
  Antisense strand to SEQ ID NO: 197086
uagaaucuugcacauggau

SEQ ID NO: 197088 - RNA, 19 nt, Artificial Sequence
  Description of Artificial Sequence: Synthetic oligonucleotide
  Sense strand starting at position 2548 of SEQ ID NO: 2539
gcauauaaucgugugcuua

SEQ ID NO: 197089 - RNA, 19 nt, Artificial Sequence
  Description of Artificial Sequence: Synthetic oligonucleotide
  Antisense strand to SEQ ID NO: 197088
uaagcacacgauuauaugc

SEQ ID NO: 197090 - RNA, 19 nt, Artificial Sequence
  Description of Artificial Sequence: Synthetic oligonucleotide
  Sense strand starting at position 2611 of SEQ ID NO: 2539
cagaaagagcguuaccgua

SEQ ID NO: 197091 - RNA, 19 nt, Artificial Sequence
  Description of Artificial Sequence: Synthetic oligonucleotide
  Antisense strand to SEQ ID NO: 197090
uacgguaacgcucuuucug

SEQ ID NO: 197092 - RNA, 19 nt, Artificial Sequence
  Description of Artificial Sequence: Synthetic oligonucleotide
  Sense strand starting at position 2864 of SEQ ID NO: 2539
cugauagcccucuaaugcu

SEQ ID NO: 197093 - RNA, 19 nt, Artificial Sequence
  Description of Artificial Sequence: Synthetic oligonucleotide
  Antisense strand to SEQ ID NO: 197092
agcauuagagggcuaucag

SEQ ID NO: 197094 - RNA, 19 nt, Artificial Sequence
  Description of Artificial Sequence: Synthetic oligonucleotide
  Sense strand starting at position 3334 of SEQ ID NO: 2539
ucuauucguccugaccagu

SEQ ID NO: 197095 - RNA, 19 nt, Artificial Sequence
  Description of Artificial Sequence: Synthetic oligonucleotide
  Antisense strand to SEQ ID NO: 197094
acuggucaggacgaauaga

SEQ ID NO: 197096 - RNA, 19 nt, Artificial Sequence
  Description of Artificial Sequence: Synthetic oligonucleotide
  Sense strand starting at position 33 of SEQ ID NO: 2540
aggcuaccuccuugauauc

SEQ ID NO: 197097 - RNA, 19 nt, Artificial Sequence
  Description of Artificial Sequence: Synthetic oligonucleotide
  Antisense strand to SEQ ID NO: 197096
gauaucaaggagguagccu

SEQ ID NO: 197098 - RNA, 19 nt, Artificial Sequence
  Description of Artificial Sequence: Synthetic oligonucleotide
  Sense strand starting at position 34 of SEQ ID NO: 2540
ggcuaccuccuugauauca

SEQ ID NO: 197099 - RNA, 19 nt, Artificial Sequence
  Description of Artificial Sequence: Synthetic oligonucleotide
  Antisense strand to SEQ ID NO: 197098
ugauaucaaggagguagcc

SEQ ID NO: 197100 - RNA, 19 nt, Artificial Sequence
  Description of Artificial Sequence: Synthetic oligonucleotide
  Sense strand starting at position 67 of SEQ ID NO: 2540
ucuguaguaauucgagaau

SEQ ID NO: 197101 - RNA, 19 nt, Artificial Sequence
  Description of Artificial Sequence: Synthetic oligonucleotide
  Antisense strand to SEQ ID NO: 197100
auucucgaauuacuacaga

SEQ ID NO: 197102 - RNA, 19 nt, Artificial Sequence
  Description of Artificial Sequence: Synthetic oligonucleotide
  Sense strand starting at position 70 of SEQ ID NO: 2540
guaguaauucgagaauauu

SEQ ID NO: 197103 - RNA, 19 nt, Artificial Sequence
  Description of Artificial Sequence: Synthetic oligonucleotide
  Antisense strand to SEQ ID NO: 197102
aauauucucgaauuacuac

SEQ ID NO: 197104 - RNA, 19 nt, Artificial Sequence
  Description of Artificial Sequence: Synthetic oligonucleotide
  Sense strand starting at position 78 of SEQ ID NO: 2540
ucgagaauauuauuaacug

SEQ ID NO: 197105 - RNA, 19 nt, Artificial Sequence
  Description of Artificial Sequence: Synthetic oligonucleotide
  Antisense strand to SEQ ID NO: 197104
caguuaauaauauucucga

SEQ ID NO: 197106 - RNA, 19 nt, Artificial Sequence
  Description of Artificial Sequence: Synthetic oligonucleotide
  Sense strand starting at position 93 of SEQ ID NO: 2540
acuggcaacuucucagagu

SEQ ID NO: 197107 - RNA, 19 nt, Artificial Sequence
  Description of Artificial Sequence: Synthetic oligonucleotide
  Antisense strand to SEQ ID NO: 197106
acucugagaaguugccagu

SEQ ID NO: 197108 - RNA, 19 nt, Artificial Sequence
  Description of Artificial Sequence: Synthetic oligonucleotide
  Sense strand starting at position 180 of SEQ ID NO: 2540
auaguacuugcccaagaca

SEQ ID NO: 197109 - RNA, 19 nt, Artificial Sequence
  Description of Artificial Sequence: Synthetic oligonucleotide
  Antisense strand to SEQ ID NO: 197108
ugucuugggcaaguacuau

SEQ ID NO: 197110 - RNA, 19 nt, Artificial Sequence
  Description of Artificial Sequence: Synthetic oligonucleotide
  Sense strand starting at position 241 of SEQ ID NO: 2540
agaacaagacuuugcuaua

SEQ ID NO: 197111 - RNA, 19 nt, Artificial Sequence
  Description of Artificial Sequence: Synthetic oligonucleotide
  Antisense strand to SEQ ID NO: 197110
uauagcaaagucuuguucu

SEQ ID NO: 197112 - RNA, 19 nt, Artificial Sequence
  Description of Artificial Sequence: Synthetic oligonucleotide
  Sense strand starting at position 578 of SEQ ID NO: 2540
aaugaaauugcacggcaau

SEQ ID NO: 197113 - RNA, 19 nt, Artificial Sequence
  Description of Artificial Sequence: Synthetic oligonucleotide
  Antisense strand to SEQ ID NO: 197112
auugccgugcaauuucauu

SEQ ID NO: 197114 - RNA, 19 nt, Artificial Sequence
  Description of Artificial Sequence: Synthetic oligonucleotide
  Sense strand starting at position 579 of SEQ ID NO: 2540
augaaauugcacggcaaua

SEQ ID NO: 197115 - RNA, 19 nt, Artificial Sequence
  Description of Artificial Sequence: Synthetic oligonucleotide
  Antisense strand to SEQ ID NO: 197114
uauugccgugcaauuucau

SEQ ID NO: 197116 - RNA, 19 nt, Artificial Sequence
  Description of Artificial Sequence: Synthetic oligonucleotide
  Sense strand starting at position 581 of SEQ ID NO: 2540
gaaauugcacggcaauaaa

SEQ ID NO: 197117 - RNA, 19 nt, Artificial Sequence
  Description of Artificial Sequence: Synthetic oligonucleotide
  Antisense strand to SEQ ID NO: 197116
uuuauugccgugcaauuuc

SEQ ID NO: 197118 - RNA, 19 nt, Artificial Sequence
  Description of Artificial Sequence: Synthetic oligonucleotide
  Sense strand starting at position 669 of SEQ ID NO: 2540
gguagugucuuucugaaau

SEQ ID NO: 197119 - RNA, 19 nt, Artificial Sequence
  Description of Artificial Sequence: Synthetic oligonucleotide
  Antisense strand to SEQ ID NO: 197118
auuucagaaagacacuacc

SEQ ID NO: 197120 - RNA, 19 nt, Artificial Sequence
  Description of Artificial Sequence: Synthetic oligonucleotide
  Sense strand starting at position 679 of SEQ ID NO: 2540
uucugaaaucauggugacu

SEQ ID NO: 197121 - RNA, 19 nt, Artificial Sequence
  Description of Artificial Sequence: Synthetic oligonucleotide
  Antisense strand to SEQ ID NO: 197120
agucaccaugauuucagaa

SEQ ID NO: 197122 - RNA, 19 nt, Artificial Sequence
  Description of Artificial Sequence: Synthetic oligonucleotide
  Sense strand starting at position 706 of SEQ ID NO: 2540
cuccucauuucuguguaca

SEQ ID NO: 197123 - RNA, 19 nt, Artificial Sequence
  Description of Artificial Sequence: Synthetic oligonucleotide
  Antisense strand to SEQ ID NO: 197122
uguacacagaaaugaggag

SEQ ID NO: 197124 - RNA, 19 nt, Artificial Sequence
  Description of Artificial Sequence: Synthetic oligonucleotide
  Sense strand starting at position 707 of SEQ ID NO: 2540
uccucauuucuguguacag

SEQ ID NO: 197125 - RNA, 19 nt, Artificial Sequence
  Description of Artificial Sequence: Synthetic oligonucleotide
  Antisense strand to SEQ ID NO: 197124
cuguacacagaaaugagga

SEQ ID NO: 197126 - RNA, 19 nt, Artificial Sequence
  Description of Artificial Sequence: Synthetic oligonucleotide
  Sense strand starting at position 728 of SEQ ID NO: 2540
agggcacucggguauugau

SEQ ID NO: 197127 - RNA, 19 nt, Artificial Sequence
  Description of Artificial Sequence: Synthetic oligonucleotide
  Antisense strand to SEQ ID NO: 197126
aucaauacccgagugcccu

SEQ ID NO: 197128 - RNA, 19 nt, Artificial Sequence
  Description of Artificial Sequence: Synthetic oligonucleotide
  Sense strand starting at position 738 of SEQ ID NO: 2540
gguauugauagcgagauac

SEQ ID NO: 197129 - RNA, 19 nt, Artificial Sequence
  Description of Artificial Sequence: Synthetic oligonucleotide
  Antisense strand to SEQ ID NO: 197128
guaucucgcuaucaauacc

SEQ ID NO: 197130 - RNA, 19 nt, Artificial Sequence
  Description of Artificial Sequence: Synthetic oligonucleotide
  Sense strand starting at position 810 of SEQ ID NO: 2540
gguaccuuauugccauuaa

SEQ ID NO: 197131 - RNA, 19 nt, Artificial Sequence
  Description of Artificial Sequence: Synthetic oligonucleotide
  Antisense strand to SEQ ID NO: 197130
uuaauggcaauaagguacc

SEQ ID NO: 197132 - RNA, 19 nt, Artificial Sequence
  Description of Artificial Sequence: Synthetic oligonucleotide
  Sense strand starting at position 2154 of SEQ ID NO: 2540
gguagacacaauggugaua

SEQ ID NO: 197133 - RNA, 19 nt, Artificial Sequence
  Description of Artificial Sequence: Synthetic oligonucleotide
  Antisense strand to SEQ ID NO: 197132
uaucaccauugugucuacc

SEQ ID NO: 197134 - RNA, 19 nt, Artificial Sequence
  Description of Artificial Sequence: Synthetic oligonucleotide
  Sense strand starting at position 2192 of SEQ ID NO: 2540
guauuuauugagcgcuuau

SEQ ID NO: 197135 - RNA, 19 nt, Artificial Sequence
  Description of Artificial Sequence: Synthetic oligonucleotide
  Antisense strand to SEQ ID NO: 197134
auaagcgcucaauaaauac

SEQ ID NO: 197136 - RNA, 19 nt, Artificial Sequence
  Description of Artificial Sequence: Synthetic oligonucleotide
  Sense strand starting at position 2449 of SEQ ID NO: 2540
uuaucuuugggccagcuaa

SEQ ID NO: 197137 - RNA, 19 nt, Artificial Sequence
  Description of Artificial Sequence: Synthetic oligonucleotide
  Antisense strand to SEQ ID NO: 197136
uuagcuggcccaaagauaa

SEQ ID NO: 197138 - RNA, 19 nt, Artificial Sequence
  Description of Artificial Sequence: Synthetic oligonucleotide
  Sense strand starting at position 2659 of SEQ ID NO: 2540
ccggaucauccauagcuga

SEQ ID NO: 197139 - RNA, 19 nt, Artificial Sequence
  Description of Artificial Sequence: Synthetic oligonucleotide
  Antisense strand to SEQ ID NO: 197138
ucagcuauggaugauccgg

SEQ ID NO: 197140 - RNA, 19 nt, Artificial Sequence
  Description of Artificial Sequence: Synthetic oligonucleotide
  Sense strand starting at position 2673 of SEQ ID NO: 2540
gcugacauccucuaaguca

SEQ ID NO: 197141 - RNA, 19 nt, Artificial Sequence
  Description of Artificial Sequence: Synthetic oligonucleotide
  Antisense strand to SEQ ID NO: 197140
ugacuuagaggaugucagc

SEQ ID NO: 197142 - RNA, 19 nt, Artificial Sequence
  Description of Artificial Sequence: Synthetic oligonucleotide
  Sense strand starting at position 2728 of SEQ ID NO: 2540
cccagaucagccgaguuaa

SEQ ID NO: 197143 - RNA, 19 nt, Artificial Sequence
  Description of Artificial Sequence: Synthetic oligonucleotide
  Antisense strand to SEQ ID NO: 197142
uuaacucggcugaucuggg

SEQ ID NO: 197144 - RNA, 19 nt, Artificial Sequence
  Description of Artificial Sequence: Synthetic oligonucleotide
  Sense strand starting at position 2782 of SEQ ID NO: 2540
caaauugcugcguuguauu

SEQ ID NO: 197145 - RNA, 19 nt, Artificial Sequence
  Description of Artificial Sequence: Synthetic oligonucleotide
  Antisense strand to SEQ ID NO: 197144
aauacaacgcagcaauuug

SEQ ID NO: 197146 - RNA, 19 nt, Artificial Sequence
  Description of Artificial Sequence: Synthetic oligonucleotide
  Sense strand starting at position 2831 of SEQ ID NO: 2540
gcaucuuauuucguguuua

SEQ ID NO: 197147 - RNA, 19 nt, Artificial Sequence
  Description of Artificial Sequence: Synthetic oligonucleotide
  Antisense strand to SEQ ID NO: 197146
uaaacacgaaauaagaugc

SEQ ID NO: 197148 - RNA, 19 nt, Artificial Sequence
  Description of Artificial Sequence: Synthetic oligonucleotide
  Sense strand starting at position 2835 of SEQ ID NO: 2540
cuuauuucguguuuaccau

SEQ ID NO: 197149 - RNA, 19 nt, Artificial Sequence
  Description of Artificial Sequence: Synthetic oligonucleotide
  Antisense strand to SEQ ID NO: 197148
augguaaacacgaaauaag

SEQ ID NO: 197150 - RNA, 19 nt, Artificial Sequence
  Description of Artificial Sequence: Synthetic oligonucleotide
  Sense strand starting at position 2949 of SEQ ID NO: 2540
guguucaauguugacggaa

SEQ ID NO: 197151 - RNA, 19 nt, Artificial Sequence
  Description of Artificial Sequence: Synthetic oligonucleotide
  Antisense strand to SEQ ID NO: 197150
uuccgucaacauugaacac

SEQ ID NO: 197152 - RNA, 19 nt, Artificial Sequence
  Description of Artificial Sequence: Synthetic oligonucleotide
  Sense strand starting at position 3009 of SEQ ID NO: 2540
ucgaggugagcguuauugu

SEQ ID NO: 197153 - RNA, 19 nt, Artificial Sequence
  Description of Artificial Sequence: Synthetic oligonucleotide
  Antisense strand to SEQ ID NO: 197152
acaauaacgcucaccucga

SEQ ID NO: 197154 - RNA, 19 nt, Artificial Sequence
  Description of Artificial Sequence: Synthetic oligonucleotide
  Sense strand starting at position 3018 of SEQ ID NO: 2540
gcguuauuguuauuuacau

SEQ ID NO: 197155 - RNA, 19 nt, Artificial Sequence
  Description of Artificial Sequence: Synthetic oligonucleotide
  Antisense strand to SEQ ID NO: 197154
auguaaauaacaauaacgc

SEQ ID NO: 197156 - RNA, 19 nt, Artificial Sequence
  Description of Artificial Sequence: Synthetic oligonucleotide
  Sense strand starting at position 3217 of SEQ ID NO: 2540
aaaucacugggcuguugaa

SEQ ID NO: 197157 - RNA, 19 nt, Artificial Sequence
  Description of Artificial Sequence: Synthetic oligonucleotide
  Antisense strand to SEQ ID NO: 197156
uucaacagcccagugauuu

SEQ ID NO: 197158 - RNA, 19 nt, Artificial Sequence
  Description of Artificial Sequence: Synthetic oligonucleotide
  Sense strand starting at position 3224 of SEQ ID NO: 2540
ugggcuguugaauggauua

SEQ ID NO: 197159 - RNA, 19 nt, Artificial Sequence
  Description of Artificial Sequence: Synthetic oligonucleotide
  Antisense strand to SEQ ID NO: 197158
uaauccauucaacagccca

SEQ ID NO: 197160 - RNA, 19 nt, Artificial Sequence
  Description of Artificial Sequence: Synthetic oligonucleotide
  Sense strand starting at position 3226 of SEQ ID NO: 2540
ggcuguugaauggauuaga

SEQ ID NO: 197161 - RNA, 19 nt, Artificial Sequence
  Description of Artificial Sequence: Synthetic oligonucleotide
  Antisense strand to SEQ ID NO: 197160
ucuaauccauucaacagcc

SEQ ID NO: 197162 - RNA, 19 nt, Artificial Sequence
  Description of Artificial Sequence: Synthetic oligonucleotide
  Sense strand starting at position 3236 of SEQ ID NO: 2540
uggauuagaaucuacguuu

SEQ ID NO: 197163 - RNA, 19 nt, Artificial Sequence
  Description of Artificial Sequence: Synthetic oligonucleotide
  Antisense strand to SEQ ID NO: 197162
aaacguagauucuaaucca

SEQ ID NO: 197164 - RNA, 19 nt, Artificial Sequence
  Description of Artificial Sequence: Synthetic oligonucleotide
  Sense strand starting at position 3239 of SEQ ID NO: 2540
auuagaaucuacguuuccu

SEQ ID NO: 197165 - RNA, 19 nt, Artificial Sequence
  Description of Artificial Sequence: Synthetic oligonucleotide
  Antisense strand to SEQ ID NO: 197164
aggaaacguagauucuaau

SEQ ID NO: 197166 - RNA, 19 nt, Artificial Sequence
  Description of Artificial Sequence: Synthetic oligonucleotide
  Sense strand starting at position 3380 of SEQ ID NO: 2540
cagauagauuggccaauga

SEQ ID NO: 197167 - RNA, 19 nt, Artificial Sequence
  Description of Artificial Sequence: Synthetic oligonucleotide
  Antisense strand to SEQ ID NO: 197166
ucauuggccaaucuaucug

SEQ ID NO: 197168 - RNA, 19 nt, Artificial Sequence
  Description of Artificial Sequence: Synthetic oligonucleotide
  Sense strand starting at position 3384 of SEQ ID NO: 2540
uagauuggccaaugaaugu

SEQ ID NO: 197169 - RNA, 19 nt, Artificial Sequence
  Description of Artificial Sequence: Synthetic oligonucleotide
  Antisense strand to SEQ ID NO: 197168
acauucauuggccaaucua

SEQ ID NO: 197170 - RNA, 19 nt, Artificial Sequence
  Description of Artificial Sequence: Synthetic oligonucleotide
  Sense strand starting at position 3466 of SEQ ID NO: 2540
ugauuaagcccauggcuaa

SEQ ID NO: 197171 - RNA, 19 nt, Artificial Sequence
  Description of Artificial Sequence: Synthetic oligonucleotide
  Antisense strand to SEQ ID NO: 197170
uuagccaugggcuuaauca

SEQ ID NO: 197172 - RNA, 19 nt, Artificial Sequence
  Description of Artificial Sequence: Synthetic oligonucleotide
  Sense strand starting at position 3627 of SEQ ID NO: 2540
ccaugauaccguuagcaua

SEQ ID NO: 197173 - RNA, 19 nt, Artificial Sequence
  Description of Artificial Sequence: Synthetic oligonucleotide
  Antisense strand to SEQ ID NO: 197172
uaugcuaacgguaucaugg

SEQ ID NO: 197174 - RNA, 19 nt, Artificial Sequence
  Description of Artificial Sequence: Synthetic oligonucleotide
  Sense strand starting at position 3980 of SEQ ID NO: 2540
caaauaucgcacuaguguu

SEQ ID NO: 197175 - RNA, 19 nt, Artificial Sequence
  Description of Artificial Sequence: Synthetic oligonucleotide
  Antisense strand to SEQ ID NO: 197174
aacacuagugcgauauuug

SEQ ID NO: 197176 - RNA, 19 nt, Artificial Sequence
  Description of Artificial Sequence: Synthetic oligonucleotide
  Sense strand starting at position 155 of SEQ ID NO: 2541
gugugaccuuuaucaaagg

SEQ ID NO: 197177 - RNA, 19 nt, Artificial Sequence
  Description of Artificial Sequence: Synthetic oligonucleotide
  Antisense strand to SEQ ID NO: 197176
ccuuugauaaaggucacac

SEQ ID NO: 197178 - RNA, 19 nt, Artificial Sequence
  Description of Artificial Sequence: Synthetic oligonucleotide
  Sense strand starting at position 171 of SEQ ID NO: 2541
agguaaaucuaaucaugua

SEQ ID NO: 197179 - RNA, 19 nt, Artificial Sequence
  Description of Artificial Sequence: Synthetic oligonucleotide
  Antisense strand to SEQ ID NO: 197178
uacaugauuagauuuaccu

SEQ ID NO: 197180 - RNA, 19 nt, Artificial Sequence
  Description of Artificial Sequence: Synthetic oligonucleotide
  Sense strand starting at position 315 of SEQ ID NO: 2541
ugaacauacuguuuguaug

SEQ ID NO: 197181 - RNA, 19 nt, Artificial Sequence
  Description of Artificial Sequence: Synthetic oligonucleotide
  Antisense strand to SEQ ID NO: 197180
cauacaaacaguauguuca

SEQ ID NO: 197182 - RNA, 19 nt, Artificial Sequence
  Description of Artificial Sequence: Synthetic oligonucleotide
  Sense strand starting at position 326 of SEQ ID NO: 2541
uuuguaugccaagaacaau

SEQ ID NO: 197183 - RNA, 19 nt, Artificial Sequence
  Description of Artificial Sequence: Synthetic oligonucleotide
  Antisense strand to SEQ ID NO: 197182
auuguucuuggcauacaaa

SEQ ID NO: 197184 - RNA, 19 nt, Artificial Sequence
  Description of Artificial Sequence: Synthetic oligonucleotide
  Sense strand starting at position 407 of SEQ ID NO: 2541
uuggaacaucuuugcacua

SEQ ID NO: 197185 - RNA, 19 nt, Artificial Sequence
  Description of Artificial Sequence: Synthetic oligonucleotide
  Antisense strand to SEQ ID NO: 197184
uagugcaaagauguuccaa

SEQ ID NO: 197186 - RNA, 19 nt, Artificial Sequence
  Description of Artificial Sequence: Synthetic oligonucleotide
  Sense strand starting at position 448 of SEQ ID NO: 2541
guuaaaugaccagguggua

SEQ ID NO: 197187 - RNA, 19 nt, Artificial Sequence
  Description of Artificial Sequence: Synthetic oligonucleotide
  Antisense strand to SEQ ID NO: 197186
uaccaccuggucauuuaac

SEQ ID NO: 197188 - RNA, 19 nt, Artificial Sequence
  Description of Artificial Sequence: Synthetic oligonucleotide
  Sense strand starting at position 473 of SEQ ID NO: 2541
ccaguuaaguuucuuauaa

SEQ ID NO: 197189 - RNA, 19 nt, Artificial Sequence
  Description of Artificial Sequence: Synthetic oligonucleotide
  Antisense strand to SEQ ID NO: 197188
uuauaagaaacuuaacugg

SEQ ID NO: 197190 - RNA, 19 nt, Artificial Sequence
  Description of Artificial Sequence: Synthetic oligonucleotide
  Sense strand starting at position 485 of SEQ ID NO: 2541
cuuauaacgcuguauuaua

SEQ ID NO: 197191 - RNA, 19 nt, Artificial Sequence
  Description of Artificial Sequence: Synthetic oligonucleotide
  Antisense strand to SEQ ID NO: 197190
uauaauacagcguuauaag

SEQ ID NO: 197192 - RNA, 19 nt, Artificial Sequence
  Description of Artificial Sequence: Synthetic oligonucleotide
  Sense strand starting at position 518 of SEQ ID NO: 2541
gcuauuccuuccuuaagag

SEQ ID NO: 197193 - RNA, 19 nt, Artificial Sequence
  Description of Artificial Sequence: Synthetic oligonucleotide
  Antisense strand to SEQ ID NO: 197192
cucuuaaggaaggaauagc

SEQ ID NO: 197194 - RNA, 19 nt, Artificial Sequence
  Description of Artificial Sequence: Synthetic oligonucleotide
  Sense strand starting at position 589 of SEQ ID NO: 2541
aagacucauguauguugaa

SEQ ID NO: 197195 - RNA, 19 nt, Artificial Sequence
  Description of Artificial Sequence: Synthetic oligonucleotide
  Antisense strand to SEQ ID NO: 197194
uucaacauacaugagucuu

SEQ ID NO: 197196 - RNA, 19 nt, Artificial Sequence
  Description of Artificial Sequence: Synthetic oligonucleotide
  Sense strand starting at position 590 of SEQ ID NO: 2541
agacucauguauguugaau

SEQ ID NO: 197197 - RNA, 19 nt, Artificial Sequence
  Description of Artificial Sequence: Synthetic oligonucleotide
  Antisense strand to SEQ ID NO: 197196
auucaacauacaugagucu

SEQ ID NO: 197198 - RNA, 19 nt, Artificial Sequence
  Description of Artificial Sequence: Synthetic oligonucleotide
  Sense strand starting at position 622 of SEQ ID NO: 2541
gcaaguauagcuuaggaac

SEQ ID NO: 197199 - RNA, 19 nt, Artificial Sequence
  Description of Artificial Sequence: Synthetic oligonucleotide
  Antisense strand to SEQ ID NO: 197198
guuccuaagcuauacuugc

SEQ ID NO: 197200 - RNA, 19 nt, Artificial Sequence
  Description of Artificial Sequence: Synthetic oligonucleotide
  Sense strand starting at position 636 of SEQ ID NO: 2541
ggaacuuggccaugaaguc

SEQ ID NO: 197201 - RNA, 19 nt, Artificial Sequence
  Description of Artificial Sequence: Synthetic oligonucleotide
  Antisense strand to SEQ ID NO: 197200
gacuucauggccaaguucc

SEQ ID NO: 197202 - RNA, 19 nt, Artificial Sequence
  Description of Artificial Sequence: Synthetic oligonucleotide
  Sense strand starting at position 637 of SEQ ID NO: 2541
gaacuuggccaugaaguca

SEQ ID NO: 197203 - RNA, 19 nt, Artificial Sequence
  Description of Artificial Sequence: Synthetic oligonucleotide
  Antisense strand to SEQ ID NO: 197202
ugacuucauggccaaguuc

SEQ ID NO: 197204 - RNA, 19 nt, Artificial Sequence
  Description of Artificial Sequence: Synthetic oligonucleotide
  Sense strand starting at position 700 of SEQ ID NO: 2541
cuaagacuccagcagacuu

SEQ ID NO: 197205 - RNA, 19 nt, Artificial Sequence
  Description of Artificial Sequence: Synthetic oligonucleotide
  Antisense strand to SEQ ID NO: 197204
aagucugcuggagucuuag

SEQ ID NO: 197206 - RNA, 19 nt, Artificial Sequence
  Description of Artificial Sequence: Synthetic oligonucleotide
  Sense strand starting at position 756 of SEQ ID NO: 2541
accucauagcuugggaaga

SEQ ID NO: 197207 - RNA, 19 nt, Artificial Sequence
  Description of Artificial Sequence: Synthetic oligonucleotide
  Antisense strand to SEQ ID NO: 197206
ucuucccaagcuaugaggu

SEQ ID NO: 197208 - RNA, 19 nt, Artificial Sequence
  Description of Artificial Sequence: Synthetic oligonucleotide
  Sense strand starting at position 1078 of SEQ ID NO: 2541
cacagagcucaguagcuau

SEQ ID NO: 197209 - RNA, 19 nt, Artificial Sequence
  Description of Artificial Sequence: Synthetic oligonucleotide
  Antisense strand to SEQ ID NO: 197208
auagcuacugagcucugug

SEQ ID NO: 197210 - RNA, 19 nt, Artificial Sequence
  Description of Artificial Sequence: Synthetic oligonucleotide
  Sense strand starting at position 1313 of SEQ ID NO: 2541
uuauaucuccucggagaaa

SEQ ID NO: 197211 - RNA, 19 nt, Artificial Sequence
  Description of Artificial Sequence: Synthetic oligonucleotide
  Antisense strand to SEQ ID NO: 197210
uuucuccgaggagauauaa

SEQ ID NO: 197212 - RNA, 19 nt, Artificial Sequence
  Description of Artificial Sequence: Synthetic oligonucleotide
  Sense strand starting at position 1995 of SEQ ID NO: 2541
ggugaaaggucacucagag

SEQ ID NO: 197213 - RNA, 19 nt, Artificial Sequence
  Description of Artificial Sequence: Synthetic oligonucleotide
  Antisense strand to SEQ ID NO: 197212
cucugagugaccuuucacc

SEQ ID NO: 197214 - RNA, 19 nt, Artificial Sequence
  Description of Artificial Sequence: Synthetic oligonucleotide
  Sense strand starting at position 2243 of SEQ ID NO: 2541
cgagguguccuagaacccu

SEQ ID NO: 197215 - RNA, 19 nt, Artificial Sequence
  Description of Artificial Sequence: Synthetic oligonucleotide
  Antisense strand to SEQ ID NO: 197214
aggguucuaggacaccucg

SEQ ID NO: 197216 - RNA, 19 nt, Artificial Sequence
  Description of Artificial Sequence: Synthetic oligonucleotide
  Sense strand starting at position 2446 of SEQ ID NO: 2541
gccucuaaccauuagagca

SEQ ID NO: 197217 - RNA, 19 nt, Artificial Sequence
  Description of Artificial Sequence: Synthetic oligonucleotide
  Antisense strand to SEQ ID NO: 197216
ugcucuaaugguuagaggc

SEQ ID NO: 197218 - RNA, 19 nt, Artificial Sequence
  Description of Artificial Sequence: Synthetic oligonucleotide
  Sense strand starting at position 2517 of SEQ ID NO: 2541
uguuuaaugcuagaucaca

SEQ ID NO: 197219 - RNA, 19 nt, Artificial Sequence
  Description of Artificial Sequence: Synthetic oligonucleotide
  Antisense strand to SEQ ID NO: 197218
ugugaucuagcauuaaaca

SEQ ID NO: 197220 - RNA, 19 nt, Artificial Sequence
  Description of Artificial Sequence: Synthetic oligonucleotide
  Sense strand starting at position 2542 of SEQ ID NO: 2541
uacagaaacugaguugcaa

SEQ ID NO: 197221 - RNA, 19 nt, Artificial Sequence
  Description of Artificial Sequence: Synthetic oligonucleotide
  Antisense strand to SEQ ID NO: 197220
uugcaacucaguuucugua

SEQ ID NO: 197222 - RNA, 19 nt, Artificial Sequence
  Description of Artificial Sequence: Synthetic oligonucleotide
  Sense strand starting at position 2615 of SEQ ID NO: 2541
gagauaaaguuucuuauug

SEQ ID NO: 197223 - RNA, 19 nt, Artificial Sequence
  Description of Artificial Sequence: Synthetic oligonucleotide
  Antisense strand to SEQ ID NO: 197222
caauaagaaacuuuaucuc

SEQ ID NO: 197224 - RNA, 19 nt, Artificial Sequence
  Description of Artificial Sequence: Synthetic oligonucleotide
  Sense strand starting at position 2749 of SEQ ID NO: 2541
gcauaagaauuagcuuaga

SEQ ID NO: 197225 - RNA, 19 nt, Artificial Sequence
  Description of Artificial Sequence: Synthetic oligonucleotide
  Antisense strand to SEQ ID NO: 197224
ucuaagcuaauucuuaugc

SEQ ID NO: 197226 - RNA, 19 nt, Artificial Sequence
  Description of Artificial Sequence: Synthetic oligonucleotide
  Sense strand starting at position 2930 of SEQ ID NO: 2541
uugagauuaugccuuuaga

SEQ ID NO: 197227 - RNA, 19 nt, Artificial Sequence
  Description of Artificial Sequence: Synthetic oligonucleotide
  Antisense strand to SEQ ID NO: 197226
ucuaaaggcauaaucucaa

SEQ ID NO: 197228 - RNA, 19 nt, Artificial Sequence
  Description of Artificial Sequence: Synthetic oligonucleotide
  Sense strand starting at position 2933 of SEQ ID NO: 2541
agauuaugccuuuagagug

SEQ ID NO: 197229 - RNA, 19 nt, Artificial Sequence
  Description of Artificial Sequence: Synthetic oligonucleotide
  Antisense strand to SEQ ID NO: 197228
cacucuaaaggcauaaucu

SEQ ID NO: 197230 - RNA, 19 nt, Artificial Sequence
  Description of Artificial Sequence: Synthetic oligonucleotide
  Sense strand starting at position 2986 of SEQ ID NO: 2541
ucaauuaagggcuaagcaa

SEQ ID NO: 197231 - RNA, 19 nt, Artificial Sequence
  Description of Artificial Sequence: Synthetic oligonucleotide
  Antisense strand to SEQ ID NO: 197230
uugcuuagcccuuaauuga

SEQ ID NO: 197232 - RNA, 19 nt, Artificial Sequence
  Description of Artificial Sequence: Synthetic oligonucleotide
  Sense strand starting at position 3131 of SEQ ID NO: 2541
gaccuuauguggucccaga

SEQ ID NO: 197233 - RNA, 19 nt, Artificial Sequence
  Description of Artificial Sequence: Synthetic oligonucleotide
  Antisense strand to SEQ ID NO: 197232
ucugggaccacauaagguc

SEQ ID NO: 197234 - RNA, 19 nt, Artificial Sequence
  Description of Artificial Sequence: Synthetic oligonucleotide
  Sense strand starting at position 3259 of SEQ ID NO: 2541
gagaaaugguuagucaaua

SEQ ID NO: 197235 - RNA, 19 nt, Artificial Sequence
  Description of Artificial Sequence: Synthetic oligonucleotide
  Antisense strand to SEQ ID NO: 197234
uauugacuaaccauuucuc

SEQ ID NO: 197236 - RNA, 19 nt, Artificial Sequence
  Description of Artificial Sequence: Synthetic oligonucleotide
  Sense strand starting at position 3260 of SEQ ID NO: 2541
agaaaugguuagucaauau

SEQ ID NO: 197237 - RNA, 19 nt, Artificial Sequence
  Description of Artificial Sequence: Synthetic oligonucleotide
  Antisense strand to SEQ ID NO: 197236
auauugacuaaccauuucu

SEQ ID NO: 197238 - RNA, 19 nt, Artificial Sequence
  Description of Artificial Sequence: Synthetic oligonucleotide
  Sense strand starting at position 3264 of SEQ ID NO: 2541
augguuagucaauauguua

SEQ ID NO: 197239 - RNA, 19 nt, Artificial Sequence
  Description of Artificial Sequence: Synthetic oligonucleotide
  Antisense strand to SEQ ID NO: 197238
uaacauauugacuaaccau

SEQ ID NO: 197240 - RNA, 19 nt, Artificial Sequence
  Description of Artificial Sequence: Synthetic oligonucleotide
  Sense strand starting at position 3532 of SEQ ID NO: 2541
uuauuccaccauuagaguu

SEQ ID NO: 197241 - RNA, 19 nt, Artificial Sequence
  Description of Artificial Sequence: Synthetic oligonucleotide
  Antisense strand to SEQ ID NO: 197240
aacucuaaugguggaauaa

SEQ ID NO: 197242 - RNA, 19 nt, Artificial Sequence
  Description of Artificial Sequence: Synthetic oligonucleotide
  Sense strand starting at position 3677 of SEQ ID NO: 2541
guucuuaaggauugaguuc

SEQ ID NO: 197243 - RNA, 19 nt, Artificial Sequence
  Description of Artificial Sequence: Synthetic oligonucleotide
  Antisense strand to SEQ ID NO: 197242
gaacucaauccuuaagaac

SEQ ID NO: 197244 - RNA, 19 nt, Artificial Sequence
  Description of Artificial Sequence: Synthetic oligonucleotide
  Sense strand starting at position 3771 of SEQ ID NO: 2541
agcacuuuccuagguauuu

SEQ ID NO: 197245 - RNA, 19 nt, Artificial Sequence
  Description of Artificial Sequence: Synthetic oligonucleotide
  Antisense strand to SEQ ID NO: 197244
aaauaccuaggaaagugcu

SEQ ID NO: 197246 - RNA, 19 nt, Artificial Sequence
  Description of Artificial Sequence: Synthetic oligonucleotide
  Sense strand starting at position 3772 of SEQ ID NO: 2541
gcacuuuccuagguauuua

SEQ ID NO: 197247 - RNA, 19 nt, Artificial Sequence
  Description of Artificial Sequence: Synthetic oligonucleotide
  Antisense strand to SEQ ID NO: 197246
uaaauaccuaggaaagugc

SEQ ID NO: 197248 - RNA, 19 nt, Artificial Sequence
  Description of Artificial Sequence: Synthetic oligonucleotide
  Sense strand starting at position 3780 of SEQ ID NO: 2541
cuagguauuuaugacugaa

SEQ ID NO: 197249 - RNA, 19 nt, Artificial Sequence
  Description of Artificial Sequence: Synthetic oligonucleotide
  Antisense strand to SEQ ID NO: 197248
uucagucauaaauaccuag

SEQ ID NO: 197250 - RNA, 19 nt, Artificial Sequence
  Description of Artificial Sequence: Synthetic oligonucleotide
  Sense strand starting at position 3802 of SEQ ID NO: 2541
agagaaucuuuaguugauc

SEQ ID NO: 197251 - RNA, 19 nt, Artificial Sequence
  Description of Artificial Sequence: Synthetic oligonucleotide
  Antisense strand to SEQ ID NO: 197250
gaucaacuaaagauucucu

SEQ ID NO: 197252 - RNA, 19 nt, Artificial Sequence
  Description of Artificial Sequence: Synthetic oligonucleotide
  Sense strand starting at position 3803 of SEQ ID NO: 2541
gagaaucuuuaguugaucu

SEQ ID NO: 197253 - RNA, 19 nt, Artificial Sequence
  Description of Artificial Sequence: Synthetic oligonucleotide
  Antisense strand to SEQ ID NO: 197252
agaucaacuaaagauucuc

SEQ ID NO: 197254 - RNA, 19 nt, Artificial Sequence
  Description of Artificial Sequence: Synthetic oligonucleotide
  Sense strand starting at position 3898 of SEQ ID NO: 2541
agaaguugcaccugauuga

SEQ ID NO: 197255 - RNA, 19 nt, Artificial Sequence
  Description of Artificial Sequence: Synthetic oligonucleotide
  Antisense strand to SEQ ID NO: 197254
ucaaucaggugcaacuucu

SEQ ID NO: 197256 - RNA, 19 nt, Artificial Sequence
  Description of Artificial Sequence: Synthetic oligonucleotide
  Sense strand starting at position 246 of SEQ ID NO: 2542
gguggacucugcccaauga

SEQ ID NO: 197257 - RNA, 19 nt, Artificial Sequence
  Description of Artificial Sequence: Synthetic oligonucleotide
  Antisense strand to SEQ ID NO: 197256
ucauugggcagaguccacc

SEQ ID NO: 197258 - RNA, 19 nt, Artificial Sequence
  Description of Artificial Sequence: Synthetic oligonucleotide
  Sense strand starting at position 481 of SEQ ID NO: 2542
aggugugauggaugacaga

SEQ ID NO: 197259 - RNA, 19 nt, Artificial Sequence
  Description of Artificial Sequence: Synthetic oligonucleotide
  Antisense strand to SEQ ID NO: 197258
ucugucauccaucacaccu

SEQ ID NO: 197260 - RNA, 19 nt, Artificial Sequence
  Description of Artificial Sequence: Synthetic oligonucleotide
  Sense strand starting at position 528 of SEQ ID NO: 2542
agccuugaccucuguugga

SEQ ID NO: 197261 - RNA, 19 nt, Artificial Sequence
  Description of Artificial Sequence: Synthetic oligonucleotide
  Antisense strand to SEQ ID NO: 197260
uccaacagaggucaaggcu

SEQ ID NO: 197262 - RNA, 19 nt, Artificial Sequence
  Description of Artificial Sequence: Synthetic oligonucleotide
  Sense strand starting at position 790 of SEQ ID NO: 2542
uguugcggucgcguauuaa

SEQ ID NO: 197263 - RNA, 19 nt, Artificial Sequence
  Description of Artificial Sequence: Synthetic oligonucleotide
  Antisense strand to SEQ ID NO: 197262
uuaauacgcgaccgcaaca

SEQ ID NO: 197264 - RNA, 19 nt, Artificial Sequence
  Description of Artificial Sequence: Synthetic oligonucleotide
  Sense strand starting at position 890 of SEQ ID NO: 2542
uccugugucucucccagaa

SEQ ID NO: 197265 - RNA, 19 nt, Artificial Sequence
  Description of Artificial Sequence: Synthetic oligonucleotide
  Antisense strand to SEQ ID NO: 197264
uucugggagagacacagga

SEQ ID NO: 197266 - RNA, 19 nt, Artificial Sequence
  Description of Artificial Sequence: Synthetic oligonucleotide
  Sense strand starting at position 910 of SEQ ID NO: 2542
aguguacuccggaggcgaa

SEQ ID NO: 197267 - RNA, 19 nt, Artificial Sequence
  Description of Artificial Sequence: Synthetic oligonucleotide
  Antisense strand to SEQ ID NO: 197266
uucgccuccggaguacacu

SEQ ID NO: 197268 - RNA, 19 nt, Artificial Sequence
  Description of Artificial Sequence: Synthetic oligonucleotide
  Sense strand starting at position 911 of SEQ ID NO: 2542
guguacuccggaggcgaau

SEQ ID NO: 197269 - RNA, 19 nt, Artificial Sequence
  Description of Artificial Sequence: Synthetic oligonucleotide
  Antisense strand to SEQ ID NO: 197268
auucgccuccggaguacac

SEQ ID NO: 197270 - RNA, 19 nt, Artificial Sequence
  Description of Artificial Sequence: Synthetic oligonucleotide
  Sense strand starting at position 922 of SEQ ID NO: 2542
aggcgaauacucugcccau

SEQ ID NO: 197271 - RNA, 19 nt, Artificial Sequence
  Description of Artificial Sequence: Synthetic oligonucleotide
  Antisense strand to SEQ ID NO: 197270
augggcagaguauucgccu

SEQ ID NO: 197272 - RNA, 19 nt, Artificial Sequence
  Description of Artificial Sequence: Synthetic oligonucleotide
  Sense strand starting at position 923 of SEQ ID NO: 2542
ggcgaauacucugcccaua

SEQ ID NO: 197273 - RNA, 19 nt, Artificial Sequence
  Description of Artificial Sequence: Synthetic oligonucleotide
  Antisense strand to SEQ ID NO: 197272
uaugggcagaguauucgcc

SEQ ID NO: 197274 - RNA, 19 nt, Artificial Sequence
  Description of Artificial Sequence: Synthetic oligonucleotide
  Sense strand starting at position 953 of SEQ ID NO: 2542
uguguaucacaucaagauu

SEQ ID NO: 197275 - RNA, 19 nt, Artificial Sequence
  Description of Artificial Sequence: Synthetic oligonucleotide
  Antisense strand to SEQ ID NO: 197274
aaucuugaugugauacaca

SEQ ID NO: 197276 - RNA, 19 nt, Artificial Sequence
  Description of Artificial Sequence: Synthetic oligonucleotide
  Sense strand starting at position 979 of SEQ ID NO: 2542
gaaggcugcugagauuuga

SEQ ID NO: 197277 - RNA, 19 nt, Artificial Sequence
  Description of Artificial Sequence: Synthetic oligonucleotide
  Antisense strand to SEQ ID NO: 197276
ucaaaucucagcagccuuc

SEQ ID NO: 197278 - RNA, 19 nt, Artificial Sequence
  Description of Artificial Sequence: Synthetic oligonucleotide
  Sense strand starting at position 1193 of SEQ ID NO: 2542
agagucaggccucaugagu

SEQ ID NO: 197279 - RNA, 19 nt, Artificial Sequence
  Description of Artificial Sequence: Synthetic oligonucleotide
  Antisense strand to SEQ ID NO: 197278
acucaugaggccugacucu

SEQ ID NO: 197280 - RNA, 19 nt, Artificial Sequence
  Description of Artificial Sequence: Synthetic oligonucleotide
  Sense strand starting at position 1576 of SEQ ID NO: 2542
ucugcaugcgggugguaua

SEQ ID NO: 197281 - RNA, 19 nt, Artificial Sequence
  Description of Artificial Sequence: Synthetic oligonucleotide
  Antisense strand to SEQ ID NO: 197280
uauaccacccgcaugcaga

SEQ ID NO: 197282 - RNA, 19 nt, Artificial Sequence
  Description of Artificial Sequence: Synthetic oligonucleotide
  Sense strand starting at position 1708 of SEQ ID NO: 2542
acuccuaccugguacauau

SEQ ID NO: 197283 - RNA, 19 nt, Artificial Sequence
  Description of Artificial Sequence: Synthetic oligonucleotide
  Antisense strand to SEQ ID NO: 197282
auauguaccagguaggagu

SEQ ID NO: 197284 - RNA, 19 nt, Artificial Sequence
  Description of Artificial Sequence: Synthetic oligonucleotide
  Sense strand starting at position 2026 of SEQ ID NO: 2542
gaggcuuaucugugcuugu

SEQ ID NO: 197285 - RNA, 19 nt, Artificial Sequence
  Description of Artificial Sequence: Synthetic oligonucleotide
  Antisense strand to SEQ ID NO: 197284
acaagcacagauaagccuc

SEQ ID NO: 197286 - RNA, 19 nt, Artificial Sequence
  Description of Artificial Sequence: Synthetic oligonucleotide
  Sense strand starting at position 2211 of SEQ ID NO: 2542
gggugagagaaguguuucu

SEQ ID NO: 197287 - RNA, 19 nt, Artificial Sequence
  Description of Artificial Sequence: Synthetic oligonucleotide
  Antisense strand to SEQ ID NO: 197286
agaaacacuucucucaccc

SEQ ID NO: 197288 - RNA, 19 nt, Artificial Sequence
  Description of Artificial Sequence: Synthetic oligonucleotide
  Sense strand starting at position 2216 of SEQ ID NO: 2542
agagaaguguuucuuaaag

SEQ ID NO: 197289 - RNA, 19 nt, Artificial Sequence
  Description of Artificial Sequence: Synthetic oligonucleotide
  Antisense strand to SEQ ID NO: 197288
cuuuaagaaacacuucucu

SEQ ID NO: 197290 - RNA, 19 nt, Artificial Sequence
  Description of Artificial Sequence: Synthetic oligonucleotide
  Sense strand starting at position 2330 of SEQ ID NO: 2542
gugggcguguuccuauaaa

SEQ ID NO: 197291 - RNA, 19 nt, Artificial Sequence
  Description of Artificial Sequence: Synthetic oligonucleotide
  Antisense strand to SEQ ID NO: 197290
uuuauaggaacacgcccac

SEQ ID NO: 197292 - RNA, 19 nt, Artificial Sequence
  Description of Artificial Sequence: Synthetic oligonucleotide
  Sense strand starting at position 2424 of SEQ ID NO: 2542
ugggaaggcuuguaaacca

SEQ ID NO: 197293 - RNA, 19 nt, Artificial Sequence
  Description of Artificial Sequence: Synthetic oligonucleotide
  Antisense strand to SEQ ID NO: 197292
ugguuuacaagccuuccca

SEQ ID NO: 197294 - RNA, 19 nt, Artificial Sequence
  Description of Artificial Sequence: Synthetic oligonucleotide
  Sense strand starting at position 2566 of SEQ ID NO: 2542
cgacauagaccuuaagucu

SEQ ID NO: 197295 - RNA, 19 nt, Artificial Sequence
  Description of Artificial Sequence: Synthetic oligonucleotide
  Antisense strand to SEQ ID NO: 197294
agacuuaaggucuaugucg

SEQ ID NO: 197296 - RNA, 19 nt, Artificial Sequence
  Description of Artificial Sequence: Synthetic oligonucleotide
  Sense strand starting at position 2575 of SEQ ID NO: 2542
ccuuaagucugauaggaag

SEQ ID NO: 197297 - RNA, 19 nt, Artificial Sequence
  Description of Artificial Sequence: Synthetic oligonucleotide
  Antisense strand to SEQ ID NO: 197296
cuuccuaucagacuuaagg

SEQ ID NO: 197298 - RNA, 19 nt, Artificial Sequence
  Description of Artificial Sequence: Synthetic oligonucleotide
  Sense strand starting at position 2793 of SEQ ID NO: 2542
guaaaucucccauguauug

SEQ ID NO: 197299 - RNA, 19 nt, Artificial Sequence
  Description of Artificial Sequence: Synthetic oligonucleotide
  Antisense strand to SEQ ID NO: 197298
caauacaugggagauuuac

SEQ ID NO: 197300 - RNA, 19 nt, Artificial Sequence
  Description of Artificial Sequence: Synthetic oligonucleotide
  Sense strand starting at position 2808 of SEQ ID NO: 2542
auugauugaugccucauau

SEQ ID NO: 197301 - RNA, 19 nt, Artificial Sequence
  Description of Artificial Sequence: Synthetic oligonucleotide
  Antisense strand to SEQ ID NO: 197300
auaugaggcaucaaucaau

SEQ ID NO: 197302 - RNA, 19 nt, Artificial Sequence
  Description of Artificial Sequence: Synthetic oligonucleotide
  Sense strand starting at position 2979 of SEQ ID NO: 2542
uugagaccuguuugaggua

SEQ ID NO: 197303 - RNA, 19 nt, Artificial Sequence
  Description of Artificial Sequence: Synthetic oligonucleotide
  Antisense strand to SEQ ID NO: 197302
uaccucaaacaggucucaa

SEQ ID NO: 197304 - RNA, 19 nt, Artificial Sequence
  Description of Artificial Sequence: Synthetic oligonucleotide
  Sense strand starting at position 3012 of SEQ ID NO: 2542
ggcucaauuuagcaagcaa

SEQ ID NO: 197305 - RNA, 19 nt, Artificial Sequence
  Description of Artificial Sequence: Synthetic oligonucleotide
  Antisense strand to SEQ ID NO: 197304
uugcuugcuaaauugagcc

SEQ ID NO: 197306 - RNA, 19 nt, Artificial Sequence
  Description of Artificial Sequence: Synthetic oligonucleotide
  Sense strand starting at position 3026 of SEQ ID NO: 2542
agcaaaccugcaugguaua

SEQ ID NO: 197307 - RNA, 19 nt, Artificial Sequence
  Description of Artificial Sequence: Synthetic oligonucleotide
  Antisense strand to SEQ ID NO: 197306
uauaccaugcagguuugcu

SEQ ID NO: 197308 - RNA, 19 nt, Artificial Sequence
  Description of Artificial Sequence: Synthetic oligonucleotide
  Sense strand starting at position 3086 of SEQ ID NO: 2542
ugcugcauuccagagaugu

SEQ ID NO: 197309 - RNA, 19 nt, Artificial Sequence
  Description of Artificial Sequence: Synthetic oligonucleotide
  Antisense strand to SEQ ID NO: 197308
acaucucuggaaugcagca

SEQ ID NO: 197310 - RNA, 19 nt, Artificial Sequence
  Description of Artificial Sequence: Synthetic oligonucleotide
  Sense strand starting at position 3156 of SEQ ID NO: 2542
aggugccaacuuuagauaa

SEQ ID NO: 197311 - RNA, 19 nt, Artificial Sequence
  Description of Artificial Sequence: Synthetic oligonucleotide
  Antisense strand to SEQ ID NO: 197310
uuaucuaaaguuggcaccu

SEQ ID NO: 197312 - RNA, 19 nt, Artificial Sequence
  Description of Artificial Sequence: Synthetic oligonucleotide
  Sense strand starting at position 3158 of SEQ ID NO: 2542
gugccaacuuuagauaaua

SEQ ID NO: 197313 - RNA, 19 nt, Artificial Sequence
  Description of Artificial Sequence: Synthetic oligonucleotide
  Antisense strand to SEQ ID NO: 197312
uauuaucuaaaguuggcac

SEQ ID NO: 197314 - RNA, 19 nt, Artificial Sequence
  Description of Artificial Sequence: Synthetic oligonucleotide
  Sense strand starting at position 3250 of SEQ ID NO: 2542
auggucuccaggugaucuu

SEQ ID NO: 197315 - RNA, 19 nt, Artificial Sequence
  Description of Artificial Sequence: Synthetic oligonucleotide
  Antisense strand to SEQ ID NO: 197314
aagaucaccuggagaccau

SEQ ID NO: 197316 - RNA, 19 nt, Artificial Sequence
  Description of Artificial Sequence: Synthetic oligonucleotide
  Sense strand starting at position 3301 of SEQ ID NO: 2542
uggugaaaucuuugacccu

SEQ ID NO: 197317 - RNA, 19 nt, Artificial Sequence
  Description of Artificial Sequence: Synthetic oligonucleotide
  Antisense strand to SEQ ID NO: 197316
agggucaaagauuucacca

SEQ ID NO: 197318 - RNA, 19 nt, Artificial Sequence
  Description of Artificial Sequence: Synthetic oligonucleotide
  Sense strand starting at position 3302 of SEQ ID NO: 2542
ggugaaaucuuugacccuu

SEQ ID NO: 197319 - RNA, 19 nt, Artificial Sequence
  Description of Artificial Sequence: Synthetic oligonucleotide
  Antisense strand to SEQ ID NO: 197318
aagggucaaagauuucacc

SEQ ID NO: 197320 - RNA, 19 nt, Artificial Sequence
  Description of Artificial Sequence: Synthetic oligonucleotide
  Sense strand starting at position 3470 of SEQ ID NO: 2542
cucggucaugaagggaaua

SEQ ID NO: 197321 - RNA, 19 nt, Artificial Sequence
  Description of Artificial Sequence: Synthetic oligonucleotide
  Antisense strand to SEQ ID NO: 197320
uauucccuucaugaccgag

SEQ ID NO: 197322 - RNA, 19 nt, Artificial Sequence
  Description of Artificial Sequence: Synthetic oligonucleotide
  Sense strand starting at position 3471 of SEQ ID NO: 2542
ucggucaugaagggaauaa

SEQ ID NO: 197323 - RNA, 19 nt, Artificial Sequence
  Description of Artificial Sequence: Synthetic oligonucleotide
  Antisense strand to SEQ ID NO: 197322
uuauucccuucaugaccga

SEQ ID NO: 197324 - RNA, 19 nt, Artificial Sequence
  Description of Artificial Sequence: Synthetic oligonucleotide
  Sense strand starting at position 3597 of SEQ ID NO: 2542
uguaaaucgagcugcaguu

SEQ ID NO: 197325 - RNA, 19 nt, Artificial Sequence
  Description of Artificial Sequence: Synthetic oligonucleotide
  Antisense strand to SEQ ID NO: 197324
aacugcagcucgauuuaca

SEQ ID NO: 197326 - RNA, 19 nt, Artificial Sequence
  Description of Artificial Sequence: Synthetic oligonucleotide
  Sense strand starting at position 3638 of SEQ ID NO: 2542
uagccuucugcagguggaa

SEQ ID NO: 197327 - RNA, 19 nt, Artificial Sequence
  Description of Artificial Sequence: Synthetic oligonucleotide
  Antisense strand to SEQ ID NO: 197326
uuccaccugcagaaggcua

SEQ ID NO: 197328 - RNA, 19 nt, Artificial Sequence
  Description of Artificial Sequence: Synthetic oligonucleotide
  Sense strand starting at position 3640 of SEQ ID NO: 2542
gccuucugcagguggaauu

SEQ ID NO: 197329 - RNA, 19 nt, Artificial Sequence
  Description of Artificial Sequence: Synthetic oligonucleotide
  Antisense strand to SEQ ID NO: 197328
aauuccaccugcagaaggc

SEQ ID NO: 197330 - RNA, 19 nt, Artificial Sequence
  Description of Artificial Sequence: Synthetic oligonucleotide
  Sense strand starting at position 3652 of SEQ ID NO: 2542
uggaauuguucucauguag

SEQ ID NO: 197331 - RNA, 19 nt, Artificial Sequence
  Description of Artificial Sequence: Synthetic oligonucleotide
  Antisense strand to SEQ ID NO: 197330
cuacaugagaacaauucca

SEQ ID NO: 197332 - RNA, 19 nt, Artificial Sequence
  Description of Artificial Sequence: Synthetic oligonucleotide
  Sense strand starting at position 3658 of SEQ ID NO: 2542
uguucucauguagaacaua

SEQ ID NO: 197333 - RNA, 19 nt, Artificial Sequence
  Description of Artificial Sequence: Synthetic oligonucleotide
  Antisense strand to SEQ ID NO: 197332
uauguucuacaugagaaca

SEQ ID NO: 197334 - RNA, 19 nt, Artificial Sequence
  Description of Artificial Sequence: Synthetic oligonucleotide
  Sense strand starting at position 3840 of SEQ ID NO: 2542
uggcuuguuugaugauuuc

SEQ ID NO: 197335 - RNA, 19 nt, Artificial Sequence
  Description of Artificial Sequence: Synthetic oligonucleotide
  Antisense strand to SEQ ID NO: 197334
gaaaucaucaaacaagcca

SEQ ID NO: 197336 - RNA, 19 nt, Artificial Sequence
  Description of Artificial Sequence: Synthetic oligonucleotide
  Sense strand starting at position 186 of SEQ ID NO: 2543
acauucgcugaaugaugaa

SEQ ID NO: 197337 - RNA, 19 nt, Artificial Sequence
  Description of Artificial Sequence: Synthetic oligonucleotide
  Antisense strand to SEQ ID NO: 197336
uucaucauucagcgaaugu

SEQ ID NO: 197338 - RNA, 19 nt, Artificial Sequence
  Description of Artificial Sequence: Synthetic oligonucleotide
  Sense strand starting at position 2333 of SEQ ID NO: 2543
ccuauagcucucgaggaca

SEQ ID NO: 197339 - RNA, 19 nt, Artificial Sequence
  Description of Artificial Sequence: Synthetic oligonucleotide
  Antisense strand to SEQ ID NO: 197338
uguccucgagagcuauagg

SEQ ID NO: 197340 - RNA, 19 nt, Artificial Sequence
  Description of Artificial Sequence: Synthetic oligonucleotide
  Sense strand starting at position 2362 of SEQ ID NO: 2543
cgcccaggucgcuguaaga

SEQ ID NO: 197341 - RNA, 19 nt, Artificial Sequence
  Description of Artificial Sequence: Synthetic oligonucleotide
  Antisense strand to SEQ ID NO: 197340
ucuuacagcgaccugggcg

SEQ ID NO: 197342 - RNA, 19 nt, Artificial Sequence
  Description of Artificial Sequence: Synthetic oligonucleotide
  Sense strand starting at position 2421 of SEQ ID NO: 2543
gcggauuucgccuaagagc

SEQ ID NO: 197343 - RNA, 19 nt, Artificial Sequence
  Description of Artificial Sequence: Synthetic oligonucleotide
  Antisense strand to SEQ ID NO: 197342
gcucuuaggcgaaauccgc

SEQ ID NO: 197344 - RNA, 19 nt, Artificial Sequence
  Description of Artificial Sequence: Synthetic oligonucleotide
  Sense strand starting at position 2515 of SEQ ID NO: 2543
uccaacuagucccauguua

SEQ ID NO: 197345 - RNA, 19 nt, Artificial Sequence
  Description of Artificial Sequence: Synthetic oligonucleotide
  Antisense strand to SEQ ID NO: 197344
uaacaugggacuaguugga

SEQ ID NO: 197346 - RNA, 19 nt, Artificial Sequence
  Description of Artificial Sequence: Synthetic oligonucleotide
  Sense strand starting at position 2527 of SEQ ID NO: 2543
cauguuacugcgggaguau

SEQ ID NO: 197347 - RNA, 19 nt, Artificial Sequence
  Description of Artificial Sequence: Synthetic oligonucleotide
  Antisense strand to SEQ ID NO: 197346
auacucccgcaguaacaug

SEQ ID NO: 197348 - RNA, 19 nt, Artificial Sequence
  Description of Artificial Sequence: Synthetic oligonucleotide
  Sense strand starting at position 2528 of SEQ ID NO: 2543
auguuacugcgggaguauu

SEQ ID NO: 197349 - RNA, 19 nt, Artificial Sequence
  Description of Artificial Sequence: Synthetic oligonucleotide
  Antisense strand to SEQ ID NO: 197348
aauacucccgcaguaacau

SEQ ID NO: 197350 - RNA, 19 nt, Artificial Sequence
  Description of Artificial Sequence: Synthetic oligonucleotide
  Sense strand starting at position 2559 of SEQ ID NO: 2543
acguaauaauccuuuagag

SEQ ID NO: 197351 - RNA, 19 nt, Artificial Sequence
  Description of Artificial Sequence: Synthetic oligonucleotide
  Antisense strand to SEQ ID NO: 197350
cucuaaaggauuauuacgu

SEQ ID NO: 197352 - RNA, 19 nt, Artificial Sequence
  Description of Artificial Sequence: Synthetic oligonucleotide
  Sense strand starting at position 2594 of SEQ ID NO: 2543
auugcaaacgcauguuacu

SEQ ID NO: 197353 - RNA, 19 nt, Artificial Sequence
  Description of Artificial Sequence: Synthetic oligonucleotide
  Antisense strand to SEQ ID NO: 197352
aguaacaugcguuugcaau

SEQ ID NO: 197354 - RNA, 19 nt, Artificial Sequence
  Description of Artificial Sequence: Synthetic oligonucleotide
  Sense strand starting at position 2623 of SEQ ID NO: 2543
gcacuuuaucauggaguau

SEQ ID NO: 197355 - RNA, 19 nt, Artificial Sequence
  Description of Artificial Sequence: Synthetic oligonucleotide
  Antisense strand to SEQ ID NO: 197354
auacuccaugauaaagugc

SEQ ID NO: 197356 - RNA, 19 nt, Artificial Sequence
  Description of Artificial Sequence: Synthetic oligonucleotide
  Sense strand starting at position 2732 of SEQ ID NO: 2543
auggguaguuagcacagaa

SEQ ID NO: 197357 - RNA, 19 nt, Artificial Sequence
  Description of Artificial Sequence: Synthetic oligonucleotide
  Antisense strand to SEQ ID NO: 197356
uucugugcuaacuacccau

SEQ ID NO: 197358 - RNA, 19 nt, Artificial Sequence
  Description of Artificial Sequence: Synthetic oligonucleotide
  Sense strand starting at position 2770 of SEQ ID NO: 2543
gguggaagcaucugacugu

SEQ ID NO: 197359 - RNA, 19 nt, Artificial Sequence
  Description of Artificial Sequence: Synthetic oligonucleotide
  Antisense strand to SEQ ID NO: 197358
acagucagaugcuuccacc

SEQ ID NO: 197360 - RNA, 19 nt, Artificial Sequence
  Description of Artificial Sequence: Synthetic oligonucleotide
  Sense strand starting at position 2820 of SEQ ID NO: 2543
ugcggucauccacgaaaua

SEQ ID NO: 197361 - RNA, 19 nt, Artificial Sequence
  Description of Artificial Sequence: Synthetic oligonucleotide
  Antisense strand to SEQ ID NO: 197360
uauuucguggaugaccgca

SEQ ID NO: 197362 - RNA, 19 nt, Artificial Sequence
  Description of Artificial Sequence: Synthetic oligonucleotide
  Sense strand starting at position 2821 of SEQ ID NO: 2543
gcggucauccacgaaauac

SEQ ID NO: 197363 - RNA, 19 nt, Artificial Sequence
  Description of Artificial Sequence: Synthetic oligonucleotide
  Antisense strand to SEQ ID NO: 197362
guauuucguggaugaccgc

SEQ ID NO: 197364 - RNA, 19 nt, Artificial Sequence
  Description of Artificial Sequence: Synthetic oligonucleotide
  Sense strand starting at position 2831 of SEQ ID NO: 2543
acgaaauacacucacgagu

SEQ ID NO: 197365 - RNA, 19 nt, Artificial Sequence
  Description of Artificial Sequence: Synthetic oligonucleotide
  Antisense strand to SEQ ID NO: 197364
acucgugaguguauuucgu

SEQ ID NO: 197366 - RNA, 19 nt, Artificial Sequence
  Description of Artificial Sequence: Synthetic oligonucleotide
  Sense strand starting at position 2911 of SEQ ID NO: 2543
cuacaacagucauguaaac

SEQ ID NO: 197367 - RNA, 19 nt, Artificial Sequence
  Description of Artificial Sequence: Synthetic oligonucleotide
  Antisense strand to SEQ ID NO: 197366
guuuacaugacuguuguag

SEQ ID NO: 197368 - RNA, 19 nt, Artificial Sequence
  Description of Artificial Sequence: Synthetic oligonucleotide
  Sense strand starting at position 3040 of SEQ ID NO: 2543
guugccugaucuuaagaag

SEQ ID NO: 197369 - RNA, 19 nt, Artificial Sequence
  Description of Artificial Sequence: Synthetic oligonucleotide
  Antisense strand to SEQ ID NO: 197368
cuucuuaagaucaggcaac

SEQ ID NO: 197370 - RNA, 19 nt, Artificial Sequence
  Description of Artificial Sequence: Synthetic oligonucleotide
  Sense strand starting at position 3043 of SEQ ID NO: 2543
gccugaucuuaagaagccu

SEQ ID NO: 197371 - RNA, 19 nt, Artificial Sequence
  Description of Artificial Sequence: Synthetic oligonucleotide
  Antisense strand to SEQ ID NO: 197370
aggcuucuuaagaucaggc

SEQ ID NO: 197372 - RNA, 19 nt, Artificial Sequence
  Description of Artificial Sequence: Synthetic oligonucleotide
  Sense strand starting at position 3145 of SEQ ID NO: 2543
ucagauguguucuagaaca

SEQ ID NO: 197373 - RNA, 19 nt, Artificial Sequence
  Description of Artificial Sequence: Synthetic oligonucleotide
  Antisense strand to SEQ ID NO: 197372
uguucuagaacacaucuga

SEQ ID NO: 197374 - RNA, 19 nt, Artificial Sequence
  Description of Artificial Sequence: Synthetic oligonucleotide
  Sense strand starting at position 3395 of SEQ ID NO: 2543
cuuccauugagccgagauc

SEQ ID NO: 197375 - RNA, 19 nt, Artificial Sequence
  Description of Artificial Sequence: Synthetic oligonucleotide
  Antisense strand to SEQ ID NO: 197374
gaucucggcucaauggaag

SEQ ID NO: 197376 - RNA, 19 nt, Artificial Sequence
  Description of Artificial Sequence: Synthetic oligonucleotide
  Sense strand starting at position 3535 of SEQ ID NO: 2543
gacuucucaggguggagaa

SEQ ID NO: 197377 - RNA, 19 nt, Artificial Sequence
  Description of Artificial Sequence: Synthetic oligonucleotide
  Antisense strand to SEQ ID NO: 197376
uucuccacccugagaaguc

SEQ ID NO: 197378 - RNA, 19 nt, Artificial Sequence
  Description of Artificial Sequence: Synthetic oligonucleotide
  Sense strand starting at position 3574 of SEQ ID NO: 2543
augagagguguucagaagu

SEQ ID NO: 197379 - RNA, 19 nt, Artificial Sequence
  Description of Artificial Sequence: Synthetic oligonucleotide
  Antisense strand to SEQ ID NO: 197378
acuucugaacaccucucau

SEQ ID NO: 197380 - RNA, 19 nt, Artificial Sequence
  Description of Artificial Sequence: Synthetic oligonucleotide
  Sense strand starting at position 3580 of SEQ ID NO: 2543
gguguucagaaguggaaug

SEQ ID NO: 197381 - RNA, 19 nt, Artificial Sequence
  Description of Artificial Sequence: Synthetic oligonucleotide
  Antisense strand to SEQ ID NO: 197380
cauuccacuucugaacacc

SEQ ID NO: 197382 - RNA, 19 nt, Artificial Sequence
  Description of Artificial Sequence: Synthetic oligonucleotide
  Sense strand starting at position 3582 of SEQ ID NO: 2543
uguucagaaguggaaugua

SEQ ID NO: 197383 - RNA, 19 nt, Artificial Sequence
  Description of Artificial Sequence: Synthetic oligonucleotide
  Antisense strand to SEQ ID NO: 197382
uacauuccacuucugaaca

SEQ ID NO: 197384 - RNA, 19 nt, Artificial Sequence
  Description of Artificial Sequence: Synthetic oligonucleotide
  Sense strand starting at position 3585 of SEQ ID NO: 2543
ucagaaguggaauguaaau

SEQ ID NO: 197385 - RNA, 19 nt, Artificial Sequence
  Description of Artificial Sequence: Synthetic oligonucleotide
  Antisense strand to SEQ ID NO: 197384
auuuacauuccacuucuga

SEQ ID NO: 197386 - RNA, 19 nt, Artificial Sequence
  Description of Artificial Sequence: Synthetic oligonucleotide
  Sense strand starting at position 3591 of SEQ ID NO: 2543
guggaauguaaaugcguca

SEQ ID NO: 197387 - RNA, 19 nt, Artificial Sequence
  Description of Artificial Sequence: Synthetic oligonucleotide
  Antisense strand to SEQ ID NO: 197386
ugacgcauuuacauuccac

SEQ ID NO: 197388 - RNA, 19 nt, Artificial Sequence
  Description of Artificial Sequence: Synthetic oligonucleotide
  Sense strand starting at position 3621 of SEQ ID NO: 2543
gcagcagagaaauacguuu

SEQ ID NO: 197389 - RNA, 19 nt, Artificial Sequence
  Description of Artificial Sequence: Synthetic oligonucleotide
  Antisense strand to SEQ ID NO: 197388
aaacguauuucucugcugc

SEQ ID NO: 197390 - RNA, 19 nt, Artificial Sequence
  Description of Artificial Sequence: Synthetic oligonucleotide
  Sense strand starting at position 3707 of SEQ ID NO: 2543
uggaaugaggcuugggcua

SEQ ID NO: 197391 - RNA, 19 nt, Artificial Sequence
  Description of Artificial Sequence: Synthetic oligonucleotide
  Antisense strand to SEQ ID NO: 197390
uagcccaagccucauucca

SEQ ID NO: 197392 - RNA, 19 nt, Artificial Sequence
  Description of Artificial Sequence: Synthetic oligonucleotide
  Sense strand starting at position 3712 of SEQ ID NO: 2543
ugaggcuugggcuauaacu

SEQ ID NO: 197393 - RNA, 19 nt, Artificial Sequence
  Description of Artificial Sequence: Synthetic oligonucleotide
  Antisense strand to SEQ ID NO: 197392
aguuauagcccaagccuca

SEQ ID NO: 197394 - RNA, 19 nt, Artificial Sequence
  Description of Artificial Sequence: Synthetic oligonucleotide
  Sense strand starting at position 3720 of SEQ ID NO: 2543
gggcuauaacucugggaaa

SEQ ID NO: 197395 - RNA, 19 nt, Artificial Sequence
  Description of Artificial Sequence: Synthetic oligonucleotide
  Antisense strand to SEQ ID NO: 197394
uuucccagaguuauagccc

SEQ ID NO: 197396 - RNA, 19 nt, Artificial Sequence
  Description of Artificial Sequence: Synthetic oligonucleotide
  Sense strand starting at position 3855 of SEQ ID NO: 2543
gccgucaucaaguguggaa

SEQ ID NO: 197397 - RNA, 19 nt, Artificial Sequence
  Description of Artificial Sequence: Synthetic oligonucleotide
  Antisense strand to SEQ ID NO: 197396
uuccacacuugaugacggc

SEQ ID NO: 197398 - RNA, 19 nt, Artificial Sequence
  Description of Artificial Sequence: Synthetic oligonucleotide
  Sense strand starting at position 3873 of SEQ ID NO: 2543
aaaguaugagucggaugau

SEQ ID NO: 197399 - RNA, 19 nt, Artificial Sequence
  Description of Artificial Sequence: Synthetic oligonucleotide
  Antisense strand to SEQ ID NO: 197398
aucauccgacucauacuuu

SEQ ID NO: 197400 - RNA, 19 nt, Artificial Sequence
  Description of Artificial Sequence: Synthetic oligonucleotide
  Sense strand starting at position 3874 of SEQ ID NO: 2543
aaguaugagucggaugaua

SEQ ID NO: 197401 - RNA, 19 nt, Artificial Sequence
  Description of Artificial Sequence: Synthetic oligonucleotide
  Antisense strand to SEQ ID NO: 197400
uaucauccgacucauacuu

SEQ ID NO: 197402 - RNA, 19 nt, Artificial Sequence
  Description of Artificial Sequence: Synthetic oligonucleotide
  Sense strand starting at position 3876 of SEQ ID NO: 2543
guaugagucggaugauaaa

SEQ ID NO: 197403 - RNA, 19 nt, Artificial Sequence
  Description of Artificial Sequence: Synthetic oligonucleotide
  Antisense strand to SEQ ID NO: 197402
uuuaucauccgacucauac

SEQ ID NO: 197404 - RNA, 19 nt, Artificial Sequence
  Description of Artificial Sequence: Synthetic oligonucleotide
  Sense strand starting at position 3883 of SEQ ID NO: 2543
ucggaugauaaagguauau

SEQ ID NO: 197405 - RNA, 19 nt, Artificial Sequence
  Description of Artificial Sequence: Synthetic oligonucleotide
  Antisense strand to SEQ ID NO: 197404
auauaccuuuaucauccga

SEQ ID NO: 197406 - RNA, 19 nt, Artificial Sequence
  Description of Artificial Sequence: Synthetic oligonucleotide
  Sense strand starting at position 3902 of SEQ ID NO: 2543
aaagauauguauugggugu

SEQ ID NO: 197407 - RNA, 19 nt, Artificial Sequence
  Description of Artificial Sequence: Synthetic oligonucleotide
  Antisense strand to SEQ ID NO: 197406
acacccaauacauaucuuu

SEQ ID NO: 197408 - RNA, 19 nt, Artificial Sequence
  Description of Artificial Sequence: Synthetic oligonucleotide
  Sense strand starting at position 3903 of SEQ ID NO: 2543
aagauauguauugggugua

SEQ ID NO: 197409 - RNA, 19 nt, Artificial Sequence
  Description of Artificial Sequence: Synthetic oligonucleotide
  Antisense strand to SEQ ID NO: 197408
uacacccaauacauaucuu

SEQ ID NO: 197410 - RNA, 19 nt, Artificial Sequence
  Description of Artificial Sequence: Synthetic oligonucleotide
  Sense strand starting at position 3904 of SEQ ID NO: 2543
agauauguauuggguguaa

SEQ ID NO: 197411 - RNA, 19 nt, Artificial Sequence
  Description of Artificial Sequence: Synthetic oligonucleotide
  Antisense strand to SEQ ID NO: 197410
uuacacccaauacauaucu

SEQ ID NO: 197412 - RNA, 19 nt, Artificial Sequence
  Description of Artificial Sequence: Synthetic oligonucleotide
  Sense strand starting at position 3906 of SEQ ID NO: 2543
auauguauuggguguaaca

SEQ ID NO: 197413 - RNA, 19 nt, Artificial Sequence
  Description of Artificial Sequence: Synthetic oligonucleotide
  Antisense strand to SEQ ID NO: 197412
uguuacacccaauacauau

SEQ ID NO: 197414 - RNA, 19 nt, Artificial Sequence
  Description of Artificial Sequence: Synthetic oligonucleotide
  Sense strand starting at position 3908 of SEQ ID NO: 2543
auguauuggguguaacaac

SEQ ID NO: 197415 - RNA, 19 nt, Artificial Sequence
  Description of Artificial Sequence: Synthetic oligonucleotide
  Antisense strand to SEQ ID NO: 197414
guuguuacacccaauacau

SEQ ID NO: 197416 - RNA, 19 nt, Artificial Sequence
  Description of Artificial Sequence: Synthetic oligonucleotide
  Sense strand starting at position 107 of SEQ ID NO: 2544
agcguauaaguccagagaa

SEQ ID NO: 197417 - RNA, 19 nt, Artificial Sequence
  Description of Artificial Sequence: Synthetic oligonucleotide
  Antisense strand to SEQ ID NO: 197416
uucucuggacuuauacgcu

SEQ ID NO: 197418 - RNA, 19 nt, Artificial Sequence
  Description of Artificial Sequence: Synthetic oligonucleotide
  Sense strand starting at position 135 of SEQ ID NO: 2544
cugccaagaguaugaaacu

SEQ ID NO: 197419 - RNA, 19 nt, Artificial Sequence
  Description of Artificial Sequence: Synthetic oligonucleotide
  Antisense strand to SEQ ID NO: 197418
aguuucauacucuuggcag

SEQ ID NO: 197420 - RNA, 19 nt, Artificial Sequence
  Description of Artificial Sequence: Synthetic oligonucleotide
  Sense strand starting at position 160 of SEQ ID NO: 2544
ccaacuugguugcuaaaga

SEQ ID NO: 197421 - RNA, 19 nt, Artificial Sequence
  Description of Artificial Sequence: Synthetic oligonucleotide
  Antisense strand to SEQ ID NO: 197420
ucuuuagcaaccaaguugg

SEQ ID NO: 197422 - RNA, 19 nt, Artificial Sequence
  Description of Artificial Sequence: Synthetic oligonucleotide
  Sense strand starting at position 240 of SEQ ID NO: 2544
aggagguuugcgggaggaa

SEQ ID NO: 197423 - RNA, 19 nt, Artificial Sequence
  Description of Artificial Sequence: Synthetic oligonucleotide
  Antisense strand to SEQ ID NO: 197422
uuccucccgcaaaccuccu

SEQ ID NO: 197424 - RNA, 19 nt, Artificial Sequence
  Description of Artificial Sequence: Synthetic oligonucleotide
  Sense strand starting at position 420 of SEQ ID NO: 2544
gcgcgaauugccgcggaca

SEQ ID NO: 197425 - RNA, 19 nt, Artificial Sequence
  Description of Artificial Sequence: Synthetic oligonucleotide
  Antisense strand to SEQ ID NO: 197424
uguccgcggcaauucgcgc

SEQ ID NO: 197426 - RNA, 19 nt, Artificial Sequence
  Description of Artificial Sequence: Synthetic oligonucleotide
  Sense strand starting at position 537 of SEQ ID NO: 2544
cugagauugaacuggagca

SEQ ID NO: 197427 - RNA, 19 nt, Artificial Sequence
  Description of Artificial Sequence: Synthetic oligonucleotide
  Antisense strand to SEQ ID NO: 197426
ugcuccaguucaaucucag

SEQ ID NO: 197428 - RNA, 19 nt, Artificial Sequence
  Description of Artificial Sequence: Synthetic oligonucleotide
  Sense strand starting at position 1221 of SEQ ID NO: 2544
cgagcaggagucuaaauga

SEQ ID NO: 197429 - RNA, 19 nt, Artificial Sequence
  Description of Artificial Sequence: Synthetic oligonucleotide
  Antisense strand to SEQ ID NO: 197428
ucauuuagacuccugcucg

SEQ ID NO: 197430 - RNA, 19 nt, Artificial Sequence
  Description of Artificial Sequence: Synthetic oligonucleotide
  Sense strand starting at position 1662 of SEQ ID NO: 2544
cugaacuucugggcgugaa

SEQ ID NO: 197431 - RNA, 19 nt, Artificial Sequence
  Description of Artificial Sequence: Synthetic oligonucleotide
  Antisense strand to SEQ ID NO: 197430
uucacgcccagaaguucag

SEQ ID NO: 197432 - RNA, 19 nt, Artificial Sequence
  Description of Artificial Sequence: Synthetic oligonucleotide
  Sense strand starting at position 1663 of SEQ ID NO: 2544
ugaacuucugggcgugaau

SEQ ID NO: 197433 - RNA, 19 nt, Artificial Sequence
  Description of Artificial Sequence: Synthetic oligonucleotide
  Antisense strand to SEQ ID NO: 197432
auucacgcccagaaguuca

SEQ ID NO: 197434 - RNA, 19 nt, Artificial Sequence
  Description of Artificial Sequence: Synthetic oligonucleotide
  Sense strand starting at position 2263 of SEQ ID NO: 2544
gcccuauuucucugcagug

SEQ ID NO: 197435 - RNA, 19 nt, Artificial Sequence
  Description of Artificial Sequence: Synthetic oligonucleotide
  Antisense strand to SEQ ID NO: 197434
cacugcagagaaauagggc

SEQ ID NO: 197436 - RNA, 19 nt, Artificial Sequence
  Description of Artificial Sequence: Synthetic oligonucleotide
  Sense strand starting at position 2264 of SEQ ID NO: 2544
cccuauuucucugcagugu

SEQ ID NO: 197437 - RNA, 19 nt, Artificial Sequence
  Description of Artificial Sequence: Synthetic oligonucleotide
  Antisense strand to SEQ ID NO: 197436
acacugcagagaaauaggg

SEQ ID NO: 197438 - RNA, 19 nt, Artificial Sequence
  Description of Artificial Sequence: Synthetic oligonucleotide
  Sense strand starting at position 2268 of SEQ ID NO: 2544
auuucucugcagugugaaa

SEQ ID NO: 197439 - RNA, 19 nt, Artificial Sequence
  Description of Artificial Sequence: Synthetic oligonucleotide
  Antisense strand to SEQ ID NO: 197438
uuucacacugcagagaaau

SEQ ID NO: 197440 - RNA, 19 nt, Artificial Sequence
  Description of Artificial Sequence: Synthetic oligonucleotide
  Sense strand starting at position 2306 of SEQ ID NO: 2544
ggaagaggccuuugcaauc

SEQ ID NO: 197441 - RNA, 19 nt, Artificial Sequence
  Description of Artificial Sequence: Synthetic oligonucleotide
  Antisense strand to SEQ ID NO: 197440
gauugcaaaggccucuucc

SEQ ID NO: 197442 - RNA, 19 nt, Artificial Sequence
  Description of Artificial Sequence: Synthetic oligonucleotide
  Sense strand starting at position 2351 of SEQ ID NO: 2544
agagauuaaacggguccga

SEQ ID NO: 197443 - RNA, 19 nt, Artificial Sequence
  Description of Artificial Sequence: Synthetic oligonucleotide
  Antisense strand to SEQ ID NO: 197442
ucggacccguuuaaucucu

SEQ ID NO: 197444 - RNA, 19 nt, Artificial Sequence
  Description of Artificial Sequence: Synthetic oligonucleotide
  Sense strand starting at position 2477 of SEQ ID NO: 2544
cugagaacagcuuguauua

SEQ ID NO: 197445 - RNA, 19 nt, Artificial Sequence
  Description of Artificial Sequence: Synthetic oligonucleotide
  Antisense strand to SEQ ID NO: 197444
uaauacaagcuguucucag

SEQ ID NO: 197446 - RNA, 19 nt, Artificial Sequence
  Description of Artificial Sequence: Synthetic oligonucleotide
  Sense strand starting at position 2490 of SEQ ID NO: 2544
guauuaaggcccugagaca

SEQ ID NO: 197447 - RNA, 19 nt, Artificial Sequence
  Description of Artificial Sequence: Synthetic oligonucleotide
  Antisense strand to SEQ ID NO: 197446
ugucucagggccuuaauac

SEQ ID NO: 197448 - RNA, 19 nt, Artificial Sequence
  Description of Artificial Sequence: Synthetic oligonucleotide
  Sense strand starting at position 2536 of SEQ ID NO: 2544
gaaugcauuccugggagcu

SEQ ID NO: 197449 - RNA, 19 nt, Artificial Sequence
  Description of Artificial Sequence: Synthetic oligonucleotide
  Antisense strand to SEQ ID NO: 197448
agcucccaggaaugcauuc

SEQ ID NO: 197450 - RNA, 19 nt, Artificial Sequence
  Description of Artificial Sequence: Synthetic oligonucleotide
  Sense strand starting at position 2537 of SEQ ID NO: 2544
aaugcauuccugggagcuu

SEQ ID NO: 197451 - RNA, 19 nt, Artificial Sequence
  Description of Artificial Sequence: Synthetic oligonucleotide
  Antisense strand to SEQ ID NO: 197450
aagcucccaggaaugcauu

SEQ ID NO: 197452 - RNA, 19 nt, Artificial Sequence
  Description of Artificial Sequence: Synthetic oligonucleotide
  Sense strand starting at position 2574 of SEQ ID NO: 2544
acaggagaauuugggaaua

SEQ ID NO: 197453 - RNA, 19 nt, Artificial Sequence
  Description of Artificial Sequence: Synthetic oligonucleotide
  Antisense strand to SEQ ID NO: 197452
uauucccaaauucuccugu

SEQ ID NO: 197454 - RNA, 19 nt, Artificial Sequence
  Description of Artificial Sequence: Synthetic oligonucleotide
  Sense strand starting at position 2687 of SEQ ID NO: 2544
ucagaauggugucugaaca

SEQ ID NO: 197455 - RNA, 19 nt, Artificial Sequence
  Description of Artificial Sequence: Synthetic oligonucleotide
  Antisense strand to SEQ ID NO: 197454
uguucagacaccauucuga

SEQ ID NO: 197456 - RNA, 19 nt, Artificial Sequence
  Description of Artificial Sequence: Synthetic oligonucleotide
  Sense strand starting at position 2688 of SEQ ID NO: 2544
cagaauggugucugaacau

SEQ ID NO: 197457 - RNA, 19 nt, Artificial Sequence
  Description of Artificial Sequence: Synthetic oligonucleotide
  Antisense strand to SEQ ID NO: 197456
auguucagacaccauucug

SEQ ID NO: 197458 - RNA, 19 nt, Artificial Sequence
  Description of Artificial Sequence: Synthetic oligonucleotide
  Sense strand starting at position 2694 of SEQ ID NO: 2544
ggugucugaacauguguaa

SEQ ID NO: 197459 - RNA, 19 nt, Artificial Sequence
  Description of Artificial Sequence: Synthetic oligonucleotide
  Antisense strand to SEQ ID NO: 197458
uuacacauguucagacacc

SEQ ID NO: 197460 - RNA, 19 nt, Artificial Sequence
  Description of Artificial Sequence: Synthetic oligonucleotide
  Sense strand starting at position 2767 of SEQ ID NO: 2544
aacugaguugcagagcauu

SEQ ID NO: 197461 - RNA, 19 nt, Artificial Sequence
  Description of Artificial Sequence: Synthetic oligonucleotide
  Antisense strand to SEQ ID NO: 197460
aaugcucugcaacucaguu

SEQ ID NO: 197462 - RNA, 19 nt, Artificial Sequence
  Description of Artificial Sequence: Synthetic oligonucleotide
  Sense strand starting at position 2962 of SEQ ID NO: 2544
ccaucuuugggucacacaa

SEQ ID NO: 197463 - RNA, 19 nt, Artificial Sequence
  Description of Artificial Sequence: Synthetic oligonucleotide
  Antisense strand to SEQ ID NO: 197462
uugugugacccaaagaugg

SEQ ID NO: 197464 - RNA, 19 nt, Artificial Sequence
  Description of Artificial Sequence: Synthetic oligonucleotide
  Sense strand starting at position 2986 of SEQ ID NO: 2544
cuugauuccuucuuaaagg

SEQ ID NO: 197465 - RNA, 19 nt, Artificial Sequence
  Description of Artificial Sequence: Synthetic oligonucleotide
  Antisense strand to SEQ ID NO: 197464
ccuuuaagaaggaaucaag

SEQ ID NO: 197466 - RNA, 19 nt, Artificial Sequence
  Description of Artificial Sequence: Synthetic oligonucleotide
  Sense strand starting at position 3276 of SEQ ID NO: 2544
gaauauugauucucggaau

SEQ ID NO: 197467 - RNA, 19 nt, Artificial Sequence
  Description of Artificial Sequence: Synthetic oligonucleotide
  Antisense strand to SEQ ID NO: 197466
auuccgagaaucaauauuc

SEQ ID NO: 197468 - RNA, 19 nt, Artificial Sequence
  Description of Artificial Sequence: Synthetic oligonucleotide
  Sense strand starting at position 3400 of SEQ ID NO: 2544
agaauuaucucacccgaga

SEQ ID NO: 197469 - RNA, 19 nt, Artificial Sequence
  Description of Artificial Sequence: Synthetic oligonucleotide
  Antisense strand to SEQ ID NO: 197468
ucucgggugagauaauucu

SEQ ID NO: 197470 - RNA, 19 nt, Artificial Sequence
  Description of Artificial Sequence: Synthetic oligonucleotide
  Sense strand starting at position 3430 of SEQ ID NO: 2544
uccuaucuugguggaggaa

SEQ ID NO: 197471 - RNA, 19 nt, Artificial Sequence
  Description of Artificial Sequence: Synthetic oligonucleotide
  Antisense strand to SEQ ID NO: 197470
uuccuccaccaagauagga

SEQ ID NO: 197472 - RNA, 19 nt, Artificial Sequence
  Description of Artificial Sequence: Synthetic oligonucleotide
  Sense strand starting at position 3479 of SEQ ID NO: 2544
augcuaugguaguuaauac

SEQ ID NO: 197473 - RNA, 19 nt, Artificial Sequence
  Description of Artificial Sequence: Synthetic oligonucleotide
  Antisense strand to SEQ ID NO: 197472
guauuaacuaccauagcau

SEQ ID NO: 197474 - RNA, 19 nt, Artificial Sequence
  Description of Artificial Sequence: Synthetic oligonucleotide
  Sense strand starting at position 3489 of SEQ ID NO: 2544
aguuaauacuuuccuggua

SEQ ID NO: 197475 - RNA, 19 nt, Artificial Sequence
  Description of Artificial Sequence: Synthetic oligonucleotide
  Antisense strand to SEQ ID NO: 197474
uaccaggaaaguauuaacu

SEQ ID NO: 197476 - RNA, 19 nt, Artificial Sequence
  Description of Artificial Sequence: Synthetic oligonucleotide
  Sense strand starting at position 3504 of SEQ ID NO: 2544
gguacaauauauguuugau

SEQ ID NO: 197477 - RNA, 19 nt, Artificial Sequence
  Description of Artificial Sequence: Synthetic oligonucleotide
  Antisense strand to SEQ ID NO: 197476
aucaaacauauauuguacc

SEQ ID NO: 197478 - RNA, 19 nt, Artificial Sequence
  Description of Artificial Sequence: Synthetic oligonucleotide
  Sense strand starting at position 3646 of SEQ ID NO: 2544
uccaguuaauuugucaguu

SEQ ID NO: 197479 - RNA, 19 nt, Artificial Sequence
  Description of Artificial Sequence: Synthetic oligonucleotide
  Antisense strand to SEQ ID NO: 197478
aacugacaaauuaacugga

SEQ ID NO: 197480 - RNA, 19 nt, Artificial Sequence
  Description of Artificial Sequence: Synthetic oligonucleotide
  Sense strand starting at position 3647 of SEQ ID NO: 2544
ccaguuaauuugucaguua

SEQ ID NO: 197481 - RNA, 19 nt, Artificial Sequence
  Description of Artificial Sequence: Synthetic oligonucleotide
  Antisense strand to SEQ ID NO: 197480
uaacugacaaauuaacugg

SEQ ID NO: 197482 - RNA, 19 nt, Artificial Sequence
  Description of Artificial Sequence: Synthetic oligonucleotide
  Sense strand starting at position 3650 of SEQ ID NO: 2544
guuaauuugucaguuaacu

SEQ ID NO: 197483 - RNA, 19 nt, Artificial Sequence
  Description of Artificial Sequence: Synthetic oligonucleotide
  Antisense strand to SEQ ID NO: 197482
aguuaacugacaaauuaac

SEQ ID NO: 197484 - RNA, 19 nt, Artificial Sequence
  Description of Artificial Sequence: Synthetic oligonucleotide
  Sense strand starting at position 3655 of SEQ ID NO: 2544
uuugucaguuaacugugaa

SEQ ID NO: 197485 - RNA, 19 nt, Artificial Sequence
  Description of Artificial Sequence: Synthetic oligonucleotide
  Antisense strand to SEQ ID NO: 197484
uucacaguuaacugacaaa

SEQ ID NO: 197486 - RNA, 19 nt, Artificial Sequence
  Description of Artificial Sequence: Synthetic oligonucleotide
  Sense strand starting at position 3739 of SEQ ID NO: 2544
gguuuaacguucucuaaua

SEQ ID NO: 197487 - RNA, 19 nt, Artificial Sequence
  Description of Artificial Sequence: Synthetic oligonucleotide
  Antisense strand to SEQ ID NO: 197486
uauuagagaacguuaaacc

SEQ ID NO: 197488 - RNA, 19 nt, Artificial Sequence
  Description of Artificial Sequence: Synthetic oligonucleotide
  Sense strand starting at position 3740 of SEQ ID NO: 2544
guuuaacguucucuaauaa

SEQ ID NO: 197489 - RNA, 19 nt, Artificial Sequence
  Description of Artificial Sequence: Synthetic oligonucleotide
  Antisense strand to SEQ ID NO: 197488
uuauuagagaacguuaaac

SEQ ID NO: 197490 - RNA, 19 nt, Artificial Sequence
  Description of Artificial Sequence: Synthetic oligonucleotide
  Sense strand starting at position 3857 of SEQ ID NO: 2544
ugccuuucccuguagauua

SEQ ID NO: 197491 - RNA, 19 nt, Artificial Sequence
  Description of Artificial Sequence: Synthetic oligonucleotide
  Antisense strand to SEQ ID NO: 197490
uaaucuacagggaaaggca

SEQ ID NO: 197492 - RNA, 19 nt, Artificial Sequence
  Description of Artificial Sequence: Synthetic oligonucleotide
  Sense strand starting at position 3967 of SEQ ID NO: 2544
auguaugcaucuguagaca

SEQ ID NO: 197493 - RNA, 19 nt, Artificial Sequence
  Description of Artificial Sequence: Synthetic oligonucleotide
  Antisense strand to SEQ ID NO: 197492
ugucuacagaugcauacau

SEQ ID NO: 197494 - RNA, 19 nt, Artificial Sequence
  Description of Artificial Sequence: Synthetic oligonucleotide
  Sense strand starting at position 3980 of SEQ ID NO: 2544
uagacaugugggugucuaa

SEQ ID NO: 197495 - RNA, 19 nt, Artificial Sequence
  Description of Artificial Sequence: Synthetic oligonucleotide
  Antisense strand to SEQ ID NO: 197494
uuagacacccacaugucua

SEQ ID NO: 197496 - RNA, 19 nt, Artificial Sequence
  Description of Artificial Sequence: Synthetic oligonucleotide
  Sense strand starting at position 135 of SEQ ID NO: 2545
cugauugcaccaugagguu

SEQ ID NO: 197497 - RNA, 19 nt, Artificial Sequence
  Description of Artificial Sequence: Synthetic oligonucleotide
  Antisense strand to SEQ ID NO: 197496
aaccucauggugcaaucag

SEQ ID NO: 197498 - RNA, 19 nt, Artificial Sequence
  Description of Artificial Sequence: Synthetic oligonucleotide
  Sense strand starting at position 307 of SEQ ID NO: 2545
gugaaagggccgugacauu

SEQ ID NO: 197499 - RNA, 19 nt, Artificial Sequence
  Description of Artificial Sequence: Synthetic oligonucleotide
  Antisense strand to SEQ ID NO: 197498
aaugucacggcccuuucac

SEQ ID NO: 197500 - RNA, 19 nt, Artificial Sequence
  Description of Artificial Sequence: Synthetic oligonucleotide
  Sense strand starting at position 314 of SEQ ID NO: 2545
ggccgugacauuugucuuu

SEQ ID NO: 197501 - RNA, 19 nt, Artificial Sequence
  Description of Artificial Sequence: Synthetic oligonucleotide
  Antisense strand to SEQ ID NO: 197500
aaagacaaaugucacggcc

SEQ ID NO: 197502 - RNA, 19 nt, Artificial Sequence
  Description of Artificial Sequence: Synthetic oligonucleotide
  Sense strand starting at position 400 of SEQ ID NO: 2545
guggagguucccgagagau

SEQ ID NO: 197503 - RNA, 19 nt, Artificial Sequence
  Description of Artificial Sequence: Synthetic oligonucleotide
  Antisense strand to SEQ ID NO: 197502
aucucucgggaaccuccac

SEQ ID NO: 197504 - RNA, 19 nt, Artificial Sequence
  Description of Artificial Sequence: Synthetic oligonucleotide
  Sense strand starting at position 402 of SEQ ID NO: 2545
ggagguucccgagagauuc

SEQ ID NO: 197505 - RNA, 19 nt, Artificial Sequence
  Description of Artificial Sequence: Synthetic oligonucleotide
  Antisense strand to SEQ ID NO: 197504
gaaucucucgggaaccucc

SEQ ID NO: 197506 - RNA, 19 nt, Artificial Sequence
  Description of Artificial Sequence: Synthetic oligonucleotide
  Sense strand starting at position 428 of SEQ ID NO: 2545
ccaagagcuggcgguauaa

SEQ ID NO: 197507 - RNA, 19 nt, Artificial Sequence
  Description of Artificial Sequence: Synthetic oligonucleotide
  Antisense strand to SEQ ID NO: 197506
uuauaccgccagcucuugg

SEQ ID NO: 197508 - RNA, 19 nt, Artificial Sequence
  Description of Artificial Sequence: Synthetic oligonucleotide
  Sense strand starting at position 737 of SEQ ID NO: 2545
cagcucugauguuugagga

SEQ ID NO: 197509 - RNA, 19 nt, Artificial Sequence
  Description of Artificial Sequence: Synthetic oligonucleotide
  Antisense strand to SEQ ID NO: 197508
uccucaaacaucagagcug

SEQ ID NO: 197510 - RNA, 19 nt, Artificial Sequence
  Description of Artificial Sequence: Synthetic oligonucleotide
  Sense strand starting at position 747 of SEQ ID NO: 2545
guuugaggaacaugcuaaa

SEQ ID NO: 197511 - RNA, 19 nt, Artificial Sequence
  Description of Artificial Sequence: Synthetic oligonucleotide
  Antisense strand to SEQ ID NO: 197510
uuuagcauguuccucaaac

SEQ ID NO: 197512 - RNA, 19 nt, Artificial Sequence
  Description of Artificial Sequence: Synthetic oligonucleotide
  Sense strand starting at position 785 of SEQ ID NO: 2545
acuuaaucaccgcaaauga

SEQ ID NO: 197513 - RNA, 19 nt, Artificial Sequence
  Description of Artificial Sequence: Synthetic oligonucleotide
  Antisense strand to SEQ ID NO: 197512
ucauuugcggugauuaagu

SEQ ID NO: 197514 - RNA, 19 nt, Artificial Sequence
  Description of Artificial Sequence: Synthetic oligonucleotide
  Sense strand starting at position 805 of SEQ ID NO: 2545
gagcauugucauggguuac

SEQ ID NO: 197515 - RNA, 19 nt, Artificial Sequence
  Description of Artificial Sequence: Synthetic oligonucleotide
  Antisense strand to SEQ ID NO: 197514
guaacccaugacaaugcuc

SEQ ID NO: 197516 - RNA, 19 nt, Artificial Sequence
  Description of Artificial Sequence: Synthetic oligonucleotide
  Sense strand starting at position 878 of SEQ ID NO: 2545
ucaaguggugcucacacua

SEQ ID NO: 197517 - RNA, 19 nt, Artificial Sequence
  Description of Artificial Sequence: Synthetic oligonucleotide
  Antisense strand to SEQ ID NO: 197516
uagugugagcaccacuuga

SEQ ID NO: 197518 - RNA, 19 nt, Artificial Sequence
  Description of Artificial Sequence: Synthetic oligonucleotide
  Sense strand starting at position 991 of SEQ ID NO: 2545
gaaggcugugcugauggaa

SEQ ID NO: 197519 - RNA, 19 nt, Artificial Sequence
  Description of Artificial Sequence: Synthetic oligonucleotide
  Antisense strand to SEQ ID NO: 197518
uuccaucagcacagccuuc

SEQ ID NO: 197520 - RNA, 19 nt, Artificial Sequence
  Description of Artificial Sequence: Synthetic oligonucleotide
  Sense strand starting at position 1008 of SEQ ID NO: 2545
aagaguuacucccucguaa

SEQ ID NO: 197521 - RNA, 19 nt, Artificial Sequence
  Description of Artificial Sequence: Synthetic oligonucleotide
  Antisense strand to SEQ ID NO: 197520
uuacgagggaguaacucuu

SEQ ID NO: 197522 - RNA, 19 nt, Artificial Sequence
  Description of Artificial Sequence: Synthetic oligonucleotide
  Sense strand starting at position 1010 of SEQ ID NO: 2545
gaguuacucccucguaaag

SEQ ID NO: 197523 - RNA, 19 nt, Artificial Sequence
  Description of Artificial Sequence: Synthetic oligonucleotide
  Antisense strand to SEQ ID NO: 197522
cuuuacgagggaguaacuc

SEQ ID NO: 197524 - RNA, 19 nt, Artificial Sequence
  Description of Artificial Sequence: Synthetic oligonucleotide
  Sense strand starting at position 1044 of SEQ ID NO: 2545
ggcuuugucaucgcuguca

SEQ ID NO: 197525 - RNA, 19 nt, Artificial Sequence
  Description of Artificial Sequence: Synthetic oligonucleotide
  Antisense strand to SEQ ID NO: 197524
ugacagcgaugacaaagcc

SEQ ID NO: 197526 - RNA, 19 nt, Artificial Sequence
  Description of Artificial Sequence: Synthetic oligonucleotide
  Sense strand starting at position 1071 of SEQ ID NO: 2545
cgaagaagccuuuggccaa

SEQ ID NO: 197527 - RNA, 19 nt, Artificial Sequence
  Description of Artificial Sequence: Synthetic oligonucleotide
  Antisense strand to SEQ ID NO: 197526
uuggccaaaggcuucuucg

SEQ ID NO: 197528 - RNA, 19 nt, Artificial Sequence
  Description of Artificial Sequence: Synthetic oligonucleotide
  Sense strand starting at position 1092 of SEQ ID NO: 2545
guaugagauuuauggugaa

SEQ ID NO: 197529 - RNA, 19 nt, Artificial Sequence
  Description of Artificial Sequence: Synthetic oligonucleotide
  Antisense strand to SEQ ID NO: 197528
uucaccauaaaucucauac

SEQ ID NO: 197530 - RNA, 19 nt, Artificial Sequence
  Description of Artificial Sequence: Synthetic oligonucleotide
  Sense strand starting at position 1095 of SEQ ID NO: 2545
ugagauuuauggugaaaua

SEQ ID NO: 197531 - RNA, 19 nt, Artificial Sequence
  Description of Artificial Sequence: Synthetic oligonucleotide
  Antisense strand to SEQ ID NO: 197530
uauuucaccauaaaucuca

SEQ ID NO: 197532 - RNA, 19 nt, Artificial Sequence
  Description of Artificial Sequence: Synthetic oligonucleotide
  Sense strand starting at position 1210 of SEQ ID NO: 2545
cggcaacucuugguauaua

SEQ ID NO: 197533 - RNA, 19 nt, Artificial Sequence
  Description of Artificial Sequence: Synthetic oligonucleotide
  Antisense strand to SEQ ID NO: 197532
uauauaccaagaguugccg

SEQ ID NO: 197534 - RNA, 19 nt, Artificial Sequence
  Description of Artificial Sequence: Synthetic oligonucleotide
  Sense strand starting at position 1236 of SEQ ID NO: 2545
uuaguucuacuuugugacu

SEQ ID NO: 197535 - RNA, 19 nt, Artificial Sequence
  Description of Artificial Sequence: Synthetic oligonucleotide
  Antisense strand to SEQ ID NO: 197534
agucacaaaguagaacuaa

SEQ ID NO: 197536 - RNA, 19 nt, Artificial Sequence
  Description of Artificial Sequence: Synthetic oligonucleotide
  Sense strand starting at position 1641 of SEQ ID NO: 2545
gucacaugauuugaaacca

SEQ ID NO: 197537 - RNA, 19 nt, Artificial Sequence
  Description of Artificial Sequence: Synthetic oligonucleotide
  Antisense strand to SEQ ID NO: 197536
ugguuucaaaucaugugac

SEQ ID NO: 197538 - RNA, 19 nt, Artificial Sequence
  Description of Artificial Sequence: Synthetic oligonucleotide
  Sense strand starting at position 1806 of SEQ ID NO: 2545
uucguugcaugacugaaau

SEQ ID NO: 197539 - RNA, 19 nt, Artificial Sequence
  Description of Artificial Sequence: Synthetic oligonucleotide
  Antisense strand to SEQ ID NO: 197538
auuucagucaugcaacgaa

SEQ ID NO: 197540 - RNA, 19 nt, Artificial Sequence
  Description of Artificial Sequence: Synthetic oligonucleotide
  Sense strand starting at position 2250 of SEQ ID NO: 2545
cggccaguaaccugacuua

SEQ ID NO: 197541 - RNA, 19 nt, Artificial Sequence
  Description of Artificial Sequence: Synthetic oligonucleotide
  Antisense strand to SEQ ID NO: 197540
uaagucagguuacuggccg

SEQ ID NO: 197542 - RNA, 19 nt, Artificial Sequence
  Description of Artificial Sequence: Synthetic oligonucleotide
  Sense strand starting at position 2253 of SEQ ID NO: 2545
ccaguaaccugacuuaaag

SEQ ID NO: 197543 - RNA, 19 nt, Artificial Sequence
  Description of Artificial Sequence: Synthetic oligonucleotide
  Antisense strand to SEQ ID NO: 197542
cuuuaagucagguuacugg

SEQ ID NO: 197544 - RNA, 19 nt, Artificial Sequence
  Description of Artificial Sequence: Synthetic oligonucleotide
  Sense strand starting at position 2448 of SEQ ID NO: 2545
gcccacagaugcuuaagaa

SEQ ID NO: 197545 - RNA, 19 nt, Artificial Sequence
  Description of Artificial Sequence: Synthetic oligonucleotide
  Antisense strand to SEQ ID NO: 197544
uucuuaagcaucugugggc

SEQ ID NO: 197546 - RNA, 19 nt, Artificial Sequence
  Description of Artificial Sequence: Synthetic oligonucleotide
  Sense strand starting at position 2648 of SEQ ID NO: 2545
auccacucugcagaugaau

SEQ ID NO: 197547 - RNA, 19 nt, Artificial Sequence
  Description of Artificial Sequence: Synthetic oligonucleotide
  Antisense strand to SEQ ID NO: 197546
auucaucugcagaguggau

SEQ ID NO: 197548 - RNA, 19 nt, Artificial Sequence
  Description of Artificial Sequence: Synthetic oligonucleotide
  Sense strand starting at position 3040 of SEQ ID NO: 2545
ggccuuugaguccauguuu

SEQ ID NO: 197549 - RNA, 19 nt, Artificial Sequence
  Description of Artificial Sequence: Synthetic oligonucleotide
  Antisense strand to SEQ ID NO: 197548
aaacauggacucaaaggcc

SEQ ID NO: 197550 - RNA, 19 nt, Artificial Sequence
  Description of Artificial Sequence: Synthetic oligonucleotide
  Sense strand starting at position 3045 of SEQ ID NO: 2545
uugaguccauguuuacaca

SEQ ID NO: 197551 - RNA, 19 nt, Artificial Sequence
  Description of Artificial Sequence: Synthetic oligonucleotide
  Antisense strand to SEQ ID NO: 197550
uguguaaacauggacucaa

SEQ ID NO: 197552 - RNA, 19 nt, Artificial Sequence
  Description of Artificial Sequence: Synthetic oligonucleotide
  Sense strand starting at position 3046 of SEQ ID NO: 2545
ugaguccauguuuacacau

SEQ ID NO: 197553 - RNA, 19 nt, Artificial Sequence
  Description of Artificial Sequence: Synthetic oligonucleotide
  Antisense strand to SEQ ID NO: 197552
auguguaaacauggacuca

SEQ ID NO: 197554 - RNA, 19 nt, Artificial Sequence
  Description of Artificial Sequence: Synthetic oligonucleotide
  Sense strand starting at position 3120 of SEQ ID NO: 2545
uuccauagcugacuguauu

SEQ ID NO: 197555 - RNA, 19 nt, Artificial Sequence
  Description of Artificial Sequence: Synthetic oligonucleotide
  Antisense strand to SEQ ID NO: 197554
aauacagucagcuauggaa

SEQ ID NO: 197556 - RNA, 19 nt, Artificial Sequence
  Description of Artificial Sequence: Synthetic oligonucleotide
  Sense strand starting at position 3121 of SEQ ID NO: 2545
uccauagcugacuguauuu

SEQ ID NO: 197557 - RNA, 19 nt, Artificial Sequence
  Description of Artificial Sequence: Synthetic oligonucleotide
  Antisense strand to SEQ ID NO: 197556
aaauacagucagcuaugga

SEQ ID NO: 197558 - RNA, 19 nt, Artificial Sequence
  Description of Artificial Sequence: Synthetic oligonucleotide
  Sense strand starting at position 3314 of SEQ ID NO: 2545
ccgauaaagccauggaaga

SEQ ID NO: 197559 - RNA, 19 nt, Artificial Sequence
  Description of Artificial Sequence: Synthetic oligonucleotide
  Antisense strand to SEQ ID NO: 197558
ucuuccauggcuuuaucgg

SEQ ID NO: 197560 - RNA, 19 nt, Artificial Sequence
  Description of Artificial Sequence: Synthetic oligonucleotide
  Sense strand starting at position 3315 of SEQ ID NO: 2545
cgauaaagccauggaagaa

SEQ ID NO: 197561 - RNA, 19 nt, Artificial Sequence
  Description of Artificial Sequence: Synthetic oligonucleotide
  Antisense strand to SEQ ID NO: 197560
uucuuccauggcuuuaucg

SEQ ID NO: 197562 - RNA, 19 nt, Artificial Sequence
  Description of Artificial Sequence: Synthetic oligonucleotide
  Sense strand starting at position 3457 of SEQ ID NO: 2545
ucaccuacgagcugguuaa

SEQ ID NO: 197563 - RNA, 19 nt, Artificial Sequence
  Description of Artificial Sequence: Synthetic oligonucleotide
  Antisense strand to SEQ ID NO: 197562
uuaaccagcucguagguga

SEQ ID NO: 197564 - RNA, 19 nt, Artificial Sequence
  Description of Artificial Sequence: Synthetic oligonucleotide
  Sense strand starting at position 3458 of SEQ ID NO: 2545
caccuacgagcugguuaaa

SEQ ID NO: 197565 - RNA, 19 nt, Artificial Sequence
  Description of Artificial Sequence: Synthetic oligonucleotide
  Antisense strand to SEQ ID NO: 197564
uuuaaccagcucguaggug

SEQ ID NO: 197566 - RNA, 19 nt, Artificial Sequence
  Description of Artificial Sequence: Synthetic oligonucleotide
  Sense strand starting at position 3481 of SEQ ID NO: 2545
agauucugacgcugcagau

SEQ ID NO: 197567 - RNA, 19 nt, Artificial Sequence
  Description of Artificial Sequence: Synthetic oligonucleotide
  Antisense strand to SEQ ID NO: 197566
aucugcagcgucagaaucu

SEQ ID NO: 197568 - RNA, 19 nt, Artificial Sequence
  Description of Artificial Sequence: Synthetic oligonucleotide
  Sense strand starting at position 3517 of SEQ ID NO: 2545
gcuugagauuucuccaagc

SEQ ID NO: 197569 - RNA, 19 nt, Artificial Sequence
  Description of Artificial Sequence: Synthetic oligonucleotide
  Antisense strand to SEQ ID NO: 197568
gcuuggagaaaucucaagc

SEQ ID NO: 197570 - RNA, 19 nt, Artificial Sequence
  Description of Artificial Sequence: Synthetic oligonucleotide
  Sense strand starting at position 3619 of SEQ ID NO: 2545
agccacuagcuaugcuaaa

SEQ ID NO: 197571 - RNA, 19 nt, Artificial Sequence
  Description of Artificial Sequence: Synthetic oligonucleotide
  Antisense strand to SEQ ID NO: 197570
uuuagcauagcuaguggcu

SEQ ID NO: 197572 - RNA, 19 nt, Artificial Sequence
  Description of Artificial Sequence: Synthetic oligonucleotide
  Sense strand starting at position 3699 of SEQ ID NO: 2545
ugucuuaugagguaaguuu

SEQ ID NO: 197573 - RNA, 19 nt, Artificial Sequence
  Description of Artificial Sequence: Synthetic oligonucleotide
  Antisense strand to SEQ ID NO: 197572
aaacuuaccucauaagaca

SEQ ID NO: 197574 - RNA, 19 nt, Artificial Sequence
  Description of Artificial Sequence: Synthetic oligonucleotide
  Sense strand starting at position 3772 of SEQ ID NO: 2545
agaacuuuccaucguggca

SEQ ID NO: 197575 - RNA, 19 nt, Artificial Sequence
  Description of Artificial Sequence: Synthetic oligonucleotide
  Antisense strand to SEQ ID NO: 197574
ugccacgauggaaaguucu

SEQ ID NO: 197576 - RNA, 19 nt, Artificial Sequence
  Description of Artificial Sequence: Synthetic oligonucleotide
  Sense strand starting at position 345 of SEQ ID NO: 2546
aggccagauuaucuuacuu

SEQ ID NO: 197577 - RNA, 19 nt, Artificial Sequence
  Description of Artificial Sequence: Synthetic oligonucleotide
  Antisense strand to SEQ ID NO: 197576
aaguaagauaaucuggccu

SEQ ID NO: 197578 - RNA, 19 nt, Artificial Sequence
  Description of Artificial Sequence: Synthetic oligonucleotide
  Sense strand starting at position 401 of SEQ ID NO: 2546
acuuuaugugaucaucuga

SEQ ID NO: 197579 - RNA, 19 nt, Artificial Sequence
  Description of Artificial Sequence: Synthetic oligonucleotide
  Antisense strand to SEQ ID NO: 197578
ucagaugaucacauaaagu

SEQ ID NO: 197580 - RNA, 19 nt, Artificial Sequence
  Description of Artificial Sequence: Synthetic oligonucleotide
  Sense strand starting at position 722 of SEQ ID NO: 2546
agaacagacgcauggaauu

SEQ ID NO: 197581 - RNA, 19 nt, Artificial Sequence
  Description of Artificial Sequence: Synthetic oligonucleotide
  Antisense strand to SEQ ID NO: 197580
aauuccaugcgucuguucu

SEQ ID NO: 197582 - RNA, 19 nt, Artificial Sequence
  Description of Artificial Sequence: Synthetic oligonucleotide
  Sense strand starting at position 892 of SEQ ID NO: 2546
agcaaauuaaauggagagu

SEQ ID NO: 197583 - RNA, 19 nt, Artificial Sequence
  Description of Artificial Sequence: Synthetic oligonucleotide
  Antisense strand to SEQ ID NO: 197582
acucuccauuuaauuugcu

SEQ ID NO: 197584 - RNA, 19 nt, Artificial Sequence
  Description of Artificial Sequence: Synthetic oligonucleotide
  Sense strand starting at position 948 of SEQ ID NO: 2546
cggcuuucuccauugugua

SEQ ID NO: 197585 - RNA, 19 nt, Artificial Sequence
  Description of Artificial Sequence: Synthetic oligonucleotide
  Antisense strand to SEQ ID NO: 197584
uacacaauggagaaagccg

SEQ ID NO: 197586 - RNA, 19 nt, Artificial Sequence
  Description of Artificial Sequence: Synthetic oligonucleotide
  Sense strand starting at position 1126 of SEQ ID NO: 2546
gguguacauuauccacauu

SEQ ID NO: 197587 - RNA, 19 nt, Artificial Sequence
  Description of Artificial Sequence: Synthetic oligonucleotide
  Antisense strand to SEQ ID NO: 197586
aauguggauaauguacacc

SEQ ID NO: 197588 - RNA, 19 nt, Artificial Sequence
  Description of Artificial Sequence: Synthetic oligonucleotide
  Sense strand starting at position 1369 of SEQ ID NO: 2546
cgagaagucuuugccacaa

SEQ ID NO: 197589 - RNA, 19 nt, Artificial Sequence
  Description of Artificial Sequence: Synthetic oligonucleotide
  Antisense strand to SEQ ID NO: 197588
uuguggcaaagacuucucg

SEQ ID NO: 197590 - RNA, 19 nt, Artificial Sequence
  Description of Artificial Sequence: Synthetic oligonucleotide
  Sense strand starting at position 2073 of SEQ ID NO: 2546
ggagguuugcuacaggcga

SEQ ID NO: 197591 - RNA, 19 nt, Artificial Sequence
  Description of Artificial Sequence: Synthetic oligonucleotide
  Antisense strand to SEQ ID NO: 197590
ucgccuguagcaaaccucc

SEQ ID NO: 197592 - RNA, 19 nt, Artificial Sequence
  Description of Artificial Sequence: Synthetic oligonucleotide
  Sense strand starting at position 2249 of SEQ ID NO: 2546
gaucaaacucuaggacgua

SEQ ID NO: 197593 - RNA, 19 nt, Artificial Sequence
  Description of Artificial Sequence: Synthetic oligonucleotide
  Antisense strand to SEQ ID NO: 197592
uacguccuagaguuugauc

SEQ ID NO: 197594 - RNA, 19 nt, Artificial Sequence
  Description of Artificial Sequence: Synthetic oligonucleotide
  Sense strand starting at position 2261 of SEQ ID NO: 2546
ggacguacccguuauaauc

SEQ ID NO: 197595 - RNA, 19 nt, Artificial Sequence
  Description of Artificial Sequence: Synthetic oligonucleotide
  Antisense strand to SEQ ID NO: 197594
gauuauaacggguacgucc

SEQ ID NO: 197596 - RNA, 19 nt, Artificial Sequence
  Description of Artificial Sequence: Synthetic oligonucleotide
  Sense strand starting at position 2304 of SEQ ID NO: 2546
aagguugaguaucuccuaa

SEQ ID NO: 197597 - RNA, 19 nt, Artificial Sequence
  Description of Artificial Sequence: Synthetic oligonucleotide
  Antisense strand to SEQ ID NO: 197596
uuaggagauacucaaccuu

SEQ ID NO: 197598 - RNA, 19 nt, Artificial Sequence
  Description of Artificial Sequence: Synthetic oligonucleotide
  Sense strand starting at position 2306 of SEQ ID NO: 2546
gguugaguaucuccuaaag

SEQ ID NO: 197599 - RNA, 19 nt, Artificial Sequence
  Description of Artificial Sequence: Synthetic oligonucleotide
  Antisense strand to SEQ ID NO: 197598
cuuuaggagauacucaacc

SEQ ID NO: 197600 - RNA, 19 nt, Artificial Sequence
  Description of Artificial Sequence: Synthetic oligonucleotide
  Sense strand starting at position 2373 of SEQ ID NO: 2546
cggguuguuagagggauua

SEQ ID NO: 197601 - RNA, 19 nt, Artificial Sequence
  Description of Artificial Sequence: Synthetic oligonucleotide
  Antisense strand to SEQ ID NO: 197600
uaaucccucuaacaacccg

SEQ ID NO: 197602 - RNA, 19 nt, Artificial Sequence
  Description of Artificial Sequence: Synthetic oligonucleotide
  Sense strand starting at position 2386 of SEQ ID NO: 2546
ggauuaagaacugggcacu

SEQ ID NO: 197603 - RNA, 19 nt, Artificial Sequence
  Description of Artificial Sequence: Synthetic oligonucleotide
  Antisense strand to SEQ ID NO: 197602
agugcccaguucuuaaucc

SEQ ID NO: 197604 - RNA, 19 nt, Artificial Sequence
  Description of Artificial Sequence: Synthetic oligonucleotide
  Sense strand starting at position 2408 of SEQ ID NO: 2546
aucagaaagaucggaguuu

SEQ ID NO: 197605 - RNA, 19 nt, Artificial Sequence
  Description of Artificial Sequence: Synthetic oligonucleotide
  Antisense strand to SEQ ID NO: 197604
aaacuccgaucuuucugau

SEQ ID NO: 197606 - RNA, 19 nt, Artificial Sequence
  Description of Artificial Sequence: Synthetic oligonucleotide
  Sense strand starting at position 2495 of SEQ ID NO: 2546
auaggaugggugugauaau

SEQ ID NO: 197607 - RNA, 19 nt, Artificial Sequence
  Description of Artificial Sequence: Synthetic oligonucleotide
  Antisense strand to SEQ ID NO: 197606
auuaucacacccauccuau

SEQ ID NO: 197608 - RNA, 19 nt, Artificial Sequence
  Description of Artificial Sequence: Synthetic oligonucleotide
  Sense strand starting at position 2537 of SEQ ID NO: 2546
gacuuagugauagguuggu

SEQ ID NO: 197609 - RNA, 19 nt, Artificial Sequence
  Description of Artificial Sequence: Synthetic oligonucleotide
  Antisense strand to SEQ ID NO: 197608
accaaccuaucacuaaguc

SEQ ID NO: 197610 - RNA, 19 nt, Artificial Sequence
  Description of Artificial Sequence: Synthetic oligonucleotide
  Sense strand starting at position 2551 of SEQ ID NO: 2546
uugguuauuguacaauaac

SEQ ID NO: 197611 - RNA, 19 nt, Artificial Sequence
  Description of Artificial Sequence: Synthetic oligonucleotide
  Antisense strand to SEQ ID NO: 197610
guuauuguacaauaaccaa

SEQ ID NO: 197612 - RNA, 19 nt, Artificial Sequence
  Description of Artificial Sequence: Synthetic oligonucleotide
  Sense strand starting at position 2554 of SEQ ID NO: 2546
guuauuguacaauaacuca

SEQ ID NO: 197613 - RNA, 19 nt, Artificial Sequence
  Description of Artificial Sequence: Synthetic oligonucleotide
  Antisense strand to SEQ ID NO: 197612
ugaguuauuguacaauaac

SEQ ID NO: 197614 - RNA, 19 nt, Artificial Sequence
  Description of Artificial Sequence: Synthetic oligonucleotide
  Sense strand starting at position 2570 of SEQ ID NO: 2546
ucauuagaugcucacgguu

SEQ ID NO: 197615 - RNA, 19 nt, Artificial Sequence
  Description of Artificial Sequence: Synthetic oligonucleotide
  Antisense strand to SEQ ID NO: 197614
aaccgugagcaucuaauga

SEQ ID NO: 197616 - RNA, 19 nt, Artificial Sequence
  Description of Artificial Sequence: Synthetic oligonucleotide
  Sense strand starting at position 2585 of SEQ ID NO: 2546
gguucugugagacaaguau

SEQ ID NO: 197617 - RNA, 19 nt, Artificial Sequence
  Description of Artificial Sequence: Synthetic oligonucleotide
  Antisense strand to SEQ ID NO: 197616
auacuugucucacagaacc

SEQ ID NO: 197618 - RNA, 19 nt, Artificial Sequence
  Description of Artificial Sequence: Synthetic oligonucleotide
  Sense strand starting at position 2615 of SEQ ID NO: 2546
guaugaagaaucugaggcu

SEQ ID NO: 197619 - RNA, 19 nt, Artificial Sequence
  Description of Artificial Sequence: Synthetic oligonucleotide
  Antisense strand to SEQ ID NO: 197618
agccucagauucuucauac

SEQ ID NO: 197620 - RNA, 19 nt, Artificial Sequence
  Description of Artificial Sequence: Synthetic oligonucleotide
  Sense strand starting at position 2802 of SEQ ID NO: 2546
augacuuuggagugcuuua

SEQ ID NO: 197621 - RNA, 19 nt, Artificial Sequence
  Description of Artificial Sequence: Synthetic oligonucleotide
  Antisense strand to SEQ ID NO: 197620
uaaagcacuccaaagucau

SEQ ID NO: 197622 - RNA, 19 nt, Artificial Sequence
  Description of Artificial Sequence: Synthetic oligonucleotide
  Sense strand starting at position 2854 of SEQ ID NO: 2546
cuacgaaaugaauggcaaa

SEQ ID NO: 197623 - RNA, 19 nt, Artificial Sequence
  Description of Artificial Sequence: Synthetic oligonucleotide
  Antisense strand to SEQ ID NO: 197622
uuugccauucauuucguag

SEQ ID NO: 197624 - RNA, 19 nt, Artificial Sequence
  Description of Artificial Sequence: Synthetic oligonucleotide
  Sense strand starting at position 3040 of SEQ ID NO: 2546
ugguauuacccacaauagu

SEQ ID NO: 197625 - RNA, 19 nt, Artificial Sequence
  Description of Artificial Sequence: Synthetic oligonucleotide
  Antisense strand to SEQ ID NO: 197624
acuauuguggguaauacca

SEQ ID NO: 197626 - RNA, 19 nt, Artificial Sequence
  Description of Artificial Sequence: Synthetic oligonucleotide
  Sense strand starting at position 3109 of SEQ ID NO: 2546
gguuauugccaaggaugua

SEQ ID NO: 197627 - RNA, 19 nt, Artificial Sequence
  Description of Artificial Sequence: Synthetic oligonucleotide
  Antisense strand to SEQ ID NO: 197626
uacauccuuggcaauaacc

SEQ ID NO: 197628 - RNA, 19 nt, Artificial Sequence
  Description of Artificial Sequence: Synthetic oligonucleotide
  Sense strand starting at position 3110 of SEQ ID NO: 2546
guuauugccaaggauguau

SEQ ID NO: 197629 - RNA, 19 nt, Artificial Sequence
  Description of Artificial Sequence: Synthetic oligonucleotide
  Antisense strand to SEQ ID NO: 197628
auacauccuuggcaauaac

SEQ ID NO: 197630 - RNA, 19 nt, Artificial Sequence
  Description of Artificial Sequence: Synthetic oligonucleotide
  Sense strand starting at position 3229 of SEQ ID NO: 2546
cuaugaguacauuaggguu

SEQ ID NO: 197631 - RNA, 19 nt, Artificial Sequence
  Description of Artificial Sequence: Synthetic oligonucleotide
  Antisense strand to SEQ ID NO: 197630
aacccuaauguacucauag

SEQ ID NO: 197632 - RNA, 19 nt, Artificial Sequence
  Description of Artificial Sequence: Synthetic oligonucleotide
  Sense strand starting at position 3283 of SEQ ID NO: 2546
ggagaccuauuacuguaau

SEQ ID NO: 197633 - RNA, 19 nt, Artificial Sequence
  Description of Artificial Sequence: Synthetic oligonucleotide
  Antisense strand to SEQ ID NO: 197632
auuacaguaauaggucucc

SEQ ID NO: 197634 - RNA, 19 nt, Artificial Sequence
  Description of Artificial Sequence: Synthetic oligonucleotide
  Sense strand starting at position 3325 of SEQ ID NO: 2546
uguauuccugaaugugaaa

SEQ ID NO: 197635 - RNA, 19 nt, Artificial Sequence
  Description of Artificial Sequence: Synthetic oligonucleotide
  Antisense strand to SEQ ID NO: 197634
uuucacauucaggaauaca

SEQ ID NO: 197636 - RNA, 19 nt, Artificial Sequence
  Description of Artificial Sequence: Synthetic oligonucleotide
  Sense strand starting at position 3338 of SEQ ID NO: 2546
gugaaaucucaauguuuau

SEQ ID NO: 197637 - RNA, 19 nt, Artificial Sequence
  Description of Artificial Sequence: Synthetic oligonucleotide
  Antisense strand to SEQ ID NO: 197636
auaaacauugagauuucac

SEQ ID NO: 197638 - RNA, 19 nt, Artificial Sequence
  Description of Artificial Sequence: Synthetic oligonucleotide
  Sense strand starting at position 3351 of SEQ ID NO: 2546
guuuaucuccaguaagagg

SEQ ID NO: 197639 - RNA, 19 nt, Artificial Sequence
  Description of Artificial Sequence: Synthetic oligonucleotide
  Antisense strand to SEQ ID NO: 197638
ccucuuacuggagauaaac

SEQ ID NO: 197640 - RNA, 19 nt, Artificial Sequence
  Description of Artificial Sequence: Synthetic oligonucleotide
  Sense strand starting at position 3554 of SEQ ID NO: 2546
gcaauaaggucaguccauu

SEQ ID NO: 197641 - RNA, 19 nt, Artificial Sequence
  Description of Artificial Sequence: Synthetic oligonucleotide
  Antisense strand to SEQ ID NO: 197640
aauggacugaccuuauugc

SEQ ID NO: 197642 - RNA, 19 nt, Artificial Sequence
  Description of Artificial Sequence: Synthetic oligonucleotide
  Sense strand starting at position 3571 of SEQ ID NO: 2546
uucuaaggcccauaaguua

SEQ ID NO: 197643 - RNA, 19 nt, Artificial Sequence
  Description of Artificial Sequence: Synthetic oligonucleotide
  Antisense strand to SEQ ID NO: 197642
uaacuuaugggccuuagaa

SEQ ID NO: 197644 - RNA, 19 nt, Artificial Sequence
  Description of Artificial Sequence: Synthetic oligonucleotide
  Sense strand starting at position 3672 of SEQ ID NO: 2546
cacuaauugcugcaggaga

SEQ ID NO: 197645 - RNA, 19 nt, Artificial Sequence
  Description of Artificial Sequence: Synthetic oligonucleotide
  Antisense strand to SEQ ID NO: 197644
ucuccugcagcaauuagug

SEQ ID NO: 197646 - RNA, 19 nt, Artificial Sequence
  Description of Artificial Sequence: Synthetic oligonucleotide
  Sense strand starting at position 3759 of SEQ ID NO: 2546
agcuucugaaguuagagau

SEQ ID NO: 197647 - RNA, 19 nt, Artificial Sequence
  Description of Artificial Sequence: Synthetic oligonucleotide
  Antisense strand to SEQ ID NO: 197646
aucucuaacuucagaagcu

SEQ ID NO: 197648 - RNA, 19 nt, Artificial Sequence
  Description of Artificial Sequence: Synthetic oligonucleotide
  Sense strand starting at position 3881 of SEQ ID NO: 2546
agacauugaucccuggauu

SEQ ID NO: 197649 - RNA, 19 nt, Artificial Sequence
  Description of Artificial Sequence: Synthetic oligonucleotide
  Antisense strand to SEQ ID NO: 197648
aauccagggaucaaugucu

SEQ ID NO: 197650 - RNA, 19 nt, Artificial Sequence
  Description of Artificial Sequence: Synthetic oligonucleotide
  Sense strand starting at position 3882 of SEQ ID NO: 2546
gacauugaucccuggauuc

SEQ ID NO: 197651 - RNA, 19 nt, Artificial Sequence
  Description of Artificial Sequence: Synthetic oligonucleotide
  Antisense strand to SEQ ID NO: 197650
gaauccagggaucaauguc

SEQ ID NO: 197652 - RNA, 19 nt, Artificial Sequence
  Description of Artificial Sequence: Synthetic oligonucleotide
  Sense strand starting at position 3944 of SEQ ID NO: 2546
ccggacaucccauacuauu

SEQ ID NO: 197653 - RNA, 19 nt, Artificial Sequence
  Description of Artificial Sequence: Synthetic oligonucleotide
  Antisense strand to SEQ ID NO: 197652
aauaguaugggauguccgg

SEQ ID NO: 197654 - RNA, 19 nt, Artificial Sequence
  Description of Artificial Sequence: Synthetic oligonucleotide
  Sense strand starting at position 3977 of SEQ ID NO: 2546
ugaagauuccugggacuuc

SEQ ID NO: 197655 - RNA, 19 nt, Artificial Sequence
  Description of Artificial Sequence: Synthetic oligonucleotide
  Antisense strand to SEQ ID NO: 197654
gaagucccaggaaucuuca

SEQ ID NO: 197656 - RNA, 19 nt, Artificial Sequence
  Description of Artificial Sequence: Synthetic oligonucleotide
  Sense strand starting at position 552 of SEQ ID NO: 2547
aggaucaccugaggacaau

SEQ ID NO: 197657 - RNA, 19 nt, Artificial Sequence
  Description of Artificial Sequence: Synthetic oligonucleotide
  Antisense strand to SEQ ID NO: 197656
auuguccucaggugauccu

SEQ ID NO: 197658 - RNA, 19 nt, Artificial Sequence
  Description of Artificial Sequence: Synthetic oligonucleotide
  Sense strand starting at position 666 of SEQ ID NO: 2547
gccuguauugcacauucua

SEQ ID NO: 197659 - RNA, 19 nt, Artificial Sequence
  Description of Artificial Sequence: Synthetic oligonucleotide
  Antisense strand to SEQ ID NO: 197658
uagaaugugcaauacaggc

SEQ ID NO: 197660 - RNA, 19 nt, Artificial Sequence
  Description of Artificial Sequence: Synthetic oligonucleotide
  Sense strand starting at position 964 of SEQ ID NO: 2547
uacugacuuuccugagggu

SEQ ID NO: 197661 - RNA, 19 nt, Artificial Sequence
  Description of Artificial Sequence: Synthetic oligonucleotide
  Antisense strand to SEQ ID NO: 197660
acccucaggaaagucagua

SEQ ID NO: 197662 - RNA, 19 nt, Artificial Sequence
  Description of Artificial Sequence: Synthetic oligonucleotide
  Sense strand starting at position 968 of SEQ ID NO: 2547
gacuuuccugagggugaca

SEQ ID NO: 197663 - RNA, 19 nt, Artificial Sequence
  Description of Artificial Sequence: Synthetic oligonucleotide
  Antisense strand to SEQ ID NO: 197662
ugucacccucaggaaaguc

SEQ ID NO: 197664 - RNA, 19 nt, Artificial Sequence
  Description of Artificial Sequence: Synthetic oligonucleotide
  Sense strand starting at position 1214 of SEQ ID NO: 2547
cacauuguaugucugcgaa

SEQ ID NO: 197665 - RNA, 19 nt, Artificial Sequence
  Description of Artificial Sequence: Synthetic oligonucleotide
  Antisense strand to SEQ ID NO: 197664
uucgcagacauacaaugug

SEQ ID NO: 197666 - RNA, 19 nt, Artificial Sequence
  Description of Artificial Sequence: Synthetic oligonucleotide
  Sense strand starting at position 1218 of SEQ ID NO: 2547
uuguaugucugcgaacgga

SEQ ID NO: 197667 - RNA, 19 nt, Artificial Sequence
  Description of Artificial Sequence: Synthetic oligonucleotide
  Antisense strand to SEQ ID NO: 197666
uccguucgcagacauacaa

SEQ ID NO: 197668 - RNA, 19 nt, Artificial Sequence
  Description of Artificial Sequence: Synthetic oligonucleotide
  Sense strand starting at position 1420 of SEQ ID NO: 2547
agcccuuaccuuggacaga

SEQ ID NO: 197669 - RNA, 19 nt, Artificial Sequence
  Description of Artificial Sequence: Synthetic oligonucleotide
  Antisense strand to SEQ ID NO: 197668
ucuguccaagguaagggcu

SEQ ID NO: 197670 - RNA, 19 nt, Artificial Sequence
  Description of Artificial Sequence: Synthetic oligonucleotide
  Sense strand starting at position 1550 of SEQ ID NO: 2547
ggagcagaaaugugugagu

SEQ ID NO: 197671 - RNA, 19 nt, Artificial Sequence
  Description of Artificial Sequence: Synthetic oligonucleotide
  Antisense strand to SEQ ID NO: 197670
acucacacauuucugcucc

SEQ ID NO: 197672 - RNA, 19 nt, Artificial Sequence
  Description of Artificial Sequence: Synthetic oligonucleotide
  Sense strand starting at position 1553 of SEQ ID NO: 2547
gcagaaaugugugaguccu

SEQ ID NO: 197673 - RNA, 19 nt, Artificial Sequence
  Description of Artificial Sequence: Synthetic oligonucleotide
  Antisense strand to SEQ ID NO: 197672
aggacucacacauuucugc

SEQ ID NO: 197674 - RNA, 19 nt, Artificial Sequence
  Description of Artificial Sequence: Synthetic oligonucleotide
  Sense strand starting at position 1578 of SEQ ID NO: 2547
caggguuguccuggaacca

SEQ ID NO: 197675 - RNA, 19 nt, Artificial Sequence
  Description of Artificial Sequence: Synthetic oligonucleotide
  Antisense strand to SEQ ID NO: 197674
ugguuccaggacaacccug

SEQ ID NO: 197676 - RNA, 19 nt, Artificial Sequence
  Description of Artificial Sequence: Synthetic oligonucleotide
  Sense strand starting at position 2130 of SEQ ID NO: 2547
cacagugucuugugggaga

SEQ ID NO: 197677 - RNA, 19 nt, Artificial Sequence
  Description of Artificial Sequence: Synthetic oligonucleotide
  Antisense strand to SEQ ID NO: 197676
ucucccacaagacacugug

SEQ ID NO: 197678 - RNA, 19 nt, Artificial Sequence
  Description of Artificial Sequence: Synthetic oligonucleotide
  Sense strand starting at position 2228 of SEQ ID NO: 2547
cggguuagggcucguaaug

SEQ ID NO: 197679 - RNA, 19 nt, Artificial Sequence
  Description of Artificial Sequence: Synthetic oligonucleotide
  Antisense strand to SEQ ID NO: 197678
cauuacgagcccuaacccg

SEQ ID NO: 197680 - RNA, 19 nt, Artificial Sequence
  Description of Artificial Sequence: Synthetic oligonucleotide
  Sense strand starting at position 2302 of SEQ ID NO: 2547
gaacccacuugguguauau

SEQ ID NO: 197681 - RNA, 19 nt, Artificial Sequence
  Description of Artificial Sequence: Synthetic oligonucleotide
  Antisense strand to SEQ ID NO: 197680
auauacaccaaguggguuc

SEQ ID NO: 197682 - RNA, 19 nt, Artificial Sequence
  Description of Artificial Sequence: Synthetic oligonucleotide
  Sense strand starting at position 2329 of SEQ ID NO: 2547
acaccuauguccugaggac

SEQ ID NO: 197683 - RNA, 19 nt, Artificial Sequence
  Description of Artificial Sequence: Synthetic oligonucleotide
  Antisense strand to SEQ ID NO: 197682
guccucaggacauaggugu

SEQ ID NO: 197684 - RNA, 19 nt, Artificial Sequence
  Description of Artificial Sequence: Synthetic oligonucleotide
  Sense strand starting at position 2501 of SEQ ID NO: 2547
aaguguagccucugauaag

SEQ ID NO: 197685 - RNA, 19 nt, Artificial Sequence
  Description of Artificial Sequence: Synthetic oligonucleotide
  Antisense strand to SEQ ID NO: 197684
cuuaucagaggcuacacuu

SEQ ID NO: 197686 - RNA, 19 nt, Artificial Sequence
  Description of Artificial Sequence: Synthetic oligonucleotide
  Sense strand starting at position 2525 of SEQ ID NO: 2547
cagagaguuugguaaccuc

SEQ ID NO: 197687 - RNA, 19 nt, Artificial Sequence
  Description of Artificial Sequence: Synthetic oligonucleotide
  Antisense strand to SEQ ID NO: 197686
gagguuaccaaacucucug

SEQ ID NO: 197688 - RNA, 19 nt, Artificial Sequence
  Description of Artificial Sequence: Synthetic oligonucleotide
  Sense strand starting at position 2743 of SEQ ID NO: 2547
uggaguaucacgcagccuu

SEQ ID NO: 197689 - RNA, 19 nt, Artificial Sequence
  Description of Artificial Sequence: Synthetic oligonucleotide
  Antisense strand to SEQ ID NO: 197688
aaggcugcgugauacucca

SEQ ID NO: 197690 - RNA, 19 nt, Artificial Sequence
  Description of Artificial Sequence: Synthetic oligonucleotide
  Sense strand starting at position 2822 of SEQ ID NO: 2547
agugaaauauaccagugca

SEQ ID NO: 197691 - RNA, 19 nt, Artificial Sequence
  Description of Artificial Sequence: Synthetic oligonucleotide
  Antisense strand to SEQ ID NO: 197690
ugcacugguauauuucacu

SEQ ID NO: 197692 - RNA, 19 nt, Artificial Sequence
  Description of Artificial Sequence: Synthetic oligonucleotide
  Sense strand starting at position 2987 of SEQ ID NO: 2547
gggacagagcuucaagguu

SEQ ID NO: 197693 - RNA, 19 nt, Artificial Sequence
  Description of Artificial Sequence: Synthetic oligonucleotide
  Antisense strand to SEQ ID NO: 197692
aaccuugaagcucuguccc

SEQ ID NO: 197694 - RNA, 19 nt, Artificial Sequence
  Description of Artificial Sequence: Synthetic oligonucleotide
  Sense strand starting at position 3000 of SEQ ID NO: 2547
aagguugcaggaugagaau

SEQ ID NO: 197695 - RNA, 19 nt, Artificial Sequence
  Description of Artificial Sequence: Synthetic oligonucleotide
  Antisense strand to SEQ ID NO: 197694
auucucauccugcaaccuu

SEQ ID NO: 197696 - RNA, 19 nt, Artificial Sequence
  Description of Artificial Sequence: Synthetic oligonucleotide
  Sense strand starting at position 3012 of SEQ ID NO: 2547
ugagaauguucuggagauc

SEQ ID NO: 197697 - RNA, 19 nt, Artificial Sequence
  Description of Artificial Sequence: Synthetic oligonucleotide
  Antisense strand to SEQ ID NO: 197696
gaucuccagaacauucuca

SEQ ID NO: 197698 - RNA, 19 nt, Artificial Sequence
  Description of Artificial Sequence: Synthetic oligonucleotide
  Sense strand starting at position 3205 of SEQ ID NO: 2547
cgagccuguuuaccucaaa

SEQ ID NO: 197699 - RNA, 19 nt, Artificial Sequence
  Description of Artificial Sequence: Synthetic oligonucleotide
  Antisense strand to SEQ ID NO: 197698
uuugagguaaacaggcucg

SEQ ID NO: 197700 - RNA, 19 nt, Artificial Sequence
  Description of Artificial Sequence: Synthetic oligonucleotide
  Sense strand starting at position 3463 of SEQ ID NO: 2547
cuugcugaguuaggaacau

SEQ ID NO: 197701 - RNA, 19 nt, Artificial Sequence
  Description of Artificial Sequence: Synthetic oligonucleotide
  Antisense strand to SEQ ID NO: 197700
auguuccuaacucagcaag

SEQ ID NO: 197702 - RNA, 19 nt, Artificial Sequence
  Description of Artificial Sequence: Synthetic oligonucleotide
  Sense strand starting at position 3473 of SEQ ID NO: 2547
uaggaacauucuuggcuga

SEQ ID NO: 197703 - RNA, 19 nt, Artificial Sequence
  Description of Artificial Sequence: Synthetic oligonucleotide
  Antisense strand to SEQ ID NO: 197702
ucagccaagaauguuccua

SEQ ID NO: 197704 - RNA, 19 nt, Artificial Sequence
  Description of Artificial Sequence: Synthetic oligonucleotide
  Sense strand starting at position 3474 of SEQ ID NO: 2547
aggaacauucuuggcugaa

SEQ ID NO: 197705 - RNA, 19 nt, Artificial Sequence
  Description of Artificial Sequence: Synthetic oligonucleotide
  Antisense strand to SEQ ID NO: 197704
uucagccaagaauguuccu

SEQ ID NO: 197706 - RNA, 19 nt, Artificial Sequence
  Description of Artificial Sequence: Synthetic oligonucleotide
  Sense strand starting at position 3475 of SEQ ID NO: 2547
ggaacauucuuggcugaaa

SEQ ID NO: 197707 - RNA, 19 nt, Artificial Sequence
  Description of Artificial Sequence: Synthetic oligonucleotide
  Antisense strand to SEQ ID NO: 197706
uuucagccaagaauguucc

SEQ ID NO: 197708 - RNA, 19 nt, Artificial Sequence
  Description of Artificial Sequence: Synthetic oligonucleotide
  Sense strand starting at position 3476 of SEQ ID NO: 2547
gaacauucuuggcugaaag

SEQ ID NO: 197709 - RNA, 19 nt, Artificial Sequence
  Description of Artificial Sequence: Synthetic oligonucleotide
  Antisense strand to SEQ ID NO: 197708
cuuucagccaagaauguuc

SEQ ID NO: 197710 - RNA, 19 nt, Artificial Sequence
  Description of Artificial Sequence: Synthetic oligonucleotide
  Sense strand starting at position 3477 of SEQ ID NO: 2547
aacauucuuggcugaaagu

SEQ ID NO: 197711 - RNA, 19 nt, Artificial Sequence
  Description of Artificial Sequence: Synthetic oligonucleotide
  Antisense strand to SEQ ID NO: 197710
acuuucagccaagaauguu

SEQ ID NO: 197712 - RNA, 19 nt, Artificial Sequence
  Description of Artificial Sequence: Synthetic oligonucleotide
  Sense strand starting at position 3486 of SEQ ID NO: 2547
ggcugaaagucagaggaga

SEQ ID NO: 197713 - RNA, 19 nt, Artificial Sequence
  Description of Artificial Sequence: Synthetic oligonucleotide
  Antisense strand to SEQ ID NO: 197712
ucuccucugacuuucagcc

SEQ ID NO: 197714 - RNA, 19 nt, Artificial Sequence
  Description of Artificial Sequence: Synthetic oligonucleotide
  Sense strand starting at position 3508 of SEQ ID NO: 2547
acuaaugggucuccucaau

SEQ ID NO: 197715 - RNA, 19 nt, Artificial Sequence
  Description of Artificial Sequence: Synthetic oligonucleotide
  Antisense strand to SEQ ID NO: 197714
auugaggagacccauuagu

SEQ ID NO: 197716 - RNA, 19 nt, Artificial Sequence
  Description of Artificial Sequence: Synthetic oligonucleotide
  Sense strand starting at position 3533 of SEQ ID NO: 2547
auugauugauuccaaaguc

SEQ ID NO: 197717 - RNA, 19 nt, Artificial Sequence
  Description of Artificial Sequence: Synthetic oligonucleotide
  Antisense strand to SEQ ID NO: 197716
gacuuuggaaucaaucaau

SEQ ID NO: 197718 - RNA, 19 nt, Artificial Sequence
  Description of Artificial Sequence: Synthetic oligonucleotide
  Sense strand starting at position 865 of SEQ ID NO: 2548
cacugacuucccuaagggu

SEQ ID NO: 197719 - RNA, 19 nt, Artificial Sequence
  Description of Artificial Sequence: Synthetic oligonucleotide
  Antisense strand to SEQ ID NO: 197718
acccuuagggaagucagug

SEQ ID NO: 197720 - RNA, 19 nt, Artificial Sequence
  Description of Artificial Sequence: Synthetic oligonucleotide
  Sense strand starting at position 881 of SEQ ID NO: 2548
ggugucagaggucaguaua

SEQ ID NO: 197721 - RNA, 19 nt, Artificial Sequence
  Description of Artificial Sequence: Synthetic oligonucleotide
  Antisense strand to SEQ ID NO: 197720
uauacugaccucugacacc

SEQ ID NO: 197722 - RNA, 19 nt, Artificial Sequence
  Description of Artificial Sequence: Synthetic oligonucleotide
  Sense strand starting at position 884 of SEQ ID NO: 2548
gucagaggucaguauaugu

SEQ ID NO: 197723 - RNA, 19 nt, Artificial Sequence
  Description of Artificial Sequence: Synthetic oligonucleotide
  Antisense strand to SEQ ID NO: 197722
acauauacugaccucugac

SEQ ID NO: 197724 - RNA, 19 nt, Artificial Sequence
  Description of Artificial Sequence: Synthetic oligonucleotide
  Sense strand starting at position 893 of SEQ ID NO: 2548
caguauaugugaccaacgu

SEQ ID NO: 197725 - RNA, 19 nt, Artificial Sequence
  Description of Artificial Sequence: Synthetic oligonucleotide
  Antisense strand to SEQ ID NO: 197724
acguuggucacauauacug

SEQ ID NO: 197726 - RNA, 19 nt, Artificial Sequence
  Description of Artificial Sequence: Synthetic oligonucleotide
  Sense strand starting at position 2097 of SEQ ID NO: 2548
ugcgguauugaguacagau

SEQ ID NO: 197727 - RNA, 19 nt, Artificial Sequence
  Description of Artificial Sequence: Synthetic oligonucleotide
  Antisense strand to SEQ ID NO: 197726
aucuguacucaauaccgca

SEQ ID NO: 197728 - RNA, 19 nt, Artificial Sequence
  Description of Artificial Sequence: Synthetic oligonucleotide
  Sense strand starting at position 2114 of SEQ ID NO: 2548
augccauuugggugagugu

SEQ ID NO: 197729 - RNA, 19 nt, Artificial Sequence
  Description of Artificial Sequence: Synthetic oligonucleotide
  Antisense strand to SEQ ID NO: 197728
acacucacccaaauggcau

SEQ ID NO: 197730 - RNA, 19 nt, Artificial Sequence
  Description of Artificial Sequence: Synthetic oligonucleotide
  Sense strand starting at position 2258 of SEQ ID NO: 2548
ggcuguguucuggugucga

SEQ ID NO: 197731 - RNA, 19 nt, Artificial Sequence
  Description of Artificial Sequence: Synthetic oligonucleotide
  Antisense strand to SEQ ID NO: 197730
ucgacaccagaacacagcc

SEQ ID NO: 197732 - RNA, 19 nt, Artificial Sequence
  Description of Artificial Sequence: Synthetic oligonucleotide
  Sense strand starting at position 2541 of SEQ ID NO: 2548
gugugauuguguauguguu

SEQ ID NO: 197733 - RNA, 19 nt, Artificial Sequence
  Description of Artificial Sequence: Synthetic oligonucleotide
  Antisense strand to SEQ ID NO: 197732
aacacauacacaaucacac

SEQ ID NO: 197734 - RNA, 19 nt, Artificial Sequence
  Description of Artificial Sequence: Synthetic oligonucleotide
  Sense strand starting at position 2542 of SEQ ID NO: 2548
ugugauuguguauguguuu

SEQ ID NO: 197735 - RNA, 19 nt, Artificial Sequence
  Description of Artificial Sequence: Synthetic oligonucleotide
  Antisense strand to SEQ ID NO: 197734
aaacacauacacaaucaca

SEQ ID NO: 197736 - RNA, 19 nt, Artificial Sequence
  Description of Artificial Sequence: Synthetic oligonucleotide
  Sense strand starting at position 2567 of SEQ ID NO: 2548
gugcacucacacuaauguu

SEQ ID NO: 197737 - RNA, 19 nt, Artificial Sequence
  Description of Artificial Sequence: Synthetic oligonucleotide
  Antisense strand to SEQ ID NO: 197736
aacauuagugugagugcac

SEQ ID NO: 197738 - RNA, 19 nt, Artificial Sequence
  Description of Artificial Sequence: Synthetic oligonucleotide
  Sense strand starting at position 2905 of SEQ ID NO: 2548
cuugcugaguuaggaaauu

SEQ ID NO: 197739 - RNA, 19 nt, Artificial Sequence
  Description of Artificial Sequence: Synthetic oligonucleotide
  Antisense strand to SEQ ID NO: 197738
aauuuccuaacucagcaag

SEQ ID NO: 197740 - RNA, 19 nt, Artificial Sequence
  Description of Artificial Sequence: Synthetic oligonucleotide
  Sense strand starting at position 2914 of SEQ ID NO: 2548
uuaggaaauuucugggcua

SEQ ID NO: 197741 - RNA, 19 nt, Artificial Sequence
  Description of Artificial Sequence: Synthetic oligonucleotide
  Antisense strand to SEQ ID NO: 197740
uagcccagaaauuuccuaa

SEQ ID NO: 197742 - RNA, 19 nt, Artificial Sequence
  Description of Artificial Sequence: Synthetic oligonucleotide
  Sense strand starting at position 2915 of SEQ ID NO: 2548
uaggaaauuucugggcuaa

SEQ ID NO: 197743 - RNA, 19 nt, Artificial Sequence
  Description of Artificial Sequence: Synthetic oligonucleotide
  Antisense strand to SEQ ID NO: 197742
uuagcccagaaauuuccua

SEQ ID NO: 197744 - RNA, 19 nt, Artificial Sequence
  Description of Artificial Sequence: Synthetic oligonucleotide
  Sense strand starting at position 3089 of SEQ ID NO: 2548
guuggagugugaugccuga

SEQ ID NO: 197745 - RNA, 19 nt, Artificial Sequence
  Description of Artificial Sequence: Synthetic oligonucleotide
  Antisense strand to SEQ ID NO: 197744
ucaggcaucacacuccaac

SEQ ID NO: 197746 - RNA, 19 nt, Artificial Sequence
  Description of Artificial Sequence: Synthetic oligonucleotide
  Sense strand starting at position 3093 of SEQ ID NO: 2548
gagugugaugccugaguua

SEQ ID NO: 197747 - RNA, 19 nt, Artificial Sequence
  Description of Artificial Sequence: Synthetic oligonucleotide
  Antisense strand to SEQ ID NO: 197746
uaacucaggcaucacacuc

SEQ ID NO: 197748 - RNA, 19 nt, Artificial Sequence
  Description of Artificial Sequence: Synthetic oligonucleotide
  Sense strand starting at position 3095 of SEQ ID NO: 2548
gugugaugccugaguuacg

SEQ ID NO: 197749 - RNA, 19 nt, Artificial Sequence
  Description of Artificial Sequence: Synthetic oligonucleotide
  Antisense strand to SEQ ID NO: 197748
cguaacucaggcaucacac

SEQ ID NO: 197750 - RNA, 19 nt, Artificial Sequence
  Description of Artificial Sequence: Synthetic oligonucleotide
  Sense strand starting at position 3282 of SEQ ID NO: 2548
cccaaagugucuggauuua

SEQ ID NO: 197751 - RNA, 19 nt, Artificial Sequence
  Description of Artificial Sequence: Synthetic oligonucleotide
  Antisense strand to SEQ ID NO: 197750
uaaauccagacacuuuggg

SEQ ID NO: 197752 - RNA, 19 nt, Artificial Sequence
  Description of Artificial Sequence: Synthetic oligonucleotide
  Sense strand starting at position 3494 of SEQ ID NO: 2548
uguagagucucacuguguu

SEQ ID NO: 197753 - RNA, 19 nt, Artificial Sequence
  Description of Artificial Sequence: Synthetic oligonucleotide
  Antisense strand to SEQ ID NO: 197752
aacacagugagacucuaca

SEQ ID NO: 197754 - RNA, 19 nt, Artificial Sequence
  Description of Artificial Sequence: Synthetic oligonucleotide
  Sense strand starting at position 3608 of SEQ ID NO: 2548
gggucuugucguuuggcaa

SEQ ID NO: 197755 - RNA, 19 nt, Artificial Sequence
  Description of Artificial Sequence: Synthetic oligonucleotide
  Antisense strand to SEQ ID NO: 197754
uugccaaacgacaagaccc

SEQ ID NO: 197756 - RNA, 19 nt, Artificial Sequence
  Description of Artificial Sequence: Synthetic oligonucleotide
  Sense strand starting at position 3609 of SEQ ID NO: 2548
ggucuugucguuuggcaac

SEQ ID NO: 197757 - RNA, 19 nt, Artificial Sequence
  Description of Artificial Sequence: Synthetic oligonucleotide
  Antisense strand to SEQ ID NO: 197756
guugccaaacgacaagacc

SEQ ID NO: 197758 - RNA, 19 nt, Artificial Sequence
  Description of Artificial Sequence: Synthetic oligonucleotide
  Sense strand starting at position 3611 of SEQ ID NO: 2548
ucuugucguuuggcaacaa

SEQ ID NO: 197759 - RNA, 19 nt, Artificial Sequence
  Description of Artificial Sequence: Synthetic oligonucleotide
  Antisense strand to SEQ ID NO: 197758
uuguugccaaacgacaaga

SEQ ID NO: 197760 - RNA, 19 nt, Artificial Sequence
  Description of Artificial Sequence: Synthetic oligonucleotide
  Sense strand starting at position 3615 of SEQ ID NO: 2548
gucguuuggcaacaacauu

SEQ ID NO: 197761 - RNA, 19 nt, Artificial Sequence
  Description of Artificial Sequence: Synthetic oligonucleotide
  Antisense strand to SEQ ID NO: 197760
aauguuguugccaaacgac

SEQ ID NO: 197762 - RNA, 19 nt, Artificial Sequence
  Description of Artificial Sequence: Synthetic oligonucleotide
  Sense strand starting at position 3670 of SEQ ID NO: 2548
aagggcuguugccauauuu

SEQ ID NO: 197763 - RNA, 19 nt, Artificial Sequence
  Description of Artificial Sequence: Synthetic oligonucleotide
  Antisense strand to SEQ ID NO: 197762
aaauauggcaacagcccuu

SEQ ID NO: 197764 - RNA, 19 nt, Artificial Sequence
  Description of Artificial Sequence: Synthetic oligonucleotide
  Sense strand starting at position 3678 of SEQ ID NO: 2548
uugccauauuucccaguga

SEQ ID NO: 197765 - RNA, 19 nt, Artificial Sequence
  Description of Artificial Sequence: Synthetic oligonucleotide
  Antisense strand to SEQ ID NO: 197764
ucacugggaaauauggcaa

SEQ ID NO: 197766 - RNA, 19 nt, Artificial Sequence
  Description of Artificial Sequence: Synthetic oligonucleotide
  Sense strand starting at position 3679 of SEQ ID NO: 2548
ugccauauuucccagugaa

SEQ ID NO: 197767 - RNA, 19 nt, Artificial Sequence
  Description of Artificial Sequence: Synthetic oligonucleotide
  Antisense strand to SEQ ID NO: 197766
uucacugggaaauauggca

SEQ ID NO: 197768 - RNA, 19 nt, Artificial Sequence
  Description of Artificial Sequence: Synthetic oligonucleotide
  Sense strand starting at position 3692 of SEQ ID NO: 2548
agugaaaugcccugguaag

SEQ ID NO: 197769 - RNA, 19 nt, Artificial Sequence
  Description of Artificial Sequence: Synthetic oligonucleotide
  Antisense strand to SEQ ID NO: 197768
cuuaccagggcauuucacu

SEQ ID NO: 197770 - RNA, 19 nt, Artificial Sequence
  Description of Artificial Sequence: Synthetic oligonucleotide
  Sense strand starting at position 3693 of SEQ ID NO: 2548
gugaaaugcccugguaaga

SEQ ID NO: 197771 - RNA, 19 nt, Artificial Sequence
  Description of Artificial Sequence: Synthetic oligonucleotide
  Antisense strand to SEQ ID NO: 197770
ucuuaccagggcauuucac

SEQ ID NO: 197772 - RNA, 19 nt, Artificial Sequence
  Description of Artificial Sequence: Synthetic oligonucleotide
  Sense strand starting at position 991 of SEQ ID NO: 2549
ugacuuuccugagggugau

SEQ ID NO: 197773 - RNA, 19 nt, Artificial Sequence
  Description of Artificial Sequence: Synthetic oligonucleotide
  Antisense strand to SEQ ID NO: 197772
aucacccucaggaaaguca

SEQ ID NO: 197774 - RNA, 19 nt, Artificial Sequence
  Description of Artificial Sequence: Synthetic oligonucleotide
  Sense strand starting at position 992 of SEQ ID NO: 2549
gacuuuccugagggugaua

SEQ ID NO: 197775 - RNA, 19 nt, Artificial Sequence
  Description of Artificial Sequence: Synthetic oligonucleotide
  Antisense strand to SEQ ID NO: 197774
uaucacccucaggaaaguc

SEQ ID NO: 197776 - RNA, 19 nt, Artificial Sequence
  Description of Artificial Sequence: Synthetic oligonucleotide
  Sense strand starting at position 994 of SEQ ID NO: 2549
cuuuccugagggugauaga

SEQ ID NO: 197777 - RNA, 19 nt, Artificial Sequence
  Description of Artificial Sequence: Synthetic oligonucleotide
  Antisense strand to SEQ ID NO: 197776
ucuaucacccucaggaaag

SEQ ID NO: 197778 - RNA, 19 nt, Artificial Sequence
  Description of Artificial Sequence: Synthetic oligonucleotide
  Sense strand starting at position 1011 of SEQ ID NO: 2549
gaggucaggauaugcgaua

SEQ ID NO: 197779 - RNA, 19 nt, Artificial Sequence
  Description of Artificial Sequence: Synthetic oligonucleotide
  Antisense strand to SEQ ID NO: 197778
uaucgcauauccugaccuc

SEQ ID NO: 197780 - RNA, 19 nt, Artificial Sequence
  Description of Artificial Sequence: Synthetic oligonucleotide
  Sense strand starting at position 1016 of SEQ ID NO: 2549
caggauaugcgauagaggu

SEQ ID NO: 197781 - RNA, 19 nt, Artificial Sequence
  Description of Artificial Sequence: Synthetic oligonucleotide
  Antisense strand to SEQ ID NO: 197780
accucuaucgcauauccug

SEQ ID NO: 197782 - RNA, 19 nt, Artificial Sequence
  Description of Artificial Sequence: Synthetic oligonucleotide
  Sense strand starting at position 2213 of SEQ ID NO: 2549
gguauagugcagugugcau

SEQ ID NO: 197783 - RNA, 19 nt, Artificial Sequence
  Description of Artificial Sequence: Synthetic oligonucleotide
  Antisense strand to SEQ ID NO: 197782
augcacacugcacuauacc

SEQ ID NO: 197784 - RNA, 19 nt, Artificial Sequence
  Description of Artificial Sequence: Synthetic oligonucleotide
  Sense strand starting at position 2268 of SEQ ID NO: 2549
cugugucuuguguggaacu

SEQ ID NO: 197785 - RNA, 19 nt, Artificial Sequence
  Description of Artificial Sequence: Synthetic oligonucleotide
  Antisense strand to SEQ ID NO: 197784
aguuccacacaagacacag

SEQ ID NO: 197786 - RNA, 19 nt, Artificial Sequence
  Description of Artificial Sequence: Synthetic oligonucleotide
  Sense strand starting at position 2325 of SEQ ID NO: 2549
cuguauuuccugggagcug

SEQ ID NO: 197787 - RNA, 19 nt, Artificial Sequence
  Description of Artificial Sequence: Synthetic oligonucleotide
  Antisense strand to SEQ ID NO: 197786
cagcucccaggaaauacag

SEQ ID NO: 197788 - RNA, 19 nt, Artificial Sequence
  Description of Artificial Sequence: Synthetic oligonucleotide
  Sense strand starting at position 2530 of SEQ ID NO: 2549
gcaggaaucuaggcccaga

SEQ ID NO: 197789 - RNA, 19 nt, Artificial Sequence
  Description of Artificial Sequence: Synthetic oligonucleotide
  Antisense strand to SEQ ID NO: 197788
ucugggccuagauuccugc

SEQ ID NO: 197790 - RNA, 19 nt, Artificial Sequence
  Description of Artificial Sequence: Synthetic oligonucleotide
  Sense strand starting at position 2622 of SEQ ID NO: 2549
cuuacauguuguguuugau

SEQ ID NO: 197791 - RNA, 19 nt, Artificial Sequence
  Description of Artificial Sequence: Synthetic oligonucleotide
  Antisense strand to SEQ ID NO: 197790
aucaaacacaacauguaag

SEQ ID NO: 197792 - RNA, 19 nt, Artificial Sequence
  Description of Artificial Sequence: Synthetic oligonucleotide
  Sense strand starting at position 2625 of SEQ ID NO: 2549
acauguuguguuugauugu

SEQ ID NO: 197793 - RNA, 19 nt, Artificial Sequence
  Description of Artificial Sequence: Synthetic oligonucleotide
  Antisense strand to SEQ ID NO: 197792
acaaucaaacacaacaugu

SEQ ID NO: 197794 - RNA, 19 nt, Artificial Sequence
  Description of Artificial Sequence: Synthetic oligonucleotide
  Sense strand starting at position 2635 of SEQ ID NO: 2549
uuugauuguguauguguuu

SEQ ID NO: 197795 - RNA, 19 nt, Artificial Sequence
  Description of Artificial Sequence: Synthetic oligonucleotide
  Antisense strand to SEQ ID NO: 197794
aaacacauacacaaucaaa

SEQ ID NO: 197796 - RNA, 19 nt, Artificial Sequence
  Description of Artificial Sequence: Synthetic oligonucleotide
  Sense strand starting at position 2659 of SEQ ID NO: 2549
ggugcacucgcacuaaugu

SEQ ID NO: 197797 - RNA, 19 nt, Artificial Sequence
  Description of Artificial Sequence: Synthetic oligonucleotide
  Antisense strand to SEQ ID NO: 197796
acauuagugcgagugcacc

SEQ ID NO: 197798 - RNA, 19 nt, Artificial Sequence
  Description of Artificial Sequence: Synthetic oligonucleotide
  Sense strand starting at position 2660 of SEQ ID NO: 2549
gugcacucgcacuaauguu

SEQ ID NO: 197799 - RNA, 19 nt, Artificial Sequence
  Description of Artificial Sequence: Synthetic oligonucleotide
  Antisense strand to SEQ ID NO: 197798
aacauuagugcgagugcac

SEQ ID NO: 197800 - RNA, 19 nt, Artificial Sequence
  Description of Artificial Sequence: Synthetic oligonucleotide
  Sense strand starting at position 2667 of SEQ ID NO: 2549
cgcacuaauguuuggacga

SEQ ID NO: 197801 - RNA, 19 nt, Artificial Sequence
  Description of Artificial Sequence: Synthetic oligonucleotide
  Antisense strand to SEQ ID NO: 197800
ucguccaaacauuagugcg

SEQ ID NO: 197802 - RNA, 19 nt, Artificial Sequence
  Description of Artificial Sequence: Synthetic oligonucleotide
  Sense strand starting at position 2744 of SEQ ID NO: 2549
gcagcuugugcacuugauu

SEQ ID NO: 197803 - RNA, 19 nt, Artificial Sequence
  Description of Artificial Sequence: Synthetic oligonucleotide
  Antisense strand to SEQ ID NO: 197802
aaucaagugcacaagcugc

SEQ ID NO: 197804 - RNA, 19 nt, Artificial Sequence
  Description of Artificial Sequence: Synthetic oligonucleotide
  Sense strand starting at position 2750 of SEQ ID NO: 2549
ugugcacuugauugugaca

SEQ ID NO: 197805 - RNA, 19 nt, Artificial Sequence
  Description of Artificial Sequence: Synthetic oligonucleotide
  Antisense strand to SEQ ID NO: 197804
ugucacaaucaagugcaca

SEQ ID NO: 197806 - RNA, 19 nt, Artificial Sequence
  Description of Artificial Sequence: Synthetic oligonucleotide
  Sense strand starting at position 2874 of SEQ ID NO: 2549
uagccucaggcugaguuaa

SEQ ID NO: 197807 - RNA, 19 nt, Artificial Sequence
  Description of Artificial Sequence: Synthetic oligonucleotide
  Antisense strand to SEQ ID NO: 197806
uuaacucagccugaggcua

SEQ ID NO: 197808 - RNA, 19 nt, Artificial Sequence
  Description of Artificial Sequence: Synthetic oligonucleotide
  Sense strand starting at position 3061 of SEQ ID NO: 2549
ucccguguaucuuccauua

SEQ ID NO: 197809 - RNA, 19 nt, Artificial Sequence
  Description of Artificial Sequence: Synthetic oligonucleotide
  Antisense strand to SEQ ID NO: 197808
uaauggaagauacacggga

SEQ ID NO: 197810 - RNA, 19 nt, Artificial Sequence
  Description of Artificial Sequence: Synthetic oligonucleotide
  Sense strand starting at position 3066 of SEQ ID NO: 2549
uguaucuuccauuauguga

SEQ ID NO: 197811 - RNA, 19 nt, Artificial Sequence
  Description of Artificial Sequence: Synthetic oligonucleotide
  Antisense strand to SEQ ID NO: 197810
ucacauaauggaagauaca

SEQ ID NO: 197812 - RNA, 19 nt, Artificial Sequence
  Description of Artificial Sequence: Synthetic oligonucleotide
  Sense strand starting at position 3250 of SEQ ID NO: 2549
gcucaagggugugugacau

SEQ ID NO: 197813 - RNA, 19 nt, Artificial Sequence
  Description of Artificial Sequence: Synthetic oligonucleotide
  Antisense strand to SEQ ID NO: 197812
augucacacacccuugagc

SEQ ID NO: 197814 - RNA, 19 nt, Artificial Sequence
  Description of Artificial Sequence: Synthetic oligonucleotide
  Sense strand starting at position 3258 of SEQ ID NO: 2549
gugugugacaugugccaca

SEQ ID NO: 197815 - RNA, 19 nt, Artificial Sequence
  Description of Artificial Sequence: Synthetic oligonucleotide
  Antisense strand to SEQ ID NO: 197814
uguggcacaugucacacac

SEQ ID NO: 197816 - RNA, 19 nt, Artificial Sequence
  Description of Artificial Sequence: Synthetic oligonucleotide
  Sense strand starting at position 3263 of SEQ ID NO: 2549
ugacaugugccacaaucgu

SEQ ID NO: 197817 - RNA, 19 nt, Artificial Sequence
  Description of Artificial Sequence: Synthetic oligonucleotide
  Antisense strand to SEQ ID NO: 197816
acgauuguggcacauguca

SEQ ID NO: 197818 - RNA, 19 nt, Artificial Sequence
  Description of Artificial Sequence: Synthetic oligonucleotide
  Sense strand starting at position 3311 of SEQ ID NO: 2549
ggcacaaucuaguggaaga

SEQ ID NO: 197819 - RNA, 19 nt, Artificial Sequence
  Description of Artificial Sequence: Synthetic oligonucleotide
  Antisense strand to SEQ ID NO: 197818
ucuuccacuagauugugcc

SEQ ID NO: 197820 - RNA, 19 nt, Artificial Sequence
  Description of Artificial Sequence: Synthetic oligonucleotide
  Sense strand starting at position 3350 of SEQ ID NO: 2549
caaagugcuggccaucaaa

SEQ ID NO: 197821 - RNA, 19 nt, Artificial Sequence
  Description of Artificial Sequence: Synthetic oligonucleotide
  Antisense strand to SEQ ID NO: 197820
uuugauggccagcacuuug

SEQ ID NO: 197822 - RNA, 19 nt, Artificial Sequence
  Description of Artificial Sequence: Synthetic oligonucleotide
  Sense strand starting at position 3374 of SEQ ID NO: 2549
gggaguugcuggaauagga

SEQ ID NO: 197823 - RNA, 19 nt, Artificial Sequence
  Description of Artificial Sequence: Synthetic oligonucleotide
  Antisense strand to SEQ ID NO: 197822
uccuauuccagcaacuccc

SEQ ID NO: 197824 - RNA, 19 nt, Artificial Sequence
  Description of Artificial Sequence: Synthetic oligonucleotide
  Sense strand starting at position 3744 of SEQ ID NO: 2549
ugugguuugagcugagaau

SEQ ID NO: 197825 - RNA, 19 nt, Artificial Sequence
  Description of Artificial Sequence: Synthetic oligonucleotide
  Antisense strand to SEQ ID NO: 197824
auucucagcucaaaccaca

SEQ ID NO: 197826 - RNA, 19 nt, Artificial Sequence
  Description of Artificial Sequence: Synthetic oligonucleotide
  Sense strand starting at position 3745 of SEQ ID NO: 2549
gugguuugagcugagaauu

SEQ ID NO: 197827 - RNA, 19 nt, Artificial Sequence
  Description of Artificial Sequence: Synthetic oligonucleotide
  Antisense strand to SEQ ID NO: 197826
aauucucagcucaaaccac

SEQ ID NO: 197828 - RNA, 19 nt, Artificial Sequence
  Description of Artificial Sequence: Synthetic oligonucleotide
  Sense strand starting at position 3753 of SEQ ID NO: 2549
agcugagaauuagggauaa

SEQ ID NO: 197829 - RNA, 19 nt, Artificial Sequence
  Description of Artificial Sequence: Synthetic oligonucleotide
  Antisense strand to SEQ ID NO: 197828
uuaucccuaauucucagcu

SEQ ID NO: 197830 - RNA, 19 nt, Artificial Sequence
  Description of Artificial Sequence: Synthetic oligonucleotide
  Sense strand starting at position 3776 of SEQ ID NO: 2549
gaguuaggcugauaaagga

SEQ ID NO: 197831 - RNA, 19 nt, Artificial Sequence
  Description of Artificial Sequence: Synthetic oligonucleotide
  Antisense strand to SEQ ID NO: 197830
uccuuuaucagccuaacuc

SEQ ID NO: 197832 - RNA, 19 nt, Artificial Sequence
  Description of Artificial Sequence: Synthetic oligonucleotide
  Sense strand starting at position 3797 of SEQ ID NO: 2549
ggaaguggugauuggagga

SEQ ID NO: 197833 - RNA, 19 nt, Artificial Sequence
  Description of Artificial Sequence: Synthetic oligonucleotide
  Antisense strand to SEQ ID NO: 197832
uccuccaaucaccacuucc

SEQ ID NO: 197834 - RNA, 19 nt, Artificial Sequence
  Description of Artificial Sequence: Synthetic oligonucleotide
  Sense strand starting at position 3800 of SEQ ID NO: 2549
aguggugauuggaggagaa

SEQ ID NO: 197835 - RNA, 19 nt, Artificial Sequence
  Description of Artificial Sequence: Synthetic oligonucleotide
  Antisense strand to SEQ ID NO: 197834
uucuccuccaaucaccacu

SEQ ID NO: 197836 - RNA, 19 nt, Artificial Sequence
  Description of Artificial Sequence: Synthetic oligonucleotide
  Sense strand starting at position 3813 of SEQ ID NO: 2549
ggagaaauccucuguccuu

SEQ ID NO: 197837 - RNA, 19 nt, Artificial Sequence
  Description of Artificial Sequence: Synthetic oligonucleotide
  Antisense strand to SEQ ID NO: 197836
aaggacagaggauuucucc

SEQ ID NO: 197838 - RNA, 19 nt, Artificial Sequence
  Description of Artificial Sequence: Synthetic oligonucleotide
  Sense strand starting at position 3822 of SEQ ID NO: 2549
cucuguccuugucugagau

SEQ ID NO: 197839 - RNA, 19 nt, Artificial Sequence
  Description of Artificial Sequence: Synthetic oligonucleotide
  Antisense strand to SEQ ID NO: 197838
aucucagacaaggacagag

SEQ ID NO: 197840 - RNA, 19 nt, Artificial Sequence
  Description of Artificial Sequence: Synthetic oligonucleotide
  Sense strand starting at position 3823 of SEQ ID NO: 2549
ucuguccuugucugagauu

SEQ ID NO: 197841 - RNA, 19 nt, Artificial Sequence
  Description of Artificial Sequence: Synthetic oligonucleotide
  Antisense strand to SEQ ID NO: 197840
aaucucagacaaggacaga

SEQ ID NO: 197842 - RNA, 19 nt, Artificial Sequence
  Description of Artificial Sequence: Synthetic oligonucleotide
  Sense strand starting at position 3832 of SEQ ID NO: 2549
gucugagauuacccugugu

SEQ ID NO: 197843 - RNA, 19 nt, Artificial Sequence
  Description of Artificial Sequence: Synthetic oligonucleotide
  Antisense strand to SEQ ID NO: 197842
acacaggguaaucucagac

SEQ ID NO: 197844 - RNA, 19 nt, Artificial Sequence
  Description of Artificial Sequence: Synthetic oligonucleotide
  Sense strand starting at position 3834 of SEQ ID NO: 2549
cugagauuacccuguguua

SEQ ID NO: 197845 - RNA, 19 nt, Artificial Sequence
  Description of Artificial Sequence: Synthetic oligonucleotide
  Antisense strand to SEQ ID NO: 197844
uaacacaggguaaucucag

SEQ ID NO: 197846 - RNA, 19 nt, Artificial Sequence
  Description of Artificial Sequence: Synthetic oligonucleotide
  Sense strand starting at position 3836 of SEQ ID NO: 2549
gagauuacccuguguuagg

SEQ ID NO: 197847 - RNA, 19 nt, Artificial Sequence
  Description of Artificial Sequence: Synthetic oligonucleotide
  Antisense strand to SEQ ID NO: 197846
ccuaacacaggguaaucuc

SEQ ID NO: 197848 - RNA, 19 nt, Artificial Sequence
  Description of Artificial Sequence: Synthetic oligonucleotide
  Sense strand starting at position 3907 of SEQ ID NO: 2549
agacauguggacugucaaa

SEQ ID NO: 197849 - RNA, 19 nt, Artificial Sequence
  Description of Artificial Sequence: Synthetic oligonucleotide
  Antisense strand to SEQ ID NO: 197848
uuugacaguccacaugucu

SEQ ID NO: 197850 - RNA, 19 nt, Artificial Sequence
  Description of Artificial Sequence: Synthetic oligonucleotide
  Sense strand starting at position 3927 of SEQ ID NO: 2549
cuaguagauucugaauccu

SEQ ID NO: 197851 - RNA, 19 nt, Artificial Sequence
  Description of Artificial Sequence: Synthetic oligonucleotide
  Antisense strand to SEQ ID NO: 197850
aggauucagaaucuacuag

SEQ ID NO: 197852 - RNA, 19 nt, Artificial Sequence
  Description of Artificial Sequence: Synthetic oligonucleotide
  Sense strand starting at position 19 of SEQ ID NO: 2550
agggauuccuguuuauauu

SEQ ID NO: 197853 - RNA, 19 nt, Artificial Sequence
  Description of Artificial Sequence: Synthetic oligonucleotide
  Antisense strand to SEQ ID NO: 197852
aauauaaacaggaaucccu

SEQ ID NO: 197854 - RNA, 19 nt, Artificial Sequence
  Description of Artificial Sequence: Synthetic oligonucleotide
  Sense strand starting at position 20 of SEQ ID NO: 2550
gggauuccuguuuauauug

SEQ ID NO: 197855 - RNA, 19 nt, Artificial Sequence
  Description of Artificial Sequence: Synthetic oligonucleotide
  Antisense strand to SEQ ID NO: 197854
caauauaaacaggaauccc

SEQ ID NO: 197856 - RNA, 19 nt, Artificial Sequence
  Description of Artificial Sequence: Synthetic oligonucleotide
  Sense strand starting at position 53 of SEQ ID NO: 2550
guaaauggccugcauaaug

SEQ ID NO: 197857 - RNA, 19 nt, Artificial Sequence
  Description of Artificial Sequence: Synthetic oligonucleotide
  Antisense strand to SEQ ID NO: 197856
cauuaugcaggccauuuac

SEQ ID NO: 197858 - RNA, 19 nt, Artificial Sequence
  Description of Artificial Sequence: Synthetic oligonucleotide
  Sense strand starting at position 203 of SEQ ID NO: 2550
gcuaauacuggucauaguu

SEQ ID NO: 197859 - RNA, 19 nt, Artificial Sequence
  Description of Artificial Sequence: Synthetic oligonucleotide
  Antisense strand to SEQ ID NO: 197858
aacuaugaccaguauuagc

SEQ ID NO: 197860 - RNA, 19 nt, Artificial Sequence
  Description of Artificial Sequence: Synthetic oligonucleotide
  Sense strand starting at position 250 of SEQ ID NO: 2550
agauucugucaguaucuuu

SEQ ID NO: 197861 - RNA, 19 nt, Artificial Sequence
  Description of Artificial Sequence: Synthetic oligonucleotide
  Antisense strand to SEQ ID NO: 197860
aaagauacugacagaaucu

SEQ ID NO: 197862 - RNA, 19 nt, Artificial Sequence
  Description of Artificial Sequence: Synthetic oligonucleotide
  Sense strand starting at position 384 of SEQ ID NO: 2550
gucaguuuggaucaugaug

SEQ ID NO: 197863 - RNA, 19 nt, Artificial Sequence
  Description of Artificial Sequence: Synthetic oligonucleotide
  Antisense strand to SEQ ID NO: 197862
caucaugauccaaacugac

SEQ ID NO: 197864 - RNA, 19 nt, Artificial Sequence
  Description of Artificial Sequence: Synthetic oligonucleotide
  Sense strand starting at position 395 of SEQ ID NO: 2550
ucaugauguagugggagga

SEQ ID NO: 197865 - RNA, 19 nt, Artificial Sequence
  Description of Artificial Sequence: Synthetic oligonucleotide
  Antisense strand to SEQ ID NO: 197864
uccucccacuacaucauga

SEQ ID NO: 197866 - RNA, 19 nt, Artificial Sequence
  Description of Artificial Sequence: Synthetic oligonucleotide
  Sense strand starting at position 399 of SEQ ID NO: 2550
gauguagugggaggaauua

SEQ ID NO: 197867 - RNA, 19 nt, Artificial Sequence
  Description of Artificial Sequence: Synthetic oligonucleotide
  Antisense strand to SEQ ID NO: 197866
uaauuccucccacuacauc

SEQ ID NO: 197868 - RNA, 19 nt, Artificial Sequence
  Description of Artificial Sequence: Synthetic oligonucleotide
  Sense strand starting at position 501 of SEQ ID NO: 2550
aagguacuguuaucaggaa

SEQ ID NO: 197869 - RNA, 19 nt, Artificial Sequence
  Description of Artificial Sequence: Synthetic oligonucleotide
  Antisense strand to SEQ ID NO: 197868
uuccugauaacaguaccuu

SEQ ID NO: 197870 - RNA, 19 nt, Artificial Sequence
  Description of Artificial Sequence: Synthetic oligonucleotide
  Sense strand starting at position 591 of SEQ ID NO: 2550
gauguaaauggaugugacu

SEQ ID NO: 197871 - RNA, 19 nt, Artificial Sequence
  Description of Artificial Sequence: Synthetic oligonucleotide
  Antisense strand to SEQ ID NO: 197870
agucacauccauuuacauc

SEQ ID NO: 197872 - RNA, 19 nt, Artificial Sequence
  Description of Artificial Sequence: Synthetic oligonucleotide
  Sense strand starting at position 593 of SEQ ID NO: 2550
uguaaauggaugugacucu

SEQ ID NO: 197873 - RNA, 19 nt, Artificial Sequence
  Description of Artificial Sequence: Synthetic oligonucleotide
  Antisense strand to SEQ ID NO: 197872
agagucacauccauuuaca

SEQ ID NO: 197874 - RNA, 19 nt, Artificial Sequence
  Description of Artificial Sequence: Synthetic oligonucleotide
  Sense strand starting at position 779 of SEQ ID NO: 2550
gaccaauagguuugcugaa

SEQ ID NO: 197875 - RNA, 19 nt, Artificial Sequence
  Description of Artificial Sequence: Synthetic oligonucleotide
  Antisense strand to SEQ ID NO: 197874
uucagcaaaccuauugguc

SEQ ID NO: 197876 - RNA, 19 nt, Artificial Sequence
  Description of Artificial Sequence: Synthetic oligonucleotide
  Sense strand starting at position 800 of SEQ ID NO: 2550
uuuguaccugcucagaaua

SEQ ID NO: 197877 - RNA, 19 nt, Artificial Sequence
  Description of Artificial Sequence: Synthetic oligonucleotide
  Antisense strand to SEQ ID NO: 197876
uauucugagcagguacaaa

SEQ ID NO: 197878 - RNA, 19 nt, Artificial Sequence
  Description of Artificial Sequence: Synthetic oligonucleotide
  Sense strand starting at position 920 of SEQ ID NO: 2550
gaaagaaagcacuguucuu

SEQ ID NO: 197879 - RNA, 19 nt, Artificial Sequence
  Description of Artificial Sequence: Synthetic oligonucleotide
  Antisense strand to SEQ ID NO: 197878
aagaacagugcuuucuuuc

SEQ ID NO: 197880 - RNA, 19 nt, Artificial Sequence
  Description of Artificial Sequence: Synthetic oligonucleotide
  Sense strand starting at position 925 of SEQ ID NO: 2550
aaagcacuguucuuggaua

SEQ ID NO: 197881 - RNA, 19 nt, Artificial Sequence
  Description of Artificial Sequence: Synthetic oligonucleotide
  Antisense strand to SEQ ID NO: 197880
uauccaagaacagugcuuu

SEQ ID NO: 197882 - RNA, 19 nt, Artificial Sequence
  Description of Artificial Sequence: Synthetic oligonucleotide
  Sense strand starting at position 1040 of SEQ ID NO: 2550
ccuauuauccgaggacgaa

SEQ ID NO: 197883 - RNA, 19 nt, Artificial Sequence
  Description of Artificial Sequence: Synthetic oligonucleotide
  Antisense strand to SEQ ID NO: 197882
uucguccucggauaauagg

SEQ ID NO: 197884 - RNA, 19 nt, Artificial Sequence
  Description of Artificial Sequence: Synthetic oligonucleotide
  Sense strand starting at position 1041 of SEQ ID NO: 2550
cuauuauccgaggacgaac

SEQ ID NO: 197885 - RNA, 19 nt, Artificial Sequence
  Description of Artificial Sequence: Synthetic oligonucleotide
  Antisense strand to SEQ ID NO: 197884
guucguccucggauaauag

SEQ ID NO: 197886 - RNA, 19 nt, Artificial Sequence
  Description of Artificial Sequence: Synthetic oligonucleotide
  Sense strand starting at position 1131 of SEQ ID NO: 2550
auuacuugauaggcucaaa

SEQ ID NO: 197887 - RNA, 19 nt, Artificial Sequence
  Description of Artificial Sequence: Synthetic oligonucleotide
  Antisense strand to SEQ ID NO: 197886
uuugagccuaucaaguaau

SEQ ID NO: 197888 - RNA, 19 nt, Artificial Sequence
  Description of Artificial Sequence: Synthetic oligonucleotide
  Sense strand starting at position 1339 of SEQ ID NO: 2550
aauucucgugaaugaauag

SEQ ID NO: 197889 - RNA, 19 nt, Artificial Sequence
  Description of Artificial Sequence: Synthetic oligonucleotide
  Antisense strand to SEQ ID NO: 197888
cuauucauucacgagaauu

SEQ ID NO: 197890 - RNA, 19 nt, Artificial Sequence
  Description of Artificial Sequence: Synthetic oligonucleotide
  Sense strand starting at position 1875 of SEQ ID NO: 2550
ugggaauuguucuugggag

SEQ ID NO: 197891 - RNA, 19 nt, Artificial Sequence
  Description of Artificial Sequence: Synthetic oligonucleotide
  Antisense strand to SEQ ID NO: 197890
cucccaagaacaauuccca

SEQ ID NO: 197892 - RNA, 19 nt, Artificial Sequence
  Description of Artificial Sequence: Synthetic oligonucleotide
  Sense strand starting at position 1877 of SEQ ID NO: 2550
ggaauuguucuugggagac

SEQ ID NO: 197893 - RNA, 19 nt, Artificial Sequence
  Description of Artificial Sequence: Synthetic oligonucleotide
  Antisense strand to SEQ ID NO: 197892
gucucccaagaacaauucc

SEQ ID NO: 197894 - RNA, 19 nt, Artificial Sequence
  Description of Artificial Sequence: Synthetic oligonucleotide
  Sense strand starting at position 2185 of SEQ ID NO: 2550
uggacaguacccuaacagu

SEQ ID NO: 197895 - RNA, 19 nt, Artificial Sequence
  Description of Artificial Sequence: Synthetic oligonucleotide
  Antisense strand to SEQ ID NO: 197894
acuguuaggguacugucca

SEQ ID NO: 197896 - RNA, 19 nt, Artificial Sequence
  Description of Artificial Sequence: Synthetic oligonucleotide
  Sense strand starting at position 2268 of SEQ ID NO: 2550
auccucaauguguaaacuu

SEQ ID NO: 197897 - RNA, 19 nt, Artificial Sequence
  Description of Artificial Sequence: Synthetic oligonucleotide
  Antisense strand to SEQ ID NO: 197896
aaguuuacacauugaggau

SEQ ID NO: 197898 - RNA, 19 nt, Artificial Sequence
  Description of Artificial Sequence: Synthetic oligonucleotide
  Sense strand starting at position 2976 of SEQ ID NO: 2550
ucucuuacaucucugagga

SEQ ID NO: 197899 - RNA, 19 nt, Artificial Sequence
  Description of Artificial Sequence: Synthetic oligonucleotide
  Antisense strand to SEQ ID NO: 197898
uccucagagauguaagaga

SEQ ID NO: 197900 - RNA, 19 nt, Artificial Sequence
  Description of Artificial Sequence: Synthetic oligonucleotide
  Sense strand starting at position 2977 of SEQ ID NO: 2550
cucuuacaucucugaggaa

SEQ ID NO: 197901 - RNA, 19 nt, Artificial Sequence
  Description of Artificial Sequence: Synthetic oligonucleotide
  Antisense strand to SEQ ID NO: 197900
uuccucagagauguaagag

SEQ ID NO: 197902 - RNA, 19 nt, Artificial Sequence
  Description of Artificial Sequence: Synthetic oligonucleotide
  Sense strand starting at position 3454 of SEQ ID NO: 2550
gaaagacuuuguucuguug

SEQ ID NO: 197903 - RNA, 19 nt, Artificial Sequence
  Description of Artificial Sequence: Synthetic oligonucleotide
  Antisense strand to SEQ ID NO: 197902
caacagaacaaagucuuuc

SEQ ID NO: 197904 - RNA, 19 nt, Artificial Sequence
  Description of Artificial Sequence: Synthetic oligonucleotide
  Sense strand starting at position 3460 of SEQ ID NO: 2550
cuuuguucuguugaugaaa

SEQ ID NO: 197905 - RNA, 19 nt, Artificial Sequence
  Description of Artificial Sequence: Synthetic oligonucleotide
  Antisense strand to SEQ ID NO: 197904
uuucaucaacagaacaaag

SEQ ID NO: 197906 - RNA, 19 nt, Artificial Sequence
  Description of Artificial Sequence: Synthetic oligonucleotide
  Sense strand starting at position 3508 of SEQ ID NO: 2550
gguuaaauauacucugauc

SEQ ID NO: 197907 - RNA, 19 nt, Artificial Sequence
  Description of Artificial Sequence: Synthetic oligonucleotide
  Antisense strand to SEQ ID NO: 197906
gaucagaguauauuuaacc

SEQ ID NO: 197908 - RNA, 19 nt, Artificial Sequence
  Description of Artificial Sequence: Synthetic oligonucleotide
  Sense strand starting at position 3510 of SEQ ID NO: 2550
uuaaauauacucugaucga

SEQ ID NO: 197909 - RNA, 19 nt, Artificial Sequence
  Description of Artificial Sequence: Synthetic oligonucleotide
  Antisense strand to SEQ ID NO: 197908
ucgaucagaguauauuuaa

SEQ ID NO: 197910 - RNA, 19 nt, Artificial Sequence
  Description of Artificial Sequence: Synthetic oligonucleotide
  Sense strand starting at position 3514 of SEQ ID NO: 2550
auauacucugaucgaaaca

SEQ ID NO: 197911 - RNA, 19 nt, Artificial Sequence
  Description of Artificial Sequence: Synthetic oligonucleotide
  Antisense strand to SEQ ID NO: 197910
uguuucgaucagaguauau

SEQ ID NO: 197912 - RNA, 19 nt, Artificial Sequence
  Description of Artificial Sequence: Synthetic oligonucleotide
  Sense strand starting at position 3519 of SEQ ID NO: 2550
cucugaucgaaacaugagu

SEQ ID NO: 197913 - RNA, 19 nt, Artificial Sequence
  Description of Artificial Sequence: Synthetic oligonucleotide
  Antisense strand to SEQ ID NO: 197912
acucauguuucgaucagag

SEQ ID NO: 197914 - RNA, 19 nt, Artificial Sequence
  Description of Artificial Sequence: Synthetic oligonucleotide
  Sense strand starting at position 3521 of SEQ ID NO: 2550
cugaucgaaacaugaguaa

SEQ ID NO: 197915 - RNA, 19 nt, Artificial Sequence
  Description of Artificial Sequence: Synthetic oligonucleotide
  Antisense strand to SEQ ID NO: 197914
uuacucauguuucgaucag

SEQ ID NO: 197916 - RNA, 19 nt, Artificial Sequence
  Description of Artificial Sequence: Synthetic oligonucleotide
  Sense strand starting at position 3680 of SEQ ID NO: 2550
cacagauuauagguggauu

SEQ ID NO: 197917 - RNA, 19 nt, Artificial Sequence
  Description of Artificial Sequence: Synthetic oligonucleotide
  Antisense strand to SEQ ID NO: 197916
aauccaccuauaaucugug

SEQ ID NO: 197918 - RNA, 19 nt, Artificial Sequence
  Description of Artificial Sequence: Synthetic oligonucleotide
  Sense strand starting at position 3702 of SEQ ID NO: 2550
agacuuuaugauggguuga

SEQ ID NO: 197919 - RNA, 19 nt, Artificial Sequence
  Description of Artificial Sequence: Synthetic oligonucleotide
  Antisense strand to SEQ ID NO: 197918
ucaacccaucauaaagucu

SEQ ID NO: 197920 - RNA, 19 nt, Artificial Sequence
  Description of Artificial Sequence: Synthetic oligonucleotide
  Sense strand starting at position 3786 of SEQ ID NO: 2550
gguuauagaagccaagguu

SEQ ID NO: 197921 - RNA, 19 nt, Artificial Sequence
  Description of Artificial Sequence: Synthetic oligonucleotide
  Antisense strand to SEQ ID NO: 197920
aaccuuggcuucuauaacc

SEQ ID NO: 197922 - RNA, 19 nt, Artificial Sequence
  Description of Artificial Sequence: Synthetic oligonucleotide
  Sense strand starting at position 3859 of SEQ ID NO: 2550
gucagacucuugguuaaau

SEQ ID NO: 197923 - RNA, 19 nt, Artificial Sequence
  Description of Artificial Sequence: Synthetic oligonucleotide
  Antisense strand to SEQ ID NO: 197922
auuuaaccaagagucugac

SEQ ID NO: 197924 - RNA, 19 nt, Artificial Sequence
  Description of Artificial Sequence: Synthetic oligonucleotide
  Sense strand starting at position 3860 of SEQ ID NO: 2550
ucagacucuugguuaaauc

SEQ ID NO: 197925 - RNA, 19 nt, Artificial Sequence
  Description of Artificial Sequence: Synthetic oligonucleotide
  Antisense strand to SEQ ID NO: 197924
gauuuaaccaagagucuga

SEQ ID NO: 197926 - RNA, 19 nt, Artificial Sequence
  Description of Artificial Sequence: Synthetic oligonucleotide
  Sense strand starting at position 3870 of SEQ ID NO: 2550
gguuaaaucucuccuggau

SEQ ID NO: 197927 - RNA, 19 nt, Artificial Sequence
  Description of Artificial Sequence: Synthetic oligonucleotide
  Antisense strand to SEQ ID NO: 197926
auccaggagagauuuaacc

SEQ ID NO: 197928 - RNA, 19 nt, Artificial Sequence
  Description of Artificial Sequence: Synthetic oligonucleotide
  Sense strand starting at position 3905 of SEQ ID NO: 2550
aaaggaaagugauucugua

SEQ ID NO: 197929 - RNA, 19 nt, Artificial Sequence
  Description of Artificial Sequence: Synthetic oligonucleotide
  Antisense strand to SEQ ID NO: 197928
uacagaaucacuuuccuuu

SEQ ID NO: 197930 - RNA, 19 nt, Artificial Sequence
  Description of Artificial Sequence: Synthetic oligonucleotide
  Sense strand starting at position 3909 of SEQ ID NO: 2550
gaaagugauucuguauaaa

SEQ ID NO: 197931 - RNA, 19 nt, Artificial Sequence
  Description of Artificial Sequence: Synthetic oligonucleotide
  Antisense strand to SEQ ID NO: 197930
uuuauacagaaucacuuuc

SEQ ID NO: 197932 - RNA, 19 nt, Artificial Sequence
  Description of Artificial Sequence: Synthetic oligonucleotide
  Sense strand starting at position 107 of SEQ ID NO: 2551
gcuuucugacuucgaacua

SEQ ID NO: 197933 - RNA, 19 nt, Artificial Sequence
  Description of Artificial Sequence: Synthetic oligonucleotide
  Antisense strand to SEQ ID NO: 197932
uaguucgaagucagaaagc

SEQ ID NO: 197934 - RNA, 19 nt, Artificial Sequence
  Description of Artificial Sequence: Synthetic oligonucleotide
  Sense strand starting at position 451 of SEQ ID NO: 2551
aggauauaggcauggccaa

SEQ ID NO: 197935 - RNA, 19 nt, Artificial Sequence
  Description of Artificial Sequence: Synthetic oligonucleotide
  Antisense strand to SEQ ID NO: 197934
uuggccaugccuauauccu

SEQ ID NO: 197936 - RNA, 19 nt, Artificial Sequence
  Description of Artificial Sequence: Synthetic oligonucleotide
  Sense strand starting at position 1600 of SEQ ID NO: 2551
gugccaauugaagggagau

SEQ ID NO: 197937 - RNA, 19 nt, Artificial Sequence
  Description of Artificial Sequence: Synthetic oligonucleotide
  Antisense strand to SEQ ID NO: 197936
aucucccuucaauuggcac

SEQ ID NO: 197938 - RNA, 19 nt, Artificial Sequence
  Description of Artificial Sequence: Synthetic oligonucleotide
  Sense strand starting at position 1612 of SEQ ID NO: 2551
gggagaugcaauuggcaca

SEQ ID NO: 197939 - RNA, 19 nt, Artificial Sequence
  Description of Artificial Sequence: Synthetic oligonucleotide
  Antisense strand to SEQ ID NO: 197938
ugugccaauugcaucuccc

SEQ ID NO: 197940 - RNA, 19 nt, Artificial Sequence
  Description of Artificial Sequence: Synthetic oligonucleotide
  Sense strand starting at position 1813 of SEQ ID NO: 2551
acccuuuaaugugcaugau

SEQ ID NO: 197941 - RNA, 19 nt, Artificial Sequence
  Description of Artificial Sequence: Synthetic oligonucleotide
  Antisense strand to SEQ ID NO: 197940
aucaugcacauuaaagggu

SEQ ID NO: 197942 - RNA, 19 nt, Artificial Sequence
  Description of Artificial Sequence: Synthetic oligonucleotide
  Sense strand starting at position 1814 of SEQ ID NO: 2551
cccuuuaaugugcaugaua

SEQ ID NO: 197943 - RNA, 19 nt, Artificial Sequence
  Description of Artificial Sequence: Synthetic oligonucleotide
  Antisense strand to SEQ ID NO: 197942
uaucaugcacauuaaaggg

SEQ ID NO: 197944 - RNA, 19 nt, Artificial Sequence
  Description of Artificial Sequence: Synthetic oligonucleotide
  Sense strand starting at position 1816 of SEQ ID NO: 2551
cuuuaaugugcaugauauc

SEQ ID NO: 197945 - RNA, 19 nt, Artificial Sequence
  Description of Artificial Sequence: Synthetic oligonucleotide
  Antisense strand to SEQ ID NO: 197944
gauaucaugcacauuaaag

SEQ ID NO: 197946 - RNA, 19 nt, Artificial Sequence
  Description of Artificial Sequence: Synthetic oligonucleotide
  Sense strand starting at position 1846 of SEQ ID NO: 2551
agggauuccucugcaauag

SEQ ID NO: 197947 - RNA, 19 nt, Artificial Sequence
  Description of Artificial Sequence: Synthetic oligonucleotide
  Antisense strand to SEQ ID NO: 197946
cuauugcagaggaaucccu

SEQ ID NO: 197948 - RNA, 19 nt, Artificial Sequence
  Description of Artificial Sequence: Synthetic oligonucleotide
  Sense strand starting at position 1900 of SEQ ID NO: 2551
gguuaucaagugugcugaa

SEQ ID NO: 197949 - RNA, 19 nt, Artificial Sequence
  Description of Artificial Sequence: Synthetic oligonucleotide
  Antisense strand to SEQ ID NO: 197948
uucagcacacuugauaacc

SEQ ID NO: 197950 - RNA, 19 nt, Artificial Sequence
  Description of Artificial Sequence: Synthetic oligonucleotide
  Sense strand starting at position 1901 of SEQ ID NO: 2551
guuaucaagugugcugaaa

SEQ ID NO: 197951 - RNA, 19 nt, Artificial Sequence
  Description of Artificial Sequence: Synthetic oligonucleotide
  Antisense strand to SEQ ID NO: 197950
uuucagcacacuugauaac

SEQ ID NO: 197952 - RNA, 19 nt, Artificial Sequence
  Description of Artificial Sequence: Synthetic oligonucleotide
  Sense strand starting at position 2168 of SEQ ID NO: 2551
ucuccuuuagaaggaaauc

SEQ ID NO: 197953 - RNA, 19 nt, Artificial Sequence
  Description of Artificial Sequence: Synthetic oligonucleotide
  Antisense strand to SEQ ID NO: 197952
gauuuccuucuaaaggaga

SEQ ID NO: 197954 - RNA, 19 nt, Artificial Sequence
  Description of Artificial Sequence: Synthetic oligonucleotide
  Sense strand starting at position 2305 of SEQ ID NO: 2551
uuuacagugucagucauua

SEQ ID NO: 197955 - RNA, 19 nt, Artificial Sequence
  Description of Artificial Sequence: Synthetic oligonucleotide
  Antisense strand to SEQ ID NO: 197954
uaaugacugacacuguaaa

SEQ ID NO: 197956 - RNA, 19 nt, Artificial Sequence
  Description of Artificial Sequence: Synthetic oligonucleotide
  Sense strand starting at position 2309 of SEQ ID NO: 2551
cagugucagucauuacuuc

SEQ ID NO: 197957 - RNA, 19 nt, Artificial Sequence
  Description of Artificial Sequence: Synthetic oligonucleotide
  Antisense strand to SEQ ID NO: 197956
gaaguaaugacugacacug

SEQ ID NO: 197958 - RNA, 19 nt, Artificial Sequence
  Description of Artificial Sequence: Synthetic oligonucleotide
  Sense strand starting at position 2342 of SEQ ID NO: 2551
gugagcuccagacguuaaa

SEQ ID NO: 197959 - RNA, 19 nt, Artificial Sequence
  Description of Artificial Sequence: Synthetic oligonucleotide
  Antisense strand to SEQ ID NO: 197958
uuuaacgucuggagcucac

SEQ ID NO: 197960 - RNA, 19 nt, Artificial Sequence
  Description of Artificial Sequence: Synthetic oligonucleotide
  Sense strand starting at position 2345 of SEQ ID NO: 2551
agcuccagacguuaaauau

SEQ ID NO: 197961 - RNA, 19 nt, Artificial Sequence
  Description of Artificial Sequence: Synthetic oligonucleotide
  Antisense strand to SEQ ID NO: 197960
auauuuaacgucuggagcu

SEQ ID NO: 197962 - RNA, 19 nt, Artificial Sequence
  Description of Artificial Sequence: Synthetic oligonucleotide
  Sense strand starting at position 2657 of SEQ ID NO: 2551
cguauuaguccuuugcagu

SEQ ID NO: 197963 - RNA, 19 nt, Artificial Sequence
  Description of Artificial Sequence: Synthetic oligonucleotide
  Antisense strand to SEQ ID NO: 197962
acugcaaaggacuaauacg

SEQ ID NO: 197964 - RNA, 19 nt, Artificial Sequence
  Description of Artificial Sequence: Synthetic oligonucleotide
  Sense strand starting at position 2663 of SEQ ID NO: 2551
aguccuuugcaguaacgaa

SEQ ID NO: 197965 - RNA, 19 nt, Artificial Sequence
  Description of Artificial Sequence: Synthetic oligonucleotide
  Antisense strand to SEQ ID NO: 197964
uucguuacugcaaaggacu

SEQ ID NO: 197966 - RNA, 19 nt, Artificial Sequence
  Description of Artificial Sequence: Synthetic oligonucleotide
  Sense strand starting at position 3000 of SEQ ID NO: 2551
accagagaauuccagaacu

SEQ ID NO: 197967 - RNA, 19 nt, Artificial Sequence
  Description of Artificial Sequence: Synthetic oligonucleotide
  Antisense strand to SEQ ID NO: 197966
aguucuggaauucucuggu

SEQ ID NO: 197968 - RNA, 19 nt, Artificial Sequence
  Description of Artificial Sequence: Synthetic oligonucleotide
  Sense strand starting at position 3082 of SEQ ID NO: 2551
cuccuagcucaggaucauu

SEQ ID NO: 197969 - RNA, 19 nt, Artificial Sequence
  Description of Artificial Sequence: Synthetic oligonucleotide
  Antisense strand to SEQ ID NO: 197968
aaugauccugagcuaggag

SEQ ID NO: 197970 - RNA, 19 nt, Artificial Sequence
  Description of Artificial Sequence: Synthetic oligonucleotide
  Sense strand starting at position 3085 of SEQ ID NO: 2551
cuagcucaggaucauuauu

SEQ ID NO: 197971 - RNA, 19 nt, Artificial Sequence
  Description of Artificial Sequence: Synthetic oligonucleotide
  Antisense strand to SEQ ID NO: 197970
aauaaugauccugagcuag

SEQ ID NO: 197972 - RNA, 19 nt, Artificial Sequence
  Description of Artificial Sequence: Synthetic oligonucleotide
  Sense strand starting at position 3203 of SEQ ID NO: 2551
ggcagaguuaacugcuaua

SEQ ID NO: 197973 - RNA, 19 nt, Artificial Sequence
  Description of Artificial Sequence: Synthetic oligonucleotide
  Antisense strand to SEQ ID NO: 197972
uauagcaguuaacucugcc

SEQ ID NO: 197974 - RNA, 19 nt, Artificial Sequence
  Description of Artificial Sequence: Synthetic oligonucleotide
  Sense strand starting at position 3301 of SEQ ID NO: 2551
aggaguaggcauugcaaua

SEQ ID NO: 197975 - RNA, 19 nt, Artificial Sequence
  Description of Artificial Sequence: Synthetic oligonucleotide
  Antisense strand to SEQ ID NO: 197974
uauugcaaugccuacuccu

SEQ ID NO: 197976 - RNA, 19 nt, Artificial Sequence
  Description of Artificial Sequence: Synthetic oligonucleotide
  Sense strand starting at position 3323 of SEQ ID NO: 2551
auacaagugccacaguaaa

SEQ ID NO: 197977 - RNA, 19 nt, Artificial Sequence
  Description of Artificial Sequence: Synthetic oligonucleotide
  Antisense strand to SEQ ID NO: 197976
uuuacuguggcacuuguau

SEQ ID NO: 197978 - RNA, 19 nt, Artificial Sequence
  Description of Artificial Sequence: Synthetic oligonucleotide
  Sense strand starting at position 3405 of SEQ ID NO: 2551
agagaauuauccuuggcua

SEQ ID NO: 197979 - RNA, 19 nt, Artificial Sequence
  Description of Artificial Sequence: Synthetic oligonucleotide
  Antisense strand to SEQ ID NO: 197978
uagccaaggauaauucucu

SEQ ID NO: 197980 - RNA, 19 nt, Artificial Sequence
  Description of Artificial Sequence: Synthetic oligonucleotide
  Sense strand starting at position 3441 of SEQ ID NO: 2551
gauguugccaguuggacau

SEQ ID NO: 197981 - RNA, 19 nt, Artificial Sequence
  Description of Artificial Sequence: Synthetic oligonucleotide
  Antisense strand to SEQ ID NO: 197980
auguccaacuggcaacauc

SEQ ID NO: 197982 - RNA, 19 nt, Artificial Sequence
  Description of Artificial Sequence: Synthetic oligonucleotide
  Sense strand starting at position 3464 of SEQ ID NO: 2551
cagggaguugcugggcaaa

SEQ ID NO: 197983 - RNA, 19 nt, Artificial Sequence
  Description of Artificial Sequence: Synthetic oligonucleotide
  Antisense strand to SEQ ID NO: 197982
uuugcccagcaacucccug

SEQ ID NO: 197984 - RNA, 19 nt, Artificial Sequence
  Description of Artificial Sequence: Synthetic oligonucleotide
  Sense strand starting at position 3466 of SEQ ID NO: 2551
gggaguugcugggcaaaug

SEQ ID NO: 197985 - RNA, 19 nt, Artificial Sequence
  Description of Artificial Sequence: Synthetic oligonucleotide
  Antisense strand to SEQ ID NO: 197984
cauuugcccagcaacuccc

SEQ ID NO: 197986 - RNA, 19 nt, Artificial Sequence
  Description of Artificial Sequence: Synthetic oligonucleotide
  Sense strand starting at position 3467 of SEQ ID NO: 2551
ggaguugcugggcaaaugu

SEQ ID NO: 197987 - RNA, 19 nt, Artificial Sequence
  Description of Artificial Sequence: Synthetic oligonucleotide
  Antisense strand to SEQ ID NO: 197986
acauuugcccagcaacucc

SEQ ID NO: 197988 - RNA, 19 nt, Artificial Sequence
  Description of Artificial Sequence: Synthetic oligonucleotide
  Sense strand starting at position 3474 of SEQ ID NO: 2551
cugggcaaauguccucaua

SEQ ID NO: 197989 - RNA, 19 nt, Artificial Sequence
  Description of Artificial Sequence: Synthetic oligonucleotide
  Antisense strand to SEQ ID NO: 197988
uaugaggacauuugcccag

SEQ ID NO: 197990 - RNA, 19 nt, Artificial Sequence
  Description of Artificial Sequence: Synthetic oligonucleotide
  Sense strand starting at position 3476 of SEQ ID NO: 2551
gggcaaauguccucauaga

SEQ ID NO: 197991 - RNA, 19 nt, Artificial Sequence
  Description of Artificial Sequence: Synthetic oligonucleotide
  Antisense strand to SEQ ID NO: 197990
ucuaugaggacauuugccc

SEQ ID NO: 197992 - RNA, 19 nt, Artificial Sequence
  Description of Artificial Sequence: Synthetic oligonucleotide
  Sense strand starting at position 3477 of SEQ ID NO: 2551
ggcaaauguccucauagaa

SEQ ID NO: 197993 - RNA, 19 nt, Artificial Sequence
  Description of Artificial Sequence: Synthetic oligonucleotide
  Antisense strand to SEQ ID NO: 197992
uucuaugaggacauuugcc

SEQ ID NO: 197994 - RNA, 19 nt, Artificial Sequence
  Description of Artificial Sequence: Synthetic oligonucleotide
  Sense strand starting at position 3576 of SEQ ID NO: 2551
aucagacaucugugcauga

SEQ ID NO: 197995 - RNA, 19 nt, Artificial Sequence
  Description of Artificial Sequence: Synthetic oligonucleotide
  Antisense strand to SEQ ID NO: 197994
ucaugcacagaugucugau

SEQ ID NO: 197996 - RNA, 19 nt, Artificial Sequence
  Description of Artificial Sequence: Synthetic oligonucleotide
  Sense strand starting at position 3577 of SEQ ID NO: 2551
ucagacaucugugcaugaa

SEQ ID NO: 197997 - RNA, 19 nt, Artificial Sequence
  Description of Artificial Sequence: Synthetic oligonucleotide
  Antisense strand to SEQ ID NO: 197996
uucaugcacagaugucuga

SEQ ID NO: 197998 - RNA, 19 nt, Artificial Sequence
  Description of Artificial Sequence: Synthetic oligonucleotide
  Sense strand starting at position 3578 of SEQ ID NO: 2551
cagacaucugugcaugaaa

SEQ ID NO: 197999 - RNA, 19 nt, Artificial Sequence
  Description of Artificial Sequence: Synthetic oligonucleotide
  Antisense strand to SEQ ID NO: 197998
uuucaugcacagaugucug

SEQ ID NO: 198000 - RNA, 19 nt, Artificial Sequence
  Description of Artificial Sequence: Synthetic oligonucleotide
  Sense strand starting at position 3680 of SEQ ID NO: 2551
uccuauuagugggcucaca

SEQ ID NO: 198001 - RNA, 19 nt, Artificial Sequence
  Description of Artificial Sequence: Synthetic oligonucleotide
  Antisense strand to SEQ ID NO: 198000
ugugagcccacuaauagga

SEQ ID NO: 198002 - RNA, 19 nt, Artificial Sequence
  Description of Artificial Sequence: Synthetic oligonucleotide
  Sense strand starting at position 3701 of SEQ ID NO: 2551
guuaguugcuaaucucaaa

SEQ ID NO: 198003 - RNA, 19 nt, Artificial Sequence
  Description of Artificial Sequence: Synthetic oligonucleotide
  Antisense strand to SEQ ID NO: 198002
uuugagauuagcaacuaac

SEQ ID NO: 198004 - RNA, 19 nt, Artificial Sequence
  Description of Artificial Sequence: Synthetic oligonucleotide
  Sense strand starting at position 3756 of SEQ ID NO: 2551
ccuugugcuccucagagua

SEQ ID NO: 198005 - RNA, 19 nt, Artificial Sequence
  Description of Artificial Sequence: Synthetic oligonucleotide
  Antisense strand to SEQ ID NO: 198004
uacucugaggagcacaagg

SEQ ID NO: 198006 - RNA, 19 nt, Artificial Sequence
  Description of Artificial Sequence: Synthetic oligonucleotide
  Sense strand starting at position 3768 of SEQ ID NO: 2551
cagaguacauggcccaaua

SEQ ID NO: 198007 - RNA, 19 nt, Artificial Sequence
  Description of Artificial Sequence: Synthetic oligonucleotide
  Antisense strand to SEQ ID NO: 198006
uauugggccauguacucug

SEQ ID NO: 198008 - RNA, 19 nt, Artificial Sequence
  Description of Artificial Sequence: Synthetic oligonucleotide
  Sense strand starting at position 3834 of SEQ ID NO: 2551
ugguguguuaauuacugca

SEQ ID NO: 198009 - RNA, 19 nt, Artificial Sequence
  Description of Artificial Sequence: Synthetic oligonucleotide
  Antisense strand to SEQ ID NO: 198008
ugcaguaauuaacacacca

SEQ ID NO: 198010 - RNA, 19 nt, Artificial Sequence
  Description of Artificial Sequence: Synthetic oligonucleotide
  Sense strand starting at position 3855 of SEQ ID NO: 2551
ccaugaaacuugcugucca

SEQ ID NO: 198011 - RNA, 19 nt, Artificial Sequence
  Description of Artificial Sequence: Synthetic oligonucleotide
  Antisense strand to SEQ ID NO: 198010
uggacagcaaguuucaugg

SEQ ID NO: 198012 - RNA, 19 nt, Artificial Sequence
  Description of Artificial Sequence: Synthetic oligonucleotide
  Sense strand starting at position 11 of SEQ ID NO: 2552
ccagaaagcagagguaaau

SEQ ID NO: 198013 - RNA, 19 nt, Artificial Sequence
  Description of Artificial Sequence: Synthetic oligonucleotide
  Antisense strand to SEQ ID NO: 198012
auuuaccucugcuuucugg

SEQ ID NO: 198014 - RNA, 19 nt, Artificial Sequence
  Description of Artificial Sequence: Synthetic oligonucleotide
  Sense strand starting at position 22 of SEQ ID NO: 2552
agguaaauuguauggguga

SEQ ID NO: 198015 - RNA, 19 nt, Artificial Sequence
  Description of Artificial Sequence: Synthetic oligonucleotide
  Antisense strand to SEQ ID NO: 198014
ucacccauacaauuuaccu

SEQ ID NO: 198016 - RNA, 19 nt, Artificial Sequence
  Description of Artificial Sequence: Synthetic oligonucleotide
  Sense strand starting at position 24 of SEQ ID NO: 2552
guaaauuguaugggugaua

SEQ ID NO: 198017 - RNA, 19 nt, Artificial Sequence
  Description of Artificial Sequence: Synthetic oligonucleotide
  Antisense strand to SEQ ID NO: 198016
uaucacccauacaauuuac

SEQ ID NO: 198018 - RNA, 19 nt, Artificial Sequence
  Description of Artificial Sequence: Synthetic oligonucleotide
  Sense strand starting at position 42 of SEQ ID NO: 2552
acaaucacucaguggaguu

SEQ ID NO: 198019 - RNA, 19 nt, Artificial Sequence
  Description of Artificial Sequence: Synthetic oligonucleotide
  Antisense strand to SEQ ID NO: 198018
aacuccacugagugauugu

SEQ ID NO: 198020 - RNA, 19 nt, Artificial Sequence
  Description of Artificial Sequence: Synthetic oligonucleotide
  Sense strand starting at position 122 of SEQ ID NO: 2552
gauaaacaaugucuuggua

SEQ ID NO: 198021 - RNA, 19 nt, Artificial Sequence
  Description of Artificial Sequence: Synthetic oligonucleotide
  Antisense strand to SEQ ID NO: 198020
uaccaagacauuguuuauc

SEQ ID NO: 198022 - RNA, 19 nt, Artificial Sequence
  Description of Artificial Sequence: Synthetic oligonucleotide
  Sense strand starting at position 511 of SEQ ID NO: 2552
cacccaugggagugauacu

SEQ ID NO: 198023 - RNA, 19 nt, Artificial Sequence
  Description of Artificial Sequence: Synthetic oligonucleotide
  Antisense strand to SEQ ID NO: 198022
aguaucacucccaugggug

SEQ ID NO: 198024 - RNA, 19 nt, Artificial Sequence
  Description of Artificial Sequence: Synthetic oligonucleotide
  Sense strand starting at position 545 of SEQ ID NO: 2552
ccaguaagacaaggcuauu

SEQ ID NO: 198025 - RNA, 19 nt, Artificial Sequence
  Description of Artificial Sequence: Synthetic oligonucleotide
  Antisense strand to SEQ ID NO: 198024
aauagccuugucuuacugg

SEQ ID NO: 198026 - RNA, 19 nt, Artificial Sequence
  Description of Artificial Sequence: Synthetic oligonucleotide
  Sense strand starting at position 632 of SEQ ID NO: 2552
cccuuaguugcugaaucau

SEQ ID NO: 198027 - RNA, 19 nt, Artificial Sequence
  Description of Artificial Sequence: Synthetic oligonucleotide
  Antisense strand to SEQ ID NO: 198026
augauucagcaacuaaggg

SEQ ID NO: 198028 - RNA, 19 nt, Artificial Sequence
  Description of Artificial Sequence: Synthetic oligonucleotide
  Sense strand starting at position 718 of SEQ ID NO: 2552
cuuggacaauggucaucua

SEQ ID NO: 198029 - RNA, 19 nt, Artificial Sequence
  Description of Artificial Sequence: Synthetic oligonucleotide
  Antisense strand to SEQ ID NO: 198028
uagaugaccauuguccaag

SEQ ID NO: 198030 - RNA, 19 nt, Artificial Sequence
  Description of Artificial Sequence: Synthetic oligonucleotide
  Sense strand starting at position 721 of SEQ ID NO: 2552
ggacaauggucaucuacca

SEQ ID NO: 198031 - RNA, 19 nt, Artificial Sequence
  Description of Artificial Sequence: Synthetic oligonucleotide
  Antisense strand to SEQ ID NO: 198030
ugguagaugaccauugucc

SEQ ID NO: 198032 - RNA, 19 nt, Artificial Sequence
  Description of Artificial Sequence: Synthetic oligonucleotide
  Sense strand starting at position 1114 of SEQ ID NO: 2552
auagcuucuuaagugggaa

SEQ ID NO: 198033 - RNA, 19 nt, Artificial Sequence
  Description of Artificial Sequence: Synthetic oligonucleotide
  Antisense strand to SEQ ID NO: 198032
uucccacuuaagaagcuau

SEQ ID NO: 198034 - RNA, 19 nt, Artificial Sequence
  Description of Artificial Sequence: Synthetic oligonucleotide
  Sense strand starting at position 1154 of SEQ ID NO: 2552
ggcauccuuccagaaaugu

SEQ ID NO: 198035 - RNA, 19 nt, Artificial Sequence
  Description of Artificial Sequence: Synthetic oligonucleotide
  Antisense strand to SEQ ID NO: 198034
acauuucuggaaggaugcc

SEQ ID NO: 198036 - RNA, 19 nt, Artificial Sequence
  Description of Artificial Sequence: Synthetic oligonucleotide
  Sense strand starting at position 1221 of SEQ ID NO: 2552
agagaagcauaauagauuu

SEQ ID NO: 198037 - RNA, 19 nt, Artificial Sequence
  Description of Artificial Sequence: Synthetic oligonucleotide
  Antisense strand to SEQ ID NO: 198036
aaaucuauuaugcuucucu

SEQ ID NO: 198038 - RNA, 19 nt, Artificial Sequence
  Description of Artificial Sequence: Synthetic oligonucleotide
  Sense strand starting at position 1307 of SEQ ID NO: 2552
caggauaucuaguugauau

SEQ ID NO: 198039 - RNA, 19 nt, Artificial Sequence
  Description of Artificial Sequence: Synthetic oligonucleotide
  Antisense strand to SEQ ID NO: 198038
auaucaacuagauauccug

SEQ ID NO: 198040 - RNA, 19 nt, Artificial Sequence
  Description of Artificial Sequence: Synthetic oligonucleotide
  Sense strand starting at position 1325 of SEQ ID NO: 2552
uuuccaugucaucacagau

SEQ ID NO: 198041 - RNA, 19 nt, Artificial Sequence
  Description of Artificial Sequence: Synthetic oligonucleotide
  Antisense strand to SEQ ID NO: 198040
aucugugaugacauggaaa

SEQ ID NO: 198042 - RNA, 19 nt, Artificial Sequence
  Description of Artificial Sequence: Synthetic oligonucleotide
  Sense strand starting at position 1359 of SEQ ID NO: 2552
guggcuugacaucauauag

SEQ ID NO: 198043 - RNA, 19 nt, Artificial Sequence
  Description of Artificial Sequence: Synthetic oligonucleotide
  Antisense strand to SEQ ID NO: 198042
cuauaugaugucaagccac

SEQ ID NO: 198044 - RNA, 19 nt, Artificial Sequence
  Description of Artificial Sequence: Synthetic oligonucleotide
  Sense strand starting at position 1443 of SEQ ID NO: 2552
gcacuucuaccugaugauu

SEQ ID NO: 198045 - RNA, 19 nt, Artificial Sequence
  Description of Artificial Sequence: Synthetic oligonucleotide
  Antisense strand to SEQ ID NO: 198044
aaucaucagguagaagugc

SEQ ID NO: 198046 - RNA, 19 nt, Artificial Sequence
  Description of Artificial Sequence: Synthetic oligonucleotide
  Sense strand starting at position 1467 of SEQ ID NO: 2552
ugaggcuugcccuaacaau

SEQ ID NO: 198047 - RNA, 19 nt, Artificial Sequence
  Description of Artificial Sequence: Synthetic oligonucleotide
  Antisense strand to SEQ ID NO: 198046
auuguuagggcaagccuca

SEQ ID NO: 198048 - RNA, 19 nt, Artificial Sequence
  Description of Artificial Sequence: Synthetic oligonucleotide
  Sense strand starting at position 1513 of SEQ ID NO: 2552
agagaaguuacugguuagu

SEQ ID NO: 198049 - RNA, 19 nt, Artificial Sequence
  Description of Artificial Sequence: Synthetic oligonucleotide
  Antisense strand to SEQ ID NO: 198048
acuaaccaguaacuucucu

SEQ ID NO: 198050 - RNA, 19 nt, Artificial Sequence
  Description of Artificial Sequence: Synthetic oligonucleotide
  Sense strand starting at position 1515 of SEQ ID NO: 2552
agaaguuacugguuaguau

SEQ ID NO: 198051 - RNA, 19 nt, Artificial Sequence
  Description of Artificial Sequence: Synthetic oligonucleotide
  Antisense strand to SEQ ID NO: 198050
auacuaaccaguaacuucu

SEQ ID NO: 198052 - RNA, 19 nt, Artificial Sequence
  Description of Artificial Sequence: Synthetic oligonucleotide
  Sense strand starting at position 1516 of SEQ ID NO: 2552
gaaguuacugguuaguauu

SEQ ID NO: 198053 - RNA, 19 nt, Artificial Sequence
  Description of Artificial Sequence: Synthetic oligonucleotide
  Antisense strand to SEQ ID NO: 198052
aauacuaaccaguaacuuc

SEQ ID NO: 198054 - RNA, 19 nt, Artificial Sequence
  Description of Artificial Sequence: Synthetic oligonucleotide
  Sense strand starting at position 1682 of SEQ ID NO: 2552
aucagaguuuacuuuagau

SEQ ID NO: 198055 - RNA, 19 nt, Artificial Sequence
  Description of Artificial Sequence: Synthetic oligonucleotide
  Antisense strand to SEQ ID NO: 198054
aucuaaaguaaacucugau

SEQ ID NO: 198056 - RNA, 19 nt, Artificial Sequence
  Description of Artificial Sequence: Synthetic oligonucleotide
  Sense strand starting at position 1720 of SEQ ID NO: 2552
cauuccaagugguugaaau

SEQ ID NO: 198057 - RNA, 19 nt, Artificial Sequence
  Description of Artificial Sequence: Synthetic oligonucleotide
  Antisense strand to SEQ ID NO: 198056
auuucaaccacuuggaaug

SEQ ID NO: 198058 - RNA, 19 nt, Artificial Sequence
  Description of Artificial Sequence: Synthetic oligonucleotide
  Sense strand starting at position 1721 of SEQ ID NO: 2552
auuccaagugguugaaaug

SEQ ID NO: 198059 - RNA, 19 nt, Artificial Sequence
  Description of Artificial Sequence: Synthetic oligonucleotide
  Antisense strand to SEQ ID NO: 198058
cauuucaaccacuuggaau

SEQ ID NO: 198060 - RNA, 19 nt, Artificial Sequence
  Description of Artificial Sequence: Synthetic oligonucleotide
  Sense strand starting at position 1872 of SEQ ID NO: 2552
ucaguauugcaaugaaauu

SEQ ID NO: 198061 - RNA, 19 nt, Artificial Sequence
  Description of Artificial Sequence: Synthetic oligonucleotide
  Antisense strand to SEQ ID NO: 198060
aauuucauugcaauacuga

SEQ ID NO: 198062 - RNA, 19 nt, Artificial Sequence
  Description of Artificial Sequence: Synthetic oligonucleotide
  Sense strand starting at position 1938 of SEQ ID NO: 2552
gccugaguugugagguuug

SEQ ID NO: 198063 - RNA, 19 nt, Artificial Sequence
  Description of Artificial Sequence: Synthetic oligonucleotide
  Antisense strand to SEQ ID NO: 198062
caaaccucacaacucaggc

SEQ ID NO: 198064 - RNA, 19 nt, Artificial Sequence
  Description of Artificial Sequence: Synthetic oligonucleotide
  Sense strand starting at position 1973 of SEQ ID NO: 2552
ggccaaaguuuguuuauuu

SEQ ID NO: 198065 - RNA, 19 nt, Artificial Sequence
  Description of Artificial Sequence: Synthetic oligonucleotide
  Antisense strand to SEQ ID NO: 198064
aaauaaacaaacuuuggcc

SEQ ID NO: 198066 - RNA, 19 nt, Artificial Sequence
  Description of Artificial Sequence: Synthetic oligonucleotide
  Sense strand starting at position 2150 of SEQ ID NO: 2552
uucgucaucagucauggga

SEQ ID NO: 198067 - RNA, 19 nt, Artificial Sequence
  Description of Artificial Sequence: Synthetic oligonucleotide
  Antisense strand to SEQ ID NO: 198066
ucccaugacugaugacgaa

SEQ ID NO: 198068 - RNA, 19 nt, Artificial Sequence
  Description of Artificial Sequence: Synthetic oligonucleotide
  Sense strand starting at position 2153 of SEQ ID NO: 2552
gucaucagucaugggacaa

SEQ ID NO: 198069 - RNA, 19 nt, Artificial Sequence
  Description of Artificial Sequence: Synthetic oligonucleotide
  Antisense strand to SEQ ID NO: 198068
uugucccaugacugaugac

SEQ ID NO: 198070 - RNA, 19 nt, Artificial Sequence
  Description of Artificial Sequence: Synthetic oligonucleotide
  Sense strand starting at position 2231 of SEQ ID NO: 2552
ggucuauggcaauaguuac

SEQ ID NO: 198071 - RNA, 19 nt, Artificial Sequence
  Description of Artificial Sequence: Synthetic oligonucleotide
  Antisense strand to SEQ ID NO: 198070
guaacuauugccauagacc

SEQ ID NO: 198072 - RNA, 19 nt, Artificial Sequence
  Description of Artificial Sequence: Synthetic oligonucleotide
  Sense strand starting at position 2331 of SEQ ID NO: 2552
aguuuaaggcuuugaaauc

SEQ ID NO: 198073 - RNA, 19 nt, Artificial Sequence
  Description of Artificial Sequence: Synthetic oligonucleotide
  Antisense strand to SEQ ID NO: 198072
gauuucaaagccuuaaacu

SEQ ID NO: 198074 - RNA, 19 nt, Artificial Sequence
  Description of Artificial Sequence: Synthetic oligonucleotide
  Sense strand starting at position 2338 of SEQ ID NO: 2552
ggcuuugaaaucugugaaa

SEQ ID NO: 198075 - RNA, 19 nt, Artificial Sequence
  Description of Artificial Sequence: Synthetic oligonucleotide
  Antisense strand to SEQ ID NO: 198074
uuucacagauuucaaagcc

SEQ ID NO: 198076 - RNA, 19 nt, Artificial Sequence
  Description of Artificial Sequence: Synthetic oligonucleotide
  Sense strand starting at position 2340 of SEQ ID NO: 2552
cuuugaaaucugugaaagu

SEQ ID NO: 198077 - RNA, 19 nt, Artificial Sequence
  Description of Artificial Sequence: Synthetic oligonucleotide
  Antisense strand to SEQ ID NO: 198076
acuuucacagauuucaaag

SEQ ID NO: 198078 - RNA, 19 nt, Artificial Sequence
  Description of Artificial Sequence: Synthetic oligonucleotide
  Sense strand starting at position 2747 of SEQ ID NO: 2552
ggauauaccucaguucuua

SEQ ID NO: 198079 - RNA, 19 nt, Artificial Sequence
  Description of Artificial Sequence: Synthetic oligonucleotide
  Antisense strand to SEQ ID NO: 198078
uaagaacugagguauaucc

SEQ ID NO: 198080 - RNA, 19 nt, Artificial Sequence
  Description of Artificial Sequence: Synthetic oligonucleotide
  Sense strand starting at position 3472 of SEQ ID NO: 2552
uauugagacuugccagaag

SEQ ID NO: 198081 - RNA, 19 nt, Artificial Sequence
  Description of Artificial Sequence: Synthetic oligonucleotide
  Antisense strand to SEQ ID NO: 198080
cuucuggcaagucucaaua

SEQ ID NO: 198082 - RNA, 19 nt, Artificial Sequence
  Description of Artificial Sequence: Synthetic oligonucleotide
  Sense strand starting at position 3720 of SEQ ID NO: 2552
augauagaacuuggugauu

SEQ ID NO: 198083 - RNA, 19 nt, Artificial Sequence
  Description of Artificial Sequence: Synthetic oligonucleotide
  Antisense strand to SEQ ID NO: 198082
aaucaccaaguucuaucau

SEQ ID NO: 198084 - RNA, 19 nt, Artificial Sequence
  Description of Artificial Sequence: Synthetic oligonucleotide
  Sense strand starting at position 3818 of SEQ ID NO: 2552
gccauuuauugagauagga

SEQ ID NO: 198085 - RNA, 19 nt, Artificial Sequence
  Description of Artificial Sequence: Synthetic oligonucleotide
  Antisense strand to SEQ ID NO: 198084
uccuaucucaauaaauggc

SEQ ID NO: 198086 - RNA, 19 nt, Artificial Sequence
  Description of Artificial Sequence: Synthetic oligonucleotide
  Sense strand starting at position 3833 of SEQ ID NO: 2552
aggaaaguguggagggaua

SEQ ID NO: 198087 - RNA, 19 nt, Artificial Sequence
  Description of Artificial Sequence: Synthetic oligonucleotide
  Antisense strand to SEQ ID NO: 198086
uaucccuccacacuuuccu

SEQ ID NO: 198088 - RNA, 19 nt, Artificial Sequence
  Description of Artificial Sequence: Synthetic oligonucleotide
  Sense strand starting at position 3856 of SEQ ID NO: 2552
gguucuagggagcagauua

SEQ ID NO: 198089 - RNA, 19 nt, Artificial Sequence
  Description of Artificial Sequence: Synthetic oligonucleotide
  Antisense strand to SEQ ID NO: 198088
uaaucugcucccuagaacc

SEQ ID NO: 198090 - RNA, 19 nt, Artificial Sequence
  Description of Artificial Sequence: Synthetic oligonucleotide
  Sense strand starting at position 3967 of SEQ ID NO: 2552
ggaagauucuggccuagaa

SEQ ID NO: 198091 - RNA, 19 nt, Artificial Sequence
  Description of Artificial Sequence: Synthetic oligonucleotide
  Antisense strand to SEQ ID NO: 198090
uucuaggccagaaucuucc

SEQ ID NO: 198092 - RNA, 19 nt, Artificial Sequence
  Description of Artificial Sequence: Synthetic oligonucleotide
  Sense strand starting at position 165 of SEQ ID NO: 2555
ggcagagacuccucugucu

SEQ ID NO: 198093 - RNA, 19 nt, Artificial Sequence
  Description of Artificial Sequence: Synthetic oligonucleotide
  Antisense strand to SEQ ID NO: 198092
agacagaggagucucugcc

SEQ ID NO: 198094 - RNA, 19 nt, Artificial Sequence
  Description of Artificial Sequence: Synthetic oligonucleotide
  Sense strand starting at position 167 of SEQ ID NO: 2555
cagagacuccucugucugu

SEQ ID NO: 198095 - RNA, 19 nt, Artificial Sequence
  Description of Artificial Sequence: Synthetic oligonucleotide
  Antisense strand to SEQ ID NO: 198094
acagacagaggagucucug

SEQ ID NO: 198096 - RNA, 19 nt, Artificial Sequence
  Description of Artificial Sequence: Synthetic oligonucleotide
  Sense strand starting at position 316 of SEQ ID NO: 2555
uuccuuugagaagguaauu

SEQ ID NO: 198097 - RNA, 19 nt, Artificial Sequence
  Description of Artificial Sequence: Synthetic oligonucleotide
  Antisense strand to SEQ ID NO: 198096
aauuaccuucucaaaggaa

SEQ ID NO: 198098 - RNA, 19 nt, Artificial Sequence
  Description of Artificial Sequence: Synthetic oligonucleotide
  Sense strand starting at position 325 of SEQ ID NO: 2555
gaagguaauuccguggcuu

SEQ ID NO: 198099 - RNA, 19 nt, Artificial Sequence
  Description of Artificial Sequence: Synthetic oligonucleotide
  Antisense strand to SEQ ID NO: 198098
aagccacggaauuaccuuc

SEQ ID NO: 198100 - RNA, 19 nt, Artificial Sequence
  Description of Artificial Sequence: Synthetic oligonucleotide
  Sense strand starting at position 352 of SEQ ID NO: 2555
cuuucuuaaccugaaagug

SEQ ID NO: 198101 - RNA, 19 nt, Artificial Sequence
  Description of Artificial Sequence: Synthetic oligonucleotide
  Antisense strand to SEQ ID NO: 198100
cacuuucagguuaagaaag

SEQ ID NO: 198102 - RNA, 19 nt, Artificial Sequence
  Description of Artificial Sequence: Synthetic oligonucleotide
  Sense strand starting at position 375 of SEQ ID NO: 2555
gguguuugauuucauggag

SEQ ID NO: 198103 - RNA, 19 nt, Artificial Sequence
  Description of Artificial Sequence: Synthetic oligonucleotide
  Antisense strand to SEQ ID NO: 198102
cuccaugaaaucaaacacc

SEQ ID NO: 198104 - RNA, 19 nt, Artificial Sequence
  Description of Artificial Sequence: Synthetic oligonucleotide
  Sense strand starting at position 426 of SEQ ID NO: 2555
acagaaacgccuugagaca

SEQ ID NO: 198105 - RNA, 19 nt, Artificial Sequence
  Description of Artificial Sequence: Synthetic oligonucleotide
  Antisense strand to SEQ ID NO: 198104
ugucucaaggcguuucugu

SEQ ID NO: 198106 - RNA, 19 nt, Artificial Sequence
  Description of Artificial Sequence: Synthetic oligonucleotide
  Sense strand starting at position 495 of SEQ ID NO: 2555
gcaggaaagucacagcagu

SEQ ID NO: 198107 - RNA, 19 nt, Artificial Sequence
  Description of Artificial Sequence: Synthetic oligonucleotide
  Antisense strand to SEQ ID NO: 198106
acugcugugacuuuccugc

SEQ ID NO: 198108 - RNA, 19 nt, Artificial Sequence
  Description of Artificial Sequence: Synthetic oligonucleotide
  Sense strand starting at position 501 of SEQ ID NO: 2555
aagucacagcagugugaua

SEQ ID NO: 198109 - RNA, 19 nt, Artificial Sequence
  Description of Artificial Sequence: Synthetic oligonucleotide
  Antisense strand to SEQ ID NO: 198108
uaucacacugcugugacuu

SEQ ID NO: 198110 - RNA, 19 nt, Artificial Sequence
  Description of Artificial Sequence: Synthetic oligonucleotide
  Sense strand starting at position 503 of SEQ ID NO: 2555
gucacagcagugugauaca

SEQ ID NO: 198111 - RNA, 19 nt, Artificial Sequence
  Description of Artificial Sequence: Synthetic oligonucleotide
  Antisense strand to SEQ ID NO: 198110
uguaucacacugcugugac

SEQ ID NO: 198112 - RNA, 19 nt, Artificial Sequence
  Description of Artificial Sequence: Synthetic oligonucleotide
  Sense strand starting at position 506 of SEQ ID NO: 2555
acagcagugugauacaaag

SEQ ID NO: 198113 - RNA, 19 nt, Artificial Sequence
  Description of Artificial Sequence: Synthetic oligonucleotide
  Antisense strand to SEQ ID NO: 198112
cuuuguaucacacugcugu

SEQ ID NO: 198114 - RNA, 19 nt, Artificial Sequence
  Description of Artificial Sequence: Synthetic oligonucleotide
  Sense strand starting at position 512 of SEQ ID NO: 2555
gugugauacaaaggagugu

SEQ ID NO: 198115 - RNA, 19 nt, Artificial Sequence
  Description of Artificial Sequence: Synthetic oligonucleotide
  Antisense strand to SEQ ID NO: 198114
acacuccuuuguaucacac

SEQ ID NO: 198116 - RNA, 19 nt, Artificial Sequence
  Description of Artificial Sequence: Synthetic oligonucleotide
  Sense strand starting at position 521 of SEQ ID NO: 2555
aaaggaguguauggugaua

SEQ ID NO: 198117 - RNA, 19 nt, Artificial Sequence
  Description of Artificial Sequence: Synthetic oligonucleotide
  Antisense strand to SEQ ID NO: 198116
uaucaccauacacuccuuu

SEQ ID NO: 198118 - RNA, 19 nt, Artificial Sequence
  Description of Artificial Sequence: Synthetic oligonucleotide
  Sense strand starting at position 523 of SEQ ID NO: 2555
aggaguguauggugauaaa

SEQ ID NO: 198119 - RNA, 19 nt, Artificial Sequence
  Description of Artificial Sequence: Synthetic oligonucleotide
  Antisense strand to SEQ ID NO: 198118
uuuaucaccauacacuccu

SEQ ID NO: 198120 - RNA, 19 nt, Artificial Sequence
  Description of Artificial Sequence: Synthetic oligonucleotide
  Sense strand starting at position 594 of SEQ ID NO: 2555
gcaauagcguucucaguag

SEQ ID NO: 198121 - RNA, 19 nt, Artificial Sequence
  Description of Artificial Sequence: Synthetic oligonucleotide
  Antisense strand to SEQ ID NO: 198120
cuacugagaacgcuauugc

SEQ ID NO: 198122 - RNA, 19 nt, Artificial Sequence
  Description of Artificial Sequence: Synthetic oligonucleotide
  Sense strand starting at position 711 of SEQ ID NO: 2555
aauagaaucugcggugaga

SEQ ID NO: 198123 - RNA, 19 nt, Artificial Sequence
  Description of Artificial Sequence: Synthetic oligonucleotide
  Antisense strand to SEQ ID NO: 198122
ucucaccgcagauucuauu

SEQ ID NO: 198124 - RNA, 19 nt, Artificial Sequence
  Description of Artificial Sequence: Synthetic oligonucleotide
  Sense strand starting at position 853 of SEQ ID NO: 2555
ugggccucacagcgauauu

SEQ ID NO: 198125 - RNA, 19 nt, Artificial Sequence
  Description of Artificial Sequence: Synthetic oligonucleotide
  Antisense strand to SEQ ID NO: 198124
aauaucgcugugaggccca

SEQ ID NO: 198126 - RNA, 19 nt, Artificial Sequence
  Description of Artificial Sequence: Synthetic oligonucleotide
  Sense strand starting at position 1016 of SEQ ID NO: 2555
cguccaucgcgccagagaa

SEQ ID NO: 198127 - RNA, 19 nt, Artificial Sequence
  Description of Artificial Sequence: Synthetic oligonucleotide
  Antisense strand to SEQ ID NO: 198126
uucucuggcgcgauggacg

SEQ ID NO: 198128 - RNA, 19 nt, Artificial Sequence
  Description of Artificial Sequence: Synthetic oligonucleotide
  Sense strand starting at position 1445 of SEQ ID NO: 2555
cggcuuugucuguucguau

SEQ ID NO: 198129 - RNA, 19 nt, Artificial Sequence
  Description of Artificial Sequence: Synthetic oligonucleotide
  Antisense strand to SEQ ID NO: 198128
auacgaacagacaaagccg

SEQ ID NO: 198130 - RNA, 19 nt, Artificial Sequence
  Description of Artificial Sequence: Synthetic oligonucleotide
  Sense strand starting at position 1446 of SEQ ID NO: 2555
ggcuuugucuguucguauc

SEQ ID NO: 198131 - RNA, 19 nt, Artificial Sequence
  Description of Artificial Sequence: Synthetic oligonucleotide
  Antisense strand to SEQ ID NO: 198130
gauacgaacagacaaagcc

SEQ ID NO: 198132 - RNA, 19 nt, Artificial Sequence
  Description of Artificial Sequence: Synthetic oligonucleotide
  Sense strand starting at position 1689 of SEQ ID NO: 2555
acgagucuuacccaggguu

SEQ ID NO: 198133 - RNA, 19 nt, Artificial Sequence
  Description of Artificial Sequence: Synthetic oligonucleotide
  Antisense strand to SEQ ID NO: 198132
aacccuggguaagacucgu

SEQ ID NO: 198134 - RNA, 19 nt, Artificial Sequence
  Description of Artificial Sequence: Synthetic oligonucleotide
  Sense strand starting at position 2226 of SEQ ID NO: 2555
ccggucaccuugucugaga

SEQ ID NO: 198135 - RNA, 19 nt, Artificial Sequence
  Description of Artificial Sequence: Synthetic oligonucleotide
  Antisense strand to SEQ ID NO: 198134
ucucagacaaggugaccgg

SEQ ID NO: 198136 - RNA, 19 nt, Artificial Sequence
  Description of Artificial Sequence: Synthetic oligonucleotide
  Sense strand starting at position 2227 of SEQ ID NO: 2555
cggucaccuugucugagaa

SEQ ID NO: 198137 - RNA, 19 nt, Artificial Sequence
  Description of Artificial Sequence: Synthetic oligonucleotide
  Antisense strand to SEQ ID NO: 198136
uucucagacaaggugaccg

SEQ ID NO: 198138 - RNA, 19 nt, Artificial Sequence
  Description of Artificial Sequence: Synthetic oligonucleotide
  Sense strand starting at position 2228 of SEQ ID NO: 2555
ggucaccuugucugagaac

SEQ ID NO: 198139 - RNA, 19 nt, Artificial Sequence
  Description of Artificial Sequence: Synthetic oligonucleotide
  Antisense strand to SEQ ID NO: 198138
guucucagacaaggugacc

SEQ ID NO: 198140 - RNA, 19 nt, Artificial Sequence
  Description of Artificial Sequence: Synthetic oligonucleotide
  Sense strand starting at position 2274 of SEQ ID NO: 2555
acugguuugguuugucauu

SEQ ID NO: 198141 - RNA, 19 nt, Artificial Sequence
  Description of Artificial Sequence: Synthetic oligonucleotide
  Antisense strand to SEQ ID NO: 198140
aaugacaaaccaaaccagu

SEQ ID NO: 198142 - RNA, 19 nt, Artificial Sequence
  Description of Artificial Sequence: Synthetic oligonucleotide
  Sense strand starting at position 2402 of SEQ ID NO: 2555
cuuucuaugcagcgacuaa

SEQ ID NO: 198143 - RNA, 19 nt, Artificial Sequence
  Description of Artificial Sequence: Synthetic oligonucleotide
  Antisense strand to SEQ ID NO: 198142
uuagucgcugcauagaaag

SEQ ID NO: 198144 - RNA, 19 nt, Artificial Sequence
  Description of Artificial Sequence: Synthetic oligonucleotide
  Sense strand starting at position 2456 of SEQ ID NO: 2555
gcugguagucuugaccuuu

SEQ ID NO: 198145 - RNA, 19 nt, Artificial Sequence
  Description of Artificial Sequence: Synthetic oligonucleotide
  Antisense strand to SEQ ID NO: 198144
aaaggucaagacuaccagc

SEQ ID NO: 198146 - RNA, 19 nt, Artificial Sequence
  Description of Artificial Sequence: Synthetic oligonucleotide
  Sense strand starting at position 2492 of SEQ ID NO: 2555
gugggaguucccugucuuu

SEQ ID NO: 198147 - RNA, 19 nt, Artificial Sequence
  Description of Artificial Sequence: Synthetic oligonucleotide
  Antisense strand to SEQ ID NO: 198146
aaagacagggaacucccac

SEQ ID NO: 198148 - RNA, 19 nt, Artificial Sequence
  Description of Artificial Sequence: Synthetic oligonucleotide
  Sense strand starting at position 2686 of SEQ ID NO: 2555
ucauguaauugugaggaua

SEQ ID NO: 198149 - RNA, 19 nt, Artificial Sequence
  Description of Artificial Sequence: Synthetic oligonucleotide
  Antisense strand to SEQ ID NO: 198148
uauccucacaauuacauga

SEQ ID NO: 198150 - RNA, 19 nt, Artificial Sequence
  Description of Artificial Sequence: Synthetic oligonucleotide
  Sense strand starting at position 2688 of SEQ ID NO: 2555
auguaauugugaggauaau

SEQ ID NO: 198151 - RNA, 19 nt, Artificial Sequence
  Description of Artificial Sequence: Synthetic oligonucleotide
  Antisense strand to SEQ ID NO: 198150
auuauccucacaauuacau

SEQ ID NO: 198152 - RNA, 19 nt, Artificial Sequence
  Description of Artificial Sequence: Synthetic oligonucleotide
  Sense strand starting at position 2716 of SEQ ID NO: 2555
agcuucuuccagugaguga

SEQ ID NO: 198153 - RNA, 19 nt, Artificial Sequence
  Description of Artificial Sequence: Synthetic oligonucleotide
  Antisense strand to SEQ ID NO: 198152
ucacucacuggaagaagcu

SEQ ID NO: 198154 - RNA, 19 nt, Artificial Sequence
  Description of Artificial Sequence: Synthetic oligonucleotide
  Sense strand starting at position 2720 of SEQ ID NO: 2555
ucuuccagugagugacaau

SEQ ID NO: 198155 - RNA, 19 nt, Artificial Sequence
  Description of Artificial Sequence: Synthetic oligonucleotide
  Antisense strand to SEQ ID NO: 198154
auugucacucacuggaaga

SEQ ID NO: 198156 - RNA, 19 nt, Artificial Sequence
  Description of Artificial Sequence: Synthetic oligonucleotide
  Sense strand starting at position 2727 of SEQ ID NO: 2555
gugagugacaauugcucau

SEQ ID NO: 198157 - RNA, 19 nt, Artificial Sequence
  Description of Artificial Sequence: Synthetic oligonucleotide
  Antisense strand to SEQ ID NO: 198156
augagcaauugucacucac

SEQ ID NO: 198158 - RNA, 19 nt, Artificial Sequence
  Description of Artificial Sequence: Synthetic oligonucleotide
  Sense strand starting at position 3018 of SEQ ID NO: 2555
gacuuacacgccuguaauc

SEQ ID NO: 198159 - RNA, 19 nt, Artificial Sequence
  Description of Artificial Sequence: Synthetic oligonucleotide
  Antisense strand to SEQ ID NO: 198158
gauuacaggcguguaaguc

SEQ ID NO: 198160 - RNA, 19 nt, Artificial Sequence
  Description of Artificial Sequence: Synthetic oligonucleotide
  Sense strand starting at position 3336 of SEQ ID NO: 2555
uuagauuucucaucugugu

SEQ ID NO: 198161 - RNA, 19 nt, Artificial Sequence
  Description of Artificial Sequence: Synthetic oligonucleotide
  Antisense strand to SEQ ID NO: 198160
acacagaugagaaaucuaa

SEQ ID NO: 198162 - RNA, 19 nt, Artificial Sequence
  Description of Artificial Sequence: Synthetic oligonucleotide
  Sense strand starting at position 3388 of SEQ ID NO: 2555
ggaacuagcuuucugguca

SEQ ID NO: 198163 - RNA, 19 nt, Artificial Sequence
  Description of Artificial Sequence: Synthetic oligonucleotide
  Antisense strand to SEQ ID NO: 198162
ugaccagaaagcuaguucc

SEQ ID NO: 198164 - RNA, 19 nt, Artificial Sequence
  Description of Artificial Sequence: Synthetic oligonucleotide
  Sense strand starting at position 3453 of SEQ ID NO: 2555
gcuuucuuggcaggccaaa

SEQ ID NO: 198165 - RNA, 19 nt, Artificial Sequence
  Description of Artificial Sequence: Synthetic oligonucleotide
  Antisense strand to SEQ ID NO: 198164
uuuggccugccaagaaagc

SEQ ID NO: 198166 - RNA, 19 nt, Artificial Sequence
  Description of Artificial Sequence: Synthetic oligonucleotide
  Sense strand starting at position 3474 of SEQ ID NO: 2555
guugacugugggcacaaau

SEQ ID NO: 198167 - RNA, 19 nt, Artificial Sequence
  Description of Artificial Sequence: Synthetic oligonucleotide
  Antisense strand to SEQ ID NO: 198166
auuugugcccacagucaac

SEQ ID NO: 198168 - RNA, 19 nt, Artificial Sequence
  Description of Artificial Sequence: Synthetic oligonucleotide
  Sense strand starting at position 3485 of SEQ ID NO: 2555
gcacaaaugagucggccau

SEQ ID NO: 198169 - RNA, 19 nt, Artificial Sequence
  Description of Artificial Sequence: Synthetic oligonucleotide
  Antisense strand to SEQ ID NO: 198168
auggccgacucauuugugc

SEQ ID NO: 198170 - RNA, 19 nt, Artificial Sequence
  Description of Artificial Sequence: Synthetic oligonucleotide
  Sense strand starting at position 3626 of SEQ ID NO: 2555
gugaacaguugguuucuuu

SEQ ID NO: 198171 - RNA, 19 nt, Artificial Sequence
  Description of Artificial Sequence: Synthetic oligonucleotide
  Antisense strand to SEQ ID NO: 198170
aaagaaaccaacuguucac

SEQ ID NO: 198172 - RNA, 19 nt, Artificial Sequence
  Description of Artificial Sequence: Synthetic oligonucleotide
  Sense strand starting at position 312 of SEQ ID NO: 2553
ggcagagacuccucugucu

SEQ ID NO: 198173 - RNA, 19 nt, Artificial Sequence
  Description of Artificial Sequence: Synthetic oligonucleotide
  Antisense strand to SEQ ID NO: 198172
agacagaggagucucugcc

SEQ ID NO: 198174 - RNA, 19 nt, Artificial Sequence
  Description of Artificial Sequence: Synthetic oligonucleotide
  Sense strand starting at position 314 of SEQ ID NO: 2553
cagagacuccucugucugu

SEQ ID NO: 198175 - RNA, 19 nt, Artificial Sequence
  Description of Artificial Sequence: Synthetic oligonucleotide
  Antisense strand to SEQ ID NO: 198174
acagacagaggagucucug

SEQ ID NO: 198176 - RNA, 19 nt, Artificial Sequence
  Description of Artificial Sequence: Synthetic oligonucleotide
  Sense strand starting at position 463 of SEQ ID NO: 2553
uuccuuugagaagguaauu

SEQ ID NO: 198177 - RNA, 19 nt, Artificial Sequence
  Description of Artificial Sequence: Synthetic oligonucleotide
  Antisense strand to SEQ ID NO: 198176
aauuaccuucucaaaggaa

SEQ ID NO: 198178 - RNA, 19 nt, Artificial Sequence
  Description of Artificial Sequence: Synthetic oligonucleotide
  Sense strand starting at position 472 of SEQ ID NO: 2553
gaagguaauuccguggcuu

SEQ ID NO: 198179 - RNA, 19 nt, Artificial Sequence
  Description of Artificial Sequence: Synthetic oligonucleotide
  Antisense strand to SEQ ID NO: 198178
aagccacggaauuaccuuc

SEQ ID NO: 198180 - RNA, 19 nt, Artificial Sequence
  Description of Artificial Sequence: Synthetic oligonucleotide
  Sense strand starting at position 499 of SEQ ID NO: 2553
cuuucuuaaccugaaagug

SEQ ID NO: 198181 - RNA, 19 nt, Artificial Sequence
  Description of Artificial Sequence: Synthetic oligonucleotide
  Antisense strand to SEQ ID NO: 198180
cacuuucagguuaagaaag

SEQ ID NO: 198182 - RNA, 19 nt, Artificial Sequence
  Description of Artificial Sequence: Synthetic oligonucleotide
  Sense strand starting at position 522 of SEQ ID NO: 2553
gguguuugauuucauggag

SEQ ID NO: 198183 - RNA, 19 nt, Artificial Sequence
  Description of Artificial Sequence: Synthetic oligonucleotide
  Antisense strand to SEQ ID NO: 198182
cuccaugaaaucaaacacc

SEQ ID NO: 198184 - RNA, 19 nt, Artificial Sequence
  Description of Artificial Sequence: Synthetic oligonucleotide
  Sense strand starting at position 573 of SEQ ID NO: 2553
acagaaacgccuugagaca

SEQ ID NO: 198185 - RNA, 19 nt, Artificial Sequence
  Description of Artificial Sequence: Synthetic oligonucleotide
  Antisense strand to SEQ ID NO: 198184
ugucucaaggcguuucugu

SEQ ID NO: 198186 - RNA, 19 nt, Artificial Sequence
  Description of Artificial Sequence: Synthetic oligonucleotide
  Sense strand starting at position 642 of SEQ ID NO: 2553
gcaggaaagucacagcagu

SEQ ID NO: 198187 - RNA, 19 nt, Artificial Sequence
  Description of Artificial Sequence: Synthetic oligonucleotide
  Antisense strand to SEQ ID NO: 198186
acugcugugacuuuccugc

SEQ ID NO: 198188 - RNA, 19 nt, Artificial Sequence
  Description of Artificial Sequence: Synthetic oligonucleotide
  Sense strand starting at position 648 of SEQ ID NO: 2553
aagucacagcagugugaua

SEQ ID NO: 198189 - RNA, 19 nt, Artificial Sequence
  Description of Artificial Sequence: Synthetic oligonucleotide
  Antisense strand to SEQ ID NO: 198188
uaucacacugcugugacuu

SEQ ID NO: 198190 - RNA, 19 nt, Artificial Sequence
  Description of Artificial Sequence: Synthetic oligonucleotide
  Sense strand starting at position 650 of SEQ ID NO: 2553
gucacagcagugugauaca

SEQ ID NO: 198191 - RNA, 19 nt, Artificial Sequence
  Description of Artificial Sequence: Synthetic oligonucleotide
  Antisense strand to SEQ ID NO: 198190
uguaucacacugcugugac

SEQ ID NO: 198192 - RNA, 19 nt, Artificial Sequence
  Description of Artificial Sequence: Synthetic oligonucleotide
  Sense strand starting at position 653 of SEQ ID NO: 2553
acagcagugugauacaaag

SEQ ID NO: 198193 - RNA, 19 nt, Artificial Sequence
  Description of Artificial Sequence: Synthetic oligonucleotide
  Antisense strand to SEQ ID NO: 198192
cuuuguaucacacugcugu

SEQ ID NO: 198194 - RNA, 19 nt, Artificial Sequence
  Description of Artificial Sequence: Synthetic oligonucleotide
  Sense strand starting at position 659 of SEQ ID NO: 2553
gugugauacaaaggagugu

SEQ ID NO: 198195 - RNA, 19 nt, Artificial Sequence
  Description of Artificial Sequence: Synthetic oligonucleotide
  Antisense strand to SEQ ID NO: 198194
acacuccuuuguaucacac

SEQ ID NO: 198196 - RNA, 19 nt, Artificial Sequence
  Description of Artificial Sequence: Synthetic oligonucleotide
  Sense strand starting at position 668 of SEQ ID NO: 2553
aaaggaguguauggugaua

SEQ ID NO: 198197 - RNA, 19 nt, Artificial Sequence
  Description of Artificial Sequence: Synthetic oligonucleotide
  Antisense strand to SEQ ID NO: 198196
uaucaccauacacuccuuu

SEQ ID NO: 198198 - RNA, 19 nt, Artificial Sequence
  Description of Artificial Sequence: Synthetic oligonucleotide
  Sense strand starting at position 670 of SEQ ID NO: 2553
aggaguguauggugauaaa

SEQ ID NO: 198199 - RNA, 19 nt, Artificial Sequence
  Description of Artificial Sequence: Synthetic oligonucleotide
  Antisense strand to SEQ ID NO: 198198
uuuaucaccauacacuccu

SEQ ID NO: 198200 - RNA, 19 nt, Artificial Sequence
  Description of Artificial Sequence: Synthetic oligonucleotide
  Sense strand starting at position 741 of SEQ ID NO: 2553
gcaauagcguucucaguag

SEQ ID NO: 198201 - RNA, 19 nt, Artificial Sequence
  Description of Artificial Sequence: Synthetic oligonucleotide
  Antisense strand to SEQ ID NO: 198200
cuacugagaacgcuauugc

SEQ ID NO: 198202 - RNA, 19 nt, Artificial Sequence
  Description of Artificial Sequence: Synthetic oligonucleotide
  Sense strand starting at position 858 of SEQ ID NO: 2553
aauagaaucugcggugaga

SEQ ID NO: 198203 - RNA, 19 nt, Artificial Sequence
  Description of Artificial Sequence: Synthetic oligonucleotide
  Antisense strand to SEQ ID NO: 198202
ucucaccgcagauucuauu

SEQ ID NO: 198204 - RNA, 19 nt, Artificial Sequence
  Description of Artificial Sequence: Synthetic oligonucleotide
  Sense strand starting at position 1000 of SEQ ID NO: 2553
ugggccucacagcgauauu

SEQ ID NO: 198205 - RNA, 19 nt, Artificial Sequence
  Description of Artificial Sequence: Synthetic oligonucleotide
  Antisense strand to SEQ ID NO: 198204
aauaucgcugugaggccca

SEQ ID NO: 198206 - RNA, 19 nt, Artificial Sequence
  Description of Artificial Sequence: Synthetic oligonucleotide
  Sense strand starting at position 1163 of SEQ ID NO: 2553
cguccaucgcgccagagaa

SEQ ID NO: 198207 - RNA, 19 nt, Artificial Sequence
  Description of Artificial Sequence: Synthetic oligonucleotide
  Antisense strand to SEQ ID NO: 198206
uucucuggcgcgauggacg

SEQ ID NO: 198208 - RNA, 19 nt, Artificial Sequence
  Description of Artificial Sequence: Synthetic oligonucleotide
  Sense strand starting at position 1592 of SEQ ID NO: 2553
cggcuuugucuguucguau

SEQ ID NO: 198209 - RNA, 19 nt, Artificial Sequence
  Description of Artificial Sequence: Synthetic oligonucleotide
  Antisense strand to SEQ ID NO: 198208
auacgaacagacaaagccg

SEQ ID NO: 198210 - RNA, 19 nt, Artificial Sequence
  Description of Artificial Sequence: Synthetic oligonucleotide
  Sense strand starting at position 1593 of SEQ ID NO: 2553
ggcuuugucuguucguauc

SEQ ID NO: 198211 - RNA, 19 nt, Artificial Sequence
  Description of Artificial Sequence: Synthetic oligonucleotide
  Antisense strand to SEQ ID NO: 198210
gauacgaacagacaaagcc

SEQ ID NO: 198212 - RNA, 19 nt, Artificial Sequence
  Description of Artificial Sequence: Synthetic oligonucleotide
  Sense strand starting at position 1836 of SEQ ID NO: 2553
acgagucuuacccaggguu

SEQ ID NO: 198213 - RNA, 19 nt, Artificial Sequence
  Description of Artificial Sequence: Synthetic oligonucleotide
  Antisense strand to SEQ ID NO: 198212
aacccuggguaagacucgu

SEQ ID NO: 198214 - RNA, 19 nt, Artificial Sequence
  Description of Artificial Sequence: Synthetic oligonucleotide
  Sense strand starting at position 2373 of SEQ ID NO: 2553
ccggucaccuugucugaga

SEQ ID NO: 198215 - RNA, 19 nt, Artificial Sequence
  Description of Artificial Sequence: Synthetic oligonucleotide
  Antisense strand to SEQ ID NO: 198214
ucucagacaaggugaccgg

SEQ ID NO: 198216 - RNA, 19 nt, Artificial Sequence
  Description of Artificial Sequence: Synthetic oligonucleotide
  Sense strand starting at position 2374 of SEQ ID NO: 2553
cggucaccuugucugagaa

SEQ ID NO: 198217 - RNA, 19 nt, Artificial Sequence
  Description of Artificial Sequence: Synthetic oligonucleotide
  Antisense strand to SEQ ID NO: 198216
uucucagacaaggugaccg

SEQ ID NO: 198218 - RNA, 19 nt, Artificial Sequence
  Description of Artificial Sequence: Synthetic oligonucleotide
  Sense strand starting at position 2375 of SEQ ID NO: 2553
ggucaccuugucugagaac

SEQ ID NO: 198219 - RNA, 19 nt, Artificial Sequence
  Description of Artificial Sequence: Synthetic oligonucleotide
  Antisense strand to SEQ ID NO: 198218
guucucagacaaggugacc

SEQ ID NO: 198220 - RNA, 19 nt, Artificial Sequence
  Description of Artificial Sequence: Synthetic oligonucleotide
  Sense strand starting at position 2421 of SEQ ID NO: 2553
acugguuugguuugucauu

SEQ ID NO: 198221 - RNA, 19 nt, Artificial Sequence
  Description of Artificial Sequence: Synthetic oligonucleotide
  Antisense strand to SEQ ID NO: 198220
aaugacaaaccaaaccagu

SEQ ID NO: 198222 - RNA, 19 nt, Artificial Sequence
  Description of Artificial Sequence: Synthetic oligonucleotide
  Sense strand starting at position 2549 of SEQ ID NO: 2553
cuuucuaugcagcgacuaa

SEQ ID NO: 198223 - RNA, 19 nt, Artificial Sequence
  Description of Artificial Sequence: Synthetic oligonucleotide
  Antisense strand to SEQ ID NO: 198222
uuagucgcugcauagaaag

SEQ ID NO: 198224 - RNA, 19 nt, Artificial Sequence
  Description of Artificial Sequence: Synthetic oligonucleotide
  Sense strand starting at position 2603 of SEQ ID NO: 2553
gcugguagucuugaccuuu

SEQ ID NO: 198225 - RNA, 19 nt, Artificial Sequence
  Description of Artificial Sequence: Synthetic oligonucleotide
  Antisense strand to SEQ ID NO: 198224
aaaggucaagacuaccagc

SEQ ID NO: 198226 - RNA, 19 nt, Artificial Sequence
  Description of Artificial Sequence: Synthetic oligonucleotide
  Sense strand starting at position 2639 of SEQ ID NO: 2553
gugggaguucccugucuuu

SEQ ID NO: 198227 - RNA, 19 nt, Artificial Sequence
  Description of Artificial Sequence: Synthetic oligonucleotide
  Antisense strand to SEQ ID NO: 198226
aaagacagggaacucccac

SEQ ID NO: 198228 - RNA, 19 nt, Artificial Sequence
  Description of Artificial Sequence: Synthetic oligonucleotide
  Sense strand starting at position 2833 of SEQ ID NO: 2553
ucauguaauugugaggaua

SEQ ID NO: 198229 - RNA, 19 nt, Artificial Sequence
  Description of Artificial Sequence: Synthetic oligonucleotide
  Antisense strand to SEQ ID NO: 198228
uauccucacaauuacauga

SEQ ID NO: 198230 - RNA, 19 nt, Artificial Sequence
  Description of Artificial Sequence: Synthetic oligonucleotide
  Sense strand starting at position 2835 of SEQ ID NO: 2553
auguaauugugaggauaau

SEQ ID NO: 198231 - RNA, 19 nt, Artificial Sequence
  Description of Artificial Sequence: Synthetic oligonucleotide
  Antisense strand to SEQ ID NO: 198230
auuauccucacaauuacau

SEQ ID NO: 198232 - RNA, 19 nt, Artificial Sequence
  Description of Artificial Sequence: Synthetic oligonucleotide
  Sense strand starting at position 2863 of SEQ ID NO: 2553
agcuucuuccagugaguga

SEQ ID NO: 198233 - RNA, 19 nt, Artificial Sequence
  Description of Artificial Sequence: Synthetic oligonucleotide
  Antisense strand to SEQ ID NO: 198232
ucacucacuggaagaagcu

SEQ ID NO: 198234 - RNA, 19 nt, Artificial Sequence
  Description of Artificial Sequence: Synthetic oligonucleotide
  Sense strand starting at position 2867 of SEQ ID NO: 2553
ucuuccagugagugacaau

SEQ ID NO: 198235 - RNA, 19 nt, Artificial Sequence
  Description of Artificial Sequence: Synthetic oligonucleotide
  Antisense strand to SEQ ID NO: 198234
auugucacucacuggaaga

SEQ ID NO: 198236 - RNA, 19 nt, Artificial Sequence
  Description of Artificial Sequence: Synthetic oligonucleotide
  Sense strand starting at position 2874 of SEQ ID NO: 2553
gugagugacaauugcucau

SEQ ID NO: 198237 - RNA, 19 nt, Artificial Sequence
  Description of Artificial Sequence: Synthetic oligonucleotide
  Antisense strand to SEQ ID NO: 198236
augagcaauugucacucac

SEQ ID NO: 198238 - RNA, 19 nt, Artificial Sequence
  Description of Artificial Sequence: Synthetic oligonucleotide
  Sense strand starting at position 3165 of SEQ ID NO: 2553
gacuuacacgccuguaauc

SEQ ID NO: 198239 - RNA, 19 nt, Artificial Sequence
  Description of Artificial Sequence: Synthetic oligonucleotide
  Antisense strand to SEQ ID NO: 198238
gauuacaggcguguaaguc

SEQ ID NO: 198240 - RNA, 19 nt, Artificial Sequence
  Description of Artificial Sequence: Synthetic oligonucleotide
  Sense strand starting at position 3483 of SEQ ID NO: 2553
uuagauuucucaucugugu

SEQ ID NO: 198241 - RNA, 19 nt, Artificial Sequence
  Description of Artificial Sequence: Synthetic oligonucleotide
  Antisense strand to SEQ ID NO: 198240
acacagaugagaaaucuaa

SEQ ID NO: 198242 - RNA, 19 nt, Artificial Sequence
  Description of Artificial Sequence: Synthetic oligonucleotide
  Sense strand starting at position 3535 of SEQ ID NO: 2553
ggaacuagcuuucugguca

SEQ ID NO: 198243 - RNA, 19 nt, Artificial Sequence
  Description of Artificial Sequence: Synthetic oligonucleotide
  Antisense strand to SEQ ID NO: 198242
ugaccagaaagcuaguucc

SEQ ID NO: 198244 - RNA, 19 nt, Artificial Sequence
  Description of Artificial Sequence: Synthetic oligonucleotide
  Sense strand starting at position 3600 of SEQ ID NO: 2553
gcuuucuuggcaggccaaa

SEQ ID NO: 198245 - RNA, 19 nt, Artificial Sequence
  Description of Artificial Sequence: Synthetic oligonucleotide
  Antisense strand to SEQ ID NO: 198244
uuuggccugccaagaaagc

SEQ ID NO: 198246 - RNA, 19 nt, Artificial Sequence
  Description of Artificial Sequence: Synthetic oligonucleotide
  Sense strand starting at position 3621 of SEQ ID NO: 2553
guugacugugggcacaaau

SEQ ID NO: 198247 - RNA, 19 nt, Artificial Sequence
  Description of Artificial Sequence: Synthetic oligonucleotide
  Antisense strand to SEQ ID NO: 198246
auuugugcccacagucaac

SEQ ID NO: 198248 - RNA, 19 nt, Artificial Sequence
  Description of Artificial Sequence: Synthetic oligonucleotide
  Sense strand starting at position 3632 of SEQ ID NO: 2553
gcacaaaugagucggccau

SEQ ID NO: 198249 - RNA, 19 nt, Artificial Sequence
  Description of Artificial Sequence: Synthetic oligonucleotide
  Antisense strand to SEQ ID NO: 198248
auggccgacucauuugugc

SEQ ID NO: 198250 - RNA, 19 nt, Artificial Sequence
  Description of Artificial Sequence: Synthetic oligonucleotide
  Sense strand starting at position 3773 of SEQ ID NO: 2553
gugaacaguugguuucuuu

SEQ ID NO: 198251 - RNA, 19 nt, Artificial Sequence
  Description of Artificial Sequence: Synthetic oligonucleotide
  Antisense strand to SEQ ID NO: 198250
aaagaaaccaacuguucac

SEQ ID NO: 198252 - RNA, 19 nt, Artificial Sequence
  Description of Artificial Sequence: Synthetic oligonucleotide
  Sense strand starting at position 513 of SEQ ID NO: 2554
uugcaaguuccaugggaac

SEQ ID NO: 198253 - RNA, 19 nt, Artificial Sequence
  Description of Artificial Sequence: Synthetic oligonucleotide
  Antisense strand to SEQ ID NO: 198252
guucccauggaacuugcaa

SEQ ID NO: 198254 - RNA, 19 nt, Artificial Sequence
  Description of Artificial Sequence: Synthetic oligonucleotide
  Sense strand starting at position 558 of SEQ ID NO: 2554
uuaauucuguuacagggau

SEQ ID NO: 198255 - RNA, 19 nt, Artificial Sequence
  Description of Artificial Sequence: Synthetic oligonucleotide
  Antisense strand to SEQ ID NO: 198254
aucccuguaacagaauuaa

SEQ ID NO: 198256 - RNA, 19 nt, Artificial Sequence
  Description of Artificial Sequence: Synthetic oligonucleotide
  Sense strand starting at position 562 of SEQ ID NO: 2554
uucuguuacagggauguga

SEQ ID NO: 198257 - RNA, 19 nt, Artificial Sequence
  Description of Artificial Sequence: Synthetic oligonucleotide
  Antisense strand to SEQ ID NO: 198256
ucacaucccuguaacagaa

SEQ ID NO: 198258 - RNA, 19 nt, Artificial Sequence
  Description of Artificial Sequence: Synthetic oligonucleotide
  Sense strand starting at position 564 of SEQ ID NO: 2554
cuguuacagggaugugaua

SEQ ID NO: 198259 - RNA, 19 nt, Artificial Sequence
  Description of Artificial Sequence: Synthetic oligonucleotide
  Antisense strand to SEQ ID NO: 198258
uaucacaucccuguaacag

SEQ ID NO: 198260 - RNA, 19 nt, Artificial Sequence
  Description of Artificial Sequence: Synthetic oligonucleotide
  Sense strand starting at position 566 of SEQ ID NO: 2554
guuacagggaugugauauu

SEQ ID NO: 198261 - RNA, 19 nt, Artificial Sequence
  Description of Artificial Sequence: Synthetic oligonucleotide
  Antisense strand to SEQ ID NO: 198260
aauaucacaucccuguaac

SEQ ID NO: 198262 - RNA, 19 nt, Artificial Sequence
  Description of Artificial Sequence: Synthetic oligonucleotide
  Sense strand starting at position 952 of SEQ ID NO: 2554
ggcagagacuccucugucu

SEQ ID NO: 198263 - RNA, 19 nt, Artificial Sequence
  Description of Artificial Sequence: Synthetic oligonucleotide
  Antisense strand to SEQ ID NO: 198262
agacagaggagucucugcc

SEQ ID NO: 198264 - RNA, 19 nt, Artificial Sequence
  Description of Artificial Sequence: Synthetic oligonucleotide
  Sense strand starting at position 954 of SEQ ID NO: 2554
cagagacuccucugucugu

SEQ ID NO: 198265 - RNA, 19 nt, Artificial Sequence
  Description of Artificial Sequence: Synthetic oligonucleotide
  Antisense strand to SEQ ID NO: 198264
acagacagaggagucucug

SEQ ID NO: 198266 - RNA, 19 nt, Artificial Sequence
  Description of Artificial Sequence: Synthetic oligonucleotide
  Sense strand starting at position 1103 of SEQ ID NO: 2554
uuccuuugagaagguaauu

SEQ ID NO: 198267 - RNA, 19 nt, Artificial Sequence
  Description of Artificial Sequence: Synthetic oligonucleotide
  Antisense strand to SEQ ID NO: 198266
aauuaccuucucaaaggaa

SEQ ID NO: 198268 - RNA, 19 nt, Artificial Sequence
  Description of Artificial Sequence: Synthetic oligonucleotide
  Sense strand starting at position 1112 of SEQ ID NO: 2554
gaagguaauuccguggcuu

SEQ ID NO: 198269 - RNA, 19 nt, Artificial Sequence
  Description of Artificial Sequence: Synthetic oligonucleotide
  Antisense strand to SEQ ID NO: 198268
aagccacggaauuaccuuc

SEQ ID NO: 198270 - RNA, 19 nt, Artificial Sequence
  Description of Artificial Sequence: Synthetic oligonucleotide
  Sense strand starting at position 1139 of SEQ ID NO: 2554
cuuucuuaaccugaaagug

SEQ ID NO: 198271 - RNA, 19 nt, Artificial Sequence
  Description of Artificial Sequence: Synthetic oligonucleotide
  Antisense strand to SEQ ID NO: 198270
cacuuucagguuaagaaag

SEQ ID NO: 198272 - RNA, 19 nt, Artificial Sequence
  Description of Artificial Sequence: Synthetic oligonucleotide
  Sense strand starting at position 1162 of SEQ ID NO: 2554
gguguuugauuucauggag

SEQ ID NO: 198273 - RNA, 19 nt, Artificial Sequence
  Description of Artificial Sequence: Synthetic oligonucleotide
  Antisense strand to SEQ ID NO: 198272
cuccaugaaaucaaacacc

SEQ ID NO: 198274 - RNA, 19 nt, Artificial Sequence
  Description of Artificial Sequence: Synthetic oligonucleotide
  Sense strand starting at position 1213 of SEQ ID NO: 2554
acagaaacgccuugagaca

SEQ ID NO: 198275 - RNA, 19 nt, Artificial Sequence
  Description of Artificial Sequence: Synthetic oligonucleotide
  Antisense strand to SEQ ID NO: 198274
ugucucaaggcguuucugu

SEQ ID NO: 198276 - RNA, 19 nt, Artificial Sequence
  Description of Artificial Sequence: Synthetic oligonucleotide
  Sense strand starting at position 1282 of SEQ ID NO: 2554
gcaggaaagucacagcagu

SEQ ID NO: 198277 - RNA, 19 nt, Artificial Sequence
  Description of Artificial Sequence: Synthetic oligonucleotide
  Antisense strand to SEQ ID NO: 198276
acugcugugacuuuccugc

SEQ ID NO: 198278 - RNA, 19 nt, Artificial Sequence
  Description of Artificial Sequence: Synthetic oligonucleotide
  Sense strand starting at position 1288 of SEQ ID NO: 2554
aagucacagcagugugaua

SEQ ID NO: 198279 - RNA, 19 nt, Artificial Sequence
  Description of Artificial Sequence: Synthetic oligonucleotide
  Antisense strand to SEQ ID NO: 198278
uaucacacugcugugacuu

SEQ ID NO: 198280 - RNA, 19 nt, Artificial Sequence
  Description of Artificial Sequence: Synthetic oligonucleotide
  Sense strand starting at position 1290 of SEQ ID NO: 2554
gucacagcagugugauaca

SEQ ID NO: 198281 - RNA, 19 nt, Artificial Sequence
  Description of Artificial Sequence: Synthetic oligonucleotide
  Antisense strand to SEQ ID NO: 198280
uguaucacacugcugugac

SEQ ID NO: 198282 - RNA, 19 nt, Artificial Sequence
  Description of Artificial Sequence: Synthetic oligonucleotide
  Sense strand starting at position 1293 of SEQ ID NO: 2554
acagcagugugauacaaag

SEQ ID NO: 198283 - RNA, 19 nt, Artificial Sequence
  Description of Artificial Sequence: Synthetic oligonucleotide
  Antisense strand to SEQ ID NO: 198282
cuuuguaucacacugcugu

SEQ ID NO: 198284 - RNA, 19 nt, Artificial Sequence
  Description of Artificial Sequence: Synthetic oligonucleotide
  Sense strand starting at position 1299 of SEQ ID NO: 2554
gugugauacaaaggagugu

SEQ ID NO: 198285 - RNA, 19 nt, Artificial Sequence
  Description of Artificial Sequence: Synthetic oligonucleotide
  Antisense strand to SEQ ID NO: 198284
acacuccuuuguaucacac

SEQ ID NO: 198286 - RNA, 19 nt, Artificial Sequence
  Description of Artificial Sequence: Synthetic oligonucleotide
  Sense strand starting at position 1308 of SEQ ID NO: 2554
aaaggaguguauggugaua

SEQ ID NO: 198287 - RNA, 19 nt, Artificial Sequence
  Description of Artificial Sequence: Synthetic oligonucleotide
  Antisense strand to SEQ ID NO: 198286
uaucaccauacacuccuuu

SEQ ID NO: 198288 - RNA, 19 nt, Artificial Sequence
  Description of Artificial Sequence: Synthetic oligonucleotide
  Sense strand starting at position 1310 of SEQ ID NO: 2554
aggaguguauggugauaaa

SEQ ID NO: 198289 - RNA, 19 nt, Artificial Sequence
  Description of Artificial Sequence: Synthetic oligonucleotide
  Antisense strand to SEQ ID NO: 198288
uuuaucaccauacacuccu

SEQ ID NO: 198290 - RNA, 19 nt, Artificial Sequence
  Description of Artificial Sequence: Synthetic oligonucleotide
  Sense strand starting at position 1381 of SEQ ID NO: 2554
gcaauagcguucucaguag

SEQ ID NO: 198291 - RNA, 19 nt, Artificial Sequence
  Description of Artificial Sequence: Synthetic oligonucleotide
  Antisense strand to SEQ ID NO: 198290
cuacugagaacgcuauugc

SEQ ID NO: 198292 - RNA, 19 nt, Artificial Sequence
  Description of Artificial Sequence: Synthetic oligonucleotide
  Sense strand starting at position 1498 of SEQ ID NO: 2554
aauagaaucugcggugaga

SEQ ID NO: 198293 - RNA, 19 nt, Artificial Sequence
  Description of Artificial Sequence: Synthetic oligonucleotide
  Antisense strand to SEQ ID NO: 198292
ucucaccgcagauucuauu

SEQ ID NO: 198294 - RNA, 19 nt, Artificial Sequence
  Description of Artificial Sequence: Synthetic oligonucleotide
  Sense strand starting at position 1640 of SEQ ID NO: 2554
ugggccucacagcgauauu

SEQ ID NO: 198295 - RNA, 19 nt, Artificial Sequence
  Description of Artificial Sequence: Synthetic oligonucleotide
  Antisense strand to SEQ ID NO: 198294
aauaucgcugugaggccca

SEQ ID NO: 198296 - RNA, 19 nt, Artificial Sequence
  Description of Artificial Sequence: Synthetic oligonucleotide
  Sense strand starting at position 1803 of SEQ ID NO: 2554
cguccaucgcgccagagaa

SEQ ID NO: 198297 - RNA, 19 nt, Artificial Sequence
  Description of Artificial Sequence: Synthetic oligonucleotide
  Antisense strand to SEQ ID NO: 198296
uucucuggcgcgauggacg

SEQ ID NO: 198298 - RNA, 19 nt, Artificial Sequence
  Description of Artificial Sequence: Synthetic oligonucleotide
  Sense strand starting at position 2231 of SEQ ID NO: 2554
ccggcuuugucuguucgua

SEQ ID NO: 198299 - RNA, 19 nt, Artificial Sequence
  Description of Artificial Sequence: Synthetic oligonucleotide
  Antisense strand to SEQ ID NO: 198298
uacgaacagacaaagccgg

SEQ ID NO: 198300 - RNA, 19 nt, Artificial Sequence
  Description of Artificial Sequence: Synthetic oligonucleotide
  Sense strand starting at position 2232 of SEQ ID NO: 2554
cggcuuugucuguucguau

SEQ ID NO: 198301 - RNA, 19 nt, Artificial Sequence
  Description of Artificial Sequence: Synthetic oligonucleotide
  Antisense strand to SEQ ID NO: 198300
auacgaacagacaaagccg

SEQ ID NO: 198302 - RNA, 19 nt, Artificial Sequence
  Description of Artificial Sequence: Synthetic oligonucleotide
  Sense strand starting at position 2233 of SEQ ID NO: 2554
ggcuuugucuguucguauc

SEQ ID NO: 198303 - RNA, 19 nt, Artificial Sequence
  Description of Artificial Sequence: Synthetic oligonucleotide
  Antisense strand to SEQ ID NO: 198302
gauacgaacagacaaagcc

SEQ ID NO: 198304 - RNA, 19 nt, Artificial Sequence
  Description of Artificial Sequence: Synthetic oligonucleotide
  Sense strand starting at position 2476 of SEQ ID NO: 2554
acgagucuuacccaggguu

SEQ ID NO: 198305 - RNA, 19 nt, Artificial Sequence
  Description of Artificial Sequence: Synthetic oligonucleotide
  Antisense strand to SEQ ID NO: 198304
aacccuggguaagacucgu

SEQ ID NO: 198306 - RNA, 19 nt, Artificial Sequence
  Description of Artificial Sequence: Synthetic oligonucleotide
  Sense strand starting at position 3013 of SEQ ID NO: 2554
ccggucaccuugucugaga

SEQ ID NO: 198307 - RNA, 19 nt, Artificial Sequence
  Description of Artificial Sequence: Synthetic oligonucleotide
  Antisense strand to SEQ ID NO: 198306
ucucagacaaggugaccgg

SEQ ID NO: 198308 - RNA, 19 nt, Artificial Sequence
  Description of Artificial Sequence: Synthetic oligonucleotide
  Sense strand starting at position 3014 of SEQ ID NO: 2554
cggucaccuugucugagaa

SEQ ID NO: 198309 - RNA, 19 nt, Artificial Sequence
  Description of Artificial Sequence: Synthetic oligonucleotide
  Antisense strand to SEQ ID NO: 198308
uucucagacaaggugaccg

SEQ ID NO: 198310 - RNA, 19 nt, Artificial Sequence
  Description of Artificial Sequence: Synthetic oligonucleotide
  Sense strand starting at position 3015 of SEQ ID NO: 2554
ggucaccuugucugagaac

SEQ ID NO: 198311 - RNA, 19 nt, Artificial Sequence
  Description of Artificial Sequence: Synthetic oligonucleotide
  Antisense strand to SEQ ID NO: 198310
guucucagacaaggugacc

SEQ ID NO: 198312 - RNA, 19 nt, Artificial Sequence
  Description of Artificial Sequence: Synthetic oligonucleotide
  Sense strand starting at position 3061 of SEQ ID NO: 2554
acugguuugguuugucauu

SEQ ID NO: 198313 - RNA, 19 nt, Artificial Sequence
  Description of Artificial Sequence: Synthetic oligonucleotide
  Antisense strand to SEQ ID NO: 198312
aaugacaaaccaaaccagu

SEQ ID NO: 198314 - RNA, 19 nt, Artificial Sequence
  Description of Artificial Sequence: Synthetic oligonucleotide
  Sense strand starting at position 3189 of SEQ ID NO: 2554
cuuucuaugcagcgacuaa

SEQ ID NO: 198315 - RNA, 19 nt, Artificial Sequence
  Description of Artificial Sequence: Synthetic oligonucleotide
  Antisense strand to SEQ ID NO: 198314
uuagucgcugcauagaaag

SEQ ID NO: 198316 - RNA, 19 nt, Artificial Sequence
  Description of Artificial Sequence: Synthetic oligonucleotide
  Sense strand starting at position 3243 of SEQ ID NO: 2554
gcugguagucuugaccuuu

SEQ ID NO: 198317 - RNA, 19 nt, Artificial Sequence
  Description of Artificial Sequence: Synthetic oligonucleotide
  Antisense strand to SEQ ID NO: 198316
aaaggucaagacuaccagc

SEQ ID NO: 198318 - RNA, 19 nt, Artificial Sequence
  Description of Artificial Sequence: Synthetic oligonucleotide
  Sense strand starting at position 3279 of SEQ ID NO: 2554
gugggaguucccugucuuu

SEQ ID NO: 198319 - RNA, 19 nt, Artificial Sequence
  Description of Artificial Sequence: Synthetic oligonucleotide
  Antisense strand to SEQ ID NO: 198318
aaagacagggaacucccac

SEQ ID NO: 198320 - RNA, 19 nt, Artificial Sequence
  Description of Artificial Sequence: Synthetic oligonucleotide
  Sense strand starting at position 3473 of SEQ ID NO: 2554
ucauguaauugugaggaua

SEQ ID NO: 198321 - RNA, 19 nt, Artificial Sequence
  Description of Artificial Sequence: Synthetic oligonucleotide
  Antisense strand to SEQ ID NO: 198320
uauccucacaauuacauga

SEQ ID NO: 198322 - RNA, 19 nt, Artificial Sequence
  Description of Artificial Sequence: Synthetic oligonucleotide
  Sense strand starting at position 3475 of SEQ ID NO: 2554
auguaauugugaggauaau

SEQ ID NO: 198323 - RNA, 19 nt, Artificial Sequence
  Description of Artificial Sequence: Synthetic oligonucleotide
  Antisense strand to SEQ ID NO: 198322
auuauccucacaauuacau

SEQ ID NO: 198324 - RNA, 19 nt, Artificial Sequence
  Description of Artificial Sequence: Synthetic oligonucleotide
  Sense strand starting at position 3503 of SEQ ID NO: 2554
agcuucuuccagugaguga

SEQ ID NO: 198325 - RNA, 19 nt, Artificial Sequence
  Description of Artificial Sequence: Synthetic oligonucleotide
  Antisense strand to SEQ ID NO: 198324
ucacucacuggaagaagcu

SEQ ID NO: 198326 - RNA, 19 nt, Artificial Sequence
  Description of Artificial Sequence: Synthetic oligonucleotide
  Sense strand starting at position 3507 of SEQ ID NO: 2554
ucuuccagugagugacaau

SEQ ID NO: 198327 - RNA, 19 nt, Artificial Sequence
  Description of Artificial Sequence: Synthetic oligonucleotide
  Antisense strand to SEQ ID NO: 198326
auugucacucacuggaaga

SEQ ID NO: 198328 - RNA, 19 nt, Artificial Sequence
  Description of Artificial Sequence: Synthetic oligonucleotide
  Sense strand starting at position 3514 of SEQ ID NO: 2554
gugagugacaauugcucau

SEQ ID NO: 198329 - RNA, 19 nt, Artificial Sequence
  Description of Artificial Sequence: Synthetic oligonucleotide
  Antisense strand to SEQ ID NO: 198328
augagcaauugucacucac

SEQ ID NO: 198330 - RNA, 19 nt, Artificial Sequence
  Description of Artificial Sequence: Synthetic oligonucleotide
  Sense strand starting at position 3805 of SEQ ID NO: 2554
gacuuacacgccuguaauc

SEQ ID NO: 198331 - RNA, 19 nt, Artificial Sequence
  Description of Artificial Sequence: Synthetic oligonucleotide
  Antisense strand to SEQ ID NO: 198330
gauuacaggcguguaaguc

SEQ ID NO: 198332 - RNA, 19 nt, Artificial Sequence
  Description of Artificial Sequence: Synthetic oligonucleotide
  Sense strand starting at position 24 of SEQ ID NO: 2557
gagugacugugcccagaau

SEQ ID NO: 198333 - RNA, 19 nt, Artificial Sequence
  Description of Artificial Sequence: Synthetic oligonucleotide
  Antisense strand to SEQ ID NO: 198332
auucugggcacagucacuc

SEQ ID NO: 198334 - RNA, 19 nt, Artificial Sequence
  Description of Artificial Sequence: Synthetic oligonucleotide
  Sense strand starting at position 25 of SEQ ID NO: 2557
agugacugugcccagaauu

SEQ ID NO: 198335 - RNA, 19 nt, Artificial Sequence
  Description of Artificial Sequence: Synthetic oligonucleotide
  Antisense strand to SEQ ID NO: 198334
aauucugggcacagucacu

SEQ ID NO: 198336 - RNA, 19 nt, Artificial Sequence
  Description of Artificial Sequence: Synthetic oligonucleotide
  Sense strand starting at position 574 of SEQ ID NO: 2557
acauguaccuaggagucaa

SEQ ID NO: 198337 - RNA, 19 nt, Artificial Sequence
  Description of Artificial Sequence: Synthetic oligonucleotide
  Antisense strand to SEQ ID NO: 198336
uugacuccuagguacaugu

SEQ ID NO: 198338 - RNA, 19 nt, Artificial Sequence
  Description of Artificial Sequence: Synthetic oligonucleotide
  Sense strand starting at position 619 of SEQ ID NO: 2557
cuaugugaccuguagcaag

SEQ ID NO: 198339 - RNA, 19 nt, Artificial Sequence
  Description of Artificial Sequence: Synthetic oligonucleotide
  Antisense strand to SEQ ID NO: 198338
cuugcuacaggucacauag

SEQ ID NO: 198340 - RNA, 19 nt, Artificial Sequence
  Description of Artificial Sequence: Synthetic oligonucleotide
  Sense strand starting at position 753 of SEQ ID NO: 2557
ucuccuaaguguuagcaua

SEQ ID NO: 198341 - RNA, 19 nt, Artificial Sequence
  Description of Artificial Sequence: Synthetic oligonucleotide
  Antisense strand to SEQ ID NO: 198340
uaugcuaacacuuaggaga

SEQ ID NO: 198342 - RNA, 19 nt, Artificial Sequence
  Description of Artificial Sequence: Synthetic oligonucleotide
  Sense strand starting at position 755 of SEQ ID NO: 2557
uccuaaguguuagcauacu

SEQ ID NO: 198343 - RNA, 19 nt, Artificial Sequence
  Description of Artificial Sequence: Synthetic oligonucleotide
  Antisense strand to SEQ ID NO: 198342
aguaugcuaacacuuagga

SEQ ID NO: 198344 - RNA, 19 nt, Artificial Sequence
  Description of Artificial Sequence: Synthetic oligonucleotide
  Sense strand starting at position 761 of SEQ ID NO: 2557
guguuagcauacuaucauu

SEQ ID NO: 198345 - RNA, 19 nt, Artificial Sequence
  Description of Artificial Sequence: Synthetic oligonucleotide
  Antisense strand to SEQ ID NO: 198344
aaugauaguaugcuaacac

SEQ ID NO: 198346 - RNA, 19 nt, Artificial Sequence
  Description of Artificial Sequence: Synthetic oligonucleotide
  Sense strand starting at position 793 of SEQ ID NO: 2557
gggcacagcagucauaauu

SEQ ID NO: 198347 - RNA, 19 nt, Artificial Sequence
  Description of Artificial Sequence: Synthetic oligonucleotide
  Antisense strand to SEQ ID NO: 198346
aauuaugacugcugugccc

SEQ ID NO: 198348 - RNA, 19 nt, Artificial Sequence
  Description of Artificial Sequence: Synthetic oligonucleotide
  Sense strand starting at position 861 of SEQ ID NO: 2557
ucaaaucugugaugggauu

SEQ ID NO: 198349 - RNA, 19 nt, Artificial Sequence
  Description of Artificial Sequence: Synthetic oligonucleotide
  Antisense strand to SEQ ID NO: 198348
aaucccaucacagauuuga

SEQ ID NO: 198350 - RNA, 19 nt, Artificial Sequence
  Description of Artificial Sequence: Synthetic oligonucleotide
  Sense strand starting at position 900 of SEQ ID NO: 2557
auugcaaauuuaggacaaa

SEQ ID NO: 198351 - RNA, 19 nt, Artificial Sequence
  Description of Artificial Sequence: Synthetic oligonucleotide
  Antisense strand to SEQ ID NO: 198350
uuuguccuaaauuugcaau

SEQ ID NO: 198352 - RNA, 19 nt, Artificial Sequence
  Description of Artificial Sequence: Synthetic oligonucleotide
  Sense strand starting at position 930 of SEQ ID NO: 2557
gucucucaggacugaaacu

SEQ ID NO: 198353 - RNA, 19 nt, Artificial Sequence
  Description of Artificial Sequence: Synthetic oligonucleotide
  Antisense strand to SEQ ID NO: 198352
aguuucaguccugagagac

SEQ ID NO: 198354 - RNA, 19 nt, Artificial Sequence
  Description of Artificial Sequence: Synthetic oligonucleotide
  Sense strand starting at position 987 of SEQ ID NO: 2557
ugcauuaaccucugaguua

SEQ ID NO: 198355 - RNA, 19 nt, Artificial Sequence
  Description of Artificial Sequence: Synthetic oligonucleotide
  Antisense strand to SEQ ID NO: 198354
uaacucagagguuaaugca

SEQ ID NO: 198356 - RNA, 19 nt, Artificial Sequence
  Description of Artificial Sequence: Synthetic oligonucleotide
  Sense strand starting at position 988 of SEQ ID NO: 2557
gcauuaaccucugaguuaa

SEQ ID NO: 198357 - RNA, 19 nt, Artificial Sequence
  Description of Artificial Sequence: Synthetic oligonucleotide
  Antisense strand to SEQ ID NO: 198356
uuaacucagagguuaaugc

SEQ ID NO: 198358 - RNA, 19 nt, Artificial Sequence
  Description of Artificial Sequence: Synthetic oligonucleotide
  Sense strand starting at position 1126 of SEQ ID NO: 2557
gcucacucuaaugggagua

SEQ ID NO: 198359 - RNA, 19 nt, Artificial Sequence
  Description of Artificial Sequence: Synthetic oligonucleotide
  Antisense strand to SEQ ID NO: 198358
uacucccauuagagugagc

SEQ ID NO: 198360 - RNA, 19 nt, Artificial Sequence
  Description of Artificial Sequence: Synthetic oligonucleotide
  Sense strand starting at position 1351 of SEQ ID NO: 2557
gaaaguuuguauugccaga

SEQ ID NO: 198361 - RNA, 19 nt, Artificial Sequence
  Description of Artificial Sequence: Synthetic oligonucleotide
  Antisense strand to SEQ ID NO: 198360
ucuggcaauacaaacuuuc

SEQ ID NO: 198362 - RNA, 19 nt, Artificial Sequence
  Description of Artificial Sequence: Synthetic oligonucleotide
  Sense strand starting at position 1356 of SEQ ID NO: 2557
uuuguauugccagaggaac

SEQ ID NO: 198363 - RNA, 19 nt, Artificial Sequence
  Description of Artificial Sequence: Synthetic oligonucleotide
  Antisense strand to SEQ ID NO: 198362
guuccucuggcaauacaaa

SEQ ID NO: 198364 - RNA, 19 nt, Artificial Sequence
  Description of Artificial Sequence: Synthetic oligonucleotide
  Sense strand starting at position 1487 of SEQ ID NO: 2557
ccagguagugcagagguaa

SEQ ID NO: 198365 - RNA, 19 nt, Artificial Sequence
  Description of Artificial Sequence: Synthetic oligonucleotide
  Antisense strand to SEQ ID NO: 198364
uuaccucugcacuaccugg

SEQ ID NO: 198366 - RNA, 19 nt, Artificial Sequence
  Description of Artificial Sequence: Synthetic oligonucleotide
  Sense strand starting at position 1500 of SEQ ID NO: 2557
agguaagauagauacgguu

SEQ ID NO: 198367 - RNA, 19 nt, Artificial Sequence
  Description of Artificial Sequence: Synthetic oligonucleotide
  Antisense strand to SEQ ID NO: 198366
aaccguaucuaucuuaccu

SEQ ID NO: 198368 - RNA, 19 nt, Artificial Sequence
  Description of Artificial Sequence: Synthetic oligonucleotide
  Sense strand starting at position 1581 of SEQ ID NO: 2557
agaacaggcucuccuuauu

SEQ ID NO: 198369 - RNA, 19 nt, Artificial Sequence
  Description of Artificial Sequence: Synthetic oligonucleotide
  Antisense strand to SEQ ID NO: 198368
aauaaggagagccuguucu

SEQ ID NO: 198370 - RNA, 19 nt, Artificial Sequence
  Description of Artificial Sequence: Synthetic oligonucleotide
  Sense strand starting at position 1662 of SEQ ID NO: 2557
uccuuagcgucaucagcaa

SEQ ID NO: 198371 - RNA, 19 nt, Artificial Sequence
  Description of Artificial Sequence: Synthetic oligonucleotide
  Antisense strand to SEQ ID NO: 198370
uugcugaugacgcuaagga

SEQ ID NO: 198372 - RNA, 19 nt, Artificial Sequence
  Description of Artificial Sequence: Synthetic oligonucleotide
  Sense strand starting at position 1685 of SEQ ID NO: 2557
ggaggacacugagaaucaa

SEQ ID NO: 198373 - RNA, 19 nt, Artificial Sequence
  Description of Artificial Sequence: Synthetic oligonucleotide
  Antisense strand to SEQ ID NO: 198372
uugauucucaguguccucc

SEQ ID NO: 198374 - RNA, 19 nt, Artificial Sequence
  Description of Artificial Sequence: Synthetic oligonucleotide
  Sense strand starting at position 1726 of SEQ ID NO: 2557
gcaugagacgcacauuaaa

SEQ ID NO: 198375 - RNA, 19 nt, Artificial Sequence
  Description of Artificial Sequence: Synthetic oligonucleotide
  Antisense strand to SEQ ID NO: 198374
uuuaaugugcgucucaugc

SEQ ID NO: 198376 - RNA, 19 nt, Artificial Sequence
  Description of Artificial Sequence: Synthetic oligonucleotide
  Sense strand starting at position 1914 of SEQ ID NO: 2557
uugcuaugccgggaggaga

SEQ ID NO: 198377 - RNA, 19 nt, Artificial Sequence
  Description of Artificial Sequence: Synthetic oligonucleotide
  Antisense strand to SEQ ID NO: 198376
ucuccucccggcauagcaa

SEQ ID NO: 198378 - RNA, 19 nt, Artificial Sequence
  Description of Artificial Sequence: Synthetic oligonucleotide
  Sense strand starting at position 1925 of SEQ ID NO: 2557
ggaggagacggucacuguu

SEQ ID NO: 198379 - RNA, 19 nt, Artificial Sequence
  Description of Artificial Sequence: Synthetic oligonucleotide
  Antisense strand to SEQ ID NO: 198378
aacagugaccgucuccucc

SEQ ID NO: 198380 - RNA, 19 nt, Artificial Sequence
  Description of Artificial Sequence: Synthetic oligonucleotide
  Sense strand starting at position 1941 of SEQ ID NO: 2557
guugcuaagggucauccau

SEQ ID NO: 198381 - RNA, 19 nt, Artificial Sequence
  Description of Artificial Sequence: Synthetic oligonucleotide
  Antisense strand to SEQ ID NO: 198380
auggaugacccuuagcaac

SEQ ID NO: 198382 - RNA, 19 nt, Artificial Sequence
  Description of Artificial Sequence: Synthetic oligonucleotide
  Sense strand starting at position 1957 of SEQ ID NO: 2557
cauccuuagucucgaagaa

SEQ ID NO: 198383 - RNA, 19 nt, Artificial Sequence
  Description of Artificial Sequence: Synthetic oligonucleotide
  Antisense strand to SEQ ID NO: 198382
uucuucgagacuaaggaug

SEQ ID NO: 198384 - RNA, 19 nt, Artificial Sequence
  Description of Artificial Sequence: Synthetic oligonucleotide
  Sense strand starting at position 1958 of SEQ ID NO: 2557
auccuuagucucgaagaaa

SEQ ID NO: 198385 - RNA, 19 nt, Artificial Sequence
  Description of Artificial Sequence: Synthetic oligonucleotide
  Antisense strand to SEQ ID NO: 198384
uuucuucgagacuaaggau

SEQ ID NO: 198386 - RNA, 19 nt, Artificial Sequence
  Description of Artificial Sequence: Synthetic oligonucleotide
  Sense strand starting at position 1961 of SEQ ID NO: 2557
cuuagucucgaagaaaucu

SEQ ID NO: 198387 - RNA, 19 nt, Artificial Sequence
  Description of Artificial Sequence: Synthetic oligonucleotide
  Antisense strand to SEQ ID NO: 198386
agauuucuucgagacuaag

SEQ ID NO: 198388 - RNA, 19 nt, Artificial Sequence
  Description of Artificial Sequence: Synthetic oligonucleotide
  Sense strand starting at position 2020 of SEQ ID NO: 2557
uugagcuacucccaaagau

SEQ ID NO: 198389 - RNA, 19 nt, Artificial Sequence
  Description of Artificial Sequence: Synthetic oligonucleotide
  Antisense strand to SEQ ID NO: 198388
aucuuugggaguagcucaa

SEQ ID NO: 198390 - RNA, 19 nt, Artificial Sequence
  Description of Artificial Sequence: Synthetic oligonucleotide
  Sense strand starting at position 2047 of SEQ ID NO: 2557
acaggagacuguuuacauc

SEQ ID NO: 198391 - RNA, 19 nt, Artificial Sequence
  Description of Artificial Sequence: Synthetic oligonucleotide
  Antisense strand to SEQ ID NO: 198390
gauguaaacagucuccugu

SEQ ID NO: 198392 - RNA, 19 nt, Artificial Sequence
  Description of Artificial Sequence: Synthetic oligonucleotide
  Sense strand starting at position 2089 of SEQ ID NO: 2557
cccacucuauccuaggaga

SEQ ID NO: 198393 - RNA, 19 nt, Artificial Sequence
  Description of Artificial Sequence: Synthetic oligonucleotide
  Antisense strand to SEQ ID NO: 198392
ucuccuaggauagaguggg

SEQ ID NO: 198394 - RNA, 19 nt, Artificial Sequence
  Description of Artificial Sequence: Synthetic oligonucleotide
  Sense strand starting at position 2345 of SEQ ID NO: 2557
gagaaagugcgcgugugaa

SEQ ID NO: 198395 - RNA, 19 nt, Artificial Sequence
  Description of Artificial Sequence: Synthetic oligonucleotide
  Antisense strand to SEQ ID NO: 198394
uucacacgcgcacuuucuc

SEQ ID NO: 198396 - RNA, 19 nt, Artificial Sequence
  Description of Artificial Sequence: Synthetic oligonucleotide
  Sense strand starting at position 2347 of SEQ ID NO: 2557
gaaagugcgcgugugaaga

SEQ ID NO: 198397 - RNA, 19 nt, Artificial Sequence
  Description of Artificial Sequence: Synthetic oligonucleotide
  Antisense strand to SEQ ID NO: 198396
ucuucacacgcgcacuuuc

SEQ ID NO: 198398 - RNA, 19 nt, Artificial Sequence
  Description of Artificial Sequence: Synthetic oligonucleotide
  Sense strand starting at position 46 of SEQ ID NO: 2556
gcucacucuaaugggagua

SEQ ID NO: 198399 - RNA, 19 nt, Artificial Sequence
  Description of Artificial Sequence: Synthetic oligonucleotide
  Antisense strand to SEQ ID NO: 198398
uacucccauuagagugagc

SEQ ID NO: 198400 - RNA, 19 nt, Artificial Sequence
  Description of Artificial Sequence: Synthetic oligonucleotide
  Sense strand starting at position 271 of SEQ ID NO: 2556
gaaaguuuguauugccaga

SEQ ID NO: 198401 - RNA, 19 nt, Artificial Sequence
  Description of Artificial Sequence: Synthetic oligonucleotide
  Antisense strand to SEQ ID NO: 198400
ucuggcaauacaaacuuuc

SEQ ID NO: 198402 - RNA, 19 nt, Artificial Sequence
  Description of Artificial Sequence: Synthetic oligonucleotide
  Sense strand starting at position 276 of SEQ ID NO: 2556
uuuguauugccagaggaac

SEQ ID NO: 198403 - RNA, 19 nt, Artificial Sequence
  Description of Artificial Sequence: Synthetic oligonucleotide
  Antisense strand to SEQ ID NO: 198402
guuccucuggcaauacaaa

SEQ ID NO: 198404 - RNA, 19 nt, Artificial Sequence
  Description of Artificial Sequence: Synthetic oligonucleotide
  Sense strand starting at position 407 of SEQ ID NO: 2556
ccagguagugcagagguaa

SEQ ID NO: 198405 - RNA, 19 nt, Artificial Sequence
  Description of Artificial Sequence: Synthetic oligonucleotide
  Antisense strand to SEQ ID NO: 198404
uuaccucugcacuaccugg

SEQ ID NO: 198406 - RNA, 19 nt, Artificial Sequence
  Description of Artificial Sequence: Synthetic oligonucleotide
  Sense strand starting at position 420 of SEQ ID NO: 2556
agguaagauagauacgguu

SEQ ID NO: 198407 - RNA, 19 nt, Artificial Sequence
  Description of Artificial Sequence: Synthetic oligonucleotide
  Antisense strand to SEQ ID NO: 198406
aaccguaucuaucuuaccu

SEQ ID NO: 198408 - RNA, 19 nt, Artificial Sequence
  Description of Artificial Sequence: Synthetic oligonucleotide
  Sense strand starting at position 501 of SEQ ID NO: 2556
agaacaggcucuccuuauu

SEQ ID NO: 198409 - RNA, 19 nt, Artificial Sequence
  Description of Artificial Sequence: Synthetic oligonucleotide
  Antisense strand to SEQ ID NO: 198408
aauaaggagagccuguucu

SEQ ID NO: 198410 - RNA, 19 nt, Artificial Sequence
  Description of Artificial Sequence: Synthetic oligonucleotide
  Sense strand starting at position 582 of SEQ ID NO: 2556
uccuuagcgucaucagcaa

SEQ ID NO: 198411 - RNA, 19 nt, Artificial Sequence
  Description of Artificial Sequence: Synthetic oligonucleotide
  Antisense strand to SEQ ID NO: 198410
uugcugaugacgcuaagga

SEQ ID NO: 198412 - RNA, 19 nt, Artificial Sequence
  Description of Artificial Sequence: Synthetic oligonucleotide
  Sense strand starting at position 605 of SEQ ID NO: 2556
ggaggacacugagaaucaa

SEQ ID NO: 198413 - RNA, 19 nt, Artificial Sequence
  Description of Artificial Sequence: Synthetic oligonucleotide
  Antisense strand to SEQ ID NO: 198412
uugauucucaguguccucc

SEQ ID NO: 198414 - RNA, 19 nt, Artificial Sequence
  Description of Artificial Sequence: Synthetic oligonucleotide
  Sense strand starting at position 646 of SEQ ID NO: 2556
gcaugagacgcacauuaaa

SEQ ID NO: 198415 - RNA, 19 nt, Artificial Sequence
  Description of Artificial Sequence: Synthetic oligonucleotide
  Antisense strand to SEQ ID NO: 198414
uuuaaugugcgucucaugc

SEQ ID NO: 198416 - RNA, 19 nt, Artificial Sequence
  Description of Artificial Sequence: Synthetic oligonucleotide
  Sense strand starting at position 834 of SEQ ID NO: 2556
uugcuaugccgggaggaga

SEQ ID NO: 198417 - RNA, 19 nt, Artificial Sequence
  Description of Artificial Sequence: Synthetic oligonucleotide
  Antisense strand to SEQ ID NO: 198416
ucuccucccggcauagcaa

SEQ ID NO: 198418 - RNA, 19 nt, Artificial Sequence
  Description of Artificial Sequence: Synthetic oligonucleotide
  Sense strand starting at position 845 of SEQ ID NO: 2556
ggaggagacggucacuguu

SEQ ID NO: 198419 - RNA, 19 nt, Artificial Sequence
  Description of Artificial Sequence: Synthetic oligonucleotide
  Antisense strand to SEQ ID NO: 198418
aacagugaccgucuccucc

SEQ ID NO: 198420 - RNA, 19 nt, Artificial Sequence
  Description of Artificial Sequence: Synthetic oligonucleotide
  Sense strand starting at position 861 of SEQ ID NO: 2556
guugcuaagggucauccau

SEQ ID NO: 198421 - RNA, 19 nt, Artificial Sequence
  Description of Artificial Sequence: Synthetic oligonucleotide
  Antisense strand to SEQ ID NO: 198420
auggaugacccuuagcaac

SEQ ID NO: 198422 - RNA, 19 nt, Artificial Sequence
  Description of Artificial Sequence: Synthetic oligonucleotide
  Sense strand starting at position 877 of SEQ ID NO: 2556
cauccuuagucucgaagaa

SEQ ID NO: 198423 - RNA, 19 nt, Artificial Sequence
  Description of Artificial Sequence: Synthetic oligonucleotide
  Antisense strand to SEQ ID NO: 198422
uucuucgagacuaaggaug

SEQ ID NO: 198424 - RNA, 19 nt, Artificial Sequence
  Description of Artificial Sequence: Synthetic oligonucleotide
  Sense strand starting at position 878 of SEQ ID NO: 2556
auccuuagucucgaagaaa

SEQ ID NO: 198425 - RNA, 19 nt, Artificial Sequence
  Description of Artificial Sequence: Synthetic oligonucleotide
  Antisense strand to SEQ ID NO: 198424
uuucuucgagacuaaggau

SEQ ID NO: 198426 - RNA, 19 nt, Artificial Sequence
  Description of Artificial Sequence: Synthetic oligonucleotide
  Sense strand starting at position 881 of SEQ ID NO: 2556
cuuagucucgaagaaaucu

SEQ ID NO: 198427 - RNA, 19 nt, Artificial Sequence
  Description of Artificial Sequence: Synthetic oligonucleotide
  Antisense strand to SEQ ID NO: 198426
agauuucuucgagacuaag

SEQ ID NO: 198428 - RNA, 19 nt, Artificial Sequence
  Description of Artificial Sequence: Synthetic oligonucleotide
  Sense strand starting at position 940 of SEQ ID NO: 2556
uugagcuacucccaaagau

SEQ ID NO: 198429 - RNA, 19 nt, Artificial Sequence
  Description of Artificial Sequence: Synthetic oligonucleotide
  Antisense strand to SEQ ID NO: 198428
aucuuugggaguagcucaa

SEQ ID NO: 198430 - RNA, 19 nt, Artificial Sequence
  Description of Artificial Sequence: Synthetic oligonucleotide
  Sense strand starting at position 967 of SEQ ID NO: 2556
acaggagacuguuuacauc

SEQ ID NO: 198431 - RNA, 19 nt, Artificial Sequence
  Description of Artificial Sequence: Synthetic oligonucleotide
  Antisense strand to SEQ ID NO: 198430
gauguaaacagucuccugu

SEQ ID NO: 198432 - RNA, 19 nt, Artificial Sequence
  Description of Artificial Sequence: Synthetic oligonucleotide
  Sense strand starting at position 1009 of SEQ ID NO: 2556
cccacucuauccuaggaga

SEQ ID NO: 198433 - RNA, 19 nt, Artificial Sequence
  Description of Artificial Sequence: Synthetic oligonucleotide
  Antisense strand to SEQ ID NO: 198432
ucuccuaggauagaguggg

SEQ ID NO: 198434 - RNA, 19 nt, Artificial Sequence
  Description of Artificial Sequence: Synthetic oligonucleotide
  Sense strand starting at position 1265 of SEQ ID NO: 2556
gagaaagugcgcgugugaa

SEQ ID NO: 198435 - RNA, 19 nt, Artificial Sequence
  Description of Artificial Sequence: Synthetic oligonucleotide
  Antisense strand to SEQ ID NO: 198434
uucacacgcgcacuuucuc

SEQ ID NO: 198436 - RNA, 19 nt, Artificial Sequence
  Description of Artificial Sequence: Synthetic oligonucleotide
  Sense strand starting at position 1267 of SEQ ID NO: 2556
gaaagugcgcgugugaaga

SEQ ID NO: 198437 - RNA, 19 nt, Artificial Sequence
  Description of Artificial Sequence: Synthetic oligonucleotide
  Antisense strand to SEQ ID NO: 198436
ucuucacacgcgcacuuuc

SEQ ID NO: 198438 - RNA, 19 nt, Artificial Sequence
  Description of Artificial Sequence: Synthetic oligonucleotide
  Sense strand starting at position 3288 of SEQ ID NO: 2556
aggaauccuugauauguuu

SEQ ID NO: 198439 - RNA, 19 nt, Artificial Sequence
  Description of Artificial Sequence: Synthetic oligonucleotide
  Antisense strand to SEQ ID NO: 198438
aaacauaucaaggauuccu

SEQ ID NO: 198440 - RNA, 19 nt, Artificial Sequence
  Description of Artificial Sequence: Synthetic oligonucleotide
  Sense strand starting at position 3295 of SEQ ID NO: 2556
cuugauauguuuguccuca

SEQ ID NO: 198441 - RNA, 19 nt, Artificial Sequence
  Description of Artificial Sequence: Synthetic oligonucleotide
  Antisense strand to SEQ ID NO: 198440
ugaggacaaacauaucaag

SEQ ID NO: 198442 - RNA, 19 nt, Artificial Sequence
  Description of Artificial Sequence: Synthetic oligonucleotide
  Sense strand starting at position 3296 of SEQ ID NO: 2556
uugauauguuuguccucaa

SEQ ID NO: 198443 - RNA, 19 nt, Artificial Sequence
  Description of Artificial Sequence: Synthetic oligonucleotide
  Antisense strand to SEQ ID NO: 198442
uugaggacaaacauaucaa

SEQ ID NO: 198444 - RNA, 19 nt, Artificial Sequence
  Description of Artificial Sequence: Synthetic oligonucleotide
  Sense strand starting at position 3297 of SEQ ID NO: 2556
ugauauguuuguccucaaa

SEQ ID NO: 198445 - RNA, 19 nt, Artificial Sequence
  Description of Artificial Sequence: Synthetic oligonucleotide
  Antisense strand to SEQ ID NO: 198444
uuugaggacaaacauauca

SEQ ID NO: 198446 - RNA, 19 nt, Artificial Sequence
  Description of Artificial Sequence: Synthetic oligonucleotide
  Sense strand starting at position 3299 of SEQ ID NO: 2556
auauguuuguccucaaaga

SEQ ID NO: 198447 - RNA, 19 nt, Artificial Sequence
  Description of Artificial Sequence: Synthetic oligonucleotide
  Antisense strand to SEQ ID NO: 198446
ucuuugaggacaaacauau

SEQ ID NO: 198448 - RNA, 19 nt, Artificial Sequence
  Description of Artificial Sequence: Synthetic oligonucleotide
  Sense strand starting at position 3381 of SEQ ID NO: 2556
ccuucugcucuagaaugca

SEQ ID NO: 198449 - RNA, 19 nt, Artificial Sequence
  Description of Artificial Sequence: Synthetic oligonucleotide
  Antisense strand to SEQ ID NO: 198448
ugcauucuagagcagaagg

SEQ ID NO: 198450 - RNA, 19 nt, Artificial Sequence
  Description of Artificial Sequence: Synthetic oligonucleotide
  Sense strand starting at position 3384 of SEQ ID NO: 2556
ucugcucuagaaugcauaa

SEQ ID NO: 198451 - RNA, 19 nt, Artificial Sequence
  Description of Artificial Sequence: Synthetic oligonucleotide
  Antisense strand to SEQ ID NO: 198450
uuaugcauucuagagcaga

SEQ ID NO: 198452 - RNA, 19 nt, Artificial Sequence
  Description of Artificial Sequence: Synthetic oligonucleotide
  Sense strand starting at position 3396 of SEQ ID NO: 2556
ugcauaauuaugcgagcau

SEQ ID NO: 198453 - RNA, 19 nt, Artificial Sequence
  Description of Artificial Sequence: Synthetic oligonucleotide
  Antisense strand to SEQ ID NO: 198452
augcucgcauaauuaugca

SEQ ID NO: 198454 - RNA, 19 nt, Artificial Sequence
  Description of Artificial Sequence: Synthetic oligonucleotide
  Sense strand starting at position 3397 of SEQ ID NO: 2556
gcauaauuaugcgagcaua

SEQ ID NO: 198455 - RNA, 19 nt, Artificial Sequence
  Description of Artificial Sequence: Synthetic oligonucleotide
  Antisense strand to SEQ ID NO: 198454
uaugcucgcauaauuaugc

SEQ ID NO: 198456 - RNA, 19 nt, Artificial Sequence
  Description of Artificial Sequence: Synthetic oligonucleotide
  Sense strand starting at position 3400 of SEQ ID NO: 2556
uaauuaugcgagcauaaga

SEQ ID NO: 198457 - RNA, 19 nt, Artificial Sequence
  Description of Artificial Sequence: Synthetic oligonucleotide
  Antisense strand to SEQ ID NO: 198456
ucuuaugcucgcauaauua

SEQ ID NO: 198458 - RNA, 19 nt, Artificial Sequence
  Description of Artificial Sequence: Synthetic oligonucleotide
  Sense strand starting at position 3463 of SEQ ID NO: 2556
acccuagucaauugagugu

SEQ ID NO: 198459 - RNA, 19 nt, Artificial Sequence
  Description of Artificial Sequence: Synthetic oligonucleotide
  Antisense strand to SEQ ID NO: 198458
acacucaauugacuagggu

SEQ ID NO: 198460 - RNA, 19 nt, Artificial Sequence
  Description of Artificial Sequence: Synthetic oligonucleotide
  Sense strand starting at position 3536 of SEQ ID NO: 2556
ggaagagacagcuaugcuu

SEQ ID NO: 198461 - RNA, 19 nt, Artificial Sequence
  Description of Artificial Sequence: Synthetic oligonucleotide
  Antisense strand to SEQ ID NO: 198460
aagcauagcugucucuucc

SEQ ID NO: 198462 - RNA, 19 nt, Artificial Sequence
  Description of Artificial Sequence: Synthetic oligonucleotide
  Sense strand starting at position 3543 of SEQ ID NO: 2556
acagcuaugcuuugugaaa

SEQ ID NO: 198463 - RNA, 19 nt, Artificial Sequence
  Description of Artificial Sequence: Synthetic oligonucleotide
  Antisense strand to SEQ ID NO: 198462
uuucacaaagcauagcugu

SEQ ID NO: 198464 - RNA, 19 nt, Artificial Sequence
  Description of Artificial Sequence: Synthetic oligonucleotide
  Sense strand starting at position 3544 of SEQ ID NO: 2556
cagcuaugcuuugugaaac

SEQ ID NO: 198465 - RNA, 19 nt, Artificial Sequence
  Description of Artificial Sequence: Synthetic oligonucleotide
  Antisense strand to SEQ ID NO: 198464
guuucacaaagcauagcug

SEQ ID NO: 198466 - RNA, 19 nt, Artificial Sequence
  Description of Artificial Sequence: Synthetic oligonucleotide
  Sense strand starting at position 3875 of SEQ ID NO: 2556
gucuauugcucccaggaug

SEQ ID NO: 198467 - RNA, 19 nt, Artificial Sequence
  Description of Artificial Sequence: Synthetic oligonucleotide
  Antisense strand to SEQ ID NO: 198466
cauccugggagcaauagac

SEQ ID NO: 198468 - RNA, 19 nt, Artificial Sequence
  Description of Artificial Sequence: Synthetic oligonucleotide
  Sense strand starting at position 3878 of SEQ ID NO: 2556
uauugcucccaggauggua

SEQ ID NO: 198469 - RNA, 19 nt, Artificial Sequence
  Description of Artificial Sequence: Synthetic oligonucleotide
  Antisense strand to SEQ ID NO: 198468
uaccauccugggagcaaua

SEQ ID NO: 198470 - RNA, 19 nt, Artificial Sequence
  Description of Artificial Sequence: Synthetic oligonucleotide
  Sense strand starting at position 3886 of SEQ ID NO: 2556
ccaggaugguacuauauag

SEQ ID NO: 198471 - RNA, 19 nt, Artificial Sequence
  Description of Artificial Sequence: Synthetic oligonucleotide
  Antisense strand to SEQ ID NO: 198470
cuauauaguaccauccugg

SEQ ID NO: 198472 - RNA, 19 nt, Artificial Sequence
  Description of Artificial Sequence: Synthetic oligonucleotide
  Sense strand starting at position 3893 of SEQ ID NO: 2556
gguacuauauagucauuaa

SEQ ID NO: 198473 - RNA, 19 nt, Artificial Sequence
  Description of Artificial Sequence: Synthetic oligonucleotide
  Antisense strand to SEQ ID NO: 198472
uuaaugacuauauaguacc

SEQ ID NO: 198474 - RNA, 19 nt, Artificial Sequence
  Description of Artificial Sequence: Synthetic oligonucleotide
  Sense strand starting at position 3949 of SEQ ID NO: 2556
uugggcugccaggaauuaa

SEQ ID NO: 198475 - RNA, 19 nt, Artificial Sequence
  Description of Artificial Sequence: Synthetic oligonucleotide
  Antisense strand to SEQ ID NO: 198474
uuaauuccuggcagcccaa

SEQ ID NO: 198476 - RNA, 19 nt, Artificial Sequence
  Description of Artificial Sequence: Synthetic oligonucleotide
  Sense strand starting at position 3960 of SEQ ID NO: 2556
ggaauuaaaugauggaacu

SEQ ID NO: 198477 - RNA, 19 nt, Artificial Sequence
  Description of Artificial Sequence: Synthetic oligonucleotide
  Antisense strand to SEQ ID NO: 198476
aguuccaucauuuaauucc

SEQ ID NO: 198478 - RNA, 19 nt, Artificial Sequence
  Description of Artificial Sequence: Synthetic oligonucleotide
  Sense strand starting at position 144 of SEQ ID NO: 2558
cccguuguuuccguguauu

SEQ ID NO: 198479 - RNA, 19 nt, Artificial Sequence
  Description of Artificial Sequence: Synthetic oligonucleotide
  Antisense strand to SEQ ID NO: 198478
aauacacggaaacaacggg

SEQ ID NO: 198480 - RNA, 19 nt, Artificial Sequence
  Description of Artificial Sequence: Synthetic oligonucleotide
  Sense strand starting at position 146 of SEQ ID NO: 2558
cguuguuuccguguauuga

SEQ ID NO: 198481 - RNA, 19 nt, Artificial Sequence
  Description of Artificial Sequence: Synthetic oligonucleotide
  Antisense strand to SEQ ID NO: 198480
ucaauacacggaaacaacg

SEQ ID NO: 198482 - RNA, 19 nt, Artificial Sequence
  Description of Artificial Sequence: Synthetic oligonucleotide
  Sense strand starting at position 147 of SEQ ID NO: 2558
guuguuuccguguauugac

SEQ ID NO: 198483 - RNA, 19 nt, Artificial Sequence
  Description of Artificial Sequence: Synthetic oligonucleotide
  Antisense strand to SEQ ID NO: 198482
gucaauacacggaaacaac

SEQ ID NO: 198484 - RNA, 19 nt, Artificial Sequence
  Description of Artificial Sequence: Synthetic oligonucleotide
  Sense strand starting at position 169 of SEQ ID NO: 2558
cugcucauagggcaagaau

SEQ ID NO: 198485 - RNA, 19 nt, Artificial Sequence
  Description of Artificial Sequence: Synthetic oligonucleotide
  Antisense strand to SEQ ID NO: 198484
auucuugcccuaugagcag

SEQ ID NO: 198486 - RNA, 19 nt, Artificial Sequence
  Description of Artificial Sequence: Synthetic oligonucleotide
  Sense strand starting at position 180 of SEQ ID NO: 2558
gcaagaauccuauaugguu

SEQ ID NO: 198487 - RNA, 19 nt, Artificial Sequence
  Description of Artificial Sequence: Synthetic oligonucleotide
  Antisense strand to SEQ ID NO: 198486
aaccauauaggauucuugc

SEQ ID NO: 198488 - RNA, 19 nt, Artificial Sequence
  Description of Artificial Sequence: Synthetic oligonucleotide
  Sense strand starting at position 207 of SEQ ID NO: 2558
agccaaagccuauguaguu

SEQ ID NO: 198489 - RNA, 19 nt, Artificial Sequence
  Description of Artificial Sequence: Synthetic oligonucleotide
  Antisense strand to SEQ ID NO: 198488
aacuacauaggcuuuggcu

SEQ ID NO: 198490 - RNA, 19 nt, Artificial Sequence
  Description of Artificial Sequence: Synthetic oligonucleotide
  Sense strand starting at position 274 of SEQ ID NO: 2558
uguuauucuuggccaggca

SEQ ID NO: 198491 - RNA, 19 nt, Artificial Sequence
  Description of Artificial Sequence: Synthetic oligonucleotide
  Antisense strand to SEQ ID NO: 198490
ugccuggccaagaauaaca

SEQ ID NO: 198492 - RNA, 19 nt, Artificial Sequence
  Description of Artificial Sequence: Synthetic oligonucleotide
  Sense strand starting at position 600 of SEQ ID NO: 2558
uggauauaauuaugucaca

SEQ ID NO: 198493 - RNA, 19 nt, Artificial Sequence
  Description of Artificial Sequence: Synthetic oligonucleotide
  Antisense strand to SEQ ID NO: 198492
ugugacauaauuauaucca

SEQ ID NO: 198494 - RNA, 19 nt, Artificial Sequence
  Description of Artificial Sequence: Synthetic oligonucleotide
  Sense strand starting at position 656 of SEQ ID NO: 2558
auaaaugaguacugggaca

SEQ ID NO: 198495 - RNA, 19 nt, Artificial Sequence
  Description of Artificial Sequence: Synthetic oligonucleotide
  Antisense strand to SEQ ID NO: 198494
ugucccaguacucauuuau

SEQ ID NO: 198496 - RNA, 19 nt, Artificial Sequence
  Description of Artificial Sequence: Synthetic oligonucleotide
  Sense strand starting at position 1156 of SEQ ID NO: 2558
uucuuauaacuuugagaga

SEQ ID NO: 198497 - RNA, 19 nt, Artificial Sequence
  Description of Artificial Sequence: Synthetic oligonucleotide
  Antisense strand to SEQ ID NO: 198496
ucucucaaaguuauaagaa

SEQ ID NO: 198498 - RNA, 19 nt, Artificial Sequence
  Description of Artificial Sequence: Synthetic oligonucleotide
  Sense strand starting at position 1157 of SEQ ID NO: 2558
ucuuauaacuuugagagaa

SEQ ID NO: 198499 - RNA, 19 nt, Artificial Sequence
  Description of Artificial Sequence: Synthetic oligonucleotide
  Antisense strand to SEQ ID NO: 198498
uucucucaaaguuauaaga

SEQ ID NO: 198500 - RNA, 19 nt, Artificial Sequence
  Description of Artificial Sequence: Synthetic oligonucleotide
  Sense strand starting at position 1209 of SEQ ID NO: 2558
accgauuaaugccacauau

SEQ ID NO: 198501 - RNA, 19 nt, Artificial Sequence
  Description of Artificial Sequence: Synthetic oligonucleotide
  Antisense strand to SEQ ID NO: 198500
auauguggcauuaaucggu

SEQ ID NO: 198502 - RNA, 19 nt, Artificial Sequence
  Description of Artificial Sequence: Synthetic oligonucleotide
  Sense strand starting at position 1269 of SEQ ID NO: 2558
acuuguuaggugcaacaua

SEQ ID NO: 198503 - RNA, 19 nt, Artificial Sequence
  Description of Artificial Sequence: Synthetic oligonucleotide
  Antisense strand to SEQ ID NO: 198502
uauguugcaccuaacaagu

SEQ ID NO: 198504 - RNA, 19 nt, Artificial Sequence
  Description of Artificial Sequence: Synthetic oligonucleotide
  Sense strand starting at position 1408 of SEQ ID NO: 2558
gagcuuaagucuccacaag

SEQ ID NO: 198505 - RNA, 19 nt, Artificial Sequence
  Description of Artificial Sequence: Synthetic oligonucleotide
  Antisense strand to SEQ ID NO: 198504
cuuguggagacuuaagcuc

SEQ ID NO: 198506 - RNA, 19 nt, Artificial Sequence
  Description of Artificial Sequence: Synthetic oligonucleotide
  Sense strand starting at position 1409 of SEQ ID NO: 2558
agcuuaagucuccacaaga

SEQ ID NO: 198507 - RNA, 19 nt, Artificial Sequence
  Description of Artificial Sequence: Synthetic oligonucleotide
  Antisense strand to SEQ ID NO: 198506
ucuuguggagacuuaagcu

SEQ ID NO: 198508 - RNA, 19 nt, Artificial Sequence
  Description of Artificial Sequence: Synthetic oligonucleotide
  Sense strand starting at position 1975 of SEQ ID NO: 2558
gcgugcgagacguucaaau

SEQ ID NO: 198509 - RNA, 19 nt, Artificial Sequence
  Description of Artificial Sequence: Synthetic oligonucleotide
  Antisense strand to SEQ ID NO: 198508
auuugaacgucucgcacgc

SEQ ID NO: 198510 - RNA, 19 nt, Artificial Sequence
  Description of Artificial Sequence: Synthetic oligonucleotide
  Sense strand starting at position 2199 of SEQ ID NO: 2558
cucuuuagcucaugucacu

SEQ ID NO: 198511 - RNA, 19 nt, Artificial Sequence
  Description of Artificial Sequence: Synthetic oligonucleotide
  Antisense strand to SEQ ID NO: 198510
agugacaugagcuaaagag

SEQ ID NO: 198512 - RNA, 19 nt, Artificial Sequence
  Description of Artificial Sequence: Synthetic oligonucleotide
  Sense strand starting at position 2223 of SEQ ID NO: 2558
ccugaacugccuuauagau

SEQ ID NO: 198513 - RNA, 19 nt, Artificial Sequence
  Description of Artificial Sequence: Synthetic oligonucleotide
  Antisense strand to SEQ ID NO: 198512
aucuauaaggcaguucagg

SEQ ID NO: 198514 - RNA, 19 nt, Artificial Sequence
  Description of Artificial Sequence: Synthetic oligonucleotide
  Sense strand starting at position 2225 of SEQ ID NO: 2558
ugaacugccuuauagaucu

SEQ ID NO: 198515 - RNA, 19 nt, Artificial Sequence
  Description of Artificial Sequence: Synthetic oligonucleotide
  Antisense strand to SEQ ID NO: 198514
agaucuauaaggcaguuca

SEQ ID NO: 198516 - RNA, 19 nt, Artificial Sequence
  Description of Artificial Sequence: Synthetic oligonucleotide
  Sense strand starting at position 2232 of SEQ ID NO: 2558
ccuuauagaucucaggguu

SEQ ID NO: 198517 - RNA, 19 nt, Artificial Sequence
  Description of Artificial Sequence: Synthetic oligonucleotide
  Antisense strand to SEQ ID NO: 198516
aacccugagaucuauaagg

SEQ ID NO: 198518 - RNA, 19 nt, Artificial Sequence
  Description of Artificial Sequence: Synthetic oligonucleotide
  Sense strand starting at position 2343 of SEQ ID NO: 2558
cgugcagugaaugcucuau

SEQ ID NO: 198519 - RNA, 19 nt, Artificial Sequence
  Description of Artificial Sequence: Synthetic oligonucleotide
  Antisense strand to SEQ ID NO: 198518
auagagcauucacugcacg

SEQ ID NO: 198520 - RNA, 19 nt, Artificial Sequence
  Description of Artificial Sequence: Synthetic oligonucleotide
  Sense strand starting at position 2347 of SEQ ID NO: 2558
cagugaaugcucuaugccu

SEQ ID NO: 198521 - RNA, 19 nt, Artificial Sequence
  Description of Artificial Sequence: Synthetic oligonucleotide
  Antisense strand to SEQ ID NO: 198520
aggcauagagcauucacug

SEQ ID NO: 198522 - RNA, 19 nt, Artificial Sequence
  Description of Artificial Sequence: Synthetic oligonucleotide
  Sense strand starting at position 2349 of SEQ ID NO: 2558
gugaaugcucuaugccuuu

SEQ ID NO: 198523 - RNA, 19 nt, Artificial Sequence
  Description of Artificial Sequence: Synthetic oligonucleotide
  Antisense strand to SEQ ID NO: 198522
aaaggcauagagcauucac

SEQ ID NO: 198524 - RNA, 19 nt, Artificial Sequence
  Description of Artificial Sequence: Synthetic oligonucleotide
  Sense strand starting at position 2371 of SEQ ID NO: 2558
gguccauacucuucgaaga

SEQ ID NO: 198525 - RNA, 19 nt, Artificial Sequence
  Description of Artificial Sequence: Synthetic oligonucleotide
  Antisense strand to SEQ ID NO: 198524
ucuucgaagaguauggacc

SEQ ID NO: 198526 - RNA, 19 nt, Artificial Sequence
  Description of Artificial Sequence: Synthetic oligonucleotide
  Sense strand starting at position 2372 of SEQ ID NO: 2558
guccauacucuucgaagag

SEQ ID NO: 198527 - RNA, 19 nt, Artificial Sequence
  Description of Artificial Sequence: Synthetic oligonucleotide
  Antisense strand to SEQ ID NO: 198526
cucuucgaagaguauggac

SEQ ID NO: 198528 - RNA, 19 nt, Artificial Sequence
  Description of Artificial Sequence: Synthetic oligonucleotide
  Sense strand starting at position 2373 of SEQ ID NO: 2558
uccauacucuucgaagagu

SEQ ID NO: 198529 - RNA, 19 nt, Artificial Sequence
  Description of Artificial Sequence: Synthetic oligonucleotide
  Antisense strand to SEQ ID NO: 198528
acucuucgaagaguaugga

SEQ ID NO: 198530 - RNA, 19 nt, Artificial Sequence
  Description of Artificial Sequence: Synthetic oligonucleotide
  Sense strand starting at position 2390 of SEQ ID NO: 2558
guggaugaacugugugaag

SEQ ID NO: 198531 - RNA, 19 nt, Artificial Sequence
  Description of Artificial Sequence: Synthetic oligonucleotide
  Antisense strand to SEQ ID NO: 198530
cuucacacaguucauccac

SEQ ID NO: 198532 - RNA, 19 nt, Artificial Sequence
  Description of Artificial Sequence: Synthetic oligonucleotide
  Sense strand starting at position 2392 of SEQ ID NO: 2558
ggaugaacugugugaaggu

SEQ ID NO: 198533 - RNA, 19 nt, Artificial Sequence
  Description of Artificial Sequence: Synthetic oligonucleotide
  Antisense strand to SEQ ID NO: 198532
accuucacacaguucaucc

SEQ ID NO: 198534 - RNA, 19 nt, Artificial Sequence
  Description of Artificial Sequence: Synthetic oligonucleotide
  Sense strand starting at position 2401 of SEQ ID NO: 2558
gugugaagguccucacaga

SEQ ID NO: 198535 - RNA, 19 nt, Artificial Sequence
  Description of Artificial Sequence: Synthetic oligonucleotide
  Antisense strand to SEQ ID NO: 198534
ucugugaggaccuucacac

SEQ ID NO: 198536 - RNA, 19 nt, Artificial Sequence
  Description of Artificial Sequence: Synthetic oligonucleotide
  Sense strand starting at position 2415 of SEQ ID NO: 2558
acagaaacguugcuugcaa

SEQ ID NO: 198537 - RNA, 19 nt, Artificial Sequence
  Description of Artificial Sequence: Synthetic oligonucleotide
  Antisense strand to SEQ ID NO: 198536
uugcaagcaacguuucugu

SEQ ID NO: 198538 - RNA, 19 nt, Artificial Sequence
  Description of Artificial Sequence: Synthetic oligonucleotide
  Sense strand starting at position 2416 of SEQ ID NO: 2558
cagaaacguugcuugcaau

SEQ ID NO: 198539 - RNA, 19 nt, Artificial Sequence
  Description of Artificial Sequence: Synthetic oligonucleotide
  Antisense strand to SEQ ID NO: 198538
auugcaagcaacguuucug

SEQ ID NO: 198540 - RNA, 19 nt, Artificial Sequence
  Description of Artificial Sequence: Synthetic oligonucleotide
  Sense strand starting at position 2417 of SEQ ID NO: 2558
agaaacguugcuugcaauu

SEQ ID NO: 198541 - RNA, 19 nt, Artificial Sequence
  Description of Artificial Sequence: Synthetic oligonucleotide
  Antisense strand to SEQ ID NO: 198540
aauugcaagcaacguuucu

SEQ ID NO: 198542 - RNA, 19 nt, Artificial Sequence
  Description of Artificial Sequence: Synthetic oligonucleotide
  Sense strand starting at position 2448 of SEQ ID NO: 2558
gacacuucuuaaggcgauu

SEQ ID NO: 198543 - RNA, 19 nt, Artificial Sequence
  Description of Artificial Sequence: Synthetic oligonucleotide
  Antisense strand to SEQ ID NO: 198542
aaucgccuuaagaaguguc

SEQ ID NO: 198544 - RNA, 19 nt, Artificial Sequence
  Description of Artificial Sequence: Synthetic oligonucleotide
  Sense strand starting at position 2493 of SEQ ID NO: 2558
ggccacucgcgccuguaau

SEQ ID NO: 198545 - RNA, 19 nt, Artificial Sequence
  Description of Artificial Sequence: Synthetic oligonucleotide
  Antisense strand to SEQ ID NO: 198544
auuacaggcgcgaguggcc

SEQ ID NO: 198546 - RNA, 19 nt, Artificial Sequence
  Description of Artificial Sequence: Synthetic oligonucleotide
  Sense strand starting at position 2783 of SEQ ID NO: 2558
aagaauggguuauaggaga

SEQ ID NO: 198547 - RNA, 19 nt, Artificial Sequence
  Description of Artificial Sequence: Synthetic oligonucleotide
  Antisense strand to SEQ ID NO: 198546
ucuccuauaacccauucuu

SEQ ID NO: 198548 - RNA, 19 nt, Artificial Sequence
  Description of Artificial Sequence: Synthetic oligonucleotide
  Sense strand starting at position 2797 of SEQ ID NO: 2558
ggagaaagguuagaaacaa

SEQ ID NO: 198549 - RNA, 19 nt, Artificial Sequence
  Description of Artificial Sequence: Synthetic oligonucleotide
  Antisense strand to SEQ ID NO: 198548
uuguuucuaaccuuucucc

SEQ ID NO: 198550 - RNA, 19 nt, Artificial Sequence
  Description of Artificial Sequence: Synthetic oligonucleotide
  Sense strand starting at position 834 of SEQ ID NO: 2559
guaguaagacucuguucca

SEQ ID NO: 198551 - RNA, 19 nt, Artificial Sequence
  Description of Artificial Sequence: Synthetic oligonucleotide
  Antisense strand to SEQ ID NO: 198550
uggaacagagucuuacuac

SEQ ID NO: 198552 - RNA, 19 nt, Artificial Sequence
  Description of Artificial Sequence: Synthetic oligonucleotide
  Sense strand starting at position 878 of SEQ ID NO: 2559
guguuaaauucucuuaccu

SEQ ID NO: 198553 - RNA, 19 nt, Artificial Sequence
  Description of Artificial Sequence: Synthetic oligonucleotide
  Antisense strand to SEQ ID NO: 198552
agguaagagaauuuaacac

SEQ ID NO: 198554 - RNA, 19 nt, Artificial Sequence
  Description of Artificial Sequence: Synthetic oligonucleotide
  Sense strand starting at position 1521 of SEQ ID NO: 2559
uuugaagcuucugcaauga

SEQ ID NO: 198555 - RNA, 19 nt, Artificial Sequence
  Description of Artificial Sequence: Synthetic oligonucleotide
  Antisense strand to SEQ ID NO: 198554
ucauugcagaagcuucaaa

SEQ ID NO: 198556 - RNA, 19 nt, Artificial Sequence
  Description of Artificial Sequence: Synthetic oligonucleotide
  Sense strand starting at position 1568 of SEQ ID NO: 2559
cugacaugccaaugaaacu

SEQ ID NO: 198557 - RNA, 19 nt, Artificial Sequence
  Description of Artificial Sequence: Synthetic oligonucleotide
  Antisense strand to SEQ ID NO: 198556
aguuucauuggcaugucag

SEQ ID NO: 198558 - RNA, 19 nt, Artificial Sequence
  Description of Artificial Sequence: Synthetic oligonucleotide
  Sense strand starting at position 1640 of SEQ ID NO: 2559
auggucaaccauuauaguu

SEQ ID NO: 198559 - RNA, 19 nt, Artificial Sequence
  Description of Artificial Sequence: Synthetic oligonucleotide
  Antisense strand to SEQ ID NO: 198558
aacuauaaugguugaccau

SEQ ID NO: 198560 - RNA, 19 nt, Artificial Sequence
  Description of Artificial Sequence: Synthetic oligonucleotide
  Sense strand starting at position 1770 of SEQ ID NO: 2559
caagaagauguaugucaaa

SEQ ID NO: 198561 - RNA, 19 nt, Artificial Sequence
  Description of Artificial Sequence: Synthetic oligonucleotide
  Antisense strand to SEQ ID NO: 198560
uuugacauacaucuucuug

SEQ ID NO: 198562 - RNA, 19 nt, Artificial Sequence
  Description of Artificial Sequence: Synthetic oligonucleotide
  Sense strand starting at position 1794 of SEQ ID NO: 2559
acguuaaguuuaucuguga

SEQ ID NO: 198563 - RNA, 19 nt, Artificial Sequence
  Description of Artificial Sequence: Synthetic oligonucleotide
  Antisense strand to SEQ ID NO: 198562
ucacagauaaacuuaacgu

SEQ ID NO: 198564 - RNA, 19 nt, Artificial Sequence
  Description of Artificial Sequence: Synthetic oligonucleotide
  Sense strand starting at position 1797 of SEQ ID NO: 2559
uuaaguuuaucugugagaa

SEQ ID NO: 198565 - RNA, 19 nt, Artificial Sequence
  Description of Artificial Sequence: Synthetic oligonucleotide
  Antisense strand to SEQ ID NO: 198564
uucucacagauaaacuuaa

SEQ ID NO: 198566 - RNA, 19 nt, Artificial Sequence
  Description of Artificial Sequence: Synthetic oligonucleotide
  Sense strand starting at position 1798 of SEQ ID NO: 2559
uaaguuuaucugugagaag

SEQ ID NO: 198567 - RNA, 19 nt, Artificial Sequence
  Description of Artificial Sequence: Synthetic oligonucleotide
  Antisense strand to SEQ ID NO: 198566
cuucucacagauaaacuua

SEQ ID NO: 198568 - RNA, 19 nt, Artificial Sequence
  Description of Artificial Sequence: Synthetic oligonucleotide
  Sense strand starting at position 1835 of SEQ ID NO: 2559
uuuguuguuggagaggcau

SEQ ID NO: 198569 - RNA, 19 nt, Artificial Sequence
  Description of Artificial Sequence: Synthetic oligonucleotide
  Antisense strand to SEQ ID NO: 198568
augccucuccaacaacaaa

SEQ ID NO: 198570 - RNA, 19 nt, Artificial Sequence
  Description of Artificial Sequence: Synthetic oligonucleotide
  Sense strand starting at position 1857 of SEQ ID NO: 2559
uuuguauauguucguguua

SEQ ID NO: 198571 - RNA, 19 nt, Artificial Sequence
  Description of Artificial Sequence: Synthetic oligonucleotide
  Antisense strand to SEQ ID NO: 198570
uaacacgaacauauacaaa

SEQ ID NO: 198572 - RNA, 19 nt, Artificial Sequence
  Description of Artificial Sequence: Synthetic oligonucleotide
  Sense strand starting at position 1858 of SEQ ID NO: 2559
uuguauauguucguguuag

SEQ ID NO: 198573 - RNA, 19 nt, Artificial Sequence
  Description of Artificial Sequence: Synthetic oligonucleotide
  Antisense strand to SEQ ID NO: 198572
cuaacacgaacauauacaa

SEQ ID NO: 198574 - RNA, 19 nt, Artificial Sequence
  Description of Artificial Sequence: Synthetic oligonucleotide
  Sense strand starting at position 1860 of SEQ ID NO: 2559
guauauguucguguuaguc

SEQ ID NO: 198575 - RNA, 19 nt, Artificial Sequence
  Description of Artificial Sequence: Synthetic oligonucleotide
  Antisense strand to SEQ ID NO: 198574
gacuaacacgaacauauac

SEQ ID NO: 198576 - RNA, 19 nt, Artificial Sequence
  Description of Artificial Sequence: Synthetic oligonucleotide
  Sense strand starting at position 1869 of SEQ ID NO: 2559
cguguuagucuguuugugu

SEQ ID NO: 198577 - RNA, 19 nt, Artificial Sequence
  Description of Artificial Sequence: Synthetic oligonucleotide
  Antisense strand to SEQ ID NO: 198576
acacaaacagacuaacacg

SEQ ID NO: 198578 - RNA, 19 nt, Artificial Sequence
  Description of Artificial Sequence: Synthetic oligonucleotide
  Sense strand starting at position 2081 of SEQ ID NO: 2559
ggaggugucuacucuuaaa

SEQ ID NO: 198579 - RNA, 19 nt, Artificial Sequence
  Description of Artificial Sequence: Synthetic oligonucleotide
  Antisense strand to SEQ ID NO: 198578
uuuaagaguagacaccucc

SEQ ID NO: 198580 - RNA, 19 nt, Artificial Sequence
  Description of Artificial Sequence: Synthetic oligonucleotide
  Sense strand starting at position 2084 of SEQ ID NO: 2559
ggugucuacucuuaaacaa

SEQ ID NO: 198581 - RNA, 19 nt, Artificial Sequence
  Description of Artificial Sequence: Synthetic oligonucleotide
  Antisense strand to SEQ ID NO: 198580
uuguuuaagaguagacacc

SEQ ID NO: 198582 - RNA, 19 nt, Artificial Sequence
  Description of Artificial Sequence: Synthetic oligonucleotide
  Sense strand starting at position 2115 of SEQ ID NO: 2559
ugagcucagagguagaguu

SEQ ID NO: 198583 - RNA, 19 nt, Artificial Sequence
  Description of Artificial Sequence: Synthetic oligonucleotide
  Antisense strand to SEQ ID NO: 198582
aacucuaccucugagcuca

SEQ ID NO: 198584 - RNA, 19 nt, Artificial Sequence
  Description of Artificial Sequence: Synthetic oligonucleotide
  Sense strand starting at position 2474 of SEQ ID NO: 2559
gccaaacguggucguacau

SEQ ID NO: 198585 - RNA, 19 nt, Artificial Sequence
  Description of Artificial Sequence: Synthetic oligonucleotide
  Antisense strand to SEQ ID NO: 198584
auguacgaccacguuuggc

SEQ ID NO: 198586 - RNA, 19 nt, Artificial Sequence
  Description of Artificial Sequence: Synthetic oligonucleotide
  Sense strand starting at position 2486 of SEQ ID NO: 2559
cguacaugccuguaaucuc

SEQ ID NO: 198587 - RNA, 19 nt, Artificial Sequence
  Description of Artificial Sequence: Synthetic oligonucleotide
  Antisense strand to SEQ ID NO: 198586
gagauuacaggcauguacg

SEQ ID NO: 198588 - RNA, 19 nt, Artificial Sequence
  Description of Artificial Sequence: Synthetic oligonucleotide
  Sense strand starting at position 2656 of SEQ ID NO: 2559
gccaaugaaugccugucua

SEQ ID NO: 198589 - RNA, 19 nt, Artificial Sequence
  Description of Artificial Sequence: Synthetic oligonucleotide
  Antisense strand to SEQ ID NO: 198588
uagacaggcauucauuggc

SEQ ID NO: 198590 - RNA, 19 nt, Artificial Sequence
  Description of Artificial Sequence: Synthetic oligonucleotide
  Sense strand starting at position 2664 of SEQ ID NO: 2559
augccugucuauuccugaa

SEQ ID NO: 198591 - RNA, 19 nt, Artificial Sequence
  Description of Artificial Sequence: Synthetic oligonucleotide
  Antisense strand to SEQ ID NO: 198590
uucaggaauagacaggcau

SEQ ID NO: 198592 - RNA, 19 nt, Artificial Sequence
  Description of Artificial Sequence: Synthetic oligonucleotide
  Sense strand starting at position 2666 of SEQ ID NO: 2559
gccugucuauuccugaaau

SEQ ID NO: 198593 - RNA, 19 nt, Artificial Sequence
  Description of Artificial Sequence: Synthetic oligonucleotide
  Antisense strand to SEQ ID NO: 198592
auuucaggaauagacaggc

SEQ ID NO: 198594 - RNA, 19 nt, Artificial Sequence
  Description of Artificial Sequence: Synthetic oligonucleotide
  Sense strand starting at position 2705 of SEQ ID NO: 2559
uuuauugagccagguucuu

SEQ ID NO: 198595 - RNA, 19 nt, Artificial Sequence
  Description of Artificial Sequence: Synthetic oligonucleotide
  Antisense strand to SEQ ID NO: 198594
aagaaccuggcucaauaaa

SEQ ID NO: 198596 - RNA, 19 nt, Artificial Sequence
  Description of Artificial Sequence: Synthetic oligonucleotide
  Sense strand starting at position 2710 of SEQ ID NO: 2559
ugagccagguucuuuacua

SEQ ID NO: 198597 - RNA, 19 nt, Artificial Sequence
  Description of Artificial Sequence: Synthetic oligonucleotide
  Antisense strand to SEQ ID NO: 198596
uaguaaagaaccuggcuca

SEQ ID NO: 198598 - RNA, 19 nt, Artificial Sequence
  Description of Artificial Sequence: Synthetic oligonucleotide
  Sense strand starting at position 2711 of SEQ ID NO: 2559
gagccagguucuuuacuau

SEQ ID NO: 198599 - RNA, 19 nt, Artificial Sequence
  Description of Artificial Sequence: Synthetic oligonucleotide
  Antisense strand to SEQ ID NO: 198598
auaguaaagaaccuggcuc

SEQ ID NO: 198600 - RNA, 19 nt, Artificial Sequence
  Description of Artificial Sequence: Synthetic oligonucleotide
  Sense strand starting at position 2714 of SEQ ID NO: 2559
ccagguucuuuacuauaua

SEQ ID NO: 198601 - RNA, 19 nt, Artificial Sequence
  Description of Artificial Sequence: Synthetic oligonucleotide
  Antisense strand to SEQ ID NO: 198600
uauauaguaaagaaccugg

SEQ ID NO: 198602 - RNA, 19 nt, Artificial Sequence
  Description of Artificial Sequence: Synthetic oligonucleotide
  Sense strand starting at position 2717 of SEQ ID NO: 2559
gguucuuuacuauauaaug

SEQ ID NO: 198603 - RNA, 19 nt, Artificial Sequence
  Description of Artificial Sequence: Synthetic oligonucleotide
  Antisense strand to SEQ ID NO: 198602
cauuauauaguaaagaacc

SEQ ID NO: 198604 - RNA, 19 nt, Artificial Sequence
  Description of Artificial Sequence: Synthetic oligonucleotide
  Sense strand starting at position 2748 of SEQ ID NO: 2559
ucaucugauuggucucuau

SEQ ID NO: 198605 - RNA, 19 nt, Artificial Sequence
  Description of Artificial Sequence: Synthetic oligonucleotide
  Antisense strand to SEQ ID NO: 198604
auagagaccaaucagauga

SEQ ID NO: 198606 - RNA, 19 nt, Artificial Sequence
  Description of Artificial Sequence: Synthetic oligonucleotide
  Sense strand starting at position 2751 of SEQ ID NO: 2559
ucugauuggucucuauuau

SEQ ID NO: 198607 - RNA, 19 nt, Artificial Sequence
  Description of Artificial Sequence: Synthetic oligonucleotide
  Antisense strand to SEQ ID NO: 198606
auaauagagaccaaucaga

SEQ ID NO: 198608 - RNA, 19 nt, Artificial Sequence
  Description of Artificial Sequence: Synthetic oligonucleotide
  Sense strand starting at position 2752 of SEQ ID NO: 2559
cugauuggucucuauuaua

SEQ ID NO: 198609 - RNA, 19 nt, Artificial Sequence
  Description of Artificial Sequence: Synthetic oligonucleotide
  Antisense strand to SEQ ID NO: 198608
uauaauagagaccaaucag

SEQ ID NO: 198610 - RNA, 19 nt, Artificial Sequence
  Description of Artificial Sequence: Synthetic oligonucleotide
  Sense strand starting at position 2755 of SEQ ID NO: 2559
auuggucucuauuauauag

SEQ ID NO: 198611 - RNA, 19 nt, Artificial Sequence
  Description of Artificial Sequence: Synthetic oligonucleotide
  Antisense strand to SEQ ID NO: 198610
cuauauaauagagaccaau

SEQ ID NO: 198612 - RNA, 19 nt, Artificial Sequence
  Description of Artificial Sequence: Synthetic oligonucleotide
  Sense strand starting at position 2765 of SEQ ID NO: 2559
auuauauagugguucucaa

SEQ ID NO: 198613 - RNA, 19 nt, Artificial Sequence
  Description of Artificial Sequence: Synthetic oligonucleotide
  Antisense strand to SEQ ID NO: 198612
uugagaaccacuauauaau

SEQ ID NO: 198614 - RNA, 19 nt, Artificial Sequence
  Description of Artificial Sequence: Synthetic oligonucleotide
  Sense strand starting at position 2893 of SEQ ID NO: 2559
uuaguaaaguuacaggaaa

SEQ ID NO: 198615 - RNA, 19 nt, Artificial Sequence
  Description of Artificial Sequence: Synthetic oligonucleotide
  Antisense strand to SEQ ID NO: 198614
uuuccuguaacuuuacuaa

SEQ ID NO: 198616 - RNA, 19 nt, Artificial Sequence
  Description of Artificial Sequence: Synthetic oligonucleotide
  Sense strand starting at position 2958 of SEQ ID NO: 2559
ugagucagaccuuguuaug

SEQ ID NO: 198617 - RNA, 19 nt, Artificial Sequence
  Description of Artificial Sequence: Synthetic oligonucleotide
  Antisense strand to SEQ ID NO: 198616
cauaacaaggucugacuca

SEQ ID NO: 198618 - RNA, 19 nt, Artificial Sequence
  Description of Artificial Sequence: Synthetic oligonucleotide
  Sense strand starting at position 2967 of SEQ ID NO: 2559
ccuuguuaugcccacuuua

SEQ ID NO: 198619 - RNA, 19 nt, Artificial Sequence
  Description of Artificial Sequence: Synthetic oligonucleotide
  Antisense strand to SEQ ID NO: 198618
uaaagugggcauaacaagg

SEQ ID NO: 198620 - RNA, 19 nt, Artificial Sequence
  Description of Artificial Sequence: Synthetic oligonucleotide
  Sense strand starting at position 3014 of SEQ ID NO: 2559
gcaggacaagucugagguu

SEQ ID NO: 198621 - RNA, 19 nt, Artificial Sequence
  Description of Artificial Sequence: Synthetic oligonucleotide
  Antisense strand to SEQ ID NO: 198620
aaccucagacuuguccugc

SEQ ID NO: 198622 - RNA, 19 nt, Artificial Sequence
  Description of Artificial Sequence: Synthetic oligonucleotide
  Sense strand starting at position 3015 of SEQ ID NO: 2559
caggacaagucugagguuu

SEQ ID NO: 198623 - RNA, 19 nt, Artificial Sequence
  Description of Artificial Sequence: Synthetic oligonucleotide
  Antisense strand to SEQ ID NO: 198622
aaaccucagacuuguccug

SEQ ID NO: 198624 - RNA, 19 nt, Artificial Sequence
  Description of Artificial Sequence: Synthetic oligonucleotide
  Sense strand starting at position 3677 of SEQ ID NO: 2559
gcagucccgaguuggaaua

SEQ ID NO: 198625 - RNA, 19 nt, Artificial Sequence
  Description of Artificial Sequence: Synthetic oligonucleotide
  Antisense strand to SEQ ID NO: 198624
uauuccaacucgggacugc

SEQ ID NO: 198626 - RNA, 19 nt, Artificial Sequence
  Description of Artificial Sequence: Synthetic oligonucleotide
  Sense strand starting at position 3734 of SEQ ID NO: 2559
uggaacaccuauuaugagu

SEQ ID NO: 198627 - RNA, 19 nt, Artificial Sequence
  Description of Artificial Sequence: Synthetic oligonucleotide
  Antisense strand to SEQ ID NO: 198626
acucauaauagguguucca

SEQ ID NO: 198628 - RNA, 19 nt, Artificial Sequence
  Description of Artificial Sequence: Synthetic oligonucleotide
  Sense strand starting at position 3810 of SEQ ID NO: 2559
ggagcuuacaguugaacag

SEQ ID NO: 198629 - RNA, 19 nt, Artificial Sequence
  Description of Artificial Sequence: Synthetic oligonucleotide
  Antisense strand to SEQ ID NO: 198628
cuguucaacuguaagcucc

SEQ ID NO: 198630 - RNA, 19 nt, Artificial Sequence
  Description of Artificial Sequence: Synthetic oligonucleotide
  Sense strand starting at position 306 of SEQ ID NO: 2560
gcgagauccgcucucuuau

SEQ ID NO: 198631 - RNA, 19 nt, Artificial Sequence
  Description of Artificial Sequence: Synthetic oligonucleotide
  Antisense strand to SEQ ID NO: 198630
auaagagagcggaucucgc

SEQ ID NO: 198632 - RNA, 19 nt, Artificial Sequence
  Description of Artificial Sequence: Synthetic oligonucleotide
  Sense strand starting at position 312 of SEQ ID NO: 2560
uccgcucucuuaucuguaa

SEQ ID NO: 198633 - RNA, 19 nt, Artificial Sequence
  Description of Artificial Sequence: Synthetic oligonucleotide
  Antisense strand to SEQ ID NO: 198632
uuacagauaagagagcgga

SEQ ID NO: 198634 - RNA, 19 nt, Artificial Sequence
  Description of Artificial Sequence: Synthetic oligonucleotide
  Sense strand starting at position 413 of SEQ ID NO: 2560
accaguuacucuccgauaa

SEQ ID NO: 198635 - RNA, 19 nt, Artificial Sequence
  Description of Artificial Sequence: Synthetic oligonucleotide
  Antisense strand to SEQ ID NO: 198634
uuaucggagaguaacuggu

SEQ ID NO: 198636 - RNA, 19 nt, Artificial Sequence
  Description of Artificial Sequence: Synthetic oligonucleotide
  Sense strand starting at position 414 of SEQ ID NO: 2560
ccaguuacucuccgauaag

SEQ ID NO: 198637 - RNA, 19 nt, Artificial Sequence
  Description of Artificial Sequence: Synthetic oligonucleotide
  Antisense strand to SEQ ID NO: 198636
cuuaucggagaguaacugg

SEQ ID NO: 198638 - RNA, 19 nt, Artificial Sequence
  Description of Artificial Sequence: Synthetic oligonucleotide
  Sense strand starting at position 417 of SEQ ID NO: 2560
guuacucuccgauaaguua

SEQ ID NO: 198639 - RNA, 19 nt, Artificial Sequence
  Description of Artificial Sequence: Synthetic oligonucleotide
  Antisense strand to SEQ ID NO: 198638
uaacuuaucggagaguaac

SEQ ID NO: 198640 - RNA, 19 nt, Artificial Sequence
  Description of Artificial Sequence: Synthetic oligonucleotide
  Sense strand starting at position 547 of SEQ ID NO: 2560
cagaucuaagugugcucaa

SEQ ID NO: 198641 - RNA, 19 nt, Artificial Sequence
  Description of Artificial Sequence: Synthetic oligonucleotide
  Antisense strand to SEQ ID NO: 198640
uugagcacacuuagaucug

SEQ ID NO: 198642 - RNA, 19 nt, Artificial Sequence
  Description of Artificial Sequence: Synthetic oligonucleotide
  Sense strand starting at position 548 of SEQ ID NO: 2560
agaucuaagugugcucaau

SEQ ID NO: 198643 - RNA, 19 nt, Artificial Sequence
  Description of Artificial Sequence: Synthetic oligonucleotide
  Antisense strand to SEQ ID NO: 198642
auugagcacacuuagaucu

SEQ ID NO: 198644 - RNA, 19 nt, Artificial Sequence
  Description of Artificial Sequence: Synthetic oligonucleotide
  Sense strand starting at position 550 of SEQ ID NO: 2560
aucuaagugugcucaauaa

SEQ ID NO: 198645 - RNA, 19 nt, Artificial Sequence
  Description of Artificial Sequence: Synthetic oligonucleotide
  Antisense strand to SEQ ID NO: 198644
uuauugagcacacuuagau

SEQ ID NO: 198646 - RNA, 19 nt, Artificial Sequence
  Description of Artificial Sequence: Synthetic oligonucleotide
  Sense strand starting at position 554 of SEQ ID NO: 2560
aagugugcucaauaaacag

SEQ ID NO: 198647 - RNA, 19 nt, Artificial Sequence
  Description of Artificial Sequence: Synthetic oligonucleotide
  Antisense strand to SEQ ID NO: 198646
cuguuuauugagcacacuu

SEQ ID NO: 198648 - RNA, 19 nt, Artificial Sequence
  Description of Artificial Sequence: Synthetic oligonucleotide
  Sense strand starting at position 853 of SEQ ID NO: 2560
acaacagagcugugaagau

SEQ ID NO: 198649 - RNA, 19 nt, Artificial Sequence
  Description of Artificial Sequence: Synthetic oligonucleotide
  Antisense strand to SEQ ID NO: 198648
aucuucacagcucuguugu

SEQ ID NO: 198650 - RNA, 19 nt, Artificial Sequence
  Description of Artificial Sequence: Synthetic oligonucleotide
  Sense strand starting at position 966 of SEQ ID NO: 2560
augagaagguuccaauuac

SEQ ID NO: 198651 - RNA, 19 nt, Artificial Sequence
  Description of Artificial Sequence: Synthetic oligonucleotide
  Antisense strand to SEQ ID NO: 198650
guaauuggaaccuucucau

SEQ ID NO: 198652 - RNA, 19 nt, Artificial Sequence
  Description of Artificial Sequence: Synthetic oligonucleotide
  Sense strand starting at position 1047 of SEQ ID NO: 2560
gaaacuaguuucucaggga

SEQ ID NO: 198653 - RNA, 19 nt, Artificial Sequence
  Description of Artificial Sequence: Synthetic oligonucleotide
  Antisense strand to SEQ ID NO: 198652
ucccugagaaacuaguuuc

SEQ ID NO: 198654 - RNA, 19 nt, Artificial Sequence
  Description of Artificial Sequence: Synthetic oligonucleotide
  Sense strand starting at position 1051 of SEQ ID NO: 2560
cuaguuucucagggaguaa

SEQ ID NO: 198655 - RNA, 19 nt, Artificial Sequence
  Description of Artificial Sequence: Synthetic oligonucleotide
  Antisense strand to SEQ ID NO: 198654
uuacucccugagaaacuag

SEQ ID NO: 198656 - RNA, 19 nt, Artificial Sequence
  Description of Artificial Sequence: Synthetic oligonucleotide
  Sense strand starting at position 1165 of SEQ ID NO: 2560
gcaccuuguggcgaagaca

SEQ ID NO: 198657 - RNA, 19 nt, Artificial Sequence
  Description of Artificial Sequence: Synthetic oligonucleotide
  Antisense strand to SEQ ID NO: 198656
ugucuucgccacaaggugc

SEQ ID NO: 198658 - RNA, 19 nt, Artificial Sequence
  Description of Artificial Sequence: Synthetic oligonucleotide
  Sense strand starting at position 1182 of SEQ ID NO: 2560
cagcguaguucuucaggga

SEQ ID NO: 198659 - RNA, 19 nt, Artificial Sequence
  Description of Artificial Sequence: Synthetic oligonucleotide
  Antisense strand to SEQ ID NO: 198658
ucccugaagaacuacgcug

SEQ ID NO: 198660 - RNA, 19 nt, Artificial Sequence
  Description of Artificial Sequence: Synthetic oligonucleotide
  Sense strand starting at position 1271 of SEQ ID NO: 2560
gagacuucguccucuaagc

SEQ ID NO: 198661 - RNA, 19 nt, Artificial Sequence
  Description of Artificial Sequence: Synthetic oligonucleotide
  Antisense strand to SEQ ID NO: 198660
gcuuagaggacgaagucuc

SEQ ID NO: 198662 - RNA, 19 nt, Artificial Sequence
  Description of Artificial Sequence: Synthetic oligonucleotide
  Sense strand starting at position 1273 of SEQ ID NO: 2560
gacuucguccucuaagcua

SEQ ID NO: 198663 - RNA, 19 nt, Artificial Sequence
  Description of Artificial Sequence: Synthetic oligonucleotide
  Antisense strand to SEQ ID NO: 198662
uagcuuagaggacgaaguc

SEQ ID NO: 198664 - RNA, 19 nt, Artificial Sequence
  Description of Artificial Sequence: Synthetic oligonucleotide
  Sense strand starting at position 1976 of SEQ ID NO: 2560
ucgcguuucccuggagaca

SEQ ID NO: 198665 - RNA, 19 nt, Artificial Sequence
  Description of Artificial Sequence: Synthetic oligonucleotide
  Antisense strand to SEQ ID NO: 198664
ugucuccagggaaacgcga

SEQ ID NO: 198666 - RNA, 19 nt, Artificial Sequence
  Description of Artificial Sequence: Synthetic oligonucleotide
  Sense strand starting at position 2174 of SEQ ID NO: 2560
gagagaaagcgcuaaauuc

SEQ ID NO: 198667 - RNA, 19 nt, Artificial Sequence
  Description of Artificial Sequence: Synthetic oligonucleotide
  Antisense strand to SEQ ID NO: 198666
gaauuuagcgcuuucucuc

SEQ ID NO: 198668 - RNA, 19 nt, Artificial Sequence
  Description of Artificial Sequence: Synthetic oligonucleotide
  Sense strand starting at position 2513 of SEQ ID NO: 2560
gcaggagcucuccaggcua

SEQ ID NO: 198669 - RNA, 19 nt, Artificial Sequence
  Description of Artificial Sequence: Synthetic oligonucleotide
  Antisense strand to SEQ ID NO: 198668
uagccuggagagcuccugc

SEQ ID NO: 198670 - RNA, 19 nt, Artificial Sequence
  Description of Artificial Sequence: Synthetic oligonucleotide
  Sense strand starting at position 3047 of SEQ ID NO: 2560
agcacauucugguuacacu

SEQ ID NO: 198671 - RNA, 19 nt, Artificial Sequence
  Description of Artificial Sequence: Synthetic oligonucleotide
  Antisense strand to SEQ ID NO: 198670
aguguaaccagaaugugcu

SEQ ID NO: 198672 - RNA, 19 nt, Artificial Sequence
  Description of Artificial Sequence: Synthetic oligonucleotide
  Sense strand starting at position 3105 of SEQ ID NO: 2560
ccagacuaaguguggcaau

SEQ ID NO: 198673 - RNA, 19 nt, Artificial Sequence
  Description of Artificial Sequence: Synthetic oligonucleotide
  Antisense strand to SEQ ID NO: 198672
auugccacacuuagucugg

SEQ ID NO: 198674 - RNA, 19 nt, Artificial Sequence
  Description of Artificial Sequence: Synthetic oligonucleotide
  Sense strand starting at position 3130 of SEQ ID NO: 2560
cagagacacuuaggaugaa

SEQ ID NO: 198675 - RNA, 19 nt, Artificial Sequence
  Description of Artificial Sequence: Synthetic oligonucleotide
  Antisense strand to SEQ ID NO: 198674
uucauccuaagugucucug

SEQ ID NO: 198676 - RNA, 19 nt, Artificial Sequence
  Description of Artificial Sequence: Synthetic oligonucleotide
  Sense strand starting at position 3131 of SEQ ID NO: 2560
agagacacuuaggaugaau

SEQ ID NO: 198677 - RNA, 19 nt, Artificial Sequence
  Description of Artificial Sequence: Synthetic oligonucleotide
  Antisense strand to SEQ ID NO: 198676
auucauccuaagugucucu

SEQ ID NO: 198678 - RNA, 19 nt, Artificial Sequence
  Description of Artificial Sequence: Synthetic oligonucleotide
  Sense strand starting at position 3180 of SEQ ID NO: 2560
ggagcaugaugguucaagu

SEQ ID NO: 198679 - RNA, 19 nt, Artificial Sequence
  Description of Artificial Sequence: Synthetic oligonucleotide
  Antisense strand to SEQ ID NO: 198678
acuugaaccaucaugcucc

SEQ ID NO: 198680 - RNA, 19 nt, Artificial Sequence
  Description of Artificial Sequence: Synthetic oligonucleotide
  Sense strand starting at position 3239 of SEQ ID NO: 2560
aaccguaaagggugaugau

SEQ ID NO: 198681 - RNA, 19 nt, Artificial Sequence
  Description of Artificial Sequence: Synthetic oligonucleotide
  Antisense strand to SEQ ID NO: 198680
aucaucacccuuuacgguu

SEQ ID NO: 198682 - RNA, 19 nt, Artificial Sequence
  Description of Artificial Sequence: Synthetic oligonucleotide
  Sense strand starting at position 3383 of SEQ ID NO: 2560
cccuuauggccaugagaga

SEQ ID NO: 198683 - RNA, 19 nt, Artificial Sequence
  Description of Artificial Sequence: Synthetic oligonucleotide
  Antisense strand to SEQ ID NO: 198682
ucucucauggccauaaggg

SEQ ID NO: 198684 - RNA, 19 nt, Artificial Sequence
  Description of Artificial Sequence: Synthetic oligonucleotide
  Sense strand starting at position 3452 of SEQ ID NO: 2560
agcucauucccagagcagu

SEQ ID NO: 198685 - RNA, 19 nt, Artificial Sequence
  Description of Artificial Sequence: Synthetic oligonucleotide
  Antisense strand to SEQ ID NO: 198684
acugcucugggaaugagcu

SEQ ID NO: 198686 - RNA, 19 nt, Artificial Sequence
  Description of Artificial Sequence: Synthetic oligonucleotide
  Sense strand starting at position 3638 of SEQ ID NO: 2560
gugggaaacagaugcugau

SEQ ID NO: 198687 - RNA, 19 nt, Artificial Sequence
  Description of Artificial Sequence: Synthetic oligonucleotide
  Antisense strand to SEQ ID NO: 198686
aucagcaucuguuucccac

SEQ ID NO: 198688 - RNA, 19 nt, Artificial Sequence
  Description of Artificial Sequence: Synthetic oligonucleotide
  Sense strand starting at position 3708 of SEQ ID NO: 2560
gcagacauauuugagucuu

SEQ ID NO: 198689 - RNA, 19 nt, Artificial Sequence
  Description of Artificial Sequence: Synthetic oligonucleotide
  Antisense strand to SEQ ID NO: 198688
aagacucaaauaugucugc

SEQ ID NO: 198690 - RNA, 19 nt, Artificial Sequence
  Description of Artificial Sequence: Synthetic oligonucleotide
  Sense strand starting at position 3714 of SEQ ID NO: 2560
auauuugagucuuuagcuc

SEQ ID NO: 198691 - RNA, 19 nt, Artificial Sequence
  Description of Artificial Sequence: Synthetic oligonucleotide
  Antisense strand to SEQ ID NO: 198690
gagcuaaagacucaaauau

SEQ ID NO: 198692 - RNA, 19 nt, Artificial Sequence
  Description of Artificial Sequence: Synthetic oligonucleotide
  Sense strand starting at position 3718 of SEQ ID NO: 2560
uugagucuuuagcucaaga

SEQ ID NO: 198693 - RNA, 19 nt, Artificial Sequence
  Description of Artificial Sequence: Synthetic oligonucleotide
  Antisense strand to SEQ ID NO: 198692
ucuugagcuaaagacucaa

SEQ ID NO: 198694 - RNA, 19 nt, Artificial Sequence
  Description of Artificial Sequence: Synthetic oligonucleotide
  Sense strand starting at position 3720 of SEQ ID NO: 2560
gagucuuuagcucaagagu

SEQ ID NO: 198695 - RNA, 19 nt, Artificial Sequence
  Description of Artificial Sequence: Synthetic oligonucleotide
  Antisense strand to SEQ ID NO: 198694
acucuugagcuaaagacuc

SEQ ID NO: 198696 - RNA, 19 nt, Artificial Sequence
  Description of Artificial Sequence: Synthetic oligonucleotide
  Sense strand starting at position 3723 of SEQ ID NO: 2560
ucuuuagcucaagagugaa

SEQ ID NO: 198697 - RNA, 19 nt, Artificial Sequence
  Description of Artificial Sequence: Synthetic oligonucleotide
  Antisense strand to SEQ ID NO: 198696
uucacucuugagcuaaaga

SEQ ID NO: 198698 - RNA, 19 nt, Artificial Sequence
  Description of Artificial Sequence: Synthetic oligonucleotide
  Sense strand starting at position 3764 of SEQ ID NO: 2560
gacaguuaccaaugcuaga

SEQ ID NO: 198699 - RNA, 19 nt, Artificial Sequence
  Description of Artificial Sequence: Synthetic oligonucleotide
  Antisense strand to SEQ ID NO: 198698
ucuagcauugguaacuguc

SEQ ID NO: 198700 - RNA, 19 nt, Artificial Sequence
  Description of Artificial Sequence: Synthetic oligonucleotide
  Sense strand starting at position 3847 of SEQ ID NO: 2560
gcuaaaugucuguagggcu

SEQ ID NO: 198701 - RNA, 19 nt, Artificial Sequence
  Description of Artificial Sequence: Synthetic oligonucleotide
  Antisense strand to SEQ ID NO: 198700
agcccuacagacauuuagc

SEQ ID NO: 198702 - RNA, 19 nt, Artificial Sequence
  Description of Artificial Sequence: Synthetic oligonucleotide
  Sense strand starting at position 3886 of SEQ ID NO: 2560
guguauccauugccugaaa

SEQ ID NO: 198703 - RNA, 19 nt, Artificial Sequence
  Description of Artificial Sequence: Synthetic oligonucleotide
  Antisense strand to SEQ ID NO: 198702
uuucaggcaauggauacac

SEQ ID NO: 198704 - RNA, 19 nt, Artificial Sequence
  Description of Artificial Sequence: Synthetic oligonucleotide
  Sense strand starting at position 3929 of SEQ ID NO: 2560
aggagucuuaaauggcaau

SEQ ID NO: 198705 - RNA, 19 nt, Artificial Sequence
  Description of Artificial Sequence: Synthetic oligonucleotide
  Antisense strand to SEQ ID NO: 198704
auugccauuuaagacuccu

SEQ ID NO: 198706 - RNA, 19 nt, Artificial Sequence
  Description of Artificial Sequence: Synthetic oligonucleotide
  Sense strand starting at position 3930 of SEQ ID NO: 2560
ggagucuuaaauggcaauu

SEQ ID NO: 198707 - RNA, 19 nt, Artificial Sequence
  Description of Artificial Sequence: Synthetic oligonucleotide
  Antisense strand to SEQ ID NO: 198706
aauugccauuuaagacucc

SEQ ID NO: 198708 - RNA, 19 nt, Artificial Sequence
  Description of Artificial Sequence: Synthetic oligonucleotide
  Sense strand starting at position 3950 of SEQ ID NO: 2560
cauggacauuaagugauau

SEQ ID NO: 198709 - RNA, 19 nt, Artificial Sequence
  Description of Artificial Sequence: Synthetic oligonucleotide
  Antisense strand to SEQ ID NO: 198708
auaucacuuaauguccaug

SEQ ID NO: 198710 - RNA, 19 nt, Artificial Sequence
  Description of Artificial Sequence: Synthetic oligonucleotide
  Sense strand starting at position 119 of SEQ ID NO: 2561
cagccagguuauccagauu

SEQ ID NO: 198711 - RNA, 19 nt, Artificial Sequence
  Description of Artificial Sequence: Synthetic oligonucleotide
  Antisense strand to SEQ ID NO: 198710
aaucuggauaaccuggcug

SEQ ID NO: 198712 - RNA, 19 nt, Artificial Sequence
  Description of Artificial Sequence: Synthetic oligonucleotide
  Sense strand starting at position 132 of SEQ ID NO: 2561
cagauuaaaucugguacug

SEQ ID NO: 198713 - RNA, 19 nt, Artificial Sequence
  Description of Artificial Sequence: Synthetic oligonucleotide
  Antisense strand to SEQ ID NO: 198712
caguaccagauuuaaucug

SEQ ID NO: 198714 - RNA, 19 nt, Artificial Sequence
  Description of Artificial Sequence: Synthetic oligonucleotide
  Sense strand starting at position 134 of SEQ ID NO: 2561
gauuaaaucugguacuguu

SEQ ID NO: 198715 - RNA, 19 nt, Artificial Sequence
  Description of Artificial Sequence: Synthetic oligonucleotide
  Antisense strand to SEQ ID NO: 198714
aacaguaccagauuuaauc

SEQ ID NO: 198716 - RNA, 19 nt, Artificial Sequence
  Description of Artificial Sequence: Synthetic oligonucleotide
  Sense strand starting at position 435 of SEQ ID NO: 2561
ucaggaacuccauguccaa

SEQ ID NO: 198717 - RNA, 19 nt, Artificial Sequence
  Description of Artificial Sequence: Synthetic oligonucleotide
  Antisense strand to SEQ ID NO: 198716
uuggacauggaguuccuga

SEQ ID NO: 198718 - RNA, 19 nt, Artificial Sequence
  Description of Artificial Sequence: Synthetic oligonucleotide
  Sense strand starting at position 502 of SEQ ID NO: 2561
ggauaugaguacugaguug

SEQ ID NO: 198719 - RNA, 19 nt, Artificial Sequence
  Description of Artificial Sequence: Synthetic oligonucleotide
  Antisense strand to SEQ ID NO: 198718
caacucaguacucauaucc

SEQ ID NO: 198720 - RNA, 19 nt, Artificial Sequence
  Description of Artificial Sequence: Synthetic oligonucleotide
  Sense strand starting at position 507 of SEQ ID NO: 2561
ugaguacugaguugggaaa

SEQ ID NO: 198721 - RNA, 19 nt, Artificial Sequence
  Description of Artificial Sequence: Synthetic oligonucleotide
  Antisense strand to SEQ ID NO: 198720
uuucccaacucaguacuca

SEQ ID NO: 198722 - RNA, 19 nt, Artificial Sequence
  Description of Artificial Sequence: Synthetic oligonucleotide
  Sense strand starting at position 559 of SEQ ID NO: 2561
guagcagggagcugucuua

SEQ ID NO: 198723 - RNA, 19 nt, Artificial Sequence
  Description of Artificial Sequence: Synthetic oligonucleotide
  Antisense strand to SEQ ID NO: 198722
uaagacagcucccugcuac

SEQ ID NO: 198724 - RNA, 19 nt, Artificial Sequence
  Description of Artificial Sequence: Synthetic oligonucleotide
  Sense strand starting at position 570 of SEQ ID NO: 2561
cugucuuauaagggcagau

SEQ ID NO: 198725 - RNA, 19 nt, Artificial Sequence
  Description of Artificial Sequence: Synthetic oligonucleotide
  Antisense strand to SEQ ID NO: 198724
aucugcccuuauaagacag

SEQ ID NO: 198726 - RNA, 19 nt, Artificial Sequence
  Description of Artificial Sequence: Synthetic oligonucleotide
  Sense strand starting at position 572 of SEQ ID NO: 2561
gucuuauaagggcagaugu

SEQ ID NO: 198727 - RNA, 19 nt, Artificial Sequence
  Description of Artificial Sequence: Synthetic oligonucleotide
  Antisense strand to SEQ ID NO: 198726
acaucugcccuuauaagac

SEQ ID NO: 198728 - RNA, 19 nt, Artificial Sequence
  Description of Artificial Sequence: Synthetic oligonucleotide
  Sense strand starting at position 784 of SEQ ID NO: 2561
uauuuauacugcugggcau

SEQ ID NO: 198729 - RNA, 19 nt, Artificial Sequence
  Description of Artificial Sequence: Synthetic oligonucleotide
  Antisense strand to SEQ ID NO: 198728
augcccagcaguauaaaua

SEQ ID NO: 198730 - RNA, 19 nt, Artificial Sequence
  Description of Artificial Sequence: Synthetic oligonucleotide
  Sense strand starting at position 850 of SEQ ID NO: 2561
uguuaagauuccuaccaga

SEQ ID NO: 198731 - RNA, 19 nt, Artificial Sequence
  Description of Artificial Sequence: Synthetic oligonucleotide
  Antisense strand to SEQ ID NO: 198730
ucugguaggaaucuuaaca

SEQ ID NO: 198732 - RNA, 19 nt, Artificial Sequence
  Description of Artificial Sequence: Synthetic oligonucleotide
  Sense strand starting at position 1000 of SEQ ID NO: 2561
gccuaaaggaguugugaag

SEQ ID NO: 198733 - RNA, 19 nt, Artificial Sequence
  Description of Artificial Sequence: Synthetic oligonucleotide
  Antisense strand to SEQ ID NO: 198732
cuucacaacuccuuuaggc

SEQ ID NO: 198734 - RNA, 19 nt, Artificial Sequence
  Description of Artificial Sequence: Synthetic oligonucleotide
  Sense strand starting at position 1006 of SEQ ID NO: 2561
aggaguugugaagguuaug

SEQ ID NO: 198735 - RNA, 19 nt, Artificial Sequence
  Description of Artificial Sequence: Synthetic oligonucleotide
  Antisense strand to SEQ ID NO: 198734
cauaaccuucacaacuccu

SEQ ID NO: 198736 - RNA, 19 nt, Artificial Sequence
  Description of Artificial Sequence: Synthetic oligonucleotide
  Sense strand starting at position 1009 of SEQ ID NO: 2561
aguugugaagguuaugagu

SEQ ID NO: 198737 - RNA, 19 nt, Artificial Sequence
  Description of Artificial Sequence: Synthetic oligonucleotide
  Antisense strand to SEQ ID NO: 198736
acucauaaccuucacaacu

SEQ ID NO: 198738 - RNA, 19 nt, Artificial Sequence
  Description of Artificial Sequence: Synthetic oligonucleotide
  Sense strand starting at position 1012 of SEQ ID NO: 2561
ugugaagguuaugaguuau

SEQ ID NO: 198739 - RNA, 19 nt, Artificial Sequence
  Description of Artificial Sequence: Synthetic oligonucleotide
  Antisense strand to SEQ ID NO: 198738
auaacucauaaccuucaca

SEQ ID NO: 198740 - RNA, 19 nt, Artificial Sequence
  Description of Artificial Sequence: Synthetic oligonucleotide
  Sense strand starting at position 1018 of SEQ ID NO: 2561
gguuaugaguuauugggac

SEQ ID NO: 198741 - RNA, 19 nt, Artificial Sequence
  Description of Artificial Sequence: Synthetic oligonucleotide
  Antisense strand to SEQ ID NO: 198740
gucccaauaacucauaacc

SEQ ID NO: 198742 - RNA, 19 nt, Artificial Sequence
  Description of Artificial Sequence: Synthetic oligonucleotide
  Sense strand starting at position 1022 of SEQ ID NO: 2561
augaguuauugggaccugu

SEQ ID NO: 198743 - RNA, 19 nt, Artificial Sequence
  Description of Artificial Sequence: Synthetic oligonucleotide
  Antisense strand to SEQ ID NO: 198742
acaggucccaauaacucau

SEQ ID NO: 198744 - RNA, 19 nt, Artificial Sequence
  Description of Artificial Sequence: Synthetic oligonucleotide
  Sense strand starting at position 1124 of SEQ ID NO: 2561
gaggaaucagccuguugug

SEQ ID NO: 198745 - RNA, 19 nt, Artificial Sequence
  Description of Artificial Sequence: Synthetic oligonucleotide
  Antisense strand to SEQ ID NO: 198744
cacaacaggcugauuccuc

SEQ ID NO: 198746 - RNA, 19 nt, Artificial Sequence
  Description of Artificial Sequence: Synthetic oligonucleotide
  Sense strand starting at position 1156 of SEQ ID NO: 2561
guggaaugauaggguaaca

SEQ ID NO: 198747 - RNA, 19 nt, Artificial Sequence
  Description of Artificial Sequence: Synthetic oligonucleotide
  Antisense strand to SEQ ID NO: 198746
uguuacccuaucauuccac

SEQ ID NO: 198748 - RNA, 19 nt, Artificial Sequence
  Description of Artificial Sequence: Synthetic oligonucleotide
  Sense strand starting at position 1168 of SEQ ID NO: 2561
gguaacagauccuaggacu

SEQ ID NO: 198749 - RNA, 19 nt, Artificial Sequence
  Description of Artificial Sequence: Synthetic oligonucleotide
  Antisense strand to SEQ ID NO: 198748
aguccuaggaucuguuacc

SEQ ID NO: 198750 - RNA, 19 nt, Artificial Sequence
  Description of Artificial Sequence: Synthetic oligonucleotide
  Sense strand starting at position 1181 of SEQ ID NO: 2561
aggacuuucuagucaggua

SEQ ID NO: 198751 - RNA, 19 nt, Artificial Sequence
  Description of Artificial Sequence: Synthetic oligonucleotide
  Antisense strand to SEQ ID NO: 198750
uaccugacuagaaaguccu

SEQ ID NO: 198752 - RNA, 19 nt, Artificial Sequence
  Description of Artificial Sequence: Synthetic oligonucleotide
  Sense strand starting at position 1182 of SEQ ID NO: 2561
ggacuuucuagucagguag

SEQ ID NO: 198753 - RNA, 19 nt, Artificial Sequence
  Description of Artificial Sequence: Synthetic oligonucleotide
  Antisense strand to SEQ ID NO: 198752
cuaccugacuagaaagucc

SEQ ID NO: 198754 - RNA, 19 nt, Artificial Sequence
  Description of Artificial Sequence: Synthetic oligonucleotide
  Sense strand starting at position 1184 of SEQ ID NO: 2561
acuuucuagucagguagaa

SEQ ID NO: 198755 - RNA, 19 nt, Artificial Sequence
  Description of Artificial Sequence: Synthetic oligonucleotide
  Antisense strand to SEQ ID NO: 198754
uucuaccugacuagaaagu

SEQ ID NO: 198756 - RNA, 19 nt, Artificial Sequence
  Description of Artificial Sequence: Synthetic oligonucleotide
  Sense strand starting at position 1341 of SEQ ID NO: 2561
aaccgacaucccuaagagu

SEQ ID NO: 198757 - RNA, 19 nt, Artificial Sequence
  Description of Artificial Sequence: Synthetic oligonucleotide
  Antisense strand to SEQ ID NO: 198756
acucuuagggaugucgguu

SEQ ID NO: 198758 - RNA, 19 nt, Artificial Sequence
  Description of Artificial Sequence: Synthetic oligonucleotide
  Sense strand starting at position 1455 of SEQ ID NO: 2561
uggugcuuaagcugaacua

SEQ ID NO: 198759 - RNA, 19 nt, Artificial Sequence
  Description of Artificial Sequence: Synthetic oligonucleotide
  Antisense strand to SEQ ID NO: 198758
uaguucagcuuaagcacca

SEQ ID NO: 198760 - RNA, 19 nt, Artificial Sequence
  Description of Artificial Sequence: Synthetic oligonucleotide
  Sense strand starting at position 1947 of SEQ ID NO: 2561
acugcugaaugcugaugaa

SEQ ID NO: 198761 - RNA, 19 nt, Artificial Sequence
  Description of Artificial Sequence: Synthetic oligonucleotide
  Antisense strand to SEQ ID NO: 198760
uucaucagcauucagcagu

SEQ ID NO: 198762 - RNA, 19 nt, Artificial Sequence
  Description of Artificial Sequence: Synthetic oligonucleotide
  Sense strand starting at position 2015 of SEQ ID NO: 2561
ugcucagcccuuuauagga

SEQ ID NO: 198763 - RNA, 19 nt, Artificial Sequence
  Description of Artificial Sequence: Synthetic oligonucleotide
  Antisense strand to SEQ ID NO: 198762
uccuauaaagggcugagca

SEQ ID NO: 198764 - RNA, 19 nt, Artificial Sequence
  Description of Artificial Sequence: Synthetic oligonucleotide
  Sense strand starting at position 2092 of SEQ ID NO: 2561
gccagaugacucugggacu

SEQ ID NO: 198765 - RNA, 19 nt, Artificial Sequence
  Description of Artificial Sequence: Synthetic oligonucleotide
  Antisense strand to SEQ ID NO: 198764
agucccagagucaucuggc

SEQ ID NO: 198766 - RNA, 19 nt, Artificial Sequence
  Description of Artificial Sequence: Synthetic oligonucleotide
  Sense strand starting at position 2164 of SEQ ID NO: 2561
aaaggagcuguuuggagau

SEQ ID NO: 198767 - RNA, 19 nt, Artificial Sequence
  Description of Artificial Sequence: Synthetic oligonucleotide
  Antisense strand to SEQ ID NO: 198766
aucuccaaacagcuccuuu

SEQ ID NO: 198768 - RNA, 19 nt, Artificial Sequence
  Description of Artificial Sequence: Synthetic oligonucleotide
  Sense strand starting at position 2167 of SEQ ID NO: 2561
ggagcuguuuggagaugag

SEQ ID NO: 198769 - RNA, 19 nt, Artificial Sequence
  Description of Artificial Sequence: Synthetic oligonucleotide
  Antisense strand to SEQ ID NO: 198768
cucaucuccaaacagcucc

SEQ ID NO: 198770 - RNA, 19 nt, Artificial Sequence
  Description of Artificial Sequence: Synthetic oligonucleotide
  Sense strand starting at position 2170 of SEQ ID NO: 2561
gcuguuuggagaugaguug

SEQ ID NO: 198771 - RNA, 19 nt, Artificial Sequence
  Description of Artificial Sequence: Synthetic oligonucleotide
  Antisense strand to SEQ ID NO: 198770
caacucaucuccaaacagc

SEQ ID NO: 198772 - RNA, 19 nt, Artificial Sequence
  Description of Artificial Sequence: Synthetic oligonucleotide
  Sense strand starting at position 2177 of SEQ ID NO: 2561
ggagaugaguuggcugcau

SEQ ID NO: 198773 - RNA, 19 nt, Artificial Sequence
  Description of Artificial Sequence: Synthetic oligonucleotide
  Antisense strand to SEQ ID NO: 198772
augcagccaacucaucucc

SEQ ID NO: 198774 - RNA, 19 nt, Artificial Sequence
  Description of Artificial Sequence: Synthetic oligonucleotide
  Sense strand starting at position 2271 of SEQ ID NO: 2561
ccagauucgggugaaacgu

SEQ ID NO: 198775 - RNA, 19 nt, Artificial Sequence
  Description of Artificial Sequence: Synthetic oligonucleotide
  Antisense strand to SEQ ID NO: 198774
acguuucacccgaaucugg

SEQ ID NO: 198776 - RNA, 19 nt, Artificial Sequence
  Description of Artificial Sequence: Synthetic oligonucleotide
  Sense strand starting at position 2309 of SEQ ID NO: 2561
agaugccacuccugaagaa

SEQ ID NO: 198777 - RNA, 19 nt, Artificial Sequence
  Description of Artificial Sequence: Synthetic oligonucleotide
  Antisense strand to SEQ ID NO: 198776
uucuucaggaguggcaucu

SEQ ID NO: 198778 - RNA, 19 nt, Artificial Sequence
  Description of Artificial Sequence: Synthetic oligonucleotide
  Sense strand starting at position 2815 of SEQ ID NO: 2561
ccuaauucucaggaagcca

SEQ ID NO: 198779 - RNA, 19 nt, Artificial Sequence
  Description of Artificial Sequence: Synthetic oligonucleotide
  Antisense strand to SEQ ID NO: 198778
uggcuuccugagaauuagg

SEQ ID NO: 198780 - RNA, 19 nt, Artificial Sequence
  Description of Artificial Sequence: Synthetic oligonucleotide
  Sense strand starting at position 2872 of SEQ ID NO: 2561
uggccuuugcaaggaaauc

SEQ ID NO: 198781 - RNA, 19 nt, Artificial Sequence
  Description of Artificial Sequence: Synthetic oligonucleotide
  Antisense strand to SEQ ID NO: 198780
gauuuccuugcaaaggcca

SEQ ID NO: 198782 - RNA, 19 nt, Artificial Sequence
  Description of Artificial Sequence: Synthetic oligonucleotide
  Sense strand starting at position 3057 of SEQ ID NO: 2561
ggcagagcuuucuuagaaa

SEQ ID NO: 198783 - RNA, 19 nt, Artificial Sequence
  Description of Artificial Sequence: Synthetic oligonucleotide
  Antisense strand to SEQ ID NO: 198782
uuucuaagaaagcucugcc

SEQ ID NO: 198784 - RNA, 19 nt, Artificial Sequence
  Description of Artificial Sequence: Synthetic oligonucleotide
  Sense strand starting at position 3444 of SEQ ID NO: 2561
cuuaguucuuaggcuaaau

SEQ ID NO: 198785 - RNA, 19 nt, Artificial Sequence
  Description of Artificial Sequence: Synthetic oligonucleotide
  Antisense strand to SEQ ID NO: 198784
auuuagccuaagaacuaag

SEQ ID NO: 198786 - RNA, 19 nt, Artificial Sequence
  Description of Artificial Sequence: Synthetic oligonucleotide
  Sense strand starting at position 3455 of SEQ ID NO: 2561
ggcuaaauuuagggugcuu

SEQ ID NO: 198787 - RNA, 19 nt, Artificial Sequence
  Description of Artificial Sequence: Synthetic oligonucleotide
  Antisense strand to SEQ ID NO: 198786
aagcacccuaaauuuagcc

SEQ ID NO: 198788 - RNA, 19 nt, Artificial Sequence
  Description of Artificial Sequence: Synthetic oligonucleotide
  Sense strand starting at position 3650 of SEQ ID NO: 2561
gugccaucacccuggcuaa

SEQ ID NO: 198789 - RNA, 19 nt, Artificial Sequence
  Description of Artificial Sequence: Synthetic oligonucleotide
  Antisense strand to SEQ ID NO: 198788
uuagccagggugauggcac

SEQ ID NO: 198790 - RNA, 19 nt, Artificial Sequence
  Description of Artificial Sequence: Synthetic oligonucleotide
  Sense strand starting at position 228 of SEQ ID NO: 2562
cgaauuuauuucugugaca

SEQ ID NO: 198791 - RNA, 19 nt, Artificial Sequence
  Description of Artificial Sequence: Synthetic oligonucleotide
  Antisense strand to SEQ ID NO: 198790
ugucacagaaauaaauucg

SEQ ID NO: 198792 - RNA, 19 nt, Artificial Sequence
  Description of Artificial Sequence: Synthetic oligonucleotide
  Sense strand starting at position 345 of SEQ ID NO: 2562
cuauuagauuggugcaaag

SEQ ID NO: 198793 - RNA, 19 nt, Artificial Sequence
  Description of Artificial Sequence: Synthetic oligonucleotide
  Antisense strand to SEQ ID NO: 198792
cuuugcaccaaucuaauag

SEQ ID NO: 198794 - RNA, 19 nt, Artificial Sequence
  Description of Artificial Sequence: Synthetic oligonucleotide
  Sense strand starting at position 375 of SEQ ID NO: 2562
uuucgccauuacuuguaau

SEQ ID NO: 198795 - RNA, 19 nt, Artificial Sequence
  Description of Artificial Sequence: Synthetic oligonucleotide
  Antisense strand to SEQ ID NO: 198794
auuacaaguaauggcgaaa

SEQ ID NO: 198796 - RNA, 19 nt, Artificial Sequence
  Description of Artificial Sequence: Synthetic oligonucleotide
  Sense strand starting at position 507 of SEQ ID NO: 2562
guaaauaacuuguggaaau

SEQ ID NO: 198797 - RNA, 19 nt, Artificial Sequence
  Description of Artificial Sequence: Synthetic oligonucleotide
  Antisense strand to SEQ ID NO: 198796
auuuccacaaguuauuuac

SEQ ID NO: 198798 - RNA, 19 nt, Artificial Sequence
  Description of Artificial Sequence: Synthetic oligonucleotide
  Sense strand starting at position 585 of SEQ ID NO: 2562
ucuugaugucgucacaaua

SEQ ID NO: 198799 - RNA, 19 nt, Artificial Sequence
  Description of Artificial Sequence: Synthetic oligonucleotide
  Antisense strand to SEQ ID NO: 198798
uauugugacgacaucaaga

SEQ ID NO: 198800 - RNA, 19 nt, Artificial Sequence
  Description of Artificial Sequence: Synthetic oligonucleotide
  Sense strand starting at position 844 of SEQ ID NO: 2562
ccaggaaguugauauauua

SEQ ID NO: 198801 - RNA, 19 nt, Artificial Sequence
  Description of Artificial Sequence: Synthetic oligonucleotide
  Antisense strand to SEQ ID NO: 198800
uaauauaucaacuuccugg

SEQ ID NO: 198802 - RNA, 19 nt, Artificial Sequence
  Description of Artificial Sequence: Synthetic oligonucleotide
  Sense strand starting at position 2860 of SEQ ID NO: 2562
caugccacuccgugaggaa

SEQ ID NO: 198803 - RNA, 19 nt, Artificial Sequence
  Description of Artificial Sequence: Synthetic oligonucleotide
  Antisense strand to SEQ ID NO: 198802
uuccucacggaguggcaug

SEQ ID NO: 198804 - RNA, 19 nt, Artificial Sequence
  Description of Artificial Sequence: Synthetic oligonucleotide
  Sense strand starting at position 2869 of SEQ ID NO: 2562
ccgugaggaaguugaaaua

SEQ ID NO: 198805 - RNA, 19 nt, Artificial Sequence
  Description of Artificial Sequence: Synthetic oligonucleotide
  Antisense strand to SEQ ID NO: 198804
uauuucaacuuccucacgg

SEQ ID NO: 198806 - RNA, 19 nt, Artificial Sequence
  Description of Artificial Sequence: Synthetic oligonucleotide
  Sense strand starting at position 2879 of SEQ ID NO: 2562
guugaaauacgugaucucu

SEQ ID NO: 198807 - RNA, 19 nt, Artificial Sequence
  Description of Artificial Sequence: Synthetic oligonucleotide
  Antisense strand to SEQ ID NO: 198806
agagaucacguauuucaac

SEQ ID NO: 198808 - RNA, 19 nt, Artificial Sequence
  Description of Artificial Sequence: Synthetic oligonucleotide
  Sense strand starting at position 2881 of SEQ ID NO: 2562
ugaaauacgugaucucuaa

SEQ ID NO: 198809 - RNA, 19 nt, Artificial Sequence
  Description of Artificial Sequence: Synthetic oligonucleotide
  Antisense strand to SEQ ID NO: 198808
uuagagaucacguauuuca

SEQ ID NO: 198810 - RNA, 19 nt, Artificial Sequence
  Description of Artificial Sequence: Synthetic oligonucleotide
  Sense strand starting at position 2885 of SEQ ID NO: 2562
auacgugaucucuaagauu

SEQ ID NO: 198811 - RNA, 19 nt, Artificial Sequence
  Description of Artificial Sequence: Synthetic oligonucleotide
  Antisense strand to SEQ ID NO: 198810
aaucuuagagaucacguau

SEQ ID NO: 198812 - RNA, 19 nt, Artificial Sequence
  Description of Artificial Sequence: Synthetic oligonucleotide
  Sense strand starting at position 2888 of SEQ ID NO: 2562
cgugaucucuaagauuccu

SEQ ID NO: 198813 - RNA, 19 nt, Artificial Sequence
  Description of Artificial Sequence: Synthetic oligonucleotide
  Antisense strand to SEQ ID NO: 198812
aggaaucuuagagaucacg

SEQ ID NO: 198814 - RNA, 19 nt, Artificial Sequence
  Description of Artificial Sequence: Synthetic oligonucleotide
  Sense strand starting at position 3000 of SEQ ID NO: 2562
gggacgugcgauuguuaca

SEQ ID NO: 198815 - RNA, 19 nt, Artificial Sequence
  Description of Artificial Sequence: Synthetic oligonucleotide
  Antisense strand to SEQ ID NO: 198814
uguaacaaucgcacguccc

SEQ ID NO: 198816 - RNA, 19 nt, Artificial Sequence
  Description of Artificial Sequence: Synthetic oligonucleotide
  Sense strand starting at position 3005 of SEQ ID NO: 2562
gugcgauuguuacaaugcu

SEQ ID NO: 198817 - RNA, 19 nt, Artificial Sequence
  Description of Artificial Sequence: Synthetic oligonucleotide
  Antisense strand to SEQ ID NO: 198816
agcauuguaacaaucgcac

SEQ ID NO: 198818 - RNA, 19 nt, Artificial Sequence
  Description of Artificial Sequence: Synthetic oligonucleotide
  Sense strand starting at position 3020 of SEQ ID NO: 2562
ugcugaagguuucccguau

SEQ ID NO: 198819 - RNA, 19 nt, Artificial Sequence
  Description of Artificial Sequence: Synthetic oligonucleotide
  Antisense strand to SEQ ID NO: 198818
auacgggaaaccuucagca

SEQ ID NO: 198820 - RNA, 19 nt, Artificial Sequence
  Description of Artificial Sequence: Synthetic oligonucleotide
  Sense strand starting at position 3021 of SEQ ID NO: 2562
gcugaagguuucccguauu

SEQ ID NO: 198821 - RNA, 19 nt, Artificial Sequence
  Description of Artificial Sequence: Synthetic oligonucleotide
  Antisense strand to SEQ ID NO: 198820
aauacgggaaaccuucagc

SEQ ID NO: 198822 - RNA, 19 nt, Artificial Sequence
  Description of Artificial Sequence: Synthetic oligonucleotide
  Sense strand starting at position 3027 of SEQ ID NO: 2562
gguuucccguauuucuuua

SEQ ID NO: 198823 - RNA, 19 nt, Artificial Sequence
  Description of Artificial Sequence: Synthetic oligonucleotide
  Antisense strand to SEQ ID NO: 198822
uaaagaaauacgggaaacc

SEQ ID NO: 198824 - RNA, 19 nt, Artificial Sequence
  Description of Artificial Sequence: Synthetic oligonucleotide
  Sense strand starting at position 3081 of SEQ ID NO: 2562
gcacuuaaagcugacuauu

SEQ ID NO: 198825 - RNA, 19 nt, Artificial Sequence
  Description of Artificial Sequence: Synthetic oligonucleotide
  Antisense strand to SEQ ID NO: 198824
aauagucagcuuuaagugc

SEQ ID NO: 198826 - RNA, 19 nt, Artificial Sequence
  Description of Artificial Sequence: Synthetic oligonucleotide
  Sense strand starting at position 3090 of SEQ ID NO: 2562
gcugacuauuaaggaaaga

SEQ ID NO: 198827 - RNA, 19 nt, Artificial Sequence
  Description of Artificial Sequence: Synthetic oligonucleotide
  Antisense strand to SEQ ID NO: 198826
ucuuuccuuaauagucagc

SEQ ID NO: 198828 - RNA, 19 nt, Artificial Sequence
  Description of Artificial Sequence: Synthetic oligonucleotide
  Sense strand starting at position 3295 of SEQ ID NO: 2562
aaacguguugaguaauuau

SEQ ID NO: 198829 - RNA, 19 nt, Artificial Sequence
  Description of Artificial Sequence: Synthetic oligonucleotide
  Antisense strand to SEQ ID NO: 198828
auaauuacucaacacguuu

SEQ ID NO: 198830 - RNA, 19 nt, Artificial Sequence
  Description of Artificial Sequence: Synthetic oligonucleotide
  Sense strand starting at position 3298 of SEQ ID NO: 2562
cguguugaguaauuauaac

SEQ ID NO: 198831 - RNA, 19 nt, Artificial Sequence
  Description of Artificial Sequence: Synthetic oligonucleotide
  Antisense strand to SEQ ID NO: 198830
guuauaauuacucaacacg

SEQ ID NO: 198832 - RNA, 19 nt, Artificial Sequence
  Description of Artificial Sequence: Synthetic oligonucleotide
  Sense strand starting at position 3528 of SEQ ID NO: 2562
gcuucuacguuguugagua

SEQ ID NO: 198833 - RNA, 19 nt, Artificial Sequence
  Description of Artificial Sequence: Synthetic oligonucleotide
  Antisense strand to SEQ ID NO: 198832
uacucaacaacguagaagc

SEQ ID NO: 198834 - RNA, 19 nt, Artificial Sequence
  Description of Artificial Sequence: Synthetic oligonucleotide
  Sense strand starting at position 3529 of SEQ ID NO: 2562
cuucuacguuguugaguaa

SEQ ID NO: 198835 - RNA, 19 nt, Artificial Sequence
  Description of Artificial Sequence: Synthetic oligonucleotide
  Antisense strand to SEQ ID NO: 198834
uuacucaacaacguagaag

SEQ ID NO: 198836 - RNA, 19 nt, Artificial Sequence
  Description of Artificial Sequence: Synthetic oligonucleotide
  Sense strand starting at position 3530 of SEQ ID NO: 2562
uucuacguuguugaguaaa

SEQ ID NO: 198837 - RNA, 19 nt, Artificial Sequence
  Description of Artificial Sequence: Synthetic oligonucleotide
  Antisense strand to SEQ ID NO: 198836
uuuacucaacaacguagaa

SEQ ID NO: 198838 - RNA, 19 nt, Artificial Sequence
  Description of Artificial Sequence: Synthetic oligonucleotide
  Sense strand starting at position 3616 of SEQ ID NO: 2562
gaggguuuaucuuguugga

SEQ ID NO: 198839 - RNA, 19 nt, Artificial Sequence
  Description of Artificial Sequence: Synthetic oligonucleotide
  Antisense strand to SEQ ID NO: 198838
uccaacaagauaaacccuc

SEQ ID NO: 198840 - RNA, 19 nt, Artificial Sequence
  Description of Artificial Sequence: Synthetic oligonucleotide
  Sense strand starting at position 3618 of SEQ ID NO: 2562
ggguuuaucuuguuggauu

SEQ ID NO: 198841 - RNA, 19 nt, Artificial Sequence
  Description of Artificial Sequence: Synthetic oligonucleotide
  Antisense strand to SEQ ID NO: 198840
aauccaacaagauaaaccc

SEQ ID NO: 198842 - RNA, 19 nt, Artificial Sequence
  Description of Artificial Sequence: Synthetic oligonucleotide
  Sense strand starting at position 3619 of SEQ ID NO: 2562
gguuuaucuuguuggauua

SEQ ID NO: 198843 - RNA, 19 nt, Artificial Sequence
  Description of Artificial Sequence: Synthetic oligonucleotide
  Antisense strand to SEQ ID NO: 198842
uaauccaacaagauaaacc

SEQ ID NO: 198844 - RNA, 19 nt, Artificial Sequence
  Description of Artificial Sequence: Synthetic oligonucleotide
  Sense strand starting at position 3771 of SEQ ID NO: 2562
aucagucaucucuguauuu

SEQ ID NO: 198845 - RNA, 19 nt, Artificial Sequence
  Description of Artificial Sequence: Synthetic oligonucleotide
  Antisense strand to SEQ ID NO: 198844
aaauacagagaugacugau

SEQ ID NO: 198846 - RNA, 19 nt, Artificial Sequence
  Description of Artificial Sequence: Synthetic oligonucleotide
  Sense strand starting at position 3772 of SEQ ID NO: 2562
ucagucaucucuguauuuc

SEQ ID NO: 198847 - RNA, 19 nt, Artificial Sequence
  Description of Artificial Sequence: Synthetic oligonucleotide
  Antisense strand to SEQ ID NO: 198846
gaaauacagagaugacuga

SEQ ID NO: 198848 - RNA, 19 nt, Artificial Sequence
  Description of Artificial Sequence: Synthetic oligonucleotide
  Sense strand starting at position 3780 of SEQ ID NO: 2562
cucuguauuucuggcauca

SEQ ID NO: 198849 - RNA, 19 nt, Artificial Sequence
  Description of Artificial Sequence: Synthetic oligonucleotide
  Antisense strand to SEQ ID NO: 198848
ugaugccagaaauacagag

SEQ ID NO: 198850 - RNA, 19 nt, Artificial Sequence
  Description of Artificial Sequence: Synthetic oligonucleotide
  Sense strand starting at position 230 of SEQ ID NO: 2563
acuuauuucugugacauga

SEQ ID NO: 198851 - RNA, 19 nt, Artificial Sequence
  Description of Artificial Sequence: Synthetic oligonucleotide
  Antisense strand to SEQ ID NO: 198850
ucaugucacagaaauaagu

SEQ ID NO: 198852 - RNA, 19 nt, Artificial Sequence
  Description of Artificial Sequence: Synthetic oligonucleotide
  Sense strand starting at position 232 of SEQ ID NO: 2563
uuauuucugugacaugaaa

SEQ ID NO: 198853 - RNA, 19 nt, Artificial Sequence
  Description of Artificial Sequence: Synthetic oligonucleotide
  Antisense strand to SEQ ID NO: 198852
uuucaugucacagaaauaa

SEQ ID NO: 198854 - RNA, 19 nt, Artificial Sequence
  Description of Artificial Sequence: Synthetic oligonucleotide
  Sense strand starting at position 843 of SEQ ID NO: 2563
ccaggaaguugauauauua

SEQ ID NO: 198855 - RNA, 19 nt, Artificial Sequence
  Description of Artificial Sequence: Synthetic oligonucleotide
  Antisense strand to SEQ ID NO: 198854
uaauauaucaacuuccugg

SEQ ID NO: 198856 - RNA, 19 nt, Artificial Sequence
  Description of Artificial Sequence: Synthetic oligonucleotide
  Sense strand starting at position 1573 of SEQ ID NO: 2563
cucucuuauuggcgucaua

SEQ ID NO: 198857 - RNA, 19 nt, Artificial Sequence
  Description of Artificial Sequence: Synthetic oligonucleotide
  Antisense strand to SEQ ID NO: 198856
uaugacgccaauaagagag

SEQ ID NO: 198858 - RNA, 19 nt, Artificial Sequence
  Description of Artificial Sequence: Synthetic oligonucleotide
  Sense strand starting at position 1576 of SEQ ID NO: 2563
ucuuauuggcgucauaaua

SEQ ID NO: 198859 - RNA, 19 nt, Artificial Sequence
  Description of Artificial Sequence: Synthetic oligonucleotide
  Antisense strand to SEQ ID NO: 198858
uauuaugacgccaauaaga

SEQ ID NO: 198860 - RNA, 19 nt, Artificial Sequence
  Description of Artificial Sequence: Synthetic oligonucleotide
  Sense strand starting at position 1584 of SEQ ID NO: 2563
gcgucauaauacgugagca

SEQ ID NO: 198861 - RNA, 19 nt, Artificial Sequence
  Description of Artificial Sequence: Synthetic oligonucleotide
  Antisense strand to SEQ ID NO: 198860
ugcucacguauuaugacgc

SEQ ID NO: 198862 - RNA, 19 nt, Artificial Sequence
  Description of Artificial Sequence: Synthetic oligonucleotide
  Sense strand starting at position 1585 of SEQ ID NO: 2563
cgucauaauacgugagcag

SEQ ID NO: 198863 - RNA, 19 nt, Artificial Sequence
  Description of Artificial Sequence: Synthetic oligonucleotide
  Antisense strand to SEQ ID NO: 198862
cugcucacguauuaugacg

SEQ ID NO: 198864 - RNA, 19 nt, Artificial Sequence
  Description of Artificial Sequence: Synthetic oligonucleotide
  Sense strand starting at position 1586 of SEQ ID NO: 2563
gucauaauacgugagcaga

SEQ ID NO: 198865 - RNA, 19 nt, Artificial Sequence
  Description of Artificial Sequence: Synthetic oligonucleotide
  Antisense strand to SEQ ID NO: 198864
ucugcucacguauuaugac

SEQ ID NO: 198866 - RNA, 19 nt, Artificial Sequence
  Description of Artificial Sequence: Synthetic oligonucleotide
  Sense strand starting at position 1620 of SEQ ID NO: 2563
uccagauuaccacguaaga

SEQ ID NO: 198867 - RNA, 19 nt, Artificial Sequence
  Description of Artificial Sequence: Synthetic oligonucleotide
  Antisense strand to SEQ ID NO: 198866
ucuuacgugguaaucugga

SEQ ID NO: 198868 - RNA, 19 nt, Artificial Sequence
  Description of Artificial Sequence: Synthetic oligonucleotide
  Sense strand starting at position 1633 of SEQ ID NO: 2563
guaagacagcucuguggau

SEQ ID NO: 198869 - RNA, 19 nt, Artificial Sequence
  Description of Artificial Sequence: Synthetic oligonucleotide
  Antisense strand to SEQ ID NO: 198868
auccacagagcugucuuac

SEQ ID NO: 198870 - RNA, 19 nt, Artificial Sequence
  Description of Artificial Sequence: Synthetic oligonucleotide
  Sense strand starting at position 1660 of SEQ ID NO: 2563
gaugauacgguuuaaugua

SEQ ID NO: 198871 - RNA, 19 nt, Artificial Sequence
  Description of Artificial Sequence: Synthetic oligonucleotide
  Antisense strand to SEQ ID NO: 198870
uacauuaaaccguaucauc

SEQ ID NO: 198872 - RNA, 19 nt, Artificial Sequence
  Description of Artificial Sequence: Synthetic oligonucleotide
  Sense strand starting at position 1741 of SEQ ID NO: 2563
gcucgucgucuuccuuaau

SEQ ID NO: 198873 - RNA, 19 nt, Artificial Sequence
  Description of Artificial Sequence: Synthetic oligonucleotide
  Antisense strand to SEQ ID NO: 198872
auuaaggaagacgacgagc

SEQ ID NO: 198874 - RNA, 19 nt, Artificial Sequence
  Description of Artificial Sequence: Synthetic oligonucleotide
  Sense strand starting at position 1744 of SEQ ID NO: 2563
cgucgucuuccuuaaucgu

SEQ ID NO: 198875 - RNA, 19 nt, Artificial Sequence
  Description of Artificial Sequence: Synthetic oligonucleotide
  Antisense strand to SEQ ID NO: 198874
acgauuaaggaagacgacg

SEQ ID NO: 198876 - RNA, 19 nt, Artificial Sequence
  Description of Artificial Sequence: Synthetic oligonucleotide
  Sense strand starting at position 1753 of SEQ ID NO: 2563
ccuuaaucgucggcugcaa

SEQ ID NO: 198877 - RNA, 19 nt, Artificial Sequence
  Description of Artificial Sequence: Synthetic oligonucleotide
  Antisense strand to SEQ ID NO: 198876
uugcagccgacgauuaagg

SEQ ID NO: 198878 - RNA, 19 nt, Artificial Sequence
  Description of Artificial Sequence: Synthetic oligonucleotide
  Sense strand starting at position 1754 of SEQ ID NO: 2563
cuuaaucgucggcugcaaa

SEQ ID NO: 198879 - RNA, 19 nt, Artificial Sequence
  Description of Artificial Sequence: Synthetic oligonucleotide
  Antisense strand to SEQ ID NO: 198878
uuugcagccgacgauuaag

SEQ ID NO: 198880 - RNA, 19 nt, Artificial Sequence
  Description of Artificial Sequence: Synthetic oligonucleotide
  Sense strand starting at position 1755 of SEQ ID NO: 2563
uuaaucgucggcugcaaau

SEQ ID NO: 198881 - RNA, 19 nt, Artificial Sequence
  Description of Artificial Sequence: Synthetic oligonucleotide
  Antisense strand to SEQ ID NO: 198880
auuugcagccgacgauuaa

SEQ ID NO: 198882 - RNA, 19 nt, Artificial Sequence
  Description of Artificial Sequence: Synthetic oligonucleotide
  Sense strand starting at position 2880 of SEQ ID NO: 2563
aguugaaauacgugaucuc

SEQ ID NO: 198883 - RNA, 19 nt, Artificial Sequence
  Description of Artificial Sequence: Synthetic oligonucleotide
  Antisense strand to SEQ ID NO: 198882
gagaucacguauuucaacu

SEQ ID NO: 198884 - RNA, 19 nt, Artificial Sequence
  Description of Artificial Sequence: Synthetic oligonucleotide
  Sense strand starting at position 2881 of SEQ ID NO: 2563
guugaaauacgugaucucu

SEQ ID NO: 198885 - RNA, 19 nt, Artificial Sequence
  Description of Artificial Sequence: Synthetic oligonucleotide
  Antisense strand to SEQ ID NO: 198884
agagaucacguauuucaac

SEQ ID NO: 198886 - RNA, 19 nt, Artificial Sequence
  Description of Artificial Sequence: Synthetic oligonucleotide
  Sense strand starting at position 2883 of SEQ ID NO: 2563
ugaaauacgugaucucuaa

SEQ ID NO: 198887 - RNA, 19 nt, Artificial Sequence
  Description of Artificial Sequence: Synthetic oligonucleotide
  Antisense strand to SEQ ID NO: 198886
uuagagaucacguauuuca

SEQ ID NO: 198888 - RNA, 19 nt, Artificial Sequence
  Description of Artificial Sequence: Synthetic oligonucleotide
  Sense strand starting at position 2887 of SEQ ID NO: 2563
auacgugaucucuaagagu

SEQ ID NO: 198889 - RNA, 19 nt, Artificial Sequence
  Description of Artificial Sequence: Synthetic oligonucleotide
  Antisense strand to SEQ ID NO: 198888
acucuuagagaucacguau

SEQ ID NO: 198890 - RNA, 19 nt, Artificial Sequence
  Description of Artificial Sequence: Synthetic oligonucleotide
  Sense strand starting at position 2890 of SEQ ID NO: 2563
cgugaucucuaagaguccu

SEQ ID NO: 198891 - RNA, 19 nt, Artificial Sequence
  Description of Artificial Sequence: Synthetic oligonucleotide
  Antisense strand to SEQ ID NO: 198890
aggacucuuagagaucacg

SEQ ID NO: 198892 - RNA, 19 nt, Artificial Sequence
  Description of Artificial Sequence: Synthetic oligonucleotide
  Sense strand starting at position 2896 of SEQ ID NO: 2563
cucuaagaguccucccagu

SEQ ID NO: 198893 - RNA, 19 nt, Artificial Sequence
  Description of Artificial Sequence: Synthetic oligonucleotide
  Antisense strand to SEQ ID NO: 198892
acugggaggacucuuagag

SEQ ID NO: 198894 - RNA, 19 nt, Artificial Sequence
  Description of Artificial Sequence: Synthetic oligonucleotide
  Sense strand starting at position 2940 of SEQ ID NO: 2563
aaguaacauucgcuauugu

SEQ ID NO: 198895 - RNA, 19 nt, Artificial Sequence
  Description of Artificial Sequence: Synthetic oligonucleotide
  Antisense strand to SEQ ID NO: 198894
acaauagcgaauguuacuu

SEQ ID NO: 198896 - RNA, 19 nt, Artificial Sequence
  Description of Artificial Sequence: Synthetic oligonucleotide
  Sense strand starting at position 2944 of SEQ ID NO: 2563
aacauucgcuauugugauu

SEQ ID NO: 198897 - RNA, 19 nt, Artificial Sequence
  Description of Artificial Sequence: Synthetic oligonucleotide
  Antisense strand to SEQ ID NO: 198896
aaucacaauagcgaauguu

SEQ ID NO: 198898 - RNA, 19 nt, Artificial Sequence
  Description of Artificial Sequence: Synthetic oligonucleotide
  Sense strand starting at position 2947 of SEQ ID NO: 2563
auucgcuauugugauuaga

SEQ ID NO: 198899 - RNA, 19 nt, Artificial Sequence
  Description of Artificial Sequence: Synthetic oligonucleotide
  Antisense strand to SEQ ID NO: 198898
ucuaaucacaauagcgaau

SEQ ID NO: 198900 - RNA, 19 nt, Artificial Sequence
  Description of Artificial Sequence: Synthetic oligonucleotide
  Sense strand starting at position 2949 of SEQ ID NO: 2563
ucgcuauugugauuagaaa

SEQ ID NO: 198901 - RNA, 19 nt, Artificial Sequence
  Description of Artificial Sequence: Synthetic oligonucleotide
  Antisense strand to SEQ ID NO: 198900
uuucuaaucacaauagcga

SEQ ID NO: 198902 - RNA, 19 nt, Artificial Sequence
  Description of Artificial Sequence: Synthetic oligonucleotide
  Sense strand starting at position 2969 of SEQ ID NO: 2563
gcugcauuuacagacguua

SEQ ID NO: 198903 - RNA, 19 nt, Artificial Sequence
  Description of Artificial Sequence: Synthetic oligonucleotide
  Antisense strand to SEQ ID NO: 198902
uaacgucuguaaaugcagc

SEQ ID NO: 198904 - RNA, 19 nt, Artificial Sequence
  Description of Artificial Sequence: Synthetic oligonucleotide
  Sense strand starting at position 3006 of SEQ ID NO: 2563
gcgauuguuacagggcuga

SEQ ID NO: 198905 - RNA, 19 nt, Artificial Sequence
  Description of Artificial Sequence: Synthetic oligonucleotide
  Antisense strand to SEQ ID NO: 198904
ucagcccuguaacaaucgc

SEQ ID NO: 198906 - RNA, 19 nt, Artificial Sequence
  Description of Artificial Sequence: Synthetic oligonucleotide
  Sense strand starting at position 3453 of SEQ ID NO: 2563
agcaaaugguucuuuaauc

SEQ ID NO: 198907 - RNA, 19 nt, Artificial Sequence
  Description of Artificial Sequence: Synthetic oligonucleotide
  Antisense strand to SEQ ID NO: 198906
gauuaaagaaccauuugcu

SEQ ID NO: 198908 - RNA, 19 nt, Artificial Sequence
  Description of Artificial Sequence: Synthetic oligonucleotide
  Sense strand starting at position 3454 of SEQ ID NO: 2563
gcaaaugguucuuuaauca

SEQ ID NO: 198909 - RNA, 19 nt, Artificial Sequence
  Description of Artificial Sequence: Synthetic oligonucleotide
  Antisense strand to SEQ ID NO: 198908
ugauuaaagaaccauuugc

SEQ ID NO: 198910 - RNA, 19 nt, Artificial Sequence
  Description of Artificial Sequence: Synthetic oligonucleotide
  Sense strand starting at position 3515 of SEQ ID NO: 2563
gaugcuucuccgcuguuga

SEQ ID NO: 198911 - RNA, 19 nt, Artificial Sequence
  Description of Artificial Sequence: Synthetic oligonucleotide
  Antisense strand to SEQ ID NO: 198910
ucaacagcggagaagcauc

SEQ ID NO: 198912 - RNA, 19 nt, Artificial Sequence
  Description of Artificial Sequence: Synthetic oligonucleotide
  Sense strand starting at position 3518 of SEQ ID NO: 2563
gcuucuccgcuguugagua

SEQ ID NO: 198913 - RNA, 19 nt, Artificial Sequence
  Description of Artificial Sequence: Synthetic oligonucleotide
  Antisense strand to SEQ ID NO: 198912
uacucaacagcggagaagc

SEQ ID NO: 198914 - RNA, 19 nt, Artificial Sequence
  Description of Artificial Sequence: Synthetic oligonucleotide
  Sense strand starting at position 3519 of SEQ ID NO: 2563
cuucuccgcuguugaguaa

SEQ ID NO: 198915 - RNA, 19 nt, Artificial Sequence
  Description of Artificial Sequence: Synthetic oligonucleotide
  Antisense strand to SEQ ID NO: 198914
uuacucaacagcggagaag

SEQ ID NO: 198916 - RNA, 19 nt, Artificial Sequence
  Description of Artificial Sequence: Synthetic oligonucleotide
  Sense strand starting at position 3619 of SEQ ID NO: 2563
cuuguuggauuaucagaug

SEQ ID NO: 198917 - RNA, 19 nt, Artificial Sequence
  Description of Artificial Sequence: Synthetic oligonucleotide
  Antisense strand to SEQ ID NO: 198916
caucugauaauccaacaag

SEQ ID NO: 198918 - RNA, 19 nt, Artificial Sequence
  Description of Artificial Sequence: Synthetic oligonucleotide
  Sense strand starting at position 3622 of SEQ ID NO: 2563
guuggauuaucagauguua

SEQ ID NO: 198919 - RNA, 19 nt, Artificial Sequence
  Description of Artificial Sequence: Synthetic oligonucleotide
  Antisense strand to SEQ ID NO: 198918
uaacaucugauaauccaac

SEQ ID NO: 198920 - RNA, 19 nt, Artificial Sequence
  Description of Artificial Sequence: Synthetic oligonucleotide
  Sense strand starting at position 1 of SEQ ID NO: 2564
acuguagugaagcggauua

SEQ ID NO: 198921 - RNA, 19 nt, Artificial Sequence
  Description of Artificial Sequence: Synthetic oligonucleotide
  Antisense strand to SEQ ID NO: 198920
uaauccgcuucacuacagu

SEQ ID NO: 198922 - RNA, 19 nt, Artificial Sequence
  Description of Artificial Sequence: Synthetic oligonucleotide
  Sense strand starting at position 103 of SEQ ID NO: 2564
gaauguauuuguuugcaca

SEQ ID NO: 198923 - RNA, 19 nt, Artificial Sequence
  Description of Artificial Sequence: Synthetic oligonucleotide
  Antisense strand to SEQ ID NO: 198922
ugugcaaacaaauacauuc

SEQ ID NO: 198924 - RNA, 19 nt, Artificial Sequence
  Description of Artificial Sequence: Synthetic oligonucleotide
  Sense strand starting at position 128 of SEQ ID NO: 2564
ugaggaaauuguuugcggu

SEQ ID NO: 198925 - RNA, 19 nt, Artificial Sequence
  Description of Artificial Sequence: Synthetic oligonucleotide
  Antisense strand to SEQ ID NO: 198924
accgcaaacaauuuccuca

SEQ ID NO: 198926 - RNA, 19 nt, Artificial Sequence
  Description of Artificial Sequence: Synthetic oligonucleotide
  Sense strand starting at position 129 of SEQ ID NO: 2564
gaggaaauuguuugcggua

SEQ ID NO: 198927 - RNA, 19 nt, Artificial Sequence
  Description of Artificial Sequence: Synthetic oligonucleotide
  Antisense strand to SEQ ID NO: 198926
uaccgcaaacaauuuccuc

SEQ ID NO: 198928 - RNA, 19 nt, Artificial Sequence
  Description of Artificial Sequence: Synthetic oligonucleotide
  Sense strand starting at position 130 of SEQ ID NO: 2564
aggaaauuguuugcgguaa

SEQ ID NO: 198929 - RNA, 19 nt, Artificial Sequence
  Description of Artificial Sequence: Synthetic oligonucleotide
  Antisense strand to SEQ ID NO: 198928
uuaccgcaaacaauuuccu

SEQ ID NO: 198930 - RNA, 19 nt, Artificial Sequence
  Description of Artificial Sequence: Synthetic oligonucleotide
  Sense strand starting at position 477 of SEQ ID NO: 2564
auggauacaucagaguaac

SEQ ID NO: 198931 - RNA, 19 nt, Artificial Sequence
  Description of Artificial Sequence: Synthetic oligonucleotide
  Antisense strand to SEQ ID NO: 198930
guuacucugauguauccau

SEQ ID NO: 198932 - RNA, 19 nt, Artificial Sequence
  Description of Artificial Sequence: Synthetic oligonucleotide
  Sense strand starting at position 487 of SEQ ID NO: 2564
cagaguaacuggccuaacu

SEQ ID NO: 198933 - RNA, 19 nt, Artificial Sequence
  Description of Artificial Sequence: Synthetic oligonucleotide
  Antisense strand to SEQ ID NO: 198932
aguuaggccaguuacucug

SEQ ID NO: 198934 - RNA, 19 nt, Artificial Sequence
  Description of Artificial Sequence: Synthetic oligonucleotide
  Sense strand starting at position 489 of SEQ ID NO: 2564
gaguaacuggccuaacuuu

SEQ ID NO: 198935 - RNA, 19 nt, Artificial Sequence
  Description of Artificial Sequence: Synthetic oligonucleotide
  Antisense strand to SEQ ID NO: 198934
aaaguuaggccaguuacuc

SEQ ID NO: 198936 - RNA, 19 nt, Artificial Sequence
  Description of Artificial Sequence: Synthetic oligonucleotide
  Sense strand starting at position 495 of SEQ ID NO: 2564
cuggccuaacuuuggauaa

SEQ ID NO: 198937 - RNA, 19 nt, Artificial Sequence
  Description of Artificial Sequence: Synthetic oligonucleotide
  Antisense strand to SEQ ID NO: 198936
uuauccaaaguuaggccag

SEQ ID NO: 198938 - RNA, 19 nt, Artificial Sequence
  Description of Artificial Sequence: Synthetic oligonucleotide
  Sense strand starting at position 507 of SEQ ID NO: 2564
uggauaaggcaauguuuac

SEQ ID NO: 198939 - RNA, 19 nt, Artificial Sequence
  Description of Artificial Sequence: Synthetic oligonucleotide
  Antisense strand to SEQ ID NO: 198938
guaaacauugccuuaucca

SEQ ID NO: 198940 - RNA, 19 nt, Artificial Sequence
  Description of Artificial Sequence: Synthetic oligonucleotide
  Sense strand starting at position 513 of SEQ ID NO: 2564
aggcaauguuuacuucuua

SEQ ID NO: 198941 - RNA, 19 nt, Artificial Sequence
  Description of Artificial Sequence: Synthetic oligonucleotide
  Antisense strand to SEQ ID NO: 198940
uaagaaguaaacauugccu

SEQ ID NO: 198942 - RNA, 19 nt, Artificial Sequence
  Description of Artificial Sequence: Synthetic oligonucleotide
  Sense strand starting at position 514 of SEQ ID NO: 2564
ggcaauguuuacuucuuaa

SEQ ID NO: 198943 - RNA, 19 nt, Artificial Sequence
  Description of Artificial Sequence: Synthetic oligonucleotide
  Antisense strand to SEQ ID NO: 198942
uuaagaaguaaacauugcc

SEQ ID NO: 198944 - RNA, 19 nt, Artificial Sequence
  Description of Artificial Sequence: Synthetic oligonucleotide
  Sense strand starting at position 557 of SEQ ID NO: 2564
ggaugauuauuguagcgag

SEQ ID NO: 198945 - RNA, 19 nt, Artificial Sequence
  Description of Artificial Sequence: Synthetic oligonucleotide
  Antisense strand to SEQ ID NO: 198944
cucgcuacaauaaucaucc

SEQ ID NO: 198946 - RNA, 19 nt, Artificial Sequence
  Description of Artificial Sequence: Synthetic oligonucleotide
  Sense strand starting at position 561 of SEQ ID NO: 2564
gauuauuguagcgagcugu

SEQ ID NO: 198947 - RNA, 19 nt, Artificial Sequence
  Description of Artificial Sequence: Synthetic oligonucleotide
  Antisense strand to SEQ ID NO: 198946
acagcucgcuacaauaauc

SEQ ID NO: 198948 - RNA, 19 nt, Artificial Sequence
  Description of Artificial Sequence: Synthetic oligonucleotide
  Sense strand starting at position 571 of SEQ ID NO: 2564
gcgagcuguccugugcauu

SEQ ID NO: 198949 - RNA, 19 nt, Artificial Sequence
  Description of Artificial Sequence: Synthetic oligonucleotide
  Antisense strand to SEQ ID NO: 198948
aaugcacaggacagcucgc

SEQ ID NO: 198950 - RNA, 19 nt, Artificial Sequence
  Description of Artificial Sequence: Synthetic oligonucleotide
  Sense strand starting at position 584 of SEQ ID NO: 2564
ugcauuguaccauguauac

SEQ ID NO: 198951 - RNA, 19 nt, Artificial Sequence
  Description of Artificial Sequence: Synthetic oligonucleotide
  Antisense strand to SEQ ID NO: 198950
guauacaugguacaaugca

SEQ ID NO: 198952 - RNA, 19 nt, Artificial Sequence
  Description of Artificial Sequence: Synthetic oligonucleotide
  Sense strand starting at position 643 of SEQ ID NO: 2564
uccugauugugacaaccca

SEQ ID NO: 198953 - RNA, 19 nt, Artificial Sequence
  Description of Artificial Sequence: Synthetic oligonucleotide
  Antisense strand to SEQ ID NO: 198952
uggguugucacaaucagga

SEQ ID NO: 198954 - RNA, 19 nt, Artificial Sequence
  Description of Artificial Sequence: Synthetic oligonucleotide
  Sense strand starting at position 732 of SEQ ID NO: 2564
gagggucucugaggagaug

SEQ ID NO: 198955 - RNA, 19 nt, Artificial Sequence
  Description of Artificial Sequence: Synthetic oligonucleotide
  Antisense strand to SEQ ID NO: 198954
caucuccucagagacccuc

SEQ ID NO: 198956 - RNA, 19 nt, Artificial Sequence
  Description of Artificial Sequence: Synthetic oligonucleotide
  Sense strand starting at position 785 of SEQ ID NO: 2564
uagcuuaacgguuguagga

SEQ ID NO: 198957 - RNA, 19 nt, Artificial Sequence
  Description of Artificial Sequence: Synthetic oligonucleotide
  Antisense strand to SEQ ID NO: 198956
uccuacaaccguuaagcua

SEQ ID NO: 198958 - RNA, 19 nt, Artificial Sequence
  Description of Artificial Sequence: Synthetic oligonucleotide
  Sense strand starting at position 861 of SEQ ID NO: 2564
uugcauauuugagacacca

SEQ ID NO: 198959 - RNA, 19 nt, Artificial Sequence
  Description of Artificial Sequence: Synthetic oligonucleotide
  Antisense strand to SEQ ID NO: 198958
uggugucucaaauaugcaa

SEQ ID NO: 198960 - RNA, 19 nt, Artificial Sequence
  Description of Artificial Sequence: Synthetic oligonucleotide
  Sense strand starting at position 976 of SEQ ID NO: 2564
cagagcuuuguaggccaua

SEQ ID NO: 198961 - RNA, 19 nt, Artificial Sequence
  Description of Artificial Sequence: Synthetic oligonucleotide
  Antisense strand to SEQ ID NO: 198960
uauggccuacaaagcucug

SEQ ID NO: 198962 - RNA, 19 nt, Artificial Sequence
  Description of Artificial Sequence: Synthetic oligonucleotide
  Sense strand starting at position 977 of SEQ ID NO: 2564
agagcuuuguaggccauaa

SEQ ID NO: 198963 - RNA, 19 nt, Artificial Sequence
  Description of Artificial Sequence: Synthetic oligonucleotide
  Antisense strand to SEQ ID NO: 198962
uuauggccuacaaagcucu

SEQ ID NO: 198964 - RNA, 19 nt, Artificial Sequence
  Description of Artificial Sequence: Synthetic oligonucleotide
  Sense strand starting at position 979 of SEQ ID NO: 2564
agcuuuguaggccauaaca

SEQ ID NO: 198965 - RNA, 19 nt, Artificial Sequence
  Description of Artificial Sequence: Synthetic oligonucleotide
  Antisense strand to SEQ ID NO: 198964
uguuauggccuacaaagcu

SEQ ID NO: 198966 - RNA, 19 nt, Artificial Sequence
  Description of Artificial Sequence: Synthetic oligonucleotide
  Sense strand starting at position 997 of SEQ ID NO: 2564
agggaaugaugugauuucu

SEQ ID NO: 198967 - RNA, 19 nt, Artificial Sequence
  Description of Artificial Sequence: Synthetic oligonucleotide
  Antisense strand to SEQ ID NO: 198966
agaaaucacaucauucccu

SEQ ID NO: 198968 - RNA, 19 nt, Artificial Sequence
  Description of Artificial Sequence: Synthetic oligonucleotide
  Sense strand starting at position 1037 of SEQ ID NO: 2564
gcugcuaugugagaguaga

SEQ ID NO: 198969 - RNA, 19 nt, Artificial Sequence
  Description of Artificial Sequence: Synthetic oligonucleotide
  Antisense strand to SEQ ID NO: 198968
ucuacucucacauagcagc

SEQ ID NO: 198970 - RNA, 19 nt, Artificial Sequence
  Description of Artificial Sequence: Synthetic oligonucleotide
  Sense strand starting at position 1175 of SEQ ID NO: 2564
aaggaagaguuccaugaga

SEQ ID NO: 198971 - RNA, 19 nt, Artificial Sequence
  Description of Artificial Sequence: Synthetic oligonucleotide
  Antisense strand to SEQ ID NO: 198970
ucucauggaacucuuccuu

SEQ ID NO: 198972 - RNA, 19 nt, Artificial Sequence
  Description of Artificial Sequence: Synthetic oligonucleotide
  Sense strand starting at position 1183 of SEQ ID NO: 2564
guuccaugagaaugcuuac

SEQ ID NO: 198973 - RNA, 19 nt, Artificial Sequence
  Description of Artificial Sequence: Synthetic oligonucleotide
  Antisense strand to SEQ ID NO: 198972
guaagcauucucauggaac

SEQ ID NO: 198974 - RNA, 19 nt, Artificial Sequence
  Description of Artificial Sequence: Synthetic oligonucleotide
  Sense strand starting at position 1186 of SEQ ID NO: 2564
ccaugagaaugcuuacaca

SEQ ID NO: 198975 - RNA, 19 nt, Artificial Sequence
  Description of Artificial Sequence: Synthetic oligonucleotide
  Antisense strand to SEQ ID NO: 198974
uguguaagcauucucaugg

SEQ ID NO: 198976 - RNA, 19 nt, Artificial Sequence
  Description of Artificial Sequence: Synthetic oligonucleotide
  Sense strand starting at position 1189 of SEQ ID NO: 2564
ugagaaugcuuacacagca

SEQ ID NO: 198977 - RNA, 19 nt, Artificial Sequence
  Description of Artificial Sequence: Synthetic oligonucleotide
  Antisense strand to SEQ ID NO: 198976
ugcuguguaagcauucuca

SEQ ID NO: 198978 - RNA, 19 nt, Artificial Sequence
  Description of Artificial Sequence: Synthetic oligonucleotide
  Sense strand starting at position 1323 of SEQ ID NO: 2564
cuguauaaucugggccaaa

SEQ ID NO: 198979 - RNA, 19 nt, Artificial Sequence
  Description of Artificial Sequence: Synthetic oligonucleotide
  Antisense strand to SEQ ID NO: 198978
uuuggcccagauuauacag

SEQ ID NO: 198980 - RNA, 19 nt, Artificial Sequence
  Description of Artificial Sequence: Synthetic oligonucleotide
  Sense strand starting at position 1324 of SEQ ID NO: 2564
uguauaaucugggccaaac

SEQ ID NO: 198981 - RNA, 19 nt, Artificial Sequence
  Description of Artificial Sequence: Synthetic oligonucleotide
  Antisense strand to SEQ ID NO: 198980
guuuggcccagauuauaca

SEQ ID NO: 198982 - RNA, 19 nt, Artificial Sequence
  Description of Artificial Sequence: Synthetic oligonucleotide
  Sense strand starting at position 1607 of SEQ ID NO: 2564
ccgcuacucgggaggguua

SEQ ID NO: 198983 - RNA, 19 nt, Artificial Sequence
  Description of Artificial Sequence: Synthetic oligonucleotide
  Antisense strand to SEQ ID NO: 198982
uaacccucccgaguagcgg

SEQ ID NO: 198984 - RNA, 19 nt, Artificial Sequence
  Description of Artificial Sequence: Synthetic oligonucleotide
  Sense strand starting at position 2130 of SEQ ID NO: 2564
gccuuagcucgagaaccaa

SEQ ID NO: 198985 - RNA, 19 nt, Artificial Sequence
  Description of Artificial Sequence: Synthetic oligonucleotide
  Antisense strand to SEQ ID NO: 198984
uugguucucgagcuaaggc

SEQ ID NO: 198986 - RNA, 19 nt, Artificial Sequence
  Description of Artificial Sequence: Synthetic oligonucleotide
  Sense strand starting at position 2923 of SEQ ID NO: 2564
gggccuugguuugugcaga

SEQ ID NO: 198987 - RNA, 19 nt, Artificial Sequence
  Description of Artificial Sequence: Synthetic oligonucleotide
  Antisense strand to SEQ ID NO: 198986
ucugcacaaaccaaggccc

SEQ ID NO: 198988 - RNA, 19 nt, Artificial Sequence
  Description of Artificial Sequence: Synthetic oligonucleotide
  Sense strand starting at position 2961 of SEQ ID NO: 2564
ggcgcugaguuuacggaau

SEQ ID NO: 198989 - RNA, 19 nt, Artificial Sequence
  Description of Artificial Sequence: Synthetic oligonucleotide
  Antisense strand to SEQ ID NO: 198988
auuccguaaacucagcgcc

SEQ ID NO: 198990 - RNA, 19 nt, Artificial Sequence
  Description of Artificial Sequence: Synthetic oligonucleotide
  Sense strand starting at position 2974 of SEQ ID NO: 2564
cggaaucggucuucaugau

SEQ ID NO: 198991 - RNA, 19 nt, Artificial Sequence
  Description of Artificial Sequence: Synthetic oligonucleotide
  Antisense strand to SEQ ID NO: 198990
aucaugaagaccgauuccg

SEQ ID NO: 198992 - RNA, 19 nt, Artificial Sequence
  Description of Artificial Sequence: Synthetic oligonucleotide
  Sense strand starting at position 3129 of SEQ ID NO: 2564
gccugaucggcuuagaaag

SEQ ID NO: 198993 - RNA, 19 nt, Artificial Sequence
  Description of Artificial Sequence: Synthetic oligonucleotide
  Antisense strand to SEQ ID NO: 198992
cuuucuaagccgaucaggc

SEQ ID NO: 198994 - RNA, 19 nt, Artificial Sequence
  Description of Artificial Sequence: Synthetic oligonucleotide
  Sense strand starting at position 3251 of SEQ ID NO: 2564
cacggaagacccuagcauu

SEQ ID NO: 198995 - RNA, 19 nt, Artificial Sequence
  Description of Artificial Sequence: Synthetic oligonucleotide
  Antisense strand to SEQ ID NO: 198994
aaugcuagggucuuccgug

SEQ ID NO: 198996 - RNA, 19 nt, Artificial Sequence
  Description of Artificial Sequence: Synthetic oligonucleotide
  Sense strand starting at position 3662 of SEQ ID NO: 2564
cccucuugguacccagaaa

SEQ ID NO: 198997 - RNA, 19 nt, Artificial Sequence
  Description of Artificial Sequence: Synthetic oligonucleotide
  Antisense strand to SEQ ID NO: 198996
uuucuggguaccaagaggg

SEQ ID NO: 198998 - RNA, 19 nt, Artificial Sequence
  Description of Artificial Sequence: Synthetic oligonucleotide
  Sense strand starting at position 3835 of SEQ ID NO: 2564
agaguaugccauuguccac

SEQ ID NO: 198999 - RNA, 19 nt, Artificial Sequence
  Description of Artificial Sequence: Synthetic oligonucleotide
  Antisense strand to SEQ ID NO: 198998
guggacaauggcauacucu

SEQ ID NO: 199000 - RNA, 19 nt, Artificial Sequence
  Description of Artificial Sequence: Synthetic oligonucleotide
  Sense strand starting at position 55 of SEQ ID NO: 2565
ggagcuauccuauaccaac

SEQ ID NO: 199001 - RNA, 19 nt, Artificial Sequence
  Description of Artificial Sequence: Synthetic oligonucleotide
  Antisense strand to SEQ ID NO: 199000
guugguauaggauagcucc

SEQ ID NO: 199002 - RNA, 19 nt, Artificial Sequence
  Description of Artificial Sequence: Synthetic oligonucleotide
  Sense strand starting at position 69 of SEQ ID NO: 2565
ccaacuguagcagaaagua

SEQ ID NO: 199003 - RNA, 19 nt, Artificial Sequence
  Description of Artificial Sequence: Synthetic oligonucleotide
  Antisense strand to SEQ ID NO: 199002
uacuuucugcuacaguugg

SEQ ID NO: 199004 - RNA, 19 nt, Artificial Sequence
  Description of Artificial Sequence: Synthetic oligonucleotide
  Sense strand starting at position 141 of SEQ ID NO: 2565
gcuggcauucuuugaggaa

SEQ ID NO: 199005 - RNA, 19 nt, Artificial Sequence
  Description of Artificial Sequence: Synthetic oligonucleotide
  Antisense strand to SEQ ID NO: 199004
uuccucaaagaaugccagc

SEQ ID NO: 199006 - RNA, 19 nt, Artificial Sequence
  Description of Artificial Sequence: Synthetic oligonucleotide
  Sense strand starting at position 199 of SEQ ID NO: 2565
aaaugaaggguuugggcua

SEQ ID NO: 199007 - RNA, 19 nt, Artificial Sequence
  Description of Artificial Sequence: Synthetic oligonucleotide
  Antisense strand to SEQ ID NO: 199006
uagcccaaacccuucauuu

SEQ ID NO: 199008 - RNA, 19 nt, Artificial Sequence
  Description of Artificial Sequence: Synthetic oligonucleotide
  Sense strand starting at position 204 of SEQ ID NO: 2565
aaggguuugggcuagauca

SEQ ID NO: 199009 - RNA, 19 nt, Artificial Sequence
  Description of Artificial Sequence: Synthetic oligonucleotide
  Antisense strand to SEQ ID NO: 199008
ugaucuagcccaaacccuu

SEQ ID NO: 199010 - RNA, 19 nt, Artificial Sequence
  Description of Artificial Sequence: Synthetic oligonucleotide
  Sense strand starting at position 206 of SEQ ID NO: 2565
ggguuugggcuagaucauc

SEQ ID NO: 199011 - RNA, 19 nt, Artificial Sequence
  Description of Artificial Sequence: Synthetic oligonucleotide
  Antisense strand to SEQ ID NO: 199010
gaugaucuagcccaaaccc

SEQ ID NO: 199012 - RNA, 19 nt, Artificial Sequence
  Description of Artificial Sequence: Synthetic oligonucleotide
  Sense strand starting at position 214 of SEQ ID NO: 2565
gcuagaucauccuuagagu

SEQ ID NO: 199013 - RNA, 19 nt, Artificial Sequence
  Description of Artificial Sequence: Synthetic oligonucleotide
  Antisense strand to SEQ ID NO: 199012
acucuaaggaugaucuagc

SEQ ID NO: 199014 - RNA, 19 nt, Artificial Sequence
  Description of Artificial Sequence: Synthetic oligonucleotide
  Sense strand starting at position 215 of SEQ ID NO: 2565
cuagaucauccuuagaguc

SEQ ID NO: 199015 - RNA, 19 nt, Artificial Sequence
  Description of Artificial Sequence: Synthetic oligonucleotide
  Antisense strand to SEQ ID NO: 199014
gacucuaaggaugaucuag

SEQ ID NO: 199016 - RNA, 19 nt, Artificial Sequence
  Description of Artificial Sequence: Synthetic oligonucleotide
  Sense strand starting at position 242 of SEQ ID NO: 2565
ucuaaacuucuaugugaug

SEQ ID NO: 199017 - RNA, 19 nt, Artificial Sequence
  Description of Artificial Sequence: Synthetic oligonucleotide
  Antisense strand to SEQ ID NO: 199016
caucacauagaaguuuaga

SEQ ID NO: 199018 - RNA, 19 nt, Artificial Sequence
  Description of Artificial Sequence: Synthetic oligonucleotide
  Sense strand starting at position 243 of SEQ ID NO: 2565
cuaaacuucuaugugaugu

SEQ ID NO: 199019 - RNA, 19 nt, Artificial Sequence
  Description of Artificial Sequence: Synthetic oligonucleotide
  Antisense strand to SEQ ID NO: 199018
acaucacauagaaguuuag

SEQ ID NO: 199020 - RNA, 19 nt, Artificial Sequence
  Description of Artificial Sequence: Synthetic oligonucleotide
  Sense strand starting at position 256 of SEQ ID NO: 2565
ugauguucuuucuuauaug

SEQ ID NO: 199021 - RNA, 19 nt, Artificial Sequence
  Description of Artificial Sequence: Synthetic oligonucleotide
  Antisense strand to SEQ ID NO: 199020
cauauaagaaagaacauca

SEQ ID NO: 199022 - RNA, 19 nt, Artificial Sequence
  Description of Artificial Sequence: Synthetic oligonucleotide
  Sense strand starting at position 299 of SEQ ID NO: 2565
uucuuuguacuuugaagau

SEQ ID NO: 199023 - RNA, 19 nt, Artificial Sequence
  Description of Artificial Sequence: Synthetic oligonucleotide
  Antisense strand to SEQ ID NO: 199022
aucuucaaaguacaaagaa

SEQ ID NO: 199024 - RNA, 19 nt, Artificial Sequence
  Description of Artificial Sequence: Synthetic oligonucleotide
  Sense strand starting at position 400 of SEQ ID NO: 2565
uacgcaaaugucuaacagu

SEQ ID NO: 199025 - RNA, 19 nt, Artificial Sequence
  Description of Artificial Sequence: Synthetic oligonucleotide
  Antisense strand to SEQ ID NO: 199024
acuguuagacauuugcgua

SEQ ID NO: 199026 - RNA, 19 nt, Artificial Sequence
  Description of Artificial Sequence: Synthetic oligonucleotide
  Sense strand starting at position 419 of SEQ ID NO: 2565
uggcaaaguaugugaccaa

SEQ ID NO: 199027 - RNA, 19 nt, Artificial Sequence
  Description of Artificial Sequence: Synthetic oligonucleotide
  Antisense strand to SEQ ID NO: 199026
uuggucacauacuuugcca

SEQ ID NO: 199028 - RNA, 19 nt, Artificial Sequence
  Description of Artificial Sequence: Synthetic oligonucleotide
  Sense strand starting at position 699 of SEQ ID NO: 2565
agauguucuggcuggauac

SEQ ID NO: 199029 - RNA, 19 nt, Artificial Sequence
  Description of Artificial Sequence: Synthetic oligonucleotide
  Antisense strand to SEQ ID NO: 199028
guauccagccagaacaucu

SEQ ID NO: 199030 - RNA, 19 nt, Artificial Sequence
  Description of Artificial Sequence: Synthetic oligonucleotide
  Sense strand starting at position 700 of SEQ ID NO: 2565
gauguucuggcuggauacu

SEQ ID NO: 199031 - RNA, 19 nt, Artificial Sequence
  Description of Artificial Sequence: Synthetic oligonucleotide
  Antisense strand to SEQ ID NO: 199030
aguauccagccagaacauc

SEQ ID NO: 199032 - RNA, 19 nt, Artificial Sequence
  Description of Artificial Sequence: Synthetic oligonucleotide
  Sense strand starting at position 701 of SEQ ID NO: 2565
auguucuggcuggauacua

SEQ ID NO: 199033 - RNA, 19 nt, Artificial Sequence
  Description of Artificial Sequence: Synthetic oligonucleotide
  Antisense strand to SEQ ID NO: 199032
uaguauccagccagaacau

SEQ ID NO: 199034 - RNA, 19 nt, Artificial Sequence
  Description of Artificial Sequence: Synthetic oligonucleotide
  Sense strand starting at position 709 of SEQ ID NO: 2565
gcuggauacuaacuggaga

SEQ ID NO: 199035 - RNA, 19 nt, Artificial Sequence
  Description of Artificial Sequence: Synthetic oligonucleotide
  Antisense strand to SEQ ID NO: 199034
ucuccaguuaguauccagc

SEQ ID NO: 199036 - RNA, 19 nt, Artificial Sequence
  Description of Artificial Sequence: Synthetic oligonucleotide
  Sense strand starting at position 750 of SEQ ID NO: 2565
cauggacaaguuugaggua

SEQ ID NO: 199037 - RNA, 19 nt, Artificial Sequence
  Description of Artificial Sequence: Synthetic oligonucleotide
  Antisense strand to SEQ ID NO: 199036
uaccucaaacuuguccaug

SEQ ID NO: 199038 - RNA, 19 nt, Artificial Sequence
  Description of Artificial Sequence: Synthetic oligonucleotide
  Sense strand starting at position 762 of SEQ ID NO: 2565
ugagguauuuaauaccaag

SEQ ID NO: 199039 - RNA, 19 nt, Artificial Sequence
  Description of Artificial Sequence: Synthetic oligonucleotide
  Antisense strand to SEQ ID NO: 199038
cuugguauuaaauaccuca

SEQ ID NO: 199040 - RNA, 19 nt, Artificial Sequence
  Description of Artificial Sequence: Synthetic oligonucleotide
  Sense strand starting at position 1269 of SEQ ID NO: 2565
gaggaagucggaugucaca

SEQ ID NO: 199041 - RNA, 19 nt, Artificial Sequence
  Description of Artificial Sequence: Synthetic oligonucleotide
  Antisense strand to SEQ ID NO: 199040
ugugacauccgacuuccuc

SEQ ID NO: 199042 - RNA, 19 nt, Artificial Sequence
  Description of Artificial Sequence: Synthetic oligonucleotide
  Sense strand starting at position 1281 of SEQ ID NO: 2565
ugucacauccaacggauaa

SEQ ID NO: 199043 - RNA, 19 nt, Artificial Sequence
  Description of Artificial Sequence: Synthetic oligonucleotide
  Antisense strand to SEQ ID NO: 199042
uuauccguuggaugugaca

SEQ ID NO: 199044 - RNA, 19 nt, Artificial Sequence
  Description of Artificial Sequence: Synthetic oligonucleotide
  Sense strand starting at position 2465 of SEQ ID NO: 2565
cauugugauucuuuacagg

SEQ ID NO: 199045 - RNA, 19 nt, Artificial Sequence
  Description of Artificial Sequence: Synthetic oligonucleotide
  Antisense strand to SEQ ID NO: 199044
ccuguaaagaaucacaaug

SEQ ID NO: 199046 - RNA, 19 nt, Artificial Sequence
  Description of Artificial Sequence: Synthetic oligonucleotide
  Sense strand starting at position 2471 of SEQ ID NO: 2565
gauucuuuacaggguguuu

SEQ ID NO: 199047 - RNA, 19 nt, Artificial Sequence
  Description of Artificial Sequence: Synthetic oligonucleotide
  Antisense strand to SEQ ID NO: 199046
aaacacccuguaaagaauc

SEQ ID NO: 199048 - RNA, 19 nt, Artificial Sequence
  Description of Artificial Sequence: Synthetic oligonucleotide
  Sense strand starting at position 2642 of SEQ ID NO: 2565
aguggaguuccuggagaag

SEQ ID NO: 199049 - RNA, 19 nt, Artificial Sequence
  Description of Artificial Sequence: Synthetic oligonucleotide
  Antisense strand to SEQ ID NO: 199048
cuucuccaggaacuccacu

SEQ ID NO: 199050 - RNA, 19 nt, Artificial Sequence
  Description of Artificial Sequence: Synthetic oligonucleotide
  Sense strand starting at position 2667 of SEQ ID NO: 2565
aguccuaaaucaccgaguu

SEQ ID NO: 199051 - RNA, 19 nt, Artificial Sequence
  Description of Artificial Sequence: Synthetic oligonucleotide
  Antisense strand to SEQ ID NO: 199050
aacucggugauuuaggacu

SEQ ID NO: 199052 - RNA, 19 nt, Artificial Sequence
  Description of Artificial Sequence: Synthetic oligonucleotide
  Sense strand starting at position 2817 of SEQ ID NO: 2565
auaguagcuguugauaguu

SEQ ID NO: 199053 - RNA, 19 nt, Artificial Sequence
  Description of Artificial Sequence: Synthetic oligonucleotide
  Antisense strand to SEQ ID NO: 199052
aacuaucaacagcuacuau

SEQ ID NO: 199054 - RNA, 19 nt, Artificial Sequence
  Description of Artificial Sequence: Synthetic oligonucleotide
  Sense strand starting at position 2980 of SEQ ID NO: 2565
ucugcuaaugaauguaauu

SEQ ID NO: 199055 - RNA, 19 nt, Artificial Sequence
  Description of Artificial Sequence: Synthetic oligonucleotide
  Antisense strand to SEQ ID NO: 199054
aauuacauucauuagcaga

SEQ ID NO: 199056 - RNA, 19 nt, Artificial Sequence
  Description of Artificial Sequence: Synthetic oligonucleotide
  Sense strand starting at position 3224 of SEQ ID NO: 2565
agcuuugaagagcaaacua

SEQ ID NO: 199057 - RNA, 19 nt, Artificial Sequence
  Description of Artificial Sequence: Synthetic oligonucleotide
  Antisense strand to SEQ ID NO: 199056
uaguuugcucuucaaagcu

SEQ ID NO: 199058 - RNA, 19 nt, Artificial Sequence
  Description of Artificial Sequence: Synthetic oligonucleotide
  Sense strand starting at position 3249 of SEQ ID NO: 2565
cagaauucuuuggucaaga

SEQ ID NO: 199059 - RNA, 19 nt, Artificial Sequence
  Description of Artificial Sequence: Synthetic oligonucleotide
  Antisense strand to SEQ ID NO: 199058
ucuugaccaaagaauucug

SEQ ID NO: 199060 - RNA, 19 nt, Artificial Sequence
  Description of Artificial Sequence: Synthetic oligonucleotide
  Sense strand starting at position 3250 of SEQ ID NO: 2565
agaauucuuuggucaagac

SEQ ID NO: 199061 - RNA, 19 nt, Artificial Sequence
  Description of Artificial Sequence: Synthetic oligonucleotide
  Antisense strand to SEQ ID NO: 199060
gucuugaccaaagaauucu

SEQ ID NO: 199062 - RNA, 19 nt, Artificial Sequence
  Description of Artificial Sequence: Synthetic oligonucleotide
  Sense strand starting at position 3523 of SEQ ID NO: 2565
aucaauguugcauggaaac

SEQ ID NO: 199063 - RNA, 19 nt, Artificial Sequence
  Description of Artificial Sequence: Synthetic oligonucleotide
  Antisense strand to SEQ ID NO: 199062
guuuccaugcaacauugau

SEQ ID NO: 199064 - RNA, 19 nt, Artificial Sequence
  Description of Artificial Sequence: Synthetic oligonucleotide
  Sense strand starting at position 3578 of SEQ ID NO: 2565
acaacagauuguuuauguu

SEQ ID NO: 199065 - RNA, 19 nt, Artificial Sequence
  Description of Artificial Sequence: Synthetic oligonucleotide
  Antisense strand to SEQ ID NO: 199064
aacauaaacaaucuguugu

SEQ ID NO: 199066 - RNA, 19 nt, Artificial Sequence
  Description of Artificial Sequence: Synthetic oligonucleotide
  Sense strand starting at position 3657 of SEQ ID NO: 2565
auggcuuuguaaguaaacu

SEQ ID NO: 199067 - RNA, 19 nt, Artificial Sequence
  Description of Artificial Sequence: Synthetic oligonucleotide
  Antisense strand to SEQ ID NO: 199066
aguuuacuuacaaagccau

SEQ ID NO: 199068 - RNA, 19 nt, Artificial Sequence
  Description of Artificial Sequence: Synthetic oligonucleotide
  Sense strand starting at position 3716 of SEQ ID NO: 2565
ucagaagagugauaacaaa

SEQ ID NO: 199069 - RNA, 19 nt, Artificial Sequence
  Description of Artificial Sequence: Synthetic oligonucleotide
  Antisense strand to SEQ ID NO: 199068
uuuguuaucacucuucuga

SEQ ID NO: 199070 - RNA, 19 nt, Artificial Sequence
  Description of Artificial Sequence: Synthetic oligonucleotide
  Sense strand starting at position 3734 of SEQ ID NO: 2565
augacuuaauuuggaagau

SEQ ID NO: 199071 - RNA, 19 nt, Artificial Sequence
  Description of Artificial Sequence: Synthetic oligonucleotide
  Antisense strand to SEQ ID NO: 199070
aucuuccaaauuaagucau

SEQ ID NO: 199072 - RNA, 19 nt, Artificial Sequence
  Description of Artificial Sequence: Synthetic oligonucleotide
  Sense strand starting at position 3735 of SEQ ID NO: 2565
ugacuuaauuuggaagauu

SEQ ID NO: 199073 - RNA, 19 nt, Artificial Sequence
  Description of Artificial Sequence: Synthetic oligonucleotide
  Antisense strand to SEQ ID NO: 199072
aaucuuccaaauuaaguca

SEQ ID NO: 199074 - RNA, 19 nt, Artificial Sequence
  Description of Artificial Sequence: Synthetic oligonucleotide
  Sense strand starting at position 3822 of SEQ ID NO: 2565
gcagcaguucuccacccaa

SEQ ID NO: 199075 - RNA, 19 nt, Artificial Sequence
  Description of Artificial Sequence: Synthetic oligonucleotide
  Antisense strand to SEQ ID NO: 199074
uuggguggagaacugcugc

SEQ ID NO: 199076 - RNA, 19 nt, Artificial Sequence
  Description of Artificial Sequence: Synthetic oligonucleotide
  Sense strand starting at position 3885 of SEQ ID NO: 2565
ccuuacuauccugaaaggu

SEQ ID NO: 199077 - RNA, 19 nt, Artificial Sequence
  Description of Artificial Sequence: Synthetic oligonucleotide
  Antisense strand to SEQ ID NO: 199076
accuuucaggauaguaagg

SEQ ID NO: 199078 - RNA, 19 nt, Artificial Sequence
  Description of Artificial Sequence: Synthetic oligonucleotide
  Sense strand starting at position 3898 of SEQ ID NO: 2565
aaagguaauuuguggauaa

SEQ ID NO: 199079 - RNA, 19 nt, Artificial Sequence
  Description of Artificial Sequence: Synthetic oligonucleotide
  Antisense strand to SEQ ID NO: 199078
uuauccacaaauuaccuuu

SEQ ID NO: 199080 - RNA, 19 nt, Artificial Sequence
  Description of Artificial Sequence: Synthetic oligonucleotide
  Sense strand starting at position 16 of SEQ ID NO: 2566
gggcauagagguugaguga

SEQ ID NO: 199081 - RNA, 19 nt, Artificial Sequence
  Description of Artificial Sequence: Synthetic oligonucleotide
  Antisense strand to SEQ ID NO: 199080
ucacucaaccucuaugccc

SEQ ID NO: 199082 - RNA, 19 nt, Artificial Sequence
  Description of Artificial Sequence: Synthetic oligonucleotide
  Sense strand starting at position 49 of SEQ ID NO: 2566
ugcugucugcuagcaaguu

SEQ ID NO: 199083 - RNA, 19 nt, Artificial Sequence
  Description of Artificial Sequence: Synthetic oligonucleotide
  Antisense strand to SEQ ID NO: 199082
aacuugcuagcagacagca

SEQ ID NO: 199084 - RNA, 19 nt, Artificial Sequence
  Description of Artificial Sequence: Synthetic oligonucleotide
  Sense strand starting at position 81 of SEQ ID NO: 2566
guagacuaggucuguuaaa

SEQ ID NO: 199085 - RNA, 19 nt, Artificial Sequence
  Description of Artificial Sequence: Synthetic oligonucleotide
  Antisense strand to SEQ ID NO: 199084
uuuaacagaccuagucuac

SEQ ID NO: 199086 - RNA, 19 nt, Artificial Sequence
  Description of Artificial Sequence: Synthetic oligonucleotide
  Sense strand starting at position 82 of SEQ ID NO: 2566
uagacuaggucuguuaaag

SEQ ID NO: 199087 - RNA, 19 nt, Artificial Sequence
  Description of Artificial Sequence: Synthetic oligonucleotide
  Antisense strand to SEQ ID NO: 199086
cuuuaacagaccuagucua

SEQ ID NO: 199088 - RNA, 19 nt, Artificial Sequence
  Description of Artificial Sequence: Synthetic oligonucleotide
  Sense strand starting at position 415 of SEQ ID NO: 2566
agcccagucucuuuauuac

SEQ ID NO: 199089 - RNA, 19 nt, Artificial Sequence
  Description of Artificial Sequence: Synthetic oligonucleotide
  Antisense strand to SEQ ID NO: 199088
guaauaaagagacugggcu

SEQ ID NO: 199090 - RNA, 19 nt, Artificial Sequence
  Description of Artificial Sequence: Synthetic oligonucleotide
  Sense strand starting at position 426 of SEQ ID NO: 2566
uuuauuacaccauguggau

SEQ ID NO: 199091 - RNA, 19 nt, Artificial Sequence
  Description of Artificial Sequence: Synthetic oligonucleotide
  Antisense strand to SEQ ID NO: 199090
auccacaugguguaauaaa

SEQ ID NO: 199092 - RNA, 19 nt, Artificial Sequence
  Description of Artificial Sequence: Synthetic oligonucleotide
  Sense strand starting at position 439 of SEQ ID NO: 2566
guggauuccugacugcuuu

SEQ ID NO: 199093 - RNA, 19 nt, Artificial Sequence
  Description of Artificial Sequence: Synthetic oligonucleotide
  Antisense strand to SEQ ID NO: 199092
aaagcagucaggaauccac

SEQ ID NO: 199094 - RNA, 19 nt, Artificial Sequence
  Description of Artificial Sequence: Synthetic oligonucleotide
  Sense strand starting at position 440 of SEQ ID NO: 2566
uggauuccugacugcuuua

SEQ ID NO: 199095 - RNA, 19 nt, Artificial Sequence
  Description of Artificial Sequence: Synthetic oligonucleotide
  Antisense strand to SEQ ID NO: 199094
uaaagcagucaggaaucca

SEQ ID NO: 199096 - RNA, 19 nt, Artificial Sequence
  Description of Artificial Sequence: Synthetic oligonucleotide
  Sense strand starting at position 495 of SEQ ID NO: 2566
cugcuuguccugcauggau

SEQ ID NO: 199097 - RNA, 19 nt, Artificial Sequence
  Description of Artificial Sequence: Synthetic oligonucleotide
  Antisense strand to SEQ ID NO: 199096
auccaugcaggacaagcag

SEQ ID NO: 199098 - RNA, 19 nt, Artificial Sequence
  Description of Artificial Sequence: Synthetic oligonucleotide
  Sense strand starting at position 497 of SEQ ID NO: 2566
gcuuguccugcauggauuu

SEQ ID NO: 199099 - RNA, 19 nt, Artificial Sequence
  Description of Artificial Sequence: Synthetic oligonucleotide
  Antisense strand to SEQ ID NO: 199098
aaauccaugcaggacaagc

SEQ ID NO: 199100 - RNA, 19 nt, Artificial Sequence
  Description of Artificial Sequence: Synthetic oligonucleotide
  Sense strand starting at position 777 of SEQ ID NO: 2566
agugaagcccugugagguu

SEQ ID NO: 199101 - RNA, 19 nt, Artificial Sequence
  Description of Artificial Sequence: Synthetic oligonucleotide
  Antisense strand to SEQ ID NO: 199100
aaccucacagggcuucacu

SEQ ID NO: 199102 - RNA, 19 nt, Artificial Sequence
  Description of Artificial Sequence: Synthetic oligonucleotide
  Sense strand starting at position 980 of SEQ ID NO: 2566
gccagaagaugaguuaaau

SEQ ID NO: 199103 - RNA, 19 nt, Artificial Sequence
  Description of Artificial Sequence: Synthetic oligonucleotide
  Antisense strand to SEQ ID NO: 199102
auuuaacucaucuucuggc

SEQ ID NO: 199104 - RNA, 19 nt, Artificial Sequence
  Description of Artificial Sequence: Synthetic oligonucleotide
  Sense strand starting at position 989 of SEQ ID NO: 2566
ugaguuaaauuaggaagau

SEQ ID NO: 199105 - RNA, 19 nt, Artificial Sequence
  Description of Artificial Sequence: Synthetic oligonucleotide
  Antisense strand to SEQ ID NO: 199104
aucuuccuaauuuaacuca

SEQ ID NO: 199106 - RNA, 19 nt, Artificial Sequence
  Description of Artificial Sequence: Synthetic oligonucleotide
  Sense strand starting at position 990 of SEQ ID NO: 2566
gaguuaaauuaggaagauc

SEQ ID NO: 199107 - RNA, 19 nt, Artificial Sequence
  Description of Artificial Sequence: Synthetic oligonucleotide
  Antisense strand to SEQ ID NO: 199106
gaucuuccuaauuuaacuc

SEQ ID NO: 199108 - RNA, 19 nt, Artificial Sequence
  Description of Artificial Sequence: Synthetic oligonucleotide
  Sense strand starting at position 1020 of SEQ ID NO: 2566
ggauaucucuucuccaggu

SEQ ID NO: 199109 - RNA, 19 nt, Artificial Sequence
  Description of Artificial Sequence: Synthetic oligonucleotide
  Antisense strand to SEQ ID NO: 199108
accuggagaagagauaucc

SEQ ID NO: 199110 - RNA, 19 nt, Artificial Sequence
  Description of Artificial Sequence: Synthetic oligonucleotide
  Sense strand starting at position 1022 of SEQ ID NO: 2566
auaucucuucuccagguga

SEQ ID NO: 199111 - RNA, 19 nt, Artificial Sequence
  Description of Artificial Sequence: Synthetic oligonucleotide
  Antisense strand to SEQ ID NO: 199110
ucaccuggagaagagauau

SEQ ID NO: 199112 - RNA, 19 nt, Artificial Sequence
  Description of Artificial Sequence: Synthetic oligonucleotide
  Sense strand starting at position 2054 of SEQ ID NO: 2566
ccgggaaacucagcaucaa

SEQ ID NO: 199113 - RNA, 19 nt, Artificial Sequence
  Description of Artificial Sequence: Synthetic oligonucleotide
  Antisense strand to SEQ ID NO: 199112
uugaugcugaguuucccgg

SEQ ID NO: 199114 - RNA, 19 nt, Artificial Sequence
  Description of Artificial Sequence: Synthetic oligonucleotide
  Sense strand starting at position 2100 of SEQ ID NO: 2566
uuuguuuccgauuaucaaa

SEQ ID NO: 199115 - RNA, 19 nt, Artificial Sequence
  Description of Artificial Sequence: Synthetic oligonucleotide
  Antisense strand to SEQ ID NO: 199114
uuugauaaucggaaacaaa

SEQ ID NO: 199116 - RNA, 19 nt, Artificial Sequence
  Description of Artificial Sequence: Synthetic oligonucleotide
  Sense strand starting at position 2180 of SEQ ID NO: 2566
cagaaaucaugguuuauug

SEQ ID NO: 199117 - RNA, 19 nt, Artificial Sequence
  Description of Artificial Sequence: Synthetic oligonucleotide
  Antisense strand to SEQ ID NO: 199116
caauaaaccaugauuucug

SEQ ID NO: 199118 - RNA, 19 nt, Artificial Sequence
  Description of Artificial Sequence: Synthetic oligonucleotide
  Sense strand starting at position 2182 of SEQ ID NO: 2566
gaaaucaugguuuauugca

SEQ ID NO: 199119 - RNA, 19 nt, Artificial Sequence
  Description of Artificial Sequence: Synthetic oligonucleotide
  Antisense strand to SEQ ID NO: 199118
ugcaauaaaccaugauuuc

SEQ ID NO: 199120 - RNA, 19 nt, Artificial Sequence
  Description of Artificial Sequence: Synthetic oligonucleotide
  Sense strand starting at position 2325 of SEQ ID NO: 2566
cgucauaauggaugugcca

SEQ ID NO: 199121 - RNA, 19 nt, Artificial Sequence
  Description of Artificial Sequence: Synthetic oligonucleotide
  Antisense strand to SEQ ID NO: 199120
uggcacauccauuaugacg

SEQ ID NO: 199122 - RNA, 19 nt, Artificial Sequence
  Description of Artificial Sequence: Synthetic oligonucleotide
  Sense strand starting at position 2414 of SEQ ID NO: 2566
gucgaaucacuaggugaaa

SEQ ID NO: 199123 - RNA, 19 nt, Artificial Sequence
  Description of Artificial Sequence: Synthetic oligonucleotide
  Antisense strand to SEQ ID NO: 199122
uuucaccuagugauucgac

SEQ ID NO: 199124 - RNA, 19 nt, Artificial Sequence
  Description of Artificial Sequence: Synthetic oligonucleotide
  Sense strand starting at position 2552 of SEQ ID NO: 2566
uuuggcaaguuaucugacu

SEQ ID NO: 199125 - RNA, 19 nt, Artificial Sequence
  Description of Artificial Sequence: Synthetic oligonucleotide
  Antisense strand to SEQ ID NO: 199124
agucagauaacuugccaaa

SEQ ID NO: 199126 - RNA, 19 nt, Artificial Sequence
  Description of Artificial Sequence: Synthetic oligonucleotide
  Sense strand starting at position 2553 of SEQ ID NO: 2566
uuggcaaguuaucugacuu

SEQ ID NO: 199127 - RNA, 19 nt, Artificial Sequence
  Description of Artificial Sequence: Synthetic oligonucleotide
  Antisense strand to SEQ ID NO: 199126
aagucagauaacuugccaa

SEQ ID NO: 199128 - RNA, 19 nt, Artificial Sequence
  Description of Artificial Sequence: Synthetic oligonucleotide
  Sense strand starting at position 2682 of SEQ ID NO: 2566
cuagaucauagacgugauu

SEQ ID NO: 199129 - RNA, 19 nt, Artificial Sequence
  Description of Artificial Sequence: Synthetic oligonucleotide
  Antisense strand to SEQ ID NO: 199128
aaucacgucuaugaucuag

SEQ ID NO: 199130 - RNA, 19 nt, Artificial Sequence
  Description of Artificial Sequence: Synthetic oligonucleotide
  Sense strand starting at position 2684 of SEQ ID NO: 2566
agaucauagacgugauuau

SEQ ID NO: 199131 - RNA, 19 nt, Artificial Sequence
  Description of Artificial Sequence: Synthetic oligonucleotide
  Antisense strand to SEQ ID NO: 199130
auaaucacgucuaugaucu

SEQ ID NO: 199132 - RNA, 19 nt, Artificial Sequence
  Description of Artificial Sequence: Synthetic oligonucleotide
  Sense strand starting at position 2688 of SEQ ID NO: 2566
cauagacgugauuauauau

SEQ ID NO: 199133 - RNA, 19 nt, Artificial Sequence
  Description of Artificial Sequence: Synthetic oligonucleotide
  Antisense strand to SEQ ID NO: 199132
auauauaaucacgucuaug

SEQ ID NO: 199134 - RNA, 19 nt, Artificial Sequence
  Description of Artificial Sequence: Synthetic oligonucleotide
  Sense strand starting at position 2896 of SEQ ID NO: 2566
ccuugaucuagcgguaaug

SEQ ID NO: 199135 - RNA, 19 nt, Artificial Sequence
  Description of Artificial Sequence: Synthetic oligonucleotide
  Antisense strand to SEQ ID NO: 199134
cauuaccgcuagaucaagg

SEQ ID NO: 199136 - RNA, 19 nt, Artificial Sequence
  Description of Artificial Sequence: Synthetic oligonucleotide
  Sense strand starting at position 3682 of SEQ ID NO: 2566
gcaccuacuuuacaaggaa

SEQ ID NO: 199137 - RNA, 19 nt, Artificial Sequence
  Description of Artificial Sequence: Synthetic oligonucleotide
  Antisense strand to SEQ ID NO: 199136
uuccuuguaaaguaggugc

SEQ ID NO: 199138 - RNA, 19 nt, Artificial Sequence
  Description of Artificial Sequence: Synthetic oligonucleotide
  Sense strand starting at position 3745 of SEQ ID NO: 2566
accugugaaucugcuauua

SEQ ID NO: 199139 - RNA, 19 nt, Artificial Sequence
  Description of Artificial Sequence: Synthetic oligonucleotide
  Antisense strand to SEQ ID NO: 199138
uaauagcagauucacaggu

SEQ ID NO: 199140 - RNA, 19 nt, Artificial Sequence
  Description of Artificial Sequence: Synthetic oligonucleotide
  Sense strand starting at position 3793 of SEQ ID NO: 2566
agcaucagauauuaggauu

SEQ ID NO: 199141 - RNA, 19 nt, Artificial Sequence
  Description of Artificial Sequence: Synthetic oligonucleotide
  Antisense strand to SEQ ID NO: 199140
aauccuaauaucugaugcu

SEQ ID NO: 199142 - RNA, 19 nt, Artificial Sequence
  Description of Artificial Sequence: Synthetic oligonucleotide
  Sense strand starting at position 3824 of SEQ ID NO: 2566
ucacuaauuugguagugga

SEQ ID NO: 199143 - RNA, 19 nt, Artificial Sequence
  Description of Artificial Sequence: Synthetic oligonucleotide
  Antisense strand to SEQ ID NO: 199142
uccacuaccaaauuaguga

SEQ ID NO: 199144 - RNA, 19 nt, Artificial Sequence
  Description of Artificial Sequence: Synthetic oligonucleotide
  Sense strand starting at position 3827 of SEQ ID NO: 2566
cuaauuugguaguggaaau

SEQ ID NO: 199145 - RNA, 19 nt, Artificial Sequence
  Description of Artificial Sequence: Synthetic oligonucleotide
  Antisense strand to SEQ ID NO: 199144
auuuccacuaccaaauuag

SEQ ID NO: 199146 - RNA, 19 nt, Artificial Sequence
  Description of Artificial Sequence: Synthetic oligonucleotide
  Sense strand starting at position 3839 of SEQ ID NO: 2566
uggaaaugauguucuaaug

SEQ ID NO: 199147 - RNA, 19 nt, Artificial Sequence
  Description of Artificial Sequence: Synthetic oligonucleotide
  Antisense strand to SEQ ID NO: 199146
cauuagaacaucauuucca

SEQ ID NO: 199148 - RNA, 19 nt, Artificial Sequence
  Description of Artificial Sequence: Synthetic oligonucleotide
  Sense strand starting at position 3853 of SEQ ID NO: 2566
uaauguggcucuuugauua

SEQ ID NO: 199149 - RNA, 19 nt, Artificial Sequence
  Description of Artificial Sequence: Synthetic oligonucleotide
  Antisense strand to SEQ ID NO: 199148
uaaucaaagagccacauua

SEQ ID NO: 199150 - RNA, 19 nt, Artificial Sequence
  Description of Artificial Sequence: Synthetic oligonucleotide
  Sense strand starting at position 3857 of SEQ ID NO: 2566
guggcucuuugauuaccaa

SEQ ID NO: 199151 - RNA, 19 nt, Artificial Sequence
  Description of Artificial Sequence: Synthetic oligonucleotide
  Antisense strand to SEQ ID NO: 199150
uugguaaucaaagagccac

SEQ ID NO: 199152 - RNA, 19 nt, Artificial Sequence
  Description of Artificial Sequence: Synthetic oligonucleotide
  Sense strand starting at position 3947 of SEQ ID NO: 2566
gccuuaauguguuucuuac

SEQ ID NO: 199153 - RNA, 19 nt, Artificial Sequence
  Description of Artificial Sequence: Synthetic oligonucleotide
  Antisense strand to SEQ ID NO: 199152
guaagaaacacauuaaggc

SEQ ID NO: 199154 - RNA, 19 nt, Artificial Sequence
  Description of Artificial Sequence: Synthetic oligonucleotide
  Sense strand starting at position 3953 of SEQ ID NO: 2566
auguguuucuuacugaucu

SEQ ID NO: 199155 - RNA, 19 nt, Artificial Sequence
  Description of Artificial Sequence: Synthetic oligonucleotide
  Antisense strand to SEQ ID NO: 199154
agaucaguaagaaacacau

SEQ ID NO: 199156 - RNA, 19 nt, Artificial Sequence
  Description of Artificial Sequence: Synthetic oligonucleotide
  Sense strand starting at position 3955 of SEQ ID NO: 2566
guguuucuuacugaucugu

SEQ ID NO: 199157 - RNA, 19 nt, Artificial Sequence
  Description of Artificial Sequence: Synthetic oligonucleotide
  Antisense strand to SEQ ID NO: 199156
acagaucaguaagaaacac

SEQ ID NO: 199158 - RNA, 19 nt, Artificial Sequence
  Description of Artificial Sequence: Synthetic oligonucleotide
  Sense strand starting at position 3957 of SEQ ID NO: 2566
guuucuuacugaucuguaa

SEQ ID NO: 199159 - RNA, 19 nt, Artificial Sequence
  Description of Artificial Sequence: Synthetic oligonucleotide
  Antisense strand to SEQ ID NO: 199158
uuacagaucaguaagaaac

SEQ ID NO: 199160 - RNA, 19 nt, Artificial Sequence
  Description of Artificial Sequence: Synthetic oligonucleotide
  Sense strand starting at position 447 of SEQ ID NO: 2568
gguuaaacuucuccaacgu

SEQ ID NO: 199161 - RNA, 19 nt, Artificial Sequence
  Description of Artificial Sequence: Synthetic oligonucleotide
  Antisense strand to SEQ ID NO: 199160
acguuggagaaguuuaacc

SEQ ID NO: 199162 - RNA, 19 nt, Artificial Sequence
  Description of Artificial Sequence: Synthetic oligonucleotide
  Sense strand starting at position 448 of SEQ ID NO: 2568
guuaaacuucuccaacgua

SEQ ID NO: 199163 - RNA, 19 nt, Artificial Sequence
  Description of Artificial Sequence: Synthetic oligonucleotide
  Antisense strand to SEQ ID NO: 199162
uacguuggagaaguuuaac

SEQ ID NO: 199164 - RNA, 19 nt, Artificial Sequence
  Description of Artificial Sequence: Synthetic oligonucleotide
  Sense strand starting at position 513 of SEQ ID NO: 2568
guuugagucuugucuaauu

SEQ ID NO: 199165 - RNA, 19 nt, Artificial Sequence
  Description of Artificial Sequence: Synthetic oligonucleotide
  Antisense strand to SEQ ID NO: 199164
aauuagacaagacucaaac

SEQ ID NO: 199166 - RNA, 19 nt, Artificial Sequence
  Description of Artificial Sequence: Synthetic oligonucleotide
  Sense strand starting at position 545 of SEQ ID NO: 2568
cagauuguuuaggugaauc

SEQ ID NO: 199167 - RNA, 19 nt, Artificial Sequence
  Description of Artificial Sequence: Synthetic oligonucleotide
  Antisense strand to SEQ ID NO: 199166
gauucaccuaaacaaucug

SEQ ID NO: 199168 - RNA, 19 nt, Artificial Sequence
  Description of Artificial Sequence: Synthetic oligonucleotide
  Sense strand starting at position 547 of SEQ ID NO: 2568
gauuguuuaggugaauccu

SEQ ID NO: 199169 - RNA, 19 nt, Artificial Sequence
  Description of Artificial Sequence: Synthetic oligonucleotide
  Antisense strand to SEQ ID NO: 199168
aggauucaccuaaacaauc

SEQ ID NO: 199170 - RNA, 19 nt, Artificial Sequence
  Description of Artificial Sequence: Synthetic oligonucleotide
  Sense strand starting at position 647 of SEQ ID NO: 2568
uuccaauuaguguacaguu

SEQ ID NO: 199171 - RNA, 19 nt, Artificial Sequence
  Description of Artificial Sequence: Synthetic oligonucleotide
  Antisense strand to SEQ ID NO: 199170
aacuguacacuaauuggaa

SEQ ID NO: 199172 - RNA, 19 nt, Artificial Sequence
  Description of Artificial Sequence: Synthetic oligonucleotide
  Sense strand starting at position 657 of SEQ ID NO: 2568
uguacaguuugucuaagga

SEQ ID NO: 199173 - RNA, 19 nt, Artificial Sequence
  Description of Artificial Sequence: Synthetic oligonucleotide
  Antisense strand to SEQ ID NO: 199172
uccuuagacaaacuguaca

SEQ ID NO: 199174 - RNA, 19 nt, Artificial Sequence
  Description of Artificial Sequence: Synthetic oligonucleotide
  Sense strand starting at position 1069 of SEQ ID NO: 2568
ccugguuaaauguggaaua

SEQ ID NO: 199175 - RNA, 19 nt, Artificial Sequence
  Description of Artificial Sequence: Synthetic oligonucleotide
  Antisense strand to SEQ ID NO: 199174
uauuccacauuuaaccagg

SEQ ID NO: 199176 - RNA, 19 nt, Artificial Sequence
  Description of Artificial Sequence: Synthetic oligonucleotide
  Sense strand starting at position 1081 of SEQ ID NO: 2568
uggaauacaucugagaauu

SEQ ID NO: 199177 - RNA, 19 nt, Artificial Sequence
  Description of Artificial Sequence: Synthetic oligonucleotide
  Antisense strand to SEQ ID NO: 199176
aauucucagauguauucca

SEQ ID NO: 199178 - RNA, 19 nt, Artificial Sequence
  Description of Artificial Sequence: Synthetic oligonucleotide
  Sense strand starting at position 1136 of SEQ ID NO: 2568
ugguguuaacgugaggaga

SEQ ID NO: 199179 - RNA, 19 nt, Artificial Sequence
  Description of Artificial Sequence: Synthetic oligonucleotide
  Antisense strand to SEQ ID NO: 199178
ucuccucacguuaacacca

SEQ ID NO: 199180 - RNA, 19 nt, Artificial Sequence
  Description of Artificial Sequence: Synthetic oligonucleotide
  Sense strand starting at position 1152 of SEQ ID NO: 2568
agauacaugcaauggcaaa

SEQ ID NO: 199181 - RNA, 19 nt, Artificial Sequence
  Description of Artificial Sequence: Synthetic oligonucleotide
  Antisense strand to SEQ ID NO: 199180
uuugccauugcauguaucu

SEQ ID NO: 199182 - RNA, 19 nt, Artificial Sequence
  Description of Artificial Sequence: Synthetic oligonucleotide
  Sense strand starting at position 1208 of SEQ ID NO: 2568
cccagagauuaagugaauu

SEQ ID NO: 199183 - RNA, 19 nt, Artificial Sequence
  Description of Artificial Sequence: Synthetic oligonucleotide
  Antisense strand to SEQ ID NO: 199182
aauucacuuaaucucuggg

SEQ ID NO: 199184 - RNA, 19 nt, Artificial Sequence
  Description of Artificial Sequence: Synthetic oligonucleotide
  Sense strand starting at position 1255 of SEQ ID NO: 2568
ccuccuaagcucgggaaua

SEQ ID NO: 199185 - RNA, 19 nt, Artificial Sequence
  Description of Artificial Sequence: Synthetic oligonucleotide
  Antisense strand to SEQ ID NO: 199184
uauucccgagcuuaggagg

SEQ ID NO: 199186 - RNA, 19 nt, Artificial Sequence
  Description of Artificial Sequence: Synthetic oligonucleotide
  Sense strand starting at position 1277 of SEQ ID NO: 2568
auaagaauguguucccuga

SEQ ID NO: 199187 - RNA, 19 nt, Artificial Sequence
  Description of Artificial Sequence: Synthetic oligonucleotide
  Antisense strand to SEQ ID NO: 199186
ucagggaacacauucuuau

SEQ ID NO: 199188 - RNA, 19 nt, Artificial Sequence
  Description of Artificial Sequence: Synthetic oligonucleotide
  Sense strand starting at position 1279 of SEQ ID NO: 2568
aagaauguguucccugaac

SEQ ID NO: 199189 - RNA, 19 nt, Artificial Sequence
  Description of Artificial Sequence: Synthetic oligonucleotide
  Antisense strand to SEQ ID NO: 199188
guucagggaacacauucuu

SEQ ID NO: 199190 - RNA, 19 nt, Artificial Sequence
  Description of Artificial Sequence: Synthetic oligonucleotide
  Sense strand starting at position 1281 of SEQ ID NO: 2568
gaauguguucccugaacgg

SEQ ID NO: 199191 - RNA, 19 nt, Artificial Sequence
  Description of Artificial Sequence: Synthetic oligonucleotide
  Antisense strand to SEQ ID NO: 199190
ccguucagggaacacauuc

SEQ ID NO: 199192 - RNA, 19 nt, Artificial Sequence
  Description of Artificial Sequence: Synthetic oligonucleotide
  Sense strand starting at position 1532 of SEQ ID NO: 2568
uggaguagaaagcguguaa

SEQ ID NO: 199193 - RNA, 19 nt, Artificial Sequence
  Description of Artificial Sequence: Synthetic oligonucleotide
  Antisense strand to SEQ ID NO: 199192
uuacacgcuuucuacucca

SEQ ID NO: 199194 - RNA, 19 nt, Artificial Sequence
  Description of Artificial Sequence: Synthetic oligonucleotide
  Sense strand starting at position 1536 of SEQ ID NO: 2568
guagaaagcguguaagaaa

SEQ ID NO: 199195 - RNA, 19 nt, Artificial Sequence
  Description of Artificial Sequence: Synthetic oligonucleotide
  Antisense strand to SEQ ID NO: 199194
uuucuuacacgcuuucuac

SEQ ID NO: 199196 - RNA, 19 nt, Artificial Sequence
  Description of Artificial Sequence: Synthetic oligonucleotide
  Sense strand starting at position 1741 of SEQ ID NO: 2568
aaucgaguccaacagaguu

SEQ ID NO: 199197 - RNA, 19 nt, Artificial Sequence
  Description of Artificial Sequence: Synthetic oligonucleotide
  Antisense strand to SEQ ID NO: 199196
aacucuguuggacucgauu

SEQ ID NO: 199198 - RNA, 19 nt, Artificial Sequence
  Description of Artificial Sequence: Synthetic oligonucleotide
  Sense strand starting at position 1743 of SEQ ID NO: 2568
ucgaguccaacagaguuaa

SEQ ID NO: 199199 - RNA, 19 nt, Artificial Sequence
  Description of Artificial Sequence: Synthetic oligonucleotide
  Antisense strand to SEQ ID NO: 199198
uuaacucuguuggacucga

SEQ ID NO: 199200 - RNA, 19 nt, Artificial Sequence
  Description of Artificial Sequence: Synthetic oligonucleotide
  Sense strand starting at position 2047 of SEQ ID NO: 2568
gucccugaagccgagaauu

SEQ ID NO: 199201 - RNA, 19 nt, Artificial Sequence
  Description of Artificial Sequence: Synthetic oligonucleotide
  Antisense strand to SEQ ID NO: 199200
aauucucggcuucagggac

SEQ ID NO: 199202 - RNA, 19 nt, Artificial Sequence
  Description of Artificial Sequence: Synthetic oligonucleotide
  Sense strand starting at position 2058 of SEQ ID NO: 2568
cgagaauuggccguugugu

SEQ ID NO: 199203 - RNA, 19 nt, Artificial Sequence
  Description of Artificial Sequence: Synthetic oligonucleotide
  Antisense strand to SEQ ID NO: 199202
acacaacggccaauucucg

SEQ ID NO: 199204 - RNA, 19 nt, Artificial Sequence
  Description of Artificial Sequence: Synthetic oligonucleotide
  Sense strand starting at position 2227 of SEQ ID NO: 2568
agacgugagaccgguuauu

SEQ ID NO: 199205 - RNA, 19 nt, Artificial Sequence
  Description of Artificial Sequence: Synthetic oligonucleotide
  Antisense strand to SEQ ID NO: 199204
aauaaccggucucacgucu

SEQ ID NO: 199206 - RNA, 19 nt, Artificial Sequence
  Description of Artificial Sequence: Synthetic oligonucleotide
  Sense strand starting at position 2230 of SEQ ID NO: 2568
cgugagaccgguuauugga

SEQ ID NO: 199207 - RNA, 19 nt, Artificial Sequence
  Description of Artificial Sequence: Synthetic oligonucleotide
  Antisense strand to SEQ ID NO: 199206
uccaauaaccggucucacg

SEQ ID NO: 199208 - RNA, 19 nt, Artificial Sequence
  Description of Artificial Sequence: Synthetic oligonucleotide
  Sense strand starting at position 2950 of SEQ ID NO: 2568
cccugagaaguaugucauu

SEQ ID NO: 199209 - RNA, 19 nt, Artificial Sequence
  Description of Artificial Sequence: Synthetic oligonucleotide
  Antisense strand to SEQ ID NO: 199208
aaugacauacuucucaggg

SEQ ID NO: 199210 - RNA, 19 nt, Artificial Sequence
  Description of Artificial Sequence: Synthetic oligonucleotide
  Sense strand starting at position 2953 of SEQ ID NO: 2568
ugagaaguaugucauuucu

SEQ ID NO: 199211 - RNA, 19 nt, Artificial Sequence
  Description of Artificial Sequence: Synthetic oligonucleotide
  Antisense strand to SEQ ID NO: 199210
agaaaugacauacuucuca

SEQ ID NO: 199212 - RNA, 19 nt, Artificial Sequence
  Description of Artificial Sequence: Synthetic oligonucleotide
  Sense strand starting at position 3054 of SEQ ID NO: 2568
cuaaguuacuucuugagac

SEQ ID NO: 199213 - RNA, 19 nt, Artificial Sequence
  Description of Artificial Sequence: Synthetic oligonucleotide
  Antisense strand to SEQ ID NO: 199212
gucucaagaaguaacuuag

SEQ ID NO: 199214 - RNA, 19 nt, Artificial Sequence
  Description of Artificial Sequence: Synthetic oligonucleotide
  Sense strand starting at position 3082 of SEQ ID NO: 2568
ggaagaguggcccgguuua

SEQ ID NO: 199215 - RNA, 19 nt, Artificial Sequence
  Description of Artificial Sequence: Synthetic oligonucleotide
  Antisense strand to SEQ ID NO: 199214
uaaaccgggccacucuucc

SEQ ID NO: 199216 - RNA, 19 nt, Artificial Sequence
  Description of Artificial Sequence: Synthetic oligonucleotide
  Sense strand starting at position 3372 of SEQ ID NO: 2568
aacuguuagucucuuggga

SEQ ID NO: 199217 - RNA, 19 nt, Artificial Sequence
  Description of Artificial Sequence: Synthetic oligonucleotide
  Antisense strand to SEQ ID NO: 199216
ucccaagagacuaacaguu

SEQ ID NO: 199218 - RNA, 19 nt, Artificial Sequence
  Description of Artificial Sequence: Synthetic oligonucleotide
  Sense strand starting at position 3421 of SEQ ID NO: 2568
gacucuucuguccguuaaa

SEQ ID NO: 199219 - RNA, 19 nt, Artificial Sequence
  Description of Artificial Sequence: Synthetic oligonucleotide
  Antisense strand to SEQ ID NO: 199218
uuuaacggacagaagaguc

SEQ ID NO: 199220 - RNA, 19 nt, Artificial Sequence
  Description of Artificial Sequence: Synthetic oligonucleotide
  Sense strand starting at position 3424 of SEQ ID NO: 2568
ucuucuguccguuaaauag

SEQ ID NO: 199221 - RNA, 19 nt, Artificial Sequence
  Description of Artificial Sequence: Synthetic oligonucleotide
  Antisense strand to SEQ ID NO: 199220
cuauuuaacggacagaaga

SEQ ID NO: 199222 - RNA, 19 nt, Artificial Sequence
  Description of Artificial Sequence: Synthetic oligonucleotide
  Sense strand starting at position 3428 of SEQ ID NO: 2568
cuguccguuaaauagaaga

SEQ ID NO: 199223 - RNA, 19 nt, Artificial Sequence
  Description of Artificial Sequence: Synthetic oligonucleotide
  Antisense strand to SEQ ID NO: 199222
ucuucuauuuaacggacag

SEQ ID NO: 199224 - RNA, 19 nt, Artificial Sequence
  Description of Artificial Sequence: Synthetic oligonucleotide
  Sense strand starting at position 3430 of SEQ ID NO: 2568
guccguuaaauagaagaug

SEQ ID NO: 199225 - RNA, 19 nt, Artificial Sequence
  Description of Artificial Sequence: Synthetic oligonucleotide
  Antisense strand to SEQ ID NO: 199224
caucuucuauuuaacggac

SEQ ID NO: 199226 - RNA, 19 nt, Artificial Sequence
  Description of Artificial Sequence: Synthetic oligonucleotide
  Sense strand starting at position 3509 of SEQ ID NO: 2568
ccagacuggccagaguuaa

SEQ ID NO: 199227 - RNA, 19 nt, Artificial Sequence
  Description of Artificial Sequence: Synthetic oligonucleotide
  Antisense strand to SEQ ID NO: 199226
uuaacucuggccagucugg

SEQ ID NO: 199228 - RNA, 19 nt, Artificial Sequence
  Description of Artificial Sequence: Synthetic oligonucleotide
  Sense strand starting at position 3729 of SEQ ID NO: 2568
uggugauggcgcaguuuga

SEQ ID NO: 199229 - RNA, 19 nt, Artificial Sequence
  Description of Artificial Sequence: Synthetic oligonucleotide
  Antisense strand to SEQ ID NO: 199228
ucaaacugcgccaucacca

SEQ ID NO: 199230 - RNA, 19 nt, Artificial Sequence
  Description of Artificial Sequence: Synthetic oligonucleotide
  Sense strand starting at position 3739 of SEQ ID NO: 2568
gcaguuugacacugaauac

SEQ ID NO: 199231 - RNA, 19 nt, Artificial Sequence
  Description of Artificial Sequence: Synthetic oligonucleotide
  Antisense strand to SEQ ID NO: 199230
guauucagugucaaacugc

SEQ ID NO: 199232 - RNA, 19 nt, Artificial Sequence
  Description of Artificial Sequence: Synthetic oligonucleotide
  Sense strand starting at position 3766 of SEQ ID NO: 2568
agaggccuccuauagugau

SEQ ID NO: 199233 - RNA, 19 nt, Artificial Sequence
  Description of Artificial Sequence: Synthetic oligonucleotide
  Antisense strand to SEQ ID NO: 199232
aucacuauaggaggccucu

SEQ ID NO: 199234 - RNA, 19 nt, Artificial Sequence
  Description of Artificial Sequence: Synthetic oligonucleotide
  Sense strand starting at position 3833 of SEQ ID NO: 2568
aagugugaguucuuggaua

SEQ ID NO: 199235 - RNA, 19 nt, Artificial Sequence
  Description of Artificial Sequence: Synthetic oligonucleotide
  Antisense strand to SEQ ID NO: 199234
uauccaagaacucacacuu

SEQ ID NO: 199236 - RNA, 19 nt, Artificial Sequence
  Description of Artificial Sequence: Synthetic oligonucleotide
  Sense strand starting at position 3835 of SEQ ID NO: 2568
gugugaguucuuggauaug

SEQ ID NO: 199237 - RNA, 19 nt, Artificial Sequence
  Description of Artificial Sequence: Synthetic oligonucleotide
  Antisense strand to SEQ ID NO: 199236
cauauccaagaacucacac

SEQ ID NO: 199238 - RNA, 19 nt, Artificial Sequence
  Description of Artificial Sequence: Synthetic oligonucleotide
  Sense strand starting at position 3918 of SEQ ID NO: 2568
ucugacaucucuguuccua

SEQ ID NO: 199239 - RNA, 19 nt, Artificial Sequence
  Description of Artificial Sequence: Synthetic oligonucleotide
  Antisense strand to SEQ ID NO: 199238
uaggaacagagaugucaga

SEQ ID NO: 199240 - RNA, 19 nt, Artificial Sequence
  Description of Artificial Sequence: Synthetic oligonucleotide
  Sense strand starting at position 578 of SEQ ID NO: 2567
gguuaaacuucuccaacgu

SEQ ID NO: 199241 - RNA, 19 nt, Artificial Sequence
  Description of Artificial Sequence: Synthetic oligonucleotide
  Antisense strand to SEQ ID NO: 199240
acguuggagaaguuuaacc

SEQ ID NO: 199242 - RNA, 19 nt, Artificial Sequence
  Description of Artificial Sequence: Synthetic oligonucleotide
  Sense strand starting at position 579 of SEQ ID NO: 2567
guuaaacuucuccaacgua

SEQ ID NO: 199243 - RNA, 19 nt, Artificial Sequence
  Description of Artificial Sequence: Synthetic oligonucleotide
  Antisense strand to SEQ ID NO: 199242
uacguuggagaaguuuaac

SEQ ID NO: 199244 - RNA, 19 nt, Artificial Sequence
  Description of Artificial Sequence: Synthetic oligonucleotide
  Sense strand starting at position 644 of SEQ ID NO: 2567
guuugagucuugucuaauu

SEQ ID NO: 199245 - RNA, 19 nt, Artificial Sequence
  Description of Artificial Sequence: Synthetic oligonucleotide
  Antisense strand to SEQ ID NO: 199244
aauuagacaagacucaaac

SEQ ID NO: 199246 - RNA, 19 nt, Artificial Sequence
  Description of Artificial Sequence: Synthetic oligonucleotide
  Sense strand starting at position 676 of SEQ ID NO: 2567
cagauuguuuaggugaauc

SEQ ID NO: 199247 - RNA, 19 nt, Artificial Sequence
  Description of Artificial Sequence: Synthetic oligonucleotide
  Antisense strand to SEQ ID NO: 199246
gauucaccuaaacaaucug

SEQ ID NO: 199248 - RNA, 19 nt, Artificial Sequence
  Description of Artificial Sequence: Synthetic oligonucleotide
  Sense strand starting at position 678 of SEQ ID NO: 2567
gauuguuuaggugaauccu

SEQ ID NO: 199249 - RNA, 19 nt, Artificial Sequence
  Description of Artificial Sequence: Synthetic oligonucleotide
  Antisense strand to SEQ ID NO: 199248
aggauucaccuaaacaauc

SEQ ID NO: 199250 - RNA, 19 nt, Artificial Sequence
  Description of Artificial Sequence: Synthetic oligonucleotide
  Sense strand starting at position 778 of SEQ ID NO: 2567
uuccaauuaguguacaguu

SEQ ID NO: 199251 - RNA, 19 nt, Artificial Sequence
  Description of Artificial Sequence: Synthetic oligonucleotide
  Antisense strand to SEQ ID NO: 199250
aacuguacacuaauuggaa

SEQ ID NO: 199252 - RNA, 19 nt, Artificial Sequence
  Description of Artificial Sequence: Synthetic oligonucleotide
  Sense strand starting at position 788 of SEQ ID NO: 2567
uguacaguuugucuaagga

SEQ ID NO: 199253 - RNA, 19 nt, Artificial Sequence
  Description of Artificial Sequence: Synthetic oligonucleotide
  Antisense strand to SEQ ID NO: 199252
uccuuagacaaacuguaca

SEQ ID NO: 199254 - RNA, 19 nt, Artificial Sequence
  Description of Artificial Sequence: Synthetic oligonucleotide
  Sense strand starting at position 1200 of SEQ ID NO: 2567
ccugguuaaauguggaaua

SEQ ID NO: 199255 - RNA, 19 nt, Artificial Sequence
  Description of Artificial Sequence: Synthetic oligonucleotide
  Antisense strand to SEQ ID NO: 199254
uauuccacauuuaaccagg

SEQ ID NO: 199256 - RNA, 19 nt, Artificial Sequence
  Description of Artificial Sequence: Synthetic oligonucleotide
  Sense strand starting at position 1212 of SEQ ID NO: 2567
uggaauacaucugagaauu

SEQ ID NO: 199257 - RNA, 19 nt, Artificial Sequence
  Description of Artificial Sequence: Synthetic oligonucleotide
  Antisense strand to SEQ ID NO: 199256
aauucucagauguauucca

SEQ ID NO: 199258 - RNA, 19 nt, Artificial Sequence
  Description of Artificial Sequence: Synthetic oligonucleotide
  Sense strand starting at position 1267 of SEQ ID NO: 2567
ugguguuaacgugaggaga

SEQ ID NO: 199259 - RNA, 19 nt, Artificial Sequence
  Description of Artificial Sequence: Synthetic oligonucleotide
  Antisense strand to SEQ ID NO: 199258
ucuccucacguuaacacca

SEQ ID NO: 199260 - RNA, 19 nt, Artificial Sequence
  Description of Artificial Sequence: Synthetic oligonucleotide
  Sense strand starting at position 1283 of SEQ ID NO: 2567
agauacaugcaauggcaaa

SEQ ID NO: 199261 - RNA, 19 nt, Artificial Sequence
  Description of Artificial Sequence: Synthetic oligonucleotide
  Antisense strand to SEQ ID NO: 199260
uuugccauugcauguaucu

SEQ ID NO: 199262 - RNA, 19 nt, Artificial Sequence
  Description of Artificial Sequence: Synthetic oligonucleotide
  Sense strand starting at position 1339 of SEQ ID NO: 2567
cccagagauuaagugaauu

SEQ ID NO: 199263 - RNA, 19 nt, Artificial Sequence
  Description of Artificial Sequence: Synthetic oligonucleotide
  Antisense strand to SEQ ID NO: 199262
aauucacuuaaucucuggg

SEQ ID NO: 199264 - RNA, 19 nt, Artificial Sequence
  Description of Artificial Sequence: Synthetic oligonucleotide
  Sense strand starting at position 1386 of SEQ ID NO: 2567
ccuccuaagcucgggaaua

SEQ ID NO: 199265 - RNA, 19 nt, Artificial Sequence
  Description of Artificial Sequence: Synthetic oligonucleotide
  Antisense strand to SEQ ID NO: 199264
uauucccgagcuuaggagg

SEQ ID NO: 199266 - RNA, 19 nt, Artificial Sequence
  Description of Artificial Sequence: Synthetic oligonucleotide
  Sense strand starting at position 1408 of SEQ ID NO: 2567
auaagaauguguucccuga

SEQ ID NO: 199267 - RNA, 19 nt, Artificial Sequence
  Description of Artificial Sequence: Synthetic oligonucleotide
  Antisense strand to SEQ ID NO: 199266
ucagggaacacauucuuau

SEQ ID NO: 199268 - RNA, 19 nt, Artificial Sequence
  Description of Artificial Sequence: Synthetic oligonucleotide
  Sense strand starting at position 1410 of SEQ ID NO: 2567
aagaauguguucccugaac

SEQ ID NO: 199269 - RNA, 19 nt, Artificial Sequence
  Description of Artificial Sequence: Synthetic oligonucleotide
  Antisense strand to SEQ ID NO: 199268
guucagggaacacauucuu

SEQ ID NO: 199270 - RNA, 19 nt, Artificial Sequence
  Description of Artificial Sequence: Synthetic oligonucleotide
  Sense strand starting at position 1412 of SEQ ID NO: 2567
gaauguguucccugaacgg

SEQ ID NO: 199271 - RNA, 19 nt, Artificial Sequence
  Description of Artificial Sequence: Synthetic oligonucleotide
  Antisense strand to SEQ ID NO: 199270
ccguucagggaacacauuc

SEQ ID NO: 199272 - RNA, 19 nt, Artificial Sequence
  Description of Artificial Sequence: Synthetic oligonucleotide
  Sense strand starting at position 1663 of SEQ ID NO: 2567
uggaguagaaagcguguaa

SEQ ID NO: 199273 - RNA, 19 nt, Artificial Sequence
  Description of Artificial Sequence: Synthetic oligonucleotide
  Antisense strand to SEQ ID NO: 199272
uuacacgcuuucuacucca

SEQ ID NO: 199274 - RNA, 19 nt, Artificial Sequence
  Description of Artificial Sequence: Synthetic oligonucleotide
  Sense strand starting at position 1667 of SEQ ID NO: 2567
guagaaagcguguaagaaa

SEQ ID NO: 199275 - RNA, 19 nt, Artificial Sequence
  Description of Artificial Sequence: Synthetic oligonucleotide
  Antisense strand to SEQ ID NO: 199274
uuucuuacacgcuuucuac

SEQ ID NO: 199276 - RNA, 19 nt, Artificial Sequence
  Description of Artificial Sequence: Synthetic oligonucleotide
  Sense strand starting at position 1872 of SEQ ID NO: 2567
aaucgaguccaacagaguu

SEQ ID NO: 199277 - RNA, 19 nt, Artificial Sequence
  Description of Artificial Sequence: Synthetic oligonucleotide
  Antisense strand to SEQ ID NO: 199276
aacucuguuggacucgauu

SEQ ID NO: 199278 - RNA, 19 nt, Artificial Sequence
  Description of Artificial Sequence: Synthetic oligonucleotide
  Sense strand starting at position 1874 of SEQ ID NO: 2567
ucgaguccaacagaguuaa

SEQ ID NO: 199279 - RNA, 19 nt, Artificial Sequence
  Description of Artificial Sequence: Synthetic oligonucleotide
  Antisense strand to SEQ ID NO: 199278
uuaacucuguuggacucga

SEQ ID NO: 199280 - RNA, 19 nt, Artificial Sequence
  Description of Artificial Sequence: Synthetic oligonucleotide
  Sense strand starting at position 2178 of SEQ ID NO: 2567
gucccugaagccgagaauu

SEQ ID NO: 199281 - RNA, 19 nt, Artificial Sequence
  Description of Artificial Sequence: Synthetic oligonucleotide
  Antisense strand to SEQ ID NO: 199280
aauucucggcuucagggac

SEQ ID NO: 199282 - RNA, 19 nt, Artificial Sequence
  Description of Artificial Sequence: Synthetic oligonucleotide
  Sense strand starting at position 2189 of SEQ ID NO: 2567
cgagaauuggccguugugu

SEQ ID NO: 199283 - RNA, 19 nt, Artificial Sequence
  Description of Artificial Sequence: Synthetic oligonucleotide
  Antisense strand to SEQ ID NO: 199282
acacaacggccaauucucg

SEQ ID NO: 199284 - RNA, 19 nt, Artificial Sequence
  Description of Artificial Sequence: Synthetic oligonucleotide
  Sense strand starting at position 2358 of SEQ ID NO: 2567
agacgugagaccgguuauu

SEQ ID NO: 199285 - RNA, 19 nt, Artificial Sequence
  Description of Artificial Sequence: Synthetic oligonucleotide
  Antisense strand to SEQ ID NO: 199284
aauaaccggucucacgucu

SEQ ID NO: 199286 - RNA, 19 nt, Artificial Sequence
  Description of Artificial Sequence: Synthetic oligonucleotide
  Sense strand starting at position 2361 of SEQ ID NO: 2567
cgugagaccgguuauugga

SEQ ID NO: 199287 - RNA, 19 nt, Artificial Sequence
  Description of Artificial Sequence: Synthetic oligonucleotide
  Antisense strand to SEQ ID NO: 199286
uccaauaaccggucucacg

SEQ ID NO: 199288 - RNA, 19 nt, Artificial Sequence
  Description of Artificial Sequence: Synthetic oligonucleotide
  Sense strand starting at position 3081 of SEQ ID NO: 2567
cccugagaaguaugucauu

SEQ ID NO: 199289 - RNA, 19 nt, Artificial Sequence
  Description of Artificial Sequence: Synthetic oligonucleotide
  Antisense strand to SEQ ID NO: 199288
aaugacauacuucucaggg

SEQ ID NO: 199290 - RNA, 19 nt, Artificial Sequence
  Description of Artificial Sequence: Synthetic oligonucleotide
  Sense strand starting at position 3084 of SEQ ID NO: 2567
ugagaaguaugucauuucu

SEQ ID NO: 199291 - RNA, 19 nt, Artificial Sequence
  Description of Artificial Sequence: Synthetic oligonucleotide
  Antisense strand to SEQ ID NO: 199290
agaaaugacauacuucuca

SEQ ID NO: 199292 - RNA, 19 nt, Artificial Sequence
  Description of Artificial Sequence: Synthetic oligonucleotide
  Sense strand starting at position 3185 of SEQ ID NO: 2567
cuaaguuacuucuugagac

SEQ ID NO: 199293 - RNA, 19 nt, Artificial Sequence
  Description of Artificial Sequence: Synthetic oligonucleotide
  Antisense strand to SEQ ID NO: 199292
gucucaagaaguaacuuag

SEQ ID NO: 199294 - RNA, 19 nt, Artificial Sequence
  Description of Artificial Sequence: Synthetic oligonucleotide
  Sense strand starting at position 3213 of SEQ ID NO: 2567
ggaagaguggcccgguuua

SEQ ID NO: 199295 - RNA, 19 nt, Artificial Sequence
  Description of Artificial Sequence: Synthetic oligonucleotide
  Antisense strand to SEQ ID NO: 199294
uaaaccgggccacucuucc

SEQ ID NO: 199296 - RNA, 19 nt, Artificial Sequence
  Description of Artificial Sequence: Synthetic oligonucleotide
  Sense strand starting at position 3503 of SEQ ID NO: 2567
aacuguuagucucuuggga

SEQ ID NO: 199297 - RNA, 19 nt, Artificial Sequence
  Description of Artificial Sequence: Synthetic oligonucleotide
  Antisense strand to SEQ ID NO: 199296
ucccaagagacuaacaguu

SEQ ID NO: 199298 - RNA, 19 nt, Artificial Sequence
  Description of Artificial Sequence: Synthetic oligonucleotide
  Sense strand starting at position 3551 of SEQ ID NO: 2567
ggacucuucuguccguuaa

SEQ ID NO: 199299 - RNA, 19 nt, Artificial Sequence
  Description of Artificial Sequence: Synthetic oligonucleotide
  Antisense strand to SEQ ID NO: 199298
uuaacggacagaagagucc

SEQ ID NO: 199300 - RNA, 19 nt, Artificial Sequence
  Description of Artificial Sequence: Synthetic oligonucleotide
  Sense strand starting at position 3552 of SEQ ID NO: 2567
gacucuucuguccguuaaa

SEQ ID NO: 199301 - RNA, 19 nt, Artificial Sequence
  Description of Artificial Sequence: Synthetic oligonucleotide
  Antisense strand to SEQ ID NO: 199300
uuuaacggacagaagaguc

SEQ ID NO: 199302 - RNA, 19 nt, Artificial Sequence
  Description of Artificial Sequence: Synthetic oligonucleotide
  Sense strand starting at position 3555 of SEQ ID NO: 2567
ucuucuguccguuaaauag

SEQ ID NO: 199303 - RNA, 19 nt, Artificial Sequence
  Description of Artificial Sequence: Synthetic oligonucleotide
  Antisense strand to SEQ ID NO: 199302
cuauuuaacggacagaaga

SEQ ID NO: 199304 - RNA, 19 nt, Artificial Sequence
  Description of Artificial Sequence: Synthetic oligonucleotide
  Sense strand starting at position 3559 of SEQ ID NO: 2567
cuguccguuaaauagaaga

SEQ ID NO: 199305 - RNA, 19 nt, Artificial Sequence
  Description of Artificial Sequence: Synthetic oligonucleotide
  Antisense strand to SEQ ID NO: 199304
ucuucuauuuaacggacag

SEQ ID NO: 199306 - RNA, 19 nt, Artificial Sequence
  Description of Artificial Sequence: Synthetic oligonucleotide
  Sense strand starting at position 3561 of SEQ ID NO: 2567
guccguuaaauagaagaug

SEQ ID NO: 199307 - RNA, 19 nt, Artificial Sequence
  Description of Artificial Sequence: Synthetic oligonucleotide
  Antisense strand to SEQ ID NO: 199306
caucuucuauuuaacggac

SEQ ID NO: 199308 - RNA, 19 nt, Artificial Sequence
  Description of Artificial Sequence: Synthetic oligonucleotide
  Sense strand starting at position 3640 of SEQ ID NO: 2567
ccagacuggccagaguuaa

SEQ ID NO: 199309 - RNA, 19 nt, Artificial Sequence
  Description of Artificial Sequence: Synthetic oligonucleotide
  Antisense strand to SEQ ID NO: 199308
uuaacucuggccagucugg

SEQ ID NO: 199310 - RNA, 19 nt, Artificial Sequence
  Description of Artificial Sequence: Synthetic oligonucleotide
  Sense strand starting at position 3860 of SEQ ID NO: 2567
uggugauggcgcaguuuga

SEQ ID NO: 199311 - RNA, 19 nt, Artificial Sequence
  Description of Artificial Sequence: Synthetic oligonucleotide
  Antisense strand to SEQ ID NO: 199310
ucaaacugcgccaucacca

SEQ ID NO: 199312 - RNA, 19 nt, Artificial Sequence
  Description of Artificial Sequence: Synthetic oligonucleotide
  Sense strand starting at position 3870 of SEQ ID NO: 2567
gcaguuugacacugaauac

SEQ ID NO: 199313 - RNA, 19 nt, Artificial Sequence
  Description of Artificial Sequence: Synthetic oligonucleotide
  Antisense strand to SEQ ID NO: 199312
guauucagugucaaacugc

SEQ ID NO: 199314 - RNA, 19 nt, Artificial Sequence
  Description of Artificial Sequence: Synthetic oligonucleotide
  Sense strand starting at position 3897 of SEQ ID NO: 2567
agaggccuccuauagugau

SEQ ID NO: 199315 - RNA, 19 nt, Artificial Sequence
  Description of Artificial Sequence: Synthetic oligonucleotide
  Antisense strand to SEQ ID NO: 199314
aucacuauaggaggccucu

SEQ ID NO: 199316 - RNA, 19 nt, Artificial Sequence
  Description of Artificial Sequence: Synthetic oligonucleotide
  Sense strand starting at position 3964 of SEQ ID NO: 2567
aagugugaguucuuggaua

SEQ ID NO: 199317 - RNA, 19 nt, Artificial Sequence
  Description of Artificial Sequence: Synthetic oligonucleotide
  Antisense strand to SEQ ID NO: 199316
uauccaagaacucacacuu

SEQ ID NO: 199318 - RNA, 19 nt, Artificial Sequence
  Description of Artificial Sequence: Synthetic oligonucleotide
  Sense strand starting at position 3966 of SEQ ID NO: 2567
gugugaguucuuggauaug

SEQ ID NO: 199319 - RNA, 19 nt, Artificial Sequence
  Description of Artificial Sequence: Synthetic oligonucleotide
  Antisense strand to SEQ ID NO: 199318
cauauccaagaacucacac

SEQ ID NO: 199320 - RNA, 19 nt, Artificial Sequence
  Description of Artificial Sequence: Synthetic oligonucleotide
  Sense strand starting at position 94 of SEQ ID NO: 2569
uggagcuccugucugaaca

SEQ ID NO: 199321 - RNA, 19 nt, Artificial Sequence
  Description of Artificial Sequence: Synthetic oligonucleotide
  Antisense strand to SEQ ID NO: 199320
uguucagacaggagcucca

SEQ ID NO: 199322 - RNA, 19 nt, Artificial Sequence
  Description of Artificial Sequence: Synthetic oligonucleotide
  Sense strand starting at position 95 of SEQ ID NO: 2569
ggagcuccugucugaacau

SEQ ID NO: 199323 - RNA, 19 nt, Artificial Sequence
  Description of Artificial Sequence: Synthetic oligonucleotide
  Antisense strand to SEQ ID NO: 199322
auguucagacaggagcucc

SEQ ID NO: 199324 - RNA, 19 nt, Artificial Sequence
  Description of Artificial Sequence: Synthetic oligonucleotide
  Sense strand starting at position 160 of SEQ ID NO: 2569
cggugaucugacugugugu

SEQ ID NO: 199325 - RNA, 19 nt, Artificial Sequence
  Description of Artificial Sequence: Synthetic oligonucleotide
  Antisense strand to SEQ ID NO: 199324
acacacagucagaucaccg

SEQ ID NO: 199326 - RNA, 19 nt, Artificial Sequence
  Description of Artificial Sequence: Synthetic oligonucleotide
  Sense strand starting at position 589 of SEQ ID NO: 2569
ggcagacucuccuggccau

SEQ ID NO: 199327 - RNA, 19 nt, Artificial Sequence
  Description of Artificial Sequence: Synthetic oligonucleotide
  Antisense strand to SEQ ID NO: 199326
auggccaggagagucugcc

SEQ ID NO: 199328 - RNA, 19 nt, Artificial Sequence
  Description of Artificial Sequence: Synthetic oligonucleotide
  Sense strand starting at position 1047 of SEQ ID NO: 2569
cuagucuugggcuggcaaa

SEQ ID NO: 199329 - RNA, 19 nt, Artificial Sequence
  Description of Artificial Sequence: Synthetic oligonucleotide
  Antisense strand to SEQ ID NO: 199328
uuugccagcccaagacuag

SEQ ID NO: 199330 - RNA, 19 nt, Artificial Sequence
  Description of Artificial Sequence: Synthetic oligonucleotide
  Sense strand starting at position 1440 of SEQ ID NO: 2569
cucagagcucucugcagaa

SEQ ID NO: 199331 - RNA, 19 nt, Artificial Sequence
  Description of Artificial Sequence: Synthetic oligonucleotide
  Antisense strand to SEQ ID NO: 199330
uucugcagagagcucugag

SEQ ID NO: 199332 - RNA, 19 nt, Artificial Sequence
  Description of Artificial Sequence: Synthetic oligonucleotide
  Sense strand starting at position 1444 of SEQ ID NO: 2569
gagcucucugcagaaagaa

SEQ ID NO: 199333 - RNA, 19 nt, Artificial Sequence
  Description of Artificial Sequence: Synthetic oligonucleotide
  Antisense strand to SEQ ID NO: 199332
uucuuucugcagagagcuc

SEQ ID NO: 199334 - RNA, 19 nt, Artificial Sequence
  Description of Artificial Sequence: Synthetic oligonucleotide
  Sense strand starting at position 1989 of SEQ ID NO: 2569
aggaucuaucuuuguuuaa

SEQ ID NO: 199335 - RNA, 19 nt, Artificial Sequence
  Description of Artificial Sequence: Synthetic oligonucleotide
  Antisense strand to SEQ ID NO: 199334
uuaaacaaagauagauccu

SEQ ID NO: 199336 - RNA, 19 nt, Artificial Sequence
  Description of Artificial Sequence: Synthetic oligonucleotide
  Sense strand starting at position 1990 of SEQ ID NO: 2569
ggaucuaucuuuguuuaaa

SEQ ID NO: 199337 - RNA, 19 nt, Artificial Sequence
  Description of Artificial Sequence: Synthetic oligonucleotide
  Antisense strand to SEQ ID NO: 199336
uuuaaacaaagauagaucc

SEQ ID NO: 199338 - RNA, 19 nt, Artificial Sequence
  Description of Artificial Sequence: Synthetic oligonucleotide
  Sense strand starting at position 2126 of SEQ ID NO: 2569
gcuggcaucagcugucaua

SEQ ID NO: 199339 - RNA, 19 nt, Artificial Sequence
  Description of Artificial Sequence: Synthetic oligonucleotide
  Antisense strand to SEQ ID NO: 199338
uaugacagcugaugccagc

SEQ ID NO: 199340 - RNA, 19 nt, Artificial Sequence
  Description of Artificial Sequence: Synthetic oligonucleotide
  Sense strand starting at position 2129 of SEQ ID NO: 2569
ggcaucagcugucauaguu

SEQ ID NO: 199341 - RNA, 19 nt, Artificial Sequence
  Description of Artificial Sequence: Synthetic oligonucleotide
  Antisense strand to SEQ ID NO: 199340
aacuaugacagcugaugcc

SEQ ID NO: 199342 - RNA, 19 nt, Artificial Sequence
  Description of Artificial Sequence: Synthetic oligonucleotide
  Sense strand starting at position 2231 of SEQ ID NO: 2569
ccucguaagcucuguuuau

SEQ ID NO: 199343 - RNA, 19 nt, Artificial Sequence
  Description of Artificial Sequence: Synthetic oligonucleotide
  Antisense strand to SEQ ID NO: 199342
auaaacagagcuuacgagg

SEQ ID NO: 199344 - RNA, 19 nt, Artificial Sequence
  Description of Artificial Sequence: Synthetic oligonucleotide
  Sense strand starting at position 2232 of SEQ ID NO: 2569
cucguaagcucuguuuaug

SEQ ID NO: 199345 - RNA, 19 nt, Artificial Sequence
  Description of Artificial Sequence: Synthetic oligonucleotide
  Antisense strand to SEQ ID NO: 199344
cauaaacagagcuuacgag

SEQ ID NO: 199346 - RNA, 19 nt, Artificial Sequence
  Description of Artificial Sequence: Synthetic oligonucleotide
  Sense strand starting at position 2233 of SEQ ID NO: 2569
ucguaagcucuguuuaugu

SEQ ID NO: 199347 - RNA, 19 nt, Artificial Sequence
  Description of Artificial Sequence: Synthetic oligonucleotide
  Antisense strand to SEQ ID NO: 199346
acauaaacagagcuuacga

SEQ ID NO: 199348 - RNA, 19 nt, Artificial Sequence
  Description of Artificial Sequence: Synthetic oligonucleotide
  Sense strand starting at position 2988 of SEQ ID NO: 2569
ccuucugccuguugaaauc

SEQ ID NO: 199349 - RNA, 19 nt, Artificial Sequence
  Description of Artificial Sequence: Synthetic oligonucleotide
  Antisense strand to SEQ ID NO: 199348
gauuucaacaggcagaagg

SEQ ID NO: 199350 - RNA, 19 nt, Artificial Sequence
  Description of Artificial Sequence: Synthetic oligonucleotide
  Sense strand starting at position 3030 of SEQ ID NO: 2569
gcugcagcuuucccuuaua

SEQ ID NO: 199351 - RNA, 19 nt, Artificial Sequence
  Description of Artificial Sequence: Synthetic oligonucleotide
  Antisense strand to SEQ ID NO: 199350
uauaagggaaagcugcagc

SEQ ID NO: 199352 - RNA, 19 nt, Artificial Sequence
  Description of Artificial Sequence: Synthetic oligonucleotide
  Sense strand starting at position 3098 of SEQ ID NO: 2569
cuguguugugccucggaac

SEQ ID NO: 199353 - RNA, 19 nt, Artificial Sequence
  Description of Artificial Sequence: Synthetic oligonucleotide
  Antisense strand to SEQ ID NO: 199352
guuccgaggcacaacacag

SEQ ID NO: 199354 - RNA, 19 nt, Artificial Sequence
  Description of Artificial Sequence: Synthetic oligonucleotide
  Sense strand starting at position 3099 of SEQ ID NO: 2569
uguguugugccucggaaca

SEQ ID NO: 199355 - RNA, 19 nt, Artificial Sequence
  Description of Artificial Sequence: Synthetic oligonucleotide
  Antisense strand to SEQ ID NO: 199354
uguuccgaggcacaacaca

SEQ ID NO: 199356 - RNA, 19 nt, Artificial Sequence
  Description of Artificial Sequence: Synthetic oligonucleotide
  Sense strand starting at position 3211 of SEQ ID NO: 2569
gaggucucugcuuggccaa

SEQ ID NO: 199357 - RNA, 19 nt, Artificial Sequence
  Description of Artificial Sequence: Synthetic oligonucleotide
  Antisense strand to SEQ ID NO: 199356
uuggccaagcagagaccuc

SEQ ID NO: 199358 - RNA, 19 nt, Artificial Sequence
  Description of Artificial Sequence: Synthetic oligonucleotide
  Sense strand starting at position 3413 of SEQ ID NO: 2569
agcguuuccucaccuggau

SEQ ID NO: 199359 - RNA, 19 nt, Artificial Sequence
  Description of Artificial Sequence: Synthetic oligonucleotide
  Antisense strand to SEQ ID NO: 199358
auccaggugaggaaacgcu

SEQ ID NO: 199360 - RNA, 19 nt, Artificial Sequence
  Description of Artificial Sequence: Synthetic oligonucleotide
  Sense strand starting at position 3451 of SEQ ID NO: 2569
cugcucagucauuggccaa

SEQ ID NO: 199361 - RNA, 19 nt, Artificial Sequence
  Description of Artificial Sequence: Synthetic oligonucleotide
  Antisense strand to SEQ ID NO: 199360
uuggccaaugacugagcag

SEQ ID NO: 199362 - RNA, 19 nt, Artificial Sequence
  Description of Artificial Sequence: Synthetic oligonucleotide
  Sense strand starting at position 3454 of SEQ ID NO: 2569
cucagucauuggccaagga

SEQ ID NO: 199363 - RNA, 19 nt, Artificial Sequence
  Description of Artificial Sequence: Synthetic oligonucleotide
  Antisense strand to SEQ ID NO: 199362
uccuuggccaaugacugag

SEQ ID NO: 199364 - RNA, 19 nt, Artificial Sequence
  Description of Artificial Sequence: Synthetic oligonucleotide
  Sense strand starting at position 3512 of SEQ ID NO: 2569
cucucugcucuuggugaca

SEQ ID NO: 199365 - RNA, 19 nt, Artificial Sequence
  Description of Artificial Sequence: Synthetic oligonucleotide
  Antisense strand to SEQ ID NO: 199364
ugucaccaagagcagagag

SEQ ID NO: 199366 - RNA, 19 nt, Artificial Sequence
  Description of Artificial Sequence: Synthetic oligonucleotide
  Sense strand starting at position 3514 of SEQ ID NO: 2569
cucugcucuuggugacaaa

SEQ ID NO: 199367 - RNA, 19 nt, Artificial Sequence
  Description of Artificial Sequence: Synthetic oligonucleotide
  Antisense strand to SEQ ID NO: 199366
uuugucaccaagagcagag

SEQ ID NO: 199368 - RNA, 19 nt, Artificial Sequence
  Description of Artificial Sequence: Synthetic oligonucleotide
  Sense strand starting at position 3550 of SEQ ID NO: 2569
agggcugucuacucaagag

SEQ ID NO: 199369 - RNA, 19 nt, Artificial Sequence
  Description of Artificial Sequence: Synthetic oligonucleotide
  Antisense strand to SEQ ID NO: 199368
cucuugaguagacagcccu

SEQ ID NO: 199370 - RNA, 19 nt, Artificial Sequence
  Description of Artificial Sequence: Synthetic oligonucleotide
  Sense strand starting at position 3653 of SEQ ID NO: 2569
ggcccugaggagugucuuu

SEQ ID NO: 199371 - RNA, 19 nt, Artificial Sequence
  Description of Artificial Sequence: Synthetic oligonucleotide
  Antisense strand to SEQ ID NO: 199370
aaagacacuccucagggcc

SEQ ID NO: 199372 - RNA, 19 nt, Artificial Sequence
  Description of Artificial Sequence: Synthetic oligonucleotide
  Sense strand starting at position 3658 of SEQ ID NO: 2569
ugaggagugucuuuccauu

SEQ ID NO: 199373 - RNA, 19 nt, Artificial Sequence
  Description of Artificial Sequence: Synthetic oligonucleotide
  Antisense strand to SEQ ID NO: 199372
aauggaaagacacuccuca

SEQ ID NO: 199374 - RNA, 19 nt, Artificial Sequence
  Description of Artificial Sequence: Synthetic oligonucleotide
  Sense strand starting at position 3715 of SEQ ID NO: 2569
caaguuguguuacuucuga

SEQ ID NO: 199375 - RNA, 19 nt, Artificial Sequence
  Description of Artificial Sequence: Synthetic oligonucleotide
  Antisense strand to SEQ ID NO: 199374
ucagaaguaacacaacuug

SEQ ID NO: 199376 - RNA, 19 nt, Artificial Sequence
  Description of Artificial Sequence: Synthetic oligonucleotide
  Sense strand starting at position 3719 of SEQ ID NO: 2569
uuguguuacuucugaggga

SEQ ID NO: 199377 - RNA, 19 nt, Artificial Sequence
  Description of Artificial Sequence: Synthetic oligonucleotide
  Antisense strand to SEQ ID NO: 199376
ucccucagaaguaacacaa

SEQ ID NO: 199378 - RNA, 19 nt, Artificial Sequence
  Description of Artificial Sequence: Synthetic oligonucleotide
  Sense strand starting at position 3720 of SEQ ID NO: 2569
uguguuacuucugagggaa

SEQ ID NO: 199379 - RNA, 19 nt, Artificial Sequence
  Description of Artificial Sequence: Synthetic oligonucleotide
  Antisense strand to SEQ ID NO: 199378
uucccucagaaguaacaca

SEQ ID NO: 199380 - RNA, 19 nt, Artificial Sequence
  Description of Artificial Sequence: Synthetic oligonucleotide
  Sense strand starting at position 3722 of SEQ ID NO: 2569
uguuacuucugagggaaag

SEQ ID NO: 199381 - RNA, 19 nt, Artificial Sequence
  Description of Artificial Sequence: Synthetic oligonucleotide
  Antisense strand to SEQ ID NO: 199380
cuuucccucagaaguaaca

SEQ ID NO: 199382 - RNA, 19 nt, Artificial Sequence
  Description of Artificial Sequence: Synthetic oligonucleotide
  Sense strand starting at position 3835 of SEQ ID NO: 2569
ccaucuuucuuuggcugua

SEQ ID NO: 199383 - RNA, 19 nt, Artificial Sequence
  Description of Artificial Sequence: Synthetic oligonucleotide
  Antisense strand to SEQ ID NO: 199382
uacagccaaagaaagaugg

SEQ ID NO: 199384 - RNA, 19 nt, Artificial Sequence
  Description of Artificial Sequence: Synthetic oligonucleotide
  Sense strand starting at position 3838 of SEQ ID NO: 2569
ucuuucuuuggcuguaaca

SEQ ID NO: 199385 - RNA, 19 nt, Artificial Sequence
  Description of Artificial Sequence: Synthetic oligonucleotide
  Antisense strand to SEQ ID NO: 199384
uguuacagccaaagaaaga

SEQ ID NO: 199386 - RNA, 19 nt, Artificial Sequence
  Description of Artificial Sequence: Synthetic oligonucleotide
  Sense strand starting at position 10 of SEQ ID NO: 2570
auaguaucucuacagucau

SEQ ID NO: 199387 - RNA, 19 nt, Artificial Sequence
  Description of Artificial Sequence: Synthetic oligonucleotide
  Antisense strand to SEQ ID NO: 199386
augacuguagagauacuau

SEQ ID NO: 199388 - RNA, 19 nt, Artificial Sequence
  Description of Artificial Sequence: Synthetic oligonucleotide
  Sense strand starting at position 347 of SEQ ID NO: 2570
cacauuuggugucuagcua

SEQ ID NO: 199389 - RNA, 19 nt, Artificial Sequence
  Description of Artificial Sequence: Synthetic oligonucleotide
  Antisense strand to SEQ ID NO: 199388
uagcuagacaccaaaugug

SEQ ID NO: 199390 - RNA, 19 nt, Artificial Sequence
  Description of Artificial Sequence: Synthetic oligonucleotide
  Sense strand starting at position 406 of SEQ ID NO: 2570
acuuuccagucugugaaau

SEQ ID NO: 199391 - RNA, 19 nt, Artificial Sequence
  Description of Artificial Sequence: Synthetic oligonucleotide
  Antisense strand to SEQ ID NO: 199390
auuucacagacuggaaagu

SEQ ID NO: 199392 - RNA, 19 nt, Artificial Sequence
  Description of Artificial Sequence: Synthetic oligonucleotide
  Sense strand starting at position 539 of SEQ ID NO: 2570
agcagauagcaugaagcuu

SEQ ID NO: 199393 - RNA, 19 nt, Artificial Sequence
  Description of Artificial Sequence: Synthetic oligonucleotide
  Antisense strand to SEQ ID NO: 199392
aagcuucaugcuaucugcu

SEQ ID NO: 199394 - RNA, 19 nt, Artificial Sequence
  Description of Artificial Sequence: Synthetic oligonucleotide
  Sense strand starting at position 577 of SEQ ID NO: 2570
ggcaaacuuaugcggauuu

SEQ ID NO: 199395 - RNA, 19 nt, Artificial Sequence
  Description of Artificial Sequence: Synthetic oligonucleotide
  Antisense strand to SEQ ID NO: 199394
aaauccgcauaaguuugcc

SEQ ID NO: 199396 - RNA, 19 nt, Artificial Sequence
  Description of Artificial Sequence: Synthetic oligonucleotide
  Sense strand starting at position 595 of SEQ ID NO: 2570
ugggaagugcuucauuggu

SEQ ID NO: 199397 - RNA, 19 nt, Artificial Sequence
  Description of Artificial Sequence: Synthetic oligonucleotide
  Antisense strand to SEQ ID NO: 199396
accaaugaagcacuuccca

SEQ ID NO: 199398 - RNA, 19 nt, Artificial Sequence
  Description of Artificial Sequence: Synthetic oligonucleotide
  Sense strand starting at position 788 of SEQ ID NO: 2570
uuuaguugucaccacuaau

SEQ ID NO: 199399 - RNA, 19 nt, Artificial Sequence
  Description of Artificial Sequence: Synthetic oligonucleotide
  Antisense strand to SEQ ID NO: 199398
auuaguggugacaacuaaa

SEQ ID NO: 199400 - RNA, 19 nt, Artificial Sequence
  Description of Artificial Sequence: Synthetic oligonucleotide
  Sense strand starting at position 791 of SEQ ID NO: 2570
aguugucaccacuaauaag

SEQ ID NO: 199401 - RNA, 19 nt, Artificial Sequence
  Description of Artificial Sequence: Synthetic oligonucleotide
  Antisense strand to SEQ ID NO: 199400
cuuauuaguggugacaacu

SEQ ID NO: 199402 - RNA, 19 nt, Artificial Sequence
  Description of Artificial Sequence: Synthetic oligonucleotide
  Sense strand starting at position 980 of SEQ ID NO: 2570
gugagaaguaugcauuaca

SEQ ID NO: 199403 - RNA, 19 nt, Artificial Sequence
  Description of Artificial Sequence: Synthetic oligonucleotide
  Antisense strand to SEQ ID NO: 199402
uguaaugcauacuucucac

SEQ ID NO: 199404 - RNA, 19 nt, Artificial Sequence
  Description of Artificial Sequence: Synthetic oligonucleotide
  Sense strand starting at position 2184 of SEQ ID NO: 2570
aggcuucgcguauaaauuu

SEQ ID NO: 199405 - RNA, 19 nt, Artificial Sequence
  Description of Artificial Sequence: Synthetic oligonucleotide
  Antisense strand to SEQ ID NO: 199404
aaauuuauacgcgaagccu

SEQ ID NO: 199406 - RNA, 19 nt, Artificial Sequence
  Description of Artificial Sequence: Synthetic oligonucleotide
  Sense strand starting at position 2357 of SEQ ID NO: 2570
gucacuaaacauuggauga

SEQ ID NO: 199407 - RNA, 19 nt, Artificial Sequence
  Description of Artificial Sequence: Synthetic oligonucleotide
  Antisense strand to SEQ ID NO: 199406
ucauccaauguuuagugac

SEQ ID NO: 199408 - RNA, 19 nt, Artificial Sequence
  Description of Artificial Sequence: Synthetic oligonucleotide
  Sense strand starting at position 2474 of SEQ ID NO: 2570
ugugguaugagucaucaga

SEQ ID NO: 199409 - RNA, 19 nt, Artificial Sequence
  Description of Artificial Sequence: Synthetic oligonucleotide
  Antisense strand to SEQ ID NO: 199408
ucugaugacucauaccaca

SEQ ID NO: 199410 - RNA, 19 nt, Artificial Sequence
  Description of Artificial Sequence: Synthetic oligonucleotide
  Sense strand starting at position 2476 of SEQ ID NO: 2570
ugguaugagucaucagagu

SEQ ID NO: 199411 - RNA, 19 nt, Artificial Sequence
  Description of Artificial Sequence: Synthetic oligonucleotide
  Antisense strand to SEQ ID NO: 199410
acucugaugacucauacca

SEQ ID NO: 199412 - RNA, 19 nt, Artificial Sequence
  Description of Artificial Sequence: Synthetic oligonucleotide
  Sense strand starting at position 2482 of SEQ ID NO: 2570
gagucaucagagugaccuu

SEQ ID NO: 199413 - RNA, 19 nt, Artificial Sequence
  Description of Artificial Sequence: Synthetic oligonucleotide
  Antisense strand to SEQ ID NO: 199412
aaggucacucugaugacuc

SEQ ID NO: 199414 - RNA, 19 nt, Artificial Sequence
  Description of Artificial Sequence: Synthetic oligonucleotide
  Sense strand starting at position 2485 of SEQ ID NO: 2570
ucaucagagugaccuuaca

SEQ ID NO: 199415 - RNA, 19 nt, Artificial Sequence
  Description of Artificial Sequence: Synthetic oligonucleotide
  Antisense strand to SEQ ID NO: 199414
uguaaggucacucugauga

SEQ ID NO: 199416 - RNA, 19 nt, Artificial Sequence
  Description of Artificial Sequence: Synthetic oligonucleotide
  Sense strand starting at position 2509 of SEQ ID NO: 2570
uuagucugucuggaccaua

SEQ ID NO: 199417 - RNA, 19 nt, Artificial Sequence
  Description of Artificial Sequence: Synthetic oligonucleotide
  Antisense strand to SEQ ID NO: 199416
uaugguccagacagacuaa

SEQ ID NO: 199418 - RNA, 19 nt, Artificial Sequence
  Description of Artificial Sequence: Synthetic oligonucleotide
  Sense strand starting at position 2706 of SEQ ID NO: 2570
aucuuugauuuaggaugga

SEQ ID NO: 199419 - RNA, 19 nt, Artificial Sequence
  Description of Artificial Sequence: Synthetic oligonucleotide
  Antisense strand to SEQ ID NO: 199418
uccauccuaaaucaaagau

SEQ ID NO: 199420 - RNA, 19 nt, Artificial Sequence
  Description of Artificial Sequence: Synthetic oligonucleotide
  Sense strand starting at position 2766 of SEQ ID NO: 2570
uuggaauuggcagggaagu

SEQ ID NO: 199421 - RNA, 19 nt, Artificial Sequence
  Description of Artificial Sequence: Synthetic oligonucleotide
  Antisense strand to SEQ ID NO: 199420
acuucccugccaauuccaa

SEQ ID NO: 199422 - RNA, 19 nt, Artificial Sequence
  Description of Artificial Sequence: Synthetic oligonucleotide
  Sense strand starting at position 2767 of SEQ ID NO: 2570
uggaauuggcagggaaguu

SEQ ID NO: 199423 - RNA, 19 nt, Artificial Sequence
  Description of Artificial Sequence: Synthetic oligonucleotide
  Antisense strand to SEQ ID NO: 199422
aacuucccugccaauucca

SEQ ID NO: 199424 - RNA, 19 nt, Artificial Sequence
  Description of Artificial Sequence: Synthetic oligonucleotide
  Sense strand starting at position 2910 of SEQ ID NO: 2570
ccaggauucuuccuccaga

SEQ ID NO: 199425 - RNA, 19 nt, Artificial Sequence
  Description of Artificial Sequence: Synthetic oligonucleotide
  Antisense strand to SEQ ID NO: 199424
ucuggaggaagaauccugg

SEQ ID NO: 199426 - RNA, 19 nt, Artificial Sequence
  Description of Artificial Sequence: Synthetic oligonucleotide
  Sense strand starting at position 3005 of SEQ ID NO: 2570
acauguguaccauggaauc

SEQ ID NO: 199427 - RNA, 19 nt, Artificial Sequence
  Description of Artificial Sequence: Synthetic oligonucleotide
  Antisense strand to SEQ ID NO: 199426
gauuccaugguacacaugu

SEQ ID NO: 199428 - RNA, 19 nt, Artificial Sequence
  Description of Artificial Sequence: Synthetic oligonucleotide
  Sense strand starting at position 3019 of SEQ ID NO: 2570
gaaucuuagugucuuggaa

SEQ ID NO: 199429 - RNA, 19 nt, Artificial Sequence
  Description of Artificial Sequence: Synthetic oligonucleotide
  Antisense strand to SEQ ID NO: 199428
uuccaagacacuaagauuc

SEQ ID NO: 199430 - RNA, 19 nt, Artificial Sequence
  Description of Artificial Sequence: Synthetic oligonucleotide
  Sense strand starting at position 3031 of SEQ ID NO: 2570
cuuggaaugcuccacuaac

SEQ ID NO: 199431 - RNA, 19 nt, Artificial Sequence
  Description of Artificial Sequence: Synthetic oligonucleotide
  Antisense strand to SEQ ID NO: 199430
guuaguggagcauuccaag

SEQ ID NO: 199432 - RNA, 19 nt, Artificial Sequence
  Description of Artificial Sequence: Synthetic oligonucleotide
  Sense strand starting at position 3052 of SEQ ID NO: 2570
auaaucauguugucaaauc

SEQ ID NO: 199433 - RNA, 19 nt, Artificial Sequence
  Description of Artificial Sequence: Synthetic oligonucleotide
  Antisense strand to SEQ ID NO: 199432
gauuugacaacaugauuau

SEQ ID NO: 199434 - RNA, 19 nt, Artificial Sequence
  Description of Artificial Sequence: Synthetic oligonucleotide
  Sense strand starting at position 3064 of SEQ ID NO: 2570
ucaaaucagccuugaagau

SEQ ID NO: 199435 - RNA, 19 nt, Artificial Sequence
  Description of Artificial Sequence: Synthetic oligonucleotide
  Antisense strand to SEQ ID NO: 199434
aucuucaaggcugauuuga

SEQ ID NO: 199436 - RNA, 19 nt, Artificial Sequence
  Description of Artificial Sequence: Synthetic oligonucleotide
  Sense strand starting at position 3079 of SEQ ID NO: 2570
agauuugucaugcguagca

SEQ ID NO: 199437 - RNA, 19 nt, Artificial Sequence
  Description of Artificial Sequence: Synthetic oligonucleotide
  Antisense strand to SEQ ID NO: 199436
ugcuacgcaugacaaaucu

SEQ ID NO: 199438 - RNA, 19 nt, Artificial Sequence
  Description of Artificial Sequence: Synthetic oligonucleotide
  Sense strand starting at position 3166 of SEQ ID NO: 2570
gagacugaccugugaguaa

SEQ ID NO: 199439 - RNA, 19 nt, Artificial Sequence
  Description of Artificial Sequence: Synthetic oligonucleotide
  Antisense strand to SEQ ID NO: 199438
uuacucacaggucagucuc

SEQ ID NO: 199440 - RNA, 19 nt, Artificial Sequence
  Description of Artificial Sequence: Synthetic oligonucleotide
  Sense strand starting at position 3169 of SEQ ID NO: 2570
acugaccugugaguaauua

SEQ ID NO: 199441 - RNA, 19 nt, Artificial Sequence
  Description of Artificial Sequence: Synthetic oligonucleotide
  Antisense strand to SEQ ID NO: 199440
uaauuacucacaggucagu

SEQ ID NO: 199442 - RNA, 19 nt, Artificial Sequence
  Description of Artificial Sequence: Synthetic oligonucleotide
  Sense strand starting at position 3173 of SEQ ID NO: 2570
accugugaguaauuaagaa

SEQ ID NO: 199443 - RNA, 19 nt, Artificial Sequence
  Description of Artificial Sequence: Synthetic oligonucleotide
  Antisense strand to SEQ ID NO: 199442
uucuuaauuacucacaggu

SEQ ID NO: 199444 - RNA, 19 nt, Artificial Sequence
  Description of Artificial Sequence: Synthetic oligonucleotide
  Sense strand starting at position 3252 of SEQ ID NO: 2570
uggaucacucacuguagga

SEQ ID NO: 199445 - RNA, 19 nt, Artificial Sequence
  Description of Artificial Sequence: Synthetic oligonucleotide
  Antisense strand to SEQ ID NO: 199444
uccuacagugagugaucca

SEQ ID NO: 199446 - RNA, 19 nt, Artificial Sequence
  Description of Artificial Sequence: Synthetic oligonucleotide
  Sense strand starting at position 3369 of SEQ ID NO: 2570
caacauugugagugaccca

SEQ ID NO: 199447 - RNA, 19 nt, Artificial Sequence
  Description of Artificial Sequence: Synthetic oligonucleotide
  Antisense strand to SEQ ID NO: 199446
ugggucacucacaauguug

SEQ ID NO: 199448 - RNA, 19 nt, Artificial Sequence
  Description of Artificial Sequence: Synthetic oligonucleotide
  Sense strand starting at position 3380 of SEQ ID NO: 2570
gugacccaucuuggacaua

SEQ ID NO: 199449 - RNA, 19 nt, Artificial Sequence
  Description of Artificial Sequence: Synthetic oligonucleotide
  Antisense strand to SEQ ID NO: 199448
uauguccaagaugggucac

SEQ ID NO: 199450 - RNA, 19 nt, Artificial Sequence
  Description of Artificial Sequence: Synthetic oligonucleotide
  Sense strand starting at position 3392 of SEQ ID NO: 2570
ggacauagguuccugacau

SEQ ID NO: 199451 - RNA, 19 nt, Artificial Sequence
  Description of Artificial Sequence: Synthetic oligonucleotide
  Antisense strand to SEQ ID NO: 199450
augucaggaaccuaugucc

SEQ ID NO: 199452 - RNA, 19 nt, Artificial Sequence
  Description of Artificial Sequence: Synthetic oligonucleotide
  Sense strand starting at position 3441 of SEQ ID NO: 2570
gucugacaucuugacugca

SEQ ID NO: 199453 - RNA, 19 nt, Artificial Sequence
  Description of Artificial Sequence: Synthetic oligonucleotide
  Antisense strand to SEQ ID NO: 199452
ugcagucaagaugucagac

SEQ ID NO: 199454 - RNA, 19 nt, Artificial Sequence
  Description of Artificial Sequence: Synthetic oligonucleotide
  Sense strand starting at position 3614 of SEQ ID NO: 2570
auauuaaagccuugagaau

SEQ ID NO: 199455 - RNA, 19 nt, Artificial Sequence
  Description of Artificial Sequence: Synthetic oligonucleotide
  Antisense strand to SEQ ID NO: 199454
auucucaaggcuuuaauau

SEQ ID NO: 199456 - RNA, 19 nt, Artificial Sequence
  Description of Artificial Sequence: Synthetic oligonucleotide
  Sense strand starting at position 3657 of SEQ ID NO: 2570
cuguguuucccagacuuac

SEQ ID NO: 199457 - RNA, 19 nt, Artificial Sequence
  Description of Artificial Sequence: Synthetic oligonucleotide
  Antisense strand to SEQ ID NO: 199456
guaagucugggaaacacag

SEQ ID NO: 199458 - RNA, 19 nt, Artificial Sequence
  Description of Artificial Sequence: Synthetic oligonucleotide
  Sense strand starting at position 3726 of SEQ ID NO: 2570
ugggaauuauugcucucag

SEQ ID NO: 199459 - RNA, 19 nt, Artificial Sequence
  Description of Artificial Sequence: Synthetic oligonucleotide
  Antisense strand to SEQ ID NO: 199458
cugagagcaauaauuccca

SEQ ID NO: 199460 - RNA, 19 nt, Artificial Sequence
  Description of Artificial Sequence: Synthetic oligonucleotide
  Sense strand starting at position 3727 of SEQ ID NO: 2570
gggaauuauugcucucagg

SEQ ID NO: 199461 - RNA, 19 nt, Artificial Sequence
  Description of Artificial Sequence: Synthetic oligonucleotide
  Antisense strand to SEQ ID NO: 199460
ccugagagcaauaauuccc

SEQ ID NO: 199462 - RNA, 19 nt, Artificial Sequence
  Description of Artificial Sequence: Synthetic oligonucleotide
  Sense strand starting at position 3852 of SEQ ID NO: 2570
gcucgaugacuugaaagac

SEQ ID NO: 199463 - RNA, 19 nt, Artificial Sequence
  Description of Artificial Sequence: Synthetic oligonucleotide
  Antisense strand to SEQ ID NO: 199462
gucuuucaagucaucgagc

SEQ ID NO: 199464 - RNA, 19 nt, Artificial Sequence
  Description of Artificial Sequence: Synthetic oligonucleotide
  Sense strand starting at position 3971 of SEQ ID NO: 2570
uguuuaugggauuggcaag

SEQ ID NO: 199465 - RNA, 19 nt, Artificial Sequence
  Description of Artificial Sequence: Synthetic oligonucleotide
  Antisense strand to SEQ ID NO: 199464
cuugccaaucccauaaaca

SEQ ID NO: 199466 - RNA, 19 nt, Artificial Sequence
  Description of Artificial Sequence: Synthetic oligonucleotide
  Sense strand starting at position 27 of SEQ ID NO: 2571
aaaugaguggcuggacaua

SEQ ID NO: 199467 - RNA, 19 nt, Artificial Sequence
  Description of Artificial Sequence: Synthetic oligonucleotide
  Antisense strand to SEQ ID NO: 199466
uauguccagccacucauuu

SEQ ID NO: 199468 - RNA, 19 nt, Artificial Sequence
  Description of Artificial Sequence: Synthetic oligonucleotide
  Sense strand starting at position 141 of SEQ ID NO: 2571
cggguuacucucuaaauug

SEQ ID NO: 199469 - RNA, 19 nt, Artificial Sequence
  Description of Artificial Sequence: Synthetic oligonucleotide
  Antisense strand to SEQ ID NO: 199468
caauuuagagaguaacccg

SEQ ID NO: 199470 - RNA, 19 nt, Artificial Sequence
  Description of Artificial Sequence: Synthetic oligonucleotide
  Sense strand starting at position 311 of SEQ ID NO: 2571
ucugacaugagcugaauga

SEQ ID NO: 199471 - RNA, 19 nt, Artificial Sequence
  Description of Artificial Sequence: Synthetic oligonucleotide
  Antisense strand to SEQ ID NO: 199470
ucauucagcucaugucaga

SEQ ID NO: 199472 - RNA, 19 nt, Artificial Sequence
  Description of Artificial Sequence: Synthetic oligonucleotide
  Sense strand starting at position 430 of SEQ ID NO: 2571
uccaccugugucugagaau

SEQ ID NO: 199473 - RNA, 19 nt, Artificial Sequence
  Description of Artificial Sequence: Synthetic oligonucleotide
  Antisense strand to SEQ ID NO: 199472
auucucagacacaggugga

SEQ ID NO: 199474 - RNA, 19 nt, Artificial Sequence
  Description of Artificial Sequence: Synthetic oligonucleotide
  Sense strand starting at position 439 of SEQ ID NO: 2571
gucugagaauucccuggca

SEQ ID NO: 199475 - RNA, 19 nt, Artificial Sequence
  Description of Artificial Sequence: Synthetic oligonucleotide
  Antisense strand to SEQ ID NO: 199474
ugccagggaauucucagac

SEQ ID NO: 199476 - RNA, 19 nt, Artificial Sequence
  Description of Artificial Sequence: Synthetic oligonucleotide
  Sense strand starting at position 441 of SEQ ID NO: 2571
cugagaauucccuggcaac

SEQ ID NO: 199477 - RNA, 19 nt, Artificial Sequence
  Description of Artificial Sequence: Synthetic oligonucleotide
  Antisense strand to SEQ ID NO: 199476
guugccagggaauucucag

SEQ ID NO: 199478 - RNA, 19 nt, Artificial Sequence
  Description of Artificial Sequence: Synthetic oligonucleotide
  Sense strand starting at position 442 of SEQ ID NO: 2571
ugagaauucccuggcaacu

SEQ ID NO: 199479 - RNA, 19 nt, Artificial Sequence
  Description of Artificial Sequence: Synthetic oligonucleotide
  Antisense strand to SEQ ID NO: 199478
aguugccagggaauucuca

SEQ ID NO: 199480 - RNA, 19 nt, Artificial Sequence
  Description of Artificial Sequence: Synthetic oligonucleotide
  Sense strand starting at position 769 of SEQ ID NO: 2571
aaaucuaggguuugguuau

SEQ ID NO: 199481 - RNA, 19 nt, Artificial Sequence
  Description of Artificial Sequence: Synthetic oligonucleotide
  Antisense strand to SEQ ID NO: 199480
auaaccaaacccuagauuu

SEQ ID NO: 199482 - RNA, 19 nt, Artificial Sequence
  Description of Artificial Sequence: Synthetic oligonucleotide
  Sense strand starting at position 775 of SEQ ID NO: 2571
aggguuugguuaucaauag

SEQ ID NO: 199483 - RNA, 19 nt, Artificial Sequence
  Description of Artificial Sequence: Synthetic oligonucleotide
  Antisense strand to SEQ ID NO: 199482
cuauugauaaccaaacccu

SEQ ID NO: 199484 - RNA, 19 nt, Artificial Sequence
  Description of Artificial Sequence: Synthetic oligonucleotide
  Sense strand starting at position 779 of SEQ ID NO: 2571
uuugguuaucaauagaguu

SEQ ID NO: 199485 - RNA, 19 nt, Artificial Sequence
  Description of Artificial Sequence: Synthetic oligonucleotide
  Antisense strand to SEQ ID NO: 199484
aacucuauugauaaccaaa

SEQ ID NO: 199486 - RNA, 19 nt, Artificial Sequence
  Description of Artificial Sequence: Synthetic oligonucleotide
  Sense strand starting at position 787 of SEQ ID NO: 2571
ucaauagaguuaccaguua

SEQ ID NO: 199487 - RNA, 19 nt, Artificial Sequence
  Description of Artificial Sequence: Synthetic oligonucleotide
  Antisense strand to SEQ ID NO: 199486
uaacugguaacucuauuga

SEQ ID NO: 199488 - RNA, 19 nt, Artificial Sequence
  Description of Artificial Sequence: Synthetic oligonucleotide
  Sense strand starting at position 870 of SEQ ID NO: 2571
gguugaggugggugaaaca

SEQ ID NO: 199489 - RNA, 19 nt, Artificial Sequence
  Description of Artificial Sequence: Synthetic oligonucleotide
  Antisense strand to SEQ ID NO: 199488
uguuucacccaccucaacc

SEQ ID NO: 199490 - RNA, 19 nt, Artificial Sequence
  Description of Artificial Sequence: Synthetic oligonucleotide
  Sense strand starting at position 1122 of SEQ ID NO: 2571
cauguaaagcacgaguuau

SEQ ID NO: 199491 - RNA, 19 nt, Artificial Sequence
  Description of Artificial Sequence: Synthetic oligonucleotide
  Antisense strand to SEQ ID NO: 199490
auaacucgugcuuuacaug

SEQ ID NO: 199492 - RNA, 19 nt, Artificial Sequence
  Description of Artificial Sequence: Synthetic oligonucleotide
  Sense strand starting at position 1201 of SEQ ID NO: 2571
ccgguaaaugguugagaag

SEQ ID NO: 199493 - RNA, 19 nt, Artificial Sequence
  Description of Artificial Sequence: Synthetic oligonucleotide
  Antisense strand to SEQ ID NO: 199492
cuucucaaccauuuaccgg

SEQ ID NO: 199494 - RNA, 19 nt, Artificial Sequence
  Description of Artificial Sequence: Synthetic oligonucleotide
  Sense strand starting at position 1247 of SEQ ID NO: 2571
gcuggucaaagucaugaca

SEQ ID NO: 199495 - RNA, 19 nt, Artificial Sequence
  Description of Artificial Sequence: Synthetic oligonucleotide
  Antisense strand to SEQ ID NO: 199494
ugucaugacuuugaccagc

SEQ ID NO: 199496 - RNA, 19 nt, Artificial Sequence
  Description of Artificial Sequence: Synthetic oligonucleotide
  Sense strand starting at position 1350 of SEQ ID NO: 2571
gcauuagacacacgagaag

SEQ ID NO: 199497 - RNA, 19 nt, Artificial Sequence
  Description of Artificial Sequence: Synthetic oligonucleotide
  Antisense strand to SEQ ID NO: 199496
cuucucgugugucuaaugc

SEQ ID NO: 199498 - RNA, 19 nt, Artificial Sequence
  Description of Artificial Sequence: Synthetic oligonucleotide
  Sense strand starting at position 1397 of SEQ ID NO: 2571
aggaguaaguuucuuaaau

SEQ ID NO: 199499 - RNA, 19 nt, Artificial Sequence
  Description of Artificial Sequence: Synthetic oligonucleotide
  Antisense strand to SEQ ID NO: 199498
auuuaagaaacuuacuccu

SEQ ID NO: 199500 - RNA, 19 nt, Artificial Sequence
  Description of Artificial Sequence: Synthetic oligonucleotide
  Sense strand starting at position 1398 of SEQ ID NO: 2571
ggaguaaguuucuuaaaug

SEQ ID NO: 199501 - RNA, 19 nt, Artificial Sequence
  Description of Artificial Sequence: Synthetic oligonucleotide
  Antisense strand to SEQ ID NO: 199500
cauuuaagaaacuuacucc

SEQ ID NO: 199502 - RNA, 19 nt, Artificial Sequence
  Description of Artificial Sequence: Synthetic oligonucleotide
  Sense strand starting at position 1456 of SEQ ID NO: 2571
aggaguuagcuacaggcaa

SEQ ID NO: 199503 - RNA, 19 nt, Artificial Sequence
  Description of Artificial Sequence: Synthetic oligonucleotide
  Antisense strand to SEQ ID NO: 199502
uugccuguagcuaacuccu

SEQ ID NO: 199504 - RNA, 19 nt, Artificial Sequence
  Description of Artificial Sequence: Synthetic oligonucleotide
  Sense strand starting at position 1460 of SEQ ID NO: 2571
guuagcuacaggcaagauu

SEQ ID NO: 199505 - RNA, 19 nt, Artificial Sequence
  Description of Artificial Sequence: Synthetic oligonucleotide
  Antisense strand to SEQ ID NO: 199504
aaucuugccuguagcuaac

SEQ ID NO: 199506 - RNA, 19 nt, Artificial Sequence
  Description of Artificial Sequence: Synthetic oligonucleotide
  Sense strand starting at position 2489 of SEQ ID NO: 2571
ccaggaaagcuuuggagua

SEQ ID NO: 199507 - RNA, 19 nt, Artificial Sequence
  Description of Artificial Sequence: Synthetic oligonucleotide
  Antisense strand to SEQ ID NO: 199506
uacuccaaagcuuuccugg

SEQ ID NO: 199508 - RNA, 19 nt, Artificial Sequence
  Description of Artificial Sequence: Synthetic oligonucleotide
  Sense strand starting at position 2494 of SEQ ID NO: 2571
aaagcuuuggaguaggagu

SEQ ID NO: 199509 - RNA, 19 nt, Artificial Sequence
  Description of Artificial Sequence: Synthetic oligonucleotide
  Antisense strand to SEQ ID NO: 199508
acuccuacuccaaagcuuu

SEQ ID NO: 199510 - RNA, 19 nt, Artificial Sequence
  Description of Artificial Sequence: Synthetic oligonucleotide
  Sense strand starting at position 2496 of SEQ ID NO: 2571
agcuuuggaguaggaguua

SEQ ID NO: 199511 - RNA, 19 nt, Artificial Sequence
  Description of Artificial Sequence: Synthetic oligonucleotide
  Antisense strand to SEQ ID NO: 199510
uaacuccuacuccaaagcu

SEQ ID NO: 199512 - RNA, 19 nt, Artificial Sequence
  Description of Artificial Sequence: Synthetic oligonucleotide
  Sense strand starting at position 2535 of SEQ ID NO: 2571
uacuccugugagugacuaa

SEQ ID NO: 199513 - RNA, 19 nt, Artificial Sequence
  Description of Artificial Sequence: Synthetic oligonucleotide
  Antisense strand to SEQ ID NO: 199512
uuagucacucacaggagua

SEQ ID NO: 199514 - RNA, 19 nt, Artificial Sequence
  Description of Artificial Sequence: Synthetic oligonucleotide
  Sense strand starting at position 2538 of SEQ ID NO: 2571
uccugugagugacuaaagu

SEQ ID NO: 199515 - RNA, 19 nt, Artificial Sequence
  Description of Artificial Sequence: Synthetic oligonucleotide
  Antisense strand to SEQ ID NO: 199514
acuuuagucacucacagga

SEQ ID NO: 199516 - RNA, 19 nt, Artificial Sequence
  Description of Artificial Sequence: Synthetic oligonucleotide
  Sense strand starting at position 2595 of SEQ ID NO: 2571
ggcgcucaucccuuguaau

SEQ ID NO: 199517 - RNA, 19 nt, Artificial Sequence
  Description of Artificial Sequence: Synthetic oligonucleotide
  Antisense strand to SEQ ID NO: 199516
auuacaagggaugagcgcc

SEQ ID NO: 199518 - RNA, 19 nt, Artificial Sequence
  Description of Artificial Sequence: Synthetic oligonucleotide
  Sense strand starting at position 2708 of SEQ ID NO: 2571
gauuucgccacguagugaa

SEQ ID NO: 199519 - RNA, 19 nt, Artificial Sequence
  Description of Artificial Sequence: Synthetic oligonucleotide
  Antisense strand to SEQ ID NO: 199518
uucacuacguggcgaaauc

SEQ ID NO: 199520 - RNA, 19 nt, Artificial Sequence
  Description of Artificial Sequence: Synthetic oligonucleotide
  Sense strand starting at position 2732 of SEQ ID NO: 2571
gcagaaugaauccguugag

SEQ ID NO: 199521 - RNA, 19 nt, Artificial Sequence
  Description of Artificial Sequence: Synthetic oligonucleotide
  Antisense strand to SEQ ID NO: 199520
cucaacggauucauucugc

SEQ ID NO: 199522 - RNA, 19 nt, Artificial Sequence
  Description of Artificial Sequence: Synthetic oligonucleotide
  Sense strand starting at position 2733 of SEQ ID NO: 2571
cagaaugaauccguugagu

SEQ ID NO: 199523 - RNA, 19 nt, Artificial Sequence
  Description of Artificial Sequence: Synthetic oligonucleotide
  Antisense strand to SEQ ID NO: 199522
acucaacggauucauucug

SEQ ID NO: 199524 - RNA, 19 nt, Artificial Sequence
  Description of Artificial Sequence: Synthetic oligonucleotide
  Sense strand starting at position 2736 of SEQ ID NO: 2571
aaugaauccguugagucua

SEQ ID NO: 199525 - RNA, 19 nt, Artificial Sequence
  Description of Artificial Sequence: Synthetic oligonucleotide
  Antisense strand to SEQ ID NO: 199524
uagacucaacggauucauu

SEQ ID NO: 199526 - RNA, 19 nt, Artificial Sequence
  Description of Artificial Sequence: Synthetic oligonucleotide
  Sense strand starting at position 2746 of SEQ ID NO: 2571
uugagucuauaggcaaauu

SEQ ID NO: 199527 - RNA, 19 nt, Artificial Sequence
  Description of Artificial Sequence: Synthetic oligonucleotide
  Antisense strand to SEQ ID NO: 199526
aauuugccuauagacucaa

SEQ ID NO: 199528 - RNA, 19 nt, Artificial Sequence
  Description of Artificial Sequence: Synthetic oligonucleotide
  Sense strand starting at position 2904 of SEQ ID NO: 2571
gguuuaauaugguuuagag

SEQ ID NO: 199529 - RNA, 19 nt, Artificial Sequence
  Description of Artificial Sequence: Synthetic oligonucleotide
  Antisense strand to SEQ ID NO: 199528
cucuaaaccauauuaaacc

SEQ ID NO: 199530 - RNA, 19 nt, Artificial Sequence
  Description of Artificial Sequence: Synthetic oligonucleotide
  Sense strand starting at position 2906 of SEQ ID NO: 2571
uuuaauaugguuuagagca

SEQ ID NO: 199531 - RNA, 19 nt, Artificial Sequence
  Description of Artificial Sequence: Synthetic oligonucleotide
  Antisense strand to SEQ ID NO: 199530
ugcucuaaaccauauuaaa

SEQ ID NO: 199532 - RNA, 19 nt, Artificial Sequence
  Description of Artificial Sequence: Synthetic oligonucleotide
  Sense strand starting at position 2938 of SEQ ID NO: 2571
cagacugauuuggauacua

SEQ ID NO: 199533 - RNA, 19 nt, Artificial Sequence
  Description of Artificial Sequence: Synthetic oligonucleotide
  Antisense strand to SEQ ID NO: 199532
uaguauccaaaucagucug

SEQ ID NO: 199534 - RNA, 19 nt, Artificial Sequence
  Description of Artificial Sequence: Synthetic oligonucleotide
  Sense strand starting at position 3054 of SEQ ID NO: 2571
gggcaaguggaucacuuua

SEQ ID NO: 199535 - RNA, 19 nt, Artificial Sequence
  Description of Artificial Sequence: Synthetic oligonucleotide
  Antisense strand to SEQ ID NO: 199534
uaaagugauccacuugccc

SEQ ID NO: 199536 - RNA, 19 nt, Artificial Sequence
  Description of Artificial Sequence: Synthetic oligonucleotide
  Sense strand starting at position 3192 of SEQ ID NO: 2571
ucggaugaggugggauaaa

SEQ ID NO: 199537 - RNA, 19 nt, Artificial Sequence
  Description of Artificial Sequence: Synthetic oligonucleotide
  Antisense strand to SEQ ID NO: 199536
uuuaucccaccucauccga

SEQ ID NO: 199538 - RNA, 19 nt, Artificial Sequence
  Description of Artificial Sequence: Synthetic oligonucleotide
  Sense strand starting at position 3428 of SEQ ID NO: 2571
gcaggaggaucacucuaaa

SEQ ID NO: 199539 - RNA, 19 nt, Artificial Sequence
  Description of Artificial Sequence: Synthetic oligonucleotide
  Antisense strand to SEQ ID NO: 199538
uuuagagugauccuccugc

SEQ ID NO: 199540 - RNA, 19 nt, Artificial Sequence
  Description of Artificial Sequence: Synthetic oligonucleotide
  Sense strand starting at position 3734 of SEQ ID NO: 2571
ggagauuauccugggcuac

SEQ ID NO: 199541 - RNA, 19 nt, Artificial Sequence
  Description of Artificial Sequence: Synthetic oligonucleotide
  Antisense strand to SEQ ID NO: 199540
guagcccaggauaaucucc

SEQ ID NO: 199542 - RNA, 19 nt, Artificial Sequence
  Description of Artificial Sequence: Synthetic oligonucleotide
  Sense strand starting at position 3735 of SEQ ID NO: 2571
gagauuauccugggcuaca

SEQ ID NO: 199543 - RNA, 19 nt, Artificial Sequence
  Description of Artificial Sequence: Synthetic oligonucleotide
  Antisense strand to SEQ ID NO: 199542
uguagcccaggauaaucuc

SEQ ID NO: 199544 - RNA, 19 nt, Artificial Sequence
  Description of Artificial Sequence: Synthetic oligonucleotide
  Sense strand starting at position 3736 of SEQ ID NO: 2571
agauuauccugggcuacau

SEQ ID NO: 199545 - RNA, 19 nt, Artificial Sequence
  Description of Artificial Sequence: Synthetic oligonucleotide
  Antisense strand to SEQ ID NO: 199544
auguagcccaggauaaucu

SEQ ID NO: 199546 - RNA, 19 nt, Artificial Sequence
  Description of Artificial Sequence: Synthetic oligonucleotide
  Sense strand starting at position 69 of SEQ ID NO: 2572
acgguaggcccuuaacaaa

SEQ ID NO: 199547 - RNA, 19 nt, Artificial Sequence
  Description of Artificial Sequence: Synthetic oligonucleotide
  Antisense strand to SEQ ID NO: 199546
uuuguuaagggccuaccgu

SEQ ID NO: 199548 - RNA, 19 nt, Artificial Sequence
  Description of Artificial Sequence: Synthetic oligonucleotide
  Sense strand starting at position 92 of SEQ ID NO: 2572
uggauugaaugcucaugau

SEQ ID NO: 199549 - RNA, 19 nt, Artificial Sequence
  Description of Artificial Sequence: Synthetic oligonucleotide
  Antisense strand to SEQ ID NO: 199548
aucaugagcauucaaucca

SEQ ID NO: 199550 - RNA, 19 nt, Artificial Sequence
  Description of Artificial Sequence: Synthetic oligonucleotide
  Sense strand starting at position 96 of SEQ ID NO: 2572
uugaaugcucaugaucacu

SEQ ID NO: 199551 - RNA, 19 nt, Artificial Sequence
  Description of Artificial Sequence: Synthetic oligonucleotide
  Antisense strand to SEQ ID NO: 199550
agugaucaugagcauucaa

SEQ ID NO: 199552 - RNA, 19 nt, Artificial Sequence
  Description of Artificial Sequence: Synthetic oligonucleotide
  Sense strand starting at position 205 of SEQ ID NO: 2572
ugaagacuuguuugucuaa

SEQ ID NO: 199553 - RNA, 19 nt, Artificial Sequence
  Description of Artificial Sequence: Synthetic oligonucleotide
  Antisense strand to SEQ ID NO: 199552
uuagacaaacaagucuuca

SEQ ID NO: 199554 - RNA, 19 nt, Artificial Sequence
  Description of Artificial Sequence: Synthetic oligonucleotide
  Sense strand starting at position 206 of SEQ ID NO: 2572
gaagacuuguuugucuaaa

SEQ ID NO: 199555 - RNA, 19 nt, Artificial Sequence
  Description of Artificial Sequence: Synthetic oligonucleotide
  Antisense strand to SEQ ID NO: 199554
uuuagacaaacaagucuuc

SEQ ID NO: 199556 - RNA, 19 nt, Artificial Sequence
  Description of Artificial Sequence: Synthetic oligonucleotide
  Sense strand starting at position 208 of SEQ ID NO: 2572
agacuuguuugucuaaaca

SEQ ID NO: 199557 - RNA, 19 nt, Artificial Sequence
  Description of Artificial Sequence: Synthetic oligonucleotide
  Antisense strand to SEQ ID NO: 199556
uguuuagacaaacaagucu

SEQ ID NO: 199558 - RNA, 19 nt, Artificial Sequence
  Description of Artificial Sequence: Synthetic oligonucleotide
  Sense strand starting at position 232 of SEQ ID NO: 2572
gccaguguuguguuuacua

SEQ ID NO: 199559 - RNA, 19 nt, Artificial Sequence
  Description of Artificial Sequence: Synthetic oligonucleotide
  Antisense strand to SEQ ID NO: 199558
uaguaaacacaacacuggc

SEQ ID NO: 199560 - RNA, 19 nt, Artificial Sequence
  Description of Artificial Sequence: Synthetic oligonucleotide
  Sense strand starting at position 239 of SEQ ID NO: 2572
uuguguuuacuauaccauu

SEQ ID NO: 199561 - RNA, 19 nt, Artificial Sequence
  Description of Artificial Sequence: Synthetic oligonucleotide
  Antisense strand to SEQ ID NO: 199560
aaugguauaguaaacacaa

SEQ ID NO: 199562 - RNA, 19 nt, Artificial Sequence
  Description of Artificial Sequence: Synthetic oligonucleotide
  Sense strand starting at position 663 of SEQ ID NO: 2572
agggaaaucaggugccacu

SEQ ID NO: 199563 - RNA, 19 nt, Artificial Sequence
  Description of Artificial Sequence: Synthetic oligonucleotide
  Antisense strand to SEQ ID NO: 199562
aguggcaccugauuucccu

SEQ ID NO: 199564 - RNA, 19 nt, Artificial Sequence
  Description of Artificial Sequence: Synthetic oligonucleotide
  Sense strand starting at position 690 of SEQ ID NO: 2572
uugguuguuagcucuguuu

SEQ ID NO: 199565 - RNA, 19 nt, Artificial Sequence
  Description of Artificial Sequence: Synthetic oligonucleotide
  Antisense strand to SEQ ID NO: 199564
aaacagagcuaacaaccaa

SEQ ID NO: 199566 - RNA, 19 nt, Artificial Sequence
  Description of Artificial Sequence: Synthetic oligonucleotide
  Sense strand starting at position 1060 of SEQ ID NO: 2572
gaguaaugucaaugaaacu

SEQ ID NO: 199567 - RNA, 19 nt, Artificial Sequence
  Description of Artificial Sequence: Synthetic oligonucleotide
  Antisense strand to SEQ ID NO: 199566
aguuucauugacauuacuc

SEQ ID NO: 199568 - RNA, 19 nt, Artificial Sequence
  Description of Artificial Sequence: Synthetic oligonucleotide
  Sense strand starting at position 1083 of SEQ ID NO: 2572
cauuaagagugagcagagu

SEQ ID NO: 199569 - RNA, 19 nt, Artificial Sequence
  Description of Artificial Sequence: Synthetic oligonucleotide
  Antisense strand to SEQ ID NO: 199568
acucugcucacucuuaaug

SEQ ID NO: 199570 - RNA, 19 nt, Artificial Sequence
  Description of Artificial Sequence: Synthetic oligonucleotide
  Sense strand starting at position 1096 of SEQ ID NO: 2572
cagaguugaugcucacauu

SEQ ID NO: 199571 - RNA, 19 nt, Artificial Sequence
  Description of Artificial Sequence: Synthetic oligonucleotide
  Antisense strand to SEQ ID NO: 199570
aaugugagcaucaacucug

SEQ ID NO: 199572 - RNA, 19 nt, Artificial Sequence
  Description of Artificial Sequence: Synthetic oligonucleotide
  Sense strand starting at position 1097 of SEQ ID NO: 2572
agaguugaugcucacauua

SEQ ID NO: 199573 - RNA, 19 nt, Artificial Sequence
  Description of Artificial Sequence: Synthetic oligonucleotide
  Antisense strand to SEQ ID NO: 199572
uaaugugagcaucaacucu

SEQ ID NO: 199574 - RNA, 19 nt, Artificial Sequence
  Description of Artificial Sequence: Synthetic oligonucleotide
  Sense strand starting at position 1296 of SEQ ID NO: 2572
ccaggaacuagcugugacu

SEQ ID NO: 199575 - RNA, 19 nt, Artificial Sequence
  Description of Artificial Sequence: Synthetic oligonucleotide
  Antisense strand to SEQ ID NO: 199574
agucacagcuaguuccugg

SEQ ID NO: 199576 - RNA, 19 nt, Artificial Sequence
  Description of Artificial Sequence: Synthetic oligonucleotide
  Sense strand starting at position 1298 of SEQ ID NO: 2572
aggaacuagcugugacuuu

SEQ ID NO: 199577 - RNA, 19 nt, Artificial Sequence
  Description of Artificial Sequence: Synthetic oligonucleotide
  Antisense strand to SEQ ID NO: 199576
aaagucacagcuaguuccu

SEQ ID NO: 199578 - RNA, 19 nt, Artificial Sequence
  Description of Artificial Sequence: Synthetic oligonucleotide
  Sense strand starting at position 1400 of SEQ ID NO: 2572
ugcucucugcgcuuccaaa

SEQ ID NO: 199579 - RNA, 19 nt, Artificial Sequence
  Description of Artificial Sequence: Synthetic oligonucleotide
  Antisense strand to SEQ ID NO: 199578
uuuggaagcgcagagagca

SEQ ID NO: 199580 - RNA, 19 nt, Artificial Sequence
  Description of Artificial Sequence: Synthetic oligonucleotide
  Sense strand starting at position 1550 of SEQ ID NO: 2572
uuaucuuacuguuuaggga

SEQ ID NO: 199581 - RNA, 19 nt, Artificial Sequence
  Description of Artificial Sequence: Synthetic oligonucleotide
  Antisense strand to SEQ ID NO: 199580
ucccuaaacaguaagauaa

SEQ ID NO: 199582 - RNA, 19 nt, Artificial Sequence
  Description of Artificial Sequence: Synthetic oligonucleotide
  Sense strand starting at position 1639 of SEQ ID NO: 2572
cccaaagauccaggacagu

SEQ ID NO: 199583 - RNA, 19 nt, Artificial Sequence
  Description of Artificial Sequence: Synthetic oligonucleotide
  Antisense strand to SEQ ID NO: 199582
acuguccuggaucuuuggg

SEQ ID NO: 199584 - RNA, 19 nt, Artificial Sequence
  Description of Artificial Sequence: Synthetic oligonucleotide
  Sense strand starting at position 1741 of SEQ ID NO: 2572
cgugccugagugccuuaaa

SEQ ID NO: 199585 - RNA, 19 nt, Artificial Sequence
  Description of Artificial Sequence: Synthetic oligonucleotide
  Antisense strand to SEQ ID NO: 199584
uuuaaggcacucaggcacg

SEQ ID NO: 199586 - RNA, 19 nt, Artificial Sequence
  Description of Artificial Sequence: Synthetic oligonucleotide
  Sense strand starting at position 2041 of SEQ ID NO: 2572
cggagaaagccuugauuaa

SEQ ID NO: 199587 - RNA, 19 nt, Artificial Sequence
  Description of Artificial Sequence: Synthetic oligonucleotide
  Antisense strand to SEQ ID NO: 199586
uuaaucaaggcuuucuccg

SEQ ID NO: 199588 - RNA, 19 nt, Artificial Sequence
  Description of Artificial Sequence: Synthetic oligonucleotide
  Sense strand starting at position 2147 of SEQ ID NO: 2572
gaaaucauccggcgaagau

SEQ ID NO: 199589 - RNA, 19 nt, Artificial Sequence
  Description of Artificial Sequence: Synthetic oligonucleotide
  Antisense strand to SEQ ID NO: 199588
aucuucgccggaugauuuc

SEQ ID NO: 199590 - RNA, 19 nt, Artificial Sequence
  Description of Artificial Sequence: Synthetic oligonucleotide
  Sense strand starting at position 2148 of SEQ ID NO: 2572
aaaucauccggcgaagaug

SEQ ID NO: 199591 - RNA, 19 nt, Artificial Sequence
  Description of Artificial Sequence: Synthetic oligonucleotide
  Antisense strand to SEQ ID NO: 199590
caucuucgccggaugauuu

SEQ ID NO: 199592 - RNA, 19 nt, Artificial Sequence
  Description of Artificial Sequence: Synthetic oligonucleotide
  Sense strand starting at position 2217 of SEQ ID NO: 2572
cccucuugcgucuuagcaa

SEQ ID NO: 199593 - RNA, 19 nt, Artificial Sequence
  Description of Artificial Sequence: Synthetic oligonucleotide
  Antisense strand to SEQ ID NO: 199592
uugcuaagacgcaagaggg

SEQ ID NO: 199594 - RNA, 19 nt, Artificial Sequence
  Description of Artificial Sequence: Synthetic oligonucleotide
  Sense strand starting at position 2238 of SEQ ID NO: 2572
auuguaaguccugggacau

SEQ ID NO: 199595 - RNA, 19 nt, Artificial Sequence
  Description of Artificial Sequence: Synthetic oligonucleotide
  Antisense strand to SEQ ID NO: 199594
augucccaggacuuacaau

SEQ ID NO: 199596 - RNA, 19 nt, Artificial Sequence
  Description of Artificial Sequence: Synthetic oligonucleotide
  Sense strand starting at position 2239 of SEQ ID NO: 2572
uuguaaguccugggacauu

SEQ ID NO: 199597 - RNA, 19 nt, Artificial Sequence
  Description of Artificial Sequence: Synthetic oligonucleotide
  Antisense strand to SEQ ID NO: 199596
aaugucccaggacuuacaa

SEQ ID NO: 199598 - RNA, 19 nt, Artificial Sequence
  Description of Artificial Sequence: Synthetic oligonucleotide
  Sense strand starting at position 2294 of SEQ ID NO: 2572
gguguuccagcuggauuua

SEQ ID NO: 199599 - RNA, 19 nt, Artificial Sequence
  Description of Artificial Sequence: Synthetic oligonucleotide
  Antisense strand to SEQ ID NO: 199598
uaaauccagcuggaacacc

SEQ ID NO: 199600 - RNA, 19 nt, Artificial Sequence
  Description of Artificial Sequence: Synthetic oligonucleotide
  Sense strand starting at position 2308 of SEQ ID NO: 2572
auuuaagucugggaacauu

SEQ ID NO: 199601 - RNA, 19 nt, Artificial Sequence
  Description of Artificial Sequence: Synthetic oligonucleotide
  Antisense strand to SEQ ID NO: 199600
aauguucccagacuuaaau

SEQ ID NO: 199602 - RNA, 19 nt, Artificial Sequence
  Description of Artificial Sequence: Synthetic oligonucleotide
  Sense strand starting at position 2360 of SEQ ID NO: 2572
cuggacucuuaaguguaaa

SEQ ID NO: 199603 - RNA, 19 nt, Artificial Sequence
  Description of Artificial Sequence: Synthetic oligonucleotide
  Antisense strand to SEQ ID NO: 199602
uuuacacuuaagaguccag

SEQ ID NO: 199604 - RNA, 19 nt, Artificial Sequence
  Description of Artificial Sequence: Synthetic oligonucleotide
  Sense strand starting at position 2430 of SEQ ID NO: 2572
gguuuacaacuugaucuuu

SEQ ID NO: 199605 - RNA, 19 nt, Artificial Sequence
  Description of Artificial Sequence: Synthetic oligonucleotide
  Antisense strand to SEQ ID NO: 199604
aaagaucaaguuguaaacc

SEQ ID NO: 199606 - RNA, 19 nt, Artificial Sequence
  Description of Artificial Sequence: Synthetic oligonucleotide
  Sense strand starting at position 2451 of SEQ ID NO: 2572
gaaauauaagguuggugca

SEQ ID NO: 199607 - RNA, 19 nt, Artificial Sequence
  Description of Artificial Sequence: Synthetic oligonucleotide
  Antisense strand to SEQ ID NO: 199606
ugcaccaaccuuauauuuc

SEQ ID NO: 199608 - RNA, 19 nt, Artificial Sequence
  Description of Artificial Sequence: Synthetic oligonucleotide
  Sense strand starting at position 2596 of SEQ ID NO: 2572
uuuacaguuuauccaguaa

SEQ ID NO: 199609 - RNA, 19 nt, Artificial Sequence
  Description of Artificial Sequence: Synthetic oligonucleotide
  Antisense strand to SEQ ID NO: 199608
uuacuggauaaacuguaaa

SEQ ID NO: 199610 - RNA, 19 nt, Artificial Sequence
  Description of Artificial Sequence: Synthetic oligonucleotide
  Sense strand starting at position 2619 of SEQ ID NO: 2572
ccacaaaguuuaucuggua

SEQ ID NO: 199611 - RNA, 19 nt, Artificial Sequence
  Description of Artificial Sequence: Synthetic oligonucleotide
  Antisense strand to SEQ ID NO: 199610
uaccagauaaacuuugugg

SEQ ID NO: 199612 - RNA, 19 nt, Artificial Sequence
  Description of Artificial Sequence: Synthetic oligonucleotide
  Sense strand starting at position 3155 of SEQ ID NO: 2572
aaacaagagcugugcaaug

SEQ ID NO: 199613 - RNA, 19 nt, Artificial Sequence
  Description of Artificial Sequence: Synthetic oligonucleotide
  Antisense strand to SEQ ID NO: 199612
cauugcacagcucuuguuu

SEQ ID NO: 199614 - RNA, 19 nt, Artificial Sequence
  Description of Artificial Sequence: Synthetic oligonucleotide
  Sense strand starting at position 3157 of SEQ ID NO: 2572
acaagagcugugcaaugua

SEQ ID NO: 199615 - RNA, 19 nt, Artificial Sequence
  Description of Artificial Sequence: Synthetic oligonucleotide
  Antisense strand to SEQ ID NO: 199614
uacauugcacagcucuugu

SEQ ID NO: 199616 - RNA, 19 nt, Artificial Sequence
  Description of Artificial Sequence: Synthetic oligonucleotide
  Sense strand starting at position 3160 of SEQ ID NO: 2572
agagcugugcaauguauuu

SEQ ID NO: 199617 - RNA, 19 nt, Artificial Sequence
  Description of Artificial Sequence: Synthetic oligonucleotide
  Antisense strand to SEQ ID NO: 199616
aaauacauugcacagcucu

SEQ ID NO: 199618 - RNA, 19 nt, Artificial Sequence
  Description of Artificial Sequence: Synthetic oligonucleotide
  Sense strand starting at position 3498 of SEQ ID NO: 2572
auugaucaguggguucaga

SEQ ID NO: 199619 - RNA, 19 nt, Artificial Sequence
  Description of Artificial Sequence: Synthetic oligonucleotide
  Antisense strand to SEQ ID NO: 199618
ucugaacccacugaucaau

SEQ ID NO: 199620 - RNA, 19 nt, Artificial Sequence
  Description of Artificial Sequence: Synthetic oligonucleotide
  Sense strand starting at position 3782 of SEQ ID NO: 2572
ugaagcaucugauuaagau

SEQ ID NO: 199621 - RNA, 19 nt, Artificial Sequence
  Description of Artificial Sequence: Synthetic oligonucleotide
  Antisense strand to SEQ ID NO: 199620
aucuuaaucagaugcuuca

SEQ ID NO: 199622 - RNA, 19 nt, Artificial Sequence
  Description of Artificial Sequence: Synthetic oligonucleotide
  Sense strand starting at position 3866 of SEQ ID NO: 2572
aauagaguuugaguaguca

SEQ ID NO: 199623 - RNA, 19 nt, Artificial Sequence
  Description of Artificial Sequence: Synthetic oligonucleotide
  Antisense strand to SEQ ID NO: 199622
ugacuacucaaacucuauu

SEQ ID NO: 199624 - RNA, 19 nt, Artificial Sequence
  Description of Artificial Sequence: Synthetic oligonucleotide
  Sense strand starting at position 3892 of SEQ ID NO: 2572
ucaauaaacuguguauuga

SEQ ID NO: 199625 - RNA, 19 nt, Artificial Sequence
  Description of Artificial Sequence: Synthetic oligonucleotide
  Antisense strand to SEQ ID NO: 199624
ucaauacacaguuuauuga

SEQ ID NO: 199626 - RNA, 19 nt, Artificial Sequence
  Description of Artificial Sequence: Synthetic oligonucleotide
  Sense strand starting at position 109 of SEQ ID NO: 2573
ggagaaacuucccacauuu

SEQ ID NO: 199627 - RNA, 19 nt, Artificial Sequence
  Description of Artificial Sequence: Synthetic oligonucleotide
  Antisense strand to SEQ ID NO: 199626
aaaugugggaaguuucucc

SEQ ID NO: 199628 - RNA, 19 nt, Artificial Sequence
  Description of Artificial Sequence: Synthetic oligonucleotide
  Sense strand starting at position 249 of SEQ ID NO: 2573
agccuuugaugacucagaa

SEQ ID NO: 199629 - RNA, 19 nt, Artificial Sequence
  Description of Artificial Sequence: Synthetic oligonucleotide
  Antisense strand to SEQ ID NO: 199628
uucugagucaucaaaggcu

SEQ ID NO: 199630 - RNA, 19 nt, Artificial Sequence
  Description of Artificial Sequence: Synthetic oligonucleotide
  Sense strand starting at position 285 of SEQ ID NO: 2573
agccucuguuaggcaaauu

SEQ ID NO: 199631 - RNA, 19 nt, Artificial Sequence
  Description of Artificial Sequence: Synthetic oligonucleotide
  Antisense strand to SEQ ID NO: 199630
aauuugccuaacagaggcu

SEQ ID NO: 199632 - RNA, 19 nt, Artificial Sequence
  Description of Artificial Sequence: Synthetic oligonucleotide
  Sense strand starting at position 296 of SEQ ID NO: 2573
ggcaaauuacacuggugga

SEQ ID NO: 199633 - RNA, 19 nt, Artificial Sequence
  Description of Artificial Sequence: Synthetic oligonucleotide
  Antisense strand to SEQ ID NO: 199632
uccaccaguguaauuugcc

SEQ ID NO: 199634 - RNA, 19 nt, Artificial Sequence
  Description of Artificial Sequence: Synthetic oligonucleotide
  Sense strand starting at position 326 of SEQ ID NO: 2573
ucaccuuguuccuugggaa

SEQ ID NO: 199635 - RNA, 19 nt, Artificial Sequence
  Description of Artificial Sequence: Synthetic oligonucleotide
  Antisense strand to SEQ ID NO: 199634
uucccaaggaacaagguga

SEQ ID NO: 199636 - RNA, 19 nt, Artificial Sequence
  Description of Artificial Sequence: Synthetic oligonucleotide
  Sense strand starting at position 327 of SEQ ID NO: 2573
caccuuguuccuugggaaa

SEQ ID NO: 199637 - RNA, 19 nt, Artificial Sequence
  Description of Artificial Sequence: Synthetic oligonucleotide
  Antisense strand to SEQ ID NO: 199636
uuucccaaggaacaaggug

SEQ ID NO: 199638 - RNA, 19 nt, Artificial Sequence
  Description of Artificial Sequence: Synthetic oligonucleotide
  Sense strand starting at position 390 of SEQ ID NO: 2573
uuugcaucacgcuguauuu

SEQ ID NO: 199639 - RNA, 19 nt, Artificial Sequence
  Description of Artificial Sequence: Synthetic oligonucleotide
  Antisense strand to SEQ ID NO: 199638
aaauacagcgugaugcaaa

SEQ ID NO: 199640 - RNA, 19 nt, Artificial Sequence
  Description of Artificial Sequence: Synthetic oligonucleotide
  Sense strand starting at position 1351 of SEQ ID NO: 2573
augucauguccuugaagag

SEQ ID NO: 199641 - RNA, 19 nt, Artificial Sequence
  Description of Artificial Sequence: Synthetic oligonucleotide
  Antisense strand to SEQ ID NO: 199640
cucuucaaggacaugacau

SEQ ID NO: 199642 - RNA, 19 nt, Artificial Sequence
  Description of Artificial Sequence: Synthetic oligonucleotide
  Sense strand starting at position 1363 of SEQ ID NO: 2573
ugaagaggcuuugccaaau

SEQ ID NO: 199643 - RNA, 19 nt, Artificial Sequence
  Description of Artificial Sequence: Synthetic oligonucleotide
  Antisense strand to SEQ ID NO: 199642
auuuggcaaagccucuuca

SEQ ID NO: 199644 - RNA, 19 nt, Artificial Sequence
  Description of Artificial Sequence: Synthetic oligonucleotide
  Sense strand starting at position 1399 of SEQ ID NO: 2573
cccgguuguauuugagacu

SEQ ID NO: 199645 - RNA, 19 nt, Artificial Sequence
  Description of Artificial Sequence: Synthetic oligonucleotide
  Antisense strand to SEQ ID NO: 199644
agucucaaauacaaccggg

SEQ ID NO: 199646 - RNA, 19 nt, Artificial Sequence
  Description of Artificial Sequence: Synthetic oligonucleotide
  Sense strand starting at position 1402 of SEQ ID NO: 2573
gguuguauuugagacuuua

SEQ ID NO: 199647 - RNA, 19 nt, Artificial Sequence
  Description of Artificial Sequence: Synthetic oligonucleotide
  Antisense strand to SEQ ID NO: 199646
uaaagucucaaauacaacc

SEQ ID NO: 199648 - RNA, 19 nt, Artificial Sequence
  Description of Artificial Sequence: Synthetic oligonucleotide
  Sense strand starting at position 1422 of SEQ ID NO: 2573
agcgcuucuuacuuuagaa

SEQ ID NO: 199649 - RNA, 19 nt, Artificial Sequence
  Description of Artificial Sequence: Synthetic oligonucleotide
  Antisense strand to SEQ ID NO: 199648
uucuaaaguaagaagcgcu

SEQ ID NO: 199650 - RNA, 19 nt, Artificial Sequence
  Description of Artificial Sequence: Synthetic oligonucleotide
  Sense strand starting at position 1424 of SEQ ID NO: 2573
cgcuucuuacuuuagaagu

SEQ ID NO: 199651 - RNA, 19 nt, Artificial Sequence
  Description of Artificial Sequence: Synthetic oligonucleotide
  Antisense strand to SEQ ID NO: 199650
acuucuaaaguaagaagcg

SEQ ID NO: 199652 - RNA, 19 nt, Artificial Sequence
  Description of Artificial Sequence: Synthetic oligonucleotide
  Sense strand starting at position 1502 of SEQ ID NO: 2573
guaagcuuccuggagaaca

SEQ ID NO: 199653 - RNA, 19 nt, Artificial Sequence
  Description of Artificial Sequence: Synthetic oligonucleotide
  Antisense strand to SEQ ID NO: 199652
uguucuccaggaagcuuac

SEQ ID NO: 199654 - RNA, 19 nt, Artificial Sequence
  Description of Artificial Sequence: Synthetic oligonucleotide
  Sense strand starting at position 1595 of SEQ ID NO: 2573
ggcggaucgaaugaaugaa

SEQ ID NO: 199655 - RNA, 19 nt, Artificial Sequence
  Description of Artificial Sequence: Synthetic oligonucleotide
  Antisense strand to SEQ ID NO: 199654
uucauucauucgauccgcc

SEQ ID NO: 199656 - RNA, 19 nt, Artificial Sequence
  Description of Artificial Sequence: Synthetic oligonucleotide
  Sense strand starting at position 2391 of SEQ ID NO: 2573
cgcgaguguguccuguauu

SEQ ID NO: 199657 - RNA, 19 nt, Artificial Sequence
  Description of Artificial Sequence: Synthetic oligonucleotide
  Antisense strand to SEQ ID NO: 199656
aauacaggacacacucgcg

SEQ ID NO: 199658 - RNA, 19 nt, Artificial Sequence
  Description of Artificial Sequence: Synthetic oligonucleotide
  Sense strand starting at position 2394 of SEQ ID NO: 2573
gaguguguccuguauuccu

SEQ ID NO: 199659 - RNA, 19 nt, Artificial Sequence
  Description of Artificial Sequence: Synthetic oligonucleotide
  Antisense strand to SEQ ID NO: 199658
aggaauacaggacacacuc

SEQ ID NO: 199660 - RNA, 19 nt, Artificial Sequence
  Description of Artificial Sequence: Synthetic oligonucleotide
  Sense strand starting at position 2413 of SEQ ID NO: 2573
uccgcaaacguuuaucaaa

SEQ ID NO: 199661 - RNA, 19 nt, Artificial Sequence
  Description of Artificial Sequence: Synthetic oligonucleotide
  Antisense strand to SEQ ID NO: 199660
uuugauaaacguuugcgga

SEQ ID NO: 199662 - RNA, 19 nt, Artificial Sequence
  Description of Artificial Sequence: Synthetic oligonucleotide
  Sense strand starting at position 2434 of SEQ ID NO: 2573
uggcaaagauacuuccgau

SEQ ID NO: 199663 - RNA, 19 nt, Artificial Sequence
  Description of Artificial Sequence: Synthetic oligonucleotide
  Antisense strand to SEQ ID NO: 199662
aucggaaguaucuuugcca

SEQ ID NO: 199664 - RNA, 19 nt, Artificial Sequence
  Description of Artificial Sequence: Synthetic oligonucleotide
  Sense strand starting at position 2446 of SEQ ID NO: 2573
uuccgauacacucgcagaa

SEQ ID NO: 199665 - RNA, 19 nt, Artificial Sequence
  Description of Artificial Sequence: Synthetic oligonucleotide
  Antisense strand to SEQ ID NO: 199664
uucugcgaguguaucggaa

SEQ ID NO: 199666 - RNA, 19 nt, Artificial Sequence
  Description of Artificial Sequence: Synthetic oligonucleotide
  Sense strand starting at position 2571 of SEQ ID NO: 2573
aaaguaagcucugcagucu

SEQ ID NO: 199667 - RNA, 19 nt, Artificial Sequence
  Description of Artificial Sequence: Synthetic oligonucleotide
  Antisense strand to SEQ ID NO: 199666
agacugcagagcuuacuuu

SEQ ID NO: 199668 - RNA, 19 nt, Artificial Sequence
  Description of Artificial Sequence: Synthetic oligonucleotide
  Sense strand starting at position 2572 of SEQ ID NO: 2573
aaguaagcucugcagucua

SEQ ID NO: 199669 - RNA, 19 nt, Artificial Sequence
  Description of Artificial Sequence: Synthetic oligonucleotide
  Antisense strand to SEQ ID NO: 199668
uagacugcagagcuuacuu

SEQ ID NO: 199670 - RNA, 19 nt, Artificial Sequence
  Description of Artificial Sequence: Synthetic oligonucleotide
  Sense strand starting at position 2848 of SEQ ID NO: 2573
gaaguugugguguagaaag

SEQ ID NO: 199671 - RNA, 19 nt, Artificial Sequence
  Description of Artificial Sequence: Synthetic oligonucleotide
  Antisense strand to SEQ ID NO: 199670
cuuucuacaccacaacuuc

SEQ ID NO: 199672 - RNA, 19 nt, Artificial Sequence
  Description of Artificial Sequence: Synthetic oligonucleotide
  Sense strand starting at position 2850 of SEQ ID NO: 2573
aguugugguguagaaaguu

SEQ ID NO: 199673 - RNA, 19 nt, Artificial Sequence
  Description of Artificial Sequence: Synthetic oligonucleotide
  Antisense strand to SEQ ID NO: 199672
aacuuucuacaccacaacu

SEQ ID NO: 199674 - RNA, 19 nt, Artificial Sequence
  Description of Artificial Sequence: Synthetic oligonucleotide
  Sense strand starting at position 2859 of SEQ ID NO: 2573
guagaaaguucguucucca

SEQ ID NO: 199675 - RNA, 19 nt, Artificial Sequence
  Description of Artificial Sequence: Synthetic oligonucleotide
  Antisense strand to SEQ ID NO: 199674
uggagaacgaacuuucuac

SEQ ID NO: 199676 - RNA, 19 nt, Artificial Sequence
  Description of Artificial Sequence: Synthetic oligonucleotide
  Sense strand starting at position 2862 of SEQ ID NO: 2573
gaaaguucguucuccaauc

SEQ ID NO: 199677 - RNA, 19 nt, Artificial Sequence
  Description of Artificial Sequence: Synthetic oligonucleotide
  Antisense strand to SEQ ID NO: 199676
gauuggagaacgaacuuuc

SEQ ID NO: 199678 - RNA, 19 nt, Artificial Sequence
  Description of Artificial Sequence: Synthetic oligonucleotide
  Sense strand starting at position 2898 of SEQ ID NO: 2573
uucuuaaaucuagggcguu

SEQ ID NO: 199679 - RNA, 19 nt, Artificial Sequence
  Description of Artificial Sequence: Synthetic oligonucleotide
  Antisense strand to SEQ ID NO: 199678
aacgcccuagauuuaagaa

SEQ ID NO: 199680 - RNA, 19 nt, Artificial Sequence
  Description of Artificial Sequence: Synthetic oligonucleotide
  Sense strand starting at position 2904 of SEQ ID NO: 2573
aaucuagggcguugagagu

SEQ ID NO: 199681 - RNA, 19 nt, Artificial Sequence
  Description of Artificial Sequence: Synthetic oligonucleotide
  Antisense strand to SEQ ID NO: 199680
acucucaacgcccuagauu

SEQ ID NO: 199682 - RNA, 19 nt, Artificial Sequence
  Description of Artificial Sequence: Synthetic oligonucleotide
  Sense strand starting at position 2987 of SEQ ID NO: 2573
acuagauguaagcagaguu

SEQ ID NO: 199683 - RNA, 19 nt, Artificial Sequence
  Description of Artificial Sequence: Synthetic oligonucleotide
  Antisense strand to SEQ ID NO: 199682
aacucugcuuacaucuagu

SEQ ID NO: 199684 - RNA, 19 nt, Artificial Sequence
  Description of Artificial Sequence: Synthetic oligonucleotide
  Sense strand starting at position 3090 of SEQ ID NO: 2573
agaaucauuuccugggcca

SEQ ID NO: 199685 - RNA, 19 nt, Artificial Sequence
  Description of Artificial Sequence: Synthetic oligonucleotide
  Antisense strand to SEQ ID NO: 199684
uggcccaggaaaugauucu

SEQ ID NO: 199686 - RNA, 19 nt, Artificial Sequence
  Description of Artificial Sequence: Synthetic oligonucleotide
  Sense strand starting at position 3339 of SEQ ID NO: 2573
gaucauccagccuagguaa

SEQ ID NO: 199687 - RNA, 19 nt, Artificial Sequence
  Description of Artificial Sequence: Synthetic oligonucleotide
  Antisense strand to SEQ ID NO: 199686
uuaccuaggcuggaugauc

SEQ ID NO: 199688 - RNA, 19 nt, Artificial Sequence
  Description of Artificial Sequence: Synthetic oligonucleotide
  Sense strand starting at position 3386 of SEQ ID NO: 2573
augucauuuccuggguggu

SEQ ID NO: 199689 - RNA, 19 nt, Artificial Sequence
  Description of Artificial Sequence: Synthetic oligonucleotide
  Antisense strand to SEQ ID NO: 199688
accacccaggaaaugacau

SEQ ID NO: 199690 - RNA, 19 nt, Artificial Sequence
  Description of Artificial Sequence: Synthetic oligonucleotide
  Sense strand starting at position 3446 of SEQ ID NO: 2573
uuguguaccuuccuaggga

SEQ ID NO: 199691 - RNA, 19 nt, Artificial Sequence
  Description of Artificial Sequence: Synthetic oligonucleotide
  Antisense strand to SEQ ID NO: 199690
ucccuaggaagguacacaa

SEQ ID NO: 199692 - RNA, 19 nt, Artificial Sequence
  Description of Artificial Sequence: Synthetic oligonucleotide
  Sense strand starting at position 3596 of SEQ ID NO: 2573
gucugucuccuggagcuua

SEQ ID NO: 199693 - RNA, 19 nt, Artificial Sequence
  Description of Artificial Sequence: Synthetic oligonucleotide
  Antisense strand to SEQ ID NO: 199692
uaagcuccaggagacagac

SEQ ID NO: 199694 - RNA, 19 nt, Artificial Sequence
  Description of Artificial Sequence: Synthetic oligonucleotide
  Sense strand starting at position 3663 of SEQ ID NO: 2573
aauuaagaugagugcuaag

SEQ ID NO: 199695 - RNA, 19 nt, Artificial Sequence
  Description of Artificial Sequence: Synthetic oligonucleotide
  Antisense strand to SEQ ID NO: 199694
cuuagcacucaucuuaauu

SEQ ID NO: 199696 - RNA, 19 nt, Artificial Sequence
  Description of Artificial Sequence: Synthetic oligonucleotide
  Sense strand starting at position 3768 of SEQ ID NO: 2573
acagaagacuuggauguga

SEQ ID NO: 199697 - RNA, 19 nt, Artificial Sequence
  Description of Artificial Sequence: Synthetic oligonucleotide
  Antisense strand to SEQ ID NO: 199696
ucacauccaagucuucugu

SEQ ID NO: 199698 - RNA, 19 nt, Artificial Sequence
  Description of Artificial Sequence: Synthetic oligonucleotide
  Sense strand starting at position 3788 of SEQ ID NO: 2573
aagccagcgcucugaagaa

SEQ ID NO: 199699 - RNA, 19 nt, Artificial Sequence
  Description of Artificial Sequence: Synthetic oligonucleotide
  Antisense strand to SEQ ID NO: 199698
uucuucagagcgcuggcuu

SEQ ID NO: 199700 - RNA, 19 nt, Artificial Sequence
  Description of Artificial Sequence: Synthetic oligonucleotide
  Sense strand starting at position 3896 of SEQ ID NO: 2573
ggcaaugaguguucucuac

SEQ ID NO: 199701 - RNA, 19 nt, Artificial Sequence
  Description of Artificial Sequence: Synthetic oligonucleotide
  Antisense strand to SEQ ID NO: 199700
guagagaacacucauugcc

SEQ ID NO: 199702 - RNA, 19 nt, Artificial Sequence
  Description of Artificial Sequence: Synthetic oligonucleotide
  Sense strand starting at position 3900 of SEQ ID NO: 2573
augaguguucucuacauua

SEQ ID NO: 199703 - RNA, 19 nt, Artificial Sequence
  Description of Artificial Sequence: Synthetic oligonucleotide
  Antisense strand to SEQ ID NO: 199702
uaauguagagaacacucau

SEQ ID NO: 199704 - RNA, 19 nt, Artificial Sequence
  Description of Artificial Sequence: Synthetic oligonucleotide
  Sense strand starting at position 3902 of SEQ ID NO: 2573
gaguguucucuacauuagg

SEQ ID NO: 199705 - RNA, 19 nt, Artificial Sequence
  Description of Artificial Sequence: Synthetic oligonucleotide
  Antisense strand to SEQ ID NO: 199704
ccuaauguagagaacacuc

SEQ ID NO: 199706 - RNA, 19 nt, Artificial Sequence
  Description of Artificial Sequence: Synthetic oligonucleotide
  Sense strand starting at position 61 of SEQ ID NO: 2574
cagguaauugcccagcuuu

SEQ ID NO: 199707 - RNA, 19 nt, Artificial Sequence
  Description of Artificial Sequence: Synthetic oligonucleotide
  Antisense strand to SEQ ID NO: 199706
aaagcugggcaauuaccug

SEQ ID NO: 199708 - RNA, 19 nt, Artificial Sequence
  Description of Artificial Sequence: Synthetic oligonucleotide
  Sense strand starting at position 164 of SEQ ID NO: 2574
aaugaaacggucugcaauc

SEQ ID NO: 199709 - RNA, 19 nt, Artificial Sequence
  Description of Artificial Sequence: Synthetic oligonucleotide
  Antisense strand to SEQ ID NO: 199708
gauugcagaccguuucauu

SEQ ID NO: 199710 - RNA, 19 nt, Artificial Sequence
  Description of Artificial Sequence: Synthetic oligonucleotide
  Sense strand starting at position 173 of SEQ ID NO: 2574
gucugcaaucuguugccau

SEQ ID NO: 199711 - RNA, 19 nt, Artificial Sequence
  Description of Artificial Sequence: Synthetic oligonucleotide
  Antisense strand to SEQ ID NO: 199710
auggcaacagauugcagac

SEQ ID NO: 199712 - RNA, 19 nt, Artificial Sequence
  Description of Artificial Sequence: Synthetic oligonucleotide
  Sense strand starting at position 253 of SEQ ID NO: 2574
gugacaauuucuuaagcaa

SEQ ID NO: 199713 - RNA, 19 nt, Artificial Sequence
  Description of Artificial Sequence: Synthetic oligonucleotide
  Antisense strand to SEQ ID NO: 199712
uugcuuaagaaauugucac

SEQ ID NO: 199714 - RNA, 19 nt, Artificial Sequence
  Description of Artificial Sequence: Synthetic oligonucleotide
  Sense strand starting at position 278 of SEQ ID NO: 2574
acucguuagucaccagaca

SEQ ID NO: 199715 - RNA, 19 nt, Artificial Sequence
  Description of Artificial Sequence: Synthetic oligonucleotide
  Antisense strand to SEQ ID NO: 199714
ugucuggugacuaacgagu

SEQ ID NO: 199716 - RNA, 19 nt, Artificial Sequence
  Description of Artificial Sequence: Synthetic oligonucleotide
  Sense strand starting at position 279 of SEQ ID NO: 2574
cucguuagucaccagacau

SEQ ID NO: 199717 - RNA, 19 nt, Artificial Sequence
  Description of Artificial Sequence: Synthetic oligonucleotide
  Antisense strand to SEQ ID NO: 199716
augucuggugacuaacgag

SEQ ID NO: 199718 - RNA, 19 nt, Artificial Sequence
  Description of Artificial Sequence: Synthetic oligonucleotide
  Sense strand starting at position 384 of SEQ ID NO: 2574
guuuguauaggccaacaaa

SEQ ID NO: 199719 - RNA, 19 nt, Artificial Sequence
  Description of Artificial Sequence: Synthetic oligonucleotide
  Antisense strand to SEQ ID NO: 199718
uuuguuggccuauacaaac

SEQ ID NO: 199720 - RNA, 19 nt, Artificial Sequence
  Description of Artificial Sequence: Synthetic oligonucleotide
  Sense strand starting at position 438 of SEQ ID NO: 2574
auaaucacuuguccaguaa

SEQ ID NO: 199721 - RNA, 19 nt, Artificial Sequence
  Description of Artificial Sequence: Synthetic oligonucleotide
  Antisense strand to SEQ ID NO: 199720
uuacuggacaagugauuau

SEQ ID NO: 199722 - RNA, 19 nt, Artificial Sequence
  Description of Artificial Sequence: Synthetic oligonucleotide
  Sense strand starting at position 912 of SEQ ID NO: 2574
uccagaaugcaauaugcaa

SEQ ID NO: 199723 - RNA, 19 nt, Artificial Sequence
  Description of Artificial Sequence: Synthetic oligonucleotide
  Antisense strand to SEQ ID NO: 199722
uugcauauugcauucugga

SEQ ID NO: 199724 - RNA, 19 nt, Artificial Sequence
  Description of Artificial Sequence: Synthetic oligonucleotide
  Sense strand starting at position 969 of SEQ ID NO: 2574
aauauuuagcuuuguggca

SEQ ID NO: 199725 - RNA, 19 nt, Artificial Sequence
  Description of Artificial Sequence: Synthetic oligonucleotide
  Antisense strand to SEQ ID NO: 199724
ugccacaaagcuaaauauu

SEQ ID NO: 199726 - RNA, 19 nt, Artificial Sequence
  Description of Artificial Sequence: Synthetic oligonucleotide
  Sense strand starting at position 970 of SEQ ID NO: 2574
auauuuagcuuuguggcau

SEQ ID NO: 199727 - RNA, 19 nt, Artificial Sequence
  Description of Artificial Sequence: Synthetic oligonucleotide
  Antisense strand to SEQ ID NO: 199726
augccacaaagcuaaauau

SEQ ID NO: 199728 - RNA, 19 nt, Artificial Sequence
  Description of Artificial Sequence: Synthetic oligonucleotide
  Sense strand starting at position 1085 of SEQ ID NO: 2574
acggucuugagacaguuaa

SEQ ID NO: 199729 - RNA, 19 nt, Artificial Sequence
  Description of Artificial Sequence: Synthetic oligonucleotide
  Antisense strand to SEQ ID NO: 199728
uuaacugucucaagaccgu

SEQ ID NO: 199730 - RNA, 19 nt, Artificial Sequence
  Description of Artificial Sequence: Synthetic oligonucleotide
  Sense strand starting at position 1095 of SEQ ID NO: 2574
gacaguuaaagauguuggu

SEQ ID NO: 199731 - RNA, 19 nt, Artificial Sequence
  Description of Artificial Sequence: Synthetic oligonucleotide
  Antisense strand to SEQ ID NO: 199730
accaacaucuuuaacuguc

SEQ ID NO: 199732 - RNA, 19 nt, Artificial Sequence
  Description of Artificial Sequence: Synthetic oligonucleotide
  Sense strand starting at position 1099 of SEQ ID NO: 2574
guuaaagauguugguauag

SEQ ID NO: 199733 - RNA, 19 nt, Artificial Sequence
  Description of Artificial Sequence: Synthetic oligonucleotide
  Antisense strand to SEQ ID NO: 199732
cuauaccaacaucuuuaac

SEQ ID NO: 199734 - RNA, 19 nt, Artificial Sequence
  Description of Artificial Sequence: Synthetic oligonucleotide
  Sense strand starting at position 1115 of SEQ ID NO: 2574
uagguaaugucuccuuaga

SEQ ID NO: 199735 - RNA, 19 nt, Artificial Sequence
  Description of Artificial Sequence: Synthetic oligonucleotide
  Antisense strand to SEQ ID NO: 199734
ucuaaggagacauuaccua

SEQ ID NO: 199736 - RNA, 19 nt, Artificial Sequence
  Description of Artificial Sequence: Synthetic oligonucleotide
  Sense strand starting at position 1117 of SEQ ID NO: 2574
gguaaugucuccuuagacc

SEQ ID NO: 199737 - RNA, 19 nt, Artificial Sequence
  Description of Artificial Sequence: Synthetic oligonucleotide
  Antisense strand to SEQ ID NO: 199736
ggucuaaggagacauuacc

SEQ ID NO: 199738 - RNA, 19 nt, Artificial Sequence
  Description of Artificial Sequence: Synthetic oligonucleotide
  Sense strand starting at position 1140 of SEQ ID NO: 2574
acacgaacgcuauacacau

SEQ ID NO: 199739 - RNA, 19 nt, Artificial Sequence
  Description of Artificial Sequence: Synthetic oligonucleotide
  Antisense strand to SEQ ID NO: 199738
auguguauagcguucgugu

SEQ ID NO: 199740 - RNA, 19 nt, Artificial Sequence
  Description of Artificial Sequence: Synthetic oligonucleotide
  Sense strand starting at position 1495 of SEQ ID NO: 2574
guuugccaaucccuggaua

SEQ ID NO: 199741 - RNA, 19 nt, Artificial Sequence
  Description of Artificial Sequence: Synthetic oligonucleotide
  Antisense strand to SEQ ID NO: 199740
uauccagggauuggcaaac

SEQ ID NO: 199742 - RNA, 19 nt, Artificial Sequence
  Description of Artificial Sequence: Synthetic oligonucleotide
  Sense strand starting at position 1496 of SEQ ID NO: 2574
uuugccaaucccuggauaa

SEQ ID NO: 199743 - RNA, 19 nt, Artificial Sequence
  Description of Artificial Sequence: Synthetic oligonucleotide
  Antisense strand to SEQ ID NO: 199742
uuauccagggauuggcaaa

SEQ ID NO: 199744 - RNA, 19 nt, Artificial Sequence
  Description of Artificial Sequence: Synthetic oligonucleotide
  Sense strand starting at position 1497 of SEQ ID NO: 2574
uugccaaucccuggauaag

SEQ ID NO: 199745 - RNA, 19 nt, Artificial Sequence
  Description of Artificial Sequence: Synthetic oligonucleotide
  Antisense strand to SEQ ID NO: 199744
cuuauccagggauuggcaa

SEQ ID NO: 199746 - RNA, 19 nt, Artificial Sequence
  Description of Artificial Sequence: Synthetic oligonucleotide
  Sense strand starting at position 1523 of SEQ ID NO: 2574
ugguaauacagucaguguu

SEQ ID NO: 199747 - RNA, 19 nt, Artificial Sequence
  Description of Artificial Sequence: Synthetic oligonucleotide
  Antisense strand to SEQ ID NO: 199746
aacacugacuguauuacca

SEQ ID NO: 199748 - RNA, 19 nt, Artificial Sequence
  Description of Artificial Sequence: Synthetic oligonucleotide
  Sense strand starting at position 1563 of SEQ ID NO: 2574
guuugugaauuggcuuaaa

SEQ ID NO: 199749 - RNA, 19 nt, Artificial Sequence
  Description of Artificial Sequence: Synthetic oligonucleotide
  Antisense strand to SEQ ID NO: 199748
uuuaagccaauucacaaac

SEQ ID NO: 199750 - RNA, 19 nt, Artificial Sequence
  Description of Artificial Sequence: Synthetic oligonucleotide
  Sense strand starting at position 1566 of SEQ ID NO: 2574
ugugaauuggcuuaaaggu

SEQ ID NO: 199751 - RNA, 19 nt, Artificial Sequence
  Description of Artificial Sequence: Synthetic oligonucleotide
  Antisense strand to SEQ ID NO: 199750
accuuuaagccaauucaca

SEQ ID NO: 199752 - RNA, 19 nt, Artificial Sequence
  Description of Artificial Sequence: Synthetic oligonucleotide
  Sense strand starting at position 2300 of SEQ ID NO: 2574
uucgaauuccgguggauuu

SEQ ID NO: 199753 - RNA, 19 nt, Artificial Sequence
  Description of Artificial Sequence: Synthetic oligonucleotide
  Antisense strand to SEQ ID NO: 199752
aaauccaccggaauucgaa

SEQ ID NO: 199754 - RNA, 19 nt, Artificial Sequence
  Description of Artificial Sequence: Synthetic oligonucleotide
  Sense strand starting at position 2301 of SEQ ID NO: 2574
ucgaauuccgguggauuua

SEQ ID NO: 199755 - RNA, 19 nt, Artificial Sequence
  Description of Artificial Sequence: Synthetic oligonucleotide
  Antisense strand to SEQ ID NO: 199754
uaaauccaccggaauucga

SEQ ID NO: 199756 - RNA, 19 nt, Artificial Sequence
  Description of Artificial Sequence: Synthetic oligonucleotide
  Sense strand starting at position 2316 of SEQ ID NO: 2574
uuuaaaucgcgggaggaga

SEQ ID NO: 199757 - RNA, 19 nt, Artificial Sequence
  Description of Artificial Sequence: Synthetic oligonucleotide
  Antisense strand to SEQ ID NO: 199756
ucuccucccgcgauuuaaa

SEQ ID NO: 199758 - RNA, 19 nt, Artificial Sequence
  Description of Artificial Sequence: Synthetic oligonucleotide
  Sense strand starting at position 2635 of SEQ ID NO: 2574
uaucccuccgaaugauagu

SEQ ID NO: 199759 - RNA, 19 nt, Artificial Sequence
  Description of Artificial Sequence: Synthetic oligonucleotide
  Antisense strand to SEQ ID NO: 199758
acuaucauucggagggaua

SEQ ID NO: 199760 - RNA, 19 nt, Artificial Sequence
  Description of Artificial Sequence: Synthetic oligonucleotide
  Sense strand starting at position 2641 of SEQ ID NO: 2574
uccgaaugauaguugaaag

SEQ ID NO: 199761 - RNA, 19 nt, Artificial Sequence
  Description of Artificial Sequence: Synthetic oligonucleotide
  Antisense strand to SEQ ID NO: 199760
cuuucaacuaucauucgga

SEQ ID NO: 199762 - RNA, 19 nt, Artificial Sequence
  Description of Artificial Sequence: Synthetic oligonucleotide
  Sense strand starting at position 3358 of SEQ ID NO: 2574
uggugauguacccagucau

SEQ ID NO: 199763 - RNA, 19 nt, Artificial Sequence
  Description of Artificial Sequence: Synthetic oligonucleotide
  Antisense strand to SEQ ID NO: 199762
augacuggguacaucacca

SEQ ID NO: 199764 - RNA, 19 nt, Artificial Sequence
  Description of Artificial Sequence: Synthetic oligonucleotide
  Sense strand starting at position 3413 of SEQ ID NO: 2574
uuagguaaauuagcugaaa

SEQ ID NO: 199765 - RNA, 19 nt, Artificial Sequence
  Description of Artificial Sequence: Synthetic oligonucleotide
  Antisense strand to SEQ ID NO: 199764
uuucagcuaauuuaccuaa

SEQ ID NO: 199766 - RNA, 19 nt, Artificial Sequence
  Description of Artificial Sequence: Synthetic oligonucleotide
  Sense strand starting at position 3424 of SEQ ID NO: 2574
agcugaaacugagcuuuaa

SEQ ID NO: 199767 - RNA, 19 nt, Artificial Sequence
  Description of Artificial Sequence: Synthetic oligonucleotide
  Antisense strand to SEQ ID NO: 199766
uuaaagcucaguuucagcu

SEQ ID NO: 199768 - RNA, 19 nt, Artificial Sequence
  Description of Artificial Sequence: Synthetic oligonucleotide
  Sense strand starting at position 3483 of SEQ ID NO: 2574
ucuaaacauuguuuacagu

SEQ ID NO: 199769 - RNA, 19 nt, Artificial Sequence
  Description of Artificial Sequence: Synthetic oligonucleotide
  Antisense strand to SEQ ID NO: 199768
acuguaaacaauguuuaga

SEQ ID NO: 199770 - RNA, 19 nt, Artificial Sequence
  Description of Artificial Sequence: Synthetic oligonucleotide
  Sense strand starting at position 3549 of SEQ ID NO: 2574
uguaauuaugcauguagga

SEQ ID NO: 199771 - RNA, 19 nt, Artificial Sequence
  Description of Artificial Sequence: Synthetic oligonucleotide
  Antisense strand to SEQ ID NO: 199770
uccuacaugcauaauuaca

SEQ ID NO: 199772 - RNA, 19 nt, Artificial Sequence
  Description of Artificial Sequence: Synthetic oligonucleotide
  Sense strand starting at position 3595 of SEQ ID NO: 2574
cuacucuuaugacugaguu

SEQ ID NO: 199773 - RNA, 19 nt, Artificial Sequence
  Description of Artificial Sequence: Synthetic oligonucleotide
  Antisense strand to SEQ ID NO: 199772
aacucagucauaagaguag

SEQ ID NO: 199774 - RNA, 19 nt, Artificial Sequence
  Description of Artificial Sequence: Synthetic oligonucleotide
  Sense strand starting at position 3599 of SEQ ID NO: 2574
ucuuaugacugaguugaau

SEQ ID NO: 199775 - RNA, 19 nt, Artificial Sequence
  Description of Artificial Sequence: Synthetic oligonucleotide
  Antisense strand to SEQ ID NO: 199774
auucaacucagucauaaga

SEQ ID NO: 199776 - RNA, 19 nt, Artificial Sequence
  Description of Artificial Sequence: Synthetic oligonucleotide
  Sense strand starting at position 3610 of SEQ ID NO: 2574
aguugaauauuugagacuu

SEQ ID NO: 199777 - RNA, 19 nt, Artificial Sequence
  Description of Artificial Sequence: Synthetic oligonucleotide
  Antisense strand to SEQ ID NO: 199776
aagucucaaauauucaacu

SEQ ID NO: 199778 - RNA, 19 nt, Artificial Sequence
  Description of Artificial Sequence: Synthetic oligonucleotide
  Sense strand starting at position 3740 of SEQ ID NO: 2574
cuagaaguccagcaaguuu

SEQ ID NO: 199779 - RNA, 19 nt, Artificial Sequence
  Description of Artificial Sequence: Synthetic oligonucleotide
  Antisense strand to SEQ ID NO: 199778
aaacuugcuggacuucuag

SEQ ID NO: 199780 - RNA, 19 nt, Artificial Sequence
  Description of Artificial Sequence: Synthetic oligonucleotide
  Sense strand starting at position 3751 of SEQ ID NO: 2574
gcaaguuuaugauuaaguc

SEQ ID NO: 199781 - RNA, 19 nt, Artificial Sequence
  Description of Artificial Sequence: Synthetic oligonucleotide
  Antisense strand to SEQ ID NO: 199780
gacuuaaucauaaacuugc

SEQ ID NO: 199782 - RNA, 19 nt, Artificial Sequence
  Description of Artificial Sequence: Synthetic oligonucleotide
  Sense strand starting at position 3755 of SEQ ID NO: 2574
guuuaugauuaagucacaa

SEQ ID NO: 199783 - RNA, 19 nt, Artificial Sequence
  Description of Artificial Sequence: Synthetic oligonucleotide
  Antisense strand to SEQ ID NO: 199782
uugugacuuaaucauaaac

SEQ ID NO: 199784 - RNA, 19 nt, Artificial Sequence
  Description of Artificial Sequence: Synthetic oligonucleotide
  Sense strand starting at position 3826 of SEQ ID NO: 2574
guuuaauaggauugacuca

SEQ ID NO: 199785 - RNA, 19 nt, Artificial Sequence
  Description of Artificial Sequence: Synthetic oligonucleotide
  Antisense strand to SEQ ID NO: 199784
ugagucaauccuauuaaac

SEQ ID NO: 199786 - RNA, 19 nt, Artificial Sequence
  Description of Artificial Sequence: Synthetic oligonucleotide
  Sense strand starting at position 8 of SEQ ID NO: 2575
gcugcuaaucuagaucaug

SEQ ID NO: 199787 - RNA, 19 nt, Artificial Sequence
  Description of Artificial Sequence: Synthetic oligonucleotide
  Antisense strand to SEQ ID NO: 199786
caugaucuagauuagcagc

SEQ ID NO: 199788 - RNA, 19 nt, Artificial Sequence
  Description of Artificial Sequence: Synthetic oligonucleotide
  Sense strand starting at position 30 of SEQ ID NO: 2575
uccuauugcaucugggaag

SEQ ID NO: 199789 - RNA, 19 nt, Artificial Sequence
  Description of Artificial Sequence: Synthetic oligonucleotide
  Antisense strand to SEQ ID NO: 199788
cuucccagaugcaauagga

SEQ ID NO: 199790 - RNA, 19 nt, Artificial Sequence
  Description of Artificial Sequence: Synthetic oligonucleotide
  Sense strand starting at position 105 of SEQ ID NO: 2575
caauguggcugacuuacaa

SEQ ID NO: 199791 - RNA, 19 nt, Artificial Sequence
  Description of Artificial Sequence: Synthetic oligonucleotide
  Antisense strand to SEQ ID NO: 199790
uuguaagucagccacauug

SEQ ID NO: 199792 - RNA, 19 nt, Artificial Sequence
  Description of Artificial Sequence: Synthetic oligonucleotide
  Sense strand starting at position 139 of SEQ ID NO: 2575
cagugcuuugaucagauua

SEQ ID NO: 199793 - RNA, 19 nt, Artificial Sequence
  Description of Artificial Sequence: Synthetic oligonucleotide
  Antisense strand to SEQ ID NO: 199792
uaaucugaucaaagcacug

SEQ ID NO: 199794 - RNA, 19 nt, Artificial Sequence
  Description of Artificial Sequence: Synthetic oligonucleotide
  Sense strand starting at position 157 of SEQ ID NO: 2575
acaacaguucugggauguu

SEQ ID NO: 199795 - RNA, 19 nt, Artificial Sequence
  Description of Artificial Sequence: Synthetic oligonucleotide
  Antisense strand to SEQ ID NO: 199794
aacaucccagaacuguugu

SEQ ID NO: 199796 - RNA, 19 nt, Artificial Sequence
  Description of Artificial Sequence: Synthetic oligonucleotide
  Sense strand starting at position 415 of SEQ ID NO: 2575
agaaauacgucagccacau

SEQ ID NO: 199797 - RNA, 19 nt, Artificial Sequence
  Description of Artificial Sequence: Synthetic oligonucleotide
  Antisense strand to SEQ ID NO: 199796
auguggcugacguauuucu

SEQ ID NO: 199798 - RNA, 19 nt, Artificial Sequence
  Description of Artificial Sequence: Synthetic oligonucleotide
  Sense strand starting at position 458 of SEQ ID NO: 2575
agccaauucugggcagaga

SEQ ID NO: 199799 - RNA, 19 nt, Artificial Sequence
  Description of Artificial Sequence: Synthetic oligonucleotide
  Antisense strand to SEQ ID NO: 199798
ucucugcccagaauuggcu

SEQ ID NO: 199800 - RNA, 19 nt, Artificial Sequence
  Description of Artificial Sequence: Synthetic oligonucleotide
  Sense strand starting at position 479 of SEQ ID NO: 2575
ggcaguggcauagagaauu

SEQ ID NO: 199801 - RNA, 19 nt, Artificial Sequence
  Description of Artificial Sequence: Synthetic oligonucleotide
  Antisense strand to SEQ ID NO: 199800
aauucucuaugccacugcc

SEQ ID NO: 199802 - RNA, 19 nt, Artificial Sequence
  Description of Artificial Sequence: Synthetic oligonucleotide
  Sense strand starting at position 563 of SEQ ID NO: 2575
ugacuucuccauuauguuu

SEQ ID NO: 199803 - RNA, 19 nt, Artificial Sequence
  Description of Artificial Sequence: Synthetic oligonucleotide
  Antisense strand to SEQ ID NO: 199802
aaacauaauggagaaguca

SEQ ID NO: 199804 - RNA, 19 nt, Artificial Sequence
  Description of Artificial Sequence: Synthetic oligonucleotide
  Sense strand starting at position 586 of SEQ ID NO: 2575
ugaggcuaauguuuaaauu

SEQ ID NO: 199805 - RNA, 19 nt, Artificial Sequence
  Description of Artificial Sequence: Synthetic oligonucleotide
  Antisense strand to SEQ ID NO: 199804
aauuuaaacauuagccuca

SEQ ID NO: 199806 - RNA, 19 nt, Artificial Sequence
  Description of Artificial Sequence: Synthetic oligonucleotide
  Sense strand starting at position 587 of SEQ ID NO: 2575
gaggcuaauguuuaaauug

SEQ ID NO: 199807 - RNA, 19 nt, Artificial Sequence
  Description of Artificial Sequence: Synthetic oligonucleotide
  Antisense strand to SEQ ID NO: 199806
caauuuaaacauuagccuc

SEQ ID NO: 199808 - RNA, 19 nt, Artificial Sequence
  Description of Artificial Sequence: Synthetic oligonucleotide
  Sense strand starting at position 607 of SEQ ID NO: 2575
cuggcaugucuugaauauc

SEQ ID NO: 199809 - RNA, 19 nt, Artificial Sequence
  Description of Artificial Sequence: Synthetic oligonucleotide
  Antisense strand to SEQ ID NO: 199808
gauauucaagacaugccag

SEQ ID NO: 199810 - RNA, 19 nt, Artificial Sequence
  Description of Artificial Sequence: Synthetic oligonucleotide
  Sense strand starting at position 610 of SEQ ID NO: 2575
gcaugucuugaauaucuca

SEQ ID NO: 199811 - RNA, 19 nt, Artificial Sequence
  Description of Artificial Sequence: Synthetic oligonucleotide
  Antisense strand to SEQ ID NO: 199810
ugagauauucaagacaugc

SEQ ID NO: 199812 - RNA, 19 nt, Artificial Sequence
  Description of Artificial Sequence: Synthetic oligonucleotide
  Sense strand starting at position 645 of SEQ ID NO: 2575
gggagugacaagugucaag

SEQ ID NO: 199813 - RNA, 19 nt, Artificial Sequence
  Description of Artificial Sequence: Synthetic oligonucleotide
  Antisense strand to SEQ ID NO: 199812
cuugacacuugucacuccc

SEQ ID NO: 199814 - RNA, 19 nt, Artificial Sequence
  Description of Artificial Sequence: Synthetic oligonucleotide
  Sense strand starting at position 714 of SEQ ID NO: 2575
ugacaacauuacgcaaaua

SEQ ID NO: 199815 - RNA, 19 nt, Artificial Sequence
  Description of Artificial Sequence: Synthetic oligonucleotide
  Antisense strand to SEQ ID NO: 199814
uauuugcguaauguuguca

SEQ ID NO: 199816 - RNA, 19 nt, Artificial Sequence
  Description of Artificial Sequence: Synthetic oligonucleotide
  Sense strand starting at position 769 of SEQ ID NO: 2575
guaauuccgugacucuaag

SEQ ID NO: 199817 - RNA, 19 nt, Artificial Sequence
  Description of Artificial Sequence: Synthetic oligonucleotide
  Antisense strand to SEQ ID NO: 199816
cuuagagucacggaauuac

SEQ ID NO: 199818 - RNA, 19 nt, Artificial Sequence
  Description of Artificial Sequence: Synthetic oligonucleotide
  Sense strand starting at position 1100 of SEQ ID NO: 2575
gucaguauuuccucacccu

SEQ ID NO: 199819 - RNA, 19 nt, Artificial Sequence
  Description of Artificial Sequence: Synthetic oligonucleotide
  Antisense strand to SEQ ID NO: 199818
agggugaggaaauacugac

SEQ ID NO: 199820 - RNA, 19 nt, Artificial Sequence
  Description of Artificial Sequence: Synthetic oligonucleotide
  Sense strand starting at position 1257 of SEQ ID NO: 2575
guagaagagaguuggcauc

SEQ ID NO: 199821 - RNA, 19 nt, Artificial Sequence
  Description of Artificial Sequence: Synthetic oligonucleotide
  Antisense strand to SEQ ID NO: 199820
gaugccaacucucuucuac

SEQ ID NO: 199822 - RNA, 19 nt, Artificial Sequence
  Description of Artificial Sequence: Synthetic oligonucleotide
  Sense strand starting at position 1430 of SEQ ID NO: 2575
gaugccuuacuuggacaga

SEQ ID NO: 199823 - RNA, 19 nt, Artificial Sequence
  Description of Artificial Sequence: Synthetic oligonucleotide
  Antisense strand to SEQ ID NO: 199822
ucuguccaaguaaggcauc

SEQ ID NO: 199824 - RNA, 19 nt, Artificial Sequence
  Description of Artificial Sequence: Synthetic oligonucleotide
  Sense strand starting at position 1492 of SEQ ID NO: 2575
gaaagaaaucugugagcuu

SEQ ID NO: 199825 - RNA, 19 nt, Artificial Sequence
  Description of Artificial Sequence: Synthetic oligonucleotide
  Antisense strand to SEQ ID NO: 199824
aagcucacagauuucuuuc

SEQ ID NO: 199826 - RNA, 19 nt, Artificial Sequence
  Description of Artificial Sequence: Synthetic oligonucleotide
  Sense strand starting at position 2041 of SEQ ID NO: 2575
cugcaagagcgccaggauu

SEQ ID NO: 199827 - RNA, 19 nt, Artificial Sequence
  Description of Artificial Sequence: Synthetic oligonucleotide
  Antisense strand to SEQ ID NO: 199826
aauccuggcgcucuugcag

SEQ ID NO: 199828 - RNA, 19 nt, Artificial Sequence
  Description of Artificial Sequence: Synthetic oligonucleotide
  Sense strand starting at position 2118 of SEQ ID NO: 2575
cucuuugagccuugaagag

SEQ ID NO: 199829 - RNA, 19 nt, Artificial Sequence
  Description of Artificial Sequence: Synthetic oligonucleotide
  Antisense strand to SEQ ID NO: 199828
cucuucaaggcucaaagag

SEQ ID NO: 199830 - RNA, 19 nt, Artificial Sequence
  Description of Artificial Sequence: Synthetic oligonucleotide
  Sense strand starting at position 2340 of SEQ ID NO: 2575
cugcuucuccuggacugaa

SEQ ID NO: 199831 - RNA, 19 nt, Artificial Sequence
  Description of Artificial Sequence: Synthetic oligonucleotide
  Antisense strand to SEQ ID NO: 199830
uucaguccaggagaagcag

SEQ ID NO: 199832 - RNA, 19 nt, Artificial Sequence
  Description of Artificial Sequence: Synthetic oligonucleotide
  Sense strand starting at position 2591 of SEQ ID NO: 2575
ccagcaggaguccaaguau

SEQ ID NO: 199833 - RNA, 19 nt, Artificial Sequence
  Description of Artificial Sequence: Synthetic oligonucleotide
  Antisense strand to SEQ ID NO: 199832
auacuuggacuccugcugg

SEQ ID NO: 199834 - RNA, 19 nt, Artificial Sequence
  Description of Artificial Sequence: Synthetic oligonucleotide
  Sense strand starting at position 2728 of SEQ ID NO: 2575
cuagguuuccuccaguggu

SEQ ID NO: 199835 - RNA, 19 nt, Artificial Sequence
  Description of Artificial Sequence: Synthetic oligonucleotide
  Antisense strand to SEQ ID NO: 199834
accacuggaggaaaccuag

SEQ ID NO: 199836 - RNA, 19 nt, Artificial Sequence
  Description of Artificial Sequence: Synthetic oligonucleotide
  Sense strand starting at position 2787 of SEQ ID NO: 2575
cgucauguuccucauagac

SEQ ID NO: 199837 - RNA, 19 nt, Artificial Sequence
  Description of Artificial Sequence: Synthetic oligonucleotide
  Antisense strand to SEQ ID NO: 199836
gucuaugaggaacaugacg

SEQ ID NO: 199838 - RNA, 19 nt, Artificial Sequence
  Description of Artificial Sequence: Synthetic oligonucleotide
  Sense strand starting at position 2983 of SEQ ID NO: 2575
gcacuaugaugagcugagu

SEQ ID NO: 199839 - RNA, 19 nt, Artificial Sequence
  Description of Artificial Sequence: Synthetic oligonucleotide
  Antisense strand to SEQ ID NO: 199838
acucagcucaucauagugc

SEQ ID NO: 199840 - RNA, 19 nt, Artificial Sequence
  Description of Artificial Sequence: Synthetic oligonucleotide
  Sense strand starting at position 2989 of SEQ ID NO: 2575
ugaugagcugagugaaugu

SEQ ID NO: 199841 - RNA, 19 nt, Artificial Sequence
  Description of Artificial Sequence: Synthetic oligonucleotide
  Antisense strand to SEQ ID NO: 199840
acauucacucagcucauca

SEQ ID NO: 199842 - RNA, 19 nt, Artificial Sequence
  Description of Artificial Sequence: Synthetic oligonucleotide
  Sense strand starting at position 3085 of SEQ ID NO: 2575
gcaauugugguaggauaga

SEQ ID NO: 199843 - RNA, 19 nt, Artificial Sequence
  Description of Artificial Sequence: Synthetic oligonucleotide
  Antisense strand to SEQ ID NO: 199842
ucuauccuaccacaauugc

SEQ ID NO: 199844 - RNA, 19 nt, Artificial Sequence
  Description of Artificial Sequence: Synthetic oligonucleotide
  Sense strand starting at position 3108 of SEQ ID NO: 2575
gcgacaaccagguagguau

SEQ ID NO: 199845 - RNA, 19 nt, Artificial Sequence
  Description of Artificial Sequence: Synthetic oligonucleotide
  Antisense strand to SEQ ID NO: 199844
auaccuaccugguugucgc

SEQ ID NO: 199846 - RNA, 19 nt, Artificial Sequence
  Description of Artificial Sequence: Synthetic oligonucleotide
  Sense strand starting at position 3318 of SEQ ID NO: 2575
aggaucaauucugaaacag

SEQ ID NO: 199847 - RNA, 19 nt, Artificial Sequence
  Description of Artificial Sequence: Synthetic oligonucleotide
  Antisense strand to SEQ ID NO: 199846
cuguuucagaauugauccu

SEQ ID NO: 199848 - RNA, 19 nt, Artificial Sequence
  Description of Artificial Sequence: Synthetic oligonucleotide
  Sense strand starting at position 3436 of SEQ ID NO: 2575
ugucauuagccaugaacuc

SEQ ID NO: 199849 - RNA, 19 nt, Artificial Sequence
  Description of Artificial Sequence: Synthetic oligonucleotide
  Antisense strand to SEQ ID NO: 199848
gaguucauggcuaaugaca

SEQ ID NO: 199850 - RNA, 19 nt, Artificial Sequence
  Description of Artificial Sequence: Synthetic oligonucleotide
  Sense strand starting at position 3486 of SEQ ID NO: 2575
guugcucauccacagcaua

SEQ ID NO: 199851 - RNA, 19 nt, Artificial Sequence
  Description of Artificial Sequence: Synthetic oligonucleotide
  Antisense strand to SEQ ID NO: 199850
uaugcuguggaugagcaac

SEQ ID NO: 199852 - RNA, 19 nt, Artificial Sequence
  Description of Artificial Sequence: Synthetic oligonucleotide
  Sense strand starting at position 3522 of SEQ ID NO: 2575
ggauauuacagaggucuca

SEQ ID NO: 199853 - RNA, 19 nt, Artificial Sequence
  Description of Artificial Sequence: Synthetic oligonucleotide
  Antisense strand to SEQ ID NO: 199852
ugagaccucuguaauaucc

SEQ ID NO: 199854 - RNA, 19 nt, Artificial Sequence
  Description of Artificial Sequence: Synthetic oligonucleotide
  Sense strand starting at position 3539 of SEQ ID NO: 2575
caacucaaggcuggucaua

SEQ ID NO: 199855 - RNA, 19 nt, Artificial Sequence
  Description of Artificial Sequence: Synthetic oligonucleotide
  Antisense strand to SEQ ID NO: 199854
uaugaccagccuugaguug

SEQ ID NO: 199856 - RNA, 19 nt, Artificial Sequence
  Description of Artificial Sequence: Synthetic oligonucleotide
  Sense strand starting at position 3631 of SEQ ID NO: 2575
ugaauuauucuauguggac

SEQ ID NO: 199857 - RNA, 19 nt, Artificial Sequence
  Description of Artificial Sequence: Synthetic oligonucleotide
  Antisense strand to SEQ ID NO: 199856
guccacauagaauaauuca

SEQ ID NO: 199858 - RNA, 19 nt, Artificial Sequence
  Description of Artificial Sequence: Synthetic oligonucleotide
  Sense strand starting at position 3632 of SEQ ID NO: 2575
gaauuauucuauguggacu

SEQ ID NO: 199859 - RNA, 19 nt, Artificial Sequence
  Description of Artificial Sequence: Synthetic oligonucleotide
  Antisense strand to SEQ ID NO: 199858
aguccacauagaauaauuc

SEQ ID NO: 199860 - RNA, 19 nt, Artificial Sequence
  Description of Artificial Sequence: Synthetic oligonucleotide
  Sense strand starting at position 3764 of SEQ ID NO: 2575
ggugucgagcuuuaauuua

SEQ ID NO: 199861 - RNA, 19 nt, Artificial Sequence
  Description of Artificial Sequence: Synthetic oligonucleotide
  Antisense strand to SEQ ID NO: 199860
uaaauuaaagcucgacacc

SEQ ID NO: 199862 - RNA, 19 nt, Artificial Sequence
  Description of Artificial Sequence: Synthetic oligonucleotide
  Sense strand starting at position 3803 of SEQ ID NO: 2575
cucuguuacgugcagauga

SEQ ID NO: 199863 - RNA, 19 nt, Artificial Sequence
  Description of Artificial Sequence: Synthetic oligonucleotide
  Antisense strand to SEQ ID NO: 199862
ucaucugcacguaacagag

SEQ ID NO: 199864 - RNA, 19 nt, Artificial Sequence
  Description of Artificial Sequence: Synthetic oligonucleotide
  Sense strand starting at position 3805 of SEQ ID NO: 2575
cuguuacgugcagaugaaa

SEQ ID NO: 199865 - RNA, 19 nt, Artificial Sequence
  Description of Artificial Sequence: Synthetic oligonucleotide
  Antisense strand to SEQ ID NO: 199864
uuucaucugcacguaacag

SEQ ID NO: 199866 - RNA, 19 nt, Artificial Sequence
  Description of Artificial Sequence: Synthetic oligonucleotide
  Sense strand starting at position 101 of SEQ ID NO: 2576
auggcugugcgaugugaga

SEQ ID NO: 199867 - RNA, 19 nt, Artificial Sequence
  Description of Artificial Sequence: Synthetic oligonucleotide
  Antisense strand to SEQ ID NO: 199866
ucucacaucgcacagccau

SEQ ID NO: 199868 - RNA, 19 nt, Artificial Sequence
  Description of Artificial Sequence: Synthetic oligonucleotide
  Sense strand starting at position 103 of SEQ ID NO: 2576
ggcugugcgaugugagaca

SEQ ID NO: 199869 - RNA, 19 nt, Artificial Sequence
  Description of Artificial Sequence: Synthetic oligonucleotide
  Antisense strand to SEQ ID NO: 199868
ugucucacaucgcacagcc

SEQ ID NO: 199870 - RNA, 19 nt, Artificial Sequence
  Description of Artificial Sequence: Synthetic oligonucleotide
  Sense strand starting at position 500 of SEQ ID NO: 2576
uggccuuugugguccagau

SEQ ID NO: 199871 - RNA, 19 nt, Artificial Sequence
  Description of Artificial Sequence: Synthetic oligonucleotide
  Antisense strand to SEQ ID NO: 199870
aucuggaccacaaaggcca

SEQ ID NO: 199872 - RNA, 19 nt, Artificial Sequence
  Description of Artificial Sequence: Synthetic oligonucleotide
  Sense strand starting at position 502 of SEQ ID NO: 2576
gccuuugugguccagauuc

SEQ ID NO: 199873 - RNA, 19 nt, Artificial Sequence
  Description of Artificial Sequence: Synthetic oligonucleotide
  Antisense strand to SEQ ID NO: 199872
gaaucuggaccacaaaggc

SEQ ID NO: 199874 - RNA, 19 nt, Artificial Sequence
  Description of Artificial Sequence: Synthetic oligonucleotide
  Sense strand starting at position 512 of SEQ ID NO: 2576
uccagauuccguggugucu

SEQ ID NO: 199875 - RNA, 19 nt, Artificial Sequence
  Description of Artificial Sequence: Synthetic oligonucleotide
  Antisense strand to SEQ ID NO: 199874
agacaccacggaaucugga

SEQ ID NO: 199876 - RNA, 19 nt, Artificial Sequence
  Description of Artificial Sequence: Synthetic oligonucleotide
  Sense strand starting at position 701 of SEQ ID NO: 2576
acaccuguccugggaacuu

SEQ ID NO: 199877 - RNA, 19 nt, Artificial Sequence
  Description of Artificial Sequence: Synthetic oligonucleotide
  Antisense strand to SEQ ID NO: 199876
aaguucccaggacaggugu

SEQ ID NO: 199878 - RNA, 19 nt, Artificial Sequence
  Description of Artificial Sequence: Synthetic oligonucleotide
  Sense strand starting at position 710 of SEQ ID NO: 2576
cugggaacuugcugagcaa

SEQ ID NO: 199879 - RNA, 19 nt, Artificial Sequence
  Description of Artificial Sequence: Synthetic oligonucleotide
  Antisense strand to SEQ ID NO: 199878
uugcucagcaaguucccag

SEQ ID NO: 199880 - RNA, 19 nt, Artificial Sequence
  Description of Artificial Sequence: Synthetic oligonucleotide
  Sense strand starting at position 711 of SEQ ID NO: 2576
ugggaacuugcugagcaaa

SEQ ID NO: 199881 - RNA, 19 nt, Artificial Sequence
  Description of Artificial Sequence: Synthetic oligonucleotide
  Antisense strand to SEQ ID NO: 199880
uuugcucagcaaguuccca

SEQ ID NO: 199882 - RNA, 19 nt, Artificial Sequence
  Description of Artificial Sequence: Synthetic oligonucleotide
  Sense strand starting at position 881 of SEQ ID NO: 2576
gcaggaugcaggugucagu

SEQ ID NO: 199883 - RNA, 19 nt, Artificial Sequence
  Description of Artificial Sequence: Synthetic oligonucleotide
  Antisense strand to SEQ ID NO: 199882
acugacaccugcauccugc

SEQ ID NO: 199884 - RNA, 19 nt, Artificial Sequence
  Description of Artificial Sequence: Synthetic oligonucleotide
  Sense strand starting at position 2144 of SEQ ID NO: 2576
gcaucaucccgucauguga

SEQ ID NO: 199885 - RNA, 19 nt, Artificial Sequence
  Description of Artificial Sequence: Synthetic oligonucleotide
  Antisense strand to SEQ ID NO: 199884
ucacaugacgggaugaugc

SEQ ID NO: 199886 - RNA, 19 nt, Artificial Sequence
  Description of Artificial Sequence: Synthetic oligonucleotide
  Sense strand starting at position 2311 of SEQ ID NO: 2576
gagucagggucucccagau

SEQ ID NO: 199887 - RNA, 19 nt, Artificial Sequence
  Description of Artificial Sequence: Synthetic oligonucleotide
  Antisense strand to SEQ ID NO: 199886
aucugggagacccugacuc

SEQ ID NO: 199888 - RNA, 19 nt, Artificial Sequence
  Description of Artificial Sequence: Synthetic oligonucleotide
  Sense strand starting at position 2512 of SEQ ID NO: 2576
gcaccuguucuuugaccca

SEQ ID NO: 199889 - RNA, 19 nt, Artificial Sequence
  Description of Artificial Sequence: Synthetic oligonucleotide
  Antisense strand to SEQ ID NO: 199888
ugggucaaagaacaggugc

SEQ ID NO: 199890 - RNA, 19 nt, Artificial Sequence
  Description of Artificial Sequence: Synthetic oligonucleotide
  Sense strand starting at position 2659 of SEQ ID NO: 2576
augggaagguccucucauu

SEQ ID NO: 199891 - RNA, 19 nt, Artificial Sequence
  Description of Artificial Sequence: Synthetic oligonucleotide
  Antisense strand to SEQ ID NO: 199890
aaugagaggaccuucccau

SEQ ID NO: 199892 - RNA, 19 nt, Artificial Sequence
  Description of Artificial Sequence: Synthetic oligonucleotide
  Sense strand starting at position 2745 of SEQ ID NO: 2576
gggucuggucugggugaga

SEQ ID NO: 199893 - RNA, 19 nt, Artificial Sequence
  Description of Artificial Sequence: Synthetic oligonucleotide
  Antisense strand to SEQ ID NO: 199892
ucucacccagaccagaccc

SEQ ID NO: 199894 - RNA, 19 nt, Artificial Sequence
  Description of Artificial Sequence: Synthetic oligonucleotide
  Sense strand starting at position 2916 of SEQ ID NO: 2576
gaaagcgcuuuccagagau

SEQ ID NO: 199895 - RNA, 19 nt, Artificial Sequence
  Description of Artificial Sequence: Synthetic oligonucleotide
  Antisense strand to SEQ ID NO: 199894
aucucuggaaagcgcuuuc

SEQ ID NO: 199896 - RNA, 19 nt, Artificial Sequence
  Description of Artificial Sequence: Synthetic oligonucleotide
  Sense strand starting at position 2918 of SEQ ID NO: 2576
aagcgcuuuccagagauga

SEQ ID NO: 199897 - RNA, 19 nt, Artificial Sequence
  Description of Artificial Sequence: Synthetic oligonucleotide
  Antisense strand to SEQ ID NO: 199896
ucaucucuggaaagcgcuu

SEQ ID NO: 199898 - RNA, 19 nt, Artificial Sequence
  Description of Artificial Sequence: Synthetic oligonucleotide
  Sense strand starting at position 2920 of SEQ ID NO: 2576
gcgcuuuccagagaugaaa

SEQ ID NO: 199899 - RNA, 19 nt, Artificial Sequence
  Description of Artificial Sequence: Synthetic oligonucleotide
  Antisense strand to SEQ ID NO: 199898
uuucaucucuggaaagcgc

SEQ ID NO: 199900 - RNA, 19 nt, Artificial Sequence
  Description of Artificial Sequence: Synthetic oligonucleotide
  Sense strand starting at position 2940 of SEQ ID NO: 2576
ccgaaagugccaucgccau

SEQ ID NO: 199901 - RNA, 19 nt, Artificial Sequence
  Description of Artificial Sequence: Synthetic oligonucleotide
  Antisense strand to SEQ ID NO: 199900
auggcgauggcacuuucgg

SEQ ID NO: 199902 - RNA, 19 nt, Artificial Sequence
  Description of Artificial Sequence: Synthetic oligonucleotide
  Sense strand starting at position 2961 of SEQ ID NO: 2576
acuugaauuuccugcagag

SEQ ID NO: 199903 - RNA, 19 nt, Artificial Sequence
  Description of Artificial Sequence: Synthetic oligonucleotide
  Antisense strand to SEQ ID NO: 199902
cucugcaggaaauucaagu

SEQ ID NO: 199904 - RNA, 19 nt, Artificial Sequence
  Description of Artificial Sequence: Synthetic oligonucleotide
  Sense strand starting at position 3132 of SEQ ID NO: 2576
cauggauccuguccaguga

SEQ ID NO: 199905 - RNA, 19 nt, Artificial Sequence
  Description of Artificial Sequence: Synthetic oligonucleotide
  Antisense strand to SEQ ID NO: 199904
ucacuggacaggauccaug

SEQ ID NO: 199906 - RNA, 19 nt, Artificial Sequence
  Description of Artificial Sequence: Synthetic oligonucleotide
  Sense strand starting at position 3136 of SEQ ID NO: 2576
gauccuguccagugagucu

SEQ ID NO: 199907 - RNA, 19 nt, Artificial Sequence
  Description of Artificial Sequence: Synthetic oligonucleotide
  Antisense strand to SEQ ID NO: 199906
agacucacuggacaggauc

SEQ ID NO: 199908 - RNA, 19 nt, Artificial Sequence
  Description of Artificial Sequence: Synthetic oligonucleotide
  Sense strand starting at position 3175 of SEQ ID NO: 2576
cagccauggccauauggua

SEQ ID NO: 199909 - RNA, 19 nt, Artificial Sequence
  Description of Artificial Sequence: Synthetic oligonucleotide
  Antisense strand to SEQ ID NO: 199908
uaccauauggccauggcug

SEQ ID NO: 199910 - RNA, 19 nt, Artificial Sequence
  Description of Artificial Sequence: Synthetic oligonucleotide
  Sense strand starting at position 3614 of SEQ ID NO: 2576
cagagaaacccugguucca

SEQ ID NO: 199911 - RNA, 19 nt, Artificial Sequence
  Description of Artificial Sequence: Synthetic oligonucleotide
  Antisense strand to SEQ ID NO: 199910
uggaaccaggguuucucug

SEQ ID NO: 199912 - RNA, 19 nt, Artificial Sequence
  Description of Artificial Sequence: Synthetic oligonucleotide
  Sense strand starting at position 3616 of SEQ ID NO: 2576
gagaaacccugguuccagu

SEQ ID NO: 199913 - RNA, 19 nt, Artificial Sequence
  Description of Artificial Sequence: Synthetic oligonucleotide
  Antisense strand to SEQ ID NO: 199912
acuggaaccaggguuucuc

SEQ ID NO: 199914 - RNA, 19 nt, Artificial Sequence
  Description of Artificial Sequence: Synthetic oligonucleotide
  Sense strand starting at position 3655 of SEQ ID NO: 2576
cugccuguucccugugcaa

SEQ ID NO: 199915 - RNA, 19 nt, Artificial Sequence
  Description of Artificial Sequence: Synthetic oligonucleotide
  Antisense strand to SEQ ID NO: 199914
uugcacagggaacaggcag

SEQ ID NO: 199916 - RNA, 19 nt, Artificial Sequence
  Description of Artificial Sequence: Synthetic oligonucleotide
  Sense strand starting at position 3657 of SEQ ID NO: 2576
gccuguucccugugcaagu

SEQ ID NO: 199917 - RNA, 19 nt, Artificial Sequence
  Description of Artificial Sequence: Synthetic oligonucleotide
  Antisense strand to SEQ ID NO: 199916
acuugcacagggaacaggc

SEQ ID NO: 199918 - RNA, 19 nt, Artificial Sequence
  Description of Artificial Sequence: Synthetic oligonucleotide
  Sense strand starting at position 3748 of SEQ ID NO: 2576
caggcuuucccucguggga

SEQ ID NO: 199919 - RNA, 19 nt, Artificial Sequence
  Description of Artificial Sequence: Synthetic oligonucleotide
  Antisense strand to SEQ ID NO: 199918
ucccacgagggaaagccug

SEQ ID NO: 199920 - RNA, 19 nt, Artificial Sequence
  Description of Artificial Sequence: Synthetic oligonucleotide
  Sense strand starting at position 3750 of SEQ ID NO: 2576
ggcuuucccucgugggauc

SEQ ID NO: 199921 - RNA, 19 nt, Artificial Sequence
  Description of Artificial Sequence: Synthetic oligonucleotide
  Antisense strand to SEQ ID NO: 199920
gaucccacgagggaaagcc

SEQ ID NO: 199922 - RNA, 19 nt, Artificial Sequence
  Description of Artificial Sequence: Synthetic oligonucleotide
  Sense strand starting at position 3760 of SEQ ID NO: 2576
cgugggauccuguggagaa

SEQ ID NO: 199923 - RNA, 19 nt, Artificial Sequence
  Description of Artificial Sequence: Synthetic oligonucleotide
  Antisense strand to SEQ ID NO: 199922
uucuccacaggaucccacg

SEQ ID NO: 199924 - RNA, 19 nt, Artificial Sequence
  Description of Artificial Sequence: Synthetic oligonucleotide
  Sense strand starting at position 3761 of SEQ ID NO: 2576
gugggauccuguggagaau

SEQ ID NO: 199925 - RNA, 19 nt, Artificial Sequence
  Description of Artificial Sequence: Synthetic oligonucleotide
  Antisense strand to SEQ ID NO: 199924
auucuccacaggaucccac

SEQ ID NO: 199926 - RNA, 19 nt, Artificial Sequence
  Description of Artificial Sequence: Synthetic oligonucleotide
  Sense strand starting at position 3763 of SEQ ID NO: 2576
gggauccuguggagaauga

SEQ ID NO: 199927 - RNA, 19 nt, Artificial Sequence
  Description of Artificial Sequence: Synthetic oligonucleotide
  Antisense strand to SEQ ID NO: 199926
ucauucuccacaggauccc

SEQ ID NO: 199928 - RNA, 19 nt, Artificial Sequence
  Description of Artificial Sequence: Synthetic oligonucleotide
  Sense strand starting at position 3784 of SEQ ID NO: 2576
ucagacggauuccucauau

SEQ ID NO: 199929 - RNA, 19 nt, Artificial Sequence
  Description of Artificial Sequence: Synthetic oligonucleotide
  Antisense strand to SEQ ID NO: 199928
auaugaggaauccgucuga

SEQ ID NO: 199930 - RNA, 19 nt, Artificial Sequence
  Description of Artificial Sequence: Synthetic oligonucleotide
  Sense strand starting at position 3788 of SEQ ID NO: 2576
acggauuccucauauucua

SEQ ID NO: 199931 - RNA, 19 nt, Artificial Sequence
  Description of Artificial Sequence: Synthetic oligonucleotide
  Antisense strand to SEQ ID NO: 199930
uagaauaugaggaauccgu

SEQ ID NO: 199932 - RNA, 19 nt, Artificial Sequence
  Description of Artificial Sequence: Synthetic oligonucleotide
  Sense strand starting at position 3980 of SEQ ID NO: 2576
aggaacguuuaaucaccau

SEQ ID NO: 199933 - RNA, 19 nt, Artificial Sequence
  Description of Artificial Sequence: Synthetic oligonucleotide
  Antisense strand to SEQ ID NO: 199932
auggugauuaaacguuccu

SEQ ID NO: 199934 - RNA, 19 nt, Artificial Sequence
  Description of Artificial Sequence: Synthetic oligonucleotide
  Sense strand starting at position 107 of SEQ ID NO: 2577
auggcugugcgaugugaga

SEQ ID NO: 199935 - RNA, 19 nt, Artificial Sequence
  Description of Artificial Sequence: Synthetic oligonucleotide
  Antisense strand to SEQ ID NO: 199934
ucucacaucgcacagccau

SEQ ID NO: 199936 - RNA, 19 nt, Artificial Sequence
  Description of Artificial Sequence: Synthetic oligonucleotide
  Sense strand starting at position 109 of SEQ ID NO: 2577
ggcugugcgaugugagaca

SEQ ID NO: 199937 - RNA, 19 nt, Artificial Sequence
  Description of Artificial Sequence: Synthetic oligonucleotide
  Antisense strand to SEQ ID NO: 199936
ugucucacaucgcacagcc

SEQ ID NO: 199938 - RNA, 19 nt, Artificial Sequence
  Description of Artificial Sequence: Synthetic oligonucleotide
  Sense strand starting at position 707 of SEQ ID NO: 2577
acaccuguccugggaacuu

SEQ ID NO: 199939 - RNA, 19 nt, Artificial Sequence
  Description of Artificial Sequence: Synthetic oligonucleotide
  Antisense strand to SEQ ID NO: 199938
aaguucccaggacaggugu

SEQ ID NO: 199940 - RNA, 19 nt, Artificial Sequence
  Description of Artificial Sequence: Synthetic oligonucleotide
  Sense strand starting at position 717 of SEQ ID NO: 2577
ugggaacuugcugagcaaa

SEQ ID NO: 199941 - RNA, 19 nt, Artificial Sequence
  Description of Artificial Sequence: Synthetic oligonucleotide
  Antisense strand to SEQ ID NO: 199940
uuugcucagcaaguuccca

SEQ ID NO: 199942 - RNA, 19 nt, Artificial Sequence
  Description of Artificial Sequence: Synthetic oligonucleotide
  Sense strand starting at position 887 of SEQ ID NO: 2577
gcaggaugcaggugucagu

SEQ ID NO: 199943 - RNA, 19 nt, Artificial Sequence
  Description of Artificial Sequence: Synthetic oligonucleotide
  Antisense strand to SEQ ID NO: 199942
acugacaccugcauccugc

SEQ ID NO: 199944 - RNA, 19 nt, Artificial Sequence
  Description of Artificial Sequence: Synthetic oligonucleotide
  Sense strand starting at position 2149 of SEQ ID NO: 2577
gcaucaucccgucauguga

SEQ ID NO: 199945 - RNA, 19 nt, Artificial Sequence
  Description of Artificial Sequence: Synthetic oligonucleotide
  Antisense strand to SEQ ID NO: 199944
ucacaugacgggaugaugc

SEQ ID NO: 199946 - RNA, 19 nt, Artificial Sequence
  Description of Artificial Sequence: Synthetic oligonucleotide
  Sense strand starting at position 2316 of SEQ ID NO: 2577
gagucagggucucccagau

SEQ ID NO: 199947 - RNA, 19 nt, Artificial Sequence
  Description of Artificial Sequence: Synthetic oligonucleotide
  Antisense strand to SEQ ID NO: 199946
aucugggagacccugacuc

SEQ ID NO: 199948 - RNA, 19 nt, Artificial Sequence
  Description of Artificial Sequence: Synthetic oligonucleotide
  Sense strand starting at position 2517 of SEQ ID NO: 2577
gcaccuguucuuugaccca

SEQ ID NO: 199949 - RNA, 19 nt, Artificial Sequence
  Description of Artificial Sequence: Synthetic oligonucleotide
  Antisense strand to SEQ ID NO: 199948
ugggucaaagaacaggugc

SEQ ID NO: 199950 - RNA, 19 nt, Artificial Sequence
  Description of Artificial Sequence: Synthetic oligonucleotide
  Sense strand starting at position 2567 of SEQ ID NO: 2577
guagaugucuucccuugag

SEQ ID NO: 199951 - RNA, 19 nt, Artificial Sequence
  Description of Artificial Sequence: Synthetic oligonucleotide
  Antisense strand to SEQ ID NO: 199950
cucaagggaagacaucuac

SEQ ID NO: 199952 - RNA, 19 nt, Artificial Sequence
  Description of Artificial Sequence: Synthetic oligonucleotide
  Sense strand starting at position 2570 of SEQ ID NO: 2577
gaugucuucccuugaguga

SEQ ID NO: 199953 - RNA, 19 nt, Artificial Sequence
  Description of Artificial Sequence: Synthetic oligonucleotide
  Antisense strand to SEQ ID NO: 199952
ucacucaagggaagacauc

SEQ ID NO: 199954 - RNA, 19 nt, Artificial Sequence
  Description of Artificial Sequence: Synthetic oligonucleotide
  Sense strand starting at position 2663 of SEQ ID NO: 2577
augggaagguccucucauu

SEQ ID NO: 199955 - RNA, 19 nt, Artificial Sequence
  Description of Artificial Sequence: Synthetic oligonucleotide
  Antisense strand to SEQ ID NO: 199954
aaugagaggaccuucccau

SEQ ID NO: 199956 - RNA, 19 nt, Artificial Sequence
  Description of Artificial Sequence: Synthetic oligonucleotide
  Sense strand starting at position 2749 of SEQ ID NO: 2577
gggucuggucugggugaga

SEQ ID NO: 199957 - RNA, 19 nt, Artificial Sequence
  Description of Artificial Sequence: Synthetic oligonucleotide
  Antisense strand to SEQ ID NO: 199956
ucucacccagaccagaccc

SEQ ID NO: 199958 - RNA, 19 nt, Artificial Sequence
  Description of Artificial Sequence: Synthetic oligonucleotide
  Sense strand starting at position 2920 of SEQ ID NO: 2577
gaaagcgcuuuccagagau

SEQ ID NO: 199959 - RNA, 19 nt, Artificial Sequence
  Description of Artificial Sequence: Synthetic oligonucleotide
  Antisense strand to SEQ ID NO: 199958
aucucuggaaagcgcuuuc

SEQ ID NO: 199960 - RNA, 19 nt, Artificial Sequence
  Description of Artificial Sequence: Synthetic oligonucleotide
  Sense strand starting at position 2922 of SEQ ID NO: 2577
aagcgcuuuccagagauga

SEQ ID NO: 199961 - RNA, 19 nt, Artificial Sequence
  Description of Artificial Sequence: Synthetic oligonucleotide
  Antisense strand to SEQ ID NO: 199960
ucaucucuggaaagcgcuu

SEQ ID NO: 199962 - RNA, 19 nt, Artificial Sequence
  Description of Artificial Sequence: Synthetic oligonucleotide
  Sense strand starting at position 2924 of SEQ ID NO: 2577
gcgcuuuccagagaugaaa

SEQ ID NO: 199963 - RNA, 19 nt, Artificial Sequence
  Description of Artificial Sequence: Synthetic oligonucleotide
  Antisense strand to SEQ ID NO: 199962
uuucaucucuggaaagcgc

SEQ ID NO: 199964 - RNA, 19 nt, Artificial Sequence
  Description of Artificial Sequence: Synthetic oligonucleotide
  Sense strand starting at position 2944 of SEQ ID NO: 2577
ccgaaagugccaucgccau

SEQ ID NO: 199965 - RNA, 19 nt, Artificial Sequence
  Description of Artificial Sequence: Synthetic oligonucleotide
  Antisense strand to SEQ ID NO: 199964
auggcgauggcacuuucgg

SEQ ID NO: 199966 - RNA, 19 nt, Artificial Sequence
  Description of Artificial Sequence: Synthetic oligonucleotide
  Sense strand starting at position 2965 of SEQ ID NO: 2577
acuugaauuuccugcagag

SEQ ID NO: 199967 - RNA, 19 nt, Artificial Sequence
  Description of Artificial Sequence: Synthetic oligonucleotide
  Antisense strand to SEQ ID NO: 199966
cucugcaggaaauucaagu

SEQ ID NO: 199968 - RNA, 19 nt, Artificial Sequence
  Description of Artificial Sequence: Synthetic oligonucleotide
  Sense strand starting at position 3302 of SEQ ID NO: 2577
cccuuucucugagacuuag

SEQ ID NO: 199969 - RNA, 19 nt, Artificial Sequence
  Description of Artificial Sequence: Synthetic oligonucleotide
  Antisense strand to SEQ ID NO: 199968
cuaagucucagagaaaggg

SEQ ID NO: 199970 - RNA, 19 nt, Artificial Sequence
  Description of Artificial Sequence: Synthetic oligonucleotide
  Sense strand starting at position 3664 of SEQ ID NO: 2577
uugccuguucccugugcaa

SEQ ID NO: 199971 - RNA, 19 nt, Artificial Sequence
  Description of Artificial Sequence: Synthetic oligonucleotide
  Antisense strand to SEQ ID NO: 199970
uugcacagggaacaggcaa

SEQ ID NO: 199972 - RNA, 19 nt, Artificial Sequence
  Description of Artificial Sequence: Synthetic oligonucleotide
  Sense strand starting at position 3666 of SEQ ID NO: 2577
gccuguucccugugcaagu

SEQ ID NO: 199973 - RNA, 19 nt, Artificial Sequence
  Description of Artificial Sequence: Synthetic oligonucleotide
  Antisense strand to SEQ ID NO: 199972
acuugcacagggaacaggc

SEQ ID NO: 199974 - RNA, 19 nt, Artificial Sequence
  Description of Artificial Sequence: Synthetic oligonucleotide
  Sense strand starting at position 3770 of SEQ ID NO: 2577
gugggauccuguggagaau

SEQ ID NO: 199975 - RNA, 19 nt, Artificial Sequence
  Description of Artificial Sequence: Synthetic oligonucleotide
  Antisense strand to SEQ ID NO: 199974
auucuccacaggaucccac

SEQ ID NO: 199976 - RNA, 19 nt, Artificial Sequence
  Description of Artificial Sequence: Synthetic oligonucleotide
  Sense strand starting at position 3772 of SEQ ID NO: 2577
gggauccuguggagaauga

SEQ ID NO: 199977 - RNA, 19 nt, Artificial Sequence
  Description of Artificial Sequence: Synthetic oligonucleotide
  Antisense strand to SEQ ID NO: 199976
ucauucuccacaggauccc

SEQ ID NO: 199978 - RNA, 19 nt, Artificial Sequence
  Description of Artificial Sequence: Synthetic oligonucleotide
  Sense strand starting at position 3793 of SEQ ID NO: 2577
ucagacggauuccucauau

SEQ ID NO: 199979 - RNA, 19 nt, Artificial Sequence
  Description of Artificial Sequence: Synthetic oligonucleotide
  Antisense strand to SEQ ID NO: 199978
auaugaggaauccgucuga

SEQ ID NO: 199980 - RNA, 19 nt, Artificial Sequence
  Description of Artificial Sequence: Synthetic oligonucleotide
  Sense strand starting at position 3797 of SEQ ID NO: 2577
acggauuccucauauucua

SEQ ID NO: 199981 - RNA, 19 nt, Artificial Sequence
  Description of Artificial Sequence: Synthetic oligonucleotide
  Antisense strand to SEQ ID NO: 199980
uagaauaugaggaauccgu

SEQ ID NO: 199982 - RNA, 19 nt, Artificial Sequence
  Description of Artificial Sequence: Synthetic oligonucleotide
  Sense strand starting at position 212 of SEQ ID NO: 2578
uuaacaguuucugcaagaa

SEQ ID NO: 199983 - RNA, 19 nt, Artificial Sequence
  Description of Artificial Sequence: Synthetic oligonucleotide
  Antisense strand to SEQ ID NO: 199982
uucuugcagaaacuguuaa

SEQ ID NO: 199984 - RNA, 19 nt, Artificial Sequence
  Description of Artificial Sequence: Synthetic oligonucleotide
  Sense strand starting at position 299 of SEQ ID NO: 2578
uccucaaugccagauguuu

SEQ ID NO: 199985 - RNA, 19 nt, Artificial Sequence
  Description of Artificial Sequence: Synthetic oligonucleotide
  Antisense strand to SEQ ID NO: 199984
aaacaucuggcauugagga

SEQ ID NO: 199986 - RNA, 19 nt, Artificial Sequence
  Description of Artificial Sequence: Synthetic oligonucleotide
  Sense strand starting at position 308 of SEQ ID NO: 2578
ccagauguuuaucugcaua

SEQ ID NO: 199987 - RNA, 19 nt, Artificial Sequence
  Description of Artificial Sequence: Synthetic oligonucleotide
  Antisense strand to SEQ ID NO: 199986
uaugcagauaaacaucugg

SEQ ID NO: 199988 - RNA, 19 nt, Artificial Sequence
  Description of Artificial Sequence: Synthetic oligonucleotide
  Sense strand starting at position 310 of SEQ ID NO: 2578
agauguuuaucugcauauu

SEQ ID NO: 199989 - RNA, 19 nt, Artificial Sequence
  Description of Artificial Sequence: Synthetic oligonucleotide
  Antisense strand to SEQ ID NO: 199988
aauaugcagauaaacaucu

SEQ ID NO: 199990 - RNA, 19 nt, Artificial Sequence
  Description of Artificial Sequence: Synthetic oligonucleotide
  Sense strand starting at position 333 of SEQ ID NO: 2578
cuugcuaagguguaaguau

SEQ ID NO: 199991 - RNA, 19 nt, Artificial Sequence
  Description of Artificial Sequence: Synthetic oligonucleotide
  Antisense strand to SEQ ID NO: 199990
auacuuacaccuuagcaag

SEQ ID NO: 199992 - RNA, 19 nt, Artificial Sequence
  Description of Artificial Sequence: Synthetic oligonucleotide
  Sense strand starting at position 556 of SEQ ID NO: 2578
uuaccagggucuucuuaca

SEQ ID NO: 199993 - RNA, 19 nt, Artificial Sequence
  Description of Artificial Sequence: Synthetic oligonucleotide
  Antisense strand to SEQ ID NO: 199992
uguaagaagacccugguaa

SEQ ID NO: 199994 - RNA, 19 nt, Artificial Sequence
  Description of Artificial Sequence: Synthetic oligonucleotide
  Sense strand starting at position 902 of SEQ ID NO: 2578
ggaucauaucuugggcugu

SEQ ID NO: 199995 - RNA, 19 nt, Artificial Sequence
  Description of Artificial Sequence: Synthetic oligonucleotide
  Antisense strand to SEQ ID NO: 199994
acagcccaagauaugaucc

SEQ ID NO: 199996 - RNA, 19 nt, Artificial Sequence
  Description of Artificial Sequence: Synthetic oligonucleotide
  Sense strand starting at position 968 of SEQ ID NO: 2578
ugucucugagauuagcaau

SEQ ID NO: 199997 - RNA, 19 nt, Artificial Sequence
  Description of Artificial Sequence: Synthetic oligonucleotide
  Antisense strand to SEQ ID NO: 199996
auugcuaaucucagagaca

SEQ ID NO: 199998 - RNA, 19 nt, Artificial Sequence
  Description of Artificial Sequence: Synthetic oligonucleotide
  Sense strand starting at position 1206 of SEQ ID NO: 2578
ugaaaucagcugugacuuc

SEQ ID NO: 199999 - RNA, 19 nt, Artificial Sequence
  Description of Artificial Sequence: Synthetic oligonucleotide
  Antisense strand to SEQ ID NO: 199998
gaagucacagcugauuuca

SEQ ID NO: 200000 - RNA, 19 nt, Artificial Sequence
  Description of Artificial Sequence: Synthetic oligonucleotide
  Sense strand starting at position 1313 of SEQ ID NO: 2578
agugucaugauagacagua

SEQ ID NO: 200001 - RNA, 19 nt, Artificial Sequence
  Description of Artificial Sequence: Synthetic oligonucleotide
  Antisense strand to SEQ ID NO: 200000
uacugucuaucaugacacu

SEQ ID NO: 200002 - RNA, 19 nt, Artificial Sequence
  Description of Artificial Sequence: Synthetic oligonucleotide
  Sense strand starting at position 1419 of SEQ ID NO: 2578
cuuuaaagugaguaucuuu

SEQ ID NO: 200003 - RNA, 19 nt, Artificial Sequence
  Description of Artificial Sequence: Synthetic oligonucleotide
  Antisense strand to SEQ ID NO: 200002
aaagauacucacuuuaaag

SEQ ID NO: 200004 - RNA, 19 nt, Artificial Sequence
  Description of Artificial Sequence: Synthetic oligonucleotide
  Sense strand starting at position 1452 of SEQ ID NO: 2578
agcuauuucucauuguuau

SEQ ID NO: 200005 - RNA, 19 nt, Artificial Sequence
  Description of Artificial Sequence: Synthetic oligonucleotide
  Antisense strand to SEQ ID NO: 200004
auaacaaugagaaauagcu

SEQ ID NO: 200006 - RNA, 19 nt, Artificial Sequence
  Description of Artificial Sequence: Synthetic oligonucleotide
  Sense strand starting at position 1453 of SEQ ID NO: 2578
gcuauuucucauuguuaua

SEQ ID NO: 200007 - RNA, 19 nt, Artificial Sequence
  Description of Artificial Sequence: Synthetic oligonucleotide
  Antisense strand to SEQ ID NO: 200006
uauaacaaugagaaauagc

SEQ ID NO: 200008 - RNA, 19 nt, Artificial Sequence
  Description of Artificial Sequence: Synthetic oligonucleotide
  Sense strand starting at position 1484 of SEQ ID NO: 2578
uccuuaucuggauguugaa

SEQ ID NO: 200009 - RNA, 19 nt, Artificial Sequence
  Description of Artificial Sequence: Synthetic oligonucleotide
  Antisense strand to SEQ ID NO: 200008
uucaacauccagauaagga

SEQ ID NO: 200010 - RNA, 19 nt, Artificial Sequence
  Description of Artificial Sequence: Synthetic oligonucleotide
  Sense strand starting at position 2052 of SEQ ID NO: 2578
accacuuccuggguagaga

SEQ ID NO: 200011 - RNA, 19 nt, Artificial Sequence
  Description of Artificial Sequence: Synthetic oligonucleotide
  Antisense strand to SEQ ID NO: 200010
ucucuacccaggaaguggu

SEQ ID NO: 200012 - RNA, 19 nt, Artificial Sequence
  Description of Artificial Sequence: Synthetic oligonucleotide
  Sense strand starting at position 2105 of SEQ ID NO: 2578
ugaagaaauugccuuguau

SEQ ID NO: 200013 - RNA, 19 nt, Artificial Sequence
  Description of Artificial Sequence: Synthetic oligonucleotide
  Antisense strand to SEQ ID NO: 200012
auacaaggcaauuucuuca

SEQ ID NO: 200014 - RNA, 19 nt, Artificial Sequence
  Description of Artificial Sequence: Synthetic oligonucleotide
  Sense strand starting at position 2107 of SEQ ID NO: 2578
aagaaauugccuuguauag

SEQ ID NO: 200015 - RNA, 19 nt, Artificial Sequence
  Description of Artificial Sequence: Synthetic oligonucleotide
  Antisense strand to SEQ ID NO: 200014
cuauacaaggcaauuucuu

SEQ ID NO: 200016 - RNA, 19 nt, Artificial Sequence
  Description of Artificial Sequence: Synthetic oligonucleotide
  Sense strand starting at position 2354 of SEQ ID NO: 2578
ucaggacacucugcauauu

SEQ ID NO: 200017 - RNA, 19 nt, Artificial Sequence
  Description of Artificial Sequence: Synthetic oligonucleotide
  Antisense strand to SEQ ID NO: 200016
aauaugcagaguguccuga

SEQ ID NO: 200018 - RNA, 19 nt, Artificial Sequence
  Description of Artificial Sequence: Synthetic oligonucleotide
  Sense strand starting at position 2767 of SEQ ID NO: 2578
gcugaaugcccucuugugu

SEQ ID NO: 200019 - RNA, 19 nt, Artificial Sequence
  Description of Artificial Sequence: Synthetic oligonucleotide
  Antisense strand to SEQ ID NO: 200018
acacaagagggcauucagc

SEQ ID NO: 200020 - RNA, 19 nt, Artificial Sequence
  Description of Artificial Sequence: Synthetic oligonucleotide
  Sense strand starting at position 2839 of SEQ ID NO: 2578
ggaugugcaucuuuauuga

SEQ ID NO: 200021 - RNA, 19 nt, Artificial Sequence
  Description of Artificial Sequence: Synthetic oligonucleotide
  Antisense strand to SEQ ID NO: 200020
ucaauaaagaugcacaucc

SEQ ID NO: 200022 - RNA, 19 nt, Artificial Sequence
  Description of Artificial Sequence: Synthetic oligonucleotide
  Sense strand starting at position 2848 of SEQ ID NO: 2578
ucuuuauugagccauggag

SEQ ID NO: 200023 - RNA, 19 nt, Artificial Sequence
  Description of Artificial Sequence: Synthetic oligonucleotide
  Antisense strand to SEQ ID NO: 200022
cuccauggcucaauaaaga

SEQ ID NO: 200024 - RNA, 19 nt, Artificial Sequence
  Description of Artificial Sequence: Synthetic oligonucleotide
  Sense strand starting at position 2850 of SEQ ID NO: 2578
uuuauugagccauggaguu

SEQ ID NO: 200025 - RNA, 19 nt, Artificial Sequence
  Description of Artificial Sequence: Synthetic oligonucleotide
  Antisense strand to SEQ ID NO: 200024
aacuccauggcucaauaaa

SEQ ID NO: 200026 - RNA, 19 nt, Artificial Sequence
  Description of Artificial Sequence: Synthetic oligonucleotide
  Sense strand starting at position 3009 of SEQ ID NO: 2578
acuagaaaucuguguaaua

SEQ ID NO: 200027 - RNA, 19 nt, Artificial Sequence
  Description of Artificial Sequence: Synthetic oligonucleotide
  Antisense strand to SEQ ID NO: 200026
uauuacacagauuucuagu

SEQ ID NO: 200028 - RNA, 19 nt, Artificial Sequence
  Description of Artificial Sequence: Synthetic oligonucleotide
  Sense strand starting at position 3010 of SEQ ID NO: 2578
cuagaaaucuguguaauag

SEQ ID NO: 200029 - RNA, 19 nt, Artificial Sequence
  Description of Artificial Sequence: Synthetic oligonucleotide
  Antisense strand to SEQ ID NO: 200028
cuauuacacagauuucuag

SEQ ID NO: 200030 - RNA, 19 nt, Artificial Sequence
  Description of Artificial Sequence: Synthetic oligonucleotide
  Sense strand starting at position 3024 of SEQ ID NO: 2578
aauagagcucagugguaua

SEQ ID NO: 200031 - RNA, 19 nt, Artificial Sequence
  Description of Artificial Sequence: Synthetic oligonucleotide
  Antisense strand to SEQ ID NO: 200030
uauaccacugagcucuauu

SEQ ID NO: 200032 - RNA, 19 nt, Artificial Sequence
  Description of Artificial Sequence: Synthetic oligonucleotide
  Sense strand starting at position 3029 of SEQ ID NO: 2578
agcucagugguauagaaug

SEQ ID NO: 200033 - RNA, 19 nt, Artificial Sequence
  Description of Artificial Sequence: Synthetic oligonucleotide
  Antisense strand to SEQ ID NO: 200032
cauucuauaccacugagcu

SEQ ID NO: 200034 - RNA, 19 nt, Artificial Sequence
  Description of Artificial Sequence: Synthetic oligonucleotide
  Sense strand starting at position 3031 of SEQ ID NO: 2578
cucagugguauagaauguu

SEQ ID NO: 200035 - RNA, 19 nt, Artificial Sequence
  Description of Artificial Sequence: Synthetic oligonucleotide
  Antisense strand to SEQ ID NO: 200034
aacauucuauaccacugag

SEQ ID NO: 200036 - RNA, 19 nt, Artificial Sequence
  Description of Artificial Sequence: Synthetic oligonucleotide
  Sense strand starting at position 3037 of SEQ ID NO: 2578
gguauagaauguuuggcau

SEQ ID NO: 200037 - RNA, 19 nt, Artificial Sequence
  Description of Artificial Sequence: Synthetic oligonucleotide
  Antisense strand to SEQ ID NO: 200036
augccaaacauucuauacc

SEQ ID NO: 200038 - RNA, 19 nt, Artificial Sequence
  Description of Artificial Sequence: Synthetic oligonucleotide
  Sense strand starting at position 3040 of SEQ ID NO: 2578
auagaauguuuggcauacu

SEQ ID NO: 200039 - RNA, 19 nt, Artificial Sequence
  Description of Artificial Sequence: Synthetic oligonucleotide
  Antisense strand to SEQ ID NO: 200038
aguaugccaaacauucuau

SEQ ID NO: 200040 - RNA, 19 nt, Artificial Sequence
  Description of Artificial Sequence: Synthetic oligonucleotide
  Sense strand starting at position 3043 of SEQ ID NO: 2578
gaauguuuggcauacuaaa

SEQ ID NO: 200041 - RNA, 19 nt, Artificial Sequence
  Description of Artificial Sequence: Synthetic oligonucleotide
  Antisense strand to SEQ ID NO: 200040
uuuaguaugccaaacauuc

SEQ ID NO: 200042 - RNA, 19 nt, Artificial Sequence
  Description of Artificial Sequence: Synthetic oligonucleotide
  Sense strand starting at position 3086 of SEQ ID NO: 2578
guggauauggcccaaguua

SEQ ID NO: 200043 - RNA, 19 nt, Artificial Sequence
  Description of Artificial Sequence: Synthetic oligonucleotide
  Antisense strand to SEQ ID NO: 200042
uaacuugggccauauccac

SEQ ID NO: 200044 - RNA, 19 nt, Artificial Sequence
  Description of Artificial Sequence: Synthetic oligonucleotide
  Sense strand starting at position 3108 of SEQ ID NO: 2578
auggcaugucccuaucagu

SEQ ID NO: 200045 - RNA, 19 nt, Artificial Sequence
  Description of Artificial Sequence: Synthetic oligonucleotide
  Antisense strand to SEQ ID NO: 200044
acugauagggacaugccau

SEQ ID NO: 200046 - RNA, 19 nt, Artificial Sequence
  Description of Artificial Sequence: Synthetic oligonucleotide
  Sense strand starting at position 3233 of SEQ ID NO: 2578
ccugaagauuuguacugaa

SEQ ID NO: 200047 - RNA, 19 nt, Artificial Sequence
  Description of Artificial Sequence: Synthetic oligonucleotide
  Antisense strand to SEQ ID NO: 200046
uucaguacaaaucuucagg

SEQ ID NO: 200048 - RNA, 19 nt, Artificial Sequence
  Description of Artificial Sequence: Synthetic oligonucleotide
  Sense strand starting at position 3496 of SEQ ID NO: 2578
auuagcaugagcugggaaa

SEQ ID NO: 200049 - RNA, 19 nt, Artificial Sequence
  Description of Artificial Sequence: Synthetic oligonucleotide
  Antisense strand to SEQ ID NO: 200048
uuucccagcucaugcuaau

SEQ ID NO: 200050 - RNA, 19 nt, Artificial Sequence
  Description of Artificial Sequence: Synthetic oligonucleotide
  Sense strand starting at position 3497 of SEQ ID NO: 2578
uuagcaugagcugggaaau

SEQ ID NO: 200051 - RNA, 19 nt, Artificial Sequence
  Description of Artificial Sequence: Synthetic oligonucleotide
  Antisense strand to SEQ ID NO: 200050
auuucccagcucaugcuaa

SEQ ID NO: 200052 - RNA, 19 nt, Artificial Sequence
  Description of Artificial Sequence: Synthetic oligonucleotide
  Sense strand starting at position 3503 of SEQ ID NO: 2578
ugagcugggaaauguugau

SEQ ID NO: 200053 - RNA, 19 nt, Artificial Sequence
  Description of Artificial Sequence: Synthetic oligonucleotide
  Antisense strand to SEQ ID NO: 200052
aucaacauuucccagcuca

SEQ ID NO: 200054 - RNA, 19 nt, Artificial Sequence
  Description of Artificial Sequence: Synthetic oligonucleotide
  Sense strand starting at position 3549 of SEQ ID NO: 2578
aguacauucugcuugauuu

SEQ ID NO: 200055 - RNA, 19 nt, Artificial Sequence
  Description of Artificial Sequence: Synthetic oligonucleotide
  Antisense strand to SEQ ID NO: 200054
aaaucaagcagaauguacu

SEQ ID NO: 200056 - RNA, 19 nt, Artificial Sequence
  Description of Artificial Sequence: Synthetic oligonucleotide
  Sense strand starting at position 3550 of SEQ ID NO: 2578
guacauucugcuugauuua

SEQ ID NO: 200057 - RNA, 19 nt, Artificial Sequence
  Description of Artificial Sequence: Synthetic oligonucleotide
  Antisense strand to SEQ ID NO: 200056
uaaaucaagcagaauguac

SEQ ID NO: 200058 - RNA, 19 nt, Artificial Sequence
  Description of Artificial Sequence: Synthetic oligonucleotide
  Sense strand starting at position 3574 of SEQ ID NO: 2578
uuguaaaucugaguuagac

SEQ ID NO: 200059 - RNA, 19 nt, Artificial Sequence
  Description of Artificial Sequence: Synthetic oligonucleotide
  Antisense strand to SEQ ID NO: 200058
gucuaacucagauuuacaa

SEQ ID NO: 200060 - RNA, 19 nt, Artificial Sequence
  Description of Artificial Sequence: Synthetic oligonucleotide
  Sense strand starting at position 3959 of SEQ ID NO: 2578
ucaggcaucugacuaggaa

SEQ ID NO: 200061 - RNA, 19 nt, Artificial Sequence
  Description of Artificial Sequence: Synthetic oligonucleotide
  Antisense strand to SEQ ID NO: 200060
uuccuagucagaugccuga

SEQ ID NO: 200062 - RNA, 19 nt, Artificial Sequence
  Description of Artificial Sequence: Synthetic oligonucleotide
  Sense strand starting at position 30 of SEQ ID NO: 2579
gugagucugauauagguua

SEQ ID NO: 200063 - RNA, 19 nt, Artificial Sequence
  Description of Artificial Sequence: Synthetic oligonucleotide
  Antisense strand to SEQ ID NO: 200062
uaaccuauaucagacucac

SEQ ID NO: 200064 - RNA, 19 nt, Artificial Sequence
  Description of Artificial Sequence: Synthetic oligonucleotide
  Sense strand starting at position 35 of SEQ ID NO: 2579
ucugauauagguuaucuau

SEQ ID NO: 200065 - RNA, 19 nt, Artificial Sequence
  Description of Artificial Sequence: Synthetic oligonucleotide
  Antisense strand to SEQ ID NO: 200064
auagauaaccuauaucaga

SEQ ID NO: 200066 - RNA, 19 nt, Artificial Sequence
  Description of Artificial Sequence: Synthetic oligonucleotide
  Sense strand starting at position 43 of SEQ ID NO: 2579
agguuaucuaugggaccau

SEQ ID NO: 200067 - RNA, 19 nt, Artificial Sequence
  Description of Artificial Sequence: Synthetic oligonucleotide
  Antisense strand to SEQ ID NO: 200066
auggucccauagauaaccu

SEQ ID NO: 200068 - RNA, 19 nt, Artificial Sequence
  Description of Artificial Sequence: Synthetic oligonucleotide
  Sense strand starting at position 52 of SEQ ID NO: 2579
augggaccaugcuuuaaga

SEQ ID NO: 200069 - RNA, 19 nt, Artificial Sequence
  Description of Artificial Sequence: Synthetic oligonucleotide
  Antisense strand to SEQ ID NO: 200068
ucuuaaagcauggucccau

SEQ ID NO: 200070 - RNA, 19 nt, Artificial Sequence
  Description of Artificial Sequence: Synthetic oligonucleotide
  Sense strand starting at position 331 of SEQ ID NO: 2579
gacauagauugagcauuag

SEQ ID NO: 200071 - RNA, 19 nt, Artificial Sequence
  Description of Artificial Sequence: Synthetic oligonucleotide
  Antisense strand to SEQ ID NO: 200070
cuaaugcucaaucuauguc

SEQ ID NO: 200072 - RNA, 19 nt, Artificial Sequence
  Description of Artificial Sequence: Synthetic oligonucleotide
  Sense strand starting at position 397 of SEQ ID NO: 2579
uuguaagagguaugaacau

SEQ ID NO: 200073 - RNA, 19 nt, Artificial Sequence
  Description of Artificial Sequence: Synthetic oligonucleotide
  Antisense strand to SEQ ID NO: 200072
auguucauaccucuuacaa

SEQ ID NO: 200074 - RNA, 19 nt, Artificial Sequence
  Description of Artificial Sequence: Synthetic oligonucleotide
  Sense strand starting at position 426 of SEQ ID NO: 2579
cugaacugaccucagcaua

SEQ ID NO: 200075 - RNA, 19 nt, Artificial Sequence
  Description of Artificial Sequence: Synthetic oligonucleotide
  Antisense strand to SEQ ID NO: 200074
uaugcugaggucaguucag

SEQ ID NO: 200076 - RNA, 19 nt, Artificial Sequence
  Description of Artificial Sequence: Synthetic oligonucleotide
  Sense strand starting at position 459 of SEQ ID NO: 2579
uugauuagggaacgcuaau

SEQ ID NO: 200077 - RNA, 19 nt, Artificial Sequence
  Description of Artificial Sequence: Synthetic oligonucleotide
  Antisense strand to SEQ ID NO: 200076
auuagcguucccuaaucaa

SEQ ID NO: 200078 - RNA, 19 nt, Artificial Sequence
  Description of Artificial Sequence: Synthetic oligonucleotide
  Sense strand starting at position 697 of SEQ ID NO: 2579
caaggaaguuaucucaugu

SEQ ID NO: 200079 - RNA, 19 nt, Artificial Sequence
  Description of Artificial Sequence: Synthetic oligonucleotide
  Antisense strand to SEQ ID NO: 200078
acaugagauaacuuccuug

SEQ ID NO: 200080 - RNA, 19 nt, Artificial Sequence
  Description of Artificial Sequence: Synthetic oligonucleotide
  Sense strand starting at position 703 of SEQ ID NO: 2579
aguuaucucauguaugggu

SEQ ID NO: 200081 - RNA, 19 nt, Artificial Sequence
  Description of Artificial Sequence: Synthetic oligonucleotide
  Antisense strand to SEQ ID NO: 200080
acccauacaugagauaacu

SEQ ID NO: 200082 - RNA, 19 nt, Artificial Sequence
  Description of Artificial Sequence: Synthetic oligonucleotide
  Sense strand starting at position 707 of SEQ ID NO: 2579
aucucauguaugggugaga

SEQ ID NO: 200083 - RNA, 19 nt, Artificial Sequence
  Description of Artificial Sequence: Synthetic oligonucleotide
  Antisense strand to SEQ ID NO: 200082
ucucacccauacaugagau

SEQ ID NO: 200084 - RNA, 19 nt, Artificial Sequence
  Description of Artificial Sequence: Synthetic oligonucleotide
  Sense strand starting at position 708 of SEQ ID NO: 2579
ucucauguaugggugagau

SEQ ID NO: 200085 - RNA, 19 nt, Artificial Sequence
  Description of Artificial Sequence: Synthetic oligonucleotide
  Antisense strand to SEQ ID NO: 200084
aucucacccauacaugaga

SEQ ID NO: 200086 - RNA, 19 nt, Artificial Sequence
  Description of Artificial Sequence: Synthetic oligonucleotide
  Sense strand starting at position 710 of SEQ ID NO: 2579
ucauguaugggugagauac

SEQ ID NO: 200087 - RNA, 19 nt, Artificial Sequence
  Description of Artificial Sequence: Synthetic oligonucleotide
  Antisense strand to SEQ ID NO: 200086
guaucucacccauacauga

SEQ ID NO: 200088 - RNA, 19 nt, Artificial Sequence
  Description of Artificial Sequence: Synthetic oligonucleotide
  Sense strand starting at position 767 of SEQ ID NO: 2579
ugugaauuacugugaccaa

SEQ ID NO: 200089 - RNA, 19 nt, Artificial Sequence
  Description of Artificial Sequence: Synthetic oligonucleotide
  Antisense strand to SEQ ID NO: 200088
uuggucacaguaauucaca

SEQ ID NO: 200090 - RNA, 19 nt, Artificial Sequence
  Description of Artificial Sequence: Synthetic oligonucleotide
  Sense strand starting at position 779 of SEQ ID NO: 2579
ugaccaauuuagcaauaga

SEQ ID NO: 200091 - RNA, 19 nt, Artificial Sequence
  Description of Artificial Sequence: Synthetic oligonucleotide
  Antisense strand to SEQ ID NO: 200090
ucuauugcuaaauugguca

SEQ ID NO: 200092 - RNA, 19 nt, Artificial Sequence
  Description of Artificial Sequence: Synthetic oligonucleotide
  Sense strand starting at position 847 of SEQ ID NO: 2579
guaucacuaucaucauuag

SEQ ID NO: 200093 - RNA, 19 nt, Artificial Sequence
  Description of Artificial Sequence: Synthetic oligonucleotide
  Antisense strand to SEQ ID NO: 200092
cuaaugaugauagugauac

SEQ ID NO: 200094 - RNA, 19 nt, Artificial Sequence
  Description of Artificial Sequence: Synthetic oligonucleotide
  Sense strand starting at position 1123 of SEQ ID NO: 2579
ugaauuuacuuacagauug

SEQ ID NO: 200095 - RNA, 19 nt, Artificial Sequence
  Description of Artificial Sequence: Synthetic oligonucleotide
  Antisense strand to SEQ ID NO: 200094
caaucuguaaguaaauuca

SEQ ID NO: 200096 - RNA, 19 nt, Artificial Sequence
  Description of Artificial Sequence: Synthetic oligonucleotide
  Sense strand starting at position 1194 of SEQ ID NO: 2579
auggaugaguuuccaaaca

SEQ ID NO: 200097 - RNA, 19 nt, Artificial Sequence
  Description of Artificial Sequence: Synthetic oligonucleotide
  Antisense strand to SEQ ID NO: 200096
uguuuggaaacucauccau

SEQ ID NO: 200098 - RNA, 19 nt, Artificial Sequence
  Description of Artificial Sequence: Synthetic oligonucleotide
  Sense strand starting at position 1262 of SEQ ID NO: 2579
agccuuaaaucauccgaag

SEQ ID NO: 200099 - RNA, 19 nt, Artificial Sequence
  Description of Artificial Sequence: Synthetic oligonucleotide
  Antisense strand to SEQ ID NO: 200098
cuucggaugauuuaaggcu

SEQ ID NO: 200100 - RNA, 19 nt, Artificial Sequence
  Description of Artificial Sequence: Synthetic oligonucleotide
  Sense strand starting at position 1406 of SEQ ID NO: 2579
ucagauuugcugcgagauc

SEQ ID NO: 200101 - RNA, 19 nt, Artificial Sequence
  Description of Artificial Sequence: Synthetic oligonucleotide
  Antisense strand to SEQ ID NO: 200100
gaucucgcagcaaaucuga

SEQ ID NO: 200102 - RNA, 19 nt, Artificial Sequence
  Description of Artificial Sequence: Synthetic oligonucleotide
  Sense strand starting at position 2075 of SEQ ID NO: 2579
ugagcacucuuucuugaga

SEQ ID NO: 200103 - RNA, 19 nt, Artificial Sequence
  Description of Artificial Sequence: Synthetic oligonucleotide
  Antisense strand to SEQ ID NO: 200102
ucucaagaaagagugcuca

SEQ ID NO: 200104 - RNA, 19 nt, Artificial Sequence
  Description of Artificial Sequence: Synthetic oligonucleotide
  Sense strand starting at position 2328 of SEQ ID NO: 2579
aggugcucaggauaaaguu

SEQ ID NO: 200105 - RNA, 19 nt, Artificial Sequence
  Description of Artificial Sequence: Synthetic oligonucleotide
  Antisense strand to SEQ ID NO: 200104
aacuuuauccugagcaccu

SEQ ID NO: 200106 - RNA, 19 nt, Artificial Sequence
  Description of Artificial Sequence: Synthetic oligonucleotide
  Sense strand starting at position 2461 of SEQ ID NO: 2579
gggugugggcuuuagaauc

SEQ ID NO: 200107 - RNA, 19 nt, Artificial Sequence
  Description of Artificial Sequence: Synthetic oligonucleotide
  Antisense strand to SEQ ID NO: 200106
gauucuaaagcccacaccc

SEQ ID NO: 200108 - RNA, 19 nt, Artificial Sequence
  Description of Artificial Sequence: Synthetic oligonucleotide
  Sense strand starting at position 2543 of SEQ ID NO: 2579
gcaacugaaucuuuccaga

SEQ ID NO: 200109 - RNA, 19 nt, Artificial Sequence
  Description of Artificial Sequence: Synthetic oligonucleotide
  Antisense strand to SEQ ID NO: 200108
ucuggaaagauucaguugc

SEQ ID NO: 200110 - RNA, 19 nt, Artificial Sequence
  Description of Artificial Sequence: Synthetic oligonucleotide
  Sense strand starting at position 2562 of SEQ ID NO: 2579
ccuuaauguccucaucagu

SEQ ID NO: 200111 - RNA, 19 nt, Artificial Sequence
  Description of Artificial Sequence: Synthetic oligonucleotide
  Antisense strand to SEQ ID NO: 200110
acugaugaggacauuaagg

SEQ ID NO: 200112 - RNA, 19 nt, Artificial Sequence
  Description of Artificial Sequence: Synthetic oligonucleotide
  Sense strand starting at position 2770 of SEQ ID NO: 2579
gaaacagaucacugguagu

SEQ ID NO: 200113 - RNA, 19 nt, Artificial Sequence
  Description of Artificial Sequence: Synthetic oligonucleotide
  Antisense strand to SEQ ID NO: 200112
acuaccagugaucuguuuc

SEQ ID NO: 200114 - RNA, 19 nt, Artificial Sequence
  Description of Artificial Sequence: Synthetic oligonucleotide
  Sense strand starting at position 2776 of SEQ ID NO: 2579
gaucacugguagucaaauc

SEQ ID NO: 200115 - RNA, 19 nt, Artificial Sequence
  Description of Artificial Sequence: Synthetic oligonucleotide
  Antisense strand to SEQ ID NO: 200114
gauuugacuaccagugauc

SEQ ID NO: 200116 - RNA, 19 nt, Artificial Sequence
  Description of Artificial Sequence: Synthetic oligonucleotide
  Sense strand starting at position 2818 of SEQ ID NO: 2579
uggacaaguuucuugacca

SEQ ID NO: 200117 - RNA, 19 nt, Artificial Sequence
  Description of Artificial Sequence: Synthetic oligonucleotide
  Antisense strand to SEQ ID NO: 200116
uggucaagaaacuugucca

SEQ ID NO: 200118 - RNA, 19 nt, Artificial Sequence
  Description of Artificial Sequence: Synthetic oligonucleotide
  Sense strand starting at position 2866 of SEQ ID NO: 2579
gggcaaauaauagggcuua

SEQ ID NO: 200119 - RNA, 19 nt, Artificial Sequence
  Description of Artificial Sequence: Synthetic oligonucleotide
  Antisense strand to SEQ ID NO: 200118
uaagcccuauuauuugccc

SEQ ID NO: 200120 - RNA, 19 nt, Artificial Sequence
  Description of Artificial Sequence: Synthetic oligonucleotide
  Sense strand starting at position 2893 of SEQ ID NO: 2579
gcuguugugaggcuuuagu

SEQ ID NO: 200121 - RNA, 19 nt, Artificial Sequence
  Description of Artificial Sequence: Synthetic oligonucleotide
  Antisense strand to SEQ ID NO: 200120
acuaaagccucacaacagc

SEQ ID NO: 200122 - RNA, 19 nt, Artificial Sequence
  Description of Artificial Sequence: Synthetic oligonucleotide
  Sense strand starting at position 2922 of SEQ ID NO: 2579
guacaaagugcucagaaca

SEQ ID NO: 200123 - RNA, 19 nt, Artificial Sequence
  Description of Artificial Sequence: Synthetic oligonucleotide
  Antisense strand to SEQ ID NO: 200122
uguucugagcacuuuguac

SEQ ID NO: 200124 - RNA, 19 nt, Artificial Sequence
  Description of Artificial Sequence: Synthetic oligonucleotide
  Sense strand starting at position 2997 of SEQ ID NO: 2579
ccuagaugacucugucaua

SEQ ID NO: 200125 - RNA, 19 nt, Artificial Sequence
  Description of Artificial Sequence: Synthetic oligonucleotide
  Antisense strand to SEQ ID NO: 200124
uaugacagagucaucuagg

SEQ ID NO: 200126 - RNA, 19 nt, Artificial Sequence
  Description of Artificial Sequence: Synthetic oligonucleotide
  Sense strand starting at position 2998 of SEQ ID NO: 2579
cuagaugacucugucauac

SEQ ID NO: 200127 - RNA, 19 nt, Artificial Sequence
  Description of Artificial Sequence: Synthetic oligonucleotide
  Antisense strand to SEQ ID NO: 200126
guaugacagagucaucuag

SEQ ID NO: 200128 - RNA, 19 nt, Artificial Sequence
  Description of Artificial Sequence: Synthetic oligonucleotide
  Sense strand starting at position 3096 of SEQ ID NO: 2579
agagaauguccacaagcuu

SEQ ID NO: 200129 - RNA, 19 nt, Artificial Sequence
  Description of Artificial Sequence: Synthetic oligonucleotide
  Antisense strand to SEQ ID NO: 200128
aagcuuguggacauucucu

SEQ ID NO: 200130 - RNA, 19 nt, Artificial Sequence
  Description of Artificial Sequence: Synthetic oligonucleotide
  Sense strand starting at position 3148 of SEQ ID NO: 2579
agcuguaucccugaccuua

SEQ ID NO: 200131 - RNA, 19 nt, Artificial Sequence
  Description of Artificial Sequence: Synthetic oligonucleotide
  Antisense strand to SEQ ID NO: 200130
uaaggucagggauacagcu

SEQ ID NO: 200132 - RNA, 19 nt, Artificial Sequence
  Description of Artificial Sequence: Synthetic oligonucleotide
  Sense strand starting at position 3361 of SEQ ID NO: 2579
guaagaauugucuaacuug

SEQ ID NO: 200133 - RNA, 19 nt, Artificial Sequence
  Description of Artificial Sequence: Synthetic oligonucleotide
  Antisense strand to SEQ ID NO: 200132
caaguuagacaauucuuac

SEQ ID NO: 200134 - RNA, 19 nt, Artificial Sequence
  Description of Artificial Sequence: Synthetic oligonucleotide
  Sense strand starting at position 3364 of SEQ ID NO: 2579
agaauugucuaacuugcaa

SEQ ID NO: 200135 - RNA, 19 nt, Artificial Sequence
  Description of Artificial Sequence: Synthetic oligonucleotide
  Antisense strand to SEQ ID NO: 200134
uugcaaguuagacaauucu

SEQ ID NO: 200136 - RNA, 19 nt, Artificial Sequence
  Description of Artificial Sequence: Synthetic oligonucleotide
  Sense strand starting at position 3784 of SEQ ID NO: 2579
agaugauuccaauguguau

SEQ ID NO: 200137 - RNA, 19 nt, Artificial Sequence
  Description of Artificial Sequence: Synthetic oligonucleotide
  Antisense strand to SEQ ID NO: 200136
auacacauuggaaucaucu

SEQ ID NO: 200138 - RNA, 19 nt, Artificial Sequence
  Description of Artificial Sequence: Synthetic oligonucleotide
  Sense strand starting at position 3835 of SEQ ID NO: 2579
auggaucucugcuuagauc

SEQ ID NO: 200139 - RNA, 19 nt, Artificial Sequence
  Description of Artificial Sequence: Synthetic oligonucleotide
  Antisense strand to SEQ ID NO: 200138
gaucuaagcagagauccau

SEQ ID NO: 200140 - RNA, 19 nt, Artificial Sequence
  Description of Artificial Sequence: Synthetic oligonucleotide
  Sense strand starting at position 3836 of SEQ ID NO: 2579
uggaucucugcuuagaucu

SEQ ID NO: 200141 - RNA, 19 nt, Artificial Sequence
  Description of Artificial Sequence: Synthetic oligonucleotide
  Antisense strand to SEQ ID NO: 200140
agaucuaagcagagaucca

SEQ ID NO: 200142 - RNA, 19 nt, Artificial Sequence
  Description of Artificial Sequence: Synthetic oligonucleotide
  Sense strand starting at position 63 of SEQ ID NO: 2580
acaugaguucuaggugggu

SEQ ID NO: 200143 - RNA, 19 nt, Artificial Sequence
  Description of Artificial Sequence: Synthetic oligonucleotide
  Antisense strand to SEQ ID NO: 200142
acccaccuagaacucaugu

SEQ ID NO: 200144 - RNA, 19 nt, Artificial Sequence
  Description of Artificial Sequence: Synthetic oligonucleotide
  Sense strand starting at position 65 of SEQ ID NO: 2580
augaguucuagguggguga

SEQ ID NO: 200145 - RNA, 19 nt, Artificial Sequence
  Description of Artificial Sequence: Synthetic oligonucleotide
  Antisense strand to SEQ ID NO: 200144
ucacccaccuagaacucau

SEQ ID NO: 200146 - RNA, 19 nt, Artificial Sequence
  Description of Artificial Sequence: Synthetic oligonucleotide
  Sense strand starting at position 91 of SEQ ID NO: 2580
gcuggaugcccugagacau

SEQ ID NO: 200147 - RNA, 19 nt, Artificial Sequence
  Description of Artificial Sequence: Synthetic oligonucleotide
  Antisense strand to SEQ ID NO: 200146
augucucagggcauccagc

SEQ ID NO: 200148 - RNA, 19 nt, Artificial Sequence
  Description of Artificial Sequence: Synthetic oligonucleotide
  Sense strand starting at position 124 of SEQ ID NO: 2580
ggguccuggcguaauuguu

SEQ ID NO: 200149 - RNA, 19 nt, Artificial Sequence
  Description of Artificial Sequence: Synthetic oligonucleotide
  Antisense strand to SEQ ID NO: 200148
aacaauuacgccaggaccc

SEQ ID NO: 200150 - RNA, 19 nt, Artificial Sequence
  Description of Artificial Sequence: Synthetic oligonucleotide
  Sense strand starting at position 264 of SEQ ID NO: 2580
aggaaauccuguuugcucu

SEQ ID NO: 200151 - RNA, 19 nt, Artificial Sequence
  Description of Artificial Sequence: Synthetic oligonucleotide
  Antisense strand to SEQ ID NO: 200150
agagcaaacaggauuuccu

SEQ ID NO: 200152 - RNA, 19 nt, Artificial Sequence
  Description of Artificial Sequence: Synthetic oligonucleotide
  Sense strand starting at position 810 of SEQ ID NO: 2580
cccuuaacucgugacaucu

SEQ ID NO: 200153 - RNA, 19 nt, Artificial Sequence
  Description of Artificial Sequence: Synthetic oligonucleotide
  Antisense strand to SEQ ID NO: 200152
agaugucacgaguuaaggg

SEQ ID NO: 200154 - RNA, 19 nt, Artificial Sequence
  Description of Artificial Sequence: Synthetic oligonucleotide
  Sense strand starting at position 991 of SEQ ID NO: 2580
caguguguggcauauaaua

SEQ ID NO: 200155 - RNA, 19 nt, Artificial Sequence
  Description of Artificial Sequence: Synthetic oligonucleotide
  Antisense strand to SEQ ID NO: 200154
uauuauaugccacacacug

SEQ ID NO: 200156 - RNA, 19 nt, Artificial Sequence
  Description of Artificial Sequence: Synthetic oligonucleotide
  Sense strand starting at position 993 of SEQ ID NO: 2580
guguguggcauauaauaaa

SEQ ID NO: 200157 - RNA, 19 nt, Artificial Sequence
  Description of Artificial Sequence: Synthetic oligonucleotide
  Antisense strand to SEQ ID NO: 200156
uuuauuauaugccacacac

SEQ ID NO: 200158 - RNA, 19 nt, Artificial Sequence
  Description of Artificial Sequence: Synthetic oligonucleotide
  Sense strand starting at position 1098 of SEQ ID NO: 2580
gacugagugucacuaccau

SEQ ID NO: 200159 - RNA, 19 nt, Artificial Sequence
  Description of Artificial Sequence: Synthetic oligonucleotide
  Antisense strand to SEQ ID NO: 200158
augguagugacacucaguc

SEQ ID NO: 200160 - RNA, 19 nt, Artificial Sequence
  Description of Artificial Sequence: Synthetic oligonucleotide
  Sense strand starting at position 1138 of SEQ ID NO: 2580
gacucagagccauguguag

SEQ ID NO: 200161 - RNA, 19 nt, Artificial Sequence
  Description of Artificial Sequence: Synthetic oligonucleotide
  Antisense strand to SEQ ID NO: 200160
cuacacauggcucugaguc

SEQ ID NO: 200162 - RNA, 19 nt, Artificial Sequence
  Description of Artificial Sequence: Synthetic oligonucleotide
  Sense strand starting at position 1142 of SEQ ID NO: 2580
cagagccauguguaggaaa

SEQ ID NO: 200163 - RNA, 19 nt, Artificial Sequence
  Description of Artificial Sequence: Synthetic oligonucleotide
  Antisense strand to SEQ ID NO: 200162
uuuccuacacauggcucug

SEQ ID NO: 200164 - RNA, 19 nt, Artificial Sequence
  Description of Artificial Sequence: Synthetic oligonucleotide
  Sense strand starting at position 1144 of SEQ ID NO: 2580
gagccauguguaggaaacu

SEQ ID NO: 200165 - RNA, 19 nt, Artificial Sequence
  Description of Artificial Sequence: Synthetic oligonucleotide
  Antisense strand to SEQ ID NO: 200164
aguuuccuacacauggcuc

SEQ ID NO: 200166 - RNA, 19 nt, Artificial Sequence
  Description of Artificial Sequence: Synthetic oligonucleotide
  Sense strand starting at position 1189 of SEQ ID NO: 2580
ggaggaccacucugucauc

SEQ ID NO: 200167 - RNA, 19 nt, Artificial Sequence
  Description of Artificial Sequence: Synthetic oligonucleotide
  Antisense strand to SEQ ID NO: 200166
gaugacagagugguccucc

SEQ ID NO: 200168 - RNA, 19 nt, Artificial Sequence
  Description of Artificial Sequence: Synthetic oligonucleotide
  Sense strand starting at position 1210 of SEQ ID NO: 2580
ugcaacucaguuuauguau

SEQ ID NO: 200169 - RNA, 19 nt, Artificial Sequence
  Description of Artificial Sequence: Synthetic oligonucleotide
  Antisense strand to SEQ ID NO: 200168
auacauaaacugaguugca

SEQ ID NO: 200170 - RNA, 19 nt, Artificial Sequence
  Description of Artificial Sequence: Synthetic oligonucleotide
  Sense strand starting at position 1299 of SEQ ID NO: 2580
cugugaguuuaagugaaau

SEQ ID NO: 200171 - RNA, 19 nt, Artificial Sequence
  Description of Artificial Sequence: Synthetic oligonucleotide
  Antisense strand to SEQ ID NO: 200170
auuucacuuaaacucacag

SEQ ID NO: 200172 - RNA, 19 nt, Artificial Sequence
  Description of Artificial Sequence: Synthetic oligonucleotide
  Sense strand starting at position 1346 of SEQ ID NO: 2580
gugccuuaugaacgggaca

SEQ ID NO: 200173 - RNA, 19 nt, Artificial Sequence
  Description of Artificial Sequence: Synthetic oligonucleotide
  Antisense strand to SEQ ID NO: 200172
ugucccguucauaaggcac

SEQ ID NO: 200174 - RNA, 19 nt, Artificial Sequence
  Description of Artificial Sequence: Synthetic oligonucleotide
  Sense strand starting at position 1347 of SEQ ID NO: 2580
ugccuuaugaacgggacaa

SEQ ID NO: 200175 - RNA, 19 nt, Artificial Sequence
  Description of Artificial Sequence: Synthetic oligonucleotide
  Antisense strand to SEQ ID NO: 200174
uugucccguucauaaggca

SEQ ID NO: 200176 - RNA, 19 nt, Artificial Sequence
  Description of Artificial Sequence: Synthetic oligonucleotide
  Sense strand starting at position 1348 of SEQ ID NO: 2580
gccuuaugaacgggacaaa

SEQ ID NO: 200177 - RNA, 19 nt, Artificial Sequence
  Description of Artificial Sequence: Synthetic oligonucleotide
  Antisense strand to SEQ ID NO: 200176
uuugucccguucauaaggc

SEQ ID NO: 200178 - RNA, 19 nt, Artificial Sequence
  Description of Artificial Sequence: Synthetic oligonucleotide
  Sense strand starting at position 2286 of SEQ ID NO: 2580
uccuaugaccuuuacaguu

SEQ ID NO: 200179 - RNA, 19 nt, Artificial Sequence
  Description of Artificial Sequence: Synthetic oligonucleotide
  Antisense strand to SEQ ID NO: 200178
aacuguaaaggucauagga

SEQ ID NO: 200180 - RNA, 19 nt, Artificial Sequence
  Description of Artificial Sequence: Synthetic oligonucleotide
  Sense strand starting at position 2309 of SEQ ID NO: 2580
cgucacugccaauagaacu

SEQ ID NO: 200181 - RNA, 19 nt, Artificial Sequence
  Description of Artificial Sequence: Synthetic oligonucleotide
  Antisense strand to SEQ ID NO: 200180
aguucuauuggcagugacg

SEQ ID NO: 200182 - RNA, 19 nt, Artificial Sequence
  Description of Artificial Sequence: Synthetic oligonucleotide
  Sense strand starting at position 2448 of SEQ ID NO: 2580
acaucuugucuccauggua

SEQ ID NO: 200183 - RNA, 19 nt, Artificial Sequence
  Description of Artificial Sequence: Synthetic oligonucleotide
  Antisense strand to SEQ ID NO: 200182
uaccauggagacaagaugu

SEQ ID NO: 200184 - RNA, 19 nt, Artificial Sequence
  Description of Artificial Sequence: Synthetic oligonucleotide
  Sense strand starting at position 2656 of SEQ ID NO: 2580
ccaaguguugcuggaggaa

SEQ ID NO: 200185 - RNA, 19 nt, Artificial Sequence
  Description of Artificial Sequence: Synthetic oligonucleotide
  Antisense strand to SEQ ID NO: 200184
uuccuccagcaacacuugg

SEQ ID NO: 200186 - RNA, 19 nt, Artificial Sequence
  Description of Artificial Sequence: Synthetic oligonucleotide
  Sense strand starting at position 2944 of SEQ ID NO: 2580
ccuggucaaagguaaguau

SEQ ID NO: 200187 - RNA, 19 nt, Artificial Sequence
  Description of Artificial Sequence: Synthetic oligonucleotide
  Antisense strand to SEQ ID NO: 200186
auacuuaccuuugaccagg

SEQ ID NO: 200188 - RNA, 19 nt, Artificial Sequence
  Description of Artificial Sequence: Synthetic oligonucleotide
  Sense strand starting at position 3017 of SEQ ID NO: 2580
gggagucaucacugagagc

SEQ ID NO: 200189 - RNA, 19 nt, Artificial Sequence
  Description of Artificial Sequence: Synthetic oligonucleotide
  Antisense strand to SEQ ID NO: 200188
gcucucagugaugacuccc

SEQ ID NO: 200190 - RNA, 19 nt, Artificial Sequence
  Description of Artificial Sequence: Synthetic oligonucleotide
  Sense strand starting at position 3018 of SEQ ID NO: 2580
ggagucaucacugagagcu

SEQ ID NO: 200191 - RNA, 19 nt, Artificial Sequence
  Description of Artificial Sequence: Synthetic oligonucleotide
  Antisense strand to SEQ ID NO: 200190
agcucucagugaugacucc

SEQ ID NO: 200192 - RNA, 19 nt, Artificial Sequence
  Description of Artificial Sequence: Synthetic oligonucleotide
  Sense strand starting at position 3328 of SEQ ID NO: 2580
ccauauuuauguccacgua

SEQ ID NO: 200193 - RNA, 19 nt, Artificial Sequence
  Description of Artificial Sequence: Synthetic oligonucleotide
  Antisense strand to SEQ ID NO: 200192
uacguggacauaaauaugg

SEQ ID NO: 200194 - RNA, 19 nt, Artificial Sequence
  Description of Artificial Sequence: Synthetic oligonucleotide
  Sense strand starting at position 3399 of SEQ ID NO: 2580
cuguuucugaguuaguuag

SEQ ID NO: 200195 - RNA, 19 nt, Artificial Sequence
  Description of Artificial Sequence: Synthetic oligonucleotide
  Antisense strand to SEQ ID NO: 200194
cuaacuaacucagaaacag

SEQ ID NO: 200196 - RNA, 19 nt, Artificial Sequence
  Description of Artificial Sequence: Synthetic oligonucleotide
  Sense strand starting at position 3401 of SEQ ID NO: 2580
guuucugaguuaguuagga

SEQ ID NO: 200197 - RNA, 19 nt, Artificial Sequence
  Description of Artificial Sequence: Synthetic oligonucleotide
  Antisense strand to SEQ ID NO: 200196
uccuaacuaacucagaaac

SEQ ID NO: 200198 - RNA, 19 nt, Artificial Sequence
  Description of Artificial Sequence: Synthetic oligonucleotide
  Sense strand starting at position 3568 of SEQ ID NO: 2580
auuacagagucuuucugua

SEQ ID NO: 200199 - RNA, 19 nt, Artificial Sequence
  Description of Artificial Sequence: Synthetic oligonucleotide
  Antisense strand to SEQ ID NO: 200198
uacagaaagacucuguaau

SEQ ID NO: 200200 - RNA, 19 nt, Artificial Sequence
  Description of Artificial Sequence: Synthetic oligonucleotide
  Sense strand starting at position 3573 of SEQ ID NO: 2580
agagucuuucuguagcuau

SEQ ID NO: 200201 - RNA, 19 nt, Artificial Sequence
  Description of Artificial Sequence: Synthetic oligonucleotide
  Antisense strand to SEQ ID NO: 200200
auagcuacagaaagacucu

SEQ ID NO: 200202 - RNA, 19 nt, Artificial Sequence
  Description of Artificial Sequence: Synthetic oligonucleotide
  Sense strand starting at position 3592 of SEQ ID NO: 2580
cuccaauuguaucuggagu

SEQ ID NO: 200203 - RNA, 19 nt, Artificial Sequence
  Description of Artificial Sequence: Synthetic oligonucleotide
  Antisense strand to SEQ ID NO: 200202
acuccagauacaauuggag

SEQ ID NO: 200204 - RNA, 19 nt, Artificial Sequence
  Description of Artificial Sequence: Synthetic oligonucleotide
  Sense strand starting at position 3644 of SEQ ID NO: 2580
caauauugcugucugaaga

SEQ ID NO: 200205 - RNA, 19 nt, Artificial Sequence
  Description of Artificial Sequence: Synthetic oligonucleotide
  Antisense strand to SEQ ID NO: 200204
ucuucagacagcaauauug

SEQ ID NO: 200206 - RNA, 19 nt, Artificial Sequence
  Description of Artificial Sequence: Synthetic oligonucleotide
  Sense strand starting at position 3645 of SEQ ID NO: 2580
aauauugcugucugaagag

SEQ ID NO: 200207 - RNA, 19 nt, Artificial Sequence
  Description of Artificial Sequence: Synthetic oligonucleotide
  Antisense strand to SEQ ID NO: 200206
cucuucagacagcaauauu

SEQ ID NO: 200208 - RNA, 19 nt, Artificial Sequence
  Description of Artificial Sequence: Synthetic oligonucleotide
  Sense strand starting at position 3660 of SEQ ID NO: 2580
agaggacuccacuguaacu

SEQ ID NO: 200209 - RNA, 19 nt, Artificial Sequence
  Description of Artificial Sequence: Synthetic oligonucleotide
  Antisense strand to SEQ ID NO: 200208
aguuacaguggaguccucu

SEQ ID NO: 200210 - RNA, 19 nt, Artificial Sequence
  Description of Artificial Sequence: Synthetic oligonucleotide
  Sense strand starting at position 3701 of SEQ ID NO: 2580
gggucugaguucccauaau

SEQ ID NO: 200211 - RNA, 19 nt, Artificial Sequence
  Description of Artificial Sequence: Synthetic oligonucleotide
  Antisense strand to SEQ ID NO: 200210
auuaugggaacucagaccc

SEQ ID NO: 200212 - RNA, 19 nt, Artificial Sequence
  Description of Artificial Sequence: Synthetic oligonucleotide
  Sense strand starting at position 3779 of SEQ ID NO: 2580
gaggucauacuagguugua

SEQ ID NO: 200213 - RNA, 19 nt, Artificial Sequence
  Description of Artificial Sequence: Synthetic oligonucleotide
  Antisense strand to SEQ ID NO: 200212
uacaaccuaguaugaccuc

SEQ ID NO: 200214 - RNA, 19 nt, Artificial Sequence
  Description of Artificial Sequence: Synthetic oligonucleotide
  Sense strand starting at position 3780 of SEQ ID NO: 2580
aggucauacuagguuguau

SEQ ID NO: 200215 - RNA, 19 nt, Artificial Sequence
  Description of Artificial Sequence: Synthetic oligonucleotide
  Antisense strand to SEQ ID NO: 200214
auacaaccuaguaugaccu

SEQ ID NO: 200216 - RNA, 19 nt, Artificial Sequence
  Description of Artificial Sequence: Synthetic oligonucleotide
  Sense strand starting at position 3792 of SEQ ID NO: 2580
guuguaucccacguugcaa

SEQ ID NO: 200217 - RNA, 19 nt, Artificial Sequence
  Description of Artificial Sequence: Synthetic oligonucleotide
  Antisense strand to SEQ ID NO: 200216
uugcaacgugggauacaac

SEQ ID NO: 200218 - RNA, 19 nt, Artificial Sequence
  Description of Artificial Sequence: Synthetic oligonucleotide
  Sense strand starting at position 3845 of SEQ ID NO: 2580
ucaucacaagagugcuuau

SEQ ID NO: 200219 - RNA, 19 nt, Artificial Sequence
  Description of Artificial Sequence: Synthetic oligonucleotide
  Antisense strand to SEQ ID NO: 200218
auaagcacucuugugauga

SEQ ID NO: 200220 - RNA, 19 nt, Artificial Sequence
  Description of Artificial Sequence: Synthetic oligonucleotide
  Sense strand starting at position 3852 of SEQ ID NO: 2580
aagagugcuuaugcucaga

SEQ ID NO: 200221 - RNA, 19 nt, Artificial Sequence
  Description of Artificial Sequence: Synthetic oligonucleotide
  Antisense strand to SEQ ID NO: 200220
ucugagcauaagcacucuu

SEQ ID NO: 200222 - RNA, 19 nt, Artificial Sequence
  Description of Artificial Sequence: Synthetic oligonucleotide
  Sense strand starting at position 234 of SEQ ID NO: 2581
uagggaaguuucucaacca

SEQ ID NO: 200223 - RNA, 19 nt, Artificial Sequence
  Description of Artificial Sequence: Synthetic oligonucleotide
  Antisense strand to SEQ ID NO: 200222
ugguugagaaacuucccua

SEQ ID NO: 200224 - RNA, 19 nt, Artificial Sequence
  Description of Artificial Sequence: Synthetic oligonucleotide
  Sense strand starting at position 254 of SEQ ID NO: 2581
acugaaugaugugugauua

SEQ ID NO: 200225 - RNA, 19 nt, Artificial Sequence
  Description of Artificial Sequence: Synthetic oligonucleotide
  Antisense strand to SEQ ID NO: 200224
uaaucacacaucauucagu

SEQ ID NO: 200226 - RNA, 19 nt, Artificial Sequence
  Description of Artificial Sequence: Synthetic oligonucleotide
  Sense strand starting at position 255 of SEQ ID NO: 2581
cugaaugaugugugauuau

SEQ ID NO: 200227 - RNA, 19 nt, Artificial Sequence
  Description of Artificial Sequence: Synthetic oligonucleotide
  Antisense strand to SEQ ID NO: 200226
auaaucacacaucauucag

SEQ ID NO: 200228 - RNA, 19 nt, Artificial Sequence
  Description of Artificial Sequence: Synthetic oligonucleotide
  Sense strand starting at position 309 of SEQ ID NO: 2581
ccuuauguucuugaggcua

SEQ ID NO: 200229 - RNA, 19 nt, Artificial Sequence
  Description of Artificial Sequence: Synthetic oligonucleotide
  Antisense strand to SEQ ID NO: 200228
uagccucaagaacauaagg

SEQ ID NO: 200230 - RNA, 19 nt, Artificial Sequence
  Description of Artificial Sequence: Synthetic oligonucleotide
  Sense strand starting at position 432 of SEQ ID NO: 2581
accucugaucuuugacaga

SEQ ID NO: 200231 - RNA, 19 nt, Artificial Sequence
  Description of Artificial Sequence: Synthetic oligonucleotide
  Antisense strand to SEQ ID NO: 200230
ucugucaaagaucagaggu

SEQ ID NO: 200232 - RNA, 19 nt, Artificial Sequence
  Description of Artificial Sequence: Synthetic oligonucleotide
  Sense strand starting at position 512 of SEQ ID NO: 2581
gggcaacagggcugauaaa

SEQ ID NO: 200233 - RNA, 19 nt, Artificial Sequence
  Description of Artificial Sequence: Synthetic oligonucleotide
  Antisense strand to SEQ ID NO: 200232
uuuaucagcccuguugccc

SEQ ID NO: 200234 - RNA, 19 nt, Artificial Sequence
  Description of Artificial Sequence: Synthetic oligonucleotide
  Sense strand starting at position 532 of SEQ ID NO: 2581
ggaauugucaacggaaagg

SEQ ID NO: 200235 - RNA, 19 nt, Artificial Sequence
  Description of Artificial Sequence: Synthetic oligonucleotide
  Antisense strand to SEQ ID NO: 200234
ccuuuccguugacaauucc

SEQ ID NO: 200236 - RNA, 19 nt, Artificial Sequence
  Description of Artificial Sequence: Synthetic oligonucleotide
  Sense strand starting at position 1013 of SEQ ID NO: 2581
gagguuggccuggaaugua

SEQ ID NO: 200237 - RNA, 19 nt, Artificial Sequence
  Description of Artificial Sequence: Synthetic oligonucleotide
  Antisense strand to SEQ ID NO: 200236
uacauuccaggccaaccuc

SEQ ID NO: 200238 - RNA, 19 nt, Artificial Sequence
  Description of Artificial Sequence: Synthetic oligonucleotide
  Sense strand starting at position 1043 of SEQ ID NO: 2581
cacauugguuggccauaaa

SEQ ID NO: 200239 - RNA, 19 nt, Artificial Sequence
  Description of Artificial Sequence: Synthetic oligonucleotide
  Antisense strand to SEQ ID NO: 200238
uuuauggccaaccaaugug

SEQ ID NO: 200240 - RNA, 19 nt, Artificial Sequence
  Description of Artificial Sequence: Synthetic oligonucleotide
  Sense strand starting at position 1046 of SEQ ID NO: 2581
auugguuggccauaaagau

SEQ ID NO: 200241 - RNA, 19 nt, Artificial Sequence
  Description of Artificial Sequence: Synthetic oligonucleotide
  Antisense strand to SEQ ID NO: 200240
aucuuuauggccaaccaau

SEQ ID NO: 200242 - RNA, 19 nt, Artificial Sequence
  Description of Artificial Sequence: Synthetic oligonucleotide
  Sense strand starting at position 1090 of SEQ ID NO: 2581
cucguugcuuauccauuua

SEQ ID NO: 200243 - RNA, 19 nt, Artificial Sequence
  Description of Artificial Sequence: Synthetic oligonucleotide
  Antisense strand to SEQ ID NO: 200242
uaaauggauaagcaacgag

SEQ ID NO: 200244 - RNA, 19 nt, Artificial Sequence
  Description of Artificial Sequence: Synthetic oligonucleotide
  Sense strand starting at position 1178 of SEQ ID NO: 2581
uugguuguguggaugugua

SEQ ID NO: 200245 - RNA, 19 nt, Artificial Sequence
  Description of Artificial Sequence: Synthetic oligonucleotide
  Antisense strand to SEQ ID NO: 200244
uacacauccacacaaccaa

SEQ ID NO: 200246 - RNA, 19 nt, Artificial Sequence
  Description of Artificial Sequence: Synthetic oligonucleotide
  Sense strand starting at position 1293 of SEQ ID NO: 2581
acagaagacugucccuaua

SEQ ID NO: 200247 - RNA, 19 nt, Artificial Sequence
  Description of Artificial Sequence: Synthetic oligonucleotide
  Antisense strand to SEQ ID NO: 200246
uauagggacagucuucugu

SEQ ID NO: 200248 - RNA, 19 nt, Artificial Sequence
  Description of Artificial Sequence: Synthetic oligonucleotide
  Sense strand starting at position 1314 of SEQ ID NO: 2581
auccauaugaugugagguu

SEQ ID NO: 200249 - RNA, 19 nt, Artificial Sequence
  Description of Artificial Sequence: Synthetic oligonucleotide
  Antisense strand to SEQ ID NO: 200248
aaccucacaucauauggau

SEQ ID NO: 200250 - RNA, 19 nt, Artificial Sequence
  Description of Artificial Sequence: Synthetic oligonucleotide
  Sense strand starting at position 1323 of SEQ ID NO: 2581
augugagguuacccaaacu

SEQ ID NO: 200251 - RNA, 19 nt, Artificial Sequence
  Description of Artificial Sequence: Synthetic oligonucleotide
  Antisense strand to SEQ ID NO: 200250
aguuuggguaaccucacau

SEQ ID NO: 200252 - RNA, 19 nt, Artificial Sequence
  Description of Artificial Sequence: Synthetic oligonucleotide
  Sense strand starting at position 1344 of SEQ ID NO: 2581
cugcauaagcuugaguaga

SEQ ID NO: 200253 - RNA, 19 nt, Artificial Sequence
  Description of Artificial Sequence: Synthetic oligonucleotide
  Antisense strand to SEQ ID NO: 200252
ucuacucaagcuuaugcag

SEQ ID NO: 200254 - RNA, 19 nt, Artificial Sequence
  Description of Artificial Sequence: Synthetic oligonucleotide
  Sense strand starting at position 1349 of SEQ ID NO: 2581
uaagcuugaguagauuauu

SEQ ID NO: 200255 - RNA, 19 nt, Artificial Sequence
  Description of Artificial Sequence: Synthetic oligonucleotide
  Antisense strand to SEQ ID NO: 200254
aauaaucuacucaagcuua

SEQ ID NO: 200256 - RNA, 19 nt, Artificial Sequence
  Description of Artificial Sequence: Synthetic oligonucleotide
  Sense strand starting at position 1593 of SEQ ID NO: 2581
uagucuagaaggugauaga

SEQ ID NO: 200257 - RNA, 19 nt, Artificial Sequence
  Description of Artificial Sequence: Synthetic oligonucleotide
  Antisense strand to SEQ ID NO: 200256
ucuaucaccuucuagacua

SEQ ID NO: 200258 - RNA, 19 nt, Artificial Sequence
  Description of Artificial Sequence: Synthetic oligonucleotide
  Sense strand starting at position 1600 of SEQ ID NO: 2581
gaaggugauagaugucuag

SEQ ID NO: 200259 - RNA, 19 nt, Artificial Sequence
  Description of Artificial Sequence: Synthetic oligonucleotide
  Antisense strand to SEQ ID NO: 200258
cuagacaucuaucaccuuc

SEQ ID NO: 200260 - RNA, 19 nt, Artificial Sequence
  Description of Artificial Sequence: Synthetic oligonucleotide
  Sense strand starting at position 1604 of SEQ ID NO: 2581
gugauagaugucuaguagu

SEQ ID NO: 200261 - RNA, 19 nt, Artificial Sequence
  Description of Artificial Sequence: Synthetic oligonucleotide
  Antisense strand to SEQ ID NO: 200260
acuacuagacaucuaucac

SEQ ID NO: 200262 - RNA, 19 nt, Artificial Sequence
  Description of Artificial Sequence: Synthetic oligonucleotide
  Sense strand starting at position 1802 of SEQ ID NO: 2581
cugucaugucucgagacag

SEQ ID NO: 200263 - RNA, 19 nt, Artificial Sequence
  Description of Artificial Sequence: Synthetic oligonucleotide
  Antisense strand to SEQ ID NO: 200262
cugucucgagacaugacag

SEQ ID NO: 200264 - RNA, 19 nt, Artificial Sequence
  Description of Artificial Sequence: Synthetic oligonucleotide
  Sense strand starting at position 1810 of SEQ ID NO: 2581
ucucgagacagugguaaga

SEQ ID NO: 200265 - RNA, 19 nt, Artificial Sequence
  Description of Artificial Sequence: Synthetic oligonucleotide
  Antisense strand to SEQ ID NO: 200264
ucuuaccacugucucgaga

SEQ ID NO: 200266 - RNA, 19 nt, Artificial Sequence
  Description of Artificial Sequence: Synthetic oligonucleotide
  Sense strand starting at position 2254 of SEQ ID NO: 2581
uaagaucuauugguuugau

SEQ ID NO: 200267 - RNA, 19 nt, Artificial Sequence
  Description of Artificial Sequence: Synthetic oligonucleotide
  Antisense strand to SEQ ID NO: 200266
aucaaaccaauagaucuua

SEQ ID NO: 200268 - RNA, 19 nt, Artificial Sequence
  Description of Artificial Sequence: Synthetic oligonucleotide
  Sense strand starting at position 2255 of SEQ ID NO: 2581
aagaucuauugguuugauu

SEQ ID NO: 200269 - RNA, 19 nt, Artificial Sequence
  Description of Artificial Sequence: Synthetic oligonucleotide
  Antisense strand to SEQ ID NO: 200268
aaucaaaccaauagaucuu

SEQ ID NO: 200270 - RNA, 19 nt, Artificial Sequence
  Description of Artificial Sequence: Synthetic oligonucleotide
  Sense strand starting at position 2257 of SEQ ID NO: 2581
gaucuauugguuugauuag

SEQ ID NO: 200271 - RNA, 19 nt, Artificial Sequence
  Description of Artificial Sequence: Synthetic oligonucleotide
  Antisense strand to SEQ ID NO: 200270
cuaaucaaaccaauagauc

SEQ ID NO: 200272 - RNA, 19 nt, Artificial Sequence
  Description of Artificial Sequence: Synthetic oligonucleotide
  Sense strand starting at position 2333 of SEQ ID NO: 2581
uucugucacccgggauaga

SEQ ID NO: 200273 - RNA, 19 nt, Artificial Sequence
  Description of Artificial Sequence: Synthetic oligonucleotide
  Antisense strand to SEQ ID NO: 200272
ucuaucccgggugacagaa

SEQ ID NO: 200274 - RNA, 19 nt, Artificial Sequence
  Description of Artificial Sequence: Synthetic oligonucleotide
  Sense strand starting at position 2448 of SEQ ID NO: 2581
augccaucauaccuggauu

SEQ ID NO: 200275 - RNA, 19 nt, Artificial Sequence
  Description of Artificial Sequence: Synthetic oligonucleotide
  Antisense strand to SEQ ID NO: 200274
aauccagguaugauggcau

SEQ ID NO: 200276 - RNA, 19 nt, Artificial Sequence
  Description of Artificial Sequence: Synthetic oligonucleotide
  Sense strand starting at position 2637 of SEQ ID NO: 2581
agcagauaugaaggccaau

SEQ ID NO: 200277 - RNA, 19 nt, Artificial Sequence
  Description of Artificial Sequence: Synthetic oligonucleotide
  Antisense strand to SEQ ID NO: 200276
auuggccuucauaucugcu

SEQ ID NO: 200278 - RNA, 19 nt, Artificial Sequence
  Description of Artificial Sequence: Synthetic oligonucleotide
  Sense strand starting at position 2737 of SEQ ID NO: 2581
ccaggaaaugcuuagcaaa

SEQ ID NO: 200279 - RNA, 19 nt, Artificial Sequence
  Description of Artificial Sequence: Synthetic oligonucleotide
  Antisense strand to SEQ ID NO: 200278
uuugcuaagcauuuccugg

SEQ ID NO: 200280 - RNA, 19 nt, Artificial Sequence
  Description of Artificial Sequence: Synthetic oligonucleotide
  Sense strand starting at position 2739 of SEQ ID NO: 2581
aggaaaugcuuagcaaaug

SEQ ID NO: 200281 - RNA, 19 nt, Artificial Sequence
  Description of Artificial Sequence: Synthetic oligonucleotide
  Antisense strand to SEQ ID NO: 200280
cauuugcuaagcauuuccu

SEQ ID NO: 200282 - RNA, 19 nt, Artificial Sequence
  Description of Artificial Sequence: Synthetic oligonucleotide
  Sense strand starting at position 2764 of SEQ ID NO: 2581
gucugacacgaccauuaga

SEQ ID NO: 200283 - RNA, 19 nt, Artificial Sequence
  Description of Artificial Sequence: Synthetic oligonucleotide
  Antisense strand to SEQ ID NO: 200282
ucuaauggucgugucagac

SEQ ID NO: 200284 - RNA, 19 nt, Artificial Sequence
  Description of Artificial Sequence: Synthetic oligonucleotide
  Sense strand starting at position 2870 of SEQ ID NO: 2581
ccuucuuaaguuugaagaa

SEQ ID NO: 200285 - RNA, 19 nt, Artificial Sequence
  Description of Artificial Sequence: Synthetic oligonucleotide
  Antisense strand to SEQ ID NO: 200284
uucuucaaacuuaagaagg

SEQ ID NO: 200286 - RNA, 19 nt, Artificial Sequence
  Description of Artificial Sequence: Synthetic oligonucleotide
  Sense strand starting at position 2967 of SEQ ID NO: 2581
cagcuaaggcaugauagau

SEQ ID NO: 200287 - RNA, 19 nt, Artificial Sequence
  Description of Artificial Sequence: Synthetic oligonucleotide
  Antisense strand to SEQ ID NO: 200286
aucuaucaugccuuagcug

SEQ ID NO: 200288 - RNA, 19 nt, Artificial Sequence
  Description of Artificial Sequence: Synthetic oligonucleotide
  Sense strand starting at position 3114 of SEQ ID NO: 2581
gguggugaccauuaucugu

SEQ ID NO: 200289 - RNA, 19 nt, Artificial Sequence
  Description of Artificial Sequence: Synthetic oligonucleotide
  Antisense strand to SEQ ID NO: 200288
acagauaauggucaccacc

SEQ ID NO: 200290 - RNA, 19 nt, Artificial Sequence
  Description of Artificial Sequence: Synthetic oligonucleotide
  Sense strand starting at position 3119 of SEQ ID NO: 2581
ugaccauuaucuguuagaa

SEQ ID NO: 200291 - RNA, 19 nt, Artificial Sequence
  Description of Artificial Sequence: Synthetic oligonucleotide
  Antisense strand to SEQ ID NO: 200290
uucuaacagauaaugguca

SEQ ID NO: 200292 - RNA, 19 nt, Artificial Sequence
  Description of Artificial Sequence: Synthetic oligonucleotide
  Sense strand starting at position 3170 of SEQ ID NO: 2581
ugcuuuccucacuaggaca

SEQ ID NO: 200293 - RNA, 19 nt, Artificial Sequence
  Description of Artificial Sequence: Synthetic oligonucleotide
  Antisense strand to SEQ ID NO: 200292
uguccuagugaggaaagca

SEQ ID NO: 200294 - RNA, 19 nt, Artificial Sequence
  Description of Artificial Sequence: Synthetic oligonucleotide
  Sense strand starting at position 3317 of SEQ ID NO: 2581
gauuguuugcuguugcuua

SEQ ID NO: 200295 - RNA, 19 nt, Artificial Sequence
  Description of Artificial Sequence: Synthetic oligonucleotide
  Antisense strand to SEQ ID NO: 200294
uaagcaacagcaaacaauc

SEQ ID NO: 200296 - RNA, 19 nt, Artificial Sequence
  Description of Artificial Sequence: Synthetic oligonucleotide
  Sense strand starting at position 3722 of SEQ ID NO: 2581
uacugaggcuggucacaaa

SEQ ID NO: 200297 - RNA, 19 nt, Artificial Sequence
  Description of Artificial Sequence: Synthetic oligonucleotide
  Antisense strand to SEQ ID NO: 200296
uuugugaccagccucagua

SEQ ID NO: 200298 - RNA, 19 nt, Artificial Sequence
  Description of Artificial Sequence: Synthetic oligonucleotide
  Sense strand starting at position 3868 of SEQ ID NO: 2581
gguauauuggugcacaaau

SEQ ID NO: 200299 - RNA, 19 nt, Artificial Sequence
  Description of Artificial Sequence: Synthetic oligonucleotide
  Antisense strand to SEQ ID NO: 200298
auuugugcaccaauauacc

SEQ ID NO: 200300 - RNA, 19 nt, Artificial Sequence
  Description of Artificial Sequence: Synthetic oligonucleotide
  Sense strand starting at position 3913 of SEQ ID NO: 2581
uuaauuggguuaucuuaca

SEQ ID NO: 200301 - RNA, 19 nt, Artificial Sequence
  Description of Artificial Sequence: Synthetic oligonucleotide
  Antisense strand to SEQ ID NO: 200300
uguaagauaacccaauuaa

SEQ ID NO: 200302 - RNA, 19 nt, Artificial Sequence
  Description of Artificial Sequence: Synthetic oligonucleotide
  Sense strand starting at position 164 of SEQ ID NO: 2582
ucggcaucgcuuggucuaa

SEQ ID NO: 200303 - RNA, 19 nt, Artificial Sequence
  Description of Artificial Sequence: Synthetic oligonucleotide
  Antisense strand to SEQ ID NO: 200302
uuagaccaagcgaugccga

SEQ ID NO: 200304 - RNA, 19 nt, Artificial Sequence
  Description of Artificial Sequence: Synthetic oligonucleotide
  Sense strand starting at position 165 of SEQ ID NO: 2582
cggcaucgcuuggucuaaa

SEQ ID NO: 200305 - RNA, 19 nt, Artificial Sequence
  Description of Artificial Sequence: Synthetic oligonucleotide
  Antisense strand to SEQ ID NO: 200304
uuuagaccaagcgaugccg

SEQ ID NO: 200306 - RNA, 19 nt, Artificial Sequence
  Description of Artificial Sequence: Synthetic oligonucleotide
  Sense strand starting at position 166 of SEQ ID NO: 2582
ggcaucgcuuggucuaaag

SEQ ID NO: 200307 - RNA, 19 nt, Artificial Sequence
  Description of Artificial Sequence: Synthetic oligonucleotide
  Antisense strand to SEQ ID NO: 200306
cuuuagaccaagcgaugcc

SEQ ID NO: 200308 - RNA, 19 nt, Artificial Sequence
  Description of Artificial Sequence: Synthetic oligonucleotide
  Sense strand starting at position 168 of SEQ ID NO: 2582
caucgcuuggucuaaagaa

SEQ ID NO: 200309 - RNA, 19 nt, Artificial Sequence
  Description of Artificial Sequence: Synthetic oligonucleotide
  Antisense strand to SEQ ID NO: 200308
uucuuuagaccaagcgaug

SEQ ID NO: 200310 - RNA, 19 nt, Artificial Sequence
  Description of Artificial Sequence: Synthetic oligonucleotide
  Sense strand starting at position 322 of SEQ ID NO: 2582
cuaaccuauccuggacaga

SEQ ID NO: 200311 - RNA, 19 nt, Artificial Sequence
  Description of Artificial Sequence: Synthetic oligonucleotide
  Antisense strand to SEQ ID NO: 200310
ucuguccaggauagguuag

SEQ ID NO: 200312 - RNA, 19 nt, Artificial Sequence
  Description of Artificial Sequence: Synthetic oligonucleotide
  Sense strand starting at position 344 of SEQ ID NO: 2582
ggucacuuugugggagaga

SEQ ID NO: 200313 - RNA, 19 nt, Artificial Sequence
  Description of Artificial Sequence: Synthetic oligonucleotide
  Antisense strand to SEQ ID NO: 200312
ucucucccacaaagugacc

SEQ ID NO: 200314 - RNA, 19 nt, Artificial Sequence
  Description of Artificial Sequence: Synthetic oligonucleotide
  Sense strand starting at position 406 of SEQ ID NO: 2582
gucucuuuauacgaaguaa

SEQ ID NO: 200315 - RNA, 19 nt, Artificial Sequence
  Description of Artificial Sequence: Synthetic oligonucleotide
  Antisense strand to SEQ ID NO: 200314
uuacuucguauaaagagac

SEQ ID NO: 200316 - RNA, 19 nt, Artificial Sequence
  Description of Artificial Sequence: Synthetic oligonucleotide
  Sense strand starting at position 456 of SEQ ID NO: 2582
aguagaagccauuaaagua

SEQ ID NO: 200317 - RNA, 19 nt, Artificial Sequence
  Description of Artificial Sequence: Synthetic oligonucleotide
  Antisense strand to SEQ ID NO: 200316
uacuuuaauggcuucuacu

SEQ ID NO: 200318 - RNA, 19 nt, Artificial Sequence
  Description of Artificial Sequence: Synthetic oligonucleotide
  Sense strand starting at position 716 of SEQ ID NO: 2582
ggcagagaauugccugaau

SEQ ID NO: 200319 - RNA, 19 nt, Artificial Sequence
  Description of Artificial Sequence: Synthetic oligonucleotide
  Antisense strand to SEQ ID NO: 200318
auucaggcaauucucugcc

SEQ ID NO: 200320 - RNA, 19 nt, Artificial Sequence
  Description of Artificial Sequence: Synthetic oligonucleotide
  Sense strand starting at position 927 of SEQ ID NO: 2582
acgaaaugaucaugaaaug

SEQ ID NO: 200321 - RNA, 19 nt, Artificial Sequence
  Description of Artificial Sequence: Synthetic oligonucleotide
  Antisense strand to SEQ ID NO: 200320
cauuucaugaucauuucgu

SEQ ID NO: 200322 - RNA, 19 nt, Artificial Sequence
  Description of Artificial Sequence: Synthetic oligonucleotide
  Sense strand starting at position 944 of SEQ ID NO: 2582
ugccaauucuggcuuguua

SEQ ID NO: 200323 - RNA, 19 nt, Artificial Sequence
  Description of Artificial Sequence: Synthetic oligonucleotide
  Antisense strand to SEQ ID NO: 200322
uaacaagccagaauuggca

SEQ ID NO: 200324 - RNA, 19 nt, Artificial Sequence
  Description of Artificial Sequence: Synthetic oligonucleotide
  Sense strand starting at position 964 of SEQ ID NO: 2582
cuugguaacguucaagaag

SEQ ID NO: 200325 - RNA, 19 nt, Artificial Sequence
  Description of Artificial Sequence: Synthetic oligonucleotide
  Antisense strand to SEQ ID NO: 200324
cuucuugaacguuaccaag

SEQ ID NO: 200326 - RNA, 19 nt, Artificial Sequence
  Description of Artificial Sequence: Synthetic oligonucleotide
  Sense strand starting at position 1244 of SEQ ID NO: 2582
uugguuuagcgucugcaga

SEQ ID NO: 200327 - RNA, 19 nt, Artificial Sequence
  Description of Artificial Sequence: Synthetic oligonucleotide
  Antisense strand to SEQ ID NO: 200326
ucugcagacgcuaaaccaa

SEQ ID NO: 200328 - RNA, 19 nt, Artificial Sequence
  Description of Artificial Sequence: Synthetic oligonucleotide
  Sense strand starting at position 1246 of SEQ ID NO: 2582
gguuuagcgucugcagaga

SEQ ID NO: 200329 - RNA, 19 nt, Artificial Sequence
  Description of Artificial Sequence: Synthetic oligonucleotide
  Antisense strand to SEQ ID NO: 200328
ucucugcagacgcuaaacc

SEQ ID NO: 200330 - RNA, 19 nt, Artificial Sequence
  Description of Artificial Sequence: Synthetic oligonucleotide
  Sense strand starting at position 1276 of SEQ ID NO: 2582
uggucuggcccuugggaau

SEQ ID NO: 200331 - RNA, 19 nt, Artificial Sequence
  Description of Artificial Sequence: Synthetic oligonucleotide
  Antisense strand to SEQ ID NO: 200330
auucccaagggccagacca

SEQ ID NO: 200332 - RNA, 19 nt, Artificial Sequence
  Description of Artificial Sequence: Synthetic oligonucleotide
  Sense strand starting at position 1336 of SEQ ID NO: 2582
uguagcuuccaagagaaac

SEQ ID NO: 200333 - RNA, 19 nt, Artificial Sequence
  Description of Artificial Sequence: Synthetic oligonucleotide
  Antisense strand to SEQ ID NO: 200332
guuucucuuggaagcuaca

SEQ ID NO: 200334 - RNA, 19 nt, Artificial Sequence
  Description of Artificial Sequence: Synthetic oligonucleotide
  Sense strand starting at position 1562 of SEQ ID NO: 2582
cggaaagauaccugaaggu

SEQ ID NO: 200335 - RNA, 19 nt, Artificial Sequence
  Description of Artificial Sequence: Synthetic oligonucleotide
  Antisense strand to SEQ ID NO: 200334
accuucagguaucuuuccg

SEQ ID NO: 200336 - RNA, 19 nt, Artificial Sequence
  Description of Artificial Sequence: Synthetic oligonucleotide
  Sense strand starting at position 2020 of SEQ ID NO: 2582
uugcguugcagcucucaga

SEQ ID NO: 200337 - RNA, 19 nt, Artificial Sequence
  Description of Artificial Sequence: Synthetic oligonucleotide
  Antisense strand to SEQ ID NO: 200336
ucugagagcugcaacgcaa

SEQ ID NO: 200338 - RNA, 19 nt, Artificial Sequence
  Description of Artificial Sequence: Synthetic oligonucleotide
  Sense strand starting at position 2686 of SEQ ID NO: 2582
gggucucgccagugcucaa

SEQ ID NO: 200339 - RNA, 19 nt, Artificial Sequence
  Description of Artificial Sequence: Synthetic oligonucleotide
  Antisense strand to SEQ ID NO: 200338
uugagcacuggcgagaccc

SEQ ID NO: 200340 - RNA, 19 nt, Artificial Sequence
  Description of Artificial Sequence: Synthetic oligonucleotide
  Sense strand starting at position 2693 of SEQ ID NO: 2582
gccagugcucaagggagau

SEQ ID NO: 200341 - RNA, 19 nt, Artificial Sequence
  Description of Artificial Sequence: Synthetic oligonucleotide
  Antisense strand to SEQ ID NO: 200340
aucucccuugagcacuggc

SEQ ID NO: 200342 - RNA, 19 nt, Artificial Sequence
  Description of Artificial Sequence: Synthetic oligonucleotide
  Sense strand starting at position 2703 of SEQ ID NO: 2582
aagggagauucuggucuuu

SEQ ID NO: 200343 - RNA, 19 nt, Artificial Sequence
  Description of Artificial Sequence: Synthetic oligonucleotide
  Antisense strand to SEQ ID NO: 200342
aaagaccagaaucucccuu

SEQ ID NO: 200344 - RNA, 19 nt, Artificial Sequence
  Description of Artificial Sequence: Synthetic oligonucleotide
  Sense strand starting at position 2705 of SEQ ID NO: 2582
gggagauucuggucuuucc

SEQ ID NO: 200345 - RNA, 19 nt, Artificial Sequence
  Description of Artificial Sequence: Synthetic oligonucleotide
  Antisense strand to SEQ ID NO: 200344
ggaaagaccagaaucuccc

SEQ ID NO: 200346 - RNA, 19 nt, Artificial Sequence
  Description of Artificial Sequence: Synthetic oligonucleotide
  Sense strand starting at position 2708 of SEQ ID NO: 2582
agauucuggucuuuccuua

SEQ ID NO: 200347 - RNA, 19 nt, Artificial Sequence
  Description of Artificial Sequence: Synthetic oligonucleotide
  Antisense strand to SEQ ID NO: 200346
uaaggaaagaccagaaucu

SEQ ID NO: 200348 - RNA, 19 nt, Artificial Sequence
  Description of Artificial Sequence: Synthetic oligonucleotide
  Sense strand starting at position 2713 of SEQ ID NO: 2582
cuggucuuuccuuaggaaa

SEQ ID NO: 200349 - RNA, 19 nt, Artificial Sequence
  Description of Artificial Sequence: Synthetic oligonucleotide
  Antisense strand to SEQ ID NO: 200348
uuuccuaaggaaagaccag

SEQ ID NO: 200350 - RNA, 19 nt, Artificial Sequence
  Description of Artificial Sequence: Synthetic oligonucleotide
  Sense strand starting at position 2933 of SEQ ID NO: 2582
ugccuugaauucugaaaga

SEQ ID NO: 200351 - RNA, 19 nt, Artificial Sequence
  Description of Artificial Sequence: Synthetic oligonucleotide
  Antisense strand to SEQ ID NO: 200350
ucuuucagaauucaaggca

SEQ ID NO: 200352 - RNA, 19 nt, Artificial Sequence
  Description of Artificial Sequence: Synthetic oligonucleotide
  Sense strand starting at position 2943 of SEQ ID NO: 2582
ucugaaagaccuugcaaag

SEQ ID NO: 200353 - RNA, 19 nt, Artificial Sequence
  Description of Artificial Sequence: Synthetic oligonucleotide
  Antisense strand to SEQ ID NO: 200352
cuuugcaaggucuuucaga

SEQ ID NO: 200354 - RNA, 19 nt, Artificial Sequence
  Description of Artificial Sequence: Synthetic oligonucleotide
  Sense strand starting at position 2959 of SEQ ID NO: 2582
aagccuguucccuguaguu

SEQ ID NO: 200355 - RNA, 19 nt, Artificial Sequence
  Description of Artificial Sequence: Synthetic oligonucleotide
  Antisense strand to SEQ ID NO: 200354
aacuacagggaacaggcuu

SEQ ID NO: 200356 - RNA, 19 nt, Artificial Sequence
  Description of Artificial Sequence: Synthetic oligonucleotide
  Sense strand starting at position 3015 of SEQ ID NO: 2582
gugucuauugcgcuugauu

SEQ ID NO: 200357 - RNA, 19 nt, Artificial Sequence
  Description of Artificial Sequence: Synthetic oligonucleotide
  Antisense strand to SEQ ID NO: 200356
aaucaagcgcaauagacac

SEQ ID NO: 200358 - RNA, 19 nt, Artificial Sequence
  Description of Artificial Sequence: Synthetic oligonucleotide
  Sense strand starting at position 3017 of SEQ ID NO: 2582
gucuauugcgcuugauuuc

SEQ ID NO: 200359 - RNA, 19 nt, Artificial Sequence
  Description of Artificial Sequence: Synthetic oligonucleotide
  Antisense strand to SEQ ID NO: 200358
gaaaucaagcgcaauagac

SEQ ID NO: 200360 - RNA, 19 nt, Artificial Sequence
  Description of Artificial Sequence: Synthetic oligonucleotide
  Sense strand starting at position 3026 of SEQ ID NO: 2582
gcuugauuucugggugguc

SEQ ID NO: 200361 - RNA, 19 nt, Artificial Sequence
  Description of Artificial Sequence: Synthetic oligonucleotide
  Antisense strand to SEQ ID NO: 200360
gaccacccagaaaucaagc

SEQ ID NO: 200362 - RNA, 19 nt, Artificial Sequence
  Description of Artificial Sequence: Synthetic oligonucleotide
  Sense strand starting at position 3027 of SEQ ID NO: 2582
cuugauuucuggguggucu

SEQ ID NO: 200363 - RNA, 19 nt, Artificial Sequence
  Description of Artificial Sequence: Synthetic oligonucleotide
  Antisense strand to SEQ ID NO: 200362
agaccacccagaaaucaag

SEQ ID NO: 200364 - RNA, 19 nt, Artificial Sequence
  Description of Artificial Sequence: Synthetic oligonucleotide
  Sense strand starting at position 3187 of SEQ ID NO: 2582
uguaauuacugguuugguu

SEQ ID NO: 200365 - RNA, 19 nt, Artificial Sequence
  Description of Artificial Sequence: Synthetic oligonucleotide
  Antisense strand to SEQ ID NO: 200364
aaccaaaccaguaauuaca

SEQ ID NO: 200366 - RNA, 19 nt, Artificial Sequence
  Description of Artificial Sequence: Synthetic oligonucleotide
  Sense strand starting at position 3200 of SEQ ID NO: 2582
uugguuuccugccuggaca

SEQ ID NO: 200367 - RNA, 19 nt, Artificial Sequence
  Description of Artificial Sequence: Synthetic oligonucleotide
  Antisense strand to SEQ ID NO: 200366
uguccaggcaggaaaccaa

SEQ ID NO: 200368 - RNA, 19 nt, Artificial Sequence
  Description of Artificial Sequence: Synthetic oligonucleotide
  Sense strand starting at position 3202 of SEQ ID NO: 2582
gguuuccugccuggacaga

SEQ ID NO: 200369 - RNA, 19 nt, Artificial Sequence
  Description of Artificial Sequence: Synthetic oligonucleotide
  Antisense strand to SEQ ID NO: 200368
ucuguccaggcaggaaacc

SEQ ID NO: 200370 - RNA, 19 nt, Artificial Sequence
  Description of Artificial Sequence: Synthetic oligonucleotide
  Sense strand starting at position 3203 of SEQ ID NO: 2582
guuuccugccuggacagaa

SEQ ID NO: 200371 - RNA, 19 nt, Artificial Sequence
  Description of Artificial Sequence: Synthetic oligonucleotide
  Antisense strand to SEQ ID NO: 200370
uucuguccaggcaggaaac

SEQ ID NO: 200372 - RNA, 19 nt, Artificial Sequence
  Description of Artificial Sequence: Synthetic oligonucleotide
  Sense strand starting at position 3383 of SEQ ID NO: 2582
gcaugaagccaccagacau

SEQ ID NO: 200373 - RNA, 19 nt, Artificial Sequence
  Description of Artificial Sequence: Synthetic oligonucleotide
  Antisense strand to SEQ ID NO: 200372
augucugguggcuucaugc

SEQ ID NO: 200374 - RNA, 19 nt, Artificial Sequence
  Description of Artificial Sequence: Synthetic oligonucleotide
  Sense strand starting at position 3405 of SEQ ID NO: 2582
cuggaauccugucuuaacu

SEQ ID NO: 200375 - RNA, 19 nt, Artificial Sequence
  Description of Artificial Sequence: Synthetic oligonucleotide
  Antisense strand to SEQ ID NO: 200374
aguuaagacaggauuccag

SEQ ID NO: 200376 - RNA, 19 nt, Artificial Sequence
  Description of Artificial Sequence: Synthetic oligonucleotide
  Sense strand starting at position 3447 of SEQ ID NO: 2582
gaaggaguguccugagagg

SEQ ID NO: 200377 - RNA, 19 nt, Artificial Sequence
  Description of Artificial Sequence: Synthetic oligonucleotide
  Antisense strand to SEQ ID NO: 200376
ccucucaggacacuccuuc

SEQ ID NO: 200378 - RNA, 19 nt, Artificial Sequence
  Description of Artificial Sequence: Synthetic oligonucleotide
  Sense strand starting at position 3616 of SEQ ID NO: 2582
ucacaugggucccagacuu

SEQ ID NO: 200379 - RNA, 19 nt, Artificial Sequence
  Description of Artificial Sequence: Synthetic oligonucleotide
  Antisense strand to SEQ ID NO: 200378
aagucugggacccauguga

SEQ ID NO: 200380 - RNA, 19 nt, Artificial Sequence
  Description of Artificial Sequence: Synthetic oligonucleotide
  Sense strand starting at position 3745 of SEQ ID NO: 2582
uguucuugucaccaguagu

SEQ ID NO: 200381 - RNA, 19 nt, Artificial Sequence
  Description of Artificial Sequence: Synthetic oligonucleotide
  Antisense strand to SEQ ID NO: 200380
acuacuggugacaagaaca

SEQ ID NO: 200382 - RNA, 19 nt, Artificial Sequence
  Description of Artificial Sequence: Synthetic oligonucleotide
  Sense strand starting at position 5 of SEQ ID NO: 2583
acugcuguugaguguugau

SEQ ID NO: 200383 - RNA, 19 nt, Artificial Sequence
  Description of Artificial Sequence: Synthetic oligonucleotide
  Antisense strand to SEQ ID NO: 200382
aucaacacucaacagcagu

SEQ ID NO: 200384 - RNA, 19 nt, Artificial Sequence
  Description of Artificial Sequence: Synthetic oligonucleotide
  Sense strand starting at position 12 of SEQ ID NO: 2583
uugaguguugauugccaau

SEQ ID NO: 200385 - RNA, 19 nt, Artificial Sequence
  Description of Artificial Sequence: Synthetic oligonucleotide
  Antisense strand to SEQ ID NO: 200384
auuggcaaucaacacucaa

SEQ ID NO: 200386 - RNA, 19 nt, Artificial Sequence
  Description of Artificial Sequence: Synthetic oligonucleotide
  Sense strand starting at position 14 of SEQ ID NO: 2583
gaguguugauugccaauca

SEQ ID NO: 200387 - RNA, 19 nt, Artificial Sequence
  Description of Artificial Sequence: Synthetic oligonucleotide
  Antisense strand to SEQ ID NO: 200386
ugauuggcaaucaacacuc

SEQ ID NO: 200388 - RNA, 19 nt, Artificial Sequence
  Description of Artificial Sequence: Synthetic oligonucleotide
  Sense strand starting at position 118 of SEQ ID NO: 2583
ucgauaucuaaggacgcau

SEQ ID NO: 200389 - RNA, 19 nt, Artificial Sequence
  Description of Artificial Sequence: Synthetic oligonucleotide
  Antisense strand to SEQ ID NO: 200388
augcguccuuagauaucga

SEQ ID NO: 200390 - RNA, 19 nt, Artificial Sequence
  Description of Artificial Sequence: Synthetic oligonucleotide
  Sense strand starting at position 150 of SEQ ID NO: 2583
gcugaagcguuauuuauaa

SEQ ID NO: 200391 - RNA, 19 nt, Artificial Sequence
  Description of Artificial Sequence: Synthetic oligonucleotide
  Antisense strand to SEQ ID NO: 200390
uuauaaauaacgcuucagc

SEQ ID NO: 200392 - RNA, 19 nt, Artificial Sequence
  Description of Artificial Sequence: Synthetic oligonucleotide
  Sense strand starting at position 154 of SEQ ID NO: 2583
aagcguuauuuauaaagac

SEQ ID NO: 200393 - RNA, 19 nt, Artificial Sequence
  Description of Artificial Sequence: Synthetic oligonucleotide
  Antisense strand to SEQ ID NO: 200392
gucuuuauaaauaacgcuu

SEQ ID NO: 200394 - RNA, 19 nt, Artificial Sequence
  Description of Artificial Sequence: Synthetic oligonucleotide
  Sense strand starting at position 232 of SEQ ID NO: 2583
auggccauacucugaacua

SEQ ID NO: 200395 - RNA, 19 nt, Artificial Sequence
  Description of Artificial Sequence: Synthetic oligonucleotide
  Antisense strand to SEQ ID NO: 200394
uaguucagaguauggccau

SEQ ID NO: 200396 - RNA, 19 nt, Artificial Sequence
  Description of Artificial Sequence: Synthetic oligonucleotide
  Sense strand starting at position 326 of SEQ ID NO: 2583
gaugcagagcaauguguau

SEQ ID NO: 200397 - RNA, 19 nt, Artificial Sequence
  Description of Artificial Sequence: Synthetic oligonucleotide
  Antisense strand to SEQ ID NO: 200396
auacacauugcucugcauc

SEQ ID NO: 200398 - RNA, 19 nt, Artificial Sequence
  Description of Artificial Sequence: Synthetic oligonucleotide
  Sense strand starting at position 332 of SEQ ID NO: 2583
gagcaauguguaugucuga

SEQ ID NO: 200399 - RNA, 19 nt, Artificial Sequence
  Description of Artificial Sequence: Synthetic oligonucleotide
  Antisense strand to SEQ ID NO: 200398
ucagacauacacauugcuc

SEQ ID NO: 200400 - RNA, 19 nt, Artificial Sequence
  Description of Artificial Sequence: Synthetic oligonucleotide
  Sense strand starting at position 384 of SEQ ID NO: 2583
ccauaagcccugugugaga

SEQ ID NO: 200401 - RNA, 19 nt, Artificial Sequence
  Description of Artificial Sequence: Synthetic oligonucleotide
  Antisense strand to SEQ ID NO: 200400
ucucacacagggcuuaugg

SEQ ID NO: 200402 - RNA, 19 nt, Artificial Sequence
  Description of Artificial Sequence: Synthetic oligonucleotide
  Sense strand starting at position 490 of SEQ ID NO: 2583
uuucuacaucuguauuguu

SEQ ID NO: 200403 - RNA, 19 nt, Artificial Sequence
  Description of Artificial Sequence: Synthetic oligonucleotide
  Antisense strand to SEQ ID NO: 200402
aacaauacagauguagaaa

SEQ ID NO: 200404 - RNA, 19 nt, Artificial Sequence
  Description of Artificial Sequence: Synthetic oligonucleotide
  Sense strand starting at position 585 of SEQ ID NO: 2583
aguguuuaacugcguagag

SEQ ID NO: 200405 - RNA, 19 nt, Artificial Sequence
  Description of Artificial Sequence: Synthetic oligonucleotide
  Antisense strand to SEQ ID NO: 200404
cucuacgcaguuaaacacu

SEQ ID NO: 200406 - RNA, 19 nt, Artificial Sequence
  Description of Artificial Sequence: Synthetic oligonucleotide
  Sense strand starting at position 586 of SEQ ID NO: 2583
guguuuaacugcguagaga

SEQ ID NO: 200407 - RNA, 19 nt, Artificial Sequence
  Description of Artificial Sequence: Synthetic oligonucleotide
  Antisense strand to SEQ ID NO: 200406
ucucuacgcaguuaaacac

SEQ ID NO: 200408 - RNA, 19 nt, Artificial Sequence
  Description of Artificial Sequence: Synthetic oligonucleotide
  Sense strand starting at position 587 of SEQ ID NO: 2583
uguuuaacugcguagagau

SEQ ID NO: 200409 - RNA, 19 nt, Artificial Sequence
  Description of Artificial Sequence: Synthetic oligonucleotide
  Antisense strand to SEQ ID NO: 200408
aucucuacgcaguuaaaca

SEQ ID NO: 200410 - RNA, 19 nt, Artificial Sequence
  Description of Artificial Sequence: Synthetic oligonucleotide
  Sense strand starting at position 912 of SEQ ID NO: 2583
ggcaucgcuuggucuaaag

SEQ ID NO: 200411 - RNA, 19 nt, Artificial Sequence
  Description of Artificial Sequence: Synthetic oligonucleotide
  Antisense strand to SEQ ID NO: 200410
cuuuagaccaagcgaugcc

SEQ ID NO: 200412 - RNA, 19 nt, Artificial Sequence
  Description of Artificial Sequence: Synthetic oligonucleotide
  Sense strand starting at position 914 of SEQ ID NO: 2583
caucgcuuggucuaaagaa

SEQ ID NO: 200413 - RNA, 19 nt, Artificial Sequence
  Description of Artificial Sequence: Synthetic oligonucleotide
  Antisense strand to SEQ ID NO: 200412
uucuuuagaccaagcgaug

SEQ ID NO: 200414 - RNA, 19 nt, Artificial Sequence
  Description of Artificial Sequence: Synthetic oligonucleotide
  Sense strand starting at position 1068 of SEQ ID NO: 2583
cuaaccuauccuggacaga

SEQ ID NO: 200415 - RNA, 19 nt, Artificial Sequence
  Description of Artificial Sequence: Synthetic oligonucleotide
  Antisense strand to SEQ ID NO: 200414
ucuguccaggauagguuag

SEQ ID NO: 200416 - RNA, 19 nt, Artificial Sequence
  Description of Artificial Sequence: Synthetic oligonucleotide
  Sense strand starting at position 1090 of SEQ ID NO: 2583
ggucacuuugugggagaga

SEQ ID NO: 200417 - RNA, 19 nt, Artificial Sequence
  Description of Artificial Sequence: Synthetic oligonucleotide
  Antisense strand to SEQ ID NO: 200416
ucucucccacaaagugacc

SEQ ID NO: 200418 - RNA, 19 nt, Artificial Sequence
  Description of Artificial Sequence: Synthetic oligonucleotide
  Sense strand starting at position 1202 of SEQ ID NO: 2583
aguagaagccauuaaagua

SEQ ID NO: 200419 - RNA, 19 nt, Artificial Sequence
  Description of Artificial Sequence: Synthetic oligonucleotide
  Antisense strand to SEQ ID NO: 200418
uacuuuaauggcuucuacu

SEQ ID NO: 200420 - RNA, 19 nt, Artificial Sequence
  Description of Artificial Sequence: Synthetic oligonucleotide
  Sense strand starting at position 1462 of SEQ ID NO: 2583
ggcagagaauugccugaau

SEQ ID NO: 200421 - RNA, 19 nt, Artificial Sequence
  Description of Artificial Sequence: Synthetic oligonucleotide
  Antisense strand to SEQ ID NO: 200420
auucaggcaauucucugcc

SEQ ID NO: 200422 - RNA, 19 nt, Artificial Sequence
  Description of Artificial Sequence: Synthetic oligonucleotide
  Sense strand starting at position 1690 of SEQ ID NO: 2583
ugccaauucuggcuuguua

SEQ ID NO: 200423 - RNA, 19 nt, Artificial Sequence
  Description of Artificial Sequence: Synthetic oligonucleotide
  Antisense strand to SEQ ID NO: 200422
uaacaagccagaauuggca

SEQ ID NO: 200424 - RNA, 19 nt, Artificial Sequence
  Description of Artificial Sequence: Synthetic oligonucleotide
  Sense strand starting at position 1710 of SEQ ID NO: 2583
cuugguaacguucaagaag

SEQ ID NO: 200425 - RNA, 19 nt, Artificial Sequence
  Description of Artificial Sequence: Synthetic oligonucleotide
  Antisense strand to SEQ ID NO: 200424
cuucuugaacguuaccaag

SEQ ID NO: 200426 - RNA, 19 nt, Artificial Sequence
  Description of Artificial Sequence: Synthetic oligonucleotide
  Sense strand starting at position 1990 of SEQ ID NO: 2583
uugguuuagcgucugcaga

SEQ ID NO: 200427 - RNA, 19 nt, Artificial Sequence
  Description of Artificial Sequence: Synthetic oligonucleotide
  Antisense strand to SEQ ID NO: 200426
ucugcagacgcuaaaccaa

SEQ ID NO: 200428 - RNA, 19 nt, Artificial Sequence
  Description of Artificial Sequence: Synthetic oligonucleotide
  Sense strand starting at position 2022 of SEQ ID NO: 2583
uggucuggcccuugggaau

SEQ ID NO: 200429 - RNA, 19 nt, Artificial Sequence
  Description of Artificial Sequence: Synthetic oligonucleotide
  Antisense strand to SEQ ID NO: 200428
auucccaagggccagacca

SEQ ID NO: 200430 - RNA, 19 nt, Artificial Sequence
  Description of Artificial Sequence: Synthetic oligonucleotide
  Sense strand starting at position 2082 of SEQ ID NO: 2583
uguagcuuccaagagaaac

SEQ ID NO: 200431 - RNA, 19 nt, Artificial Sequence
  Description of Artificial Sequence: Synthetic oligonucleotide
  Antisense strand to SEQ ID NO: 200430
guuucucuuggaagcuaca

SEQ ID NO: 200432 - RNA, 19 nt, Artificial Sequence
  Description of Artificial Sequence: Synthetic oligonucleotide
  Sense strand starting at position 2308 of SEQ ID NO: 2583
cggaaagauaccugaaggu

SEQ ID NO: 200433 - RNA, 19 nt, Artificial Sequence
  Description of Artificial Sequence: Synthetic oligonucleotide
  Antisense strand to SEQ ID NO: 200432
accuucagguaucuuuccg

SEQ ID NO: 200434 - RNA, 19 nt, Artificial Sequence
  Description of Artificial Sequence: Synthetic oligonucleotide
  Sense strand starting at position 2766 of SEQ ID NO: 2583
uugcguugcagcucucaga

SEQ ID NO: 200435 - RNA, 19 nt, Artificial Sequence
  Description of Artificial Sequence: Synthetic oligonucleotide
  Antisense strand to SEQ ID NO: 200434
ucugagagcugcaacgcaa

SEQ ID NO: 200436 - RNA, 19 nt, Artificial Sequence
  Description of Artificial Sequence: Synthetic oligonucleotide
  Sense strand starting at position 3439 of SEQ ID NO: 2583
gccagugcucaagggagau

SEQ ID NO: 200437 - RNA, 19 nt, Artificial Sequence
  Description of Artificial Sequence: Synthetic oligonucleotide
  Antisense strand to SEQ ID NO: 200436
aucucccuugagcacuggc

SEQ ID NO: 200438 - RNA, 19 nt, Artificial Sequence
  Description of Artificial Sequence: Synthetic oligonucleotide
  Sense strand starting at position 3451 of SEQ ID NO: 2583
gggagauucuggucuuucc

SEQ ID NO: 200439 - RNA, 19 nt, Artificial Sequence
  Description of Artificial Sequence: Synthetic oligonucleotide
  Antisense strand to SEQ ID NO: 200438
ggaaagaccagaaucuccc

SEQ ID NO: 200440 - RNA, 19 nt, Artificial Sequence
  Description of Artificial Sequence: Synthetic oligonucleotide
  Sense strand starting at position 3454 of SEQ ID NO: 2583
agauucuggucuuuccuua

SEQ ID NO: 200441 - RNA, 19 nt, Artificial Sequence
  Description of Artificial Sequence: Synthetic oligonucleotide
  Antisense strand to SEQ ID NO: 200440
uaaggaaagaccagaaucu

SEQ ID NO: 200442 - RNA, 19 nt, Artificial Sequence
  Description of Artificial Sequence: Synthetic oligonucleotide
  Sense strand starting at position 3459 of SEQ ID NO: 2583
cuggucuuuccuuaggaaa

SEQ ID NO: 200443 - RNA, 19 nt, Artificial Sequence
  Description of Artificial Sequence: Synthetic oligonucleotide
  Antisense strand to SEQ ID NO: 200442
uuuccuaaggaaagaccag

SEQ ID NO: 200444 - RNA, 19 nt, Artificial Sequence
  Description of Artificial Sequence: Synthetic oligonucleotide
  Sense strand starting at position 3689 of SEQ ID NO: 2583
ucugaaagaccuugcaaag

SEQ ID NO: 200445 - RNA, 19 nt, Artificial Sequence
  Description of Artificial Sequence: Synthetic oligonucleotide
  Antisense strand to SEQ ID NO: 200444
cuuugcaaggucuuucaga

SEQ ID NO: 200446 - RNA, 19 nt, Artificial Sequence
  Description of Artificial Sequence: Synthetic oligonucleotide
  Sense strand starting at position 3761 of SEQ ID NO: 2583
gugucuauugcgcuugauu

SEQ ID NO: 200447 - RNA, 19 nt, Artificial Sequence
  Description of Artificial Sequence: Synthetic oligonucleotide
  Antisense strand to SEQ ID NO: 200446
aaucaagcgcaauagacac

SEQ ID NO: 200448 - RNA, 19 nt, Artificial Sequence
  Description of Artificial Sequence: Synthetic oligonucleotide
  Sense strand starting at position 3763 of SEQ ID NO: 2583
gucuauugcgcuugauuuc

SEQ ID NO: 200449 - RNA, 19 nt, Artificial Sequence
  Description of Artificial Sequence: Synthetic oligonucleotide
  Antisense strand to SEQ ID NO: 200448
gaaaucaagcgcaauagac

SEQ ID NO: 200450 - RNA, 19 nt, Artificial Sequence
  Description of Artificial Sequence: Synthetic oligonucleotide
  Sense strand starting at position 3772 of SEQ ID NO: 2583
gcuugauuucugggugguc

SEQ ID NO: 200451 - RNA, 19 nt, Artificial Sequence
  Description of Artificial Sequence: Synthetic oligonucleotide
  Antisense strand to SEQ ID NO: 200450
gaccacccagaaaucaagc

SEQ ID NO: 200452 - RNA, 19 nt, Artificial Sequence
  Description of Artificial Sequence: Synthetic oligonucleotide
  Sense strand starting at position 3773 of SEQ ID NO: 2583
cuugauuucuggguggucu

SEQ ID NO: 200453 - RNA, 19 nt, Artificial Sequence
  Description of Artificial Sequence: Synthetic oligonucleotide
  Antisense strand to SEQ ID NO: 200452
agaccacccagaaaucaag

SEQ ID NO: 200454 - RNA, 19 nt, Artificial Sequence
  Description of Artificial Sequence: Synthetic oligonucleotide
  Sense strand starting at position 3933 of SEQ ID NO: 2583
uguaauuacugguuugguu

SEQ ID NO: 200455 - RNA, 19 nt, Artificial Sequence
  Description of Artificial Sequence: Synthetic oligonucleotide
  Antisense strand to SEQ ID NO: 200454
aaccaaaccaguaauuaca

SEQ ID NO: 200456 - RNA, 19 nt, Artificial Sequence
  Description of Artificial Sequence: Synthetic oligonucleotide
  Sense strand starting at position 3946 of SEQ ID NO: 2583
uugguuuccugccuggaca

SEQ ID NO: 200457 - RNA, 19 nt, Artificial Sequence
  Description of Artificial Sequence: Synthetic oligonucleotide
  Antisense strand to SEQ ID NO: 200456
uguccaggcaggaaaccaa

SEQ ID NO: 200458 - RNA, 19 nt, Artificial Sequence
  Description of Artificial Sequence: Synthetic oligonucleotide
  Sense strand starting at position 3948 of SEQ ID NO: 2583
gguuuccugccuggacaga

SEQ ID NO: 200459 - RNA, 19 nt, Artificial Sequence
  Description of Artificial Sequence: Synthetic oligonucleotide
  Antisense strand to SEQ ID NO: 200458
ucuguccaggcaggaaacc

SEQ ID NO: 200460 - RNA, 19 nt, Artificial Sequence
  Description of Artificial Sequence: Synthetic oligonucleotide
  Sense strand starting at position 3949 of SEQ ID NO: 2583
guuuccugccuggacagaa

SEQ ID NO: 200461 - RNA, 19 nt, Artificial Sequence
  Description of Artificial Sequence: Synthetic oligonucleotide
  Antisense strand to SEQ ID NO: 200460
uucuguccaggcaggaaac

SEQ ID NO: 200462 - RNA, 19 nt, Artificial Sequence
  Description of Artificial Sequence: Synthetic oligonucleotide
  Sense strand starting at position 8 of SEQ ID NO: 2584
gcuuaaguuucucuaagcu

SEQ ID NO: 200463 - RNA, 19 nt, Artificial Sequence
  Description of Artificial Sequence: Synthetic oligonucleotide
  Antisense strand to SEQ ID NO: 200462
agcuuagagaaacuuaagc

SEQ ID NO: 200464 - RNA, 19 nt, Artificial Sequence
  Description of Artificial Sequence: Synthetic oligonucleotide
  Sense strand starting at position 22 of SEQ ID NO: 2584
aagcuugagcuggagcaaa

SEQ ID NO: 200465 - RNA, 19 nt, Artificial Sequence
  Description of Artificial Sequence: Synthetic oligonucleotide
  Antisense strand to SEQ ID NO: 200464
uuugcuccagcucaagcuu

SEQ ID NO: 200466 - RNA, 19 nt, Artificial Sequence
  Description of Artificial Sequence: Synthetic oligonucleotide
  Sense strand starting at position 116 of SEQ ID NO: 2584
gcgagcuugcuccagcagu

SEQ ID NO: 200467 - RNA, 19 nt, Artificial Sequence
  Description of Artificial Sequence: Synthetic oligonucleotide
  Antisense strand to SEQ ID NO: 200466
acugcuggagcaagcucgc

SEQ ID NO: 200468 - RNA, 19 nt, Artificial Sequence
  Description of Artificial Sequence: Synthetic oligonucleotide
  Sense strand starting at position 118 of SEQ ID NO: 2584
gagcuugcuccagcaguuu

SEQ ID NO: 200469 - RNA, 19 nt, Artificial Sequence
  Description of Artificial Sequence: Synthetic oligonucleotide
  Antisense strand to SEQ ID NO: 200468
aaacugcuggagcaagcuc

SEQ ID NO: 200470 - RNA, 19 nt, Artificial Sequence
  Description of Artificial Sequence: Synthetic oligonucleotide
  Sense strand starting at position 497 of SEQ ID NO: 2584
gagagcuccucagaugguu

SEQ ID NO: 200471 - RNA, 19 nt, Artificial Sequence
  Description of Artificial Sequence: Synthetic oligonucleotide
  Antisense strand to SEQ ID NO: 200470
aaccaucugaggagcucuc

SEQ ID NO: 200472 - RNA, 19 nt, Artificial Sequence
  Description of Artificial Sequence: Synthetic oligonucleotide
  Sense strand starting at position 505 of SEQ ID NO: 2584
cucagaugguuucgugugu

SEQ ID NO: 200473 - RNA, 19 nt, Artificial Sequence
  Description of Artificial Sequence: Synthetic oligonucleotide
  Antisense strand to SEQ ID NO: 200472
acacacgaaaccaucugag

SEQ ID NO: 200474 - RNA, 19 nt, Artificial Sequence
  Description of Artificial Sequence: Synthetic oligonucleotide
  Sense strand starting at position 506 of SEQ ID NO: 2584
ucagaugguuucguguguu

SEQ ID NO: 200475 - RNA, 19 nt, Artificial Sequence
  Description of Artificial Sequence: Synthetic oligonucleotide
  Antisense strand to SEQ ID NO: 200474
aacacacgaaaccaucuga

SEQ ID NO: 200476 - RNA, 19 nt, Artificial Sequence
  Description of Artificial Sequence: Synthetic oligonucleotide
  Sense strand starting at position 512 of SEQ ID NO: 2584
gguuucguguguucccauu

SEQ ID NO: 200477 - RNA, 19 nt, Artificial Sequence
  Description of Artificial Sequence: Synthetic oligonucleotide
  Antisense strand to SEQ ID NO: 200476
aaugggaacacacgaaacc

SEQ ID NO: 200478 - RNA, 19 nt, Artificial Sequence
  Description of Artificial Sequence: Synthetic oligonucleotide
  Sense strand starting at position 841 of SEQ ID NO: 2584
gcccaagacucugcaaaca

SEQ ID NO: 200479 - RNA, 19 nt, Artificial Sequence
  Description of Artificial Sequence: Synthetic oligonucleotide
  Antisense strand to SEQ ID NO: 200478
uguuugcagagucuugggc

SEQ ID NO: 200480 - RNA, 19 nt, Artificial Sequence
  Description of Artificial Sequence: Synthetic oligonucleotide
  Sense strand starting at position 2070 of SEQ ID NO: 2584
ggcuucgucgcgcggagaa

SEQ ID NO: 200481 - RNA, 19 nt, Artificial Sequence
  Description of Artificial Sequence: Synthetic oligonucleotide
  Antisense strand to SEQ ID NO: 200480
uucuccgcgcgacgaagcc

SEQ ID NO: 200482 - RNA, 19 nt, Artificial Sequence
  Description of Artificial Sequence: Synthetic oligonucleotide
  Sense strand starting at position 2179 of SEQ ID NO: 2584
ggaauaggcuccucaccua

SEQ ID NO: 200483 - RNA, 19 nt, Artificial Sequence
  Description of Artificial Sequence: Synthetic oligonucleotide
  Antisense strand to SEQ ID NO: 200482
uaggugaggagccuauucc

SEQ ID NO: 200484 - RNA, 19 nt, Artificial Sequence
  Description of Artificial Sequence: Synthetic oligonucleotide
  Sense strand starting at position 2209 of SEQ ID NO: 2584
gcaggacccucaguaauca

SEQ ID NO: 200485 - RNA, 19 nt, Artificial Sequence
  Description of Artificial Sequence: Synthetic oligonucleotide
  Antisense strand to SEQ ID NO: 200484
ugauuacugaggguccugc

SEQ ID NO: 200486 - RNA, 19 nt, Artificial Sequence
  Description of Artificial Sequence: Synthetic oligonucleotide
  Sense strand starting at position 2242 of SEQ ID NO: 2584
cucaguuucccuggaggca

SEQ ID NO: 200487 - RNA, 19 nt, Artificial Sequence
  Description of Artificial Sequence: Synthetic oligonucleotide
  Antisense strand to SEQ ID NO: 200486
ugccuccagggaaacugag

SEQ ID NO: 200488 - RNA, 19 nt, Artificial Sequence
  Description of Artificial Sequence: Synthetic oligonucleotide
  Sense strand starting at position 2327 of SEQ ID NO: 2584
aagugcuucugacuuugau

SEQ ID NO: 200489 - RNA, 19 nt, Artificial Sequence
  Description of Artificial Sequence: Synthetic oligonucleotide
  Antisense strand to SEQ ID NO: 200488
aucaaagucagaagcacuu

SEQ ID NO: 200490 - RNA, 19 nt, Artificial Sequence
  Description of Artificial Sequence: Synthetic oligonucleotide
  Sense strand starting at position 2331 of SEQ ID NO: 2584
gcuucugacuuugauuuga

SEQ ID NO: 200491 - RNA, 19 nt, Artificial Sequence
  Description of Artificial Sequence: Synthetic oligonucleotide
  Antisense strand to SEQ ID NO: 200490
ucaaaucaaagucagaagc

SEQ ID NO: 200492 - RNA, 19 nt, Artificial Sequence
  Description of Artificial Sequence: Synthetic oligonucleotide
  Sense strand starting at position 2599 of SEQ ID NO: 2584
gugguuagugugagcuaga

SEQ ID NO: 200493 - RNA, 19 nt, Artificial Sequence
  Description of Artificial Sequence: Synthetic oligonucleotide
  Antisense strand to SEQ ID NO: 200492
ucuagcucacacuaaccac

SEQ ID NO: 200494 - RNA, 19 nt, Artificial Sequence
  Description of Artificial Sequence: Synthetic oligonucleotide
  Sense strand starting at position 2602 of SEQ ID NO: 2584
guuagugugagcuagacaa

SEQ ID NO: 200495 - RNA, 19 nt, Artificial Sequence
  Description of Artificial Sequence: Synthetic oligonucleotide
  Antisense strand to SEQ ID NO: 200494
uugucuagcucacacuaac

SEQ ID NO: 200496 - RNA, 19 nt, Artificial Sequence
  Description of Artificial Sequence: Synthetic oligonucleotide
  Sense strand starting at position 2629 of SEQ ID NO: 2584
cuaguaaauccuuggccua

SEQ ID NO: 200497 - RNA, 19 nt, Artificial Sequence
  Description of Artificial Sequence: Synthetic oligonucleotide
  Antisense strand to SEQ ID NO: 200496
uaggccaaggauuuacuag

SEQ ID NO: 200498 - RNA, 19 nt, Artificial Sequence
  Description of Artificial Sequence: Synthetic oligonucleotide
  Sense strand starting at position 2659 of SEQ ID NO: 2584
caggccugccaguaauagu

SEQ ID NO: 200499 - RNA, 19 nt, Artificial Sequence
  Description of Artificial Sequence: Synthetic oligonucleotide
  Antisense strand to SEQ ID NO: 200498
acuauuacuggcaggccug

SEQ ID NO: 200500 - RNA, 19 nt, Artificial Sequence
  Description of Artificial Sequence: Synthetic oligonucleotide
  Sense strand starting at position 2720 of SEQ ID NO: 2584
agcugaguaguccaaagaa

SEQ ID NO: 200501 - RNA, 19 nt, Artificial Sequence
  Description of Artificial Sequence: Synthetic oligonucleotide
  Antisense strand to SEQ ID NO: 200500
uucuuuggacuacucagcu

SEQ ID NO: 200502 - RNA, 19 nt, Artificial Sequence
  Description of Artificial Sequence: Synthetic oligonucleotide
  Sense strand starting at position 3023 of SEQ ID NO: 2584
cugagagauuagcucaagu

SEQ ID NO: 200503 - RNA, 19 nt, Artificial Sequence
  Description of Artificial Sequence: Synthetic oligonucleotide
  Antisense strand to SEQ ID NO: 200502
acuugagcuaaucucucag

SEQ ID NO: 200504 - RNA, 19 nt, Artificial Sequence
  Description of Artificial Sequence: Synthetic oligonucleotide
  Sense strand starting at position 3055 of SEQ ID NO: 2584
gguguuggagccagagcua

SEQ ID NO: 200505 - RNA, 19 nt, Artificial Sequence
  Description of Artificial Sequence: Synthetic oligonucleotide
  Antisense strand to SEQ ID NO: 200504
uagcucuggcuccaacacc

SEQ ID NO: 200506 - RNA, 19 nt, Artificial Sequence
  Description of Artificial Sequence: Synthetic oligonucleotide
  Sense strand starting at position 3275 of SEQ ID NO: 2584
gugggcucugcaggauaaa

SEQ ID NO: 200507 - RNA, 19 nt, Artificial Sequence
  Description of Artificial Sequence: Synthetic oligonucleotide
  Antisense strand to SEQ ID NO: 200506
uuuauccugcagagcccac

SEQ ID NO: 200508 - RNA, 19 nt, Artificial Sequence
  Description of Artificial Sequence: Synthetic oligonucleotide
  Sense strand starting at position 3276 of SEQ ID NO: 2584
ugggcucugcaggauaaau

SEQ ID NO: 200509 - RNA, 19 nt, Artificial Sequence
  Description of Artificial Sequence: Synthetic oligonucleotide
  Antisense strand to SEQ ID NO: 200508
auuuauccugcagagccca

SEQ ID NO: 200510 - RNA, 19 nt, Artificial Sequence
  Description of Artificial Sequence: Synthetic oligonucleotide
  Sense strand starting at position 3337 of SEQ ID NO: 2584
ccuguagaauugguaauag

SEQ ID NO: 200511 - RNA, 19 nt, Artificial Sequence
  Description of Artificial Sequence: Synthetic oligonucleotide
  Antisense strand to SEQ ID NO: 200510
cuauuaccaauucuacagg

SEQ ID NO: 200512 - RNA, 19 nt, Artificial Sequence
  Description of Artificial Sequence: Synthetic oligonucleotide
  Sense strand starting at position 3360 of SEQ ID NO: 2584
ccagaacaaucauaauggu

SEQ ID NO: 200513 - RNA, 19 nt, Artificial Sequence
  Description of Artificial Sequence: Synthetic oligonucleotide
  Antisense strand to SEQ ID NO: 200512
accauuaugauuguucugg

SEQ ID NO: 200514 - RNA, 19 nt, Artificial Sequence
  Description of Artificial Sequence: Synthetic oligonucleotide
  Sense strand starting at position 3478 of SEQ ID NO: 2584
ggaagcaccuuuguacauu

SEQ ID NO: 200515 - RNA, 19 nt, Artificial Sequence
  Description of Artificial Sequence: Synthetic oligonucleotide
  Antisense strand to SEQ ID NO: 200514
aauguacaaaggugcuucc

SEQ ID NO: 200516 - RNA, 19 nt, Artificial Sequence
  Description of Artificial Sequence: Synthetic oligonucleotide
  Sense strand starting at position 3488 of SEQ ID NO: 2584
uuguacauucuggaagcau

SEQ ID NO: 200517 - RNA, 19 nt, Artificial Sequence
  Description of Artificial Sequence: Synthetic oligonucleotide
  Antisense strand to SEQ ID NO: 200516
augcuuccagaauguacaa

SEQ ID NO: 200518 - RNA, 19 nt, Artificial Sequence
  Description of Artificial Sequence: Synthetic oligonucleotide
  Sense strand starting at position 3504 of SEQ ID NO: 2584
cauugauuggcaggcacua

SEQ ID NO: 200519 - RNA, 19 nt, Artificial Sequence
  Description of Artificial Sequence: Synthetic oligonucleotide
  Antisense strand to SEQ ID NO: 200518
uagugccugccaaucaaug

SEQ ID NO: 200520 - RNA, 19 nt, Artificial Sequence
  Description of Artificial Sequence: Synthetic oligonucleotide
  Sense strand starting at position 3641 of SEQ ID NO: 2584
agcucaucccaccaagagu

SEQ ID NO: 200521 - RNA, 19 nt, Artificial Sequence
  Description of Artificial Sequence: Synthetic oligonucleotide
  Antisense strand to SEQ ID NO: 200520
acucuuggugggaugagcu

SEQ ID NO: 200522 - RNA, 19 nt, Artificial Sequence
  Description of Artificial Sequence: Synthetic oligonucleotide
  Sense strand starting at position 3650 of SEQ ID NO: 2584
caccaagaguuaggguuau

SEQ ID NO: 200523 - RNA, 19 nt, Artificial Sequence
  Description of Artificial Sequence: Synthetic oligonucleotide
  Antisense strand to SEQ ID NO: 200522
auaacccuaacucuuggug

SEQ ID NO: 200524 - RNA, 19 nt, Artificial Sequence
  Description of Artificial Sequence: Synthetic oligonucleotide
  Sense strand starting at position 3688 of SEQ ID NO: 2584
ggcacauucugacagacaa

SEQ ID NO: 200525 - RNA, 19 nt, Artificial Sequence
  Description of Artificial Sequence: Synthetic oligonucleotide
  Antisense strand to SEQ ID NO: 200524
uugucugucagaaugugcc

SEQ ID NO: 200526 - RNA, 19 nt, Artificial Sequence
  Description of Artificial Sequence: Synthetic oligonucleotide
  Sense strand starting at position 3776 of SEQ ID NO: 2584
uuaauugcuuccugaggca

SEQ ID NO: 200527 - RNA, 19 nt, Artificial Sequence
  Description of Artificial Sequence: Synthetic oligonucleotide
  Antisense strand to SEQ ID NO: 200526
ugccucaggaagcaauuaa

SEQ ID NO: 200528 - RNA, 19 nt, Artificial Sequence
  Description of Artificial Sequence: Synthetic oligonucleotide
  Sense strand starting at position 3788 of SEQ ID NO: 2584
ugaggcaacuguuugcaau

SEQ ID NO: 200529 - RNA, 19 nt, Artificial Sequence
  Description of Artificial Sequence: Synthetic oligonucleotide
  Antisense strand to SEQ ID NO: 200528
auugcaaacaguugccuca

SEQ ID NO: 200530 - RNA, 19 nt, Artificial Sequence
  Description of Artificial Sequence: Synthetic oligonucleotide
  Sense strand starting at position 3789 of SEQ ID NO: 2584
gaggcaacuguuugcaaua

SEQ ID NO: 200531 - RNA, 19 nt, Artificial Sequence
  Description of Artificial Sequence: Synthetic oligonucleotide
  Antisense strand to SEQ ID NO: 200530
uauugcaaacaguugccuc

SEQ ID NO: 200532 - RNA, 19 nt, Artificial Sequence
  Description of Artificial Sequence: Synthetic oligonucleotide
  Sense strand starting at position 3791 of SEQ ID NO: 2584
ggcaacuguuugcaauaga

SEQ ID NO: 200533 - RNA, 19 nt, Artificial Sequence
  Description of Artificial Sequence: Synthetic oligonucleotide
  Antisense strand to SEQ ID NO: 200532
ucuauugcaaacaguugcc

SEQ ID NO: 200534 - RNA, 19 nt, Artificial Sequence
  Description of Artificial Sequence: Synthetic oligonucleotide
  Sense strand starting at position 3825 of SEQ ID NO: 2584
gccaguaaauccugcagaa

SEQ ID NO: 200535 - RNA, 19 nt, Artificial Sequence
  Description of Artificial Sequence: Synthetic oligonucleotide
  Antisense strand to SEQ ID NO: 200534
uucugcaggauuuacuggc

SEQ ID NO: 200536 - RNA, 19 nt, Artificial Sequence
  Description of Artificial Sequence: Synthetic oligonucleotide
  Sense strand starting at position 121 of SEQ ID NO: 2586
uggucucuuugugugauaa

SEQ ID NO: 200537 - RNA, 19 nt, Artificial Sequence
  Description of Artificial Sequence: Synthetic oligonucleotide
  Antisense strand to SEQ ID NO: 200536
uuaucacacaaagagacca

SEQ ID NO: 200538 - RNA, 19 nt, Artificial Sequence
  Description of Artificial Sequence: Synthetic oligonucleotide
  Sense strand starting at position 122 of SEQ ID NO: 2586
ggucucuuugugugauaau

SEQ ID NO: 200539 - RNA, 19 nt, Artificial Sequence
  Description of Artificial Sequence: Synthetic oligonucleotide
  Antisense strand to SEQ ID NO: 200538
auuaucacacaaagagacc

SEQ ID NO: 200540 - RNA, 19 nt, Artificial Sequence
  Description of Artificial Sequence: Synthetic oligonucleotide
  Sense strand starting at position 169 of SEQ ID NO: 2586
ucuggaagaugucugauuc

SEQ ID NO: 200541 - RNA, 19 nt, Artificial Sequence
  Description of Artificial Sequence: Synthetic oligonucleotide
  Antisense strand to SEQ ID NO: 200540
gaaucagacaucuuccaga

SEQ ID NO: 200542 - RNA, 19 nt, Artificial Sequence
  Description of Artificial Sequence: Synthetic oligonucleotide
  Sense strand starting at position 173 of SEQ ID NO: 2586
gaagaugucugauuccagg

SEQ ID NO: 200543 - RNA, 19 nt, Artificial Sequence
  Description of Artificial Sequence: Synthetic oligonucleotide
  Antisense strand to SEQ ID NO: 200542
ccuggaaucagacaucuuc

SEQ ID NO: 200544 - RNA, 19 nt, Artificial Sequence
  Description of Artificial Sequence: Synthetic oligonucleotide
  Sense strand starting at position 313 of SEQ ID NO: 2586
caggcaguccucugaugac

SEQ ID NO: 200545 - RNA, 19 nt, Artificial Sequence
  Description of Artificial Sequence: Synthetic oligonucleotide
  Antisense strand to SEQ ID NO: 200544
gucaucagaggacugccug

SEQ ID NO: 200546 - RNA, 19 nt, Artificial Sequence
  Description of Artificial Sequence: Synthetic oligonucleotide
  Sense strand starting at position 590 of SEQ ID NO: 2586
uugucuuuccgacaacuga

SEQ ID NO: 200547 - RNA, 19 nt, Artificial Sequence
  Description of Artificial Sequence: Synthetic oligonucleotide
  Antisense strand to SEQ ID NO: 200546
ucaguugucggaaagacaa

SEQ ID NO: 200548 - RNA, 19 nt, Artificial Sequence
  Description of Artificial Sequence: Synthetic oligonucleotide
  Sense strand starting at position 688 of SEQ ID NO: 2586
agcucuggcguucagacaa

SEQ ID NO: 200549 - RNA, 19 nt, Artificial Sequence
  Description of Artificial Sequence: Synthetic oligonucleotide
  Antisense strand to SEQ ID NO: 200548
uugucugaacgccagagcu

SEQ ID NO: 200550 - RNA, 19 nt, Artificial Sequence
  Description of Artificial Sequence: Synthetic oligonucleotide
  Sense strand starting at position 738 of SEQ ID NO: 2586
ucgagaguaggccgguaaa

SEQ ID NO: 200551 - RNA, 19 nt, Artificial Sequence
  Description of Artificial Sequence: Synthetic oligonucleotide
  Antisense strand to SEQ ID NO: 200550
uuuaccggccuacucucga

SEQ ID NO: 200552 - RNA, 19 nt, Artificial Sequence
  Description of Artificial Sequence: Synthetic oligonucleotide
  Sense strand starting at position 739 of SEQ ID NO: 2586
cgagaguaggccgguaaau

SEQ ID NO: 200553 - RNA, 19 nt, Artificial Sequence
  Description of Artificial Sequence: Synthetic oligonucleotide
  Antisense strand to SEQ ID NO: 200552
auuuaccggccuacucucg

SEQ ID NO: 200554 - RNA, 19 nt, Artificial Sequence
  Description of Artificial Sequence: Synthetic oligonucleotide
  Sense strand starting at position 741 of SEQ ID NO: 2586
agaguaggccgguaaauca

SEQ ID NO: 200555 - RNA, 19 nt, Artificial Sequence
  Description of Artificial Sequence: Synthetic oligonucleotide
  Antisense strand to SEQ ID NO: 200554
ugauuuaccggccuacucu

SEQ ID NO: 200556 - RNA, 19 nt, Artificial Sequence
  Description of Artificial Sequence: Synthetic oligonucleotide
  Sense strand starting at position 859 of SEQ ID NO: 2586
gcggguucucgcucaucca

SEQ ID NO: 200557 - RNA, 19 nt, Artificial Sequence
  Description of Artificial Sequence: Synthetic oligonucleotide
  Antisense strand to SEQ ID NO: 200556
uggaugagcgagaacccgc

SEQ ID NO: 200558 - RNA, 19 nt, Artificial Sequence
  Description of Artificial Sequence: Synthetic oligonucleotide
  Sense strand starting at position 967 of SEQ ID NO: 2586
ucuucuucugcuugaggga

SEQ ID NO: 200559 - RNA, 19 nt, Artificial Sequence
  Description of Artificial Sequence: Synthetic oligonucleotide
  Antisense strand to SEQ ID NO: 200558
ucccucaagcagaagaaga

SEQ ID NO: 200560 - RNA, 19 nt, Artificial Sequence
  Description of Artificial Sequence: Synthetic oligonucleotide
  Sense strand starting at position 1006 of SEQ ID NO: 2586
ucucauagagcuuguccau

SEQ ID NO: 200561 - RNA, 19 nt, Artificial Sequence
  Description of Artificial Sequence: Synthetic oligonucleotide
  Antisense strand to SEQ ID NO: 200560
auggacaagcucuaugaga

SEQ ID NO: 200562 - RNA, 19 nt, Artificial Sequence
  Description of Artificial Sequence: Synthetic oligonucleotide
  Sense strand starting at position 1102 of SEQ ID NO: 2586
gcgccagcugcuucucaau

SEQ ID NO: 200563 - RNA, 19 nt, Artificial Sequence
  Description of Artificial Sequence: Synthetic oligonucleotide
  Antisense strand to SEQ ID NO: 200562
auugagaagcagcuggcgc

SEQ ID NO: 200564 - RNA, 19 nt, Artificial Sequence
  Description of Artificial Sequence: Synthetic oligonucleotide
  Sense strand starting at position 1381 of SEQ ID NO: 2586
ugaucuucucgguguugaa

SEQ ID NO: 200565 - RNA, 19 nt, Artificial Sequence
  Description of Artificial Sequence: Synthetic oligonucleotide
  Antisense strand to SEQ ID NO: 200564
uucaacaccgagaagauca

SEQ ID NO: 200566 - RNA, 19 nt, Artificial Sequence
  Description of Artificial Sequence: Synthetic oligonucleotide
  Sense strand starting at position 1420 of SEQ ID NO: 2586
ucacgaacucguugaacuu

SEQ ID NO: 200567 - RNA, 19 nt, Artificial Sequence
  Description of Artificial Sequence: Synthetic oligonucleotide
  Antisense strand to SEQ ID NO: 200566
aaguucaacgaguucguga

SEQ ID NO: 200568 - RNA, 19 nt, Artificial Sequence
  Description of Artificial Sequence: Synthetic oligonucleotide
  Sense strand starting at position 1502 of SEQ ID NO: 2586
cuggaaggccgagauguua

SEQ ID NO: 200569 - RNA, 19 nt, Artificial Sequence
  Description of Artificial Sequence: Synthetic oligonucleotide
  Antisense strand to SEQ ID NO: 200568
uaacaucucggccuuccag

SEQ ID NO: 200570 - RNA, 19 nt, Artificial Sequence
  Description of Artificial Sequence: Synthetic oligonucleotide
  Sense strand starting at position 1510 of SEQ ID NO: 2586
ccgagauguuagaggagau

SEQ ID NO: 200571 - RNA, 19 nt, Artificial Sequence
  Description of Artificial Sequence: Synthetic oligonucleotide
  Antisense strand to SEQ ID NO: 200570
aucuccucuaacaucucgg

SEQ ID NO: 200572 - RNA, 19 nt, Artificial Sequence
  Description of Artificial Sequence: Synthetic oligonucleotide
  Sense strand starting at position 1511 of SEQ ID NO: 2586
cgagauguuagaggagaug

SEQ ID NO: 200573 - RNA, 19 nt, Artificial Sequence
  Description of Artificial Sequence: Synthetic oligonucleotide
  Antisense strand to SEQ ID NO: 200572
caucuccucuaacaucucg

SEQ ID NO: 200574 - RNA, 19 nt, Artificial Sequence
  Description of Artificial Sequence: Synthetic oligonucleotide
  Sense strand starting at position 1523 of SEQ ID NO: 2586
ggagauguugcccauggcu

SEQ ID NO: 200575 - RNA, 19 nt, Artificial Sequence
  Description of Artificial Sequence: Synthetic oligonucleotide
  Antisense strand to SEQ ID NO: 200574
agccaugggcaacaucucc

SEQ ID NO: 200576 - RNA, 19 nt, Artificial Sequence
  Description of Artificial Sequence: Synthetic oligonucleotide
  Sense strand starting at position 2265 of SEQ ID NO: 2586
gcggcugacgcguuugcaa

SEQ ID NO: 200577 - RNA, 19 nt, Artificial Sequence
  Description of Artificial Sequence: Synthetic oligonucleotide
  Antisense strand to SEQ ID NO: 200576
uugcaaacgcgucagccgc

SEQ ID NO: 200578 - RNA, 19 nt, Artificial Sequence
  Description of Artificial Sequence: Synthetic oligonucleotide
  Sense strand starting at position 2938 of SEQ ID NO: 2586
ggugaacuacuccgcagaa

SEQ ID NO: 200579 - RNA, 19 nt, Artificial Sequence
  Description of Artificial Sequence: Synthetic oligonucleotide
  Antisense strand to SEQ ID NO: 200578
uucugcggaguaguucacc

SEQ ID NO: 200580 - RNA, 19 nt, Artificial Sequence
  Description of Artificial Sequence: Synthetic oligonucleotide
  Sense strand starting at position 2939 of SEQ ID NO: 2586
gugaacuacuccgcagaaa

SEQ ID NO: 200581 - RNA, 19 nt, Artificial Sequence
  Description of Artificial Sequence: Synthetic oligonucleotide
  Antisense strand to SEQ ID NO: 200580
uuucugcggaguaguucac

SEQ ID NO: 200582 - RNA, 19 nt, Artificial Sequence
  Description of Artificial Sequence: Synthetic oligonucleotide
  Sense strand starting at position 2940 of SEQ ID NO: 2586
ugaacuacuccgcagaaau

SEQ ID NO: 200583 - RNA, 19 nt, Artificial Sequence
  Description of Artificial Sequence: Synthetic oligonucleotide
  Antisense strand to SEQ ID NO: 200582
auuucugcggaguaguuca

SEQ ID NO: 200584 - RNA, 19 nt, Artificial Sequence
  Description of Artificial Sequence: Synthetic oligonucleotide
  Sense strand starting at position 3022 of SEQ ID NO: 2586
gguuacaaacacugauauu

SEQ ID NO: 200585 - RNA, 19 nt, Artificial Sequence
  Description of Artificial Sequence: Synthetic oligonucleotide
  Antisense strand to SEQ ID NO: 200584
aauaucaguguuuguaacc

SEQ ID NO: 200586 - RNA, 19 nt, Artificial Sequence
  Description of Artificial Sequence: Synthetic oligonucleotide
  Sense strand starting at position 3034 of SEQ ID NO: 2586
ugauauuccacggguucca

SEQ ID NO: 200587 - RNA, 19 nt, Artificial Sequence
  Description of Artificial Sequence: Synthetic oligonucleotide
  Antisense strand to SEQ ID NO: 200586
uggaacccguggaauauca

SEQ ID NO: 200588 - RNA, 19 nt, Artificial Sequence
  Description of Artificial Sequence: Synthetic oligonucleotide
  Sense strand starting at position 3078 of SEQ ID NO: 2586
uuuauucugguuuguaaac

SEQ ID NO: 200589 - RNA, 19 nt, Artificial Sequence
  Description of Artificial Sequence: Synthetic oligonucleotide
  Antisense strand to SEQ ID NO: 200588
guuuacaaaccagaauaaa

SEQ ID NO: 200590 - RNA, 19 nt, Artificial Sequence
  Description of Artificial Sequence: Synthetic oligonucleotide
  Sense strand starting at position 3079 of SEQ ID NO: 2586
uuauucugguuuguaaaca

SEQ ID NO: 200591 - RNA, 19 nt, Artificial Sequence
  Description of Artificial Sequence: Synthetic oligonucleotide
  Antisense strand to SEQ ID NO: 200590
uguuuacaaaccagaauaa

SEQ ID NO: 200592 - RNA, 19 nt, Artificial Sequence
  Description of Artificial Sequence: Synthetic oligonucleotide
  Sense strand starting at position 3222 of SEQ ID NO: 2586
ccagcucuagcuuaugaga

SEQ ID NO: 200593 - RNA, 19 nt, Artificial Sequence
  Description of Artificial Sequence: Synthetic oligonucleotide
  Antisense strand to SEQ ID NO: 200592
ucucauaagcuagagcugg

SEQ ID NO: 200594 - RNA, 19 nt, Artificial Sequence
  Description of Artificial Sequence: Synthetic oligonucleotide
  Sense strand starting at position 3360 of SEQ ID NO: 2586
auaugauaucguugguacc

SEQ ID NO: 200595 - RNA, 19 nt, Artificial Sequence
  Description of Artificial Sequence: Synthetic oligonucleotide
  Antisense strand to SEQ ID NO: 200594
gguaccaacgauaucauau

SEQ ID NO: 200596 - RNA, 19 nt, Artificial Sequence
  Description of Artificial Sequence: Synthetic oligonucleotide
  Sense strand starting at position 3361 of SEQ ID NO: 2586
uaugauaucguugguacca

SEQ ID NO: 200597 - RNA, 19 nt, Artificial Sequence
  Description of Artificial Sequence: Synthetic oligonucleotide
  Antisense strand to SEQ ID NO: 200596
ugguaccaacgauaucaua

SEQ ID NO: 200598 - RNA, 19 nt, Artificial Sequence
  Description of Artificial Sequence: Synthetic oligonucleotide
  Sense strand starting at position 3362 of SEQ ID NO: 2586
augauaucguugguaccaa

SEQ ID NO: 200599 - RNA, 19 nt, Artificial Sequence
  Description of Artificial Sequence: Synthetic oligonucleotide
  Antisense strand to SEQ ID NO: 200598
uugguaccaacgauaucau

SEQ ID NO: 200600 - RNA, 19 nt, Artificial Sequence
  Description of Artificial Sequence: Synthetic oligonucleotide
  Sense strand starting at position 3373 of SEQ ID NO: 2586
gguaccaaagcaugugaga

SEQ ID NO: 200601 - RNA, 19 nt, Artificial Sequence
  Description of Artificial Sequence: Synthetic oligonucleotide
  Antisense strand to SEQ ID NO: 200600
ucucacaugcuuugguacc

SEQ ID NO: 200602 - RNA, 19 nt, Artificial Sequence
  Description of Artificial Sequence: Synthetic oligonucleotide
  Sense strand starting at position 3386 of SEQ ID NO: 2586
gugagaagaccucaccugu

SEQ ID NO: 200603 - RNA, 19 nt, Artificial Sequence
  Description of Artificial Sequence: Synthetic oligonucleotide
  Antisense strand to SEQ ID NO: 200602
acaggugaggucuucucac

SEQ ID NO: 200604 - RNA, 19 nt, Artificial Sequence
  Description of Artificial Sequence: Synthetic oligonucleotide
  Sense strand starting at position 3472 of SEQ ID NO: 2586
ccacucuacugaguggauu

SEQ ID NO: 200605 - RNA, 19 nt, Artificial Sequence
  Description of Artificial Sequence: Synthetic oligonucleotide
  Antisense strand to SEQ ID NO: 200604
aauccacucaguagagugg

SEQ ID NO: 200606 - RNA, 19 nt, Artificial Sequence
  Description of Artificial Sequence: Synthetic oligonucleotide
  Sense strand starting at position 3504 of SEQ ID NO: 2586
gaaguaucaggcuggaaag

SEQ ID NO: 200607 - RNA, 19 nt, Artificial Sequence
  Description of Artificial Sequence: Synthetic oligonucleotide
  Antisense strand to SEQ ID NO: 200606
cuuuccagccugauacuuc

SEQ ID NO: 200608 - RNA, 19 nt, Artificial Sequence
  Description of Artificial Sequence: Synthetic oligonucleotide
  Sense strand starting at position 3951 of SEQ ID NO: 2586
ggacucacauccuugguuu

SEQ ID NO: 200609 - RNA, 19 nt, Artificial Sequence
  Description of Artificial Sequence: Synthetic oligonucleotide
  Antisense strand to SEQ ID NO: 200608
aaaccaaggaugugagucc

SEQ ID NO: 200610 - RNA, 19 nt, Artificial Sequence
  Description of Artificial Sequence: Synthetic oligonucleotide
  Sense strand starting at position 3954 of SEQ ID NO: 2586
cucacauccuugguuuaga

SEQ ID NO: 200611 - RNA, 19 nt, Artificial Sequence
  Description of Artificial Sequence: Synthetic oligonucleotide
  Antisense strand to SEQ ID NO: 200610
ucuaaaccaaggaugugag

SEQ ID NO: 200612 - RNA, 19 nt, Artificial Sequence
  Description of Artificial Sequence: Synthetic oligonucleotide
  Sense strand starting at position 3955 of SEQ ID NO: 2586
ucacauccuugguuuagau

SEQ ID NO: 200613 - RNA, 19 nt, Artificial Sequence
  Description of Artificial Sequence: Synthetic oligonucleotide
  Antisense strand to SEQ ID NO: 200612
aucuaaaccaaggauguga

SEQ ID NO: 200614 - RNA, 19 nt, Artificial Sequence
  Description of Artificial Sequence: Synthetic oligonucleotide
  Sense strand starting at position 3965 of SEQ ID NO: 2586
gguuuagauccuggaaagg

SEQ ID NO: 200615 - RNA, 19 nt, Artificial Sequence
  Description of Artificial Sequence: Synthetic oligonucleotide
  Antisense strand to SEQ ID NO: 200614
ccuuuccaggaucuaaacc

SEQ ID NO: 200616 - RNA, 19 nt, Artificial Sequence
  Description of Artificial Sequence: Synthetic oligonucleotide
  Sense strand starting at position 117 of SEQ ID NO: 2585
uggucucuuugugugauaa

SEQ ID NO: 200617 - RNA, 19 nt, Artificial Sequence
  Description of Artificial Sequence: Synthetic oligonucleotide
  Antisense strand to SEQ ID NO: 200616
uuaucacacaaagagacca

SEQ ID NO: 200618 - RNA, 19 nt, Artificial Sequence
  Description of Artificial Sequence: Synthetic oligonucleotide
  Sense strand starting at position 118 of SEQ ID NO: 2585
ggucucuuugugugauaau

SEQ ID NO: 200619 - RNA, 19 nt, Artificial Sequence
  Description of Artificial Sequence: Synthetic oligonucleotide
  Antisense strand to SEQ ID NO: 200618
auuaucacacaaagagacc

SEQ ID NO: 200620 - RNA, 19 nt, Artificial Sequence
  Description of Artificial Sequence: Synthetic oligonucleotide
  Sense strand starting at position 165 of SEQ ID NO: 2585
ucuggaagaugucugauuc

SEQ ID NO: 200621 - RNA, 19 nt, Artificial Sequence
  Description of Artificial Sequence: Synthetic oligonucleotide
  Antisense strand to SEQ ID NO: 200620
gaaucagacaucuuccaga

SEQ ID NO: 200622 - RNA, 19 nt, Artificial Sequence
  Description of Artificial Sequence: Synthetic oligonucleotide
  Sense strand starting at position 169 of SEQ ID NO: 2585
gaagaugucugauuccagg

SEQ ID NO: 200623 - RNA, 19 nt, Artificial Sequence
  Description of Artificial Sequence: Synthetic oligonucleotide
  Antisense strand to SEQ ID NO: 200622
ccuggaaucagacaucuuc

SEQ ID NO: 200624 - RNA, 19 nt, Artificial Sequence
  Description of Artificial Sequence: Synthetic oligonucleotide
  Sense strand starting at position 309 of SEQ ID NO: 2585
caggcaguccucugaugac

SEQ ID NO: 200625 - RNA, 19 nt, Artificial Sequence
  Description of Artificial Sequence: Synthetic oligonucleotide
  Antisense strand to SEQ ID NO: 200624
gucaucagaggacugccug

SEQ ID NO: 200626 - RNA, 19 nt, Artificial Sequence
  Description of Artificial Sequence: Synthetic oligonucleotide
  Sense strand starting at position 586 of SEQ ID NO: 2585
uugucuuuccgacaacuga

SEQ ID NO: 200627 - RNA, 19 nt, Artificial Sequence
  Description of Artificial Sequence: Synthetic oligonucleotide
  Antisense strand to SEQ ID NO: 200626
ucaguugucggaaagacaa

SEQ ID NO: 200628 - RNA, 19 nt, Artificial Sequence
  Description of Artificial Sequence: Synthetic oligonucleotide
  Sense strand starting at position 684 of SEQ ID NO: 2585
agcucuggcguucagacaa

SEQ ID NO: 200629 - RNA, 19 nt, Artificial Sequence
  Description of Artificial Sequence: Synthetic oligonucleotide
  Antisense strand to SEQ ID NO: 200628
uugucugaacgccagagcu

SEQ ID NO: 200630 - RNA, 19 nt, Artificial Sequence
  Description of Artificial Sequence: Synthetic oligonucleotide
  Sense strand starting at position 734 of SEQ ID NO: 2585
ucgagaguaggccgguaaa

SEQ ID NO: 200631 - RNA, 19 nt, Artificial Sequence
  Description of Artificial Sequence: Synthetic oligonucleotide
  Antisense strand to SEQ ID NO: 200630
uuuaccggccuacucucga

SEQ ID NO: 200632 - RNA, 19 nt, Artificial Sequence
  Description of Artificial Sequence: Synthetic oligonucleotide
  Sense strand starting at position 735 of SEQ ID NO: 2585
cgagaguaggccgguaaau

SEQ ID NO: 200633 - RNA, 19 nt, Artificial Sequence
  Description of Artificial Sequence: Synthetic oligonucleotide
  Antisense strand to SEQ ID NO: 200632
auuuaccggccuacucucg

SEQ ID NO: 200634 - RNA, 19 nt, Artificial Sequence
  Description of Artificial Sequence: Synthetic oligonucleotide
  Sense strand starting at position 737 of SEQ ID NO: 2585
agaguaggccgguaaauca

SEQ ID NO: 200635 - RNA, 19 nt, Artificial Sequence
  Description of Artificial Sequence: Synthetic oligonucleotide
  Antisense strand to SEQ ID NO: 200634
ugauuuaccggccuacucu

SEQ ID NO: 200636 - RNA, 19 nt, Artificial Sequence
  Description of Artificial Sequence: Synthetic oligonucleotide
  Sense strand starting at position 855 of SEQ ID NO: 2585
gcggguucucgcucaucca

SEQ ID NO: 200637 - RNA, 19 nt, Artificial Sequence
  Description of Artificial Sequence: Synthetic oligonucleotide
  Antisense strand to SEQ ID NO: 200636
uggaugagcgagaacccgc

SEQ ID NO: 200638 - RNA, 19 nt, Artificial Sequence
  Description of Artificial Sequence: Synthetic oligonucleotide
  Sense strand starting at position 963 of SEQ ID NO: 2585
ucuucuucugcuugaggga

SEQ ID NO: 200639 - RNA, 19 nt, Artificial Sequence
  Description of Artificial Sequence: Synthetic oligonucleotide
  Antisense strand to SEQ ID NO: 200638
ucccucaagcagaagaaga

SEQ ID NO: 200640 - RNA, 19 nt, Artificial Sequence
  Description of Artificial Sequence: Synthetic oligonucleotide
  Sense strand starting at position 1002 of SEQ ID NO: 2585
ucucauagagcuuguccau

SEQ ID NO: 200641 - RNA, 19 nt, Artificial Sequence
  Description of Artificial Sequence: Synthetic oligonucleotide
  Antisense strand to SEQ ID NO: 200640
auggacaagcucuaugaga

SEQ ID NO: 200642 - RNA, 19 nt, Artificial Sequence
  Description of Artificial Sequence: Synthetic oligonucleotide
  Sense strand starting at position 1098 of SEQ ID NO: 2585
gcgccagcugcuucucaau

SEQ ID NO: 200643 - RNA, 19 nt, Artificial Sequence
  Description of Artificial Sequence: Synthetic oligonucleotide
  Antisense strand to SEQ ID NO: 200642
auugagaagcagcuggcgc

SEQ ID NO: 200644 - RNA, 19 nt, Artificial Sequence
  Description of Artificial Sequence: Synthetic oligonucleotide
  Sense strand starting at position 1377 of SEQ ID NO: 2585
ugaucuucucgguguugaa

SEQ ID NO: 200645 - RNA, 19 nt, Artificial Sequence
  Description of Artificial Sequence: Synthetic oligonucleotide
  Antisense strand to SEQ ID NO: 200644
uucaacaccgagaagauca

SEQ ID NO: 200646 - RNA, 19 nt, Artificial Sequence
  Description of Artificial Sequence: Synthetic oligonucleotide
  Sense strand starting at position 1416 of SEQ ID NO: 2585
ucacgaacucguugaacuu

SEQ ID NO: 200647 - RNA, 19 nt, Artificial Sequence
  Description of Artificial Sequence: Synthetic oligonucleotide
  Antisense strand to SEQ ID NO: 200646
aaguucaacgaguucguga

SEQ ID NO: 200648 - RNA, 19 nt, Artificial Sequence
  Description of Artificial Sequence: Synthetic oligonucleotide
  Sense strand starting at position 1498 of SEQ ID NO: 2585
cuggaaggccgagauguua

SEQ ID NO: 200649 - RNA, 19 nt, Artificial Sequence
  Description of Artificial Sequence: Synthetic oligonucleotide
  Antisense strand to SEQ ID NO: 200648
uaacaucucggccuuccag

SEQ ID NO: 200650 - RNA, 19 nt, Artificial Sequence
  Description of Artificial Sequence: Synthetic oligonucleotide
  Sense strand starting at position 1506 of SEQ ID NO: 2585
ccgagauguuagaggagau

SEQ ID NO: 200651 - RNA, 19 nt, Artificial Sequence
  Description of Artificial Sequence: Synthetic oligonucleotide
  Antisense strand to SEQ ID NO: 200650
aucuccucuaacaucucgg

SEQ ID NO: 200652 - RNA, 19 nt, Artificial Sequence
  Description of Artificial Sequence: Synthetic oligonucleotide
  Sense strand starting at position 1507 of SEQ ID NO: 2585
cgagauguuagaggagaug

SEQ ID NO: 200653 - RNA, 19 nt, Artificial Sequence
  Description of Artificial Sequence: Synthetic oligonucleotide
  Antisense strand to SEQ ID NO: 200652
caucuccucuaacaucucg

SEQ ID NO: 200654 - RNA, 19 nt, Artificial Sequence
  Description of Artificial Sequence: Synthetic oligonucleotide
  Sense strand starting at position 1519 of SEQ ID NO: 2585
ggagauguugcccauggcu

SEQ ID NO: 200655 - RNA, 19 nt, Artificial Sequence
  Description of Artificial Sequence: Synthetic oligonucleotide
  Antisense strand to SEQ ID NO: 200654
agccaugggcaacaucucc

SEQ ID NO: 200656 - RNA, 19 nt, Artificial Sequence
  Description of Artificial Sequence: Synthetic oligonucleotide
  Sense strand starting at position 2261 of SEQ ID NO: 2585
gcggcugacgcguuugcaa

SEQ ID NO: 200657 - RNA, 19 nt, Artificial Sequence
  Description of Artificial Sequence: Synthetic oligonucleotide
  Antisense strand to SEQ ID NO: 200656
uugcaaacgcgucagccgc

SEQ ID NO: 200658 - RNA, 19 nt, Artificial Sequence
  Description of Artificial Sequence: Synthetic oligonucleotide
  Sense strand starting at position 2934 of SEQ ID NO: 2585
ggugaacuacuccgcagaa

SEQ ID NO: 200659 - RNA, 19 nt, Artificial Sequence
  Description of Artificial Sequence: Synthetic oligonucleotide
  Antisense strand to SEQ ID NO: 200658
uucugcggaguaguucacc

SEQ ID NO: 200660 - RNA, 19 nt, Artificial Sequence
  Description of Artificial Sequence: Synthetic oligonucleotide
  Sense strand starting at position 2935 of SEQ ID NO: 2585
gugaacuacuccgcagaaa

SEQ ID NO: 200661 - RNA, 19 nt, Artificial Sequence
  Description of Artificial Sequence: Synthetic oligonucleotide
  Antisense strand to SEQ ID NO: 200660
uuucugcggaguaguucac

SEQ ID NO: 200662 - RNA, 19 nt, Artificial Sequence
  Description of Artificial Sequence: Synthetic oligonucleotide
  Sense strand starting at position 2936 of SEQ ID NO: 2585
ugaacuacuccgcagaaau

SEQ ID NO: 200663 - RNA, 19 nt, Artificial Sequence
  Description of Artificial Sequence: Synthetic oligonucleotide
  Antisense strand to SEQ ID NO: 200662
auuucugcggaguaguuca

SEQ ID NO: 200664 - RNA, 19 nt, Artificial Sequence
  Description of Artificial Sequence: Synthetic oligonucleotide
  Sense strand starting at position 3018 of SEQ ID NO: 2585
gguuacaaacacugauauu

SEQ ID NO: 200665 - RNA, 19 nt, Artificial Sequence
  Description of Artificial Sequence: Synthetic oligonucleotide
  Antisense strand to SEQ ID NO: 200664
aauaucaguguuuguaacc

SEQ ID NO: 200666 - RNA, 19 nt, Artificial Sequence
  Description of Artificial Sequence: Synthetic oligonucleotide
  Sense strand starting at position 3030 of SEQ ID NO: 2585
ugauauuccacggguucca

SEQ ID NO: 200667 - RNA, 19 nt, Artificial Sequence
  Description of Artificial Sequence: Synthetic oligonucleotide
  Antisense strand to SEQ ID NO: 200666
uggaacccguggaauauca

SEQ ID NO: 200668 - RNA, 19 nt, Artificial Sequence
  Description of Artificial Sequence: Synthetic oligonucleotide
  Sense strand starting at position 3074 of SEQ ID NO: 2585
uuuauucugguuuguaaac

SEQ ID NO: 200669 - RNA, 19 nt, Artificial Sequence
  Description of Artificial Sequence: Synthetic oligonucleotide
  Antisense strand to SEQ ID NO: 200668
guuuacaaaccagaauaaa

SEQ ID NO: 200670 - RNA, 19 nt, Artificial Sequence
  Description of Artificial Sequence: Synthetic oligonucleotide
  Sense strand starting at position 3075 of SEQ ID NO: 2585
uuauucugguuuguaaaca

SEQ ID NO: 200671 - RNA, 19 nt, Artificial Sequence
  Description of Artificial Sequence: Synthetic oligonucleotide
  Antisense strand to SEQ ID NO: 200670
uguuuacaaaccagaauaa

SEQ ID NO: 200672 - RNA, 19 nt, Artificial Sequence
  Description of Artificial Sequence: Synthetic oligonucleotide
  Sense strand starting at position 3218 of SEQ ID NO: 2585
ccagcucuagcuuaugaga

SEQ ID NO: 200673 - RNA, 19 nt, Artificial Sequence
  Description of Artificial Sequence: Synthetic oligonucleotide
  Antisense strand to SEQ ID NO: 200672
ucucauaagcuagagcugg

SEQ ID NO: 200674 - RNA, 19 nt, Artificial Sequence
  Description of Artificial Sequence: Synthetic oligonucleotide
  Sense strand starting at position 3356 of SEQ ID NO: 2585
auaugauaucguugguacc

SEQ ID NO: 200675 - RNA, 19 nt, Artificial Sequence
  Description of Artificial Sequence: Synthetic oligonucleotide
  Antisense strand to SEQ ID NO: 200674
gguaccaacgauaucauau

SEQ ID NO: 200676 - RNA, 19 nt, Artificial Sequence
  Description of Artificial Sequence: Synthetic oligonucleotide
  Sense strand starting at position 3357 of SEQ ID NO: 2585
uaugauaucguugguacca

SEQ ID NO: 200677 - RNA, 19 nt, Artificial Sequence
  Description of Artificial Sequence: Synthetic oligonucleotide
  Antisense strand to SEQ ID NO: 200676
ugguaccaacgauaucaua

SEQ ID NO: 200678 - RNA, 19 nt, Artificial Sequence
  Description of Artificial Sequence: Synthetic oligonucleotide
  Sense strand starting at position 3358 of SEQ ID NO: 2585
augauaucguugguaccaa

SEQ ID NO: 200679 - RNA, 19 nt, Artificial Sequence
  Description of Artificial Sequence: Synthetic oligonucleotide
  Antisense strand to SEQ ID NO: 200678
uugguaccaacgauaucau

SEQ ID NO: 200680 - RNA, 19 nt, Artificial Sequence
  Description of Artificial Sequence: Synthetic oligonucleotide
  Sense strand starting at position 3369 of SEQ ID NO: 2585
gguaccaaagcaugugaga

SEQ ID NO: 200681 - RNA, 19 nt, Artificial Sequence
  Description of Artificial Sequence: Synthetic oligonucleotide
  Antisense strand to SEQ ID NO: 200680
ucucacaugcuuugguacc

SEQ ID NO: 200682 - RNA, 19 nt, Artificial Sequence
  Description of Artificial Sequence: Synthetic oligonucleotide
  Sense strand starting at position 3382 of SEQ ID NO: 2585
gugagaagaccucaccugu

SEQ ID NO: 200683 - RNA, 19 nt, Artificial Sequence
  Description of Artificial Sequence: Synthetic oligonucleotide
  Antisense strand to SEQ ID NO: 200682
acaggugaggucuucucac

SEQ ID NO: 200684 - RNA, 19 nt, Artificial Sequence
  Description of Artificial Sequence: Synthetic oligonucleotide
  Sense strand starting at position 3468 of SEQ ID NO: 2585
ccacucuacugaguggauu

SEQ ID NO: 200685 - RNA, 19 nt, Artificial Sequence
  Description of Artificial Sequence: Synthetic oligonucleotide
  Antisense strand to SEQ ID NO: 200684
aauccacucaguagagugg

SEQ ID NO: 200686 - RNA, 19 nt, Artificial Sequence
  Description of Artificial Sequence: Synthetic oligonucleotide
  Sense strand starting at position 3500 of SEQ ID NO: 2585
gaaguaucaggcuggaaag

SEQ ID NO: 200687 - RNA, 19 nt, Artificial Sequence
  Description of Artificial Sequence: Synthetic oligonucleotide
  Antisense strand to SEQ ID NO: 200686
cuuuccagccugauacuuc

SEQ ID NO: 200688 - RNA, 19 nt, Artificial Sequence
  Description of Artificial Sequence: Synthetic oligonucleotide
  Sense strand starting at position 3947 of SEQ ID NO: 2585
ggacucacauccuugguuu

SEQ ID NO: 200689 - RNA, 19 nt, Artificial Sequence
  Description of Artificial Sequence: Synthetic oligonucleotide
  Antisense strand to SEQ ID NO: 200688
aaaccaaggaugugagucc

SEQ ID NO: 200690 - RNA, 19 nt, Artificial Sequence
  Description of Artificial Sequence: Synthetic oligonucleotide
  Sense strand starting at position 3950 of SEQ ID NO: 2585
cucacauccuugguuuaga

SEQ ID NO: 200691 - RNA, 19 nt, Artificial Sequence
  Description of Artificial Sequence: Synthetic oligonucleotide
  Antisense strand to SEQ ID NO: 200690
ucuaaaccaaggaugugag

SEQ ID NO: 200692 - RNA, 19 nt, Artificial Sequence
  Description of Artificial Sequence: Synthetic oligonucleotide
  Sense strand starting at position 3951 of SEQ ID NO: 2585
ucacauccuugguuuagau

SEQ ID NO: 200693 - RNA, 19 nt, Artificial Sequence
  Description of Artificial Sequence: Synthetic oligonucleotide
  Antisense strand to SEQ ID NO: 200692
aucuaaaccaaggauguga

SEQ ID NO: 200694 - RNA, 19 nt, Artificial Sequence
  Description of Artificial Sequence: Synthetic oligonucleotide
  Sense strand starting at position 3961 of SEQ ID NO: 2585
gguuuagauccuggaaagg

SEQ ID NO: 200695 - RNA, 19 nt, Artificial Sequence
  Description of Artificial Sequence: Synthetic oligonucleotide
  Antisense strand to SEQ ID NO: 200694
ccuuuccaggaucuaaacc

SEQ ID NO: 200696 - RNA, 19 nt, Artificial Sequence
  Description of Artificial Sequence: Synthetic oligonucleotide
  Sense strand starting at position 222 of SEQ ID NO: 2587
uccacagaucccugguguu

SEQ ID NO: 200697 - RNA, 19 nt, Artificial Sequence
  Description of Artificial Sequence: Synthetic oligonucleotide
  Antisense strand to SEQ ID NO: 200696
aacaccagggaucugugga

SEQ ID NO: 200698 - RNA, 19 nt, Artificial Sequence
  Description of Artificial Sequence: Synthetic oligonucleotide
  Sense strand starting at position 232 of SEQ ID NO: 2587
ccugguguucuaggugaga

SEQ ID NO: 200699 - RNA, 19 nt, Artificial Sequence
  Description of Artificial Sequence: Synthetic oligonucleotide
  Antisense strand to SEQ ID NO: 200698
ucucaccuagaacaccagg

SEQ ID NO: 200700 - RNA, 19 nt, Artificial Sequence
  Description of Artificial Sequence: Synthetic oligonucleotide
  Sense strand starting at position 234 of SEQ ID NO: 2587
ugguguucuaggugagaaa

SEQ ID NO: 200701 - RNA, 19 nt, Artificial Sequence
  Description of Artificial Sequence: Synthetic oligonucleotide
  Antisense strand to SEQ ID NO: 200700
uuucucaccuagaacacca

SEQ ID NO: 200702 - RNA, 19 nt, Artificial Sequence
  Description of Artificial Sequence: Synthetic oligonucleotide
  Sense strand starting at position 333 of SEQ ID NO: 2587
gacagugcugauuagaacu

SEQ ID NO: 200703 - RNA, 19 nt, Artificial Sequence
  Description of Artificial Sequence: Synthetic oligonucleotide
  Antisense strand to SEQ ID NO: 200702
aguucuaaucagcacuguc

SEQ ID NO: 200704 - RNA, 19 nt, Artificial Sequence
  Description of Artificial Sequence: Synthetic oligonucleotide
  Sense strand starting at position 478 of SEQ ID NO: 2587
guucuaguucugcuugcuu

SEQ ID NO: 200705 - RNA, 19 nt, Artificial Sequence
  Description of Artificial Sequence: Synthetic oligonucleotide
  Antisense strand to SEQ ID NO: 200704
aagcaagcagaacuagaac

SEQ ID NO: 200706 - RNA, 19 nt, Artificial Sequence
  Description of Artificial Sequence: Synthetic oligonucleotide
  Sense strand starting at position 546 of SEQ ID NO: 2587
guaguagguguacauaaua

SEQ ID NO: 200707 - RNA, 19 nt, Artificial Sequence
  Description of Artificial Sequence: Synthetic oligonucleotide
  Antisense strand to SEQ ID NO: 200706
uauuauguacaccuacuac

SEQ ID NO: 200708 - RNA, 19 nt, Artificial Sequence
  Description of Artificial Sequence: Synthetic oligonucleotide
  Sense strand starting at position 577 of SEQ ID NO: 2587
cacguaagucuuuauugga

SEQ ID NO: 200709 - RNA, 19 nt, Artificial Sequence
  Description of Artificial Sequence: Synthetic oligonucleotide
  Antisense strand to SEQ ID NO: 200708
uccaauaaagacuuacgug

SEQ ID NO: 200710 - RNA, 19 nt, Artificial Sequence
  Description of Artificial Sequence: Synthetic oligonucleotide
  Sense strand starting at position 709 of SEQ ID NO: 2587
guaucuuaauaaguaucca

SEQ ID NO: 200711 - RNA, 19 nt, Artificial Sequence
  Description of Artificial Sequence: Synthetic oligonucleotide
  Antisense strand to SEQ ID NO: 200710
uggauacuuauuaagauac

SEQ ID NO: 200712 - RNA, 19 nt, Artificial Sequence
  Description of Artificial Sequence: Synthetic oligonucleotide
  Sense strand starting at position 874 of SEQ ID NO: 2587
gcuaguuaccuaugguuaa

SEQ ID NO: 200713 - RNA, 19 nt, Artificial Sequence
  Description of Artificial Sequence: Synthetic oligonucleotide
  Antisense strand to SEQ ID NO: 200712
uuaaccauagguaacuagc

SEQ ID NO: 200714 - RNA, 19 nt, Artificial Sequence
  Description of Artificial Sequence: Synthetic oligonucleotide
  Sense strand starting at position 877 of SEQ ID NO: 2587
aguuaccuaugguuaacaa

SEQ ID NO: 200715 - RNA, 19 nt, Artificial Sequence
  Description of Artificial Sequence: Synthetic oligonucleotide
  Antisense strand to SEQ ID NO: 200714
uuguuaaccauagguaacu

SEQ ID NO: 200716 - RNA, 19 nt, Artificial Sequence
  Description of Artificial Sequence: Synthetic oligonucleotide
  Sense strand starting at position 878 of SEQ ID NO: 2587
guuaccuaugguuaacaaa

SEQ ID NO: 200717 - RNA, 19 nt, Artificial Sequence
  Description of Artificial Sequence: Synthetic oligonucleotide
  Antisense strand to SEQ ID NO: 200716
uuuguuaaccauagguaac

SEQ ID NO: 200718 - RNA, 19 nt, Artificial Sequence
  Description of Artificial Sequence: Synthetic oligonucleotide
  Sense strand starting at position 1223 of SEQ ID NO: 2587
ggcagcaaucuauaaccuu

SEQ ID NO: 200719 - RNA, 19 nt, Artificial Sequence
  Description of Artificial Sequence: Synthetic oligonucleotide
  Antisense strand to SEQ ID NO: 200718
aagguuauagauugcugcc

SEQ ID NO: 200720 - RNA, 19 nt, Artificial Sequence
  Description of Artificial Sequence: Synthetic oligonucleotide
  Sense strand starting at position 1414 of SEQ ID NO: 2587
uuaggaaggucuccuaaga

SEQ ID NO: 200721 - RNA, 19 nt, Artificial Sequence
  Description of Artificial Sequence: Synthetic oligonucleotide
  Antisense strand to SEQ ID NO: 200720
ucuuaggagaccuuccuaa

SEQ ID NO: 200722 - RNA, 19 nt, Artificial Sequence
  Description of Artificial Sequence: Synthetic oligonucleotide
  Sense strand starting at position 2079 of SEQ ID NO: 2587
cgcccuguccucgcuuauu

SEQ ID NO: 200723 - RNA, 19 nt, Artificial Sequence
  Description of Artificial Sequence: Synthetic oligonucleotide
  Antisense strand to SEQ ID NO: 200722
aauaagcgaggacagggcg

SEQ ID NO: 200724 - RNA, 19 nt, Artificial Sequence
  Description of Artificial Sequence: Synthetic oligonucleotide
  Sense strand starting at position 2124 of SEQ ID NO: 2587
aggacuuuacccugggacu

SEQ ID NO: 200725 - RNA, 19 nt, Artificial Sequence
  Description of Artificial Sequence: Synthetic oligonucleotide
  Antisense strand to SEQ ID NO: 200724
agucccaggguaaaguccu

SEQ ID NO: 200726 - RNA, 19 nt, Artificial Sequence
  Description of Artificial Sequence: Synthetic oligonucleotide
  Sense strand starting at position 2126 of SEQ ID NO: 2587
gacuuuacccugggacuga

SEQ ID NO: 200727 - RNA, 19 nt, Artificial Sequence
  Description of Artificial Sequence: Synthetic oligonucleotide
  Antisense strand to SEQ ID NO: 200726
ucagucccaggguaaaguc

SEQ ID NO: 200728 - RNA, 19 nt, Artificial Sequence
  Description of Artificial Sequence: Synthetic oligonucleotide
  Sense strand starting at position 2301 of SEQ ID NO: 2587
cuuaaaguuccacgucaug

SEQ ID NO: 200729 - RNA, 19 nt, Artificial Sequence
  Description of Artificial Sequence: Synthetic oligonucleotide
  Antisense strand to SEQ ID NO: 200728
caugacguggaacuuuaag

SEQ ID NO: 200730 - RNA, 19 nt, Artificial Sequence
  Description of Artificial Sequence: Synthetic oligonucleotide
  Sense strand starting at position 2313 of SEQ ID NO: 2587
cgucaugacucuuuaagac

SEQ ID NO: 200731 - RNA, 19 nt, Artificial Sequence
  Description of Artificial Sequence: Synthetic oligonucleotide
  Antisense strand to SEQ ID NO: 200730
gucuuaaagagucaugacg

SEQ ID NO: 200732 - RNA, 19 nt, Artificial Sequence
  Description of Artificial Sequence: Synthetic oligonucleotide
  Sense strand starting at position 2525 of SEQ ID NO: 2587
accuuuaguggccaccaaa

SEQ ID NO: 200733 - RNA, 19 nt, Artificial Sequence
  Description of Artificial Sequence: Synthetic oligonucleotide
  Antisense strand to SEQ ID NO: 200732
uuugguggccacuaaaggu

SEQ ID NO: 200734 - RNA, 19 nt, Artificial Sequence
  Description of Artificial Sequence: Synthetic oligonucleotide
  Sense strand starting at position 2561 of SEQ ID NO: 2587
ucucguuaaccuuaguaaa

SEQ ID NO: 200735 - RNA, 19 nt, Artificial Sequence
  Description of Artificial Sequence: Synthetic oligonucleotide
  Antisense strand to SEQ ID NO: 200734
uuuacuaagguuaacgaga

SEQ ID NO: 200736 - RNA, 19 nt, Artificial Sequence
  Description of Artificial Sequence: Synthetic oligonucleotide
  Sense strand starting at position 2644 of SEQ ID NO: 2587
ccaacagcugaaugaaauu

SEQ ID NO: 200737 - RNA, 19 nt, Artificial Sequence
  Description of Artificial Sequence: Synthetic oligonucleotide
  Antisense strand to SEQ ID NO: 200736
aauuucauucagcuguugg

SEQ ID NO: 200738 - RNA, 19 nt, Artificial Sequence
  Description of Artificial Sequence: Synthetic oligonucleotide
  Sense strand starting at position 2740 of SEQ ID NO: 2587
aaguaauuucguugacuuc

SEQ ID NO: 200739 - RNA, 19 nt, Artificial Sequence
  Description of Artificial Sequence: Synthetic oligonucleotide
  Antisense strand to SEQ ID NO: 200738
gaagucaacgaaauuacuu

SEQ ID NO: 200740 - RNA, 19 nt, Artificial Sequence
  Description of Artificial Sequence: Synthetic oligonucleotide
  Sense strand starting at position 2845 of SEQ ID NO: 2587
guauuaucaugucuggauu

SEQ ID NO: 200741 - RNA, 19 nt, Artificial Sequence
  Description of Artificial Sequence: Synthetic oligonucleotide
  Antisense strand to SEQ ID NO: 200740
aauccagacaugauaauac

SEQ ID NO: 200742 - RNA, 19 nt, Artificial Sequence
  Description of Artificial Sequence: Synthetic oligonucleotide
  Sense strand starting at position 2874 of SEQ ID NO: 2587
ucuguacacuguuuagaag

SEQ ID NO: 200743 - RNA, 19 nt, Artificial Sequence
  Description of Artificial Sequence: Synthetic oligonucleotide
  Antisense strand to SEQ ID NO: 200742
cuucuaaacaguguacaga

SEQ ID NO: 200744 - RNA, 19 nt, Artificial Sequence
  Description of Artificial Sequence: Synthetic oligonucleotide
  Sense strand starting at position 2875 of SEQ ID NO: 2587
cuguacacuguuuagaaga

SEQ ID NO: 200745 - RNA, 19 nt, Artificial Sequence
  Description of Artificial Sequence: Synthetic oligonucleotide
  Antisense strand to SEQ ID NO: 200744
ucuucuaaacaguguacag

SEQ ID NO: 200746 - RNA, 19 nt, Artificial Sequence
  Description of Artificial Sequence: Synthetic oligonucleotide
  Sense strand starting at position 2886 of SEQ ID NO: 2587
uuagaagaacaauguaguu

SEQ ID NO: 200747 - RNA, 19 nt, Artificial Sequence
  Description of Artificial Sequence: Synthetic oligonucleotide
  Antisense strand to SEQ ID NO: 200746
aacuacauuguucuucuaa

SEQ ID NO: 200748 - RNA, 19 nt, Artificial Sequence
  Description of Artificial Sequence: Synthetic oligonucleotide
  Sense strand starting at position 2891 of SEQ ID NO: 2587
agaacaauguaguuuguau

SEQ ID NO: 200749 - RNA, 19 nt, Artificial Sequence
  Description of Artificial Sequence: Synthetic oligonucleotide
  Antisense strand to SEQ ID NO: 200748
auacaaacuacauuguucu

SEQ ID NO: 200750 - RNA, 19 nt, Artificial Sequence
  Description of Artificial Sequence: Synthetic oligonucleotide
  Sense strand starting at position 3010 of SEQ ID NO: 2587
uuaugaaauggaugucaua

SEQ ID NO: 200751 - RNA, 19 nt, Artificial Sequence
  Description of Artificial Sequence: Synthetic oligonucleotide
  Antisense strand to SEQ ID NO: 200750
uaugacauccauuucauaa

SEQ ID NO: 200752 - RNA, 19 nt, Artificial Sequence
  Description of Artificial Sequence: Synthetic oligonucleotide
  Sense strand starting at position 3074 of SEQ ID NO: 2587
aggaaauggucucccaggu

SEQ ID NO: 200753 - RNA, 19 nt, Artificial Sequence
  Description of Artificial Sequence: Synthetic oligonucleotide
  Antisense strand to SEQ ID NO: 200752
accugggagaccauuuccu

SEQ ID NO: 200754 - RNA, 19 nt, Artificial Sequence
  Description of Artificial Sequence: Synthetic oligonucleotide
  Sense strand starting at position 3078 of SEQ ID NO: 2587
aauggucucccagguuauu

SEQ ID NO: 200755 - RNA, 19 nt, Artificial Sequence
  Description of Artificial Sequence: Synthetic oligonucleotide
  Antisense strand to SEQ ID NO: 200754
aauaaccugggagaccauu

SEQ ID NO: 200756 - RNA, 19 nt, Artificial Sequence
  Description of Artificial Sequence: Synthetic oligonucleotide
  Sense strand starting at position 3217 of SEQ ID NO: 2587
agaguaggaugguuugaau

SEQ ID NO: 200757 - RNA, 19 nt, Artificial Sequence
  Description of Artificial Sequence: Synthetic oligonucleotide
  Antisense strand to SEQ ID NO: 200756
auucaaaccauccuacucu

SEQ ID NO: 200758 - RNA, 19 nt, Artificial Sequence
  Description of Artificial Sequence: Synthetic oligonucleotide
  Sense strand starting at position 3459 of SEQ ID NO: 2587
auaucagcauucccagaga

SEQ ID NO: 200759 - RNA, 19 nt, Artificial Sequence
  Description of Artificial Sequence: Synthetic oligonucleotide
  Antisense strand to SEQ ID NO: 200758
ucucugggaaugcugauau

SEQ ID NO: 200760 - RNA, 19 nt, Artificial Sequence
  Description of Artificial Sequence: Synthetic oligonucleotide
  Sense strand starting at position 3462 of SEQ ID NO: 2587
ucagcauucccagagauca

SEQ ID NO: 200761 - RNA, 19 nt, Artificial Sequence
  Description of Artificial Sequence: Synthetic oligonucleotide
  Antisense strand to SEQ ID NO: 200760
ugaucucugggaaugcuga

SEQ ID NO: 200762 - RNA, 19 nt, Artificial Sequence
  Description of Artificial Sequence: Synthetic oligonucleotide
  Sense strand starting at position 3470 of SEQ ID NO: 2587
cccagagaucaaggugacu

SEQ ID NO: 200763 - RNA, 19 nt, Artificial Sequence
  Description of Artificial Sequence: Synthetic oligonucleotide
  Antisense strand to SEQ ID NO: 200762
agucaccuugaucucuggg

SEQ ID NO: 200764 - RNA, 19 nt, Artificial Sequence
  Description of Artificial Sequence: Synthetic oligonucleotide
  Sense strand starting at position 3486 of SEQ ID NO: 2587
acuagaauuugugaagcag

SEQ ID NO: 200765 - RNA, 19 nt, Artificial Sequence
  Description of Artificial Sequence: Synthetic oligonucleotide
  Antisense strand to SEQ ID NO: 200764
cugcuucacaaauucuagu

SEQ ID NO: 200766 - RNA, 19 nt, Artificial Sequence
  Description of Artificial Sequence: Synthetic oligonucleotide
  Sense strand starting at position 3566 of SEQ ID NO: 2587
agucuuuggcugcauauca

SEQ ID NO: 200767 - RNA, 19 nt, Artificial Sequence
  Description of Artificial Sequence: Synthetic oligonucleotide
  Antisense strand to SEQ ID NO: 200766
ugauaugcagccaaagacu

SEQ ID NO: 200768 - RNA, 19 nt, Artificial Sequence
  Description of Artificial Sequence: Synthetic oligonucleotide
  Sense strand starting at position 3581 of SEQ ID NO: 2587
aucaauuugugcucgugca

SEQ ID NO: 200769 - RNA, 19 nt, Artificial Sequence
  Description of Artificial Sequence: Synthetic oligonucleotide
  Antisense strand to SEQ ID NO: 200768
ugcacgagcacaaauugau

SEQ ID NO: 200770 - RNA, 19 nt, Artificial Sequence
  Description of Artificial Sequence: Synthetic oligonucleotide
  Sense strand starting at position 3588 of SEQ ID NO: 2587
ugugcucgugcaguaugaa

SEQ ID NO: 200771 - RNA, 19 nt, Artificial Sequence
  Description of Artificial Sequence: Synthetic oligonucleotide
  Antisense strand to SEQ ID NO: 200770
uucauacugcacgagcaca

SEQ ID NO: 200772 - RNA, 19 nt, Artificial Sequence
  Description of Artificial Sequence: Synthetic oligonucleotide
  Sense strand starting at position 3666 of SEQ ID NO: 2587
ugcaaaugauucccagaga

SEQ ID NO: 200773 - RNA, 19 nt, Artificial Sequence
  Description of Artificial Sequence: Synthetic oligonucleotide
  Antisense strand to SEQ ID NO: 200772
ucucugggaaucauuugca

SEQ ID NO: 200774 - RNA, 19 nt, Artificial Sequence
  Description of Artificial Sequence: Synthetic oligonucleotide
  Sense strand starting at position 3679 of SEQ ID NO: 2587
cagagauuacaacggguca

SEQ ID NO: 200775 - RNA, 19 nt, Artificial Sequence
  Description of Artificial Sequence: Synthetic oligonucleotide
  Antisense strand to SEQ ID NO: 200774
ugacccguuguaaucucug

SEQ ID NO: 200776 - RNA, 19 nt, Artificial Sequence
  Description of Artificial Sequence: Synthetic oligonucleotide
  Sense strand starting at position 312 of SEQ ID NO: 2588
ggacgaguggacuauacuu

SEQ ID NO: 200777 - RNA, 19 nt, Artificial Sequence
  Description of Artificial Sequence: Synthetic oligonucleotide
  Antisense strand to SEQ ID NO: 200776
aaguauaguccacucgucc

SEQ ID NO: 200778 - RNA, 19 nt, Artificial Sequence
  Description of Artificial Sequence: Synthetic oligonucleotide
  Sense strand starting at position 320 of SEQ ID NO: 2588
ggacuauacuuucugcaac

SEQ ID NO: 200779 - RNA, 19 nt, Artificial Sequence
  Description of Artificial Sequence: Synthetic oligonucleotide
  Antisense strand to SEQ ID NO: 200778
guugcagaaaguauagucc

SEQ ID NO: 200780 - RNA, 19 nt, Artificial Sequence
  Description of Artificial Sequence: Synthetic oligonucleotide
  Sense strand starting at position 336 of SEQ ID NO: 2588
aacagaacuccgugcacua

SEQ ID NO: 200781 - RNA, 19 nt, Artificial Sequence
  Description of Artificial Sequence: Synthetic oligonucleotide
  Antisense strand to SEQ ID NO: 200780
uagugcacggaguucuguu

SEQ ID NO: 200782 - RNA, 19 nt, Artificial Sequence
  Description of Artificial Sequence: Synthetic oligonucleotide
  Sense strand starting at position 441 of SEQ ID NO: 2588
ccucaagauucuguguaga

SEQ ID NO: 200783 - RNA, 19 nt, Artificial Sequence
  Description of Artificial Sequence: Synthetic oligonucleotide
  Antisense strand to SEQ ID NO: 200782
ucuacacagaaucuugagg

SEQ ID NO: 200784 - RNA, 19 nt, Artificial Sequence
  Description of Artificial Sequence: Synthetic oligonucleotide
  Sense strand starting at position 443 of SEQ ID NO: 2588
ucaagauucuguguagagg

SEQ ID NO: 200785 - RNA, 19 nt, Artificial Sequence
  Description of Artificial Sequence: Synthetic oligonucleotide
  Antisense strand to SEQ ID NO: 200784
ccucuacacagaaucuuga

SEQ ID NO: 200786 - RNA, 19 nt, Artificial Sequence
  Description of Artificial Sequence: Synthetic oligonucleotide
  Sense strand starting at position 491 of SEQ ID NO: 2588
gaugaaggccauugaacau

SEQ ID NO: 200787 - RNA, 19 nt, Artificial Sequence
  Description of Artificial Sequence: Synthetic oligonucleotide
  Antisense strand to SEQ ID NO: 200786
auguucaauggccuucauc

SEQ ID NO: 200788 - RNA, 19 nt, Artificial Sequence
  Description of Artificial Sequence: Synthetic oligonucleotide
  Sense strand starting at position 773 of SEQ ID NO: 2588
gggcuuagcgcgagggaaa

SEQ ID NO: 200789 - RNA, 19 nt, Artificial Sequence
  Description of Artificial Sequence: Synthetic oligonucleotide
  Antisense strand to SEQ ID NO: 200788
uuucccucgcgcuaagccc

SEQ ID NO: 200790 - RNA, 19 nt, Artificial Sequence
  Description of Artificial Sequence: Synthetic oligonucleotide
  Sense strand starting at position 2531 of SEQ ID NO: 2588
gccucauggugagugaaau

SEQ ID NO: 200791 - RNA, 19 nt, Artificial Sequence
  Description of Artificial Sequence: Synthetic oligonucleotide
  Antisense strand to SEQ ID NO: 200790
auuucacucaccaugaggc

SEQ ID NO: 200792 - RNA, 19 nt, Artificial Sequence
  Description of Artificial Sequence: Synthetic oligonucleotide
  Sense strand starting at position 2532 of SEQ ID NO: 2588
ccucauggugagugaaaug

SEQ ID NO: 200793 - RNA, 19 nt, Artificial Sequence
  Description of Artificial Sequence: Synthetic oligonucleotide
  Antisense strand to SEQ ID NO: 200792
cauuucacucaccaugagg

SEQ ID NO: 200794 - RNA, 19 nt, Artificial Sequence
  Description of Artificial Sequence: Synthetic oligonucleotide
  Sense strand starting at position 2719 of SEQ ID NO: 2588
acaggaagcuuucuccgaa

SEQ ID NO: 200795 - RNA, 19 nt, Artificial Sequence
  Description of Artificial Sequence: Synthetic oligonucleotide
  Antisense strand to SEQ ID NO: 200794
uucggagaaagcuuccugu

SEQ ID NO: 200796 - RNA, 19 nt, Artificial Sequence
  Description of Artificial Sequence: Synthetic oligonucleotide
  Sense strand starting at position 2720 of SEQ ID NO: 2588
caggaagcuuucuccgaaa

SEQ ID NO: 200797 - RNA, 19 nt, Artificial Sequence
  Description of Artificial Sequence: Synthetic oligonucleotide
  Antisense strand to SEQ ID NO: 200796
uuucggagaaagcuuccug

SEQ ID NO: 200798 - RNA, 19 nt, Artificial Sequence
  Description of Artificial Sequence: Synthetic oligonucleotide
  Sense strand starting at position 2722 of SEQ ID NO: 2588
ggaagcuuucuccgaaagg

SEQ ID NO: 200799 - RNA, 19 nt, Artificial Sequence
  Description of Artificial Sequence: Synthetic oligonucleotide
  Antisense strand to SEQ ID NO: 200798
ccuuucggagaaagcuucc

SEQ ID NO: 200800 - RNA, 19 nt, Artificial Sequence
  Description of Artificial Sequence: Synthetic oligonucleotide
  Sense strand starting at position 2770 of SEQ ID NO: 2588
acucgagauggugggauau

SEQ ID NO: 200801 - RNA, 19 nt, Artificial Sequence
  Description of Artificial Sequence: Synthetic oligonucleotide
  Antisense strand to SEQ ID NO: 200800
auaucccaccaucucgagu

SEQ ID NO: 200802 - RNA, 19 nt, Artificial Sequence
  Description of Artificial Sequence: Synthetic oligonucleotide
  Sense strand starting at position 2834 of SEQ ID NO: 2588
augugagacccuggaaguu

SEQ ID NO: 200803 - RNA, 19 nt, Artificial Sequence
  Description of Artificial Sequence: Synthetic oligonucleotide
  Antisense strand to SEQ ID NO: 200802
aacuuccagggucucacau

SEQ ID NO: 200804 - RNA, 19 nt, Artificial Sequence
  Description of Artificial Sequence: Synthetic oligonucleotide
  Sense strand starting at position 2859 of SEQ ID NO: 2588
gggcuuggccuagacagau

SEQ ID NO: 200805 - RNA, 19 nt, Artificial Sequence
  Description of Artificial Sequence: Synthetic oligonucleotide
  Antisense strand to SEQ ID NO: 200804
aucugucuaggccaagccc

SEQ ID NO: 200806 - RNA, 19 nt, Artificial Sequence
  Description of Artificial Sequence: Synthetic oligonucleotide
  Sense strand starting at position 2869 of SEQ ID NO: 2588
uagacagaugcguggugaa

SEQ ID NO: 200807 - RNA, 19 nt, Artificial Sequence
  Description of Artificial Sequence: Synthetic oligonucleotide
  Antisense strand to SEQ ID NO: 200806
uucaccacgcaucugucua

SEQ ID NO: 200808 - RNA, 19 nt, Artificial Sequence
  Description of Artificial Sequence: Synthetic oligonucleotide
  Sense strand starting at position 3054 of SEQ ID NO: 2588
ggagauaauuaggugguuu

SEQ ID NO: 200809 - RNA, 19 nt, Artificial Sequence
  Description of Artificial Sequence: Synthetic oligonucleotide
  Antisense strand to SEQ ID NO: 200808
aaaccaccuaauuaucucc

SEQ ID NO: 200810 - RNA, 19 nt, Artificial Sequence
  Description of Artificial Sequence: Synthetic oligonucleotide
  Sense strand starting at position 3092 of SEQ ID NO: 2588
auggacucaucgguaaaga

SEQ ID NO: 200811 - RNA, 19 nt, Artificial Sequence
  Description of Artificial Sequence: Synthetic oligonucleotide
  Antisense strand to SEQ ID NO: 200810
ucuuuaccgaugaguccau

SEQ ID NO: 200812 - RNA, 19 nt, Artificial Sequence
  Description of Artificial Sequence: Synthetic oligonucleotide
  Sense strand starting at position 3105 of SEQ ID NO: 2588
uaaagaaaguaguugucuu

SEQ ID NO: 200813 - RNA, 19 nt, Artificial Sequence
  Description of Artificial Sequence: Synthetic oligonucleotide
  Antisense strand to SEQ ID NO: 200812
aagacaacuacuuucuuua

SEQ ID NO: 200814 - RNA, 19 nt, Artificial Sequence
  Description of Artificial Sequence: Synthetic oligonucleotide
  Sense strand starting at position 3144 of SEQ ID NO: 2588
augaauuaguuguuugcau

SEQ ID NO: 200815 - RNA, 19 nt, Artificial Sequence
  Description of Artificial Sequence: Synthetic oligonucleotide
  Antisense strand to SEQ ID NO: 200814
augcaaacaacuaauucau

SEQ ID NO: 200816 - RNA, 19 nt, Artificial Sequence
  Description of Artificial Sequence: Synthetic oligonucleotide
  Sense strand starting at position 3146 of SEQ ID NO: 2588
gaauuaguuguuugcauuu

SEQ ID NO: 200817 - RNA, 19 nt, Artificial Sequence
  Description of Artificial Sequence: Synthetic oligonucleotide
  Antisense strand to SEQ ID NO: 200816
aaaugcaaacaacuaauuc

SEQ ID NO: 200818 - RNA, 19 nt, Artificial Sequence
  Description of Artificial Sequence: Synthetic oligonucleotide
  Sense strand starting at position 3160 of SEQ ID NO: 2588
cauuuaguguccgugagug

SEQ ID NO: 200819 - RNA, 19 nt, Artificial Sequence
  Description of Artificial Sequence: Synthetic oligonucleotide
  Antisense strand to SEQ ID NO: 200818
cacucacggacacuaaaug

SEQ ID NO: 200820 - RNA, 19 nt, Artificial Sequence
  Description of Artificial Sequence: Synthetic oligonucleotide
  Sense strand starting at position 3176 of SEQ ID NO: 2588
gugacagaaccucagucuu

SEQ ID NO: 200821 - RNA, 19 nt, Artificial Sequence
  Description of Artificial Sequence: Synthetic oligonucleotide
  Antisense strand to SEQ ID NO: 200820
aagacugagguucugucac

SEQ ID NO: 200822 - RNA, 19 nt, Artificial Sequence
  Description of Artificial Sequence: Synthetic oligonucleotide
  Sense strand starting at position 3228 of SEQ ID NO: 2588
ugucuuaaagguuauguua

SEQ ID NO: 200823 - RNA, 19 nt, Artificial Sequence
  Description of Artificial Sequence: Synthetic oligonucleotide
  Antisense strand to SEQ ID NO: 200822
uaacauaaccuuuaagaca

SEQ ID NO: 200824 - RNA, 19 nt, Artificial Sequence
  Description of Artificial Sequence: Synthetic oligonucleotide
  Sense strand starting at position 3247 of SEQ ID NO: 2588
ggaaauaaguuuguuagga

SEQ ID NO: 200825 - RNA, 19 nt, Artificial Sequence
  Description of Artificial Sequence: Synthetic oligonucleotide
  Antisense strand to SEQ ID NO: 200824
uccuaacaaacuuauuucc

SEQ ID NO: 200826 - RNA, 19 nt, Artificial Sequence
  Description of Artificial Sequence: Synthetic oligonucleotide
  Sense strand starting at position 3248 of SEQ ID NO: 2588
gaaauaaguuuguuaggag

SEQ ID NO: 200827 - RNA, 19 nt, Artificial Sequence
  Description of Artificial Sequence: Synthetic oligonucleotide
  Antisense strand to SEQ ID NO: 200826
cuccuaacaaacuuauuuc

SEQ ID NO: 200828 - RNA, 19 nt, Artificial Sequence
  Description of Artificial Sequence: Synthetic oligonucleotide
  Sense strand starting at position 3255 of SEQ ID NO: 2588
guuuguuaggagugaauug

SEQ ID NO: 200829 - RNA, 19 nt, Artificial Sequence
  Description of Artificial Sequence: Synthetic oligonucleotide
  Antisense strand to SEQ ID NO: 200828
caauucacuccuaacaaac

SEQ ID NO: 200830 - RNA, 19 nt, Artificial Sequence
  Description of Artificial Sequence: Synthetic oligonucleotide
  Sense strand starting at position 3310 of SEQ ID NO: 2588
cgacucucaccugaguuaa

SEQ ID NO: 200831 - RNA, 19 nt, Artificial Sequence
  Description of Artificial Sequence: Synthetic oligonucleotide
  Antisense strand to SEQ ID NO: 200830
uuaacucaggugagagucg

SEQ ID NO: 200832 - RNA, 19 nt, Artificial Sequence
  Description of Artificial Sequence: Synthetic oligonucleotide
  Sense strand starting at position 3318 of SEQ ID NO: 2588
accugaguuaauuggauag

SEQ ID NO: 200833 - RNA, 19 nt, Artificial Sequence
  Description of Artificial Sequence: Synthetic oligonucleotide
  Antisense strand to SEQ ID NO: 200832
cuauccaauuaacucaggu

SEQ ID NO: 200834 - RNA, 19 nt, Artificial Sequence
  Description of Artificial Sequence: Synthetic oligonucleotide
  Sense strand starting at position 3324 of SEQ ID NO: 2588
guuaauuggauagagcauu

SEQ ID NO: 200835 - RNA, 19 nt, Artificial Sequence
  Description of Artificial Sequence: Synthetic oligonucleotide
  Antisense strand to SEQ ID NO: 200834
aaugcucuauccaauuaac

SEQ ID NO: 200836 - RNA, 19 nt, Artificial Sequence
  Description of Artificial Sequence: Synthetic oligonucleotide
  Sense strand starting at position 3456 of SEQ ID NO: 2588
auguguauccuccaagcuu

SEQ ID NO: 200837 - RNA, 19 nt, Artificial Sequence
  Description of Artificial Sequence: Synthetic oligonucleotide
  Antisense strand to SEQ ID NO: 200836
aagcuuggaggauacacau

SEQ ID NO: 200838 - RNA, 19 nt, Artificial Sequence
  Description of Artificial Sequence: Synthetic oligonucleotide
  Sense strand starting at position 3482 of SEQ ID NO: 2588
caauuaguagcugguuaag

SEQ ID NO: 200839 - RNA, 19 nt, Artificial Sequence
  Description of Artificial Sequence: Synthetic oligonucleotide
  Antisense strand to SEQ ID NO: 200838
cuuaaccagcuacuaauug

SEQ ID NO: 200840 - RNA, 19 nt, Artificial Sequence
  Description of Artificial Sequence: Synthetic oligonucleotide
  Sense strand starting at position 3632 of SEQ ID NO: 2588
gguauagacuaauccaaug

SEQ ID NO: 200841 - RNA, 19 nt, Artificial Sequence
  Description of Artificial Sequence: Synthetic oligonucleotide
  Antisense strand to SEQ ID NO: 200840
cauuggauuagucuauacc

SEQ ID NO: 200842 - RNA, 19 nt, Artificial Sequence
  Description of Artificial Sequence: Synthetic oligonucleotide
  Sense strand starting at position 3637 of SEQ ID NO: 2588
agacuaauccaaugauguu

SEQ ID NO: 200843 - RNA, 19 nt, Artificial Sequence
  Description of Artificial Sequence: Synthetic oligonucleotide
  Antisense strand to SEQ ID NO: 200842
aacaucauuggauuagucu

SEQ ID NO: 200844 - RNA, 19 nt, Artificial Sequence
  Description of Artificial Sequence: Synthetic oligonucleotide
  Sense strand starting at position 3685 of SEQ ID NO: 2588
ucagauaacugaucuguug

SEQ ID NO: 200845 - RNA, 19 nt, Artificial Sequence
  Description of Artificial Sequence: Synthetic oligonucleotide
  Antisense strand to SEQ ID NO: 200844
caacagaucaguuaucuga

SEQ ID NO: 200846 - RNA, 19 nt, Artificial Sequence
  Description of Artificial Sequence: Synthetic oligonucleotide
  Sense strand starting at position 3688 of SEQ ID NO: 2588
gauaacugaucuguugaaa

SEQ ID NO: 200847 - RNA, 19 nt, Artificial Sequence
  Description of Artificial Sequence: Synthetic oligonucleotide
  Antisense strand to SEQ ID NO: 200846
uuucaacagaucaguuauc

SEQ ID NO: 200848 - RNA, 19 nt, Artificial Sequence
  Description of Artificial Sequence: Synthetic oligonucleotide
  Sense strand starting at position 3943 of SEQ ID NO: 2588
ugccucagguauucuauca

SEQ ID NO: 200849 - RNA, 19 nt, Artificial Sequence
  Description of Artificial Sequence: Synthetic oligonucleotide
  Antisense strand to SEQ ID NO: 200848
ugauagaauaccugaggca

SEQ ID NO: 200850 - RNA, 19 nt, Artificial Sequence
  Description of Artificial Sequence: Synthetic oligonucleotide
  Sense strand starting at position 3968 of SEQ ID NO: 2588
cagaaucuaggucaguagu

SEQ ID NO: 200851 - RNA, 19 nt, Artificial Sequence
  Description of Artificial Sequence: Synthetic oligonucleotide
  Antisense strand to SEQ ID NO: 200850
acuacugaccuagauucug

SEQ ID NO: 200852 - RNA, 19 nt, Artificial Sequence
  Description of Artificial Sequence: Synthetic oligonucleotide
  Sense strand starting at position 3970 of SEQ ID NO: 2588
gaaucuaggucaguaguua

SEQ ID NO: 200853 - RNA, 19 nt, Artificial Sequence
  Description of Artificial Sequence: Synthetic oligonucleotide
  Antisense strand to SEQ ID NO: 200852
uaacuacugaccuagauuc

SEQ ID NO: 200854 - RNA, 19 nt, Artificial Sequence
  Description of Artificial Sequence: Synthetic oligonucleotide
  Sense strand starting at position 3971 of SEQ ID NO: 2588
aaucuaggucaguaguuau

SEQ ID NO: 200855 - RNA, 19 nt, Artificial Sequence
  Description of Artificial Sequence: Synthetic oligonucleotide
  Antisense strand to SEQ ID NO: 200854
auaacuacugaccuagauu

SEQ ID NO: 200856 - RNA, 19 nt, Artificial Sequence
  Description of Artificial Sequence: Synthetic oligonucleotide
  Sense strand starting at position 208 of SEQ ID NO: 2590
cuaacagagugucuaguaa

SEQ ID NO: 200857 - RNA, 19 nt, Artificial Sequence
  Description of Artificial Sequence: Synthetic oligonucleotide
  Antisense strand to SEQ ID NO: 200856
uuacuagacacucuguuag

SEQ ID NO: 200858 - RNA, 19 nt, Artificial Sequence
  Description of Artificial Sequence: Synthetic oligonucleotide
  Sense strand starting at position 215 of SEQ ID NO: 2590
agugucuaguaagcaagaa

SEQ ID NO: 200859 - RNA, 19 nt, Artificial Sequence
  Description of Artificial Sequence: Synthetic oligonucleotide
  Antisense strand to SEQ ID NO: 200858
uucuugcuuacuagacacu

SEQ ID NO: 200860 - RNA, 19 nt, Artificial Sequence
  Description of Artificial Sequence: Synthetic oligonucleotide
  Sense strand starting at position 216 of SEQ ID NO: 2590
gugucuaguaagcaagaaa

SEQ ID NO: 200861 - RNA, 19 nt, Artificial Sequence
  Description of Artificial Sequence: Synthetic oligonucleotide
  Antisense strand to SEQ ID NO: 200860
uuucuugcuuacuagacac

SEQ ID NO: 200862 - RNA, 19 nt, Artificial Sequence
  Description of Artificial Sequence: Synthetic oligonucleotide
  Sense strand starting at position 219 of SEQ ID NO: 2590
ucuaguaagcaagaaaggu

SEQ ID NO: 200863 - RNA, 19 nt, Artificial Sequence
  Description of Artificial Sequence: Synthetic oligonucleotide
  Antisense strand to SEQ ID NO: 200862
accuuucuugcuuacuaga

SEQ ID NO: 200864 - RNA, 19 nt, Artificial Sequence
  Description of Artificial Sequence: Synthetic oligonucleotide
  Sense strand starting at position 232 of SEQ ID NO: 2590
aaagguacucaaggcauau

SEQ ID NO: 200865 - RNA, 19 nt, Artificial Sequence
  Description of Artificial Sequence: Synthetic oligonucleotide
  Antisense strand to SEQ ID NO: 200864
auaugccuugaguaccuuu

SEQ ID NO: 200866 - RNA, 19 nt, Artificial Sequence
  Description of Artificial Sequence: Synthetic oligonucleotide
  Sense strand starting at position 236 of SEQ ID NO: 2590
guacucaaggcauauaaug

SEQ ID NO: 200867 - RNA, 19 nt, Artificial Sequence
  Description of Artificial Sequence: Synthetic oligonucleotide
  Antisense strand to SEQ ID NO: 200866
cauuauaugccuugaguac

SEQ ID NO: 200868 - RNA, 19 nt, Artificial Sequence
  Description of Artificial Sequence: Synthetic oligonucleotide
  Sense strand starting at position 451 of SEQ ID NO: 2590
cccuaagccguuuaaauag

SEQ ID NO: 200869 - RNA, 19 nt, Artificial Sequence
  Description of Artificial Sequence: Synthetic oligonucleotide
  Antisense strand to SEQ ID NO: 200868
cuauuuaaacggcuuaggg

SEQ ID NO: 200870 - RNA, 19 nt, Artificial Sequence
  Description of Artificial Sequence: Synthetic oligonucleotide
  Sense strand starting at position 463 of SEQ ID NO: 2590
uaaauaguaucugcuguga

SEQ ID NO: 200871 - RNA, 19 nt, Artificial Sequence
  Description of Artificial Sequence: Synthetic oligonucleotide
  Antisense strand to SEQ ID NO: 200870
ucacagcagauacuauuua

SEQ ID NO: 200872 - RNA, 19 nt, Artificial Sequence
  Description of Artificial Sequence: Synthetic oligonucleotide
  Sense strand starting at position 480 of SEQ ID NO: 2590
gaucaacugucauugaaug

SEQ ID NO: 200873 - RNA, 19 nt, Artificial Sequence
  Description of Artificial Sequence: Synthetic oligonucleotide
  Antisense strand to SEQ ID NO: 200872
cauucaaugacaguugauc

SEQ ID NO: 200874 - RNA, 19 nt, Artificial Sequence
  Description of Artificial Sequence: Synthetic oligonucleotide
  Sense strand starting at position 481 of SEQ ID NO: 2590
aucaacugucauugaaugu

SEQ ID NO: 200875 - RNA, 19 nt, Artificial Sequence
  Description of Artificial Sequence: Synthetic oligonucleotide
  Antisense strand to SEQ ID NO: 200874
acauucaaugacaguugau

SEQ ID NO: 200876 - RNA, 19 nt, Artificial Sequence
  Description of Artificial Sequence: Synthetic oligonucleotide
  Sense strand starting at position 485 of SEQ ID NO: 2590
acugucauugaaugugagu

SEQ ID NO: 200877 - RNA, 19 nt, Artificial Sequence
  Description of Artificial Sequence: Synthetic oligonucleotide
  Antisense strand to SEQ ID NO: 200876
acucacauucaaugacagu

SEQ ID NO: 200878 - RNA, 19 nt, Artificial Sequence
  Description of Artificial Sequence: Synthetic oligonucleotide
  Sense strand starting at position 697 of SEQ ID NO: 2590
uggcgucugcaccuguaau

SEQ ID NO: 200879 - RNA, 19 nt, Artificial Sequence
  Description of Artificial Sequence: Synthetic oligonucleotide
  Antisense strand to SEQ ID NO: 200878
auuacaggugcagacgcca

SEQ ID NO: 200880 - RNA, 19 nt, Artificial Sequence
  Description of Artificial Sequence: Synthetic oligonucleotide
  Sense strand starting at position 960 of SEQ ID NO: 2590
guaaaccugacaggugaau

SEQ ID NO: 200881 - RNA, 19 nt, Artificial Sequence
  Description of Artificial Sequence: Synthetic oligonucleotide
  Antisense strand to SEQ ID NO: 200880
auucaccugucagguuuac

SEQ ID NO: 200882 - RNA, 19 nt, Artificial Sequence
  Description of Artificial Sequence: Synthetic oligonucleotide
  Sense strand starting at position 1189 of SEQ ID NO: 2590
gcaccaugcccagaaaucu

SEQ ID NO: 200883 - RNA, 19 nt, Artificial Sequence
  Description of Artificial Sequence: Synthetic oligonucleotide
  Antisense strand to SEQ ID NO: 200882
agauuucugggcauggugc

SEQ ID NO: 200884 - RNA, 19 nt, Artificial Sequence
  Description of Artificial Sequence: Synthetic oligonucleotide
  Sense strand starting at position 1268 of SEQ ID NO: 2590
cuccuuuaugcggaaacua

SEQ ID NO: 200885 - RNA, 19 nt, Artificial Sequence
  Description of Artificial Sequence: Synthetic oligonucleotide
  Antisense strand to SEQ ID NO: 200884
uaguuuccgcauaaaggag

SEQ ID NO: 200886 - RNA, 19 nt, Artificial Sequence
  Description of Artificial Sequence: Synthetic oligonucleotide
  Sense strand starting at position 1426 of SEQ ID NO: 2590
uccuaagauuaggugaagu

SEQ ID NO: 200887 - RNA, 19 nt, Artificial Sequence
  Description of Artificial Sequence: Synthetic oligonucleotide
  Antisense strand to SEQ ID NO: 200886
acuucaccuaaucuuagga

SEQ ID NO: 200888 - RNA, 19 nt, Artificial Sequence
  Description of Artificial Sequence: Synthetic oligonucleotide
  Sense strand starting at position 1434 of SEQ ID NO: 2590
uuaggugaagucuggacuu

SEQ ID NO: 200889 - RNA, 19 nt, Artificial Sequence
  Description of Artificial Sequence: Synthetic oligonucleotide
  Antisense strand to SEQ ID NO: 200888
aaguccagacuucaccuaa

SEQ ID NO: 200890 - RNA, 19 nt, Artificial Sequence
  Description of Artificial Sequence: Synthetic oligonucleotide
  Sense strand starting at position 1436 of SEQ ID NO: 2590
aggugaagucuggacuuca

SEQ ID NO: 200891 - RNA, 19 nt, Artificial Sequence
  Description of Artificial Sequence: Synthetic oligonucleotide
  Antisense strand to SEQ ID NO: 200890
ugaaguccagacuucaccu

SEQ ID NO: 200892 - RNA, 19 nt, Artificial Sequence
  Description of Artificial Sequence: Synthetic oligonucleotide
  Sense strand starting at position 1656 of SEQ ID NO: 2590
gcccuugccgaagaaagau

SEQ ID NO: 200893 - RNA, 19 nt, Artificial Sequence
  Description of Artificial Sequence: Synthetic oligonucleotide
  Antisense strand to SEQ ID NO: 200892
aucuuucuucggcaagggc

SEQ ID NO: 200894 - RNA, 19 nt, Artificial Sequence
  Description of Artificial Sequence: Synthetic oligonucleotide
  Sense strand starting at position 1668 of SEQ ID NO: 2590
gaaagaucccuggaccgca

SEQ ID NO: 200895 - RNA, 19 nt, Artificial Sequence
  Description of Artificial Sequence: Synthetic oligonucleotide
  Antisense strand to SEQ ID NO: 200894
ugcgguccagggaucuuuc

SEQ ID NO: 200896 - RNA, 19 nt, Artificial Sequence
  Description of Artificial Sequence: Synthetic oligonucleotide
  Sense strand starting at position 2217 of SEQ ID NO: 2590
gcucguggucgcguagaga

SEQ ID NO: 200897 - RNA, 19 nt, Artificial Sequence
  Description of Artificial Sequence: Synthetic oligonucleotide
  Antisense strand to SEQ ID NO: 200896
ucucuacgcgaccacgagc

SEQ ID NO: 200898 - RNA, 19 nt, Artificial Sequence
  Description of Artificial Sequence: Synthetic oligonucleotide
  Sense strand starting at position 2267 of SEQ ID NO: 2590
gaaagagucaggcaugguu

SEQ ID NO: 200899 - RNA, 19 nt, Artificial Sequence
  Description of Artificial Sequence: Synthetic oligonucleotide
  Antisense strand to SEQ ID NO: 200898
aaccaugccugacucuuuc

SEQ ID NO: 200900 - RNA, 19 nt, Artificial Sequence
  Description of Artificial Sequence: Synthetic oligonucleotide
  Sense strand starting at position 2269 of SEQ ID NO: 2590
aagagucaggcaugguuau

SEQ ID NO: 200901 - RNA, 19 nt, Artificial Sequence
  Description of Artificial Sequence: Synthetic oligonucleotide
  Antisense strand to SEQ ID NO: 200900
auaaccaugccugacucuu

SEQ ID NO: 200902 - RNA, 19 nt, Artificial Sequence
  Description of Artificial Sequence: Synthetic oligonucleotide
  Sense strand starting at position 2270 of SEQ ID NO: 2590
agagucaggcaugguuauu

SEQ ID NO: 200903 - RNA, 19 nt, Artificial Sequence
  Description of Artificial Sequence: Synthetic oligonucleotide
  Antisense strand to SEQ ID NO: 200902
aauaaccaugccugacucu

SEQ ID NO: 200904 - RNA, 19 nt, Artificial Sequence
  Description of Artificial Sequence: Synthetic oligonucleotide
  Sense strand starting at position 2336 of SEQ ID NO: 2590
gcccaagaugugcauuaaa

SEQ ID NO: 200905 - RNA, 19 nt, Artificial Sequence
  Description of Artificial Sequence: Synthetic oligonucleotide
  Antisense strand to SEQ ID NO: 200904
uuuaaugcacaucuugggc

SEQ ID NO: 200906 - RNA, 19 nt, Artificial Sequence
  Description of Artificial Sequence: Synthetic oligonucleotide
  Sense strand starting at position 2339 of SEQ ID NO: 2590
caagaugugcauuaaagcu

SEQ ID NO: 200907 - RNA, 19 nt, Artificial Sequence
  Description of Artificial Sequence: Synthetic oligonucleotide
  Antisense strand to SEQ ID NO: 200906
agcuuuaaugcacaucuug

SEQ ID NO: 200908 - RNA, 19 nt, Artificial Sequence
  Description of Artificial Sequence: Synthetic oligonucleotide
  Sense strand starting at position 2385 of SEQ ID NO: 2590
agcgguuuccaaggauuuc

SEQ ID NO: 200909 - RNA, 19 nt, Artificial Sequence
  Description of Artificial Sequence: Synthetic oligonucleotide
  Antisense strand to SEQ ID NO: 200908
gaaauccuuggaaaccgcu

SEQ ID NO: 200910 - RNA, 19 nt, Artificial Sequence
  Description of Artificial Sequence: Synthetic oligonucleotide
  Sense strand starting at position 2427 of SEQ ID NO: 2590
ucaaaugugggcuauuaaa

SEQ ID NO: 200911 - RNA, 19 nt, Artificial Sequence
  Description of Artificial Sequence: Synthetic oligonucleotide
  Antisense strand to SEQ ID NO: 200910
uuuaauagcccacauuuga

SEQ ID NO: 200912 - RNA, 19 nt, Artificial Sequence
  Description of Artificial Sequence: Synthetic oligonucleotide
  Sense strand starting at position 2827 of SEQ ID NO: 2590
cuaucuucuguccagguaa

SEQ ID NO: 200913 - RNA, 19 nt, Artificial Sequence
  Description of Artificial Sequence: Synthetic oligonucleotide
  Antisense strand to SEQ ID NO: 200912
uuaccuggacagaagauag

SEQ ID NO: 200914 - RNA, 19 nt, Artificial Sequence
  Description of Artificial Sequence: Synthetic oligonucleotide
  Sense strand starting at position 2829 of SEQ ID NO: 2590
aucuucuguccagguaaua

SEQ ID NO: 200915 - RNA, 19 nt, Artificial Sequence
  Description of Artificial Sequence: Synthetic oligonucleotide
  Antisense strand to SEQ ID NO: 200914
uauuaccuggacagaagau

SEQ ID NO: 200916 - RNA, 19 nt, Artificial Sequence
  Description of Artificial Sequence: Synthetic oligonucleotide
  Sense strand starting at position 2899 of SEQ ID NO: 2590
aacuguaugccgggagaug

SEQ ID NO: 200917 - RNA, 19 nt, Artificial Sequence
  Description of Artificial Sequence: Synthetic oligonucleotide
  Antisense strand to SEQ ID NO: 200916
caucucccggcauacaguu

SEQ ID NO: 200918 - RNA, 19 nt, Artificial Sequence
  Description of Artificial Sequence: Synthetic oligonucleotide
  Sense strand starting at position 3465 of SEQ ID NO: 2590
acugauugacaauguugua

SEQ ID NO: 200919 - RNA, 19 nt, Artificial Sequence
  Description of Artificial Sequence: Synthetic oligonucleotide
  Antisense strand to SEQ ID NO: 200918
uacaacauugucaaucagu

SEQ ID NO: 200920 - RNA, 19 nt, Artificial Sequence
  Description of Artificial Sequence: Synthetic oligonucleotide
  Sense strand starting at position 3480 of SEQ ID NO: 2590
uguaauuaaccugagcugu

SEQ ID NO: 200921 - RNA, 19 nt, Artificial Sequence
  Description of Artificial Sequence: Synthetic oligonucleotide
  Antisense strand to SEQ ID NO: 200920
acagcucagguuaauuaca

SEQ ID NO: 200922 - RNA, 19 nt, Artificial Sequence
  Description of Artificial Sequence: Synthetic oligonucleotide
  Sense strand starting at position 3590 of SEQ ID NO: 2590
ggaaguagcuuaucagaaa

SEQ ID NO: 200923 - RNA, 19 nt, Artificial Sequence
  Description of Artificial Sequence: Synthetic oligonucleotide
  Antisense strand to SEQ ID NO: 200922
uuucugauaagcuacuucc

SEQ ID NO: 200924 - RNA, 19 nt, Artificial Sequence
  Description of Artificial Sequence: Synthetic oligonucleotide
  Sense strand starting at position 3667 of SEQ ID NO: 2590
ccauaugaugcacggauga

SEQ ID NO: 200925 - RNA, 19 nt, Artificial Sequence
  Description of Artificial Sequence: Synthetic oligonucleotide
  Antisense strand to SEQ ID NO: 200924
ucauccgugcaucauaugg

SEQ ID NO: 200926 - RNA, 19 nt, Artificial Sequence
  Description of Artificial Sequence: Synthetic oligonucleotide
  Sense strand starting at position 3790 of SEQ ID NO: 2590
caugguugauuagcugaga

SEQ ID NO: 200927 - RNA, 19 nt, Artificial Sequence
  Description of Artificial Sequence: Synthetic oligonucleotide
  Antisense strand to SEQ ID NO: 200926
ucucagcuaaucaaccaug

SEQ ID NO: 200928 - RNA, 19 nt, Artificial Sequence
  Description of Artificial Sequence: Synthetic oligonucleotide
  Sense strand starting at position 3791 of SEQ ID NO: 2590
augguugauuagcugagau

SEQ ID NO: 200929 - RNA, 19 nt, Artificial Sequence
  Description of Artificial Sequence: Synthetic oligonucleotide
  Antisense strand to SEQ ID NO: 200928
aucucagcuaaucaaccau

SEQ ID NO: 200930 - RNA, 19 nt, Artificial Sequence
  Description of Artificial Sequence: Synthetic oligonucleotide
  Sense strand starting at position 3793 of SEQ ID NO: 2590
gguugauuagcugagauua

SEQ ID NO: 200931 - RNA, 19 nt, Artificial Sequence
  Description of Artificial Sequence: Synthetic oligonucleotide
  Antisense strand to SEQ ID NO: 200930
uaaucucagcuaaucaacc

SEQ ID NO: 200932 - RNA, 19 nt, Artificial Sequence
  Description of Artificial Sequence: Synthetic oligonucleotide
  Sense strand starting at position 3825 of SEQ ID NO: 2590
ugucuuuggcaagaugaac

SEQ ID NO: 200933 - RNA, 19 nt, Artificial Sequence
  Description of Artificial Sequence: Synthetic oligonucleotide
  Antisense strand to SEQ ID NO: 200932
guucaucuugccaaagaca

SEQ ID NO: 200934 - RNA, 19 nt, Artificial Sequence
  Description of Artificial Sequence: Synthetic oligonucleotide
  Sense strand starting at position 3845 of SEQ ID NO: 2590
acaugaggcauacgggauu

SEQ ID NO: 200935 - RNA, 19 nt, Artificial Sequence
  Description of Artificial Sequence: Synthetic oligonucleotide
  Antisense strand to SEQ ID NO: 200934
aaucccguaugccucaugu

SEQ ID NO: 200936 - RNA, 19 nt, Artificial Sequence
  Description of Artificial Sequence: Synthetic oligonucleotide
  Sense strand starting at position 367 of SEQ ID NO: 2589
ugguacggccauuauagaa

SEQ ID NO: 200937 - RNA, 19 nt, Artificial Sequence
  Description of Artificial Sequence: Synthetic oligonucleotide
  Antisense strand to SEQ ID NO: 200936
uucuauaauggccguacca

SEQ ID NO: 200938 - RNA, 19 nt, Artificial Sequence
  Description of Artificial Sequence: Synthetic oligonucleotide
  Sense strand starting at position 1117 of SEQ ID NO: 2589
uacagugaaccaugaugau

SEQ ID NO: 200939 - RNA, 19 nt, Artificial Sequence
  Description of Artificial Sequence: Synthetic oligonucleotide
  Antisense strand to SEQ ID NO: 200938
aucaucaugguucacugua

SEQ ID NO: 200940 - RNA, 19 nt, Artificial Sequence
  Description of Artificial Sequence: Synthetic oligonucleotide
  Sense strand starting at position 1212 of SEQ ID NO: 2589
agaauauauucgccaucac

SEQ ID NO: 200941 - RNA, 19 nt, Artificial Sequence
  Description of Artificial Sequence: Synthetic oligonucleotide
  Antisense strand to SEQ ID NO: 200940
gugauggcgaauauauucu

SEQ ID NO: 200942 - RNA, 19 nt, Artificial Sequence
  Description of Artificial Sequence: Synthetic oligonucleotide
  Sense strand starting at position 1305 of SEQ ID NO: 2589
gcaggugguuacucacaca

SEQ ID NO: 200943 - RNA, 19 nt, Artificial Sequence
  Description of Artificial Sequence: Synthetic oligonucleotide
  Antisense strand to SEQ ID NO: 200942
ugugugaguaaccaccugc

SEQ ID NO: 200944 - RNA, 19 nt, Artificial Sequence
  Description of Artificial Sequence: Synthetic oligonucleotide
  Sense strand starting at position 1341 of SEQ ID NO: 2589
gcgaaccauuucuuuagca

SEQ ID NO: 200945 - RNA, 19 nt, Artificial Sequence
  Description of Artificial Sequence: Synthetic oligonucleotide
  Antisense strand to SEQ ID NO: 200944
ugcuaaagaaaugguucgc

SEQ ID NO: 200946 - RNA, 19 nt, Artificial Sequence
  Description of Artificial Sequence: Synthetic oligonucleotide
  Sense strand starting at position 1351 of SEQ ID NO: 2589
ucuuuagcaccagaaaguu

SEQ ID NO: 200947 - RNA, 19 nt, Artificial Sequence
  Description of Artificial Sequence: Synthetic oligonucleotide
  Antisense strand to SEQ ID NO: 200946
aacuuucuggugcuaaaga

SEQ ID NO: 200948 - RNA, 19 nt, Artificial Sequence
  Description of Artificial Sequence: Synthetic oligonucleotide
  Sense strand starting at position 1404 of SEQ ID NO: 2589
guaggaaaccuaggccauu

SEQ ID NO: 200949 - RNA, 19 nt, Artificial Sequence
  Description of Artificial Sequence: Synthetic oligonucleotide
  Antisense strand to SEQ ID NO: 200948
aauggccuagguuuccuac

SEQ ID NO: 200950 - RNA, 19 nt, Artificial Sequence
  Description of Artificial Sequence: Synthetic oligonucleotide
  Sense strand starting at position 1452 of SEQ ID NO: 2589
gcagccacucaaugaaaua

SEQ ID NO: 200951 - RNA, 19 nt, Artificial Sequence
  Description of Artificial Sequence: Synthetic oligonucleotide
  Antisense strand to SEQ ID NO: 200950
uauuucauugaguggcugc

SEQ ID NO: 200952 - RNA, 19 nt, Artificial Sequence
  Description of Artificial Sequence: Synthetic oligonucleotide
  Sense strand starting at position 1464 of SEQ ID NO: 2589
ugaaauacucuauggcauu

SEQ ID NO: 200953 - RNA, 19 nt, Artificial Sequence
  Description of Artificial Sequence: Synthetic oligonucleotide
  Antisense strand to SEQ ID NO: 200952
aaugccauagaguauuuca

SEQ ID NO: 200954 - RNA, 19 nt, Artificial Sequence
  Description of Artificial Sequence: Synthetic oligonucleotide
  Sense strand starting at position 1486 of SEQ ID NO: 2589
augucuagggccgaucaua

SEQ ID NO: 200955 - RNA, 19 nt, Artificial Sequence
  Description of Artificial Sequence: Synthetic oligonucleotide
  Antisense strand to SEQ ID NO: 200954
uaugaucggcccuagacau

SEQ ID NO: 200956 - RNA, 19 nt, Artificial Sequence
  Description of Artificial Sequence: Synthetic oligonucleotide
  Sense strand starting at position 1520 of SEQ ID NO: 2589
uauauuauuguuggcagau

SEQ ID NO: 200957 - RNA, 19 nt, Artificial Sequence
  Description of Artificial Sequence: Synthetic oligonucleotide
  Antisense strand to SEQ ID NO: 200956
aucugccaacaauaauaua

SEQ ID NO: 200958 - RNA, 19 nt, Artificial Sequence
  Description of Artificial Sequence: Synthetic oligonucleotide
  Sense strand starting at position 1521 of SEQ ID NO: 2589
auauuauuguuggcagaua

SEQ ID NO: 200959 - RNA, 19 nt, Artificial Sequence
  Description of Artificial Sequence: Synthetic oligonucleotide
  Antisense strand to SEQ ID NO: 200958
uaucugccaacaauaauau

SEQ ID NO: 200960 - RNA, 19 nt, Artificial Sequence
  Description of Artificial Sequence: Synthetic oligonucleotide
  Sense strand starting at position 1548 of SEQ ID NO: 2589
gcuacagaacaauguauca

SEQ ID NO: 200961 - RNA, 19 nt, Artificial Sequence
  Description of Artificial Sequence: Synthetic oligonucleotide
  Antisense strand to SEQ ID NO: 200960
ugauacauuguucuguagc

SEQ ID NO: 200962 - RNA, 19 nt, Artificial Sequence
  Description of Artificial Sequence: Synthetic oligonucleotide
  Sense strand starting at position 1583 of SEQ ID NO: 2589
aaacuacaggcaugugaau

SEQ ID NO: 200963 - RNA, 19 nt, Artificial Sequence
  Description of Artificial Sequence: Synthetic oligonucleotide
  Antisense strand to SEQ ID NO: 200962
auucacaugccuguaguuu

SEQ ID NO: 200964 - RNA, 19 nt, Artificial Sequence
  Description of Artificial Sequence: Synthetic oligonucleotide
  Sense strand starting at position 1655 of SEQ ID NO: 2589
uucuguagugcuugaaucu

SEQ ID NO: 200965 - RNA, 19 nt, Artificial Sequence
  Description of Artificial Sequence: Synthetic oligonucleotide
  Antisense strand to SEQ ID NO: 200964
agauucaagcacuacagaa

SEQ ID NO: 200966 - RNA, 19 nt, Artificial Sequence
  Description of Artificial Sequence: Synthetic oligonucleotide
  Sense strand starting at position 1656 of SEQ ID NO: 2589
ucuguagugcuugaaucuu

SEQ ID NO: 200967 - RNA, 19 nt, Artificial Sequence
  Description of Artificial Sequence: Synthetic oligonucleotide
  Antisense strand to SEQ ID NO: 200966
aagauucaagcacuacaga

SEQ ID NO: 200968 - RNA, 19 nt, Artificial Sequence
  Description of Artificial Sequence: Synthetic oligonucleotide
  Sense strand starting at position 1729 of SEQ ID NO: 2589
gcuuuaagauuuguuuagu

SEQ ID NO: 200969 - RNA, 19 nt, Artificial Sequence
  Description of Artificial Sequence: Synthetic oligonucleotide
  Antisense strand to SEQ ID NO: 200968
acuaaacaaaucuuaaagc

SEQ ID NO: 200970 - RNA, 19 nt, Artificial Sequence
  Description of Artificial Sequence: Synthetic oligonucleotide
  Sense strand starting at position 1831 of SEQ ID NO: 2589
acuaaauaguuuguugcau

SEQ ID NO: 200971 - RNA, 19 nt, Artificial Sequence
  Description of Artificial Sequence: Synthetic oligonucleotide
  Antisense strand to SEQ ID NO: 200970
augcaacaaacuauuuagu

SEQ ID NO: 200972 - RNA, 19 nt, Artificial Sequence
  Description of Artificial Sequence: Synthetic oligonucleotide
  Sense strand starting at position 1832 of SEQ ID NO: 2589
cuaaauaguuuguugcauu

SEQ ID NO: 200973 - RNA, 19 nt, Artificial Sequence
  Description of Artificial Sequence: Synthetic oligonucleotide
  Antisense strand to SEQ ID NO: 200972
aaugcaacaaacuauuuag

SEQ ID NO: 200974 - RNA, 19 nt, Artificial Sequence
  Description of Artificial Sequence: Synthetic oligonucleotide
  Sense strand starting at position 1868 of SEQ ID NO: 2589
aagaucuguuucucuguga

SEQ ID NO: 200975 - RNA, 19 nt, Artificial Sequence
  Description of Artificial Sequence: Synthetic oligonucleotide
  Antisense strand to SEQ ID NO: 200974
ucacagagaaacagaucuu

SEQ ID NO: 200976 - RNA, 19 nt, Artificial Sequence
  Description of Artificial Sequence: Synthetic oligonucleotide
  Sense strand starting at position 1884 of SEQ ID NO: 2589
ugaccucugcuuuguauaa

SEQ ID NO: 200977 - RNA, 19 nt, Artificial Sequence
  Description of Artificial Sequence: Synthetic oligonucleotide
  Antisense strand to SEQ ID NO: 200976
uuauacaaagcagagguca

SEQ ID NO: 200978 - RNA, 19 nt, Artificial Sequence
  Description of Artificial Sequence: Synthetic oligonucleotide
  Sense strand starting at position 2067 of SEQ ID NO: 2589
gguuguggugagcagaaua

SEQ ID NO: 200979 - RNA, 19 nt, Artificial Sequence
  Description of Artificial Sequence: Synthetic oligonucleotide
  Antisense strand to SEQ ID NO: 200978
uauucugcucaccacaacc

SEQ ID NO: 200980 - RNA, 19 nt, Artificial Sequence
  Description of Artificial Sequence: Synthetic oligonucleotide
  Sense strand starting at position 2124 of SEQ ID NO: 2589
cugugaauacgugagguua

SEQ ID NO: 200981 - RNA, 19 nt, Artificial Sequence
  Description of Artificial Sequence: Synthetic oligonucleotide
  Antisense strand to SEQ ID NO: 200980
uaaccucacguauucacag

SEQ ID NO: 200982 - RNA, 19 nt, Artificial Sequence
  Description of Artificial Sequence: Synthetic oligonucleotide
  Sense strand starting at position 2188 of SEQ ID NO: 2589
ucagcugaccuuuaaauug

SEQ ID NO: 200983 - RNA, 19 nt, Artificial Sequence
  Description of Artificial Sequence: Synthetic oligonucleotide
  Antisense strand to SEQ ID NO: 200982
caauuuaaaggucagcuga

SEQ ID NO: 200984 - RNA, 19 nt, Artificial Sequence
  Description of Artificial Sequence: Synthetic oligonucleotide
  Sense strand starting at position 2340 of SEQ ID NO: 2589
gggauaaaguggcauaaga

SEQ ID NO: 200985 - RNA, 19 nt, Artificial Sequence
  Description of Artificial Sequence: Synthetic oligonucleotide
  Antisense strand to SEQ ID NO: 200984
ucuuaugccacuuuauccc

SEQ ID NO: 200986 - RNA, 19 nt, Artificial Sequence
  Description of Artificial Sequence: Synthetic oligonucleotide
  Sense strand starting at position 2532 of SEQ ID NO: 2589
aguuuauggucauuuguuc

SEQ ID NO: 200987 - RNA, 19 nt, Artificial Sequence
  Description of Artificial Sequence: Synthetic oligonucleotide
  Antisense strand to SEQ ID NO: 200986
gaacaaaugaccauaaacu

SEQ ID NO: 200988 - RNA, 19 nt, Artificial Sequence
  Description of Artificial Sequence: Synthetic oligonucleotide
  Sense strand starting at position 2706 of SEQ ID NO: 2589
aggucugggcucuaauguu

SEQ ID NO: 200989 - RNA, 19 nt, Artificial Sequence
  Description of Artificial Sequence: Synthetic oligonucleotide
  Antisense strand to SEQ ID NO: 200988
aacauuagagcccagaccu

SEQ ID NO: 200990 - RNA, 19 nt, Artificial Sequence
  Description of Artificial Sequence: Synthetic oligonucleotide
  Sense strand starting at position 2752 of SEQ ID NO: 2589
ugagacaacucacugaagu

SEQ ID NO: 200991 - RNA, 19 nt, Artificial Sequence
  Description of Artificial Sequence: Synthetic oligonucleotide
  Antisense strand to SEQ ID NO: 200990
acuucagugaguugucuca

SEQ ID NO: 200992 - RNA, 19 nt, Artificial Sequence
  Description of Artificial Sequence: Synthetic oligonucleotide
  Sense strand starting at position 2803 of SEQ ID NO: 2589
ugugucagaacucaucgaa

SEQ ID NO: 200993 - RNA, 19 nt, Artificial Sequence
  Description of Artificial Sequence: Synthetic oligonucleotide
  Antisense strand to SEQ ID NO: 200992
uucgaugaguucugacaca

SEQ ID NO: 200994 - RNA, 19 nt, Artificial Sequence
  Description of Artificial Sequence: Synthetic oligonucleotide
  Sense strand starting at position 3033 of SEQ ID NO: 2589
ugccaaacuccuggguaau

SEQ ID NO: 200995 - RNA, 19 nt, Artificial Sequence
  Description of Artificial Sequence: Synthetic oligonucleotide
  Antisense strand to SEQ ID NO: 200994
auuacccaggaguuuggca

SEQ ID NO: 200996 - RNA, 19 nt, Artificial Sequence
  Description of Artificial Sequence: Synthetic oligonucleotide
  Sense strand starting at position 3034 of SEQ ID NO: 2589
gccaaacuccuggguaaug

SEQ ID NO: 200997 - RNA, 19 nt, Artificial Sequence
  Description of Artificial Sequence: Synthetic oligonucleotide
  Antisense strand to SEQ ID NO: 200996
cauuacccaggaguuuggc

SEQ ID NO: 200998 - RNA, 19 nt, Artificial Sequence
  Description of Artificial Sequence: Synthetic oligonucleotide
  Sense strand starting at position 3110 of SEQ ID NO: 2589
ucagucagaucucuucuga

SEQ ID NO: 200999 - RNA, 19 nt, Artificial Sequence
  Description of Artificial Sequence: Synthetic oligonucleotide
  Antisense strand to SEQ ID NO: 200998
ucagaagagaucugacuga

SEQ ID NO: 201000 - RNA, 19 nt, Artificial Sequence
  Description of Artificial Sequence: Synthetic oligonucleotide
  Sense strand starting at position 3117 of SEQ ID NO: 2589
gaucucuucugagucugua

SEQ ID NO: 201001 - RNA, 19 nt, Artificial Sequence
  Description of Artificial Sequence: Synthetic oligonucleotide
  Antisense strand to SEQ ID NO: 201000
uacagacucagaagagauc

SEQ ID NO: 201002 - RNA, 19 nt, Artificial Sequence
  Description of Artificial Sequence: Synthetic oligonucleotide
  Sense strand starting at position 3125 of SEQ ID NO: 2589
cugagucuguaaccuuaca

SEQ ID NO: 201003 - RNA, 19 nt, Artificial Sequence
  Description of Artificial Sequence: Synthetic oligonucleotide
  Antisense strand to SEQ ID NO: 201002
uguaagguuacagacucag

SEQ ID NO: 201004 - RNA, 19 nt, Artificial Sequence
  Description of Artificial Sequence: Synthetic oligonucleotide
  Sense strand starting at position 3639 of SEQ ID NO: 2589
ggaaauugauuccagacau

SEQ ID NO: 201005 - RNA, 19 nt, Artificial Sequence
  Description of Artificial Sequence: Synthetic oligonucleotide
  Antisense strand to SEQ ID NO: 201004
augucuggaaucaauuucc

SEQ ID NO: 201006 - RNA, 19 nt, Artificial Sequence
  Description of Artificial Sequence: Synthetic oligonucleotide
  Sense strand starting at position 3714 of SEQ ID NO: 2589
uuuagauagagugguugau

SEQ ID NO: 201007 - RNA, 19 nt, Artificial Sequence
  Description of Artificial Sequence: Synthetic oligonucleotide
  Antisense strand to SEQ ID NO: 201006
aucaaccacucuaucuaaa

SEQ ID NO: 201008 - RNA, 19 nt, Artificial Sequence
  Description of Artificial Sequence: Synthetic oligonucleotide
  Sense strand starting at position 3784 of SEQ ID NO: 2589
ggaagauggcuuuguuagu

SEQ ID NO: 201009 - RNA, 19 nt, Artificial Sequence
  Description of Artificial Sequence: Synthetic oligonucleotide
  Antisense strand to SEQ ID NO: 201008
acuaacaaagccaucuucc

SEQ ID NO: 201010 - RNA, 19 nt, Artificial Sequence
  Description of Artificial Sequence: Synthetic oligonucleotide
  Sense strand starting at position 3785 of SEQ ID NO: 2589
gaagauggcuuuguuagug

SEQ ID NO: 201011 - RNA, 19 nt, Artificial Sequence
  Description of Artificial Sequence: Synthetic oligonucleotide
  Antisense strand to SEQ ID NO: 201010
cacuaacaaagccaucuuc

SEQ ID NO: 201012 - RNA, 19 nt, Artificial Sequence
  Description of Artificial Sequence: Synthetic oligonucleotide
  Sense strand starting at position 3921 of SEQ ID NO: 2589
ugguaaguggcuuggacau

SEQ ID NO: 201013 - RNA, 19 nt, Artificial Sequence
  Description of Artificial Sequence: Synthetic oligonucleotide
  Antisense strand to SEQ ID NO: 201012
auguccaagccacuuacca

SEQ ID NO: 201014 - RNA, 19 nt, Artificial Sequence
  Description of Artificial Sequence: Synthetic oligonucleotide
  Sense strand starting at position 3933 of SEQ ID NO: 2589
uggacauuaggcugacagu

SEQ ID NO: 201015 - RNA, 19 nt, Artificial Sequence
  Description of Artificial Sequence: Synthetic oligonucleotide
  Antisense strand to SEQ ID NO: 201014
acugucagccuaaugucca

SEQ ID NO: 201016 - RNA, 19 nt, Artificial Sequence
  Description of Artificial Sequence: Synthetic oligonucleotide
  Sense strand starting at position 2 of SEQ ID NO: 2592
cuagucuggaccugagaau

SEQ ID NO: 201017 - RNA, 19 nt, Artificial Sequence
  Description of Artificial Sequence: Synthetic oligonucleotide
  Antisense strand to SEQ ID NO: 201016
auucucagguccagacuag

SEQ ID NO: 201018 - RNA, 19 nt, Artificial Sequence
  Description of Artificial Sequence: Synthetic oligonucleotide
  Sense strand starting at position 8 of SEQ ID NO: 2592
uggaccugagaaugcauua

SEQ ID NO: 201019 - RNA, 19 nt, Artificial Sequence
  Description of Artificial Sequence: Synthetic oligonucleotide
  Antisense strand to SEQ ID NO: 201018
uaaugcauucucaggucca

SEQ ID NO: 201020 - RNA, 19 nt, Artificial Sequence
  Description of Artificial Sequence: Synthetic oligonucleotide
  Sense strand starting at position 19 of SEQ ID NO: 2592
augcauuaagaucaguuau

SEQ ID NO: 201021 - RNA, 19 nt, Artificial Sequence
  Description of Artificial Sequence: Synthetic oligonucleotide
  Antisense strand to SEQ ID NO: 201020
auaacugaucuuaaugcau

SEQ ID NO: 201022 - RNA, 19 nt, Artificial Sequence
  Description of Artificial Sequence: Synthetic oligonucleotide
  Sense strand starting at position 21 of SEQ ID NO: 2592
gcauuaagaucaguuauga

SEQ ID NO: 201023 - RNA, 19 nt, Artificial Sequence
  Description of Artificial Sequence: Synthetic oligonucleotide
  Antisense strand to SEQ ID NO: 201022
ucauaacugaucuuaaugc

SEQ ID NO: 201024 - RNA, 19 nt, Artificial Sequence
  Description of Artificial Sequence: Synthetic oligonucleotide
  Sense strand starting at position 71 of SEQ ID NO: 2592
guguuacacugcucagaaa

SEQ ID NO: 201025 - RNA, 19 nt, Artificial Sequence
  Description of Artificial Sequence: Synthetic oligonucleotide
  Antisense strand to SEQ ID NO: 201024
uuucugagcaguguaacac

SEQ ID NO: 201026 - RNA, 19 nt, Artificial Sequence
  Description of Artificial Sequence: Synthetic oligonucleotide
  Sense strand starting at position 113 of SEQ ID NO: 2592
auaagacucugggcugauu

SEQ ID NO: 201027 - RNA, 19 nt, Artificial Sequence
  Description of Artificial Sequence: Synthetic oligonucleotide
  Antisense strand to SEQ ID NO: 201026
aaucagcccagagucuuau

SEQ ID NO: 201028 - RNA, 19 nt, Artificial Sequence
  Description of Artificial Sequence: Synthetic oligonucleotide
  Sense strand starting at position 151 of SEQ ID NO: 2592
caaagaaacugguaagaga

SEQ ID NO: 201029 - RNA, 19 nt, Artificial Sequence
  Description of Artificial Sequence: Synthetic oligonucleotide
  Antisense strand to SEQ ID NO: 201028
ucucuuaccaguuucuuug

SEQ ID NO: 201030 - RNA, 19 nt, Artificial Sequence
  Description of Artificial Sequence: Synthetic oligonucleotide
  Sense strand starting at position 188 of SEQ ID NO: 2592
gcaagucagccucaaauau

SEQ ID NO: 201031 - RNA, 19 nt, Artificial Sequence
  Description of Artificial Sequence: Synthetic oligonucleotide
  Antisense strand to SEQ ID NO: 201030
auauuugaggcugacuugc

SEQ ID NO: 201032 - RNA, 19 nt, Artificial Sequence
  Description of Artificial Sequence: Synthetic oligonucleotide
  Sense strand starting at position 297 of SEQ ID NO: 2592
uggccuuauaaaggagaca

SEQ ID NO: 201033 - RNA, 19 nt, Artificial Sequence
  Description of Artificial Sequence: Synthetic oligonucleotide
  Antisense strand to SEQ ID NO: 201032
ugucuccuuuauaaggcca

SEQ ID NO: 201034 - RNA, 19 nt, Artificial Sequence
  Description of Artificial Sequence: Synthetic oligonucleotide
  Sense strand starting at position 342 of SEQ ID NO: 2592
ggcaguuaauacuuucuaa

SEQ ID NO: 201035 - RNA, 19 nt, Artificial Sequence
  Description of Artificial Sequence: Synthetic oligonucleotide
  Antisense strand to SEQ ID NO: 201034
uuagaaaguauuaacugcc

SEQ ID NO: 201036 - RNA, 19 nt, Artificial Sequence
  Description of Artificial Sequence: Synthetic oligonucleotide
  Sense strand starting at position 376 of SEQ ID NO: 2592
aguacauuaugaccacuua

SEQ ID NO: 201037 - RNA, 19 nt, Artificial Sequence
  Description of Artificial Sequence: Synthetic oligonucleotide
  Antisense strand to SEQ ID NO: 201036
uaaguggucauaauguacu

SEQ ID NO: 201038 - RNA, 19 nt, Artificial Sequence
  Description of Artificial Sequence: Synthetic oligonucleotide
  Sense strand starting at position 467 of SEQ ID NO: 2592
ccagaaacggucugcacuu

SEQ ID NO: 201039 - RNA, 19 nt, Artificial Sequence
  Description of Artificial Sequence: Synthetic oligonucleotide
  Antisense strand to SEQ ID NO: 201038
aagugcagaccguuucugg

SEQ ID NO: 201040 - RNA, 19 nt, Artificial Sequence
  Description of Artificial Sequence: Synthetic oligonucleotide
  Sense strand starting at position 468 of SEQ ID NO: 2592
cagaaacggucugcacuua

SEQ ID NO: 201041 - RNA, 19 nt, Artificial Sequence
  Description of Artificial Sequence: Synthetic oligonucleotide
  Antisense strand to SEQ ID NO: 201040
uaagugcagaccguuucug

SEQ ID NO: 201042 - RNA, 19 nt, Artificial Sequence
  Description of Artificial Sequence: Synthetic oligonucleotide
  Sense strand starting at position 479 of SEQ ID NO: 2592
ugcacuuauuaacugugaa

SEQ ID NO: 201043 - RNA, 19 nt, Artificial Sequence
  Description of Artificial Sequence: Synthetic oligonucleotide
  Antisense strand to SEQ ID NO: 201042
uucacaguuaauaagugca

SEQ ID NO: 201044 - RNA, 19 nt, Artificial Sequence
  Description of Artificial Sequence: Synthetic oligonucleotide
  Sense strand starting at position 493 of SEQ ID NO: 2592
gugaaacccagaugugaag

SEQ ID NO: 201045 - RNA, 19 nt, Artificial Sequence
  Description of Artificial Sequence: Synthetic oligonucleotide
  Antisense strand to SEQ ID NO: 201044
cuucacaucuggguuucac

SEQ ID NO: 201046 - RNA, 19 nt, Artificial Sequence
  Description of Artificial Sequence: Synthetic oligonucleotide
  Sense strand starting at position 632 of SEQ ID NO: 2592
aggagcagauugucuucua

SEQ ID NO: 201047 - RNA, 19 nt, Artificial Sequence
  Description of Artificial Sequence: Synthetic oligonucleotide
  Antisense strand to SEQ ID NO: 201046
uagaagacaaucugcuccu

SEQ ID NO: 201048 - RNA, 19 nt, Artificial Sequence
  Description of Artificial Sequence: Synthetic oligonucleotide
  Sense strand starting at position 635 of SEQ ID NO: 2592
agcagauugucuucuacug

SEQ ID NO: 201049 - RNA, 19 nt, Artificial Sequence
  Description of Artificial Sequence: Synthetic oligonucleotide
  Antisense strand to SEQ ID NO: 201048
caguagaagacaaucugcu

SEQ ID NO: 201050 - RNA, 19 nt, Artificial Sequence
  Description of Artificial Sequence: Synthetic oligonucleotide
  Sense strand starting at position 653 of SEQ ID NO: 2592
gauucuuguguuuggcaga

SEQ ID NO: 201051 - RNA, 19 nt, Artificial Sequence
  Description of Artificial Sequence: Synthetic oligonucleotide
  Antisense strand to SEQ ID NO: 201050
ucugccaaacacaagaauc

SEQ ID NO: 201052 - RNA, 19 nt, Artificial Sequence
  Description of Artificial Sequence: Synthetic oligonucleotide
  Sense strand starting at position 719 of SEQ ID NO: 2592
aucguaaagacagguuauc

SEQ ID NO: 201053 - RNA, 19 nt, Artificial Sequence
  Description of Artificial Sequence: Synthetic oligonucleotide
  Antisense strand to SEQ ID NO: 201052
gauaaccugucuuuacgau

SEQ ID NO: 201054 - RNA, 19 nt, Artificial Sequence
  Description of Artificial Sequence: Synthetic oligonucleotide
  Sense strand starting at position 758 of SEQ ID NO: 2592
gagucuuugaaguguguaa

SEQ ID NO: 201055 - RNA, 19 nt, Artificial Sequence
  Description of Artificial Sequence: Synthetic oligonucleotide
  Antisense strand to SEQ ID NO: 201054
uuacacacuucaaagacuc

SEQ ID NO: 201056 - RNA, 19 nt, Artificial Sequence
  Description of Artificial Sequence: Synthetic oligonucleotide
  Sense strand starting at position 919 of SEQ ID NO: 2592
acaauuggcuuugcuuuaa

SEQ ID NO: 201057 - RNA, 19 nt, Artificial Sequence
  Description of Artificial Sequence: Synthetic oligonucleotide
  Antisense strand to SEQ ID NO: 201056
uuaaagcaaagccaauugu

SEQ ID NO: 201058 - RNA, 19 nt, Artificial Sequence
  Description of Artificial Sequence: Synthetic oligonucleotide
  Sense strand starting at position 1119 of SEQ ID NO: 2592
uccuccaguccugggaauu

SEQ ID NO: 201059 - RNA, 19 nt, Artificial Sequence
  Description of Artificial Sequence: Synthetic oligonucleotide
  Antisense strand to SEQ ID NO: 201058
aauucccaggacuggagga

SEQ ID NO: 201060 - RNA, 19 nt, Artificial Sequence
  Description of Artificial Sequence: Synthetic oligonucleotide
  Sense strand starting at position 2411 of SEQ ID NO: 2592
uguagugguaaaugaaaug

SEQ ID NO: 201061 - RNA, 19 nt, Artificial Sequence
  Description of Artificial Sequence: Synthetic oligonucleotide
  Antisense strand to SEQ ID NO: 201060
cauuucauuuaccacuaca

SEQ ID NO: 201062 - RNA, 19 nt, Artificial Sequence
  Description of Artificial Sequence: Synthetic oligonucleotide
  Sense strand starting at position 2450 of SEQ ID NO: 2592
gaacuuacagucuggcaaa

SEQ ID NO: 201063 - RNA, 19 nt, Artificial Sequence
  Description of Artificial Sequence: Synthetic oligonucleotide
  Antisense strand to SEQ ID NO: 201062
uuugccagacuguaaguuc

SEQ ID NO: 201064 - RNA, 19 nt, Artificial Sequence
  Description of Artificial Sequence: Synthetic oligonucleotide
  Sense strand starting at position 2485 of SEQ ID NO: 2592
auucucaguugucuaagga

SEQ ID NO: 201065 - RNA, 19 nt, Artificial Sequence
  Description of Artificial Sequence: Synthetic oligonucleotide
  Antisense strand to SEQ ID NO: 201064
uccuuagacaacugagaau

SEQ ID NO: 201066 - RNA, 19 nt, Artificial Sequence
  Description of Artificial Sequence: Synthetic oligonucleotide
  Sense strand starting at position 2486 of SEQ ID NO: 2592
uucucaguugucuaaggag

SEQ ID NO: 201067 - RNA, 19 nt, Artificial Sequence
  Description of Artificial Sequence: Synthetic oligonucleotide
  Antisense strand to SEQ ID NO: 201066
cuccuuagacaacugagaa

SEQ ID NO: 201068 - RNA, 19 nt, Artificial Sequence
  Description of Artificial Sequence: Synthetic oligonucleotide
  Sense strand starting at position 2615 of SEQ ID NO: 2592
ggaacuugcgcuggaggaa

SEQ ID NO: 201069 - RNA, 19 nt, Artificial Sequence
  Description of Artificial Sequence: Synthetic oligonucleotide
  Antisense strand to SEQ ID NO: 201068
uuccuccagcgcaaguucc

SEQ ID NO: 201070 - RNA, 19 nt, Artificial Sequence
  Description of Artificial Sequence: Synthetic oligonucleotide
  Sense strand starting at position 2661 of SEQ ID NO: 2592
ggacccuuuccuuggguga

SEQ ID NO: 201071 - RNA, 19 nt, Artificial Sequence
  Description of Artificial Sequence: Synthetic oligonucleotide
  Antisense strand to SEQ ID NO: 201070
ucacccaaggaaagggucc

SEQ ID NO: 201072 - RNA, 19 nt, Artificial Sequence
  Description of Artificial Sequence: Synthetic oligonucleotide
  Sense strand starting at position 2662 of SEQ ID NO: 2592
gacccuuuccuugggugaa

SEQ ID NO: 201073 - RNA, 19 nt, Artificial Sequence
  Description of Artificial Sequence: Synthetic oligonucleotide
  Antisense strand to SEQ ID NO: 201072
uucacccaaggaaaggguc

SEQ ID NO: 201074 - RNA, 19 nt, Artificial Sequence
  Description of Artificial Sequence: Synthetic oligonucleotide
  Sense strand starting at position 2664 of SEQ ID NO: 2592
cccuuuccuugggugaaau

SEQ ID NO: 201075 - RNA, 19 nt, Artificial Sequence
  Description of Artificial Sequence: Synthetic oligonucleotide
  Antisense strand to SEQ ID NO: 201074
auuucacccaaggaaaggg

SEQ ID NO: 201076 - RNA, 19 nt, Artificial Sequence
  Description of Artificial Sequence: Synthetic oligonucleotide
  Sense strand starting at position 2665 of SEQ ID NO: 2592
ccuuuccuugggugaaauu

SEQ ID NO: 201077 - RNA, 19 nt, Artificial Sequence
  Description of Artificial Sequence: Synthetic oligonucleotide
  Antisense strand to SEQ ID NO: 201076
aauuucacccaaggaaagg

SEQ ID NO: 201078 - RNA, 19 nt, Artificial Sequence
  Description of Artificial Sequence: Synthetic oligonucleotide
  Sense strand starting at position 2721 of SEQ ID NO: 2592
agaggucaccugggugaau

SEQ ID NO: 201079 - RNA, 19 nt, Artificial Sequence
  Description of Artificial Sequence: Synthetic oligonucleotide
  Antisense strand to SEQ ID NO: 201078
auucacccaggugaccucu

SEQ ID NO: 201080 - RNA, 19 nt, Artificial Sequence
  Description of Artificial Sequence: Synthetic oligonucleotide
  Sense strand starting at position 2722 of SEQ ID NO: 2592
gaggucaccugggugaaua

SEQ ID NO: 201081 - RNA, 19 nt, Artificial Sequence
  Description of Artificial Sequence: Synthetic oligonucleotide
  Antisense strand to SEQ ID NO: 201080
uauucacccaggugaccuc

SEQ ID NO: 201082 - RNA, 19 nt, Artificial Sequence
  Description of Artificial Sequence: Synthetic oligonucleotide
  Sense strand starting at position 2836 of SEQ ID NO: 2592
guaccucuggcagagauau

SEQ ID NO: 201083 - RNA, 19 nt, Artificial Sequence
  Description of Artificial Sequence: Synthetic oligonucleotide
  Antisense strand to SEQ ID NO: 201082
auaucucugccagagguac

SEQ ID NO: 201084 - RNA, 19 nt, Artificial Sequence
  Description of Artificial Sequence: Synthetic oligonucleotide
  Sense strand starting at position 2956 of SEQ ID NO: 2592
gggagaauauaauaaacuu

SEQ ID NO: 201085 - RNA, 19 nt, Artificial Sequence
  Description of Artificial Sequence: Synthetic oligonucleotide
  Antisense strand to SEQ ID NO: 201084
aaguuuauuauauucuccc

SEQ ID NO: 201086 - RNA, 19 nt, Artificial Sequence
  Description of Artificial Sequence: Synthetic oligonucleotide
  Sense strand starting at position 2979 of SEQ ID NO: 2592
gaguccguucuacauacaa

SEQ ID NO: 201087 - RNA, 19 nt, Artificial Sequence
  Description of Artificial Sequence: Synthetic oligonucleotide
  Antisense strand to SEQ ID NO: 201086
uuguauguagaacggacuc

SEQ ID NO: 201088 - RNA, 19 nt, Artificial Sequence
  Description of Artificial Sequence: Synthetic oligonucleotide
  Sense strand starting at position 3098 of SEQ ID NO: 2592
uacuuaacgggcuauggau

SEQ ID NO: 201089 - RNA, 19 nt, Artificial Sequence
  Description of Artificial Sequence: Synthetic oligonucleotide
  Antisense strand to SEQ ID NO: 201088
auccauagcccguuaagua

SEQ ID NO: 201090 - RNA, 19 nt, Artificial Sequence
  Description of Artificial Sequence: Synthetic oligonucleotide
  Sense strand starting at position 3759 of SEQ ID NO: 2592
auaagcuagcuuuguaaca

SEQ ID NO: 201091 - RNA, 19 nt, Artificial Sequence
  Description of Artificial Sequence: Synthetic oligonucleotide
  Antisense strand to SEQ ID NO: 201090
uguuacaaagcuagcuuau

SEQ ID NO: 201092 - RNA, 19 nt, Artificial Sequence
  Description of Artificial Sequence: Synthetic oligonucleotide
  Sense strand starting at position 3875 of SEQ ID NO: 2592
cuacucuuuggaggcaaua

SEQ ID NO: 201093 - RNA, 19 nt, Artificial Sequence
  Description of Artificial Sequence: Synthetic oligonucleotide
  Antisense strand to SEQ ID NO: 201092
uauugccuccaaagaguag

SEQ ID NO: 201094 - RNA, 19 nt, Artificial Sequence
  Description of Artificial Sequence: Synthetic oligonucleotide
  Sense strand starting at position 3886 of SEQ ID NO: 2592
aggcaauaugcucaacucu

SEQ ID NO: 201095 - RNA, 19 nt, Artificial Sequence
  Description of Artificial Sequence: Synthetic oligonucleotide
  Antisense strand to SEQ ID NO: 201094
agaguugagcauauugccu

SEQ ID NO: 201096 - RNA, 19 nt, Artificial Sequence
  Description of Artificial Sequence: Synthetic oligonucleotide
  Sense strand starting at position 56 of SEQ ID NO: 2591
uuaugucuuccagacuuga

SEQ ID NO: 201097 - RNA, 19 nt, Artificial Sequence
  Description of Artificial Sequence: Synthetic oligonucleotide
  Antisense strand to SEQ ID NO: 201096
ucaagucuggaagacauaa

SEQ ID NO: 201098 - RNA, 19 nt, Artificial Sequence
  Description of Artificial Sequence: Synthetic oligonucleotide
  Sense strand starting at position 197 of SEQ ID NO: 2591
acaaauagaugagaaugua

SEQ ID NO: 201099 - RNA, 19 nt, Artificial Sequence
  Description of Artificial Sequence: Synthetic oligonucleotide
  Antisense strand to SEQ ID NO: 201098
uacauucucaucuauuugu

SEQ ID NO: 201100 - RNA, 19 nt, Artificial Sequence
  Description of Artificial Sequence: Synthetic oligonucleotide
  Sense strand starting at position 205 of SEQ ID NO: 2591
augagaauguacuccuaug

SEQ ID NO: 201101 - RNA, 19 nt, Artificial Sequence
  Description of Artificial Sequence: Synthetic oligonucleotide
  Antisense strand to SEQ ID NO: 201100
cauaggaguacauucucau

SEQ ID NO: 201102 - RNA, 19 nt, Artificial Sequence
  Description of Artificial Sequence: Synthetic oligonucleotide
  Sense strand starting at position 257 of SEQ ID NO: 2591
ccauuuaucuuguagauca

SEQ ID NO: 201103 - RNA, 19 nt, Artificial Sequence
  Description of Artificial Sequence: Synthetic oligonucleotide
  Antisense strand to SEQ ID NO: 201102
ugaucuacaagauaaaugg

SEQ ID NO: 201104 - RNA, 19 nt, Artificial Sequence
  Description of Artificial Sequence: Synthetic oligonucleotide
  Sense strand starting at position 264 of SEQ ID NO: 2591
ucuuguagaucagcuuaua

SEQ ID NO: 201105 - RNA, 19 nt, Artificial Sequence
  Description of Artificial Sequence: Synthetic oligonucleotide
  Antisense strand to SEQ ID NO: 201104
uauaagcugaucuacaaga

SEQ ID NO: 201106 - RNA, 19 nt, Artificial Sequence
  Description of Artificial Sequence: Synthetic oligonucleotide
  Sense strand starting at position 305 of SEQ ID NO: 2591
cuagucuggaccugagaau

SEQ ID NO: 201107 - RNA, 19 nt, Artificial Sequence
  Description of Artificial Sequence: Synthetic oligonucleotide
  Antisense strand to SEQ ID NO: 201106
auucucagguccagacuag

SEQ ID NO: 201108 - RNA, 19 nt, Artificial Sequence
  Description of Artificial Sequence: Synthetic oligonucleotide
  Sense strand starting at position 311 of SEQ ID NO: 2591
uggaccugagaaugcauua

SEQ ID NO: 201109 - RNA, 19 nt, Artificial Sequence
  Description of Artificial Sequence: Synthetic oligonucleotide
  Antisense strand to SEQ ID NO: 201108
uaaugcauucucaggucca

SEQ ID NO: 201110 - RNA, 19 nt, Artificial Sequence
  Description of Artificial Sequence: Synthetic oligonucleotide
  Sense strand starting at position 322 of SEQ ID NO: 2591
augcauuaagaucaguuau

SEQ ID NO: 201111 - RNA, 19 nt, Artificial Sequence
  Description of Artificial Sequence: Synthetic oligonucleotide
  Antisense strand to SEQ ID NO: 201110
auaacugaucuuaaugcau

SEQ ID NO: 201112 - RNA, 19 nt, Artificial Sequence
  Description of Artificial Sequence: Synthetic oligonucleotide
  Sense strand starting at position 324 of SEQ ID NO: 2591
gcauuaagaucaguuauga

SEQ ID NO: 201113 - RNA, 19 nt, Artificial Sequence
  Description of Artificial Sequence: Synthetic oligonucleotide
  Antisense strand to SEQ ID NO: 201112
ucauaacugaucuuaaugc

SEQ ID NO: 201114 - RNA, 19 nt, Artificial Sequence
  Description of Artificial Sequence: Synthetic oligonucleotide
  Sense strand starting at position 374 of SEQ ID NO: 2591
guguuacacugcucagaaa

SEQ ID NO: 201115 - RNA, 19 nt, Artificial Sequence
  Description of Artificial Sequence: Synthetic oligonucleotide
  Antisense strand to SEQ ID NO: 201114
uuucugagcaguguaacac

SEQ ID NO: 201116 - RNA, 19 nt, Artificial Sequence
  Description of Artificial Sequence: Synthetic oligonucleotide
  Sense strand starting at position 416 of SEQ ID NO: 2591
auaagacucugggcugauu

SEQ ID NO: 201117 - RNA, 19 nt, Artificial Sequence
  Description of Artificial Sequence: Synthetic oligonucleotide
  Antisense strand to SEQ ID NO: 201116
aaucagcccagagucuuau

SEQ ID NO: 201118 - RNA, 19 nt, Artificial Sequence
  Description of Artificial Sequence: Synthetic oligonucleotide
  Sense strand starting at position 454 of SEQ ID NO: 2591
caaagaaacugguaagaga

SEQ ID NO: 201119 - RNA, 19 nt, Artificial Sequence
  Description of Artificial Sequence: Synthetic oligonucleotide
  Antisense strand to SEQ ID NO: 201118
ucucuuaccaguuucuuug

SEQ ID NO: 201120 - RNA, 19 nt, Artificial Sequence
  Description of Artificial Sequence: Synthetic oligonucleotide
  Sense strand starting at position 491 of SEQ ID NO: 2591
gcaagucagccucaaauau

SEQ ID NO: 201121 - RNA, 19 nt, Artificial Sequence
  Description of Artificial Sequence: Synthetic oligonucleotide
  Antisense strand to SEQ ID NO: 201120
auauuugaggcugacuugc

SEQ ID NO: 201122 - RNA, 19 nt, Artificial Sequence
  Description of Artificial Sequence: Synthetic oligonucleotide
  Sense strand starting at position 600 of SEQ ID NO: 2591
uggccuuauaaaggagaca

SEQ ID NO: 201123 - RNA, 19 nt, Artificial Sequence
  Description of Artificial Sequence: Synthetic oligonucleotide
  Antisense strand to SEQ ID NO: 201122
ugucuccuuuauaaggcca

SEQ ID NO: 201124 - RNA, 19 nt, Artificial Sequence
  Description of Artificial Sequence: Synthetic oligonucleotide
  Sense strand starting at position 645 of SEQ ID NO: 2591
ggcaguuaauacuuucuaa

SEQ ID NO: 201125 - RNA, 19 nt, Artificial Sequence
  Description of Artificial Sequence: Synthetic oligonucleotide
  Antisense strand to SEQ ID NO: 201124
uuagaaaguauuaacugcc

SEQ ID NO: 201126 - RNA, 19 nt, Artificial Sequence
  Description of Artificial Sequence: Synthetic oligonucleotide
  Sense strand starting at position 679 of SEQ ID NO: 2591
aguacauuaugaccacuua

SEQ ID NO: 201127 - RNA, 19 nt, Artificial Sequence
  Description of Artificial Sequence: Synthetic oligonucleotide
  Antisense strand to SEQ ID NO: 201126
uaaguggucauaauguacu

SEQ ID NO: 201128 - RNA, 19 nt, Artificial Sequence
  Description of Artificial Sequence: Synthetic oligonucleotide
  Sense strand starting at position 771 of SEQ ID NO: 2591
cagaaacggucugcacuua

SEQ ID NO: 201129 - RNA, 19 nt, Artificial Sequence
  Description of Artificial Sequence: Synthetic oligonucleotide
  Antisense strand to SEQ ID NO: 201128
uaagugcagaccguuucug

SEQ ID NO: 201130 - RNA, 19 nt, Artificial Sequence
  Description of Artificial Sequence: Synthetic oligonucleotide
  Sense strand starting at position 782 of SEQ ID NO: 2591
ugcacuuauuaacugugaa

SEQ ID NO: 201131 - RNA, 19 nt, Artificial Sequence
  Description of Artificial Sequence: Synthetic oligonucleotide
  Antisense strand to SEQ ID NO: 201130
uucacaguuaauaagugca

SEQ ID NO: 201132 - RNA, 19 nt, Artificial Sequence
  Description of Artificial Sequence: Synthetic oligonucleotide
  Sense strand starting at position 796 of SEQ ID NO: 2591
gugaaacccagaugugaag

SEQ ID NO: 201133 - RNA, 19 nt, Artificial Sequence
  Description of Artificial Sequence: Synthetic oligonucleotide
  Antisense strand to SEQ ID NO: 201132
cuucacaucuggguuucac

SEQ ID NO: 201134 - RNA, 19 nt, Artificial Sequence
  Description of Artificial Sequence: Synthetic oligonucleotide
  Sense strand starting at position 935 of SEQ ID NO: 2591
aggagcagauugucuucua

SEQ ID NO: 201135 - RNA, 19 nt, Artificial Sequence
  Description of Artificial Sequence: Synthetic oligonucleotide
  Antisense strand to SEQ ID NO: 201134
uagaagacaaucugcuccu

SEQ ID NO: 201136 - RNA, 19 nt, Artificial Sequence
  Description of Artificial Sequence: Synthetic oligonucleotide
  Sense strand starting at position 938 of SEQ ID NO: 2591
agcagauugucuucuacug

SEQ ID NO: 201137 - RNA, 19 nt, Artificial Sequence
  Description of Artificial Sequence: Synthetic oligonucleotide
  Antisense strand to SEQ ID NO: 201136
caguagaagacaaucugcu

SEQ ID NO: 201138 - RNA, 19 nt, Artificial Sequence
  Description of Artificial Sequence: Synthetic oligonucleotide
  Sense strand starting at position 1022 of SEQ ID NO: 2591
aucguaaagacagguuauc

SEQ ID NO: 201139 - RNA, 19 nt, Artificial Sequence
  Description of Artificial Sequence: Synthetic oligonucleotide
  Antisense strand to SEQ ID NO: 201138
gauaaccugucuuuacgau

SEQ ID NO: 201140 - RNA, 19 nt, Artificial Sequence
  Description of Artificial Sequence: Synthetic oligonucleotide
  Sense strand starting at position 1061 of SEQ ID NO: 2591
gagucuuugaaguguguaa

SEQ ID NO: 201141 - RNA, 19 nt, Artificial Sequence
  Description of Artificial Sequence: Synthetic oligonucleotide
  Antisense strand to SEQ ID NO: 201140
uuacacacuucaaagacuc

SEQ ID NO: 201142 - RNA, 19 nt, Artificial Sequence
  Description of Artificial Sequence: Synthetic oligonucleotide
  Sense strand starting at position 1222 of SEQ ID NO: 2591
acaauuggcuuugcuuuaa

SEQ ID NO: 201143 - RNA, 19 nt, Artificial Sequence
  Description of Artificial Sequence: Synthetic oligonucleotide
  Antisense strand to SEQ ID NO: 201142
uuaaagcaaagccaauugu

SEQ ID NO: 201144 - RNA, 19 nt, Artificial Sequence
  Description of Artificial Sequence: Synthetic oligonucleotide
  Sense strand starting at position 1422 of SEQ ID NO: 2591
uccuccaguccugggaauu

SEQ ID NO: 201145 - RNA, 19 nt, Artificial Sequence
  Description of Artificial Sequence: Synthetic oligonucleotide
  Antisense strand to SEQ ID NO: 201144
aauucccaggacuggagga

SEQ ID NO: 201146 - RNA, 19 nt, Artificial Sequence
  Description of Artificial Sequence: Synthetic oligonucleotide
  Sense strand starting at position 2714 of SEQ ID NO: 2591
uguagugguaaaugaaaug

SEQ ID NO: 201147 - RNA, 19 nt, Artificial Sequence
  Description of Artificial Sequence: Synthetic oligonucleotide
  Antisense strand to SEQ ID NO: 201146
cauuucauuuaccacuaca

SEQ ID NO: 201148 - RNA, 19 nt, Artificial Sequence
  Description of Artificial Sequence: Synthetic oligonucleotide
  Sense strand starting at position 2753 of SEQ ID NO: 2591
gaacuuacagucuggcaaa

SEQ ID NO: 201149 - RNA, 19 nt, Artificial Sequence
  Description of Artificial Sequence: Synthetic oligonucleotide
  Antisense strand to SEQ ID NO: 201148
uuugccagacuguaaguuc

SEQ ID NO: 201150 - RNA, 19 nt, Artificial Sequence
  Description of Artificial Sequence: Synthetic oligonucleotide
  Sense strand starting at position 2788 of SEQ ID NO: 2591
auucucaguugucuaagga

SEQ ID NO: 201151 - RNA, 19 nt, Artificial Sequence
  Description of Artificial Sequence: Synthetic oligonucleotide
  Antisense strand to SEQ ID NO: 201150
uccuuagacaacugagaau

SEQ ID NO: 201152 - RNA, 19 nt, Artificial Sequence
  Description of Artificial Sequence: Synthetic oligonucleotide
  Sense strand starting at position 2789 of SEQ ID NO: 2591
uucucaguugucuaaggag

SEQ ID NO: 201153 - RNA, 19 nt, Artificial Sequence
  Description of Artificial Sequence: Synthetic oligonucleotide
  Antisense strand to SEQ ID NO: 201152
cuccuuagacaacugagaa

SEQ ID NO: 201154 - RNA, 19 nt, Artificial Sequence
  Description of Artificial Sequence: Synthetic oligonucleotide
  Sense strand starting at position 2918 of SEQ ID NO: 2591
ggaacuugcgcuggaggaa

SEQ ID NO: 201155 - RNA, 19 nt, Artificial Sequence
  Description of Artificial Sequence: Synthetic oligonucleotide
  Antisense strand to SEQ ID NO: 201154
uuccuccagcgcaaguucc

SEQ ID NO: 201156 - RNA, 19 nt, Artificial Sequence
  Description of Artificial Sequence: Synthetic oligonucleotide
  Sense strand starting at position 2964 of SEQ ID NO: 2591
ggacccuuuccuuggguga

SEQ ID NO: 201157 - RNA, 19 nt, Artificial Sequence
  Description of Artificial Sequence: Synthetic oligonucleotide
  Antisense strand to SEQ ID NO: 201156
ucacccaaggaaagggucc

SEQ ID NO: 201158 - RNA, 19 nt, Artificial Sequence
  Description of Artificial Sequence: Synthetic oligonucleotide
  Sense strand starting at position 2965 of SEQ ID NO: 2591
gacccuuuccuugggugaa

SEQ ID NO: 201159 - RNA, 19 nt, Artificial Sequence
  Description of Artificial Sequence: Synthetic oligonucleotide
  Antisense strand to SEQ ID NO: 201158
uucacccaaggaaaggguc

SEQ ID NO: 201160 - RNA, 19 nt, Artificial Sequence
  Description of Artificial Sequence: Synthetic oligonucleotide
  Sense strand starting at position 2967 of SEQ ID NO: 2591
cccuuuccuugggugaaau

SEQ ID NO: 201161 - RNA, 19 nt, Artificial Sequence
  Description of Artificial Sequence: Synthetic oligonucleotide
  Antisense strand to SEQ ID NO: 201160
auuucacccaaggaaaggg

SEQ ID NO: 201162 - RNA, 19 nt, Artificial Sequence
  Description of Artificial Sequence: Synthetic oligonucleotide
  Sense strand starting at position 2968 of SEQ ID NO: 2591
ccuuuccuugggugaaauu

SEQ ID NO: 201163 - RNA, 19 nt, Artificial Sequence
  Description of Artificial Sequence: Synthetic oligonucleotide
  Antisense strand to SEQ ID NO: 201162
aauuucacccaaggaaagg

SEQ ID NO: 201164 - RNA, 19 nt, Artificial Sequence
  Description of Artificial Sequence: Synthetic oligonucleotide
  Sense strand starting at position 3024 of SEQ ID NO: 2591
agaggucaccugggugaau

SEQ ID NO: 201165 - RNA, 19 nt, Artificial Sequence
  Description of Artificial Sequence: Synthetic oligonucleotide
  Antisense strand to SEQ ID NO: 201164
auucacccaggugaccucu

SEQ ID NO: 201166 - RNA, 19 nt, Artificial Sequence
  Description of Artificial Sequence: Synthetic oligonucleotide
  Sense strand starting at position 3025 of SEQ ID NO: 2591
gaggucaccugggugaaua

SEQ ID NO: 201167 - RNA, 19 nt, Artificial Sequence
  Description of Artificial Sequence: Synthetic oligonucleotide
  Antisense strand to SEQ ID NO: 201166
uauucacccaggugaccuc

SEQ ID NO: 201168 - RNA, 19 nt, Artificial Sequence
  Description of Artificial Sequence: Synthetic oligonucleotide
  Sense strand starting at position 3139 of SEQ ID NO: 2591
guaccucuggcagagauau

SEQ ID NO: 201169 - RNA, 19 nt, Artificial Sequence
  Description of Artificial Sequence: Synthetic oligonucleotide
  Antisense strand to SEQ ID NO: 201168
auaucucugccagagguac

SEQ ID NO: 201170 - RNA, 19 nt, Artificial Sequence
  Description of Artificial Sequence: Synthetic oligonucleotide
  Sense strand starting at position 3259 of SEQ ID NO: 2591
gggagaauauaauaaacuu

SEQ ID NO: 201171 - RNA, 19 nt, Artificial Sequence
  Description of Artificial Sequence: Synthetic oligonucleotide
  Antisense strand to SEQ ID NO: 201170
aaguuuauuauauucuccc

SEQ ID NO: 201172 - RNA, 19 nt, Artificial Sequence
  Description of Artificial Sequence: Synthetic oligonucleotide
  Sense strand starting at position 3282 of SEQ ID NO: 2591
gaguccguucuacauacaa

SEQ ID NO: 201173 - RNA, 19 nt, Artificial Sequence
  Description of Artificial Sequence: Synthetic oligonucleotide
  Antisense strand to SEQ ID NO: 201172
uuguauguagaacggacuc

SEQ ID NO: 201174 - RNA, 19 nt, Artificial Sequence
  Description of Artificial Sequence: Synthetic oligonucleotide
  Sense strand starting at position 3401 of SEQ ID NO: 2591
uacuuaacgggcuauggau

SEQ ID NO: 201175 - RNA, 19 nt, Artificial Sequence
  Description of Artificial Sequence: Synthetic oligonucleotide
  Antisense strand to SEQ ID NO: 201174
auccauagcccguuaagua

SEQ ID NO: 201176 - RNA, 19 nt, Artificial Sequence
  Description of Artificial Sequence: Synthetic oligonucleotide
  Sense strand starting at position 67 of SEQ ID NO: 2593
ucuguaagccuugcugcua

SEQ ID NO: 201177 - RNA, 19 nt, Artificial Sequence
  Description of Artificial Sequence: Synthetic oligonucleotide
  Antisense strand to SEQ ID NO: 201176
uagcagcaaggcuuacaga

SEQ ID NO: 201178 - RNA, 19 nt, Artificial Sequence
  Description of Artificial Sequence: Synthetic oligonucleotide
  Sense strand starting at position 88 of SEQ ID NO: 2593
aguagaauuaagugaucug

SEQ ID NO: 201179 - RNA, 19 nt, Artificial Sequence
  Description of Artificial Sequence: Synthetic oligonucleotide
  Antisense strand to SEQ ID NO: 201178
cagaucacuuaauucuacu

SEQ ID NO: 201180 - RNA, 19 nt, Artificial Sequence
  Description of Artificial Sequence: Synthetic oligonucleotide
  Sense strand starting at position 143 of SEQ ID NO: 2593
gcucucuuccgccaaauua

SEQ ID NO: 201181 - RNA, 19 nt, Artificial Sequence
  Description of Artificial Sequence: Synthetic oligonucleotide
  Antisense strand to SEQ ID NO: 201180
uaauuuggcggaagagagc

SEQ ID NO: 201182 - RNA, 19 nt, Artificial Sequence
  Description of Artificial Sequence: Synthetic oligonucleotide
  Sense strand starting at position 204 of SEQ ID NO: 2593
cagaaugcugaauguuacu

SEQ ID NO: 201183 - RNA, 19 nt, Artificial Sequence
  Description of Artificial Sequence: Synthetic oligonucleotide
  Antisense strand to SEQ ID NO: 201182
aguaacauucagcauucug

SEQ ID NO: 201184 - RNA, 19 nt, Artificial Sequence
  Description of Artificial Sequence: Synthetic oligonucleotide
  Sense strand starting at position 243 of SEQ ID NO: 2593
uguuuacagcuacaaagaa

SEQ ID NO: 201185 - RNA, 19 nt, Artificial Sequence
  Description of Artificial Sequence: Synthetic oligonucleotide
  Antisense strand to SEQ ID NO: 201184
uucuuuguagcuguaaaca

SEQ ID NO: 201186 - RNA, 19 nt, Artificial Sequence
  Description of Artificial Sequence: Synthetic oligonucleotide
  Sense strand starting at position 495 of SEQ ID NO: 2593
cauccuggcccagagacau

SEQ ID NO: 201187 - RNA, 19 nt, Artificial Sequence
  Description of Artificial Sequence: Synthetic oligonucleotide
  Antisense strand to SEQ ID NO: 201186
augucucugggccaggaug

SEQ ID NO: 201188 - RNA, 19 nt, Artificial Sequence
  Description of Artificial Sequence: Synthetic oligonucleotide
  Sense strand starting at position 535 of SEQ ID NO: 2593
ccacacgugugacuuguaa

SEQ ID NO: 201189 - RNA, 19 nt, Artificial Sequence
  Description of Artificial Sequence: Synthetic oligonucleotide
  Antisense strand to SEQ ID NO: 201188
uuacaagucacacgugugg

SEQ ID NO: 201190 - RNA, 19 nt, Artificial Sequence
  Description of Artificial Sequence: Synthetic oligonucleotide
  Sense strand starting at position 537 of SEQ ID NO: 2593
acacgugugacuuguaaac

SEQ ID NO: 201191 - RNA, 19 nt, Artificial Sequence
  Description of Artificial Sequence: Synthetic oligonucleotide
  Antisense strand to SEQ ID NO: 201190
guuuacaagucacacgugu

SEQ ID NO: 201192 - RNA, 19 nt, Artificial Sequence
  Description of Artificial Sequence: Synthetic oligonucleotide
  Sense strand starting at position 626 of SEQ ID NO: 2593
cccguuugauggguaagga

SEQ ID NO: 201193 - RNA, 19 nt, Artificial Sequence
  Description of Artificial Sequence: Synthetic oligonucleotide
  Antisense strand to SEQ ID NO: 201192
uccuuacccaucaaacggg

SEQ ID NO: 201194 - RNA, 19 nt, Artificial Sequence
  Description of Artificial Sequence: Synthetic oligonucleotide
  Sense strand starting at position 627 of SEQ ID NO: 2593
ccguuugauggguaaggaa

SEQ ID NO: 201195 - RNA, 19 nt, Artificial Sequence
  Description of Artificial Sequence: Synthetic oligonucleotide
  Antisense strand to SEQ ID NO: 201194
uuccuuacccaucaaacgg

SEQ ID NO: 201196 - RNA, 19 nt, Artificial Sequence
  Description of Artificial Sequence: Synthetic oligonucleotide
  Sense strand starting at position 662 of SEQ ID NO: 2593
gaggaugugccucaaacca

SEQ ID NO: 201197 - RNA, 19 nt, Artificial Sequence
  Description of Artificial Sequence: Synthetic oligonucleotide
  Antisense strand to SEQ ID NO: 201196
ugguuugaggcacauccuc

SEQ ID NO: 201198 - RNA, 19 nt, Artificial Sequence
  Description of Artificial Sequence: Synthetic oligonucleotide
  Sense strand starting at position 822 of SEQ ID NO: 2593
gcaccuugagagcacuuua

SEQ ID NO: 201199 - RNA, 19 nt, Artificial Sequence
  Description of Artificial Sequence: Synthetic oligonucleotide
  Antisense strand to SEQ ID NO: 201198
uaaagugcucucaaggugc

SEQ ID NO: 201200 - RNA, 19 nt, Artificial Sequence
  Description of Artificial Sequence: Synthetic oligonucleotide
  Sense strand starting at position 2462 of SEQ ID NO: 2593
aagugaccugaccgugaau

SEQ ID NO: 201201 - RNA, 19 nt, Artificial Sequence
  Description of Artificial Sequence: Synthetic oligonucleotide
  Antisense strand to SEQ ID NO: 201200
auucacggucaggucacuu

SEQ ID NO: 201202 - RNA, 19 nt, Artificial Sequence
  Description of Artificial Sequence: Synthetic oligonucleotide
  Sense strand starting at position 2464 of SEQ ID NO: 2593
gugaccugaccgugaaugu

SEQ ID NO: 201203 - RNA, 19 nt, Artificial Sequence
  Description of Artificial Sequence: Synthetic oligonucleotide
  Antisense strand to SEQ ID NO: 201202
acauucacggucaggucac

SEQ ID NO: 201204 - RNA, 19 nt, Artificial Sequence
  Description of Artificial Sequence: Synthetic oligonucleotide
  Sense strand starting at position 2529 of SEQ ID NO: 2593
ugaagagaugggugcuuau

SEQ ID NO: 201205 - RNA, 19 nt, Artificial Sequence
  Description of Artificial Sequence: Synthetic oligonucleotide
  Antisense strand to SEQ ID NO: 201204
auaagcacccaucucuuca

SEQ ID NO: 201206 - RNA, 19 nt, Artificial Sequence
  Description of Artificial Sequence: Synthetic oligonucleotide
  Sense strand starting at position 2608 of SEQ ID NO: 2593
acccauguucccugacuca

SEQ ID NO: 201207 - RNA, 19 nt, Artificial Sequence
  Description of Artificial Sequence: Synthetic oligonucleotide
  Antisense strand to SEQ ID NO: 201206
ugagucagggaacaugggu

SEQ ID NO: 201208 - RNA, 19 nt, Artificial Sequence
  Description of Artificial Sequence: Synthetic oligonucleotide
  Sense strand starting at position 2617 of SEQ ID NO: 2593
cccugacucaagugugagu

SEQ ID NO: 201209 - RNA, 19 nt, Artificial Sequence
  Description of Artificial Sequence: Synthetic oligonucleotide
  Antisense strand to SEQ ID NO: 201208
acucacacuugagucaggg

SEQ ID NO: 201210 - RNA, 19 nt, Artificial Sequence
  Description of Artificial Sequence: Synthetic oligonucleotide
  Sense strand starting at position 2667 of SEQ ID NO: 2593
gucccagucgcguuuccua

SEQ ID NO: 201211 - RNA, 19 nt, Artificial Sequence
  Description of Artificial Sequence: Synthetic oligonucleotide
  Antisense strand to SEQ ID NO: 201210
uaggaaacgcgacugggac

SEQ ID NO: 201212 - RNA, 19 nt, Artificial Sequence
  Description of Artificial Sequence: Synthetic oligonucleotide
  Sense strand starting at position 2698 of SEQ ID NO: 2593
auagguauucucgguuaua

SEQ ID NO: 201213 - RNA, 19 nt, Artificial Sequence
  Description of Artificial Sequence: Synthetic oligonucleotide
  Antisense strand to SEQ ID NO: 201212
uauaaccgagaauaccuau

SEQ ID NO: 201214 - RNA, 19 nt, Artificial Sequence
  Description of Artificial Sequence: Synthetic oligonucleotide
  Sense strand starting at position 2699 of SEQ ID NO: 2593
uagguauucucgguuauag

SEQ ID NO: 201215 - RNA, 19 nt, Artificial Sequence
  Description of Artificial Sequence: Synthetic oligonucleotide
  Antisense strand to SEQ ID NO: 201214
cuauaaccgagaauaccua

SEQ ID NO: 201216 - RNA, 19 nt, Artificial Sequence
  Description of Artificial Sequence: Synthetic oligonucleotide
  Sense strand starting at position 2701 of SEQ ID NO: 2593
gguauucucgguuauaguu

SEQ ID NO: 201217 - RNA, 19 nt, Artificial Sequence
  Description of Artificial Sequence: Synthetic oligonucleotide
  Antisense strand to SEQ ID NO: 201216
aacuauaaccgagaauacc

SEQ ID NO: 201218 - RNA, 19 nt, Artificial Sequence
  Description of Artificial Sequence: Synthetic oligonucleotide
  Sense strand starting at position 2903 of SEQ ID NO: 2593
auuuacagcucuuaaggaa

SEQ ID NO: 201219 - RNA, 19 nt, Artificial Sequence
  Description of Artificial Sequence: Synthetic oligonucleotide
  Antisense strand to SEQ ID NO: 201218
uuccuuaagagcuguaaau

SEQ ID NO: 201220 - RNA, 19 nt, Artificial Sequence
  Description of Artificial Sequence: Synthetic oligonucleotide
  Sense strand starting at position 2916 of SEQ ID NO: 2593
aaggaaauucucgguuaua

SEQ ID NO: 201221 - RNA, 19 nt, Artificial Sequence
  Description of Artificial Sequence: Synthetic oligonucleotide
  Antisense strand to SEQ ID NO: 201220
uauaaccgagaauuuccuu

SEQ ID NO: 201222 - RNA, 19 nt, Artificial Sequence
  Description of Artificial Sequence: Synthetic oligonucleotide
  Sense strand starting at position 2917 of SEQ ID NO: 2593
aggaaauucucgguuauac

SEQ ID NO: 201223 - RNA, 19 nt, Artificial Sequence
  Description of Artificial Sequence: Synthetic oligonucleotide
  Antisense strand to SEQ ID NO: 201222
guauaaccgagaauuuccu

SEQ ID NO: 201224 - RNA, 19 nt, Artificial Sequence
  Description of Artificial Sequence: Synthetic oligonucleotide
  Sense strand starting at position 2919 of SEQ ID NO: 2593
gaaauucucgguuauacug

SEQ ID NO: 201225 - RNA, 19 nt, Artificial Sequence
  Description of Artificial Sequence: Synthetic oligonucleotide
  Antisense strand to SEQ ID NO: 201224
caguauaaccgagaauuuc

SEQ ID NO: 201226 - RNA, 19 nt, Artificial Sequence
  Description of Artificial Sequence: Synthetic oligonucleotide
  Sense strand starting at position 3202 of SEQ ID NO: 2593
ggcagcuugggucagacau

SEQ ID NO: 201227 - RNA, 19 nt, Artificial Sequence
  Description of Artificial Sequence: Synthetic oligonucleotide
  Antisense strand to SEQ ID NO: 201226
augucugacccaagcugcc

SEQ ID NO: 201228 - RNA, 19 nt, Artificial Sequence
  Description of Artificial Sequence: Synthetic oligonucleotide
  Sense strand starting at position 3209 of SEQ ID NO: 2593
ugggucagacauuauguau

SEQ ID NO: 201229 - RNA, 19 nt, Artificial Sequence
  Description of Artificial Sequence: Synthetic oligonucleotide
  Antisense strand to SEQ ID NO: 201228
auacauaaugucugaccca

SEQ ID NO: 201230 - RNA, 19 nt, Artificial Sequence
  Description of Artificial Sequence: Synthetic oligonucleotide
  Sense strand starting at position 3281 of SEQ ID NO: 2593
uguauucguggauagcuuu

SEQ ID NO: 201231 - RNA, 19 nt, Artificial Sequence
  Description of Artificial Sequence: Synthetic oligonucleotide
  Antisense strand to SEQ ID NO: 201230
aaagcuauccacgaauaca

SEQ ID NO: 201232 - RNA, 19 nt, Artificial Sequence
  Description of Artificial Sequence: Synthetic oligonucleotide
  Sense strand starting at position 3564 of SEQ ID NO: 2593
ugaggcuaugagggaucua

SEQ ID NO: 201233 - RNA, 19 nt, Artificial Sequence
  Description of Artificial Sequence: Synthetic oligonucleotide
  Antisense strand to SEQ ID NO: 201232
uagaucccucauagccuca

SEQ ID NO: 201234 - RNA, 19 nt, Artificial Sequence
  Description of Artificial Sequence: Synthetic oligonucleotide
  Sense strand starting at position 3601 of SEQ ID NO: 2593
uuccuugaugucuaguaca

SEQ ID NO: 201235 - RNA, 19 nt, Artificial Sequence
  Description of Artificial Sequence: Synthetic oligonucleotide
  Antisense strand to SEQ ID NO: 201234
uguacuagacaucaaggaa

SEQ ID NO: 201236 - RNA, 19 nt, Artificial Sequence
  Description of Artificial Sequence: Synthetic oligonucleotide
  Sense strand starting at position 3606 of SEQ ID NO: 2593
ugaugucuaguacagcauu

SEQ ID NO: 201237 - RNA, 19 nt, Artificial Sequence
  Description of Artificial Sequence: Synthetic oligonucleotide
  Antisense strand to SEQ ID NO: 201236
aaugcuguacuagacauca

SEQ ID NO: 201238 - RNA, 19 nt, Artificial Sequence
  Description of Artificial Sequence: Synthetic oligonucleotide
  Sense strand starting at position 3654 of SEQ ID NO: 2593
caaaguuaagcuugguauu

SEQ ID NO: 201239 - RNA, 19 nt, Artificial Sequence
  Description of Artificial Sequence: Synthetic oligonucleotide
  Antisense strand to SEQ ID NO: 201238
aauaccaagcuuaacuuug

SEQ ID NO: 201240 - RNA, 19 nt, Artificial Sequence
  Description of Artificial Sequence: Synthetic oligonucleotide
  Sense strand starting at position 3656 of SEQ ID NO: 2593
aaguuaagcuugguauucu

SEQ ID NO: 201241 - RNA, 19 nt, Artificial Sequence
  Description of Artificial Sequence: Synthetic oligonucleotide
  Antisense strand to SEQ ID NO: 201240
agaauaccaagcuuaacuu

SEQ ID NO: 201242 - RNA, 19 nt, Artificial Sequence
  Description of Artificial Sequence: Synthetic oligonucleotide
  Sense strand starting at position 3767 of SEQ ID NO: 2593
ugcaaagcuguguugcauu

SEQ ID NO: 201243 - RNA, 19 nt, Artificial Sequence
  Description of Artificial Sequence: Synthetic oligonucleotide
  Antisense strand to SEQ ID NO: 201242
aaugcaacacagcuuugca

SEQ ID NO: 201244 - RNA, 19 nt, Artificial Sequence
  Description of Artificial Sequence: Synthetic oligonucleotide
  Sense strand starting at position 3820 of SEQ ID NO: 2593
guucauugguggccuaaag

SEQ ID NO: 201245 - RNA, 19 nt, Artificial Sequence
  Description of Artificial Sequence: Synthetic oligonucleotide
  Antisense strand to SEQ ID NO: 201244
cuuuaggccaccaaugaac

SEQ ID NO: 201246 - RNA, 19 nt, Artificial Sequence
  Description of Artificial Sequence: Synthetic oligonucleotide
  Sense strand starting at position 3852 of SEQ ID NO: 2593
gguagaaugcuagagccau

SEQ ID NO: 201247 - RNA, 19 nt, Artificial Sequence
  Description of Artificial Sequence: Synthetic oligonucleotide
  Antisense strand to SEQ ID NO: 201246
auggcucuagcauucuacc

SEQ ID NO: 201248 - RNA, 19 nt, Artificial Sequence
  Description of Artificial Sequence: Synthetic oligonucleotide
  Sense strand starting at position 3908 of SEQ ID NO: 2593
acugcauaagccuagaauu

SEQ ID NO: 201249 - RNA, 19 nt, Artificial Sequence
  Description of Artificial Sequence: Synthetic oligonucleotide
  Antisense strand to SEQ ID NO: 201248
aauucuaggcuuaugcagu

SEQ ID NO: 201250 - RNA, 19 nt, Artificial Sequence
  Description of Artificial Sequence: Synthetic oligonucleotide
  Sense strand starting at position 3910 of SEQ ID NO: 2593
ugcauaagccuagaauuaa

SEQ ID NO: 201251 - RNA, 19 nt, Artificial Sequence
  Description of Artificial Sequence: Synthetic oligonucleotide
  Antisense strand to SEQ ID NO: 201250
uuaauucuaggcuuaugca

SEQ ID NO: 201252 - RNA, 19 nt, Artificial Sequence
  Description of Artificial Sequence: Synthetic oligonucleotide
  Sense strand starting at position 3951 of SEQ ID NO: 2593
gcuaaugccuuucugagau

SEQ ID NO: 201253 - RNA, 19 nt, Artificial Sequence
  Description of Artificial Sequence: Synthetic oligonucleotide
  Antisense strand to SEQ ID NO: 201252
aucucagaaaggcauuagc

SEQ ID NO: 201254 - RNA, 19 nt, Artificial Sequence
  Description of Artificial Sequence: Synthetic oligonucleotide
  Sense strand starting at position 3972 of SEQ ID NO: 2593
auauaagaaugaguagcuu

SEQ ID NO: 201255 - RNA, 19 nt, Artificial Sequence
  Description of Artificial Sequence: Synthetic oligonucleotide
  Antisense strand to SEQ ID NO: 201254
aagcuacucauucuuauau

SEQ ID NO: 201256 - RNA, 19 nt, Artificial Sequence
  Description of Artificial Sequence: Synthetic oligonucleotide
  Sense strand starting at position 12 of SEQ ID NO: 2594
cuguaauuacuccacaguu

SEQ ID NO: 201257 - RNA, 19 nt, Artificial Sequence
  Description of Artificial Sequence: Synthetic oligonucleotide
  Antisense strand to SEQ ID NO: 201256
aacuguggaguaauuacag

SEQ ID NO: 201258 - RNA, 19 nt, Artificial Sequence
  Description of Artificial Sequence: Synthetic oligonucleotide
  Sense strand starting at position 31 of SEQ ID NO: 2594
gcgguuacuacagagugaa

SEQ ID NO: 201259 - RNA, 19 nt, Artificial Sequence
  Description of Artificial Sequence: Synthetic oligonucleotide
  Antisense strand to SEQ ID NO: 201258
uucacucuguaguaaccgc

SEQ ID NO: 201260 - RNA, 19 nt, Artificial Sequence
  Description of Artificial Sequence: Synthetic oligonucleotide
  Sense strand starting at position 66 of SEQ ID NO: 2594
gugggaaagauucaggugu

SEQ ID NO: 201261 - RNA, 19 nt, Artificial Sequence
  Description of Artificial Sequence: Synthetic oligonucleotide
  Antisense strand to SEQ ID NO: 201260
acaccugaaucuuucccac

SEQ ID NO: 201262 - RNA, 19 nt, Artificial Sequence
  Description of Artificial Sequence: Synthetic oligonucleotide
  Sense strand starting at position 234 of SEQ ID NO: 2594
caaguuuguguuucgcuga

SEQ ID NO: 201263 - RNA, 19 nt, Artificial Sequence
  Description of Artificial Sequence: Synthetic oligonucleotide
  Antisense strand to SEQ ID NO: 201262
ucagcgaaacacaaacuug

SEQ ID NO: 201264 - RNA, 19 nt, Artificial Sequence
  Description of Artificial Sequence: Synthetic oligonucleotide
  Sense strand starting at position 333 of SEQ ID NO: 2594
gccgaaacacacugaauaa

SEQ ID NO: 201265 - RNA, 19 nt, Artificial Sequence
  Description of Artificial Sequence: Synthetic oligonucleotide
  Antisense strand to SEQ ID NO: 201264
uuauucaguguguuucggc

SEQ ID NO: 201266 - RNA, 19 nt, Artificial Sequence
  Description of Artificial Sequence: Synthetic oligonucleotide
  Sense strand starting at position 471 of SEQ ID NO: 2594
cuaucagccuggccaauau

SEQ ID NO: 201267 - RNA, 19 nt, Artificial Sequence
  Description of Artificial Sequence: Synthetic oligonucleotide
  Antisense strand to SEQ ID NO: 201266
auauuggccaggcugauag

SEQ ID NO: 201268 - RNA, 19 nt, Artificial Sequence
  Description of Artificial Sequence: Synthetic oligonucleotide
  Sense strand starting at position 703 of SEQ ID NO: 2594
cgacaaagccaguguuuau

SEQ ID NO: 201269 - RNA, 19 nt, Artificial Sequence
  Description of Artificial Sequence: Synthetic oligonucleotide
  Antisense strand to SEQ ID NO: 201268
auaaacacuggcuuugucg

SEQ ID NO: 201270 - RNA, 19 nt, Artificial Sequence
  Description of Artificial Sequence: Synthetic oligonucleotide
  Sense strand starting at position 734 of SEQ ID NO: 2594
cucuuuauacugggaagua

SEQ ID NO: 201271 - RNA, 19 nt, Artificial Sequence
  Description of Artificial Sequence: Synthetic oligonucleotide
  Antisense strand to SEQ ID NO: 201270
uacuucccaguauaaagag

SEQ ID NO: 201272 - RNA, 19 nt, Artificial Sequence
  Description of Artificial Sequence: Synthetic oligonucleotide
  Sense strand starting at position 782 of SEQ ID NO: 2594
cgcaucauuccgucucuca

SEQ ID NO: 201273 - RNA, 19 nt, Artificial Sequence
  Description of Artificial Sequence: Synthetic oligonucleotide
  Antisense strand to SEQ ID NO: 201272
ugagagacggaaugaugcg

SEQ ID NO: 201274 - RNA, 19 nt, Artificial Sequence
  Description of Artificial Sequence: Synthetic oligonucleotide
  Sense strand starting at position 1048 of SEQ ID NO: 2594
guuuaagaaauguauuggu

SEQ ID NO: 201275 - RNA, 19 nt, Artificial Sequence
  Description of Artificial Sequence: Synthetic oligonucleotide
  Antisense strand to SEQ ID NO: 201274
accaauacauuucuuaaac

SEQ ID NO: 201276 - RNA, 19 nt, Artificial Sequence
  Description of Artificial Sequence: Synthetic oligonucleotide
  Sense strand starting at position 1098 of SEQ ID NO: 2594
agacaaauauaggcaugua

SEQ ID NO: 201277 - RNA, 19 nt, Artificial Sequence
  Description of Artificial Sequence: Synthetic oligonucleotide
  Antisense strand to SEQ ID NO: 201276
uacaugccuauauuugucu

SEQ ID NO: 201278 - RNA, 19 nt, Artificial Sequence
  Description of Artificial Sequence: Synthetic oligonucleotide
  Sense strand starting at position 1266 of SEQ ID NO: 2594
cccuaaguaggacaguuau

SEQ ID NO: 201279 - RNA, 19 nt, Artificial Sequence
  Description of Artificial Sequence: Synthetic oligonucleotide
  Antisense strand to SEQ ID NO: 201278
auaacuguccuacuuaggg

SEQ ID NO: 201280 - RNA, 19 nt, Artificial Sequence
  Description of Artificial Sequence: Synthetic oligonucleotide
  Sense strand starting at position 1612 of SEQ ID NO: 2594
gcaaguuccaccggaaaga

SEQ ID NO: 201281 - RNA, 19 nt, Artificial Sequence
  Description of Artificial Sequence: Synthetic oligonucleotide
  Antisense strand to SEQ ID NO: 201280
ucuuuccgguggaacuugc

SEQ ID NO: 201282 - RNA, 19 nt, Artificial Sequence
  Description of Artificial Sequence: Synthetic oligonucleotide
  Sense strand starting at position 2232 of SEQ ID NO: 2594
gaggcagcagucugggaau

SEQ ID NO: 201283 - RNA, 19 nt, Artificial Sequence
  Description of Artificial Sequence: Synthetic oligonucleotide
  Antisense strand to SEQ ID NO: 201282
auucccagacugcugccuc

SEQ ID NO: 201284 - RNA, 19 nt, Artificial Sequence
  Description of Artificial Sequence: Synthetic oligonucleotide
  Sense strand starting at position 2234 of SEQ ID NO: 2594
ggcagcagucugggaauuu

SEQ ID NO: 201285 - RNA, 19 nt, Artificial Sequence
  Description of Artificial Sequence: Synthetic oligonucleotide
  Antisense strand to SEQ ID NO: 201284
aaauucccagacugcugcc

SEQ ID NO: 201286 - RNA, 19 nt, Artificial Sequence
  Description of Artificial Sequence: Synthetic oligonucleotide
  Sense strand starting at position 2516 of SEQ ID NO: 2594
caaucaggucgguaacuga

SEQ ID NO: 201287 - RNA, 19 nt, Artificial Sequence
  Description of Artificial Sequence: Synthetic oligonucleotide
  Antisense strand to SEQ ID NO: 201286
ucaguuaccgaccugauug

SEQ ID NO: 201288 - RNA, 19 nt, Artificial Sequence
  Description of Artificial Sequence: Synthetic oligonucleotide
  Sense strand starting at position 2551 of SEQ ID NO: 2594
acgcgaaguucauugaaua

SEQ ID NO: 201289 - RNA, 19 nt, Artificial Sequence
  Description of Artificial Sequence: Synthetic oligonucleotide
  Antisense strand to SEQ ID NO: 201288
uauucaaugaacuucgcgu

SEQ ID NO: 201290 - RNA, 19 nt, Artificial Sequence
  Description of Artificial Sequence: Synthetic oligonucleotide
  Sense strand starting at position 2571 of SEQ ID NO: 2594
augaaugcauucgugaaca

SEQ ID NO: 201291 - RNA, 19 nt, Artificial Sequence
  Description of Artificial Sequence: Synthetic oligonucleotide
  Antisense strand to SEQ ID NO: 201290
uguucacgaaugcauucau

SEQ ID NO: 201292 - RNA, 19 nt, Artificial Sequence
  Description of Artificial Sequence: Synthetic oligonucleotide
  Sense strand starting at position 2573 of SEQ ID NO: 2594
gaaugcauucgugaacaac

SEQ ID NO: 201293 - RNA, 19 nt, Artificial Sequence
  Description of Artificial Sequence: Synthetic oligonucleotide
  Antisense strand to SEQ ID NO: 201292
guuguucacgaaugcauuc

SEQ ID NO: 201294 - RNA, 19 nt, Artificial Sequence
  Description of Artificial Sequence: Synthetic oligonucleotide
  Sense strand starting at position 2810 of SEQ ID NO: 2594
uggcucauccguguguaca

SEQ ID NO: 201295 - RNA, 19 nt, Artificial Sequence
  Description of Artificial Sequence: Synthetic oligonucleotide
  Antisense strand to SEQ ID NO: 201294
uguacacacggaugagcca

SEQ ID NO: 201296 - RNA, 19 nt, Artificial Sequence
  Description of Artificial Sequence: Synthetic oligonucleotide
  Sense strand starting at position 2828 of SEQ ID NO: 2594
aacauuccagacuggagua

SEQ ID NO: 201297 - RNA, 19 nt, Artificial Sequence
  Description of Artificial Sequence: Synthetic oligonucleotide
  Antisense strand to SEQ ID NO: 201296
uacuccagucuggaauguu

SEQ ID NO: 201298 - RNA, 19 nt, Artificial Sequence
  Description of Artificial Sequence: Synthetic oligonucleotide
  Sense strand starting at position 2989 of SEQ ID NO: 2594
guguuuggucuugaugaca

SEQ ID NO: 201299 - RNA, 19 nt, Artificial Sequence
  Description of Artificial Sequence: Synthetic oligonucleotide
  Antisense strand to SEQ ID NO: 201298
ugucaucaagaccaaacac

SEQ ID NO: 201300 - RNA, 19 nt, Artificial Sequence
  Description of Artificial Sequence: Synthetic oligonucleotide
  Sense strand starting at position 3035 of SEQ ID NO: 2594
aggugacuccgaugaugac

SEQ ID NO: 201301 - RNA, 19 nt, Artificial Sequence
  Description of Artificial Sequence: Synthetic oligonucleotide
  Antisense strand to SEQ ID NO: 201300
gucaucaucggagucaccu

SEQ ID NO: 201302 - RNA, 19 nt, Artificial Sequence
  Description of Artificial Sequence: Synthetic oligonucleotide
  Sense strand starting at position 3157 of SEQ ID NO: 2594
cguguuguuggauggauga

SEQ ID NO: 201303 - RNA, 19 nt, Artificial Sequence
  Description of Artificial Sequence: Synthetic oligonucleotide
  Antisense strand to SEQ ID NO: 201302
ucauccauccaacaacacg

SEQ ID NO: 201304 - RNA, 19 nt, Artificial Sequence
  Description of Artificial Sequence: Synthetic oligonucleotide
  Sense strand starting at position 3159 of SEQ ID NO: 2594
uguuguuggauggaugaau

SEQ ID NO: 201305 - RNA, 19 nt, Artificial Sequence
  Description of Artificial Sequence: Synthetic oligonucleotide
  Antisense strand to SEQ ID NO: 201304
auucauccauccaacaaca

SEQ ID NO: 201306 - RNA, 19 nt, Artificial Sequence
  Description of Artificial Sequence: Synthetic oligonucleotide
  Sense strand starting at position 3214 of SEQ ID NO: 2594
cguacucagccuuagaaag

SEQ ID NO: 201307 - RNA, 19 nt, Artificial Sequence
  Description of Artificial Sequence: Synthetic oligonucleotide
  Antisense strand to SEQ ID NO: 201306
cuuucuaaggcugaguacg

SEQ ID NO: 201308 - RNA, 19 nt, Artificial Sequence
  Description of Artificial Sequence: Synthetic oligonucleotide
  Sense strand starting at position 3306 of SEQ ID NO: 2594
cacggaugaccuugaagac

SEQ ID NO: 201309 - RNA, 19 nt, Artificial Sequence
  Description of Artificial Sequence: Synthetic oligonucleotide
  Antisense strand to SEQ ID NO: 201308
gucuucaaggucauccgug

SEQ ID NO: 201310 - RNA, 19 nt, Artificial Sequence
  Description of Artificial Sequence: Synthetic oligonucleotide
  Sense strand starting at position 3323 of SEQ ID NO: 2594
acguuaugcugagugagau

SEQ ID NO: 201311 - RNA, 19 nt, Artificial Sequence
  Description of Artificial Sequence: Synthetic oligonucleotide
  Antisense strand to SEQ ID NO: 201310
aucucacucagcauaacgu

SEQ ID NO: 201312 - RNA, 19 nt, Artificial Sequence
  Description of Artificial Sequence: Synthetic oligonucleotide
  Sense strand starting at position 3324 of SEQ ID NO: 2594
cguuaugcugagugagaua

SEQ ID NO: 201313 - RNA, 19 nt, Artificial Sequence
  Description of Artificial Sequence: Synthetic oligonucleotide
  Antisense strand to SEQ ID NO: 201312
uaucucacucagcauaacg

SEQ ID NO: 201314 - RNA, 19 nt, Artificial Sequence
  Description of Artificial Sequence: Synthetic oligonucleotide
  Sense strand starting at position 3362 of SEQ ID NO: 2594
aauacaguacugugugauu

SEQ ID NO: 201315 - RNA, 19 nt, Artificial Sequence
  Description of Artificial Sequence: Synthetic oligonucleotide
  Antisense strand to SEQ ID NO: 201314
aaucacacaguacuguauu

SEQ ID NO: 201316 - RNA, 19 nt, Artificial Sequence
  Description of Artificial Sequence: Synthetic oligonucleotide
  Sense strand starting at position 3367 of SEQ ID NO: 2594
aguacugugugauuccaau

SEQ ID NO: 201317 - RNA, 19 nt, Artificial Sequence
  Description of Artificial Sequence: Synthetic oligonucleotide
  Antisense strand to SEQ ID NO: 201316
auuggaaucacacaguacu

SEQ ID NO: 201318 - RNA, 19 nt, Artificial Sequence
  Description of Artificial Sequence: Synthetic oligonucleotide
  Sense strand starting at position 3477 of SEQ ID NO: 2594
gggacagagcuucaguuga

SEQ ID NO: 201319 - RNA, 19 nt, Artificial Sequence
  Description of Artificial Sequence: Synthetic oligonucleotide
  Antisense strand to SEQ ID NO: 201318
ucaacugaagcucuguccc

SEQ ID NO: 201320 - RNA, 19 nt, Artificial Sequence
  Description of Artificial Sequence: Synthetic oligonucleotide
  Sense strand starting at position 3485 of SEQ ID NO: 2594
gcuucaguugaggaagaug

SEQ ID NO: 201321 - RNA, 19 nt, Artificial Sequence
  Description of Artificial Sequence: Synthetic oligonucleotide
  Antisense strand to SEQ ID NO: 201320
caucuuccucaacugaagc

SEQ ID NO: 201322 - RNA, 19 nt, Artificial Sequence
  Description of Artificial Sequence: Synthetic oligonucleotide
  Sense strand starting at position 3533 of SEQ ID NO: 2594
augugaauugugcauuaac

SEQ ID NO: 201323 - RNA, 19 nt, Artificial Sequence
  Description of Artificial Sequence: Synthetic oligonucleotide
  Antisense strand to SEQ ID NO: 201322
guuaaugcacaauucacau

SEQ ID NO: 201324 - RNA, 19 nt, Artificial Sequence
  Description of Artificial Sequence: Synthetic oligonucleotide
  Sense strand starting at position 3536 of SEQ ID NO: 2594
ugaauugugcauuaacagu

SEQ ID NO: 201325 - RNA, 19 nt, Artificial Sequence
  Description of Artificial Sequence: Synthetic oligonucleotide
  Antisense strand to SEQ ID NO: 201324
acuguuaaugcacaauuca

SEQ ID NO: 201326 - RNA, 19 nt, Artificial Sequence
  Description of Artificial Sequence: Synthetic oligonucleotide
  Sense strand starting at position 3542 of SEQ ID NO: 2594
gugcauuaacaguacugaa

SEQ ID NO: 201327 - RNA, 19 nt, Artificial Sequence
  Description of Artificial Sequence: Synthetic oligonucleotide
  Antisense strand to SEQ ID NO: 201326
uucaguacuguuaaugcac

SEQ ID NO: 201328 - RNA, 19 nt, Artificial Sequence
  Description of Artificial Sequence: Synthetic oligonucleotide
  Sense strand starting at position 3687 of SEQ ID NO: 2594
gcacccaggugauucuaaa

SEQ ID NO: 201329 - RNA, 19 nt, Artificial Sequence
  Description of Artificial Sequence: Synthetic oligonucleotide
  Antisense strand to SEQ ID NO: 201328
uuuagaaucaccugggugc

SEQ ID NO: 201330 - RNA, 19 nt, Artificial Sequence
  Description of Artificial Sequence: Synthetic oligonucleotide
  Sense strand starting at position 3797 of SEQ ID NO: 2594
uagccuuugcaucaaggua

SEQ ID NO: 201331 - RNA, 19 nt, Artificial Sequence
  Description of Artificial Sequence: Synthetic oligonucleotide
  Antisense strand to SEQ ID NO: 201330
uaccuugaugcaaaggcua

SEQ ID NO: 201332 - RNA, 19 nt, Artificial Sequence
  Description of Artificial Sequence: Synthetic oligonucleotide
  Sense strand starting at position 3812 of SEQ ID NO: 2594
gguauugagucccugagca

SEQ ID NO: 201333 - RNA, 19 nt, Artificial Sequence
  Description of Artificial Sequence: Synthetic oligonucleotide
  Antisense strand to SEQ ID NO: 201332
ugcucagggacucaauacc

SEQ ID NO: 201334 - RNA, 19 nt, Artificial Sequence
  Description of Artificial Sequence: Synthetic oligonucleotide
  Sense strand starting at position 3814 of SEQ ID NO: 2594
uauugagucccugagcaga

SEQ ID NO: 201335 - RNA, 19 nt, Artificial Sequence
  Description of Artificial Sequence: Synthetic oligonucleotide
  Antisense strand to SEQ ID NO: 201334
ucugcucagggacucaaua

SEQ ID NO: 201336 - RNA, 19 nt, Artificial Sequence
  Description of Artificial Sequence: Synthetic oligonucleotide
  Sense strand starting at position 283 of SEQ ID NO: 2595
gggugaaugcaagauguac

SEQ ID NO: 201337 - RNA, 19 nt, Artificial Sequence
  Description of Artificial Sequence: Synthetic oligonucleotide
  Antisense strand to SEQ ID NO: 201336
guacaucuugcauucaccc

SEQ ID NO: 201338 - RNA, 19 nt, Artificial Sequence
  Description of Artificial Sequence: Synthetic oligonucleotide
  Sense strand starting at position 464 of SEQ ID NO: 2595
aagagaagguuccucccua

SEQ ID NO: 201339 - RNA, 19 nt, Artificial Sequence
  Description of Artificial Sequence: Synthetic oligonucleotide
  Antisense strand to SEQ ID NO: 201338
uagggaggaaccuucucuu

SEQ ID NO: 201340 - RNA, 19 nt, Artificial Sequence
  Description of Artificial Sequence: Synthetic oligonucleotide
  Sense strand starting at position 465 of SEQ ID NO: 2595
agagaagguuccucccuaa

SEQ ID NO: 201341 - RNA, 19 nt, Artificial Sequence
  Description of Artificial Sequence: Synthetic oligonucleotide
  Antisense strand to SEQ ID NO: 201340
uuagggaggaaccuucucu

SEQ ID NO: 201342 - RNA, 19 nt, Artificial Sequence
  Description of Artificial Sequence: Synthetic oligonucleotide
  Sense strand starting at position 862 of SEQ ID NO: 2595
aagggaugaugucuauguu

SEQ ID NO: 201343 - RNA, 19 nt, Artificial Sequence
  Description of Artificial Sequence: Synthetic oligonucleotide
  Antisense strand to SEQ ID NO: 201342
aacauagacaucaucccuu

SEQ ID NO: 201344 - RNA, 19 nt, Artificial Sequence
  Description of Artificial Sequence: Synthetic oligonucleotide
  Sense strand starting at position 863 of SEQ ID NO: 2595
agggaugaugucuauguua

SEQ ID NO: 201345 - RNA, 19 nt, Artificial Sequence
  Description of Artificial Sequence: Synthetic oligonucleotide
  Antisense strand to SEQ ID NO: 201344
uaacauagacaucaucccu

SEQ ID NO: 201346 - RNA, 19 nt, Artificial Sequence
  Description of Artificial Sequence: Synthetic oligonucleotide
  Sense strand starting at position 1033 of SEQ ID NO: 2595
gcgacaggcagugaagaau

SEQ ID NO: 201347 - RNA, 19 nt, Artificial Sequence
  Description of Artificial Sequence: Synthetic oligonucleotide
  Antisense strand to SEQ ID NO: 201346
auucuucacugccugucgc

SEQ ID NO: 201348 - RNA, 19 nt, Artificial Sequence
  Description of Artificial Sequence: Synthetic oligonucleotide
  Sense strand starting at position 1248 of SEQ ID NO: 2595
aggaauuuaugguaaggau

SEQ ID NO: 201349 - RNA, 19 nt, Artificial Sequence
  Description of Artificial Sequence: Synthetic oligonucleotide
  Antisense strand to SEQ ID NO: 201348
auccuuaccauaaauuccu

SEQ ID NO: 201350 - RNA, 19 nt, Artificial Sequence
  Description of Artificial Sequence: Synthetic oligonucleotide
  Sense strand starting at position 1362 of SEQ ID NO: 2595
uuuguaggcauuugguuua

SEQ ID NO: 201351 - RNA, 19 nt, Artificial Sequence
  Description of Artificial Sequence: Synthetic oligonucleotide
  Antisense strand to SEQ ID NO: 201350
uaaaccaaaugccuacaaa

SEQ ID NO: 201352 - RNA, 19 nt, Artificial Sequence
  Description of Artificial Sequence: Synthetic oligonucleotide
  Sense strand starting at position 1365 of SEQ ID NO: 2595
guaggcauuugguuuaagu

SEQ ID NO: 201353 - RNA, 19 nt, Artificial Sequence
  Description of Artificial Sequence: Synthetic oligonucleotide
  Antisense strand to SEQ ID NO: 201352
acuuaaaccaaaugccuac

SEQ ID NO: 201354 - RNA, 19 nt, Artificial Sequence
  Description of Artificial Sequence: Synthetic oligonucleotide
  Sense strand starting at position 1405 of SEQ ID NO: 2595
ugggaagacuauguagcaa

SEQ ID NO: 201355 - RNA, 19 nt, Artificial Sequence
  Description of Artificial Sequence: Synthetic oligonucleotide
  Antisense strand to SEQ ID NO: 201354
uugcuacauagucuuccca

SEQ ID NO: 201356 - RNA, 19 nt, Artificial Sequence
  Description of Artificial Sequence: Synthetic oligonucleotide
  Sense strand starting at position 1451 of SEQ ID NO: 2595
uguagaucucaagggagca

SEQ ID NO: 201357 - RNA, 19 nt, Artificial Sequence
  Description of Artificial Sequence: Synthetic oligonucleotide
  Antisense strand to SEQ ID NO: 201356
ugcucccuugagaucuaca

SEQ ID NO: 201358 - RNA, 19 nt, Artificial Sequence
  Description of Artificial Sequence: Synthetic oligonucleotide
  Sense strand starting at position 1474 of SEQ ID NO: 2595
acacaauuauguguaugau

SEQ ID NO: 201359 - RNA, 19 nt, Artificial Sequence
  Description of Artificial Sequence: Synthetic oligonucleotide
  Antisense strand to SEQ ID NO: 201358
aucauacacauaauugugu

SEQ ID NO: 201360 - RNA, 19 nt, Artificial Sequence
  Description of Artificial Sequence: Synthetic oligonucleotide
  Sense strand starting at position 1477 of SEQ ID NO: 2595
caauuauguguaugauaug

SEQ ID NO: 201361 - RNA, 19 nt, Artificial Sequence
  Description of Artificial Sequence: Synthetic oligonucleotide
  Antisense strand to SEQ ID NO: 201360
cauaucauacacauaauug

SEQ ID NO: 201362 - RNA, 19 nt, Artificial Sequence
  Description of Artificial Sequence: Synthetic oligonucleotide
  Sense strand starting at position 1495 of SEQ ID NO: 2595
gguuaucagugggugaaau

SEQ ID NO: 201363 - RNA, 19 nt, Artificial Sequence
  Description of Artificial Sequence: Synthetic oligonucleotide
  Antisense strand to SEQ ID NO: 201362
auuucacccacugauaacc

SEQ ID NO: 201364 - RNA, 19 nt, Artificial Sequence
  Description of Artificial Sequence: Synthetic oligonucleotide
  Sense strand starting at position 1667 of SEQ ID NO: 2595
agagucagauauccgagua

SEQ ID NO: 201365 - RNA, 19 nt, Artificial Sequence
  Description of Artificial Sequence: Synthetic oligonucleotide
  Antisense strand to SEQ ID NO: 201364
uacucggauaucugacucu

SEQ ID NO: 201366 - RNA, 19 nt, Artificial Sequence
  Description of Artificial Sequence: Synthetic oligonucleotide
  Sense strand starting at position 1672 of SEQ ID NO: 2595
cagauauccgaguacauau

SEQ ID NO: 201367 - RNA, 19 nt, Artificial Sequence
  Description of Artificial Sequence: Synthetic oligonucleotide
  Antisense strand to SEQ ID NO: 201366
auauguacucggauaucug

SEQ ID NO: 201368 - RNA, 19 nt, Artificial Sequence
  Description of Artificial Sequence: Synthetic oligonucleotide
  Sense strand starting at position 1950 of SEQ ID NO: 2595
cacuaaaucugaguugagu

SEQ ID NO: 201369 - RNA, 19 nt, Artificial Sequence
  Description of Artificial Sequence: Synthetic oligonucleotide
  Antisense strand to SEQ ID NO: 201368
acucaacucagauuuagug

SEQ ID NO: 201370 - RNA, 19 nt, Artificial Sequence
  Description of Artificial Sequence: Synthetic oligonucleotide
  Sense strand starting at position 1986 of SEQ ID NO: 2595
auccgaguuggacauuguu

SEQ ID NO: 201371 - RNA, 19 nt, Artificial Sequence
  Description of Artificial Sequence: Synthetic oligonucleotide
  Antisense strand to SEQ ID NO: 201370
aacaauguccaacucggau

SEQ ID NO: 201372 - RNA, 19 nt, Artificial Sequence
  Description of Artificial Sequence: Synthetic oligonucleotide
  Sense strand starting at position 2007 of SEQ ID NO: 2595
gucguuucugcagugacca

SEQ ID NO: 201373 - RNA, 19 nt, Artificial Sequence
  Description of Artificial Sequence: Synthetic oligonucleotide
  Antisense strand to SEQ ID NO: 201372
uggucacugcagaaacgac

SEQ ID NO: 201374 - RNA, 19 nt, Artificial Sequence
  Description of Artificial Sequence: Synthetic oligonucleotide
  Sense strand starting at position 2154 of SEQ ID NO: 2595
ggaggugugaaguaaucuu

SEQ ID NO: 201375 - RNA, 19 nt, Artificial Sequence
  Description of Artificial Sequence: Synthetic oligonucleotide
  Antisense strand to SEQ ID NO: 201374
aagauuacuucacaccucc

SEQ ID NO: 201376 - RNA, 19 nt, Artificial Sequence
  Description of Artificial Sequence: Synthetic oligonucleotide
  Sense strand starting at position 2162 of SEQ ID NO: 2595
gaaguaaucuuuccagagg

SEQ ID NO: 201377 - RNA, 19 nt, Artificial Sequence
  Description of Artificial Sequence: Synthetic oligonucleotide
  Antisense strand to SEQ ID NO: 201376
ccucuggaaagauuacuuc

SEQ ID NO: 201378 - RNA, 19 nt, Artificial Sequence
  Description of Artificial Sequence: Synthetic oligonucleotide
  Sense strand starting at position 2165 of SEQ ID NO: 2595
guaaucuuuccagaggccu

SEQ ID NO: 201379 - RNA, 19 nt, Artificial Sequence
  Description of Artificial Sequence: Synthetic oligonucleotide
  Antisense strand to SEQ ID NO: 201378
aggccucuggaaagauuac

SEQ ID NO: 201380 - RNA, 19 nt, Artificial Sequence
  Description of Artificial Sequence: Synthetic oligonucleotide
  Sense strand starting at position 2224 of SEQ ID NO: 2595
uugugaguggugcaagaag

SEQ ID NO: 201381 - RNA, 19 nt, Artificial Sequence
  Description of Artificial Sequence: Synthetic oligonucleotide
  Antisense strand to SEQ ID NO: 201380
cuucuugcaccacucacaa

SEQ ID NO: 201382 - RNA, 19 nt, Artificial Sequence
  Description of Artificial Sequence: Synthetic oligonucleotide
  Sense strand starting at position 2275 of SEQ ID NO: 2595
gguauuguugaauaauauc

SEQ ID NO: 201383 - RNA, 19 nt, Artificial Sequence
  Description of Artificial Sequence: Synthetic oligonucleotide
  Antisense strand to SEQ ID NO: 201382
gauauuauucaacaauacc

SEQ ID NO: 201384 - RNA, 19 nt, Artificial Sequence
  Description of Artificial Sequence: Synthetic oligonucleotide
  Sense strand starting at position 2311 of SEQ ID NO: 2595
aggcucucuccugaaacuu

SEQ ID NO: 201385 - RNA, 19 nt, Artificial Sequence
  Description of Artificial Sequence: Synthetic oligonucleotide
  Antisense strand to SEQ ID NO: 201384
aaguuucaggagagagccu

SEQ ID NO: 201386 - RNA, 19 nt, Artificial Sequence
  Description of Artificial Sequence: Synthetic oligonucleotide
  Sense strand starting at position 2358 of SEQ ID NO: 2595
gaccucuauucuguggaaa

SEQ ID NO: 201387 - RNA, 19 nt, Artificial Sequence
  Description of Artificial Sequence: Synthetic oligonucleotide
  Antisense strand to SEQ ID NO: 201386
uuuccacagaauagagguc

SEQ ID NO: 201388 - RNA, 19 nt, Artificial Sequence
  Description of Artificial Sequence: Synthetic oligonucleotide
  Sense strand starting at position 2359 of SEQ ID NO: 2595
accucuauucuguggaaag

SEQ ID NO: 201389 - RNA, 19 nt, Artificial Sequence
  Description of Artificial Sequence: Synthetic oligonucleotide
  Antisense strand to SEQ ID NO: 201388
cuuuccacagaauagaggu

SEQ ID NO: 201390 - RNA, 19 nt, Artificial Sequence
  Description of Artificial Sequence: Synthetic oligonucleotide
  Sense strand starting at position 2430 of SEQ ID NO: 2595
gcgucuggucaccugcaaa

SEQ ID NO: 201391 - RNA, 19 nt, Artificial Sequence
  Description of Artificial Sequence: Synthetic oligonucleotide
  Antisense strand to SEQ ID NO: 201390
uuugcaggugaccagacgc

SEQ ID NO: 201392 - RNA, 19 nt, Artificial Sequence
  Description of Artificial Sequence: Synthetic oligonucleotide
  Sense strand starting at position 2479 of SEQ ID NO: 2595
uggaaucuuugguuuccaa

SEQ ID NO: 201393 - RNA, 19 nt, Artificial Sequence
  Description of Artificial Sequence: Synthetic oligonucleotide
  Antisense strand to SEQ ID NO: 201392
uuggaaaccaaagauucca

SEQ ID NO: 201394 - RNA, 19 nt, Artificial Sequence
  Description of Artificial Sequence: Synthetic oligonucleotide
  Sense strand starting at position 2599 of SEQ ID NO: 2595
ugguaaacuuugcucaaag

SEQ ID NO: 201395 - RNA, 19 nt, Artificial Sequence
  Description of Artificial Sequence: Synthetic oligonucleotide
  Antisense strand to SEQ ID NO: 201394
cuuugagcaaaguuuacca

SEQ ID NO: 201396 - RNA, 19 nt, Artificial Sequence
  Description of Artificial Sequence: Synthetic oligonucleotide
  Sense strand starting at position 2627 of SEQ ID NO: 2595
ccaugacuuguggaagugu

SEQ ID NO: 201397 - RNA, 19 nt, Artificial Sequence
  Description of Artificial Sequence: Synthetic oligonucleotide
  Antisense strand to SEQ ID NO: 201396
acacuuccacaagucaugg

SEQ ID NO: 201398 - RNA, 19 nt, Artificial Sequence
  Description of Artificial Sequence: Synthetic oligonucleotide
  Sense strand starting at position 3102 of SEQ ID NO: 2595
gacugacuuucccugagca

SEQ ID NO: 201399 - RNA, 19 nt, Artificial Sequence
  Description of Artificial Sequence: Synthetic oligonucleotide
  Antisense strand to SEQ ID NO: 201398
ugcucagggaaagucaguc

SEQ ID NO: 201400 - RNA, 19 nt, Artificial Sequence
  Description of Artificial Sequence: Synthetic oligonucleotide
  Sense strand starting at position 3225 of SEQ ID NO: 2595
acaauaguaugagccaauu

SEQ ID NO: 201401 - RNA, 19 nt, Artificial Sequence
  Description of Artificial Sequence: Synthetic oligonucleotide
  Antisense strand to SEQ ID NO: 201400
aauuggcucauacuauugu

SEQ ID NO: 201402 - RNA, 19 nt, Artificial Sequence
  Description of Artificial Sequence: Synthetic oligonucleotide
  Sense strand starting at position 3233 of SEQ ID NO: 2595
augagccaauucuugaaga

SEQ ID NO: 201403 - RNA, 19 nt, Artificial Sequence
  Description of Artificial Sequence: Synthetic oligonucleotide
  Antisense strand to SEQ ID NO: 201402
ucuucaagaauuggcucau

SEQ ID NO: 201404 - RNA, 19 nt, Artificial Sequence
  Description of Artificial Sequence: Synthetic oligonucleotide
  Sense strand starting at position 3489 of SEQ ID NO: 2595
ugauuuaggucaguagugu

SEQ ID NO: 201405 - RNA, 19 nt, Artificial Sequence
  Description of Artificial Sequence: Synthetic oligonucleotide
  Antisense strand to SEQ ID NO: 201404
acacuacugaccuaaauca

SEQ ID NO: 201406 - RNA, 19 nt, Artificial Sequence
  Description of Artificial Sequence: Synthetic oligonucleotide
  Sense strand starting at position 3591 of SEQ ID NO: 2595
augugcuuuccugaucaag

SEQ ID NO: 201407 - RNA, 19 nt, Artificial Sequence
  Description of Artificial Sequence: Synthetic oligonucleotide
  Antisense strand to SEQ ID NO: 201406
cuugaucaggaaagcacau

SEQ ID NO: 201408 - RNA, 19 nt, Artificial Sequence
  Description of Artificial Sequence: Synthetic oligonucleotide
  Sense strand starting at position 3644 of SEQ ID NO: 2595
ucuuguuuccuugaacaug

SEQ ID NO: 201409 - RNA, 19 nt, Artificial Sequence
  Description of Artificial Sequence: Synthetic oligonucleotide
  Antisense strand to SEQ ID NO: 201408
cauguucaaggaaacaaga

SEQ ID NO: 201410 - RNA, 19 nt, Artificial Sequence
  Description of Artificial Sequence: Synthetic oligonucleotide
  Sense strand starting at position 3662 of SEQ ID NO: 2595
ggacaugauaucuggaggu

SEQ ID NO: 201411 - RNA, 19 nt, Artificial Sequence
  Description of Artificial Sequence: Synthetic oligonucleotide
  Antisense strand to SEQ ID NO: 201410
accuccagauaucaugucc

SEQ ID NO: 201412 - RNA, 19 nt, Artificial Sequence
  Description of Artificial Sequence: Synthetic oligonucleotide
  Sense strand starting at position 3889 of SEQ ID NO: 2595
gguugauacagguagugua

SEQ ID NO: 201413 - RNA, 19 nt, Artificial Sequence
  Description of Artificial Sequence: Synthetic oligonucleotide
  Antisense strand to SEQ ID NO: 201412
uacacuaccuguaucaacc

SEQ ID NO: 201414 - RNA, 19 nt, Artificial Sequence
  Description of Artificial Sequence: Synthetic oligonucleotide
  Sense strand starting at position 3981 of SEQ ID NO: 2595
ugaagaacuugaguugauc

SEQ ID NO: 201415 - RNA, 19 nt, Artificial Sequence
  Description of Artificial Sequence: Synthetic oligonucleotide
  Antisense strand to SEQ ID NO: 201414
gaucaacucaaguucuuca

SEQ ID NO: 201416 - RNA, 19 nt, Artificial Sequence
  Description of Artificial Sequence: Synthetic oligonucleotide
  Sense strand starting at position 232 of SEQ ID NO: 2596
agggccucugccuagaaau

SEQ ID NO: 201417 - RNA, 19 nt, Artificial Sequence
  Description of Artificial Sequence: Synthetic oligonucleotide
  Antisense strand to SEQ ID NO: 201416
auuucuaggcagaggcccu

SEQ ID NO: 201418 - RNA, 19 nt, Artificial Sequence
  Description of Artificial Sequence: Synthetic oligonucleotide
  Sense strand starting at position 306 of SEQ ID NO: 2596
acagaagucuccucugacu

SEQ ID NO: 201419 - RNA, 19 nt, Artificial Sequence
  Description of Artificial Sequence: Synthetic oligonucleotide
  Antisense strand to SEQ ID NO: 201418
agucagaggagacuucugu

SEQ ID NO: 201420 - RNA, 19 nt, Artificial Sequence
  Description of Artificial Sequence: Synthetic oligonucleotide
  Sense strand starting at position 308 of SEQ ID NO: 2596
agaagucuccucugacuua

SEQ ID NO: 201421 - RNA, 19 nt, Artificial Sequence
  Description of Artificial Sequence: Synthetic oligonucleotide
  Antisense strand to SEQ ID NO: 201420
uaagucagaggagacuucu

SEQ ID NO: 201422 - RNA, 19 nt, Artificial Sequence
  Description of Artificial Sequence: Synthetic oligonucleotide
  Sense strand starting at position 556 of SEQ ID NO: 2596
aagacuagugcuuagcaca

SEQ ID NO: 201423 - RNA, 19 nt, Artificial Sequence
  Description of Artificial Sequence: Synthetic oligonucleotide
  Antisense strand to SEQ ID NO: 201422
ugugcuaagcacuagucuu

SEQ ID NO: 201424 - RNA, 19 nt, Artificial Sequence
  Description of Artificial Sequence: Synthetic oligonucleotide
  Sense strand starting at position 561 of SEQ ID NO: 2596
uagugcuuagcacagaaua

SEQ ID NO: 201425 - RNA, 19 nt, Artificial Sequence
  Description of Artificial Sequence: Synthetic oligonucleotide
  Antisense strand to SEQ ID NO: 201424
uauucugugcuaagcacua

SEQ ID NO: 201426 - RNA, 19 nt, Artificial Sequence
  Description of Artificial Sequence: Synthetic oligonucleotide
  Sense strand starting at position 625 of SEQ ID NO: 2596
gcaauuauuuguuuguaca

SEQ ID NO: 201427 - RNA, 19 nt, Artificial Sequence
  Description of Artificial Sequence: Synthetic oligonucleotide
  Antisense strand to SEQ ID NO: 201426
uguacaaacaaauaauugc

SEQ ID NO: 201428 - RNA, 19 nt, Artificial Sequence
  Description of Artificial Sequence: Synthetic oligonucleotide
  Sense strand starting at position 655 of SEQ ID NO: 2596
uagacugugugaccaaaga

SEQ ID NO: 201429 - RNA, 19 nt, Artificial Sequence
  Description of Artificial Sequence: Synthetic oligonucleotide
  Antisense strand to SEQ ID NO: 201428
ucuuuggucacacagucua

SEQ ID NO: 201430 - RNA, 19 nt, Artificial Sequence
  Description of Artificial Sequence: Synthetic oligonucleotide
  Sense strand starting at position 1026 of SEQ ID NO: 2596
ucuggaucacauuaagcau

SEQ ID NO: 201431 - RNA, 19 nt, Artificial Sequence
  Description of Artificial Sequence: Synthetic oligonucleotide
  Antisense strand to SEQ ID NO: 201430
augcuuaaugugauccaga

SEQ ID NO: 201432 - RNA, 19 nt, Artificial Sequence
  Description of Artificial Sequence: Synthetic oligonucleotide
  Sense strand starting at position 1055 of SEQ ID NO: 2596
ugcugaauauaauuagcga

SEQ ID NO: 201433 - RNA, 19 nt, Artificial Sequence
  Description of Artificial Sequence: Synthetic oligonucleotide
  Antisense strand to SEQ ID NO: 201432
ucgcuaauuauauucagca

SEQ ID NO: 201434 - RNA, 19 nt, Artificial Sequence
  Description of Artificial Sequence: Synthetic oligonucleotide
  Sense strand starting at position 1084 of SEQ ID NO: 2596
ugaagaaaguuaucuucuu

SEQ ID NO: 201435 - RNA, 19 nt, Artificial Sequence
  Description of Artificial Sequence: Synthetic oligonucleotide
  Antisense strand to SEQ ID NO: 201434
aagaagauaacuuucuuca

SEQ ID NO: 201436 - RNA, 19 nt, Artificial Sequence
  Description of Artificial Sequence: Synthetic oligonucleotide
  Sense strand starting at position 1091 of SEQ ID NO: 2596
aguuaucuucuuugauacu

SEQ ID NO: 201437 - RNA, 19 nt, Artificial Sequence
  Description of Artificial Sequence: Synthetic oligonucleotide
  Antisense strand to SEQ ID NO: 201436
aguaucaaagaagauaacu

SEQ ID NO: 201438 - RNA, 19 nt, Artificial Sequence
  Description of Artificial Sequence: Synthetic oligonucleotide
  Sense strand starting at position 1145 of SEQ ID NO: 2596
agaauaugggacuguccuu

SEQ ID NO: 201439 - RNA, 19 nt, Artificial Sequence
  Description of Artificial Sequence: Synthetic oligonucleotide
  Antisense strand to SEQ ID NO: 201438
aaggacagucccauauucu

SEQ ID NO: 201440 - RNA, 19 nt, Artificial Sequence
  Description of Artificial Sequence: Synthetic oligonucleotide
  Sense strand starting at position 1202 of SEQ ID NO: 2596
gcgaccagucuuuaacaga

SEQ ID NO: 201441 - RNA, 19 nt, Artificial Sequence
  Description of Artificial Sequence: Synthetic oligonucleotide
  Antisense strand to SEQ ID NO: 201440
ucuguuaaagacuggucgc

SEQ ID NO: 201442 - RNA, 19 nt, Artificial Sequence
  Description of Artificial Sequence: Synthetic oligonucleotide
  Sense strand starting at position 1237 of SEQ ID NO: 2596
agcuuuagggaaugguaau

SEQ ID NO: 201443 - RNA, 19 nt, Artificial Sequence
  Description of Artificial Sequence: Synthetic oligonucleotide
  Antisense strand to SEQ ID NO: 201442
auuaccauucccuaaagcu

SEQ ID NO: 201444 - RNA, 19 nt, Artificial Sequence
  Description of Artificial Sequence: Synthetic oligonucleotide
  Sense strand starting at position 1238 of SEQ ID NO: 2596
gcuuuagggaaugguaauu

SEQ ID NO: 201445 - RNA, 19 nt, Artificial Sequence
  Description of Artificial Sequence: Synthetic oligonucleotide
  Antisense strand to SEQ ID NO: 201444
aauuaccauucccuaaagc

SEQ ID NO: 201446 - RNA, 19 nt, Artificial Sequence
  Description of Artificial Sequence: Synthetic oligonucleotide
  Sense strand starting at position 1272 of SEQ ID NO: 2596
cucuauguccauuauauug

SEQ ID NO: 201447 - RNA, 19 nt, Artificial Sequence
  Description of Artificial Sequence: Synthetic oligonucleotide
  Antisense strand to SEQ ID NO: 201446
caauauaauggacauagag

SEQ ID NO: 201448 - RNA, 19 nt, Artificial Sequence
  Description of Artificial Sequence: Synthetic oligonucleotide
  Sense strand starting at position 1408 of SEQ ID NO: 2596
ggcgcuaaaccucacauaa

SEQ ID NO: 201449 - RNA, 19 nt, Artificial Sequence
  Description of Artificial Sequence: Synthetic oligonucleotide
  Antisense strand to SEQ ID NO: 201448
uuaugugagguuuagcgcc

SEQ ID NO: 201450 - RNA, 19 nt, Artificial Sequence
  Description of Artificial Sequence: Synthetic oligonucleotide
  Sense strand starting at position 1984 of SEQ ID NO: 2596
ccacuucuacaccgaaaug

SEQ ID NO: 201451 - RNA, 19 nt, Artificial Sequence
  Description of Artificial Sequence: Synthetic oligonucleotide
  Antisense strand to SEQ ID NO: 201450
cauuucgguguagaagugg

SEQ ID NO: 201452 - RNA, 19 nt, Artificial Sequence
  Description of Artificial Sequence: Synthetic oligonucleotide
  Sense strand starting at position 2612 of SEQ ID NO: 2596
ccaagaccuucucugcaga

SEQ ID NO: 201453 - RNA, 19 nt, Artificial Sequence
  Description of Artificial Sequence: Synthetic oligonucleotide
  Antisense strand to SEQ ID NO: 201452
ucugcagagaaggucuugg

SEQ ID NO: 201454 - RNA, 19 nt, Artificial Sequence
  Description of Artificial Sequence: Synthetic oligonucleotide
  Sense strand starting at position 2681 of SEQ ID NO: 2596
guucguucucacguuaugu

SEQ ID NO: 201455 - RNA, 19 nt, Artificial Sequence
  Description of Artificial Sequence: Synthetic oligonucleotide
  Antisense strand to SEQ ID NO: 201454
acauaacgugagaacgaac

SEQ ID NO: 201456 - RNA, 19 nt, Artificial Sequence
  Description of Artificial Sequence: Synthetic oligonucleotide
  Sense strand starting at position 2712 of SEQ ID NO: 2596
cuugcugagcauuagggau

SEQ ID NO: 201457 - RNA, 19 nt, Artificial Sequence
  Description of Artificial Sequence: Synthetic oligonucleotide
  Antisense strand to SEQ ID NO: 201456
aucccuaaugcucagcaag

SEQ ID NO: 201458 - RNA, 19 nt, Artificial Sequence
  Description of Artificial Sequence: Synthetic oligonucleotide
  Sense strand starting at position 2720 of SEQ ID NO: 2596
gcauuagggauccagcaau

SEQ ID NO: 201459 - RNA, 19 nt, Artificial Sequence
  Description of Artificial Sequence: Synthetic oligonucleotide
  Antisense strand to SEQ ID NO: 201458
auugcuggaucccuaaugc

SEQ ID NO: 201460 - RNA, 19 nt, Artificial Sequence
  Description of Artificial Sequence: Synthetic oligonucleotide
  Sense strand starting at position 2800 of SEQ ID NO: 2596
ugcagaagcagcuuucgua

SEQ ID NO: 201461 - RNA, 19 nt, Artificial Sequence
  Description of Artificial Sequence: Synthetic oligonucleotide
  Antisense strand to SEQ ID NO: 201460
uacgaaagcugcuucugca

SEQ ID NO: 201462 - RNA, 19 nt, Artificial Sequence
  Description of Artificial Sequence: Synthetic oligonucleotide
  Sense strand starting at position 2942 of SEQ ID NO: 2596
ucgaguucccucucucgua

SEQ ID NO: 201463 - RNA, 19 nt, Artificial Sequence
  Description of Artificial Sequence: Synthetic oligonucleotide
  Antisense strand to SEQ ID NO: 201462
uacgagagagggaacucga

SEQ ID NO: 201464 - RNA, 19 nt, Artificial Sequence
  Description of Artificial Sequence: Synthetic oligonucleotide
  Sense strand starting at position 2958 of SEQ ID NO: 2596
guauucguucucccucagu

SEQ ID NO: 201465 - RNA, 19 nt, Artificial Sequence
  Description of Artificial Sequence: Synthetic oligonucleotide
  Antisense strand to SEQ ID NO: 201464
acugagggagaacgaauac

SEQ ID NO: 201466 - RNA, 19 nt, Artificial Sequence
  Description of Artificial Sequence: Synthetic oligonucleotide
  Sense strand starting at position 3037 of SEQ ID NO: 2596
uuguuucugagagggcuau

SEQ ID NO: 201467 - RNA, 19 nt, Artificial Sequence
  Description of Artificial Sequence: Synthetic oligonucleotide
  Antisense strand to SEQ ID NO: 201466
auagcccucucagaaacaa

SEQ ID NO: 201468 - RNA, 19 nt, Artificial Sequence
  Description of Artificial Sequence: Synthetic oligonucleotide
  Sense strand starting at position 3048 of SEQ ID NO: 2596
agggcuauuuggccuguga

SEQ ID NO: 201469 - RNA, 19 nt, Artificial Sequence
  Description of Artificial Sequence: Synthetic oligonucleotide
  Antisense strand to SEQ ID NO: 201468
ucacaggccaaauagcccu

SEQ ID NO: 201470 - RNA, 19 nt, Artificial Sequence
  Description of Artificial Sequence: Synthetic oligonucleotide
  Sense strand starting at position 3050 of SEQ ID NO: 2596
ggcuauuuggccugugaga

SEQ ID NO: 201471 - RNA, 19 nt, Artificial Sequence
  Description of Artificial Sequence: Synthetic oligonucleotide
  Antisense strand to SEQ ID NO: 201470
ucucacaggccaaauagcc

SEQ ID NO: 201472 - RNA, 19 nt, Artificial Sequence
  Description of Artificial Sequence: Synthetic oligonucleotide
  Sense strand starting at position 3114 of SEQ ID NO: 2596
uuacgacuguuauuugagu

SEQ ID NO: 201473 - RNA, 19 nt, Artificial Sequence
  Description of Artificial Sequence: Synthetic oligonucleotide
  Antisense strand to SEQ ID NO: 201472
acucaaauaacagucguaa

SEQ ID NO: 201474 - RNA, 19 nt, Artificial Sequence
  Description of Artificial Sequence: Synthetic oligonucleotide
  Sense strand starting at position 3163 of SEQ ID NO: 2596
uccuguagugaagaacauu

SEQ ID NO: 201475 - RNA, 19 nt, Artificial Sequence
  Description of Artificial Sequence: Synthetic oligonucleotide
  Antisense strand to SEQ ID NO: 201474
aauguucuucacuacagga

SEQ ID NO: 201476 - RNA, 19 nt, Artificial Sequence
  Description of Artificial Sequence: Synthetic oligonucleotide
  Sense strand starting at position 3182 of SEQ ID NO: 2596
uguaaccucgcggaaauga

SEQ ID NO: 201477 - RNA, 19 nt, Artificial Sequence
  Description of Artificial Sequence: Synthetic oligonucleotide
  Antisense strand to SEQ ID NO: 201476
ucauuuccgcgagguuaca

SEQ ID NO: 201478 - RNA, 19 nt, Artificial Sequence
  Description of Artificial Sequence: Synthetic oligonucleotide
  Sense strand starting at position 3253 of SEQ ID NO: 2596
ccuacugcaggcuaauaaa

SEQ ID NO: 201479 - RNA, 19 nt, Artificial Sequence
  Description of Artificial Sequence: Synthetic oligonucleotide
  Antisense strand to SEQ ID NO: 201478
uuuauuagccugcaguagg

SEQ ID NO: 201480 - RNA, 19 nt, Artificial Sequence
  Description of Artificial Sequence: Synthetic oligonucleotide
  Sense strand starting at position 3282 of SEQ ID NO: 2596
uuaugacacuuaccaugua

SEQ ID NO: 201481 - RNA, 19 nt, Artificial Sequence
  Description of Artificial Sequence: Synthetic oligonucleotide
  Antisense strand to SEQ ID NO: 201480
uacaugguaagugucauaa

SEQ ID NO: 201482 - RNA, 19 nt, Artificial Sequence
  Description of Artificial Sequence: Synthetic oligonucleotide
  Sense strand starting at position 3285 of SEQ ID NO: 2596
ugacacuuaccauguagua

SEQ ID NO: 201483 - RNA, 19 nt, Artificial Sequence
  Description of Artificial Sequence: Synthetic oligonucleotide
  Antisense strand to SEQ ID NO: 201482
uacuacaugguaaguguca

SEQ ID NO: 201484 - RNA, 19 nt, Artificial Sequence
  Description of Artificial Sequence: Synthetic oligonucleotide
  Sense strand starting at position 3465 of SEQ ID NO: 2596
ugucaaguuaauggauguu

SEQ ID NO: 201485 - RNA, 19 nt, Artificial Sequence
  Description of Artificial Sequence: Synthetic oligonucleotide
  Antisense strand to SEQ ID NO: 201484
aacauccauuaacuugaca

SEQ ID NO: 201486 - RNA, 19 nt, Artificial Sequence
  Description of Artificial Sequence: Synthetic oligonucleotide
  Sense strand starting at position 3479 of SEQ ID NO: 2596
auguuauuaccacauagcu

SEQ ID NO: 201487 - RNA, 19 nt, Artificial Sequence
  Description of Artificial Sequence: Synthetic oligonucleotide
  Antisense strand to SEQ ID NO: 201486
agcuaugugguaauaacau

SEQ ID NO: 201488 - RNA, 19 nt, Artificial Sequence
  Description of Artificial Sequence: Synthetic oligonucleotide
  Sense strand starting at position 3828 of SEQ ID NO: 2596
gugugaaccaaauguucug

SEQ ID NO: 201489 - RNA, 19 nt, Artificial Sequence
  Description of Artificial Sequence: Synthetic oligonucleotide
  Antisense strand to SEQ ID NO: 201488
cagaacauuugguucacac

SEQ ID NO: 201490 - RNA, 19 nt, Artificial Sequence
  Description of Artificial Sequence: Synthetic oligonucleotide
  Sense strand starting at position 3831 of SEQ ID NO: 2596
ugaaccaaauguucugaau

SEQ ID NO: 201491 - RNA, 19 nt, Artificial Sequence
  Description of Artificial Sequence: Synthetic oligonucleotide
  Antisense strand to SEQ ID NO: 201490
auucagaacauuugguuca

SEQ ID NO: 201492 - RNA, 19 nt, Artificial Sequence
  Description of Artificial Sequence: Synthetic oligonucleotide
  Sense strand starting at position 3875 of SEQ ID NO: 2596
acgucaaauuucucuuugu

SEQ ID NO: 201493 - RNA, 19 nt, Artificial Sequence
  Description of Artificial Sequence: Synthetic oligonucleotide
  Antisense strand to SEQ ID NO: 201492
acaaagagaaauuugacgu

SEQ ID NO: 201494 - RNA, 19 nt, Artificial Sequence
  Description of Artificial Sequence: Synthetic oligonucleotide
  Sense strand starting at position 3876 of SEQ ID NO: 2596
cgucaaauuucucuuugua

SEQ ID NO: 201495 - RNA, 19 nt, Artificial Sequence
  Description of Artificial Sequence: Synthetic oligonucleotide
  Antisense strand to SEQ ID NO: 201494
uacaaagagaaauuugacg

SEQ ID NO: 201496 - RNA, 19 nt, Artificial Sequence
  Description of Artificial Sequence: Synthetic oligonucleotide
  Sense strand starting at position 71 of SEQ ID NO: 2597
agggccucugccuagaaau

SEQ ID NO: 201497 - RNA, 19 nt, Artificial Sequence
  Description of Artificial Sequence: Synthetic oligonucleotide
  Antisense strand to SEQ ID NO: 201496
auuucuaggcagaggcccu

SEQ ID NO: 201498 - RNA, 19 nt, Artificial Sequence
  Description of Artificial Sequence: Synthetic oligonucleotide
  Sense strand starting at position 145 of SEQ ID NO: 2597
acagaagucuccucugacu

SEQ ID NO: 201499 - RNA, 19 nt, Artificial Sequence
  Description of Artificial Sequence: Synthetic oligonucleotide
  Antisense strand to SEQ ID NO: 201498
agucagaggagacuucugu

SEQ ID NO: 201500 - RNA, 19 nt, Artificial Sequence
  Description of Artificial Sequence: Synthetic oligonucleotide
  Sense strand starting at position 147 of SEQ ID NO: 2597
agaagucuccucugacuua

SEQ ID NO: 201501 - RNA, 19 nt, Artificial Sequence
  Description of Artificial Sequence: Synthetic oligonucleotide
  Antisense strand to SEQ ID NO: 201500
uaagucagaggagacuucu

SEQ ID NO: 201502 - RNA, 19 nt, Artificial Sequence
  Description of Artificial Sequence: Synthetic oligonucleotide
  Sense strand starting at position 395 of SEQ ID NO: 2597
aagacuagugcuuagcaca

SEQ ID NO: 201503 - RNA, 19 nt, Artificial Sequence
  Description of Artificial Sequence: Synthetic oligonucleotide
  Antisense strand to SEQ ID NO: 201502
ugugcuaagcacuagucuu

SEQ ID NO: 201504 - RNA, 19 nt, Artificial Sequence
  Description of Artificial Sequence: Synthetic oligonucleotide
  Sense strand starting at position 400 of SEQ ID NO: 2597
uagugcuuagcacagaaua

SEQ ID NO: 201505 - RNA, 19 nt, Artificial Sequence
  Description of Artificial Sequence: Synthetic oligonucleotide
  Antisense strand to SEQ ID NO: 201504
uauucugugcuaagcacua

SEQ ID NO: 201506 - RNA, 19 nt, Artificial Sequence
  Description of Artificial Sequence: Synthetic oligonucleotide
  Sense strand starting at position 464 of SEQ ID NO: 2597
gcaauuauuuguuuguaca

SEQ ID NO: 201507 - RNA, 19 nt, Artificial Sequence
  Description of Artificial Sequence: Synthetic oligonucleotide
  Antisense strand to SEQ ID NO: 201506
uguacaaacaaauaauugc

SEQ ID NO: 201508 - RNA, 19 nt, Artificial Sequence
  Description of Artificial Sequence: Synthetic oligonucleotide
  Sense strand starting at position 494 of SEQ ID NO: 2597
uagacugugugaccaaaga

SEQ ID NO: 201509 - RNA, 19 nt, Artificial Sequence
  Description of Artificial Sequence: Synthetic oligonucleotide
  Antisense strand to SEQ ID NO: 201508
ucuuuggucacacagucua

SEQ ID NO: 201510 - RNA, 19 nt, Artificial Sequence
  Description of Artificial Sequence: Synthetic oligonucleotide
  Sense strand starting at position 865 of SEQ ID NO: 2597
ucuggaucacauuaagcau

SEQ ID NO: 201511 - RNA, 19 nt, Artificial Sequence
  Description of Artificial Sequence: Synthetic oligonucleotide
  Antisense strand to SEQ ID NO: 201510
augcuuaaugugauccaga

SEQ ID NO: 201512 - RNA, 19 nt, Artificial Sequence
  Description of Artificial Sequence: Synthetic oligonucleotide
  Sense strand starting at position 923 of SEQ ID NO: 2597
ugaagaaaguuaucuucuu

SEQ ID NO: 201513 - RNA, 19 nt, Artificial Sequence
  Description of Artificial Sequence: Synthetic oligonucleotide
  Antisense strand to SEQ ID NO: 201512
aagaagauaacuuucuuca

SEQ ID NO: 201514 - RNA, 19 nt, Artificial Sequence
  Description of Artificial Sequence: Synthetic oligonucleotide
  Sense strand starting at position 984 of SEQ ID NO: 2597
agaauaugggacuguccuu

SEQ ID NO: 201515 - RNA, 19 nt, Artificial Sequence
  Description of Artificial Sequence: Synthetic oligonucleotide
  Antisense strand to SEQ ID NO: 201514
aaggacagucccauauucu

SEQ ID NO: 201516 - RNA, 19 nt, Artificial Sequence
  Description of Artificial Sequence: Synthetic oligonucleotide
  Sense strand starting at position 1041 of SEQ ID NO: 2597
gcgaccagucuuuaacaga

SEQ ID NO: 201517 - RNA, 19 nt, Artificial Sequence
  Description of Artificial Sequence: Synthetic oligonucleotide
  Antisense strand to SEQ ID NO: 201516
ucuguuaaagacuggucgc

SEQ ID NO: 201518 - RNA, 19 nt, Artificial Sequence
  Description of Artificial Sequence: Synthetic oligonucleotide
  Sense strand starting at position 1076 of SEQ ID NO: 2597
agcuuuagggaaugguaau

SEQ ID NO: 201519 - RNA, 19 nt, Artificial Sequence
  Description of Artificial Sequence: Synthetic oligonucleotide
  Antisense strand to SEQ ID NO: 201518
auuaccauucccuaaagcu

SEQ ID NO: 201520 - RNA, 19 nt, Artificial Sequence
  Description of Artificial Sequence: Synthetic oligonucleotide
  Sense strand starting at position 1077 of SEQ ID NO: 2597
gcuuuagggaaugguaauu

SEQ ID NO: 201521 - RNA, 19 nt, Artificial Sequence
  Description of Artificial Sequence: Synthetic oligonucleotide
  Antisense strand to SEQ ID NO: 201520
aauuaccauucccuaaagc

SEQ ID NO: 201522 - RNA, 19 nt, Artificial Sequence
  Description of Artificial Sequence: Synthetic oligonucleotide
  Sense strand starting at position 1111 of SEQ ID NO: 2597
cucuauguccauuauauug

SEQ ID NO: 201523 - RNA, 19 nt, Artificial Sequence
  Description of Artificial Sequence: Synthetic oligonucleotide
  Antisense strand to SEQ ID NO: 201522
caauauaauggacauagag

SEQ ID NO: 201524 - RNA, 19 nt, Artificial Sequence
  Description of Artificial Sequence: Synthetic oligonucleotide
  Sense strand starting at position 1247 of SEQ ID NO: 2597
ggcgcuaaaccucacauaa

SEQ ID NO: 201525 - RNA, 19 nt, Artificial Sequence
  Description of Artificial Sequence: Synthetic oligonucleotide
  Antisense strand to SEQ ID NO: 201524
uuaugugagguuuagcgcc

SEQ ID NO: 201526 - RNA, 19 nt, Artificial Sequence
  Description of Artificial Sequence: Synthetic oligonucleotide
  Sense strand starting at position 1823 of SEQ ID NO: 2597
ccacuucuacaccgaaaug

SEQ ID NO: 201527 - RNA, 19 nt, Artificial Sequence
  Description of Artificial Sequence: Synthetic oligonucleotide
  Antisense strand to SEQ ID NO: 201526
cauuucgguguagaagugg

SEQ ID NO: 201528 - RNA, 19 nt, Artificial Sequence
  Description of Artificial Sequence: Synthetic oligonucleotide
  Sense strand starting at position 2451 of SEQ ID NO: 2597
ccaagaccuucucugcaga

SEQ ID NO: 201529 - RNA, 19 nt, Artificial Sequence
  Description of Artificial Sequence: Synthetic oligonucleotide
  Antisense strand to SEQ ID NO: 201528
ucugcagagaaggucuugg

SEQ ID NO: 201530 - RNA, 19 nt, Artificial Sequence
  Description of Artificial Sequence: Synthetic oligonucleotide
  Sense strand starting at position 2520 of SEQ ID NO: 2597
guucguucucacguuaugu

SEQ ID NO: 201531 - RNA, 19 nt, Artificial Sequence
  Description of Artificial Sequence: Synthetic oligonucleotide
  Antisense strand to SEQ ID NO: 201530
acauaacgugagaacgaac

SEQ ID NO: 201532 - RNA, 19 nt, Artificial Sequence
  Description of Artificial Sequence: Synthetic oligonucleotide
  Sense strand starting at position 2551 of SEQ ID NO: 2597
cuugcugagcauuagggau

SEQ ID NO: 201533 - RNA, 19 nt, Artificial Sequence
  Description of Artificial Sequence: Synthetic oligonucleotide
  Antisense strand to SEQ ID NO: 201532
aucccuaaugcucagcaag

SEQ ID NO: 201534 - RNA, 19 nt, Artificial Sequence
  Description of Artificial Sequence: Synthetic oligonucleotide
  Sense strand starting at position 2559 of SEQ ID NO: 2597
gcauuagggauccagcaau

SEQ ID NO: 201535 - RNA, 19 nt, Artificial Sequence
  Description of Artificial Sequence: Synthetic oligonucleotide
  Antisense strand to SEQ ID NO: 201534
auugcuggaucccuaaugc

SEQ ID NO: 201536 - RNA, 19 nt, Artificial Sequence
  Description of Artificial Sequence: Synthetic oligonucleotide
  Sense strand starting at position 2639 of SEQ ID NO: 2597
ugcagaagcagcuuucgua

SEQ ID NO: 201537 - RNA, 19 nt, Artificial Sequence
  Description of Artificial Sequence: Synthetic oligonucleotide
  Antisense strand to SEQ ID NO: 201536
uacgaaagcugcuucugca

SEQ ID NO: 201538 - RNA, 19 nt, Artificial Sequence
  Description of Artificial Sequence: Synthetic oligonucleotide
  Sense strand starting at position 2781 of SEQ ID NO: 2597
ucgaguucccucucucgua

SEQ ID NO: 201539 - RNA, 19 nt, Artificial Sequence
  Description of Artificial Sequence: Synthetic oligonucleotide
  Antisense strand to SEQ ID NO: 201538
uacgagagagggaacucga

SEQ ID NO: 201540 - RNA, 19 nt, Artificial Sequence
  Description of Artificial Sequence: Synthetic oligonucleotide
  Sense strand starting at position 2797 of SEQ ID NO: 2597
guauucguucucccucagu

SEQ ID NO: 201541 - RNA, 19 nt, Artificial Sequence
  Description of Artificial Sequence: Synthetic oligonucleotide
  Antisense strand to SEQ ID NO: 201540
acugagggagaacgaauac

SEQ ID NO: 201542 - RNA, 19 nt, Artificial Sequence
  Description of Artificial Sequence: Synthetic oligonucleotide
  Sense strand starting at position 2887 of SEQ ID NO: 2597
agggcuauuuggccuguga

SEQ ID NO: 201543 - RNA, 19 nt, Artificial Sequence
  Description of Artificial Sequence: Synthetic oligonucleotide
  Antisense strand to SEQ ID NO: 201542
ucacaggccaaauagcccu

SEQ ID NO: 201544 - RNA, 19 nt, Artificial Sequence
  Description of Artificial Sequence: Synthetic oligonucleotide
  Sense strand starting at position 2889 of SEQ ID NO: 2597
ggcuauuuggccugugaga

SEQ ID NO: 201545 - RNA, 19 nt, Artificial Sequence
  Description of Artificial Sequence: Synthetic oligonucleotide
  Antisense strand to SEQ ID NO: 201544
ucucacaggccaaauagcc

SEQ ID NO: 201546 - RNA, 19 nt, Artificial Sequence
  Description of Artificial Sequence: Synthetic oligonucleotide
  Sense strand starting at position 2953 of SEQ ID NO: 2597
uuacgacuguuauuugagu

SEQ ID NO: 201547 - RNA, 19 nt, Artificial Sequence
  Description of Artificial Sequence: Synthetic oligonucleotide
  Antisense strand to SEQ ID NO: 201546
acucaaauaacagucguaa

SEQ ID NO: 201548 - RNA, 19 nt, Artificial Sequence
  Description of Artificial Sequence: Synthetic oligonucleotide
  Sense strand starting at position 3002 of SEQ ID NO: 2597
uccuguagugaagaacauu

SEQ ID NO: 201549 - RNA, 19 nt, Artificial Sequence
  Description of Artificial Sequence: Synthetic oligonucleotide
  Antisense strand to SEQ ID NO: 201548
aauguucuucacuacagga

SEQ ID NO: 201550 - RNA, 19 nt, Artificial Sequence
  Description of Artificial Sequence: Synthetic oligonucleotide
  Sense strand starting at position 3021 of SEQ ID NO: 2597
uguaaccucgcggaaauga

SEQ ID NO: 201551 - RNA, 19 nt, Artificial Sequence
  Description of Artificial Sequence: Synthetic oligonucleotide
  Antisense strand to SEQ ID NO: 201550
ucauuuccgcgagguuaca

SEQ ID NO: 201552 - RNA, 19 nt, Artificial Sequence
  Description of Artificial Sequence: Synthetic oligonucleotide
  Sense strand starting at position 3092 of SEQ ID NO: 2597
ccuacugcaggcuaauaaa

SEQ ID NO: 201553 - RNA, 19 nt, Artificial Sequence
  Description of Artificial Sequence: Synthetic oligonucleotide
  Antisense strand to SEQ ID NO: 201552
uuuauuagccugcaguagg

SEQ ID NO: 201554 - RNA, 19 nt, Artificial Sequence
  Description of Artificial Sequence: Synthetic oligonucleotide
  Sense strand starting at position 3121 of SEQ ID NO: 2597
uuaugacacuuaccaugua

SEQ ID NO: 201555 - RNA, 19 nt, Artificial Sequence
  Description of Artificial Sequence: Synthetic oligonucleotide
  Antisense strand to SEQ ID NO: 201554
uacaugguaagugucauaa

SEQ ID NO: 201556 - RNA, 19 nt, Artificial Sequence
  Description of Artificial Sequence: Synthetic oligonucleotide
  Sense strand starting at position 3124 of SEQ ID NO: 2597
ugacacuuaccauguagua

SEQ ID NO: 201557 - RNA, 19 nt, Artificial Sequence
  Description of Artificial Sequence: Synthetic oligonucleotide
  Antisense strand to SEQ ID NO: 201556
uacuacaugguaaguguca

SEQ ID NO: 201558 - RNA, 19 nt, Artificial Sequence
  Description of Artificial Sequence: Synthetic oligonucleotide
  Sense strand starting at position 3318 of SEQ ID NO: 2597
auguuauuaccacauagcu

SEQ ID NO: 201559 - RNA, 19 nt, Artificial Sequence
  Description of Artificial Sequence: Synthetic oligonucleotide
  Antisense strand to SEQ ID NO: 201558
agcuaugugguaauaacau

SEQ ID NO: 201560 - RNA, 19 nt, Artificial Sequence
  Description of Artificial Sequence: Synthetic oligonucleotide
  Sense strand starting at position 3670 of SEQ ID NO: 2597
ugaaccaaauguucugaau

SEQ ID NO: 201561 - RNA, 19 nt, Artificial Sequence
  Description of Artificial Sequence: Synthetic oligonucleotide
  Antisense strand to SEQ ID NO: 201560
auucagaacauuugguuca

SEQ ID NO: 201562 - RNA, 19 nt, Artificial Sequence
  Description of Artificial Sequence: Synthetic oligonucleotide
  Sense strand starting at position 3714 of SEQ ID NO: 2597
acgucaaauuucucuuugu

SEQ ID NO: 201563 - RNA, 19 nt, Artificial Sequence
  Description of Artificial Sequence: Synthetic oligonucleotide
  Antisense strand to SEQ ID NO: 201562
acaaagagaaauuugacgu

SEQ ID NO: 201564 - RNA, 19 nt, Artificial Sequence
  Description of Artificial Sequence: Synthetic oligonucleotide
  Sense strand starting at position 3715 of SEQ ID NO: 2597
cgucaaauuucucuuugua

SEQ ID NO: 201565 - RNA, 19 nt, Artificial Sequence
  Description of Artificial Sequence: Synthetic oligonucleotide
  Antisense strand to SEQ ID NO: 201564
uacaaagagaaauuugacg

SEQ ID NO: 201566 - RNA, 19 nt, Artificial Sequence
  Description of Artificial Sequence: Synthetic oligonucleotide
  Sense strand starting at position 3833 of SEQ ID NO: 2597
uguuguuguauccaaagag

SEQ ID NO: 201567 - RNA, 19 nt, Artificial Sequence
  Description of Artificial Sequence: Synthetic oligonucleotide
  Antisense strand to SEQ ID NO: 201566
cucuuuggauacaacaaca

SEQ ID NO: 201568 - RNA, 19 nt, Artificial Sequence
  Description of Artificial Sequence: Synthetic oligonucleotide
  Sense strand starting at position 3851 of SEQ ID NO: 2597
gcacacuuggagugaauau

SEQ ID NO: 201569 - RNA, 19 nt, Artificial Sequence
  Description of Artificial Sequence: Synthetic oligonucleotide
  Antisense strand to SEQ ID NO: 201568
auauucacuccaagugugc

SEQ ID NO: 201570 - RNA, 19 nt, Artificial Sequence
  Description of Artificial Sequence: Synthetic oligonucleotide
  Sense strand starting at position 3862 of SEQ ID NO: 2597
gugaauauggcagauguuu

SEQ ID NO: 201571 - RNA, 19 nt, Artificial Sequence
  Description of Artificial Sequence: Synthetic oligonucleotide
  Antisense strand to SEQ ID NO: 201570
aaacaucugccauauucac

SEQ ID NO: 201572 - RNA, 19 nt, Artificial Sequence
  Description of Artificial Sequence: Synthetic oligonucleotide
  Sense strand starting at position 3867 of SEQ ID NO: 2597
uauggcagauguuugaaga

SEQ ID NO: 201573 - RNA, 19 nt, Artificial Sequence
  Description of Artificial Sequence: Synthetic oligonucleotide
  Antisense strand to SEQ ID NO: 201572
ucuucaaacaucugccaua

SEQ ID NO: 201574 - RNA, 19 nt, Artificial Sequence
  Description of Artificial Sequence: Synthetic oligonucleotide
  Sense strand starting at position 3971 of SEQ ID NO: 2597
cuauaagcgagcgacuaaa

SEQ ID NO: 201575 - RNA, 19 nt, Artificial Sequence
  Description of Artificial Sequence: Synthetic oligonucleotide
  Antisense strand to SEQ ID NO: 201574
uuuagucgcucgcuuauag

SEQ ID NO: 201576 - RNA, 19 nt, Artificial Sequence
  Description of Artificial Sequence: Synthetic oligonucleotide
  Sense strand starting at position 9 of SEQ ID NO: 2598
gcaugugaguguagugaca

SEQ ID NO: 201577 - RNA, 19 nt, Artificial Sequence
  Description of Artificial Sequence: Synthetic oligonucleotide
  Antisense strand to SEQ ID NO: 201576
ugucacuacacucacaugc

SEQ ID NO: 201578 - RNA, 19 nt, Artificial Sequence
  Description of Artificial Sequence: Synthetic oligonucleotide
  Sense strand starting at position 127 of SEQ ID NO: 2598
agcagugagggugaguuau

SEQ ID NO: 201579 - RNA, 19 nt, Artificial Sequence
  Description of Artificial Sequence: Synthetic oligonucleotide
  Antisense strand to SEQ ID NO: 201578
auaacucacccucacugcu

SEQ ID NO: 201580 - RNA, 19 nt, Artificial Sequence
  Description of Artificial Sequence: Synthetic oligonucleotide
  Sense strand starting at position 133 of SEQ ID NO: 2598
gagggugaguuaugcacau

SEQ ID NO: 201581 - RNA, 19 nt, Artificial Sequence
  Description of Artificial Sequence: Synthetic oligonucleotide
  Antisense strand to SEQ ID NO: 201580
augugcauaacucacccuc

SEQ ID NO: 201582 - RNA, 19 nt, Artificial Sequence
  Description of Artificial Sequence: Synthetic oligonucleotide
  Sense strand starting at position 135 of SEQ ID NO: 2598
gggugaguuaugcacauaa

SEQ ID NO: 201583 - RNA, 19 nt, Artificial Sequence
  Description of Artificial Sequence: Synthetic oligonucleotide
  Antisense strand to SEQ ID NO: 201582
uuaugugcauaacucaccc

SEQ ID NO: 201584 - RNA, 19 nt, Artificial Sequence
  Description of Artificial Sequence: Synthetic oligonucleotide
  Sense strand starting at position 137 of SEQ ID NO: 2598
gugaguuaugcacauaaga

SEQ ID NO: 201585 - RNA, 19 nt, Artificial Sequence
  Description of Artificial Sequence: Synthetic oligonucleotide
  Antisense strand to SEQ ID NO: 201584
ucuuaugugcauaacucac

SEQ ID NO: 201586 - RNA, 19 nt, Artificial Sequence
  Description of Artificial Sequence: Synthetic oligonucleotide
  Sense strand starting at position 160 of SEQ ID NO: 2598
accagugauucccagugua

SEQ ID NO: 201587 - RNA, 19 nt, Artificial Sequence
  Description of Artificial Sequence: Synthetic oligonucleotide
  Antisense strand to SEQ ID NO: 201586
uacacugggaaucacuggu

SEQ ID NO: 201588 - RNA, 19 nt, Artificial Sequence
  Description of Artificial Sequence: Synthetic oligonucleotide
  Sense strand starting at position 163 of SEQ ID NO: 2598
agugauucccaguguaaga

SEQ ID NO: 201589 - RNA, 19 nt, Artificial Sequence
  Description of Artificial Sequence: Synthetic oligonucleotide
  Antisense strand to SEQ ID NO: 201588
ucuuacacugggaaucacu

SEQ ID NO: 201590 - RNA, 19 nt, Artificial Sequence
  Description of Artificial Sequence: Synthetic oligonucleotide
  Sense strand starting at position 331 of SEQ ID NO: 2598
cacccaguguccugaagac

SEQ ID NO: 201591 - RNA, 19 nt, Artificial Sequence
  Description of Artificial Sequence: Synthetic oligonucleotide
  Antisense strand to SEQ ID NO: 201590
gucuucaggacacugggug

SEQ ID NO: 201592 - RNA, 19 nt, Artificial Sequence
  Description of Artificial Sequence: Synthetic oligonucleotide
  Sense strand starting at position 445 of SEQ ID NO: 2598
cuucguuuggugggaagaa

SEQ ID NO: 201593 - RNA, 19 nt, Artificial Sequence
  Description of Artificial Sequence: Synthetic oligonucleotide
  Antisense strand to SEQ ID NO: 201592
uucuucccaccaaacgaag

SEQ ID NO: 201594 - RNA, 19 nt, Artificial Sequence
  Description of Artificial Sequence: Synthetic oligonucleotide
  Sense strand starting at position 446 of SEQ ID NO: 2598
uucguuuggugggaagaau

SEQ ID NO: 201595 - RNA, 19 nt, Artificial Sequence
  Description of Artificial Sequence: Synthetic oligonucleotide
  Antisense strand to SEQ ID NO: 201594
auucuucccaccaaacgaa

SEQ ID NO: 201596 - RNA, 19 nt, Artificial Sequence
  Description of Artificial Sequence: Synthetic oligonucleotide
  Sense strand starting at position 457 of SEQ ID NO: 2598
ggaagaauccaguagccuc

SEQ ID NO: 201597 - RNA, 19 nt, Artificial Sequence
  Description of Artificial Sequence: Synthetic oligonucleotide
  Antisense strand to SEQ ID NO: 201596
gaggcuacuggauucuucc

SEQ ID NO: 201598 - RNA, 19 nt, Artificial Sequence
  Description of Artificial Sequence: Synthetic oligonucleotide
  Sense strand starting at position 465 of SEQ ID NO: 2598
ccaguagccucagaagaaa

SEQ ID NO: 201599 - RNA, 19 nt, Artificial Sequence
  Description of Artificial Sequence: Synthetic oligonucleotide
  Antisense strand to SEQ ID NO: 201598
uuucuucugaggcuacugg

SEQ ID NO: 201600 - RNA, 19 nt, Artificial Sequence
  Description of Artificial Sequence: Synthetic oligonucleotide
  Sense strand starting at position 2212 of SEQ ID NO: 2598
gagagccacuuguuugaau

SEQ ID NO: 201601 - RNA, 19 nt, Artificial Sequence
  Description of Artificial Sequence: Synthetic oligonucleotide
  Antisense strand to SEQ ID NO: 201600
auucaaacaaguggcucuc

SEQ ID NO: 201602 - RNA, 19 nt, Artificial Sequence
  Description of Artificial Sequence: Synthetic oligonucleotide
  Sense strand starting at position 2214 of SEQ ID NO: 2598
gagccacuuguuugaauga

SEQ ID NO: 201603 - RNA, 19 nt, Artificial Sequence
  Description of Artificial Sequence: Synthetic oligonucleotide
  Antisense strand to SEQ ID NO: 201602
ucauucaaacaaguggcuc

SEQ ID NO: 201604 - RNA, 19 nt, Artificial Sequence
  Description of Artificial Sequence: Synthetic oligonucleotide
  Sense strand starting at position 2309 of SEQ ID NO: 2598
ggagcuuugcuccagacuu

SEQ ID NO: 201605 - RNA, 19 nt, Artificial Sequence
  Description of Artificial Sequence: Synthetic oligonucleotide
  Antisense strand to SEQ ID NO: 201604
aagucuggagcaaagcucc

SEQ ID NO: 201606 - RNA, 19 nt, Artificial Sequence
  Description of Artificial Sequence: Synthetic oligonucleotide
  Sense strand starting at position 2409 of SEQ ID NO: 2598
ucauaugucugggacagac

SEQ ID NO: 201607 - RNA, 19 nt, Artificial Sequence
  Description of Artificial Sequence: Synthetic oligonucleotide
  Antisense strand to SEQ ID NO: 201606
gucugucccagacauauga

SEQ ID NO: 201608 - RNA, 19 nt, Artificial Sequence
  Description of Artificial Sequence: Synthetic oligonucleotide
  Sense strand starting at position 2642 of SEQ ID NO: 2598
agaugugcugggcgucaau

SEQ ID NO: 201609 - RNA, 19 nt, Artificial Sequence
  Description of Artificial Sequence: Synthetic oligonucleotide
  Antisense strand to SEQ ID NO: 201608
auugacgcccagcacaucu

SEQ ID NO: 201610 - RNA, 19 nt, Artificial Sequence
  Description of Artificial Sequence: Synthetic oligonucleotide
  Sense strand starting at position 2664 of SEQ ID NO: 2598
agcgaaugcucuccuaaag

SEQ ID NO: 201611 - RNA, 19 nt, Artificial Sequence
  Description of Artificial Sequence: Synthetic oligonucleotide
  Antisense strand to SEQ ID NO: 201610
cuuuaggagagcauucgcu

SEQ ID NO: 201612 - RNA, 19 nt, Artificial Sequence
  Description of Artificial Sequence: Synthetic oligonucleotide
  Sense strand starting at position 3050 of SEQ ID NO: 2598
aggaaucgaucugagggaa

SEQ ID NO: 201613 - RNA, 19 nt, Artificial Sequence
  Description of Artificial Sequence: Synthetic oligonucleotide
  Antisense strand to SEQ ID NO: 201612
uucccucagaucgauuccu

SEQ ID NO: 201614 - RNA, 19 nt, Artificial Sequence
  Description of Artificial Sequence: Synthetic oligonucleotide
  Sense strand starting at position 3381 of SEQ ID NO: 2598
cuccaaugagucuggguca

SEQ ID NO: 201615 - RNA, 19 nt, Artificial Sequence
  Description of Artificial Sequence: Synthetic oligonucleotide
  Antisense strand to SEQ ID NO: 201614
ugacccagacucauuggag

SEQ ID NO: 201616 - RNA, 19 nt, Artificial Sequence
  Description of Artificial Sequence: Synthetic oligonucleotide
  Sense strand starting at position 3443 of SEQ ID NO: 2598
gaugcaucuggcugggaca

SEQ ID NO: 201617 - RNA, 19 nt, Artificial Sequence
  Description of Artificial Sequence: Synthetic oligonucleotide
  Antisense strand to SEQ ID NO: 201616
ugucccagccagaugcauc

SEQ ID NO: 201618 - RNA, 19 nt, Artificial Sequence
  Description of Artificial Sequence: Synthetic oligonucleotide
  Sense strand starting at position 3445 of SEQ ID NO: 2598
ugcaucuggcugggacaua

SEQ ID NO: 201619 - RNA, 19 nt, Artificial Sequence
  Description of Artificial Sequence: Synthetic oligonucleotide
  Antisense strand to SEQ ID NO: 201618
uaugucccagccagaugca

SEQ ID NO: 201620 - RNA, 19 nt, Artificial Sequence
  Description of Artificial Sequence: Synthetic oligonucleotide
  Sense strand starting at position 3456 of SEQ ID NO: 2598
gggacauagugucccagaa

SEQ ID NO: 201621 - RNA, 19 nt, Artificial Sequence
  Description of Artificial Sequence: Synthetic oligonucleotide
  Antisense strand to SEQ ID NO: 201620
uucugggacacuauguccc

SEQ ID NO: 201622 - RNA, 19 nt, Artificial Sequence
  Description of Artificial Sequence: Synthetic oligonucleotide
  Sense strand starting at position 3482 of SEQ ID NO: 2598
ugggauuggcauuggacaa

SEQ ID NO: 201623 - RNA, 19 nt, Artificial Sequence
  Description of Artificial Sequence: Synthetic oligonucleotide
  Antisense strand to SEQ ID NO: 201622
uuguccaaugccaauccca

SEQ ID NO: 201624 - RNA, 19 nt, Artificial Sequence
  Description of Artificial Sequence: Synthetic oligonucleotide
  Sense strand starting at position 3483 of SEQ ID NO: 2598
gggauuggcauuggacaaa

SEQ ID NO: 201625 - RNA, 19 nt, Artificial Sequence
  Description of Artificial Sequence: Synthetic oligonucleotide
  Antisense strand to SEQ ID NO: 201624
uuuguccaaugccaauccc

SEQ ID NO: 201626 - RNA, 19 nt, Artificial Sequence
  Description of Artificial Sequence: Synthetic oligonucleotide
  Sense strand starting at position 3495 of SEQ ID NO: 2598
ggacaaagccgcugaguua

SEQ ID NO: 201627 - RNA, 19 nt, Artificial Sequence
  Description of Artificial Sequence: Synthetic oligonucleotide
  Antisense strand to SEQ ID NO: 201626
uaacucagcggcuuugucc

SEQ ID NO: 201628 - RNA, 19 nt, Artificial Sequence
  Description of Artificial Sequence: Synthetic oligonucleotide
  Sense strand starting at position 3506 of SEQ ID NO: 2598
cugaguuagcacugaaagu

SEQ ID NO: 201629 - RNA, 19 nt, Artificial Sequence
  Description of Artificial Sequence: Synthetic oligonucleotide
  Antisense strand to SEQ ID NO: 201628
acuuucagugcuaacucag

SEQ ID NO: 201630 - RNA, 19 nt, Artificial Sequence
  Description of Artificial Sequence: Synthetic oligonucleotide
  Sense strand starting at position 3507 of SEQ ID NO: 2598
ugaguuagcacugaaagug

SEQ ID NO: 201631 - RNA, 19 nt, Artificial Sequence
  Description of Artificial Sequence: Synthetic oligonucleotide
  Antisense strand to SEQ ID NO: 201630
cacuuucagugcuaacuca

SEQ ID NO: 201632 - RNA, 19 nt, Artificial Sequence
  Description of Artificial Sequence: Synthetic oligonucleotide
  Sense strand starting at position 3876 of SEQ ID NO: 2598
uggccuccaucaugagaca

SEQ ID NO: 201633 - RNA, 19 nt, Artificial Sequence
  Description of Artificial Sequence: Synthetic oligonucleotide
  Antisense strand to SEQ ID NO: 201632
ugucucaugauggaggcca

SEQ ID NO: 201634 - RNA, 19 nt, Artificial Sequence
  Description of Artificial Sequence: Synthetic oligonucleotide
  Sense strand starting at position 3904 of SEQ ID NO: 2598
cucuuuccuccugagggua

SEQ ID NO: 201635 - RNA, 19 nt, Artificial Sequence
  Description of Artificial Sequence: Synthetic oligonucleotide
  Antisense strand to SEQ ID NO: 201634
uacccucaggaggaaagag

SEQ ID NO: 201636 - RNA, 19 nt, Artificial Sequence
  Description of Artificial Sequence: Synthetic oligonucleotide
  Sense strand starting at position 3950 of SEQ ID NO: 2598
aaagaaaucgggugguaac

SEQ ID NO: 201637 - RNA, 19 nt, Artificial Sequence
  Description of Artificial Sequence: Synthetic oligonucleotide
  Antisense strand to SEQ ID NO: 201636
guuaccacccgauuucuuu

SEQ ID NO: 201638 - RNA, 19 nt, Artificial Sequence
  Description of Artificial Sequence: Synthetic oligonucleotide
  Sense strand starting at position 3951 of SEQ ID NO: 2598
aagaaaucgggugguaacu

SEQ ID NO: 201639 - RNA, 19 nt, Artificial Sequence
  Description of Artificial Sequence: Synthetic oligonucleotide
  Antisense strand to SEQ ID NO: 201638
aguuaccacccgauuucuu

SEQ ID NO: 201640 - RNA, 19 nt, Artificial Sequence
  Description of Artificial Sequence: Synthetic oligonucleotide
  Sense strand starting at position 359 of SEQ ID NO: 2599
auguuccaucuugguauuu

SEQ ID NO: 201641 - RNA, 19 nt, Artificial Sequence
  Description of Artificial Sequence: Synthetic oligonucleotide
  Antisense strand to SEQ ID NO: 201640
aaauaccaagauggaacau

SEQ ID NO: 201642 - RNA, 19 nt, Artificial Sequence
  Description of Artificial Sequence: Synthetic oligonucleotide
  Sense strand starting at position 668 of SEQ ID NO: 2599
uugugaacaugacugauua

SEQ ID NO: 201643 - RNA, 19 nt, Artificial Sequence
  Description of Artificial Sequence: Synthetic oligonucleotide
  Antisense strand to SEQ ID NO: 201642
uaaucagucauguucacaa

SEQ ID NO: 201644 - RNA, 19 nt, Artificial Sequence
  Description of Artificial Sequence: Synthetic oligonucleotide
  Sense strand starting at position 669 of SEQ ID NO: 2599
ugugaacaugacugauuac

SEQ ID NO: 201645 - RNA, 19 nt, Artificial Sequence
  Description of Artificial Sequence: Synthetic oligonucleotide
  Antisense strand to SEQ ID NO: 201644
guaaucagucauguucaca

SEQ ID NO: 201646 - RNA, 19 nt, Artificial Sequence
  Description of Artificial Sequence: Synthetic oligonucleotide
  Sense strand starting at position 772 of SEQ ID NO: 2599
ugcguaaguggcuugcuau

SEQ ID NO: 201647 - RNA, 19 nt, Artificial Sequence
  Description of Artificial Sequence: Synthetic oligonucleotide
  Antisense strand to SEQ ID NO: 201646
auagcaagccacuuacgca

SEQ ID NO: 201648 - RNA, 19 nt, Artificial Sequence
  Description of Artificial Sequence: Synthetic oligonucleotide
  Sense strand starting at position 883 of SEQ ID NO: 2599
uaguaaugagguugaauuc

SEQ ID NO: 201649 - RNA, 19 nt, Artificial Sequence
  Description of Artificial Sequence: Synthetic oligonucleotide
  Antisense strand to SEQ ID NO: 201648
gaauucaaccucauuacua

SEQ ID NO: 201650 - RNA, 19 nt, Artificial Sequence
  Description of Artificial Sequence: Synthetic oligonucleotide
  Sense strand starting at position 893 of SEQ ID NO: 2599
guugaauuccaaggccaaa

SEQ ID NO: 201651 - RNA, 19 nt, Artificial Sequence
  Description of Artificial Sequence: Synthetic oligonucleotide
  Antisense strand to SEQ ID NO: 201650
uuuggccuuggaauucaac

SEQ ID NO: 201652 - RNA, 19 nt, Artificial Sequence
  Description of Artificial Sequence: Synthetic oligonucleotide
  Sense strand starting at position 913 of SEQ ID NO: 2599
uuguaaacauucuuugaga

SEQ ID NO: 201653 - RNA, 19 nt, Artificial Sequence
  Description of Artificial Sequence: Synthetic oligonucleotide
  Antisense strand to SEQ ID NO: 201652
ucucaaagaauguuuacaa

SEQ ID NO: 201654 - RNA, 19 nt, Artificial Sequence
  Description of Artificial Sequence: Synthetic oligonucleotide
  Sense strand starting at position 914 of SEQ ID NO: 2599
uguaaacauucuuugagac

SEQ ID NO: 201655 - RNA, 19 nt, Artificial Sequence
  Description of Artificial Sequence: Synthetic oligonucleotide
  Antisense strand to SEQ ID NO: 201654
gucucaaagaauguuuaca

SEQ ID NO: 201656 - RNA, 19 nt, Artificial Sequence
  Description of Artificial Sequence: Synthetic oligonucleotide
  Sense strand starting at position 915 of SEQ ID NO: 2599
guaaacauucuuugagacu

SEQ ID NO: 201657 - RNA, 19 nt, Artificial Sequence
  Description of Artificial Sequence: Synthetic oligonucleotide
  Antisense strand to SEQ ID NO: 201656
agucucaaagaauguuuac

SEQ ID NO: 201658 - RNA, 19 nt, Artificial Sequence
  Description of Artificial Sequence: Synthetic oligonucleotide
  Sense strand starting at position 962 of SEQ ID NO: 2599
aggaaugacagguguacau

SEQ ID NO: 201659 - RNA, 19 nt, Artificial Sequence
  Description of Artificial Sequence: Synthetic oligonucleotide
  Antisense strand to SEQ ID NO: 201658
auguacaccugucauuccu

SEQ ID NO: 201660 - RNA, 19 nt, Artificial Sequence
  Description of Artificial Sequence: Synthetic oligonucleotide
  Sense strand starting at position 1025 of SEQ ID NO: 2599
agacuugcccaagauguca

SEQ ID NO: 201661 - RNA, 19 nt, Artificial Sequence
  Description of Artificial Sequence: Synthetic oligonucleotide
  Antisense strand to SEQ ID NO: 201660
ugacaucuugggcaagucu

SEQ ID NO: 201662 - RNA, 19 nt, Artificial Sequence
  Description of Artificial Sequence: Synthetic oligonucleotide
  Sense strand starting at position 1147 of SEQ ID NO: 2599
gcaguuaaggcuuauauua

SEQ ID NO: 201663 - RNA, 19 nt, Artificial Sequence
  Description of Artificial Sequence: Synthetic oligonucleotide
  Antisense strand to SEQ ID NO: 201662
uaauauaagccuuaacugc

SEQ ID NO: 201664 - RNA, 19 nt, Artificial Sequence
  Description of Artificial Sequence: Synthetic oligonucleotide
  Sense strand starting at position 1348 of SEQ ID NO: 2599
aguguucacggugauaaag

SEQ ID NO: 201665 - RNA, 19 nt, Artificial Sequence
  Description of Artificial Sequence: Synthetic oligonucleotide
  Antisense strand to SEQ ID NO: 201664
cuuuaucaccgugaacacu

SEQ ID NO: 201666 - RNA, 19 nt, Artificial Sequence
  Description of Artificial Sequence: Synthetic oligonucleotide
  Sense strand starting at position 2074 of SEQ ID NO: 2599
ugcuuagggagcgaguaaa

SEQ ID NO: 201667 - RNA, 19 nt, Artificial Sequence
  Description of Artificial Sequence: Synthetic oligonucleotide
  Antisense strand to SEQ ID NO: 201666
uuuacucgcucccuaagca

SEQ ID NO: 201668 - RNA, 19 nt, Artificial Sequence
  Description of Artificial Sequence: Synthetic oligonucleotide
  Sense strand starting at position 2226 of SEQ ID NO: 2599
agaauagucgugcaauaga

SEQ ID NO: 201669 - RNA, 19 nt, Artificial Sequence
  Description of Artificial Sequence: Synthetic oligonucleotide
  Antisense strand to SEQ ID NO: 201668
ucuauugcacgacuauucu

SEQ ID NO: 201670 - RNA, 19 nt, Artificial Sequence
  Description of Artificial Sequence: Synthetic oligonucleotide
  Sense strand starting at position 2229 of SEQ ID NO: 2599
auagucgugcaauagaaac

SEQ ID NO: 201671 - RNA, 19 nt, Artificial Sequence
  Description of Artificial Sequence: Synthetic oligonucleotide
  Antisense strand to SEQ ID NO: 201670
guuucuauugcacgacuau

SEQ ID NO: 201672 - RNA, 19 nt, Artificial Sequence
  Description of Artificial Sequence: Synthetic oligonucleotide
  Sense strand starting at position 2242 of SEQ ID NO: 2599
agaaacagcgcuuaauaug

SEQ ID NO: 201673 - RNA, 19 nt, Artificial Sequence
  Description of Artificial Sequence: Synthetic oligonucleotide
  Antisense strand to SEQ ID NO: 201672
cauauuaagcgcuguuucu

SEQ ID NO: 201674 - RNA, 19 nt, Artificial Sequence
  Description of Artificial Sequence: Synthetic oligonucleotide
  Sense strand starting at position 2329 of SEQ ID NO: 2599
uguacagacuugguaaagu

SEQ ID NO: 201675 - RNA, 19 nt, Artificial Sequence
  Description of Artificial Sequence: Synthetic oligonucleotide
  Antisense strand to SEQ ID NO: 201674
acuuuaccaagucuguaca

SEQ ID NO: 201676 - RNA, 19 nt, Artificial Sequence
  Description of Artificial Sequence: Synthetic oligonucleotide
  Sense strand starting at position 2433 of SEQ ID NO: 2599
cgugcaauauuugcaauau

SEQ ID NO: 201677 - RNA, 19 nt, Artificial Sequence
  Description of Artificial Sequence: Synthetic oligonucleotide
  Antisense strand to SEQ ID NO: 201676
auauugcaaauauugcacg

SEQ ID NO: 201678 - RNA, 19 nt, Artificial Sequence
  Description of Artificial Sequence: Synthetic oligonucleotide
  Sense strand starting at position 2584 of SEQ ID NO: 2599
aaagguuaacuuugguaga

SEQ ID NO: 201679 - RNA, 19 nt, Artificial Sequence
  Description of Artificial Sequence: Synthetic oligonucleotide
  Antisense strand to SEQ ID NO: 201678
ucuaccaaaguuaaccuuu

SEQ ID NO: 201680 - RNA, 19 nt, Artificial Sequence
  Description of Artificial Sequence: Synthetic oligonucleotide
  Sense strand starting at position 2586 of SEQ ID NO: 2599
agguuaacuuugguagaga

SEQ ID NO: 201681 - RNA, 19 nt, Artificial Sequence
  Description of Artificial Sequence: Synthetic oligonucleotide
  Antisense strand to SEQ ID NO: 201680
ucucuaccaaaguuaaccu

SEQ ID NO: 201682 - RNA, 19 nt, Artificial Sequence
  Description of Artificial Sequence: Synthetic oligonucleotide
  Sense strand starting at position 2608 of SEQ ID NO: 2599
ugguuugguagagaugcaa

SEQ ID NO: 201683 - RNA, 19 nt, Artificial Sequence
  Description of Artificial Sequence: Synthetic oligonucleotide
  Antisense strand to SEQ ID NO: 201682
uugcaucucuaccaaacca

SEQ ID NO: 201684 - RNA, 19 nt, Artificial Sequence
  Description of Artificial Sequence: Synthetic oligonucleotide
  Sense strand starting at position 2634 of SEQ ID NO: 2599
uuuguuguaccagauacca

SEQ ID NO: 201685 - RNA, 19 nt, Artificial Sequence
  Description of Artificial Sequence: Synthetic oligonucleotide
  Antisense strand to SEQ ID NO: 201684
ugguaucugguacaacaaa

SEQ ID NO: 201686 - RNA, 19 nt, Artificial Sequence
  Description of Artificial Sequence: Synthetic oligonucleotide
  Sense strand starting at position 2752 of SEQ ID NO: 2599
ucuaauauucuguauuggu

SEQ ID NO: 201687 - RNA, 19 nt, Artificial Sequence
  Description of Artificial Sequence: Synthetic oligonucleotide
  Antisense strand to SEQ ID NO: 201686
accaauacagaauauuaga

SEQ ID NO: 201688 - RNA, 19 nt, Artificial Sequence
  Description of Artificial Sequence: Synthetic oligonucleotide
  Sense strand starting at position 2887 of SEQ ID NO: 2599
uggaaaucuuaaguuucca

SEQ ID NO: 201689 - RNA, 19 nt, Artificial Sequence
  Description of Artificial Sequence: Synthetic oligonucleotide
  Antisense strand to SEQ ID NO: 201688
uggaaacuuaagauuucca

SEQ ID NO: 201690 - RNA, 19 nt, Artificial Sequence
  Description of Artificial Sequence: Synthetic oligonucleotide
  Sense strand starting at position 2919 of SEQ ID NO: 2599
cuggauuuaugugaugaau

SEQ ID NO: 201691 - RNA, 19 nt, Artificial Sequence
  Description of Artificial Sequence: Synthetic oligonucleotide
  Antisense strand to SEQ ID NO: 201690
auucaucacauaaauccag

SEQ ID NO: 201692 - RNA, 19 nt, Artificial Sequence
  Description of Artificial Sequence: Synthetic oligonucleotide
  Sense strand starting at position 2949 of SEQ ID NO: 2599
gcgaaagaaauguauacau

SEQ ID NO: 201693 - RNA, 19 nt, Artificial Sequence
  Description of Artificial Sequence: Synthetic oligonucleotide
  Antisense strand to SEQ ID NO: 201692
auguauacauuucuuucgc

SEQ ID NO: 201694 - RNA, 19 nt, Artificial Sequence
  Description of Artificial Sequence: Synthetic oligonucleotide
  Sense strand starting at position 3080 of SEQ ID NO: 2599
uuguacauuccugauaagu

SEQ ID NO: 201695 - RNA, 19 nt, Artificial Sequence
  Description of Artificial Sequence: Synthetic oligonucleotide
  Antisense strand to SEQ ID NO: 201694
acuuaucaggaauguacaa

SEQ ID NO: 201696 - RNA, 19 nt, Artificial Sequence
  Description of Artificial Sequence: Synthetic oligonucleotide
  Sense strand starting at position 3165 of SEQ ID NO: 2599
ggucuaaccauuugguggu

SEQ ID NO: 201697 - RNA, 19 nt, Artificial Sequence
  Description of Artificial Sequence: Synthetic oligonucleotide
  Antisense strand to SEQ ID NO: 201696
accaccaaaugguuagacc

SEQ ID NO: 201698 - RNA, 19 nt, Artificial Sequence
  Description of Artificial Sequence: Synthetic oligonucleotide
  Sense strand starting at position 3204 of SEQ ID NO: 2599
cuagucucauugguagaga

SEQ ID NO: 201699 - RNA, 19 nt, Artificial Sequence
  Description of Artificial Sequence: Synthetic oligonucleotide
  Antisense strand to SEQ ID NO: 201698
ucucuaccaaugagacuag

SEQ ID NO: 201700 - RNA, 19 nt, Artificial Sequence
  Description of Artificial Sequence: Synthetic oligonucleotide
  Sense strand starting at position 3207 of SEQ ID NO: 2599
gucucauugguagagaggu

SEQ ID NO: 201701 - RNA, 19 nt, Artificial Sequence
  Description of Artificial Sequence: Synthetic oligonucleotide
  Antisense strand to SEQ ID NO: 201700
accucucuaccaaugagac

SEQ ID NO: 201702 - RNA, 19 nt, Artificial Sequence
  Description of Artificial Sequence: Synthetic oligonucleotide
  Sense strand starting at position 3424 of SEQ ID NO: 2599
ugagaugugggcuaguaag

SEQ ID NO: 201703 - RNA, 19 nt, Artificial Sequence
  Description of Artificial Sequence: Synthetic oligonucleotide
  Antisense strand to SEQ ID NO: 201702
cuuacuagcccacaucuca

SEQ ID NO: 201704 - RNA, 19 nt, Artificial Sequence
  Description of Artificial Sequence: Synthetic oligonucleotide
  Sense strand starting at position 3478 of SEQ ID NO: 2599
agcagaagaacuggugaau

SEQ ID NO: 201705 - RNA, 19 nt, Artificial Sequence
  Description of Artificial Sequence: Synthetic oligonucleotide
  Antisense strand to SEQ ID NO: 201704
auucaccaguucuucugcu

SEQ ID NO: 201706 - RNA, 19 nt, Artificial Sequence
  Description of Artificial Sequence: Synthetic oligonucleotide
  Sense strand starting at position 3519 of SEQ ID NO: 2599
uugaccugagauugaaguu

SEQ ID NO: 201707 - RNA, 19 nt, Artificial Sequence
  Description of Artificial Sequence: Synthetic oligonucleotide
  Antisense strand to SEQ ID NO: 201706
aacuucaaucucaggucaa

SEQ ID NO: 201708 - RNA, 19 nt, Artificial Sequence
  Description of Artificial Sequence: Synthetic oligonucleotide
  Sense strand starting at position 3525 of SEQ ID NO: 2599
ugagauugaaguuguaaga

SEQ ID NO: 201709 - RNA, 19 nt, Artificial Sequence
  Description of Artificial Sequence: Synthetic oligonucleotide
  Antisense strand to SEQ ID NO: 201708
ucuuacaacuucaaucuca

SEQ ID NO: 201710 - RNA, 19 nt, Artificial Sequence
  Description of Artificial Sequence: Synthetic oligonucleotide
  Sense strand starting at position 3593 of SEQ ID NO: 2599
gcuuuaugucucccuuugu

SEQ ID NO: 201711 - RNA, 19 nt, Artificial Sequence
  Description of Artificial Sequence: Synthetic oligonucleotide
  Antisense strand to SEQ ID NO: 201710
acaaagggagacauaaagc

SEQ ID NO: 201712 - RNA, 19 nt, Artificial Sequence
  Description of Artificial Sequence: Synthetic oligonucleotide
  Sense strand starting at position 3626 of SEQ ID NO: 2599
ucccuacuucuggagugua

SEQ ID NO: 201713 - RNA, 19 nt, Artificial Sequence
  Description of Artificial Sequence: Synthetic oligonucleotide
  Antisense strand to SEQ ID NO: 201712
uacacuccagaaguaggga

SEQ ID NO: 201714 - RNA, 19 nt, Artificial Sequence
  Description of Artificial Sequence: Synthetic oligonucleotide
  Sense strand starting at position 3631 of SEQ ID NO: 2599
acuucuggaguguauuaau

SEQ ID NO: 201715 - RNA, 19 nt, Artificial Sequence
  Description of Artificial Sequence: Synthetic oligonucleotide
  Antisense strand to SEQ ID NO: 201714
auuaauacacuccagaagu

SEQ ID NO: 201716 - RNA, 19 nt, Artificial Sequence
  Description of Artificial Sequence: Synthetic oligonucleotide
  Sense strand starting at position 3682 of SEQ ID NO: 2599
cucuguucugacuaguuua

SEQ ID NO: 201717 - RNA, 19 nt, Artificial Sequence
  Description of Artificial Sequence: Synthetic oligonucleotide
  Antisense strand to SEQ ID NO: 201716
uaaacuagucagaacagag

SEQ ID NO: 201718 - RNA, 19 nt, Artificial Sequence
  Description of Artificial Sequence: Synthetic oligonucleotide
  Sense strand starting at position 3847 of SEQ ID NO: 2599
agagcuccaaagugaagua

SEQ ID NO: 201719 - RNA, 19 nt, Artificial Sequence
  Description of Artificial Sequence: Synthetic oligonucleotide
  Antisense strand to SEQ ID NO: 201718
uacuucacuuuggagcucu

SEQ ID NO: 201720 - RNA, 19 nt, Artificial Sequence
  Description of Artificial Sequence: Synthetic oligonucleotide
  Sense strand starting at position 40 of SEQ ID NO: 2600
gccauaccucagggaaucu

SEQ ID NO: 201721 - RNA, 19 nt, Artificial Sequence
  Description of Artificial Sequence: Synthetic oligonucleotide
  Antisense strand to SEQ ID NO: 201720
agauucccugagguauggc

SEQ ID NO: 201722 - RNA, 19 nt, Artificial Sequence
  Description of Artificial Sequence: Synthetic oligonucleotide
  Sense strand starting at position 125 of SEQ ID NO: 2600
gagucuuugucaucaacag

SEQ ID NO: 201723 - RNA, 19 nt, Artificial Sequence
  Description of Artificial Sequence: Synthetic oligonucleotide
  Antisense strand to SEQ ID NO: 201722
cuguugaugacaaagacuc

SEQ ID NO: 201724 - RNA, 19 nt, Artificial Sequence
  Description of Artificial Sequence: Synthetic oligonucleotide
  Sense strand starting at position 278 of SEQ ID NO: 2600
aagaguugauaagcagacu

SEQ ID NO: 201725 - RNA, 19 nt, Artificial Sequence
  Description of Artificial Sequence: Synthetic oligonucleotide
  Antisense strand to SEQ ID NO: 201724
agucugcuuaucaacucuu

SEQ ID NO: 201726 - RNA, 19 nt, Artificial Sequence
  Description of Artificial Sequence: Synthetic oligonucleotide
  Sense strand starting at position 347 of SEQ ID NO: 2600
gggucuucccaccaauauu

SEQ ID NO: 201727 - RNA, 19 nt, Artificial Sequence
  Description of Artificial Sequence: Synthetic oligonucleotide
  Antisense strand to SEQ ID NO: 201726
aauauuggugggaagaccc

SEQ ID NO: 201728 - RNA, 19 nt, Artificial Sequence
  Description of Artificial Sequence: Synthetic oligonucleotide
  Sense strand starting at position 357 of SEQ ID NO: 2600
accaauauuuaggagguua

SEQ ID NO: 201729 - RNA, 19 nt, Artificial Sequence
  Description of Artificial Sequence: Synthetic oligonucleotide
  Antisense strand to SEQ ID NO: 201728
uaaccuccuaaauauuggu

SEQ ID NO: 201730 - RNA, 19 nt, Artificial Sequence
  Description of Artificial Sequence: Synthetic oligonucleotide
  Sense strand starting at position 385 of SEQ ID NO: 2600
uggcuucucagugggauag

SEQ ID NO: 201731 - RNA, 19 nt, Artificial Sequence
  Description of Artificial Sequence: Synthetic oligonucleotide
  Antisense strand to SEQ ID NO: 201730
cuaucccacugagaagcca

SEQ ID NO: 201732 - RNA, 19 nt, Artificial Sequence
  Description of Artificial Sequence: Synthetic oligonucleotide
  Sense strand starting at position 439 of SEQ ID NO: 2600
cuaugagcuccaggucaaa

SEQ ID NO: 201733 - RNA, 19 nt, Artificial Sequence
  Description of Artificial Sequence: Synthetic oligonucleotide
  Antisense strand to SEQ ID NO: 201732
uuugaccuggagcucauag

SEQ ID NO: 201734 - RNA, 19 nt, Artificial Sequence
  Description of Artificial Sequence: Synthetic oligonucleotide
  Sense strand starting at position 1012 of SEQ ID NO: 2600
ggaaccuuagcuuggugau

SEQ ID NO: 201735 - RNA, 19 nt, Artificial Sequence
  Description of Artificial Sequence: Synthetic oligonucleotide
  Antisense strand to SEQ ID NO: 201734
aucaccaagcuaagguucc

SEQ ID NO: 201736 - RNA, 19 nt, Artificial Sequence
  Description of Artificial Sequence: Synthetic oligonucleotide
  Sense strand starting at position 1013 of SEQ ID NO: 2600
gaaccuuagcuuggugaua

SEQ ID NO: 201737 - RNA, 19 nt, Artificial Sequence
  Description of Artificial Sequence: Synthetic oligonucleotide
  Antisense strand to SEQ ID NO: 201736
uaucaccaagcuaagguuc

SEQ ID NO: 201738 - RNA, 19 nt, Artificial Sequence
  Description of Artificial Sequence: Synthetic oligonucleotide
  Sense strand starting at position 1014 of SEQ ID NO: 2600
aaccuuagcuuggugauau

SEQ ID NO: 201739 - RNA, 19 nt, Artificial Sequence
  Description of Artificial Sequence: Synthetic oligonucleotide
  Antisense strand to SEQ ID NO: 201738
auaucaccaagcuaagguu

SEQ ID NO: 201740 - RNA, 19 nt, Artificial Sequence
  Description of Artificial Sequence: Synthetic oligonucleotide
  Sense strand starting at position 1039 of SEQ ID NO: 2600
aaugguugaggucauugau

SEQ ID NO: 201741 - RNA, 19 nt, Artificial Sequence
  Description of Artificial Sequence: Synthetic oligonucleotide
  Antisense strand to SEQ ID NO: 201740
aucaaugaccucaaccauu

SEQ ID NO: 201742 - RNA, 19 nt, Artificial Sequence
  Description of Artificial Sequence: Synthetic oligonucleotide
  Sense strand starting at position 1042 of SEQ ID NO: 2600
gguugaggucauugaugac

SEQ ID NO: 201743 - RNA, 19 nt, Artificial Sequence
  Description of Artificial Sequence: Synthetic oligonucleotide
  Antisense strand to SEQ ID NO: 201742
gucaucaaugaccucaacc

SEQ ID NO: 201744 - RNA, 19 nt, Artificial Sequence
  Description of Artificial Sequence: Synthetic oligonucleotide
  Sense strand starting at position 1078 of SEQ ID NO: 2600
agagguuugggacgacauu

SEQ ID NO: 201745 - RNA, 19 nt, Artificial Sequence
  Description of Artificial Sequence: Synthetic oligonucleotide
  Antisense strand to SEQ ID NO: 201744
aaugucgucccaaaccucu

SEQ ID NO: 201746 - RNA, 19 nt, Artificial Sequence
  Description of Artificial Sequence: Synthetic oligonucleotide
  Sense strand starting at position 1512 of SEQ ID NO: 2600
gcauccauccuuggaccaa

SEQ ID NO: 201747 - RNA, 19 nt, Artificial Sequence
  Description of Artificial Sequence: Synthetic oligonucleotide
  Antisense strand to SEQ ID NO: 201746
uugguccaaggauggaugc

SEQ ID NO: 201748 - RNA, 19 nt, Artificial Sequence
  Description of Artificial Sequence: Synthetic oligonucleotide
  Sense strand starting at position 1599 of SEQ ID NO: 2600
gccuguguuccagaauaac

SEQ ID NO: 201749 - RNA, 19 nt, Artificial Sequence
  Description of Artificial Sequence: Synthetic oligonucleotide
  Antisense strand to SEQ ID NO: 201748
guuauucuggaacacaggc

SEQ ID NO: 201750 - RNA, 19 nt, Artificial Sequence
  Description of Artificial Sequence: Synthetic oligonucleotide
  Sense strand starting at position 1649 of SEQ ID NO: 2600
agguauuugucaucagcca

SEQ ID NO: 201751 - RNA, 19 nt, Artificial Sequence
  Description of Artificial Sequence: Synthetic oligonucleotide
  Antisense strand to SEQ ID NO: 201750
uggcugaugacaaauaccu

SEQ ID NO: 201752 - RNA, 19 nt, Artificial Sequence
  Description of Artificial Sequence: Synthetic oligonucleotide
  Sense strand starting at position 1657 of SEQ ID NO: 2600
gucaucagccagugaagga

SEQ ID NO: 201753 - RNA, 19 nt, Artificial Sequence
  Description of Artificial Sequence: Synthetic oligonucleotide
  Antisense strand to SEQ ID NO: 201752
uccuucacuggcugaugac

SEQ ID NO: 201754 - RNA, 19 nt, Artificial Sequence
  Description of Artificial Sequence: Synthetic oligonucleotide
  Sense strand starting at position 1740 of SEQ ID NO: 2600
acaagugacuacuuugagu

SEQ ID NO: 201755 - RNA, 19 nt, Artificial Sequence
  Description of Artificial Sequence: Synthetic oligonucleotide
  Antisense strand to SEQ ID NO: 201754
acucaaaguagucacuugu

SEQ ID NO: 201756 - RNA, 19 nt, Artificial Sequence
  Description of Artificial Sequence: Synthetic oligonucleotide
  Sense strand starting at position 1745 of SEQ ID NO: 2600
ugacuacuuugagugguca

SEQ ID NO: 201757 - RNA, 19 nt, Artificial Sequence
  Description of Artificial Sequence: Synthetic oligonucleotide
  Antisense strand to SEQ ID NO: 201756
ugaccacucaaaguaguca

SEQ ID NO: 201758 - RNA, 19 nt, Artificial Sequence
  Description of Artificial Sequence: Synthetic oligonucleotide
  Sense strand starting at position 1746 of SEQ ID NO: 2600
gacuacuuugaguggucaa

SEQ ID NO: 201759 - RNA, 19 nt, Artificial Sequence
  Description of Artificial Sequence: Synthetic oligonucleotide
  Antisense strand to SEQ ID NO: 201758
uugaccacucaaaguaguc

SEQ ID NO: 201760 - RNA, 19 nt, Artificial Sequence
  Description of Artificial Sequence: Synthetic oligonucleotide
  Sense strand starting at position 1749 of SEQ ID NO: 2600
uacuuugaguggucaaagg

SEQ ID NO: 201761 - RNA, 19 nt, Artificial Sequence
  Description of Artificial Sequence: Synthetic oligonucleotide
  Antisense strand to SEQ ID NO: 201760
ccuuugaccacucaaagua

SEQ ID NO: 201762 - RNA, 19 nt, Artificial Sequence
  Description of Artificial Sequence: Synthetic oligonucleotide
  Sense strand starting at position 1844 of SEQ ID NO: 2600
augggauccuaugggauuu

SEQ ID NO: 201763 - RNA, 19 nt, Artificial Sequence
  Description of Artificial Sequence: Synthetic oligonucleotide
  Antisense strand to SEQ ID NO: 201762
aaaucccauaggaucccau

SEQ ID NO: 201764 - RNA, 19 nt, Artificial Sequence
  Description of Artificial Sequence: Synthetic oligonucleotide
  Sense strand starting at position 1988 of SEQ ID NO: 2600
acucaacugcugcaguaau

SEQ ID NO: 201765 - RNA, 19 nt, Artificial Sequence
  Description of Artificial Sequence: Synthetic oligonucleotide
  Antisense strand to SEQ ID NO: 201764
auuacugcagcaguugagu

SEQ ID NO: 201766 - RNA, 19 nt, Artificial Sequence
  Description of Artificial Sequence: Synthetic oligonucleotide
  Sense strand starting at position 2074 of SEQ ID NO: 2600
acugcacuccaugagcauu

SEQ ID NO: 201767 - RNA, 19 nt, Artificial Sequence
  Description of Artificial Sequence: Synthetic oligonucleotide
  Antisense strand to SEQ ID NO: 201766
aaugcucauggagugcagu

SEQ ID NO: 201768 - RNA, 19 nt, Artificial Sequence
  Description of Artificial Sequence: Synthetic oligonucleotide
  Sense strand starting at position 2353 of SEQ ID NO: 2600
ggacaucugugaguccaag

SEQ ID NO: 201769 - RNA, 19 nt, Artificial Sequence
  Description of Artificial Sequence: Synthetic oligonucleotide
  Antisense strand to SEQ ID NO: 201768
cuuggacucacagaugucc

SEQ ID NO: 201770 - RNA, 19 nt, Artificial Sequence
  Description of Artificial Sequence: Synthetic oligonucleotide
  Sense strand starting at position 2651 of SEQ ID NO: 2600
agcugugugcugucaccaa

SEQ ID NO: 201771 - RNA, 19 nt, Artificial Sequence
  Description of Artificial Sequence: Synthetic oligonucleotide
  Antisense strand to SEQ ID NO: 201770
uuggugacagcacacagcu

SEQ ID NO: 201772 - RNA, 19 nt, Artificial Sequence
  Description of Artificial Sequence: Synthetic oligonucleotide
  Sense strand starting at position 3027 of SEQ ID NO: 2600
gcaggugguucuuugagaa

SEQ ID NO: 201773 - RNA, 19 nt, Artificial Sequence
  Description of Artificial Sequence: Synthetic oligonucleotide
  Antisense strand to SEQ ID NO: 201772
uucucaaagaaccaccugc

SEQ ID NO: 201774 - RNA, 19 nt, Artificial Sequence
  Description of Artificial Sequence: Synthetic oligonucleotide
  Sense strand starting at position 3034 of SEQ ID NO: 2600
guucuuugagaagacugua

SEQ ID NO: 201775 - RNA, 19 nt, Artificial Sequence
  Description of Artificial Sequence: Synthetic oligonucleotide
  Antisense strand to SEQ ID NO: 201774
uacagucuucucaaagaac

SEQ ID NO: 201776 - RNA, 19 nt, Artificial Sequence
  Description of Artificial Sequence: Synthetic oligonucleotide
  Sense strand starting at position 3037 of SEQ ID NO: 2600
cuuugagaagacuguauaa

SEQ ID NO: 201777 - RNA, 19 nt, Artificial Sequence
  Description of Artificial Sequence: Synthetic oligonucleotide
  Antisense strand to SEQ ID NO: 201776
uuauacagucuucucaaag

SEQ ID NO: 201778 - RNA, 19 nt, Artificial Sequence
  Description of Artificial Sequence: Synthetic oligonucleotide
  Sense strand starting at position 3161 of SEQ ID NO: 2600
uguucuguggcucaaagaa

SEQ ID NO: 201779 - RNA, 19 nt, Artificial Sequence
  Description of Artificial Sequence: Synthetic oligonucleotide
  Antisense strand to SEQ ID NO: 201778
uucuuugagccacagaaca

SEQ ID NO: 201780 - RNA, 19 nt, Artificial Sequence
  Description of Artificial Sequence: Synthetic oligonucleotide
  Sense strand starting at position 3192 of SEQ ID NO: 2600
uuuccugauucccugguau

SEQ ID NO: 201781 - RNA, 19 nt, Artificial Sequence
  Description of Artificial Sequence: Synthetic oligonucleotide
  Antisense strand to SEQ ID NO: 201780
auaccagggaaucaggaaa

SEQ ID NO: 201782 - RNA, 19 nt, Artificial Sequence
  Description of Artificial Sequence: Synthetic oligonucleotide
  Sense strand starting at position 3349 of SEQ ID NO: 2600
cauagugguagauguugaa

SEQ ID NO: 201783 - RNA, 19 nt, Artificial Sequence
  Description of Artificial Sequence: Synthetic oligonucleotide
  Antisense strand to SEQ ID NO: 201782
uucaacaucuaccacuaug

SEQ ID NO: 201784 - RNA, 19 nt, Artificial Sequence
  Description of Artificial Sequence: Synthetic oligonucleotide
  Sense strand starting at position 3382 of SEQ ID NO: 2600
cugcccuuagacuagaaau

SEQ ID NO: 201785 - RNA, 19 nt, Artificial Sequence
  Description of Artificial Sequence: Synthetic oligonucleotide
  Antisense strand to SEQ ID NO: 201784
auuucuagucuaagggcag

SEQ ID NO: 201786 - RNA, 19 nt, Artificial Sequence
  Description of Artificial Sequence: Synthetic oligonucleotide
  Sense strand starting at position 3667 of SEQ ID NO: 2600
caaagagcugcuuguuaaa

SEQ ID NO: 201787 - RNA, 19 nt, Artificial Sequence
  Description of Artificial Sequence: Synthetic oligonucleotide
  Antisense strand to SEQ ID NO: 201786
uuuaacaagcagcucuuug

SEQ ID NO: 201788 - RNA, 19 nt, Artificial Sequence
  Description of Artificial Sequence: Synthetic oligonucleotide
  Sense strand starting at position 3669 of SEQ ID NO: 2600
aagagcugcuuguuaaaua

SEQ ID NO: 201789 - RNA, 19 nt, Artificial Sequence
  Description of Artificial Sequence: Synthetic oligonucleotide
  Antisense strand to SEQ ID NO: 201788
uauuuaacaagcagcucuu

SEQ ID NO: 201790 - RNA, 19 nt, Artificial Sequence
  Description of Artificial Sequence: Synthetic oligonucleotide
  Sense strand starting at position 3698 of SEQ ID NO: 2600
uggugagucaauuguuaaa

SEQ ID NO: 201791 - RNA, 19 nt, Artificial Sequence
  Description of Artificial Sequence: Synthetic oligonucleotide
  Antisense strand to SEQ ID NO: 201790
uuuaacaauugacucacca

SEQ ID NO: 201792 - RNA, 19 nt, Artificial Sequence
  Description of Artificial Sequence: Synthetic oligonucleotide
  Sense strand starting at position 3716 of SEQ ID NO: 2600
accaauugguacuugaaau

SEQ ID NO: 201793 - RNA, 19 nt, Artificial Sequence
  Description of Artificial Sequence: Synthetic oligonucleotide
  Antisense strand to SEQ ID NO: 201792
auuucaaguaccaauuggu

SEQ ID NO: 201794 - RNA, 19 nt, Artificial Sequence
  Description of Artificial Sequence: Synthetic oligonucleotide
  Sense strand starting at position 3733 of SEQ ID NO: 2600
aucagacuugguggaagua

SEQ ID NO: 201795 - RNA, 19 nt, Artificial Sequence
  Description of Artificial Sequence: Synthetic oligonucleotide
  Antisense strand to SEQ ID NO: 201794
uacuuccaccaagucugau

SEQ ID NO: 201796 - RNA, 19 nt, Artificial Sequence
  Description of Artificial Sequence: Synthetic oligonucleotide
  Sense strand starting at position 3734 of SEQ ID NO: 2600
ucagacuugguggaaguau

SEQ ID NO: 201797 - RNA, 19 nt, Artificial Sequence
  Description of Artificial Sequence: Synthetic oligonucleotide
  Antisense strand to SEQ ID NO: 201796
auacuuccaccaagucuga

SEQ ID NO: 201798 - RNA, 19 nt, Artificial Sequence
  Description of Artificial Sequence: Synthetic oligonucleotide
  Sense strand starting at position 3877 of SEQ ID NO: 2600
gcuggugaugaacaaguuu

SEQ ID NO: 201799 - RNA, 19 nt, Artificial Sequence
  Description of Artificial Sequence: Synthetic oligonucleotide
  Antisense strand to SEQ ID NO: 201798
aaacuuguucaucaccagc

SEQ ID NO: 201800 - RNA, 19 nt, Artificial Sequence
  Description of Artificial Sequence: Synthetic oligonucleotide
  Sense strand starting at position 5 of SEQ ID NO: 2601
acgggcagcccuuaugaga

SEQ ID NO: 201801 - RNA, 19 nt, Artificial Sequence
  Description of Artificial Sequence: Synthetic oligonucleotide
  Antisense strand to SEQ ID NO: 201800
ucucauaagggcugcccgu

SEQ ID NO: 201802 - RNA, 19 nt, Artificial Sequence
  Description of Artificial Sequence: Synthetic oligonucleotide
  Sense strand starting at position 30 of SEQ ID NO: 2601
caccguaggugauaggaua

SEQ ID NO: 201803 - RNA, 19 nt, Artificial Sequence
  Description of Artificial Sequence: Synthetic oligonucleotide
  Antisense strand to SEQ ID NO: 201802
uauccuaucaccuacggug

SEQ ID NO: 201804 - RNA, 19 nt, Artificial Sequence
  Description of Artificial Sequence: Synthetic oligonucleotide
  Sense strand starting at position 872 of SEQ ID NO: 2601
uuaagcaauugcccauaga

SEQ ID NO: 201805 - RNA, 19 nt, Artificial Sequence
  Description of Artificial Sequence: Synthetic oligonucleotide
  Antisense strand to SEQ ID NO: 201804
ucuaugggcaauugcuuaa

SEQ ID NO: 201806 - RNA, 19 nt, Artificial Sequence
  Description of Artificial Sequence: Synthetic oligonucleotide
  Sense strand starting at position 875 of SEQ ID NO: 2601
agcaauugcccauagaauu

SEQ ID NO: 201807 - RNA, 19 nt, Artificial Sequence
  Description of Artificial Sequence: Synthetic oligonucleotide
  Antisense strand to SEQ ID NO: 201806
aauucuaugggcaauugcu

SEQ ID NO: 201808 - RNA, 19 nt, Artificial Sequence
  Description of Artificial Sequence: Synthetic oligonucleotide
  Sense strand starting at position 1013 of SEQ ID NO: 2601
ccacuuagagcccagagua

SEQ ID NO: 201809 - RNA, 19 nt, Artificial Sequence
  Description of Artificial Sequence: Synthetic oligonucleotide
  Antisense strand to SEQ ID NO: 201808
uacucugggcucuaagugg

SEQ ID NO: 201810 - RNA, 19 nt, Artificial Sequence
  Description of Artificial Sequence: Synthetic oligonucleotide
  Sense strand starting at position 1064 of SEQ ID NO: 2601
cugaguguucggugugguu

SEQ ID NO: 201811 - RNA, 19 nt, Artificial Sequence
  Description of Artificial Sequence: Synthetic oligonucleotide
  Antisense strand to SEQ ID NO: 201810
aaccacaccgaacacucag

SEQ ID NO: 201812 - RNA, 19 nt, Artificial Sequence
  Description of Artificial Sequence: Synthetic oligonucleotide
  Sense strand starting at position 1129 of SEQ ID NO: 2601
gugcccucaccuugguuaa

SEQ ID NO: 201813 - RNA, 19 nt, Artificial Sequence
  Description of Artificial Sequence: Synthetic oligonucleotide
  Antisense strand to SEQ ID NO: 201812
uuaaccaaggugagggcac

SEQ ID NO: 201814 - RNA, 19 nt, Artificial Sequence
  Description of Artificial Sequence: Synthetic oligonucleotide
  Sense strand starting at position 1130 of SEQ ID NO: 2601
ugcccucaccuugguuaau

SEQ ID NO: 201815 - RNA, 19 nt, Artificial Sequence
  Description of Artificial Sequence: Synthetic oligonucleotide
  Antisense strand to SEQ ID NO: 201814
auuaaccaaggugagggca

SEQ ID NO: 201816 - RNA, 19 nt, Artificial Sequence
  Description of Artificial Sequence: Synthetic oligonucleotide
  Sense strand starting at position 1131 of SEQ ID NO: 2601
gcccucaccuugguuaauu

SEQ ID NO: 201817 - RNA, 19 nt, Artificial Sequence
  Description of Artificial Sequence: Synthetic oligonucleotide
  Antisense strand to SEQ ID NO: 201816
aauuaaccaaggugagggc

SEQ ID NO: 201818 - RNA, 19 nt, Artificial Sequence
  Description of Artificial Sequence: Synthetic oligonucleotide
  Sense strand starting at position 1139 of SEQ ID NO: 2601
cuugguuaauugcaggaau

SEQ ID NO: 201819 - RNA, 19 nt, Artificial Sequence
  Description of Artificial Sequence: Synthetic oligonucleotide
  Antisense strand to SEQ ID NO: 201818
auuccugcaauuaaccaag

SEQ ID NO: 201820 - RNA, 19 nt, Artificial Sequence
  Description of Artificial Sequence: Synthetic oligonucleotide
  Sense strand starting at position 1141 of SEQ ID NO: 2601
ugguuaauugcaggaaugu

SEQ ID NO: 201821 - RNA, 19 nt, Artificial Sequence
  Description of Artificial Sequence: Synthetic oligonucleotide
  Antisense strand to SEQ ID NO: 201820
acauuccugcaauuaacca

SEQ ID NO: 201822 - RNA, 19 nt, Artificial Sequence
  Description of Artificial Sequence: Synthetic oligonucleotide
  Sense strand starting at position 1142 of SEQ ID NO: 2601
gguuaauugcaggaauguc

SEQ ID NO: 201823 - RNA, 19 nt, Artificial Sequence
  Description of Artificial Sequence: Synthetic oligonucleotide
  Antisense strand to SEQ ID NO: 201822
gacauuccugcaauuaacc

SEQ ID NO: 201824 - RNA, 19 nt, Artificial Sequence
  Description of Artificial Sequence: Synthetic oligonucleotide
  Sense strand starting at position 1357 of SEQ ID NO: 2601
cgguaagacucagucccua

SEQ ID NO: 201825 - RNA, 19 nt, Artificial Sequence
  Description of Artificial Sequence: Synthetic oligonucleotide
  Antisense strand to SEQ ID NO: 201824
uagggacugagucuuaccg

SEQ ID NO: 201826 - RNA, 19 nt, Artificial Sequence
  Description of Artificial Sequence: Synthetic oligonucleotide
  Sense strand starting at position 1361 of SEQ ID NO: 2601
aagacucagucccuaggaa

SEQ ID NO: 201827 - RNA, 19 nt, Artificial Sequence
  Description of Artificial Sequence: Synthetic oligonucleotide
  Antisense strand to SEQ ID NO: 201826
uuccuagggacugagucuu

SEQ ID NO: 201828 - RNA, 19 nt, Artificial Sequence
  Description of Artificial Sequence: Synthetic oligonucleotide
  Sense strand starting at position 1793 of SEQ ID NO: 2601
ggagcugacuucuagaaua

SEQ ID NO: 201829 - RNA, 19 nt, Artificial Sequence
  Description of Artificial Sequence: Synthetic oligonucleotide
  Antisense strand to SEQ ID NO: 201828
uauucuagaagucagcucc

SEQ ID NO: 201830 - RNA, 19 nt, Artificial Sequence
  Description of Artificial Sequence: Synthetic oligonucleotide
  Sense strand starting at position 1821 of SEQ ID NO: 2601
agcucugugcucugagcua

SEQ ID NO: 201831 - RNA, 19 nt, Artificial Sequence
  Description of Artificial Sequence: Synthetic oligonucleotide
  Antisense strand to SEQ ID NO: 201830
uagcucagagcacagagcu

SEQ ID NO: 201832 - RNA, 19 nt, Artificial Sequence
  Description of Artificial Sequence: Synthetic oligonucleotide
  Sense strand starting at position 2051 of SEQ ID NO: 2601
acaguaaccuaauugcaga

SEQ ID NO: 201833 - RNA, 19 nt, Artificial Sequence
  Description of Artificial Sequence: Synthetic oligonucleotide
  Antisense strand to SEQ ID NO: 201832
ucugcaauuagguuacugu

SEQ ID NO: 201834 - RNA, 19 nt, Artificial Sequence
  Description of Artificial Sequence: Synthetic oligonucleotide
  Sense strand starting at position 2358 of SEQ ID NO: 2601
ggcuguagcaggugaaaga

SEQ ID NO: 201835 - RNA, 19 nt, Artificial Sequence
  Description of Artificial Sequence: Synthetic oligonucleotide
  Antisense strand to SEQ ID NO: 201834
ucuuucaccugcuacagcc

SEQ ID NO: 201836 - RNA, 19 nt, Artificial Sequence
  Description of Artificial Sequence: Synthetic oligonucleotide
  Sense strand starting at position 2436 of SEQ ID NO: 2601
agagaaacaucgcagaaag

SEQ ID NO: 201837 - RNA, 19 nt, Artificial Sequence
  Description of Artificial Sequence: Synthetic oligonucleotide
  Antisense strand to SEQ ID NO: 201836
cuuucugcgauguuucucu

SEQ ID NO: 201838 - RNA, 19 nt, Artificial Sequence
  Description of Artificial Sequence: Synthetic oligonucleotide
  Sense strand starting at position 2438 of SEQ ID NO: 2601
agaaacaucgcagaaaguu

SEQ ID NO: 201839 - RNA, 19 nt, Artificial Sequence
  Description of Artificial Sequence: Synthetic oligonucleotide
  Antisense strand to SEQ ID NO: 201838
aacuuucugcgauguuucu

SEQ ID NO: 201840 - RNA, 19 nt, Artificial Sequence
  Description of Artificial Sequence: Synthetic oligonucleotide
  Sense strand starting at position 2492 of SEQ ID NO: 2601
gaccuauuccuccagcgag

SEQ ID NO: 201841 - RNA, 19 nt, Artificial Sequence
  Description of Artificial Sequence: Synthetic oligonucleotide
  Antisense strand to SEQ ID NO: 201840
cucgcuggaggaauagguc

SEQ ID NO: 201842 - RNA, 19 nt, Artificial Sequence
  Description of Artificial Sequence: Synthetic oligonucleotide
  Sense strand starting at position 2530 of SEQ ID NO: 2601
ccggccugugcuuagacau

SEQ ID NO: 201843 - RNA, 19 nt, Artificial Sequence
  Description of Artificial Sequence: Synthetic oligonucleotide
  Antisense strand to SEQ ID NO: 201842
augucuaagcacaggccgg

SEQ ID NO: 201844 - RNA, 19 nt, Artificial Sequence
  Description of Artificial Sequence: Synthetic oligonucleotide
  Sense strand starting at position 2581 of SEQ ID NO: 2601
ccguguaucuccggaagga

SEQ ID NO: 201845 - RNA, 19 nt, Artificial Sequence
  Description of Artificial Sequence: Synthetic oligonucleotide
  Antisense strand to SEQ ID NO: 201844
uccuuccggagauacacgg

SEQ ID NO: 201846 - RNA, 19 nt, Artificial Sequence
  Description of Artificial Sequence: Synthetic oligonucleotide
  Sense strand starting at position 2582 of SEQ ID NO: 2601
cguguaucuccggaaggag

SEQ ID NO: 201847 - RNA, 19 nt, Artificial Sequence
  Description of Artificial Sequence: Synthetic oligonucleotide
  Antisense strand to SEQ ID NO: 201846
cuccuuccggagauacacg

SEQ ID NO: 201848 - RNA, 19 nt, Artificial Sequence
  Description of Artificial Sequence: Synthetic oligonucleotide
  Sense strand starting at position 2796 of SEQ ID NO: 2601
cuggcaugaucagucagua

SEQ ID NO: 201849 - RNA, 19 nt, Artificial Sequence
  Description of Artificial Sequence: Synthetic oligonucleotide
  Antisense strand to SEQ ID NO: 201848
uacugacugaucaugccag

SEQ ID NO: 201850 - RNA, 19 nt, Artificial Sequence
  Description of Artificial Sequence: Synthetic oligonucleotide
  Sense strand starting at position 3067 of SEQ ID NO: 2601
uccagagcuucuccaaaga

SEQ ID NO: 201851 - RNA, 19 nt, Artificial Sequence
  Description of Artificial Sequence: Synthetic oligonucleotide
  Antisense strand to SEQ ID NO: 201850
ucuuuggagaagcucugga

SEQ ID NO: 201852 - RNA, 19 nt, Artificial Sequence
  Description of Artificial Sequence: Synthetic oligonucleotide
  Sense strand starting at position 3147 of SEQ ID NO: 2601
auugacagaugucaggaua

SEQ ID NO: 201853 - RNA, 19 nt, Artificial Sequence
  Description of Artificial Sequence: Synthetic oligonucleotide
  Antisense strand to SEQ ID NO: 201852
uauccugacaucugucaau

SEQ ID NO: 201854 - RNA, 19 nt, Artificial Sequence
  Description of Artificial Sequence: Synthetic oligonucleotide
  Sense strand starting at position 3184 of SEQ ID NO: 2601
guuagcuuguuguggucau

SEQ ID NO: 201855 - RNA, 19 nt, Artificial Sequence
  Description of Artificial Sequence: Synthetic oligonucleotide
  Antisense strand to SEQ ID NO: 201854
augaccacaacaagcuaac

SEQ ID NO: 201856 - RNA, 19 nt, Artificial Sequence
  Description of Artificial Sequence: Synthetic oligonucleotide
  Sense strand starting at position 3188 of SEQ ID NO: 2601
gcuuguuguggucaucauu

SEQ ID NO: 201857 - RNA, 19 nt, Artificial Sequence
  Description of Artificial Sequence: Synthetic oligonucleotide
  Antisense strand to SEQ ID NO: 201856
aaugaugaccacaacaagc

SEQ ID NO: 201858 - RNA, 19 nt, Artificial Sequence
  Description of Artificial Sequence: Synthetic oligonucleotide
  Sense strand starting at position 3268 of SEQ ID NO: 2601
ugucgauuaugccucagua

SEQ ID NO: 201859 - RNA, 19 nt, Artificial Sequence
  Description of Artificial Sequence: Synthetic oligonucleotide
  Antisense strand to SEQ ID NO: 201858
uacugaggcauaaucgaca

SEQ ID NO: 201860 - RNA, 19 nt, Artificial Sequence
  Description of Artificial Sequence: Synthetic oligonucleotide
  Sense strand starting at position 3270 of SEQ ID NO: 2601
ucgauuaugccucaguaaa

SEQ ID NO: 201861 - RNA, 19 nt, Artificial Sequence
  Description of Artificial Sequence: Synthetic oligonucleotide
  Antisense strand to SEQ ID NO: 201860
uuuacugaggcauaaucga

SEQ ID NO: 201862 - RNA, 19 nt, Artificial Sequence
  Description of Artificial Sequence: Synthetic oligonucleotide
  Sense strand starting at position 3974 of SEQ ID NO: 2601
gaaacagagucuuuauuag

SEQ ID NO: 201863 - RNA, 19 nt, Artificial Sequence
  Description of Artificial Sequence: Synthetic oligonucleotide
  Antisense strand to SEQ ID NO: 201862
cuaauaaagacucuguuuc

SEQ ID NO: 201864 - RNA, 19 nt, Artificial Sequence
  Description of Artificial Sequence: Synthetic oligonucleotide
  Sense strand starting at position 3978 of SEQ ID NO: 2601
cagagucuuuauuaggaca

SEQ ID NO: 201865 - RNA, 19 nt, Artificial Sequence
  Description of Artificial Sequence: Synthetic oligonucleotide
  Antisense strand to SEQ ID NO: 201864
uguccuaauaaagacucug

SEQ ID NO: 201866 - RNA, 19 nt, Artificial Sequence
  Description of Artificial Sequence: Synthetic oligonucleotide
  Sense strand starting at position 3980 of SEQ ID NO: 2601
gagucuuuauuaggacaug

SEQ ID NO: 201867 - RNA, 19 nt, Artificial Sequence
  Description of Artificial Sequence: Synthetic oligonucleotide
  Antisense strand to SEQ ID NO: 201866
cauguccuaauaaagacuc

SEQ ID NO: 201868 - RNA, 19 nt, Artificial Sequence
  Description of Artificial Sequence: Synthetic oligonucleotide
  Sense strand starting at position 138 of SEQ ID NO: 2602
aggucugcuuaccuauaau

SEQ ID NO: 201869 - RNA, 19 nt, Artificial Sequence
  Description of Artificial Sequence: Synthetic oligonucleotide
  Antisense strand to SEQ ID NO: 201868
auuauagguaagcagaccu

SEQ ID NO: 201870 - RNA, 19 nt, Artificial Sequence
  Description of Artificial Sequence: Synthetic oligonucleotide
  Sense strand starting at position 556 of SEQ ID NO: 2602
cggugaaauaaaugugauu

SEQ ID NO: 201871 - RNA, 19 nt, Artificial Sequence
  Description of Artificial Sequence: Synthetic oligonucleotide
  Antisense strand to SEQ ID NO: 201870
aaucacauuuauuucaccg

SEQ ID NO: 201872 - RNA, 19 nt, Artificial Sequence
  Description of Artificial Sequence: Synthetic oligonucleotide
  Sense strand starting at position 717 of SEQ ID NO: 2602
aaguauuaccggcauuaau

SEQ ID NO: 201873 - RNA, 19 nt, Artificial Sequence
  Description of Artificial Sequence: Synthetic oligonucleotide
  Antisense strand to SEQ ID NO: 201872
auuaaugccgguaauacuu

SEQ ID NO: 201874 - RNA, 19 nt, Artificial Sequence
  Description of Artificial Sequence: Synthetic oligonucleotide
  Sense strand starting at position 726 of SEQ ID NO: 2602
cggcauuaaucaccauuaa

SEQ ID NO: 201875 - RNA, 19 nt, Artificial Sequence
  Description of Artificial Sequence: Synthetic oligonucleotide
  Antisense strand to SEQ ID NO: 201874
uuaauggugauuaaugccg

SEQ ID NO: 201876 - RNA, 19 nt, Artificial Sequence
  Description of Artificial Sequence: Synthetic oligonucleotide
  Sense strand starting at position 785 of SEQ ID NO: 2602
cguuuaaugcccuauuacu

SEQ ID NO: 201877 - RNA, 19 nt, Artificial Sequence
  Description of Artificial Sequence: Synthetic oligonucleotide
  Antisense strand to SEQ ID NO: 201876
aguaauagggcauuaaacg

SEQ ID NO: 201878 - RNA, 19 nt, Artificial Sequence
  Description of Artificial Sequence: Synthetic oligonucleotide
  Sense strand starting at position 813 of SEQ ID NO: 2602
cacccucaacgauguauga

SEQ ID NO: 201879 - RNA, 19 nt, Artificial Sequence
  Description of Artificial Sequence: Synthetic oligonucleotide
  Antisense strand to SEQ ID NO: 201878
ucauacaucguugagggug

SEQ ID NO: 201880 - RNA, 19 nt, Artificial Sequence
  Description of Artificial Sequence: Synthetic oligonucleotide
  Sense strand starting at position 1086 of SEQ ID NO: 2602
cagaguaggucucuacgga

SEQ ID NO: 201881 - RNA, 19 nt, Artificial Sequence
  Description of Artificial Sequence: Synthetic oligonucleotide
  Antisense strand to SEQ ID NO: 201880
uccguagagaccuacucug

SEQ ID NO: 201882 - RNA, 19 nt, Artificial Sequence
  Description of Artificial Sequence: Synthetic oligonucleotide
  Sense strand starting at position 1087 of SEQ ID NO: 2602
agaguaggucucuacggaa

SEQ ID NO: 201883 - RNA, 19 nt, Artificial Sequence
  Description of Artificial Sequence: Synthetic oligonucleotide
  Antisense strand to SEQ ID NO: 201882
uuccguagagaccuacucu

SEQ ID NO: 201884 - RNA, 19 nt, Artificial Sequence
  Description of Artificial Sequence: Synthetic oligonucleotide
  Sense strand starting at position 1201 of SEQ ID NO: 2602
ucgugaucucucgucugcu

SEQ ID NO: 201885 - RNA, 19 nt, Artificial Sequence
  Description of Artificial Sequence: Synthetic oligonucleotide
  Antisense strand to SEQ ID NO: 201884
agcagacgagagaucacga

SEQ ID NO: 201886 - RNA, 19 nt, Artificial Sequence
  Description of Artificial Sequence: Synthetic oligonucleotide
  Sense strand starting at position 1273 of SEQ ID NO: 2602
gguaaauucuauccagcuc

SEQ ID NO: 201887 - RNA, 19 nt, Artificial Sequence
  Description of Artificial Sequence: Synthetic oligonucleotide
  Antisense strand to SEQ ID NO: 201886
gagcuggauagaauuuacc

SEQ ID NO: 201888 - RNA, 19 nt, Artificial Sequence
  Description of Artificial Sequence: Synthetic oligonucleotide
  Sense strand starting at position 2290 of SEQ ID NO: 2602
accugugccauccgggaaa

SEQ ID NO: 201889 - RNA, 19 nt, Artificial Sequence
  Description of Artificial Sequence: Synthetic oligonucleotide
  Antisense strand to SEQ ID NO: 201888
uuucccggauggcacaggu

SEQ ID NO: 201890 - RNA, 19 nt, Artificial Sequence
  Description of Artificial Sequence: Synthetic oligonucleotide
  Sense strand starting at position 2516 of SEQ ID NO: 2602
aggcgaagcaacugagauu

SEQ ID NO: 201891 - RNA, 19 nt, Artificial Sequence
  Description of Artificial Sequence: Synthetic oligonucleotide
  Antisense strand to SEQ ID NO: 201890
aaucucaguugcuucgccu

SEQ ID NO: 201892 - RNA, 19 nt, Artificial Sequence
  Description of Artificial Sequence: Synthetic oligonucleotide
  Sense strand starting at position 2525 of SEQ ID NO: 2602
aacugagauugagugacuu

SEQ ID NO: 201893 - RNA, 19 nt, Artificial Sequence
  Description of Artificial Sequence: Synthetic oligonucleotide
  Antisense strand to SEQ ID NO: 201892
aagucacucaaucucaguu

SEQ ID NO: 201894 - RNA, 19 nt, Artificial Sequence
  Description of Artificial Sequence: Synthetic oligonucleotide
  Sense strand starting at position 2548 of SEQ ID NO: 2602
agcucauaagucugggaug

SEQ ID NO: 201895 - RNA, 19 nt, Artificial Sequence
  Description of Artificial Sequence: Synthetic oligonucleotide
  Antisense strand to SEQ ID NO: 201894
caucccagacuuaugagcu

SEQ ID NO: 201896 - RNA, 19 nt, Artificial Sequence
  Description of Artificial Sequence: Synthetic oligonucleotide
  Sense strand starting at position 2550 of SEQ ID NO: 2602
cucauaagucugggaugua

SEQ ID NO: 201897 - RNA, 19 nt, Artificial Sequence
  Description of Artificial Sequence: Synthetic oligonucleotide
  Antisense strand to SEQ ID NO: 201896
uacaucccagacuuaugag

SEQ ID NO: 201898 - RNA, 19 nt, Artificial Sequence
  Description of Artificial Sequence: Synthetic oligonucleotide
  Sense strand starting at position 2684 of SEQ ID NO: 2602
ugaagcuacucaucaauga

SEQ ID NO: 201899 - RNA, 19 nt, Artificial Sequence
  Description of Artificial Sequence: Synthetic oligonucleotide
  Antisense strand to SEQ ID NO: 201898
ucauugaugaguagcuuca

SEQ ID NO: 201900 - RNA, 19 nt, Artificial Sequence
  Description of Artificial Sequence: Synthetic oligonucleotide
  Sense strand starting at position 2688 of SEQ ID NO: 2602
gcuacucaucaaugacaga

SEQ ID NO: 201901 - RNA, 19 nt, Artificial Sequence
  Description of Artificial Sequence: Synthetic oligonucleotide
  Antisense strand to SEQ ID NO: 201900
ucugucauugaugaguagc

SEQ ID NO: 201902 - RNA, 19 nt, Artificial Sequence
  Description of Artificial Sequence: Synthetic oligonucleotide
  Sense strand starting at position 2703 of SEQ ID NO: 2602
cagaaauggugucuucuuu

SEQ ID NO: 201903 - RNA, 19 nt, Artificial Sequence
  Description of Artificial Sequence: Synthetic oligonucleotide
  Antisense strand to SEQ ID NO: 201902
aaagaagacaccauuucug

SEQ ID NO: 201904 - RNA, 19 nt, Artificial Sequence
  Description of Artificial Sequence: Synthetic oligonucleotide
  Sense strand starting at position 2716 of SEQ ID NO: 2602
uucuuuauuucggugagcu

SEQ ID NO: 201905 - RNA, 19 nt, Artificial Sequence
  Description of Artificial Sequence: Synthetic oligonucleotide
  Antisense strand to SEQ ID NO: 201904
agcucaccgaaauaaagaa

SEQ ID NO: 201906 - RNA, 19 nt, Artificial Sequence
  Description of Artificial Sequence: Synthetic oligonucleotide
  Sense strand starting at position 2717 of SEQ ID NO: 2602
ucuuuauuucggugagcuc

SEQ ID NO: 201907 - RNA, 19 nt, Artificial Sequence
  Description of Artificial Sequence: Synthetic oligonucleotide
  Antisense strand to SEQ ID NO: 201906
gagcucaccgaaauaaaga

SEQ ID NO: 201908 - RNA, 19 nt, Artificial Sequence
  Description of Artificial Sequence: Synthetic oligonucleotide
  Sense strand starting at position 2730 of SEQ ID NO: 2602
gagcucagucccuagcaua

SEQ ID NO: 201909 - RNA, 19 nt, Artificial Sequence
  Description of Artificial Sequence: Synthetic oligonucleotide
  Antisense strand to SEQ ID NO: 201908
uaugcuagggacugagcuc

SEQ ID NO: 201910 - RNA, 19 nt, Artificial Sequence
  Description of Artificial Sequence: Synthetic oligonucleotide
  Sense strand starting at position 2762 of SEQ ID NO: 2602
ucaggcgcccaguaaauau

SEQ ID NO: 201911 - RNA, 19 nt, Artificial Sequence
  Description of Artificial Sequence: Synthetic oligonucleotide
  Antisense strand to SEQ ID NO: 201910
auauuuacugggcgccuga

SEQ ID NO: 201912 - RNA, 19 nt, Artificial Sequence
  Description of Artificial Sequence: Synthetic oligonucleotide
  Sense strand starting at position 2793 of SEQ ID NO: 2602
ucaccuauuucugugguca

SEQ ID NO: 201913 - RNA, 19 nt, Artificial Sequence
  Description of Artificial Sequence: Synthetic oligonucleotide
  Antisense strand to SEQ ID NO: 201912
ugaccacagaaauagguga

SEQ ID NO: 201914 - RNA, 19 nt, Artificial Sequence
  Description of Artificial Sequence: Synthetic oligonucleotide
  Sense strand starting at position 2805 of SEQ ID NO: 2602
guggucagagaccauuauu

SEQ ID NO: 201915 - RNA, 19 nt, Artificial Sequence
  Description of Artificial Sequence: Synthetic oligonucleotide
  Antisense strand to SEQ ID NO: 201914
aauaauggucucugaccac

SEQ ID NO: 201916 - RNA, 19 nt, Artificial Sequence
  Description of Artificial Sequence: Synthetic oligonucleotide
  Sense strand starting at position 2821 of SEQ ID NO: 2602
auuuguaguauccguaaca

SEQ ID NO: 201917 - RNA, 19 nt, Artificial Sequence
  Description of Artificial Sequence: Synthetic oligonucleotide
  Antisense strand to SEQ ID NO: 201916
uguuacggauacuacaaau

SEQ ID NO: 201918 - RNA, 19 nt, Artificial Sequence
  Description of Artificial Sequence: Synthetic oligonucleotide
  Sense strand starting at position 2833 of SEQ ID NO: 2602
cguaacagcuuucugaaag

SEQ ID NO: 201919 - RNA, 19 nt, Artificial Sequence
  Description of Artificial Sequence: Synthetic oligonucleotide
  Antisense strand to SEQ ID NO: 201918
cuuucagaaagcuguuacg

SEQ ID NO: 201920 - RNA, 19 nt, Artificial Sequence
  Description of Artificial Sequence: Synthetic oligonucleotide
  Sense strand starting at position 2903 of SEQ ID NO: 2602
aaguaagaagaauguagua

SEQ ID NO: 201921 - RNA, 19 nt, Artificial Sequence
  Description of Artificial Sequence: Synthetic oligonucleotide
  Antisense strand to SEQ ID NO: 201920
uacuacauucuucuuacuu

SEQ ID NO: 201922 - RNA, 19 nt, Artificial Sequence
  Description of Artificial Sequence: Synthetic oligonucleotide
  Sense strand starting at position 2975 of SEQ ID NO: 2602
ccaguaaacuuacuauagu

SEQ ID NO: 201923 - RNA, 19 nt, Artificial Sequence
  Description of Artificial Sequence: Synthetic oligonucleotide
  Antisense strand to SEQ ID NO: 201922
acuauaguaaguuuacugg

SEQ ID NO: 201924 - RNA, 19 nt, Artificial Sequence
  Description of Artificial Sequence: Synthetic oligonucleotide
  Sense strand starting at position 2983 of SEQ ID NO: 2602
cuuacuauagugugaaaua

SEQ ID NO: 201925 - RNA, 19 nt, Artificial Sequence
  Description of Artificial Sequence: Synthetic oligonucleotide
  Antisense strand to SEQ ID NO: 201924
uauuucacacuauaguaag

SEQ ID NO: 201926 - RNA, 19 nt, Artificial Sequence
  Description of Artificial Sequence: Synthetic oligonucleotide
  Sense strand starting at position 3114 of SEQ ID NO: 2602
guguguuauaugugaauuu

SEQ ID NO: 201927 - RNA, 19 nt, Artificial Sequence
  Description of Artificial Sequence: Synthetic oligonucleotide
  Antisense strand to SEQ ID NO: 201926
aaauucacauauaacacac

SEQ ID NO: 201928 - RNA, 19 nt, Artificial Sequence
  Description of Artificial Sequence: Synthetic oligonucleotide
  Sense strand starting at position 3236 of SEQ ID NO: 2602
guaucuagauacuuccuua

SEQ ID NO: 201929 - RNA, 19 nt, Artificial Sequence
  Description of Artificial Sequence: Synthetic oligonucleotide
  Antisense strand to SEQ ID NO: 201928
uaaggaaguaucuagauac

SEQ ID NO: 201930 - RNA, 19 nt, Artificial Sequence
  Description of Artificial Sequence: Synthetic oligonucleotide
  Sense strand starting at position 3313 of SEQ ID NO: 2602
ucccaaaugucuuugguaa

SEQ ID NO: 201931 - RNA, 19 nt, Artificial Sequence
  Description of Artificial Sequence: Synthetic oligonucleotide
  Antisense strand to SEQ ID NO: 201930
uuaccaaagacauuuggga

SEQ ID NO: 201932 - RNA, 19 nt, Artificial Sequence
  Description of Artificial Sequence: Synthetic oligonucleotide
  Sense strand starting at position 3314 of SEQ ID NO: 2602
cccaaaugucuuugguaau

SEQ ID NO: 201933 - RNA, 19 nt, Artificial Sequence
  Description of Artificial Sequence: Synthetic oligonucleotide
  Antisense strand to SEQ ID NO: 201932
auuaccaaagacauuuggg

SEQ ID NO: 201934 - RNA, 19 nt, Artificial Sequence
  Description of Artificial Sequence: Synthetic oligonucleotide
  Sense strand starting at position 3345 of SEQ ID NO: 2602
gcauuacacagguaguaug

SEQ ID NO: 201935 - RNA, 19 nt, Artificial Sequence
  Description of Artificial Sequence: Synthetic oligonucleotide
  Antisense strand to SEQ ID NO: 201934
cauacuaccuguguaaugc

SEQ ID NO: 201936 - RNA, 19 nt, Artificial Sequence
  Description of Artificial Sequence: Synthetic oligonucleotide
  Sense strand starting at position 3383 of SEQ ID NO: 2602
uuaugucuguagucuaaga

SEQ ID NO: 201937 - RNA, 19 nt, Artificial Sequence
  Description of Artificial Sequence: Synthetic oligonucleotide
  Antisense strand to SEQ ID NO: 201936
ucuuagacuacagacauaa

SEQ ID NO: 201938 - RNA, 19 nt, Artificial Sequence
  Description of Artificial Sequence: Synthetic oligonucleotide
  Sense strand starting at position 3385 of SEQ ID NO: 2602
augucuguagucuaagaag

SEQ ID NO: 201939 - RNA, 19 nt, Artificial Sequence
  Description of Artificial Sequence: Synthetic oligonucleotide
  Antisense strand to SEQ ID NO: 201938
cuucuuagacuacagacau

SEQ ID NO: 201940 - RNA, 19 nt, Artificial Sequence
  Description of Artificial Sequence: Synthetic oligonucleotide
  Sense strand starting at position 3764 of SEQ ID NO: 2602
ggcuguugagcugaguaca

SEQ ID NO: 201941 - RNA, 19 nt, Artificial Sequence
  Description of Artificial Sequence: Synthetic oligonucleotide
  Antisense strand to SEQ ID NO: 201940
uguacucagcucaacagcc

SEQ ID NO: 201942 - RNA, 19 nt, Artificial Sequence
  Description of Artificial Sequence: Synthetic oligonucleotide
  Sense strand starting at position 3774 of SEQ ID NO: 2602
cugaguacagcuuaucauc

SEQ ID NO: 201943 - RNA, 19 nt, Artificial Sequence
  Description of Artificial Sequence: Synthetic oligonucleotide
  Antisense strand to SEQ ID NO: 201942
gaugauaagcuguacucag

SEQ ID NO: 201944 - RNA, 19 nt, Artificial Sequence
  Description of Artificial Sequence: Synthetic oligonucleotide
  Sense strand starting at position 3837 of SEQ ID NO: 2602
uuacuaggguccuuacuuu

SEQ ID NO: 201945 - RNA, 19 nt, Artificial Sequence
  Description of Artificial Sequence: Synthetic oligonucleotide
  Antisense strand to SEQ ID NO: 201944
aaaguaaggacccuaguaa

SEQ ID NO: 201946 - RNA, 19 nt, Artificial Sequence
  Description of Artificial Sequence: Synthetic oligonucleotide
  Sense strand starting at position 3911 of SEQ ID NO: 2602
ugugguuccuacuucuuaa

SEQ ID NO: 201947 - RNA, 19 nt, Artificial Sequence
  Description of Artificial Sequence: Synthetic oligonucleotide
  Antisense strand to SEQ ID NO: 201946
uuaagaaguaggaaccaca

SEQ ID NO: 201948 - RNA, 19 nt, Artificial Sequence
  Description of Artificial Sequence: Synthetic oligonucleotide
  Sense strand starting at position 3 of SEQ ID NO: 2603
ucaguaggucaagaagcuu

SEQ ID NO: 201949 - RNA, 19 nt, Artificial Sequence
  Description of Artificial Sequence: Synthetic oligonucleotide
  Antisense strand to SEQ ID NO: 201948
aagcuucuugaccuacuga

SEQ ID NO: 201950 - RNA, 19 nt, Artificial Sequence
  Description of Artificial Sequence: Synthetic oligonucleotide
  Sense strand starting at position 9 of SEQ ID NO: 2603
ggucaagaagcuugaacau

SEQ ID NO: 201951 - RNA, 19 nt, Artificial Sequence
  Description of Artificial Sequence: Synthetic oligonucleotide
  Antisense strand to SEQ ID NO: 201950
auguucaagcuucuugacc

SEQ ID NO: 201952 - RNA, 19 nt, Artificial Sequence
  Description of Artificial Sequence: Synthetic oligonucleotide
  Sense strand starting at position 18 of SEQ ID NO: 2603
gcuugaacauguuuggaau

SEQ ID NO: 201953 - RNA, 19 nt, Artificial Sequence
  Description of Artificial Sequence: Synthetic oligonucleotide
  Antisense strand to SEQ ID NO: 201952
auuccaaacauguucaagc

SEQ ID NO: 201954 - RNA, 19 nt, Artificial Sequence
  Description of Artificial Sequence: Synthetic oligonucleotide
  Sense strand starting at position 19 of SEQ ID NO: 2603
cuugaacauguuuggaaua

SEQ ID NO: 201955 - RNA, 19 nt, Artificial Sequence
  Description of Artificial Sequence: Synthetic oligonucleotide
  Antisense strand to SEQ ID NO: 201954
uauuccaaacauguucaag

SEQ ID NO: 201956 - RNA, 19 nt, Artificial Sequence
  Description of Artificial Sequence: Synthetic oligonucleotide
  Sense strand starting at position 264 of SEQ ID NO: 2603
uccauucuguuagugucaa

SEQ ID NO: 201957 - RNA, 19 nt, Artificial Sequence
  Description of Artificial Sequence: Synthetic oligonucleotide
  Antisense strand to SEQ ID NO: 201956
uugacacuaacagaaugga

SEQ ID NO: 201958 - RNA, 19 nt, Artificial Sequence
  Description of Artificial Sequence: Synthetic oligonucleotide
  Sense strand starting at position 507 of SEQ ID NO: 2603
acgugucaauuccuuuaaa

SEQ ID NO: 201959 - RNA, 19 nt, Artificial Sequence
  Description of Artificial Sequence: Synthetic oligonucleotide
  Antisense strand to SEQ ID NO: 201958
uuuaaaggaauugacacgu

SEQ ID NO: 201960 - RNA, 19 nt, Artificial Sequence
  Description of Artificial Sequence: Synthetic oligonucleotide
  Sense strand starting at position 535 of SEQ ID NO: 2603
aucugugcuuagcuuuaua

SEQ ID NO: 201961 - RNA, 19 nt, Artificial Sequence
  Description of Artificial Sequence: Synthetic oligonucleotide
  Antisense strand to SEQ ID NO: 201960
uauaaagcuaagcacagau

SEQ ID NO: 201962 - RNA, 19 nt, Artificial Sequence
  Description of Artificial Sequence: Synthetic oligonucleotide
  Sense strand starting at position 538 of SEQ ID NO: 2603
ugugcuuagcuuuauaaug

SEQ ID NO: 201963 - RNA, 19 nt, Artificial Sequence
  Description of Artificial Sequence: Synthetic oligonucleotide
  Antisense strand to SEQ ID NO: 201962
cauuauaaagcuaagcaca

SEQ ID NO: 201964 - RNA, 19 nt, Artificial Sequence
  Description of Artificial Sequence: Synthetic oligonucleotide
  Sense strand starting at position 602 of SEQ ID NO: 2603
ucaccagcgucuuuaaaug

SEQ ID NO: 201965 - RNA, 19 nt, Artificial Sequence
  Description of Artificial Sequence: Synthetic oligonucleotide
  Antisense strand to SEQ ID NO: 201964
cauuuaaagacgcugguga

SEQ ID NO: 201966 - RNA, 19 nt, Artificial Sequence
  Description of Artificial Sequence: Synthetic oligonucleotide
  Sense strand starting at position 626 of SEQ ID NO: 2603
uuugcaacugcaugacuau

SEQ ID NO: 201967 - RNA, 19 nt, Artificial Sequence
  Description of Artificial Sequence: Synthetic oligonucleotide
  Antisense strand to SEQ ID NO: 201966
auagucaugcaguugcaaa

SEQ ID NO: 201968 - RNA, 19 nt, Artificial Sequence
  Description of Artificial Sequence: Synthetic oligonucleotide
  Sense strand starting at position 660 of SEQ ID NO: 2603
uuuguaauauagucccaua

SEQ ID NO: 201969 - RNA, 19 nt, Artificial Sequence
  Description of Artificial Sequence: Synthetic oligonucleotide
  Antisense strand to SEQ ID NO: 201968
uaugggacuauauuacaaa

SEQ ID NO: 201970 - RNA, 19 nt, Artificial Sequence
  Description of Artificial Sequence: Synthetic oligonucleotide
  Sense strand starting at position 759 of SEQ ID NO: 2603
cgacgugcuccuucuguga

SEQ ID NO: 201971 - RNA, 19 nt, Artificial Sequence
  Description of Artificial Sequence: Synthetic oligonucleotide
  Antisense strand to SEQ ID NO: 201970
ucacagaaggagcacgucg

SEQ ID NO: 201972 - RNA, 19 nt, Artificial Sequence
  Description of Artificial Sequence: Synthetic oligonucleotide
  Sense strand starting at position 766 of SEQ ID NO: 2603
cuccuucugugaccugaaa

SEQ ID NO: 201973 - RNA, 19 nt, Artificial Sequence
  Description of Artificial Sequence: Synthetic oligonucleotide
  Antisense strand to SEQ ID NO: 201972
uuucaggucacagaaggag

SEQ ID NO: 201974 - RNA, 19 nt, Artificial Sequence
  Description of Artificial Sequence: Synthetic oligonucleotide
  Sense strand starting at position 850 of SEQ ID NO: 2603
gaucucuccugccuggaga

SEQ ID NO: 201975 - RNA, 19 nt, Artificial Sequence
  Description of Artificial Sequence: Synthetic oligonucleotide
  Antisense strand to SEQ ID NO: 201974
ucuccaggcaggagagauc

SEQ ID NO: 201976 - RNA, 19 nt, Artificial Sequence
  Description of Artificial Sequence: Synthetic oligonucleotide
  Sense strand starting at position 995 of SEQ ID NO: 2603
cugagaguaagcuggaguu

SEQ ID NO: 201977 - RNA, 19 nt, Artificial Sequence
  Description of Artificial Sequence: Synthetic oligonucleotide
  Antisense strand to SEQ ID NO: 201976
aacuccagcuuacucucag

SEQ ID NO: 201978 - RNA, 19 nt, Artificial Sequence
  Description of Artificial Sequence: Synthetic oligonucleotide
  Sense strand starting at position 1046 of SEQ ID NO: 2603
aggguuugacaccgcagaa

SEQ ID NO: 201979 - RNA, 19 nt, Artificial Sequence
  Description of Artificial Sequence: Synthetic oligonucleotide
  Antisense strand to SEQ ID NO: 201978
uucugcggugucaaacccu

SEQ ID NO: 201980 - RNA, 19 nt, Artificial Sequence
  Description of Artificial Sequence: Synthetic oligonucleotide
  Sense strand starting at position 1159 of SEQ ID NO: 2603
gacagcagaucguucgaau

SEQ ID NO: 201981 - RNA, 19 nt, Artificial Sequence
  Description of Artificial Sequence: Synthetic oligonucleotide
  Antisense strand to SEQ ID NO: 201980
auucgaacgaucugcuguc

SEQ ID NO: 201982 - RNA, 19 nt, Artificial Sequence
  Description of Artificial Sequence: Synthetic oligonucleotide
  Sense strand starting at position 1644 of SEQ ID NO: 2603
ggguguucaccauggucca

SEQ ID NO: 201983 - RNA, 19 nt, Artificial Sequence
  Description of Artificial Sequence: Synthetic oligonucleotide
  Antisense strand to SEQ ID NO: 201982
uggaccauggugaacaccc

SEQ ID NO: 201984 - RNA, 19 nt, Artificial Sequence
  Description of Artificial Sequence: Synthetic oligonucleotide
  Sense strand starting at position 2212 of SEQ ID NO: 2603
gacuaaucaggacgaguuc

SEQ ID NO: 201985 - RNA, 19 nt, Artificial Sequence
  Description of Artificial Sequence: Synthetic oligonucleotide
  Antisense strand to SEQ ID NO: 201984
gaacucguccugauuaguc

SEQ ID NO: 201986 - RNA, 19 nt, Artificial Sequence
  Description of Artificial Sequence: Synthetic oligonucleotide
  Sense strand starting at position 2369 of SEQ ID NO: 2603
cgaggagcugacugggaau

SEQ ID NO: 201987 - RNA, 19 nt, Artificial Sequence
  Description of Artificial Sequence: Synthetic oligonucleotide
  Antisense strand to SEQ ID NO: 201986
auucccagucagcuccucg

SEQ ID NO: 201988 - RNA, 19 nt, Artificial Sequence
  Description of Artificial Sequence: Synthetic oligonucleotide
  Sense strand starting at position 2450 of SEQ ID NO: 2603
gaaugacagcugugauaaa

SEQ ID NO: 201989 - RNA, 19 nt, Artificial Sequence
  Description of Artificial Sequence: Synthetic oligonucleotide
  Antisense strand to SEQ ID NO: 201988
uuuaucacagcugucauuc

SEQ ID NO: 201990 - RNA, 19 nt, Artificial Sequence
  Description of Artificial Sequence: Synthetic oligonucleotide
  Sense strand starting at position 2615 of SEQ ID NO: 2603
aagaaugaguacccuguaa

SEQ ID NO: 201991 - RNA, 19 nt, Artificial Sequence
  Description of Artificial Sequence: Synthetic oligonucleotide
  Antisense strand to SEQ ID NO: 201990
uuacaggguacucauucuu

SEQ ID NO: 201992 - RNA, 19 nt, Artificial Sequence
  Description of Artificial Sequence: Synthetic oligonucleotide
  Sense strand starting at position 2617 of SEQ ID NO: 2603
gaaugaguacccuguaaga

SEQ ID NO: 201993 - RNA, 19 nt, Artificial Sequence
  Description of Artificial Sequence: Synthetic oligonucleotide
  Antisense strand to SEQ ID NO: 201992
ucuuacaggguacucauuc

SEQ ID NO: 201994 - RNA, 19 nt, Artificial Sequence
  Description of Artificial Sequence: Synthetic oligonucleotide
  Sense strand starting at position 3136 of SEQ ID NO: 2603
aaagcucugcuguaaagua

SEQ ID NO: 201995 - RNA, 19 nt, Artificial Sequence
  Description of Artificial Sequence: Synthetic oligonucleotide
  Antisense strand to SEQ ID NO: 201994
uacuuuacagcagagcuuu

SEQ ID NO: 201996 - RNA, 19 nt, Artificial Sequence
  Description of Artificial Sequence: Synthetic oligonucleotide
  Sense strand starting at position 3141 of SEQ ID NO: 2603
ucugcuguaaaguaggaau

SEQ ID NO: 201997 - RNA, 19 nt, Artificial Sequence
  Description of Artificial Sequence: Synthetic oligonucleotide
  Antisense strand to SEQ ID NO: 201996
auuccuacuuuacagcaga

SEQ ID NO: 201998 - RNA, 19 nt, Artificial Sequence
  Description of Artificial Sequence: Synthetic oligonucleotide
  Sense strand starting at position 3143 of SEQ ID NO: 2603
ugcuguaaaguaggaauua

SEQ ID NO: 201999 - RNA, 19 nt, Artificial Sequence
  Description of Artificial Sequence: Synthetic oligonucleotide
  Antisense strand to SEQ ID NO: 201998
uaauuccuacuuuacagca

SEQ ID NO: 202000 - RNA, 19 nt, Artificial Sequence
  Description of Artificial Sequence: Synthetic oligonucleotide
  Sense strand starting at position 3190 of SEQ ID NO: 2603
ccgggcuuacgccuguaau

SEQ ID NO: 202001 - RNA, 19 nt, Artificial Sequence
  Description of Artificial Sequence: Synthetic oligonucleotide
  Antisense strand to SEQ ID NO: 202000
auuacaggcguaagcccgg

SEQ ID NO: 202002 - RNA, 19 nt, Artificial Sequence
  Description of Artificial Sequence: Synthetic oligonucleotide
  Sense strand starting at position 3506 of SEQ ID NO: 2603
cuguuuauugggcaggagu

SEQ ID NO: 202003 - RNA, 19 nt, Artificial Sequence
  Description of Artificial Sequence: Synthetic oligonucleotide
  Antisense strand to SEQ ID NO: 202002
acuccugcccaauaaacag

SEQ ID NO: 202004 - RNA, 19 nt, Artificial Sequence
  Description of Artificial Sequence: Synthetic oligonucleotide
  Sense strand starting at position 3508 of SEQ ID NO: 2603
guuuauugggcaggaguuu

SEQ ID NO: 202005 - RNA, 19 nt, Artificial Sequence
  Description of Artificial Sequence: Synthetic oligonucleotide
  Antisense strand to SEQ ID NO: 202004
aaacuccugcccaauaaac

SEQ ID NO: 202006 - RNA, 19 nt, Artificial Sequence
  Description of Artificial Sequence: Synthetic oligonucleotide
  Sense strand starting at position 3509 of SEQ ID NO: 2603
uuuauugggcaggaguuua

SEQ ID NO: 202007 - RNA, 19 nt, Artificial Sequence
  Description of Artificial Sequence: Synthetic oligonucleotide
  Antisense strand to SEQ ID NO: 202006
uaaacuccugcccaauaaa

SEQ ID NO: 202008 - RNA, 19 nt, Artificial Sequence
  Description of Artificial Sequence: Synthetic oligonucleotide
  Sense strand starting at position 3603 of SEQ ID NO: 2603
agagcauucuggccaucua

SEQ ID NO: 202009 - RNA, 19 nt, Artificial Sequence
  Description of Artificial Sequence: Synthetic oligonucleotide
  Antisense strand to SEQ ID NO: 202008
uagauggccagaaugcucu

SEQ ID NO: 202010 - RNA, 19 nt, Artificial Sequence
  Description of Artificial Sequence: Synthetic oligonucleotide
  Sense strand starting at position 3685 of SEQ ID NO: 2603
caguauggauuccagaaua

SEQ ID NO: 202011 - RNA, 19 nt, Artificial Sequence
  Description of Artificial Sequence: Synthetic oligonucleotide
  Antisense strand to SEQ ID NO: 202010
uauucuggaauccauacug

SEQ ID NO: 202012 - RNA, 19 nt, Artificial Sequence
  Description of Artificial Sequence: Synthetic oligonucleotide
  Sense strand starting at position 3759 of SEQ ID NO: 2603
gccacuuagaguugauguc

SEQ ID NO: 202013 - RNA, 19 nt, Artificial Sequence
  Description of Artificial Sequence: Synthetic oligonucleotide
  Antisense strand to SEQ ID NO: 202012
gacaucaacucuaaguggc

SEQ ID NO: 202014 - RNA, 19 nt, Artificial Sequence
  Description of Artificial Sequence: Synthetic oligonucleotide
  Sense strand starting at position 3765 of SEQ ID NO: 2603
uagaguugaugucuuaaug

SEQ ID NO: 202015 - RNA, 19 nt, Artificial Sequence
  Description of Artificial Sequence: Synthetic oligonucleotide
  Antisense strand to SEQ ID NO: 202014
cauuaagacaucaacucua

SEQ ID NO: 202016 - RNA, 19 nt, Artificial Sequence
  Description of Artificial Sequence: Synthetic oligonucleotide
  Sense strand starting at position 3773 of SEQ ID NO: 2603
augucuuaaugggugggau

SEQ ID NO: 202017 - RNA, 19 nt, Artificial Sequence
  Description of Artificial Sequence: Synthetic oligonucleotide
  Antisense strand to SEQ ID NO: 202016
aucccacccauuaagacau

SEQ ID NO: 202018 - RNA, 19 nt, Artificial Sequence
  Description of Artificial Sequence: Synthetic oligonucleotide
  Sense strand starting at position 3774 of SEQ ID NO: 2603
ugucuuaaugggugggauu

SEQ ID NO: 202019 - RNA, 19 nt, Artificial Sequence
  Description of Artificial Sequence: Synthetic oligonucleotide
  Antisense strand to SEQ ID NO: 202018
aaucccacccauuaagaca

SEQ ID NO: 202020 - RNA, 19 nt, Artificial Sequence
  Description of Artificial Sequence: Synthetic oligonucleotide
  Sense strand starting at position 3775 of SEQ ID NO: 2603
gucuuaaugggugggauuc

SEQ ID NO: 202021 - RNA, 19 nt, Artificial Sequence
  Description of Artificial Sequence: Synthetic oligonucleotide
  Antisense strand to SEQ ID NO: 202020
gaaucccacccauuaagac

SEQ ID NO: 202022 - RNA, 19 nt, Artificial Sequence
  Description of Artificial Sequence: Synthetic oligonucleotide
  Sense strand starting at position 3786 of SEQ ID NO: 2603
ugggauuccucauaaugga

SEQ ID NO: 202023 - RNA, 19 nt, Artificial Sequence
  Description of Artificial Sequence: Synthetic oligonucleotide
  Antisense strand to SEQ ID NO: 202022
uccauuaugaggaauccca

SEQ ID NO: 202024 - RNA, 19 nt, Artificial Sequence
  Description of Artificial Sequence: Synthetic oligonucleotide
  Sense strand starting at position 3824 of SEQ ID NO: 2603
gggucaaguagcuaucaca

SEQ ID NO: 202025 - RNA, 19 nt, Artificial Sequence
  Description of Artificial Sequence: Synthetic oligonucleotide
  Antisense strand to SEQ ID NO: 202024
ugugauagcuacuugaccc

SEQ ID NO: 202026 - RNA, 19 nt, Artificial Sequence
  Description of Artificial Sequence: Synthetic oligonucleotide
  Sense strand starting at position 3864 of SEQ ID NO: 2603
uaucaauuccuguggaaag

SEQ ID NO: 202027 - RNA, 19 nt, Artificial Sequence
  Description of Artificial Sequence: Synthetic oligonucleotide
  Antisense strand to SEQ ID NO: 202026
cuuuccacaggaauugaua

SEQ ID NO: 202028 - RNA, 19 nt, Artificial Sequence
  Description of Artificial Sequence: Synthetic oligonucleotide
  Sense strand starting at position 47 of SEQ ID NO: 2604
acuuaauggcaguagcauu

SEQ ID NO: 202029 - RNA, 19 nt, Artificial Sequence
  Description of Artificial Sequence: Synthetic oligonucleotide
  Antisense strand to SEQ ID NO: 202028
aaugcuacugccauuaagu

SEQ ID NO: 202030 - RNA, 19 nt, Artificial Sequence
  Description of Artificial Sequence: Synthetic oligonucleotide
  Sense strand starting at position 110 of SEQ ID NO: 2604
caugguaaauuuggaagau

SEQ ID NO: 202031 - RNA, 19 nt, Artificial Sequence
  Description of Artificial Sequence: Synthetic oligonucleotide
  Antisense strand to SEQ ID NO: 202030
aucuuccaaauuuaccaug

SEQ ID NO: 202032 - RNA, 19 nt, Artificial Sequence
  Description of Artificial Sequence: Synthetic oligonucleotide
  Sense strand starting at position 111 of SEQ ID NO: 2604
augguaaauuuggaagauu

SEQ ID NO: 202033 - RNA, 19 nt, Artificial Sequence
  Description of Artificial Sequence: Synthetic oligonucleotide
  Antisense strand to SEQ ID NO: 202032
aaucuuccaaauuuaccau

SEQ ID NO: 202034 - RNA, 19 nt, Artificial Sequence
  Description of Artificial Sequence: Synthetic oligonucleotide
  Sense strand starting at position 142 of SEQ ID NO: 2604
uuuacacaucacgguaaau

SEQ ID NO: 202035 - RNA, 19 nt, Artificial Sequence
  Description of Artificial Sequence: Synthetic oligonucleotide
  Antisense strand to SEQ ID NO: 202034
auuuaccgugauguguaaa

SEQ ID NO: 202036 - RNA, 19 nt, Artificial Sequence
  Description of Artificial Sequence: Synthetic oligonucleotide
  Sense strand starting at position 152 of SEQ ID NO: 2604
acgguaaauuuggaagauu

SEQ ID NO: 202037 - RNA, 19 nt, Artificial Sequence
  Description of Artificial Sequence: Synthetic oligonucleotide
  Antisense strand to SEQ ID NO: 202036
aaucuuccaaauuuaccgu

SEQ ID NO: 202038 - RNA, 19 nt, Artificial Sequence
  Description of Artificial Sequence: Synthetic oligonucleotide
  Sense strand starting at position 190 of SEQ ID NO: 2604
agacgaggauucuuaacua

SEQ ID NO: 202039 - RNA, 19 nt, Artificial Sequence
  Description of Artificial Sequence: Synthetic oligonucleotide
  Antisense strand to SEQ ID NO: 202038
uaguuaagaauccucgucu

SEQ ID NO: 202040 - RNA, 19 nt, Artificial Sequence
  Description of Artificial Sequence: Synthetic oligonucleotide
  Sense strand starting at position 382 of SEQ ID NO: 2604
guguuuguacuuuaagaca

SEQ ID NO: 202041 - RNA, 19 nt, Artificial Sequence
  Description of Artificial Sequence: Synthetic oligonucleotide
  Antisense strand to SEQ ID NO: 202040
ugucuuaaaguacaaacac

SEQ ID NO: 202042 - RNA, 19 nt, Artificial Sequence
  Description of Artificial Sequence: Synthetic oligonucleotide
  Sense strand starting at position 625 of SEQ ID NO: 2604
ugugaccgucuccauaauu

SEQ ID NO: 202043 - RNA, 19 nt, Artificial Sequence
  Description of Artificial Sequence: Synthetic oligonucleotide
  Antisense strand to SEQ ID NO: 202042
aauuauggagacggucaca

SEQ ID NO: 202044 - RNA, 19 nt, Artificial Sequence
  Description of Artificial Sequence: Synthetic oligonucleotide
  Sense strand starting at position 687 of SEQ ID NO: 2604
auuagucaaucccuuagua

SEQ ID NO: 202045 - RNA, 19 nt, Artificial Sequence
  Description of Artificial Sequence: Synthetic oligonucleotide
  Antisense strand to SEQ ID NO: 202044
uacuaagggauugacuaau

SEQ ID NO: 202046 - RNA, 19 nt, Artificial Sequence
  Description of Artificial Sequence: Synthetic oligonucleotide
  Sense strand starting at position 709 of SEQ ID NO: 2604
guuaaauaauagccaggaa

SEQ ID NO: 202047 - RNA, 19 nt, Artificial Sequence
  Description of Artificial Sequence: Synthetic oligonucleotide
  Antisense strand to SEQ ID NO: 202046
uuccuggcuauuauuuaac

SEQ ID NO: 202048 - RNA, 19 nt, Artificial Sequence
  Description of Artificial Sequence: Synthetic oligonucleotide
  Sense strand starting at position 740 of SEQ ID NO: 2604
ccugaagguacauguaaag

SEQ ID NO: 202049 - RNA, 19 nt, Artificial Sequence
  Description of Artificial Sequence: Synthetic oligonucleotide
  Antisense strand to SEQ ID NO: 202048
cuuuacauguaccuucagg

SEQ ID NO: 202050 - RNA, 19 nt, Artificial Sequence
  Description of Artificial Sequence: Synthetic oligonucleotide
  Sense strand starting at position 997 of SEQ ID NO: 2604
gguuaaacgagcgaacaua

SEQ ID NO: 202051 - RNA, 19 nt, Artificial Sequence
  Description of Artificial Sequence: Synthetic oligonucleotide
  Antisense strand to SEQ ID NO: 202050
uauguucgcucguuuaacc

SEQ ID NO: 202052 - RNA, 19 nt, Artificial Sequence
  Description of Artificial Sequence: Synthetic oligonucleotide
  Sense strand starting at position 1050 of SEQ ID NO: 2604
ucccuagggcauugaugaa

SEQ ID NO: 202053 - RNA, 19 nt, Artificial Sequence
  Description of Artificial Sequence: Synthetic oligonucleotide
  Antisense strand to SEQ ID NO: 202052
uucaucaaugcccuaggga

SEQ ID NO: 202054 - RNA, 19 nt, Artificial Sequence
  Description of Artificial Sequence: Synthetic oligonucleotide
  Sense strand starting at position 1251 of SEQ ID NO: 2604
cuagguucuccacaccauu

SEQ ID NO: 202055 - RNA, 19 nt, Artificial Sequence
  Description of Artificial Sequence: Synthetic oligonucleotide
  Antisense strand to SEQ ID NO: 202054
aaugguguggagaaccuag

SEQ ID NO: 202056 - RNA, 19 nt, Artificial Sequence
  Description of Artificial Sequence: Synthetic oligonucleotide
  Sense strand starting at position 1294 of SEQ ID NO: 2604
cagggacccugauucuauu

SEQ ID NO: 202057 - RNA, 19 nt, Artificial Sequence
  Description of Artificial Sequence: Synthetic oligonucleotide
  Antisense strand to SEQ ID NO: 202056
aauagaaucagggucccug

SEQ ID NO: 202058 - RNA, 19 nt, Artificial Sequence
  Description of Artificial Sequence: Synthetic oligonucleotide
  Sense strand starting at position 1364 of SEQ ID NO: 2604
ccucaaucgcuugaauacu

SEQ ID NO: 202059 - RNA, 19 nt, Artificial Sequence
  Description of Artificial Sequence: Synthetic oligonucleotide
  Antisense strand to SEQ ID NO: 202058
aguauucaagcgauugagg

SEQ ID NO: 202060 - RNA, 19 nt, Artificial Sequence
  Description of Artificial Sequence: Synthetic oligonucleotide
  Sense strand starting at position 1555 of SEQ ID NO: 2604
uuuccucugccuuaggaaa

SEQ ID NO: 202061 - RNA, 19 nt, Artificial Sequence
  Description of Artificial Sequence: Synthetic oligonucleotide
  Antisense strand to SEQ ID NO: 202060
uuuccuaaggcagaggaaa

SEQ ID NO: 202062 - RNA, 19 nt, Artificial Sequence
  Description of Artificial Sequence: Synthetic oligonucleotide
  Sense strand starting at position 1772 of SEQ ID NO: 2604
ccauguuagcgccuucuuu

SEQ ID NO: 202063 - RNA, 19 nt, Artificial Sequence
  Description of Artificial Sequence: Synthetic oligonucleotide
  Antisense strand to SEQ ID NO: 202062
aaagaaggcgcuaacaugg

SEQ ID NO: 202064 - RNA, 19 nt, Artificial Sequence
  Description of Artificial Sequence: Synthetic oligonucleotide
  Sense strand starting at position 1982 of SEQ ID NO: 2604
gcgagaucggacugacaac

SEQ ID NO: 202065 - RNA, 19 nt, Artificial Sequence
  Description of Artificial Sequence: Synthetic oligonucleotide
  Antisense strand to SEQ ID NO: 202064
guugucaguccgaucucgc

SEQ ID NO: 202066 - RNA, 19 nt, Artificial Sequence
  Description of Artificial Sequence: Synthetic oligonucleotide
  Sense strand starting at position 2708 of SEQ ID NO: 2604
aucagaggccucugugaga

SEQ ID NO: 202067 - RNA, 19 nt, Artificial Sequence
  Description of Artificial Sequence: Synthetic oligonucleotide
  Antisense strand to SEQ ID NO: 202066
ucucacagaggccucugau

SEQ ID NO: 202068 - RNA, 19 nt, Artificial Sequence
  Description of Artificial Sequence: Synthetic oligonucleotide
  Sense strand starting at position 2876 of SEQ ID NO: 2604
gagaguuaaugagccugaa

SEQ ID NO: 202069 - RNA, 19 nt, Artificial Sequence
  Description of Artificial Sequence: Synthetic oligonucleotide
  Antisense strand to SEQ ID NO: 202068
uucaggcucauuaacucuc

SEQ ID NO: 202070 - RNA, 19 nt, Artificial Sequence
  Description of Artificial Sequence: Synthetic oligonucleotide
  Sense strand starting at position 2879 of SEQ ID NO: 2604
aguuaaugagccugaaguu

SEQ ID NO: 202071 - RNA, 19 nt, Artificial Sequence
  Description of Artificial Sequence: Synthetic oligonucleotide
  Antisense strand to SEQ ID NO: 202070
aacuucaggcucauuaacu

SEQ ID NO: 202072 - RNA, 19 nt, Artificial Sequence
  Description of Artificial Sequence: Synthetic oligonucleotide
  Sense strand starting at position 2880 of SEQ ID NO: 2604
guuaaugagccugaaguuc

SEQ ID NO: 202073 - RNA, 19 nt, Artificial Sequence
  Description of Artificial Sequence: Synthetic oligonucleotide
  Antisense strand to SEQ ID NO: 202072
gaacuucaggcucauuaac

SEQ ID NO: 202074 - RNA, 19 nt, Artificial Sequence
  Description of Artificial Sequence: Synthetic oligonucleotide
  Sense strand starting at position 2927 of SEQ ID NO: 2604
uuguaauggcauugacauu

SEQ ID NO: 202075 - RNA, 19 nt, Artificial Sequence
  Description of Artificial Sequence: Synthetic oligonucleotide
  Antisense strand to SEQ ID NO: 202074
aaugucaaugccauuacaa

SEQ ID NO: 202076 - RNA, 19 nt, Artificial Sequence
  Description of Artificial Sequence: Synthetic oligonucleotide
  Sense strand starting at position 3082 of SEQ ID NO: 2604
guaacaguaauguaguagu

SEQ ID NO: 202077 - RNA, 19 nt, Artificial Sequence
  Description of Artificial Sequence: Synthetic oligonucleotide
  Antisense strand to SEQ ID NO: 202076
acuacuacauuacuguuac

SEQ ID NO: 202078 - RNA, 19 nt, Artificial Sequence
  Description of Artificial Sequence: Synthetic oligonucleotide
  Sense strand starting at position 3093 of SEQ ID NO: 2604
guaguagugccauuguagu

SEQ ID NO: 202079 - RNA, 19 nt, Artificial Sequence
  Description of Artificial Sequence: Synthetic oligonucleotide
  Antisense strand to SEQ ID NO: 202078
acuacaauggcacuacuac

SEQ ID NO: 202080 - RNA, 19 nt, Artificial Sequence
  Description of Artificial Sequence: Synthetic oligonucleotide
  Sense strand starting at position 3192 of SEQ ID NO: 2604
cacaauuguuaggucuaga

SEQ ID NO: 202081 - RNA, 19 nt, Artificial Sequence
  Description of Artificial Sequence: Synthetic oligonucleotide
  Antisense strand to SEQ ID NO: 202080
ucuagaccuaacaauugug

SEQ ID NO: 202082 - RNA, 19 nt, Artificial Sequence
  Description of Artificial Sequence: Synthetic oligonucleotide
  Sense strand starting at position 3195 of SEQ ID NO: 2604
aauuguuaggucuagaacg

SEQ ID NO: 202083 - RNA, 19 nt, Artificial Sequence
  Description of Artificial Sequence: Synthetic oligonucleotide
  Antisense strand to SEQ ID NO: 202082
cguucuagaccuaacaauu

SEQ ID NO: 202084 - RNA, 19 nt, Artificial Sequence
  Description of Artificial Sequence: Synthetic oligonucleotide
  Sense strand starting at position 3202 of SEQ ID NO: 2604
aggucuagaacgcauugau

SEQ ID NO: 202085 - RNA, 19 nt, Artificial Sequence
  Description of Artificial Sequence: Synthetic oligonucleotide
  Antisense strand to SEQ ID NO: 202084
aucaaugcguucuagaccu

SEQ ID NO: 202086 - RNA, 19 nt, Artificial Sequence
  Description of Artificial Sequence: Synthetic oligonucleotide
  Sense strand starting at position 3205 of SEQ ID NO: 2604
ucuagaacgcauugauuaa

SEQ ID NO: 202087 - RNA, 19 nt, Artificial Sequence
  Description of Artificial Sequence: Synthetic oligonucleotide
  Antisense strand to SEQ ID NO: 202086
uuaaucaaugcguucuaga

SEQ ID NO: 202088 - RNA, 19 nt, Artificial Sequence
  Description of Artificial Sequence: Synthetic oligonucleotide
  Sense strand starting at position 3296 of SEQ ID NO: 2604
aaagaaguuugggucaauu

SEQ ID NO: 202089 - RNA, 19 nt, Artificial Sequence
  Description of Artificial Sequence: Synthetic oligonucleotide
  Antisense strand to SEQ ID NO: 202088
aauugacccaaacuucuuu

SEQ ID NO: 202090 - RNA, 19 nt, Artificial Sequence
  Description of Artificial Sequence: Synthetic oligonucleotide
  Sense strand starting at position 3436 of SEQ ID NO: 2604
guuaguuaucuacaugaug

SEQ ID NO: 202091 - RNA, 19 nt, Artificial Sequence
  Description of Artificial Sequence: Synthetic oligonucleotide
  Antisense strand to SEQ ID NO: 202090
caucauguagauaacuaac

SEQ ID NO: 202092 - RNA, 19 nt, Artificial Sequence
  Description of Artificial Sequence: Synthetic oligonucleotide
  Sense strand starting at position 3439 of SEQ ID NO: 2604
aguuaucuacaugaugcau

SEQ ID NO: 202093 - RNA, 19 nt, Artificial Sequence
  Description of Artificial Sequence: Synthetic oligonucleotide
  Antisense strand to SEQ ID NO: 202092
augcaucauguagauaacu

SEQ ID NO: 202094 - RNA, 19 nt, Artificial Sequence
  Description of Artificial Sequence: Synthetic oligonucleotide
  Sense strand starting at position 3447 of SEQ ID NO: 2604
acaugaugcauucgagaaa

SEQ ID NO: 202095 - RNA, 19 nt, Artificial Sequence
  Description of Artificial Sequence: Synthetic oligonucleotide
  Antisense strand to SEQ ID NO: 202094
uuucucgaaugcaucaugu

SEQ ID NO: 202096 - RNA, 19 nt, Artificial Sequence
  Description of Artificial Sequence: Synthetic oligonucleotide
  Sense strand starting at position 3450 of SEQ ID NO: 2604
ugaugcauucgagaaacac

SEQ ID NO: 202097 - RNA, 19 nt, Artificial Sequence
  Description of Artificial Sequence: Synthetic oligonucleotide
  Antisense strand to SEQ ID NO: 202096
guguuucucgaaugcauca

SEQ ID NO: 202098 - RNA, 19 nt, Artificial Sequence
  Description of Artificial Sequence: Synthetic oligonucleotide
  Sense strand starting at position 3510 of SEQ ID NO: 2604
aagaacuguuuagugauau

SEQ ID NO: 202099 - RNA, 19 nt, Artificial Sequence
  Description of Artificial Sequence: Synthetic oligonucleotide
  Antisense strand to SEQ ID NO: 202098
auaucacuaaacaguucuu

SEQ ID NO: 202100 - RNA, 19 nt, Artificial Sequence
  Description of Artificial Sequence: Synthetic oligonucleotide
  Sense strand starting at position 3516 of SEQ ID NO: 2604
uguuuagugauaugaacag

SEQ ID NO: 202101 - RNA, 19 nt, Artificial Sequence
  Description of Artificial Sequence: Synthetic oligonucleotide
  Antisense strand to SEQ ID NO: 202100
cuguucauaucacuaaaca

SEQ ID NO: 202102 - RNA, 19 nt, Artificial Sequence
  Description of Artificial Sequence: Synthetic oligonucleotide
  Sense strand starting at position 3634 of SEQ ID NO: 2604
ggaaacuaugccgaucugu

SEQ ID NO: 202103 - RNA, 19 nt, Artificial Sequence
  Description of Artificial Sequence: Synthetic oligonucleotide
  Antisense strand to SEQ ID NO: 202102
acagaucggcauaguuucc

SEQ ID NO: 202104 - RNA, 19 nt, Artificial Sequence
  Description of Artificial Sequence: Synthetic oligonucleotide
  Sense strand starting at position 3802 of SEQ ID NO: 2604
gucugauuccaugaacuug

SEQ ID NO: 202105 - RNA, 19 nt, Artificial Sequence
  Description of Artificial Sequence: Synthetic oligonucleotide
  Antisense strand to SEQ ID NO: 202104
caaguucauggaaucagac

SEQ ID NO: 202106 - RNA, 19 nt, Artificial Sequence
  Description of Artificial Sequence: Synthetic oligonucleotide
  Sense strand starting at position 3939 of SEQ ID NO: 2604
gcaggaaacuucuuguaga

SEQ ID NO: 202107 - RNA, 19 nt, Artificial Sequence
  Description of Artificial Sequence: Synthetic oligonucleotide
  Antisense strand to SEQ ID NO: 202106
ucuacaagaaguuuccugc

SEQ ID NO: 202108 - RNA, 19 nt, Artificial Sequence
  Description of Artificial Sequence: Synthetic oligonucleotide
  Sense strand starting at position 297 of SEQ ID NO: 2605
cucaguuccaugugugaaa

SEQ ID NO: 202109 - RNA, 19 nt, Artificial Sequence
  Description of Artificial Sequence: Synthetic oligonucleotide
  Antisense strand to SEQ ID NO: 202108
uuucacacauggaacugag

SEQ ID NO: 202110 - RNA, 19 nt, Artificial Sequence
  Description of Artificial Sequence: Synthetic oligonucleotide
  Sense strand starting at position 512 of SEQ ID NO: 2605
ugugauacuugugauuuag

SEQ ID NO: 202111 - RNA, 19 nt, Artificial Sequence
  Description of Artificial Sequence: Synthetic oligonucleotide
  Antisense strand to SEQ ID NO: 202110
cuaaaucacaaguaucaca

SEQ ID NO: 202112 - RNA, 19 nt, Artificial Sequence
  Description of Artificial Sequence: Synthetic oligonucleotide
  Sense strand starting at position 520 of SEQ ID NO: 2605
uugugauuuaguuggucug

SEQ ID NO: 202113 - RNA, 19 nt, Artificial Sequence
  Description of Artificial Sequence: Synthetic oligonucleotide
  Antisense strand to SEQ ID NO: 202112
cagaccaacuaaaucacaa

SEQ ID NO: 202114 - RNA, 19 nt, Artificial Sequence
  Description of Artificial Sequence: Synthetic oligonucleotide
  Sense strand starting at position 571 of SEQ ID NO: 2605
auccauaggugauucuaau

SEQ ID NO: 202115 - RNA, 19 nt, Artificial Sequence
  Description of Artificial Sequence: Synthetic oligonucleotide
  Antisense strand to SEQ ID NO: 202114
auuagaaucaccuauggau

SEQ ID NO: 202116 - RNA, 19 nt, Artificial Sequence
  Description of Artificial Sequence: Synthetic oligonucleotide
  Sense strand starting at position 581 of SEQ ID NO: 2605
gauucuaauguggagcuaa

SEQ ID NO: 202117 - RNA, 19 nt, Artificial Sequence
  Description of Artificial Sequence: Synthetic oligonucleotide
  Antisense strand to SEQ ID NO: 202116
uuagcuccacauuagaauc

SEQ ID NO: 202118 - RNA, 19 nt, Artificial Sequence
  Description of Artificial Sequence: Synthetic oligonucleotide
  Sense strand starting at position 620 of SEQ ID NO: 2605
gcacaaucagaaugcaaua

SEQ ID NO: 202119 - RNA, 19 nt, Artificial Sequence
  Description of Artificial Sequence: Synthetic oligonucleotide
  Antisense strand to SEQ ID NO: 202118
uauugcauucugauugugc

SEQ ID NO: 202120 - RNA, 19 nt, Artificial Sequence
  Description of Artificial Sequence: Synthetic oligonucleotide
  Sense strand starting at position 681 of SEQ ID NO: 2605
uugagaaagucgucagguu

SEQ ID NO: 202121 - RNA, 19 nt, Artificial Sequence
  Description of Artificial Sequence: Synthetic oligonucleotide
  Antisense strand to SEQ ID NO: 202120
aaccugacgacuuucucaa

SEQ ID NO: 202122 - RNA, 19 nt, Artificial Sequence
  Description of Artificial Sequence: Synthetic oligonucleotide
  Sense strand starting at position 682 of SEQ ID NO: 2605
ugagaaagucgucagguuu

SEQ ID NO: 202123 - RNA, 19 nt, Artificial Sequence
  Description of Artificial Sequence: Synthetic oligonucleotide
  Antisense strand to SEQ ID NO: 202122
aaaccugacgacuuucuca

SEQ ID NO: 202124 - RNA, 19 nt, Artificial Sequence
  Description of Artificial Sequence: Synthetic oligonucleotide
  Sense strand starting at position 1034 of SEQ ID NO: 2605
uggugaagcgcgucuguaa

SEQ ID NO: 202125 - RNA, 19 nt, Artificial Sequence
  Description of Artificial Sequence: Synthetic oligonucleotide
  Antisense strand to SEQ ID NO: 202124
uuacagacgcgcuucacca

SEQ ID NO: 202126 - RNA, 19 nt, Artificial Sequence
  Description of Artificial Sequence: Synthetic oligonucleotide
  Sense strand starting at position 1035 of SEQ ID NO: 2605
ggugaagcgcgucuguaau

SEQ ID NO: 202127 - RNA, 19 nt, Artificial Sequence
  Description of Artificial Sequence: Synthetic oligonucleotide
  Antisense strand to SEQ ID NO: 202126
auuacagacgcgcuucacc

SEQ ID NO: 202128 - RNA, 19 nt, Artificial Sequence
  Description of Artificial Sequence: Synthetic oligonucleotide
  Sense strand starting at position 1248 of SEQ ID NO: 2605
guuccagugcauugagaag

SEQ ID NO: 202129 - RNA, 19 nt, Artificial Sequence
  Description of Artificial Sequence: Synthetic oligonucleotide
  Antisense strand to SEQ ID NO: 202128
cuucucaaugcacuggaac

SEQ ID NO: 202130 - RNA, 19 nt, Artificial Sequence
  Description of Artificial Sequence: Synthetic oligonucleotide
  Sense strand starting at position 1259 of SEQ ID NO: 2605
uugagaaggcaauguuaau

SEQ ID NO: 202131 - RNA, 19 nt, Artificial Sequence
  Description of Artificial Sequence: Synthetic oligonucleotide
  Antisense strand to SEQ ID NO: 202130
auuaacauugccuucucaa

SEQ ID NO: 202132 - RNA, 19 nt, Artificial Sequence
  Description of Artificial Sequence: Synthetic oligonucleotide
  Sense strand starting at position 1274 of SEQ ID NO: 2605
uaauucugcgacugaaagu

SEQ ID NO: 202133 - RNA, 19 nt, Artificial Sequence
  Description of Artificial Sequence: Synthetic oligonucleotide
  Antisense strand to SEQ ID NO: 202132
acuuucagucgcagaauua

SEQ ID NO: 202134 - RNA, 19 nt, Artificial Sequence
  Description of Artificial Sequence: Synthetic oligonucleotide
  Sense strand starting at position 1354 of SEQ ID NO: 2605
auaagcauuguaugagcua

SEQ ID NO: 202135 - RNA, 19 nt, Artificial Sequence
  Description of Artificial Sequence: Synthetic oligonucleotide
  Antisense strand to SEQ ID NO: 202134
uagcucauacaaugcuuau

SEQ ID NO: 202136 - RNA, 19 nt, Artificial Sequence
  Description of Artificial Sequence: Synthetic oligonucleotide
  Sense strand starting at position 1419 of SEQ ID NO: 2605
cguacaauuuaauagggaa

SEQ ID NO: 202137 - RNA, 19 nt, Artificial Sequence
  Description of Artificial Sequence: Synthetic oligonucleotide
  Antisense strand to SEQ ID NO: 202136
uucccuauuaaauuguacg

SEQ ID NO: 202138 - RNA, 19 nt, Artificial Sequence
  Description of Artificial Sequence: Synthetic oligonucleotide
  Sense strand starting at position 2281 of SEQ ID NO: 2605
guugucucaucuguaaaug

SEQ ID NO: 202139 - RNA, 19 nt, Artificial Sequence
  Description of Artificial Sequence: Synthetic oligonucleotide
  Antisense strand to SEQ ID NO: 202138
cauuuacagaugagacaac

SEQ ID NO: 202140 - RNA, 19 nt, Artificial Sequence
  Description of Artificial Sequence: Synthetic oligonucleotide
  Sense strand starting at position 2320 of SEQ ID NO: 2605
cucagaagguugucacgaa

SEQ ID NO: 202141 - RNA, 19 nt, Artificial Sequence
  Description of Artificial Sequence: Synthetic oligonucleotide
  Antisense strand to SEQ ID NO: 202140
uucgugacaaccuucugag

SEQ ID NO: 202142 - RNA, 19 nt, Artificial Sequence
  Description of Artificial Sequence: Synthetic oligonucleotide
  Sense strand starting at position 2324 of SEQ ID NO: 2605
gaagguugucacgaauagu

SEQ ID NO: 202143 - RNA, 19 nt, Artificial Sequence
  Description of Artificial Sequence: Synthetic oligonucleotide
  Antisense strand to SEQ ID NO: 202142
acuauucgugacaaccuuc

SEQ ID NO: 202144 - RNA, 19 nt, Artificial Sequence
  Description of Artificial Sequence: Synthetic oligonucleotide
  Sense strand starting at position 2327 of SEQ ID NO: 2605
gguugucacgaauaguaaa

SEQ ID NO: 202145 - RNA, 19 nt, Artificial Sequence
  Description of Artificial Sequence: Synthetic oligonucleotide
  Antisense strand to SEQ ID NO: 202144
uuuacuauucgugacaacc

SEQ ID NO: 202146 - RNA, 19 nt, Artificial Sequence
  Description of Artificial Sequence: Synthetic oligonucleotide
  Sense strand starting at position 2717 of SEQ ID NO: 2605
acacccuuaguguguaaga

SEQ ID NO: 202147 - RNA, 19 nt, Artificial Sequence
  Description of Artificial Sequence: Synthetic oligonucleotide
  Antisense strand to SEQ ID NO: 202146
ucuuacacacuaagggugu

SEQ ID NO: 202148 - RNA, 19 nt, Artificial Sequence
  Description of Artificial Sequence: Synthetic oligonucleotide
  Sense strand starting at position 2719 of SEQ ID NO: 2605
acccuuaguguguaagaga

SEQ ID NO: 202149 - RNA, 19 nt, Artificial Sequence
  Description of Artificial Sequence: Synthetic oligonucleotide
  Antisense strand to SEQ ID NO: 202148
ucucuuacacacuaagggu

SEQ ID NO: 202150 - RNA, 19 nt, Artificial Sequence
  Description of Artificial Sequence: Synthetic oligonucleotide
  Sense strand starting at position 2795 of SEQ ID NO: 2605
accugucuuugauuguuaa

SEQ ID NO: 202151 - RNA, 19 nt, Artificial Sequence
  Description of Artificial Sequence: Synthetic oligonucleotide
  Antisense strand to SEQ ID NO: 202150
uuaacaaucaaagacaggu

SEQ ID NO: 202152 - RNA, 19 nt, Artificial Sequence
  Description of Artificial Sequence: Synthetic oligonucleotide
  Sense strand starting at position 2796 of SEQ ID NO: 2605
ccugucuuugauuguuaag

SEQ ID NO: 202153 - RNA, 19 nt, Artificial Sequence
  Description of Artificial Sequence: Synthetic oligonucleotide
  Antisense strand to SEQ ID NO: 202152
cuuaacaaucaaagacagg

SEQ ID NO: 202154 - RNA, 19 nt, Artificial Sequence
  Description of Artificial Sequence: Synthetic oligonucleotide
  Sense strand starting at position 2934 of SEQ ID NO: 2605
uuuguuugcaauggagaag

SEQ ID NO: 202155 - RNA, 19 nt, Artificial Sequence
  Description of Artificial Sequence: Synthetic oligonucleotide
  Antisense strand to SEQ ID NO: 202154
cuucuccauugcaaacaaa

SEQ ID NO: 202156 - RNA, 19 nt, Artificial Sequence
  Description of Artificial Sequence: Synthetic oligonucleotide
  Sense strand starting at position 2968 of SEQ ID NO: 2605
agcuaagaaagaugugaau

SEQ ID NO: 202157 - RNA, 19 nt, Artificial Sequence
  Description of Artificial Sequence: Synthetic oligonucleotide
  Antisense strand to SEQ ID NO: 202156
auucacaucuuucuuagcu

SEQ ID NO: 202158 - RNA, 19 nt, Artificial Sequence
  Description of Artificial Sequence: Synthetic oligonucleotide
  Sense strand starting at position 2979 of SEQ ID NO: 2605
augugaauuguguaucaga

SEQ ID NO: 202159 - RNA, 19 nt, Artificial Sequence
  Description of Artificial Sequence: Synthetic oligonucleotide
  Antisense strand to SEQ ID NO: 202158
ucugauacacaauucacau

SEQ ID NO: 202160 - RNA, 19 nt, Artificial Sequence
  Description of Artificial Sequence: Synthetic oligonucleotide
  Sense strand starting at position 3021 of SEQ ID NO: 2605
uagaaauuguggccugaca

SEQ ID NO: 202161 - RNA, 19 nt, Artificial Sequence
  Description of Artificial Sequence: Synthetic oligonucleotide
  Antisense strand to SEQ ID NO: 202160
ugucaggccacaauuucua

SEQ ID NO: 202162 - RNA, 19 nt, Artificial Sequence
  Description of Artificial Sequence: Synthetic oligonucleotide
  Sense strand starting at position 3023 of SEQ ID NO: 2605
gaaauuguggccugacaau

SEQ ID NO: 202163 - RNA, 19 nt, Artificial Sequence
  Description of Artificial Sequence: Synthetic oligonucleotide
  Antisense strand to SEQ ID NO: 202162
auugucaggccacaauuuc

SEQ ID NO: 202164 - RNA, 19 nt, Artificial Sequence
  Description of Artificial Sequence: Synthetic oligonucleotide
  Sense strand starting at position 3059 of SEQ ID NO: 2605
guaaucugaggcuguagau

SEQ ID NO: 202165 - RNA, 19 nt, Artificial Sequence
  Description of Artificial Sequence: Synthetic oligonucleotide
  Antisense strand to SEQ ID NO: 202164
aucuacagccucagauuac

SEQ ID NO: 202166 - RNA, 19 nt, Artificial Sequence
  Description of Artificial Sequence: Synthetic oligonucleotide
  Sense strand starting at position 3108 of SEQ ID NO: 2605
uccugagaaaguugugucu

SEQ ID NO: 202167 - RNA, 19 nt, Artificial Sequence
  Description of Artificial Sequence: Synthetic oligonucleotide
  Antisense strand to SEQ ID NO: 202166
agacacaacuuucucagga

SEQ ID NO: 202168 - RNA, 19 nt, Artificial Sequence
  Description of Artificial Sequence: Synthetic oligonucleotide
  Sense strand starting at position 3114 of SEQ ID NO: 2605
gaaaguugugucugugaac

SEQ ID NO: 202169 - RNA, 19 nt, Artificial Sequence
  Description of Artificial Sequence: Synthetic oligonucleotide
  Antisense strand to SEQ ID NO: 202168
guucacagacacaacuuuc

SEQ ID NO: 202170 - RNA, 19 nt, Artificial Sequence
  Description of Artificial Sequence: Synthetic oligonucleotide
  Sense strand starting at position 3115 of SEQ ID NO: 2605
aaaguugugucugugaaca

SEQ ID NO: 202171 - RNA, 19 nt, Artificial Sequence
  Description of Artificial Sequence: Synthetic oligonucleotide
  Antisense strand to SEQ ID NO: 202170
uguucacagacacaacuuu

SEQ ID NO: 202172 - RNA, 19 nt, Artificial Sequence
  Description of Artificial Sequence: Synthetic oligonucleotide
  Sense strand starting at position 3128 of SEQ ID NO: 2605
ugaacaagcucaguagaau

SEQ ID NO: 202173 - RNA, 19 nt, Artificial Sequence
  Description of Artificial Sequence: Synthetic oligonucleotide
  Antisense strand to SEQ ID NO: 202172
auucuacugagcuuguuca

SEQ ID NO: 202174 - RNA, 19 nt, Artificial Sequence
  Description of Artificial Sequence: Synthetic oligonucleotide
  Sense strand starting at position 3160 of SEQ ID NO: 2605
cuguaauagaguugcugga

SEQ ID NO: 202175 - RNA, 19 nt, Artificial Sequence
  Description of Artificial Sequence: Synthetic oligonucleotide
  Antisense strand to SEQ ID NO: 202174
uccagcaacucuauuacag

SEQ ID NO: 202176 - RNA, 19 nt, Artificial Sequence
  Description of Artificial Sequence: Synthetic oligonucleotide
  Sense strand starting at position 3365 of SEQ ID NO: 2605
cuagcacuguaguugaaga

SEQ ID NO: 202177 - RNA, 19 nt, Artificial Sequence
  Description of Artificial Sequence: Synthetic oligonucleotide
  Antisense strand to SEQ ID NO: 202176
ucuucaacuacagugcuag

SEQ ID NO: 202178 - RNA, 19 nt, Artificial Sequence
  Description of Artificial Sequence: Synthetic oligonucleotide
  Sense strand starting at position 3397 of SEQ ID NO: 2605
gucaguauugaguggaccu

SEQ ID NO: 202179 - RNA, 19 nt, Artificial Sequence
  Description of Artificial Sequence: Synthetic oligonucleotide
  Antisense strand to SEQ ID NO: 202178
agguccacucaauacugac

SEQ ID NO: 202180 - RNA, 19 nt, Artificial Sequence
  Description of Artificial Sequence: Synthetic oligonucleotide
  Sense strand starting at position 3413 of SEQ ID NO: 2605
ccugaagucguuggaagga

SEQ ID NO: 202181 - RNA, 19 nt, Artificial Sequence
  Description of Artificial Sequence: Synthetic oligonucleotide
  Antisense strand to SEQ ID NO: 202180
uccuuccaacgacuucagg

SEQ ID NO: 202182 - RNA, 19 nt, Artificial Sequence
  Description of Artificial Sequence: Synthetic oligonucleotide
  Sense strand starting at position 3489 of SEQ ID NO: 2605
ucugaaagugaccgagaau

SEQ ID NO: 202183 - RNA, 19 nt, Artificial Sequence
  Description of Artificial Sequence: Synthetic oligonucleotide
  Antisense strand to SEQ ID NO: 202182
auucucggucacuuucaga

SEQ ID NO: 202184 - RNA, 19 nt, Artificial Sequence
  Description of Artificial Sequence: Synthetic oligonucleotide
  Sense strand starting at position 3559 of SEQ ID NO: 2605
uugacaguugagcauguua

SEQ ID NO: 202185 - RNA, 19 nt, Artificial Sequence
  Description of Artificial Sequence: Synthetic oligonucleotide
  Antisense strand to SEQ ID NO: 202184
uaacaugcucaacugucaa

SEQ ID NO: 202186 - RNA, 19 nt, Artificial Sequence
  Description of Artificial Sequence: Synthetic oligonucleotide
  Sense strand starting at position 3561 of SEQ ID NO: 2605
gacaguugagcauguuaau

SEQ ID NO: 202187 - RNA, 19 nt, Artificial Sequence
  Description of Artificial Sequence: Synthetic oligonucleotide
  Antisense strand to SEQ ID NO: 202186
auuaacaugcucaacuguc

SEQ ID NO: 202188 - RNA, 19 nt, Artificial Sequence
  Description of Artificial Sequence: Synthetic oligonucleotide
  Sense strand starting at position 24 of SEQ ID NO: 2606
cuucgauugucaguguuaa

SEQ ID NO: 202189 - RNA, 19 nt, Artificial Sequence
  Description of Artificial Sequence: Synthetic oligonucleotide
  Antisense strand to SEQ ID NO: 202188
uuaacacugacaaucgaag

SEQ ID NO: 202190 - RNA, 19 nt, Artificial Sequence
  Description of Artificial Sequence: Synthetic oligonucleotide
  Sense strand starting at position 25 of SEQ ID NO: 2606
uucgauugucaguguuaag

SEQ ID NO: 202191 - RNA, 19 nt, Artificial Sequence
  Description of Artificial Sequence: Synthetic oligonucleotide
  Antisense strand to SEQ ID NO: 202190
cuuaacacugacaaucgaa

SEQ ID NO: 202192 - RNA, 19 nt, Artificial Sequence
  Description of Artificial Sequence: Synthetic oligonucleotide
  Sense strand starting at position 32 of SEQ ID NO: 2606
gucaguguuaaguguaguc

SEQ ID NO: 202193 - RNA, 19 nt, Artificial Sequence
  Description of Artificial Sequence: Synthetic oligonucleotide
  Antisense strand to SEQ ID NO: 202192
gacuacacuuaacacugac

SEQ ID NO: 202194 - RNA, 19 nt, Artificial Sequence
  Description of Artificial Sequence: Synthetic oligonucleotide
  Sense strand starting at position 37 of SEQ ID NO: 2606
uguuaaguguagucucauu

SEQ ID NO: 202195 - RNA, 19 nt, Artificial Sequence
  Description of Artificial Sequence: Synthetic oligonucleotide
  Antisense strand to SEQ ID NO: 202194
aaugagacuacacuuaaca

SEQ ID NO: 202196 - RNA, 19 nt, Artificial Sequence
  Description of Artificial Sequence: Synthetic oligonucleotide
  Sense strand starting at position 42 of SEQ ID NO: 2606
aguguagucucauucuucu

SEQ ID NO: 202197 - RNA, 19 nt, Artificial Sequence
  Description of Artificial Sequence: Synthetic oligonucleotide
  Antisense strand to SEQ ID NO: 202196
agaagaaugagacuacacu

SEQ ID NO: 202198 - RNA, 19 nt, Artificial Sequence
  Description of Artificial Sequence: Synthetic oligonucleotide
  Sense strand starting at position 220 of SEQ ID NO: 2606
agagcuauagccuggagca

SEQ ID NO: 202199 - RNA, 19 nt, Artificial Sequence
  Description of Artificial Sequence: Synthetic oligonucleotide
  Antisense strand to SEQ ID NO: 202198
ugcuccaggcuauagcucu

SEQ ID NO: 202200 - RNA, 19 nt, Artificial Sequence
  Description of Artificial Sequence: Synthetic oligonucleotide
  Sense strand starting at position 387 of SEQ ID NO: 2606
gugggaguugcuugccaca

SEQ ID NO: 202201 - RNA, 19 nt, Artificial Sequence
  Description of Artificial Sequence: Synthetic oligonucleotide
  Antisense strand to SEQ ID NO: 202200
uguggcaagcaacucccac

SEQ ID NO: 202202 - RNA, 19 nt, Artificial Sequence
  Description of Artificial Sequence: Synthetic oligonucleotide
  Sense strand starting at position 389 of SEQ ID NO: 2606
gggaguugcuugccacaug

SEQ ID NO: 202203 - RNA, 19 nt, Artificial Sequence
  Description of Artificial Sequence: Synthetic oligonucleotide
  Antisense strand to SEQ ID NO: 202202
cauguggcaagcaacuccc

SEQ ID NO: 202204 - RNA, 19 nt, Artificial Sequence
  Description of Artificial Sequence: Synthetic oligonucleotide
  Sense strand starting at position 401 of SEQ ID NO: 2606
ccacaugucuagcuguaag

SEQ ID NO: 202205 - RNA, 19 nt, Artificial Sequence
  Description of Artificial Sequence: Synthetic oligonucleotide
  Antisense strand to SEQ ID NO: 202204
cuuacagcuagacaugugg

SEQ ID NO: 202206 - RNA, 19 nt, Artificial Sequence
  Description of Artificial Sequence: Synthetic oligonucleotide
  Sense strand starting at position 644 of SEQ ID NO: 2606
gaggucucuggcugccaga

SEQ ID NO: 202207 - RNA, 19 nt, Artificial Sequence
  Description of Artificial Sequence: Synthetic oligonucleotide
  Antisense strand to SEQ ID NO: 202206
ucuggcagccagagaccuc

SEQ ID NO: 202208 - RNA, 19 nt, Artificial Sequence
  Description of Artificial Sequence: Synthetic oligonucleotide
  Sense strand starting at position 771 of SEQ ID NO: 2606
gugaaugacgguuauucua

SEQ ID NO: 202209 - RNA, 19 nt, Artificial Sequence
  Description of Artificial Sequence: Synthetic oligonucleotide
  Antisense strand to SEQ ID NO: 202208
uagaauaaccgucauucac

SEQ ID NO: 202210 - RNA, 19 nt, Artificial Sequence
  Description of Artificial Sequence: Synthetic oligonucleotide
  Sense strand starting at position 773 of SEQ ID NO: 2606
gaaugacgguuauucuaaa

SEQ ID NO: 202211 - RNA, 19 nt, Artificial Sequence
  Description of Artificial Sequence: Synthetic oligonucleotide
  Antisense strand to SEQ ID NO: 202210
uuuagaauaaccgucauuc

SEQ ID NO: 202212 - RNA, 19 nt, Artificial Sequence
  Description of Artificial Sequence: Synthetic oligonucleotide
  Sense strand starting at position 820 of SEQ ID NO: 2606
ucaacaugcuccuuaggga

SEQ ID NO: 202213 - RNA, 19 nt, Artificial Sequence
  Description of Artificial Sequence: Synthetic oligonucleotide
  Antisense strand to SEQ ID NO: 202212
ucccuaaggagcauguuga

SEQ ID NO: 202214 - RNA, 19 nt, Artificial Sequence
  Description of Artificial Sequence: Synthetic oligonucleotide
  Sense strand starting at position 914 of SEQ ID NO: 2606
ggcaauacacauuacaguu

SEQ ID NO: 202215 - RNA, 19 nt, Artificial Sequence
  Description of Artificial Sequence: Synthetic oligonucleotide
  Antisense strand to SEQ ID NO: 202214
aacuguaauguguauugcc

SEQ ID NO: 202216 - RNA, 19 nt, Artificial Sequence
  Description of Artificial Sequence: Synthetic oligonucleotide
  Sense strand starting at position 1141 of SEQ ID NO: 2606
uggguuuggcgcugacuua

SEQ ID NO: 202217 - RNA, 19 nt, Artificial Sequence
  Description of Artificial Sequence: Synthetic oligonucleotide
  Antisense strand to SEQ ID NO: 202216
uaagucagcgccaaaccca

SEQ ID NO: 202218 - RNA, 19 nt, Artificial Sequence
  Description of Artificial Sequence: Synthetic oligonucleotide
  Sense strand starting at position 1142 of SEQ ID NO: 2606
ggguuuggcgcugacuuaa

SEQ ID NO: 202219 - RNA, 19 nt, Artificial Sequence
  Description of Artificial Sequence: Synthetic oligonucleotide
  Antisense strand to SEQ ID NO: 202218
uuaagucagcgccaaaccc

SEQ ID NO: 202220 - RNA, 19 nt, Artificial Sequence
  Description of Artificial Sequence: Synthetic oligonucleotide
  Sense strand starting at position 1307 of SEQ ID NO: 2606
uucucuuucucgucacgga

SEQ ID NO: 202221 - RNA, 19 nt, Artificial Sequence
  Description of Artificial Sequence: Synthetic oligonucleotide
  Antisense strand to SEQ ID NO: 202220
uccgugacgagaaagagaa

SEQ ID NO: 202222 - RNA, 19 nt, Artificial Sequence
  Description of Artificial Sequence: Synthetic oligonucleotide
  Sense strand starting at position 1308 of SEQ ID NO: 2606
ucucuuucucgucacggaa

SEQ ID NO: 202223 - RNA, 19 nt, Artificial Sequence
  Description of Artificial Sequence: Synthetic oligonucleotide
  Antisense strand to SEQ ID NO: 202222
uuccgugacgagaaagaga

SEQ ID NO: 202224 - RNA, 19 nt, Artificial Sequence
  Description of Artificial Sequence: Synthetic oligonucleotide
  Sense strand starting at position 1336 of SEQ ID NO: 2606
ggagaaucuacugguuacu

SEQ ID NO: 202225 - RNA, 19 nt, Artificial Sequence
  Description of Artificial Sequence: Synthetic oligonucleotide
  Antisense strand to SEQ ID NO: 202224
aguaaccaguagauucucc

SEQ ID NO: 202226 - RNA, 19 nt, Artificial Sequence
  Description of Artificial Sequence: Synthetic oligonucleotide
  Sense strand starting at position 1338 of SEQ ID NO: 2606
agaaucuacugguuacuaa

SEQ ID NO: 202227 - RNA, 19 nt, Artificial Sequence
  Description of Artificial Sequence: Synthetic oligonucleotide
  Antisense strand to SEQ ID NO: 202226
uuaguaaccaguagauucu

SEQ ID NO: 202228 - RNA, 19 nt, Artificial Sequence
  Description of Artificial Sequence: Synthetic oligonucleotide
  Sense strand starting at position 1379 of SEQ ID NO: 2606
auacguauacugugaugaa

SEQ ID NO: 202229 - RNA, 19 nt, Artificial Sequence
  Description of Artificial Sequence: Synthetic oligonucleotide
  Antisense strand to SEQ ID NO: 202228
uucaucacaguauacguau

SEQ ID NO: 202230 - RNA, 19 nt, Artificial Sequence
  Description of Artificial Sequence: Synthetic oligonucleotide
  Sense strand starting at position 1391 of SEQ ID NO: 2606
ugaugaacacgucacguuu

SEQ ID NO: 202231 - RNA, 19 nt, Artificial Sequence
  Description of Artificial Sequence: Synthetic oligonucleotide
  Antisense strand to SEQ ID NO: 202230
aaacgugacguguucauca

SEQ ID NO: 202232 - RNA, 19 nt, Artificial Sequence
  Description of Artificial Sequence: Synthetic oligonucleotide
  Sense strand starting at position 2167 of SEQ ID NO: 2606
ggcgcuuccuccucuuaga

SEQ ID NO: 202233 - RNA, 19 nt, Artificial Sequence
  Description of Artificial Sequence: Synthetic oligonucleotide
  Antisense strand to SEQ ID NO: 202232
ucuaagaggaggaagcgcc

SEQ ID NO: 202234 - RNA, 19 nt, Artificial Sequence
  Description of Artificial Sequence: Synthetic oligonucleotide
  Sense strand starting at position 3277 of SEQ ID NO: 2606
cagugagauuucugcggau

SEQ ID NO: 202235 - RNA, 19 nt, Artificial Sequence
  Description of Artificial Sequence: Synthetic oligonucleotide
  Antisense strand to SEQ ID NO: 202234
auccgcagaaaucucacug

SEQ ID NO: 202236 - RNA, 19 nt, Artificial Sequence
  Description of Artificial Sequence: Synthetic oligonucleotide
  Sense strand starting at position 3279 of SEQ ID NO: 2606
gugagauuucugcggauua

SEQ ID NO: 202237 - RNA, 19 nt, Artificial Sequence
  Description of Artificial Sequence: Synthetic oligonucleotide
  Antisense strand to SEQ ID NO: 202236
uaauccgcagaaaucucac

SEQ ID NO: 202238 - RNA, 19 nt, Artificial Sequence
  Description of Artificial Sequence: Synthetic oligonucleotide
  Sense strand starting at position 3280 of SEQ ID NO: 2606
ugagauuucugcggauuac

SEQ ID NO: 202239 - RNA, 19 nt, Artificial Sequence
  Description of Artificial Sequence: Synthetic oligonucleotide
  Antisense strand to SEQ ID NO: 202238
guaauccgcagaaaucuca

SEQ ID NO: 202240 - RNA, 19 nt, Artificial Sequence
  Description of Artificial Sequence: Synthetic oligonucleotide
  Sense strand starting at position 3363 of SEQ ID NO: 2606
guugcaugguguuauuuaa

SEQ ID NO: 202241 - RNA, 19 nt, Artificial Sequence
  Description of Artificial Sequence: Synthetic oligonucleotide
  Antisense strand to SEQ ID NO: 202240
uuaaauaacaccaugcaac

SEQ ID NO: 202242 - RNA, 19 nt, Artificial Sequence
  Description of Artificial Sequence: Synthetic oligonucleotide
  Sense strand starting at position 3391 of SEQ ID NO: 2606
acgggaauggcacguguua

SEQ ID NO: 202243 - RNA, 19 nt, Artificial Sequence
  Description of Artificial Sequence: Synthetic oligonucleotide
  Antisense strand to SEQ ID NO: 202242
uaacacgugccauucccgu

SEQ ID NO: 202244 - RNA, 19 nt, Artificial Sequence
  Description of Artificial Sequence: Synthetic oligonucleotide
  Sense strand starting at position 3393 of SEQ ID NO: 2606
gggaauggcacguguuauu

SEQ ID NO: 202245 - RNA, 19 nt, Artificial Sequence
  Description of Artificial Sequence: Synthetic oligonucleotide
  Antisense strand to SEQ ID NO: 202244
aauaacacgugccauuccc

SEQ ID NO: 202246 - RNA, 19 nt, Artificial Sequence
  Description of Artificial Sequence: Synthetic oligonucleotide
  Sense strand starting at position 3396 of SEQ ID NO: 2606
aauggcacguguuauuuau

SEQ ID NO: 202247 - RNA, 19 nt, Artificial Sequence
  Description of Artificial Sequence: Synthetic oligonucleotide
  Antisense strand to SEQ ID NO: 202246
auaaauaacacgugccauu

SEQ ID NO: 202248 - RNA, 19 nt, Artificial Sequence
  Description of Artificial Sequence: Synthetic oligonucleotide
  Sense strand starting at position 3402 of SEQ ID NO: 2606
acguguuauuuauaggguu

SEQ ID NO: 202249 - RNA, 19 nt, Artificial Sequence
  Description of Artificial Sequence: Synthetic oligonucleotide
  Antisense strand to SEQ ID NO: 202248
aacccuauaaauaacacgu

SEQ ID NO: 202250 - RNA, 19 nt, Artificial Sequence
  Description of Artificial Sequence: Synthetic oligonucleotide
  Sense strand starting at position 3404 of SEQ ID NO: 2606
guguuauuuauaggguuau

SEQ ID NO: 202251 - RNA, 19 nt, Artificial Sequence
  Description of Artificial Sequence: Synthetic oligonucleotide
  Antisense strand to SEQ ID NO: 202250
auaacccuauaaauaacac

SEQ ID NO: 202252 - RNA, 19 nt, Artificial Sequence
  Description of Artificial Sequence: Synthetic oligonucleotide
  Sense strand starting at position 3410 of SEQ ID NO: 2606
uuuauaggguuauugaaag

SEQ ID NO: 202253 - RNA, 19 nt, Artificial Sequence
  Description of Artificial Sequence: Synthetic oligonucleotide
  Antisense strand to SEQ ID NO: 202252
cuuucaauaacccuauaaa

SEQ ID NO: 202254 - RNA, 19 nt, Artificial Sequence
  Description of Artificial Sequence: Synthetic oligonucleotide
  Sense strand starting at position 3434 of SEQ ID NO: 2606
aguaguuugcuguaagucu

SEQ ID NO: 202255 - RNA, 19 nt, Artificial Sequence
  Description of Artificial Sequence: Synthetic oligonucleotide
  Antisense strand to SEQ ID NO: 202254
agacuuacagcaaacuacu

SEQ ID NO: 202256 - RNA, 19 nt, Artificial Sequence
  Description of Artificial Sequence: Synthetic oligonucleotide
  Sense strand starting at position 3512 of SEQ ID NO: 2606
gcgcacuuucuugacaauu

SEQ ID NO: 202257 - RNA, 19 nt, Artificial Sequence
  Description of Artificial Sequence: Synthetic oligonucleotide
  Antisense strand to SEQ ID NO: 202256
aauugucaagaaagugcgc

SEQ ID NO: 202258 - RNA, 19 nt, Artificial Sequence
  Description of Artificial Sequence: Synthetic oligonucleotide
  Sense strand starting at position 3536 of SEQ ID NO: 2606
cagagcuuguguccuagaa

SEQ ID NO: 202259 - RNA, 19 nt, Artificial Sequence
  Description of Artificial Sequence: Synthetic oligonucleotide
  Antisense strand to SEQ ID NO: 202258
uucuaggacacaagcucug

SEQ ID NO: 202260 - RNA, 19 nt, Artificial Sequence
  Description of Artificial Sequence: Synthetic oligonucleotide
  Sense strand starting at position 3540 of SEQ ID NO: 2606
gcuuguguccuagaaguuu

SEQ ID NO: 202261 - RNA, 19 nt, Artificial Sequence
  Description of Artificial Sequence: Synthetic oligonucleotide
  Antisense strand to SEQ ID NO: 202260
aaacuucuaggacacaagc

SEQ ID NO: 202262 - RNA, 19 nt, Artificial Sequence
  Description of Artificial Sequence: Synthetic oligonucleotide
  Sense strand starting at position 3597 of SEQ ID NO: 2606
ggucuaacaugguauggga

SEQ ID NO: 202263 - RNA, 19 nt, Artificial Sequence
  Description of Artificial Sequence: Synthetic oligonucleotide
  Antisense strand to SEQ ID NO: 202262
ucccauaccauguuagacc

SEQ ID NO: 202264 - RNA, 19 nt, Artificial Sequence
  Description of Artificial Sequence: Synthetic oligonucleotide
  Sense strand starting at position 3726 of SEQ ID NO: 2606
uaggauuuguccuggucca

SEQ ID NO: 202265 - RNA, 19 nt, Artificial Sequence
  Description of Artificial Sequence: Synthetic oligonucleotide
  Antisense strand to SEQ ID NO: 202264
uggaccaggacaaauccua

SEQ ID NO: 202266 - RNA, 19 nt, Artificial Sequence
  Description of Artificial Sequence: Synthetic oligonucleotide
  Sense strand starting at position 3790 of SEQ ID NO: 2606
gucccuuaugugcacauua

SEQ ID NO: 202267 - RNA, 19 nt, Artificial Sequence
  Description of Artificial Sequence: Synthetic oligonucleotide
  Antisense strand to SEQ ID NO: 202266
uaaugugcacauaagggac

SEQ ID NO: 202268 - RNA, 19 nt, Artificial Sequence
  Description of Artificial Sequence: Synthetic oligonucleotide
  Sense strand starting at position 25 of SEQ ID NO: 2607
ccggcuuagagagacauua

SEQ ID NO: 202269 - RNA, 19 nt, Artificial Sequence
  Description of Artificial Sequence: Synthetic oligonucleotide
  Antisense strand to SEQ ID NO: 202268
uaaugucucucuaagccgg

SEQ ID NO: 202270 - RNA, 19 nt, Artificial Sequence
  Description of Artificial Sequence: Synthetic oligonucleotide
  Sense strand starting at position 145 of SEQ ID NO: 2607
augucagagcccugggaga

SEQ ID NO: 202271 - RNA, 19 nt, Artificial Sequence
  Description of Artificial Sequence: Synthetic oligonucleotide
  Antisense strand to SEQ ID NO: 202270
ucucccagggcucugacau

SEQ ID NO: 202272 - RNA, 19 nt, Artificial Sequence
  Description of Artificial Sequence: Synthetic oligonucleotide
  Sense strand starting at position 202 of SEQ ID NO: 2607
ucucccuauggcugucaua

SEQ ID NO: 202273 - RNA, 19 nt, Artificial Sequence
  Description of Artificial Sequence: Synthetic oligonucleotide
  Antisense strand to SEQ ID NO: 202272
uaugacagccauagggaga

SEQ ID NO: 202274 - RNA, 19 nt, Artificial Sequence
  Description of Artificial Sequence: Synthetic oligonucleotide
  Sense strand starting at position 955 of SEQ ID NO: 2607
uuccucuggcugugcuaaa

SEQ ID NO: 202275 - RNA, 19 nt, Artificial Sequence
  Description of Artificial Sequence: Synthetic oligonucleotide
  Antisense strand to SEQ ID NO: 202274
uuuagcacagccagaggaa

SEQ ID NO: 202276 - RNA, 19 nt, Artificial Sequence
  Description of Artificial Sequence: Synthetic oligonucleotide
  Sense strand starting at position 1088 of SEQ ID NO: 2607
accuuagccucagaaauga

SEQ ID NO: 202277 - RNA, 19 nt, Artificial Sequence
  Description of Artificial Sequence: Synthetic oligonucleotide
  Antisense strand to SEQ ID NO: 202276
ucauuucugaggcuaaggu

SEQ ID NO: 202278 - RNA, 19 nt, Artificial Sequence
  Description of Artificial Sequence: Synthetic oligonucleotide
  Sense strand starting at position 1103 of SEQ ID NO: 2607
augacauacuucucagggu

SEQ ID NO: 202279 - RNA, 19 nt, Artificial Sequence
  Description of Artificial Sequence: Synthetic oligonucleotide
  Antisense strand to SEQ ID NO: 202278
acccugagaaguaugucau

SEQ ID NO: 202280 - RNA, 19 nt, Artificial Sequence
  Description of Artificial Sequence: Synthetic oligonucleotide
  Sense strand starting at position 1130 of SEQ ID NO: 2607
ccucaagagucuuuccuga

SEQ ID NO: 202281 - RNA, 19 nt, Artificial Sequence
  Description of Artificial Sequence: Synthetic oligonucleotide
  Antisense strand to SEQ ID NO: 202280
ucaggaaagacucuugagg

SEQ ID NO: 202282 - RNA, 19 nt, Artificial Sequence
  Description of Artificial Sequence: Synthetic oligonucleotide
  Sense strand starting at position 1132 of SEQ ID NO: 2607
ucaagagucuuuccugaag

SEQ ID NO: 202283 - RNA, 19 nt, Artificial Sequence
  Description of Artificial Sequence: Synthetic oligonucleotide
  Antisense strand to SEQ ID NO: 202282
cuucaggaaagacucuuga

SEQ ID NO: 202284 - RNA, 19 nt, Artificial Sequence
  Description of Artificial Sequence: Synthetic oligonucleotide
  Sense strand starting at position 1134 of SEQ ID NO: 2607
aagagucuuuccugaagag

SEQ ID NO: 202285 - RNA, 19 nt, Artificial Sequence
  Description of Artificial Sequence: Synthetic oligonucleotide
  Antisense strand to SEQ ID NO: 202284
cucuucaggaaagacucuu

SEQ ID NO: 202286 - RNA, 19 nt, Artificial Sequence
  Description of Artificial Sequence: Synthetic oligonucleotide
  Sense strand starting at position 1149 of SEQ ID NO: 2607
agaggaccuuucuggucaa

SEQ ID NO: 202287 - RNA, 19 nt, Artificial Sequence
  Description of Artificial Sequence: Synthetic oligonucleotide
  Antisense strand to SEQ ID NO: 202286
uugaccagaaagguccucu

SEQ ID NO: 202288 - RNA, 19 nt, Artificial Sequence
  Description of Artificial Sequence: Synthetic oligonucleotide
  Sense strand starting at position 1231 of SEQ ID NO: 2607
ccuugacugggucagugua

SEQ ID NO: 202289 - RNA, 19 nt, Artificial Sequence
  Description of Artificial Sequence: Synthetic oligonucleotide
  Antisense strand to SEQ ID NO: 202288
uacacugacccagucaagg

SEQ ID NO: 202290 - RNA, 19 nt, Artificial Sequence
  Description of Artificial Sequence: Synthetic oligonucleotide
  Sense strand starting at position 1265 of SEQ ID NO: 2607
gugaauuuguggguucccu

SEQ ID NO: 202291 - RNA, 19 nt, Artificial Sequence
  Description of Artificial Sequence: Synthetic oligonucleotide
  Antisense strand to SEQ ID NO: 202290
agggaacccacaaauucac

SEQ ID NO: 202292 - RNA, 19 nt, Artificial Sequence
  Description of Artificial Sequence: Synthetic oligonucleotide
  Sense strand starting at position 1373 of SEQ ID NO: 2607
ugggauucccugggcuagu

SEQ ID NO: 202293 - RNA, 19 nt, Artificial Sequence
  Description of Artificial Sequence: Synthetic oligonucleotide
  Antisense strand to SEQ ID NO: 202292
acuagcccagggaauccca

SEQ ID NO: 202294 - RNA, 19 nt, Artificial Sequence
  Description of Artificial Sequence: Synthetic oligonucleotide
  Sense strand starting at position 2061 of SEQ ID NO: 2607
ggcccaauagugugcucua

SEQ ID NO: 202295 - RNA, 19 nt, Artificial Sequence
  Description of Artificial Sequence: Synthetic oligonucleotide
  Antisense strand to SEQ ID NO: 202294
uagagcacacuauugggcc

SEQ ID NO: 202296 - RNA, 19 nt, Artificial Sequence
  Description of Artificial Sequence: Synthetic oligonucleotide
  Sense strand starting at position 2064 of SEQ ID NO: 2607
ccaauagugugcucuacgu

SEQ ID NO: 202297 - RNA, 19 nt, Artificial Sequence
  Description of Artificial Sequence: Synthetic oligonucleotide
  Antisense strand to SEQ ID NO: 202296
acguagagcacacuauugg

SEQ ID NO: 202298 - RNA, 19 nt, Artificial Sequence
  Description of Artificial Sequence: Synthetic oligonucleotide
  Sense strand starting at position 2290 of SEQ ID NO: 2607
uaggcaagcucagugauuu

SEQ ID NO: 202299 - RNA, 19 nt, Artificial Sequence
  Description of Artificial Sequence: Synthetic oligonucleotide
  Antisense strand to SEQ ID NO: 202298
aaaucacugagcuugccua

SEQ ID NO: 202300 - RNA, 19 nt, Artificial Sequence
  Description of Artificial Sequence: Synthetic oligonucleotide
  Sense strand starting at position 2702 of SEQ ID NO: 2607
cguacuuccuguucaggua

SEQ ID NO: 202301 - RNA, 19 nt, Artificial Sequence
  Description of Artificial Sequence: Synthetic oligonucleotide
  Antisense strand to SEQ ID NO: 202300
uaccugaacaggaaguacg

SEQ ID NO: 202302 - RNA, 19 nt, Artificial Sequence
  Description of Artificial Sequence: Synthetic oligonucleotide
  Sense strand starting at position 2714 of SEQ ID NO: 2607
ucagguauccuggaagguu

SEQ ID NO: 202303 - RNA, 19 nt, Artificial Sequence
  Description of Artificial Sequence: Synthetic oligonucleotide
  Antisense strand to SEQ ID NO: 202302
aaccuuccaggauaccuga

SEQ ID NO: 202304 - RNA, 19 nt, Artificial Sequence
  Description of Artificial Sequence: Synthetic oligonucleotide
  Sense strand starting at position 2723 of SEQ ID NO: 2607
cuggaagguuucgugugaa

SEQ ID NO: 202305 - RNA, 19 nt, Artificial Sequence
  Description of Artificial Sequence: Synthetic oligonucleotide
  Antisense strand to SEQ ID NO: 202304
uucacacgaaaccuuccag

SEQ ID NO: 202306 - RNA, 19 nt, Artificial Sequence
  Description of Artificial Sequence: Synthetic oligonucleotide
  Sense strand starting at position 2726 of SEQ ID NO: 2607
gaagguuucgugugaaacg

SEQ ID NO: 202307 - RNA, 19 nt, Artificial Sequence
  Description of Artificial Sequence: Synthetic oligonucleotide
  Antisense strand to SEQ ID NO: 202306
cguuucacacgaaaccuuc

SEQ ID NO: 202308 - RNA, 19 nt, Artificial Sequence
  Description of Artificial Sequence: Synthetic oligonucleotide
  Sense strand starting at position 2729 of SEQ ID NO: 2607
gguuucgugugaaacguga

SEQ ID NO: 202309 - RNA, 19 nt, Artificial Sequence
  Description of Artificial Sequence: Synthetic oligonucleotide
  Antisense strand to SEQ ID NO: 202308
ucacguuucacacgaaacc

SEQ ID NO: 202310 - RNA, 19 nt, Artificial Sequence
  Description of Artificial Sequence: Synthetic oligonucleotide
  Sense strand starting at position 2731 of SEQ ID NO: 2607
uuucgugugaaacgugaca

SEQ ID NO: 202311 - RNA, 19 nt, Artificial Sequence
  Description of Artificial Sequence: Synthetic oligonucleotide
  Antisense strand to SEQ ID NO: 202310
ugucacguuucacacgaaa

SEQ ID NO: 202312 - RNA, 19 nt, Artificial Sequence
  Description of Artificial Sequence: Synthetic oligonucleotide
  Sense strand starting at position 2779 of SEQ ID NO: 2607
ggaacacauucuuauuggu

SEQ ID NO: 202313 - RNA, 19 nt, Artificial Sequence
  Description of Artificial Sequence: Synthetic oligonucleotide
  Antisense strand to SEQ ID NO: 202312
accaauaagaauguguucc

SEQ ID NO: 202314 - RNA, 19 nt, Artificial Sequence
  Description of Artificial Sequence: Synthetic oligonucleotide
  Sense strand starting at position 2782 of SEQ ID NO: 2607
acacauucuuauugguauu

SEQ ID NO: 202315 - RNA, 19 nt, Artificial Sequence
  Description of Artificial Sequence: Synthetic oligonucleotide
  Antisense strand to SEQ ID NO: 202314
aauaccaauaagaaugugu

SEQ ID NO: 202316 - RNA, 19 nt, Artificial Sequence
  Description of Artificial Sequence: Synthetic oligonucleotide
  Sense strand starting at position 2792 of SEQ ID NO: 2607
auugguauucccgagcuua

SEQ ID NO: 202317 - RNA, 19 nt, Artificial Sequence
  Description of Artificial Sequence: Synthetic oligonucleotide
  Antisense strand to SEQ ID NO: 202316
uaagcucgggaauaccaau

SEQ ID NO: 202318 - RNA, 19 nt, Artificial Sequence
  Description of Artificial Sequence: Synthetic oligonucleotide
  Sense strand starting at position 2847 of SEQ ID NO: 2607
ucacuuaaucucuggguaa

SEQ ID NO: 202319 - RNA, 19 nt, Artificial Sequence
  Description of Artificial Sequence: Synthetic oligonucleotide
  Antisense strand to SEQ ID NO: 202318
uuacccagagauuaaguga

SEQ ID NO: 202320 - RNA, 19 nt, Artificial Sequence
  Description of Artificial Sequence: Synthetic oligonucleotide
  Sense strand starting at position 2858 of SEQ ID NO: 2607
cuggguaauguccagcaca

SEQ ID NO: 202321 - RNA, 19 nt, Artificial Sequence
  Description of Artificial Sequence: Synthetic oligonucleotide
  Antisense strand to SEQ ID NO: 202320
ugugcuggacauuacccag

SEQ ID NO: 202322 - RNA, 19 nt, Artificial Sequence
  Description of Artificial Sequence: Synthetic oligonucleotide
  Sense strand starting at position 2909 of SEQ ID NO: 2607
gcauguaucuccucacguu

SEQ ID NO: 202323 - RNA, 19 nt, Artificial Sequence
  Description of Artificial Sequence: Synthetic oligonucleotide
  Antisense strand to SEQ ID NO: 202322
aacgugaggagauacaugc

SEQ ID NO: 202324 - RNA, 19 nt, Artificial Sequence
  Description of Artificial Sequence: Synthetic oligonucleotide
  Sense strand starting at position 2949 of SEQ ID NO: 2607
acuuuaaacuuuguagaga

SEQ ID NO: 202325 - RNA, 19 nt, Artificial Sequence
  Description of Artificial Sequence: Synthetic oligonucleotide
  Antisense strand to SEQ ID NO: 202324
ucucuacaaaguuuaaagu

SEQ ID NO: 202326 - RNA, 19 nt, Artificial Sequence
  Description of Artificial Sequence: Synthetic oligonucleotide
  Sense strand starting at position 2950 of SEQ ID NO: 2607
cuuuaaacuuuguagagau

SEQ ID NO: 202327 - RNA, 19 nt, Artificial Sequence
  Description of Artificial Sequence: Synthetic oligonucleotide
  Antisense strand to SEQ ID NO: 202326
aucucuacaaaguuuaaag

SEQ ID NO: 202328 - RNA, 19 nt, Artificial Sequence
  Description of Artificial Sequence: Synthetic oligonucleotide
  Sense strand starting at position 2976 of SEQ ID NO: 2607
ucagauguauuccacauuu

SEQ ID NO: 202329 - RNA, 19 nt, Artificial Sequence
  Description of Artificial Sequence: Synthetic oligonucleotide
  Antisense strand to SEQ ID NO: 202328
aaauguggaauacaucuga

SEQ ID NO: 202330 - RNA, 19 nt, Artificial Sequence
  Description of Artificial Sequence: Synthetic oligonucleotide
  Sense strand starting at position 3045 of SEQ ID NO: 2607
uuauuuguuucguauagcu

SEQ ID NO: 202331 - RNA, 19 nt, Artificial Sequence
  Description of Artificial Sequence: Synthetic oligonucleotide
  Antisense strand to SEQ ID NO: 202330
agcuauacgaaacaaauaa

SEQ ID NO: 202332 - RNA, 19 nt, Artificial Sequence
  Description of Artificial Sequence: Synthetic oligonucleotide
  Sense strand starting at position 3047 of SEQ ID NO: 2607
auuuguuucguauagcuuu

SEQ ID NO: 202333 - RNA, 19 nt, Artificial Sequence
  Description of Artificial Sequence: Synthetic oligonucleotide
  Antisense strand to SEQ ID NO: 202332
aaagcuauacgaaacaaau

SEQ ID NO: 202334 - RNA, 19 nt, Artificial Sequence
  Description of Artificial Sequence: Synthetic oligonucleotide
  Sense strand starting at position 3050 of SEQ ID NO: 2607
uguuucguauagcuuuauu

SEQ ID NO: 202335 - RNA, 19 nt, Artificial Sequence
  Description of Artificial Sequence: Synthetic oligonucleotide
  Antisense strand to SEQ ID NO: 202334
aauaaagcuauacgaaaca

SEQ ID NO: 202336 - RNA, 19 nt, Artificial Sequence
  Description of Artificial Sequence: Synthetic oligonucleotide
  Sense strand starting at position 3285 of SEQ ID NO: 2607
aagugauccgccuggguca

SEQ ID NO: 202337 - RNA, 19 nt, Artificial Sequence
  Description of Artificial Sequence: Synthetic oligonucleotide
  Antisense strand to SEQ ID NO: 202336
ugacccaggcggaucacuu

SEQ ID NO: 202338 - RNA, 19 nt, Artificial Sequence
  Description of Artificial Sequence: Synthetic oligonucleotide
  Sense strand starting at position 3409 of SEQ ID NO: 2607
guacacuaauuggaaaugu

SEQ ID NO: 202339 - RNA, 19 nt, Artificial Sequence
  Description of Artificial Sequence: Synthetic oligonucleotide
  Antisense strand to SEQ ID NO: 202338
acauuuccaauuaguguac

SEQ ID NO: 202340 - RNA, 19 nt, Artificial Sequence
  Description of Artificial Sequence: Synthetic oligonucleotide
  Sense strand starting at position 3518 of SEQ ID NO: 2607
acaaucuguuuggcuaauu

SEQ ID NO: 202341 - RNA, 19 nt, Artificial Sequence
  Description of Artificial Sequence: Synthetic oligonucleotide
  Antisense strand to SEQ ID NO: 202340
aauuagccaaacagauugu

SEQ ID NO: 202342 - RNA, 19 nt, Artificial Sequence
  Description of Artificial Sequence: Synthetic oligonucleotide
  Sense strand starting at position 3600 of SEQ ID NO: 2607
gggcuacguuggagaaguu

SEQ ID NO: 202343 - RNA, 19 nt, Artificial Sequence
  Description of Artificial Sequence: Synthetic oligonucleotide
  Antisense strand to SEQ ID NO: 202342
aacuucuccaacguagccc

SEQ ID NO: 202344 - RNA, 19 nt, Artificial Sequence
  Description of Artificial Sequence: Synthetic oligonucleotide
  Sense strand starting at position 3601 of SEQ ID NO: 2607
ggcuacguuggagaaguuu

SEQ ID NO: 202345 - RNA, 19 nt, Artificial Sequence
  Description of Artificial Sequence: Synthetic oligonucleotide
  Antisense strand to SEQ ID NO: 202344
aaacuucuccaacguagcc

SEQ ID NO: 202346 - RNA, 19 nt, Artificial Sequence
  Description of Artificial Sequence: Synthetic oligonucleotide
  Sense strand starting at position 3607 of SEQ ID NO: 2607
guuggagaaguuuaaccga

SEQ ID NO: 202347 - RNA, 19 nt, Artificial Sequence
  Description of Artificial Sequence: Synthetic oligonucleotide
  Antisense strand to SEQ ID NO: 202346
ucgguuaaacuucuccaac

SEQ ID NO: 202348 - RNA, 19 nt, Artificial Sequence
  Description of Artificial Sequence: Synthetic oligonucleotide
  Sense strand starting at position 56 of SEQ ID NO: 2608
uuugaauucucauucgguu

SEQ ID NO: 202349 - RNA, 19 nt, Artificial Sequence
  Description of Artificial Sequence: Synthetic oligonucleotide
  Antisense strand to SEQ ID NO: 202348
aaccgaaugagaauucaaa

SEQ ID NO: 202350 - RNA, 19 nt, Artificial Sequence
  Description of Artificial Sequence: Synthetic oligonucleotide
  Sense strand starting at position 111 of SEQ ID NO: 2608
cucacagguuucccaugaa

SEQ ID NO: 202351 - RNA, 19 nt, Artificial Sequence
  Description of Artificial Sequence: Synthetic oligonucleotide
  Antisense strand to SEQ ID NO: 202350
uucaugggaaaccugugag

SEQ ID NO: 202352 - RNA, 19 nt, Artificial Sequence
  Description of Artificial Sequence: Synthetic oligonucleotide
  Sense strand starting at position 410 of SEQ ID NO: 2608
cucacugccguuuauuaaa

SEQ ID NO: 202353 - RNA, 19 nt, Artificial Sequence
  Description of Artificial Sequence: Synthetic oligonucleotide
  Antisense strand to SEQ ID NO: 202352
uuuaauaaacggcagugag

SEQ ID NO: 202354 - RNA, 19 nt, Artificial Sequence
  Description of Artificial Sequence: Synthetic oligonucleotide
  Sense strand starting at position 515 of SEQ ID NO: 2608
auggcauccugguuaauca

SEQ ID NO: 202355 - RNA, 19 nt, Artificial Sequence
  Description of Artificial Sequence: Synthetic oligonucleotide
  Antisense strand to SEQ ID NO: 202354
ugauuaaccaggaugccau

SEQ ID NO: 202356 - RNA, 19 nt, Artificial Sequence
  Description of Artificial Sequence: Synthetic oligonucleotide
  Sense strand starting at position 516 of SEQ ID NO: 2608
uggcauccugguuaaucau

SEQ ID NO: 202357 - RNA, 19 nt, Artificial Sequence
  Description of Artificial Sequence: Synthetic oligonucleotide
  Antisense strand to SEQ ID NO: 202356
augauuaaccaggaugcca

SEQ ID NO: 202358 - RNA, 19 nt, Artificial Sequence
  Description of Artificial Sequence: Synthetic oligonucleotide
  Sense strand starting at position 556 of SEQ ID NO: 2608
ggccuagucagcuaaugaa

SEQ ID NO: 202359 - RNA, 19 nt, Artificial Sequence
  Description of Artificial Sequence: Synthetic oligonucleotide
  Antisense strand to SEQ ID NO: 202358
uucauuagcugacuaggcc

SEQ ID NO: 202360 - RNA, 19 nt, Artificial Sequence
  Description of Artificial Sequence: Synthetic oligonucleotide
  Sense strand starting at position 568 of SEQ ID NO: 2608
uaaugaagggcuugugaac

SEQ ID NO: 202361 - RNA, 19 nt, Artificial Sequence
  Description of Artificial Sequence: Synthetic oligonucleotide
  Antisense strand to SEQ ID NO: 202360
guucacaagcccuucauua

SEQ ID NO: 202362 - RNA, 19 nt, Artificial Sequence
  Description of Artificial Sequence: Synthetic oligonucleotide
  Sense strand starting at position 729 of SEQ ID NO: 2608
cuaaguuaaucuguuuaag

SEQ ID NO: 202363 - RNA, 19 nt, Artificial Sequence
  Description of Artificial Sequence: Synthetic oligonucleotide
  Antisense strand to SEQ ID NO: 202362
cuuaaacagauuaacuuag

SEQ ID NO: 202364 - RNA, 19 nt, Artificial Sequence
  Description of Artificial Sequence: Synthetic oligonucleotide
  Sense strand starting at position 731 of SEQ ID NO: 2608
aaguuaaucuguuuaagga

SEQ ID NO: 202365 - RNA, 19 nt, Artificial Sequence
  Description of Artificial Sequence: Synthetic oligonucleotide
  Antisense strand to SEQ ID NO: 202364
uccuuaaacagauuaacuu

SEQ ID NO: 202366 - RNA, 19 nt, Artificial Sequence
  Description of Artificial Sequence: Synthetic oligonucleotide
  Sense strand starting at position 820 of SEQ ID NO: 2608
guuuaaacuugugcagaag

SEQ ID NO: 202367 - RNA, 19 nt, Artificial Sequence
  Description of Artificial Sequence: Synthetic oligonucleotide
  Antisense strand to SEQ ID NO: 202366
cuucugcacaaguuuaaac

SEQ ID NO: 202368 - RNA, 19 nt, Artificial Sequence
  Description of Artificial Sequence: Synthetic oligonucleotide
  Sense strand starting at position 821 of SEQ ID NO: 2608
uuuaaacuugugcagaaga

SEQ ID NO: 202369 - RNA, 19 nt, Artificial Sequence
  Description of Artificial Sequence: Synthetic oligonucleotide
  Antisense strand to SEQ ID NO: 202368
ucuucugcacaaguuuaaa

SEQ ID NO: 202370 - RNA, 19 nt, Artificial Sequence
  Description of Artificial Sequence: Synthetic oligonucleotide
  Sense strand starting at position 838 of SEQ ID NO: 2608
gaugcuaaaucuguccagu

SEQ ID NO: 202371 - RNA, 19 nt, Artificial Sequence
  Description of Artificial Sequence: Synthetic oligonucleotide
  Antisense strand to SEQ ID NO: 202370
acuggacagauuuagcauc

SEQ ID NO: 202372 - RNA, 19 nt, Artificial Sequence
  Description of Artificial Sequence: Synthetic oligonucleotide
  Sense strand starting at position 840 of SEQ ID NO: 2608
ugcuaaaucuguccagugu

SEQ ID NO: 202373 - RNA, 19 nt, Artificial Sequence
  Description of Artificial Sequence: Synthetic oligonucleotide
  Antisense strand to SEQ ID NO: 202372
acacuggacagauuuagca

SEQ ID NO: 202374 - RNA, 19 nt, Artificial Sequence
  Description of Artificial Sequence: Synthetic oligonucleotide
  Sense strand starting at position 1057 of SEQ ID NO: 2608
ucucgaacucuugaccgua

SEQ ID NO: 202375 - RNA, 19 nt, Artificial Sequence
  Description of Artificial Sequence: Synthetic oligonucleotide
  Antisense strand to SEQ ID NO: 202374
uacggucaagaguucgaga

SEQ ID NO: 202376 - RNA, 19 nt, Artificial Sequence
  Description of Artificial Sequence: Synthetic oligonucleotide
  Sense strand starting at position 1060 of SEQ ID NO: 2608
cgaacucuugaccguaagu

SEQ ID NO: 202377 - RNA, 19 nt, Artificial Sequence
  Description of Artificial Sequence: Synthetic oligonucleotide
  Antisense strand to SEQ ID NO: 202376
acuuacggucaagaguucg

SEQ ID NO: 202378 - RNA, 19 nt, Artificial Sequence
  Description of Artificial Sequence: Synthetic oligonucleotide
  Sense strand starting at position 1225 of SEQ ID NO: 2608
gcgcuacugggaggaguaa

SEQ ID NO: 202379 - RNA, 19 nt, Artificial Sequence
  Description of Artificial Sequence: Synthetic oligonucleotide
  Antisense strand to SEQ ID NO: 202378
uuacuccucccaguagcgc

SEQ ID NO: 202380 - RNA, 19 nt, Artificial Sequence
  Description of Artificial Sequence: Synthetic oligonucleotide
  Sense strand starting at position 1285 of SEQ ID NO: 2608
ugguuaaugugaucacacu

SEQ ID NO: 202381 - RNA, 19 nt, Artificial Sequence
  Description of Artificial Sequence: Synthetic oligonucleotide
  Antisense strand to SEQ ID NO: 202380
agugugaucacauuaacca

SEQ ID NO: 202382 - RNA, 19 nt, Artificial Sequence
  Description of Artificial Sequence: Synthetic oligonucleotide
  Sense strand starting at position 1286 of SEQ ID NO: 2608
gguuaaugugaucacacuc

SEQ ID NO: 202383 - RNA, 19 nt, Artificial Sequence
  Description of Artificial Sequence: Synthetic oligonucleotide
  Antisense strand to SEQ ID NO: 202382
gagugugaucacauuaacc

SEQ ID NO: 202384 - RNA, 19 nt, Artificial Sequence
  Description of Artificial Sequence: Synthetic oligonucleotide
  Sense strand starting at position 1299 of SEQ ID NO: 2608
acacuccuuucugauggaa

SEQ ID NO: 202385 - RNA, 19 nt, Artificial Sequence
  Description of Artificial Sequence: Synthetic oligonucleotide
  Antisense strand to SEQ ID NO: 202384
uuccaucagaaaggagugu

SEQ ID NO: 202386 - RNA, 19 nt, Artificial Sequence
  Description of Artificial Sequence: Synthetic oligonucleotide
  Sense strand starting at position 1302 of SEQ ID NO: 2608
cuccuuucugauggaacua

SEQ ID NO: 202387 - RNA, 19 nt, Artificial Sequence
  Description of Artificial Sequence: Synthetic oligonucleotide
  Antisense strand to SEQ ID NO: 202386
uaguuccaucagaaaggag

SEQ ID NO: 202388 - RNA, 19 nt, Artificial Sequence
  Description of Artificial Sequence: Synthetic oligonucleotide
  Sense strand starting at position 1318 of SEQ ID NO: 2608
cuagcuaugccuuaccuga

SEQ ID NO: 202389 - RNA, 19 nt, Artificial Sequence
  Description of Artificial Sequence: Synthetic oligonucleotide
  Antisense strand to SEQ ID NO: 202388
ucagguaaggcauagcuag

SEQ ID NO: 202390 - RNA, 19 nt, Artificial Sequence
  Description of Artificial Sequence: Synthetic oligonucleotide
  Sense strand starting at position 2057 of SEQ ID NO: 2608
cggagugcuugggcuggaa

SEQ ID NO: 202391 - RNA, 19 nt, Artificial Sequence
  Description of Artificial Sequence: Synthetic oligonucleotide
  Antisense strand to SEQ ID NO: 202390
uuccagcccaagcacuccg

SEQ ID NO: 202392 - RNA, 19 nt, Artificial Sequence
  Description of Artificial Sequence: Synthetic oligonucleotide
  Sense strand starting at position 2074 of SEQ ID NO: 2608
aagggauccugccugcgau

SEQ ID NO: 202393 - RNA, 19 nt, Artificial Sequence
  Description of Artificial Sequence: Synthetic oligonucleotide
  Antisense strand to SEQ ID NO: 202392
aucgcaggcaggaucccuu

SEQ ID NO: 202394 - RNA, 19 nt, Artificial Sequence
  Description of Artificial Sequence: Synthetic oligonucleotide
  Sense strand starting at position 2277 of SEQ ID NO: 2608
gcuggaaaguaucuggaca

SEQ ID NO: 202395 - RNA, 19 nt, Artificial Sequence
  Description of Artificial Sequence: Synthetic oligonucleotide
  Antisense strand to SEQ ID NO: 202394
uguccagauacuuuccagc

SEQ ID NO: 202396 - RNA, 19 nt, Artificial Sequence
  Description of Artificial Sequence: Synthetic oligonucleotide
  Sense strand starting at position 3100 of SEQ ID NO: 2608
aauugacauucguuguuga

SEQ ID NO: 202397 - RNA, 19 nt, Artificial Sequence
  Description of Artificial Sequence: Synthetic oligonucleotide
  Antisense strand to SEQ ID NO: 202396
ucaacaacgaaugucaauu

SEQ ID NO: 202398 - RNA, 19 nt, Artificial Sequence
  Description of Artificial Sequence: Synthetic oligonucleotide
  Sense strand starting at position 3101 of SEQ ID NO: 2608
auugacauucguuguugau

SEQ ID NO: 202399 - RNA, 19 nt, Artificial Sequence
  Description of Artificial Sequence: Synthetic oligonucleotide
  Antisense strand to SEQ ID NO: 202398
aucaacaacgaaugucaau

SEQ ID NO: 202400 - RNA, 19 nt, Artificial Sequence
  Description of Artificial Sequence: Synthetic oligonucleotide
  Sense strand starting at position 3103 of SEQ ID NO: 2608
ugacauucguuguugauuu

SEQ ID NO: 202401 - RNA, 19 nt, Artificial Sequence
  Description of Artificial Sequence: Synthetic oligonucleotide
  Antisense strand to SEQ ID NO: 202400
aaaucaacaacgaauguca

SEQ ID NO: 202402 - RNA, 19 nt, Artificial Sequence
  Description of Artificial Sequence: Synthetic oligonucleotide
  Sense strand starting at position 3214 of SEQ ID NO: 2608
gauggugucuucuugcaaa

SEQ ID NO: 202403 - RNA, 19 nt, Artificial Sequence
  Description of Artificial Sequence: Synthetic oligonucleotide
  Antisense strand to SEQ ID NO: 202402
uuugcaagaagacaccauc

SEQ ID NO: 202404 - RNA, 19 nt, Artificial Sequence
  Description of Artificial Sequence: Synthetic oligonucleotide
  Sense strand starting at position 3234 of SEQ ID NO: 2608
cuguaaauauuccuggaug

SEQ ID NO: 202405 - RNA, 19 nt, Artificial Sequence
  Description of Artificial Sequence: Synthetic oligonucleotide
  Antisense strand to SEQ ID NO: 202404
cauccaggaauauuuacag

SEQ ID NO: 202406 - RNA, 19 nt, Artificial Sequence
  Description of Artificial Sequence: Synthetic oligonucleotide
  Sense strand starting at position 3236 of SEQ ID NO: 2608
guaaauauuccuggaugag

SEQ ID NO: 202407 - RNA, 19 nt, Artificial Sequence
  Description of Artificial Sequence: Synthetic oligonucleotide
  Antisense strand to SEQ ID NO: 202406
cucauccaggaauauuuac

SEQ ID NO: 202408 - RNA, 19 nt, Artificial Sequence
  Description of Artificial Sequence: Synthetic oligonucleotide
  Sense strand starting at position 3254 of SEQ ID NO: 2608
gaggaaugaugacagucaa

SEQ ID NO: 202409 - RNA, 19 nt, Artificial Sequence
  Description of Artificial Sequence: Synthetic oligonucleotide
  Antisense strand to SEQ ID NO: 202408
uugacugucaucauuccuc

SEQ ID NO: 202410 - RNA, 19 nt, Artificial Sequence
  Description of Artificial Sequence: Synthetic oligonucleotide
  Sense strand starting at position 3375 of SEQ ID NO: 2608
uacauauuguggucuauga

SEQ ID NO: 202411 - RNA, 19 nt, Artificial Sequence
  Description of Artificial Sequence: Synthetic oligonucleotide
  Antisense strand to SEQ ID NO: 202410
ucauagaccacaauaugua

SEQ ID NO: 202412 - RNA, 19 nt, Artificial Sequence
  Description of Artificial Sequence: Synthetic oligonucleotide
  Sense strand starting at position 3377 of SEQ ID NO: 2608
cauauuguggucuaugagu

SEQ ID NO: 202413 - RNA, 19 nt, Artificial Sequence
  Description of Artificial Sequence: Synthetic oligonucleotide
  Antisense strand to SEQ ID NO: 202412
acucauagaccacaauaug

SEQ ID NO: 202414 - RNA, 19 nt, Artificial Sequence
  Description of Artificial Sequence: Synthetic oligonucleotide
  Sense strand starting at position 3379 of SEQ ID NO: 2608
uauuguggucuaugagucu

SEQ ID NO: 202415 - RNA, 19 nt, Artificial Sequence
  Description of Artificial Sequence: Synthetic oligonucleotide
  Antisense strand to SEQ ID NO: 202414
agacucauagaccacaaua

SEQ ID NO: 202416 - RNA, 19 nt, Artificial Sequence
  Description of Artificial Sequence: Synthetic oligonucleotide
  Sense strand starting at position 3427 of SEQ ID NO: 2608
guaauagcauuguuuaucu

SEQ ID NO: 202417 - RNA, 19 nt, Artificial Sequence
  Description of Artificial Sequence: Synthetic oligonucleotide
  Antisense strand to SEQ ID NO: 202416
agauaaacaaugcuauuac

SEQ ID NO: 202418 - RNA, 19 nt, Artificial Sequence
  Description of Artificial Sequence: Synthetic oligonucleotide
  Sense strand starting at position 3957 of SEQ ID NO: 2608
cucacauuccuacgaggaa

SEQ ID NO: 202419 - RNA, 19 nt, Artificial Sequence
  Description of Artificial Sequence: Synthetic oligonucleotide
  Antisense strand to SEQ ID NO: 202418
uuccucguaggaaugugag

SEQ ID NO: 202420 - RNA, 19 nt, Artificial Sequence
  Description of Artificial Sequence: Synthetic oligonucleotide
  Sense strand starting at position 3960 of SEQ ID NO: 2608
acauuccuacgaggaauau

SEQ ID NO: 202421 - RNA, 19 nt, Artificial Sequence
  Description of Artificial Sequence: Synthetic oligonucleotide
  Antisense strand to SEQ ID NO: 202420
auauuccucguaggaaugu

SEQ ID NO: 202422 - RNA, 19 nt, Artificial Sequence
  Description of Artificial Sequence: Synthetic oligonucleotide
  Sense strand starting at position 3969 of SEQ ID NO: 2608
cgaggaauauauuaagauu

SEQ ID NO: 202423 - RNA, 19 nt, Artificial Sequence
  Description of Artificial Sequence: Synthetic oligonucleotide
  Antisense strand to SEQ ID NO: 202422
aaucuuaauauauuccucg

SEQ ID NO: 202424 - RNA, 19 nt, Artificial Sequence
  Description of Artificial Sequence: Synthetic oligonucleotide
  Sense strand starting at position 3977 of SEQ ID NO: 2608
auauuaagauuaucgcaug

SEQ ID NO: 202425 - RNA, 19 nt, Artificial Sequence
  Description of Artificial Sequence: Synthetic oligonucleotide
  Antisense strand to SEQ ID NO: 202424
caugcgauaaucuuaauau

SEQ ID NO: 202426 - RNA, 19 nt, Artificial Sequence
  Description of Artificial Sequence: Synthetic oligonucleotide
  Sense strand starting at position 3982 of SEQ ID NO: 2608
aagauuaucgcaugucuuc

SEQ ID NO: 202427 - RNA, 19 nt, Artificial Sequence
  Description of Artificial Sequence: Synthetic oligonucleotide
  Antisense strand to SEQ ID NO: 202426
gaagacaugcgauaaucuu

SEQ ID NO: 202428 - RNA, 19 nt, Artificial Sequence
  Description of Artificial Sequence: Synthetic oligonucleotide
  Sense strand starting at position 27 of SEQ ID NO: 2609
agugacucggagcaaauua

SEQ ID NO: 202429 - RNA, 19 nt, Artificial Sequence
  Description of Artificial Sequence: Synthetic oligonucleotide
  Antisense strand to SEQ ID NO: 202428
uaauuugcuccgagucacu

SEQ ID NO: 202430 - RNA, 19 nt, Artificial Sequence
  Description of Artificial Sequence: Synthetic oligonucleotide
  Sense strand starting at position 85 of SEQ ID NO: 2609
auggcuaucaagugaaggu

SEQ ID NO: 202431 - RNA, 19 nt, Artificial Sequence
  Description of Artificial Sequence: Synthetic oligonucleotide
  Antisense strand to SEQ ID NO: 202430
accuucacuugauagccau

SEQ ID NO: 202432 - RNA, 19 nt, Artificial Sequence
  Description of Artificial Sequence: Synthetic oligonucleotide
  Sense strand starting at position 204 of SEQ ID NO: 2609
ugaagaguaucaucucuuc

SEQ ID NO: 202433 - RNA, 19 nt, Artificial Sequence
  Description of Artificial Sequence: Synthetic oligonucleotide
  Antisense strand to SEQ ID NO: 202432
gaagagaugauacucuuca

SEQ ID NO: 202434 - RNA, 19 nt, Artificial Sequence
  Description of Artificial Sequence: Synthetic oligonucleotide
  Sense strand starting at position 207 of SEQ ID NO: 2609
agaguaucaucucuucuca

SEQ ID NO: 202435 - RNA, 19 nt, Artificial Sequence
  Description of Artificial Sequence: Synthetic oligonucleotide
  Antisense strand to SEQ ID NO: 202434
ugagaagagaugauacucu

SEQ ID NO: 202436 - RNA, 19 nt, Artificial Sequence
  Description of Artificial Sequence: Synthetic oligonucleotide
  Sense strand starting at position 513 of SEQ ID NO: 2609
gagugcuaccacuguacaa

SEQ ID NO: 202437 - RNA, 19 nt, Artificial Sequence
  Description of Artificial Sequence: Synthetic oligonucleotide
  Antisense strand to SEQ ID NO: 202436
uuguacagugguagcacuc

SEQ ID NO: 202438 - RNA, 19 nt, Artificial Sequence
  Description of Artificial Sequence: Synthetic oligonucleotide
  Sense strand starting at position 545 of SEQ ID NO: 2609
uugguuggcagacaauaau

SEQ ID NO: 202439 - RNA, 19 nt, Artificial Sequence
  Description of Artificial Sequence: Synthetic oligonucleotide
  Antisense strand to SEQ ID NO: 202438
auuauugucugccaaccaa

SEQ ID NO: 202440 - RNA, 19 nt, Artificial Sequence
  Description of Artificial Sequence: Synthetic oligonucleotide
  Sense strand starting at position 688 of SEQ ID NO: 2609
gaguccuugugguuaacau

SEQ ID NO: 202441 - RNA, 19 nt, Artificial Sequence
  Description of Artificial Sequence: Synthetic oligonucleotide
  Antisense strand to SEQ ID NO: 202440
auguuaaccacaaggacuc

SEQ ID NO: 202442 - RNA, 19 nt, Artificial Sequence
  Description of Artificial Sequence: Synthetic oligonucleotide
  Sense strand starting at position 695 of SEQ ID NO: 2609
ugugguuaacaucauacca

SEQ ID NO: 202443 - RNA, 19 nt, Artificial Sequence
  Description of Artificial Sequence: Synthetic oligonucleotide
  Antisense strand to SEQ ID NO: 202442
ugguaugauguuaaccaca

SEQ ID NO: 202444 - RNA, 19 nt, Artificial Sequence
  Description of Artificial Sequence: Synthetic oligonucleotide
  Sense strand starting at position 777 of SEQ ID NO: 2609
gagcucguaucuguauuua

SEQ ID NO: 202445 - RNA, 19 nt, Artificial Sequence
  Description of Artificial Sequence: Synthetic oligonucleotide
  Antisense strand to SEQ ID NO: 202444
uaaauacagauacgagcuc

SEQ ID NO: 202446 - RNA, 19 nt, Artificial Sequence
  Description of Artificial Sequence: Synthetic oligonucleotide
  Sense strand starting at position 966 of SEQ ID NO: 2609
ggguguuaugagugagagg

SEQ ID NO: 202447 - RNA, 19 nt, Artificial Sequence
  Description of Artificial Sequence: Synthetic oligonucleotide
  Antisense strand to SEQ ID NO: 202446
ccucucacucauaacaccc

SEQ ID NO: 202448 - RNA, 19 nt, Artificial Sequence
  Description of Artificial Sequence: Synthetic oligonucleotide
  Sense strand starting at position 1130 of SEQ ID NO: 2609
cuuacuaucguccaaguga

SEQ ID NO: 202449 - RNA, 19 nt, Artificial Sequence
  Description of Artificial Sequence: Synthetic oligonucleotide
  Antisense strand to SEQ ID NO: 202448
ucacuuggacgauaguaag

SEQ ID NO: 202450 - RNA, 19 nt, Artificial Sequence
  Description of Artificial Sequence: Synthetic oligonucleotide
  Sense strand starting at position 2215 of SEQ ID NO: 2609
ccaaguuucugguuggacu

SEQ ID NO: 202451 - RNA, 19 nt, Artificial Sequence
  Description of Artificial Sequence: Synthetic oligonucleotide
  Antisense strand to SEQ ID NO: 202450
aguccaaccagaaacuugg

SEQ ID NO: 202452 - RNA, 19 nt, Artificial Sequence
  Description of Artificial Sequence: Synthetic oligonucleotide
  Sense strand starting at position 2373 of SEQ ID NO: 2609
uuacaucucuaaucguuga

SEQ ID NO: 202453 - RNA, 19 nt, Artificial Sequence
  Description of Artificial Sequence: Synthetic oligonucleotide
  Antisense strand to SEQ ID NO: 202452
ucaacgauuagagauguaa

SEQ ID NO: 202454 - RNA, 19 nt, Artificial Sequence
  Description of Artificial Sequence: Synthetic oligonucleotide
  Sense strand starting at position 2724 of SEQ ID NO: 2609
guucuuaccuaauugugau

SEQ ID NO: 202455 - RNA, 19 nt, Artificial Sequence
  Description of Artificial Sequence: Synthetic oligonucleotide
  Antisense strand to SEQ ID NO: 202454
aucacaauuagguaagaac

SEQ ID NO: 202456 - RNA, 19 nt, Artificial Sequence
  Description of Artificial Sequence: Synthetic oligonucleotide
  Sense strand starting at position 2731 of SEQ ID NO: 2609
ccuaauugugaugaaccuu

SEQ ID NO: 202457 - RNA, 19 nt, Artificial Sequence
  Description of Artificial Sequence: Synthetic oligonucleotide
  Antisense strand to SEQ ID NO: 202456
aagguucaucacaauuagg

SEQ ID NO: 202458 - RNA, 19 nt, Artificial Sequence
  Description of Artificial Sequence: Synthetic oligonucleotide
  Sense strand starting at position 2820 of SEQ ID NO: 2609
gcgucugugaaacaugauc

SEQ ID NO: 202459 - RNA, 19 nt, Artificial Sequence
  Description of Artificial Sequence: Synthetic oligonucleotide
  Antisense strand to SEQ ID NO: 202458
gaucauguuucacagacgc

SEQ ID NO: 202460 - RNA, 19 nt, Artificial Sequence
  Description of Artificial Sequence: Synthetic oligonucleotide
  Sense strand starting at position 2825 of SEQ ID NO: 2609
ugugaaacaugaucccuuu

SEQ ID NO: 202461 - RNA, 19 nt, Artificial Sequence
  Description of Artificial Sequence: Synthetic oligonucleotide
  Antisense strand to SEQ ID NO: 202460
aaagggaucauguuucaca

SEQ ID NO: 202462 - RNA, 19 nt, Artificial Sequence
  Description of Artificial Sequence: Synthetic oligonucleotide
  Sense strand starting at position 3267 of SEQ ID NO: 2609
gaauauggaguuugucauc

SEQ ID NO: 202463 - RNA, 19 nt, Artificial Sequence
  Description of Artificial Sequence: Synthetic oligonucleotide
  Antisense strand to SEQ ID NO: 202462
gaugacaaacuccauauuc

SEQ ID NO: 202464 - RNA, 19 nt, Artificial Sequence
  Description of Artificial Sequence: Synthetic oligonucleotide
  Sense strand starting at position 3273 of SEQ ID NO: 2609
ggaguuugucaucauuguc

SEQ ID NO: 202465 - RNA, 19 nt, Artificial Sequence
  Description of Artificial Sequence: Synthetic oligonucleotide
  Antisense strand to SEQ ID NO: 202464
gacaaugaugacaaacucc

SEQ ID NO: 202466 - RNA, 19 nt, Artificial Sequence
  Description of Artificial Sequence: Synthetic oligonucleotide
  Sense strand starting at position 3278 of SEQ ID NO: 2609
uugucaucauugucacaua

SEQ ID NO: 202467 - RNA, 19 nt, Artificial Sequence
  Description of Artificial Sequence: Synthetic oligonucleotide
  Antisense strand to SEQ ID NO: 202466
uaugugacaaugaugacaa

SEQ ID NO: 202468 - RNA, 19 nt, Artificial Sequence
  Description of Artificial Sequence: Synthetic oligonucleotide
  Sense strand starting at position 3292 of SEQ ID NO: 2609
acauaaaucuaggagaaua

SEQ ID NO: 202469 - RNA, 19 nt, Artificial Sequence
  Description of Artificial Sequence: Synthetic oligonucleotide
  Antisense strand to SEQ ID NO: 202468
uauucuccuagauuuaugu

SEQ ID NO: 202470 - RNA, 19 nt, Artificial Sequence
  Description of Artificial Sequence: Synthetic oligonucleotide
  Sense strand starting at position 3326 of SEQ ID NO: 2609
uuggcaauauucuuugagu

SEQ ID NO: 202471 - RNA, 19 nt, Artificial Sequence
  Description of Artificial Sequence: Synthetic oligonucleotide
  Antisense strand to SEQ ID NO: 202470
acucaaagaauauugccaa

SEQ ID NO: 202472 - RNA, 19 nt, Artificial Sequence
  Description of Artificial Sequence: Synthetic oligonucleotide
  Sense strand starting at position 3327 of SEQ ID NO: 2609
uggcaauauucuuugaguu

SEQ ID NO: 202473 - RNA, 19 nt, Artificial Sequence
  Description of Artificial Sequence: Synthetic oligonucleotide
  Antisense strand to SEQ ID NO: 202472
aacucaaagaauauugcca

SEQ ID NO: 202474 - RNA, 19 nt, Artificial Sequence
  Description of Artificial Sequence: Synthetic oligonucleotide
  Sense strand starting at position 3328 of SEQ ID NO: 2609
ggcaauauucuuugaguua

SEQ ID NO: 202475 - RNA, 19 nt, Artificial Sequence
  Description of Artificial Sequence: Synthetic oligonucleotide
  Antisense strand to SEQ ID NO: 202474
uaacucaaagaauauugcc

SEQ ID NO: 202476 - RNA, 19 nt, Artificial Sequence
  Description of Artificial Sequence: Synthetic oligonucleotide
  Sense strand starting at position 3335 of SEQ ID NO: 2609
uucuuugaguuacuaagau

SEQ ID NO: 202477 - RNA, 19 nt, Artificial Sequence
  Description of Artificial Sequence: Synthetic oligonucleotide
  Antisense strand to SEQ ID NO: 202476
aucuuaguaacucaaagaa

SEQ ID NO: 202478 - RNA, 19 nt, Artificial Sequence
  Description of Artificial Sequence: Synthetic oligonucleotide
  Sense strand starting at position 3412 of SEQ ID NO: 2609
guucauauugauggcagga

SEQ ID NO: 202479 - RNA, 19 nt, Artificial Sequence
  Description of Artificial Sequence: Synthetic oligonucleotide
  Antisense strand to SEQ ID NO: 202478
uccugccaucaauaugaac

SEQ ID NO: 202480 - RNA, 19 nt, Artificial Sequence
  Description of Artificial Sequence: Synthetic oligonucleotide
  Sense strand starting at position 3417 of SEQ ID NO: 2609
uauugauggcaggaucuuu

SEQ ID NO: 202481 - RNA, 19 nt, Artificial Sequence
  Description of Artificial Sequence: Synthetic oligonucleotide
  Antisense strand to SEQ ID NO: 202480
aaagauccugccaucaaua

SEQ ID NO: 202482 - RNA, 19 nt, Artificial Sequence
  Description of Artificial Sequence: Synthetic oligonucleotide
  Sense strand starting at position 3422 of SEQ ID NO: 2609
auggcaggaucuuuaucaa

SEQ ID NO: 202483 - RNA, 19 nt, Artificial Sequence
  Description of Artificial Sequence: Synthetic oligonucleotide
  Antisense strand to SEQ ID NO: 202482
uugauaaagauccugccau

SEQ ID NO: 202484 - RNA, 19 nt, Artificial Sequence
  Description of Artificial Sequence: Synthetic oligonucleotide
  Sense strand starting at position 3425 of SEQ ID NO: 2609
gcaggaucuuuaucaacuu

SEQ ID NO: 202485 - RNA, 19 nt, Artificial Sequence
  Description of Artificial Sequence: Synthetic oligonucleotide
  Antisense strand to SEQ ID NO: 202484
aaguugauaaagauccugc

SEQ ID NO: 202486 - RNA, 19 nt, Artificial Sequence
  Description of Artificial Sequence: Synthetic oligonucleotide
  Sense strand starting at position 3437 of SEQ ID NO: 2609
ucaacuuguuaagugauau

SEQ ID NO: 202487 - RNA, 19 nt, Artificial Sequence
  Description of Artificial Sequence: Synthetic oligonucleotide
  Antisense strand to SEQ ID NO: 202486
auaucacuuaacaaguuga

SEQ ID NO: 202488 - RNA, 19 nt, Artificial Sequence
  Description of Artificial Sequence: Synthetic oligonucleotide
  Sense strand starting at position 3447 of SEQ ID NO: 2609
aagugauauuccucuuacg

SEQ ID NO: 202489 - RNA, 19 nt, Artificial Sequence
  Description of Artificial Sequence: Synthetic oligonucleotide
  Antisense strand to SEQ ID NO: 202488
cguaagaggaauaucacuu

SEQ ID NO: 202490 - RNA, 19 nt, Artificial Sequence
  Description of Artificial Sequence: Synthetic oligonucleotide
  Sense strand starting at position 3474 of SEQ ID NO: 2609
auauaugauuuggagagcu

SEQ ID NO: 202491 - RNA, 19 nt, Artificial Sequence
  Description of Artificial Sequence: Synthetic oligonucleotide
  Antisense strand to SEQ ID NO: 202490
agcucuccaaaucauauau

SEQ ID NO: 202492 - RNA, 19 nt, Artificial Sequence
  Description of Artificial Sequence: Synthetic oligonucleotide
  Sense strand starting at position 3486 of SEQ ID NO: 2609
gagagcucacuuugucaag

SEQ ID NO: 202493 - RNA, 19 nt, Artificial Sequence
  Description of Artificial Sequence: Synthetic oligonucleotide
  Antisense strand to SEQ ID NO: 202492
cuugacaaagugagcucuc

SEQ ID NO: 202494 - RNA, 19 nt, Artificial Sequence
  Description of Artificial Sequence: Synthetic oligonucleotide
  Sense strand starting at position 3487 of SEQ ID NO: 2609
agagcucacuuugucaaga

SEQ ID NO: 202495 - RNA, 19 nt, Artificial Sequence
  Description of Artificial Sequence: Synthetic oligonucleotide
  Antisense strand to SEQ ID NO: 202494
ucuugacaaagugagcucu

SEQ ID NO: 202496 - RNA, 19 nt, Artificial Sequence
  Description of Artificial Sequence: Synthetic oligonucleotide
  Sense strand starting at position 3616 of SEQ ID NO: 2609
ucacgaggauuguucuaca

SEQ ID NO: 202497 - RNA, 19 nt, Artificial Sequence
  Description of Artificial Sequence: Synthetic oligonucleotide
  Antisense strand to SEQ ID NO: 202496
uguagaacaauccucguga

SEQ ID NO: 202498 - RNA, 19 nt, Artificial Sequence
  Description of Artificial Sequence: Synthetic oligonucleotide
  Sense strand starting at position 3671 of SEQ ID NO: 2609
uuugcuuaggcacauagaa

SEQ ID NO: 202499 - RNA, 19 nt, Artificial Sequence
  Description of Artificial Sequence: Synthetic oligonucleotide
  Antisense strand to SEQ ID NO: 202498
uucuaugugccuaagcaaa

SEQ ID NO: 202500 - RNA, 19 nt, Artificial Sequence
  Description of Artificial Sequence: Synthetic oligonucleotide
  Sense strand starting at position 3741 of SEQ ID NO: 2609
uugauacagucagugacaa

SEQ ID NO: 202501 - RNA, 19 nt, Artificial Sequence
  Description of Artificial Sequence: Synthetic oligonucleotide
  Antisense strand to SEQ ID NO: 202500
uugucacugacuguaucaa

SEQ ID NO: 202502 - RNA, 19 nt, Artificial Sequence
  Description of Artificial Sequence: Synthetic oligonucleotide
  Sense strand starting at position 3812 of SEQ ID NO: 2609
acccucuaugcuuaguaua

SEQ ID NO: 202503 - RNA, 19 nt, Artificial Sequence
  Description of Artificial Sequence: Synthetic oligonucleotide
  Antisense strand to SEQ ID NO: 202502
uauacuaagcauagagggu

SEQ ID NO: 202504 - RNA, 19 nt, Artificial Sequence
  Description of Artificial Sequence: Synthetic oligonucleotide
  Sense strand starting at position 3829 of SEQ ID NO: 2609
uaggcaguccuuuggaaga

SEQ ID NO: 202505 - RNA, 19 nt, Artificial Sequence
  Description of Artificial Sequence: Synthetic oligonucleotide
  Antisense strand to SEQ ID NO: 202504
ucuuccaaaggacugccua

SEQ ID NO: 202506 - RNA, 19 nt, Artificial Sequence
  Description of Artificial Sequence: Synthetic oligonucleotide
  Sense strand starting at position 3926 of SEQ ID NO: 2609
cuacuaaucuaggcugcua

SEQ ID NO: 202507 - RNA, 19 nt, Artificial Sequence
  Description of Artificial Sequence: Synthetic oligonucleotide
  Antisense strand to SEQ ID NO: 202506
uagcagccuagauuaguag

SEQ ID NO: 202508 - RNA, 19 nt, Artificial Sequence
  Description of Artificial Sequence: Synthetic oligonucleotide
  Sense strand starting at position 34 of SEQ ID NO: 2610
cggguaauucuuggguuaa

SEQ ID NO: 202509 - RNA, 19 nt, Artificial Sequence
  Description of Artificial Sequence: Synthetic oligonucleotide
  Antisense strand to SEQ ID NO: 202508
uuaacccaagaauuacccg

SEQ ID NO: 202510 - RNA, 19 nt, Artificial Sequence
  Description of Artificial Sequence: Synthetic oligonucleotide
  Sense strand starting at position 36 of SEQ ID NO: 2610
gguaauucuuggguuaagu

SEQ ID NO: 202511 - RNA, 19 nt, Artificial Sequence
  Description of Artificial Sequence: Synthetic oligonucleotide
  Antisense strand to SEQ ID NO: 202510
acuuaacccaagaauuacc

SEQ ID NO: 202512 - RNA, 19 nt, Artificial Sequence
  Description of Artificial Sequence: Synthetic oligonucleotide
  Sense strand starting at position 38 of SEQ ID NO: 2610
uaauucuuggguuaaguau

SEQ ID NO: 202513 - RNA, 19 nt, Artificial Sequence
  Description of Artificial Sequence: Synthetic oligonucleotide
  Antisense strand to SEQ ID NO: 202512
auacuuaacccaagaauua

SEQ ID NO: 202514 - RNA, 19 nt, Artificial Sequence
  Description of Artificial Sequence: Synthetic oligonucleotide
  Sense strand starting at position 138 of SEQ ID NO: 2610
agaacuaggcucugaagau

SEQ ID NO: 202515 - RNA, 19 nt, Artificial Sequence
  Description of Artificial Sequence: Synthetic oligonucleotide
  Antisense strand to SEQ ID NO: 202514
aucuucagagccuaguucu

SEQ ID NO: 202516 - RNA, 19 nt, Artificial Sequence
  Description of Artificial Sequence: Synthetic oligonucleotide
  Sense strand starting at position 139 of SEQ ID NO: 2610
gaacuaggcucugaagaug

SEQ ID NO: 202517 - RNA, 19 nt, Artificial Sequence
  Description of Artificial Sequence: Synthetic oligonucleotide
  Antisense strand to SEQ ID NO: 202516
caucuucagagccuaguuc

SEQ ID NO: 202518 - RNA, 19 nt, Artificial Sequence
  Description of Artificial Sequence: Synthetic oligonucleotide
  Sense strand starting at position 469 of SEQ ID NO: 2610
gcugacagauucccacauu

SEQ ID NO: 202519 - RNA, 19 nt, Artificial Sequence
  Description of Artificial Sequence: Synthetic oligonucleotide
  Antisense strand to SEQ ID NO: 202518
aaugugggaaucugucagc

SEQ ID NO: 202520 - RNA, 19 nt, Artificial Sequence
  Description of Artificial Sequence: Synthetic oligonucleotide
  Sense strand starting at position 528 of SEQ ID NO: 2610
ggcaaauacucgcugccau

SEQ ID NO: 202521 - RNA, 19 nt, Artificial Sequence
  Description of Artificial Sequence: Synthetic oligonucleotide
  Antisense strand to SEQ ID NO: 202520
auggcagcgaguauuugcc

SEQ ID NO: 202522 - RNA, 19 nt, Artificial Sequence
  Description of Artificial Sequence: Synthetic oligonucleotide
  Sense strand starting at position 529 of SEQ ID NO: 2610
gcaaauacucgcugccaua

SEQ ID NO: 202523 - RNA, 19 nt, Artificial Sequence
  Description of Artificial Sequence: Synthetic oligonucleotide
  Antisense strand to SEQ ID NO: 202522
uauggcagcgaguauuugc

SEQ ID NO: 202524 - RNA, 19 nt, Artificial Sequence
  Description of Artificial Sequence: Synthetic oligonucleotide
  Sense strand starting at position 618 of SEQ ID NO: 2610
gggugcucgggccagagau

SEQ ID NO: 202525 - RNA, 19 nt, Artificial Sequence
  Description of Artificial Sequence: Synthetic oligonucleotide
  Antisense strand to SEQ ID NO: 202524
aucucuggcccgagcaccc

SEQ ID NO: 202526 - RNA, 19 nt, Artificial Sequence
  Description of Artificial Sequence: Synthetic oligonucleotide
  Sense strand starting at position 619 of SEQ ID NO: 2610
ggugcucgggccagagaua

SEQ ID NO: 202527 - RNA, 19 nt, Artificial Sequence
  Description of Artificial Sequence: Synthetic oligonucleotide
  Antisense strand to SEQ ID NO: 202526
uaucucuggcccgagcacc

SEQ ID NO: 202528 - RNA, 19 nt, Artificial Sequence
  Description of Artificial Sequence: Synthetic oligonucleotide
  Sense strand starting at position 620 of SEQ ID NO: 2610
gugcucgggccagagauaa

SEQ ID NO: 202529 - RNA, 19 nt, Artificial Sequence
  Description of Artificial Sequence: Synthetic oligonucleotide
  Antisense strand to SEQ ID NO: 202528
uuaucucuggcccgagcac

SEQ ID NO: 202530 - RNA, 19 nt, Artificial Sequence
  Description of Artificial Sequence: Synthetic oligonucleotide
  Sense strand starting at position 2126 of SEQ ID NO: 2610
gcgcuucuauguucccaga

SEQ ID NO: 202531 - RNA, 19 nt, Artificial Sequence
  Description of Artificial Sequence: Synthetic oligonucleotide
  Antisense strand to SEQ ID NO: 202530
ucugggaacauagaagcgc

SEQ ID NO: 202532 - RNA, 19 nt, Artificial Sequence
  Description of Artificial Sequence: Synthetic oligonucleotide
  Sense strand starting at position 2129 of SEQ ID NO: 2610
cuucuauguucccagagga

SEQ ID NO: 202533 - RNA, 19 nt, Artificial Sequence
  Description of Artificial Sequence: Synthetic oligonucleotide
  Antisense strand to SEQ ID NO: 202532
uccucugggaacauagaag

SEQ ID NO: 202534 - RNA, 19 nt, Artificial Sequence
  Description of Artificial Sequence: Synthetic oligonucleotide
  Sense strand starting at position 2475 of SEQ ID NO: 2610
gaaacugaguuuccgaaag

SEQ ID NO: 202535 - RNA, 19 nt, Artificial Sequence
  Description of Artificial Sequence: Synthetic oligonucleotide
  Antisense strand to SEQ ID NO: 202534
cuuucggaaacucaguuuc

SEQ ID NO: 202536 - RNA, 19 nt, Artificial Sequence
  Description of Artificial Sequence: Synthetic oligonucleotide
  Sense strand starting at position 2531 of SEQ ID NO: 2610
gguggaagcuucggauuua

SEQ ID NO: 202537 - RNA, 19 nt, Artificial Sequence
  Description of Artificial Sequence: Synthetic oligonucleotide
  Antisense strand to SEQ ID NO: 202536
uaaauccgaagcuuccacc

SEQ ID NO: 202538 - RNA, 19 nt, Artificial Sequence
  Description of Artificial Sequence: Synthetic oligonucleotide
  Sense strand starting at position 2532 of SEQ ID NO: 2610
guggaagcuucggauuuag

SEQ ID NO: 202539 - RNA, 19 nt, Artificial Sequence
  Description of Artificial Sequence: Synthetic oligonucleotide
  Antisense strand to SEQ ID NO: 202538
cuaaauccgaagcuuccac

SEQ ID NO: 202540 - RNA, 19 nt, Artificial Sequence
  Description of Artificial Sequence: Synthetic oligonucleotide
  Sense strand starting at position 2659 of SEQ ID NO: 2610
acagcauugcucugaggaa

SEQ ID NO: 202541 - RNA, 19 nt, Artificial Sequence
  Description of Artificial Sequence: Synthetic oligonucleotide
  Antisense strand to SEQ ID NO: 202540
uuccucagagcaaugcugu

SEQ ID NO: 202542 - RNA, 19 nt, Artificial Sequence
  Description of Artificial Sequence: Synthetic oligonucleotide
  Sense strand starting at position 2694 of SEQ ID NO: 2610
auaggaacgggucgucaaa

SEQ ID NO: 202543 - RNA, 19 nt, Artificial Sequence
  Description of Artificial Sequence: Synthetic oligonucleotide
  Antisense strand to SEQ ID NO: 202542
uuugacgacccguuccuau

SEQ ID NO: 202544 - RNA, 19 nt, Artificial Sequence
  Description of Artificial Sequence: Synthetic oligonucleotide
  Sense strand starting at position 2733 of SEQ ID NO: 2610
aguauuauuuauugaggca

SEQ ID NO: 202545 - RNA, 19 nt, Artificial Sequence
  Description of Artificial Sequence: Synthetic oligonucleotide
  Antisense strand to SEQ ID NO: 202544
ugccucaauaaauaauacu

SEQ ID NO: 202546 - RNA, 19 nt, Artificial Sequence
  Description of Artificial Sequence: Synthetic oligonucleotide
  Sense strand starting at position 2766 of SEQ ID NO: 2610
ggcagauuuccugggcuca

SEQ ID NO: 202547 - RNA, 19 nt, Artificial Sequence
  Description of Artificial Sequence: Synthetic oligonucleotide
  Antisense strand to SEQ ID NO: 202546
ugagcccaggaaaucugcc

SEQ ID NO: 202548 - RNA, 19 nt, Artificial Sequence
  Description of Artificial Sequence: Synthetic oligonucleotide
  Sense strand starting at position 2959 of SEQ ID NO: 2610
gcaggugcccacgguuauu

SEQ ID NO: 202549 - RNA, 19 nt, Artificial Sequence
  Description of Artificial Sequence: Synthetic oligonucleotide
  Antisense strand to SEQ ID NO: 202548
aauaaccgugggcaccugc

SEQ ID NO: 202550 - RNA, 19 nt, Artificial Sequence
  Description of Artificial Sequence: Synthetic oligonucleotide
  Sense strand starting at position 3008 of SEQ ID NO: 2610
cucagucaucagugccauu

SEQ ID NO: 202551 - RNA, 19 nt, Artificial Sequence
  Description of Artificial Sequence: Synthetic oligonucleotide
  Antisense strand to SEQ ID NO: 202550
aauggcacugaugacugag

SEQ ID NO: 202552 - RNA, 19 nt, Artificial Sequence
  Description of Artificial Sequence: Synthetic oligonucleotide
  Sense strand starting at position 3019 of SEQ ID NO: 2610
gugccauuccacuggagau

SEQ ID NO: 202553 - RNA, 19 nt, Artificial Sequence
  Description of Artificial Sequence: Synthetic oligonucleotide
  Antisense strand to SEQ ID NO: 202552
aucuccaguggaauggcac

SEQ ID NO: 202554 - RNA, 19 nt, Artificial Sequence
  Description of Artificial Sequence: Synthetic oligonucleotide
  Sense strand starting at position 3029 of SEQ ID NO: 2610
acuggagauucuggaaaga

SEQ ID NO: 202555 - RNA, 19 nt, Artificial Sequence
  Description of Artificial Sequence: Synthetic oligonucleotide
  Antisense strand to SEQ ID NO: 202554
ucuuuccagaaucuccagu

SEQ ID NO: 202556 - RNA, 19 nt, Artificial Sequence
  Description of Artificial Sequence: Synthetic oligonucleotide
  Sense strand starting at position 3068 of SEQ ID NO: 2610
cucagauguccuugccaga

SEQ ID NO: 202557 - RNA, 19 nt, Artificial Sequence
  Description of Artificial Sequence: Synthetic oligonucleotide
  Antisense strand to SEQ ID NO: 202556
ucuggcaaggacaucugag

SEQ ID NO: 202558 - RNA, 19 nt, Artificial Sequence
  Description of Artificial Sequence: Synthetic oligonucleotide
  Sense strand starting at position 3071 of SEQ ID NO: 2610
agauguccuugccagagga

SEQ ID NO: 202559 - RNA, 19 nt, Artificial Sequence
  Description of Artificial Sequence: Synthetic oligonucleotide
  Antisense strand to SEQ ID NO: 202558
uccucuggcaaggacaucu

SEQ ID NO: 202560 - RNA, 19 nt, Artificial Sequence
  Description of Artificial Sequence: Synthetic oligonucleotide
  Sense strand starting at position 3153 of SEQ ID NO: 2610
cugugacuguuacuccuua

SEQ ID NO: 202561 - RNA, 19 nt, Artificial Sequence
  Description of Artificial Sequence: Synthetic oligonucleotide
  Antisense strand to SEQ ID NO: 202560
uaaggaguaacagucacag

SEQ ID NO: 202562 - RNA, 19 nt, Artificial Sequence
  Description of Artificial Sequence: Synthetic oligonucleotide
  Sense strand starting at position 3154 of SEQ ID NO: 2610
ugugacuguuacuccuuaa

SEQ ID NO: 202563 - RNA, 19 nt, Artificial Sequence
  Description of Artificial Sequence: Synthetic oligonucleotide
  Antisense strand to SEQ ID NO: 202562
uuaaggaguaacagucaca

SEQ ID NO: 202564 - RNA, 19 nt, Artificial Sequence
  Description of Artificial Sequence: Synthetic oligonucleotide
  Sense strand starting at position 3157 of SEQ ID NO: 2610
gacuguuacuccuuaagga

SEQ ID NO: 202565 - RNA, 19 nt, Artificial Sequence
  Description of Artificial Sequence: Synthetic oligonucleotide
  Antisense strand to SEQ ID NO: 202564
uccuuaaggaguaacaguc

SEQ ID NO: 202566 - RNA, 19 nt, Artificial Sequence
  Description of Artificial Sequence: Synthetic oligonucleotide
  Sense strand starting at position 3231 of SEQ ID NO: 2610
ggccuugaacucugaugaa

SEQ ID NO: 202567 - RNA, 19 nt, Artificial Sequence
  Description of Artificial Sequence: Synthetic oligonucleotide
  Antisense strand to SEQ ID NO: 202566
uucaucagaguucaaggcc

SEQ ID NO: 202568 - RNA, 19 nt, Artificial Sequence
  Description of Artificial Sequence: Synthetic oligonucleotide
  Sense strand starting at position 3279 of SEQ ID NO: 2610
uucucuccuccaugggaga

SEQ ID NO: 202569 - RNA, 19 nt, Artificial Sequence
  Description of Artificial Sequence: Synthetic oligonucleotide
  Antisense strand to SEQ ID NO: 202568
ucucccauggaggagagaa

SEQ ID NO: 202570 - RNA, 19 nt, Artificial Sequence
  Description of Artificial Sequence: Synthetic oligonucleotide
  Sense strand starting at position 3410 of SEQ ID NO: 2610
agccuugguuugucaacga

SEQ ID NO: 202571 - RNA, 19 nt, Artificial Sequence
  Description of Artificial Sequence: Synthetic oligonucleotide
  Antisense strand to SEQ ID NO: 202570
ucguugacaaaccaaggcu

SEQ ID NO: 202572 - RNA, 19 nt, Artificial Sequence
  Description of Artificial Sequence: Synthetic oligonucleotide
  Sense strand starting at position 3414 of SEQ ID NO: 2610
uugguuugucaacgacgga

SEQ ID NO: 202573 - RNA, 19 nt, Artificial Sequence
  Description of Artificial Sequence: Synthetic oligonucleotide
  Antisense strand to SEQ ID NO: 202572
uccgucguugacaaaccaa

SEQ ID NO: 202574 - RNA, 19 nt, Artificial Sequence
  Description of Artificial Sequence: Synthetic oligonucleotide
  Sense strand starting at position 3415 of SEQ ID NO: 2610
ugguuugucaacgacggaa

SEQ ID NO: 202575 - RNA, 19 nt, Artificial Sequence
  Description of Artificial Sequence: Synthetic oligonucleotide
  Antisense strand to SEQ ID NO: 202574
uuccgucguugacaaacca

SEQ ID NO: 202576 - RNA, 19 nt, Artificial Sequence
  Description of Artificial Sequence: Synthetic oligonucleotide
  Sense strand starting at position 3486 of SEQ ID NO: 2610
ugaggauauuuccagccaa

SEQ ID NO: 202577 - RNA, 19 nt, Artificial Sequence
  Description of Artificial Sequence: Synthetic oligonucleotide
  Antisense strand to SEQ ID NO: 202576
uuggcuggaaauauccuca

SEQ ID NO: 202578 - RNA, 19 nt, Artificial Sequence
  Description of Artificial Sequence: Synthetic oligonucleotide
  Sense strand starting at position 3533 of SEQ ID NO: 2610
agagauggaugucaaagga

SEQ ID NO: 202579 - RNA, 19 nt, Artificial Sequence
  Description of Artificial Sequence: Synthetic oligonucleotide
  Antisense strand to SEQ ID NO: 202578
uccuuugacauccaucucu

SEQ ID NO: 202580 - RNA, 19 nt, Artificial Sequence
  Description of Artificial Sequence: Synthetic oligonucleotide
  Sense strand starting at position 3537 of SEQ ID NO: 2610
auggaugucaaaggacuuu

SEQ ID NO: 202581 - RNA, 19 nt, Artificial Sequence
  Description of Artificial Sequence: Synthetic oligonucleotide
  Antisense strand to SEQ ID NO: 202580
aaaguccuuugacauccau

SEQ ID NO: 202582 - RNA, 19 nt, Artificial Sequence
  Description of Artificial Sequence: Synthetic oligonucleotide
  Sense strand starting at position 3543 of SEQ ID NO: 2610
gucaaaggacuuugacaua

SEQ ID NO: 202583 - RNA, 19 nt, Artificial Sequence
  Description of Artificial Sequence: Synthetic oligonucleotide
  Antisense strand to SEQ ID NO: 202582
uaugucaaaguccuuugac

SEQ ID NO: 202584 - RNA, 19 nt, Artificial Sequence
  Description of Artificial Sequence: Synthetic oligonucleotide
  Sense strand starting at position 3672 of SEQ ID NO: 2610
gcaugugcucccggagaca

SEQ ID NO: 202585 - RNA, 19 nt, Artificial Sequence
  Description of Artificial Sequence: Synthetic oligonucleotide
  Antisense strand to SEQ ID NO: 202584
ugucuccgggagcacaugc

SEQ ID NO: 202586 - RNA, 19 nt, Artificial Sequence
  Description of Artificial Sequence: Synthetic oligonucleotide
  Sense strand starting at position 3953 of SEQ ID NO: 2610
gugugcaugcuugcucaaa

SEQ ID NO: 202587 - RNA, 19 nt, Artificial Sequence
  Description of Artificial Sequence: Synthetic oligonucleotide
  Antisense strand to SEQ ID NO: 202586
uuugagcaagcaugcacac

SEQ ID NO: 202588 - RNA, 19 nt, Artificial Sequence
  Description of Artificial Sequence: Synthetic oligonucleotide
  Sense strand starting at position 289 of SEQ ID NO: 2611
cuauuuggcucaucuaguu

SEQ ID NO: 202589 - RNA, 19 nt, Artificial Sequence
  Description of Artificial Sequence: Synthetic oligonucleotide
  Antisense strand to SEQ ID NO: 202588
aacuagaugagccaaauag

SEQ ID NO: 202590 - RNA, 19 nt, Artificial Sequence
  Description of Artificial Sequence: Synthetic oligonucleotide
  Sense strand starting at position 324 of SEQ ID NO: 2611
gggaaagacuugcccucaa

SEQ ID NO: 202591 - RNA, 19 nt, Artificial Sequence
  Description of Artificial Sequence: Synthetic oligonucleotide
  Antisense strand to SEQ ID NO: 202590
uugagggcaagucuuuccc

SEQ ID NO: 202592 - RNA, 19 nt, Artificial Sequence
  Description of Artificial Sequence: Synthetic oligonucleotide
  Sense strand starting at position 449 of SEQ ID NO: 2611
uagccucuggucgagauaa

SEQ ID NO: 202593 - RNA, 19 nt, Artificial Sequence
  Description of Artificial Sequence: Synthetic oligonucleotide
  Antisense strand to SEQ ID NO: 202592
uuaucucgaccagaggcua

SEQ ID NO: 202594 - RNA, 19 nt, Artificial Sequence
  Description of Artificial Sequence: Synthetic oligonucleotide
  Sense strand starting at position 451 of SEQ ID NO: 2611
gccucuggucgagauaaca

SEQ ID NO: 202595 - RNA, 19 nt, Artificial Sequence
  Description of Artificial Sequence: Synthetic oligonucleotide
  Antisense strand to SEQ ID NO: 202594
uguuaucucgaccagaggc

SEQ ID NO: 202596 - RNA, 19 nt, Artificial Sequence
  Description of Artificial Sequence: Synthetic oligonucleotide
  Sense strand starting at position 459 of SEQ ID NO: 2611
ucgagauaacacugaugca

SEQ ID NO: 202597 - RNA, 19 nt, Artificial Sequence
  Description of Artificial Sequence: Synthetic oligonucleotide
  Antisense strand to SEQ ID NO: 202596
ugcaucaguguuaucucga

SEQ ID NO: 202598 - RNA, 19 nt, Artificial Sequence
  Description of Artificial Sequence: Synthetic oligonucleotide
  Sense strand starting at position 474 of SEQ ID NO: 2611
ugcagaaauuggucuguau

SEQ ID NO: 202599 - RNA, 19 nt, Artificial Sequence
  Description of Artificial Sequence: Synthetic oligonucleotide
  Antisense strand to SEQ ID NO: 202598
auacagaccaauuucugca

SEQ ID NO: 202600 - RNA, 19 nt, Artificial Sequence
  Description of Artificial Sequence: Synthetic oligonucleotide
  Sense strand starting at position 478 of SEQ ID NO: 2611
gaaauuggucuguaugcaa

SEQ ID NO: 202601 - RNA, 19 nt, Artificial Sequence
  Description of Artificial Sequence: Synthetic oligonucleotide
  Antisense strand to SEQ ID NO: 202600
uugcauacagaccaauuuc

SEQ ID NO: 202602 - RNA, 19 nt, Artificial Sequence
  Description of Artificial Sequence: Synthetic oligonucleotide
  Sense strand starting at position 714 of SEQ ID NO: 2611
gcuugcuaccuugaauaaa

SEQ ID NO: 202603 - RNA, 19 nt, Artificial Sequence
  Description of Artificial Sequence: Synthetic oligonucleotide
  Antisense strand to SEQ ID NO: 202602
uuuauucaagguagcaagc

SEQ ID NO: 202604 - RNA, 19 nt, Artificial Sequence
  Description of Artificial Sequence: Synthetic oligonucleotide
  Sense strand starting at position 828 of SEQ ID NO: 2611
acacguucuuuggcaauuu

SEQ ID NO: 202605 - RNA, 19 nt, Artificial Sequence
  Description of Artificial Sequence: Synthetic oligonucleotide
  Antisense strand to SEQ ID NO: 202604
aaauugccaaagaacgugu

SEQ ID NO: 202606 - RNA, 19 nt, Artificial Sequence
  Description of Artificial Sequence: Synthetic oligonucleotide
  Sense strand starting at position 911 of SEQ ID NO: 2611
aguuaauagcccugaccau

SEQ ID NO: 202607 - RNA, 19 nt, Artificial Sequence
  Description of Artificial Sequence: Synthetic oligonucleotide
  Antisense strand to SEQ ID NO: 202606
auggucagggcuauuaacu

SEQ ID NO: 202608 - RNA, 19 nt, Artificial Sequence
  Description of Artificial Sequence: Synthetic oligonucleotide
  Sense strand starting at position 912 of SEQ ID NO: 2611
guuaauagcccugaccauu

SEQ ID NO: 202609 - RNA, 19 nt, Artificial Sequence
  Description of Artificial Sequence: Synthetic oligonucleotide
  Antisense strand to SEQ ID NO: 202608
aauggucagggcuauuaac

SEQ ID NO: 202610 - RNA, 19 nt, Artificial Sequence
  Description of Artificial Sequence: Synthetic oligonucleotide
  Sense strand starting at position 1005 of SEQ ID NO: 2611
guuuaagaauaaucuguga

SEQ ID NO: 202611 - RNA, 19 nt, Artificial Sequence
  Description of Artificial Sequence: Synthetic oligonucleotide
  Antisense strand to SEQ ID NO: 202610
ucacagauuauucuuaaac

SEQ ID NO: 202612 - RNA, 19 nt, Artificial Sequence
  Description of Artificial Sequence: Synthetic oligonucleotide
  Sense strand starting at position 1068 of SEQ ID NO: 2611
uugaguguccacuaaauua

SEQ ID NO: 202613 - RNA, 19 nt, Artificial Sequence
  Description of Artificial Sequence: Synthetic oligonucleotide
  Antisense strand to SEQ ID NO: 202612
uaauuuaguggacacucaa

SEQ ID NO: 202614 - RNA, 19 nt, Artificial Sequence
  Description of Artificial Sequence: Synthetic oligonucleotide
  Sense strand starting at position 1280 of SEQ ID NO: 2611
acgaguuugaccuacagac

SEQ ID NO: 202615 - RNA, 19 nt, Artificial Sequence
  Description of Artificial Sequence: Synthetic oligonucleotide
  Antisense strand to SEQ ID NO: 202614
gucuguaggucaaacucgu

SEQ ID NO: 202616 - RNA, 19 nt, Artificial Sequence
  Description of Artificial Sequence: Synthetic oligonucleotide
  Sense strand starting at position 1529 of SEQ ID NO: 2611
cccuaagauuaggaagaaa

SEQ ID NO: 202617 - RNA, 19 nt, Artificial Sequence
  Description of Artificial Sequence: Synthetic oligonucleotide
  Antisense strand to SEQ ID NO: 202616
uuucuuccuaaucuuaggg

SEQ ID NO: 202618 - RNA, 19 nt, Artificial Sequence
  Description of Artificial Sequence: Synthetic oligonucleotide
  Sense strand starting at position 1797 of SEQ ID NO: 2611
uuccucucugcggaggaaa

SEQ ID NO: 202619 - RNA, 19 nt, Artificial Sequence
  Description of Artificial Sequence: Synthetic oligonucleotide
  Antisense strand to SEQ ID NO: 202618
uuuccuccgcagagaggaa

SEQ ID NO: 202620 - RNA, 19 nt, Artificial Sequence
  Description of Artificial Sequence: Synthetic oligonucleotide
  Sense strand starting at position 2146 of SEQ ID NO: 2611
guaacaacuuuauuggcaa

SEQ ID NO: 202621 - RNA, 19 nt, Artificial Sequence
  Description of Artificial Sequence: Synthetic oligonucleotide
  Antisense strand to SEQ ID NO: 202620
uugccaauaaaguuguuac

SEQ ID NO: 202622 - RNA, 19 nt, Artificial Sequence
  Description of Artificial Sequence: Synthetic oligonucleotide
  Sense strand starting at position 2272 of SEQ ID NO: 2611
auaugaguuggcugcagga

SEQ ID NO: 202623 - RNA, 19 nt, Artificial Sequence
  Description of Artificial Sequence: Synthetic oligonucleotide
  Antisense strand to SEQ ID NO: 202622
uccugcagccaacucauau

SEQ ID NO: 202624 - RNA, 19 nt, Artificial Sequence
  Description of Artificial Sequence: Synthetic oligonucleotide
  Sense strand starting at position 2274 of SEQ ID NO: 2611
augaguuggcugcaggaua

SEQ ID NO: 202625 - RNA, 19 nt, Artificial Sequence
  Description of Artificial Sequence: Synthetic oligonucleotide
  Antisense strand to SEQ ID NO: 202624
uauccugcagccaacucau

SEQ ID NO: 202626 - RNA, 19 nt, Artificial Sequence
  Description of Artificial Sequence: Synthetic oligonucleotide
  Sense strand starting at position 2504 of SEQ ID NO: 2611
guuccagaaguauggcuaa

SEQ ID NO: 202627 - RNA, 19 nt, Artificial Sequence
  Description of Artificial Sequence: Synthetic oligonucleotide
  Antisense strand to SEQ ID NO: 202626
uuagccauacuucuggaac

SEQ ID NO: 202628 - RNA, 19 nt, Artificial Sequence
  Description of Artificial Sequence: Synthetic oligonucleotide
  Sense strand starting at position 2565 of SEQ ID NO: 2611
gccauaagcaaaugaguag

SEQ ID NO: 202629 - RNA, 19 nt, Artificial Sequence
  Description of Artificial Sequence: Synthetic oligonucleotide
  Antisense strand to SEQ ID NO: 202628
cuacucauuugcuuauggc

SEQ ID NO: 202630 - RNA, 19 nt, Artificial Sequence
  Description of Artificial Sequence: Synthetic oligonucleotide
  Sense strand starting at position 2584 of SEQ ID NO: 2611
aucuaagagcuuugucauc

SEQ ID NO: 202631 - RNA, 19 nt, Artificial Sequence
  Description of Artificial Sequence: Synthetic oligonucleotide
  Antisense strand to SEQ ID NO: 202630
gaugacaaagcucuuagau

SEQ ID NO: 202632 - RNA, 19 nt, Artificial Sequence
  Description of Artificial Sequence: Synthetic oligonucleotide
  Sense strand starting at position 2586 of SEQ ID NO: 2611
cuaagagcuuugucaucug

SEQ ID NO: 202633 - RNA, 19 nt, Artificial Sequence
  Description of Artificial Sequence: Synthetic oligonucleotide
  Antisense strand to SEQ ID NO: 202632
cagaugacaaagcucuuag

SEQ ID NO: 202634 - RNA, 19 nt, Artificial Sequence
  Description of Artificial Sequence: Synthetic oligonucleotide
  Sense strand starting at position 2688 of SEQ ID NO: 2611
ucauguaggguuugagacu

SEQ ID NO: 202635 - RNA, 19 nt, Artificial Sequence
  Description of Artificial Sequence: Synthetic oligonucleotide
  Antisense strand to SEQ ID NO: 202634
agucucaaacccuacauga

SEQ ID NO: 202636 - RNA, 19 nt, Artificial Sequence
  Description of Artificial Sequence: Synthetic oligonucleotide
  Sense strand starting at position 2724 of SEQ ID NO: 2611
aagucugaguauucucaga

SEQ ID NO: 202637 - RNA, 19 nt, Artificial Sequence
  Description of Artificial Sequence: Synthetic oligonucleotide
  Antisense strand to SEQ ID NO: 202636
ucugagaauacucagacuu

SEQ ID NO: 202638 - RNA, 19 nt, Artificial Sequence
  Description of Artificial Sequence: Synthetic oligonucleotide
  Sense strand starting at position 2726 of SEQ ID NO: 2611
gucugaguauucucagaac

SEQ ID NO: 202639 - RNA, 19 nt, Artificial Sequence
  Description of Artificial Sequence: Synthetic oligonucleotide
  Antisense strand to SEQ ID NO: 202638
guucugagaauacucagac

SEQ ID NO: 202640 - RNA, 19 nt, Artificial Sequence
  Description of Artificial Sequence: Synthetic oligonucleotide
  Sense strand starting at position 2897 of SEQ ID NO: 2611
ggcuaauggaagugauauc

SEQ ID NO: 202641 - RNA, 19 nt, Artificial Sequence
  Description of Artificial Sequence: Synthetic oligonucleotide
  Antisense strand to SEQ ID NO: 202640
gauaucacuuccauuagcc

SEQ ID NO: 202642 - RNA, 19 nt, Artificial Sequence
  Description of Artificial Sequence: Synthetic oligonucleotide
  Sense strand starting at position 2906 of SEQ ID NO: 2611
aagugauaucaacacguca

SEQ ID NO: 202643 - RNA, 19 nt, Artificial Sequence
  Description of Artificial Sequence: Synthetic oligonucleotide
  Antisense strand to SEQ ID NO: 202642
ugacguguugauaucacuu

SEQ ID NO: 202644 - RNA, 19 nt, Artificial Sequence
  Description of Artificial Sequence: Synthetic oligonucleotide
  Sense strand starting at position 2942 of SEQ ID NO: 2611
ucuagaaugcccugcuaag

SEQ ID NO: 202645 - RNA, 19 nt, Artificial Sequence
  Description of Artificial Sequence: Synthetic oligonucleotide
  Antisense strand to SEQ ID NO: 202644
cuuagcagggcauucuaga

SEQ ID NO: 202646 - RNA, 19 nt, Artificial Sequence
  Description of Artificial Sequence: Synthetic oligonucleotide
  Sense strand starting at position 3040 of SEQ ID NO: 2611
uuuacuuguuagcuuaaag

SEQ ID NO: 202647 - RNA, 19 nt, Artificial Sequence
  Description of Artificial Sequence: Synthetic oligonucleotide
  Antisense strand to SEQ ID NO: 202646
cuuuaagcuaacaaguaaa

SEQ ID NO: 202648 - RNA, 19 nt, Artificial Sequence
  Description of Artificial Sequence: Synthetic oligonucleotide
  Sense strand starting at position 3050 of SEQ ID NO: 2611
agcuuaaaggugcaauauu

SEQ ID NO: 202649 - RNA, 19 nt, Artificial Sequence
  Description of Artificial Sequence: Synthetic oligonucleotide
  Antisense strand to SEQ ID NO: 202648
aauauugcaccuuuaagcu

SEQ ID NO: 202650 - RNA, 19 nt, Artificial Sequence
  Description of Artificial Sequence: Synthetic oligonucleotide
  Sense strand starting at position 3133 of SEQ ID NO: 2611
ugaauaagacuuugucacu

SEQ ID NO: 202651 - RNA, 19 nt, Artificial Sequence
  Description of Artificial Sequence: Synthetic oligonucleotide
  Antisense strand to SEQ ID NO: 202650
agugacaaagucuuauuca

SEQ ID NO: 202652 - RNA, 19 nt, Artificial Sequence
  Description of Artificial Sequence: Synthetic oligonucleotide
  Sense strand starting at position 3209 of SEQ ID NO: 2611
gcucaaucuuuagcuggaa

SEQ ID NO: 202653 - RNA, 19 nt, Artificial Sequence
  Description of Artificial Sequence: Synthetic oligonucleotide
  Antisense strand to SEQ ID NO: 202652
uuccagcuaaagauugagc

SEQ ID NO: 202654 - RNA, 19 nt, Artificial Sequence
  Description of Artificial Sequence: Synthetic oligonucleotide
  Sense strand starting at position 3210 of SEQ ID NO: 2611
cucaaucuuuagcuggaaa

SEQ ID NO: 202655 - RNA, 19 nt, Artificial Sequence
  Description of Artificial Sequence: Synthetic oligonucleotide
  Antisense strand to SEQ ID NO: 202654
uuuccagcuaaagauugag

SEQ ID NO: 202656 - RNA, 19 nt, Artificial Sequence
  Description of Artificial Sequence: Synthetic oligonucleotide
  Sense strand starting at position 3268 of SEQ ID NO: 2611
ucauauaguuucucaagua

SEQ ID NO: 202657 - RNA, 19 nt, Artificial Sequence
  Description of Artificial Sequence: Synthetic oligonucleotide
  Antisense strand to SEQ ID NO: 202656
uacuugagaaacuauauga

SEQ ID NO: 202658 - RNA, 19 nt, Artificial Sequence
  Description of Artificial Sequence: Synthetic oligonucleotide
  Sense strand starting at position 3317 of SEQ ID NO: 2611
uggugucuacaguagaaua

SEQ ID NO: 202659 - RNA, 19 nt, Artificial Sequence
  Description of Artificial Sequence: Synthetic oligonucleotide
  Antisense strand to SEQ ID NO: 202658
uauucuacuguagacacca

SEQ ID NO: 202660 - RNA, 19 nt, Artificial Sequence
  Description of Artificial Sequence: Synthetic oligonucleotide
  Sense strand starting at position 3319 of SEQ ID NO: 2611
gugucuacaguagaauaaa

SEQ ID NO: 202661 - RNA, 19 nt, Artificial Sequence
  Description of Artificial Sequence: Synthetic oligonucleotide
  Antisense strand to SEQ ID NO: 202660
uuuauucuacuguagacac

SEQ ID NO: 202662 - RNA, 19 nt, Artificial Sequence
  Description of Artificial Sequence: Synthetic oligonucleotide
  Sense strand starting at position 3421 of SEQ ID NO: 2611
ugauguuccuaucucuuua

SEQ ID NO: 202663 - RNA, 19 nt, Artificial Sequence
  Description of Artificial Sequence: Synthetic oligonucleotide
  Antisense strand to SEQ ID NO: 202662
uaaagagauaggaacauca

SEQ ID NO: 202664 - RNA, 19 nt, Artificial Sequence
  Description of Artificial Sequence: Synthetic oligonucleotide
  Sense strand starting at position 3608 of SEQ ID NO: 2611
ggugcuauucuagauagau

SEQ ID NO: 202665 - RNA, 19 nt, Artificial Sequence
  Description of Artificial Sequence: Synthetic oligonucleotide
  Antisense strand to SEQ ID NO: 202664
aucuaucuagaauagcacc

SEQ ID NO: 202666 - RNA, 19 nt, Artificial Sequence
  Description of Artificial Sequence: Synthetic oligonucleotide
  Sense strand starting at position 3655 of SEQ ID NO: 2611
cuaagauugcguuauagaa

SEQ ID NO: 202667 - RNA, 19 nt, Artificial Sequence
  Description of Artificial Sequence: Synthetic oligonucleotide
  Antisense strand to SEQ ID NO: 202666
uucuauaacgcaaucuuag

SEQ ID NO: 202668 - RNA, 19 nt, Artificial Sequence
  Description of Artificial Sequence: Synthetic oligonucleotide
  Sense strand starting at position 190 of SEQ ID NO: 2612
cuauuuggcucaucuaguu

SEQ ID NO: 202669 - RNA, 19 nt, Artificial Sequence
  Description of Artificial Sequence: Synthetic oligonucleotide
  Antisense strand to SEQ ID NO: 202668
aacuagaugagccaaauag

SEQ ID NO: 202670 - RNA, 19 nt, Artificial Sequence
  Description of Artificial Sequence: Synthetic oligonucleotide
  Sense strand starting at position 225 of SEQ ID NO: 2612
gggaaagacuugcccucaa

SEQ ID NO: 202671 - RNA, 19 nt, Artificial Sequence
  Description of Artificial Sequence: Synthetic oligonucleotide
  Antisense strand to SEQ ID NO: 202670
uugagggcaagucuuuccc

SEQ ID NO: 202672 - RNA, 19 nt, Artificial Sequence
  Description of Artificial Sequence: Synthetic oligonucleotide
  Sense strand starting at position 350 of SEQ ID NO: 2612
uagccucuggucgagauaa

SEQ ID NO: 202673 - RNA, 19 nt, Artificial Sequence
  Description of Artificial Sequence: Synthetic oligonucleotide
  Antisense strand to SEQ ID NO: 202672
uuaucucgaccagaggcua

SEQ ID NO: 202674 - RNA, 19 nt, Artificial Sequence
  Description of Artificial Sequence: Synthetic oligonucleotide
  Sense strand starting at position 352 of SEQ ID NO: 2612
gccucuggucgagauaaca

SEQ ID NO: 202675 - RNA, 19 nt, Artificial Sequence
  Description of Artificial Sequence: Synthetic oligonucleotide
  Antisense strand to SEQ ID NO: 202674
uguuaucucgaccagaggc

SEQ ID NO: 202676 - RNA, 19 nt, Artificial Sequence
  Description of Artificial Sequence: Synthetic oligonucleotide
  Sense strand starting at position 360 of SEQ ID NO: 2612
ucgagauaacacugaugca

SEQ ID NO: 202677 - RNA, 19 nt, Artificial Sequence
  Description of Artificial Sequence: Synthetic oligonucleotide
  Antisense strand to SEQ ID NO: 202676
ugcaucaguguuaucucga

SEQ ID NO: 202678 - RNA, 19 nt, Artificial Sequence
  Description of Artificial Sequence: Synthetic oligonucleotide
  Sense strand starting at position 379 of SEQ ID NO: 2612
gaaauuggucuguaugcaa

SEQ ID NO: 202679 - RNA, 19 nt, Artificial Sequence
  Description of Artificial Sequence: Synthetic oligonucleotide
  Antisense strand to SEQ ID NO: 202678
uugcauacagaccaauuuc

SEQ ID NO: 202680 - RNA, 19 nt, Artificial Sequence
  Description of Artificial Sequence: Synthetic oligonucleotide
  Sense strand starting at position 615 of SEQ ID NO: 2612
gcuugcuaccuugaauaaa

SEQ ID NO: 202681 - RNA, 19 nt, Artificial Sequence
  Description of Artificial Sequence: Synthetic oligonucleotide
  Antisense strand to SEQ ID NO: 202680
uuuauucaagguagcaagc

SEQ ID NO: 202682 - RNA, 19 nt, Artificial Sequence
  Description of Artificial Sequence: Synthetic oligonucleotide
  Sense strand starting at position 729 of SEQ ID NO: 2612
acacguucuuuggcaauuu

SEQ ID NO: 202683 - RNA, 19 nt, Artificial Sequence
  Description of Artificial Sequence: Synthetic oligonucleotide
  Antisense strand to SEQ ID NO: 202682
aaauugccaaagaacgugu

SEQ ID NO: 202684 - RNA, 19 nt, Artificial Sequence
  Description of Artificial Sequence: Synthetic oligonucleotide
  Sense strand starting at position 812 of SEQ ID NO: 2612
aguuaauagcccugaccau

SEQ ID NO: 202685 - RNA, 19 nt, Artificial Sequence
  Description of Artificial Sequence: Synthetic oligonucleotide
  Antisense strand to SEQ ID NO: 202684
auggucagggcuauuaacu

SEQ ID NO: 202686 - RNA, 19 nt, Artificial Sequence
  Description of Artificial Sequence: Synthetic oligonucleotide
  Sense strand starting at position 813 of SEQ ID NO: 2612
guuaauagcccugaccauu

SEQ ID NO: 202687 - RNA, 19 nt, Artificial Sequence
  Description of Artificial Sequence: Synthetic oligonucleotide
  Antisense strand to SEQ ID NO: 202686
aauggucagggcuauuaac

SEQ ID NO: 202688 - RNA, 19 nt, Artificial Sequence
  Description of Artificial Sequence: Synthetic oligonucleotide
  Sense strand starting at position 906 of SEQ ID NO: 2612
guuuaagaauaaucuguga

SEQ ID NO: 202689 - RNA, 19 nt, Artificial Sequence
  Description of Artificial Sequence: Synthetic oligonucleotide
  Antisense strand to SEQ ID NO: 202688
ucacagauuauucuuaaac

SEQ ID NO: 202690 - RNA, 19 nt, Artificial Sequence
  Description of Artificial Sequence: Synthetic oligonucleotide
  Sense strand starting at position 969 of SEQ ID NO: 2612
uugaguguccacuaaauua

SEQ ID NO: 202691 - RNA, 19 nt, Artificial Sequence
  Description of Artificial Sequence: Synthetic oligonucleotide
  Antisense strand to SEQ ID NO: 202690
uaauuuaguggacacucaa

SEQ ID NO: 202692 - RNA, 19 nt, Artificial Sequence
  Description of Artificial Sequence: Synthetic oligonucleotide
  Sense strand starting at position 1181 of SEQ ID NO: 2612
acgaguuugaccuacagac

SEQ ID NO: 202693 - RNA, 19 nt, Artificial Sequence
  Description of Artificial Sequence: Synthetic oligonucleotide
  Antisense strand to SEQ ID NO: 202692
gucuguaggucaaacucgu

SEQ ID NO: 202694 - RNA, 19 nt, Artificial Sequence
  Description of Artificial Sequence: Synthetic oligonucleotide
  Sense strand starting at position 1430 of SEQ ID NO: 2612
cccuaagauuaggaagaaa

SEQ ID NO: 202695 - RNA, 19 nt, Artificial Sequence
  Description of Artificial Sequence: Synthetic oligonucleotide
  Antisense strand to SEQ ID NO: 202694
uuucuuccuaaucuuaggg

SEQ ID NO: 202696 - RNA, 19 nt, Artificial Sequence
  Description of Artificial Sequence: Synthetic oligonucleotide
  Sense strand starting at position 1698 of SEQ ID NO: 2612
uuccucucugcggaggaaa

SEQ ID NO: 202697 - RNA, 19 nt, Artificial Sequence
  Description of Artificial Sequence: Synthetic oligonucleotide
  Antisense strand to SEQ ID NO: 202696
uuuccuccgcagagaggaa

SEQ ID NO: 202698 - RNA, 19 nt, Artificial Sequence
  Description of Artificial Sequence: Synthetic oligonucleotide
  Sense strand starting at position 2047 of SEQ ID NO: 2612
guaacaacuuuauuggcaa

SEQ ID NO: 202699 - RNA, 19 nt, Artificial Sequence
  Description of Artificial Sequence: Synthetic oligonucleotide
  Antisense strand to SEQ ID NO: 202698
uugccaauaaaguuguuac

SEQ ID NO: 202700 - RNA, 19 nt, Artificial Sequence
  Description of Artificial Sequence: Synthetic oligonucleotide
  Sense strand starting at position 2173 of SEQ ID NO: 2612
auaugaguuggcugcagga

SEQ ID NO: 202701 - RNA, 19 nt, Artificial Sequence
  Description of Artificial Sequence: Synthetic oligonucleotide
  Antisense strand to SEQ ID NO: 202700
uccugcagccaacucauau

SEQ ID NO: 202702 - RNA, 19 nt, Artificial Sequence
  Description of Artificial Sequence: Synthetic oligonucleotide
  Sense strand starting at position 2175 of SEQ ID NO: 2612
augaguuggcugcaggaua

SEQ ID NO: 202703 - RNA, 19 nt, Artificial Sequence
  Description of Artificial Sequence: Synthetic oligonucleotide
  Antisense strand to SEQ ID NO: 202702
uauccugcagccaacucau

SEQ ID NO: 202704 - RNA, 19 nt, Artificial Sequence
  Description of Artificial Sequence: Synthetic oligonucleotide
  Sense strand starting at position 2405 of SEQ ID NO: 2612
guuccagaaguauggcuaa

SEQ ID NO: 202705 - RNA, 19 nt, Artificial Sequence
  Description of Artificial Sequence: Synthetic oligonucleotide
  Antisense strand to SEQ ID NO: 202704
uuagccauacuucuggaac

SEQ ID NO: 202706 - RNA, 19 nt, Artificial Sequence
  Description of Artificial Sequence: Synthetic oligonucleotide
  Sense strand starting at position 2466 of SEQ ID NO: 2612
gccauaagcaaaugaguag

SEQ ID NO: 202707 - RNA, 19 nt, Artificial Sequence
  Description of Artificial Sequence: Synthetic oligonucleotide
  Antisense strand to SEQ ID NO: 202706
cuacucauuugcuuauggc

SEQ ID NO: 202708 - RNA, 19 nt, Artificial Sequence
  Description of Artificial Sequence: Synthetic oligonucleotide
  Sense strand starting at position 2485 of SEQ ID NO: 2612
aucuaagagcuuugucauc

SEQ ID NO: 202709 - RNA, 19 nt, Artificial Sequence
  Description of Artificial Sequence: Synthetic oligonucleotide
  Antisense strand to SEQ ID NO: 202708
gaugacaaagcucuuagau

SEQ ID NO: 202710 - RNA, 19 nt, Artificial Sequence
  Description of Artificial Sequence: Synthetic oligonucleotide
  Sense strand starting at position 2487 of SEQ ID NO: 2612
cuaagagcuuugucaucug

SEQ ID NO: 202711 - RNA, 19 nt, Artificial Sequence
  Description of Artificial Sequence: Synthetic oligonucleotide
  Antisense strand to SEQ ID NO: 202710
cagaugacaaagcucuuag

SEQ ID NO: 202712 - RNA, 19 nt, Artificial Sequence
  Description of Artificial Sequence: Synthetic oligonucleotide
  Sense strand starting at position 2589 of SEQ ID NO: 2612
ucauguaggguuugagacu

SEQ ID NO: 202713 - RNA, 19 nt, Artificial Sequence
  Description of Artificial Sequence: Synthetic oligonucleotide
  Antisense strand to SEQ ID NO: 202712
agucucaaacccuacauga

SEQ ID NO: 202714 - RNA, 19 nt, Artificial Sequence
  Description of Artificial Sequence: Synthetic oligonucleotide
  Sense strand starting at position 2625 of SEQ ID NO: 2612
aagucugaguauucucaga

SEQ ID NO: 202715 - RNA, 19 nt, Artificial Sequence
  Description of Artificial Sequence: Synthetic oligonucleotide
  Antisense strand to SEQ ID NO: 202714
ucugagaauacucagacuu

SEQ ID NO: 202716 - RNA, 19 nt, Artificial Sequence
  Description of Artificial Sequence: Synthetic oligonucleotide
  Sense strand starting at position 2627 of SEQ ID NO: 2612
gucugaguauucucagaac

SEQ ID NO: 202717 - RNA, 19 nt, Artificial Sequence
  Description of Artificial Sequence: Synthetic oligonucleotide
  Antisense strand to SEQ ID NO: 202716
guucugagaauacucagac

SEQ ID NO: 202718 - RNA, 19 nt, Artificial Sequence
  Description of Artificial Sequence: Synthetic oligonucleotide
  Sense strand starting at position 2798 of SEQ ID NO: 2612
ggcuaauggaagugauauc

SEQ ID NO: 202719 - RNA, 19 nt, Artificial Sequence
  Description of Artificial Sequence: Synthetic oligonucleotide
  Antisense strand to SEQ ID NO: 202718
gauaucacuuccauuagcc

SEQ ID NO: 202720 - RNA, 19 nt, Artificial Sequence
  Description of Artificial Sequence: Synthetic oligonucleotide
  Sense strand starting at position 2807 of SEQ ID NO: 2612
aagugauaucaacacguca

SEQ ID NO: 202721 - RNA, 19 nt, Artificial Sequence
  Description of Artificial Sequence: Synthetic oligonucleotide
  Antisense strand to SEQ ID NO: 202720
ugacguguugauaucacuu

SEQ ID NO: 202722 - RNA, 19 nt, Artificial Sequence
  Description of Artificial Sequence: Synthetic oligonucleotide
  Sense strand starting at position 2941 of SEQ ID NO: 2612
uuuacuuguuagcuuaaag

SEQ ID NO: 202723 - RNA, 19 nt, Artificial Sequence
  Description of Artificial Sequence: Synthetic oligonucleotide
  Antisense strand to SEQ ID NO: 202722
cuuuaagcuaacaaguaaa

SEQ ID NO: 202724 - RNA, 19 nt, Artificial Sequence
  Description of Artificial Sequence: Synthetic oligonucleotide
  Sense strand starting at position 2951 of SEQ ID NO: 2612
agcuuaaaggugcaauauu

SEQ ID NO: 202725 - RNA, 19 nt, Artificial Sequence
  Description of Artificial Sequence: Synthetic oligonucleotide
  Antisense strand to SEQ ID NO: 202724
aauauugcaccuuuaagcu

SEQ ID NO: 202726 - RNA, 19 nt, Artificial Sequence
  Description of Artificial Sequence: Synthetic oligonucleotide
  Sense strand starting at position 3034 of SEQ ID NO: 2612
ugaauaagacuuugucacu

SEQ ID NO: 202727 - RNA, 19 nt, Artificial Sequence
  Description of Artificial Sequence: Synthetic oligonucleotide
  Antisense strand to SEQ ID NO: 202726
agugacaaagucuuauuca

SEQ ID NO: 202728 - RNA, 19 nt, Artificial Sequence
  Description of Artificial Sequence: Synthetic oligonucleotide
  Sense strand starting at position 3110 of SEQ ID NO: 2612
gcucaaucuuuagcuggaa

SEQ ID NO: 202729 - RNA, 19 nt, Artificial Sequence
  Description of Artificial Sequence: Synthetic oligonucleotide
  Antisense strand to SEQ ID NO: 202728
uuccagcuaaagauugagc

SEQ ID NO: 202730 - RNA, 19 nt, Artificial Sequence
  Description of Artificial Sequence: Synthetic oligonucleotide
  Sense strand starting at position 3111 of SEQ ID NO: 2612
cucaaucuuuagcuggaaa

SEQ ID NO: 202731 - RNA, 19 nt, Artificial Sequence
  Description of Artificial Sequence: Synthetic oligonucleotide
  Antisense strand to SEQ ID NO: 202730
uuuccagcuaaagauugag

SEQ ID NO: 202732 - RNA, 19 nt, Artificial Sequence
  Description of Artificial Sequence: Synthetic oligonucleotide
  Sense strand starting at position 3169 of SEQ ID NO: 2612
ucauauaguuucucaagua

SEQ ID NO: 202733 - RNA, 19 nt, Artificial Sequence
  Description of Artificial Sequence: Synthetic oligonucleotide
  Antisense strand to SEQ ID NO: 202732
uacuugagaaacuauauga

SEQ ID NO: 202734 - RNA, 19 nt, Artificial Sequence
  Description of Artificial Sequence: Synthetic oligonucleotide
  Sense strand starting at position 3218 of SEQ ID NO: 2612
uggugucuacaguagaaua

SEQ ID NO: 202735 - RNA, 19 nt, Artificial Sequence
  Description of Artificial Sequence: Synthetic oligonucleotide
  Antisense strand to SEQ ID NO: 202734
uauucuacuguagacacca

SEQ ID NO: 202736 - RNA, 19 nt, Artificial Sequence
  Description of Artificial Sequence: Synthetic oligonucleotide
  Sense strand starting at position 3220 of SEQ ID NO: 2612
gugucuacaguagaauaaa

SEQ ID NO: 202737 - RNA, 19 nt, Artificial Sequence
  Description of Artificial Sequence: Synthetic oligonucleotide
  Antisense strand to SEQ ID NO: 202736
uuuauucuacuguagacac

SEQ ID NO: 202738 - RNA, 19 nt, Artificial Sequence
  Description of Artificial Sequence: Synthetic oligonucleotide
  Sense strand starting at position 3322 of SEQ ID NO: 2612
ugauguuccuaucucuuua

SEQ ID NO: 202739 - RNA, 19 nt, Artificial Sequence
  Description of Artificial Sequence: Synthetic oligonucleotide
  Antisense strand to SEQ ID NO: 202738
uaaagagauaggaacauca

SEQ ID NO: 202740 - RNA, 19 nt, Artificial Sequence
  Description of Artificial Sequence: Synthetic oligonucleotide
  Sense strand starting at position 3509 of SEQ ID NO: 2612
ggugcuauucuagauagau

SEQ ID NO: 202741 - RNA, 19 nt, Artificial Sequence
  Description of Artificial Sequence: Synthetic oligonucleotide
  Antisense strand to SEQ ID NO: 202740
aucuaucuagaauagcacc

SEQ ID NO: 202742 - RNA, 19 nt, Artificial Sequence
  Description of Artificial Sequence: Synthetic oligonucleotide
  Sense strand starting at position 3556 of SEQ ID NO: 2612
cuaagauugcguuauagaa

SEQ ID NO: 202743 - RNA, 19 nt, Artificial Sequence
  Description of Artificial Sequence: Synthetic oligonucleotide
  Antisense strand to SEQ ID NO: 202742
uucuauaacgcaaucuuag

SEQ ID NO: 202744 - RNA, 19 nt, Artificial Sequence
  Description of Artificial Sequence: Synthetic oligonucleotide
  Sense strand starting at position 3942 of SEQ ID NO: 2612
guugauugaggguggauau

SEQ ID NO: 202745 - RNA, 19 nt, Artificial Sequence
  Description of Artificial Sequence: Synthetic oligonucleotide
  Antisense strand to SEQ ID NO: 202744
auauccacccucaaucaac

SEQ ID NO: 202746 - RNA, 19 nt, Artificial Sequence
  Description of Artificial Sequence: Synthetic oligonucleotide
  Sense strand starting at position 3943 of SEQ ID NO: 2612
uugauugaggguggauauu

SEQ ID NO: 202747 - RNA, 19 nt, Artificial Sequence
  Description of Artificial Sequence: Synthetic oligonucleotide
  Antisense strand to SEQ ID NO: 202746
aauauccacccucaaucaa

SEQ ID NO: 202748 - RNA, 19 nt, Artificial Sequence
  Description of Artificial Sequence: Synthetic oligonucleotide
  Sense strand starting at position 117 of SEQ ID NO: 2613
gggcacuuuccaggaagaa

SEQ ID NO: 202749 - RNA, 19 nt, Artificial Sequence
  Description of Artificial Sequence: Synthetic oligonucleotide
  Antisense strand to SEQ ID NO: 202748
uucuuccuggaaagugccc

SEQ ID NO: 202750 - RNA, 19 nt, Artificial Sequence
  Description of Artificial Sequence: Synthetic oligonucleotide
  Sense strand starting at position 344 of SEQ ID NO: 2613
agcuuuggccuagggagua

SEQ ID NO: 202751 - RNA, 19 nt, Artificial Sequence
  Description of Artificial Sequence: Synthetic oligonucleotide
  Antisense strand to SEQ ID NO: 202750
uacucccuaggccaaagcu

SEQ ID NO: 202752 - RNA, 19 nt, Artificial Sequence
  Description of Artificial Sequence: Synthetic oligonucleotide
  Sense strand starting at position 406 of SEQ ID NO: 2613
acaggccuugcuugagaaa

SEQ ID NO: 202753 - RNA, 19 nt, Artificial Sequence
  Description of Artificial Sequence: Synthetic oligonucleotide
  Antisense strand to SEQ ID NO: 202752
uuucucaagcaaggccugu

SEQ ID NO: 202754 - RNA, 19 nt, Artificial Sequence
  Description of Artificial Sequence: Synthetic oligonucleotide
  Sense strand starting at position 407 of SEQ ID NO: 2613
caggccuugcuugagaaau

SEQ ID NO: 202755 - RNA, 19 nt, Artificial Sequence
  Description of Artificial Sequence: Synthetic oligonucleotide
  Antisense strand to SEQ ID NO: 202754
auuucucaagcaaggccug

SEQ ID NO: 202756 - RNA, 19 nt, Artificial Sequence
  Description of Artificial Sequence: Synthetic oligonucleotide
  Sense strand starting at position 772 of SEQ ID NO: 2613
gguuuacuccagugagccu

SEQ ID NO: 202757 - RNA, 19 nt, Artificial Sequence
  Description of Artificial Sequence: Synthetic oligonucleotide
  Antisense strand to SEQ ID NO: 202756
aggcucacuggaguaaacc

SEQ ID NO: 202758 - RNA, 19 nt, Artificial Sequence
  Description of Artificial Sequence: Synthetic oligonucleotide
  Sense strand starting at position 819 of SEQ ID NO: 2613
gcugguuuacuccagugag

SEQ ID NO: 202759 - RNA, 19 nt, Artificial Sequence
  Description of Artificial Sequence: Synthetic oligonucleotide
  Antisense strand to SEQ ID NO: 202758
cucacuggaguaaaccagc

SEQ ID NO: 202760 - RNA, 19 nt, Artificial Sequence
  Description of Artificial Sequence: Synthetic oligonucleotide
  Sense strand starting at position 822 of SEQ ID NO: 2613
gguuuacuccagugagcag

SEQ ID NO: 202761 - RNA, 19 nt, Artificial Sequence
  Description of Artificial Sequence: Synthetic oligonucleotide
  Antisense strand to SEQ ID NO: 202760
cugcucacuggaguaaacc

SEQ ID NO: 202762 - RNA, 19 nt, Artificial Sequence
  Description of Artificial Sequence: Synthetic oligonucleotide
  Sense strand starting at position 982 of SEQ ID NO: 2613
cucugaaauugacaagggu

SEQ ID NO: 202763 - RNA, 19 nt, Artificial Sequence
  Description of Artificial Sequence: Synthetic oligonucleotide
  Antisense strand to SEQ ID NO: 202762
acccuugucaauuucagag

SEQ ID NO: 202764 - RNA, 19 nt, Artificial Sequence
  Description of Artificial Sequence: Synthetic oligonucleotide
  Sense strand starting at position 1110 of SEQ ID NO: 2613
acacaaguguucucuccau

SEQ ID NO: 202765 - RNA, 19 nt, Artificial Sequence
  Description of Artificial Sequence: Synthetic oligonucleotide
  Antisense strand to SEQ ID NO: 202764
auggagagaacacuugugu

SEQ ID NO: 202766 - RNA, 19 nt, Artificial Sequence
  Description of Artificial Sequence: Synthetic oligonucleotide
  Sense strand starting at position 1114 of SEQ ID NO: 2613
aaguguucucuccaugagu

SEQ ID NO: 202767 - RNA, 19 nt, Artificial Sequence
  Description of Artificial Sequence: Synthetic oligonucleotide
  Antisense strand to SEQ ID NO: 202766
acucauggagagaacacuu

SEQ ID NO: 202768 - RNA, 19 nt, Artificial Sequence
  Description of Artificial Sequence: Synthetic oligonucleotide
  Sense strand starting at position 1334 of SEQ ID NO: 2613
gcaccuauuuccucaggcu

SEQ ID NO: 202769 - RNA, 19 nt, Artificial Sequence
  Description of Artificial Sequence: Synthetic oligonucleotide
  Antisense strand to SEQ ID NO: 202768
agccugaggaaauaggugc

SEQ ID NO: 202770 - RNA, 19 nt, Artificial Sequence
  Description of Artificial Sequence: Synthetic oligonucleotide
  Sense strand starting at position 1504 of SEQ ID NO: 2613
ggaagcuaucucuggacuu

SEQ ID NO: 202771 - RNA, 19 nt, Artificial Sequence
  Description of Artificial Sequence: Synthetic oligonucleotide
  Antisense strand to SEQ ID NO: 202770
aaguccagagauagcuucc

SEQ ID NO: 202772 - RNA, 19 nt, Artificial Sequence
  Description of Artificial Sequence: Synthetic oligonucleotide
  Sense strand starting at position 1515 of SEQ ID NO: 2613
cuggacuucggguguuaca

SEQ ID NO: 202773 - RNA, 19 nt, Artificial Sequence
  Description of Artificial Sequence: Synthetic oligonucleotide
  Antisense strand to SEQ ID NO: 202772
uguaacacccgaaguccag

SEQ ID NO: 202774 - RNA, 19 nt, Artificial Sequence
  Description of Artificial Sequence: Synthetic oligonucleotide
  Sense strand starting at position 1534 of SEQ ID NO: 2613
gcaggauugggcugaugac

SEQ ID NO: 202775 - RNA, 19 nt, Artificial Sequence
  Description of Artificial Sequence: Synthetic oligonucleotide
  Antisense strand to SEQ ID NO: 202774
gucaucagcccaauccugc

SEQ ID NO: 202776 - RNA, 19 nt, Artificial Sequence
  Description of Artificial Sequence: Synthetic oligonucleotide
  Sense strand starting at position 1995 of SEQ ID NO: 2613
gagagagcugcucagccuu

SEQ ID NO: 202777 - RNA, 19 nt, Artificial Sequence
  Description of Artificial Sequence: Synthetic oligonucleotide
  Antisense strand to SEQ ID NO: 202776
aaggcugagcagcucucuc

SEQ ID NO: 202778 - RNA, 19 nt, Artificial Sequence
  Description of Artificial Sequence: Synthetic oligonucleotide
  Sense strand starting at position 2406 of SEQ ID NO: 2613
cccugacuauaccuggaua

SEQ ID NO: 202779 - RNA, 19 nt, Artificial Sequence
  Description of Artificial Sequence: Synthetic oligonucleotide
  Antisense strand to SEQ ID NO: 202778
uauccagguauagucaggg

SEQ ID NO: 202780 - RNA, 19 nt, Artificial Sequence
  Description of Artificial Sequence: Synthetic oligonucleotide
  Sense strand starting at position 2408 of SEQ ID NO: 2613
cugacuauaccuggauacu

SEQ ID NO: 202781 - RNA, 19 nt, Artificial Sequence
  Description of Artificial Sequence: Synthetic oligonucleotide
  Antisense strand to SEQ ID NO: 202780
aguauccagguauagucag

SEQ ID NO: 202782 - RNA, 19 nt, Artificial Sequence
  Description of Artificial Sequence: Synthetic oligonucleotide
  Sense strand starting at position 2436 of SEQ ID NO: 2613
ugacaauuccaucgucauc

SEQ ID NO: 202783 - RNA, 19 nt, Artificial Sequence
  Description of Artificial Sequence: Synthetic oligonucleotide
  Antisense strand to SEQ ID NO: 202782
gaugacgauggaauuguca

SEQ ID NO: 202784 - RNA, 19 nt, Artificial Sequence
  Description of Artificial Sequence: Synthetic oligonucleotide
  Sense strand starting at position 2472 of SEQ ID NO: 2613
agaauuauuuccuggucag

SEQ ID NO: 202785 - RNA, 19 nt, Artificial Sequence
  Description of Artificial Sequence: Synthetic oligonucleotide
  Antisense strand to SEQ ID NO: 202784
cugaccaggaaauaauucu

SEQ ID NO: 202786 - RNA, 19 nt, Artificial Sequence
  Description of Artificial Sequence: Synthetic oligonucleotide
  Sense strand starting at position 2571 of SEQ ID NO: 2613
agucaugcccuuuaggaga

SEQ ID NO: 202787 - RNA, 19 nt, Artificial Sequence
  Description of Artificial Sequence: Synthetic oligonucleotide
  Antisense strand to SEQ ID NO: 202786
ucuccuaaagggcaugacu

SEQ ID NO: 202788 - RNA, 19 nt, Artificial Sequence
  Description of Artificial Sequence: Synthetic oligonucleotide
  Sense strand starting at position 2689 of SEQ ID NO: 2613
uauugagaguucuugagaa

SEQ ID NO: 202789 - RNA, 19 nt, Artificial Sequence
  Description of Artificial Sequence: Synthetic oligonucleotide
  Antisense strand to SEQ ID NO: 202788
uucucaagaacucucaaua

SEQ ID NO: 202790 - RNA, 19 nt, Artificial Sequence
  Description of Artificial Sequence: Synthetic oligonucleotide
  Sense strand starting at position 2693 of SEQ ID NO: 2613
gagaguucuugagaaugag

SEQ ID NO: 202791 - RNA, 19 nt, Artificial Sequence
  Description of Artificial Sequence: Synthetic oligonucleotide
  Antisense strand to SEQ ID NO: 202790
cucauucucaagaacucuc

SEQ ID NO: 202792 - RNA, 19 nt, Artificial Sequence
  Description of Artificial Sequence: Synthetic oligonucleotide
  Sense strand starting at position 2732 of SEQ ID NO: 2613
aucauagaaccgugucuca

SEQ ID NO: 202793 - RNA, 19 nt, Artificial Sequence
  Description of Artificial Sequence: Synthetic oligonucleotide
  Antisense strand to SEQ ID NO: 202792
ugagacacgguucuaugau

SEQ ID NO: 202794 - RNA, 19 nt, Artificial Sequence
  Description of Artificial Sequence: Synthetic oligonucleotide
  Sense strand starting at position 2742 of SEQ ID NO: 2613
cgugucucaucuucucaca

SEQ ID NO: 202795 - RNA, 19 nt, Artificial Sequence
  Description of Artificial Sequence: Synthetic oligonucleotide
  Antisense strand to SEQ ID NO: 202794
ugugagaagaugagacacg

SEQ ID NO: 202796 - RNA, 19 nt, Artificial Sequence
  Description of Artificial Sequence: Synthetic oligonucleotide
  Sense strand starting at position 2824 of SEQ ID NO: 2613
aauggaggucccuguauug

SEQ ID NO: 202797 - RNA, 19 nt, Artificial Sequence
  Description of Artificial Sequence: Synthetic oligonucleotide
  Antisense strand to SEQ ID NO: 202796
caauacagggaccuccauu

SEQ ID NO: 202798 - RNA, 19 nt, Artificial Sequence
  Description of Artificial Sequence: Synthetic oligonucleotide
  Sense strand starting at position 2833 of SEQ ID NO: 2613
cccuguauuguauaacuaa

SEQ ID NO: 202799 - RNA, 19 nt, Artificial Sequence
  Description of Artificial Sequence: Synthetic oligonucleotide
  Antisense strand to SEQ ID NO: 202798
uuaguuauacaauacaggg

SEQ ID NO: 202800 - RNA, 19 nt, Artificial Sequence
  Description of Artificial Sequence: Synthetic oligonucleotide
  Sense strand starting at position 2948 of SEQ ID NO: 2613
gaaacuaagaguugugguu

SEQ ID NO: 202801 - RNA, 19 nt, Artificial Sequence
  Description of Artificial Sequence: Synthetic oligonucleotide
  Antisense strand to SEQ ID NO: 202800
aaccacaacucuuaguuuc

SEQ ID NO: 202802 - RNA, 19 nt, Artificial Sequence
  Description of Artificial Sequence: Synthetic oligonucleotide
  Sense strand starting at position 3073 of SEQ ID NO: 2613
ucauucuaggcucaggauu

SEQ ID NO: 202803 - RNA, 19 nt, Artificial Sequence
  Description of Artificial Sequence: Synthetic oligonucleotide
  Antisense strand to SEQ ID NO: 202802
aauccugagccuagaauga

SEQ ID NO: 202804 - RNA, 19 nt, Artificial Sequence
  Description of Artificial Sequence: Synthetic oligonucleotide
  Sense strand starting at position 3081 of SEQ ID NO: 2613
ggcucaggauuucugcauu

SEQ ID NO: 202805 - RNA, 19 nt, Artificial Sequence
  Description of Artificial Sequence: Synthetic oligonucleotide
  Antisense strand to SEQ ID NO: 202804
aaugcagaaauccugagcc

SEQ ID NO: 202806 - RNA, 19 nt, Artificial Sequence
  Description of Artificial Sequence: Synthetic oligonucleotide
  Sense strand starting at position 3227 of SEQ ID NO: 2613
gcuacuauguuucucagag

SEQ ID NO: 202807 - RNA, 19 nt, Artificial Sequence
  Description of Artificial Sequence: Synthetic oligonucleotide
  Antisense strand to SEQ ID NO: 202806
cucugagaaacauaguagc

SEQ ID NO: 202808 - RNA, 19 nt, Artificial Sequence
  Description of Artificial Sequence: Synthetic oligonucleotide
  Sense strand starting at position 3252 of SEQ ID NO: 2613
ggaggagacugugcuuguu

SEQ ID NO: 202809 - RNA, 19 nt, Artificial Sequence
  Description of Artificial Sequence: Synthetic oligonucleotide
  Antisense strand to SEQ ID NO: 202808
aacaagcacagucuccucc

SEQ ID NO: 202810 - RNA, 19 nt, Artificial Sequence
  Description of Artificial Sequence: Synthetic oligonucleotide
  Sense strand starting at position 3254 of SEQ ID NO: 2613
aggagacugugcuuguuau

SEQ ID NO: 202811 - RNA, 19 nt, Artificial Sequence
  Description of Artificial Sequence: Synthetic oligonucleotide
  Antisense strand to SEQ ID NO: 202810
auaacaagcacagucuccu

SEQ ID NO: 202812 - RNA, 19 nt, Artificial Sequence
  Description of Artificial Sequence: Synthetic oligonucleotide
  Sense strand starting at position 3255 of SEQ ID NO: 2613
ggagacugugcuuguuauu

SEQ ID NO: 202813 - RNA, 19 nt, Artificial Sequence
  Description of Artificial Sequence: Synthetic oligonucleotide
  Antisense strand to SEQ ID NO: 202812
aauaacaagcacagucucc

SEQ ID NO: 202814 - RNA, 19 nt, Artificial Sequence
  Description of Artificial Sequence: Synthetic oligonucleotide
  Sense strand starting at position 3327 of SEQ ID NO: 2613
ucaggucucugguuccuaa

SEQ ID NO: 202815 - RNA, 19 nt, Artificial Sequence
  Description of Artificial Sequence: Synthetic oligonucleotide
  Antisense strand to SEQ ID NO: 202814
uuaggaaccagagaccuga

SEQ ID NO: 202816 - RNA, 19 nt, Artificial Sequence
  Description of Artificial Sequence: Synthetic oligonucleotide
  Sense strand starting at position 3459 of SEQ ID NO: 2613
cagugaguccaugaaucua

SEQ ID NO: 202817 - RNA, 19 nt, Artificial Sequence
  Description of Artificial Sequence: Synthetic oligonucleotide
  Antisense strand to SEQ ID NO: 202816
uagauucauggacucacug

SEQ ID NO: 202818 - RNA, 19 nt, Artificial Sequence
  Description of Artificial Sequence: Synthetic oligonucleotide
  Sense strand starting at position 3553 of SEQ ID NO: 2613
gaagaugaagccuaucugu

SEQ ID NO: 202819 - RNA, 19 nt, Artificial Sequence
  Description of Artificial Sequence: Synthetic oligonucleotide
  Antisense strand to SEQ ID NO: 202818
acagauaggcuucaucuuc

SEQ ID NO: 202820 - RNA, 19 nt, Artificial Sequence
  Description of Artificial Sequence: Synthetic oligonucleotide
  Sense strand starting at position 3577 of SEQ ID NO: 2613
acuauugaguuccugccaa

SEQ ID NO: 202821 - RNA, 19 nt, Artificial Sequence
  Description of Artificial Sequence: Synthetic oligonucleotide
  Antisense strand to SEQ ID NO: 202820
uuggcaggaacucaauagu

SEQ ID NO: 202822 - RNA, 19 nt, Artificial Sequence
  Description of Artificial Sequence: Synthetic oligonucleotide
  Sense strand starting at position 3600 of SEQ ID NO: 2613
aggaacuucucuguccuau

SEQ ID NO: 202823 - RNA, 19 nt, Artificial Sequence
  Description of Artificial Sequence: Synthetic oligonucleotide
  Antisense strand to SEQ ID NO: 202822
auaggacagagaaguuccu

SEQ ID NO: 202824 - RNA, 19 nt, Artificial Sequence
  Description of Artificial Sequence: Synthetic oligonucleotide
  Sense strand starting at position 3619 of SEQ ID NO: 2613
cucugcagcuuccuguaaa

SEQ ID NO: 202825 - RNA, 19 nt, Artificial Sequence
  Description of Artificial Sequence: Synthetic oligonucleotide
  Antisense strand to SEQ ID NO: 202824
uuuacaggaagcugcagag

SEQ ID NO: 202826 - RNA, 19 nt, Artificial Sequence
  Description of Artificial Sequence: Synthetic oligonucleotide
  Sense strand starting at position 3674 of SEQ ID NO: 2613
agucuugagcaagacucuu

SEQ ID NO: 202827 - RNA, 19 nt, Artificial Sequence
  Description of Artificial Sequence: Synthetic oligonucleotide
  Antisense strand to SEQ ID NO: 202826
aagagucuugcucaagacu

SEQ ID NO: 202828 - RNA, 19 nt, Artificial Sequence
  Description of Artificial Sequence: Synthetic oligonucleotide
  Sense strand starting at position 146 of SEQ ID NO: 2614
cccuuagaugccugggcau

SEQ ID NO: 202829 - RNA, 19 nt, Artificial Sequence
  Description of Artificial Sequence: Synthetic oligonucleotide
  Antisense strand to SEQ ID NO: 202828
augcccaggcaucuaaggg

SEQ ID NO: 202830 - RNA, 19 nt, Artificial Sequence
  Description of Artificial Sequence: Synthetic oligonucleotide
  Sense strand starting at position 148 of SEQ ID NO: 2614
cuuagaugccugggcauga

SEQ ID NO: 202831 - RNA, 19 nt, Artificial Sequence
  Description of Artificial Sequence: Synthetic oligonucleotide
  Antisense strand to SEQ ID NO: 202830
ucaugcccaggcaucuaag

SEQ ID NO: 202832 - RNA, 19 nt, Artificial Sequence
  Description of Artificial Sequence: Synthetic oligonucleotide
  Sense strand starting at position 302 of SEQ ID NO: 2614
uauggugggucuucugaga

SEQ ID NO: 202833 - RNA, 19 nt, Artificial Sequence
  Description of Artificial Sequence: Synthetic oligonucleotide
  Antisense strand to SEQ ID NO: 202832
ucucagaagacccaccaua

SEQ ID NO: 202834 - RNA, 19 nt, Artificial Sequence
  Description of Artificial Sequence: Synthetic oligonucleotide
  Sense strand starting at position 485 of SEQ ID NO: 2614
gggacuauggcaugauauc

SEQ ID NO: 202835 - RNA, 19 nt, Artificial Sequence
  Description of Artificial Sequence: Synthetic oligonucleotide
  Antisense strand to SEQ ID NO: 202834
gauaucaugccauaguccc

SEQ ID NO: 202836 - RNA, 19 nt, Artificial Sequence
  Description of Artificial Sequence: Synthetic oligonucleotide
  Sense strand starting at position 561 of SEQ ID NO: 2614
cugcuuugccuugauacuu

SEQ ID NO: 202837 - RNA, 19 nt, Artificial Sequence
  Description of Artificial Sequence: Synthetic oligonucleotide
  Antisense strand to SEQ ID NO: 202836
aaguaucaaggcaaagcag

SEQ ID NO: 202838 - RNA, 19 nt, Artificial Sequence
  Description of Artificial Sequence: Synthetic oligonucleotide
  Sense strand starting at position 989 of SEQ ID NO: 2614
ucagguguucccgaaacuc

SEQ ID NO: 202839 - RNA, 19 nt, Artificial Sequence
  Description of Artificial Sequence: Synthetic oligonucleotide
  Antisense strand to SEQ ID NO: 202838
gaguuucgggaacaccuga

SEQ ID NO: 202840 - RNA, 19 nt, Artificial Sequence
  Description of Artificial Sequence: Synthetic oligonucleotide
  Sense strand starting at position 1063 of SEQ ID NO: 2614
gggagagguuccuuucuuu

SEQ ID NO: 202841 - RNA, 19 nt, Artificial Sequence
  Description of Artificial Sequence: Synthetic oligonucleotide
  Antisense strand to SEQ ID NO: 202840
aaagaaaggaaccucuccc

SEQ ID NO: 202842 - RNA, 19 nt, Artificial Sequence
  Description of Artificial Sequence: Synthetic oligonucleotide
  Sense strand starting at position 1183 of SEQ ID NO: 2614
cugcaucuucugggaugca

SEQ ID NO: 202843 - RNA, 19 nt, Artificial Sequence
  Description of Artificial Sequence: Synthetic oligonucleotide
  Antisense strand to SEQ ID NO: 202842
ugcaucccagaagaugcag

SEQ ID NO: 202844 - RNA, 19 nt, Artificial Sequence
  Description of Artificial Sequence: Synthetic oligonucleotide
  Sense strand starting at position 1280 of SEQ ID NO: 2614
ccaaccuugugauugguau

SEQ ID NO: 202845 - RNA, 19 nt, Artificial Sequence
  Description of Artificial Sequence: Synthetic oligonucleotide
  Antisense strand to SEQ ID NO: 202844
auaccaaucacaagguugg

SEQ ID NO: 202846 - RNA, 19 nt, Artificial Sequence
  Description of Artificial Sequence: Synthetic oligonucleotide
  Sense strand starting at position 1281 of SEQ ID NO: 2614
caaccuugugauugguauu

SEQ ID NO: 202847 - RNA, 19 nt, Artificial Sequence
  Description of Artificial Sequence: Synthetic oligonucleotide
  Antisense strand to SEQ ID NO: 202846
aauaccaaucacaagguug

SEQ ID NO: 202848 - RNA, 19 nt, Artificial Sequence
  Description of Artificial Sequence: Synthetic oligonucleotide
  Sense strand starting at position 1815 of SEQ ID NO: 2614
ccacguuuccaaugggaaa

SEQ ID NO: 202849 - RNA, 19 nt, Artificial Sequence
  Description of Artificial Sequence: Synthetic oligonucleotide
  Antisense strand to SEQ ID NO: 202848
uuucccauuggaaacgugg

SEQ ID NO: 202850 - RNA, 19 nt, Artificial Sequence
  Description of Artificial Sequence: Synthetic oligonucleotide
  Sense strand starting at position 2075 of SEQ ID NO: 2614
cccgcaggauauuugcaua

SEQ ID NO: 202851 - RNA, 19 nt, Artificial Sequence
  Description of Artificial Sequence: Synthetic oligonucleotide
  Antisense strand to SEQ ID NO: 202850
uaugcaaauauccugcggg

SEQ ID NO: 202852 - RNA, 19 nt, Artificial Sequence
  Description of Artificial Sequence: Synthetic oligonucleotide
  Sense strand starting at position 2401 of SEQ ID NO: 2614
gagacaugcgcggaucuca

SEQ ID NO: 202853 - RNA, 19 nt, Artificial Sequence
  Description of Artificial Sequence: Synthetic oligonucleotide
  Antisense strand to SEQ ID NO: 202852
ugagauccgcgcaugucuc

SEQ ID NO: 202854 - RNA, 19 nt, Artificial Sequence
  Description of Artificial Sequence: Synthetic oligonucleotide
  Sense strand starting at position 2658 of SEQ ID NO: 2614
gacgaucagagaugaguuc

SEQ ID NO: 202855 - RNA, 19 nt, Artificial Sequence
  Description of Artificial Sequence: Synthetic oligonucleotide
  Antisense strand to SEQ ID NO: 202854
gaacucaucucugaucguc

SEQ ID NO: 202856 - RNA, 19 nt, Artificial Sequence
  Description of Artificial Sequence: Synthetic oligonucleotide
  Sense strand starting at position 2667 of SEQ ID NO: 2614
agaugaguucaugaucggu

SEQ ID NO: 202857 - RNA, 19 nt, Artificial Sequence
  Description of Artificial Sequence: Synthetic oligonucleotide
  Antisense strand to SEQ ID NO: 202856
accgaucaugaacucaucu

SEQ ID NO: 202858 - RNA, 19 nt, Artificial Sequence
  Description of Artificial Sequence: Synthetic oligonucleotide
  Sense strand starting at position 2714 of SEQ ID NO: 2614
uggaaauuaacgugugaag

SEQ ID NO: 202859 - RNA, 19 nt, Artificial Sequence
  Description of Artificial Sequence: Synthetic oligonucleotide
  Antisense strand to SEQ ID NO: 202858
cuucacacguuaauuucca

SEQ ID NO: 202860 - RNA, 19 nt, Artificial Sequence
  Description of Artificial Sequence: Synthetic oligonucleotide
  Sense strand starting at position 2716 of SEQ ID NO: 2614
gaaauuaacgugugaaggu

SEQ ID NO: 202861 - RNA, 19 nt, Artificial Sequence
  Description of Artificial Sequence: Synthetic oligonucleotide
  Antisense strand to SEQ ID NO: 202860
accuucacacguuaauuuc

SEQ ID NO: 202862 - RNA, 19 nt, Artificial Sequence
  Description of Artificial Sequence: Synthetic oligonucleotide
  Sense strand starting at position 2848 of SEQ ID NO: 2614
agaugaagaucucaagagu

SEQ ID NO: 202863 - RNA, 19 nt, Artificial Sequence
  Description of Artificial Sequence: Synthetic oligonucleotide
  Antisense strand to SEQ ID NO: 202862
acucuugagaucuucaucu

SEQ ID NO: 202864 - RNA, 19 nt, Artificial Sequence
  Description of Artificial Sequence: Synthetic oligonucleotide
  Sense strand starting at position 2973 of SEQ ID NO: 2614
gggucuuuggcagaaggau

SEQ ID NO: 202865 - RNA, 19 nt, Artificial Sequence
  Description of Artificial Sequence: Synthetic oligonucleotide
  Antisense strand to SEQ ID NO: 202864
auccuucugccaaagaccc

SEQ ID NO: 202866 - RNA, 19 nt, Artificial Sequence
  Description of Artificial Sequence: Synthetic oligonucleotide
  Sense strand starting at position 2982 of SEQ ID NO: 2614
gcagaaggauuugacauca

SEQ ID NO: 202867 - RNA, 19 nt, Artificial Sequence
  Description of Artificial Sequence: Synthetic oligonucleotide
  Antisense strand to SEQ ID NO: 202866
ugaugucaaauccuucugc

SEQ ID NO: 202868 - RNA, 19 nt, Artificial Sequence
  Description of Artificial Sequence: Synthetic oligonucleotide
  Sense strand starting at position 3005 of SEQ ID NO: 2614
agacuuaagcuguaaucac

SEQ ID NO: 202869 - RNA, 19 nt, Artificial Sequence
  Description of Artificial Sequence: Synthetic oligonucleotide
  Antisense strand to SEQ ID NO: 202868
gugauuacagcuuaagucu

SEQ ID NO: 202870 - RNA, 19 nt, Artificial Sequence
  Description of Artificial Sequence: Synthetic oligonucleotide
  Sense strand starting at position 3013 of SEQ ID NO: 2614
gcuguaaucacauagggug

SEQ ID NO: 202871 - RNA, 19 nt, Artificial Sequence
  Description of Artificial Sequence: Synthetic oligonucleotide
  Antisense strand to SEQ ID NO: 202870
cacccuaugugauuacagc

SEQ ID NO: 202872 - RNA, 19 nt, Artificial Sequence
  Description of Artificial Sequence: Synthetic oligonucleotide
  Sense strand starting at position 3055 of SEQ ID NO: 2614
acagaaagguggcuuuaag

SEQ ID NO: 202873 - RNA, 19 nt, Artificial Sequence
  Description of Artificial Sequence: Synthetic oligonucleotide
  Antisense strand to SEQ ID NO: 202872
cuuaaagccaccuuucugu

SEQ ID NO: 202874 - RNA, 19 nt, Artificial Sequence
  Description of Artificial Sequence: Synthetic oligonucleotide
  Sense strand starting at position 3099 of SEQ ID NO: 2614
cuagguuagacuuggaagu

SEQ ID NO: 202875 - RNA, 19 nt, Artificial Sequence
  Description of Artificial Sequence: Synthetic oligonucleotide
  Antisense strand to SEQ ID NO: 202874
acuuccaagucuaaccuag

SEQ ID NO: 202876 - RNA, 19 nt, Artificial Sequence
  Description of Artificial Sequence: Synthetic oligonucleotide
  Sense strand starting at position 3138 of SEQ ID NO: 2614
ucguuauugggacacuaau

SEQ ID NO: 202877 - RNA, 19 nt, Artificial Sequence
  Description of Artificial Sequence: Synthetic oligonucleotide
  Antisense strand to SEQ ID NO: 202876
auuagugucccaauaacga

SEQ ID NO: 202878 - RNA, 19 nt, Artificial Sequence
  Description of Artificial Sequence: Synthetic oligonucleotide
  Sense strand starting at position 3146 of SEQ ID NO: 2614
gggacacuaaugugcauua

SEQ ID NO: 202879 - RNA, 19 nt, Artificial Sequence
  Description of Artificial Sequence: Synthetic oligonucleotide
  Antisense strand to SEQ ID NO: 202878
uaaugcacauuaguguccc

SEQ ID NO: 202880 - RNA, 19 nt, Artificial Sequence
  Description of Artificial Sequence: Synthetic oligonucleotide
  Sense strand starting at position 3148 of SEQ ID NO: 2614
gacacuaaugugcauuagu

SEQ ID NO: 202881 - RNA, 19 nt, Artificial Sequence
  Description of Artificial Sequence: Synthetic oligonucleotide
  Antisense strand to SEQ ID NO: 202880
acuaaugcacauuaguguc

SEQ ID NO: 202882 - RNA, 19 nt, Artificial Sequence
  Description of Artificial Sequence: Synthetic oligonucleotide
  Sense strand starting at position 3216 of SEQ ID NO: 2614
gggaaacuccgguauguuu

SEQ ID NO: 202883 - RNA, 19 nt, Artificial Sequence
  Description of Artificial Sequence: Synthetic oligonucleotide
  Antisense strand to SEQ ID NO: 202882
aaacauaccggaguuuccc

SEQ ID NO: 202884 - RNA, 19 nt, Artificial Sequence
  Description of Artificial Sequence: Synthetic oligonucleotide
  Sense strand starting at position 3218 of SEQ ID NO: 2614
gaaacuccgguauguuuga

SEQ ID NO: 202885 - RNA, 19 nt, Artificial Sequence
  Description of Artificial Sequence: Synthetic oligonucleotide
  Antisense strand to SEQ ID NO: 202884
ucaaacauaccggaguuuc

SEQ ID NO: 202886 - RNA, 19 nt, Artificial Sequence
  Description of Artificial Sequence: Synthetic oligonucleotide
  Sense strand starting at position 3236 of SEQ ID NO: 2614
aggacauuaaguggcuauu

SEQ ID NO: 202887 - RNA, 19 nt, Artificial Sequence
  Description of Artificial Sequence: Synthetic oligonucleotide
  Antisense strand to SEQ ID NO: 202886
aauagccacuuaauguccu

SEQ ID NO: 202888 - RNA, 19 nt, Artificial Sequence
  Description of Artificial Sequence: Synthetic oligonucleotide
  Sense strand starting at position 3247 of SEQ ID NO: 2614
uggcuauuccagggaagga

SEQ ID NO: 202889 - RNA, 19 nt, Artificial Sequence
  Description of Artificial Sequence: Synthetic oligonucleotide
  Antisense strand to SEQ ID NO: 202888
uccuucccuggaauagcca

SEQ ID NO: 202890 - RNA, 19 nt, Artificial Sequence
  Description of Artificial Sequence: Synthetic oligonucleotide
  Sense strand starting at position 3309 of SEQ ID NO: 2614
acguuauccaggcacgaca

SEQ ID NO: 202891 - RNA, 19 nt, Artificial Sequence
  Description of Artificial Sequence: Synthetic oligonucleotide
  Antisense strand to SEQ ID NO: 202890
ugucgugccuggauaacgu

SEQ ID NO: 202892 - RNA, 19 nt, Artificial Sequence
  Description of Artificial Sequence: Synthetic oligonucleotide
  Sense strand starting at position 3398 of SEQ ID NO: 2614
cacagaaguuacgugaauu

SEQ ID NO: 202893 - RNA, 19 nt, Artificial Sequence
  Description of Artificial Sequence: Synthetic oligonucleotide
  Antisense strand to SEQ ID NO: 202892
aauucacguaacuucugug

SEQ ID NO: 202894 - RNA, 19 nt, Artificial Sequence
  Description of Artificial Sequence: Synthetic oligonucleotide
  Sense strand starting at position 3399 of SEQ ID NO: 2614
acagaaguuacgugaauug

SEQ ID NO: 202895 - RNA, 19 nt, Artificial Sequence
  Description of Artificial Sequence: Synthetic oligonucleotide
  Antisense strand to SEQ ID NO: 202894
caauucacguaacuucugu

SEQ ID NO: 202896 - RNA, 19 nt, Artificial Sequence
  Description of Artificial Sequence: Synthetic oligonucleotide
  Sense strand starting at position 3476 of SEQ ID NO: 2614
agucuuauguccuuucuac

SEQ ID NO: 202897 - RNA, 19 nt, Artificial Sequence
  Description of Artificial Sequence: Synthetic oligonucleotide
  Antisense strand to SEQ ID NO: 202896
guagaaaggacauaagacu

SEQ ID NO: 202898 - RNA, 19 nt, Artificial Sequence
  Description of Artificial Sequence: Synthetic oligonucleotide
  Sense strand starting at position 3594 of SEQ ID NO: 2614
ggaccuggcuucucagaga

SEQ ID NO: 202899 - RNA, 19 nt, Artificial Sequence
  Description of Artificial Sequence: Synthetic oligonucleotide
  Antisense strand to SEQ ID NO: 202898
ucucugagaagccaggucc

SEQ ID NO: 202900 - RNA, 19 nt, Artificial Sequence
  Description of Artificial Sequence: Synthetic oligonucleotide
  Sense strand starting at position 3617 of SEQ ID NO: 2614
gcaacacauuuagaaguau

SEQ ID NO: 202901 - RNA, 19 nt, Artificial Sequence
  Description of Artificial Sequence: Synthetic oligonucleotide
  Antisense strand to SEQ ID NO: 202900
auacuucuaaauguguugc

SEQ ID NO: 202902 - RNA, 19 nt, Artificial Sequence
  Description of Artificial Sequence: Synthetic oligonucleotide
  Sense strand starting at position 3626 of SEQ ID NO: 2614
uuagaaguaucugugaccu

SEQ ID NO: 202903 - RNA, 19 nt, Artificial Sequence
  Description of Artificial Sequence: Synthetic oligonucleotide
  Antisense strand to SEQ ID NO: 202902
aggucacagauacuucuaa

SEQ ID NO: 202904 - RNA, 19 nt, Artificial Sequence
  Description of Artificial Sequence: Synthetic oligonucleotide
  Sense strand starting at position 3669 of SEQ ID NO: 2614
acaccugguuaccuguaaa

SEQ ID NO: 202905 - RNA, 19 nt, Artificial Sequence
  Description of Artificial Sequence: Synthetic oligonucleotide
  Antisense strand to SEQ ID NO: 202904
uuuacagguaaccaggugu

SEQ ID NO: 202906 - RNA, 19 nt, Artificial Sequence
  Description of Artificial Sequence: Synthetic oligonucleotide
  Sense strand starting at position 3672 of SEQ ID NO: 2614
ccugguuaccuguaaauac

SEQ ID NO: 202907 - RNA, 19 nt, Artificial Sequence
  Description of Artificial Sequence: Synthetic oligonucleotide
  Antisense strand to SEQ ID NO: 202906
guauuuacagguaaccagg

SEQ ID NO: 202908 - RNA, 19 nt, Artificial Sequence
  Description of Artificial Sequence: Synthetic oligonucleotide
  Sense strand starting at position 13 of SEQ ID NO: 2615
auggaauuaccauguaauc

SEQ ID NO: 202909 - RNA, 19 nt, Artificial Sequence
  Description of Artificial Sequence: Synthetic oligonucleotide
  Antisense strand to SEQ ID NO: 202908
gauuacaugguaauuccau

SEQ ID NO: 202910 - RNA, 19 nt, Artificial Sequence
  Description of Artificial Sequence: Synthetic oligonucleotide
  Sense strand starting at position 74 of SEQ ID NO: 2615
ugaagaaauguuugcacac

SEQ ID NO: 202911 - RNA, 19 nt, Artificial Sequence
  Description of Artificial Sequence: Synthetic oligonucleotide
  Antisense strand to SEQ ID NO: 202910
gugugcaaacauuucuuca

SEQ ID NO: 202912 - RNA, 19 nt, Artificial Sequence
  Description of Artificial Sequence: Synthetic oligonucleotide
  Sense strand starting at position 168 of SEQ ID NO: 2615
aacagugugguguauacau

SEQ ID NO: 202913 - RNA, 19 nt, Artificial Sequence
  Description of Artificial Sequence: Synthetic oligonucleotide
  Antisense strand to SEQ ID NO: 202912
auguauacaccacacuguu

SEQ ID NO: 202914 - RNA, 19 nt, Artificial Sequence
  Description of Artificial Sequence: Synthetic oligonucleotide
  Sense strand starting at position 353 of SEQ ID NO: 2615
aggaaauauuaacagaaug

SEQ ID NO: 202915 - RNA, 19 nt, Artificial Sequence
  Description of Artificial Sequence: Synthetic oligonucleotide
  Antisense strand to SEQ ID NO: 202914
cauucuguuaauauuuccu

SEQ ID NO: 202916 - RNA, 19 nt, Artificial Sequence
  Description of Artificial Sequence: Synthetic oligonucleotide
  Sense strand starting at position 473 of SEQ ID NO: 2615
cguacauacaguuaacagu

SEQ ID NO: 202917 - RNA, 19 nt, Artificial Sequence
  Description of Artificial Sequence: Synthetic oligonucleotide
  Antisense strand to SEQ ID NO: 202916
acuguuaacuguauguacg

SEQ ID NO: 202918 - RNA, 19 nt, Artificial Sequence
  Description of Artificial Sequence: Synthetic oligonucleotide
  Sense strand starting at position 484 of SEQ ID NO: 2615
uuaacaguacuguaccaua

SEQ ID NO: 202919 - RNA, 19 nt, Artificial Sequence
  Description of Artificial Sequence: Synthetic oligonucleotide
  Antisense strand to SEQ ID NO: 202918
uaugguacaguacuguuaa

SEQ ID NO: 202920 - RNA, 19 nt, Artificial Sequence
  Description of Artificial Sequence: Synthetic oligonucleotide
  Sense strand starting at position 595 of SEQ ID NO: 2615
uucccaagcuugguggaaa

SEQ ID NO: 202921 - RNA, 19 nt, Artificial Sequence
  Description of Artificial Sequence: Synthetic oligonucleotide
  Antisense strand to SEQ ID NO: 202920
uuuccaccaagcuugggaa

SEQ ID NO: 202922 - RNA, 19 nt, Artificial Sequence
  Description of Artificial Sequence: Synthetic oligonucleotide
  Sense strand starting at position 944 of SEQ ID NO: 2615
agguuacguguauauagga

SEQ ID NO: 202923 - RNA, 19 nt, Artificial Sequence
  Description of Artificial Sequence: Synthetic oligonucleotide
  Antisense strand to SEQ ID NO: 202922
uccuauauacacguaaccu

SEQ ID NO: 202924 - RNA, 19 nt, Artificial Sequence
  Description of Artificial Sequence: Synthetic oligonucleotide
  Sense strand starting at position 1084 of SEQ ID NO: 2615
uccuucuuuguacagauga

SEQ ID NO: 202925 - RNA, 19 nt, Artificial Sequence
  Description of Artificial Sequence: Synthetic oligonucleotide
  Antisense strand to SEQ ID NO: 202924
ucaucuguacaaagaagga

SEQ ID NO: 202926 - RNA, 19 nt, Artificial Sequence
  Description of Artificial Sequence: Synthetic oligonucleotide
  Sense strand starting at position 1238 of SEQ ID NO: 2615
cucagaaucucaguuaagu

SEQ ID NO: 202927 - RNA, 19 nt, Artificial Sequence
  Description of Artificial Sequence: Synthetic oligonucleotide
  Antisense strand to SEQ ID NO: 202926
acuuaacugagauucugag

SEQ ID NO: 202928 - RNA, 19 nt, Artificial Sequence
  Description of Artificial Sequence: Synthetic oligonucleotide
  Sense strand starting at position 1379 of SEQ ID NO: 2615
cuccuuucccucuauguga

SEQ ID NO: 202929 - RNA, 19 nt, Artificial Sequence
  Description of Artificial Sequence: Synthetic oligonucleotide
  Antisense strand to SEQ ID NO: 202928
ucacauagagggaaaggag

SEQ ID NO: 202930 - RNA, 19 nt, Artificial Sequence
  Description of Artificial Sequence: Synthetic oligonucleotide
  Sense strand starting at position 1413 of SEQ ID NO: 2615
aaaucugaagguuguuuaa

SEQ ID NO: 202931 - RNA, 19 nt, Artificial Sequence
  Description of Artificial Sequence: Synthetic oligonucleotide
  Antisense strand to SEQ ID NO: 202930
uuaaacaaccuucagauuu

SEQ ID NO: 202932 - RNA, 19 nt, Artificial Sequence
  Description of Artificial Sequence: Synthetic oligonucleotide
  Sense strand starting at position 1415 of SEQ ID NO: 2615
aucugaagguuguuuaaua

SEQ ID NO: 202933 - RNA, 19 nt, Artificial Sequence
  Description of Artificial Sequence: Synthetic oligonucleotide
  Antisense strand to SEQ ID NO: 202932
uauuaaacaaccuucagau

SEQ ID NO: 202934 - RNA, 19 nt, Artificial Sequence
  Description of Artificial Sequence: Synthetic oligonucleotide
  Sense strand starting at position 1416 of SEQ ID NO: 2615
ucugaagguuguuuaauaa

SEQ ID NO: 202935 - RNA, 19 nt, Artificial Sequence
  Description of Artificial Sequence: Synthetic oligonucleotide
  Antisense strand to SEQ ID NO: 202934
uuauuaaacaaccuucaga

SEQ ID NO: 202936 - RNA, 19 nt, Artificial Sequence
  Description of Artificial Sequence: Synthetic oligonucleotide
  Sense strand starting at position 1457 of SEQ ID NO: 2615
accagauggucuuuaagag

SEQ ID NO: 202937 - RNA, 19 nt, Artificial Sequence
  Description of Artificial Sequence: Synthetic oligonucleotide
  Antisense strand to SEQ ID NO: 202936
cucuuaaagaccaucuggu

SEQ ID NO: 202938 - RNA, 19 nt, Artificial Sequence
  Description of Artificial Sequence: Synthetic oligonucleotide
  Sense strand starting at position 1629 of SEQ ID NO: 2615
uuaccauuuguacgacuuu

SEQ ID NO: 202939 - RNA, 19 nt, Artificial Sequence
  Description of Artificial Sequence: Synthetic oligonucleotide
  Antisense strand to SEQ ID NO: 202938
aaagucguacaaaugguaa

SEQ ID NO: 202940 - RNA, 19 nt, Artificial Sequence
  Description of Artificial Sequence: Synthetic oligonucleotide
  Sense strand starting at position 1746 of SEQ ID NO: 2615
aagugagacguuuaacaca

SEQ ID NO: 202941 - RNA, 19 nt, Artificial Sequence
  Description of Artificial Sequence: Synthetic oligonucleotide
  Antisense strand to SEQ ID NO: 202940
uguguuaaacgucucacuu

SEQ ID NO: 202942 - RNA, 19 nt, Artificial Sequence
  Description of Artificial Sequence: Synthetic oligonucleotide
  Sense strand starting at position 1787 of SEQ ID NO: 2615
augucugguaguuauuauu

SEQ ID NO: 202943 - RNA, 19 nt, Artificial Sequence
  Description of Artificial Sequence: Synthetic oligonucleotide
  Antisense strand to SEQ ID NO: 202942
aauaauaacuaccagacau

SEQ ID NO: 202944 - RNA, 19 nt, Artificial Sequence
  Description of Artificial Sequence: Synthetic oligonucleotide
  Sense strand starting at position 1835 of SEQ ID NO: 2615
ccucgucuccucugauuua

SEQ ID NO: 202945 - RNA, 19 nt, Artificial Sequence
  Description of Artificial Sequence: Synthetic oligonucleotide
  Antisense strand to SEQ ID NO: 202944
uaaaucagaggagacgagg

SEQ ID NO: 202946 - RNA, 19 nt, Artificial Sequence
  Description of Artificial Sequence: Synthetic oligonucleotide
  Sense strand starting at position 1894 of SEQ ID NO: 2615
accuaugaaugauuagguu

SEQ ID NO: 202947 - RNA, 19 nt, Artificial Sequence
  Description of Artificial Sequence: Synthetic oligonucleotide
  Antisense strand to SEQ ID NO: 202946
aaccuaaucauucauaggu

SEQ ID NO: 202948 - RNA, 19 nt, Artificial Sequence
  Description of Artificial Sequence: Synthetic oligonucleotide
  Sense strand starting at position 1902 of SEQ ID NO: 2615
augauuagguuuccacuca

SEQ ID NO: 202949 - RNA, 19 nt, Artificial Sequence
  Description of Artificial Sequence: Synthetic oligonucleotide
  Antisense strand to SEQ ID NO: 202948
ugaguggaaaccuaaucau

SEQ ID NO: 202950 - RNA, 19 nt, Artificial Sequence
  Description of Artificial Sequence: Synthetic oligonucleotide
  Sense strand starting at position 1926 of SEQ ID NO: 2615
guggaaacauauucuaguc

SEQ ID NO: 202951 - RNA, 19 nt, Artificial Sequence
  Description of Artificial Sequence: Synthetic oligonucleotide
  Antisense strand to SEQ ID NO: 202950
gacuagaauauguuuccac

SEQ ID NO: 202952 - RNA, 19 nt, Artificial Sequence
  Description of Artificial Sequence: Synthetic oligonucleotide
  Sense strand starting at position 1939 of SEQ ID NO: 2615
cuagucuugccuguuugua

SEQ ID NO: 202953 - RNA, 19 nt, Artificial Sequence
  Description of Artificial Sequence: Synthetic oligonucleotide
  Antisense strand to SEQ ID NO: 202952
uacaaacaggcaagacuag

SEQ ID NO: 202954 - RNA, 19 nt, Artificial Sequence
  Description of Artificial Sequence: Synthetic oligonucleotide
  Sense strand starting at position 2072 of SEQ ID NO: 2615
uccugaaucccaggauucu

SEQ ID NO: 202955 - RNA, 19 nt, Artificial Sequence
  Description of Artificial Sequence: Synthetic oligonucleotide
  Antisense strand to SEQ ID NO: 202954
agaauccugggauucagga

SEQ ID NO: 202956 - RNA, 19 nt, Artificial Sequence
  Description of Artificial Sequence: Synthetic oligonucleotide
  Sense strand starting at position 2282 of SEQ ID NO: 2615
gcgugugcccauguaaugu

SEQ ID NO: 202957 - RNA, 19 nt, Artificial Sequence
  Description of Artificial Sequence: Synthetic oligonucleotide
  Antisense strand to SEQ ID NO: 202956
acauuacaugggcacacgc

SEQ ID NO: 202958 - RNA, 19 nt, Artificial Sequence
  Description of Artificial Sequence: Synthetic oligonucleotide
  Sense strand starting at position 2292 of SEQ ID NO: 2615
auguaaugugucuagcaga

SEQ ID NO: 202959 - RNA, 19 nt, Artificial Sequence
  Description of Artificial Sequence: Synthetic oligonucleotide
  Antisense strand to SEQ ID NO: 202958
ucugcuagacacauuacau

SEQ ID NO: 202960 - RNA, 19 nt, Artificial Sequence
  Description of Artificial Sequence: Synthetic oligonucleotide
  Sense strand starting at position 2297 of SEQ ID NO: 2615
augugucuagcagauguaa

SEQ ID NO: 202961 - RNA, 19 nt, Artificial Sequence
  Description of Artificial Sequence: Synthetic oligonucleotide
  Antisense strand to SEQ ID NO: 202960
uuacaucugcuagacacau

SEQ ID NO: 202962 - RNA, 19 nt, Artificial Sequence
  Description of Artificial Sequence: Synthetic oligonucleotide
  Sense strand starting at position 2322 of SEQ ID NO: 2615
gucugucugggauggagau

SEQ ID NO: 202963 - RNA, 19 nt, Artificial Sequence
  Description of Artificial Sequence: Synthetic oligonucleotide
  Antisense strand to SEQ ID NO: 202962
aucuccaucccagacagac

SEQ ID NO: 202964 - RNA, 19 nt, Artificial Sequence
  Description of Artificial Sequence: Synthetic oligonucleotide
  Sense strand starting at position 2334 of SEQ ID NO: 2615
uggagauuaugagcccaca

SEQ ID NO: 202965 - RNA, 19 nt, Artificial Sequence
  Description of Artificial Sequence: Synthetic oligonucleotide
  Antisense strand to SEQ ID NO: 202964
ugugggcucauaaucucca

SEQ ID NO: 202966 - RNA, 19 nt, Artificial Sequence
  Description of Artificial Sequence: Synthetic oligonucleotide
  Sense strand starting at position 2390 of SEQ ID NO: 2615
agaaaugugaaacgcacau

SEQ ID NO: 202967 - RNA, 19 nt, Artificial Sequence
  Description of Artificial Sequence: Synthetic oligonucleotide
  Antisense strand to SEQ ID NO: 202966
augugcguuucacauuucu

SEQ ID NO: 202968 - RNA, 19 nt, Artificial Sequence
  Description of Artificial Sequence: Synthetic oligonucleotide
  Sense strand starting at position 2402 of SEQ ID NO: 2615
cgcacaugccuguccuuau

SEQ ID NO: 202969 - RNA, 19 nt, Artificial Sequence
  Description of Artificial Sequence: Synthetic oligonucleotide
  Antisense strand to SEQ ID NO: 202968
auaaggacaggcaugugcg

SEQ ID NO: 202970 - RNA, 19 nt, Artificial Sequence
  Description of Artificial Sequence: Synthetic oligonucleotide
  Sense strand starting at position 2743 of SEQ ID NO: 2615
gcuggauucgguguuuguu

SEQ ID NO: 202971 - RNA, 19 nt, Artificial Sequence
  Description of Artificial Sequence: Synthetic oligonucleotide
  Antisense strand to SEQ ID NO: 202970
aacaaacaccgaauccagc

SEQ ID NO: 202972 - RNA, 19 nt, Artificial Sequence
  Description of Artificial Sequence: Synthetic oligonucleotide
  Sense strand starting at position 2855 of SEQ ID NO: 2615
cguggauugauuggauuaa

SEQ ID NO: 202973 - RNA, 19 nt, Artificial Sequence
  Description of Artificial Sequence: Synthetic oligonucleotide
  Antisense strand to SEQ ID NO: 202972
uuaauccaaucaauccacg

SEQ ID NO: 202974 - RNA, 19 nt, Artificial Sequence
  Description of Artificial Sequence: Synthetic oligonucleotide
  Sense strand starting at position 2983 of SEQ ID NO: 2615
ugaauauuacgaggcaaau

SEQ ID NO: 202975 - RNA, 19 nt, Artificial Sequence
  Description of Artificial Sequence: Synthetic oligonucleotide
  Antisense strand to SEQ ID NO: 202974
auuugccucguaauauuca

SEQ ID NO: 202976 - RNA, 19 nt, Artificial Sequence
  Description of Artificial Sequence: Synthetic oligonucleotide
  Sense strand starting at position 3045 of SEQ ID NO: 2615
ccagaagccucuccauaug

SEQ ID NO: 202977 - RNA, 19 nt, Artificial Sequence
  Description of Artificial Sequence: Synthetic oligonucleotide
  Antisense strand to SEQ ID NO: 202976
cauauggagaggcuucugg

SEQ ID NO: 202978 - RNA, 19 nt, Artificial Sequence
  Description of Artificial Sequence: Synthetic oligonucleotide
  Sense strand starting at position 3083 of SEQ ID NO: 2615
uuccaaacuggugauugua

SEQ ID NO: 202979 - RNA, 19 nt, Artificial Sequence
  Description of Artificial Sequence: Synthetic oligonucleotide
  Antisense strand to SEQ ID NO: 202978
uacaaucaccaguuuggaa

SEQ ID NO: 202980 - RNA, 19 nt, Artificial Sequence
  Description of Artificial Sequence: Synthetic oligonucleotide
  Sense strand starting at position 3086 of SEQ ID NO: 2615
caaacuggugauuguauau

SEQ ID NO: 202981 - RNA, 19 nt, Artificial Sequence
  Description of Artificial Sequence: Synthetic oligonucleotide
  Antisense strand to SEQ ID NO: 202980
auauacaaucaccaguuug

SEQ ID NO: 202982 - RNA, 19 nt, Artificial Sequence
  Description of Artificial Sequence: Synthetic oligonucleotide
  Sense strand starting at position 3159 of SEQ ID NO: 2615
ugcugaggccgauaucaaa

SEQ ID NO: 202983 - RNA, 19 nt, Artificial Sequence
  Description of Artificial Sequence: Synthetic oligonucleotide
  Antisense strand to SEQ ID NO: 202982
uuugauaucggccucagca

SEQ ID NO: 202984 - RNA, 19 nt, Artificial Sequence
  Description of Artificial Sequence: Synthetic oligonucleotide
  Sense strand starting at position 3272 of SEQ ID NO: 2615
ggaagugugagcugggaaa

SEQ ID NO: 202985 - RNA, 19 nt, Artificial Sequence
  Description of Artificial Sequence: Synthetic oligonucleotide
  Antisense strand to SEQ ID NO: 202984
uuucccagcucacacuucc

SEQ ID NO: 202986 - RNA, 19 nt, Artificial Sequence
  Description of Artificial Sequence: Synthetic oligonucleotide
  Sense strand starting at position 3274 of SEQ ID NO: 2615
aagugugagcugggaaauc

SEQ ID NO: 202987 - RNA, 19 nt, Artificial Sequence
  Description of Artificial Sequence: Synthetic oligonucleotide
  Antisense strand to SEQ ID NO: 202986
gauuucccagcucacacuu

SEQ ID NO: 202988 - RNA, 19 nt, Artificial Sequence
  Description of Artificial Sequence: Synthetic oligonucleotide
  Sense strand starting at position 98 of SEQ ID NO: 2617
aagguauuacucuggaacu

SEQ ID NO: 202989 - RNA, 19 nt, Artificial Sequence
  Description of Artificial Sequence: Synthetic oligonucleotide
  Antisense strand to SEQ ID NO: 202988
aguuccagaguaauaccuu

SEQ ID NO: 202990 - RNA, 19 nt, Artificial Sequence
  Description of Artificial Sequence: Synthetic oligonucleotide
  Sense strand starting at position 166 of SEQ ID NO: 2617
uuccuaauuugguagagga

SEQ ID NO: 202991 - RNA, 19 nt, Artificial Sequence
  Description of Artificial Sequence: Synthetic oligonucleotide
  Antisense strand to SEQ ID NO: 202990
uccucuaccaaauuaggaa

SEQ ID NO: 202992 - RNA, 19 nt, Artificial Sequence
  Description of Artificial Sequence: Synthetic oligonucleotide
  Sense strand starting at position 260 of SEQ ID NO: 2617
gaccauuauggagguuuga

SEQ ID NO: 202993 - RNA, 19 nt, Artificial Sequence
  Description of Artificial Sequence: Synthetic oligonucleotide
  Antisense strand to SEQ ID NO: 202992
ucaaaccuccauaaugguc

SEQ ID NO: 202994 - RNA, 19 nt, Artificial Sequence
  Description of Artificial Sequence: Synthetic oligonucleotide
  Sense strand starting at position 269 of SEQ ID NO: 2617
ggagguuugagcggacaag

SEQ ID NO: 202995 - RNA, 19 nt, Artificial Sequence
  Description of Artificial Sequence: Synthetic oligonucleotide
  Antisense strand to SEQ ID NO: 202994
cuuguccgcucaaaccucc

SEQ ID NO: 202996 - RNA, 19 nt, Artificial Sequence
  Description of Artificial Sequence: Synthetic oligonucleotide
  Sense strand starting at position 270 of SEQ ID NO: 2617
gagguuugagcggacaagu

SEQ ID NO: 202997 - RNA, 19 nt, Artificial Sequence
  Description of Artificial Sequence: Synthetic oligonucleotide
  Antisense strand to SEQ ID NO: 202996
acuuguccgcucaaaccuc

SEQ ID NO: 202998 - RNA, 19 nt, Artificial Sequence
  Description of Artificial Sequence: Synthetic oligonucleotide
  Sense strand starting at position 279 of SEQ ID NO: 2617
gcggacaaguaauuggaaa

SEQ ID NO: 202999 - RNA, 19 nt, Artificial Sequence
  Description of Artificial Sequence: Synthetic oligonucleotide
  Antisense strand to SEQ ID NO: 202998
uuuccaauuacuuguccgc

SEQ ID NO: 203000 - RNA, 19 nt, Artificial Sequence
  Description of Artificial Sequence: Synthetic oligonucleotide
  Sense strand starting at position 280 of SEQ ID NO: 2617
cggacaaguaauuggaaau

SEQ ID NO: 203001 - RNA, 19 nt, Artificial Sequence
  Description of Artificial Sequence: Synthetic oligonucleotide
  Antisense strand to SEQ ID NO: 203000
auuuccaauuacuuguccg

SEQ ID NO: 203002 - RNA, 19 nt, Artificial Sequence
  Description of Artificial Sequence: Synthetic oligonucleotide
  Sense strand starting at position 507 of SEQ ID NO: 2617
gggugcacucaguaggaaa

SEQ ID NO: 203003 - RNA, 19 nt, Artificial Sequence
  Description of Artificial Sequence: Synthetic oligonucleotide
  Antisense strand to SEQ ID NO: 203002
uuuccuacugagugcaccc

SEQ ID NO: 203004 - RNA, 19 nt, Artificial Sequence
  Description of Artificial Sequence: Synthetic oligonucleotide
  Sense strand starting at position 559 of SEQ ID NO: 2617
ccuggaguguggaaagguu

SEQ ID NO: 203005 - RNA, 19 nt, Artificial Sequence
  Description of Artificial Sequence: Synthetic oligonucleotide
  Antisense strand to SEQ ID NO: 203004
aaccuuuccacacuccagg

SEQ ID NO: 203006 - RNA, 19 nt, Artificial Sequence
  Description of Artificial Sequence: Synthetic oligonucleotide
  Sense strand starting at position 609 of SEQ ID NO: 2617
agacaucugcgugaugauu

SEQ ID NO: 203007 - RNA, 19 nt, Artificial Sequence
  Description of Artificial Sequence: Synthetic oligonucleotide
  Antisense strand to SEQ ID NO: 203006
aaucaucacgcagaugucu

SEQ ID NO: 203008 - RNA, 19 nt, Artificial Sequence
  Description of Artificial Sequence: Synthetic oligonucleotide
  Sense strand starting at position 643 of SEQ ID NO: 2617
auagguggauucuuuaaau

SEQ ID NO: 203009 - RNA, 19 nt, Artificial Sequence
  Description of Artificial Sequence: Synthetic oligonucleotide
  Antisense strand to SEQ ID NO: 203008
auuuaaagaauccaccuau

SEQ ID NO: 203010 - RNA, 19 nt, Artificial Sequence
  Description of Artificial Sequence: Synthetic oligonucleotide
  Sense strand starting at position 847 of SEQ ID NO: 2617
ggugcauaucugcagaaga

SEQ ID NO: 203011 - RNA, 19 nt, Artificial Sequence
  Description of Artificial Sequence: Synthetic oligonucleotide
  Antisense strand to SEQ ID NO: 203010
ucuucugcagauaugcacc

SEQ ID NO: 203012 - RNA, 19 nt, Artificial Sequence
  Description of Artificial Sequence: Synthetic oligonucleotide
  Sense strand starting at position 849 of SEQ ID NO: 2617
ugcauaucugcagaagaga

SEQ ID NO: 203013 - RNA, 19 nt, Artificial Sequence
  Description of Artificial Sequence: Synthetic oligonucleotide
  Antisense strand to SEQ ID NO: 203012
ucucuucugcagauaugca

SEQ ID NO: 203014 - RNA, 19 nt, Artificial Sequence
  Description of Artificial Sequence: Synthetic oligonucleotide
  Sense strand starting at position 911 of SEQ ID NO: 2617
aacggcgaucaagaauuaa

SEQ ID NO: 203015 - RNA, 19 nt, Artificial Sequence
  Description of Artificial Sequence: Synthetic oligonucleotide
  Antisense strand to SEQ ID NO: 203014
uuaauucuugaucgccguu

SEQ ID NO: 203016 - RNA, 19 nt, Artificial Sequence
  Description of Artificial Sequence: Synthetic oligonucleotide
  Sense strand starting at position 934 of SEQ ID NO: 2617
caguacacguuuccagaau

SEQ ID NO: 203017 - RNA, 19 nt, Artificial Sequence
  Description of Artificial Sequence: Synthetic oligonucleotide
  Antisense strand to SEQ ID NO: 203016
auucuggaaacguguacug

SEQ ID NO: 203018 - RNA, 19 nt, Artificial Sequence
  Description of Artificial Sequence: Synthetic oligonucleotide
  Sense strand starting at position 1096 of SEQ ID NO: 2617
agguccucaucucugaaga

SEQ ID NO: 203019 - RNA, 19 nt, Artificial Sequence
  Description of Artificial Sequence: Synthetic oligonucleotide
  Antisense strand to SEQ ID NO: 203018
ucuucagagaugaggaccu

SEQ ID NO: 203020 - RNA, 19 nt, Artificial Sequence
  Description of Artificial Sequence: Synthetic oligonucleotide
  Sense strand starting at position 1097 of SEQ ID NO: 2617
gguccucaucucugaagau

SEQ ID NO: 203021 - RNA, 19 nt, Artificial Sequence
  Description of Artificial Sequence: Synthetic oligonucleotide
  Antisense strand to SEQ ID NO: 203020
aucuucagagaugaggacc

SEQ ID NO: 203022 - RNA, 19 nt, Artificial Sequence
  Description of Artificial Sequence: Synthetic oligonucleotide
  Sense strand starting at position 1137 of SEQ ID NO: 2617
augcuuucugcagagacuu

SEQ ID NO: 203023 - RNA, 19 nt, Artificial Sequence
  Description of Artificial Sequence: Synthetic oligonucleotide
  Antisense strand to SEQ ID NO: 203022
aagucucugcagaaagcau

SEQ ID NO: 203024 - RNA, 19 nt, Artificial Sequence
  Description of Artificial Sequence: Synthetic oligonucleotide
  Sense strand starting at position 1145 of SEQ ID NO: 2617
ugcagagacuucucaaucu

SEQ ID NO: 203025 - RNA, 19 nt, Artificial Sequence
  Description of Artificial Sequence: Synthetic oligonucleotide
  Antisense strand to SEQ ID NO: 203024
agauugagaagucucugca

SEQ ID NO: 203026 - RNA, 19 nt, Artificial Sequence
  Description of Artificial Sequence: Synthetic oligonucleotide
  Sense strand starting at position 1172 of SEQ ID NO: 2617
uaguuuggcgcgguguaaa

SEQ ID NO: 203027 - RNA, 19 nt, Artificial Sequence
  Description of Artificial Sequence: Synthetic oligonucleotide
  Antisense strand to SEQ ID NO: 203026
uuuacaccgcgccaaacua

SEQ ID NO: 203028 - RNA, 19 nt, Artificial Sequence
  Description of Artificial Sequence: Synthetic oligonucleotide
  Sense strand starting at position 1292 of SEQ ID NO: 2617
agaggacccgucuguagaa

SEQ ID NO: 203029 - RNA, 19 nt, Artificial Sequence
  Description of Artificial Sequence: Synthetic oligonucleotide
  Antisense strand to SEQ ID NO: 203028
uucuacagacggguccucu

SEQ ID NO: 203030 - RNA, 19 nt, Artificial Sequence
  Description of Artificial Sequence: Synthetic oligonucleotide
  Sense strand starting at position 1293 of SEQ ID NO: 2617
gaggacccgucuguagaaa

SEQ ID NO: 203031 - RNA, 19 nt, Artificial Sequence
  Description of Artificial Sequence: Synthetic oligonucleotide
  Antisense strand to SEQ ID NO: 203030
uuucuacagacggguccuc

SEQ ID NO: 203032 - RNA, 19 nt, Artificial Sequence
  Description of Artificial Sequence: Synthetic oligonucleotide
  Sense strand starting at position 1400 of SEQ ID NO: 2617
cgacgugaguacuugggaa

SEQ ID NO: 203033 - RNA, 19 nt, Artificial Sequence
  Description of Artificial Sequence: Synthetic oligonucleotide
  Antisense strand to SEQ ID NO: 203032
uucccaaguacucacgucg

SEQ ID NO: 203034 - RNA, 19 nt, Artificial Sequence
  Description of Artificial Sequence: Synthetic oligonucleotide
  Sense strand starting at position 1402 of SEQ ID NO: 2617
acgugaguacuugggaaca

SEQ ID NO: 203035 - RNA, 19 nt, Artificial Sequence
  Description of Artificial Sequence: Synthetic oligonucleotide
  Antisense strand to SEQ ID NO: 203034
uguucccaaguacucacgu

SEQ ID NO: 203036 - RNA, 19 nt, Artificial Sequence
  Description of Artificial Sequence: Synthetic oligonucleotide
  Sense strand starting at position 2250 of SEQ ID NO: 2617
aucuuaagugcgagcggua

SEQ ID NO: 203037 - RNA, 19 nt, Artificial Sequence
  Description of Artificial Sequence: Synthetic oligonucleotide
  Antisense strand to SEQ ID NO: 203036
uaccgcucgcacuuaagau

SEQ ID NO: 203038 - RNA, 19 nt, Artificial Sequence
  Description of Artificial Sequence: Synthetic oligonucleotide
  Sense strand starting at position 2251 of SEQ ID NO: 2617
ucuuaagugcgagcgguaa

SEQ ID NO: 203039 - RNA, 19 nt, Artificial Sequence
  Description of Artificial Sequence: Synthetic oligonucleotide
  Antisense strand to SEQ ID NO: 203038
uuaccgcucgcacuuaaga

SEQ ID NO: 203040 - RNA, 19 nt, Artificial Sequence
  Description of Artificial Sequence: Synthetic oligonucleotide
  Sense strand starting at position 2664 of SEQ ID NO: 2617
ccagaaagcuccuuaaagc

SEQ ID NO: 203041 - RNA, 19 nt, Artificial Sequence
  Description of Artificial Sequence: Synthetic oligonucleotide
  Antisense strand to SEQ ID NO: 203040
gcuuuaaggagcuuucugg

SEQ ID NO: 203042 - RNA, 19 nt, Artificial Sequence
  Description of Artificial Sequence: Synthetic oligonucleotide
  Sense strand starting at position 2750 of SEQ ID NO: 2617
cuggaaguuccugaaaggu

SEQ ID NO: 203043 - RNA, 19 nt, Artificial Sequence
  Description of Artificial Sequence: Synthetic oligonucleotide
  Antisense strand to SEQ ID NO: 203042
accuuucaggaacuuccag

SEQ ID NO: 203044 - RNA, 19 nt, Artificial Sequence
  Description of Artificial Sequence: Synthetic oligonucleotide
  Sense strand starting at position 2758 of SEQ ID NO: 2617
uccugaaagguuuacguuu

SEQ ID NO: 203045 - RNA, 19 nt, Artificial Sequence
  Description of Artificial Sequence: Synthetic oligonucleotide
  Antisense strand to SEQ ID NO: 203044
aaacguaaaccuuucagga

SEQ ID NO: 203046 - RNA, 19 nt, Artificial Sequence
  Description of Artificial Sequence: Synthetic oligonucleotide
  Sense strand starting at position 2957 of SEQ ID NO: 2617
gugugugaccaaagugagu

SEQ ID NO: 203047 - RNA, 19 nt, Artificial Sequence
  Description of Artificial Sequence: Synthetic oligonucleotide
  Antisense strand to SEQ ID NO: 203046
acucacuuuggucacacac

SEQ ID NO: 203048 - RNA, 19 nt, Artificial Sequence
  Description of Artificial Sequence: Synthetic oligonucleotide
  Sense strand starting at position 3258 of SEQ ID NO: 2617
ugggauuacaggcagugau

SEQ ID NO: 203049 - RNA, 19 nt, Artificial Sequence
  Description of Artificial Sequence: Synthetic oligonucleotide
  Antisense strand to SEQ ID NO: 203048
aucacugccuguaauccca

SEQ ID NO: 203050 - RNA, 19 nt, Artificial Sequence
  Description of Artificial Sequence: Synthetic oligonucleotide
  Sense strand starting at position 3700 of SEQ ID NO: 2617
gaccauagcguuuggauca

SEQ ID NO: 203051 - RNA, 19 nt, Artificial Sequence
  Description of Artificial Sequence: Synthetic oligonucleotide
  Antisense strand to SEQ ID NO: 203050
ugauccaaacgcuaugguc

SEQ ID NO: 203052 - RNA, 19 nt, Artificial Sequence
  Description of Artificial Sequence: Synthetic oligonucleotide
  Sense strand starting at position 3705 of SEQ ID NO: 2617
uagcguuuggaucaaugua

SEQ ID NO: 203053 - RNA, 19 nt, Artificial Sequence
  Description of Artificial Sequence: Synthetic oligonucleotide
  Antisense strand to SEQ ID NO: 203052
uacauugauccaaacgcua

SEQ ID NO: 203054 - RNA, 19 nt, Artificial Sequence
  Description of Artificial Sequence: Synthetic oligonucleotide
  Sense strand starting at position 3718 of SEQ ID NO: 2617
aauguaggguguuuagaaa

SEQ ID NO: 203055 - RNA, 19 nt, Artificial Sequence
  Description of Artificial Sequence: Synthetic oligonucleotide
  Antisense strand to SEQ ID NO: 203054
uuucuaaacacccuacauu

SEQ ID NO: 203056 - RNA, 19 nt, Artificial Sequence
  Description of Artificial Sequence: Synthetic oligonucleotide
  Sense strand starting at position 3740 of SEQ ID NO: 2617
acagaucuguucucagaau

SEQ ID NO: 203057 - RNA, 19 nt, Artificial Sequence
  Description of Artificial Sequence: Synthetic oligonucleotide
  Antisense strand to SEQ ID NO: 203056
auucugagaacagaucugu

SEQ ID NO: 203058 - RNA, 19 nt, Artificial Sequence
  Description of Artificial Sequence: Synthetic oligonucleotide
  Sense strand starting at position 3751 of SEQ ID NO: 2617
cucagaaucuggucuguug

SEQ ID NO: 203059 - RNA, 19 nt, Artificial Sequence
  Description of Artificial Sequence: Synthetic oligonucleotide
  Antisense strand to SEQ ID NO: 203058
caacagaccagauucugag

SEQ ID NO: 203060 - RNA, 19 nt, Artificial Sequence
  Description of Artificial Sequence: Synthetic oligonucleotide
  Sense strand starting at position 3869 of SEQ ID NO: 2617
agcagagugucuuuauuuc

SEQ ID NO: 203061 - RNA, 19 nt, Artificial Sequence
  Description of Artificial Sequence: Synthetic oligonucleotide
  Antisense strand to SEQ ID NO: 203060
gaaauaaagacacucugcu

SEQ ID NO: 203062 - RNA, 19 nt, Artificial Sequence
  Description of Artificial Sequence: Synthetic oligonucleotide
  Sense strand starting at position 3873 of SEQ ID NO: 2617
gagugucuuuauuucugua

SEQ ID NO: 203063 - RNA, 19 nt, Artificial Sequence
  Description of Artificial Sequence: Synthetic oligonucleotide
  Antisense strand to SEQ ID NO: 203062
uacagaaauaaagacacuc

SEQ ID NO: 203064 - RNA, 19 nt, Artificial Sequence
  Description of Artificial Sequence: Synthetic oligonucleotide
  Sense strand starting at position 3979 of SEQ ID NO: 2617
guguucuuugcacacagga

SEQ ID NO: 203065 - RNA, 19 nt, Artificial Sequence
  Description of Artificial Sequence: Synthetic oligonucleotide
  Antisense strand to SEQ ID NO: 203064
uccugugugcaaagaacac

SEQ ID NO: 203066 - RNA, 19 nt, Artificial Sequence
  Description of Artificial Sequence: Synthetic oligonucleotide
  Sense strand starting at position 3981 of SEQ ID NO: 2617
guucuuugcacacaggaga

SEQ ID NO: 203067 - RNA, 19 nt, Artificial Sequence
  Description of Artificial Sequence: Synthetic oligonucleotide
  Antisense strand to SEQ ID NO: 203066
ucuccugugugcaaagaac

SEQ ID NO: 203068 - RNA, 19 nt, Artificial Sequence
  Description of Artificial Sequence: Synthetic oligonucleotide
  Sense strand starting at position 6 of SEQ ID NO: 2616
aggaucaugccacguuauu

SEQ ID NO: 203069 - RNA, 19 nt, Artificial Sequence
  Description of Artificial Sequence: Synthetic oligonucleotide
  Antisense strand to SEQ ID NO: 203068
aauaacguggcaugauccu

SEQ ID NO: 203070 - RNA, 19 nt, Artificial Sequence
  Description of Artificial Sequence: Synthetic oligonucleotide
  Sense strand starting at position 90 of SEQ ID NO: 2616
cugcaaacacugggagaau

SEQ ID NO: 203071 - RNA, 19 nt, Artificial Sequence
  Description of Artificial Sequence: Synthetic oligonucleotide
  Antisense strand to SEQ ID NO: 203070
auucucccaguguuugcag

SEQ ID NO: 203072 - RNA, 19 nt, Artificial Sequence
  Description of Artificial Sequence: Synthetic oligonucleotide
  Sense strand starting at position 138 of SEQ ID NO: 2616
cuuugaguggcuuacaaug

SEQ ID NO: 203073 - RNA, 19 nt, Artificial Sequence
  Description of Artificial Sequence: Synthetic oligonucleotide
  Antisense strand to SEQ ID NO: 203072
cauuguaagccacucaaag

SEQ ID NO: 203074 - RNA, 19 nt, Artificial Sequence
  Description of Artificial Sequence: Synthetic oligonucleotide
  Sense strand starting at position 291 of SEQ ID NO: 2616
guauuacugaaucgcuuga

SEQ ID NO: 203075 - RNA, 19 nt, Artificial Sequence
  Description of Artificial Sequence: Synthetic oligonucleotide
  Antisense strand to SEQ ID NO: 203074
ucaagcgauucaguaauac

SEQ ID NO: 203076 - RNA, 19 nt, Artificial Sequence
  Description of Artificial Sequence: Synthetic oligonucleotide
  Sense strand starting at position 418 of SEQ ID NO: 2616
aagguauuacucuggaacu

SEQ ID NO: 203077 - RNA, 19 nt, Artificial Sequence
  Description of Artificial Sequence: Synthetic oligonucleotide
  Antisense strand to SEQ ID NO: 203076
aguuccagaguaauaccuu

SEQ ID NO: 203078 - RNA, 19 nt, Artificial Sequence
  Description of Artificial Sequence: Synthetic oligonucleotide
  Sense strand starting at position 486 of SEQ ID NO: 2616
uuccuaauuugguagagga

SEQ ID NO: 203079 - RNA, 19 nt, Artificial Sequence
  Description of Artificial Sequence: Synthetic oligonucleotide
  Antisense strand to SEQ ID NO: 203078
uccucuaccaaauuaggaa

SEQ ID NO: 203080 - RNA, 19 nt, Artificial Sequence
  Description of Artificial Sequence: Synthetic oligonucleotide
  Sense strand starting at position 580 of SEQ ID NO: 2616
gaccauuauggagguuuga

SEQ ID NO: 203081 - RNA, 19 nt, Artificial Sequence
  Description of Artificial Sequence: Synthetic oligonucleotide
  Antisense strand to SEQ ID NO: 203080
ucaaaccuccauaaugguc

SEQ ID NO: 203082 - RNA, 19 nt, Artificial Sequence
  Description of Artificial Sequence: Synthetic oligonucleotide
  Sense strand starting at position 589 of SEQ ID NO: 2616
ggagguuugagcggacaag

SEQ ID NO: 203083 - RNA, 19 nt, Artificial Sequence
  Description of Artificial Sequence: Synthetic oligonucleotide
  Antisense strand to SEQ ID NO: 203082
cuuguccgcucaaaccucc

SEQ ID NO: 203084 - RNA, 19 nt, Artificial Sequence
  Description of Artificial Sequence: Synthetic oligonucleotide
  Sense strand starting at position 590 of SEQ ID NO: 2616
gagguuugagcggacaagu

SEQ ID NO: 203085 - RNA, 19 nt, Artificial Sequence
  Description of Artificial Sequence: Synthetic oligonucleotide
  Antisense strand to SEQ ID NO: 203084
acuuguccgcucaaaccuc

SEQ ID NO: 203086 - RNA, 19 nt, Artificial Sequence
  Description of Artificial Sequence: Synthetic oligonucleotide
  Sense strand starting at position 599 of SEQ ID NO: 2616
gcggacaaguaauuggaaa

SEQ ID NO: 203087 - RNA, 19 nt, Artificial Sequence
  Description of Artificial Sequence: Synthetic oligonucleotide
  Antisense strand to SEQ ID NO: 203086
uuuccaauuacuuguccgc

SEQ ID NO: 203088 - RNA, 19 nt, Artificial Sequence
  Description of Artificial Sequence: Synthetic oligonucleotide
  Sense strand starting at position 600 of SEQ ID NO: 2616
cggacaaguaauuggaaau

SEQ ID NO: 203089 - RNA, 19 nt, Artificial Sequence
  Description of Artificial Sequence: Synthetic oligonucleotide
  Antisense strand to SEQ ID NO: 203088
auuuccaauuacuuguccg

SEQ ID NO: 203090 - RNA, 19 nt, Artificial Sequence
  Description of Artificial Sequence: Synthetic oligonucleotide
  Sense strand starting at position 827 of SEQ ID NO: 2616
gggugcacucaguaggaaa

SEQ ID NO: 203091 - RNA, 19 nt, Artificial Sequence
  Description of Artificial Sequence: Synthetic oligonucleotide
  Antisense strand to SEQ ID NO: 203090
uuuccuacugagugcaccc

SEQ ID NO: 203092 - RNA, 19 nt, Artificial Sequence
  Description of Artificial Sequence: Synthetic oligonucleotide
  Sense strand starting at position 841 of SEQ ID NO: 2616
ggaaaugcuuaauaggaag

SEQ ID NO: 203093 - RNA, 19 nt, Artificial Sequence
  Description of Artificial Sequence: Synthetic oligonucleotide
  Antisense strand to SEQ ID NO: 203092
cuuccuauuaagcauuucc

SEQ ID NO: 203094 - RNA, 19 nt, Artificial Sequence
  Description of Artificial Sequence: Synthetic oligonucleotide
  Sense strand starting at position 879 of SEQ ID NO: 2616
ccuggaguguggaaagguu

SEQ ID NO: 203095 - RNA, 19 nt, Artificial Sequence
  Description of Artificial Sequence: Synthetic oligonucleotide
  Antisense strand to SEQ ID NO: 203094
aaccuuuccacacuccagg

SEQ ID NO: 203096 - RNA, 19 nt, Artificial Sequence
  Description of Artificial Sequence: Synthetic oligonucleotide
  Sense strand starting at position 927 of SEQ ID NO: 2616
guagacaucugcgugauga

SEQ ID NO: 203097 - RNA, 19 nt, Artificial Sequence
  Description of Artificial Sequence: Synthetic oligonucleotide
  Antisense strand to SEQ ID NO: 203096
ucaucacgcagaugucuac

SEQ ID NO: 203098 - RNA, 19 nt, Artificial Sequence
  Description of Artificial Sequence: Synthetic oligonucleotide
  Sense strand starting at position 928 of SEQ ID NO: 2616
uagacaucugcgugaugau

SEQ ID NO: 203099 - RNA, 19 nt, Artificial Sequence
  Description of Artificial Sequence: Synthetic oligonucleotide
  Antisense strand to SEQ ID NO: 203098
aucaucacgcagaugucua

SEQ ID NO: 203100 - RNA, 19 nt, Artificial Sequence
  Description of Artificial Sequence: Synthetic oligonucleotide
  Sense strand starting at position 929 of SEQ ID NO: 2616
agacaucugcgugaugauu

SEQ ID NO: 203101 - RNA, 19 nt, Artificial Sequence
  Description of Artificial Sequence: Synthetic oligonucleotide
  Antisense strand to SEQ ID NO: 203100
aaucaucacgcagaugucu

SEQ ID NO: 203102 - RNA, 19 nt, Artificial Sequence
  Description of Artificial Sequence: Synthetic oligonucleotide
  Sense strand starting at position 963 of SEQ ID NO: 2616
auagguggauucuuuaaau

SEQ ID NO: 203103 - RNA, 19 nt, Artificial Sequence
  Description of Artificial Sequence: Synthetic oligonucleotide
  Antisense strand to SEQ ID NO: 203102
auuuaaagaauccaccuau

SEQ ID NO: 203104 - RNA, 19 nt, Artificial Sequence
  Description of Artificial Sequence: Synthetic oligonucleotide
  Sense strand starting at position 1167 of SEQ ID NO: 2616
ggugcauaucugcagaaga

SEQ ID NO: 203105 - RNA, 19 nt, Artificial Sequence
  Description of Artificial Sequence: Synthetic oligonucleotide
  Antisense strand to SEQ ID NO: 203104
ucuucugcagauaugcacc

SEQ ID NO: 203106 - RNA, 19 nt, Artificial Sequence
  Description of Artificial Sequence: Synthetic oligonucleotide
  Sense strand starting at position 1169 of SEQ ID NO: 2616
ugcauaucugcagaagaga

SEQ ID NO: 203107 - RNA, 19 nt, Artificial Sequence
  Description of Artificial Sequence: Synthetic oligonucleotide
  Antisense strand to SEQ ID NO: 203106
ucucuucugcagauaugca

SEQ ID NO: 203108 - RNA, 19 nt, Artificial Sequence
  Description of Artificial Sequence: Synthetic oligonucleotide
  Sense strand starting at position 1231 of SEQ ID NO: 2616
aacggcgaucaagaauuaa

SEQ ID NO: 203109 - RNA, 19 nt, Artificial Sequence
  Description of Artificial Sequence: Synthetic oligonucleotide
  Antisense strand to SEQ ID NO: 203108
uuaauucuugaucgccguu

SEQ ID NO: 203110 - RNA, 19 nt, Artificial Sequence
  Description of Artificial Sequence: Synthetic oligonucleotide
  Sense strand starting at position 1254 of SEQ ID NO: 2616
caguacacguuuccagaau

SEQ ID NO: 203111 - RNA, 19 nt, Artificial Sequence
  Description of Artificial Sequence: Synthetic oligonucleotide
  Antisense strand to SEQ ID NO: 203110
auucuggaaacguguacug

SEQ ID NO: 203112 - RNA, 19 nt, Artificial Sequence
  Description of Artificial Sequence: Synthetic oligonucleotide
  Sense strand starting at position 1416 of SEQ ID NO: 2616
agguccucaucucugaaga

SEQ ID NO: 203113 - RNA, 19 nt, Artificial Sequence
  Description of Artificial Sequence: Synthetic oligonucleotide
  Antisense strand to SEQ ID NO: 203112
ucuucagagaugaggaccu

SEQ ID NO: 203114 - RNA, 19 nt, Artificial Sequence
  Description of Artificial Sequence: Synthetic oligonucleotide
  Sense strand starting at position 1417 of SEQ ID NO: 2616
gguccucaucucugaagau

SEQ ID NO: 203115 - RNA, 19 nt, Artificial Sequence
  Description of Artificial Sequence: Synthetic oligonucleotide
  Antisense strand to SEQ ID NO: 203114
aucuucagagaugaggacc

SEQ ID NO: 203116 - RNA, 19 nt, Artificial Sequence
  Description of Artificial Sequence: Synthetic oligonucleotide
  Sense strand starting at position 1452 of SEQ ID NO: 2616
uuauuaugcuuucugcaga

SEQ ID NO: 203117 - RNA, 19 nt, Artificial Sequence
  Description of Artificial Sequence: Synthetic oligonucleotide
  Antisense strand to SEQ ID NO: 203116
ucugcagaaagcauaauaa

SEQ ID NO: 203118 - RNA, 19 nt, Artificial Sequence
  Description of Artificial Sequence: Synthetic oligonucleotide
  Sense strand starting at position 1457 of SEQ ID NO: 2616
augcuuucugcagagacuu

SEQ ID NO: 203119 - RNA, 19 nt, Artificial Sequence
  Description of Artificial Sequence: Synthetic oligonucleotide
  Antisense strand to SEQ ID NO: 203118
aagucucugcagaaagcau

SEQ ID NO: 203120 - RNA, 19 nt, Artificial Sequence
  Description of Artificial Sequence: Synthetic oligonucleotide
  Sense strand starting at position 1465 of SEQ ID NO: 2616
ugcagagacuucucaaucu

SEQ ID NO: 203121 - RNA, 19 nt, Artificial Sequence
  Description of Artificial Sequence: Synthetic oligonucleotide
  Antisense strand to SEQ ID NO: 203120
agauugagaagucucugca

SEQ ID NO: 203122 - RNA, 19 nt, Artificial Sequence
  Description of Artificial Sequence: Synthetic oligonucleotide
  Sense strand starting at position 1492 of SEQ ID NO: 2616
uaguuuggcgcgguguaaa

SEQ ID NO: 203123 - RNA, 19 nt, Artificial Sequence
  Description of Artificial Sequence: Synthetic oligonucleotide
  Antisense strand to SEQ ID NO: 203122
uuuacaccgcgccaaacua

SEQ ID NO: 203124 - RNA, 19 nt, Artificial Sequence
  Description of Artificial Sequence: Synthetic oligonucleotide
  Sense strand starting at position 1580 of SEQ ID NO: 2616
gcguucgugcguagagaga

SEQ ID NO: 203125 - RNA, 19 nt, Artificial Sequence
  Description of Artificial Sequence: Synthetic oligonucleotide
  Antisense strand to SEQ ID NO: 203124
ucucucuacgcacgaacgc

SEQ ID NO: 203126 - RNA, 19 nt, Artificial Sequence
  Description of Artificial Sequence: Synthetic oligonucleotide
  Sense strand starting at position 1612 of SEQ ID NO: 2616
agaggacccgucuguagaa

SEQ ID NO: 203127 - RNA, 19 nt, Artificial Sequence
  Description of Artificial Sequence: Synthetic oligonucleotide
  Antisense strand to SEQ ID NO: 203126
uucuacagacggguccucu

SEQ ID NO: 203128 - RNA, 19 nt, Artificial Sequence
  Description of Artificial Sequence: Synthetic oligonucleotide
  Sense strand starting at position 1613 of SEQ ID NO: 2616
gaggacccgucuguagaaa

SEQ ID NO: 203129 - RNA, 19 nt, Artificial Sequence
  Description of Artificial Sequence: Synthetic oligonucleotide
  Antisense strand to SEQ ID NO: 203128
uuucuacagacggguccuc

SEQ ID NO: 203130 - RNA, 19 nt, Artificial Sequence
  Description of Artificial Sequence: Synthetic oligonucleotide
  Sense strand starting at position 1720 of SEQ ID NO: 2616
cgacgugaguacuugggaa

SEQ ID NO: 203131 - RNA, 19 nt, Artificial Sequence
  Description of Artificial Sequence: Synthetic oligonucleotide
  Antisense strand to SEQ ID NO: 203130
uucccaaguacucacgucg

SEQ ID NO: 203132 - RNA, 19 nt, Artificial Sequence
  Description of Artificial Sequence: Synthetic oligonucleotide
  Sense strand starting at position 1722 of SEQ ID NO: 2616
acgugaguacuugggaaca

SEQ ID NO: 203133 - RNA, 19 nt, Artificial Sequence
  Description of Artificial Sequence: Synthetic oligonucleotide
  Antisense strand to SEQ ID NO: 203132
uguucccaaguacucacgu

SEQ ID NO: 203134 - RNA, 19 nt, Artificial Sequence
  Description of Artificial Sequence: Synthetic oligonucleotide
  Sense strand starting at position 2570 of SEQ ID NO: 2616
aucuuaagugcgagcggua

SEQ ID NO: 203135 - RNA, 19 nt, Artificial Sequence
  Description of Artificial Sequence: Synthetic oligonucleotide
  Antisense strand to SEQ ID NO: 203134
uaccgcucgcacuuaagau

SEQ ID NO: 203136 - RNA, 19 nt, Artificial Sequence
  Description of Artificial Sequence: Synthetic oligonucleotide
  Sense strand starting at position 2571 of SEQ ID NO: 2616
ucuuaagugcgagcgguaa

SEQ ID NO: 203137 - RNA, 19 nt, Artificial Sequence
  Description of Artificial Sequence: Synthetic oligonucleotide
  Antisense strand to SEQ ID NO: 203136
uuaccgcucgcacuuaaga

SEQ ID NO: 203138 - RNA, 19 nt, Artificial Sequence
  Description of Artificial Sequence: Synthetic oligonucleotide
  Sense strand starting at position 2984 of SEQ ID NO: 2616
ccagaaagcuccuuaaagc

SEQ ID NO: 203139 - RNA, 19 nt, Artificial Sequence
  Description of Artificial Sequence: Synthetic oligonucleotide
  Antisense strand to SEQ ID NO: 203138
gcuuuaaggagcuuucugg

SEQ ID NO: 203140 - RNA, 19 nt, Artificial Sequence
  Description of Artificial Sequence: Synthetic oligonucleotide
  Sense strand starting at position 3070 of SEQ ID NO: 2616
cuggaaguuccugaaaggu

SEQ ID NO: 203141 - RNA, 19 nt, Artificial Sequence
  Description of Artificial Sequence: Synthetic oligonucleotide
  Antisense strand to SEQ ID NO: 203140
accuuucaggaacuuccag

SEQ ID NO: 203142 - RNA, 19 nt, Artificial Sequence
  Description of Artificial Sequence: Synthetic oligonucleotide
  Sense strand starting at position 3078 of SEQ ID NO: 2616
uccugaaagguuuacguuu

SEQ ID NO: 203143 - RNA, 19 nt, Artificial Sequence
  Description of Artificial Sequence: Synthetic oligonucleotide
  Antisense strand to SEQ ID NO: 203142
aaacguaaaccuuucagga

SEQ ID NO: 203144 - RNA, 19 nt, Artificial Sequence
  Description of Artificial Sequence: Synthetic oligonucleotide
  Sense strand starting at position 3277 of SEQ ID NO: 2616
gugugugaccaaagugagu

SEQ ID NO: 203145 - RNA, 19 nt, Artificial Sequence
  Description of Artificial Sequence: Synthetic oligonucleotide
  Antisense strand to SEQ ID NO: 203144
acucacuuuggucacacac

SEQ ID NO: 203146 - RNA, 19 nt, Artificial Sequence
  Description of Artificial Sequence: Synthetic oligonucleotide
  Sense strand starting at position 3578 of SEQ ID NO: 2616
ugggauuacaggcagugau

SEQ ID NO: 203147 - RNA, 19 nt, Artificial Sequence
  Description of Artificial Sequence: Synthetic oligonucleotide
  Antisense strand to SEQ ID NO: 203146
aucacugccuguaauccca

SEQ ID NO: 203148 - RNA, 19 nt, Artificial Sequence
  Description of Artificial Sequence: Synthetic oligonucleotide
  Sense strand starting at position 116 of SEQ ID NO: 2618
agaaacaauccagggcuau

SEQ ID NO: 203149 - RNA, 19 nt, Artificial Sequence
  Description of Artificial Sequence: Synthetic oligonucleotide
  Antisense strand to SEQ ID NO: 203148
auagcccuggauuguuucu

SEQ ID NO: 203150 - RNA, 19 nt, Artificial Sequence
  Description of Artificial Sequence: Synthetic oligonucleotide
  Sense strand starting at position 150 of SEQ ID NO: 2618
gguagaggcugucaccauu

SEQ ID NO: 203151 - RNA, 19 nt, Artificial Sequence
  Description of Artificial Sequence: Synthetic oligonucleotide
  Antisense strand to SEQ ID NO: 203150
aauggugacagccucuacc

SEQ ID NO: 203152 - RNA, 19 nt, Artificial Sequence
  Description of Artificial Sequence: Synthetic oligonucleotide
  Sense strand starting at position 227 of SEQ ID NO: 2618
uuguguugccucuguggua

SEQ ID NO: 203153 - RNA, 19 nt, Artificial Sequence
  Description of Artificial Sequence: Synthetic oligonucleotide
  Antisense strand to SEQ ID NO: 203152
uaccacagaggcaacacaa

SEQ ID NO: 203154 - RNA, 19 nt, Artificial Sequence
  Description of Artificial Sequence: Synthetic oligonucleotide
  Sense strand starting at position 240 of SEQ ID NO: 2618
gugguagaaccuugauaua

SEQ ID NO: 203155 - RNA, 19 nt, Artificial Sequence
  Description of Artificial Sequence: Synthetic oligonucleotide
  Antisense strand to SEQ ID NO: 203154
uauaucaagguucuaccac

SEQ ID NO: 203156 - RNA, 19 nt, Artificial Sequence
  Description of Artificial Sequence: Synthetic oligonucleotide
  Sense strand starting at position 243 of SEQ ID NO: 2618
guagaaccuugauauaaag

SEQ ID NO: 203157 - RNA, 19 nt, Artificial Sequence
  Description of Artificial Sequence: Synthetic oligonucleotide
  Antisense strand to SEQ ID NO: 203156
cuuuauaucaagguucuac

SEQ ID NO: 203158 - RNA, 19 nt, Artificial Sequence
  Description of Artificial Sequence: Synthetic oligonucleotide
  Sense strand starting at position 336 of SEQ ID NO: 2618
gaggacaguuaauaccuua

SEQ ID NO: 203159 - RNA, 19 nt, Artificial Sequence
  Description of Artificial Sequence: Synthetic oligonucleotide
  Antisense strand to SEQ ID NO: 203158
uaagguauuaacuguccuc

SEQ ID NO: 203160 - RNA, 19 nt, Artificial Sequence
  Description of Artificial Sequence: Synthetic oligonucleotide
  Sense strand starting at position 538 of SEQ ID NO: 2618
cugaacuugcaggguaaga

SEQ ID NO: 203161 - RNA, 19 nt, Artificial Sequence
  Description of Artificial Sequence: Synthetic oligonucleotide
  Antisense strand to SEQ ID NO: 203160
ucuuacccugcaaguucag

SEQ ID NO: 203162 - RNA, 19 nt, Artificial Sequence
  Description of Artificial Sequence: Synthetic oligonucleotide
  Sense strand starting at position 561 of SEQ ID NO: 2618
guaccacaucuuggauaga

SEQ ID NO: 203163 - RNA, 19 nt, Artificial Sequence
  Description of Artificial Sequence: Synthetic oligonucleotide
  Antisense strand to SEQ ID NO: 203162
ucuauccaagaugugguac

SEQ ID NO: 203164 - RNA, 19 nt, Artificial Sequence
  Description of Artificial Sequence: Synthetic oligonucleotide
  Sense strand starting at position 763 of SEQ ID NO: 2618
ggucuaagggccgaagaaa

SEQ ID NO: 203165 - RNA, 19 nt, Artificial Sequence
  Description of Artificial Sequence: Synthetic oligonucleotide
  Antisense strand to SEQ ID NO: 203164
uuucuucggcccuuagacc

SEQ ID NO: 203166 - RNA, 19 nt, Artificial Sequence
  Description of Artificial Sequence: Synthetic oligonucleotide
  Sense strand starting at position 885 of SEQ ID NO: 2618
uggccucuuccucagggaa

SEQ ID NO: 203167 - RNA, 19 nt, Artificial Sequence
  Description of Artificial Sequence: Synthetic oligonucleotide
  Antisense strand to SEQ ID NO: 203166
uucccugaggaagaggcca

SEQ ID NO: 203168 - RNA, 19 nt, Artificial Sequence
  Description of Artificial Sequence: Synthetic oligonucleotide
  Sense strand starting at position 887 of SEQ ID NO: 2618
gccucuuccucagggaaua

SEQ ID NO: 203169 - RNA, 19 nt, Artificial Sequence
  Description of Artificial Sequence: Synthetic oligonucleotide
  Antisense strand to SEQ ID NO: 203168
uauucccugaggaagaggc

SEQ ID NO: 203170 - RNA, 19 nt, Artificial Sequence
  Description of Artificial Sequence: Synthetic oligonucleotide
  Sense strand starting at position 937 of SEQ ID NO: 2618
agcacagaaucucuugagu

SEQ ID NO: 203171 - RNA, 19 nt, Artificial Sequence
  Description of Artificial Sequence: Synthetic oligonucleotide
  Antisense strand to SEQ ID NO: 203170
acucaagagauucugugcu

SEQ ID NO: 203172 - RNA, 19 nt, Artificial Sequence
  Description of Artificial Sequence: Synthetic oligonucleotide
  Sense strand starting at position 939 of SEQ ID NO: 2618
cacagaaucucuugaguga

SEQ ID NO: 203173 - RNA, 19 nt, Artificial Sequence
  Description of Artificial Sequence: Synthetic oligonucleotide
  Antisense strand to SEQ ID NO: 203172
ucacucaagagauucugug

SEQ ID NO: 203174 - RNA, 19 nt, Artificial Sequence
  Description of Artificial Sequence: Synthetic oligonucleotide
  Sense strand starting at position 1262 of SEQ ID NO: 2618
uauguuguggucgaaaggu

SEQ ID NO: 203175 - RNA, 19 nt, Artificial Sequence
  Description of Artificial Sequence: Synthetic oligonucleotide
  Antisense strand to SEQ ID NO: 203174
accuuucgaccacaacaua

SEQ ID NO: 203176 - RNA, 19 nt, Artificial Sequence
  Description of Artificial Sequence: Synthetic oligonucleotide
  Sense strand starting at position 1264 of SEQ ID NO: 2618
uguuguggucgaaaggugu

SEQ ID NO: 203177 - RNA, 19 nt, Artificial Sequence
  Description of Artificial Sequence: Synthetic oligonucleotide
  Antisense strand to SEQ ID NO: 203176
acaccuuucgaccacaaca

SEQ ID NO: 203178 - RNA, 19 nt, Artificial Sequence
  Description of Artificial Sequence: Synthetic oligonucleotide
  Sense strand starting at position 1268 of SEQ ID NO: 2618
guggucgaaaggugucaca

SEQ ID NO: 203179 - RNA, 19 nt, Artificial Sequence
  Description of Artificial Sequence: Synthetic oligonucleotide
  Antisense strand to SEQ ID NO: 203178
ugugacaccuuucgaccac

SEQ ID NO: 203180 - RNA, 19 nt, Artificial Sequence
  Description of Artificial Sequence: Synthetic oligonucleotide
  Sense strand starting at position 1278 of SEQ ID NO: 2618
ggugucacaugguuggaaa

SEQ ID NO: 203181 - RNA, 19 nt, Artificial Sequence
  Description of Artificial Sequence: Synthetic oligonucleotide
  Antisense strand to SEQ ID NO: 203180
uuuccaaccaugugacacc

SEQ ID NO: 203182 - RNA, 19 nt, Artificial Sequence
  Description of Artificial Sequence: Synthetic oligonucleotide
  Sense strand starting at position 1279 of SEQ ID NO: 2618
gugucacaugguuggaaau

SEQ ID NO: 203183 - RNA, 19 nt, Artificial Sequence
  Description of Artificial Sequence: Synthetic oligonucleotide
  Antisense strand to SEQ ID NO: 203182
auuuccaaccaugugacac

SEQ ID NO: 203184 - RNA, 19 nt, Artificial Sequence
  Description of Artificial Sequence: Synthetic oligonucleotide
  Sense strand starting at position 1281 of SEQ ID NO: 2618
gucacaugguuggaaauga

SEQ ID NO: 203185 - RNA, 19 nt, Artificial Sequence
  Description of Artificial Sequence: Synthetic oligonucleotide
  Antisense strand to SEQ ID NO: 203184
ucauuuccaaccaugugac

SEQ ID NO: 203186 - RNA, 19 nt, Artificial Sequence
  Description of Artificial Sequence: Synthetic oligonucleotide
  Sense strand starting at position 1505 of SEQ ID NO: 2618
agacguggaucccgagaaa

SEQ ID NO: 203187 - RNA, 19 nt, Artificial Sequence
  Description of Artificial Sequence: Synthetic oligonucleotide
  Antisense strand to SEQ ID NO: 203186
uuucucgggauccacgucu

SEQ ID NO: 203188 - RNA, 19 nt, Artificial Sequence
  Description of Artificial Sequence: Synthetic oligonucleotide
  Sense strand starting at position 2680 of SEQ ID NO: 2618
gucagagccuccucuuauc

SEQ ID NO: 203189 - RNA, 19 nt, Artificial Sequence
  Description of Artificial Sequence: Synthetic oligonucleotide
  Antisense strand to SEQ ID NO: 203188
gauaagaggaggcucugac

SEQ ID NO: 203190 - RNA, 19 nt, Artificial Sequence
  Description of Artificial Sequence: Synthetic oligonucleotide
  Sense strand starting at position 2959 of SEQ ID NO: 2618
ugcuuauuugcucgcaucu

SEQ ID NO: 203191 - RNA, 19 nt, Artificial Sequence
  Description of Artificial Sequence: Synthetic oligonucleotide
  Antisense strand to SEQ ID NO: 203190
agaugcgagcaaauaagca

SEQ ID NO: 203192 - RNA, 19 nt, Artificial Sequence
  Description of Artificial Sequence: Synthetic oligonucleotide
  Sense strand starting at position 3278 of SEQ ID NO: 2618
acugauauaugguggauga

SEQ ID NO: 203193 - RNA, 19 nt, Artificial Sequence
  Description of Artificial Sequence: Synthetic oligonucleotide
  Antisense strand to SEQ ID NO: 203192
ucauccaccauauaucagu

SEQ ID NO: 203194 - RNA, 19 nt, Artificial Sequence
  Description of Artificial Sequence: Synthetic oligonucleotide
  Sense strand starting at position 3279 of SEQ ID NO: 2618
cugauauaugguggaugag

SEQ ID NO: 203195 - RNA, 19 nt, Artificial Sequence
  Description of Artificial Sequence: Synthetic oligonucleotide
  Antisense strand to SEQ ID NO: 203194
cucauccaccauauaucag

SEQ ID NO: 203196 - RNA, 19 nt, Artificial Sequence
  Description of Artificial Sequence: Synthetic oligonucleotide
  Sense strand starting at position 3288 of SEQ ID NO: 2618
gguggaugagccuauauag

SEQ ID NO: 203197 - RNA, 19 nt, Artificial Sequence
  Description of Artificial Sequence: Synthetic oligonucleotide
  Antisense strand to SEQ ID NO: 203196
cuauauaggcucauccacc

SEQ ID NO: 203198 - RNA, 19 nt, Artificial Sequence
  Description of Artificial Sequence: Synthetic oligonucleotide
  Sense strand starting at position 3433 of SEQ ID NO: 2618
guccuacaguuuggaaacu

SEQ ID NO: 203199 - RNA, 19 nt, Artificial Sequence
  Description of Artificial Sequence: Synthetic oligonucleotide
  Antisense strand to SEQ ID NO: 203198
aguuuccaaacuguaggac

SEQ ID NO: 203200 - RNA, 19 nt, Artificial Sequence
  Description of Artificial Sequence: Synthetic oligonucleotide
  Sense strand starting at position 3462 of SEQ ID NO: 2618
ccugguuaaccuggugagu

SEQ ID NO: 203201 - RNA, 19 nt, Artificial Sequence
  Description of Artificial Sequence: Synthetic oligonucleotide
  Antisense strand to SEQ ID NO: 203200
acucaccagguuaaccagg

SEQ ID NO: 203202 - RNA, 19 nt, Artificial Sequence
  Description of Artificial Sequence: Synthetic oligonucleotide
  Sense strand starting at position 3464 of SEQ ID NO: 2618
ugguuaaccuggugaguga

SEQ ID NO: 203203 - RNA, 19 nt, Artificial Sequence
  Description of Artificial Sequence: Synthetic oligonucleotide
  Antisense strand to SEQ ID NO: 203202
ucacucaccagguuaacca

SEQ ID NO: 203204 - RNA, 19 nt, Artificial Sequence
  Description of Artificial Sequence: Synthetic oligonucleotide
  Sense strand starting at position 3473 of SEQ ID NO: 2618
uggugagugagacauccuu

SEQ ID NO: 203205 - RNA, 19 nt, Artificial Sequence
  Description of Artificial Sequence: Synthetic oligonucleotide
  Antisense strand to SEQ ID NO: 203204
aaggaugucucacucacca

SEQ ID NO: 203206 - RNA, 19 nt, Artificial Sequence
  Description of Artificial Sequence: Synthetic oligonucleotide
  Sense strand starting at position 3547 of SEQ ID NO: 2618
caaggauguuuggucaagu

SEQ ID NO: 203207 - RNA, 19 nt, Artificial Sequence
  Description of Artificial Sequence: Synthetic oligonucleotide
  Antisense strand to SEQ ID NO: 203206
acuugaccaaacauccuug

SEQ ID NO: 203208 - RNA, 19 nt, Artificial Sequence
  Description of Artificial Sequence: Synthetic oligonucleotide
  Sense strand starting at position 3548 of SEQ ID NO: 2618
aaggauguuuggucaaguu

SEQ ID NO: 203209 - RNA, 19 nt, Artificial Sequence
  Description of Artificial Sequence: Synthetic oligonucleotide
  Antisense strand to SEQ ID NO: 203208
aacuugaccaaacauccuu

SEQ ID NO: 203210 - RNA, 19 nt, Artificial Sequence
  Description of Artificial Sequence: Synthetic oligonucleotide
  Sense strand starting at position 3560 of SEQ ID NO: 2618
ucaaguuucugagcaguuc

SEQ ID NO: 203211 - RNA, 19 nt, Artificial Sequence
  Description of Artificial Sequence: Synthetic oligonucleotide
  Antisense strand to SEQ ID NO: 203210
gaacugcucagaaacuuga

SEQ ID NO: 203212 - RNA, 19 nt, Artificial Sequence
  Description of Artificial Sequence: Synthetic oligonucleotide
  Sense strand starting at position 3571 of SEQ ID NO: 2618
agcaguucuuuguuggcua

SEQ ID NO: 203213 - RNA, 19 nt, Artificial Sequence
  Description of Artificial Sequence: Synthetic oligonucleotide
  Antisense strand to SEQ ID NO: 203212
uagccaacaaagaacugcu

SEQ ID NO: 203214 - RNA, 19 nt, Artificial Sequence
  Description of Artificial Sequence: Synthetic oligonucleotide
  Sense strand starting at position 3685 of SEQ ID NO: 2618
gcuguaucccugcaggaug

SEQ ID NO: 203215 - RNA, 19 nt, Artificial Sequence
  Description of Artificial Sequence: Synthetic oligonucleotide
  Antisense strand to SEQ ID NO: 203214
cauccugcagggauacagc

SEQ ID NO: 203216 - RNA, 19 nt, Artificial Sequence
  Description of Artificial Sequence: Synthetic oligonucleotide
  Sense strand starting at position 3823 of SEQ ID NO: 2618
ggaaacggguuccuuuaau

SEQ ID NO: 203217 - RNA, 19 nt, Artificial Sequence
  Description of Artificial Sequence: Synthetic oligonucleotide
  Antisense strand to SEQ ID NO: 203216
auuaaaggaacccguuucc

SEQ ID NO: 203218 - RNA, 19 nt, Artificial Sequence
  Description of Artificial Sequence: Synthetic oligonucleotide
  Sense strand starting at position 3832 of SEQ ID NO: 2618
uuccuuuaaugugguggaa

SEQ ID NO: 203219 - RNA, 19 nt, Artificial Sequence
  Description of Artificial Sequence: Synthetic oligonucleotide
  Antisense strand to SEQ ID NO: 203218
uuccaccacauuaaaggaa

SEQ ID NO: 203220 - RNA, 19 nt, Artificial Sequence
  Description of Artificial Sequence: Synthetic oligonucleotide
  Sense strand starting at position 3834 of SEQ ID NO: 2618
ccuuuaaugugguggaaau

SEQ ID NO: 203221 - RNA, 19 nt, Artificial Sequence
  Description of Artificial Sequence: Synthetic oligonucleotide
  Antisense strand to SEQ ID NO: 203220
auuuccaccacauuaaagg

SEQ ID NO: 203222 - RNA, 19 nt, Artificial Sequence
  Description of Artificial Sequence: Synthetic oligonucleotide
  Sense strand starting at position 3835 of SEQ ID NO: 2618
cuuuaaugugguggaaaua

SEQ ID NO: 203223 - RNA, 19 nt, Artificial Sequence
  Description of Artificial Sequence: Synthetic oligonucleotide
  Antisense strand to SEQ ID NO: 203222
uauuuccaccacauuaaag

SEQ ID NO: 203224 - RNA, 19 nt, Artificial Sequence
  Description of Artificial Sequence: Synthetic oligonucleotide
  Sense strand starting at position 3886 of SEQ ID NO: 2618
guggucuacugggagaaga

SEQ ID NO: 203225 - RNA, 19 nt, Artificial Sequence
  Description of Artificial Sequence: Synthetic oligonucleotide
  Antisense strand to SEQ ID NO: 203224
ucuucucccaguagaccac

SEQ ID NO: 203226 - RNA, 19 nt, Artificial Sequence
  Description of Artificial Sequence: Synthetic oligonucleotide
  Sense strand starting at position 3955 of SEQ ID NO: 2618
acagauuccuccuccggaa

SEQ ID NO: 203227 - RNA, 19 nt, Artificial Sequence
  Description of Artificial Sequence: Synthetic oligonucleotide
  Antisense strand to SEQ ID NO: 203226
uuccggaggaggaaucugu

SEQ ID NO: 203228 - RNA, 19 nt, Artificial Sequence
  Description of Artificial Sequence: Synthetic oligonucleotide
  Sense strand starting at position 214 of SEQ ID NO: 2619
ggaagugccauagauccuu

SEQ ID NO: 203229 - RNA, 19 nt, Artificial Sequence
  Description of Artificial Sequence: Synthetic oligonucleotide
  Antisense strand to SEQ ID NO: 203228
aaggaucuauggcacuucc

SEQ ID NO: 203230 - RNA, 19 nt, Artificial Sequence
  Description of Artificial Sequence: Synthetic oligonucleotide
  Sense strand starting at position 595 of SEQ ID NO: 2619
ugucuugaacuuggagaau

SEQ ID NO: 203231 - RNA, 19 nt, Artificial Sequence
  Description of Artificial Sequence: Synthetic oligonucleotide
  Antisense strand to SEQ ID NO: 203230
auucuccaaguucaagaca

SEQ ID NO: 203232 - RNA, 19 nt, Artificial Sequence
  Description of Artificial Sequence: Synthetic oligonucleotide
  Sense strand starting at position 616 of SEQ ID NO: 2619
uuaugaguauaaucucaug

SEQ ID NO: 203233 - RNA, 19 nt, Artificial Sequence
  Description of Artificial Sequence: Synthetic oligonucleotide
  Antisense strand to SEQ ID NO: 203232
caugagauuauacucauaa

SEQ ID NO: 203234 - RNA, 19 nt, Artificial Sequence
  Description of Artificial Sequence: Synthetic oligonucleotide
  Sense strand starting at position 642 of SEQ ID NO: 2619
gucuguguccacccguuua

SEQ ID NO: 203235 - RNA, 19 nt, Artificial Sequence
  Description of Artificial Sequence: Synthetic oligonucleotide
  Antisense strand to SEQ ID NO: 203234
uaaacggguggacacagac

SEQ ID NO: 203236 - RNA, 19 nt, Artificial Sequence
  Description of Artificial Sequence: Synthetic oligonucleotide
  Sense strand starting at position 803 of SEQ ID NO: 2619
aucuccaaaggcugugaaa

SEQ ID NO: 203237 - RNA, 19 nt, Artificial Sequence
  Description of Artificial Sequence: Synthetic oligonucleotide
  Antisense strand to SEQ ID NO: 203236
uuucacagccuuuggagau

SEQ ID NO: 203238 - RNA, 19 nt, Artificial Sequence
  Description of Artificial Sequence: Synthetic oligonucleotide
  Sense strand starting at position 930 of SEQ ID NO: 2619
agggaauuggcucagagcu

SEQ ID NO: 203239 - RNA, 19 nt, Artificial Sequence
  Description of Artificial Sequence: Synthetic oligonucleotide
  Antisense strand to SEQ ID NO: 203238
agcucugagccaauucccu

SEQ ID NO: 203240 - RNA, 19 nt, Artificial Sequence
  Description of Artificial Sequence: Synthetic oligonucleotide
  Sense strand starting at position 985 of SEQ ID NO: 2619
cugauucugcuuggcauuu

SEQ ID NO: 203241 - RNA, 19 nt, Artificial Sequence
  Description of Artificial Sequence: Synthetic oligonucleotide
  Antisense strand to SEQ ID NO: 203240
aaaugccaagcagaaucag

SEQ ID NO: 203242 - RNA, 19 nt, Artificial Sequence
  Description of Artificial Sequence: Synthetic oligonucleotide
  Sense strand starting at position 1041 of SEQ ID NO: 2619
aggaaacuguaguuuagaa

SEQ ID NO: 203243 - RNA, 19 nt, Artificial Sequence
  Description of Artificial Sequence: Synthetic oligonucleotide
  Antisense strand to SEQ ID NO: 203242
uucuaaacuacaguuuccu

SEQ ID NO: 203244 - RNA, 19 nt, Artificial Sequence
  Description of Artificial Sequence: Synthetic oligonucleotide
  Sense strand starting at position 1049 of SEQ ID NO: 2619
guaguuuagaaagguuaag

SEQ ID NO: 203245 - RNA, 19 nt, Artificial Sequence
  Description of Artificial Sequence: Synthetic oligonucleotide
  Antisense strand to SEQ ID NO: 203244
cuuaaccuuucuaaacuac

SEQ ID NO: 203246 - RNA, 19 nt, Artificial Sequence
  Description of Artificial Sequence: Synthetic oligonucleotide
  Sense strand starting at position 1100 of SEQ ID NO: 2619
gaaagauaggagugucauc

SEQ ID NO: 203247 - RNA, 19 nt, Artificial Sequence
  Description of Artificial Sequence: Synthetic oligonucleotide
  Antisense strand to SEQ ID NO: 203246
gaugacacuccuaucuuuc

SEQ ID NO: 203248 - RNA, 19 nt, Artificial Sequence
  Description of Artificial Sequence: Synthetic oligonucleotide
  Sense strand starting at position 1107 of SEQ ID NO: 2619
aggagugucauccagguga

SEQ ID NO: 203249 - RNA, 19 nt, Artificial Sequence
  Description of Artificial Sequence: Synthetic oligonucleotide
  Antisense strand to SEQ ID NO: 203248
ucaccuggaugacacuccu

SEQ ID NO: 203250 - RNA, 19 nt, Artificial Sequence
  Description of Artificial Sequence: Synthetic oligonucleotide
  Sense strand starting at position 1197 of SEQ ID NO: 2619
augugccauuuaguguaua

SEQ ID NO: 203251 - RNA, 19 nt, Artificial Sequence
  Description of Artificial Sequence: Synthetic oligonucleotide
  Antisense strand to SEQ ID NO: 203250
uauacacuaaauggcacau

SEQ ID NO: 203252 - RNA, 19 nt, Artificial Sequence
  Description of Artificial Sequence: Synthetic oligonucleotide
  Sense strand starting at position 1350 of SEQ ID NO: 2619
guaagaaaugauugaagca

SEQ ID NO: 203253 - RNA, 19 nt, Artificial Sequence
  Description of Artificial Sequence: Synthetic oligonucleotide
  Antisense strand to SEQ ID NO: 203252
ugcuucaaucauuucuuac

SEQ ID NO: 203254 - RNA, 19 nt, Artificial Sequence
  Description of Artificial Sequence: Synthetic oligonucleotide
  Sense strand starting at position 1378 of SEQ ID NO: 2619
gugggaugaguuuacuuca

SEQ ID NO: 203255 - RNA, 19 nt, Artificial Sequence
  Description of Artificial Sequence: Synthetic oligonucleotide
  Antisense strand to SEQ ID NO: 203254
ugaaguaaacucaucccac

SEQ ID NO: 203256 - RNA, 19 nt, Artificial Sequence
  Description of Artificial Sequence: Synthetic oligonucleotide
  Sense strand starting at position 1420 of SEQ ID NO: 2619
uagugauggccuuggagaa

SEQ ID NO: 203257 - RNA, 19 nt, Artificial Sequence
  Description of Artificial Sequence: Synthetic oligonucleotide
  Antisense strand to SEQ ID NO: 203256
uucuccaaggccaucacua

SEQ ID NO: 203258 - RNA, 19 nt, Artificial Sequence
  Description of Artificial Sequence: Synthetic oligonucleotide
  Sense strand starting at position 1421 of SEQ ID NO: 2619
agugauggccuuggagaaa

SEQ ID NO: 203259 - RNA, 19 nt, Artificial Sequence
  Description of Artificial Sequence: Synthetic oligonucleotide
  Antisense strand to SEQ ID NO: 203258
uuucuccaaggccaucacu

SEQ ID NO: 203260 - RNA, 19 nt, Artificial Sequence
  Description of Artificial Sequence: Synthetic oligonucleotide
  Sense strand starting at position 1456 of SEQ ID NO: 2619
auugucuuaggucaucuaa

SEQ ID NO: 203261 - RNA, 19 nt, Artificial Sequence
  Description of Artificial Sequence: Synthetic oligonucleotide
  Antisense strand to SEQ ID NO: 203260
uuagaugaccuaagacaau

SEQ ID NO: 203262 - RNA, 19 nt, Artificial Sequence
  Description of Artificial Sequence: Synthetic oligonucleotide
  Sense strand starting at position 1535 of SEQ ID NO: 2619
agacacuuguaaguaugaa

SEQ ID NO: 203263 - RNA, 19 nt, Artificial Sequence
  Description of Artificial Sequence: Synthetic oligonucleotide
  Antisense strand to SEQ ID NO: 203262
uucauacuuacaagugucu

SEQ ID NO: 203264 - RNA, 19 nt, Artificial Sequence
  Description of Artificial Sequence: Synthetic oligonucleotide
  Sense strand starting at position 2134 of SEQ ID NO: 2619
uggguaggcguugaauaga

SEQ ID NO: 203265 - RNA, 19 nt, Artificial Sequence
  Description of Artificial Sequence: Synthetic oligonucleotide
  Antisense strand to SEQ ID NO: 203264
ucuauucaacgccuaccca

SEQ ID NO: 203266 - RNA, 19 nt, Artificial Sequence
  Description of Artificial Sequence: Synthetic oligonucleotide
  Sense strand starting at position 2252 of SEQ ID NO: 2619
guaucaaugagccagcaga

SEQ ID NO: 203267 - RNA, 19 nt, Artificial Sequence
  Description of Artificial Sequence: Synthetic oligonucleotide
  Antisense strand to SEQ ID NO: 203266
ucugcuggcucauugauac

SEQ ID NO: 203268 - RNA, 19 nt, Artificial Sequence
  Description of Artificial Sequence: Synthetic oligonucleotide
  Sense strand starting at position 2351 of SEQ ID NO: 2619
ucaggucuaguugaugauu

SEQ ID NO: 203269 - RNA, 19 nt, Artificial Sequence
  Description of Artificial Sequence: Synthetic oligonucleotide
  Antisense strand to SEQ ID NO: 203268
aaucaucaacuagaccuga

SEQ ID NO: 203270 - RNA, 19 nt, Artificial Sequence
  Description of Artificial Sequence: Synthetic oligonucleotide
  Sense strand starting at position 2759 of SEQ ID NO: 2619
ggcugaaucugauccagac

SEQ ID NO: 203271 - RNA, 19 nt, Artificial Sequence
  Description of Artificial Sequence: Synthetic oligonucleotide
  Antisense strand to SEQ ID NO: 203270
gucuggaucagauucagcc

SEQ ID NO: 203272 - RNA, 19 nt, Artificial Sequence
  Description of Artificial Sequence: Synthetic oligonucleotide
  Sense strand starting at position 2774 of SEQ ID NO: 2619
agaccuguuuguuuaaaua

SEQ ID NO: 203273 - RNA, 19 nt, Artificial Sequence
  Description of Artificial Sequence: Synthetic oligonucleotide
  Antisense strand to SEQ ID NO: 203272
uauuuaaacaaacaggucu

SEQ ID NO: 203274 - RNA, 19 nt, Artificial Sequence
  Description of Artificial Sequence: Synthetic oligonucleotide
  Sense strand starting at position 2829 of SEQ ID NO: 2619
ucagauucuugggucucaa

SEQ ID NO: 203275 - RNA, 19 nt, Artificial Sequence
  Description of Artificial Sequence: Synthetic oligonucleotide
  Antisense strand to SEQ ID NO: 203274
uugagacccaagaaucuga

SEQ ID NO: 203276 - RNA, 19 nt, Artificial Sequence
  Description of Artificial Sequence: Synthetic oligonucleotide
  Sense strand starting at position 2848 of SEQ ID NO: 2619
gcuauauauguauacaaag

SEQ ID NO: 203277 - RNA, 19 nt, Artificial Sequence
  Description of Artificial Sequence: Synthetic oligonucleotide
  Antisense strand to SEQ ID NO: 203276
cuuuguauacauauauagc

SEQ ID NO: 203278 - RNA, 19 nt, Artificial Sequence
  Description of Artificial Sequence: Synthetic oligonucleotide
  Sense strand starting at position 2937 of SEQ ID NO: 2619
aaugcugagugacugaaau

SEQ ID NO: 203279 - RNA, 19 nt, Artificial Sequence
  Description of Artificial Sequence: Synthetic oligonucleotide
  Antisense strand to SEQ ID NO: 203278
auuucagucacucagcauu

SEQ ID NO: 203280 - RNA, 19 nt, Artificial Sequence
  Description of Artificial Sequence: Synthetic oligonucleotide
  Sense strand starting at position 2939 of SEQ ID NO: 2619
ugcugagugacugaaaugu

SEQ ID NO: 203281 - RNA, 19 nt, Artificial Sequence
  Description of Artificial Sequence: Synthetic oligonucleotide
  Antisense strand to SEQ ID NO: 203280
acauuucagucacucagca

SEQ ID NO: 203282 - RNA, 19 nt, Artificial Sequence
  Description of Artificial Sequence: Synthetic oligonucleotide
  Sense strand starting at position 2943 of SEQ ID NO: 2619
gagugacugaaaugugaug

SEQ ID NO: 203283 - RNA, 19 nt, Artificial Sequence
  Description of Artificial Sequence: Synthetic oligonucleotide
  Antisense strand to SEQ ID NO: 203282
caucacauuucagucacuc

SEQ ID NO: 203284 - RNA, 19 nt, Artificial Sequence
  Description of Artificial Sequence: Synthetic oligonucleotide
  Sense strand starting at position 2996 of SEQ ID NO: 2619
auuuguuugggaugguguu

SEQ ID NO: 203285 - RNA, 19 nt, Artificial Sequence
  Description of Artificial Sequence: Synthetic oligonucleotide
  Antisense strand to SEQ ID NO: 203284
aacaccaucccaaacaaau

SEQ ID NO: 203286 - RNA, 19 nt, Artificial Sequence
  Description of Artificial Sequence: Synthetic oligonucleotide
  Sense strand starting at position 3071 of SEQ ID NO: 2619
gauccauuugcugguucca

SEQ ID NO: 203287 - RNA, 19 nt, Artificial Sequence
  Description of Artificial Sequence: Synthetic oligonucleotide
  Antisense strand to SEQ ID NO: 203286
uggaaccagcaaauggauc

SEQ ID NO: 203288 - RNA, 19 nt, Artificial Sequence
  Description of Artificial Sequence: Synthetic oligonucleotide
  Sense strand starting at position 3132 of SEQ ID NO: 2619
gugugauggguaaguguau

SEQ ID NO: 203289 - RNA, 19 nt, Artificial Sequence
  Description of Artificial Sequence: Synthetic oligonucleotide
  Antisense strand to SEQ ID NO: 203288
auacacuuacccaucacac

SEQ ID NO: 203290 - RNA, 19 nt, Artificial Sequence
  Description of Artificial Sequence: Synthetic oligonucleotide
  Sense strand starting at position 3156 of SEQ ID NO: 2619
ggguuuagagacugacuca

SEQ ID NO: 203291 - RNA, 19 nt, Artificial Sequence
  Description of Artificial Sequence: Synthetic oligonucleotide
  Antisense strand to SEQ ID NO: 203290
ugagucagucucuaaaccc

SEQ ID NO: 203292 - RNA, 19 nt, Artificial Sequence
  Description of Artificial Sequence: Synthetic oligonucleotide
  Sense strand starting at position 3168 of SEQ ID NO: 2619
ugacucagccacugaugau

SEQ ID NO: 203293 - RNA, 19 nt, Artificial Sequence
  Description of Artificial Sequence: Synthetic oligonucleotide
  Antisense strand to SEQ ID NO: 203292
aucaucaguggcugaguca

SEQ ID NO: 203294 - RNA, 19 nt, Artificial Sequence
  Description of Artificial Sequence: Synthetic oligonucleotide
  Sense strand starting at position 3230 of SEQ ID NO: 2619
accugaauccuagaguugu

SEQ ID NO: 203295 - RNA, 19 nt, Artificial Sequence
  Description of Artificial Sequence: Synthetic oligonucleotide
  Antisense strand to SEQ ID NO: 203294
acaacucuaggauucaggu

SEQ ID NO: 203296 - RNA, 19 nt, Artificial Sequence
  Description of Artificial Sequence: Synthetic oligonucleotide
  Sense strand starting at position 3236 of SEQ ID NO: 2619
auccuagaguugucaugag

SEQ ID NO: 203297 - RNA, 19 nt, Artificial Sequence
  Description of Artificial Sequence: Synthetic oligonucleotide
  Antisense strand to SEQ ID NO: 203296
cucaugacaacucuaggau

SEQ ID NO: 203298 - RNA, 19 nt, Artificial Sequence
  Description of Artificial Sequence: Synthetic oligonucleotide
  Sense strand starting at position 3240 of SEQ ID NO: 2619
uagaguugucaugagguuc

SEQ ID NO: 203299 - RNA, 19 nt, Artificial Sequence
  Description of Artificial Sequence: Synthetic oligonucleotide
  Antisense strand to SEQ ID NO: 203298
gaaccucaugacaacucua

SEQ ID NO: 203300 - RNA, 19 nt, Artificial Sequence
  Description of Artificial Sequence: Synthetic oligonucleotide
  Sense strand starting at position 3272 of SEQ ID NO: 2619
cauagaaagugcuuaggau

SEQ ID NO: 203301 - RNA, 19 nt, Artificial Sequence
  Description of Artificial Sequence: Synthetic oligonucleotide
  Antisense strand to SEQ ID NO: 203300
auccuaagcacuuucuaug

SEQ ID NO: 203302 - RNA, 19 nt, Artificial Sequence
  Description of Artificial Sequence: Synthetic oligonucleotide
  Sense strand starting at position 3477 of SEQ ID NO: 2619
caaugucauccugggauua

SEQ ID NO: 203303 - RNA, 19 nt, Artificial Sequence
  Description of Artificial Sequence: Synthetic oligonucleotide
  Antisense strand to SEQ ID NO: 203302
uaaucccaggaugacauug

SEQ ID NO: 203304 - RNA, 19 nt, Artificial Sequence
  Description of Artificial Sequence: Synthetic oligonucleotide
  Sense strand starting at position 3478 of SEQ ID NO: 2619
aaugucauccugggauuag

SEQ ID NO: 203305 - RNA, 19 nt, Artificial Sequence
  Description of Artificial Sequence: Synthetic oligonucleotide
  Antisense strand to SEQ ID NO: 203304
cuaaucccaggaugacauu

SEQ ID NO: 203306 - RNA, 19 nt, Artificial Sequence
  Description of Artificial Sequence: Synthetic oligonucleotide
  Sense strand starting at position 3747 of SEQ ID NO: 2619
uaauaaugggaguguacca

SEQ ID NO: 203307 - RNA, 19 nt, Artificial Sequence
  Description of Artificial Sequence: Synthetic oligonucleotide
  Antisense strand to SEQ ID NO: 203306
ugguacacucccauuauua

SEQ ID NO: 203308 - RNA, 19 nt, Artificial Sequence
  Description of Artificial Sequence: Synthetic oligonucleotide
  Sense strand starting at position 141 of SEQ ID NO: 2620
ucacuucuguguucuuaaa

SEQ ID NO: 203309 - RNA, 19 nt, Artificial Sequence
  Description of Artificial Sequence: Synthetic oligonucleotide
  Antisense strand to SEQ ID NO: 203308
uuuaagaacacagaaguga

SEQ ID NO: 203310 - RNA, 19 nt, Artificial Sequence
  Description of Artificial Sequence: Synthetic oligonucleotide
  Sense strand starting at position 178 of SEQ ID NO: 2620
gcgcaugggcuccgaguaa

SEQ ID NO: 203311 - RNA, 19 nt, Artificial Sequence
  Description of Artificial Sequence: Synthetic oligonucleotide
  Antisense strand to SEQ ID NO: 203310
uuacucggagcccaugcgc

SEQ ID NO: 203312 - RNA, 19 nt, Artificial Sequence
  Description of Artificial Sequence: Synthetic oligonucleotide
  Sense strand starting at position 324 of SEQ ID NO: 2620
ccgcaugggugcgacuaua

SEQ ID NO: 203313 - RNA, 19 nt, Artificial Sequence
  Description of Artificial Sequence: Synthetic oligonucleotide
  Antisense strand to SEQ ID NO: 203312
uauagucgcacccaugcgg

SEQ ID NO: 203314 - RNA, 19 nt, Artificial Sequence
  Description of Artificial Sequence: Synthetic oligonucleotide
  Sense strand starting at position 499 of SEQ ID NO: 2620
uggcuucgcuaucggauau

SEQ ID NO: 203315 - RNA, 19 nt, Artificial Sequence
  Description of Artificial Sequence: Synthetic oligonucleotide
  Antisense strand to SEQ ID NO: 203314
auauccgauagcgaagcca

SEQ ID NO: 203316 - RNA, 19 nt, Artificial Sequence
  Description of Artificial Sequence: Synthetic oligonucleotide
  Sense strand starting at position 500 of SEQ ID NO: 2620
ggcuucgcuaucggauauu

SEQ ID NO: 203317 - RNA, 19 nt, Artificial Sequence
  Description of Artificial Sequence: Synthetic oligonucleotide
  Antisense strand to SEQ ID NO: 203316
aauauccgauagcgaagcc

SEQ ID NO: 203318 - RNA, 19 nt, Artificial Sequence
  Description of Artificial Sequence: Synthetic oligonucleotide
  Sense strand starting at position 511 of SEQ ID NO: 2620
cggauauuacgguaggguu

SEQ ID NO: 203319 - RNA, 19 nt, Artificial Sequence
  Description of Artificial Sequence: Synthetic oligonucleotide
  Antisense strand to SEQ ID NO: 203318
aacccuaccguaauauccg

SEQ ID NO: 203320 - RNA, 19 nt, Artificial Sequence
  Description of Artificial Sequence: Synthetic oligonucleotide
  Sense strand starting at position 573 of SEQ ID NO: 2620
caaucuuucugagaaguug

SEQ ID NO: 203321 - RNA, 19 nt, Artificial Sequence
  Description of Artificial Sequence: Synthetic oligonucleotide
  Antisense strand to SEQ ID NO: 203320
caacuucucagaaagauug

SEQ ID NO: 203322 - RNA, 19 nt, Artificial Sequence
  Description of Artificial Sequence: Synthetic oligonucleotide
  Sense strand starting at position 694 of SEQ ID NO: 2620
gccaacccagguuauaaau

SEQ ID NO: 203323 - RNA, 19 nt, Artificial Sequence
  Description of Artificial Sequence: Synthetic oligonucleotide
  Antisense strand to SEQ ID NO: 203322
auuuauaaccuggguuggc

SEQ ID NO: 203324 - RNA, 19 nt, Artificial Sequence
  Description of Artificial Sequence: Synthetic oligonucleotide
  Sense strand starting at position 731 of SEQ ID NO: 2620
gagcuuugacgcugugaca

SEQ ID NO: 203325 - RNA, 19 nt, Artificial Sequence
  Description of Artificial Sequence: Synthetic oligonucleotide
  Antisense strand to SEQ ID NO: 203324
ugucacagcgucaaagcuc

SEQ ID NO: 203326 - RNA, 19 nt, Artificial Sequence
  Description of Artificial Sequence: Synthetic oligonucleotide
  Sense strand starting at position 828 of SEQ ID NO: 2620
aauaccguggccuggaaau

SEQ ID NO: 203327 - RNA, 19 nt, Artificial Sequence
  Description of Artificial Sequence: Synthetic oligonucleotide
  Antisense strand to SEQ ID NO: 203326
auuuccaggccacgguauu

SEQ ID NO: 203328 - RNA, 19 nt, Artificial Sequence
  Description of Artificial Sequence: Synthetic oligonucleotide
  Sense strand starting at position 830 of SEQ ID NO: 2620
uaccguggccuggaaauua

SEQ ID NO: 203329 - RNA, 19 nt, Artificial Sequence
  Description of Artificial Sequence: Synthetic oligonucleotide
  Antisense strand to SEQ ID NO: 203328
uaauuuccaggccacggua

SEQ ID NO: 203330 - RNA, 19 nt, Artificial Sequence
  Description of Artificial Sequence: Synthetic oligonucleotide
  Sense strand starting at position 841 of SEQ ID NO: 2620
ggaaauuaaccgggugacu

SEQ ID NO: 203331 - RNA, 19 nt, Artificial Sequence
  Description of Artificial Sequence: Synthetic oligonucleotide
  Antisense strand to SEQ ID NO: 203330
agucacccgguuaauuucc

SEQ ID NO: 203332 - RNA, 19 nt, Artificial Sequence
  Description of Artificial Sequence: Synthetic oligonucleotide
  Sense strand starting at position 859 of SEQ ID NO: 2620
ucgguuuauugccuccaga

SEQ ID NO: 203333 - RNA, 19 nt, Artificial Sequence
  Description of Artificial Sequence: Synthetic oligonucleotide
  Antisense strand to SEQ ID NO: 203332
ucuggaggcaauaaaccga

SEQ ID NO: 203334 - RNA, 19 nt, Artificial Sequence
  Description of Artificial Sequence: Synthetic oligonucleotide
  Sense strand starting at position 1044 of SEQ ID NO: 2620
gggcuagcagccugguuaa

SEQ ID NO: 203335 - RNA, 19 nt, Artificial Sequence
  Description of Artificial Sequence: Synthetic oligonucleotide
  Antisense strand to SEQ ID NO: 203334
uuaaccaggcugcuagccc

SEQ ID NO: 203336 - RNA, 19 nt, Artificial Sequence
  Description of Artificial Sequence: Synthetic oligonucleotide
  Sense strand starting at position 1070 of SEQ ID NO: 2620
acgcaaacaguguggaaua

SEQ ID NO: 203337 - RNA, 19 nt, Artificial Sequence
  Description of Artificial Sequence: Synthetic oligonucleotide
  Antisense strand to SEQ ID NO: 203336
uauuccacacuguuugcgu

SEQ ID NO: 203338 - RNA, 19 nt, Artificial Sequence
  Description of Artificial Sequence: Synthetic oligonucleotide
  Sense strand starting at position 1071 of SEQ ID NO: 2620
cgcaaacaguguggaauau

SEQ ID NO: 203339 - RNA, 19 nt, Artificial Sequence
  Description of Artificial Sequence: Synthetic oligonucleotide
  Antisense strand to SEQ ID NO: 203338
auauuccacacuguuugcg

SEQ ID NO: 203340 - RNA, 19 nt, Artificial Sequence
  Description of Artificial Sequence: Synthetic oligonucleotide
  Sense strand starting at position 1072 of SEQ ID NO: 2620
gcaaacaguguggaauauu

SEQ ID NO: 203341 - RNA, 19 nt, Artificial Sequence
  Description of Artificial Sequence: Synthetic oligonucleotide
  Antisense strand to SEQ ID NO: 203340
aauauuccacacuguuugc

SEQ ID NO: 203342 - RNA, 19 nt, Artificial Sequence
  Description of Artificial Sequence: Synthetic oligonucleotide
  Sense strand starting at position 1118 of SEQ ID NO: 2620
uucccuaaguuuggcagaa

SEQ ID NO: 203343 - RNA, 19 nt, Artificial Sequence
  Description of Artificial Sequence: Synthetic oligonucleotide
  Antisense strand to SEQ ID NO: 203342
uucugccaaacuuagggaa

SEQ ID NO: 203344 - RNA, 19 nt, Artificial Sequence
  Description of Artificial Sequence: Synthetic oligonucleotide
  Sense strand starting at position 1119 of SEQ ID NO: 2620
ucccuaaguuuggcagaaa

SEQ ID NO: 203345 - RNA, 19 nt, Artificial Sequence
  Description of Artificial Sequence: Synthetic oligonucleotide
  Antisense strand to SEQ ID NO: 203344
uuucugccaaacuuaggga

SEQ ID NO: 203346 - RNA, 19 nt, Artificial Sequence
  Description of Artificial Sequence: Synthetic oligonucleotide
  Sense strand starting at position 1122 of SEQ ID NO: 2620
cuaaguuuggcagaaacca

SEQ ID NO: 203347 - RNA, 19 nt, Artificial Sequence
  Description of Artificial Sequence: Synthetic oligonucleotide
  Antisense strand to SEQ ID NO: 203346
ugguuucugccaaacuuag

SEQ ID NO: 203348 - RNA, 19 nt, Artificial Sequence
  Description of Artificial Sequence: Synthetic oligonucleotide
  Sense strand starting at position 2605 of SEQ ID NO: 2620
acuggauccucuggcuuau

SEQ ID NO: 203349 - RNA, 19 nt, Artificial Sequence
  Description of Artificial Sequence: Synthetic oligonucleotide
  Antisense strand to SEQ ID NO: 203348
auaagccagaggauccagu

SEQ ID NO: 203350 - RNA, 19 nt, Artificial Sequence
  Description of Artificial Sequence: Synthetic oligonucleotide
  Sense strand starting at position 2609 of SEQ ID NO: 2620
gauccucuggcuuaugaag

SEQ ID NO: 203351 - RNA, 19 nt, Artificial Sequence
  Description of Artificial Sequence: Synthetic oligonucleotide
  Antisense strand to SEQ ID NO: 203350
cuucauaagccagaggauc

SEQ ID NO: 203352 - RNA, 19 nt, Artificial Sequence
  Description of Artificial Sequence: Synthetic oligonucleotide
  Sense strand starting at position 2986 of SEQ ID NO: 2620
ccagguaagccuggcgaua

SEQ ID NO: 203353 - RNA, 19 nt, Artificial Sequence
  Description of Artificial Sequence: Synthetic oligonucleotide
  Antisense strand to SEQ ID NO: 203352
uaucgccaggcuuaccugg

SEQ ID NO: 203354 - RNA, 19 nt, Artificial Sequence
  Description of Artificial Sequence: Synthetic oligonucleotide
  Sense strand starting at position 2998 of SEQ ID NO: 2620
ggcgauaccggauggagaa

SEQ ID NO: 203355 - RNA, 19 nt, Artificial Sequence
  Description of Artificial Sequence: Synthetic oligonucleotide
  Antisense strand to SEQ ID NO: 203354
uucuccauccgguaucgcc

SEQ ID NO: 203356 - RNA, 19 nt, Artificial Sequence
  Description of Artificial Sequence: Synthetic oligonucleotide
  Sense strand starting at position 3010 of SEQ ID NO: 2620
uggagaaguuaccuggucu

SEQ ID NO: 203357 - RNA, 19 nt, Artificial Sequence
  Description of Artificial Sequence: Synthetic oligonucleotide
  Antisense strand to SEQ ID NO: 203356
agaccagguaacuucucca

SEQ ID NO: 203358 - RNA, 19 nt, Artificial Sequence
  Description of Artificial Sequence: Synthetic oligonucleotide
  Sense strand starting at position 3011 of SEQ ID NO: 2620
ggagaaguuaccuggucuu

SEQ ID NO: 203359 - RNA, 19 nt, Artificial Sequence
  Description of Artificial Sequence: Synthetic oligonucleotide
  Antisense strand to SEQ ID NO: 203358
aagaccagguaacuucucc

SEQ ID NO: 203360 - RNA, 19 nt, Artificial Sequence
  Description of Artificial Sequence: Synthetic oligonucleotide
  Sense strand starting at position 3014 of SEQ ID NO: 2620
gaaguuaccuggucuugaa

SEQ ID NO: 203361 - RNA, 19 nt, Artificial Sequence
  Description of Artificial Sequence: Synthetic oligonucleotide
  Antisense strand to SEQ ID NO: 203360
uucaagaccagguaacuuc

SEQ ID NO: 203362 - RNA, 19 nt, Artificial Sequence
  Description of Artificial Sequence: Synthetic oligonucleotide
  Sense strand starting at position 3121 of SEQ ID NO: 2620
guccuuaucucugaaucga

SEQ ID NO: 203363 - RNA, 19 nt, Artificial Sequence
  Description of Artificial Sequence: Synthetic oligonucleotide
  Antisense strand to SEQ ID NO: 203362
ucgauucagagauaaggac

SEQ ID NO: 203364 - RNA, 19 nt, Artificial Sequence
  Description of Artificial Sequence: Synthetic oligonucleotide
  Sense strand starting at position 3192 of SEQ ID NO: 2620
gcuccuaacuguuagcauu

SEQ ID NO: 203365 - RNA, 19 nt, Artificial Sequence
  Description of Artificial Sequence: Synthetic oligonucleotide
  Antisense strand to SEQ ID NO: 203364
aaugcuaacaguuaggagc

SEQ ID NO: 203366 - RNA, 19 nt, Artificial Sequence
  Description of Artificial Sequence: Synthetic oligonucleotide
  Sense strand starting at position 3230 of SEQ ID NO: 2620
ggcggaaucagcuggaaag

SEQ ID NO: 203367 - RNA, 19 nt, Artificial Sequence
  Description of Artificial Sequence: Synthetic oligonucleotide
  Antisense strand to SEQ ID NO: 203366
cuuuccagcugauuccgcc

SEQ ID NO: 203368 - RNA, 19 nt, Artificial Sequence
  Description of Artificial Sequence: Synthetic oligonucleotide
  Sense strand starting at position 3249 of SEQ ID NO: 2620
gaacauugcuaaguaggaa

SEQ ID NO: 203369 - RNA, 19 nt, Artificial Sequence
  Description of Artificial Sequence: Synthetic oligonucleotide
  Antisense strand to SEQ ID NO: 203368
uuccuacuuagcaauguuc

SEQ ID NO: 203370 - RNA, 19 nt, Artificial Sequence
  Description of Artificial Sequence: Synthetic oligonucleotide
  Sense strand starting at position 3373 of SEQ ID NO: 2620
gggugcggguccucuagaa

SEQ ID NO: 203371 - RNA, 19 nt, Artificial Sequence
  Description of Artificial Sequence: Synthetic oligonucleotide
  Antisense strand to SEQ ID NO: 203370
uucuagaggacccgcaccc

SEQ ID NO: 203372 - RNA, 19 nt, Artificial Sequence
  Description of Artificial Sequence: Synthetic oligonucleotide
  Sense strand starting at position 3405 of SEQ ID NO: 2620
gucaguagauauggaaaug

SEQ ID NO: 203373 - RNA, 19 nt, Artificial Sequence
  Description of Artificial Sequence: Synthetic oligonucleotide
  Antisense strand to SEQ ID NO: 203372
cauuuccauaucuacugac

SEQ ID NO: 203374 - RNA, 19 nt, Artificial Sequence
  Description of Artificial Sequence: Synthetic oligonucleotide
  Sense strand starting at position 3430 of SEQ ID NO: 2620
uuugcagucuucggaccau

SEQ ID NO: 203375 - RNA, 19 nt, Artificial Sequence
  Description of Artificial Sequence: Synthetic oligonucleotide
  Antisense strand to SEQ ID NO: 203374
augguccgaagacugcaaa

SEQ ID NO: 203376 - RNA, 19 nt, Artificial Sequence
  Description of Artificial Sequence: Synthetic oligonucleotide
  Sense strand starting at position 3465 of SEQ ID NO: 2620
ucacaugauucuccucgga

SEQ ID NO: 203377 - RNA, 19 nt, Artificial Sequence
  Description of Artificial Sequence: Synthetic oligonucleotide
  Antisense strand to SEQ ID NO: 203376
uccgaggagaaucauguga

SEQ ID NO: 203378 - RNA, 19 nt, Artificial Sequence
  Description of Artificial Sequence: Synthetic oligonucleotide
  Sense strand starting at position 3467 of SEQ ID NO: 2620
acaugauucuccucggacu

SEQ ID NO: 203379 - RNA, 19 nt, Artificial Sequence
  Description of Artificial Sequence: Synthetic oligonucleotide
  Antisense strand to SEQ ID NO: 203378
aguccgaggagaaucaugu

SEQ ID NO: 203380 - RNA, 19 nt, Artificial Sequence
  Description of Artificial Sequence: Synthetic oligonucleotide
  Sense strand starting at position 3503 of SEQ ID NO: 2620
aaacaagucgaauguuugu

SEQ ID NO: 203381 - RNA, 19 nt, Artificial Sequence
  Description of Artificial Sequence: Synthetic oligonucleotide
  Antisense strand to SEQ ID NO: 203380
acaaacauucgacuuguuu

SEQ ID NO: 203382 - RNA, 19 nt, Artificial Sequence
  Description of Artificial Sequence: Synthetic oligonucleotide
  Sense strand starting at position 3506 of SEQ ID NO: 2620
caagucgaauguuuguauu

SEQ ID NO: 203383 - RNA, 19 nt, Artificial Sequence
  Description of Artificial Sequence: Synthetic oligonucleotide
  Antisense strand to SEQ ID NO: 203382
aauacaaacauucgacuug

SEQ ID NO: 203384 - RNA, 19 nt, Artificial Sequence
  Description of Artificial Sequence: Synthetic oligonucleotide
  Sense strand starting at position 3699 of SEQ ID NO: 2620
gcuagaaauucucuaagaa

SEQ ID NO: 203385 - RNA, 19 nt, Artificial Sequence
  Description of Artificial Sequence: Synthetic oligonucleotide
  Antisense strand to SEQ ID NO: 203384
uucuuagagaauuucuagc

SEQ ID NO: 203386 - RNA, 19 nt, Artificial Sequence
  Description of Artificial Sequence: Synthetic oligonucleotide
  Sense strand starting at position 23 of SEQ ID NO: 2621
ucccuaagcugucagggua

SEQ ID NO: 203387 - RNA, 19 nt, Artificial Sequence
  Description of Artificial Sequence: Synthetic oligonucleotide
  Antisense strand to SEQ ID NO: 203386
uacccugacagcuuaggga

SEQ ID NO: 203388 - RNA, 19 nt, Artificial Sequence
  Description of Artificial Sequence: Synthetic oligonucleotide
  Sense strand starting at position 133 of SEQ ID NO: 2621
agcugaaugagugguuuac

SEQ ID NO: 203389 - RNA, 19 nt, Artificial Sequence
  Description of Artificial Sequence: Synthetic oligonucleotide
  Antisense strand to SEQ ID NO: 203388
guaaaccacucauucagcu

SEQ ID NO: 203390 - RNA, 19 nt, Artificial Sequence
  Description of Artificial Sequence: Synthetic oligonucleotide
  Sense strand starting at position 135 of SEQ ID NO: 2621
cugaaugagugguuuacaa

SEQ ID NO: 203391 - RNA, 19 nt, Artificial Sequence
  Description of Artificial Sequence: Synthetic oligonucleotide
  Antisense strand to SEQ ID NO: 203390
uuguaaaccacucauucag

SEQ ID NO: 203392 - RNA, 19 nt, Artificial Sequence
  Description of Artificial Sequence: Synthetic oligonucleotide
  Sense strand starting at position 199 of SEQ ID NO: 2621
acaggauuggagugcuaua

SEQ ID NO: 203393 - RNA, 19 nt, Artificial Sequence
  Description of Artificial Sequence: Synthetic oligonucleotide
  Antisense strand to SEQ ID NO: 203392
uauagcacuccaauccugu

SEQ ID NO: 203394 - RNA, 19 nt, Artificial Sequence
  Description of Artificial Sequence: Synthetic oligonucleotide
  Sense strand starting at position 206 of SEQ ID NO: 2621
uggagugcuauauaaagua

SEQ ID NO: 203395 - RNA, 19 nt, Artificial Sequence
  Description of Artificial Sequence: Synthetic oligonucleotide
  Antisense strand to SEQ ID NO: 203394
uacuuuauauagcacucca

SEQ ID NO: 203396 - RNA, 19 nt, Artificial Sequence
  Description of Artificial Sequence: Synthetic oligonucleotide
  Sense strand starting at position 355 of SEQ ID NO: 2621
gcaguagguaucgguauca

SEQ ID NO: 203397 - RNA, 19 nt, Artificial Sequence
  Description of Artificial Sequence: Synthetic oligonucleotide
  Antisense strand to SEQ ID NO: 203396
ugauaccgauaccuacugc

SEQ ID NO: 203398 - RNA, 19 nt, Artificial Sequence
  Description of Artificial Sequence: Synthetic oligonucleotide
  Sense strand starting at position 365 of SEQ ID NO: 2621
ucgguaucauuaggugacu

SEQ ID NO: 203399 - RNA, 19 nt, Artificial Sequence
  Description of Artificial Sequence: Synthetic oligonucleotide
  Antisense strand to SEQ ID NO: 203398
agucaccuaaugauaccga

SEQ ID NO: 203400 - RNA, 19 nt, Artificial Sequence
  Description of Artificial Sequence: Synthetic oligonucleotide
  Sense strand starting at position 367 of SEQ ID NO: 2621
gguaucauuaggugacuca

SEQ ID NO: 203401 - RNA, 19 nt, Artificial Sequence
  Description of Artificial Sequence: Synthetic oligonucleotide
  Antisense strand to SEQ ID NO: 203400
ugagucaccuaaugauacc

SEQ ID NO: 203402 - RNA, 19 nt, Artificial Sequence
  Description of Artificial Sequence: Synthetic oligonucleotide
  Sense strand starting at position 380 of SEQ ID NO: 2621
gacucagagccagagucau

SEQ ID NO: 203403 - RNA, 19 nt, Artificial Sequence
  Description of Artificial Sequence: Synthetic oligonucleotide
  Antisense strand to SEQ ID NO: 203402
augacucuggcucugaguc

SEQ ID NO: 203404 - RNA, 19 nt, Artificial Sequence
  Description of Artificial Sequence: Synthetic oligonucleotide
  Sense strand starting at position 386 of SEQ ID NO: 2621
gagccagagucauugagag

SEQ ID NO: 203405 - RNA, 19 nt, Artificial Sequence
  Description of Artificial Sequence: Synthetic oligonucleotide
  Antisense strand to SEQ ID NO: 203404
cucucaaugacucuggcuc

SEQ ID NO: 203406 - RNA, 19 nt, Artificial Sequence
  Description of Artificial Sequence: Synthetic oligonucleotide
  Sense strand starting at position 459 of SEQ ID NO: 2621
uggagaguggcucgagcuu

SEQ ID NO: 203407 - RNA, 19 nt, Artificial Sequence
  Description of Artificial Sequence: Synthetic oligonucleotide
  Antisense strand to SEQ ID NO: 203406
aagcucgagccacucucca

SEQ ID NO: 203408 - RNA, 19 nt, Artificial Sequence
  Description of Artificial Sequence: Synthetic oligonucleotide
  Sense strand starting at position 472 of SEQ ID NO: 2621
gagcuugggaccugaggaa

SEQ ID NO: 203409 - RNA, 19 nt, Artificial Sequence
  Description of Artificial Sequence: Synthetic oligonucleotide
  Antisense strand to SEQ ID NO: 203408
uuccucaggucccaagcuc

SEQ ID NO: 203410 - RNA, 19 nt, Artificial Sequence
  Description of Artificial Sequence: Synthetic oligonucleotide
  Sense strand starting at position 705 of SEQ ID NO: 2621
gacccuucuugcccagaga

SEQ ID NO: 203411 - RNA, 19 nt, Artificial Sequence
  Description of Artificial Sequence: Synthetic oligonucleotide
  Antisense strand to SEQ ID NO: 203410
ucucugggcaagaaggguc

SEQ ID NO: 203412 - RNA, 19 nt, Artificial Sequence
  Description of Artificial Sequence: Synthetic oligonucleotide
  Sense strand starting at position 1132 of SEQ ID NO: 2621
gcaugugguuggaggaaga

SEQ ID NO: 203413 - RNA, 19 nt, Artificial Sequence
  Description of Artificial Sequence: Synthetic oligonucleotide
  Antisense strand to SEQ ID NO: 203412
ucuuccuccaaccacaugc

SEQ ID NO: 203414 - RNA, 19 nt, Artificial Sequence
  Description of Artificial Sequence: Synthetic oligonucleotide
  Sense strand starting at position 1349 of SEQ ID NO: 2621
ccgcuccauucguagggaa

SEQ ID NO: 203415 - RNA, 19 nt, Artificial Sequence
  Description of Artificial Sequence: Synthetic oligonucleotide
  Antisense strand to SEQ ID NO: 203414
uucccuacgaauggagcgg

SEQ ID NO: 203416 - RNA, 19 nt, Artificial Sequence
  Description of Artificial Sequence: Synthetic oligonucleotide
  Sense strand starting at position 1351 of SEQ ID NO: 2621
gcuccauucguagggaaag

SEQ ID NO: 203417 - RNA, 19 nt, Artificial Sequence
  Description of Artificial Sequence: Synthetic oligonucleotide
  Antisense strand to SEQ ID NO: 203416
cuuucccuacgaauggagc

SEQ ID NO: 203418 - RNA, 19 nt, Artificial Sequence
  Description of Artificial Sequence: Synthetic oligonucleotide
  Sense strand starting at position 2206 of SEQ ID NO: 2621
uccuguacuugugcgaaac

SEQ ID NO: 203419 - RNA, 19 nt, Artificial Sequence
  Description of Artificial Sequence: Synthetic oligonucleotide
  Antisense strand to SEQ ID NO: 203418
guuucgcacaaguacagga

SEQ ID NO: 203420 - RNA, 19 nt, Artificial Sequence
  Description of Artificial Sequence: Synthetic oligonucleotide
  Sense strand starting at position 2208 of SEQ ID NO: 2621
cuguacuugugcgaaaccu

SEQ ID NO: 203421 - RNA, 19 nt, Artificial Sequence
  Description of Artificial Sequence: Synthetic oligonucleotide
  Antisense strand to SEQ ID NO: 203420
agguuucgcacaaguacag

SEQ ID NO: 203422 - RNA, 19 nt, Artificial Sequence
  Description of Artificial Sequence: Synthetic oligonucleotide
  Sense strand starting at position 2648 of SEQ ID NO: 2621
ccuuuauuagucugcuugu

SEQ ID NO: 203423 - RNA, 19 nt, Artificial Sequence
  Description of Artificial Sequence: Synthetic oligonucleotide
  Antisense strand to SEQ ID NO: 203422
acaagcagacuaauaaagg

SEQ ID NO: 203424 - RNA, 19 nt, Artificial Sequence
  Description of Artificial Sequence: Synthetic oligonucleotide
  Sense strand starting at position 2651 of SEQ ID NO: 2621
uuauuagucugcuugugca

SEQ ID NO: 203425 - RNA, 19 nt, Artificial Sequence
  Description of Artificial Sequence: Synthetic oligonucleotide
  Antisense strand to SEQ ID NO: 203424
ugcacaagcagacuaauaa

SEQ ID NO: 203426 - RNA, 19 nt, Artificial Sequence
  Description of Artificial Sequence: Synthetic oligonucleotide
  Sense strand starting at position 2731 of SEQ ID NO: 2621
ccaggugacuuccagaauc

SEQ ID NO: 203427 - RNA, 19 nt, Artificial Sequence
  Description of Artificial Sequence: Synthetic oligonucleotide
  Antisense strand to SEQ ID NO: 203426
gauucuggaagucaccugg

SEQ ID NO: 203428 - RNA, 19 nt, Artificial Sequence
  Description of Artificial Sequence: Synthetic oligonucleotide
  Sense strand starting at position 2876 of SEQ ID NO: 2621
cacguugugguccaaucau

SEQ ID NO: 203429 - RNA, 19 nt, Artificial Sequence
  Description of Artificial Sequence: Synthetic oligonucleotide
  Antisense strand to SEQ ID NO: 203428
augauuggaccacaacgug

SEQ ID NO: 203430 - RNA, 19 nt, Artificial Sequence
  Description of Artificial Sequence: Synthetic oligonucleotide
  Sense strand starting at position 2950 of SEQ ID NO: 2621
gcaugacuggcucacuuaa

SEQ ID NO: 203431 - RNA, 19 nt, Artificial Sequence
  Description of Artificial Sequence: Synthetic oligonucleotide
  Antisense strand to SEQ ID NO: 203430
uuaagugagccagucaugc

SEQ ID NO: 203432 - RNA, 19 nt, Artificial Sequence
  Description of Artificial Sequence: Synthetic oligonucleotide
  Sense strand starting at position 2973 of SEQ ID NO: 2621
agagacauacgcuauuauu

SEQ ID NO: 203433 - RNA, 19 nt, Artificial Sequence
  Description of Artificial Sequence: Synthetic oligonucleotide
  Antisense strand to SEQ ID NO: 203432
aauaauagcguaugucucu

SEQ ID NO: 203434 - RNA, 19 nt, Artificial Sequence
  Description of Artificial Sequence: Synthetic oligonucleotide
  Sense strand starting at position 3277 of SEQ ID NO: 2621
cugcccuauccuuaagguu

SEQ ID NO: 203435 - RNA, 19 nt, Artificial Sequence
  Description of Artificial Sequence: Synthetic oligonucleotide
  Antisense strand to SEQ ID NO: 203434
aaccuuaaggauagggcag

SEQ ID NO: 203436 - RNA, 19 nt, Artificial Sequence
  Description of Artificial Sequence: Synthetic oligonucleotide
  Sense strand starting at position 3332 of SEQ ID NO: 2621
accauagaauguucuggaa

SEQ ID NO: 203437 - RNA, 19 nt, Artificial Sequence
  Description of Artificial Sequence: Synthetic oligonucleotide
  Antisense strand to SEQ ID NO: 203436
uuccagaacauucuauggu

SEQ ID NO: 203438 - RNA, 19 nt, Artificial Sequence
  Description of Artificial Sequence: Synthetic oligonucleotide
  Sense strand starting at position 3334 of SEQ ID NO: 2621
cauagaauguucuggaaug

SEQ ID NO: 203439 - RNA, 19 nt, Artificial Sequence
  Description of Artificial Sequence: Synthetic oligonucleotide
  Antisense strand to SEQ ID NO: 203438
cauuccagaacauucuaug

SEQ ID NO: 203440 - RNA, 19 nt, Artificial Sequence
  Description of Artificial Sequence: Synthetic oligonucleotide
  Sense strand starting at position 3335 of SEQ ID NO: 2621
auagaauguucuggaaugu

SEQ ID NO: 203441 - RNA, 19 nt, Artificial Sequence
  Description of Artificial Sequence: Synthetic oligonucleotide
  Antisense strand to SEQ ID NO: 203440
acauuccagaacauucuau

SEQ ID NO: 203442 - RNA, 19 nt, Artificial Sequence
  Description of Artificial Sequence: Synthetic oligonucleotide
  Sense strand starting at position 3336 of SEQ ID NO: 2621
uagaauguucuggaauguu

SEQ ID NO: 203443 - RNA, 19 nt, Artificial Sequence
  Description of Artificial Sequence: Synthetic oligonucleotide
  Antisense strand to SEQ ID NO: 203442
aacauuccagaacauucua

SEQ ID NO: 203444 - RNA, 19 nt, Artificial Sequence
  Description of Artificial Sequence: Synthetic oligonucleotide
  Sense strand starting at position 3339 of SEQ ID NO: 2621
aauguucuggaauguugua

SEQ ID NO: 203445 - RNA, 19 nt, Artificial Sequence
  Description of Artificial Sequence: Synthetic oligonucleotide
  Antisense strand to SEQ ID NO: 203444
uacaacauuccagaacauu

SEQ ID NO: 203446 - RNA, 19 nt, Artificial Sequence
  Description of Artificial Sequence: Synthetic oligonucleotide
  Sense strand starting at position 3355 of SEQ ID NO: 2621
guaagugccaauuagggaa

SEQ ID NO: 203447 - RNA, 19 nt, Artificial Sequence
  Description of Artificial Sequence: Synthetic oligonucleotide
  Antisense strand to SEQ ID NO: 203446
uucccuaauuggcacuuac

SEQ ID NO: 203448 - RNA, 19 nt, Artificial Sequence
  Description of Artificial Sequence: Synthetic oligonucleotide
  Sense strand starting at position 3390 of SEQ ID NO: 2621
ggcagaauuucagaggagu

SEQ ID NO: 203449 - RNA, 19 nt, Artificial Sequence
  Description of Artificial Sequence: Synthetic oligonucleotide
  Antisense strand to SEQ ID NO: 203448
acuccucugaaauucugcc

SEQ ID NO: 203450 - RNA, 19 nt, Artificial Sequence
  Description of Artificial Sequence: Synthetic oligonucleotide
  Sense strand starting at position 3417 of SEQ ID NO: 2621
gcugauguccuuuguaaug

SEQ ID NO: 203451 - RNA, 19 nt, Artificial Sequence
  Description of Artificial Sequence: Synthetic oligonucleotide
  Antisense strand to SEQ ID NO: 203450
cauuacaaaggacaucagc

SEQ ID NO: 203452 - RNA, 19 nt, Artificial Sequence
  Description of Artificial Sequence: Synthetic oligonucleotide
  Sense strand starting at position 3822 of SEQ ID NO: 2621
gggucagagucuugcacuu

SEQ ID NO: 203453 - RNA, 19 nt, Artificial Sequence
  Description of Artificial Sequence: Synthetic oligonucleotide
  Antisense strand to SEQ ID NO: 203452
aagugcaagacucugaccc

SEQ ID NO: 203454 - RNA, 19 nt, Artificial Sequence
  Description of Artificial Sequence: Synthetic oligonucleotide
  Sense strand starting at position 3896 of SEQ ID NO: 2621
agcucagggccuugugaga

SEQ ID NO: 203455 - RNA, 19 nt, Artificial Sequence
  Description of Artificial Sequence: Synthetic oligonucleotide
  Antisense strand to SEQ ID NO: 203454
ucucacaaggcccugagcu

SEQ ID NO: 203456 - RNA, 19 nt, Artificial Sequence
  Description of Artificial Sequence: Synthetic oligonucleotide
  Sense strand starting at position 3909 of SEQ ID NO: 2621
gugagaugacgccaaugaa

SEQ ID NO: 203457 - RNA, 19 nt, Artificial Sequence
  Description of Artificial Sequence: Synthetic oligonucleotide
  Antisense strand to SEQ ID NO: 203456
uucauuggcgucaucucac

SEQ ID NO: 203458 - RNA, 19 nt, Artificial Sequence
  Description of Artificial Sequence: Synthetic oligonucleotide
  Sense strand starting at position 3972 of SEQ ID NO: 2621
cggcuacuguuaguguuau

SEQ ID NO: 203459 - RNA, 19 nt, Artificial Sequence
  Description of Artificial Sequence: Synthetic oligonucleotide
  Antisense strand to SEQ ID NO: 203458
auaacacuaacaguagccg

SEQ ID NO: 203460 - RNA, 19 nt, Artificial Sequence
  Description of Artificial Sequence: Synthetic oligonucleotide
  Sense strand starting at position 3976 of SEQ ID NO: 2621
uacuguuaguguuaucauu

SEQ ID NO: 203461 - RNA, 19 nt, Artificial Sequence
  Description of Artificial Sequence: Synthetic oligonucleotide
  Antisense strand to SEQ ID NO: 203460
aaugauaacacuaacagua

SEQ ID NO: 203462 - RNA, 19 nt, Artificial Sequence
  Description of Artificial Sequence: Synthetic oligonucleotide
  Sense strand starting at position 3978 of SEQ ID NO: 2621
cuguuaguguuaucauuga

SEQ ID NO: 203463 - RNA, 19 nt, Artificial Sequence
  Description of Artificial Sequence: Synthetic oligonucleotide
  Antisense strand to SEQ ID NO: 203462
ucaaugauaacacuaacag

SEQ ID NO: 203464 - RNA, 19 nt, Artificial Sequence
  Description of Artificial Sequence: Synthetic oligonucleotide
  Sense strand starting at position 3982 of SEQ ID NO: 2621
uaguguuaucauugauguc

SEQ ID NO: 203465 - RNA, 19 nt, Artificial Sequence
  Description of Artificial Sequence: Synthetic oligonucleotide
  Antisense strand to SEQ ID NO: 203464
gacaucaaugauaacacua

SEQ ID NO: 203466 - RNA, 19 nt, Artificial Sequence
  Description of Artificial Sequence: Synthetic oligonucleotide
  Sense strand starting at position 79 of SEQ ID NO: 2622
caggcauucugaccacagu

SEQ ID NO: 203467 - RNA, 19 nt, Artificial Sequence
  Description of Artificial Sequence: Synthetic oligonucleotide
  Antisense strand to SEQ ID NO: 203466
acuguggucagaaugccug

SEQ ID NO: 203468 - RNA, 19 nt, Artificial Sequence
  Description of Artificial Sequence: Synthetic oligonucleotide
  Sense strand starting at position 82 of SEQ ID NO: 2622
gcauucugaccacagucua

SEQ ID NO: 203469 - RNA, 19 nt, Artificial Sequence
  Description of Artificial Sequence: Synthetic oligonucleotide
  Antisense strand to SEQ ID NO: 203468
uagacuguggucagaaugc

SEQ ID NO: 203470 - RNA, 19 nt, Artificial Sequence
  Description of Artificial Sequence: Synthetic oligonucleotide
  Sense strand starting at position 130 of SEQ ID NO: 2622
gugccaagggaaugucuaa

SEQ ID NO: 203471 - RNA, 19 nt, Artificial Sequence
  Description of Artificial Sequence: Synthetic oligonucleotide
  Antisense strand to SEQ ID NO: 203470
uuagacauucccuuggcac

SEQ ID NO: 203472 - RNA, 19 nt, Artificial Sequence
  Description of Artificial Sequence: Synthetic oligonucleotide
  Sense strand starting at position 137 of SEQ ID NO: 2622
gggaaugucuaacuuucgu

SEQ ID NO: 203473 - RNA, 19 nt, Artificial Sequence
  Description of Artificial Sequence: Synthetic oligonucleotide
  Antisense strand to SEQ ID NO: 203472
acgaaaguuagacauuccc

SEQ ID NO: 203474 - RNA, 19 nt, Artificial Sequence
  Description of Artificial Sequence: Synthetic oligonucleotide
  Sense strand starting at position 144 of SEQ ID NO: 2622
ucuaacuuucguuggacua

SEQ ID NO: 203475 - RNA, 19 nt, Artificial Sequence
  Description of Artificial Sequence: Synthetic oligonucleotide
  Antisense strand to SEQ ID NO: 203474
uaguccaacgaaaguuaga

SEQ ID NO: 203476 - RNA, 19 nt, Artificial Sequence
  Description of Artificial Sequence: Synthetic oligonucleotide
  Sense strand starting at position 145 of SEQ ID NO: 2622
cuaacuuucguuggacuau

SEQ ID NO: 203477 - RNA, 19 nt, Artificial Sequence
  Description of Artificial Sequence: Synthetic oligonucleotide
  Antisense strand to SEQ ID NO: 203476
auaguccaacgaaaguuag

SEQ ID NO: 203478 - RNA, 19 nt, Artificial Sequence
  Description of Artificial Sequence: Synthetic oligonucleotide
  Sense strand starting at position 157 of SEQ ID NO: 2622
ggacuaucaaggugugaac

SEQ ID NO: 203479 - RNA, 19 nt, Artificial Sequence
  Description of Artificial Sequence: Synthetic oligonucleotide
  Antisense strand to SEQ ID NO: 203478
guucacaccuugauagucc

SEQ ID NO: 203480 - RNA, 19 nt, Artificial Sequence
  Description of Artificial Sequence: Synthetic oligonucleotide
  Sense strand starting at position 159 of SEQ ID NO: 2622
acuaucaaggugugaacua

SEQ ID NO: 203481 - RNA, 19 nt, Artificial Sequence
  Description of Artificial Sequence: Synthetic oligonucleotide
  Antisense strand to SEQ ID NO: 203480
uaguucacaccuugauagu

SEQ ID NO: 203482 - RNA, 19 nt, Artificial Sequence
  Description of Artificial Sequence: Synthetic oligonucleotide
  Sense strand starting at position 166 of SEQ ID NO: 2622
aggugugaacuauaaugcu

SEQ ID NO: 203483 - RNA, 19 nt, Artificial Sequence
  Description of Artificial Sequence: Synthetic oligonucleotide
  Antisense strand to SEQ ID NO: 203482
agcauuauaguucacaccu

SEQ ID NO: 203484 - RNA, 19 nt, Artificial Sequence
  Description of Artificial Sequence: Synthetic oligonucleotide
  Sense strand starting at position 228 of SEQ ID NO: 2622
ucagaugacccaugugcua

SEQ ID NO: 203485 - RNA, 19 nt, Artificial Sequence
  Description of Artificial Sequence: Synthetic oligonucleotide
  Antisense strand to SEQ ID NO: 203484
uagcacaugggucaucuga

SEQ ID NO: 203486 - RNA, 19 nt, Artificial Sequence
  Description of Artificial Sequence: Synthetic oligonucleotide
  Sense strand starting at position 235 of SEQ ID NO: 2622
acccaugugcuacaggaaa

SEQ ID NO: 203487 - RNA, 19 nt, Artificial Sequence
  Description of Artificial Sequence: Synthetic oligonucleotide
  Antisense strand to SEQ ID NO: 203486
uuuccuguagcacaugggu

SEQ ID NO: 203488 - RNA, 19 nt, Artificial Sequence
  Description of Artificial Sequence: Synthetic oligonucleotide
  Sense strand starting at position 280 of SEQ ID NO: 2622
uguacucacuuaucugagu

SEQ ID NO: 203489 - RNA, 19 nt, Artificial Sequence
  Description of Artificial Sequence: Synthetic oligonucleotide
  Antisense strand to SEQ ID NO: 203488
acucagauaagugaguaca

SEQ ID NO: 203490 - RNA, 19 nt, Artificial Sequence
  Description of Artificial Sequence: Synthetic oligonucleotide
  Sense strand starting at position 285 of SEQ ID NO: 2622
ucacuuaucugagugucac

SEQ ID NO: 203491 - RNA, 19 nt, Artificial Sequence
  Description of Artificial Sequence: Synthetic oligonucleotide
  Antisense strand to SEQ ID NO: 203490
gugacacucagauaaguga

SEQ ID NO: 203492 - RNA, 19 nt, Artificial Sequence
  Description of Artificial Sequence: Synthetic oligonucleotide
  Sense strand starting at position 309 of SEQ ID NO: 2622
uaagaagugcaaugucauu

SEQ ID NO: 203493 - RNA, 19 nt, Artificial Sequence
  Description of Artificial Sequence: Synthetic oligonucleotide
  Antisense strand to SEQ ID NO: 203492
aaugacauugcacuucuua

SEQ ID NO: 203494 - RNA, 19 nt, Artificial Sequence
  Description of Artificial Sequence: Synthetic oligonucleotide
  Sense strand starting at position 752 of SEQ ID NO: 2622
acuuaaguucugcaaguua

SEQ ID NO: 203495 - RNA, 19 nt, Artificial Sequence
  Description of Artificial Sequence: Synthetic oligonucleotide
  Antisense strand to SEQ ID NO: 203494
uaacuugcagaacuuaagu

SEQ ID NO: 203496 - RNA, 19 nt, Artificial Sequence
  Description of Artificial Sequence: Synthetic oligonucleotide
  Sense strand starting at position 855 of SEQ ID NO: 2622
agaaauacuuagcuguaca

SEQ ID NO: 203497 - RNA, 19 nt, Artificial Sequence
  Description of Artificial Sequence: Synthetic oligonucleotide
  Antisense strand to SEQ ID NO: 203496
uguacagcuaaguauuucu

SEQ ID NO: 203498 - RNA, 19 nt, Artificial Sequence
  Description of Artificial Sequence: Synthetic oligonucleotide
  Sense strand starting at position 1010 of SEQ ID NO: 2622
augucuuuggacggaauga

SEQ ID NO: 203499 - RNA, 19 nt, Artificial Sequence
  Description of Artificial Sequence: Synthetic oligonucleotide
  Antisense strand to SEQ ID NO: 203498
ucauuccguccaaagacau

SEQ ID NO: 203500 - RNA, 19 nt, Artificial Sequence
  Description of Artificial Sequence: Synthetic oligonucleotide
  Sense strand starting at position 1011 of SEQ ID NO: 2622
ugucuuuggacggaaugaa

SEQ ID NO: 203501 - RNA, 19 nt, Artificial Sequence
  Description of Artificial Sequence: Synthetic oligonucleotide
  Antisense strand to SEQ ID NO: 203500
uucauuccguccaaagaca

SEQ ID NO: 203502 - RNA, 19 nt, Artificial Sequence
  Description of Artificial Sequence: Synthetic oligonucleotide
  Sense strand starting at position 1135 of SEQ ID NO: 2622
augagaaauuccgugccau

SEQ ID NO: 203503 - RNA, 19 nt, Artificial Sequence
  Description of Artificial Sequence: Synthetic oligonucleotide
  Antisense strand to SEQ ID NO: 203502
auggcacggaauuucucau

SEQ ID NO: 203504 - RNA, 19 nt, Artificial Sequence
  Description of Artificial Sequence: Synthetic oligonucleotide
  Sense strand starting at position 1236 of SEQ ID NO: 2622
gccaguuuaacuuagagug

SEQ ID NO: 203505 - RNA, 19 nt, Artificial Sequence
  Description of Artificial Sequence: Synthetic oligonucleotide
  Antisense strand to SEQ ID NO: 203504
cacucuaaguuaaacuggc

SEQ ID NO: 203506 - RNA, 19 nt, Artificial Sequence
  Description of Artificial Sequence: Synthetic oligonucleotide
  Sense strand starting at position 1252 of SEQ ID NO: 2622
guggcagcugcuucuaauu

SEQ ID NO: 203507 - RNA, 19 nt, Artificial Sequence
  Description of Artificial Sequence: Synthetic oligonucleotide
  Antisense strand to SEQ ID NO: 203506
aauuagaagcagcugccac

SEQ ID NO: 203508 - RNA, 19 nt, Artificial Sequence
  Description of Artificial Sequence: Synthetic oligonucleotide
  Sense strand starting at position 1531 of SEQ ID NO: 2622
agaagcagaaguuguuaau

SEQ ID NO: 203509 - RNA, 19 nt, Artificial Sequence
  Description of Artificial Sequence: Synthetic oligonucleotide
  Antisense strand to SEQ ID NO: 203508
auuaacaacuucugcuucu

SEQ ID NO: 203510 - RNA, 19 nt, Artificial Sequence
  Description of Artificial Sequence: Synthetic oligonucleotide
  Sense strand starting at position 1843 of SEQ ID NO: 2622
gccgauuauccggcaucgu

SEQ ID NO: 203511 - RNA, 19 nt, Artificial Sequence
  Description of Artificial Sequence: Synthetic oligonucleotide
  Antisense strand to SEQ ID NO: 203510
acgaugccggauaaucggc

SEQ ID NO: 203512 - RNA, 19 nt, Artificial Sequence
  Description of Artificial Sequence: Synthetic oligonucleotide
  Sense strand starting at position 1873 of SEQ ID NO: 2622
augaaaggcuccucgcaga

SEQ ID NO: 203513 - RNA, 19 nt, Artificial Sequence
  Description of Artificial Sequence: Synthetic oligonucleotide
  Antisense strand to SEQ ID NO: 203512
ucugcgaggagccuuucau

SEQ ID NO: 203514 - RNA, 19 nt, Artificial Sequence
  Description of Artificial Sequence: Synthetic oligonucleotide
  Sense strand starting at position 2125 of SEQ ID NO: 2622
ggcugaaacuugccaaagu

SEQ ID NO: 203515 - RNA, 19 nt, Artificial Sequence
  Description of Artificial Sequence: Synthetic oligonucleotide
  Antisense strand to SEQ ID NO: 203514
acuuuggcaaguuucagcc

SEQ ID NO: 203516 - RNA, 19 nt, Artificial Sequence
  Description of Artificial Sequence: Synthetic oligonucleotide
  Sense strand starting at position 2840 of SEQ ID NO: 2622
agcucaaaggcaugucuga

SEQ ID NO: 203517 - RNA, 19 nt, Artificial Sequence
  Description of Artificial Sequence: Synthetic oligonucleotide
  Antisense strand to SEQ ID NO: 203516
ucagacaugccuuugagcu

SEQ ID NO: 203518 - RNA, 19 nt, Artificial Sequence
  Description of Artificial Sequence: Synthetic oligonucleotide
  Sense strand starting at position 2952 of SEQ ID NO: 2622
cacugaucgccguaauuua

SEQ ID NO: 203519 - RNA, 19 nt, Artificial Sequence
  Description of Artificial Sequence: Synthetic oligonucleotide
  Antisense strand to SEQ ID NO: 203518
uaaauuacggcgaucagug

SEQ ID NO: 203520 - RNA, 19 nt, Artificial Sequence
  Description of Artificial Sequence: Synthetic oligonucleotide
  Sense strand starting at position 3051 of SEQ ID NO: 2622
cuaacuugucucgaaugca

SEQ ID NO: 203521 - RNA, 19 nt, Artificial Sequence
  Description of Artificial Sequence: Synthetic oligonucleotide
  Antisense strand to SEQ ID NO: 203520
ugcauucgagacaaguuag

SEQ ID NO: 203522 - RNA, 19 nt, Artificial Sequence
  Description of Artificial Sequence: Synthetic oligonucleotide
  Sense strand starting at position 3337 of SEQ ID NO: 2622
guucccuuaggucauuaaa

SEQ ID NO: 203523 - RNA, 19 nt, Artificial Sequence
  Description of Artificial Sequence: Synthetic oligonucleotide
  Antisense strand to SEQ ID NO: 203522
uuuaaugaccuaagggaac

SEQ ID NO: 203524 - RNA, 19 nt, Artificial Sequence
  Description of Artificial Sequence: Synthetic oligonucleotide
  Sense strand starting at position 3451 of SEQ ID NO: 2622
gcugaaguaucacuccuua

SEQ ID NO: 203525 - RNA, 19 nt, Artificial Sequence
  Description of Artificial Sequence: Synthetic oligonucleotide
  Antisense strand to SEQ ID NO: 203524
uaaggagugauacuucagc

SEQ ID NO: 203526 - RNA, 19 nt, Artificial Sequence
  Description of Artificial Sequence: Synthetic oligonucleotide
  Sense strand starting at position 3456 of SEQ ID NO: 2622
aguaucacuccuuaaaggu

SEQ ID NO: 203527 - RNA, 19 nt, Artificial Sequence
  Description of Artificial Sequence: Synthetic oligonucleotide
  Antisense strand to SEQ ID NO: 203526
accuuuaaggagugauacu

SEQ ID NO: 203528 - RNA, 19 nt, Artificial Sequence
  Description of Artificial Sequence: Synthetic oligonucleotide
  Sense strand starting at position 3511 of SEQ ID NO: 2622
cauaucaccuguguaugua

SEQ ID NO: 203529 - RNA, 19 nt, Artificial Sequence
  Description of Artificial Sequence: Synthetic oligonucleotide
  Antisense strand to SEQ ID NO: 203528
uacauacacaggugauaug

SEQ ID NO: 203530 - RNA, 19 nt, Artificial Sequence
  Description of Artificial Sequence: Synthetic oligonucleotide
  Sense strand starting at position 3515 of SEQ ID NO: 2622
ucaccuguguauguagaua

SEQ ID NO: 203531 - RNA, 19 nt, Artificial Sequence
  Description of Artificial Sequence: Synthetic oligonucleotide
  Antisense strand to SEQ ID NO: 203530
uaucuacauacacagguga

SEQ ID NO: 203532 - RNA, 19 nt, Artificial Sequence
  Description of Artificial Sequence: Synthetic oligonucleotide
  Sense strand starting at position 3589 of SEQ ID NO: 2622
agagauuggcugcauguga

SEQ ID NO: 203533 - RNA, 19 nt, Artificial Sequence
  Description of Artificial Sequence: Synthetic oligonucleotide
  Antisense strand to SEQ ID NO: 203532
ucacaugcagccaaucucu

SEQ ID NO: 203534 - RNA, 19 nt, Artificial Sequence
  Description of Artificial Sequence: Synthetic oligonucleotide
  Sense strand starting at position 3596 of SEQ ID NO: 2622
ggcugcaugugacucauuu

SEQ ID NO: 203535 - RNA, 19 nt, Artificial Sequence
  Description of Artificial Sequence: Synthetic oligonucleotide
  Antisense strand to SEQ ID NO: 203534
aaaugagucacaugcagcc

SEQ ID NO: 203536 - RNA, 19 nt, Artificial Sequence
  Description of Artificial Sequence: Synthetic oligonucleotide
  Sense strand starting at position 3600 of SEQ ID NO: 2622
gcaugugacucauuuccca

SEQ ID NO: 203537 - RNA, 19 nt, Artificial Sequence
  Description of Artificial Sequence: Synthetic oligonucleotide
  Antisense strand to SEQ ID NO: 203536
ugggaaaugagucacaugc

SEQ ID NO: 203538 - RNA, 19 nt, Artificial Sequence
  Description of Artificial Sequence: Synthetic oligonucleotide
  Sense strand starting at position 3671 of SEQ ID NO: 2622
uuuguugaaucauugaacu

SEQ ID NO: 203539 - RNA, 19 nt, Artificial Sequence
  Description of Artificial Sequence: Synthetic oligonucleotide
  Antisense strand to SEQ ID NO: 203538
aguucaaugauucaacaaa

SEQ ID NO: 203540 - RNA, 19 nt, Artificial Sequence
  Description of Artificial Sequence: Synthetic oligonucleotide
  Sense strand starting at position 3760 of SEQ ID NO: 2622
cuaugaaaugggcauuagu

SEQ ID NO: 203541 - RNA, 19 nt, Artificial Sequence
  Description of Artificial Sequence: Synthetic oligonucleotide
  Antisense strand to SEQ ID NO: 203540
acuaaugcccauuucauag

SEQ ID NO: 203542 - RNA, 19 nt, Artificial Sequence
  Description of Artificial Sequence: Synthetic oligonucleotide
  Sense strand starting at position 3845 of SEQ ID NO: 2622
ggaccuuugggugguaguu

SEQ ID NO: 203543 - RNA, 19 nt, Artificial Sequence
  Description of Artificial Sequence: Synthetic oligonucleotide
  Antisense strand to SEQ ID NO: 203542
aacuaccacccaaaggucc

SEQ ID NO: 203544 - RNA, 19 nt, Artificial Sequence
  Description of Artificial Sequence: Synthetic oligonucleotide
  Sense strand starting at position 3904 of SEQ ID NO: 2622
gguuaaugaccuuguaaga

SEQ ID NO: 203545 - RNA, 19 nt, Artificial Sequence
  Description of Artificial Sequence: Synthetic oligonucleotide
  Antisense strand to SEQ ID NO: 203544
ucuuacaaggucauuaacc

SEQ ID NO: 203546 - RNA, 19 nt, Artificial Sequence
  Description of Artificial Sequence: Synthetic oligonucleotide
  Sense strand starting at position 127 of SEQ ID NO: 2623
gcagacuucguauacugau

SEQ ID NO: 203547 - RNA, 19 nt, Artificial Sequence
  Description of Artificial Sequence: Synthetic oligonucleotide
  Antisense strand to SEQ ID NO: 203546
aucaguauacgaagucugc

SEQ ID NO: 203548 - RNA, 19 nt, Artificial Sequence
  Description of Artificial Sequence: Synthetic oligonucleotide
  Sense strand starting at position 178 of SEQ ID NO: 2623
acuuaucaguaaccuguaa

SEQ ID NO: 203549 - RNA, 19 nt, Artificial Sequence
  Description of Artificial Sequence: Synthetic oligonucleotide
  Antisense strand to SEQ ID NO: 203548
uuacagguuacugauaagu

SEQ ID NO: 203550 - RNA, 19 nt, Artificial Sequence
  Description of Artificial Sequence: Synthetic oligonucleotide
  Sense strand starting at position 182 of SEQ ID NO: 2623
aucaguaaccuguaaguua

SEQ ID NO: 203551 - RNA, 19 nt, Artificial Sequence
  Description of Artificial Sequence: Synthetic oligonucleotide
  Antisense strand to SEQ ID NO: 203550
uaacuuacagguuacugau

SEQ ID NO: 203552 - RNA, 19 nt, Artificial Sequence
  Description of Artificial Sequence: Synthetic oligonucleotide
  Sense strand starting at position 258 of SEQ ID NO: 2623
cuccguaaaguuuacauga

SEQ ID NO: 203553 - RNA, 19 nt, Artificial Sequence
  Description of Artificial Sequence: Synthetic oligonucleotide
  Antisense strand to SEQ ID NO: 203552
ucauguaaacuuuacggag

SEQ ID NO: 203554 - RNA, 19 nt, Artificial Sequence
  Description of Artificial Sequence: Synthetic oligonucleotide
  Sense strand starting at position 263 of SEQ ID NO: 2623
uaaaguuuacaugacguca

SEQ ID NO: 203555 - RNA, 19 nt, Artificial Sequence
  Description of Artificial Sequence: Synthetic oligonucleotide
  Antisense strand to SEQ ID NO: 203554
ugacgucauguaaacuuua

SEQ ID NO: 203556 - RNA, 19 nt, Artificial Sequence
  Description of Artificial Sequence: Synthetic oligonucleotide
  Sense strand starting at position 307 of SEQ ID NO: 2623
cuuugagacuuauccagac

SEQ ID NO: 203557 - RNA, 19 nt, Artificial Sequence
  Description of Artificial Sequence: Synthetic oligonucleotide
  Antisense strand to SEQ ID NO: 203556
gucuggauaagucucaaag

SEQ ID NO: 203558 - RNA, 19 nt, Artificial Sequence
  Description of Artificial Sequence: Synthetic oligonucleotide
  Sense strand starting at position 398 of SEQ ID NO: 2623
uggcgaaacgcuuguuguu

SEQ ID NO: 203559 - RNA, 19 nt, Artificial Sequence
  Description of Artificial Sequence: Synthetic oligonucleotide
  Antisense strand to SEQ ID NO: 203558
aacaacaagcguuucgcca

SEQ ID NO: 203560 - RNA, 19 nt, Artificial Sequence
  Description of Artificial Sequence: Synthetic oligonucleotide
  Sense strand starting at position 399 of SEQ ID NO: 2623
ggcgaaacgcuuguuguuu

SEQ ID NO: 203561 - RNA, 19 nt, Artificial Sequence
  Description of Artificial Sequence: Synthetic oligonucleotide
  Antisense strand to SEQ ID NO: 203560
aaacaacaagcguuucgcc

SEQ ID NO: 203562 - RNA, 19 nt, Artificial Sequence
  Description of Artificial Sequence: Synthetic oligonucleotide
  Sense strand starting at position 400 of SEQ ID NO: 2623
gcgaaacgcuuguuguuua

SEQ ID NO: 203563 - RNA, 19 nt, Artificial Sequence
  Description of Artificial Sequence: Synthetic oligonucleotide
  Antisense strand to SEQ ID NO: 203562
uaaacaacaagcguuucgc

SEQ ID NO: 203564 - RNA, 19 nt, Artificial Sequence
  Description of Artificial Sequence: Synthetic oligonucleotide
  Sense strand starting at position 407 of SEQ ID NO: 2623
gcuuguuguuuagagggca

SEQ ID NO: 203565 - RNA, 19 nt, Artificial Sequence
  Description of Artificial Sequence: Synthetic oligonucleotide
  Antisense strand to SEQ ID NO: 203564
ugcccucuaaacaacaagc

SEQ ID NO: 203566 - RNA, 19 nt, Artificial Sequence
  Description of Artificial Sequence: Synthetic oligonucleotide
  Sense strand starting at position 434 of SEQ ID NO: 2623
aauggaggauauuguaaua

SEQ ID NO: 203567 - RNA, 19 nt, Artificial Sequence
  Description of Artificial Sequence: Synthetic oligonucleotide
  Antisense strand to SEQ ID NO: 203566
uauuacaauauccuccauu

SEQ ID NO: 203568 - RNA, 19 nt, Artificial Sequence
  Description of Artificial Sequence: Synthetic oligonucleotide
  Sense strand starting at position 439 of SEQ ID NO: 2623
aggauauuguaauauacac

SEQ ID NO: 203569 - RNA, 19 nt, Artificial Sequence
  Description of Artificial Sequence: Synthetic oligonucleotide
  Antisense strand to SEQ ID NO: 203568
guguauauuacaauauccu

SEQ ID NO: 203570 - RNA, 19 nt, Artificial Sequence
  Description of Artificial Sequence: Synthetic oligonucleotide
  Sense strand starting at position 3520 of SEQ ID NO: 2623
cugccacauucccggaaua

SEQ ID NO: 203571 - RNA, 19 nt, Artificial Sequence
  Description of Artificial Sequence: Synthetic oligonucleotide
  Antisense strand to SEQ ID NO: 203570
uauuccgggaauguggcag

SEQ ID NO: 203572 - RNA, 19 nt, Artificial Sequence
  Description of Artificial Sequence: Synthetic oligonucleotide
  Sense strand starting at position 3522 of SEQ ID NO: 2623
gccacauucccggaauaca

SEQ ID NO: 203573 - RNA, 19 nt, Artificial Sequence
  Description of Artificial Sequence: Synthetic oligonucleotide
  Antisense strand to SEQ ID NO: 203572
uguauuccgggaauguggc

SEQ ID NO: 203574 - RNA, 19 nt, Artificial Sequence
  Description of Artificial Sequence: Synthetic oligonucleotide
  Sense strand starting at position 3646 of SEQ ID NO: 2623
gcagcaaacugucucuaca

SEQ ID NO: 203575 - RNA, 19 nt, Artificial Sequence
  Description of Artificial Sequence: Synthetic oligonucleotide
  Antisense strand to SEQ ID NO: 203574
uguagagacaguuugcugc

SEQ ID NO: 203576 - RNA, 19 nt, Artificial Sequence
  Description of Artificial Sequence: Synthetic oligonucleotide
  Sense strand starting at position 3648 of SEQ ID NO: 2623
agcaaacugucucuacagu

SEQ ID NO: 203577 - RNA, 19 nt, Artificial Sequence
  Description of Artificial Sequence: Synthetic oligonucleotide
  Antisense strand to SEQ ID NO: 203576
acuguagagacaguuugcu

SEQ ID NO: 203578 - RNA, 19 nt, Artificial Sequence
  Description of Artificial Sequence: Synthetic oligonucleotide
  Sense strand starting at position 3649 of SEQ ID NO: 2623
gcaaacugucucuacagua

SEQ ID NO: 203579 - RNA, 19 nt, Artificial Sequence
  Description of Artificial Sequence: Synthetic oligonucleotide
  Antisense strand to SEQ ID NO: 203578
uacuguagagacaguuugc

SEQ ID NO: 203580 - RNA, 19 nt, Artificial Sequence
  Description of Artificial Sequence: Synthetic oligonucleotide
  Sense strand starting at position 3808 of SEQ ID NO: 2623
uuaauuaacucggaggcca

SEQ ID NO: 203581 - RNA, 19 nt, Artificial Sequence
  Description of Artificial Sequence: Synthetic oligonucleotide
  Antisense strand to SEQ ID NO: 203580
uggccuccgaguuaauuaa

SEQ ID NO: 203582 - RNA, 19 nt, Artificial Sequence
  Description of Artificial Sequence: Synthetic oligonucleotide
  Sense strand starting at position 3820 of SEQ ID NO: 2623
gaggccaagcucuguacau

SEQ ID NO: 203583 - RNA, 19 nt, Artificial Sequence
  Description of Artificial Sequence: Synthetic oligonucleotide
  Antisense strand to SEQ ID NO: 203582
auguacagagcuuggccuc

SEQ ID NO: 203584 - RNA, 19 nt, Artificial Sequence
  Description of Artificial Sequence: Synthetic oligonucleotide
  Sense strand starting at position 3824 of SEQ ID NO: 2623
ccaagcucuguacauguau

SEQ ID NO: 203585 - RNA, 19 nt, Artificial Sequence
  Description of Artificial Sequence: Synthetic oligonucleotide
  Antisense strand to SEQ ID NO: 203584
auacauguacagagcuugg

SEQ ID NO: 203586 - RNA, 19 nt, Artificial Sequence
  Description of Artificial Sequence: Synthetic oligonucleotide
  Sense strand starting at position 3835 of SEQ ID NO: 2623
acauguaugacugggucaa

SEQ ID NO: 203587 - RNA, 19 nt, Artificial Sequence
  Description of Artificial Sequence: Synthetic oligonucleotide
  Antisense strand to SEQ ID NO: 203586
uugacccagucauacaugu

SEQ ID NO: 203588 - RNA, 19 nt, Artificial Sequence
  Description of Artificial Sequence: Synthetic oligonucleotide
  Sense strand starting at position 3836 of SEQ ID NO: 2623
cauguaugacugggucaac

SEQ ID NO: 203589 - RNA, 19 nt, Artificial Sequence
  Description of Artificial Sequence: Synthetic oligonucleotide
  Antisense strand to SEQ ID NO: 203588
guugacccagucauacaug

SEQ ID NO: 203590 - RNA, 19 nt, Artificial Sequence
  Description of Artificial Sequence: Synthetic oligonucleotide
  Sense strand starting at position 3837 of SEQ ID NO: 2623
auguaugacugggucaaca

SEQ ID NO: 203591 - RNA, 19 nt, Artificial Sequence
  Description of Artificial Sequence: Synthetic oligonucleotide
  Antisense strand to SEQ ID NO: 203590
uguugacccagucauacau

SEQ ID NO: 203592 - RNA, 19 nt, Artificial Sequence
  Description of Artificial Sequence: Synthetic oligonucleotide
  Sense strand starting at position 3839 of SEQ ID NO: 2623
guaugacugggucaacagu

SEQ ID NO: 203593 - RNA, 19 nt, Artificial Sequence
  Description of Artificial Sequence: Synthetic oligonucleotide
  Antisense strand to SEQ ID NO: 203592
acuguugacccagucauac

SEQ ID NO: 203594 - RNA, 19 nt, Artificial Sequence
  Description of Artificial Sequence: Synthetic oligonucleotide
  Sense strand starting at position 3848 of SEQ ID NO: 2623
ggucaacaguucuauaauc

SEQ ID NO: 203595 - RNA, 19 nt, Artificial Sequence
  Description of Artificial Sequence: Synthetic oligonucleotide
  Antisense strand to SEQ ID NO: 203594
gauuauagaacuguugacc

SEQ ID NO: 203596 - RNA, 19 nt, Artificial Sequence
  Description of Artificial Sequence: Synthetic oligonucleotide
  Sense strand starting at position 3877 of SEQ ID NO: 2623
cuaauaauguuccagaaga

SEQ ID NO: 203597 - RNA, 19 nt, Artificial Sequence
  Description of Artificial Sequence: Synthetic oligonucleotide
  Antisense strand to SEQ ID NO: 203596
ucuucuggaacauuauuag

SEQ ID NO: 203598 - RNA, 19 nt, Artificial Sequence
  Description of Artificial Sequence: Synthetic oligonucleotide
  Sense strand starting at position 3969 of SEQ ID NO: 2623
guuaaugcauuguucuaua

SEQ ID NO: 203599 - RNA, 19 nt, Artificial Sequence
  Description of Artificial Sequence: Synthetic oligonucleotide
  Antisense strand to SEQ ID NO: 203598
uauagaacaaugcauuaac

SEQ ID NO: 203600 - RNA, 19 nt, Artificial Sequence
  Description of Artificial Sequence: Synthetic oligonucleotide
  Sense strand starting at position 3974 of SEQ ID NO: 2623
ugcauuguucuauaauggu

SEQ ID NO: 203601 - RNA, 19 nt, Artificial Sequence
  Description of Artificial Sequence: Synthetic oligonucleotide
  Antisense strand to SEQ ID NO: 203600
accauuauagaacaaugca

SEQ ID NO: 203602 - RNA, 19 nt, Artificial Sequence
  Description of Artificial Sequence: Synthetic oligonucleotide
  Sense strand starting at position 3980 of SEQ ID NO: 2623
guucuauaaugguggucau

SEQ ID NO: 203603 - RNA, 19 nt, Artificial Sequence
  Description of Artificial Sequence: Synthetic oligonucleotide
  Antisense strand to SEQ ID NO: 203602
augaccaccauuauagaac

SEQ ID NO: 203604 - RNA, 19 nt, Artificial Sequence
  Description of Artificial Sequence: Synthetic oligonucleotide
  Sense strand starting at position 3981 of SEQ ID NO: 2623
uucuauaaugguggucauu

SEQ ID NO: 203605 - RNA, 19 nt, Artificial Sequence
  Description of Artificial Sequence: Synthetic oligonucleotide
  Antisense strand to SEQ ID NO: 203604
aaugaccaccauuauagaa

SEQ ID NO: 203606 - RNA, 19 nt, Artificial Sequence
  Description of Artificial Sequence: Synthetic oligonucleotide
  Sense strand starting at position 3983 of SEQ ID NO: 2623
cuauaaugguggucauuaa

SEQ ID NO: 203607 - RNA, 19 nt, Artificial Sequence
  Description of Artificial Sequence: Synthetic oligonucleotide
  Antisense strand to SEQ ID NO: 203606
uuaaugaccaccauuauag

SEQ ID NO: 203608 - RNA, 19 nt, Artificial Sequence
  Description of Artificial Sequence: Synthetic oligonucleotide
  Sense strand starting at position 106 of SEQ ID NO: 2624
agguuacagcuccaagacu

SEQ ID NO: 203609 - RNA, 19 nt, Artificial Sequence
  Description of Artificial Sequence: Synthetic oligonucleotide
  Antisense strand to SEQ ID NO: 203608
agucuuggagcuguaaccu

SEQ ID NO: 203610 - RNA, 19 nt, Artificial Sequence
  Description of Artificial Sequence: Synthetic oligonucleotide
  Sense strand starting at position 348 of SEQ ID NO: 2624
auguaucuccugcacuaga

SEQ ID NO: 203611 - RNA, 19 nt, Artificial Sequence
  Description of Artificial Sequence: Synthetic oligonucleotide
  Antisense strand to SEQ ID NO: 203610
ucuagugcaggagauacau

SEQ ID NO: 203612 - RNA, 19 nt, Artificial Sequence
  Description of Artificial Sequence: Synthetic oligonucleotide
  Sense strand starting at position 843 of SEQ ID NO: 2624
cauagaaagugcgcaauau

SEQ ID NO: 203613 - RNA, 19 nt, Artificial Sequence
  Description of Artificial Sequence: Synthetic oligonucleotide
  Antisense strand to SEQ ID NO: 203612
auauugcgcacuuucuaug

SEQ ID NO: 203614 - RNA, 19 nt, Artificial Sequence
  Description of Artificial Sequence: Synthetic oligonucleotide
  Sense strand starting at position 847 of SEQ ID NO: 2624
gaaagugcgcaauauguua

SEQ ID NO: 203615 - RNA, 19 nt, Artificial Sequence
  Description of Artificial Sequence: Synthetic oligonucleotide
  Antisense strand to SEQ ID NO: 203614
uaacauauugcgcacuuuc

SEQ ID NO: 203616 - RNA, 19 nt, Artificial Sequence
  Description of Artificial Sequence: Synthetic oligonucleotide
  Sense strand starting at position 863 of SEQ ID NO: 2624
uuacuacaguccguaauuu

SEQ ID NO: 203617 - RNA, 19 nt, Artificial Sequence
  Description of Artificial Sequence: Synthetic oligonucleotide
  Antisense strand to SEQ ID NO: 203616
aaauuacggacuguaguaa

SEQ ID NO: 203618 - RNA, 19 nt, Artificial Sequence
  Description of Artificial Sequence: Synthetic oligonucleotide
  Sense strand starting at position 920 of SEQ ID NO: 2624
acauguuagcauuagauau

SEQ ID NO: 203619 - RNA, 19 nt, Artificial Sequence
  Description of Artificial Sequence: Synthetic oligonucleotide
  Antisense strand to SEQ ID NO: 203618
auaucuaaugcuaacaugu

SEQ ID NO: 203620 - RNA, 19 nt, Artificial Sequence
  Description of Artificial Sequence: Synthetic oligonucleotide
  Sense strand starting at position 927 of SEQ ID NO: 2624
agcauuagauaucuagcua

SEQ ID NO: 203621 - RNA, 19 nt, Artificial Sequence
  Description of Artificial Sequence: Synthetic oligonucleotide
  Antisense strand to SEQ ID NO: 203620
uagcuagauaucuaaugcu

SEQ ID NO: 203622 - RNA, 19 nt, Artificial Sequence
  Description of Artificial Sequence: Synthetic oligonucleotide
  Sense strand starting at position 941 of SEQ ID NO: 2624
agcuauacuuaaccugaga

SEQ ID NO: 203623 - RNA, 19 nt, Artificial Sequence
  Description of Artificial Sequence: Synthetic oligonucleotide
  Antisense strand to SEQ ID NO: 203622
ucucagguuaaguauagcu

SEQ ID NO: 203624 - RNA, 19 nt, Artificial Sequence
  Description of Artificial Sequence: Synthetic oligonucleotide
  Sense strand starting at position 1029 of SEQ ID NO: 2624
aggugagguccaugauaag

SEQ ID NO: 203625 - RNA, 19 nt, Artificial Sequence
  Description of Artificial Sequence: Synthetic oligonucleotide
  Antisense strand to SEQ ID NO: 203624
cuuaucauggaccucaccu

SEQ ID NO: 203626 - RNA, 19 nt, Artificial Sequence
  Description of Artificial Sequence: Synthetic oligonucleotide
  Sense strand starting at position 1115 of SEQ ID NO: 2624
gccauuaauccaggaaucu

SEQ ID NO: 203627 - RNA, 19 nt, Artificial Sequence
  Description of Artificial Sequence: Synthetic oligonucleotide
  Antisense strand to SEQ ID NO: 203626
agauuccuggauuaauggc

SEQ ID NO: 203628 - RNA, 19 nt, Artificial Sequence
  Description of Artificial Sequence: Synthetic oligonucleotide
  Sense strand starting at position 1124 of SEQ ID NO: 2624
ccaggaaucuuagcuuuag

SEQ ID NO: 203629 - RNA, 19 nt, Artificial Sequence
  Description of Artificial Sequence: Synthetic oligonucleotide
  Antisense strand to SEQ ID NO: 203628
cuaaagcuaagauuccugg

SEQ ID NO: 203630 - RNA, 19 nt, Artificial Sequence
  Description of Artificial Sequence: Synthetic oligonucleotide
  Sense strand starting at position 1133 of SEQ ID NO: 2624
uuagcuuuagcguuucuca

SEQ ID NO: 203631 - RNA, 19 nt, Artificial Sequence
  Description of Artificial Sequence: Synthetic oligonucleotide
  Antisense strand to SEQ ID NO: 203630
ugagaaacgcuaaagcuaa

SEQ ID NO: 203632 - RNA, 19 nt, Artificial Sequence
  Description of Artificial Sequence: Synthetic oligonucleotide
  Sense strand starting at position 1198 of SEQ ID NO: 2624
ggagguuucuaaccacuuu

SEQ ID NO: 203633 - RNA, 19 nt, Artificial Sequence
  Description of Artificial Sequence: Synthetic oligonucleotide
  Antisense strand to SEQ ID NO: 203632
aaagugguuagaaaccucc

SEQ ID NO: 203634 - RNA, 19 nt, Artificial Sequence
  Description of Artificial Sequence: Synthetic oligonucleotide
  Sense strand starting at position 1291 of SEQ ID NO: 2624
gacuccuucuuguugguga

SEQ ID NO: 203635 - RNA, 19 nt, Artificial Sequence
  Description of Artificial Sequence: Synthetic oligonucleotide
  Antisense strand to SEQ ID NO: 203634
ucaccaacaagaaggaguc

SEQ ID NO: 203636 - RNA, 19 nt, Artificial Sequence
  Description of Artificial Sequence: Synthetic oligonucleotide
  Sense strand starting at position 1296 of SEQ ID NO: 2624
cuucuuguuggugacugau

SEQ ID NO: 203637 - RNA, 19 nt, Artificial Sequence
  Description of Artificial Sequence: Synthetic oligonucleotide
  Antisense strand to SEQ ID NO: 203636
aucagucaccaacaagaag

SEQ ID NO: 203638 - RNA, 19 nt, Artificial Sequence
  Description of Artificial Sequence: Synthetic oligonucleotide
  Sense strand starting at position 1298 of SEQ ID NO: 2624
ucuuguuggugacugauau

SEQ ID NO: 203639 - RNA, 19 nt, Artificial Sequence
  Description of Artificial Sequence: Synthetic oligonucleotide
  Antisense strand to SEQ ID NO: 203638
auaucagucaccaacaaga

SEQ ID NO: 203640 - RNA, 19 nt, Artificial Sequence
  Description of Artificial Sequence: Synthetic oligonucleotide
  Sense strand starting at position 1299 of SEQ ID NO: 2624
cuuguuggugacugauaug

SEQ ID NO: 203641 - RNA, 19 nt, Artificial Sequence
  Description of Artificial Sequence: Synthetic oligonucleotide
  Antisense strand to SEQ ID NO: 203640
cauaucagucaccaacaag

SEQ ID NO: 203642 - RNA, 19 nt, Artificial Sequence
  Description of Artificial Sequence: Synthetic oligonucleotide
  Sense strand starting at position 1348 of SEQ ID NO: 2624
aaaguuugcgcgguuagua

SEQ ID NO: 203643 - RNA, 19 nt, Artificial Sequence
  Description of Artificial Sequence: Synthetic oligonucleotide
  Antisense strand to SEQ ID NO: 203642
uacuaaccgcgcaaacuuu

SEQ ID NO: 203644 - RNA, 19 nt, Artificial Sequence
  Description of Artificial Sequence: Synthetic oligonucleotide
  Sense strand starting at position 1349 of SEQ ID NO: 2624
aaguuugcgcgguuaguaa

SEQ ID NO: 203645 - RNA, 19 nt, Artificial Sequence
  Description of Artificial Sequence: Synthetic oligonucleotide
  Antisense strand to SEQ ID NO: 203644
uuacuaaccgcgcaaacuu

SEQ ID NO: 203646 - RNA, 19 nt, Artificial Sequence
  Description of Artificial Sequence: Synthetic oligonucleotide
  Sense strand starting at position 1412 of SEQ ID NO: 2624
ugaggauucuagcuugaau

SEQ ID NO: 203647 - RNA, 19 nt, Artificial Sequence
  Description of Artificial Sequence: Synthetic oligonucleotide
  Antisense strand to SEQ ID NO: 203646
auucaagcuagaauccuca

SEQ ID NO: 203648 - RNA, 19 nt, Artificial Sequence
  Description of Artificial Sequence: Synthetic oligonucleotide
  Sense strand starting at position 1455 of SEQ ID NO: 2624
cacacugugggucgauauu

SEQ ID NO: 203649 - RNA, 19 nt, Artificial Sequence
  Description of Artificial Sequence: Synthetic oligonucleotide
  Antisense strand to SEQ ID NO: 203648
aauaucgacccacagugug

SEQ ID NO: 203650 - RNA, 19 nt, Artificial Sequence
  Description of Artificial Sequence: Synthetic oligonucleotide
  Sense strand starting at position 1517 of SEQ ID NO: 2624
acguuccuuccaugaaacu

SEQ ID NO: 203651 - RNA, 19 nt, Artificial Sequence
  Description of Artificial Sequence: Synthetic oligonucleotide
  Antisense strand to SEQ ID NO: 203650
aguuucauggaaggaacgu

SEQ ID NO: 203652 - RNA, 19 nt, Artificial Sequence
  Description of Artificial Sequence: Synthetic oligonucleotide
  Sense strand starting at position 1842 of SEQ ID NO: 2624
ccucuacaggguugaagau

SEQ ID NO: 203653 - RNA, 19 nt, Artificial Sequence
  Description of Artificial Sequence: Synthetic oligonucleotide
  Antisense strand to SEQ ID NO: 203652
aucuucaacccuguagagg

SEQ ID NO: 203654 - RNA, 19 nt, Artificial Sequence
  Description of Artificial Sequence: Synthetic oligonucleotide
  Sense strand starting at position 1851 of SEQ ID NO: 2624
gguugaagaucccucggga

SEQ ID NO: 203655 - RNA, 19 nt, Artificial Sequence
  Description of Artificial Sequence: Synthetic oligonucleotide
  Antisense strand to SEQ ID NO: 203654
ucccgagggaucuucaacc

SEQ ID NO: 203656 - RNA, 19 nt, Artificial Sequence
  Description of Artificial Sequence: Synthetic oligonucleotide
  Sense strand starting at position 1854 of SEQ ID NO: 2624
ugaagaucccucgggaauc

SEQ ID NO: 203657 - RNA, 19 nt, Artificial Sequence
  Description of Artificial Sequence: Synthetic oligonucleotide
  Antisense strand to SEQ ID NO: 203656
gauucccgagggaucuuca

SEQ ID NO: 203658 - RNA, 19 nt, Artificial Sequence
  Description of Artificial Sequence: Synthetic oligonucleotide
  Sense strand starting at position 2091 of SEQ ID NO: 2624
agcucuuucgcgucguuaa

SEQ ID NO: 203659 - RNA, 19 nt, Artificial Sequence
  Description of Artificial Sequence: Synthetic oligonucleotide
  Antisense strand to SEQ ID NO: 203658
uuaacgacgcgaaagagcu

SEQ ID NO: 203660 - RNA, 19 nt, Artificial Sequence
  Description of Artificial Sequence: Synthetic oligonucleotide
  Sense strand starting at position 2101 of SEQ ID NO: 2624
cgucguuaagccgauuuga

SEQ ID NO: 203661 - RNA, 19 nt, Artificial Sequence
  Description of Artificial Sequence: Synthetic oligonucleotide
  Antisense strand to SEQ ID NO: 203660
ucaaaucggcuuaacgacg

SEQ ID NO: 203662 - RNA, 19 nt, Artificial Sequence
  Description of Artificial Sequence: Synthetic oligonucleotide
  Sense strand starting at position 2591 of SEQ ID NO: 2624
ccugcugugcaguaacaaa

SEQ ID NO: 203663 - RNA, 19 nt, Artificial Sequence
  Description of Artificial Sequence: Synthetic oligonucleotide
  Antisense strand to SEQ ID NO: 203662
uuuguuacugcacagcagg

SEQ ID NO: 203664 - RNA, 19 nt, Artificial Sequence
  Description of Artificial Sequence: Synthetic oligonucleotide
  Sense strand starting at position 2628 of SEQ ID NO: 2624
cagaguuugcagcagggaa

SEQ ID NO: 203665 - RNA, 19 nt, Artificial Sequence
  Description of Artificial Sequence: Synthetic oligonucleotide
  Antisense strand to SEQ ID NO: 203664
uucccugcugcaaacucug

SEQ ID NO: 203666 - RNA, 19 nt, Artificial Sequence
  Description of Artificial Sequence: Synthetic oligonucleotide
  Sense strand starting at position 2684 of SEQ ID NO: 2624
ggaagagauccucgaaucu

SEQ ID NO: 203667 - RNA, 19 nt, Artificial Sequence
  Description of Artificial Sequence: Synthetic oligonucleotide
  Antisense strand to SEQ ID NO: 203666
agauucgaggaucucuucc

SEQ ID NO: 203668 - RNA, 19 nt, Artificial Sequence
  Description of Artificial Sequence: Synthetic oligonucleotide
  Sense strand starting at position 2712 of SEQ ID NO: 2624
agaguucugggcugagguu

SEQ ID NO: 203669 - RNA, 19 nt, Artificial Sequence
  Description of Artificial Sequence: Synthetic oligonucleotide
  Antisense strand to SEQ ID NO: 203668
aaccucagcccagaacucu

SEQ ID NO: 203670 - RNA, 19 nt, Artificial Sequence
  Description of Artificial Sequence: Synthetic oligonucleotide
  Sense strand starting at position 2773 of SEQ ID NO: 2624
ccuugauuggucggaguaa

SEQ ID NO: 203671 - RNA, 19 nt, Artificial Sequence
  Description of Artificial Sequence: Synthetic oligonucleotide
  Antisense strand to SEQ ID NO: 203670
uuacuccgaccaaucaagg

SEQ ID NO: 203672 - RNA, 19 nt, Artificial Sequence
  Description of Artificial Sequence: Synthetic oligonucleotide
  Sense strand starting at position 2967 of SEQ ID NO: 2624
ucaaguuguucucuauaga

SEQ ID NO: 203673 - RNA, 19 nt, Artificial Sequence
  Description of Artificial Sequence: Synthetic oligonucleotide
  Antisense strand to SEQ ID NO: 203672
ucuauagagaacaacuuga

SEQ ID NO: 203674 - RNA, 19 nt, Artificial Sequence
  Description of Artificial Sequence: Synthetic oligonucleotide
  Sense strand starting at position 2968 of SEQ ID NO: 2624
caaguuguucucuauagag

SEQ ID NO: 203675 - RNA, 19 nt, Artificial Sequence
  Description of Artificial Sequence: Synthetic oligonucleotide
  Antisense strand to SEQ ID NO: 203674
cucuauagagaacaacuug

SEQ ID NO: 203676 - RNA, 19 nt, Artificial Sequence
  Description of Artificial Sequence: Synthetic oligonucleotide
  Sense strand starting at position 2970 of SEQ ID NO: 2624
aguuguucucuauagagca

SEQ ID NO: 203677 - RNA, 19 nt, Artificial Sequence
  Description of Artificial Sequence: Synthetic oligonucleotide
  Antisense strand to SEQ ID NO: 203676
ugcucuauagagaacaacu

SEQ ID NO: 203678 - RNA, 19 nt, Artificial Sequence
  Description of Artificial Sequence: Synthetic oligonucleotide
  Sense strand starting at position 3014 of SEQ ID NO: 2624
cagggucugcaugauucua

SEQ ID NO: 203679 - RNA, 19 nt, Artificial Sequence
  Description of Artificial Sequence: Synthetic oligonucleotide
  Antisense strand to SEQ ID NO: 203678
uagaaucaugcagacccug

SEQ ID NO: 203680 - RNA, 19 nt, Artificial Sequence
  Description of Artificial Sequence: Synthetic oligonucleotide
  Sense strand starting at position 3337 of SEQ ID NO: 2624
ccuuccuuugccuggaaca

SEQ ID NO: 203681 - RNA, 19 nt, Artificial Sequence
  Description of Artificial Sequence: Synthetic oligonucleotide
  Antisense strand to SEQ ID NO: 203680
uguuccaggcaaaggaagg

SEQ ID NO: 203682 - RNA, 19 nt, Artificial Sequence
  Description of Artificial Sequence: Synthetic oligonucleotide
  Sense strand starting at position 3805 of SEQ ID NO: 2624
ugaucuaucuaguugacug

SEQ ID NO: 203683 - RNA, 19 nt, Artificial Sequence
  Description of Artificial Sequence: Synthetic oligonucleotide
  Antisense strand to SEQ ID NO: 203682
cagucaacuagauagauca

SEQ ID NO: 203684 - RNA, 19 nt, Artificial Sequence
  Description of Artificial Sequence: Synthetic oligonucleotide
  Sense strand starting at position 3813 of SEQ ID NO: 2624
cuaguugacugcuuugaac

SEQ ID NO: 203685 - RNA, 19 nt, Artificial Sequence
  Description of Artificial Sequence: Synthetic oligonucleotide
  Antisense strand to SEQ ID NO: 203684
guucaaagcagucaacuag

SEQ ID NO: 203686 - RNA, 19 nt, Artificial Sequence
  Description of Artificial Sequence: Synthetic oligonucleotide
  Sense strand starting at position 3815 of SEQ ID NO: 2624
aguugacugcuuugaacaa

SEQ ID NO: 203687 - RNA, 19 nt, Artificial Sequence
  Description of Artificial Sequence: Synthetic oligonucleotide
  Antisense strand to SEQ ID NO: 203686
uuguucaaagcagucaacu

SEQ ID NO: 203688 - RNA, 19 nt, Artificial Sequence
  Description of Artificial Sequence: Synthetic oligonucleotide
  Sense strand starting at position 50 of SEQ ID NO: 2625
agagacgucugagaaagua

SEQ ID NO: 203689 - RNA, 19 nt, Artificial Sequence
  Description of Artificial Sequence: Synthetic oligonucleotide
  Antisense strand to SEQ ID NO: 203688
uacuuucucagacgucucu

SEQ ID NO: 203690 - RNA, 19 nt, Artificial Sequence
  Description of Artificial Sequence: Synthetic oligonucleotide
  Sense strand starting at position 617 of SEQ ID NO: 2625
augagagauugugagauuu

SEQ ID NO: 203691 - RNA, 19 nt, Artificial Sequence
  Description of Artificial Sequence: Synthetic oligonucleotide
  Antisense strand to SEQ ID NO: 203690
aaaucucacaaucucucau

SEQ ID NO: 203692 - RNA, 19 nt, Artificial Sequence
  Description of Artificial Sequence: Synthetic oligonucleotide
  Sense strand starting at position 693 of SEQ ID NO: 2625
gagcguuuggcuucgguuu

SEQ ID NO: 203693 - RNA, 19 nt, Artificial Sequence
  Description of Artificial Sequence: Synthetic oligonucleotide
  Antisense strand to SEQ ID NO: 203692
aaaccgaagccaaacgcuc

SEQ ID NO: 203694 - RNA, 19 nt, Artificial Sequence
  Description of Artificial Sequence: Synthetic oligonucleotide
  Sense strand starting at position 773 of SEQ ID NO: 2625
uuauuuaugugccagucuu

SEQ ID NO: 203695 - RNA, 19 nt, Artificial Sequence
  Description of Artificial Sequence: Synthetic oligonucleotide
  Antisense strand to SEQ ID NO: 203694
aagacuggcacauaaauaa

SEQ ID NO: 203696 - RNA, 19 nt, Artificial Sequence
  Description of Artificial Sequence: Synthetic oligonucleotide
  Sense strand starting at position 1131 of SEQ ID NO: 2625
gccacuuucucacuauugu

SEQ ID NO: 203697 - RNA, 19 nt, Artificial Sequence
  Description of Artificial Sequence: Synthetic oligonucleotide
  Antisense strand to SEQ ID NO: 203696
acaauagugagaaaguggc

SEQ ID NO: 203698 - RNA, 19 nt, Artificial Sequence
  Description of Artificial Sequence: Synthetic oligonucleotide
  Sense strand starting at position 1338 of SEQ ID NO: 2625
gcaugugaguuguucgcaa

SEQ ID NO: 203699 - RNA, 19 nt, Artificial Sequence
  Description of Artificial Sequence: Synthetic oligonucleotide
  Antisense strand to SEQ ID NO: 203698
uugcgaacaacucacaugc

SEQ ID NO: 203700 - RNA, 19 nt, Artificial Sequence
  Description of Artificial Sequence: Synthetic oligonucleotide
  Sense strand starting at position 1404 of SEQ ID NO: 2625
guggaaucauugcauuccu

SEQ ID NO: 203701 - RNA, 19 nt, Artificial Sequence
  Description of Artificial Sequence: Synthetic oligonucleotide
  Antisense strand to SEQ ID NO: 203700
aggaaugcaaugauuccac

SEQ ID NO: 203702 - RNA, 19 nt, Artificial Sequence
  Description of Artificial Sequence: Synthetic oligonucleotide
  Sense strand starting at position 1500 of SEQ ID NO: 2625
aggugcgugcugucucaaa

SEQ ID NO: 203703 - RNA, 19 nt, Artificial Sequence
  Description of Artificial Sequence: Synthetic oligonucleotide
  Antisense strand to SEQ ID NO: 203702
uuugagacagcacgcaccu

SEQ ID NO: 203704 - RNA, 19 nt, Artificial Sequence
  Description of Artificial Sequence: Synthetic oligonucleotide
  Sense strand starting at position 1664 of SEQ ID NO: 2625
cugcgcgcucucgugauua

SEQ ID NO: 203705 - RNA, 19 nt, Artificial Sequence
  Description of Artificial Sequence: Synthetic oligonucleotide
  Antisense strand to SEQ ID NO: 203704
uaaucacgagagcgcgcag

SEQ ID NO: 203706 - RNA, 19 nt, Artificial Sequence
  Description of Artificial Sequence: Synthetic oligonucleotide
  Sense strand starting at position 1666 of SEQ ID NO: 2625
gcgcgcucucgugauuauu

SEQ ID NO: 203707 - RNA, 19 nt, Artificial Sequence
  Description of Artificial Sequence: Synthetic oligonucleotide
  Antisense strand to SEQ ID NO: 203706
aauaaucacgagagcgcgc

SEQ ID NO: 203708 - RNA, 19 nt, Artificial Sequence
  Description of Artificial Sequence: Synthetic oligonucleotide
  Sense strand starting at position 1668 of SEQ ID NO: 2625
gcgcucucgugauuauuaa

SEQ ID NO: 203709 - RNA, 19 nt, Artificial Sequence
  Description of Artificial Sequence: Synthetic oligonucleotide
  Antisense strand to SEQ ID NO: 203708
uuaauaaucacgagagcgc

SEQ ID NO: 203710 - RNA, 19 nt, Artificial Sequence
  Description of Artificial Sequence: Synthetic oligonucleotide
  Sense strand starting at position 1669 of SEQ ID NO: 2625
cgcucucgugauuauuaau

SEQ ID NO: 203711 - RNA, 19 nt, Artificial Sequence
  Description of Artificial Sequence: Synthetic oligonucleotide
  Antisense strand to SEQ ID NO: 203710
auuaauaaucacgagagcg

SEQ ID NO: 203712 - RNA, 19 nt, Artificial Sequence
  Description of Artificial Sequence: Synthetic oligonucleotide
  Sense strand starting at position 1696 of SEQ ID NO: 2625
uuacuauuauuggguuacu

SEQ ID NO: 203713 - RNA, 19 nt, Artificial Sequence
  Description of Artificial Sequence: Synthetic oligonucleotide
  Antisense strand to SEQ ID NO: 203712
aguaacccaauaauaguaa

SEQ ID NO: 203714 - RNA, 19 nt, Artificial Sequence
  Description of Artificial Sequence: Synthetic oligonucleotide
  Sense strand starting at position 1699 of SEQ ID NO: 2625
cuauuauuggguuacuuac

SEQ ID NO: 203715 - RNA, 19 nt, Artificial Sequence
  Description of Artificial Sequence: Synthetic oligonucleotide
  Antisense strand to SEQ ID NO: 203714
guaaguaacccaauaauag

SEQ ID NO: 203716 - RNA, 19 nt, Artificial Sequence
  Description of Artificial Sequence: Synthetic oligonucleotide
  Sense strand starting at position 1706 of SEQ ID NO: 2625
uggguuacuuacgcgagaa

SEQ ID NO: 203717 - RNA, 19 nt, Artificial Sequence
  Description of Artificial Sequence: Synthetic oligonucleotide
  Antisense strand to SEQ ID NO: 203716
uucucgcguaaguaaccca

SEQ ID NO: 203718 - RNA, 19 nt, Artificial Sequence
  Description of Artificial Sequence: Synthetic oligonucleotide
  Sense strand starting at position 1707 of SEQ ID NO: 2625
ggguuacuuacgcgagaau

SEQ ID NO: 203719 - RNA, 19 nt, Artificial Sequence
  Description of Artificial Sequence: Synthetic oligonucleotide
  Antisense strand to SEQ ID NO: 203718
auucucgcguaaguaaccc

SEQ ID NO: 203720 - RNA, 19 nt, Artificial Sequence
  Description of Artificial Sequence: Synthetic oligonucleotide
  Sense strand starting at position 1708 of SEQ ID NO: 2625
gguuacuuacgcgagaauu

SEQ ID NO: 203721 - RNA, 19 nt, Artificial Sequence
  Description of Artificial Sequence: Synthetic oligonucleotide
  Antisense strand to SEQ ID NO: 203720
aauucucgcguaaguaacc

SEQ ID NO: 203722 - RNA, 19 nt, Artificial Sequence
  Description of Artificial Sequence: Synthetic oligonucleotide
  Sense strand starting at position 1718 of SEQ ID NO: 2625
gcgagaauucccguuugcu

SEQ ID NO: 203723 - RNA, 19 nt, Artificial Sequence
  Description of Artificial Sequence: Synthetic oligonucleotide
  Antisense strand to SEQ ID NO: 203722
agcaaacgggaauucucgc

SEQ ID NO: 203724 - RNA, 19 nt, Artificial Sequence
  Description of Artificial Sequence: Synthetic oligonucleotide
  Sense strand starting at position 1721 of SEQ ID NO: 2625
agaauucccguuugcuuaa

SEQ ID NO: 203725 - RNA, 19 nt, Artificial Sequence
  Description of Artificial Sequence: Synthetic oligonucleotide
  Antisense strand to SEQ ID NO: 203724
uuaagcaaacgggaauucu

SEQ ID NO: 203726 - RNA, 19 nt, Artificial Sequence
  Description of Artificial Sequence: Synthetic oligonucleotide
  Sense strand starting at position 2122 of SEQ ID NO: 2625
gaacuugaacgucaggagu

SEQ ID NO: 203727 - RNA, 19 nt, Artificial Sequence
  Description of Artificial Sequence: Synthetic oligonucleotide
  Antisense strand to SEQ ID NO: 203726
acuccugacguucaaguuc

SEQ ID NO: 203728 - RNA, 19 nt, Artificial Sequence
  Description of Artificial Sequence: Synthetic oligonucleotide
  Sense strand starting at position 2719 of SEQ ID NO: 2625
ggcugcgcucgggaaacuu

SEQ ID NO: 203729 - RNA, 19 nt, Artificial Sequence
  Description of Artificial Sequence: Synthetic oligonucleotide
  Antisense strand to SEQ ID NO: 203728
aaguuucccgagcgcagcc

SEQ ID NO: 203730 - RNA, 19 nt, Artificial Sequence
  Description of Artificial Sequence: Synthetic oligonucleotide
  Sense strand starting at position 2729 of SEQ ID NO: 2625
gggaaacuuugcccgagga

SEQ ID NO: 203731 - RNA, 19 nt, Artificial Sequence
  Description of Artificial Sequence: Synthetic oligonucleotide
  Antisense strand to SEQ ID NO: 203730
uccucgggcaaaguuuccc

SEQ ID NO: 203732 - RNA, 19 nt, Artificial Sequence
  Description of Artificial Sequence: Synthetic oligonucleotide
  Sense strand starting at position 2846 of SEQ ID NO: 2625
cggaauccagccuaaguuu

SEQ ID NO: 203733 - RNA, 19 nt, Artificial Sequence
  Description of Artificial Sequence: Synthetic oligonucleotide
  Antisense strand to SEQ ID NO: 203732
aaacuuaggcuggauuccg

SEQ ID NO: 203734 - RNA, 19 nt, Artificial Sequence
  Description of Artificial Sequence: Synthetic oligonucleotide
  Sense strand starting at position 3333 of SEQ ID NO: 2625
guuucuuacgggcagagca

SEQ ID NO: 203735 - RNA, 19 nt, Artificial Sequence
  Description of Artificial Sequence: Synthetic oligonucleotide
  Antisense strand to SEQ ID NO: 203734
ugcucugcccguaagaaac

SEQ ID NO: 203736 - RNA, 19 nt, Artificial Sequence
  Description of Artificial Sequence: Synthetic oligonucleotide
  Sense strand starting at position 3353 of SEQ ID NO: 2625
aacuguuccugugcuguua

SEQ ID NO: 203737 - RNA, 19 nt, Artificial Sequence
  Description of Artificial Sequence: Synthetic oligonucleotide
  Antisense strand to SEQ ID NO: 203736
uaacagcacaggaacaguu

SEQ ID NO: 203738 - RNA, 19 nt, Artificial Sequence
  Description of Artificial Sequence: Synthetic oligonucleotide
  Sense strand starting at position 3362 of SEQ ID NO: 2625
ugugcuguuacccagggaa

SEQ ID NO: 203739 - RNA, 19 nt, Artificial Sequence
  Description of Artificial Sequence: Synthetic oligonucleotide
  Antisense strand to SEQ ID NO: 203738
uucccuggguaacagcaca

SEQ ID NO: 203740 - RNA, 19 nt, Artificial Sequence
  Description of Artificial Sequence: Synthetic oligonucleotide
  Sense strand starting at position 3364 of SEQ ID NO: 2625
ugcuguuacccagggaaag

SEQ ID NO: 203741 - RNA, 19 nt, Artificial Sequence
  Description of Artificial Sequence: Synthetic oligonucleotide
  Antisense strand to SEQ ID NO: 203740
cuuucccuggguaacagca

SEQ ID NO: 203742 - RNA, 19 nt, Artificial Sequence
  Description of Artificial Sequence: Synthetic oligonucleotide
  Sense strand starting at position 3365 of SEQ ID NO: 2625
gcuguuacccagggaaaga

SEQ ID NO: 203743 - RNA, 19 nt, Artificial Sequence
  Description of Artificial Sequence: Synthetic oligonucleotide
  Antisense strand to SEQ ID NO: 203742
ucuuucccuggguaacagc

SEQ ID NO: 203744 - RNA, 19 nt, Artificial Sequence
  Description of Artificial Sequence: Synthetic oligonucleotide
  Sense strand starting at position 3533 of SEQ ID NO: 2625
ugcagacguucccuggaaa

SEQ ID NO: 203745 - RNA, 19 nt, Artificial Sequence
  Description of Artificial Sequence: Synthetic oligonucleotide
  Antisense strand to SEQ ID NO: 203744
uuuccagggaacgucugca

SEQ ID NO: 203746 - RNA, 19 nt, Artificial Sequence
  Description of Artificial Sequence: Synthetic oligonucleotide
  Sense strand starting at position 3534 of SEQ ID NO: 2625
gcagacguucccuggaaau

SEQ ID NO: 203747 - RNA, 19 nt, Artificial Sequence
  Description of Artificial Sequence: Synthetic oligonucleotide
  Antisense strand to SEQ ID NO: 203746
auuuccagggaacgucugc

SEQ ID NO: 203748 - RNA, 19 nt, Artificial Sequence
  Description of Artificial Sequence: Synthetic oligonucleotide
  Sense strand starting at position 3536 of SEQ ID NO: 2625
agacguucccuggaaauua

SEQ ID NO: 203749 - RNA, 19 nt, Artificial Sequence
  Description of Artificial Sequence: Synthetic oligonucleotide
  Antisense strand to SEQ ID NO: 203748
uaauuuccagggaacgucu

SEQ ID NO: 203750 - RNA, 19 nt, Artificial Sequence
  Description of Artificial Sequence: Synthetic oligonucleotide
  Sense strand starting at position 3557 of SEQ ID NO: 2625
gaagaccuguuggaaauaa

SEQ ID NO: 203751 - RNA, 19 nt, Artificial Sequence
  Description of Artificial Sequence: Synthetic oligonucleotide
  Antisense strand to SEQ ID NO: 203750
uuauuuccaacaggucuuc

SEQ ID NO: 203752 - RNA, 19 nt, Artificial Sequence
  Description of Artificial Sequence: Synthetic oligonucleotide
  Sense strand starting at position 3640 of SEQ ID NO: 2625
uucacucuggcgugggaua

SEQ ID NO: 203753 - RNA, 19 nt, Artificial Sequence
  Description of Artificial Sequence: Synthetic oligonucleotide
  Antisense strand to SEQ ID NO: 203752
uaucccacgccagagugaa

SEQ ID NO: 203754 - RNA, 19 nt, Artificial Sequence
  Description of Artificial Sequence: Synthetic oligonucleotide
  Sense strand starting at position 3716 of SEQ ID NO: 2625
ucagaaacgugccuguaaa

SEQ ID NO: 203755 - RNA, 19 nt, Artificial Sequence
  Description of Artificial Sequence: Synthetic oligonucleotide
  Antisense strand to SEQ ID NO: 203754
uuuacaggcacguuucuga

SEQ ID NO: 203756 - RNA, 19 nt, Artificial Sequence
  Description of Artificial Sequence: Synthetic oligonucleotide
  Sense strand starting at position 3717 of SEQ ID NO: 2625
cagaaacgugccuguaaag

SEQ ID NO: 203757 - RNA, 19 nt, Artificial Sequence
  Description of Artificial Sequence: Synthetic oligonucleotide
  Antisense strand to SEQ ID NO: 203756
cuuuacaggcacguuucug

SEQ ID NO: 203758 - RNA, 19 nt, Artificial Sequence
  Description of Artificial Sequence: Synthetic oligonucleotide
  Sense strand starting at position 3823 of SEQ ID NO: 2625
gauuccaaaucuggaagga

SEQ ID NO: 203759 - RNA, 19 nt, Artificial Sequence
  Description of Artificial Sequence: Synthetic oligonucleotide
  Antisense strand to SEQ ID NO: 203758
uccuuccagauuuggaauc

SEQ ID NO: 203760 - RNA, 19 nt, Artificial Sequence
  Description of Artificial Sequence: Synthetic oligonucleotide
  Sense strand starting at position 3937 of SEQ ID NO: 2625
gguggauaugugugagugu

SEQ ID NO: 203761 - RNA, 19 nt, Artificial Sequence
  Description of Artificial Sequence: Synthetic oligonucleotide
  Antisense strand to SEQ ID NO: 203760
acacucacacauauccacc

SEQ ID NO: 203762 - RNA, 19 nt, Artificial Sequence
  Description of Artificial Sequence: Synthetic oligonucleotide
  Sense strand starting at position 3939 of SEQ ID NO: 2625
uggauaugugugagugugu

SEQ ID NO: 203763 - RNA, 19 nt, Artificial Sequence
  Description of Artificial Sequence: Synthetic oligonucleotide
  Antisense strand to SEQ ID NO: 203762
acacacucacacauaucca

SEQ ID NO: 203764 - RNA, 19 nt, Artificial Sequence
  Description of Artificial Sequence: Synthetic oligonucleotide
  Sense strand starting at position 3946 of SEQ ID NO: 2625
gugugagugugucugcaga

SEQ ID NO: 203765 - RNA, 19 nt, Artificial Sequence
  Description of Artificial Sequence: Synthetic oligonucleotide
  Antisense strand to SEQ ID NO: 203764
ucugcagacacacucacac

SEQ ID NO: 203766 - RNA, 19 nt, Artificial Sequence
  Description of Artificial Sequence: Synthetic oligonucleotide
  Sense strand starting at position 3950 of SEQ ID NO: 2625
gagugugucugcagagcga

SEQ ID NO: 203767 - RNA, 19 nt, Artificial Sequence
  Description of Artificial Sequence: Synthetic oligonucleotide
  Antisense strand to SEQ ID NO: 203766
ucgcucugcagacacacuc

SEQ ID NO: 203768 - RNA, 19 nt, Artificial Sequence
  Description of Artificial Sequence: Synthetic oligonucleotide
  Sense strand starting at position 442 of SEQ ID NO: 2626
cgaggcgauuguugacaaa

SEQ ID NO: 203769 - RNA, 19 nt, Artificial Sequence
  Description of Artificial Sequence: Synthetic oligonucleotide
  Antisense strand to SEQ ID NO: 203768
uuugucaacaaucgccucg

SEQ ID NO: 203770 - RNA, 19 nt, Artificial Sequence
  Description of Artificial Sequence: Synthetic oligonucleotide
  Sense strand starting at position 445 of SEQ ID NO: 2626
ggcgauuguugacaaacuc

SEQ ID NO: 203771 - RNA, 19 nt, Artificial Sequence
  Description of Artificial Sequence: Synthetic oligonucleotide
  Antisense strand to SEQ ID NO: 203770
gaguuugucaacaaucgcc

SEQ ID NO: 203772 - RNA, 19 nt, Artificial Sequence
  Description of Artificial Sequence: Synthetic oligonucleotide
  Sense strand starting at position 501 of SEQ ID NO: 2626
gccgcuucgucggaggauu

SEQ ID NO: 203773 - RNA, 19 nt, Artificial Sequence
  Description of Artificial Sequence: Synthetic oligonucleotide
  Antisense strand to SEQ ID NO: 203772
aauccuccgacgaagcggc

SEQ ID NO: 203774 - RNA, 19 nt, Artificial Sequence
  Description of Artificial Sequence: Synthetic oligonucleotide
  Sense strand starting at position 603 of SEQ ID NO: 2626
gccagucaccuggagacaa

SEQ ID NO: 203775 - RNA, 19 nt, Artificial Sequence
  Description of Artificial Sequence: Synthetic oligonucleotide
  Antisense strand to SEQ ID NO: 203774
uugucuccaggugacuggc

SEQ ID NO: 203776 - RNA, 19 nt, Artificial Sequence
  Description of Artificial Sequence: Synthetic oligonucleotide
  Sense strand starting at position 837 of SEQ ID NO: 2626
gcgaccaucgaguaaauuc

SEQ ID NO: 203777 - RNA, 19 nt, Artificial Sequence
  Description of Artificial Sequence: Synthetic oligonucleotide
  Antisense strand to SEQ ID NO: 203776
gaauuuacucgauggucgc

SEQ ID NO: 203778 - RNA, 19 nt, Artificial Sequence
  Description of Artificial Sequence: Synthetic oligonucleotide
  Sense strand starting at position 976 of SEQ ID NO: 2626
augcgugagccgcuaagau

SEQ ID NO: 203779 - RNA, 19 nt, Artificial Sequence
  Description of Artificial Sequence: Synthetic oligonucleotide
  Antisense strand to SEQ ID NO: 203778
aucuuagcggcucacgcau

SEQ ID NO: 203780 - RNA, 19 nt, Artificial Sequence
  Description of Artificial Sequence: Synthetic oligonucleotide
  Sense strand starting at position 978 of SEQ ID NO: 2626
gcgugagccgcuaagauag

SEQ ID NO: 203781 - RNA, 19 nt, Artificial Sequence
  Description of Artificial Sequence: Synthetic oligonucleotide
  Antisense strand to SEQ ID NO: 203780
cuaucuuagcggcucacgc

SEQ ID NO: 203782 - RNA, 19 nt, Artificial Sequence
  Description of Artificial Sequence: Synthetic oligonucleotide
  Sense strand starting at position 1071 of SEQ ID NO: 2626
cuagauuucucgcugccag

SEQ ID NO: 203783 - RNA, 19 nt, Artificial Sequence
  Description of Artificial Sequence: Synthetic oligonucleotide
  Antisense strand to SEQ ID NO: 203782
cuggcagcgagaaaucuag

SEQ ID NO: 203784 - RNA, 19 nt, Artificial Sequence
  Description of Artificial Sequence: Synthetic oligonucleotide
  Sense strand starting at position 1143 of SEQ ID NO: 2626
ccagguacgcuugagaaag

SEQ ID NO: 203785 - RNA, 19 nt, Artificial Sequence
  Description of Artificial Sequence: Synthetic oligonucleotide
  Antisense strand to SEQ ID NO: 203784
cuuucucaagcguaccugg

SEQ ID NO: 203786 - RNA, 19 nt, Artificial Sequence
  Description of Artificial Sequence: Synthetic oligonucleotide
  Sense strand starting at position 1179 of SEQ ID NO: 2626
ccgaaaccuuggccugaau

SEQ ID NO: 203787 - RNA, 19 nt, Artificial Sequence
  Description of Artificial Sequence: Synthetic oligonucleotide
  Antisense strand to SEQ ID NO: 203786
auucaggccaagguuucgg

SEQ ID NO: 203788 - RNA, 19 nt, Artificial Sequence
  Description of Artificial Sequence: Synthetic oligonucleotide
  Sense strand starting at position 1181 of SEQ ID NO: 2626
gaaaccuuggccugaauga

SEQ ID NO: 203789 - RNA, 19 nt, Artificial Sequence
  Description of Artificial Sequence: Synthetic oligonucleotide
  Antisense strand to SEQ ID NO: 203788
ucauucaggccaagguuuc

SEQ ID NO: 203790 - RNA, 19 nt, Artificial Sequence
  Description of Artificial Sequence: Synthetic oligonucleotide
  Sense strand starting at position 1211 of SEQ ID NO: 2626
agccgugucucgucaguua

SEQ ID NO: 203791 - RNA, 19 nt, Artificial Sequence
  Description of Artificial Sequence: Synthetic oligonucleotide
  Antisense strand to SEQ ID NO: 203790
uaacugacgagacacggcu

SEQ ID NO: 203792 - RNA, 19 nt, Artificial Sequence
  Description of Artificial Sequence: Synthetic oligonucleotide
  Sense strand starting at position 1214 of SEQ ID NO: 2626
cgugucucgucaguuaaau

SEQ ID NO: 203793 - RNA, 19 nt, Artificial Sequence
  Description of Artificial Sequence: Synthetic oligonucleotide
  Antisense strand to SEQ ID NO: 203792
auuuaacugacgagacacg

SEQ ID NO: 203794 - RNA, 19 nt, Artificial Sequence
  Description of Artificial Sequence: Synthetic oligonucleotide
  Sense strand starting at position 1216 of SEQ ID NO: 2626
ugucucgucaguuaaauca

SEQ ID NO: 203795 - RNA, 19 nt, Artificial Sequence
  Description of Artificial Sequence: Synthetic oligonucleotide
  Antisense strand to SEQ ID NO: 203794
ugauuuaacugacgagaca

SEQ ID NO: 203796 - RNA, 19 nt, Artificial Sequence
  Description of Artificial Sequence: Synthetic oligonucleotide
  Sense strand starting at position 1510 of SEQ ID NO: 2626
gcagguuccgcgugaacga

SEQ ID NO: 203797 - RNA, 19 nt, Artificial Sequence
  Description of Artificial Sequence: Synthetic oligonucleotide
  Antisense strand to SEQ ID NO: 203796
ucguucacgcggaaccugc

SEQ ID NO: 203798 - RNA, 19 nt, Artificial Sequence
  Description of Artificial Sequence: Synthetic oligonucleotide
  Sense strand starting at position 1715 of SEQ ID NO: 2626
ggagguauuuaccuugcgu

SEQ ID NO: 203799 - RNA, 19 nt, Artificial Sequence
  Description of Artificial Sequence: Synthetic oligonucleotide
  Antisense strand to SEQ ID NO: 203798
acgcaagguaaauaccucc

SEQ ID NO: 203800 - RNA, 19 nt, Artificial Sequence
  Description of Artificial Sequence: Synthetic oligonucleotide
  Sense strand starting at position 1717 of SEQ ID NO: 2626
agguauuuaccuugcguuu

SEQ ID NO: 203801 - RNA, 19 nt, Artificial Sequence
  Description of Artificial Sequence: Synthetic oligonucleotide
  Antisense strand to SEQ ID NO: 203800
aaacgcaagguaaauaccu

SEQ ID NO: 203802 - RNA, 19 nt, Artificial Sequence
  Description of Artificial Sequence: Synthetic oligonucleotide
  Sense strand starting at position 2213 of SEQ ID NO: 2626
uggcguguuuaccggagua

SEQ ID NO: 203803 - RNA, 19 nt, Artificial Sequence
  Description of Artificial Sequence: Synthetic oligonucleotide
  Antisense strand to SEQ ID NO: 203802
uacuccgguaaacacgcca

SEQ ID NO: 203804 - RNA, 19 nt, Artificial Sequence
  Description of Artificial Sequence: Synthetic oligonucleotide
  Sense strand starting at position 2215 of SEQ ID NO: 2626
gcguguuuaccggaguaac

SEQ ID NO: 203805 - RNA, 19 nt, Artificial Sequence
  Description of Artificial Sequence: Synthetic oligonucleotide
  Antisense strand to SEQ ID NO: 203804
guuacuccgguaaacacgc

SEQ ID NO: 203806 - RNA, 19 nt, Artificial Sequence
  Description of Artificial Sequence: Synthetic oligonucleotide
  Sense strand starting at position 2458 of SEQ ID NO: 2626
cuggguugguccucgcgaa

SEQ ID NO: 203807 - RNA, 19 nt, Artificial Sequence
  Description of Artificial Sequence: Synthetic oligonucleotide
  Antisense strand to SEQ ID NO: 203806
uucgcgaggaccaacccag

SEQ ID NO: 203808 - RNA, 19 nt, Artificial Sequence
  Description of Artificial Sequence: Synthetic oligonucleotide
  Sense strand starting at position 2483 of SEQ ID NO: 2626
gggcgaggucuuugagcuc

SEQ ID NO: 203809 - RNA, 19 nt, Artificial Sequence
  Description of Artificial Sequence: Synthetic oligonucleotide
  Antisense strand to SEQ ID NO: 203808
gagcucaaagaccucgccc

SEQ ID NO: 203810 - RNA, 19 nt, Artificial Sequence
  Description of Artificial Sequence: Synthetic oligonucleotide
  Sense strand starting at position 2897 of SEQ ID NO: 2626
cgcagauaaccucguagga

SEQ ID NO: 203811 - RNA, 19 nt, Artificial Sequence
  Description of Artificial Sequence: Synthetic oligonucleotide
  Antisense strand to SEQ ID NO: 203810
uccuacgagguuaucugcg

SEQ ID NO: 203812 - RNA, 19 nt, Artificial Sequence
  Description of Artificial Sequence: Synthetic oligonucleotide
  Sense strand starting at position 3088 of SEQ ID NO: 2626
ucuccaguccucugagucu

SEQ ID NO: 203813 - RNA, 19 nt, Artificial Sequence
  Description of Artificial Sequence: Synthetic oligonucleotide
  Antisense strand to SEQ ID NO: 203812
agacucagaggacuggaga

SEQ ID NO: 203814 - RNA, 19 nt, Artificial Sequence
  Description of Artificial Sequence: Synthetic oligonucleotide
  Sense strand starting at position 3453 of SEQ ID NO: 2626
gccaaagucucagcgcauu

SEQ ID NO: 203815 - RNA, 19 nt, Artificial Sequence
  Description of Artificial Sequence: Synthetic oligonucleotide
  Antisense strand to SEQ ID NO: 203814
aaugcgcugagacuuuggc

SEQ ID NO: 203816 - RNA, 19 nt, Artificial Sequence
  Description of Artificial Sequence: Synthetic oligonucleotide
  Sense strand starting at position 3546 of SEQ ID NO: 2626
cccaguuauuucgcugcaa

SEQ ID NO: 203817 - RNA, 19 nt, Artificial Sequence
  Description of Artificial Sequence: Synthetic oligonucleotide
  Antisense strand to SEQ ID NO: 203816
uugcagcgaaauaacuggg

SEQ ID NO: 203818 - RNA, 19 nt, Artificial Sequence
  Description of Artificial Sequence: Synthetic oligonucleotide
  Sense strand starting at position 3547 of SEQ ID NO: 2626
ccaguuauuucgcugcaag

SEQ ID NO: 203819 - RNA, 19 nt, Artificial Sequence
  Description of Artificial Sequence: Synthetic oligonucleotide
  Antisense strand to SEQ ID NO: 203818
cuugcagcgaaauaacugg

SEQ ID NO: 203820 - RNA, 19 nt, Artificial Sequence
  Description of Artificial Sequence: Synthetic oligonucleotide
  Sense strand starting at position 3548 of SEQ ID NO: 2626
caguuauuucgcugcaaga

SEQ ID NO: 203821 - RNA, 19 nt, Artificial Sequence
  Description of Artificial Sequence: Synthetic oligonucleotide
  Antisense strand to SEQ ID NO: 203820
ucuugcagcgaaauaacug

SEQ ID NO: 203822 - RNA, 19 nt, Artificial Sequence
  Description of Artificial Sequence: Synthetic oligonucleotide
  Sense strand starting at position 3550 of SEQ ID NO: 2626
guuauuucgcugcaagagg

SEQ ID NO: 203823 - RNA, 19 nt, Artificial Sequence
  Description of Artificial Sequence: Synthetic oligonucleotide
  Antisense strand to SEQ ID NO: 203822
ccucuugcagcgaaauaac

SEQ ID NO: 203824 - RNA, 19 nt, Artificial Sequence
  Description of Artificial Sequence: Synthetic oligonucleotide
  Sense strand starting at position 72 of SEQ ID NO: 2627
cugcaaugucccuagaaag

SEQ ID NO: 203825 - RNA, 19 nt, Artificial Sequence
  Description of Artificial Sequence: Synthetic oligonucleotide
  Antisense strand to SEQ ID NO: 203824
cuuucuagggacauugcag

SEQ ID NO: 203826 - RNA, 19 nt, Artificial Sequence
  Description of Artificial Sequence: Synthetic oligonucleotide
  Sense strand starting at position 274 of SEQ ID NO: 2627
gagugagugaaugggucaa

SEQ ID NO: 203827 - RNA, 19 nt, Artificial Sequence
  Description of Artificial Sequence: Synthetic oligonucleotide
  Antisense strand to SEQ ID NO: 203826
uugacccauucacucacuc

SEQ ID NO: 203828 - RNA, 19 nt, Artificial Sequence
  Description of Artificial Sequence: Synthetic oligonucleotide
  Sense strand starting at position 796 of SEQ ID NO: 2627
cauuacugugugggucaau

SEQ ID NO: 203829 - RNA, 19 nt, Artificial Sequence
  Description of Artificial Sequence: Synthetic oligonucleotide
  Antisense strand to SEQ ID NO: 203828
auugacccacacaguaaug

SEQ ID NO: 203830 - RNA, 19 nt, Artificial Sequence
  Description of Artificial Sequence: Synthetic oligonucleotide
  Sense strand starting at position 797 of SEQ ID NO: 2627
auuacugugugggucaaua

SEQ ID NO: 203831 - RNA, 19 nt, Artificial Sequence
  Description of Artificial Sequence: Synthetic oligonucleotide
  Antisense strand to SEQ ID NO: 203830
uauugacccacacaguaau

SEQ ID NO: 203832 - RNA, 19 nt, Artificial Sequence
  Description of Artificial Sequence: Synthetic oligonucleotide
  Sense strand starting at position 1014 of SEQ ID NO: 2627
ugggaccagcuaugauaaa

SEQ ID NO: 203833 - RNA, 19 nt, Artificial Sequence
  Description of Artificial Sequence: Synthetic oligonucleotide
  Antisense strand to SEQ ID NO: 203832
uuuaucauagcugguccca

SEQ ID NO: 203834 - RNA, 19 nt, Artificial Sequence
  Description of Artificial Sequence: Synthetic oligonucleotide
  Sense strand starting at position 1074 of SEQ ID NO: 2627
uugacuugucaguaacccu

SEQ ID NO: 203835 - RNA, 19 nt, Artificial Sequence
  Description of Artificial Sequence: Synthetic oligonucleotide
  Antisense strand to SEQ ID NO: 203834
aggguuacugacaagucaa

SEQ ID NO: 203836 - RNA, 19 nt, Artificial Sequence
  Description of Artificial Sequence: Synthetic oligonucleotide
  Sense strand starting at position 1089 of SEQ ID NO: 2627
cccuaugucuuguuaugag

SEQ ID NO: 203837 - RNA, 19 nt, Artificial Sequence
  Description of Artificial Sequence: Synthetic oligonucleotide
  Antisense strand to SEQ ID NO: 203836
cucauaacaagacauaggg

SEQ ID NO: 203838 - RNA, 19 nt, Artificial Sequence
  Description of Artificial Sequence: Synthetic oligonucleotide
  Sense strand starting at position 1096 of SEQ ID NO: 2627
ucuuguuaugaguaauguc

SEQ ID NO: 203839 - RNA, 19 nt, Artificial Sequence
  Description of Artificial Sequence: Synthetic oligonucleotide
  Antisense strand to SEQ ID NO: 203838
gacauuacucauaacaaga

SEQ ID NO: 203840 - RNA, 19 nt, Artificial Sequence
  Description of Artificial Sequence: Synthetic oligonucleotide
  Sense strand starting at position 1631 of SEQ ID NO: 2627
agagcaaaguuguuucuag

SEQ ID NO: 203841 - RNA, 19 nt, Artificial Sequence
  Description of Artificial Sequence: Synthetic oligonucleotide
  Antisense strand to SEQ ID NO: 203840
cuagaaacaacuuugcucu

SEQ ID NO: 203842 - RNA, 19 nt, Artificial Sequence
  Description of Artificial Sequence: Synthetic oligonucleotide
  Sense strand starting at position 1632 of SEQ ID NO: 2627
gagcaaaguuguuucuagu

SEQ ID NO: 203843 - RNA, 19 nt, Artificial Sequence
  Description of Artificial Sequence: Synthetic oligonucleotide
  Antisense strand to SEQ ID NO: 203842
acuagaaacaacuuugcuc

SEQ ID NO: 203844 - RNA, 19 nt, Artificial Sequence
  Description of Artificial Sequence: Synthetic oligonucleotide
  Sense strand starting at position 2388 of SEQ ID NO: 2627
cugggaacucucggaagga

SEQ ID NO: 203845 - RNA, 19 nt, Artificial Sequence
  Description of Artificial Sequence: Synthetic oligonucleotide
  Antisense strand to SEQ ID NO: 203844
uccuuccgagaguucccag

SEQ ID NO: 203846 - RNA, 19 nt, Artificial Sequence
  Description of Artificial Sequence: Synthetic oligonucleotide
  Sense strand starting at position 2554 of SEQ ID NO: 2627
guucgcuggcucuuaugau

SEQ ID NO: 203847 - RNA, 19 nt, Artificial Sequence
  Description of Artificial Sequence: Synthetic oligonucleotide
  Antisense strand to SEQ ID NO: 203846
aucauaagagccagcgaac

SEQ ID NO: 203848 - RNA, 19 nt, Artificial Sequence
  Description of Artificial Sequence: Synthetic oligonucleotide
  Sense strand starting at position 2653 of SEQ ID NO: 2627
gacugugucuguccaagac

SEQ ID NO: 203849 - RNA, 19 nt, Artificial Sequence
  Description of Artificial Sequence: Synthetic oligonucleotide
  Antisense strand to SEQ ID NO: 203848
gucuuggacagacacaguc

SEQ ID NO: 203850 - RNA, 19 nt, Artificial Sequence
  Description of Artificial Sequence: Synthetic oligonucleotide
  Sense strand starting at position 2781 of SEQ ID NO: 2627
cccuccugcccggaagaua

SEQ ID NO: 203851 - RNA, 19 nt, Artificial Sequence
  Description of Artificial Sequence: Synthetic oligonucleotide
  Antisense strand to SEQ ID NO: 203850
uaucuuccgggcaggaggg

SEQ ID NO: 203852 - RNA, 19 nt, Artificial Sequence
  Description of Artificial Sequence: Synthetic oligonucleotide
  Sense strand starting at position 2790 of SEQ ID NO: 2627
ccggaagauaagcguauuu

SEQ ID NO: 203853 - RNA, 19 nt, Artificial Sequence
  Description of Artificial Sequence: Synthetic oligonucleotide
  Antisense strand to SEQ ID NO: 203852
aaauacgcuuaucuuccgg

SEQ ID NO: 203854 - RNA, 19 nt, Artificial Sequence
  Description of Artificial Sequence: Synthetic oligonucleotide
  Sense strand starting at position 2854 of SEQ ID NO: 2627
aggugaagguucuuaaucu

SEQ ID NO: 203855 - RNA, 19 nt, Artificial Sequence
  Description of Artificial Sequence: Synthetic oligonucleotide
  Antisense strand to SEQ ID NO: 203854
agauuaagaaccuucaccu

SEQ ID NO: 203856 - RNA, 19 nt, Artificial Sequence
  Description of Artificial Sequence: Synthetic oligonucleotide
  Sense strand starting at position 2914 of SEQ ID NO: 2627
uauggucaagcuugaagau

SEQ ID NO: 203857 - RNA, 19 nt, Artificial Sequence
  Description of Artificial Sequence: Synthetic oligonucleotide
  Antisense strand to SEQ ID NO: 203856
aucuucaagcuugaccaua

SEQ ID NO: 203858 - RNA, 19 nt, Artificial Sequence
  Description of Artificial Sequence: Synthetic oligonucleotide
  Sense strand starting at position 2915 of SEQ ID NO: 2627
auggucaagcuugaagauu

SEQ ID NO: 203859 - RNA, 19 nt, Artificial Sequence
  Description of Artificial Sequence: Synthetic oligonucleotide
  Antisense strand to SEQ ID NO: 203858
aaucuucaagcuugaccau

SEQ ID NO: 203860 - RNA, 19 nt, Artificial Sequence
  Description of Artificial Sequence: Synthetic oligonucleotide
  Sense strand starting at position 2936 of SEQ ID NO: 2627
ccagaacagcgauaauauu

SEQ ID NO: 203861 - RNA, 19 nt, Artificial Sequence
  Description of Artificial Sequence: Synthetic oligonucleotide
  Antisense strand to SEQ ID NO: 203860
aauauuaucgcuguucugg

SEQ ID NO: 203862 - RNA, 19 nt, Artificial Sequence
  Description of Artificial Sequence: Synthetic oligonucleotide
  Sense strand starting at position 2979 of SEQ ID NO: 2627
agagaaucccucugaccac

SEQ ID NO: 203863 - RNA, 19 nt, Artificial Sequence
  Description of Artificial Sequence: Synthetic oligonucleotide
  Antisense strand to SEQ ID NO: 203862
guggucagagggauucucu

SEQ ID NO: 203864 - RNA, 19 nt, Artificial Sequence
  Description of Artificial Sequence: Synthetic oligonucleotide
  Sense strand starting at position 3018 of SEQ ID NO: 2627
ccuugugaaucccugugau

SEQ ID NO: 203865 - RNA, 19 nt, Artificial Sequence
  Description of Artificial Sequence: Synthetic oligonucleotide
  Antisense strand to SEQ ID NO: 203864
aucacagggauucacaagg

SEQ ID NO: 203866 - RNA, 19 nt, Artificial Sequence
  Description of Artificial Sequence: Synthetic oligonucleotide
  Sense strand starting at position 3021 of SEQ ID NO: 2627
ugugaaucccugugaucug

SEQ ID NO: 203867 - RNA, 19 nt, Artificial Sequence
  Description of Artificial Sequence: Synthetic oligonucleotide
  Antisense strand to SEQ ID NO: 203866
cagaucacagggauucaca

SEQ ID NO: 203868 - RNA, 19 nt, Artificial Sequence
  Description of Artificial Sequence: Synthetic oligonucleotide
  Sense strand starting at position 3071 of SEQ ID NO: 2627
ggacuaucagauugcagga

SEQ ID NO: 203869 - RNA, 19 nt, Artificial Sequence
  Description of Artificial Sequence: Synthetic oligonucleotide
  Antisense strand to SEQ ID NO: 203868
uccugcaaucugauagucc

SEQ ID NO: 203870 - RNA, 19 nt, Artificial Sequence
  Description of Artificial Sequence: Synthetic oligonucleotide
  Sense strand starting at position 3429 of SEQ ID NO: 2627
ucuugucugugacucaauu

SEQ ID NO: 203871 - RNA, 19 nt, Artificial Sequence
  Description of Artificial Sequence: Synthetic oligonucleotide
  Antisense strand to SEQ ID NO: 203870
aauugagucacagacaaga

SEQ ID NO: 203872 - RNA, 19 nt, Artificial Sequence
  Description of Artificial Sequence: Synthetic oligonucleotide
  Sense strand starting at position 3454 of SEQ ID NO: 2627
agugauucccaucauucuu

SEQ ID NO: 203873 - RNA, 19 nt, Artificial Sequence
  Description of Artificial Sequence: Synthetic oligonucleotide
  Antisense strand to SEQ ID NO: 203872
aagaaugaugggaaucacu

SEQ ID NO: 203874 - RNA, 19 nt, Artificial Sequence
  Description of Artificial Sequence: Synthetic oligonucleotide
  Sense strand starting at position 3550 of SEQ ID NO: 2627
ucaguuauguucccauauu

SEQ ID NO: 203875 - RNA, 19 nt, Artificial Sequence
  Description of Artificial Sequence: Synthetic oligonucleotide
  Antisense strand to SEQ ID NO: 203874
aauaugggaacauaacuga

SEQ ID NO: 203876 - RNA, 19 nt, Artificial Sequence
  Description of Artificial Sequence: Synthetic oligonucleotide
  Sense strand starting at position 3576 of SEQ ID NO: 2627
aggccauagucaguuaaug

SEQ ID NO: 203877 - RNA, 19 nt, Artificial Sequence
  Description of Artificial Sequence: Synthetic oligonucleotide
  Antisense strand to SEQ ID NO: 203876
cauuaacugacuauggccu

SEQ ID NO: 203878 - RNA, 19 nt, Artificial Sequence
  Description of Artificial Sequence: Synthetic oligonucleotide
  Sense strand starting at position 3578 of SEQ ID NO: 2627
gccauagucaguuaaugag

SEQ ID NO: 203879 - RNA, 19 nt, Artificial Sequence
  Description of Artificial Sequence: Synthetic oligonucleotide
  Antisense strand to SEQ ID NO: 203878
cucauuaacugacuauggc

SEQ ID NO: 203880 - RNA, 19 nt, Artificial Sequence
  Description of Artificial Sequence: Synthetic oligonucleotide
  Sense strand starting at position 3584 of SEQ ID NO: 2627
gucaguuaaugaguuugaa

SEQ ID NO: 203881 - RNA, 19 nt, Artificial Sequence
  Description of Artificial Sequence: Synthetic oligonucleotide
  Antisense strand to SEQ ID NO: 203880
uucaaacucauuaacugac

SEQ ID NO: 203882 - RNA, 19 nt, Artificial Sequence
  Description of Artificial Sequence: Synthetic oligonucleotide
  Sense strand starting at position 3618 of SEQ ID NO: 2627
uuacguuauaggugaggaa

SEQ ID NO: 203883 - RNA, 19 nt, Artificial Sequence
  Description of Artificial Sequence: Synthetic oligonucleotide
  Antisense strand to SEQ ID NO: 203882
uuccucaccuauaacguaa

SEQ ID NO: 203884 - RNA, 19 nt, Artificial Sequence
  Description of Artificial Sequence: Synthetic oligonucleotide
  Sense strand starting at position 3702 of SEQ ID NO: 2627
ggaaucuucgauugugggu

SEQ ID NO: 203885 - RNA, 19 nt, Artificial Sequence
  Description of Artificial Sequence: Synthetic oligonucleotide
  Antisense strand to SEQ ID NO: 203884
acccacaaucgaagauucc

SEQ ID NO: 203886 - RNA, 19 nt, Artificial Sequence
  Description of Artificial Sequence: Synthetic oligonucleotide
  Sense strand starting at position 3707 of SEQ ID NO: 2627
cuucgauugugggugauuu

SEQ ID NO: 203887 - RNA, 19 nt, Artificial Sequence
  Description of Artificial Sequence: Synthetic oligonucleotide
  Antisense strand to SEQ ID NO: 203886
aaaucacccacaaucgaag

SEQ ID NO: 203888 - RNA, 19 nt, Artificial Sequence
  Description of Artificial Sequence: Synthetic oligonucleotide
  Sense strand starting at position 3718 of SEQ ID NO: 2627
ggugauuuguguucguuga

SEQ ID NO: 203889 - RNA, 19 nt, Artificial Sequence
  Description of Artificial Sequence: Synthetic oligonucleotide
  Antisense strand to SEQ ID NO: 203888
ucaacgaacacaaaucacc

SEQ ID NO: 203890 - RNA, 19 nt, Artificial Sequence
  Description of Artificial Sequence: Synthetic oligonucleotide
  Sense strand starting at position 3719 of SEQ ID NO: 2627
gugauuuguguucguugaa

SEQ ID NO: 203891 - RNA, 19 nt, Artificial Sequence
  Description of Artificial Sequence: Synthetic oligonucleotide
  Antisense strand to SEQ ID NO: 203890
uucaacgaacacaaaucac

SEQ ID NO: 203892 - RNA, 19 nt, Artificial Sequence
  Description of Artificial Sequence: Synthetic oligonucleotide
  Sense strand starting at position 3720 of SEQ ID NO: 2627
ugauuuguguucguugaag

SEQ ID NO: 203893 - RNA, 19 nt, Artificial Sequence
  Description of Artificial Sequence: Synthetic oligonucleotide
  Antisense strand to SEQ ID NO: 203892
cuucaacgaacacaaauca

SEQ ID NO: 203894 - RNA, 19 nt, Artificial Sequence
  Description of Artificial Sequence: Synthetic oligonucleotide
  Sense strand starting at position 3722 of SEQ ID NO: 2627
auuuguguucguugaagug

SEQ ID NO: 203895 - RNA, 19 nt, Artificial Sequence
  Description of Artificial Sequence: Synthetic oligonucleotide
  Antisense strand to SEQ ID NO: 203894
cacuucaacgaacacaaau

SEQ ID NO: 203896 - RNA, 19 nt, Artificial Sequence
  Description of Artificial Sequence: Synthetic oligonucleotide
  Sense strand starting at position 3728 of SEQ ID NO: 2627
guucguugaagugauaaug

SEQ ID NO: 203897 - RNA, 19 nt, Artificial Sequence
  Description of Artificial Sequence: Synthetic oligonucleotide
  Antisense strand to SEQ ID NO: 203896
cauuaucacuucaacgaac

SEQ ID NO: 203898 - RNA, 19 nt, Artificial Sequence
  Description of Artificial Sequence: Synthetic oligonucleotide
  Sense strand starting at position 3738 of SEQ ID NO: 2627
gugauaaugucaguaucac

SEQ ID NO: 203899 - RNA, 19 nt, Artificial Sequence
  Description of Artificial Sequence: Synthetic oligonucleotide
  Antisense strand to SEQ ID NO: 203898
gugauacugacauuaucac

SEQ ID NO: 203900 - RNA, 19 nt, Artificial Sequence
  Description of Artificial Sequence: Synthetic oligonucleotide
  Sense strand starting at position 3739 of SEQ ID NO: 2627
ugauaaugucaguaucaca

SEQ ID NO: 203901 - RNA, 19 nt, Artificial Sequence
  Description of Artificial Sequence: Synthetic oligonucleotide
  Antisense strand to SEQ ID NO: 203900
ugugauacugacauuauca

SEQ ID NO: 203902 - RNA, 19 nt, Artificial Sequence
  Description of Artificial Sequence: Synthetic oligonucleotide
  Sense strand starting at position 3758 of SEQ ID NO: 2627
aaguaauaucauugaagug

SEQ ID NO: 203903 - RNA, 19 nt, Artificial Sequence
  Description of Artificial Sequence: Synthetic oligonucleotide
  Antisense strand to SEQ ID NO: 203902
cacuucaaugauauuacuu

SEQ ID NO: 203904 - RNA, 19 nt, Artificial Sequence
  Description of Artificial Sequence: Synthetic oligonucleotide
  Sense strand starting at position 25 of SEQ ID NO: 2628
ggauuacccagucauggca

SEQ ID NO: 203905 - RNA, 19 nt, Artificial Sequence
  Description of Artificial Sequence: Synthetic oligonucleotide
  Antisense strand to SEQ ID NO: 203904
ugccaugacuggguaaucc

SEQ ID NO: 203906 - RNA, 19 nt, Artificial Sequence
  Description of Artificial Sequence: Synthetic oligonucleotide
  Sense strand starting at position 260 of SEQ ID NO: 2628
ccuccuuagccaggaaaca

SEQ ID NO: 203907 - RNA, 19 nt, Artificial Sequence
  Description of Artificial Sequence: Synthetic oligonucleotide
  Antisense strand to SEQ ID NO: 203906
uguuuccuggcuaaggagg

SEQ ID NO: 203908 - RNA, 19 nt, Artificial Sequence
  Description of Artificial Sequence: Synthetic oligonucleotide
  Sense strand starting at position 358 of SEQ ID NO: 2628
gugguugcauccuuaggga

SEQ ID NO: 203909 - RNA, 19 nt, Artificial Sequence
  Description of Artificial Sequence: Synthetic oligonucleotide
  Antisense strand to SEQ ID NO: 203908
ucccuaaggaugcaaccac

SEQ ID NO: 203910 - RNA, 19 nt, Artificial Sequence
  Description of Artificial Sequence: Synthetic oligonucleotide
  Sense strand starting at position 622 of SEQ ID NO: 2628
agagguggcuugggauaga

SEQ ID NO: 203911 - RNA, 19 nt, Artificial Sequence
  Description of Artificial Sequence: Synthetic oligonucleotide
  Antisense strand to SEQ ID NO: 203910
ucuaucccaagccaccucu

SEQ ID NO: 203912 - RNA, 19 nt, Artificial Sequence
  Description of Artificial Sequence: Synthetic oligonucleotide
  Sense strand starting at position 2110 of SEQ ID NO: 2628
aggagugcuuucgaaauca

SEQ ID NO: 203913 - RNA, 19 nt, Artificial Sequence
  Description of Artificial Sequence: Synthetic oligonucleotide
  Antisense strand to SEQ ID NO: 203912
ugauuucgaaagcacuccu

SEQ ID NO: 203914 - RNA, 19 nt, Artificial Sequence
  Description of Artificial Sequence: Synthetic oligonucleotide
  Sense strand starting at position 2371 of SEQ ID NO: 2628
uggucuucccguucgcuaa

SEQ ID NO: 203915 - RNA, 19 nt, Artificial Sequence
  Description of Artificial Sequence: Synthetic oligonucleotide
  Antisense strand to SEQ ID NO: 203914
uuagcgaacgggaagacca

SEQ ID NO: 203916 - RNA, 19 nt, Artificial Sequence
  Description of Artificial Sequence: Synthetic oligonucleotide
  Sense strand starting at position 2372 of SEQ ID NO: 2628
ggucuucccguucgcuaaa

SEQ ID NO: 203917 - RNA, 19 nt, Artificial Sequence
  Description of Artificial Sequence: Synthetic oligonucleotide
  Antisense strand to SEQ ID NO: 203916
uuuagcgaacgggaagacc

SEQ ID NO: 203918 - RNA, 19 nt, Artificial Sequence
  Description of Artificial Sequence: Synthetic oligonucleotide
  Sense strand starting at position 2414 of SEQ ID NO: 2628
uagcauuacugagugcuua

SEQ ID NO: 203919 - RNA, 19 nt, Artificial Sequence
  Description of Artificial Sequence: Synthetic oligonucleotide
  Antisense strand to SEQ ID NO: 203918
uaagcacucaguaaugcua

SEQ ID NO: 203920 - RNA, 19 nt, Artificial Sequence
  Description of Artificial Sequence: Synthetic oligonucleotide
  Sense strand starting at position 2429 of SEQ ID NO: 2628
cuuacuguguacuaaguga

SEQ ID NO: 203921 - RNA, 19 nt, Artificial Sequence
  Description of Artificial Sequence: Synthetic oligonucleotide
  Antisense strand to SEQ ID NO: 203920
ucacuuaguacacaguaag

SEQ ID NO: 203922 - RNA, 19 nt, Artificial Sequence
  Description of Artificial Sequence: Synthetic oligonucleotide
  Sense strand starting at position 2436 of SEQ ID NO: 2628
uguacuaagugacuugaca

SEQ ID NO: 203923 - RNA, 19 nt, Artificial Sequence
  Description of Artificial Sequence: Synthetic oligonucleotide
  Antisense strand to SEQ ID NO: 203922
ugucaagucacuuaguaca

SEQ ID NO: 203924 - RNA, 19 nt, Artificial Sequence
  Description of Artificial Sequence: Synthetic oligonucleotide
  Sense strand starting at position 2443 of SEQ ID NO: 2628
agugacuugacaggcauua

SEQ ID NO: 203925 - RNA, 19 nt, Artificial Sequence
  Description of Artificial Sequence: Synthetic oligonucleotide
  Antisense strand to SEQ ID NO: 203924
uaaugccugucaagucacu

SEQ ID NO: 203926 - RNA, 19 nt, Artificial Sequence
  Description of Artificial Sequence: Synthetic oligonucleotide
  Sense strand starting at position 2482 of SEQ ID NO: 2628
ccuagagguaggugcuauu

SEQ ID NO: 203927 - RNA, 19 nt, Artificial Sequence
  Description of Artificial Sequence: Synthetic oligonucleotide
  Antisense strand to SEQ ID NO: 203926
aauagcaccuaccucuagg

SEQ ID NO: 203928 - RNA, 19 nt, Artificial Sequence
  Description of Artificial Sequence: Synthetic oligonucleotide
  Sense strand starting at position 2485 of SEQ ID NO: 2628
agagguaggugcuauuacu

SEQ ID NO: 203929 - RNA, 19 nt, Artificial Sequence
  Description of Artificial Sequence: Synthetic oligonucleotide
  Antisense strand to SEQ ID NO: 203928
aguaauagcaccuaccucu

SEQ ID NO: 203930 - RNA, 19 nt, Artificial Sequence
  Description of Artificial Sequence: Synthetic oligonucleotide
  Sense strand starting at position 2494 of SEQ ID NO: 2628
ugcuauuacuguuccuacu

SEQ ID NO: 203931 - RNA, 19 nt, Artificial Sequence
  Description of Artificial Sequence: Synthetic oligonucleotide
  Antisense strand to SEQ ID NO: 203930
aguaggaacaguaauagca

SEQ ID NO: 203932 - RNA, 19 nt, Artificial Sequence
  Description of Artificial Sequence: Synthetic oligonucleotide
  Sense strand starting at position 2538 of SEQ ID NO: 2628
gaacgagaucucugccucu

SEQ ID NO: 203933 - RNA, 19 nt, Artificial Sequence
  Description of Artificial Sequence: Synthetic oligonucleotide
  Antisense strand to SEQ ID NO: 203932
agaggcagagaucucguuc

SEQ ID NO: 203934 - RNA, 19 nt, Artificial Sequence
  Description of Artificial Sequence: Synthetic oligonucleotide
  Sense strand starting at position 2611 of SEQ ID NO: 2628
aggaaugauuagugaucau

SEQ ID NO: 203935 - RNA, 19 nt, Artificial Sequence
  Description of Artificial Sequence: Synthetic oligonucleotide
  Antisense strand to SEQ ID NO: 203934
augaucacuaaucauuccu

SEQ ID NO: 203936 - RNA, 19 nt, Artificial Sequence
  Description of Artificial Sequence: Synthetic oligonucleotide
  Sense strand starting at position 2618 of SEQ ID NO: 2628
auuagugaucauuauuccu

SEQ ID NO: 203937 - RNA, 19 nt, Artificial Sequence
  Description of Artificial Sequence: Synthetic oligonucleotide
  Antisense strand to SEQ ID NO: 203936
aggaauaaugaucacuaau

SEQ ID NO: 203938 - RNA, 19 nt, Artificial Sequence
  Description of Artificial Sequence: Synthetic oligonucleotide
  Sense strand starting at position 2621 of SEQ ID NO: 2628
agugaucauuauuccugga

SEQ ID NO: 203939 - RNA, 19 nt, Artificial Sequence
  Description of Artificial Sequence: Synthetic oligonucleotide
  Antisense strand to SEQ ID NO: 203938
uccaggaauaaugaucacu

SEQ ID NO: 203940 - RNA, 19 nt, Artificial Sequence
  Description of Artificial Sequence: Synthetic oligonucleotide
  Sense strand starting at position 2642 of SEQ ID NO: 2628
agauaagguuauugcuaac

SEQ ID NO: 203941 - RNA, 19 nt, Artificial Sequence
  Description of Artificial Sequence: Synthetic oligonucleotide
  Antisense strand to SEQ ID NO: 203940
guuagcaauaaccuuaucu

SEQ ID NO: 203942 - RNA, 19 nt, Artificial Sequence
  Description of Artificial Sequence: Synthetic oligonucleotide
  Sense strand starting at position 2648 of SEQ ID NO: 2628
gguuauugcuaaccagcuu

SEQ ID NO: 203943 - RNA, 19 nt, Artificial Sequence
  Description of Artificial Sequence: Synthetic oligonucleotide
  Antisense strand to SEQ ID NO: 203942
aagcugguuagcaauaacc

SEQ ID NO: 203944 - RNA, 19 nt, Artificial Sequence
  Description of Artificial Sequence: Synthetic oligonucleotide
  Sense strand starting at position 2706 of SEQ ID NO: 2628
acguauugagucugcugau

SEQ ID NO: 203945 - RNA, 19 nt, Artificial Sequence
  Description of Artificial Sequence: Synthetic oligonucleotide
  Antisense strand to SEQ ID NO: 203944
aucagcagacucaauacgu

SEQ ID NO: 203946 - RNA, 19 nt, Artificial Sequence
  Description of Artificial Sequence: Synthetic oligonucleotide
  Sense strand starting at position 2707 of SEQ ID NO: 2628
cguauugagucugcugaua

SEQ ID NO: 203947 - RNA, 19 nt, Artificial Sequence
  Description of Artificial Sequence: Synthetic oligonucleotide
  Antisense strand to SEQ ID NO: 203946
uaucagcagacucaauacg

SEQ ID NO: 203948 - RNA, 19 nt, Artificial Sequence
  Description of Artificial Sequence: Synthetic oligonucleotide
  Sense strand starting at position 2778 of SEQ ID NO: 2628
ccuggaaauuucuaaagaa

SEQ ID NO: 203949 - RNA, 19 nt, Artificial Sequence
  Description of Artificial Sequence: Synthetic oligonucleotide
  Antisense strand to SEQ ID NO: 203948
uucuuuagaaauuuccagg

SEQ ID NO: 203950 - RNA, 19 nt, Artificial Sequence
  Description of Artificial Sequence: Synthetic oligonucleotide
  Sense strand starting at position 2792 of SEQ ID NO: 2628
aagaacuguugauugaguu

SEQ ID NO: 203951 - RNA, 19 nt, Artificial Sequence
  Description of Artificial Sequence: Synthetic oligonucleotide
  Antisense strand to SEQ ID NO: 203950
aacucaaucaacaguucuu

SEQ ID NO: 203952 - RNA, 19 nt, Artificial Sequence
  Description of Artificial Sequence: Synthetic oligonucleotide
  Sense strand starting at position 2798 of SEQ ID NO: 2628
uguugauugaguugagcag

SEQ ID NO: 203953 - RNA, 19 nt, Artificial Sequence
  Description of Artificial Sequence: Synthetic oligonucleotide
  Antisense strand to SEQ ID NO: 203952
cugcucaacucaaucaaca

SEQ ID NO: 203954 - RNA, 19 nt, Artificial Sequence
  Description of Artificial Sequence: Synthetic oligonucleotide
  Sense strand starting at position 2799 of SEQ ID NO: 2628
guugauugaguugagcaga

SEQ ID NO: 203955 - RNA, 19 nt, Artificial Sequence
  Description of Artificial Sequence: Synthetic oligonucleotide
  Antisense strand to SEQ ID NO: 203954
ucugcucaacucaaucaac

SEQ ID NO: 203956 - RNA, 19 nt, Artificial Sequence
  Description of Artificial Sequence: Synthetic oligonucleotide
  Sense strand starting at position 2817 of SEQ ID NO: 2628
agagauaggucccgcugaa

SEQ ID NO: 203957 - RNA, 19 nt, Artificial Sequence
  Description of Artificial Sequence: Synthetic oligonucleotide
  Antisense strand to SEQ ID NO: 203956
uucagcgggaccuaucucu

SEQ ID NO: 203958 - RNA, 19 nt, Artificial Sequence
  Description of Artificial Sequence: Synthetic oligonucleotide
  Sense strand starting at position 2981 of SEQ ID NO: 2628
ccaagcaguuuguacaaau

SEQ ID NO: 203959 - RNA, 19 nt, Artificial Sequence
  Description of Artificial Sequence: Synthetic oligonucleotide
  Antisense strand to SEQ ID NO: 203958
auuuguacaaacugcuugg

SEQ ID NO: 203960 - RNA, 19 nt, Artificial Sequence
  Description of Artificial Sequence: Synthetic oligonucleotide
  Sense strand starting at position 2988 of SEQ ID NO: 2628
guuuguacaaauggagaaa

SEQ ID NO: 203961 - RNA, 19 nt, Artificial Sequence
  Description of Artificial Sequence: Synthetic oligonucleotide
  Antisense strand to SEQ ID NO: 203960
uuucuccauuuguacaaac

SEQ ID NO: 203962 - RNA, 19 nt, Artificial Sequence
  Description of Artificial Sequence: Synthetic oligonucleotide
  Sense strand starting at position 3003 of SEQ ID NO: 2628
gaaaucgagucccaggaau

SEQ ID NO: 203963 - RNA, 19 nt, Artificial Sequence
  Description of Artificial Sequence: Synthetic oligonucleotide
  Antisense strand to SEQ ID NO: 203962
auuccugggacucgauuuc

SEQ ID NO: 203964 - RNA, 19 nt, Artificial Sequence
  Description of Artificial Sequence: Synthetic oligonucleotide
  Sense strand starting at position 3005 of SEQ ID NO: 2628
aaucgagucccaggaauga

SEQ ID NO: 203965 - RNA, 19 nt, Artificial Sequence
  Description of Artificial Sequence: Synthetic oligonucleotide
  Antisense strand to SEQ ID NO: 203964
ucauuccugggacucgauu

SEQ ID NO: 203966 - RNA, 19 nt, Artificial Sequence
  Description of Artificial Sequence: Synthetic oligonucleotide
  Sense strand starting at position 3272 of SEQ ID NO: 2628
gcauauagcguacacaaau

SEQ ID NO: 203967 - RNA, 19 nt, Artificial Sequence
  Description of Artificial Sequence: Synthetic oligonucleotide
  Antisense strand to SEQ ID NO: 203966
auuuguguacgcuauaugc

SEQ ID NO: 203968 - RNA, 19 nt, Artificial Sequence
  Description of Artificial Sequence: Synthetic oligonucleotide
  Sense strand starting at position 3314 of SEQ ID NO: 2628
ucuagauucuuguaauagc

SEQ ID NO: 203969 - RNA, 19 nt, Artificial Sequence
  Description of Artificial Sequence: Synthetic oligonucleotide
  Antisense strand to SEQ ID NO: 203968
gcuauuacaagaaucuaga

SEQ ID NO: 203970 - RNA, 19 nt, Artificial Sequence
  Description of Artificial Sequence: Synthetic oligonucleotide
  Sense strand starting at position 3317 of SEQ ID NO: 2628
agauucuuguaauagcuaa

SEQ ID NO: 203971 - RNA, 19 nt, Artificial Sequence
  Description of Artificial Sequence: Synthetic oligonucleotide
  Antisense strand to SEQ ID NO: 203970
uuagcuauuacaagaaucu

SEQ ID NO: 203972 - RNA, 19 nt, Artificial Sequence
  Description of Artificial Sequence: Synthetic oligonucleotide
  Sense strand starting at position 3359 of SEQ ID NO: 2628
aguuguuaacgcuguauuu

SEQ ID NO: 203973 - RNA, 19 nt, Artificial Sequence
  Description of Artificial Sequence: Synthetic oligonucleotide
  Antisense strand to SEQ ID NO: 203972
aaauacagcguuaacaacu

SEQ ID NO: 203974 - RNA, 19 nt, Artificial Sequence
  Description of Artificial Sequence: Synthetic oligonucleotide
  Sense strand starting at position 3793 of SEQ ID NO: 2628
gagggcugacuguauucuu

SEQ ID NO: 203975 - RNA, 19 nt, Artificial Sequence
  Description of Artificial Sequence: Synthetic oligonucleotide
  Antisense strand to SEQ ID NO: 203974
aagaauacagucagcccuc

SEQ ID NO: 203976 - RNA, 19 nt, Artificial Sequence
  Description of Artificial Sequence: Synthetic oligonucleotide
  Sense strand starting at position 3796 of SEQ ID NO: 2628
ggcugacuguauucuuauu

SEQ ID NO: 203977 - RNA, 19 nt, Artificial Sequence
  Description of Artificial Sequence: Synthetic oligonucleotide
  Antisense strand to SEQ ID NO: 203976
aauaagaauacagucagcc

SEQ ID NO: 203978 - RNA, 19 nt, Artificial Sequence
  Description of Artificial Sequence: Synthetic oligonucleotide
  Sense strand starting at position 3806 of SEQ ID NO: 2628
auucuuauucugcaggaag

SEQ ID NO: 203979 - RNA, 19 nt, Artificial Sequence
  Description of Artificial Sequence: Synthetic oligonucleotide
  Antisense strand to SEQ ID NO: 203978
cuuccugcagaauaagaau

SEQ ID NO: 203980 - RNA, 19 nt, Artificial Sequence
  Description of Artificial Sequence: Synthetic oligonucleotide
  Sense strand starting at position 3808 of SEQ ID NO: 2628
ucuuauucugcaggaagac

SEQ ID NO: 203981 - RNA, 19 nt, Artificial Sequence
  Description of Artificial Sequence: Synthetic oligonucleotide
  Antisense strand to SEQ ID NO: 203980
gucuuccugcagaauaaga

SEQ ID NO: 203982 - RNA, 19 nt, Artificial Sequence
  Description of Artificial Sequence: Synthetic oligonucleotide
  Sense strand starting at position 3872 of SEQ ID NO: 2628
agcagagauucugcaucaa

SEQ ID NO: 203983 - RNA, 19 nt, Artificial Sequence
  Description of Artificial Sequence: Synthetic oligonucleotide
  Antisense strand to SEQ ID NO: 203982
uugaugcagaaucucugcu

SEQ ID NO: 203984 - RNA, 19 nt, Artificial Sequence
  Description of Artificial Sequence: Synthetic oligonucleotide
  Sense strand starting at position 322 of SEQ ID NO: 2629
acguuugcaucccuaaauu

SEQ ID NO: 203985 - RNA, 19 nt, Artificial Sequence
  Description of Artificial Sequence: Synthetic oligonucleotide
  Antisense strand to SEQ ID NO: 203984
aauuuagggaugcaaacgu

SEQ ID NO: 203986 - RNA, 19 nt, Artificial Sequence
  Description of Artificial Sequence: Synthetic oligonucleotide
  Sense strand starting at position 388 of SEQ ID NO: 2629
cuuguucgucuacguuaaa

SEQ ID NO: 203987 - RNA, 19 nt, Artificial Sequence
  Description of Artificial Sequence: Synthetic oligonucleotide
  Antisense strand to SEQ ID NO: 203986
uuuaacguagacgaacaag

SEQ ID NO: 203988 - RNA, 19 nt, Artificial Sequence
  Description of Artificial Sequence: Synthetic oligonucleotide
  Sense strand starting at position 411 of SEQ ID NO: 2629
aagugaauugguugaccac

SEQ ID NO: 203989 - RNA, 19 nt, Artificial Sequence
  Description of Artificial Sequence: Synthetic oligonucleotide
  Antisense strand to SEQ ID NO: 203988
guggucaaccaauucacuu

SEQ ID NO: 203990 - RNA, 19 nt, Artificial Sequence
  Description of Artificial Sequence: Synthetic oligonucleotide
  Sense strand starting at position 414 of SEQ ID NO: 2629
ugaauugguugaccacaua

SEQ ID NO: 203991 - RNA, 19 nt, Artificial Sequence
  Description of Artificial Sequence: Synthetic oligonucleotide
  Antisense strand to SEQ ID NO: 203990
uauguggucaaccaauuca

SEQ ID NO: 203992 - RNA, 19 nt, Artificial Sequence
  Description of Artificial Sequence: Synthetic oligonucleotide
  Sense strand starting at position 460 of SEQ ID NO: 2629
aguuguauacauuacaucu

SEQ ID NO: 203993 - RNA, 19 nt, Artificial Sequence
  Description of Artificial Sequence: Synthetic oligonucleotide
  Antisense strand to SEQ ID NO: 203992
agauguaauguauacaacu

SEQ ID NO: 203994 - RNA, 19 nt, Artificial Sequence
  Description of Artificial Sequence: Synthetic oligonucleotide
  Sense strand starting at position 470 of SEQ ID NO: 2629
auuacaucucuaugcagga

SEQ ID NO: 203995 - RNA, 19 nt, Artificial Sequence
  Description of Artificial Sequence: Synthetic oligonucleotide
  Antisense strand to SEQ ID NO: 203994
uccugcauagagauguaau

SEQ ID NO: 203996 - RNA, 19 nt, Artificial Sequence
  Description of Artificial Sequence: Synthetic oligonucleotide
  Sense strand starting at position 572 of SEQ ID NO: 2629
ugucaucuccgccaaaucu

SEQ ID NO: 203997 - RNA, 19 nt, Artificial Sequence
  Description of Artificial Sequence: Synthetic oligonucleotide
  Antisense strand to SEQ ID NO: 203996
agauuuggcggagaugaca

SEQ ID NO: 203998 - RNA, 19 nt, Artificial Sequence
  Description of Artificial Sequence: Synthetic oligonucleotide
  Sense strand starting at position 2348 of SEQ ID NO: 2629
acggcucuggugugagaau

SEQ ID NO: 203999 - RNA, 19 nt, Artificial Sequence
  Description of Artificial Sequence: Synthetic oligonucleotide
  Antisense strand to SEQ ID NO: 203998
auucucacaccagagccgu

SEQ ID NO: 204000 - RNA, 19 nt, Artificial Sequence
  Description of Artificial Sequence: Synthetic oligonucleotide
  Sense strand starting at position 2375 of SEQ ID NO: 2629
agaagccucucguuuggau

SEQ ID NO: 204001 - RNA, 19 nt, Artificial Sequence
  Description of Artificial Sequence: Synthetic oligonucleotide
  Antisense strand to SEQ ID NO: 204000
auccaaacgagaggcuucu

SEQ ID NO: 204002 - RNA, 19 nt, Artificial Sequence
  Description of Artificial Sequence: Synthetic oligonucleotide
  Sense strand starting at position 2461 of SEQ ID NO: 2629
cuuucuguugaacagaagu

SEQ ID NO: 204003 - RNA, 19 nt, Artificial Sequence
  Description of Artificial Sequence: Synthetic oligonucleotide
  Antisense strand to SEQ ID NO: 204002
acuucuguucaacagaaag

SEQ ID NO: 204004 - RNA, 19 nt, Artificial Sequence
  Description of Artificial Sequence: Synthetic oligonucleotide
  Sense strand starting at position 2494 of SEQ ID NO: 2629
gcuggaagcgcauaguuaa

SEQ ID NO: 204005 - RNA, 19 nt, Artificial Sequence
  Description of Artificial Sequence: Synthetic oligonucleotide
  Antisense strand to SEQ ID NO: 204004
uuaacuaugcgcuuccagc

SEQ ID NO: 204006 - RNA, 19 nt, Artificial Sequence
  Description of Artificial Sequence: Synthetic oligonucleotide
  Sense strand starting at position 2501 of SEQ ID NO: 2629
gcgcauaguuaagcuuagu

SEQ ID NO: 204007 - RNA, 19 nt, Artificial Sequence
  Description of Artificial Sequence: Synthetic oligonucleotide
  Antisense strand to SEQ ID NO: 204006
acuaagcuuaacuaugcgc

SEQ ID NO: 204008 - RNA, 19 nt, Artificial Sequence
  Description of Artificial Sequence: Synthetic oligonucleotide
  Sense strand starting at position 2502 of SEQ ID NO: 2629
cgcauaguuaagcuuaguu

SEQ ID NO: 204009 - RNA, 19 nt, Artificial Sequence
  Description of Artificial Sequence: Synthetic oligonucleotide
  Antisense strand to SEQ ID NO: 204008
aacuaagcuuaacuaugcg

SEQ ID NO: 204010 - RNA, 19 nt, Artificial Sequence
  Description of Artificial Sequence: Synthetic oligonucleotide
  Sense strand starting at position 2512 of SEQ ID NO: 2629
agcuuaguuucucuaucca

SEQ ID NO: 204011 - RNA, 19 nt, Artificial Sequence
  Description of Artificial Sequence: Synthetic oligonucleotide
  Antisense strand to SEQ ID NO: 204010
uggauagagaaacuaagcu

SEQ ID NO: 204012 - RNA, 19 nt, Artificial Sequence
  Description of Artificial Sequence: Synthetic oligonucleotide
  Sense strand starting at position 2542 of SEQ ID NO: 2629
acccgaguuaccggaauua

SEQ ID NO: 204013 - RNA, 19 nt, Artificial Sequence
  Description of Artificial Sequence: Synthetic oligonucleotide
  Antisense strand to SEQ ID NO: 204012
uaauuccgguaacucgggu

SEQ ID NO: 204014 - RNA, 19 nt, Artificial Sequence
  Description of Artificial Sequence: Synthetic oligonucleotide
  Sense strand starting at position 2552 of SEQ ID NO: 2629
ccggaauuaauaggagugu

SEQ ID NO: 204015 - RNA, 19 nt, Artificial Sequence
  Description of Artificial Sequence: Synthetic oligonucleotide
  Antisense strand to SEQ ID NO: 204014
acacuccuauuaauuccgg

SEQ ID NO: 204016 - RNA, 19 nt, Artificial Sequence
  Description of Artificial Sequence: Synthetic oligonucleotide
  Sense strand starting at position 2673 of SEQ ID NO: 2629
ugaaauagauuacaguuga

SEQ ID NO: 204017 - RNA, 19 nt, Artificial Sequence
  Description of Artificial Sequence: Synthetic oligonucleotide
  Antisense strand to SEQ ID NO: 204016
ucaacuguaaucuauuuca

SEQ ID NO: 204018 - RNA, 19 nt, Artificial Sequence
  Description of Artificial Sequence: Synthetic oligonucleotide
  Sense strand starting at position 2865 of SEQ ID NO: 2629
augguugcauauuacauaa

SEQ ID NO: 204019 - RNA, 19 nt, Artificial Sequence
  Description of Artificial Sequence: Synthetic oligonucleotide
  Antisense strand to SEQ ID NO: 204018
uuauguaauaugcaaccau

SEQ ID NO: 204020 - RNA, 19 nt, Artificial Sequence
  Description of Artificial Sequence: Synthetic oligonucleotide
  Sense strand starting at position 2867 of SEQ ID NO: 2629
gguugcauauuacauaauu

SEQ ID NO: 204021 - RNA, 19 nt, Artificial Sequence
  Description of Artificial Sequence: Synthetic oligonucleotide
  Antisense strand to SEQ ID NO: 204020
aauuauguaauaugcaacc

SEQ ID NO: 204022 - RNA, 19 nt, Artificial Sequence
  Description of Artificial Sequence: Synthetic oligonucleotide
  Sense strand starting at position 2909 of SEQ ID NO: 2629
auuugauaguuguaugaug

SEQ ID NO: 204023 - RNA, 19 nt, Artificial Sequence
  Description of Artificial Sequence: Synthetic oligonucleotide
  Antisense strand to SEQ ID NO: 204022
caucauacaacuaucaaau

SEQ ID NO: 204024 - RNA, 19 nt, Artificial Sequence
  Description of Artificial Sequence: Synthetic oligonucleotide
  Sense strand starting at position 2916 of SEQ ID NO: 2629
aguuguaugauguguguau

SEQ ID NO: 204025 - RNA, 19 nt, Artificial Sequence
  Description of Artificial Sequence: Synthetic oligonucleotide
  Antisense strand to SEQ ID NO: 204024
auacacacaucauacaacu

SEQ ID NO: 204026 - RNA, 19 nt, Artificial Sequence
  Description of Artificial Sequence: Synthetic oligonucleotide
  Sense strand starting at position 2917 of SEQ ID NO: 2629
guuguaugauguguguaua

SEQ ID NO: 204027 - RNA, 19 nt, Artificial Sequence
  Description of Artificial Sequence: Synthetic oligonucleotide
  Antisense strand to SEQ ID NO: 204026
uauacacacaucauacaac

SEQ ID NO: 204028 - RNA, 19 nt, Artificial Sequence
  Description of Artificial Sequence: Synthetic oligonucleotide
  Sense strand starting at position 2918 of SEQ ID NO: 2629
uuguaugauguguguauag

SEQ ID NO: 204029 - RNA, 19 nt, Artificial Sequence
  Description of Artificial Sequence: Synthetic oligonucleotide
  Antisense strand to SEQ ID NO: 204028
cuauacacacaucauacaa

SEQ ID NO: 204030 - RNA, 19 nt, Artificial Sequence
  Description of Artificial Sequence: Synthetic oligonucleotide
  Sense strand starting at position 2920 of SEQ ID NO: 2629
guaugauguguguauaguu

SEQ ID NO: 204031 - RNA, 19 nt, Artificial Sequence
  Description of Artificial Sequence: Synthetic oligonucleotide
  Antisense strand to SEQ ID NO: 204030
aacuauacacacaucauac

SEQ ID NO: 204032 - RNA, 19 nt, Artificial Sequence
  Description of Artificial Sequence: Synthetic oligonucleotide
  Sense strand starting at position 2983 of SEQ ID NO: 2629
ugcagaguuguauguucua

SEQ ID NO: 204033 - RNA, 19 nt, Artificial Sequence
  Description of Artificial Sequence: Synthetic oligonucleotide
  Antisense strand to SEQ ID NO: 204032
uagaacauacaacucugca

SEQ ID NO: 204034 - RNA, 19 nt, Artificial Sequence
  Description of Artificial Sequence: Synthetic oligonucleotide
  Sense strand starting at position 2986 of SEQ ID NO: 2629
agaguuguauguucuauau

SEQ ID NO: 204035 - RNA, 19 nt, Artificial Sequence
  Description of Artificial Sequence: Synthetic oligonucleotide
  Antisense strand to SEQ ID NO: 204034
auauagaacauacaacucu

SEQ ID NO: 204036 - RNA, 19 nt, Artificial Sequence
  Description of Artificial Sequence: Synthetic oligonucleotide
  Sense strand starting at position 3057 of SEQ ID NO: 2629
aaucaaagaucuguuguga

SEQ ID NO: 204037 - RNA, 19 nt, Artificial Sequence
  Description of Artificial Sequence: Synthetic oligonucleotide
  Antisense strand to SEQ ID NO: 204036
ucacaacagaucuuugauu

SEQ ID NO: 204038 - RNA, 19 nt, Artificial Sequence
  Description of Artificial Sequence: Synthetic oligonucleotide
  Sense strand starting at position 3061 of SEQ ID NO: 2629
aaagaucuguugugaggau

SEQ ID NO: 204039 - RNA, 19 nt, Artificial Sequence
  Description of Artificial Sequence: Synthetic oligonucleotide
  Antisense strand to SEQ ID NO: 204038
auccucacaacagaucuuu

SEQ ID NO: 204040 - RNA, 19 nt, Artificial Sequence
  Description of Artificial Sequence: Synthetic oligonucleotide
  Sense strand starting at position 3062 of SEQ ID NO: 2629
aagaucuguugugaggauu

SEQ ID NO: 204041 - RNA, 19 nt, Artificial Sequence
  Description of Artificial Sequence: Synthetic oligonucleotide
  Antisense strand to SEQ ID NO: 204040
aauccucacaacagaucuu

SEQ ID NO: 204042 - RNA, 19 nt, Artificial Sequence
  Description of Artificial Sequence: Synthetic oligonucleotide
  Sense strand starting at position 3105 of SEQ ID NO: 2629
aagagcaucugacaaguau

SEQ ID NO: 204043 - RNA, 19 nt, Artificial Sequence
  Description of Artificial Sequence: Synthetic oligonucleotide
  Antisense strand to SEQ ID NO: 204042
auacuugucagaugcucuu

SEQ ID NO: 204044 - RNA, 19 nt, Artificial Sequence
  Description of Artificial Sequence: Synthetic oligonucleotide
  Sense strand starting at position 3225 of SEQ ID NO: 2629
acuauuagccaucaggcua

SEQ ID NO: 204045 - RNA, 19 nt, Artificial Sequence
  Description of Artificial Sequence: Synthetic oligonucleotide
  Antisense strand to SEQ ID NO: 204044
uagccugauggcuaauagu

SEQ ID NO: 204046 - RNA, 19 nt, Artificial Sequence
  Description of Artificial Sequence: Synthetic oligonucleotide
  Sense strand starting at position 3247 of SEQ ID NO: 2629
cugaaacacuuagagauuu

SEQ ID NO: 204047 - RNA, 19 nt, Artificial Sequence
  Description of Artificial Sequence: Synthetic oligonucleotide
  Antisense strand to SEQ ID NO: 204046
aaaucucuaaguguuucag

SEQ ID NO: 204048 - RNA, 19 nt, Artificial Sequence
  Description of Artificial Sequence: Synthetic oligonucleotide
  Sense strand starting at position 3328 of SEQ ID NO: 2629
agugacauuccuuacucau

SEQ ID NO: 204049 - RNA, 19 nt, Artificial Sequence
  Description of Artificial Sequence: Synthetic oligonucleotide
  Antisense strand to SEQ ID NO: 204048
augaguaaggaaugucacu

SEQ ID NO: 204050 - RNA, 19 nt, Artificial Sequence
  Description of Artificial Sequence: Synthetic oligonucleotide
  Sense strand starting at position 3713 of SEQ ID NO: 2629
ccuguaagucugggaacaa

SEQ ID NO: 204051 - RNA, 19 nt, Artificial Sequence
  Description of Artificial Sequence: Synthetic oligonucleotide
  Antisense strand to SEQ ID NO: 204050
uuguucccagacuuacagg

SEQ ID NO: 204052 - RNA, 19 nt, Artificial Sequence
  Description of Artificial Sequence: Synthetic oligonucleotide
  Sense strand starting at position 3714 of SEQ ID NO: 2629
cuguaagucugggaacaau

SEQ ID NO: 204053 - RNA, 19 nt, Artificial Sequence
  Description of Artificial Sequence: Synthetic oligonucleotide
  Antisense strand to SEQ ID NO: 204052
auuguucccagacuuacag

SEQ ID NO: 204054 - RNA, 19 nt, Artificial Sequence
  Description of Artificial Sequence: Synthetic oligonucleotide
  Sense strand starting at position 3791 of SEQ ID NO: 2629
aaugccaucuggucauguu

SEQ ID NO: 204055 - RNA, 19 nt, Artificial Sequence
  Description of Artificial Sequence: Synthetic oligonucleotide
  Antisense strand to SEQ ID NO: 204054
aacaugaccagauggcauu

SEQ ID NO: 204056 - RNA, 19 nt, Artificial Sequence
  Description of Artificial Sequence: Synthetic oligonucleotide
  Sense strand starting at position 3792 of SEQ ID NO: 2629
augccaucuggucauguuu

SEQ ID NO: 204057 - RNA, 19 nt, Artificial Sequence
  Description of Artificial Sequence: Synthetic oligonucleotide
  Antisense strand to SEQ ID NO: 204056
aaacaugaccagauggcau

SEQ ID NO: 204058 - RNA, 19 nt, Artificial Sequence
  Description of Artificial Sequence: Synthetic oligonucleotide
  Sense strand starting at position 3856 of SEQ ID NO: 2629
cuccaauuaugucuuguua

SEQ ID NO: 204059 - RNA, 19 nt, Artificial Sequence
  Description of Artificial Sequence: Synthetic oligonucleotide
  Antisense strand to SEQ ID NO: 204058
uaacaagacauaauuggag

SEQ ID NO: 204060 - RNA, 19 nt, Artificial Sequence
  Description of Artificial Sequence: Synthetic oligonucleotide
  Sense strand starting at position 3863 of SEQ ID NO: 2629
uaugucuuguuacaggaga

SEQ ID NO: 204061 - RNA, 19 nt, Artificial Sequence
  Description of Artificial Sequence: Synthetic oligonucleotide
  Antisense strand to SEQ ID NO: 204060
ucuccuguaacaagacaua

SEQ ID NO: 204062 - RNA, 19 nt, Artificial Sequence
  Description of Artificial Sequence: Synthetic oligonucleotide
  Sense strand starting at position 3865 of SEQ ID NO: 2629
ugucuuguuacaggagaac

SEQ ID NO: 204063 - RNA, 19 nt, Artificial Sequence
  Description of Artificial Sequence: Synthetic oligonucleotide
  Antisense strand to SEQ ID NO: 204062
guucuccuguaacaagaca

SEQ ID NO: 204064 - RNA, 19 nt, Artificial Sequence
  Description of Artificial Sequence: Synthetic oligonucleotide
  Sense strand starting at position 126 of SEQ ID NO: 2630
aguauuagggaggguucuu

SEQ ID NO: 204065 - RNA, 19 nt, Artificial Sequence
  Description of Artificial Sequence: Synthetic oligonucleotide
  Antisense strand to SEQ ID NO: 204064
aagaacccucccuaauacu

SEQ ID NO: 204066 - RNA, 19 nt, Artificial Sequence
  Description of Artificial Sequence: Synthetic oligonucleotide
  Sense strand starting at position 210 of SEQ ID NO: 2630
ccauuuccaugagaaagau

SEQ ID NO: 204067 - RNA, 19 nt, Artificial Sequence
  Description of Artificial Sequence: Synthetic oligonucleotide
  Antisense strand to SEQ ID NO: 204066
aucuuucucauggaaaugg

SEQ ID NO: 204068 - RNA, 19 nt, Artificial Sequence
  Description of Artificial Sequence: Synthetic oligonucleotide
  Sense strand starting at position 331 of SEQ ID NO: 2630
uuaaguaacucauuaguag

SEQ ID NO: 204069 - RNA, 19 nt, Artificial Sequence
  Description of Artificial Sequence: Synthetic oligonucleotide
  Antisense strand to SEQ ID NO: 204068
cuacuaaugaguuacuuaa

SEQ ID NO: 204070 - RNA, 19 nt, Artificial Sequence
  Description of Artificial Sequence: Synthetic oligonucleotide
  Sense strand starting at position 338 of SEQ ID NO: 2630
acucauuaguagucacuaa

SEQ ID NO: 204071 - RNA, 19 nt, Artificial Sequence
  Description of Artificial Sequence: Synthetic oligonucleotide
  Antisense strand to SEQ ID NO: 204070
uuagugacuacuaaugagu

SEQ ID NO: 204072 - RNA, 19 nt, Artificial Sequence
  Description of Artificial Sequence: Synthetic oligonucleotide
  Sense strand starting at position 342 of SEQ ID NO: 2630
auuaguagucacuaaaguu

SEQ ID NO: 204073 - RNA, 19 nt, Artificial Sequence
  Description of Artificial Sequence: Synthetic oligonucleotide
  Antisense strand to SEQ ID NO: 204072
aacuuuagugacuacuaau

SEQ ID NO: 204074 - RNA, 19 nt, Artificial Sequence
  Description of Artificial Sequence: Synthetic oligonucleotide
  Sense strand starting at position 434 of SEQ ID NO: 2630
agguauuauuacucccacu

SEQ ID NO: 204075 - RNA, 19 nt, Artificial Sequence
  Description of Artificial Sequence: Synthetic oligonucleotide
  Antisense strand to SEQ ID NO: 204074
agugggaguaauaauaccu

SEQ ID NO: 204076 - RNA, 19 nt, Artificial Sequence
  Description of Artificial Sequence: Synthetic oligonucleotide
  Sense strand starting at position 584 of SEQ ID NO: 2630
caauauuaacgggaagcuu

SEQ ID NO: 204077 - RNA, 19 nt, Artificial Sequence
  Description of Artificial Sequence: Synthetic oligonucleotide
  Antisense strand to SEQ ID NO: 204076
aagcuucccguuaauauug

SEQ ID NO: 204078 - RNA, 19 nt, Artificial Sequence
  Description of Artificial Sequence: Synthetic oligonucleotide
  Sense strand starting at position 611 of SEQ ID NO: 2630
ccugguuagugacuauaaa

SEQ ID NO: 204079 - RNA, 19 nt, Artificial Sequence
  Description of Artificial Sequence: Synthetic oligonucleotide
  Antisense strand to SEQ ID NO: 204078
uuuauagucacuaaccagg

SEQ ID NO: 204080 - RNA, 19 nt, Artificial Sequence
  Description of Artificial Sequence: Synthetic oligonucleotide
  Sense strand starting at position 647 of SEQ ID NO: 2630
uuaaauuaguuccuuugga

SEQ ID NO: 204081 - RNA, 19 nt, Artificial Sequence
  Description of Artificial Sequence: Synthetic oligonucleotide
  Antisense strand to SEQ ID NO: 204080
uccaaaggaacuaauuuaa

SEQ ID NO: 204082 - RNA, 19 nt, Artificial Sequence
  Description of Artificial Sequence: Synthetic oligonucleotide
  Sense strand starting at position 874 of SEQ ID NO: 2630
cggaaaugaugagcuggau

SEQ ID NO: 204083 - RNA, 19 nt, Artificial Sequence
  Description of Artificial Sequence: Synthetic oligonucleotide
  Antisense strand to SEQ ID NO: 204082
auccagcucaucauuuccg

SEQ ID NO: 204084 - RNA, 19 nt, Artificial Sequence
  Description of Artificial Sequence: Synthetic oligonucleotide
  Sense strand starting at position 880 of SEQ ID NO: 2630
ugaugagcuggaugauuaa

SEQ ID NO: 204085 - RNA, 19 nt, Artificial Sequence
  Description of Artificial Sequence: Synthetic oligonucleotide
  Antisense strand to SEQ ID NO: 204084
uuaaucauccagcucauca

SEQ ID NO: 204086 - RNA, 19 nt, Artificial Sequence
  Description of Artificial Sequence: Synthetic oligonucleotide
  Sense strand starting at position 889 of SEQ ID NO: 2630
ggaugauuaaugggccauc

SEQ ID NO: 204087 - RNA, 19 nt, Artificial Sequence
  Description of Artificial Sequence: Synthetic oligonucleotide
  Antisense strand to SEQ ID NO: 204086
gauggcccauuaaucaucc

SEQ ID NO: 204088 - RNA, 19 nt, Artificial Sequence
  Description of Artificial Sequence: Synthetic oligonucleotide
  Sense strand starting at position 892 of SEQ ID NO: 2630
ugauuaaugggccaucuac

SEQ ID NO: 204089 - RNA, 19 nt, Artificial Sequence
  Description of Artificial Sequence: Synthetic oligonucleotide
  Antisense strand to SEQ ID NO: 204088
guagauggcccauuaauca

SEQ ID NO: 204090 - RNA, 19 nt, Artificial Sequence
  Description of Artificial Sequence: Synthetic oligonucleotide
  Sense strand starting at position 926 of SEQ ID NO: 2630
uaaacagugcuuuaaggau

SEQ ID NO: 204091 - RNA, 19 nt, Artificial Sequence
  Description of Artificial Sequence: Synthetic oligonucleotide
  Antisense strand to SEQ ID NO: 204090
auccuuaaagcacuguuua

SEQ ID NO: 204092 - RNA, 19 nt, Artificial Sequence
  Description of Artificial Sequence: Synthetic oligonucleotide
  Sense strand starting at position 934 of SEQ ID NO: 2630
gcuuuaaggauguacauga

SEQ ID NO: 204093 - RNA, 19 nt, Artificial Sequence
  Description of Artificial Sequence: Synthetic oligonucleotide
  Antisense strand to SEQ ID NO: 204092
ucauguacauccuuaaagc

SEQ ID NO: 204094 - RNA, 19 nt, Artificial Sequence
  Description of Artificial Sequence: Synthetic oligonucleotide
  Sense strand starting at position 1114 of SEQ ID NO: 2630
aguagaaguugagaaauuu

SEQ ID NO: 204095 - RNA, 19 nt, Artificial Sequence
  Description of Artificial Sequence: Synthetic oligonucleotide
  Antisense strand to SEQ ID NO: 204094
aaauuucucaacuucuacu

SEQ ID NO: 204096 - RNA, 19 nt, Artificial Sequence
  Description of Artificial Sequence: Synthetic oligonucleotide
  Sense strand starting at position 1193 of SEQ ID NO: 2630
gcaguagaccaacauuaau

SEQ ID NO: 204097 - RNA, 19 nt, Artificial Sequence
  Description of Artificial Sequence: Synthetic oligonucleotide
  Antisense strand to SEQ ID NO: 204096
auuaauguuggucuacugc

SEQ ID NO: 204098 - RNA, 19 nt, Artificial Sequence
  Description of Artificial Sequence: Synthetic oligonucleotide
  Sense strand starting at position 1378 of SEQ ID NO: 2630
guguauccauauguauuua

SEQ ID NO: 204099 - RNA, 19 nt, Artificial Sequence
  Description of Artificial Sequence: Synthetic oligonucleotide
  Antisense strand to SEQ ID NO: 204098
uaaauacauauggauacac

SEQ ID NO: 204100 - RNA, 19 nt, Artificial Sequence
  Description of Artificial Sequence: Synthetic oligonucleotide
  Sense strand starting at position 1561 of SEQ ID NO: 2630
guugcaaauuuguuguaga

SEQ ID NO: 204101 - RNA, 19 nt, Artificial Sequence
  Description of Artificial Sequence: Synthetic oligonucleotide
  Antisense strand to SEQ ID NO: 204100
ucuacaacaaauuugcaac

SEQ ID NO: 204102 - RNA, 19 nt, Artificial Sequence
  Description of Artificial Sequence: Synthetic oligonucleotide
  Sense strand starting at position 1628 of SEQ ID NO: 2630
ggaugucagagagguuuag

SEQ ID NO: 204103 - RNA, 19 nt, Artificial Sequence
  Description of Artificial Sequence: Synthetic oligonucleotide
  Antisense strand to SEQ ID NO: 204102
cuaaaccucucugacaucc

SEQ ID NO: 204104 - RNA, 19 nt, Artificial Sequence
  Description of Artificial Sequence: Synthetic oligonucleotide
  Sense strand starting at position 1638 of SEQ ID NO: 2630
gagguuuagugucuuaaga

SEQ ID NO: 204105 - RNA, 19 nt, Artificial Sequence
  Description of Artificial Sequence: Synthetic oligonucleotide
  Antisense strand to SEQ ID NO: 204104
ucuuaagacacuaaaccuc

SEQ ID NO: 204106 - RNA, 19 nt, Artificial Sequence
  Description of Artificial Sequence: Synthetic oligonucleotide
  Sense strand starting at position 1684 of SEQ ID NO: 2630
guguuaaagucgacaccgu

SEQ ID NO: 204107 - RNA, 19 nt, Artificial Sequence
  Description of Artificial Sequence: Synthetic oligonucleotide
  Antisense strand to SEQ ID NO: 204106
acggugucgacuuuaacac

SEQ ID NO: 204108 - RNA, 19 nt, Artificial Sequence
  Description of Artificial Sequence: Synthetic oligonucleotide
  Sense strand starting at position 1729 of SEQ ID NO: 2630
agggacauaucuucuucca

SEQ ID NO: 204109 - RNA, 19 nt, Artificial Sequence
  Description of Artificial Sequence: Synthetic oligonucleotide
  Antisense strand to SEQ ID NO: 204108
uggaagaagauaugucccu

SEQ ID NO: 204110 - RNA, 19 nt, Artificial Sequence
  Description of Artificial Sequence: Synthetic oligonucleotide
  Sense strand starting at position 1731 of SEQ ID NO: 2630
ggacauaucuucuuccaga

SEQ ID NO: 204111 - RNA, 19 nt, Artificial Sequence
  Description of Artificial Sequence: Synthetic oligonucleotide
  Antisense strand to SEQ ID NO: 204110
ucuggaagaagauaugucc

SEQ ID NO: 204112 - RNA, 19 nt, Artificial Sequence
  Description of Artificial Sequence: Synthetic oligonucleotide
  Sense strand starting at position 1747 of SEQ ID NO: 2630
agaggagacugcucuaggu

SEQ ID NO: 204113 - RNA, 19 nt, Artificial Sequence
  Description of Artificial Sequence: Synthetic oligonucleotide
  Antisense strand to SEQ ID NO: 204112
accuagagcagucuccucu

SEQ ID NO: 204114 - RNA, 19 nt, Artificial Sequence
  Description of Artificial Sequence: Synthetic oligonucleotide
  Sense strand starting at position 2011 of SEQ ID NO: 2630
gguugcaguaauuggauaa

SEQ ID NO: 204115 - RNA, 19 nt, Artificial Sequence
  Description of Artificial Sequence: Synthetic oligonucleotide
  Antisense strand to SEQ ID NO: 204114
uuauccaauuacugcaacc

SEQ ID NO: 204116 - RNA, 19 nt, Artificial Sequence
  Description of Artificial Sequence: Synthetic oligonucleotide
  Sense strand starting at position 2303 of SEQ ID NO: 2630
aaugcacaucaauggugau

SEQ ID NO: 204117 - RNA, 19 nt, Artificial Sequence
  Description of Artificial Sequence: Synthetic oligonucleotide
  Antisense strand to SEQ ID NO: 204116
aucaccauugaugugcauu

SEQ ID NO: 204118 - RNA, 19 nt, Artificial Sequence
  Description of Artificial Sequence: Synthetic oligonucleotide
  Sense strand starting at position 2322 of SEQ ID NO: 2630
acauguuaauuugagaggu

SEQ ID NO: 204119 - RNA, 19 nt, Artificial Sequence
  Description of Artificial Sequence: Synthetic oligonucleotide
  Antisense strand to SEQ ID NO: 204118
accucucaaauuaacaugu

SEQ ID NO: 204120 - RNA, 19 nt, Artificial Sequence
  Description of Artificial Sequence: Synthetic oligonucleotide
  Sense strand starting at position 2324 of SEQ ID NO: 2630
auguuaauuugagagguag

SEQ ID NO: 204121 - RNA, 19 nt, Artificial Sequence
  Description of Artificial Sequence: Synthetic oligonucleotide
  Antisense strand to SEQ ID NO: 204120
cuaccucucaaauuaacau

SEQ ID NO: 204122 - RNA, 19 nt, Artificial Sequence
  Description of Artificial Sequence: Synthetic oligonucleotide
  Sense strand starting at position 2626 of SEQ ID NO: 2630
cuguaauaaccguaucauu

SEQ ID NO: 204123 - RNA, 19 nt, Artificial Sequence
  Description of Artificial Sequence: Synthetic oligonucleotide
  Antisense strand to SEQ ID NO: 204122
aaugauacgguuauuacag

SEQ ID NO: 204124 - RNA, 19 nt, Artificial Sequence
  Description of Artificial Sequence: Synthetic oligonucleotide
  Sense strand starting at position 2656 of SEQ ID NO: 2630
auauaugggucagugaagu

SEQ ID NO: 204125 - RNA, 19 nt, Artificial Sequence
  Description of Artificial Sequence: Synthetic oligonucleotide
  Antisense strand to SEQ ID NO: 204124
acuucacugacccauauau

SEQ ID NO: 204126 - RNA, 19 nt, Artificial Sequence
  Description of Artificial Sequence: Synthetic oligonucleotide
  Sense strand starting at position 2922 of SEQ ID NO: 2630
accaacaucucugcgaaau

SEQ ID NO: 204127 - RNA, 19 nt, Artificial Sequence
  Description of Artificial Sequence: Synthetic oligonucleotide
  Antisense strand to SEQ ID NO: 204126
auuucgcagagauguuggu

SEQ ID NO: 204128 - RNA, 19 nt, Artificial Sequence
  Description of Artificial Sequence: Synthetic oligonucleotide
  Sense strand starting at position 3001 of SEQ ID NO: 2630
gguuaauacuuacugucaa

SEQ ID NO: 204129 - RNA, 19 nt, Artificial Sequence
  Description of Artificial Sequence: Synthetic oligonucleotide
  Antisense strand to SEQ ID NO: 204128
uugacaguaaguauuaacc

SEQ ID NO: 204130 - RNA, 19 nt, Artificial Sequence
  Description of Artificial Sequence: Synthetic oligonucleotide
  Sense strand starting at position 3164 of SEQ ID NO: 2630
acgguuagaauauaaagca

SEQ ID NO: 204131 - RNA, 19 nt, Artificial Sequence
  Description of Artificial Sequence: Synthetic oligonucleotide
  Antisense strand to SEQ ID NO: 204130
ugcuuuauauucuaaccgu

SEQ ID NO: 204132 - RNA, 19 nt, Artificial Sequence
  Description of Artificial Sequence: Synthetic oligonucleotide
  Sense strand starting at position 3202 of SEQ ID NO: 2630
acgagacuggccuagacuu

SEQ ID NO: 204133 - RNA, 19 nt, Artificial Sequence
  Description of Artificial Sequence: Synthetic oligonucleotide
  Antisense strand to SEQ ID NO: 204132
aagucuaggccagucucgu

SEQ ID NO: 204134 - RNA, 19 nt, Artificial Sequence
  Description of Artificial Sequence: Synthetic oligonucleotide
  Sense strand starting at position 3249 of SEQ ID NO: 2630
cuuccuguccuugaauaug

SEQ ID NO: 204135 - RNA, 19 nt, Artificial Sequence
  Description of Artificial Sequence: Synthetic oligonucleotide
  Antisense strand to SEQ ID NO: 204134
cauauucaaggacaggaag

SEQ ID NO: 204136 - RNA, 19 nt, Artificial Sequence
  Description of Artificial Sequence: Synthetic oligonucleotide
  Sense strand starting at position 3514 of SEQ ID NO: 2630
guguguccagauuaggaaa

SEQ ID NO: 204137 - RNA, 19 nt, Artificial Sequence
  Description of Artificial Sequence: Synthetic oligonucleotide
  Antisense strand to SEQ ID NO: 204136
uuuccuaaucuggacacac

SEQ ID NO: 204138 - RNA, 19 nt, Artificial Sequence
  Description of Artificial Sequence: Synthetic oligonucleotide
  Sense strand starting at position 3730 of SEQ ID NO: 2630
cuggaauccuuucucaguu

SEQ ID NO: 204139 - RNA, 19 nt, Artificial Sequence
  Description of Artificial Sequence: Synthetic oligonucleotide
  Antisense strand to SEQ ID NO: 204138
aacugagaaaggauuccag

SEQ ID NO: 204140 - RNA, 19 nt, Artificial Sequence
  Description of Artificial Sequence: Synthetic oligonucleotide
  Sense strand starting at position 3731 of SEQ ID NO: 2630
uggaauccuuucucaguuu

SEQ ID NO: 204141 - RNA, 19 nt, Artificial Sequence
  Description of Artificial Sequence: Synthetic oligonucleotide
  Antisense strand to SEQ ID NO: 204140
aaacugagaaaggauucca

SEQ ID NO: 204142 - RNA, 19 nt, Artificial Sequence
  Description of Artificial Sequence: Synthetic oligonucleotide
  Sense strand starting at position 3742 of SEQ ID NO: 2630
cucaguuucuagguuaaau

SEQ ID NO: 204143 - RNA, 19 nt, Artificial Sequence
  Description of Artificial Sequence: Synthetic oligonucleotide
  Antisense strand to SEQ ID NO: 204142
auuuaaccuagaaacugag

SEQ ID NO: 204144 - RNA, 19 nt, Artificial Sequence
  Description of Artificial Sequence: Synthetic oligonucleotide
  Sense strand starting at position 18 of SEQ ID NO: 2631
uuccuaagguuucugagaa

SEQ ID NO: 204145 - RNA, 19 nt, Artificial Sequence
  Description of Artificial Sequence: Synthetic oligonucleotide
  Antisense strand to SEQ ID NO: 204144
uucucagaaaccuuaggaa

SEQ ID NO: 204146 - RNA, 19 nt, Artificial Sequence
  Description of Artificial Sequence: Synthetic oligonucleotide
  Sense strand starting at position 26 of SEQ ID NO: 2631
guuucugagaacugaaaug

SEQ ID NO: 204147 - RNA, 19 nt, Artificial Sequence
  Description of Artificial Sequence: Synthetic oligonucleotide
  Antisense strand to SEQ ID NO: 204146
cauuucaguucucagaaac

SEQ ID NO: 204148 - RNA, 19 nt, Artificial Sequence
  Description of Artificial Sequence: Synthetic oligonucleotide
  Sense strand starting at position 74 of SEQ ID NO: 2631
cccuuuagacuuuagugaa

SEQ ID NO: 204149 - RNA, 19 nt, Artificial Sequence
  Description of Artificial Sequence: Synthetic oligonucleotide
  Antisense strand to SEQ ID NO: 204148
uucacuaaagucuaaaggg

SEQ ID NO: 204150 - RNA, 19 nt, Artificial Sequence
  Description of Artificial Sequence: Synthetic oligonucleotide
  Sense strand starting at position 109 of SEQ ID NO: 2631
ggagucaaaucuccuagaa

SEQ ID NO: 204151 - RNA, 19 nt, Artificial Sequence
  Description of Artificial Sequence: Synthetic oligonucleotide
  Antisense strand to SEQ ID NO: 204150
uucuaggagauuugacucc

SEQ ID NO: 204152 - RNA, 19 nt, Artificial Sequence
  Description of Artificial Sequence: Synthetic oligonucleotide
  Sense strand starting at position 139 of SEQ ID NO: 2631
ggucaaaguugucucgaca

SEQ ID NO: 204153 - RNA, 19 nt, Artificial Sequence
  Description of Artificial Sequence: Synthetic oligonucleotide
  Antisense strand to SEQ ID NO: 204152
ugucgagacaacuuugacc

SEQ ID NO: 204154 - RNA, 19 nt, Artificial Sequence
  Description of Artificial Sequence: Synthetic oligonucleotide
  Sense strand starting at position 142 of SEQ ID NO: 2631
caaaguugucucgacagca

SEQ ID NO: 204155 - RNA, 19 nt, Artificial Sequence
  Description of Artificial Sequence: Synthetic oligonucleotide
  Antisense strand to SEQ ID NO: 204154
ugcugucgagacaacuuug

SEQ ID NO: 204156 - RNA, 19 nt, Artificial Sequence
  Description of Artificial Sequence: Synthetic oligonucleotide
  Sense strand starting at position 167 of SEQ ID NO: 2631
auagauagaugccagauga

SEQ ID NO: 204157 - RNA, 19 nt, Artificial Sequence
  Description of Artificial Sequence: Synthetic oligonucleotide
  Antisense strand to SEQ ID NO: 204156
ucaucuggcaucuaucuau

SEQ ID NO: 204158 - RNA, 19 nt, Artificial Sequence
  Description of Artificial Sequence: Synthetic oligonucleotide
  Sense strand starting at position 175 of SEQ ID NO: 2631
augccagaugacuaacagu

SEQ ID NO: 204159 - RNA, 19 nt, Artificial Sequence
  Description of Artificial Sequence: Synthetic oligonucleotide
  Antisense strand to SEQ ID NO: 204158
acuguuagucaucuggcau

SEQ ID NO: 204160 - RNA, 19 nt, Artificial Sequence
  Description of Artificial Sequence: Synthetic oligonucleotide
  Sense strand starting at position 178 of SEQ ID NO: 2631
ccagaugacuaacaguaaa

SEQ ID NO: 204161 - RNA, 19 nt, Artificial Sequence
  Description of Artificial Sequence: Synthetic oligonucleotide
  Antisense strand to SEQ ID NO: 204160
uuuacuguuagucaucugg

SEQ ID NO: 204162 - RNA, 19 nt, Artificial Sequence
  Description of Artificial Sequence: Synthetic oligonucleotide
  Sense strand starting at position 197 of SEQ ID NO: 2631
guuaucaaaccguauaaua

SEQ ID NO: 204163 - RNA, 19 nt, Artificial Sequence
  Description of Artificial Sequence: Synthetic oligonucleotide
  Antisense strand to SEQ ID NO: 204162
uauuauacgguuugauaac

SEQ ID NO: 204164 - RNA, 19 nt, Artificial Sequence
  Description of Artificial Sequence: Synthetic oligonucleotide
  Sense strand starting at position 236 of SEQ ID NO: 2631
aguucuggcuuccucaaca

SEQ ID NO: 204165 - RNA, 19 nt, Artificial Sequence
  Description of Artificial Sequence: Synthetic oligonucleotide
  Antisense strand to SEQ ID NO: 204164
uguugaggaagccagaacu

SEQ ID NO: 204166 - RNA, 19 nt, Artificial Sequence
  Description of Artificial Sequence: Synthetic oligonucleotide
  Sense strand starting at position 270 of SEQ ID NO: 2631
cgguaacauuucugaauaa

SEQ ID NO: 204167 - RNA, 19 nt, Artificial Sequence
  Description of Artificial Sequence: Synthetic oligonucleotide
  Antisense strand to SEQ ID NO: 204166
uuauucagaaauguuaccg

SEQ ID NO: 204168 - RNA, 19 nt, Artificial Sequence
  Description of Artificial Sequence: Synthetic oligonucleotide
  Sense strand starting at position 271 of SEQ ID NO: 2631
gguaacauuucugaauaau

SEQ ID NO: 204169 - RNA, 19 nt, Artificial Sequence
  Description of Artificial Sequence: Synthetic oligonucleotide
  Antisense strand to SEQ ID NO: 204168
auuauucagaaauguuacc

SEQ ID NO: 204170 - RNA, 19 nt, Artificial Sequence
  Description of Artificial Sequence: Synthetic oligonucleotide
  Sense strand starting at position 295 of SEQ ID NO: 2631
gaacauggauucccagagu

SEQ ID NO: 204171 - RNA, 19 nt, Artificial Sequence
  Description of Artificial Sequence: Synthetic oligonucleotide
  Antisense strand to SEQ ID NO: 204170
acucugggaauccauguuc

SEQ ID NO: 204172 - RNA, 19 nt, Artificial Sequence
  Description of Artificial Sequence: Synthetic oligonucleotide
  Sense strand starting at position 301 of SEQ ID NO: 2631
ggauucccagagugaucua

SEQ ID NO: 204173 - RNA, 19 nt, Artificial Sequence
  Description of Artificial Sequence: Synthetic oligonucleotide
  Antisense strand to SEQ ID NO: 204172
uagaucacucugggaaucc

SEQ ID NO: 204174 - RNA, 19 nt, Artificial Sequence
  Description of Artificial Sequence: Synthetic oligonucleotide
  Sense strand starting at position 304 of SEQ ID NO: 2631
uucccagagugaucuaaau

SEQ ID NO: 204175 - RNA, 19 nt, Artificial Sequence
  Description of Artificial Sequence: Synthetic oligonucleotide
  Antisense strand to SEQ ID NO: 204174
auuuagaucacucugggaa

SEQ ID NO: 204176 - RNA, 19 nt, Artificial Sequence
  Description of Artificial Sequence: Synthetic oligonucleotide
  Sense strand starting at position 415 of SEQ ID NO: 2631
acaggucuguuuccagaga

SEQ ID NO: 204177 - RNA, 19 nt, Artificial Sequence
  Description of Artificial Sequence: Synthetic oligonucleotide
  Antisense strand to SEQ ID NO: 204176
ucucuggaaacagaccugu

SEQ ID NO: 204178 - RNA, 19 nt, Artificial Sequence
  Description of Artificial Sequence: Synthetic oligonucleotide
  Sense strand starting at position 2351 of SEQ ID NO: 2631
uugggauucgcguauuugu

SEQ ID NO: 204179 - RNA, 19 nt, Artificial Sequence
  Description of Artificial Sequence: Synthetic oligonucleotide
  Antisense strand to SEQ ID NO: 204178
acaaauacgcgaaucccaa

SEQ ID NO: 204180 - RNA, 19 nt, Artificial Sequence
  Description of Artificial Sequence: Synthetic oligonucleotide
  Sense strand starting at position 2354 of SEQ ID NO: 2631
ggauucgcguauuuguuua

SEQ ID NO: 204181 - RNA, 19 nt, Artificial Sequence
  Description of Artificial Sequence: Synthetic oligonucleotide
  Antisense strand to SEQ ID NO: 204180
uaaacaaauacgcgaaucc

SEQ ID NO: 204182 - RNA, 19 nt, Artificial Sequence
  Description of Artificial Sequence: Synthetic oligonucleotide
  Sense strand starting at position 2358 of SEQ ID NO: 2631
ucgcguauuuguuuaagag

SEQ ID NO: 204183 - RNA, 19 nt, Artificial Sequence
  Description of Artificial Sequence: Synthetic oligonucleotide
  Antisense strand to SEQ ID NO: 204182
cucuuaaacaaauacgcga

SEQ ID NO: 204184 - RNA, 19 nt, Artificial Sequence
  Description of Artificial Sequence: Synthetic oligonucleotide
  Sense strand starting at position 2359 of SEQ ID NO: 2631
cgcguauuuguuuaagaga

SEQ ID NO: 204185 - RNA, 19 nt, Artificial Sequence
  Description of Artificial Sequence: Synthetic oligonucleotide
  Antisense strand to SEQ ID NO: 204184
ucucuuaaacaaauacgcg

SEQ ID NO: 204186 - RNA, 19 nt, Artificial Sequence
  Description of Artificial Sequence: Synthetic oligonucleotide
  Sense strand starting at position 2362 of SEQ ID NO: 2631
guauuuguuuaagagacga

SEQ ID NO: 204187 - RNA, 19 nt, Artificial Sequence
  Description of Artificial Sequence: Synthetic oligonucleotide
  Antisense strand to SEQ ID NO: 204186
ucgucucuuaaacaaauac

SEQ ID NO: 204188 - RNA, 19 nt, Artificial Sequence
  Description of Artificial Sequence: Synthetic oligonucleotide
  Sense strand starting at position 2444 of SEQ ID NO: 2631
aggcgucuccgucucagua

SEQ ID NO: 204189 - RNA, 19 nt, Artificial Sequence
  Description of Artificial Sequence: Synthetic oligonucleotide
  Antisense strand to SEQ ID NO: 204188
uacugagacggagacgccu

SEQ ID NO: 204190 - RNA, 19 nt, Artificial Sequence
  Description of Artificial Sequence: Synthetic oligonucleotide
  Sense strand starting at position 2456 of SEQ ID NO: 2631
cucaguacucucggaggaa

SEQ ID NO: 204191 - RNA, 19 nt, Artificial Sequence
  Description of Artificial Sequence: Synthetic oligonucleotide
  Antisense strand to SEQ ID NO: 204190
uuccuccgagaguacugag

SEQ ID NO: 204192 - RNA, 19 nt, Artificial Sequence
  Description of Artificial Sequence: Synthetic oligonucleotide
  Sense strand starting at position 2691 of SEQ ID NO: 2631
uuagccuucuuaguugaca

SEQ ID NO: 204193 - RNA, 19 nt, Artificial Sequence
  Description of Artificial Sequence: Synthetic oligonucleotide
  Antisense strand to SEQ ID NO: 204192
ugucaacuaagaaggcuaa

SEQ ID NO: 204194 - RNA, 19 nt, Artificial Sequence
  Description of Artificial Sequence: Synthetic oligonucleotide
  Sense strand starting at position 2895 of SEQ ID NO: 2631
uagaguugugucgggauag

SEQ ID NO: 204195 - RNA, 19 nt, Artificial Sequence
  Description of Artificial Sequence: Synthetic oligonucleotide
  Antisense strand to SEQ ID NO: 204194
cuaucccgacacaacucua

SEQ ID NO: 204196 - RNA, 19 nt, Artificial Sequence
  Description of Artificial Sequence: Synthetic oligonucleotide
  Sense strand starting at position 2909 of SEQ ID NO: 2631
gauagagagugggaucauu

SEQ ID NO: 204197 - RNA, 19 nt, Artificial Sequence
  Description of Artificial Sequence: Synthetic oligonucleotide
  Antisense strand to SEQ ID NO: 204196
aaugaucccacucucuauc

SEQ ID NO: 204198 - RNA, 19 nt, Artificial Sequence
  Description of Artificial Sequence: Synthetic oligonucleotide
  Sense strand starting at position 2963 of SEQ ID NO: 2631
cgcaguuuccaaggauuug

SEQ ID NO: 204199 - RNA, 19 nt, Artificial Sequence
  Description of Artificial Sequence: Synthetic oligonucleotide
  Antisense strand to SEQ ID NO: 204198
caaauccuuggaaacugcg

SEQ ID NO: 204200 - RNA, 19 nt, Artificial Sequence
  Description of Artificial Sequence: Synthetic oligonucleotide
  Sense strand starting at position 2995 of SEQ ID NO: 2631
uuggaucugguuuguacaa

SEQ ID NO: 204201 - RNA, 19 nt, Artificial Sequence
  Description of Artificial Sequence: Synthetic oligonucleotide
  Antisense strand to SEQ ID NO: 204200
uuguacaaaccagauccaa

SEQ ID NO: 204202 - RNA, 19 nt, Artificial Sequence
  Description of Artificial Sequence: Synthetic oligonucleotide
  Sense strand starting at position 3007 of SEQ ID NO: 2631
uguacaagcgaccaguaua

SEQ ID NO: 204203 - RNA, 19 nt, Artificial Sequence
  Description of Artificial Sequence: Synthetic oligonucleotide
  Antisense strand to SEQ ID NO: 204202
uauacuggucgcuuguaca

SEQ ID NO: 204204 - RNA, 19 nt, Artificial Sequence
  Description of Artificial Sequence: Synthetic oligonucleotide
  Sense strand starting at position 3132 of SEQ ID NO: 2631
ggaagucuggacugaauuc

SEQ ID NO: 204205 - RNA, 19 nt, Artificial Sequence
  Description of Artificial Sequence: Synthetic oligonucleotide
  Antisense strand to SEQ ID NO: 204204
gaauucaguccagacuucc

SEQ ID NO: 204206 - RNA, 19 nt, Artificial Sequence
  Description of Artificial Sequence: Synthetic oligonucleotide
  Sense strand starting at position 3142 of SEQ ID NO: 2631
acugaauucuuagcugcga

SEQ ID NO: 204207 - RNA, 19 nt, Artificial Sequence
  Description of Artificial Sequence: Synthetic oligonucleotide
  Antisense strand to SEQ ID NO: 204206
ucgcagcuaagaauucagu

SEQ ID NO: 204208 - RNA, 19 nt, Artificial Sequence
  Description of Artificial Sequence: Synthetic oligonucleotide
  Sense strand starting at position 3230 of SEQ ID NO: 2631
gaggguuaugcugaaggcu

SEQ ID NO: 204209 - RNA, 19 nt, Artificial Sequence
  Description of Artificial Sequence: Synthetic oligonucleotide
  Antisense strand to SEQ ID NO: 204208
agccuucagcauaacccuc

SEQ ID NO: 204210 - RNA, 19 nt, Artificial Sequence
  Description of Artificial Sequence: Synthetic oligonucleotide
  Sense strand starting at position 3278 of SEQ ID NO: 2631
ggcaguuccacagauacag

SEQ ID NO: 204211 - RNA, 19 nt, Artificial Sequence
  Description of Artificial Sequence: Synthetic oligonucleotide
  Antisense strand to SEQ ID NO: 204210
cuguaucuguggaacugcc

SEQ ID NO: 204212 - RNA, 19 nt, Artificial Sequence
  Description of Artificial Sequence: Synthetic oligonucleotide
  Sense strand starting at position 3288 of SEQ ID NO: 2631
cagauacagucauagauag

SEQ ID NO: 204213 - RNA, 19 nt, Artificial Sequence
  Description of Artificial Sequence: Synthetic oligonucleotide
  Antisense strand to SEQ ID NO: 204212
cuaucuaugacuguaucug

SEQ ID NO: 204214 - RNA, 19 nt, Artificial Sequence
  Description of Artificial Sequence: Synthetic oligonucleotide
  Sense strand starting at position 3344 of SEQ ID NO: 2631
gcuguuaccucuuuaucug

SEQ ID NO: 204215 - RNA, 19 nt, Artificial Sequence
  Description of Artificial Sequence: Synthetic oligonucleotide
  Antisense strand to SEQ ID NO: 204214
cagauaaagagguaacagc

SEQ ID NO: 204216 - RNA, 19 nt, Artificial Sequence
  Description of Artificial Sequence: Synthetic oligonucleotide
  Sense strand starting at position 3345 of SEQ ID NO: 2631
cuguuaccucuuuaucuga

SEQ ID NO: 204217 - RNA, 19 nt, Artificial Sequence
  Description of Artificial Sequence: Synthetic oligonucleotide
  Antisense strand to SEQ ID NO: 204216
ucagauaaagagguaacag

SEQ ID NO: 204218 - RNA, 19 nt, Artificial Sequence
  Description of Artificial Sequence: Synthetic oligonucleotide
  Sense strand starting at position 3389 of SEQ ID NO: 2631
uccuuaaacugguucuguu

SEQ ID NO: 204219 - RNA, 19 nt, Artificial Sequence
  Description of Artificial Sequence: Synthetic oligonucleotide
  Antisense strand to SEQ ID NO: 204218
aacagaaccaguuuaagga

SEQ ID NO: 204220 - RNA, 19 nt, Artificial Sequence
  Description of Artificial Sequence: Synthetic oligonucleotide
  Sense strand starting at position 3474 of SEQ ID NO: 2631
guugaaauauguuuaugcu

SEQ ID NO: 204221 - RNA, 19 nt, Artificial Sequence
  Description of Artificial Sequence: Synthetic oligonucleotide
  Antisense strand to SEQ ID NO: 204220
agcauaaacauauuucaac

SEQ ID NO: 204222 - RNA, 19 nt, Artificial Sequence
  Description of Artificial Sequence: Synthetic oligonucleotide
  Sense strand starting at position 3475 of SEQ ID NO: 2631
uugaaauauguuuaugcug

SEQ ID NO: 204223 - RNA, 19 nt, Artificial Sequence
  Description of Artificial Sequence: Synthetic oligonucleotide
  Antisense strand to SEQ ID NO: 204222
cagcauaaacauauuucaa

SEQ ID NO: 204224 - RNA, 19 nt, Artificial Sequence
  Description of Artificial Sequence: Synthetic oligonucleotide
  Sense strand starting at position 53 of SEQ ID NO: 2632
cugaacuucucagauggga

SEQ ID NO: 204225 - RNA, 19 nt, Artificial Sequence
  Description of Artificial Sequence: Synthetic oligonucleotide
  Antisense strand to SEQ ID NO: 204224
ucccaucugagaaguucag

SEQ ID NO: 204226 - RNA, 19 nt, Artificial Sequence
  Description of Artificial Sequence: Synthetic oligonucleotide
  Sense strand starting at position 523 of SEQ ID NO: 2632
cccagauguccucacagca

SEQ ID NO: 204227 - RNA, 19 nt, Artificial Sequence
  Description of Artificial Sequence: Synthetic oligonucleotide
  Antisense strand to SEQ ID NO: 204226
ugcugugaggacaucuggg

SEQ ID NO: 204228 - RNA, 19 nt, Artificial Sequence
  Description of Artificial Sequence: Synthetic oligonucleotide
  Sense strand starting at position 632 of SEQ ID NO: 2632
ggcgggaucucggccagua

SEQ ID NO: 204229 - RNA, 19 nt, Artificial Sequence
  Description of Artificial Sequence: Synthetic oligonucleotide
  Antisense strand to SEQ ID NO: 204228
uacuggccgagaucccgcc

SEQ ID NO: 204230 - RNA, 19 nt, Artificial Sequence
  Description of Artificial Sequence: Synthetic oligonucleotide
  Sense strand starting at position 759 of SEQ ID NO: 2632
auagauuauucuuucugga

SEQ ID NO: 204231 - RNA, 19 nt, Artificial Sequence
  Description of Artificial Sequence: Synthetic oligonucleotide
  Antisense strand to SEQ ID NO: 204230
uccagaaagaauaaucuau

SEQ ID NO: 204232 - RNA, 19 nt, Artificial Sequence
  Description of Artificial Sequence: Synthetic oligonucleotide
  Sense strand starting at position 764 of SEQ ID NO: 2632
uuauucuuucuggagcuuu

SEQ ID NO: 204233 - RNA, 19 nt, Artificial Sequence
  Description of Artificial Sequence: Synthetic oligonucleotide
  Antisense strand to SEQ ID NO: 204232
aaagcuccagaaagaauaa

SEQ ID NO: 204234 - RNA, 19 nt, Artificial Sequence
  Description of Artificial Sequence: Synthetic oligonucleotide
  Sense strand starting at position 784 of SEQ ID NO: 2632
uauuguuuauggccagcau

SEQ ID NO: 204235 - RNA, 19 nt, Artificial Sequence
  Description of Artificial Sequence: Synthetic oligonucleotide
  Antisense strand to SEQ ID NO: 204234
augcuggccauaaacaaua

SEQ ID NO: 204236 - RNA, 19 nt, Artificial Sequence
  Description of Artificial Sequence: Synthetic oligonucleotide
  Sense strand starting at position 788 of SEQ ID NO: 2632
guuuauggccagcaugacu

SEQ ID NO: 204237 - RNA, 19 nt, Artificial Sequence
  Description of Artificial Sequence: Synthetic oligonucleotide
  Antisense strand to SEQ ID NO: 204236
agucaugcuggccauaaac

SEQ ID NO: 204238 - RNA, 19 nt, Artificial Sequence
  Description of Artificial Sequence: Synthetic oligonucleotide
  Sense strand starting at position 793 of SEQ ID NO: 2632
uggccagcaugacugaaau

SEQ ID NO: 204239 - RNA, 19 nt, Artificial Sequence
  Description of Artificial Sequence: Synthetic oligonucleotide
  Antisense strand to SEQ ID NO: 204238
auuucagucaugcuggcca

SEQ ID NO: 204240 - RNA, 19 nt, Artificial Sequence
  Description of Artificial Sequence: Synthetic oligonucleotide
  Sense strand starting at position 2209 of SEQ ID NO: 2632
ugucuucuucguucguaga

SEQ ID NO: 204241 - RNA, 19 nt, Artificial Sequence
  Description of Artificial Sequence: Synthetic oligonucleotide
  Antisense strand to SEQ ID NO: 204240
ucuacgaacgaagaagaca

SEQ ID NO: 204242 - RNA, 19 nt, Artificial Sequence
  Description of Artificial Sequence: Synthetic oligonucleotide
  Sense strand starting at position 2213 of SEQ ID NO: 2632
uucuucguucguagagguu

SEQ ID NO: 204243 - RNA, 19 nt, Artificial Sequence
  Description of Artificial Sequence: Synthetic oligonucleotide
  Antisense strand to SEQ ID NO: 204242
aaccucuacgaacgaagaa

SEQ ID NO: 204244 - RNA, 19 nt, Artificial Sequence
  Description of Artificial Sequence: Synthetic oligonucleotide
  Sense strand starting at position 2222 of SEQ ID NO: 2632
cguagagguucuuuccaga

SEQ ID NO: 204245 - RNA, 19 nt, Artificial Sequence
  Description of Artificial Sequence: Synthetic oligonucleotide
  Antisense strand to SEQ ID NO: 204244
ucuggaaagaaccucuacg

SEQ ID NO: 204246 - RNA, 19 nt, Artificial Sequence
  Description of Artificial Sequence: Synthetic oligonucleotide
  Sense strand starting at position 2265 of SEQ ID NO: 2632
gacgcaugcccuuuguauu

SEQ ID NO: 204247 - RNA, 19 nt, Artificial Sequence
  Description of Artificial Sequence: Synthetic oligonucleotide
  Antisense strand to SEQ ID NO: 204246
aauacaaagggcaugcguc

SEQ ID NO: 204248 - RNA, 19 nt, Artificial Sequence
  Description of Artificial Sequence: Synthetic oligonucleotide
  Sense strand starting at position 2275 of SEQ ID NO: 2632
cuuuguauuguagauggau

SEQ ID NO: 204249 - RNA, 19 nt, Artificial Sequence
  Description of Artificial Sequence: Synthetic oligonucleotide
  Antisense strand to SEQ ID NO: 204248
auccaucuacaauacaaag

SEQ ID NO: 204250 - RNA, 19 nt, Artificial Sequence
  Description of Artificial Sequence: Synthetic oligonucleotide
  Sense strand starting at position 2277 of SEQ ID NO: 2632
uuguauuguagauggauua

SEQ ID NO: 204251 - RNA, 19 nt, Artificial Sequence
  Description of Artificial Sequence: Synthetic oligonucleotide
  Antisense strand to SEQ ID NO: 204250
uaauccaucuacaauacaa

SEQ ID NO: 204252 - RNA, 19 nt, Artificial Sequence
  Description of Artificial Sequence: Synthetic oligonucleotide
  Sense strand starting at position 2278 of SEQ ID NO: 2632
uguauuguagauggauuau

SEQ ID NO: 204253 - RNA, 19 nt, Artificial Sequence
  Description of Artificial Sequence: Synthetic oligonucleotide
  Antisense strand to SEQ ID NO: 204252
auaauccaucuacaauaca

SEQ ID NO: 204254 - RNA, 19 nt, Artificial Sequence
  Description of Artificial Sequence: Synthetic oligonucleotide
  Sense strand starting at position 2284 of SEQ ID NO: 2632
guagauggauuauuggauu

SEQ ID NO: 204255 - RNA, 19 nt, Artificial Sequence
  Description of Artificial Sequence: Synthetic oligonucleotide
  Antisense strand to SEQ ID NO: 204254
aauccaauaauccaucuac

SEQ ID NO: 204256 - RNA, 19 nt, Artificial Sequence
  Description of Artificial Sequence: Synthetic oligonucleotide
  Sense strand starting at position 2371 of SEQ ID NO: 2632
gaguuacucuuagugaugu

SEQ ID NO: 204257 - RNA, 19 nt, Artificial Sequence
  Description of Artificial Sequence: Synthetic oligonucleotide
  Antisense strand to SEQ ID NO: 204256
acaucacuaagaguaacuc

SEQ ID NO: 204258 - RNA, 19 nt, Artificial Sequence
  Description of Artificial Sequence: Synthetic oligonucleotide
  Sense strand starting at position 2432 of SEQ ID NO: 2632
gggauauccuccuguauuu

SEQ ID NO: 204259 - RNA, 19 nt, Artificial Sequence
  Description of Artificial Sequence: Synthetic oligonucleotide
  Antisense strand to SEQ ID NO: 204258
aaauacaggaggauauccc

SEQ ID NO: 204260 - RNA, 19 nt, Artificial Sequence
  Description of Artificial Sequence: Synthetic oligonucleotide
  Sense strand starting at position 2472 of SEQ ID NO: 2632
ggcucauauuuagaucuau

SEQ ID NO: 204261 - RNA, 19 nt, Artificial Sequence
  Description of Artificial Sequence: Synthetic oligonucleotide
  Antisense strand to SEQ ID NO: 204260
auagaucuaaauaugagcc

SEQ ID NO: 204262 - RNA, 19 nt, Artificial Sequence
  Description of Artificial Sequence: Synthetic oligonucleotide
  Sense strand starting at position 2551 of SEQ ID NO: 2632
cguguagauauccaauuga

SEQ ID NO: 204263 - RNA, 19 nt, Artificial Sequence
  Description of Artificial Sequence: Synthetic oligonucleotide
  Antisense strand to SEQ ID NO: 204262
ucaauuggauaucuacacg

SEQ ID NO: 204264 - RNA, 19 nt, Artificial Sequence
  Description of Artificial Sequence: Synthetic oligonucleotide
  Sense strand starting at position 2684 of SEQ ID NO: 2632
acucuaucccacugguuua

SEQ ID NO: 204265 - RNA, 19 nt, Artificial Sequence
  Description of Artificial Sequence: Synthetic oligonucleotide
  Antisense strand to SEQ ID NO: 204264
uaaaccagugggauagagu

SEQ ID NO: 204266 - RNA, 19 nt, Artificial Sequence
  Description of Artificial Sequence: Synthetic oligonucleotide
  Sense strand starting at position 2768 of SEQ ID NO: 2632
acguguguacaacacuaua

SEQ ID NO: 204267 - RNA, 19 nt, Artificial Sequence
  Description of Artificial Sequence: Synthetic oligonucleotide
  Antisense strand to SEQ ID NO: 204266
uauaguguuguacacacgu

SEQ ID NO: 204268 - RNA, 19 nt, Artificial Sequence
  Description of Artificial Sequence: Synthetic oligonucleotide
  Sense strand starting at position 2806 of SEQ ID NO: 2632
gugcacauaggauguuuau

SEQ ID NO: 204269 - RNA, 19 nt, Artificial Sequence
  Description of Artificial Sequence: Synthetic oligonucleotide
  Antisense strand to SEQ ID NO: 204268
auaaacauccuaugugcac

SEQ ID NO: 204270 - RNA, 19 nt, Artificial Sequence
  Description of Artificial Sequence: Synthetic oligonucleotide
  Sense strand starting at position 2812 of SEQ ID NO: 2632
auaggauguuuaucgaaau

SEQ ID NO: 204271 - RNA, 19 nt, Artificial Sequence
  Description of Artificial Sequence: Synthetic oligonucleotide
  Antisense strand to SEQ ID NO: 204270
auuucgauaaacauccuau

SEQ ID NO: 204272 - RNA, 19 nt, Artificial Sequence
  Description of Artificial Sequence: Synthetic oligonucleotide
  Sense strand starting at position 2866 of SEQ ID NO: 2632
aucucaacggauugaaauc

SEQ ID NO: 204273 - RNA, 19 nt, Artificial Sequence
  Description of Artificial Sequence: Synthetic oligonucleotide
  Antisense strand to SEQ ID NO: 204272
gauuucaauccguugagau

SEQ ID NO: 204274 - RNA, 19 nt, Artificial Sequence
  Description of Artificial Sequence: Synthetic oligonucleotide
  Sense strand starting at position 2886 of SEQ ID NO: 2632
uacaguguguccucucuga

SEQ ID NO: 204275 - RNA, 19 nt, Artificial Sequence
  Description of Artificial Sequence: Synthetic oligonucleotide
  Antisense strand to SEQ ID NO: 204274
ucagagaggacacacugua

SEQ ID NO: 204276 - RNA, 19 nt, Artificial Sequence
  Description of Artificial Sequence: Synthetic oligonucleotide
  Sense strand starting at position 2890 of SEQ ID NO: 2632
guguguccucucugaauua

SEQ ID NO: 204277 - RNA, 19 nt, Artificial Sequence
  Description of Artificial Sequence: Synthetic oligonucleotide
  Antisense strand to SEQ ID NO: 204276
uaauucagagaggacacac

SEQ ID NO: 204278 - RNA, 19 nt, Artificial Sequence
  Description of Artificial Sequence: Synthetic oligonucleotide
  Sense strand starting at position 2938 of SEQ ID NO: 2632
aucugcaaaugcuuggaaa

SEQ ID NO: 204279 - RNA, 19 nt, Artificial Sequence
  Description of Artificial Sequence: Synthetic oligonucleotide
  Antisense strand to SEQ ID NO: 204278
uuuccaagcauuugcagau

SEQ ID NO: 204280 - RNA, 19 nt, Artificial Sequence
  Description of Artificial Sequence: Synthetic oligonucleotide
  Sense strand starting at position 2939 of SEQ ID NO: 2632
ucugcaaaugcuuggaaau

SEQ ID NO: 204281 - RNA, 19 nt, Artificial Sequence
  Description of Artificial Sequence: Synthetic oligonucleotide
  Antisense strand to SEQ ID NO: 204280
auuuccaagcauuugcaga

SEQ ID NO: 204282 - RNA, 19 nt, Artificial Sequence
  Description of Artificial Sequence: Synthetic oligonucleotide
  Sense strand starting at position 2940 of SEQ ID NO: 2632
cugcaaaugcuuggaaauu

SEQ ID NO: 204283 - RNA, 19 nt, Artificial Sequence
  Description of Artificial Sequence: Synthetic oligonucleotide
  Antisense strand to SEQ ID NO: 204282
aauuuccaagcauuugcag

SEQ ID NO: 204284 - RNA, 19 nt, Artificial Sequence
  Description of Artificial Sequence: Synthetic oligonucleotide
  Sense strand starting at position 2986 of SEQ ID NO: 2632
ggucaauaaucacagugga

SEQ ID NO: 204285 - RNA, 19 nt, Artificial Sequence
  Description of Artificial Sequence: Synthetic oligonucleotide
  Antisense strand to SEQ ID NO: 204284
uccacugugauuauugacc

SEQ ID NO: 204286 - RNA, 19 nt, Artificial Sequence
  Description of Artificial Sequence: Synthetic oligonucleotide
  Sense strand starting at position 3082 of SEQ ID NO: 2632
gaggaaauuugauagcuuu

SEQ ID NO: 204287 - RNA, 19 nt, Artificial Sequence
  Description of Artificial Sequence: Synthetic oligonucleotide
  Antisense strand to SEQ ID NO: 204286
aaagcuaucaaauuuccuc

SEQ ID NO: 204288 - RNA, 19 nt, Artificial Sequence
  Description of Artificial Sequence: Synthetic oligonucleotide
  Sense strand starting at position 3090 of SEQ ID NO: 2632
uugauagcuuuagaagaag

SEQ ID NO: 204289 - RNA, 19 nt, Artificial Sequence
  Description of Artificial Sequence: Synthetic oligonucleotide
  Antisense strand to SEQ ID NO: 204288
cuucuucuaaagcuaucaa

SEQ ID NO: 204290 - RNA, 19 nt, Artificial Sequence
  Description of Artificial Sequence: Synthetic oligonucleotide
  Sense strand starting at position 3128 of SEQ ID NO: 2632
ugaaaugacucagaccugu

SEQ ID NO: 204291 - RNA, 19 nt, Artificial Sequence
  Description of Artificial Sequence: Synthetic oligonucleotide
  Antisense strand to SEQ ID NO: 204290
acaggucugagucauuuca

SEQ ID NO: 204292 - RNA, 19 nt, Artificial Sequence
  Description of Artificial Sequence: Synthetic oligonucleotide
  Sense strand starting at position 3380 of SEQ ID NO: 2632
uggacaacagagugugauu

SEQ ID NO: 204293 - RNA, 19 nt, Artificial Sequence
  Description of Artificial Sequence: Synthetic oligonucleotide
  Antisense strand to SEQ ID NO: 204292
aaucacacucuguugucca

SEQ ID NO: 204294 - RNA, 19 nt, Artificial Sequence
  Description of Artificial Sequence: Synthetic oligonucleotide
  Sense strand starting at position 3519 of SEQ ID NO: 2632
agcagaaauuaauggaaua

SEQ ID NO: 204295 - RNA, 19 nt, Artificial Sequence
  Description of Artificial Sequence: Synthetic oligonucleotide
  Antisense strand to SEQ ID NO: 204294
uauuccauuaauuucugcu

SEQ ID NO: 204296 - RNA, 19 nt, Artificial Sequence
  Description of Artificial Sequence: Synthetic oligonucleotide
  Sense strand starting at position 3582 of SEQ ID NO: 2632
ugaagagauuaauagaacu

SEQ ID NO: 204297 - RNA, 19 nt, Artificial Sequence
  Description of Artificial Sequence: Synthetic oligonucleotide
  Antisense strand to SEQ ID NO: 204296
aguucuauuaaucucuuca

SEQ ID NO: 204298 - RNA, 19 nt, Artificial Sequence
  Description of Artificial Sequence: Synthetic oligonucleotide
  Sense strand starting at position 3796 of SEQ ID NO: 2632
ucuggauaguccuacacca

SEQ ID NO: 204299 - RNA, 19 nt, Artificial Sequence
  Description of Artificial Sequence: Synthetic oligonucleotide
  Antisense strand to SEQ ID NO: 204298
ugguguaggacuauccaga

SEQ ID NO: 204300 - RNA, 19 nt, Artificial Sequence
  Description of Artificial Sequence: Synthetic oligonucleotide
  Sense strand starting at position 3954 of SEQ ID NO: 2632
gggaguauuucccaacuca

SEQ ID NO: 204301 - RNA, 19 nt, Artificial Sequence
  Description of Artificial Sequence: Synthetic oligonucleotide
  Antisense strand to SEQ ID NO: 204300
ugaguugggaaauacuccc

SEQ ID NO: 204302 - RNA, 19 nt, Artificial Sequence
  Description of Artificial Sequence: Synthetic oligonucleotide
  Sense strand starting at position 3975 of SEQ ID NO: 2632
uuaugaggucaauguaauu

SEQ ID NO: 204303 - RNA, 19 nt, Artificial Sequence
  Description of Artificial Sequence: Synthetic oligonucleotide
  Antisense strand to SEQ ID NO: 204302
aauuacauugaccucauaa

SEQ ID NO: 204304 - RNA, 19 nt, Artificial Sequence
  Description of Artificial Sequence: Synthetic oligonucleotide
  Sense strand starting at position 1 of SEQ ID NO: 2633
aggaguaucuguagguugu

SEQ ID NO: 204305 - RNA, 19 nt, Artificial Sequence
  Description of Artificial Sequence: Synthetic oligonucleotide
  Antisense strand to SEQ ID NO: 204304
acaaccuacagauacuccu

SEQ ID NO: 204306 - RNA, 19 nt, Artificial Sequence
  Description of Artificial Sequence: Synthetic oligonucleotide
  Sense strand starting at position 2 of SEQ ID NO: 2633
ggaguaucuguagguuguu

SEQ ID NO: 204307 - RNA, 19 nt, Artificial Sequence
  Description of Artificial Sequence: Synthetic oligonucleotide
  Antisense strand to SEQ ID NO: 204306
aacaaccuacagauacucc

SEQ ID NO: 204308 - RNA, 19 nt, Artificial Sequence
  Description of Artificial Sequence: Synthetic oligonucleotide
  Sense strand starting at position 3 of SEQ ID NO: 2633
gaguaucuguagguuguuu

SEQ ID NO: 204309 - RNA, 19 nt, Artificial Sequence
  Description of Artificial Sequence: Synthetic oligonucleotide
  Antisense strand to SEQ ID NO: 204308
aaacaaccuacagauacuc

SEQ ID NO: 204310 - RNA, 19 nt, Artificial Sequence
  Description of Artificial Sequence: Synthetic oligonucleotide
  Sense strand starting at position 15 of SEQ ID NO: 2633
guuguuuaccauuggcaac

SEQ ID NO: 204311 - RNA, 19 nt, Artificial Sequence
  Description of Artificial Sequence: Synthetic oligonucleotide
  Antisense strand to SEQ ID NO: 204310
guugccaaugguaaacaac

SEQ ID NO: 204312 - RNA, 19 nt, Artificial Sequence
  Description of Artificial Sequence: Synthetic oligonucleotide
  Sense strand starting at position 408 of SEQ ID NO: 2633
cgucucaacaguuaguagu

SEQ ID NO: 204313 - RNA, 19 nt, Artificial Sequence
  Description of Artificial Sequence: Synthetic oligonucleotide
  Antisense strand to SEQ ID NO: 204312
acuacuaacuguugagacg

SEQ ID NO: 204314 - RNA, 19 nt, Artificial Sequence
  Description of Artificial Sequence: Synthetic oligonucleotide
  Sense strand starting at position 556 of SEQ ID NO: 2633
ugggacuccaggugauaga

SEQ ID NO: 204315 - RNA, 19 nt, Artificial Sequence
  Description of Artificial Sequence: Synthetic oligonucleotide
  Antisense strand to SEQ ID NO: 204314
ucuaucaccuggaguccca

SEQ ID NO: 204316 - RNA, 19 nt, Artificial Sequence
  Description of Artificial Sequence: Synthetic oligonucleotide
  Sense strand starting at position 641 of SEQ ID NO: 2633
gcccaaguaagaggcauua

SEQ ID NO: 204317 - RNA, 19 nt, Artificial Sequence
  Description of Artificial Sequence: Synthetic oligonucleotide
  Antisense strand to SEQ ID NO: 204316
uaaugccucuuacuugggc

SEQ ID NO: 204318 - RNA, 19 nt, Artificial Sequence
  Description of Artificial Sequence: Synthetic oligonucleotide
  Sense strand starting at position 676 of SEQ ID NO: 2633
gggcacuggucccugacua

SEQ ID NO: 204319 - RNA, 19 nt, Artificial Sequence
  Description of Artificial Sequence: Synthetic oligonucleotide
  Antisense strand to SEQ ID NO: 204318
uagucagggaccagugccc

SEQ ID NO: 204320 - RNA, 19 nt, Artificial Sequence
  Description of Artificial Sequence: Synthetic oligonucleotide
  Sense strand starting at position 853 of SEQ ID NO: 2633
ucucaccacuggucuuaua

SEQ ID NO: 204321 - RNA, 19 nt, Artificial Sequence
  Description of Artificial Sequence: Synthetic oligonucleotide
  Antisense strand to SEQ ID NO: 204320
uauaagaccaguggugaga

SEQ ID NO: 204322 - RNA, 19 nt, Artificial Sequence
  Description of Artificial Sequence: Synthetic oligonucleotide
  Sense strand starting at position 863 of SEQ ID NO: 2633
ggucuuauaggccaggaau

SEQ ID NO: 204323 - RNA, 19 nt, Artificial Sequence
  Description of Artificial Sequence: Synthetic oligonucleotide
  Antisense strand to SEQ ID NO: 204322
auuccuggccuauaagacc

SEQ ID NO: 204324 - RNA, 19 nt, Artificial Sequence
  Description of Artificial Sequence: Synthetic oligonucleotide
  Sense strand starting at position 865 of SEQ ID NO: 2633
ucuuauaggccaggaauga

SEQ ID NO: 204325 - RNA, 19 nt, Artificial Sequence
  Description of Artificial Sequence: Synthetic oligonucleotide
  Antisense strand to SEQ ID NO: 204324
ucauuccuggccuauaaga

SEQ ID NO: 204326 - RNA, 19 nt, Artificial Sequence
  Description of Artificial Sequence: Synthetic oligonucleotide
  Sense strand starting at position 928 of SEQ ID NO: 2633
gcacuuggugcuggaugaa

SEQ ID NO: 204327 - RNA, 19 nt, Artificial Sequence
  Description of Artificial Sequence: Synthetic oligonucleotide
  Antisense strand to SEQ ID NO: 204326
uucauccagcaccaagugc

SEQ ID NO: 204328 - RNA, 19 nt, Artificial Sequence
  Description of Artificial Sequence: Synthetic oligonucleotide
  Sense strand starting at position 931 of SEQ ID NO: 2633
cuuggugcuggaugaauga

SEQ ID NO: 204329 - RNA, 19 nt, Artificial Sequence
  Description of Artificial Sequence: Synthetic oligonucleotide
  Antisense strand to SEQ ID NO: 204328
ucauucauccagcaccaag

SEQ ID NO: 204330 - RNA, 19 nt, Artificial Sequence
  Description of Artificial Sequence: Synthetic oligonucleotide
  Sense strand starting at position 996 of SEQ ID NO: 2633
ggagaaagguccagagugu

SEQ ID NO: 204331 - RNA, 19 nt, Artificial Sequence
  Description of Artificial Sequence: Synthetic oligonucleotide
  Antisense strand to SEQ ID NO: 204330
acacucuggaccuuucucc

SEQ ID NO: 204332 - RNA, 19 nt, Artificial Sequence
  Description of Artificial Sequence: Synthetic oligonucleotide
  Sense strand starting at position 1000 of SEQ ID NO: 2633
aaagguccagagugugauu

SEQ ID NO: 204333 - RNA, 19 nt, Artificial Sequence
  Description of Artificial Sequence: Synthetic oligonucleotide
  Antisense strand to SEQ ID NO: 204332
aaucacacucuggaccuuu

SEQ ID NO: 204334 - RNA, 19 nt, Artificial Sequence
  Description of Artificial Sequence: Synthetic oligonucleotide
  Sense strand starting at position 1037 of SEQ ID NO: 2633
gggacagaaacucgauguu

SEQ ID NO: 204335 - RNA, 19 nt, Artificial Sequence
  Description of Artificial Sequence: Synthetic oligonucleotide
  Antisense strand to SEQ ID NO: 204334
aacaucgaguuucuguccc

SEQ ID NO: 204336 - RNA, 19 nt, Artificial Sequence
  Description of Artificial Sequence: Synthetic oligonucleotide
  Sense strand starting at position 1040 of SEQ ID NO: 2633
acagaaacucgauguugag

SEQ ID NO: 204337 - RNA, 19 nt, Artificial Sequence
  Description of Artificial Sequence: Synthetic oligonucleotide
  Antisense strand to SEQ ID NO: 204336
cucaacaucgaguuucugu

SEQ ID NO: 204338 - RNA, 19 nt, Artificial Sequence
  Description of Artificial Sequence: Synthetic oligonucleotide
  Sense strand starting at position 1066 of SEQ ID NO: 2633
acaggauugccaggaguga

SEQ ID NO: 204339 - RNA, 19 nt, Artificial Sequence
  Description of Artificial Sequence: Synthetic oligonucleotide
  Antisense strand to SEQ ID NO: 204338
ucacuccuggcaauccugu

SEQ ID NO: 204340 - RNA, 19 nt, Artificial Sequence
  Description of Artificial Sequence: Synthetic oligonucleotide
  Sense strand starting at position 1180 of SEQ ID NO: 2633
agaggugagcguugcagaa

SEQ ID NO: 204341 - RNA, 19 nt, Artificial Sequence
  Description of Artificial Sequence: Synthetic oligonucleotide
  Antisense strand to SEQ ID NO: 204340
uucugcaacgcucaccucu

SEQ ID NO: 204342 - RNA, 19 nt, Artificial Sequence
  Description of Artificial Sequence: Synthetic oligonucleotide
  Sense strand starting at position 1192 of SEQ ID NO: 2633
ugcagaauccuugggagaa

SEQ ID NO: 204343 - RNA, 19 nt, Artificial Sequence
  Description of Artificial Sequence: Synthetic oligonucleotide
  Antisense strand to SEQ ID NO: 204342
uucucccaaggauucugca

SEQ ID NO: 204344 - RNA, 19 nt, Artificial Sequence
  Description of Artificial Sequence: Synthetic oligonucleotide
  Sense strand starting at position 1240 of SEQ ID NO: 2633
cggccuuuaguggaacaau

SEQ ID NO: 204345 - RNA, 19 nt, Artificial Sequence
  Description of Artificial Sequence: Synthetic oligonucleotide
  Antisense strand to SEQ ID NO: 204344
auuguuccacuaaaggccg

SEQ ID NO: 204346 - RNA, 19 nt, Artificial Sequence
  Description of Artificial Sequence: Synthetic oligonucleotide
  Sense strand starting at position 1384 of SEQ ID NO: 2633
augguaugagcugaagcaa

SEQ ID NO: 204347 - RNA, 19 nt, Artificial Sequence
  Description of Artificial Sequence: Synthetic oligonucleotide
  Antisense strand to SEQ ID NO: 204346
uugcuucagcucauaccau

SEQ ID NO: 204348 - RNA, 19 nt, Artificial Sequence
  Description of Artificial Sequence: Synthetic oligonucleotide
  Sense strand starting at position 1584 of SEQ ID NO: 2633
ugucuucugcucgguaaac

SEQ ID NO: 204349 - RNA, 19 nt, Artificial Sequence
  Description of Artificial Sequence: Synthetic oligonucleotide
  Antisense strand to SEQ ID NO: 204348
guuuaccgagcagaagaca

SEQ ID NO: 204350 - RNA, 19 nt, Artificial Sequence
  Description of Artificial Sequence: Synthetic oligonucleotide
  Sense strand starting at position 1586 of SEQ ID NO: 2633
ucuucugcucgguaaacca

SEQ ID NO: 204351 - RNA, 19 nt, Artificial Sequence
  Description of Artificial Sequence: Synthetic oligonucleotide
  Antisense strand to SEQ ID NO: 204350
ugguuuaccgagcagaaga

SEQ ID NO: 204352 - RNA, 19 nt, Artificial Sequence
  Description of Artificial Sequence: Synthetic oligonucleotide
  Sense strand starting at position 1699 of SEQ ID NO: 2633
gcgcgccagagcuugaaau

SEQ ID NO: 204353 - RNA, 19 nt, Artificial Sequence
  Description of Artificial Sequence: Synthetic oligonucleotide
  Antisense strand to SEQ ID NO: 204352
auuucaagcucuggcgcgc

SEQ ID NO: 204354 - RNA, 19 nt, Artificial Sequence
  Description of Artificial Sequence: Synthetic oligonucleotide
  Sense strand starting at position 1701 of SEQ ID NO: 2633
gcgccagagcuugaaauuu

SEQ ID NO: 204355 - RNA, 19 nt, Artificial Sequence
  Description of Artificial Sequence: Synthetic oligonucleotide
  Antisense strand to SEQ ID NO: 204354
aaauuucaagcucuggcgc

SEQ ID NO: 204356 - RNA, 19 nt, Artificial Sequence
  Description of Artificial Sequence: Synthetic oligonucleotide
  Sense strand starting at position 1712 of SEQ ID NO: 2633
ugaaauuucgaaugccguu

SEQ ID NO: 204357 - RNA, 19 nt, Artificial Sequence
  Description of Artificial Sequence: Synthetic oligonucleotide
  Antisense strand to SEQ ID NO: 204356
aacggcauucgaaauuuca

SEQ ID NO: 204358 - RNA, 19 nt, Artificial Sequence
  Description of Artificial Sequence: Synthetic oligonucleotide
  Sense strand starting at position 1728 of SEQ ID NO: 2633
guugucgcugagugaauga

SEQ ID NO: 204359 - RNA, 19 nt, Artificial Sequence
  Description of Artificial Sequence: Synthetic oligonucleotide
  Antisense strand to SEQ ID NO: 204358
ucauucacucagcgacaac

SEQ ID NO: 204360 - RNA, 19 nt, Artificial Sequence
  Description of Artificial Sequence: Synthetic oligonucleotide
  Sense strand starting at position 1733 of SEQ ID NO: 2633
cgcugagugaaugaaugaa

SEQ ID NO: 204361 - RNA, 19 nt, Artificial Sequence
  Description of Artificial Sequence: Synthetic oligonucleotide
  Antisense strand to SEQ ID NO: 204360
uucauucauucacucagcg

SEQ ID NO: 204362 - RNA, 19 nt, Artificial Sequence
  Description of Artificial Sequence: Synthetic oligonucleotide
  Sense strand starting at position 1993 of SEQ ID NO: 2633
cacuguaugcccgaaagac

SEQ ID NO: 204363 - RNA, 19 nt, Artificial Sequence
  Description of Artificial Sequence: Synthetic oligonucleotide
  Antisense strand to SEQ ID NO: 204362
gucuuucgggcauacagug

SEQ ID NO: 204364 - RNA, 19 nt, Artificial Sequence
  Description of Artificial Sequence: Synthetic oligonucleotide
  Sense strand starting at position 2554 of SEQ ID NO: 2633
cgcgaugguccaggugaga

SEQ ID NO: 204365 - RNA, 19 nt, Artificial Sequence
  Description of Artificial Sequence: Synthetic oligonucleotide
  Antisense strand to SEQ ID NO: 204364
ucucaccuggaccaucgcg

SEQ ID NO: 204366 - RNA, 19 nt, Artificial Sequence
  Description of Artificial Sequence: Synthetic oligonucleotide
  Sense strand starting at position 2672 of SEQ ID NO: 2633
gugggaagguaucugagau

SEQ ID NO: 204367 - RNA, 19 nt, Artificial Sequence
  Description of Artificial Sequence: Synthetic oligonucleotide
  Antisense strand to SEQ ID NO: 204366
aucucagauaccuucccac

SEQ ID NO: 204368 - RNA, 19 nt, Artificial Sequence
  Description of Artificial Sequence: Synthetic oligonucleotide
  Sense strand starting at position 2676 of SEQ ID NO: 2633
gaagguaucugagaugacu

SEQ ID NO: 204369 - RNA, 19 nt, Artificial Sequence
  Description of Artificial Sequence: Synthetic oligonucleotide
  Antisense strand to SEQ ID NO: 204368
agucaucucagauaccuuc

SEQ ID NO: 204370 - RNA, 19 nt, Artificial Sequence
  Description of Artificial Sequence: Synthetic oligonucleotide
  Sense strand starting at position 2684 of SEQ ID NO: 2633
cugagaugacuccaguuuc

SEQ ID NO: 204371 - RNA, 19 nt, Artificial Sequence
  Description of Artificial Sequence: Synthetic oligonucleotide
  Antisense strand to SEQ ID NO: 204370
gaaacuggagucaucucag

SEQ ID NO: 204372 - RNA, 19 nt, Artificial Sequence
  Description of Artificial Sequence: Synthetic oligonucleotide
  Sense strand starting at position 2696 of SEQ ID NO: 2633
caguuucuggcuuggacaa

SEQ ID NO: 204373 - RNA, 19 nt, Artificial Sequence
  Description of Artificial Sequence: Synthetic oligonucleotide
  Antisense strand to SEQ ID NO: 204372
uuguccaagccagaaacug

SEQ ID NO: 204374 - RNA, 19 nt, Artificial Sequence
  Description of Artificial Sequence: Synthetic oligonucleotide
  Sense strand starting at position 2745 of SEQ ID NO: 2633
agcagaguccacgaacagu

SEQ ID NO: 204375 - RNA, 19 nt, Artificial Sequence
  Description of Artificial Sequence: Synthetic oligonucleotide
  Antisense strand to SEQ ID NO: 204374
acuguucguggacucugcu

SEQ ID NO: 204376 - RNA, 19 nt, Artificial Sequence
  Description of Artificial Sequence: Synthetic oligonucleotide
  Sense strand starting at position 2762 of SEQ ID NO: 2633
guucuuaauuugccugagu

SEQ ID NO: 204377 - RNA, 19 nt, Artificial Sequence
  Description of Artificial Sequence: Synthetic oligonucleotide
  Antisense strand to SEQ ID NO: 204376
acucaggcaaauuaagaac

SEQ ID NO: 204378 - RNA, 19 nt, Artificial Sequence
  Description of Artificial Sequence: Synthetic oligonucleotide
  Sense strand starting at position 2763 of SEQ ID NO: 2633
uucuuaauuugccugaguu

SEQ ID NO: 204379 - RNA, 19 nt, Artificial Sequence
  Description of Artificial Sequence: Synthetic oligonucleotide
  Antisense strand to SEQ ID NO: 204378
aacucaggcaaauuaagaa

SEQ ID NO: 204380 - RNA, 19 nt, Artificial Sequence
  Description of Artificial Sequence: Synthetic oligonucleotide
  Sense strand starting at position 2764 of SEQ ID NO: 2633
ucuuaauuugccugaguuu

SEQ ID NO: 204381 - RNA, 19 nt, Artificial Sequence
  Description of Artificial Sequence: Synthetic oligonucleotide
  Antisense strand to SEQ ID NO: 204380
aaacucaggcaaauuaaga

SEQ ID NO: 204382 - RNA, 19 nt, Artificial Sequence
  Description of Artificial Sequence: Synthetic oligonucleotide
  Sense strand starting at position 2775 of SEQ ID NO: 2633
cugaguuuaaggugccaca

SEQ ID NO: 204383 - RNA, 19 nt, Artificial Sequence
  Description of Artificial Sequence: Synthetic oligonucleotide
  Antisense strand to SEQ ID NO: 204382
uguggcaccuuaaacucag

SEQ ID NO: 204384 - RNA, 19 nt, Artificial Sequence
  Description of Artificial Sequence: Synthetic oligonucleotide
  Sense strand starting at position 11 of SEQ ID NO: 2635
acuugagaaucacauugaa

SEQ ID NO: 204385 - RNA, 19 nt, Artificial Sequence
  Description of Artificial Sequence: Synthetic oligonucleotide
  Antisense strand to SEQ ID NO: 204384
uucaaugugauucucaagu

SEQ ID NO: 204386 - RNA, 19 nt, Artificial Sequence
  Description of Artificial Sequence: Synthetic oligonucleotide
  Sense strand starting at position 157 of SEQ ID NO: 2635
gaaguaaacuggguguugu

SEQ ID NO: 204387 - RNA, 19 nt, Artificial Sequence
  Description of Artificial Sequence: Synthetic oligonucleotide
  Antisense strand to SEQ ID NO: 204386
acaacacccaguuuacuuc

SEQ ID NO: 204388 - RNA, 19 nt, Artificial Sequence
  Description of Artificial Sequence: Synthetic oligonucleotide
  Sense strand starting at position 538 of SEQ ID NO: 2635
ggaaguauguacuccuaau

SEQ ID NO: 204389 - RNA, 19 nt, Artificial Sequence
  Description of Artificial Sequence: Synthetic oligonucleotide
  Antisense strand to SEQ ID NO: 204388
auuaggaguacauacuucc

SEQ ID NO: 204390 - RNA, 19 nt, Artificial Sequence
  Description of Artificial Sequence: Synthetic oligonucleotide
  Sense strand starting at position 544 of SEQ ID NO: 2635
auguacuccuaauaaggga

SEQ ID NO: 204391 - RNA, 19 nt, Artificial Sequence
  Description of Artificial Sequence: Synthetic oligonucleotide
  Antisense strand to SEQ ID NO: 204390
ucccuuauuaggaguacau

SEQ ID NO: 204392 - RNA, 19 nt, Artificial Sequence
  Description of Artificial Sequence: Synthetic oligonucleotide
  Sense strand starting at position 634 of SEQ ID NO: 2635
gaaagaaacugggaaucua

SEQ ID NO: 204393 - RNA, 19 nt, Artificial Sequence
  Description of Artificial Sequence: Synthetic oligonucleotide
  Antisense strand to SEQ ID NO: 204392
uagauucccaguuucuuuc

SEQ ID NO: 204394 - RNA, 19 nt, Artificial Sequence
  Description of Artificial Sequence: Synthetic oligonucleotide
  Sense strand starting at position 702 of SEQ ID NO: 2635
ucacuucgcucaguaggau

SEQ ID NO: 204395 - RNA, 19 nt, Artificial Sequence
  Description of Artificial Sequence: Synthetic oligonucleotide
  Antisense strand to SEQ ID NO: 204394
auccuacugagcgaaguga

SEQ ID NO: 204396 - RNA, 19 nt, Artificial Sequence
  Description of Artificial Sequence: Synthetic oligonucleotide
  Sense strand starting at position 703 of SEQ ID NO: 2635
cacuucgcucaguaggaua

SEQ ID NO: 204397 - RNA, 19 nt, Artificial Sequence
  Description of Artificial Sequence: Synthetic oligonucleotide
  Antisense strand to SEQ ID NO: 204396
uauccuacugagcgaagug

SEQ ID NO: 204398 - RNA, 19 nt, Artificial Sequence
  Description of Artificial Sequence: Synthetic oligonucleotide
  Sense strand starting at position 705 of SEQ ID NO: 2635
cuucgcucaguaggauaua

SEQ ID NO: 204399 - RNA, 19 nt, Artificial Sequence
  Description of Artificial Sequence: Synthetic oligonucleotide
  Antisense strand to SEQ ID NO: 204398
uauauccuacugagcgaag

SEQ ID NO: 204400 - RNA, 19 nt, Artificial Sequence
  Description of Artificial Sequence: Synthetic oligonucleotide
  Sense strand starting at position 708 of SEQ ID NO: 2635
cgcucaguaggauauaaug

SEQ ID NO: 204401 - RNA, 19 nt, Artificial Sequence
  Description of Artificial Sequence: Synthetic oligonucleotide
  Antisense strand to SEQ ID NO: 204400
cauuauauccuacugagcg

SEQ ID NO: 204402 - RNA, 19 nt, Artificial Sequence
  Description of Artificial Sequence: Synthetic oligonucleotide
  Sense strand starting at position 722 of SEQ ID NO: 2635
uaaugcucagaauggguaa

SEQ ID NO: 204403 - RNA, 19 nt, Artificial Sequence
  Description of Artificial Sequence: Synthetic oligonucleotide
  Antisense strand to SEQ ID NO: 204402
uuacccauucugagcauua

SEQ ID NO: 204404 - RNA, 19 nt, Artificial Sequence
  Description of Artificial Sequence: Synthetic oligonucleotide
  Sense strand starting at position 724 of SEQ ID NO: 2635
augcucagaauggguaauu

SEQ ID NO: 204405 - RNA, 19 nt, Artificial Sequence
  Description of Artificial Sequence: Synthetic oligonucleotide
  Antisense strand to SEQ ID NO: 204404
aauuacccauucugagcau

SEQ ID NO: 204406 - RNA, 19 nt, Artificial Sequence
  Description of Artificial Sequence: Synthetic oligonucleotide
  Sense strand starting at position 734 of SEQ ID NO: 2635
uggguaauucuggaaugcu

SEQ ID NO: 204407 - RNA, 19 nt, Artificial Sequence
  Description of Artificial Sequence: Synthetic oligonucleotide
  Antisense strand to SEQ ID NO: 204406
agcauuccagaauuaccca

SEQ ID NO: 204408 - RNA, 19 nt, Artificial Sequence
  Description of Artificial Sequence: Synthetic oligonucleotide
  Sense strand starting at position 774 of SEQ ID NO: 2635
uuuguauugcuagagauaa

SEQ ID NO: 204409 - RNA, 19 nt, Artificial Sequence
  Description of Artificial Sequence: Synthetic oligonucleotide
  Antisense strand to SEQ ID NO: 204408
uuaucucuagcaauacaaa

SEQ ID NO: 204410 - RNA, 19 nt, Artificial Sequence
  Description of Artificial Sequence: Synthetic oligonucleotide
  Sense strand starting at position 792 of SEQ ID NO: 2635
auauaacagcucuaguaga

SEQ ID NO: 204411 - RNA, 19 nt, Artificial Sequence
  Description of Artificial Sequence: Synthetic oligonucleotide
  Antisense strand to SEQ ID NO: 204410
ucuacuagagcuguuauau

SEQ ID NO: 204412 - RNA, 19 nt, Artificial Sequence
  Description of Artificial Sequence: Synthetic oligonucleotide
  Sense strand starting at position 797 of SEQ ID NO: 2635
acagcucuaguagauguaa

SEQ ID NO: 204413 - RNA, 19 nt, Artificial Sequence
  Description of Artificial Sequence: Synthetic oligonucleotide
  Antisense strand to SEQ ID NO: 204412
uuacaucuacuagagcugu

SEQ ID NO: 204414 - RNA, 19 nt, Artificial Sequence
  Description of Artificial Sequence: Synthetic oligonucleotide
  Sense strand starting at position 913 of SEQ ID NO: 2635
guacuaauauguucgcaag

SEQ ID NO: 204415 - RNA, 19 nt, Artificial Sequence
  Description of Artificial Sequence: Synthetic oligonucleotide
  Antisense strand to SEQ ID NO: 204414
cuugcgaacauauuaguac

SEQ ID NO: 204416 - RNA, 19 nt, Artificial Sequence
  Description of Artificial Sequence: Synthetic oligonucleotide
  Sense strand starting at position 914 of SEQ ID NO: 2635
uacuaauauguucgcaagu

SEQ ID NO: 204417 - RNA, 19 nt, Artificial Sequence
  Description of Artificial Sequence: Synthetic oligonucleotide
  Antisense strand to SEQ ID NO: 204416
acuugcgaacauauuagua

SEQ ID NO: 204418 - RNA, 19 nt, Artificial Sequence
  Description of Artificial Sequence: Synthetic oligonucleotide
  Sense strand starting at position 915 of SEQ ID NO: 2635
acuaauauguucgcaaguu

SEQ ID NO: 204419 - RNA, 19 nt, Artificial Sequence
  Description of Artificial Sequence: Synthetic oligonucleotide
  Antisense strand to SEQ ID NO: 204418
aacuugcgaacauauuagu

SEQ ID NO: 204420 - RNA, 19 nt, Artificial Sequence
  Description of Artificial Sequence: Synthetic oligonucleotide
  Sense strand starting at position 986 of SEQ ID NO: 2635
ggaaguaaacagugcuuua

SEQ ID NO: 204421 - RNA, 19 nt, Artificial Sequence
  Description of Artificial Sequence: Synthetic oligonucleotide
  Antisense strand to SEQ ID NO: 204420
uaaagcacuguuuacuucc

SEQ ID NO: 204422 - RNA, 19 nt, Artificial Sequence
  Description of Artificial Sequence: Synthetic oligonucleotide
  Sense strand starting at position 1142 of SEQ ID NO: 2635
ucuaacauacgauauaguu

SEQ ID NO: 204423 - RNA, 19 nt, Artificial Sequence
  Description of Artificial Sequence: Synthetic oligonucleotide
  Antisense strand to SEQ ID NO: 204422
aacuauaucguauguuaga

SEQ ID NO: 204424 - RNA, 19 nt, Artificial Sequence
  Description of Artificial Sequence: Synthetic oligonucleotide
  Sense strand starting at position 1151 of SEQ ID NO: 2635
cgauauaguuuacuuagua

SEQ ID NO: 204425 - RNA, 19 nt, Artificial Sequence
  Description of Artificial Sequence: Synthetic oligonucleotide
  Antisense strand to SEQ ID NO: 204424
uacuaaguaaacuauaucg

SEQ ID NO: 204426 - RNA, 19 nt, Artificial Sequence
  Description of Artificial Sequence: Synthetic oligonucleotide
  Sense strand starting at position 1167 of SEQ ID NO: 2635
guauguuuauuaucugucu

SEQ ID NO: 204427 - RNA, 19 nt, Artificial Sequence
  Description of Artificial Sequence: Synthetic oligonucleotide
  Antisense strand to SEQ ID NO: 204426
agacagauaauaaacauac

SEQ ID NO: 204428 - RNA, 19 nt, Artificial Sequence
  Description of Artificial Sequence: Synthetic oligonucleotide
  Sense strand starting at position 1178 of SEQ ID NO: 2635
aucugucuccacuauuaug

SEQ ID NO: 204429 - RNA, 19 nt, Artificial Sequence
  Description of Artificial Sequence: Synthetic oligonucleotide
  Antisense strand to SEQ ID NO: 204428
cauaauaguggagacagau

SEQ ID NO: 204430 - RNA, 19 nt, Artificial Sequence
  Description of Artificial Sequence: Synthetic oligonucleotide
  Sense strand starting at position 1309 of SEQ ID NO: 2635
ucaggagagaccugcucau

SEQ ID NO: 204431 - RNA, 19 nt, Artificial Sequence
  Description of Artificial Sequence: Synthetic oligonucleotide
  Antisense strand to SEQ ID NO: 204430
augagcaggucucuccuga

SEQ ID NO: 204432 - RNA, 19 nt, Artificial Sequence
  Description of Artificial Sequence: Synthetic oligonucleotide
  Sense strand starting at position 1321 of SEQ ID NO: 2635
ugcucaugauaugccaaau

SEQ ID NO: 204433 - RNA, 19 nt, Artificial Sequence
  Description of Artificial Sequence: Synthetic oligonucleotide
  Antisense strand to SEQ ID NO: 204432
auuuggcauaucaugagca

SEQ ID NO: 204434 - RNA, 19 nt, Artificial Sequence
  Description of Artificial Sequence: Synthetic oligonucleotide
  Sense strand starting at position 1782 of SEQ ID NO: 2635
aacaauuagcgaugcauug

SEQ ID NO: 204435 - RNA, 19 nt, Artificial Sequence
  Description of Artificial Sequence: Synthetic oligonucleotide
  Antisense strand to SEQ ID NO: 204434
caaugcaucgcuaauuguu

SEQ ID NO: 204436 - RNA, 19 nt, Artificial Sequence
  Description of Artificial Sequence: Synthetic oligonucleotide
  Sense strand starting at position 1835 of SEQ ID NO: 2635
gcaauaauuccgcaugugu

SEQ ID NO: 204437 - RNA, 19 nt, Artificial Sequence
  Description of Artificial Sequence: Synthetic oligonucleotide
  Antisense strand to SEQ ID NO: 204436
acacaugcggaauuauugc

SEQ ID NO: 204438 - RNA, 19 nt, Artificial Sequence
  Description of Artificial Sequence: Synthetic oligonucleotide
  Sense strand starting at position 1837 of SEQ ID NO: 2635
aauaauuccgcauguguua

SEQ ID NO: 204439 - RNA, 19 nt, Artificial Sequence
  Description of Artificial Sequence: Synthetic oligonucleotide
  Antisense strand to SEQ ID NO: 204438
uaacacaugcggaauuauu

SEQ ID NO: 204440 - RNA, 19 nt, Artificial Sequence
  Description of Artificial Sequence: Synthetic oligonucleotide
  Sense strand starting at position 1846 of SEQ ID NO: 2635
gcauguguuacggaaacac

SEQ ID NO: 204441 - RNA, 19 nt, Artificial Sequence
  Description of Artificial Sequence: Synthetic oligonucleotide
  Antisense strand to SEQ ID NO: 204440
guguuuccguaacacaugc

SEQ ID NO: 204442 - RNA, 19 nt, Artificial Sequence
  Description of Artificial Sequence: Synthetic oligonucleotide
  Sense strand starting at position 1873 of SEQ ID NO: 2635
ggacuguugccggguuuga

SEQ ID NO: 204443 - RNA, 19 nt, Artificial Sequence
  Description of Artificial Sequence: Synthetic oligonucleotide
  Antisense strand to SEQ ID NO: 204442
ucaaacccggcaacagucc

SEQ ID NO: 204444 - RNA, 19 nt, Artificial Sequence
  Description of Artificial Sequence: Synthetic oligonucleotide
  Sense strand starting at position 1981 of SEQ ID NO: 2635
gagaaucaaccucgagauc

SEQ ID NO: 204445 - RNA, 19 nt, Artificial Sequence
  Description of Artificial Sequence: Synthetic oligonucleotide
  Antisense strand to SEQ ID NO: 204444
gaucucgagguugauucuc

SEQ ID NO: 204446 - RNA, 19 nt, Artificial Sequence
  Description of Artificial Sequence: Synthetic oligonucleotide
  Sense strand starting at position 2120 of SEQ ID NO: 2635
cgacaacuuccucgaguuc

SEQ ID NO: 204447 - RNA, 19 nt, Artificial Sequence
  Description of Artificial Sequence: Synthetic oligonucleotide
  Antisense strand to SEQ ID NO: 204446
gaacucgaggaaguugucg

SEQ ID NO: 204448 - RNA, 19 nt, Artificial Sequence
  Description of Artificial Sequence: Synthetic oligonucleotide
  Sense strand starting at position 2121 of SEQ ID NO: 2635
gacaacuuccucgaguucu

SEQ ID NO: 204449 - RNA, 19 nt, Artificial Sequence
  Description of Artificial Sequence: Synthetic oligonucleotide
  Antisense strand to SEQ ID NO: 204448
agaacucgaggaaguuguc

SEQ ID NO: 204450 - RNA, 19 nt, Artificial Sequence
  Description of Artificial Sequence: Synthetic oligonucleotide
  Sense strand starting at position 2212 of SEQ ID NO: 2635
aaggcuagccagcgagaaa

SEQ ID NO: 204451 - RNA, 19 nt, Artificial Sequence
  Description of Artificial Sequence: Synthetic oligonucleotide
  Antisense strand to SEQ ID NO: 204450
uuucucgcuggcuagccuu

SEQ ID NO: 204452 - RNA, 19 nt, Artificial Sequence
  Description of Artificial Sequence: Synthetic oligonucleotide
  Sense strand starting at position 2213 of SEQ ID NO: 2635
aggcuagccagcgagaaau

SEQ ID NO: 204453 - RNA, 19 nt, Artificial Sequence
  Description of Artificial Sequence: Synthetic oligonucleotide
  Antisense strand to SEQ ID NO: 204452
auuucucgcuggcuagccu

SEQ ID NO: 204454 - RNA, 19 nt, Artificial Sequence
  Description of Artificial Sequence: Synthetic oligonucleotide
  Sense strand starting at position 2632 of SEQ ID NO: 2635
agcccaauuucggcgggaa

SEQ ID NO: 204455 - RNA, 19 nt, Artificial Sequence
  Description of Artificial Sequence: Synthetic oligonucleotide
  Antisense strand to SEQ ID NO: 204454
uucccgccgaaauugggcu

SEQ ID NO: 204456 - RNA, 19 nt, Artificial Sequence
  Description of Artificial Sequence: Synthetic oligonucleotide
  Sense strand starting at position 2633 of SEQ ID NO: 2635
gcccaauuucggcgggaaa

SEQ ID NO: 204457 - RNA, 19 nt, Artificial Sequence
  Description of Artificial Sequence: Synthetic oligonucleotide
  Antisense strand to SEQ ID NO: 204456
uuucccgccgaaauugggc

SEQ ID NO: 204458 - RNA, 19 nt, Artificial Sequence
  Description of Artificial Sequence: Synthetic oligonucleotide
  Sense strand starting at position 3561 of SEQ ID NO: 2635
guguaaagcgaagaagguu

SEQ ID NO: 204459 - RNA, 19 nt, Artificial Sequence
  Description of Artificial Sequence: Synthetic oligonucleotide
  Antisense strand to SEQ ID NO: 204458
aaccuucuucgcuuuacac

SEQ ID NO: 204460 - RNA, 19 nt, Artificial Sequence
  Description of Artificial Sequence: Synthetic oligonucleotide
  Sense strand starting at position 3886 of SEQ ID NO: 2635
ugggaucgccuuuggaaga

SEQ ID NO: 204461 - RNA, 19 nt, Artificial Sequence
  Description of Artificial Sequence: Synthetic oligonucleotide
  Antisense strand to SEQ ID NO: 204460
ucuuccaaaggcgauccca

SEQ ID NO: 204462 - RNA, 19 nt, Artificial Sequence
  Description of Artificial Sequence: Synthetic oligonucleotide
  Sense strand starting at position 3891 of SEQ ID NO: 2635
ucgccuuuggaagaagauu

SEQ ID NO: 204463 - RNA, 19 nt, Artificial Sequence
  Description of Artificial Sequence: Synthetic oligonucleotide
  Antisense strand to SEQ ID NO: 204462
aaucuucuuccaaaggcga

SEQ ID NO: 204464 - RNA, 19 nt, Artificial Sequence
  Description of Artificial Sequence: Synthetic oligonucleotide
  Sense strand starting at position 198 of SEQ ID NO: 2636
ggaaguauguacuccuaau

SEQ ID NO: 204465 - RNA, 19 nt, Artificial Sequence
  Description of Artificial Sequence: Synthetic oligonucleotide
  Antisense strand to SEQ ID NO: 204464
auuaggaguacauacuucc

SEQ ID NO: 204466 - RNA, 19 nt, Artificial Sequence
  Description of Artificial Sequence: Synthetic oligonucleotide
  Sense strand starting at position 294 of SEQ ID NO: 2636
gaaagaaacugggaaucua

SEQ ID NO: 204467 - RNA, 19 nt, Artificial Sequence
  Description of Artificial Sequence: Synthetic oligonucleotide
  Antisense strand to SEQ ID NO: 204466
uagauucccaguuucuuuc

SEQ ID NO: 204468 - RNA, 19 nt, Artificial Sequence
  Description of Artificial Sequence: Synthetic oligonucleotide
  Sense strand starting at position 362 of SEQ ID NO: 2636
ucacuucgcucaguaggau

SEQ ID NO: 204469 - RNA, 19 nt, Artificial Sequence
  Description of Artificial Sequence: Synthetic oligonucleotide
  Antisense strand to SEQ ID NO: 204468
auccuacugagcgaaguga

SEQ ID NO: 204470 - RNA, 19 nt, Artificial Sequence
  Description of Artificial Sequence: Synthetic oligonucleotide
  Sense strand starting at position 363 of SEQ ID NO: 2636
cacuucgcucaguaggaua

SEQ ID NO: 204471 - RNA, 19 nt, Artificial Sequence
  Description of Artificial Sequence: Synthetic oligonucleotide
  Antisense strand to SEQ ID NO: 204470
uauccuacugagcgaagug

SEQ ID NO: 204472 - RNA, 19 nt, Artificial Sequence
  Description of Artificial Sequence: Synthetic oligonucleotide
  Sense strand starting at position 365 of SEQ ID NO: 2636
cuucgcucaguaggauaua

SEQ ID NO: 204473 - RNA, 19 nt, Artificial Sequence
  Description of Artificial Sequence: Synthetic oligonucleotide
  Antisense strand to SEQ ID NO: 204472
uauauccuacugagcgaag

SEQ ID NO: 204474 - RNA, 19 nt, Artificial Sequence
  Description of Artificial Sequence: Synthetic oligonucleotide
  Sense strand starting at position 368 of SEQ ID NO: 2636
cgcucaguaggauauaaug

SEQ ID NO: 204475 - RNA, 19 nt, Artificial Sequence
  Description of Artificial Sequence: Synthetic oligonucleotide
  Antisense strand to SEQ ID NO: 204474
cauuauauccuacugagcg

SEQ ID NO: 204476 - RNA, 19 nt, Artificial Sequence
  Description of Artificial Sequence: Synthetic oligonucleotide
  Sense strand starting at position 382 of SEQ ID NO: 2636
uaaugcucagaauggguaa

SEQ ID NO: 204477 - RNA, 19 nt, Artificial Sequence
  Description of Artificial Sequence: Synthetic oligonucleotide
  Antisense strand to SEQ ID NO: 204476
uuacccauucugagcauua

SEQ ID NO: 204478 - RNA, 19 nt, Artificial Sequence
  Description of Artificial Sequence: Synthetic oligonucleotide
  Sense strand starting at position 384 of SEQ ID NO: 2636
augcucagaauggguaauu

SEQ ID NO: 204479 - RNA, 19 nt, Artificial Sequence
  Description of Artificial Sequence: Synthetic oligonucleotide
  Antisense strand to SEQ ID NO: 204478
aauuacccauucugagcau

SEQ ID NO: 204480 - RNA, 19 nt, Artificial Sequence
  Description of Artificial Sequence: Synthetic oligonucleotide
  Sense strand starting at position 394 of SEQ ID NO: 2636
uggguaauucuggaaugcu

SEQ ID NO: 204481 - RNA, 19 nt, Artificial Sequence
  Description of Artificial Sequence: Synthetic oligonucleotide
  Antisense strand to SEQ ID NO: 204480
agcauuccagaauuaccca

SEQ ID NO: 204482 - RNA, 19 nt, Artificial Sequence
  Description of Artificial Sequence: Synthetic oligonucleotide
  Sense strand starting at position 434 of SEQ ID NO: 2636
uuuguauugcuagagauaa

SEQ ID NO: 204483 - RNA, 19 nt, Artificial Sequence
  Description of Artificial Sequence: Synthetic oligonucleotide
  Antisense strand to SEQ ID NO: 204482
uuaucucuagcaauacaaa

SEQ ID NO: 204484 - RNA, 19 nt, Artificial Sequence
  Description of Artificial Sequence: Synthetic oligonucleotide
  Sense strand starting at position 452 of SEQ ID NO: 2636
auauaacagcucuaguaga

SEQ ID NO: 204485 - RNA, 19 nt, Artificial Sequence
  Description of Artificial Sequence: Synthetic oligonucleotide
  Antisense strand to SEQ ID NO: 204484
ucuacuagagcuguuauau

SEQ ID NO: 204486 - RNA, 19 nt, Artificial Sequence
  Description of Artificial Sequence: Synthetic oligonucleotide
  Sense strand starting at position 457 of SEQ ID NO: 2636
acagcucuaguagauguaa

SEQ ID NO: 204487 - RNA, 19 nt, Artificial Sequence
  Description of Artificial Sequence: Synthetic oligonucleotide
  Antisense strand to SEQ ID NO: 204486
uuacaucuacuagagcugu

SEQ ID NO: 204488 - RNA, 19 nt, Artificial Sequence
  Description of Artificial Sequence: Synthetic oligonucleotide
  Sense strand starting at position 573 of SEQ ID NO: 2636
guacuaauauguucgcaag

SEQ ID NO: 204489 - RNA, 19 nt, Artificial Sequence
  Description of Artificial Sequence: Synthetic oligonucleotide
  Antisense strand to SEQ ID NO: 204488
cuugcgaacauauuaguac

SEQ ID NO: 204490 - RNA, 19 nt, Artificial Sequence
  Description of Artificial Sequence: Synthetic oligonucleotide
  Sense strand starting at position 646 of SEQ ID NO: 2636
ggaaguaaacagugcuuua

SEQ ID NO: 204491 - RNA, 19 nt, Artificial Sequence
  Description of Artificial Sequence: Synthetic oligonucleotide
  Antisense strand to SEQ ID NO: 204490
uaaagcacuguuuacuucc

SEQ ID NO: 204492 - RNA, 19 nt, Artificial Sequence
  Description of Artificial Sequence: Synthetic oligonucleotide
  Sense strand starting at position 802 of SEQ ID NO: 2636
ucuaacauacgauauaguu

SEQ ID NO: 204493 - RNA, 19 nt, Artificial Sequence
  Description of Artificial Sequence: Synthetic oligonucleotide
  Antisense strand to SEQ ID NO: 204492
aacuauaucguauguuaga

SEQ ID NO: 204494 - RNA, 19 nt, Artificial Sequence
  Description of Artificial Sequence: Synthetic oligonucleotide
  Sense strand starting at position 811 of SEQ ID NO: 2636
cgauauaguuuacuuagua

SEQ ID NO: 204495 - RNA, 19 nt, Artificial Sequence
  Description of Artificial Sequence: Synthetic oligonucleotide
  Antisense strand to SEQ ID NO: 204494
uacuaaguaaacuauaucg

SEQ ID NO: 204496 - RNA, 19 nt, Artificial Sequence
  Description of Artificial Sequence: Synthetic oligonucleotide
  Sense strand starting at position 838 of SEQ ID NO: 2636
aucugucuccacuauuaug

SEQ ID NO: 204497 - RNA, 19 nt, Artificial Sequence
  Description of Artificial Sequence: Synthetic oligonucleotide
  Antisense strand to SEQ ID NO: 204496
cauaauaguggagacagau

SEQ ID NO: 204498 - RNA, 19 nt, Artificial Sequence
  Description of Artificial Sequence: Synthetic oligonucleotide
  Sense strand starting at position 969 of SEQ ID NO: 2636
ucaggagagaccugcucau

SEQ ID NO: 204499 - RNA, 19 nt, Artificial Sequence
  Description of Artificial Sequence: Synthetic oligonucleotide
  Antisense strand to SEQ ID NO: 204498
augagcaggucucuccuga

SEQ ID NO: 204500 - RNA, 19 nt, Artificial Sequence
  Description of Artificial Sequence: Synthetic oligonucleotide
  Sense strand starting at position 981 of SEQ ID NO: 2636
ugcucaugauaugccaaau

SEQ ID NO: 204501 - RNA, 19 nt, Artificial Sequence
  Description of Artificial Sequence: Synthetic oligonucleotide
  Antisense strand to SEQ ID NO: 204500
auuuggcauaucaugagca

SEQ ID NO: 204502 - RNA, 19 nt, Artificial Sequence
  Description of Artificial Sequence: Synthetic oligonucleotide
  Sense strand starting at position 1442 of SEQ ID NO: 2636
aacaauuagcgaugcauug

SEQ ID NO: 204503 - RNA, 19 nt, Artificial Sequence
  Description of Artificial Sequence: Synthetic oligonucleotide
  Antisense strand to SEQ ID NO: 204502
caaugcaucgcuaauuguu

SEQ ID NO: 204504 - RNA, 19 nt, Artificial Sequence
  Description of Artificial Sequence: Synthetic oligonucleotide
  Sense strand starting at position 1506 of SEQ ID NO: 2636
gcauguguuacggaaacac

SEQ ID NO: 204505 - RNA, 19 nt, Artificial Sequence
  Description of Artificial Sequence: Synthetic oligonucleotide
  Antisense strand to SEQ ID NO: 204504
guguuuccguaacacaugc

SEQ ID NO: 204506 - RNA, 19 nt, Artificial Sequence
  Description of Artificial Sequence: Synthetic oligonucleotide
  Sense strand starting at position 1641 of SEQ ID NO: 2636
gagaaucaaccucgagauc

SEQ ID NO: 204507 - RNA, 19 nt, Artificial Sequence
  Description of Artificial Sequence: Synthetic oligonucleotide
  Antisense strand to SEQ ID NO: 204506
gaucucgagguugauucuc

SEQ ID NO: 204508 - RNA, 19 nt, Artificial Sequence
  Description of Artificial Sequence: Synthetic oligonucleotide
  Sense strand starting at position 1780 of SEQ ID NO: 2636
cgacaacuuccucgaguuc

SEQ ID NO: 204509 - RNA, 19 nt, Artificial Sequence
  Description of Artificial Sequence: Synthetic oligonucleotide
  Antisense strand to SEQ ID NO: 204508
gaacucgaggaaguugucg

SEQ ID NO: 204510 - RNA, 19 nt, Artificial Sequence
  Description of Artificial Sequence: Synthetic oligonucleotide
  Sense strand starting at position 1781 of SEQ ID NO: 2636
gacaacuuccucgaguucu

SEQ ID NO: 204511 - RNA, 19 nt, Artificial Sequence
  Description of Artificial Sequence: Synthetic oligonucleotide
  Antisense strand to SEQ ID NO: 204510
agaacucgaggaaguuguc

SEQ ID NO: 204512 - RNA, 19 nt, Artificial Sequence
  Description of Artificial Sequence: Synthetic oligonucleotide
  Sense strand starting at position 1872 of SEQ ID NO: 2636
aaggcuagccagcgagaaa

SEQ ID NO: 204513 - RNA, 19 nt, Artificial Sequence
  Description of Artificial Sequence: Synthetic oligonucleotide
  Antisense strand to SEQ ID NO: 204512
uuucucgcuggcuagccuu

SEQ ID NO: 204514 - RNA, 19 nt, Artificial Sequence
  Description of Artificial Sequence: Synthetic oligonucleotide
  Sense strand starting at position 1873 of SEQ ID NO: 2636
aggcuagccagcgagaaau

SEQ ID NO: 204515 - RNA, 19 nt, Artificial Sequence
  Description of Artificial Sequence: Synthetic oligonucleotide
  Antisense strand to SEQ ID NO: 204514
auuucucgcuggcuagccu

SEQ ID NO: 204516 - RNA, 19 nt, Artificial Sequence
  Description of Artificial Sequence: Synthetic oligonucleotide
  Sense strand starting at position 2292 of SEQ ID NO: 2636
agcccaauuucggcgggaa

SEQ ID NO: 204517 - RNA, 19 nt, Artificial Sequence
  Description of Artificial Sequence: Synthetic oligonucleotide
  Antisense strand to SEQ ID NO: 204516
uucccgccgaaauugggcu

SEQ ID NO: 204518 - RNA, 19 nt, Artificial Sequence
  Description of Artificial Sequence: Synthetic oligonucleotide
  Sense strand starting at position 2293 of SEQ ID NO: 2636
gcccaauuucggcgggaaa

SEQ ID NO: 204519 - RNA, 19 nt, Artificial Sequence
  Description of Artificial Sequence: Synthetic oligonucleotide
  Antisense strand to SEQ ID NO: 204518
uuucccgccgaaauugggc

SEQ ID NO: 204520 - RNA, 19 nt, Artificial Sequence
  Description of Artificial Sequence: Synthetic oligonucleotide
  Sense strand starting at position 3221 of SEQ ID NO: 2636
guguaaagcgaagaagguu

SEQ ID NO: 204521 - RNA, 19 nt, Artificial Sequence
  Description of Artificial Sequence: Synthetic oligonucleotide
  Antisense strand to SEQ ID NO: 204520
aaccuucuucgcuuuacac

SEQ ID NO: 204522 - RNA, 19 nt, Artificial Sequence
  Description of Artificial Sequence: Synthetic oligonucleotide
  Sense strand starting at position 3546 of SEQ ID NO: 2636
ugggaucgccuuuggaaga

SEQ ID NO: 204523 - RNA, 19 nt, Artificial Sequence
  Description of Artificial Sequence: Synthetic oligonucleotide
  Antisense strand to SEQ ID NO: 204522
ucuuccaaaggcgauccca

SEQ ID NO: 204524 - RNA, 19 nt, Artificial Sequence
  Description of Artificial Sequence: Synthetic oligonucleotide
  Sense strand starting at position 3551 of SEQ ID NO: 2636
ucgccuuuggaagaagauu

SEQ ID NO: 204525 - RNA, 19 nt, Artificial Sequence
  Description of Artificial Sequence: Synthetic oligonucleotide
  Antisense strand to SEQ ID NO: 204524
aaucuucuuccaaaggcga

SEQ ID NO: 204526 - RNA, 19 nt, Artificial Sequence
  Description of Artificial Sequence: Synthetic oligonucleotide
  Sense strand starting at position 3839 of SEQ ID NO: 2636
ccugucuuggccgcucaaa

SEQ ID NO: 204527 - RNA, 19 nt, Artificial Sequence
  Description of Artificial Sequence: Synthetic oligonucleotide
  Antisense strand to SEQ ID NO: 204526
uuugagcggccaagacagg

SEQ ID NO: 204528 - RNA, 19 nt, Artificial Sequence
  Description of Artificial Sequence: Synthetic oligonucleotide
  Sense strand starting at position 3840 of SEQ ID NO: 2636
cugucuuggccgcucaaau

SEQ ID NO: 204529 - RNA, 19 nt, Artificial Sequence
  Description of Artificial Sequence: Synthetic oligonucleotide
  Antisense strand to SEQ ID NO: 204528
auuugagcggccaagacag

SEQ ID NO: 204530 - RNA, 19 nt, Artificial Sequence
  Description of Artificial Sequence: Synthetic oligonucleotide
  Sense strand starting at position 3841 of SEQ ID NO: 2636
ugucuuggccgcucaaauu

SEQ ID NO: 204531 - RNA, 19 nt, Artificial Sequence
  Description of Artificial Sequence: Synthetic oligonucleotide
  Antisense strand to SEQ ID NO: 204530
aauuugagcggccaagaca

SEQ ID NO: 204532 - RNA, 19 nt, Artificial Sequence
  Description of Artificial Sequence: Synthetic oligonucleotide
  Sense strand starting at position 3887 of SEQ ID NO: 2636
gcccguccaguugacuaau

SEQ ID NO: 204533 - RNA, 19 nt, Artificial Sequence
  Description of Artificial Sequence: Synthetic oligonucleotide
  Antisense strand to SEQ ID NO: 204532
auuagucaacuggacgggc

SEQ ID NO: 204534 - RNA, 19 nt, Artificial Sequence
  Description of Artificial Sequence: Synthetic oligonucleotide
  Sense strand starting at position 3889 of SEQ ID NO: 2636
ccguccaguugacuaauua

SEQ ID NO: 204535 - RNA, 19 nt, Artificial Sequence
  Description of Artificial Sequence: Synthetic oligonucleotide
  Antisense strand to SEQ ID NO: 204534
uaauuagucaacuggacgg

SEQ ID NO: 204536 - RNA, 19 nt, Artificial Sequence
  Description of Artificial Sequence: Synthetic oligonucleotide
  Sense strand starting at position 3890 of SEQ ID NO: 2636
cguccaguugacuaauuau

SEQ ID NO: 204537 - RNA, 19 nt, Artificial Sequence
  Description of Artificial Sequence: Synthetic oligonucleotide
  Antisense strand to SEQ ID NO: 204536
auaauuagucaacuggacg

SEQ ID NO: 204538 - RNA, 19 nt, Artificial Sequence
  Description of Artificial Sequence: Synthetic oligonucleotide
  Sense strand starting at position 3900 of SEQ ID NO: 2636
acuaauuauuuagacacga

SEQ ID NO: 204539 - RNA, 19 nt, Artificial Sequence
  Description of Artificial Sequence: Synthetic oligonucleotide
  Antisense strand to SEQ ID NO: 204538
ucgugucuaaauaauuagu

SEQ ID NO: 204540 - RNA, 19 nt, Artificial Sequence
  Description of Artificial Sequence: Synthetic oligonucleotide
  Sense strand starting at position 3953 of SEQ ID NO: 2636
gugcgaucacgcucacuga

SEQ ID NO: 204541 - RNA, 19 nt, Artificial Sequence
  Description of Artificial Sequence: Synthetic oligonucleotide
  Antisense strand to SEQ ID NO: 204540
ucagugagcgugaucgcac

SEQ ID NO: 204542 - RNA, 19 nt, Artificial Sequence
  Description of Artificial Sequence: Synthetic oligonucleotide
  Sense strand starting at position 3956 of SEQ ID NO: 2636
cgaucacgcucacugaauu

SEQ ID NO: 204543 - RNA, 19 nt, Artificial Sequence
  Description of Artificial Sequence: Synthetic oligonucleotide
  Antisense strand to SEQ ID NO: 204542
aauucagugagcgugaucg

SEQ ID NO: 204544 - RNA, 19 nt, Artificial Sequence
  Description of Artificial Sequence: Synthetic oligonucleotide
  Sense strand starting at position 105 of SEQ ID NO: 2637
ucaggagagaccugcucau

SEQ ID NO: 204545 - RNA, 19 nt, Artificial Sequence
  Description of Artificial Sequence: Synthetic oligonucleotide
  Antisense strand to SEQ ID NO: 204544
augagcaggucucuccuga

SEQ ID NO: 204546 - RNA, 19 nt, Artificial Sequence
  Description of Artificial Sequence: Synthetic oligonucleotide
  Sense strand starting at position 117 of SEQ ID NO: 2637
ugcucaugauaugccaaau

SEQ ID NO: 204547 - RNA, 19 nt, Artificial Sequence
  Description of Artificial Sequence: Synthetic oligonucleotide
  Antisense strand to SEQ ID NO: 204546
auuuggcauaucaugagca

SEQ ID NO: 204548 - RNA, 19 nt, Artificial Sequence
  Description of Artificial Sequence: Synthetic oligonucleotide
  Sense strand starting at position 578 of SEQ ID NO: 2637
aacaauuagcgaugcauug

SEQ ID NO: 204549 - RNA, 19 nt, Artificial Sequence
  Description of Artificial Sequence: Synthetic oligonucleotide
  Antisense strand to SEQ ID NO: 204548
caaugcaucgcuaauuguu

SEQ ID NO: 204550 - RNA, 19 nt, Artificial Sequence
  Description of Artificial Sequence: Synthetic oligonucleotide
  Sense strand starting at position 642 of SEQ ID NO: 2637
gcauguguuacggaaacac

SEQ ID NO: 204551 - RNA, 19 nt, Artificial Sequence
  Description of Artificial Sequence: Synthetic oligonucleotide
  Antisense strand to SEQ ID NO: 204550
guguuuccguaacacaugc

SEQ ID NO: 204552 - RNA, 19 nt, Artificial Sequence
  Description of Artificial Sequence: Synthetic oligonucleotide
  Sense strand starting at position 777 of SEQ ID NO: 2637
gagaaucaaccucgagauc

SEQ ID NO: 204553 - RNA, 19 nt, Artificial Sequence
  Description of Artificial Sequence: Synthetic oligonucleotide
  Antisense strand to SEQ ID NO: 204552
gaucucgagguugauucuc

SEQ ID NO: 204554 - RNA, 19 nt, Artificial Sequence
  Description of Artificial Sequence: Synthetic oligonucleotide
  Sense strand starting at position 917 of SEQ ID NO: 2637
gacaacuuccucgaguucu

SEQ ID NO: 204555 - RNA, 19 nt, Artificial Sequence
  Description of Artificial Sequence: Synthetic oligonucleotide
  Antisense strand to SEQ ID NO: 204554
agaacucgaggaaguuguc

SEQ ID NO: 204556 - RNA, 19 nt, Artificial Sequence
  Description of Artificial Sequence: Synthetic oligonucleotide
  Sense strand starting at position 1008 of SEQ ID NO: 2637
aaggcuagccagcgagaaa

SEQ ID NO: 204557 - RNA, 19 nt, Artificial Sequence
  Description of Artificial Sequence: Synthetic oligonucleotide
  Antisense strand to SEQ ID NO: 204556
uuucucgcuggcuagccuu

SEQ ID NO: 204558 - RNA, 19 nt, Artificial Sequence
  Description of Artificial Sequence: Synthetic oligonucleotide
  Sense strand starting at position 1009 of SEQ ID NO: 2637
aggcuagccagcgagaaau

SEQ ID NO: 204559 - RNA, 19 nt, Artificial Sequence
  Description of Artificial Sequence: Synthetic oligonucleotide
  Antisense strand to SEQ ID NO: 204558
auuucucgcuggcuagccu

SEQ ID NO: 204560 - RNA, 19 nt, Artificial Sequence
  Description of Artificial Sequence: Synthetic oligonucleotide
  Sense strand starting at position 1428 of SEQ ID NO: 2637
agcccaauuucggcgggaa

SEQ ID NO: 204561 - RNA, 19 nt, Artificial Sequence
  Description of Artificial Sequence: Synthetic oligonucleotide
  Antisense strand to SEQ ID NO: 204560
uucccgccgaaauugggcu

SEQ ID NO: 204562 - RNA, 19 nt, Artificial Sequence
  Description of Artificial Sequence: Synthetic oligonucleotide
  Sense strand starting at position 1429 of SEQ ID NO: 2637
gcccaauuucggcgggaaa

SEQ ID NO: 204563 - RNA, 19 nt, Artificial Sequence
  Description of Artificial Sequence: Synthetic oligonucleotide
  Antisense strand to SEQ ID NO: 204562
uuucccgccgaaauugggc

SEQ ID NO: 204564 - RNA, 19 nt, Artificial Sequence
  Description of Artificial Sequence: Synthetic oligonucleotide
  Sense strand starting at position 2357 of SEQ ID NO: 2637
guguaaagcgaagaagguu

SEQ ID NO: 204565 - RNA, 19 nt, Artificial Sequence
  Description of Artificial Sequence: Synthetic oligonucleotide
  Antisense strand to SEQ ID NO: 204564
aaccuucuucgcuuuacac

SEQ ID NO: 204566 - RNA, 19 nt, Artificial Sequence
  Description of Artificial Sequence: Synthetic oligonucleotide
  Sense strand starting at position 2682 of SEQ ID NO: 2637
ugggaucgccuuuggaaga

SEQ ID NO: 204567 - RNA, 19 nt, Artificial Sequence
  Description of Artificial Sequence: Synthetic oligonucleotide
  Antisense strand to SEQ ID NO: 204566
ucuuccaaaggcgauccca

SEQ ID NO: 204568 - RNA, 19 nt, Artificial Sequence
  Description of Artificial Sequence: Synthetic oligonucleotide
  Sense strand starting at position 2687 of SEQ ID NO: 2637
ucgccuuuggaagaagauu

SEQ ID NO: 204569 - RNA, 19 nt, Artificial Sequence
  Description of Artificial Sequence: Synthetic oligonucleotide
  Antisense strand to SEQ ID NO: 204568
aaucuucuuccaaaggcga

SEQ ID NO: 204570 - RNA, 19 nt, Artificial Sequence
  Description of Artificial Sequence: Synthetic oligonucleotide
  Sense strand starting at position 2975 of SEQ ID NO: 2637
ccugucuuggccgcucaaa

SEQ ID NO: 204571 - RNA, 19 nt, Artificial Sequence
  Description of Artificial Sequence: Synthetic oligonucleotide
  Antisense strand to SEQ ID NO: 204570
uuugagcggccaagacagg

SEQ ID NO: 204572 - RNA, 19 nt, Artificial Sequence
  Description of Artificial Sequence: Synthetic oligonucleotide
  Sense strand starting at position 2976 of SEQ ID NO: 2637
cugucuuggccgcucaaau

SEQ ID NO: 204573 - RNA, 19 nt, Artificial Sequence
  Description of Artificial Sequence: Synthetic oligonucleotide
  Antisense strand to SEQ ID NO: 204572
auuugagcggccaagacag

SEQ ID NO: 204574 - RNA, 19 nt, Artificial Sequence
  Description of Artificial Sequence: Synthetic oligonucleotide
  Sense strand starting at position 2977 of SEQ ID NO: 2637
ugucuuggccgcucaaauu

SEQ ID NO: 204575 - RNA, 19 nt, Artificial Sequence
  Description of Artificial Sequence: Synthetic oligonucleotide
  Antisense strand to SEQ ID NO: 204574
aauuugagcggccaagaca

SEQ ID NO: 204576 - RNA, 19 nt, Artificial Sequence
  Description of Artificial Sequence: Synthetic oligonucleotide
  Sense strand starting at position 3023 of SEQ ID NO: 2637
gcccguccaguugacuaau

SEQ ID NO: 204577 - RNA, 19 nt, Artificial Sequence
  Description of Artificial Sequence: Synthetic oligonucleotide
  Antisense strand to SEQ ID NO: 204576
auuagucaacuggacgggc

SEQ ID NO: 204578 - RNA, 19 nt, Artificial Sequence
  Description of Artificial Sequence: Synthetic oligonucleotide
  Sense strand starting at position 3025 of SEQ ID NO: 2637
ccguccaguugacuaauua

SEQ ID NO: 204579 - RNA, 19 nt, Artificial Sequence
  Description of Artificial Sequence: Synthetic oligonucleotide
  Antisense strand to SEQ ID NO: 204578
uaauuagucaacuggacgg

SEQ ID NO: 204580 - RNA, 19 nt, Artificial Sequence
  Description of Artificial Sequence: Synthetic oligonucleotide
  Sense strand starting at position 3026 of SEQ ID NO: 2637
cguccaguugacuaauuau

SEQ ID NO: 204581 - RNA, 19 nt, Artificial Sequence
  Description of Artificial Sequence: Synthetic oligonucleotide
  Antisense strand to SEQ ID NO: 204580
auaauuagucaacuggacg

SEQ ID NO: 204582 - RNA, 19 nt, Artificial Sequence
  Description of Artificial Sequence: Synthetic oligonucleotide
  Sense strand starting at position 3036 of SEQ ID NO: 2637
acuaauuauuuagacacga

SEQ ID NO: 204583 - RNA, 19 nt, Artificial Sequence
  Description of Artificial Sequence: Synthetic oligonucleotide
  Antisense strand to SEQ ID NO: 204582
ucgugucuaaauaauuagu

SEQ ID NO: 204584 - RNA, 19 nt, Artificial Sequence
  Description of Artificial Sequence: Synthetic oligonucleotide
  Sense strand starting at position 3089 of SEQ ID NO: 2637
gugcgaucacgcucacuga

SEQ ID NO: 204585 - RNA, 19 nt, Artificial Sequence
  Description of Artificial Sequence: Synthetic oligonucleotide
  Antisense strand to SEQ ID NO: 204584
ucagugagcgugaucgcac

SEQ ID NO: 204586 - RNA, 19 nt, Artificial Sequence
  Description of Artificial Sequence: Synthetic oligonucleotide
  Sense strand starting at position 3201 of SEQ ID NO: 2637
agaagacugcuuuguaaau

SEQ ID NO: 204587 - RNA, 19 nt, Artificial Sequence
  Description of Artificial Sequence: Synthetic oligonucleotide
  Antisense strand to SEQ ID NO: 204586
auuuacaaagcagucuucu

SEQ ID NO: 204588 - RNA, 19 nt, Artificial Sequence
  Description of Artificial Sequence: Synthetic oligonucleotide
  Sense strand starting at position 3202 of SEQ ID NO: 2637
gaagacugcuuuguaaaua

SEQ ID NO: 204589 - RNA, 19 nt, Artificial Sequence
  Description of Artificial Sequence: Synthetic oligonucleotide
  Antisense strand to SEQ ID NO: 204588
uauuuacaaagcagucuuc

SEQ ID NO: 204590 - RNA, 19 nt, Artificial Sequence
  Description of Artificial Sequence: Synthetic oligonucleotide
  Sense strand starting at position 3325 of SEQ ID NO: 2637
ggcacaaugcuuuaugauc

SEQ ID NO: 204591 - RNA, 19 nt, Artificial Sequence
  Description of Artificial Sequence: Synthetic oligonucleotide
  Antisense strand to SEQ ID NO: 204590
gaucauaaagcauugugcc

SEQ ID NO: 204592 - RNA, 19 nt, Artificial Sequence
  Description of Artificial Sequence: Synthetic oligonucleotide
  Sense strand starting at position 3331 of SEQ ID NO: 2637
augcuuuaugaucaguauc

SEQ ID NO: 204593 - RNA, 19 nt, Artificial Sequence
  Description of Artificial Sequence: Synthetic oligonucleotide
  Antisense strand to SEQ ID NO: 204592
gauacugaucauaaagcau

SEQ ID NO: 204594 - RNA, 19 nt, Artificial Sequence
  Description of Artificial Sequence: Synthetic oligonucleotide
  Sense strand starting at position 3333 of SEQ ID NO: 2637
gcuuuaugaucaguaucau

SEQ ID NO: 204595 - RNA, 19 nt, Artificial Sequence
  Description of Artificial Sequence: Synthetic oligonucleotide
  Antisense strand to SEQ ID NO: 204594
augauacugaucauaaagc

SEQ ID NO: 204596 - RNA, 19 nt, Artificial Sequence
  Description of Artificial Sequence: Synthetic oligonucleotide
  Sense strand starting at position 3334 of SEQ ID NO: 2637
cuuuaugaucaguaucauu

SEQ ID NO: 204597 - RNA, 19 nt, Artificial Sequence
  Description of Artificial Sequence: Synthetic oligonucleotide
  Antisense strand to SEQ ID NO: 204596
aaugauacugaucauaaag

SEQ ID NO: 204598 - RNA, 19 nt, Artificial Sequence
  Description of Artificial Sequence: Synthetic oligonucleotide
  Sense strand starting at position 3380 of SEQ ID NO: 2637
ucagauagaugcuccaauu

SEQ ID NO: 204599 - RNA, 19 nt, Artificial Sequence
  Description of Artificial Sequence: Synthetic oligonucleotide
  Antisense strand to SEQ ID NO: 204598
aauuggagcaucuaucuga

SEQ ID NO: 204600 - RNA, 19 nt, Artificial Sequence
  Description of Artificial Sequence: Synthetic oligonucleotide
  Sense strand starting at position 3392 of SEQ ID NO: 2637
uccaauuaucgucauagua

SEQ ID NO: 204601 - RNA, 19 nt, Artificial Sequence
  Description of Artificial Sequence: Synthetic oligonucleotide
  Antisense strand to SEQ ID NO: 204600
uacuaugacgauaauugga

SEQ ID NO: 204602 - RNA, 19 nt, Artificial Sequence
  Description of Artificial Sequence: Synthetic oligonucleotide
  Sense strand starting at position 3402 of SEQ ID NO: 2637
gucauaguacgugaugaag

SEQ ID NO: 204603 - RNA, 19 nt, Artificial Sequence
  Description of Artificial Sequence: Synthetic oligonucleotide
  Antisense strand to SEQ ID NO: 204602
cuucaucacguacuaugac

SEQ ID NO: 204604 - RNA, 19 nt, Artificial Sequence
  Description of Artificial Sequence: Synthetic oligonucleotide
  Sense strand starting at position 3494 of SEQ ID NO: 2637
cccacaguucuugaucaua

SEQ ID NO: 204605 - RNA, 19 nt, Artificial Sequence
  Description of Artificial Sequence: Synthetic oligonucleotide
  Antisense strand to SEQ ID NO: 204604
uaugaucaagaacuguggg

SEQ ID NO: 204606 - RNA, 19 nt, Artificial Sequence
  Description of Artificial Sequence: Synthetic oligonucleotide
  Sense strand starting at position 3531 of SEQ ID NO: 2637
uuuaaagaaucagcaguaa

SEQ ID NO: 204607 - RNA, 19 nt, Artificial Sequence
  Description of Artificial Sequence: Synthetic oligonucleotide
  Antisense strand to SEQ ID NO: 204606
uuacugcugauucuuuaaa

SEQ ID NO: 204608 - RNA, 19 nt, Artificial Sequence
  Description of Artificial Sequence: Synthetic oligonucleotide
  Sense strand starting at position 3598 of SEQ ID NO: 2637
aaaguuugacuuuggguua

SEQ ID NO: 204609 - RNA, 19 nt, Artificial Sequence
  Description of Artificial Sequence: Synthetic oligonucleotide
  Antisense strand to SEQ ID NO: 204608
uaacccaaagucaaacuuu

SEQ ID NO: 204610 - RNA, 19 nt, Artificial Sequence
  Description of Artificial Sequence: Synthetic oligonucleotide
  Sense strand starting at position 3601 of SEQ ID NO: 2637
guuugacuuuggguuacuu

SEQ ID NO: 204611 - RNA, 19 nt, Artificial Sequence
  Description of Artificial Sequence: Synthetic oligonucleotide
  Antisense strand to SEQ ID NO: 204610
aaguaacccaaagucaaac

SEQ ID NO: 204612 - RNA, 19 nt, Artificial Sequence
  Description of Artificial Sequence: Synthetic oligonucleotide
  Sense strand starting at position 3727 of SEQ ID NO: 2637
uuguuuaucuuacccgaag

SEQ ID NO: 204613 - RNA, 19 nt, Artificial Sequence
  Description of Artificial Sequence: Synthetic oligonucleotide
  Antisense strand to SEQ ID NO: 204612
cuucggguaagauaaacaa

SEQ ID NO: 204614 - RNA, 19 nt, Artificial Sequence
  Description of Artificial Sequence: Synthetic oligonucleotide
  Sense strand starting at position 3728 of SEQ ID NO: 2637
uguuuaucuuacccgaaga

SEQ ID NO: 204615 - RNA, 19 nt, Artificial Sequence
  Description of Artificial Sequence: Synthetic oligonucleotide
  Antisense strand to SEQ ID NO: 204614
ucuucggguaagauaaaca

SEQ ID NO: 204616 - RNA, 19 nt, Artificial Sequence
  Description of Artificial Sequence: Synthetic oligonucleotide
  Sense strand starting at position 3739 of SEQ ID NO: 2637
cccgaagaaucccuaaagu

SEQ ID NO: 204617 - RNA, 19 nt, Artificial Sequence
  Description of Artificial Sequence: Synthetic oligonucleotide
  Antisense strand to SEQ ID NO: 204616
acuuuagggauucuucggg

SEQ ID NO: 204618 - RNA, 19 nt, Artificial Sequence
  Description of Artificial Sequence: Synthetic oligonucleotide
  Sense strand starting at position 3798 of SEQ ID NO: 2637
gguuucagucucuguggaa

SEQ ID NO: 204619 - RNA, 19 nt, Artificial Sequence
  Description of Artificial Sequence: Synthetic oligonucleotide
  Antisense strand to SEQ ID NO: 204618
uuccacagagacugaaacc

SEQ ID NO: 204620 - RNA, 19 nt, Artificial Sequence
  Description of Artificial Sequence: Synthetic oligonucleotide
  Sense strand starting at position 3807 of SEQ ID NO: 2637
cucuguggaaaucgagaau

SEQ ID NO: 204621 - RNA, 19 nt, Artificial Sequence
  Description of Artificial Sequence: Synthetic oligonucleotide
  Antisense strand to SEQ ID NO: 204620
auucucgauuuccacagag

SEQ ID NO: 204622 - RNA, 19 nt, Artificial Sequence
  Description of Artificial Sequence: Synthetic oligonucleotide
  Sense strand starting at position 3920 of SEQ ID NO: 2637
cuaggacuguugcuggauu

SEQ ID NO: 204623 - RNA, 19 nt, Artificial Sequence
  Description of Artificial Sequence: Synthetic oligonucleotide
  Antisense strand to SEQ ID NO: 204622
aauccagcaacaguccuag

SEQ ID NO: 204624 - RNA, 19 nt, Artificial Sequence
  Description of Artificial Sequence: Synthetic oligonucleotide
  Sense strand starting at position 7 of SEQ ID NO: 2634
ucaggagagaccugcucau

SEQ ID NO: 204625 - RNA, 19 nt, Artificial Sequence
  Description of Artificial Sequence: Synthetic oligonucleotide
  Antisense strand to SEQ ID NO: 204624
augagcaggucucuccuga

SEQ ID NO: 204626 - RNA, 19 nt, Artificial Sequence
  Description of Artificial Sequence: Synthetic oligonucleotide
  Sense strand starting at position 19 of SEQ ID NO: 2634
ugcucaugauaugccaaau

SEQ ID NO: 204627 - RNA, 19 nt, Artificial Sequence
  Description of Artificial Sequence: Synthetic oligonucleotide
  Antisense strand to SEQ ID NO: 204626
auuuggcauaucaugagca

SEQ ID NO: 204628 - RNA, 19 nt, Artificial Sequence
  Description of Artificial Sequence: Synthetic oligonucleotide
  Sense strand starting at position 480 of SEQ ID NO: 2634
aacaauuagcgaugcauug

SEQ ID NO: 204629 - RNA, 19 nt, Artificial Sequence
  Description of Artificial Sequence: Synthetic oligonucleotide
  Antisense strand to SEQ ID NO: 204628
caaugcaucgcuaauuguu

SEQ ID NO: 204630 - RNA, 19 nt, Artificial Sequence
  Description of Artificial Sequence: Synthetic oligonucleotide
  Sense strand starting at position 544 of SEQ ID NO: 2634
gcauguguuacggaaacac

SEQ ID NO: 204631 - RNA, 19 nt, Artificial Sequence
  Description of Artificial Sequence: Synthetic oligonucleotide
  Antisense strand to SEQ ID NO: 204630
guguuuccguaacacaugc

SEQ ID NO: 204632 - RNA, 19 nt, Artificial Sequence
  Description of Artificial Sequence: Synthetic oligonucleotide
  Sense strand starting at position 679 of SEQ ID NO: 2634
gagaaucaaccucgagauc

SEQ ID NO: 204633 - RNA, 19 nt, Artificial Sequence
  Description of Artificial Sequence: Synthetic oligonucleotide
  Antisense strand to SEQ ID NO: 204632
gaucucgagguugauucuc

SEQ ID NO: 204634 - RNA, 19 nt, Artificial Sequence
  Description of Artificial Sequence: Synthetic oligonucleotide
  Sense strand starting at position 819 of SEQ ID NO: 2634
gacaacuuccucgaguucu

SEQ ID NO: 204635 - RNA, 19 nt, Artificial Sequence
  Description of Artificial Sequence: Synthetic oligonucleotide
  Antisense strand to SEQ ID NO: 204634
agaacucgaggaaguuguc

SEQ ID NO: 204636 - RNA, 19 nt, Artificial Sequence
  Description of Artificial Sequence: Synthetic oligonucleotide
  Sense strand starting at position 910 of SEQ ID NO: 2634
aaggcuagccagcgagaaa

SEQ ID NO: 204637 - RNA, 19 nt, Artificial Sequence
  Description of Artificial Sequence: Synthetic oligonucleotide
  Antisense strand to SEQ ID NO: 204636
uuucucgcuggcuagccuu

SEQ ID NO: 204638 - RNA, 19 nt, Artificial Sequence
  Description of Artificial Sequence: Synthetic oligonucleotide
  Sense strand starting at position 911 of SEQ ID NO: 2634
aggcuagccagcgagaaau

SEQ ID NO: 204639 - RNA, 19 nt, Artificial Sequence
  Description of Artificial Sequence: Synthetic oligonucleotide
  Antisense strand to SEQ ID NO: 204638
auuucucgcuggcuagccu

SEQ ID NO: 204640 - RNA, 19 nt, Artificial Sequence
  Description of Artificial Sequence: Synthetic oligonucleotide
  Sense strand starting at position 1330 of SEQ ID NO: 2634
agcccaauuucggcgggaa

SEQ ID NO: 204641 - RNA, 19 nt, Artificial Sequence
  Description of Artificial Sequence: Synthetic oligonucleotide
  Antisense strand to SEQ ID NO: 204640
uucccgccgaaauugggcu

SEQ ID NO: 204642 - RNA, 19 nt, Artificial Sequence
  Description of Artificial Sequence: Synthetic oligonucleotide
  Sense strand starting at position 1331 of SEQ ID NO: 2634
gcccaauuucggcgggaaa

SEQ ID NO: 204643 - RNA, 19 nt, Artificial Sequence
  Description of Artificial Sequence: Synthetic oligonucleotide
  Antisense strand to SEQ ID NO: 204642
uuucccgccgaaauugggc

SEQ ID NO: 204644 - RNA, 19 nt, Artificial Sequence
  Description of Artificial Sequence: Synthetic oligonucleotide
  Sense strand starting at position 2259 of SEQ ID NO: 2634
guguaaagcgaagaagguu

SEQ ID NO: 204645 - RNA, 19 nt, Artificial Sequence
  Description of Artificial Sequence: Synthetic oligonucleotide
  Antisense strand to SEQ ID NO: 204644
aaccuucuucgcuuuacac

SEQ ID NO: 204646 - RNA, 19 nt, Artificial Sequence
  Description of Artificial Sequence: Synthetic oligonucleotide
  Sense strand starting at position 2584 of SEQ ID NO: 2634
ugggaucgccuuuggaaga

SEQ ID NO: 204647 - RNA, 19 nt, Artificial Sequence
  Description of Artificial Sequence: Synthetic oligonucleotide
  Antisense strand to SEQ ID NO: 204646
ucuuccaaaggcgauccca

SEQ ID NO: 204648 - RNA, 19 nt, Artificial Sequence
  Description of Artificial Sequence: Synthetic oligonucleotide
  Sense strand starting at position 2589 of SEQ ID NO: 2634
ucgccuuuggaagaagauu

SEQ ID NO: 204649 - RNA, 19 nt, Artificial Sequence
  Description of Artificial Sequence: Synthetic oligonucleotide
  Antisense strand to SEQ ID NO: 204648
aaucuucuuccaaaggcga

SEQ ID NO: 204650 - RNA, 19 nt, Artificial Sequence
  Description of Artificial Sequence: Synthetic oligonucleotide
  Sense strand starting at position 2877 of SEQ ID NO: 2634
ccugucuuggccgcucaaa

SEQ ID NO: 204651 - RNA, 19 nt, Artificial Sequence
  Description of Artificial Sequence: Synthetic oligonucleotide
  Antisense strand to SEQ ID NO: 204650
uuugagcggccaagacagg

SEQ ID NO: 204652 - RNA, 19 nt, Artificial Sequence
  Description of Artificial Sequence: Synthetic oligonucleotide
  Sense strand starting at position 2878 of SEQ ID NO: 2634
cugucuuggccgcucaaau

SEQ ID NO: 204653 - RNA, 19 nt, Artificial Sequence
  Description of Artificial Sequence: Synthetic oligonucleotide
  Antisense strand to SEQ ID NO: 204652
auuugagcggccaagacag

SEQ ID NO: 204654 - RNA, 19 nt, Artificial Sequence
  Description of Artificial Sequence: Synthetic oligonucleotide
  Sense strand starting at position 2879 of SEQ ID NO: 2634
ugucuuggccgcucaaauu

SEQ ID NO: 204655 - RNA, 19 nt, Artificial Sequence
  Description of Artificial Sequence: Synthetic oligonucleotide
  Antisense strand to SEQ ID NO: 204654
aauuugagcggccaagaca

SEQ ID NO: 204656 - RNA, 19 nt, Artificial Sequence
  Description of Artificial Sequence: Synthetic oligonucleotide
  Sense strand starting at position 2928 of SEQ ID NO: 2634
cguccaguugacuaauuau

SEQ ID NO: 204657 - RNA, 19 nt, Artificial Sequence
  Description of Artificial Sequence: Synthetic oligonucleotide
  Antisense strand to SEQ ID NO: 204656
auaauuagucaacuggacg

SEQ ID NO: 204658 - RNA, 19 nt, Artificial Sequence
  Description of Artificial Sequence: Synthetic oligonucleotide
  Sense strand starting at position 2938 of SEQ ID NO: 2634
acuaauuauuuagacacga

SEQ ID NO: 204659 - RNA, 19 nt, Artificial Sequence
  Description of Artificial Sequence: Synthetic oligonucleotide
  Antisense strand to SEQ ID NO: 204658
ucgugucuaaauaauuagu

SEQ ID NO: 204660 - RNA, 19 nt, Artificial Sequence
  Description of Artificial Sequence: Synthetic oligonucleotide
  Sense strand starting at position 2991 of SEQ ID NO: 2634
gugcgaucacgcucacuga

SEQ ID NO: 204661 - RNA, 19 nt, Artificial Sequence
  Description of Artificial Sequence: Synthetic oligonucleotide
  Antisense strand to SEQ ID NO: 204660
ucagugagcgugaucgcac

SEQ ID NO: 204662 - RNA, 19 nt, Artificial Sequence
  Description of Artificial Sequence: Synthetic oligonucleotide
  Sense strand starting at position 3103 of SEQ ID NO: 2634
agaagacugcuuuguaaau

SEQ ID NO: 204663 - RNA, 19 nt, Artificial Sequence
  Description of Artificial Sequence: Synthetic oligonucleotide
  Antisense strand to SEQ ID NO: 204662
auuuacaaagcagucuucu

SEQ ID NO: 204664 - RNA, 19 nt, Artificial Sequence
  Description of Artificial Sequence: Synthetic oligonucleotide
  Sense strand starting at position 3104 of SEQ ID NO: 2634
gaagacugcuuuguaaaua

SEQ ID NO: 204665 - RNA, 19 nt, Artificial Sequence
  Description of Artificial Sequence: Synthetic oligonucleotide
  Antisense strand to SEQ ID NO: 204664
uauuuacaaagcagucuuc

SEQ ID NO: 204666 - RNA, 19 nt, Artificial Sequence
  Description of Artificial Sequence: Synthetic oligonucleotide
  Sense strand starting at position 3227 of SEQ ID NO: 2634
ggcacaaugcuuuaugauc

SEQ ID NO: 204667 - RNA, 19 nt, Artificial Sequence
  Description of Artificial Sequence: Synthetic oligonucleotide
  Antisense strand to SEQ ID NO: 204666
gaucauaaagcauugugcc

SEQ ID NO: 204668 - RNA, 19 nt, Artificial Sequence
  Description of Artificial Sequence: Synthetic oligonucleotide
  Sense strand starting at position 3233 of SEQ ID NO: 2634
augcuuuaugaucaguauc

SEQ ID NO: 204669 - RNA, 19 nt, Artificial Sequence
  Description of Artificial Sequence: Synthetic oligonucleotide
  Antisense strand to SEQ ID NO: 204668
gauacugaucauaaagcau

SEQ ID NO: 204670 - RNA, 19 nt, Artificial Sequence
  Description of Artificial Sequence: Synthetic oligonucleotide
  Sense strand starting at position 3235 of SEQ ID NO: 2634
gcuuuaugaucaguaucau

SEQ ID NO: 204671 - RNA, 19 nt, Artificial Sequence
  Description of Artificial Sequence: Synthetic oligonucleotide
  Antisense strand to SEQ ID NO: 204670
augauacugaucauaaagc

SEQ ID NO: 204672 - RNA, 19 nt, Artificial Sequence
  Description of Artificial Sequence: Synthetic oligonucleotide
  Sense strand starting at position 3236 of SEQ ID NO: 2634
cuuuaugaucaguaucauu

SEQ ID NO: 204673 - RNA, 19 nt, Artificial Sequence
  Description of Artificial Sequence: Synthetic oligonucleotide
  Antisense strand to SEQ ID NO: 204672
aaugauacugaucauaaag

SEQ ID NO: 204674 - RNA, 19 nt, Artificial Sequence
  Description of Artificial Sequence: Synthetic oligonucleotide
  Sense strand starting at position 3282 of SEQ ID NO: 2634
ucagauagaugcuccaauu

SEQ ID NO: 204675 - RNA, 19 nt, Artificial Sequence
  Description of Artificial Sequence: Synthetic oligonucleotide
  Antisense strand to SEQ ID NO: 204674
aauuggagcaucuaucuga

SEQ ID NO: 204676 - RNA, 19 nt, Artificial Sequence
  Description of Artificial Sequence: Synthetic oligonucleotide
  Sense strand starting at position 3294 of SEQ ID NO: 2634
uccaauuaucgucauagua

SEQ ID NO: 204677 - RNA, 19 nt, Artificial Sequence
  Description of Artificial Sequence: Synthetic oligonucleotide
  Antisense strand to SEQ ID NO: 204676
uacuaugacgauaauugga

SEQ ID NO: 204678 - RNA, 19 nt, Artificial Sequence
  Description of Artificial Sequence: Synthetic oligonucleotide
  Sense strand starting at position 3304 of SEQ ID NO: 2634
gucauaguacgugaugaag

SEQ ID NO: 204679 - RNA, 19 nt, Artificial Sequence
  Description of Artificial Sequence: Synthetic oligonucleotide
  Antisense strand to SEQ ID NO: 204678
cuucaucacguacuaugac

SEQ ID NO: 204680 - RNA, 19 nt, Artificial Sequence
  Description of Artificial Sequence: Synthetic oligonucleotide
  Sense strand starting at position 3396 of SEQ ID NO: 2634
cccacaguucuugaucaua

SEQ ID NO: 204681 - RNA, 19 nt, Artificial Sequence
  Description of Artificial Sequence: Synthetic oligonucleotide
  Antisense strand to SEQ ID NO: 204680
uaugaucaagaacuguggg

SEQ ID NO: 204682 - RNA, 19 nt, Artificial Sequence
  Description of Artificial Sequence: Synthetic oligonucleotide
  Sense strand starting at position 3433 of SEQ ID NO: 2634
uuuaaagaaucagcaguaa

SEQ ID NO: 204683 - RNA, 19 nt, Artificial Sequence
  Description of Artificial Sequence: Synthetic oligonucleotide
  Antisense strand to SEQ ID NO: 204682
uuacugcugauucuuuaaa

SEQ ID NO: 204684 - RNA, 19 nt, Artificial Sequence
  Description of Artificial Sequence: Synthetic oligonucleotide
  Sense strand starting at position 3500 of SEQ ID NO: 2634
aaaguuugacuuuggguua

SEQ ID NO: 204685 - RNA, 19 nt, Artificial Sequence
  Description of Artificial Sequence: Synthetic oligonucleotide
  Antisense strand to SEQ ID NO: 204684
uaacccaaagucaaacuuu

SEQ ID NO: 204686 - RNA, 19 nt, Artificial Sequence
  Description of Artificial Sequence: Synthetic oligonucleotide
  Sense strand starting at position 3503 of SEQ ID NO: 2634
guuugacuuuggguuacuu

SEQ ID NO: 204687 - RNA, 19 nt, Artificial Sequence
  Description of Artificial Sequence: Synthetic oligonucleotide
  Antisense strand to SEQ ID NO: 204686
aaguaacccaaagucaaac

SEQ ID NO: 204688 - RNA, 19 nt, Artificial Sequence
  Description of Artificial Sequence: Synthetic oligonucleotide
  Sense strand starting at position 3629 of SEQ ID NO: 2634
uuguuuaucuuacccgaag

SEQ ID NO: 204689 - RNA, 19 nt, Artificial Sequence
  Description of Artificial Sequence: Synthetic oligonucleotide
  Antisense strand to SEQ ID NO: 204688
cuucggguaagauaaacaa

SEQ ID NO: 204690 - RNA, 19 nt, Artificial Sequence
  Description of Artificial Sequence: Synthetic oligonucleotide
  Sense strand starting at position 3630 of SEQ ID NO: 2634
uguuuaucuuacccgaaga

SEQ ID NO: 204691 - RNA, 19 nt, Artificial Sequence
  Description of Artificial Sequence: Synthetic oligonucleotide
  Antisense strand to SEQ ID NO: 204690
ucuucggguaagauaaaca

SEQ ID NO: 204692 - RNA, 19 nt, Artificial Sequence
  Description of Artificial Sequence: Synthetic oligonucleotide
  Sense strand starting at position 3641 of SEQ ID NO: 2634
cccgaagaaucccuaaagu

SEQ ID NO: 204693 - RNA, 19 nt, Artificial Sequence
  Description of Artificial Sequence: Synthetic oligonucleotide
  Antisense strand to SEQ ID NO: 204692
acuuuagggauucuucggg

SEQ ID NO: 204694 - RNA, 19 nt, Artificial Sequence
  Description of Artificial Sequence: Synthetic oligonucleotide
  Sense strand starting at position 3709 of SEQ ID NO: 2634
cucuguggaaaucgagaau

SEQ ID NO: 204695 - RNA, 19 nt, Artificial Sequence
  Description of Artificial Sequence: Synthetic oligonucleotide
  Antisense strand to SEQ ID NO: 204694
auucucgauuuccacagag

SEQ ID NO: 204696 - RNA, 19 nt, Artificial Sequence
  Description of Artificial Sequence: Synthetic oligonucleotide
  Sense strand starting at position 3822 of SEQ ID NO: 2634
cuaggacuguugcuggauu

SEQ ID NO: 204697 - RNA, 19 nt, Artificial Sequence
  Description of Artificial Sequence: Synthetic oligonucleotide
  Antisense strand to SEQ ID NO: 204696
aauccagcaacaguccuag

SEQ ID NO: 204698 - RNA, 19 nt, Artificial Sequence
  Description of Artificial Sequence: Synthetic oligonucleotide
  Sense strand starting at position 3930 of SEQ ID NO: 2634
agcgcaguagguguuuaau

SEQ ID NO: 204699 - RNA, 19 nt, Artificial Sequence
  Description of Artificial Sequence: Synthetic oligonucleotide
  Antisense strand to SEQ ID NO: 204698
auuaaacaccuacugcgcu

SEQ ID NO: 204700 - RNA, 19 nt, Artificial Sequence
  Description of Artificial Sequence: Synthetic oligonucleotide
  Sense strand starting at position 3936 of SEQ ID NO: 2634
guagguguuuaaucugaca

SEQ ID NO: 204701 - RNA, 19 nt, Artificial Sequence
  Description of Artificial Sequence: Synthetic oligonucleotide
  Antisense strand to SEQ ID NO: 204700
ugucagauuaaacaccuac

SEQ ID NO: 204702 - RNA, 19 nt, Artificial Sequence
  Description of Artificial Sequence: Synthetic oligonucleotide
  Sense strand starting at position 3971 of SEQ ID NO: 2634
agggaacgcuaacuguauu

SEQ ID NO: 204703 - RNA, 19 nt, Artificial Sequence
  Description of Artificial Sequence: Synthetic oligonucleotide
  Antisense strand to SEQ ID NO: 204702
aauacaguuagcguucccu

SEQ ID NO: 204704 - RNA, 19 nt, Artificial Sequence
  Description of Artificial Sequence: Synthetic oligonucleotide
  Sense strand starting at position 97 of SEQ ID NO: 2638
aagggaugcuuaucaaagu

SEQ ID NO: 204705 - RNA, 19 nt, Artificial Sequence
  Description of Artificial Sequence: Synthetic oligonucleotide
  Antisense strand to SEQ ID NO: 204704
acuuugauaagcaucccuu

SEQ ID NO: 204706 - RNA, 19 nt, Artificial Sequence
  Description of Artificial Sequence: Synthetic oligonucleotide
  Sense strand starting at position 114 of SEQ ID NO: 2638
gucauaugcuaaguacaaa

SEQ ID NO: 204707 - RNA, 19 nt, Artificial Sequence
  Description of Artificial Sequence: Synthetic oligonucleotide
  Antisense strand to SEQ ID NO: 204706
uuuguacuuagcauaugac

SEQ ID NO: 204708 - RNA, 19 nt, Artificial Sequence
  Description of Artificial Sequence: Synthetic oligonucleotide
  Sense strand starting at position 335 of SEQ ID NO: 2638
ccaacucuguucccugaga

SEQ ID NO: 204709 - RNA, 19 nt, Artificial Sequence
  Description of Artificial Sequence: Synthetic oligonucleotide
  Antisense strand to SEQ ID NO: 204708
ucucagggaacagaguugg

SEQ ID NO: 204710 - RNA, 19 nt, Artificial Sequence
  Description of Artificial Sequence: Synthetic oligonucleotide
  Sense strand starting at position 703 of SEQ ID NO: 2638
agggaacagccuugcucua

SEQ ID NO: 204711 - RNA, 19 nt, Artificial Sequence
  Description of Artificial Sequence: Synthetic oligonucleotide
  Antisense strand to SEQ ID NO: 204710
uagagcaaggcuguucccu

SEQ ID NO: 204712 - RNA, 19 nt, Artificial Sequence
  Description of Artificial Sequence: Synthetic oligonucleotide
  Sense strand starting at position 705 of SEQ ID NO: 2638
ggaacagccuugcucuaga

SEQ ID NO: 204713 - RNA, 19 nt, Artificial Sequence
  Description of Artificial Sequence: Synthetic oligonucleotide
  Antisense strand to SEQ ID NO: 204712
ucuagagcaaggcuguucc

SEQ ID NO: 204714 - RNA, 19 nt, Artificial Sequence
  Description of Artificial Sequence: Synthetic oligonucleotide
  Sense strand starting at position 1072 of SEQ ID NO: 2638
uauuuacgguggucagagu

SEQ ID NO: 204715 - RNA, 19 nt, Artificial Sequence
  Description of Artificial Sequence: Synthetic oligonucleotide
  Antisense strand to SEQ ID NO: 204714
acucugaccaccguaaaua

SEQ ID NO: 204716 - RNA, 19 nt, Artificial Sequence
  Description of Artificial Sequence: Synthetic oligonucleotide
  Sense strand starting at position 1226 of SEQ ID NO: 2638
ggauuacaaagacgucuaa

SEQ ID NO: 204717 - RNA, 19 nt, Artificial Sequence
  Description of Artificial Sequence: Synthetic oligonucleotide
  Antisense strand to SEQ ID NO: 204716
uuagacgucuuuguaaucc

SEQ ID NO: 204718 - RNA, 19 nt, Artificial Sequence
  Description of Artificial Sequence: Synthetic oligonucleotide
  Sense strand starting at position 1427 of SEQ ID NO: 2638
uagcucagacccgaagaau

SEQ ID NO: 204719 - RNA, 19 nt, Artificial Sequence
  Description of Artificial Sequence: Synthetic oligonucleotide
  Antisense strand to SEQ ID NO: 204718
auucuucgggucugagcua

SEQ ID NO: 204720 - RNA, 19 nt, Artificial Sequence
  Description of Artificial Sequence: Synthetic oligonucleotide
  Sense strand starting at position 1601 of SEQ ID NO: 2638
gggcucguucuugagggaa

SEQ ID NO: 204721 - RNA, 19 nt, Artificial Sequence
  Description of Artificial Sequence: Synthetic oligonucleotide
  Antisense strand to SEQ ID NO: 204720
uucccucaagaacgagccc

SEQ ID NO: 204722 - RNA, 19 nt, Artificial Sequence
  Description of Artificial Sequence: Synthetic oligonucleotide
  Sense strand starting at position 1604 of SEQ ID NO: 2638
cucguucuugagggaauca

SEQ ID NO: 204723 - RNA, 19 nt, Artificial Sequence
  Description of Artificial Sequence: Synthetic oligonucleotide
  Antisense strand to SEQ ID NO: 204722
ugauucccucaagaacgag

SEQ ID NO: 204724 - RNA, 19 nt, Artificial Sequence
  Description of Artificial Sequence: Synthetic oligonucleotide
  Sense strand starting at position 1658 of SEQ ID NO: 2638
gggccuucuccauaggaag

SEQ ID NO: 204725 - RNA, 19 nt, Artificial Sequence
  Description of Artificial Sequence: Synthetic oligonucleotide
  Antisense strand to SEQ ID NO: 204724
cuuccuauggagaaggccc

SEQ ID NO: 204726 - RNA, 19 nt, Artificial Sequence
  Description of Artificial Sequence: Synthetic oligonucleotide
  Sense strand starting at position 2152 of SEQ ID NO: 2638
cccgcguaggcgucugaaa

SEQ ID NO: 204727 - RNA, 19 nt, Artificial Sequence
  Description of Artificial Sequence: Synthetic oligonucleotide
  Antisense strand to SEQ ID NO: 204726
uuucagacgccuacgcggg

SEQ ID NO: 204728 - RNA, 19 nt, Artificial Sequence
  Description of Artificial Sequence: Synthetic oligonucleotide
  Sense strand starting at position 2443 of SEQ ID NO: 2638
cugggucuccagggauaga

SEQ ID NO: 204729 - RNA, 19 nt, Artificial Sequence
  Description of Artificial Sequence: Synthetic oligonucleotide
  Antisense strand to SEQ ID NO: 204728
ucuaucccuggagacccag

SEQ ID NO: 204730 - RNA, 19 nt, Artificial Sequence
  Description of Artificial Sequence: Synthetic oligonucleotide
  Sense strand starting at position 2510 of SEQ ID NO: 2638
accuuccuggcaugaaaga

SEQ ID NO: 204731 - RNA, 19 nt, Artificial Sequence
  Description of Artificial Sequence: Synthetic oligonucleotide
  Antisense strand to SEQ ID NO: 204730
ucuuucaugccaggaaggu

SEQ ID NO: 204732 - RNA, 19 nt, Artificial Sequence
  Description of Artificial Sequence: Synthetic oligonucleotide
  Sense strand starting at position 2723 of SEQ ID NO: 2638
cgagaaugugccuaccuca

SEQ ID NO: 204733 - RNA, 19 nt, Artificial Sequence
  Description of Artificial Sequence: Synthetic oligonucleotide
  Antisense strand to SEQ ID NO: 204732
ugagguaggcacauucucg

SEQ ID NO: 204734 - RNA, 19 nt, Artificial Sequence
  Description of Artificial Sequence: Synthetic oligonucleotide
  Sense strand starting at position 2784 of SEQ ID NO: 2638
agcguaacauuauccaaau

SEQ ID NO: 204735 - RNA, 19 nt, Artificial Sequence
  Description of Artificial Sequence: Synthetic oligonucleotide
  Antisense strand to SEQ ID NO: 204734
auuuggauaauguuacgcu

SEQ ID NO: 204736 - RNA, 19 nt, Artificial Sequence
  Description of Artificial Sequence: Synthetic oligonucleotide
  Sense strand starting at position 2887 of SEQ ID NO: 2638
gucggcauuacugcaguau

SEQ ID NO: 204737 - RNA, 19 nt, Artificial Sequence
  Description of Artificial Sequence: Synthetic oligonucleotide
  Antisense strand to SEQ ID NO: 204736
auacugcaguaaugccgac

SEQ ID NO: 204738 - RNA, 19 nt, Artificial Sequence
  Description of Artificial Sequence: Synthetic oligonucleotide
  Sense strand starting at position 3031 of SEQ ID NO: 2638
ugaguuaggucaguaagau

SEQ ID NO: 204739 - RNA, 19 nt, Artificial Sequence
  Description of Artificial Sequence: Synthetic oligonucleotide
  Antisense strand to SEQ ID NO: 204738
aucuuacugaccuaacuca

SEQ ID NO: 204740 - RNA, 19 nt, Artificial Sequence
  Description of Artificial Sequence: Synthetic oligonucleotide
  Sense strand starting at position 3032 of SEQ ID NO: 2638
gaguuaggucaguaagauu

SEQ ID NO: 204741 - RNA, 19 nt, Artificial Sequence
  Description of Artificial Sequence: Synthetic oligonucleotide
  Antisense strand to SEQ ID NO: 204740
aaucuuacugaccuaacuc

SEQ ID NO: 204742 - RNA, 19 nt, Artificial Sequence
  Description of Artificial Sequence: Synthetic oligonucleotide
  Sense strand starting at position 3039 of SEQ ID NO: 2638
gucaguaagauugaguaga

SEQ ID NO: 204743 - RNA, 19 nt, Artificial Sequence
  Description of Artificial Sequence: Synthetic oligonucleotide
  Antisense strand to SEQ ID NO: 204742
ucuacucaaucuuacugac

SEQ ID NO: 204744 - RNA, 19 nt, Artificial Sequence
  Description of Artificial Sequence: Synthetic oligonucleotide
  Sense strand starting at position 3041 of SEQ ID NO: 2638
caguaagauugaguagaca

SEQ ID NO: 204745 - RNA, 19 nt, Artificial Sequence
  Description of Artificial Sequence: Synthetic oligonucleotide
  Antisense strand to SEQ ID NO: 204744
ugucuacucaaucuuacug

SEQ ID NO: 204746 - RNA, 19 nt, Artificial Sequence
  Description of Artificial Sequence: Synthetic oligonucleotide
  Sense strand starting at position 3053 of SEQ ID NO: 2638
guagacagauccuucugau

SEQ ID NO: 204747 - RNA, 19 nt, Artificial Sequence
  Description of Artificial Sequence: Synthetic oligonucleotide
  Antisense strand to SEQ ID NO: 204746
aucagaaggaucugucuac

SEQ ID NO: 204748 - RNA, 19 nt, Artificial Sequence
  Description of Artificial Sequence: Synthetic oligonucleotide
  Sense strand starting at position 3268 of SEQ ID NO: 2638
cucauucguccugaaaugu

SEQ ID NO: 204749 - RNA, 19 nt, Artificial Sequence
  Description of Artificial Sequence: Synthetic oligonucleotide
  Antisense strand to SEQ ID NO: 204748
acauuucaggacgaaugag

SEQ ID NO: 204750 - RNA, 19 nt, Artificial Sequence
  Description of Artificial Sequence: Synthetic oligonucleotide
  Sense strand starting at position 3300 of SEQ ID NO: 2638
gguaauagagaacguggaa

SEQ ID NO: 204751 - RNA, 19 nt, Artificial Sequence
  Description of Artificial Sequence: Synthetic oligonucleotide
  Antisense strand to SEQ ID NO: 204750
uuccacguucucuauuacc

SEQ ID NO: 204752 - RNA, 19 nt, Artificial Sequence
  Description of Artificial Sequence: Synthetic oligonucleotide
  Sense strand starting at position 3475 of SEQ ID NO: 2638
auuagaaaggugggaguua

SEQ ID NO: 204753 - RNA, 19 nt, Artificial Sequence
  Description of Artificial Sequence: Synthetic oligonucleotide
  Antisense strand to SEQ ID NO: 204752
uaacucccaccuuucuaau

SEQ ID NO: 204754 - RNA, 19 nt, Artificial Sequence
  Description of Artificial Sequence: Synthetic oligonucleotide
  Sense strand starting at position 3505 of SEQ ID NO: 2638
gcuagaggcaguuauagug

SEQ ID NO: 204755 - RNA, 19 nt, Artificial Sequence
  Description of Artificial Sequence: Synthetic oligonucleotide
  Antisense strand to SEQ ID NO: 204754
cacuauaacugccucuagc

SEQ ID NO: 204756 - RNA, 19 nt, Artificial Sequence
  Description of Artificial Sequence: Synthetic oligonucleotide
  Sense strand starting at position 3513 of SEQ ID NO: 2638
caguuauagugacugacga

SEQ ID NO: 204757 - RNA, 19 nt, Artificial Sequence
  Description of Artificial Sequence: Synthetic oligonucleotide
  Antisense strand to SEQ ID NO: 204756
ucgucagucacuauaacug

SEQ ID NO: 204758 - RNA, 19 nt, Artificial Sequence
  Description of Artificial Sequence: Synthetic oligonucleotide
  Sense strand starting at position 3514 of SEQ ID NO: 2638
aguuauagugacugacgaa

SEQ ID NO: 204759 - RNA, 19 nt, Artificial Sequence
  Description of Artificial Sequence: Synthetic oligonucleotide
  Antisense strand to SEQ ID NO: 204758
uucgucagucacuauaacu

SEQ ID NO: 204760 - RNA, 19 nt, Artificial Sequence
  Description of Artificial Sequence: Synthetic oligonucleotide
  Sense strand starting at position 3515 of SEQ ID NO: 2638
guuauagugacugacgaaa

SEQ ID NO: 204761 - RNA, 19 nt, Artificial Sequence
  Description of Artificial Sequence: Synthetic oligonucleotide
  Antisense strand to SEQ ID NO: 204760
uuucgucagucacuauaac

SEQ ID NO: 204762 - RNA, 19 nt, Artificial Sequence
  Description of Artificial Sequence: Synthetic oligonucleotide
  Sense strand starting at position 3543 of SEQ ID NO: 2638
ugaguaggagacuguguaa

SEQ ID NO: 204763 - RNA, 19 nt, Artificial Sequence
  Description of Artificial Sequence: Synthetic oligonucleotide
  Antisense strand to SEQ ID NO: 204762
uuacacagucuccuacuca

SEQ ID NO: 204764 - RNA, 19 nt, Artificial Sequence
  Description of Artificial Sequence: Synthetic oligonucleotide
  Sense strand starting at position 3684 of SEQ ID NO: 2638
auugaaucuaguuggagac

SEQ ID NO: 204765 - RNA, 19 nt, Artificial Sequence
  Description of Artificial Sequence: Synthetic oligonucleotide
  Antisense strand to SEQ ID NO: 204764
gucuccaacuagauucaau

SEQ ID NO: 204766 - RNA, 19 nt, Artificial Sequence
  Description of Artificial Sequence: Synthetic oligonucleotide
  Sense strand starting at position 3685 of SEQ ID NO: 2638
uugaaucuaguuggagaca

SEQ ID NO: 204767 - RNA, 19 nt, Artificial Sequence
  Description of Artificial Sequence: Synthetic oligonucleotide
  Antisense strand to SEQ ID NO: 204766
ugucuccaacuagauucaa

SEQ ID NO: 204768 - RNA, 19 nt, Artificial Sequence
  Description of Artificial Sequence: Synthetic oligonucleotide
  Sense strand starting at position 3697 of SEQ ID NO: 2638
ggagacauuuguugaagag

SEQ ID NO: 204769 - RNA, 19 nt, Artificial Sequence
  Description of Artificial Sequence: Synthetic oligonucleotide
  Antisense strand to SEQ ID NO: 204768
cucuucaacaaaugucucc

SEQ ID NO: 204770 - RNA, 19 nt, Artificial Sequence
  Description of Artificial Sequence: Synthetic oligonucleotide
  Sense strand starting at position 3709 of SEQ ID NO: 2638
ugaagaggccuguacaucu

SEQ ID NO: 204771 - RNA, 19 nt, Artificial Sequence
  Description of Artificial Sequence: Synthetic oligonucleotide
  Antisense strand to SEQ ID NO: 204770
agauguacaggccucuuca

SEQ ID NO: 204772 - RNA, 19 nt, Artificial Sequence
  Description of Artificial Sequence: Synthetic oligonucleotide
  Sense strand starting at position 3735 of SEQ ID NO: 2638
gagcaagaguaaguaaacu

SEQ ID NO: 204773 - RNA, 19 nt, Artificial Sequence
  Description of Artificial Sequence: Synthetic oligonucleotide
  Antisense strand to SEQ ID NO: 204772
aguuuacuuacucuugcuc

SEQ ID NO: 204774 - RNA, 19 nt, Artificial Sequence
  Description of Artificial Sequence: Synthetic oligonucleotide
  Sense strand starting at position 3900 of SEQ ID NO: 2638
gcagacaucuguguagaaa

SEQ ID NO: 204775 - RNA, 19 nt, Artificial Sequence
  Description of Artificial Sequence: Synthetic oligonucleotide
  Antisense strand to SEQ ID NO: 204774
uuucuacacagaugucugc

SEQ ID NO: 204776 - RNA, 19 nt, Artificial Sequence
  Description of Artificial Sequence: Synthetic oligonucleotide
  Sense strand starting at position 3915 of SEQ ID NO: 2638
gaaagaacauuacuguguu

SEQ ID NO: 204777 - RNA, 19 nt, Artificial Sequence
  Description of Artificial Sequence: Synthetic oligonucleotide
  Antisense strand to SEQ ID NO: 204776
aacacaguaauguucuuuc

SEQ ID NO: 204778 - RNA, 19 nt, Artificial Sequence
  Description of Artificial Sequence: Synthetic oligonucleotide
  Sense strand starting at position 3918 of SEQ ID NO: 2638
agaacauuacuguguuuac

SEQ ID NO: 204779 - RNA, 19 nt, Artificial Sequence
  Description of Artificial Sequence: Synthetic oligonucleotide
  Antisense strand to SEQ ID NO: 204778
guaaacacaguaauguucu

SEQ ID NO: 204780 - RNA, 19 nt, Artificial Sequence
  Description of Artificial Sequence: Synthetic oligonucleotide
  Sense strand starting at position 3921 of SEQ ID NO: 2638
acauuacuguguuuacaac

SEQ ID NO: 204781 - RNA, 19 nt, Artificial Sequence
  Description of Artificial Sequence: Synthetic oligonucleotide
  Antisense strand to SEQ ID NO: 204780
guuguaaacacaguaaugu

SEQ ID NO: 204782 - RNA, 19 nt, Artificial Sequence
  Description of Artificial Sequence: Synthetic oligonucleotide
  Sense strand starting at position 3927 of SEQ ID NO: 2638
cuguguuuacaacacaaua

SEQ ID NO: 204783 - RNA, 19 nt, Artificial Sequence
  Description of Artificial Sequence: Synthetic oligonucleotide
  Antisense strand to SEQ ID NO: 204782
uauuguguuguaaacacag

SEQ ID NO: 204784 - RNA, 19 nt, Artificial Sequence
  Description of Artificial Sequence: Synthetic oligonucleotide
  Sense strand starting at position 448 of SEQ ID NO: 2639
uuugaaacagauugucaac

SEQ ID NO: 204785 - RNA, 19 nt, Artificial Sequence
  Description of Artificial Sequence: Synthetic oligonucleotide
  Antisense strand to SEQ ID NO: 204784
guugacaaucuguuucaaa

SEQ ID NO: 204786 - RNA, 19 nt, Artificial Sequence
  Description of Artificial Sequence: Synthetic oligonucleotide
  Sense strand starting at position 540 of SEQ ID NO: 2639
acuuuauguauugguagag

SEQ ID NO: 204787 - RNA, 19 nt, Artificial Sequence
  Description of Artificial Sequence: Synthetic oligonucleotide
  Antisense strand to SEQ ID NO: 204786
cucuaccaauacauaaagu

SEQ ID NO: 204788 - RNA, 19 nt, Artificial Sequence
  Description of Artificial Sequence: Synthetic oligonucleotide
  Sense strand starting at position 541 of SEQ ID NO: 2639
cuuuauguauugguagaga

SEQ ID NO: 204789 - RNA, 19 nt, Artificial Sequence
  Description of Artificial Sequence: Synthetic oligonucleotide
  Antisense strand to SEQ ID NO: 204788
ucucuaccaauacauaaag

SEQ ID NO: 204790 - RNA, 19 nt, Artificial Sequence
  Description of Artificial Sequence: Synthetic oligonucleotide
  Sense strand starting at position 544 of SEQ ID NO: 2639
uauguauugguagagaucu

SEQ ID NO: 204791 - RNA, 19 nt, Artificial Sequence
  Description of Artificial Sequence: Synthetic oligonucleotide
  Antisense strand to SEQ ID NO: 204790
agaucucuaccaauacaua

SEQ ID NO: 204792 - RNA, 19 nt, Artificial Sequence
  Description of Artificial Sequence: Synthetic oligonucleotide
  Sense strand starting at position 709 of SEQ ID NO: 2639
aacgguuacaugugacaga

SEQ ID NO: 204793 - RNA, 19 nt, Artificial Sequence
  Description of Artificial Sequence: Synthetic oligonucleotide
  Antisense strand to SEQ ID NO: 204792
ucugucacauguaaccguu

SEQ ID NO: 204794 - RNA, 19 nt, Artificial Sequence
  Description of Artificial Sequence: Synthetic oligonucleotide
  Sense strand starting at position 746 of SEQ ID NO: 2639
acaggaguucucgguaaau

SEQ ID NO: 204795 - RNA, 19 nt, Artificial Sequence
  Description of Artificial Sequence: Synthetic oligonucleotide
  Antisense strand to SEQ ID NO: 204794
auuuaccgagaacuccugu

SEQ ID NO: 204796 - RNA, 19 nt, Artificial Sequence
  Description of Artificial Sequence: Synthetic oligonucleotide
  Sense strand starting at position 748 of SEQ ID NO: 2639
aggaguucucgguaaauac

SEQ ID NO: 204797 - RNA, 19 nt, Artificial Sequence
  Description of Artificial Sequence: Synthetic oligonucleotide
  Antisense strand to SEQ ID NO: 204796
guauuuaccgagaacuccu

SEQ ID NO: 204798 - RNA, 19 nt, Artificial Sequence
  Description of Artificial Sequence: Synthetic oligonucleotide
  Sense strand starting at position 758 of SEQ ID NO: 2639
gguaaauacuguucuaaau

SEQ ID NO: 204799 - RNA, 19 nt, Artificial Sequence
  Description of Artificial Sequence: Synthetic oligonucleotide
  Antisense strand to SEQ ID NO: 204798
auuuagaacaguauuuacc

SEQ ID NO: 204800 - RNA, 19 nt, Artificial Sequence
  Description of Artificial Sequence: Synthetic oligonucleotide
  Sense strand starting at position 977 of SEQ ID NO: 2639
cuaaaugcacuguaauagu

SEQ ID NO: 204801 - RNA, 19 nt, Artificial Sequence
  Description of Artificial Sequence: Synthetic oligonucleotide
  Antisense strand to SEQ ID NO: 204800
acuauuacagugcauuuag

SEQ ID NO: 204802 - RNA, 19 nt, Artificial Sequence
  Description of Artificial Sequence: Synthetic oligonucleotide
  Sense strand starting at position 1047 of SEQ ID NO: 2639
ccaggaauaucugcuuuac

SEQ ID NO: 204803 - RNA, 19 nt, Artificial Sequence
  Description of Artificial Sequence: Synthetic oligonucleotide
  Antisense strand to SEQ ID NO: 204802
guaaagcagauauuccugg

SEQ ID NO: 204804 - RNA, 19 nt, Artificial Sequence
  Description of Artificial Sequence: Synthetic oligonucleotide
  Sense strand starting at position 1049 of SEQ ID NO: 2639
aggaauaucugcuuuaccu

SEQ ID NO: 204805 - RNA, 19 nt, Artificial Sequence
  Description of Artificial Sequence: Synthetic oligonucleotide
  Antisense strand to SEQ ID NO: 204804
agguaaagcagauauuccu

SEQ ID NO: 204806 - RNA, 19 nt, Artificial Sequence
  Description of Artificial Sequence: Synthetic oligonucleotide
  Sense strand starting at position 1260 of SEQ ID NO: 2639
uaaguaacagucuggguaa

SEQ ID NO: 204807 - RNA, 19 nt, Artificial Sequence
  Description of Artificial Sequence: Synthetic oligonucleotide
  Antisense strand to SEQ ID NO: 204806
uuacccagacuguuacuua

SEQ ID NO: 204808 - RNA, 19 nt, Artificial Sequence
  Description of Artificial Sequence: Synthetic oligonucleotide
  Sense strand starting at position 1262 of SEQ ID NO: 2639
aguaacagucuggguaaau

SEQ ID NO: 204809 - RNA, 19 nt, Artificial Sequence
  Description of Artificial Sequence: Synthetic oligonucleotide
  Antisense strand to SEQ ID NO: 204808
auuuacccagacuguuacu

SEQ ID NO: 204810 - RNA, 19 nt, Artificial Sequence
  Description of Artificial Sequence: Synthetic oligonucleotide
  Sense strand starting at position 1263 of SEQ ID NO: 2639
guaacagucuggguaaauc

SEQ ID NO: 204811 - RNA, 19 nt, Artificial Sequence
  Description of Artificial Sequence: Synthetic oligonucleotide
  Antisense strand to SEQ ID NO: 204810
gauuuacccagacuguuac

SEQ ID NO: 204812 - RNA, 19 nt, Artificial Sequence
  Description of Artificial Sequence: Synthetic oligonucleotide
  Sense strand starting at position 1271 of SEQ ID NO: 2639
cuggguaaaucaucuaagu

SEQ ID NO: 204813 - RNA, 19 nt, Artificial Sequence
  Description of Artificial Sequence: Synthetic oligonucleotide
  Antisense strand to SEQ ID NO: 204812
acuuagaugauuuacccag

SEQ ID NO: 204814 - RNA, 19 nt, Artificial Sequence
  Description of Artificial Sequence: Synthetic oligonucleotide
  Sense strand starting at position 1324 of SEQ ID NO: 2639
gugagugauguuagcaggu

SEQ ID NO: 204815 - RNA, 19 nt, Artificial Sequence
  Description of Artificial Sequence: Synthetic oligonucleotide
  Antisense strand to SEQ ID NO: 204814
accugcuaacaucacucac

SEQ ID NO: 204816 - RNA, 19 nt, Artificial Sequence
  Description of Artificial Sequence: Synthetic oligonucleotide
  Sense strand starting at position 1484 of SEQ ID NO: 2639
cgaauuguuaaauacguga

SEQ ID NO: 204817 - RNA, 19 nt, Artificial Sequence
  Description of Artificial Sequence: Synthetic oligonucleotide
  Antisense strand to SEQ ID NO: 204816
ucacguauuuaacaauucg

SEQ ID NO: 204818 - RNA, 19 nt, Artificial Sequence
  Description of Artificial Sequence: Synthetic oligonucleotide
  Sense strand starting at position 1491 of SEQ ID NO: 2639
uuaaauacgugacuuugaa

SEQ ID NO: 204819 - RNA, 19 nt, Artificial Sequence
  Description of Artificial Sequence: Synthetic oligonucleotide
  Antisense strand to SEQ ID NO: 204818
uucaaagucacguauuuaa

SEQ ID NO: 204820 - RNA, 19 nt, Artificial Sequence
  Description of Artificial Sequence: Synthetic oligonucleotide
  Sense strand starting at position 1607 of SEQ ID NO: 2639
ccuaacgaauuauccagau

SEQ ID NO: 204821 - RNA, 19 nt, Artificial Sequence
  Description of Artificial Sequence: Synthetic oligonucleotide
  Antisense strand to SEQ ID NO: 204820
aucuggauaauucguuagg

SEQ ID NO: 204822 - RNA, 19 nt, Artificial Sequence
  Description of Artificial Sequence: Synthetic oligonucleotide
  Sense strand starting at position 1611 of SEQ ID NO: 2639
acgaauuauccagauugcu

SEQ ID NO: 204823 - RNA, 19 nt, Artificial Sequence
  Description of Artificial Sequence: Synthetic oligonucleotide
  Antisense strand to SEQ ID NO: 204822
agcaaucuggauaauucgu

SEQ ID NO: 204824 - RNA, 19 nt, Artificial Sequence
  Description of Artificial Sequence: Synthetic oligonucleotide
  Sense strand starting at position 2235 of SEQ ID NO: 2639
uugugacugguuuacauaa

SEQ ID NO: 204825 - RNA, 19 nt, Artificial Sequence
  Description of Artificial Sequence: Synthetic oligonucleotide
  Antisense strand to SEQ ID NO: 204824
uuauguaaaccagucacaa

SEQ ID NO: 204826 - RNA, 19 nt, Artificial Sequence
  Description of Artificial Sequence: Synthetic oligonucleotide
  Sense strand starting at position 2259 of SEQ ID NO: 2639
cgauuaagccaucauugua

SEQ ID NO: 204827 - RNA, 19 nt, Artificial Sequence
  Description of Artificial Sequence: Synthetic oligonucleotide
  Antisense strand to SEQ ID NO: 204826
uacaaugauggcuuaaucg

SEQ ID NO: 204828 - RNA, 19 nt, Artificial Sequence
  Description of Artificial Sequence: Synthetic oligonucleotide
  Sense strand starting at position 2280 of SEQ ID NO: 2639
aaaggcuuugcaggagaaa

SEQ ID NO: 204829 - RNA, 19 nt, Artificial Sequence
  Description of Artificial Sequence: Synthetic oligonucleotide
  Antisense strand to SEQ ID NO: 204828
uuucuccugcaaagccuuu

SEQ ID NO: 204830 - RNA, 19 nt, Artificial Sequence
  Description of Artificial Sequence: Synthetic oligonucleotide
  Sense strand starting at position 2308 of SEQ ID NO: 2639
acuggaggucuuugagaca

SEQ ID NO: 204831 - RNA, 19 nt, Artificial Sequence
  Description of Artificial Sequence: Synthetic oligonucleotide
  Antisense strand to SEQ ID NO: 204830
ugucucaaagaccuccagu

SEQ ID NO: 204832 - RNA, 19 nt, Artificial Sequence
  Description of Artificial Sequence: Synthetic oligonucleotide
  Sense strand starting at position 2354 of SEQ ID NO: 2639
cugagagucgcguuucuuc

SEQ ID NO: 204833 - RNA, 19 nt, Artificial Sequence
  Description of Artificial Sequence: Synthetic oligonucleotide
  Antisense strand to SEQ ID NO: 204832
gaagaaacgcgacucucag

SEQ ID NO: 204834 - RNA, 19 nt, Artificial Sequence
  Description of Artificial Sequence: Synthetic oligonucleotide
  Sense strand starting at position 2555 of SEQ ID NO: 2639
gcguccucggcugugagaa

SEQ ID NO: 204835 - RNA, 19 nt, Artificial Sequence
  Description of Artificial Sequence: Synthetic oligonucleotide
  Antisense strand to SEQ ID NO: 204834
uucucacagccgaggacgc

SEQ ID NO: 204836 - RNA, 19 nt, Artificial Sequence
  Description of Artificial Sequence: Synthetic oligonucleotide
  Sense strand starting at position 2585 of SEQ ID NO: 2639
ugcugaaaccaauagucuu

SEQ ID NO: 204837 - RNA, 19 nt, Artificial Sequence
  Description of Artificial Sequence: Synthetic oligonucleotide
  Antisense strand to SEQ ID NO: 204836
aagacuauugguuucagca

SEQ ID NO: 204838 - RNA, 19 nt, Artificial Sequence
  Description of Artificial Sequence: Synthetic oligonucleotide
  Sense strand starting at position 2593 of SEQ ID NO: 2639
ccaauagucuuagcccaga

SEQ ID NO: 204839 - RNA, 19 nt, Artificial Sequence
  Description of Artificial Sequence: Synthetic oligonucleotide
  Antisense strand to SEQ ID NO: 204838
ucugggcuaagacuauugg

SEQ ID NO: 204840 - RNA, 19 nt, Artificial Sequence
  Description of Artificial Sequence: Synthetic oligonucleotide
  Sense strand starting at position 2596 of SEQ ID NO: 2639
auagucuuagcccagaauc

SEQ ID NO: 204841 - RNA, 19 nt, Artificial Sequence
  Description of Artificial Sequence: Synthetic oligonucleotide
  Antisense strand to SEQ ID NO: 204840
gauucugggcuaagacuau

SEQ ID NO: 204842 - RNA, 19 nt, Artificial Sequence
  Description of Artificial Sequence: Synthetic oligonucleotide
  Sense strand starting at position 2673 of SEQ ID NO: 2639
gggcuuagcgccuucaugu

SEQ ID NO: 204843 - RNA, 19 nt, Artificial Sequence
  Description of Artificial Sequence: Synthetic oligonucleotide
  Antisense strand to SEQ ID NO: 204842
acaugaaggcgcuaagccc

SEQ ID NO: 204844 - RNA, 19 nt, Artificial Sequence
  Description of Artificial Sequence: Synthetic oligonucleotide
  Sense strand starting at position 2674 of SEQ ID NO: 2639
ggcuuagcgccuucaugua

SEQ ID NO: 204845 - RNA, 19 nt, Artificial Sequence
  Description of Artificial Sequence: Synthetic oligonucleotide
  Antisense strand to SEQ ID NO: 204844
uacaugaaggcgcuaagcc

SEQ ID NO: 204846 - RNA, 19 nt, Artificial Sequence
  Description of Artificial Sequence: Synthetic oligonucleotide
  Sense strand starting at position 2752 of SEQ ID NO: 2639
uggaaagugauggguuagu

SEQ ID NO: 204847 - RNA, 19 nt, Artificial Sequence
  Description of Artificial Sequence: Synthetic oligonucleotide
  Antisense strand to SEQ ID NO: 204846
acuaacccaucacuuucca

SEQ ID NO: 204848 - RNA, 19 nt, Artificial Sequence
  Description of Artificial Sequence: Synthetic oligonucleotide
  Sense strand starting at position 2920 of SEQ ID NO: 2639
agaagaguuuggguagauu

SEQ ID NO: 204849 - RNA, 19 nt, Artificial Sequence
  Description of Artificial Sequence: Synthetic oligonucleotide
  Antisense strand to SEQ ID NO: 204848
aaucuacccaaacucuucu

SEQ ID NO: 204850 - RNA, 19 nt, Artificial Sequence
  Description of Artificial Sequence: Synthetic oligonucleotide
  Sense strand starting at position 2985 of SEQ ID NO: 2639
gagaccaaguucuuagaca

SEQ ID NO: 204851 - RNA, 19 nt, Artificial Sequence
  Description of Artificial Sequence: Synthetic oligonucleotide
  Antisense strand to SEQ ID NO: 204850
ugucuaagaacuuggucuc

SEQ ID NO: 204852 - RNA, 19 nt, Artificial Sequence
  Description of Artificial Sequence: Synthetic oligonucleotide
  Sense strand starting at position 3018 of SEQ ID NO: 2639
auagacaccucuuuguaga

SEQ ID NO: 204853 - RNA, 19 nt, Artificial Sequence
  Description of Artificial Sequence: Synthetic oligonucleotide
  Antisense strand to SEQ ID NO: 204852
ucuacaaagaggugucuau

SEQ ID NO: 204854 - RNA, 19 nt, Artificial Sequence
  Description of Artificial Sequence: Synthetic oligonucleotide
  Sense strand starting at position 3038 of SEQ ID NO: 2639
gaguccagaugucuaaaga

SEQ ID NO: 204855 - RNA, 19 nt, Artificial Sequence
  Description of Artificial Sequence: Synthetic oligonucleotide
  Antisense strand to SEQ ID NO: 204854
ucuuuagacaucuggacuc

SEQ ID NO: 204856 - RNA, 19 nt, Artificial Sequence
  Description of Artificial Sequence: Synthetic oligonucleotide
  Sense strand starting at position 3063 of SEQ ID NO: 2639
auguaauaggcugauguuu

SEQ ID NO: 204857 - RNA, 19 nt, Artificial Sequence
  Description of Artificial Sequence: Synthetic oligonucleotide
  Antisense strand to SEQ ID NO: 204856
aaacaucagccuauuacau

SEQ ID NO: 204858 - RNA, 19 nt, Artificial Sequence
  Description of Artificial Sequence: Synthetic oligonucleotide
  Sense strand starting at position 3180 of SEQ ID NO: 2639
gugcuuauacuauggaaug

SEQ ID NO: 204859 - RNA, 19 nt, Artificial Sequence
  Description of Artificial Sequence: Synthetic oligonucleotide
  Antisense strand to SEQ ID NO: 204858
cauuccauaguauaagcac

SEQ ID NO: 204860 - RNA, 19 nt, Artificial Sequence
  Description of Artificial Sequence: Synthetic oligonucleotide
  Sense strand starting at position 3459 of SEQ ID NO: 2639
cuguuagccgaugcaugua

SEQ ID NO: 204861 - RNA, 19 nt, Artificial Sequence
  Description of Artificial Sequence: Synthetic oligonucleotide
  Antisense strand to SEQ ID NO: 204860
uacaugcaucggcuaacag

SEQ ID NO: 204862 - RNA, 19 nt, Artificial Sequence
  Description of Artificial Sequence: Synthetic oligonucleotide
  Sense strand starting at position 3614 of SEQ ID NO: 2639
caacgcucucggccgaaua

SEQ ID NO: 204863 - RNA, 19 nt, Artificial Sequence
  Description of Artificial Sequence: Synthetic oligonucleotide
  Antisense strand to SEQ ID NO: 204862
uauucggccgagagcguug

SEQ ID NO: 204864 - RNA, 19 nt, Artificial Sequence
  Description of Artificial Sequence: Synthetic oligonucleotide
  Sense strand starting at position 42 of SEQ ID NO: 2640
cacuaaccggcuuagagau

SEQ ID NO: 204865 - RNA, 19 nt, Artificial Sequence
  Description of Artificial Sequence: Synthetic oligonucleotide
  Antisense strand to SEQ ID NO: 204864
aucucuaagccgguuagug

SEQ ID NO: 204866 - RNA, 19 nt, Artificial Sequence
  Description of Artificial Sequence: Synthetic oligonucleotide
  Sense strand starting at position 48 of SEQ ID NO: 2640
ccggcuuagagauauauug

SEQ ID NO: 204867 - RNA, 19 nt, Artificial Sequence
  Description of Artificial Sequence: Synthetic oligonucleotide
  Antisense strand to SEQ ID NO: 204866
caauauaucucuaagccgg

SEQ ID NO: 204868 - RNA, 19 nt, Artificial Sequence
  Description of Artificial Sequence: Synthetic oligonucleotide
  Sense strand starting at position 74 of SEQ ID NO: 2640
aaauuaaggcuugagcagu

SEQ ID NO: 204869 - RNA, 19 nt, Artificial Sequence
  Description of Artificial Sequence: Synthetic oligonucleotide
  Antisense strand to SEQ ID NO: 204868
acugcucaagccuuaauuu

SEQ ID NO: 204870 - RNA, 19 nt, Artificial Sequence
  Description of Artificial Sequence: Synthetic oligonucleotide
  Sense strand starting at position 105 of SEQ ID NO: 2640
auauuaaagguguauguga

SEQ ID NO: 204871 - RNA, 19 nt, Artificial Sequence
  Description of Artificial Sequence: Synthetic oligonucleotide
  Antisense strand to SEQ ID NO: 204870
ucacauacaccuuuaauau

SEQ ID NO: 204872 - RNA, 19 nt, Artificial Sequence
  Description of Artificial Sequence: Synthetic oligonucleotide
  Sense strand starting at position 107 of SEQ ID NO: 2640
auuaaagguguaugugaaa

SEQ ID NO: 204873 - RNA, 19 nt, Artificial Sequence
  Description of Artificial Sequence: Synthetic oligonucleotide
  Antisense strand to SEQ ID NO: 204872
uuucacauacaccuuuaau

SEQ ID NO: 204874 - RNA, 19 nt, Artificial Sequence
  Description of Artificial Sequence: Synthetic oligonucleotide
  Sense strand starting at position 124 of SEQ ID NO: 2640
aauggcagucaacgagaaa

SEQ ID NO: 204875 - RNA, 19 nt, Artificial Sequence
  Description of Artificial Sequence: Synthetic oligonucleotide
  Antisense strand to SEQ ID NO: 204874
uuucucguugacugccauu

SEQ ID NO: 204876 - RNA, 19 nt, Artificial Sequence
  Description of Artificial Sequence: Synthetic oligonucleotide
  Sense strand starting at position 125 of SEQ ID NO: 2640
auggcagucaacgagaaau

SEQ ID NO: 204877 - RNA, 19 nt, Artificial Sequence
  Description of Artificial Sequence: Synthetic oligonucleotide
  Antisense strand to SEQ ID NO: 204876
auuucucguugacugccau

SEQ ID NO: 204878 - RNA, 19 nt, Artificial Sequence
  Description of Artificial Sequence: Synthetic oligonucleotide
  Sense strand starting at position 127 of SEQ ID NO: 2640
ggcagucaacgagaaauuc

SEQ ID NO: 204879 - RNA, 19 nt, Artificial Sequence
  Description of Artificial Sequence: Synthetic oligonucleotide
  Antisense strand to SEQ ID NO: 204878
gaauuucucguugacugcc

SEQ ID NO: 204880 - RNA, 19 nt, Artificial Sequence
  Description of Artificial Sequence: Synthetic oligonucleotide
  Sense strand starting at position 191 of SEQ ID NO: 2640
guaccugucagagaaggca

SEQ ID NO: 204881 - RNA, 19 nt, Artificial Sequence
  Description of Artificial Sequence: Synthetic oligonucleotide
  Antisense strand to SEQ ID NO: 204880
ugccuucucugacagguac

SEQ ID NO: 204882 - RNA, 19 nt, Artificial Sequence
  Description of Artificial Sequence: Synthetic oligonucleotide
  Sense strand starting at position 217 of SEQ ID NO: 2640
caagauguucuggagguuu

SEQ ID NO: 204883 - RNA, 19 nt, Artificial Sequence
  Description of Artificial Sequence: Synthetic oligonucleotide
  Antisense strand to SEQ ID NO: 204882
aaaccuccagaacaucuug

SEQ ID NO: 204884 - RNA, 19 nt, Artificial Sequence
  Description of Artificial Sequence: Synthetic oligonucleotide
  Sense strand starting at position 219 of SEQ ID NO: 2640
agauguucuggagguuuga

SEQ ID NO: 204885 - RNA, 19 nt, Artificial Sequence
  Description of Artificial Sequence: Synthetic oligonucleotide
  Antisense strand to SEQ ID NO: 204884
ucaaaccuccagaacaucu

SEQ ID NO: 204886 - RNA, 19 nt, Artificial Sequence
  Description of Artificial Sequence: Synthetic oligonucleotide
  Sense strand starting at position 406 of SEQ ID NO: 2640
accuuagucuagucacaua

SEQ ID NO: 204887 - RNA, 19 nt, Artificial Sequence
  Description of Artificial Sequence: Synthetic oligonucleotide
  Antisense strand to SEQ ID NO: 204886
uaugugacuagacuaaggu

SEQ ID NO: 204888 - RNA, 19 nt, Artificial Sequence
  Description of Artificial Sequence: Synthetic oligonucleotide
  Sense strand starting at position 451 of SEQ ID NO: 2640
ggauauaaagcuggcaauu

SEQ ID NO: 204889 - RNA, 19 nt, Artificial Sequence
  Description of Artificial Sequence: Synthetic oligonucleotide
  Antisense strand to SEQ ID NO: 204888
aauugccagcuuuauaucc

SEQ ID NO: 204890 - RNA, 19 nt, Artificial Sequence
  Description of Artificial Sequence: Synthetic oligonucleotide
  Sense strand starting at position 464 of SEQ ID NO: 2640
gcaauuauacccgauacag

SEQ ID NO: 204891 - RNA, 19 nt, Artificial Sequence
  Description of Artificial Sequence: Synthetic oligonucleotide
  Antisense strand to SEQ ID NO: 204890
cuguaucggguauaauugc

SEQ ID NO: 204892 - RNA, 19 nt, Artificial Sequence
  Description of Artificial Sequence: Synthetic oligonucleotide
  Sense strand starting at position 505 of SEQ ID NO: 2640
gaaucaaauguacgucaaa

SEQ ID NO: 204893 - RNA, 19 nt, Artificial Sequence
  Description of Artificial Sequence: Synthetic oligonucleotide
  Antisense strand to SEQ ID NO: 204892
uuugacguacauuugauuc

SEQ ID NO: 204894 - RNA, 19 nt, Artificial Sequence
  Description of Artificial Sequence: Synthetic oligonucleotide
  Sense strand starting at position 524 of SEQ ID NO: 2640
augugcauuucucucuaca

SEQ ID NO: 204895 - RNA, 19 nt, Artificial Sequence
  Description of Artificial Sequence: Synthetic oligonucleotide
  Antisense strand to SEQ ID NO: 204894
uguagagagaaaugcacau

SEQ ID NO: 204896 - RNA, 19 nt, Artificial Sequence
  Description of Artificial Sequence: Synthetic oligonucleotide
  Sense strand starting at position 526 of SEQ ID NO: 2640
gugcauuucucucuacaag

SEQ ID NO: 204897 - RNA, 19 nt, Artificial Sequence
  Description of Artificial Sequence: Synthetic oligonucleotide
  Antisense strand to SEQ ID NO: 204896
cuuguagagagaaaugcac

SEQ ID NO: 204898 - RNA, 19 nt, Artificial Sequence
  Description of Artificial Sequence: Synthetic oligonucleotide
  Sense strand starting at position 599 of SEQ ID NO: 2640
gugaucacccgucauaaac

SEQ ID NO: 204899 - RNA, 19 nt, Artificial Sequence
  Description of Artificial Sequence: Synthetic oligonucleotide
  Antisense strand to SEQ ID NO: 204898
guuuaugacgggugaucac

SEQ ID NO: 204900 - RNA, 19 nt, Artificial Sequence
  Description of Artificial Sequence: Synthetic oligonucleotide
  Sense strand starting at position 697 of SEQ ID NO: 2640
gagagauuaucaccauagu

SEQ ID NO: 204901 - RNA, 19 nt, Artificial Sequence
  Description of Artificial Sequence: Synthetic oligonucleotide
  Antisense strand to SEQ ID NO: 204900
acuauggugauaaucucuc

SEQ ID NO: 204902 - RNA, 19 nt, Artificial Sequence
  Description of Artificial Sequence: Synthetic oligonucleotide
  Sense strand starting at position 1546 of SEQ ID NO: 2640
ccgcgucucaccgaauuua

SEQ ID NO: 204903 - RNA, 19 nt, Artificial Sequence
  Description of Artificial Sequence: Synthetic oligonucleotide
  Antisense strand to SEQ ID NO: 204902
uaaauucggugagacgcgg

SEQ ID NO: 204904 - RNA, 19 nt, Artificial Sequence
  Description of Artificial Sequence: Synthetic oligonucleotide
  Sense strand starting at position 2227 of SEQ ID NO: 2640
gggaaauucuguccuccaa

SEQ ID NO: 204905 - RNA, 19 nt, Artificial Sequence
  Description of Artificial Sequence: Synthetic oligonucleotide
  Antisense strand to SEQ ID NO: 204904
uuggaggacagaauuuccc

SEQ ID NO: 204906 - RNA, 19 nt, Artificial Sequence
  Description of Artificial Sequence: Synthetic oligonucleotide
  Sense strand starting at position 2381 of SEQ ID NO: 2640
ugguguggaacccaugaau

SEQ ID NO: 204907 - RNA, 19 nt, Artificial Sequence
  Description of Artificial Sequence: Synthetic oligonucleotide
  Antisense strand to SEQ ID NO: 204906
auucauggguuccacacca

SEQ ID NO: 204908 - RNA, 19 nt, Artificial Sequence
  Description of Artificial Sequence: Synthetic oligonucleotide
  Sense strand starting at position 2407 of SEQ ID NO: 2640
uccaacaaguuaucuguga

SEQ ID NO: 204909 - RNA, 19 nt, Artificial Sequence
  Description of Artificial Sequence: Synthetic oligonucleotide
  Antisense strand to SEQ ID NO: 204908
ucacagauaacuuguugga

SEQ ID NO: 204910 - RNA, 19 nt, Artificial Sequence
  Description of Artificial Sequence: Synthetic oligonucleotide
  Sense strand starting at position 2408 of SEQ ID NO: 2640
ccaacaaguuaucugugau

SEQ ID NO: 204911 - RNA, 19 nt, Artificial Sequence
  Description of Artificial Sequence: Synthetic oligonucleotide
  Antisense strand to SEQ ID NO: 204910
aucacagauaacuuguugg

SEQ ID NO: 204912 - RNA, 19 nt, Artificial Sequence
  Description of Artificial Sequence: Synthetic oligonucleotide
  Sense strand starting at position 2457 of SEQ ID NO: 2640
ucaguuagaggcuauauca

SEQ ID NO: 204913 - RNA, 19 nt, Artificial Sequence
  Description of Artificial Sequence: Synthetic oligonucleotide
  Antisense strand to SEQ ID NO: 204912
ugauauagccucuaacuga

SEQ ID NO: 204914 - RNA, 19 nt, Artificial Sequence
  Description of Artificial Sequence: Synthetic oligonucleotide
  Sense strand starting at position 2464 of SEQ ID NO: 2640
gaggcuauaucaucaggga

SEQ ID NO: 204915 - RNA, 19 nt, Artificial Sequence
  Description of Artificial Sequence: Synthetic oligonucleotide
  Antisense strand to SEQ ID NO: 204914
ucccugaugauauagccuc

SEQ ID NO: 204916 - RNA, 19 nt, Artificial Sequence
  Description of Artificial Sequence: Synthetic oligonucleotide
  Sense strand starting at position 2757 of SEQ ID NO: 2640
gacuuucucagcguucguu

SEQ ID NO: 204917 - RNA, 19 nt, Artificial Sequence
  Description of Artificial Sequence: Synthetic oligonucleotide
  Antisense strand to SEQ ID NO: 204916
aacgaacgcugagaaaguc

SEQ ID NO: 204918 - RNA, 19 nt, Artificial Sequence
  Description of Artificial Sequence: Synthetic oligonucleotide
  Sense strand starting at position 2821 of SEQ ID NO: 2640
gccuccucugagcauugaa

SEQ ID NO: 204919 - RNA, 19 nt, Artificial Sequence
  Description of Artificial Sequence: Synthetic oligonucleotide
  Antisense strand to SEQ ID NO: 204918
uucaaugcucagaggaggc

SEQ ID NO: 204920 - RNA, 19 nt, Artificial Sequence
  Description of Artificial Sequence: Synthetic oligonucleotide
  Sense strand starting at position 3122 of SEQ ID NO: 2640
acugcaucuguuggaggaa

SEQ ID NO: 204921 - RNA, 19 nt, Artificial Sequence
  Description of Artificial Sequence: Synthetic oligonucleotide
  Antisense strand to SEQ ID NO: 204920
uuccuccaacagaugcagu

SEQ ID NO: 204922 - RNA, 19 nt, Artificial Sequence
  Description of Artificial Sequence: Synthetic oligonucleotide
  Sense strand starting at position 3194 of SEQ ID NO: 2640
ggagucugaucucuaagug

SEQ ID NO: 204923 - RNA, 19 nt, Artificial Sequence
  Description of Artificial Sequence: Synthetic oligonucleotide
  Antisense strand to SEQ ID NO: 204922
cacuuagagaucagacucc

SEQ ID NO: 204924 - RNA, 19 nt, Artificial Sequence
  Description of Artificial Sequence: Synthetic oligonucleotide
  Sense strand starting at position 3195 of SEQ ID NO: 2640
gagucugaucucuaagugu

SEQ ID NO: 204925 - RNA, 19 nt, Artificial Sequence
  Description of Artificial Sequence: Synthetic oligonucleotide
  Antisense strand to SEQ ID NO: 204924
acacuuagagaucagacuc

SEQ ID NO: 204926 - RNA, 19 nt, Artificial Sequence
  Description of Artificial Sequence: Synthetic oligonucleotide
  Sense strand starting at position 3331 of SEQ ID NO: 2640
aucugaaguucuguuaaag

SEQ ID NO: 204927 - RNA, 19 nt, Artificial Sequence
  Description of Artificial Sequence: Synthetic oligonucleotide
  Antisense strand to SEQ ID NO: 204926
cuuuaacagaacuucagau

SEQ ID NO: 204928 - RNA, 19 nt, Artificial Sequence
  Description of Artificial Sequence: Synthetic oligonucleotide
  Sense strand starting at position 3378 of SEQ ID NO: 2640
cuaauaugucccuauaugu

SEQ ID NO: 204929 - RNA, 19 nt, Artificial Sequence
  Description of Artificial Sequence: Synthetic oligonucleotide
  Antisense strand to SEQ ID NO: 204928
acauauagggacauauuag

SEQ ID NO: 204930 - RNA, 19 nt, Artificial Sequence
  Description of Artificial Sequence: Synthetic oligonucleotide
  Sense strand starting at position 3514 of SEQ ID NO: 2640
ucagguaacuugucuaaga

SEQ ID NO: 204931 - RNA, 19 nt, Artificial Sequence
  Description of Artificial Sequence: Synthetic oligonucleotide
  Antisense strand to SEQ ID NO: 204930
ucuuagacaaguuaccuga

SEQ ID NO: 204932 - RNA, 19 nt, Artificial Sequence
  Description of Artificial Sequence: Synthetic oligonucleotide
  Sense strand starting at position 3530 of SEQ ID NO: 2640
agaucauagcgcuaguaag

SEQ ID NO: 204933 - RNA, 19 nt, Artificial Sequence
  Description of Artificial Sequence: Synthetic oligonucleotide
  Antisense strand to SEQ ID NO: 204932
cuuacuagcgcuaugaucu

SEQ ID NO: 204934 - RNA, 19 nt, Artificial Sequence
  Description of Artificial Sequence: Synthetic oligonucleotide
  Sense strand starting at position 3839 of SEQ ID NO: 2640
agagcaaucuucucaacug

SEQ ID NO: 204935 - RNA, 19 nt, Artificial Sequence
  Description of Artificial Sequence: Synthetic oligonucleotide
  Antisense strand to SEQ ID NO: 204934
caguugagaagauugcucu

SEQ ID NO: 204936 - RNA, 19 nt, Artificial Sequence
  Description of Artificial Sequence: Synthetic oligonucleotide
  Sense strand starting at position 3892 of SEQ ID NO: 2640
cucuguuuauacucaggga

SEQ ID NO: 204937 - RNA, 19 nt, Artificial Sequence
  Description of Artificial Sequence: Synthetic oligonucleotide
  Antisense strand to SEQ ID NO: 204936
ucccugaguauaaacagag

SEQ ID NO: 204938 - RNA, 19 nt, Artificial Sequence
  Description of Artificial Sequence: Synthetic oligonucleotide
  Sense strand starting at position 3896 of SEQ ID NO: 2640
guuuauacucagggauagc

SEQ ID NO: 204939 - RNA, 19 nt, Artificial Sequence
  Description of Artificial Sequence: Synthetic oligonucleotide
  Antisense strand to SEQ ID NO: 204938
gcuaucccugaguauaaac

SEQ ID NO: 204940 - RNA, 19 nt, Artificial Sequence
  Description of Artificial Sequence: Synthetic oligonucleotide
  Sense strand starting at position 3905 of SEQ ID NO: 2640
cagggauagcucugaccaa

SEQ ID NO: 204941 - RNA, 19 nt, Artificial Sequence
  Description of Artificial Sequence: Synthetic oligonucleotide
  Antisense strand to SEQ ID NO: 204940
uuggucagagcuaucccug

SEQ ID NO: 204942 - RNA, 19 nt, Artificial Sequence
  Description of Artificial Sequence: Synthetic oligonucleotide
  Sense strand starting at position 3909 of SEQ ID NO: 2640
gauagcucugaccaauguu

SEQ ID NO: 204943 - RNA, 19 nt, Artificial Sequence
  Description of Artificial Sequence: Synthetic oligonucleotide
  Antisense strand to SEQ ID NO: 204942
aacauuggucagagcuauc

SEQ ID NO: 204944 - RNA, 19 nt, Artificial Sequence
  Description of Artificial Sequence: Synthetic oligonucleotide
  Sense strand starting at position 137 of SEQ ID NO: 2642
acagccuaugauuagugau

SEQ ID NO: 204945 - RNA, 19 nt, Artificial Sequence
  Description of Artificial Sequence: Synthetic oligonucleotide
  Antisense strand to SEQ ID NO: 204944
aucacuaaucauaggcugu

SEQ ID NO: 204946 - RNA, 19 nt, Artificial Sequence
  Description of Artificial Sequence: Synthetic oligonucleotide
  Sense strand starting at position 183 of SEQ ID NO: 2642
aaugucugcuacuuaagga

SEQ ID NO: 204947 - RNA, 19 nt, Artificial Sequence
  Description of Artificial Sequence: Synthetic oligonucleotide
  Antisense strand to SEQ ID NO: 204946
uccuuaaguagcagacauu

SEQ ID NO: 204948 - RNA, 19 nt, Artificial Sequence
  Description of Artificial Sequence: Synthetic oligonucleotide
  Sense strand starting at position 219 of SEQ ID NO: 2642
acuuauaaccaguagcuga

SEQ ID NO: 204949 - RNA, 19 nt, Artificial Sequence
  Description of Artificial Sequence: Synthetic oligonucleotide
  Antisense strand to SEQ ID NO: 204948
ucagcuacugguuauaagu

SEQ ID NO: 204950 - RNA, 19 nt, Artificial Sequence
  Description of Artificial Sequence: Synthetic oligonucleotide
  Sense strand starting at position 322 of SEQ ID NO: 2642
acgucuuauuuagcuuuau

SEQ ID NO: 204951 - RNA, 19 nt, Artificial Sequence
  Description of Artificial Sequence: Synthetic oligonucleotide
  Antisense strand to SEQ ID NO: 204950
auaaagcuaaauaagacgu

SEQ ID NO: 204952 - RNA, 19 nt, Artificial Sequence
  Description of Artificial Sequence: Synthetic oligonucleotide
  Sense strand starting at position 323 of SEQ ID NO: 2642
cgucuuauuuagcuuuaua

SEQ ID NO: 204953 - RNA, 19 nt, Artificial Sequence
  Description of Artificial Sequence: Synthetic oligonucleotide
  Antisense strand to SEQ ID NO: 204952
uauaaagcuaaauaagacg

SEQ ID NO: 204954 - RNA, 19 nt, Artificial Sequence
  Description of Artificial Sequence: Synthetic oligonucleotide
  Sense strand starting at position 352 of SEQ ID NO: 2642
agcacuuugcuacagaauu

SEQ ID NO: 204955 - RNA, 19 nt, Artificial Sequence
  Description of Artificial Sequence: Synthetic oligonucleotide
  Antisense strand to SEQ ID NO: 204954
aauucuguagcaaagugcu

SEQ ID NO: 204956 - RNA, 19 nt, Artificial Sequence
  Description of Artificial Sequence: Synthetic oligonucleotide
  Sense strand starting at position 483 of SEQ ID NO: 2642
aauuaacuuccauggguga

SEQ ID NO: 204957 - RNA, 19 nt, Artificial Sequence
  Description of Artificial Sequence: Synthetic oligonucleotide
  Antisense strand to SEQ ID NO: 204956
ucacccauggaaguuaauu

SEQ ID NO: 204958 - RNA, 19 nt, Artificial Sequence
  Description of Artificial Sequence: Synthetic oligonucleotide
  Sense strand starting at position 484 of SEQ ID NO: 2642
auuaacuuccaugggugaa

SEQ ID NO: 204959 - RNA, 19 nt, Artificial Sequence
  Description of Artificial Sequence: Synthetic oligonucleotide
  Antisense strand to SEQ ID NO: 204958
uucacccauggaaguuaau

SEQ ID NO: 204960 - RNA, 19 nt, Artificial Sequence
  Description of Artificial Sequence: Synthetic oligonucleotide
  Sense strand starting at position 532 of SEQ ID NO: 2642
aaaucugggugacuacauu

SEQ ID NO: 204961 - RNA, 19 nt, Artificial Sequence
  Description of Artificial Sequence: Synthetic oligonucleotide
  Antisense strand to SEQ ID NO: 204960
aauguagucacccagauuu

SEQ ID NO: 204962 - RNA, 19 nt, Artificial Sequence
  Description of Artificial Sequence: Synthetic oligonucleotide
  Sense strand starting at position 681 of SEQ ID NO: 2642
cacuaaccggcuuagagau

SEQ ID NO: 204963 - RNA, 19 nt, Artificial Sequence
  Description of Artificial Sequence: Synthetic oligonucleotide
  Antisense strand to SEQ ID NO: 204962
aucucuaagccgguuagug

SEQ ID NO: 204964 - RNA, 19 nt, Artificial Sequence
  Description of Artificial Sequence: Synthetic oligonucleotide
  Sense strand starting at position 687 of SEQ ID NO: 2642
ccggcuuagagauauauug

SEQ ID NO: 204965 - RNA, 19 nt, Artificial Sequence
  Description of Artificial Sequence: Synthetic oligonucleotide
  Antisense strand to SEQ ID NO: 204964
caauauaucucuaagccgg

SEQ ID NO: 204966 - RNA, 19 nt, Artificial Sequence
  Description of Artificial Sequence: Synthetic oligonucleotide
  Sense strand starting at position 713 of SEQ ID NO: 2642
aaauuaaggcuugagcagu

SEQ ID NO: 204967 - RNA, 19 nt, Artificial Sequence
  Description of Artificial Sequence: Synthetic oligonucleotide
  Antisense strand to SEQ ID NO: 204966
acugcucaagccuuaauuu

SEQ ID NO: 204968 - RNA, 19 nt, Artificial Sequence
  Description of Artificial Sequence: Synthetic oligonucleotide
  Sense strand starting at position 744 of SEQ ID NO: 2642
auauuaaagguguauguga

SEQ ID NO: 204969 - RNA, 19 nt, Artificial Sequence
  Description of Artificial Sequence: Synthetic oligonucleotide
  Antisense strand to SEQ ID NO: 204968
ucacauacaccuuuaauau

SEQ ID NO: 204970 - RNA, 19 nt, Artificial Sequence
  Description of Artificial Sequence: Synthetic oligonucleotide
  Sense strand starting at position 746 of SEQ ID NO: 2642
auuaaagguguaugugaaa

SEQ ID NO: 204971 - RNA, 19 nt, Artificial Sequence
  Description of Artificial Sequence: Synthetic oligonucleotide
  Antisense strand to SEQ ID NO: 204970
uuucacauacaccuuuaau

SEQ ID NO: 204972 - RNA, 19 nt, Artificial Sequence
  Description of Artificial Sequence: Synthetic oligonucleotide
  Sense strand starting at position 763 of SEQ ID NO: 2642
aauggcagucaacgagaaa

SEQ ID NO: 204973 - RNA, 19 nt, Artificial Sequence
  Description of Artificial Sequence: Synthetic oligonucleotide
  Antisense strand to SEQ ID NO: 204972
uuucucguugacugccauu

SEQ ID NO: 204974 - RNA, 19 nt, Artificial Sequence
  Description of Artificial Sequence: Synthetic oligonucleotide
  Sense strand starting at position 764 of SEQ ID NO: 2642
auggcagucaacgagaaau

SEQ ID NO: 204975 - RNA, 19 nt, Artificial Sequence
  Description of Artificial Sequence: Synthetic oligonucleotide
  Antisense strand to SEQ ID NO: 204974
auuucucguugacugccau

SEQ ID NO: 204976 - RNA, 19 nt, Artificial Sequence
  Description of Artificial Sequence: Synthetic oligonucleotide
  Sense strand starting at position 766 of SEQ ID NO: 2642
ggcagucaacgagaaauuc

SEQ ID NO: 204977 - RNA, 19 nt, Artificial Sequence
  Description of Artificial Sequence: Synthetic oligonucleotide
  Antisense strand to SEQ ID NO: 204976
gaauuucucguugacugcc

SEQ ID NO: 204978 - RNA, 19 nt, Artificial Sequence
  Description of Artificial Sequence: Synthetic oligonucleotide
  Sense strand starting at position 830 of SEQ ID NO: 2642
guaccugucagagaaggca

SEQ ID NO: 204979 - RNA, 19 nt, Artificial Sequence
  Description of Artificial Sequence: Synthetic oligonucleotide
  Antisense strand to SEQ ID NO: 204978
ugccuucucugacagguac

SEQ ID NO: 204980 - RNA, 19 nt, Artificial Sequence
  Description of Artificial Sequence: Synthetic oligonucleotide
  Sense strand starting at position 856 of SEQ ID NO: 2642
caagauguucuggagguuu

SEQ ID NO: 204981 - RNA, 19 nt, Artificial Sequence
  Description of Artificial Sequence: Synthetic oligonucleotide
  Antisense strand to SEQ ID NO: 204980
aaaccuccagaacaucuug

SEQ ID NO: 204982 - RNA, 19 nt, Artificial Sequence
  Description of Artificial Sequence: Synthetic oligonucleotide
  Sense strand starting at position 858 of SEQ ID NO: 2642
agauguucuggagguuuga

SEQ ID NO: 204983 - RNA, 19 nt, Artificial Sequence
  Description of Artificial Sequence: Synthetic oligonucleotide
  Antisense strand to SEQ ID NO: 204982
ucaaaccuccagaacaucu

SEQ ID NO: 204984 - RNA, 19 nt, Artificial Sequence
  Description of Artificial Sequence: Synthetic oligonucleotide
  Sense strand starting at position 1090 of SEQ ID NO: 2642
ggauauaaagcuggcaauu

SEQ ID NO: 204985 - RNA, 19 nt, Artificial Sequence
  Description of Artificial Sequence: Synthetic oligonucleotide
  Antisense strand to SEQ ID NO: 204984
aauugccagcuuuauaucc

SEQ ID NO: 204986 - RNA, 19 nt, Artificial Sequence
  Description of Artificial Sequence: Synthetic oligonucleotide
  Sense strand starting at position 1103 of SEQ ID NO: 2642
gcaauuauacccgauacag

SEQ ID NO: 204987 - RNA, 19 nt, Artificial Sequence
  Description of Artificial Sequence: Synthetic oligonucleotide
  Antisense strand to SEQ ID NO: 204986
cuguaucggguauaauugc

SEQ ID NO: 204988 - RNA, 19 nt, Artificial Sequence
  Description of Artificial Sequence: Synthetic oligonucleotide
  Sense strand starting at position 1144 of SEQ ID NO: 2642
gaaucaaauguacgucaaa

SEQ ID NO: 204989 - RNA, 19 nt, Artificial Sequence
  Description of Artificial Sequence: Synthetic oligonucleotide
  Antisense strand to SEQ ID NO: 204988
uuugacguacauuugauuc

SEQ ID NO: 204990 - RNA, 19 nt, Artificial Sequence
  Description of Artificial Sequence: Synthetic oligonucleotide
  Sense strand starting at position 1163 of SEQ ID NO: 2642
augugcauuucucucuaca

SEQ ID NO: 204991 - RNA, 19 nt, Artificial Sequence
  Description of Artificial Sequence: Synthetic oligonucleotide
  Antisense strand to SEQ ID NO: 204990
uguagagagaaaugcacau

SEQ ID NO: 204992 - RNA, 19 nt, Artificial Sequence
  Description of Artificial Sequence: Synthetic oligonucleotide
  Sense strand starting at position 1165 of SEQ ID NO: 2642
gugcauuucucucuacaag

SEQ ID NO: 204993 - RNA, 19 nt, Artificial Sequence
  Description of Artificial Sequence: Synthetic oligonucleotide
  Antisense strand to SEQ ID NO: 204992
cuuguagagagaaaugcac

SEQ ID NO: 204994 - RNA, 19 nt, Artificial Sequence
  Description of Artificial Sequence: Synthetic oligonucleotide
  Sense strand starting at position 1238 of SEQ ID NO: 2642
gugaucacccgucauaaac

SEQ ID NO: 204995 - RNA, 19 nt, Artificial Sequence
  Description of Artificial Sequence: Synthetic oligonucleotide
  Antisense strand to SEQ ID NO: 204994
guuuaugacgggugaucac

SEQ ID NO: 204996 - RNA, 19 nt, Artificial Sequence
  Description of Artificial Sequence: Synthetic oligonucleotide
  Sense strand starting at position 1336 of SEQ ID NO: 2642
gagagauuaucaccauagu

SEQ ID NO: 204997 - RNA, 19 nt, Artificial Sequence
  Description of Artificial Sequence: Synthetic oligonucleotide
  Antisense strand to SEQ ID NO: 204996
acuauggugauaaucucuc

SEQ ID NO: 204998 - RNA, 19 nt, Artificial Sequence
  Description of Artificial Sequence: Synthetic oligonucleotide
  Sense strand starting at position 2185 of SEQ ID NO: 2642
ccgcgucucaccgaauuua

SEQ ID NO: 204999 - RNA, 19 nt, Artificial Sequence
  Description of Artificial Sequence: Synthetic oligonucleotide
  Antisense strand to SEQ ID NO: 204998
uaaauucggugagacgcgg

SEQ ID NO: 205000 - RNA, 19 nt, Artificial Sequence
  Description of Artificial Sequence: Synthetic oligonucleotide
  Sense strand starting at position 2866 of SEQ ID NO: 2642
gggaaauucuguccuccaa

SEQ ID NO: 205001 - RNA, 19 nt, Artificial Sequence
  Description of Artificial Sequence: Synthetic oligonucleotide
  Antisense strand to SEQ ID NO: 205000
uuggaggacagaauuuccc

SEQ ID NO: 205002 - RNA, 19 nt, Artificial Sequence
  Description of Artificial Sequence: Synthetic oligonucleotide
  Sense strand starting at position 3020 of SEQ ID NO: 2642
ugguguggaacccaugaau

SEQ ID NO: 205003 - RNA, 19 nt, Artificial Sequence
  Description of Artificial Sequence: Synthetic oligonucleotide
  Antisense strand to SEQ ID NO: 205002
auucauggguuccacacca

SEQ ID NO: 205004 - RNA, 19 nt, Artificial Sequence
  Description of Artificial Sequence: Synthetic oligonucleotide
  Sense strand starting at position 3046 of SEQ ID NO: 2642
uccaacaaguuaucuguga

SEQ ID NO: 205005 - RNA, 19 nt, Artificial Sequence
  Description of Artificial Sequence: Synthetic oligonucleotide
  Antisense strand to SEQ ID NO: 205004
ucacagauaacuuguugga

SEQ ID NO: 205006 - RNA, 19 nt, Artificial Sequence
  Description of Artificial Sequence: Synthetic oligonucleotide
  Sense strand starting at position 3047 of SEQ ID NO: 2642
ccaacaaguuaucugugau

SEQ ID NO: 205007 - RNA, 19 nt, Artificial Sequence
  Description of Artificial Sequence: Synthetic oligonucleotide
  Antisense strand to SEQ ID NO: 205006
aucacagauaacuuguugg

SEQ ID NO: 205008 - RNA, 19 nt, Artificial Sequence
  Description of Artificial Sequence: Synthetic oligonucleotide
  Sense strand starting at position 3096 of SEQ ID NO: 2642
ucaguuagaggcuauauca

SEQ ID NO: 205009 - RNA, 19 nt, Artificial Sequence
  Description of Artificial Sequence: Synthetic oligonucleotide
  Antisense strand to SEQ ID NO: 205008
ugauauagccucuaacuga

SEQ ID NO: 205010 - RNA, 19 nt, Artificial Sequence
  Description of Artificial Sequence: Synthetic oligonucleotide
  Sense strand starting at position 3103 of SEQ ID NO: 2642
gaggcuauaucaucaggga

SEQ ID NO: 205011 - RNA, 19 nt, Artificial Sequence
  Description of Artificial Sequence: Synthetic oligonucleotide
  Antisense strand to SEQ ID NO: 205010
ucccugaugauauagccuc

SEQ ID NO: 205012 - RNA, 19 nt, Artificial Sequence
  Description of Artificial Sequence: Synthetic oligonucleotide
  Sense strand starting at position 3396 of SEQ ID NO: 2642
gacuuucucagcguucguu

SEQ ID NO: 205013 - RNA, 19 nt, Artificial Sequence
  Description of Artificial Sequence: Synthetic oligonucleotide
  Antisense strand to SEQ ID NO: 205012
aacgaacgcugagaaaguc

SEQ ID NO: 205014 - RNA, 19 nt, Artificial Sequence
  Description of Artificial Sequence: Synthetic oligonucleotide
  Sense strand starting at position 3460 of SEQ ID NO: 2642
gccuccucugagcauugaa

SEQ ID NO: 205015 - RNA, 19 nt, Artificial Sequence
  Description of Artificial Sequence: Synthetic oligonucleotide
  Antisense strand to SEQ ID NO: 205014
uucaaugcucagaggaggc

SEQ ID NO: 205016 - RNA, 19 nt, Artificial Sequence
  Description of Artificial Sequence: Synthetic oligonucleotide
  Sense strand starting at position 3761 of SEQ ID NO: 2642
acugcaucuguuggaggaa

SEQ ID NO: 205017 - RNA, 19 nt, Artificial Sequence
  Description of Artificial Sequence: Synthetic oligonucleotide
  Antisense strand to SEQ ID NO: 205016
uuccuccaacagaugcagu

SEQ ID NO: 205018 - RNA, 19 nt, Artificial Sequence
  Description of Artificial Sequence: Synthetic oligonucleotide
  Sense strand starting at position 3833 of SEQ ID NO: 2642
ggagucugaucucuaagug

SEQ ID NO: 205019 - RNA, 19 nt, Artificial Sequence
  Description of Artificial Sequence: Synthetic oligonucleotide
  Antisense strand to SEQ ID NO: 205018
cacuuagagaucagacucc

SEQ ID NO: 205020 - RNA, 19 nt, Artificial Sequence
  Description of Artificial Sequence: Synthetic oligonucleotide
  Sense strand starting at position 3834 of SEQ ID NO: 2642
gagucugaucucuaagugu

SEQ ID NO: 205021 - RNA, 19 nt, Artificial Sequence
  Description of Artificial Sequence: Synthetic oligonucleotide
  Antisense strand to SEQ ID NO: 205020
acacuuagagaucagacuc

SEQ ID NO: 205022 - RNA, 19 nt, Artificial Sequence
  Description of Artificial Sequence: Synthetic oligonucleotide
  Sense strand starting at position 3970 of SEQ ID NO: 2642
aucugaaguucuguuaaag

SEQ ID NO: 205023 - RNA, 19 nt, Artificial Sequence
  Description of Artificial Sequence: Synthetic oligonucleotide
  Antisense strand to SEQ ID NO: 205022
cuuuaacagaacuucagau

SEQ ID NO: 205024 - RNA, 19 nt, Artificial Sequence
  Description of Artificial Sequence: Synthetic oligonucleotide
  Sense strand starting at position 285 of SEQ ID NO: 2641
acagccuaugauuagugau

SEQ ID NO: 205025 - RNA, 19 nt, Artificial Sequence
  Description of Artificial Sequence: Synthetic oligonucleotide
  Antisense strand to SEQ ID NO: 205024
aucacuaaucauaggcugu

SEQ ID NO: 205026 - RNA, 19 nt, Artificial Sequence
  Description of Artificial Sequence: Synthetic oligonucleotide
  Sense strand starting at position 331 of SEQ ID NO: 2641
aaugucugcuacuuaagga

SEQ ID NO: 205027 - RNA, 19 nt, Artificial Sequence
  Description of Artificial Sequence: Synthetic oligonucleotide
  Antisense strand to SEQ ID NO: 205026
uccuuaaguagcagacauu

SEQ ID NO: 205028 - RNA, 19 nt, Artificial Sequence
  Description of Artificial Sequence: Synthetic oligonucleotide
  Sense strand starting at position 367 of SEQ ID NO: 2641
acuuauaaccaguagcuga

SEQ ID NO: 205029 - RNA, 19 nt, Artificial Sequence
  Description of Artificial Sequence: Synthetic oligonucleotide
  Antisense strand to SEQ ID NO: 205028
ucagcuacugguuauaagu

SEQ ID NO: 205030 - RNA, 19 nt, Artificial Sequence
  Description of Artificial Sequence: Synthetic oligonucleotide
  Sense strand starting at position 470 of SEQ ID NO: 2641
acgucuuauuuagcuuuau

SEQ ID NO: 205031 - RNA, 19 nt, Artificial Sequence
  Description of Artificial Sequence: Synthetic oligonucleotide
  Antisense strand to SEQ ID NO: 205030
auaaagcuaaauaagacgu

SEQ ID NO: 205032 - RNA, 19 nt, Artificial Sequence
  Description of Artificial Sequence: Synthetic oligonucleotide
  Sense strand starting at position 471 of SEQ ID NO: 2641
cgucuuauuuagcuuuaua

SEQ ID NO: 205033 - RNA, 19 nt, Artificial Sequence
  Description of Artificial Sequence: Synthetic oligonucleotide
  Antisense strand to SEQ ID NO: 205032
uauaaagcuaaauaagacg

SEQ ID NO: 205034 - RNA, 19 nt, Artificial Sequence
  Description of Artificial Sequence: Synthetic oligonucleotide
  Sense strand starting at position 500 of SEQ ID NO: 2641
agcacuuugcuacagaauu

SEQ ID NO: 205035 - RNA, 19 nt, Artificial Sequence
  Description of Artificial Sequence: Synthetic oligonucleotide
  Antisense strand to SEQ ID NO: 205034
aauucuguagcaaagugcu

SEQ ID NO: 205036 - RNA, 19 nt, Artificial Sequence
  Description of Artificial Sequence: Synthetic oligonucleotide
  Sense strand starting at position 631 of SEQ ID NO: 2641
aauuaacuuccauggguga

SEQ ID NO: 205037 - RNA, 19 nt, Artificial Sequence
  Description of Artificial Sequence: Synthetic oligonucleotide
  Antisense strand to SEQ ID NO: 205036
ucacccauggaaguuaauu

SEQ ID NO: 205038 - RNA, 19 nt, Artificial Sequence
  Description of Artificial Sequence: Synthetic oligonucleotide
  Sense strand starting at position 632 of SEQ ID NO: 2641
auuaacuuccaugggugaa

SEQ ID NO: 205039 - RNA, 19 nt, Artificial Sequence
  Description of Artificial Sequence: Synthetic oligonucleotide
  Antisense strand to SEQ ID NO: 205038
uucacccauggaaguuaau

SEQ ID NO: 205040 - RNA, 19 nt, Artificial Sequence
  Description of Artificial Sequence: Synthetic oligonucleotide
  Sense strand starting at position 680 of SEQ ID NO: 2641
aaaucugggugacuacauu

SEQ ID NO: 205041 - RNA, 19 nt, Artificial Sequence
  Description of Artificial Sequence: Synthetic oligonucleotide
  Antisense strand to SEQ ID NO: 205040
aauguagucacccagauuu

SEQ ID NO: 205042 - RNA, 19 nt, Artificial Sequence
  Description of Artificial Sequence: Synthetic oligonucleotide
  Sense strand starting at position 829 of SEQ ID NO: 2641
cacuaaccggcuuagagau

SEQ ID NO: 205043 - RNA, 19 nt, Artificial Sequence
  Description of Artificial Sequence: Synthetic oligonucleotide
  Antisense strand to SEQ ID NO: 205042
aucucuaagccgguuagug

SEQ ID NO: 205044 - RNA, 19 nt, Artificial Sequence
  Description of Artificial Sequence: Synthetic oligonucleotide
  Sense strand starting at position 835 of SEQ ID NO: 2641
ccggcuuagagauauauug

SEQ ID NO: 205045 - RNA, 19 nt, Artificial Sequence
  Description of Artificial Sequence: Synthetic oligonucleotide
  Antisense strand to SEQ ID NO: 205044
caauauaucucuaagccgg

SEQ ID NO: 205046 - RNA, 19 nt, Artificial Sequence
  Description of Artificial Sequence: Synthetic oligonucleotide
  Sense strand starting at position 861 of SEQ ID NO: 2641
aaauuaaggcuugagcagu

SEQ ID NO: 205047 - RNA, 19 nt, Artificial Sequence
  Description of Artificial Sequence: Synthetic oligonucleotide
  Antisense strand to SEQ ID NO: 205046
acugcucaagccuuaauuu

SEQ ID NO: 205048 - RNA, 19 nt, Artificial Sequence
  Description of Artificial Sequence: Synthetic oligonucleotide
  Sense strand starting at position 892 of SEQ ID NO: 2641
auauuaaagguguauguga

SEQ ID NO: 205049 - RNA, 19 nt, Artificial Sequence
  Description of Artificial Sequence: Synthetic oligonucleotide
  Antisense strand to SEQ ID NO: 205048
ucacauacaccuuuaauau

SEQ ID NO: 205050 - RNA, 19 nt, Artificial Sequence
  Description of Artificial Sequence: Synthetic oligonucleotide
  Sense strand starting at position 894 of SEQ ID NO: 2641
auuaaagguguaugugaaa

SEQ ID NO: 205051 - RNA, 19 nt, Artificial Sequence
  Description of Artificial Sequence: Synthetic oligonucleotide
  Antisense strand to SEQ ID NO: 205050
uuucacauacaccuuuaau

SEQ ID NO: 205052 - RNA, 19 nt, Artificial Sequence
  Description of Artificial Sequence: Synthetic oligonucleotide
  Sense strand starting at position 911 of SEQ ID NO: 2641
aauggcagucaacgagaaa

SEQ ID NO: 205053 - RNA, 19 nt, Artificial Sequence
  Description of Artificial Sequence: Synthetic oligonucleotide
  Antisense strand to SEQ ID NO: 205052
uuucucguugacugccauu

SEQ ID NO: 205054 - RNA, 19 nt, Artificial Sequence
  Description of Artificial Sequence: Synthetic oligonucleotide
  Sense strand starting at position 912 of SEQ ID NO: 2641
auggcagucaacgagaaau

SEQ ID NO: 205055 - RNA, 19 nt, Artificial Sequence
  Description of Artificial Sequence: Synthetic oligonucleotide
  Antisense strand to SEQ ID NO: 205054
auuucucguugacugccau

SEQ ID NO: 205056 - RNA, 19 nt, Artificial Sequence
  Description of Artificial Sequence: Synthetic oligonucleotide
  Sense strand starting at position 914 of SEQ ID NO: 2641
ggcagucaacgagaaauuc

SEQ ID NO: 205057 - RNA, 19 nt, Artificial Sequence
  Description of Artificial Sequence: Synthetic oligonucleotide
  Antisense strand to SEQ ID NO: 205056
gaauuucucguugacugcc

SEQ ID NO: 205058 - RNA, 19 nt, Artificial Sequence
  Description of Artificial Sequence: Synthetic oligonucleotide
  Sense strand starting at position 978 of SEQ ID NO: 2641
guaccugucagagaaggca

SEQ ID NO: 205059 - RNA, 19 nt, Artificial Sequence
  Description of Artificial Sequence: Synthetic oligonucleotide
  Antisense strand to SEQ ID NO: 205058
ugccuucucugacagguac

SEQ ID NO: 205060 - RNA, 19 nt, Artificial Sequence
  Description of Artificial Sequence: Synthetic oligonucleotide
  Sense strand starting at position 1004 of SEQ ID NO: 2641
caagauguucuggagguuu

SEQ ID NO: 205061 - RNA, 19 nt, Artificial Sequence
  Description of Artificial Sequence: Synthetic oligonucleotide
  Antisense strand to SEQ ID NO: 205060
aaaccuccagaacaucuug

SEQ ID NO: 205062 - RNA, 19 nt, Artificial Sequence
  Description of Artificial Sequence: Synthetic oligonucleotide
  Sense strand starting at position 1006 of SEQ ID NO: 2641
agauguucuggagguuuga

SEQ ID NO: 205063 - RNA, 19 nt, Artificial Sequence
  Description of Artificial Sequence: Synthetic oligonucleotide
  Antisense strand to SEQ ID NO: 205062
ucaaaccuccagaacaucu

SEQ ID NO: 205064 - RNA, 19 nt, Artificial Sequence
  Description of Artificial Sequence: Synthetic oligonucleotide
  Sense strand starting at position 1193 of SEQ ID NO: 2641
accuuagucuagucacaua

SEQ ID NO: 205065 - RNA, 19 nt, Artificial Sequence
  Description of Artificial Sequence: Synthetic oligonucleotide
  Antisense strand to SEQ ID NO: 205064
uaugugacuagacuaaggu

SEQ ID NO: 205066 - RNA, 19 nt, Artificial Sequence
  Description of Artificial Sequence: Synthetic oligonucleotide
  Sense strand starting at position 1238 of SEQ ID NO: 2641
ggauauaaagcuggcaauu

SEQ ID NO: 205067 - RNA, 19 nt, Artificial Sequence
  Description of Artificial Sequence: Synthetic oligonucleotide
  Antisense strand to SEQ ID NO: 205066
aauugccagcuuuauaucc

SEQ ID NO: 205068 - RNA, 19 nt, Artificial Sequence
  Description of Artificial Sequence: Synthetic oligonucleotide
  Sense strand starting at position 1251 of SEQ ID NO: 2641
gcaauuauacccgauacag

SEQ ID NO: 205069 - RNA, 19 nt, Artificial Sequence
  Description of Artificial Sequence: Synthetic oligonucleotide
  Antisense strand to SEQ ID NO: 205068
cuguaucggguauaauugc

SEQ ID NO: 205070 - RNA, 19 nt, Artificial Sequence
  Description of Artificial Sequence: Synthetic oligonucleotide
  Sense strand starting at position 1292 of SEQ ID NO: 2641
gaaucaaauguacgucaaa

SEQ ID NO: 205071 - RNA, 19 nt, Artificial Sequence
  Description of Artificial Sequence: Synthetic oligonucleotide
  Antisense strand to SEQ ID NO: 205070
uuugacguacauuugauuc

SEQ ID NO: 205072 - RNA, 19 nt, Artificial Sequence
  Description of Artificial Sequence: Synthetic oligonucleotide
  Sense strand starting at position 1311 of SEQ ID NO: 2641
augugcauuucucucuaca

SEQ ID NO: 205073 - RNA, 19 nt, Artificial Sequence
  Description of Artificial Sequence: Synthetic oligonucleotide
  Antisense strand to SEQ ID NO: 205072
uguagagagaaaugcacau

SEQ ID NO: 205074 - RNA, 19 nt, Artificial Sequence
  Description of Artificial Sequence: Synthetic oligonucleotide
  Sense strand starting at position 1313 of SEQ ID NO: 2641
gugcauuucucucuacaag

SEQ ID NO: 205075 - RNA, 19 nt, Artificial Sequence
  Description of Artificial Sequence: Synthetic oligonucleotide
  Antisense strand to SEQ ID NO: 205074
cuuguagagagaaaugcac

SEQ ID NO: 205076 - RNA, 19 nt, Artificial Sequence
  Description of Artificial Sequence: Synthetic oligonucleotide
  Sense strand starting at position 1386 of SEQ ID NO: 2641
gugaucacccgucauaaac

SEQ ID NO: 205077 - RNA, 19 nt, Artificial Sequence
  Description of Artificial Sequence: Synthetic oligonucleotide
  Antisense strand to SEQ ID NO: 205076
guuuaugacgggugaucac

SEQ ID NO: 205078 - RNA, 19 nt, Artificial Sequence
  Description of Artificial Sequence: Synthetic oligonucleotide
  Sense strand starting at position 1484 of SEQ ID NO: 2641
gagagauuaucaccauagu

SEQ ID NO: 205079 - RNA, 19 nt, Artificial Sequence
  Description of Artificial Sequence: Synthetic oligonucleotide
  Antisense strand to SEQ ID NO: 205078
acuauggugauaaucucuc

SEQ ID NO: 205080 - RNA, 19 nt, Artificial Sequence
  Description of Artificial Sequence: Synthetic oligonucleotide
  Sense strand starting at position 2333 of SEQ ID NO: 2641
ccgcgucucaccgaauuua

SEQ ID NO: 205081 - RNA, 19 nt, Artificial Sequence
  Description of Artificial Sequence: Synthetic oligonucleotide
  Antisense strand to SEQ ID NO: 205080
uaaauucggugagacgcgg

SEQ ID NO: 205082 - RNA, 19 nt, Artificial Sequence
  Description of Artificial Sequence: Synthetic oligonucleotide
  Sense strand starting at position 3014 of SEQ ID NO: 2641
gggaaauucuguccuccaa

SEQ ID NO: 205083 - RNA, 19 nt, Artificial Sequence
  Description of Artificial Sequence: Synthetic oligonucleotide
  Antisense strand to SEQ ID NO: 205082
uuggaggacagaauuuccc

SEQ ID NO: 205084 - RNA, 19 nt, Artificial Sequence
  Description of Artificial Sequence: Synthetic oligonucleotide
  Sense strand starting at position 3168 of SEQ ID NO: 2641
ugguguggaacccaugaau

SEQ ID NO: 205085 - RNA, 19 nt, Artificial Sequence
  Description of Artificial Sequence: Synthetic oligonucleotide
  Antisense strand to SEQ ID NO: 205084
auucauggguuccacacca

SEQ ID NO: 205086 - RNA, 19 nt, Artificial Sequence
  Description of Artificial Sequence: Synthetic oligonucleotide
  Sense strand starting at position 3194 of SEQ ID NO: 2641
uccaacaaguuaucuguga

SEQ ID NO: 205087 - RNA, 19 nt, Artificial Sequence
  Description of Artificial Sequence: Synthetic oligonucleotide
  Antisense strand to SEQ ID NO: 205086
ucacagauaacuuguugga

SEQ ID NO: 205088 - RNA, 19 nt, Artificial Sequence
  Description of Artificial Sequence: Synthetic oligonucleotide
  Sense strand starting at position 3195 of SEQ ID NO: 2641
ccaacaaguuaucugugau

SEQ ID NO: 205089 - RNA, 19 nt, Artificial Sequence
  Description of Artificial Sequence: Synthetic oligonucleotide
  Antisense strand to SEQ ID NO: 205088
aucacagauaacuuguugg

SEQ ID NO: 205090 - RNA, 19 nt, Artificial Sequence
  Description of Artificial Sequence: Synthetic oligonucleotide
  Sense strand starting at position 3244 of SEQ ID NO: 2641
ucaguuagaggcuauauca

SEQ ID NO: 205091 - RNA, 19 nt, Artificial Sequence
  Description of Artificial Sequence: Synthetic oligonucleotide
  Antisense strand to SEQ ID NO: 205090
ugauauagccucuaacuga

SEQ ID NO: 205092 - RNA, 19 nt, Artificial Sequence
  Description of Artificial Sequence: Synthetic oligonucleotide
  Sense strand starting at position 3251 of SEQ ID NO: 2641
gaggcuauaucaucaggga

SEQ ID NO: 205093 - RNA, 19 nt, Artificial Sequence
  Description of Artificial Sequence: Synthetic oligonucleotide
  Antisense strand to SEQ ID NO: 205092
ucccugaugauauagccuc

SEQ ID NO: 205094 - RNA, 19 nt, Artificial Sequence
  Description of Artificial Sequence: Synthetic oligonucleotide
  Sense strand starting at position 3544 of SEQ ID NO: 2641
gacuuucucagcguucguu

SEQ ID NO: 205095 - RNA, 19 nt, Artificial Sequence
  Description of Artificial Sequence: Synthetic oligonucleotide
  Antisense strand to SEQ ID NO: 205094
aacgaacgcugagaaaguc

SEQ ID NO: 205096 - RNA, 19 nt, Artificial Sequence
  Description of Artificial Sequence: Synthetic oligonucleotide
  Sense strand starting at position 3608 of SEQ ID NO: 2641
gccuccucugagcauugaa

SEQ ID NO: 205097 - RNA, 19 nt, Artificial Sequence
  Description of Artificial Sequence: Synthetic oligonucleotide
  Antisense strand to SEQ ID NO: 205096
uucaaugcucagaggaggc

SEQ ID NO: 205098 - RNA, 19 nt, Artificial Sequence
  Description of Artificial Sequence: Synthetic oligonucleotide
  Sense strand starting at position 3909 of SEQ ID NO: 2641
acugcaucuguuggaggaa

SEQ ID NO: 205099 - RNA, 19 nt, Artificial Sequence
  Description of Artificial Sequence: Synthetic oligonucleotide
  Antisense strand to SEQ ID NO: 205098
uuccuccaacagaugcagu

SEQ ID NO: 205100 - RNA, 19 nt, Artificial Sequence
  Description of Artificial Sequence: Synthetic oligonucleotide
  Sense strand starting at position 3981 of SEQ ID NO: 2641
ggagucugaucucuaagug

SEQ ID NO: 205101 - RNA, 19 nt, Artificial Sequence
  Description of Artificial Sequence: Synthetic oligonucleotide
  Antisense strand to SEQ ID NO: 205100
cacuuagagaucagacucc

SEQ ID NO: 205102 - RNA, 19 nt, Artificial Sequence
  Description of Artificial Sequence: Synthetic oligonucleotide
  Sense strand starting at position 3982 of SEQ ID NO: 2641
gagucugaucucuaagugu

SEQ ID NO: 205103 - RNA, 19 nt, Artificial Sequence
  Description of Artificial Sequence: Synthetic oligonucleotide
  Antisense strand to SEQ ID NO: 205102
acacuuagagaucagacuc

SEQ ID NO: 205104 - RNA, 19 nt, Artificial Sequence
  Description of Artificial Sequence: Synthetic oligonucleotide
  Sense strand starting at position 97 of SEQ ID NO: 2643
uuuggaauuugagagccau

SEQ ID NO: 205105 - RNA, 19 nt, Artificial Sequence
  Description of Artificial Sequence: Synthetic oligonucleotide
  Antisense strand to SEQ ID NO: 205104
auggcucucaaauuccaaa

SEQ ID NO: 205106 - RNA, 19 nt, Artificial Sequence
  Description of Artificial Sequence: Synthetic oligonucleotide
  Sense strand starting at position 105 of SEQ ID NO: 2643
uugagagccauuugcuguu

SEQ ID NO: 205107 - RNA, 19 nt, Artificial Sequence
  Description of Artificial Sequence: Synthetic oligonucleotide
  Antisense strand to SEQ ID NO: 205106
aacagcaaauggcucucaa

SEQ ID NO: 205108 - RNA, 19 nt, Artificial Sequence
  Description of Artificial Sequence: Synthetic oligonucleotide
  Sense strand starting at position 121 of SEQ ID NO: 2643
guuguugcaccagaauucu

SEQ ID NO: 205109 - RNA, 19 nt, Artificial Sequence
  Description of Artificial Sequence: Synthetic oligonucleotide
  Antisense strand to SEQ ID NO: 205108
agaauucuggugcaacaac

SEQ ID NO: 205110 - RNA, 19 nt, Artificial Sequence
  Description of Artificial Sequence: Synthetic oligonucleotide
  Sense strand starting at position 264 of SEQ ID NO: 2643
uaguguugucuguaacucu

SEQ ID NO: 205111 - RNA, 19 nt, Artificial Sequence
  Description of Artificial Sequence: Synthetic oligonucleotide
  Antisense strand to SEQ ID NO: 205110
agaguuacagacaacacua

SEQ ID NO: 205112 - RNA, 19 nt, Artificial Sequence
  Description of Artificial Sequence: Synthetic oligonucleotide
  Sense strand starting at position 294 of SEQ ID NO: 2643
acaguacaauuccugagua

SEQ ID NO: 205113 - RNA, 19 nt, Artificial Sequence
  Description of Artificial Sequence: Synthetic oligonucleotide
  Antisense strand to SEQ ID NO: 205112
uacucaggaauuguacugu

SEQ ID NO: 205114 - RNA, 19 nt, Artificial Sequence
  Description of Artificial Sequence: Synthetic oligonucleotide
  Sense strand starting at position 399 of SEQ ID NO: 2643
cgaggauauugcucaagau

SEQ ID NO: 205115 - RNA, 19 nt, Artificial Sequence
  Description of Artificial Sequence: Synthetic oligonucleotide
  Antisense strand to SEQ ID NO: 205114
aucuugagcaauauccucg

SEQ ID NO: 205116 - RNA, 19 nt, Artificial Sequence
  Description of Artificial Sequence: Synthetic oligonucleotide
  Sense strand starting at position 525 of SEQ ID NO: 2643
ggaaguugauuauuacaau

SEQ ID NO: 205117 - RNA, 19 nt, Artificial Sequence
  Description of Artificial Sequence: Synthetic oligonucleotide
  Antisense strand to SEQ ID NO: 205116
auuguaauaaucaacuucc

SEQ ID NO: 205118 - RNA, 19 nt, Artificial Sequence
  Description of Artificial Sequence: Synthetic oligonucleotide
  Sense strand starting at position 571 of SEQ ID NO: 2643
aguguuguugcacagauua

SEQ ID NO: 205119 - RNA, 19 nt, Artificial Sequence
  Description of Artificial Sequence: Synthetic oligonucleotide
  Antisense strand to SEQ ID NO: 205118
uaaucugugcaacaacacu

SEQ ID NO: 205120 - RNA, 19 nt, Artificial Sequence
  Description of Artificial Sequence: Synthetic oligonucleotide
  Sense strand starting at position 696 of SEQ ID NO: 2643
gugaacuauuuagagccau

SEQ ID NO: 205121 - RNA, 19 nt, Artificial Sequence
  Description of Artificial Sequence: Synthetic oligonucleotide
  Antisense strand to SEQ ID NO: 205120
auggcucuaaauaguucac

SEQ ID NO: 205122 - RNA, 19 nt, Artificial Sequence
  Description of Artificial Sequence: Synthetic oligonucleotide
  Sense strand starting at position 1235 of SEQ ID NO: 2643
auagguuaauaaguggaua

SEQ ID NO: 205123 - RNA, 19 nt, Artificial Sequence
  Description of Artificial Sequence: Synthetic oligonucleotide
  Antisense strand to SEQ ID NO: 205122
uauccacuuauuaaccuau

SEQ ID NO: 205124 - RNA, 19 nt, Artificial Sequence
  Description of Artificial Sequence: Synthetic oligonucleotide
  Sense strand starting at position 1238 of SEQ ID NO: 2643
gguuaauaaguggauagca

SEQ ID NO: 205125 - RNA, 19 nt, Artificial Sequence
  Description of Artificial Sequence: Synthetic oligonucleotide
  Antisense strand to SEQ ID NO: 205124
ugcuauccacuuauuaacc

SEQ ID NO: 205126 - RNA, 19 nt, Artificial Sequence
  Description of Artificial Sequence: Synthetic oligonucleotide
  Sense strand starting at position 1260 of SEQ ID NO: 2643
aucucauugcgacaaauac

SEQ ID NO: 205127 - RNA, 19 nt, Artificial Sequence
  Description of Artificial Sequence: Synthetic oligonucleotide
  Antisense strand to SEQ ID NO: 205126
guauuugucgcaaugagau

SEQ ID NO: 205128 - RNA, 19 nt, Artificial Sequence
  Description of Artificial Sequence: Synthetic oligonucleotide
  Sense strand starting at position 1296 of SEQ ID NO: 2643
acugaacuguagucagcaa

SEQ ID NO: 205129 - RNA, 19 nt, Artificial Sequence
  Description of Artificial Sequence: Synthetic oligonucleotide
  Antisense strand to SEQ ID NO: 205128
uugcugacuacaguucagu

SEQ ID NO: 205130 - RNA, 19 nt, Artificial Sequence
  Description of Artificial Sequence: Synthetic oligonucleotide
  Sense strand starting at position 1338 of SEQ ID NO: 2643
uugaaacaaguuugaguua

SEQ ID NO: 205131 - RNA, 19 nt, Artificial Sequence
  Description of Artificial Sequence: Synthetic oligonucleotide
  Antisense strand to SEQ ID NO: 205130
uaacucaaacuuguuucaa

SEQ ID NO: 205132 - RNA, 19 nt, Artificial Sequence
  Description of Artificial Sequence: Synthetic oligonucleotide
  Sense strand starting at position 1360 of SEQ ID NO: 2643
ugaacuuauccgggucauc

SEQ ID NO: 205133 - RNA, 19 nt, Artificial Sequence
  Description of Artificial Sequence: Synthetic oligonucleotide
  Antisense strand to SEQ ID NO: 205132
gaugacccggauaaguuca

SEQ ID NO: 205134 - RNA, 19 nt, Artificial Sequence
  Description of Artificial Sequence: Synthetic oligonucleotide
  Sense strand starting at position 1365 of SEQ ID NO: 2643
uuauccgggucaucaagaa

SEQ ID NO: 205135 - RNA, 19 nt, Artificial Sequence
  Description of Artificial Sequence: Synthetic oligonucleotide
  Antisense strand to SEQ ID NO: 205134
uucuugaugacccggauaa

SEQ ID NO: 205136 - RNA, 19 nt, Artificial Sequence
  Description of Artificial Sequence: Synthetic oligonucleotide
  Sense strand starting at position 1416 of SEQ ID NO: 2643
ucagcuaaaggucgaaauu

SEQ ID NO: 205137 - RNA, 19 nt, Artificial Sequence
  Description of Artificial Sequence: Synthetic oligonucleotide
  Antisense strand to SEQ ID NO: 205136
aauuucgaccuuuagcuga

SEQ ID NO: 205138 - RNA, 19 nt, Artificial Sequence
  Description of Artificial Sequence: Synthetic oligonucleotide
  Sense strand starting at position 1417 of SEQ ID NO: 2643
cagcuaaaggucgaaauua

SEQ ID NO: 205139 - RNA, 19 nt, Artificial Sequence
  Description of Artificial Sequence: Synthetic oligonucleotide
  Antisense strand to SEQ ID NO: 205138
uaauuucgaccuuuagcug

SEQ ID NO: 205140 - RNA, 19 nt, Artificial Sequence
  Description of Artificial Sequence: Synthetic oligonucleotide
  Sense strand starting at position 1425 of SEQ ID NO: 2643
ggucgaaauuagcccacua

SEQ ID NO: 205141 - RNA, 19 nt, Artificial Sequence
  Description of Artificial Sequence: Synthetic oligonucleotide
  Antisense strand to SEQ ID NO: 205140
uagugggcuaauuucgacc

SEQ ID NO: 205142 - RNA, 19 nt, Artificial Sequence
  Description of Artificial Sequence: Synthetic oligonucleotide
  Sense strand starting at position 1427 of SEQ ID NO: 2643
ucgaaauuagcccacuauc

SEQ ID NO: 205143 - RNA, 19 nt, Artificial Sequence
  Description of Artificial Sequence: Synthetic oligonucleotide
  Antisense strand to SEQ ID NO: 205142
gauagugggcuaauuucga

SEQ ID NO: 205144 - RNA, 19 nt, Artificial Sequence
  Description of Artificial Sequence: Synthetic oligonucleotide
  Sense strand starting at position 1479 of SEQ ID NO: 2643
ugugaaugugaaugauaaa

SEQ ID NO: 205145 - RNA, 19 nt, Artificial Sequence
  Description of Artificial Sequence: Synthetic oligonucleotide
  Antisense strand to SEQ ID NO: 205144
uuuaucauucacauucaca

SEQ ID NO: 205146 - RNA, 19 nt, Artificial Sequence
  Description of Artificial Sequence: Synthetic oligonucleotide
  Sense strand starting at position 1500 of SEQ ID NO: 2643
gagcuaacacaguaaaguu

SEQ ID NO: 205147 - RNA, 19 nt, Artificial Sequence
  Description of Artificial Sequence: Synthetic oligonucleotide
  Antisense strand to SEQ ID NO: 205146
aacuuuacuguguuagcuc

SEQ ID NO: 205148 - RNA, 19 nt, Artificial Sequence
  Description of Artificial Sequence: Synthetic oligonucleotide
  Sense strand starting at position 1647 of SEQ ID NO: 2643
gugguuaacaaacgaagaa

SEQ ID NO: 205149 - RNA, 19 nt, Artificial Sequence
  Description of Artificial Sequence: Synthetic oligonucleotide
  Antisense strand to SEQ ID NO: 205148
uucuucguuuguuaaccac

SEQ ID NO: 205150 - RNA, 19 nt, Artificial Sequence
  Description of Artificial Sequence: Synthetic oligonucleotide
  Sense strand starting at position 1775 of SEQ ID NO: 2643
aacgaagagcugugagaga

SEQ ID NO: 205151 - RNA, 19 nt, Artificial Sequence
  Description of Artificial Sequence: Synthetic oligonucleotide
  Antisense strand to SEQ ID NO: 205150
ucucucacagcucuucguu

SEQ ID NO: 205152 - RNA, 19 nt, Artificial Sequence
  Description of Artificial Sequence: Synthetic oligonucleotide
  Sense strand starting at position 2106 of SEQ ID NO: 2643
cauguugugggagacgauu

SEQ ID NO: 205153 - RNA, 19 nt, Artificial Sequence
  Description of Artificial Sequence: Synthetic oligonucleotide
  Antisense strand to SEQ ID NO: 205152
aaucgucucccacaacaug

SEQ ID NO: 205154 - RNA, 19 nt, Artificial Sequence
  Description of Artificial Sequence: Synthetic oligonucleotide
  Sense strand starting at position 2291 of SEQ ID NO: 2643
auugucugccucuagauga

SEQ ID NO: 205155 - RNA, 19 nt, Artificial Sequence
  Description of Artificial Sequence: Synthetic oligonucleotide
  Antisense strand to SEQ ID NO: 205154
ucaucuagaggcagacaau

SEQ ID NO: 205156 - RNA, 19 nt, Artificial Sequence
  Description of Artificial Sequence: Synthetic oligonucleotide
  Sense strand starting at position 2319 of SEQ ID NO: 2643
agcagcuucccagauuauc

SEQ ID NO: 205157 - RNA, 19 nt, Artificial Sequence
  Description of Artificial Sequence: Synthetic oligonucleotide
  Antisense strand to SEQ ID NO: 205156
gauaaucugggaagcugcu

SEQ ID NO: 205158 - RNA, 19 nt, Artificial Sequence
  Description of Artificial Sequence: Synthetic oligonucleotide
  Sense strand starting at position 2346 of SEQ ID NO: 2643
agaacagguucuuuauuag

SEQ ID NO: 205159 - RNA, 19 nt, Artificial Sequence
  Description of Artificial Sequence: Synthetic oligonucleotide
  Antisense strand to SEQ ID NO: 205158
cuaauaaagaaccuguucu

SEQ ID NO: 205160 - RNA, 19 nt, Artificial Sequence
  Description of Artificial Sequence: Synthetic oligonucleotide
  Sense strand starting at position 2349 of SEQ ID NO: 2643
acagguucuuuauuagauu

SEQ ID NO: 205161 - RNA, 19 nt, Artificial Sequence
  Description of Artificial Sequence: Synthetic oligonucleotide
  Antisense strand to SEQ ID NO: 205160
aaucuaauaaagaaccugu

SEQ ID NO: 205162 - RNA, 19 nt, Artificial Sequence
  Description of Artificial Sequence: Synthetic oligonucleotide
  Sense strand starting at position 2597 of SEQ ID NO: 2643
gaaaguguaguauaagcga

SEQ ID NO: 205163 - RNA, 19 nt, Artificial Sequence
  Description of Artificial Sequence: Synthetic oligonucleotide
  Antisense strand to SEQ ID NO: 205162
ucgcuuauacuacacuuuc

SEQ ID NO: 205164 - RNA, 19 nt, Artificial Sequence
  Description of Artificial Sequence: Synthetic oligonucleotide
  Sense strand starting at position 2605 of SEQ ID NO: 2643
aguauaagcgauugagcau

SEQ ID NO: 205165 - RNA, 19 nt, Artificial Sequence
  Description of Artificial Sequence: Synthetic oligonucleotide
  Antisense strand to SEQ ID NO: 205164
augcucaaucgcuuauacu

SEQ ID NO: 205166 - RNA, 19 nt, Artificial Sequence
  Description of Artificial Sequence: Synthetic oligonucleotide
  Sense strand starting at position 2606 of SEQ ID NO: 2643
guauaagcgauugagcauu

SEQ ID NO: 205167 - RNA, 19 nt, Artificial Sequence
  Description of Artificial Sequence: Synthetic oligonucleotide
  Antisense strand to SEQ ID NO: 205166
aaugcucaaucgcuuauac

SEQ ID NO: 205168 - RNA, 19 nt, Artificial Sequence
  Description of Artificial Sequence: Synthetic oligonucleotide
  Sense strand starting at position 2614 of SEQ ID NO: 2643
gauugagcauugucuuaac

SEQ ID NO: 205169 - RNA, 19 nt, Artificial Sequence
  Description of Artificial Sequence: Synthetic oligonucleotide
  Antisense strand to SEQ ID NO: 205168
guuaagacaaugcucaauc

SEQ ID NO: 205170 - RNA, 19 nt, Artificial Sequence
  Description of Artificial Sequence: Synthetic oligonucleotide
  Sense strand starting at position 2680 of SEQ ID NO: 2643
augaaacaguuguccguau

SEQ ID NO: 205171 - RNA, 19 nt, Artificial Sequence
  Description of Artificial Sequence: Synthetic oligonucleotide
  Antisense strand to SEQ ID NO: 205170
auacggacaacuguuucau

SEQ ID NO: 205172 - RNA, 19 nt, Artificial Sequence
  Description of Artificial Sequence: Synthetic oligonucleotide
  Sense strand starting at position 2681 of SEQ ID NO: 2643
ugaaacaguuguccguaua

SEQ ID NO: 205173 - RNA, 19 nt, Artificial Sequence
  Description of Artificial Sequence: Synthetic oligonucleotide
  Antisense strand to SEQ ID NO: 205172
uauacggacaacuguuuca

SEQ ID NO: 205174 - RNA, 19 nt, Artificial Sequence
  Description of Artificial Sequence: Synthetic oligonucleotide
  Sense strand starting at position 2682 of SEQ ID NO: 2643
gaaacaguuguccguauau

SEQ ID NO: 205175 - RNA, 19 nt, Artificial Sequence
  Description of Artificial Sequence: Synthetic oligonucleotide
  Antisense strand to SEQ ID NO: 205174
auauacggacaacuguuuc

SEQ ID NO: 205176 - RNA, 19 nt, Artificial Sequence
  Description of Artificial Sequence: Synthetic oligonucleotide
  Sense strand starting at position 2684 of SEQ ID NO: 2643
aacaguuguccguauauua

SEQ ID NO: 205177 - RNA, 19 nt, Artificial Sequence
  Description of Artificial Sequence: Synthetic oligonucleotide
  Antisense strand to SEQ ID NO: 205176
uaauauacggacaacuguu

SEQ ID NO: 205178 - RNA, 19 nt, Artificial Sequence
  Description of Artificial Sequence: Synthetic oligonucleotide
  Sense strand starting at position 2728 of SEQ ID NO: 2643
agcaccauguauguaauau

SEQ ID NO: 205179 - RNA, 19 nt, Artificial Sequence
  Description of Artificial Sequence: Synthetic oligonucleotide
  Antisense strand to SEQ ID NO: 205178
auauuacauacauggugcu

SEQ ID NO: 205180 - RNA, 19 nt, Artificial Sequence
  Description of Artificial Sequence: Synthetic oligonucleotide
  Sense strand starting at position 2950 of SEQ ID NO: 2643
ggaauucccuuucuuagca

SEQ ID NO: 205181 - RNA, 19 nt, Artificial Sequence
  Description of Artificial Sequence: Synthetic oligonucleotide
  Antisense strand to SEQ ID NO: 205180
ugcuaagaaagggaauucc

SEQ ID NO: 205182 - RNA, 19 nt, Artificial Sequence
  Description of Artificial Sequence: Synthetic oligonucleotide
  Sense strand starting at position 3059 of SEQ ID NO: 2643
agaagauuauaucccguga

SEQ ID NO: 205183 - RNA, 19 nt, Artificial Sequence
  Description of Artificial Sequence: Synthetic oligonucleotide
  Antisense strand to SEQ ID NO: 205182
ucacgggauauaaucuucu

SEQ ID NO: 205184 - RNA, 19 nt, Artificial Sequence
  Description of Artificial Sequence: Synthetic oligonucleotide
  Sense strand starting at position 267 of SEQ ID NO: 2644
cgccgacgagucugggaaa

SEQ ID NO: 205185 - RNA, 19 nt, Artificial Sequence
  Description of Artificial Sequence: Synthetic oligonucleotide
  Antisense strand to SEQ ID NO: 205184
uuucccagacucgucggcg

SEQ ID NO: 205186 - RNA, 19 nt, Artificial Sequence
  Description of Artificial Sequence: Synthetic oligonucleotide
  Sense strand starting at position 450 of SEQ ID NO: 2644
ggccaaggaguguaguuua

SEQ ID NO: 205187 - RNA, 19 nt, Artificial Sequence
  Description of Artificial Sequence: Synthetic oligonucleotide
  Antisense strand to SEQ ID NO: 205186
uaaacuacacuccuuggcc

SEQ ID NO: 205188 - RNA, 19 nt, Artificial Sequence
  Description of Artificial Sequence: Synthetic oligonucleotide
  Sense strand starting at position 453 of SEQ ID NO: 2644
caaggaguguaguuuaggu

SEQ ID NO: 205189 - RNA, 19 nt, Artificial Sequence
  Description of Artificial Sequence: Synthetic oligonucleotide
  Antisense strand to SEQ ID NO: 205188
accuaaacuacacuccuug

SEQ ID NO: 205190 - RNA, 19 nt, Artificial Sequence
  Description of Artificial Sequence: Synthetic oligonucleotide
  Sense strand starting at position 455 of SEQ ID NO: 2644
aggaguguaguuuagguau

SEQ ID NO: 205191 - RNA, 19 nt, Artificial Sequence
  Description of Artificial Sequence: Synthetic oligonucleotide
  Antisense strand to SEQ ID NO: 205190
auaccuaaacuacacuccu

SEQ ID NO: 205192 - RNA, 19 nt, Artificial Sequence
  Description of Artificial Sequence: Synthetic oligonucleotide
  Sense strand starting at position 621 of SEQ ID NO: 2644
gcugguucccugggagguu

SEQ ID NO: 205193 - RNA, 19 nt, Artificial Sequence
  Description of Artificial Sequence: Synthetic oligonucleotide
  Antisense strand to SEQ ID NO: 205192
aaccucccagggaaccagc

SEQ ID NO: 205194 - RNA, 19 nt, Artificial Sequence
  Description of Artificial Sequence: Synthetic oligonucleotide
  Sense strand starting at position 747 of SEQ ID NO: 2644
ggaugugguaggugaagaa

SEQ ID NO: 205195 - RNA, 19 nt, Artificial Sequence
  Description of Artificial Sequence: Synthetic oligonucleotide
  Antisense strand to SEQ ID NO: 205194
uucuucaccuaccacaucc

SEQ ID NO: 205196 - RNA, 19 nt, Artificial Sequence
  Description of Artificial Sequence: Synthetic oligonucleotide
  Sense strand starting at position 750 of SEQ ID NO: 2644
ugugguaggugaagaagua

SEQ ID NO: 205197 - RNA, 19 nt, Artificial Sequence
  Description of Artificial Sequence: Synthetic oligonucleotide
  Antisense strand to SEQ ID NO: 205196
uacuucuucaccuaccaca

SEQ ID NO: 205198 - RNA, 19 nt, Artificial Sequence
  Description of Artificial Sequence: Synthetic oligonucleotide
  Sense strand starting at position 806 of SEQ ID NO: 2644
gggucauagugauugccga

SEQ ID NO: 205199 - RNA, 19 nt, Artificial Sequence
  Description of Artificial Sequence: Synthetic oligonucleotide
  Antisense strand to SEQ ID NO: 205198
ucggcaaucacuaugaccc

SEQ ID NO: 205200 - RNA, 19 nt, Artificial Sequence
  Description of Artificial Sequence: Synthetic oligonucleotide
  Sense strand starting at position 1263 of SEQ ID NO: 2644
caguguaagggucgcagau

SEQ ID NO: 205201 - RNA, 19 nt, Artificial Sequence
  Description of Artificial Sequence: Synthetic oligonucleotide
  Antisense strand to SEQ ID NO: 205200
aucugcgacccuuacacug

SEQ ID NO: 205202 - RNA, 19 nt, Artificial Sequence
  Description of Artificial Sequence: Synthetic oligonucleotide
  Sense strand starting at position 2339 of SEQ ID NO: 2644
gaaggaguuucugaaagac

SEQ ID NO: 205203 - RNA, 19 nt, Artificial Sequence
  Description of Artificial Sequence: Synthetic oligonucleotide
  Antisense strand to SEQ ID NO: 205202
gucuuucagaaacuccuuc

SEQ ID NO: 205204 - RNA, 19 nt, Artificial Sequence
  Description of Artificial Sequence: Synthetic oligonucleotide
  Sense strand starting at position 2396 of SEQ ID NO: 2644
ucuggaagaucuuucgcaa

SEQ ID NO: 205205 - RNA, 19 nt, Artificial Sequence
  Description of Artificial Sequence: Synthetic oligonucleotide
  Antisense strand to SEQ ID NO: 205204
uugcgaaagaucuuccaga

SEQ ID NO: 205206 - RNA, 19 nt, Artificial Sequence
  Description of Artificial Sequence: Synthetic oligonucleotide
  Sense strand starting at position 2399 of SEQ ID NO: 2644
ggaagaucuuucgcaaacc

SEQ ID NO: 205207 - RNA, 19 nt, Artificial Sequence
  Description of Artificial Sequence: Synthetic oligonucleotide
  Antisense strand to SEQ ID NO: 205206
gguuugcgaaagaucuucc

SEQ ID NO: 205208 - RNA, 19 nt, Artificial Sequence
  Description of Artificial Sequence: Synthetic oligonucleotide
  Sense strand starting at position 2821 of SEQ ID NO: 2644
aaggaauauucgccucaga

SEQ ID NO: 205209 - RNA, 19 nt, Artificial Sequence
  Description of Artificial Sequence: Synthetic oligonucleotide
  Antisense strand to SEQ ID NO: 205208
ucugaggcgaauauuccuu

SEQ ID NO: 205210 - RNA, 19 nt, Artificial Sequence
  Description of Artificial Sequence: Synthetic oligonucleotide
  Sense strand starting at position 2915 of SEQ ID NO: 2644
ggcacuuggcagugaucau

SEQ ID NO: 205211 - RNA, 19 nt, Artificial Sequence
  Description of Artificial Sequence: Synthetic oligonucleotide
  Antisense strand to SEQ ID NO: 205210
augaucacugccaagugcc

SEQ ID NO: 205212 - RNA, 19 nt, Artificial Sequence
  Description of Artificial Sequence: Synthetic oligonucleotide
  Sense strand starting at position 2916 of SEQ ID NO: 2644
gcacuuggcagugaucaug

SEQ ID NO: 205213 - RNA, 19 nt, Artificial Sequence
  Description of Artificial Sequence: Synthetic oligonucleotide
  Antisense strand to SEQ ID NO: 205212
caugaucacugccaagugc

SEQ ID NO: 205214 - RNA, 19 nt, Artificial Sequence
  Description of Artificial Sequence: Synthetic oligonucleotide
  Sense strand starting at position 2984 of SEQ ID NO: 2644
ggcacauucccuuggacau

SEQ ID NO: 205215 - RNA, 19 nt, Artificial Sequence
  Description of Artificial Sequence: Synthetic oligonucleotide
  Antisense strand to SEQ ID NO: 205214
auguccaagggaaugugcc

SEQ ID NO: 205216 - RNA, 19 nt, Artificial Sequence
  Description of Artificial Sequence: Synthetic oligonucleotide
  Sense strand starting at position 3019 of SEQ ID NO: 2644
cugagauggguuuaguuau

SEQ ID NO: 205217 - RNA, 19 nt, Artificial Sequence
  Description of Artificial Sequence: Synthetic oligonucleotide
  Antisense strand to SEQ ID NO: 205216
auaacuaaacccaucucag

SEQ ID NO: 205218 - RNA, 19 nt, Artificial Sequence
  Description of Artificial Sequence: Synthetic oligonucleotide
  Sense strand starting at position 3072 of SEQ ID NO: 2644
ugagccagucuugaauaaa

SEQ ID NO: 205219 - RNA, 19 nt, Artificial Sequence
  Description of Artificial Sequence: Synthetic oligonucleotide
  Antisense strand to SEQ ID NO: 205218
uuuauucaagacuggcuca

SEQ ID NO: 205220 - RNA, 19 nt, Artificial Sequence
  Description of Artificial Sequence: Synthetic oligonucleotide
  Sense strand starting at position 3075 of SEQ ID NO: 2644
gccagucuugaauaaacca

SEQ ID NO: 205221 - RNA, 19 nt, Artificial Sequence
  Description of Artificial Sequence: Synthetic oligonucleotide
  Antisense strand to SEQ ID NO: 205220
ugguuuauucaagacuggc

SEQ ID NO: 205222 - RNA, 19 nt, Artificial Sequence
  Description of Artificial Sequence: Synthetic oligonucleotide
  Sense strand starting at position 3114 of SEQ ID NO: 2644
auagucuaucuccaaugua

SEQ ID NO: 205223 - RNA, 19 nt, Artificial Sequence
  Description of Artificial Sequence: Synthetic oligonucleotide
  Antisense strand to SEQ ID NO: 205222
uacauuggagauagacuau

SEQ ID NO: 205224 - RNA, 19 nt, Artificial Sequence
  Description of Artificial Sequence: Synthetic oligonucleotide
  Sense strand starting at position 3117 of SEQ ID NO: 2644
gucuaucuccaauguagca

SEQ ID NO: 205225 - RNA, 19 nt, Artificial Sequence
  Description of Artificial Sequence: Synthetic oligonucleotide
  Antisense strand to SEQ ID NO: 205224
ugcuacauuggagauagac

SEQ ID NO: 205226 - RNA, 19 nt, Artificial Sequence
  Description of Artificial Sequence: Synthetic oligonucleotide
  Sense strand starting at position 3175 of SEQ ID NO: 2644
agagacuuccagcggagaa

SEQ ID NO: 205227 - RNA, 19 nt, Artificial Sequence
  Description of Artificial Sequence: Synthetic oligonucleotide
  Antisense strand to SEQ ID NO: 205226
uucuccgcuggaagucucu

SEQ ID NO: 205228 - RNA, 19 nt, Artificial Sequence
  Description of Artificial Sequence: Synthetic oligonucleotide
  Sense strand starting at position 3176 of SEQ ID NO: 2644
gagacuuccagcggagaaa

SEQ ID NO: 205229 - RNA, 19 nt, Artificial Sequence
  Description of Artificial Sequence: Synthetic oligonucleotide
  Antisense strand to SEQ ID NO: 205228
uuucuccgcuggaagucuc

SEQ ID NO: 205230 - RNA, 19 nt, Artificial Sequence
  Description of Artificial Sequence: Synthetic oligonucleotide
  Sense strand starting at position 3221 of SEQ ID NO: 2644
cugaguagcugugugauuu

SEQ ID NO: 205231 - RNA, 19 nt, Artificial Sequence
  Description of Artificial Sequence: Synthetic oligonucleotide
  Antisense strand to SEQ ID NO: 205230
aaaucacacagcuacucag

SEQ ID NO: 205232 - RNA, 19 nt, Artificial Sequence
  Description of Artificial Sequence: Synthetic oligonucleotide
  Sense strand starting at position 3248 of SEQ ID NO: 2644
gguuccugucccugagacu

SEQ ID NO: 205233 - RNA, 19 nt, Artificial Sequence
  Description of Artificial Sequence: Synthetic oligonucleotide
  Antisense strand to SEQ ID NO: 205232
agucucagggacaggaacc

SEQ ID NO: 205234 - RNA, 19 nt, Artificial Sequence
  Description of Artificial Sequence: Synthetic oligonucleotide
  Sense strand starting at position 3409 of SEQ ID NO: 2644
aggcuauugcuuugaagcu

SEQ ID NO: 205235 - RNA, 19 nt, Artificial Sequence
  Description of Artificial Sequence: Synthetic oligonucleotide
  Antisense strand to SEQ ID NO: 205234
agcuucaaagcaauagccu

SEQ ID NO: 205236 - RNA, 19 nt, Artificial Sequence
  Description of Artificial Sequence: Synthetic oligonucleotide
  Sense strand starting at position 3448 of SEQ ID NO: 2644
uagguucuuacggguuaau

SEQ ID NO: 205237 - RNA, 19 nt, Artificial Sequence
  Description of Artificial Sequence: Synthetic oligonucleotide
  Antisense strand to SEQ ID NO: 205236
auuaacccguaagaaccua

SEQ ID NO: 205238 - RNA, 19 nt, Artificial Sequence
  Description of Artificial Sequence: Synthetic oligonucleotide
  Sense strand starting at position 3451 of SEQ ID NO: 2644
guucuuacggguuaauuaa

SEQ ID NO: 205239 - RNA, 19 nt, Artificial Sequence
  Description of Artificial Sequence: Synthetic oligonucleotide
  Antisense strand to SEQ ID NO: 205238
uuaauuaacccguaagaac

SEQ ID NO: 205240 - RNA, 19 nt, Artificial Sequence
  Description of Artificial Sequence: Synthetic oligonucleotide
  Sense strand starting at position 3486 of SEQ ID NO: 2644
cugaucacccugggucauu

SEQ ID NO: 205241 - RNA, 19 nt, Artificial Sequence
  Description of Artificial Sequence: Synthetic oligonucleotide
  Antisense strand to SEQ ID NO: 205240
aaugacccagggugaucag

SEQ ID NO: 205242 - RNA, 19 nt, Artificial Sequence
  Description of Artificial Sequence: Synthetic oligonucleotide
  Sense strand starting at position 3531 of SEQ ID NO: 2644
gccuguucucuccacauau

SEQ ID NO: 205243 - RNA, 19 nt, Artificial Sequence
  Description of Artificial Sequence: Synthetic oligonucleotide
  Antisense strand to SEQ ID NO: 205242
auauguggagagaacaggc

SEQ ID NO: 205244 - RNA, 19 nt, Artificial Sequence
  Description of Artificial Sequence: Synthetic oligonucleotide
  Sense strand starting at position 3543 of SEQ ID NO: 2644
cacauauauuuguggaaag

SEQ ID NO: 205245 - RNA, 19 nt, Artificial Sequence
  Description of Artificial Sequence: Synthetic oligonucleotide
  Antisense strand to SEQ ID NO: 205244
cuuuccacaaauauaugug

SEQ ID NO: 205246 - RNA, 19 nt, Artificial Sequence
  Description of Artificial Sequence: Synthetic oligonucleotide
  Sense strand starting at position 3673 of SEQ ID NO: 2644
cauguuacuguggauuagu

SEQ ID NO: 205247 - RNA, 19 nt, Artificial Sequence
  Description of Artificial Sequence: Synthetic oligonucleotide
  Antisense strand to SEQ ID NO: 205246
acuaauccacaguaacaug

SEQ ID NO: 205248 - RNA, 19 nt, Artificial Sequence
  Description of Artificial Sequence: Synthetic oligonucleotide
  Sense strand starting at position 3676 of SEQ ID NO: 2644
guuacuguggauuagugau

SEQ ID NO: 205249 - RNA, 19 nt, Artificial Sequence
  Description of Artificial Sequence: Synthetic oligonucleotide
  Antisense strand to SEQ ID NO: 205248
aucacuaauccacaguaac

SEQ ID NO: 205250 - RNA, 19 nt, Artificial Sequence
  Description of Artificial Sequence: Synthetic oligonucleotide
  Sense strand starting at position 3845 of SEQ ID NO: 2644
gcuacuucuuggccacagu

SEQ ID NO: 205251 - RNA, 19 nt, Artificial Sequence
  Description of Artificial Sequence: Synthetic oligonucleotide
  Antisense strand to SEQ ID NO: 205250
acuguggccaagaaguagc

SEQ ID NO: 205252 - RNA, 19 nt, Artificial Sequence
  Description of Artificial Sequence: Synthetic oligonucleotide
  Sense strand starting at position 3884 of SEQ ID NO: 2644
uugggagucuuucuccacu

SEQ ID NO: 205253 - RNA, 19 nt, Artificial Sequence
  Description of Artificial Sequence: Synthetic oligonucleotide
  Antisense strand to SEQ ID NO: 205252
aguggagaaagacucccaa

SEQ ID NO: 205254 - RNA, 19 nt, Artificial Sequence
  Description of Artificial Sequence: Synthetic oligonucleotide
  Sense strand starting at position 3886 of SEQ ID NO: 2644
gggagucuuucuccacucu

SEQ ID NO: 205255 - RNA, 19 nt, Artificial Sequence
  Description of Artificial Sequence: Synthetic oligonucleotide
  Antisense strand to SEQ ID NO: 205254
agaguggagaaagacuccc

SEQ ID NO: 205256 - RNA, 19 nt, Artificial Sequence
  Description of Artificial Sequence: Synthetic oligonucleotide
  Sense strand starting at position 3907 of SEQ ID NO: 2644
gccucagagucaucccaag

SEQ ID NO: 205257 - RNA, 19 nt, Artificial Sequence
  Description of Artificial Sequence: Synthetic oligonucleotide
  Antisense strand to SEQ ID NO: 205256
cuugggaugacucugaggc

SEQ ID NO: 205258 - RNA, 19 nt, Artificial Sequence
  Description of Artificial Sequence: Synthetic oligonucleotide
  Sense strand starting at position 3956 of SEQ ID NO: 2644
cuuccaauccugggucuga

SEQ ID NO: 205259 - RNA, 19 nt, Artificial Sequence
  Description of Artificial Sequence: Synthetic oligonucleotide
  Antisense strand to SEQ ID NO: 205258
ucagacccaggauuggaag

SEQ ID NO: 205260 - RNA, 19 nt, Artificial Sequence
  Description of Artificial Sequence: Synthetic oligonucleotide
  Sense strand starting at position 3960 of SEQ ID NO: 2644
caauccugggucugagacu

SEQ ID NO: 205261 - RNA, 19 nt, Artificial Sequence
  Description of Artificial Sequence: Synthetic oligonucleotide
  Antisense strand to SEQ ID NO: 205260
agucucagacccaggauug

SEQ ID NO: 205262 - RNA, 19 nt, Artificial Sequence
  Description of Artificial Sequence: Synthetic oligonucleotide
  Sense strand starting at position 3974 of SEQ ID NO: 2644
agacuuccugucuguguga

SEQ ID NO: 205263 - RNA, 19 nt, Artificial Sequence
  Description of Artificial Sequence: Synthetic oligonucleotide
  Antisense strand to SEQ ID NO: 205262
ucacacagacaggaagucu

SEQ ID NO: 205264 - RNA, 19 nt, Artificial Sequence
  Description of Artificial Sequence: Synthetic oligonucleotide
  Sense strand starting at position 678 of SEQ ID NO: 2645
agucaacaguucuugauag

SEQ ID NO: 205265 - RNA, 19 nt, Artificial Sequence
  Description of Artificial Sequence: Synthetic oligonucleotide
  Antisense strand to SEQ ID NO: 205264
cuaucaagaacuguugacu

SEQ ID NO: 205266 - RNA, 19 nt, Artificial Sequence
  Description of Artificial Sequence: Synthetic oligonucleotide
  Sense strand starting at position 1430 of SEQ ID NO: 2645
cuaugucaucugcaggaaa

SEQ ID NO: 205267 - RNA, 19 nt, Artificial Sequence
  Description of Artificial Sequence: Synthetic oligonucleotide
  Antisense strand to SEQ ID NO: 205266
uuuccugcagaugacauag

SEQ ID NO: 205268 - RNA, 19 nt, Artificial Sequence
  Description of Artificial Sequence: Synthetic oligonucleotide
  Sense strand starting at position 1473 of SEQ ID NO: 2645
ccagaagcucuugaguuau

SEQ ID NO: 205269 - RNA, 19 nt, Artificial Sequence
  Description of Artificial Sequence: Synthetic oligonucleotide
  Antisense strand to SEQ ID NO: 205268
auaacucaagagcuucugg

SEQ ID NO: 205270 - RNA, 19 nt, Artificial Sequence
  Description of Artificial Sequence: Synthetic oligonucleotide
  Sense strand starting at position 1484 of SEQ ID NO: 2645
ugaguuauuuaagaaggga

SEQ ID NO: 205271 - RNA, 19 nt, Artificial Sequence
  Description of Artificial Sequence: Synthetic oligonucleotide
  Antisense strand to SEQ ID NO: 205270
ucccuucuuaaauaacuca

SEQ ID NO: 205272 - RNA, 19 nt, Artificial Sequence
  Description of Artificial Sequence: Synthetic oligonucleotide
  Sense strand starting at position 1498 of SEQ ID NO: 2645
agggacaugguagguauua

SEQ ID NO: 205273 - RNA, 19 nt, Artificial Sequence
  Description of Artificial Sequence: Synthetic oligonucleotide
  Antisense strand to SEQ ID NO: 205272
uaauaccuaccaugucccu

SEQ ID NO: 205274 - RNA, 19 nt, Artificial Sequence
  Description of Artificial Sequence: Synthetic oligonucleotide
  Sense strand starting at position 1499 of SEQ ID NO: 2645
gggacaugguagguauuaa

SEQ ID NO: 205275 - RNA, 19 nt, Artificial Sequence
  Description of Artificial Sequence: Synthetic oligonucleotide
  Antisense strand to SEQ ID NO: 205274
uuaauaccuaccauguccc

SEQ ID NO: 205276 - RNA, 19 nt, Artificial Sequence
  Description of Artificial Sequence: Synthetic oligonucleotide
  Sense strand starting at position 1605 of SEQ ID NO: 2645
gcucauuugucacuuuaag

SEQ ID NO: 205277 - RNA, 19 nt, Artificial Sequence
  Description of Artificial Sequence: Synthetic oligonucleotide
  Antisense strand to SEQ ID NO: 205276
cuuaaagugacaaaugagc

SEQ ID NO: 205278 - RNA, 19 nt, Artificial Sequence
  Description of Artificial Sequence: Synthetic oligonucleotide
  Sense strand starting at position 1648 of SEQ ID NO: 2645
gcauguggagaaggaauau

SEQ ID NO: 205279 - RNA, 19 nt, Artificial Sequence
  Description of Artificial Sequence: Synthetic oligonucleotide
  Antisense strand to SEQ ID NO: 205278
auauuccuucuccacaugc

SEQ ID NO: 205280 - RNA, 19 nt, Artificial Sequence
  Description of Artificial Sequence: Synthetic oligonucleotide
  Sense strand starting at position 2052 of SEQ ID NO: 2645
cagccucaggcagagauua

SEQ ID NO: 205281 - RNA, 19 nt, Artificial Sequence
  Description of Artificial Sequence: Synthetic oligonucleotide
  Antisense strand to SEQ ID NO: 205280
uaaucucugccugaggcug

SEQ ID NO: 205282 - RNA, 19 nt, Artificial Sequence
  Description of Artificial Sequence: Synthetic oligonucleotide
  Sense strand starting at position 2054 of SEQ ID NO: 2645
gccucaggcagagauuaag

SEQ ID NO: 205283 - RNA, 19 nt, Artificial Sequence
  Description of Artificial Sequence: Synthetic oligonucleotide
  Antisense strand to SEQ ID NO: 205282
cuuaaucucugccugaggc

SEQ ID NO: 205284 - RNA, 19 nt, Artificial Sequence
  Description of Artificial Sequence: Synthetic oligonucleotide
  Sense strand starting at position 2069 of SEQ ID NO: 2645
uaagaaaugagucguggaa

SEQ ID NO: 205285 - RNA, 19 nt, Artificial Sequence
  Description of Artificial Sequence: Synthetic oligonucleotide
  Antisense strand to SEQ ID NO: 205284
uuccacgacucauuucuua

SEQ ID NO: 205286 - RNA, 19 nt, Artificial Sequence
  Description of Artificial Sequence: Synthetic oligonucleotide
  Sense strand starting at position 2922 of SEQ ID NO: 2645
ggagacuguucaguuuaga

SEQ ID NO: 205287 - RNA, 19 nt, Artificial Sequence
  Description of Artificial Sequence: Synthetic oligonucleotide
  Antisense strand to SEQ ID NO: 205286
ucuaaacugaacagucucc

SEQ ID NO: 205288 - RNA, 19 nt, Artificial Sequence
  Description of Artificial Sequence: Synthetic oligonucleotide
  Sense strand starting at position 3008 of SEQ ID NO: 2645
cccgaucgcucauuucuga

SEQ ID NO: 205289 - RNA, 19 nt, Artificial Sequence
  Description of Artificial Sequence: Synthetic oligonucleotide
  Antisense strand to SEQ ID NO: 205288
ucagaaaugagcgaucggg

SEQ ID NO: 205290 - RNA, 19 nt, Artificial Sequence
  Description of Artificial Sequence: Synthetic oligonucleotide
  Sense strand starting at position 3015 of SEQ ID NO: 2645
gcucauuucugagccucuu

SEQ ID NO: 205291 - RNA, 19 nt, Artificial Sequence
  Description of Artificial Sequence: Synthetic oligonucleotide
  Antisense strand to SEQ ID NO: 205290
aagaggcucagaaaugagc

SEQ ID NO: 205292 - RNA, 19 nt, Artificial Sequence
  Description of Artificial Sequence: Synthetic oligonucleotide
  Sense strand starting at position 3166 of SEQ ID NO: 2645
auuggauaacuaggugauc

SEQ ID NO: 205293 - RNA, 19 nt, Artificial Sequence
  Description of Artificial Sequence: Synthetic oligonucleotide
  Antisense strand to SEQ ID NO: 205292
gaucaccuaguuauccaau

SEQ ID NO: 205294 - RNA, 19 nt, Artificial Sequence
  Description of Artificial Sequence: Synthetic oligonucleotide
  Sense strand starting at position 3167 of SEQ ID NO: 2645
uuggauaacuaggugauca

SEQ ID NO: 205295 - RNA, 19 nt, Artificial Sequence
  Description of Artificial Sequence: Synthetic oligonucleotide
  Antisense strand to SEQ ID NO: 205294
ugaucaccuaguuauccaa

SEQ ID NO: 205296 - RNA, 19 nt, Artificial Sequence
  Description of Artificial Sequence: Synthetic oligonucleotide
  Sense strand starting at position 3168 of SEQ ID NO: 2645
uggauaacuaggugaucau

SEQ ID NO: 205297 - RNA, 19 nt, Artificial Sequence
  Description of Artificial Sequence: Synthetic oligonucleotide
  Antisense strand to SEQ ID NO: 205296
augaucaccuaguuaucca

SEQ ID NO: 205298 - RNA, 19 nt, Artificial Sequence
  Description of Artificial Sequence: Synthetic oligonucleotide
  Sense strand starting at position 3242 of SEQ ID NO: 2645
cgcagcuucgggaaaguuu

SEQ ID NO: 205299 - RNA, 19 nt, Artificial Sequence
  Description of Artificial Sequence: Synthetic oligonucleotide
  Antisense strand to SEQ ID NO: 205298
aaacuuucccgaagcugcg

SEQ ID NO: 205300 - RNA, 19 nt, Artificial Sequence
  Description of Artificial Sequence: Synthetic oligonucleotide
  Sense strand starting at position 3249 of SEQ ID NO: 2645
ucgggaaaguuugcauaga

SEQ ID NO: 205301 - RNA, 19 nt, Artificial Sequence
  Description of Artificial Sequence: Synthetic oligonucleotide
  Antisense strand to SEQ ID NO: 205300
ucuaugcaaacuuucccga

SEQ ID NO: 205302 - RNA, 19 nt, Artificial Sequence
  Description of Artificial Sequence: Synthetic oligonucleotide
  Sense strand starting at position 3306 of SEQ ID NO: 2645
ccuuauauccuaggagauu

SEQ ID NO: 205303 - RNA, 19 nt, Artificial Sequence
  Description of Artificial Sequence: Synthetic oligonucleotide
  Antisense strand to SEQ ID NO: 205302
aaucuccuaggauauaagg

SEQ ID NO: 205304 - RNA, 19 nt, Artificial Sequence
  Description of Artificial Sequence: Synthetic oligonucleotide
  Sense strand starting at position 3307 of SEQ ID NO: 2645
cuuauauccuaggagauuu

SEQ ID NO: 205305 - RNA, 19 nt, Artificial Sequence
  Description of Artificial Sequence: Synthetic oligonucleotide
  Antisense strand to SEQ ID NO: 205304
aaaucuccuaggauauaag

SEQ ID NO: 205306 - RNA, 19 nt, Artificial Sequence
  Description of Artificial Sequence: Synthetic oligonucleotide
  Sense strand starting at position 3380 of SEQ ID NO: 2645
cguguaaggacauaaguag

SEQ ID NO: 205307 - RNA, 19 nt, Artificial Sequence
  Description of Artificial Sequence: Synthetic oligonucleotide
  Antisense strand to SEQ ID NO: 205306
cuacuuauguccuuacacg

SEQ ID NO: 205308 - RNA, 19 nt, Artificial Sequence
  Description of Artificial Sequence: Synthetic oligonucleotide
  Sense strand starting at position 3398 of SEQ ID NO: 2645
gaauaacaauagguuugua

SEQ ID NO: 205309 - RNA, 19 nt, Artificial Sequence
  Description of Artificial Sequence: Synthetic oligonucleotide
  Antisense strand to SEQ ID NO: 205308
uacaaaccuauuguuauuc

SEQ ID NO: 205310 - RNA, 19 nt, Artificial Sequence
  Description of Artificial Sequence: Synthetic oligonucleotide
  Sense strand starting at position 3401 of SEQ ID NO: 2645
uaacaauagguuuguaagu

SEQ ID NO: 205311 - RNA, 19 nt, Artificial Sequence
  Description of Artificial Sequence: Synthetic oligonucleotide
  Antisense strand to SEQ ID NO: 205310
acuuacaaaccuauuguua

SEQ ID NO: 205312 - RNA, 19 nt, Artificial Sequence
  Description of Artificial Sequence: Synthetic oligonucleotide
  Sense strand starting at position 3402 of SEQ ID NO: 2645
aacaauagguuuguaagua

SEQ ID NO: 205313 - RNA, 19 nt, Artificial Sequence
  Description of Artificial Sequence: Synthetic oligonucleotide
  Antisense strand to SEQ ID NO: 205312
uacuuacaaaccuauuguu

SEQ ID NO: 205314 - RNA, 19 nt, Artificial Sequence
  Description of Artificial Sequence: Synthetic oligonucleotide
  Sense strand starting at position 3406 of SEQ ID NO: 2645
auagguuuguaaguagaaa

SEQ ID NO: 205315 - RNA, 19 nt, Artificial Sequence
  Description of Artificial Sequence: Synthetic oligonucleotide
  Antisense strand to SEQ ID NO: 205314
uuucuacuuacaaaccuau

SEQ ID NO: 205316 - RNA, 19 nt, Artificial Sequence
  Description of Artificial Sequence: Synthetic oligonucleotide
  Sense strand starting at position 3430 of SEQ ID NO: 2645
agguuaguuauagaaguag

SEQ ID NO: 205317 - RNA, 19 nt, Artificial Sequence
  Description of Artificial Sequence: Synthetic oligonucleotide
  Antisense strand to SEQ ID NO: 205316
cuacuucuauaacuaaccu

SEQ ID NO: 205318 - RNA, 19 nt, Artificial Sequence
  Description of Artificial Sequence: Synthetic oligonucleotide
  Sense strand starting at position 3452 of SEQ ID NO: 2645
gucgcauucgaaucugcuu

SEQ ID NO: 205319 - RNA, 19 nt, Artificial Sequence
  Description of Artificial Sequence: Synthetic oligonucleotide
  Antisense strand to SEQ ID NO: 205318
aagcagauucgaaugcgac

SEQ ID NO: 205320 - RNA, 19 nt, Artificial Sequence
  Description of Artificial Sequence: Synthetic oligonucleotide
  Sense strand starting at position 3480 of SEQ ID NO: 2645
gacagauucuuguuuguau

SEQ ID NO: 205321 - RNA, 19 nt, Artificial Sequence
  Description of Artificial Sequence: Synthetic oligonucleotide
  Antisense strand to SEQ ID NO: 205320
auacaaacaagaaucuguc

SEQ ID NO: 205322 - RNA, 19 nt, Artificial Sequence
  Description of Artificial Sequence: Synthetic oligonucleotide
  Sense strand starting at position 3526 of SEQ ID NO: 2645
cagucuuaauuagugggaa

SEQ ID NO: 205323 - RNA, 19 nt, Artificial Sequence
  Description of Artificial Sequence: Synthetic oligonucleotide
  Antisense strand to SEQ ID NO: 205322
uucccacuaauuaagacug

SEQ ID NO: 205324 - RNA, 19 nt, Artificial Sequence
  Description of Artificial Sequence: Synthetic oligonucleotide
  Sense strand starting at position 3528 of SEQ ID NO: 2645
gucuuaauuagugggaaau

SEQ ID NO: 205325 - RNA, 19 nt, Artificial Sequence
  Description of Artificial Sequence: Synthetic oligonucleotide
  Antisense strand to SEQ ID NO: 205324
auuucccacuaauuaagac

SEQ ID NO: 205326 - RNA, 19 nt, Artificial Sequence
  Description of Artificial Sequence: Synthetic oligonucleotide
  Sense strand starting at position 3529 of SEQ ID NO: 2645
ucuuaauuagugggaaaua

SEQ ID NO: 205327 - RNA, 19 nt, Artificial Sequence
  Description of Artificial Sequence: Synthetic oligonucleotide
  Antisense strand to SEQ ID NO: 205326
uauuucccacuaauuaaga

SEQ ID NO: 205328 - RNA, 19 nt, Artificial Sequence
  Description of Artificial Sequence: Synthetic oligonucleotide
  Sense strand starting at position 3685 of SEQ ID NO: 2645
uguagagauucucugggag

SEQ ID NO: 205329 - RNA, 19 nt, Artificial Sequence
  Description of Artificial Sequence: Synthetic oligonucleotide
  Antisense strand to SEQ ID NO: 205328
cucccagagaaucucuaca

SEQ ID NO: 205330 - RNA, 19 nt, Artificial Sequence
  Description of Artificial Sequence: Synthetic oligonucleotide
  Sense strand starting at position 3732 of SEQ ID NO: 2645
uagacuaguuuguuuagga

SEQ ID NO: 205331 - RNA, 19 nt, Artificial Sequence
  Description of Artificial Sequence: Synthetic oligonucleotide
  Antisense strand to SEQ ID NO: 205330
uccuaaacaaacuagucua

SEQ ID NO: 205332 - RNA, 19 nt, Artificial Sequence
  Description of Artificial Sequence: Synthetic oligonucleotide
  Sense strand starting at position 3733 of SEQ ID NO: 2645
agacuaguuuguuuaggac

SEQ ID NO: 205333 - RNA, 19 nt, Artificial Sequence
  Description of Artificial Sequence: Synthetic oligonucleotide
  Antisense strand to SEQ ID NO: 205332
guccuaaacaaacuagucu

SEQ ID NO: 205334 - RNA, 19 nt, Artificial Sequence
  Description of Artificial Sequence: Synthetic oligonucleotide
  Sense strand starting at position 3780 of SEQ ID NO: 2645
gaggcaguuagagguauua

SEQ ID NO: 205335 - RNA, 19 nt, Artificial Sequence
  Description of Artificial Sequence: Synthetic oligonucleotide
  Antisense strand to SEQ ID NO: 205334
uaauaccucuaacugccuc

SEQ ID NO: 205336 - RNA, 19 nt, Artificial Sequence
  Description of Artificial Sequence: Synthetic oligonucleotide
  Sense strand starting at position 3782 of SEQ ID NO: 2645
ggcaguuagagguauuacu

SEQ ID NO: 205337 - RNA, 19 nt, Artificial Sequence
  Description of Artificial Sequence: Synthetic oligonucleotide
  Antisense strand to SEQ ID NO: 205336
aguaauaccucuaacugcc

SEQ ID NO: 205338 - RNA, 19 nt, Artificial Sequence
  Description of Artificial Sequence: Synthetic oligonucleotide
  Sense strand starting at position 3901 of SEQ ID NO: 2645
acaucauuguaugugaaca

SEQ ID NO: 205339 - RNA, 19 nt, Artificial Sequence
  Description of Artificial Sequence: Synthetic oligonucleotide
  Antisense strand to SEQ ID NO: 205338
uguucacauacaaugaugu

SEQ ID NO: 205340 - RNA, 19 nt, Artificial Sequence
  Description of Artificial Sequence: Synthetic oligonucleotide
  Sense strand starting at position 3944 of SEQ ID NO: 2645
uugaacuucgaauggaauu

SEQ ID NO: 205341 - RNA, 19 nt, Artificial Sequence
  Description of Artificial Sequence: Synthetic oligonucleotide
  Antisense strand to SEQ ID NO: 205340
aauuccauucgaaguucaa

SEQ ID NO: 205342 - RNA, 19 nt, Artificial Sequence
  Description of Artificial Sequence: Synthetic oligonucleotide
  Sense strand starting at position 3950 of SEQ ID NO: 2645
uucgaauggaauuguacua

SEQ ID NO: 205343 - RNA, 19 nt, Artificial Sequence
  Description of Artificial Sequence: Synthetic oligonucleotide
  Antisense strand to SEQ ID NO: 205342
uaguacaauuccauucgaa

SEQ ID NO: 205344 - RNA, 19 nt, Artificial Sequence
  Description of Artificial Sequence: Synthetic oligonucleotide
  Sense strand starting at position 2001 of SEQ ID NO: 2646
cgcauugugacccaaagca

SEQ ID NO: 205345 - RNA, 19 nt, Artificial Sequence
  Description of Artificial Sequence: Synthetic oligonucleotide
  Antisense strand to SEQ ID NO: 205344
ugcuuugggucacaaugcg

SEQ ID NO: 205346 - RNA, 19 nt, Artificial Sequence
  Description of Artificial Sequence: Synthetic oligonucleotide
  Sense strand starting at position 2020 of SEQ ID NO: 2646
ugaugucaacccugaagaa

SEQ ID NO: 205347 - RNA, 19 nt, Artificial Sequence
  Description of Artificial Sequence: Synthetic oligonucleotide
  Antisense strand to SEQ ID NO: 205346
uucuucaggguugacauca

SEQ ID NO: 205348 - RNA, 19 nt, Artificial Sequence
  Description of Artificial Sequence: Synthetic oligonucleotide
  Sense strand starting at position 2051 of SEQ ID NO: 2646
gguuguggccauagaguug

SEQ ID NO: 205349 - RNA, 19 nt, Artificial Sequence
  Description of Artificial Sequence: Synthetic oligonucleotide
  Antisense strand to SEQ ID NO: 205348
caacucuauggccacaacc

SEQ ID NO: 205350 - RNA, 19 nt, Artificial Sequence
  Description of Artificial Sequence: Synthetic oligonucleotide
  Sense strand starting at position 2092 of SEQ ID NO: 2646
agaacauggcucugguaca

SEQ ID NO: 205351 - RNA, 19 nt, Artificial Sequence
  Description of Artificial Sequence: Synthetic oligonucleotide
  Antisense strand to SEQ ID NO: 205350
uguaccagagccauguucu

SEQ ID NO: 205352 - RNA, 19 nt, Artificial Sequence
  Description of Artificial Sequence: Synthetic oligonucleotide
  Sense strand starting at position 2191 of SEQ ID NO: 2646
guugaacuccuuugguguu

SEQ ID NO: 205353 - RNA, 19 nt, Artificial Sequence
  Description of Artificial Sequence: Synthetic oligonucleotide
  Antisense strand to SEQ ID NO: 205352
aacaccaaaggaguucaac

SEQ ID NO: 205354 - RNA, 19 nt, Artificial Sequence
  Description of Artificial Sequence: Synthetic oligonucleotide
  Sense strand starting at position 2256 of SEQ ID NO: 2646
guaaauguugcacagaguu

SEQ ID NO: 205355 - RNA, 19 nt, Artificial Sequence
  Description of Artificial Sequence: Synthetic oligonucleotide
  Antisense strand to SEQ ID NO: 205354
aacucugugcaacauuuac

SEQ ID NO: 205356 - RNA, 19 nt, Artificial Sequence
  Description of Artificial Sequence: Synthetic oligonucleotide
  Sense strand starting at position 2382 of SEQ ID NO: 2646
guuugcacuccauagaauc

SEQ ID NO: 205357 - RNA, 19 nt, Artificial Sequence
  Description of Artificial Sequence: Synthetic oligonucleotide
  Antisense strand to SEQ ID NO: 205356
gauucuauggagugcaaac

SEQ ID NO: 205358 - RNA, 19 nt, Artificial Sequence
  Description of Artificial Sequence: Synthetic oligonucleotide
  Sense strand starting at position 2495 of SEQ ID NO: 2646
agcuuugacccuggaguca

SEQ ID NO: 205359 - RNA, 19 nt, Artificial Sequence
  Description of Artificial Sequence: Synthetic oligonucleotide
  Antisense strand to SEQ ID NO: 205358
ugacuccagggucaaagcu

SEQ ID NO: 205360 - RNA, 19 nt, Artificial Sequence
  Description of Artificial Sequence: Synthetic oligonucleotide
  Sense strand starting at position 2532 of SEQ ID NO: 2646
gcaaaugugguauaggguu

SEQ ID NO: 205361 - RNA, 19 nt, Artificial Sequence
  Description of Artificial Sequence: Synthetic oligonucleotide
  Antisense strand to SEQ ID NO: 205360
aacccuauaccacauuugc

SEQ ID NO: 205362 - RNA, 19 nt, Artificial Sequence
  Description of Artificial Sequence: Synthetic oligonucleotide
  Sense strand starting at position 2538 of SEQ ID NO: 2646
gugguauaggguugaacau

SEQ ID NO: 205363 - RNA, 19 nt, Artificial Sequence
  Description of Artificial Sequence: Synthetic oligonucleotide
  Antisense strand to SEQ ID NO: 205362
auguucaacccuauaccac

SEQ ID NO: 205364 - RNA, 19 nt, Artificial Sequence
  Description of Artificial Sequence: Synthetic oligonucleotide
  Sense strand starting at position 2558 of SEQ ID NO: 2646
auaggugucucacuuugaa

SEQ ID NO: 205365 - RNA, 19 nt, Artificial Sequence
  Description of Artificial Sequence: Synthetic oligonucleotide
  Antisense strand to SEQ ID NO: 205364
uucaaagugagacaccuau

SEQ ID NO: 205366 - RNA, 19 nt, Artificial Sequence
  Description of Artificial Sequence: Synthetic oligonucleotide
  Sense strand starting at position 2670 of SEQ ID NO: 2646
cuggguugcacccaauaga

SEQ ID NO: 205367 - RNA, 19 nt, Artificial Sequence
  Description of Artificial Sequence: Synthetic oligonucleotide
  Antisense strand to SEQ ID NO: 205366
ucuauugggugcaacccag

SEQ ID NO: 205368 - RNA, 19 nt, Artificial Sequence
  Description of Artificial Sequence: Synthetic oligonucleotide
  Sense strand starting at position 2673 of SEQ ID NO: 2646
gguugcacccaauagaauu

SEQ ID NO: 205369 - RNA, 19 nt, Artificial Sequence
  Description of Artificial Sequence: Synthetic oligonucleotide
  Antisense strand to SEQ ID NO: 205368
aauucuauugggugcaacc

SEQ ID NO: 205370 - RNA, 19 nt, Artificial Sequence
  Description of Artificial Sequence: Synthetic oligonucleotide
  Sense strand starting at position 2739 of SEQ ID NO: 2646
gcaaauguggcccagggau

SEQ ID NO: 205371 - RNA, 19 nt, Artificial Sequence
  Description of Artificial Sequence: Synthetic oligonucleotide
  Antisense strand to SEQ ID NO: 205370
aucccugggccacauuugc

SEQ ID NO: 205372 - RNA, 19 nt, Artificial Sequence
  Description of Artificial Sequence: Synthetic oligonucleotide
  Sense strand starting at position 2835 of SEQ ID NO: 2646
aguugcucccaguagaauu

SEQ ID NO: 205373 - RNA, 19 nt, Artificial Sequence
  Description of Artificial Sequence: Synthetic oligonucleotide
  Antisense strand to SEQ ID NO: 205372
aauucuacugggagcaacu

SEQ ID NO: 205374 - RNA, 19 nt, Artificial Sequence
  Description of Artificial Sequence: Synthetic oligonucleotide
  Sense strand starting at position 3072 of SEQ ID NO: 2646
gcaacuguugcugaagauu

SEQ ID NO: 205375 - RNA, 19 nt, Artificial Sequence
  Description of Artificial Sequence: Synthetic oligonucleotide
  Antisense strand to SEQ ID NO: 205374
aaucuucagcaacaguugc

SEQ ID NO: 205376 - RNA, 19 nt, Artificial Sequence
  Description of Artificial Sequence: Synthetic oligonucleotide
  Sense strand starting at position 3075 of SEQ ID NO: 2646
acuguugcugaagauugaa

SEQ ID NO: 205377 - RNA, 19 nt, Artificial Sequence
  Description of Artificial Sequence: Synthetic oligonucleotide
  Antisense strand to SEQ ID NO: 205376
uucaaucuucagcaacagu

SEQ ID NO: 205378 - RNA, 19 nt, Artificial Sequence
  Description of Artificial Sequence: Synthetic oligonucleotide
  Sense strand starting at position 3116 of SEQ ID NO: 2646
agcuuugucccugugcaua

SEQ ID NO: 205379 - RNA, 19 nt, Artificial Sequence
  Description of Artificial Sequence: Synthetic oligonucleotide
  Antisense strand to SEQ ID NO: 205378
uaugcacagggacaaagcu

SEQ ID NO: 205380 - RNA, 19 nt, Artificial Sequence
  Description of Artificial Sequence: Synthetic oligonucleotide
  Sense strand starting at position 3156 of SEQ ID NO: 2646
gcagauguggcucaggauu

SEQ ID NO: 205381 - RNA, 19 nt, Artificial Sequence
  Description of Artificial Sequence: Synthetic oligonucleotide
  Antisense strand to SEQ ID NO: 205380
aauccugagccacaucugc

SEQ ID NO: 205382 - RNA, 19 nt, Artificial Sequence
  Description of Artificial Sequence: Synthetic oligonucleotide
  Sense strand starting at position 3321 of SEQ ID NO: 2646
ccugcaauucugggucaug

SEQ ID NO: 205383 - RNA, 19 nt, Artificial Sequence
  Description of Artificial Sequence: Synthetic oligonucleotide
  Antisense strand to SEQ ID NO: 205382
caugacccagaauugcagg

SEQ ID NO: 205384 - RNA, 19 nt, Artificial Sequence
  Description of Artificial Sequence: Synthetic oligonucleotide
  Sense strand starting at position 3324 of SEQ ID NO: 2646
gcaauucugggucaugguu

SEQ ID NO: 205385 - RNA, 19 nt, Artificial Sequence
  Description of Artificial Sequence: Synthetic oligonucleotide
  Antisense strand to SEQ ID NO: 205384
aaccaugacccagaauugc

SEQ ID NO: 205386 - RNA, 19 nt, Artificial Sequence
  Description of Artificial Sequence: Synthetic oligonucleotide
  Sense strand starting at position 3339 of SEQ ID NO: 2646
gguugccuucuguagaguu

SEQ ID NO: 205387 - RNA, 19 nt, Artificial Sequence
  Description of Artificial Sequence: Synthetic oligonucleotide
  Antisense strand to SEQ ID NO: 205386
aacucuacagaaggcaacc

SEQ ID NO: 205388 - RNA, 19 nt, Artificial Sequence
  Description of Artificial Sequence: Synthetic oligonucleotide
  Sense strand starting at position 3349 of SEQ ID NO: 2646
uguagaguucaccgucuga

SEQ ID NO: 205389 - RNA, 19 nt, Artificial Sequence
  Description of Artificial Sequence: Synthetic oligonucleotide
  Antisense strand to SEQ ID NO: 205388
ucagacggugaacucuaca

SEQ ID NO: 205390 - RNA, 19 nt, Artificial Sequence
  Description of Artificial Sequence: Synthetic oligonucleotide
  Sense strand starting at position 3409 of SEQ ID NO: 2646
aggauuauauucuacagau

SEQ ID NO: 205391 - RNA, 19 nt, Artificial Sequence
  Description of Artificial Sequence: Synthetic oligonucleotide
  Antisense strand to SEQ ID NO: 205390
aucuguagaauauaauccu

SEQ ID NO: 205392 - RNA, 19 nt, Artificial Sequence
  Description of Artificial Sequence: Synthetic oligonucleotide
  Sense strand starting at position 3440 of SEQ ID NO: 2646
agguguaucccugguguca

SEQ ID NO: 205393 - RNA, 19 nt, Artificial Sequence
  Description of Artificial Sequence: Synthetic oligonucleotide
  Antisense strand to SEQ ID NO: 205392
ugacaccagggauacaccu

SEQ ID NO: 205394 - RNA, 19 nt, Artificial Sequence
  Description of Artificial Sequence: Synthetic oligonucleotide
  Sense strand starting at position 3472 of SEQ ID NO: 2646
ucuaucuuguaacugugaa

SEQ ID NO: 205395 - RNA, 19 nt, Artificial Sequence
  Description of Artificial Sequence: Synthetic oligonucleotide
  Antisense strand to SEQ ID NO: 205394
uucacaguuacaagauaga

SEQ ID NO: 205396 - RNA, 19 nt, Artificial Sequence
  Description of Artificial Sequence: Synthetic oligonucleotide
  Sense strand starting at position 3490 of SEQ ID NO: 2646
aguugagcuuaacuccaaa

SEQ ID NO: 205397 - RNA, 19 nt, Artificial Sequence
  Description of Artificial Sequence: Synthetic oligonucleotide
  Antisense strand to SEQ ID NO: 205396
uuuggaguuaagcucaacu

SEQ ID NO: 205398 - RNA, 19 nt, Artificial Sequence
  Description of Artificial Sequence: Synthetic oligonucleotide
  Sense strand starting at position 3643 of SEQ ID NO: 2646
uugcaagugugauccagaa

SEQ ID NO: 205399 - RNA, 19 nt, Artificial Sequence
  Description of Artificial Sequence: Synthetic oligonucleotide
  Antisense strand to SEQ ID NO: 205398
uucuggaucacacuugcaa

SEQ ID NO: 205400 - RNA, 19 nt, Artificial Sequence
  Description of Artificial Sequence: Synthetic oligonucleotide
  Sense strand starting at position 3645 of SEQ ID NO: 2646
gcaagugugauccagaacu

SEQ ID NO: 205401 - RNA, 19 nt, Artificial Sequence
  Description of Artificial Sequence: Synthetic oligonucleotide
  Antisense strand to SEQ ID NO: 205400
aguucuggaucacacuugc

SEQ ID NO: 205402 - RNA, 19 nt, Artificial Sequence
  Description of Artificial Sequence: Synthetic oligonucleotide
  Sense strand starting at position 3742 of SEQ ID NO: 2646
cgaguugaacuccacagau

SEQ ID NO: 205403 - RNA, 19 nt, Artificial Sequence
  Description of Artificial Sequence: Synthetic oligonucleotide
  Antisense strand to SEQ ID NO: 205402
aucuguggaguucaacucg

SEQ ID NO: 205404 - RNA, 19 nt, Artificial Sequence
  Description of Artificial Sequence: Synthetic oligonucleotide
  Sense strand starting at position 3816 of SEQ ID NO: 2646
acuuuagaccaugguggaa

SEQ ID NO: 205405 - RNA, 19 nt, Artificial Sequence
  Description of Artificial Sequence: Synthetic oligonucleotide
  Antisense strand to SEQ ID NO: 205404
uuccaccauggucuaaagu

SEQ ID NO: 205406 - RNA, 19 nt, Artificial Sequence
  Description of Artificial Sequence: Synthetic oligonucleotide
  Sense strand starting at position 3842 of SEQ ID NO: 2646
gauuuaacaucuugauggu

SEQ ID NO: 205407 - RNA, 19 nt, Artificial Sequence
  Description of Artificial Sequence: Synthetic oligonucleotide
  Antisense strand to SEQ ID NO: 205406
accaucaagauguuaaauc

SEQ ID NO: 205408 - RNA, 19 nt, Artificial Sequence
  Description of Artificial Sequence: Synthetic oligonucleotide
  Sense strand starting at position 3869 of SEQ ID NO: 2646
ugaaucaacucagaagauu

SEQ ID NO: 205409 - RNA, 19 nt, Artificial Sequence
  Description of Artificial Sequence: Synthetic oligonucleotide
  Antisense strand to SEQ ID NO: 205408
aaucuucugaguugauuca

SEQ ID NO: 205410 - RNA, 19 nt, Artificial Sequence
  Description of Artificial Sequence: Synthetic oligonucleotide
  Sense strand starting at position 3899 of SEQ ID NO: 2646
gucuguuguccagaauuga

SEQ ID NO: 205411 - RNA, 19 nt, Artificial Sequence
  Description of Artificial Sequence: Synthetic oligonucleotide
  Antisense strand to SEQ ID NO: 205410
ucaauucuggacaacagac

SEQ ID NO: 205412 - RNA, 19 nt, Artificial Sequence
  Description of Artificial Sequence: Synthetic oligonucleotide
  Sense strand starting at position 3940 of SEQ ID NO: 2646
aagccuugucccugagguu

SEQ ID NO: 205413 - RNA, 19 nt, Artificial Sequence
  Description of Artificial Sequence: Synthetic oligonucleotide
  Antisense strand to SEQ ID NO: 205412
aaccucagggacaaggcuu

SEQ ID NO: 205414 - RNA, 19 nt, Artificial Sequence
  Description of Artificial Sequence: Synthetic oligonucleotide
  Sense strand starting at position 3941 of SEQ ID NO: 2646
agccuugucccugagguua

SEQ ID NO: 205415 - RNA, 19 nt, Artificial Sequence
  Description of Artificial Sequence: Synthetic oligonucleotide
  Antisense strand to SEQ ID NO: 205414
uaaccucagggacaaggcu

SEQ ID NO: 205416 - RNA, 19 nt, Artificial Sequence
  Description of Artificial Sequence: Synthetic oligonucleotide
  Sense strand starting at position 3949 of SEQ ID NO: 2646
cccugagguuaccucagaa

SEQ ID NO: 205417 - RNA, 19 nt, Artificial Sequence
  Description of Artificial Sequence: Synthetic oligonucleotide
  Antisense strand to SEQ ID NO: 205416
uucugagguaaccucaggg

SEQ ID NO: 205418 - RNA, 19 nt, Artificial Sequence
  Description of Artificial Sequence: Synthetic oligonucleotide
  Sense strand starting at position 3979 of SEQ ID NO: 2646
uugaaaguguuguccagaa

SEQ ID NO: 205419 - RNA, 19 nt, Artificial Sequence
  Description of Artificial Sequence: Synthetic oligonucleotide
  Antisense strand to SEQ ID NO: 205418
uucuggacaacacuuucaa

SEQ ID NO: 205420 - RNA, 19 nt, Artificial Sequence
  Description of Artificial Sequence: Synthetic oligonucleotide
  Sense strand starting at position 3981 of SEQ ID NO: 2646
gaaaguguuguccagaacu

SEQ ID NO: 205421 - RNA, 19 nt, Artificial Sequence
  Description of Artificial Sequence: Synthetic oligonucleotide
  Antisense strand to SEQ ID NO: 205420
aguucuggacaacacuuuc

SEQ ID NO: 205422 - RNA, 19 nt, Artificial Sequence
  Description of Artificial Sequence: Synthetic oligonucleotide
  Sense strand starting at position 3983 of SEQ ID NO: 2646
aaguguuguccagaacuga

SEQ ID NO: 205423 - RNA, 19 nt, Artificial Sequence
  Description of Artificial Sequence: Synthetic oligonucleotide
  Antisense strand to SEQ ID NO: 205422
ucaguucuggacaacacuu

SEQ ID NO: 205424 - RNA, 19 nt, Artificial Sequence
  Description of Artificial Sequence: Synthetic oligonucleotide
  Sense strand starting at position 511 of SEQ ID NO: 2647
gugucaagcucauagucaa

SEQ ID NO: 205425 - RNA, 19 nt, Artificial Sequence
  Description of Artificial Sequence: Synthetic oligonucleotide
  Antisense strand to SEQ ID NO: 205424
uugacuaugagcuugacac

SEQ ID NO: 205426 - RNA, 19 nt, Artificial Sequence
  Description of Artificial Sequence: Synthetic oligonucleotide
  Sense strand starting at position 654 of SEQ ID NO: 2647
cuuguauuggugggugaca

SEQ ID NO: 205427 - RNA, 19 nt, Artificial Sequence
  Description of Artificial Sequence: Synthetic oligonucleotide
  Antisense strand to SEQ ID NO: 205426
ugucacccaccaauacaag

SEQ ID NO: 205428 - RNA, 19 nt, Artificial Sequence
  Description of Artificial Sequence: Synthetic oligonucleotide
  Sense strand starting at position 655 of SEQ ID NO: 2647
uuguauuggugggugacau

SEQ ID NO: 205429 - RNA, 19 nt, Artificial Sequence
  Description of Artificial Sequence: Synthetic oligonucleotide
  Antisense strand to SEQ ID NO: 205428
augucacccaccaauacaa

SEQ ID NO: 205430 - RNA, 19 nt, Artificial Sequence
  Description of Artificial Sequence: Synthetic oligonucleotide
  Sense strand starting at position 656 of SEQ ID NO: 2647
uguauuggugggugacaug

SEQ ID NO: 205431 - RNA, 19 nt, Artificial Sequence
  Description of Artificial Sequence: Synthetic oligonucleotide
  Antisense strand to SEQ ID NO: 205430
caugucacccaccaauaca

SEQ ID NO: 205432 - RNA, 19 nt, Artificial Sequence
  Description of Artificial Sequence: Synthetic oligonucleotide
  Sense strand starting at position 689 of SEQ ID NO: 2647
ucucaacgcucaggucauu

SEQ ID NO: 205433 - RNA, 19 nt, Artificial Sequence
  Description of Artificial Sequence: Synthetic oligonucleotide
  Antisense strand to SEQ ID NO: 205432
aaugaccugagcguugaga

SEQ ID NO: 205434 - RNA, 19 nt, Artificial Sequence
  Description of Artificial Sequence: Synthetic oligonucleotide
  Sense strand starting at position 907 of SEQ ID NO: 2647
gcagaaugcuggucuacca

SEQ ID NO: 205435 - RNA, 19 nt, Artificial Sequence
  Description of Artificial Sequence: Synthetic oligonucleotide
  Antisense strand to SEQ ID NO: 205434
ugguagaccagcauucugc

SEQ ID NO: 205436 - RNA, 19 nt, Artificial Sequence
  Description of Artificial Sequence: Synthetic oligonucleotide
  Sense strand starting at position 1139 of SEQ ID NO: 2647
ggccaaaggcucuguggau

SEQ ID NO: 205437 - RNA, 19 nt, Artificial Sequence
  Description of Artificial Sequence: Synthetic oligonucleotide
  Antisense strand to SEQ ID NO: 205436
auccacagagccuuuggcc

SEQ ID NO: 205438 - RNA, 19 nt, Artificial Sequence
  Description of Artificial Sequence: Synthetic oligonucleotide
  Sense strand starting at position 1140 of SEQ ID NO: 2647
gccaaaggcucuguggaua

SEQ ID NO: 205439 - RNA, 19 nt, Artificial Sequence
  Description of Artificial Sequence: Synthetic oligonucleotide
  Antisense strand to SEQ ID NO: 205438
uauccacagagccuuuggc

SEQ ID NO: 205440 - RNA, 19 nt, Artificial Sequence
  Description of Artificial Sequence: Synthetic oligonucleotide
  Sense strand starting at position 1170 of SEQ ID NO: 2647
gugugugccacguuggaga

SEQ ID NO: 205441 - RNA, 19 nt, Artificial Sequence
  Description of Artificial Sequence: Synthetic oligonucleotide
  Antisense strand to SEQ ID NO: 205440
ucuccaacguggcacacac

SEQ ID NO: 205442 - RNA, 19 nt, Artificial Sequence
  Description of Artificial Sequence: Synthetic oligonucleotide
  Sense strand starting at position 1282 of SEQ ID NO: 2647
cccaucuccucgguauaaa

SEQ ID NO: 205443 - RNA, 19 nt, Artificial Sequence
  Description of Artificial Sequence: Synthetic oligonucleotide
  Antisense strand to SEQ ID NO: 205442
uuuauaccgaggagauggg

SEQ ID NO: 205444 - RNA, 19 nt, Artificial Sequence
  Description of Artificial Sequence: Synthetic oligonucleotide
  Sense strand starting at position 1283 of SEQ ID NO: 2647
ccaucuccucgguauaaau

SEQ ID NO: 205445 - RNA, 19 nt, Artificial Sequence
  Description of Artificial Sequence: Synthetic oligonucleotide
  Antisense strand to SEQ ID NO: 205444
auuuauaccgaggagaugg

SEQ ID NO: 205446 - RNA, 19 nt, Artificial Sequence
  Description of Artificial Sequence: Synthetic oligonucleotide
  Sense strand starting at position 1285 of SEQ ID NO: 2647
aucuccucgguauaaauca

SEQ ID NO: 205447 - RNA, 19 nt, Artificial Sequence
  Description of Artificial Sequence: Synthetic oligonucleotide
  Antisense strand to SEQ ID NO: 205446
ugauuuauaccgaggagau

SEQ ID NO: 205448 - RNA, 19 nt, Artificial Sequence
  Description of Artificial Sequence: Synthetic oligonucleotide
  Sense strand starting at position 1292 of SEQ ID NO: 2647
cgguauaaaucauguuuau

SEQ ID NO: 205449 - RNA, 19 nt, Artificial Sequence
  Description of Artificial Sequence: Synthetic oligonucleotide
  Antisense strand to SEQ ID NO: 205448
auaaacaugauuuauaccg

SEQ ID NO: 205450 - RNA, 19 nt, Artificial Sequence
  Description of Artificial Sequence: Synthetic oligonucleotide
  Sense strand starting at position 1411 of SEQ ID NO: 2647
uuuaguacuuccugucaua

SEQ ID NO: 205451 - RNA, 19 nt, Artificial Sequence
  Description of Artificial Sequence: Synthetic oligonucleotide
  Antisense strand to SEQ ID NO: 205450
uaugacaggaaguacuaaa

SEQ ID NO: 205452 - RNA, 19 nt, Artificial Sequence
  Description of Artificial Sequence: Synthetic oligonucleotide
  Sense strand starting at position 1414 of SEQ ID NO: 2647
aguacuuccugucauaguu

SEQ ID NO: 205453 - RNA, 19 nt, Artificial Sequence
  Description of Artificial Sequence: Synthetic oligonucleotide
  Antisense strand to SEQ ID NO: 205452
aacuaugacaggaaguacu

SEQ ID NO: 205454 - RNA, 19 nt, Artificial Sequence
  Description of Artificial Sequence: Synthetic oligonucleotide
  Sense strand starting at position 1473 of SEQ ID NO: 2647
uggugaaaugcucauuaua

SEQ ID NO: 205455 - RNA, 19 nt, Artificial Sequence
  Description of Artificial Sequence: Synthetic oligonucleotide
  Antisense strand to SEQ ID NO: 205454
uauaaugagcauuucacca

SEQ ID NO: 205456 - RNA, 19 nt, Artificial Sequence
  Description of Artificial Sequence: Synthetic oligonucleotide
  Sense strand starting at position 1475 of SEQ ID NO: 2647
gugaaaugcucauuauaca

SEQ ID NO: 205457 - RNA, 19 nt, Artificial Sequence
  Description of Artificial Sequence: Synthetic oligonucleotide
  Antisense strand to SEQ ID NO: 205456
uguauaaugagcauuucac

SEQ ID NO: 205458 - RNA, 19 nt, Artificial Sequence
  Description of Artificial Sequence: Synthetic oligonucleotide
  Sense strand starting at position 1626 of SEQ ID NO: 2647
caacguuaguaauuauguu

SEQ ID NO: 205459 - RNA, 19 nt, Artificial Sequence
  Description of Artificial Sequence: Synthetic oligonucleotide
  Antisense strand to SEQ ID NO: 205458
aacauaauuacuaacguug

SEQ ID NO: 205460 - RNA, 19 nt, Artificial Sequence
  Description of Artificial Sequence: Synthetic oligonucleotide
  Sense strand starting at position 1813 of SEQ ID NO: 2647
aguuauacuuuccugacag

SEQ ID NO: 205461 - RNA, 19 nt, Artificial Sequence
  Description of Artificial Sequence: Synthetic oligonucleotide
  Antisense strand to SEQ ID NO: 205460
cugucaggaaaguauaacu

SEQ ID NO: 205462 - RNA, 19 nt, Artificial Sequence
  Description of Artificial Sequence: Synthetic oligonucleotide
  Sense strand starting at position 1814 of SEQ ID NO: 2647
guuauacuuuccugacaga

SEQ ID NO: 205463 - RNA, 19 nt, Artificial Sequence
  Description of Artificial Sequence: Synthetic oligonucleotide
  Antisense strand to SEQ ID NO: 205462
ucugucaggaaaguauaac

SEQ ID NO: 205464 - RNA, 19 nt, Artificial Sequence
  Description of Artificial Sequence: Synthetic oligonucleotide
  Sense strand starting at position 2113 of SEQ ID NO: 2647
ggagguuaccgauaacagu

SEQ ID NO: 205465 - RNA, 19 nt, Artificial Sequence
  Description of Artificial Sequence: Synthetic oligonucleotide
  Antisense strand to SEQ ID NO: 205464
acuguuaucgguaaccucc

SEQ ID NO: 205466 - RNA, 19 nt, Artificial Sequence
  Description of Artificial Sequence: Synthetic oligonucleotide
  Sense strand starting at position 2239 of SEQ ID NO: 2647
aggcauuguaagcacugaa

SEQ ID NO: 205467 - RNA, 19 nt, Artificial Sequence
  Description of Artificial Sequence: Synthetic oligonucleotide
  Antisense strand to SEQ ID NO: 205466
uucagugcuuacaaugccu

SEQ ID NO: 205468 - RNA, 19 nt, Artificial Sequence
  Description of Artificial Sequence: Synthetic oligonucleotide
  Sense strand starting at position 2242 of SEQ ID NO: 2647
cauuguaagcacugaaagu

SEQ ID NO: 205469 - RNA, 19 nt, Artificial Sequence
  Description of Artificial Sequence: Synthetic oligonucleotide
  Antisense strand to SEQ ID NO: 205468
acuuucagugcuuacaaug

SEQ ID NO: 205470 - RNA, 19 nt, Artificial Sequence
  Description of Artificial Sequence: Synthetic oligonucleotide
  Sense strand starting at position 2802 of SEQ ID NO: 2647
gcaagaagcuuuccuguuu

SEQ ID NO: 205471 - RNA, 19 nt, Artificial Sequence
  Description of Artificial Sequence: Synthetic oligonucleotide
  Antisense strand to SEQ ID NO: 205470
aaacaggaaagcuucuugc

SEQ ID NO: 205472 - RNA, 19 nt, Artificial Sequence
  Description of Artificial Sequence: Synthetic oligonucleotide
  Sense strand starting at position 2868 of SEQ ID NO: 2647
auggucaggucuuucuuau

SEQ ID NO: 205473 - RNA, 19 nt, Artificial Sequence
  Description of Artificial Sequence: Synthetic oligonucleotide
  Antisense strand to SEQ ID NO: 205472
auaagaaagaccugaccau

SEQ ID NO: 205474 - RNA, 19 nt, Artificial Sequence
  Description of Artificial Sequence: Synthetic oligonucleotide
  Sense strand starting at position 2875 of SEQ ID NO: 2647
ggucuuucuuaucccauga

SEQ ID NO: 205475 - RNA, 19 nt, Artificial Sequence
  Description of Artificial Sequence: Synthetic oligonucleotide
  Antisense strand to SEQ ID NO: 205474
ucaugggauaagaaagacc

SEQ ID NO: 205476 - RNA, 19 nt, Artificial Sequence
  Description of Artificial Sequence: Synthetic oligonucleotide
  Sense strand starting at position 2990 of SEQ ID NO: 2647
cugguuuaucgagacucga

SEQ ID NO: 205477 - RNA, 19 nt, Artificial Sequence
  Description of Artificial Sequence: Synthetic oligonucleotide
  Antisense strand to SEQ ID NO: 205476
ucgagucucgauaaaccag

SEQ ID NO: 205478 - RNA, 19 nt, Artificial Sequence
  Description of Artificial Sequence: Synthetic oligonucleotide
  Sense strand starting at position 2994 of SEQ ID NO: 2647
uuuaucgagacucgagaau

SEQ ID NO: 205479 - RNA, 19 nt, Artificial Sequence
  Description of Artificial Sequence: Synthetic oligonucleotide
  Antisense strand to SEQ ID NO: 205478
auucucgagucucgauaaa

SEQ ID NO: 205480 - RNA, 19 nt, Artificial Sequence
  Description of Artificial Sequence: Synthetic oligonucleotide
  Sense strand starting at position 3193 of SEQ ID NO: 2647
cgaagcaauuguucaaggu

SEQ ID NO: 205481 - RNA, 19 nt, Artificial Sequence
  Description of Artificial Sequence: Synthetic oligonucleotide
  Antisense strand to SEQ ID NO: 205480
accuugaacaauugcuucg

SEQ ID NO: 205482 - RNA, 19 nt, Artificial Sequence
  Description of Artificial Sequence: Synthetic oligonucleotide
  Sense strand starting at position 3364 of SEQ ID NO: 2647
augugauuccugggugcga

SEQ ID NO: 205483 - RNA, 19 nt, Artificial Sequence
  Description of Artificial Sequence: Synthetic oligonucleotide
  Antisense strand to SEQ ID NO: 205482
ucgcacccaggaaucacau

SEQ ID NO: 205484 - RNA, 19 nt, Artificial Sequence
  Description of Artificial Sequence: Synthetic oligonucleotide
  Sense strand starting at position 3365 of SEQ ID NO: 2647
ugugauuccugggugcgau

SEQ ID NO: 205485 - RNA, 19 nt, Artificial Sequence
  Description of Artificial Sequence: Synthetic oligonucleotide
  Antisense strand to SEQ ID NO: 205484
aucgcacccaggaaucaca

SEQ ID NO: 205486 - RNA, 19 nt, Artificial Sequence
  Description of Artificial Sequence: Synthetic oligonucleotide
  Sense strand starting at position 3366 of SEQ ID NO: 2647
gugauuccugggugcgauu

SEQ ID NO: 205487 - RNA, 19 nt, Artificial Sequence
  Description of Artificial Sequence: Synthetic oligonucleotide
  Antisense strand to SEQ ID NO: 205486
aaucgcacccaggaaucac

SEQ ID NO: 205488 - RNA, 19 nt, Artificial Sequence
  Description of Artificial Sequence: Synthetic oligonucleotide
  Sense strand starting at position 3821 of SEQ ID NO: 2647
cucuguuacuaucuguuga

SEQ ID NO: 205489 - RNA, 19 nt, Artificial Sequence
  Description of Artificial Sequence: Synthetic oligonucleotide
  Antisense strand to SEQ ID NO: 205488
ucaacagauaguaacagag

SEQ ID NO: 205490 - RNA, 19 nt, Artificial Sequence
  Description of Artificial Sequence: Synthetic oligonucleotide
  Sense strand starting at position 3823 of SEQ ID NO: 2647
cuguuacuaucuguugauu

SEQ ID NO: 205491 - RNA, 19 nt, Artificial Sequence
  Description of Artificial Sequence: Synthetic oligonucleotide
  Antisense strand to SEQ ID NO: 205490
aaucaacagauaguaacag

SEQ ID NO: 205492 - RNA, 19 nt, Artificial Sequence
  Description of Artificial Sequence: Synthetic oligonucleotide
  Sense strand starting at position 3825 of SEQ ID NO: 2647
guuacuaucuguugauuga

SEQ ID NO: 205493 - RNA, 19 nt, Artificial Sequence
  Description of Artificial Sequence: Synthetic oligonucleotide
  Antisense strand to SEQ ID NO: 205492
ucaaucaacagauaguaac

SEQ ID NO: 205494 - RNA, 19 nt, Artificial Sequence
  Description of Artificial Sequence: Synthetic oligonucleotide
  Sense strand starting at position 3826 of SEQ ID NO: 2647
uuacuaucuguugauugaa

SEQ ID NO: 205495 - RNA, 19 nt, Artificial Sequence
  Description of Artificial Sequence: Synthetic oligonucleotide
  Antisense strand to SEQ ID NO: 205494
uucaaucaacagauaguaa

SEQ ID NO: 205496 - RNA, 19 nt, Artificial Sequence
  Description of Artificial Sequence: Synthetic oligonucleotide
  Sense strand starting at position 3836 of SEQ ID NO: 2647
uugauugaaucccauagga

SEQ ID NO: 205497 - RNA, 19 nt, Artificial Sequence
  Description of Artificial Sequence: Synthetic oligonucleotide
  Antisense strand to SEQ ID NO: 205496
uccuaugggauucaaucaa

SEQ ID NO: 205498 - RNA, 19 nt, Artificial Sequence
  Description of Artificial Sequence: Synthetic oligonucleotide
  Sense strand starting at position 187 of SEQ ID NO: 2648
ucaggcucuagaugaaugu

SEQ ID NO: 205499 - RNA, 19 nt, Artificial Sequence
  Description of Artificial Sequence: Synthetic oligonucleotide
  Antisense strand to SEQ ID NO: 205498
acauucaucuagagccuga

SEQ ID NO: 205500 - RNA, 19 nt, Artificial Sequence
  Description of Artificial Sequence: Synthetic oligonucleotide
  Sense strand starting at position 242 of SEQ ID NO: 2648
cugggucuuagguagacau

SEQ ID NO: 205501 - RNA, 19 nt, Artificial Sequence
  Description of Artificial Sequence: Synthetic oligonucleotide
  Antisense strand to SEQ ID NO: 205500
augucuaccuaagacccag

SEQ ID NO: 205502 - RNA, 19 nt, Artificial Sequence
  Description of Artificial Sequence: Synthetic oligonucleotide
  Sense strand starting at position 924 of SEQ ID NO: 2648
auagacaucuggcuccaua

SEQ ID NO: 205503 - RNA, 19 nt, Artificial Sequence
  Description of Artificial Sequence: Synthetic oligonucleotide
  Antisense strand to SEQ ID NO: 205502
uauggagccagaugucuau

SEQ ID NO: 205504 - RNA, 19 nt, Artificial Sequence
  Description of Artificial Sequence: Synthetic oligonucleotide
  Sense strand starting at position 1287 of SEQ ID NO: 2648
acacaugugucuuccugaa

SEQ ID NO: 205505 - RNA, 19 nt, Artificial Sequence
  Description of Artificial Sequence: Synthetic oligonucleotide
  Antisense strand to SEQ ID NO: 205504
uucaggaagacacaugugu

SEQ ID NO: 205506 - RNA, 19 nt, Artificial Sequence
  Description of Artificial Sequence: Synthetic oligonucleotide
  Sense strand starting at position 1350 of SEQ ID NO: 2648
acaugugugucccagacuu

SEQ ID NO: 205507 - RNA, 19 nt, Artificial Sequence
  Description of Artificial Sequence: Synthetic oligonucleotide
  Antisense strand to SEQ ID NO: 205506
aagucugggacacacaugu

SEQ ID NO: 205508 - RNA, 19 nt, Artificial Sequence
  Description of Artificial Sequence: Synthetic oligonucleotide
  Sense strand starting at position 1358 of SEQ ID NO: 2648
gucccagacuugcuuaauc

SEQ ID NO: 205509 - RNA, 19 nt, Artificial Sequence
  Description of Artificial Sequence: Synthetic oligonucleotide
  Antisense strand to SEQ ID NO: 205508
gauuaagcaagucugggac

SEQ ID NO: 205510 - RNA, 19 nt, Artificial Sequence
  Description of Artificial Sequence: Synthetic oligonucleotide
  Sense strand starting at position 1367 of SEQ ID NO: 2648
uugcuuaaucaauggagca

SEQ ID NO: 205511 - RNA, 19 nt, Artificial Sequence
  Description of Artificial Sequence: Synthetic oligonucleotide
  Antisense strand to SEQ ID NO: 205510
ugcuccauugauuaagcaa

SEQ ID NO: 205512 - RNA, 19 nt, Artificial Sequence
  Description of Artificial Sequence: Synthetic oligonucleotide
  Sense strand starting at position 1369 of SEQ ID NO: 2648
gcuuaaucaauggagcagu

SEQ ID NO: 205513 - RNA, 19 nt, Artificial Sequence
  Description of Artificial Sequence: Synthetic oligonucleotide
  Antisense strand to SEQ ID NO: 205512
acugcuccauugauuaagc

SEQ ID NO: 205514 - RNA, 19 nt, Artificial Sequence
  Description of Artificial Sequence: Synthetic oligonucleotide
  Sense strand starting at position 1405 of SEQ ID NO: 2648
gguacagucuccuccauuu

SEQ ID NO: 205515 - RNA, 19 nt, Artificial Sequence
  Description of Artificial Sequence: Synthetic oligonucleotide
  Antisense strand to SEQ ID NO: 205514
aaauggaggagacuguacc

SEQ ID NO: 205516 - RNA, 19 nt, Artificial Sequence
  Description of Artificial Sequence: Synthetic oligonucleotide
  Sense strand starting at position 1850 of SEQ ID NO: 2648
ucccgcucuggagaguuua

SEQ ID NO: 205517 - RNA, 19 nt, Artificial Sequence
  Description of Artificial Sequence: Synthetic oligonucleotide
  Antisense strand to SEQ ID NO: 205516
uaaacucuccagagcggga

SEQ ID NO: 205518 - RNA, 19 nt, Artificial Sequence
  Description of Artificial Sequence: Synthetic oligonucleotide
  Sense strand starting at position 2391 of SEQ ID NO: 2648
gcuggagugccuuacuagu

SEQ ID NO: 205519 - RNA, 19 nt, Artificial Sequence
  Description of Artificial Sequence: Synthetic oligonucleotide
  Antisense strand to SEQ ID NO: 205518
acuaguaaggcacuccagc

SEQ ID NO: 205520 - RNA, 19 nt, Artificial Sequence
  Description of Artificial Sequence: Synthetic oligonucleotide
  Sense strand starting at position 2393 of SEQ ID NO: 2648
uggagugccuuacuaguga

SEQ ID NO: 205521 - RNA, 19 nt, Artificial Sequence
  Description of Artificial Sequence: Synthetic oligonucleotide
  Antisense strand to SEQ ID NO: 205520
ucacuaguaaggcacucca

SEQ ID NO: 205522 - RNA, 19 nt, Artificial Sequence
  Description of Artificial Sequence: Synthetic oligonucleotide
  Sense strand starting at position 2561 of SEQ ID NO: 2648
gccagauagucccaguaaa

SEQ ID NO: 205523 - RNA, 19 nt, Artificial Sequence
  Description of Artificial Sequence: Synthetic oligonucleotide
  Antisense strand to SEQ ID NO: 205522
uuuacugggacuaucuggc

SEQ ID NO: 205524 - RNA, 19 nt, Artificial Sequence
  Description of Artificial Sequence: Synthetic oligonucleotide
  Sense strand starting at position 2597 of SEQ ID NO: 2648
uggccucuggauuauuauu

SEQ ID NO: 205525 - RNA, 19 nt, Artificial Sequence
  Description of Artificial Sequence: Synthetic oligonucleotide
  Antisense strand to SEQ ID NO: 205524
aauaauaauccagaggcca

SEQ ID NO: 205526 - RNA, 19 nt, Artificial Sequence
  Description of Artificial Sequence: Synthetic oligonucleotide
  Sense strand starting at position 2630 of SEQ ID NO: 2648
uggcuuucuuaggaaacuu

SEQ ID NO: 205527 - RNA, 19 nt, Artificial Sequence
  Description of Artificial Sequence: Synthetic oligonucleotide
  Antisense strand to SEQ ID NO: 205526
aaguuuccuaagaaagcca

SEQ ID NO: 205528 - RNA, 19 nt, Artificial Sequence
  Description of Artificial Sequence: Synthetic oligonucleotide
  Sense strand starting at position 2638 of SEQ ID NO: 2648
uuaggaaacuuuccggaau

SEQ ID NO: 205529 - RNA, 19 nt, Artificial Sequence
  Description of Artificial Sequence: Synthetic oligonucleotide
  Antisense strand to SEQ ID NO: 205528
auuccggaaaguuuccuaa

SEQ ID NO: 205530 - RNA, 19 nt, Artificial Sequence
  Description of Artificial Sequence: Synthetic oligonucleotide
  Sense strand starting at position 2639 of SEQ ID NO: 2648
uaggaaacuuuccggaaug

SEQ ID NO: 205531 - RNA, 19 nt, Artificial Sequence
  Description of Artificial Sequence: Synthetic oligonucleotide
  Antisense strand to SEQ ID NO: 205530
cauuccggaaaguuuccua

SEQ ID NO: 205532 - RNA, 19 nt, Artificial Sequence
  Description of Artificial Sequence: Synthetic oligonucleotide
  Sense strand starting at position 2640 of SEQ ID NO: 2648
aggaaacuuuccggaaugu

SEQ ID NO: 205533 - RNA, 19 nt, Artificial Sequence
  Description of Artificial Sequence: Synthetic oligonucleotide
  Antisense strand to SEQ ID NO: 205532
acauuccggaaaguuuccu

SEQ ID NO: 205534 - RNA, 19 nt, Artificial Sequence
  Description of Artificial Sequence: Synthetic oligonucleotide
  Sense strand starting at position 2641 of SEQ ID NO: 2648
ggaaacuuuccggaaugug

SEQ ID NO: 205535 - RNA, 19 nt, Artificial Sequence
  Description of Artificial Sequence: Synthetic oligonucleotide
  Antisense strand to SEQ ID NO: 205534
cacauuccggaaaguuucc

SEQ ID NO: 205536 - RNA, 19 nt, Artificial Sequence
  Description of Artificial Sequence: Synthetic oligonucleotide
  Sense strand starting at position 2651 of SEQ ID NO: 2648
cggaauguguccagguguu

SEQ ID NO: 205537 - RNA, 19 nt, Artificial Sequence
  Description of Artificial Sequence: Synthetic oligonucleotide
  Antisense strand to SEQ ID NO: 205536
aacaccuggacacauuccg

SEQ ID NO: 205538 - RNA, 19 nt, Artificial Sequence
  Description of Artificial Sequence: Synthetic oligonucleotide
  Sense strand starting at position 2882 of SEQ ID NO: 2648
agacucgagugucaguuua

SEQ ID NO: 205539 - RNA, 19 nt, Artificial Sequence
  Description of Artificial Sequence: Synthetic oligonucleotide
  Antisense strand to SEQ ID NO: 205538
uaaacugacacucgagucu

SEQ ID NO: 205540 - RNA, 19 nt, Artificial Sequence
  Description of Artificial Sequence: Synthetic oligonucleotide
  Sense strand starting at position 2896 of SEQ ID NO: 2648
guuuaaugcuuguucccua

SEQ ID NO: 205541 - RNA, 19 nt, Artificial Sequence
  Description of Artificial Sequence: Synthetic oligonucleotide
  Antisense strand to SEQ ID NO: 205540
uagggaacaagcauuaaac

SEQ ID NO: 205542 - RNA, 19 nt, Artificial Sequence
  Description of Artificial Sequence: Synthetic oligonucleotide
  Sense strand starting at position 2900 of SEQ ID NO: 2648
aaugcuuguucccuaaggu

SEQ ID NO: 205543 - RNA, 19 nt, Artificial Sequence
  Description of Artificial Sequence: Synthetic oligonucleotide
  Antisense strand to SEQ ID NO: 205542
accuuagggaacaagcauu

SEQ ID NO: 205544 - RNA, 19 nt, Artificial Sequence
  Description of Artificial Sequence: Synthetic oligonucleotide
  Sense strand starting at position 2938 of SEQ ID NO: 2648
cggcguuaggguuaggauu

SEQ ID NO: 205545 - RNA, 19 nt, Artificial Sequence
  Description of Artificial Sequence: Synthetic oligonucleotide
  Antisense strand to SEQ ID NO: 205544
aauccuaacccuaacgccg

SEQ ID NO: 205546 - RNA, 19 nt, Artificial Sequence
  Description of Artificial Sequence: Synthetic oligonucleotide
  Sense strand starting at position 3060 of SEQ ID NO: 2648
ggagcaauguucuucucag

SEQ ID NO: 205547 - RNA, 19 nt, Artificial Sequence
  Description of Artificial Sequence: Synthetic oligonucleotide
  Antisense strand to SEQ ID NO: 205546
cugagaagaacauugcucc

SEQ ID NO: 205548 - RNA, 19 nt, Artificial Sequence
  Description of Artificial Sequence: Synthetic oligonucleotide
  Sense strand starting at position 3061 of SEQ ID NO: 2648
gagcaauguucuucucagc

SEQ ID NO: 205549 - RNA, 19 nt, Artificial Sequence
  Description of Artificial Sequence: Synthetic oligonucleotide
  Antisense strand to SEQ ID NO: 205548
gcugagaagaacauugcuc

SEQ ID NO: 205550 - RNA, 19 nt, Artificial Sequence
  Description of Artificial Sequence: Synthetic oligonucleotide
  Sense strand starting at position 3547 of SEQ ID NO: 2648
cgaucauaauaaucagcau

SEQ ID NO: 205551 - RNA, 19 nt, Artificial Sequence
  Description of Artificial Sequence: Synthetic oligonucleotide
  Antisense strand to SEQ ID NO: 205550
augcugauuauuaugaucg

SEQ ID NO: 205552 - RNA, 19 nt, Artificial Sequence
  Description of Artificial Sequence: Synthetic oligonucleotide
  Sense strand starting at position 3763 of SEQ ID NO: 2648
ggguuaggguuagcaguua

SEQ ID NO: 205553 - RNA, 19 nt, Artificial Sequence
  Description of Artificial Sequence: Synthetic oligonucleotide
  Antisense strand to SEQ ID NO: 205552
uaacugcuaacccuaaccc

SEQ ID NO: 205554 - RNA, 19 nt, Artificial Sequence
  Description of Artificial Sequence: Synthetic oligonucleotide
  Sense strand starting at position 3890 of SEQ ID NO: 2648
gacuguucccuuugcaaug

SEQ ID NO: 205555 - RNA, 19 nt, Artificial Sequence
  Description of Artificial Sequence: Synthetic oligonucleotide
  Antisense strand to SEQ ID NO: 205554
cauugcaaagggaacaguc

SEQ ID NO: 205556 - RNA, 19 nt, Artificial Sequence
  Description of Artificial Sequence: Synthetic oligonucleotide
  Sense strand starting at position 3914 of SEQ ID NO: 2648
gcucgcucuuuaguuuaaa

SEQ ID NO: 205557 - RNA, 19 nt, Artificial Sequence
  Description of Artificial Sequence: Synthetic oligonucleotide
  Antisense strand to SEQ ID NO: 205556
uuuaaacuaaagagcgagc

SEQ ID NO: 205558 - RNA, 19 nt, Artificial Sequence
  Description of Artificial Sequence: Synthetic oligonucleotide
  Sense strand starting at position 3915 of SEQ ID NO: 2648
cucgcucuuuaguuuaaau

SEQ ID NO: 205559 - RNA, 19 nt, Artificial Sequence
  Description of Artificial Sequence: Synthetic oligonucleotide
  Antisense strand to SEQ ID NO: 205558
auuuaaacuaaagagcgag

SEQ ID NO: 205560 - RNA, 19 nt, Artificial Sequence
  Description of Artificial Sequence: Synthetic oligonucleotide
  Sense strand starting at position 3917 of SEQ ID NO: 2648
cgcucuuuaguuuaaauga

SEQ ID NO: 205561 - RNA, 19 nt, Artificial Sequence
  Description of Artificial Sequence: Synthetic oligonucleotide
  Antisense strand to SEQ ID NO: 205560
ucauuuaaacuaaagagcg

SEQ ID NO: 205562 - RNA, 19 nt, Artificial Sequence
  Description of Artificial Sequence: Synthetic oligonucleotide
  Sense strand starting at position 3928 of SEQ ID NO: 2648
uuaaaugagucccagcuau

SEQ ID NO: 205563 - RNA, 19 nt, Artificial Sequence
  Description of Artificial Sequence: Synthetic oligonucleotide
  Antisense strand to SEQ ID NO: 205562
auagcugggacucauuuaa

SEQ ID NO: 205564 - RNA, 19 nt, Artificial Sequence
  Description of Artificial Sequence: Synthetic oligonucleotide
  Sense strand starting at position 212 of SEQ ID NO: 2649
aucccagcucggugaugau

SEQ ID NO: 205565 - RNA, 19 nt, Artificial Sequence
  Description of Artificial Sequence: Synthetic oligonucleotide
  Antisense strand to SEQ ID NO: 205564
aucaucaccgagcugggau

SEQ ID NO: 205566 - RNA, 19 nt, Artificial Sequence
  Description of Artificial Sequence: Synthetic oligonucleotide
  Sense strand starting at position 234 of SEQ ID NO: 2649
uuaacugaguuauugguau

SEQ ID NO: 205567 - RNA, 19 nt, Artificial Sequence
  Description of Artificial Sequence: Synthetic oligonucleotide
  Antisense strand to SEQ ID NO: 205566
auaccaauaacucaguuaa

SEQ ID NO: 205568 - RNA, 19 nt, Artificial Sequence
  Description of Artificial Sequence: Synthetic oligonucleotide
  Sense strand starting at position 654 of SEQ ID NO: 2649
gcuucuuaaaguggcaaga

SEQ ID NO: 205569 - RNA, 19 nt, Artificial Sequence
  Description of Artificial Sequence: Synthetic oligonucleotide
  Antisense strand to SEQ ID NO: 205568
ucuugccacuuuaagaagc

SEQ ID NO: 205570 - RNA, 19 nt, Artificial Sequence
  Description of Artificial Sequence: Synthetic oligonucleotide
  Sense strand starting at position 706 of SEQ ID NO: 2649
ggaaaugacugauuagcuu

SEQ ID NO: 205571 - RNA, 19 nt, Artificial Sequence
  Description of Artificial Sequence: Synthetic oligonucleotide
  Antisense strand to SEQ ID NO: 205570
aagcuaaucagucauuucc

SEQ ID NO: 205572 - RNA, 19 nt, Artificial Sequence
  Description of Artificial Sequence: Synthetic oligonucleotide
  Sense strand starting at position 730 of SEQ ID NO: 2649
gugauucuaagguggaaca

SEQ ID NO: 205573 - RNA, 19 nt, Artificial Sequence
  Description of Artificial Sequence: Synthetic oligonucleotide
  Antisense strand to SEQ ID NO: 205572
uguuccaccuuagaaucac

SEQ ID NO: 205574 - RNA, 19 nt, Artificial Sequence
  Description of Artificial Sequence: Synthetic oligonucleotide
  Sense strand starting at position 865 of SEQ ID NO: 2649
uuccauaccuguuucgaau

SEQ ID NO: 205575 - RNA, 19 nt, Artificial Sequence
  Description of Artificial Sequence: Synthetic oligonucleotide
  Antisense strand to SEQ ID NO: 205574
auucgaaacagguauggaa

SEQ ID NO: 205576 - RNA, 19 nt, Artificial Sequence
  Description of Artificial Sequence: Synthetic oligonucleotide
  Sense strand starting at position 871 of SEQ ID NO: 2649
accuguuucgaaugagcaa

SEQ ID NO: 205577 - RNA, 19 nt, Artificial Sequence
  Description of Artificial Sequence: Synthetic oligonucleotide
  Antisense strand to SEQ ID NO: 205576
uugcucauucgaaacaggu

SEQ ID NO: 205578 - RNA, 19 nt, Artificial Sequence
  Description of Artificial Sequence: Synthetic oligonucleotide
  Sense strand starting at position 872 of SEQ ID NO: 2649
ccuguuucgaaugagcaaa

SEQ ID NO: 205579 - RNA, 19 nt, Artificial Sequence
  Description of Artificial Sequence: Synthetic oligonucleotide
  Antisense strand to SEQ ID NO: 205578
uuugcucauucgaaacagg

SEQ ID NO: 205580 - RNA, 19 nt, Artificial Sequence
  Description of Artificial Sequence: Synthetic oligonucleotide
  Sense strand starting at position 1053 of SEQ ID NO: 2649
gcagucauguguccuugag

SEQ ID NO: 205581 - RNA, 19 nt, Artificial Sequence
  Description of Artificial Sequence: Synthetic oligonucleotide
  Antisense strand to SEQ ID NO: 205580
cucaaggacacaugacugc

SEQ ID NO: 205582 - RNA, 19 nt, Artificial Sequence
  Description of Artificial Sequence: Synthetic oligonucleotide
  Sense strand starting at position 1075 of SEQ ID NO: 2649
acuugugaaccauaaaugu

SEQ ID NO: 205583 - RNA, 19 nt, Artificial Sequence
  Description of Artificial Sequence: Synthetic oligonucleotide
  Antisense strand to SEQ ID NO: 205582
acauuuaugguucacaagu

SEQ ID NO: 205584 - RNA, 19 nt, Artificial Sequence
  Description of Artificial Sequence: Synthetic oligonucleotide
  Sense strand starting at position 1140 of SEQ ID NO: 2649
agauuaugguuccuaaagu

SEQ ID NO: 205585 - RNA, 19 nt, Artificial Sequence
  Description of Artificial Sequence: Synthetic oligonucleotide
  Antisense strand to SEQ ID NO: 205584
acuuuaggaaccauaaucu

SEQ ID NO: 205586 - RNA, 19 nt, Artificial Sequence
  Description of Artificial Sequence: Synthetic oligonucleotide
  Sense strand starting at position 1169 of SEQ ID NO: 2649
gagcccagcgaucagauau

SEQ ID NO: 205587 - RNA, 19 nt, Artificial Sequence
  Description of Artificial Sequence: Synthetic oligonucleotide
  Antisense strand to SEQ ID NO: 205586
auaucugaucgcugggcuc

SEQ ID NO: 205588 - RNA, 19 nt, Artificial Sequence
  Description of Artificial Sequence: Synthetic oligonucleotide
  Sense strand starting at position 1303 of SEQ ID NO: 2649
gcauuacuccuuuaagagc

SEQ ID NO: 205589 - RNA, 19 nt, Artificial Sequence
  Description of Artificial Sequence: Synthetic oligonucleotide
  Antisense strand to SEQ ID NO: 205588
gcucuuaaaggaguaaugc

SEQ ID NO: 205590 - RNA, 19 nt, Artificial Sequence
  Description of Artificial Sequence: Synthetic oligonucleotide
  Sense strand starting at position 1393 of SEQ ID NO: 2649
aagucaacuugguugcuaa

SEQ ID NO: 205591 - RNA, 19 nt, Artificial Sequence
  Description of Artificial Sequence: Synthetic oligonucleotide
  Antisense strand to SEQ ID NO: 205590
uuagcaaccaaguugacuu

SEQ ID NO: 205592 - RNA, 19 nt, Artificial Sequence
  Description of Artificial Sequence: Synthetic oligonucleotide
  Sense strand starting at position 1502 of SEQ ID NO: 2649
uacguuaagccacgaaaca

SEQ ID NO: 205593 - RNA, 19 nt, Artificial Sequence
  Description of Artificial Sequence: Synthetic oligonucleotide
  Antisense strand to SEQ ID NO: 205592
uguuucguggcuuaacgua

SEQ ID NO: 205594 - RNA, 19 nt, Artificial Sequence
  Description of Artificial Sequence: Synthetic oligonucleotide
  Sense strand starting at position 1632 of SEQ ID NO: 2649
cgcacuugugcgagugcaa

SEQ ID NO: 205595 - RNA, 19 nt, Artificial Sequence
  Description of Artificial Sequence: Synthetic oligonucleotide
  Antisense strand to SEQ ID NO: 205594
uugcacucgcacaagugcg

SEQ ID NO: 205596 - RNA, 19 nt, Artificial Sequence
  Description of Artificial Sequence: Synthetic oligonucleotide
  Sense strand starting at position 1633 of SEQ ID NO: 2649
gcacuugugcgagugcaaa

SEQ ID NO: 205597 - RNA, 19 nt, Artificial Sequence
  Description of Artificial Sequence: Synthetic oligonucleotide
  Antisense strand to SEQ ID NO: 205596
uuugcacucgcacaagugc

SEQ ID NO: 205598 - RNA, 19 nt, Artificial Sequence
  Description of Artificial Sequence: Synthetic oligonucleotide
  Sense strand starting at position 2156 of SEQ ID NO: 2649
gaugcuuggccacggagaa

SEQ ID NO: 205599 - RNA, 19 nt, Artificial Sequence
  Description of Artificial Sequence: Synthetic oligonucleotide
  Antisense strand to SEQ ID NO: 205598
uucuccguggccaagcauc

SEQ ID NO: 205600 - RNA, 19 nt, Artificial Sequence
  Description of Artificial Sequence: Synthetic oligonucleotide
  Sense strand starting at position 2458 of SEQ ID NO: 2649
uaaagugggcuuuggaauu

SEQ ID NO: 205601 - RNA, 19 nt, Artificial Sequence
  Description of Artificial Sequence: Synthetic oligonucleotide
  Antisense strand to SEQ ID NO: 205600
aauuccaaagcccacuuua

SEQ ID NO: 205602 - RNA, 19 nt, Artificial Sequence
  Description of Artificial Sequence: Synthetic oligonucleotide
  Sense strand starting at position 2492 of SEQ ID NO: 2649
ugcucuuaaggaugccuua

SEQ ID NO: 205603 - RNA, 19 nt, Artificial Sequence
  Description of Artificial Sequence: Synthetic oligonucleotide
  Antisense strand to SEQ ID NO: 205602
uaaggcauccuuaagagca

SEQ ID NO: 205604 - RNA, 19 nt, Artificial Sequence
  Description of Artificial Sequence: Synthetic oligonucleotide
  Sense strand starting at position 2524 of SEQ ID NO: 2649
uugagauaguuugaaagau

SEQ ID NO: 205605 - RNA, 19 nt, Artificial Sequence
  Description of Artificial Sequence: Synthetic oligonucleotide
  Antisense strand to SEQ ID NO: 205604
aucuuucaaacuaucucaa

SEQ ID NO: 205606 - RNA, 19 nt, Artificial Sequence
  Description of Artificial Sequence: Synthetic oligonucleotide
  Sense strand starting at position 2675 of SEQ ID NO: 2649
ucuguaaucugggcacacu

SEQ ID NO: 205607 - RNA, 19 nt, Artificial Sequence
  Description of Artificial Sequence: Synthetic oligonucleotide
  Antisense strand to SEQ ID NO: 205606
agugugcccagauuacaga

SEQ ID NO: 205608 - RNA, 19 nt, Artificial Sequence
  Description of Artificial Sequence: Synthetic oligonucleotide
  Sense strand starting at position 2676 of SEQ ID NO: 2649
cuguaaucugggcacacuu

SEQ ID NO: 205609 - RNA, 19 nt, Artificial Sequence
  Description of Artificial Sequence: Synthetic oligonucleotide
  Antisense strand to SEQ ID NO: 205608
aagugugcccagauuacag

SEQ ID NO: 205610 - RNA, 19 nt, Artificial Sequence
  Description of Artificial Sequence: Synthetic oligonucleotide
  Sense strand starting at position 3359 of SEQ ID NO: 2649
gaagucuucuaacauugag

SEQ ID NO: 205611 - RNA, 19 nt, Artificial Sequence
  Description of Artificial Sequence: Synthetic oligonucleotide
  Antisense strand to SEQ ID NO: 205610
cucaauguuagaagacuuc

SEQ ID NO: 205612 - RNA, 19 nt, Artificial Sequence
  Description of Artificial Sequence: Synthetic oligonucleotide
  Sense strand starting at position 3362 of SEQ ID NO: 2649
gucuucuaacauugagcua

SEQ ID NO: 205613 - RNA, 19 nt, Artificial Sequence
  Description of Artificial Sequence: Synthetic oligonucleotide
  Antisense strand to SEQ ID NO: 205612
uagcucaauguuagaagac

SEQ ID NO: 205614 - RNA, 19 nt, Artificial Sequence
  Description of Artificial Sequence: Synthetic oligonucleotide
  Sense strand starting at position 3365 of SEQ ID NO: 2649
uucuaacauugagcuagua

SEQ ID NO: 205615 - RNA, 19 nt, Artificial Sequence
  Description of Artificial Sequence: Synthetic oligonucleotide
  Antisense strand to SEQ ID NO: 205614
uacuagcucaauguuagaa

SEQ ID NO: 205616 - RNA, 19 nt, Artificial Sequence
  Description of Artificial Sequence: Synthetic oligonucleotide
  Sense strand starting at position 3421 of SEQ ID NO: 2649
gugggucugaguuagauca

SEQ ID NO: 205617 - RNA, 19 nt, Artificial Sequence
  Description of Artificial Sequence: Synthetic oligonucleotide
  Antisense strand to SEQ ID NO: 205616
ugaucuaacucagacccac

SEQ ID NO: 205618 - RNA, 19 nt, Artificial Sequence
  Description of Artificial Sequence: Synthetic oligonucleotide
  Sense strand starting at position 3458 of SEQ ID NO: 2649
cagagagaaucagaaggau

SEQ ID NO: 205619 - RNA, 19 nt, Artificial Sequence
  Description of Artificial Sequence: Synthetic oligonucleotide
  Antisense strand to SEQ ID NO: 205618
auccuucugauucucucug

SEQ ID NO: 205620 - RNA, 19 nt, Artificial Sequence
  Description of Artificial Sequence: Synthetic oligonucleotide
  Sense strand starting at position 3470 of SEQ ID NO: 2649
gaaggauaauguuacacau

SEQ ID NO: 205621 - RNA, 19 nt, Artificial Sequence
  Description of Artificial Sequence: Synthetic oligonucleotide
  Antisense strand to SEQ ID NO: 205620
auguguaacauuauccuuc

SEQ ID NO: 205622 - RNA, 19 nt, Artificial Sequence
  Description of Artificial Sequence: Synthetic oligonucleotide
  Sense strand starting at position 3472 of SEQ ID NO: 2649
aggauaauguuacacaucu

SEQ ID NO: 205623 - RNA, 19 nt, Artificial Sequence
  Description of Artificial Sequence: Synthetic oligonucleotide
  Antisense strand to SEQ ID NO: 205622
agauguguaacauuauccu

SEQ ID NO: 205624 - RNA, 19 nt, Artificial Sequence
  Description of Artificial Sequence: Synthetic oligonucleotide
  Sense strand starting at position 3509 of SEQ ID NO: 2649
cuucuaaacccuugaggaa

SEQ ID NO: 205625 - RNA, 19 nt, Artificial Sequence
  Description of Artificial Sequence: Synthetic oligonucleotide
  Antisense strand to SEQ ID NO: 205624
uuccucaaggguuuagaag

SEQ ID NO: 205626 - RNA, 19 nt, Artificial Sequence
  Description of Artificial Sequence: Synthetic oligonucleotide
  Sense strand starting at position 3633 of SEQ ID NO: 2649
agccaauauucuguuugga

SEQ ID NO: 205627 - RNA, 19 nt, Artificial Sequence
  Description of Artificial Sequence: Synthetic oligonucleotide
  Antisense strand to SEQ ID NO: 205626
uccaaacagaauauuggcu

SEQ ID NO: 205628 - RNA, 19 nt, Artificial Sequence
  Description of Artificial Sequence: Synthetic oligonucleotide
  Sense strand starting at position 3635 of SEQ ID NO: 2649
ccaauauucuguuuggauu

SEQ ID NO: 205629 - RNA, 19 nt, Artificial Sequence
  Description of Artificial Sequence: Synthetic oligonucleotide
  Antisense strand to SEQ ID NO: 205628
aauccaaacagaauauugg

SEQ ID NO: 205630 - RNA, 19 nt, Artificial Sequence
  Description of Artificial Sequence: Synthetic oligonucleotide
  Sense strand starting at position 3636 of SEQ ID NO: 2649
caauauucuguuuggauug

SEQ ID NO: 205631 - RNA, 19 nt, Artificial Sequence
  Description of Artificial Sequence: Synthetic oligonucleotide
  Antisense strand to SEQ ID NO: 205630
caauccaaacagaauauug

SEQ ID NO: 205632 - RNA, 19 nt, Artificial Sequence
  Description of Artificial Sequence: Synthetic oligonucleotide
  Sense strand starting at position 3641 of SEQ ID NO: 2649
uucuguuuggauugguuua

SEQ ID NO: 205633 - RNA, 19 nt, Artificial Sequence
  Description of Artificial Sequence: Synthetic oligonucleotide
  Antisense strand to SEQ ID NO: 205632
uaaaccaauccaaacagaa

SEQ ID NO: 205634 - RNA, 19 nt, Artificial Sequence
  Description of Artificial Sequence: Synthetic oligonucleotide
  Sense strand starting at position 3643 of SEQ ID NO: 2649
cuguuuggauugguuuaga

SEQ ID NO: 205635 - RNA, 19 nt, Artificial Sequence
  Description of Artificial Sequence: Synthetic oligonucleotide
  Antisense strand to SEQ ID NO: 205634
ucuaaaccaauccaaacag

SEQ ID NO: 205636 - RNA, 19 nt, Artificial Sequence
  Description of Artificial Sequence: Synthetic oligonucleotide
  Sense strand starting at position 3648 of SEQ ID NO: 2649
uggauugguuuagaacaua

SEQ ID NO: 205637 - RNA, 19 nt, Artificial Sequence
  Description of Artificial Sequence: Synthetic oligonucleotide
  Antisense strand to SEQ ID NO: 205636
uauguucuaaaccaaucca

SEQ ID NO: 205638 - RNA, 19 nt, Artificial Sequence
  Description of Artificial Sequence: Synthetic oligonucleotide
  Sense strand starting at position 3673 of SEQ ID NO: 2649
acauaauggcuguaaucuu

SEQ ID NO: 205639 - RNA, 19 nt, Artificial Sequence
  Description of Artificial Sequence: Synthetic oligonucleotide
  Antisense strand to SEQ ID NO: 205638
aagauuacagccauuaugu

SEQ ID NO: 205640 - RNA, 19 nt, Artificial Sequence
  Description of Artificial Sequence: Synthetic oligonucleotide
  Sense strand starting at position 3688 of SEQ ID NO: 2649
ucuuauuuauccuguggag

SEQ ID NO: 205641 - RNA, 19 nt, Artificial Sequence
  Description of Artificial Sequence: Synthetic oligonucleotide
  Antisense strand to SEQ ID NO: 205640
cuccacaggauaaauaaga

SEQ ID NO: 205642 - RNA, 19 nt, Artificial Sequence
  Description of Artificial Sequence: Synthetic oligonucleotide
  Sense strand starting at position 3691 of SEQ ID NO: 2649
uauuuauccuguggagauc

SEQ ID NO: 205643 - RNA, 19 nt, Artificial Sequence
  Description of Artificial Sequence: Synthetic oligonucleotide
  Antisense strand to SEQ ID NO: 205642
gaucuccacaggauaaaua

SEQ ID NO: 205644 - RNA, 19 nt, Artificial Sequence
  Description of Artificial Sequence: Synthetic oligonucleotide
  Sense strand starting at position 20 of SEQ ID NO: 2650
ugguguaauuaauuauggu

SEQ ID NO: 205645 - RNA, 19 nt, Artificial Sequence
  Description of Artificial Sequence: Synthetic oligonucleotide
  Antisense strand to SEQ ID NO: 205644
accauaauuaauuacacca

SEQ ID NO: 205646 - RNA, 19 nt, Artificial Sequence
  Description of Artificial Sequence: Synthetic oligonucleotide
  Sense strand starting at position 21 of SEQ ID NO: 2650
gguguaauuaauuauggua

SEQ ID NO: 205647 - RNA, 19 nt, Artificial Sequence
  Description of Artificial Sequence: Synthetic oligonucleotide
  Antisense strand to SEQ ID NO: 205646
uaccauaauuaauuacacc

SEQ ID NO: 205648 - RNA, 19 nt, Artificial Sequence
  Description of Artificial Sequence: Synthetic oligonucleotide
  Sense strand starting at position 890 of SEQ ID NO: 2650
guaauaugcuauucuuggu

SEQ ID NO: 205649 - RNA, 19 nt, Artificial Sequence
  Description of Artificial Sequence: Synthetic oligonucleotide
  Antisense strand to SEQ ID NO: 205648
accaagaauagcauauuac

SEQ ID NO: 205650 - RNA, 19 nt, Artificial Sequence
  Description of Artificial Sequence: Synthetic oligonucleotide
  Sense strand starting at position 950 of SEQ ID NO: 2650
auauguaucuaucuagaca

SEQ ID NO: 205651 - RNA, 19 nt, Artificial Sequence
  Description of Artificial Sequence: Synthetic oligonucleotide
  Antisense strand to SEQ ID NO: 205650
ugucuagauagauacauau

SEQ ID NO: 205652 - RNA, 19 nt, Artificial Sequence
  Description of Artificial Sequence: Synthetic oligonucleotide
  Sense strand starting at position 982 of SEQ ID NO: 2650
ugucuauugcaucagaaga

SEQ ID NO: 205653 - RNA, 19 nt, Artificial Sequence
  Description of Artificial Sequence: Synthetic oligonucleotide
  Antisense strand to SEQ ID NO: 205652
ucuucugaugcaauagaca

SEQ ID NO: 205654 - RNA, 19 nt, Artificial Sequence
  Description of Artificial Sequence: Synthetic oligonucleotide
  Sense strand starting at position 1032 of SEQ ID NO: 2650
gagggagacuuacaucuca

SEQ ID NO: 205655 - RNA, 19 nt, Artificial Sequence
  Description of Artificial Sequence: Synthetic oligonucleotide
  Antisense strand to SEQ ID NO: 205654
ugagauguaagucucccuc

SEQ ID NO: 205656 - RNA, 19 nt, Artificial Sequence
  Description of Artificial Sequence: Synthetic oligonucleotide
  Sense strand starting at position 1081 of SEQ ID NO: 2650
guacuaguauuacuuccua

SEQ ID NO: 205657 - RNA, 19 nt, Artificial Sequence
  Description of Artificial Sequence: Synthetic oligonucleotide
  Antisense strand to SEQ ID NO: 205656
uaggaaguaauacuaguac

SEQ ID NO: 205658 - RNA, 19 nt, Artificial Sequence
  Description of Artificial Sequence: Synthetic oligonucleotide
  Sense strand starting at position 1167 of SEQ ID NO: 2650
gaaagaucugcuggguauu

SEQ ID NO: 205659 - RNA, 19 nt, Artificial Sequence
  Description of Artificial Sequence: Synthetic oligonucleotide
  Antisense strand to SEQ ID NO: 205658
aauacccagcagaucuuuc

SEQ ID NO: 205660 - RNA, 19 nt, Artificial Sequence
  Description of Artificial Sequence: Synthetic oligonucleotide
  Sense strand starting at position 1180 of SEQ ID NO: 2650
gguauucucuucucagcaa

SEQ ID NO: 205661 - RNA, 19 nt, Artificial Sequence
  Description of Artificial Sequence: Synthetic oligonucleotide
  Antisense strand to SEQ ID NO: 205660
uugcugagaagagaauacc

SEQ ID NO: 205662 - RNA, 19 nt, Artificial Sequence
  Description of Artificial Sequence: Synthetic oligonucleotide
  Sense strand starting at position 1238 of SEQ ID NO: 2650
acugguguuggaagcguua

SEQ ID NO: 205663 - RNA, 19 nt, Artificial Sequence
  Description of Artificial Sequence: Synthetic oligonucleotide
  Antisense strand to SEQ ID NO: 205662
uaacgcuuccaacaccagu

SEQ ID NO: 205664 - RNA, 19 nt, Artificial Sequence
  Description of Artificial Sequence: Synthetic oligonucleotide
  Sense strand starting at position 1290 of SEQ ID NO: 2650
gaccuaaauguuuggugga

SEQ ID NO: 205665 - RNA, 19 nt, Artificial Sequence
  Description of Artificial Sequence: Synthetic oligonucleotide
  Antisense strand to SEQ ID NO: 205664
uccaccaaacauuuagguc

SEQ ID NO: 205666 - RNA, 19 nt, Artificial Sequence
  Description of Artificial Sequence: Synthetic oligonucleotide
  Sense strand starting at position 1292 of SEQ ID NO: 2650
ccuaaauguuugguggauu

SEQ ID NO: 205667 - RNA, 19 nt, Artificial Sequence
  Description of Artificial Sequence: Synthetic oligonucleotide
  Antisense strand to SEQ ID NO: 205666
aauccaccaaacauuuagg

SEQ ID NO: 205668 - RNA, 19 nt, Artificial Sequence
  Description of Artificial Sequence: Synthetic oligonucleotide
  Sense strand starting at position 1471 of SEQ ID NO: 2650
aggaaacuguuacucagau

SEQ ID NO: 205669 - RNA, 19 nt, Artificial Sequence
  Description of Artificial Sequence: Synthetic oligonucleotide
  Antisense strand to SEQ ID NO: 205668
aucugaguaacaguuuccu

SEQ ID NO: 205670 - RNA, 19 nt, Artificial Sequence
  Description of Artificial Sequence: Synthetic oligonucleotide
  Sense strand starting at position 1472 of SEQ ID NO: 2650
ggaaacuguuacucagauu

SEQ ID NO: 205671 - RNA, 19 nt, Artificial Sequence
  Description of Artificial Sequence: Synthetic oligonucleotide
  Antisense strand to SEQ ID NO: 205670
aaucugaguaacaguuucc

SEQ ID NO: 205672 - RNA, 19 nt, Artificial Sequence
  Description of Artificial Sequence: Synthetic oligonucleotide
  Sense strand starting at position 1520 of SEQ ID NO: 2650
ucacaaacguggguuugua

SEQ ID NO: 205673 - RNA, 19 nt, Artificial Sequence
  Description of Artificial Sequence: Synthetic oligonucleotide
  Antisense strand to SEQ ID NO: 205672
uacaaacccacguuuguga

SEQ ID NO: 205674 - RNA, 19 nt, Artificial Sequence
  Description of Artificial Sequence: Synthetic oligonucleotide
  Sense strand starting at position 2007 of SEQ ID NO: 2650
uguaacgacaaucguuauu

SEQ ID NO: 205675 - RNA, 19 nt, Artificial Sequence
  Description of Artificial Sequence: Synthetic oligonucleotide
  Antisense strand to SEQ ID NO: 205674
aauaacgauugucguuaca

SEQ ID NO: 205676 - RNA, 19 nt, Artificial Sequence
  Description of Artificial Sequence: Synthetic oligonucleotide
  Sense strand starting at position 2012 of SEQ ID NO: 2650
cgacaaucguuauugguca

SEQ ID NO: 205677 - RNA, 19 nt, Artificial Sequence
  Description of Artificial Sequence: Synthetic oligonucleotide
  Antisense strand to SEQ ID NO: 205676
ugaccaauaacgauugucg

SEQ ID NO: 205678 - RNA, 19 nt, Artificial Sequence
  Description of Artificial Sequence: Synthetic oligonucleotide
  Sense strand starting at position 2014 of SEQ ID NO: 2650
acaaucguuauuggucaga

SEQ ID NO: 205679 - RNA, 19 nt, Artificial Sequence
  Description of Artificial Sequence: Synthetic oligonucleotide
  Antisense strand to SEQ ID NO: 205678
ucugaccaauaacgauugu

SEQ ID NO: 205680 - RNA, 19 nt, Artificial Sequence
  Description of Artificial Sequence: Synthetic oligonucleotide
  Sense strand starting at position 2243 of SEQ ID NO: 2650
ucccuucuggccugagaga

SEQ ID NO: 205681 - RNA, 19 nt, Artificial Sequence
  Description of Artificial Sequence: Synthetic oligonucleotide
  Antisense strand to SEQ ID NO: 205680
ucucucaggccagaaggga

SEQ ID NO: 205682 - RNA, 19 nt, Artificial Sequence
  Description of Artificial Sequence: Synthetic oligonucleotide
  Sense strand starting at position 2254 of SEQ ID NO: 2650
cugagagaguccuauuucu

SEQ ID NO: 205683 - RNA, 19 nt, Artificial Sequence
  Description of Artificial Sequence: Synthetic oligonucleotide
  Antisense strand to SEQ ID NO: 205682
agaaauaggacucucucag

SEQ ID NO: 205684 - RNA, 19 nt, Artificial Sequence
  Description of Artificial Sequence: Synthetic oligonucleotide
  Sense strand starting at position 2260 of SEQ ID NO: 2650
gaguccuauuucugaauag

SEQ ID NO: 205685 - RNA, 19 nt, Artificial Sequence
  Description of Artificial Sequence: Synthetic oligonucleotide
  Antisense strand to SEQ ID NO: 205684
cuauucagaaauaggacuc

SEQ ID NO: 205686 - RNA, 19 nt, Artificial Sequence
  Description of Artificial Sequence: Synthetic oligonucleotide
  Sense strand starting at position 2261 of SEQ ID NO: 2650
aguccuauuucugaauaga

SEQ ID NO: 205687 - RNA, 19 nt, Artificial Sequence
  Description of Artificial Sequence: Synthetic oligonucleotide
  Antisense strand to SEQ ID NO: 205686
ucuauucagaaauaggacu

SEQ ID NO: 205688 - RNA, 19 nt, Artificial Sequence
  Description of Artificial Sequence: Synthetic oligonucleotide
  Sense strand starting at position 2473 of SEQ ID NO: 2650
acauuauuagcagauguca

SEQ ID NO: 205689 - RNA, 19 nt, Artificial Sequence
  Description of Artificial Sequence: Synthetic oligonucleotide
  Antisense strand to SEQ ID NO: 205688
ugacaucugcuaauaaugu

SEQ ID NO: 205690 - RNA, 19 nt, Artificial Sequence
  Description of Artificial Sequence: Synthetic oligonucleotide
  Sense strand starting at position 2484 of SEQ ID NO: 2650
agaugucagcugcgaauuu

SEQ ID NO: 205691 - RNA, 19 nt, Artificial Sequence
  Description of Artificial Sequence: Synthetic oligonucleotide
  Antisense strand to SEQ ID NO: 205690
aaauucgcagcugacaucu

SEQ ID NO: 205692 - RNA, 19 nt, Artificial Sequence
  Description of Artificial Sequence: Synthetic oligonucleotide
  Sense strand starting at position 2646 of SEQ ID NO: 2650
uguauaucuuaguucuggu

SEQ ID NO: 205693 - RNA, 19 nt, Artificial Sequence
  Description of Artificial Sequence: Synthetic oligonucleotide
  Antisense strand to SEQ ID NO: 205692
accagaacuaagauauaca

SEQ ID NO: 205694 - RNA, 19 nt, Artificial Sequence
  Description of Artificial Sequence: Synthetic oligonucleotide
  Sense strand starting at position 2655 of SEQ ID NO: 2650
uaguucugguccuuggaau

SEQ ID NO: 205695 - RNA, 19 nt, Artificial Sequence
  Description of Artificial Sequence: Synthetic oligonucleotide
  Antisense strand to SEQ ID NO: 205694
auuccaaggaccagaacua

SEQ ID NO: 205696 - RNA, 19 nt, Artificial Sequence
  Description of Artificial Sequence: Synthetic oligonucleotide
  Sense strand starting at position 2656 of SEQ ID NO: 2650
aguucugguccuuggaauc

SEQ ID NO: 205697 - RNA, 19 nt, Artificial Sequence
  Description of Artificial Sequence: Synthetic oligonucleotide
  Antisense strand to SEQ ID NO: 205696
gauuccaaggaccagaacu

SEQ ID NO: 205698 - RNA, 19 nt, Artificial Sequence
  Description of Artificial Sequence: Synthetic oligonucleotide
  Sense strand starting at position 2790 of SEQ ID NO: 2650
acccuagucuggcuacuua

SEQ ID NO: 205699 - RNA, 19 nt, Artificial Sequence
  Description of Artificial Sequence: Synthetic oligonucleotide
  Antisense strand to SEQ ID NO: 205698
uaaguagccagacuagggu

SEQ ID NO: 205700 - RNA, 19 nt, Artificial Sequence
  Description of Artificial Sequence: Synthetic oligonucleotide
  Sense strand starting at position 2835 of SEQ ID NO: 2650
ugggaaaccuuagucaacu

SEQ ID NO: 205701 - RNA, 19 nt, Artificial Sequence
  Description of Artificial Sequence: Synthetic oligonucleotide
  Antisense strand to SEQ ID NO: 205700
aguugacuaagguuuccca

SEQ ID NO: 205702 - RNA, 19 nt, Artificial Sequence
  Description of Artificial Sequence: Synthetic oligonucleotide
  Sense strand starting at position 2836 of SEQ ID NO: 2650
gggaaaccuuagucaacua

SEQ ID NO: 205703 - RNA, 19 nt, Artificial Sequence
  Description of Artificial Sequence: Synthetic oligonucleotide
  Antisense strand to SEQ ID NO: 205702
uaguugacuaagguuuccc

SEQ ID NO: 205704 - RNA, 19 nt, Artificial Sequence
  Description of Artificial Sequence: Synthetic oligonucleotide
  Sense strand starting at position 2847 of SEQ ID NO: 2650
gucaacuauuuauaagaga

SEQ ID NO: 205705 - RNA, 19 nt, Artificial Sequence
  Description of Artificial Sequence: Synthetic oligonucleotide
  Antisense strand to SEQ ID NO: 205704
ucucuuauaaauaguugac

SEQ ID NO: 205706 - RNA, 19 nt, Artificial Sequence
  Description of Artificial Sequence: Synthetic oligonucleotide
  Sense strand starting at position 3205 of SEQ ID NO: 2650
aggacuaauguuuguagua

SEQ ID NO: 205707 - RNA, 19 nt, Artificial Sequence
  Description of Artificial Sequence: Synthetic oligonucleotide
  Antisense strand to SEQ ID NO: 205706
uacuacaaacauuaguccu

SEQ ID NO: 205708 - RNA, 19 nt, Artificial Sequence
  Description of Artificial Sequence: Synthetic oligonucleotide
  Sense strand starting at position 3206 of SEQ ID NO: 2650
ggacuaauguuuguaguau

SEQ ID NO: 205709 - RNA, 19 nt, Artificial Sequence
  Description of Artificial Sequence: Synthetic oligonucleotide
  Antisense strand to SEQ ID NO: 205708
auacuacaaacauuagucc

SEQ ID NO: 205710 - RNA, 19 nt, Artificial Sequence
  Description of Artificial Sequence: Synthetic oligonucleotide
  Sense strand starting at position 3384 of SEQ ID NO: 2650
cugaauucuccugggugga

SEQ ID NO: 205711 - RNA, 19 nt, Artificial Sequence
  Description of Artificial Sequence: Synthetic oligonucleotide
  Antisense strand to SEQ ID NO: 205710
uccacccaggagaauucag

SEQ ID NO: 205712 - RNA, 19 nt, Artificial Sequence
  Description of Artificial Sequence: Synthetic oligonucleotide
  Sense strand starting at position 3385 of SEQ ID NO: 2650
ugaauucuccuggguggaa

SEQ ID NO: 205713 - RNA, 19 nt, Artificial Sequence
  Description of Artificial Sequence: Synthetic oligonucleotide
  Antisense strand to SEQ ID NO: 205712
uuccacccaggagaauuca

SEQ ID NO: 205714 - RNA, 19 nt, Artificial Sequence
  Description of Artificial Sequence: Synthetic oligonucleotide
  Sense strand starting at position 3386 of SEQ ID NO: 2650
gaauucuccuggguggaaa

SEQ ID NO: 205715 - RNA, 19 nt, Artificial Sequence
  Description of Artificial Sequence: Synthetic oligonucleotide
  Antisense strand to SEQ ID NO: 205714
uuuccacccaggagaauuc

SEQ ID NO: 205716 - RNA, 19 nt, Artificial Sequence
  Description of Artificial Sequence: Synthetic oligonucleotide
  Sense strand starting at position 3644 of SEQ ID NO: 2650
gccugaaucagguauagca

SEQ ID NO: 205717 - RNA, 19 nt, Artificial Sequence
  Description of Artificial Sequence: Synthetic oligonucleotide
  Antisense strand to SEQ ID NO: 205716
ugcuauaccugauucaggc

SEQ ID NO: 205718 - RNA, 19 nt, Artificial Sequence
  Description of Artificial Sequence: Synthetic oligonucleotide
  Sense strand starting at position 3654 of SEQ ID NO: 2650
gguauagcaccacaugaua

SEQ ID NO: 205719 - RNA, 19 nt, Artificial Sequence
  Description of Artificial Sequence: Synthetic oligonucleotide
  Antisense strand to SEQ ID NO: 205718
uaucauguggugcuauacc

SEQ ID NO: 205720 - RNA, 19 nt, Artificial Sequence
  Description of Artificial Sequence: Synthetic oligonucleotide
  Sense strand starting at position 3697 of SEQ ID NO: 2650
auguaagcauuccuuugua

SEQ ID NO: 205721 - RNA, 19 nt, Artificial Sequence
  Description of Artificial Sequence: Synthetic oligonucleotide
  Antisense strand to SEQ ID NO: 205720
uacaaaggaaugcuuacau

SEQ ID NO: 205722 - RNA, 19 nt, Artificial Sequence
  Description of Artificial Sequence: Synthetic oligonucleotide
  Sense strand starting at position 3718 of SEQ ID NO: 2650
gacuucgaguccuuagaca

SEQ ID NO: 205723 - RNA, 19 nt, Artificial Sequence
  Description of Artificial Sequence: Synthetic oligonucleotide
  Antisense strand to SEQ ID NO: 205722
ugucuaaggacucgaaguc

SEQ ID NO: 205724 - RNA, 19 nt, Artificial Sequence
  Description of Artificial Sequence: Synthetic oligonucleotide
  Sense strand starting at position 674 of SEQ ID NO: 2651
gucugaaggcauuaaguua

SEQ ID NO: 205725 - RNA, 19 nt, Artificial Sequence
  Description of Artificial Sequence: Synthetic oligonucleotide
  Antisense strand to SEQ ID NO: 205724
uaacuuaaugccuucagac

SEQ ID NO: 205726 - RNA, 19 nt, Artificial Sequence
  Description of Artificial Sequence: Synthetic oligonucleotide
  Sense strand starting at position 738 of SEQ ID NO: 2651
cuguguugcccugauuauc

SEQ ID NO: 205727 - RNA, 19 nt, Artificial Sequence
  Description of Artificial Sequence: Synthetic oligonucleotide
  Antisense strand to SEQ ID NO: 205726
gauaaucagggcaacacag

SEQ ID NO: 205728 - RNA, 19 nt, Artificial Sequence
  Description of Artificial Sequence: Synthetic oligonucleotide
  Sense strand starting at position 765 of SEQ ID NO: 2651
augcuacaugcuggaaaga

SEQ ID NO: 205729 - RNA, 19 nt, Artificial Sequence
  Description of Artificial Sequence: Synthetic oligonucleotide
  Antisense strand to SEQ ID NO: 205728
ucuuuccagcauguagcau

SEQ ID NO: 205730 - RNA, 19 nt, Artificial Sequence
  Description of Artificial Sequence: Synthetic oligonucleotide
  Sense strand starting at position 793 of SEQ ID NO: 2651
gcagguuucuaagucuuua

SEQ ID NO: 205731 - RNA, 19 nt, Artificial Sequence
  Description of Artificial Sequence: Synthetic oligonucleotide
  Antisense strand to SEQ ID NO: 205730
uaaagacuuagaaaccugc

SEQ ID NO: 205732 - RNA, 19 nt, Artificial Sequence
  Description of Artificial Sequence: Synthetic oligonucleotide
  Sense strand starting at position 797 of SEQ ID NO: 2651
guuucuaagucuuuaaccu

SEQ ID NO: 205733 - RNA, 19 nt, Artificial Sequence
  Description of Artificial Sequence: Synthetic oligonucleotide
  Antisense strand to SEQ ID NO: 205732
agguuaaagacuuagaaac

SEQ ID NO: 205734 - RNA, 19 nt, Artificial Sequence
  Description of Artificial Sequence: Synthetic oligonucleotide
  Sense strand starting at position 844 of SEQ ID NO: 2651
gagacacuccuacguauag

SEQ ID NO: 205735 - RNA, 19 nt, Artificial Sequence
  Description of Artificial Sequence: Synthetic oligonucleotide
  Antisense strand to SEQ ID NO: 205734
cuauacguaggagugucuc

SEQ ID NO: 205736 - RNA, 19 nt, Artificial Sequence
  Description of Artificial Sequence: Synthetic oligonucleotide
  Sense strand starting at position 1322 of SEQ ID NO: 2651
aacucuuguguuugguaca

SEQ ID NO: 205737 - RNA, 19 nt, Artificial Sequence
  Description of Artificial Sequence: Synthetic oligonucleotide
  Antisense strand to SEQ ID NO: 205736
uguaccaaacacaagaguu

SEQ ID NO: 205738 - RNA, 19 nt, Artificial Sequence
  Description of Artificial Sequence: Synthetic oligonucleotide
  Sense strand starting at position 1327 of SEQ ID NO: 2651
uuguguuugguacacagga

SEQ ID NO: 205739 - RNA, 19 nt, Artificial Sequence
  Description of Artificial Sequence: Synthetic oligonucleotide
  Antisense strand to SEQ ID NO: 205738
uccuguguaccaaacacaa

SEQ ID NO: 205740 - RNA, 19 nt, Artificial Sequence
  Description of Artificial Sequence: Synthetic oligonucleotide
  Sense strand starting at position 1352 of SEQ ID NO: 2651
gcagguguccgguaacuac

SEQ ID NO: 205741 - RNA, 19 nt, Artificial Sequence
  Description of Artificial Sequence: Synthetic oligonucleotide
  Antisense strand to SEQ ID NO: 205740
guaguuaccggacaccugc

SEQ ID NO: 205742 - RNA, 19 nt, Artificial Sequence
  Description of Artificial Sequence: Synthetic oligonucleotide
  Sense strand starting at position 1365 of SEQ ID NO: 2651
aacuacuugcgagggaaga

SEQ ID NO: 205743 - RNA, 19 nt, Artificial Sequence
  Description of Artificial Sequence: Synthetic oligonucleotide
  Antisense strand to SEQ ID NO: 205742
ucuucccucgcaaguaguu

SEQ ID NO: 205744 - RNA, 19 nt, Artificial Sequence
  Description of Artificial Sequence: Synthetic oligonucleotide
  Sense strand starting at position 1366 of SEQ ID NO: 2651
acuacuugcgagggaagau

SEQ ID NO: 205745 - RNA, 19 nt, Artificial Sequence
  Description of Artificial Sequence: Synthetic oligonucleotide
  Antisense strand to SEQ ID NO: 205744
aucuucccucgcaaguagu

SEQ ID NO: 205746 - RNA, 19 nt, Artificial Sequence
  Description of Artificial Sequence: Synthetic oligonucleotide
  Sense strand starting at position 1375 of SEQ ID NO: 2651
gagggaagauacgaauuaa

SEQ ID NO: 205747 - RNA, 19 nt, Artificial Sequence
  Description of Artificial Sequence: Synthetic oligonucleotide
  Antisense strand to SEQ ID NO: 205746
uuaauucguaucuucccuc

SEQ ID NO: 205748 - RNA, 19 nt, Artificial Sequence
  Description of Artificial Sequence: Synthetic oligonucleotide
  Sense strand starting at position 1398 of SEQ ID NO: 2651
ggaauaaaguguuccaauc

SEQ ID NO: 205749 - RNA, 19 nt, Artificial Sequence
  Description of Artificial Sequence: Synthetic oligonucleotide
  Antisense strand to SEQ ID NO: 205748
gauuggaacacuuuauucc

SEQ ID NO: 205750 - RNA, 19 nt, Artificial Sequence
  Description of Artificial Sequence: Synthetic oligonucleotide
  Sense strand starting at position 1480 of SEQ ID NO: 2651
aggucuucagcgugaauaa

SEQ ID NO: 205751 - RNA, 19 nt, Artificial Sequence
  Description of Artificial Sequence: Synthetic oligonucleotide
  Antisense strand to SEQ ID NO: 205750
uuauucacgcugaagaccu

SEQ ID NO: 205752 - RNA, 19 nt, Artificial Sequence
  Description of Artificial Sequence: Synthetic oligonucleotide
  Sense strand starting at position 1481 of SEQ ID NO: 2651
ggucuucagcgugaauaaa

SEQ ID NO: 205753 - RNA, 19 nt, Artificial Sequence
  Description of Artificial Sequence: Synthetic oligonucleotide
  Antisense strand to SEQ ID NO: 205752
uuuauucacgcugaagacc

SEQ ID NO: 205754 - RNA, 19 nt, Artificial Sequence
  Description of Artificial Sequence: Synthetic oligonucleotide
  Sense strand starting at position 1742 of SEQ ID NO: 2651
gcgagcugucggaacagua

SEQ ID NO: 205755 - RNA, 19 nt, Artificial Sequence
  Description of Artificial Sequence: Synthetic oligonucleotide
  Antisense strand to SEQ ID NO: 205754
uacuguuccgacagcucgc

SEQ ID NO: 205756 - RNA, 19 nt, Artificial Sequence
  Description of Artificial Sequence: Synthetic oligonucleotide
  Sense strand starting at position 2079 of SEQ ID NO: 2651
gccggugguccagaucaga

SEQ ID NO: 205757 - RNA, 19 nt, Artificial Sequence
  Description of Artificial Sequence: Synthetic oligonucleotide
  Antisense strand to SEQ ID NO: 205756
ucugaucuggaccaccggc

SEQ ID NO: 205758 - RNA, 19 nt, Artificial Sequence
  Description of Artificial Sequence: Synthetic oligonucleotide
  Sense strand starting at position 2300 of SEQ ID NO: 2651
caggaaaguugauucucau

SEQ ID NO: 205759 - RNA, 19 nt, Artificial Sequence
  Description of Artificial Sequence: Synthetic oligonucleotide
  Antisense strand to SEQ ID NO: 205758
augagaaucaacuuuccug

SEQ ID NO: 205760 - RNA, 19 nt, Artificial Sequence
  Description of Artificial Sequence: Synthetic oligonucleotide
  Sense strand starting at position 2367 of SEQ ID NO: 2651
uguugccaacuuuaagaaa

SEQ ID NO: 205761 - RNA, 19 nt, Artificial Sequence
  Description of Artificial Sequence: Synthetic oligonucleotide
  Antisense strand to SEQ ID NO: 205760
uuucuuaaaguuggcaaca

SEQ ID NO: 205762 - RNA, 19 nt, Artificial Sequence
  Description of Artificial Sequence: Synthetic oligonucleotide
  Sense strand starting at position 2410 of SEQ ID NO: 2651
gaguuuauuugggcucagu

SEQ ID NO: 205763 - RNA, 19 nt, Artificial Sequence
  Description of Artificial Sequence: Synthetic oligonucleotide
  Antisense strand to SEQ ID NO: 205762
acugagcccaaauaaacuc

SEQ ID NO: 205764 - RNA, 19 nt, Artificial Sequence
  Description of Artificial Sequence: Synthetic oligonucleotide
  Sense strand starting at position 2419 of SEQ ID NO: 2651
ugggcucagugcuugagaa

SEQ ID NO: 205765 - RNA, 19 nt, Artificial Sequence
  Description of Artificial Sequence: Synthetic oligonucleotide
  Antisense strand to SEQ ID NO: 205764
uucucaagcacugagccca

SEQ ID NO: 205766 - RNA, 19 nt, Artificial Sequence
  Description of Artificial Sequence: Synthetic oligonucleotide
  Sense strand starting at position 2420 of SEQ ID NO: 2651
gggcucagugcuugagaau

SEQ ID NO: 205767 - RNA, 19 nt, Artificial Sequence
  Description of Artificial Sequence: Synthetic oligonucleotide
  Antisense strand to SEQ ID NO: 205766
auucucaagcacugagccc

SEQ ID NO: 205768 - RNA, 19 nt, Artificial Sequence
  Description of Artificial Sequence: Synthetic oligonucleotide
  Sense strand starting at position 2421 of SEQ ID NO: 2651
ggcucagugcuugagaaug

SEQ ID NO: 205769 - RNA, 19 nt, Artificial Sequence
  Description of Artificial Sequence: Synthetic oligonucleotide
  Antisense strand to SEQ ID NO: 205768
cauucucaagcacugagcc

SEQ ID NO: 205770 - RNA, 19 nt, Artificial Sequence
  Description of Artificial Sequence: Synthetic oligonucleotide
  Sense strand starting at position 2489 of SEQ ID NO: 2651
gcagcagucggaguagguu

SEQ ID NO: 205771 - RNA, 19 nt, Artificial Sequence
  Description of Artificial Sequence: Synthetic oligonucleotide
  Antisense strand to SEQ ID NO: 205770
aaccuacuccgacugcugc

SEQ ID NO: 205772 - RNA, 19 nt, Artificial Sequence
  Description of Artificial Sequence: Synthetic oligonucleotide
  Sense strand starting at position 2830 of SEQ ID NO: 2651
ggcagagcuuaacuuguuu

SEQ ID NO: 205773 - RNA, 19 nt, Artificial Sequence
  Description of Artificial Sequence: Synthetic oligonucleotide
  Antisense strand to SEQ ID NO: 205772
aaacaaguuaagcucugcc

SEQ ID NO: 205774 - RNA, 19 nt, Artificial Sequence
  Description of Artificial Sequence: Synthetic oligonucleotide
  Sense strand starting at position 2892 of SEQ ID NO: 2651
ugcuuucuuccuuguauca

SEQ ID NO: 205775 - RNA, 19 nt, Artificial Sequence
  Description of Artificial Sequence: Synthetic oligonucleotide
  Antisense strand to SEQ ID NO: 205774
ugauacaaggaagaaagca

SEQ ID NO: 205776 - RNA, 19 nt, Artificial Sequence
  Description of Artificial Sequence: Synthetic oligonucleotide
  Sense strand starting at position 2936 of SEQ ID NO: 2651
gggugaggcagcuaauaaa

SEQ ID NO: 205777 - RNA, 19 nt, Artificial Sequence
  Description of Artificial Sequence: Synthetic oligonucleotide
  Antisense strand to SEQ ID NO: 205776
uuuauuagcugccucaccc

SEQ ID NO: 205778 - RNA, 19 nt, Artificial Sequence
  Description of Artificial Sequence: Synthetic oligonucleotide
  Sense strand starting at position 3015 of SEQ ID NO: 2651
cacuucuguccgggucuaa

SEQ ID NO: 205779 - RNA, 19 nt, Artificial Sequence
  Description of Artificial Sequence: Synthetic oligonucleotide
  Antisense strand to SEQ ID NO: 205778
uuagacccggacagaagug

SEQ ID NO: 205780 - RNA, 19 nt, Artificial Sequence
  Description of Artificial Sequence: Synthetic oligonucleotide
  Sense strand starting at position 3019 of SEQ ID NO: 2651
ucuguccgggucuaauaaa

SEQ ID NO: 205781 - RNA, 19 nt, Artificial Sequence
  Description of Artificial Sequence: Synthetic oligonucleotide
  Antisense strand to SEQ ID NO: 205780
uuuauuagacccggacaga

SEQ ID NO: 205782 - RNA, 19 nt, Artificial Sequence
  Description of Artificial Sequence: Synthetic oligonucleotide
  Sense strand starting at position 3059 of SEQ ID NO: 2651
cagacagcucugggcuauu

SEQ ID NO: 205783 - RNA, 19 nt, Artificial Sequence
  Description of Artificial Sequence: Synthetic oligonucleotide
  Antisense strand to SEQ ID NO: 205782
aauagcccagagcugucug

SEQ ID NO: 205784 - RNA, 19 nt, Artificial Sequence
  Description of Artificial Sequence: Synthetic oligonucleotide
  Sense strand starting at position 3116 of SEQ ID NO: 2651
uguuguacacaauaaucua

SEQ ID NO: 205785 - RNA, 19 nt, Artificial Sequence
  Description of Artificial Sequence: Synthetic oligonucleotide
  Antisense strand to SEQ ID NO: 205784
uagauuauuguguacaaca

SEQ ID NO: 205786 - RNA, 19 nt, Artificial Sequence
  Description of Artificial Sequence: Synthetic oligonucleotide
  Sense strand starting at position 3188 of SEQ ID NO: 2651
ugaacugccuuauugugau

SEQ ID NO: 205787 - RNA, 19 nt, Artificial Sequence
  Description of Artificial Sequence: Synthetic oligonucleotide
  Antisense strand to SEQ ID NO: 205786
aucacaauaaggcaguuca

SEQ ID NO: 205788 - RNA, 19 nt, Artificial Sequence
  Description of Artificial Sequence: Synthetic oligonucleotide
  Sense strand starting at position 3252 of SEQ ID NO: 2651
aaaguaugcuuggauuuaa

SEQ ID NO: 205789 - RNA, 19 nt, Artificial Sequence
  Description of Artificial Sequence: Synthetic oligonucleotide
  Antisense strand to SEQ ID NO: 205788
uuaaauccaagcauacuuu

SEQ ID NO: 205790 - RNA, 19 nt, Artificial Sequence
  Description of Artificial Sequence: Synthetic oligonucleotide
  Sense strand starting at position 3338 of SEQ ID NO: 2651
cucaguucugguuagaguu

SEQ ID NO: 205791 - RNA, 19 nt, Artificial Sequence
  Description of Artificial Sequence: Synthetic oligonucleotide
  Antisense strand to SEQ ID NO: 205790
aacucuaaccagaacugag

SEQ ID NO: 205792 - RNA, 19 nt, Artificial Sequence
  Description of Artificial Sequence: Synthetic oligonucleotide
  Sense strand starting at position 3537 of SEQ ID NO: 2651
acaucaggauuauagugaa

SEQ ID NO: 205793 - RNA, 19 nt, Artificial Sequence
  Description of Artificial Sequence: Synthetic oligonucleotide
  Antisense strand to SEQ ID NO: 205792
uucacuauaauccugaugu

SEQ ID NO: 205794 - RNA, 19 nt, Artificial Sequence
  Description of Artificial Sequence: Synthetic oligonucleotide
  Sense strand starting at position 3601 of SEQ ID NO: 2651
ucaguuagugcuuaagucu

SEQ ID NO: 205795 - RNA, 19 nt, Artificial Sequence
  Description of Artificial Sequence: Synthetic oligonucleotide
  Antisense strand to SEQ ID NO: 205794
agacuuaagcacuaacuga

SEQ ID NO: 205796 - RNA, 19 nt, Artificial Sequence
  Description of Artificial Sequence: Synthetic oligonucleotide
  Sense strand starting at position 3604 of SEQ ID NO: 2651
guuagugcuuaagucuuga

SEQ ID NO: 205797 - RNA, 19 nt, Artificial Sequence
  Description of Artificial Sequence: Synthetic oligonucleotide
  Antisense strand to SEQ ID NO: 205796
ucaagacuuaagcacuaac

SEQ ID NO: 205798 - RNA, 19 nt, Artificial Sequence
  Description of Artificial Sequence: Synthetic oligonucleotide
  Sense strand starting at position 3625 of SEQ ID NO: 2651
ucccuaauuguuuauaggu

SEQ ID NO: 205799 - RNA, 19 nt, Artificial Sequence
  Description of Artificial Sequence: Synthetic oligonucleotide
  Antisense strand to SEQ ID NO: 205798
accuauaaacaauuaggga

SEQ ID NO: 205800 - RNA, 19 nt, Artificial Sequence
  Description of Artificial Sequence: Synthetic oligonucleotide
  Sense strand starting at position 3705 of SEQ ID NO: 2651
gguuauauauuggcuuaac

SEQ ID NO: 205801 - RNA, 19 nt, Artificial Sequence
  Description of Artificial Sequence: Synthetic oligonucleotide
  Antisense strand to SEQ ID NO: 205800
guuaagccaauauauaacc

SEQ ID NO: 205802 - RNA, 19 nt, Artificial Sequence
  Description of Artificial Sequence: Synthetic oligonucleotide
  Sense strand starting at position 3800 of SEQ ID NO: 2651
ggaagcagcuuuccauauu

SEQ ID NO: 205803 - RNA, 19 nt, Artificial Sequence
  Description of Artificial Sequence: Synthetic oligonucleotide
  Antisense strand to SEQ ID NO: 205802
aauauggaaagcugcuucc

SEQ ID NO: 205804 - RNA, 19 nt, Artificial Sequence
  Description of Artificial Sequence: Synthetic oligonucleotide
  Sense strand starting at position 440 of SEQ ID NO: 2652
ugaaaugauacagagcgua

SEQ ID NO: 205805 - RNA, 19 nt, Artificial Sequence
  Description of Artificial Sequence: Synthetic oligonucleotide
  Antisense strand to SEQ ID NO: 205804
uacgcucuguaucauuuca

SEQ ID NO: 205806 - RNA, 19 nt, Artificial Sequence
  Description of Artificial Sequence: Synthetic oligonucleotide
  Sense strand starting at position 474 of SEQ ID NO: 2652
agggaugacuugcaaauuu

SEQ ID NO: 205807 - RNA, 19 nt, Artificial Sequence
  Description of Artificial Sequence: Synthetic oligonucleotide
  Antisense strand to SEQ ID NO: 205806
aaauuugcaagucaucccu

SEQ ID NO: 205808 - RNA, 19 nt, Artificial Sequence
  Description of Artificial Sequence: Synthetic oligonucleotide
  Sense strand starting at position 758 of SEQ ID NO: 2652
cauguaagaugucuacaug

SEQ ID NO: 205809 - RNA, 19 nt, Artificial Sequence
  Description of Artificial Sequence: Synthetic oligonucleotide
  Antisense strand to SEQ ID NO: 205808
cauguagacaucuuacaug

SEQ ID NO: 205810 - RNA, 19 nt, Artificial Sequence
  Description of Artificial Sequence: Synthetic oligonucleotide
  Sense strand starting at position 761 of SEQ ID NO: 2652
guaagaugucuacauggua

SEQ ID NO: 205811 - RNA, 19 nt, Artificial Sequence
  Description of Artificial Sequence: Synthetic oligonucleotide
  Antisense strand to SEQ ID NO: 205810
uaccauguagacaucuuac

SEQ ID NO: 205812 - RNA, 19 nt, Artificial Sequence
  Description of Artificial Sequence: Synthetic oligonucleotide
  Sense strand starting at position 793 of SEQ ID NO: 2652
ggcagucagagguaaggau

SEQ ID NO: 205813 - RNA, 19 nt, Artificial Sequence
  Description of Artificial Sequence: Synthetic oligonucleotide
  Antisense strand to SEQ ID NO: 205812
auccuuaccucugacugcc

SEQ ID NO: 205814 - RNA, 19 nt, Artificial Sequence
  Description of Artificial Sequence: Synthetic oligonucleotide
  Sense strand starting at position 802 of SEQ ID NO: 2652
agguaaggauuuggaaauc

SEQ ID NO: 205815 - RNA, 19 nt, Artificial Sequence
  Description of Artificial Sequence: Synthetic oligonucleotide
  Antisense strand to SEQ ID NO: 205814
gauuuccaaauccuuaccu

SEQ ID NO: 205816 - RNA, 19 nt, Artificial Sequence
  Description of Artificial Sequence: Synthetic oligonucleotide
  Sense strand starting at position 828 of SEQ ID NO: 2652
uaggguuaaucauuaaagu

SEQ ID NO: 205817 - RNA, 19 nt, Artificial Sequence
  Description of Artificial Sequence: Synthetic oligonucleotide
  Antisense strand to SEQ ID NO: 205816
acuuuaaugauuaacccua

SEQ ID NO: 205818 - RNA, 19 nt, Artificial Sequence
  Description of Artificial Sequence: Synthetic oligonucleotide
  Sense strand starting at position 855 of SEQ ID NO: 2652
uggagaaccucacuguaua

SEQ ID NO: 205819 - RNA, 19 nt, Artificial Sequence
  Description of Artificial Sequence: Synthetic oligonucleotide
  Antisense strand to SEQ ID NO: 205818
uauacagugagguucucca

SEQ ID NO: 205820 - RNA, 19 nt, Artificial Sequence
  Description of Artificial Sequence: Synthetic oligonucleotide
  Sense strand starting at position 856 of SEQ ID NO: 2652
ggagaaccucacuguauaa

SEQ ID NO: 205821 - RNA, 19 nt, Artificial Sequence
  Description of Artificial Sequence: Synthetic oligonucleotide
  Antisense strand to SEQ ID NO: 205820
uuauacagugagguucucc

SEQ ID NO: 205822 - RNA, 19 nt, Artificial Sequence
  Description of Artificial Sequence: Synthetic oligonucleotide
  Sense strand starting at position 1008 of SEQ ID NO: 2652
ucaagaacccuggguguuu

SEQ ID NO: 205823 - RNA, 19 nt, Artificial Sequence
  Description of Artificial Sequence: Synthetic oligonucleotide
  Antisense strand to SEQ ID NO: 205822
aaacacccaggguucuuga

SEQ ID NO: 205824 - RNA, 19 nt, Artificial Sequence
  Description of Artificial Sequence: Synthetic oligonucleotide
  Sense strand starting at position 1062 of SEQ ID NO: 2652
ccggagagguggucagaaa

SEQ ID NO: 205825 - RNA, 19 nt, Artificial Sequence
  Description of Artificial Sequence: Synthetic oligonucleotide
  Antisense strand to SEQ ID NO: 205824
uuucugaccaccucuccgg

SEQ ID NO: 205826 - RNA, 19 nt, Artificial Sequence
  Description of Artificial Sequence: Synthetic oligonucleotide
  Sense strand starting at position 1177 of SEQ ID NO: 2652
gcauuuccagcagguuuaa

SEQ ID NO: 205827 - RNA, 19 nt, Artificial Sequence
  Description of Artificial Sequence: Synthetic oligonucleotide
  Antisense strand to SEQ ID NO: 205826
uuaaaccugcuggaaaugc

SEQ ID NO: 205828 - RNA, 19 nt, Artificial Sequence
  Description of Artificial Sequence: Synthetic oligonucleotide
  Sense strand starting at position 1366 of SEQ ID NO: 2652
agacucuucuaugcauagu

SEQ ID NO: 205829 - RNA, 19 nt, Artificial Sequence
  Description of Artificial Sequence: Synthetic oligonucleotide
  Antisense strand to SEQ ID NO: 205828
acuaugcauagaagagucu

SEQ ID NO: 205830 - RNA, 19 nt, Artificial Sequence
  Description of Artificial Sequence: Synthetic oligonucleotide
  Sense strand starting at position 1404 of SEQ ID NO: 2652
aguuauacugugcaacuuu

SEQ ID NO: 205831 - RNA, 19 nt, Artificial Sequence
  Description of Artificial Sequence: Synthetic oligonucleotide
  Antisense strand to SEQ ID NO: 205830
aaaguugcacaguauaacu

SEQ ID NO: 205832 - RNA, 19 nt, Artificial Sequence
  Description of Artificial Sequence: Synthetic oligonucleotide
  Sense strand starting at position 1451 of SEQ ID NO: 2652
auuagcauuucccuauguu

SEQ ID NO: 205833 - RNA, 19 nt, Artificial Sequence
  Description of Artificial Sequence: Synthetic oligonucleotide
  Antisense strand to SEQ ID NO: 205832
aacauagggaaaugcuaau

SEQ ID NO: 205834 - RNA, 19 nt, Artificial Sequence
  Description of Artificial Sequence: Synthetic oligonucleotide
  Sense strand starting at position 1454 of SEQ ID NO: 2652
agcauuucccuauguuauu

SEQ ID NO: 205835 - RNA, 19 nt, Artificial Sequence
  Description of Artificial Sequence: Synthetic oligonucleotide
  Antisense strand to SEQ ID NO: 205834
aauaacauagggaaaugcu

SEQ ID NO: 205836 - RNA, 19 nt, Artificial Sequence
  Description of Artificial Sequence: Synthetic oligonucleotide
  Sense strand starting at position 1570 of SEQ ID NO: 2652
cgcuacccgcuauaaauaa

SEQ ID NO: 205837 - RNA, 19 nt, Artificial Sequence
  Description of Artificial Sequence: Synthetic oligonucleotide
  Antisense strand to SEQ ID NO: 205836
uuauuuauagcggguagcg

SEQ ID NO: 205838 - RNA, 19 nt, Artificial Sequence
  Description of Artificial Sequence: Synthetic oligonucleotide
  Sense strand starting at position 1601 of SEQ ID NO: 2652
ggucuuaaggcuuaaagca

SEQ ID NO: 205839 - RNA, 19 nt, Artificial Sequence
  Description of Artificial Sequence: Synthetic oligonucleotide
  Antisense strand to SEQ ID NO: 205838
ugcuuuaagccuuaagacc

SEQ ID NO: 205840 - RNA, 19 nt, Artificial Sequence
  Description of Artificial Sequence: Synthetic oligonucleotide
  Sense strand starting at position 1647 of SEQ ID NO: 2652
gacauauucccaggagugu

SEQ ID NO: 205841 - RNA, 19 nt, Artificial Sequence
  Description of Artificial Sequence: Synthetic oligonucleotide
  Antisense strand to SEQ ID NO: 205840
acacuccugggaauauguc

SEQ ID NO: 205842 - RNA, 19 nt, Artificial Sequence
  Description of Artificial Sequence: Synthetic oligonucleotide
  Sense strand starting at position 1648 of SEQ ID NO: 2652
acauauucccaggaguguu

SEQ ID NO: 205843 - RNA, 19 nt, Artificial Sequence
  Description of Artificial Sequence: Synthetic oligonucleotide
  Antisense strand to SEQ ID NO: 205842
aacacuccugggaauaugu

SEQ ID NO: 205844 - RNA, 19 nt, Artificial Sequence
  Description of Artificial Sequence: Synthetic oligonucleotide
  Sense strand starting at position 1651 of SEQ ID NO: 2652
uauucccaggaguguuauu

SEQ ID NO: 205845 - RNA, 19 nt, Artificial Sequence
  Description of Artificial Sequence: Synthetic oligonucleotide
  Antisense strand to SEQ ID NO: 205844
aauaacacuccugggaaua

SEQ ID NO: 205846 - RNA, 19 nt, Artificial Sequence
  Description of Artificial Sequence: Synthetic oligonucleotide
  Sense strand starting at position 1656 of SEQ ID NO: 2652
ccaggaguguuauucacga

SEQ ID NO: 205847 - RNA, 19 nt, Artificial Sequence
  Description of Artificial Sequence: Synthetic oligonucleotide
  Antisense strand to SEQ ID NO: 205846
ucgugaauaacacuccugg

SEQ ID NO: 205848 - RNA, 19 nt, Artificial Sequence
  Description of Artificial Sequence: Synthetic oligonucleotide
  Sense strand starting at position 1661 of SEQ ID NO: 2652
aguguuauucacgagucac

SEQ ID NO: 205849 - RNA, 19 nt, Artificial Sequence
  Description of Artificial Sequence: Synthetic oligonucleotide
  Antisense strand to SEQ ID NO: 205848
gugacucgugaauaacacu

SEQ ID NO: 205850 - RNA, 19 nt, Artificial Sequence
  Description of Artificial Sequence: Synthetic oligonucleotide
  Sense strand starting at position 1671 of SEQ ID NO: 2652
acgagucacggucauaauc

SEQ ID NO: 205851 - RNA, 19 nt, Artificial Sequence
  Description of Artificial Sequence: Synthetic oligonucleotide
  Antisense strand to SEQ ID NO: 205850
gauuaugaccgugacucgu

SEQ ID NO: 205852 - RNA, 19 nt, Artificial Sequence
  Description of Artificial Sequence: Synthetic oligonucleotide
  Sense strand starting at position 2000 of SEQ ID NO: 2652
ugauaggugggcggugaua

SEQ ID NO: 205853 - RNA, 19 nt, Artificial Sequence
  Description of Artificial Sequence: Synthetic oligonucleotide
  Antisense strand to SEQ ID NO: 205852
uaucaccgcccaccuauca

SEQ ID NO: 205854 - RNA, 19 nt, Artificial Sequence
  Description of Artificial Sequence: Synthetic oligonucleotide
  Sense strand starting at position 2014 of SEQ ID NO: 2652
ugauaucgguccucugaua

SEQ ID NO: 205855 - RNA, 19 nt, Artificial Sequence
  Description of Artificial Sequence: Synthetic oligonucleotide
  Antisense strand to SEQ ID NO: 205854
uaucagaggaccgauauca

SEQ ID NO: 205856 - RNA, 19 nt, Artificial Sequence
  Description of Artificial Sequence: Synthetic oligonucleotide
  Sense strand starting at position 2335 of SEQ ID NO: 2652
auguucuuaucuguacaca

SEQ ID NO: 205857 - RNA, 19 nt, Artificial Sequence
  Description of Artificial Sequence: Synthetic oligonucleotide
  Antisense strand to SEQ ID NO: 205856
uguguacagauaagaacau

SEQ ID NO: 205858 - RNA, 19 nt, Artificial Sequence
  Description of Artificial Sequence: Synthetic oligonucleotide
  Sense strand starting at position 2336 of SEQ ID NO: 2652
uguucuuaucuguacacaa

SEQ ID NO: 205859 - RNA, 19 nt, Artificial Sequence
  Description of Artificial Sequence: Synthetic oligonucleotide
  Antisense strand to SEQ ID NO: 205858
uuguguacagauaagaaca

SEQ ID NO: 205860 - RNA, 19 nt, Artificial Sequence
  Description of Artificial Sequence: Synthetic oligonucleotide
  Sense strand starting at position 2490 of SEQ ID NO: 2652
ugaggaauuccagguccug

SEQ ID NO: 205861 - RNA, 19 nt, Artificial Sequence
  Description of Artificial Sequence: Synthetic oligonucleotide
  Antisense strand to SEQ ID NO: 205860
caggaccuggaauuccuca

SEQ ID NO: 205862 - RNA, 19 nt, Artificial Sequence
  Description of Artificial Sequence: Synthetic oligonucleotide
  Sense strand starting at position 2516 of SEQ ID NO: 2652
caguacagucgacaaucau

SEQ ID NO: 205863 - RNA, 19 nt, Artificial Sequence
  Description of Artificial Sequence: Synthetic oligonucleotide
  Antisense strand to SEQ ID NO: 205862
augauugucgacuguacug

SEQ ID NO: 205864 - RNA, 19 nt, Artificial Sequence
  Description of Artificial Sequence: Synthetic oligonucleotide
  Sense strand starting at position 3019 of SEQ ID NO: 2652
uggcgacagagugaagauu

SEQ ID NO: 205865 - RNA, 19 nt, Artificial Sequence
  Description of Artificial Sequence: Synthetic oligonucleotide
  Antisense strand to SEQ ID NO: 205864
aaucuucacucugucgcca

SEQ ID NO: 205866 - RNA, 19 nt, Artificial Sequence
  Description of Artificial Sequence: Synthetic oligonucleotide
  Sense strand starting at position 3028 of SEQ ID NO: 2652
agugaagauucugucucaa

SEQ ID NO: 205867 - RNA, 19 nt, Artificial Sequence
  Description of Artificial Sequence: Synthetic oligonucleotide
  Antisense strand to SEQ ID NO: 205866
uugagacagaaucuucacu

SEQ ID NO: 205868 - RNA, 19 nt, Artificial Sequence
  Description of Artificial Sequence: Synthetic oligonucleotide
  Sense strand starting at position 3148 of SEQ ID NO: 2652
uccuacaguguugagauua

SEQ ID NO: 205869 - RNA, 19 nt, Artificial Sequence
  Description of Artificial Sequence: Synthetic oligonucleotide
  Antisense strand to SEQ ID NO: 205868
uaaucucaacacuguagga

SEQ ID NO: 205870 - RNA, 19 nt, Artificial Sequence
  Description of Artificial Sequence: Synthetic oligonucleotide
  Sense strand starting at position 3193 of SEQ ID NO: 2652
ugauauacuuggccucaca

SEQ ID NO: 205871 - RNA, 19 nt, Artificial Sequence
  Description of Artificial Sequence: Synthetic oligonucleotide
  Antisense strand to SEQ ID NO: 205870
ugugaggccaaguauauca

SEQ ID NO: 205872 - RNA, 19 nt, Artificial Sequence
  Description of Artificial Sequence: Synthetic oligonucleotide
  Sense strand starting at position 3220 of SEQ ID NO: 2652
uggaacaaugcagguaaua

SEQ ID NO: 205873 - RNA, 19 nt, Artificial Sequence
  Description of Artificial Sequence: Synthetic oligonucleotide
  Antisense strand to SEQ ID NO: 205872
uauuaccugcauuguucca

SEQ ID NO: 205874 - RNA, 19 nt, Artificial Sequence
  Description of Artificial Sequence: Synthetic oligonucleotide
  Sense strand starting at position 3435 of SEQ ID NO: 2652
gacuuaguaccuggaagac

SEQ ID NO: 205875 - RNA, 19 nt, Artificial Sequence
  Description of Artificial Sequence: Synthetic oligonucleotide
  Antisense strand to SEQ ID NO: 205874
gucuuccagguacuaaguc

SEQ ID NO: 205876 - RNA, 19 nt, Artificial Sequence
  Description of Artificial Sequence: Synthetic oligonucleotide
  Sense strand starting at position 3490 of SEQ ID NO: 2652
cgcauuucuuugccuugaa

SEQ ID NO: 205877 - RNA, 19 nt, Artificial Sequence
  Description of Artificial Sequence: Synthetic oligonucleotide
  Antisense strand to SEQ ID NO: 205876
uucaaggcaaagaaaugcg

SEQ ID NO: 205878 - RNA, 19 nt, Artificial Sequence
  Description of Artificial Sequence: Synthetic oligonucleotide
  Sense strand starting at position 3491 of SEQ ID NO: 2652
gcauuucuuugccuugaaa

SEQ ID NO: 205879 - RNA, 19 nt, Artificial Sequence
  Description of Artificial Sequence: Synthetic oligonucleotide
  Antisense strand to SEQ ID NO: 205878
uuucaaggcaaagaaaugc

SEQ ID NO: 205880 - RNA, 19 nt, Artificial Sequence
  Description of Artificial Sequence: Synthetic oligonucleotide
  Sense strand starting at position 3511 of SEQ ID NO: 2652
uugaguacccaauaaaugu

SEQ ID NO: 205881 - RNA, 19 nt, Artificial Sequence
  Description of Artificial Sequence: Synthetic oligonucleotide
  Antisense strand to SEQ ID NO: 205880
acauuuauuggguacucaa

SEQ ID NO: 205882 - RNA, 19 nt, Artificial Sequence
  Description of Artificial Sequence: Synthetic oligonucleotide
  Sense strand starting at position 3928 of SEQ ID NO: 2652
gcaagauccucugucuaaa

SEQ ID NO: 205883 - RNA, 19 nt, Artificial Sequence
  Description of Artificial Sequence: Synthetic oligonucleotide
  Antisense strand to SEQ ID NO: 205882
uuuagacagaggaucuugc

SEQ ID NO: 205884 - RNA, 19 nt, Artificial Sequence
  Description of Artificial Sequence: Synthetic oligonucleotide
  Sense strand starting at position 202 of SEQ ID NO: 2653
cuucuauuguuaucagcag

SEQ ID NO: 205885 - RNA, 19 nt, Artificial Sequence
  Description of Artificial Sequence: Synthetic oligonucleotide
  Antisense strand to SEQ ID NO: 205884
cugcugauaacaauagaag

SEQ ID NO: 205886 - RNA, 19 nt, Artificial Sequence
  Description of Artificial Sequence: Synthetic oligonucleotide
  Sense strand starting at position 227 of SEQ ID NO: 2653
aauguuugggaacgauaca

SEQ ID NO: 205887 - RNA, 19 nt, Artificial Sequence
  Description of Artificial Sequence: Synthetic oligonucleotide
  Antisense strand to SEQ ID NO: 205886
uguaucguucccaaacauu

SEQ ID NO: 205888 - RNA, 19 nt, Artificial Sequence
  Description of Artificial Sequence: Synthetic oligonucleotide
  Sense strand starting at position 335 of SEQ ID NO: 2653
aggguaaggcaagguauaa

SEQ ID NO: 205889 - RNA, 19 nt, Artificial Sequence
  Description of Artificial Sequence: Synthetic oligonucleotide
  Antisense strand to SEQ ID NO: 205888
uuauaccuugccuuacccu

SEQ ID NO: 205890 - RNA, 19 nt, Artificial Sequence
  Description of Artificial Sequence: Synthetic oligonucleotide
  Sense strand starting at position 487 of SEQ ID NO: 2653
auugcucaucuccaguuua

SEQ ID NO: 205891 - RNA, 19 nt, Artificial Sequence
  Description of Artificial Sequence: Synthetic oligonucleotide
  Antisense strand to SEQ ID NO: 205890
uaaacuggagaugagcaau

SEQ ID NO: 205892 - RNA, 19 nt, Artificial Sequence
  Description of Artificial Sequence: Synthetic oligonucleotide
  Sense strand starting at position 498 of SEQ ID NO: 2653
ccaguuuaaucuuuacgga

SEQ ID NO: 205893 - RNA, 19 nt, Artificial Sequence
  Description of Artificial Sequence: Synthetic oligonucleotide
  Antisense strand to SEQ ID NO: 205892
uccguaaagauuaaacugg

SEQ ID NO: 205894 - RNA, 19 nt, Artificial Sequence
  Description of Artificial Sequence: Synthetic oligonucleotide
  Sense strand starting at position 499 of SEQ ID NO: 2653
caguuuaaucuuuacggag

SEQ ID NO: 205895 - RNA, 19 nt, Artificial Sequence
  Description of Artificial Sequence: Synthetic oligonucleotide
  Antisense strand to SEQ ID NO: 205894
cuccguaaagauuaaacug

SEQ ID NO: 205896 - RNA, 19 nt, Artificial Sequence
  Description of Artificial Sequence: Synthetic oligonucleotide
  Sense strand starting at position 588 of SEQ ID NO: 2653
auuacagcacuuuggaaau

SEQ ID NO: 205897 - RNA, 19 nt, Artificial Sequence
  Description of Artificial Sequence: Synthetic oligonucleotide
  Antisense strand to SEQ ID NO: 205896
auuuccaaagugcuguaau

SEQ ID NO: 205898 - RNA, 19 nt, Artificial Sequence
  Description of Artificial Sequence: Synthetic oligonucleotide
  Sense strand starting at position 600 of SEQ ID NO: 2653
uggaaauguuaucucaauu

SEQ ID NO: 205899 - RNA, 19 nt, Artificial Sequence
  Description of Artificial Sequence: Synthetic oligonucleotide
  Antisense strand to SEQ ID NO: 205898
aauugagauaacauuucca

SEQ ID NO: 205900 - RNA, 19 nt, Artificial Sequence
  Description of Artificial Sequence: Synthetic oligonucleotide
  Sense strand starting at position 900 of SEQ ID NO: 2653
ggcccagaagcuuacuuua

SEQ ID NO: 205901 - RNA, 19 nt, Artificial Sequence
  Description of Artificial Sequence: Synthetic oligonucleotide
  Antisense strand to SEQ ID NO: 205900
uaaaguaagcuucugggcc

SEQ ID NO: 205902 - RNA, 19 nt, Artificial Sequence
  Description of Artificial Sequence: Synthetic oligonucleotide
  Sense strand starting at position 903 of SEQ ID NO: 2653
ccagaagcuuacuuuaagu

SEQ ID NO: 205903 - RNA, 19 nt, Artificial Sequence
  Description of Artificial Sequence: Synthetic oligonucleotide
  Antisense strand to SEQ ID NO: 205902
acuuaaaguaagcuucugg

SEQ ID NO: 205904 - RNA, 19 nt, Artificial Sequence
  Description of Artificial Sequence: Synthetic oligonucleotide
  Sense strand starting at position 905 of SEQ ID NO: 2653
agaagcuuacuuuaaguca

SEQ ID NO: 205905 - RNA, 19 nt, Artificial Sequence
  Description of Artificial Sequence: Synthetic oligonucleotide
  Antisense strand to SEQ ID NO: 205904
ugacuuaaaguaagcuucu

SEQ ID NO: 205906 - RNA, 19 nt, Artificial Sequence
  Description of Artificial Sequence: Synthetic oligonucleotide
  Sense strand starting at position 931 of SEQ ID NO: 2653
gcuggaaggcucuaugucu

SEQ ID NO: 205907 - RNA, 19 nt, Artificial Sequence
  Description of Artificial Sequence: Synthetic oligonucleotide
  Antisense strand to SEQ ID NO: 205906
agacauagagccuuccagc

SEQ ID NO: 205908 - RNA, 19 nt, Artificial Sequence
  Description of Artificial Sequence: Synthetic oligonucleotide
  Sense strand starting at position 942 of SEQ ID NO: 2653
cuaugucugggccacuaau

SEQ ID NO: 205909 - RNA, 19 nt, Artificial Sequence
  Description of Artificial Sequence: Synthetic oligonucleotide
  Antisense strand to SEQ ID NO: 205908
auuaguggcccagacauag

SEQ ID NO: 205910 - RNA, 19 nt, Artificial Sequence
  Description of Artificial Sequence: Synthetic oligonucleotide
  Sense strand starting at position 973 of SEQ ID NO: 2653
cuuguaucccagugaagaa

SEQ ID NO: 205911 - RNA, 19 nt, Artificial Sequence
  Description of Artificial Sequence: Synthetic oligonucleotide
  Antisense strand to SEQ ID NO: 205910
uucuucacugggauacaag

SEQ ID NO: 205912 - RNA, 19 nt, Artificial Sequence
  Description of Artificial Sequence: Synthetic oligonucleotide
  Sense strand starting at position 1014 of SEQ ID NO: 2653
cgagcaauaguugaacuca

SEQ ID NO: 205913 - RNA, 19 nt, Artificial Sequence
  Description of Artificial Sequence: Synthetic oligonucleotide
  Antisense strand to SEQ ID NO: 205912
ugaguucaacuauugcucg

SEQ ID NO: 205914 - RNA, 19 nt, Artificial Sequence
  Description of Artificial Sequence: Synthetic oligonucleotide
  Sense strand starting at position 1885 of SEQ ID NO: 2653
gcguuucucgggagcaguu

SEQ ID NO: 205915 - RNA, 19 nt, Artificial Sequence
  Description of Artificial Sequence: Synthetic oligonucleotide
  Antisense strand to SEQ ID NO: 205914
aacugcucccgagaaacgc

SEQ ID NO: 205916 - RNA, 19 nt, Artificial Sequence
  Description of Artificial Sequence: Synthetic oligonucleotide
  Sense strand starting at position 1966 of SEQ ID NO: 2653
agagacacgucuuuaccuu

SEQ ID NO: 205917 - RNA, 19 nt, Artificial Sequence
  Description of Artificial Sequence: Synthetic oligonucleotide
  Antisense strand to SEQ ID NO: 205916
aagguaaagacgugucucu

SEQ ID NO: 205918 - RNA, 19 nt, Artificial Sequence
  Description of Artificial Sequence: Synthetic oligonucleotide
  Sense strand starting at position 1967 of SEQ ID NO: 2653
gagacacgucuuuaccuuu

SEQ ID NO: 205919 - RNA, 19 nt, Artificial Sequence
  Description of Artificial Sequence: Synthetic oligonucleotide
  Antisense strand to SEQ ID NO: 205918
aaagguaaagacgugucuc

SEQ ID NO: 205920 - RNA, 19 nt, Artificial Sequence
  Description of Artificial Sequence: Synthetic oligonucleotide
  Sense strand starting at position 2109 of SEQ ID NO: 2653
uauugaaauuuccggagaa

SEQ ID NO: 205921 - RNA, 19 nt, Artificial Sequence
  Description of Artificial Sequence: Synthetic oligonucleotide
  Antisense strand to SEQ ID NO: 205920
uucuccggaaauuucaaua

SEQ ID NO: 205922 - RNA, 19 nt, Artificial Sequence
  Description of Artificial Sequence: Synthetic oligonucleotide
  Sense strand starting at position 2110 of SEQ ID NO: 2653
auugaaauuuccggagaaa

SEQ ID NO: 205923 - RNA, 19 nt, Artificial Sequence
  Description of Artificial Sequence: Synthetic oligonucleotide
  Antisense strand to SEQ ID NO: 205922
uuucuccggaaauuucaau

SEQ ID NO: 205924 - RNA, 19 nt, Artificial Sequence
  Description of Artificial Sequence: Synthetic oligonucleotide
  Sense strand starting at position 2123 of SEQ ID NO: 2653
gagaaagucccauguuucu

SEQ ID NO: 205925 - RNA, 19 nt, Artificial Sequence
  Description of Artificial Sequence: Synthetic oligonucleotide
  Antisense strand to SEQ ID NO: 205924
agaaacaugggacuuucuc

SEQ ID NO: 205926 - RNA, 19 nt, Artificial Sequence
  Description of Artificial Sequence: Synthetic oligonucleotide
  Sense strand starting at position 2164 of SEQ ID NO: 2653
agcugagugcgagagguau

SEQ ID NO: 205927 - RNA, 19 nt, Artificial Sequence
  Description of Artificial Sequence: Synthetic oligonucleotide
  Antisense strand to SEQ ID NO: 205926
auaccucucgcacucagcu

SEQ ID NO: 205928 - RNA, 19 nt, Artificial Sequence
  Description of Artificial Sequence: Synthetic oligonucleotide
  Sense strand starting at position 2166 of SEQ ID NO: 2653
cugagugcgagagguauuu

SEQ ID NO: 205929 - RNA, 19 nt, Artificial Sequence
  Description of Artificial Sequence: Synthetic oligonucleotide
  Antisense strand to SEQ ID NO: 205928
aaauaccucucgcacucag

SEQ ID NO: 205930 - RNA, 19 nt, Artificial Sequence
  Description of Artificial Sequence: Synthetic oligonucleotide
  Sense strand starting at position 2364 of SEQ ID NO: 2653
uaguuagaaccuuaggucu

SEQ ID NO: 205931 - RNA, 19 nt, Artificial Sequence
  Description of Artificial Sequence: Synthetic oligonucleotide
  Antisense strand to SEQ ID NO: 205930
agaccuaagguucuaacua

SEQ ID NO: 205932 - RNA, 19 nt, Artificial Sequence
  Description of Artificial Sequence: Synthetic oligonucleotide
  Sense strand starting at position 2399 of SEQ ID NO: 2653
agagaaauauuagggaaac

SEQ ID NO: 205933 - RNA, 19 nt, Artificial Sequence
  Description of Artificial Sequence: Synthetic oligonucleotide
  Antisense strand to SEQ ID NO: 205932
guuucccuaauauuucucu

SEQ ID NO: 205934 - RNA, 19 nt, Artificial Sequence
  Description of Artificial Sequence: Synthetic oligonucleotide
  Sense strand starting at position 2400 of SEQ ID NO: 2653
gagaaauauuagggaaaca

SEQ ID NO: 205935 - RNA, 19 nt, Artificial Sequence
  Description of Artificial Sequence: Synthetic oligonucleotide
  Antisense strand to SEQ ID NO: 205934
uguuucccuaauauuucuc

SEQ ID NO: 205936 - RNA, 19 nt, Artificial Sequence
  Description of Artificial Sequence: Synthetic oligonucleotide
  Sense strand starting at position 2497 of SEQ ID NO: 2653
ggauuacaguaagucaguu

SEQ ID NO: 205937 - RNA, 19 nt, Artificial Sequence
  Description of Artificial Sequence: Synthetic oligonucleotide
  Antisense strand to SEQ ID NO: 205936
aacugacuuacuguaaucc

SEQ ID NO: 205938 - RNA, 19 nt, Artificial Sequence
  Description of Artificial Sequence: Synthetic oligonucleotide
  Sense strand starting at position 2562 of SEQ ID NO: 2653
uuauaaggguggucauaga

SEQ ID NO: 205939 - RNA, 19 nt, Artificial Sequence
  Description of Artificial Sequence: Synthetic oligonucleotide
  Antisense strand to SEQ ID NO: 205938
ucuaugaccacccuuauaa

SEQ ID NO: 205940 - RNA, 19 nt, Artificial Sequence
  Description of Artificial Sequence: Synthetic oligonucleotide
  Sense strand starting at position 2853 of SEQ ID NO: 2653
gagcuaaacucggucucaa

SEQ ID NO: 205941 - RNA, 19 nt, Artificial Sequence
  Description of Artificial Sequence: Synthetic oligonucleotide
  Antisense strand to SEQ ID NO: 205940
uugagaccgaguuuagcuc

SEQ ID NO: 205942 - RNA, 19 nt, Artificial Sequence
  Description of Artificial Sequence: Synthetic oligonucleotide
  Sense strand starting at position 2886 of SEQ ID NO: 2653
cuacaauucugaguguuac

SEQ ID NO: 205943 - RNA, 19 nt, Artificial Sequence
  Description of Artificial Sequence: Synthetic oligonucleotide
  Antisense strand to SEQ ID NO: 205942
guaacacucagaauuguag

SEQ ID NO: 205944 - RNA, 19 nt, Artificial Sequence
  Description of Artificial Sequence: Synthetic oligonucleotide
  Sense strand starting at position 3138 of SEQ ID NO: 2653
ugcagugauccaugauccu

SEQ ID NO: 205945 - RNA, 19 nt, Artificial Sequence
  Description of Artificial Sequence: Synthetic oligonucleotide
  Antisense strand to SEQ ID NO: 205944
aggaucauggaucacugca

SEQ ID NO: 205946 - RNA, 19 nt, Artificial Sequence
  Description of Artificial Sequence: Synthetic oligonucleotide
  Sense strand starting at position 3280 of SEQ ID NO: 2653
ccuuuauuaguuuggagac

SEQ ID NO: 205947 - RNA, 19 nt, Artificial Sequence
  Description of Artificial Sequence: Synthetic oligonucleotide
  Antisense strand to SEQ ID NO: 205946
gucuccaaacuaauaaagg

SEQ ID NO: 205948 - RNA, 19 nt, Artificial Sequence
  Description of Artificial Sequence: Synthetic oligonucleotide
  Sense strand starting at position 3344 of SEQ ID NO: 2653
ccuaucucagaaugugcua

SEQ ID NO: 205949 - RNA, 19 nt, Artificial Sequence
  Description of Artificial Sequence: Synthetic oligonucleotide
  Antisense strand to SEQ ID NO: 205948
uagcacauucugagauagg

SEQ ID NO: 205950 - RNA, 19 nt, Artificial Sequence
  Description of Artificial Sequence: Synthetic oligonucleotide
  Sense strand starting at position 3351 of SEQ ID NO: 2653
cagaaugugcuagacguaa

SEQ ID NO: 205951 - RNA, 19 nt, Artificial Sequence
  Description of Artificial Sequence: Synthetic oligonucleotide
  Antisense strand to SEQ ID NO: 205950
uuacgucuagcacauucug

SEQ ID NO: 205952 - RNA, 19 nt, Artificial Sequence
  Description of Artificial Sequence: Synthetic oligonucleotide
  Sense strand starting at position 3386 of SEQ ID NO: 2653
uguugugaagauuagggua

SEQ ID NO: 205953 - RNA, 19 nt, Artificial Sequence
  Description of Artificial Sequence: Synthetic oligonucleotide
  Antisense strand to SEQ ID NO: 205952
uacccuaaucuucacaaca

SEQ ID NO: 205954 - RNA, 19 nt, Artificial Sequence
  Description of Artificial Sequence: Synthetic oligonucleotide
  Sense strand starting at position 3393 of SEQ ID NO: 2653
aagauuaggguauguggaa

SEQ ID NO: 205955 - RNA, 19 nt, Artificial Sequence
  Description of Artificial Sequence: Synthetic oligonucleotide
  Antisense strand to SEQ ID NO: 205954
uuccacauacccuaaucuu

SEQ ID NO: 205956 - RNA, 19 nt, Artificial Sequence
  Description of Artificial Sequence: Synthetic oligonucleotide
  Sense strand starting at position 3668 of SEQ ID NO: 2653
guauauuguacagguacau

SEQ ID NO: 205957 - RNA, 19 nt, Artificial Sequence
  Description of Artificial Sequence: Synthetic oligonucleotide
  Antisense strand to SEQ ID NO: 205956
auguaccuguacaauauac

SEQ ID NO: 205958 - RNA, 19 nt, Artificial Sequence
  Description of Artificial Sequence: Synthetic oligonucleotide
  Sense strand starting at position 3751 of SEQ ID NO: 2653
guauaauaagcaugacauu

SEQ ID NO: 205959 - RNA, 19 nt, Artificial Sequence
  Description of Artificial Sequence: Synthetic oligonucleotide
  Antisense strand to SEQ ID NO: 205958
aaugucaugcuuauuauac

SEQ ID NO: 205960 - RNA, 19 nt, Artificial Sequence
  Description of Artificial Sequence: Synthetic oligonucleotide
  Sense strand starting at position 3894 of SEQ ID NO: 2653
uggauagccuccuccauga

SEQ ID NO: 205961 - RNA, 19 nt, Artificial Sequence
  Description of Artificial Sequence: Synthetic oligonucleotide
  Antisense strand to SEQ ID NO: 205960
ucauggaggaggcuaucca

SEQ ID NO: 205962 - RNA, 19 nt, Artificial Sequence
  Description of Artificial Sequence: Synthetic oligonucleotide
  Sense strand starting at position 3921 of SEQ ID NO: 2653
cccucauuagagugguaua

SEQ ID NO: 205963 - RNA, 19 nt, Artificial Sequence
  Description of Artificial Sequence: Synthetic oligonucleotide
  Antisense strand to SEQ ID NO: 205962
uauaccacucuaaugaggg

SEQ ID NO: 205964 - RNA, 19 nt, Artificial Sequence
  Description of Artificial Sequence: Synthetic oligonucleotide
  Sense strand starting at position 67 of SEQ ID NO: 2654
ugaggagguucccagggaa

SEQ ID NO: 205965 - RNA, 19 nt, Artificial Sequence
  Description of Artificial Sequence: Synthetic oligonucleotide
  Antisense strand to SEQ ID NO: 205964
uucccugggaaccuccuca

SEQ ID NO: 205966 - RNA, 19 nt, Artificial Sequence
  Description of Artificial Sequence: Synthetic oligonucleotide
  Sense strand starting at position 70 of SEQ ID NO: 2654
ggagguucccagggaaagu

SEQ ID NO: 205967 - RNA, 19 nt, Artificial Sequence
  Description of Artificial Sequence: Synthetic oligonucleotide
  Antisense strand to SEQ ID NO: 205966
acuuucccugggaaccucc

SEQ ID NO: 205968 - RNA, 19 nt, Artificial Sequence
  Description of Artificial Sequence: Synthetic oligonucleotide
  Sense strand starting at position 79 of SEQ ID NO: 2654
cagggaaagugaccuguaa

SEQ ID NO: 205969 - RNA, 19 nt, Artificial Sequence
  Description of Artificial Sequence: Synthetic oligonucleotide
  Antisense strand to SEQ ID NO: 205968
uuacaggucacuuucccug

SEQ ID NO: 205970 - RNA, 19 nt, Artificial Sequence
  Description of Artificial Sequence: Synthetic oligonucleotide
  Sense strand starting at position 81 of SEQ ID NO: 2654
gggaaagugaccuguaagu

SEQ ID NO: 205971 - RNA, 19 nt, Artificial Sequence
  Description of Artificial Sequence: Synthetic oligonucleotide
  Antisense strand to SEQ ID NO: 205970
acuuacaggucacuuuccc

SEQ ID NO: 205972 - RNA, 19 nt, Artificial Sequence
  Description of Artificial Sequence: Synthetic oligonucleotide
  Sense strand starting at position 83 of SEQ ID NO: 2654
gaaagugaccuguaaguug

SEQ ID NO: 205973 - RNA, 19 nt, Artificial Sequence
  Description of Artificial Sequence: Synthetic oligonucleotide
  Antisense strand to SEQ ID NO: 205972
caacuuacaggucacuuuc

SEQ ID NO: 205974 - RNA, 19 nt, Artificial Sequence
  Description of Artificial Sequence: Synthetic oligonucleotide
  Sense strand starting at position 182 of SEQ ID NO: 2654
ggaugugguguuuaagaag

SEQ ID NO: 205975 - RNA, 19 nt, Artificial Sequence
  Description of Artificial Sequence: Synthetic oligonucleotide
  Antisense strand to SEQ ID NO: 205974
cuucuuaaacaccacaucc

SEQ ID NO: 205976 - RNA, 19 nt, Artificial Sequence
  Description of Artificial Sequence: Synthetic oligonucleotide
  Sense strand starting at position 660 of SEQ ID NO: 2654
ccagaugcuaugugugcaa

SEQ ID NO: 205977 - RNA, 19 nt, Artificial Sequence
  Description of Artificial Sequence: Synthetic oligonucleotide
  Antisense strand to SEQ ID NO: 205976
uugcacacauagcaucugg

SEQ ID NO: 205978 - RNA, 19 nt, Artificial Sequence
  Description of Artificial Sequence: Synthetic oligonucleotide
  Sense strand starting at position 664 of SEQ ID NO: 2654
augcuaugugugcaaugga

SEQ ID NO: 205979 - RNA, 19 nt, Artificial Sequence
  Description of Artificial Sequence: Synthetic oligonucleotide
  Antisense strand to SEQ ID NO: 205978
uccauugcacacauagcau

SEQ ID NO: 205980 - RNA, 19 nt, Artificial Sequence
  Description of Artificial Sequence: Synthetic oligonucleotide
  Sense strand starting at position 1405 of SEQ ID NO: 2654
agagcuugucaccgucuga

SEQ ID NO: 205981 - RNA, 19 nt, Artificial Sequence
  Description of Artificial Sequence: Synthetic oligonucleotide
  Antisense strand to SEQ ID NO: 205980
ucagacggugacaagcucu

SEQ ID NO: 205982 - RNA, 19 nt, Artificial Sequence
  Description of Artificial Sequence: Synthetic oligonucleotide
  Sense strand starting at position 1408 of SEQ ID NO: 2654
gcuugucaccgucugacuu

SEQ ID NO: 205983 - RNA, 19 nt, Artificial Sequence
  Description of Artificial Sequence: Synthetic oligonucleotide
  Antisense strand to SEQ ID NO: 205982
aagucagacggugacaagc

SEQ ID NO: 205984 - RNA, 19 nt, Artificial Sequence
  Description of Artificial Sequence: Synthetic oligonucleotide
  Sense strand starting at position 1409 of SEQ ID NO: 2654
cuugucaccgucugacuua

SEQ ID NO: 205985 - RNA, 19 nt, Artificial Sequence
  Description of Artificial Sequence: Synthetic oligonucleotide
  Antisense strand to SEQ ID NO: 205984
uaagucagacggugacaag

SEQ ID NO: 205986 - RNA, 19 nt, Artificial Sequence
  Description of Artificial Sequence: Synthetic oligonucleotide
  Sense strand starting at position 1741 of SEQ ID NO: 2654
cccuccuccgugugaucuu

SEQ ID NO: 205987 - RNA, 19 nt, Artificial Sequence
  Description of Artificial Sequence: Synthetic oligonucleotide
  Antisense strand to SEQ ID NO: 205986
aagaucacacggaggaggg

SEQ ID NO: 205988 - RNA, 19 nt, Artificial Sequence
  Description of Artificial Sequence: Synthetic oligonucleotide
  Sense strand starting at position 1973 of SEQ ID NO: 2654
gcaugagaugcgugucagu

SEQ ID NO: 205989 - RNA, 19 nt, Artificial Sequence
  Description of Artificial Sequence: Synthetic oligonucleotide
  Antisense strand to SEQ ID NO: 205988
acugacacgcaucucaugc

SEQ ID NO: 205990 - RNA, 19 nt, Artificial Sequence
  Description of Artificial Sequence: Synthetic oligonucleotide
  Sense strand starting at position 1980 of SEQ ID NO: 2654
augcgugucagugagcgua

SEQ ID NO: 205991 - RNA, 19 nt, Artificial Sequence
  Description of Artificial Sequence: Synthetic oligonucleotide
  Antisense strand to SEQ ID NO: 205990
uacgcucacugacacgcau

SEQ ID NO: 205992 - RNA, 19 nt, Artificial Sequence
  Description of Artificial Sequence: Synthetic oligonucleotide
  Sense strand starting at position 1984 of SEQ ID NO: 2654
gugucagugagcguagcua

SEQ ID NO: 205993 - RNA, 19 nt, Artificial Sequence
  Description of Artificial Sequence: Synthetic oligonucleotide
  Antisense strand to SEQ ID NO: 205992
uagcuacgcucacugacac

SEQ ID NO: 205994 - RNA, 19 nt, Artificial Sequence
  Description of Artificial Sequence: Synthetic oligonucleotide
  Sense strand starting at position 2120 of SEQ ID NO: 2654
gcacauaacuggucaacag

SEQ ID NO: 205995 - RNA, 19 nt, Artificial Sequence
  Description of Artificial Sequence: Synthetic oligonucleotide
  Antisense strand to SEQ ID NO: 205994
cuguugaccaguuaugugc

SEQ ID NO: 205996 - RNA, 19 nt, Artificial Sequence
  Description of Artificial Sequence: Synthetic oligonucleotide
  Sense strand starting at position 2289 of SEQ ID NO: 2654
gcacaauagugagcagaca

SEQ ID NO: 205997 - RNA, 19 nt, Artificial Sequence
  Description of Artificial Sequence: Synthetic oligonucleotide
  Antisense strand to SEQ ID NO: 205996
ugucugcucacuauugugc

SEQ ID NO: 205998 - RNA, 19 nt, Artificial Sequence
  Description of Artificial Sequence: Synthetic oligonucleotide
  Sense strand starting at position 2512 of SEQ ID NO: 2654
ggcugcgagugcucaucaa

SEQ ID NO: 205999 - RNA, 19 nt, Artificial Sequence
  Description of Artificial Sequence: Synthetic oligonucleotide
  Antisense strand to SEQ ID NO: 205998
uugaugagcacucgcagcc

SEQ ID NO: 206000 - RNA, 19 nt, Artificial Sequence
  Description of Artificial Sequence: Synthetic oligonucleotide
  Sense strand starting at position 2516 of SEQ ID NO: 2654
gcgagugcucaucaacacu

SEQ ID NO: 206001 - RNA, 19 nt, Artificial Sequence
  Description of Artificial Sequence: Synthetic oligonucleotide
  Antisense strand to SEQ ID NO: 206000
aguguugaugagcacucgc

SEQ ID NO: 206002 - RNA, 19 nt, Artificial Sequence
  Description of Artificial Sequence: Synthetic oligonucleotide
  Sense strand starting at position 2641 of SEQ ID NO: 2654
gggacaccuuccucucuau

SEQ ID NO: 206003 - RNA, 19 nt, Artificial Sequence
  Description of Artificial Sequence: Synthetic oligonucleotide
  Antisense strand to SEQ ID NO: 206002
auagagaggaagguguccc

SEQ ID NO: 206004 - RNA, 19 nt, Artificial Sequence
  Description of Artificial Sequence: Synthetic oligonucleotide
  Sense strand starting at position 2743 of SEQ ID NO: 2654
agcuuucccuguguuuaaa

SEQ ID NO: 206005 - RNA, 19 nt, Artificial Sequence
  Description of Artificial Sequence: Synthetic oligonucleotide
  Antisense strand to SEQ ID NO: 206004
uuuaaacacagggaaagcu

SEQ ID NO: 206006 - RNA, 19 nt, Artificial Sequence
  Description of Artificial Sequence: Synthetic oligonucleotide
  Sense strand starting at position 2752 of SEQ ID NO: 2654
uguguuuaaaugugaucug

SEQ ID NO: 206007 - RNA, 19 nt, Artificial Sequence
  Description of Artificial Sequence: Synthetic oligonucleotide
  Antisense strand to SEQ ID NO: 206006
cagaucacauuuaaacaca

SEQ ID NO: 206008 - RNA, 19 nt, Artificial Sequence
  Description of Artificial Sequence: Synthetic oligonucleotide
  Sense strand starting at position 2755 of SEQ ID NO: 2654
guuuaaaugugaucugugu

SEQ ID NO: 206009 - RNA, 19 nt, Artificial Sequence
  Description of Artificial Sequence: Synthetic oligonucleotide
  Antisense strand to SEQ ID NO: 206008
acacagaucacauuuaaac

SEQ ID NO: 206010 - RNA, 19 nt, Artificial Sequence
  Description of Artificial Sequence: Synthetic oligonucleotide
  Sense strand starting at position 2757 of SEQ ID NO: 2654
uuaaaugugaucuguguau

SEQ ID NO: 206011 - RNA, 19 nt, Artificial Sequence
  Description of Artificial Sequence: Synthetic oligonucleotide
  Antisense strand to SEQ ID NO: 206010
auacacagaucacauuuaa

SEQ ID NO: 206012 - RNA, 19 nt, Artificial Sequence
  Description of Artificial Sequence: Synthetic oligonucleotide
  Sense strand starting at position 2764 of SEQ ID NO: 2654
ugaucuguguauuucucau

SEQ ID NO: 206013 - RNA, 19 nt, Artificial Sequence
  Description of Artificial Sequence: Synthetic oligonucleotide
  Antisense strand to SEQ ID NO: 206012
augagaaauacacagauca

SEQ ID NO: 206014 - RNA, 19 nt, Artificial Sequence
  Description of Artificial Sequence: Synthetic oligonucleotide
  Sense strand starting at position 2768 of SEQ ID NO: 2654
cuguguauuucucaucuag

SEQ ID NO: 206015 - RNA, 19 nt, Artificial Sequence
  Description of Artificial Sequence: Synthetic oligonucleotide
  Antisense strand to SEQ ID NO: 206014
cuagaugagaaauacacag

SEQ ID NO: 206016 - RNA, 19 nt, Artificial Sequence
  Description of Artificial Sequence: Synthetic oligonucleotide
  Sense strand starting at position 2780 of SEQ ID NO: 2654
caucuagagugacugguua

SEQ ID NO: 206017 - RNA, 19 nt, Artificial Sequence
  Description of Artificial Sequence: Synthetic oligonucleotide
  Antisense strand to SEQ ID NO: 206016
uaaccagucacucuagaug

SEQ ID NO: 206018 - RNA, 19 nt, Artificial Sequence
  Description of Artificial Sequence: Synthetic oligonucleotide
  Sense strand starting at position 2793 of SEQ ID NO: 2654
ugguuagcacuccauuaau

SEQ ID NO: 206019 - RNA, 19 nt, Artificial Sequence
  Description of Artificial Sequence: Synthetic oligonucleotide
  Antisense strand to SEQ ID NO: 206018
auuaauggagugcuaacca

SEQ ID NO: 206020 - RNA, 19 nt, Artificial Sequence
  Description of Artificial Sequence: Synthetic oligonucleotide
  Sense strand starting at position 2911 of SEQ ID NO: 2654
aggccuuacucagagcuca

SEQ ID NO: 206021 - RNA, 19 nt, Artificial Sequence
  Description of Artificial Sequence: Synthetic oligonucleotide
  Antisense strand to SEQ ID NO: 206020
ugagcucugaguaaggccu

SEQ ID NO: 206022 - RNA, 19 nt, Artificial Sequence
  Description of Artificial Sequence: Synthetic oligonucleotide
  Sense strand starting at position 2980 of SEQ ID NO: 2654
gucucuuauccauggugaa

SEQ ID NO: 206023 - RNA, 19 nt, Artificial Sequence
  Description of Artificial Sequence: Synthetic oligonucleotide
  Antisense strand to SEQ ID NO: 206022
uucaccauggauaagagac

SEQ ID NO: 206024 - RNA, 19 nt, Artificial Sequence
  Description of Artificial Sequence: Synthetic oligonucleotide
  Sense strand starting at position 2981 of SEQ ID NO: 2654
ucucuuauccauggugaag

SEQ ID NO: 206025 - RNA, 19 nt, Artificial Sequence
  Description of Artificial Sequence: Synthetic oligonucleotide
  Antisense strand to SEQ ID NO: 206024
cuucaccauggauaagaga

SEQ ID NO: 206026 - RNA, 19 nt, Artificial Sequence
  Description of Artificial Sequence: Synthetic oligonucleotide
  Sense strand starting at position 3445 of SEQ ID NO: 2654
agcuccugguauguauaaa

SEQ ID NO: 206027 - RNA, 19 nt, Artificial Sequence
  Description of Artificial Sequence: Synthetic oligonucleotide
  Antisense strand to SEQ ID NO: 206026
uuuauacauaccaggagcu

SEQ ID NO: 206028 - RNA, 19 nt, Artificial Sequence
  Description of Artificial Sequence: Synthetic oligonucleotide
  Sense strand starting at position 3512 of SEQ ID NO: 2654
cuccguuaacauuggagga

SEQ ID NO: 206029 - RNA, 19 nt, Artificial Sequence
  Description of Artificial Sequence: Synthetic oligonucleotide
  Antisense strand to SEQ ID NO: 206028
uccuccaauguuaacggag

SEQ ID NO: 206030 - RNA, 19 nt, Artificial Sequence
  Description of Artificial Sequence: Synthetic oligonucleotide
  Sense strand starting at position 3513 of SEQ ID NO: 2654
uccguuaacauuggaggau

SEQ ID NO: 206031 - RNA, 19 nt, Artificial Sequence
  Description of Artificial Sequence: Synthetic oligonucleotide
  Antisense strand to SEQ ID NO: 206030
auccuccaauguuaacgga

SEQ ID NO: 206032 - RNA, 19 nt, Artificial Sequence
  Description of Artificial Sequence: Synthetic oligonucleotide
  Sense strand starting at position 3544 of SEQ ID NO: 2654
gaaggaaaguccuagaaag

SEQ ID NO: 206033 - RNA, 19 nt, Artificial Sequence
  Description of Artificial Sequence: Synthetic oligonucleotide
  Antisense strand to SEQ ID NO: 206032
cuuucuaggacuuuccuuc

SEQ ID NO: 206034 - RNA, 19 nt, Artificial Sequence
  Description of Artificial Sequence: Synthetic oligonucleotide
  Sense strand starting at position 3616 of SEQ ID NO: 2654
cucucuguguuccagaaag

SEQ ID NO: 206035 - RNA, 19 nt, Artificial Sequence
  Description of Artificial Sequence: Synthetic oligonucleotide
  Antisense strand to SEQ ID NO: 206034
cuuucuggaacacagagag

SEQ ID NO: 206036 - RNA, 19 nt, Artificial Sequence
  Description of Artificial Sequence: Synthetic oligonucleotide
  Sense strand starting at position 3618 of SEQ ID NO: 2654
cucuguguuccagaaaguu

SEQ ID NO: 206037 - RNA, 19 nt, Artificial Sequence
  Description of Artificial Sequence: Synthetic oligonucleotide
  Antisense strand to SEQ ID NO: 206036
aacuuucuggaacacagag

SEQ ID NO: 206038 - RNA, 19 nt, Artificial Sequence
  Description of Artificial Sequence: Synthetic oligonucleotide
  Sense strand starting at position 3626 of SEQ ID NO: 2654
uccagaaaguucuaggacu

SEQ ID NO: 206039 - RNA, 19 nt, Artificial Sequence
  Description of Artificial Sequence: Synthetic oligonucleotide
  Antisense strand to SEQ ID NO: 206038
aguccuagaacuuucugga

SEQ ID NO: 206040 - RNA, 19 nt, Artificial Sequence
  Description of Artificial Sequence: Synthetic oligonucleotide
  Sense strand starting at position 3628 of SEQ ID NO: 2654
cagaaaguucuaggacuug

SEQ ID NO: 206041 - RNA, 19 nt, Artificial Sequence
  Description of Artificial Sequence: Synthetic oligonucleotide
  Antisense strand to SEQ ID NO: 206040
caaguccuagaacuuucug

SEQ ID NO: 206042 - RNA, 19 nt, Artificial Sequence
  Description of Artificial Sequence: Synthetic oligonucleotide
  Sense strand starting at position 3719 of SEQ ID NO: 2654
ggaccauagagauggcuca

SEQ ID NO: 206043 - RNA, 19 nt, Artificial Sequence
  Description of Artificial Sequence: Synthetic oligonucleotide
  Antisense strand to SEQ ID NO: 206042
ugagccaucucuauggucc

SEQ ID NO: 206044 - RNA, 19 nt, Artificial Sequence
  Description of Artificial Sequence: Synthetic oligonucleotide
  Sense strand starting at position 148 of SEQ ID NO: 2655
ucaauaagcuaccuugagu

SEQ ID NO: 206045 - RNA, 19 nt, Artificial Sequence
  Description of Artificial Sequence: Synthetic oligonucleotide
  Antisense strand to SEQ ID NO: 206044
acucaagguagcuuauuga

SEQ ID NO: 206046 - RNA, 19 nt, Artificial Sequence
  Description of Artificial Sequence: Synthetic oligonucleotide
  Sense strand starting at position 182 of SEQ ID NO: 2655
agauuagugggaugaaggu

SEQ ID NO: 206047 - RNA, 19 nt, Artificial Sequence
  Description of Artificial Sequence: Synthetic oligonucleotide
  Antisense strand to SEQ ID NO: 206046
accuucaucccacuaaucu

SEQ ID NO: 206048 - RNA, 19 nt, Artificial Sequence
  Description of Artificial Sequence: Synthetic oligonucleotide
  Sense strand starting at position 318 of SEQ ID NO: 2655
guagcaguacaucauuaga

SEQ ID NO: 206049 - RNA, 19 nt, Artificial Sequence
  Description of Artificial Sequence: Synthetic oligonucleotide
  Antisense strand to SEQ ID NO: 206048
ucuaaugauguacugcuac

SEQ ID NO: 206050 - RNA, 19 nt, Artificial Sequence
  Description of Artificial Sequence: Synthetic oligonucleotide
  Sense strand starting at position 320 of SEQ ID NO: 2655
agcaguacaucauuagaaa

SEQ ID NO: 206051 - RNA, 19 nt, Artificial Sequence
  Description of Artificial Sequence: Synthetic oligonucleotide
  Antisense strand to SEQ ID NO: 206050
uuucuaaugauguacugcu

SEQ ID NO: 206052 - RNA, 19 nt, Artificial Sequence
  Description of Artificial Sequence: Synthetic oligonucleotide
  Sense strand starting at position 378 of SEQ ID NO: 2655
uccagucauuguccaacca

SEQ ID NO: 206053 - RNA, 19 nt, Artificial Sequence
  Description of Artificial Sequence: Synthetic oligonucleotide
  Antisense strand to SEQ ID NO: 206052
ugguuggacaaugacugga

SEQ ID NO: 206054 - RNA, 19 nt, Artificial Sequence
  Description of Artificial Sequence: Synthetic oligonucleotide
  Sense strand starting at position 379 of SEQ ID NO: 2655
ccagucauuguccaaccau

SEQ ID NO: 206055 - RNA, 19 nt, Artificial Sequence
  Description of Artificial Sequence: Synthetic oligonucleotide
  Antisense strand to SEQ ID NO: 206054
augguuggacaaugacugg

SEQ ID NO: 206056 - RNA, 19 nt, Artificial Sequence
  Description of Artificial Sequence: Synthetic oligonucleotide
  Sense strand starting at position 637 of SEQ ID NO: 2655
uucucuuucguauauuaga

SEQ ID NO: 206057 - RNA, 19 nt, Artificial Sequence
  Description of Artificial Sequence: Synthetic oligonucleotide
  Antisense strand to SEQ ID NO: 206056
ucuaauauacgaaagagaa

SEQ ID NO: 206058 - RNA, 19 nt, Artificial Sequence
  Description of Artificial Sequence: Synthetic oligonucleotide
  Sense strand starting at position 670 of SEQ ID NO: 2655
gcccguacucgcucagaag

SEQ ID NO: 206059 - RNA, 19 nt, Artificial Sequence
  Description of Artificial Sequence: Synthetic oligonucleotide
  Antisense strand to SEQ ID NO: 206058
cuucugagcgaguacgggc

SEQ ID NO: 206060 - RNA, 19 nt, Artificial Sequence
  Description of Artificial Sequence: Synthetic oligonucleotide
  Sense strand starting at position 713 of SEQ ID NO: 2655
uggacaacguucccagaga

SEQ ID NO: 206061 - RNA, 19 nt, Artificial Sequence
  Description of Artificial Sequence: Synthetic oligonucleotide
  Antisense strand to SEQ ID NO: 206060
ucucugggaacguugucca

SEQ ID NO: 206062 - RNA, 19 nt, Artificial Sequence
  Description of Artificial Sequence: Synthetic oligonucleotide
  Sense strand starting at position 739 of SEQ ID NO: 2655
agcccauuacuuuggaaag

SEQ ID NO: 206063 - RNA, 19 nt, Artificial Sequence
  Description of Artificial Sequence: Synthetic oligonucleotide
  Antisense strand to SEQ ID NO: 206062
cuuuccaaaguaaugggcu

SEQ ID NO: 206064 - RNA, 19 nt, Artificial Sequence
  Description of Artificial Sequence: Synthetic oligonucleotide
  Sense strand starting at position 754 of SEQ ID NO: 2655
aaaguauugccuuaggaca

SEQ ID NO: 206065 - RNA, 19 nt, Artificial Sequence
  Description of Artificial Sequence: Synthetic oligonucleotide
  Antisense strand to SEQ ID NO: 206064
uguccuaaggcaauacuuu

SEQ ID NO: 206066 - RNA, 19 nt, Artificial Sequence
  Description of Artificial Sequence: Synthetic oligonucleotide
  Sense strand starting at position 1183 of SEQ ID NO: 2655
ccugaauucuccucccgga

SEQ ID NO: 206067 - RNA, 19 nt, Artificial Sequence
  Description of Artificial Sequence: Synthetic oligonucleotide
  Antisense strand to SEQ ID NO: 206066
uccgggaggagaauucagg

SEQ ID NO: 206068 - RNA, 19 nt, Artificial Sequence
  Description of Artificial Sequence: Synthetic oligonucleotide
  Sense strand starting at position 1187 of SEQ ID NO: 2655
aauucuccucccggaagua

SEQ ID NO: 206069 - RNA, 19 nt, Artificial Sequence
  Description of Artificial Sequence: Synthetic oligonucleotide
  Antisense strand to SEQ ID NO: 206068
uacuuccgggaggagaauu

SEQ ID NO: 206070 - RNA, 19 nt, Artificial Sequence
  Description of Artificial Sequence: Synthetic oligonucleotide
  Sense strand starting at position 1274 of SEQ ID NO: 2655
acgauuagaagguguggaa

SEQ ID NO: 206071 - RNA, 19 nt, Artificial Sequence
  Description of Artificial Sequence: Synthetic oligonucleotide
  Antisense strand to SEQ ID NO: 206070
uuccacaccuucuaaucgu

SEQ ID NO: 206072 - RNA, 19 nt, Artificial Sequence
  Description of Artificial Sequence: Synthetic oligonucleotide
  Sense strand starting at position 1291 of SEQ ID NO: 2655
aauggacgguuucucagau

SEQ ID NO: 206073 - RNA, 19 nt, Artificial Sequence
  Description of Artificial Sequence: Synthetic oligonucleotide
  Antisense strand to SEQ ID NO: 206072
aucugagaaaccguccauu

SEQ ID NO: 206074 - RNA, 19 nt, Artificial Sequence
  Description of Artificial Sequence: Synthetic oligonucleotide
  Sense strand starting at position 1410 of SEQ ID NO: 2655
ugggacuccucuuuacaag

SEQ ID NO: 206075 - RNA, 19 nt, Artificial Sequence
  Description of Artificial Sequence: Synthetic oligonucleotide
  Antisense strand to SEQ ID NO: 206074
cuuguaaagaggaguccca

SEQ ID NO: 206076 - RNA, 19 nt, Artificial Sequence
  Description of Artificial Sequence: Synthetic oligonucleotide
  Sense strand starting at position 1986 of SEQ ID NO: 2655
aaacaaauggcgugucaag

SEQ ID NO: 206077 - RNA, 19 nt, Artificial Sequence
  Description of Artificial Sequence: Synthetic oligonucleotide
  Antisense strand to SEQ ID NO: 206076
cuugacacgccauuuguuu

SEQ ID NO: 206078 - RNA, 19 nt, Artificial Sequence
  Description of Artificial Sequence: Synthetic oligonucleotide
  Sense strand starting at position 2000 of SEQ ID NO: 2655
ucaaguuucgcaggaagag

SEQ ID NO: 206079 - RNA, 19 nt, Artificial Sequence
  Description of Artificial Sequence: Synthetic oligonucleotide
  Antisense strand to SEQ ID NO: 206078
cucuuccugcgaaacuuga

SEQ ID NO: 206080 - RNA, 19 nt, Artificial Sequence
  Description of Artificial Sequence: Synthetic oligonucleotide
  Sense strand starting at position 2001 of SEQ ID NO: 2655
caaguuucgcaggaagaga

SEQ ID NO: 206081 - RNA, 19 nt, Artificial Sequence
  Description of Artificial Sequence: Synthetic oligonucleotide
  Antisense strand to SEQ ID NO: 206080
ucucuuccugcgaaacuug

SEQ ID NO: 206082 - RNA, 19 nt, Artificial Sequence
  Description of Artificial Sequence: Synthetic oligonucleotide
  Sense strand starting at position 2073 of SEQ ID NO: 2655
uccaauggcagaggucaaa

SEQ ID NO: 206083 - RNA, 19 nt, Artificial Sequence
  Description of Artificial Sequence: Synthetic oligonucleotide
  Antisense strand to SEQ ID NO: 206082
uuugaccucugccauugga

SEQ ID NO: 206084 - RNA, 19 nt, Artificial Sequence
  Description of Artificial Sequence: Synthetic oligonucleotide
  Sense strand starting at position 2117 of SEQ ID NO: 2655
aaagaauucuggcuccgag

SEQ ID NO: 206085 - RNA, 19 nt, Artificial Sequence
  Description of Artificial Sequence: Synthetic oligonucleotide
  Antisense strand to SEQ ID NO: 206084
cucggagccagaauucuuu

SEQ ID NO: 206086 - RNA, 19 nt, Artificial Sequence
  Description of Artificial Sequence: Synthetic oligonucleotide
  Sense strand starting at position 2142 of SEQ ID NO: 2655
uguacagugcuuuaaauau

SEQ ID NO: 206087 - RNA, 19 nt, Artificial Sequence
  Description of Artificial Sequence: Synthetic oligonucleotide
  Antisense strand to SEQ ID NO: 206086
auauuuaaagcacuguaca

SEQ ID NO: 206088 - RNA, 19 nt, Artificial Sequence
  Description of Artificial Sequence: Synthetic oligonucleotide
  Sense strand starting at position 2154 of SEQ ID NO: 2655
uaaauauggcagugguuau

SEQ ID NO: 206089 - RNA, 19 nt, Artificial Sequence
  Description of Artificial Sequence: Synthetic oligonucleotide
  Antisense strand to SEQ ID NO: 206088
auaaccacugccauauuua

SEQ ID NO: 206090 - RNA, 19 nt, Artificial Sequence
  Description of Artificial Sequence: Synthetic oligonucleotide
  Sense strand starting at position 2246 of SEQ ID NO: 2655
agaggcuuuauguagugaa

SEQ ID NO: 206091 - RNA, 19 nt, Artificial Sequence
  Description of Artificial Sequence: Synthetic oligonucleotide
  Antisense strand to SEQ ID NO: 206090
uucacuacauaaagccucu

SEQ ID NO: 206092 - RNA, 19 nt, Artificial Sequence
  Description of Artificial Sequence: Synthetic oligonucleotide
  Sense strand starting at position 2304 of SEQ ID NO: 2655
aguauuuguuucuugaagu

SEQ ID NO: 206093 - RNA, 19 nt, Artificial Sequence
  Description of Artificial Sequence: Synthetic oligonucleotide
  Antisense strand to SEQ ID NO: 206092
acuucaagaaacaaauacu

SEQ ID NO: 206094 - RNA, 19 nt, Artificial Sequence
  Description of Artificial Sequence: Synthetic oligonucleotide
  Sense strand starting at position 2615 of SEQ ID NO: 2655
uuuaaauugcuguagguau

SEQ ID NO: 206095 - RNA, 19 nt, Artificial Sequence
  Description of Artificial Sequence: Synthetic oligonucleotide
  Antisense strand to SEQ ID NO: 206094
auaccuacagcaauuuaaa

SEQ ID NO: 206096 - RNA, 19 nt, Artificial Sequence
  Description of Artificial Sequence: Synthetic oligonucleotide
  Sense strand starting at position 2626 of SEQ ID NO: 2655
guagguaucaaucauaguc

SEQ ID NO: 206097 - RNA, 19 nt, Artificial Sequence
  Description of Artificial Sequence: Synthetic oligonucleotide
  Antisense strand to SEQ ID NO: 206096
gacuaugauugauaccuac

SEQ ID NO: 206098 - RNA, 19 nt, Artificial Sequence
  Description of Artificial Sequence: Synthetic oligonucleotide
  Sense strand starting at position 2969 of SEQ ID NO: 2655
ugcaguuaggauuaccaca

SEQ ID NO: 206099 - RNA, 19 nt, Artificial Sequence
  Description of Artificial Sequence: Synthetic oligonucleotide
  Antisense strand to SEQ ID NO: 206098
ugugguaauccuaacugca

SEQ ID NO: 206100 - RNA, 19 nt, Artificial Sequence
  Description of Artificial Sequence: Synthetic oligonucleotide
  Sense strand starting at position 3078 of SEQ ID NO: 2655
augcauccucuaugaggua

SEQ ID NO: 206101 - RNA, 19 nt, Artificial Sequence
  Description of Artificial Sequence: Synthetic oligonucleotide
  Antisense strand to SEQ ID NO: 206100
uaccucauagaggaugcau

SEQ ID NO: 206102 - RNA, 19 nt, Artificial Sequence
  Description of Artificial Sequence: Synthetic oligonucleotide
  Sense strand starting at position 3208 of SEQ ID NO: 2655
ugagaaguguuucccaauu

SEQ ID NO: 206103 - RNA, 19 nt, Artificial Sequence
  Description of Artificial Sequence: Synthetic oligonucleotide
  Antisense strand to SEQ ID NO: 206102
aauugggaaacacuucuca

SEQ ID NO: 206104 - RNA, 19 nt, Artificial Sequence
  Description of Artificial Sequence: Synthetic oligonucleotide
  Sense strand starting at position 3247 of SEQ ID NO: 2655
guaauacuuuaugucuaga

SEQ ID NO: 206105 - RNA, 19 nt, Artificial Sequence
  Description of Artificial Sequence: Synthetic oligonucleotide
  Antisense strand to SEQ ID NO: 206104
ucuagacauaaaguauuac

SEQ ID NO: 206106 - RNA, 19 nt, Artificial Sequence
  Description of Artificial Sequence: Synthetic oligonucleotide
  Sense strand starting at position 3589 of SEQ ID NO: 2655
gggcuagaaaccugacuuc

SEQ ID NO: 206107 - RNA, 19 nt, Artificial Sequence
  Description of Artificial Sequence: Synthetic oligonucleotide
  Antisense strand to SEQ ID NO: 206106
gaagucagguuucuagccc

SEQ ID NO: 206108 - RNA, 19 nt, Artificial Sequence
  Description of Artificial Sequence: Synthetic oligonucleotide
  Sense strand starting at position 3691 of SEQ ID NO: 2655
uuagcacuuucugugaaga

SEQ ID NO: 206109 - RNA, 19 nt, Artificial Sequence
  Description of Artificial Sequence: Synthetic oligonucleotide
  Antisense strand to SEQ ID NO: 206108
ucuucacagaaagugcuaa

SEQ ID NO: 206110 - RNA, 19 nt, Artificial Sequence
  Description of Artificial Sequence: Synthetic oligonucleotide
  Sense strand starting at position 3692 of SEQ ID NO: 2655
uagcacuuucugugaagaa

SEQ ID NO: 206111 - RNA, 19 nt, Artificial Sequence
  Description of Artificial Sequence: Synthetic oligonucleotide
  Antisense strand to SEQ ID NO: 206110
uucuucacagaaagugcua

SEQ ID NO: 206112 - RNA, 19 nt, Artificial Sequence
  Description of Artificial Sequence: Synthetic oligonucleotide
  Sense strand starting at position 3699 of SEQ ID NO: 2655
uucugugaagaaugaucaa

SEQ ID NO: 206113 - RNA, 19 nt, Artificial Sequence
  Description of Artificial Sequence: Synthetic oligonucleotide
  Antisense strand to SEQ ID NO: 206112
uugaucauucuucacagaa

SEQ ID NO: 206114 - RNA, 19 nt, Artificial Sequence
  Description of Artificial Sequence: Synthetic oligonucleotide
  Sense strand starting at position 3754 of SEQ ID NO: 2655
cacaguaaguguuuaagaa

SEQ ID NO: 206115 - RNA, 19 nt, Artificial Sequence
  Description of Artificial Sequence: Synthetic oligonucleotide
  Antisense strand to SEQ ID NO: 206114
uucuuaaacacuuacugug

SEQ ID NO: 206116 - RNA, 19 nt, Artificial Sequence
  Description of Artificial Sequence: Synthetic oligonucleotide
  Sense strand starting at position 3755 of SEQ ID NO: 2655
acaguaaguguuuaagaac

SEQ ID NO: 206117 - RNA, 19 nt, Artificial Sequence
  Description of Artificial Sequence: Synthetic oligonucleotide
  Antisense strand to SEQ ID NO: 206116
guucuuaaacacuuacugu

SEQ ID NO: 206118 - RNA, 19 nt, Artificial Sequence
  Description of Artificial Sequence: Synthetic oligonucleotide
  Sense strand starting at position 3800 of SEQ ID NO: 2655
ggucauagaaggcaguuua

SEQ ID NO: 206119 - RNA, 19 nt, Artificial Sequence
  Description of Artificial Sequence: Synthetic oligonucleotide
  Antisense strand to SEQ ID NO: 206118
uaaacugccuucuaugacc

SEQ ID NO: 206120 - RNA, 19 nt, Artificial Sequence
  Description of Artificial Sequence: Synthetic oligonucleotide
  Sense strand starting at position 3915 of SEQ ID NO: 2655
cccuucugagauggaaauu

SEQ ID NO: 206121 - RNA, 19 nt, Artificial Sequence
  Description of Artificial Sequence: Synthetic oligonucleotide
  Antisense strand to SEQ ID NO: 206120
aauuuccaucucagaaggg

SEQ ID NO: 206122 - RNA, 19 nt, Artificial Sequence
  Description of Artificial Sequence: Synthetic oligonucleotide
  Sense strand starting at position 3947 of SEQ ID NO: 2655
caguguugugaggauugga

SEQ ID NO: 206123 - RNA, 19 nt, Artificial Sequence
  Description of Artificial Sequence: Synthetic oligonucleotide
  Antisense strand to SEQ ID NO: 206122
uccaauccucacaacacug

SEQ ID NO: 206124 - RNA, 19 nt, Artificial Sequence
  Description of Artificial Sequence: Synthetic oligonucleotide
  Sense strand starting at position 142 of SEQ ID NO: 2656
ccaggacuaugcucguaca

SEQ ID NO: 206125 - RNA, 19 nt, Artificial Sequence
  Description of Artificial Sequence: Synthetic oligonucleotide
  Antisense strand to SEQ ID NO: 206124
uguacgagcauaguccugg

SEQ ID NO: 206126 - RNA, 19 nt, Artificial Sequence
  Description of Artificial Sequence: Synthetic oligonucleotide
  Sense strand starting at position 399 of SEQ ID NO: 2656
ggaggaaauucugcgauau

SEQ ID NO: 206127 - RNA, 19 nt, Artificial Sequence
  Description of Artificial Sequence: Synthetic oligonucleotide
  Antisense strand to SEQ ID NO: 206126
auaucgcagaauuuccucc

SEQ ID NO: 206128 - RNA, 19 nt, Artificial Sequence
  Description of Artificial Sequence: Synthetic oligonucleotide
  Sense strand starting at position 400 of SEQ ID NO: 2656
gaggaaauucugcgauaug

SEQ ID NO: 206129 - RNA, 19 nt, Artificial Sequence
  Description of Artificial Sequence: Synthetic oligonucleotide
  Antisense strand to SEQ ID NO: 206128
cauaucgcagaauuuccuc

SEQ ID NO: 206130 - RNA, 19 nt, Artificial Sequence
  Description of Artificial Sequence: Synthetic oligonucleotide
  Sense strand starting at position 403 of SEQ ID NO: 2656
gaaauucugcgauaugcaa

SEQ ID NO: 206131 - RNA, 19 nt, Artificial Sequence
  Description of Artificial Sequence: Synthetic oligonucleotide
  Antisense strand to SEQ ID NO: 206130
uugcauaucgcagaauuuc

SEQ ID NO: 206132 - RNA, 19 nt, Artificial Sequence
  Description of Artificial Sequence: Synthetic oligonucleotide
  Sense strand starting at position 579 of SEQ ID NO: 2656
ugcuaaucaacggguauga

SEQ ID NO: 206133 - RNA, 19 nt, Artificial Sequence
  Description of Artificial Sequence: Synthetic oligonucleotide
  Antisense strand to SEQ ID NO: 206132
ucauacccguugauuagca

SEQ ID NO: 206134 - RNA, 19 nt, Artificial Sequence
  Description of Artificial Sequence: Synthetic oligonucleotide
  Sense strand starting at position 599 of SEQ ID NO: 2656
guuucaguggugcaagaug

SEQ ID NO: 206135 - RNA, 19 nt, Artificial Sequence
  Description of Artificial Sequence: Synthetic oligonucleotide
  Antisense strand to SEQ ID NO: 206134
caucuugcaccacugaaac

SEQ ID NO: 206136 - RNA, 19 nt, Artificial Sequence
  Description of Artificial Sequence: Synthetic oligonucleotide
  Sense strand starting at position 615 of SEQ ID NO: 2656
augaaugcauccuagaauc

SEQ ID NO: 206137 - RNA, 19 nt, Artificial Sequence
  Description of Artificial Sequence: Synthetic oligonucleotide
  Antisense strand to SEQ ID NO: 206136
gauucuaggaugcauucau

SEQ ID NO: 206138 - RNA, 19 nt, Artificial Sequence
  Description of Artificial Sequence: Synthetic oligonucleotide
  Sense strand starting at position 633 of SEQ ID NO: 2656
cuaucaggcugcucacuua

SEQ ID NO: 206139 - RNA, 19 nt, Artificial Sequence
  Description of Artificial Sequence: Synthetic oligonucleotide
  Antisense strand to SEQ ID NO: 206138
uaagugagcagccugauag

SEQ ID NO: 206140 - RNA, 19 nt, Artificial Sequence
  Description of Artificial Sequence: Synthetic oligonucleotide
  Sense strand starting at position 695 of SEQ ID NO: 2656
gauggugucuccuuuggaa

SEQ ID NO: 206141 - RNA, 19 nt, Artificial Sequence
  Description of Artificial Sequence: Synthetic oligonucleotide
  Antisense strand to SEQ ID NO: 206140
uuccaaaggagacaccauc

SEQ ID NO: 206142 - RNA, 19 nt, Artificial Sequence
  Description of Artificial Sequence: Synthetic oligonucleotide
  Sense strand starting at position 1043 of SEQ ID NO: 2656
ugucuagucccuuguugca

SEQ ID NO: 206143 - RNA, 19 nt, Artificial Sequence
  Description of Artificial Sequence: Synthetic oligonucleotide
  Antisense strand to SEQ ID NO: 206142
ugcaacaagggacuagaca

SEQ ID NO: 206144 - RNA, 19 nt, Artificial Sequence
  Description of Artificial Sequence: Synthetic oligonucleotide
  Sense strand starting at position 1181 of SEQ ID NO: 2656
gcuccagcucaagggauua

SEQ ID NO: 206145 - RNA, 19 nt, Artificial Sequence
  Description of Artificial Sequence: Synthetic oligonucleotide
  Antisense strand to SEQ ID NO: 206144
uaaucccuugagcuggagc

SEQ ID NO: 206146 - RNA, 19 nt, Artificial Sequence
  Description of Artificial Sequence: Synthetic oligonucleotide
  Sense strand starting at position 1356 of SEQ ID NO: 2656
gucccucagccagaucauu

SEQ ID NO: 206147 - RNA, 19 nt, Artificial Sequence
  Description of Artificial Sequence: Synthetic oligonucleotide
  Antisense strand to SEQ ID NO: 206146
aaugaucuggcugagggac

SEQ ID NO: 206148 - RNA, 19 nt, Artificial Sequence
  Description of Artificial Sequence: Synthetic oligonucleotide
  Sense strand starting at position 2078 of SEQ ID NO: 2656
ggcagagaguuccugacua

SEQ ID NO: 206149 - RNA, 19 nt, Artificial Sequence
  Description of Artificial Sequence: Synthetic oligonucleotide
  Antisense strand to SEQ ID NO: 206148
uagucaggaacucucugcc

SEQ ID NO: 206150 - RNA, 19 nt, Artificial Sequence
  Description of Artificial Sequence: Synthetic oligonucleotide
  Sense strand starting at position 2082 of SEQ ID NO: 2656
gagaguuccugacuagaug

SEQ ID NO: 206151 - RNA, 19 nt, Artificial Sequence
  Description of Artificial Sequence: Synthetic oligonucleotide
  Antisense strand to SEQ ID NO: 206150
caucuagucaggaacucuc

SEQ ID NO: 206152 - RNA, 19 nt, Artificial Sequence
  Description of Artificial Sequence: Synthetic oligonucleotide
  Sense strand starting at position 2311 of SEQ ID NO: 2656
cgcuuugggaauuguggau

SEQ ID NO: 206153 - RNA, 19 nt, Artificial Sequence
  Description of Artificial Sequence: Synthetic oligonucleotide
  Antisense strand to SEQ ID NO: 206152
auccacaauucccaaagcg

SEQ ID NO: 206154 - RNA, 19 nt, Artificial Sequence
  Description of Artificial Sequence: Synthetic oligonucleotide
  Sense strand starting at position 2318 of SEQ ID NO: 2656
ggaauuguggaucaggcau

SEQ ID NO: 206155 - RNA, 19 nt, Artificial Sequence
  Description of Artificial Sequence: Synthetic oligonucleotide
  Antisense strand to SEQ ID NO: 206154
augccugauccacaauucc

SEQ ID NO: 206156 - RNA, 19 nt, Artificial Sequence
  Description of Artificial Sequence: Synthetic oligonucleotide
  Sense strand starting at position 2347 of SEQ ID NO: 2656
cuuccugcuuguuugggaa

SEQ ID NO: 206157 - RNA, 19 nt, Artificial Sequence
  Description of Artificial Sequence: Synthetic oligonucleotide
  Antisense strand to SEQ ID NO: 206156
uucccaaacaagcaggaag

SEQ ID NO: 206158 - RNA, 19 nt, Artificial Sequence
  Description of Artificial Sequence: Synthetic oligonucleotide
  Sense strand starting at position 2370 of SEQ ID NO: 2656
ggcggaagucaugagcuua

SEQ ID NO: 206159 - RNA, 19 nt, Artificial Sequence
  Description of Artificial Sequence: Synthetic oligonucleotide
  Antisense strand to SEQ ID NO: 206158
uaagcucaugacuuccgcc

SEQ ID NO: 206160 - RNA, 19 nt, Artificial Sequence
  Description of Artificial Sequence: Synthetic oligonucleotide
  Sense strand starting at position 2384 of SEQ ID NO: 2656
gcuuauguugggcgaggaa

SEQ ID NO: 206161 - RNA, 19 nt, Artificial Sequence
  Description of Artificial Sequence: Synthetic oligonucleotide
  Antisense strand to SEQ ID NO: 206160
uuccucgcccaacauaagc

SEQ ID NO: 206162 - RNA, 19 nt, Artificial Sequence
  Description of Artificial Sequence: Synthetic oligonucleotide
  Sense strand starting at position 2402 of SEQ ID NO: 2656
aaaugagugcaaugcacua

SEQ ID NO: 206163 - RNA, 19 nt, Artificial Sequence
  Description of Artificial Sequence: Synthetic oligonucleotide
  Antisense strand to SEQ ID NO: 206162
uagugcauugcacucauuu

SEQ ID NO: 206164 - RNA, 19 nt, Artificial Sequence
  Description of Artificial Sequence: Synthetic oligonucleotide
  Sense strand starting at position 2460 of SEQ ID NO: 2656
agcacucugcuuuaucuga

SEQ ID NO: 206165 - RNA, 19 nt, Artificial Sequence
  Description of Artificial Sequence: Synthetic oligonucleotide
  Antisense strand to SEQ ID NO: 206164
ucagauaaagcagagugcu

SEQ ID NO: 206166 - RNA, 19 nt, Artificial Sequence
  Description of Artificial Sequence: Synthetic oligonucleotide
  Sense strand starting at position 2529 of SEQ ID NO: 2656
ggcccuuaccggcaagauu

SEQ ID NO: 206167 - RNA, 19 nt, Artificial Sequence
  Description of Artificial Sequence: Synthetic oligonucleotide
  Antisense strand to SEQ ID NO: 206166
aaucuugccgguaagggcc

SEQ ID NO: 206168 - RNA, 19 nt, Artificial Sequence
  Description of Artificial Sequence: Synthetic oligonucleotide
  Sense strand starting at position 2596 of SEQ ID NO: 2656
ugagaaucugagggcuuau

SEQ ID NO: 206169 - RNA, 19 nt, Artificial Sequence
  Description of Artificial Sequence: Synthetic oligonucleotide
  Antisense strand to SEQ ID NO: 206168
auaagcccucagauucuca

SEQ ID NO: 206170 - RNA, 19 nt, Artificial Sequence
  Description of Artificial Sequence: Synthetic oligonucleotide
  Sense strand starting at position 2628 of SEQ ID NO: 2656
agcccuguuucugcucuaa

SEQ ID NO: 206171 - RNA, 19 nt, Artificial Sequence
  Description of Artificial Sequence: Synthetic oligonucleotide
  Antisense strand to SEQ ID NO: 206170
uuagagcagaaacagggcu

SEQ ID NO: 206172 - RNA, 19 nt, Artificial Sequence
  Description of Artificial Sequence: Synthetic oligonucleotide
  Sense strand starting at position 2846 of SEQ ID NO: 2656
gcugcuuccuaucuuugua

SEQ ID NO: 206173 - RNA, 19 nt, Artificial Sequence
  Description of Artificial Sequence: Synthetic oligonucleotide
  Antisense strand to SEQ ID NO: 206172
uacaaagauaggaagcagc

SEQ ID NO: 206174 - RNA, 19 nt, Artificial Sequence
  Description of Artificial Sequence: Synthetic oligonucleotide
  Sense strand starting at position 2851 of SEQ ID NO: 2656
uuccuaucuuuguaaggga

SEQ ID NO: 206175 - RNA, 19 nt, Artificial Sequence
  Description of Artificial Sequence: Synthetic oligonucleotide
  Antisense strand to SEQ ID NO: 206174
ucccuuacaaagauaggaa

SEQ ID NO: 206176 - RNA, 19 nt, Artificial Sequence
  Description of Artificial Sequence: Synthetic oligonucleotide
  Sense strand starting at position 2854 of SEQ ID NO: 2656
cuaucuuuguaagggaaga

SEQ ID NO: 206177 - RNA, 19 nt, Artificial Sequence
  Description of Artificial Sequence: Synthetic oligonucleotide
  Antisense strand to SEQ ID NO: 206176
ucuucccuuacaaagauag

SEQ ID NO: 206178 - RNA, 19 nt, Artificial Sequence
  Description of Artificial Sequence: Synthetic oligonucleotide
  Sense strand starting at position 2990 of SEQ ID NO: 2656
gcuggauucugcuucuaug

SEQ ID NO: 206179 - RNA, 19 nt, Artificial Sequence
  Description of Artificial Sequence: Synthetic oligonucleotide
  Antisense strand to SEQ ID NO: 206178
cauagaagcagaauccagc

SEQ ID NO: 206180 - RNA, 19 nt, Artificial Sequence
  Description of Artificial Sequence: Synthetic oligonucleotide
  Sense strand starting at position 3044 of SEQ ID NO: 2656
aaggacuugccagguagaa

SEQ ID NO: 206181 - RNA, 19 nt, Artificial Sequence
  Description of Artificial Sequence: Synthetic oligonucleotide
  Antisense strand to SEQ ID NO: 206180
uucuaccuggcaaguccuu

SEQ ID NO: 206182 - RNA, 19 nt, Artificial Sequence
  Description of Artificial Sequence: Synthetic oligonucleotide
  Sense strand starting at position 3537 of SEQ ID NO: 2656
guggcaucuagugacuuaa

SEQ ID NO: 206183 - RNA, 19 nt, Artificial Sequence
  Description of Artificial Sequence: Synthetic oligonucleotide
  Antisense strand to SEQ ID NO: 206182
uuaagucacuagaugccac

SEQ ID NO: 206184 - RNA, 19 nt, Artificial Sequence
  Description of Artificial Sequence: Synthetic oligonucleotide
  Sense strand starting at position 3539 of SEQ ID NO: 2656
ggcaucuagugacuuaaau

SEQ ID NO: 206185 - RNA, 19 nt, Artificial Sequence
  Description of Artificial Sequence: Synthetic oligonucleotide
  Antisense strand to SEQ ID NO: 206184
auuuaagucacuagaugcc

SEQ ID NO: 206186 - RNA, 19 nt, Artificial Sequence
  Description of Artificial Sequence: Synthetic oligonucleotide
  Sense strand starting at position 3734 of SEQ ID NO: 2656
gaaggcaucccgugagugu

SEQ ID NO: 206187 - RNA, 19 nt, Artificial Sequence
  Description of Artificial Sequence: Synthetic oligonucleotide
  Antisense strand to SEQ ID NO: 206186
acacucacgggaugccuuc

SEQ ID NO: 206188 - RNA, 19 nt, Artificial Sequence
  Description of Artificial Sequence: Synthetic oligonucleotide
  Sense strand starting at position 3741 of SEQ ID NO: 2656
ucccgugagugucuuuaga

SEQ ID NO: 206189 - RNA, 19 nt, Artificial Sequence
  Description of Artificial Sequence: Synthetic oligonucleotide
  Antisense strand to SEQ ID NO: 206188
ucuaaagacacucacggga

SEQ ID NO: 206190 - RNA, 19 nt, Artificial Sequence
  Description of Artificial Sequence: Synthetic oligonucleotide
  Sense strand starting at position 3743 of SEQ ID NO: 2656
ccgugagugucuuuagaga

SEQ ID NO: 206191 - RNA, 19 nt, Artificial Sequence
  Description of Artificial Sequence: Synthetic oligonucleotide
  Antisense strand to SEQ ID NO: 206190
ucucuaaagacacucacgg

SEQ ID NO: 206192 - RNA, 19 nt, Artificial Sequence
  Description of Artificial Sequence: Synthetic oligonucleotide
  Sense strand starting at position 3745 of SEQ ID NO: 2656
gugagugucuuuagagagg

SEQ ID NO: 206193 - RNA, 19 nt, Artificial Sequence
  Description of Artificial Sequence: Synthetic oligonucleotide
  Antisense strand to SEQ ID NO: 206192
ccucucuaaagacacucac

SEQ ID NO: 206194 - RNA, 19 nt, Artificial Sequence
  Description of Artificial Sequence: Synthetic oligonucleotide
  Sense strand starting at position 3954 of SEQ ID NO: 2656
cugauugaguuccugaugu

SEQ ID NO: 206195 - RNA, 19 nt, Artificial Sequence
  Description of Artificial Sequence: Synthetic oligonucleotide
  Antisense strand to SEQ ID NO: 206194
acaucaggaacucaaucag

SEQ ID NO: 206196 - RNA, 19 nt, Artificial Sequence
  Description of Artificial Sequence: Synthetic oligonucleotide
  Sense strand starting at position 3956 of SEQ ID NO: 2656
gauugaguuccugauguau

SEQ ID NO: 206197 - RNA, 19 nt, Artificial Sequence
  Description of Artificial Sequence: Synthetic oligonucleotide
  Antisense strand to SEQ ID NO: 206196
auacaucaggaacucaauc

SEQ ID NO: 206198 - RNA, 19 nt, Artificial Sequence
  Description of Artificial Sequence: Synthetic oligonucleotide
  Sense strand starting at position 3968 of SEQ ID NO: 2656
gauguauguagaggcugaa

SEQ ID NO: 206199 - RNA, 19 nt, Artificial Sequence
  Description of Artificial Sequence: Synthetic oligonucleotide
  Antisense strand to SEQ ID NO: 206198
uucagccucuacauacauc

SEQ ID NO: 206200 - RNA, 19 nt, Artificial Sequence
  Description of Artificial Sequence: Synthetic oligonucleotide
  Sense strand starting at position 3972 of SEQ ID NO: 2656
uauguagaggcugaauagu

SEQ ID NO: 206201 - RNA, 19 nt, Artificial Sequence
  Description of Artificial Sequence: Synthetic oligonucleotide
  Antisense strand to SEQ ID NO: 206200
acuauucagccucuacaua

SEQ ID NO: 206202 - RNA, 19 nt, Artificial Sequence
  Description of Artificial Sequence: Synthetic oligonucleotide
  Sense strand starting at position 3980 of SEQ ID NO: 2656
ggcugaauaguucaacgga

SEQ ID NO: 206203 - RNA, 19 nt, Artificial Sequence
  Description of Artificial Sequence: Synthetic oligonucleotide
  Antisense strand to SEQ ID NO: 206202
uccguugaacuauucagcc

SEQ ID NO: 206204 - RNA, 19 nt, Artificial Sequence
  Description of Artificial Sequence: Synthetic oligonucleotide
  Sense strand starting at position 329 of SEQ ID NO: 2658
cugaauacggagggaugua

SEQ ID NO: 206205 - RNA, 19 nt, Artificial Sequence
  Description of Artificial Sequence: Synthetic oligonucleotide
  Antisense strand to SEQ ID NO: 206204
uacaucccuccguauucag

SEQ ID NO: 206206 - RNA, 19 nt, Artificial Sequence
  Description of Artificial Sequence: Synthetic oligonucleotide
  Sense strand starting at position 432 of SEQ ID NO: 2658
gugugacagcuccacucau

SEQ ID NO: 206207 - RNA, 19 nt, Artificial Sequence
  Description of Artificial Sequence: Synthetic oligonucleotide
  Antisense strand to SEQ ID NO: 206206
augaguggagcugucacac

SEQ ID NO: 206208 - RNA, 19 nt, Artificial Sequence
  Description of Artificial Sequence: Synthetic oligonucleotide
  Sense strand starting at position 494 of SEQ ID NO: 2658
gcaugaugggcucagaauc

SEQ ID NO: 206209 - RNA, 19 nt, Artificial Sequence
  Description of Artificial Sequence: Synthetic oligonucleotide
  Antisense strand to SEQ ID NO: 206208
gauucugagcccaucaugc

SEQ ID NO: 206210 - RNA, 19 nt, Artificial Sequence
  Description of Artificial Sequence: Synthetic oligonucleotide
  Sense strand starting at position 567 of SEQ ID NO: 2658
gaugacuugcugcgugcau

SEQ ID NO: 206211 - RNA, 19 nt, Artificial Sequence
  Description of Artificial Sequence: Synthetic oligonucleotide
  Antisense strand to SEQ ID NO: 206210
augcacgcagcaagucauc

SEQ ID NO: 206212 - RNA, 19 nt, Artificial Sequence
  Description of Artificial Sequence: Synthetic oligonucleotide
  Sense strand starting at position 784 of SEQ ID NO: 2658
gcagguaguuuauuccaca

SEQ ID NO: 206213 - RNA, 19 nt, Artificial Sequence
  Description of Artificial Sequence: Synthetic oligonucleotide
  Antisense strand to SEQ ID NO: 206212
uguggaauaaacuaccugc

SEQ ID NO: 206214 - RNA, 19 nt, Artificial Sequence
  Description of Artificial Sequence: Synthetic oligonucleotide
  Sense strand starting at position 1222 of SEQ ID NO: 2658
uagugaaaggucuggucua

SEQ ID NO: 206215 - RNA, 19 nt, Artificial Sequence
  Description of Artificial Sequence: Synthetic oligonucleotide
  Antisense strand to SEQ ID NO: 206214
uagaccagaccuuucacua

SEQ ID NO: 206216 - RNA, 19 nt, Artificial Sequence
  Description of Artificial Sequence: Synthetic oligonucleotide
  Sense strand starting at position 1223 of SEQ ID NO: 2658
agugaaaggucuggucuag

SEQ ID NO: 206217 - RNA, 19 nt, Artificial Sequence
  Description of Artificial Sequence: Synthetic oligonucleotide
  Antisense strand to SEQ ID NO: 206216
cuagaccagaccuuucacu

SEQ ID NO: 206218 - RNA, 19 nt, Artificial Sequence
  Description of Artificial Sequence: Synthetic oligonucleotide
  Sense strand starting at position 1349 of SEQ ID NO: 2658
ccaguaaucucaguggaac

SEQ ID NO: 206219 - RNA, 19 nt, Artificial Sequence
  Description of Artificial Sequence: Synthetic oligonucleotide
  Antisense strand to SEQ ID NO: 206218
guuccacugagauuacugg

SEQ ID NO: 206220 - RNA, 19 nt, Artificial Sequence
  Description of Artificial Sequence: Synthetic oligonucleotide
  Sense strand starting at position 1350 of SEQ ID NO: 2658
caguaaucucaguggaaca

SEQ ID NO: 206221 - RNA, 19 nt, Artificial Sequence
  Description of Artificial Sequence: Synthetic oligonucleotide
  Antisense strand to SEQ ID NO: 206220
uguuccacugagauuacug

SEQ ID NO: 206222 - RNA, 19 nt, Artificial Sequence
  Description of Artificial Sequence: Synthetic oligonucleotide
  Sense strand starting at position 1540 of SEQ ID NO: 2658
ggcugaggauccuucucaa

SEQ ID NO: 206223 - RNA, 19 nt, Artificial Sequence
  Description of Artificial Sequence: Synthetic oligonucleotide
  Antisense strand to SEQ ID NO: 206222
uugagaaggauccucagcc

SEQ ID NO: 206224 - RNA, 19 nt, Artificial Sequence
  Description of Artificial Sequence: Synthetic oligonucleotide
  Sense strand starting at position 1543 of SEQ ID NO: 2658
ugaggauccuucucaagcu

SEQ ID NO: 206225 - RNA, 19 nt, Artificial Sequence
  Description of Artificial Sequence: Synthetic oligonucleotide
  Antisense strand to SEQ ID NO: 206224
agcuugagaaggauccuca

SEQ ID NO: 206226 - RNA, 19 nt, Artificial Sequence
  Description of Artificial Sequence: Synthetic oligonucleotide
  Sense strand starting at position 1950 of SEQ ID NO: 2658
gugacaguccucggcacaa

SEQ ID NO: 206227 - RNA, 19 nt, Artificial Sequence
  Description of Artificial Sequence: Synthetic oligonucleotide
  Antisense strand to SEQ ID NO: 206226
uugugccgaggacugucac

SEQ ID NO: 206228 - RNA, 19 nt, Artificial Sequence
  Description of Artificial Sequence: Synthetic oligonucleotide
  Sense strand starting at position 2334 of SEQ ID NO: 2658
ccuggaagcuucccugaga

SEQ ID NO: 206229 - RNA, 19 nt, Artificial Sequence
  Description of Artificial Sequence: Synthetic oligonucleotide
  Antisense strand to SEQ ID NO: 206228
ucucagggaagcuuccagg

SEQ ID NO: 206230 - RNA, 19 nt, Artificial Sequence
  Description of Artificial Sequence: Synthetic oligonucleotide
  Sense strand starting at position 2467 of SEQ ID NO: 2658
cucaguucccauggagaga

SEQ ID NO: 206231 - RNA, 19 nt, Artificial Sequence
  Description of Artificial Sequence: Synthetic oligonucleotide
  Antisense strand to SEQ ID NO: 206230
ucucuccaugggaacugag

SEQ ID NO: 206232 - RNA, 19 nt, Artificial Sequence
  Description of Artificial Sequence: Synthetic oligonucleotide
  Sense strand starting at position 2717 of SEQ ID NO: 2658
ggcacauucugaccaagag

SEQ ID NO: 206233 - RNA, 19 nt, Artificial Sequence
  Description of Artificial Sequence: Synthetic oligonucleotide
  Antisense strand to SEQ ID NO: 206232
cucuuggucagaaugugcc

SEQ ID NO: 206234 - RNA, 19 nt, Artificial Sequence
  Description of Artificial Sequence: Synthetic oligonucleotide
  Sense strand starting at position 2821 of SEQ ID NO: 2658
gggccuguuccagggugua

SEQ ID NO: 206235 - RNA, 19 nt, Artificial Sequence
  Description of Artificial Sequence: Synthetic oligonucleotide
  Antisense strand to SEQ ID NO: 206234
uacacccuggaacaggccc

SEQ ID NO: 206236 - RNA, 19 nt, Artificial Sequence
  Description of Artificial Sequence: Synthetic oligonucleotide
  Sense strand starting at position 2862 of SEQ ID NO: 2658
gggcauucuggugagucca

SEQ ID NO: 206237 - RNA, 19 nt, Artificial Sequence
  Description of Artificial Sequence: Synthetic oligonucleotide
  Antisense strand to SEQ ID NO: 206236
uggacucaccagaaugccc

SEQ ID NO: 206238 - RNA, 19 nt, Artificial Sequence
  Description of Artificial Sequence: Synthetic oligonucleotide
  Sense strand starting at position 3120 of SEQ ID NO: 2658
uggcaugugccuugggaaa

SEQ ID NO: 206239 - RNA, 19 nt, Artificial Sequence
  Description of Artificial Sequence: Synthetic oligonucleotide
  Antisense strand to SEQ ID NO: 206238
uuucccaaggcacaugcca

SEQ ID NO: 206240 - RNA, 19 nt, Artificial Sequence
  Description of Artificial Sequence: Synthetic oligonucleotide
  Sense strand starting at position 3334 of SEQ ID NO: 2658
ggccucaguucccaucaau

SEQ ID NO: 206241 - RNA, 19 nt, Artificial Sequence
  Description of Artificial Sequence: Synthetic oligonucleotide
  Antisense strand to SEQ ID NO: 206240
auugaugggaacugaggcc

SEQ ID NO: 206242 - RNA, 19 nt, Artificial Sequence
  Description of Artificial Sequence: Synthetic oligonucleotide
  Sense strand starting at position 3591 of SEQ ID NO: 2658
uaaggugagugucaggaaa

SEQ ID NO: 206243 - RNA, 19 nt, Artificial Sequence
  Description of Artificial Sequence: Synthetic oligonucleotide
  Antisense strand to SEQ ID NO: 206242
uuuccugacacucaccuua

SEQ ID NO: 206244 - RNA, 19 nt, Artificial Sequence
  Description of Artificial Sequence: Synthetic oligonucleotide
  Sense strand starting at position 3594 of SEQ ID NO: 2658
ggugagugucaggaaacga

SEQ ID NO: 206245 - RNA, 19 nt, Artificial Sequence
  Description of Artificial Sequence: Synthetic oligonucleotide
  Antisense strand to SEQ ID NO: 206244
ucguuuccugacacucacc

SEQ ID NO: 206246 - RNA, 19 nt, Artificial Sequence
  Description of Artificial Sequence: Synthetic oligonucleotide
  Sense strand starting at position 3672 of SEQ ID NO: 2658
ugcaguaucgagucugcuu

SEQ ID NO: 206247 - RNA, 19 nt, Artificial Sequence
  Description of Artificial Sequence: Synthetic oligonucleotide
  Antisense strand to SEQ ID NO: 206246
aagcagacucgauacugca

SEQ ID NO: 206248 - RNA, 19 nt, Artificial Sequence
  Description of Artificial Sequence: Synthetic oligonucleotide
  Sense strand starting at position 3673 of SEQ ID NO: 2658
gcaguaucgagucugcuuu

SEQ ID NO: 206249 - RNA, 19 nt, Artificial Sequence
  Description of Artificial Sequence: Synthetic oligonucleotide
  Antisense strand to SEQ ID NO: 206248
aaagcagacucgauacugc

SEQ ID NO: 206250 - RNA, 19 nt, Artificial Sequence
  Description of Artificial Sequence: Synthetic oligonucleotide
  Sense strand starting at position 3677 of SEQ ID NO: 2658
uaucgagucugcuuucuca

SEQ ID NO: 206251 - RNA, 19 nt, Artificial Sequence
  Description of Artificial Sequence: Synthetic oligonucleotide
  Antisense strand to SEQ ID NO: 206250
ugagaaagcagacucgaua

SEQ ID NO: 206252 - RNA, 19 nt, Artificial Sequence
  Description of Artificial Sequence: Synthetic oligonucleotide
  Sense strand starting at position 3684 of SEQ ID NO: 2658
ucugcuuucucaggaggca

SEQ ID NO: 206253 - RNA, 19 nt, Artificial Sequence
  Description of Artificial Sequence: Synthetic oligonucleotide
  Antisense strand to SEQ ID NO: 206252
ugccuccugagaaagcaga

SEQ ID NO: 206254 - RNA, 19 nt, Artificial Sequence
  Description of Artificial Sequence: Synthetic oligonucleotide
  Sense strand starting at position 3734 of SEQ ID NO: 2658
agcaaauccgaaugacuca

SEQ ID NO: 206255 - RNA, 19 nt, Artificial Sequence
  Description of Artificial Sequence: Synthetic oligonucleotide
  Antisense strand to SEQ ID NO: 206254
ugagucauucggauuugcu

SEQ ID NO: 206256 - RNA, 19 nt, Artificial Sequence
  Description of Artificial Sequence: Synthetic oligonucleotide
  Sense strand starting at position 3815 of SEQ ID NO: 2658
ccaagugaggucgggaaga

SEQ ID NO: 206257 - RNA, 19 nt, Artificial Sequence
  Description of Artificial Sequence: Synthetic oligonucleotide
  Antisense strand to SEQ ID NO: 206256
ucuucccgaccucacuugg

SEQ ID NO: 206258 - RNA, 19 nt, Artificial Sequence
  Description of Artificial Sequence: Synthetic oligonucleotide
  Sense strand starting at position 3865 of SEQ ID NO: 2658
auuagagguucagaagaug

SEQ ID NO: 206259 - RNA, 19 nt, Artificial Sequence
  Description of Artificial Sequence: Synthetic oligonucleotide
  Antisense strand to SEQ ID NO: 206258
caucuucugaaccucuaau

SEQ ID NO: 206260 - RNA, 19 nt, Artificial Sequence
  Description of Artificial Sequence: Synthetic oligonucleotide
  Sense strand starting at position 85 of SEQ ID NO: 2657
acaugagggucagaugaau

SEQ ID NO: 206261 - RNA, 19 nt, Artificial Sequence
  Description of Artificial Sequence: Synthetic oligonucleotide
  Antisense strand to SEQ ID NO: 206260
auucaucugacccucaugu

SEQ ID NO: 206262 - RNA, 19 nt, Artificial Sequence
  Description of Artificial Sequence: Synthetic oligonucleotide
  Sense strand starting at position 144 of SEQ ID NO: 2657
uguggugacucacauguga

SEQ ID NO: 206263 - RNA, 19 nt, Artificial Sequence
  Description of Artificial Sequence: Synthetic oligonucleotide
  Antisense strand to SEQ ID NO: 206262
ucacaugugagucaccaca

SEQ ID NO: 206264 - RNA, 19 nt, Artificial Sequence
  Description of Artificial Sequence: Synthetic oligonucleotide
  Sense strand starting at position 146 of SEQ ID NO: 2657
uggugacucacaugugaca

SEQ ID NO: 206265 - RNA, 19 nt, Artificial Sequence
  Description of Artificial Sequence: Synthetic oligonucleotide
  Antisense strand to SEQ ID NO: 206264
ugucacaugugagucacca

SEQ ID NO: 206266 - RNA, 19 nt, Artificial Sequence
  Description of Artificial Sequence: Synthetic oligonucleotide
  Sense strand starting at position 149 of SEQ ID NO: 2657
ugacucacaugugacaaau

SEQ ID NO: 206267 - RNA, 19 nt, Artificial Sequence
  Description of Artificial Sequence: Synthetic oligonucleotide
  Antisense strand to SEQ ID NO: 206266
auuugucacaugugaguca

SEQ ID NO: 206268 - RNA, 19 nt, Artificial Sequence
  Description of Artificial Sequence: Synthetic oligonucleotide
  Sense strand starting at position 158 of SEQ ID NO: 2657
ugugacaaauucuguucca

SEQ ID NO: 206269 - RNA, 19 nt, Artificial Sequence
  Description of Artificial Sequence: Synthetic oligonucleotide
  Antisense strand to SEQ ID NO: 206268
uggaacagaauuugucaca

SEQ ID NO: 206270 - RNA, 19 nt, Artificial Sequence
  Description of Artificial Sequence: Synthetic oligonucleotide
  Sense strand starting at position 159 of SEQ ID NO: 2657
gugacaaauucuguuccag

SEQ ID NO: 206271 - RNA, 19 nt, Artificial Sequence
  Description of Artificial Sequence: Synthetic oligonucleotide
  Antisense strand to SEQ ID NO: 206270
cuggaacagaauuugucac

SEQ ID NO: 206272 - RNA, 19 nt, Artificial Sequence
  Description of Artificial Sequence: Synthetic oligonucleotide
  Sense strand starting at position 212 of SEQ ID NO: 2657
ggaggauggcuguaccacu

SEQ ID NO: 206273 - RNA, 19 nt, Artificial Sequence
  Description of Artificial Sequence: Synthetic oligonucleotide
  Antisense strand to SEQ ID NO: 206272
agugguacagccauccucc

SEQ ID NO: 206274 - RNA, 19 nt, Artificial Sequence
  Description of Artificial Sequence: Synthetic oligonucleotide
  Sense strand starting at position 753 of SEQ ID NO: 2657
gccauaagcugauaagaca

SEQ ID NO: 206275 - RNA, 19 nt, Artificial Sequence
  Description of Artificial Sequence: Synthetic oligonucleotide
  Antisense strand to SEQ ID NO: 206274
ugucuuaucagcuuauggc

SEQ ID NO: 206276 - RNA, 19 nt, Artificial Sequence
  Description of Artificial Sequence: Synthetic oligonucleotide
  Sense strand starting at position 850 of SEQ ID NO: 2657
ggugcaacaucaucagaca

SEQ ID NO: 206277 - RNA, 19 nt, Artificial Sequence
  Description of Artificial Sequence: Synthetic oligonucleotide
  Antisense strand to SEQ ID NO: 206276
ugucugaugauguugcacc

SEQ ID NO: 206278 - RNA, 19 nt, Artificial Sequence
  Description of Artificial Sequence: Synthetic oligonucleotide
  Sense strand starting at position 1057 of SEQ ID NO: 2657
cacgucaucugucuuguua

SEQ ID NO: 206279 - RNA, 19 nt, Artificial Sequence
  Description of Artificial Sequence: Synthetic oligonucleotide
  Antisense strand to SEQ ID NO: 206278
uaacaagacagaugacgug

SEQ ID NO: 206280 - RNA, 19 nt, Artificial Sequence
  Description of Artificial Sequence: Synthetic oligonucleotide
  Sense strand starting at position 1059 of SEQ ID NO: 2657
cgucaucugucuuguuaca

SEQ ID NO: 206281 - RNA, 19 nt, Artificial Sequence
  Description of Artificial Sequence: Synthetic oligonucleotide
  Antisense strand to SEQ ID NO: 206280
uguaacaagacagaugacg

SEQ ID NO: 206282 - RNA, 19 nt, Artificial Sequence
  Description of Artificial Sequence: Synthetic oligonucleotide
  Sense strand starting at position 1334 of SEQ ID NO: 2657
cgaugagacuguggugcuu

SEQ ID NO: 206283 - RNA, 19 nt, Artificial Sequence
  Description of Artificial Sequence: Synthetic oligonucleotide
  Antisense strand to SEQ ID NO: 206282
aagcaccacagucucaucg

SEQ ID NO: 206284 - RNA, 19 nt, Artificial Sequence
  Description of Artificial Sequence: Synthetic oligonucleotide
  Sense strand starting at position 1346 of SEQ ID NO: 2657
ggugcuugcaguguacgau

SEQ ID NO: 206285 - RNA, 19 nt, Artificial Sequence
  Description of Artificial Sequence: Synthetic oligonucleotide
  Antisense strand to SEQ ID NO: 206284
aucguacacugcaagcacc

SEQ ID NO: 206286 - RNA, 19 nt, Artificial Sequence
  Description of Artificial Sequence: Synthetic oligonucleotide
  Sense strand starting at position 1546 of SEQ ID NO: 2657
gccucugguuccucaauca

SEQ ID NO: 206287 - RNA, 19 nt, Artificial Sequence
  Description of Artificial Sequence: Synthetic oligonucleotide
  Antisense strand to SEQ ID NO: 206286
ugauugaggaaccagaggc

SEQ ID NO: 206288 - RNA, 19 nt, Artificial Sequence
  Description of Artificial Sequence: Synthetic oligonucleotide
  Sense strand starting at position 1655 of SEQ ID NO: 2657
gggaguaguccacgaugaa

SEQ ID NO: 206289 - RNA, 19 nt, Artificial Sequence
  Description of Artificial Sequence: Synthetic oligonucleotide
  Antisense strand to SEQ ID NO: 206288
uucaucguggacuacuccc

SEQ ID NO: 206290 - RNA, 19 nt, Artificial Sequence
  Description of Artificial Sequence: Synthetic oligonucleotide
  Sense strand starting at position 1656 of SEQ ID NO: 2657
ggaguaguccacgaugaag

SEQ ID NO: 206291 - RNA, 19 nt, Artificial Sequence
  Description of Artificial Sequence: Synthetic oligonucleotide
  Antisense strand to SEQ ID NO: 206290
cuucaucguggacuacucc

SEQ ID NO: 206292 - RNA, 19 nt, Artificial Sequence
  Description of Artificial Sequence: Synthetic oligonucleotide
  Sense strand starting at position 1995 of SEQ ID NO: 2657
cacaguguggcaggugaaa

SEQ ID NO: 206293 - RNA, 19 nt, Artificial Sequence
  Description of Artificial Sequence: Synthetic oligonucleotide
  Antisense strand to SEQ ID NO: 206292
uuucaccugccacacugug

SEQ ID NO: 206294 - RNA, 19 nt, Artificial Sequence
  Description of Artificial Sequence: Synthetic oligonucleotide
  Sense strand starting at position 1997 of SEQ ID NO: 2657
caguguggcaggugaaaua

SEQ ID NO: 206295 - RNA, 19 nt, Artificial Sequence
  Description of Artificial Sequence: Synthetic oligonucleotide
  Antisense strand to SEQ ID NO: 206294
uauuucaccugccacacug

SEQ ID NO: 206296 - RNA, 19 nt, Artificial Sequence
  Description of Artificial Sequence: Synthetic oligonucleotide
  Sense strand starting at position 2006 of SEQ ID NO: 2657
aggugaaauagcugaacua

SEQ ID NO: 206297 - RNA, 19 nt, Artificial Sequence
  Description of Artificial Sequence: Synthetic oligonucleotide
  Antisense strand to SEQ ID NO: 206296
uaguucagcuauuucaccu

SEQ ID NO: 206298 - RNA, 19 nt, Artificial Sequence
  Description of Artificial Sequence: Synthetic oligonucleotide
  Sense strand starting at position 2060 of SEQ ID NO: 2657
agcaauugggaaugucaca

SEQ ID NO: 206299 - RNA, 19 nt, Artificial Sequence
  Description of Artificial Sequence: Synthetic oligonucleotide
  Antisense strand to SEQ ID NO: 206298
ugugacauucccaauugcu

SEQ ID NO: 206300 - RNA, 19 nt, Artificial Sequence
  Description of Artificial Sequence: Synthetic oligonucleotide
  Sense strand starting at position 2200 of SEQ ID NO: 2657
gagaaauauugccgcugga

SEQ ID NO: 206301 - RNA, 19 nt, Artificial Sequence
  Description of Artificial Sequence: Synthetic oligonucleotide
  Antisense strand to SEQ ID NO: 206300
uccagcggcaauauuucuc

SEQ ID NO: 206302 - RNA, 19 nt, Artificial Sequence
  Description of Artificial Sequence: Synthetic oligonucleotide
  Sense strand starting at position 2241 of SEQ ID NO: 2657
gccucuguguguugcugau

SEQ ID NO: 206303 - RNA, 19 nt, Artificial Sequence
  Description of Artificial Sequence: Synthetic oligonucleotide
  Antisense strand to SEQ ID NO: 206302
aucagcaacacacagaggc

SEQ ID NO: 206304 - RNA, 19 nt, Artificial Sequence
  Description of Artificial Sequence: Synthetic oligonucleotide
  Sense strand starting at position 2463 of SEQ ID NO: 2657
gaggcugcgucucugcaau

SEQ ID NO: 206305 - RNA, 19 nt, Artificial Sequence
  Description of Artificial Sequence: Synthetic oligonucleotide
  Antisense strand to SEQ ID NO: 206304
auugcagagacgcagccuc

SEQ ID NO: 206306 - RNA, 19 nt, Artificial Sequence
  Description of Artificial Sequence: Synthetic oligonucleotide
  Sense strand starting at position 2671 of SEQ ID NO: 2657
cucgucugguucuggagaa

SEQ ID NO: 206307 - RNA, 19 nt, Artificial Sequence
  Description of Artificial Sequence: Synthetic oligonucleotide
  Antisense strand to SEQ ID NO: 206306
uucuccagaaccagacgag

SEQ ID NO: 206308 - RNA, 19 nt, Artificial Sequence
  Description of Artificial Sequence: Synthetic oligonucleotide
  Sense strand starting at position 2672 of SEQ ID NO: 2657
ucgucugguucuggagaaa

SEQ ID NO: 206309 - RNA, 19 nt, Artificial Sequence
  Description of Artificial Sequence: Synthetic oligonucleotide
  Antisense strand to SEQ ID NO: 206308
uuucuccagaaccagacga

SEQ ID NO: 206310 - RNA, 19 nt, Artificial Sequence
  Description of Artificial Sequence: Synthetic oligonucleotide
  Sense strand starting at position 2887 of SEQ ID NO: 2657
ggugucugcaaacagugaa

SEQ ID NO: 206311 - RNA, 19 nt, Artificial Sequence
  Description of Artificial Sequence: Synthetic oligonucleotide
  Antisense strand to SEQ ID NO: 206310
uucacuguuugcagacacc

SEQ ID NO: 206312 - RNA, 19 nt, Artificial Sequence
  Description of Artificial Sequence: Synthetic oligonucleotide
  Sense strand starting at position 2890 of SEQ ID NO: 2657
gucugcaaacagugaacau

SEQ ID NO: 206313 - RNA, 19 nt, Artificial Sequence
  Description of Artificial Sequence: Synthetic oligonucleotide
  Antisense strand to SEQ ID NO: 206312
auguucacuguuugcagac

SEQ ID NO: 206314 - RNA, 19 nt, Artificial Sequence
  Description of Artificial Sequence: Synthetic oligonucleotide
  Sense strand starting at position 2981 of SEQ ID NO: 2657
gggagcugcaucugaguca

SEQ ID NO: 206315 - RNA, 19 nt, Artificial Sequence
  Description of Artificial Sequence: Synthetic oligonucleotide
  Antisense strand to SEQ ID NO: 206314
ugacucagaugcagcuccc

SEQ ID NO: 206316 - RNA, 19 nt, Artificial Sequence
  Description of Artificial Sequence: Synthetic oligonucleotide
  Sense strand starting at position 3204 of SEQ ID NO: 2657
acuccuguucccuggaguu

SEQ ID NO: 206317 - RNA, 19 nt, Artificial Sequence
  Description of Artificial Sequence: Synthetic oligonucleotide
  Antisense strand to SEQ ID NO: 206316
aacuccagggaacaggagu

SEQ ID NO: 206318 - RNA, 19 nt, Artificial Sequence
  Description of Artificial Sequence: Synthetic oligonucleotide
  Sense strand starting at position 3214 of SEQ ID NO: 2657
ccuggaguugcuuagagca

SEQ ID NO: 206319 - RNA, 19 nt, Artificial Sequence
  Description of Artificial Sequence: Synthetic oligonucleotide
  Antisense strand to SEQ ID NO: 206318
ugcucuaagcaacuccagg

SEQ ID NO: 206320 - RNA, 19 nt, Artificial Sequence
  Description of Artificial Sequence: Synthetic oligonucleotide
  Sense strand starting at position 3528 of SEQ ID NO: 2657
ucugaauucgcccaggaga

SEQ ID NO: 206321 - RNA, 19 nt, Artificial Sequence
  Description of Artificial Sequence: Synthetic oligonucleotide
  Antisense strand to SEQ ID NO: 206320
ucuccugggcgaauucaga

SEQ ID NO: 206322 - RNA, 19 nt, Artificial Sequence
  Description of Artificial Sequence: Synthetic oligonucleotide
  Sense strand starting at position 3835 of SEQ ID NO: 2657
accaguuccugagcugaau

SEQ ID NO: 206323 - RNA, 19 nt, Artificial Sequence
  Description of Artificial Sequence: Synthetic oligonucleotide
  Antisense strand to SEQ ID NO: 206322
auucagcucaggaacuggu

SEQ ID NO: 206324 - RNA, 19 nt, Artificial Sequence
  Description of Artificial Sequence: Synthetic oligonucleotide
  Sense strand starting at position 19 of SEQ ID NO: 2659
gacagucgguuugcuuaga

SEQ ID NO: 206325 - RNA, 19 nt, Artificial Sequence
  Description of Artificial Sequence: Synthetic oligonucleotide
  Antisense strand to SEQ ID NO: 206324
ucuaagcaaaccgacuguc

SEQ ID NO: 206326 - RNA, 19 nt, Artificial Sequence
  Description of Artificial Sequence: Synthetic oligonucleotide
  Sense strand starting at position 59 of SEQ ID NO: 2659
cagcucaccggaggauaau

SEQ ID NO: 206327 - RNA, 19 nt, Artificial Sequence
  Description of Artificial Sequence: Synthetic oligonucleotide
  Antisense strand to SEQ ID NO: 206326
auuauccuccggugagcug

SEQ ID NO: 206328 - RNA, 19 nt, Artificial Sequence
  Description of Artificial Sequence: Synthetic oligonucleotide
  Sense strand starting at position 65 of SEQ ID NO: 2659
accggaggauaaugauaau

SEQ ID NO: 206329 - RNA, 19 nt, Artificial Sequence
  Description of Artificial Sequence: Synthetic oligonucleotide
  Antisense strand to SEQ ID NO: 206328
auuaucauuauccuccggu

SEQ ID NO: 206330 - RNA, 19 nt, Artificial Sequence
  Description of Artificial Sequence: Synthetic oligonucleotide
  Sense strand starting at position 100 of SEQ ID NO: 2659
gggcuuaucaagugccaga

SEQ ID NO: 206331 - RNA, 19 nt, Artificial Sequence
  Description of Artificial Sequence: Synthetic oligonucleotide
  Antisense strand to SEQ ID NO: 206330
ucuggcacuugauaagccc

SEQ ID NO: 206332 - RNA, 19 nt, Artificial Sequence
  Description of Artificial Sequence: Synthetic oligonucleotide
  Sense strand starting at position 153 of SEQ ID NO: 2659
gucuuauaacagugucaug

SEQ ID NO: 206333 - RNA, 19 nt, Artificial Sequence
  Description of Artificial Sequence: Synthetic oligonucleotide
  Antisense strand to SEQ ID NO: 206332
caugacacuguuauaagac

SEQ ID NO: 206334 - RNA, 19 nt, Artificial Sequence
  Description of Artificial Sequence: Synthetic oligonucleotide
  Sense strand starting at position 164 of SEQ ID NO: 2659
gugucaugguauggauuua

SEQ ID NO: 206335 - RNA, 19 nt, Artificial Sequence
  Description of Artificial Sequence: Synthetic oligonucleotide
  Antisense strand to SEQ ID NO: 206334
uaaauccauaccaugacac

SEQ ID NO: 206336 - RNA, 19 nt, Artificial Sequence
  Description of Artificial Sequence: Synthetic oligonucleotide
  Sense strand starting at position 218 of SEQ ID NO: 2659
acgugauucgcccagggca

SEQ ID NO: 206337 - RNA, 19 nt, Artificial Sequence
  Description of Artificial Sequence: Synthetic oligonucleotide
  Antisense strand to SEQ ID NO: 206336
ugcccugggcgaaucacgu

SEQ ID NO: 206338 - RNA, 19 nt, Artificial Sequence
  Description of Artificial Sequence: Synthetic oligonucleotide
  Sense strand starting at position 219 of SEQ ID NO: 2659
cgugauucgcccagggcaa

SEQ ID NO: 206339 - RNA, 19 nt, Artificial Sequence
  Description of Artificial Sequence: Synthetic oligonucleotide
  Antisense strand to SEQ ID NO: 206338
uugcccugggcgaaucacg

SEQ ID NO: 206340 - RNA, 19 nt, Artificial Sequence
  Description of Artificial Sequence: Synthetic oligonucleotide
  Sense strand starting at position 265 of SEQ ID NO: 2659
uggugugacucaguacugu

SEQ ID NO: 206341 - RNA, 19 nt, Artificial Sequence
  Description of Artificial Sequence: Synthetic oligonucleotide
  Antisense strand to SEQ ID NO: 206340
acaguacugagucacacca

SEQ ID NO: 206342 - RNA, 19 nt, Artificial Sequence
  Description of Artificial Sequence: Synthetic oligonucleotide
  Sense strand starting at position 570 of SEQ ID NO: 2659
ggaggcuggugcuuagaaa

SEQ ID NO: 206343 - RNA, 19 nt, Artificial Sequence
  Description of Artificial Sequence: Synthetic oligonucleotide
  Antisense strand to SEQ ID NO: 206342
uuucuaagcaccagccucc

SEQ ID NO: 206344 - RNA, 19 nt, Artificial Sequence
  Description of Artificial Sequence: Synthetic oligonucleotide
  Sense strand starting at position 571 of SEQ ID NO: 2659
gaggcuggugcuuagaaau

SEQ ID NO: 206345 - RNA, 19 nt, Artificial Sequence
  Description of Artificial Sequence: Synthetic oligonucleotide
  Antisense strand to SEQ ID NO: 206344
auuucuaagcaccagccuc

SEQ ID NO: 206346 - RNA, 19 nt, Artificial Sequence
  Description of Artificial Sequence: Synthetic oligonucleotide
  Sense strand starting at position 2016 of SEQ ID NO: 2659
ugggcugaguuguccaagu

SEQ ID NO: 206347 - RNA, 19 nt, Artificial Sequence
  Description of Artificial Sequence: Synthetic oligonucleotide
  Antisense strand to SEQ ID NO: 206346
acuuggacaacucagccca

SEQ ID NO: 206348 - RNA, 19 nt, Artificial Sequence
  Description of Artificial Sequence: Synthetic oligonucleotide
  Sense strand starting at position 2020 of SEQ ID NO: 2659
cugaguuguccaaguggug

SEQ ID NO: 206349 - RNA, 19 nt, Artificial Sequence
  Description of Artificial Sequence: Synthetic oligonucleotide
  Antisense strand to SEQ ID NO: 206348
caccacuuggacaacucag

SEQ ID NO: 206350 - RNA, 19 nt, Artificial Sequence
  Description of Artificial Sequence: Synthetic oligonucleotide
  Sense strand starting at position 2123 of SEQ ID NO: 2659
gggcuaagucuaugggaca

SEQ ID NO: 206351 - RNA, 19 nt, Artificial Sequence
  Description of Artificial Sequence: Synthetic oligonucleotide
  Antisense strand to SEQ ID NO: 206350
ugucccauagacuuagccc

SEQ ID NO: 206352 - RNA, 19 nt, Artificial Sequence
  Description of Artificial Sequence: Synthetic oligonucleotide
  Sense strand starting at position 2126 of SEQ ID NO: 2659
cuaagucuaugggacaguu

SEQ ID NO: 206353 - RNA, 19 nt, Artificial Sequence
  Description of Artificial Sequence: Synthetic oligonucleotide
  Antisense strand to SEQ ID NO: 206352
aacugucccauagacuuag

SEQ ID NO: 206354 - RNA, 19 nt, Artificial Sequence
  Description of Artificial Sequence: Synthetic oligonucleotide
  Sense strand starting at position 2138 of SEQ ID NO: 2659
gacaguuuguugccaacuu

SEQ ID NO: 206355 - RNA, 19 nt, Artificial Sequence
  Description of Artificial Sequence: Synthetic oligonucleotide
  Antisense strand to SEQ ID NO: 206354
aaguuggcaacaaacuguc

SEQ ID NO: 206356 - RNA, 19 nt, Artificial Sequence
  Description of Artificial Sequence: Synthetic oligonucleotide
  Sense strand starting at position 2178 of SEQ ID NO: 2659
ugacaaauguucuugaaag

SEQ ID NO: 206357 - RNA, 19 nt, Artificial Sequence
  Description of Artificial Sequence: Synthetic oligonucleotide
  Antisense strand to SEQ ID NO: 206356
cuuucaagaacauuuguca

SEQ ID NO: 206358 - RNA, 19 nt, Artificial Sequence
  Description of Artificial Sequence: Synthetic oligonucleotide
  Sense strand starting at position 2179 of SEQ ID NO: 2659
gacaaauguucuugaaagg

SEQ ID NO: 206359 - RNA, 19 nt, Artificial Sequence
  Description of Artificial Sequence: Synthetic oligonucleotide
  Antisense strand to SEQ ID NO: 206358
ccuuucaagaacauuuguc

SEQ ID NO: 206360 - RNA, 19 nt, Artificial Sequence
  Description of Artificial Sequence: Synthetic oligonucleotide
  Sense strand starting at position 2253 of SEQ ID NO: 2659
agcugugacucugacaaau

SEQ ID NO: 206361 - RNA, 19 nt, Artificial Sequence
  Description of Artificial Sequence: Synthetic oligonucleotide
  Antisense strand to SEQ ID NO: 206360
auuugucagagucacagcu

SEQ ID NO: 206362 - RNA, 19 nt, Artificial Sequence
  Description of Artificial Sequence: Synthetic oligonucleotide
  Sense strand starting at position 2255 of SEQ ID NO: 2659
cugugacucugacaaauga

SEQ ID NO: 206363 - RNA, 19 nt, Artificial Sequence
  Description of Artificial Sequence: Synthetic oligonucleotide
  Antisense strand to SEQ ID NO: 206362
ucauuugucagagucacag

SEQ ID NO: 206364 - RNA, 19 nt, Artificial Sequence
  Description of Artificial Sequence: Synthetic oligonucleotide
  Sense strand starting at position 2275 of SEQ ID NO: 2659
aagggaugcagauguugau

SEQ ID NO: 206365 - RNA, 19 nt, Artificial Sequence
  Description of Artificial Sequence: Synthetic oligonucleotide
  Antisense strand to SEQ ID NO: 206364
aucaacaucugcaucccuu

SEQ ID NO: 206366 - RNA, 19 nt, Artificial Sequence
  Description of Artificial Sequence: Synthetic oligonucleotide
  Sense strand starting at position 2278 of SEQ ID NO: 2659
ggaugcagauguugauuua

SEQ ID NO: 206367 - RNA, 19 nt, Artificial Sequence
  Description of Artificial Sequence: Synthetic oligonucleotide
  Antisense strand to SEQ ID NO: 206366
uaaaucaacaucugcaucc

SEQ ID NO: 206368 - RNA, 19 nt, Artificial Sequence
  Description of Artificial Sequence: Synthetic oligonucleotide
  Sense strand starting at position 2294 of SEQ ID NO: 2659
uuagaacaguguuuauaag

SEQ ID NO: 206369 - RNA, 19 nt, Artificial Sequence
  Description of Artificial Sequence: Synthetic oligonucleotide
  Antisense strand to SEQ ID NO: 206368
cuuauaaacacuguucuaa

SEQ ID NO: 206370 - RNA, 19 nt, Artificial Sequence
  Description of Artificial Sequence: Synthetic oligonucleotide
  Sense strand starting at position 2739 of SEQ ID NO: 2659
agcaguggugaguagguau

SEQ ID NO: 206371 - RNA, 19 nt, Artificial Sequence
  Description of Artificial Sequence: Synthetic oligonucleotide
  Antisense strand to SEQ ID NO: 206370
auaccuacucaccacugcu

SEQ ID NO: 206372 - RNA, 19 nt, Artificial Sequence
  Description of Artificial Sequence: Synthetic oligonucleotide
  Sense strand starting at position 2891 of SEQ ID NO: 2659
cucugaguguuucuuggag

SEQ ID NO: 206373 - RNA, 19 nt, Artificial Sequence
  Description of Artificial Sequence: Synthetic oligonucleotide
  Antisense strand to SEQ ID NO: 206372
cuccaagaaacacucagag

SEQ ID NO: 206374 - RNA, 19 nt, Artificial Sequence
  Description of Artificial Sequence: Synthetic oligonucleotide
  Sense strand starting at position 2895 of SEQ ID NO: 2659
gaguguuucuuggagaagg

SEQ ID NO: 206375 - RNA, 19 nt, Artificial Sequence
  Description of Artificial Sequence: Synthetic oligonucleotide
  Antisense strand to SEQ ID NO: 206374
ccuucuccaagaaacacuc

SEQ ID NO: 206376 - RNA, 19 nt, Artificial Sequence
  Description of Artificial Sequence: Synthetic oligonucleotide
  Sense strand starting at position 2897 of SEQ ID NO: 2659
guguuucuuggagaaggau

SEQ ID NO: 206377 - RNA, 19 nt, Artificial Sequence
  Description of Artificial Sequence: Synthetic oligonucleotide
  Antisense strand to SEQ ID NO: 206376
auccuucuccaagaaacac

SEQ ID NO: 206378 - RNA, 19 nt, Artificial Sequence
  Description of Artificial Sequence: Synthetic oligonucleotide
  Sense strand starting at position 3254 of SEQ ID NO: 2659
agaagauguuuggagagga

SEQ ID NO: 206379 - RNA, 19 nt, Artificial Sequence
  Description of Artificial Sequence: Synthetic oligonucleotide
  Antisense strand to SEQ ID NO: 206378
uccucuccaaacaucuucu

SEQ ID NO: 206380 - RNA, 19 nt, Artificial Sequence
  Description of Artificial Sequence: Synthetic oligonucleotide
  Sense strand starting at position 3327 of SEQ ID NO: 2659
gacugcuuaugggcagaaa

SEQ ID NO: 206381 - RNA, 19 nt, Artificial Sequence
  Description of Artificial Sequence: Synthetic oligonucleotide
  Antisense strand to SEQ ID NO: 206380
uuucugcccauaagcaguc

SEQ ID NO: 206382 - RNA, 19 nt, Artificial Sequence
  Description of Artificial Sequence: Synthetic oligonucleotide
  Sense strand starting at position 3350 of SEQ ID NO: 2659
cgcauagcauccuucucau

SEQ ID NO: 206383 - RNA, 19 nt, Artificial Sequence
  Description of Artificial Sequence: Synthetic oligonucleotide
  Antisense strand to SEQ ID NO: 206382
augagaaggaugcuaugcg

SEQ ID NO: 206384 - RNA, 19 nt, Artificial Sequence
  Description of Artificial Sequence: Synthetic oligonucleotide
  Sense strand starting at position 3397 of SEQ ID NO: 2659
cuacuaguauacucaguuu

SEQ ID NO: 206385 - RNA, 19 nt, Artificial Sequence
  Description of Artificial Sequence: Synthetic oligonucleotide
  Antisense strand to SEQ ID NO: 206384
aaacugaguauacuaguag

SEQ ID NO: 206386 - RNA, 19 nt, Artificial Sequence
  Description of Artificial Sequence: Synthetic oligonucleotide
  Sense strand starting at position 3400 of SEQ ID NO: 2659
cuaguauacucaguuuaca

SEQ ID NO: 206387 - RNA, 19 nt, Artificial Sequence
  Description of Artificial Sequence: Synthetic oligonucleotide
  Antisense strand to SEQ ID NO: 206386
uguaaacugaguauacuag

SEQ ID NO: 206388 - RNA, 19 nt, Artificial Sequence
  Description of Artificial Sequence: Synthetic oligonucleotide
  Sense strand starting at position 3427 of SEQ ID NO: 2659
ugcugagccucacagagaa

SEQ ID NO: 206389 - RNA, 19 nt, Artificial Sequence
  Description of Artificial Sequence: Synthetic oligonucleotide
  Antisense strand to SEQ ID NO: 206388
uucucugugaggcucagca

SEQ ID NO: 206390 - RNA, 19 nt, Artificial Sequence
  Description of Artificial Sequence: Synthetic oligonucleotide
  Sense strand starting at position 3478 of SEQ ID NO: 2659
agagcugaaucugggauuu

SEQ ID NO: 206391 - RNA, 19 nt, Artificial Sequence
  Description of Artificial Sequence: Synthetic oligonucleotide
  Antisense strand to SEQ ID NO: 206390
aaaucccagauucagcucu

SEQ ID NO: 206392 - RNA, 19 nt, Artificial Sequence
  Description of Artificial Sequence: Synthetic oligonucleotide
  Sense strand starting at position 3480 of SEQ ID NO: 2659
agcugaaucugggauuuga

SEQ ID NO: 206393 - RNA, 19 nt, Artificial Sequence
  Description of Artificial Sequence: Synthetic oligonucleotide
  Antisense strand to SEQ ID NO: 206392
ucaaaucccagauucagcu

SEQ ID NO: 206394 - RNA, 19 nt, Artificial Sequence
  Description of Artificial Sequence: Synthetic oligonucleotide
  Sense strand starting at position 3673 of SEQ ID NO: 2659
guaguaugacccugucucu

SEQ ID NO: 206395 - RNA, 19 nt, Artificial Sequence
  Description of Artificial Sequence: Synthetic oligonucleotide
  Antisense strand to SEQ ID NO: 206394
agagacagggucauacuac

SEQ ID NO: 206396 - RNA, 19 nt, Artificial Sequence
  Description of Artificial Sequence: Synthetic oligonucleotide
  Sense strand starting at position 3850 of SEQ ID NO: 2659
gcgagauccugugccuuaa

SEQ ID NO: 206397 - RNA, 19 nt, Artificial Sequence
  Description of Artificial Sequence: Synthetic oligonucleotide
  Antisense strand to SEQ ID NO: 206396
uuaaggcacaggaucucgc

SEQ ID NO: 206398 - RNA, 19 nt, Artificial Sequence
  Description of Artificial Sequence: Synthetic oligonucleotide
  Sense strand starting at position 3886 of SEQ ID NO: 2659
ucuaaugacuggcauggua

SEQ ID NO: 206399 - RNA, 19 nt, Artificial Sequence
  Description of Artificial Sequence: Synthetic oligonucleotide
  Antisense strand to SEQ ID NO: 206398
uaccaugccagucauuaga

SEQ ID NO: 206400 - RNA, 19 nt, Artificial Sequence
  Description of Artificial Sequence: Synthetic oligonucleotide
  Sense strand starting at position 3888 of SEQ ID NO: 2659
uaaugacuggcaugguaau

SEQ ID NO: 206401 - RNA, 19 nt, Artificial Sequence
  Description of Artificial Sequence: Synthetic oligonucleotide
  Antisense strand to SEQ ID NO: 206400
auuaccaugccagucauua

SEQ ID NO: 206402 - RNA, 19 nt, Artificial Sequence
  Description of Artificial Sequence: Synthetic oligonucleotide
  Sense strand starting at position 3901 of SEQ ID NO: 2659
gguaaugaugcuggcagau

SEQ ID NO: 206403 - RNA, 19 nt, Artificial Sequence
  Description of Artificial Sequence: Synthetic oligonucleotide
  Antisense strand to SEQ ID NO: 206402
aucugccagcaucauuacc

SEQ ID NO: 206404 - RNA, 19 nt, Artificial Sequence
  Description of Artificial Sequence: Synthetic oligonucleotide
  Sense strand starting at position 8 of SEQ ID NO: 2660
gggugaguuacccaacccu

SEQ ID NO: 206405 - RNA, 19 nt, Artificial Sequence
  Description of Artificial Sequence: Synthetic oligonucleotide
  Antisense strand to SEQ ID NO: 206404
aggguuggguaacucaccc

SEQ ID NO: 206406 - RNA, 19 nt, Artificial Sequence
  Description of Artificial Sequence: Synthetic oligonucleotide
  Sense strand starting at position 30 of SEQ ID NO: 2660
gcuuccucacaguaguaua

SEQ ID NO: 206407 - RNA, 19 nt, Artificial Sequence
  Description of Artificial Sequence: Synthetic oligonucleotide
  Antisense strand to SEQ ID NO: 206406
uauacuacugugaggaagc

SEQ ID NO: 206408 - RNA, 19 nt, Artificial Sequence
  Description of Artificial Sequence: Synthetic oligonucleotide
  Sense strand starting at position 253 of SEQ ID NO: 2660
uguaaucccuccucagaag

SEQ ID NO: 206409 - RNA, 19 nt, Artificial Sequence
  Description of Artificial Sequence: Synthetic oligonucleotide
  Antisense strand to SEQ ID NO: 206408
cuucugaggagggauuaca

SEQ ID NO: 206410 - RNA, 19 nt, Artificial Sequence
  Description of Artificial Sequence: Synthetic oligonucleotide
  Sense strand starting at position 271 of SEQ ID NO: 2660
ggcuguaaucccuacucau

SEQ ID NO: 206411 - RNA, 19 nt, Artificial Sequence
  Description of Artificial Sequence: Synthetic oligonucleotide
  Antisense strand to SEQ ID NO: 206410
augaguagggauuacagcc

SEQ ID NO: 206412 - RNA, 19 nt, Artificial Sequence
  Description of Artificial Sequence: Synthetic oligonucleotide
  Sense strand starting at position 409 of SEQ ID NO: 2660
agacuaaggcauuguacuu

SEQ ID NO: 206413 - RNA, 19 nt, Artificial Sequence
  Description of Artificial Sequence: Synthetic oligonucleotide
  Antisense strand to SEQ ID NO: 206412
aaguacaaugccuuagucu

SEQ ID NO: 206414 - RNA, 19 nt, Artificial Sequence
  Description of Artificial Sequence: Synthetic oligonucleotide
  Sense strand starting at position 496 of SEQ ID NO: 2660
aguuaagaagcugauuauu

SEQ ID NO: 206415 - RNA, 19 nt, Artificial Sequence
  Description of Artificial Sequence: Synthetic oligonucleotide
  Antisense strand to SEQ ID NO: 206414
aauaaucagcuucuuaacu

SEQ ID NO: 206416 - RNA, 19 nt, Artificial Sequence
  Description of Artificial Sequence: Synthetic oligonucleotide
  Sense strand starting at position 524 of SEQ ID NO: 2660
cucaguuuccaaggaagcu

SEQ ID NO: 206417 - RNA, 19 nt, Artificial Sequence
  Description of Artificial Sequence: Synthetic oligonucleotide
  Antisense strand to SEQ ID NO: 206416
agcuuccuuggaaacugag

SEQ ID NO: 206418 - RNA, 19 nt, Artificial Sequence
  Description of Artificial Sequence: Synthetic oligonucleotide
  Sense strand starting at position 603 of SEQ ID NO: 2660
gcccauuguccacagaaca

SEQ ID NO: 206419 - RNA, 19 nt, Artificial Sequence
  Description of Artificial Sequence: Synthetic oligonucleotide
  Antisense strand to SEQ ID NO: 206418
uguucuguggacaaugggc

SEQ ID NO: 206420 - RNA, 19 nt, Artificial Sequence
  Description of Artificial Sequence: Synthetic oligonucleotide
  Sense strand starting at position 776 of SEQ ID NO: 2660
ccugucuaguaacuuaaau

SEQ ID NO: 206421 - RNA, 19 nt, Artificial Sequence
  Description of Artificial Sequence: Synthetic oligonucleotide
  Antisense strand to SEQ ID NO: 206420
auuuaaguuacuagacagg

SEQ ID NO: 206422 - RNA, 19 nt, Artificial Sequence
  Description of Artificial Sequence: Synthetic oligonucleotide
  Sense strand starting at position 799 of SEQ ID NO: 2660
uguacuuaugaguaccacu

SEQ ID NO: 206423 - RNA, 19 nt, Artificial Sequence
  Description of Artificial Sequence: Synthetic oligonucleotide
  Antisense strand to SEQ ID NO: 206422
agugguacucauaaguaca

SEQ ID NO: 206424 - RNA, 19 nt, Artificial Sequence
  Description of Artificial Sequence: Synthetic oligonucleotide
  Sense strand starting at position 1035 of SEQ ID NO: 2660
agaaguaaacgcgaucaau

SEQ ID NO: 206425 - RNA, 19 nt, Artificial Sequence
  Description of Artificial Sequence: Synthetic oligonucleotide
  Antisense strand to SEQ ID NO: 206424
auugaucgcguuuacuucu

SEQ ID NO: 206426 - RNA, 19 nt, Artificial Sequence
  Description of Artificial Sequence: Synthetic oligonucleotide
  Sense strand starting at position 1038 of SEQ ID NO: 2660
aguaaacgcgaucaaucua

SEQ ID NO: 206427 - RNA, 19 nt, Artificial Sequence
  Description of Artificial Sequence: Synthetic oligonucleotide
  Antisense strand to SEQ ID NO: 206426
uagauugaucgcguuuacu

SEQ ID NO: 206428 - RNA, 19 nt, Artificial Sequence
  Description of Artificial Sequence: Synthetic oligonucleotide
  Sense strand starting at position 1043 of SEQ ID NO: 2660
acgcgaucaaucuaaugga

SEQ ID NO: 206429 - RNA, 19 nt, Artificial Sequence
  Description of Artificial Sequence: Synthetic oligonucleotide
  Antisense strand to SEQ ID NO: 206428
uccauuagauugaucgcgu

SEQ ID NO: 206430 - RNA, 19 nt, Artificial Sequence
  Description of Artificial Sequence: Synthetic oligonucleotide
  Sense strand starting at position 1090 of SEQ ID NO: 2660
gcccaagacaggugaucua

SEQ ID NO: 206431 - RNA, 19 nt, Artificial Sequence
  Description of Artificial Sequence: Synthetic oligonucleotide
  Antisense strand to SEQ ID NO: 206430
uagaucaccugucuugggc

SEQ ID NO: 206432 - RNA, 19 nt, Artificial Sequence
  Description of Artificial Sequence: Synthetic oligonucleotide
  Sense strand starting at position 1498 of SEQ ID NO: 2660
aaagcaguuguccaguuua

SEQ ID NO: 206433 - RNA, 19 nt, Artificial Sequence
  Description of Artificial Sequence: Synthetic oligonucleotide
  Antisense strand to SEQ ID NO: 206432
uaaacuggacaacugcuuu

SEQ ID NO: 206434 - RNA, 19 nt, Artificial Sequence
  Description of Artificial Sequence: Synthetic oligonucleotide
  Sense strand starting at position 1514 of SEQ ID NO: 2660
uuaauuaguagugggaaga

SEQ ID NO: 206435 - RNA, 19 nt, Artificial Sequence
  Description of Artificial Sequence: Synthetic oligonucleotide
  Antisense strand to SEQ ID NO: 206434
ucuucccacuacuaauuaa

SEQ ID NO: 206436 - RNA, 19 nt, Artificial Sequence
  Description of Artificial Sequence: Synthetic oligonucleotide
  Sense strand starting at position 1793 of SEQ ID NO: 2660
cgaagcugugaugaaugau

SEQ ID NO: 206437 - RNA, 19 nt, Artificial Sequence
  Description of Artificial Sequence: Synthetic oligonucleotide
  Antisense strand to SEQ ID NO: 206436
aucauucaucacagcuucg

SEQ ID NO: 206438 - RNA, 19 nt, Artificial Sequence
  Description of Artificial Sequence: Synthetic oligonucleotide
  Sense strand starting at position 1796 of SEQ ID NO: 2660
agcugugaugaaugauucu

SEQ ID NO: 206439 - RNA, 19 nt, Artificial Sequence
  Description of Artificial Sequence: Synthetic oligonucleotide
  Antisense strand to SEQ ID NO: 206438
agaaucauucaucacagcu

SEQ ID NO: 206440 - RNA, 19 nt, Artificial Sequence
  Description of Artificial Sequence: Synthetic oligonucleotide
  Sense strand starting at position 1990 of SEQ ID NO: 2660
ucuuuagugcugcagggaa

SEQ ID NO: 206441 - RNA, 19 nt, Artificial Sequence
  Description of Artificial Sequence: Synthetic oligonucleotide
  Antisense strand to SEQ ID NO: 206440
uucccugcagcacuaaaga

SEQ ID NO: 206442 - RNA, 19 nt, Artificial Sequence
  Description of Artificial Sequence: Synthetic oligonucleotide
  Sense strand starting at position 2103 of SEQ ID NO: 2660
ucuagagggcucuggaguu

SEQ ID NO: 206443 - RNA, 19 nt, Artificial Sequence
  Description of Artificial Sequence: Synthetic oligonucleotide
  Antisense strand to SEQ ID NO: 206442
aacuccagagcccucuaga

SEQ ID NO: 206444 - RNA, 19 nt, Artificial Sequence
  Description of Artificial Sequence: Synthetic oligonucleotide
  Sense strand starting at position 2267 of SEQ ID NO: 2660
agagaaaucugccuuagca

SEQ ID NO: 206445 - RNA, 19 nt, Artificial Sequence
  Description of Artificial Sequence: Synthetic oligonucleotide
  Antisense strand to SEQ ID NO: 206444
ugcuaaggcagauuucucu

SEQ ID NO: 206446 - RNA, 19 nt, Artificial Sequence
  Description of Artificial Sequence: Synthetic oligonucleotide
  Sense strand starting at position 2292 of SEQ ID NO: 2660
uucuaagauuguuucuaag

SEQ ID NO: 206447 - RNA, 19 nt, Artificial Sequence
  Description of Artificial Sequence: Synthetic oligonucleotide
  Antisense strand to SEQ ID NO: 206446
cuuagaaacaaucuuagaa

SEQ ID NO: 206448 - RNA, 19 nt, Artificial Sequence
  Description of Artificial Sequence: Synthetic oligonucleotide
  Sense strand starting at position 2294 of SEQ ID NO: 2660
cuaagauuguuucuaagcu

SEQ ID NO: 206449 - RNA, 19 nt, Artificial Sequence
  Description of Artificial Sequence: Synthetic oligonucleotide
  Antisense strand to SEQ ID NO: 206448
agcuuagaaacaaucuuag

SEQ ID NO: 206450 - RNA, 19 nt, Artificial Sequence
  Description of Artificial Sequence: Synthetic oligonucleotide
  Sense strand starting at position 2418 of SEQ ID NO: 2660
ccauucuucucaguauaga

SEQ ID NO: 206451 - RNA, 19 nt, Artificial Sequence
  Description of Artificial Sequence: Synthetic oligonucleotide
  Antisense strand to SEQ ID NO: 206450
ucuauacugagaagaaugg

SEQ ID NO: 206452 - RNA, 19 nt, Artificial Sequence
  Description of Artificial Sequence: Synthetic oligonucleotide
  Sense strand starting at position 2468 of SEQ ID NO: 2660
gcuucuucuuaaccuagga

SEQ ID NO: 206453 - RNA, 19 nt, Artificial Sequence
  Description of Artificial Sequence: Synthetic oligonucleotide
  Antisense strand to SEQ ID NO: 206452
uccuagguuaagaagaagc

SEQ ID NO: 206454 - RNA, 19 nt, Artificial Sequence
  Description of Artificial Sequence: Synthetic oligonucleotide
  Sense strand starting at position 2545 of SEQ ID NO: 2660
uacuguauuccagggacuu

SEQ ID NO: 206455 - RNA, 19 nt, Artificial Sequence
  Description of Artificial Sequence: Synthetic oligonucleotide
  Antisense strand to SEQ ID NO: 206454
aagucccuggaauacagua

SEQ ID NO: 206456 - RNA, 19 nt, Artificial Sequence
  Description of Artificial Sequence: Synthetic oligonucleotide
  Sense strand starting at position 2546 of SEQ ID NO: 2660
acuguauuccagggacuuc

SEQ ID NO: 206457 - RNA, 19 nt, Artificial Sequence
  Description of Artificial Sequence: Synthetic oligonucleotide
  Antisense strand to SEQ ID NO: 206456
gaagucccuggaauacagu

SEQ ID NO: 206458 - RNA, 19 nt, Artificial Sequence
  Description of Artificial Sequence: Synthetic oligonucleotide
  Sense strand starting at position 2600 of SEQ ID NO: 2660
cuacaaaguagguauuagu

SEQ ID NO: 206459 - RNA, 19 nt, Artificial Sequence
  Description of Artificial Sequence: Synthetic oligonucleotide
  Antisense strand to SEQ ID NO: 206458
acuaauaccuacuuuguag

SEQ ID NO: 206460 - RNA, 19 nt, Artificial Sequence
  Description of Artificial Sequence: Synthetic oligonucleotide
  Sense strand starting at position 2736 of SEQ ID NO: 2660
gcccuauaccaugaaguuu

SEQ ID NO: 206461 - RNA, 19 nt, Artificial Sequence
  Description of Artificial Sequence: Synthetic oligonucleotide
  Antisense strand to SEQ ID NO: 206460
aaacuucaugguauagggc

SEQ ID NO: 206462 - RNA, 19 nt, Artificial Sequence
  Description of Artificial Sequence: Synthetic oligonucleotide
  Sense strand starting at position 3032 of SEQ ID NO: 2660
gugcuuauuuccuugucua

SEQ ID NO: 206463 - RNA, 19 nt, Artificial Sequence
  Description of Artificial Sequence: Synthetic oligonucleotide
  Antisense strand to SEQ ID NO: 206462
uagacaaggaaauaagcac

SEQ ID NO: 206464 - RNA, 19 nt, Artificial Sequence
  Description of Artificial Sequence: Synthetic oligonucleotide
  Sense strand starting at position 3033 of SEQ ID NO: 2660
ugcuuauuuccuugucuau

SEQ ID NO: 206465 - RNA, 19 nt, Artificial Sequence
  Description of Artificial Sequence: Synthetic oligonucleotide
  Antisense strand to SEQ ID NO: 206464
auagacaaggaaauaagca

SEQ ID NO: 206466 - RNA, 19 nt, Artificial Sequence
  Description of Artificial Sequence: Synthetic oligonucleotide
  Sense strand starting at position 3039 of SEQ ID NO: 2660
uuuccuugucuauagagaa

SEQ ID NO: 206467 - RNA, 19 nt, Artificial Sequence
  Description of Artificial Sequence: Synthetic oligonucleotide
  Antisense strand to SEQ ID NO: 206466
uucucuauagacaaggaaa

SEQ ID NO: 206468 - RNA, 19 nt, Artificial Sequence
  Description of Artificial Sequence: Synthetic oligonucleotide
  Sense strand starting at position 3070 of SEQ ID NO: 2660
auugguaccuauccacaua

SEQ ID NO: 206469 - RNA, 19 nt, Artificial Sequence
  Description of Artificial Sequence: Synthetic oligonucleotide
  Antisense strand to SEQ ID NO: 206468
uauguggauagguaccaau

SEQ ID NO: 206470 - RNA, 19 nt, Artificial Sequence
  Description of Artificial Sequence: Synthetic oligonucleotide
  Sense strand starting at position 3158 of SEQ ID NO: 2660
ugucauuaccuuuaggaca

SEQ ID NO: 206471 - RNA, 19 nt, Artificial Sequence
  Description of Artificial Sequence: Synthetic oligonucleotide
  Antisense strand to SEQ ID NO: 206470
uguccuaaagguaaugaca

SEQ ID NO: 206472 - RNA, 19 nt, Artificial Sequence
  Description of Artificial Sequence: Synthetic oligonucleotide
  Sense strand starting at position 3457 of SEQ ID NO: 2660
gcaugcucugcuguaucau

SEQ ID NO: 206473 - RNA, 19 nt, Artificial Sequence
  Description of Artificial Sequence: Synthetic oligonucleotide
  Antisense strand to SEQ ID NO: 206472
augauacagcagagcaugc

SEQ ID NO: 206474 - RNA, 19 nt, Artificial Sequence
  Description of Artificial Sequence: Synthetic oligonucleotide
  Sense strand starting at position 3531 of SEQ ID NO: 2660
cuagcucuucugcaugaaa

SEQ ID NO: 206475 - RNA, 19 nt, Artificial Sequence
  Description of Artificial Sequence: Synthetic oligonucleotide
  Antisense strand to SEQ ID NO: 206474
uuucaugcagaagagcuag

SEQ ID NO: 206476 - RNA, 19 nt, Artificial Sequence
  Description of Artificial Sequence: Synthetic oligonucleotide
  Sense strand starting at position 3599 of SEQ ID NO: 2660
ugaguagaccucuaagccu

SEQ ID NO: 206477 - RNA, 19 nt, Artificial Sequence
  Description of Artificial Sequence: Synthetic oligonucleotide
  Antisense strand to SEQ ID NO: 206476
aggcuuagaggucuacuca

SEQ ID NO: 206478 - RNA, 19 nt, Artificial Sequence
  Description of Artificial Sequence: Synthetic oligonucleotide
  Sense strand starting at position 3636 of SEQ ID NO: 2660
ggacccugugccuaucauu

SEQ ID NO: 206479 - RNA, 19 nt, Artificial Sequence
  Description of Artificial Sequence: Synthetic oligonucleotide
  Antisense strand to SEQ ID NO: 206478
aaugauaggcacagggucc

SEQ ID NO: 206480 - RNA, 19 nt, Artificial Sequence
  Description of Artificial Sequence: Synthetic oligonucleotide
  Sense strand starting at position 3644 of SEQ ID NO: 2660
ugccuaucauuguuggaag

SEQ ID NO: 206481 - RNA, 19 nt, Artificial Sequence
  Description of Artificial Sequence: Synthetic oligonucleotide
  Antisense strand to SEQ ID NO: 206480
cuuccaacaaugauaggca

SEQ ID NO: 206482 - RNA, 19 nt, Artificial Sequence
  Description of Artificial Sequence: Synthetic oligonucleotide
  Sense strand starting at position 3646 of SEQ ID NO: 2660
ccuaucauuguuggaagau

SEQ ID NO: 206483 - RNA, 19 nt, Artificial Sequence
  Description of Artificial Sequence: Synthetic oligonucleotide
  Antisense strand to SEQ ID NO: 206482
aucuuccaacaaugauagg

SEQ ID NO: 206484 - RNA, 19 nt, Artificial Sequence
  Description of Artificial Sequence: Synthetic oligonucleotide
  Sense strand starting at position 50 of SEQ ID NO: 2661
uagagcuuucuaggaaaga

SEQ ID NO: 206485 - RNA, 19 nt, Artificial Sequence
  Description of Artificial Sequence: Synthetic oligonucleotide
  Antisense strand to SEQ ID NO: 206484
ucuuuccuagaaagcucua

SEQ ID NO: 206486 - RNA, 19 nt, Artificial Sequence
  Description of Artificial Sequence: Synthetic oligonucleotide
  Sense strand starting at position 421 of SEQ ID NO: 2661
agagaauguuuacugaucu

SEQ ID NO: 206487 - RNA, 19 nt, Artificial Sequence
  Description of Artificial Sequence: Synthetic oligonucleotide
  Antisense strand to SEQ ID NO: 206486
agaucaguaaacauucucu

SEQ ID NO: 206488 - RNA, 19 nt, Artificial Sequence
  Description of Artificial Sequence: Synthetic oligonucleotide
  Sense strand starting at position 650 of SEQ ID NO: 2661
agucaauguguauauaaga

SEQ ID NO: 206489 - RNA, 19 nt, Artificial Sequence
  Description of Artificial Sequence: Synthetic oligonucleotide
  Antisense strand to SEQ ID NO: 206488
ucuuauauacacauugacu

SEQ ID NO: 206490 - RNA, 19 nt, Artificial Sequence
  Description of Artificial Sequence: Synthetic oligonucleotide
  Sense strand starting at position 744 of SEQ ID NO: 2661
aauguaaacuggccagaga

SEQ ID NO: 206491 - RNA, 19 nt, Artificial Sequence
  Description of Artificial Sequence: Synthetic oligonucleotide
  Antisense strand to SEQ ID NO: 206490
ucucuggccaguuuacauu

SEQ ID NO: 206492 - RNA, 19 nt, Artificial Sequence
  Description of Artificial Sequence: Synthetic oligonucleotide
  Sense strand starting at position 802 of SEQ ID NO: 2661
uccaauccuguuggagaau

SEQ ID NO: 206493 - RNA, 19 nt, Artificial Sequence
  Description of Artificial Sequence: Synthetic oligonucleotide
  Antisense strand to SEQ ID NO: 206492
auucuccaacaggauugga

SEQ ID NO: 206494 - RNA, 19 nt, Artificial Sequence
  Description of Artificial Sequence: Synthetic oligonucleotide
  Sense strand starting at position 879 of SEQ ID NO: 2661
cguaaauccaaagaggcau

SEQ ID NO: 206495 - RNA, 19 nt, Artificial Sequence
  Description of Artificial Sequence: Synthetic oligonucleotide
  Antisense strand to SEQ ID NO: 206494
augccucuuuggauuuacg

SEQ ID NO: 206496 - RNA, 19 nt, Artificial Sequence
  Description of Artificial Sequence: Synthetic oligonucleotide
  Sense strand starting at position 1066 of SEQ ID NO: 2661
agugaagcugagugaaaga

SEQ ID NO: 206497 - RNA, 19 nt, Artificial Sequence
  Description of Artificial Sequence: Synthetic oligonucleotide
  Antisense strand to SEQ ID NO: 206496
ucuuucacucagcuucacu

SEQ ID NO: 206498 - RNA, 19 nt, Artificial Sequence
  Description of Artificial Sequence: Synthetic oligonucleotide
  Sense strand starting at position 1094 of SEQ ID NO: 2661
ggagcugucaaugaucauu

SEQ ID NO: 206499 - RNA, 19 nt, Artificial Sequence
  Description of Artificial Sequence: Synthetic oligonucleotide
  Antisense strand to SEQ ID NO: 206498
aaugaucauugacagcucc

SEQ ID NO: 206500 - RNA, 19 nt, Artificial Sequence
  Description of Artificial Sequence: Synthetic oligonucleotide
  Sense strand starting at position 1099 of SEQ ID NO: 2661
ugucaaugaucauugagag

SEQ ID NO: 206501 - RNA, 19 nt, Artificial Sequence
  Description of Artificial Sequence: Synthetic oligonucleotide
  Antisense strand to SEQ ID NO: 206500
cucucaaugaucauugaca

SEQ ID NO: 206502 - RNA, 19 nt, Artificial Sequence
  Description of Artificial Sequence: Synthetic oligonucleotide
  Sense strand starting at position 1182 of SEQ ID NO: 2661
agcauacugguuuaucuaa

SEQ ID NO: 206503 - RNA, 19 nt, Artificial Sequence
  Description of Artificial Sequence: Synthetic oligonucleotide
  Antisense strand to SEQ ID NO: 206502
uuagauaaaccaguaugcu

SEQ ID NO: 206504 - RNA, 19 nt, Artificial Sequence
  Description of Artificial Sequence: Synthetic oligonucleotide
  Sense strand starting at position 1265 of SEQ ID NO: 2661
cuuaaaguagcccaugaua

SEQ ID NO: 206505 - RNA, 19 nt, Artificial Sequence
  Description of Artificial Sequence: Synthetic oligonucleotide
  Antisense strand to SEQ ID NO: 206504
uaucaugggcuacuuuaag

SEQ ID NO: 206506 - RNA, 19 nt, Artificial Sequence
  Description of Artificial Sequence: Synthetic oligonucleotide
  Sense strand starting at position 1289 of SEQ ID NO: 2661
aauguuauacagugauaag

SEQ ID NO: 206507 - RNA, 19 nt, Artificial Sequence
  Description of Artificial Sequence: Synthetic oligonucleotide
  Antisense strand to SEQ ID NO: 206506
cuuaucacuguauaacauu

SEQ ID NO: 206508 - RNA, 19 nt, Artificial Sequence
  Description of Artificial Sequence: Synthetic oligonucleotide
  Sense strand starting at position 1374 of SEQ ID NO: 2661
cuuuguugucuccaaagaa

SEQ ID NO: 206509 - RNA, 19 nt, Artificial Sequence
  Description of Artificial Sequence: Synthetic oligonucleotide
  Antisense strand to SEQ ID NO: 206508
uucuuuggagacaacaaag

SEQ ID NO: 206510 - RNA, 19 nt, Artificial Sequence
  Description of Artificial Sequence: Synthetic oligonucleotide
  Sense strand starting at position 1576 of SEQ ID NO: 2661
cacuccaaggugugaaaga

SEQ ID NO: 206511 - RNA, 19 nt, Artificial Sequence
  Description of Artificial Sequence: Synthetic oligonucleotide
  Antisense strand to SEQ ID NO: 206510
ucuuucacaccuuggagug

SEQ ID NO: 206512 - RNA, 19 nt, Artificial Sequence
  Description of Artificial Sequence: Synthetic oligonucleotide
  Sense strand starting at position 1728 of SEQ ID NO: 2661
guggaagucacugacuuga

SEQ ID NO: 206513 - RNA, 19 nt, Artificial Sequence
  Description of Artificial Sequence: Synthetic oligonucleotide
  Antisense strand to SEQ ID NO: 206512
ucaagucagugacuuccac

SEQ ID NO: 206514 - RNA, 19 nt, Artificial Sequence
  Description of Artificial Sequence: Synthetic oligonucleotide
  Sense strand starting at position 1828 of SEQ ID NO: 2661
ggauaagcuuauuugccuu

SEQ ID NO: 206515 - RNA, 19 nt, Artificial Sequence
  Description of Artificial Sequence: Synthetic oligonucleotide
  Antisense strand to SEQ ID NO: 206514
aaggcaaauaagcuuaucc

SEQ ID NO: 206516 - RNA, 19 nt, Artificial Sequence
  Description of Artificial Sequence: Synthetic oligonucleotide
  Sense strand starting at position 1979 of SEQ ID NO: 2661
auggauuauagcuggaaau

SEQ ID NO: 206517 - RNA, 19 nt, Artificial Sequence
  Description of Artificial Sequence: Synthetic oligonucleotide
  Antisense strand to SEQ ID NO: 206516
auuuccagcuauaauccau

SEQ ID NO: 206518 - RNA, 19 nt, Artificial Sequence
  Description of Artificial Sequence: Synthetic oligonucleotide
  Sense strand starting at position 1980 of SEQ ID NO: 2661
uggauuauagcuggaaaua

SEQ ID NO: 206519 - RNA, 19 nt, Artificial Sequence
  Description of Artificial Sequence: Synthetic oligonucleotide
  Antisense strand to SEQ ID NO: 206518
uauuuccagcuauaaucca

SEQ ID NO: 206520 - RNA, 19 nt, Artificial Sequence
  Description of Artificial Sequence: Synthetic oligonucleotide
  Sense strand starting at position 2291 of SEQ ID NO: 2661
augguaggccgagaaauug

SEQ ID NO: 206521 - RNA, 19 nt, Artificial Sequence
  Description of Artificial Sequence: Synthetic oligonucleotide
  Antisense strand to SEQ ID NO: 206520
caauuucucggccuaccau

SEQ ID NO: 206522 - RNA, 19 nt, Artificial Sequence
  Description of Artificial Sequence: Synthetic oligonucleotide
  Sense strand starting at position 2313 of SEQ ID NO: 2661
uugaguugugacguugcuu

SEQ ID NO: 206523 - RNA, 19 nt, Artificial Sequence
  Description of Artificial Sequence: Synthetic oligonucleotide
  Antisense strand to SEQ ID NO: 206522
aagcaacgucacaacucaa

SEQ ID NO: 206524 - RNA, 19 nt, Artificial Sequence
  Description of Artificial Sequence: Synthetic oligonucleotide
  Sense strand starting at position 2314 of SEQ ID NO: 2661
ugaguugugacguugcuuu

SEQ ID NO: 206525 - RNA, 19 nt, Artificial Sequence
  Description of Artificial Sequence: Synthetic oligonucleotide
  Antisense strand to SEQ ID NO: 206524
aaagcaacgucacaacuca

SEQ ID NO: 206526 - RNA, 19 nt, Artificial Sequence
  Description of Artificial Sequence: Synthetic oligonucleotide
  Sense strand starting at position 2603 of SEQ ID NO: 2661
uagaguagugggcaagaca

SEQ ID NO: 206527 - RNA, 19 nt, Artificial Sequence
  Description of Artificial Sequence: Synthetic oligonucleotide
  Antisense strand to SEQ ID NO: 206526
ugucuugcccacuacucua

SEQ ID NO: 206528 - RNA, 19 nt, Artificial Sequence
  Description of Artificial Sequence: Synthetic oligonucleotide
  Sense strand starting at position 2639 of SEQ ID NO: 2661
acaaccaaauguguacaua

SEQ ID NO: 206529 - RNA, 19 nt, Artificial Sequence
  Description of Artificial Sequence: Synthetic oligonucleotide
  Antisense strand to SEQ ID NO: 206528
uauguacacauuugguugu

SEQ ID NO: 206530 - RNA, 19 nt, Artificial Sequence
  Description of Artificial Sequence: Synthetic oligonucleotide
  Sense strand starting at position 2689 of SEQ ID NO: 2661
gugcuaugaaaguauagaa

SEQ ID NO: 206531 - RNA, 19 nt, Artificial Sequence
  Description of Artificial Sequence: Synthetic oligonucleotide
  Antisense strand to SEQ ID NO: 206530
uucuauacuuucauagcac

SEQ ID NO: 206532 - RNA, 19 nt, Artificial Sequence
  Description of Artificial Sequence: Synthetic oligonucleotide
  Sense strand starting at position 2738 of SEQ ID NO: 2661
ggaagucuucugugaagaa

SEQ ID NO: 206533 - RNA, 19 nt, Artificial Sequence
  Description of Artificial Sequence: Synthetic oligonucleotide
  Antisense strand to SEQ ID NO: 206532
uucuucacagaagacuucc

SEQ ID NO: 206534 - RNA, 19 nt, Artificial Sequence
  Description of Artificial Sequence: Synthetic oligonucleotide
  Sense strand starting at position 2772 of SEQ ID NO: 2661
gucaacugaauaggaguua

SEQ ID NO: 206535 - RNA, 19 nt, Artificial Sequence
  Description of Artificial Sequence: Synthetic oligonucleotide
  Antisense strand to SEQ ID NO: 206534
uaacuccuauucaguugac

SEQ ID NO: 206536 - RNA, 19 nt, Artificial Sequence
  Description of Artificial Sequence: Synthetic oligonucleotide
  Sense strand starting at position 2930 of SEQ ID NO: 2661
cggagagguagucagauua

SEQ ID NO: 206537 - RNA, 19 nt, Artificial Sequence
  Description of Artificial Sequence: Synthetic oligonucleotide
  Antisense strand to SEQ ID NO: 206536
uaaucugacuaccucuccg

SEQ ID NO: 206538 - RNA, 19 nt, Artificial Sequence
  Description of Artificial Sequence: Synthetic oligonucleotide
  Sense strand starting at position 2940 of SEQ ID NO: 2661
gucagauuaugaucuuuag

SEQ ID NO: 206539 - RNA, 19 nt, Artificial Sequence
  Description of Artificial Sequence: Synthetic oligonucleotide
  Antisense strand to SEQ ID NO: 206538
cuaaagaucauaaucugac

SEQ ID NO: 206540 - RNA, 19 nt, Artificial Sequence
  Description of Artificial Sequence: Synthetic oligonucleotide
  Sense strand starting at position 2944 of SEQ ID NO: 2661
gauuaugaucuuuaggcua

SEQ ID NO: 206541 - RNA, 19 nt, Artificial Sequence
  Description of Artificial Sequence: Synthetic oligonucleotide
  Antisense strand to SEQ ID NO: 206540
uagccuaaagaucauaauc

SEQ ID NO: 206542 - RNA, 19 nt, Artificial Sequence
  Description of Artificial Sequence: Synthetic oligonucleotide
  Sense strand starting at position 2951 of SEQ ID NO: 2661
aucuuuaggcuacaaguaa

SEQ ID NO: 206543 - RNA, 19 nt, Artificial Sequence
  Description of Artificial Sequence: Synthetic oligonucleotide
  Antisense strand to SEQ ID NO: 206542
uuacuuguagccuaaagau

SEQ ID NO: 206544 - RNA, 19 nt, Artificial Sequence
  Description of Artificial Sequence: Synthetic oligonucleotide
  Sense strand starting at position 2996 of SEQ ID NO: 2661
aucaaagaagcuugaucau

SEQ ID NO: 206545 - RNA, 19 nt, Artificial Sequence
  Description of Artificial Sequence: Synthetic oligonucleotide
  Antisense strand to SEQ ID NO: 206544
augaucaagcuucuuugau

SEQ ID NO: 206546 - RNA, 19 nt, Artificial Sequence
  Description of Artificial Sequence: Synthetic oligonucleotide
  Sense strand starting at position 3125 of SEQ ID NO: 2661
agauguuaacuuggauuag

SEQ ID NO: 206547 - RNA, 19 nt, Artificial Sequence
  Description of Artificial Sequence: Synthetic oligonucleotide
  Antisense strand to SEQ ID NO: 206546
cuaauccaaguuaacaucu

SEQ ID NO: 206548 - RNA, 19 nt, Artificial Sequence
  Description of Artificial Sequence: Synthetic oligonucleotide
  Sense strand starting at position 3163 of SEQ ID NO: 2661
cacagauuauggguagauc

SEQ ID NO: 206549 - RNA, 19 nt, Artificial Sequence
  Description of Artificial Sequence: Synthetic oligonucleotide
  Antisense strand to SEQ ID NO: 206548
gaucuacccauaaucugug

SEQ ID NO: 206550 - RNA, 19 nt, Artificial Sequence
  Description of Artificial Sequence: Synthetic oligonucleotide
  Sense strand starting at position 3186 of SEQ ID NO: 2661
agagauuuauaagggauug

SEQ ID NO: 206551 - RNA, 19 nt, Artificial Sequence
  Description of Artificial Sequence: Synthetic oligonucleotide
  Antisense strand to SEQ ID NO: 206550
caaucccuuauaaaucucu

SEQ ID NO: 206552 - RNA, 19 nt, Artificial Sequence
  Description of Artificial Sequence: Synthetic oligonucleotide
  Sense strand starting at position 3336 of SEQ ID NO: 2661
gagugaagaucaucauucu

SEQ ID NO: 206553 - RNA, 19 nt, Artificial Sequence
  Description of Artificial Sequence: Synthetic oligonucleotide
  Antisense strand to SEQ ID NO: 206552
agaaugaugaucuucacuc

SEQ ID NO: 206554 - RNA, 19 nt, Artificial Sequence
  Description of Artificial Sequence: Synthetic oligonucleotide
  Sense strand starting at position 3481 of SEQ ID NO: 2661
uuggcauagaagugaauga

SEQ ID NO: 206555 - RNA, 19 nt, Artificial Sequence
  Description of Artificial Sequence: Synthetic oligonucleotide
  Antisense strand to SEQ ID NO: 206554
ucauucacuucuaugccaa

SEQ ID NO: 206556 - RNA, 19 nt, Artificial Sequence
  Description of Artificial Sequence: Synthetic oligonucleotide
  Sense strand starting at position 3494 of SEQ ID NO: 2661
gaaugagauuaccucagua

SEQ ID NO: 206557 - RNA, 19 nt, Artificial Sequence
  Description of Artificial Sequence: Synthetic oligonucleotide
  Antisense strand to SEQ ID NO: 206556
uacugagguaaucucauuc

SEQ ID NO: 206558 - RNA, 19 nt, Artificial Sequence
  Description of Artificial Sequence: Synthetic oligonucleotide
  Sense strand starting at position 3498 of SEQ ID NO: 2661
gagauuaccucaguaaagu

SEQ ID NO: 206559 - RNA, 19 nt, Artificial Sequence
  Description of Artificial Sequence: Synthetic oligonucleotide
  Antisense strand to SEQ ID NO: 206558
acuuuacugagguaaucuc

SEQ ID NO: 206560 - RNA, 19 nt, Artificial Sequence
  Description of Artificial Sequence: Synthetic oligonucleotide
  Sense strand starting at position 3499 of SEQ ID NO: 2661
agauuaccucaguaaaguu

SEQ ID NO: 206561 - RNA, 19 nt, Artificial Sequence
  Description of Artificial Sequence: Synthetic oligonucleotide
  Antisense strand to SEQ ID NO: 206560
aacuuuacugagguaaucu

SEQ ID NO: 206562 - RNA, 19 nt, Artificial Sequence
  Description of Artificial Sequence: Synthetic oligonucleotide
  Sense strand starting at position 3775 of SEQ ID NO: 2661
uggaaacgcagcuaugaaa

SEQ ID NO: 206563 - RNA, 19 nt, Artificial Sequence
  Description of Artificial Sequence: Synthetic oligonucleotide
  Antisense strand to SEQ ID NO: 206562
uuucauagcugcguuucca

SEQ ID NO: 206564 - RNA, 19 nt, Artificial Sequence
  Description of Artificial Sequence: Synthetic oligonucleotide
  Sense strand starting at position 355 of SEQ ID NO: 2662
augcacauuugucuagcaa

SEQ ID NO: 206565 - RNA, 19 nt, Artificial Sequence
  Description of Artificial Sequence: Synthetic oligonucleotide
  Antisense strand to SEQ ID NO: 206564
uugcuagacaaaugugcau

SEQ ID NO: 206566 - RNA, 19 nt, Artificial Sequence
  Description of Artificial Sequence: Synthetic oligonucleotide
  Sense strand starting at position 442 of SEQ ID NO: 2662
agcugagaucuugggcaag

SEQ ID NO: 206567 - RNA, 19 nt, Artificial Sequence
  Description of Artificial Sequence: Synthetic oligonucleotide
  Antisense strand to SEQ ID NO: 206566
cuugcccaagaucucagcu

SEQ ID NO: 206568 - RNA, 19 nt, Artificial Sequence
  Description of Artificial Sequence: Synthetic oligonucleotide
  Sense strand starting at position 479 of SEQ ID NO: 2662
ccuguuuccugacugugaa

SEQ ID NO: 206569 - RNA, 19 nt, Artificial Sequence
  Description of Artificial Sequence: Synthetic oligonucleotide
  Antisense strand to SEQ ID NO: 206568
uucacagucaggaaacagg

SEQ ID NO: 206570 - RNA, 19 nt, Artificial Sequence
  Description of Artificial Sequence: Synthetic oligonucleotide
  Sense strand starting at position 480 of SEQ ID NO: 2662
cuguuuccugacugugaaa

SEQ ID NO: 206571 - RNA, 19 nt, Artificial Sequence
  Description of Artificial Sequence: Synthetic oligonucleotide
  Antisense strand to SEQ ID NO: 206570
uuucacagucaggaaacag

SEQ ID NO: 206572 - RNA, 19 nt, Artificial Sequence
  Description of Artificial Sequence: Synthetic oligonucleotide
  Sense strand starting at position 482 of SEQ ID NO: 2662
guuuccugacugugaaaca

SEQ ID NO: 206573 - RNA, 19 nt, Artificial Sequence
  Description of Artificial Sequence: Synthetic oligonucleotide
  Antisense strand to SEQ ID NO: 206572
uguuucacagucaggaaac

SEQ ID NO: 206574 - RNA, 19 nt, Artificial Sequence
  Description of Artificial Sequence: Synthetic oligonucleotide
  Sense strand starting at position 502 of SEQ ID NO: 2662
acagaagcuuucuuaugag

SEQ ID NO: 206575 - RNA, 19 nt, Artificial Sequence
  Description of Artificial Sequence: Synthetic oligonucleotide
  Antisense strand to SEQ ID NO: 206574
cucauaagaaagcuucugu

SEQ ID NO: 206576 - RNA, 19 nt, Artificial Sequence
  Description of Artificial Sequence: Synthetic oligonucleotide
  Sense strand starting at position 511 of SEQ ID NO: 2662
uucuuaugagguuguauaa

SEQ ID NO: 206577 - RNA, 19 nt, Artificial Sequence
  Description of Artificial Sequence: Synthetic oligonucleotide
  Antisense strand to SEQ ID NO: 206576
uuauacaaccucauaagaa

SEQ ID NO: 206578 - RNA, 19 nt, Artificial Sequence
  Description of Artificial Sequence: Synthetic oligonucleotide
  Sense strand starting at position 1203 of SEQ ID NO: 2662
gucauauauuaaccagugu

SEQ ID NO: 206579 - RNA, 19 nt, Artificial Sequence
  Description of Artificial Sequence: Synthetic oligonucleotide
  Antisense strand to SEQ ID NO: 206578
acacugguuaauauaugac

SEQ ID NO: 206580 - RNA, 19 nt, Artificial Sequence
  Description of Artificial Sequence: Synthetic oligonucleotide
  Sense strand starting at position 1218 of SEQ ID NO: 2662
gugugaucucuagguagca

SEQ ID NO: 206581 - RNA, 19 nt, Artificial Sequence
  Description of Artificial Sequence: Synthetic oligonucleotide
  Antisense strand to SEQ ID NO: 206580
ugcuaccuagagaucacac

SEQ ID NO: 206582 - RNA, 19 nt, Artificial Sequence
  Description of Artificial Sequence: Synthetic oligonucleotide
  Sense strand starting at position 1220 of SEQ ID NO: 2662
gugaucucuagguagcaga

SEQ ID NO: 206583 - RNA, 19 nt, Artificial Sequence
  Description of Artificial Sequence: Synthetic oligonucleotide
  Antisense strand to SEQ ID NO: 206582
ucugcuaccuagagaucac

SEQ ID NO: 206584 - RNA, 19 nt, Artificial Sequence
  Description of Artificial Sequence: Synthetic oligonucleotide
  Sense strand starting at position 1308 of SEQ ID NO: 2662
acuuucucuuugcuaggua

SEQ ID NO: 206585 - RNA, 19 nt, Artificial Sequence
  Description of Artificial Sequence: Synthetic oligonucleotide
  Antisense strand to SEQ ID NO: 206584
uaccuagcaaagagaaagu

SEQ ID NO: 206586 - RNA, 19 nt, Artificial Sequence
  Description of Artificial Sequence: Synthetic oligonucleotide
  Sense strand starting at position 1326 of SEQ ID NO: 2662
agcggagcaccuuacuaaa

SEQ ID NO: 206587 - RNA, 19 nt, Artificial Sequence
  Description of Artificial Sequence: Synthetic oligonucleotide
  Antisense strand to SEQ ID NO: 206586
uuuaguaaggugcuccgcu

SEQ ID NO: 206588 - RNA, 19 nt, Artificial Sequence
  Description of Artificial Sequence: Synthetic oligonucleotide
  Sense strand starting at position 1398 of SEQ ID NO: 2662
cucugacagcgaugcuuaa

SEQ ID NO: 206589 - RNA, 19 nt, Artificial Sequence
  Description of Artificial Sequence: Synthetic oligonucleotide
  Antisense strand to SEQ ID NO: 206588
uuaagcaucgcugucagag

SEQ ID NO: 206590 - RNA, 19 nt, Artificial Sequence
  Description of Artificial Sequence: Synthetic oligonucleotide
  Sense strand starting at position 1421 of SEQ ID NO: 2662
gggcuuaugagucguccca

SEQ ID NO: 206591 - RNA, 19 nt, Artificial Sequence
  Description of Artificial Sequence: Synthetic oligonucleotide
  Antisense strand to SEQ ID NO: 206590
ugggacgacucauaagccc

SEQ ID NO: 206592 - RNA, 19 nt, Artificial Sequence
  Description of Artificial Sequence: Synthetic oligonucleotide
  Sense strand starting at position 1423 of SEQ ID NO: 2662
gcuuaugagucgucccagu

SEQ ID NO: 206593 - RNA, 19 nt, Artificial Sequence
  Description of Artificial Sequence: Synthetic oligonucleotide
  Antisense strand to SEQ ID NO: 206592
acugggacgacucauaagc

SEQ ID NO: 206594 - RNA, 19 nt, Artificial Sequence
  Description of Artificial Sequence: Synthetic oligonucleotide
  Sense strand starting at position 1434 of SEQ ID NO: 2662
gucccaguucuuggugaga

SEQ ID NO: 206595 - RNA, 19 nt, Artificial Sequence
  Description of Artificial Sequence: Synthetic oligonucleotide
  Antisense strand to SEQ ID NO: 206594
ucucaccaagaacugggac

SEQ ID NO: 206596 - RNA, 19 nt, Artificial Sequence
  Description of Artificial Sequence: Synthetic oligonucleotide
  Sense strand starting at position 1437 of SEQ ID NO: 2662
ccaguucuuggugagaauc

SEQ ID NO: 206597 - RNA, 19 nt, Artificial Sequence
  Description of Artificial Sequence: Synthetic oligonucleotide
  Antisense strand to SEQ ID NO: 206596
gauucucaccaagaacugg

SEQ ID NO: 206598 - RNA, 19 nt, Artificial Sequence
  Description of Artificial Sequence: Synthetic oligonucleotide
  Sense strand starting at position 1439 of SEQ ID NO: 2662
aguucuuggugagaaucau

SEQ ID NO: 206599 - RNA, 19 nt, Artificial Sequence
  Description of Artificial Sequence: Synthetic oligonucleotide
  Antisense strand to SEQ ID NO: 206598
augauucucaccaagaacu

SEQ ID NO: 206600 - RNA, 19 nt, Artificial Sequence
  Description of Artificial Sequence: Synthetic oligonucleotide
  Sense strand starting at position 1502 of SEQ ID NO: 2662
acgagaugagcugaaccuu

SEQ ID NO: 206601 - RNA, 19 nt, Artificial Sequence
  Description of Artificial Sequence: Synthetic oligonucleotide
  Antisense strand to SEQ ID NO: 206600
aagguucagcucaucucgu

SEQ ID NO: 206602 - RNA, 19 nt, Artificial Sequence
  Description of Artificial Sequence: Synthetic oligonucleotide
  Sense strand starting at position 1508 of SEQ ID NO: 2662
ugagcugaaccuuaggagu

SEQ ID NO: 206603 - RNA, 19 nt, Artificial Sequence
  Description of Artificial Sequence: Synthetic oligonucleotide
  Antisense strand to SEQ ID NO: 206602
acuccuaagguucagcuca

SEQ ID NO: 206604 - RNA, 19 nt, Artificial Sequence
  Description of Artificial Sequence: Synthetic oligonucleotide
  Sense strand starting at position 1510 of SEQ ID NO: 2662
agcugaaccuuaggaguaa

SEQ ID NO: 206605 - RNA, 19 nt, Artificial Sequence
  Description of Artificial Sequence: Synthetic oligonucleotide
  Antisense strand to SEQ ID NO: 206604
uuacuccuaagguucagcu

SEQ ID NO: 206606 - RNA, 19 nt, Artificial Sequence
  Description of Artificial Sequence: Synthetic oligonucleotide
  Sense strand starting at position 1829 of SEQ ID NO: 2662
ucugguuccgucggauaug

SEQ ID NO: 206607 - RNA, 19 nt, Artificial Sequence
  Description of Artificial Sequence: Synthetic oligonucleotide
  Antisense strand to SEQ ID NO: 206606
cauauccgacggaaccaga

SEQ ID NO: 206608 - RNA, 19 nt, Artificial Sequence
  Description of Artificial Sequence: Synthetic oligonucleotide
  Sense strand starting at position 1850 of SEQ ID NO: 2662
gcacgaagccgugguucau

SEQ ID NO: 206609 - RNA, 19 nt, Artificial Sequence
  Description of Artificial Sequence: Synthetic oligonucleotide
  Antisense strand to SEQ ID NO: 206608
augaaccacggcuucgugc

SEQ ID NO: 206610 - RNA, 19 nt, Artificial Sequence
  Description of Artificial Sequence: Synthetic oligonucleotide
  Sense strand starting at position 2375 of SEQ ID NO: 2662
guuuccucauuaguaaaug

SEQ ID NO: 206611 - RNA, 19 nt, Artificial Sequence
  Description of Artificial Sequence: Synthetic oligonucleotide
  Antisense strand to SEQ ID NO: 206610
cauuuacuaaugaggaaac

SEQ ID NO: 206612 - RNA, 19 nt, Artificial Sequence
  Description of Artificial Sequence: Synthetic oligonucleotide
  Sense strand starting at position 2565 of SEQ ID NO: 2662
gggaccuacggguguauua

SEQ ID NO: 206613 - RNA, 19 nt, Artificial Sequence
  Description of Artificial Sequence: Synthetic oligonucleotide
  Antisense strand to SEQ ID NO: 206612
uaauacacccguagguccc

SEQ ID NO: 206614 - RNA, 19 nt, Artificial Sequence
  Description of Artificial Sequence: Synthetic oligonucleotide
  Sense strand starting at position 2567 of SEQ ID NO: 2662
gaccuacggguguauuauu

SEQ ID NO: 206615 - RNA, 19 nt, Artificial Sequence
  Description of Artificial Sequence: Synthetic oligonucleotide
  Antisense strand to SEQ ID NO: 206614
aauaauacacccguagguc

SEQ ID NO: 206616 - RNA, 19 nt, Artificial Sequence
  Description of Artificial Sequence: Synthetic oligonucleotide
  Sense strand starting at position 2655 of SEQ ID NO: 2662
agugcauuggcgugauuuc

SEQ ID NO: 206617 - RNA, 19 nt, Artificial Sequence
  Description of Artificial Sequence: Synthetic oligonucleotide
  Antisense strand to SEQ ID NO: 206616
gaaaucacgccaaugcacu

SEQ ID NO: 206618 - RNA, 19 nt, Artificial Sequence
  Description of Artificial Sequence: Synthetic oligonucleotide
  Sense strand starting at position 2943 of SEQ ID NO: 2662
ucacgucacagcguguaaa

SEQ ID NO: 206619 - RNA, 19 nt, Artificial Sequence
  Description of Artificial Sequence: Synthetic oligonucleotide
  Antisense strand to SEQ ID NO: 206618
uuuacacgcugugacguga

SEQ ID NO: 206620 - RNA, 19 nt, Artificial Sequence
  Description of Artificial Sequence: Synthetic oligonucleotide
  Sense strand starting at position 3075 of SEQ ID NO: 2662
gggaguaucgcuggaggga

SEQ ID NO: 206621 - RNA, 19 nt, Artificial Sequence
  Description of Artificial Sequence: Synthetic oligonucleotide
  Antisense strand to SEQ ID NO: 206620
ucccuccagcgauacuccc

SEQ ID NO: 206622 - RNA, 19 nt, Artificial Sequence
  Description of Artificial Sequence: Synthetic oligonucleotide
  Sense strand starting at position 3124 of SEQ ID NO: 2662
gagacaucgucucuacaag

SEQ ID NO: 206623 - RNA, 19 nt, Artificial Sequence
  Description of Artificial Sequence: Synthetic oligonucleotide
  Antisense strand to SEQ ID NO: 206622
cuuguagagacgaugucuc

SEQ ID NO: 206624 - RNA, 19 nt, Artificial Sequence
  Description of Artificial Sequence: Synthetic oligonucleotide
  Sense strand starting at position 3125 of SEQ ID NO: 2662
agacaucgucucuacaaga

SEQ ID NO: 206625 - RNA, 19 nt, Artificial Sequence
  Description of Artificial Sequence: Synthetic oligonucleotide
  Antisense strand to SEQ ID NO: 206624
ucuuguagagacgaugucu

SEQ ID NO: 206626 - RNA, 19 nt, Artificial Sequence
  Description of Artificial Sequence: Synthetic oligonucleotide
  Sense strand starting at position 3491 of SEQ ID NO: 2662
gauggaauauuacugagca

SEQ ID NO: 206627 - RNA, 19 nt, Artificial Sequence
  Description of Artificial Sequence: Synthetic oligonucleotide
  Antisense strand to SEQ ID NO: 206626
ugcucaguaauauuccauc

SEQ ID NO: 206628 - RNA, 19 nt, Artificial Sequence
  Description of Artificial Sequence: Synthetic oligonucleotide
  Sense strand starting at position 3518 of SEQ ID NO: 2662
gaagaucuguagcucaaca

SEQ ID NO: 206629 - RNA, 19 nt, Artificial Sequence
  Description of Artificial Sequence: Synthetic oligonucleotide
  Antisense strand to SEQ ID NO: 206628
uguugagcuacagaucuuc

SEQ ID NO: 206630 - RNA, 19 nt, Artificial Sequence
  Description of Artificial Sequence: Synthetic oligonucleotide
  Sense strand starting at position 3557 of SEQ ID NO: 2662
aaauaugcccagugaaaga

SEQ ID NO: 206631 - RNA, 19 nt, Artificial Sequence
  Description of Artificial Sequence: Synthetic oligonucleotide
  Antisense strand to SEQ ID NO: 206630
ucuuucacugggcauauuu

SEQ ID NO: 206632 - RNA, 19 nt, Artificial Sequence
  Description of Artificial Sequence: Synthetic oligonucleotide
  Sense strand starting at position 3581 of SEQ ID NO: 2662
gggacucuguaugauucca

SEQ ID NO: 206633 - RNA, 19 nt, Artificial Sequence
  Description of Artificial Sequence: Synthetic oligonucleotide
  Antisense strand to SEQ ID NO: 206632
uggaaucauacagaguccc

SEQ ID NO: 206634 - RNA, 19 nt, Artificial Sequence
  Description of Artificial Sequence: Synthetic oligonucleotide
  Sense strand starting at position 3630 of SEQ ID NO: 2662
aucuauagugaccgagaga

SEQ ID NO: 206635 - RNA, 19 nt, Artificial Sequence
  Description of Artificial Sequence: Synthetic oligonucleotide
  Antisense strand to SEQ ID NO: 206634
ucucucggucacuauagau

SEQ ID NO: 206636 - RNA, 19 nt, Artificial Sequence
  Description of Artificial Sequence: Synthetic oligonucleotide
  Sense strand starting at position 3635 of SEQ ID NO: 2662
uagugaccgagagaucagu

SEQ ID NO: 206637 - RNA, 19 nt, Artificial Sequence
  Description of Artificial Sequence: Synthetic oligonucleotide
  Antisense strand to SEQ ID NO: 206636
acugaucucucggucacua

SEQ ID NO: 206638 - RNA, 19 nt, Artificial Sequence
  Description of Artificial Sequence: Synthetic oligonucleotide
  Sense strand starting at position 3699 of SEQ ID NO: 2662
cuggguagauucuuuaaau

SEQ ID NO: 206639 - RNA, 19 nt, Artificial Sequence
  Description of Artificial Sequence: Synthetic oligonucleotide
  Antisense strand to SEQ ID NO: 206638
auuuaaagaaucuacccag

SEQ ID NO: 206640 - RNA, 19 nt, Artificial Sequence
  Description of Artificial Sequence: Synthetic oligonucleotide
  Sense strand starting at position 3700 of SEQ ID NO: 2662
uggguagauucuuuaaauu

SEQ ID NO: 206641 - RNA, 19 nt, Artificial Sequence
  Description of Artificial Sequence: Synthetic oligonucleotide
  Antisense strand to SEQ ID NO: 206640
aauuuaaagaaucuaccca

SEQ ID NO: 206642 - RNA, 19 nt, Artificial Sequence
  Description of Artificial Sequence: Synthetic oligonucleotide
  Sense strand starting at position 3745 of SEQ ID NO: 2662
gcaggaucucacugucgca

SEQ ID NO: 206643 - RNA, 19 nt, Artificial Sequence
  Description of Artificial Sequence: Synthetic oligonucleotide
  Antisense strand to SEQ ID NO: 206642
ugcgacagugagauccugc

SEQ ID NO: 206644 - RNA, 19 nt, Artificial Sequence
  Description of Artificial Sequence: Synthetic oligonucleotide
  Sense strand starting at position 232 of SEQ ID NO: 2663
agagcacaguuucuaagua

SEQ ID NO: 206645 - RNA, 19 nt, Artificial Sequence
  Description of Artificial Sequence: Synthetic oligonucleotide
  Antisense strand to SEQ ID NO: 206644
uacuuagaaacugugcucu

SEQ ID NO: 206646 - RNA, 19 nt, Artificial Sequence
  Description of Artificial Sequence: Synthetic oligonucleotide
  Sense strand starting at position 240 of SEQ ID NO: 2663
guuucuaaguaugucauuu

SEQ ID NO: 206647 - RNA, 19 nt, Artificial Sequence
  Description of Artificial Sequence: Synthetic oligonucleotide
  Antisense strand to SEQ ID NO: 206646
aaaugacauacuuagaaac

SEQ ID NO: 206648 - RNA, 19 nt, Artificial Sequence
  Description of Artificial Sequence: Synthetic oligonucleotide
  Sense strand starting at position 638 of SEQ ID NO: 2663
gcuuuaccugucuagaacu

SEQ ID NO: 206649 - RNA, 19 nt, Artificial Sequence
  Description of Artificial Sequence: Synthetic oligonucleotide
  Antisense strand to SEQ ID NO: 206648
aguucuagacagguaaagc

SEQ ID NO: 206650 - RNA, 19 nt, Artificial Sequence
  Description of Artificial Sequence: Synthetic oligonucleotide
  Sense strand starting at position 657 of SEQ ID NO: 2663
uucuaugaugauggauuau

SEQ ID NO: 206651 - RNA, 19 nt, Artificial Sequence
  Description of Artificial Sequence: Synthetic oligonucleotide
  Antisense strand to SEQ ID NO: 206650
auaauccaucaucauagaa

SEQ ID NO: 206652 - RNA, 19 nt, Artificial Sequence
  Description of Artificial Sequence: Synthetic oligonucleotide
  Sense strand starting at position 838 of SEQ ID NO: 2663
uagauaaugcaacguuaga

SEQ ID NO: 206653 - RNA, 19 nt, Artificial Sequence
  Description of Artificial Sequence: Synthetic oligonucleotide
  Antisense strand to SEQ ID NO: 206652
ucuaacguugcauuaucua

SEQ ID NO: 206654 - RNA, 19 nt, Artificial Sequence
  Description of Artificial Sequence: Synthetic oligonucleotide
  Sense strand starting at position 876 of SEQ ID NO: 2663
gcaacauaaccacggauau

SEQ ID NO: 206655 - RNA, 19 nt, Artificial Sequence
  Description of Artificial Sequence: Synthetic oligonucleotide
  Antisense strand to SEQ ID NO: 206654
auauccgugguuauguugc

SEQ ID NO: 206656 - RNA, 19 nt, Artificial Sequence
  Description of Artificial Sequence: Synthetic oligonucleotide
  Sense strand starting at position 888 of SEQ ID NO: 2663
cggauauuuaccugcagcu

SEQ ID NO: 206657 - RNA, 19 nt, Artificial Sequence
  Description of Artificial Sequence: Synthetic oligonucleotide
  Antisense strand to SEQ ID NO: 206656
agcugcagguaaauauccg

SEQ ID NO: 206658 - RNA, 19 nt, Artificial Sequence
  Description of Artificial Sequence: Synthetic oligonucleotide
  Sense strand starting at position 1021 of SEQ ID NO: 2663
aggguuacuggaugucaua

SEQ ID NO: 206659 - RNA, 19 nt, Artificial Sequence
  Description of Artificial Sequence: Synthetic oligonucleotide
  Antisense strand to SEQ ID NO: 206658
uaugacauccaguaacccu

SEQ ID NO: 206660 - RNA, 19 nt, Artificial Sequence
  Description of Artificial Sequence: Synthetic oligonucleotide
  Sense strand starting at position 1032 of SEQ ID NO: 2663
augucauaccuuuguaaug

SEQ ID NO: 206661 - RNA, 19 nt, Artificial Sequence
  Description of Artificial Sequence: Synthetic oligonucleotide
  Antisense strand to SEQ ID NO: 206660
cauuacaaagguaugacau

SEQ ID NO: 206662 - RNA, 19 nt, Artificial Sequence
  Description of Artificial Sequence: Synthetic oligonucleotide
  Sense strand starting at position 1330 of SEQ ID NO: 2663
uggauuucguggaguagag

SEQ ID NO: 206663 - RNA, 19 nt, Artificial Sequence
  Description of Artificial Sequence: Synthetic oligonucleotide
  Antisense strand to SEQ ID NO: 206662
cucuacuccacgaaaucca

SEQ ID NO: 206664 - RNA, 19 nt, Artificial Sequence
  Description of Artificial Sequence: Synthetic oligonucleotide
  Sense strand starting at position 1435 of SEQ ID NO: 2663
guacguauacacgagagga

SEQ ID NO: 206665 - RNA, 19 nt, Artificial Sequence
  Description of Artificial Sequence: Synthetic oligonucleotide
  Antisense strand to SEQ ID NO: 206664
uccucucguguauacguac

SEQ ID NO: 206666 - RNA, 19 nt, Artificial Sequence
  Description of Artificial Sequence: Synthetic oligonucleotide
  Sense strand starting at position 2211 of SEQ ID NO: 2663
gcaggucgccguucaauaa

SEQ ID NO: 206667 - RNA, 19 nt, Artificial Sequence
  Description of Artificial Sequence: Synthetic oligonucleotide
  Antisense strand to SEQ ID NO: 206666
uuauugaacggcgaccugc

SEQ ID NO: 206668 - RNA, 19 nt, Artificial Sequence
  Description of Artificial Sequence: Synthetic oligonucleotide
  Sense strand starting at position 2229 of SEQ ID NO: 2663
auacguaauguauagacuu

SEQ ID NO: 206669 - RNA, 19 nt, Artificial Sequence
  Description of Artificial Sequence: Synthetic oligonucleotide
  Antisense strand to SEQ ID NO: 206668
aagucuauacauuacguau

SEQ ID NO: 206670 - RNA, 19 nt, Artificial Sequence
  Description of Artificial Sequence: Synthetic oligonucleotide
  Sense strand starting at position 2331 of SEQ ID NO: 2663
agaagauuccgugggaagu

SEQ ID NO: 206671 - RNA, 19 nt, Artificial Sequence
  Description of Artificial Sequence: Synthetic oligonucleotide
  Antisense strand to SEQ ID NO: 206670
acuucccacggaaucuucu

SEQ ID NO: 206672 - RNA, 19 nt, Artificial Sequence
  Description of Artificial Sequence: Synthetic oligonucleotide
  Sense strand starting at position 2332 of SEQ ID NO: 2663
gaagauuccgugggaaguc

SEQ ID NO: 206673 - RNA, 19 nt, Artificial Sequence
  Description of Artificial Sequence: Synthetic oligonucleotide
  Antisense strand to SEQ ID NO: 206672
gacuucccacggaaucuuc

SEQ ID NO: 206674 - RNA, 19 nt, Artificial Sequence
  Description of Artificial Sequence: Synthetic oligonucleotide
  Sense strand starting at position 2393 of SEQ ID NO: 2663
ugaguuuccugaguacaau

SEQ ID NO: 206675 - RNA, 19 nt, Artificial Sequence
  Description of Artificial Sequence: Synthetic oligonucleotide
  Antisense strand to SEQ ID NO: 206674
auuguacucaggaaacuca

SEQ ID NO: 206676 - RNA, 19 nt, Artificial Sequence
  Description of Artificial Sequence: Synthetic oligonucleotide
  Sense strand starting at position 2394 of SEQ ID NO: 2663
gaguuuccugaguacaauu

SEQ ID NO: 206677 - RNA, 19 nt, Artificial Sequence
  Description of Artificial Sequence: Synthetic oligonucleotide
  Antisense strand to SEQ ID NO: 206676
aauuguacucaggaaacuc

SEQ ID NO: 206678 - RNA, 19 nt, Artificial Sequence
  Description of Artificial Sequence: Synthetic oligonucleotide
  Sense strand starting at position 2396 of SEQ ID NO: 2663
guuuccugaguacaauuau

SEQ ID NO: 206679 - RNA, 19 nt, Artificial Sequence
  Description of Artificial Sequence: Synthetic oligonucleotide
  Antisense strand to SEQ ID NO: 206678
auaauuguacucaggaaac

SEQ ID NO: 206680 - RNA, 19 nt, Artificial Sequence
  Description of Artificial Sequence: Synthetic oligonucleotide
  Sense strand starting at position 2426 of SEQ ID NO: 2663
gaagaucucugugcucaug

SEQ ID NO: 206681 - RNA, 19 nt, Artificial Sequence
  Description of Artificial Sequence: Synthetic oligonucleotide
  Antisense strand to SEQ ID NO: 206680
caugagcacagagaucuuc

SEQ ID NO: 206682 - RNA, 19 nt, Artificial Sequence
  Description of Artificial Sequence: Synthetic oligonucleotide
  Sense strand starting at position 2428 of SEQ ID NO: 2663
agaucucugugcucaugga

SEQ ID NO: 206683 - RNA, 19 nt, Artificial Sequence
  Description of Artificial Sequence: Synthetic oligonucleotide
  Antisense strand to SEQ ID NO: 206682
uccaugagcacagagaucu

SEQ ID NO: 206684 - RNA, 19 nt, Artificial Sequence
  Description of Artificial Sequence: Synthetic oligonucleotide
  Sense strand starting at position 2618 of SEQ ID NO: 2663
uggccaguugaguaggaau

SEQ ID NO: 206685 - RNA, 19 nt, Artificial Sequence
  Description of Artificial Sequence: Synthetic oligonucleotide
  Antisense strand to SEQ ID NO: 206684
auuccuacucaacuggcca

SEQ ID NO: 206686 - RNA, 19 nt, Artificial Sequence
  Description of Artificial Sequence: Synthetic oligonucleotide
  Sense strand starting at position 2620 of SEQ ID NO: 2663
gccaguugaguaggaauaa

SEQ ID NO: 206687 - RNA, 19 nt, Artificial Sequence
  Description of Artificial Sequence: Synthetic oligonucleotide
  Antisense strand to SEQ ID NO: 206686
uuauuccuacucaacuggc

SEQ ID NO: 206688 - RNA, 19 nt, Artificial Sequence
  Description of Artificial Sequence: Synthetic oligonucleotide
  Sense strand starting at position 2832 of SEQ ID NO: 2663
gggagauuggaucgcuuga

SEQ ID NO: 206689 - RNA, 19 nt, Artificial Sequence
  Description of Artificial Sequence: Synthetic oligonucleotide
  Antisense strand to SEQ ID NO: 206688
ucaagcgauccaaucuccc

SEQ ID NO: 206690 - RNA, 19 nt, Artificial Sequence
  Description of Artificial Sequence: Synthetic oligonucleotide
  Sense strand starting at position 2990 of SEQ ID NO: 2663
guacuugugagacaaagca

SEQ ID NO: 206691 - RNA, 19 nt, Artificial Sequence
  Description of Artificial Sequence: Synthetic oligonucleotide
  Antisense strand to SEQ ID NO: 206690
ugcuuugucucacaaguac

SEQ ID NO: 206692 - RNA, 19 nt, Artificial Sequence
  Description of Artificial Sequence: Synthetic oligonucleotide
  Sense strand starting at position 3062 of SEQ ID NO: 2663
gaggguuuacuauaggcca

SEQ ID NO: 206693 - RNA, 19 nt, Artificial Sequence
  Description of Artificial Sequence: Synthetic oligonucleotide
  Antisense strand to SEQ ID NO: 206692
uggccuauaguaaacccuc

SEQ ID NO: 206694 - RNA, 19 nt, Artificial Sequence
  Description of Artificial Sequence: Synthetic oligonucleotide
  Sense strand starting at position 3064 of SEQ ID NO: 2663
ggguuuacuauaggccaga

SEQ ID NO: 206695 - RNA, 19 nt, Artificial Sequence
  Description of Artificial Sequence: Synthetic oligonucleotide
  Antisense strand to SEQ ID NO: 206694
ucuggccuauaguaaaccc

SEQ ID NO: 206696 - RNA, 19 nt, Artificial Sequence
  Description of Artificial Sequence: Synthetic oligonucleotide
  Sense strand starting at position 3065 of SEQ ID NO: 2663
gguuuacuauaggccagaa

SEQ ID NO: 206697 - RNA, 19 nt, Artificial Sequence
  Description of Artificial Sequence: Synthetic oligonucleotide
  Antisense strand to SEQ ID NO: 206696
uucuggccuauaguaaacc

SEQ ID NO: 206698 - RNA, 19 nt, Artificial Sequence
  Description of Artificial Sequence: Synthetic oligonucleotide
  Sense strand starting at position 3097 of SEQ ID NO: 2663
auauauaauuguucggagu

SEQ ID NO: 206699 - RNA, 19 nt, Artificial Sequence
  Description of Artificial Sequence: Synthetic oligonucleotide
  Antisense strand to SEQ ID NO: 206698
acuccgaacaauuauauau

SEQ ID NO: 206700 - RNA, 19 nt, Artificial Sequence
  Description of Artificial Sequence: Synthetic oligonucleotide
  Sense strand starting at position 3105 of SEQ ID NO: 2663
uuguucggaguuuauauau

SEQ ID NO: 206701 - RNA, 19 nt, Artificial Sequence
  Description of Artificial Sequence: Synthetic oligonucleotide
  Antisense strand to SEQ ID NO: 206700
auauauaaacuccgaacaa

SEQ ID NO: 206702 - RNA, 19 nt, Artificial Sequence
  Description of Artificial Sequence: Synthetic oligonucleotide
  Sense strand starting at position 3153 of SEQ ID NO: 2663
uggucuacauaugcaaaua

SEQ ID NO: 206703 - RNA, 19 nt, Artificial Sequence
  Description of Artificial Sequence: Synthetic oligonucleotide
  Antisense strand to SEQ ID NO: 206702
uauuugcauauguagacca

SEQ ID NO: 206704 - RNA, 19 nt, Artificial Sequence
  Description of Artificial Sequence: Synthetic oligonucleotide
  Sense strand starting at position 3173 of SEQ ID NO: 2663
uaacaaauggcuuggagua

SEQ ID NO: 206705 - RNA, 19 nt, Artificial Sequence
  Description of Artificial Sequence: Synthetic oligonucleotide
  Antisense strand to SEQ ID NO: 206704
uacuccaagccauuuguua

SEQ ID NO: 206706 - RNA, 19 nt, Artificial Sequence
  Description of Artificial Sequence: Synthetic oligonucleotide
  Sense strand starting at position 3232 of SEQ ID NO: 2663
auguauagacuuggugacu

SEQ ID NO: 206707 - RNA, 19 nt, Artificial Sequence
  Description of Artificial Sequence: Synthetic oligonucleotide
  Antisense strand to SEQ ID NO: 206706
agucaccaagucuauacau

SEQ ID NO: 206708 - RNA, 19 nt, Artificial Sequence
  Description of Artificial Sequence: Synthetic oligonucleotide
  Sense strand starting at position 3233 of SEQ ID NO: 2663
uguauagacuuggugacuu

SEQ ID NO: 206709 - RNA, 19 nt, Artificial Sequence
  Description of Artificial Sequence: Synthetic oligonucleotide
  Antisense strand to SEQ ID NO: 206708
aagucaccaagucuauaca

SEQ ID NO: 206710 - RNA, 19 nt, Artificial Sequence
  Description of Artificial Sequence: Synthetic oligonucleotide
  Sense strand starting at position 3237 of SEQ ID NO: 2663
uagacuuggugacuuagua

SEQ ID NO: 206711 - RNA, 19 nt, Artificial Sequence
  Description of Artificial Sequence: Synthetic oligonucleotide
  Antisense strand to SEQ ID NO: 206710
uacuaagucaccaagucua

SEQ ID NO: 206712 - RNA, 19 nt, Artificial Sequence
  Description of Artificial Sequence: Synthetic oligonucleotide
  Sense strand starting at position 3377 of SEQ ID NO: 2663
acaaguagagguuaguuau

SEQ ID NO: 206713 - RNA, 19 nt, Artificial Sequence
  Description of Artificial Sequence: Synthetic oligonucleotide
  Antisense strand to SEQ ID NO: 206712
auaacuaaccucuacuugu

SEQ ID NO: 206714 - RNA, 19 nt, Artificial Sequence
  Description of Artificial Sequence: Synthetic oligonucleotide
  Sense strand starting at position 3380 of SEQ ID NO: 2663
aguagagguuaguuauaca

SEQ ID NO: 206715 - RNA, 19 nt, Artificial Sequence
  Description of Artificial Sequence: Synthetic oligonucleotide
  Antisense strand to SEQ ID NO: 206714
uguauaacuaaccucuacu

SEQ ID NO: 206716 - RNA, 19 nt, Artificial Sequence
  Description of Artificial Sequence: Synthetic oligonucleotide
  Sense strand starting at position 3542 of SEQ ID NO: 2663
uuugauuuguggucuuguu

SEQ ID NO: 206717 - RNA, 19 nt, Artificial Sequence
  Description of Artificial Sequence: Synthetic oligonucleotide
  Antisense strand to SEQ ID NO: 206716
aacaagaccacaaaucaaa

SEQ ID NO: 206718 - RNA, 19 nt, Artificial Sequence
  Description of Artificial Sequence: Synthetic oligonucleotide
  Sense strand starting at position 3562 of SEQ ID NO: 2663
uuagcuugaccuuauaaug

SEQ ID NO: 206719 - RNA, 19 nt, Artificial Sequence
  Description of Artificial Sequence: Synthetic oligonucleotide
  Antisense strand to SEQ ID NO: 206718
cauuauaaggucaagcuaa

SEQ ID NO: 206720 - RNA, 19 nt, Artificial Sequence
  Description of Artificial Sequence: Synthetic oligonucleotide
  Sense strand starting at position 3921 of SEQ ID NO: 2663
gagaguggagaauguguuu

SEQ ID NO: 206721 - RNA, 19 nt, Artificial Sequence
  Description of Artificial Sequence: Synthetic oligonucleotide
  Antisense strand to SEQ ID NO: 206720
aaacacauucuccacucuc

SEQ ID NO: 206722 - RNA, 19 nt, Artificial Sequence
  Description of Artificial Sequence: Synthetic oligonucleotide
  Sense strand starting at position 3977 of SEQ ID NO: 2663
guugucucaguaucgcuaa

SEQ ID NO: 206723 - RNA, 19 nt, Artificial Sequence
  Description of Artificial Sequence: Synthetic oligonucleotide
  Antisense strand to SEQ ID NO: 206722
uuagcgauacugagacaac

SEQ ID NO: 206724 - RNA, 19 nt, Artificial Sequence
  Description of Artificial Sequence: Synthetic oligonucleotide
  Sense strand starting at position 97 of SEQ ID NO: 2664
ggcucagcugcucaaacua

SEQ ID NO: 206725 - RNA, 19 nt, Artificial Sequence
  Description of Artificial Sequence: Synthetic oligonucleotide
  Antisense strand to SEQ ID NO: 206724
uaguuugagcagcugagcc

SEQ ID NO: 206726 - RNA, 19 nt, Artificial Sequence
  Description of Artificial Sequence: Synthetic oligonucleotide
  Sense strand starting at position 331 of SEQ ID NO: 2664
gggaaauguccaggaguca

SEQ ID NO: 206727 - RNA, 19 nt, Artificial Sequence
  Description of Artificial Sequence: Synthetic oligonucleotide
  Antisense strand to SEQ ID NO: 206726
ugacuccuggacauuuccc

SEQ ID NO: 206728 - RNA, 19 nt, Artificial Sequence
  Description of Artificial Sequence: Synthetic oligonucleotide
  Sense strand starting at position 481 of SEQ ID NO: 2664
ugaacuaaaccuuaugugu

SEQ ID NO: 206729 - RNA, 19 nt, Artificial Sequence
  Description of Artificial Sequence: Synthetic oligonucleotide
  Antisense strand to SEQ ID NO: 206728
acacauaagguuuaguuca

SEQ ID NO: 206730 - RNA, 19 nt, Artificial Sequence
  Description of Artificial Sequence: Synthetic oligonucleotide
  Sense strand starting at position 484 of SEQ ID NO: 2664
acuaaaccuuauguguuua

SEQ ID NO: 206731 - RNA, 19 nt, Artificial Sequence
  Description of Artificial Sequence: Synthetic oligonucleotide
  Antisense strand to SEQ ID NO: 206730
uaaacacauaagguuuagu

SEQ ID NO: 206732 - RNA, 19 nt, Artificial Sequence
  Description of Artificial Sequence: Synthetic oligonucleotide
  Sense strand starting at position 489 of SEQ ID NO: 2664
accuuauguguuuacacca

SEQ ID NO: 206733 - RNA, 19 nt, Artificial Sequence
  Description of Artificial Sequence: Synthetic oligonucleotide
  Antisense strand to SEQ ID NO: 206732
ugguguaaacacauaaggu

SEQ ID NO: 206734 - RNA, 19 nt, Artificial Sequence
  Description of Artificial Sequence: Synthetic oligonucleotide
  Sense strand starting at position 494 of SEQ ID NO: 2664
auguguuuacaccacacua

SEQ ID NO: 206735 - RNA, 19 nt, Artificial Sequence
  Description of Artificial Sequence: Synthetic oligonucleotide
  Antisense strand to SEQ ID NO: 206734
uagugugguguaaacacau

SEQ ID NO: 206736 - RNA, 19 nt, Artificial Sequence
  Description of Artificial Sequence: Synthetic oligonucleotide
  Sense strand starting at position 634 of SEQ ID NO: 2664
cuggcuuggcuucgggaaa

SEQ ID NO: 206737 - RNA, 19 nt, Artificial Sequence
  Description of Artificial Sequence: Synthetic oligonucleotide
  Antisense strand to SEQ ID NO: 206736
uuucccgaagccaagccag

SEQ ID NO: 206738 - RNA, 19 nt, Artificial Sequence
  Description of Artificial Sequence: Synthetic oligonucleotide
  Sense strand starting at position 653 of SEQ ID NO: 2664
cuaccaugaccugguaaau

SEQ ID NO: 206739 - RNA, 19 nt, Artificial Sequence
  Description of Artificial Sequence: Synthetic oligonucleotide
  Antisense strand to SEQ ID NO: 206738
auuuaccaggucaugguag

SEQ ID NO: 206740 - RNA, 19 nt, Artificial Sequence
  Description of Artificial Sequence: Synthetic oligonucleotide
  Sense strand starting at position 666 of SEQ ID NO: 2664
guaaaucagcuuugucuga

SEQ ID NO: 206741 - RNA, 19 nt, Artificial Sequence
  Description of Artificial Sequence: Synthetic oligonucleotide
  Antisense strand to SEQ ID NO: 206740
ucagacaaagcugauuuac

SEQ ID NO: 206742 - RNA, 19 nt, Artificial Sequence
  Description of Artificial Sequence: Synthetic oligonucleotide
  Sense strand starting at position 668 of SEQ ID NO: 2664
aaaucagcuuugucugaug

SEQ ID NO: 206743 - RNA, 19 nt, Artificial Sequence
  Description of Artificial Sequence: Synthetic oligonucleotide
  Antisense strand to SEQ ID NO: 206742
caucagacaaagcugauuu

SEQ ID NO: 206744 - RNA, 19 nt, Artificial Sequence
  Description of Artificial Sequence: Synthetic oligonucleotide
  Sense strand starting at position 727 of SEQ ID NO: 2664
agaggucgcauccacaaau

SEQ ID NO: 206745 - RNA, 19 nt, Artificial Sequence
  Description of Artificial Sequence: Synthetic oligonucleotide
  Antisense strand to SEQ ID NO: 206744
auuuguggaugcgaccucu

SEQ ID NO: 206746 - RNA, 19 nt, Artificial Sequence
  Description of Artificial Sequence: Synthetic oligonucleotide
  Sense strand starting at position 738 of SEQ ID NO: 2664
ccacaaaugggcuagguua

SEQ ID NO: 206747 - RNA, 19 nt, Artificial Sequence
  Description of Artificial Sequence: Synthetic oligonucleotide
  Antisense strand to SEQ ID NO: 206746
uaaccuagcccauuugugg

SEQ ID NO: 206748 - RNA, 19 nt, Artificial Sequence
  Description of Artificial Sequence: Synthetic oligonucleotide
  Sense strand starting at position 740 of SEQ ID NO: 2664
acaaaugggcuagguuaaa

SEQ ID NO: 206749 - RNA, 19 nt, Artificial Sequence
  Description of Artificial Sequence: Synthetic oligonucleotide
  Antisense strand to SEQ ID NO: 206748
uuuaaccuagcccauuugu

SEQ ID NO: 206750 - RNA, 19 nt, Artificial Sequence
  Description of Artificial Sequence: Synthetic oligonucleotide
  Sense strand starting at position 790 of SEQ ID NO: 2664
ucaugcagccuccagaaau

SEQ ID NO: 206751 - RNA, 19 nt, Artificial Sequence
  Description of Artificial Sequence: Synthetic oligonucleotide
  Antisense strand to SEQ ID NO: 206750
auuucuggaggcugcauga

SEQ ID NO: 206752 - RNA, 19 nt, Artificial Sequence
  Description of Artificial Sequence: Synthetic oligonucleotide
  Sense strand starting at position 808 of SEQ ID NO: 2664
ugauuugaaugucacagca

SEQ ID NO: 206753 - RNA, 19 nt, Artificial Sequence
  Description of Artificial Sequence: Synthetic oligonucleotide
  Antisense strand to SEQ ID NO: 206752
ugcugugacauucaaauca

SEQ ID NO: 206754 - RNA, 19 nt, Artificial Sequence
  Description of Artificial Sequence: Synthetic oligonucleotide
  Sense strand starting at position 1044 of SEQ ID NO: 2664
cagauuugcugauacugua

SEQ ID NO: 206755 - RNA, 19 nt, Artificial Sequence
  Description of Artificial Sequence: Synthetic oligonucleotide
  Antisense strand to SEQ ID NO: 206754
uacaguaucagcaaaucug

SEQ ID NO: 206756 - RNA, 19 nt, Artificial Sequence
  Description of Artificial Sequence: Synthetic oligonucleotide
  Sense strand starting at position 1086 of SEQ ID NO: 2664
gccuguucucaguaccuau

SEQ ID NO: 206757 - RNA, 19 nt, Artificial Sequence
  Description of Artificial Sequence: Synthetic oligonucleotide
  Antisense strand to SEQ ID NO: 206756
auagguacugagaacaggc

SEQ ID NO: 206758 - RNA, 19 nt, Artificial Sequence
  Description of Artificial Sequence: Synthetic oligonucleotide
  Sense strand starting at position 1130 of SEQ ID NO: 2664
agccuuacacccugggaga

SEQ ID NO: 206759 - RNA, 19 nt, Artificial Sequence
  Description of Artificial Sequence: Synthetic oligonucleotide
  Antisense strand to SEQ ID NO: 206758
ucucccaggguguaaggcu

SEQ ID NO: 206760 - RNA, 19 nt, Artificial Sequence
  Description of Artificial Sequence: Synthetic oligonucleotide
  Sense strand starting at position 1211 of SEQ ID NO: 2664
gccagacuugcauguuaga

SEQ ID NO: 206761 - RNA, 19 nt, Artificial Sequence
  Description of Artificial Sequence: Synthetic oligonucleotide
  Antisense strand to SEQ ID NO: 206760
ucuaacaugcaagucuggc

SEQ ID NO: 206762 - RNA, 19 nt, Artificial Sequence
  Description of Artificial Sequence: Synthetic oligonucleotide
  Sense strand starting at position 1256 of SEQ ID NO: 2664
uaaagaaagguagguguaa

SEQ ID NO: 206763 - RNA, 19 nt, Artificial Sequence
  Description of Artificial Sequence: Synthetic oligonucleotide
  Antisense strand to SEQ ID NO: 206762
uuacaccuaccuuucuuua

SEQ ID NO: 206764 - RNA, 19 nt, Artificial Sequence
  Description of Artificial Sequence: Synthetic oligonucleotide
  Sense strand starting at position 1265 of SEQ ID NO: 2664
guagguguaaccuaguauu

SEQ ID NO: 206765 - RNA, 19 nt, Artificial Sequence
  Description of Artificial Sequence: Synthetic oligonucleotide
  Antisense strand to SEQ ID NO: 206764
aauacuagguuacaccuac

SEQ ID NO: 206766 - RNA, 19 nt, Artificial Sequence
  Description of Artificial Sequence: Synthetic oligonucleotide
  Sense strand starting at position 1268 of SEQ ID NO: 2664
gguguaaccuaguauuuga

SEQ ID NO: 206767 - RNA, 19 nt, Artificial Sequence
  Description of Artificial Sequence: Synthetic oligonucleotide
  Antisense strand to SEQ ID NO: 206766
ucaaauacuagguuacacc

SEQ ID NO: 206768 - RNA, 19 nt, Artificial Sequence
  Description of Artificial Sequence: Synthetic oligonucleotide
  Sense strand starting at position 1281 of SEQ ID NO: 2664
auuugaaagugcuaaacag

SEQ ID NO: 206769 - RNA, 19 nt, Artificial Sequence
  Description of Artificial Sequence: Synthetic oligonucleotide
  Antisense strand to SEQ ID NO: 206768
cuguuuagcacuuucaaau

SEQ ID NO: 206770 - RNA, 19 nt, Artificial Sequence
  Description of Artificial Sequence: Synthetic oligonucleotide
  Sense strand starting at position 1324 of SEQ ID NO: 2664
ccaggaagcuuuccaagaa

SEQ ID NO: 206771 - RNA, 19 nt, Artificial Sequence
  Description of Artificial Sequence: Synthetic oligonucleotide
  Antisense strand to SEQ ID NO: 206770
uucuuggaaagcuuccugg

SEQ ID NO: 206772 - RNA, 19 nt, Artificial Sequence
  Description of Artificial Sequence: Synthetic oligonucleotide
  Sense strand starting at position 1597 of SEQ ID NO: 2664
ggcgucuccaagcacuaaa

SEQ ID NO: 206773 - RNA, 19 nt, Artificial Sequence
  Description of Artificial Sequence: Synthetic oligonucleotide
  Antisense strand to SEQ ID NO: 206772
uuuagugcuuggagacgcc

SEQ ID NO: 206774 - RNA, 19 nt, Artificial Sequence
  Description of Artificial Sequence: Synthetic oligonucleotide
  Sense strand starting at position 2745 of SEQ ID NO: 2664
cugggugugugauuuacau

SEQ ID NO: 206775 - RNA, 19 nt, Artificial Sequence
  Description of Artificial Sequence: Synthetic oligonucleotide
  Antisense strand to SEQ ID NO: 206774
auguaaaucacacacccag

SEQ ID NO: 206776 - RNA, 19 nt, Artificial Sequence
  Description of Artificial Sequence: Synthetic oligonucleotide
  Sense strand starting at position 2749 of SEQ ID NO: 2664
gugugugauuuacauuugu

SEQ ID NO: 206777 - RNA, 19 nt, Artificial Sequence
  Description of Artificial Sequence: Synthetic oligonucleotide
  Antisense strand to SEQ ID NO: 206776
acaaauguaaaucacacac

SEQ ID NO: 206778 - RNA, 19 nt, Artificial Sequence
  Description of Artificial Sequence: Synthetic oligonucleotide
  Sense strand starting at position 2854 of SEQ ID NO: 2664
guguaauccucccugugac

SEQ ID NO: 206779 - RNA, 19 nt, Artificial Sequence
  Description of Artificial Sequence: Synthetic oligonucleotide
  Antisense strand to SEQ ID NO: 206778
gucacagggaggauuacac

SEQ ID NO: 206780 - RNA, 19 nt, Artificial Sequence
  Description of Artificial Sequence: Synthetic oligonucleotide
  Sense strand starting at position 2855 of SEQ ID NO: 2664
uguaauccucccugugacu

SEQ ID NO: 206781 - RNA, 19 nt, Artificial Sequence
  Description of Artificial Sequence: Synthetic oligonucleotide
  Antisense strand to SEQ ID NO: 206780
agucacagggaggauuaca

SEQ ID NO: 206782 - RNA, 19 nt, Artificial Sequence
  Description of Artificial Sequence: Synthetic oligonucleotide
  Sense strand starting at position 3044 of SEQ ID NO: 2664
gcagcaguccuggugucau

SEQ ID NO: 206783 - RNA, 19 nt, Artificial Sequence
  Description of Artificial Sequence: Synthetic oligonucleotide
  Antisense strand to SEQ ID NO: 206782
augacaccaggacugcugc

SEQ ID NO: 206784 - RNA, 19 nt, Artificial Sequence
  Description of Artificial Sequence: Synthetic oligonucleotide
  Sense strand starting at position 3142 of SEQ ID NO: 2664
ucgcacuucgguucuguaa

SEQ ID NO: 206785 - RNA, 19 nt, Artificial Sequence
  Description of Artificial Sequence: Synthetic oligonucleotide
  Antisense strand to SEQ ID NO: 206784
uuacagaaccgaagugcga

SEQ ID NO: 206786 - RNA, 19 nt, Artificial Sequence
  Description of Artificial Sequence: Synthetic oligonucleotide
  Sense strand starting at position 3143 of SEQ ID NO: 2664
cgcacuucgguucuguaaa

SEQ ID NO: 206787 - RNA, 19 nt, Artificial Sequence
  Description of Artificial Sequence: Synthetic oligonucleotide
  Antisense strand to SEQ ID NO: 206786
uuuacagaaccgaagugcg

SEQ ID NO: 206788 - RNA, 19 nt, Artificial Sequence
  Description of Artificial Sequence: Synthetic oligonucleotide
  Sense strand starting at position 3240 of SEQ ID NO: 2664
ggcaaaugccaaugaaaug

SEQ ID NO: 206789 - RNA, 19 nt, Artificial Sequence
  Description of Artificial Sequence: Synthetic oligonucleotide
  Antisense strand to SEQ ID NO: 206788
cauuucauuggcauuugcc

SEQ ID NO: 206790 - RNA, 19 nt, Artificial Sequence
  Description of Artificial Sequence: Synthetic oligonucleotide
  Sense strand starting at position 3316 of SEQ ID NO: 2664
gaaagagagcuguaggcaa

SEQ ID NO: 206791 - RNA, 19 nt, Artificial Sequence
  Description of Artificial Sequence: Synthetic oligonucleotide
  Antisense strand to SEQ ID NO: 206790
uugccuacagcucucuuuc

SEQ ID NO: 206792 - RNA, 19 nt, Artificial Sequence
  Description of Artificial Sequence: Synthetic oligonucleotide
  Sense strand starting at position 3388 of SEQ ID NO: 2664
ugcagucaugucuguauuu

SEQ ID NO: 206793 - RNA, 19 nt, Artificial Sequence
  Description of Artificial Sequence: Synthetic oligonucleotide
  Antisense strand to SEQ ID NO: 206792
aaauacagacaugacugca

SEQ ID NO: 206794 - RNA, 19 nt, Artificial Sequence
  Description of Artificial Sequence: Synthetic oligonucleotide
  Sense strand starting at position 3576 of SEQ ID NO: 2664
ugucucgucugauugggau

SEQ ID NO: 206795 - RNA, 19 nt, Artificial Sequence
  Description of Artificial Sequence: Synthetic oligonucleotide
  Antisense strand to SEQ ID NO: 206794
aucccaaucagacgagaca

SEQ ID NO: 206796 - RNA, 19 nt, Artificial Sequence
  Description of Artificial Sequence: Synthetic oligonucleotide
  Sense strand starting at position 3596 of SEQ ID NO: 2664
cugugccauccauaucaua

SEQ ID NO: 206797 - RNA, 19 nt, Artificial Sequence
  Description of Artificial Sequence: Synthetic oligonucleotide
  Antisense strand to SEQ ID NO: 206796
uaugauauggauggcacag

SEQ ID NO: 206798 - RNA, 19 nt, Artificial Sequence
  Description of Artificial Sequence: Synthetic oligonucleotide
  Sense strand starting at position 3724 of SEQ ID NO: 2664
aguggguucuggcugggaa

SEQ ID NO: 206799 - RNA, 19 nt, Artificial Sequence
  Description of Artificial Sequence: Synthetic oligonucleotide
  Antisense strand to SEQ ID NO: 206798
uucccagccagaacccacu

SEQ ID NO: 206800 - RNA, 19 nt, Artificial Sequence
  Description of Artificial Sequence: Synthetic oligonucleotide
  Sense strand starting at position 3725 of SEQ ID NO: 2664
guggguucuggcugggaac

SEQ ID NO: 206801 - RNA, 19 nt, Artificial Sequence
  Description of Artificial Sequence: Synthetic oligonucleotide
  Antisense strand to SEQ ID NO: 206800
guucccagccagaacccac

SEQ ID NO: 206802 - RNA, 19 nt, Artificial Sequence
  Description of Artificial Sequence: Synthetic oligonucleotide
  Sense strand starting at position 3887 of SEQ ID NO: 2664
augcuuauagucugaccua

SEQ ID NO: 206803 - RNA, 19 nt, Artificial Sequence
  Description of Artificial Sequence: Synthetic oligonucleotide
  Antisense strand to SEQ ID NO: 206802
uaggucagacuauaagcau

SEQ ID NO: 206804 - RNA, 19 nt, Artificial Sequence
  Description of Artificial Sequence: Synthetic oligonucleotide
  Sense strand starting at position 439 of SEQ ID NO: 2665
cggucagcaggugaagauu

SEQ ID NO: 206805 - RNA, 19 nt, Artificial Sequence
  Description of Artificial Sequence: Synthetic oligonucleotide
  Antisense strand to SEQ ID NO: 206804
aaucuucaccugcugaccg

SEQ ID NO: 206806 - RNA, 19 nt, Artificial Sequence
  Description of Artificial Sequence: Synthetic oligonucleotide
  Sense strand starting at position 450 of SEQ ID NO: 2665
ugaagauuguggccuugaa

SEQ ID NO: 206807 - RNA, 19 nt, Artificial Sequence
  Description of Artificial Sequence: Synthetic oligonucleotide
  Antisense strand to SEQ ID NO: 206806
uucaaggccacaaucuuca

SEQ ID NO: 206808 - RNA, 19 nt, Artificial Sequence
  Description of Artificial Sequence: Synthetic oligonucleotide
  Sense strand starting at position 1201 of SEQ ID NO: 2665
aggagauuuggcugcuccu

SEQ ID NO: 206809 - RNA, 19 nt, Artificial Sequence
  Description of Artificial Sequence: Synthetic oligonucleotide
  Antisense strand to SEQ ID NO: 206808
aggagcagccaaaucuccu

SEQ ID NO: 206810 - RNA, 19 nt, Artificial Sequence
  Description of Artificial Sequence: Synthetic oligonucleotide
  Sense strand starting at position 1271 of SEQ ID NO: 2665
ggagcacuucuccauccuu

SEQ ID NO: 206811 - RNA, 19 nt, Artificial Sequence
  Description of Artificial Sequence: Synthetic oligonucleotide
  Antisense strand to SEQ ID NO: 206810
aaggauggagaagugcucc

SEQ ID NO: 206812 - RNA, 19 nt, Artificial Sequence
  Description of Artificial Sequence: Synthetic oligonucleotide
  Sense strand starting at position 1276 of SEQ ID NO: 2665
acuucuccauccuuggaga

SEQ ID NO: 206813 - RNA, 19 nt, Artificial Sequence
  Description of Artificial Sequence: Synthetic oligonucleotide
  Antisense strand to SEQ ID NO: 206812
ucuccaaggauggagaagu

SEQ ID NO: 206814 - RNA, 19 nt, Artificial Sequence
  Description of Artificial Sequence: Synthetic oligonucleotide
  Sense strand starting at position 1277 of SEQ ID NO: 2665
cuucuccauccuuggagau

SEQ ID NO: 206815 - RNA, 19 nt, Artificial Sequence
  Description of Artificial Sequence: Synthetic oligonucleotide
  Antisense strand to SEQ ID NO: 206814
aucuccaaggauggagaag

SEQ ID NO: 206816 - RNA, 19 nt, Artificial Sequence
  Description of Artificial Sequence: Synthetic oligonucleotide
  Sense strand starting at position 1310 of SEQ ID NO: 2665
ggcugaucuccucaaagca

SEQ ID NO: 206817 - RNA, 19 nt, Artificial Sequence
  Description of Artificial Sequence: Synthetic oligonucleotide
  Antisense strand to SEQ ID NO: 206816
ugcuuugaggagaucagcc

SEQ ID NO: 206818 - RNA, 19 nt, Artificial Sequence
  Description of Artificial Sequence: Synthetic oligonucleotide
  Sense strand starting at position 1573 of SEQ ID NO: 2665
gaaguaucuuggguacuac

SEQ ID NO: 206819 - RNA, 19 nt, Artificial Sequence
  Description of Artificial Sequence: Synthetic oligonucleotide
  Antisense strand to SEQ ID NO: 206818
guaguacccaagauacuuc

SEQ ID NO: 206820 - RNA, 19 nt, Artificial Sequence
  Description of Artificial Sequence: Synthetic oligonucleotide
  Sense strand starting at position 1624 of SEQ ID NO: 2665
ccuugugauccaugggaac

SEQ ID NO: 206821 - RNA, 19 nt, Artificial Sequence
  Description of Artificial Sequence: Synthetic oligonucleotide
  Antisense strand to SEQ ID NO: 206820
guucccauggaucacaagg

SEQ ID NO: 206822 - RNA, 19 nt, Artificial Sequence
  Description of Artificial Sequence: Synthetic oligonucleotide
  Sense strand starting at position 1646 of SEQ ID NO: 2665
gugucuugaacggaauauc

SEQ ID NO: 206823 - RNA, 19 nt, Artificial Sequence
  Description of Artificial Sequence: Synthetic oligonucleotide
  Antisense strand to SEQ ID NO: 206822
gauauuccguucaagacac

SEQ ID NO: 206824 - RNA, 19 nt, Artificial Sequence
  Description of Artificial Sequence: Synthetic oligonucleotide
  Sense strand starting at position 1655 of SEQ ID NO: 2665
acggaauauccuuagccau

SEQ ID NO: 206825 - RNA, 19 nt, Artificial Sequence
  Description of Artificial Sequence: Synthetic oligonucleotide
  Antisense strand to SEQ ID NO: 206824
auggcuaaggauauuccgu

SEQ ID NO: 206826 - RNA, 19 nt, Artificial Sequence
  Description of Artificial Sequence: Synthetic oligonucleotide
  Sense strand starting at position 1670 of SEQ ID NO: 2665
ccauguggcuuugugauuu

SEQ ID NO: 206827 - RNA, 19 nt, Artificial Sequence
  Description of Artificial Sequence: Synthetic oligonucleotide
  Antisense strand to SEQ ID NO: 206826
aaaucacaaagccacaugg

SEQ ID NO: 206828 - RNA, 19 nt, Artificial Sequence
  Description of Artificial Sequence: Synthetic oligonucleotide
  Sense strand starting at position 1682 of SEQ ID NO: 2665
gugauuuguucagcuggga

SEQ ID NO: 206829 - RNA, 19 nt, Artificial Sequence
  Description of Artificial Sequence: Synthetic oligonucleotide
  Antisense strand to SEQ ID NO: 206828
ucccagcugaacaaaucac

SEQ ID NO: 206830 - RNA, 19 nt, Artificial Sequence
  Description of Artificial Sequence: Synthetic oligonucleotide
  Sense strand starting at position 1719 of SEQ ID NO: 2665
ugggaucaguccuuccaua

SEQ ID NO: 206831 - RNA, 19 nt, Artificial Sequence
  Description of Artificial Sequence: Synthetic oligonucleotide
  Antisense strand to SEQ ID NO: 206830
uauggaaggacugauccca

SEQ ID NO: 206832 - RNA, 19 nt, Artificial Sequence
  Description of Artificial Sequence: Synthetic oligonucleotide
  Sense strand starting at position 1843 of SEQ ID NO: 2665
gcgucauagcagguggagu

SEQ ID NO: 206833 - RNA, 19 nt, Artificial Sequence
  Description of Artificial Sequence: Synthetic oligonucleotide
  Antisense strand to SEQ ID NO: 206832
acuccaccugcuaugacgc

SEQ ID NO: 206834 - RNA, 19 nt, Artificial Sequence
  Description of Artificial Sequence: Synthetic oligonucleotide
  Sense strand starting at position 2105 of SEQ ID NO: 2665
aggccagaauucuuugaag

SEQ ID NO: 206835 - RNA, 19 nt, Artificial Sequence
  Description of Artificial Sequence: Synthetic oligonucleotide
  Antisense strand to SEQ ID NO: 206834
cuucaaagaauucuggccu

SEQ ID NO: 206836 - RNA, 19 nt, Artificial Sequence
  Description of Artificial Sequence: Synthetic oligonucleotide
  Sense strand starting at position 2117 of SEQ ID NO: 2665
uuugaaguccaugguacaa

SEQ ID NO: 206837 - RNA, 19 nt, Artificial Sequence
  Description of Artificial Sequence: Synthetic oligonucleotide
  Antisense strand to SEQ ID NO: 206836
uuguaccauggacuucaaa

SEQ ID NO: 206838 - RNA, 19 nt, Artificial Sequence
  Description of Artificial Sequence: Synthetic oligonucleotide
  Sense strand starting at position 2203 of SEQ ID NO: 2665
cguccuguuguuguucuaa

SEQ ID NO: 206839 - RNA, 19 nt, Artificial Sequence
  Description of Artificial Sequence: Synthetic oligonucleotide
  Antisense strand to SEQ ID NO: 206838
uuagaacaacaacaggacg

SEQ ID NO: 206840 - RNA, 19 nt, Artificial Sequence
  Description of Artificial Sequence: Synthetic oligonucleotide
  Sense strand starting at position 2340 of SEQ ID NO: 2665
agccuauuagguuaaucau

SEQ ID NO: 206841 - RNA, 19 nt, Artificial Sequence
  Description of Artificial Sequence: Synthetic oligonucleotide
  Antisense strand to SEQ ID NO: 206840
augauuaaccuaauaggcu

SEQ ID NO: 206842 - RNA, 19 nt, Artificial Sequence
  Description of Artificial Sequence: Synthetic oligonucleotide
  Sense strand starting at position 2467 of SEQ ID NO: 2665
agacgccugccauaugaaa

SEQ ID NO: 206843 - RNA, 19 nt, Artificial Sequence
  Description of Artificial Sequence: Synthetic oligonucleotide
  Antisense strand to SEQ ID NO: 206842
uuucauauggcaggcgucu

SEQ ID NO: 206844 - RNA, 19 nt, Artificial Sequence
  Description of Artificial Sequence: Synthetic oligonucleotide
  Sense strand starting at position 2506 of SEQ ID NO: 2665
uugcaaaggcucuggaaga

SEQ ID NO: 206845 - RNA, 19 nt, Artificial Sequence
  Description of Artificial Sequence: Synthetic oligonucleotide
  Antisense strand to SEQ ID NO: 206844
ucuuccagagccuuugcaa

SEQ ID NO: 206846 - RNA, 19 nt, Artificial Sequence
  Description of Artificial Sequence: Synthetic oligonucleotide
  Sense strand starting at position 2576 of SEQ ID NO: 2665
agaagugaccuucacgguu

SEQ ID NO: 206847 - RNA, 19 nt, Artificial Sequence
  Description of Artificial Sequence: Synthetic oligonucleotide
  Antisense strand to SEQ ID NO: 206846
aaccgugaaggucacuucu

SEQ ID NO: 206848 - RNA, 19 nt, Artificial Sequence
  Description of Artificial Sequence: Synthetic oligonucleotide
  Sense strand starting at position 2673 of SEQ ID NO: 2665
gaaguaaugcauuauuguu

SEQ ID NO: 206849 - RNA, 19 nt, Artificial Sequence
  Description of Artificial Sequence: Synthetic oligonucleotide
  Antisense strand to SEQ ID NO: 206848
aacaauaaugcauuacuuc

SEQ ID NO: 206850 - RNA, 19 nt, Artificial Sequence
  Description of Artificial Sequence: Synthetic oligonucleotide
  Sense strand starting at position 3126 of SEQ ID NO: 2665
ccuagaaagacuggaguuu

SEQ ID NO: 206851 - RNA, 19 nt, Artificial Sequence
  Description of Artificial Sequence: Synthetic oligonucleotide
  Antisense strand to SEQ ID NO: 206850
aaacuccagucuuucuagg

SEQ ID NO: 206852 - RNA, 19 nt, Artificial Sequence
  Description of Artificial Sequence: Synthetic oligonucleotide
  Sense strand starting at position 3163 of SEQ ID NO: 2665
cuguuaguugaggaaacuu

SEQ ID NO: 206853 - RNA, 19 nt, Artificial Sequence
  Description of Artificial Sequence: Synthetic oligonucleotide
  Antisense strand to SEQ ID NO: 206852
aaguuuccucaacuaacag

SEQ ID NO: 206854 - RNA, 19 nt, Artificial Sequence
  Description of Artificial Sequence: Synthetic oligonucleotide
  Sense strand starting at position 3209 of SEQ ID NO: 2665
agagcucaucuuugaaaug

SEQ ID NO: 206855 - RNA, 19 nt, Artificial Sequence
  Description of Artificial Sequence: Synthetic oligonucleotide
  Antisense strand to SEQ ID NO: 206854
cauuucaaagaugagcucu

SEQ ID NO: 206856 - RNA, 19 nt, Artificial Sequence
  Description of Artificial Sequence: Synthetic oligonucleotide
  Sense strand starting at position 3255 of SEQ ID NO: 2665
cauugugaggauugucaau

SEQ ID NO: 206857 - RNA, 19 nt, Artificial Sequence
  Description of Artificial Sequence: Synthetic oligonucleotide
  Antisense strand to SEQ ID NO: 206856
auugacaauccucacaaug

SEQ ID NO: 206858 - RNA, 19 nt, Artificial Sequence
  Description of Artificial Sequence: Synthetic oligonucleotide
  Sense strand starting at position 3257 of SEQ ID NO: 2665
uugugaggauugucaauua

SEQ ID NO: 206859 - RNA, 19 nt, Artificial Sequence
  Description of Artificial Sequence: Synthetic oligonucleotide
  Antisense strand to SEQ ID NO: 206858
uaauugacaauccucacaa

SEQ ID NO: 206860 - RNA, 19 nt, Artificial Sequence
  Description of Artificial Sequence: Synthetic oligonucleotide
  Sense strand starting at position 3268 of SEQ ID NO: 2665
gucaauuaauacuugguaa

SEQ ID NO: 206861 - RNA, 19 nt, Artificial Sequence
  Description of Artificial Sequence: Synthetic oligonucleotide
  Antisense strand to SEQ ID NO: 206860
uuaccaaguauuaauugac

SEQ ID NO: 206862 - RNA, 19 nt, Artificial Sequence
  Description of Artificial Sequence: Synthetic oligonucleotide
  Sense strand starting at position 3271 of SEQ ID NO: 2665
aauuaauacuugguaagug

SEQ ID NO: 206863 - RNA, 19 nt, Artificial Sequence
  Description of Artificial Sequence: Synthetic oligonucleotide
  Antisense strand to SEQ ID NO: 206862
cacuuaccaaguauuaauu

SEQ ID NO: 206864 - RNA, 19 nt, Artificial Sequence
  Description of Artificial Sequence: Synthetic oligonucleotide
  Sense strand starting at position 3281 of SEQ ID NO: 2665
ugguaagugcuugacccaa

SEQ ID NO: 206865 - RNA, 19 nt, Artificial Sequence
  Description of Artificial Sequence: Synthetic oligonucleotide
  Antisense strand to SEQ ID NO: 206864
uugggucaagcacuuacca

SEQ ID NO: 206866 - RNA, 19 nt, Artificial Sequence
  Description of Artificial Sequence: Synthetic oligonucleotide
  Sense strand starting at position 3339 of SEQ ID NO: 2665
ugacucaacgccuauaaau

SEQ ID NO: 206867 - RNA, 19 nt, Artificial Sequence
  Description of Artificial Sequence: Synthetic oligonucleotide
  Antisense strand to SEQ ID NO: 206866
auuuauaggcguugaguca

SEQ ID NO: 206868 - RNA, 19 nt, Artificial Sequence
  Description of Artificial Sequence: Synthetic oligonucleotide
  Sense strand starting at position 3708 of SEQ ID NO: 2665
ugguuuauuccugaauggu

SEQ ID NO: 206869 - RNA, 19 nt, Artificial Sequence
  Description of Artificial Sequence: Synthetic oligonucleotide
  Antisense strand to SEQ ID NO: 206868
accauucaggaauaaacca

SEQ ID NO: 206870 - RNA, 19 nt, Artificial Sequence
  Description of Artificial Sequence: Synthetic oligonucleotide
  Sense strand starting at position 3714 of SEQ ID NO: 2665
auuccugaauggucuggaa

SEQ ID NO: 206871 - RNA, 19 nt, Artificial Sequence
  Description of Artificial Sequence: Synthetic oligonucleotide
  Antisense strand to SEQ ID NO: 206870
uuccagaccauucaggaau

SEQ ID NO: 206872 - RNA, 19 nt, Artificial Sequence
  Description of Artificial Sequence: Synthetic oligonucleotide
  Sense strand starting at position 3716 of SEQ ID NO: 2665
uccugaauggucuggaaau

SEQ ID NO: 206873 - RNA, 19 nt, Artificial Sequence
  Description of Artificial Sequence: Synthetic oligonucleotide
  Antisense strand to SEQ ID NO: 206872
auuuccagaccauucagga

SEQ ID NO: 206874 - RNA, 19 nt, Artificial Sequence
  Description of Artificial Sequence: Synthetic oligonucleotide
  Sense strand starting at position 3728 of SEQ ID NO: 2665
uggaaauaauugccuauga

SEQ ID NO: 206875 - RNA, 19 nt, Artificial Sequence
  Description of Artificial Sequence: Synthetic oligonucleotide
  Antisense strand to SEQ ID NO: 206874
ucauaggcaauuauuucca

SEQ ID NO: 206876 - RNA, 19 nt, Artificial Sequence
  Description of Artificial Sequence: Synthetic oligonucleotide
  Sense strand starting at position 3729 of SEQ ID NO: 2665
ggaaauaauugccuaugau

SEQ ID NO: 206877 - RNA, 19 nt, Artificial Sequence
  Description of Artificial Sequence: Synthetic oligonucleotide
  Antisense strand to SEQ ID NO: 206876
aucauaggcaauuauuucc

SEQ ID NO: 206878 - RNA, 19 nt, Artificial Sequence
  Description of Artificial Sequence: Synthetic oligonucleotide
  Sense strand starting at position 3834 of SEQ ID NO: 2665
aggccucauuguuuaauuu

SEQ ID NO: 206879 - RNA, 19 nt, Artificial Sequence
  Description of Artificial Sequence: Synthetic oligonucleotide
  Antisense strand to SEQ ID NO: 206878
aaauuaaacaaugaggccu

SEQ ID NO: 206880 - RNA, 19 nt, Artificial Sequence
  Description of Artificial Sequence: Synthetic oligonucleotide
  Sense strand starting at position 3845 of SEQ ID NO: 2665
uuuaauuucucggcucuca

SEQ ID NO: 206881 - RNA, 19 nt, Artificial Sequence
  Description of Artificial Sequence: Synthetic oligonucleotide
  Antisense strand to SEQ ID NO: 206880
ugagagccgagaaauuaaa

SEQ ID NO: 206882 - RNA, 19 nt, Artificial Sequence
  Description of Artificial Sequence: Synthetic oligonucleotide
  Sense strand starting at position 3941 of SEQ ID NO: 2665
guugccaauuucgaaauuu

SEQ ID NO: 206883 - RNA, 19 nt, Artificial Sequence
  Description of Artificial Sequence: Synthetic oligonucleotide
  Antisense strand to SEQ ID NO: 206882
aaauuucgaaauuggcaac

SEQ ID NO: 206884 - RNA, 19 nt, Artificial Sequence
  Description of Artificial Sequence: Synthetic oligonucleotide
  Sense strand starting at position 68 of SEQ ID NO: 2666
acgccaauacuccaggaga

SEQ ID NO: 206885 - RNA, 19 nt, Artificial Sequence
  Description of Artificial Sequence: Synthetic oligonucleotide
  Antisense strand to SEQ ID NO: 206884
ucuccuggaguauuggcgu

SEQ ID NO: 206886 - RNA, 19 nt, Artificial Sequence
  Description of Artificial Sequence: Synthetic oligonucleotide
  Sense strand starting at position 70 of SEQ ID NO: 2666
gccaauacuccaggagaca

SEQ ID NO: 206887 - RNA, 19 nt, Artificial Sequence
  Description of Artificial Sequence: Synthetic oligonucleotide
  Antisense strand to SEQ ID NO: 206886
ugucuccuggaguauuggc

SEQ ID NO: 206888 - RNA, 19 nt, Artificial Sequence
  Description of Artificial Sequence: Synthetic oligonucleotide
  Sense strand starting at position 193 of SEQ ID NO: 2666
caaagaucucccggguuug

SEQ ID NO: 206889 - RNA, 19 nt, Artificial Sequence
  Description of Artificial Sequence: Synthetic oligonucleotide
  Antisense strand to SEQ ID NO: 206888
caaacccgggagaucuuug

SEQ ID NO: 206890 - RNA, 19 nt, Artificial Sequence
  Description of Artificial Sequence: Synthetic oligonucleotide
  Sense strand starting at position 508 of SEQ ID NO: 2666
agaugcagcuacucuuaau

SEQ ID NO: 206891 - RNA, 19 nt, Artificial Sequence
  Description of Artificial Sequence: Synthetic oligonucleotide
  Antisense strand to SEQ ID NO: 206890
auuaagaguagcugcaucu

SEQ ID NO: 206892 - RNA, 19 nt, Artificial Sequence
  Description of Artificial Sequence: Synthetic oligonucleotide
  Sense strand starting at position 541 of SEQ ID NO: 2666
ccuagaacauuggagaguu

SEQ ID NO: 206893 - RNA, 19 nt, Artificial Sequence
  Description of Artificial Sequence: Synthetic oligonucleotide
  Antisense strand to SEQ ID NO: 206892
aacucuccaauguucuagg

SEQ ID NO: 206894 - RNA, 19 nt, Artificial Sequence
  Description of Artificial Sequence: Synthetic oligonucleotide
  Sense strand starting at position 549 of SEQ ID NO: 2666
auuggagaguuccuguaaa

SEQ ID NO: 206895 - RNA, 19 nt, Artificial Sequence
  Description of Artificial Sequence: Synthetic oligonucleotide
  Antisense strand to SEQ ID NO: 206894
uuuacaggaacucuccaau

SEQ ID NO: 206896 - RNA, 19 nt, Artificial Sequence
  Description of Artificial Sequence: Synthetic oligonucleotide
  Sense strand starting at position 560 of SEQ ID NO: 2666
ccuguaaagccuuguguuc

SEQ ID NO: 206897 - RNA, 19 nt, Artificial Sequence
  Description of Artificial Sequence: Synthetic oligonucleotide
  Antisense strand to SEQ ID NO: 206896
gaacacaaggcuuuacagg

SEQ ID NO: 206898 - RNA, 19 nt, Artificial Sequence
  Description of Artificial Sequence: Synthetic oligonucleotide
  Sense strand starting at position 569 of SEQ ID NO: 2666
ccuuguguuccaggaggaa

SEQ ID NO: 206899 - RNA, 19 nt, Artificial Sequence
  Description of Artificial Sequence: Synthetic oligonucleotide
  Antisense strand to SEQ ID NO: 206898
uuccuccuggaacacaagg

SEQ ID NO: 206900 - RNA, 19 nt, Artificial Sequence
  Description of Artificial Sequence: Synthetic oligonucleotide
  Sense strand starting at position 895 of SEQ ID NO: 2666
ccuagagcucccgacgcau

SEQ ID NO: 206901 - RNA, 19 nt, Artificial Sequence
  Description of Artificial Sequence: Synthetic oligonucleotide
  Antisense strand to SEQ ID NO: 206900
augcgucgggagcucuagg

SEQ ID NO: 206902 - RNA, 19 nt, Artificial Sequence
  Description of Artificial Sequence: Synthetic oligonucleotide
  Sense strand starting at position 1070 of SEQ ID NO: 2666
ucggccuugcccgauucau

SEQ ID NO: 206903 - RNA, 19 nt, Artificial Sequence
  Description of Artificial Sequence: Synthetic oligonucleotide
  Antisense strand to SEQ ID NO: 206902
augaaucgggcaaggccga

SEQ ID NO: 206904 - RNA, 19 nt, Artificial Sequence
  Description of Artificial Sequence: Synthetic oligonucleotide
  Sense strand starting at position 1263 of SEQ ID NO: 2666
aguuuaccucggugcucaa

SEQ ID NO: 206905 - RNA, 19 nt, Artificial Sequence
  Description of Artificial Sequence: Synthetic oligonucleotide
  Antisense strand to SEQ ID NO: 206904
uugagcaccgagguaaacu

SEQ ID NO: 206906 - RNA, 19 nt, Artificial Sequence
  Description of Artificial Sequence: Synthetic oligonucleotide
  Sense strand starting at position 1266 of SEQ ID NO: 2666
uuaccucggugcucaauaa

SEQ ID NO: 206907 - RNA, 19 nt, Artificial Sequence
  Description of Artificial Sequence: Synthetic oligonucleotide
  Antisense strand to SEQ ID NO: 206906
uuauugagcaccgagguaa

SEQ ID NO: 206908 - RNA, 19 nt, Artificial Sequence
  Description of Artificial Sequence: Synthetic oligonucleotide
  Sense strand starting at position 1270 of SEQ ID NO: 2666
cucggugcucaauaaggga

SEQ ID NO: 206909 - RNA, 19 nt, Artificial Sequence
  Description of Artificial Sequence: Synthetic oligonucleotide
  Antisense strand to SEQ ID NO: 206908
ucccuuauugagcaccgag

SEQ ID NO: 206910 - RNA, 19 nt, Artificial Sequence
  Description of Artificial Sequence: Synthetic oligonucleotide
  Sense strand starting at position 2377 of SEQ ID NO: 2666
uagauaagaucguuuggag

SEQ ID NO: 206911 - RNA, 19 nt, Artificial Sequence
  Description of Artificial Sequence: Synthetic oligonucleotide
  Antisense strand to SEQ ID NO: 206910
cuccaaacgaucuuaucua

SEQ ID NO: 206912 - RNA, 19 nt, Artificial Sequence
  Description of Artificial Sequence: Synthetic oligonucleotide
  Sense strand starting at position 2402 of SEQ ID NO: 2666
agcagaguccugcacaguu

SEQ ID NO: 206913 - RNA, 19 nt, Artificial Sequence
  Description of Artificial Sequence: Synthetic oligonucleotide
  Antisense strand to SEQ ID NO: 206912
aacugugcaggacucugcu

SEQ ID NO: 206914 - RNA, 19 nt, Artificial Sequence
  Description of Artificial Sequence: Synthetic oligonucleotide
  Sense strand starting at position 2620 of SEQ ID NO: 2666
gguugaaacccagacuguu

SEQ ID NO: 206915 - RNA, 19 nt, Artificial Sequence
  Description of Artificial Sequence: Synthetic oligonucleotide
  Antisense strand to SEQ ID NO: 206914
aacagucuggguuucaacc

SEQ ID NO: 206916 - RNA, 19 nt, Artificial Sequence
  Description of Artificial Sequence: Synthetic oligonucleotide
  Sense strand starting at position 2628 of SEQ ID NO: 2666
cccagacuguuuccguaaa

SEQ ID NO: 206917 - RNA, 19 nt, Artificial Sequence
  Description of Artificial Sequence: Synthetic oligonucleotide
  Antisense strand to SEQ ID NO: 206916
uuuacggaaacagucuggg

SEQ ID NO: 206918 - RNA, 19 nt, Artificial Sequence
  Description of Artificial Sequence: Synthetic oligonucleotide
  Sense strand starting at position 2761 of SEQ ID NO: 2666
aggucagccuuguccaaua

SEQ ID NO: 206919 - RNA, 19 nt, Artificial Sequence
  Description of Artificial Sequence: Synthetic oligonucleotide
  Antisense strand to SEQ ID NO: 206918
uauuggacaaggcugaccu

SEQ ID NO: 206920 - RNA, 19 nt, Artificial Sequence
  Description of Artificial Sequence: Synthetic oligonucleotide
  Sense strand starting at position 2763 of SEQ ID NO: 2666
gucagccuuguccaauaga

SEQ ID NO: 206921 - RNA, 19 nt, Artificial Sequence
  Description of Artificial Sequence: Synthetic oligonucleotide
  Antisense strand to SEQ ID NO: 206920
ucuauuggacaaggcugac

SEQ ID NO: 206922 - RNA, 19 nt, Artificial Sequence
  Description of Artificial Sequence: Synthetic oligonucleotide
  Sense strand starting at position 2766 of SEQ ID NO: 2666
agccuuguccaauagaaca

SEQ ID NO: 206923 - RNA, 19 nt, Artificial Sequence
  Description of Artificial Sequence: Synthetic oligonucleotide
  Antisense strand to SEQ ID NO: 206922
uguucuauuggacaaggcu

SEQ ID NO: 206924 - RNA, 19 nt, Artificial Sequence
  Description of Artificial Sequence: Synthetic oligonucleotide
  Sense strand starting at position 2811 of SEQ ID NO: 2666
uugucugcaccauauguga

SEQ ID NO: 206925 - RNA, 19 nt, Artificial Sequence
  Description of Artificial Sequence: Synthetic oligonucleotide
  Antisense strand to SEQ ID NO: 206924
ucacauauggugcagacaa

SEQ ID NO: 206926 - RNA, 19 nt, Artificial Sequence
  Description of Artificial Sequence: Synthetic oligonucleotide
  Sense strand starting at position 2822 of SEQ ID NO: 2666
auaugugacuauuauugag

SEQ ID NO: 206927 - RNA, 19 nt, Artificial Sequence
  Description of Artificial Sequence: Synthetic oligonucleotide
  Antisense strand to SEQ ID NO: 206926
cucaauaauagucacauau

SEQ ID NO: 206928 - RNA, 19 nt, Artificial Sequence
  Description of Artificial Sequence: Synthetic oligonucleotide
  Sense strand starting at position 2824 of SEQ ID NO: 2666
augugacuauuauugagua

SEQ ID NO: 206929 - RNA, 19 nt, Artificial Sequence
  Description of Artificial Sequence: Synthetic oligonucleotide
  Antisense strand to SEQ ID NO: 206928
uacucaauaauagucacau

SEQ ID NO: 206930 - RNA, 19 nt, Artificial Sequence
  Description of Artificial Sequence: Synthetic oligonucleotide
  Sense strand starting at position 2832 of SEQ ID NO: 2666
auuauugaguaccugaaau

SEQ ID NO: 206931 - RNA, 19 nt, Artificial Sequence
  Description of Artificial Sequence: Synthetic oligonucleotide
  Antisense strand to SEQ ID NO: 206930
auuucagguacucaauaau

SEQ ID NO: 206932 - RNA, 19 nt, Artificial Sequence
  Description of Artificial Sequence: Synthetic oligonucleotide
  Sense strand starting at position 2844 of SEQ ID NO: 2666
cugaaaucuggcgagugca

SEQ ID NO: 206933 - RNA, 19 nt, Artificial Sequence
  Description of Artificial Sequence: Synthetic oligonucleotide
  Antisense strand to SEQ ID NO: 206932
ugcacucgccagauuucag

SEQ ID NO: 206934 - RNA, 19 nt, Artificial Sequence
  Description of Artificial Sequence: Synthetic oligonucleotide
  Sense strand starting at position 2868 of SEQ ID NO: 2666
agaacugaguauuacauuu

SEQ ID NO: 206935 - RNA, 19 nt, Artificial Sequence
  Description of Artificial Sequence: Synthetic oligonucleotide
  Antisense strand to SEQ ID NO: 206934
aaauguaauacucaguucu

SEQ ID NO: 206936 - RNA, 19 nt, Artificial Sequence
  Description of Artificial Sequence: Synthetic oligonucleotide
  Sense strand starting at position 2886 of SEQ ID NO: 2666
ucacguaauuuguaaugaa

SEQ ID NO: 206937 - RNA, 19 nt, Artificial Sequence
  Description of Artificial Sequence: Synthetic oligonucleotide
  Antisense strand to SEQ ID NO: 206936
uucauuacaaauuacguga

SEQ ID NO: 206938 - RNA, 19 nt, Artificial Sequence
  Description of Artificial Sequence: Synthetic oligonucleotide
  Sense strand starting at position 2889 of SEQ ID NO: 2666
cguaauuuguaaugaaaug

SEQ ID NO: 206939 - RNA, 19 nt, Artificial Sequence
  Description of Artificial Sequence: Synthetic oligonucleotide
  Antisense strand to SEQ ID NO: 206938
cauuucauuacaaauuacg

SEQ ID NO: 206940 - RNA, 19 nt, Artificial Sequence
  Description of Artificial Sequence: Synthetic oligonucleotide
  Sense strand starting at position 2925 of SEQ ID NO: 2666
gugacaagaugauaaugua

SEQ ID NO: 206941 - RNA, 19 nt, Artificial Sequence
  Description of Artificial Sequence: Synthetic oligonucleotide
  Antisense strand to SEQ ID NO: 206940
uacauuaucaucuugucac

SEQ ID NO: 206942 - RNA, 19 nt, Artificial Sequence
  Description of Artificial Sequence: Synthetic oligonucleotide
  Sense strand starting at position 2928 of SEQ ID NO: 2666
acaagaugauaauguacuu

SEQ ID NO: 206943 - RNA, 19 nt, Artificial Sequence
  Description of Artificial Sequence: Synthetic oligonucleotide
  Antisense strand to SEQ ID NO: 206942
aaguacauuaucaucuugu

SEQ ID NO: 206944 - RNA, 19 nt, Artificial Sequence
  Description of Artificial Sequence: Synthetic oligonucleotide
  Sense strand starting at position 2953 of SEQ ID NO: 2666
cuggcaccuuucucugaau

SEQ ID NO: 206945 - RNA, 19 nt, Artificial Sequence
  Description of Artificial Sequence: Synthetic oligonucleotide
  Antisense strand to SEQ ID NO: 206944
auucagagaaaggugccag

SEQ ID NO: 206946 - RNA, 19 nt, Artificial Sequence
  Description of Artificial Sequence: Synthetic oligonucleotide
  Sense strand starting at position 2954 of SEQ ID NO: 2666
uggcaccuuucucugaaua

SEQ ID NO: 206947 - RNA, 19 nt, Artificial Sequence
  Description of Artificial Sequence: Synthetic oligonucleotide
  Antisense strand to SEQ ID NO: 206946
uauucagagaaaggugcca

SEQ ID NO: 206948 - RNA, 19 nt, Artificial Sequence
  Description of Artificial Sequence: Synthetic oligonucleotide
  Sense strand starting at position 2955 of SEQ ID NO: 2666
ggcaccuuucucugaauag

SEQ ID NO: 206949 - RNA, 19 nt, Artificial Sequence
  Description of Artificial Sequence: Synthetic oligonucleotide
  Antisense strand to SEQ ID NO: 206948
cuauucagagaaaggugcc

SEQ ID NO: 206950 - RNA, 19 nt, Artificial Sequence
  Description of Artificial Sequence: Synthetic oligonucleotide
  Sense strand starting at position 2965 of SEQ ID NO: 2666
ucugaauaguacccuaaag

SEQ ID NO: 206951 - RNA, 19 nt, Artificial Sequence
  Description of Artificial Sequence: Synthetic oligonucleotide
  Antisense strand to SEQ ID NO: 206950
cuuuaggguacuauucaga

SEQ ID NO: 206952 - RNA, 19 nt, Artificial Sequence
  Description of Artificial Sequence: Synthetic oligonucleotide
  Sense strand starting at position 3091 of SEQ ID NO: 2666
gagugaacgcuauacacuu

SEQ ID NO: 206953 - RNA, 19 nt, Artificial Sequence
  Description of Artificial Sequence: Synthetic oligonucleotide
  Antisense strand to SEQ ID NO: 206952
aaguguauagcguucacuc

SEQ ID NO: 206954 - RNA, 19 nt, Artificial Sequence
  Description of Artificial Sequence: Synthetic oligonucleotide
  Sense strand starting at position 3125 of SEQ ID NO: 2666
cuugcauuggccugaguag

SEQ ID NO: 206955 - RNA, 19 nt, Artificial Sequence
  Description of Artificial Sequence: Synthetic oligonucleotide
  Antisense strand to SEQ ID NO: 206954
cuacucaggccaaugcaag

SEQ ID NO: 206956 - RNA, 19 nt, Artificial Sequence
  Description of Artificial Sequence: Synthetic oligonucleotide
  Sense strand starting at position 3126 of SEQ ID NO: 2666
uugcauuggccugaguaga

SEQ ID NO: 206957 - RNA, 19 nt, Artificial Sequence
  Description of Artificial Sequence: Synthetic oligonucleotide
  Antisense strand to SEQ ID NO: 206956
ucuacucaggccaaugcaa

SEQ ID NO: 206958 - RNA, 19 nt, Artificial Sequence
  Description of Artificial Sequence: Synthetic oligonucleotide
  Sense strand starting at position 3295 of SEQ ID NO: 2666
cgagaccugccucaugaaa

SEQ ID NO: 206959 - RNA, 19 nt, Artificial Sequence
  Description of Artificial Sequence: Synthetic oligonucleotide
  Antisense strand to SEQ ID NO: 206958
uuucaugaggcaggucucg

SEQ ID NO: 206960 - RNA, 19 nt, Artificial Sequence
  Description of Artificial Sequence: Synthetic oligonucleotide
  Sense strand starting at position 3519 of SEQ ID NO: 2666
agcugauaucuagggaaac

SEQ ID NO: 206961 - RNA, 19 nt, Artificial Sequence
  Description of Artificial Sequence: Synthetic oligonucleotide
  Antisense strand to SEQ ID NO: 206960
guuucccuagauaucagcu

SEQ ID NO: 206962 - RNA, 19 nt, Artificial Sequence
  Description of Artificial Sequence: Synthetic oligonucleotide
  Sense strand starting at position 3926 of SEQ ID NO: 2666
gcagguuuaauggauauau

SEQ ID NO: 206963 - RNA, 19 nt, Artificial Sequence
  Description of Artificial Sequence: Synthetic oligonucleotide
  Antisense strand to SEQ ID NO: 206962
auauauccauuaaaccugc

SEQ ID NO: 206964 - RNA, 19 nt, Artificial Sequence
  Description of Artificial Sequence: Synthetic oligonucleotide
  Sense strand starting at position 193 of SEQ ID NO: 2667
gugaucaaguccuugaaga

SEQ ID NO: 206965 - RNA, 19 nt, Artificial Sequence
  Description of Artificial Sequence: Synthetic oligonucleotide
  Antisense strand to SEQ ID NO: 206964
ucuucaaggacuugaucac

SEQ ID NO: 206966 - RNA, 19 nt, Artificial Sequence
  Description of Artificial Sequence: Synthetic oligonucleotide
  Sense strand starting at position 194 of SEQ ID NO: 2667
ugaucaaguccuugaagaa

SEQ ID NO: 206967 - RNA, 19 nt, Artificial Sequence
  Description of Artificial Sequence: Synthetic oligonucleotide
  Antisense strand to SEQ ID NO: 206966
uucuucaaggacuugauca

SEQ ID NO: 206968 - RNA, 19 nt, Artificial Sequence
  Description of Artificial Sequence: Synthetic oligonucleotide
  Sense strand starting at position 273 of SEQ ID NO: 2667
ugccuacggguugauaaau

SEQ ID NO: 206969 - RNA, 19 nt, Artificial Sequence
  Description of Artificial Sequence: Synthetic oligonucleotide
  Antisense strand to SEQ ID NO: 206968
auuuaucaacccguaggca

SEQ ID NO: 206970 - RNA, 19 nt, Artificial Sequence
  Description of Artificial Sequence: Synthetic oligonucleotide
  Sense strand starting at position 282 of SEQ ID NO: 2667
guugauaaauaagugugaa

SEQ ID NO: 206971 - RNA, 19 nt, Artificial Sequence
  Description of Artificial Sequence: Synthetic oligonucleotide
  Antisense strand to SEQ ID NO: 206970
uucacacuuauuuaucaac

SEQ ID NO: 206972 - RNA, 19 nt, Artificial Sequence
  Description of Artificial Sequence: Synthetic oligonucleotide
  Sense strand starting at position 303 of SEQ ID NO: 2667
auaugacucgagcaaucuc

SEQ ID NO: 206973 - RNA, 19 nt, Artificial Sequence
  Description of Artificial Sequence: Synthetic oligonucleotide
  Antisense strand to SEQ ID NO: 206972
gagauugcucgagucauau

SEQ ID NO: 206974 - RNA, 19 nt, Artificial Sequence
  Description of Artificial Sequence: Synthetic oligonucleotide
  Sense strand starting at position 390 of SEQ ID NO: 2667
ccaguucugccauaucuga

SEQ ID NO: 206975 - RNA, 19 nt, Artificial Sequence
  Description of Artificial Sequence: Synthetic oligonucleotide
  Antisense strand to SEQ ID NO: 206974
ucagauauggcagaacugg

SEQ ID NO: 206976 - RNA, 19 nt, Artificial Sequence
  Description of Artificial Sequence: Synthetic oligonucleotide
  Sense strand starting at position 491 of SEQ ID NO: 2667
gauauuuauugaguugcgu

SEQ ID NO: 206977 - RNA, 19 nt, Artificial Sequence
  Description of Artificial Sequence: Synthetic oligonucleotide
  Antisense strand to SEQ ID NO: 206976
acgcaacucaauaaauauc

SEQ ID NO: 206978 - RNA, 19 nt, Artificial Sequence
  Description of Artificial Sequence: Synthetic oligonucleotide
  Sense strand starting at position 520 of SEQ ID NO: 2667
guuggaggcacugaugaua

SEQ ID NO: 206979 - RNA, 19 nt, Artificial Sequence
  Description of Artificial Sequence: Synthetic oligonucleotide
  Antisense strand to SEQ ID NO: 206978
uaucaucagugccuccaac

SEQ ID NO: 206980 - RNA, 19 nt, Artificial Sequence
  Description of Artificial Sequence: Synthetic oligonucleotide
  Sense strand starting at position 533 of SEQ ID NO: 2667
augauaaagcagugacaaa

SEQ ID NO: 206981 - RNA, 19 nt, Artificial Sequence
  Description of Artificial Sequence: Synthetic oligonucleotide
  Antisense strand to SEQ ID NO: 206980
uuugucacugcuuuaucau

SEQ ID NO: 206982 - RNA, 19 nt, Artificial Sequence
  Description of Artificial Sequence: Synthetic oligonucleotide
  Sense strand starting at position 783 of SEQ ID NO: 2667
agcauucuagcagagugaa

SEQ ID NO: 206983 - RNA, 19 nt, Artificial Sequence
  Description of Artificial Sequence: Synthetic oligonucleotide
  Antisense strand to SEQ ID NO: 206982
uucacucugcuagaaugcu

SEQ ID NO: 206984 - RNA, 19 nt, Artificial Sequence
  Description of Artificial Sequence: Synthetic oligonucleotide
  Sense strand starting at position 791 of SEQ ID NO: 2667
agcagagugaacuguaacu

SEQ ID NO: 206985 - RNA, 19 nt, Artificial Sequence
  Description of Artificial Sequence: Synthetic oligonucleotide
  Antisense strand to SEQ ID NO: 206984
aguuacaguucacucugcu

SEQ ID NO: 206986 - RNA, 19 nt, Artificial Sequence
  Description of Artificial Sequence: Synthetic oligonucleotide
  Sense strand starting at position 821 of SEQ ID NO: 2667
ccagcagaaguguaaccau

SEQ ID NO: 206987 - RNA, 19 nt, Artificial Sequence
  Description of Artificial Sequence: Synthetic oligonucleotide
  Antisense strand to SEQ ID NO: 206986
augguuacacuucugcugg

SEQ ID NO: 206988 - RNA, 19 nt, Artificial Sequence
  Description of Artificial Sequence: Synthetic oligonucleotide
  Sense strand starting at position 1066 of SEQ ID NO: 2667
accauuguuccagggacaa

SEQ ID NO: 206989 - RNA, 19 nt, Artificial Sequence
  Description of Artificial Sequence: Synthetic oligonucleotide
  Antisense strand to SEQ ID NO: 206988
uugucccuggaacaauggu

SEQ ID NO: 206990 - RNA, 19 nt, Artificial Sequence
  Description of Artificial Sequence: Synthetic oligonucleotide
  Sense strand starting at position 1143 of SEQ ID NO: 2667
guacuaccuugauuaauag

SEQ ID NO: 206991 - RNA, 19 nt, Artificial Sequence
  Description of Artificial Sequence: Synthetic oligonucleotide
  Antisense strand to SEQ ID NO: 206990
cuauuaaucaagguaguac

SEQ ID NO: 206992 - RNA, 19 nt, Artificial Sequence
  Description of Artificial Sequence: Synthetic oligonucleotide
  Sense strand starting at position 1197 of SEQ ID NO: 2667
cuugguugaagccagauua

SEQ ID NO: 206993 - RNA, 19 nt, Artificial Sequence
  Description of Artificial Sequence: Synthetic oligonucleotide
  Antisense strand to SEQ ID NO: 206992
uaaucuggcuucaaccaag

SEQ ID NO: 206994 - RNA, 19 nt, Artificial Sequence
  Description of Artificial Sequence: Synthetic oligonucleotide
  Sense strand starting at position 1312 of SEQ ID NO: 2667
ucuuuaucacugcagauga

SEQ ID NO: 206995 - RNA, 19 nt, Artificial Sequence
  Description of Artificial Sequence: Synthetic oligonucleotide
  Antisense strand to SEQ ID NO: 206994
ucaucugcagugauaaaga

SEQ ID NO: 206996 - RNA, 19 nt, Artificial Sequence
  Description of Artificial Sequence: Synthetic oligonucleotide
  Sense strand starting at position 1314 of SEQ ID NO: 2667
uuuaucacugcagaugaua

SEQ ID NO: 206997 - RNA, 19 nt, Artificial Sequence
  Description of Artificial Sequence: Synthetic oligonucleotide
  Antisense strand to SEQ ID NO: 206996
uaucaucugcagugauaaa

SEQ ID NO: 206998 - RNA, 19 nt, Artificial Sequence
  Description of Artificial Sequence: Synthetic oligonucleotide
  Sense strand starting at position 1443 of SEQ ID NO: 2667
uacgaugucggauggagaa

SEQ ID NO: 206999 - RNA, 19 nt, Artificial Sequence
  Description of Artificial Sequence: Synthetic oligonucleotide
  Antisense strand to SEQ ID NO: 206998
uucuccauccgacaucgua

SEQ ID NO: 207000 - RNA, 19 nt, Artificial Sequence
  Description of Artificial Sequence: Synthetic oligonucleotide
  Sense strand starting at position 1466 of SEQ ID NO: 2667
gaucuaaccugggcuguaa

SEQ ID NO: 207001 - RNA, 19 nt, Artificial Sequence
  Description of Artificial Sequence: Synthetic oligonucleotide
  Antisense strand to SEQ ID NO: 207000
uuacagcccagguuagauc

SEQ ID NO: 207002 - RNA, 19 nt, Artificial Sequence
  Description of Artificial Sequence: Synthetic oligonucleotide
  Sense strand starting at position 1785 of SEQ ID NO: 2667
uguuguaagcgcucagcca

SEQ ID NO: 207003 - RNA, 19 nt, Artificial Sequence
  Description of Artificial Sequence: Synthetic oligonucleotide
  Antisense strand to SEQ ID NO: 207002
uggcugagcgcuuacaaca

SEQ ID NO: 207004 - RNA, 19 nt, Artificial Sequence
  Description of Artificial Sequence: Synthetic oligonucleotide
  Sense strand starting at position 2272 of SEQ ID NO: 2667
gguguuuaucaggacugau

SEQ ID NO: 207005 - RNA, 19 nt, Artificial Sequence
  Description of Artificial Sequence: Synthetic oligonucleotide
  Antisense strand to SEQ ID NO: 207004
aucaguccugauaaacacc

SEQ ID NO: 207006 - RNA, 19 nt, Artificial Sequence
  Description of Artificial Sequence: Synthetic oligonucleotide
  Sense strand starting at position 2516 of SEQ ID NO: 2667
gccuuuacuccagaaagcu

SEQ ID NO: 207007 - RNA, 19 nt, Artificial Sequence
  Description of Artificial Sequence: Synthetic oligonucleotide
  Antisense strand to SEQ ID NO: 207006
agcuuucuggaguaaaggc

SEQ ID NO: 207008 - RNA, 19 nt, Artificial Sequence
  Description of Artificial Sequence: Synthetic oligonucleotide
  Sense strand starting at position 2579 of SEQ ID NO: 2667
cugggcugccaggauuaaa

SEQ ID NO: 207009 - RNA, 19 nt, Artificial Sequence
  Description of Artificial Sequence: Synthetic oligonucleotide
  Antisense strand to SEQ ID NO: 207008
uuuaauccuggcagcccag

SEQ ID NO: 207010 - RNA, 19 nt, Artificial Sequence
  Description of Artificial Sequence: Synthetic oligonucleotide
  Sense strand starting at position 2865 of SEQ ID NO: 2667
ucacgcauuucccuggaua

SEQ ID NO: 207011 - RNA, 19 nt, Artificial Sequence
  Description of Artificial Sequence: Synthetic oligonucleotide
  Antisense strand to SEQ ID NO: 207010
uauccagggaaaugcguga

SEQ ID NO: 207012 - RNA, 19 nt, Artificial Sequence
  Description of Artificial Sequence: Synthetic oligonucleotide
  Sense strand starting at position 2917 of SEQ ID NO: 2667
cuuauaucaggcuaugcau

SEQ ID NO: 207013 - RNA, 19 nt, Artificial Sequence
  Description of Artificial Sequence: Synthetic oligonucleotide
  Antisense strand to SEQ ID NO: 207012
augcauagccugauauaag

SEQ ID NO: 207014 - RNA, 19 nt, Artificial Sequence
  Description of Artificial Sequence: Synthetic oligonucleotide
  Sense strand starting at position 3032 of SEQ ID NO: 2667
uuauguaugugaccugaaa

SEQ ID NO: 207015 - RNA, 19 nt, Artificial Sequence
  Description of Artificial Sequence: Synthetic oligonucleotide
  Antisense strand to SEQ ID NO: 207014
uuucaggucacauacauaa

SEQ ID NO: 207016 - RNA, 19 nt, Artificial Sequence
  Description of Artificial Sequence: Synthetic oligonucleotide
  Sense strand starting at position 3097 of SEQ ID NO: 2667
cuaaauaccugagugugga

SEQ ID NO: 207017 - RNA, 19 nt, Artificial Sequence
  Description of Artificial Sequence: Synthetic oligonucleotide
  Antisense strand to SEQ ID NO: 207016
uccacacucagguauuuag

SEQ ID NO: 207018 - RNA, 19 nt, Artificial Sequence
  Description of Artificial Sequence: Synthetic oligonucleotide
  Sense strand starting at position 3164 of SEQ ID NO: 2667
guguguuuggugaguaagg

SEQ ID NO: 207019 - RNA, 19 nt, Artificial Sequence
  Description of Artificial Sequence: Synthetic oligonucleotide
  Antisense strand to SEQ ID NO: 207018
ccuuacucaccaaacacac

SEQ ID NO: 207020 - RNA, 19 nt, Artificial Sequence
  Description of Artificial Sequence: Synthetic oligonucleotide
  Sense strand starting at position 3173 of SEQ ID NO: 2667
gugaguaaggaguggauga

SEQ ID NO: 207021 - RNA, 19 nt, Artificial Sequence
  Description of Artificial Sequence: Synthetic oligonucleotide
  Antisense strand to SEQ ID NO: 207020
ucauccacuccuuacucac

SEQ ID NO: 207022 - RNA, 19 nt, Artificial Sequence
  Description of Artificial Sequence: Synthetic oligonucleotide
  Sense strand starting at position 3272 of SEQ ID NO: 2667
ggcauuuguuaggcauugu

SEQ ID NO: 207023 - RNA, 19 nt, Artificial Sequence
  Description of Artificial Sequence: Synthetic oligonucleotide
  Antisense strand to SEQ ID NO: 207022
acaaugccuaacaaaugcc

SEQ ID NO: 207024 - RNA, 19 nt, Artificial Sequence
  Description of Artificial Sequence: Synthetic oligonucleotide
  Sense strand starting at position 3273 of SEQ ID NO: 2667
gcauuuguuaggcauugua

SEQ ID NO: 207025 - RNA, 19 nt, Artificial Sequence
  Description of Artificial Sequence: Synthetic oligonucleotide
  Antisense strand to SEQ ID NO: 207024
uacaaugccuaacaaaugc

SEQ ID NO: 207026 - RNA, 19 nt, Artificial Sequence
  Description of Artificial Sequence: Synthetic oligonucleotide
  Sense strand starting at position 3474 of SEQ ID NO: 2667
aggguuguugugaggugua

SEQ ID NO: 207027 - RNA, 19 nt, Artificial Sequence
  Description of Artificial Sequence: Synthetic oligonucleotide
  Antisense strand to SEQ ID NO: 207026
uacaccucacaacaacccu

SEQ ID NO: 207028 - RNA, 19 nt, Artificial Sequence
  Description of Artificial Sequence: Synthetic oligonucleotide
  Sense strand starting at position 3479 of SEQ ID NO: 2667
uguugugagguguagauga

SEQ ID NO: 207029 - RNA, 19 nt, Artificial Sequence
  Description of Artificial Sequence: Synthetic oligonucleotide
  Antisense strand to SEQ ID NO: 207028
ucaucuacaccucacaaca

SEQ ID NO: 207030 - RNA, 19 nt, Artificial Sequence
  Description of Artificial Sequence: Synthetic oligonucleotide
  Sense strand starting at position 3481 of SEQ ID NO: 2667
uugugagguguagaugauu

SEQ ID NO: 207031 - RNA, 19 nt, Artificial Sequence
  Description of Artificial Sequence: Synthetic oligonucleotide
  Antisense strand to SEQ ID NO: 207030
aaucaucuacaccucacaa

SEQ ID NO: 207032 - RNA, 19 nt, Artificial Sequence
  Description of Artificial Sequence: Synthetic oligonucleotide
  Sense strand starting at position 3589 of SEQ ID NO: 2667
ccacauguccuugaggguu

SEQ ID NO: 207033 - RNA, 19 nt, Artificial Sequence
  Description of Artificial Sequence: Synthetic oligonucleotide
  Antisense strand to SEQ ID NO: 207032
aacccucaaggacaugugg

SEQ ID NO: 207034 - RNA, 19 nt, Artificial Sequence
  Description of Artificial Sequence: Synthetic oligonucleotide
  Sense strand starting at position 3595 of SEQ ID NO: 2667
guccuugaggguuagucaa

SEQ ID NO: 207035 - RNA, 19 nt, Artificial Sequence
  Description of Artificial Sequence: Synthetic oligonucleotide
  Antisense strand to SEQ ID NO: 207034
uugacuaacccucaaggac

SEQ ID NO: 207036 - RNA, 19 nt, Artificial Sequence
  Description of Artificial Sequence: Synthetic oligonucleotide
  Sense strand starting at position 3597 of SEQ ID NO: 2667
ccuugaggguuagucaacu

SEQ ID NO: 207037 - RNA, 19 nt, Artificial Sequence
  Description of Artificial Sequence: Synthetic oligonucleotide
  Antisense strand to SEQ ID NO: 207036
aguugacuaacccucaagg

SEQ ID NO: 207038 - RNA, 19 nt, Artificial Sequence
  Description of Artificial Sequence: Synthetic oligonucleotide
  Sense strand starting at position 3776 of SEQ ID NO: 2667
agagucauuugccucucuu

SEQ ID NO: 207039 - RNA, 19 nt, Artificial Sequence
  Description of Artificial Sequence: Synthetic oligonucleotide
  Antisense strand to SEQ ID NO: 207038
aagagaggcaaaugacucu

SEQ ID NO: 207040 - RNA, 19 nt, Artificial Sequence
  Description of Artificial Sequence: Synthetic oligonucleotide
  Sense strand starting at position 3849 of SEQ ID NO: 2667
cuugcauaugucuaggacu

SEQ ID NO: 207041 - RNA, 19 nt, Artificial Sequence
  Description of Artificial Sequence: Synthetic oligonucleotide
  Antisense strand to SEQ ID NO: 207040
aguccuagacauaugcaag

SEQ ID NO: 207042 - RNA, 19 nt, Artificial Sequence
  Description of Artificial Sequence: Synthetic oligonucleotide
  Sense strand starting at position 3896 of SEQ ID NO: 2667
aagaaauugugggcuaggu

SEQ ID NO: 207043 - RNA, 19 nt, Artificial Sequence
  Description of Artificial Sequence: Synthetic oligonucleotide
  Antisense strand to SEQ ID NO: 207042
accuagcccacaauuucuu

SEQ ID NO: 207044 - RNA, 19 nt, Artificial Sequence
  Description of Artificial Sequence: Synthetic oligonucleotide
  Sense strand starting at position 82 of SEQ ID NO: 2669
ccaucuaauuuggagguuu

SEQ ID NO: 207045 - RNA, 19 nt, Artificial Sequence
  Description of Artificial Sequence: Synthetic oligonucleotide
  Antisense strand to SEQ ID NO: 207044
aaaccuccaaauuagaugg

SEQ ID NO: 207046 - RNA, 19 nt, Artificial Sequence
  Description of Artificial Sequence: Synthetic oligonucleotide
  Sense strand starting at position 722 of SEQ ID NO: 2669
gacuauuaguuucuugagu

SEQ ID NO: 207047 - RNA, 19 nt, Artificial Sequence
  Description of Artificial Sequence: Synthetic oligonucleotide
  Antisense strand to SEQ ID NO: 207046
acucaagaaacuaauaguc

SEQ ID NO: 207048 - RNA, 19 nt, Artificial Sequence
  Description of Artificial Sequence: Synthetic oligonucleotide
  Sense strand starting at position 723 of SEQ ID NO: 2669
acuauuaguuucuugagua

SEQ ID NO: 207049 - RNA, 19 nt, Artificial Sequence
  Description of Artificial Sequence: Synthetic oligonucleotide
  Antisense strand to SEQ ID NO: 207048
uacucaagaaacuaauagu

SEQ ID NO: 207050 - RNA, 19 nt, Artificial Sequence
  Description of Artificial Sequence: Synthetic oligonucleotide
  Sense strand starting at position 728 of SEQ ID NO: 2669
uaguuucuugaguauauug

SEQ ID NO: 207051 - RNA, 19 nt, Artificial Sequence
  Description of Artificial Sequence: Synthetic oligonucleotide
  Antisense strand to SEQ ID NO: 207050
caauauacucaagaaacua

SEQ ID NO: 207052 - RNA, 19 nt, Artificial Sequence
  Description of Artificial Sequence: Synthetic oligonucleotide
  Sense strand starting at position 735 of SEQ ID NO: 2669
uugaguauauugccagaau

SEQ ID NO: 207053 - RNA, 19 nt, Artificial Sequence
  Description of Artificial Sequence: Synthetic oligonucleotide
  Antisense strand to SEQ ID NO: 207052
auucuggcaauauacucaa

SEQ ID NO: 207054 - RNA, 19 nt, Artificial Sequence
  Description of Artificial Sequence: Synthetic oligonucleotide
  Sense strand starting at position 748 of SEQ ID NO: 2669
cagaauuuauguggaaaua

SEQ ID NO: 207055 - RNA, 19 nt, Artificial Sequence
  Description of Artificial Sequence: Synthetic oligonucleotide
  Antisense strand to SEQ ID NO: 207054
uauuuccacauaaauucug

SEQ ID NO: 207056 - RNA, 19 nt, Artificial Sequence
  Description of Artificial Sequence: Synthetic oligonucleotide
  Sense strand starting at position 844 of SEQ ID NO: 2669
cgcuuaguaagauaugcua

SEQ ID NO: 207057 - RNA, 19 nt, Artificial Sequence
  Description of Artificial Sequence: Synthetic oligonucleotide
  Antisense strand to SEQ ID NO: 207056
uagcauaucuuacuaagcg

SEQ ID NO: 207058 - RNA, 19 nt, Artificial Sequence
  Description of Artificial Sequence: Synthetic oligonucleotide
  Sense strand starting at position 872 of SEQ ID NO: 2669
ccacauuaguauguuggga

SEQ ID NO: 207059 - RNA, 19 nt, Artificial Sequence
  Description of Artificial Sequence: Synthetic oligonucleotide
  Antisense strand to SEQ ID NO: 207058
ucccaacauacuaaugugg

SEQ ID NO: 207060 - RNA, 19 nt, Artificial Sequence
  Description of Artificial Sequence: Synthetic oligonucleotide
  Sense strand starting at position 888 of SEQ ID NO: 2669
ggaacugauuccucacucu

SEQ ID NO: 207061 - RNA, 19 nt, Artificial Sequence
  Description of Artificial Sequence: Synthetic oligonucleotide
  Antisense strand to SEQ ID NO: 207060
agagugaggaaucaguucc

SEQ ID NO: 207062 - RNA, 19 nt, Artificial Sequence
  Description of Artificial Sequence: Synthetic oligonucleotide
  Sense strand starting at position 960 of SEQ ID NO: 2669
cagucuucugauggauacu

SEQ ID NO: 207063 - RNA, 19 nt, Artificial Sequence
  Description of Artificial Sequence: Synthetic oligonucleotide
  Antisense strand to SEQ ID NO: 207062
aguauccaucagaagacug

SEQ ID NO: 207064 - RNA, 19 nt, Artificial Sequence
  Description of Artificial Sequence: Synthetic oligonucleotide
  Sense strand starting at position 971 of SEQ ID NO: 2669
uggauacucacguaguuua

SEQ ID NO: 207065 - RNA, 19 nt, Artificial Sequence
  Description of Artificial Sequence: Synthetic oligonucleotide
  Antisense strand to SEQ ID NO: 207064
uaaacuacgugaguaucca

SEQ ID NO: 207066 - RNA, 19 nt, Artificial Sequence
  Description of Artificial Sequence: Synthetic oligonucleotide
  Sense strand starting at position 974 of SEQ ID NO: 2669
auacucacguaguuuacaa

SEQ ID NO: 207067 - RNA, 19 nt, Artificial Sequence
  Description of Artificial Sequence: Synthetic oligonucleotide
  Antisense strand to SEQ ID NO: 207066
uuguaaacuacgugaguau

SEQ ID NO: 207068 - RNA, 19 nt, Artificial Sequence
  Description of Artificial Sequence: Synthetic oligonucleotide
  Sense strand starting at position 1190 of SEQ ID NO: 2669
cuccuauauugaguauauu

SEQ ID NO: 207069 - RNA, 19 nt, Artificial Sequence
  Description of Artificial Sequence: Synthetic oligonucleotide
  Antisense strand to SEQ ID NO: 207068
aauauacucaauauaggag

SEQ ID NO: 207070 - RNA, 19 nt, Artificial Sequence
  Description of Artificial Sequence: Synthetic oligonucleotide
  Sense strand starting at position 1276 of SEQ ID NO: 2669
auccuagcacuuggugaaa

SEQ ID NO: 207071 - RNA, 19 nt, Artificial Sequence
  Description of Artificial Sequence: Synthetic oligonucleotide
  Antisense strand to SEQ ID NO: 207070
uuucaccaagugcuaggau

SEQ ID NO: 207072 - RNA, 19 nt, Artificial Sequence
  Description of Artificial Sequence: Synthetic oligonucleotide
  Sense strand starting at position 1769 of SEQ ID NO: 2669
cccaguacuucgcccauuu

SEQ ID NO: 207073 - RNA, 19 nt, Artificial Sequence
  Description of Artificial Sequence: Synthetic oligonucleotide
  Antisense strand to SEQ ID NO: 207072
aaaugggcgaaguacuggg

SEQ ID NO: 207074 - RNA, 19 nt, Artificial Sequence
  Description of Artificial Sequence: Synthetic oligonucleotide
  Sense strand starting at position 1779 of SEQ ID NO: 2669
cgcccauuugucuaaugca

SEQ ID NO: 207075 - RNA, 19 nt, Artificial Sequence
  Description of Artificial Sequence: Synthetic oligonucleotide
  Antisense strand to SEQ ID NO: 207074
ugcauuagacaaaugggcg

SEQ ID NO: 207076 - RNA, 19 nt, Artificial Sequence
  Description of Artificial Sequence: Synthetic oligonucleotide
  Sense strand starting at position 1803 of SEQ ID NO: 2669
gccuguuaauucuuagaua

SEQ ID NO: 207077 - RNA, 19 nt, Artificial Sequence
  Description of Artificial Sequence: Synthetic oligonucleotide
  Antisense strand to SEQ ID NO: 207076
uaucuaagaauuaacaggc

SEQ ID NO: 207078 - RNA, 19 nt, Artificial Sequence
  Description of Artificial Sequence: Synthetic oligonucleotide
  Sense strand starting at position 2052 of SEQ ID NO: 2669
uugauuccuagcggaaagu

SEQ ID NO: 207079 - RNA, 19 nt, Artificial Sequence
  Description of Artificial Sequence: Synthetic oligonucleotide
  Antisense strand to SEQ ID NO: 207078
acuuuccgcuaggaaucaa

SEQ ID NO: 207080 - RNA, 19 nt, Artificial Sequence
  Description of Artificial Sequence: Synthetic oligonucleotide
  Sense strand starting at position 2053 of SEQ ID NO: 2669
ugauuccuagcggaaaguu

SEQ ID NO: 207081 - RNA, 19 nt, Artificial Sequence
  Description of Artificial Sequence: Synthetic oligonucleotide
  Antisense strand to SEQ ID NO: 207080
aacuuuccgcuaggaauca

SEQ ID NO: 207082 - RNA, 19 nt, Artificial Sequence
  Description of Artificial Sequence: Synthetic oligonucleotide
  Sense strand starting at position 2321 of SEQ ID NO: 2669
ugcauuacaucagcaggua

SEQ ID NO: 207083 - RNA, 19 nt, Artificial Sequence
  Description of Artificial Sequence: Synthetic oligonucleotide
  Antisense strand to SEQ ID NO: 207082
uaccugcugauguaaugca

SEQ ID NO: 207084 - RNA, 19 nt, Artificial Sequence
  Description of Artificial Sequence: Synthetic oligonucleotide
  Sense strand starting at position 2322 of SEQ ID NO: 2669
gcauuacaucagcagguau

SEQ ID NO: 207085 - RNA, 19 nt, Artificial Sequence
  Description of Artificial Sequence: Synthetic oligonucleotide
  Antisense strand to SEQ ID NO: 207084
auaccugcugauguaaugc

SEQ ID NO: 207086 - RNA, 19 nt, Artificial Sequence
  Description of Artificial Sequence: Synthetic oligonucleotide
  Sense strand starting at position 2810 of SEQ ID NO: 2669
gguuaauaaucugcauauu

SEQ ID NO: 207087 - RNA, 19 nt, Artificial Sequence
  Description of Artificial Sequence: Synthetic oligonucleotide
  Antisense strand to SEQ ID NO: 207086
aauaugcagauuauuaacc

SEQ ID NO: 207088 - RNA, 19 nt, Artificial Sequence
  Description of Artificial Sequence: Synthetic oligonucleotide
  Sense strand starting at position 3213 of SEQ ID NO: 2669
ccugucauucuuggagaaa

SEQ ID NO: 207089 - RNA, 19 nt, Artificial Sequence
  Description of Artificial Sequence: Synthetic oligonucleotide
  Antisense strand to SEQ ID NO: 207088
uuucuccaagaaugacagg

SEQ ID NO: 207090 - RNA, 19 nt, Artificial Sequence
  Description of Artificial Sequence: Synthetic oligonucleotide
  Sense strand starting at position 3336 of SEQ ID NO: 2669
cacucugugagacguugaa

SEQ ID NO: 207091 - RNA, 19 nt, Artificial Sequence
  Description of Artificial Sequence: Synthetic oligonucleotide
  Antisense strand to SEQ ID NO: 207090
uucaacgucucacagagug

SEQ ID NO: 207092 - RNA, 19 nt, Artificial Sequence
  Description of Artificial Sequence: Synthetic oligonucleotide
  Sense strand starting at position 3340 of SEQ ID NO: 2669
cugugagacguugaaaucu

SEQ ID NO: 207093 - RNA, 19 nt, Artificial Sequence
  Description of Artificial Sequence: Synthetic oligonucleotide
  Antisense strand to SEQ ID NO: 207092
agauuucaacgucucacag

SEQ ID NO: 207094 - RNA, 19 nt, Artificial Sequence
  Description of Artificial Sequence: Synthetic oligonucleotide
  Sense strand starting at position 3348 of SEQ ID NO: 2669
cguugaaaucuccagaagu

SEQ ID NO: 207095 - RNA, 19 nt, Artificial Sequence
  Description of Artificial Sequence: Synthetic oligonucleotide
  Antisense strand to SEQ ID NO: 207094
acuucuggagauuucaacg

SEQ ID NO: 207096 - RNA, 19 nt, Artificial Sequence
  Description of Artificial Sequence: Synthetic oligonucleotide
  Sense strand starting at position 3359 of SEQ ID NO: 2669
ccagaaguugcccaagguu

SEQ ID NO: 207097 - RNA, 19 nt, Artificial Sequence
  Description of Artificial Sequence: Synthetic oligonucleotide
  Antisense strand to SEQ ID NO: 207096
aaccuugggcaacuucugg

SEQ ID NO: 207098 - RNA, 19 nt, Artificial Sequence
  Description of Artificial Sequence: Synthetic oligonucleotide
  Sense strand starting at position 3485 of SEQ ID NO: 2669
ucugguaucugguuauauu

SEQ ID NO: 207099 - RNA, 19 nt, Artificial Sequence
  Description of Artificial Sequence: Synthetic oligonucleotide
  Antisense strand to SEQ ID NO: 207098
aauauaaccagauaccaga

SEQ ID NO: 207100 - RNA, 19 nt, Artificial Sequence
  Description of Artificial Sequence: Synthetic oligonucleotide
  Sense strand starting at position 3486 of SEQ ID NO: 2669
cugguaucugguuauauug

SEQ ID NO: 207101 - RNA, 19 nt, Artificial Sequence
  Description of Artificial Sequence: Synthetic oligonucleotide
  Antisense strand to SEQ ID NO: 207100
caauauaaccagauaccag

SEQ ID NO: 207102 - RNA, 19 nt, Artificial Sequence
  Description of Artificial Sequence: Synthetic oligonucleotide
  Sense strand starting at position 3498 of SEQ ID NO: 2669
uauauuguggccugacaga

SEQ ID NO: 207103 - RNA, 19 nt, Artificial Sequence
  Description of Artificial Sequence: Synthetic oligonucleotide
  Antisense strand to SEQ ID NO: 207102
ucugucaggccacaauaua

SEQ ID NO: 207104 - RNA, 19 nt, Artificial Sequence
  Description of Artificial Sequence: Synthetic oligonucleotide
  Sense strand starting at position 3505 of SEQ ID NO: 2669
uggccugacagagaaguuu

SEQ ID NO: 207105 - RNA, 19 nt, Artificial Sequence
  Description of Artificial Sequence: Synthetic oligonucleotide
  Antisense strand to SEQ ID NO: 207104
aaacuucucugucaggcca

SEQ ID NO: 207106 - RNA, 19 nt, Artificial Sequence
  Description of Artificial Sequence: Synthetic oligonucleotide
  Sense strand starting at position 3609 of SEQ ID NO: 2669
cucuuuauaguagguugaa

SEQ ID NO: 207107 - RNA, 19 nt, Artificial Sequence
  Description of Artificial Sequence: Synthetic oligonucleotide
  Antisense strand to SEQ ID NO: 207106
uucaaccuacuauaaagag

SEQ ID NO: 207108 - RNA, 19 nt, Artificial Sequence
  Description of Artificial Sequence: Synthetic oligonucleotide
  Sense strand starting at position 3610 of SEQ ID NO: 2669
ucuuuauaguagguugaaa

SEQ ID NO: 207109 - RNA, 19 nt, Artificial Sequence
  Description of Artificial Sequence: Synthetic oligonucleotide
  Antisense strand to SEQ ID NO: 207108
uuucaaccuacuauaaaga

SEQ ID NO: 207110 - RNA, 19 nt, Artificial Sequence
  Description of Artificial Sequence: Synthetic oligonucleotide
  Sense strand starting at position 3612 of SEQ ID NO: 2669
uuuauaguagguugaaaug

SEQ ID NO: 207111 - RNA, 19 nt, Artificial Sequence
  Description of Artificial Sequence: Synthetic oligonucleotide
  Antisense strand to SEQ ID NO: 207110
cauuucaaccuacuauaaa

SEQ ID NO: 207112 - RNA, 19 nt, Artificial Sequence
  Description of Artificial Sequence: Synthetic oligonucleotide
  Sense strand starting at position 3622 of SEQ ID NO: 2669
guugaaaugucaguaucuc

SEQ ID NO: 207113 - RNA, 19 nt, Artificial Sequence
  Description of Artificial Sequence: Synthetic oligonucleotide
  Antisense strand to SEQ ID NO: 207112
gagauacugacauuucaac

SEQ ID NO: 207114 - RNA, 19 nt, Artificial Sequence
  Description of Artificial Sequence: Synthetic oligonucleotide
  Sense strand starting at position 3623 of SEQ ID NO: 2669
uugaaaugucaguaucucu

SEQ ID NO: 207115 - RNA, 19 nt, Artificial Sequence
  Description of Artificial Sequence: Synthetic oligonucleotide
  Antisense strand to SEQ ID NO: 207114
agagauacugacauuucaa

SEQ ID NO: 207116 - RNA, 19 nt, Artificial Sequence
  Description of Artificial Sequence: Synthetic oligonucleotide
  Sense strand starting at position 3628 of SEQ ID NO: 2669
augucaguaucucuuaaga

SEQ ID NO: 207117 - RNA, 19 nt, Artificial Sequence
  Description of Artificial Sequence: Synthetic oligonucleotide
  Antisense strand to SEQ ID NO: 207116
ucuuaagagauacugacau

SEQ ID NO: 207118 - RNA, 19 nt, Artificial Sequence
  Description of Artificial Sequence: Synthetic oligonucleotide
  Sense strand starting at position 3860 of SEQ ID NO: 2669
ucuggcaugacaugugaca

SEQ ID NO: 207119 - RNA, 19 nt, Artificial Sequence
  Description of Artificial Sequence: Synthetic oligonucleotide
  Antisense strand to SEQ ID NO: 207118
ugucacaugucaugccaga

SEQ ID NO: 207120 - RNA, 19 nt, Artificial Sequence
  Description of Artificial Sequence: Synthetic oligonucleotide
  Sense strand starting at position 3862 of SEQ ID NO: 2669
uggcaugacaugugacaaa

SEQ ID NO: 207121 - RNA, 19 nt, Artificial Sequence
  Description of Artificial Sequence: Synthetic oligonucleotide
  Antisense strand to SEQ ID NO: 207120
uuugucacaugucaugcca

SEQ ID NO: 207122 - RNA, 19 nt, Artificial Sequence
  Description of Artificial Sequence: Synthetic oligonucleotide
  Sense strand starting at position 3865 of SEQ ID NO: 2669
caugacaugugacaaagaa

SEQ ID NO: 207123 - RNA, 19 nt, Artificial Sequence
  Description of Artificial Sequence: Synthetic oligonucleotide
  Antisense strand to SEQ ID NO: 207122
uucuuugucacaugucaug

SEQ ID NO: 207124 - RNA, 19 nt, Artificial Sequence
  Description of Artificial Sequence: Synthetic oligonucleotide
  Sense strand starting at position 211 of SEQ ID NO: 2668
agguuauauguacacuuaa

SEQ ID NO: 207125 - RNA, 19 nt, Artificial Sequence
  Description of Artificial Sequence: Synthetic oligonucleotide
  Antisense strand to SEQ ID NO: 207124
uuaaguguacauauaaccu

SEQ ID NO: 207126 - RNA, 19 nt, Artificial Sequence
  Description of Artificial Sequence: Synthetic oligonucleotide
  Sense strand starting at position 340 of SEQ ID NO: 2668
aacauuuggugacauguaa

SEQ ID NO: 207127 - RNA, 19 nt, Artificial Sequence
  Description of Artificial Sequence: Synthetic oligonucleotide
  Antisense strand to SEQ ID NO: 207126
uuacaugucaccaaauguu

SEQ ID NO: 207128 - RNA, 19 nt, Artificial Sequence
  Description of Artificial Sequence: Synthetic oligonucleotide
  Sense strand starting at position 354 of SEQ ID NO: 2668
uguaauucucuccaugaag

SEQ ID NO: 207129 - RNA, 19 nt, Artificial Sequence
  Description of Artificial Sequence: Synthetic oligonucleotide
  Antisense strand to SEQ ID NO: 207128
cuucauggagagaauuaca

SEQ ID NO: 207130 - RNA, 19 nt, Artificial Sequence
  Description of Artificial Sequence: Synthetic oligonucleotide
  Sense strand starting at position 449 of SEQ ID NO: 2668
guuguucgugucagggaau

SEQ ID NO: 207131 - RNA, 19 nt, Artificial Sequence
  Description of Artificial Sequence: Synthetic oligonucleotide
  Antisense strand to SEQ ID NO: 207130
auucccugacacgaacaac

SEQ ID NO: 207132 - RNA, 19 nt, Artificial Sequence
  Description of Artificial Sequence: Synthetic oligonucleotide
  Sense strand starting at position 615 of SEQ ID NO: 2668
agggcuggaucccuagaua

SEQ ID NO: 207133 - RNA, 19 nt, Artificial Sequence
  Description of Artificial Sequence: Synthetic oligonucleotide
  Antisense strand to SEQ ID NO: 207132
uaucuagggauccagcccu

SEQ ID NO: 207134 - RNA, 19 nt, Artificial Sequence
  Description of Artificial Sequence: Synthetic oligonucleotide
  Sense strand starting at position 618 of SEQ ID NO: 2668
gcuggaucccuagauaguc

SEQ ID NO: 207135 - RNA, 19 nt, Artificial Sequence
  Description of Artificial Sequence: Synthetic oligonucleotide
  Antisense strand to SEQ ID NO: 207134
gacuaucuagggauccagc

SEQ ID NO: 207136 - RNA, 19 nt, Artificial Sequence
  Description of Artificial Sequence: Synthetic oligonucleotide
  Sense strand starting at position 623 of SEQ ID NO: 2668
aucccuagauagucucuua

SEQ ID NO: 207137 - RNA, 19 nt, Artificial Sequence
  Description of Artificial Sequence: Synthetic oligonucleotide
  Antisense strand to SEQ ID NO: 207136
uaagagacuaucuagggau

SEQ ID NO: 207138 - RNA, 19 nt, Artificial Sequence
  Description of Artificial Sequence: Synthetic oligonucleotide
  Sense strand starting at position 722 of SEQ ID NO: 2668
cuaagcaaguuucuagacu

SEQ ID NO: 207139 - RNA, 19 nt, Artificial Sequence
  Description of Artificial Sequence: Synthetic oligonucleotide
  Antisense strand to SEQ ID NO: 207138
agucuagaaacuugcuuag

SEQ ID NO: 207140 - RNA, 19 nt, Artificial Sequence
  Description of Artificial Sequence: Synthetic oligonucleotide
  Sense strand starting at position 730 of SEQ ID NO: 2668
guuucuagacuuggcauau

SEQ ID NO: 207141 - RNA, 19 nt, Artificial Sequence
  Description of Artificial Sequence: Synthetic oligonucleotide
  Antisense strand to SEQ ID NO: 207140
auaugccaagucuagaaac

SEQ ID NO: 207142 - RNA, 19 nt, Artificial Sequence
  Description of Artificial Sequence: Synthetic oligonucleotide
  Sense strand starting at position 734 of SEQ ID NO: 2668
cuagacuuggcauauguaa

SEQ ID NO: 207143 - RNA, 19 nt, Artificial Sequence
  Description of Artificial Sequence: Synthetic oligonucleotide
  Antisense strand to SEQ ID NO: 207142
uuacauaugccaagucuag

SEQ ID NO: 207144 - RNA, 19 nt, Artificial Sequence
  Description of Artificial Sequence: Synthetic oligonucleotide
  Sense strand starting at position 736 of SEQ ID NO: 2668
agacuuggcauauguaaug

SEQ ID NO: 207145 - RNA, 19 nt, Artificial Sequence
  Description of Artificial Sequence: Synthetic oligonucleotide
  Antisense strand to SEQ ID NO: 207144
cauuacauaugccaagucu

SEQ ID NO: 207146 - RNA, 19 nt, Artificial Sequence
  Description of Artificial Sequence: Synthetic oligonucleotide
  Sense strand starting at position 742 of SEQ ID NO: 2668
ggcauauguaaugguuuag

SEQ ID NO: 207147 - RNA, 19 nt, Artificial Sequence
  Description of Artificial Sequence: Synthetic oligonucleotide
  Antisense strand to SEQ ID NO: 207146
cuaaaccauuacauaugcc

SEQ ID NO: 207148 - RNA, 19 nt, Artificial Sequence
  Description of Artificial Sequence: Synthetic oligonucleotide
  Sense strand starting at position 746 of SEQ ID NO: 2668
uauguaaugguuuaguaac

SEQ ID NO: 207149 - RNA, 19 nt, Artificial Sequence
  Description of Artificial Sequence: Synthetic oligonucleotide
  Antisense strand to SEQ ID NO: 207148
guuacuaaaccauuacaua

SEQ ID NO: 207150 - RNA, 19 nt, Artificial Sequence
  Description of Artificial Sequence: Synthetic oligonucleotide
  Sense strand starting at position 790 of SEQ ID NO: 2668
cuuaaaugacugugggcau

SEQ ID NO: 207151 - RNA, 19 nt, Artificial Sequence
  Description of Artificial Sequence: Synthetic oligonucleotide
  Antisense strand to SEQ ID NO: 207150
augcccacagucauuuaag

SEQ ID NO: 207152 - RNA, 19 nt, Artificial Sequence
  Description of Artificial Sequence: Synthetic oligonucleotide
  Sense strand starting at position 803 of SEQ ID NO: 2668
gggcauuggacucauucua

SEQ ID NO: 207153 - RNA, 19 nt, Artificial Sequence
  Description of Artificial Sequence: Synthetic oligonucleotide
  Antisense strand to SEQ ID NO: 207152
uagaaugaguccaaugccc

SEQ ID NO: 207154 - RNA, 19 nt, Artificial Sequence
  Description of Artificial Sequence: Synthetic oligonucleotide
  Sense strand starting at position 1091 of SEQ ID NO: 2668
cucgaugugcccucgugau

SEQ ID NO: 207155 - RNA, 19 nt, Artificial Sequence
  Description of Artificial Sequence: Synthetic oligonucleotide
  Antisense strand to SEQ ID NO: 207154
aucacgagggcacaucgag

SEQ ID NO: 207156 - RNA, 19 nt, Artificial Sequence
  Description of Artificial Sequence: Synthetic oligonucleotide
  Sense strand starting at position 1164 of SEQ ID NO: 2668
gguccuccaucuccuauua

SEQ ID NO: 207157 - RNA, 19 nt, Artificial Sequence
  Description of Artificial Sequence: Synthetic oligonucleotide
  Antisense strand to SEQ ID NO: 207156
uaauaggagauggaggacc

SEQ ID NO: 207158 - RNA, 19 nt, Artificial Sequence
  Description of Artificial Sequence: Synthetic oligonucleotide
  Sense strand starting at position 1181 of SEQ ID NO: 2668
uauuauaccuagcugagga

SEQ ID NO: 207159 - RNA, 19 nt, Artificial Sequence
  Description of Artificial Sequence: Synthetic oligonucleotide
  Antisense strand to SEQ ID NO: 207158
uccucagcuagguauaaua

SEQ ID NO: 207160 - RNA, 19 nt, Artificial Sequence
  Description of Artificial Sequence: Synthetic oligonucleotide
  Sense strand starting at position 1228 of SEQ ID NO: 2668
cuaaacugcucuuugagag

SEQ ID NO: 207161 - RNA, 19 nt, Artificial Sequence
  Description of Artificial Sequence: Synthetic oligonucleotide
  Antisense strand to SEQ ID NO: 207160
cucucaaagagcaguuuag

SEQ ID NO: 207162 - RNA, 19 nt, Artificial Sequence
  Description of Artificial Sequence: Synthetic oligonucleotide
  Sense strand starting at position 1229 of SEQ ID NO: 2668
uaaacugcucuuugagagu

SEQ ID NO: 207163 - RNA, 19 nt, Artificial Sequence
  Description of Artificial Sequence: Synthetic oligonucleotide
  Antisense strand to SEQ ID NO: 207162
acucucaaagagcaguuua

SEQ ID NO: 207164 - RNA, 19 nt, Artificial Sequence
  Description of Artificial Sequence: Synthetic oligonucleotide
  Sense strand starting at position 1704 of SEQ ID NO: 2668
uaaggugugguauagaaac

SEQ ID NO: 207165 - RNA, 19 nt, Artificial Sequence
  Description of Artificial Sequence: Synthetic oligonucleotide
  Antisense strand to SEQ ID NO: 207164
guuucuauaccacaccuua

SEQ ID NO: 207166 - RNA, 19 nt, Artificial Sequence
  Description of Artificial Sequence: Synthetic oligonucleotide
  Sense strand starting at position 1706 of SEQ ID NO: 2668
aggugugguauagaaacuu

SEQ ID NO: 207167 - RNA, 19 nt, Artificial Sequence
  Description of Artificial Sequence: Synthetic oligonucleotide
  Antisense strand to SEQ ID NO: 207166
aaguuucuauaccacaccu

SEQ ID NO: 207168 - RNA, 19 nt, Artificial Sequence
  Description of Artificial Sequence: Synthetic oligonucleotide
  Sense strand starting at position 1787 of SEQ ID NO: 2668
aucauuacuuguucuguuu

SEQ ID NO: 207169 - RNA, 19 nt, Artificial Sequence
  Description of Artificial Sequence: Synthetic oligonucleotide
  Antisense strand to SEQ ID NO: 207168
aaacagaacaaguaaugau

SEQ ID NO: 207170 - RNA, 19 nt, Artificial Sequence
  Description of Artificial Sequence: Synthetic oligonucleotide
  Sense strand starting at position 1836 of SEQ ID NO: 2668
uugcuaaugugacuugaaa

SEQ ID NO: 207171 - RNA, 19 nt, Artificial Sequence
  Description of Artificial Sequence: Synthetic oligonucleotide
  Antisense strand to SEQ ID NO: 207170
uuucaagucacauuagcaa

SEQ ID NO: 207172 - RNA, 19 nt, Artificial Sequence
  Description of Artificial Sequence: Synthetic oligonucleotide
  Sense strand starting at position 1860 of SEQ ID NO: 2668
ucccaauuaucagcaugga

SEQ ID NO: 207173 - RNA, 19 nt, Artificial Sequence
  Description of Artificial Sequence: Synthetic oligonucleotide
  Antisense strand to SEQ ID NO: 207172
uccaugcugauaauuggga

SEQ ID NO: 207174 - RNA, 19 nt, Artificial Sequence
  Description of Artificial Sequence: Synthetic oligonucleotide
  Sense strand starting at position 1861 of SEQ ID NO: 2668
cccaauuaucagcauggau

SEQ ID NO: 207175 - RNA, 19 nt, Artificial Sequence
  Description of Artificial Sequence: Synthetic oligonucleotide
  Antisense strand to SEQ ID NO: 207174
auccaugcugauaauuggg

SEQ ID NO: 207176 - RNA, 19 nt, Artificial Sequence
  Description of Artificial Sequence: Synthetic oligonucleotide
  Sense strand starting at position 2042 of SEQ ID NO: 2668
gcucaauuugaaugcaguu

SEQ ID NO: 207177 - RNA, 19 nt, Artificial Sequence
  Description of Artificial Sequence: Synthetic oligonucleotide
  Antisense strand to SEQ ID NO: 207176
aacugcauucaaauugagc

SEQ ID NO: 207178 - RNA, 19 nt, Artificial Sequence
  Description of Artificial Sequence: Synthetic oligonucleotide
  Sense strand starting at position 2238 of SEQ ID NO: 2668
ggacaugugugaucacgca

SEQ ID NO: 207179 - RNA, 19 nt, Artificial Sequence
  Description of Artificial Sequence: Synthetic oligonucleotide
  Antisense strand to SEQ ID NO: 207178
ugcgugaucacacaugucc

SEQ ID NO: 207180 - RNA, 19 nt, Artificial Sequence
  Description of Artificial Sequence: Synthetic oligonucleotide
  Sense strand starting at position 2466 of SEQ ID NO: 2668
uucugagagguccagguua

SEQ ID NO: 207181 - RNA, 19 nt, Artificial Sequence
  Description of Artificial Sequence: Synthetic oligonucleotide
  Antisense strand to SEQ ID NO: 207180
uaaccuggaccucucagaa

SEQ ID NO: 207182 - RNA, 19 nt, Artificial Sequence
  Description of Artificial Sequence: Synthetic oligonucleotide
  Sense strand starting at position 2468 of SEQ ID NO: 2668
cugagagguccagguuaga

SEQ ID NO: 207183 - RNA, 19 nt, Artificial Sequence
  Description of Artificial Sequence: Synthetic oligonucleotide
  Antisense strand to SEQ ID NO: 207182
ucuaaccuggaccucucag

SEQ ID NO: 207184 - RNA, 19 nt, Artificial Sequence
  Description of Artificial Sequence: Synthetic oligonucleotide
  Sense strand starting at position 2494 of SEQ ID NO: 2668
ugaaacugucuugaccauu

SEQ ID NO: 207185 - RNA, 19 nt, Artificial Sequence
  Description of Artificial Sequence: Synthetic oligonucleotide
  Antisense strand to SEQ ID NO: 207184
aauggucaagacaguuuca

SEQ ID NO: 207186 - RNA, 19 nt, Artificial Sequence
  Description of Artificial Sequence: Synthetic oligonucleotide
  Sense strand starting at position 2504 of SEQ ID NO: 2668
uugaccauucuuugagcaa

SEQ ID NO: 207187 - RNA, 19 nt, Artificial Sequence
  Description of Artificial Sequence: Synthetic oligonucleotide
  Antisense strand to SEQ ID NO: 207186
uugcucaaagaauggucaa

SEQ ID NO: 207188 - RNA, 19 nt, Artificial Sequence
  Description of Artificial Sequence: Synthetic oligonucleotide
  Sense strand starting at position 2507 of SEQ ID NO: 2668
accauucuuugagcaagga

SEQ ID NO: 207189 - RNA, 19 nt, Artificial Sequence
  Description of Artificial Sequence: Synthetic oligonucleotide
  Antisense strand to SEQ ID NO: 207188
uccuugcucaaagaauggu

SEQ ID NO: 207190 - RNA, 19 nt, Artificial Sequence
  Description of Artificial Sequence: Synthetic oligonucleotide
  Sense strand starting at position 2508 of SEQ ID NO: 2668
ccauucuuugagcaaggau

SEQ ID NO: 207191 - RNA, 19 nt, Artificial Sequence
  Description of Artificial Sequence: Synthetic oligonucleotide
  Antisense strand to SEQ ID NO: 207190
auccuugcucaaagaaugg

SEQ ID NO: 207192 - RNA, 19 nt, Artificial Sequence
  Description of Artificial Sequence: Synthetic oligonucleotide
  Sense strand starting at position 2611 of SEQ ID NO: 2668
uugguauacuuccuucuua

SEQ ID NO: 207193 - RNA, 19 nt, Artificial Sequence
  Description of Artificial Sequence: Synthetic oligonucleotide
  Antisense strand to SEQ ID NO: 207192
uaagaaggaaguauaccaa

SEQ ID NO: 207194 - RNA, 19 nt, Artificial Sequence
  Description of Artificial Sequence: Synthetic oligonucleotide
  Sense strand starting at position 2612 of SEQ ID NO: 2668
ugguauacuuccuucuuau

SEQ ID NO: 207195 - RNA, 19 nt, Artificial Sequence
  Description of Artificial Sequence: Synthetic oligonucleotide
  Antisense strand to SEQ ID NO: 207194
auaagaaggaaguauacca

SEQ ID NO: 207196 - RNA, 19 nt, Artificial Sequence
  Description of Artificial Sequence: Synthetic oligonucleotide
  Sense strand starting at position 2749 of SEQ ID NO: 2668
cuagucauucuauggagcu

SEQ ID NO: 207197 - RNA, 19 nt, Artificial Sequence
  Description of Artificial Sequence: Synthetic oligonucleotide
  Antisense strand to SEQ ID NO: 207196
agcuccauagaaugacuag

SEQ ID NO: 207198 - RNA, 19 nt, Artificial Sequence
  Description of Artificial Sequence: Synthetic oligonucleotide
  Sense strand starting at position 2929 of SEQ ID NO: 2668
augcaaagauaguuuagua

SEQ ID NO: 207199 - RNA, 19 nt, Artificial Sequence
  Description of Artificial Sequence: Synthetic oligonucleotide
  Antisense strand to SEQ ID NO: 207198
uacuaaacuaucuuugcau

SEQ ID NO: 207200 - RNA, 19 nt, Artificial Sequence
  Description of Artificial Sequence: Synthetic oligonucleotide
  Sense strand starting at position 3186 of SEQ ID NO: 2668
cuguuaauggacugauauc

SEQ ID NO: 207201 - RNA, 19 nt, Artificial Sequence
  Description of Artificial Sequence: Synthetic oligonucleotide
  Antisense strand to SEQ ID NO: 207200
gauaucaguccauuaacag

SEQ ID NO: 207202 - RNA, 19 nt, Artificial Sequence
  Description of Artificial Sequence: Synthetic oligonucleotide
  Sense strand starting at position 3619 of SEQ ID NO: 2668
acccuugcucauggcagaa

SEQ ID NO: 207203 - RNA, 19 nt, Artificial Sequence
  Description of Artificial Sequence: Synthetic oligonucleotide
  Antisense strand to SEQ ID NO: 207202
uucugccaugagcaagggu

SEQ ID NO: 207204 - RNA, 19 nt, Artificial Sequence
  Description of Artificial Sequence: Synthetic oligonucleotide
  Sense strand starting at position 266 of SEQ ID NO: 2670
ggugguugugcccacauuu

SEQ ID NO: 207205 - RNA, 19 nt, Artificial Sequence
  Description of Artificial Sequence: Synthetic oligonucleotide
  Antisense strand to SEQ ID NO: 207204
aaaugugggcacaaccacc

SEQ ID NO: 207206 - RNA, 19 nt, Artificial Sequence
  Description of Artificial Sequence: Synthetic oligonucleotide
  Sense strand starting at position 441 of SEQ ID NO: 2670
agcaacugaucuuugagaa

SEQ ID NO: 207207 - RNA, 19 nt, Artificial Sequence
  Description of Artificial Sequence: Synthetic oligonucleotide
  Antisense strand to SEQ ID NO: 207206
uucucaaagaucaguugcu

SEQ ID NO: 207208 - RNA, 19 nt, Artificial Sequence
  Description of Artificial Sequence: Synthetic oligonucleotide
  Sense strand starting at position 442 of SEQ ID NO: 2670
gcaacugaucuuugagaag

SEQ ID NO: 207209 - RNA, 19 nt, Artificial Sequence
  Description of Artificial Sequence: Synthetic oligonucleotide
  Antisense strand to SEQ ID NO: 207208
cuucucaaagaucaguugc

SEQ ID NO: 207210 - RNA, 19 nt, Artificial Sequence
  Description of Artificial Sequence: Synthetic oligonucleotide
  Sense strand starting at position 514 of SEQ ID NO: 2670
ugcugacuaggagauguau

SEQ ID NO: 207211 - RNA, 19 nt, Artificial Sequence
  Description of Artificial Sequence: Synthetic oligonucleotide
  Antisense strand to SEQ ID NO: 207210
auacaucuccuagucagca

SEQ ID NO: 207212 - RNA, 19 nt, Artificial Sequence
  Description of Artificial Sequence: Synthetic oligonucleotide
  Sense strand starting at position 523 of SEQ ID NO: 2670
ggagauguauuugacugca

SEQ ID NO: 207213 - RNA, 19 nt, Artificial Sequence
  Description of Artificial Sequence: Synthetic oligonucleotide
  Antisense strand to SEQ ID NO: 207212
ugcagucaaauacaucucc

SEQ ID NO: 207214 - RNA, 19 nt, Artificial Sequence
  Description of Artificial Sequence: Synthetic oligonucleotide
  Sense strand starting at position 539 of SEQ ID NO: 2670
gcaaaucuggcccacacaa

SEQ ID NO: 207215 - RNA, 19 nt, Artificial Sequence
  Description of Artificial Sequence: Synthetic oligonucleotide
  Antisense strand to SEQ ID NO: 207214
uugugugggccagauuugc

SEQ ID NO: 207216 - RNA, 19 nt, Artificial Sequence
  Description of Artificial Sequence: Synthetic oligonucleotide
  Sense strand starting at position 636 of SEQ ID NO: 2670
gcagcucugaauugugauu

SEQ ID NO: 207217 - RNA, 19 nt, Artificial Sequence
  Description of Artificial Sequence: Synthetic oligonucleotide
  Antisense strand to SEQ ID NO: 207216
aaucacaauucagagcugc

SEQ ID NO: 207218 - RNA, 19 nt, Artificial Sequence
  Description of Artificial Sequence: Synthetic oligonucleotide
  Sense strand starting at position 824 of SEQ ID NO: 2670
cgugaccuacauuaaguua

SEQ ID NO: 207219 - RNA, 19 nt, Artificial Sequence
  Description of Artificial Sequence: Synthetic oligonucleotide
  Antisense strand to SEQ ID NO: 207218
uaacuuaauguaggucacg

SEQ ID NO: 207220 - RNA, 19 nt, Artificial Sequence
  Description of Artificial Sequence: Synthetic oligonucleotide
  Sense strand starting at position 843 of SEQ ID NO: 2670
gcaaguuaagucugaaagc

SEQ ID NO: 207221 - RNA, 19 nt, Artificial Sequence
  Description of Artificial Sequence: Synthetic oligonucleotide
  Antisense strand to SEQ ID NO: 207220
gcuuucagacuuaacuugc

SEQ ID NO: 207222 - RNA, 19 nt, Artificial Sequence
  Description of Artificial Sequence: Synthetic oligonucleotide
  Sense strand starting at position 898 of SEQ ID NO: 2670
ggcagagauuuguagucca

SEQ ID NO: 207223 - RNA, 19 nt, Artificial Sequence
  Description of Artificial Sequence: Synthetic oligonucleotide
  Antisense strand to SEQ ID NO: 207222
uggacuacaaaucucugcc

SEQ ID NO: 207224 - RNA, 19 nt, Artificial Sequence
  Description of Artificial Sequence: Synthetic oligonucleotide
  Sense strand starting at position 931 of SEQ ID NO: 2670
aauuaugaauuagagagga

SEQ ID NO: 207225 - RNA, 19 nt, Artificial Sequence
  Description of Artificial Sequence: Synthetic oligonucleotide
  Antisense strand to SEQ ID NO: 207224
uccucucuaauucauaauu

SEQ ID NO: 207226 - RNA, 19 nt, Artificial Sequence
  Description of Artificial Sequence: Synthetic oligonucleotide
  Sense strand starting at position 1030 of SEQ ID NO: 2670
agagaagucuuccuuuagc

SEQ ID NO: 207227 - RNA, 19 nt, Artificial Sequence
  Description of Artificial Sequence: Synthetic oligonucleotide
  Antisense strand to SEQ ID NO: 207226
gcuaaaggaagacuucucu

SEQ ID NO: 207228 - RNA, 19 nt, Artificial Sequence
  Description of Artificial Sequence: Synthetic oligonucleotide
  Sense strand starting at position 1108 of SEQ ID NO: 2670
uggagauuaggcuguguaa

SEQ ID NO: 207229 - RNA, 19 nt, Artificial Sequence
  Description of Artificial Sequence: Synthetic oligonucleotide
  Antisense strand to SEQ ID NO: 207228
uuacacagccuaaucucca

SEQ ID NO: 207230 - RNA, 19 nt, Artificial Sequence
  Description of Artificial Sequence: Synthetic oligonucleotide
  Sense strand starting at position 1110 of SEQ ID NO: 2670
gagauuaggcuguguaaca

SEQ ID NO: 207231 - RNA, 19 nt, Artificial Sequence
  Description of Artificial Sequence: Synthetic oligonucleotide
  Antisense strand to SEQ ID NO: 207230
uguuacacagccuaaucuc

SEQ ID NO: 207232 - RNA, 19 nt, Artificial Sequence
  Description of Artificial Sequence: Synthetic oligonucleotide
  Sense strand starting at position 1111 of SEQ ID NO: 2670
agauuaggcuguguaacaa

SEQ ID NO: 207233 - RNA, 19 nt, Artificial Sequence
  Description of Artificial Sequence: Synthetic oligonucleotide
  Antisense strand to SEQ ID NO: 207232
uuguuacacagccuaaucu

SEQ ID NO: 207234 - RNA, 19 nt, Artificial Sequence
  Description of Artificial Sequence: Synthetic oligonucleotide
  Sense strand starting at position 1207 of SEQ ID NO: 2670
cagucaaagucccugugau

SEQ ID NO: 207235 - RNA, 19 nt, Artificial Sequence
  Description of Artificial Sequence: Synthetic oligonucleotide
  Antisense strand to SEQ ID NO: 207234
aucacagggacuuugacug

SEQ ID NO: 207236 - RNA, 19 nt, Artificial Sequence
  Description of Artificial Sequence: Synthetic oligonucleotide
  Sense strand starting at position 1208 of SEQ ID NO: 2670
agucaaagucccugugaug

SEQ ID NO: 207237 - RNA, 19 nt, Artificial Sequence
  Description of Artificial Sequence: Synthetic oligonucleotide
  Antisense strand to SEQ ID NO: 207236
caucacagggacuuugacu

SEQ ID NO: 207238 - RNA, 19 nt, Artificial Sequence
  Description of Artificial Sequence: Synthetic oligonucleotide
  Sense strand starting at position 1322 of SEQ ID NO: 2670
cuuguucucugcuuggaau

SEQ ID NO: 207239 - RNA, 19 nt, Artificial Sequence
  Description of Artificial Sequence: Synthetic oligonucleotide
  Antisense strand to SEQ ID NO: 207238
auuccaagcagagaacaag

SEQ ID NO: 207240 - RNA, 19 nt, Artificial Sequence
  Description of Artificial Sequence: Synthetic oligonucleotide
  Sense strand starting at position 1539 of SEQ ID NO: 2670
ggucuagaacagugcaagu

SEQ ID NO: 207241 - RNA, 19 nt, Artificial Sequence
  Description of Artificial Sequence: Synthetic oligonucleotide
  Antisense strand to SEQ ID NO: 207240
acuugcacuguucuagacc

SEQ ID NO: 207242 - RNA, 19 nt, Artificial Sequence
  Description of Artificial Sequence: Synthetic oligonucleotide
  Sense strand starting at position 1541 of SEQ ID NO: 2670
ucuagaacagugcaaguua

SEQ ID NO: 207243 - RNA, 19 nt, Artificial Sequence
  Description of Artificial Sequence: Synthetic oligonucleotide
  Antisense strand to SEQ ID NO: 207242
uaacuugcacuguucuaga

SEQ ID NO: 207244 - RNA, 19 nt, Artificial Sequence
  Description of Artificial Sequence: Synthetic oligonucleotide
  Sense strand starting at position 1618 of SEQ ID NO: 2670
cccguccaaguuuguuaaa

SEQ ID NO: 207245 - RNA, 19 nt, Artificial Sequence
  Description of Artificial Sequence: Synthetic oligonucleotide
  Antisense strand to SEQ ID NO: 207244
uuuaacaaacuuggacggg

SEQ ID NO: 207246 - RNA, 19 nt, Artificial Sequence
  Description of Artificial Sequence: Synthetic oligonucleotide
  Sense strand starting at position 1619 of SEQ ID NO: 2670
ccguccaaguuuguuaaau

SEQ ID NO: 207247 - RNA, 19 nt, Artificial Sequence
  Description of Artificial Sequence: Synthetic oligonucleotide
  Antisense strand to SEQ ID NO: 207246
auuuaacaaacuuggacgg

SEQ ID NO: 207248 - RNA, 19 nt, Artificial Sequence
  Description of Artificial Sequence: Synthetic oligonucleotide
  Sense strand starting at position 1620 of SEQ ID NO: 2670
cguccaaguuuguuaaauc

SEQ ID NO: 207249 - RNA, 19 nt, Artificial Sequence
  Description of Artificial Sequence: Synthetic oligonucleotide
  Antisense strand to SEQ ID NO: 207248
gauuuaacaaacuuggacg

SEQ ID NO: 207250 - RNA, 19 nt, Artificial Sequence
  Description of Artificial Sequence: Synthetic oligonucleotide
  Sense strand starting at position 1739 of SEQ ID NO: 2670
agucaaagaacgugccaaa

SEQ ID NO: 207251 - RNA, 19 nt, Artificial Sequence
  Description of Artificial Sequence: Synthetic oligonucleotide
  Antisense strand to SEQ ID NO: 207250
uuuggcacguucuuugacu

SEQ ID NO: 207252 - RNA, 19 nt, Artificial Sequence
  Description of Artificial Sequence: Synthetic oligonucleotide
  Sense strand starting at position 1898 of SEQ ID NO: 2670
cucagaguuuacuugucca

SEQ ID NO: 207253 - RNA, 19 nt, Artificial Sequence
  Description of Artificial Sequence: Synthetic oligonucleotide
  Antisense strand to SEQ ID NO: 207252
uggacaaguaaacucugag

SEQ ID NO: 207254 - RNA, 19 nt, Artificial Sequence
  Description of Artificial Sequence: Synthetic oligonucleotide
  Sense strand starting at position 1901 of SEQ ID NO: 2670
agaguuuacuuguccagag

SEQ ID NO: 207255 - RNA, 19 nt, Artificial Sequence
  Description of Artificial Sequence: Synthetic oligonucleotide
  Antisense strand to SEQ ID NO: 207254
cucuggacaaguaaacucu

SEQ ID NO: 207256 - RNA, 19 nt, Artificial Sequence
  Description of Artificial Sequence: Synthetic oligonucleotide
  Sense strand starting at position 1902 of SEQ ID NO: 2670
gaguuuacuuguccagaga

SEQ ID NO: 207257 - RNA, 19 nt, Artificial Sequence
  Description of Artificial Sequence: Synthetic oligonucleotide
  Antisense strand to SEQ ID NO: 207256
ucucuggacaaguaaacuc

SEQ ID NO: 207258 - RNA, 19 nt, Artificial Sequence
  Description of Artificial Sequence: Synthetic oligonucleotide
  Sense strand starting at position 1903 of SEQ ID NO: 2670
aguuuacuuguccagagau

SEQ ID NO: 207259 - RNA, 19 nt, Artificial Sequence
  Description of Artificial Sequence: Synthetic oligonucleotide
  Antisense strand to SEQ ID NO: 207258
aucucuggacaaguaaacu

SEQ ID NO: 207260 - RNA, 19 nt, Artificial Sequence
  Description of Artificial Sequence: Synthetic oligonucleotide
  Sense strand starting at position 2956 of SEQ ID NO: 2670
gacagaggucgguguugaa

SEQ ID NO: 207261 - RNA, 19 nt, Artificial Sequence
  Description of Artificial Sequence: Synthetic oligonucleotide
  Antisense strand to SEQ ID NO: 207260
uucaacaccgaccucuguc

SEQ ID NO: 207262 - RNA, 19 nt, Artificial Sequence
  Description of Artificial Sequence: Synthetic oligonucleotide
  Sense strand starting at position 3248 of SEQ ID NO: 2670
uugugagagcucuggauau

SEQ ID NO: 207263 - RNA, 19 nt, Artificial Sequence
  Description of Artificial Sequence: Synthetic oligonucleotide
  Antisense strand to SEQ ID NO: 207262
auauccagagcucucacaa

SEQ ID NO: 207264 - RNA, 19 nt, Artificial Sequence
  Description of Artificial Sequence: Synthetic oligonucleotide
  Sense strand starting at position 3250 of SEQ ID NO: 2670
gugagagcucuggauauau

SEQ ID NO: 207265 - RNA, 19 nt, Artificial Sequence
  Description of Artificial Sequence: Synthetic oligonucleotide
  Antisense strand to SEQ ID NO: 207264
auauauccagagcucucac

SEQ ID NO: 207266 - RNA, 19 nt, Artificial Sequence
  Description of Artificial Sequence: Synthetic oligonucleotide
  Sense strand starting at position 3274 of SEQ ID NO: 2670
ucgauugaaugagugaacu

SEQ ID NO: 207267 - RNA, 19 nt, Artificial Sequence
  Description of Artificial Sequence: Synthetic oligonucleotide
  Antisense strand to SEQ ID NO: 207266
aguucacucauucaaucga

SEQ ID NO: 207268 - RNA, 19 nt, Artificial Sequence
  Description of Artificial Sequence: Synthetic oligonucleotide
  Sense strand starting at position 3308 of SEQ ID NO: 2670
ucuuguguugcugaaucuu

SEQ ID NO: 207269 - RNA, 19 nt, Artificial Sequence
  Description of Artificial Sequence: Synthetic oligonucleotide
  Antisense strand to SEQ ID NO: 207268
aagauucagcaacacaaga

SEQ ID NO: 207270 - RNA, 19 nt, Artificial Sequence
  Description of Artificial Sequence: Synthetic oligonucleotide
  Sense strand starting at position 3496 of SEQ ID NO: 2670
uuccauuuaggcugaguuu

SEQ ID NO: 207271 - RNA, 19 nt, Artificial Sequence
  Description of Artificial Sequence: Synthetic oligonucleotide
  Antisense strand to SEQ ID NO: 207270
aaacucagccuaaauggaa

SEQ ID NO: 207272 - RNA, 19 nt, Artificial Sequence
  Description of Artificial Sequence: Synthetic oligonucleotide
  Sense strand starting at position 3609 of SEQ ID NO: 2670
gcgacauaaauacagguau

SEQ ID NO: 207273 - RNA, 19 nt, Artificial Sequence
  Description of Artificial Sequence: Synthetic oligonucleotide
  Antisense strand to SEQ ID NO: 207272
auaccuguauuuaugucgc

SEQ ID NO: 207274 - RNA, 19 nt, Artificial Sequence
  Description of Artificial Sequence: Synthetic oligonucleotide
  Sense strand starting at position 3645 of SEQ ID NO: 2670
agggcaucugcucaucaaa

SEQ ID NO: 207275 - RNA, 19 nt, Artificial Sequence
  Description of Artificial Sequence: Synthetic oligonucleotide
  Antisense strand to SEQ ID NO: 207274
uuugaugagcagaugcccu

SEQ ID NO: 207276 - RNA, 19 nt, Artificial Sequence
  Description of Artificial Sequence: Synthetic oligonucleotide
  Sense strand starting at position 3744 of SEQ ID NO: 2670
uggugaugguuccugaggu

SEQ ID NO: 207277 - RNA, 19 nt, Artificial Sequence
  Description of Artificial Sequence: Synthetic oligonucleotide
  Antisense strand to SEQ ID NO: 207276
accucaggaaccaucacca

SEQ ID NO: 207278 - RNA, 19 nt, Artificial Sequence
  Description of Artificial Sequence: Synthetic oligonucleotide
  Sense strand starting at position 3787 of SEQ ID NO: 2670
cagugucuccaguaguaac

SEQ ID NO: 207279 - RNA, 19 nt, Artificial Sequence
  Description of Artificial Sequence: Synthetic oligonucleotide
  Antisense strand to SEQ ID NO: 207278
guuacuacuggagacacug

SEQ ID NO: 207280 - RNA, 19 nt, Artificial Sequence
  Description of Artificial Sequence: Synthetic oligonucleotide
  Sense strand starting at position 3830 of SEQ ID NO: 2670
ggucuuuacugguuaucac

SEQ ID NO: 207281 - RNA, 19 nt, Artificial Sequence
  Description of Artificial Sequence: Synthetic oligonucleotide
  Antisense strand to SEQ ID NO: 207280
gugauaaccaguaaagacc

SEQ ID NO: 207282 - RNA, 19 nt, Artificial Sequence
  Description of Artificial Sequence: Synthetic oligonucleotide
  Sense strand starting at position 3919 of SEQ ID NO: 2670
ucaguaguaucauuguuga

SEQ ID NO: 207283 - RNA, 19 nt, Artificial Sequence
  Description of Artificial Sequence: Synthetic oligonucleotide
  Antisense strand to SEQ ID NO: 207282
ucaacaaugauacuacuga

SEQ ID NO: 207284 - RNA, 19 nt, Artificial Sequence
  Description of Artificial Sequence: Synthetic oligonucleotide
  Sense strand starting at position 533 of SEQ ID NO: 2671
uuccuagggauauguaaug

SEQ ID NO: 207285 - RNA, 19 nt, Artificial Sequence
  Description of Artificial Sequence: Synthetic oligonucleotide
  Antisense strand to SEQ ID NO: 207284
cauuacauaucccuaggaa

SEQ ID NO: 207286 - RNA, 19 nt, Artificial Sequence
  Description of Artificial Sequence: Synthetic oligonucleotide
  Sense strand starting at position 696 of SEQ ID NO: 2671
ugucauucuccagggcaua

SEQ ID NO: 207287 - RNA, 19 nt, Artificial Sequence
  Description of Artificial Sequence: Synthetic oligonucleotide
  Antisense strand to SEQ ID NO: 207286
uaugcccuggagaaugaca

SEQ ID NO: 207288 - RNA, 19 nt, Artificial Sequence
  Description of Artificial Sequence: Synthetic oligonucleotide
  Sense strand starting at position 697 of SEQ ID NO: 2671
gucauucuccagggcauau

SEQ ID NO: 207289 - RNA, 19 nt, Artificial Sequence
  Description of Artificial Sequence: Synthetic oligonucleotide
  Antisense strand to SEQ ID NO: 207288
auaugcccuggagaaugac

SEQ ID NO: 207290 - RNA, 19 nt, Artificial Sequence
  Description of Artificial Sequence: Synthetic oligonucleotide
  Sense strand starting at position 821 of SEQ ID NO: 2671
cuuuccaccuaguuuagau

SEQ ID NO: 207291 - RNA, 19 nt, Artificial Sequence
  Description of Artificial Sequence: Synthetic oligonucleotide
  Antisense strand to SEQ ID NO: 207290
aucuaaacuagguggaaag

SEQ ID NO: 207292 - RNA, 19 nt, Artificial Sequence
  Description of Artificial Sequence: Synthetic oligonucleotide
  Sense strand starting at position 829 of SEQ ID NO: 2671
cuaguuuagauaggaaugu

SEQ ID NO: 207293 - RNA, 19 nt, Artificial Sequence
  Description of Artificial Sequence: Synthetic oligonucleotide
  Antisense strand to SEQ ID NO: 207292
acauuccuaucuaaacuag

SEQ ID NO: 207294 - RNA, 19 nt, Artificial Sequence
  Description of Artificial Sequence: Synthetic oligonucleotide
  Sense strand starting at position 833 of SEQ ID NO: 2671
uuuagauaggaauguccaa

SEQ ID NO: 207295 - RNA, 19 nt, Artificial Sequence
  Description of Artificial Sequence: Synthetic oligonucleotide
  Antisense strand to SEQ ID NO: 207294
uuggacauuccuaucuaaa

SEQ ID NO: 207296 - RNA, 19 nt, Artificial Sequence
  Description of Artificial Sequence: Synthetic oligonucleotide
  Sense strand starting at position 1174 of SEQ ID NO: 2671
cgcccaacugaauauuaaa

SEQ ID NO: 207297 - RNA, 19 nt, Artificial Sequence
  Description of Artificial Sequence: Synthetic oligonucleotide
  Antisense strand to SEQ ID NO: 207296
uuuaauauucaguugggcg

SEQ ID NO: 207298 - RNA, 19 nt, Artificial Sequence
  Description of Artificial Sequence: Synthetic oligonucleotide
  Sense strand starting at position 1304 of SEQ ID NO: 2671
cuggcugaauauuauuuaa

SEQ ID NO: 207299 - RNA, 19 nt, Artificial Sequence
  Description of Artificial Sequence: Synthetic oligonucleotide
  Antisense strand to SEQ ID NO: 207298
uuaaauaauauucagccag

SEQ ID NO: 207300 - RNA, 19 nt, Artificial Sequence
  Description of Artificial Sequence: Synthetic oligonucleotide
  Sense strand starting at position 1440 of SEQ ID NO: 2671
uucucuguuucuguugaaa

SEQ ID NO: 207301 - RNA, 19 nt, Artificial Sequence
  Description of Artificial Sequence: Synthetic oligonucleotide
  Antisense strand to SEQ ID NO: 207300
uuucaacagaaacagagaa

SEQ ID NO: 207302 - RNA, 19 nt, Artificial Sequence
  Description of Artificial Sequence: Synthetic oligonucleotide
  Sense strand starting at position 1443 of SEQ ID NO: 2671
ucuguuucuguugaaauga

SEQ ID NO: 207303 - RNA, 19 nt, Artificial Sequence
  Description of Artificial Sequence: Synthetic oligonucleotide
  Antisense strand to SEQ ID NO: 207302
ucauuucaacagaaacaga

SEQ ID NO: 207304 - RNA, 19 nt, Artificial Sequence
  Description of Artificial Sequence: Synthetic oligonucleotide
  Sense strand starting at position 1496 of SEQ ID NO: 2671
acguauacccuuuaagacu

SEQ ID NO: 207305 - RNA, 19 nt, Artificial Sequence
  Description of Artificial Sequence: Synthetic oligonucleotide
  Antisense strand to SEQ ID NO: 207304
agucuuaaaggguauacgu

SEQ ID NO: 207306 - RNA, 19 nt, Artificial Sequence
  Description of Artificial Sequence: Synthetic oligonucleotide
  Sense strand starting at position 1505 of SEQ ID NO: 2671
cuuuaagacucaguauuag

SEQ ID NO: 207307 - RNA, 19 nt, Artificial Sequence
  Description of Artificial Sequence: Synthetic oligonucleotide
  Antisense strand to SEQ ID NO: 207306
cuaauacugagucuuaaag

SEQ ID NO: 207308 - RNA, 19 nt, Artificial Sequence
  Description of Artificial Sequence: Synthetic oligonucleotide
  Sense strand starting at position 1556 of SEQ ID NO: 2671
auuauccuaguguaauaga

SEQ ID NO: 207309 - RNA, 19 nt, Artificial Sequence
  Description of Artificial Sequence: Synthetic oligonucleotide
  Antisense strand to SEQ ID NO: 207308
ucuauuacacuaggauaau

SEQ ID NO: 207310 - RNA, 19 nt, Artificial Sequence
  Description of Artificial Sequence: Synthetic oligonucleotide
  Sense strand starting at position 1690 of SEQ ID NO: 2671
auuccaagcuguuugggaa

SEQ ID NO: 207311 - RNA, 19 nt, Artificial Sequence
  Description of Artificial Sequence: Synthetic oligonucleotide
  Antisense strand to SEQ ID NO: 207310
uucccaaacagcuuggaau

SEQ ID NO: 207312 - RNA, 19 nt, Artificial Sequence
  Description of Artificial Sequence: Synthetic oligonucleotide
  Sense strand starting at position 1691 of SEQ ID NO: 2671
uuccaagcuguuugggaau

SEQ ID NO: 207313 - RNA, 19 nt, Artificial Sequence
  Description of Artificial Sequence: Synthetic oligonucleotide
  Antisense strand to SEQ ID NO: 207312
auucccaaacagcuuggaa

SEQ ID NO: 207314 - RNA, 19 nt, Artificial Sequence
  Description of Artificial Sequence: Synthetic oligonucleotide
  Sense strand starting at position 1988 of SEQ ID NO: 2671
ggucgguuuggugggagaa

SEQ ID NO: 207315 - RNA, 19 nt, Artificial Sequence
  Description of Artificial Sequence: Synthetic oligonucleotide
  Antisense strand to SEQ ID NO: 207314
uucucccaccaaaccgacc

SEQ ID NO: 207316 - RNA, 19 nt, Artificial Sequence
  Description of Artificial Sequence: Synthetic oligonucleotide
  Sense strand starting at position 1989 of SEQ ID NO: 2671
gucgguuuggugggagaau

SEQ ID NO: 207317 - RNA, 19 nt, Artificial Sequence
  Description of Artificial Sequence: Synthetic oligonucleotide
  Antisense strand to SEQ ID NO: 207316
auucucccaccaaaccgac

SEQ ID NO: 207318 - RNA, 19 nt, Artificial Sequence
  Description of Artificial Sequence: Synthetic oligonucleotide
  Sense strand starting at position 2001 of SEQ ID NO: 2671
ggagaaugaugucacaaag

SEQ ID NO: 207319 - RNA, 19 nt, Artificial Sequence
  Description of Artificial Sequence: Synthetic oligonucleotide
  Antisense strand to SEQ ID NO: 207318
cuuugugacaucauucucc

SEQ ID NO: 207320 - RNA, 19 nt, Artificial Sequence
  Description of Artificial Sequence: Synthetic oligonucleotide
  Sense strand starting at position 2030 of SEQ ID NO: 2671
aaaggucugcgauagccaa

SEQ ID NO: 207321 - RNA, 19 nt, Artificial Sequence
  Description of Artificial Sequence: Synthetic oligonucleotide
  Antisense strand to SEQ ID NO: 207320
uuggcuaucgcagaccuuu

SEQ ID NO: 207322 - RNA, 19 nt, Artificial Sequence
  Description of Artificial Sequence: Synthetic oligonucleotide
  Sense strand starting at position 2091 of SEQ ID NO: 2671
ggugguaggaaagguguaa

SEQ ID NO: 207323 - RNA, 19 nt, Artificial Sequence
  Description of Artificial Sequence: Synthetic oligonucleotide
  Antisense strand to SEQ ID NO: 207322
uuacaccuuuccuaccacc

SEQ ID NO: 207324 - RNA, 19 nt, Artificial Sequence
  Description of Artificial Sequence: Synthetic oligonucleotide
  Sense strand starting at position 2134 of SEQ ID NO: 2671
ggaggugaaaucugcaaga

SEQ ID NO: 207325 - RNA, 19 nt, Artificial Sequence
  Description of Artificial Sequence: Synthetic oligonucleotide
  Antisense strand to SEQ ID NO: 207324
ucuugcagauuucaccucc

SEQ ID NO: 207326 - RNA, 19 nt, Artificial Sequence
  Description of Artificial Sequence: Synthetic oligonucleotide
  Sense strand starting at position 2147 of SEQ ID NO: 2671
gcaagacagacaugauagu

SEQ ID NO: 207327 - RNA, 19 nt, Artificial Sequence
  Description of Artificial Sequence: Synthetic oligonucleotide
  Antisense strand to SEQ ID NO: 207326
acuaucaugucugucuugc

SEQ ID NO: 207328 - RNA, 19 nt, Artificial Sequence
  Description of Artificial Sequence: Synthetic oligonucleotide
  Sense strand starting at position 2338 of SEQ ID NO: 2671
ggauguuuaaguugagcaa

SEQ ID NO: 207329 - RNA, 19 nt, Artificial Sequence
  Description of Artificial Sequence: Synthetic oligonucleotide
  Antisense strand to SEQ ID NO: 207328
uugcucaacuuaaacaucc

SEQ ID NO: 207330 - RNA, 19 nt, Artificial Sequence
  Description of Artificial Sequence: Synthetic oligonucleotide
  Sense strand starting at position 2339 of SEQ ID NO: 2671
gauguuuaaguugagcaau

SEQ ID NO: 207331 - RNA, 19 nt, Artificial Sequence
  Description of Artificial Sequence: Synthetic oligonucleotide
  Antisense strand to SEQ ID NO: 207330
auugcucaacuuaaacauc

SEQ ID NO: 207332 - RNA, 19 nt, Artificial Sequence
  Description of Artificial Sequence: Synthetic oligonucleotide
  Sense strand starting at position 2341 of SEQ ID NO: 2671
uguuuaaguugagcaauua

SEQ ID NO: 207333 - RNA, 19 nt, Artificial Sequence
  Description of Artificial Sequence: Synthetic oligonucleotide
  Antisense strand to SEQ ID NO: 207332
uaauugcucaacuuaaaca

SEQ ID NO: 207334 - RNA, 19 nt, Artificial Sequence
  Description of Artificial Sequence: Synthetic oligonucleotide
  Sense strand starting at position 2342 of SEQ ID NO: 2671
guuuaaguugagcaauuac

SEQ ID NO: 207335 - RNA, 19 nt, Artificial Sequence
  Description of Artificial Sequence: Synthetic oligonucleotide
  Antisense strand to SEQ ID NO: 207334
guaauugcucaacuuaaac

SEQ ID NO: 207336 - RNA, 19 nt, Artificial Sequence
  Description of Artificial Sequence: Synthetic oligonucleotide
  Sense strand starting at position 2380 of SEQ ID NO: 2671
cagugaaucugauuaauga

SEQ ID NO: 207337 - RNA, 19 nt, Artificial Sequence
  Description of Artificial Sequence: Synthetic oligonucleotide
  Antisense strand to SEQ ID NO: 207336
ucauuaaucagauucacug

SEQ ID NO: 207338 - RNA, 19 nt, Artificial Sequence
  Description of Artificial Sequence: Synthetic oligonucleotide
  Sense strand starting at position 2753 of SEQ ID NO: 2671
uugguugaacggcaaaguu

SEQ ID NO: 207339 - RNA, 19 nt, Artificial Sequence
  Description of Artificial Sequence: Synthetic oligonucleotide
  Antisense strand to SEQ ID NO: 207338
aacuuugccguucaaccaa

SEQ ID NO: 207340 - RNA, 19 nt, Artificial Sequence
  Description of Artificial Sequence: Synthetic oligonucleotide
  Sense strand starting at position 2819 of SEQ ID NO: 2671
uuuaguuucuucuccuuga

SEQ ID NO: 207341 - RNA, 19 nt, Artificial Sequence
  Description of Artificial Sequence: Synthetic oligonucleotide
  Antisense strand to SEQ ID NO: 207340
ucaaggagaagaaacuaaa

SEQ ID NO: 207342 - RNA, 19 nt, Artificial Sequence
  Description of Artificial Sequence: Synthetic oligonucleotide
  Sense strand starting at position 2961 of SEQ ID NO: 2671
ggauauuccuucuugucaa

SEQ ID NO: 207343 - RNA, 19 nt, Artificial Sequence
  Description of Artificial Sequence: Synthetic oligonucleotide
  Antisense strand to SEQ ID NO: 207342
uugacaagaaggaauaucc

SEQ ID NO: 207344 - RNA, 19 nt, Artificial Sequence
  Description of Artificial Sequence: Synthetic oligonucleotide
  Sense strand starting at position 3025 of SEQ ID NO: 2671
acggacucugcuuaugaga

SEQ ID NO: 207345 - RNA, 19 nt, Artificial Sequence
  Description of Artificial Sequence: Synthetic oligonucleotide
  Antisense strand to SEQ ID NO: 207344
ucucauaagcagaguccgu

SEQ ID NO: 207346 - RNA, 19 nt, Artificial Sequence
  Description of Artificial Sequence: Synthetic oligonucleotide
  Sense strand starting at position 3486 of SEQ ID NO: 2671
uuauguagcuaguccagaa

SEQ ID NO: 207347 - RNA, 19 nt, Artificial Sequence
  Description of Artificial Sequence: Synthetic oligonucleotide
  Antisense strand to SEQ ID NO: 207346
uucuggacuagcuacauaa

SEQ ID NO: 207348 - RNA, 19 nt, Artificial Sequence
  Description of Artificial Sequence: Synthetic oligonucleotide
  Sense strand starting at position 3513 of SEQ ID NO: 2671
acuucuguacacugaagaa

SEQ ID NO: 207349 - RNA, 19 nt, Artificial Sequence
  Description of Artificial Sequence: Synthetic oligonucleotide
  Antisense strand to SEQ ID NO: 207348
uucuucaguguacagaagu

SEQ ID NO: 207350 - RNA, 19 nt, Artificial Sequence
  Description of Artificial Sequence: Synthetic oligonucleotide
  Sense strand starting at position 3591 of SEQ ID NO: 2671
ucauuaguaugucugguua

SEQ ID NO: 207351 - RNA, 19 nt, Artificial Sequence
  Description of Artificial Sequence: Synthetic oligonucleotide
  Antisense strand to SEQ ID NO: 207350
uaaccagacauacuaauga

SEQ ID NO: 207352 - RNA, 19 nt, Artificial Sequence
  Description of Artificial Sequence: Synthetic oligonucleotide
  Sense strand starting at position 3602 of SEQ ID NO: 2671
ucugguuacuuucuaggaa

SEQ ID NO: 207353 - RNA, 19 nt, Artificial Sequence
  Description of Artificial Sequence: Synthetic oligonucleotide
  Antisense strand to SEQ ID NO: 207352
uuccuagaaaguaaccaga

SEQ ID NO: 207354 - RNA, 19 nt, Artificial Sequence
  Description of Artificial Sequence: Synthetic oligonucleotide
  Sense strand starting at position 3648 of SEQ ID NO: 2671
uugugucaacuauaacuga

SEQ ID NO: 207355 - RNA, 19 nt, Artificial Sequence
  Description of Artificial Sequence: Synthetic oligonucleotide
  Antisense strand to SEQ ID NO: 207354
ucaguuauaguugacacaa

SEQ ID NO: 207356 - RNA, 19 nt, Artificial Sequence
  Description of Artificial Sequence: Synthetic oligonucleotide
  Sense strand starting at position 3651 of SEQ ID NO: 2671
ugucaacuauaacugaguu

SEQ ID NO: 207357 - RNA, 19 nt, Artificial Sequence
  Description of Artificial Sequence: Synthetic oligonucleotide
  Antisense strand to SEQ ID NO: 207356
aacucaguuauaguugaca

SEQ ID NO: 207358 - RNA, 19 nt, Artificial Sequence
  Description of Artificial Sequence: Synthetic oligonucleotide
  Sense strand starting at position 3764 of SEQ ID NO: 2671
ucuugucaugucuauagac

SEQ ID NO: 207359 - RNA, 19 nt, Artificial Sequence
  Description of Artificial Sequence: Synthetic oligonucleotide
  Antisense strand to SEQ ID NO: 207358
gucuauagacaugacaaga

SEQ ID NO: 207360 - RNA, 19 nt, Artificial Sequence
  Description of Artificial Sequence: Synthetic oligonucleotide
  Sense strand starting at position 3766 of SEQ ID NO: 2671
uugucaugucuauagacau

SEQ ID NO: 207361 - RNA, 19 nt, Artificial Sequence
  Description of Artificial Sequence: Synthetic oligonucleotide
  Antisense strand to SEQ ID NO: 207360
augucuauagacaugacaa

SEQ ID NO: 207362 - RNA, 19 nt, Artificial Sequence
  Description of Artificial Sequence: Synthetic oligonucleotide
  Sense strand starting at position 3867 of SEQ ID NO: 2671
uuuauuucgugauacagag

SEQ ID NO: 207363 - RNA, 19 nt, Artificial Sequence
  Description of Artificial Sequence: Synthetic oligonucleotide
  Antisense strand to SEQ ID NO: 207362
cucuguaucacgaaauaaa

SEQ ID NO: 207364 - RNA, 19 nt, Artificial Sequence
  Description of Artificial Sequence: Synthetic oligonucleotide
  Sense strand starting at position 11 of SEQ ID NO: 2672
agagaugguuaagccuaua

SEQ ID NO: 207365 - RNA, 19 nt, Artificial Sequence
  Description of Artificial Sequence: Synthetic oligonucleotide
  Antisense strand to SEQ ID NO: 207364
uauaggcuuaaccaucucu

SEQ ID NO: 207366 - RNA, 19 nt, Artificial Sequence
  Description of Artificial Sequence: Synthetic oligonucleotide
  Sense strand starting at position 148 of SEQ ID NO: 2672
aguuguugacucuggaauu

SEQ ID NO: 207367 - RNA, 19 nt, Artificial Sequence
  Description of Artificial Sequence: Synthetic oligonucleotide
  Antisense strand to SEQ ID NO: 207366
aauuccagagucaacaacu

SEQ ID NO: 207368 - RNA, 19 nt, Artificial Sequence
  Description of Artificial Sequence: Synthetic oligonucleotide
  Sense strand starting at position 159 of SEQ ID NO: 2672
cuggaauucuaaguccaug

SEQ ID NO: 207369 - RNA, 19 nt, Artificial Sequence
  Description of Artificial Sequence: Synthetic oligonucleotide
  Antisense strand to SEQ ID NO: 207368
cauggacuuagaauuccag

SEQ ID NO: 207370 - RNA, 19 nt, Artificial Sequence
  Description of Artificial Sequence: Synthetic oligonucleotide
  Sense strand starting at position 164 of SEQ ID NO: 2672
auucuaaguccauggaugu

SEQ ID NO: 207371 - RNA, 19 nt, Artificial Sequence
  Description of Artificial Sequence: Synthetic oligonucleotide
  Antisense strand to SEQ ID NO: 207370
acauccauggacuuagaau

SEQ ID NO: 207372 - RNA, 19 nt, Artificial Sequence
  Description of Artificial Sequence: Synthetic oligonucleotide
  Sense strand starting at position 165 of SEQ ID NO: 2672
uucuaaguccauggauguu

SEQ ID NO: 207373 - RNA, 19 nt, Artificial Sequence
  Description of Artificial Sequence: Synthetic oligonucleotide
  Antisense strand to SEQ ID NO: 207372
aacauccauggacuuagaa

SEQ ID NO: 207374 - RNA, 19 nt, Artificial Sequence
  Description of Artificial Sequence: Synthetic oligonucleotide
  Sense strand starting at position 345 of SEQ ID NO: 2672
caggauggcgcugaucuaa

SEQ ID NO: 207375 - RNA, 19 nt, Artificial Sequence
  Description of Artificial Sequence: Synthetic oligonucleotide
  Antisense strand to SEQ ID NO: 207374
uuagaucagcgccauccug

SEQ ID NO: 207376 - RNA, 19 nt, Artificial Sequence
  Description of Artificial Sequence: Synthetic oligonucleotide
  Sense strand starting at position 755 of SEQ ID NO: 2672
ggauguggauaagaugaaa

SEQ ID NO: 207377 - RNA, 19 nt, Artificial Sequence
  Description of Artificial Sequence: Synthetic oligonucleotide
  Antisense strand to SEQ ID NO: 207376
uuucaucuuauccacaucc

SEQ ID NO: 207378 - RNA, 19 nt, Artificial Sequence
  Description of Artificial Sequence: Synthetic oligonucleotide
  Sense strand starting at position 880 of SEQ ID NO: 2672
uggcccuauugccuagaga

SEQ ID NO: 207379 - RNA, 19 nt, Artificial Sequence
  Description of Artificial Sequence: Synthetic oligonucleotide
  Antisense strand to SEQ ID NO: 207378
ucucuaggcaauagggcca

SEQ ID NO: 207380 - RNA, 19 nt, Artificial Sequence
  Description of Artificial Sequence: Synthetic oligonucleotide
  Sense strand starting at position 881 of SEQ ID NO: 2672
ggcccuauugccuagagaa

SEQ ID NO: 207381 - RNA, 19 nt, Artificial Sequence
  Description of Artificial Sequence: Synthetic oligonucleotide
  Antisense strand to SEQ ID NO: 207380
uucucuaggcaauagggcc

SEQ ID NO: 207382 - RNA, 19 nt, Artificial Sequence
  Description of Artificial Sequence: Synthetic oligonucleotide
  Sense strand starting at position 1030 of SEQ ID NO: 2672
ucuguaacucuauaaaguc

SEQ ID NO: 207383 - RNA, 19 nt, Artificial Sequence
  Description of Artificial Sequence: Synthetic oligonucleotide
  Antisense strand to SEQ ID NO: 207382
gacuuuauagaguuacaga

SEQ ID NO: 207384 - RNA, 19 nt, Artificial Sequence
  Description of Artificial Sequence: Synthetic oligonucleotide
  Sense strand starting at position 1122 of SEQ ID NO: 2672
auuccuuggcagggaguaa

SEQ ID NO: 207385 - RNA, 19 nt, Artificial Sequence
  Description of Artificial Sequence: Synthetic oligonucleotide
  Antisense strand to SEQ ID NO: 207384
uuacucccugccaaggaau

SEQ ID NO: 207386 - RNA, 19 nt, Artificial Sequence
  Description of Artificial Sequence: Synthetic oligonucleotide
  Sense strand starting at position 1163 of SEQ ID NO: 2672
auccauucuugucuuguaa

SEQ ID NO: 207387 - RNA, 19 nt, Artificial Sequence
  Description of Artificial Sequence: Synthetic oligonucleotide
  Antisense strand to SEQ ID NO: 207386
uuacaagacaagaauggau

SEQ ID NO: 207388 - RNA, 19 nt, Artificial Sequence
  Description of Artificial Sequence: Synthetic oligonucleotide
  Sense strand starting at position 1186 of SEQ ID NO: 2672
gagaaagcccuuugaguuu

SEQ ID NO: 207389 - RNA, 19 nt, Artificial Sequence
  Description of Artificial Sequence: Synthetic oligonucleotide
  Antisense strand to SEQ ID NO: 207388
aaacucaaagggcuuucuc

SEQ ID NO: 207390 - RNA, 19 nt, Artificial Sequence
  Description of Artificial Sequence: Synthetic oligonucleotide
  Sense strand starting at position 1254 of SEQ ID NO: 2672
cgucuuagaucaucccuca

SEQ ID NO: 207391 - RNA, 19 nt, Artificial Sequence
  Description of Artificial Sequence: Synthetic oligonucleotide
  Antisense strand to SEQ ID NO: 207390
ugagggaugaucuaagacg

SEQ ID NO: 207392 - RNA, 19 nt, Artificial Sequence
  Description of Artificial Sequence: Synthetic oligonucleotide
  Sense strand starting at position 1311 of SEQ ID NO: 2672
ugguauaauaugcaaaggu

SEQ ID NO: 207393 - RNA, 19 nt, Artificial Sequence
  Description of Artificial Sequence: Synthetic oligonucleotide
  Antisense strand to SEQ ID NO: 207392
accuuugcauauuauacca

SEQ ID NO: 207394 - RNA, 19 nt, Artificial Sequence
  Description of Artificial Sequence: Synthetic oligonucleotide
  Sense strand starting at position 1368 of SEQ ID NO: 2672
cacuaaacuguaggucaga

SEQ ID NO: 207395 - RNA, 19 nt, Artificial Sequence
  Description of Artificial Sequence: Synthetic oligonucleotide
  Antisense strand to SEQ ID NO: 207394
ucugaccuacaguuuagug

SEQ ID NO: 207396 - RNA, 19 nt, Artificial Sequence
  Description of Artificial Sequence: Synthetic oligonucleotide
  Sense strand starting at position 1413 of SEQ ID NO: 2672
gugcaccuugaacaaauua

SEQ ID NO: 207397 - RNA, 19 nt, Artificial Sequence
  Description of Artificial Sequence: Synthetic oligonucleotide
  Antisense strand to SEQ ID NO: 207396
uaauuuguucaaggugcac

SEQ ID NO: 207398 - RNA, 19 nt, Artificial Sequence
  Description of Artificial Sequence: Synthetic oligonucleotide
  Sense strand starting at position 1470 of SEQ ID NO: 2672
agcguugaaugauuggaga

SEQ ID NO: 207399 - RNA, 19 nt, Artificial Sequence
  Description of Artificial Sequence: Synthetic oligonucleotide
  Antisense strand to SEQ ID NO: 207398
ucuccaaucauucaacgcu

SEQ ID NO: 207400 - RNA, 19 nt, Artificial Sequence
  Description of Artificial Sequence: Synthetic oligonucleotide
  Sense strand starting at position 1535 of SEQ ID NO: 2672
cuacgccuggucuaaagaa

SEQ ID NO: 207401 - RNA, 19 nt, Artificial Sequence
  Description of Artificial Sequence: Synthetic oligonucleotide
  Antisense strand to SEQ ID NO: 207400
uucuuuagaccaggcguag

SEQ ID NO: 207402 - RNA, 19 nt, Artificial Sequence
  Description of Artificial Sequence: Synthetic oligonucleotide
  Sense strand starting at position 1605 of SEQ ID NO: 2672
ccucuucucugucuauaga

SEQ ID NO: 207403 - RNA, 19 nt, Artificial Sequence
  Description of Artificial Sequence: Synthetic oligonucleotide
  Antisense strand to SEQ ID NO: 207402
ucuauagacagagaagagg

SEQ ID NO: 207404 - RNA, 19 nt, Artificial Sequence
  Description of Artificial Sequence: Synthetic oligonucleotide
  Sense strand starting at position 1782 of SEQ ID NO: 2672
uggagaauaucugcacauu

SEQ ID NO: 207405 - RNA, 19 nt, Artificial Sequence
  Description of Artificial Sequence: Synthetic oligonucleotide
  Antisense strand to SEQ ID NO: 207404
aaugugcagauauucucca

SEQ ID NO: 207406 - RNA, 19 nt, Artificial Sequence
  Description of Artificial Sequence: Synthetic oligonucleotide
  Sense strand starting at position 1889 of SEQ ID NO: 2672
uugagaaucgcucaccaac

SEQ ID NO: 207407 - RNA, 19 nt, Artificial Sequence
  Description of Artificial Sequence: Synthetic oligonucleotide
  Antisense strand to SEQ ID NO: 207406
guuggugagcgauucucaa

SEQ ID NO: 207408 - RNA, 19 nt, Artificial Sequence
  Description of Artificial Sequence: Synthetic oligonucleotide
  Sense strand starting at position 1975 of SEQ ID NO: 2672
ucagacuggugcucacaga

SEQ ID NO: 207409 - RNA, 19 nt, Artificial Sequence
  Description of Artificial Sequence: Synthetic oligonucleotide
  Antisense strand to SEQ ID NO: 207408
ucugugagcaccagucuga

SEQ ID NO: 207410 - RNA, 19 nt, Artificial Sequence
  Description of Artificial Sequence: Synthetic oligonucleotide
  Sense strand starting at position 2084 of SEQ ID NO: 2672
cccauuaaggguugaggga

SEQ ID NO: 207411 - RNA, 19 nt, Artificial Sequence
  Description of Artificial Sequence: Synthetic oligonucleotide
  Antisense strand to SEQ ID NO: 207410
ucccucaacccuuaauggg

SEQ ID NO: 207412 - RNA, 19 nt, Artificial Sequence
  Description of Artificial Sequence: Synthetic oligonucleotide
  Sense strand starting at position 2104 of SEQ ID NO: 2672
gguggaaagucauauauuu

SEQ ID NO: 207413 - RNA, 19 nt, Artificial Sequence
  Description of Artificial Sequence: Synthetic oligonucleotide
  Antisense strand to SEQ ID NO: 207412
aaauauaugacuuuccacc

SEQ ID NO: 207414 - RNA, 19 nt, Artificial Sequence
  Description of Artificial Sequence: Synthetic oligonucleotide
  Sense strand starting at position 2113 of SEQ ID NO: 2672
ucauauauuugggacagga

SEQ ID NO: 207415 - RNA, 19 nt, Artificial Sequence
  Description of Artificial Sequence: Synthetic oligonucleotide
  Antisense strand to SEQ ID NO: 207414
uccugucccaaauauauga

SEQ ID NO: 207416 - RNA, 19 nt, Artificial Sequence
  Description of Artificial Sequence: Synthetic oligonucleotide
  Sense strand starting at position 2130 of SEQ ID NO: 2672
gauugugauccuggccuga

SEQ ID NO: 207417 - RNA, 19 nt, Artificial Sequence
  Description of Artificial Sequence: Synthetic oligonucleotide
  Antisense strand to SEQ ID NO: 207416
ucaggccaggaucacaauc

SEQ ID NO: 207418 - RNA, 19 nt, Artificial Sequence
  Description of Artificial Sequence: Synthetic oligonucleotide
  Sense strand starting at position 2132 of SEQ ID NO: 2672
uugugauccuggccugaag

SEQ ID NO: 207419 - RNA, 19 nt, Artificial Sequence
  Description of Artificial Sequence: Synthetic oligonucleotide
  Antisense strand to SEQ ID NO: 207418
cuucaggccaggaucacaa

SEQ ID NO: 207420 - RNA, 19 nt, Artificial Sequence
  Description of Artificial Sequence: Synthetic oligonucleotide
  Sense strand starting at position 2365 of SEQ ID NO: 2672
agaucauucuacucgauga

SEQ ID NO: 207421 - RNA, 19 nt, Artificial Sequence
  Description of Artificial Sequence: Synthetic oligonucleotide
  Antisense strand to SEQ ID NO: 207420
ucaucgaguagaaugaucu

SEQ ID NO: 207422 - RNA, 19 nt, Artificial Sequence
  Description of Artificial Sequence: Synthetic oligonucleotide
  Sense strand starting at position 2369 of SEQ ID NO: 2672
cauucuacucgaugaaugu

SEQ ID NO: 207423 - RNA, 19 nt, Artificial Sequence
  Description of Artificial Sequence: Synthetic oligonucleotide
  Antisense strand to SEQ ID NO: 207422
acauucaucgaguagaaug

SEQ ID NO: 207424 - RNA, 19 nt, Artificial Sequence
  Description of Artificial Sequence: Synthetic oligonucleotide
  Sense strand starting at position 2373 of SEQ ID NO: 2672
cuacucgaugaaugucaau

SEQ ID NO: 207425 - RNA, 19 nt, Artificial Sequence
  Description of Artificial Sequence: Synthetic oligonucleotide
  Antisense strand to SEQ ID NO: 207424
auugacauucaucgaguag

SEQ ID NO: 207426 - RNA, 19 nt, Artificial Sequence
  Description of Artificial Sequence: Synthetic oligonucleotide
  Sense strand starting at position 3004 of SEQ ID NO: 2672
cugugucuccucuauacca

SEQ ID NO: 207427 - RNA, 19 nt, Artificial Sequence
  Description of Artificial Sequence: Synthetic oligonucleotide
  Antisense strand to SEQ ID NO: 207426
ugguauagaggagacacag

SEQ ID NO: 207428 - RNA, 19 nt, Artificial Sequence
  Description of Artificial Sequence: Synthetic oligonucleotide
  Sense strand starting at position 3118 of SEQ ID NO: 2672
ccaaguaagucacuugauu

SEQ ID NO: 207429 - RNA, 19 nt, Artificial Sequence
  Description of Artificial Sequence: Synthetic oligonucleotide
  Antisense strand to SEQ ID NO: 207428
aaucaagugacuuacuugg

SEQ ID NO: 207430 - RNA, 19 nt, Artificial Sequence
  Description of Artificial Sequence: Synthetic oligonucleotide
  Sense strand starting at position 3204 of SEQ ID NO: 2672
acuccauauugaguuuaua

SEQ ID NO: 207431 - RNA, 19 nt, Artificial Sequence
  Description of Artificial Sequence: Synthetic oligonucleotide
  Antisense strand to SEQ ID NO: 207430
uauaaacucaauauggagu

SEQ ID NO: 207432 - RNA, 19 nt, Artificial Sequence
  Description of Artificial Sequence: Synthetic oligonucleotide
  Sense strand starting at position 3207 of SEQ ID NO: 2672
ccauauugaguuuauauug

SEQ ID NO: 207433 - RNA, 19 nt, Artificial Sequence
  Description of Artificial Sequence: Synthetic oligonucleotide
  Antisense strand to SEQ ID NO: 207432
caauauaaacucaauaugg

SEQ ID NO: 207434 - RNA, 19 nt, Artificial Sequence
  Description of Artificial Sequence: Synthetic oligonucleotide
  Sense strand starting at position 3217 of SEQ ID NO: 2672
uuuauauuguaccuagaca

SEQ ID NO: 207435 - RNA, 19 nt, Artificial Sequence
  Description of Artificial Sequence: Synthetic oligonucleotide
  Antisense strand to SEQ ID NO: 207434
ugucuagguacaauauaaa

SEQ ID NO: 207436 - RNA, 19 nt, Artificial Sequence
  Description of Artificial Sequence: Synthetic oligonucleotide
  Sense strand starting at position 3244 of SEQ ID NO: 2672
uuuggugagccugaaguuu

SEQ ID NO: 207437 - RNA, 19 nt, Artificial Sequence
  Description of Artificial Sequence: Synthetic oligonucleotide
  Antisense strand to SEQ ID NO: 207436
aaacuucaggcucaccaaa

SEQ ID NO: 207438 - RNA, 19 nt, Artificial Sequence
  Description of Artificial Sequence: Synthetic oligonucleotide
  Sense strand starting at position 3250 of SEQ ID NO: 2672
gagccugaaguuuauacau

SEQ ID NO: 207439 - RNA, 19 nt, Artificial Sequence
  Description of Artificial Sequence: Synthetic oligonucleotide
  Antisense strand to SEQ ID NO: 207438
auguauaaacuucaggcuc

SEQ ID NO: 207440 - RNA, 19 nt, Artificial Sequence
  Description of Artificial Sequence: Synthetic oligonucleotide
  Sense strand starting at position 3467 of SEQ ID NO: 2672
acucuuugauuaucuguua

SEQ ID NO: 207441 - RNA, 19 nt, Artificial Sequence
  Description of Artificial Sequence: Synthetic oligonucleotide
  Antisense strand to SEQ ID NO: 207440
uaacagauaaucaaagagu

SEQ ID NO: 207442 - RNA, 19 nt, Artificial Sequence
  Description of Artificial Sequence: Synthetic oligonucleotide
  Sense strand starting at position 3545 of SEQ ID NO: 2672
ccucuacuaugacuguuua

SEQ ID NO: 207443 - RNA, 19 nt, Artificial Sequence
  Description of Artificial Sequence: Synthetic oligonucleotide
  Antisense strand to SEQ ID NO: 207442
uaaacagucauaguagagg

SEQ ID NO: 207444 - RNA, 19 nt, Artificial Sequence
  Description of Artificial Sequence: Synthetic oligonucleotide
  Sense strand starting at position 295 of SEQ ID NO: 2673
ugcugagucagguagacuu

SEQ ID NO: 207445 - RNA, 19 nt, Artificial Sequence
  Description of Artificial Sequence: Synthetic oligonucleotide
  Antisense strand to SEQ ID NO: 207444
aagucuaccugacucagca

SEQ ID NO: 207446 - RNA, 19 nt, Artificial Sequence
  Description of Artificial Sequence: Synthetic oligonucleotide
  Sense strand starting at position 303 of SEQ ID NO: 2673
cagguagacuuugaaagca

SEQ ID NO: 207447 - RNA, 19 nt, Artificial Sequence
  Description of Artificial Sequence: Synthetic oligonucleotide
  Antisense strand to SEQ ID NO: 207446
ugcuuucaaagucuaccug

SEQ ID NO: 207448 - RNA, 19 nt, Artificial Sequence
  Description of Artificial Sequence: Synthetic oligonucleotide
  Sense strand starting at position 514 of SEQ ID NO: 2673
cucuccugccucugugaga

SEQ ID NO: 207449 - RNA, 19 nt, Artificial Sequence
  Description of Artificial Sequence: Synthetic oligonucleotide
  Antisense strand to SEQ ID NO: 207448
ucucacagaggcaggagag

SEQ ID NO: 207450 - RNA, 19 nt, Artificial Sequence
  Description of Artificial Sequence: Synthetic oligonucleotide
  Sense strand starting at position 515 of SEQ ID NO: 2673
ucuccugccucugugagaa

SEQ ID NO: 207451 - RNA, 19 nt, Artificial Sequence
  Description of Artificial Sequence: Synthetic oligonucleotide
  Antisense strand to SEQ ID NO: 207450
uucucacagaggcaggaga

SEQ ID NO: 207452 - RNA, 19 nt, Artificial Sequence
  Description of Artificial Sequence: Synthetic oligonucleotide
  Sense strand starting at position 594 of SEQ ID NO: 2673
ggaggaagcuuucucaagu

SEQ ID NO: 207453 - RNA, 19 nt, Artificial Sequence
  Description of Artificial Sequence: Synthetic oligonucleotide
  Antisense strand to SEQ ID NO: 207452
acuugagaaagcuuccucc

SEQ ID NO: 207454 - RNA, 19 nt, Artificial Sequence
  Description of Artificial Sequence: Synthetic oligonucleotide
  Sense strand starting at position 595 of SEQ ID NO: 2673
gaggaagcuuucucaaguu

SEQ ID NO: 207455 - RNA, 19 nt, Artificial Sequence
  Description of Artificial Sequence: Synthetic oligonucleotide
  Antisense strand to SEQ ID NO: 207454
aacuugagaaagcuuccuc

SEQ ID NO: 207456 - RNA, 19 nt, Artificial Sequence
  Description of Artificial Sequence: Synthetic oligonucleotide
  Sense strand starting at position 610 of SEQ ID NO: 2673
aguugucuagugggaagga

SEQ ID NO: 207457 - RNA, 19 nt, Artificial Sequence
  Description of Artificial Sequence: Synthetic oligonucleotide
  Antisense strand to SEQ ID NO: 207456
uccuucccacuagacaacu

SEQ ID NO: 207458 - RNA, 19 nt, Artificial Sequence
  Description of Artificial Sequence: Synthetic oligonucleotide
  Sense strand starting at position 611 of SEQ ID NO: 2673
guugucuagugggaaggaa

SEQ ID NO: 207459 - RNA, 19 nt, Artificial Sequence
  Description of Artificial Sequence: Synthetic oligonucleotide
  Antisense strand to SEQ ID NO: 207458
uuccuucccacuagacaac

SEQ ID NO: 207460 - RNA, 19 nt, Artificial Sequence
  Description of Artificial Sequence: Synthetic oligonucleotide
  Sense strand starting at position 661 of SEQ ID NO: 2673
acagauacuuaguagaugu

SEQ ID NO: 207461 - RNA, 19 nt, Artificial Sequence
  Description of Artificial Sequence: Synthetic oligonucleotide
  Antisense strand to SEQ ID NO: 207460
acaucuacuaaguaucugu

SEQ ID NO: 207462 - RNA, 19 nt, Artificial Sequence
  Description of Artificial Sequence: Synthetic oligonucleotide
  Sense strand starting at position 669 of SEQ ID NO: 2673
uuaguagauguuugaccua

SEQ ID NO: 207463 - RNA, 19 nt, Artificial Sequence
  Description of Artificial Sequence: Synthetic oligonucleotide
  Antisense strand to SEQ ID NO: 207462
uaggucaaacaucuacuaa

SEQ ID NO: 207464 - RNA, 19 nt, Artificial Sequence
  Description of Artificial Sequence: Synthetic oligonucleotide
  Sense strand starting at position 672 of SEQ ID NO: 2673
guagauguuugaccuaaua

SEQ ID NO: 207465 - RNA, 19 nt, Artificial Sequence
  Description of Artificial Sequence: Synthetic oligonucleotide
  Antisense strand to SEQ ID NO: 207464
uauuaggucaaacaucuac

SEQ ID NO: 207466 - RNA, 19 nt, Artificial Sequence
  Description of Artificial Sequence: Synthetic oligonucleotide
  Sense strand starting at position 901 of SEQ ID NO: 2673
cgaagucugacagaaguua

SEQ ID NO: 207467 - RNA, 19 nt, Artificial Sequence
  Description of Artificial Sequence: Synthetic oligonucleotide
  Antisense strand to SEQ ID NO: 207466
uaacuucugucagacuucg

SEQ ID NO: 207468 - RNA, 19 nt, Artificial Sequence
  Description of Artificial Sequence: Synthetic oligonucleotide
  Sense strand starting at position 956 of SEQ ID NO: 2673
agacaaugugaagguuuaa

SEQ ID NO: 207469 - RNA, 19 nt, Artificial Sequence
  Description of Artificial Sequence: Synthetic oligonucleotide
  Antisense strand to SEQ ID NO: 207468
uuaaaccuucacauugucu

SEQ ID NO: 207470 - RNA, 19 nt, Artificial Sequence
  Description of Artificial Sequence: Synthetic oligonucleotide
  Sense strand starting at position 982 of SEQ ID NO: 2673
gcccuuauaccagagcaaa

SEQ ID NO: 207471 - RNA, 19 nt, Artificial Sequence
  Description of Artificial Sequence: Synthetic oligonucleotide
  Antisense strand to SEQ ID NO: 207470
uuugcucugguauaagggc

SEQ ID NO: 207472 - RNA, 19 nt, Artificial Sequence
  Description of Artificial Sequence: Synthetic oligonucleotide
  Sense strand starting at position 1048 of SEQ ID NO: 2673
guaaacaguccuggaauua

SEQ ID NO: 207473 - RNA, 19 nt, Artificial Sequence
  Description of Artificial Sequence: Synthetic oligonucleotide
  Antisense strand to SEQ ID NO: 207472
uaauuccaggacuguuuac

SEQ ID NO: 207474 - RNA, 19 nt, Artificial Sequence
  Description of Artificial Sequence: Synthetic oligonucleotide
  Sense strand starting at position 1057 of SEQ ID NO: 2673
ccuggaauuauuggugcua

SEQ ID NO: 207475 - RNA, 19 nt, Artificial Sequence
  Description of Artificial Sequence: Synthetic oligonucleotide
  Antisense strand to SEQ ID NO: 207474
uagcaccaauaauuccagg

SEQ ID NO: 207476 - RNA, 19 nt, Artificial Sequence
  Description of Artificial Sequence: Synthetic oligonucleotide
  Sense strand starting at position 1058 of SEQ ID NO: 2673
cuggaauuauuggugcuau

SEQ ID NO: 207477 - RNA, 19 nt, Artificial Sequence
  Description of Artificial Sequence: Synthetic oligonucleotide
  Antisense strand to SEQ ID NO: 207476
auagcaccaauaauuccag

SEQ ID NO: 207478 - RNA, 19 nt, Artificial Sequence
  Description of Artificial Sequence: Synthetic oligonucleotide
  Sense strand starting at position 1076 of SEQ ID NO: 2673
uuuagagucuucucuacau

SEQ ID NO: 207479 - RNA, 19 nt, Artificial Sequence
  Description of Artificial Sequence: Synthetic oligonucleotide
  Antisense strand to SEQ ID NO: 207478
auguagagaagacucuaaa

SEQ ID NO: 207480 - RNA, 19 nt, Artificial Sequence
  Description of Artificial Sequence: Synthetic oligonucleotide
  Sense strand starting at position 1227 of SEQ ID NO: 2673
caugcuuuaugguggauuu

SEQ ID NO: 207481 - RNA, 19 nt, Artificial Sequence
  Description of Artificial Sequence: Synthetic oligonucleotide
  Antisense strand to SEQ ID NO: 207480
aaauccaccauaaagcaug

SEQ ID NO: 207482 - RNA, 19 nt, Artificial Sequence
  Description of Artificial Sequence: Synthetic oligonucleotide
  Sense strand starting at position 1317 of SEQ ID NO: 2673
ccucuucuccacgaagagu

SEQ ID NO: 207483 - RNA, 19 nt, Artificial Sequence
  Description of Artificial Sequence: Synthetic oligonucleotide
  Antisense strand to SEQ ID NO: 207482
acucuucguggagaagagg

SEQ ID NO: 207484 - RNA, 19 nt, Artificial Sequence
  Description of Artificial Sequence: Synthetic oligonucleotide
  Sense strand starting at position 1368 of SEQ ID NO: 2673
aggcaauguggaugaacau

SEQ ID NO: 207485 - RNA, 19 nt, Artificial Sequence
  Description of Artificial Sequence: Synthetic oligonucleotide
  Antisense strand to SEQ ID NO: 207484
auguucauccacauugccu

SEQ ID NO: 207486 - RNA, 19 nt, Artificial Sequence
  Description of Artificial Sequence: Synthetic oligonucleotide
  Sense strand starting at position 1402 of SEQ ID NO: 2673
gcagcaaugacagauguca

SEQ ID NO: 207487 - RNA, 19 nt, Artificial Sequence
  Description of Artificial Sequence: Synthetic oligonucleotide
  Antisense strand to SEQ ID NO: 207486
ugacaucugucauugcugc

SEQ ID NO: 207488 - RNA, 19 nt, Artificial Sequence
  Description of Artificial Sequence: Synthetic oligonucleotide
  Sense strand starting at position 1460 of SEQ ID NO: 2673
gagguaguuugugaacaaa

SEQ ID NO: 207489 - RNA, 19 nt, Artificial Sequence
  Description of Artificial Sequence: Synthetic oligonucleotide
  Antisense strand to SEQ ID NO: 207488
uuuguucacaaacuaccuc

SEQ ID NO: 207490 - RNA, 19 nt, Artificial Sequence
  Description of Artificial Sequence: Synthetic oligonucleotide
  Sense strand starting at position 1463 of SEQ ID NO: 2673
guaguuugugaacaaagga

SEQ ID NO: 207491 - RNA, 19 nt, Artificial Sequence
  Description of Artificial Sequence: Synthetic oligonucleotide
  Antisense strand to SEQ ID NO: 207490
uccuuuguucacaaacuac

SEQ ID NO: 207492 - RNA, 19 nt, Artificial Sequence
  Description of Artificial Sequence: Synthetic oligonucleotide
  Sense strand starting at position 1537 of SEQ ID NO: 2673
gggugagcuccuuguuauu

SEQ ID NO: 207493 - RNA, 19 nt, Artificial Sequence
  Description of Artificial Sequence: Synthetic oligonucleotide
  Antisense strand to SEQ ID NO: 207492
aauaacaaggagcucaccc

SEQ ID NO: 207494 - RNA, 19 nt, Artificial Sequence
  Description of Artificial Sequence: Synthetic oligonucleotide
  Sense strand starting at position 1695 of SEQ ID NO: 2673
ugcaauauguacucagauc

SEQ ID NO: 207495 - RNA, 19 nt, Artificial Sequence
  Description of Artificial Sequence: Synthetic oligonucleotide
  Antisense strand to SEQ ID NO: 207494
gaucugaguacauauugca

SEQ ID NO: 207496 - RNA, 19 nt, Artificial Sequence
  Description of Artificial Sequence: Synthetic oligonucleotide
  Sense strand starting at position 1775 of SEQ ID NO: 2673
cccgcuuuccuguagccaa

SEQ ID NO: 207497 - RNA, 19 nt, Artificial Sequence
  Description of Artificial Sequence: Synthetic oligonucleotide
  Antisense strand to SEQ ID NO: 207496
uuggcuacaggaaagcggg

SEQ ID NO: 207498 - RNA, 19 nt, Artificial Sequence
  Description of Artificial Sequence: Synthetic oligonucleotide
  Sense strand starting at position 1838 of SEQ ID NO: 2673
ggaugaaaggugugagccu

SEQ ID NO: 207499 - RNA, 19 nt, Artificial Sequence
  Description of Artificial Sequence: Synthetic oligonucleotide
  Antisense strand to SEQ ID NO: 207498
aggcucacaccuuucaucc

SEQ ID NO: 207500 - RNA, 19 nt, Artificial Sequence
  Description of Artificial Sequence: Synthetic oligonucleotide
  Sense strand starting at position 2073 of SEQ ID NO: 2673
agagcaaugucaccaccaa

SEQ ID NO: 207501 - RNA, 19 nt, Artificial Sequence
  Description of Artificial Sequence: Synthetic oligonucleotide
  Antisense strand to SEQ ID NO: 207500
uugguggugacauugcucu

SEQ ID NO: 207502 - RNA, 19 nt, Artificial Sequence
  Description of Artificial Sequence: Synthetic oligonucleotide
  Sense strand starting at position 2074 of SEQ ID NO: 2673
gagcaaugucaccaccaag

SEQ ID NO: 207503 - RNA, 19 nt, Artificial Sequence
  Description of Artificial Sequence: Synthetic oligonucleotide
  Antisense strand to SEQ ID NO: 207502
cuugguggugacauugcuc

SEQ ID NO: 207504 - RNA, 19 nt, Artificial Sequence
  Description of Artificial Sequence: Synthetic oligonucleotide
  Sense strand starting at position 2131 of SEQ ID NO: 2673
ggacauuagccuuguccag

SEQ ID NO: 207505 - RNA, 19 nt, Artificial Sequence
  Description of Artificial Sequence: Synthetic oligonucleotide
  Antisense strand to SEQ ID NO: 207504
cuggacaaggcuaaugucc

SEQ ID NO: 207506 - RNA, 19 nt, Artificial Sequence
  Description of Artificial Sequence: Synthetic oligonucleotide
  Sense strand starting at position 2133 of SEQ ID NO: 2673
acauuagccuuguccagga

SEQ ID NO: 207507 - RNA, 19 nt, Artificial Sequence
  Description of Artificial Sequence: Synthetic oligonucleotide
  Antisense strand to SEQ ID NO: 207506
uccuggacaaggcuaaugu

SEQ ID NO: 207508 - RNA, 19 nt, Artificial Sequence
  Description of Artificial Sequence: Synthetic oligonucleotide
  Sense strand starting at position 2417 of SEQ ID NO: 2673
ugaggacuccugcgagaug

SEQ ID NO: 207509 - RNA, 19 nt, Artificial Sequence
  Description of Artificial Sequence: Synthetic oligonucleotide
  Antisense strand to SEQ ID NO: 207508
caucucgcaggaguccuca

SEQ ID NO: 207510 - RNA, 19 nt, Artificial Sequence
  Description of Artificial Sequence: Synthetic oligonucleotide
  Sense strand starting at position 2476 of SEQ ID NO: 2673
uugguuuccuucccagagu

SEQ ID NO: 207511 - RNA, 19 nt, Artificial Sequence
  Description of Artificial Sequence: Synthetic oligonucleotide
  Antisense strand to SEQ ID NO: 207510
acucugggaaggaaaccaa

SEQ ID NO: 207512 - RNA, 19 nt, Artificial Sequence
  Description of Artificial Sequence: Synthetic oligonucleotide
  Sense strand starting at position 2479 of SEQ ID NO: 2673
guuuccuucccagaguugu

SEQ ID NO: 207513 - RNA, 19 nt, Artificial Sequence
  Description of Artificial Sequence: Synthetic oligonucleotide
  Antisense strand to SEQ ID NO: 207512
acaacucugggaaggaaac

SEQ ID NO: 207514 - RNA, 19 nt, Artificial Sequence
  Description of Artificial Sequence: Synthetic oligonucleotide
  Sense strand starting at position 3047 of SEQ ID NO: 2673
guaggauguagugaaguca

SEQ ID NO: 207515 - RNA, 19 nt, Artificial Sequence
  Description of Artificial Sequence: Synthetic oligonucleotide
  Antisense strand to SEQ ID NO: 207514
ugacuucacuacauccuac

SEQ ID NO: 207516 - RNA, 19 nt, Artificial Sequence
  Description of Artificial Sequence: Synthetic oligonucleotide
  Sense strand starting at position 3785 of SEQ ID NO: 2673
ggcaaagguuuagugugau

SEQ ID NO: 207517 - RNA, 19 nt, Artificial Sequence
  Description of Artificial Sequence: Synthetic oligonucleotide
  Antisense strand to SEQ ID NO: 207516
aucacacuaaaccuuugcc

SEQ ID NO: 207518 - RNA, 19 nt, Artificial Sequence
  Description of Artificial Sequence: Synthetic oligonucleotide
  Sense strand starting at position 3927 of SEQ ID NO: 2673
caacaaauucucugcggua

SEQ ID NO: 207519 - RNA, 19 nt, Artificial Sequence
  Description of Artificial Sequence: Synthetic oligonucleotide
  Antisense strand to SEQ ID NO: 207518
uaccgcagagaauuuguug

SEQ ID NO: 207520 - RNA, 19 nt, Artificial Sequence
  Description of Artificial Sequence: Synthetic oligonucleotide
  Sense strand starting at position 3928 of SEQ ID NO: 2673
aacaaauucucugcgguau

SEQ ID NO: 207521 - RNA, 19 nt, Artificial Sequence
  Description of Artificial Sequence: Synthetic oligonucleotide
  Antisense strand to SEQ ID NO: 207520
auaccgcagagaauuuguu

SEQ ID NO: 207522 - RNA, 19 nt, Artificial Sequence
  Description of Artificial Sequence: Synthetic oligonucleotide
  Sense strand starting at position 3929 of SEQ ID NO: 2673
acaaauucucugcgguauu

SEQ ID NO: 207523 - RNA, 19 nt, Artificial Sequence
  Description of Artificial Sequence: Synthetic oligonucleotide
  Antisense strand to SEQ ID NO: 207522
aauaccgcagagaauuugu

SEQ ID NO: 207524 - RNA, 19 nt, Artificial Sequence
  Description of Artificial Sequence: Synthetic oligonucleotide
  Sense strand starting at position 237 of SEQ ID NO: 2674
cugccuacucuugguagga

SEQ ID NO: 207525 - RNA, 19 nt, Artificial Sequence
  Description of Artificial Sequence: Synthetic oligonucleotide
  Antisense strand to SEQ ID NO: 207524
uccuaccaagaguaggcag

SEQ ID NO: 207526 - RNA, 19 nt, Artificial Sequence
  Description of Artificial Sequence: Synthetic oligonucleotide
  Sense strand starting at position 554 of SEQ ID NO: 2674
gauccaagccauggaagau

SEQ ID NO: 207527 - RNA, 19 nt, Artificial Sequence
  Description of Artificial Sequence: Synthetic oligonucleotide
  Antisense strand to SEQ ID NO: 207526
aucuuccauggcuuggauc

SEQ ID NO: 207528 - RNA, 19 nt, Artificial Sequence
  Description of Artificial Sequence: Synthetic oligonucleotide
  Sense strand starting at position 689 of SEQ ID NO: 2674
uagaguucuguugagacca

SEQ ID NO: 207529 - RNA, 19 nt, Artificial Sequence
  Description of Artificial Sequence: Synthetic oligonucleotide
  Antisense strand to SEQ ID NO: 207528
uggucucaacagaacucua

SEQ ID NO: 207530 - RNA, 19 nt, Artificial Sequence
  Description of Artificial Sequence: Synthetic oligonucleotide
  Sense strand starting at position 1066 of SEQ ID NO: 2674
gguccaccuuucucacaga

SEQ ID NO: 207531 - RNA, 19 nt, Artificial Sequence
  Description of Artificial Sequence: Synthetic oligonucleotide
  Antisense strand to SEQ ID NO: 207530
ucugugagaaagguggacc

SEQ ID NO: 207532 - RNA, 19 nt, Artificial Sequence
  Description of Artificial Sequence: Synthetic oligonucleotide
  Sense strand starting at position 1424 of SEQ ID NO: 2674
gguccucauucucuaagga

SEQ ID NO: 207533 - RNA, 19 nt, Artificial Sequence
  Description of Artificial Sequence: Synthetic oligonucleotide
  Antisense strand to SEQ ID NO: 207532
uccuuagagaaugaggacc

SEQ ID NO: 207534 - RNA, 19 nt, Artificial Sequence
  Description of Artificial Sequence: Synthetic oligonucleotide
  Sense strand starting at position 1568 of SEQ ID NO: 2674
uuuaaagugcuagagcaau

SEQ ID NO: 207535 - RNA, 19 nt, Artificial Sequence
  Description of Artificial Sequence: Synthetic oligonucleotide
  Antisense strand to SEQ ID NO: 207534
auugcucuagcacuuuaaa

SEQ ID NO: 207536 - RNA, 19 nt, Artificial Sequence
  Description of Artificial Sequence: Synthetic oligonucleotide
  Sense strand starting at position 1574 of SEQ ID NO: 2674
gugcuagagcaauacccau

SEQ ID NO: 207537 - RNA, 19 nt, Artificial Sequence
  Description of Artificial Sequence: Synthetic oligonucleotide
  Antisense strand to SEQ ID NO: 207536
auggguauugcucuagcac

SEQ ID NO: 207538 - RNA, 19 nt, Artificial Sequence
  Description of Artificial Sequence: Synthetic oligonucleotide
  Sense strand starting at position 1670 of SEQ ID NO: 2674
cuaacaauuuccugagacg

SEQ ID NO: 207539 - RNA, 19 nt, Artificial Sequence
  Description of Artificial Sequence: Synthetic oligonucleotide
  Antisense strand to SEQ ID NO: 207538
cgucucaggaaauuguuag

SEQ ID NO: 207540 - RNA, 19 nt, Artificial Sequence
  Description of Artificial Sequence: Synthetic oligonucleotide
  Sense strand starting at position 1721 of SEQ ID NO: 2674
acaagagcucuucgcagaa

SEQ ID NO: 207541 - RNA, 19 nt, Artificial Sequence
  Description of Artificial Sequence: Synthetic oligonucleotide
  Antisense strand to SEQ ID NO: 207540
uucugcgaagagcucuugu

SEQ ID NO: 207542 - RNA, 19 nt, Artificial Sequence
  Description of Artificial Sequence: Synthetic oligonucleotide
  Sense strand starting at position 1725 of SEQ ID NO: 2674
gagcucuucgcagaaucac

SEQ ID NO: 207543 - RNA, 19 nt, Artificial Sequence
  Description of Artificial Sequence: Synthetic oligonucleotide
  Antisense strand to SEQ ID NO: 207542
gugauucugcgaagagcuc

SEQ ID NO: 207544 - RNA, 19 nt, Artificial Sequence
  Description of Artificial Sequence: Synthetic oligonucleotide
  Sense strand starting at position 1783 of SEQ ID NO: 2674
cccagugaacguugaagaa

SEQ ID NO: 207545 - RNA, 19 nt, Artificial Sequence
  Description of Artificial Sequence: Synthetic oligonucleotide
  Antisense strand to SEQ ID NO: 207544
uucuucaacguucacuggg

SEQ ID NO: 207546 - RNA, 19 nt, Artificial Sequence
  Description of Artificial Sequence: Synthetic oligonucleotide
  Sense strand starting at position 1834 of SEQ ID NO: 2674
gcuagugguggcugagaca

SEQ ID NO: 207547 - RNA, 19 nt, Artificial Sequence
  Description of Artificial Sequence: Synthetic oligonucleotide
  Antisense strand to SEQ ID NO: 207546
ugucucagccaccacuagc

SEQ ID NO: 207548 - RNA, 19 nt, Artificial Sequence
  Description of Artificial Sequence: Synthetic oligonucleotide
  Sense strand starting at position 2000 of SEQ ID NO: 2674
acuucagggcagugagaaa

SEQ ID NO: 207549 - RNA, 19 nt, Artificial Sequence
  Description of Artificial Sequence: Synthetic oligonucleotide
  Antisense strand to SEQ ID NO: 207548
uuucucacugcccugaagu

SEQ ID NO: 207550 - RNA, 19 nt, Artificial Sequence
  Description of Artificial Sequence: Synthetic oligonucleotide
  Sense strand starting at position 2059 of SEQ ID NO: 2674
cucuguccuccugggacau

SEQ ID NO: 207551 - RNA, 19 nt, Artificial Sequence
  Description of Artificial Sequence: Synthetic oligonucleotide
  Antisense strand to SEQ ID NO: 207550
augucccaggaggacagag

SEQ ID NO: 207552 - RNA, 19 nt, Artificial Sequence
  Description of Artificial Sequence: Synthetic oligonucleotide
  Sense strand starting at position 2192 of SEQ ID NO: 2674
gaggaaauugccugugcuc

SEQ ID NO: 207553 - RNA, 19 nt, Artificial Sequence
  Description of Artificial Sequence: Synthetic oligonucleotide
  Antisense strand to SEQ ID NO: 207552
gagcacaggcaauuuccuc

SEQ ID NO: 207554 - RNA, 19 nt, Artificial Sequence
  Description of Artificial Sequence: Synthetic oligonucleotide
  Sense strand starting at position 2374 of SEQ ID NO: 2674
agggaaucugcauguuagu

SEQ ID NO: 207555 - RNA, 19 nt, Artificial Sequence
  Description of Artificial Sequence: Synthetic oligonucleotide
  Antisense strand to SEQ ID NO: 207554
acuaacaugcagauucccu

SEQ ID NO: 207556 - RNA, 19 nt, Artificial Sequence
  Description of Artificial Sequence: Synthetic oligonucleotide
  Sense strand starting at position 2761 of SEQ ID NO: 2674
cucacucagucaguggaau

SEQ ID NO: 207557 - RNA, 19 nt, Artificial Sequence
  Description of Artificial Sequence: Synthetic oligonucleotide
  Antisense strand to SEQ ID NO: 207556
auuccacugacugagugag

SEQ ID NO: 207558 - RNA, 19 nt, Artificial Sequence
  Description of Artificial Sequence: Synthetic oligonucleotide
  Sense strand starting at position 3050 of SEQ ID NO: 2674
aaggcaguccuguggugau

SEQ ID NO: 207559 - RNA, 19 nt, Artificial Sequence
  Description of Artificial Sequence: Synthetic oligonucleotide
  Antisense strand to SEQ ID NO: 207558
aucaccacaggacugccuu

SEQ ID NO: 207560 - RNA, 19 nt, Artificial Sequence
  Description of Artificial Sequence: Synthetic oligonucleotide
  Sense strand starting at position 3091 of SEQ ID NO: 2674
aagccucagcuugauaagu

SEQ ID NO: 207561 - RNA, 19 nt, Artificial Sequence
  Description of Artificial Sequence: Synthetic oligonucleotide
  Antisense strand to SEQ ID NO: 207560
acuuaucaagcugaggcuu

SEQ ID NO: 207562 - RNA, 19 nt, Artificial Sequence
  Description of Artificial Sequence: Synthetic oligonucleotide
  Sense strand starting at position 3230 of SEQ ID NO: 2674
ucagcauuccuagggagag

SEQ ID NO: 207563 - RNA, 19 nt, Artificial Sequence
  Description of Artificial Sequence: Synthetic oligonucleotide
  Antisense strand to SEQ ID NO: 207562
cucucccuaggaaugcuga

SEQ ID NO: 207564 - RNA, 19 nt, Artificial Sequence
  Description of Artificial Sequence: Synthetic oligonucleotide
  Sense strand starting at position 3253 of SEQ ID NO: 2674
cacaaagucugacuuagga

SEQ ID NO: 207565 - RNA, 19 nt, Artificial Sequence
  Description of Artificial Sequence: Synthetic oligonucleotide
  Antisense strand to SEQ ID NO: 207564
uccuaagucagacuuugug

SEQ ID NO: 207566 - RNA, 19 nt, Artificial Sequence
  Description of Artificial Sequence: Synthetic oligonucleotide
  Sense strand starting at position 3297 of SEQ ID NO: 2674
cuguuaauuuaugcuagca

SEQ ID NO: 207567 - RNA, 19 nt, Artificial Sequence
  Description of Artificial Sequence: Synthetic oligonucleotide
  Antisense strand to SEQ ID NO: 207566
ugcuagcauaaauuaacag

SEQ ID NO: 207568 - RNA, 19 nt, Artificial Sequence
  Description of Artificial Sequence: Synthetic oligonucleotide
  Sense strand starting at position 3299 of SEQ ID NO: 2674
guuaauuuaugcuagcaau

SEQ ID NO: 207569 - RNA, 19 nt, Artificial Sequence
  Description of Artificial Sequence: Synthetic oligonucleotide
  Antisense strand to SEQ ID NO: 207568
auugcuagcauaaauuaac

SEQ ID NO: 207570 - RNA, 19 nt, Artificial Sequence
  Description of Artificial Sequence: Synthetic oligonucleotide
  Sense strand starting at position 3323 of SEQ ID NO: 2674
aguaucaaguuaguaagau

SEQ ID NO: 207571 - RNA, 19 nt, Artificial Sequence
  Description of Artificial Sequence: Synthetic oligonucleotide
  Antisense strand to SEQ ID NO: 207570
aucuuacuaacuugauacu

SEQ ID NO: 207572 - RNA, 19 nt, Artificial Sequence
  Description of Artificial Sequence: Synthetic oligonucleotide
  Sense strand starting at position 3367 of SEQ ID NO: 2674
agaaacauggugugggaau

SEQ ID NO: 207573 - RNA, 19 nt, Artificial Sequence
  Description of Artificial Sequence: Synthetic oligonucleotide
  Antisense strand to SEQ ID NO: 207572
auucccacaccauguuucu

SEQ ID NO: 207574 - RNA, 19 nt, Artificial Sequence
  Description of Artificial Sequence: Synthetic oligonucleotide
  Sense strand starting at position 3369 of SEQ ID NO: 2674
aaacauggugugggaauga

SEQ ID NO: 207575 - RNA, 19 nt, Artificial Sequence
  Description of Artificial Sequence: Synthetic oligonucleotide
  Antisense strand to SEQ ID NO: 207574
ucauucccacaccauguuu

SEQ ID NO: 207576 - RNA, 19 nt, Artificial Sequence
  Description of Artificial Sequence: Synthetic oligonucleotide
  Sense strand starting at position 3380 of SEQ ID NO: 2674
gggaaugaauucuaaggug

SEQ ID NO: 207577 - RNA, 19 nt, Artificial Sequence
  Description of Artificial Sequence: Synthetic oligonucleotide
  Antisense strand to SEQ ID NO: 207576
caccuuagaauucauuccc

SEQ ID NO: 207578 - RNA, 19 nt, Artificial Sequence
  Description of Artificial Sequence: Synthetic oligonucleotide
  Sense strand starting at position 3385 of SEQ ID NO: 2674
ugaauucuaaggugucaga

SEQ ID NO: 207579 - RNA, 19 nt, Artificial Sequence
  Description of Artificial Sequence: Synthetic oligonucleotide
  Antisense strand to SEQ ID NO: 207578
ucugacaccuuagaauuca

SEQ ID NO: 207580 - RNA, 19 nt, Artificial Sequence
  Description of Artificial Sequence: Synthetic oligonucleotide
  Sense strand starting at position 3408 of SEQ ID NO: 2674
auaggcaagaugugaguau

SEQ ID NO: 207581 - RNA, 19 nt, Artificial Sequence
  Description of Artificial Sequence: Synthetic oligonucleotide
  Antisense strand to SEQ ID NO: 207580
auacucacaucuugccuau

SEQ ID NO: 207582 - RNA, 19 nt, Artificial Sequence
  Description of Artificial Sequence: Synthetic oligonucleotide
  Sense strand starting at position 3412 of SEQ ID NO: 2674
gcaagaugugaguaugaca

SEQ ID NO: 207583 - RNA, 19 nt, Artificial Sequence
  Description of Artificial Sequence: Synthetic oligonucleotide
  Antisense strand to SEQ ID NO: 207582
ugucauacucacaucuugc

SEQ ID NO: 207584 - RNA, 19 nt, Artificial Sequence
  Description of Artificial Sequence: Synthetic oligonucleotide
  Sense strand starting at position 3417 of SEQ ID NO: 2674
augugaguaugacauuaga

SEQ ID NO: 207585 - RNA, 19 nt, Artificial Sequence
  Description of Artificial Sequence: Synthetic oligonucleotide
  Antisense strand to SEQ ID NO: 207584
ucuaaugucauacucacau

SEQ ID NO: 207586 - RNA, 19 nt, Artificial Sequence
  Description of Artificial Sequence: Synthetic oligonucleotide
  Sense strand starting at position 3560 of SEQ ID NO: 2674
cuaugagauugagaagccu

SEQ ID NO: 207587 - RNA, 19 nt, Artificial Sequence
  Description of Artificial Sequence: Synthetic oligonucleotide
  Antisense strand to SEQ ID NO: 207586
aggcuucucaaucucauag

SEQ ID NO: 207588 - RNA, 19 nt, Artificial Sequence
  Description of Artificial Sequence: Synthetic oligonucleotide
  Sense strand starting at position 3569 of SEQ ID NO: 2674
ugagaagccuaacuuaaug

SEQ ID NO: 207589 - RNA, 19 nt, Artificial Sequence
  Description of Artificial Sequence: Synthetic oligonucleotide
  Antisense strand to SEQ ID NO: 207588
cauuaaguuaggcuucuca

SEQ ID NO: 207590 - RNA, 19 nt, Artificial Sequence
  Description of Artificial Sequence: Synthetic oligonucleotide
  Sense strand starting at position 3597 of SEQ ID NO: 2674
auaccaauggcuuaguaag

SEQ ID NO: 207591 - RNA, 19 nt, Artificial Sequence
  Description of Artificial Sequence: Synthetic oligonucleotide
  Antisense strand to SEQ ID NO: 207590
cuuacuaagccauugguau

SEQ ID NO: 207592 - RNA, 19 nt, Artificial Sequence
  Description of Artificial Sequence: Synthetic oligonucleotide
  Sense strand starting at position 3599 of SEQ ID NO: 2674
accaauggcuuaguaagaa

SEQ ID NO: 207593 - RNA, 19 nt, Artificial Sequence
  Description of Artificial Sequence: Synthetic oligonucleotide
  Antisense strand to SEQ ID NO: 207592
uucuuacuaagccauuggu

SEQ ID NO: 207594 - RNA, 19 nt, Artificial Sequence
  Description of Artificial Sequence: Synthetic oligonucleotide
  Sense strand starting at position 3603 of SEQ ID NO: 2674
auggcuuaguaagaaagga

SEQ ID NO: 207595 - RNA, 19 nt, Artificial Sequence
  Description of Artificial Sequence: Synthetic oligonucleotide
  Antisense strand to SEQ ID NO: 207594
uccuuucuuacuaagccau

SEQ ID NO: 207596 - RNA, 19 nt, Artificial Sequence
  Description of Artificial Sequence: Synthetic oligonucleotide
  Sense strand starting at position 3630 of SEQ ID NO: 2674
guggauuuaucuuuggcga

SEQ ID NO: 207597 - RNA, 19 nt, Artificial Sequence
  Description of Artificial Sequence: Synthetic oligonucleotide
  Antisense strand to SEQ ID NO: 207596
ucgccaaagauaaauccac

SEQ ID NO: 207598 - RNA, 19 nt, Artificial Sequence
  Description of Artificial Sequence: Synthetic oligonucleotide
  Sense strand starting at position 3702 of SEQ ID NO: 2674
cgagaugcauuagugaaga

SEQ ID NO: 207599 - RNA, 19 nt, Artificial Sequence
  Description of Artificial Sequence: Synthetic oligonucleotide
  Antisense strand to SEQ ID NO: 207598
ucuucacuaaugcaucucg

SEQ ID NO: 207600 - RNA, 19 nt, Artificial Sequence
  Description of Artificial Sequence: Synthetic oligonucleotide
  Sense strand starting at position 3767 of SEQ ID NO: 2674
aguugaugaugggaucacu

SEQ ID NO: 207601 - RNA, 19 nt, Artificial Sequence
  Description of Artificial Sequence: Synthetic oligonucleotide
  Antisense strand to SEQ ID NO: 207600
agugaucccaucaucaacu

SEQ ID NO: 207602 - RNA, 19 nt, Artificial Sequence
  Description of Artificial Sequence: Synthetic oligonucleotide
  Sense strand starting at position 3804 of SEQ ID NO: 2674
gugauucuaaaguagcaga

SEQ ID NO: 207603 - RNA, 19 nt, Artificial Sequence
  Description of Artificial Sequence: Synthetic oligonucleotide
  Antisense strand to SEQ ID NO: 207602
ucugcuacuuuagaaucac

SEQ ID NO: 207604 - RNA, 19 nt, Artificial Sequence
  Description of Artificial Sequence: Synthetic oligonucleotide
  Sense strand starting at position 137 of SEQ ID NO: 2675
ucuggagcugauuaaugua

SEQ ID NO: 207605 - RNA, 19 nt, Artificial Sequence
  Description of Artificial Sequence: Synthetic oligonucleotide
  Antisense strand to SEQ ID NO: 207604
uacauuaaucagcuccaga

SEQ ID NO: 207606 - RNA, 19 nt, Artificial Sequence
  Description of Artificial Sequence: Synthetic oligonucleotide
  Sense strand starting at position 238 of SEQ ID NO: 2675
gagagauguuuguuuauug

SEQ ID NO: 207607 - RNA, 19 nt, Artificial Sequence
  Description of Artificial Sequence: Synthetic oligonucleotide
  Antisense strand to SEQ ID NO: 207606
caauaaacaaacaucucuc

SEQ ID NO: 207608 - RNA, 19 nt, Artificial Sequence
  Description of Artificial Sequence: Synthetic oligonucleotide
  Sense strand starting at position 273 of SEQ ID NO: 2675
ggaauagugugguuuagag

SEQ ID NO: 207609 - RNA, 19 nt, Artificial Sequence
  Description of Artificial Sequence: Synthetic oligonucleotide
  Antisense strand to SEQ ID NO: 207608
cucuaaaccacacuauucc

SEQ ID NO: 207610 - RNA, 19 nt, Artificial Sequence
  Description of Artificial Sequence: Synthetic oligonucleotide
  Sense strand starting at position 298 of SEQ ID NO: 2675
acuuaaccuguguaagaac

SEQ ID NO: 207611 - RNA, 19 nt, Artificial Sequence
  Description of Artificial Sequence: Synthetic oligonucleotide
  Antisense strand to SEQ ID NO: 207610
guucuuacacagguuaagu

SEQ ID NO: 207612 - RNA, 19 nt, Artificial Sequence
  Description of Artificial Sequence: Synthetic oligonucleotide
  Sense strand starting at position 313 of SEQ ID NO: 2675
gaacucaugcaguaagucu

SEQ ID NO: 207613 - RNA, 19 nt, Artificial Sequence
  Description of Artificial Sequence: Synthetic oligonucleotide
  Antisense strand to SEQ ID NO: 207612
agacuuacugcaugaguuc

SEQ ID NO: 207614 - RNA, 19 nt, Artificial Sequence
  Description of Artificial Sequence: Synthetic oligonucleotide
  Sense strand starting at position 376 of SEQ ID NO: 2675
auauuacaucuuuaggguu

SEQ ID NO: 207615 - RNA, 19 nt, Artificial Sequence
  Description of Artificial Sequence: Synthetic oligonucleotide
  Antisense strand to SEQ ID NO: 207614
aacccuaaagauguaauau

SEQ ID NO: 207616 - RNA, 19 nt, Artificial Sequence
  Description of Artificial Sequence: Synthetic oligonucleotide
  Sense strand starting at position 383 of SEQ ID NO: 2675
aucuuuaggguuuacuuua

SEQ ID NO: 207617 - RNA, 19 nt, Artificial Sequence
  Description of Artificial Sequence: Synthetic oligonucleotide
  Antisense strand to SEQ ID NO: 207616
uaaaguaaacccuaaagau

SEQ ID NO: 207618 - RNA, 19 nt, Artificial Sequence
  Description of Artificial Sequence: Synthetic oligonucleotide
  Sense strand starting at position 429 of SEQ ID NO: 2675
uuucauugggaguggagua

SEQ ID NO: 207619 - RNA, 19 nt, Artificial Sequence
  Description of Artificial Sequence: Synthetic oligonucleotide
  Antisense strand to SEQ ID NO: 207618
uacuccacucccaaugaaa

SEQ ID NO: 207620 - RNA, 19 nt, Artificial Sequence
  Description of Artificial Sequence: Synthetic oligonucleotide
  Sense strand starting at position 517 of SEQ ID NO: 2675
uguuguauguauuugaagu

SEQ ID NO: 207621 - RNA, 19 nt, Artificial Sequence
  Description of Artificial Sequence: Synthetic oligonucleotide
  Antisense strand to SEQ ID NO: 207620
acuucaaauacauacaaca

SEQ ID NO: 207622 - RNA, 19 nt, Artificial Sequence
  Description of Artificial Sequence: Synthetic oligonucleotide
  Sense strand starting at position 518 of SEQ ID NO: 2675
guuguauguauuugaaguu

SEQ ID NO: 207623 - RNA, 19 nt, Artificial Sequence
  Description of Artificial Sequence: Synthetic oligonucleotide
  Antisense strand to SEQ ID NO: 207622
aacuucaaauacauacaac

SEQ ID NO: 207624 - RNA, 19 nt, Artificial Sequence
  Description of Artificial Sequence: Synthetic oligonucleotide
  Sense strand starting at position 608 of SEQ ID NO: 2675
gcuuguucucucgcuaaca

SEQ ID NO: 207625 - RNA, 19 nt, Artificial Sequence
  Description of Artificial Sequence: Synthetic oligonucleotide
  Antisense strand to SEQ ID NO: 207624
uguuagcgagagaacaagc

SEQ ID NO: 207626 - RNA, 19 nt, Artificial Sequence
  Description of Artificial Sequence: Synthetic oligonucleotide
  Sense strand starting at position 726 of SEQ ID NO: 2675
gucgaauagccucaaacaa

SEQ ID NO: 207627 - RNA, 19 nt, Artificial Sequence
  Description of Artificial Sequence: Synthetic oligonucleotide
  Antisense strand to SEQ ID NO: 207626
uuguuugaggcuauucgac

SEQ ID NO: 207628 - RNA, 19 nt, Artificial Sequence
  Description of Artificial Sequence: Synthetic oligonucleotide
  Sense strand starting at position 781 of SEQ ID NO: 2675
acaugaaucuuaguguuaa

SEQ ID NO: 207629 - RNA, 19 nt, Artificial Sequence
  Description of Artificial Sequence: Synthetic oligonucleotide
  Antisense strand to SEQ ID NO: 207628
uuaacacuaagauucaugu

SEQ ID NO: 207630 - RNA, 19 nt, Artificial Sequence
  Description of Artificial Sequence: Synthetic oligonucleotide
  Sense strand starting at position 1014 of SEQ ID NO: 2675
agaguagauuuacagaauu

SEQ ID NO: 207631 - RNA, 19 nt, Artificial Sequence
  Description of Artificial Sequence: Synthetic oligonucleotide
  Antisense strand to SEQ ID NO: 207630
aauucuguaaaucuacucu

SEQ ID NO: 207632 - RNA, 19 nt, Artificial Sequence
  Description of Artificial Sequence: Synthetic oligonucleotide
  Sense strand starting at position 1119 of SEQ ID NO: 2675
augacuuuauggcuuuaau

SEQ ID NO: 207633 - RNA, 19 nt, Artificial Sequence
  Description of Artificial Sequence: Synthetic oligonucleotide
  Antisense strand to SEQ ID NO: 207632
auuaaagccauaaagucau

SEQ ID NO: 207634 - RNA, 19 nt, Artificial Sequence
  Description of Artificial Sequence: Synthetic oligonucleotide
  Sense strand starting at position 1177 of SEQ ID NO: 2675
aggucaccuguuuaaugaa

SEQ ID NO: 207635 - RNA, 19 nt, Artificial Sequence
  Description of Artificial Sequence: Synthetic oligonucleotide
  Antisense strand to SEQ ID NO: 207634
uucauuaaacaggugaccu

SEQ ID NO: 207636 - RNA, 19 nt, Artificial Sequence
  Description of Artificial Sequence: Synthetic oligonucleotide
  Sense strand starting at position 1476 of SEQ ID NO: 2675
gcuguacauuugcccuaau

SEQ ID NO: 207637 - RNA, 19 nt, Artificial Sequence
  Description of Artificial Sequence: Synthetic oligonucleotide
  Antisense strand to SEQ ID NO: 207636
auuagggcaaauguacagc

SEQ ID NO: 207638 - RNA, 19 nt, Artificial Sequence
  Description of Artificial Sequence: Synthetic oligonucleotide
  Sense strand starting at position 1529 of SEQ ID NO: 2675
gcacguauauuauuuauca

SEQ ID NO: 207639 - RNA, 19 nt, Artificial Sequence
  Description of Artificial Sequence: Synthetic oligonucleotide
  Antisense strand to SEQ ID NO: 207638
ugauaaauaauauacgugc

SEQ ID NO: 207640 - RNA, 19 nt, Artificial Sequence
  Description of Artificial Sequence: Synthetic oligonucleotide
  Sense strand starting at position 1611 of SEQ ID NO: 2675
cucuuuguccaugagagca

SEQ ID NO: 207641 - RNA, 19 nt, Artificial Sequence
  Description of Artificial Sequence: Synthetic oligonucleotide
  Antisense strand to SEQ ID NO: 207640
ugcucucauggacaaagag

SEQ ID NO: 207642 - RNA, 19 nt, Artificial Sequence
  Description of Artificial Sequence: Synthetic oligonucleotide
  Sense strand starting at position 1678 of SEQ ID NO: 2675
gguugucaaccacagucau

SEQ ID NO: 207643 - RNA, 19 nt, Artificial Sequence
  Description of Artificial Sequence: Synthetic oligonucleotide
  Antisense strand to SEQ ID NO: 207642
augacugugguugacaacc

SEQ ID NO: 207644 - RNA, 19 nt, Artificial Sequence
  Description of Artificial Sequence: Synthetic oligonucleotide
  Sense strand starting at position 1699 of SEQ ID NO: 2675
ucacgauggguugaaucau

SEQ ID NO: 207645 - RNA, 19 nt, Artificial Sequence
  Description of Artificial Sequence: Synthetic oligonucleotide
  Antisense strand to SEQ ID NO: 207644
augauucaacccaucguga

SEQ ID NO: 207646 - RNA, 19 nt, Artificial Sequence
  Description of Artificial Sequence: Synthetic oligonucleotide
  Sense strand starting at position 1785 of SEQ ID NO: 2675
ugaaaucugucauuguaca

SEQ ID NO: 207647 - RNA, 19 nt, Artificial Sequence
  Description of Artificial Sequence: Synthetic oligonucleotide
  Antisense strand to SEQ ID NO: 207646
uguacaaugacagauuuca

SEQ ID NO: 207648 - RNA, 19 nt, Artificial Sequence
  Description of Artificial Sequence: Synthetic oligonucleotide
  Sense strand starting at position 1910 of SEQ ID NO: 2675
gacaguuucuuucugaaag

SEQ ID NO: 207649 - RNA, 19 nt, Artificial Sequence
  Description of Artificial Sequence: Synthetic oligonucleotide
  Antisense strand to SEQ ID NO: 207648
cuuucagaaagaaacuguc

SEQ ID NO: 207650 - RNA, 19 nt, Artificial Sequence
  Description of Artificial Sequence: Synthetic oligonucleotide
  Sense strand starting at position 1990 of SEQ ID NO: 2675
uuccgugggaugggauaua

SEQ ID NO: 207651 - RNA, 19 nt, Artificial Sequence
  Description of Artificial Sequence: Synthetic oligonucleotide
  Antisense strand to SEQ ID NO: 207650
uauaucccaucccacggaa

SEQ ID NO: 207652 - RNA, 19 nt, Artificial Sequence
  Description of Artificial Sequence: Synthetic oligonucleotide
  Sense strand starting at position 1993 of SEQ ID NO: 2675
cgugggaugggauauagua

SEQ ID NO: 207653 - RNA, 19 nt, Artificial Sequence
  Description of Artificial Sequence: Synthetic oligonucleotide
  Antisense strand to SEQ ID NO: 207652
uacuauaucccaucccacg

SEQ ID NO: 207654 - RNA, 19 nt, Artificial Sequence
  Description of Artificial Sequence: Synthetic oligonucleotide
  Sense strand starting at position 2001 of SEQ ID NO: 2675
gggauauaguacgcuaaga

SEQ ID NO: 207655 - RNA, 19 nt, Artificial Sequence
  Description of Artificial Sequence: Synthetic oligonucleotide
  Antisense strand to SEQ ID NO: 207654
ucuuagcguacuauauccc

SEQ ID NO: 207656 - RNA, 19 nt, Artificial Sequence
  Description of Artificial Sequence: Synthetic oligonucleotide
  Sense strand starting at position 2003 of SEQ ID NO: 2675
gauauaguacgcuaagaau

SEQ ID NO: 207657 - RNA, 19 nt, Artificial Sequence
  Description of Artificial Sequence: Synthetic oligonucleotide
  Antisense strand to SEQ ID NO: 207656
auucuuagcguacuauauc

SEQ ID NO: 207658 - RNA, 19 nt, Artificial Sequence
  Description of Artificial Sequence: Synthetic oligonucleotide
  Sense strand starting at position 2101 of SEQ ID NO: 2675
agauaaauauggcuuagca

SEQ ID NO: 207659 - RNA, 19 nt, Artificial Sequence
  Description of Artificial Sequence: Synthetic oligonucleotide
  Antisense strand to SEQ ID NO: 207658
ugcuaagccauauuuaucu

SEQ ID NO: 207660 - RNA, 19 nt, Artificial Sequence
  Description of Artificial Sequence: Synthetic oligonucleotide
  Sense strand starting at position 2103 of SEQ ID NO: 2675
auaaauauggcuuagcaag

SEQ ID NO: 207661 - RNA, 19 nt, Artificial Sequence
  Description of Artificial Sequence: Synthetic oligonucleotide
  Antisense strand to SEQ ID NO: 207660
cuugcuaagccauauuuau

SEQ ID NO: 207662 - RNA, 19 nt, Artificial Sequence
  Description of Artificial Sequence: Synthetic oligonucleotide
  Sense strand starting at position 2543 of SEQ ID NO: 2675
agagucuaaucagugaaua

SEQ ID NO: 207663 - RNA, 19 nt, Artificial Sequence
  Description of Artificial Sequence: Synthetic oligonucleotide
  Antisense strand to SEQ ID NO: 207662
uauucacugauuagacucu

SEQ ID NO: 207664 - RNA, 19 nt, Artificial Sequence
  Description of Artificial Sequence: Synthetic oligonucleotide
  Sense strand starting at position 2544 of SEQ ID NO: 2675
gagucuaaucagugaauau

SEQ ID NO: 207665 - RNA, 19 nt, Artificial Sequence
  Description of Artificial Sequence: Synthetic oligonucleotide
  Antisense strand to SEQ ID NO: 207664
auauucacugauuagacuc

SEQ ID NO: 207666 - RNA, 19 nt, Artificial Sequence
  Description of Artificial Sequence: Synthetic oligonucleotide
  Sense strand starting at position 2630 of SEQ ID NO: 2675
auaauuguacugggauguu

SEQ ID NO: 207667 - RNA, 19 nt, Artificial Sequence
  Description of Artificial Sequence: Synthetic oligonucleotide
  Antisense strand to SEQ ID NO: 207666
aacaucccaguacaauuau

SEQ ID NO: 207668 - RNA, 19 nt, Artificial Sequence
  Description of Artificial Sequence: Synthetic oligonucleotide
  Sense strand starting at position 2633 of SEQ ID NO: 2675
auuguacugggauguuaaa

SEQ ID NO: 207669 - RNA, 19 nt, Artificial Sequence
  Description of Artificial Sequence: Synthetic oligonucleotide
  Antisense strand to SEQ ID NO: 207668
uuuaacaucccaguacaau

SEQ ID NO: 207670 - RNA, 19 nt, Artificial Sequence
  Description of Artificial Sequence: Synthetic oligonucleotide
  Sense strand starting at position 2656 of SEQ ID NO: 2675
gucagucaagacugacaua

SEQ ID NO: 207671 - RNA, 19 nt, Artificial Sequence
  Description of Artificial Sequence: Synthetic oligonucleotide
  Antisense strand to SEQ ID NO: 207670
uaugucagucuugacugac

SEQ ID NO: 207672 - RNA, 19 nt, Artificial Sequence
  Description of Artificial Sequence: Synthetic oligonucleotide
  Sense strand starting at position 2902 of SEQ ID NO: 2675
ccacguagugaauaugaca

SEQ ID NO: 207673 - RNA, 19 nt, Artificial Sequence
  Description of Artificial Sequence: Synthetic oligonucleotide
  Antisense strand to SEQ ID NO: 207672
ugucauauucacuacgugg

SEQ ID NO: 207674 - RNA, 19 nt, Artificial Sequence
  Description of Artificial Sequence: Synthetic oligonucleotide
  Sense strand starting at position 3102 of SEQ ID NO: 2675
gcagcuugacagugauuua

SEQ ID NO: 207675 - RNA, 19 nt, Artificial Sequence
  Description of Artificial Sequence: Synthetic oligonucleotide
  Antisense strand to SEQ ID NO: 207674
uaaaucacugucaagcugc

SEQ ID NO: 207676 - RNA, 19 nt, Artificial Sequence
  Description of Artificial Sequence: Synthetic oligonucleotide
  Sense strand starting at position 3370 of SEQ ID NO: 2675
acuagcaaguucuuagaaa

SEQ ID NO: 207677 - RNA, 19 nt, Artificial Sequence
  Description of Artificial Sequence: Synthetic oligonucleotide
  Antisense strand to SEQ ID NO: 207676
uuucuaagaacuugcuagu

SEQ ID NO: 207678 - RNA, 19 nt, Artificial Sequence
  Description of Artificial Sequence: Synthetic oligonucleotide
  Sense strand starting at position 3474 of SEQ ID NO: 2675
auagaacuaccuugaaguu

SEQ ID NO: 207679 - RNA, 19 nt, Artificial Sequence
  Description of Artificial Sequence: Synthetic oligonucleotide
  Antisense strand to SEQ ID NO: 207678
aacuucaagguaguucuau

SEQ ID NO: 207680 - RNA, 19 nt, Artificial Sequence
  Description of Artificial Sequence: Synthetic oligonucleotide
  Sense strand starting at position 3516 of SEQ ID NO: 2675
guauuacggaaguaugaga

SEQ ID NO: 207681 - RNA, 19 nt, Artificial Sequence
  Description of Artificial Sequence: Synthetic oligonucleotide
  Antisense strand to SEQ ID NO: 207680
ucucauacuuccguaauac

SEQ ID NO: 207682 - RNA, 19 nt, Artificial Sequence
  Description of Artificial Sequence: Synthetic oligonucleotide
  Sense strand starting at position 3577 of SEQ ID NO: 2675
gggaacauuuacuaaagca

SEQ ID NO: 207683 - RNA, 19 nt, Artificial Sequence
  Description of Artificial Sequence: Synthetic oligonucleotide
  Antisense strand to SEQ ID NO: 207682
ugcuuuaguaaauguuccc

SEQ ID NO: 207684 - RNA, 19 nt, Artificial Sequence
  Description of Artificial Sequence: Synthetic oligonucleotide
  Sense strand starting at position 246 of SEQ ID NO: 2678
gcagaacagugagugaauu

SEQ ID NO: 207685 - RNA, 19 nt, Artificial Sequence
  Description of Artificial Sequence: Synthetic oligonucleotide
  Antisense strand to SEQ ID NO: 207684
aauucacucacuguucugc

SEQ ID NO: 207686 - RNA, 19 nt, Artificial Sequence
  Description of Artificial Sequence: Synthetic oligonucleotide
  Sense strand starting at position 247 of SEQ ID NO: 2678
cagaacagugagugaauua

SEQ ID NO: 207687 - RNA, 19 nt, Artificial Sequence
  Description of Artificial Sequence: Synthetic oligonucleotide
  Antisense strand to SEQ ID NO: 207686
uaauucacucacuguucug

SEQ ID NO: 207688 - RNA, 19 nt, Artificial Sequence
  Description of Artificial Sequence: Synthetic oligonucleotide
  Sense strand starting at position 446 of SEQ ID NO: 2678
gcugccuuauuucuguaau

SEQ ID NO: 207689 - RNA, 19 nt, Artificial Sequence
  Description of Artificial Sequence: Synthetic oligonucleotide
  Antisense strand to SEQ ID NO: 207688
auuacagaaauaaggcagc

SEQ ID NO: 207690 - RNA, 19 nt, Artificial Sequence
  Description of Artificial Sequence: Synthetic oligonucleotide
  Sense strand starting at position 749 of SEQ ID NO: 2678
uccacaaaggcuugugaaa

SEQ ID NO: 207691 - RNA, 19 nt, Artificial Sequence
  Description of Artificial Sequence: Synthetic oligonucleotide
  Antisense strand to SEQ ID NO: 207690
uuucacaagccuuugugga

SEQ ID NO: 207692 - RNA, 19 nt, Artificial Sequence
  Description of Artificial Sequence: Synthetic oligonucleotide
  Sense strand starting at position 1001 of SEQ ID NO: 2678
gcuuaugagguauggacaa

SEQ ID NO: 207693 - RNA, 19 nt, Artificial Sequence
  Description of Artificial Sequence: Synthetic oligonucleotide
  Antisense strand to SEQ ID NO: 207692
uuguccauaccucauaagc

SEQ ID NO: 207694 - RNA, 19 nt, Artificial Sequence
  Description of Artificial Sequence: Synthetic oligonucleotide
  Sense strand starting at position 1123 of SEQ ID NO: 2678
ggaaguggguuugcagaua

SEQ ID NO: 207695 - RNA, 19 nt, Artificial Sequence
  Description of Artificial Sequence: Synthetic oligonucleotide
  Antisense strand to SEQ ID NO: 207694
uaucugcaaacccacuucc

SEQ ID NO: 207696 - RNA, 19 nt, Artificial Sequence
  Description of Artificial Sequence: Synthetic oligonucleotide
  Sense strand starting at position 1195 of SEQ ID NO: 2678
ggaugagacuucucagcag

SEQ ID NO: 207697 - RNA, 19 nt, Artificial Sequence
  Description of Artificial Sequence: Synthetic oligonucleotide
  Antisense strand to SEQ ID NO: 207696
cugcugagaagucucaucc

SEQ ID NO: 207698 - RNA, 19 nt, Artificial Sequence
  Description of Artificial Sequence: Synthetic oligonucleotide
  Sense strand starting at position 1199 of SEQ ID NO: 2678
gagacuucucagcagccau

SEQ ID NO: 207699 - RNA, 19 nt, Artificial Sequence
  Description of Artificial Sequence: Synthetic oligonucleotide
  Antisense strand to SEQ ID NO: 207698
auggcugcugagaagucuc

SEQ ID NO: 207700 - RNA, 19 nt, Artificial Sequence
  Description of Artificial Sequence: Synthetic oligonucleotide
  Sense strand starting at position 1228 of SEQ ID NO: 2678
ggaugaaugcauuguugac

SEQ ID NO: 207701 - RNA, 19 nt, Artificial Sequence
  Description of Artificial Sequence: Synthetic oligonucleotide
  Antisense strand to SEQ ID NO: 207700
gucaacaaugcauucaucc

SEQ ID NO: 207702 - RNA, 19 nt, Artificial Sequence
  Description of Artificial Sequence: Synthetic oligonucleotide
  Sense strand starting at position 1232 of SEQ ID NO: 2678
gaaugcauuguugacugaa

SEQ ID NO: 207703 - RNA, 19 nt, Artificial Sequence
  Description of Artificial Sequence: Synthetic oligonucleotide
  Antisense strand to SEQ ID NO: 207702
uucagucaacaaugcauuc

SEQ ID NO: 207704 - RNA, 19 nt, Artificial Sequence
  Description of Artificial Sequence: Synthetic oligonucleotide
  Sense strand starting at position 1268 of SEQ ID NO: 2678
guauuuagugacuguguga

SEQ ID NO: 207705 - RNA, 19 nt, Artificial Sequence
  Description of Artificial Sequence: Synthetic oligonucleotide
  Antisense strand to SEQ ID NO: 207704
ucacacagucacuaaauac

SEQ ID NO: 207706 - RNA, 19 nt, Artificial Sequence
  Description of Artificial Sequence: Synthetic oligonucleotide
  Sense strand starting at position 1313 of SEQ ID NO: 2678
agcugaacugccuaggagu

SEQ ID NO: 207707 - RNA, 19 nt, Artificial Sequence
  Description of Artificial Sequence: Synthetic oligonucleotide
  Antisense strand to SEQ ID NO: 207706
acuccuaggcaguucagcu

SEQ ID NO: 207708 - RNA, 19 nt, Artificial Sequence
  Description of Artificial Sequence: Synthetic oligonucleotide
  Sense strand starting at position 1315 of SEQ ID NO: 2678
cugaacugccuaggaguau

SEQ ID NO: 207709 - RNA, 19 nt, Artificial Sequence
  Description of Artificial Sequence: Synthetic oligonucleotide
  Antisense strand to SEQ ID NO: 207708
auacuccuaggcaguucag

SEQ ID NO: 207710 - RNA, 19 nt, Artificial Sequence
  Description of Artificial Sequence: Synthetic oligonucleotide
  Sense strand starting at position 1348 of SEQ ID NO: 2678
acaguauuaggcuauagua

SEQ ID NO: 207711 - RNA, 19 nt, Artificial Sequence
  Description of Artificial Sequence: Synthetic oligonucleotide
  Antisense strand to SEQ ID NO: 207710
uacuauagccuaauacugu

SEQ ID NO: 207712 - RNA, 19 nt, Artificial Sequence
  Description of Artificial Sequence: Synthetic oligonucleotide
  Sense strand starting at position 1350 of SEQ ID NO: 2678
aguauuaggcuauaguacu

SEQ ID NO: 207713 - RNA, 19 nt, Artificial Sequence
  Description of Artificial Sequence: Synthetic oligonucleotide
  Antisense strand to SEQ ID NO: 207712
aguacuauagccuaauacu

SEQ ID NO: 207714 - RNA, 19 nt, Artificial Sequence
  Description of Artificial Sequence: Synthetic oligonucleotide
  Sense strand starting at position 1412 of SEQ ID NO: 2678
agggacuucuacuccacua

SEQ ID NO: 207715 - RNA, 19 nt, Artificial Sequence
  Description of Artificial Sequence: Synthetic oligonucleotide
  Antisense strand to SEQ ID NO: 207714
uaguggaguagaagucccu

SEQ ID NO: 207716 - RNA, 19 nt, Artificial Sequence
  Description of Artificial Sequence: Synthetic oligonucleotide
  Sense strand starting at position 1460 of SEQ ID NO: 2678
uggcauaaccucuaguuac

SEQ ID NO: 207717 - RNA, 19 nt, Artificial Sequence
  Description of Artificial Sequence: Synthetic oligonucleotide
  Antisense strand to SEQ ID NO: 207716
guaacuagagguuaugcca

SEQ ID NO: 207718 - RNA, 19 nt, Artificial Sequence
  Description of Artificial Sequence: Synthetic oligonucleotide
  Sense strand starting at position 1548 of SEQ ID NO: 2678
aaaucaugaucaguaguga

SEQ ID NO: 207719 - RNA, 19 nt, Artificial Sequence
  Description of Artificial Sequence: Synthetic oligonucleotide
  Antisense strand to SEQ ID NO: 207718
ucacuacugaucaugauuu

SEQ ID NO: 207720 - RNA, 19 nt, Artificial Sequence
  Description of Artificial Sequence: Synthetic oligonucleotide
  Sense strand starting at position 1656 of SEQ ID NO: 2678
uucucaguaguagguagaa

SEQ ID NO: 207721 - RNA, 19 nt, Artificial Sequence
  Description of Artificial Sequence: Synthetic oligonucleotide
  Antisense strand to SEQ ID NO: 207720
uucuaccuacuacugagaa

SEQ ID NO: 207722 - RNA, 19 nt, Artificial Sequence
  Description of Artificial Sequence: Synthetic oligonucleotide
  Sense strand starting at position 1668 of SEQ ID NO: 2678
gguagaaaccuggguguaa

SEQ ID NO: 207723 - RNA, 19 nt, Artificial Sequence
  Description of Artificial Sequence: Synthetic oligonucleotide
  Antisense strand to SEQ ID NO: 207722
uuacacccagguuucuacc

SEQ ID NO: 207724 - RNA, 19 nt, Artificial Sequence
  Description of Artificial Sequence: Synthetic oligonucleotide
  Sense strand starting at position 1669 of SEQ ID NO: 2678
guagaaaccuggguguaau

SEQ ID NO: 207725 - RNA, 19 nt, Artificial Sequence
  Description of Artificial Sequence: Synthetic oligonucleotide
  Antisense strand to SEQ ID NO: 207724
auuacacccagguuucuac

SEQ ID NO: 207726 - RNA, 19 nt, Artificial Sequence
  Description of Artificial Sequence: Synthetic oligonucleotide
  Sense strand starting at position 1670 of SEQ ID NO: 2678
uagaaaccuggguguaauc

SEQ ID NO: 207727 - RNA, 19 nt, Artificial Sequence
  Description of Artificial Sequence: Synthetic oligonucleotide
  Antisense strand to SEQ ID NO: 207726
gauuacacccagguuucua

SEQ ID NO: 207728 - RNA, 19 nt, Artificial Sequence
  Description of Artificial Sequence: Synthetic oligonucleotide
  Sense strand starting at position 1680 of SEQ ID NO: 2678
gguguaauccuagaccacu

SEQ ID NO: 207729 - RNA, 19 nt, Artificial Sequence
  Description of Artificial Sequence: Synthetic oligonucleotide
  Antisense strand to SEQ ID NO: 207728
aguggucuaggauuacacc

SEQ ID NO: 207730 - RNA, 19 nt, Artificial Sequence
  Description of Artificial Sequence: Synthetic oligonucleotide
  Sense strand starting at position 1700 of SEQ ID NO: 2678
aagaaugugccagaguuua

SEQ ID NO: 207731 - RNA, 19 nt, Artificial Sequence
  Description of Artificial Sequence: Synthetic oligonucleotide
  Antisense strand to SEQ ID NO: 207730
uaaacucuggcacauucuu

SEQ ID NO: 207732 - RNA, 19 nt, Artificial Sequence
  Description of Artificial Sequence: Synthetic oligonucleotide
  Sense strand starting at position 2217 of SEQ ID NO: 2678
gaugaagaccuuugucauc

SEQ ID NO: 207733 - RNA, 19 nt, Artificial Sequence
  Description of Artificial Sequence: Synthetic oligonucleotide
  Antisense strand to SEQ ID NO: 207732
gaugacaaaggucuucauc

SEQ ID NO: 207734 - RNA, 19 nt, Artificial Sequence
  Description of Artificial Sequence: Synthetic oligonucleotide
  Sense strand starting at position 2219 of SEQ ID NO: 2678
ugaagaccuuugucaucua

SEQ ID NO: 207735 - RNA, 19 nt, Artificial Sequence
  Description of Artificial Sequence: Synthetic oligonucleotide
  Antisense strand to SEQ ID NO: 207734
uagaugacaaaggucuuca

SEQ ID NO: 207736 - RNA, 19 nt, Artificial Sequence
  Description of Artificial Sequence: Synthetic oligonucleotide
  Sense strand starting at position 2230 of SEQ ID NO: 2678
gucaucuaggucuaggagu

SEQ ID NO: 207737 - RNA, 19 nt, Artificial Sequence
  Description of Artificial Sequence: Synthetic oligonucleotide
  Antisense strand to SEQ ID NO: 207736
acuccuagaccuagaugac

SEQ ID NO: 207738 - RNA, 19 nt, Artificial Sequence
  Description of Artificial Sequence: Synthetic oligonucleotide
  Sense strand starting at position 2241 of SEQ ID NO: 2678
cuaggagugcuuuggagaa

SEQ ID NO: 207739 - RNA, 19 nt, Artificial Sequence
  Description of Artificial Sequence: Synthetic oligonucleotide
  Antisense strand to SEQ ID NO: 207738
uucuccaaagcacuccuag

SEQ ID NO: 207740 - RNA, 19 nt, Artificial Sequence
  Description of Artificial Sequence: Synthetic oligonucleotide
  Sense strand starting at position 2245 of SEQ ID NO: 2678
gagugcuuuggagaagucu

SEQ ID NO: 207741 - RNA, 19 nt, Artificial Sequence
  Description of Artificial Sequence: Synthetic oligonucleotide
  Antisense strand to SEQ ID NO: 207740
agacuucuccaaagcacuc

SEQ ID NO: 207742 - RNA, 19 nt, Artificial Sequence
  Description of Artificial Sequence: Synthetic oligonucleotide
  Sense strand starting at position 2308 of SEQ ID NO: 2678
uauaaauguuauccaggga

SEQ ID NO: 207743 - RNA, 19 nt, Artificial Sequence
  Description of Artificial Sequence: Synthetic oligonucleotide
  Antisense strand to SEQ ID NO: 207742
ucccuggauaacauuuaua

SEQ ID NO: 207744 - RNA, 19 nt, Artificial Sequence
  Description of Artificial Sequence: Synthetic oligonucleotide
  Sense strand starting at position 2311 of SEQ ID NO: 2678
aaauguuauccagggacca

SEQ ID NO: 207745 - RNA, 19 nt, Artificial Sequence
  Description of Artificial Sequence: Synthetic oligonucleotide
  Antisense strand to SEQ ID NO: 207744
uggucccuggauaacauuu

SEQ ID NO: 207746 - RNA, 19 nt, Artificial Sequence
  Description of Artificial Sequence: Synthetic oligonucleotide
  Sense strand starting at position 2620 of SEQ ID NO: 2678
gauugccuagcuuauugau

SEQ ID NO: 207747 - RNA, 19 nt, Artificial Sequence
  Description of Artificial Sequence: Synthetic oligonucleotide
  Antisense strand to SEQ ID NO: 207746
aucaauaagcuaggcaauc

SEQ ID NO: 207748 - RNA, 19 nt, Artificial Sequence
  Description of Artificial Sequence: Synthetic oligonucleotide
  Sense strand starting at position 2713 of SEQ ID NO: 2678
cccuguucugaaugaagug

SEQ ID NO: 207749 - RNA, 19 nt, Artificial Sequence
  Description of Artificial Sequence: Synthetic oligonucleotide
  Antisense strand to SEQ ID NO: 207748
cacuucauucagaacaggg

SEQ ID NO: 207750 - RNA, 19 nt, Artificial Sequence
  Description of Artificial Sequence: Synthetic oligonucleotide
  Sense strand starting at position 2736 of SEQ ID NO: 2678
cugcuacgucgacacauuu

SEQ ID NO: 207751 - RNA, 19 nt, Artificial Sequence
  Description of Artificial Sequence: Synthetic oligonucleotide
  Antisense strand to SEQ ID NO: 207750
aaaugugucgacguagcag

SEQ ID NO: 207752 - RNA, 19 nt, Artificial Sequence
  Description of Artificial Sequence: Synthetic oligonucleotide
  Sense strand starting at position 3029 of SEQ ID NO: 2678
cacaguuaaaugugggaga

SEQ ID NO: 207753 - RNA, 19 nt, Artificial Sequence
  Description of Artificial Sequence: Synthetic oligonucleotide
  Antisense strand to SEQ ID NO: 207752
ucucccacauuuaacugug

SEQ ID NO: 207754 - RNA, 19 nt, Artificial Sequence
  Description of Artificial Sequence: Synthetic oligonucleotide
  Sense strand starting at position 3031 of SEQ ID NO: 2678
caguuaaaugugggagauu

SEQ ID NO: 207755 - RNA, 19 nt, Artificial Sequence
  Description of Artificial Sequence: Synthetic oligonucleotide
  Antisense strand to SEQ ID NO: 207754
aaucucccacauuuaacug

SEQ ID NO: 207756 - RNA, 19 nt, Artificial Sequence
  Description of Artificial Sequence: Synthetic oligonucleotide
  Sense strand starting at position 3203 of SEQ ID NO: 2678
gggaauuuaucucaaacag

SEQ ID NO: 207757 - RNA, 19 nt, Artificial Sequence
  Description of Artificial Sequence: Synthetic oligonucleotide
  Antisense strand to SEQ ID NO: 207756
cuguuugagauaaauuccc

SEQ ID NO: 207758 - RNA, 19 nt, Artificial Sequence
  Description of Artificial Sequence: Synthetic oligonucleotide
  Sense strand starting at position 3344 of SEQ ID NO: 2678
uuugucuaugcugaaugaa

SEQ ID NO: 207759 - RNA, 19 nt, Artificial Sequence
  Description of Artificial Sequence: Synthetic oligonucleotide
  Antisense strand to SEQ ID NO: 207758
uucauucagcauagacaaa

SEQ ID NO: 207760 - RNA, 19 nt, Artificial Sequence
  Description of Artificial Sequence: Synthetic oligonucleotide
  Sense strand starting at position 3702 of SEQ ID NO: 2678
auaaauacaucggugucua

SEQ ID NO: 207761 - RNA, 19 nt, Artificial Sequence
  Description of Artificial Sequence: Synthetic oligonucleotide
  Antisense strand to SEQ ID NO: 207760
uagacaccgauguauuuau

SEQ ID NO: 207762 - RNA, 19 nt, Artificial Sequence
  Description of Artificial Sequence: Synthetic oligonucleotide
  Sense strand starting at position 3919 of SEQ ID NO: 2678
cuagaaugcuagucaauca

SEQ ID NO: 207763 - RNA, 19 nt, Artificial Sequence
  Description of Artificial Sequence: Synthetic oligonucleotide
  Antisense strand to SEQ ID NO: 207762
ugauugacuagcauucuag

SEQ ID NO: 207764 - RNA, 19 nt, Artificial Sequence
  Description of Artificial Sequence: Synthetic oligonucleotide
  Sense strand starting at position 21 of SEQ ID NO: 2677
ggugauauuuauuagaauc

SEQ ID NO: 207765 - RNA, 19 nt, Artificial Sequence
  Description of Artificial Sequence: Synthetic oligonucleotide
  Antisense strand to SEQ ID NO: 207764
gauucuaauaaauaucacc

SEQ ID NO: 207766 - RNA, 19 nt, Artificial Sequence
  Description of Artificial Sequence: Synthetic oligonucleotide
  Sense strand starting at position 29 of SEQ ID NO: 2677
uuauuagaaucaugggaag

SEQ ID NO: 207767 - RNA, 19 nt, Artificial Sequence
  Description of Artificial Sequence: Synthetic oligonucleotide
  Antisense strand to SEQ ID NO: 207766
cuucccaugauucuaauaa

SEQ ID NO: 207768 - RNA, 19 nt, Artificial Sequence
  Description of Artificial Sequence: Synthetic oligonucleotide
  Sense strand starting at position 43 of SEQ ID NO: 2677
ggaagaccuuucuugcuua

SEQ ID NO: 207769 - RNA, 19 nt, Artificial Sequence
  Description of Artificial Sequence: Synthetic oligonucleotide
  Antisense strand to SEQ ID NO: 207768
uaagcaagaaaggucuucc

SEQ ID NO: 207770 - RNA, 19 nt, Artificial Sequence
  Description of Artificial Sequence: Synthetic oligonucleotide
  Sense strand starting at position 412 of SEQ ID NO: 2677
gagauaagaugucacuaug

SEQ ID NO: 207771 - RNA, 19 nt, Artificial Sequence
  Description of Artificial Sequence: Synthetic oligonucleotide
  Antisense strand to SEQ ID NO: 207770
cauagugacaucuuaucuc

SEQ ID NO: 207772 - RNA, 19 nt, Artificial Sequence
  Description of Artificial Sequence: Synthetic oligonucleotide
  Sense strand starting at position 550 of SEQ ID NO: 2677
aaaucaaagucuggauagu

SEQ ID NO: 207773 - RNA, 19 nt, Artificial Sequence
  Description of Artificial Sequence: Synthetic oligonucleotide
  Antisense strand to SEQ ID NO: 207772
acuauccagacuuugauuu

SEQ ID NO: 207774 - RNA, 19 nt, Artificial Sequence
  Description of Artificial Sequence: Synthetic oligonucleotide
  Sense strand starting at position 563 of SEQ ID NO: 2677
gauaguugcuugguuuguu

SEQ ID NO: 207775 - RNA, 19 nt, Artificial Sequence
  Description of Artificial Sequence: Synthetic oligonucleotide
  Antisense strand to SEQ ID NO: 207774
aacaaaccaagcaacuauc

SEQ ID NO: 207776 - RNA, 19 nt, Artificial Sequence
  Description of Artificial Sequence: Synthetic oligonucleotide
  Sense strand starting at position 710 of SEQ ID NO: 2677
gcauguccuuugcagggaa

SEQ ID NO: 207777 - RNA, 19 nt, Artificial Sequence
  Description of Artificial Sequence: Synthetic oligonucleotide
  Antisense strand to SEQ ID NO: 207776
uucccugcaaaggacaugc

SEQ ID NO: 207778 - RNA, 19 nt, Artificial Sequence
  Description of Artificial Sequence: Synthetic oligonucleotide
  Sense strand starting at position 790 of SEQ ID NO: 2677
ugcuuauucuugcuuacag

SEQ ID NO: 207779 - RNA, 19 nt, Artificial Sequence
  Description of Artificial Sequence: Synthetic oligonucleotide
  Antisense strand to SEQ ID NO: 207778
cuguaagcaagaauaagca

SEQ ID NO: 207780 - RNA, 19 nt, Artificial Sequence
  Description of Artificial Sequence: Synthetic oligonucleotide
  Sense strand starting at position 791 of SEQ ID NO: 2677
gcuuauucuugcuuacaga

SEQ ID NO: 207781 - RNA, 19 nt, Artificial Sequence
  Description of Artificial Sequence: Synthetic oligonucleotide
  Antisense strand to SEQ ID NO: 207780
ucuguaagcaagaauaagc

SEQ ID NO: 207782 - RNA, 19 nt, Artificial Sequence
  Description of Artificial Sequence: Synthetic oligonucleotide
  Sense strand starting at position 930 of SEQ ID NO: 2677
ccuaaaugauggguuggua

SEQ ID NO: 207783 - RNA, 19 nt, Artificial Sequence
  Description of Artificial Sequence: Synthetic oligonucleotide
  Antisense strand to SEQ ID NO: 207782
uaccaacccaucauuuagg

SEQ ID NO: 207784 - RNA, 19 nt, Artificial Sequence
  Description of Artificial Sequence: Synthetic oligonucleotide
  Sense strand starting at position 1041 of SEQ ID NO: 2677
uggauagcauaauagucaa

SEQ ID NO: 207785 - RNA, 19 nt, Artificial Sequence
  Description of Artificial Sequence: Synthetic oligonucleotide
  Antisense strand to SEQ ID NO: 207784
uugacuauuaugcuaucca

SEQ ID NO: 207786 - RNA, 19 nt, Artificial Sequence
  Description of Artificial Sequence: Synthetic oligonucleotide
  Sense strand starting at position 1044 of SEQ ID NO: 2677
auagcauaauagucaaaug

SEQ ID NO: 207787 - RNA, 19 nt, Artificial Sequence
  Description of Artificial Sequence: Synthetic oligonucleotide
  Antisense strand to SEQ ID NO: 207786
cauuugacuauuaugcuau

SEQ ID NO: 207788 - RNA, 19 nt, Artificial Sequence
  Description of Artificial Sequence: Synthetic oligonucleotide
  Sense strand starting at position 1160 of SEQ ID NO: 2677
gcacaaacugagugcuuau

SEQ ID NO: 207789 - RNA, 19 nt, Artificial Sequence
  Description of Artificial Sequence: Synthetic oligonucleotide
  Antisense strand to SEQ ID NO: 207788
auaagcacucaguuugugc

SEQ ID NO: 207790 - RNA, 19 nt, Artificial Sequence
  Description of Artificial Sequence: Synthetic oligonucleotide
  Sense strand starting at position 1163 of SEQ ID NO: 2677
caaacugagugcuuauaag

SEQ ID NO: 207791 - RNA, 19 nt, Artificial Sequence
  Description of Artificial Sequence: Synthetic oligonucleotide
  Antisense strand to SEQ ID NO: 207790
cuuauaagcacucaguuug

SEQ ID NO: 207792 - RNA, 19 nt, Artificial Sequence
  Description of Artificial Sequence: Synthetic oligonucleotide
  Sense strand starting at position 1169 of SEQ ID NO: 2677
gagugcuuauaaguauucu

SEQ ID NO: 207793 - RNA, 19 nt, Artificial Sequence
  Description of Artificial Sequence: Synthetic oligonucleotide
  Antisense strand to SEQ ID NO: 207792
agaauacuuauaagcacuc

SEQ ID NO: 207794 - RNA, 19 nt, Artificial Sequence
  Description of Artificial Sequence: Synthetic oligonucleotide
  Sense strand starting at position 1242 of SEQ ID NO: 2677
agcaaagaauaugaaugaa

SEQ ID NO: 207795 - RNA, 19 nt, Artificial Sequence
  Description of Artificial Sequence: Synthetic oligonucleotide
  Antisense strand to SEQ ID NO: 207794
uucauucauauucuuugcu

SEQ ID NO: 207796 - RNA, 19 nt, Artificial Sequence
  Description of Artificial Sequence: Synthetic oligonucleotide
  Sense strand starting at position 1337 of SEQ ID NO: 2677
auauuacacugagauagaa

SEQ ID NO: 207797 - RNA, 19 nt, Artificial Sequence
  Description of Artificial Sequence: Synthetic oligonucleotide
  Antisense strand to SEQ ID NO: 207796
uucuaucucaguguaauau

SEQ ID NO: 207798 - RNA, 19 nt, Artificial Sequence
  Description of Artificial Sequence: Synthetic oligonucleotide
  Sense strand starting at position 1388 of SEQ ID NO: 2677
uauaguacauuauuggaga

SEQ ID NO: 207799 - RNA, 19 nt, Artificial Sequence
  Description of Artificial Sequence: Synthetic oligonucleotide
  Antisense strand to SEQ ID NO: 207798
ucuccaauaauguacuaua

SEQ ID NO: 207800 - RNA, 19 nt, Artificial Sequence
  Description of Artificial Sequence: Synthetic oligonucleotide
  Sense strand starting at position 1432 of SEQ ID NO: 2677
aauauugcuggugggagua

SEQ ID NO: 207801 - RNA, 19 nt, Artificial Sequence
  Description of Artificial Sequence: Synthetic oligonucleotide
  Antisense strand to SEQ ID NO: 207800
uacucccaccagcaauauu

SEQ ID NO: 207802 - RNA, 19 nt, Artificial Sequence
  Description of Artificial Sequence: Synthetic oligonucleotide
  Sense strand starting at position 1557 of SEQ ID NO: 2677
gacagagcaguuugcagaa

SEQ ID NO: 207803 - RNA, 19 nt, Artificial Sequence
  Description of Artificial Sequence: Synthetic oligonucleotide
  Antisense strand to SEQ ID NO: 207802
uucugcaaacugcucuguc

SEQ ID NO: 207804 - RNA, 19 nt, Artificial Sequence
  Description of Artificial Sequence: Synthetic oligonucleotide
  Sense strand starting at position 1569 of SEQ ID NO: 2677
ugcagaagcucgcauuuga

SEQ ID NO: 207805 - RNA, 19 nt, Artificial Sequence
  Description of Artificial Sequence: Synthetic oligonucleotide
  Antisense strand to SEQ ID NO: 207804
ucaaaugcgagcuucugca

SEQ ID NO: 207806 - RNA, 19 nt, Artificial Sequence
  Description of Artificial Sequence: Synthetic oligonucleotide
  Sense strand starting at position 1595 of SEQ ID NO: 2677
cuccauacugacugcaaga

SEQ ID NO: 207807 - RNA, 19 nt, Artificial Sequence
  Description of Artificial Sequence: Synthetic oligonucleotide
  Antisense strand to SEQ ID NO: 207806
ucuugcagucaguauggag

SEQ ID NO: 207808 - RNA, 19 nt, Artificial Sequence
  Description of Artificial Sequence: Synthetic oligonucleotide
  Sense strand starting at position 1778 of SEQ ID NO: 2677
gggagaaauuucugacuuc

SEQ ID NO: 207809 - RNA, 19 nt, Artificial Sequence
  Description of Artificial Sequence: Synthetic oligonucleotide
  Antisense strand to SEQ ID NO: 207808
gaagucagaaauuucuccc

SEQ ID NO: 207810 - RNA, 19 nt, Artificial Sequence
  Description of Artificial Sequence: Synthetic oligonucleotide
  Sense strand starting at position 2037 of SEQ ID NO: 2677
ggcgcaaauccugugugca

SEQ ID NO: 207811 - RNA, 19 nt, Artificial Sequence
  Description of Artificial Sequence: Synthetic oligonucleotide
  Antisense strand to SEQ ID NO: 207810
ugcacacaggauuugcgcc

SEQ ID NO: 207812 - RNA, 19 nt, Artificial Sequence
  Description of Artificial Sequence: Synthetic oligonucleotide
  Sense strand starting at position 2038 of SEQ ID NO: 2677
gcgcaaauccugugugcag

SEQ ID NO: 207813 - RNA, 19 nt, Artificial Sequence
  Description of Artificial Sequence: Synthetic oligonucleotide
  Antisense strand to SEQ ID NO: 207812
cugcacacaggauuugcgc

SEQ ID NO: 207814 - RNA, 19 nt, Artificial Sequence
  Description of Artificial Sequence: Synthetic oligonucleotide
  Sense strand starting at position 2039 of SEQ ID NO: 2677
cgcaaauccugugugcaga

SEQ ID NO: 207815 - RNA, 19 nt, Artificial Sequence
  Description of Artificial Sequence: Synthetic oligonucleotide
  Antisense strand to SEQ ID NO: 207814
ucugcacacaggauuugcg

SEQ ID NO: 207816 - RNA, 19 nt, Artificial Sequence
  Description of Artificial Sequence: Synthetic oligonucleotide
  Sense strand starting at position 2137 of SEQ ID NO: 2677
caugcugucugccuggaaa

SEQ ID NO: 207817 - RNA, 19 nt, Artificial Sequence
  Description of Artificial Sequence: Synthetic oligonucleotide
  Antisense strand to SEQ ID NO: 207816
uuuccaggcagacagcaug

SEQ ID NO: 207818 - RNA, 19 nt, Artificial Sequence
  Description of Artificial Sequence: Synthetic oligonucleotide
  Sense strand starting at position 2734 of SEQ ID NO: 2677
cuaucuaaaccuugggaua

SEQ ID NO: 207819 - RNA, 19 nt, Artificial Sequence
  Description of Artificial Sequence: Synthetic oligonucleotide
  Antisense strand to SEQ ID NO: 207818
uaucccaagguuuagauag

SEQ ID NO: 207820 - RNA, 19 nt, Artificial Sequence
  Description of Artificial Sequence: Synthetic oligonucleotide
  Sense strand starting at position 2736 of SEQ ID NO: 2677
aucuaaaccuugggauaca

SEQ ID NO: 207821 - RNA, 19 nt, Artificial Sequence
  Description of Artificial Sequence: Synthetic oligonucleotide
  Antisense strand to SEQ ID NO: 207820
uguaucccaagguuuagau

SEQ ID NO: 207822 - RNA, 19 nt, Artificial Sequence
  Description of Artificial Sequence: Synthetic oligonucleotide
  Sense strand starting at position 2903 of SEQ ID NO: 2677
uuaccaagaucagagaacu

SEQ ID NO: 207823 - RNA, 19 nt, Artificial Sequence
  Description of Artificial Sequence: Synthetic oligonucleotide
  Antisense strand to SEQ ID NO: 207822
aguucucugaucuugguaa

SEQ ID NO: 207824 - RNA, 19 nt, Artificial Sequence
  Description of Artificial Sequence: Synthetic oligonucleotide
  Sense strand starting at position 3655 of SEQ ID NO: 2677
gagaauuggucccaauccu

SEQ ID NO: 207825 - RNA, 19 nt, Artificial Sequence
  Description of Artificial Sequence: Synthetic oligonucleotide
  Antisense strand to SEQ ID NO: 207824
aggauugggaccaauucuc

SEQ ID NO: 207826 - RNA, 19 nt, Artificial Sequence
  Description of Artificial Sequence: Synthetic oligonucleotide
  Sense strand starting at position 3916 of SEQ ID NO: 2677
gguuuaacauaugugaauc

SEQ ID NO: 207827 - RNA, 19 nt, Artificial Sequence
  Description of Artificial Sequence: Synthetic oligonucleotide
  Antisense strand to SEQ ID NO: 207826
gauucacauauguuaaacc

SEQ ID NO: 207828 - RNA, 19 nt, Artificial Sequence
  Description of Artificial Sequence: Synthetic oligonucleotide
  Sense strand starting at position 186 of SEQ ID NO: 2676
ggguuaaacugacuuauug

SEQ ID NO: 207829 - RNA, 19 nt, Artificial Sequence
  Description of Artificial Sequence: Synthetic oligonucleotide
  Antisense strand to SEQ ID NO: 207828
caauaagucaguuuaaccc

SEQ ID NO: 207830 - RNA, 19 nt, Artificial Sequence
  Description of Artificial Sequence: Synthetic oligonucleotide
  Sense strand starting at position 623 of SEQ ID NO: 2676
uuccuaagugauugucagu

SEQ ID NO: 207831 - RNA, 19 nt, Artificial Sequence
  Description of Artificial Sequence: Synthetic oligonucleotide
  Antisense strand to SEQ ID NO: 207830
acugacaaucacuuaggaa

SEQ ID NO: 207832 - RNA, 19 nt, Artificial Sequence
  Description of Artificial Sequence: Synthetic oligonucleotide
  Sense strand starting at position 748 of SEQ ID NO: 2676
gagugcuacagaggagaua

SEQ ID NO: 207833 - RNA, 19 nt, Artificial Sequence
  Description of Artificial Sequence: Synthetic oligonucleotide
  Antisense strand to SEQ ID NO: 207832
uaucuccucuguagcacuc

SEQ ID NO: 207834 - RNA, 19 nt, Artificial Sequence
  Description of Artificial Sequence: Synthetic oligonucleotide
  Sense strand starting at position 816 of SEQ ID NO: 2676
caacauuguguggaccuaa

SEQ ID NO: 207835 - RNA, 19 nt, Artificial Sequence
  Description of Artificial Sequence: Synthetic oligonucleotide
  Antisense strand to SEQ ID NO: 207834
uuagguccacacaauguug

SEQ ID NO: 207836 - RNA, 19 nt, Artificial Sequence
  Description of Artificial Sequence: Synthetic oligonucleotide
  Sense strand starting at position 899 of SEQ ID NO: 2676
agaccauucugcuugaaag

SEQ ID NO: 207837 - RNA, 19 nt, Artificial Sequence
  Description of Artificial Sequence: Synthetic oligonucleotide
  Antisense strand to SEQ ID NO: 207836
cuuucaagcagaauggucu

SEQ ID NO: 207838 - RNA, 19 nt, Artificial Sequence
  Description of Artificial Sequence: Synthetic oligonucleotide
  Sense strand starting at position 901 of SEQ ID NO: 2676
accauucugcuugaaagca

SEQ ID NO: 207839 - RNA, 19 nt, Artificial Sequence
  Description of Artificial Sequence: Synthetic oligonucleotide
  Antisense strand to SEQ ID NO: 207838
ugcuuucaagcagaauggu

SEQ ID NO: 207840 - RNA, 19 nt, Artificial Sequence
  Description of Artificial Sequence: Synthetic oligonucleotide
  Sense strand starting at position 951 of SEQ ID NO: 2676
uuaugauagccauguuagg

SEQ ID NO: 207841 - RNA, 19 nt, Artificial Sequence
  Description of Artificial Sequence: Synthetic oligonucleotide
  Antisense strand to SEQ ID NO: 207840
ccuaacauggcuaucauaa

SEQ ID NO: 207842 - RNA, 19 nt, Artificial Sequence
  Description of Artificial Sequence: Synthetic oligonucleotide
  Sense strand starting at position 1002 of SEQ ID NO: 2676
ggaauagccaacuguugau

SEQ ID NO: 207843 - RNA, 19 nt, Artificial Sequence
  Description of Artificial Sequence: Synthetic oligonucleotide
  Antisense strand to SEQ ID NO: 207842
aucaacaguuggcuauucc

SEQ ID NO: 207844 - RNA, 19 nt, Artificial Sequence
  Description of Artificial Sequence: Synthetic oligonucleotide
  Sense strand starting at position 1012 of SEQ ID NO: 2676
acuguugaucuugguuuga

SEQ ID NO: 207845 - RNA, 19 nt, Artificial Sequence
  Description of Artificial Sequence: Synthetic oligonucleotide
  Antisense strand to SEQ ID NO: 207844
ucaaaccaagaucaacagu

SEQ ID NO: 207846 - RNA, 19 nt, Artificial Sequence
  Description of Artificial Sequence: Synthetic oligonucleotide
  Sense strand starting at position 1014 of SEQ ID NO: 2676
uguugaucuugguuugauu

SEQ ID NO: 207847 - RNA, 19 nt, Artificial Sequence
  Description of Artificial Sequence: Synthetic oligonucleotide
  Antisense strand to SEQ ID NO: 207846
aaucaaaccaagaucaaca

SEQ ID NO: 207848 - RNA, 19 nt, Artificial Sequence
  Description of Artificial Sequence: Synthetic oligonucleotide
  Sense strand starting at position 1017 of SEQ ID NO: 2676
ugaucuugguuugauuuau

SEQ ID NO: 207849 - RNA, 19 nt, Artificial Sequence
  Description of Artificial Sequence: Synthetic oligonucleotide
  Antisense strand to SEQ ID NO: 207848
auaaaucaaaccaagauca

SEQ ID NO: 207850 - RNA, 19 nt, Artificial Sequence
  Description of Artificial Sequence: Synthetic oligonucleotide
  Sense strand starting at position 1278 of SEQ ID NO: 2676
aaaggaucuuacccgucua

SEQ ID NO: 207851 - RNA, 19 nt, Artificial Sequence
  Description of Artificial Sequence: Synthetic oligonucleotide
  Antisense strand to SEQ ID NO: 207850
uagacggguaagauccuuu

SEQ ID NO: 207852 - RNA, 19 nt, Artificial Sequence
  Description of Artificial Sequence: Synthetic oligonucleotide
  Sense strand starting at position 1368 of SEQ ID NO: 2676
gcuaauacuuugcucauga

SEQ ID NO: 207853 - RNA, 19 nt, Artificial Sequence
  Description of Artificial Sequence: Synthetic oligonucleotide
  Antisense strand to SEQ ID NO: 207852
ucaugagcaaaguauuagc

SEQ ID NO: 207854 - RNA, 19 nt, Artificial Sequence
  Description of Artificial Sequence: Synthetic oligonucleotide
  Sense strand starting at position 1416 of SEQ ID NO: 2676
uuggcauaucaaugcaaug

SEQ ID NO: 207855 - RNA, 19 nt, Artificial Sequence
  Description of Artificial Sequence: Synthetic oligonucleotide
  Antisense strand to SEQ ID NO: 207854
cauugcauugauaugccaa

SEQ ID NO: 207856 - RNA, 19 nt, Artificial Sequence
  Description of Artificial Sequence: Synthetic oligonucleotide
  Sense strand starting at position 1558 of SEQ ID NO: 2676
ggcuaacucuucucgauua

SEQ ID NO: 207857 - RNA, 19 nt, Artificial Sequence
  Description of Artificial Sequence: Synthetic oligonucleotide
  Antisense strand to SEQ ID NO: 207856
uaaucgagaagaguuagcc

SEQ ID NO: 207858 - RNA, 19 nt, Artificial Sequence
  Description of Artificial Sequence: Synthetic oligonucleotide
  Sense strand starting at position 1619 of SEQ ID NO: 2676
aacggucucguuuaauuaa

SEQ ID NO: 207859 - RNA, 19 nt, Artificial Sequence
  Description of Artificial Sequence: Synthetic oligonucleotide
  Antisense strand to SEQ ID NO: 207858
uuaauuaaacgagaccguu

SEQ ID NO: 207860 - RNA, 19 nt, Artificial Sequence
  Description of Artificial Sequence: Synthetic oligonucleotide
  Sense strand starting at position 2182 of SEQ ID NO: 2676
gaggguugccucgauacuu

SEQ ID NO: 207861 - RNA, 19 nt, Artificial Sequence
  Description of Artificial Sequence: Synthetic oligonucleotide
  Antisense strand to SEQ ID NO: 207860
aaguaucgaggcaacccuc

SEQ ID NO: 207862 - RNA, 19 nt, Artificial Sequence
  Description of Artificial Sequence: Synthetic oligonucleotide
  Sense strand starting at position 2360 of SEQ ID NO: 2676
aggcaucgcagaggucaau

SEQ ID NO: 207863 - RNA, 19 nt, Artificial Sequence
  Description of Artificial Sequence: Synthetic oligonucleotide
  Antisense strand to SEQ ID NO: 207862
auugaccucugcgaugccu

SEQ ID NO: 207864 - RNA, 19 nt, Artificial Sequence
  Description of Artificial Sequence: Synthetic oligonucleotide
  Sense strand starting at position 2366 of SEQ ID NO: 2676
cgcagaggucaaugaaagu

SEQ ID NO: 207865 - RNA, 19 nt, Artificial Sequence
  Description of Artificial Sequence: Synthetic oligonucleotide
  Antisense strand to SEQ ID NO: 207864
acuuucauugaccucugcg

SEQ ID NO: 207866 - RNA, 19 nt, Artificial Sequence
  Description of Artificial Sequence: Synthetic oligonucleotide
  Sense strand starting at position 2879 of SEQ ID NO: 2676
ggccauuauugaguuacac

SEQ ID NO: 207867 - RNA, 19 nt, Artificial Sequence
  Description of Artificial Sequence: Synthetic oligonucleotide
  Antisense strand to SEQ ID NO: 207866
guguaacucaauaauggcc

SEQ ID NO: 207868 - RNA, 19 nt, Artificial Sequence
  Description of Artificial Sequence: Synthetic oligonucleotide
  Sense strand starting at position 2924 of SEQ ID NO: 2676
gcaucugcccagcaugauu

SEQ ID NO: 207869 - RNA, 19 nt, Artificial Sequence
  Description of Artificial Sequence: Synthetic oligonucleotide
  Antisense strand to SEQ ID NO: 207868
aaucaugcugggcagaugc

SEQ ID NO: 207870 - RNA, 19 nt, Artificial Sequence
  Description of Artificial Sequence: Synthetic oligonucleotide
  Sense strand starting at position 2992 of SEQ ID NO: 2676
ccuuguguucuacaacgga

SEQ ID NO: 207871 - RNA, 19 nt, Artificial Sequence
  Description of Artificial Sequence: Synthetic oligonucleotide
  Antisense strand to SEQ ID NO: 207870
uccguuguagaacacaagg

SEQ ID NO: 207872 - RNA, 19 nt, Artificial Sequence
  Description of Artificial Sequence: Synthetic oligonucleotide
  Sense strand starting at position 2995 of SEQ ID NO: 2676
uguguucuacaacggauua

SEQ ID NO: 207873 - RNA, 19 nt, Artificial Sequence
  Description of Artificial Sequence: Synthetic oligonucleotide
  Antisense strand to SEQ ID NO: 207872
uaauccguuguagaacaca

SEQ ID NO: 207874 - RNA, 19 nt, Artificial Sequence
  Description of Artificial Sequence: Synthetic oligonucleotide
  Sense strand starting at position 2997 of SEQ ID NO: 2676
uguucuacaacggauuagu

SEQ ID NO: 207875 - RNA, 19 nt, Artificial Sequence
  Description of Artificial Sequence: Synthetic oligonucleotide
  Antisense strand to SEQ ID NO: 207874
acuaauccguuguagaaca

SEQ ID NO: 207876 - RNA, 19 nt, Artificial Sequence
  Description of Artificial Sequence: Synthetic oligonucleotide
  Sense strand starting at position 3007 of SEQ ID NO: 2676
cggauuagucaaugcgaaa

SEQ ID NO: 207877 - RNA, 19 nt, Artificial Sequence
  Description of Artificial Sequence: Synthetic oligonucleotide
  Antisense strand to SEQ ID NO: 207876
uuucgcauugacuaauccg

SEQ ID NO: 207878 - RNA, 19 nt, Artificial Sequence
  Description of Artificial Sequence: Synthetic oligonucleotide
  Sense strand starting at position 3150 of SEQ ID NO: 2676
agacuuagcucuuugaagg

SEQ ID NO: 207879 - RNA, 19 nt, Artificial Sequence
  Description of Artificial Sequence: Synthetic oligonucleotide
  Antisense strand to SEQ ID NO: 207878
ccuucaaagagcuaagucu

SEQ ID NO: 207880 - RNA, 19 nt, Artificial Sequence
  Description of Artificial Sequence: Synthetic oligonucleotide
  Sense strand starting at position 3151 of SEQ ID NO: 2676
gacuuagcucuuugaaggu

SEQ ID NO: 207881 - RNA, 19 nt, Artificial Sequence
  Description of Artificial Sequence: Synthetic oligonucleotide
  Antisense strand to SEQ ID NO: 207880
accuucaaagagcuaaguc

SEQ ID NO: 207882 - RNA, 19 nt, Artificial Sequence
  Description of Artificial Sequence: Synthetic oligonucleotide
  Sense strand starting at position 3197 of SEQ ID NO: 2676
ugcagaagaguugagaagu

SEQ ID NO: 207883 - RNA, 19 nt, Artificial Sequence
  Description of Artificial Sequence: Synthetic oligonucleotide
  Antisense strand to SEQ ID NO: 207882
acuucucaacucuucugca

SEQ ID NO: 207884 - RNA, 19 nt, Artificial Sequence
  Description of Artificial Sequence: Synthetic oligonucleotide
  Sense strand starting at position 3205 of SEQ ID NO: 2676
aguugagaaguuuaaguua

SEQ ID NO: 207885 - RNA, 19 nt, Artificial Sequence
  Description of Artificial Sequence: Synthetic oligonucleotide
  Antisense strand to SEQ ID NO: 207884
uaacuuaaacuucucaacu

SEQ ID NO: 207886 - RNA, 19 nt, Artificial Sequence
  Description of Artificial Sequence: Synthetic oligonucleotide
  Sense strand starting at position 3285 of SEQ ID NO: 2676
ggcuuaaauuagcuaaggu

SEQ ID NO: 207887 - RNA, 19 nt, Artificial Sequence
  Description of Artificial Sequence: Synthetic oligonucleotide
  Antisense strand to SEQ ID NO: 207886
accuuagcuaauuuaagcc

SEQ ID NO: 207888 - RNA, 19 nt, Artificial Sequence
  Description of Artificial Sequence: Synthetic oligonucleotide
  Sense strand starting at position 3312 of SEQ ID NO: 2676
aacccaguggcccagaaau

SEQ ID NO: 207889 - RNA, 19 nt, Artificial Sequence
  Description of Artificial Sequence: Synthetic oligonucleotide
  Antisense strand to SEQ ID NO: 207888
auuucugggccacuggguu

SEQ ID NO: 207890 - RNA, 19 nt, Artificial Sequence
  Description of Artificial Sequence: Synthetic oligonucleotide
  Sense strand starting at position 3351 of SEQ ID NO: 2676
uaugauuaaugggauugga

SEQ ID NO: 207891 - RNA, 19 nt, Artificial Sequence
  Description of Artificial Sequence: Synthetic oligonucleotide
  Antisense strand to SEQ ID NO: 207890
uccaaucccauuaaucaua

SEQ ID NO: 207892 - RNA, 19 nt, Artificial Sequence
  Description of Artificial Sequence: Synthetic oligonucleotide
  Sense strand starting at position 3354 of SEQ ID NO: 2676
gauuaaugggauuggaguu

SEQ ID NO: 207893 - RNA, 19 nt, Artificial Sequence
  Description of Artificial Sequence: Synthetic oligonucleotide
  Antisense strand to SEQ ID NO: 207892
aacuccaaucccauuaauc

SEQ ID NO: 207894 - RNA, 19 nt, Artificial Sequence
  Description of Artificial Sequence: Synthetic oligonucleotide
  Sense strand starting at position 3360 of SEQ ID NO: 2676
ugggauuggaguugguaca

SEQ ID NO: 207895 - RNA, 19 nt, Artificial Sequence
  Description of Artificial Sequence: Synthetic oligonucleotide
  Antisense strand to SEQ ID NO: 207894
uguaccaacuccaauccca

SEQ ID NO: 207896 - RNA, 19 nt, Artificial Sequence
  Description of Artificial Sequence: Synthetic oligonucleotide
  Sense strand starting at position 3361 of SEQ ID NO: 2676
gggauuggaguugguacau

SEQ ID NO: 207897 - RNA, 19 nt, Artificial Sequence
  Description of Artificial Sequence: Synthetic oligonucleotide
  Antisense strand to SEQ ID NO: 207896
auguaccaacuccaauccc

SEQ ID NO: 207898 - RNA, 19 nt, Artificial Sequence
  Description of Artificial Sequence: Synthetic oligonucleotide
  Sense strand starting at position 3371 of SEQ ID NO: 2676
uugguacauccugacaauc

SEQ ID NO: 207899 - RNA, 19 nt, Artificial Sequence
  Description of Artificial Sequence: Synthetic oligonucleotide
  Antisense strand to SEQ ID NO: 207898
gauugucaggauguaccaa

SEQ ID NO: 207900 - RNA, 19 nt, Artificial Sequence
  Description of Artificial Sequence: Synthetic oligonucleotide
  Sense strand starting at position 3384 of SEQ ID NO: 2676
acaaucauagaauguaagu

SEQ ID NO: 207901 - RNA, 19 nt, Artificial Sequence
  Description of Artificial Sequence: Synthetic oligonucleotide
  Antisense strand to SEQ ID NO: 207900
acuuacauucuaugauugu

SEQ ID NO: 207902 - RNA, 19 nt, Artificial Sequence
  Description of Artificial Sequence: Synthetic oligonucleotide
  Sense strand starting at position 3729 of SEQ ID NO: 2676
gcacccagccaguaucaau

SEQ ID NO: 207903 - RNA, 19 nt, Artificial Sequence
  Description of Artificial Sequence: Synthetic oligonucleotide
  Antisense strand to SEQ ID NO: 207902
auugauacuggcugggugc

SEQ ID NO: 207904 - RNA, 19 nt, Artificial Sequence
  Description of Artificial Sequence: Synthetic oligonucleotide
  Sense strand starting at position 3924 of SEQ ID NO: 2676
caaccuagugcuggaauca

SEQ ID NO: 207905 - RNA, 19 nt, Artificial Sequence
  Description of Artificial Sequence: Synthetic oligonucleotide
  Antisense strand to SEQ ID NO: 207904
ugauuccagcacuagguug

SEQ ID NO: 207906 - RNA, 19 nt, Artificial Sequence
  Description of Artificial Sequence: Synthetic oligonucleotide
  Sense strand starting at position 3925 of SEQ ID NO: 2676
aaccuagugcuggaaucau

SEQ ID NO: 207907 - RNA, 19 nt, Artificial Sequence
  Description of Artificial Sequence: Synthetic oligonucleotide
  Antisense strand to SEQ ID NO: 207906
augauuccagcacuagguu

SEQ ID NO: 207908 - RNA, 19 nt, Artificial Sequence
  Description of Artificial Sequence: Synthetic oligonucleotide
  Sense strand starting at position 278 of SEQ ID NO: 2679
ggguuaaacugacuuauug

SEQ ID NO: 207909 - RNA, 19 nt, Artificial Sequence
  Description of Artificial Sequence: Synthetic oligonucleotide
  Antisense strand to SEQ ID NO: 207908
caauaagucaguuuaaccc

SEQ ID NO: 207910 - RNA, 19 nt, Artificial Sequence
  Description of Artificial Sequence: Synthetic oligonucleotide
  Sense strand starting at position 715 of SEQ ID NO: 2679
uuccuaagugauugucagu

SEQ ID NO: 207911 - RNA, 19 nt, Artificial Sequence
  Description of Artificial Sequence: Synthetic oligonucleotide
  Antisense strand to SEQ ID NO: 207910
acugacaaucacuuaggaa

SEQ ID NO: 207912 - RNA, 19 nt, Artificial Sequence
  Description of Artificial Sequence: Synthetic oligonucleotide
  Sense strand starting at position 840 of SEQ ID NO: 2679
gagugcuacagaggagaua

SEQ ID NO: 207913 - RNA, 19 nt, Artificial Sequence
  Description of Artificial Sequence: Synthetic oligonucleotide
  Antisense strand to SEQ ID NO: 207912
uaucuccucuguagcacuc

SEQ ID NO: 207914 - RNA, 19 nt, Artificial Sequence
  Description of Artificial Sequence: Synthetic oligonucleotide
  Sense strand starting at position 908 of SEQ ID NO: 2679
caacauuguguggaccuaa

SEQ ID NO: 207915 - RNA, 19 nt, Artificial Sequence
  Description of Artificial Sequence: Synthetic oligonucleotide
  Antisense strand to SEQ ID NO: 207914
uuagguccacacaauguug

SEQ ID NO: 207916 - RNA, 19 nt, Artificial Sequence
  Description of Artificial Sequence: Synthetic oligonucleotide
  Sense strand starting at position 991 of SEQ ID NO: 2679
agaccauucugcuugaaag

SEQ ID NO: 207917 - RNA, 19 nt, Artificial Sequence
  Description of Artificial Sequence: Synthetic oligonucleotide
  Antisense strand to SEQ ID NO: 207916
cuuucaagcagaauggucu

SEQ ID NO: 207918 - RNA, 19 nt, Artificial Sequence
  Description of Artificial Sequence: Synthetic oligonucleotide
  Sense strand starting at position 993 of SEQ ID NO: 2679
accauucugcuugaaagca

SEQ ID NO: 207919 - RNA, 19 nt, Artificial Sequence
  Description of Artificial Sequence: Synthetic oligonucleotide
  Antisense strand to SEQ ID NO: 207918
ugcuuucaagcagaauggu

SEQ ID NO: 207920 - RNA, 19 nt, Artificial Sequence
  Description of Artificial Sequence: Synthetic oligonucleotide
  Sense strand starting at position 1043 of SEQ ID NO: 2679
uuaugauagccauguuagg

SEQ ID NO: 207921 - RNA, 19 nt, Artificial Sequence
  Description of Artificial Sequence: Synthetic oligonucleotide
  Antisense strand to SEQ ID NO: 207920
ccuaacauggcuaucauaa

SEQ ID NO: 207922 - RNA, 19 nt, Artificial Sequence
  Description of Artificial Sequence: Synthetic oligonucleotide
  Sense strand starting at position 1094 of SEQ ID NO: 2679
ggaauagccaacuguugau

SEQ ID NO: 207923 - RNA, 19 nt, Artificial Sequence
  Description of Artificial Sequence: Synthetic oligonucleotide
  Antisense strand to SEQ ID NO: 207922
aucaacaguuggcuauucc

SEQ ID NO: 207924 - RNA, 19 nt, Artificial Sequence
  Description of Artificial Sequence: Synthetic oligonucleotide
  Sense strand starting at position 1104 of SEQ ID NO: 2679
acuguugaucuugguuuga

SEQ ID NO: 207925 - RNA, 19 nt, Artificial Sequence
  Description of Artificial Sequence: Synthetic oligonucleotide
  Antisense strand to SEQ ID NO: 207924
ucaaaccaagaucaacagu

SEQ ID NO: 207926 - RNA, 19 nt, Artificial Sequence
  Description of Artificial Sequence: Synthetic oligonucleotide
  Sense strand starting at position 1106 of SEQ ID NO: 2679
uguugaucuugguuugauu

SEQ ID NO: 207927 - RNA, 19 nt, Artificial Sequence
  Description of Artificial Sequence: Synthetic oligonucleotide
  Antisense strand to SEQ ID NO: 207926
aaucaaaccaagaucaaca

SEQ ID NO: 207928 - RNA, 19 nt, Artificial Sequence
  Description of Artificial Sequence: Synthetic oligonucleotide
  Sense strand starting at position 1109 of SEQ ID NO: 2679
ugaucuugguuugauuuau

SEQ ID NO: 207929 - RNA, 19 nt, Artificial Sequence
  Description of Artificial Sequence: Synthetic oligonucleotide
  Antisense strand to SEQ ID NO: 207928
auaaaucaaaccaagauca

SEQ ID NO: 207930 - RNA, 19 nt, Artificial Sequence
  Description of Artificial Sequence: Synthetic oligonucleotide
  Sense strand starting at position 1370 of SEQ ID NO: 2679
aaaggaucuuacccgucua

SEQ ID NO: 207931 - RNA, 19 nt, Artificial Sequence
  Description of Artificial Sequence: Synthetic oligonucleotide
  Antisense strand to SEQ ID NO: 207930
uagacggguaagauccuuu

SEQ ID NO: 207932 - RNA, 19 nt, Artificial Sequence
  Description of Artificial Sequence: Synthetic oligonucleotide
  Sense strand starting at position 1460 of SEQ ID NO: 2679
gcuaauacuuugcucauga

SEQ ID NO: 207933 - RNA, 19 nt, Artificial Sequence
  Description of Artificial Sequence: Synthetic oligonucleotide
  Antisense strand to SEQ ID NO: 207932
ucaugagcaaaguauuagc

SEQ ID NO: 207934 - RNA, 19 nt, Artificial Sequence
  Description of Artificial Sequence: Synthetic oligonucleotide
  Sense strand starting at position 1508 of SEQ ID NO: 2679
uuggcauaucaaugcaaug

SEQ ID NO: 207935 - RNA, 19 nt, Artificial Sequence
  Description of Artificial Sequence: Synthetic oligonucleotide
  Antisense strand to SEQ ID NO: 207934
cauugcauugauaugccaa

SEQ ID NO: 207936 - RNA, 19 nt, Artificial Sequence
  Description of Artificial Sequence: Synthetic oligonucleotide
  Sense strand starting at position 1650 of SEQ ID NO: 2679
ggcuaacucuucucgauua

SEQ ID NO: 207937 - RNA, 19 nt, Artificial Sequence
  Description of Artificial Sequence: Synthetic oligonucleotide
  Antisense strand to SEQ ID NO: 207936
uaaucgagaagaguuagcc

SEQ ID NO: 207938 - RNA, 19 nt, Artificial Sequence
  Description of Artificial Sequence: Synthetic oligonucleotide
  Sense strand starting at position 1711 of SEQ ID NO: 2679
aacggucucguuuaauuaa

SEQ ID NO: 207939 - RNA, 19 nt, Artificial Sequence
  Description of Artificial Sequence: Synthetic oligonucleotide
  Antisense strand to SEQ ID NO: 207938
uuaauuaaacgagaccguu

SEQ ID NO: 207940 - RNA, 19 nt, Artificial Sequence
  Description of Artificial Sequence: Synthetic oligonucleotide
  Sense strand starting at position 2274 of SEQ ID NO: 2679
gaggguugccucgauacuu

SEQ ID NO: 207941 - RNA, 19 nt, Artificial Sequence
  Description of Artificial Sequence: Synthetic oligonucleotide
  Antisense strand to SEQ ID NO: 207940
aaguaucgaggcaacccuc

SEQ ID NO: 207942 - RNA, 19 nt, Artificial Sequence
  Description of Artificial Sequence: Synthetic oligonucleotide
  Sense strand starting at position 2452 of SEQ ID NO: 2679
aggcaucgcagaggucaau

SEQ ID NO: 207943 - RNA, 19 nt, Artificial Sequence
  Description of Artificial Sequence: Synthetic oligonucleotide
  Antisense strand to SEQ ID NO: 207942
auugaccucugcgaugccu

SEQ ID NO: 207944 - RNA, 19 nt, Artificial Sequence
  Description of Artificial Sequence: Synthetic oligonucleotide
  Sense strand starting at position 2458 of SEQ ID NO: 2679
cgcagaggucaaugaaagu

SEQ ID NO: 207945 - RNA, 19 nt, Artificial Sequence
  Description of Artificial Sequence: Synthetic oligonucleotide
  Antisense strand to SEQ ID NO: 207944
acuuucauugaccucugcg

SEQ ID NO: 207946 - RNA, 19 nt, Artificial Sequence
  Description of Artificial Sequence: Synthetic oligonucleotide
  Sense strand starting at position 2971 of SEQ ID NO: 2679
ggccauuauugaguuacac

SEQ ID NO: 207947 - RNA, 19 nt, Artificial Sequence
  Description of Artificial Sequence: Synthetic oligonucleotide
  Antisense strand to SEQ ID NO: 207946
guguaacucaauaauggcc

SEQ ID NO: 207948 - RNA, 19 nt, Artificial Sequence
  Description of Artificial Sequence: Synthetic oligonucleotide
  Sense strand starting at position 3016 of SEQ ID NO: 2679
gcaucugcccagcaugauu

SEQ ID NO: 207949 - RNA, 19 nt, Artificial Sequence
  Description of Artificial Sequence: Synthetic oligonucleotide
  Antisense strand to SEQ ID NO: 207948
aaucaugcugggcagaugc

SEQ ID NO: 207950 - RNA, 19 nt, Artificial Sequence
  Description of Artificial Sequence: Synthetic oligonucleotide
  Sense strand starting at position 3084 of SEQ ID NO: 2679
ccuuguguucuacaacgga

SEQ ID NO: 207951 - RNA, 19 nt, Artificial Sequence
  Description of Artificial Sequence: Synthetic oligonucleotide
  Antisense strand to SEQ ID NO: 207950
uccguuguagaacacaagg

SEQ ID NO: 207952 - RNA, 19 nt, Artificial Sequence
  Description of Artificial Sequence: Synthetic oligonucleotide
  Sense strand starting at position 3087 of SEQ ID NO: 2679
uguguucuacaacggauua

SEQ ID NO: 207953 - RNA, 19 nt, Artificial Sequence
  Description of Artificial Sequence: Synthetic oligonucleotide
  Antisense strand to SEQ ID NO: 207952
uaauccguuguagaacaca

SEQ ID NO: 207954 - RNA, 19 nt, Artificial Sequence
  Description of Artificial Sequence: Synthetic oligonucleotide
  Sense strand starting at position 3089 of SEQ ID NO: 2679
uguucuacaacggauuagu

SEQ ID NO: 207955 - RNA, 19 nt, Artificial Sequence
  Description of Artificial Sequence: Synthetic oligonucleotide
  Antisense strand to SEQ ID NO: 207954
acuaauccguuguagaaca

SEQ ID NO: 207956 - RNA, 19 nt, Artificial Sequence
  Description of Artificial Sequence: Synthetic oligonucleotide
  Sense strand starting at position 3099 of SEQ ID NO: 2679
cggauuagucaaugcgaaa

SEQ ID NO: 207957 - RNA, 19 nt, Artificial Sequence
  Description of Artificial Sequence: Synthetic oligonucleotide
  Antisense strand to SEQ ID NO: 207956
uuucgcauugacuaauccg

SEQ ID NO: 207958 - RNA, 19 nt, Artificial Sequence
  Description of Artificial Sequence: Synthetic oligonucleotide
  Sense strand starting at position 3242 of SEQ ID NO: 2679
agacuuagcucuuugaagg

SEQ ID NO: 207959 - RNA, 19 nt, Artificial Sequence
  Description of Artificial Sequence: Synthetic oligonucleotide
  Antisense strand to SEQ ID NO: 207958
ccuucaaagagcuaagucu

SEQ ID NO: 207960 - RNA, 19 nt, Artificial Sequence
  Description of Artificial Sequence: Synthetic oligonucleotide
  Sense strand starting at position 3243 of SEQ ID NO: 2679
gacuuagcucuuugaaggu

SEQ ID NO: 207961 - RNA, 19 nt, Artificial Sequence
  Description of Artificial Sequence: Synthetic oligonucleotide
  Antisense strand to SEQ ID NO: 207960
accuucaaagagcuaaguc

SEQ ID NO: 207962 - RNA, 19 nt, Artificial Sequence
  Description of Artificial Sequence: Synthetic oligonucleotide
  Sense strand starting at position 3289 of SEQ ID NO: 2679
ugcagaagaguugagaagu

SEQ ID NO: 207963 - RNA, 19 nt, Artificial Sequence
  Description of Artificial Sequence: Synthetic oligonucleotide
  Antisense strand to SEQ ID NO: 207962
acuucucaacucuucugca

SEQ ID NO: 207964 - RNA, 19 nt, Artificial Sequence
  Description of Artificial Sequence: Synthetic oligonucleotide
  Sense strand starting at position 3297 of SEQ ID NO: 2679
aguugagaaguuuaaguua

SEQ ID NO: 207965 - RNA, 19 nt, Artificial Sequence
  Description of Artificial Sequence: Synthetic oligonucleotide
  Antisense strand to SEQ ID NO: 207964
uaacuuaaacuucucaacu

SEQ ID NO: 207966 - RNA, 19 nt, Artificial Sequence
  Description of Artificial Sequence: Synthetic oligonucleotide
  Sense strand starting at position 3377 of SEQ ID NO: 2679
ggcuuaaauuagcuaaggu

SEQ ID NO: 207967 - RNA, 19 nt, Artificial Sequence
  Description of Artificial Sequence: Synthetic oligonucleotide
  Antisense strand to SEQ ID NO: 207966
accuuagcuaauuuaagcc

SEQ ID NO: 207968 - RNA, 19 nt, Artificial Sequence
  Description of Artificial Sequence: Synthetic oligonucleotide
  Sense strand starting at position 3404 of SEQ ID NO: 2679
aacccaguggcccagaaau

SEQ ID NO: 207969 - RNA, 19 nt, Artificial Sequence
  Description of Artificial Sequence: Synthetic oligonucleotide
  Antisense strand to SEQ ID NO: 207968
auuucugggccacuggguu

SEQ ID NO: 207970 - RNA, 19 nt, Artificial Sequence
  Description of Artificial Sequence: Synthetic oligonucleotide
  Sense strand starting at position 3443 of SEQ ID NO: 2679
uaugauuaaugggauugga

SEQ ID NO: 207971 - RNA, 19 nt, Artificial Sequence
  Description of Artificial Sequence: Synthetic oligonucleotide
  Antisense strand to SEQ ID NO: 207970
uccaaucccauuaaucaua

SEQ ID NO: 207972 - RNA, 19 nt, Artificial Sequence
  Description of Artificial Sequence: Synthetic oligonucleotide
  Sense strand starting at position 3446 of SEQ ID NO: 2679
gauuaaugggauuggaguu

SEQ ID NO: 207973 - RNA, 19 nt, Artificial Sequence
  Description of Artificial Sequence: Synthetic oligonucleotide
  Antisense strand to SEQ ID NO: 207972
aacuccaaucccauuaauc

SEQ ID NO: 207974 - RNA, 19 nt, Artificial Sequence
  Description of Artificial Sequence: Synthetic oligonucleotide
  Sense strand starting at position 3452 of SEQ ID NO: 2679
ugggauuggaguugguaca

SEQ ID NO: 207975 - RNA, 19 nt, Artificial Sequence
  Description of Artificial Sequence: Synthetic oligonucleotide
  Antisense strand to SEQ ID NO: 207974
uguaccaacuccaauccca

SEQ ID NO: 207976 - RNA, 19 nt, Artificial Sequence
  Description of Artificial Sequence: Synthetic oligonucleotide
  Sense strand starting at position 3453 of SEQ ID NO: 2679
gggauuggaguugguacau

SEQ ID NO: 207977 - RNA, 19 nt, Artificial Sequence
  Description of Artificial Sequence: Synthetic oligonucleotide
  Antisense strand to SEQ ID NO: 207976
auguaccaacuccaauccc

SEQ ID NO: 207978 - RNA, 19 nt, Artificial Sequence
  Description of Artificial Sequence: Synthetic oligonucleotide
  Sense strand starting at position 3463 of SEQ ID NO: 2679
uugguacauccugacaauc

SEQ ID NO: 207979 - RNA, 19 nt, Artificial Sequence
  Description of Artificial Sequence: Synthetic oligonucleotide
  Antisense strand to SEQ ID NO: 207978
gauugucaggauguaccaa

SEQ ID NO: 207980 - RNA, 19 nt, Artificial Sequence
  Description of Artificial Sequence: Synthetic oligonucleotide
  Sense strand starting at position 3471 of SEQ ID NO: 2679
uccugacaaucauagaaug

SEQ ID NO: 207981 - RNA, 19 nt, Artificial Sequence
  Description of Artificial Sequence: Synthetic oligonucleotide
  Antisense strand to SEQ ID NO: 207980
cauucuaugauugucagga

SEQ ID NO: 207982 - RNA, 19 nt, Artificial Sequence
  Description of Artificial Sequence: Synthetic oligonucleotide
  Sense strand starting at position 3476 of SEQ ID NO: 2679
acaaucauagaauguaagu

SEQ ID NO: 207983 - RNA, 19 nt, Artificial Sequence
  Description of Artificial Sequence: Synthetic oligonucleotide
  Antisense strand to SEQ ID NO: 207982
acuuacauucuaugauugu

SEQ ID NO: 207984 - RNA, 19 nt, Artificial Sequence
  Description of Artificial Sequence: Synthetic oligonucleotide
  Sense strand starting at position 3650 of SEQ ID NO: 2679
gcuccugaguggcugagau

SEQ ID NO: 207985 - RNA, 19 nt, Artificial Sequence
  Description of Artificial Sequence: Synthetic oligonucleotide
  Antisense strand to SEQ ID NO: 207984
aucucagccacucaggagc

SEQ ID NO: 207986 - RNA, 19 nt, Artificial Sequence
  Description of Artificial Sequence: Synthetic oligonucleotide
  Sense strand starting at position 3821 of SEQ ID NO: 2679
gcacccagccaguaucaau

SEQ ID NO: 207987 - RNA, 19 nt, Artificial Sequence
  Description of Artificial Sequence: Synthetic oligonucleotide
  Antisense strand to SEQ ID NO: 207986
auugauacuggcugggugc

SEQ ID NO: 207988 - RNA, 19 nt, Artificial Sequence
  Description of Artificial Sequence: Synthetic oligonucleotide
  Sense strand starting at position 304 of SEQ ID NO: 2680
uaaaguggacuguguacau

SEQ ID NO: 207989 - RNA, 19 nt, Artificial Sequence
  Description of Artificial Sequence: Synthetic oligonucleotide
  Antisense strand to SEQ ID NO: 207988
auguacacaguccacuuua

SEQ ID NO: 207990 - RNA, 19 nt, Artificial Sequence
  Description of Artificial Sequence: Synthetic oligonucleotide
  Sense strand starting at position 375 of SEQ ID NO: 2680
cagguaagaugcuucucca

SEQ ID NO: 207991 - RNA, 19 nt, Artificial Sequence
  Description of Artificial Sequence: Synthetic oligonucleotide
  Antisense strand to SEQ ID NO: 207990
uggagaagcaucuuaccug

SEQ ID NO: 207992 - RNA, 19 nt, Artificial Sequence
  Description of Artificial Sequence: Synthetic oligonucleotide
  Sense strand starting at position 413 of SEQ ID NO: 2680
gacccagggucuuuaaaca

SEQ ID NO: 207993 - RNA, 19 nt, Artificial Sequence
  Description of Artificial Sequence: Synthetic oligonucleotide
  Antisense strand to SEQ ID NO: 207992
uguuuaaagacccuggguc

SEQ ID NO: 207994 - RNA, 19 nt, Artificial Sequence
  Description of Artificial Sequence: Synthetic oligonucleotide
  Sense strand starting at position 594 of SEQ ID NO: 2680
ggaagcuucugacaauuuc

SEQ ID NO: 207995 - RNA, 19 nt, Artificial Sequence
  Description of Artificial Sequence: Synthetic oligonucleotide
  Antisense strand to SEQ ID NO: 207994
gaaauugucagaagcuucc

SEQ ID NO: 207996 - RNA, 19 nt, Artificial Sequence
  Description of Artificial Sequence: Synthetic oligonucleotide
  Sense strand starting at position 617 of SEQ ID NO: 2680
accgaaaucuuccugccuu

SEQ ID NO: 207997 - RNA, 19 nt, Artificial Sequence
  Description of Artificial Sequence: Synthetic oligonucleotide
  Antisense strand to SEQ ID NO: 207996
aaggcaggaagauuucggu

SEQ ID NO: 207998 - RNA, 19 nt, Artificial Sequence
  Description of Artificial Sequence: Synthetic oligonucleotide
  Sense strand starting at position 648 of SEQ ID NO: 2680
agucaaaugcuccauugag

SEQ ID NO: 207999 - RNA, 19 nt, Artificial Sequence
  Description of Artificial Sequence: Synthetic oligonucleotide
  Antisense strand to SEQ ID NO: 207998
cucaauggagcauuugacu

SEQ ID NO: 208000 - RNA, 19 nt, Artificial Sequence
  Description of Artificial Sequence: Synthetic oligonucleotide
  Sense strand starting at position 669 of SEQ ID NO: 2680
agacuucuguaucuuuaca

SEQ ID NO: 208001 - RNA, 19 nt, Artificial Sequence
  Description of Artificial Sequence: Synthetic oligonucleotide
  Antisense strand to SEQ ID NO: 208000
uguaaagauacagaagucu

SEQ ID NO: 208002 - RNA, 19 nt, Artificial Sequence
  Description of Artificial Sequence: Synthetic oligonucleotide
  Sense strand starting at position 725 of SEQ ID NO: 2680
cagaaugucccguguagaa

SEQ ID NO: 208003 - RNA, 19 nt, Artificial Sequence
  Description of Artificial Sequence: Synthetic oligonucleotide
  Antisense strand to SEQ ID NO: 208002
uucuacacgggacauucug

SEQ ID NO: 208004 - RNA, 19 nt, Artificial Sequence
  Description of Artificial Sequence: Synthetic oligonucleotide
  Sense strand starting at position 800 of SEQ ID NO: 2680
ccucucagauccuuggagu

SEQ ID NO: 208005 - RNA, 19 nt, Artificial Sequence
  Description of Artificial Sequence: Synthetic oligonucleotide
  Antisense strand to SEQ ID NO: 208004
acuccaaggaucugagagg

SEQ ID NO: 208006 - RNA, 19 nt, Artificial Sequence
  Description of Artificial Sequence: Synthetic oligonucleotide
  Sense strand starting at position 801 of SEQ ID NO: 2680
cucucagauccuuggaguu

SEQ ID NO: 208007 - RNA, 19 nt, Artificial Sequence
  Description of Artificial Sequence: Synthetic oligonucleotide
  Antisense strand to SEQ ID NO: 208006
aacuccaaggaucugagag

SEQ ID NO: 208008 - RNA, 19 nt, Artificial Sequence
  Description of Artificial Sequence: Synthetic oligonucleotide
  Sense strand starting at position 953 of SEQ ID NO: 2680
cucagaagcagguguaauc

SEQ ID NO: 208009 - RNA, 19 nt, Artificial Sequence
  Description of Artificial Sequence: Synthetic oligonucleotide
  Antisense strand to SEQ ID NO: 208008
gauuacaccugcuucugag

SEQ ID NO: 208010 - RNA, 19 nt, Artificial Sequence
  Description of Artificial Sequence: Synthetic oligonucleotide
  Sense strand starting at position 1006 of SEQ ID NO: 2680
acgggagcaucuuuaaucu

SEQ ID NO: 208011 - RNA, 19 nt, Artificial Sequence
  Description of Artificial Sequence: Synthetic oligonucleotide
  Antisense strand to SEQ ID NO: 208010
agauuaaagaugcucccgu

SEQ ID NO: 208012 - RNA, 19 nt, Artificial Sequence
  Description of Artificial Sequence: Synthetic oligonucleotide
  Sense strand starting at position 1078 of SEQ ID NO: 2680
ggcuauacauuuguuuauu

SEQ ID NO: 208013 - RNA, 19 nt, Artificial Sequence
  Description of Artificial Sequence: Synthetic oligonucleotide
  Antisense strand to SEQ ID NO: 208012
aauaaacaaauguauagcc

SEQ ID NO: 208014 - RNA, 19 nt, Artificial Sequence
  Description of Artificial Sequence: Synthetic oligonucleotide
  Sense strand starting at position 1079 of SEQ ID NO: 2680
gcuauacauuuguuuauuc

SEQ ID NO: 208015 - RNA, 19 nt, Artificial Sequence
  Description of Artificial Sequence: Synthetic oligonucleotide
  Antisense strand to SEQ ID NO: 208014
gaauaaacaaauguauagc

SEQ ID NO: 208016 - RNA, 19 nt, Artificial Sequence
  Description of Artificial Sequence: Synthetic oligonucleotide
  Sense strand starting at position 1288 of SEQ ID NO: 2680
uggguacuuggcugagagu

SEQ ID NO: 208017 - RNA, 19 nt, Artificial Sequence
  Description of Artificial Sequence: Synthetic oligonucleotide
  Antisense strand to SEQ ID NO: 208016
acucucagccaaguaccca

SEQ ID NO: 208018 - RNA, 19 nt, Artificial Sequence
  Description of Artificial Sequence: Synthetic oligonucleotide
  Sense strand starting at position 1290 of SEQ ID NO: 2680
gguacuuggcugagagugu

SEQ ID NO: 208019 - RNA, 19 nt, Artificial Sequence
  Description of Artificial Sequence: Synthetic oligonucleotide
  Antisense strand to SEQ ID NO: 208018
acacucucagccaaguacc

SEQ ID NO: 208020 - RNA, 19 nt, Artificial Sequence
  Description of Artificial Sequence: Synthetic oligonucleotide
  Sense strand starting at position 1317 of SEQ ID NO: 2680
cucagaggugccugaggaa

SEQ ID NO: 208021 - RNA, 19 nt, Artificial Sequence
  Description of Artificial Sequence: Synthetic oligonucleotide
  Antisense strand to SEQ ID NO: 208020
uuccucaggcaccucugag

SEQ ID NO: 208022 - RNA, 19 nt, Artificial Sequence
  Description of Artificial Sequence: Synthetic oligonucleotide
  Sense strand starting at position 1453 of SEQ ID NO: 2680
aggcccaaucgaggaauaa

SEQ ID NO: 208023 - RNA, 19 nt, Artificial Sequence
  Description of Artificial Sequence: Synthetic oligonucleotide
  Antisense strand to SEQ ID NO: 208022
uuauuccucgauugggccu

SEQ ID NO: 208024 - RNA, 19 nt, Artificial Sequence
  Description of Artificial Sequence: Synthetic oligonucleotide
  Sense strand starting at position 1493 of SEQ ID NO: 2680
gugugagcucuggcuguuu

SEQ ID NO: 208025 - RNA, 19 nt, Artificial Sequence
  Description of Artificial Sequence: Synthetic oligonucleotide
  Antisense strand to SEQ ID NO: 208024
aaacagccagagcucacac

SEQ ID NO: 208026 - RNA, 19 nt, Artificial Sequence
  Description of Artificial Sequence: Synthetic oligonucleotide
  Sense strand starting at position 1543 of SEQ ID NO: 2680
cugguccuucugggagaaa

SEQ ID NO: 208027 - RNA, 19 nt, Artificial Sequence
  Description of Artificial Sequence: Synthetic oligonucleotide
  Antisense strand to SEQ ID NO: 208026
uuucucccagaaggaccag

SEQ ID NO: 208028 - RNA, 19 nt, Artificial Sequence
  Description of Artificial Sequence: Synthetic oligonucleotide
  Sense strand starting at position 1954 of SEQ ID NO: 2680
auaguuguuucuucuagaa

SEQ ID NO: 208029 - RNA, 19 nt, Artificial Sequence
  Description of Artificial Sequence: Synthetic oligonucleotide
  Antisense strand to SEQ ID NO: 208028
uucuagaagaaacaacuau

SEQ ID NO: 208030 - RNA, 19 nt, Artificial Sequence
  Description of Artificial Sequence: Synthetic oligonucleotide
  Sense strand starting at position 1983 of SEQ ID NO: 2680
cugggugacuugcuugaaa

SEQ ID NO: 208031 - RNA, 19 nt, Artificial Sequence
  Description of Artificial Sequence: Synthetic oligonucleotide
  Antisense strand to SEQ ID NO: 208030
uuucaagcaagucacccag

SEQ ID NO: 208032 - RNA, 19 nt, Artificial Sequence
  Description of Artificial Sequence: Synthetic oligonucleotide
  Sense strand starting at position 1985 of SEQ ID NO: 2680
gggugacuugcuugaaagu

SEQ ID NO: 208033 - RNA, 19 nt, Artificial Sequence
  Description of Artificial Sequence: Synthetic oligonucleotide
  Antisense strand to SEQ ID NO: 208032
acuuucaagcaagucaccc

SEQ ID NO: 208034 - RNA, 19 nt, Artificial Sequence
  Description of Artificial Sequence: Synthetic oligonucleotide
  Sense strand starting at position 1986 of SEQ ID NO: 2680
ggugacuugcuugaaagug

SEQ ID NO: 208035 - RNA, 19 nt, Artificial Sequence
  Description of Artificial Sequence: Synthetic oligonucleotide
  Antisense strand to SEQ ID NO: 208034
cacuuucaagcaagucacc

SEQ ID NO: 208036 - RNA, 19 nt, Artificial Sequence
  Description of Artificial Sequence: Synthetic oligonucleotide
  Sense strand starting at position 1994 of SEQ ID NO: 2680
gcuugaaagugacucacuu

SEQ ID NO: 208037 - RNA, 19 nt, Artificial Sequence
  Description of Artificial Sequence: Synthetic oligonucleotide
  Antisense strand to SEQ ID NO: 208036
aagugagucacuuucaagc

SEQ ID NO: 208038 - RNA, 19 nt, Artificial Sequence
  Description of Artificial Sequence: Synthetic oligonucleotide
  Sense strand starting at position 2025 of SEQ ID NO: 2680
caagucuucgcucaauuga

SEQ ID NO: 208039 - RNA, 19 nt, Artificial Sequence
  Description of Artificial Sequence: Synthetic oligonucleotide
  Antisense strand to SEQ ID NO: 208038
ucaauugagcgaagacuug

SEQ ID NO: 208040 - RNA, 19 nt, Artificial Sequence
  Description of Artificial Sequence: Synthetic oligonucleotide
  Sense strand starting at position 2212 of SEQ ID NO: 2680
ccauuuauugucugucucu

SEQ ID NO: 208041 - RNA, 19 nt, Artificial Sequence
  Description of Artificial Sequence: Synthetic oligonucleotide
  Antisense strand to SEQ ID NO: 208040
agagacagacaauaaaugg

SEQ ID NO: 208042 - RNA, 19 nt, Artificial Sequence
  Description of Artificial Sequence: Synthetic oligonucleotide
  Sense strand starting at position 2370 of SEQ ID NO: 2680
gagugaaugggcuguagga

SEQ ID NO: 208043 - RNA, 19 nt, Artificial Sequence
  Description of Artificial Sequence: Synthetic oligonucleotide
  Antisense strand to SEQ ID NO: 208042
uccuacagcccauucacuc

SEQ ID NO: 208044 - RNA, 19 nt, Artificial Sequence
  Description of Artificial Sequence: Synthetic oligonucleotide
  Sense strand starting at position 2395 of SEQ ID NO: 2680
gaggaugaagcuugugaag

SEQ ID NO: 208045 - RNA, 19 nt, Artificial Sequence
  Description of Artificial Sequence: Synthetic oligonucleotide
  Antisense strand to SEQ ID NO: 208044
cuucacaagcuucauccuc

SEQ ID NO: 208046 - RNA, 19 nt, Artificial Sequence
  Description of Artificial Sequence: Synthetic oligonucleotide
  Sense strand starting at position 2616 of SEQ ID NO: 2680
ucuggaugucauuagcuga

SEQ ID NO: 208047 - RNA, 19 nt, Artificial Sequence
  Description of Artificial Sequence: Synthetic oligonucleotide
  Antisense strand to SEQ ID NO: 208046
ucagcuaaugacauccaga

SEQ ID NO: 208048 - RNA, 19 nt, Artificial Sequence
  Description of Artificial Sequence: Synthetic oligonucleotide
  Sense strand starting at position 2639 of SEQ ID NO: 2680
uucugcucugcagaaugua

SEQ ID NO: 208049 - RNA, 19 nt, Artificial Sequence
  Description of Artificial Sequence: Synthetic oligonucleotide
  Antisense strand to SEQ ID NO: 208048
uacauucugcagagcagaa

SEQ ID NO: 208050 - RNA, 19 nt, Artificial Sequence
  Description of Artificial Sequence: Synthetic oligonucleotide
  Sense strand starting at position 2708 of SEQ ID NO: 2680
uucugugagcuguagcaca

SEQ ID NO: 208051 - RNA, 19 nt, Artificial Sequence
  Description of Artificial Sequence: Synthetic oligonucleotide
  Antisense strand to SEQ ID NO: 208050
ugugcuacagcucacagaa

SEQ ID NO: 208052 - RNA, 19 nt, Artificial Sequence
  Description of Artificial Sequence: Synthetic oligonucleotide
  Sense strand starting at position 2726 of SEQ ID NO: 2680
auggccugcuaauuaugaa

SEQ ID NO: 208053 - RNA, 19 nt, Artificial Sequence
  Description of Artificial Sequence: Synthetic oligonucleotide
  Antisense strand to SEQ ID NO: 208052
uucauaauuagcaggccau

SEQ ID NO: 208054 - RNA, 19 nt, Artificial Sequence
  Description of Artificial Sequence: Synthetic oligonucleotide
  Sense strand starting at position 2777 of SEQ ID NO: 2680
auuuaauugugcuucguuu

SEQ ID NO: 208055 - RNA, 19 nt, Artificial Sequence
  Description of Artificial Sequence: Synthetic oligonucleotide
  Antisense strand to SEQ ID NO: 208054
aaacgaagcacaauuaaau

SEQ ID NO: 208056 - RNA, 19 nt, Artificial Sequence
  Description of Artificial Sequence: Synthetic oligonucleotide
  Sense strand starting at position 2827 of SEQ ID NO: 2680
cuccaaugcugaucaguuu

SEQ ID NO: 208057 - RNA, 19 nt, Artificial Sequence
  Description of Artificial Sequence: Synthetic oligonucleotide
  Antisense strand to SEQ ID NO: 208056
aaacugaucagcauuggag

SEQ ID NO: 208058 - RNA, 19 nt, Artificial Sequence
  Description of Artificial Sequence: Synthetic oligonucleotide
  Sense strand starting at position 2846 of SEQ ID NO: 2680
ucaagaaguuaacauaaga

SEQ ID NO: 208059 - RNA, 19 nt, Artificial Sequence
  Description of Artificial Sequence: Synthetic oligonucleotide
  Antisense strand to SEQ ID NO: 208058
ucuuauguuaacuucuuga

SEQ ID NO: 208060 - RNA, 19 nt, Artificial Sequence
  Description of Artificial Sequence: Synthetic oligonucleotide
  Sense strand starting at position 3053 of SEQ ID NO: 2680
agaggagguucugcagagu

SEQ ID NO: 208061 - RNA, 19 nt, Artificial Sequence
  Description of Artificial Sequence: Synthetic oligonucleotide
  Antisense strand to SEQ ID NO: 208060
acucugcagaaccuccucu

SEQ ID NO: 208062 - RNA, 19 nt, Artificial Sequence
  Description of Artificial Sequence: Synthetic oligonucleotide
  Sense strand starting at position 3212 of SEQ ID NO: 2680
gaugcaucuggauagcuca

SEQ ID NO: 208063 - RNA, 19 nt, Artificial Sequence
  Description of Artificial Sequence: Synthetic oligonucleotide
  Antisense strand to SEQ ID NO: 208062
ugagcuauccagaugcauc

SEQ ID NO: 208064 - RNA, 19 nt, Artificial Sequence
  Description of Artificial Sequence: Synthetic oligonucleotide
  Sense strand starting at position 3953 of SEQ ID NO: 2680
ucuccuugguuuguuacaa

SEQ ID NO: 208065 - RNA, 19 nt, Artificial Sequence
  Description of Artificial Sequence: Synthetic oligonucleotide
  Antisense strand to SEQ ID NO: 208064
uuguaacaaaccaaggaga

SEQ ID NO: 208066 - RNA, 19 nt, Artificial Sequence
  Description of Artificial Sequence: Synthetic oligonucleotide
  Sense strand starting at position 3961 of SEQ ID NO: 2680
guuuguuacaagggcuaaa

SEQ ID NO: 208067 - RNA, 19 nt, Artificial Sequence
  Description of Artificial Sequence: Synthetic oligonucleotide
  Antisense strand to SEQ ID NO: 208066
uuuagcccuuguaacaaac

SEQ ID NO: 208068 - RNA, 19 nt, Artificial Sequence
  Description of Artificial Sequence: Synthetic oligonucleotide
  Sense strand starting at position 5 of SEQ ID NO: 2682
auucuagauuucgaauaca

SEQ ID NO: 208069 - RNA, 19 nt, Artificial Sequence
  Description of Artificial Sequence: Synthetic oligonucleotide
  Antisense strand to SEQ ID NO: 208068
uguauucgaaaucuagaau

SEQ ID NO: 208070 - RNA, 19 nt, Artificial Sequence
  Description of Artificial Sequence: Synthetic oligonucleotide
  Sense strand starting at position 85 of SEQ ID NO: 2682
cuggcucuacuauaaagau

SEQ ID NO: 208071 - RNA, 19 nt, Artificial Sequence
  Description of Artificial Sequence: Synthetic oligonucleotide
  Antisense strand to SEQ ID NO: 208070
aucuuuauaguagagccag

SEQ ID NO: 208072 - RNA, 19 nt, Artificial Sequence
  Description of Artificial Sequence: Synthetic oligonucleotide
  Sense strand starting at position 163 of SEQ ID NO: 2682
ggcuuucuacagcagaaua

SEQ ID NO: 208073 - RNA, 19 nt, Artificial Sequence
  Description of Artificial Sequence: Synthetic oligonucleotide
  Antisense strand to SEQ ID NO: 208072
uauucugcuguagaaagcc

SEQ ID NO: 208074 - RNA, 19 nt, Artificial Sequence
  Description of Artificial Sequence: Synthetic oligonucleotide
  Sense strand starting at position 246 of SEQ ID NO: 2682
guagguuuagcuuaguaau

SEQ ID NO: 208075 - RNA, 19 nt, Artificial Sequence
  Description of Artificial Sequence: Synthetic oligonucleotide
  Antisense strand to SEQ ID NO: 208074
auuacuaagcuaaaccuac

SEQ ID NO: 208076 - RNA, 19 nt, Artificial Sequence
  Description of Artificial Sequence: Synthetic oligonucleotide
  Sense strand starting at position 248 of SEQ ID NO: 2682
agguuuagcuuaguaauuc

SEQ ID NO: 208077 - RNA, 19 nt, Artificial Sequence
  Description of Artificial Sequence: Synthetic oligonucleotide
  Antisense strand to SEQ ID NO: 208076
gaauuacuaagcuaaaccu

SEQ ID NO: 208078 - RNA, 19 nt, Artificial Sequence
  Description of Artificial Sequence: Synthetic oligonucleotide
  Sense strand starting at position 270 of SEQ ID NO: 2682
aguacauacgccuaauaca

SEQ ID NO: 208079 - RNA, 19 nt, Artificial Sequence
  Description of Artificial Sequence: Synthetic oligonucleotide
  Antisense strand to SEQ ID NO: 208078
uguauuaggcguauguacu

SEQ ID NO: 208080 - RNA, 19 nt, Artificial Sequence
  Description of Artificial Sequence: Synthetic oligonucleotide
  Sense strand starting at position 285 of SEQ ID NO: 2682
uacaaagugcaagaaguuu

SEQ ID NO: 208081 - RNA, 19 nt, Artificial Sequence
  Description of Artificial Sequence: Synthetic oligonucleotide
  Antisense strand to SEQ ID NO: 208080
aaacuucuugcacuuugua

SEQ ID NO: 208082 - RNA, 19 nt, Artificial Sequence
  Description of Artificial Sequence: Synthetic oligonucleotide
  Sense strand starting at position 383 of SEQ ID NO: 2682
cucuuaagagccugauauc

SEQ ID NO: 208083 - RNA, 19 nt, Artificial Sequence
  Description of Artificial Sequence: Synthetic oligonucleotide
  Antisense strand to SEQ ID NO: 208082
gauaucaggcucuuaagag

SEQ ID NO: 208084 - RNA, 19 nt, Artificial Sequence
  Description of Artificial Sequence: Synthetic oligonucleotide
  Sense strand starting at position 384 of SEQ ID NO: 2682
ucuuaagagccugauaucu

SEQ ID NO: 208085 - RNA, 19 nt, Artificial Sequence
  Description of Artificial Sequence: Synthetic oligonucleotide
  Antisense strand to SEQ ID NO: 208084
agauaucaggcucuuaaga

SEQ ID NO: 208086 - RNA, 19 nt, Artificial Sequence
  Description of Artificial Sequence: Synthetic oligonucleotide
  Sense strand starting at position 389 of SEQ ID NO: 2682
agagccugauaucuaauga

SEQ ID NO: 208087 - RNA, 19 nt, Artificial Sequence
  Description of Artificial Sequence: Synthetic oligonucleotide
  Antisense strand to SEQ ID NO: 208086
ucauuagauaucaggcucu

SEQ ID NO: 208088 - RNA, 19 nt, Artificial Sequence
  Description of Artificial Sequence: Synthetic oligonucleotide
  Sense strand starting at position 405 of SEQ ID NO: 2682
ugaagcuuucugcaaaggu

SEQ ID NO: 208089 - RNA, 19 nt, Artificial Sequence
  Description of Artificial Sequence: Synthetic oligonucleotide
  Antisense strand to SEQ ID NO: 208088
accuuugcagaaagcuuca

SEQ ID NO: 208090 - RNA, 19 nt, Artificial Sequence
  Description of Artificial Sequence: Synthetic oligonucleotide
  Sense strand starting at position 448 of SEQ ID NO: 2682
uuacuugauuaucugggaa

SEQ ID NO: 208091 - RNA, 19 nt, Artificial Sequence
  Description of Artificial Sequence: Synthetic oligonucleotide
  Antisense strand to SEQ ID NO: 208090
uucccagauaaucaaguaa

SEQ ID NO: 208092 - RNA, 19 nt, Artificial Sequence
  Description of Artificial Sequence: Synthetic oligonucleotide
  Sense strand starting at position 451 of SEQ ID NO: 2682
cuugauuaucugggaagcu

SEQ ID NO: 208093 - RNA, 19 nt, Artificial Sequence
  Description of Artificial Sequence: Synthetic oligonucleotide
  Antisense strand to SEQ ID NO: 208092
agcuucccagauaaucaag

SEQ ID NO: 208094 - RNA, 19 nt, Artificial Sequence
  Description of Artificial Sequence: Synthetic oligonucleotide
  Sense strand starting at position 575 of SEQ ID NO: 2682
ccuacauuuccgggcucau

SEQ ID NO: 208095 - RNA, 19 nt, Artificial Sequence
  Description of Artificial Sequence: Synthetic oligonucleotide
  Antisense strand to SEQ ID NO: 208094
augagcccggaaauguagg

SEQ ID NO: 208096 - RNA, 19 nt, Artificial Sequence
  Description of Artificial Sequence: Synthetic oligonucleotide
  Sense strand starting at position 588 of SEQ ID NO: 2682
gcucaugagucacugagaa

SEQ ID NO: 208097 - RNA, 19 nt, Artificial Sequence
  Description of Artificial Sequence: Synthetic oligonucleotide
  Antisense strand to SEQ ID NO: 208096
uucucagugacucaugagc

SEQ ID NO: 208098 - RNA, 19 nt, Artificial Sequence
  Description of Artificial Sequence: Synthetic oligonucleotide
  Sense strand starting at position 592 of SEQ ID NO: 2682
augagucacugagaaauga

SEQ ID NO: 208099 - RNA, 19 nt, Artificial Sequence
  Description of Artificial Sequence: Synthetic oligonucleotide
  Antisense strand to SEQ ID NO: 208098
ucauuucucagugacucau

SEQ ID NO: 208100 - RNA, 19 nt, Artificial Sequence
  Description of Artificial Sequence: Synthetic oligonucleotide
  Sense strand starting at position 603 of SEQ ID NO: 2682
agaaaugagcucuaaguuu

SEQ ID NO: 208101 - RNA, 19 nt, Artificial Sequence
  Description of Artificial Sequence: Synthetic oligonucleotide
  Antisense strand to SEQ ID NO: 208100
aaacuuagagcucauuucu

SEQ ID NO: 208102 - RNA, 19 nt, Artificial Sequence
  Description of Artificial Sequence: Synthetic oligonucleotide
  Sense strand starting at position 611 of SEQ ID NO: 2682
gcucuaaguuucucuuaga

SEQ ID NO: 208103 - RNA, 19 nt, Artificial Sequence
  Description of Artificial Sequence: Synthetic oligonucleotide
  Antisense strand to SEQ ID NO: 208102
ucuaagagaaacuuagagc

SEQ ID NO: 208104 - RNA, 19 nt, Artificial Sequence
  Description of Artificial Sequence: Synthetic oligonucleotide
  Sense strand starting at position 625 of SEQ ID NO: 2682
uuagaaugcugcucaaaua

SEQ ID NO: 208105 - RNA, 19 nt, Artificial Sequence
  Description of Artificial Sequence: Synthetic oligonucleotide
  Antisense strand to SEQ ID NO: 208104
uauuugagcagcauucuaa

SEQ ID NO: 208106 - RNA, 19 nt, Artificial Sequence
  Description of Artificial Sequence: Synthetic oligonucleotide
  Sense strand starting at position 733 of SEQ ID NO: 2682
auccaugauuucuaggcuu

SEQ ID NO: 208107 - RNA, 19 nt, Artificial Sequence
  Description of Artificial Sequence: Synthetic oligonucleotide
  Antisense strand to SEQ ID NO: 208106
aagccuagaaaucauggau

SEQ ID NO: 208108 - RNA, 19 nt, Artificial Sequence
  Description of Artificial Sequence: Synthetic oligonucleotide
  Sense strand starting at position 736 of SEQ ID NO: 2682
caugauuucuaggcuuugu

SEQ ID NO: 208109 - RNA, 19 nt, Artificial Sequence
  Description of Artificial Sequence: Synthetic oligonucleotide
  Antisense strand to SEQ ID NO: 208108
acaaagccuagaaaucaug

SEQ ID NO: 208110 - RNA, 19 nt, Artificial Sequence
  Description of Artificial Sequence: Synthetic oligonucleotide
  Sense strand starting at position 2268 of SEQ ID NO: 2682
aagcuuaauucugcgagag

SEQ ID NO: 208111 - RNA, 19 nt, Artificial Sequence
  Description of Artificial Sequence: Synthetic oligonucleotide
  Antisense strand to SEQ ID NO: 208110
cucucgcagaauuaagcuu

SEQ ID NO: 208112 - RNA, 19 nt, Artificial Sequence
  Description of Artificial Sequence: Synthetic oligonucleotide
  Sense strand starting at position 2269 of SEQ ID NO: 2682
agcuuaauucugcgagagg

SEQ ID NO: 208113 - RNA, 19 nt, Artificial Sequence
  Description of Artificial Sequence: Synthetic oligonucleotide
  Antisense strand to SEQ ID NO: 208112
ccucucgcagaauuaagcu

SEQ ID NO: 208114 - RNA, 19 nt, Artificial Sequence
  Description of Artificial Sequence: Synthetic oligonucleotide
  Sense strand starting at position 2375 of SEQ ID NO: 2682
ggacaagugccagaacguu

SEQ ID NO: 208115 - RNA, 19 nt, Artificial Sequence
  Description of Artificial Sequence: Synthetic oligonucleotide
  Antisense strand to SEQ ID NO: 208114
aacguucuggcacuugucc

SEQ ID NO: 208116 - RNA, 19 nt, Artificial Sequence
  Description of Artificial Sequence: Synthetic oligonucleotide
  Sense strand starting at position 2385 of SEQ ID NO: 2682
cagaacguuccagauuaau

SEQ ID NO: 208117 - RNA, 19 nt, Artificial Sequence
  Description of Artificial Sequence: Synthetic oligonucleotide
  Antisense strand to SEQ ID NO: 208116
auuaaucuggaacguucug

SEQ ID NO: 208118 - RNA, 19 nt, Artificial Sequence
  Description of Artificial Sequence: Synthetic oligonucleotide
  Sense strand starting at position 2394 of SEQ ID NO: 2682
ccagauuaaugggaauauu

SEQ ID NO: 208119 - RNA, 19 nt, Artificial Sequence
  Description of Artificial Sequence: Synthetic oligonucleotide
  Antisense strand to SEQ ID NO: 208118
aauauucccauuaaucugg

SEQ ID NO: 208120 - RNA, 19 nt, Artificial Sequence
  Description of Artificial Sequence: Synthetic oligonucleotide
  Sense strand starting at position 2403 of SEQ ID NO: 2682
ugggaauauuccuauuuaa

SEQ ID NO: 208121 - RNA, 19 nt, Artificial Sequence
  Description of Artificial Sequence: Synthetic oligonucleotide
  Antisense strand to SEQ ID NO: 208120
uuaaauaggaauauuccca

SEQ ID NO: 208122 - RNA, 19 nt, Artificial Sequence
  Description of Artificial Sequence: Synthetic oligonucleotide
  Sense strand starting at position 2575 of SEQ ID NO: 2682
auugcaaagcucugacaac

SEQ ID NO: 208123 - RNA, 19 nt, Artificial Sequence
  Description of Artificial Sequence: Synthetic oligonucleotide
  Antisense strand to SEQ ID NO: 208122
guugucagagcuuugcaau

SEQ ID NO: 208124 - RNA, 19 nt, Artificial Sequence
  Description of Artificial Sequence: Synthetic oligonucleotide
  Sense strand starting at position 2606 of SEQ ID NO: 2682
auacaaaugccauaugugu

SEQ ID NO: 208125 - RNA, 19 nt, Artificial Sequence
  Description of Artificial Sequence: Synthetic oligonucleotide
  Antisense strand to SEQ ID NO: 208124
acacauauggcauuuguau

SEQ ID NO: 208126 - RNA, 19 nt, Artificial Sequence
  Description of Artificial Sequence: Synthetic oligonucleotide
  Sense strand starting at position 2612 of SEQ ID NO: 2682
augccauauguguguauuu

SEQ ID NO: 208127 - RNA, 19 nt, Artificial Sequence
  Description of Artificial Sequence: Synthetic oligonucleotide
  Antisense strand to SEQ ID NO: 208126
aaauacacacauauggcau

SEQ ID NO: 208128 - RNA, 19 nt, Artificial Sequence
  Description of Artificial Sequence: Synthetic oligonucleotide
  Sense strand starting at position 3155 of SEQ ID NO: 2682
gagaaagcaggguguuguu

SEQ ID NO: 208129 - RNA, 19 nt, Artificial Sequence
  Description of Artificial Sequence: Synthetic oligonucleotide
  Antisense strand to SEQ ID NO: 208128
aacaacacccugcuuucuc

SEQ ID NO: 208130 - RNA, 19 nt, Artificial Sequence
  Description of Artificial Sequence: Synthetic oligonucleotide
  Sense strand starting at position 3164 of SEQ ID NO: 2682
ggguguuguuauuuacagu

SEQ ID NO: 208131 - RNA, 19 nt, Artificial Sequence
  Description of Artificial Sequence: Synthetic oligonucleotide
  Antisense strand to SEQ ID NO: 208130
acuguaaauaacaacaccc

SEQ ID NO: 208132 - RNA, 19 nt, Artificial Sequence
  Description of Artificial Sequence: Synthetic oligonucleotide
  Sense strand starting at position 3221 of SEQ ID NO: 2682
gggagcuuucuguauggaa

SEQ ID NO: 208133 - RNA, 19 nt, Artificial Sequence
  Description of Artificial Sequence: Synthetic oligonucleotide
  Antisense strand to SEQ ID NO: 208132
uuccauacagaaagcuccc

SEQ ID NO: 208134 - RNA, 19 nt, Artificial Sequence
  Description of Artificial Sequence: Synthetic oligonucleotide
  Sense strand starting at position 3223 of SEQ ID NO: 2682
gagcuuucuguauggaaag

SEQ ID NO: 208135 - RNA, 19 nt, Artificial Sequence
  Description of Artificial Sequence: Synthetic oligonucleotide
  Antisense strand to SEQ ID NO: 208134
cuuuccauacagaaagcuc

SEQ ID NO: 208136 - RNA, 19 nt, Artificial Sequence
  Description of Artificial Sequence: Synthetic oligonucleotide
  Sense strand starting at position 3276 of SEQ ID NO: 2682
agaaucugcuggcuugaaa

SEQ ID NO: 208137 - RNA, 19 nt, Artificial Sequence
  Description of Artificial Sequence: Synthetic oligonucleotide
  Antisense strand to SEQ ID NO: 208136
uuucaagccagcagauucu

SEQ ID NO: 208138 - RNA, 19 nt, Artificial Sequence
  Description of Artificial Sequence: Synthetic oligonucleotide
  Sense strand starting at position 3394 of SEQ ID NO: 2682
aaggguugcgagcagagaa

SEQ ID NO: 208139 - RNA, 19 nt, Artificial Sequence
  Description of Artificial Sequence: Synthetic oligonucleotide
  Antisense strand to SEQ ID NO: 208138
uucucugcucgcaacccuu

SEQ ID NO: 208140 - RNA, 19 nt, Artificial Sequence
  Description of Artificial Sequence: Synthetic oligonucleotide
  Sense strand starting at position 3466 of SEQ ID NO: 2682
gacugaaagcccugagggu

SEQ ID NO: 208141 - RNA, 19 nt, Artificial Sequence
  Description of Artificial Sequence: Synthetic oligonucleotide
  Antisense strand to SEQ ID NO: 208140
acccucagggcuuucaguc

SEQ ID NO: 208142 - RNA, 19 nt, Artificial Sequence
  Description of Artificial Sequence: Synthetic oligonucleotide
  Sense strand starting at position 3634 of SEQ ID NO: 2682
ucugaccaguauguugaaa

SEQ ID NO: 208143 - RNA, 19 nt, Artificial Sequence
  Description of Artificial Sequence: Synthetic oligonucleotide
  Antisense strand to SEQ ID NO: 208142
uuucaacauacuggucaga

SEQ ID NO: 208144 - RNA, 19 nt, Artificial Sequence
  Description of Artificial Sequence: Synthetic oligonucleotide
  Sense strand starting at position 3842 of SEQ ID NO: 2682
gggugguggcaguagaaga

SEQ ID NO: 208145 - RNA, 19 nt, Artificial Sequence
  Description of Artificial Sequence: Synthetic oligonucleotide
  Antisense strand to SEQ ID NO: 208144
ucuucuacugccaccaccc

SEQ ID NO: 208146 - RNA, 19 nt, Artificial Sequence
  Description of Artificial Sequence: Synthetic oligonucleotide
  Sense strand starting at position 3957 of SEQ ID NO: 2682
ucgagaucaccaugcccaa

SEQ ID NO: 208147 - RNA, 19 nt, Artificial Sequence
  Description of Artificial Sequence: Synthetic oligonucleotide
  Antisense strand to SEQ ID NO: 208146
uugggcauggugaucucga

SEQ ID NO: 208148 - RNA, 19 nt, Artificial Sequence
  Description of Artificial Sequence: Synthetic oligonucleotide
  Sense strand starting at position 339 of SEQ ID NO: 2681
agacuuccauuguugagua

SEQ ID NO: 208149 - RNA, 19 nt, Artificial Sequence
  Description of Artificial Sequence: Synthetic oligonucleotide
  Antisense strand to SEQ ID NO: 208148
uacucaacaauggaagucu

SEQ ID NO: 208150 - RNA, 19 nt, Artificial Sequence
  Description of Artificial Sequence: Synthetic oligonucleotide
  Sense strand starting at position 341 of SEQ ID NO: 2681
acuuccauuguugaguaaa

SEQ ID NO: 208151 - RNA, 19 nt, Artificial Sequence
  Description of Artificial Sequence: Synthetic oligonucleotide
  Antisense strand to SEQ ID NO: 208150
uuuacucaacaauggaagu

SEQ ID NO: 208152 - RNA, 19 nt, Artificial Sequence
  Description of Artificial Sequence: Synthetic oligonucleotide
  Sense strand starting at position 394 of SEQ ID NO: 2681
agcuuaauaagagaugugu

SEQ ID NO: 208153 - RNA, 19 nt, Artificial Sequence
  Description of Artificial Sequence: Synthetic oligonucleotide
  Antisense strand to SEQ ID NO: 208152
acacaucucuuauuaagcu

SEQ ID NO: 208154 - RNA, 19 nt, Artificial Sequence
  Description of Artificial Sequence: Synthetic oligonucleotide
  Sense strand starting at position 396 of SEQ ID NO: 2681
cuuaauaagagaugugugu

SEQ ID NO: 208155 - RNA, 19 nt, Artificial Sequence
  Description of Artificial Sequence: Synthetic oligonucleotide
  Antisense strand to SEQ ID NO: 208154
acacacaucucuuauuaag

SEQ ID NO: 208156 - RNA, 19 nt, Artificial Sequence
  Description of Artificial Sequence: Synthetic oligonucleotide
  Sense strand starting at position 701 of SEQ ID NO: 2681
cagaucguauauucuagau

SEQ ID NO: 208157 - RNA, 19 nt, Artificial Sequence
  Description of Artificial Sequence: Synthetic oligonucleotide
  Antisense strand to SEQ ID NO: 208156
aucuagaauauacgaucug

SEQ ID NO: 208158 - RNA, 19 nt, Artificial Sequence
  Description of Artificial Sequence: Synthetic oligonucleotide
  Sense strand starting at position 703 of SEQ ID NO: 2681
gaucguauauucuagauuu

SEQ ID NO: 208159 - RNA, 19 nt, Artificial Sequence
  Description of Artificial Sequence: Synthetic oligonucleotide
  Antisense strand to SEQ ID NO: 208158
aaaucuagaauauacgauc

SEQ ID NO: 208160 - RNA, 19 nt, Artificial Sequence
  Description of Artificial Sequence: Synthetic oligonucleotide
  Sense strand starting at position 711 of SEQ ID NO: 2681
auucuagauuucgaauaca

SEQ ID NO: 208161 - RNA, 19 nt, Artificial Sequence
  Description of Artificial Sequence: Synthetic oligonucleotide
  Antisense strand to SEQ ID NO: 208160
uguauucgaaaucuagaau

SEQ ID NO: 208162 - RNA, 19 nt, Artificial Sequence
  Description of Artificial Sequence: Synthetic oligonucleotide
  Sense strand starting at position 791 of SEQ ID NO: 2681
cuggcucuacuauaaagau

SEQ ID NO: 208163 - RNA, 19 nt, Artificial Sequence
  Description of Artificial Sequence: Synthetic oligonucleotide
  Antisense strand to SEQ ID NO: 208162
aucuuuauaguagagccag

SEQ ID NO: 208164 - RNA, 19 nt, Artificial Sequence
  Description of Artificial Sequence: Synthetic oligonucleotide
  Sense strand starting at position 869 of SEQ ID NO: 2681
ggcuuucuacagcagaaua

SEQ ID NO: 208165 - RNA, 19 nt, Artificial Sequence
  Description of Artificial Sequence: Synthetic oligonucleotide
  Antisense strand to SEQ ID NO: 208164
uauucugcuguagaaagcc

SEQ ID NO: 208166 - RNA, 19 nt, Artificial Sequence
  Description of Artificial Sequence: Synthetic oligonucleotide
  Sense strand starting at position 952 of SEQ ID NO: 2681
guagguuuagcuuaguaau

SEQ ID NO: 208167 - RNA, 19 nt, Artificial Sequence
  Description of Artificial Sequence: Synthetic oligonucleotide
  Antisense strand to SEQ ID NO: 208166
auuacuaagcuaaaccuac

SEQ ID NO: 208168 - RNA, 19 nt, Artificial Sequence
  Description of Artificial Sequence: Synthetic oligonucleotide
  Sense strand starting at position 954 of SEQ ID NO: 2681
agguuuagcuuaguaauuc

SEQ ID NO: 208169 - RNA, 19 nt, Artificial Sequence
  Description of Artificial Sequence: Synthetic oligonucleotide
  Antisense strand to SEQ ID NO: 208168
gaauuacuaagcuaaaccu

SEQ ID NO: 208170 - RNA, 19 nt, Artificial Sequence
  Description of Artificial Sequence: Synthetic oligonucleotide
  Sense strand starting at position 976 of SEQ ID NO: 2681
aguacauacgccuaauaca

SEQ ID NO: 208171 - RNA, 19 nt, Artificial Sequence
  Description of Artificial Sequence: Synthetic oligonucleotide
  Antisense strand to SEQ ID NO: 208170
uguauuaggcguauguacu

SEQ ID NO: 208172 - RNA, 19 nt, Artificial Sequence
  Description of Artificial Sequence: Synthetic oligonucleotide
  Sense strand starting at position 991 of SEQ ID NO: 2681
uacaaagugcaagaaguuu

SEQ ID NO: 208173 - RNA, 19 nt, Artificial Sequence
  Description of Artificial Sequence: Synthetic oligonucleotide
  Antisense strand to SEQ ID NO: 208172
aaacuucuugcacuuugua

SEQ ID NO: 208174 - RNA, 19 nt, Artificial Sequence
  Description of Artificial Sequence: Synthetic oligonucleotide
  Sense strand starting at position 1089 of SEQ ID NO: 2681
cucuuaagagccugauauc

SEQ ID NO: 208175 - RNA, 19 nt, Artificial Sequence
  Description of Artificial Sequence: Synthetic oligonucleotide
  Antisense strand to SEQ ID NO: 208174
gauaucaggcucuuaagag

SEQ ID NO: 208176 - RNA, 19 nt, Artificial Sequence
  Description of Artificial Sequence: Synthetic oligonucleotide
  Sense strand starting at position 1090 of SEQ ID NO: 2681
ucuuaagagccugauaucu

SEQ ID NO: 208177 - RNA, 19 nt, Artificial Sequence
  Description of Artificial Sequence: Synthetic oligonucleotide
  Antisense strand to SEQ ID NO: 208176
agauaucaggcucuuaaga

SEQ ID NO: 208178 - RNA, 19 nt, Artificial Sequence
  Description of Artificial Sequence: Synthetic oligonucleotide
  Sense strand starting at position 1095 of SEQ ID NO: 2681
agagccugauaucuaauga

SEQ ID NO: 208179 - RNA, 19 nt, Artificial Sequence
  Description of Artificial Sequence: Synthetic oligonucleotide
  Antisense strand to SEQ ID NO: 208178
ucauuagauaucaggcucu

SEQ ID NO: 208180 - RNA, 19 nt, Artificial Sequence
  Description of Artificial Sequence: Synthetic oligonucleotide
  Sense strand starting at position 1111 of SEQ ID NO: 2681
ugaagcuuucugcaaaggu

SEQ ID NO: 208181 - RNA, 19 nt, Artificial Sequence
  Description of Artificial Sequence: Synthetic oligonucleotide
  Antisense strand to SEQ ID NO: 208180
accuuugcagaaagcuuca

SEQ ID NO: 208182 - RNA, 19 nt, Artificial Sequence
  Description of Artificial Sequence: Synthetic oligonucleotide
  Sense strand starting at position 1154 of SEQ ID NO: 2681
uuacuugauuaucugggaa

SEQ ID NO: 208183 - RNA, 19 nt, Artificial Sequence
  Description of Artificial Sequence: Synthetic oligonucleotide
  Antisense strand to SEQ ID NO: 208182
uucccagauaaucaaguaa

SEQ ID NO: 208184 - RNA, 19 nt, Artificial Sequence
  Description of Artificial Sequence: Synthetic oligonucleotide
  Sense strand starting at position 1157 of SEQ ID NO: 2681
cuugauuaucugggaagcu

SEQ ID NO: 208185 - RNA, 19 nt, Artificial Sequence
  Description of Artificial Sequence: Synthetic oligonucleotide
  Antisense strand to SEQ ID NO: 208184
agcuucccagauaaucaag

SEQ ID NO: 208186 - RNA, 19 nt, Artificial Sequence
  Description of Artificial Sequence: Synthetic oligonucleotide
  Sense strand starting at position 1281 of SEQ ID NO: 2681
ccuacauuuccgggcucau

SEQ ID NO: 208187 - RNA, 19 nt, Artificial Sequence
  Description of Artificial Sequence: Synthetic oligonucleotide
  Antisense strand to SEQ ID NO: 208186
augagcccggaaauguagg

SEQ ID NO: 208188 - RNA, 19 nt, Artificial Sequence
  Description of Artificial Sequence: Synthetic oligonucleotide
  Sense strand starting at position 1294 of SEQ ID NO: 2681
gcucaugagucacugagaa

SEQ ID NO: 208189 - RNA, 19 nt, Artificial Sequence
  Description of Artificial Sequence: Synthetic oligonucleotide
  Antisense strand to SEQ ID NO: 208188
uucucagugacucaugagc

SEQ ID NO: 208190 - RNA, 19 nt, Artificial Sequence
  Description of Artificial Sequence: Synthetic oligonucleotide
  Sense strand starting at position 1309 of SEQ ID NO: 2681
agaaaugagcucuaaguuu

SEQ ID NO: 208191 - RNA, 19 nt, Artificial Sequence
  Description of Artificial Sequence: Synthetic oligonucleotide
  Antisense strand to SEQ ID NO: 208190
aaacuuagagcucauuucu

SEQ ID NO: 208192 - RNA, 19 nt, Artificial Sequence
  Description of Artificial Sequence: Synthetic oligonucleotide
  Sense strand starting at position 1317 of SEQ ID NO: 2681
gcucuaaguuucucuuaga

SEQ ID NO: 208193 - RNA, 19 nt, Artificial Sequence
  Description of Artificial Sequence: Synthetic oligonucleotide
  Antisense strand to SEQ ID NO: 208192
ucuaagagaaacuuagagc

SEQ ID NO: 208194 - RNA, 19 nt, Artificial Sequence
  Description of Artificial Sequence: Synthetic oligonucleotide
  Sense strand starting at position 1331 of SEQ ID NO: 2681
uuagaaugcugcucaaaua

SEQ ID NO: 208195 - RNA, 19 nt, Artificial Sequence
  Description of Artificial Sequence: Synthetic oligonucleotide
  Antisense strand to SEQ ID NO: 208194
uauuugagcagcauucuaa

SEQ ID NO: 208196 - RNA, 19 nt, Artificial Sequence
  Description of Artificial Sequence: Synthetic oligonucleotide
  Sense strand starting at position 1439 of SEQ ID NO: 2681
auccaugauuucuaggcuu

SEQ ID NO: 208197 - RNA, 19 nt, Artificial Sequence
  Description of Artificial Sequence: Synthetic oligonucleotide
  Antisense strand to SEQ ID NO: 208196
aagccuagaaaucauggau

SEQ ID NO: 208198 - RNA, 19 nt, Artificial Sequence
  Description of Artificial Sequence: Synthetic oligonucleotide
  Sense strand starting at position 1442 of SEQ ID NO: 2681
caugauuucuaggcuuugu

SEQ ID NO: 208199 - RNA, 19 nt, Artificial Sequence
  Description of Artificial Sequence: Synthetic oligonucleotide
  Antisense strand to SEQ ID NO: 208198
acaaagccuagaaaucaug

SEQ ID NO: 208200 - RNA, 19 nt, Artificial Sequence
  Description of Artificial Sequence: Synthetic oligonucleotide
  Sense strand starting at position 2974 of SEQ ID NO: 2681
aagcuuaauucugcgagag

SEQ ID NO: 208201 - RNA, 19 nt, Artificial Sequence
  Description of Artificial Sequence: Synthetic oligonucleotide
  Antisense strand to SEQ ID NO: 208200
cucucgcagaauuaagcuu

SEQ ID NO: 208202 - RNA, 19 nt, Artificial Sequence
  Description of Artificial Sequence: Synthetic oligonucleotide
  Sense strand starting at position 2975 of SEQ ID NO: 2681
agcuuaauucugcgagagg

SEQ ID NO: 208203 - RNA, 19 nt, Artificial Sequence
  Description of Artificial Sequence: Synthetic oligonucleotide
  Antisense strand to SEQ ID NO: 208202
ccucucgcagaauuaagcu

SEQ ID NO: 208204 - RNA, 19 nt, Artificial Sequence
  Description of Artificial Sequence: Synthetic oligonucleotide
  Sense strand starting at position 3081 of SEQ ID NO: 2681
ggacaagugccagaacguu

SEQ ID NO: 208205 - RNA, 19 nt, Artificial Sequence
  Description of Artificial Sequence: Synthetic oligonucleotide
  Antisense strand to SEQ ID NO: 208204
aacguucuggcacuugucc

SEQ ID NO: 208206 - RNA, 19 nt, Artificial Sequence
  Description of Artificial Sequence: Synthetic oligonucleotide
  Sense strand starting at position 3091 of SEQ ID NO: 2681
cagaacguuccagauuaau

SEQ ID NO: 208207 - RNA, 19 nt, Artificial Sequence
  Description of Artificial Sequence: Synthetic oligonucleotide
  Antisense strand to SEQ ID NO: 208206
auuaaucuggaacguucug

SEQ ID NO: 208208 - RNA, 19 nt, Artificial Sequence
  Description of Artificial Sequence: Synthetic oligonucleotide
  Sense strand starting at position 3100 of SEQ ID NO: 2681
ccagauuaaugggaauauu

SEQ ID NO: 208209 - RNA, 19 nt, Artificial Sequence
  Description of Artificial Sequence: Synthetic oligonucleotide
  Antisense strand to SEQ ID NO: 208208
aauauucccauuaaucugg

SEQ ID NO: 208210 - RNA, 19 nt, Artificial Sequence
  Description of Artificial Sequence: Synthetic oligonucleotide
  Sense strand starting at position 3109 of SEQ ID NO: 2681
ugggaauauuccuauuuaa

SEQ ID NO: 208211 - RNA, 19 nt, Artificial Sequence
  Description of Artificial Sequence: Synthetic oligonucleotide
  Antisense strand to SEQ ID NO: 208210
uuaaauaggaauauuccca

SEQ ID NO: 208212 - RNA, 19 nt, Artificial Sequence
  Description of Artificial Sequence: Synthetic oligonucleotide
  Sense strand starting at position 3281 of SEQ ID NO: 2681
auugcaaagcucugacaac

SEQ ID NO: 208213 - RNA, 19 nt, Artificial Sequence
  Description of Artificial Sequence: Synthetic oligonucleotide
  Antisense strand to SEQ ID NO: 208212
guugucagagcuuugcaau

SEQ ID NO: 208214 - RNA, 19 nt, Artificial Sequence
  Description of Artificial Sequence: Synthetic oligonucleotide
  Sense strand starting at position 3312 of SEQ ID NO: 2681
auacaaaugccauaugugu

SEQ ID NO: 208215 - RNA, 19 nt, Artificial Sequence
  Description of Artificial Sequence: Synthetic oligonucleotide
  Antisense strand to SEQ ID NO: 208214
acacauauggcauuuguau

SEQ ID NO: 208216 - RNA, 19 nt, Artificial Sequence
  Description of Artificial Sequence: Synthetic oligonucleotide
  Sense strand starting at position 3318 of SEQ ID NO: 2681
augccauauguguguauuu

SEQ ID NO: 208217 - RNA, 19 nt, Artificial Sequence
  Description of Artificial Sequence: Synthetic oligonucleotide
  Antisense strand to SEQ ID NO: 208216
aaauacacacauauggcau

SEQ ID NO: 208218 - RNA, 19 nt, Artificial Sequence
  Description of Artificial Sequence: Synthetic oligonucleotide
  Sense strand starting at position 3861 of SEQ ID NO: 2681
gagaaagcaggguguuguu

SEQ ID NO: 208219 - RNA, 19 nt, Artificial Sequence
  Description of Artificial Sequence: Synthetic oligonucleotide
  Antisense strand to SEQ ID NO: 208218
aacaacacccugcuuucuc

SEQ ID NO: 208220 - RNA, 19 nt, Artificial Sequence
  Description of Artificial Sequence: Synthetic oligonucleotide
  Sense strand starting at position 3870 of SEQ ID NO: 2681
ggguguuguuauuuacagu

SEQ ID NO: 208221 - RNA, 19 nt, Artificial Sequence
  Description of Artificial Sequence: Synthetic oligonucleotide
  Antisense strand to SEQ ID NO: 208220
acuguaaauaacaacaccc

SEQ ID NO: 208222 - RNA, 19 nt, Artificial Sequence
  Description of Artificial Sequence: Synthetic oligonucleotide
  Sense strand starting at position 3927 of SEQ ID NO: 2681
gggagcuuucuguauggaa

SEQ ID NO: 208223 - RNA, 19 nt, Artificial Sequence
  Description of Artificial Sequence: Synthetic oligonucleotide
  Antisense strand to SEQ ID NO: 208222
uuccauacagaaagcuccc

SEQ ID NO: 208224 - RNA, 19 nt, Artificial Sequence
  Description of Artificial Sequence: Synthetic oligonucleotide
  Sense strand starting at position 3929 of SEQ ID NO: 2681
gagcuuucuguauggaaag

SEQ ID NO: 208225 - RNA, 19 nt, Artificial Sequence
  Description of Artificial Sequence: Synthetic oligonucleotide
  Antisense strand to SEQ ID NO: 208224
cuuuccauacagaaagcuc

SEQ ID NO: 208226 - RNA, 19 nt, Artificial Sequence
  Description of Artificial Sequence: Synthetic oligonucleotide
  Sense strand starting at position 3982 of SEQ ID NO: 2681
agaaucugcuggcuugaaa

SEQ ID NO: 208227 - RNA, 19 nt, Artificial Sequence
  Description of Artificial Sequence: Synthetic oligonucleotide
  Antisense strand to SEQ ID NO: 208226
uuucaagccagcagauucu

SEQ ID NO: 208228 - RNA, 19 nt, Artificial Sequence
  Description of Artificial Sequence: Synthetic oligonucleotide
  Sense strand starting at position 159 of SEQ ID NO: 2685
aucugaaauguauacaguu

SEQ ID NO: 208229 - RNA, 19 nt, Artificial Sequence
  Description of Artificial Sequence: Synthetic oligonucleotide
  Antisense strand to SEQ ID NO: 208228
aacuguauacauuucagau

SEQ ID NO: 208230 - RNA, 19 nt, Artificial Sequence
  Description of Artificial Sequence: Synthetic oligonucleotide
  Sense strand starting at position 540 of SEQ ID NO: 2685
gaucauuuaugagcacguu

SEQ ID NO: 208231 - RNA, 19 nt, Artificial Sequence
  Description of Artificial Sequence: Synthetic oligonucleotide
  Antisense strand to SEQ ID NO: 208230
aacgugcucauaaaugauc

SEQ ID NO: 208232 - RNA, 19 nt, Artificial Sequence
  Description of Artificial Sequence: Synthetic oligonucleotide
  Sense strand starting at position 569 of SEQ ID NO: 2685
cagagagacuuugcggaaa

SEQ ID NO: 208233 - RNA, 19 nt, Artificial Sequence
  Description of Artificial Sequence: Synthetic oligonucleotide
  Antisense strand to SEQ ID NO: 208232
uuuccgcaaagucucucug

SEQ ID NO: 208234 - RNA, 19 nt, Artificial Sequence
  Description of Artificial Sequence: Synthetic oligonucleotide
  Sense strand starting at position 582 of SEQ ID NO: 2685
cggaaacagaguuagaguu

SEQ ID NO: 208235 - RNA, 19 nt, Artificial Sequence
  Description of Artificial Sequence: Synthetic oligonucleotide
  Antisense strand to SEQ ID NO: 208234
aacucuaacucuguuuccg

SEQ ID NO: 208236 - RNA, 19 nt, Artificial Sequence
  Description of Artificial Sequence: Synthetic oligonucleotide
  Sense strand starting at position 686 of SEQ ID NO: 2685
acauauacgucugcauuga

SEQ ID NO: 208237 - RNA, 19 nt, Artificial Sequence
  Description of Artificial Sequence: Synthetic oligonucleotide
  Antisense strand to SEQ ID NO: 208236
ucaaugcagacguauaugu

SEQ ID NO: 208238 - RNA, 19 nt, Artificial Sequence
  Description of Artificial Sequence: Synthetic oligonucleotide
  Sense strand starting at position 697 of SEQ ID NO: 2685
ugcauugacguauaccaca

SEQ ID NO: 208239 - RNA, 19 nt, Artificial Sequence
  Description of Artificial Sequence: Synthetic oligonucleotide
  Antisense strand to SEQ ID NO: 208238
ugugguauacgucaaugca

SEQ ID NO: 208240 - RNA, 19 nt, Artificial Sequence
  Description of Artificial Sequence: Synthetic oligonucleotide
  Sense strand starting at position 702 of SEQ ID NO: 2685
ugacguauaccacaggguu

SEQ ID NO: 208241 - RNA, 19 nt, Artificial Sequence
  Description of Artificial Sequence: Synthetic oligonucleotide
  Antisense strand to SEQ ID NO: 208240
aacccugugguauacguca

SEQ ID NO: 208242 - RNA, 19 nt, Artificial Sequence
  Description of Artificial Sequence: Synthetic oligonucleotide
  Sense strand starting at position 765 of SEQ ID NO: 2685
gugguuuagccagagaauc

SEQ ID NO: 208243 - RNA, 19 nt, Artificial Sequence
  Description of Artificial Sequence: Synthetic oligonucleotide
  Antisense strand to SEQ ID NO: 208242
gauucucuggcuaaaccac

SEQ ID NO: 208244 - RNA, 19 nt, Artificial Sequence
  Description of Artificial Sequence: Synthetic oligonucleotide
  Sense strand starting at position 767 of SEQ ID NO: 2685
gguuuagccagagaaucuu

SEQ ID NO: 208245 - RNA, 19 nt, Artificial Sequence
  Description of Artificial Sequence: Synthetic oligonucleotide
  Antisense strand to SEQ ID NO: 208244
aagauucucuggcuaaacc

SEQ ID NO: 208246 - RNA, 19 nt, Artificial Sequence
  Description of Artificial Sequence: Synthetic oligonucleotide
  Sense strand starting at position 898 of SEQ ID NO: 2685
gagguuucuguguauugau

SEQ ID NO: 208247 - RNA, 19 nt, Artificial Sequence
  Description of Artificial Sequence: Synthetic oligonucleotide
  Antisense strand to SEQ ID NO: 208246
aucaauacacagaaaccuc

SEQ ID NO: 208248 - RNA, 19 nt, Artificial Sequence
  Description of Artificial Sequence: Synthetic oligonucleotide
  Sense strand starting at position 988 of SEQ ID NO: 2685
aagcuagcacucuauggua

SEQ ID NO: 208249 - RNA, 19 nt, Artificial Sequence
  Description of Artificial Sequence: Synthetic oligonucleotide
  Antisense strand to SEQ ID NO: 208248
uaccauagagugcuagcuu

SEQ ID NO: 208250 - RNA, 19 nt, Artificial Sequence
  Description of Artificial Sequence: Synthetic oligonucleotide
  Sense strand starting at position 1001 of SEQ ID NO: 2685
augguaugauuucagggau

SEQ ID NO: 208251 - RNA, 19 nt, Artificial Sequence
  Description of Artificial Sequence: Synthetic oligonucleotide
  Antisense strand to SEQ ID NO: 208250
aucccugaaaucauaccau

SEQ ID NO: 208252 - RNA, 19 nt, Artificial Sequence
  Description of Artificial Sequence: Synthetic oligonucleotide
  Sense strand starting at position 1114 of SEQ ID NO: 2685
gucugcuucgcucuuccaa

SEQ ID NO: 208253 - RNA, 19 nt, Artificial Sequence
  Description of Artificial Sequence: Synthetic oligonucleotide
  Antisense strand to SEQ ID NO: 208252
uuggaagagcgaagcagac

SEQ ID NO: 208254 - RNA, 19 nt, Artificial Sequence
  Description of Artificial Sequence: Synthetic oligonucleotide
  Sense strand starting at position 1123 of SEQ ID NO: 2685
gcucuuccaagguagagua

SEQ ID NO: 208255 - RNA, 19 nt, Artificial Sequence
  Description of Artificial Sequence: Synthetic oligonucleotide
  Antisense strand to SEQ ID NO: 208254
uacucuaccuuggaagagc

SEQ ID NO: 208256 - RNA, 19 nt, Artificial Sequence
  Description of Artificial Sequence: Synthetic oligonucleotide
  Sense strand starting at position 1236 of SEQ ID NO: 2685
cuuguuuggccagaaagca

SEQ ID NO: 208257 - RNA, 19 nt, Artificial Sequence
  Description of Artificial Sequence: Synthetic oligonucleotide
  Antisense strand to SEQ ID NO: 208256
ugcuuucuggccaaacaag

SEQ ID NO: 208258 - RNA, 19 nt, Artificial Sequence
  Description of Artificial Sequence: Synthetic oligonucleotide
  Sense strand starting at position 1364 of SEQ ID NO: 2685
aggcacuuucugcauaguu

SEQ ID NO: 208259 - RNA, 19 nt, Artificial Sequence
  Description of Artificial Sequence: Synthetic oligonucleotide
  Antisense strand to SEQ ID NO: 208258
aacuaugcagaaagugccu

SEQ ID NO: 208260 - RNA, 19 nt, Artificial Sequence
  Description of Artificial Sequence: Synthetic oligonucleotide
  Sense strand starting at position 1571 of SEQ ID NO: 2685
gaaugauguuagcuuucug

SEQ ID NO: 208261 - RNA, 19 nt, Artificial Sequence
  Description of Artificial Sequence: Synthetic oligonucleotide
  Antisense strand to SEQ ID NO: 208260
cagaaagcuaacaucauuc

SEQ ID NO: 208262 - RNA, 19 nt, Artificial Sequence
  Description of Artificial Sequence: Synthetic oligonucleotide
  Sense strand starting at position 1670 of SEQ ID NO: 2685
ggaauuagcuaucuaugaa

SEQ ID NO: 208263 - RNA, 19 nt, Artificial Sequence
  Description of Artificial Sequence: Synthetic oligonucleotide
  Antisense strand to SEQ ID NO: 208262
uucauagauagcuaauucc

SEQ ID NO: 208264 - RNA, 19 nt, Artificial Sequence
  Description of Artificial Sequence: Synthetic oligonucleotide
  Sense strand starting at position 1723 of SEQ ID NO: 2685
agguacaaauugucauaca

SEQ ID NO: 208265 - RNA, 19 nt, Artificial Sequence
  Description of Artificial Sequence: Synthetic oligonucleotide
  Antisense strand to SEQ ID NO: 208264
uguaugacaauuuguaccu

SEQ ID NO: 208266 - RNA, 19 nt, Artificial Sequence
  Description of Artificial Sequence: Synthetic oligonucleotide
  Sense strand starting at position 1736 of SEQ ID NO: 2685
cauacauggaggugugaua

SEQ ID NO: 208267 - RNA, 19 nt, Artificial Sequence
  Description of Artificial Sequence: Synthetic oligonucleotide
  Antisense strand to SEQ ID NO: 208266
uaucacaccuccauguaug

SEQ ID NO: 208268 - RNA, 19 nt, Artificial Sequence
  Description of Artificial Sequence: Synthetic oligonucleotide
  Sense strand starting at position 2474 of SEQ ID NO: 2685
aauauucucguugaagucu

SEQ ID NO: 208269 - RNA, 19 nt, Artificial Sequence
  Description of Artificial Sequence: Synthetic oligonucleotide
  Antisense strand to SEQ ID NO: 208268
agacuucaacgagaauauu

SEQ ID NO: 208270 - RNA, 19 nt, Artificial Sequence
  Description of Artificial Sequence: Synthetic oligonucleotide
  Sense strand starting at position 2520 of SEQ ID NO: 2685
cugugucccaacuggugaa

SEQ ID NO: 208271 - RNA, 19 nt, Artificial Sequence
  Description of Artificial Sequence: Synthetic oligonucleotide
  Antisense strand to SEQ ID NO: 208270
uucaccaguugggacacag

SEQ ID NO: 208272 - RNA, 19 nt, Artificial Sequence
  Description of Artificial Sequence: Synthetic oligonucleotide
  Sense strand starting at position 2524 of SEQ ID NO: 2685
gucccaacuggugaaguuu

SEQ ID NO: 208273 - RNA, 19 nt, Artificial Sequence
  Description of Artificial Sequence: Synthetic oligonucleotide
  Antisense strand to SEQ ID NO: 208272
aaacuucaccaguugggac

SEQ ID NO: 208274 - RNA, 19 nt, Artificial Sequence
  Description of Artificial Sequence: Synthetic oligonucleotide
  Sense strand starting at position 2585 of SEQ ID NO: 2685
uuuaaugcucuuuaguuga

SEQ ID NO: 208275 - RNA, 19 nt, Artificial Sequence
  Description of Artificial Sequence: Synthetic oligonucleotide
  Antisense strand to SEQ ID NO: 208274
ucaacuaaagagcauuaaa

SEQ ID NO: 208276 - RNA, 19 nt, Artificial Sequence
  Description of Artificial Sequence: Synthetic oligonucleotide
  Sense strand starting at position 2590 of SEQ ID NO: 2685
ugcucuuuaguugaauguu

SEQ ID NO: 208277 - RNA, 19 nt, Artificial Sequence
  Description of Artificial Sequence: Synthetic oligonucleotide
  Antisense strand to SEQ ID NO: 208276
aacauucaacuaaagagca

SEQ ID NO: 208278 - RNA, 19 nt, Artificial Sequence
  Description of Artificial Sequence: Synthetic oligonucleotide
  Sense strand starting at position 2805 of SEQ ID NO: 2685
ggaugaguuucucuaggua

SEQ ID NO: 208279 - RNA, 19 nt, Artificial Sequence
  Description of Artificial Sequence: Synthetic oligonucleotide
  Antisense strand to SEQ ID NO: 208278
uaccuagagaaacucaucc

SEQ ID NO: 208280 - RNA, 19 nt, Artificial Sequence
  Description of Artificial Sequence: Synthetic oligonucleotide
  Sense strand starting at position 2808 of SEQ ID NO: 2685
ugaguuucucuagguacuu

SEQ ID NO: 208281 - RNA, 19 nt, Artificial Sequence
  Description of Artificial Sequence: Synthetic oligonucleotide
  Antisense strand to SEQ ID NO: 208280
aaguaccuagagaaacuca

SEQ ID NO: 208282 - RNA, 19 nt, Artificial Sequence
  Description of Artificial Sequence: Synthetic oligonucleotide
  Sense strand starting at position 2809 of SEQ ID NO: 2685
gaguuucucuagguacuua

SEQ ID NO: 208283 - RNA, 19 nt, Artificial Sequence
  Description of Artificial Sequence: Synthetic oligonucleotide
  Antisense strand to SEQ ID NO: 208282
uaaguaccuagagaaacuc

SEQ ID NO: 208284 - RNA, 19 nt, Artificial Sequence
  Description of Artificial Sequence: Synthetic oligonucleotide
  Sense strand starting at position 2827 of SEQ ID NO: 2685
agaacuuucuggucaacca

SEQ ID NO: 208285 - RNA, 19 nt, Artificial Sequence
  Description of Artificial Sequence: Synthetic oligonucleotide
  Antisense strand to SEQ ID NO: 208284
ugguugaccagaaaguucu

SEQ ID NO: 208286 - RNA, 19 nt, Artificial Sequence
  Description of Artificial Sequence: Synthetic oligonucleotide
  Sense strand starting at position 2885 of SEQ ID NO: 2685
agcuuuauggcccacucua

SEQ ID NO: 208287 - RNA, 19 nt, Artificial Sequence
  Description of Artificial Sequence: Synthetic oligonucleotide
  Antisense strand to SEQ ID NO: 208286
uagagugggccauaaagcu

SEQ ID NO: 208288 - RNA, 19 nt, Artificial Sequence
  Description of Artificial Sequence: Synthetic oligonucleotide
  Sense strand starting at position 2975 of SEQ ID NO: 2685
augacugacuggguaagua

SEQ ID NO: 208289 - RNA, 19 nt, Artificial Sequence
  Description of Artificial Sequence: Synthetic oligonucleotide
  Antisense strand to SEQ ID NO: 208288
uacuuacccagucagucau

SEQ ID NO: 208290 - RNA, 19 nt, Artificial Sequence
  Description of Artificial Sequence: Synthetic oligonucleotide
  Sense strand starting at position 3037 of SEQ ID NO: 2685
ugccacuaauuggucagau

SEQ ID NO: 208291 - RNA, 19 nt, Artificial Sequence
  Description of Artificial Sequence: Synthetic oligonucleotide
  Antisense strand to SEQ ID NO: 208290
aucugaccaauuaguggca

SEQ ID NO: 208292 - RNA, 19 nt, Artificial Sequence
  Description of Artificial Sequence: Synthetic oligonucleotide
  Sense strand starting at position 3038 of SEQ ID NO: 2685
gccacuaauuggucagaug

SEQ ID NO: 208293 - RNA, 19 nt, Artificial Sequence
  Description of Artificial Sequence: Synthetic oligonucleotide
  Antisense strand to SEQ ID NO: 208292
caucugaccaauuaguggc

SEQ ID NO: 208294 - RNA, 19 nt, Artificial Sequence
  Description of Artificial Sequence: Synthetic oligonucleotide
  Sense strand starting at position 3049 of SEQ ID NO: 2685
gucagaugacucuggacca

SEQ ID NO: 208295 - RNA, 19 nt, Artificial Sequence
  Description of Artificial Sequence: Synthetic oligonucleotide
  Antisense strand to SEQ ID NO: 208294
ugguccagagucaucugac

SEQ ID NO: 208296 - RNA, 19 nt, Artificial Sequence
  Description of Artificial Sequence: Synthetic oligonucleotide
  Sense strand starting at position 3120 of SEQ ID NO: 2685
agaaauaacuuagggaaag

SEQ ID NO: 208297 - RNA, 19 nt, Artificial Sequence
  Description of Artificial Sequence: Synthetic oligonucleotide
  Antisense strand to SEQ ID NO: 208296
cuuucccuaaguuauuucu

SEQ ID NO: 208298 - RNA, 19 nt, Artificial Sequence
  Description of Artificial Sequence: Synthetic oligonucleotide
  Sense strand starting at position 3121 of SEQ ID NO: 2685
gaaauaacuuagggaaaga

SEQ ID NO: 208299 - RNA, 19 nt, Artificial Sequence
  Description of Artificial Sequence: Synthetic oligonucleotide
  Antisense strand to SEQ ID NO: 208298
ucuuucccuaaguuauuuc

SEQ ID NO: 208300 - RNA, 19 nt, Artificial Sequence
  Description of Artificial Sequence: Synthetic oligonucleotide
  Sense strand starting at position 3523 of SEQ ID NO: 2685
gauugucaccucugagauu

SEQ ID NO: 208301 - RNA, 19 nt, Artificial Sequence
  Description of Artificial Sequence: Synthetic oligonucleotide
  Antisense strand to SEQ ID NO: 208300
aaucucagaggugacaauc

SEQ ID NO: 208302 - RNA, 19 nt, Artificial Sequence
  Description of Artificial Sequence: Synthetic oligonucleotide
  Sense strand starting at position 3620 of SEQ ID NO: 2685
ucuaccugucgacaaggau

SEQ ID NO: 208303 - RNA, 19 nt, Artificial Sequence
  Description of Artificial Sequence: Synthetic oligonucleotide
  Antisense strand to SEQ ID NO: 208302
auccuugucgacagguaga

SEQ ID NO: 208304 - RNA, 19 nt, Artificial Sequence
  Description of Artificial Sequence: Synthetic oligonucleotide
  Sense strand starting at position 3766 of SEQ ID NO: 2685
uaauuacagccauacggua

SEQ ID NO: 208305 - RNA, 19 nt, Artificial Sequence
  Description of Artificial Sequence: Synthetic oligonucleotide
  Antisense strand to SEQ ID NO: 208304
uaccguauggcuguaauua

SEQ ID NO: 208306 - RNA, 19 nt, Artificial Sequence
  Description of Artificial Sequence: Synthetic oligonucleotide
  Sense strand starting at position 3956 of SEQ ID NO: 2685
ucaccaagaugagacaaau

SEQ ID NO: 208307 - RNA, 19 nt, Artificial Sequence
  Description of Artificial Sequence: Synthetic oligonucleotide
  Antisense strand to SEQ ID NO: 208306
auuugucucaucuugguga

SEQ ID NO: 208308 - RNA, 19 nt, Artificial Sequence
  Description of Artificial Sequence: Synthetic oligonucleotide
  Sense strand starting at position 25 of SEQ ID NO: 2684
aucaguuacgggcauaaau

SEQ ID NO: 208309 - RNA, 19 nt, Artificial Sequence
  Description of Artificial Sequence: Synthetic oligonucleotide
  Antisense strand to SEQ ID NO: 208308
auuuaugcccguaacugau

SEQ ID NO: 208310 - RNA, 19 nt, Artificial Sequence
  Description of Artificial Sequence: Synthetic oligonucleotide
  Sense strand starting at position 32 of SEQ ID NO: 2684
acgggcauaaauugagaaa

SEQ ID NO: 208311 - RNA, 19 nt, Artificial Sequence
  Description of Artificial Sequence: Synthetic oligonucleotide
  Antisense strand to SEQ ID NO: 208310
uuucucaauuuaugcccgu

SEQ ID NO: 208312 - RNA, 19 nt, Artificial Sequence
  Description of Artificial Sequence: Synthetic oligonucleotide
  Sense strand starting at position 95 of SEQ ID NO: 2684
agaauaaagcauuagugca

SEQ ID NO: 208313 - RNA, 19 nt, Artificial Sequence
  Description of Artificial Sequence: Synthetic oligonucleotide
  Antisense strand to SEQ ID NO: 208312
ugcacuaaugcuuuauucu

SEQ ID NO: 208314 - RNA, 19 nt, Artificial Sequence
  Description of Artificial Sequence: Synthetic oligonucleotide
  Sense strand starting at position 100 of SEQ ID NO: 2684
aaagcauuagugcaguuau

SEQ ID NO: 208315 - RNA, 19 nt, Artificial Sequence
  Description of Artificial Sequence: Synthetic oligonucleotide
  Antisense strand to SEQ ID NO: 208314
auaacugcacuaaugcuuu

SEQ ID NO: 208316 - RNA, 19 nt, Artificial Sequence
  Description of Artificial Sequence: Synthetic oligonucleotide
  Sense strand starting at position 108 of SEQ ID NO: 2684
agugcaguuauguagauga

SEQ ID NO: 208317 - RNA, 19 nt, Artificial Sequence
  Description of Artificial Sequence: Synthetic oligonucleotide
  Antisense strand to SEQ ID NO: 208316
ucaucuacauaacugcacu

SEQ ID NO: 208318 - RNA, 19 nt, Artificial Sequence
  Description of Artificial Sequence: Synthetic oligonucleotide
  Sense strand starting at position 110 of SEQ ID NO: 2684
ugcaguuauguagaugaac

SEQ ID NO: 208319 - RNA, 19 nt, Artificial Sequence
  Description of Artificial Sequence: Synthetic oligonucleotide
  Antisense strand to SEQ ID NO: 208318
guucaucuacauaacugca

SEQ ID NO: 208320 - RNA, 19 nt, Artificial Sequence
  Description of Artificial Sequence: Synthetic oligonucleotide
  Sense strand starting at position 157 of SEQ ID NO: 2684
aaagaacugcuguguaauu

SEQ ID NO: 208321 - RNA, 19 nt, Artificial Sequence
  Description of Artificial Sequence: Synthetic oligonucleotide
  Antisense strand to SEQ ID NO: 208320
aauuacacagcaguucuuu

SEQ ID NO: 208322 - RNA, 19 nt, Artificial Sequence
  Description of Artificial Sequence: Synthetic oligonucleotide
  Sense strand starting at position 158 of SEQ ID NO: 2684
aagaacugcuguguaauua

SEQ ID NO: 208323 - RNA, 19 nt, Artificial Sequence
  Description of Artificial Sequence: Synthetic oligonucleotide
  Antisense strand to SEQ ID NO: 208322
uaauuacacagcaguucuu

SEQ ID NO: 208324 - RNA, 19 nt, Artificial Sequence
  Description of Artificial Sequence: Synthetic oligonucleotide
  Sense strand starting at position 395 of SEQ ID NO: 2684
ugcuuagugcucgcugaau

SEQ ID NO: 208325 - RNA, 19 nt, Artificial Sequence
  Description of Artificial Sequence: Synthetic oligonucleotide
  Antisense strand to SEQ ID NO: 208324
auucagcgagcacuaagca

SEQ ID NO: 208326 - RNA, 19 nt, Artificial Sequence
  Description of Artificial Sequence: Synthetic oligonucleotide
  Sense strand starting at position 447 of SEQ ID NO: 2684
agugaaauucugcauaaua

SEQ ID NO: 208327 - RNA, 19 nt, Artificial Sequence
  Description of Artificial Sequence: Synthetic oligonucleotide
  Antisense strand to SEQ ID NO: 208326
uauuaugcagaauuucacu

SEQ ID NO: 208328 - RNA, 19 nt, Artificial Sequence
  Description of Artificial Sequence: Synthetic oligonucleotide
  Sense strand starting at position 497 of SEQ ID NO: 2684
uuaggagaggucugaguuc

SEQ ID NO: 208329 - RNA, 19 nt, Artificial Sequence
  Description of Artificial Sequence: Synthetic oligonucleotide
  Antisense strand to SEQ ID NO: 208328
gaacucagaccucuccuaa

SEQ ID NO: 208330 - RNA, 19 nt, Artificial Sequence
  Description of Artificial Sequence: Synthetic oligonucleotide
  Sense strand starting at position 522 of SEQ ID NO: 2684
gauaucaauuccucguuga

SEQ ID NO: 208331 - RNA, 19 nt, Artificial Sequence
  Description of Artificial Sequence: Synthetic oligonucleotide
  Antisense strand to SEQ ID NO: 208330
ucaacgaggaauugauauc

SEQ ID NO: 208332 - RNA, 19 nt, Artificial Sequence
  Description of Artificial Sequence: Synthetic oligonucleotide
  Sense strand starting at position 535 of SEQ ID NO: 2684
cguugauauguuuaaauug

SEQ ID NO: 208333 - RNA, 19 nt, Artificial Sequence
  Description of Artificial Sequence: Synthetic oligonucleotide
  Antisense strand to SEQ ID NO: 208332
caauuuaaacauaucaacg

SEQ ID NO: 208334 - RNA, 19 nt, Artificial Sequence
  Description of Artificial Sequence: Synthetic oligonucleotide
  Sense strand starting at position 581 of SEQ ID NO: 2684
cugccaucauagguuagaa

SEQ ID NO: 208335 - RNA, 19 nt, Artificial Sequence
  Description of Artificial Sequence: Synthetic oligonucleotide
  Antisense strand to SEQ ID NO: 208334
uucuaaccuaugauggcag

SEQ ID NO: 208336 - RNA, 19 nt, Artificial Sequence
  Description of Artificial Sequence: Synthetic oligonucleotide
  Sense strand starting at position 636 of SEQ ID NO: 2684
agaacuucucaaggucacu

SEQ ID NO: 208337 - RNA, 19 nt, Artificial Sequence
  Description of Artificial Sequence: Synthetic oligonucleotide
  Antisense strand to SEQ ID NO: 208336
agugaccuugagaaguucu

SEQ ID NO: 208338 - RNA, 19 nt, Artificial Sequence
  Description of Artificial Sequence: Synthetic oligonucleotide
  Sense strand starting at position 769 of SEQ ID NO: 2684
caaggugacucauugcaug

SEQ ID NO: 208339 - RNA, 19 nt, Artificial Sequence
  Description of Artificial Sequence: Synthetic oligonucleotide
  Antisense strand to SEQ ID NO: 208338
caugcaaugagucaccuug

SEQ ID NO: 208340 - RNA, 19 nt, Artificial Sequence
  Description of Artificial Sequence: Synthetic oligonucleotide
  Sense strand starting at position 874 of SEQ ID NO: 2684
gugaaaggcaccuaagcau

SEQ ID NO: 208341 - RNA, 19 nt, Artificial Sequence
  Description of Artificial Sequence: Synthetic oligonucleotide
  Antisense strand to SEQ ID NO: 208340
augcuuaggugccuuucac

SEQ ID NO: 208342 - RNA, 19 nt, Artificial Sequence
  Description of Artificial Sequence: Synthetic oligonucleotide
  Sense strand starting at position 1011 of SEQ ID NO: 2684
gagugcuggccuucguuaa

SEQ ID NO: 208343 - RNA, 19 nt, Artificial Sequence
  Description of Artificial Sequence: Synthetic oligonucleotide
  Antisense strand to SEQ ID NO: 208342
uuaacgaaggccagcacuc

SEQ ID NO: 208344 - RNA, 19 nt, Artificial Sequence
  Description of Artificial Sequence: Synthetic oligonucleotide
  Sense strand starting at position 1096 of SEQ ID NO: 2684
agaguaaacuuucugcuca

SEQ ID NO: 208345 - RNA, 19 nt, Artificial Sequence
  Description of Artificial Sequence: Synthetic oligonucleotide
  Antisense strand to SEQ ID NO: 208344
ugagcagaaaguuuacucu

SEQ ID NO: 208346 - RNA, 19 nt, Artificial Sequence
  Description of Artificial Sequence: Synthetic oligonucleotide
  Sense strand starting at position 1252 of SEQ ID NO: 2684
uuacucuaggucgaguuau

SEQ ID NO: 208347 - RNA, 19 nt, Artificial Sequence
  Description of Artificial Sequence: Synthetic oligonucleotide
  Antisense strand to SEQ ID NO: 208346
auaacucgaccuagaguaa

SEQ ID NO: 208348 - RNA, 19 nt, Artificial Sequence
  Description of Artificial Sequence: Synthetic oligonucleotide
  Sense strand starting at position 1601 of SEQ ID NO: 2684
ucucauaccugucugagga

SEQ ID NO: 208349 - RNA, 19 nt, Artificial Sequence
  Description of Artificial Sequence: Synthetic oligonucleotide
  Antisense strand to SEQ ID NO: 208348
uccucagacagguaugaga

SEQ ID NO: 208350 - RNA, 19 nt, Artificial Sequence
  Description of Artificial Sequence: Synthetic oligonucleotide
  Sense strand starting at position 1602 of SEQ ID NO: 2684
cucauaccugucugaggau

SEQ ID NO: 208351 - RNA, 19 nt, Artificial Sequence
  Description of Artificial Sequence: Synthetic oligonucleotide
  Antisense strand to SEQ ID NO: 208350
auccucagacagguaugag

SEQ ID NO: 208352 - RNA, 19 nt, Artificial Sequence
  Description of Artificial Sequence: Synthetic oligonucleotide
  Sense strand starting at position 2753 of SEQ ID NO: 2684
guuugcugcacuggaauuu

SEQ ID NO: 208353 - RNA, 19 nt, Artificial Sequence
  Description of Artificial Sequence: Synthetic oligonucleotide
  Antisense strand to SEQ ID NO: 208352
aaauuccagugcagcaaac

SEQ ID NO: 208354 - RNA, 19 nt, Artificial Sequence
  Description of Artificial Sequence: Synthetic oligonucleotide
  Sense strand starting at position 3021 of SEQ ID NO: 2684
gaagcaagaguuggucacu

SEQ ID NO: 208355 - RNA, 19 nt, Artificial Sequence
  Description of Artificial Sequence: Synthetic oligonucleotide
  Antisense strand to SEQ ID NO: 208354
agugaccaacucuugcuuc

SEQ ID NO: 208356 - RNA, 19 nt, Artificial Sequence
  Description of Artificial Sequence: Synthetic oligonucleotide
  Sense strand starting at position 3024 of SEQ ID NO: 2684
gcaagaguuggucacugug

SEQ ID NO: 208357 - RNA, 19 nt, Artificial Sequence
  Description of Artificial Sequence: Synthetic oligonucleotide
  Antisense strand to SEQ ID NO: 208356
cacagugaccaacucuugc

SEQ ID NO: 208358 - RNA, 19 nt, Artificial Sequence
  Description of Artificial Sequence: Synthetic oligonucleotide
  Sense strand starting at position 3044 of SEQ ID NO: 2684
cucccauuucuaugcgaau

SEQ ID NO: 208359 - RNA, 19 nt, Artificial Sequence
  Description of Artificial Sequence: Synthetic oligonucleotide
  Antisense strand to SEQ ID NO: 208358
auucgcauagaaaugggag

SEQ ID NO: 208360 - RNA, 19 nt, Artificial Sequence
  Description of Artificial Sequence: Synthetic oligonucleotide
  Sense strand starting at position 3045 of SEQ ID NO: 2684
ucccauuucuaugcgaaug

SEQ ID NO: 208361 - RNA, 19 nt, Artificial Sequence
  Description of Artificial Sequence: Synthetic oligonucleotide
  Antisense strand to SEQ ID NO: 208360
cauucgcauagaaauggga

SEQ ID NO: 208362 - RNA, 19 nt, Artificial Sequence
  Description of Artificial Sequence: Synthetic oligonucleotide
  Sense strand starting at position 3050 of SEQ ID NO: 2684
uuucuaugcgaauggauau

SEQ ID NO: 208363 - RNA, 19 nt, Artificial Sequence
  Description of Artificial Sequence: Synthetic oligonucleotide
  Antisense strand to SEQ ID NO: 208362
auauccauucgcauagaaa

SEQ ID NO: 208364 - RNA, 19 nt, Artificial Sequence
  Description of Artificial Sequence: Synthetic oligonucleotide
  Sense strand starting at position 3051 of SEQ ID NO: 2684
uucuaugcgaauggauauu

SEQ ID NO: 208365 - RNA, 19 nt, Artificial Sequence
  Description of Artificial Sequence: Synthetic oligonucleotide
  Antisense strand to SEQ ID NO: 208364
aauauccauucgcauagaa

SEQ ID NO: 208366 - RNA, 19 nt, Artificial Sequence
  Description of Artificial Sequence: Synthetic oligonucleotide
  Sense strand starting at position 3119 of SEQ ID NO: 2684
gguuuccuccuguaaauac

SEQ ID NO: 208367 - RNA, 19 nt, Artificial Sequence
  Description of Artificial Sequence: Synthetic oligonucleotide
  Antisense strand to SEQ ID NO: 208366
guauuuacaggaggaaacc

SEQ ID NO: 208368 - RNA, 19 nt, Artificial Sequence
  Description of Artificial Sequence: Synthetic oligonucleotide
  Sense strand starting at position 3188 of SEQ ID NO: 2684
gaagaauaagugcgaggua

SEQ ID NO: 208369 - RNA, 19 nt, Artificial Sequence
  Description of Artificial Sequence: Synthetic oligonucleotide
  Antisense strand to SEQ ID NO: 208368
uaccucgcacuuauucuuc

SEQ ID NO: 208370 - RNA, 19 nt, Artificial Sequence
  Description of Artificial Sequence: Synthetic oligonucleotide
  Sense strand starting at position 3256 of SEQ ID NO: 2684
uaaagagacuccguuuaaa

SEQ ID NO: 208371 - RNA, 19 nt, Artificial Sequence
  Description of Artificial Sequence: Synthetic oligonucleotide
  Antisense strand to SEQ ID NO: 208370
uuuaaacggagucucuuua

SEQ ID NO: 208372 - RNA, 19 nt, Artificial Sequence
  Description of Artificial Sequence: Synthetic oligonucleotide
  Sense strand starting at position 3259 of SEQ ID NO: 2684
agagacuccguuuaaauua

SEQ ID NO: 208373 - RNA, 19 nt, Artificial Sequence
  Description of Artificial Sequence: Synthetic oligonucleotide
  Antisense strand to SEQ ID NO: 208372
uaauuuaaacggagucucu

SEQ ID NO: 208374 - RNA, 19 nt, Artificial Sequence
  Description of Artificial Sequence: Synthetic oligonucleotide
  Sense strand starting at position 3321 of SEQ ID NO: 2684
aggacuuuauguuuaugga

SEQ ID NO: 208375 - RNA, 19 nt, Artificial Sequence
  Description of Artificial Sequence: Synthetic oligonucleotide
  Antisense strand to SEQ ID NO: 208374
uccauaaacauaaaguccu

SEQ ID NO: 208376 - RNA, 19 nt, Artificial Sequence
  Description of Artificial Sequence: Synthetic oligonucleotide
  Sense strand starting at position 3377 of SEQ ID NO: 2684
uauugagguccugguuaua

SEQ ID NO: 208377 - RNA, 19 nt, Artificial Sequence
  Description of Artificial Sequence: Synthetic oligonucleotide
  Antisense strand to SEQ ID NO: 208376
uauaaccaggaccucaaua

SEQ ID NO: 208378 - RNA, 19 nt, Artificial Sequence
  Description of Artificial Sequence: Synthetic oligonucleotide
  Sense strand starting at position 3380 of SEQ ID NO: 2684
ugagguccugguuauaucu

SEQ ID NO: 208379 - RNA, 19 nt, Artificial Sequence
  Description of Artificial Sequence: Synthetic oligonucleotide
  Antisense strand to SEQ ID NO: 208378
agauauaaccaggaccuca

SEQ ID NO: 208380 - RNA, 19 nt, Artificial Sequence
  Description of Artificial Sequence: Synthetic oligonucleotide
  Sense strand starting at position 3389 of SEQ ID NO: 2684
gguuauaucuuaccaucca

SEQ ID NO: 208381 - RNA, 19 nt, Artificial Sequence
  Description of Artificial Sequence: Synthetic oligonucleotide
  Antisense strand to SEQ ID NO: 208380
uggaugguaagauauaacc

SEQ ID NO: 208382 - RNA, 19 nt, Artificial Sequence
  Description of Artificial Sequence: Synthetic oligonucleotide
  Sense strand starting at position 3731 of SEQ ID NO: 2684
agucaucaauacccaagua

SEQ ID NO: 208383 - RNA, 19 nt, Artificial Sequence
  Description of Artificial Sequence: Synthetic oligonucleotide
  Antisense strand to SEQ ID NO: 208382
uacuuggguauugaugacu

SEQ ID NO: 208384 - RNA, 19 nt, Artificial Sequence
  Description of Artificial Sequence: Synthetic oligonucleotide
  Sense strand starting at position 3865 of SEQ ID NO: 2684
ucacgcuuccuccacagaa

SEQ ID NO: 208385 - RNA, 19 nt, Artificial Sequence
  Description of Artificial Sequence: Synthetic oligonucleotide
  Antisense strand to SEQ ID NO: 208384
uucuguggaggaagcguga

SEQ ID NO: 208386 - RNA, 19 nt, Artificial Sequence
  Description of Artificial Sequence: Synthetic oligonucleotide
  Sense strand starting at position 3867 of SEQ ID NO: 2684
acgcuuccuccacagaaau

SEQ ID NO: 208387 - RNA, 19 nt, Artificial Sequence
  Description of Artificial Sequence: Synthetic oligonucleotide
  Antisense strand to SEQ ID NO: 208386
auuucuguggaggaagcgu

SEQ ID NO: 208388 - RNA, 19 nt, Artificial Sequence
  Description of Artificial Sequence: Synthetic oligonucleotide
  Sense strand starting at position 37 of SEQ ID NO: 2683
ugcuuagugcucgcugaau

SEQ ID NO: 208389 - RNA, 19 nt, Artificial Sequence
  Description of Artificial Sequence: Synthetic oligonucleotide
  Antisense strand to SEQ ID NO: 208388
auucagcgagcacuaagca

SEQ ID NO: 208390 - RNA, 19 nt, Artificial Sequence
  Description of Artificial Sequence: Synthetic oligonucleotide
  Sense strand starting at position 89 of SEQ ID NO: 2683
agugaaauucugcauaaua

SEQ ID NO: 208391 - RNA, 19 nt, Artificial Sequence
  Description of Artificial Sequence: Synthetic oligonucleotide
  Antisense strand to SEQ ID NO: 208390
uauuaugcagaauuucacu

SEQ ID NO: 208392 - RNA, 19 nt, Artificial Sequence
  Description of Artificial Sequence: Synthetic oligonucleotide
  Sense strand starting at position 139 of SEQ ID NO: 2683
uuaggagaggucugaguuc

SEQ ID NO: 208393 - RNA, 19 nt, Artificial Sequence
  Description of Artificial Sequence: Synthetic oligonucleotide
  Antisense strand to SEQ ID NO: 208392
gaacucagaccucuccuaa

SEQ ID NO: 208394 - RNA, 19 nt, Artificial Sequence
  Description of Artificial Sequence: Synthetic oligonucleotide
  Sense strand starting at position 164 of SEQ ID NO: 2683
gauaucaauuccucguuga

SEQ ID NO: 208395 - RNA, 19 nt, Artificial Sequence
  Description of Artificial Sequence: Synthetic oligonucleotide
  Antisense strand to SEQ ID NO: 208394
ucaacgaggaauugauauc

SEQ ID NO: 208396 - RNA, 19 nt, Artificial Sequence
  Description of Artificial Sequence: Synthetic oligonucleotide
  Sense strand starting at position 165 of SEQ ID NO: 2683
auaucaauuccucguugau

SEQ ID NO: 208397 - RNA, 19 nt, Artificial Sequence
  Description of Artificial Sequence: Synthetic oligonucleotide
  Antisense strand to SEQ ID NO: 208396
aucaacgaggaauugauau

SEQ ID NO: 208398 - RNA, 19 nt, Artificial Sequence
  Description of Artificial Sequence: Synthetic oligonucleotide
  Sense strand starting at position 167 of SEQ ID NO: 2683
aucaauuccucguugauau

SEQ ID NO: 208399 - RNA, 19 nt, Artificial Sequence
  Description of Artificial Sequence: Synthetic oligonucleotide
  Antisense strand to SEQ ID NO: 208398
auaucaacgaggaauugau

SEQ ID NO: 208400 - RNA, 19 nt, Artificial Sequence
  Description of Artificial Sequence: Synthetic oligonucleotide
  Sense strand starting at position 169 of SEQ ID NO: 2683
caauuccucguugauaugu

SEQ ID NO: 208401 - RNA, 19 nt, Artificial Sequence
  Description of Artificial Sequence: Synthetic oligonucleotide
  Antisense strand to SEQ ID NO: 208400
acauaucaacgaggaauug

SEQ ID NO: 208402 - RNA, 19 nt, Artificial Sequence
  Description of Artificial Sequence: Synthetic oligonucleotide
  Sense strand starting at position 177 of SEQ ID NO: 2683
cguugauauguuuaaauug

SEQ ID NO: 208403 - RNA, 19 nt, Artificial Sequence
  Description of Artificial Sequence: Synthetic oligonucleotide
  Antisense strand to SEQ ID NO: 208402
caauuuaaacauaucaacg

SEQ ID NO: 208404 - RNA, 19 nt, Artificial Sequence
  Description of Artificial Sequence: Synthetic oligonucleotide
  Sense strand starting at position 223 of SEQ ID NO: 2683
cugccaucauagguuagaa

SEQ ID NO: 208405 - RNA, 19 nt, Artificial Sequence
  Description of Artificial Sequence: Synthetic oligonucleotide
  Antisense strand to SEQ ID NO: 208404
uucuaaccuaugauggcag

SEQ ID NO: 208406 - RNA, 19 nt, Artificial Sequence
  Description of Artificial Sequence: Synthetic oligonucleotide
  Sense strand starting at position 278 of SEQ ID NO: 2683
agaacuucucaaggucacu

SEQ ID NO: 208407 - RNA, 19 nt, Artificial Sequence
  Description of Artificial Sequence: Synthetic oligonucleotide
  Antisense strand to SEQ ID NO: 208406
agugaccuugagaaguucu

SEQ ID NO: 208408 - RNA, 19 nt, Artificial Sequence
  Description of Artificial Sequence: Synthetic oligonucleotide
  Sense strand starting at position 411 of SEQ ID NO: 2683
caaggugacucauugcaug

SEQ ID NO: 208409 - RNA, 19 nt, Artificial Sequence
  Description of Artificial Sequence: Synthetic oligonucleotide
  Antisense strand to SEQ ID NO: 208408
caugcaaugagucaccuug

SEQ ID NO: 208410 - RNA, 19 nt, Artificial Sequence
  Description of Artificial Sequence: Synthetic oligonucleotide
  Sense strand starting at position 516 of SEQ ID NO: 2683
gugaaaggcaccuaagcau

SEQ ID NO: 208411 - RNA, 19 nt, Artificial Sequence
  Description of Artificial Sequence: Synthetic oligonucleotide
  Antisense strand to SEQ ID NO: 208410
augcuuaggugccuuucac

SEQ ID NO: 208412 - RNA, 19 nt, Artificial Sequence
  Description of Artificial Sequence: Synthetic oligonucleotide
  Sense strand starting at position 653 of SEQ ID NO: 2683
gagugcuggccuucguuaa

SEQ ID NO: 208413 - RNA, 19 nt, Artificial Sequence
  Description of Artificial Sequence: Synthetic oligonucleotide
  Antisense strand to SEQ ID NO: 208412
uuaacgaaggccagcacuc

SEQ ID NO: 208414 - RNA, 19 nt, Artificial Sequence
  Description of Artificial Sequence: Synthetic oligonucleotide
  Sense strand starting at position 738 of SEQ ID NO: 2683
agaguaaacuuucugcuca

SEQ ID NO: 208415 - RNA, 19 nt, Artificial Sequence
  Description of Artificial Sequence: Synthetic oligonucleotide
  Antisense strand to SEQ ID NO: 208414
ugagcagaaaguuuacucu

SEQ ID NO: 208416 - RNA, 19 nt, Artificial Sequence
  Description of Artificial Sequence: Synthetic oligonucleotide
  Sense strand starting at position 894 of SEQ ID NO: 2683
uuacucuaggucgaguuau

SEQ ID NO: 208417 - RNA, 19 nt, Artificial Sequence
  Description of Artificial Sequence: Synthetic oligonucleotide
  Antisense strand to SEQ ID NO: 208416
auaacucgaccuagaguaa

SEQ ID NO: 208418 - RNA, 19 nt, Artificial Sequence
  Description of Artificial Sequence: Synthetic oligonucleotide
  Sense strand starting at position 1243 of SEQ ID NO: 2683
ucucauaccugucugagga

SEQ ID NO: 208419 - RNA, 19 nt, Artificial Sequence
  Description of Artificial Sequence: Synthetic oligonucleotide
  Antisense strand to SEQ ID NO: 208418
uccucagacagguaugaga

SEQ ID NO: 208420 - RNA, 19 nt, Artificial Sequence
  Description of Artificial Sequence: Synthetic oligonucleotide
  Sense strand starting at position 1244 of SEQ ID NO: 2683
cucauaccugucugaggau

SEQ ID NO: 208421 - RNA, 19 nt, Artificial Sequence
  Description of Artificial Sequence: Synthetic oligonucleotide
  Antisense strand to SEQ ID NO: 208420
auccucagacagguaugag

SEQ ID NO: 208422 - RNA, 19 nt, Artificial Sequence
  Description of Artificial Sequence: Synthetic oligonucleotide
  Sense strand starting at position 2306 of SEQ ID NO: 2683
gguggcacgguucaugaau

SEQ ID NO: 208423 - RNA, 19 nt, Artificial Sequence
  Description of Artificial Sequence: Synthetic oligonucleotide
  Antisense strand to SEQ ID NO: 208422
auucaugaaccgugccacc

SEQ ID NO: 208424 - RNA, 19 nt, Artificial Sequence
  Description of Artificial Sequence: Synthetic oligonucleotide
  Sense strand starting at position 2395 of SEQ ID NO: 2683
guuugcugcacuggaauuu

SEQ ID NO: 208425 - RNA, 19 nt, Artificial Sequence
  Description of Artificial Sequence: Synthetic oligonucleotide
  Antisense strand to SEQ ID NO: 208424
aaauuccagugcagcaaac

SEQ ID NO: 208426 - RNA, 19 nt, Artificial Sequence
  Description of Artificial Sequence: Synthetic oligonucleotide
  Sense strand starting at position 2663 of SEQ ID NO: 2683
gaagcaagaguuggucacu

SEQ ID NO: 208427 - RNA, 19 nt, Artificial Sequence
  Description of Artificial Sequence: Synthetic oligonucleotide
  Antisense strand to SEQ ID NO: 208426
agugaccaacucuugcuuc

SEQ ID NO: 208428 - RNA, 19 nt, Artificial Sequence
  Description of Artificial Sequence: Synthetic oligonucleotide
  Sense strand starting at position 2666 of SEQ ID NO: 2683
gcaagaguuggucacugug

SEQ ID NO: 208429 - RNA, 19 nt, Artificial Sequence
  Description of Artificial Sequence: Synthetic oligonucleotide
  Antisense strand to SEQ ID NO: 208428
cacagugaccaacucuugc

SEQ ID NO: 208430 - RNA, 19 nt, Artificial Sequence
  Description of Artificial Sequence: Synthetic oligonucleotide
  Sense strand starting at position 2686 of SEQ ID NO: 2683
cucccauuucuaugcgaau

SEQ ID NO: 208431 - RNA, 19 nt, Artificial Sequence
  Description of Artificial Sequence: Synthetic oligonucleotide
  Antisense strand to SEQ ID NO: 208430
auucgcauagaaaugggag

SEQ ID NO: 208432 - RNA, 19 nt, Artificial Sequence
  Description of Artificial Sequence: Synthetic oligonucleotide
  Sense strand starting at position 2687 of SEQ ID NO: 2683
ucccauuucuaugcgaaug

SEQ ID NO: 208433 - RNA, 19 nt, Artificial Sequence
  Description of Artificial Sequence: Synthetic oligonucleotide
  Antisense strand to SEQ ID NO: 208432
cauucgcauagaaauggga

SEQ ID NO: 208434 - RNA, 19 nt, Artificial Sequence
  Description of Artificial Sequence: Synthetic oligonucleotide
  Sense strand starting at position 2692 of SEQ ID NO: 2683
uuucuaugcgaauggauau

SEQ ID NO: 208435 - RNA, 19 nt, Artificial Sequence
  Description of Artificial Sequence: Synthetic oligonucleotide
  Antisense strand to SEQ ID NO: 208434
auauccauucgcauagaaa

SEQ ID NO: 208436 - RNA, 19 nt, Artificial Sequence
  Description of Artificial Sequence: Synthetic oligonucleotide
  Sense strand starting at position 2693 of SEQ ID NO: 2683
uucuaugcgaauggauauu

SEQ ID NO: 208437 - RNA, 19 nt, Artificial Sequence
  Description of Artificial Sequence: Synthetic oligonucleotide
  Antisense strand to SEQ ID NO: 208436
aauauccauucgcauagaa

SEQ ID NO: 208438 - RNA, 19 nt, Artificial Sequence
  Description of Artificial Sequence: Synthetic oligonucleotide
  Sense strand starting at position 2761 of SEQ ID NO: 2683
gguuuccuccuguaaauac

SEQ ID NO: 208439 - RNA, 19 nt, Artificial Sequence
  Description of Artificial Sequence: Synthetic oligonucleotide
  Antisense strand to SEQ ID NO: 208438
guauuuacaggaggaaacc

SEQ ID NO: 208440 - RNA, 19 nt, Artificial Sequence
  Description of Artificial Sequence: Synthetic oligonucleotide
  Sense strand starting at position 2786 of SEQ ID NO: 2683
gagauuaauuugugaucaa

SEQ ID NO: 208441 - RNA, 19 nt, Artificial Sequence
  Description of Artificial Sequence: Synthetic oligonucleotide
  Antisense strand to SEQ ID NO: 208440
uugaucacaaauuaaucuc

SEQ ID NO: 208442 - RNA, 19 nt, Artificial Sequence
  Description of Artificial Sequence: Synthetic oligonucleotide
  Sense strand starting at position 2830 of SEQ ID NO: 2683
gaagaauaagugcgaggua

SEQ ID NO: 208443 - RNA, 19 nt, Artificial Sequence
  Description of Artificial Sequence: Synthetic oligonucleotide
  Antisense strand to SEQ ID NO: 208442
uaccucgcacuuauucuuc

SEQ ID NO: 208444 - RNA, 19 nt, Artificial Sequence
  Description of Artificial Sequence: Synthetic oligonucleotide
  Sense strand starting at position 2898 of SEQ ID NO: 2683
uaaagagacuccguuuaaa

SEQ ID NO: 208445 - RNA, 19 nt, Artificial Sequence
  Description of Artificial Sequence: Synthetic oligonucleotide
  Antisense strand to SEQ ID NO: 208444
uuuaaacggagucucuuua

SEQ ID NO: 208446 - RNA, 19 nt, Artificial Sequence
  Description of Artificial Sequence: Synthetic oligonucleotide
  Sense strand starting at position 2901 of SEQ ID NO: 2683
agagacuccguuuaaauua

SEQ ID NO: 208447 - RNA, 19 nt, Artificial Sequence
  Description of Artificial Sequence: Synthetic oligonucleotide
  Antisense strand to SEQ ID NO: 208446
uaauuuaaacggagucucu

SEQ ID NO: 208448 - RNA, 19 nt, Artificial Sequence
  Description of Artificial Sequence: Synthetic oligonucleotide
  Sense strand starting at position 2963 of SEQ ID NO: 2683
aggacuuuauguuuaugga

SEQ ID NO: 208449 - RNA, 19 nt, Artificial Sequence
  Description of Artificial Sequence: Synthetic oligonucleotide
  Antisense strand to SEQ ID NO: 208448
uccauaaacauaaaguccu

SEQ ID NO: 208450 - RNA, 19 nt, Artificial Sequence
  Description of Artificial Sequence: Synthetic oligonucleotide
  Sense strand starting at position 3019 of SEQ ID NO: 2683
uauugagguccugguuaua

SEQ ID NO: 208451 - RNA, 19 nt, Artificial Sequence
  Description of Artificial Sequence: Synthetic oligonucleotide
  Antisense strand to SEQ ID NO: 208450
uauaaccaggaccucaaua

SEQ ID NO: 208452 - RNA, 19 nt, Artificial Sequence
  Description of Artificial Sequence: Synthetic oligonucleotide
  Sense strand starting at position 3022 of SEQ ID NO: 2683
ugagguccugguuauaucu

SEQ ID NO: 208453 - RNA, 19 nt, Artificial Sequence
  Description of Artificial Sequence: Synthetic oligonucleotide
  Antisense strand to SEQ ID NO: 208452
agauauaaccaggaccuca

SEQ ID NO: 208454 - RNA, 19 nt, Artificial Sequence
  Description of Artificial Sequence: Synthetic oligonucleotide
  Sense strand starting at position 3031 of SEQ ID NO: 2683
gguuauaucuuaccaucca

SEQ ID NO: 208455 - RNA, 19 nt, Artificial Sequence
  Description of Artificial Sequence: Synthetic oligonucleotide
  Antisense strand to SEQ ID NO: 208454
uggaugguaagauauaacc

SEQ ID NO: 208456 - RNA, 19 nt, Artificial Sequence
  Description of Artificial Sequence: Synthetic oligonucleotide
  Sense strand starting at position 3373 of SEQ ID NO: 2683
agucaucaauacccaagua

SEQ ID NO: 208457 - RNA, 19 nt, Artificial Sequence
  Description of Artificial Sequence: Synthetic oligonucleotide
  Antisense strand to SEQ ID NO: 208456
uacuuggguauugaugacu

SEQ ID NO: 208458 - RNA, 19 nt, Artificial Sequence
  Description of Artificial Sequence: Synthetic oligonucleotide
  Sense strand starting at position 3507 of SEQ ID NO: 2683
ucacgcuuccuccacagaa

SEQ ID NO: 208459 - RNA, 19 nt, Artificial Sequence
  Description of Artificial Sequence: Synthetic oligonucleotide
  Antisense strand to SEQ ID NO: 208458
uucuguggaggaagcguga

SEQ ID NO: 208460 - RNA, 19 nt, Artificial Sequence
  Description of Artificial Sequence: Synthetic oligonucleotide
  Sense strand starting at position 3509 of SEQ ID NO: 2683
acgcuuccuccacagaaau

SEQ ID NO: 208461 - RNA, 19 nt, Artificial Sequence
  Description of Artificial Sequence: Synthetic oligonucleotide
  Antisense strand to SEQ ID NO: 208460
auuucuguggaggaagcgu

SEQ ID NO: 208462 - RNA, 19 nt, Artificial Sequence
  Description of Artificial Sequence: Synthetic oligonucleotide
  Sense strand starting at position 3737 of SEQ ID NO: 2683
gaggucuaaccaugcagga

SEQ ID NO: 208463 - RNA, 19 nt, Artificial Sequence
  Description of Artificial Sequence: Synthetic oligonucleotide
  Antisense strand to SEQ ID NO: 208462
uccugcaugguuagaccuc

SEQ ID NO: 208464 - RNA, 19 nt, Artificial Sequence
  Description of Artificial Sequence: Synthetic oligonucleotide
  Sense strand starting at position 3832 of SEQ ID NO: 2683
uuaaauuacuaugugagca

SEQ ID NO: 208465 - RNA, 19 nt, Artificial Sequence
  Description of Artificial Sequence: Synthetic oligonucleotide
  Antisense strand to SEQ ID NO: 208464
ugcucacauaguaauuuaa

SEQ ID NO: 208466 - RNA, 19 nt, Artificial Sequence
  Description of Artificial Sequence: Synthetic oligonucleotide
  Sense strand starting at position 3840 of SEQ ID NO: 2683
cuaugugagcacuggacuu

SEQ ID NO: 208467 - RNA, 19 nt, Artificial Sequence
  Description of Artificial Sequence: Synthetic oligonucleotide
  Antisense strand to SEQ ID NO: 208466
aaguccagugcucacauag

SEQ ID NO: 208468 - RNA, 19 nt, Artificial Sequence
  Description of Artificial Sequence: Synthetic oligonucleotide
  Sense strand starting at position 68 of SEQ ID NO: 2686
uagauaagcguuuaauagc

SEQ ID NO: 208469 - RNA, 19 nt, Artificial Sequence
  Description of Artificial Sequence: Synthetic oligonucleotide
  Antisense strand to SEQ ID NO: 208468
gcuauuaaacgcuuaucua

SEQ ID NO: 208470 - RNA, 19 nt, Artificial Sequence
  Description of Artificial Sequence: Synthetic oligonucleotide
  Sense strand starting at position 75 of SEQ ID NO: 2686
gcguuuaauagcuacauag

SEQ ID NO: 208471 - RNA, 19 nt, Artificial Sequence
  Description of Artificial Sequence: Synthetic oligonucleotide
  Antisense strand to SEQ ID NO: 208470
cuauguagcuauuaaacgc

SEQ ID NO: 208472 - RNA, 19 nt, Artificial Sequence
  Description of Artificial Sequence: Synthetic oligonucleotide
  Sense strand starting at position 77 of SEQ ID NO: 2686
guuuaauagcuacauagaa

SEQ ID NO: 208473 - RNA, 19 nt, Artificial Sequence
  Description of Artificial Sequence: Synthetic oligonucleotide
  Antisense strand to SEQ ID NO: 208472
uucuauguagcuauuaaac

SEQ ID NO: 208474 - RNA, 19 nt, Artificial Sequence
  Description of Artificial Sequence: Synthetic oligonucleotide
  Sense strand starting at position 100 of SEQ ID NO: 2686
aaaguuuaugugggaggga

SEQ ID NO: 208475 - RNA, 19 nt, Artificial Sequence
  Description of Artificial Sequence: Synthetic oligonucleotide
  Antisense strand to SEQ ID NO: 208474
ucccucccacauaaacuuu

SEQ ID NO: 208476 - RNA, 19 nt, Artificial Sequence
  Description of Artificial Sequence: Synthetic oligonucleotide
  Sense strand starting at position 103 of SEQ ID NO: 2686
guuuaugugggagggauca

SEQ ID NO: 208477 - RNA, 19 nt, Artificial Sequence
  Description of Artificial Sequence: Synthetic oligonucleotide
  Antisense strand to SEQ ID NO: 208476
ugaucccucccacauaaac

SEQ ID NO: 208478 - RNA, 19 nt, Artificial Sequence
  Description of Artificial Sequence: Synthetic oligonucleotide
  Sense strand starting at position 135 of SEQ ID NO: 2686
gcauucagcugggugauga

SEQ ID NO: 208479 - RNA, 19 nt, Artificial Sequence
  Description of Artificial Sequence: Synthetic oligonucleotide
  Antisense strand to SEQ ID NO: 208478
ucaucacccagcugaaugc

SEQ ID NO: 208480 - RNA, 19 nt, Artificial Sequence
  Description of Artificial Sequence: Synthetic oligonucleotide
  Sense strand starting at position 143 of SEQ ID NO: 2686
cugggugaugaacaguuua

SEQ ID NO: 208481 - RNA, 19 nt, Artificial Sequence
  Description of Artificial Sequence: Synthetic oligonucleotide
  Antisense strand to SEQ ID NO: 208480
uaaacuguucaucacccag

SEQ ID NO: 208482 - RNA, 19 nt, Artificial Sequence
  Description of Artificial Sequence: Synthetic oligonucleotide
  Sense strand starting at position 199 of SEQ ID NO: 2686
gauaguuuggcagaacccu

SEQ ID NO: 208483 - RNA, 19 nt, Artificial Sequence
  Description of Artificial Sequence: Synthetic oligonucleotide
  Antisense strand to SEQ ID NO: 208482
aggguucugccaaacuauc

SEQ ID NO: 208484 - RNA, 19 nt, Artificial Sequence
  Description of Artificial Sequence: Synthetic oligonucleotide
  Sense strand starting at position 237 of SEQ ID NO: 2686
uccauuuauaugugcgagu

SEQ ID NO: 208485 - RNA, 19 nt, Artificial Sequence
  Description of Artificial Sequence: Synthetic oligonucleotide
  Antisense strand to SEQ ID NO: 208484
acucgcacauauaaaugga

SEQ ID NO: 208486 - RNA, 19 nt, Artificial Sequence
  Description of Artificial Sequence: Synthetic oligonucleotide
  Sense strand starting at position 319 of SEQ ID NO: 2686
caauuuagucagugugucu

SEQ ID NO: 208487 - RNA, 19 nt, Artificial Sequence
  Description of Artificial Sequence: Synthetic oligonucleotide
  Antisense strand to SEQ ID NO: 208486
agacacacugacuaaauug

SEQ ID NO: 208488 - RNA, 19 nt, Artificial Sequence
  Description of Artificial Sequence: Synthetic oligonucleotide
  Sense strand starting at position 331 of SEQ ID NO: 2686
ugugucuagaguugacaaa

SEQ ID NO: 208489 - RNA, 19 nt, Artificial Sequence
  Description of Artificial Sequence: Synthetic oligonucleotide
  Antisense strand to SEQ ID NO: 208488
uuugucaacucuagacaca

SEQ ID NO: 208490 - RNA, 19 nt, Artificial Sequence
  Description of Artificial Sequence: Synthetic oligonucleotide
  Sense strand starting at position 407 of SEQ ID NO: 2686
aguguauuuguagguuugu

SEQ ID NO: 208491 - RNA, 19 nt, Artificial Sequence
  Description of Artificial Sequence: Synthetic oligonucleotide
  Antisense strand to SEQ ID NO: 208490
acaaaccuacaaauacacu

SEQ ID NO: 208492 - RNA, 19 nt, Artificial Sequence
  Description of Artificial Sequence: Synthetic oligonucleotide
  Sense strand starting at position 467 of SEQ ID NO: 2686
guccuuuauccggagcuca

SEQ ID NO: 208493 - RNA, 19 nt, Artificial Sequence
  Description of Artificial Sequence: Synthetic oligonucleotide
  Antisense strand to SEQ ID NO: 208492
ugagcuccggauaaaggac

SEQ ID NO: 208494 - RNA, 19 nt, Artificial Sequence
  Description of Artificial Sequence: Synthetic oligonucleotide
  Sense strand starting at position 569 of SEQ ID NO: 2686
gauacuacucuaggccaga

SEQ ID NO: 208495 - RNA, 19 nt, Artificial Sequence
  Description of Artificial Sequence: Synthetic oligonucleotide
  Antisense strand to SEQ ID NO: 208494
ucuggccuagaguaguauc

SEQ ID NO: 208496 - RNA, 19 nt, Artificial Sequence
  Description of Artificial Sequence: Synthetic oligonucleotide
  Sense strand starting at position 570 of SEQ ID NO: 2686
auacuacucuaggccagau

SEQ ID NO: 208497 - RNA, 19 nt, Artificial Sequence
  Description of Artificial Sequence: Synthetic oligonucleotide
  Antisense strand to SEQ ID NO: 208496
aucuggccuagaguaguau

SEQ ID NO: 208498 - RNA, 19 nt, Artificial Sequence
  Description of Artificial Sequence: Synthetic oligonucleotide
  Sense strand starting at position 650 of SEQ ID NO: 2686
agggcaacuuaguuuccaa

SEQ ID NO: 208499 - RNA, 19 nt, Artificial Sequence
  Description of Artificial Sequence: Synthetic oligonucleotide
  Antisense strand to SEQ ID NO: 208498
uuggaaacuaaguugcccu

SEQ ID NO: 208500 - RNA, 19 nt, Artificial Sequence
  Description of Artificial Sequence: Synthetic oligonucleotide
  Sense strand starting at position 771 of SEQ ID NO: 2686
ccaugucaguaggucuaga

SEQ ID NO: 208501 - RNA, 19 nt, Artificial Sequence
  Description of Artificial Sequence: Synthetic oligonucleotide
  Antisense strand to SEQ ID NO: 208500
ucuagaccuacugacaugg

SEQ ID NO: 208502 - RNA, 19 nt, Artificial Sequence
  Description of Artificial Sequence: Synthetic oligonucleotide
  Sense strand starting at position 789 of SEQ ID NO: 2686
aagauaaugucacugguuu

SEQ ID NO: 208503 - RNA, 19 nt, Artificial Sequence
  Description of Artificial Sequence: Synthetic oligonucleotide
  Antisense strand to SEQ ID NO: 208502
aaaccagugacauuaucuu

SEQ ID NO: 208504 - RNA, 19 nt, Artificial Sequence
  Description of Artificial Sequence: Synthetic oligonucleotide
  Sense strand starting at position 830 of SEQ ID NO: 2686
gucacagagaaguauguga

SEQ ID NO: 208505 - RNA, 19 nt, Artificial Sequence
  Description of Artificial Sequence: Synthetic oligonucleotide
  Antisense strand to SEQ ID NO: 208504
ucacauacuucucugugac

SEQ ID NO: 208506 - RNA, 19 nt, Artificial Sequence
  Description of Artificial Sequence: Synthetic oligonucleotide
  Sense strand starting at position 837 of SEQ ID NO: 2686
agaaguaugugacccuagu

SEQ ID NO: 208507 - RNA, 19 nt, Artificial Sequence
  Description of Artificial Sequence: Synthetic oligonucleotide
  Antisense strand to SEQ ID NO: 208506
acuagggucacauacuucu

SEQ ID NO: 208508 - RNA, 19 nt, Artificial Sequence
  Description of Artificial Sequence: Synthetic oligonucleotide
  Sense strand starting at position 1051 of SEQ ID NO: 2686
ggacaaggcuguucccuua

SEQ ID NO: 208509 - RNA, 19 nt, Artificial Sequence
  Description of Artificial Sequence: Synthetic oligonucleotide
  Antisense strand to SEQ ID NO: 208508
uaagggaacagccuugucc

SEQ ID NO: 208510 - RNA, 19 nt, Artificial Sequence
  Description of Artificial Sequence: Synthetic oligonucleotide
  Sense strand starting at position 1224 of SEQ ID NO: 2686
aguuacuagugaucuuagu

SEQ ID NO: 208511 - RNA, 19 nt, Artificial Sequence
  Description of Artificial Sequence: Synthetic oligonucleotide
  Antisense strand to SEQ ID NO: 208510
acuaagaucacuaguaacu

SEQ ID NO: 208512 - RNA, 19 nt, Artificial Sequence
  Description of Artificial Sequence: Synthetic oligonucleotide
  Sense strand starting at position 1230 of SEQ ID NO: 2686
uagugaucuuaguccuuga

SEQ ID NO: 208513 - RNA, 19 nt, Artificial Sequence
  Description of Artificial Sequence: Synthetic oligonucleotide
  Antisense strand to SEQ ID NO: 208512
ucaaggacuaagaucacua

SEQ ID NO: 208514 - RNA, 19 nt, Artificial Sequence
  Description of Artificial Sequence: Synthetic oligonucleotide
  Sense strand starting at position 1233 of SEQ ID NO: 2686
ugaucuuaguccuugacuu

SEQ ID NO: 208515 - RNA, 19 nt, Artificial Sequence
  Description of Artificial Sequence: Synthetic oligonucleotide
  Antisense strand to SEQ ID NO: 208514
aagucaaggacuaagauca

SEQ ID NO: 208516 - RNA, 19 nt, Artificial Sequence
  Description of Artificial Sequence: Synthetic oligonucleotide
  Sense strand starting at position 1235 of SEQ ID NO: 2686
aucuuaguccuugacuuua

SEQ ID NO: 208517 - RNA, 19 nt, Artificial Sequence
  Description of Artificial Sequence: Synthetic oligonucleotide
  Antisense strand to SEQ ID NO: 208516
uaaagucaaggacuaagau

SEQ ID NO: 208518 - RNA, 19 nt, Artificial Sequence
  Description of Artificial Sequence: Synthetic oligonucleotide
  Sense strand starting at position 1724 of SEQ ID NO: 2686
ggauaaggucugcagccua

SEQ ID NO: 208519 - RNA, 19 nt, Artificial Sequence
  Description of Artificial Sequence: Synthetic oligonucleotide
  Antisense strand to SEQ ID NO: 208518
uaggcugcagaccuuaucc

SEQ ID NO: 208520 - RNA, 19 nt, Artificial Sequence
  Description of Artificial Sequence: Synthetic oligonucleotide
  Sense strand starting at position 2108 of SEQ ID NO: 2686
guggucuccgcacugcaaa

SEQ ID NO: 208521 - RNA, 19 nt, Artificial Sequence
  Description of Artificial Sequence: Synthetic oligonucleotide
  Antisense strand to SEQ ID NO: 208520
uuugcagugcggagaccac

SEQ ID NO: 208522 - RNA, 19 nt, Artificial Sequence
  Description of Artificial Sequence: Synthetic oligonucleotide
  Sense strand starting at position 2539 of SEQ ID NO: 2686
gaacgagcccugugaacaa

SEQ ID NO: 208523 - RNA, 19 nt, Artificial Sequence
  Description of Artificial Sequence: Synthetic oligonucleotide
  Antisense strand to SEQ ID NO: 208522
uuguucacagggcucguuc

SEQ ID NO: 208524 - RNA, 19 nt, Artificial Sequence
  Description of Artificial Sequence: Synthetic oligonucleotide
  Sense strand starting at position 2634 of SEQ ID NO: 2686
ucacuuugucuagggcaau

SEQ ID NO: 208525 - RNA, 19 nt, Artificial Sequence
  Description of Artificial Sequence: Synthetic oligonucleotide
  Antisense strand to SEQ ID NO: 208524
auugcccuagacaaaguga

SEQ ID NO: 208526 - RNA, 19 nt, Artificial Sequence
  Description of Artificial Sequence: Synthetic oligonucleotide
  Sense strand starting at position 2700 of SEQ ID NO: 2686
uggcucuccuuucugagaa

SEQ ID NO: 208527 - RNA, 19 nt, Artificial Sequence
  Description of Artificial Sequence: Synthetic oligonucleotide
  Antisense strand to SEQ ID NO: 208526
uucucagaaaggagagcca

SEQ ID NO: 208528 - RNA, 19 nt, Artificial Sequence
  Description of Artificial Sequence: Synthetic oligonucleotide
  Sense strand starting at position 2713 of SEQ ID NO: 2686
ugagaagacuugcucuaug

SEQ ID NO: 208529 - RNA, 19 nt, Artificial Sequence
  Description of Artificial Sequence: Synthetic oligonucleotide
  Antisense strand to SEQ ID NO: 208528
cauagagcaagucuucuca

SEQ ID NO: 208530 - RNA, 19 nt, Artificial Sequence
  Description of Artificial Sequence: Synthetic oligonucleotide
  Sense strand starting at position 2734 of SEQ ID NO: 2686
uuccuuguaucccuaguua

SEQ ID NO: 208531 - RNA, 19 nt, Artificial Sequence
  Description of Artificial Sequence: Synthetic oligonucleotide
  Antisense strand to SEQ ID NO: 208530
uaacuagggauacaaggaa

SEQ ID NO: 208532 - RNA, 19 nt, Artificial Sequence
  Description of Artificial Sequence: Synthetic oligonucleotide
  Sense strand starting at position 2952 of SEQ ID NO: 2686
ucucaaucauugcuaggau

SEQ ID NO: 208533 - RNA, 19 nt, Artificial Sequence
  Description of Artificial Sequence: Synthetic oligonucleotide
  Antisense strand to SEQ ID NO: 208532
auccuagcaaugauugaga

SEQ ID NO: 208534 - RNA, 19 nt, Artificial Sequence
  Description of Artificial Sequence: Synthetic oligonucleotide
  Sense strand starting at position 3453 of SEQ ID NO: 2686
gucucuuuacacggacaca

SEQ ID NO: 208535 - RNA, 19 nt, Artificial Sequence
  Description of Artificial Sequence: Synthetic oligonucleotide
  Antisense strand to SEQ ID NO: 208534
uguguccguguaaagagac

SEQ ID NO: 208536 - RNA, 19 nt, Artificial Sequence
  Description of Artificial Sequence: Synthetic oligonucleotide
  Sense strand starting at position 3474 of SEQ ID NO: 2686
ugagacaaauaauagagua

SEQ ID NO: 208537 - RNA, 19 nt, Artificial Sequence
  Description of Artificial Sequence: Synthetic oligonucleotide
  Antisense strand to SEQ ID NO: 208536
uacucuauuauuugucuca

SEQ ID NO: 208538 - RNA, 19 nt, Artificial Sequence
  Description of Artificial Sequence: Synthetic oligonucleotide
  Sense strand starting at position 3556 of SEQ ID NO: 2686
gcaacuuugucuuucugau

SEQ ID NO: 208539 - RNA, 19 nt, Artificial Sequence
  Description of Artificial Sequence: Synthetic oligonucleotide
  Antisense strand to SEQ ID NO: 208538
aucagaaagacaaaguugc

SEQ ID NO: 208540 - RNA, 19 nt, Artificial Sequence
  Description of Artificial Sequence: Synthetic oligonucleotide
  Sense strand starting at position 3562 of SEQ ID NO: 2686
uugucuuucugaucuaaag

SEQ ID NO: 208541 - RNA, 19 nt, Artificial Sequence
  Description of Artificial Sequence: Synthetic oligonucleotide
  Antisense strand to SEQ ID NO: 208540
cuuuagaucagaaagacaa

SEQ ID NO: 208542 - RNA, 19 nt, Artificial Sequence
  Description of Artificial Sequence: Synthetic oligonucleotide
  Sense strand starting at position 3764 of SEQ ID NO: 2686
agagaaauguggucauaac

SEQ ID NO: 208543 - RNA, 19 nt, Artificial Sequence
  Description of Artificial Sequence: Synthetic oligonucleotide
  Antisense strand to SEQ ID NO: 208542
guuaugaccacauuucucu

SEQ ID NO: 208544 - RNA, 19 nt, Artificial Sequence
  Description of Artificial Sequence: Synthetic oligonucleotide
  Sense strand starting at position 3938 of SEQ ID NO: 2686
gcacuuucgcaucaaccua

SEQ ID NO: 208545 - RNA, 19 nt, Artificial Sequence
  Description of Artificial Sequence: Synthetic oligonucleotide
  Antisense strand to SEQ ID NO: 208544
uagguugaugcgaaagugc

SEQ ID NO: 208546 - RNA, 19 nt, Artificial Sequence
  Description of Artificial Sequence: Synthetic oligonucleotide
  Sense strand starting at position 3979 of SEQ ID NO: 2686
ggagguaccuaacuacuua

SEQ ID NO: 208547 - RNA, 19 nt, Artificial Sequence
  Description of Artificial Sequence: Synthetic oligonucleotide
  Antisense strand to SEQ ID NO: 208546
uaaguaguuagguaccucc

SEQ ID NO: 208548 - RNA, 19 nt, Artificial Sequence
  Description of Artificial Sequence: Synthetic oligonucleotide
  Sense strand starting at position 121 of SEQ ID NO: 2687
accauacuguuaguaaacu

SEQ ID NO: 208549 - RNA, 19 nt, Artificial Sequence
  Description of Artificial Sequence: Synthetic oligonucleotide
  Antisense strand to SEQ ID NO: 208548
aguuuacuaacaguauggu

SEQ ID NO: 208550 - RNA, 19 nt, Artificial Sequence
  Description of Artificial Sequence: Synthetic oligonucleotide
  Sense strand starting at position 168 of SEQ ID NO: 2687
aaauuauggguuugggacu

SEQ ID NO: 208551 - RNA, 19 nt, Artificial Sequence
  Description of Artificial Sequence: Synthetic oligonucleotide
  Antisense strand to SEQ ID NO: 208550
agucccaaacccauaauuu

SEQ ID NO: 208552 - RNA, 19 nt, Artificial Sequence
  Description of Artificial Sequence: Synthetic oligonucleotide
  Sense strand starting at position 212 of SEQ ID NO: 2687
uuuggagaguuucucauua

SEQ ID NO: 208553 - RNA, 19 nt, Artificial Sequence
  Description of Artificial Sequence: Synthetic oligonucleotide
  Antisense strand to SEQ ID NO: 208552
uaaugagaaacucuccaaa

SEQ ID NO: 208554 - RNA, 19 nt, Artificial Sequence
  Description of Artificial Sequence: Synthetic oligonucleotide
  Sense strand starting at position 313 of SEQ ID NO: 2687
acgucauuggguuaguaaa

SEQ ID NO: 208555 - RNA, 19 nt, Artificial Sequence
  Description of Artificial Sequence: Synthetic oligonucleotide
  Antisense strand to SEQ ID NO: 208554
uuuacuaacccaaugacgu

SEQ ID NO: 208556 - RNA, 19 nt, Artificial Sequence
  Description of Artificial Sequence: Synthetic oligonucleotide
  Sense strand starting at position 451 of SEQ ID NO: 2687
agaaaucagccaugauacu

SEQ ID NO: 208557 - RNA, 19 nt, Artificial Sequence
  Description of Artificial Sequence: Synthetic oligonucleotide
  Antisense strand to SEQ ID NO: 208556
aguaucauggcugauuucu

SEQ ID NO: 208558 - RNA, 19 nt, Artificial Sequence
  Description of Artificial Sequence: Synthetic oligonucleotide
  Sense strand starting at position 538 of SEQ ID NO: 2687
aguuguaaauuacugagga

SEQ ID NO: 208559 - RNA, 19 nt, Artificial Sequence
  Description of Artificial Sequence: Synthetic oligonucleotide
  Antisense strand to SEQ ID NO: 208558
uccucaguaauuuacaacu

SEQ ID NO: 208560 - RNA, 19 nt, Artificial Sequence
  Description of Artificial Sequence: Synthetic oligonucleotide
  Sense strand starting at position 554 of SEQ ID NO: 2687
ggaguuacucaggauguuu

SEQ ID NO: 208561 - RNA, 19 nt, Artificial Sequence
  Description of Artificial Sequence: Synthetic oligonucleotide
  Antisense strand to SEQ ID NO: 208560
aaacauccugaguaacucc

SEQ ID NO: 208562 - RNA, 19 nt, Artificial Sequence
  Description of Artificial Sequence: Synthetic oligonucleotide
  Sense strand starting at position 583 of SEQ ID NO: 2687
auuaaugugccagauauaa

SEQ ID NO: 208563 - RNA, 19 nt, Artificial Sequence
  Description of Artificial Sequence: Synthetic oligonucleotide
  Antisense strand to SEQ ID NO: 208562
uuauaucuggcacauuaau

SEQ ID NO: 208564 - RNA, 19 nt, Artificial Sequence
  Description of Artificial Sequence: Synthetic oligonucleotide
  Sense strand starting at position 628 of SEQ ID NO: 2687
gcaggacaucuuggaaagu

SEQ ID NO: 208565 - RNA, 19 nt, Artificial Sequence
  Description of Artificial Sequence: Synthetic oligonucleotide
  Antisense strand to SEQ ID NO: 208564
acuuuccaagauguccugc

SEQ ID NO: 208566 - RNA, 19 nt, Artificial Sequence
  Description of Artificial Sequence: Synthetic oligonucleotide
  Sense strand starting at position 639 of SEQ ID NO: 2687
uggaaaguauaauugcauu

SEQ ID NO: 208567 - RNA, 19 nt, Artificial Sequence
  Description of Artificial Sequence: Synthetic oligonucleotide
  Antisense strand to SEQ ID NO: 208566
aaugcaauuauacuuucca

SEQ ID NO: 208568 - RNA, 19 nt, Artificial Sequence
  Description of Artificial Sequence: Synthetic oligonucleotide
  Sense strand starting at position 911 of SEQ ID NO: 2687
cuaauauacuucuuuggga

SEQ ID NO: 208569 - RNA, 19 nt, Artificial Sequence
  Description of Artificial Sequence: Synthetic oligonucleotide
  Antisense strand to SEQ ID NO: 208568
ucccaaagaaguauauuag

SEQ ID NO: 208570 - RNA, 19 nt, Artificial Sequence
  Description of Artificial Sequence: Synthetic oligonucleotide
  Sense strand starting at position 999 of SEQ ID NO: 2687
accagucaaguugaaguau

SEQ ID NO: 208571 - RNA, 19 nt, Artificial Sequence
  Description of Artificial Sequence: Synthetic oligonucleotide
  Antisense strand to SEQ ID NO: 208570
auacuucaacuugacuggu

SEQ ID NO: 208572 - RNA, 19 nt, Artificial Sequence
  Description of Artificial Sequence: Synthetic oligonucleotide
  Sense strand starting at position 1008 of SEQ ID NO: 2687
guugaaguauucucuuaaa

SEQ ID NO: 208573 - RNA, 19 nt, Artificial Sequence
  Description of Artificial Sequence: Synthetic oligonucleotide
  Antisense strand to SEQ ID NO: 208572
uuuaagagaauacuucaac

SEQ ID NO: 208574 - RNA, 19 nt, Artificial Sequence
  Description of Artificial Sequence: Synthetic oligonucleotide
  Sense strand starting at position 1097 of SEQ ID NO: 2687
ccgacaccaugauccaaau

SEQ ID NO: 208575 - RNA, 19 nt, Artificial Sequence
  Description of Artificial Sequence: Synthetic oligonucleotide
  Antisense strand to SEQ ID NO: 208574
auuuggaucauggugucgg

SEQ ID NO: 208576 - RNA, 19 nt, Artificial Sequence
  Description of Artificial Sequence: Synthetic oligonucleotide
  Sense strand starting at position 1191 of SEQ ID NO: 2687
aguaguuacagauauaugu

SEQ ID NO: 208577 - RNA, 19 nt, Artificial Sequence
  Description of Artificial Sequence: Synthetic oligonucleotide
  Antisense strand to SEQ ID NO: 208576
acauauaucuguaacuacu

SEQ ID NO: 208578 - RNA, 19 nt, Artificial Sequence
  Description of Artificial Sequence: Synthetic oligonucleotide
  Sense strand starting at position 1207 of SEQ ID NO: 2687
uguguaaauaaaggugaaa

SEQ ID NO: 208579 - RNA, 19 nt, Artificial Sequence
  Description of Artificial Sequence: Synthetic oligonucleotide
  Antisense strand to SEQ ID NO: 208578
uuucaccuuuauuuacaca

SEQ ID NO: 208580 - RNA, 19 nt, Artificial Sequence
  Description of Artificial Sequence: Synthetic oligonucleotide
  Sense strand starting at position 1302 of SEQ ID NO: 2687
gugagacuccgagacccau

SEQ ID NO: 208581 - RNA, 19 nt, Artificial Sequence
  Description of Artificial Sequence: Synthetic oligonucleotide
  Antisense strand to SEQ ID NO: 208580
augggucucggagucucac

SEQ ID NO: 208582 - RNA, 19 nt, Artificial Sequence
  Description of Artificial Sequence: Synthetic oligonucleotide
  Sense strand starting at position 1351 of SEQ ID NO: 2687
agcugauaacauggaaagu

SEQ ID NO: 208583 - RNA, 19 nt, Artificial Sequence
  Description of Artificial Sequence: Synthetic oligonucleotide
  Antisense strand to SEQ ID NO: 208582
acuuuccauguuaucagcu

SEQ ID NO: 208584 - RNA, 19 nt, Artificial Sequence
  Description of Artificial Sequence: Synthetic oligonucleotide
  Sense strand starting at position 1453 of SEQ ID NO: 2687
uuguucugugauuaaggua

SEQ ID NO: 208585 - RNA, 19 nt, Artificial Sequence
  Description of Artificial Sequence: Synthetic oligonucleotide
  Antisense strand to SEQ ID NO: 208584
uaccuuaaucacagaacaa

SEQ ID NO: 208586 - RNA, 19 nt, Artificial Sequence
  Description of Artificial Sequence: Synthetic oligonucleotide
  Sense strand starting at position 1615 of SEQ ID NO: 2687
augugaaauaagugagacu

SEQ ID NO: 208587 - RNA, 19 nt, Artificial Sequence
  Description of Artificial Sequence: Synthetic oligonucleotide
  Antisense strand to SEQ ID NO: 208586
agucucacuuauuucacau

SEQ ID NO: 208588 - RNA, 19 nt, Artificial Sequence
  Description of Artificial Sequence: Synthetic oligonucleotide
  Sense strand starting at position 1760 of SEQ ID NO: 2687
aggaaauucuuugugaaau

SEQ ID NO: 208589 - RNA, 19 nt, Artificial Sequence
  Description of Artificial Sequence: Synthetic oligonucleotide
  Antisense strand to SEQ ID NO: 208588
auuucacaaagaauuuccu

SEQ ID NO: 208590 - RNA, 19 nt, Artificial Sequence
  Description of Artificial Sequence: Synthetic oligonucleotide
  Sense strand starting at position 1771 of SEQ ID NO: 2687
ugugaaauauucucaggau

SEQ ID NO: 208591 - RNA, 19 nt, Artificial Sequence
  Description of Artificial Sequence: Synthetic oligonucleotide
  Antisense strand to SEQ ID NO: 208590
auccugagaauauuucaca

SEQ ID NO: 208592 - RNA, 19 nt, Artificial Sequence
  Description of Artificial Sequence: Synthetic oligonucleotide
  Sense strand starting at position 1871 of SEQ ID NO: 2687
cugcaauuaggaugagauu

SEQ ID NO: 208593 - RNA, 19 nt, Artificial Sequence
  Description of Artificial Sequence: Synthetic oligonucleotide
  Antisense strand to SEQ ID NO: 208592
aaucucauccuaauugcag

SEQ ID NO: 208594 - RNA, 19 nt, Artificial Sequence
  Description of Artificial Sequence: Synthetic oligonucleotide
  Sense strand starting at position 1880 of SEQ ID NO: 2687
ggaugagauucaguuagca

SEQ ID NO: 208595 - RNA, 19 nt, Artificial Sequence
  Description of Artificial Sequence: Synthetic oligonucleotide
  Antisense strand to SEQ ID NO: 208594
ugcuaacugaaucucaucc

SEQ ID NO: 208596 - RNA, 19 nt, Artificial Sequence
  Description of Artificial Sequence: Synthetic oligonucleotide
  Sense strand starting at position 1898 of SEQ ID NO: 2687
agagcuugaugguccuaaa

SEQ ID NO: 208597 - RNA, 19 nt, Artificial Sequence
  Description of Artificial Sequence: Synthetic oligonucleotide
  Antisense strand to SEQ ID NO: 208596
uuuaggaccaucaagcucu

SEQ ID NO: 208598 - RNA, 19 nt, Artificial Sequence
  Description of Artificial Sequence: Synthetic oligonucleotide
  Sense strand starting at position 1927 of SEQ ID NO: 2687
acacucucugcuggagaga

SEQ ID NO: 208599 - RNA, 19 nt, Artificial Sequence
  Description of Artificial Sequence: Synthetic oligonucleotide
  Antisense strand to SEQ ID NO: 208598
ucucuccagcagagagugu

SEQ ID NO: 208600 - RNA, 19 nt, Artificial Sequence
  Description of Artificial Sequence: Synthetic oligonucleotide
  Sense strand starting at position 1950 of SEQ ID NO: 2687
gguuguucugaguagauug

SEQ ID NO: 208601 - RNA, 19 nt, Artificial Sequence
  Description of Artificial Sequence: Synthetic oligonucleotide
  Antisense strand to SEQ ID NO: 208600
caaucuacucagaacaacc

SEQ ID NO: 208602 - RNA, 19 nt, Artificial Sequence
  Description of Artificial Sequence: Synthetic oligonucleotide
  Sense strand starting at position 1952 of SEQ ID NO: 2687
uuguucugaguagauugua

SEQ ID NO: 208603 - RNA, 19 nt, Artificial Sequence
  Description of Artificial Sequence: Synthetic oligonucleotide
  Antisense strand to SEQ ID NO: 208602
uacaaucuacucagaacaa

SEQ ID NO: 208604 - RNA, 19 nt, Artificial Sequence
  Description of Artificial Sequence: Synthetic oligonucleotide
  Sense strand starting at position 1978 of SEQ ID NO: 2687
ucagauuguaagugaucag

SEQ ID NO: 208605 - RNA, 19 nt, Artificial Sequence
  Description of Artificial Sequence: Synthetic oligonucleotide
  Antisense strand to SEQ ID NO: 208604
cugaucacuuacaaucuga

SEQ ID NO: 208606 - RNA, 19 nt, Artificial Sequence
  Description of Artificial Sequence: Synthetic oligonucleotide
  Sense strand starting at position 1985 of SEQ ID NO: 2687
guaagugaucagcagcaga

SEQ ID NO: 208607 - RNA, 19 nt, Artificial Sequence
  Description of Artificial Sequence: Synthetic oligonucleotide
  Antisense strand to SEQ ID NO: 208606
ucugcugcugaucacuuac

SEQ ID NO: 208608 - RNA, 19 nt, Artificial Sequence
  Description of Artificial Sequence: Synthetic oligonucleotide
  Sense strand starting at position 2268 of SEQ ID NO: 2687
auaguauucugcucaaaga

SEQ ID NO: 208609 - RNA, 19 nt, Artificial Sequence
  Description of Artificial Sequence: Synthetic oligonucleotide
  Antisense strand to SEQ ID NO: 208608
ucuuugagcagaauacuau

SEQ ID NO: 208610 - RNA, 19 nt, Artificial Sequence
  Description of Artificial Sequence: Synthetic oligonucleotide
  Sense strand starting at position 2341 of SEQ ID NO: 2687
guugaauuauagcuuacaa

SEQ ID NO: 208611 - RNA, 19 nt, Artificial Sequence
  Description of Artificial Sequence: Synthetic oligonucleotide
  Antisense strand to SEQ ID NO: 208610
uuguaagcuauaauucaac

SEQ ID NO: 208612 - RNA, 19 nt, Artificial Sequence
  Description of Artificial Sequence: Synthetic oligonucleotide
  Sense strand starting at position 2990 of SEQ ID NO: 2687
guaaauguucgauaugaag

SEQ ID NO: 208613 - RNA, 19 nt, Artificial Sequence
  Description of Artificial Sequence: Synthetic oligonucleotide
  Antisense strand to SEQ ID NO: 208612
cuucauaucgaacauuuac

SEQ ID NO: 208614 - RNA, 19 nt, Artificial Sequence
  Description of Artificial Sequence: Synthetic oligonucleotide
  Sense strand starting at position 3160 of SEQ ID NO: 2687
cggugaggaucauucaacu

SEQ ID NO: 208615 - RNA, 19 nt, Artificial Sequence
  Description of Artificial Sequence: Synthetic oligonucleotide
  Antisense strand to SEQ ID NO: 208614
aguugaaugauccucaccg

SEQ ID NO: 208616 - RNA, 19 nt, Artificial Sequence
  Description of Artificial Sequence: Synthetic oligonucleotide
  Sense strand starting at position 3193 of SEQ ID NO: 2687
agugcaauuccaggauaaa

SEQ ID NO: 208617 - RNA, 19 nt, Artificial Sequence
  Description of Artificial Sequence: Synthetic oligonucleotide
  Antisense strand to SEQ ID NO: 208616
uuuauccuggaauugcacu

SEQ ID NO: 208618 - RNA, 19 nt, Artificial Sequence
  Description of Artificial Sequence: Synthetic oligonucleotide
  Sense strand starting at position 3315 of SEQ ID NO: 2687
gucugaauuaguggaagaa

SEQ ID NO: 208619 - RNA, 19 nt, Artificial Sequence
  Description of Artificial Sequence: Synthetic oligonucleotide
  Antisense strand to SEQ ID NO: 208618
uucuuccacuaauucagac

SEQ ID NO: 208620 - RNA, 19 nt, Artificial Sequence
  Description of Artificial Sequence: Synthetic oligonucleotide
  Sense strand starting at position 3459 of SEQ ID NO: 2687
cugaguuacacuggugaac

SEQ ID NO: 208621 - RNA, 19 nt, Artificial Sequence
  Description of Artificial Sequence: Synthetic oligonucleotide
  Antisense strand to SEQ ID NO: 208620
guucaccaguguaacucag

SEQ ID NO: 208622 - RNA, 19 nt, Artificial Sequence
  Description of Artificial Sequence: Synthetic oligonucleotide
  Sense strand starting at position 3494 of SEQ ID NO: 2687
uggugugaucuugacaaag

SEQ ID NO: 208623 - RNA, 19 nt, Artificial Sequence
  Description of Artificial Sequence: Synthetic oligonucleotide
  Antisense strand to SEQ ID NO: 208622
cuuugucaagaucacacca

SEQ ID NO: 208624 - RNA, 19 nt, Artificial Sequence
  Description of Artificial Sequence: Synthetic oligonucleotide
  Sense strand starting at position 3576 of SEQ ID NO: 2687
aaguaauaaugggucaugu

SEQ ID NO: 208625 - RNA, 19 nt, Artificial Sequence
  Description of Artificial Sequence: Synthetic oligonucleotide
  Antisense strand to SEQ ID NO: 208624
acaugacccauuauuacuu

SEQ ID NO: 208626 - RNA, 19 nt, Artificial Sequence
  Description of Artificial Sequence: Synthetic oligonucleotide
  Sense strand starting at position 3606 of SEQ ID NO: 2687
ccaugcuaaguguaauaua

SEQ ID NO: 208627 - RNA, 19 nt, Artificial Sequence
  Description of Artificial Sequence: Synthetic oligonucleotide
  Antisense strand to SEQ ID NO: 208626
uauauuacacuuagcaugg

SEQ ID NO: 208628 - RNA, 19 nt, Artificial Sequence
  Description of Artificial Sequence: Synthetic oligonucleotide
  Sense strand starting at position 49 of SEQ ID NO: 2688
gaccacaaaugcguagaua

SEQ ID NO: 208629 - RNA, 19 nt, Artificial Sequence
  Description of Artificial Sequence: Synthetic oligonucleotide
  Antisense strand to SEQ ID NO: 208628
uaucuacgcauuugugguc

SEQ ID NO: 208630 - RNA, 19 nt, Artificial Sequence
  Description of Artificial Sequence: Synthetic oligonucleotide
  Sense strand starting at position 132 of SEQ ID NO: 2688
acuuuacccuucguuuauu

SEQ ID NO: 208631 - RNA, 19 nt, Artificial Sequence
  Description of Artificial Sequence: Synthetic oligonucleotide
  Antisense strand to SEQ ID NO: 208630
aauaaacgaaggguaaagu

SEQ ID NO: 208632 - RNA, 19 nt, Artificial Sequence
  Description of Artificial Sequence: Synthetic oligonucleotide
  Sense strand starting at position 247 of SEQ ID NO: 2688
agaauaacauuugaagcau

SEQ ID NO: 208633 - RNA, 19 nt, Artificial Sequence
  Description of Artificial Sequence: Synthetic oligonucleotide
  Antisense strand to SEQ ID NO: 208632
augcuucaaauguuauucu

SEQ ID NO: 208634 - RNA, 19 nt, Artificial Sequence
  Description of Artificial Sequence: Synthetic oligonucleotide
  Sense strand starting at position 371 of SEQ ID NO: 2688
cuaacuccuguuuaagaug

SEQ ID NO: 208635 - RNA, 19 nt, Artificial Sequence
  Description of Artificial Sequence: Synthetic oligonucleotide
  Antisense strand to SEQ ID NO: 208634
caucuuaaacaggaguuag

SEQ ID NO: 208636 - RNA, 19 nt, Artificial Sequence
  Description of Artificial Sequence: Synthetic oligonucleotide
  Sense strand starting at position 849 of SEQ ID NO: 2688
caagaaacgccuuguagaa

SEQ ID NO: 208637 - RNA, 19 nt, Artificial Sequence
  Description of Artificial Sequence: Synthetic oligonucleotide
  Antisense strand to SEQ ID NO: 208636
uucuacaaggcguuucuug

SEQ ID NO: 208638 - RNA, 19 nt, Artificial Sequence
  Description of Artificial Sequence: Synthetic oligonucleotide
  Sense strand starting at position 1121 of SEQ ID NO: 2688
aggagaucuccgcaguccu

SEQ ID NO: 208639 - RNA, 19 nt, Artificial Sequence
  Description of Artificial Sequence: Synthetic oligonucleotide
  Antisense strand to SEQ ID NO: 208638
aggacugcggagaucuccu

SEQ ID NO: 208640 - RNA, 19 nt, Artificial Sequence
  Description of Artificial Sequence: Synthetic oligonucleotide
  Sense strand starting at position 1731 of SEQ ID NO: 2688
gaaaccacuccuugaaggu

SEQ ID NO: 208641 - RNA, 19 nt, Artificial Sequence
  Description of Artificial Sequence: Synthetic oligonucleotide
  Antisense strand to SEQ ID NO: 208640
accuucaaggagugguuuc

SEQ ID NO: 208642 - RNA, 19 nt, Artificial Sequence
  Description of Artificial Sequence: Synthetic oligonucleotide
  Sense strand starting at position 2053 of SEQ ID NO: 2688
uuauuuggucgaugaggca

SEQ ID NO: 208643 - RNA, 19 nt, Artificial Sequence
  Description of Artificial Sequence: Synthetic oligonucleotide
  Antisense strand to SEQ ID NO: 208642
ugccucaucgaccaaauaa

SEQ ID NO: 208644 - RNA, 19 nt, Artificial Sequence
  Description of Artificial Sequence: Synthetic oligonucleotide
  Sense strand starting at position 2099 of SEQ ID NO: 2688
ugacguaaguggguuucau

SEQ ID NO: 208645 - RNA, 19 nt, Artificial Sequence
  Description of Artificial Sequence: Synthetic oligonucleotide
  Antisense strand to SEQ ID NO: 208644
augaaacccacuuacguca

SEQ ID NO: 208646 - RNA, 19 nt, Artificial Sequence
  Description of Artificial Sequence: Synthetic oligonucleotide
  Sense strand starting at position 2479 of SEQ ID NO: 2688
gaaagauuccgauaaacgc

SEQ ID NO: 208647 - RNA, 19 nt, Artificial Sequence
  Description of Artificial Sequence: Synthetic oligonucleotide
  Antisense strand to SEQ ID NO: 208646
gcguuuaucggaaucuuuc

SEQ ID NO: 208648 - RNA, 19 nt, Artificial Sequence
  Description of Artificial Sequence: Synthetic oligonucleotide
  Sense strand starting at position 2596 of SEQ ID NO: 2688
gggcaaauguagcuguuca

SEQ ID NO: 208649 - RNA, 19 nt, Artificial Sequence
  Description of Artificial Sequence: Synthetic oligonucleotide
  Antisense strand to SEQ ID NO: 208648
ugaacagcuacauuugccc

SEQ ID NO: 208650 - RNA, 19 nt, Artificial Sequence
  Description of Artificial Sequence: Synthetic oligonucleotide
  Sense strand starting at position 2616 of SEQ ID NO: 2688
cugacaggcuaaucucaaa

SEQ ID NO: 208651 - RNA, 19 nt, Artificial Sequence
  Description of Artificial Sequence: Synthetic oligonucleotide
  Antisense strand to SEQ ID NO: 208650
uuugagauuagccugucag

SEQ ID NO: 208652 - RNA, 19 nt, Artificial Sequence
  Description of Artificial Sequence: Synthetic oligonucleotide
  Sense strand starting at position 2663 of SEQ ID NO: 2688
guucuuugccaaggguaau

SEQ ID NO: 208653 - RNA, 19 nt, Artificial Sequence
  Description of Artificial Sequence: Synthetic oligonucleotide
  Antisense strand to SEQ ID NO: 208652
auuacccuuggcaaagaac

SEQ ID NO: 208654 - RNA, 19 nt, Artificial Sequence
  Description of Artificial Sequence: Synthetic oligonucleotide
  Sense strand starting at position 2730 of SEQ ID NO: 2688
ugggauuaguaucucgaaa

SEQ ID NO: 208655 - RNA, 19 nt, Artificial Sequence
  Description of Artificial Sequence: Synthetic oligonucleotide
  Antisense strand to SEQ ID NO: 208654
uuucgagauacuaauccca

SEQ ID NO: 208656 - RNA, 19 nt, Artificial Sequence
  Description of Artificial Sequence: Synthetic oligonucleotide
  Sense strand starting at position 2775 of SEQ ID NO: 2688
ggguucuggauuggacaga

SEQ ID NO: 208657 - RNA, 19 nt, Artificial Sequence
  Description of Artificial Sequence: Synthetic oligonucleotide
  Antisense strand to SEQ ID NO: 208656
ucuguccaauccagaaccc

SEQ ID NO: 208658 - RNA, 19 nt, Artificial Sequence
  Description of Artificial Sequence: Synthetic oligonucleotide
  Sense strand starting at position 2790 of SEQ ID NO: 2688
cagagcugggcaugaguua

SEQ ID NO: 208659 - RNA, 19 nt, Artificial Sequence
  Description of Artificial Sequence: Synthetic oligonucleotide
  Antisense strand to SEQ ID NO: 208658
uaacucaugcccagcucug

SEQ ID NO: 208660 - RNA, 19 nt, Artificial Sequence
  Description of Artificial Sequence: Synthetic oligonucleotide
  Sense strand starting at position 3112 of SEQ ID NO: 2688
aggcguacauaccugaaau

SEQ ID NO: 208661 - RNA, 19 nt, Artificial Sequence
  Description of Artificial Sequence: Synthetic oligonucleotide
  Antisense strand to SEQ ID NO: 208660
auuucagguauguacgccu

SEQ ID NO: 208662 - RNA, 19 nt, Artificial Sequence
  Description of Artificial Sequence: Synthetic oligonucleotide
  Sense strand starting at position 3113 of SEQ ID NO: 2688
ggcguacauaccugaaaua

SEQ ID NO: 208663 - RNA, 19 nt, Artificial Sequence
  Description of Artificial Sequence: Synthetic oligonucleotide
  Antisense strand to SEQ ID NO: 208662
uauuucagguauguacgcc

SEQ ID NO: 208664 - RNA, 19 nt, Artificial Sequence
  Description of Artificial Sequence: Synthetic oligonucleotide
  Sense strand starting at position 3114 of SEQ ID NO: 2688
gcguacauaccugaaauau

SEQ ID NO: 208665 - RNA, 19 nt, Artificial Sequence
  Description of Artificial Sequence: Synthetic oligonucleotide
  Antisense strand to SEQ ID NO: 208664
auauuucagguauguacgc

SEQ ID NO: 208666 - RNA, 19 nt, Artificial Sequence
  Description of Artificial Sequence: Synthetic oligonucleotide
  Sense strand starting at position 3159 of SEQ ID NO: 2688
uguguaaacucgguuugau

SEQ ID NO: 208667 - RNA, 19 nt, Artificial Sequence
  Description of Artificial Sequence: Synthetic oligonucleotide
  Antisense strand to SEQ ID NO: 208666
aucaaaccgaguuuacaca

SEQ ID NO: 208668 - RNA, 19 nt, Artificial Sequence
  Description of Artificial Sequence: Synthetic oligonucleotide
  Sense strand starting at position 3162 of SEQ ID NO: 2688
guaaacucgguuugauuau

SEQ ID NO: 208669 - RNA, 19 nt, Artificial Sequence
  Description of Artificial Sequence: Synthetic oligonucleotide
  Antisense strand to SEQ ID NO: 208668
auaaucaaaccgaguuuac

SEQ ID NO: 208670 - RNA, 19 nt, Artificial Sequence
  Description of Artificial Sequence: Synthetic oligonucleotide
  Sense strand starting at position 3185 of SEQ ID NO: 2688
guaacuauagaagggcuua

SEQ ID NO: 208671 - RNA, 19 nt, Artificial Sequence
  Description of Artificial Sequence: Synthetic oligonucleotide
  Antisense strand to SEQ ID NO: 208670
uaagcccuucuauaguuac

SEQ ID NO: 208672 - RNA, 19 nt, Artificial Sequence
  Description of Artificial Sequence: Synthetic oligonucleotide
  Sense strand starting at position 3220 of SEQ ID NO: 2688
ggaccuuaguccucuauaa

SEQ ID NO: 208673 - RNA, 19 nt, Artificial Sequence
  Description of Artificial Sequence: Synthetic oligonucleotide
  Antisense strand to SEQ ID NO: 208672
uuauagaggacuaaggucc

SEQ ID NO: 208674 - RNA, 19 nt, Artificial Sequence
  Description of Artificial Sequence: Synthetic oligonucleotide
  Sense strand starting at position 3271 of SEQ ID NO: 2688
cuccuaaauugucuaaugu

SEQ ID NO: 208675 - RNA, 19 nt, Artificial Sequence
  Description of Artificial Sequence: Synthetic oligonucleotide
  Antisense strand to SEQ ID NO: 208674
acauuagacaauuuaggag

SEQ ID NO: 208676 - RNA, 19 nt, Artificial Sequence
  Description of Artificial Sequence: Synthetic oligonucleotide
  Sense strand starting at position 3272 of SEQ ID NO: 2688
uccuaaauugucuaauguu

SEQ ID NO: 208677 - RNA, 19 nt, Artificial Sequence
  Description of Artificial Sequence: Synthetic oligonucleotide
  Antisense strand to SEQ ID NO: 208676
aacauuagacaauuuagga

SEQ ID NO: 208678 - RNA, 19 nt, Artificial Sequence
  Description of Artificial Sequence: Synthetic oligonucleotide
  Sense strand starting at position 3328 of SEQ ID NO: 2688
gagcaaguucugggugaag

SEQ ID NO: 208679 - RNA, 19 nt, Artificial Sequence
  Description of Artificial Sequence: Synthetic oligonucleotide
  Antisense strand to SEQ ID NO: 208678
cuucacccagaacuugcuc

SEQ ID NO: 208680 - RNA, 19 nt, Artificial Sequence
  Description of Artificial Sequence: Synthetic oligonucleotide
  Sense strand starting at position 3330 of SEQ ID NO: 2688
gcaaguucugggugaagua

SEQ ID NO: 208681 - RNA, 19 nt, Artificial Sequence
  Description of Artificial Sequence: Synthetic oligonucleotide
  Antisense strand to SEQ ID NO: 208680
uacuucacccagaacuugc

SEQ ID NO: 208682 - RNA, 19 nt, Artificial Sequence
  Description of Artificial Sequence: Synthetic oligonucleotide
  Sense strand starting at position 3331 of SEQ ID NO: 2688
caaguucugggugaaguaa

SEQ ID NO: 208683 - RNA, 19 nt, Artificial Sequence
  Description of Artificial Sequence: Synthetic oligonucleotide
  Antisense strand to SEQ ID NO: 208682
uuacuucacccagaacuug

SEQ ID NO: 208684 - RNA, 19 nt, Artificial Sequence
  Description of Artificial Sequence: Synthetic oligonucleotide
  Sense strand starting at position 3381 of SEQ ID NO: 2688
cgugguaugauggaggagu

SEQ ID NO: 208685 - RNA, 19 nt, Artificial Sequence
  Description of Artificial Sequence: Synthetic oligonucleotide
  Antisense strand to SEQ ID NO: 208684
acuccuccaucauaccacg

SEQ ID NO: 208686 - RNA, 19 nt, Artificial Sequence
  Description of Artificial Sequence: Synthetic oligonucleotide
  Sense strand starting at position 3382 of SEQ ID NO: 2688
gugguaugauggaggaguu

SEQ ID NO: 208687 - RNA, 19 nt, Artificial Sequence
  Description of Artificial Sequence: Synthetic oligonucleotide
  Antisense strand to SEQ ID NO: 208686
aacuccuccaucauaccac

SEQ ID NO: 208688 - RNA, 19 nt, Artificial Sequence
  Description of Artificial Sequence: Synthetic oligonucleotide
  Sense strand starting at position 3506 of SEQ ID NO: 2688
guuccuuaagaagauuguu

SEQ ID NO: 208689 - RNA, 19 nt, Artificial Sequence
  Description of Artificial Sequence: Synthetic oligonucleotide
  Antisense strand to SEQ ID NO: 208688
aacaaucuucuuaaggaac

SEQ ID NO: 208690 - RNA, 19 nt, Artificial Sequence
  Description of Artificial Sequence: Synthetic oligonucleotide
  Sense strand starting at position 3514 of SEQ ID NO: 2688
agaagauuguugguagaau

SEQ ID NO: 208691 - RNA, 19 nt, Artificial Sequence
  Description of Artificial Sequence: Synthetic oligonucleotide
  Antisense strand to SEQ ID NO: 208690
auucuaccaacaaucuucu

SEQ ID NO: 208692 - RNA, 19 nt, Artificial Sequence
  Description of Artificial Sequence: Synthetic oligonucleotide
  Sense strand starting at position 3568 of SEQ ID NO: 2688
aggccauaucaaggucuga

SEQ ID NO: 208693 - RNA, 19 nt, Artificial Sequence
  Description of Artificial Sequence: Synthetic oligonucleotide
  Antisense strand to SEQ ID NO: 208692
ucagaccuugauauggccu

SEQ ID NO: 208694 - RNA, 19 nt, Artificial Sequence
  Description of Artificial Sequence: Synthetic oligonucleotide
  Sense strand starting at position 3572 of SEQ ID NO: 2688
cauaucaaggucugagaau

SEQ ID NO: 208695 - RNA, 19 nt, Artificial Sequence
  Description of Artificial Sequence: Synthetic oligonucleotide
  Antisense strand to SEQ ID NO: 208694
auucucagaccuugauaug

SEQ ID NO: 208696 - RNA, 19 nt, Artificial Sequence
  Description of Artificial Sequence: Synthetic oligonucleotide
  Sense strand starting at position 3657 of SEQ ID NO: 2688
ggugaaaucuugccuacug

SEQ ID NO: 208697 - RNA, 19 nt, Artificial Sequence
  Description of Artificial Sequence: Synthetic oligonucleotide
  Antisense strand to SEQ ID NO: 208696
caguaggcaagauuucacc

SEQ ID NO: 208698 - RNA, 19 nt, Artificial Sequence
  Description of Artificial Sequence: Synthetic oligonucleotide
  Sense strand starting at position 3658 of SEQ ID NO: 2688
gugaaaucuugccuacuga

SEQ ID NO: 208699 - RNA, 19 nt, Artificial Sequence
  Description of Artificial Sequence: Synthetic oligonucleotide
  Antisense strand to SEQ ID NO: 208698
ucaguaggcaagauuucac

SEQ ID NO: 208700 - RNA, 19 nt, Artificial Sequence
  Description of Artificial Sequence: Synthetic oligonucleotide
  Sense strand starting at position 3659 of SEQ ID NO: 2688
ugaaaucuugccuacugaa

SEQ ID NO: 208701 - RNA, 19 nt, Artificial Sequence
  Description of Artificial Sequence: Synthetic oligonucleotide
  Antisense strand to SEQ ID NO: 208700
uucaguaggcaagauuuca

SEQ ID NO: 208702 - RNA, 19 nt, Artificial Sequence
  Description of Artificial Sequence: Synthetic oligonucleotide
  Sense strand starting at position 3675 of SEQ ID NO: 2688
gaagacagcucccuagaga

SEQ ID NO: 208703 - RNA, 19 nt, Artificial Sequence
  Description of Artificial Sequence: Synthetic oligonucleotide
  Antisense strand to SEQ ID NO: 208702
ucucuagggagcugucuuc

SEQ ID NO: 208704 - RNA, 19 nt, Artificial Sequence
  Description of Artificial Sequence: Synthetic oligonucleotide
  Sense strand starting at position 3868 of SEQ ID NO: 2688
ggcauuaaaugcucuucca

SEQ ID NO: 208705 - RNA, 19 nt, Artificial Sequence
  Description of Artificial Sequence: Synthetic oligonucleotide
  Antisense strand to SEQ ID NO: 208704
uggaagagcauuuaaugcc

SEQ ID NO: 208706 - RNA, 19 nt, Artificial Sequence
  Description of Artificial Sequence: Synthetic oligonucleotide
  Sense strand starting at position 3956 of SEQ ID NO: 2688
gcuucuauuguccucgcua

SEQ ID NO: 208707 - RNA, 19 nt, Artificial Sequence
  Description of Artificial Sequence: Synthetic oligonucleotide
  Antisense strand to SEQ ID NO: 208706
uagcgaggacaauagaagc

SEQ ID NO: 208708 - RNA, 19 nt, Artificial Sequence
  Description of Artificial Sequence: Synthetic oligonucleotide
  Sense strand starting at position 94 of SEQ ID NO: 2689
ggcugaguacgggagaauu

SEQ ID NO: 208709 - RNA, 19 nt, Artificial Sequence
  Description of Artificial Sequence: Synthetic oligonucleotide
  Antisense strand to SEQ ID NO: 208708
aauucucccguacucagcc

SEQ ID NO: 208710 - RNA, 19 nt, Artificial Sequence
  Description of Artificial Sequence: Synthetic oligonucleotide
  Sense strand starting at position 618 of SEQ ID NO: 2689
agauacuuccuaugaugau

SEQ ID NO: 208711 - RNA, 19 nt, Artificial Sequence
  Description of Artificial Sequence: Synthetic oligonucleotide
  Antisense strand to SEQ ID NO: 208710
aucaucauaggaaguaucu

SEQ ID NO: 208712 - RNA, 19 nt, Artificial Sequence
  Description of Artificial Sequence: Synthetic oligonucleotide
  Sense strand starting at position 624 of SEQ ID NO: 2689
uuccuaugaugaucuguga

SEQ ID NO: 208713 - RNA, 19 nt, Artificial Sequence
  Description of Artificial Sequence: Synthetic oligonucleotide
  Antisense strand to SEQ ID NO: 208712
ucacagaucaucauaggaa

SEQ ID NO: 208714 - RNA, 19 nt, Artificial Sequence
  Description of Artificial Sequence: Synthetic oligonucleotide
  Sense strand starting at position 627 of SEQ ID NO: 2689
cuaugaugaucugugagga

SEQ ID NO: 208715 - RNA, 19 nt, Artificial Sequence
  Description of Artificial Sequence: Synthetic oligonucleotide
  Antisense strand to SEQ ID NO: 208714
uccucacagaucaucauag

SEQ ID NO: 208716 - RNA, 19 nt, Artificial Sequence
  Description of Artificial Sequence: Synthetic oligonucleotide
  Sense strand starting at position 628 of SEQ ID NO: 2689
uaugaugaucugugaggac

SEQ ID NO: 208717 - RNA, 19 nt, Artificial Sequence
  Description of Artificial Sequence: Synthetic oligonucleotide
  Antisense strand to SEQ ID NO: 208716
guccucacagaucaucaua

SEQ ID NO: 208718 - RNA, 19 nt, Artificial Sequence
  Description of Artificial Sequence: Synthetic oligonucleotide
  Sense strand starting at position 694 of SEQ ID NO: 2689
gaucauuacuggucuggaa

SEQ ID NO: 208719 - RNA, 19 nt, Artificial Sequence
  Description of Artificial Sequence: Synthetic oligonucleotide
  Antisense strand to SEQ ID NO: 208718
uuccagaccaguaaugauc

SEQ ID NO: 208720 - RNA, 19 nt, Artificial Sequence
  Description of Artificial Sequence: Synthetic oligonucleotide
  Sense strand starting at position 696 of SEQ ID NO: 2689
ucauuacuggucuggaaag

SEQ ID NO: 208721 - RNA, 19 nt, Artificial Sequence
  Description of Artificial Sequence: Synthetic oligonucleotide
  Antisense strand to SEQ ID NO: 208720
cuuuccagaccaguaauga

SEQ ID NO: 208722 - RNA, 19 nt, Artificial Sequence
  Description of Artificial Sequence: Synthetic oligonucleotide
  Sense strand starting at position 872 of SEQ ID NO: 2689
uggcaauagcugggaaacu

SEQ ID NO: 208723 - RNA, 19 nt, Artificial Sequence
  Description of Artificial Sequence: Synthetic oligonucleotide
  Antisense strand to SEQ ID NO: 208722
aguuucccagcuauugcca

SEQ ID NO: 208724 - RNA, 19 nt, Artificial Sequence
  Description of Artificial Sequence: Synthetic oligonucleotide
  Sense strand starting at position 1007 of SEQ ID NO: 2689
ucaagaagugagcgaagaa

SEQ ID NO: 208725 - RNA, 19 nt, Artificial Sequence
  Description of Artificial Sequence: Synthetic oligonucleotide
  Antisense strand to SEQ ID NO: 208724
uucuucgcucacuucuuga

SEQ ID NO: 208726 - RNA, 19 nt, Artificial Sequence
  Description of Artificial Sequence: Synthetic oligonucleotide
  Sense strand starting at position 1019 of SEQ ID NO: 2689
cgaagaaugugagugauca

SEQ ID NO: 208727 - RNA, 19 nt, Artificial Sequence
  Description of Artificial Sequence: Synthetic oligonucleotide
  Antisense strand to SEQ ID NO: 208726
ugaucacucacauucuucg

SEQ ID NO: 208728 - RNA, 19 nt, Artificial Sequence
  Description of Artificial Sequence: Synthetic oligonucleotide
  Sense strand starting at position 1020 of SEQ ID NO: 2689
gaagaaugugagugaucau

SEQ ID NO: 208729 - RNA, 19 nt, Artificial Sequence
  Description of Artificial Sequence: Synthetic oligonucleotide
  Antisense strand to SEQ ID NO: 208728
augaucacucacauucuuc

SEQ ID NO: 208730 - RNA, 19 nt, Artificial Sequence
  Description of Artificial Sequence: Synthetic oligonucleotide
  Sense strand starting at position 1023 of SEQ ID NO: 2689
gaaugugagugaucauaaa

SEQ ID NO: 208731 - RNA, 19 nt, Artificial Sequence
  Description of Artificial Sequence: Synthetic oligonucleotide
  Antisense strand to SEQ ID NO: 208730
uuuaugaucacucacauuc

SEQ ID NO: 208732 - RNA, 19 nt, Artificial Sequence
  Description of Artificial Sequence: Synthetic oligonucleotide
  Sense strand starting at position 1160 of SEQ ID NO: 2689
gagaaucucgcugaucacu

SEQ ID NO: 208733 - RNA, 19 nt, Artificial Sequence
  Description of Artificial Sequence: Synthetic oligonucleotide
  Antisense strand to SEQ ID NO: 208732
agugaucagcgagauucuc

SEQ ID NO: 208734 - RNA, 19 nt, Artificial Sequence
  Description of Artificial Sequence: Synthetic oligonucleotide
  Sense strand starting at position 1168 of SEQ ID NO: 2689
cgcugaucacuacaaacua

SEQ ID NO: 208735 - RNA, 19 nt, Artificial Sequence
  Description of Artificial Sequence: Synthetic oligonucleotide
  Antisense strand to SEQ ID NO: 208734
uaguuuguagugaucagcg

SEQ ID NO: 208736 - RNA, 19 nt, Artificial Sequence
  Description of Artificial Sequence: Synthetic oligonucleotide
  Sense strand starting at position 1291 of SEQ ID NO: 2689
gucucagucccggcauagu

SEQ ID NO: 208737 - RNA, 19 nt, Artificial Sequence
  Description of Artificial Sequence: Synthetic oligonucleotide
  Antisense strand to SEQ ID NO: 208736
acuaugccgggacugagac

SEQ ID NO: 208738 - RNA, 19 nt, Artificial Sequence
  Description of Artificial Sequence: Synthetic oligonucleotide
  Sense strand starting at position 1346 of SEQ ID NO: 2689
agacgaauaucgguaacuc

SEQ ID NO: 208739 - RNA, 19 nt, Artificial Sequence
  Description of Artificial Sequence: Synthetic oligonucleotide
  Antisense strand to SEQ ID NO: 208738
gaguuaccgauauucgucu

SEQ ID NO: 208740 - RNA, 19 nt, Artificial Sequence
  Description of Artificial Sequence: Synthetic oligonucleotide
  Sense strand starting at position 1525 of SEQ ID NO: 2689
ugaguuucccaggagcuca

SEQ ID NO: 208741 - RNA, 19 nt, Artificial Sequence
  Description of Artificial Sequence: Synthetic oligonucleotide
  Antisense strand to SEQ ID NO: 208740
ugagcuccugggaaacuca

SEQ ID NO: 208742 - RNA, 19 nt, Artificial Sequence
  Description of Artificial Sequence: Synthetic oligonucleotide
  Sense strand starting at position 2314 of SEQ ID NO: 2689
ccuguugcucgugcuagau

SEQ ID NO: 208743 - RNA, 19 nt, Artificial Sequence
  Description of Artificial Sequence: Synthetic oligonucleotide
  Antisense strand to SEQ ID NO: 208742
aucuagcacgagcaacagg

SEQ ID NO: 208744 - RNA, 19 nt, Artificial Sequence
  Description of Artificial Sequence: Synthetic oligonucleotide
  Sense strand starting at position 2342 of SEQ ID NO: 2689
guagauuggcgugcugcaa

SEQ ID NO: 208745 - RNA, 19 nt, Artificial Sequence
  Description of Artificial Sequence: Synthetic oligonucleotide
  Antisense strand to SEQ ID NO: 208744
uugcagcacgccaaucuac

SEQ ID NO: 208746 - RNA, 19 nt, Artificial Sequence
  Description of Artificial Sequence: Synthetic oligonucleotide
  Sense strand starting at position 2503 of SEQ ID NO: 2689
ccggacugauucucucaau

SEQ ID NO: 208747 - RNA, 19 nt, Artificial Sequence
  Description of Artificial Sequence: Synthetic oligonucleotide
  Antisense strand to SEQ ID NO: 208746
auugagagaaucaguccgg

SEQ ID NO: 208748 - RNA, 19 nt, Artificial Sequence
  Description of Artificial Sequence: Synthetic oligonucleotide
  Sense strand starting at position 2504 of SEQ ID NO: 2689
cggacugauucucucaauu

SEQ ID NO: 208749 - RNA, 19 nt, Artificial Sequence
  Description of Artificial Sequence: Synthetic oligonucleotide
  Antisense strand to SEQ ID NO: 208748
aauugagagaaucaguccg

SEQ ID NO: 208750 - RNA, 19 nt, Artificial Sequence
  Description of Artificial Sequence: Synthetic oligonucleotide
  Sense strand starting at position 2514 of SEQ ID NO: 2689
cucucaauuugcguaugua

SEQ ID NO: 208751 - RNA, 19 nt, Artificial Sequence
  Description of Artificial Sequence: Synthetic oligonucleotide
  Antisense strand to SEQ ID NO: 208750
uacauacgcaaauugagag

SEQ ID NO: 208752 - RNA, 19 nt, Artificial Sequence
  Description of Artificial Sequence: Synthetic oligonucleotide
  Sense strand starting at position 2515 of SEQ ID NO: 2689
ucucaauuugcguauguau

SEQ ID NO: 208753 - RNA, 19 nt, Artificial Sequence
  Description of Artificial Sequence: Synthetic oligonucleotide
  Antisense strand to SEQ ID NO: 208752
auacauacgcaaauugaga

SEQ ID NO: 208754 - RNA, 19 nt, Artificial Sequence
  Description of Artificial Sequence: Synthetic oligonucleotide
  Sense strand starting at position 2713 of SEQ ID NO: 2689
cgaauagguucuccugaga

SEQ ID NO: 208755 - RNA, 19 nt, Artificial Sequence
  Description of Artificial Sequence: Synthetic oligonucleotide
  Antisense strand to SEQ ID NO: 208754
ucucaggagaaccuauucg

SEQ ID NO: 208756 - RNA, 19 nt, Artificial Sequence
  Description of Artificial Sequence: Synthetic oligonucleotide
  Sense strand starting at position 2937 of SEQ ID NO: 2689
gcgacauggaaagggauua

SEQ ID NO: 208757 - RNA, 19 nt, Artificial Sequence
  Description of Artificial Sequence: Synthetic oligonucleotide
  Antisense strand to SEQ ID NO: 208756
uaaucccuuuccaugucgc

SEQ ID NO: 208758 - RNA, 19 nt, Artificial Sequence
  Description of Artificial Sequence: Synthetic oligonucleotide
  Sense strand starting at position 2978 of SEQ ID NO: 2689
gcaucugaucuaugguaaa

SEQ ID NO: 208759 - RNA, 19 nt, Artificial Sequence
  Description of Artificial Sequence: Synthetic oligonucleotide
  Antisense strand to SEQ ID NO: 208758
uuuaccauagaucagaugc

SEQ ID NO: 208760 - RNA, 19 nt, Artificial Sequence
  Description of Artificial Sequence: Synthetic oligonucleotide
  Sense strand starting at position 3111 of SEQ ID NO: 2689
gccauuuauugagugguca

SEQ ID NO: 208761 - RNA, 19 nt, Artificial Sequence
  Description of Artificial Sequence: Synthetic oligonucleotide
  Antisense strand to SEQ ID NO: 208760
ugaccacucaauaaauggc

SEQ ID NO: 208762 - RNA, 19 nt, Artificial Sequence
  Description of Artificial Sequence: Synthetic oligonucleotide
  Sense strand starting at position 3157 of SEQ ID NO: 2689
auguuaagcugucucauuu

SEQ ID NO: 208763 - RNA, 19 nt, Artificial Sequence
  Description of Artificial Sequence: Synthetic oligonucleotide
  Antisense strand to SEQ ID NO: 208762
aaaugagacagcuuaacau

SEQ ID NO: 208764 - RNA, 19 nt, Artificial Sequence
  Description of Artificial Sequence: Synthetic oligonucleotide
  Sense strand starting at position 3285 of SEQ ID NO: 2689
aggucucucugacucuuaa

SEQ ID NO: 208765 - RNA, 19 nt, Artificial Sequence
  Description of Artificial Sequence: Synthetic oligonucleotide
  Antisense strand to SEQ ID NO: 208764
uuaagagucagagagaccu

SEQ ID NO: 208766 - RNA, 19 nt, Artificial Sequence
  Description of Artificial Sequence: Synthetic oligonucleotide
  Sense strand starting at position 3310 of SEQ ID NO: 2689
auuagcaaucaagguuaau

SEQ ID NO: 208767 - RNA, 19 nt, Artificial Sequence
  Description of Artificial Sequence: Synthetic oligonucleotide
  Antisense strand to SEQ ID NO: 208766
auuaaccuugauugcuaau

SEQ ID NO: 208768 - RNA, 19 nt, Artificial Sequence
  Description of Artificial Sequence: Synthetic oligonucleotide
  Sense strand starting at position 3497 of SEQ ID NO: 2689
cagcuuacuguacaaguga

SEQ ID NO: 208769 - RNA, 19 nt, Artificial Sequence
  Description of Artificial Sequence: Synthetic oligonucleotide
  Antisense strand to SEQ ID NO: 208768
ucacuuguacaguaagcug

SEQ ID NO: 208770 - RNA, 19 nt, Artificial Sequence
  Description of Artificial Sequence: Synthetic oligonucleotide
  Sense strand starting at position 3506 of SEQ ID NO: 2689
guacaagugaccuggaaca

SEQ ID NO: 208771 - RNA, 19 nt, Artificial Sequence
  Description of Artificial Sequence: Synthetic oligonucleotide
  Antisense strand to SEQ ID NO: 208770
uguuccaggucacuuguac

SEQ ID NO: 208772 - RNA, 19 nt, Artificial Sequence
  Description of Artificial Sequence: Synthetic oligonucleotide
  Sense strand starting at position 3517 of SEQ ID NO: 2689
cuggaacaguugcuuagaa

SEQ ID NO: 208773 - RNA, 19 nt, Artificial Sequence
  Description of Artificial Sequence: Synthetic oligonucleotide
  Antisense strand to SEQ ID NO: 208772
uucuaagcaacuguuccag

SEQ ID NO: 208774 - RNA, 19 nt, Artificial Sequence
  Description of Artificial Sequence: Synthetic oligonucleotide
  Sense strand starting at position 3783 of SEQ ID NO: 2689
cccugaguuccugagauac

SEQ ID NO: 208775 - RNA, 19 nt, Artificial Sequence
  Description of Artificial Sequence: Synthetic oligonucleotide
  Antisense strand to SEQ ID NO: 208774
guaucucaggaacucaggg

SEQ ID NO: 208776 - RNA, 19 nt, Artificial Sequence
  Description of Artificial Sequence: Synthetic oligonucleotide
  Sense strand starting at position 3812 of SEQ ID NO: 2689
cuguguacuuauuugcaaa

SEQ ID NO: 208777 - RNA, 19 nt, Artificial Sequence
  Description of Artificial Sequence: Synthetic oligonucleotide
  Antisense strand to SEQ ID NO: 208776
uuugcaaauaaguacacag

SEQ ID NO: 208778 - RNA, 19 nt, Artificial Sequence
  Description of Artificial Sequence: Synthetic oligonucleotide
  Sense strand starting at position 3814 of SEQ ID NO: 2689
guguacuuauuugcaaauu

SEQ ID NO: 208779 - RNA, 19 nt, Artificial Sequence
  Description of Artificial Sequence: Synthetic oligonucleotide
  Antisense strand to SEQ ID NO: 208778
aauuugcaaauaaguacac

SEQ ID NO: 208780 - RNA, 19 nt, Artificial Sequence
  Description of Artificial Sequence: Synthetic oligonucleotide
  Sense strand starting at position 3883 of SEQ ID NO: 2689
gccagagucagugcugcau

SEQ ID NO: 208781 - RNA, 19 nt, Artificial Sequence
  Description of Artificial Sequence: Synthetic oligonucleotide
  Antisense strand to SEQ ID NO: 208780
augcagcacugacucuggc

SEQ ID NO: 208782 - RNA, 19 nt, Artificial Sequence
  Description of Artificial Sequence: Synthetic oligonucleotide
  Sense strand starting at position 3901 of SEQ ID NO: 2689
uaguuugagccugauagga

SEQ ID NO: 208783 - RNA, 19 nt, Artificial Sequence
  Description of Artificial Sequence: Synthetic oligonucleotide
  Antisense strand to SEQ ID NO: 208782
uccuaucaggcucaaacua

SEQ ID NO: 208784 - RNA, 19 nt, Artificial Sequence
  Description of Artificial Sequence: Synthetic oligonucleotide
  Sense strand starting at position 3905 of SEQ ID NO: 2689
uugagccugauaggauuaa

SEQ ID NO: 208785 - RNA, 19 nt, Artificial Sequence
  Description of Artificial Sequence: Synthetic oligonucleotide
  Antisense strand to SEQ ID NO: 208784
uuaauccuaucaggcucaa

SEQ ID NO: 208786 - RNA, 19 nt, Artificial Sequence
  Description of Artificial Sequence: Synthetic oligonucleotide
  Sense strand starting at position 3909 of SEQ ID NO: 2689
gccugauaggauuaacuuu

SEQ ID NO: 208787 - RNA, 19 nt, Artificial Sequence
  Description of Artificial Sequence: Synthetic oligonucleotide
  Antisense strand to SEQ ID NO: 208786
aaaguuaauccuaucaggc

SEQ ID NO: 208788 - RNA, 19 nt, Artificial Sequence
  Description of Artificial Sequence: Synthetic oligonucleotide
  Sense strand starting at position 39 of SEQ ID NO: 2691
agacgaacuuccucuaagu

SEQ ID NO: 208789 - RNA, 19 nt, Artificial Sequence
  Description of Artificial Sequence: Synthetic oligonucleotide
  Antisense strand to SEQ ID NO: 208788
acuuagaggaaguucgucu

SEQ ID NO: 208790 - RNA, 19 nt, Artificial Sequence
  Description of Artificial Sequence: Synthetic oligonucleotide
  Sense strand starting at position 75 of SEQ ID NO: 2691
cacagaugucagcauuaga

SEQ ID NO: 208791 - RNA, 19 nt, Artificial Sequence
  Description of Artificial Sequence: Synthetic oligonucleotide
  Antisense strand to SEQ ID NO: 208790
ucuaaugcugacaucugug

SEQ ID NO: 208792 - RNA, 19 nt, Artificial Sequence
  Description of Artificial Sequence: Synthetic oligonucleotide
  Sense strand starting at position 88 of SEQ ID NO: 2691
auuagaaagugcuaaaguu

SEQ ID NO: 208793 - RNA, 19 nt, Artificial Sequence
  Description of Artificial Sequence: Synthetic oligonucleotide
  Antisense strand to SEQ ID NO: 208792
aacuuuagcacuuucuaau

SEQ ID NO: 208794 - RNA, 19 nt, Artificial Sequence
  Description of Artificial Sequence: Synthetic oligonucleotide
  Sense strand starting at position 156 of SEQ ID NO: 2691
gcgcuaaaguucuuaucua

SEQ ID NO: 208795 - RNA, 19 nt, Artificial Sequence
  Description of Artificial Sequence: Synthetic oligonucleotide
  Antisense strand to SEQ ID NO: 208794
uagauaagaacuuuagcgc

SEQ ID NO: 208796 - RNA, 19 nt, Artificial Sequence
  Description of Artificial Sequence: Synthetic oligonucleotide
  Sense strand starting at position 211 of SEQ ID NO: 2691
acacgcauagugcagaaau

SEQ ID NO: 208797 - RNA, 19 nt, Artificial Sequence
  Description of Artificial Sequence: Synthetic oligonucleotide
  Antisense strand to SEQ ID NO: 208796
auuucugcacuaugcgugu

SEQ ID NO: 208798 - RNA, 19 nt, Artificial Sequence
  Description of Artificial Sequence: Synthetic oligonucleotide
  Sense strand starting at position 213 of SEQ ID NO: 2691
acgcauagugcagaaaucu

SEQ ID NO: 208799 - RNA, 19 nt, Artificial Sequence
  Description of Artificial Sequence: Synthetic oligonucleotide
  Antisense strand to SEQ ID NO: 208798
agauuucugcacuaugcgu

SEQ ID NO: 208800 - RNA, 19 nt, Artificial Sequence
  Description of Artificial Sequence: Synthetic oligonucleotide
  Sense strand starting at position 222 of SEQ ID NO: 2691
gcagaaaucucuucuauag

SEQ ID NO: 208801 - RNA, 19 nt, Artificial Sequence
  Description of Artificial Sequence: Synthetic oligonucleotide
  Antisense strand to SEQ ID NO: 208800
cuauagaagagauuucugc

SEQ ID NO: 208802 - RNA, 19 nt, Artificial Sequence
  Description of Artificial Sequence: Synthetic oligonucleotide
  Sense strand starting at position 264 of SEQ ID NO: 2691
aaggcuuccagugauggga

SEQ ID NO: 208803 - RNA, 19 nt, Artificial Sequence
  Description of Artificial Sequence: Synthetic oligonucleotide
  Antisense strand to SEQ ID NO: 208802
ucccaucacuggaagccuu

SEQ ID NO: 208804 - RNA, 19 nt, Artificial Sequence
  Description of Artificial Sequence: Synthetic oligonucleotide
  Sense strand starting at position 447 of SEQ ID NO: 2691
caugcaggugcucaaagaa

SEQ ID NO: 208805 - RNA, 19 nt, Artificial Sequence
  Description of Artificial Sequence: Synthetic oligonucleotide
  Antisense strand to SEQ ID NO: 208804
uucuuugagcaccugcaug

SEQ ID NO: 208806 - RNA, 19 nt, Artificial Sequence
  Description of Artificial Sequence: Synthetic oligonucleotide
  Sense strand starting at position 454 of SEQ ID NO: 2691
gugcucaaagaaugcauuu

SEQ ID NO: 208807 - RNA, 19 nt, Artificial Sequence
  Description of Artificial Sequence: Synthetic oligonucleotide
  Antisense strand to SEQ ID NO: 208806
aaaugcauucuuugagcac

SEQ ID NO: 208808 - RNA, 19 nt, Artificial Sequence
  Description of Artificial Sequence: Synthetic oligonucleotide
  Sense strand starting at position 484 of SEQ ID NO: 2691
ccugcugggcucugauuau

SEQ ID NO: 208809 - RNA, 19 nt, Artificial Sequence
  Description of Artificial Sequence: Synthetic oligonucleotide
  Antisense strand to SEQ ID NO: 208808
auaaucagagcccagcagg

SEQ ID NO: 208810 - RNA, 19 nt, Artificial Sequence
  Description of Artificial Sequence: Synthetic oligonucleotide
  Sense strand starting at position 488 of SEQ ID NO: 2691
cugggcucugauuauuaga

SEQ ID NO: 208811 - RNA, 19 nt, Artificial Sequence
  Description of Artificial Sequence: Synthetic oligonucleotide
  Antisense strand to SEQ ID NO: 208810
ucuaauaaucagagcccag

SEQ ID NO: 208812 - RNA, 19 nt, Artificial Sequence
  Description of Artificial Sequence: Synthetic oligonucleotide
  Sense strand starting at position 490 of SEQ ID NO: 2691
gggcucugauuauuagacu

SEQ ID NO: 208813 - RNA, 19 nt, Artificial Sequence
  Description of Artificial Sequence: Synthetic oligonucleotide
  Antisense strand to SEQ ID NO: 208812
agucuaauaaucagagccc

SEQ ID NO: 208814 - RNA, 19 nt, Artificial Sequence
  Description of Artificial Sequence: Synthetic oligonucleotide
  Sense strand starting at position 699 of SEQ ID NO: 2691
agaggaggucaccguuaca

SEQ ID NO: 208815 - RNA, 19 nt, Artificial Sequence
  Description of Artificial Sequence: Synthetic oligonucleotide
  Antisense strand to SEQ ID NO: 208814
uguaacggugaccuccucu

SEQ ID NO: 208816 - RNA, 19 nt, Artificial Sequence
  Description of Artificial Sequence: Synthetic oligonucleotide
  Sense strand starting at position 855 of SEQ ID NO: 2691
cuaggugugaaaugaaaca

SEQ ID NO: 208817 - RNA, 19 nt, Artificial Sequence
  Description of Artificial Sequence: Synthetic oligonucleotide
  Antisense strand to SEQ ID NO: 208816
uguuucauuucacaccuag

SEQ ID NO: 208818 - RNA, 19 nt, Artificial Sequence
  Description of Artificial Sequence: Synthetic oligonucleotide
  Sense strand starting at position 944 of SEQ ID NO: 2691
auggcauucucagaaucua

SEQ ID NO: 208819 - RNA, 19 nt, Artificial Sequence
  Description of Artificial Sequence: Synthetic oligonucleotide
  Antisense strand to SEQ ID NO: 208818
uagauucugagaaugccau

SEQ ID NO: 208820 - RNA, 19 nt, Artificial Sequence
  Description of Artificial Sequence: Synthetic oligonucleotide
  Sense strand starting at position 952 of SEQ ID NO: 2691
cucagaaucuagguccaga

SEQ ID NO: 208821 - RNA, 19 nt, Artificial Sequence
  Description of Artificial Sequence: Synthetic oligonucleotide
  Antisense strand to SEQ ID NO: 208820
ucuggaccuagauucugag

SEQ ID NO: 208822 - RNA, 19 nt, Artificial Sequence
  Description of Artificial Sequence: Synthetic oligonucleotide
  Sense strand starting at position 1096 of SEQ ID NO: 2691
caaggucuuccagaguuug

SEQ ID NO: 208823 - RNA, 19 nt, Artificial Sequence
  Description of Artificial Sequence: Synthetic oligonucleotide
  Antisense strand to SEQ ID NO: 208822
caaacucuggaagaccuug

SEQ ID NO: 208824 - RNA, 19 nt, Artificial Sequence
  Description of Artificial Sequence: Synthetic oligonucleotide
  Sense strand starting at position 1230 of SEQ ID NO: 2691
ggcagcuucuaaucugauu

SEQ ID NO: 208825 - RNA, 19 nt, Artificial Sequence
  Description of Artificial Sequence: Synthetic oligonucleotide
  Antisense strand to SEQ ID NO: 208824
aaucagauuagaagcugcc

SEQ ID NO: 208826 - RNA, 19 nt, Artificial Sequence
  Description of Artificial Sequence: Synthetic oligonucleotide
  Sense strand starting at position 1480 of SEQ ID NO: 2691
uccagaaaugugggucucu

SEQ ID NO: 208827 - RNA, 19 nt, Artificial Sequence
  Description of Artificial Sequence: Synthetic oligonucleotide
  Antisense strand to SEQ ID NO: 208826
agagacccacauuucugga

SEQ ID NO: 208828 - RNA, 19 nt, Artificial Sequence
  Description of Artificial Sequence: Synthetic oligonucleotide
  Sense strand starting at position 2220 of SEQ ID NO: 2691
guggcauuaucaccgcuaa

SEQ ID NO: 208829 - RNA, 19 nt, Artificial Sequence
  Description of Artificial Sequence: Synthetic oligonucleotide
  Antisense strand to SEQ ID NO: 208828
uuagcggugauaaugccac

SEQ ID NO: 208830 - RNA, 19 nt, Artificial Sequence
  Description of Artificial Sequence: Synthetic oligonucleotide
  Sense strand starting at position 2221 of SEQ ID NO: 2691
uggcauuaucaccgcuaac

SEQ ID NO: 208831 - RNA, 19 nt, Artificial Sequence
  Description of Artificial Sequence: Synthetic oligonucleotide
  Antisense strand to SEQ ID NO: 208830
guuagcggugauaaugcca

SEQ ID NO: 208832 - RNA, 19 nt, Artificial Sequence
  Description of Artificial Sequence: Synthetic oligonucleotide
  Sense strand starting at position 2350 of SEQ ID NO: 2691
gacagagucuugcuacuca

SEQ ID NO: 208833 - RNA, 19 nt, Artificial Sequence
  Description of Artificial Sequence: Synthetic oligonucleotide
  Antisense strand to SEQ ID NO: 208832
ugaguagcaagacucuguc

SEQ ID NO: 208834 - RNA, 19 nt, Artificial Sequence
  Description of Artificial Sequence: Synthetic oligonucleotide
  Sense strand starting at position 2454 of SEQ ID NO: 2691
uggcuaagcucaguucuca

SEQ ID NO: 208835 - RNA, 19 nt, Artificial Sequence
  Description of Artificial Sequence: Synthetic oligonucleotide
  Antisense strand to SEQ ID NO: 208834
ugagaacugagcuuagcca

SEQ ID NO: 208836 - RNA, 19 nt, Artificial Sequence
  Description of Artificial Sequence: Synthetic oligonucleotide
  Sense strand starting at position 2564 of SEQ ID NO: 2691
ucaccagauguuuaucauc

SEQ ID NO: 208837 - RNA, 19 nt, Artificial Sequence
  Description of Artificial Sequence: Synthetic oligonucleotide
  Antisense strand to SEQ ID NO: 208836
gaugauaaacaucugguga

SEQ ID NO: 208838 - RNA, 19 nt, Artificial Sequence
  Description of Artificial Sequence: Synthetic oligonucleotide
  Sense strand starting at position 2566 of SEQ ID NO: 2691
accagauguuuaucaucau

SEQ ID NO: 208839 - RNA, 19 nt, Artificial Sequence
  Description of Artificial Sequence: Synthetic oligonucleotide
  Antisense strand to SEQ ID NO: 208838
augaugauaaacaucuggu

SEQ ID NO: 208840 - RNA, 19 nt, Artificial Sequence
  Description of Artificial Sequence: Synthetic oligonucleotide
  Sense strand starting at position 2567 of SEQ ID NO: 2691
ccagauguuuaucaucaug

SEQ ID NO: 208841 - RNA, 19 nt, Artificial Sequence
  Description of Artificial Sequence: Synthetic oligonucleotide
  Antisense strand to SEQ ID NO: 208840
caugaugauaaacaucugg

SEQ ID NO: 208842 - RNA, 19 nt, Artificial Sequence
  Description of Artificial Sequence: Synthetic oligonucleotide
  Sense strand starting at position 2695 of SEQ ID NO: 2691
gcuggcuuucuggaggaca

SEQ ID NO: 208843 - RNA, 19 nt, Artificial Sequence
  Description of Artificial Sequence: Synthetic oligonucleotide
  Antisense strand to SEQ ID NO: 208842
uguccuccagaaagccagc

SEQ ID NO: 208844 - RNA, 19 nt, Artificial Sequence
  Description of Artificial Sequence: Synthetic oligonucleotide
  Sense strand starting at position 2875 of SEQ ID NO: 2691
cguaguuccucugcccaga

SEQ ID NO: 208845 - RNA, 19 nt, Artificial Sequence
  Description of Artificial Sequence: Synthetic oligonucleotide
  Antisense strand to SEQ ID NO: 208844
ucugggcagaggaacuacg

SEQ ID NO: 208846 - RNA, 19 nt, Artificial Sequence
  Description of Artificial Sequence: Synthetic oligonucleotide
  Sense strand starting at position 2901 of SEQ ID NO: 2691
cggccuguccuggaaaggu

SEQ ID NO: 208847 - RNA, 19 nt, Artificial Sequence
  Description of Artificial Sequence: Synthetic oligonucleotide
  Antisense strand to SEQ ID NO: 208846
accuuuccaggacaggccg

SEQ ID NO: 208848 - RNA, 19 nt, Artificial Sequence
  Description of Artificial Sequence: Synthetic oligonucleotide
  Sense strand starting at position 3035 of SEQ ID NO: 2691
auuauuugacugcguggga

SEQ ID NO: 208849 - RNA, 19 nt, Artificial Sequence
  Description of Artificial Sequence: Synthetic oligonucleotide
  Antisense strand to SEQ ID NO: 208848
ucccacgcagucaaauaau

SEQ ID NO: 208850 - RNA, 19 nt, Artificial Sequence
  Description of Artificial Sequence: Synthetic oligonucleotide
  Sense strand starting at position 3093 of SEQ ID NO: 2691
gguggcugucuccgguaau

SEQ ID NO: 208851 - RNA, 19 nt, Artificial Sequence
  Description of Artificial Sequence: Synthetic oligonucleotide
  Antisense strand to SEQ ID NO: 208850
auuaccggagacagccacc

SEQ ID NO: 208852 - RNA, 19 nt, Artificial Sequence
  Description of Artificial Sequence: Synthetic oligonucleotide
  Sense strand starting at position 3377 of SEQ ID NO: 2691
agcaauacuggaugaaugu

SEQ ID NO: 208853 - RNA, 19 nt, Artificial Sequence
  Description of Artificial Sequence: Synthetic oligonucleotide
  Antisense strand to SEQ ID NO: 208852
acauucauccaguauugcu

SEQ ID NO: 208854 - RNA, 19 nt, Artificial Sequence
  Description of Artificial Sequence: Synthetic oligonucleotide
  Sense strand starting at position 3378 of SEQ ID NO: 2691
gcaauacuggaugaauguu

SEQ ID NO: 208855 - RNA, 19 nt, Artificial Sequence
  Description of Artificial Sequence: Synthetic oligonucleotide
  Antisense strand to SEQ ID NO: 208854
aacauucauccaguauugc

SEQ ID NO: 208856 - RNA, 19 nt, Artificial Sequence
  Description of Artificial Sequence: Synthetic oligonucleotide
  Sense strand starting at position 3384 of SEQ ID NO: 2691
cuggaugaauguuucucau

SEQ ID NO: 208857 - RNA, 19 nt, Artificial Sequence
  Description of Artificial Sequence: Synthetic oligonucleotide
  Antisense strand to SEQ ID NO: 208856
augagaaacauucauccag

SEQ ID NO: 208858 - RNA, 19 nt, Artificial Sequence
  Description of Artificial Sequence: Synthetic oligonucleotide
  Sense strand starting at position 3386 of SEQ ID NO: 2691
ggaugaauguuucucauug

SEQ ID NO: 208859 - RNA, 19 nt, Artificial Sequence
  Description of Artificial Sequence: Synthetic oligonucleotide
  Antisense strand to SEQ ID NO: 208858
caaugagaaacauucaucc

SEQ ID NO: 208860 - RNA, 19 nt, Artificial Sequence
  Description of Artificial Sequence: Synthetic oligonucleotide
  Sense strand starting at position 3387 of SEQ ID NO: 2691
gaugaauguuucucauuga

SEQ ID NO: 208861 - RNA, 19 nt, Artificial Sequence
  Description of Artificial Sequence: Synthetic oligonucleotide
  Antisense strand to SEQ ID NO: 208860
ucaaugagaaacauucauc

SEQ ID NO: 208862 - RNA, 19 nt, Artificial Sequence
  Description of Artificial Sequence: Synthetic oligonucleotide
  Sense strand starting at position 3388 of SEQ ID NO: 2691
augaauguuucucauugaa

SEQ ID NO: 208863 - RNA, 19 nt, Artificial Sequence
  Description of Artificial Sequence: Synthetic oligonucleotide
  Antisense strand to SEQ ID NO: 208862
uucaaugagaaacauucau

SEQ ID NO: 208864 - RNA, 19 nt, Artificial Sequence
  Description of Artificial Sequence: Synthetic oligonucleotide
  Sense strand starting at position 3391 of SEQ ID NO: 2691
aauguuucucauugaaacg

SEQ ID NO: 208865 - RNA, 19 nt, Artificial Sequence
  Description of Artificial Sequence: Synthetic oligonucleotide
  Antisense strand to SEQ ID NO: 208864
cguuucaaugagaaacauu

SEQ ID NO: 208866 - RNA, 19 nt, Artificial Sequence
  Description of Artificial Sequence: Synthetic oligonucleotide
  Sense strand starting at position 3487 of SEQ ID NO: 2691
aagugucuccauggccaaa

SEQ ID NO: 208867 - RNA, 19 nt, Artificial Sequence
  Description of Artificial Sequence: Synthetic oligonucleotide
  Antisense strand to SEQ ID NO: 208866
uuuggccauggagacacuu

SEQ ID NO: 208868 - RNA, 19 nt, Artificial Sequence
  Description of Artificial Sequence: Synthetic oligonucleotide
  Sense strand starting at position 1 of SEQ ID NO: 2690
gcaauacuggaugaauguu

SEQ ID NO: 208869 - RNA, 19 nt, Artificial Sequence
  Description of Artificial Sequence: Synthetic oligonucleotide
  Antisense strand to SEQ ID NO: 208868
aacauucauccaguauugc

SEQ ID NO: 208870 - RNA, 19 nt, Artificial Sequence
  Description of Artificial Sequence: Synthetic oligonucleotide
  Sense strand starting at position 7 of SEQ ID NO: 2690
cuggaugaauguuucucau

SEQ ID NO: 208871 - RNA, 19 nt, Artificial Sequence
  Description of Artificial Sequence: Synthetic oligonucleotide
  Antisense strand to SEQ ID NO: 208870
augagaaacauucauccag

SEQ ID NO: 208872 - RNA, 19 nt, Artificial Sequence
  Description of Artificial Sequence: Synthetic oligonucleotide
  Sense strand starting at position 9 of SEQ ID NO: 2690
ggaugaauguuucucauug

SEQ ID NO: 208873 - RNA, 19 nt, Artificial Sequence
  Description of Artificial Sequence: Synthetic oligonucleotide
  Antisense strand to SEQ ID NO: 208872
caaugagaaacauucaucc

SEQ ID NO: 208874 - RNA, 19 nt, Artificial Sequence
  Description of Artificial Sequence: Synthetic oligonucleotide
  Sense strand starting at position 10 of SEQ ID NO: 2690
gaugaauguuucucauuga

SEQ ID NO: 208875 - RNA, 19 nt, Artificial Sequence
  Description of Artificial Sequence: Synthetic oligonucleotide
  Antisense strand to SEQ ID NO: 208874
ucaaugagaaacauucauc

SEQ ID NO: 208876 - RNA, 19 nt, Artificial Sequence
  Description of Artificial Sequence: Synthetic oligonucleotide
  Sense strand starting at position 14 of SEQ ID NO: 2690
aauguuucucauugaaacg

SEQ ID NO: 208877 - RNA, 19 nt, Artificial Sequence
  Description of Artificial Sequence: Synthetic oligonucleotide
  Antisense strand to SEQ ID NO: 208876
cguuucaaugagaaacauu

SEQ ID NO: 208878 - RNA, 19 nt, Artificial Sequence
  Description of Artificial Sequence: Synthetic oligonucleotide
  Sense strand starting at position 110 of SEQ ID NO: 2690
aagugucuccauggccaaa

SEQ ID NO: 208879 - RNA, 19 nt, Artificial Sequence
  Description of Artificial Sequence: Synthetic oligonucleotide
  Antisense strand to SEQ ID NO: 208878
uuuggccauggagacacuu

SEQ ID NO: 208880 - RNA, 19 nt, Artificial Sequence
  Description of Artificial Sequence: Synthetic oligonucleotide
  Sense strand starting at position 643 of SEQ ID NO: 2690
aaggauagucugggugaga

SEQ ID NO: 208881 - RNA, 19 nt, Artificial Sequence
  Description of Artificial Sequence: Synthetic oligonucleotide
  Antisense strand to SEQ ID NO: 208880
ucucacccagacuauccuu

SEQ ID NO: 208882 - RNA, 19 nt, Artificial Sequence
  Description of Artificial Sequence: Synthetic oligonucleotide
  Sense strand starting at position 644 of SEQ ID NO: 2690
aggauagucugggugagaa

SEQ ID NO: 208883 - RNA, 19 nt, Artificial Sequence
  Description of Artificial Sequence: Synthetic oligonucleotide
  Antisense strand to SEQ ID NO: 208882
uucucacccagacuauccu

SEQ ID NO: 208884 - RNA, 19 nt, Artificial Sequence
  Description of Artificial Sequence: Synthetic oligonucleotide
  Sense strand starting at position 804 of SEQ ID NO: 2690
cgugcauacaguuaaaugu

SEQ ID NO: 208885 - RNA, 19 nt, Artificial Sequence
  Description of Artificial Sequence: Synthetic oligonucleotide
  Antisense strand to SEQ ID NO: 208884
acauuuaacuguaugcacg

SEQ ID NO: 208886 - RNA, 19 nt, Artificial Sequence
  Description of Artificial Sequence: Synthetic oligonucleotide
  Sense strand starting at position 832 of SEQ ID NO: 2690
augagauccuaugauuaau

SEQ ID NO: 208887 - RNA, 19 nt, Artificial Sequence
  Description of Artificial Sequence: Synthetic oligonucleotide
  Antisense strand to SEQ ID NO: 208886
auuaaucauaggaucucau

SEQ ID NO: 208888 - RNA, 19 nt, Artificial Sequence
  Description of Artificial Sequence: Synthetic oligonucleotide
  Sense strand starting at position 857 of SEQ ID NO: 2690
auaauacaugcucgauaaa

SEQ ID NO: 208889 - RNA, 19 nt, Artificial Sequence
  Description of Artificial Sequence: Synthetic oligonucleotide
  Antisense strand to SEQ ID NO: 208888
uuuaucgagcauguauuau

SEQ ID NO: 208890 - RNA, 19 nt, Artificial Sequence
  Description of Artificial Sequence: Synthetic oligonucleotide
  Sense strand starting at position 961 of SEQ ID NO: 2690
gguuucuccacaggaggaa

SEQ ID NO: 208891 - RNA, 19 nt, Artificial Sequence
  Description of Artificial Sequence: Synthetic oligonucleotide
  Antisense strand to SEQ ID NO: 208890
uuccuccuguggagaaacc

SEQ ID NO: 208892 - RNA, 19 nt, Artificial Sequence
  Description of Artificial Sequence: Synthetic oligonucleotide
  Sense strand starting at position 1145 of SEQ ID NO: 2690
cucagcugucuaggcuaaa

SEQ ID NO: 208893 - RNA, 19 nt, Artificial Sequence
  Description of Artificial Sequence: Synthetic oligonucleotide
  Antisense strand to SEQ ID NO: 208892
uuuagccuagacagcugag

SEQ ID NO: 208894 - RNA, 19 nt, Artificial Sequence
  Description of Artificial Sequence: Synthetic oligonucleotide
  Sense strand starting at position 1202 of SEQ ID NO: 2690
acacauuaacagcgaaaca

SEQ ID NO: 208895 - RNA, 19 nt, Artificial Sequence
  Description of Artificial Sequence: Synthetic oligonucleotide
  Antisense strand to SEQ ID NO: 208894
uguuucgcuguuaaugugu

SEQ ID NO: 208896 - RNA, 19 nt, Artificial Sequence
  Description of Artificial Sequence: Synthetic oligonucleotide
  Sense strand starting at position 1574 of SEQ ID NO: 2690
cuaggaacucaaugcacau

SEQ ID NO: 208897 - RNA, 19 nt, Artificial Sequence
  Description of Artificial Sequence: Synthetic oligonucleotide
  Antisense strand to SEQ ID NO: 208896
augugcauugaguuccuag

SEQ ID NO: 208898 - RNA, 19 nt, Artificial Sequence
  Description of Artificial Sequence: Synthetic oligonucleotide
  Sense strand starting at position 1593 of SEQ ID NO: 2690
gcuaaugaguuaucuggua

SEQ ID NO: 208899 - RNA, 19 nt, Artificial Sequence
  Description of Artificial Sequence: Synthetic oligonucleotide
  Antisense strand to SEQ ID NO: 208898
uaccagauaacucauuagc

SEQ ID NO: 208900 - RNA, 19 nt, Artificial Sequence
  Description of Artificial Sequence: Synthetic oligonucleotide
  Sense strand starting at position 1715 of SEQ ID NO: 2690
aguauuucuuuagcacgga

SEQ ID NO: 208901 - RNA, 19 nt, Artificial Sequence
  Description of Artificial Sequence: Synthetic oligonucleotide
  Antisense strand to SEQ ID NO: 208900
uccgugcuaaagaaauacu

SEQ ID NO: 208902 - RNA, 19 nt, Artificial Sequence
  Description of Artificial Sequence: Synthetic oligonucleotide
  Sense strand starting at position 2070 of SEQ ID NO: 2690
ccuagaauugggcguggga

SEQ ID NO: 208903 - RNA, 19 nt, Artificial Sequence
  Description of Artificial Sequence: Synthetic oligonucleotide
  Antisense strand to SEQ ID NO: 208902
ucccacgcccaauucuagg

SEQ ID NO: 208904 - RNA, 19 nt, Artificial Sequence
  Description of Artificial Sequence: Synthetic oligonucleotide
  Sense strand starting at position 2072 of SEQ ID NO: 2690
uagaauugggcgugggaag

SEQ ID NO: 208905 - RNA, 19 nt, Artificial Sequence
  Description of Artificial Sequence: Synthetic oligonucleotide
  Antisense strand to SEQ ID NO: 208904
cuucccacgcccaauucua

SEQ ID NO: 208906 - RNA, 19 nt, Artificial Sequence
  Description of Artificial Sequence: Synthetic oligonucleotide
  Sense strand starting at position 2118 of SEQ ID NO: 2690
cuuacugugcuguaaacuu

SEQ ID NO: 208907 - RNA, 19 nt, Artificial Sequence
  Description of Artificial Sequence: Synthetic oligonucleotide
  Antisense strand to SEQ ID NO: 208906
aaguuuacagcacaguaag

SEQ ID NO: 208908 - RNA, 19 nt, Artificial Sequence
  Description of Artificial Sequence: Synthetic oligonucleotide
  Sense strand starting at position 2130 of SEQ ID NO: 2690
uaaacuuugcgagagaauu

SEQ ID NO: 208909 - RNA, 19 nt, Artificial Sequence
  Description of Artificial Sequence: Synthetic oligonucleotide
  Antisense strand to SEQ ID NO: 208908
aauucucucgcaaaguuua

SEQ ID NO: 208910 - RNA, 19 nt, Artificial Sequence
  Description of Artificial Sequence: Synthetic oligonucleotide
  Sense strand starting at position 2260 of SEQ ID NO: 2690
auuauuccugcuggaaaca

SEQ ID NO: 208911 - RNA, 19 nt, Artificial Sequence
  Description of Artificial Sequence: Synthetic oligonucleotide
  Antisense strand to SEQ ID NO: 208910
uguuuccagcaggaauaau

SEQ ID NO: 208912 - RNA, 19 nt, Artificial Sequence
  Description of Artificial Sequence: Synthetic oligonucleotide
  Sense strand starting at position 2261 of SEQ ID NO: 2690
uuauuccugcuggaaacau

SEQ ID NO: 208913 - RNA, 19 nt, Artificial Sequence
  Description of Artificial Sequence: Synthetic oligonucleotide
  Antisense strand to SEQ ID NO: 208912
auguuuccagcaggaauaa

SEQ ID NO: 208914 - RNA, 19 nt, Artificial Sequence
  Description of Artificial Sequence: Synthetic oligonucleotide
  Sense strand starting at position 2305 of SEQ ID NO: 2690
guaacuaacuuguccagag

SEQ ID NO: 208915 - RNA, 19 nt, Artificial Sequence
  Description of Artificial Sequence: Synthetic oligonucleotide
  Antisense strand to SEQ ID NO: 208914
cucuggacaaguuaguuac

SEQ ID NO: 208916 - RNA, 19 nt, Artificial Sequence
  Description of Artificial Sequence: Synthetic oligonucleotide
  Sense strand starting at position 2760 of SEQ ID NO: 2690
ccaggccuucuggaaaugu

SEQ ID NO: 208917 - RNA, 19 nt, Artificial Sequence
  Description of Artificial Sequence: Synthetic oligonucleotide
  Antisense strand to SEQ ID NO: 208916
acauuuccagaaggccugg

SEQ ID NO: 208918 - RNA, 19 nt, Artificial Sequence
  Description of Artificial Sequence: Synthetic oligonucleotide
  Sense strand starting at position 2773 of SEQ ID NO: 2690
aaauguguuggacagcgau

SEQ ID NO: 208919 - RNA, 19 nt, Artificial Sequence
  Description of Artificial Sequence: Synthetic oligonucleotide
  Antisense strand to SEQ ID NO: 208918
aucgcuguccaacacauuu

SEQ ID NO: 208920 - RNA, 19 nt, Artificial Sequence
  Description of Artificial Sequence: Synthetic oligonucleotide
  Sense strand starting at position 2785 of SEQ ID NO: 2690
cagcgauggguccacacuu

SEQ ID NO: 208921 - RNA, 19 nt, Artificial Sequence
  Description of Artificial Sequence: Synthetic oligonucleotide
  Antisense strand to SEQ ID NO: 208920
aaguguggacccaucgcug

SEQ ID NO: 208922 - RNA, 19 nt, Artificial Sequence
  Description of Artificial Sequence: Synthetic oligonucleotide
  Sense strand starting at position 2834 of SEQ ID NO: 2690
acccaugagagaugucagu

SEQ ID NO: 208923 - RNA, 19 nt, Artificial Sequence
  Description of Artificial Sequence: Synthetic oligonucleotide
  Antisense strand to SEQ ID NO: 208922
acugacaucucucaugggu

SEQ ID NO: 208924 - RNA, 19 nt, Artificial Sequence
  Description of Artificial Sequence: Synthetic oligonucleotide
  Sense strand starting at position 2841 of SEQ ID NO: 2690
agagaugucaguugacaaa

SEQ ID NO: 208925 - RNA, 19 nt, Artificial Sequence
  Description of Artificial Sequence: Synthetic oligonucleotide
  Antisense strand to SEQ ID NO: 208924
uuugucaacugacaucucu

SEQ ID NO: 208926 - RNA, 19 nt, Artificial Sequence
  Description of Artificial Sequence: Synthetic oligonucleotide
  Sense strand starting at position 2884 of SEQ ID NO: 2690
uugugacacagugguaaga

SEQ ID NO: 208927 - RNA, 19 nt, Artificial Sequence
  Description of Artificial Sequence: Synthetic oligonucleotide
  Antisense strand to SEQ ID NO: 208926
ucuuaccacugugucacaa

SEQ ID NO: 208928 - RNA, 19 nt, Artificial Sequence
  Description of Artificial Sequence: Synthetic oligonucleotide
  Sense strand starting at position 2937 of SEQ ID NO: 2690
cagaaugaguuucucugaa

SEQ ID NO: 208929 - RNA, 19 nt, Artificial Sequence
  Description of Artificial Sequence: Synthetic oligonucleotide
  Antisense strand to SEQ ID NO: 208928
uucagagaaacucauucug

SEQ ID NO: 208930 - RNA, 19 nt, Artificial Sequence
  Description of Artificial Sequence: Synthetic oligonucleotide
  Sense strand starting at position 2939 of SEQ ID NO: 2690
gaaugaguuucucugaagu

SEQ ID NO: 208931 - RNA, 19 nt, Artificial Sequence
  Description of Artificial Sequence: Synthetic oligonucleotide
  Antisense strand to SEQ ID NO: 208930
acuucagagaaacucauuc

SEQ ID NO: 208932 - RNA, 19 nt, Artificial Sequence
  Description of Artificial Sequence: Synthetic oligonucleotide
  Sense strand starting at position 3092 of SEQ ID NO: 2690
ucugcagacucagcuuaaa

SEQ ID NO: 208933 - RNA, 19 nt, Artificial Sequence
  Description of Artificial Sequence: Synthetic oligonucleotide
  Antisense strand to SEQ ID NO: 208932
uuuaagcugagucugcaga

SEQ ID NO: 208934 - RNA, 19 nt, Artificial Sequence
  Description of Artificial Sequence: Synthetic oligonucleotide
  Sense strand starting at position 3095 of SEQ ID NO: 2690
gcagacucagcuuaaauau

SEQ ID NO: 208935 - RNA, 19 nt, Artificial Sequence
  Description of Artificial Sequence: Synthetic oligonucleotide
  Antisense strand to SEQ ID NO: 208934
auauuuaagcugagucugc

SEQ ID NO: 208936 - RNA, 19 nt, Artificial Sequence
  Description of Artificial Sequence: Synthetic oligonucleotide
  Sense strand starting at position 3294 of SEQ ID NO: 2690
caggcauaguccuuccaga

SEQ ID NO: 208937 - RNA, 19 nt, Artificial Sequence
  Description of Artificial Sequence: Synthetic oligonucleotide
  Antisense strand to SEQ ID NO: 208936
ucuggaaggacuaugccug

SEQ ID NO: 208938 - RNA, 19 nt, Artificial Sequence
  Description of Artificial Sequence: Synthetic oligonucleotide
  Sense strand starting at position 3299 of SEQ ID NO: 2690
auaguccuuccagagcauu

SEQ ID NO: 208939 - RNA, 19 nt, Artificial Sequence
  Description of Artificial Sequence: Synthetic oligonucleotide
  Antisense strand to SEQ ID NO: 208938
aaugcucuggaaggacuau

SEQ ID NO: 208940 - RNA, 19 nt, Artificial Sequence
  Description of Artificial Sequence: Synthetic oligonucleotide
  Sense strand starting at position 3340 of SEQ ID NO: 2690
aggucaaauuuauagugaa

SEQ ID NO: 208941 - RNA, 19 nt, Artificial Sequence
  Description of Artificial Sequence: Synthetic oligonucleotide
  Antisense strand to SEQ ID NO: 208940
uucacuauaaauuugaccu

SEQ ID NO: 208942 - RNA, 19 nt, Artificial Sequence
  Description of Artificial Sequence: Synthetic oligonucleotide
  Sense strand starting at position 3474 of SEQ ID NO: 2690
augugcuuccuccaccaua

SEQ ID NO: 208943 - RNA, 19 nt, Artificial Sequence
  Description of Artificial Sequence: Synthetic oligonucleotide
  Antisense strand to SEQ ID NO: 208942
uaugguggaggaagcacau

SEQ ID NO: 208944 - RNA, 19 nt, Artificial Sequence
  Description of Artificial Sequence: Synthetic oligonucleotide
  Sense strand starting at position 3657 of SEQ ID NO: 2690
ucgggauaaucccuuaaga

SEQ ID NO: 208945 - RNA, 19 nt, Artificial Sequence
  Description of Artificial Sequence: Synthetic oligonucleotide
  Antisense strand to SEQ ID NO: 208944
ucuuaagggauuaucccga

SEQ ID NO: 208946 - RNA, 19 nt, Artificial Sequence
  Description of Artificial Sequence: Synthetic oligonucleotide
  Sense strand starting at position 3686 of SEQ ID NO: 2690
acagauuccucaucuguga

SEQ ID NO: 208947 - RNA, 19 nt, Artificial Sequence
  Description of Artificial Sequence: Synthetic oligonucleotide
  Antisense strand to SEQ ID NO: 208946
ucacagaugaggaaucugu

SEQ ID NO: 208948 - RNA, 19 nt, Artificial Sequence
  Description of Artificial Sequence: Synthetic oligonucleotide
  Sense strand starting at position 77 of SEQ ID NO: 2692
ccuaaacugccucgaucaa

SEQ ID NO: 208949 - RNA, 19 nt, Artificial Sequence
  Description of Artificial Sequence: Synthetic oligonucleotide
  Antisense strand to SEQ ID NO: 208948
uugaucgaggcaguuuagg

SEQ ID NO: 208950 - RNA, 19 nt, Artificial Sequence
  Description of Artificial Sequence: Synthetic oligonucleotide
  Sense strand starting at position 78 of SEQ ID NO: 2692
cuaaacugccucgaucaau

SEQ ID NO: 208951 - RNA, 19 nt, Artificial Sequence
  Description of Artificial Sequence: Synthetic oligonucleotide
  Antisense strand to SEQ ID NO: 208950
auugaucgaggcaguuuag

SEQ ID NO: 208952 - RNA, 19 nt, Artificial Sequence
  Description of Artificial Sequence: Synthetic oligonucleotide
  Sense strand starting at position 99 of SEQ ID NO: 2692
cgcugucaccucuauguua

SEQ ID NO: 208953 - RNA, 19 nt, Artificial Sequence
  Description of Artificial Sequence: Synthetic oligonucleotide
  Antisense strand to SEQ ID NO: 208952
uaacauagaggugacagcg

SEQ ID NO: 208954 - RNA, 19 nt, Artificial Sequence
  Description of Artificial Sequence: Synthetic oligonucleotide
  Sense strand starting at position 101 of SEQ ID NO: 2692
cugucaccucuauguuauc

SEQ ID NO: 208955 - RNA, 19 nt, Artificial Sequence
  Description of Artificial Sequence: Synthetic oligonucleotide
  Antisense strand to SEQ ID NO: 208954
gauaacauagaggugacag

SEQ ID NO: 208956 - RNA, 19 nt, Artificial Sequence
  Description of Artificial Sequence: Synthetic oligonucleotide
  Sense strand starting at position 129 of SEQ ID NO: 2692
gggcuucucuuggucccaa

SEQ ID NO: 208957 - RNA, 19 nt, Artificial Sequence
  Description of Artificial Sequence: Synthetic oligonucleotide
  Antisense strand to SEQ ID NO: 208956
uugggaccaagagaagccc

SEQ ID NO: 208958 - RNA, 19 nt, Artificial Sequence
  Description of Artificial Sequence: Synthetic oligonucleotide
  Sense strand starting at position 421 of SEQ ID NO: 2692
cuccgccucccagaagaau

SEQ ID NO: 208959 - RNA, 19 nt, Artificial Sequence
  Description of Artificial Sequence: Synthetic oligonucleotide
  Antisense strand to SEQ ID NO: 208958
auucuucugggaggcggag

SEQ ID NO: 208960 - RNA, 19 nt, Artificial Sequence
  Description of Artificial Sequence: Synthetic oligonucleotide
  Sense strand starting at position 607 of SEQ ID NO: 2692
gcauguugaucccuccacu

SEQ ID NO: 208961 - RNA, 19 nt, Artificial Sequence
  Description of Artificial Sequence: Synthetic oligonucleotide
  Antisense strand to SEQ ID NO: 208960
aguggagggaucaacaugc

SEQ ID NO: 208962 - RNA, 19 nt, Artificial Sequence
  Description of Artificial Sequence: Synthetic oligonucleotide
  Sense strand starting at position 610 of SEQ ID NO: 2692
uguugaucccuccacuauc

SEQ ID NO: 208963 - RNA, 19 nt, Artificial Sequence
  Description of Artificial Sequence: Synthetic oligonucleotide
  Antisense strand to SEQ ID NO: 208962
gauaguggagggaucaaca

SEQ ID NO: 208964 - RNA, 19 nt, Artificial Sequence
  Description of Artificial Sequence: Synthetic oligonucleotide
  Sense strand starting at position 714 of SEQ ID NO: 2692
ccuaacagucgucaagcua

SEQ ID NO: 208965 - RNA, 19 nt, Artificial Sequence
  Description of Artificial Sequence: Synthetic oligonucleotide
  Antisense strand to SEQ ID NO: 208964
uagcuugacgacuguuagg

SEQ ID NO: 208966 - RNA, 19 nt, Artificial Sequence
  Description of Artificial Sequence: Synthetic oligonucleotide
  Sense strand starting at position 1039 of SEQ ID NO: 2692
aguuccagcucuguucgaa

SEQ ID NO: 208967 - RNA, 19 nt, Artificial Sequence
  Description of Artificial Sequence: Synthetic oligonucleotide
  Antisense strand to SEQ ID NO: 208966
uucgaacagagcuggaacu

SEQ ID NO: 208968 - RNA, 19 nt, Artificial Sequence
  Description of Artificial Sequence: Synthetic oligonucleotide
  Sense strand starting at position 1070 of SEQ ID NO: 2692
ucaguugucuccgcuaaga

SEQ ID NO: 208969 - RNA, 19 nt, Artificial Sequence
  Description of Artificial Sequence: Synthetic oligonucleotide
  Antisense strand to SEQ ID NO: 208968
ucuuagcggagacaacuga

SEQ ID NO: 208970 - RNA, 19 nt, Artificial Sequence
  Description of Artificial Sequence: Synthetic oligonucleotide
  Sense strand starting at position 1192 of SEQ ID NO: 2692
gugccauuucuagguguua

SEQ ID NO: 208971 - RNA, 19 nt, Artificial Sequence
  Description of Artificial Sequence: Synthetic oligonucleotide
  Antisense strand to SEQ ID NO: 208970
uaacaccuagaaauggcac

SEQ ID NO: 208972 - RNA, 19 nt, Artificial Sequence
  Description of Artificial Sequence: Synthetic oligonucleotide
  Sense strand starting at position 1197 of SEQ ID NO: 2692
auuucuagguguuacaacu

SEQ ID NO: 208973 - RNA, 19 nt, Artificial Sequence
  Description of Artificial Sequence: Synthetic oligonucleotide
  Antisense strand to SEQ ID NO: 208972
aguuguaacaccuagaaau

SEQ ID NO: 208974 - RNA, 19 nt, Artificial Sequence
  Description of Artificial Sequence: Synthetic oligonucleotide
  Sense strand starting at position 1203 of SEQ ID NO: 2692
agguguuacaacuggaaag

SEQ ID NO: 208975 - RNA, 19 nt, Artificial Sequence
  Description of Artificial Sequence: Synthetic oligonucleotide
  Antisense strand to SEQ ID NO: 208974
cuuuccaguuguaacaccu

SEQ ID NO: 208976 - RNA, 19 nt, Artificial Sequence
  Description of Artificial Sequence: Synthetic oligonucleotide
  Sense strand starting at position 2312 of SEQ ID NO: 2692
ggccgaguugcgucgcaga

SEQ ID NO: 208977 - RNA, 19 nt, Artificial Sequence
  Description of Artificial Sequence: Synthetic oligonucleotide
  Antisense strand to SEQ ID NO: 208976
ucugcgacgcaacucggcc

SEQ ID NO: 208978 - RNA, 19 nt, Artificial Sequence
  Description of Artificial Sequence: Synthetic oligonucleotide
  Sense strand starting at position 2314 of SEQ ID NO: 2692
ccgaguugcgucgcagacu

SEQ ID NO: 208979 - RNA, 19 nt, Artificial Sequence
  Description of Artificial Sequence: Synthetic oligonucleotide
  Antisense strand to SEQ ID NO: 208978
agucugcgacgcaacucgg

SEQ ID NO: 208980 - RNA, 19 nt, Artificial Sequence
  Description of Artificial Sequence: Synthetic oligonucleotide
  Sense strand starting at position 2548 of SEQ ID NO: 2692
gacagcuguuugcuaccua

SEQ ID NO: 208981 - RNA, 19 nt, Artificial Sequence
  Description of Artificial Sequence: Synthetic oligonucleotide
  Antisense strand to SEQ ID NO: 208980
uagguagcaaacagcuguc

SEQ ID NO: 208982 - RNA, 19 nt, Artificial Sequence
  Description of Artificial Sequence: Synthetic oligonucleotide
  Sense strand starting at position 2552 of SEQ ID NO: 2692
gcuguuugcuaccuaauag

SEQ ID NO: 208983 - RNA, 19 nt, Artificial Sequence
  Description of Artificial Sequence: Synthetic oligonucleotide
  Antisense strand to SEQ ID NO: 208982
cuauuagguagcaaacagc

SEQ ID NO: 208984 - RNA, 19 nt, Artificial Sequence
  Description of Artificial Sequence: Synthetic oligonucleotide
  Sense strand starting at position 2678 of SEQ ID NO: 2692
cugugauguguuugggagu

SEQ ID NO: 208985 - RNA, 19 nt, Artificial Sequence
  Description of Artificial Sequence: Synthetic oligonucleotide
  Antisense strand to SEQ ID NO: 208984
acucccaaacacaucacag

SEQ ID NO: 208986 - RNA, 19 nt, Artificial Sequence
  Description of Artificial Sequence: Synthetic oligonucleotide
  Sense strand starting at position 2793 of SEQ ID NO: 2692
gguugaacgcucuacaucu

SEQ ID NO: 208987 - RNA, 19 nt, Artificial Sequence
  Description of Artificial Sequence: Synthetic oligonucleotide
  Antisense strand to SEQ ID NO: 208986
agauguagagcguucaacc

SEQ ID NO: 208988 - RNA, 19 nt, Artificial Sequence
  Description of Artificial Sequence: Synthetic oligonucleotide
  Sense strand starting at position 2795 of SEQ ID NO: 2692
uugaacgcucuacaucuua

SEQ ID NO: 208989 - RNA, 19 nt, Artificial Sequence
  Description of Artificial Sequence: Synthetic oligonucleotide
  Antisense strand to SEQ ID NO: 208988
uaagauguagagcguucaa

SEQ ID NO: 208990 - RNA, 19 nt, Artificial Sequence
  Description of Artificial Sequence: Synthetic oligonucleotide
  Sense strand starting at position 2959 of SEQ ID NO: 2692
gauagugauccugggaccu

SEQ ID NO: 208991 - RNA, 19 nt, Artificial Sequence
  Description of Artificial Sequence: Synthetic oligonucleotide
  Antisense strand to SEQ ID NO: 208990
aggucccaggaucacuauc

SEQ ID NO: 208992 - RNA, 19 nt, Artificial Sequence
  Description of Artificial Sequence: Synthetic oligonucleotide
  Sense strand starting at position 2970 of SEQ ID NO: 2692
ugggaccugcucgaggauu

SEQ ID NO: 208993 - RNA, 19 nt, Artificial Sequence
  Description of Artificial Sequence: Synthetic oligonucleotide
  Antisense strand to SEQ ID NO: 208992
aauccucgagcagguccca

SEQ ID NO: 208994 - RNA, 19 nt, Artificial Sequence
  Description of Artificial Sequence: Synthetic oligonucleotide
  Sense strand starting at position 2972 of SEQ ID NO: 2692
ggaccugcucgaggauuca

SEQ ID NO: 208995 - RNA, 19 nt, Artificial Sequence
  Description of Artificial Sequence: Synthetic oligonucleotide
  Antisense strand to SEQ ID NO: 208994
ugaauccucgagcaggucc

SEQ ID NO: 208996 - RNA, 19 nt, Artificial Sequence
  Description of Artificial Sequence: Synthetic oligonucleotide
  Sense strand starting at position 3009 of SEQ ID NO: 2692
guuccauucccaggaauga

SEQ ID NO: 208997 - RNA, 19 nt, Artificial Sequence
  Description of Artificial Sequence: Synthetic oligonucleotide
  Antisense strand to SEQ ID NO: 208996
ucauuccugggaauggaac

SEQ ID NO: 208998 - RNA, 19 nt, Artificial Sequence
  Description of Artificial Sequence: Synthetic oligonucleotide
  Sense strand starting at position 3143 of SEQ ID NO: 2692
uaucaaggauggucacauu

SEQ ID NO: 208999 - RNA, 19 nt, Artificial Sequence
  Description of Artificial Sequence: Synthetic oligonucleotide
  Antisense strand to SEQ ID NO: 208998
aaugugaccauccuugaua

SEQ ID NO: 209000 - RNA, 19 nt, Artificial Sequence
  Description of Artificial Sequence: Synthetic oligonucleotide
  Sense strand starting at position 3146 of SEQ ID NO: 2692
caaggauggucacauugaa

SEQ ID NO: 209001 - RNA, 19 nt, Artificial Sequence
  Description of Artificial Sequence: Synthetic oligonucleotide
  Antisense strand to SEQ ID NO: 209000
uucaaugugaccauccuug

SEQ ID NO: 209002 - RNA, 19 nt, Artificial Sequence
  Description of Artificial Sequence: Synthetic oligonucleotide
  Sense strand starting at position 3343 of SEQ ID NO: 2692
ggcccagagugcuuaugua

SEQ ID NO: 209003 - RNA, 19 nt, Artificial Sequence
  Description of Artificial Sequence: Synthetic oligonucleotide
  Antisense strand to SEQ ID NO: 209002
uacauaagcacucugggcc

SEQ ID NO: 209004 - RNA, 19 nt, Artificial Sequence
  Description of Artificial Sequence: Synthetic oligonucleotide
  Sense strand starting at position 3362 of SEQ ID NO: 2692
cuugccucggucugagaaa

SEQ ID NO: 209005 - RNA, 19 nt, Artificial Sequence
  Description of Artificial Sequence: Synthetic oligonucleotide
  Antisense strand to SEQ ID NO: 209004
uuucucagaccgaggcaag

SEQ ID NO: 209006 - RNA, 19 nt, Artificial Sequence
  Description of Artificial Sequence: Synthetic oligonucleotide
  Sense strand starting at position 3428 of SEQ ID NO: 2692
auguuucaucuccgggaug

SEQ ID NO: 209007 - RNA, 19 nt, Artificial Sequence
  Description of Artificial Sequence: Synthetic oligonucleotide
  Antisense strand to SEQ ID NO: 209006
caucccggagaugaaacau

SEQ ID NO: 209008 - RNA, 19 nt, Artificial Sequence
  Description of Artificial Sequence: Synthetic oligonucleotide
  Sense strand starting at position 3430 of SEQ ID NO: 2692
guuucaucuccgggaugcu

SEQ ID NO: 209009 - RNA, 19 nt, Artificial Sequence
  Description of Artificial Sequence: Synthetic oligonucleotide
  Antisense strand to SEQ ID NO: 209008
agcaucccggagaugaaac

SEQ ID NO: 209010 - RNA, 19 nt, Artificial Sequence
  Description of Artificial Sequence: Synthetic oligonucleotide
  Sense strand starting at position 3474 of SEQ ID NO: 2692
ggugcugacucuuccggaa

SEQ ID NO: 209011 - RNA, 19 nt, Artificial Sequence
  Description of Artificial Sequence: Synthetic oligonucleotide
  Antisense strand to SEQ ID NO: 209010
uuccggaagagucagcacc

SEQ ID NO: 209012 - RNA, 19 nt, Artificial Sequence
  Description of Artificial Sequence: Synthetic oligonucleotide
  Sense strand starting at position 3486 of SEQ ID NO: 2692
uccggaagauguuucugau

SEQ ID NO: 209013 - RNA, 19 nt, Artificial Sequence
  Description of Artificial Sequence: Synthetic oligonucleotide
  Antisense strand to SEQ ID NO: 209012
aucagaaacaucuuccgga

SEQ ID NO: 209014 - RNA, 19 nt, Artificial Sequence
  Description of Artificial Sequence: Synthetic oligonucleotide
  Sense strand starting at position 3571 of SEQ ID NO: 2692
cuaggagucccggaggagu

SEQ ID NO: 209015 - RNA, 19 nt, Artificial Sequence
  Description of Artificial Sequence: Synthetic oligonucleotide
  Antisense strand to SEQ ID NO: 209014
acuccuccgggacuccuag

SEQ ID NO: 209016 - RNA, 19 nt, Artificial Sequence
  Description of Artificial Sequence: Synthetic oligonucleotide
  Sense strand starting at position 3606 of SEQ ID NO: 2692
uccuguucugggcacauau

SEQ ID NO: 209017 - RNA, 19 nt, Artificial Sequence
  Description of Artificial Sequence: Synthetic oligonucleotide
  Antisense strand to SEQ ID NO: 209016
auaugugcccagaacagga

SEQ ID NO: 209018 - RNA, 19 nt, Artificial Sequence
  Description of Artificial Sequence: Synthetic oligonucleotide
  Sense strand starting at position 3733 of SEQ ID NO: 2692
uggccacaucuguguccaa

SEQ ID NO: 209019 - RNA, 19 nt, Artificial Sequence
  Description of Artificial Sequence: Synthetic oligonucleotide
  Antisense strand to SEQ ID NO: 209018
uuggacacagauguggcca

SEQ ID NO: 209020 - RNA, 19 nt, Artificial Sequence
  Description of Artificial Sequence: Synthetic oligonucleotide
  Sense strand starting at position 3913 of SEQ ID NO: 2692
gccucaaugaggcaguguu

SEQ ID NO: 209021 - RNA, 19 nt, Artificial Sequence
  Description of Artificial Sequence: Synthetic oligonucleotide
  Antisense strand to SEQ ID NO: 209020
aacacugccucauugaggc

SEQ ID NO: 209022 - RNA, 19 nt, Artificial Sequence
  Description of Artificial Sequence: Synthetic oligonucleotide
  Sense strand starting at position 3947 of SEQ ID NO: 2692
guaggaggaguuuggguaa

SEQ ID NO: 209023 - RNA, 19 nt, Artificial Sequence
  Description of Artificial Sequence: Synthetic oligonucleotide
  Antisense strand to SEQ ID NO: 209022
uuacccaaacuccuccuac

SEQ ID NO: 209024 - RNA, 19 nt, Artificial Sequence
  Description of Artificial Sequence: Synthetic oligonucleotide
  Sense strand starting at position 3950 of SEQ ID NO: 2692
ggaggaguuuggguaauag

SEQ ID NO: 209025 - RNA, 19 nt, Artificial Sequence
  Description of Artificial Sequence: Synthetic oligonucleotide
  Antisense strand to SEQ ID NO: 209024
cuauuacccaaacuccucc

SEQ ID NO: 209026 - RNA, 19 nt, Artificial Sequence
  Description of Artificial Sequence: Synthetic oligonucleotide
  Sense strand starting at position 3977 of SEQ ID NO: 2692
cccucauggauagguuagu

SEQ ID NO: 209027 - RNA, 19 nt, Artificial Sequence
  Description of Artificial Sequence: Synthetic oligonucleotide
  Antisense strand to SEQ ID NO: 209026
acuaaccuauccaugaggg

SEQ ID NO: 209028 - RNA, 19 nt, Artificial Sequence
  Description of Artificial Sequence: Synthetic oligonucleotide
  Sense strand starting at position 103 of SEQ ID NO: 2693
aagugcuuuccauauagga

SEQ ID NO: 209029 - RNA, 19 nt, Artificial Sequence
  Description of Artificial Sequence: Synthetic oligonucleotide
  Antisense strand to SEQ ID NO: 209028
uccuauauggaaagcacuu

SEQ ID NO: 209030 - RNA, 19 nt, Artificial Sequence
  Description of Artificial Sequence: Synthetic oligonucleotide
  Sense strand starting at position 155 of SEQ ID NO: 2693
agauuacuguugcuaccau

SEQ ID NO: 209031 - RNA, 19 nt, Artificial Sequence
  Description of Artificial Sequence: Synthetic oligonucleotide
  Antisense strand to SEQ ID NO: 209030
augguagcaacaguaaucu

SEQ ID NO: 209032 - RNA, 19 nt, Artificial Sequence
  Description of Artificial Sequence: Synthetic oligonucleotide
  Sense strand starting at position 168 of SEQ ID NO: 2693
uaccaugucuuagugauga

SEQ ID NO: 209033 - RNA, 19 nt, Artificial Sequence
  Description of Artificial Sequence: Synthetic oligonucleotide
  Antisense strand to SEQ ID NO: 209032
ucaucacuaagacauggua

SEQ ID NO: 209034 - RNA, 19 nt, Artificial Sequence
  Description of Artificial Sequence: Synthetic oligonucleotide
  Sense strand starting at position 631 of SEQ ID NO: 2693
ggcuuaaugugugcauuuc

SEQ ID NO: 209035 - RNA, 19 nt, Artificial Sequence
  Description of Artificial Sequence: Synthetic oligonucleotide
  Antisense strand to SEQ ID NO: 209034
gaaaugcacacauuaagcc

SEQ ID NO: 209036 - RNA, 19 nt, Artificial Sequence
  Description of Artificial Sequence: Synthetic oligonucleotide
  Sense strand starting at position 632 of SEQ ID NO: 2693
gcuuaaugugugcauuucu

SEQ ID NO: 209037 - RNA, 19 nt, Artificial Sequence
  Description of Artificial Sequence: Synthetic oligonucleotide
  Antisense strand to SEQ ID NO: 209036
agaaaugcacacauuaagc

SEQ ID NO: 209038 - RNA, 19 nt, Artificial Sequence
  Description of Artificial Sequence: Synthetic oligonucleotide
  Sense strand starting at position 673 of SEQ ID NO: 2693
guguucuuucaagagggua

SEQ ID NO: 209039 - RNA, 19 nt, Artificial Sequence
  Description of Artificial Sequence: Synthetic oligonucleotide
  Antisense strand to SEQ ID NO: 209038
uacccucuugaaagaacac

SEQ ID NO: 209040 - RNA, 19 nt, Artificial Sequence
  Description of Artificial Sequence: Synthetic oligonucleotide
  Sense strand starting at position 752 of SEQ ID NO: 2693
ccagcucugucauuugcau

SEQ ID NO: 209041 - RNA, 19 nt, Artificial Sequence
  Description of Artificial Sequence: Synthetic oligonucleotide
  Antisense strand to SEQ ID NO: 209040
augcaaaugacagagcugg

SEQ ID NO: 209042 - RNA, 19 nt, Artificial Sequence
  Description of Artificial Sequence: Synthetic oligonucleotide
  Sense strand starting at position 765 of SEQ ID NO: 2693
uugcaucugguauaaacuu

SEQ ID NO: 209043 - RNA, 19 nt, Artificial Sequence
  Description of Artificial Sequence: Synthetic oligonucleotide
  Antisense strand to SEQ ID NO: 209042
aaguuuauaccagaugcaa

SEQ ID NO: 209044 - RNA, 19 nt, Artificial Sequence
  Description of Artificial Sequence: Synthetic oligonucleotide
  Sense strand starting at position 875 of SEQ ID NO: 2693
guugguagauuauuacauu

SEQ ID NO: 209045 - RNA, 19 nt, Artificial Sequence
  Description of Artificial Sequence: Synthetic oligonucleotide
  Antisense strand to SEQ ID NO: 209044
aauguaauaaucuaccaac

SEQ ID NO: 209046 - RNA, 19 nt, Artificial Sequence
  Description of Artificial Sequence: Synthetic oligonucleotide
  Sense strand starting at position 1032 of SEQ ID NO: 2693
agaggauaaucugauugaa

SEQ ID NO: 209047 - RNA, 19 nt, Artificial Sequence
  Description of Artificial Sequence: Synthetic oligonucleotide
  Antisense strand to SEQ ID NO: 209046
uucaaucagauuauccucu

SEQ ID NO: 209048 - RNA, 19 nt, Artificial Sequence
  Description of Artificial Sequence: Synthetic oligonucleotide
  Sense strand starting at position 1086 of SEQ ID NO: 2693
guguuugugacccaggaca

SEQ ID NO: 209049 - RNA, 19 nt, Artificial Sequence
  Description of Artificial Sequence: Synthetic oligonucleotide
  Antisense strand to SEQ ID NO: 209048
uguccugggucacaaacac

SEQ ID NO: 209050 - RNA, 19 nt, Artificial Sequence
  Description of Artificial Sequence: Synthetic oligonucleotide
  Sense strand starting at position 1088 of SEQ ID NO: 2693
guuugugacccaggacaaa

SEQ ID NO: 209051 - RNA, 19 nt, Artificial Sequence
  Description of Artificial Sequence: Synthetic oligonucleotide
  Antisense strand to SEQ ID NO: 209050
uuuguccugggucacaaac

SEQ ID NO: 209052 - RNA, 19 nt, Artificial Sequence
  Description of Artificial Sequence: Synthetic oligonucleotide
  Sense strand starting at position 1203 of SEQ ID NO: 2693
ggaacugucucccugagaa

SEQ ID NO: 209053 - RNA, 19 nt, Artificial Sequence
  Description of Artificial Sequence: Synthetic oligonucleotide
  Antisense strand to SEQ ID NO: 209052
uucucagggagacaguucc

SEQ ID NO: 209054 - RNA, 19 nt, Artificial Sequence
  Description of Artificial Sequence: Synthetic oligonucleotide
  Sense strand starting at position 1321 of SEQ ID NO: 2693
ugaaguuguaaugaucugu

SEQ ID NO: 209055 - RNA, 19 nt, Artificial Sequence
  Description of Artificial Sequence: Synthetic oligonucleotide
  Antisense strand to SEQ ID NO: 209054
acagaucauuacaacuuca

SEQ ID NO: 209056 - RNA, 19 nt, Artificial Sequence
  Description of Artificial Sequence: Synthetic oligonucleotide
  Sense strand starting at position 1345 of SEQ ID NO: 2693
gugauuaacccagaguugu

SEQ ID NO: 209057 - RNA, 19 nt, Artificial Sequence
  Description of Artificial Sequence: Synthetic oligonucleotide
  Antisense strand to SEQ ID NO: 209056
acaacucuggguuaaucac

SEQ ID NO: 209058 - RNA, 19 nt, Artificial Sequence
  Description of Artificial Sequence: Synthetic oligonucleotide
  Sense strand starting at position 1561 of SEQ ID NO: 2693
ucagaaaucgaaggugaca

SEQ ID NO: 209059 - RNA, 19 nt, Artificial Sequence
  Description of Artificial Sequence: Synthetic oligonucleotide
  Antisense strand to SEQ ID NO: 209058
ugucaccuucgauuucuga

SEQ ID NO: 209060 - RNA, 19 nt, Artificial Sequence
  Description of Artificial Sequence: Synthetic oligonucleotide
  Sense strand starting at position 1611 of SEQ ID NO: 2693
auaugcaaaguuuggauua

SEQ ID NO: 209061 - RNA, 19 nt, Artificial Sequence
  Description of Artificial Sequence: Synthetic oligonucleotide
  Antisense strand to SEQ ID NO: 209060
uaauccaaacuuugcauau

SEQ ID NO: 209062 - RNA, 19 nt, Artificial Sequence
  Description of Artificial Sequence: Synthetic oligonucleotide
  Sense strand starting at position 1623 of SEQ ID NO: 2693
uggauuagauucucuuaga

SEQ ID NO: 209063 - RNA, 19 nt, Artificial Sequence
  Description of Artificial Sequence: Synthetic oligonucleotide
  Antisense strand to SEQ ID NO: 209062
ucuaagagaaucuaaucca

SEQ ID NO: 209064 - RNA, 19 nt, Artificial Sequence
  Description of Artificial Sequence: Synthetic oligonucleotide
  Sense strand starting at position 1725 of SEQ ID NO: 2693
cugaauauguaccuuggga

SEQ ID NO: 209065 - RNA, 19 nt, Artificial Sequence
  Description of Artificial Sequence: Synthetic oligonucleotide
  Antisense strand to SEQ ID NO: 209064
ucccaagguacauauucag

SEQ ID NO: 209066 - RNA, 19 nt, Artificial Sequence
  Description of Artificial Sequence: Synthetic oligonucleotide
  Sense strand starting at position 1765 of SEQ ID NO: 2693
ucaugaagcucucuagaaa

SEQ ID NO: 209067 - RNA, 19 nt, Artificial Sequence
  Description of Artificial Sequence: Synthetic oligonucleotide
  Antisense strand to SEQ ID NO: 209066
uuucuagagagcuucauga

SEQ ID NO: 209068 - RNA, 19 nt, Artificial Sequence
  Description of Artificial Sequence: Synthetic oligonucleotide
  Sense strand starting at position 1787 of SEQ ID NO: 2693
guacaugcucacuaauguu

SEQ ID NO: 209069 - RNA, 19 nt, Artificial Sequence
  Description of Artificial Sequence: Synthetic oligonucleotide
  Antisense strand to SEQ ID NO: 209068
aacauuagugagcauguac

SEQ ID NO: 209070 - RNA, 19 nt, Artificial Sequence
  Description of Artificial Sequence: Synthetic oligonucleotide
  Sense strand starting at position 2021 of SEQ ID NO: 2693
uccuuauauggguguacca

SEQ ID NO: 209071 - RNA, 19 nt, Artificial Sequence
  Description of Artificial Sequence: Synthetic oligonucleotide
  Antisense strand to SEQ ID NO: 209070
ugguacacccauauaagga

SEQ ID NO: 209072 - RNA, 19 nt, Artificial Sequence
  Description of Artificial Sequence: Synthetic oligonucleotide
  Sense strand starting at position 2559 of SEQ ID NO: 2693
agagaugaggcguguaaag

SEQ ID NO: 209073 - RNA, 19 nt, Artificial Sequence
  Description of Artificial Sequence: Synthetic oligonucleotide
  Antisense strand to SEQ ID NO: 209072
cuuuacacgccucaucucu

SEQ ID NO: 209074 - RNA, 19 nt, Artificial Sequence
  Description of Artificial Sequence: Synthetic oligonucleotide
  Sense strand starting at position 2561 of SEQ ID NO: 2693
agaugaggcguguaaagug

SEQ ID NO: 209075 - RNA, 19 nt, Artificial Sequence
  Description of Artificial Sequence: Synthetic oligonucleotide
  Antisense strand to SEQ ID NO: 209074
cacuuuacacgccucaucu

SEQ ID NO: 209076 - RNA, 19 nt, Artificial Sequence
  Description of Artificial Sequence: Synthetic oligonucleotide
  Sense strand starting at position 2712 of SEQ ID NO: 2693
ugcuauaggcaauaaugau

SEQ ID NO: 209077 - RNA, 19 nt, Artificial Sequence
  Description of Artificial Sequence: Synthetic oligonucleotide
  Antisense strand to SEQ ID NO: 209076
aucauuauugccuauagca

SEQ ID NO: 209078 - RNA, 19 nt, Artificial Sequence
  Description of Artificial Sequence: Synthetic oligonucleotide
  Sense strand starting at position 2771 of SEQ ID NO: 2693
aacuguuaugacuggucca

SEQ ID NO: 209079 - RNA, 19 nt, Artificial Sequence
  Description of Artificial Sequence: Synthetic oligonucleotide
  Antisense strand to SEQ ID NO: 209078
uggaccagucauaacaguu

SEQ ID NO: 209080 - RNA, 19 nt, Artificial Sequence
  Description of Artificial Sequence: Synthetic oligonucleotide
  Sense strand starting at position 2813 of SEQ ID NO: 2693
agggauauuuggcacauga

SEQ ID NO: 209081 - RNA, 19 nt, Artificial Sequence
  Description of Artificial Sequence: Synthetic oligonucleotide
  Antisense strand to SEQ ID NO: 209080
ucaugugccaaauaucccu

SEQ ID NO: 209082 - RNA, 19 nt, Artificial Sequence
  Description of Artificial Sequence: Synthetic oligonucleotide
  Sense strand starting at position 2931 of SEQ ID NO: 2693
cuauuaauccgugagcuga

SEQ ID NO: 209083 - RNA, 19 nt, Artificial Sequence
  Description of Artificial Sequence: Synthetic oligonucleotide
  Antisense strand to SEQ ID NO: 209082
ucagcucacggauuaauag

SEQ ID NO: 209084 - RNA, 19 nt, Artificial Sequence
  Description of Artificial Sequence: Synthetic oligonucleotide
  Sense strand starting at position 2939 of SEQ ID NO: 2693
ccgugagcugaggauuaug

SEQ ID NO: 209085 - RNA, 19 nt, Artificial Sequence
  Description of Artificial Sequence: Synthetic oligonucleotide
  Antisense strand to SEQ ID NO: 209084
cauaauccucagcucacgg

SEQ ID NO: 209086 - RNA, 19 nt, Artificial Sequence
  Description of Artificial Sequence: Synthetic oligonucleotide
  Sense strand starting at position 2950 of SEQ ID NO: 2693
ggauuaugaugcuuacccu

SEQ ID NO: 209087 - RNA, 19 nt, Artificial Sequence
  Description of Artificial Sequence: Synthetic oligonucleotide
  Antisense strand to SEQ ID NO: 209086
aggguaagcaucauaaucc

SEQ ID NO: 209088 - RNA, 19 nt, Artificial Sequence
  Description of Artificial Sequence: Synthetic oligonucleotide
  Sense strand starting at position 2989 of SEQ ID NO: 2693
gugggauuccugcauccca

SEQ ID NO: 209089 - RNA, 19 nt, Artificial Sequence
  Description of Artificial Sequence: Synthetic oligonucleotide
  Antisense strand to SEQ ID NO: 209088
ugggaugcaggaaucccac

SEQ ID NO: 209090 - RNA, 19 nt, Artificial Sequence
  Description of Artificial Sequence: Synthetic oligonucleotide
  Sense strand starting at position 3072 of SEQ ID NO: 2693
gcauaaacaucaucaguga

SEQ ID NO: 209091 - RNA, 19 nt, Artificial Sequence
  Description of Artificial Sequence: Synthetic oligonucleotide
  Antisense strand to SEQ ID NO: 209090
ucacugaugauguuuaugc

SEQ ID NO: 209092 - RNA, 19 nt, Artificial Sequence
  Description of Artificial Sequence: Synthetic oligonucleotide
  Sense strand starting at position 3086 of SEQ ID NO: 2693
agugaauaaauacgcagau

SEQ ID NO: 209093 - RNA, 19 nt, Artificial Sequence
  Description of Artificial Sequence: Synthetic oligonucleotide
  Antisense strand to SEQ ID NO: 209092
aucugcguauuuauucacu

SEQ ID NO: 209094 - RNA, 19 nt, Artificial Sequence
  Description of Artificial Sequence: Synthetic oligonucleotide
  Sense strand starting at position 3087 of SEQ ID NO: 2693
gugaauaaauacgcagaua

SEQ ID NO: 209095 - RNA, 19 nt, Artificial Sequence
  Description of Artificial Sequence: Synthetic oligonucleotide
  Antisense strand to SEQ ID NO: 209094
uaucugcguauuuauucac

SEQ ID NO: 209096 - RNA, 19 nt, Artificial Sequence
  Description of Artificial Sequence: Synthetic oligonucleotide
  Sense strand starting at position 3131 of SEQ ID NO: 2693
uuacuaauagagcaugcaa

SEQ ID NO: 209097 - RNA, 19 nt, Artificial Sequence
  Description of Artificial Sequence: Synthetic oligonucleotide
  Antisense strand to SEQ ID NO: 209096
uugcaugcucuauuaguaa

SEQ ID NO: 209098 - RNA, 19 nt, Artificial Sequence
  Description of Artificial Sequence: Synthetic oligonucleotide
  Sense strand starting at position 3158 of SEQ ID NO: 2693
guuggaaagccauaguuuc

SEQ ID NO: 209099 - RNA, 19 nt, Artificial Sequence
  Description of Artificial Sequence: Synthetic oligonucleotide
  Antisense strand to SEQ ID NO: 209098
gaaacuauggcuuuccaac

SEQ ID NO: 209100 - RNA, 19 nt, Artificial Sequence
  Description of Artificial Sequence: Synthetic oligonucleotide
  Sense strand starting at position 3433 of SEQ ID NO: 2693
gauaauugugccggaagaa

SEQ ID NO: 209101 - RNA, 19 nt, Artificial Sequence
  Description of Artificial Sequence: Synthetic oligonucleotide
  Antisense strand to SEQ ID NO: 209100
uucuuccggcacaauuauc

SEQ ID NO: 209102 - RNA, 19 nt, Artificial Sequence
  Description of Artificial Sequence: Synthetic oligonucleotide
  Sense strand starting at position 3434 of SEQ ID NO: 2693
auaauugugccggaagaau

SEQ ID NO: 209103 - RNA, 19 nt, Artificial Sequence
  Description of Artificial Sequence: Synthetic oligonucleotide
  Antisense strand to SEQ ID NO: 209102
auucuuccggcacaauuau

SEQ ID NO: 209104 - RNA, 19 nt, Artificial Sequence
  Description of Artificial Sequence: Synthetic oligonucleotide
  Sense strand starting at position 3872 of SEQ ID NO: 2693
acuaccugugucuaccaaa

SEQ ID NO: 209105 - RNA, 19 nt, Artificial Sequence
  Description of Artificial Sequence: Synthetic oligonucleotide
  Antisense strand to SEQ ID NO: 209104
uuugguagacacagguagu

SEQ ID NO: 209106 - RNA, 19 nt, Artificial Sequence
  Description of Artificial Sequence: Synthetic oligonucleotide
  Sense strand starting at position 3933 of SEQ ID NO: 2693
gcuguucuucgagugccaa

SEQ ID NO: 209107 - RNA, 19 nt, Artificial Sequence
  Description of Artificial Sequence: Synthetic oligonucleotide
  Antisense strand to SEQ ID NO: 209106
uuggcacucgaagaacagc

SEQ ID NO: 209108 - RNA, 19 nt, Artificial Sequence
  Description of Artificial Sequence: Synthetic oligonucleotide
  Sense strand starting at position 133 of SEQ ID NO: 2694
agagaaugcugguuaacag

SEQ ID NO: 209109 - RNA, 19 nt, Artificial Sequence
  Description of Artificial Sequence: Synthetic oligonucleotide
  Antisense strand to SEQ ID NO: 209108
cuguuaaccagcauucucu

SEQ ID NO: 209110 - RNA, 19 nt, Artificial Sequence
  Description of Artificial Sequence: Synthetic oligonucleotide
  Sense strand starting at position 230 of SEQ ID NO: 2694
agaucaaaguaugcaguua

SEQ ID NO: 209111 - RNA, 19 nt, Artificial Sequence
  Description of Artificial Sequence: Synthetic oligonucleotide
  Antisense strand to SEQ ID NO: 209110
uaacugcauacuuugaucu

SEQ ID NO: 209112 - RNA, 19 nt, Artificial Sequence
  Description of Artificial Sequence: Synthetic oligonucleotide
  Sense strand starting at position 688 of SEQ ID NO: 2694
uagaaauuagcuuaguggu

SEQ ID NO: 209113 - RNA, 19 nt, Artificial Sequence
  Description of Artificial Sequence: Synthetic oligonucleotide
  Antisense strand to SEQ ID NO: 209112
accacuaagcuaauuucua

SEQ ID NO: 209114 - RNA, 19 nt, Artificial Sequence
  Description of Artificial Sequence: Synthetic oligonucleotide
  Sense strand starting at position 722 of SEQ ID NO: 2694
gcgaucuaucaccaaacca

SEQ ID NO: 209115 - RNA, 19 nt, Artificial Sequence
  Description of Artificial Sequence: Synthetic oligonucleotide
  Antisense strand to SEQ ID NO: 209114
ugguuuggugauagaucgc

SEQ ID NO: 209116 - RNA, 19 nt, Artificial Sequence
  Description of Artificial Sequence: Synthetic oligonucleotide
  Sense strand starting at position 885 of SEQ ID NO: 2694
ggcauugcccuagauggua

SEQ ID NO: 209117 - RNA, 19 nt, Artificial Sequence
  Description of Artificial Sequence: Synthetic oligonucleotide
  Antisense strand to SEQ ID NO: 209116
uaccaucuagggcaaugcc

SEQ ID NO: 209118 - RNA, 19 nt, Artificial Sequence
  Description of Artificial Sequence: Synthetic oligonucleotide
  Sense strand starting at position 1016 of SEQ ID NO: 2694
ugaaauggccaguaccuaa

SEQ ID NO: 209119 - RNA, 19 nt, Artificial Sequence
  Description of Artificial Sequence: Synthetic oligonucleotide
  Antisense strand to SEQ ID NO: 209118
uuagguacuggccauuuca

SEQ ID NO: 209120 - RNA, 19 nt, Artificial Sequence
  Description of Artificial Sequence: Synthetic oligonucleotide
  Sense strand starting at position 1079 of SEQ ID NO: 2694
cccuaucaggccuggaaga

SEQ ID NO: 209121 - RNA, 19 nt, Artificial Sequence
  Description of Artificial Sequence: Synthetic oligonucleotide
  Antisense strand to SEQ ID NO: 209120
ucuuccaggccugauaggg

SEQ ID NO: 209122 - RNA, 19 nt, Artificial Sequence
  Description of Artificial Sequence: Synthetic oligonucleotide
  Sense strand starting at position 1080 of SEQ ID NO: 2694
ccuaucaggccuggaagau

SEQ ID NO: 209123 - RNA, 19 nt, Artificial Sequence
  Description of Artificial Sequence: Synthetic oligonucleotide
  Antisense strand to SEQ ID NO: 209122
aucuuccaggccugauagg

SEQ ID NO: 209124 - RNA, 19 nt, Artificial Sequence
  Description of Artificial Sequence: Synthetic oligonucleotide
  Sense strand starting at position 1106 of SEQ ID NO: 2694
ggcugaaacacuuagguac

SEQ ID NO: 209125 - RNA, 19 nt, Artificial Sequence
  Description of Artificial Sequence: Synthetic oligonucleotide
  Antisense strand to SEQ ID NO: 209124
guaccuaaguguuucagcc

SEQ ID NO: 209126 - RNA, 19 nt, Artificial Sequence
  Description of Artificial Sequence: Synthetic oligonucleotide
  Sense strand starting at position 1202 of SEQ ID NO: 2694
uggaguccuccagagcuuu

SEQ ID NO: 209127 - RNA, 19 nt, Artificial Sequence
  Description of Artificial Sequence: Synthetic oligonucleotide
  Antisense strand to SEQ ID NO: 209126
aaagcucuggaggacucca

SEQ ID NO: 209128 - RNA, 19 nt, Artificial Sequence
  Description of Artificial Sequence: Synthetic oligonucleotide
  Sense strand starting at position 1212 of SEQ ID NO: 2694
cagagcuuugaggagugau

SEQ ID NO: 209129 - RNA, 19 nt, Artificial Sequence
  Description of Artificial Sequence: Synthetic oligonucleotide
  Antisense strand to SEQ ID NO: 209128
aucacuccucaaagcucug

SEQ ID NO: 209130 - RNA, 19 nt, Artificial Sequence
  Description of Artificial Sequence: Synthetic oligonucleotide
  Sense strand starting at position 1225 of SEQ ID NO: 2694
agugauuuccagugcccau

SEQ ID NO: 209131 - RNA, 19 nt, Artificial Sequence
  Description of Artificial Sequence: Synthetic oligonucleotide
  Antisense strand to SEQ ID NO: 209130
augggcacuggaaaucacu

SEQ ID NO: 209132 - RNA, 19 nt, Artificial Sequence
  Description of Artificial Sequence: Synthetic oligonucleotide
  Sense strand starting at position 1412 of SEQ ID NO: 2694
agccucacugcuuaucaga

SEQ ID NO: 209133 - RNA, 19 nt, Artificial Sequence
  Description of Artificial Sequence: Synthetic oligonucleotide
  Antisense strand to SEQ ID NO: 209132
ucugauaagcagugaggcu

SEQ ID NO: 209134 - RNA, 19 nt, Artificial Sequence
  Description of Artificial Sequence: Synthetic oligonucleotide
  Sense strand starting at position 1465 of SEQ ID NO: 2694
cccauaaggccucagugau

SEQ ID NO: 209135 - RNA, 19 nt, Artificial Sequence
  Description of Artificial Sequence: Synthetic oligonucleotide
  Antisense strand to SEQ ID NO: 209134
aucacugaggccuuauggg

SEQ ID NO: 209136 - RNA, 19 nt, Artificial Sequence
  Description of Artificial Sequence: Synthetic oligonucleotide
  Sense strand starting at position 1540 of SEQ ID NO: 2694
gccuauguucugggaaaug

SEQ ID NO: 209137 - RNA, 19 nt, Artificial Sequence
  Description of Artificial Sequence: Synthetic oligonucleotide
  Antisense strand to SEQ ID NO: 209136
cauuucccagaacauaggc

SEQ ID NO: 209138 - RNA, 19 nt, Artificial Sequence
  Description of Artificial Sequence: Synthetic oligonucleotide
  Sense strand starting at position 1626 of SEQ ID NO: 2694
agaaauuacccaggcccaa

SEQ ID NO: 209139 - RNA, 19 nt, Artificial Sequence
  Description of Artificial Sequence: Synthetic oligonucleotide
  Antisense strand to SEQ ID NO: 209138
uugggccuggguaauuucu

SEQ ID NO: 209140 - RNA, 19 nt, Artificial Sequence
  Description of Artificial Sequence: Synthetic oligonucleotide
  Sense strand starting at position 1694 of SEQ ID NO: 2694
gaagucuauuccucaaggu

SEQ ID NO: 209141 - RNA, 19 nt, Artificial Sequence
  Description of Artificial Sequence: Synthetic oligonucleotide
  Antisense strand to SEQ ID NO: 209140
accuugaggaauagacuuc

SEQ ID NO: 209142 - RNA, 19 nt, Artificial Sequence
  Description of Artificial Sequence: Synthetic oligonucleotide
  Sense strand starting at position 1949 of SEQ ID NO: 2694
gcucuaaucccggugcagu

SEQ ID NO: 209143 - RNA, 19 nt, Artificial Sequence
  Description of Artificial Sequence: Synthetic oligonucleotide
  Antisense strand to SEQ ID NO: 209142
acugcaccgggauuagagc

SEQ ID NO: 209144 - RNA, 19 nt, Artificial Sequence
  Description of Artificial Sequence: Synthetic oligonucleotide
  Sense strand starting at position 2077 of SEQ ID NO: 2694
uguguucucuggaagggag

SEQ ID NO: 209145 - RNA, 19 nt, Artificial Sequence
  Description of Artificial Sequence: Synthetic oligonucleotide
  Antisense strand to SEQ ID NO: 209144
cucccuuccagagaacaca

SEQ ID NO: 209146 - RNA, 19 nt, Artificial Sequence
  Description of Artificial Sequence: Synthetic oligonucleotide
  Sense strand starting at position 2173 of SEQ ID NO: 2694
ucaguaaugccuuaaugag

SEQ ID NO: 209147 - RNA, 19 nt, Artificial Sequence
  Description of Artificial Sequence: Synthetic oligonucleotide
  Antisense strand to SEQ ID NO: 209146
cucauuaaggcauuacuga

SEQ ID NO: 209148 - RNA, 19 nt, Artificial Sequence
  Description of Artificial Sequence: Synthetic oligonucleotide
  Sense strand starting at position 2337 of SEQ ID NO: 2694
ccuguacaucccuauguuu

SEQ ID NO: 209149 - RNA, 19 nt, Artificial Sequence
  Description of Artificial Sequence: Synthetic oligonucleotide
  Antisense strand to SEQ ID NO: 209148
aaacauagggauguacagg

SEQ ID NO: 209150 - RNA, 19 nt, Artificial Sequence
  Description of Artificial Sequence: Synthetic oligonucleotide
  Sense strand starting at position 2340 of SEQ ID NO: 2694
guacaucccuauguuuaaa

SEQ ID NO: 209151 - RNA, 19 nt, Artificial Sequence
  Description of Artificial Sequence: Synthetic oligonucleotide
  Antisense strand to SEQ ID NO: 209150
uuuaaacauagggauguac

SEQ ID NO: 209152 - RNA, 19 nt, Artificial Sequence
  Description of Artificial Sequence: Synthetic oligonucleotide
  Sense strand starting at position 2828 of SEQ ID NO: 2694
ccaggaggugcucaauaug

SEQ ID NO: 209153 - RNA, 19 nt, Artificial Sequence
  Description of Artificial Sequence: Synthetic oligonucleotide
  Antisense strand to SEQ ID NO: 209152
cauauugagcaccuccugg

SEQ ID NO: 209154 - RNA, 19 nt, Artificial Sequence
  Description of Artificial Sequence: Synthetic oligonucleotide
  Sense strand starting at position 2840 of SEQ ID NO: 2694
caauaugugucaguggaau

SEQ ID NO: 209155 - RNA, 19 nt, Artificial Sequence
  Description of Artificial Sequence: Synthetic oligonucleotide
  Antisense strand to SEQ ID NO: 209154
auuccacugacacauauug

SEQ ID NO: 209156 - RNA, 19 nt, Artificial Sequence
  Description of Artificial Sequence: Synthetic oligonucleotide
  Sense strand starting at position 2875 of SEQ ID NO: 2694
uggaaauccucuguccucu

SEQ ID NO: 209157 - RNA, 19 nt, Artificial Sequence
  Description of Artificial Sequence: Synthetic oligonucleotide
  Antisense strand to SEQ ID NO: 209156
agaggacagaggauuucca

SEQ ID NO: 209158 - RNA, 19 nt, Artificial Sequence
  Description of Artificial Sequence: Synthetic oligonucleotide
  Sense strand starting at position 3072 of SEQ ID NO: 2694
gcagaaucucauggaaucu

SEQ ID NO: 209159 - RNA, 19 nt, Artificial Sequence
  Description of Artificial Sequence: Synthetic oligonucleotide
  Antisense strand to SEQ ID NO: 209158
agauuccaugagauucugc

SEQ ID NO: 209160 - RNA, 19 nt, Artificial Sequence
  Description of Artificial Sequence: Synthetic oligonucleotide
  Sense strand starting at position 3156 of SEQ ID NO: 2694
uggcaacucgcccaagaua

SEQ ID NO: 209161 - RNA, 19 nt, Artificial Sequence
  Description of Artificial Sequence: Synthetic oligonucleotide
  Antisense strand to SEQ ID NO: 209160
uaucuugggcgaguugcca

SEQ ID NO: 209162 - RNA, 19 nt, Artificial Sequence
  Description of Artificial Sequence: Synthetic oligonucleotide
  Sense strand starting at position 3181 of SEQ ID NO: 2694
gccaguaaacagcagagau

SEQ ID NO: 209163 - RNA, 19 nt, Artificial Sequence
  Description of Artificial Sequence: Synthetic oligonucleotide
  Antisense strand to SEQ ID NO: 209162
aucucugcuguuuacuggc

SEQ ID NO: 209164 - RNA, 19 nt, Artificial Sequence
  Description of Artificial Sequence: Synthetic oligonucleotide
  Sense strand starting at position 3238 of SEQ ID NO: 2694
uccucaucuuugucaagga

SEQ ID NO: 209165 - RNA, 19 nt, Artificial Sequence
  Description of Artificial Sequence: Synthetic oligonucleotide
  Antisense strand to SEQ ID NO: 209164
uccuugacaaagaugagga

SEQ ID NO: 209166 - RNA, 19 nt, Artificial Sequence
  Description of Artificial Sequence: Synthetic oligonucleotide
  Sense strand starting at position 3242 of SEQ ID NO: 2694
caucuuugucaaggaauug

SEQ ID NO: 209167 - RNA, 19 nt, Artificial Sequence
  Description of Artificial Sequence: Synthetic oligonucleotide
  Antisense strand to SEQ ID NO: 209166
caauuccuugacaaagaug

SEQ ID NO: 209168 - RNA, 19 nt, Artificial Sequence
  Description of Artificial Sequence: Synthetic oligonucleotide
  Sense strand starting at position 3290 of SEQ ID NO: 2694
agcuuucuuccugagcuaa

SEQ ID NO: 209169 - RNA, 19 nt, Artificial Sequence
  Description of Artificial Sequence: Synthetic oligonucleotide
  Antisense strand to SEQ ID NO: 209168
uuagcucaggaagaaagcu

SEQ ID NO: 209170 - RNA, 19 nt, Artificial Sequence
  Description of Artificial Sequence: Synthetic oligonucleotide
  Sense strand starting at position 3374 of SEQ ID NO: 2694
agguguuaugaggauagca

SEQ ID NO: 209171 - RNA, 19 nt, Artificial Sequence
  Description of Artificial Sequence: Synthetic oligonucleotide
  Antisense strand to SEQ ID NO: 209170
ugcuauccucauaacaccu

SEQ ID NO: 209172 - RNA, 19 nt, Artificial Sequence
  Description of Artificial Sequence: Synthetic oligonucleotide
  Sense strand starting at position 3376 of SEQ ID NO: 2694
guguuaugaggauagcaga

SEQ ID NO: 209173 - RNA, 19 nt, Artificial Sequence
  Description of Artificial Sequence: Synthetic oligonucleotide
  Antisense strand to SEQ ID NO: 209172
ucugcuauccucauaacac

SEQ ID NO: 209174 - RNA, 19 nt, Artificial Sequence
  Description of Artificial Sequence: Synthetic oligonucleotide
  Sense strand starting at position 3571 of SEQ ID NO: 2694
caggguuaggcucacucua

SEQ ID NO: 209175 - RNA, 19 nt, Artificial Sequence
  Description of Artificial Sequence: Synthetic oligonucleotide
  Antisense strand to SEQ ID NO: 209174
uagagugagccuaacccug

SEQ ID NO: 209176 - RNA, 19 nt, Artificial Sequence
  Description of Artificial Sequence: Synthetic oligonucleotide
  Sense strand starting at position 3696 of SEQ ID NO: 2694
gugacaacucuugaaaguu

SEQ ID NO: 209177 - RNA, 19 nt, Artificial Sequence
  Description of Artificial Sequence: Synthetic oligonucleotide
  Antisense strand to SEQ ID NO: 209176
aacuuucaagaguugucac

SEQ ID NO: 209178 - RNA, 19 nt, Artificial Sequence
  Description of Artificial Sequence: Synthetic oligonucleotide
  Sense strand starting at position 3816 of SEQ ID NO: 2694
gacugucacccaggacaga

SEQ ID NO: 209179 - RNA, 19 nt, Artificial Sequence
  Description of Artificial Sequence: Synthetic oligonucleotide
  Antisense strand to SEQ ID NO: 209178
ucuguccugggugacaguc

SEQ ID NO: 209180 - RNA, 19 nt, Artificial Sequence
  Description of Artificial Sequence: Synthetic oligonucleotide
  Sense strand starting at position 3832 of SEQ ID NO: 2694
agacuaguaugccugagaa

SEQ ID NO: 209181 - RNA, 19 nt, Artificial Sequence
  Description of Artificial Sequence: Synthetic oligonucleotide
  Antisense strand to SEQ ID NO: 209180
uucucaggcauacuagucu

SEQ ID NO: 209182 - RNA, 19 nt, Artificial Sequence
  Description of Artificial Sequence: Synthetic oligonucleotide
  Sense strand starting at position 3946 of SEQ ID NO: 2694
guuggcaaguuugugauuu

SEQ ID NO: 209183 - RNA, 19 nt, Artificial Sequence
  Description of Artificial Sequence: Synthetic oligonucleotide
  Antisense strand to SEQ ID NO: 209182
aaaucacaaacuugccaac

SEQ ID NO: 209184 - RNA, 19 nt, Artificial Sequence
  Description of Artificial Sequence: Synthetic oligonucleotide
  Sense strand starting at position 3977 of SEQ ID NO: 2694
uuacuuucccguggaaaca

SEQ ID NO: 209185 - RNA, 19 nt, Artificial Sequence
  Description of Artificial Sequence: Synthetic oligonucleotide
  Antisense strand to SEQ ID NO: 209184
uguuuccacgggaaaguaa

SEQ ID NO: 209186 - RNA, 19 nt, Artificial Sequence
  Description of Artificial Sequence: Synthetic oligonucleotide
  Sense strand starting at position 3978 of SEQ ID NO: 2694
uacuuucccguggaaacaa

SEQ ID NO: 209187 - RNA, 19 nt, Artificial Sequence
  Description of Artificial Sequence: Synthetic oligonucleotide
  Antisense strand to SEQ ID NO: 209186
uuguuuccacgggaaagua

SEQ ID NO: 209188 - RNA, 19 nt, Artificial Sequence
  Description of Artificial Sequence: Synthetic oligonucleotide
  Sense strand starting at position 183 of SEQ ID NO: 2695
aaacauaaugcuggguauu

SEQ ID NO: 209189 - RNA, 19 nt, Artificial Sequence
  Description of Artificial Sequence: Synthetic oligonucleotide
  Antisense strand to SEQ ID NO: 209188
aauacccagcauuauguuu

SEQ ID NO: 209190 - RNA, 19 nt, Artificial Sequence
  Description of Artificial Sequence: Synthetic oligonucleotide
  Sense strand starting at position 193 of SEQ ID NO: 2695
cuggguauuuaguuauguu

SEQ ID NO: 209191 - RNA, 19 nt, Artificial Sequence
  Description of Artificial Sequence: Synthetic oligonucleotide
  Antisense strand to SEQ ID NO: 209190
aacauaacuaaauacccag

SEQ ID NO: 209192 - RNA, 19 nt, Artificial Sequence
  Description of Artificial Sequence: Synthetic oligonucleotide
  Sense strand starting at position 203 of SEQ ID NO: 2695
aguuauguugaaugcuaaa

SEQ ID NO: 209193 - RNA, 19 nt, Artificial Sequence
  Description of Artificial Sequence: Synthetic oligonucleotide
  Antisense strand to SEQ ID NO: 209192
uuuagcauucaacauaacu

SEQ ID NO: 209194 - RNA, 19 nt, Artificial Sequence
  Description of Artificial Sequence: Synthetic oligonucleotide
  Sense strand starting at position 236 of SEQ ID NO: 2695
aacuaaaggucuccgucaa

SEQ ID NO: 209195 - RNA, 19 nt, Artificial Sequence
  Description of Artificial Sequence: Synthetic oligonucleotide
  Antisense strand to SEQ ID NO: 209194
uugacggagaccuuuaguu

SEQ ID NO: 209196 - RNA, 19 nt, Artificial Sequence
  Description of Artificial Sequence: Synthetic oligonucleotide
  Sense strand starting at position 237 of SEQ ID NO: 2695
acuaaaggucuccgucaaa

SEQ ID NO: 209197 - RNA, 19 nt, Artificial Sequence
  Description of Artificial Sequence: Synthetic oligonucleotide
  Antisense strand to SEQ ID NO: 209196
uuugacggagaccuuuagu

SEQ ID NO: 209198 - RNA, 19 nt, Artificial Sequence
  Description of Artificial Sequence: Synthetic oligonucleotide
  Sense strand starting at position 240 of SEQ ID NO: 2695
aaaggucuccgucaaauga

SEQ ID NO: 209199 - RNA, 19 nt, Artificial Sequence
  Description of Artificial Sequence: Synthetic oligonucleotide
  Antisense strand to SEQ ID NO: 209198
ucauuugacggagaccuuu

SEQ ID NO: 209200 - RNA, 19 nt, Artificial Sequence
  Description of Artificial Sequence: Synthetic oligonucleotide
  Sense strand starting at position 386 of SEQ ID NO: 2695
gguacuguauauucucauu

SEQ ID NO: 209201 - RNA, 19 nt, Artificial Sequence
  Description of Artificial Sequence: Synthetic oligonucleotide
  Antisense strand to SEQ ID NO: 209200
aaugagaauauacaguacc

SEQ ID NO: 209202 - RNA, 19 nt, Artificial Sequence
  Description of Artificial Sequence: Synthetic oligonucleotide
  Sense strand starting at position 437 of SEQ ID NO: 2695
uuaaccugcuggucaauua

SEQ ID NO: 209203 - RNA, 19 nt, Artificial Sequence
  Description of Artificial Sequence: Synthetic oligonucleotide
  Antisense strand to SEQ ID NO: 209202
uaauugaccagcagguuaa

SEQ ID NO: 209204 - RNA, 19 nt, Artificial Sequence
  Description of Artificial Sequence: Synthetic oligonucleotide
  Sense strand starting at position 545 of SEQ ID NO: 2695
ucagaugcccaagacuuau

SEQ ID NO: 209205 - RNA, 19 nt, Artificial Sequence
  Description of Artificial Sequence: Synthetic oligonucleotide
  Antisense strand to SEQ ID NO: 209204
auaagucuugggcaucuga

SEQ ID NO: 209206 - RNA, 19 nt, Artificial Sequence
  Description of Artificial Sequence: Synthetic oligonucleotide
  Sense strand starting at position 642 of SEQ ID NO: 2695
aagugaucuccugggacuu

SEQ ID NO: 209207 - RNA, 19 nt, Artificial Sequence
  Description of Artificial Sequence: Synthetic oligonucleotide
  Antisense strand to SEQ ID NO: 209206
aagucccaggagaucacuu

SEQ ID NO: 209208 - RNA, 19 nt, Artificial Sequence
  Description of Artificial Sequence: Synthetic oligonucleotide
  Sense strand starting at position 796 of SEQ ID NO: 2695
uccgaugccgcaguuaauu

SEQ ID NO: 209209 - RNA, 19 nt, Artificial Sequence
  Description of Artificial Sequence: Synthetic oligonucleotide
  Antisense strand to SEQ ID NO: 209208
aauuaacugcggcaucgga

SEQ ID NO: 209210 - RNA, 19 nt, Artificial Sequence
  Description of Artificial Sequence: Synthetic oligonucleotide
  Sense strand starting at position 844 of SEQ ID NO: 2695
agguuaaucaaguagcaga

SEQ ID NO: 209211 - RNA, 19 nt, Artificial Sequence
  Description of Artificial Sequence: Synthetic oligonucleotide
  Antisense strand to SEQ ID NO: 209210
ucugcuacuugauuaaccu

SEQ ID NO: 209212 - RNA, 19 nt, Artificial Sequence
  Description of Artificial Sequence: Synthetic oligonucleotide
  Sense strand starting at position 911 of SEQ ID NO: 2695
cuacaaaggugaguaaacu

SEQ ID NO: 209213 - RNA, 19 nt, Artificial Sequence
  Description of Artificial Sequence: Synthetic oligonucleotide
  Antisense strand to SEQ ID NO: 209212
aguuuacucaccuuuguag

SEQ ID NO: 209214 - RNA, 19 nt, Artificial Sequence
  Description of Artificial Sequence: Synthetic oligonucleotide
  Sense strand starting at position 1038 of SEQ ID NO: 2695
acauuaggcgucuaccuua

SEQ ID NO: 209215 - RNA, 19 nt, Artificial Sequence
  Description of Artificial Sequence: Synthetic oligonucleotide
  Antisense strand to SEQ ID NO: 209214
uaagguagacgccuaaugu

SEQ ID NO: 209216 - RNA, 19 nt, Artificial Sequence
  Description of Artificial Sequence: Synthetic oligonucleotide
  Sense strand starting at position 2109 of SEQ ID NO: 2695
gagccucugguugggaaua

SEQ ID NO: 209217 - RNA, 19 nt, Artificial Sequence
  Description of Artificial Sequence: Synthetic oligonucleotide
  Antisense strand to SEQ ID NO: 209216
uauucccaaccagaggcuc

SEQ ID NO: 209218 - RNA, 19 nt, Artificial Sequence
  Description of Artificial Sequence: Synthetic oligonucleotide
  Sense strand starting at position 2114 of SEQ ID NO: 2695
ucugguugggaauauguau

SEQ ID NO: 209219 - RNA, 19 nt, Artificial Sequence
  Description of Artificial Sequence: Synthetic oligonucleotide
  Antisense strand to SEQ ID NO: 209218
auacauauucccaaccaga

SEQ ID NO: 209220 - RNA, 19 nt, Artificial Sequence
  Description of Artificial Sequence: Synthetic oligonucleotide
  Sense strand starting at position 2186 of SEQ ID NO: 2695
uuugauaucuggcuggagu

SEQ ID NO: 209221 - RNA, 19 nt, Artificial Sequence
  Description of Artificial Sequence: Synthetic oligonucleotide
  Antisense strand to SEQ ID NO: 209220
acuccagccagauaucaaa

SEQ ID NO: 209222 - RNA, 19 nt, Artificial Sequence
  Description of Artificial Sequence: Synthetic oligonucleotide
  Sense strand starting at position 2187 of SEQ ID NO: 2695
uugauaucuggcuggaguc

SEQ ID NO: 209223 - RNA, 19 nt, Artificial Sequence
  Description of Artificial Sequence: Synthetic oligonucleotide
  Antisense strand to SEQ ID NO: 209222
gacuccagccagauaucaa

SEQ ID NO: 209224 - RNA, 19 nt, Artificial Sequence
  Description of Artificial Sequence: Synthetic oligonucleotide
  Sense strand starting at position 2189 of SEQ ID NO: 2695
gauaucuggcuggagucua

SEQ ID NO: 209225 - RNA, 19 nt, Artificial Sequence
  Description of Artificial Sequence: Synthetic oligonucleotide
  Antisense strand to SEQ ID NO: 209224
uagacuccagccagauauc

SEQ ID NO: 209226 - RNA, 19 nt, Artificial Sequence
  Description of Artificial Sequence: Synthetic oligonucleotide
  Sense strand starting at position 2318 of SEQ ID NO: 2695
aggagcuguguuugaacua

SEQ ID NO: 209227 - RNA, 19 nt, Artificial Sequence
  Description of Artificial Sequence: Synthetic oligonucleotide
  Antisense strand to SEQ ID NO: 209226
uaguucaaacacagcuccu

SEQ ID NO: 209228 - RNA, 19 nt, Artificial Sequence
  Description of Artificial Sequence: Synthetic oligonucleotide
  Sense strand starting at position 2385 of SEQ ID NO: 2695
ggauuugagugggaucuuu

SEQ ID NO: 209229 - RNA, 19 nt, Artificial Sequence
  Description of Artificial Sequence: Synthetic oligonucleotide
  Antisense strand to SEQ ID NO: 209228
aaagaucccacucaaaucc

SEQ ID NO: 209230 - RNA, 19 nt, Artificial Sequence
  Description of Artificial Sequence: Synthetic oligonucleotide
  Sense strand starting at position 2432 of SEQ ID NO: 2695
ugggaagaauucuaacaau

SEQ ID NO: 209231 - RNA, 19 nt, Artificial Sequence
  Description of Artificial Sequence: Synthetic oligonucleotide
  Antisense strand to SEQ ID NO: 209230
auuguuagaauucuuccca

SEQ ID NO: 209232 - RNA, 19 nt, Artificial Sequence
  Description of Artificial Sequence: Synthetic oligonucleotide
  Sense strand starting at position 2499 of SEQ ID NO: 2695
cuccuaaaucuaggaguag

SEQ ID NO: 209233 - RNA, 19 nt, Artificial Sequence
  Description of Artificial Sequence: Synthetic oligonucleotide
  Antisense strand to SEQ ID NO: 209232
cuacuccuagauuuaggag

SEQ ID NO: 209234 - RNA, 19 nt, Artificial Sequence
  Description of Artificial Sequence: Synthetic oligonucleotide
  Sense strand starting at position 2562 of SEQ ID NO: 2695
gugcuuucugcagaggaga

SEQ ID NO: 209235 - RNA, 19 nt, Artificial Sequence
  Description of Artificial Sequence: Synthetic oligonucleotide
  Antisense strand to SEQ ID NO: 209234
ucuccucugcagaaagcac

SEQ ID NO: 209236 - RNA, 19 nt, Artificial Sequence
  Description of Artificial Sequence: Synthetic oligonucleotide
  Sense strand starting at position 2683 of SEQ ID NO: 2695
ucguguugugggucugcua

SEQ ID NO: 209237 - RNA, 19 nt, Artificial Sequence
  Description of Artificial Sequence: Synthetic oligonucleotide
  Antisense strand to SEQ ID NO: 209236
uagcagacccacaacacga

SEQ ID NO: 209238 - RNA, 19 nt, Artificial Sequence
  Description of Artificial Sequence: Synthetic oligonucleotide
  Sense strand starting at position 2684 of SEQ ID NO: 2695
cguguugugggucugcuaa

SEQ ID NO: 209239 - RNA, 19 nt, Artificial Sequence
  Description of Artificial Sequence: Synthetic oligonucleotide
  Antisense strand to SEQ ID NO: 209238
uuagcagacccacaacacg

SEQ ID NO: 209240 - RNA, 19 nt, Artificial Sequence
  Description of Artificial Sequence: Synthetic oligonucleotide
  Sense strand starting at position 2760 of SEQ ID NO: 2695
acgcuucuacacugauaac

SEQ ID NO: 209241 - RNA, 19 nt, Artificial Sequence
  Description of Artificial Sequence: Synthetic oligonucleotide
  Antisense strand to SEQ ID NO: 209240
guuaucaguguagaagcgu

SEQ ID NO: 209242 - RNA, 19 nt, Artificial Sequence
  Description of Artificial Sequence: Synthetic oligonucleotide
  Sense strand starting at position 2840 of SEQ ID NO: 2695
uugguaugaccuuguggau

SEQ ID NO: 209243 - RNA, 19 nt, Artificial Sequence
  Description of Artificial Sequence: Synthetic oligonucleotide
  Antisense strand to SEQ ID NO: 209242
auccacaaggucauaccaa

SEQ ID NO: 209244 - RNA, 19 nt, Artificial Sequence
  Description of Artificial Sequence: Synthetic oligonucleotide
  Sense strand starting at position 2893 of SEQ ID NO: 2695
uucugagauuaccugcuuu

SEQ ID NO: 209245 - RNA, 19 nt, Artificial Sequence
  Description of Artificial Sequence: Synthetic oligonucleotide
  Antisense strand to SEQ ID NO: 209244
aaagcagguaaucucagaa

SEQ ID NO: 209246 - RNA, 19 nt, Artificial Sequence
  Description of Artificial Sequence: Synthetic oligonucleotide
  Sense strand starting at position 2939 of SEQ ID NO: 2695
uuugaauugugagugugga

SEQ ID NO: 209247 - RNA, 19 nt, Artificial Sequence
  Description of Artificial Sequence: Synthetic oligonucleotide
  Antisense strand to SEQ ID NO: 209246
uccacacucacaauucaaa

SEQ ID NO: 209248 - RNA, 19 nt, Artificial Sequence
  Description of Artificial Sequence: Synthetic oligonucleotide
  Sense strand starting at position 2979 of SEQ ID NO: 2695
uugcuuucugaaugaaaca

SEQ ID NO: 209249 - RNA, 19 nt, Artificial Sequence
  Description of Artificial Sequence: Synthetic oligonucleotide
  Antisense strand to SEQ ID NO: 209248
uguuucauucagaaagcaa

SEQ ID NO: 209250 - RNA, 19 nt, Artificial Sequence
  Description of Artificial Sequence: Synthetic oligonucleotide
  Sense strand starting at position 3308 of SEQ ID NO: 2695
cuuggauuggcugagucaa

SEQ ID NO: 209251 - RNA, 19 nt, Artificial Sequence
  Description of Artificial Sequence: Synthetic oligonucleotide
  Antisense strand to SEQ ID NO: 209250
uugacucagccaauccaag

SEQ ID NO: 209252 - RNA, 19 nt, Artificial Sequence
  Description of Artificial Sequence: Synthetic oligonucleotide
  Sense strand starting at position 3310 of SEQ ID NO: 2695
uggauuggcugagucaaca

SEQ ID NO: 209253 - RNA, 19 nt, Artificial Sequence
  Description of Artificial Sequence: Synthetic oligonucleotide
  Antisense strand to SEQ ID NO: 209252
uguugacucagccaaucca

SEQ ID NO: 209254 - RNA, 19 nt, Artificial Sequence
  Description of Artificial Sequence: Synthetic oligonucleotide
  Sense strand starting at position 3355 of SEQ ID NO: 2695
ugauaauauuugucguguu

SEQ ID NO: 209255 - RNA, 19 nt, Artificial Sequence
  Description of Artificial Sequence: Synthetic oligonucleotide
  Antisense strand to SEQ ID NO: 209254
aacacgacaaauauuauca

SEQ ID NO: 209256 - RNA, 19 nt, Artificial Sequence
  Description of Artificial Sequence: Synthetic oligonucleotide
  Sense strand starting at position 3378 of SEQ ID NO: 2695
agcuaaaguuagccauaaa

SEQ ID NO: 209257 - RNA, 19 nt, Artificial Sequence
  Description of Artificial Sequence: Synthetic oligonucleotide
  Antisense strand to SEQ ID NO: 209256
uuuauggcuaacuuuagcu

SEQ ID NO: 209258 - RNA, 19 nt, Artificial Sequence
  Description of Artificial Sequence: Synthetic oligonucleotide
  Sense strand starting at position 3513 of SEQ ID NO: 2695
aucaaugcaccugaguaua

SEQ ID NO: 209259 - RNA, 19 nt, Artificial Sequence
  Description of Artificial Sequence: Synthetic oligonucleotide
  Antisense strand to SEQ ID NO: 209258
uauacucaggugcauugau

SEQ ID NO: 209260 - RNA, 19 nt, Artificial Sequence
  Description of Artificial Sequence: Synthetic oligonucleotide
  Sense strand starting at position 3521 of SEQ ID NO: 2695
accugaguauauguacuua

SEQ ID NO: 209261 - RNA, 19 nt, Artificial Sequence
  Description of Artificial Sequence: Synthetic oligonucleotide
  Antisense strand to SEQ ID NO: 209260
uaaguacauauacucaggu

SEQ ID NO: 209262 - RNA, 19 nt, Artificial Sequence
  Description of Artificial Sequence: Synthetic oligonucleotide
  Sense strand starting at position 3567 of SEQ ID NO: 2695
uaggaauguggugaugcau

SEQ ID NO: 209263 - RNA, 19 nt, Artificial Sequence
  Description of Artificial Sequence: Synthetic oligonucleotide
  Antisense strand to SEQ ID NO: 209262
augcaucaccacauuccua

SEQ ID NO: 209264 - RNA, 19 nt, Artificial Sequence
  Description of Artificial Sequence: Synthetic oligonucleotide
  Sense strand starting at position 3870 of SEQ ID NO: 2695
gaauuugucuugguggcca

SEQ ID NO: 209265 - RNA, 19 nt, Artificial Sequence
  Description of Artificial Sequence: Synthetic oligonucleotide
  Antisense strand to SEQ ID NO: 209264
uggccaccaagacaaauuc

SEQ ID NO: 209266 - RNA, 19 nt, Artificial Sequence
  Description of Artificial Sequence: Synthetic oligonucleotide
  Sense strand starting at position 3979 of SEQ ID NO: 2695
uugagauaauuguugauuc

SEQ ID NO: 209267 - RNA, 19 nt, Artificial Sequence
  Description of Artificial Sequence: Synthetic oligonucleotide
  Antisense strand to SEQ ID NO: 209266
gaaucaacaauuaucucaa

SEQ ID NO: 209268 - RNA, 19 nt, Artificial Sequence
  Description of Artificial Sequence: Synthetic oligonucleotide
  Sense strand starting at position 89 of SEQ ID NO: 2696
uuuccaucugaucaguuua

SEQ ID NO: 209269 - RNA, 19 nt, Artificial Sequence
  Description of Artificial Sequence: Synthetic oligonucleotide
  Antisense strand to SEQ ID NO: 209268
uaaacugaucagauggaaa

SEQ ID NO: 209270 - RNA, 19 nt, Artificial Sequence
  Description of Artificial Sequence: Synthetic oligonucleotide
  Sense strand starting at position 91 of SEQ ID NO: 2696
uccaucugaucaguuuaua

SEQ ID NO: 209271 - RNA, 19 nt, Artificial Sequence
  Description of Artificial Sequence: Synthetic oligonucleotide
  Antisense strand to SEQ ID NO: 209270
uauaaacugaucagaugga

SEQ ID NO: 209272 - RNA, 19 nt, Artificial Sequence
  Description of Artificial Sequence: Synthetic oligonucleotide
  Sense strand starting at position 193 of SEQ ID NO: 2696
cuauaagcacuugagguau

SEQ ID NO: 209273 - RNA, 19 nt, Artificial Sequence
  Description of Artificial Sequence: Synthetic oligonucleotide
  Antisense strand to SEQ ID NO: 209272
auaccucaagugcuuauag

SEQ ID NO: 209274 - RNA, 19 nt, Artificial Sequence
  Description of Artificial Sequence: Synthetic oligonucleotide
  Sense strand starting at position 201 of SEQ ID NO: 2696
acuugagguauguagucaa

SEQ ID NO: 209275 - RNA, 19 nt, Artificial Sequence
  Description of Artificial Sequence: Synthetic oligonucleotide
  Antisense strand to SEQ ID NO: 209274
uugacuacauaccucaagu

SEQ ID NO: 209276 - RNA, 19 nt, Artificial Sequence
  Description of Artificial Sequence: Synthetic oligonucleotide
  Sense strand starting at position 204 of SEQ ID NO: 2696
ugagguauguagucaauau

SEQ ID NO: 209277 - RNA, 19 nt, Artificial Sequence
  Description of Artificial Sequence: Synthetic oligonucleotide
  Antisense strand to SEQ ID NO: 209276
auauugacuacauaccuca

SEQ ID NO: 209278 - RNA, 19 nt, Artificial Sequence
  Description of Artificial Sequence: Synthetic oligonucleotide
  Sense strand starting at position 205 of SEQ ID NO: 2696
gagguauguagucaauaug

SEQ ID NO: 209279 - RNA, 19 nt, Artificial Sequence
  Description of Artificial Sequence: Synthetic oligonucleotide
  Antisense strand to SEQ ID NO: 209278
cauauugacuacauaccuc

SEQ ID NO: 209280 - RNA, 19 nt, Artificial Sequence
  Description of Artificial Sequence: Synthetic oligonucleotide
  Sense strand starting at position 208 of SEQ ID NO: 2696
guauguagucaauaugcag

SEQ ID NO: 209281 - RNA, 19 nt, Artificial Sequence
  Description of Artificial Sequence: Synthetic oligonucleotide
  Antisense strand to SEQ ID NO: 209280
cugcauauugacuacauac

SEQ ID NO: 209282 - RNA, 19 nt, Artificial Sequence
  Description of Artificial Sequence: Synthetic oligonucleotide
  Sense strand starting at position 619 of SEQ ID NO: 2696
agacaagaguugcucaaau

SEQ ID NO: 209283 - RNA, 19 nt, Artificial Sequence
  Description of Artificial Sequence: Synthetic oligonucleotide
  Antisense strand to SEQ ID NO: 209282
auuugagcaacucuugucu

SEQ ID NO: 209284 - RNA, 19 nt, Artificial Sequence
  Description of Artificial Sequence: Synthetic oligonucleotide
  Sense strand starting at position 621 of SEQ ID NO: 2696
acaagaguugcucaaauca

SEQ ID NO: 209285 - RNA, 19 nt, Artificial Sequence
  Description of Artificial Sequence: Synthetic oligonucleotide
  Antisense strand to SEQ ID NO: 209284
ugauuugagcaacucuugu

SEQ ID NO: 209286 - RNA, 19 nt, Artificial Sequence
  Description of Artificial Sequence: Synthetic oligonucleotide
  Sense strand starting at position 629 of SEQ ID NO: 2696
ugcucaaaucagcgaagga

SEQ ID NO: 209287 - RNA, 19 nt, Artificial Sequence
  Description of Artificial Sequence: Synthetic oligonucleotide
  Antisense strand to SEQ ID NO: 209286
uccuucgcugauuugagca

SEQ ID NO: 209288 - RNA, 19 nt, Artificial Sequence
  Description of Artificial Sequence: Synthetic oligonucleotide
  Sense strand starting at position 630 of SEQ ID NO: 2696
gcucaaaucagcgaaggaa

SEQ ID NO: 209289 - RNA, 19 nt, Artificial Sequence
  Description of Artificial Sequence: Synthetic oligonucleotide
  Antisense strand to SEQ ID NO: 209288
uuccuucgcugauuugagc

SEQ ID NO: 209290 - RNA, 19 nt, Artificial Sequence
  Description of Artificial Sequence: Synthetic oligonucleotide
  Sense strand starting at position 672 of SEQ ID NO: 2696
uuuccaucugacuagucua

SEQ ID NO: 209291 - RNA, 19 nt, Artificial Sequence
  Description of Artificial Sequence: Synthetic oligonucleotide
  Antisense strand to SEQ ID NO: 209290
uagacuagucagauggaaa

SEQ ID NO: 209292 - RNA, 19 nt, Artificial Sequence
  Description of Artificial Sequence: Synthetic oligonucleotide
  Sense strand starting at position 686 of SEQ ID NO: 2696
gucuauaaacuaugguauu

SEQ ID NO: 209293 - RNA, 19 nt, Artificial Sequence
  Description of Artificial Sequence: Synthetic oligonucleotide
  Antisense strand to SEQ ID NO: 209292
aauaccauaguuuauagac

SEQ ID NO: 209294 - RNA, 19 nt, Artificial Sequence
  Description of Artificial Sequence: Synthetic oligonucleotide
  Sense strand starting at position 1084 of SEQ ID NO: 2696
agugguuauaucgagguga

SEQ ID NO: 209295 - RNA, 19 nt, Artificial Sequence
  Description of Artificial Sequence: Synthetic oligonucleotide
  Antisense strand to SEQ ID NO: 209294
ucaccucgauauaaccacu

SEQ ID NO: 209296 - RNA, 19 nt, Artificial Sequence
  Description of Artificial Sequence: Synthetic oligonucleotide
  Sense strand starting at position 1086 of SEQ ID NO: 2696
ugguuauaucgaggugaca

SEQ ID NO: 209297 - RNA, 19 nt, Artificial Sequence
  Description of Artificial Sequence: Synthetic oligonucleotide
  Antisense strand to SEQ ID NO: 209296
ugucaccucgauauaacca

SEQ ID NO: 209298 - RNA, 19 nt, Artificial Sequence
  Description of Artificial Sequence: Synthetic oligonucleotide
  Sense strand starting at position 1088 of SEQ ID NO: 2696
guuauaucgaggugacaua

SEQ ID NO: 209299 - RNA, 19 nt, Artificial Sequence
  Description of Artificial Sequence: Synthetic oligonucleotide
  Antisense strand to SEQ ID NO: 209298
uaugucaccucgauauaac

SEQ ID NO: 209300 - RNA, 19 nt, Artificial Sequence
  Description of Artificial Sequence: Synthetic oligonucleotide
  Sense strand starting at position 1262 of SEQ ID NO: 2696
aggucaaaugagugguuua

SEQ ID NO: 209301 - RNA, 19 nt, Artificial Sequence
  Description of Artificial Sequence: Synthetic oligonucleotide
  Antisense strand to SEQ ID NO: 209300
uaaaccacucauuugaccu

SEQ ID NO: 209302 - RNA, 19 nt, Artificial Sequence
  Description of Artificial Sequence: Synthetic oligonucleotide
  Sense strand starting at position 1263 of SEQ ID NO: 2696
ggucaaaugagugguuuau

SEQ ID NO: 209303 - RNA, 19 nt, Artificial Sequence
  Description of Artificial Sequence: Synthetic oligonucleotide
  Antisense strand to SEQ ID NO: 209302
auaaaccacucauuugacc

SEQ ID NO: 209304 - RNA, 19 nt, Artificial Sequence
  Description of Artificial Sequence: Synthetic oligonucleotide
  Sense strand starting at position 1265 of SEQ ID NO: 2696
ucaaaugagugguuuauug

SEQ ID NO: 209305 - RNA, 19 nt, Artificial Sequence
  Description of Artificial Sequence: Synthetic oligonucleotide
  Antisense strand to SEQ ID NO: 209304
caauaaaccacucauuuga

SEQ ID NO: 209306 - RNA, 19 nt, Artificial Sequence
  Description of Artificial Sequence: Synthetic oligonucleotide
  Sense strand starting at position 1269 of SEQ ID NO: 2696
augagugguuuauuggaga

SEQ ID NO: 209307 - RNA, 19 nt, Artificial Sequence
  Description of Artificial Sequence: Synthetic oligonucleotide
  Antisense strand to SEQ ID NO: 209306
ucuccaauaaaccacucau

SEQ ID NO: 209308 - RNA, 19 nt, Artificial Sequence
  Description of Artificial Sequence: Synthetic oligonucleotide
  Sense strand starting at position 1283 of SEQ ID NO: 2696
ggagacaccuuucuauucu

SEQ ID NO: 209309 - RNA, 19 nt, Artificial Sequence
  Description of Artificial Sequence: Synthetic oligonucleotide
  Antisense strand to SEQ ID NO: 209308
agaauagaaaggugucucc

SEQ ID NO: 209310 - RNA, 19 nt, Artificial Sequence
  Description of Artificial Sequence: Synthetic oligonucleotide
  Sense strand starting at position 1332 of SEQ ID NO: 2696
ugacaauucugaucucuag

SEQ ID NO: 209311 - RNA, 19 nt, Artificial Sequence
  Description of Artificial Sequence: Synthetic oligonucleotide
  Antisense strand to SEQ ID NO: 209310
cuagagaucagaauuguca

SEQ ID NO: 209312 - RNA, 19 nt, Artificial Sequence
  Description of Artificial Sequence: Synthetic oligonucleotide
  Sense strand starting at position 1562 of SEQ ID NO: 2696
uggaguaagaaggguuguu

SEQ ID NO: 209313 - RNA, 19 nt, Artificial Sequence
  Description of Artificial Sequence: Synthetic oligonucleotide
  Antisense strand to SEQ ID NO: 209312
aacaacccuucuuacucca

SEQ ID NO: 209314 - RNA, 19 nt, Artificial Sequence
  Description of Artificial Sequence: Synthetic oligonucleotide
  Sense strand starting at position 1567 of SEQ ID NO: 2696
uaagaaggguuguuaauua

SEQ ID NO: 209315 - RNA, 19 nt, Artificial Sequence
  Description of Artificial Sequence: Synthetic oligonucleotide
  Antisense strand to SEQ ID NO: 209314
uaauuaacaacccuucuua

SEQ ID NO: 209316 - RNA, 19 nt, Artificial Sequence
  Description of Artificial Sequence: Synthetic oligonucleotide
  Sense strand starting at position 1571 of SEQ ID NO: 2696
aaggguuguuaauuacaua

SEQ ID NO: 209317 - RNA, 19 nt, Artificial Sequence
  Description of Artificial Sequence: Synthetic oligonucleotide
  Antisense strand to SEQ ID NO: 209316
uauguaauuaacaacccuu

SEQ ID NO: 209318 - RNA, 19 nt, Artificial Sequence
  Description of Artificial Sequence: Synthetic oligonucleotide
  Sense strand starting at position 1990 of SEQ ID NO: 2696
cuccauuuccuugguaagu

SEQ ID NO: 209319 - RNA, 19 nt, Artificial Sequence
  Description of Artificial Sequence: Synthetic oligonucleotide
  Antisense strand to SEQ ID NO: 209318
acuuaccaaggaaauggag

SEQ ID NO: 209320 - RNA, 19 nt, Artificial Sequence
  Description of Artificial Sequence: Synthetic oligonucleotide
  Sense strand starting at position 2432 of SEQ ID NO: 2696
ucagucuuugugggagaaa

SEQ ID NO: 209321 - RNA, 19 nt, Artificial Sequence
  Description of Artificial Sequence: Synthetic oligonucleotide
  Antisense strand to SEQ ID NO: 209320
uuucucccacaaagacuga

SEQ ID NO: 209322 - RNA, 19 nt, Artificial Sequence
  Description of Artificial Sequence: Synthetic oligonucleotide
  Sense strand starting at position 2435 of SEQ ID NO: 2696
gucuuugugggagaaauua

SEQ ID NO: 209323 - RNA, 19 nt, Artificial Sequence
  Description of Artificial Sequence: Synthetic oligonucleotide
  Antisense strand to SEQ ID NO: 209322
uaauuucucccacaaagac

SEQ ID NO: 209324 - RNA, 19 nt, Artificial Sequence
  Description of Artificial Sequence: Synthetic oligonucleotide
  Sense strand starting at position 2443 of SEQ ID NO: 2696
gggagaaauuaagaaauaa

SEQ ID NO: 209325 - RNA, 19 nt, Artificial Sequence
  Description of Artificial Sequence: Synthetic oligonucleotide
  Antisense strand to SEQ ID NO: 209324
uuauuucuuaauuucuccc

SEQ ID NO: 209326 - RNA, 19 nt, Artificial Sequence
  Description of Artificial Sequence: Synthetic oligonucleotide
  Sense strand starting at position 2843 of SEQ ID NO: 2696
gcaaguuuggaucaaaguc

SEQ ID NO: 209327 - RNA, 19 nt, Artificial Sequence
  Description of Artificial Sequence: Synthetic oligonucleotide
  Antisense strand to SEQ ID NO: 209326
gacuuugauccaaacuugc

SEQ ID NO: 209328 - RNA, 19 nt, Artificial Sequence
  Description of Artificial Sequence: Synthetic oligonucleotide
  Sense strand starting at position 2851 of SEQ ID NO: 2696
ggaucaaagucacuacacu

SEQ ID NO: 209329 - RNA, 19 nt, Artificial Sequence
  Description of Artificial Sequence: Synthetic oligonucleotide
  Antisense strand to SEQ ID NO: 209328
aguguagugacuuugaucc

SEQ ID NO: 209330 - RNA, 19 nt, Artificial Sequence
  Description of Artificial Sequence: Synthetic oligonucleotide
  Sense strand starting at position 2962 of SEQ ID NO: 2696
ugaugcuuugauuagcaaa

SEQ ID NO: 209331 - RNA, 19 nt, Artificial Sequence
  Description of Artificial Sequence: Synthetic oligonucleotide
  Antisense strand to SEQ ID NO: 209330
uuugcuaaucaaagcauca

SEQ ID NO: 209332 - RNA, 19 nt, Artificial Sequence
  Description of Artificial Sequence: Synthetic oligonucleotide
  Sense strand starting at position 3018 of SEQ ID NO: 2696
cagagaacuucugugcuua

SEQ ID NO: 209333 - RNA, 19 nt, Artificial Sequence
  Description of Artificial Sequence: Synthetic oligonucleotide
  Antisense strand to SEQ ID NO: 209332
uaagcacagaaguucucug

SEQ ID NO: 209334 - RNA, 19 nt, Artificial Sequence
  Description of Artificial Sequence: Synthetic oligonucleotide
  Sense strand starting at position 3019 of SEQ ID NO: 2696
agagaacuucugugcuuaa

SEQ ID NO: 209335 - RNA, 19 nt, Artificial Sequence
  Description of Artificial Sequence: Synthetic oligonucleotide
  Antisense strand to SEQ ID NO: 209334
uuaagcacagaaguucucu

SEQ ID NO: 209336 - RNA, 19 nt, Artificial Sequence
  Description of Artificial Sequence: Synthetic oligonucleotide
  Sense strand starting at position 3020 of SEQ ID NO: 2696
gagaacuucugugcuuaag

SEQ ID NO: 209337 - RNA, 19 nt, Artificial Sequence
  Description of Artificial Sequence: Synthetic oligonucleotide
  Antisense strand to SEQ ID NO: 209336
cuuaagcacagaaguucuc

SEQ ID NO: 209338 - RNA, 19 nt, Artificial Sequence
  Description of Artificial Sequence: Synthetic oligonucleotide
  Sense strand starting at position 3030 of SEQ ID NO: 2696
gugcuuaagaaagacaagu

SEQ ID NO: 209339 - RNA, 19 nt, Artificial Sequence
  Description of Artificial Sequence: Synthetic oligonucleotide
  Antisense strand to SEQ ID NO: 209338
acuugucuuucuuaagcac

SEQ ID NO: 209340 - RNA, 19 nt, Artificial Sequence
  Description of Artificial Sequence: Synthetic oligonucleotide
  Sense strand starting at position 3228 of SEQ ID NO: 2696
ggauaaucgcuugaaggca

SEQ ID NO: 209341 - RNA, 19 nt, Artificial Sequence
  Description of Artificial Sequence: Synthetic oligonucleotide
  Antisense strand to SEQ ID NO: 209340
ugccuucaagcgauuaucc

SEQ ID NO: 209342 - RNA, 19 nt, Artificial Sequence
  Description of Artificial Sequence: Synthetic oligonucleotide
  Sense strand starting at position 3268 of SEQ ID NO: 2696
cggauaucacgccaucaca

SEQ ID NO: 209343 - RNA, 19 nt, Artificial Sequence
  Description of Artificial Sequence: Synthetic oligonucleotide
  Antisense strand to SEQ ID NO: 209342
ugugauggcgugauauccg

SEQ ID NO: 209344 - RNA, 19 nt, Artificial Sequence
  Description of Artificial Sequence: Synthetic oligonucleotide
  Sense strand starting at position 3730 of SEQ ID NO: 2696
ccuagaaugcugcagcaga

SEQ ID NO: 209345 - RNA, 19 nt, Artificial Sequence
  Description of Artificial Sequence: Synthetic oligonucleotide
  Antisense strand to SEQ ID NO: 209344
ucugcugcagcauucuagg

SEQ ID NO: 209346 - RNA, 19 nt, Artificial Sequence
  Description of Artificial Sequence: Synthetic oligonucleotide
  Sense strand starting at position 3813 of SEQ ID NO: 2696
ggaccaggcuagucauuau

SEQ ID NO: 209347 - RNA, 19 nt, Artificial Sequence
  Description of Artificial Sequence: Synthetic oligonucleotide
  Antisense strand to SEQ ID NO: 209346
auaaugacuagccuggucc

SEQ ID NO: 209348 - RNA, 19 nt, Artificial Sequence
  Description of Artificial Sequence: Synthetic oligonucleotide
  Sense strand starting at position 268 of SEQ ID NO: 2697
augagaaauugacaaucua

SEQ ID NO: 209349 - RNA, 19 nt, Artificial Sequence
  Description of Artificial Sequence: Synthetic oligonucleotide
  Antisense strand to SEQ ID NO: 209348
uagauugucaauuucucau

SEQ ID NO: 209350 - RNA, 19 nt, Artificial Sequence
  Description of Artificial Sequence: Synthetic oligonucleotide
  Sense strand starting at position 286 of SEQ ID NO: 2697
acagucauaguguaagauu

SEQ ID NO: 209351 - RNA, 19 nt, Artificial Sequence
  Description of Artificial Sequence: Synthetic oligonucleotide
  Antisense strand to SEQ ID NO: 209350
aaucuuacacuaugacugu

SEQ ID NO: 209352 - RNA, 19 nt, Artificial Sequence
  Description of Artificial Sequence: Synthetic oligonucleotide
  Sense strand starting at position 317 of SEQ ID NO: 2697
ucucgauaauggguaagaa

SEQ ID NO: 209353 - RNA, 19 nt, Artificial Sequence
  Description of Artificial Sequence: Synthetic oligonucleotide
  Antisense strand to SEQ ID NO: 209352
uucuuacccauuaucgaga

SEQ ID NO: 209354 - RNA, 19 nt, Artificial Sequence
  Description of Artificial Sequence: Synthetic oligonucleotide
  Sense strand starting at position 457 of SEQ ID NO: 2697
ucauacagucacuguaaua

SEQ ID NO: 209355 - RNA, 19 nt, Artificial Sequence
  Description of Artificial Sequence: Synthetic oligonucleotide
  Antisense strand to SEQ ID NO: 209354
uauuacagugacuguauga

SEQ ID NO: 209356 - RNA, 19 nt, Artificial Sequence
  Description of Artificial Sequence: Synthetic oligonucleotide
  Sense strand starting at position 474 of SEQ ID NO: 2697
uagugacuccugcauguga

SEQ ID NO: 209357 - RNA, 19 nt, Artificial Sequence
  Description of Artificial Sequence: Synthetic oligonucleotide
  Antisense strand to SEQ ID NO: 209356
ucacaugcaggagucacua

SEQ ID NO: 209358 - RNA, 19 nt, Artificial Sequence
  Description of Artificial Sequence: Synthetic oligonucleotide
  Sense strand starting at position 476 of SEQ ID NO: 2697
gugacuccugcaugugaag

SEQ ID NO: 209359 - RNA, 19 nt, Artificial Sequence
  Description of Artificial Sequence: Synthetic oligonucleotide
  Antisense strand to SEQ ID NO: 209358
cuucacaugcaggagucac

SEQ ID NO: 209360 - RNA, 19 nt, Artificial Sequence
  Description of Artificial Sequence: Synthetic oligonucleotide
  Sense strand starting at position 501 of SEQ ID NO: 2697
acgagaaucaaaugaguua

SEQ ID NO: 209361 - RNA, 19 nt, Artificial Sequence
  Description of Artificial Sequence: Synthetic oligonucleotide
  Antisense strand to SEQ ID NO: 209360
uaacucauuugauucucgu

SEQ ID NO: 209362 - RNA, 19 nt, Artificial Sequence
  Description of Artificial Sequence: Synthetic oligonucleotide
  Sense strand starting at position 531 of SEQ ID NO: 2697
uucuuagaauuccuggcau

SEQ ID NO: 209363 - RNA, 19 nt, Artificial Sequence
  Description of Artificial Sequence: Synthetic oligonucleotide
  Antisense strand to SEQ ID NO: 209362
augccaggaauucuaagaa

SEQ ID NO: 209364 - RNA, 19 nt, Artificial Sequence
  Description of Artificial Sequence: Synthetic oligonucleotide
  Sense strand starting at position 612 of SEQ ID NO: 2697
ucaucuaguggucacauua

SEQ ID NO: 209365 - RNA, 19 nt, Artificial Sequence
  Description of Artificial Sequence: Synthetic oligonucleotide
  Antisense strand to SEQ ID NO: 209364
uaaugugaccacuagauga

SEQ ID NO: 209366 - RNA, 19 nt, Artificial Sequence
  Description of Artificial Sequence: Synthetic oligonucleotide
  Sense strand starting at position 908 of SEQ ID NO: 2697
cggagauaucagugagcug

SEQ ID NO: 209367 - RNA, 19 nt, Artificial Sequence
  Description of Artificial Sequence: Synthetic oligonucleotide
  Antisense strand to SEQ ID NO: 209366
cagcucacugauaucuccg

SEQ ID NO: 209368 - RNA, 19 nt, Artificial Sequence
  Description of Artificial Sequence: Synthetic oligonucleotide
  Sense strand starting at position 911 of SEQ ID NO: 2697
agauaucagugagcugaga

SEQ ID NO: 209369 - RNA, 19 nt, Artificial Sequence
  Description of Artificial Sequence: Synthetic oligonucleotide
  Antisense strand to SEQ ID NO: 209368
ucucagcucacugauaucu

SEQ ID NO: 209370 - RNA, 19 nt, Artificial Sequence
  Description of Artificial Sequence: Synthetic oligonucleotide
  Sense strand starting at position 913 of SEQ ID NO: 2697
auaucagugagcugagauc

SEQ ID NO: 209371 - RNA, 19 nt, Artificial Sequence
  Description of Artificial Sequence: Synthetic oligonucleotide
  Antisense strand to SEQ ID NO: 209370
gaucucagcucacugauau

SEQ ID NO: 209372 - RNA, 19 nt, Artificial Sequence
  Description of Artificial Sequence: Synthetic oligonucleotide
  Sense strand starting at position 1014 of SEQ ID NO: 2697
gagccauugucauuuagug

SEQ ID NO: 209373 - RNA, 19 nt, Artificial Sequence
  Description of Artificial Sequence: Synthetic oligonucleotide
  Antisense strand to SEQ ID NO: 209372
cacuaaaugacaauggcuc

SEQ ID NO: 209374 - RNA, 19 nt, Artificial Sequence
  Description of Artificial Sequence: Synthetic oligonucleotide
  Sense strand starting at position 1180 of SEQ ID NO: 2697
agggaacaauaauggauua

SEQ ID NO: 209375 - RNA, 19 nt, Artificial Sequence
  Description of Artificial Sequence: Synthetic oligonucleotide
  Antisense strand to SEQ ID NO: 209374
uaauccauuauuguucccu

SEQ ID NO: 209376 - RNA, 19 nt, Artificial Sequence
  Description of Artificial Sequence: Synthetic oligonucleotide
  Sense strand starting at position 1248 of SEQ ID NO: 2697
gcccacuggugucuagaua

SEQ ID NO: 209377 - RNA, 19 nt, Artificial Sequence
  Description of Artificial Sequence: Synthetic oligonucleotide
  Antisense strand to SEQ ID NO: 209376
uaucuagacaccagugggc

SEQ ID NO: 209378 - RNA, 19 nt, Artificial Sequence
  Description of Artificial Sequence: Synthetic oligonucleotide
  Sense strand starting at position 1440 of SEQ ID NO: 2697
gagagaugacggugaguag

SEQ ID NO: 209379 - RNA, 19 nt, Artificial Sequence
  Description of Artificial Sequence: Synthetic oligonucleotide
  Antisense strand to SEQ ID NO: 209378
cuacucaccgucaucucuc

SEQ ID NO: 209380 - RNA, 19 nt, Artificial Sequence
  Description of Artificial Sequence: Synthetic oligonucleotide
  Sense strand starting at position 1562 of SEQ ID NO: 2697
gucagacuucuagaagcag

SEQ ID NO: 209381 - RNA, 19 nt, Artificial Sequence
  Description of Artificial Sequence: Synthetic oligonucleotide
  Antisense strand to SEQ ID NO: 209380
cugcuucuagaagucugac

SEQ ID NO: 209382 - RNA, 19 nt, Artificial Sequence
  Description of Artificial Sequence: Synthetic oligonucleotide
  Sense strand starting at position 1601 of SEQ ID NO: 2697
gucuucuacucccuggaaa

SEQ ID NO: 209383 - RNA, 19 nt, Artificial Sequence
  Description of Artificial Sequence: Synthetic oligonucleotide
  Antisense strand to SEQ ID NO: 209382
uuuccagggaguagaagac

SEQ ID NO: 209384 - RNA, 19 nt, Artificial Sequence
  Description of Artificial Sequence: Synthetic oligonucleotide
  Sense strand starting at position 1602 of SEQ ID NO: 2697
ucuucuacucccuggaaag

SEQ ID NO: 209385 - RNA, 19 nt, Artificial Sequence
  Description of Artificial Sequence: Synthetic oligonucleotide
  Antisense strand to SEQ ID NO: 209384
cuuuccagggaguagaaga

SEQ ID NO: 209386 - RNA, 19 nt, Artificial Sequence
  Description of Artificial Sequence: Synthetic oligonucleotide
  Sense strand starting at position 2139 of SEQ ID NO: 2697
cugugaguugucguuuauu

SEQ ID NO: 209387 - RNA, 19 nt, Artificial Sequence
  Description of Artificial Sequence: Synthetic oligonucleotide
  Antisense strand to SEQ ID NO: 209386
aauaaacgacaacucacag

SEQ ID NO: 209388 - RNA, 19 nt, Artificial Sequence
  Description of Artificial Sequence: Synthetic oligonucleotide
  Sense strand starting at position 2142 of SEQ ID NO: 2697
ugaguugucguuuauuaac

SEQ ID NO: 209389 - RNA, 19 nt, Artificial Sequence
  Description of Artificial Sequence: Synthetic oligonucleotide
  Antisense strand to SEQ ID NO: 209388
guuaauaaacgacaacuca

SEQ ID NO: 209390 - RNA, 19 nt, Artificial Sequence
  Description of Artificial Sequence: Synthetic oligonucleotide
  Sense strand starting at position 2349 of SEQ ID NO: 2697
ucauccuagcacuguuaua

SEQ ID NO: 209391 - RNA, 19 nt, Artificial Sequence
  Description of Artificial Sequence: Synthetic oligonucleotide
  Antisense strand to SEQ ID NO: 209390
uauaacagugcuaggauga

SEQ ID NO: 209392 - RNA, 19 nt, Artificial Sequence
  Description of Artificial Sequence: Synthetic oligonucleotide
  Sense strand starting at position 2701 of SEQ ID NO: 2697
cuauaaugauuccugcaug

SEQ ID NO: 209393 - RNA, 19 nt, Artificial Sequence
  Description of Artificial Sequence: Synthetic oligonucleotide
  Antisense strand to SEQ ID NO: 209392
caugcaggaaucauuauag

SEQ ID NO: 209394 - RNA, 19 nt, Artificial Sequence
  Description of Artificial Sequence: Synthetic oligonucleotide
  Sense strand starting at position 2704 of SEQ ID NO: 2697
uaaugauuccugcauguga

SEQ ID NO: 209395 - RNA, 19 nt, Artificial Sequence
  Description of Artificial Sequence: Synthetic oligonucleotide
  Antisense strand to SEQ ID NO: 209394
ucacaugcaggaaucauua

SEQ ID NO: 209396 - RNA, 19 nt, Artificial Sequence
  Description of Artificial Sequence: Synthetic oligonucleotide
  Sense strand starting at position 2706 of SEQ ID NO: 2697
augauuccugcaugugaag

SEQ ID NO: 209397 - RNA, 19 nt, Artificial Sequence
  Description of Artificial Sequence: Synthetic oligonucleotide
  Antisense strand to SEQ ID NO: 209396
cuucacaugcaggaaucau

SEQ ID NO: 209398 - RNA, 19 nt, Artificial Sequence
  Description of Artificial Sequence: Synthetic oligonucleotide
  Sense strand starting at position 2708 of SEQ ID NO: 2697
gauuccugcaugugaaggu

SEQ ID NO: 209399 - RNA, 19 nt, Artificial Sequence
  Description of Artificial Sequence: Synthetic oligonucleotide
  Antisense strand to SEQ ID NO: 209398
accuucacaugcaggaauc

SEQ ID NO: 209400 - RNA, 19 nt, Artificial Sequence
  Description of Artificial Sequence: Synthetic oligonucleotide
  Sense strand starting at position 2712 of SEQ ID NO: 2697
ccugcaugugaagguuauu

SEQ ID NO: 209401 - RNA, 19 nt, Artificial Sequence
  Description of Artificial Sequence: Synthetic oligonucleotide
  Antisense strand to SEQ ID NO: 209400
aauaaccuucacaugcagg

SEQ ID NO: 209402 - RNA, 19 nt, Artificial Sequence
  Description of Artificial Sequence: Synthetic oligonucleotide
  Sense strand starting at position 2715 of SEQ ID NO: 2697
gcaugugaagguuauuaug

SEQ ID NO: 209403 - RNA, 19 nt, Artificial Sequence
  Description of Artificial Sequence: Synthetic oligonucleotide
  Antisense strand to SEQ ID NO: 209402
cauaauaaccuucacaugc

SEQ ID NO: 209404 - RNA, 19 nt, Artificial Sequence
  Description of Artificial Sequence: Synthetic oligonucleotide
  Sense strand starting at position 2717 of SEQ ID NO: 2697
augugaagguuauuaugag

SEQ ID NO: 209405 - RNA, 19 nt, Artificial Sequence
  Description of Artificial Sequence: Synthetic oligonucleotide
  Antisense strand to SEQ ID NO: 209404
cucauaauaaccuucacau

SEQ ID NO: 209406 - RNA, 19 nt, Artificial Sequence
  Description of Artificial Sequence: Synthetic oligonucleotide
  Sense strand starting at position 2721 of SEQ ID NO: 2697
gaagguuauuaugagaaca

SEQ ID NO: 209407 - RNA, 19 nt, Artificial Sequence
  Description of Artificial Sequence: Synthetic oligonucleotide
  Antisense strand to SEQ ID NO: 209406
uguucucauaauaaccuuc

SEQ ID NO: 209408 - RNA, 19 nt, Artificial Sequence
  Description of Artificial Sequence: Synthetic oligonucleotide
  Sense strand starting at position 2723 of SEQ ID NO: 2697
agguuauuaugagaacaaa

SEQ ID NO: 209409 - RNA, 19 nt, Artificial Sequence
  Description of Artificial Sequence: Synthetic oligonucleotide
  Antisense strand to SEQ ID NO: 209408
uuuguucucauaauaaccu

SEQ ID NO: 209410 - RNA, 19 nt, Artificial Sequence
  Description of Artificial Sequence: Synthetic oligonucleotide
  Sense strand starting at position 3397 of SEQ ID NO: 2697
aagggaaugugaguauuau

SEQ ID NO: 209411 - RNA, 19 nt, Artificial Sequence
  Description of Artificial Sequence: Synthetic oligonucleotide
  Antisense strand to SEQ ID NO: 209410
auaauacucacauucccuu

SEQ ID NO: 209412 - RNA, 19 nt, Artificial Sequence
  Description of Artificial Sequence: Synthetic oligonucleotide
  Sense strand starting at position 3406 of SEQ ID NO: 2697
ugaguauuaucguuuccag

SEQ ID NO: 209413 - RNA, 19 nt, Artificial Sequence
  Description of Artificial Sequence: Synthetic oligonucleotide
  Antisense strand to SEQ ID NO: 209412
cuggaaacgauaauacuca

SEQ ID NO: 209414 - RNA, 19 nt, Artificial Sequence
  Description of Artificial Sequence: Synthetic oligonucleotide
  Sense strand starting at position 3438 of SEQ ID NO: 2697
uacccugugcaguagugaa

SEQ ID NO: 209415 - RNA, 19 nt, Artificial Sequence
  Description of Artificial Sequence: Synthetic oligonucleotide
  Antisense strand to SEQ ID NO: 209414
uucacuacugcacagggua

SEQ ID NO: 209416 - RNA, 19 nt, Artificial Sequence
  Description of Artificial Sequence: Synthetic oligonucleotide
  Sense strand starting at position 3538 of SEQ ID NO: 2697
gcauguaagucuuuggaaa

SEQ ID NO: 209417 - RNA, 19 nt, Artificial Sequence
  Description of Artificial Sequence: Synthetic oligonucleotide
  Antisense strand to SEQ ID NO: 209416
uuuccaaagacuuacaugc

SEQ ID NO: 209418 - RNA, 19 nt, Artificial Sequence
  Description of Artificial Sequence: Synthetic oligonucleotide
  Sense strand starting at position 3563 of SEQ ID NO: 2697
ugagauugcucucccuaua

SEQ ID NO: 209419 - RNA, 19 nt, Artificial Sequence
  Description of Artificial Sequence: Synthetic oligonucleotide
  Antisense strand to SEQ ID NO: 209418
uauagggagagcaaucuca

SEQ ID NO: 209420 - RNA, 19 nt, Artificial Sequence
  Description of Artificial Sequence: Synthetic oligonucleotide
  Sense strand starting at position 3568 of SEQ ID NO: 2697
uugcucucccuauaagguu

SEQ ID NO: 209421 - RNA, 19 nt, Artificial Sequence
  Description of Artificial Sequence: Synthetic oligonucleotide
  Antisense strand to SEQ ID NO: 209420
aaccuuauagggagagcaa

SEQ ID NO: 209422 - RNA, 19 nt, Artificial Sequence
  Description of Artificial Sequence: Synthetic oligonucleotide
  Sense strand starting at position 3770 of SEQ ID NO: 2697
ugugaaacacauugcuuau

SEQ ID NO: 209423 - RNA, 19 nt, Artificial Sequence
  Description of Artificial Sequence: Synthetic oligonucleotide
  Antisense strand to SEQ ID NO: 209422
auaagcaauguguuucaca

SEQ ID NO: 209424 - RNA, 19 nt, Artificial Sequence
  Description of Artificial Sequence: Synthetic oligonucleotide
  Sense strand starting at position 3805 of SEQ ID NO: 2697
uuaguuggauugucacuuu

SEQ ID NO: 209425 - RNA, 19 nt, Artificial Sequence
  Description of Artificial Sequence: Synthetic oligonucleotide
  Antisense strand to SEQ ID NO: 209424
aaagugacaauccaacuaa

SEQ ID NO: 209426 - RNA, 19 nt, Artificial Sequence
  Description of Artificial Sequence: Synthetic oligonucleotide
  Sense strand starting at position 3901 of SEQ ID NO: 2697
auucuuaguuauguagcaa

SEQ ID NO: 209427 - RNA, 19 nt, Artificial Sequence
  Description of Artificial Sequence: Synthetic oligonucleotide
  Antisense strand to SEQ ID NO: 209426
uugcuacauaacuaagaau

SEQ ID NO: 209428 - RNA, 19 nt, Artificial Sequence
  Description of Artificial Sequence: Synthetic oligonucleotide
  Sense strand starting at position 198 of SEQ ID NO: 2698
aaaggugauccuuguauau

SEQ ID NO: 209429 - RNA, 19 nt, Artificial Sequence
  Description of Artificial Sequence: Synthetic oligonucleotide
  Antisense strand to SEQ ID NO: 209428
auauacaaggaucaccuuu

SEQ ID NO: 209430 - RNA, 19 nt, Artificial Sequence
  Description of Artificial Sequence: Synthetic oligonucleotide
  Sense strand starting at position 202 of SEQ ID NO: 2698
gugauccuuguauaugagu

SEQ ID NO: 209431 - RNA, 19 nt, Artificial Sequence
  Description of Artificial Sequence: Synthetic oligonucleotide
  Antisense strand to SEQ ID NO: 209430
acucauauacaaggaucac

SEQ ID NO: 209432 - RNA, 19 nt, Artificial Sequence
  Description of Artificial Sequence: Synthetic oligonucleotide
  Sense strand starting at position 210 of SEQ ID NO: 2698
uguauaugaguguagcuga

SEQ ID NO: 209433 - RNA, 19 nt, Artificial Sequence
  Description of Artificial Sequence: Synthetic oligonucleotide
  Antisense strand to SEQ ID NO: 209432
ucagcuacacucauauaca

SEQ ID NO: 209434 - RNA, 19 nt, Artificial Sequence
  Description of Artificial Sequence: Synthetic oligonucleotide
  Sense strand starting at position 215 of SEQ ID NO: 2698
augaguguagcugaggaaa

SEQ ID NO: 209435 - RNA, 19 nt, Artificial Sequence
  Description of Artificial Sequence: Synthetic oligonucleotide
  Antisense strand to SEQ ID NO: 209434
uuuccucagcuacacucau

SEQ ID NO: 209436 - RNA, 19 nt, Artificial Sequence
  Description of Artificial Sequence: Synthetic oligonucleotide
  Sense strand starting at position 298 of SEQ ID NO: 2698
cauguugggcucuagggau

SEQ ID NO: 209437 - RNA, 19 nt, Artificial Sequence
  Description of Artificial Sequence: Synthetic oligonucleotide
  Antisense strand to SEQ ID NO: 209436
aucccuagagcccaacaug

SEQ ID NO: 209438 - RNA, 19 nt, Artificial Sequence
  Description of Artificial Sequence: Synthetic oligonucleotide
  Sense strand starting at position 344 of SEQ ID NO: 2698
uacugagaguuagaugaaa

SEQ ID NO: 209439 - RNA, 19 nt, Artificial Sequence
  Description of Artificial Sequence: Synthetic oligonucleotide
  Antisense strand to SEQ ID NO: 209438
uuucaucuaacucucagua

SEQ ID NO: 209440 - RNA, 19 nt, Artificial Sequence
  Description of Artificial Sequence: Synthetic oligonucleotide
  Sense strand starting at position 464 of SEQ ID NO: 2698
gggacucauagcugagaag

SEQ ID NO: 209441 - RNA, 19 nt, Artificial Sequence
  Description of Artificial Sequence: Synthetic oligonucleotide
  Antisense strand to SEQ ID NO: 209440
cuucucagcuaugaguccc

SEQ ID NO: 209442 - RNA, 19 nt, Artificial Sequence
  Description of Artificial Sequence: Synthetic oligonucleotide
  Sense strand starting at position 526 of SEQ ID NO: 2698
aggucaagauggccucaua

SEQ ID NO: 209443 - RNA, 19 nt, Artificial Sequence
  Description of Artificial Sequence: Synthetic oligonucleotide
  Antisense strand to SEQ ID NO: 209442
uaugaggccaucuugaccu

SEQ ID NO: 209444 - RNA, 19 nt, Artificial Sequence
  Description of Artificial Sequence: Synthetic oligonucleotide
  Sense strand starting at position 1025 of SEQ ID NO: 2698
agaggaauuacuugccuga

SEQ ID NO: 209445 - RNA, 19 nt, Artificial Sequence
  Description of Artificial Sequence: Synthetic oligonucleotide
  Antisense strand to SEQ ID NO: 209444
ucaggcaaguaauuccucu

SEQ ID NO: 209446 - RNA, 19 nt, Artificial Sequence
  Description of Artificial Sequence: Synthetic oligonucleotide
  Sense strand starting at position 1027 of SEQ ID NO: 2698
aggaauuacuugccugaga

SEQ ID NO: 209447 - RNA, 19 nt, Artificial Sequence
  Description of Artificial Sequence: Synthetic oligonucleotide
  Antisense strand to SEQ ID NO: 209446
ucucaggcaaguaauuccu

SEQ ID NO: 209448 - RNA, 19 nt, Artificial Sequence
  Description of Artificial Sequence: Synthetic oligonucleotide
  Sense strand starting at position 1028 of SEQ ID NO: 2698
ggaauuacuugccugagau

SEQ ID NO: 209449 - RNA, 19 nt, Artificial Sequence
  Description of Artificial Sequence: Synthetic oligonucleotide
  Antisense strand to SEQ ID NO: 209448
aucucaggcaaguaauucc

SEQ ID NO: 209450 - RNA, 19 nt, Artificial Sequence
  Description of Artificial Sequence: Synthetic oligonucleotide
  Sense strand starting at position 1252 of SEQ ID NO: 2698
cgugauucgacagaaugac

SEQ ID NO: 209451 - RNA, 19 nt, Artificial Sequence
  Description of Artificial Sequence: Synthetic oligonucleotide
  Antisense strand to SEQ ID NO: 209450
gucauucugucgaaucacg

SEQ ID NO: 209452 - RNA, 19 nt, Artificial Sequence
  Description of Artificial Sequence: Synthetic oligonucleotide
  Sense strand starting at position 1432 of SEQ ID NO: 2698
acuggagacugcucagagu

SEQ ID NO: 209453 - RNA, 19 nt, Artificial Sequence
  Description of Artificial Sequence: Synthetic oligonucleotide
  Antisense strand to SEQ ID NO: 209452
acucugagcagucuccagu

SEQ ID NO: 209454 - RNA, 19 nt, Artificial Sequence
  Description of Artificial Sequence: Synthetic oligonucleotide
  Sense strand starting at position 1987 of SEQ ID NO: 2698
agagaugacucacucgaac

SEQ ID NO: 209455 - RNA, 19 nt, Artificial Sequence
  Description of Artificial Sequence: Synthetic oligonucleotide
  Antisense strand to SEQ ID NO: 209454
guucgagugagucaucucu

SEQ ID NO: 209456 - RNA, 19 nt, Artificial Sequence
  Description of Artificial Sequence: Synthetic oligonucleotide
  Sense strand starting at position 2010 of SEQ ID NO: 2698
aauguuuccuguuuaaagg

SEQ ID NO: 209457 - RNA, 19 nt, Artificial Sequence
  Description of Artificial Sequence: Synthetic oligonucleotide
  Antisense strand to SEQ ID NO: 209456
ccuuuaaacaggaaacauu

SEQ ID NO: 209458 - RNA, 19 nt, Artificial Sequence
  Description of Artificial Sequence: Synthetic oligonucleotide
  Sense strand starting at position 2011 of SEQ ID NO: 2698
auguuuccuguuuaaagga

SEQ ID NO: 209459 - RNA, 19 nt, Artificial Sequence
  Description of Artificial Sequence: Synthetic oligonucleotide
  Antisense strand to SEQ ID NO: 209458
uccuuuaaacaggaaacau

SEQ ID NO: 209460 - RNA, 19 nt, Artificial Sequence
  Description of Artificial Sequence: Synthetic oligonucleotide
  Sense strand starting at position 2109 of SEQ ID NO: 2698
ggacaugcuuuauuggaaa

SEQ ID NO: 209461 - RNA, 19 nt, Artificial Sequence
  Description of Artificial Sequence: Synthetic oligonucleotide
  Antisense strand to SEQ ID NO: 209460
uuuccaauaaagcaugucc

SEQ ID NO: 209462 - RNA, 19 nt, Artificial Sequence
  Description of Artificial Sequence: Synthetic oligonucleotide
  Sense strand starting at position 2194 of SEQ ID NO: 2698
uugcaaagggucugggaau

SEQ ID NO: 209463 - RNA, 19 nt, Artificial Sequence
  Description of Artificial Sequence: Synthetic oligonucleotide
  Antisense strand to SEQ ID NO: 209462
auucccagacccuuugcaa

SEQ ID NO: 209464 - RNA, 19 nt, Artificial Sequence
  Description of Artificial Sequence: Synthetic oligonucleotide
  Sense strand starting at position 2307 of SEQ ID NO: 2698
agcugaaauguagguagau

SEQ ID NO: 209465 - RNA, 19 nt, Artificial Sequence
  Description of Artificial Sequence: Synthetic oligonucleotide
  Antisense strand to SEQ ID NO: 209464
aucuaccuacauuucagcu

SEQ ID NO: 209466 - RNA, 19 nt, Artificial Sequence
  Description of Artificial Sequence: Synthetic oligonucleotide
  Sense strand starting at position 2308 of SEQ ID NO: 2698
gcugaaauguagguagauu

SEQ ID NO: 209467 - RNA, 19 nt, Artificial Sequence
  Description of Artificial Sequence: Synthetic oligonucleotide
  Antisense strand to SEQ ID NO: 209466
aaucuaccuacauuucagc

SEQ ID NO: 209468 - RNA, 19 nt, Artificial Sequence
  Description of Artificial Sequence: Synthetic oligonucleotide
  Sense strand starting at position 2316 of SEQ ID NO: 2698
guagguagauuguucagaa

SEQ ID NO: 209469 - RNA, 19 nt, Artificial Sequence
  Description of Artificial Sequence: Synthetic oligonucleotide
  Antisense strand to SEQ ID NO: 209468
uucugaacaaucuaccuac

SEQ ID NO: 209470 - RNA, 19 nt, Artificial Sequence
  Description of Artificial Sequence: Synthetic oligonucleotide
  Sense strand starting at position 2417 of SEQ ID NO: 2698
ggccauguucuccaguuua

SEQ ID NO: 209471 - RNA, 19 nt, Artificial Sequence
  Description of Artificial Sequence: Synthetic oligonucleotide
  Antisense strand to SEQ ID NO: 209470
uaaacuggagaacauggcc

SEQ ID NO: 209472 - RNA, 19 nt, Artificial Sequence
  Description of Artificial Sequence: Synthetic oligonucleotide
  Sense strand starting at position 2445 of SEQ ID NO: 2698
cgugucuuuguagcauuga

SEQ ID NO: 209473 - RNA, 19 nt, Artificial Sequence
  Description of Artificial Sequence: Synthetic oligonucleotide
  Antisense strand to SEQ ID NO: 209472
ucaaugcuacaaagacacg

SEQ ID NO: 209474 - RNA, 19 nt, Artificial Sequence
  Description of Artificial Sequence: Synthetic oligonucleotide
  Sense strand starting at position 2456 of SEQ ID NO: 2698
agcauugauccuggagugu

SEQ ID NO: 209475 - RNA, 19 nt, Artificial Sequence
  Description of Artificial Sequence: Synthetic oligonucleotide
  Antisense strand to SEQ ID NO: 209474
acacuccaggaucaaugcu

SEQ ID NO: 209476 - RNA, 19 nt, Artificial Sequence
  Description of Artificial Sequence: Synthetic oligonucleotide
  Sense strand starting at position 2484 of SEQ ID NO: 2698
ugaggucuguucuccaaag

SEQ ID NO: 209477 - RNA, 19 nt, Artificial Sequence
  Description of Artificial Sequence: Synthetic oligonucleotide
  Antisense strand to SEQ ID NO: 209476
cuuuggagaacagaccuca

SEQ ID NO: 209478 - RNA, 19 nt, Artificial Sequence
  Description of Artificial Sequence: Synthetic oligonucleotide
  Sense strand starting at position 2486 of SEQ ID NO: 2698
aggucuguucuccaaagcu

SEQ ID NO: 209479 - RNA, 19 nt, Artificial Sequence
  Description of Artificial Sequence: Synthetic oligonucleotide
  Antisense strand to SEQ ID NO: 209478
agcuuuggagaacagaccu

SEQ ID NO: 209480 - RNA, 19 nt, Artificial Sequence
  Description of Artificial Sequence: Synthetic oligonucleotide
  Sense strand starting at position 3262 of SEQ ID NO: 2698
gcaccuugacaugaacuau

SEQ ID NO: 209481 - RNA, 19 nt, Artificial Sequence
  Description of Artificial Sequence: Synthetic oligonucleotide
  Antisense strand to SEQ ID NO: 209480
auaguucaugucaaggugc

SEQ ID NO: 209482 - RNA, 19 nt, Artificial Sequence
  Description of Artificial Sequence: Synthetic oligonucleotide
  Sense strand starting at position 3292 of SEQ ID NO: 2698
gcagcagaauucucuaauu

SEQ ID NO: 209483 - RNA, 19 nt, Artificial Sequence
  Description of Artificial Sequence: Synthetic oligonucleotide
  Antisense strand to SEQ ID NO: 209482
aauuagagaauucugcugc

SEQ ID NO: 209484 - RNA, 19 nt, Artificial Sequence
  Description of Artificial Sequence: Synthetic oligonucleotide
  Sense strand starting at position 3312 of SEQ ID NO: 2698
aggguauuguucucccaug

SEQ ID NO: 209485 - RNA, 19 nt, Artificial Sequence
  Description of Artificial Sequence: Synthetic oligonucleotide
  Antisense strand to SEQ ID NO: 209484
caugggagaacaauacccu

SEQ ID NO: 209486 - RNA, 19 nt, Artificial Sequence
  Description of Artificial Sequence: Synthetic oligonucleotide
  Sense strand starting at position 3317 of SEQ ID NO: 2698
auuguucucccauguuaug

SEQ ID NO: 209487 - RNA, 19 nt, Artificial Sequence
  Description of Artificial Sequence: Synthetic oligonucleotide
  Antisense strand to SEQ ID NO: 209486
cauaacaugggagaacaau

SEQ ID NO: 209488 - RNA, 19 nt, Artificial Sequence
  Description of Artificial Sequence: Synthetic oligonucleotide
  Sense strand starting at position 3487 of SEQ ID NO: 2698
cuaauagugacuggugcau

SEQ ID NO: 209489 - RNA, 19 nt, Artificial Sequence
  Description of Artificial Sequence: Synthetic oligonucleotide
  Antisense strand to SEQ ID NO: 209488
augcaccagucacuauuag

SEQ ID NO: 209490 - RNA, 19 nt, Artificial Sequence
  Description of Artificial Sequence: Synthetic oligonucleotide
  Sense strand starting at position 3510 of SEQ ID NO: 2698
ggcagaagguccuugguuu

SEQ ID NO: 209491 - RNA, 19 nt, Artificial Sequence
  Description of Artificial Sequence: Synthetic oligonucleotide
  Antisense strand to SEQ ID NO: 209490
aaaccaaggaccuucugcc

SEQ ID NO: 209492 - RNA, 19 nt, Artificial Sequence
  Description of Artificial Sequence: Synthetic oligonucleotide
  Sense strand starting at position 3525 of SEQ ID NO: 2698
guuucucagucaccuaaca

SEQ ID NO: 209493 - RNA, 19 nt, Artificial Sequence
  Description of Artificial Sequence: Synthetic oligonucleotide
  Antisense strand to SEQ ID NO: 209492
uguuaggugacugagaaac

SEQ ID NO: 209494 - RNA, 19 nt, Artificial Sequence
  Description of Artificial Sequence: Synthetic oligonucleotide
  Sense strand starting at position 3580 of SEQ ID NO: 2698
uuaucaaaccauuggcgua

SEQ ID NO: 209495 - RNA, 19 nt, Artificial Sequence
  Description of Artificial Sequence: Synthetic oligonucleotide
  Antisense strand to SEQ ID NO: 209494
uacgccaaugguuugauaa

SEQ ID NO: 209496 - RNA, 19 nt, Artificial Sequence
  Description of Artificial Sequence: Synthetic oligonucleotide
  Sense strand starting at position 3636 of SEQ ID NO: 2698
ucugaacaguucucagaag

SEQ ID NO: 209497 - RNA, 19 nt, Artificial Sequence
  Description of Artificial Sequence: Synthetic oligonucleotide
  Antisense strand to SEQ ID NO: 209496
cuucugagaacuguucaga

SEQ ID NO: 209498 - RNA, 19 nt, Artificial Sequence
  Description of Artificial Sequence: Synthetic oligonucleotide
  Sense strand starting at position 3743 of SEQ ID NO: 2698
cagaauaaggucuguuugu

SEQ ID NO: 209499 - RNA, 19 nt, Artificial Sequence
  Description of Artificial Sequence: Synthetic oligonucleotide
  Antisense strand to SEQ ID NO: 209498
acaaacagaccuuauucug

SEQ ID NO: 209500 - RNA, 19 nt, Artificial Sequence
  Description of Artificial Sequence: Synthetic oligonucleotide
  Sense strand starting at position 3744 of SEQ ID NO: 2698
agaauaaggucuguuuguc

SEQ ID NO: 209501 - RNA, 19 nt, Artificial Sequence
  Description of Artificial Sequence: Synthetic oligonucleotide
  Antisense strand to SEQ ID NO: 209500
gacaaacagaccuuauucu

SEQ ID NO: 209502 - RNA, 19 nt, Artificial Sequence
  Description of Artificial Sequence: Synthetic oligonucleotide
  Sense strand starting at position 3749 of SEQ ID NO: 2698
aaggucuguuugucucuaa

SEQ ID NO: 209503 - RNA, 19 nt, Artificial Sequence
  Description of Artificial Sequence: Synthetic oligonucleotide
  Antisense strand to SEQ ID NO: 209502
uuagagacaaacagaccuu

SEQ ID NO: 209504 - RNA, 19 nt, Artificial Sequence
  Description of Artificial Sequence: Synthetic oligonucleotide
  Sense strand starting at position 3775 of SEQ ID NO: 2698
agugguuagucaccaccua

SEQ ID NO: 209505 - RNA, 19 nt, Artificial Sequence
  Description of Artificial Sequence: Synthetic oligonucleotide
  Antisense strand to SEQ ID NO: 209504
uagguggugacuaaccacu

SEQ ID NO: 209506 - RNA, 19 nt, Artificial Sequence
  Description of Artificial Sequence: Synthetic oligonucleotide
  Sense strand starting at position 3776 of SEQ ID NO: 2698
gugguuagucaccaccuaa

SEQ ID NO: 209507 - RNA, 19 nt, Artificial Sequence
  Description of Artificial Sequence: Synthetic oligonucleotide
  Antisense strand to SEQ ID NO: 209506
uuagguggugacuaaccac

SEQ ID NO: 209508 - RNA, 19 nt, Artificial Sequence
  Description of Artificial Sequence: Synthetic oligonucleotide
  Sense strand starting at position 159 of SEQ ID NO: 2699
guuuguaaucuauauaucc

SEQ ID NO: 209509 - RNA, 19 nt, Artificial Sequence
  Description of Artificial Sequence: Synthetic oligonucleotide
  Antisense strand to SEQ ID NO: 209508
ggauauauagauuacaaac

SEQ ID NO: 209510 - RNA, 19 nt, Artificial Sequence
  Description of Artificial Sequence: Synthetic oligonucleotide
  Sense strand starting at position 265 of SEQ ID NO: 2699
aaaucacggcuuggaaaua

SEQ ID NO: 209511 - RNA, 19 nt, Artificial Sequence
  Description of Artificial Sequence: Synthetic oligonucleotide
  Antisense strand to SEQ ID NO: 209510
uauuuccaagccgugauuu

SEQ ID NO: 209512 - RNA, 19 nt, Artificial Sequence
  Description of Artificial Sequence: Synthetic oligonucleotide
  Sense strand starting at position 312 of SEQ ID NO: 2699
auuuaagugucucacucaa

SEQ ID NO: 209513 - RNA, 19 nt, Artificial Sequence
  Description of Artificial Sequence: Synthetic oligonucleotide
  Antisense strand to SEQ ID NO: 209512
uugagugagacacuuaaau

SEQ ID NO: 209514 - RNA, 19 nt, Artificial Sequence
  Description of Artificial Sequence: Synthetic oligonucleotide
  Sense strand starting at position 338 of SEQ ID NO: 2699
agugacagaucacaaagau

SEQ ID NO: 209515 - RNA, 19 nt, Artificial Sequence
  Description of Artificial Sequence: Synthetic oligonucleotide
  Antisense strand to SEQ ID NO: 209514
aucuuugugaucugucacu

SEQ ID NO: 209516 - RNA, 19 nt, Artificial Sequence
  Description of Artificial Sequence: Synthetic oligonucleotide
  Sense strand starting at position 389 of SEQ ID NO: 2699
gugaaagaaucucaugaag

SEQ ID NO: 209517 - RNA, 19 nt, Artificial Sequence
  Description of Artificial Sequence: Synthetic oligonucleotide
  Antisense strand to SEQ ID NO: 209516
cuucaugagauucuuucac

SEQ ID NO: 209518 - RNA, 19 nt, Artificial Sequence
  Description of Artificial Sequence: Synthetic oligonucleotide
  Sense strand starting at position 661 of SEQ ID NO: 2699
uagcucuugcagugauaac

SEQ ID NO: 209519 - RNA, 19 nt, Artificial Sequence
  Description of Artificial Sequence: Synthetic oligonucleotide
  Antisense strand to SEQ ID NO: 209518
guuaucacugcaagagcua

SEQ ID NO: 209520 - RNA, 19 nt, Artificial Sequence
  Description of Artificial Sequence: Synthetic oligonucleotide
  Sense strand starting at position 695 of SEQ ID NO: 2699
gcauuugccaucggaagca

SEQ ID NO: 209521 - RNA, 19 nt, Artificial Sequence
  Description of Artificial Sequence: Synthetic oligonucleotide
  Antisense strand to SEQ ID NO: 209520
ugcuuccgauggcaaaugc

SEQ ID NO: 209522 - RNA, 19 nt, Artificial Sequence
  Description of Artificial Sequence: Synthetic oligonucleotide
  Sense strand starting at position 710 of SEQ ID NO: 2699
agcagaaaccugcaucuca

SEQ ID NO: 209523 - RNA, 19 nt, Artificial Sequence
  Description of Artificial Sequence: Synthetic oligonucleotide
  Antisense strand to SEQ ID NO: 209522
ugagaugcagguuucugcu

SEQ ID NO: 209524 - RNA, 19 nt, Artificial Sequence
  Description of Artificial Sequence: Synthetic oligonucleotide
  Sense strand starting at position 872 of SEQ ID NO: 2699
gcacaugauguccauaaca

SEQ ID NO: 209525 - RNA, 19 nt, Artificial Sequence
  Description of Artificial Sequence: Synthetic oligonucleotide
  Antisense strand to SEQ ID NO: 209524
uguuauggacaucaugugc

SEQ ID NO: 209526 - RNA, 19 nt, Artificial Sequence
  Description of Artificial Sequence: Synthetic oligonucleotide
  Sense strand starting at position 1025 of SEQ ID NO: 2699
cucugauugugucuaucua

SEQ ID NO: 209527 - RNA, 19 nt, Artificial Sequence
  Description of Artificial Sequence: Synthetic oligonucleotide
  Antisense strand to SEQ ID NO: 209526
uagauagacacaaucagag

SEQ ID NO: 209528 - RNA, 19 nt, Artificial Sequence
  Description of Artificial Sequence: Synthetic oligonucleotide
  Sense strand starting at position 1430 of SEQ ID NO: 2699
ggaccacauggguguguuu

SEQ ID NO: 209529 - RNA, 19 nt, Artificial Sequence
  Description of Artificial Sequence: Synthetic oligonucleotide
  Antisense strand to SEQ ID NO: 209528
aaacacacccauguggucc

SEQ ID NO: 209530 - RNA, 19 nt, Artificial Sequence
  Description of Artificial Sequence: Synthetic oligonucleotide
  Sense strand starting at position 1526 of SEQ ID NO: 2699
gcagcaaagucaguagaga

SEQ ID NO: 209531 - RNA, 19 nt, Artificial Sequence
  Description of Artificial Sequence: Synthetic oligonucleotide
  Antisense strand to SEQ ID NO: 209530
ucucuacugacuuugcugc

SEQ ID NO: 209532 - RNA, 19 nt, Artificial Sequence
  Description of Artificial Sequence: Synthetic oligonucleotide
  Sense strand starting at position 1527 of SEQ ID NO: 2699
cagcaaagucaguagagau

SEQ ID NO: 209533 - RNA, 19 nt, Artificial Sequence
  Description of Artificial Sequence: Synthetic oligonucleotide
  Antisense strand to SEQ ID NO: 209532
aucucuacugacuuugcug

SEQ ID NO: 209534 - RNA, 19 nt, Artificial Sequence
  Description of Artificial Sequence: Synthetic oligonucleotide
  Sense strand starting at position 1568 of SEQ ID NO: 2699
ucacaaguuugacugggau

SEQ ID NO: 209535 - RNA, 19 nt, Artificial Sequence
  Description of Artificial Sequence: Synthetic oligonucleotide
  Antisense strand to SEQ ID NO: 209534
aucccagucaaacuuguga

SEQ ID NO: 209536 - RNA, 19 nt, Artificial Sequence
  Description of Artificial Sequence: Synthetic oligonucleotide
  Sense strand starting at position 1570 of SEQ ID NO: 2699
acaaguuugacugggauca

SEQ ID NO: 209537 - RNA, 19 nt, Artificial Sequence
  Description of Artificial Sequence: Synthetic oligonucleotide
  Antisense strand to SEQ ID NO: 209536
ugaucccagucaaacuugu

SEQ ID NO: 209538 - RNA, 19 nt, Artificial Sequence
  Description of Artificial Sequence: Synthetic oligonucleotide
  Sense strand starting at position 1872 of SEQ ID NO: 2699
agaggcaaauccuuaccuu

SEQ ID NO: 209539 - RNA, 19 nt, Artificial Sequence
  Description of Artificial Sequence: Synthetic oligonucleotide
  Antisense strand to SEQ ID NO: 209538
aagguaaggauuugccucu

SEQ ID NO: 209540 - RNA, 19 nt, Artificial Sequence
  Description of Artificial Sequence: Synthetic oligonucleotide
  Sense strand starting at position 1997 of SEQ ID NO: 2699
ucuacuuccuguuucgaaa

SEQ ID NO: 209541 - RNA, 19 nt, Artificial Sequence
  Description of Artificial Sequence: Synthetic oligonucleotide
  Antisense strand to SEQ ID NO: 209540
uuucgaaacaggaaguaga

SEQ ID NO: 209542 - RNA, 19 nt, Artificial Sequence
  Description of Artificial Sequence: Synthetic oligonucleotide
  Sense strand starting at position 2011 of SEQ ID NO: 2699
cgaaacuccugagucacaa

SEQ ID NO: 209543 - RNA, 19 nt, Artificial Sequence
  Description of Artificial Sequence: Synthetic oligonucleotide
  Antisense strand to SEQ ID NO: 209542
uugugacucaggaguuucg

SEQ ID NO: 209544 - RNA, 19 nt, Artificial Sequence
  Description of Artificial Sequence: Synthetic oligonucleotide
  Sense strand starting at position 2069 of SEQ ID NO: 2699
ugagcagagugccuucuaa

SEQ ID NO: 209545 - RNA, 19 nt, Artificial Sequence
  Description of Artificial Sequence: Synthetic oligonucleotide
  Antisense strand to SEQ ID NO: 209544
uuagaaggcacucugcuca

SEQ ID NO: 209546 - RNA, 19 nt, Artificial Sequence
  Description of Artificial Sequence: Synthetic oligonucleotide
  Sense strand starting at position 2090 of SEQ ID NO: 2699
cuucuaaagcugcaggaaa

SEQ ID NO: 209547 - RNA, 19 nt, Artificial Sequence
  Description of Artificial Sequence: Synthetic oligonucleotide
  Antisense strand to SEQ ID NO: 209546
uuuccugcagcuuuagaag

SEQ ID NO: 209548 - RNA, 19 nt, Artificial Sequence
  Description of Artificial Sequence: Synthetic oligonucleotide
  Sense strand starting at position 2233 of SEQ ID NO: 2699
guuggacuggauuguaacu

SEQ ID NO: 209549 - RNA, 19 nt, Artificial Sequence
  Description of Artificial Sequence: Synthetic oligonucleotide
  Antisense strand to SEQ ID NO: 209548
aguuacaauccaguccaac

SEQ ID NO: 209550 - RNA, 19 nt, Artificial Sequence
  Description of Artificial Sequence: Synthetic oligonucleotide
  Sense strand starting at position 2355 of SEQ ID NO: 2699
ggucuugagauuggacacu

SEQ ID NO: 209551 - RNA, 19 nt, Artificial Sequence
  Description of Artificial Sequence: Synthetic oligonucleotide
  Antisense strand to SEQ ID NO: 209550
aguguccaaucucaagacc

SEQ ID NO: 209552 - RNA, 19 nt, Artificial Sequence
  Description of Artificial Sequence: Synthetic oligonucleotide
  Sense strand starting at position 2432 of SEQ ID NO: 2699
ugguuuagccaaggagcau

SEQ ID NO: 209553 - RNA, 19 nt, Artificial Sequence
  Description of Artificial Sequence: Synthetic oligonucleotide
  Antisense strand to SEQ ID NO: 209552
augcuccuuggcuaaacca

SEQ ID NO: 209554 - RNA, 19 nt, Artificial Sequence
  Description of Artificial Sequence: Synthetic oligonucleotide
  Sense strand starting at position 2667 of SEQ ID NO: 2699
aaaggugauccuuguauau

SEQ ID NO: 209555 - RNA, 19 nt, Artificial Sequence
  Description of Artificial Sequence: Synthetic oligonucleotide
  Antisense strand to SEQ ID NO: 209554
auauacaaggaucaccuuu

SEQ ID NO: 209556 - RNA, 19 nt, Artificial Sequence
  Description of Artificial Sequence: Synthetic oligonucleotide
  Sense strand starting at position 2671 of SEQ ID NO: 2699
gugauccuuguauaugagu

SEQ ID NO: 209557 - RNA, 19 nt, Artificial Sequence
  Description of Artificial Sequence: Synthetic oligonucleotide
  Antisense strand to SEQ ID NO: 209556
acucauauacaaggaucac

SEQ ID NO: 209558 - RNA, 19 nt, Artificial Sequence
  Description of Artificial Sequence: Synthetic oligonucleotide
  Sense strand starting at position 2679 of SEQ ID NO: 2699
uguauaugaguguagcuga

SEQ ID NO: 209559 - RNA, 19 nt, Artificial Sequence
  Description of Artificial Sequence: Synthetic oligonucleotide
  Antisense strand to SEQ ID NO: 209558
ucagcuacacucauauaca

SEQ ID NO: 209560 - RNA, 19 nt, Artificial Sequence
  Description of Artificial Sequence: Synthetic oligonucleotide
  Sense strand starting at position 2684 of SEQ ID NO: 2699
augaguguagcugaggaaa

SEQ ID NO: 209561 - RNA, 19 nt, Artificial Sequence
  Description of Artificial Sequence: Synthetic oligonucleotide
  Antisense strand to SEQ ID NO: 209560
uuuccucagcuacacucau

SEQ ID NO: 209562 - RNA, 19 nt, Artificial Sequence
  Description of Artificial Sequence: Synthetic oligonucleotide
  Sense strand starting at position 2767 of SEQ ID NO: 2699
cauguugggcucuagggau

SEQ ID NO: 209563 - RNA, 19 nt, Artificial Sequence
  Description of Artificial Sequence: Synthetic oligonucleotide
  Antisense strand to SEQ ID NO: 209562
aucccuagagcccaacaug

SEQ ID NO: 209564 - RNA, 19 nt, Artificial Sequence
  Description of Artificial Sequence: Synthetic oligonucleotide
  Sense strand starting at position 2813 of SEQ ID NO: 2699
uacugagaguuagaugaaa

SEQ ID NO: 209565 - RNA, 19 nt, Artificial Sequence
  Description of Artificial Sequence: Synthetic oligonucleotide
  Antisense strand to SEQ ID NO: 209564
uuucaucuaacucucagua

SEQ ID NO: 209566 - RNA, 19 nt, Artificial Sequence
  Description of Artificial Sequence: Synthetic oligonucleotide
  Sense strand starting at position 2933 of SEQ ID NO: 2699
gggacucauagcugagaag

SEQ ID NO: 209567 - RNA, 19 nt, Artificial Sequence
  Description of Artificial Sequence: Synthetic oligonucleotide
  Antisense strand to SEQ ID NO: 209566
cuucucagcuaugaguccc

SEQ ID NO: 209568 - RNA, 19 nt, Artificial Sequence
  Description of Artificial Sequence: Synthetic oligonucleotide
  Sense strand starting at position 2995 of SEQ ID NO: 2699
aggucaagauggccucaua

SEQ ID NO: 209569 - RNA, 19 nt, Artificial Sequence
  Description of Artificial Sequence: Synthetic oligonucleotide
  Antisense strand to SEQ ID NO: 209568
uaugaggccaucuugaccu

SEQ ID NO: 209570 - RNA, 19 nt, Artificial Sequence
  Description of Artificial Sequence: Synthetic oligonucleotide
  Sense strand starting at position 3390 of SEQ ID NO: 2699
ugcuaacucguguaguaag

SEQ ID NO: 209571 - RNA, 19 nt, Artificial Sequence
  Description of Artificial Sequence: Synthetic oligonucleotide
  Antisense strand to SEQ ID NO: 209570
cuuacuacacgaguuagca

SEQ ID NO: 209572 - RNA, 19 nt, Artificial Sequence
  Description of Artificial Sequence: Synthetic oligonucleotide
  Sense strand starting at position 3398 of SEQ ID NO: 2699
cguguaguaagugauguau

SEQ ID NO: 209573 - RNA, 19 nt, Artificial Sequence
  Description of Artificial Sequence: Synthetic oligonucleotide
  Antisense strand to SEQ ID NO: 209572
auacaucacuuacuacacg

SEQ ID NO: 209574 - RNA, 19 nt, Artificial Sequence
  Description of Artificial Sequence: Synthetic oligonucleotide
  Sense strand starting at position 3494 of SEQ ID NO: 2699
agaggaauuacuugccuga

SEQ ID NO: 209575 - RNA, 19 nt, Artificial Sequence
  Description of Artificial Sequence: Synthetic oligonucleotide
  Antisense strand to SEQ ID NO: 209574
ucaggcaaguaauuccucu

SEQ ID NO: 209576 - RNA, 19 nt, Artificial Sequence
  Description of Artificial Sequence: Synthetic oligonucleotide
  Sense strand starting at position 3496 of SEQ ID NO: 2699
aggaauuacuugccugaga

SEQ ID NO: 209577 - RNA, 19 nt, Artificial Sequence
  Description of Artificial Sequence: Synthetic oligonucleotide
  Antisense strand to SEQ ID NO: 209576
ucucaggcaaguaauuccu

SEQ ID NO: 209578 - RNA, 19 nt, Artificial Sequence
  Description of Artificial Sequence: Synthetic oligonucleotide
  Sense strand starting at position 3497 of SEQ ID NO: 2699
ggaauuacuugccugagau

SEQ ID NO: 209579 - RNA, 19 nt, Artificial Sequence
  Description of Artificial Sequence: Synthetic oligonucleotide
  Antisense strand to SEQ ID NO: 209578
aucucaggcaaguaauucc

SEQ ID NO: 209580 - RNA, 19 nt, Artificial Sequence
  Description of Artificial Sequence: Synthetic oligonucleotide
  Sense strand starting at position 3714 of SEQ ID NO: 2699
agggcaucgugauucgaca

SEQ ID NO: 209581 - RNA, 19 nt, Artificial Sequence
  Description of Artificial Sequence: Synthetic oligonucleotide
  Antisense strand to SEQ ID NO: 209580
ugucgaaucacgaugcccu

SEQ ID NO: 209582 - RNA, 19 nt, Artificial Sequence
  Description of Artificial Sequence: Synthetic oligonucleotide
  Sense strand starting at position 3716 of SEQ ID NO: 2699
ggcaucgugauucgacaga

SEQ ID NO: 209583 - RNA, 19 nt, Artificial Sequence
  Description of Artificial Sequence: Synthetic oligonucleotide
  Antisense strand to SEQ ID NO: 209582
ucugucgaaucacgaugcc

SEQ ID NO: 209584 - RNA, 19 nt, Artificial Sequence
  Description of Artificial Sequence: Synthetic oligonucleotide
  Sense strand starting at position 3721 of SEQ ID NO: 2699
cgugauucgacagaaugac

SEQ ID NO: 209585 - RNA, 19 nt, Artificial Sequence
  Description of Artificial Sequence: Synthetic oligonucleotide
  Antisense strand to SEQ ID NO: 209584
gucauucugucgaaucacg

SEQ ID NO: 209586 - RNA, 19 nt, Artificial Sequence
  Description of Artificial Sequence: Synthetic oligonucleotide
  Sense strand starting at position 3901 of SEQ ID NO: 2699
acuggagacugcucagagu

SEQ ID NO: 209587 - RNA, 19 nt, Artificial Sequence
  Description of Artificial Sequence: Synthetic oligonucleotide
  Antisense strand to SEQ ID NO: 209586
acucugagcagucuccagu

SEQ ID NO: 209588 - RNA, 19 nt, Artificial Sequence
  Description of Artificial Sequence: Synthetic oligonucleotide
  Sense strand starting at position 614 of SEQ ID NO: 2700
ugagcuuuacauugcauca

SEQ ID NO: 209589 - RNA, 19 nt, Artificial Sequence
  Description of Artificial Sequence: Synthetic oligonucleotide
  Antisense strand to SEQ ID NO: 209588
ugaugcaauguaaagcuca

SEQ ID NO: 209590 - RNA, 19 nt, Artificial Sequence
  Description of Artificial Sequence: Synthetic oligonucleotide
  Sense strand starting at position 624 of SEQ ID NO: 2700
auugcaucauaacacgauu

SEQ ID NO: 209591 - RNA, 19 nt, Artificial Sequence
  Description of Artificial Sequence: Synthetic oligonucleotide
  Antisense strand to SEQ ID NO: 209590
aaucguguuaugaugcaau

SEQ ID NO: 209592 - RNA, 19 nt, Artificial Sequence
  Description of Artificial Sequence: Synthetic oligonucleotide
  Sense strand starting at position 630 of SEQ ID NO: 2700
ucauaacacgauugcuauu

SEQ ID NO: 209593 - RNA, 19 nt, Artificial Sequence
  Description of Artificial Sequence: Synthetic oligonucleotide
  Antisense strand to SEQ ID NO: 209592
aauagcaaucguguuauga

SEQ ID NO: 209594 - RNA, 19 nt, Artificial Sequence
  Description of Artificial Sequence: Synthetic oligonucleotide
  Sense strand starting at position 660 of SEQ ID NO: 2700
cuguguauguaauagguuu

SEQ ID NO: 209595 - RNA, 19 nt, Artificial Sequence
  Description of Artificial Sequence: Synthetic oligonucleotide
  Antisense strand to SEQ ID NO: 209594
aaaccuauuacauacacag

SEQ ID NO: 209596 - RNA, 19 nt, Artificial Sequence
  Description of Artificial Sequence: Synthetic oligonucleotide
  Sense strand starting at position 758 of SEQ ID NO: 2700
gaaguaccuugaugaaguc

SEQ ID NO: 209597 - RNA, 19 nt, Artificial Sequence
  Description of Artificial Sequence: Synthetic oligonucleotide
  Antisense strand to SEQ ID NO: 209596
gacuucaucaagguacuuc

SEQ ID NO: 209598 - RNA, 19 nt, Artificial Sequence
  Description of Artificial Sequence: Synthetic oligonucleotide
  Sense strand starting at position 851 of SEQ ID NO: 2700
acaggagaugugggucaga

SEQ ID NO: 209599 - RNA, 19 nt, Artificial Sequence
  Description of Artificial Sequence: Synthetic oligonucleotide
  Antisense strand to SEQ ID NO: 209598
ucugacccacaucuccugu

SEQ ID NO: 209600 - RNA, 19 nt, Artificial Sequence
  Description of Artificial Sequence: Synthetic oligonucleotide
  Sense strand starting at position 898 of SEQ ID NO: 2700
gcuggaggacuagguguaa

SEQ ID NO: 209601 - RNA, 19 nt, Artificial Sequence
  Description of Artificial Sequence: Synthetic oligonucleotide
  Antisense strand to SEQ ID NO: 209600
uuacaccuaguccuccagc

SEQ ID NO: 209602 - RNA, 19 nt, Artificial Sequence
  Description of Artificial Sequence: Synthetic oligonucleotide
  Sense strand starting at position 1001 of SEQ ID NO: 2700
gugccuuguccugguccaa

SEQ ID NO: 209603 - RNA, 19 nt, Artificial Sequence
  Description of Artificial Sequence: Synthetic oligonucleotide
  Antisense strand to SEQ ID NO: 209602
uuggaccaggacaaggcac

SEQ ID NO: 209604 - RNA, 19 nt, Artificial Sequence
  Description of Artificial Sequence: Synthetic oligonucleotide
  Sense strand starting at position 1499 of SEQ ID NO: 2700
gggccuucccuugaagaau

SEQ ID NO: 209605 - RNA, 19 nt, Artificial Sequence
  Description of Artificial Sequence: Synthetic oligonucleotide
  Antisense strand to SEQ ID NO: 209604
auucuucaagggaaggccc

SEQ ID NO: 209606 - RNA, 19 nt, Artificial Sequence
  Description of Artificial Sequence: Synthetic oligonucleotide
  Sense strand starting at position 1508 of SEQ ID NO: 2700
cuugaagaaugucaacaaa

SEQ ID NO: 209607 - RNA, 19 nt, Artificial Sequence
  Description of Artificial Sequence: Synthetic oligonucleotide
  Antisense strand to SEQ ID NO: 209606
uuuguugacauucuucaag

SEQ ID NO: 209608 - RNA, 19 nt, Artificial Sequence
  Description of Artificial Sequence: Synthetic oligonucleotide
  Sense strand starting at position 1542 of SEQ ID NO: 2700
uucugagucccaggagaau

SEQ ID NO: 209609 - RNA, 19 nt, Artificial Sequence
  Description of Artificial Sequence: Synthetic oligonucleotide
  Antisense strand to SEQ ID NO: 209608
auucuccugggacucagaa

SEQ ID NO: 209610 - RNA, 19 nt, Artificial Sequence
  Description of Artificial Sequence: Synthetic oligonucleotide
  Sense strand starting at position 2122 of SEQ ID NO: 2700
ugagguguuguccagcaga

SEQ ID NO: 209611 - RNA, 19 nt, Artificial Sequence
  Description of Artificial Sequence: Synthetic oligonucleotide
  Antisense strand to SEQ ID NO: 209610
ucugcuggacaacaccuca

SEQ ID NO: 209612 - RNA, 19 nt, Artificial Sequence
  Description of Artificial Sequence: Synthetic oligonucleotide
  Sense strand starting at position 2139 of SEQ ID NO: 2700
gagggagcauuugauauau

SEQ ID NO: 209613 - RNA, 19 nt, Artificial Sequence
  Description of Artificial Sequence: Synthetic oligonucleotide
  Antisense strand to SEQ ID NO: 209612
auauaucaaaugcucccuc

SEQ ID NO: 209614 - RNA, 19 nt, Artificial Sequence
  Description of Artificial Sequence: Synthetic oligonucleotide
  Sense strand starting at position 2213 of SEQ ID NO: 2700
ggcgcauucucaucucacu

SEQ ID NO: 209615 - RNA, 19 nt, Artificial Sequence
  Description of Artificial Sequence: Synthetic oligonucleotide
  Antisense strand to SEQ ID NO: 209614
agugagaugagaaugcgcc

SEQ ID NO: 209616 - RNA, 19 nt, Artificial Sequence
  Description of Artificial Sequence: Synthetic oligonucleotide
  Sense strand starting at position 2254 of SEQ ID NO: 2700
aagcaauucuucuugaggu

SEQ ID NO: 209617 - RNA, 19 nt, Artificial Sequence
  Description of Artificial Sequence: Synthetic oligonucleotide
  Antisense strand to SEQ ID NO: 209616
accucaagaagaauugcuu

SEQ ID NO: 209618 - RNA, 19 nt, Artificial Sequence
  Description of Artificial Sequence: Synthetic oligonucleotide
  Sense strand starting at position 2255 of SEQ ID NO: 2700
agcaauucuucuugagguc

SEQ ID NO: 209619 - RNA, 19 nt, Artificial Sequence
  Description of Artificial Sequence: Synthetic oligonucleotide
  Antisense strand to SEQ ID NO: 209618
gaccucaagaagaauugcu

SEQ ID NO: 209620 - RNA, 19 nt, Artificial Sequence
  Description of Artificial Sequence: Synthetic oligonucleotide
  Sense strand starting at position 2256 of SEQ ID NO: 2700
gcaauucuucuugaggucu

SEQ ID NO: 209621 - RNA, 19 nt, Artificial Sequence
  Description of Artificial Sequence: Synthetic oligonucleotide
  Antisense strand to SEQ ID NO: 209620
agaccucaagaagaauugc

SEQ ID NO: 209622 - RNA, 19 nt, Artificial Sequence
  Description of Artificial Sequence: Synthetic oligonucleotide
  Sense strand starting at position 2460 of SEQ ID NO: 2700
auuugauauucuuaagagg

SEQ ID NO: 209623 - RNA, 19 nt, Artificial Sequence
  Description of Artificial Sequence: Synthetic oligonucleotide
  Antisense strand to SEQ ID NO: 209622
ccucuuaagaauaucaaau

SEQ ID NO: 209624 - RNA, 19 nt, Artificial Sequence
  Description of Artificial Sequence: Synthetic oligonucleotide
  Sense strand starting at position 2481 of SEQ ID NO: 2700
gagugaagaaaugggucau

SEQ ID NO: 209625 - RNA, 19 nt, Artificial Sequence
  Description of Artificial Sequence: Synthetic oligonucleotide
  Antisense strand to SEQ ID NO: 209624
augacccauuucuucacuc

SEQ ID NO: 209626 - RNA, 19 nt, Artificial Sequence
  Description of Artificial Sequence: Synthetic oligonucleotide
  Sense strand starting at position 2482 of SEQ ID NO: 2700
agugaagaaaugggucauu

SEQ ID NO: 209627 - RNA, 19 nt, Artificial Sequence
  Description of Artificial Sequence: Synthetic oligonucleotide
  Antisense strand to SEQ ID NO: 209626
aaugacccauuucuucacu

SEQ ID NO: 209628 - RNA, 19 nt, Artificial Sequence
  Description of Artificial Sequence: Synthetic oligonucleotide
  Sense strand starting at position 2493 of SEQ ID NO: 2700
gggucauuagaaugaccuu

SEQ ID NO: 209629 - RNA, 19 nt, Artificial Sequence
  Description of Artificial Sequence: Synthetic oligonucleotide
  Antisense strand to SEQ ID NO: 209628
aaggucauucuaaugaccc

SEQ ID NO: 209630 - RNA, 19 nt, Artificial Sequence
  Description of Artificial Sequence: Synthetic oligonucleotide
  Sense strand starting at position 2706 of SEQ ID NO: 2700
cuuagaagauaugaacgaa

SEQ ID NO: 209631 - RNA, 19 nt, Artificial Sequence
  Description of Artificial Sequence: Synthetic oligonucleotide
  Antisense strand to SEQ ID NO: 209630
uucguucauaucuucuaag

SEQ ID NO: 209632 - RNA, 19 nt, Artificial Sequence
  Description of Artificial Sequence: Synthetic oligonucleotide
  Sense strand starting at position 2754 of SEQ ID NO: 2700
ccaauuagcugcuacauga

SEQ ID NO: 209633 - RNA, 19 nt, Artificial Sequence
  Description of Artificial Sequence: Synthetic oligonucleotide
  Antisense strand to SEQ ID NO: 209632
ucauguagcagcuaauugg

SEQ ID NO: 209634 - RNA, 19 nt, Artificial Sequence
  Description of Artificial Sequence: Synthetic oligonucleotide
  Sense strand starting at position 2767 of SEQ ID NO: 2700
acaugaauaucucugcaag

SEQ ID NO: 209635 - RNA, 19 nt, Artificial Sequence
  Description of Artificial Sequence: Synthetic oligonucleotide
  Antisense strand to SEQ ID NO: 209634
cuugcagagauauucaugu

SEQ ID NO: 209636 - RNA, 19 nt, Artificial Sequence
  Description of Artificial Sequence: Synthetic oligonucleotide
  Sense strand starting at position 2769 of SEQ ID NO: 2700
augaauaucucugcaaguu

SEQ ID NO: 209637 - RNA, 19 nt, Artificial Sequence
  Description of Artificial Sequence: Synthetic oligonucleotide
  Antisense strand to SEQ ID NO: 209636
aacuugcagagauauucau

SEQ ID NO: 209638 - RNA, 19 nt, Artificial Sequence
  Description of Artificial Sequence: Synthetic oligonucleotide
  Sense strand starting at position 2770 of SEQ ID NO: 2700
ugaauaucucugcaaguua

SEQ ID NO: 209639 - RNA, 19 nt, Artificial Sequence
  Description of Artificial Sequence: Synthetic oligonucleotide
  Antisense strand to SEQ ID NO: 209638
uaacuugcagagauauuca

SEQ ID NO: 209640 - RNA, 19 nt, Artificial Sequence
  Description of Artificial Sequence: Synthetic oligonucleotide
  Sense strand starting at position 2849 of SEQ ID NO: 2700
uggacuuauuccuggugag

SEQ ID NO: 209641 - RNA, 19 nt, Artificial Sequence
  Description of Artificial Sequence: Synthetic oligonucleotide
  Antisense strand to SEQ ID NO: 209640
cucaccaggaauaagucca

SEQ ID NO: 209642 - RNA, 19 nt, Artificial Sequence
  Description of Artificial Sequence: Synthetic oligonucleotide
  Sense strand starting at position 2850 of SEQ ID NO: 2700
ggacuuauuccuggugagg

SEQ ID NO: 209643 - RNA, 19 nt, Artificial Sequence
  Description of Artificial Sequence: Synthetic oligonucleotide
  Antisense strand to SEQ ID NO: 209642
ccucaccaggaauaagucc

SEQ ID NO: 209644 - RNA, 19 nt, Artificial Sequence
  Description of Artificial Sequence: Synthetic oligonucleotide
  Sense strand starting at position 3344 of SEQ ID NO: 2700
ggguguucucccugugugu

SEQ ID NO: 209645 - RNA, 19 nt, Artificial Sequence
  Description of Artificial Sequence: Synthetic oligonucleotide
  Antisense strand to SEQ ID NO: 209644
acacacagggagaacaccc

SEQ ID NO: 209646 - RNA, 19 nt, Artificial Sequence
  Description of Artificial Sequence: Synthetic oligonucleotide
  Sense strand starting at position 3484 of SEQ ID NO: 2700
cgcugauauuuauugcaca

SEQ ID NO: 209647 - RNA, 19 nt, Artificial Sequence
  Description of Artificial Sequence: Synthetic oligonucleotide
  Antisense strand to SEQ ID NO: 209646
ugugcaauaaauaucagcg

SEQ ID NO: 209648 - RNA, 19 nt, Artificial Sequence
  Description of Artificial Sequence: Synthetic oligonucleotide
  Sense strand starting at position 3525 of SEQ ID NO: 2700
gagggcgagucuucuaagu

SEQ ID NO: 209649 - RNA, 19 nt, Artificial Sequence
  Description of Artificial Sequence: Synthetic oligonucleotide
  Antisense strand to SEQ ID NO: 209648
acuuagaagacucgcccuc

SEQ ID NO: 209650 - RNA, 19 nt, Artificial Sequence
  Description of Artificial Sequence: Synthetic oligonucleotide
  Sense strand starting at position 3527 of SEQ ID NO: 2700
gggcgagucuucuaaguga

SEQ ID NO: 209651 - RNA, 19 nt, Artificial Sequence
  Description of Artificial Sequence: Synthetic oligonucleotide
  Antisense strand to SEQ ID NO: 209650
ucacuuagaagacucgccc

SEQ ID NO: 209652 - RNA, 19 nt, Artificial Sequence
  Description of Artificial Sequence: Synthetic oligonucleotide
  Sense strand starting at position 3530 of SEQ ID NO: 2700
cgagucuucuaagugauug

SEQ ID NO: 209653 - RNA, 19 nt, Artificial Sequence
  Description of Artificial Sequence: Synthetic oligonucleotide
  Antisense strand to SEQ ID NO: 209652
caaucacuuagaagacucg

SEQ ID NO: 209654 - RNA, 19 nt, Artificial Sequence
  Description of Artificial Sequence: Synthetic oligonucleotide
  Sense strand starting at position 3765 of SEQ ID NO: 2700
gagcgugaccuuuggagca

SEQ ID NO: 209655 - RNA, 19 nt, Artificial Sequence
  Description of Artificial Sequence: Synthetic oligonucleotide
  Antisense strand to SEQ ID NO: 209654
ugcuccaaaggucacgcuc

SEQ ID NO: 209656 - RNA, 19 nt, Artificial Sequence
  Description of Artificial Sequence: Synthetic oligonucleotide
  Sense strand starting at position 3948 of SEQ ID NO: 2700
ggcacuaccgcuugaccaa

SEQ ID NO: 209657 - RNA, 19 nt, Artificial Sequence
  Description of Artificial Sequence: Synthetic oligonucleotide
  Antisense strand to SEQ ID NO: 209656
uuggucaagcgguagugcc

SEQ ID NO: 209658 - RNA, 19 nt, Artificial Sequence
  Description of Artificial Sequence: Synthetic oligonucleotide
  Sense strand starting at position 3970 of SEQ ID NO: 2700
gcccucaagugguccuuau

SEQ ID NO: 209659 - RNA, 19 nt, Artificial Sequence
  Description of Artificial Sequence: Synthetic oligonucleotide
  Antisense strand to SEQ ID NO: 209658
auaaggaccacuugagggc

SEQ ID NO: 209660 - RNA, 19 nt, Artificial Sequence
  Description of Artificial Sequence: Synthetic oligonucleotide
  Sense strand starting at position 45 of SEQ ID NO: 2701
uggcaagauccagaugcua

SEQ ID NO: 209661 - RNA, 19 nt, Artificial Sequence
  Description of Artificial Sequence: Synthetic oligonucleotide
  Antisense strand to SEQ ID NO: 209660
uagcaucuggaucuugcca

SEQ ID NO: 209662 - RNA, 19 nt, Artificial Sequence
  Description of Artificial Sequence: Synthetic oligonucleotide
  Sense strand starting at position 59 of SEQ ID NO: 2701
ugcuacagguccuuguaau

SEQ ID NO: 209663 - RNA, 19 nt, Artificial Sequence
  Description of Artificial Sequence: Synthetic oligonucleotide
  Antisense strand to SEQ ID NO: 209662
auuacaaggaccuguagca

SEQ ID NO: 209664 - RNA, 19 nt, Artificial Sequence
  Description of Artificial Sequence: Synthetic oligonucleotide
  Sense strand starting at position 60 of SEQ ID NO: 2701
gcuacagguccuuguaauu

SEQ ID NO: 209665 - RNA, 19 nt, Artificial Sequence
  Description of Artificial Sequence: Synthetic oligonucleotide
  Antisense strand to SEQ ID NO: 209664
aauuacaaggaccuguagc

SEQ ID NO: 209666 - RNA, 19 nt, Artificial Sequence
  Description of Artificial Sequence: Synthetic oligonucleotide
  Sense strand starting at position 231 of SEQ ID NO: 2701
uuacaaaugguugggauca

SEQ ID NO: 209667 - RNA, 19 nt, Artificial Sequence
  Description of Artificial Sequence: Synthetic oligonucleotide
  Antisense strand to SEQ ID NO: 209666
ugaucccaaccauuuguaa

SEQ ID NO: 209668 - RNA, 19 nt, Artificial Sequence
  Description of Artificial Sequence: Synthetic oligonucleotide
  Sense strand starting at position 233 of SEQ ID NO: 2701
acaaaugguugggaucaca

SEQ ID NO: 209669 - RNA, 19 nt, Artificial Sequence
  Description of Artificial Sequence: Synthetic oligonucleotide
  Antisense strand to SEQ ID NO: 209668
ugugaucccaaccauuugu

SEQ ID NO: 209670 - RNA, 19 nt, Artificial Sequence
  Description of Artificial Sequence: Synthetic oligonucleotide
  Sense strand starting at position 1364 of SEQ ID NO: 2701
guaagauaacuugguagga

SEQ ID NO: 209671 - RNA, 19 nt, Artificial Sequence
  Description of Artificial Sequence: Synthetic oligonucleotide
  Antisense strand to SEQ ID NO: 209670
uccuaccaaguuaucuuac

SEQ ID NO: 209672 - RNA, 19 nt, Artificial Sequence
  Description of Artificial Sequence: Synthetic oligonucleotide
  Sense strand starting at position 1403 of SEQ ID NO: 2701
gggcgugucuuagcgucaa

SEQ ID NO: 209673 - RNA, 19 nt, Artificial Sequence
  Description of Artificial Sequence: Synthetic oligonucleotide
  Antisense strand to SEQ ID NO: 209672
uugacgcuaagacacgccc

SEQ ID NO: 209674 - RNA, 19 nt, Artificial Sequence
  Description of Artificial Sequence: Synthetic oligonucleotide
  Sense strand starting at position 1405 of SEQ ID NO: 2701
gcgugucuuagcgucaaag

SEQ ID NO: 209675 - RNA, 19 nt, Artificial Sequence
  Description of Artificial Sequence: Synthetic oligonucleotide
  Antisense strand to SEQ ID NO: 209674
cuuugacgcuaagacacgc

SEQ ID NO: 209676 - RNA, 19 nt, Artificial Sequence
  Description of Artificial Sequence: Synthetic oligonucleotide
  Sense strand starting at position 2483 of SEQ ID NO: 2701
aaucguauuugcuggugca

SEQ ID NO: 209677 - RNA, 19 nt, Artificial Sequence
  Description of Artificial Sequence: Synthetic oligonucleotide
  Antisense strand to SEQ ID NO: 209676
ugcaccagcaaauacgauu

SEQ ID NO: 209678 - RNA, 19 nt, Artificial Sequence
  Description of Artificial Sequence: Synthetic oligonucleotide
  Sense strand starting at position 2484 of SEQ ID NO: 2701
aucguauuugcuggugcau

SEQ ID NO: 209679 - RNA, 19 nt, Artificial Sequence
  Description of Artificial Sequence: Synthetic oligonucleotide
  Antisense strand to SEQ ID NO: 209678
augcaccagcaaauacgau

SEQ ID NO: 209680 - RNA, 19 nt, Artificial Sequence
  Description of Artificial Sequence: Synthetic oligonucleotide
  Sense strand starting at position 2486 of SEQ ID NO: 2701
cguauuugcuggugcauga

SEQ ID NO: 209681 - RNA, 19 nt, Artificial Sequence
  Description of Artificial Sequence: Synthetic oligonucleotide
  Antisense strand to SEQ ID NO: 209680
ucaugcaccagcaaauacg

SEQ ID NO: 209682 - RNA, 19 nt, Artificial Sequence
  Description of Artificial Sequence: Synthetic oligonucleotide
  Sense strand starting at position 2724 of SEQ ID NO: 2701
ccacguauguacuuacaga

SEQ ID NO: 209683 - RNA, 19 nt, Artificial Sequence
  Description of Artificial Sequence: Synthetic oligonucleotide
  Antisense strand to SEQ ID NO: 209682
ucuguaaguacauacgugg

SEQ ID NO: 209684 - RNA, 19 nt, Artificial Sequence
  Description of Artificial Sequence: Synthetic oligonucleotide
  Sense strand starting at position 2972 of SEQ ID NO: 2701
cuguguaagagcugaauug

SEQ ID NO: 209685 - RNA, 19 nt, Artificial Sequence
  Description of Artificial Sequence: Synthetic oligonucleotide
  Antisense strand to SEQ ID NO: 209684
caauucagcucuuacacag

SEQ ID NO: 209686 - RNA, 19 nt, Artificial Sequence
  Description of Artificial Sequence: Synthetic oligonucleotide
  Sense strand starting at position 2982 of SEQ ID NO: 2701
gcugaauugcuggguccua

SEQ ID NO: 209687 - RNA, 19 nt, Artificial Sequence
  Description of Artificial Sequence: Synthetic oligonucleotide
  Antisense strand to SEQ ID NO: 209686
uaggacccagcaauucagc

SEQ ID NO: 209688 - RNA, 19 nt, Artificial Sequence
  Description of Artificial Sequence: Synthetic oligonucleotide
  Sense strand starting at position 3091 of SEQ ID NO: 2701
gagaucucauuggucuguu

SEQ ID NO: 209689 - RNA, 19 nt, Artificial Sequence
  Description of Artificial Sequence: Synthetic oligonucleotide
  Antisense strand to SEQ ID NO: 209688
aacagaccaaugagaucuc

SEQ ID NO: 209690 - RNA, 19 nt, Artificial Sequence
  Description of Artificial Sequence: Synthetic oligonucleotide
  Sense strand starting at position 3092 of SEQ ID NO: 2701
agaucucauuggucuguua

SEQ ID NO: 209691 - RNA, 19 nt, Artificial Sequence
  Description of Artificial Sequence: Synthetic oligonucleotide
  Antisense strand to SEQ ID NO: 209690
uaacagaccaaugagaucu

SEQ ID NO: 209692 - RNA, 19 nt, Artificial Sequence
  Description of Artificial Sequence: Synthetic oligonucleotide
  Sense strand starting at position 3094 of SEQ ID NO: 2701
aucucauuggucuguuaug

SEQ ID NO: 209693 - RNA, 19 nt, Artificial Sequence
  Description of Artificial Sequence: Synthetic oligonucleotide
  Antisense strand to SEQ ID NO: 209692
cauaacagaccaaugagau

SEQ ID NO: 209694 - RNA, 19 nt, Artificial Sequence
  Description of Artificial Sequence: Synthetic oligonucleotide
  Sense strand starting at position 3095 of SEQ ID NO: 2701
ucucauuggucuguuaugu

SEQ ID NO: 209695 - RNA, 19 nt, Artificial Sequence
  Description of Artificial Sequence: Synthetic oligonucleotide
  Antisense strand to SEQ ID NO: 209694
acauaacagaccaaugaga

SEQ ID NO: 209696 - RNA, 19 nt, Artificial Sequence
  Description of Artificial Sequence: Synthetic oligonucleotide
  Sense strand starting at position 3099 of SEQ ID NO: 2701
auuggucuguuaugucaau

SEQ ID NO: 209697 - RNA, 19 nt, Artificial Sequence
  Description of Artificial Sequence: Synthetic oligonucleotide
  Antisense strand to SEQ ID NO: 209696
auugacauaacagaccaau

SEQ ID NO: 209698 - RNA, 19 nt, Artificial Sequence
  Description of Artificial Sequence: Synthetic oligonucleotide
  Sense strand starting at position 3100 of SEQ ID NO: 2701
uuggucuguuaugucaaua

SEQ ID NO: 209699 - RNA, 19 nt, Artificial Sequence
  Description of Artificial Sequence: Synthetic oligonucleotide
  Antisense strand to SEQ ID NO: 209698
uauugacauaacagaccaa

SEQ ID NO: 209700 - RNA, 19 nt, Artificial Sequence
  Description of Artificial Sequence: Synthetic oligonucleotide
  Sense strand starting at position 3105 of SEQ ID NO: 2701
cuguuaugucaauauuauc

SEQ ID NO: 209701 - RNA, 19 nt, Artificial Sequence
  Description of Artificial Sequence: Synthetic oligonucleotide
  Antisense strand to SEQ ID NO: 209700
gauaauauugacauaacag

SEQ ID NO: 209702 - RNA, 19 nt, Artificial Sequence
  Description of Artificial Sequence: Synthetic oligonucleotide
  Sense strand starting at position 3446 of SEQ ID NO: 2701
uucuacugauaaggacaua

SEQ ID NO: 209703 - RNA, 19 nt, Artificial Sequence
  Description of Artificial Sequence: Synthetic oligonucleotide
  Antisense strand to SEQ ID NO: 209702
uauguccuuaucaguagaa

SEQ ID NO: 209704 - RNA, 19 nt, Artificial Sequence
  Description of Artificial Sequence: Synthetic oligonucleotide
  Sense strand starting at position 3634 of SEQ ID NO: 2701
aggcaaauaccuuaggcau

SEQ ID NO: 209705 - RNA, 19 nt, Artificial Sequence
  Description of Artificial Sequence: Synthetic oligonucleotide
  Antisense strand to SEQ ID NO: 209704
augccuaagguauuugccu

SEQ ID NO: 209706 - RNA, 19 nt, Artificial Sequence
  Description of Artificial Sequence: Synthetic oligonucleotide
  Sense strand starting at position 3891 of SEQ ID NO: 2701
ucaccacguucuuugacau

SEQ ID NO: 209707 - RNA, 19 nt, Artificial Sequence
  Description of Artificial Sequence: Synthetic oligonucleotide
  Antisense strand to SEQ ID NO: 209706
augucaaagaacgugguga

SEQ ID NO: 209708 - RNA, 19 nt, Artificial Sequence
  Description of Artificial Sequence: Synthetic oligonucleotide
  Sense strand starting at position 139 of SEQ ID NO: 2702
ugaauauguaaucgauaug

SEQ ID NO: 209709 - RNA, 19 nt, Artificial Sequence
  Description of Artificial Sequence: Synthetic oligonucleotide
  Antisense strand to SEQ ID NO: 209708
cauaucgauuacauauuca

SEQ ID NO: 209710 - RNA, 19 nt, Artificial Sequence
  Description of Artificial Sequence: Synthetic oligonucleotide
  Sense strand starting at position 189 of SEQ ID NO: 2702
guauuaagacuuugaaauc

SEQ ID NO: 209711 - RNA, 19 nt, Artificial Sequence
  Description of Artificial Sequence: Synthetic oligonucleotide
  Antisense strand to SEQ ID NO: 209710
gauuucaaagucuuaauac

SEQ ID NO: 209712 - RNA, 19 nt, Artificial Sequence
  Description of Artificial Sequence: Synthetic oligonucleotide
  Sense strand starting at position 299 of SEQ ID NO: 2702
uggacagcaucacuuuaau

SEQ ID NO: 209713 - RNA, 19 nt, Artificial Sequence
  Description of Artificial Sequence: Synthetic oligonucleotide
  Antisense strand to SEQ ID NO: 209712
auuaaagugaugcugucca

SEQ ID NO: 209714 - RNA, 19 nt, Artificial Sequence
  Description of Artificial Sequence: Synthetic oligonucleotide
  Sense strand starting at position 584 of SEQ ID NO: 2702
gcaauucucccuuacaggu

SEQ ID NO: 209715 - RNA, 19 nt, Artificial Sequence
  Description of Artificial Sequence: Synthetic oligonucleotide
  Antisense strand to SEQ ID NO: 209714
accuguaagggagaauugc

SEQ ID NO: 209716 - RNA, 19 nt, Artificial Sequence
  Description of Artificial Sequence: Synthetic oligonucleotide
  Sense strand starting at position 631 of SEQ ID NO: 2702
acgugugacuugcccauuu

SEQ ID NO: 209717 - RNA, 19 nt, Artificial Sequence
  Description of Artificial Sequence: Synthetic oligonucleotide
  Antisense strand to SEQ ID NO: 209716
aaaugggcaagucacacgu

SEQ ID NO: 209718 - RNA, 19 nt, Artificial Sequence
  Description of Artificial Sequence: Synthetic oligonucleotide
  Sense strand starting at position 674 of SEQ ID NO: 2702
caaguuugucguuuaguuc

SEQ ID NO: 209719 - RNA, 19 nt, Artificial Sequence
  Description of Artificial Sequence: Synthetic oligonucleotide
  Antisense strand to SEQ ID NO: 209718
gaacuaaacgacaaacuug

SEQ ID NO: 209720 - RNA, 19 nt, Artificial Sequence
  Description of Artificial Sequence: Synthetic oligonucleotide
  Sense strand starting at position 680 of SEQ ID NO: 2702
ugucguuuaguuccuuauu

SEQ ID NO: 209721 - RNA, 19 nt, Artificial Sequence
  Description of Artificial Sequence: Synthetic oligonucleotide
  Antisense strand to SEQ ID NO: 209720
aauaaggaacuaaacgaca

SEQ ID NO: 209722 - RNA, 19 nt, Artificial Sequence
  Description of Artificial Sequence: Synthetic oligonucleotide
  Sense strand starting at position 877 of SEQ ID NO: 2702
cuagauucagucguucguu

SEQ ID NO: 209723 - RNA, 19 nt, Artificial Sequence
  Description of Artificial Sequence: Synthetic oligonucleotide
  Antisense strand to SEQ ID NO: 209722
aacgaacgacugaaucuag

SEQ ID NO: 209724 - RNA, 19 nt, Artificial Sequence
  Description of Artificial Sequence: Synthetic oligonucleotide
  Sense strand starting at position 1203 of SEQ ID NO: 2702
guagaaagcugguccaaca

SEQ ID NO: 209725 - RNA, 19 nt, Artificial Sequence
  Description of Artificial Sequence: Synthetic oligonucleotide
  Antisense strand to SEQ ID NO: 209724
uguuggaccagcuuucuac

SEQ ID NO: 209726 - RNA, 19 nt, Artificial Sequence
  Description of Artificial Sequence: Synthetic oligonucleotide
  Sense strand starting at position 1347 of SEQ ID NO: 2702
guggguuauccugacgauu

SEQ ID NO: 209727 - RNA, 19 nt, Artificial Sequence
  Description of Artificial Sequence: Synthetic oligonucleotide
  Antisense strand to SEQ ID NO: 209726
aaucgucaggauaacccac

SEQ ID NO: 209728 - RNA, 19 nt, Artificial Sequence
  Description of Artificial Sequence: Synthetic oligonucleotide
  Sense strand starting at position 1373 of SEQ ID NO: 2702
gucgaugugcagcucgaau

SEQ ID NO: 209729 - RNA, 19 nt, Artificial Sequence
  Description of Artificial Sequence: Synthetic oligonucleotide
  Antisense strand to SEQ ID NO: 209728
auucgagcugcacaucgac

SEQ ID NO: 209730 - RNA, 19 nt, Artificial Sequence
  Description of Artificial Sequence: Synthetic oligonucleotide
  Sense strand starting at position 1618 of SEQ ID NO: 2702
ugccuaauugcugaucuaa

SEQ ID NO: 209731 - RNA, 19 nt, Artificial Sequence
  Description of Artificial Sequence: Synthetic oligonucleotide
  Antisense strand to SEQ ID NO: 209730
uuagaucagcaauuaggca

SEQ ID NO: 209732 - RNA, 19 nt, Artificial Sequence
  Description of Artificial Sequence: Synthetic oligonucleotide
  Sense strand starting at position 1677 of SEQ ID NO: 2702
guauagagucgagggagaa

SEQ ID NO: 209733 - RNA, 19 nt, Artificial Sequence
  Description of Artificial Sequence: Synthetic oligonucleotide
  Antisense strand to SEQ ID NO: 209732
uucucccucgacucuauac

SEQ ID NO: 209734 - RNA, 19 nt, Artificial Sequence
  Description of Artificial Sequence: Synthetic oligonucleotide
  Sense strand starting at position 1756 of SEQ ID NO: 2702
ggauccuuagucugauuga

SEQ ID NO: 209735 - RNA, 19 nt, Artificial Sequence
  Description of Artificial Sequence: Synthetic oligonucleotide
  Antisense strand to SEQ ID NO: 209734
ucaaucagacuaaggaucc

SEQ ID NO: 209736 - RNA, 19 nt, Artificial Sequence
  Description of Artificial Sequence: Synthetic oligonucleotide
  Sense strand starting at position 1770 of SEQ ID NO: 2702
auugaucucgcccaagacu

SEQ ID NO: 209737 - RNA, 19 nt, Artificial Sequence
  Description of Artificial Sequence: Synthetic oligonucleotide
  Antisense strand to SEQ ID NO: 209736
agucuugggcgagaucaau

SEQ ID NO: 209738 - RNA, 19 nt, Artificial Sequence
  Description of Artificial Sequence: Synthetic oligonucleotide
  Sense strand starting at position 1851 of SEQ ID NO: 2702
agggucucccgggacagau

SEQ ID NO: 209739 - RNA, 19 nt, Artificial Sequence
  Description of Artificial Sequence: Synthetic oligonucleotide
  Antisense strand to SEQ ID NO: 209738
aucugucccgggagacccu

SEQ ID NO: 209740 - RNA, 19 nt, Artificial Sequence
  Description of Artificial Sequence: Synthetic oligonucleotide
  Sense strand starting at position 1915 of SEQ ID NO: 2702
gggacuaacgcucagaacu

SEQ ID NO: 209741 - RNA, 19 nt, Artificial Sequence
  Description of Artificial Sequence: Synthetic oligonucleotide
  Antisense strand to SEQ ID NO: 209740
aguucugagcguuaguccc

SEQ ID NO: 209742 - RNA, 19 nt, Artificial Sequence
  Description of Artificial Sequence: Synthetic oligonucleotide
  Sense strand starting at position 1991 of SEQ ID NO: 2702
ucagauaucccagggcaac

SEQ ID NO: 209743 - RNA, 19 nt, Artificial Sequence
  Description of Artificial Sequence: Synthetic oligonucleotide
  Antisense strand to SEQ ID NO: 209742
guugcccugggauaucuga

SEQ ID NO: 209744 - RNA, 19 nt, Artificial Sequence
  Description of Artificial Sequence: Synthetic oligonucleotide
  Sense strand starting at position 2017 of SEQ ID NO: 2702
gcccgaguaagucaagauu

SEQ ID NO: 209745 - RNA, 19 nt, Artificial Sequence
  Description of Artificial Sequence: Synthetic oligonucleotide
  Antisense strand to SEQ ID NO: 209744
aaucuugacuuacucgggc

SEQ ID NO: 209746 - RNA, 19 nt, Artificial Sequence
  Description of Artificial Sequence: Synthetic oligonucleotide
  Sense strand starting at position 2025 of SEQ ID NO: 2702
aagucaagauucguagaag

SEQ ID NO: 209747 - RNA, 19 nt, Artificial Sequence
  Description of Artificial Sequence: Synthetic oligonucleotide
  Antisense strand to SEQ ID NO: 209746
cuucuacgaaucuugacuu

SEQ ID NO: 209748 - RNA, 19 nt, Artificial Sequence
  Description of Artificial Sequence: Synthetic oligonucleotide
  Sense strand starting at position 2160 of SEQ ID NO: 2702
ugucgugacguuccagcaa

SEQ ID NO: 209749 - RNA, 19 nt, Artificial Sequence
  Description of Artificial Sequence: Synthetic oligonucleotide
  Antisense strand to SEQ ID NO: 209748
uugcuggaacgucacgaca

SEQ ID NO: 209750 - RNA, 19 nt, Artificial Sequence
  Description of Artificial Sequence: Synthetic oligonucleotide
  Sense strand starting at position 2179 of SEQ ID NO: 2702
ucaugacuuuaauugacga

SEQ ID NO: 209751 - RNA, 19 nt, Artificial Sequence
  Description of Artificial Sequence: Synthetic oligonucleotide
  Antisense strand to SEQ ID NO: 209750
ucgucaauuaaagucauga

SEQ ID NO: 209752 - RNA, 19 nt, Artificial Sequence
  Description of Artificial Sequence: Synthetic oligonucleotide
  Sense strand starting at position 2298 of SEQ ID NO: 2702
gcaguuauuucuuauuuga

SEQ ID NO: 209753 - RNA, 19 nt, Artificial Sequence
  Description of Artificial Sequence: Synthetic oligonucleotide
  Antisense strand to SEQ ID NO: 209752
ucaaauaagaaauaacugc

SEQ ID NO: 209754 - RNA, 19 nt, Artificial Sequence
  Description of Artificial Sequence: Synthetic oligonucleotide
  Sense strand starting at position 2380 of SEQ ID NO: 2702
cggcauuucuucuugguca

SEQ ID NO: 209755 - RNA, 19 nt, Artificial Sequence
  Description of Artificial Sequence: Synthetic oligonucleotide
  Antisense strand to SEQ ID NO: 209754
ugaccaagaagaaaugccg

SEQ ID NO: 209756 - RNA, 19 nt, Artificial Sequence
  Description of Artificial Sequence: Synthetic oligonucleotide
  Sense strand starting at position 2384 of SEQ ID NO: 2702
auuucuucuuggucagcaa

SEQ ID NO: 209757 - RNA, 19 nt, Artificial Sequence
  Description of Artificial Sequence: Synthetic oligonucleotide
  Antisense strand to SEQ ID NO: 209756
uugcugaccaagaagaaau

SEQ ID NO: 209758 - RNA, 19 nt, Artificial Sequence
  Description of Artificial Sequence: Synthetic oligonucleotide
  Sense strand starting at position 2423 of SEQ ID NO: 2702
aagggaucggaagguuaau

SEQ ID NO: 209759 - RNA, 19 nt, Artificial Sequence
  Description of Artificial Sequence: Synthetic oligonucleotide
  Antisense strand to SEQ ID NO: 209758
auuaaccuuccgaucccuu

SEQ ID NO: 209760 - RNA, 19 nt, Artificial Sequence
  Description of Artificial Sequence: Synthetic oligonucleotide
  Sense strand starting at position 2488 of SEQ ID NO: 2702
gguucauuuguugguaugu

SEQ ID NO: 209761 - RNA, 19 nt, Artificial Sequence
  Description of Artificial Sequence: Synthetic oligonucleotide
  Antisense strand to SEQ ID NO: 209760
acauaccaacaaaugaacc

SEQ ID NO: 209762 - RNA, 19 nt, Artificial Sequence
  Description of Artificial Sequence: Synthetic oligonucleotide
  Sense strand starting at position 2530 of SEQ ID NO: 2702
ugugaagacuccuuaguag

SEQ ID NO: 209763 - RNA, 19 nt, Artificial Sequence
  Description of Artificial Sequence: Synthetic oligonucleotide
  Antisense strand to SEQ ID NO: 209762
cuacuaaggagucuucaca

SEQ ID NO: 209764 - RNA, 19 nt, Artificial Sequence
  Description of Artificial Sequence: Synthetic oligonucleotide
  Sense strand starting at position 2721 of SEQ ID NO: 2702
ugacuugugaaaggugaaa

SEQ ID NO: 209765 - RNA, 19 nt, Artificial Sequence
  Description of Artificial Sequence: Synthetic oligonucleotide
  Antisense strand to SEQ ID NO: 209764
uuucaccuuucacaaguca

SEQ ID NO: 209766 - RNA, 19 nt, Artificial Sequence
  Description of Artificial Sequence: Synthetic oligonucleotide
  Sense strand starting at position 2776 of SEQ ID NO: 2702
gggagaucacauggccaga

SEQ ID NO: 209767 - RNA, 19 nt, Artificial Sequence
  Description of Artificial Sequence: Synthetic oligonucleotide
  Antisense strand to SEQ ID NO: 209766
ucuggccaugugaucuccc

SEQ ID NO: 209768 - RNA, 19 nt, Artificial Sequence
  Description of Artificial Sequence: Synthetic oligonucleotide
  Sense strand starting at position 2881 of SEQ ID NO: 2702
guggaacucagugagcuuu

SEQ ID NO: 209769 - RNA, 19 nt, Artificial Sequence
  Description of Artificial Sequence: Synthetic oligonucleotide
  Antisense strand to SEQ ID NO: 209768
aaagcucacugaguuccac

SEQ ID NO: 209770 - RNA, 19 nt, Artificial Sequence
  Description of Artificial Sequence: Synthetic oligonucleotide
  Sense strand starting at position 3014 of SEQ ID NO: 2702
uugaaauggucagccuaac

SEQ ID NO: 209771 - RNA, 19 nt, Artificial Sequence
  Description of Artificial Sequence: Synthetic oligonucleotide
  Antisense strand to SEQ ID NO: 209770
guuaggcugaccauuucaa

SEQ ID NO: 209772 - RNA, 19 nt, Artificial Sequence
  Description of Artificial Sequence: Synthetic oligonucleotide
  Sense strand starting at position 3231 of SEQ ID NO: 2702
gguggauucuggguuugga

SEQ ID NO: 209773 - RNA, 19 nt, Artificial Sequence
  Description of Artificial Sequence: Synthetic oligonucleotide
  Antisense strand to SEQ ID NO: 209772
uccaaacccagaauccacc

SEQ ID NO: 209774 - RNA, 19 nt, Artificial Sequence
  Description of Artificial Sequence: Synthetic oligonucleotide
  Sense strand starting at position 3259 of SEQ ID NO: 2702
gggaaugguuccuccucuu

SEQ ID NO: 209775 - RNA, 19 nt, Artificial Sequence
  Description of Artificial Sequence: Synthetic oligonucleotide
  Antisense strand to SEQ ID NO: 209774
aagaggaggaaccauuccc

SEQ ID NO: 209776 - RNA, 19 nt, Artificial Sequence
  Description of Artificial Sequence: Synthetic oligonucleotide
  Sense strand starting at position 3290 of SEQ ID NO: 2702
guagccucugcuucuguaa

SEQ ID NO: 209777 - RNA, 19 nt, Artificial Sequence
  Description of Artificial Sequence: Synthetic oligonucleotide
  Antisense strand to SEQ ID NO: 209776
uuacagaagcagaggcuac

SEQ ID NO: 209778 - RNA, 19 nt, Artificial Sequence
  Description of Artificial Sequence: Synthetic oligonucleotide
  Sense strand starting at position 3527 of SEQ ID NO: 2702
gggaccuguugaucauauu

SEQ ID NO: 209779 - RNA, 19 nt, Artificial Sequence
  Description of Artificial Sequence: Synthetic oligonucleotide
  Antisense strand to SEQ ID NO: 209778
aauaugaucaacagguccc

SEQ ID NO: 209780 - RNA, 19 nt, Artificial Sequence
  Description of Artificial Sequence: Synthetic oligonucleotide
  Sense strand starting at position 3640 of SEQ ID NO: 2702
ucaggaguuuggucaggag

SEQ ID NO: 209781 - RNA, 19 nt, Artificial Sequence
  Description of Artificial Sequence: Synthetic oligonucleotide
  Antisense strand to SEQ ID NO: 209780
cuccugaccaaacuccuga

SEQ ID NO: 209782 - RNA, 19 nt, Artificial Sequence
  Description of Artificial Sequence: Synthetic oligonucleotide
  Sense strand starting at position 3644 of SEQ ID NO: 2702
gaguuuggucaggaguuca

SEQ ID NO: 209783 - RNA, 19 nt, Artificial Sequence
  Description of Artificial Sequence: Synthetic oligonucleotide
  Antisense strand to SEQ ID NO: 209782
ugaacuccugaccaaacuc

SEQ ID NO: 209784 - RNA, 19 nt, Artificial Sequence
  Description of Artificial Sequence: Synthetic oligonucleotide
  Sense strand starting at position 3768 of SEQ ID NO: 2702
gcaagauaauugcucuaac

SEQ ID NO: 209785 - RNA, 19 nt, Artificial Sequence
  Description of Artificial Sequence: Synthetic oligonucleotide
  Antisense strand to SEQ ID NO: 209784
guuagagcaauuaucuugc

SEQ ID NO: 209786 - RNA, 19 nt, Artificial Sequence
  Description of Artificial Sequence: Synthetic oligonucleotide
  Sense strand starting at position 3771 of SEQ ID NO: 2702
agauaauugcucuaaccug

SEQ ID NO: 209787 - RNA, 19 nt, Artificial Sequence
  Description of Artificial Sequence: Synthetic oligonucleotide
  Antisense strand to SEQ ID NO: 209786
cagguuagagcaauuaucu

SEQ ID NO: 209788 - RNA, 19 nt, Artificial Sequence
  Description of Artificial Sequence: Synthetic oligonucleotide
  Sense strand starting at position 12 of SEQ ID NO: 2703
gggcuuacaucaccugacu

SEQ ID NO: 209789 - RNA, 19 nt, Artificial Sequence
  Description of Artificial Sequence: Synthetic oligonucleotide
  Antisense strand to SEQ ID NO: 209788
agucaggugauguaagccc

SEQ ID NO: 209790 - RNA, 19 nt, Artificial Sequence
  Description of Artificial Sequence: Synthetic oligonucleotide
  Sense strand starting at position 51 of SEQ ID NO: 2703
cggcacauaccagauauau

SEQ ID NO: 209791 - RNA, 19 nt, Artificial Sequence
  Description of Artificial Sequence: Synthetic oligonucleotide
  Antisense strand to SEQ ID NO: 209790
auauaucugguaugugccg

SEQ ID NO: 209792 - RNA, 19 nt, Artificial Sequence
  Description of Artificial Sequence: Synthetic oligonucleotide
  Sense strand starting at position 232 of SEQ ID NO: 2703
auguuaagggccuacuuau

SEQ ID NO: 209793 - RNA, 19 nt, Artificial Sequence
  Description of Artificial Sequence: Synthetic oligonucleotide
  Antisense strand to SEQ ID NO: 209792
auaaguaggcccuuaacau

SEQ ID NO: 209794 - RNA, 19 nt, Artificial Sequence
  Description of Artificial Sequence: Synthetic oligonucleotide
  Sense strand starting at position 385 of SEQ ID NO: 2703
ggguguacaacggaaguuu

SEQ ID NO: 209795 - RNA, 19 nt, Artificial Sequence
  Description of Artificial Sequence: Synthetic oligonucleotide
  Antisense strand to SEQ ID NO: 209794
aaacuuccguuguacaccc

SEQ ID NO: 209796 - RNA, 19 nt, Artificial Sequence
  Description of Artificial Sequence: Synthetic oligonucleotide
  Sense strand starting at position 395 of SEQ ID NO: 2703
cggaaguuuggauggagga

SEQ ID NO: 209797 - RNA, 19 nt, Artificial Sequence
  Description of Artificial Sequence: Synthetic oligonucleotide
  Antisense strand to SEQ ID NO: 209796
uccuccauccaaacuuccg

SEQ ID NO: 209798 - RNA, 19 nt, Artificial Sequence
  Description of Artificial Sequence: Synthetic oligonucleotide
  Sense strand starting at position 548 of SEQ ID NO: 2703
ugacguagacugugaggaa

SEQ ID NO: 209799 - RNA, 19 nt, Artificial Sequence
  Description of Artificial Sequence: Synthetic oligonucleotide
  Antisense strand to SEQ ID NO: 209798
uuccucacagucuacguca

SEQ ID NO: 209800 - RNA, 19 nt, Artificial Sequence
  Description of Artificial Sequence: Synthetic oligonucleotide
  Sense strand starting at position 682 of SEQ ID NO: 2703
cugggaucuuacucccuga

SEQ ID NO: 209801 - RNA, 19 nt, Artificial Sequence
  Description of Artificial Sequence: Synthetic oligonucleotide
  Antisense strand to SEQ ID NO: 209800
ucagggaguaagaucccag

SEQ ID NO: 209802 - RNA, 19 nt, Artificial Sequence
  Description of Artificial Sequence: Synthetic oligonucleotide
  Sense strand starting at position 702 of SEQ ID NO: 2703
cuuuaucaucuuggugaca

SEQ ID NO: 209803 - RNA, 19 nt, Artificial Sequence
  Description of Artificial Sequence: Synthetic oligonucleotide
  Antisense strand to SEQ ID NO: 209802
ugucaccaagaugauaaag

SEQ ID NO: 209804 - RNA, 19 nt, Artificial Sequence
  Description of Artificial Sequence: Synthetic oligonucleotide
  Sense strand starting at position 703 of SEQ ID NO: 2703
uuuaucaucuuggugacaa

SEQ ID NO: 209805 - RNA, 19 nt, Artificial Sequence
  Description of Artificial Sequence: Synthetic oligonucleotide
  Antisense strand to SEQ ID NO: 209804
uugucaccaagaugauaaa

SEQ ID NO: 209806 - RNA, 19 nt, Artificial Sequence
  Description of Artificial Sequence: Synthetic oligonucleotide
  Sense strand starting at position 716 of SEQ ID NO: 2703
ugacaauguugagcuugau

SEQ ID NO: 209807 - RNA, 19 nt, Artificial Sequence
  Description of Artificial Sequence: Synthetic oligonucleotide
  Antisense strand to SEQ ID NO: 209806
aucaagcucaacauuguca

SEQ ID NO: 209808 - RNA, 19 nt, Artificial Sequence
  Description of Artificial Sequence: Synthetic oligonucleotide
  Sense strand starting at position 720 of SEQ ID NO: 2703
aauguugagcuugaucuga

SEQ ID NO: 209809 - RNA, 19 nt, Artificial Sequence
  Description of Artificial Sequence: Synthetic oligonucleotide
  Antisense strand to SEQ ID NO: 209808
ucagaucaagcucaacauu

SEQ ID NO: 209810 - RNA, 19 nt, Artificial Sequence
  Description of Artificial Sequence: Synthetic oligonucleotide
  Sense strand starting at position 730 of SEQ ID NO: 2703
uugaucugagcucaugauu

SEQ ID NO: 209811 - RNA, 19 nt, Artificial Sequence
  Description of Artificial Sequence: Synthetic oligonucleotide
  Antisense strand to SEQ ID NO: 209810
aaucaugagcucagaucaa

SEQ ID NO: 209812 - RNA, 19 nt, Artificial Sequence
  Description of Artificial Sequence: Synthetic oligonucleotide
  Sense strand starting at position 733 of SEQ ID NO: 2703
aucugagcucaugauucua

SEQ ID NO: 209813 - RNA, 19 nt, Artificial Sequence
  Description of Artificial Sequence: Synthetic oligonucleotide
  Antisense strand to SEQ ID NO: 209812
uagaaucaugagcucagau

SEQ ID NO: 209814 - RNA, 19 nt, Artificial Sequence
  Description of Artificial Sequence: Synthetic oligonucleotide
  Sense strand starting at position 735 of SEQ ID NO: 2703
cugagcucaugauucuaua

SEQ ID NO: 209815 - RNA, 19 nt, Artificial Sequence
  Description of Artificial Sequence: Synthetic oligonucleotide
  Antisense strand to SEQ ID NO: 209814
uauagaaucaugagcucag

SEQ ID NO: 209816 - RNA, 19 nt, Artificial Sequence
  Description of Artificial Sequence: Synthetic oligonucleotide
  Sense strand starting at position 754 of SEQ ID NO: 2703
aaacacuguugguuggaaa

SEQ ID NO: 209817 - RNA, 19 nt, Artificial Sequence
  Description of Artificial Sequence: Synthetic oligonucleotide
  Antisense strand to SEQ ID NO: 209816
uuuccaaccaacaguguuu

SEQ ID NO: 209818 - RNA, 19 nt, Artificial Sequence
  Description of Artificial Sequence: Synthetic oligonucleotide
  Sense strand starting at position 836 of SEQ ID NO: 2703
agaugagacuguuugucca

SEQ ID NO: 209819 - RNA, 19 nt, Artificial Sequence
  Description of Artificial Sequence: Synthetic oligonucleotide
  Antisense strand to SEQ ID NO: 209818
uggacaaacagucucaucu

SEQ ID NO: 209820 - RNA, 19 nt, Artificial Sequence
  Description of Artificial Sequence: Synthetic oligonucleotide
  Sense strand starting at position 862 of SEQ ID NO: 2703
ccgugacuccuguaagacc

SEQ ID NO: 209821 - RNA, 19 nt, Artificial Sequence
  Description of Artificial Sequence: Synthetic oligonucleotide
  Antisense strand to SEQ ID NO: 209820
ggucuuacaggagucacgg

SEQ ID NO: 209822 - RNA, 19 nt, Artificial Sequence
  Description of Artificial Sequence: Synthetic oligonucleotide
  Sense strand starting at position 973 of SEQ ID NO: 2703
uuugucucaggaugauuaa

SEQ ID NO: 209823 - RNA, 19 nt, Artificial Sequence
  Description of Artificial Sequence: Synthetic oligonucleotide
  Antisense strand to SEQ ID NO: 209822
uuaaucauccugagacaaa

SEQ ID NO: 209824 - RNA, 19 nt, Artificial Sequence
  Description of Artificial Sequence: Synthetic oligonucleotide
  Sense strand starting at position 995 of SEQ ID NO: 2703
ggauuagaaguuugucccu

SEQ ID NO: 209825 - RNA, 19 nt, Artificial Sequence
  Description of Artificial Sequence: Synthetic oligonucleotide
  Antisense strand to SEQ ID NO: 209824
agggacaaacuucuaaucc

SEQ ID NO: 209826 - RNA, 19 nt, Artificial Sequence
  Description of Artificial Sequence: Synthetic oligonucleotide
  Sense strand starting at position 997 of SEQ ID NO: 2703
auuagaaguuugucccucu

SEQ ID NO: 209827 - RNA, 19 nt, Artificial Sequence
  Description of Artificial Sequence: Synthetic oligonucleotide
  Antisense strand to SEQ ID NO: 209826
agagggacaaacuucuaau

SEQ ID NO: 209828 - RNA, 19 nt, Artificial Sequence
  Description of Artificial Sequence: Synthetic oligonucleotide
  Sense strand starting at position 1000 of SEQ ID NO: 2703
agaaguuugucccucugaa

SEQ ID NO: 209829 - RNA, 19 nt, Artificial Sequence
  Description of Artificial Sequence: Synthetic oligonucleotide
  Antisense strand to SEQ ID NO: 209828
uucagagggacaaacuucu

SEQ ID NO: 209830 - RNA, 19 nt, Artificial Sequence
  Description of Artificial Sequence: Synthetic oligonucleotide
  Sense strand starting at position 1057 of SEQ ID NO: 2703
gacugaaauguaugugauu

SEQ ID NO: 209831 - RNA, 19 nt, Artificial Sequence
  Description of Artificial Sequence: Synthetic oligonucleotide
  Antisense strand to SEQ ID NO: 209830
aaucacauacauuucaguc

SEQ ID NO: 209832 - RNA, 19 nt, Artificial Sequence
  Description of Artificial Sequence: Synthetic oligonucleotide
  Sense strand starting at position 1058 of SEQ ID NO: 2703
acugaaauguaugugauug

SEQ ID NO: 209833 - RNA, 19 nt, Artificial Sequence
  Description of Artificial Sequence: Synthetic oligonucleotide
  Antisense strand to SEQ ID NO: 209832
caaucacauacauuucagu

SEQ ID NO: 209834 - RNA, 19 nt, Artificial Sequence
  Description of Artificial Sequence: Synthetic oligonucleotide
  Sense strand starting at position 1059 of SEQ ID NO: 2703
cugaaauguaugugauugu

SEQ ID NO: 209835 - RNA, 19 nt, Artificial Sequence
  Description of Artificial Sequence: Synthetic oligonucleotide
  Antisense strand to SEQ ID NO: 209834
acaaucacauacauuucag

SEQ ID NO: 209836 - RNA, 19 nt, Artificial Sequence
  Description of Artificial Sequence: Synthetic oligonucleotide
  Sense strand starting at position 1074 of SEQ ID NO: 2703
uuguaaaucuauucccagu

SEQ ID NO: 209837 - RNA, 19 nt, Artificial Sequence
  Description of Artificial Sequence: Synthetic oligonucleotide
  Antisense strand to SEQ ID NO: 209836
acugggaauagauuuacaa

SEQ ID NO: 209838 - RNA, 19 nt, Artificial Sequence
  Description of Artificial Sequence: Synthetic oligonucleotide
  Sense strand starting at position 1080 of SEQ ID NO: 2703
aucuauucccaguguaaag

SEQ ID NO: 209839 - RNA, 19 nt, Artificial Sequence
  Description of Artificial Sequence: Synthetic oligonucleotide
  Antisense strand to SEQ ID NO: 209838
cuuuacacugggaauagau

SEQ ID NO: 209840 - RNA, 19 nt, Artificial Sequence
  Description of Artificial Sequence: Synthetic oligonucleotide
  Sense strand starting at position 1236 of SEQ ID NO: 2703
ugucuuugacacugggaag

SEQ ID NO: 209841 - RNA, 19 nt, Artificial Sequence
  Description of Artificial Sequence: Synthetic oligonucleotide
  Antisense strand to SEQ ID NO: 209840
cuucccagugucaaagaca

SEQ ID NO: 209842 - RNA, 19 nt, Artificial Sequence
  Description of Artificial Sequence: Synthetic oligonucleotide
  Sense strand starting at position 1577 of SEQ ID NO: 2703
agcggugagacucaguuua

SEQ ID NO: 209843 - RNA, 19 nt, Artificial Sequence
  Description of Artificial Sequence: Synthetic oligonucleotide
  Antisense strand to SEQ ID NO: 209842
uaaacugagucucaccgcu

SEQ ID NO: 209844 - RNA, 19 nt, Artificial Sequence
  Description of Artificial Sequence: Synthetic oligonucleotide
  Sense strand starting at position 2048 of SEQ ID NO: 2703
cacuguuguggcgauggaa

SEQ ID NO: 209845 - RNA, 19 nt, Artificial Sequence
  Description of Artificial Sequence: Synthetic oligonucleotide
  Antisense strand to SEQ ID NO: 209844
uuccaucgccacaacagug

SEQ ID NO: 209846 - RNA, 19 nt, Artificial Sequence
  Description of Artificial Sequence: Synthetic oligonucleotide
  Sense strand starting at position 2179 of SEQ ID NO: 2703
cuguuuccagccgcuaauu

SEQ ID NO: 209847 - RNA, 19 nt, Artificial Sequence
  Description of Artificial Sequence: Synthetic oligonucleotide
  Antisense strand to SEQ ID NO: 209846
aauuagcggcuggaaacag

SEQ ID NO: 209848 - RNA, 19 nt, Artificial Sequence
  Description of Artificial Sequence: Synthetic oligonucleotide
  Sense strand starting at position 2331 of SEQ ID NO: 2703
cagucuaucgguuauccca

SEQ ID NO: 209849 - RNA, 19 nt, Artificial Sequence
  Description of Artificial Sequence: Synthetic oligonucleotide
  Antisense strand to SEQ ID NO: 209848
ugggauaaccgauagacug

SEQ ID NO: 209850 - RNA, 19 nt, Artificial Sequence
  Description of Artificial Sequence: Synthetic oligonucleotide
  Sense strand starting at position 2339 of SEQ ID NO: 2703
cgguuaucccaaggagaac

SEQ ID NO: 209851 - RNA, 19 nt, Artificial Sequence
  Description of Artificial Sequence: Synthetic oligonucleotide
  Antisense strand to SEQ ID NO: 209850
guucuccuugggauaaccg

SEQ ID NO: 209852 - RNA, 19 nt, Artificial Sequence
  Description of Artificial Sequence: Synthetic oligonucleotide
  Sense strand starting at position 2443 of SEQ ID NO: 2703
cagugaagcgucuaaggga

SEQ ID NO: 209853 - RNA, 19 nt, Artificial Sequence
  Description of Artificial Sequence: Synthetic oligonucleotide
  Antisense strand to SEQ ID NO: 209852
ucccuuagacgcuucacug

SEQ ID NO: 209854 - RNA, 19 nt, Artificial Sequence
  Description of Artificial Sequence: Synthetic oligonucleotide
  Sense strand starting at position 2858 of SEQ ID NO: 2703
acgcauuuguguucgaaua

SEQ ID NO: 209855 - RNA, 19 nt, Artificial Sequence
  Description of Artificial Sequence: Synthetic oligonucleotide
  Antisense strand to SEQ ID NO: 209854
uauucgaacacaaaugcgu

SEQ ID NO: 209856 - RNA, 19 nt, Artificial Sequence
  Description of Artificial Sequence: Synthetic oligonucleotide
  Sense strand starting at position 2859 of SEQ ID NO: 2703
cgcauuuguguucgaauau

SEQ ID NO: 209857 - RNA, 19 nt, Artificial Sequence
  Description of Artificial Sequence: Synthetic oligonucleotide
  Antisense strand to SEQ ID NO: 209856
auauucgaacacaaaugcg

SEQ ID NO: 209858 - RNA, 19 nt, Artificial Sequence
  Description of Artificial Sequence: Synthetic oligonucleotide
  Sense strand starting at position 2870 of SEQ ID NO: 2703
ucgaauauccgagcgucuu

SEQ ID NO: 209859 - RNA, 19 nt, Artificial Sequence
  Description of Artificial Sequence: Synthetic oligonucleotide
  Antisense strand to SEQ ID NO: 209858
aagacgcucggauauucga

SEQ ID NO: 209860 - RNA, 19 nt, Artificial Sequence
  Description of Artificial Sequence: Synthetic oligonucleotide
  Sense strand starting at position 2963 of SEQ ID NO: 2703
ugguauuaauuacuuguca

SEQ ID NO: 209861 - RNA, 19 nt, Artificial Sequence
  Description of Artificial Sequence: Synthetic oligonucleotide
  Antisense strand to SEQ ID NO: 209860
ugacaaguaauuaauacca

SEQ ID NO: 209862 - RNA, 19 nt, Artificial Sequence
  Description of Artificial Sequence: Synthetic oligonucleotide
  Sense strand starting at position 3020 of SEQ ID NO: 2703
gugugcagugugucaaguu

SEQ ID NO: 209863 - RNA, 19 nt, Artificial Sequence
  Description of Artificial Sequence: Synthetic oligonucleotide
  Antisense strand to SEQ ID NO: 209862
aacuugacacacugcacac

SEQ ID NO: 209864 - RNA, 19 nt, Artificial Sequence
  Description of Artificial Sequence: Synthetic oligonucleotide
  Sense strand starting at position 3062 of SEQ ID NO: 2703
ucuuguccuguagaaauuc

SEQ ID NO: 209865 - RNA, 19 nt, Artificial Sequence
  Description of Artificial Sequence: Synthetic oligonucleotide
  Antisense strand to SEQ ID NO: 209864
gaauuucuacaggacaaga

SEQ ID NO: 209866 - RNA, 19 nt, Artificial Sequence
  Description of Artificial Sequence: Synthetic oligonucleotide
  Sense strand starting at position 3070 of SEQ ID NO: 2703
uguagaaauucucuuuaga

SEQ ID NO: 209867 - RNA, 19 nt, Artificial Sequence
  Description of Artificial Sequence: Synthetic oligonucleotide
  Antisense strand to SEQ ID NO: 209866
ucuaaagagaauuucuaca

SEQ ID NO: 209868 - RNA, 19 nt, Artificial Sequence
  Description of Artificial Sequence: Synthetic oligonucleotide
  Sense strand starting at position 14 of SEQ ID NO: 2704
uucuaaccagguuaaugua

SEQ ID NO: 209869 - RNA, 19 nt, Artificial Sequence
  Description of Artificial Sequence: Synthetic oligonucleotide
  Antisense strand to SEQ ID NO: 209868
uacauuaaccugguuagaa

SEQ ID NO: 209870 - RNA, 19 nt, Artificial Sequence
  Description of Artificial Sequence: Synthetic oligonucleotide
  Sense strand starting at position 47 of SEQ ID NO: 2704
uugcuccaguucuuauuua

SEQ ID NO: 209871 - RNA, 19 nt, Artificial Sequence
  Description of Artificial Sequence: Synthetic oligonucleotide
  Antisense strand to SEQ ID NO: 209870
uaaauaagaacuggagcaa

SEQ ID NO: 209872 - RNA, 19 nt, Artificial Sequence
  Description of Artificial Sequence: Synthetic oligonucleotide
  Sense strand starting at position 55 of SEQ ID NO: 2704
guucuuauuuaaucagugu

SEQ ID NO: 209873 - RNA, 19 nt, Artificial Sequence
  Description of Artificial Sequence: Synthetic oligonucleotide
  Antisense strand to SEQ ID NO: 209872
acacugauuaaauaagaac

SEQ ID NO: 209874 - RNA, 19 nt, Artificial Sequence
  Description of Artificial Sequence: Synthetic oligonucleotide
  Sense strand starting at position 77 of SEQ ID NO: 2704
uuuagaaguuacuuuggau

SEQ ID NO: 209875 - RNA, 19 nt, Artificial Sequence
  Description of Artificial Sequence: Synthetic oligonucleotide
  Antisense strand to SEQ ID NO: 209874
auccaaaguaacuucuaaa

SEQ ID NO: 209876 - RNA, 19 nt, Artificial Sequence
  Description of Artificial Sequence: Synthetic oligonucleotide
  Sense strand starting at position 84 of SEQ ID NO: 2704
guuacuuuggauuaauccu

SEQ ID NO: 209877 - RNA, 19 nt, Artificial Sequence
  Description of Artificial Sequence: Synthetic oligonucleotide
  Antisense strand to SEQ ID NO: 209876
aggauuaauccaaaguaac

SEQ ID NO: 209878 - RNA, 19 nt, Artificial Sequence
  Description of Artificial Sequence: Synthetic oligonucleotide
  Sense strand starting at position 260 of SEQ ID NO: 2704
cuuugaguagccguuaguu

SEQ ID NO: 209879 - RNA, 19 nt, Artificial Sequence
  Description of Artificial Sequence: Synthetic oligonucleotide
  Antisense strand to SEQ ID NO: 209878
aacuaacggcuacucaaag

SEQ ID NO: 209880 - RNA, 19 nt, Artificial Sequence
  Description of Artificial Sequence: Synthetic oligonucleotide
  Sense strand starting at position 545 of SEQ ID NO: 2704
uccuguaaugucuguauuu

SEQ ID NO: 209881 - RNA, 19 nt, Artificial Sequence
  Description of Artificial Sequence: Synthetic oligonucleotide
  Antisense strand to SEQ ID NO: 209880
aaauacagacauuacagga

SEQ ID NO: 209882 - RNA, 19 nt, Artificial Sequence
  Description of Artificial Sequence: Synthetic oligonucleotide
  Sense strand starting at position 546 of SEQ ID NO: 2704
ccuguaaugucuguauuuc

SEQ ID NO: 209883 - RNA, 19 nt, Artificial Sequence
  Description of Artificial Sequence: Synthetic oligonucleotide
  Antisense strand to SEQ ID NO: 209882
gaaauacagacauuacagg

SEQ ID NO: 209884 - RNA, 19 nt, Artificial Sequence
  Description of Artificial Sequence: Synthetic oligonucleotide
  Sense strand starting at position 785 of SEQ ID NO: 2704
uuguuagucagguauucca

SEQ ID NO: 209885 - RNA, 19 nt, Artificial Sequence
  Description of Artificial Sequence: Synthetic oligonucleotide
  Antisense strand to SEQ ID NO: 209884
uggaauaccugacuaacaa

SEQ ID NO: 209886 - RNA, 19 nt, Artificial Sequence
  Description of Artificial Sequence: Synthetic oligonucleotide
  Sense strand starting at position 788 of SEQ ID NO: 2704
uuagucagguauuccagaa

SEQ ID NO: 209887 - RNA, 19 nt, Artificial Sequence
  Description of Artificial Sequence: Synthetic oligonucleotide
  Antisense strand to SEQ ID NO: 209886
uucuggaauaccugacuaa

SEQ ID NO: 209888 - RNA, 19 nt, Artificial Sequence
  Description of Artificial Sequence: Synthetic oligonucleotide
  Sense strand starting at position 916 of SEQ ID NO: 2704
cgucauuuccgccacuauc

SEQ ID NO: 209889 - RNA, 19 nt, Artificial Sequence
  Description of Artificial Sequence: Synthetic oligonucleotide
  Antisense strand to SEQ ID NO: 209888
gauaguggcggaaaugacg

SEQ ID NO: 209890 - RNA, 19 nt, Artificial Sequence
  Description of Artificial Sequence: Synthetic oligonucleotide
  Sense strand starting at position 998 of SEQ ID NO: 2704
cuaugauacgguggaagga

SEQ ID NO: 209891 - RNA, 19 nt, Artificial Sequence
  Description of Artificial Sequence: Synthetic oligonucleotide
  Antisense strand to SEQ ID NO: 209890
uccuuccaccguaucauag

SEQ ID NO: 209892 - RNA, 19 nt, Artificial Sequence
  Description of Artificial Sequence: Synthetic oligonucleotide
  Sense strand starting at position 1129 of SEQ ID NO: 2704
uucugagcaccagaauguu

SEQ ID NO: 209893 - RNA, 19 nt, Artificial Sequence
  Description of Artificial Sequence: Synthetic oligonucleotide
  Antisense strand to SEQ ID NO: 209892
aacauucuggugcucagaa

SEQ ID NO: 209894 - RNA, 19 nt, Artificial Sequence
  Description of Artificial Sequence: Synthetic oligonucleotide
  Sense strand starting at position 1144 of SEQ ID NO: 2704
uguuccagacauuaugcaa

SEQ ID NO: 209895 - RNA, 19 nt, Artificial Sequence
  Description of Artificial Sequence: Synthetic oligonucleotide
  Antisense strand to SEQ ID NO: 209894
uugcauaaugucuggaaca

SEQ ID NO: 209896 - RNA, 19 nt, Artificial Sequence
  Description of Artificial Sequence: Synthetic oligonucleotide
  Sense strand starting at position 1197 of SEQ ID NO: 2704
gaauguagcucgucauuua

SEQ ID NO: 209897 - RNA, 19 nt, Artificial Sequence
  Description of Artificial Sequence: Synthetic oligonucleotide
  Antisense strand to SEQ ID NO: 209896
uaaaugacgagcuacauuc

SEQ ID NO: 209898 - RNA, 19 nt, Artificial Sequence
  Description of Artificial Sequence: Synthetic oligonucleotide
  Sense strand starting at position 1200 of SEQ ID NO: 2704
uguagcucgucauuuacaa

SEQ ID NO: 209899 - RNA, 19 nt, Artificial Sequence
  Description of Artificial Sequence: Synthetic oligonucleotide
  Antisense strand to SEQ ID NO: 209898
uuguaaaugacgagcuaca

SEQ ID NO: 209900 - RNA, 19 nt, Artificial Sequence
  Description of Artificial Sequence: Synthetic oligonucleotide
  Sense strand starting at position 1290 of SEQ ID NO: 2704
aagugacuugcccaugacu

SEQ ID NO: 209901 - RNA, 19 nt, Artificial Sequence
  Description of Artificial Sequence: Synthetic oligonucleotide
  Antisense strand to SEQ ID NO: 209900
agucaugggcaagucacuu

SEQ ID NO: 209902 - RNA, 19 nt, Artificial Sequence
  Description of Artificial Sequence: Synthetic oligonucleotide
  Sense strand starting at position 1335 of SEQ ID NO: 2704
ggguauuaaagccagaucu

SEQ ID NO: 209903 - RNA, 19 nt, Artificial Sequence
  Description of Artificial Sequence: Synthetic oligonucleotide
  Antisense strand to SEQ ID NO: 209902
agaucuggcuuuaauaccc

SEQ ID NO: 209904 - RNA, 19 nt, Artificial Sequence
  Description of Artificial Sequence: Synthetic oligonucleotide
  Sense strand starting at position 1337 of SEQ ID NO: 2704
guauuaaagccagaucuua

SEQ ID NO: 209905 - RNA, 19 nt, Artificial Sequence
  Description of Artificial Sequence: Synthetic oligonucleotide
  Antisense strand to SEQ ID NO: 209904
uaagaucuggcuuuaauac

SEQ ID NO: 209906 - RNA, 19 nt, Artificial Sequence
  Description of Artificial Sequence: Synthetic oligonucleotide
  Sense strand starting at position 1403 of SEQ ID NO: 2704
cuggguggucaggaguaga

SEQ ID NO: 209907 - RNA, 19 nt, Artificial Sequence
  Description of Artificial Sequence: Synthetic oligonucleotide
  Antisense strand to SEQ ID NO: 209906
ucuacuccugaccacccag

SEQ ID NO: 209908 - RNA, 19 nt, Artificial Sequence
  Description of Artificial Sequence: Synthetic oligonucleotide
  Sense strand starting at position 1454 of SEQ ID NO: 2704
ugaguuucugagggaccuu

SEQ ID NO: 209909 - RNA, 19 nt, Artificial Sequence
  Description of Artificial Sequence: Synthetic oligonucleotide
  Antisense strand to SEQ ID NO: 209908
aaggucccucagaaacuca

SEQ ID NO: 209910 - RNA, 19 nt, Artificial Sequence
  Description of Artificial Sequence: Synthetic oligonucleotide
  Sense strand starting at position 1571 of SEQ ID NO: 2704
ggugacugccaaggaauga

SEQ ID NO: 209911 - RNA, 19 nt, Artificial Sequence
  Description of Artificial Sequence: Synthetic oligonucleotide
  Antisense strand to SEQ ID NO: 209910
ucauuccuuggcagucacc

SEQ ID NO: 209912 - RNA, 19 nt, Artificial Sequence
  Description of Artificial Sequence: Synthetic oligonucleotide
  Sense strand starting at position 1894 of SEQ ID NO: 2704
gccuuccuccgggagacaa

SEQ ID NO: 209913 - RNA, 19 nt, Artificial Sequence
  Description of Artificial Sequence: Synthetic oligonucleotide
  Antisense strand to SEQ ID NO: 209912
uugucucccggaggaaggc

SEQ ID NO: 209914 - RNA, 19 nt, Artificial Sequence
  Description of Artificial Sequence: Synthetic oligonucleotide
  Sense strand starting at position 2004 of SEQ ID NO: 2704
gucacuaguugacucauca

SEQ ID NO: 209915 - RNA, 19 nt, Artificial Sequence
  Description of Artificial Sequence: Synthetic oligonucleotide
  Antisense strand to SEQ ID NO: 209914
ugaugagucaacuagugac

SEQ ID NO: 209916 - RNA, 19 nt, Artificial Sequence
  Description of Artificial Sequence: Synthetic oligonucleotide
  Sense strand starting at position 2551 of SEQ ID NO: 2704
ugcguuucucggaggcaag

SEQ ID NO: 209917 - RNA, 19 nt, Artificial Sequence
  Description of Artificial Sequence: Synthetic oligonucleotide
  Antisense strand to SEQ ID NO: 209916
cuugccuccgagaaacgca

SEQ ID NO: 209918 - RNA, 19 nt, Artificial Sequence
  Description of Artificial Sequence: Synthetic oligonucleotide
  Sense strand starting at position 2709 of SEQ ID NO: 2704
ccaaauauuuaauggagga

SEQ ID NO: 209919 - RNA, 19 nt, Artificial Sequence
  Description of Artificial Sequence: Synthetic oligonucleotide
  Antisense strand to SEQ ID NO: 209918
uccuccauuaaauauuugg

SEQ ID NO: 209920 - RNA, 19 nt, Artificial Sequence
  Description of Artificial Sequence: Synthetic oligonucleotide
  Sense strand starting at position 2791 of SEQ ID NO: 2704
cuuuguuagaugggugaug

SEQ ID NO: 209921 - RNA, 19 nt, Artificial Sequence
  Description of Artificial Sequence: Synthetic oligonucleotide
  Antisense strand to SEQ ID NO: 209920
caucacccaucuaacaaag

SEQ ID NO: 209922 - RNA, 19 nt, Artificial Sequence
  Description of Artificial Sequence: Synthetic oligonucleotide
  Sense strand starting at position 2792 of SEQ ID NO: 2704
uuuguuagaugggugauga

SEQ ID NO: 209923 - RNA, 19 nt, Artificial Sequence
  Description of Artificial Sequence: Synthetic oligonucleotide
  Antisense strand to SEQ ID NO: 209922
ucaucacccaucuaacaaa

SEQ ID NO: 209924 - RNA, 19 nt, Artificial Sequence
  Description of Artificial Sequence: Synthetic oligonucleotide
  Sense strand starting at position 2793 of SEQ ID NO: 2704
uuguuagaugggugaugaa

SEQ ID NO: 209925 - RNA, 19 nt, Artificial Sequence
  Description of Artificial Sequence: Synthetic oligonucleotide
  Antisense strand to SEQ ID NO: 209924
uucaucacccaucuaacaa

SEQ ID NO: 209926 - RNA, 19 nt, Artificial Sequence
  Description of Artificial Sequence: Synthetic oligonucleotide
  Sense strand starting at position 2809 of SEQ ID NO: 2704
gaagaaagguagcauuuga

SEQ ID NO: 209927 - RNA, 19 nt, Artificial Sequence
  Description of Artificial Sequence: Synthetic oligonucleotide
  Antisense strand to SEQ ID NO: 209926
ucaaaugcuaccuuucuuc

SEQ ID NO: 209928 - RNA, 19 nt, Artificial Sequence
  Description of Artificial Sequence: Synthetic oligonucleotide
  Sense strand starting at position 2825 of SEQ ID NO: 2704
ugaacugagaguuguaucu

SEQ ID NO: 209929 - RNA, 19 nt, Artificial Sequence
  Description of Artificial Sequence: Synthetic oligonucleotide
  Antisense strand to SEQ ID NO: 209928
agauacaacucucaguuca

SEQ ID NO: 209930 - RNA, 19 nt, Artificial Sequence
  Description of Artificial Sequence: Synthetic oligonucleotide
  Sense strand starting at position 2838 of SEQ ID NO: 2704
guaucuuggagguggacau

SEQ ID NO: 209931 - RNA, 19 nt, Artificial Sequence
  Description of Artificial Sequence: Synthetic oligonucleotide
  Antisense strand to SEQ ID NO: 209930
auguccaccuccaagauac

SEQ ID NO: 209932 - RNA, 19 nt, Artificial Sequence
  Description of Artificial Sequence: Synthetic oligonucleotide
  Sense strand starting at position 2848 of SEQ ID NO: 2704
gguggacaugguggauauu

SEQ ID NO: 209933 - RNA, 19 nt, Artificial Sequence
  Description of Artificial Sequence: Synthetic oligonucleotide
  Antisense strand to SEQ ID NO: 209932
aauauccaccauguccacc

SEQ ID NO: 209934 - RNA, 19 nt, Artificial Sequence
  Description of Artificial Sequence: Synthetic oligonucleotide
  Sense strand starting at position 2909 of SEQ ID NO: 2704
guguuaaaggaauggaagu

SEQ ID NO: 209935 - RNA, 19 nt, Artificial Sequence
  Description of Artificial Sequence: Synthetic oligonucleotide
  Antisense strand to SEQ ID NO: 209934
acuuccauuccuuuaacac

SEQ ID NO: 209936 - RNA, 19 nt, Artificial Sequence
  Description of Artificial Sequence: Synthetic oligonucleotide
  Sense strand starting at position 3065 of SEQ ID NO: 2704
gccaauauuggugaguaaa

SEQ ID NO: 209937 - RNA, 19 nt, Artificial Sequence
  Description of Artificial Sequence: Synthetic oligonucleotide
  Antisense strand to SEQ ID NO: 209936
uuuacucaccaauauuggc

SEQ ID NO: 209938 - RNA, 19 nt, Artificial Sequence
  Description of Artificial Sequence: Synthetic oligonucleotide
  Sense strand starting at position 3097 of SEQ ID NO: 2704
uugugugcagugcuuuaaa

SEQ ID NO: 209939 - RNA, 19 nt, Artificial Sequence
  Description of Artificial Sequence: Synthetic oligonucleotide
  Antisense strand to SEQ ID NO: 209938
uuuaaagcacugcacacaa

SEQ ID NO: 209940 - RNA, 19 nt, Artificial Sequence
  Description of Artificial Sequence: Synthetic oligonucleotide
  Sense strand starting at position 3392 of SEQ ID NO: 2704
gagugagacucuguaaagc

SEQ ID NO: 209941 - RNA, 19 nt, Artificial Sequence
  Description of Artificial Sequence: Synthetic oligonucleotide
  Antisense strand to SEQ ID NO: 209940
gcuuuacagagucucacuc

SEQ ID NO: 209942 - RNA, 19 nt, Artificial Sequence
  Description of Artificial Sequence: Synthetic oligonucleotide
  Sense strand starting at position 3819 of SEQ ID NO: 2704
cauuguguugccuuuguca

SEQ ID NO: 209943 - RNA, 19 nt, Artificial Sequence
  Description of Artificial Sequence: Synthetic oligonucleotide
  Antisense strand to SEQ ID NO: 209942
ugacaaaggcaacacaaug

SEQ ID NO: 209944 - RNA, 19 nt, Artificial Sequence
  Description of Artificial Sequence: Synthetic oligonucleotide
  Sense strand starting at position 3827 of SEQ ID NO: 2704
ugccuuugucaguaauagg

SEQ ID NO: 209945 - RNA, 19 nt, Artificial Sequence
  Description of Artificial Sequence: Synthetic oligonucleotide
  Antisense strand to SEQ ID NO: 209944
ccuauuacugacaaaggca

SEQ ID NO: 209946 - RNA, 19 nt, Artificial Sequence
  Description of Artificial Sequence: Synthetic oligonucleotide
  Sense strand starting at position 3838 of SEQ ID NO: 2704
guaauaggcaauuaguaag

SEQ ID NO: 209947 - RNA, 19 nt, Artificial Sequence
  Description of Artificial Sequence: Synthetic oligonucleotide
  Antisense strand to SEQ ID NO: 209946
cuuacuaauugccuauuac

SEQ ID NO: 209948 - RNA, 19 nt, Artificial Sequence
  Description of Artificial Sequence: Synthetic oligonucleotide
  Sense strand starting at position 107 of SEQ ID NO: 2705
cuuugaguagccguuaguu

SEQ ID NO: 209949 - RNA, 19 nt, Artificial Sequence
  Description of Artificial Sequence: Synthetic oligonucleotide
  Antisense strand to SEQ ID NO: 209948
aacuaacggcuacucaaag

SEQ ID NO: 209950 - RNA, 19 nt, Artificial Sequence
  Description of Artificial Sequence: Synthetic oligonucleotide
  Sense strand starting at position 136 of SEQ ID NO: 2705
cucaauuagcugcaguaau

SEQ ID NO: 209951 - RNA, 19 nt, Artificial Sequence
  Description of Artificial Sequence: Synthetic oligonucleotide
  Antisense strand to SEQ ID NO: 209950
auuacugcagcuaauugag

SEQ ID NO: 209952 - RNA, 19 nt, Artificial Sequence
  Description of Artificial Sequence: Synthetic oligonucleotide
  Sense strand starting at position 392 of SEQ ID NO: 2705
uccuguaaugucuguauuu

SEQ ID NO: 209953 - RNA, 19 nt, Artificial Sequence
  Description of Artificial Sequence: Synthetic oligonucleotide
  Antisense strand to SEQ ID NO: 209952
aaauacagacauuacagga

SEQ ID NO: 209954 - RNA, 19 nt, Artificial Sequence
  Description of Artificial Sequence: Synthetic oligonucleotide
  Sense strand starting at position 393 of SEQ ID NO: 2705
ccuguaaugucuguauuuc

SEQ ID NO: 209955 - RNA, 19 nt, Artificial Sequence
  Description of Artificial Sequence: Synthetic oligonucleotide
  Antisense strand to SEQ ID NO: 209954
gaaauacagacauuacagg

SEQ ID NO: 209956 - RNA, 19 nt, Artificial Sequence
  Description of Artificial Sequence: Synthetic oligonucleotide
  Sense strand starting at position 632 of SEQ ID NO: 2705
uuguuagucagguauucca

SEQ ID NO: 209957 - RNA, 19 nt, Artificial Sequence
  Description of Artificial Sequence: Synthetic oligonucleotide
  Antisense strand to SEQ ID NO: 209956
uggaauaccugacuaacaa

SEQ ID NO: 209958 - RNA, 19 nt, Artificial Sequence
  Description of Artificial Sequence: Synthetic oligonucleotide
  Sense strand starting at position 635 of SEQ ID NO: 2705
uuagucagguauuccagaa

SEQ ID NO: 209959 - RNA, 19 nt, Artificial Sequence
  Description of Artificial Sequence: Synthetic oligonucleotide
  Antisense strand to SEQ ID NO: 209958
uucuggaauaccugacuaa

SEQ ID NO: 209960 - RNA, 19 nt, Artificial Sequence
  Description of Artificial Sequence: Synthetic oligonucleotide
  Sense strand starting at position 763 of SEQ ID NO: 2705
cgucauuuccgccacuauc

SEQ ID NO: 209961 - RNA, 19 nt, Artificial Sequence
  Description of Artificial Sequence: Synthetic oligonucleotide
  Antisense strand to SEQ ID NO: 209960
gauaguggcggaaaugacg

SEQ ID NO: 209962 - RNA, 19 nt, Artificial Sequence
  Description of Artificial Sequence: Synthetic oligonucleotide
  Sense strand starting at position 845 of SEQ ID NO: 2705
cuaugauacgguggaagga

SEQ ID NO: 209963 - RNA, 19 nt, Artificial Sequence
  Description of Artificial Sequence: Synthetic oligonucleotide
  Antisense strand to SEQ ID NO: 209962
uccuuccaccguaucauag

SEQ ID NO: 209964 - RNA, 19 nt, Artificial Sequence
  Description of Artificial Sequence: Synthetic oligonucleotide
  Sense strand starting at position 899 of SEQ ID NO: 2705
acgagacauuccucuguca

SEQ ID NO: 209965 - RNA, 19 nt, Artificial Sequence
  Description of Artificial Sequence: Synthetic oligonucleotide
  Antisense strand to SEQ ID NO: 209964
ugacagaggaaugucucgu

SEQ ID NO: 209966 - RNA, 19 nt, Artificial Sequence
  Description of Artificial Sequence: Synthetic oligonucleotide
  Sense strand starting at position 976 of SEQ ID NO: 2705
uucugagcaccagaauguu

SEQ ID NO: 209967 - RNA, 19 nt, Artificial Sequence
  Description of Artificial Sequence: Synthetic oligonucleotide
  Antisense strand to SEQ ID NO: 209966
aacauucuggugcucagaa

SEQ ID NO: 209968 - RNA, 19 nt, Artificial Sequence
  Description of Artificial Sequence: Synthetic oligonucleotide
  Sense strand starting at position 991 of SEQ ID NO: 2705
uguuccagacauuaugcaa

SEQ ID NO: 209969 - RNA, 19 nt, Artificial Sequence
  Description of Artificial Sequence: Synthetic oligonucleotide
  Antisense strand to SEQ ID NO: 209968
uugcauaaugucuggaaca

SEQ ID NO: 209970 - RNA, 19 nt, Artificial Sequence
  Description of Artificial Sequence: Synthetic oligonucleotide
  Sense strand starting at position 1044 of SEQ ID NO: 2705
gaauguagcucgucauuua

SEQ ID NO: 209971 - RNA, 19 nt, Artificial Sequence
  Description of Artificial Sequence: Synthetic oligonucleotide
  Antisense strand to SEQ ID NO: 209970
uaaaugacgagcuacauuc

SEQ ID NO: 209972 - RNA, 19 nt, Artificial Sequence
  Description of Artificial Sequence: Synthetic oligonucleotide
  Sense strand starting at position 1047 of SEQ ID NO: 2705
uguagcucgucauuuacaa

SEQ ID NO: 209973 - RNA, 19 nt, Artificial Sequence
  Description of Artificial Sequence: Synthetic oligonucleotide
  Antisense strand to SEQ ID NO: 209972
uuguaaaugacgagcuaca

SEQ ID NO: 209974 - RNA, 19 nt, Artificial Sequence
  Description of Artificial Sequence: Synthetic oligonucleotide
  Sense strand starting at position 1137 of SEQ ID NO: 2705
aagugacuugcccaugacu

SEQ ID NO: 209975 - RNA, 19 nt, Artificial Sequence
  Description of Artificial Sequence: Synthetic oligonucleotide
  Antisense strand to SEQ ID NO: 209974
agucaugggcaagucacuu

SEQ ID NO: 209976 - RNA, 19 nt, Artificial Sequence
  Description of Artificial Sequence: Synthetic oligonucleotide
  Sense strand starting at position 1182 of SEQ ID NO: 2705
ggguauuaaagccagaucu

SEQ ID NO: 209977 - RNA, 19 nt, Artificial Sequence
  Description of Artificial Sequence: Synthetic oligonucleotide
  Antisense strand to SEQ ID NO: 209976
agaucuggcuuuaauaccc

SEQ ID NO: 209978 - RNA, 19 nt, Artificial Sequence
  Description of Artificial Sequence: Synthetic oligonucleotide
  Sense strand starting at position 1184 of SEQ ID NO: 2705
guauuaaagccagaucuua

SEQ ID NO: 209979 - RNA, 19 nt, Artificial Sequence
  Description of Artificial Sequence: Synthetic oligonucleotide
  Antisense strand to SEQ ID NO: 209978
uaagaucuggcuuuaauac

SEQ ID NO: 209980 - RNA, 19 nt, Artificial Sequence
  Description of Artificial Sequence: Synthetic oligonucleotide
  Sense strand starting at position 1250 of SEQ ID NO: 2705
cuggguggucaggaguaga

SEQ ID NO: 209981 - RNA, 19 nt, Artificial Sequence
  Description of Artificial Sequence: Synthetic oligonucleotide
  Antisense strand to SEQ ID NO: 209980
ucuacuccugaccacccag

SEQ ID NO: 209982 - RNA, 19 nt, Artificial Sequence
  Description of Artificial Sequence: Synthetic oligonucleotide
  Sense strand starting at position 1301 of SEQ ID NO: 2705
ugaguuucugagggaccuu

SEQ ID NO: 209983 - RNA, 19 nt, Artificial Sequence
  Description of Artificial Sequence: Synthetic oligonucleotide
  Antisense strand to SEQ ID NO: 209982
aaggucccucagaaacuca

SEQ ID NO: 209984 - RNA, 19 nt, Artificial Sequence
  Description of Artificial Sequence: Synthetic oligonucleotide
  Sense strand starting at position 1418 of SEQ ID NO: 2705
ggugacugccaaggaauga

SEQ ID NO: 209985 - RNA, 19 nt, Artificial Sequence
  Description of Artificial Sequence: Synthetic oligonucleotide
  Antisense strand to SEQ ID NO: 209984
ucauuccuuggcagucacc

SEQ ID NO: 209986 - RNA, 19 nt, Artificial Sequence
  Description of Artificial Sequence: Synthetic oligonucleotide
  Sense strand starting at position 1741 of SEQ ID NO: 2705
gccuuccuccgggagacaa

SEQ ID NO: 209987 - RNA, 19 nt, Artificial Sequence
  Description of Artificial Sequence: Synthetic oligonucleotide
  Antisense strand to SEQ ID NO: 209986
uugucucccggaggaaggc

SEQ ID NO: 209988 - RNA, 19 nt, Artificial Sequence
  Description of Artificial Sequence: Synthetic oligonucleotide
  Sense strand starting at position 1851 of SEQ ID NO: 2705
gucacuaguugacucauca

SEQ ID NO: 209989 - RNA, 19 nt, Artificial Sequence
  Description of Artificial Sequence: Synthetic oligonucleotide
  Antisense strand to SEQ ID NO: 209988
ugaugagucaacuagugac

SEQ ID NO: 209990 - RNA, 19 nt, Artificial Sequence
  Description of Artificial Sequence: Synthetic oligonucleotide
  Sense strand starting at position 2398 of SEQ ID NO: 2705
ugcguuucucggaggcaag

SEQ ID NO: 209991 - RNA, 19 nt, Artificial Sequence
  Description of Artificial Sequence: Synthetic oligonucleotide
  Antisense strand to SEQ ID NO: 209990
cuugccuccgagaaacgca

SEQ ID NO: 209992 - RNA, 19 nt, Artificial Sequence
  Description of Artificial Sequence: Synthetic oligonucleotide
  Sense strand starting at position 2556 of SEQ ID NO: 2705
ccaaauauuuaauggagga

SEQ ID NO: 209993 - RNA, 19 nt, Artificial Sequence
  Description of Artificial Sequence: Synthetic oligonucleotide
  Antisense strand to SEQ ID NO: 209992
uccuccauuaaauauuugg

SEQ ID NO: 209994 - RNA, 19 nt, Artificial Sequence
  Description of Artificial Sequence: Synthetic oligonucleotide
  Sense strand starting at position 2638 of SEQ ID NO: 2705
cuuuguuagaugggugaug

SEQ ID NO: 209995 - RNA, 19 nt, Artificial Sequence
  Description of Artificial Sequence: Synthetic oligonucleotide
  Antisense strand to SEQ ID NO: 209994
caucacccaucuaacaaag

SEQ ID NO: 209996 - RNA, 19 nt, Artificial Sequence
  Description of Artificial Sequence: Synthetic oligonucleotide
  Sense strand starting at position 2639 of SEQ ID NO: 2705
uuuguuagaugggugauga

SEQ ID NO: 209997 - RNA, 19 nt, Artificial Sequence
  Description of Artificial Sequence: Synthetic oligonucleotide
  Antisense strand to SEQ ID NO: 209996
ucaucacccaucuaacaaa

SEQ ID NO: 209998 - RNA, 19 nt, Artificial Sequence
  Description of Artificial Sequence: Synthetic oligonucleotide
  Sense strand starting at position 2640 of SEQ ID NO: 2705
uuguuagaugggugaugaa

SEQ ID NO: 209999 - RNA, 19 nt, Artificial Sequence
  Description of Artificial Sequence: Synthetic oligonucleotide
  Antisense strand to SEQ ID NO: 209998
uucaucacccaucuaacaa

SEQ ID NO: 210000 - RNA, 19 nt, Artificial Sequence
  Description of Artificial Sequence: Synthetic oligonucleotide
  Sense strand starting at position 2656 of SEQ ID NO: 2705
gaagaaagguagcauuuga

SEQ ID NO: 210001 - RNA, 19 nt, Artificial Sequence
  Description of Artificial Sequence: Synthetic oligonucleotide
  Antisense strand to SEQ ID NO: 210000
ucaaaugcuaccuuucuuc

SEQ ID NO: 210002 - RNA, 19 nt, Artificial Sequence
  Description of Artificial Sequence: Synthetic oligonucleotide
  Sense strand starting at position 2672 of SEQ ID NO: 2705
ugaacugagaguuguaucu

SEQ ID NO: 210003 - RNA, 19 nt, Artificial Sequence
  Description of Artificial Sequence: Synthetic oligonucleotide
  Antisense strand to SEQ ID NO: 210002
agauacaacucucaguuca

SEQ ID NO: 210004 - RNA, 19 nt, Artificial Sequence
  Description of Artificial Sequence: Synthetic oligonucleotide
  Sense strand starting at position 2685 of SEQ ID NO: 2705
guaucuuggagguggacau

SEQ ID NO: 210005 - RNA, 19 nt, Artificial Sequence
  Description of Artificial Sequence: Synthetic oligonucleotide
  Antisense strand to SEQ ID NO: 210004
auguccaccuccaagauac

SEQ ID NO: 210006 - RNA, 19 nt, Artificial Sequence
  Description of Artificial Sequence: Synthetic oligonucleotide
  Sense strand starting at position 2695 of SEQ ID NO: 2705
gguggacaugguggauauu

SEQ ID NO: 210007 - RNA, 19 nt, Artificial Sequence
  Description of Artificial Sequence: Synthetic oligonucleotide
  Antisense strand to SEQ ID NO: 210006
aauauccaccauguccacc

SEQ ID NO: 210008 - RNA, 19 nt, Artificial Sequence
  Description of Artificial Sequence: Synthetic oligonucleotide
  Sense strand starting at position 2756 of SEQ ID NO: 2705
guguuaaaggaauggaagu

SEQ ID NO: 210009 - RNA, 19 nt, Artificial Sequence
  Description of Artificial Sequence: Synthetic oligonucleotide
  Antisense strand to SEQ ID NO: 210008
acuuccauuccuuuaacac

SEQ ID NO: 210010 - RNA, 19 nt, Artificial Sequence
  Description of Artificial Sequence: Synthetic oligonucleotide
  Sense strand starting at position 2912 of SEQ ID NO: 2705
gccaauauuggugaguaaa

SEQ ID NO: 210011 - RNA, 19 nt, Artificial Sequence
  Description of Artificial Sequence: Synthetic oligonucleotide
  Antisense strand to SEQ ID NO: 210010
uuuacucaccaauauuggc

SEQ ID NO: 210012 - RNA, 19 nt, Artificial Sequence
  Description of Artificial Sequence: Synthetic oligonucleotide
  Sense strand starting at position 2944 of SEQ ID NO: 2705
uugugugcagugcuuuaaa

SEQ ID NO: 210013 - RNA, 19 nt, Artificial Sequence
  Description of Artificial Sequence: Synthetic oligonucleotide
  Antisense strand to SEQ ID NO: 210012
uuuaaagcacugcacacaa

SEQ ID NO: 210014 - RNA, 19 nt, Artificial Sequence
  Description of Artificial Sequence: Synthetic oligonucleotide
  Sense strand starting at position 3239 of SEQ ID NO: 2705
gagugagacucuguaaagc

SEQ ID NO: 210015 - RNA, 19 nt, Artificial Sequence
  Description of Artificial Sequence: Synthetic oligonucleotide
  Antisense strand to SEQ ID NO: 210014
gcuuuacagagucucacuc

SEQ ID NO: 210016 - RNA, 19 nt, Artificial Sequence
  Description of Artificial Sequence: Synthetic oligonucleotide
  Sense strand starting at position 3666 of SEQ ID NO: 2705
cauuguguugccuuuguca

SEQ ID NO: 210017 - RNA, 19 nt, Artificial Sequence
  Description of Artificial Sequence: Synthetic oligonucleotide
  Antisense strand to SEQ ID NO: 210016
ugacaaaggcaacacaaug

SEQ ID NO: 210018 - RNA, 19 nt, Artificial Sequence
  Description of Artificial Sequence: Synthetic oligonucleotide
  Sense strand starting at position 3674 of SEQ ID NO: 2705
ugccuuugucaguaauagg

SEQ ID NO: 210019 - RNA, 19 nt, Artificial Sequence
  Description of Artificial Sequence: Synthetic oligonucleotide
  Antisense strand to SEQ ID NO: 210018
ccuauuacugacaaaggca

SEQ ID NO: 210020 - RNA, 19 nt, Artificial Sequence
  Description of Artificial Sequence: Synthetic oligonucleotide
  Sense strand starting at position 3685 of SEQ ID NO: 2705
guaauaggcaauuaguaag

SEQ ID NO: 210021 - RNA, 19 nt, Artificial Sequence
  Description of Artificial Sequence: Synthetic oligonucleotide
  Antisense strand to SEQ ID NO: 210020
cuuacuaauugccuauuac

SEQ ID NO: 210022 - RNA, 19 nt, Artificial Sequence
  Description of Artificial Sequence: Synthetic oligonucleotide
  Sense strand starting at position 3832 of SEQ ID NO: 2705
ugauuuacuuggcauuuau

SEQ ID NO: 210023 - RNA, 19 nt, Artificial Sequence
  Description of Artificial Sequence: Synthetic oligonucleotide
  Antisense strand to SEQ ID NO: 210022
auaaaugccaaguaaauca

SEQ ID NO: 210024 - RNA, 19 nt, Artificial Sequence
  Description of Artificial Sequence: Synthetic oligonucleotide
  Sense strand starting at position 3841 of SEQ ID NO: 2705
uggcauuuauucuuuguaa

SEQ ID NO: 210025 - RNA, 19 nt, Artificial Sequence
  Description of Artificial Sequence: Synthetic oligonucleotide
  Antisense strand to SEQ ID NO: 210024
uuacaaagaauaaaugcca

SEQ ID NO: 210026 - RNA, 19 nt, Artificial Sequence
  Description of Artificial Sequence: Synthetic oligonucleotide
  Sense strand starting at position 3947 of SEQ ID NO: 2705
gggaauguguauguauuac

SEQ ID NO: 210027 - RNA, 19 nt, Artificial Sequence
  Description of Artificial Sequence: Synthetic oligonucleotide
  Antisense strand to SEQ ID NO: 210026
guaauacauacacauuccc

SEQ ID NO: 210028 - RNA, 19 nt, Artificial Sequence
  Description of Artificial Sequence: Synthetic oligonucleotide
  Sense strand starting at position 523 of SEQ ID NO: 2706
ucacuauguuggccugagu

SEQ ID NO: 210029 - RNA, 19 nt, Artificial Sequence
  Description of Artificial Sequence: Synthetic oligonucleotide
  Antisense strand to SEQ ID NO: 210028
acucaggccaacauaguga

SEQ ID NO: 210030 - RNA, 19 nt, Artificial Sequence
  Description of Artificial Sequence: Synthetic oligonucleotide
  Sense strand starting at position 532 of SEQ ID NO: 2706
uggccugaguggucucgaa

SEQ ID NO: 210031 - RNA, 19 nt, Artificial Sequence
  Description of Artificial Sequence: Synthetic oligonucleotide
  Antisense strand to SEQ ID NO: 210030
uucgagaccacucaggcca

SEQ ID NO: 210032 - RNA, 19 nt, Artificial Sequence
  Description of Artificial Sequence: Synthetic oligonucleotide
  Sense strand starting at position 833 of SEQ ID NO: 2706
ggagaaaucuuguagacac

SEQ ID NO: 210033 - RNA, 19 nt, Artificial Sequence
  Description of Artificial Sequence: Synthetic oligonucleotide
  Antisense strand to SEQ ID NO: 210032
gugucuacaagauuucucc

SEQ ID NO: 210034 - RNA, 19 nt, Artificial Sequence
  Description of Artificial Sequence: Synthetic oligonucleotide
  Sense strand starting at position 840 of SEQ ID NO: 2706
ucuuguagacaccaucuua

SEQ ID NO: 210035 - RNA, 19 nt, Artificial Sequence
  Description of Artificial Sequence: Synthetic oligonucleotide
  Antisense strand to SEQ ID NO: 210034
uaagauggugucuacaaga

SEQ ID NO: 210036 - RNA, 19 nt, Artificial Sequence
  Description of Artificial Sequence: Synthetic oligonucleotide
  Sense strand starting at position 1074 of SEQ ID NO: 2706
cugugaaccuguuccagau

SEQ ID NO: 210037 - RNA, 19 nt, Artificial Sequence
  Description of Artificial Sequence: Synthetic oligonucleotide
  Antisense strand to SEQ ID NO: 210036
aucuggaacagguucacag

SEQ ID NO: 210038 - RNA, 19 nt, Artificial Sequence
  Description of Artificial Sequence: Synthetic oligonucleotide
  Sense strand starting at position 1076 of SEQ ID NO: 2706
gugaaccuguuccagauua

SEQ ID NO: 210039 - RNA, 19 nt, Artificial Sequence
  Description of Artificial Sequence: Synthetic oligonucleotide
  Antisense strand to SEQ ID NO: 210038
uaaucuggaacagguucac

SEQ ID NO: 210040 - RNA, 19 nt, Artificial Sequence
  Description of Artificial Sequence: Synthetic oligonucleotide
  Sense strand starting at position 1142 of SEQ ID NO: 2706
ucggaucugcacuaggaaa

SEQ ID NO: 210041 - RNA, 19 nt, Artificial Sequence
  Description of Artificial Sequence: Synthetic oligonucleotide
  Antisense strand to SEQ ID NO: 210040
uuuccuagugcagauccga

SEQ ID NO: 210042 - RNA, 19 nt, Artificial Sequence
  Description of Artificial Sequence: Synthetic oligonucleotide
  Sense strand starting at position 1184 of SEQ ID NO: 2706
ucgagauaauugcugaaau

SEQ ID NO: 210043 - RNA, 19 nt, Artificial Sequence
  Description of Artificial Sequence: Synthetic oligonucleotide
  Antisense strand to SEQ ID NO: 210042
auuucagcaauuaucucga

SEQ ID NO: 210044 - RNA, 19 nt, Artificial Sequence
  Description of Artificial Sequence: Synthetic oligonucleotide
  Sense strand starting at position 1185 of SEQ ID NO: 2706
cgagauaauugcugaaauu

SEQ ID NO: 210045 - RNA, 19 nt, Artificial Sequence
  Description of Artificial Sequence: Synthetic oligonucleotide
  Antisense strand to SEQ ID NO: 210044
aauuucagcaauuaucucg

SEQ ID NO: 210046 - RNA, 19 nt, Artificial Sequence
  Description of Artificial Sequence: Synthetic oligonucleotide
  Sense strand starting at position 1195 of SEQ ID NO: 2706
gcugaaauuucuuaugaac

SEQ ID NO: 210047 - RNA, 19 nt, Artificial Sequence
  Description of Artificial Sequence: Synthetic oligonucleotide
  Antisense strand to SEQ ID NO: 210046
guucauaagaaauuucagc

SEQ ID NO: 210048 - RNA, 19 nt, Artificial Sequence
  Description of Artificial Sequence: Synthetic oligonucleotide
  Sense strand starting at position 1276 of SEQ ID NO: 2706
agacaacguccuuaugcuu

SEQ ID NO: 210049 - RNA, 19 nt, Artificial Sequence
  Description of Artificial Sequence: Synthetic oligonucleotide
  Antisense strand to SEQ ID NO: 210048
aagcauaaggacguugucu

SEQ ID NO: 210050 - RNA, 19 nt, Artificial Sequence
  Description of Artificial Sequence: Synthetic oligonucleotide
  Sense strand starting at position 1281 of SEQ ID NO: 2706
acguccuuaugcuuaggaa

SEQ ID NO: 210051 - RNA, 19 nt, Artificial Sequence
  Description of Artificial Sequence: Synthetic oligonucleotide
  Antisense strand to SEQ ID NO: 210050
uuccuaagcauaaggacgu

SEQ ID NO: 210052 - RNA, 19 nt, Artificial Sequence
  Description of Artificial Sequence: Synthetic oligonucleotide
  Sense strand starting at position 1282 of SEQ ID NO: 2706
cguccuuaugcuuaggaaa

SEQ ID NO: 210053 - RNA, 19 nt, Artificial Sequence
  Description of Artificial Sequence: Synthetic oligonucleotide
  Antisense strand to SEQ ID NO: 210052
uuuccuaagcauaaggacg

SEQ ID NO: 210054 - RNA, 19 nt, Artificial Sequence
  Description of Artificial Sequence: Synthetic oligonucleotide
  Sense strand starting at position 1333 of SEQ ID NO: 2706
gggcaugaugccugcaaau

SEQ ID NO: 210055 - RNA, 19 nt, Artificial Sequence
  Description of Artificial Sequence: Synthetic oligonucleotide
  Antisense strand to SEQ ID NO: 210054
auuugcaggcaucaugccc

SEQ ID NO: 210056 - RNA, 19 nt, Artificial Sequence
  Description of Artificial Sequence: Synthetic oligonucleotide
  Sense strand starting at position 1335 of SEQ ID NO: 2706
gcaugaugccugcaaauca

SEQ ID NO: 210057 - RNA, 19 nt, Artificial Sequence
  Description of Artificial Sequence: Synthetic oligonucleotide
  Antisense strand to SEQ ID NO: 210056
ugauuugcaggcaucaugc

SEQ ID NO: 210058 - RNA, 19 nt, Artificial Sequence
  Description of Artificial Sequence: Synthetic oligonucleotide
  Sense strand starting at position 1466 of SEQ ID NO: 2706
gggaauucuugguaauacu

SEQ ID NO: 210059 - RNA, 19 nt, Artificial Sequence
  Description of Artificial Sequence: Synthetic oligonucleotide
  Antisense strand to SEQ ID NO: 210058
aguauuaccaagaauuccc

SEQ ID NO: 210060 - RNA, 19 nt, Artificial Sequence
  Description of Artificial Sequence: Synthetic oligonucleotide
  Sense strand starting at position 1477 of SEQ ID NO: 2706
guaauacugcagcaacuuu

SEQ ID NO: 210061 - RNA, 19 nt, Artificial Sequence
  Description of Artificial Sequence: Synthetic oligonucleotide
  Antisense strand to SEQ ID NO: 210060
aaaguugcugcaguauuac

SEQ ID NO: 210062 - RNA, 19 nt, Artificial Sequence
  Description of Artificial Sequence: Synthetic oligonucleotide
  Sense strand starting at position 1495 of SEQ ID NO: 2706
uugaguaaguccgaaauua

SEQ ID NO: 210063 - RNA, 19 nt, Artificial Sequence
  Description of Artificial Sequence: Synthetic oligonucleotide
  Antisense strand to SEQ ID NO: 210062
uaauuucggacuuacucaa

SEQ ID NO: 210064 - RNA, 19 nt, Artificial Sequence
  Description of Artificial Sequence: Synthetic oligonucleotide
  Sense strand starting at position 1505 of SEQ ID NO: 2706
ccgaaauuauuucgaaaua

SEQ ID NO: 210065 - RNA, 19 nt, Artificial Sequence
  Description of Artificial Sequence: Synthetic oligonucleotide
  Antisense strand to SEQ ID NO: 210064
uauuucgaaauaauuucgg

SEQ ID NO: 210066 - RNA, 19 nt, Artificial Sequence
  Description of Artificial Sequence: Synthetic oligonucleotide
  Sense strand starting at position 2119 of SEQ ID NO: 2706
caaguuucucgugcuagca

SEQ ID NO: 210067 - RNA, 19 nt, Artificial Sequence
  Description of Artificial Sequence: Synthetic oligonucleotide
  Antisense strand to SEQ ID NO: 210066
ugcuagcacgagaaacuug

SEQ ID NO: 210068 - RNA, 19 nt, Artificial Sequence
  Description of Artificial Sequence: Synthetic oligonucleotide
  Sense strand starting at position 2145 of SEQ ID NO: 2706
ccucguaacugaguaguau

SEQ ID NO: 210069 - RNA, 19 nt, Artificial Sequence
  Description of Artificial Sequence: Synthetic oligonucleotide
  Antisense strand to SEQ ID NO: 210068
auacuacucaguuacgagg

SEQ ID NO: 210070 - RNA, 19 nt, Artificial Sequence
  Description of Artificial Sequence: Synthetic oligonucleotide
  Sense strand starting at position 2146 of SEQ ID NO: 2706
cucguaacugaguaguauu

SEQ ID NO: 210071 - RNA, 19 nt, Artificial Sequence
  Description of Artificial Sequence: Synthetic oligonucleotide
  Antisense strand to SEQ ID NO: 210070
aauacuacucaguuacgag

SEQ ID NO: 210072 - RNA, 19 nt, Artificial Sequence
  Description of Artificial Sequence: Synthetic oligonucleotide
  Sense strand starting at position 2149 of SEQ ID NO: 2706
guaacugaguaguauugca

SEQ ID NO: 210073 - RNA, 19 nt, Artificial Sequence
  Description of Artificial Sequence: Synthetic oligonucleotide
  Antisense strand to SEQ ID NO: 210072
ugcaauacuacucaguuac

SEQ ID NO: 210074 - RNA, 19 nt, Artificial Sequence
  Description of Artificial Sequence: Synthetic oligonucleotide
  Sense strand starting at position 2309 of SEQ ID NO: 2706
gucguuccaucagaaguga

SEQ ID NO: 210075 - RNA, 19 nt, Artificial Sequence
  Description of Artificial Sequence: Synthetic oligonucleotide
  Antisense strand to SEQ ID NO: 210074
ucacuucugauggaacgac

SEQ ID NO: 210076 - RNA, 19 nt, Artificial Sequence
  Description of Artificial Sequence: Synthetic oligonucleotide
  Sense strand starting at position 2320 of SEQ ID NO: 2706
agaagugaccuuugcuaac

SEQ ID NO: 210077 - RNA, 19 nt, Artificial Sequence
  Description of Artificial Sequence: Synthetic oligonucleotide
  Antisense strand to SEQ ID NO: 210076
guuagcaaaggucacuucu

SEQ ID NO: 210078 - RNA, 19 nt, Artificial Sequence
  Description of Artificial Sequence: Synthetic oligonucleotide
  Sense strand starting at position 2361 of SEQ ID NO: 2706
gaguauaucugagccggga

SEQ ID NO: 210079 - RNA, 19 nt, Artificial Sequence
  Description of Artificial Sequence: Synthetic oligonucleotide
  Antisense strand to SEQ ID NO: 210078
ucccggcucagauauacuc

SEQ ID NO: 210080 - RNA, 19 nt, Artificial Sequence
  Description of Artificial Sequence: Synthetic oligonucleotide
  Sense strand starting at position 2363 of SEQ ID NO: 2706
guauaucugagccgggagu

SEQ ID NO: 210081 - RNA, 19 nt, Artificial Sequence
  Description of Artificial Sequence: Synthetic oligonucleotide
  Antisense strand to SEQ ID NO: 210080
acucccggcucagauauac

SEQ ID NO: 210082 - RNA, 19 nt, Artificial Sequence
  Description of Artificial Sequence: Synthetic oligonucleotide
  Sense strand starting at position 2391 of SEQ ID NO: 2706
cguguagucccggcugcua

SEQ ID NO: 210083 - RNA, 19 nt, Artificial Sequence
  Description of Artificial Sequence: Synthetic oligonucleotide
  Antisense strand to SEQ ID NO: 210082
uagcagccgggacuacacg

SEQ ID NO: 210084 - RNA, 19 nt, Artificial Sequence
  Description of Artificial Sequence: Synthetic oligonucleotide
  Sense strand starting at position 2424 of SEQ ID NO: 2706
ggagcauugcuuugagccu

SEQ ID NO: 210085 - RNA, 19 nt, Artificial Sequence
  Description of Artificial Sequence: Synthetic oligonucleotide
  Antisense strand to SEQ ID NO: 210084
aggcucaaagcaaugcucc

SEQ ID NO: 210086 - RNA, 19 nt, Artificial Sequence
  Description of Artificial Sequence: Synthetic oligonucleotide
  Sense strand starting at position 2430 of SEQ ID NO: 2706
uugcuuugagccugagagu

SEQ ID NO: 210087 - RNA, 19 nt, Artificial Sequence
  Description of Artificial Sequence: Synthetic oligonucleotide
  Antisense strand to SEQ ID NO: 210086
acucucaggcucaaagcaa

SEQ ID NO: 210088 - RNA, 19 nt, Artificial Sequence
  Description of Artificial Sequence: Synthetic oligonucleotide
  Sense strand starting at position 2431 of SEQ ID NO: 2706
ugcuuugagccugagaguu

SEQ ID NO: 210089 - RNA, 19 nt, Artificial Sequence
  Description of Artificial Sequence: Synthetic oligonucleotide
  Antisense strand to SEQ ID NO: 210088
aacucucaggcucaaagca

SEQ ID NO: 210090 - RNA, 19 nt, Artificial Sequence
  Description of Artificial Sequence: Synthetic oligonucleotide
  Sense strand starting at position 2439 of SEQ ID NO: 2706
gccugagaguuacaucuau

SEQ ID NO: 210091 - RNA, 19 nt, Artificial Sequence
  Description of Artificial Sequence: Synthetic oligonucleotide
  Antisense strand to SEQ ID NO: 210090
auagauguaacucucaggc

SEQ ID NO: 210092 - RNA, 19 nt, Artificial Sequence
  Description of Artificial Sequence: Synthetic oligonucleotide
  Sense strand starting at position 2448 of SEQ ID NO: 2706
uuacaucuaucuuggguaa

SEQ ID NO: 210093 - RNA, 19 nt, Artificial Sequence
  Description of Artificial Sequence: Synthetic oligonucleotide
  Antisense strand to SEQ ID NO: 210092
uuacccaagauagauguaa

SEQ ID NO: 210094 - RNA, 19 nt, Artificial Sequence
  Description of Artificial Sequence: Synthetic oligonucleotide
  Sense strand starting at position 2450 of SEQ ID NO: 2706
acaucuaucuuggguaaca

SEQ ID NO: 210095 - RNA, 19 nt, Artificial Sequence
  Description of Artificial Sequence: Synthetic oligonucleotide
  Antisense strand to SEQ ID NO: 210094
uguuacccaagauagaugu

SEQ ID NO: 210096 - RNA, 19 nt, Artificial Sequence
  Description of Artificial Sequence: Synthetic oligonucleotide
  Sense strand starting at position 2521 of SEQ ID NO: 2706
gagcauagacauugcagau

SEQ ID NO: 210097 - RNA, 19 nt, Artificial Sequence
  Description of Artificial Sequence: Synthetic oligonucleotide
  Antisense strand to SEQ ID NO: 210096
aucugcaaugucuaugcuc

SEQ ID NO: 210098 - RNA, 19 nt, Artificial Sequence
  Description of Artificial Sequence: Synthetic oligonucleotide
  Sense strand starting at position 2544 of SEQ ID NO: 2706
ucacuuucccuguguucca

SEQ ID NO: 210099 - RNA, 19 nt, Artificial Sequence
  Description of Artificial Sequence: Synthetic oligonucleotide
  Antisense strand to SEQ ID NO: 210098
uggaacacagggaaaguga

SEQ ID NO: 210100 - RNA, 19 nt, Artificial Sequence
  Description of Artificial Sequence: Synthetic oligonucleotide
  Sense strand starting at position 2768 of SEQ ID NO: 2706
aaauuacagugguguaauc

SEQ ID NO: 210101 - RNA, 19 nt, Artificial Sequence
  Description of Artificial Sequence: Synthetic oligonucleotide
  Antisense strand to SEQ ID NO: 210100
gauuacaccacuguaauuu

SEQ ID NO: 210102 - RNA, 19 nt, Artificial Sequence
  Description of Artificial Sequence: Synthetic oligonucleotide
  Sense strand starting at position 2770 of SEQ ID NO: 2706
auuacagugguguaaucuu

SEQ ID NO: 210103 - RNA, 19 nt, Artificial Sequence
  Description of Artificial Sequence: Synthetic oligonucleotide
  Antisense strand to SEQ ID NO: 210102
aagauuacaccacuguaau

SEQ ID NO: 210104 - RNA, 19 nt, Artificial Sequence
  Description of Artificial Sequence: Synthetic oligonucleotide
  Sense strand starting at position 2813 of SEQ ID NO: 2706
gcugcaucucuggacuaac

SEQ ID NO: 210105 - RNA, 19 nt, Artificial Sequence
  Description of Artificial Sequence: Synthetic oligonucleotide
  Antisense strand to SEQ ID NO: 210104
guuaguccagagaugcagc

SEQ ID NO: 210106 - RNA, 19 nt, Artificial Sequence
  Description of Artificial Sequence: Synthetic oligonucleotide
  Sense strand starting at position 2848 of SEQ ID NO: 2706
ggauuaaaguucccaaaug

SEQ ID NO: 210107 - RNA, 19 nt, Artificial Sequence
  Description of Artificial Sequence: Synthetic oligonucleotide
  Antisense strand to SEQ ID NO: 210106
cauuugggaacuuuaaucc

SEQ ID NO: 210108 - RNA, 19 nt, Artificial Sequence
  Description of Artificial Sequence: Synthetic oligonucleotide
  Sense strand starting at position 28 of SEQ ID NO: 2707
gcgaguucgcuggcacuua

SEQ ID NO: 210109 - RNA, 19 nt, Artificial Sequence
  Description of Artificial Sequence: Synthetic oligonucleotide
  Antisense strand to SEQ ID NO: 210108
uaagugccagcgaacucgc

SEQ ID NO: 210110 - RNA, 19 nt, Artificial Sequence
  Description of Artificial Sequence: Synthetic oligonucleotide
  Sense strand starting at position 178 of SEQ ID NO: 2707
ccagcaguuuagucugaau

SEQ ID NO: 210111 - RNA, 19 nt, Artificial Sequence
  Description of Artificial Sequence: Synthetic oligonucleotide
  Antisense strand to SEQ ID NO: 210110
auucagacuaaacugcugg

SEQ ID NO: 210112 - RNA, 19 nt, Artificial Sequence
  Description of Artificial Sequence: Synthetic oligonucleotide
  Sense strand starting at position 189 of SEQ ID NO: 2707
gucugaaugccauaauaaa

SEQ ID NO: 210113 - RNA, 19 nt, Artificial Sequence
  Description of Artificial Sequence: Synthetic oligonucleotide
  Antisense strand to SEQ ID NO: 210112
uuuauuauggcauucagac

SEQ ID NO: 210114 - RNA, 19 nt, Artificial Sequence
  Description of Artificial Sequence: Synthetic oligonucleotide
  Sense strand starting at position 610 of SEQ ID NO: 2707
gcaguaagccaagagaaau

SEQ ID NO: 210115 - RNA, 19 nt, Artificial Sequence
  Description of Artificial Sequence: Synthetic oligonucleotide
  Antisense strand to SEQ ID NO: 210114
auuucucuuggcuuacugc

SEQ ID NO: 210116 - RNA, 19 nt, Artificial Sequence
  Description of Artificial Sequence: Synthetic oligonucleotide
  Sense strand starting at position 633 of SEQ ID NO: 2707
gcgagaccuacagguagaa

SEQ ID NO: 210117 - RNA, 19 nt, Artificial Sequence
  Description of Artificial Sequence: Synthetic oligonucleotide
  Antisense strand to SEQ ID NO: 210116
uucuaccuguaggucucgc

SEQ ID NO: 210118 - RNA, 19 nt, Artificial Sequence
  Description of Artificial Sequence: Synthetic oligonucleotide
  Sense strand starting at position 1010 of SEQ ID NO: 2707
aagagaaaguggucgcugu

SEQ ID NO: 210119 - RNA, 19 nt, Artificial Sequence
  Description of Artificial Sequence: Synthetic oligonucleotide
  Antisense strand to SEQ ID NO: 210118
acagcgaccacuuucucuu

SEQ ID NO: 210120 - RNA, 19 nt, Artificial Sequence
  Description of Artificial Sequence: Synthetic oligonucleotide
  Sense strand starting at position 1011 of SEQ ID NO: 2707
agagaaaguggucgcuguu

SEQ ID NO: 210121 - RNA, 19 nt, Artificial Sequence
  Description of Artificial Sequence: Synthetic oligonucleotide
  Antisense strand to SEQ ID NO: 210120
aacagcgaccacuuucucu

SEQ ID NO: 210122 - RNA, 19 nt, Artificial Sequence
  Description of Artificial Sequence: Synthetic oligonucleotide
  Sense strand starting at position 1446 of SEQ ID NO: 2707
gauaguucccgagggucau

SEQ ID NO: 210123 - RNA, 19 nt, Artificial Sequence
  Description of Artificial Sequence: Synthetic oligonucleotide
  Antisense strand to SEQ ID NO: 210122
augacccucgggaacuauc

SEQ ID NO: 210124 - RNA, 19 nt, Artificial Sequence
  Description of Artificial Sequence: Synthetic oligonucleotide
  Sense strand starting at position 1502 of SEQ ID NO: 2707
gauauaauuuccgagcgaa

SEQ ID NO: 210125 - RNA, 19 nt, Artificial Sequence
  Description of Artificial Sequence: Synthetic oligonucleotide
  Antisense strand to SEQ ID NO: 210124
uucgcucggaaauuauauc

SEQ ID NO: 210126 - RNA, 19 nt, Artificial Sequence
  Description of Artificial Sequence: Synthetic oligonucleotide
  Sense strand starting at position 1505 of SEQ ID NO: 2707
auaauuuccgagcgaagcu

SEQ ID NO: 210127 - RNA, 19 nt, Artificial Sequence
  Description of Artificial Sequence: Synthetic oligonucleotide
  Antisense strand to SEQ ID NO: 210126
agcuucgcucggaaauuau

SEQ ID NO: 210128 - RNA, 19 nt, Artificial Sequence
  Description of Artificial Sequence: Synthetic oligonucleotide
  Sense strand starting at position 2000 of SEQ ID NO: 2707
uugugaaacauauguuagu

SEQ ID NO: 210129 - RNA, 19 nt, Artificial Sequence
  Description of Artificial Sequence: Synthetic oligonucleotide
  Antisense strand to SEQ ID NO: 210128
acuaacauauguuucacaa

SEQ ID NO: 210130 - RNA, 19 nt, Artificial Sequence
  Description of Artificial Sequence: Synthetic oligonucleotide
  Sense strand starting at position 2001 of SEQ ID NO: 2707
ugugaaacauauguuaguu

SEQ ID NO: 210131 - RNA, 19 nt, Artificial Sequence
  Description of Artificial Sequence: Synthetic oligonucleotide
  Antisense strand to SEQ ID NO: 210130
aacuaacauauguuucaca

SEQ ID NO: 210132 - RNA, 19 nt, Artificial Sequence
  Description of Artificial Sequence: Synthetic oligonucleotide
  Sense strand starting at position 2071 of SEQ ID NO: 2707
cgccauugugauuggaauu

SEQ ID NO: 210133 - RNA, 19 nt, Artificial Sequence
  Description of Artificial Sequence: Synthetic oligonucleotide
  Antisense strand to SEQ ID NO: 210132
aauuccaaucacaauggcg

SEQ ID NO: 210134 - RNA, 19 nt, Artificial Sequence
  Description of Artificial Sequence: Synthetic oligonucleotide
  Sense strand starting at position 2145 of SEQ ID NO: 2707
uucuauaacuuguuuagga

SEQ ID NO: 210135 - RNA, 19 nt, Artificial Sequence
  Description of Artificial Sequence: Synthetic oligonucleotide
  Antisense strand to SEQ ID NO: 210134
uccuaaacaaguuauagaa

SEQ ID NO: 210136 - RNA, 19 nt, Artificial Sequence
  Description of Artificial Sequence: Synthetic oligonucleotide
  Sense strand starting at position 2146 of SEQ ID NO: 2707
ucuauaacuuguuuaggaa

SEQ ID NO: 210137 - RNA, 19 nt, Artificial Sequence
  Description of Artificial Sequence: Synthetic oligonucleotide
  Antisense strand to SEQ ID NO: 210136
uuccuaaacaaguuauaga

SEQ ID NO: 210138 - RNA, 19 nt, Artificial Sequence
  Description of Artificial Sequence: Synthetic oligonucleotide
  Sense strand starting at position 2171 of SEQ ID NO: 2707
uuccguccacuugaagauu

SEQ ID NO: 210139 - RNA, 19 nt, Artificial Sequence
  Description of Artificial Sequence: Synthetic oligonucleotide
  Antisense strand to SEQ ID NO: 210138
aaucuucaaguggacggaa

SEQ ID NO: 210140 - RNA, 19 nt, Artificial Sequence
  Description of Artificial Sequence: Synthetic oligonucleotide
  Sense strand starting at position 2310 of SEQ ID NO: 2707
ccuagaguagaauguaaca

SEQ ID NO: 210141 - RNA, 19 nt, Artificial Sequence
  Description of Artificial Sequence: Synthetic oligonucleotide
  Antisense strand to SEQ ID NO: 210140
uguuacauucuacucuagg

SEQ ID NO: 210142 - RNA, 19 nt, Artificial Sequence
  Description of Artificial Sequence: Synthetic oligonucleotide
  Sense strand starting at position 2378 of SEQ ID NO: 2707
uguggucucugucccaaga

SEQ ID NO: 210143 - RNA, 19 nt, Artificial Sequence
  Description of Artificial Sequence: Synthetic oligonucleotide
  Antisense strand to SEQ ID NO: 210142
ucuugggacagagaccaca

SEQ ID NO: 210144 - RNA, 19 nt, Artificial Sequence
  Description of Artificial Sequence: Synthetic oligonucleotide
  Sense strand starting at position 2394 of SEQ ID NO: 2707
agauguaacaggugacaca

SEQ ID NO: 210145 - RNA, 19 nt, Artificial Sequence
  Description of Artificial Sequence: Synthetic oligonucleotide
  Antisense strand to SEQ ID NO: 210144
ugugucaccuguuacaucu

SEQ ID NO: 210146 - RNA, 19 nt, Artificial Sequence
  Description of Artificial Sequence: Synthetic oligonucleotide
  Sense strand starting at position 2500 of SEQ ID NO: 2707
gcccaagucccuuagaaag

SEQ ID NO: 210147 - RNA, 19 nt, Artificial Sequence
  Description of Artificial Sequence: Synthetic oligonucleotide
  Antisense strand to SEQ ID NO: 210146
cuuucuaagggacuugggc

SEQ ID NO: 210148 - RNA, 19 nt, Artificial Sequence
  Description of Artificial Sequence: Synthetic oligonucleotide
  Sense strand starting at position 2594 of SEQ ID NO: 2707
ccaggaggcuguuucuaga

SEQ ID NO: 210149 - RNA, 19 nt, Artificial Sequence
  Description of Artificial Sequence: Synthetic oligonucleotide
  Antisense strand to SEQ ID NO: 210148
ucuagaaacagccuccugg

SEQ ID NO: 210150 - RNA, 19 nt, Artificial Sequence
  Description of Artificial Sequence: Synthetic oligonucleotide
  Sense strand starting at position 2602 of SEQ ID NO: 2707
cuguuucuagagcaagcua

SEQ ID NO: 210151 - RNA, 19 nt, Artificial Sequence
  Description of Artificial Sequence: Synthetic oligonucleotide
  Antisense strand to SEQ ID NO: 210150
uagcuugcucuagaaacag

SEQ ID NO: 210152 - RNA, 19 nt, Artificial Sequence
  Description of Artificial Sequence: Synthetic oligonucleotide
  Sense strand starting at position 2707 of SEQ ID NO: 2707
cccauuugcugucuuuaca

SEQ ID NO: 210153 - RNA, 19 nt, Artificial Sequence
  Description of Artificial Sequence: Synthetic oligonucleotide
  Antisense strand to SEQ ID NO: 210152
uguaaagacagcaaauggg

SEQ ID NO: 210154 - RNA, 19 nt, Artificial Sequence
  Description of Artificial Sequence: Synthetic oligonucleotide
  Sense strand starting at position 2738 of SEQ ID NO: 2707
cgcuauauugcugaauaau

SEQ ID NO: 210155 - RNA, 19 nt, Artificial Sequence
  Description of Artificial Sequence: Synthetic oligonucleotide
  Antisense strand to SEQ ID NO: 210154
auuauucagcaauauagcg

SEQ ID NO: 210156 - RNA, 19 nt, Artificial Sequence
  Description of Artificial Sequence: Synthetic oligonucleotide
  Sense strand starting at position 2747 of SEQ ID NO: 2707
gcugaauaauuugaacaaa

SEQ ID NO: 210157 - RNA, 19 nt, Artificial Sequence
  Description of Artificial Sequence: Synthetic oligonucleotide
  Antisense strand to SEQ ID NO: 210156
uuuguucaaauuauucagc

SEQ ID NO: 210158 - RNA, 19 nt, Artificial Sequence
  Description of Artificial Sequence: Synthetic oligonucleotide
  Sense strand starting at position 2757 of SEQ ID NO: 2707
uugaacaaaugugauugaa

SEQ ID NO: 210159 - RNA, 19 nt, Artificial Sequence
  Description of Artificial Sequence: Synthetic oligonucleotide
  Antisense strand to SEQ ID NO: 210158
uucaaucacauuuguucaa

SEQ ID NO: 210160 - RNA, 19 nt, Artificial Sequence
  Description of Artificial Sequence: Synthetic oligonucleotide
  Sense strand starting at position 2795 of SEQ ID NO: 2707
guccgaugucgagcaguuu

SEQ ID NO: 210161 - RNA, 19 nt, Artificial Sequence
  Description of Artificial Sequence: Synthetic oligonucleotide
  Antisense strand to SEQ ID NO: 210160
aaacugcucgacaucggac

SEQ ID NO: 210162 - RNA, 19 nt, Artificial Sequence
  Description of Artificial Sequence: Synthetic oligonucleotide
  Sense strand starting at position 2821 of SEQ ID NO: 2707
ggugcuguaacaugaggau

SEQ ID NO: 210163 - RNA, 19 nt, Artificial Sequence
  Description of Artificial Sequence: Synthetic oligonucleotide
  Antisense strand to SEQ ID NO: 210162
auccucauguuacagcacc

SEQ ID NO: 210164 - RNA, 19 nt, Artificial Sequence
  Description of Artificial Sequence: Synthetic oligonucleotide
  Sense strand starting at position 2842 of SEQ ID NO: 2707
gacagaagacugcgaaauu

SEQ ID NO: 210165 - RNA, 19 nt, Artificial Sequence
  Description of Artificial Sequence: Synthetic oligonucleotide
  Antisense strand to SEQ ID NO: 210164
aauuucgcagucuucuguc

SEQ ID NO: 210166 - RNA, 19 nt, Artificial Sequence
  Description of Artificial Sequence: Synthetic oligonucleotide
  Sense strand starting at position 3100 of SEQ ID NO: 2707
ccaagauccugugcaggua

SEQ ID NO: 210167 - RNA, 19 nt, Artificial Sequence
  Description of Artificial Sequence: Synthetic oligonucleotide
  Antisense strand to SEQ ID NO: 210166
uaccugcacaggaucuugg

SEQ ID NO: 210168 - RNA, 19 nt, Artificial Sequence
  Description of Artificial Sequence: Synthetic oligonucleotide
  Sense strand starting at position 3259 of SEQ ID NO: 2707
gggcucuccaaugaguuau

SEQ ID NO: 210169 - RNA, 19 nt, Artificial Sequence
  Description of Artificial Sequence: Synthetic oligonucleotide
  Antisense strand to SEQ ID NO: 210168
auaacucauuggagagccc

SEQ ID NO: 210170 - RNA, 19 nt, Artificial Sequence
  Description of Artificial Sequence: Synthetic oligonucleotide
  Sense strand starting at position 3261 of SEQ ID NO: 2707
gcucuccaaugaguuauuu

SEQ ID NO: 210171 - RNA, 19 nt, Artificial Sequence
  Description of Artificial Sequence: Synthetic oligonucleotide
  Antisense strand to SEQ ID NO: 210170
aaauaacucauuggagagc

SEQ ID NO: 210172 - RNA, 19 nt, Artificial Sequence
  Description of Artificial Sequence: Synthetic oligonucleotide
  Sense strand starting at position 3337 of SEQ ID NO: 2707
ccuggacacuucuugauga

SEQ ID NO: 210173 - RNA, 19 nt, Artificial Sequence
  Description of Artificial Sequence: Synthetic oligonucleotide
  Antisense strand to SEQ ID NO: 210172
ucaucaagaaguguccagg

SEQ ID NO: 210174 - RNA, 19 nt, Artificial Sequence
  Description of Artificial Sequence: Synthetic oligonucleotide
  Sense strand starting at position 3494 of SEQ ID NO: 2707
gccgauuucuucccuaagu

SEQ ID NO: 210175 - RNA, 19 nt, Artificial Sequence
  Description of Artificial Sequence: Synthetic oligonucleotide
  Antisense strand to SEQ ID NO: 210174
acuuagggaagaaaucggc

SEQ ID NO: 210176 - RNA, 19 nt, Artificial Sequence
  Description of Artificial Sequence: Synthetic oligonucleotide
  Sense strand starting at position 3495 of SEQ ID NO: 2707
ccgauuucuucccuaagug

SEQ ID NO: 210177 - RNA, 19 nt, Artificial Sequence
  Description of Artificial Sequence: Synthetic oligonucleotide
  Antisense strand to SEQ ID NO: 210176
cacuuagggaagaaaucgg

SEQ ID NO: 210178 - RNA, 19 nt, Artificial Sequence
  Description of Artificial Sequence: Synthetic oligonucleotide
  Sense strand starting at position 3559 of SEQ ID NO: 2707
uaaggaacuucuuuagguu

SEQ ID NO: 210179 - RNA, 19 nt, Artificial Sequence
  Description of Artificial Sequence: Synthetic oligonucleotide
  Antisense strand to SEQ ID NO: 210178
aaccuaaagaaguuccuua

SEQ ID NO: 210180 - RNA, 19 nt, Artificial Sequence
  Description of Artificial Sequence: Synthetic oligonucleotide
  Sense strand starting at position 3640 of SEQ ID NO: 2707
agucaaauacuagggugau

SEQ ID NO: 210181 - RNA, 19 nt, Artificial Sequence
  Description of Artificial Sequence: Synthetic oligonucleotide
  Antisense strand to SEQ ID NO: 210180
aucacccuaguauuugacu

SEQ ID NO: 210182 - RNA, 19 nt, Artificial Sequence
  Description of Artificial Sequence: Synthetic oligonucleotide
  Sense strand starting at position 3646 of SEQ ID NO: 2707
auacuagggugaucaguuu

SEQ ID NO: 210183 - RNA, 19 nt, Artificial Sequence
  Description of Artificial Sequence: Synthetic oligonucleotide
  Antisense strand to SEQ ID NO: 210182
aaacugaucacccuaguau

SEQ ID NO: 210184 - RNA, 19 nt, Artificial Sequence
  Description of Artificial Sequence: Synthetic oligonucleotide
  Sense strand starting at position 3710 of SEQ ID NO: 2707
uggugcuauccuuaaauua

SEQ ID NO: 210185 - RNA, 19 nt, Artificial Sequence
  Description of Artificial Sequence: Synthetic oligonucleotide
  Antisense strand to SEQ ID NO: 210184
uaauuuaaggauagcacca

SEQ ID NO: 210186 - RNA, 19 nt, Artificial Sequence
  Description of Artificial Sequence: Synthetic oligonucleotide
  Sense strand starting at position 3771 of SEQ ID NO: 2707
ggcugagugggagggaauu

SEQ ID NO: 210187 - RNA, 19 nt, Artificial Sequence
  Description of Artificial Sequence: Synthetic oligonucleotide
  Antisense strand to SEQ ID NO: 210186
aauucccucccacucagcc

SEQ ID NO: 210188 - RNA, 19 nt, Artificial Sequence
  Description of Artificial Sequence: Synthetic oligonucleotide
  Sense strand starting at position 113 of SEQ ID NO: 2708
gcauguagauaccugaauu

SEQ ID NO: 210189 - RNA, 19 nt, Artificial Sequence
  Description of Artificial Sequence: Synthetic oligonucleotide
  Antisense strand to SEQ ID NO: 210188
aauucagguaucuacaugc

SEQ ID NO: 210190 - RNA, 19 nt, Artificial Sequence
  Description of Artificial Sequence: Synthetic oligonucleotide
  Sense strand starting at position 193 of SEQ ID NO: 2708
uuuggacagucacuauaaa

SEQ ID NO: 210191 - RNA, 19 nt, Artificial Sequence
  Description of Artificial Sequence: Synthetic oligonucleotide
  Antisense strand to SEQ ID NO: 210190
uuuauagugacuguccaaa

SEQ ID NO: 210192 - RNA, 19 nt, Artificial Sequence
  Description of Artificial Sequence: Synthetic oligonucleotide
  Sense strand starting at position 242 of SEQ ID NO: 2708
uggacuuuauacucugaau

SEQ ID NO: 210193 - RNA, 19 nt, Artificial Sequence
  Description of Artificial Sequence: Synthetic oligonucleotide
  Antisense strand to SEQ ID NO: 210192
auucagaguauaaagucca

SEQ ID NO: 210194 - RNA, 19 nt, Artificial Sequence
  Description of Artificial Sequence: Synthetic oligonucleotide
  Sense strand starting at position 281 of SEQ ID NO: 2708
uggagauggcaguaaggua

SEQ ID NO: 210195 - RNA, 19 nt, Artificial Sequence
  Description of Artificial Sequence: Synthetic oligonucleotide
  Antisense strand to SEQ ID NO: 210194
uaccuuacugccaucucca

SEQ ID NO: 210196 - RNA, 19 nt, Artificial Sequence
  Description of Artificial Sequence: Synthetic oligonucleotide
  Sense strand starting at position 354 of SEQ ID NO: 2708
aaauaagaguuuccagugu

SEQ ID NO: 210197 - RNA, 19 nt, Artificial Sequence
  Description of Artificial Sequence: Synthetic oligonucleotide
  Antisense strand to SEQ ID NO: 210196
acacuggaaacucuuauuu

SEQ ID NO: 210198 - RNA, 19 nt, Artificial Sequence
  Description of Artificial Sequence: Synthetic oligonucleotide
  Sense strand starting at position 383 of SEQ ID NO: 2708
uguaauuuccaguguaauu

SEQ ID NO: 210199 - RNA, 19 nt, Artificial Sequence
  Description of Artificial Sequence: Synthetic oligonucleotide
  Antisense strand to SEQ ID NO: 210198
aauuacacuggaaauuaca

SEQ ID NO: 210200 - RNA, 19 nt, Artificial Sequence
  Description of Artificial Sequence: Synthetic oligonucleotide
  Sense strand starting at position 542 of SEQ ID NO: 2708
ugcugaaaucugcaguuaa

SEQ ID NO: 210201 - RNA, 19 nt, Artificial Sequence
  Description of Artificial Sequence: Synthetic oligonucleotide
  Antisense strand to SEQ ID NO: 210200
uuaacugcagauuucagca

SEQ ID NO: 210202 - RNA, 19 nt, Artificial Sequence
  Description of Artificial Sequence: Synthetic oligonucleotide
  Sense strand starting at position 572 of SEQ ID NO: 2708
auuaaucccgugcaaauga

SEQ ID NO: 210203 - RNA, 19 nt, Artificial Sequence
  Description of Artificial Sequence: Synthetic oligonucleotide
  Antisense strand to SEQ ID NO: 210202
ucauuugcacgggauuaau

SEQ ID NO: 210204 - RNA, 19 nt, Artificial Sequence
  Description of Artificial Sequence: Synthetic oligonucleotide
  Sense strand starting at position 679 of SEQ ID NO: 2708
cugguuccugugggagaga

SEQ ID NO: 210205 - RNA, 19 nt, Artificial Sequence
  Description of Artificial Sequence: Synthetic oligonucleotide
  Antisense strand to SEQ ID NO: 210204
ucucucccacaggaaccag

SEQ ID NO: 210206 - RNA, 19 nt, Artificial Sequence
  Description of Artificial Sequence: Synthetic oligonucleotide
  Sense strand starting at position 744 of SEQ ID NO: 2708
ucuguccuucuauagugaa

SEQ ID NO: 210207 - RNA, 19 nt, Artificial Sequence
  Description of Artificial Sequence: Synthetic oligonucleotide
  Antisense strand to SEQ ID NO: 210206
uucacuauagaaggacaga

SEQ ID NO: 210208 - RNA, 19 nt, Artificial Sequence
  Description of Artificial Sequence: Synthetic oligonucleotide
  Sense strand starting at position 910 of SEQ ID NO: 2708
accugaaaguaacugguuu

SEQ ID NO: 210209 - RNA, 19 nt, Artificial Sequence
  Description of Artificial Sequence: Synthetic oligonucleotide
  Antisense strand to SEQ ID NO: 210208
aaaccaguuacuuucaggu

SEQ ID NO: 210210 - RNA, 19 nt, Artificial Sequence
  Description of Artificial Sequence: Synthetic oligonucleotide
  Sense strand starting at position 914 of SEQ ID NO: 2708
gaaaguaacugguuuguga

SEQ ID NO: 210211 - RNA, 19 nt, Artificial Sequence
  Description of Artificial Sequence: Synthetic oligonucleotide
  Antisense strand to SEQ ID NO: 210210
ucacaaaccaguuacuuuc

SEQ ID NO: 210212 - RNA, 19 nt, Artificial Sequence
  Description of Artificial Sequence: Synthetic oligonucleotide
  Sense strand starting at position 1105 of SEQ ID NO: 2708
gggcaaauggguugucaua

SEQ ID NO: 210213 - RNA, 19 nt, Artificial Sequence
  Description of Artificial Sequence: Synthetic oligonucleotide
  Antisense strand to SEQ ID NO: 210212
uaugacaacccauuugccc

SEQ ID NO: 210214 - RNA, 19 nt, Artificial Sequence
  Description of Artificial Sequence: Synthetic oligonucleotide
  Sense strand starting at position 1107 of SEQ ID NO: 2708
gcaaauggguugucauaaa

SEQ ID NO: 210215 - RNA, 19 nt, Artificial Sequence
  Description of Artificial Sequence: Synthetic oligonucleotide
  Antisense strand to SEQ ID NO: 210214
uuuaugacaacccauuugc

SEQ ID NO: 210216 - RNA, 19 nt, Artificial Sequence
  Description of Artificial Sequence: Synthetic oligonucleotide
  Sense strand starting at position 1206 of SEQ ID NO: 2708
ccuugcauggucuucguua

SEQ ID NO: 210217 - RNA, 19 nt, Artificial Sequence
  Description of Artificial Sequence: Synthetic oligonucleotide
  Antisense strand to SEQ ID NO: 210216
uaacgaagaccaugcaagg

SEQ ID NO: 210218 - RNA, 19 nt, Artificial Sequence
  Description of Artificial Sequence: Synthetic oligonucleotide
  Sense strand starting at position 1218 of SEQ ID NO: 2708
uucguuacuggacaaggau

SEQ ID NO: 210219 - RNA, 19 nt, Artificial Sequence
  Description of Artificial Sequence: Synthetic oligonucleotide
  Antisense strand to SEQ ID NO: 210218
auccuuguccaguaacgaa

SEQ ID NO: 210220 - RNA, 19 nt, Artificial Sequence
  Description of Artificial Sequence: Synthetic oligonucleotide
  Sense strand starting at position 1420 of SEQ ID NO: 2708
ggacucuuuagucaggcaa

SEQ ID NO: 210221 - RNA, 19 nt, Artificial Sequence
  Description of Artificial Sequence: Synthetic oligonucleotide
  Antisense strand to SEQ ID NO: 210220
uugccugacuaaagagucc

SEQ ID NO: 210222 - RNA, 19 nt, Artificial Sequence
  Description of Artificial Sequence: Synthetic oligonucleotide
  Sense strand starting at position 1486 of SEQ ID NO: 2708
caguauaugcuagagguuu

SEQ ID NO: 210223 - RNA, 19 nt, Artificial Sequence
  Description of Artificial Sequence: Synthetic oligonucleotide
  Antisense strand to SEQ ID NO: 210222
aaaccucuagcauauacug

SEQ ID NO: 210224 - RNA, 19 nt, Artificial Sequence
  Description of Artificial Sequence: Synthetic oligonucleotide
  Sense strand starting at position 1566 of SEQ ID NO: 2708
ugcuuucuggcugacugaa

SEQ ID NO: 210225 - RNA, 19 nt, Artificial Sequence
  Description of Artificial Sequence: Synthetic oligonucleotide
  Antisense strand to SEQ ID NO: 210224
uucagucagccagaaagca

SEQ ID NO: 210226 - RNA, 19 nt, Artificial Sequence
  Description of Artificial Sequence: Synthetic oligonucleotide
  Sense strand starting at position 1599 of SEQ ID NO: 2708
cugguaacugcugaaacuu

SEQ ID NO: 210227 - RNA, 19 nt, Artificial Sequence
  Description of Artificial Sequence: Synthetic oligonucleotide
  Antisense strand to SEQ ID NO: 210226
aaguuucagcaguuaccag

SEQ ID NO: 210228 - RNA, 19 nt, Artificial Sequence
  Description of Artificial Sequence: Synthetic oligonucleotide
  Sense strand starting at position 1609 of SEQ ID NO: 2708
cugaaacuuguagagguuu

SEQ ID NO: 210229 - RNA, 19 nt, Artificial Sequence
  Description of Artificial Sequence: Synthetic oligonucleotide
  Antisense strand to SEQ ID NO: 210228
aaaccucuacaaguuucag

SEQ ID NO: 210230 - RNA, 19 nt, Artificial Sequence
  Description of Artificial Sequence: Synthetic oligonucleotide
  Sense strand starting at position 1643 of SEQ ID NO: 2708
uuuagaaagcaguaagagu

SEQ ID NO: 210231 - RNA, 19 nt, Artificial Sequence
  Description of Artificial Sequence: Synthetic oligonucleotide
  Antisense strand to SEQ ID NO: 210230
acucuuacugcuuucuaaa

SEQ ID NO: 210232 - RNA, 19 nt, Artificial Sequence
  Description of Artificial Sequence: Synthetic oligonucleotide
  Sense strand starting at position 1704 of SEQ ID NO: 2708
auggaauguucuuuagggu

SEQ ID NO: 210233 - RNA, 19 nt, Artificial Sequence
  Description of Artificial Sequence: Synthetic oligonucleotide
  Antisense strand to SEQ ID NO: 210232
acccuaaagaacauuccau

SEQ ID NO: 210234 - RNA, 19 nt, Artificial Sequence
  Description of Artificial Sequence: Synthetic oligonucleotide
  Sense strand starting at position 1705 of SEQ ID NO: 2708
uggaauguucuuuaggguu

SEQ ID NO: 210235 - RNA, 19 nt, Artificial Sequence
  Description of Artificial Sequence: Synthetic oligonucleotide
  Antisense strand to SEQ ID NO: 210234
aacccuaaagaacauucca

SEQ ID NO: 210236 - RNA, 19 nt, Artificial Sequence
  Description of Artificial Sequence: Synthetic oligonucleotide
  Sense strand starting at position 1783 of SEQ ID NO: 2708
uuaugacagcuauaacgau

SEQ ID NO: 210237 - RNA, 19 nt, Artificial Sequence
  Description of Artificial Sequence: Synthetic oligonucleotide
  Antisense strand to SEQ ID NO: 210236
aucguuauagcugucauaa

SEQ ID NO: 210238 - RNA, 19 nt, Artificial Sequence
  Description of Artificial Sequence: Synthetic oligonucleotide
  Sense strand starting at position 1876 of SEQ ID NO: 2708
uggacaugguacuuuagaa

SEQ ID NO: 210239 - RNA, 19 nt, Artificial Sequence
  Description of Artificial Sequence: Synthetic oligonucleotide
  Antisense strand to SEQ ID NO: 210238
uucuaaaguaccaugucca

SEQ ID NO: 210240 - RNA, 19 nt, Artificial Sequence
  Description of Artificial Sequence: Synthetic oligonucleotide
  Sense strand starting at position 2052 of SEQ ID NO: 2708
ugaguuuaucgugagagag

SEQ ID NO: 210241 - RNA, 19 nt, Artificial Sequence
  Description of Artificial Sequence: Synthetic oligonucleotide
  Antisense strand to SEQ ID NO: 210240
cucucucacgauaaacuca

SEQ ID NO: 210242 - RNA, 19 nt, Artificial Sequence
  Description of Artificial Sequence: Synthetic oligonucleotide
  Sense strand starting at position 2140 of SEQ ID NO: 2708
uuaucuuaaauguggagga

SEQ ID NO: 210243 - RNA, 19 nt, Artificial Sequence
  Description of Artificial Sequence: Synthetic oligonucleotide
  Antisense strand to SEQ ID NO: 210242
uccuccacauuuaagauaa

SEQ ID NO: 210244 - RNA, 19 nt, Artificial Sequence
  Description of Artificial Sequence: Synthetic oligonucleotide
  Sense strand starting at position 2179 of SEQ ID NO: 2708
aucagcugauguuugauaa

SEQ ID NO: 210245 - RNA, 19 nt, Artificial Sequence
  Description of Artificial Sequence: Synthetic oligonucleotide
  Antisense strand to SEQ ID NO: 210244
uuaucaaacaucagcugau

SEQ ID NO: 210246 - RNA, 19 nt, Artificial Sequence
  Description of Artificial Sequence: Synthetic oligonucleotide
  Sense strand starting at position 2280 of SEQ ID NO: 2708
acaaguaagucuuugaccu

SEQ ID NO: 210247 - RNA, 19 nt, Artificial Sequence
  Description of Artificial Sequence: Synthetic oligonucleotide
  Antisense strand to SEQ ID NO: 210246
aggucaaagacuuacuugu

SEQ ID NO: 210248 - RNA, 19 nt, Artificial Sequence
  Description of Artificial Sequence: Synthetic oligonucleotide
  Sense strand starting at position 2281 of SEQ ID NO: 2708
caaguaagucuuugaccug

SEQ ID NO: 210249 - RNA, 19 nt, Artificial Sequence
  Description of Artificial Sequence: Synthetic oligonucleotide
  Antisense strand to SEQ ID NO: 210248
caggucaaagacuuacuug

SEQ ID NO: 210250 - RNA, 19 nt, Artificial Sequence
  Description of Artificial Sequence: Synthetic oligonucleotide
  Sense strand starting at position 2290 of SEQ ID NO: 2708
cuuugaccugguuaucaau

SEQ ID NO: 210251 - RNA, 19 nt, Artificial Sequence
  Description of Artificial Sequence: Synthetic oligonucleotide
  Antisense strand to SEQ ID NO: 210250
auugauaaccaggucaaag

SEQ ID NO: 210252 - RNA, 19 nt, Artificial Sequence
  Description of Artificial Sequence: Synthetic oligonucleotide
  Sense strand starting at position 2322 of SEQ ID NO: 2708
uugaaaucucucugaugca

SEQ ID NO: 210253 - RNA, 19 nt, Artificial Sequence
  Description of Artificial Sequence: Synthetic oligonucleotide
  Antisense strand to SEQ ID NO: 210252
ugcaucagagagauuucaa

SEQ ID NO: 210254 - RNA, 19 nt, Artificial Sequence
  Description of Artificial Sequence: Synthetic oligonucleotide
  Sense strand starting at position 2545 of SEQ ID NO: 2708
auaaauaggugccuaucau

SEQ ID NO: 210255 - RNA, 19 nt, Artificial Sequence
  Description of Artificial Sequence: Synthetic oligonucleotide
  Antisense strand to SEQ ID NO: 210254
augauaggcaccuauuuau

SEQ ID NO: 210256 - RNA, 19 nt, Artificial Sequence
  Description of Artificial Sequence: Synthetic oligonucleotide
  Sense strand starting at position 2936 of SEQ ID NO: 2708
acuaaaguuuaggucagaa

SEQ ID NO: 210257 - RNA, 19 nt, Artificial Sequence
  Description of Artificial Sequence: Synthetic oligonucleotide
  Antisense strand to SEQ ID NO: 210256
uucugaccuaaacuuuagu

SEQ ID NO: 210258 - RNA, 19 nt, Artificial Sequence
  Description of Artificial Sequence: Synthetic oligonucleotide
  Sense strand starting at position 2938 of SEQ ID NO: 2708
uaaaguuuaggucagaagu

SEQ ID NO: 210259 - RNA, 19 nt, Artificial Sequence
  Description of Artificial Sequence: Synthetic oligonucleotide
  Antisense strand to SEQ ID NO: 210258
acuucugaccuaaacuuua

SEQ ID NO: 210260 - RNA, 19 nt, Artificial Sequence
  Description of Artificial Sequence: Synthetic oligonucleotide
  Sense strand starting at position 2994 of SEQ ID NO: 2708
gcuggaagcauuggaaauc

SEQ ID NO: 210261 - RNA, 19 nt, Artificial Sequence
  Description of Artificial Sequence: Synthetic oligonucleotide
  Antisense strand to SEQ ID NO: 210260
gauuuccaaugcuuccagc

SEQ ID NO: 210262 - RNA, 19 nt, Artificial Sequence
  Description of Artificial Sequence: Synthetic oligonucleotide
  Sense strand starting at position 3336 of SEQ ID NO: 2708
ccuagauccuagucccuau

SEQ ID NO: 210263 - RNA, 19 nt, Artificial Sequence
  Description of Artificial Sequence: Synthetic oligonucleotide
  Antisense strand to SEQ ID NO: 210262
auagggacuaggaucuagg

SEQ ID NO: 210264 - RNA, 19 nt, Artificial Sequence
  Description of Artificial Sequence: Synthetic oligonucleotide
  Sense strand starting at position 3476 of SEQ ID NO: 2708
agagcuugcaaagagguaa

SEQ ID NO: 210265 - RNA, 19 nt, Artificial Sequence
  Description of Artificial Sequence: Synthetic oligonucleotide
  Antisense strand to SEQ ID NO: 210264
uuaccucuuugcaagcucu

SEQ ID NO: 210266 - RNA, 19 nt, Artificial Sequence
  Description of Artificial Sequence: Synthetic oligonucleotide
  Sense strand starting at position 3491 of SEQ ID NO: 2708
guaacugaccuggaagguu

SEQ ID NO: 210267 - RNA, 19 nt, Artificial Sequence
  Description of Artificial Sequence: Synthetic oligonucleotide
  Antisense strand to SEQ ID NO: 210266
aaccuuccaggucaguuac

SEQ ID NO: 210268 - RNA, 19 nt, Artificial Sequence
  Description of Artificial Sequence: Synthetic oligonucleotide
  Sense strand starting at position 132 of SEQ ID NO: 2709
cuggcagaaaccugaggau

SEQ ID NO: 210269 - RNA, 19 nt, Artificial Sequence
  Description of Artificial Sequence: Synthetic oligonucleotide
  Antisense strand to SEQ ID NO: 210268
auccucagguuucugccag

SEQ ID NO: 210270 - RNA, 19 nt, Artificial Sequence
  Description of Artificial Sequence: Synthetic oligonucleotide
  Sense strand starting at position 174 of SEQ ID NO: 2709
agcgguaaccugggacuua

SEQ ID NO: 210271 - RNA, 19 nt, Artificial Sequence
  Description of Artificial Sequence: Synthetic oligonucleotide
  Antisense strand to SEQ ID NO: 210270
uaagucccagguuaccgcu

SEQ ID NO: 210272 - RNA, 19 nt, Artificial Sequence
  Description of Artificial Sequence: Synthetic oligonucleotide
  Sense strand starting at position 236 of SEQ ID NO: 2709
cagauaagcgacugaugaa

SEQ ID NO: 210273 - RNA, 19 nt, Artificial Sequence
  Description of Artificial Sequence: Synthetic oligonucleotide
  Antisense strand to SEQ ID NO: 210272
uucaucagucgcuuaucug

SEQ ID NO: 210274 - RNA, 19 nt, Artificial Sequence
  Description of Artificial Sequence: Synthetic oligonucleotide
  Sense strand starting at position 249 of SEQ ID NO: 2709
gaugaaguagucugugaca

SEQ ID NO: 210275 - RNA, 19 nt, Artificial Sequence
  Description of Artificial Sequence: Synthetic oligonucleotide
  Antisense strand to SEQ ID NO: 210274
ugucacagacuacuucauc

SEQ ID NO: 210276 - RNA, 19 nt, Artificial Sequence
  Description of Artificial Sequence: Synthetic oligonucleotide
  Sense strand starting at position 251 of SEQ ID NO: 2709
ugaaguagucugugacaca

SEQ ID NO: 210277 - RNA, 19 nt, Artificial Sequence
  Description of Artificial Sequence: Synthetic oligonucleotide
  Antisense strand to SEQ ID NO: 210276
ugugucacagacuacuuca

SEQ ID NO: 210278 - RNA, 19 nt, Artificial Sequence
  Description of Artificial Sequence: Synthetic oligonucleotide
  Sense strand starting at position 304 of SEQ ID NO: 2709
ggaugcuagugggagaaau

SEQ ID NO: 210279 - RNA, 19 nt, Artificial Sequence
  Description of Artificial Sequence: Synthetic oligonucleotide
  Antisense strand to SEQ ID NO: 210278
auuucucccacuagcaucc

SEQ ID NO: 210280 - RNA, 19 nt, Artificial Sequence
  Description of Artificial Sequence: Synthetic oligonucleotide
  Sense strand starting at position 370 of SEQ ID NO: 2709
acucaaugaugaggcaaga

SEQ ID NO: 210281 - RNA, 19 nt, Artificial Sequence
  Description of Artificial Sequence: Synthetic oligonucleotide
  Antisense strand to SEQ ID NO: 210280
ucuugccucaucauugagu

SEQ ID NO: 210282 - RNA, 19 nt, Artificial Sequence
  Description of Artificial Sequence: Synthetic oligonucleotide
  Sense strand starting at position 389 of SEQ ID NO: 2709
aggcaugcuuccuccaaga

SEQ ID NO: 210283 - RNA, 19 nt, Artificial Sequence
  Description of Artificial Sequence: Synthetic oligonucleotide
  Antisense strand to SEQ ID NO: 210282
ucuuggaggaagcaugccu

SEQ ID NO: 210284 - RNA, 19 nt, Artificial Sequence
  Description of Artificial Sequence: Synthetic oligonucleotide
  Sense strand starting at position 391 of SEQ ID NO: 2709
gcaugcuuccuccaagacu

SEQ ID NO: 210285 - RNA, 19 nt, Artificial Sequence
  Description of Artificial Sequence: Synthetic oligonucleotide
  Antisense strand to SEQ ID NO: 210284
agucuuggaggaagcaugc

SEQ ID NO: 210286 - RNA, 19 nt, Artificial Sequence
  Description of Artificial Sequence: Synthetic oligonucleotide
  Sense strand starting at position 427 of SEQ ID NO: 2709
gcaagacuuugccuugaaa

SEQ ID NO: 210287 - RNA, 19 nt, Artificial Sequence
  Description of Artificial Sequence: Synthetic oligonucleotide
  Antisense strand to SEQ ID NO: 210286
uuucaaggcaaagucuugc

SEQ ID NO: 210288 - RNA, 19 nt, Artificial Sequence
  Description of Artificial Sequence: Synthetic oligonucleotide
  Sense strand starting at position 430 of SEQ ID NO: 2709
agacuuugccuugaaagcu

SEQ ID NO: 210289 - RNA, 19 nt, Artificial Sequence
  Description of Artificial Sequence: Synthetic oligonucleotide
  Antisense strand to SEQ ID NO: 210288
agcuuucaaggcaaagucu

SEQ ID NO: 210290 - RNA, 19 nt, Artificial Sequence
  Description of Artificial Sequence: Synthetic oligonucleotide
  Sense strand starting at position 514 of SEQ ID NO: 2709
aggucagugaguuggccaa

SEQ ID NO: 210291 - RNA, 19 nt, Artificial Sequence
  Description of Artificial Sequence: Synthetic oligonucleotide
  Antisense strand to SEQ ID NO: 210290
uuggccaacucacugaccu

SEQ ID NO: 210292 - RNA, 19 nt, Artificial Sequence
  Description of Artificial Sequence: Synthetic oligonucleotide
  Sense strand starting at position 1818 of SEQ ID NO: 2709
gguaucaaauacuagacua

SEQ ID NO: 210293 - RNA, 19 nt, Artificial Sequence
  Description of Artificial Sequence: Synthetic oligonucleotide
  Antisense strand to SEQ ID NO: 210292
uagucuaguauuugauacc

SEQ ID NO: 210294 - RNA, 19 nt, Artificial Sequence
  Description of Artificial Sequence: Synthetic oligonucleotide
  Sense strand starting at position 1902 of SEQ ID NO: 2709
cuaggugagcgguaugaca

SEQ ID NO: 210295 - RNA, 19 nt, Artificial Sequence
  Description of Artificial Sequence: Synthetic oligonucleotide
  Antisense strand to SEQ ID NO: 210294
ugucauaccgcucaccuag

SEQ ID NO: 210296 - RNA, 19 nt, Artificial Sequence
  Description of Artificial Sequence: Synthetic oligonucleotide
  Sense strand starting at position 1976 of SEQ ID NO: 2709
cugaacguuucgaguagga

SEQ ID NO: 210297 - RNA, 19 nt, Artificial Sequence
  Description of Artificial Sequence: Synthetic oligonucleotide
  Antisense strand to SEQ ID NO: 210296
uccuacucgaaacguucag

SEQ ID NO: 210298 - RNA, 19 nt, Artificial Sequence
  Description of Artificial Sequence: Synthetic oligonucleotide
  Sense strand starting at position 1978 of SEQ ID NO: 2709
gaacguuucgaguaggauu

SEQ ID NO: 210299 - RNA, 19 nt, Artificial Sequence
  Description of Artificial Sequence: Synthetic oligonucleotide
  Antisense strand to SEQ ID NO: 210298
aauccuacucgaaacguuc

SEQ ID NO: 210300 - RNA, 19 nt, Artificial Sequence
  Description of Artificial Sequence: Synthetic oligonucleotide
  Sense strand starting at position 2221 of SEQ ID NO: 2709
ggucacgccucuuugaagu

SEQ ID NO: 210301 - RNA, 19 nt, Artificial Sequence
  Description of Artificial Sequence: Synthetic oligonucleotide
  Antisense strand to SEQ ID NO: 210300
acuucaaagaggcgugacc

SEQ ID NO: 210302 - RNA, 19 nt, Artificial Sequence
  Description of Artificial Sequence: Synthetic oligonucleotide
  Sense strand starting at position 2234 of SEQ ID NO: 2709
ugaagucagcugugcagaa

SEQ ID NO: 210303 - RNA, 19 nt, Artificial Sequence
  Description of Artificial Sequence: Synthetic oligonucleotide
  Antisense strand to SEQ ID NO: 210302
uucugcacagcugacuuca

SEQ ID NO: 210304 - RNA, 19 nt, Artificial Sequence
  Description of Artificial Sequence: Synthetic oligonucleotide
  Sense strand starting at position 2235 of SEQ ID NO: 2709
gaagucagcugugcagaaa

SEQ ID NO: 210305 - RNA, 19 nt, Artificial Sequence
  Description of Artificial Sequence: Synthetic oligonucleotide
  Antisense strand to SEQ ID NO: 210304
uuucugcacagcugacuuc

SEQ ID NO: 210306 - RNA, 19 nt, Artificial Sequence
  Description of Artificial Sequence: Synthetic oligonucleotide
  Sense strand starting at position 2310 of SEQ ID NO: 2709
cggccaugcccuugaggau

SEQ ID NO: 210307 - RNA, 19 nt, Artificial Sequence
  Description of Artificial Sequence: Synthetic oligonucleotide
  Antisense strand to SEQ ID NO: 210306
auccucaagggcauggccg

SEQ ID NO: 210308 - RNA, 19 nt, Artificial Sequence
  Description of Artificial Sequence: Synthetic oligonucleotide
  Sense strand starting at position 2319 of SEQ ID NO: 2709
ccuugaggaucuuaggcaa

SEQ ID NO: 210309 - RNA, 19 nt, Artificial Sequence
  Description of Artificial Sequence: Synthetic oligonucleotide
  Antisense strand to SEQ ID NO: 210308
uugccuaagauccucaagg

SEQ ID NO: 210310 - RNA, 19 nt, Artificial Sequence
  Description of Artificial Sequence: Synthetic oligonucleotide
  Sense strand starting at position 2356 of SEQ ID NO: 2709
ggaggaugauccugaugua

SEQ ID NO: 210311 - RNA, 19 nt, Artificial Sequence
  Description of Artificial Sequence: Synthetic oligonucleotide
  Antisense strand to SEQ ID NO: 210310
uacaucaggaucauccucc

SEQ ID NO: 210312 - RNA, 19 nt, Artificial Sequence
  Description of Artificial Sequence: Synthetic oligonucleotide
  Sense strand starting at position 2359 of SEQ ID NO: 2709
ggaugauccugauguaaca

SEQ ID NO: 210313 - RNA, 19 nt, Artificial Sequence
  Description of Artificial Sequence: Synthetic oligonucleotide
  Antisense strand to SEQ ID NO: 210312
uguuacaucaggaucaucc

SEQ ID NO: 210314 - RNA, 19 nt, Artificial Sequence
  Description of Artificial Sequence: Synthetic oligonucleotide
  Sense strand starting at position 2368 of SEQ ID NO: 2709
ugauguaacagaugcucga

SEQ ID NO: 210315 - RNA, 19 nt, Artificial Sequence
  Description of Artificial Sequence: Synthetic oligonucleotide
  Antisense strand to SEQ ID NO: 210314
ucgagcaucuguuacauca

SEQ ID NO: 210316 - RNA, 19 nt, Artificial Sequence
  Description of Artificial Sequence: Synthetic oligonucleotide
  Sense strand starting at position 2372 of SEQ ID NO: 2709
guaacagaugcucgaagug

SEQ ID NO: 210317 - RNA, 19 nt, Artificial Sequence
  Description of Artificial Sequence: Synthetic oligonucleotide
  Antisense strand to SEQ ID NO: 210316
cacuucgagcaucuguuac

SEQ ID NO: 210318 - RNA, 19 nt, Artificial Sequence
  Description of Artificial Sequence: Synthetic oligonucleotide
  Sense strand starting at position 2381 of SEQ ID NO: 2709
gcucgaaguggguagaauu

SEQ ID NO: 210319 - RNA, 19 nt, Artificial Sequence
  Description of Artificial Sequence: Synthetic oligonucleotide
  Antisense strand to SEQ ID NO: 210318
aauucuacccacuucgagc

SEQ ID NO: 210320 - RNA, 19 nt, Artificial Sequence
  Description of Artificial Sequence: Synthetic oligonucleotide
  Sense strand starting at position 2404 of SEQ ID NO: 2709
agacaagggucucugaguu

SEQ ID NO: 210321 - RNA, 19 nt, Artificial Sequence
  Description of Artificial Sequence: Synthetic oligonucleotide
  Antisense strand to SEQ ID NO: 210320
aacucagagacccuugucu

SEQ ID NO: 210322 - RNA, 19 nt, Artificial Sequence
  Description of Artificial Sequence: Synthetic oligonucleotide
  Sense strand starting at position 2410 of SEQ ID NO: 2709
gggucucugaguugaggau

SEQ ID NO: 210323 - RNA, 19 nt, Artificial Sequence
  Description of Artificial Sequence: Synthetic oligonucleotide
  Antisense strand to SEQ ID NO: 210322
auccucaacucagagaccc

SEQ ID NO: 210324 - RNA, 19 nt, Artificial Sequence
  Description of Artificial Sequence: Synthetic oligonucleotide
  Sense strand starting at position 2411 of SEQ ID NO: 2709
ggucucugaguugaggauu

SEQ ID NO: 210325 - RNA, 19 nt, Artificial Sequence
  Description of Artificial Sequence: Synthetic oligonucleotide
  Antisense strand to SEQ ID NO: 210324
aauccucaacucagagacc

SEQ ID NO: 210326 - RNA, 19 nt, Artificial Sequence
  Description of Artificial Sequence: Synthetic oligonucleotide
  Sense strand starting at position 2439 of SEQ ID NO: 2709
guacgaguuccuugggaaa

SEQ ID NO: 210327 - RNA, 19 nt, Artificial Sequence
  Description of Artificial Sequence: Synthetic oligonucleotide
  Antisense strand to SEQ ID NO: 210326
uuucccaaggaacucguac

SEQ ID NO: 210328 - RNA, 19 nt, Artificial Sequence
  Description of Artificial Sequence: Synthetic oligonucleotide
  Sense strand starting at position 2695 of SEQ ID NO: 2709
cggugagacucugucuaaa

SEQ ID NO: 210329 - RNA, 19 nt, Artificial Sequence
  Description of Artificial Sequence: Synthetic oligonucleotide
  Antisense strand to SEQ ID NO: 210328
uuuagacagagucucaccg

SEQ ID NO: 210330 - RNA, 19 nt, Artificial Sequence
  Description of Artificial Sequence: Synthetic oligonucleotide
  Sense strand starting at position 3084 of SEQ ID NO: 2709
agagaacuuuaccaaagug

SEQ ID NO: 210331 - RNA, 19 nt, Artificial Sequence
  Description of Artificial Sequence: Synthetic oligonucleotide
  Antisense strand to SEQ ID NO: 210330
cacuuugguaaaguucucu

SEQ ID NO: 210332 - RNA, 19 nt, Artificial Sequence
  Description of Artificial Sequence: Synthetic oligonucleotide
  Sense strand starting at position 3167 of SEQ ID NO: 2709
cuugaaaggcuuugacuua

SEQ ID NO: 210333 - RNA, 19 nt, Artificial Sequence
  Description of Artificial Sequence: Synthetic oligonucleotide
  Antisense strand to SEQ ID NO: 210332
uaagucaaagccuuucaag

SEQ ID NO: 210334 - RNA, 19 nt, Artificial Sequence
  Description of Artificial Sequence: Synthetic oligonucleotide
  Sense strand starting at position 3192 of SEQ ID NO: 2709
ggguuuggauguucucaag

SEQ ID NO: 210335 - RNA, 19 nt, Artificial Sequence
  Description of Artificial Sequence: Synthetic oligonucleotide
  Antisense strand to SEQ ID NO: 210334
cuugagaacauccaaaccc

SEQ ID NO: 210336 - RNA, 19 nt, Artificial Sequence
  Description of Artificial Sequence: Synthetic oligonucleotide
  Sense strand starting at position 3554 of SEQ ID NO: 2709
ggaucagauuuggaagcau

SEQ ID NO: 210337 - RNA, 19 nt, Artificial Sequence
  Description of Artificial Sequence: Synthetic oligonucleotide
  Antisense strand to SEQ ID NO: 210336
augcuuccaaaucugaucc

SEQ ID NO: 210338 - RNA, 19 nt, Artificial Sequence
  Description of Artificial Sequence: Synthetic oligonucleotide
  Sense strand starting at position 3566 of SEQ ID NO: 2709
gaagcauugaggcgcuaua

SEQ ID NO: 210339 - RNA, 19 nt, Artificial Sequence
  Description of Artificial Sequence: Synthetic oligonucleotide
  Antisense strand to SEQ ID NO: 210338
uauagcgccucaaugcuuc

SEQ ID NO: 210340 - RNA, 19 nt, Artificial Sequence
  Description of Artificial Sequence: Synthetic oligonucleotide
  Sense strand starting at position 3577 of SEQ ID NO: 2709
gcgcuauacucccuagaau

SEQ ID NO: 210341 - RNA, 19 nt, Artificial Sequence
  Description of Artificial Sequence: Synthetic oligonucleotide
  Antisense strand to SEQ ID NO: 210340
auucuagggaguauagcgc

SEQ ID NO: 210342 - RNA, 19 nt, Artificial Sequence
  Description of Artificial Sequence: Synthetic oligonucleotide
  Sense strand starting at position 3578 of SEQ ID NO: 2709
cgcuauacucccuagaauc

SEQ ID NO: 210343 - RNA, 19 nt, Artificial Sequence
  Description of Artificial Sequence: Synthetic oligonucleotide
  Antisense strand to SEQ ID NO: 210342
gauucuagggaguauagcg

SEQ ID NO: 210344 - RNA, 19 nt, Artificial Sequence
  Description of Artificial Sequence: Synthetic oligonucleotide
  Sense strand starting at position 3708 of SEQ ID NO: 2709
ucaucuaguuguuuaaucu

SEQ ID NO: 210345 - RNA, 19 nt, Artificial Sequence
  Description of Artificial Sequence: Synthetic oligonucleotide
  Antisense strand to SEQ ID NO: 210344
agauuaaacaacuagauga

SEQ ID NO: 210346 - RNA, 19 nt, Artificial Sequence
  Description of Artificial Sequence: Synthetic oligonucleotide
  Sense strand starting at position 3712 of SEQ ID NO: 2709
cuaguuguuuaaucuggaa

SEQ ID NO: 210347 - RNA, 19 nt, Artificial Sequence
  Description of Artificial Sequence: Synthetic oligonucleotide
  Antisense strand to SEQ ID NO: 210346
uuccagauuaaacaacuag

SEQ ID NO: 210348 - RNA, 19 nt, Artificial Sequence
  Description of Artificial Sequence: Synthetic oligonucleotide
  Sense strand starting at position 2 of SEQ ID NO: 2710
ugaagugauucuuuaaccu

SEQ ID NO: 210349 - RNA, 19 nt, Artificial Sequence
  Description of Artificial Sequence: Synthetic oligonucleotide
  Antisense strand to SEQ ID NO: 210348
agguuaaagaaucacuuca

SEQ ID NO: 210350 - RNA, 19 nt, Artificial Sequence
  Description of Artificial Sequence: Synthetic oligonucleotide
  Sense strand starting at position 95 of SEQ ID NO: 2710
aauuaauguugaguggcaa

SEQ ID NO: 210351 - RNA, 19 nt, Artificial Sequence
  Description of Artificial Sequence: Synthetic oligonucleotide
  Antisense strand to SEQ ID NO: 210350
uugccacucaacauuaauu

SEQ ID NO: 210352 - RNA, 19 nt, Artificial Sequence
  Description of Artificial Sequence: Synthetic oligonucleotide
  Sense strand starting at position 373 of SEQ ID NO: 2710
uuaaacaugugucucauau

SEQ ID NO: 210353 - RNA, 19 nt, Artificial Sequence
  Description of Artificial Sequence: Synthetic oligonucleotide
  Antisense strand to SEQ ID NO: 210352
auaugagacacauguuuaa

SEQ ID NO: 210354 - RNA, 19 nt, Artificial Sequence
  Description of Artificial Sequence: Synthetic oligonucleotide
  Sense strand starting at position 579 of SEQ ID NO: 2710
aguccuacccuguguagga

SEQ ID NO: 210355 - RNA, 19 nt, Artificial Sequence
  Description of Artificial Sequence: Synthetic oligonucleotide
  Antisense strand to SEQ ID NO: 210354
uccuacacaggguaggacu

SEQ ID NO: 210356 - RNA, 19 nt, Artificial Sequence
  Description of Artificial Sequence: Synthetic oligonucleotide
  Sense strand starting at position 678 of SEQ ID NO: 2710
agguuacaucuuuguaauc

SEQ ID NO: 210357 - RNA, 19 nt, Artificial Sequence
  Description of Artificial Sequence: Synthetic oligonucleotide
  Antisense strand to SEQ ID NO: 210356
gauuacaaagauguaaccu

SEQ ID NO: 210358 - RNA, 19 nt, Artificial Sequence
  Description of Artificial Sequence: Synthetic oligonucleotide
  Sense strand starting at position 679 of SEQ ID NO: 2710
gguuacaucuuuguaaucu

SEQ ID NO: 210359 - RNA, 19 nt, Artificial Sequence
  Description of Artificial Sequence: Synthetic oligonucleotide
  Antisense strand to SEQ ID NO: 210358
agauuacaaagauguaacc

SEQ ID NO: 210360 - RNA, 19 nt, Artificial Sequence
  Description of Artificial Sequence: Synthetic oligonucleotide
  Sense strand starting at position 877 of SEQ ID NO: 2710
guaacauagucuccuuacu

SEQ ID NO: 210361 - RNA, 19 nt, Artificial Sequence
  Description of Artificial Sequence: Synthetic oligonucleotide
  Antisense strand to SEQ ID NO: 210360
aguaaggagacuauguuac

SEQ ID NO: 210362 - RNA, 19 nt, Artificial Sequence
  Description of Artificial Sequence: Synthetic oligonucleotide
  Sense strand starting at position 936 of SEQ ID NO: 2710
guaagaauaucaguggcua

SEQ ID NO: 210363 - RNA, 19 nt, Artificial Sequence
  Description of Artificial Sequence: Synthetic oligonucleotide
  Antisense strand to SEQ ID NO: 210362
uagccacugauauucuuac

SEQ ID NO: 210364 - RNA, 19 nt, Artificial Sequence
  Description of Artificial Sequence: Synthetic oligonucleotide
  Sense strand starting at position 937 of SEQ ID NO: 2710
uaagaauaucaguggcuau

SEQ ID NO: 210365 - RNA, 19 nt, Artificial Sequence
  Description of Artificial Sequence: Synthetic oligonucleotide
  Antisense strand to SEQ ID NO: 210364
auagccacugauauucuua

SEQ ID NO: 210366 - RNA, 19 nt, Artificial Sequence
  Description of Artificial Sequence: Synthetic oligonucleotide
  Sense strand starting at position 950 of SEQ ID NO: 2710
ggcuauaggcuagagcaau

SEQ ID NO: 210367 - RNA, 19 nt, Artificial Sequence
  Description of Artificial Sequence: Synthetic oligonucleotide
  Antisense strand to SEQ ID NO: 210366
auugcucuagccuauagcc

SEQ ID NO: 210368 - RNA, 19 nt, Artificial Sequence
  Description of Artificial Sequence: Synthetic oligonucleotide
  Sense strand starting at position 956 of SEQ ID NO: 2710
aggcuagagcaauaucauc

SEQ ID NO: 210369 - RNA, 19 nt, Artificial Sequence
  Description of Artificial Sequence: Synthetic oligonucleotide
  Antisense strand to SEQ ID NO: 210368
gaugauauugcucuagccu

SEQ ID NO: 210370 - RNA, 19 nt, Artificial Sequence
  Description of Artificial Sequence: Synthetic oligonucleotide
  Sense strand starting at position 1003 of SEQ ID NO: 2710
ucacuuuaagaaggugaua

SEQ ID NO: 210371 - RNA, 19 nt, Artificial Sequence
  Description of Artificial Sequence: Synthetic oligonucleotide
  Antisense strand to SEQ ID NO: 210370
uaucaccuucuuaaaguga

SEQ ID NO: 210372 - RNA, 19 nt, Artificial Sequence
  Description of Artificial Sequence: Synthetic oligonucleotide
  Sense strand starting at position 1095 of SEQ ID NO: 2710
agaagacauuauuaaagcu

SEQ ID NO: 210373 - RNA, 19 nt, Artificial Sequence
  Description of Artificial Sequence: Synthetic oligonucleotide
  Antisense strand to SEQ ID NO: 210372
agcuuuaauaaugucuucu

SEQ ID NO: 210374 - RNA, 19 nt, Artificial Sequence
  Description of Artificial Sequence: Synthetic oligonucleotide
  Sense strand starting at position 1141 of SEQ ID NO: 2710
gccucagguuauuuccaua

SEQ ID NO: 210375 - RNA, 19 nt, Artificial Sequence
  Description of Artificial Sequence: Synthetic oligonucleotide
  Antisense strand to SEQ ID NO: 210374
uauggaaauaaccugaggc

SEQ ID NO: 210376 - RNA, 19 nt, Artificial Sequence
  Description of Artificial Sequence: Synthetic oligonucleotide
  Sense strand starting at position 1144 of SEQ ID NO: 2710
ucagguuauuuccauauca

SEQ ID NO: 210377 - RNA, 19 nt, Artificial Sequence
  Description of Artificial Sequence: Synthetic oligonucleotide
  Antisense strand to SEQ ID NO: 210376
ugauauggaaauaaccuga

SEQ ID NO: 210378 - RNA, 19 nt, Artificial Sequence
  Description of Artificial Sequence: Synthetic oligonucleotide
  Sense strand starting at position 1234 of SEQ ID NO: 2710
aaaucaucacaagguguga

SEQ ID NO: 210379 - RNA, 19 nt, Artificial Sequence
  Description of Artificial Sequence: Synthetic oligonucleotide
  Antisense strand to SEQ ID NO: 210378
ucacaccuugugaugauuu

SEQ ID NO: 210380 - RNA, 19 nt, Artificial Sequence
  Description of Artificial Sequence: Synthetic oligonucleotide
  Sense strand starting at position 1243 of SEQ ID NO: 2710
caaggugugaaggauuguu

SEQ ID NO: 210381 - RNA, 19 nt, Artificial Sequence
  Description of Artificial Sequence: Synthetic oligonucleotide
  Antisense strand to SEQ ID NO: 210380
aacaauccuucacaccuug

SEQ ID NO: 210382 - RNA, 19 nt, Artificial Sequence
  Description of Artificial Sequence: Synthetic oligonucleotide
  Sense strand starting at position 1248 of SEQ ID NO: 2710
ugugaaggauuguuucugu

SEQ ID NO: 210383 - RNA, 19 nt, Artificial Sequence
  Description of Artificial Sequence: Synthetic oligonucleotide
  Antisense strand to SEQ ID NO: 210382
acagaaacaauccuucaca

SEQ ID NO: 210384 - RNA, 19 nt, Artificial Sequence
  Description of Artificial Sequence: Synthetic oligonucleotide
  Sense strand starting at position 1251 of SEQ ID NO: 2710
gaaggauuguuucuguuuc

SEQ ID NO: 210385 - RNA, 19 nt, Artificial Sequence
  Description of Artificial Sequence: Synthetic oligonucleotide
  Antisense strand to SEQ ID NO: 210384
gaaacagaaacaauccuuc

SEQ ID NO: 210386 - RNA, 19 nt, Artificial Sequence
  Description of Artificial Sequence: Synthetic oligonucleotide
  Sense strand starting at position 1333 of SEQ ID NO: 2710
gcgggauguacacacagau

SEQ ID NO: 210387 - RNA, 19 nt, Artificial Sequence
  Description of Artificial Sequence: Synthetic oligonucleotide
  Antisense strand to SEQ ID NO: 210386
aucuguguguacaucccgc

SEQ ID NO: 210388 - RNA, 19 nt, Artificial Sequence
  Description of Artificial Sequence: Synthetic oligonucleotide
  Sense strand starting at position 1342 of SEQ ID NO: 2710
acacacagauguguuuaau

SEQ ID NO: 210389 - RNA, 19 nt, Artificial Sequence
  Description of Artificial Sequence: Synthetic oligonucleotide
  Antisense strand to SEQ ID NO: 210388
auuaaacacaucugugugu

SEQ ID NO: 210390 - RNA, 19 nt, Artificial Sequence
  Description of Artificial Sequence: Synthetic oligonucleotide
  Sense strand starting at position 1384 of SEQ ID NO: 2710
agagguuugcuuugagaau

SEQ ID NO: 210391 - RNA, 19 nt, Artificial Sequence
  Description of Artificial Sequence: Synthetic oligonucleotide
  Antisense strand to SEQ ID NO: 210390
auucucaaagcaaaccucu

SEQ ID NO: 210392 - RNA, 19 nt, Artificial Sequence
  Description of Artificial Sequence: Synthetic oligonucleotide
  Sense strand starting at position 1393 of SEQ ID NO: 2710
cuuugagaaucagggaaca

SEQ ID NO: 210393 - RNA, 19 nt, Artificial Sequence
  Description of Artificial Sequence: Synthetic oligonucleotide
  Antisense strand to SEQ ID NO: 210392
uguucccugauucucaaag

SEQ ID NO: 210394 - RNA, 19 nt, Artificial Sequence
  Description of Artificial Sequence: Synthetic oligonucleotide
  Sense strand starting at position 1421 of SEQ ID NO: 2710
auguguugacgcuuuggca

SEQ ID NO: 210395 - RNA, 19 nt, Artificial Sequence
  Description of Artificial Sequence: Synthetic oligonucleotide
  Antisense strand to SEQ ID NO: 210394
ugccaaagcgucaacacau

SEQ ID NO: 210396 - RNA, 19 nt, Artificial Sequence
  Description of Artificial Sequence: Synthetic oligonucleotide
  Sense strand starting at position 1422 of SEQ ID NO: 2710
uguguugacgcuuuggcau

SEQ ID NO: 210397 - RNA, 19 nt, Artificial Sequence
  Description of Artificial Sequence: Synthetic oligonucleotide
  Antisense strand to SEQ ID NO: 210396
augccaaagcgucaacaca

SEQ ID NO: 210398 - RNA, 19 nt, Artificial Sequence
  Description of Artificial Sequence: Synthetic oligonucleotide
  Sense strand starting at position 1487 of SEQ ID NO: 2710
aggaaauccucuuugaguc

SEQ ID NO: 210399 - RNA, 19 nt, Artificial Sequence
  Description of Artificial Sequence: Synthetic oligonucleotide
  Antisense strand to SEQ ID NO: 210398
gacucaaagaggauuuccu

SEQ ID NO: 210400 - RNA, 19 nt, Artificial Sequence
  Description of Artificial Sequence: Synthetic oligonucleotide
  Sense strand starting at position 1488 of SEQ ID NO: 2710
ggaaauccucuuugagucu

SEQ ID NO: 210401 - RNA, 19 nt, Artificial Sequence
  Description of Artificial Sequence: Synthetic oligonucleotide
  Antisense strand to SEQ ID NO: 210400
agacucaaagaggauuucc

SEQ ID NO: 210402 - RNA, 19 nt, Artificial Sequence
  Description of Artificial Sequence: Synthetic oligonucleotide
  Sense strand starting at position 1514 of SEQ ID NO: 2710
gaguuaugaguuugaggac

SEQ ID NO: 210403 - RNA, 19 nt, Artificial Sequence
  Description of Artificial Sequence: Synthetic oligonucleotide
  Antisense strand to SEQ ID NO: 210402
guccucaaacucauaacuc

SEQ ID NO: 210404 - RNA, 19 nt, Artificial Sequence
  Description of Artificial Sequence: Synthetic oligonucleotide
  Sense strand starting at position 2450 of SEQ ID NO: 2710
cugccuaagcuggaaagua

SEQ ID NO: 210405 - RNA, 19 nt, Artificial Sequence
  Description of Artificial Sequence: Synthetic oligonucleotide
  Antisense strand to SEQ ID NO: 210404
uacuuuccagcuuaggcag

SEQ ID NO: 210406 - RNA, 19 nt, Artificial Sequence
  Description of Artificial Sequence: Synthetic oligonucleotide
  Sense strand starting at position 3423 of SEQ ID NO: 2710
gcgacagauugugcaggaa

SEQ ID NO: 210407 - RNA, 19 nt, Artificial Sequence
  Description of Artificial Sequence: Synthetic oligonucleotide
  Antisense strand to SEQ ID NO: 210406
uuccugcacaaucugucgc

SEQ ID NO: 210408 - RNA, 19 nt, Artificial Sequence
  Description of Artificial Sequence: Synthetic oligonucleotide
  Sense strand starting at position 3667 of SEQ ID NO: 2710
ggucuucaggaccgugaau

SEQ ID NO: 210409 - RNA, 19 nt, Artificial Sequence
  Description of Artificial Sequence: Synthetic oligonucleotide
  Antisense strand to SEQ ID NO: 210408
auucacgguccugaagacc

SEQ ID NO: 210410 - RNA, 19 nt, Artificial Sequence
  Description of Artificial Sequence: Synthetic oligonucleotide
  Sense strand starting at position 3709 of SEQ ID NO: 2710
aagguuauugaucauugca

SEQ ID NO: 210411 - RNA, 19 nt, Artificial Sequence
  Description of Artificial Sequence: Synthetic oligonucleotide
  Antisense strand to SEQ ID NO: 210410
ugcaaugaucaauaaccuu

SEQ ID NO: 210412 - RNA, 19 nt, Artificial Sequence
  Description of Artificial Sequence: Synthetic oligonucleotide
  Sense strand starting at position 3711 of SEQ ID NO: 2710
gguuauugaucauugcaca

SEQ ID NO: 210413 - RNA, 19 nt, Artificial Sequence
  Description of Artificial Sequence: Synthetic oligonucleotide
  Antisense strand to SEQ ID NO: 210412
ugugcaaugaucaauaacc

SEQ ID NO: 210414 - RNA, 19 nt, Artificial Sequence
  Description of Artificial Sequence: Synthetic oligonucleotide
  Sense strand starting at position 3712 of SEQ ID NO: 2710
guuauugaucauugcacag

SEQ ID NO: 210415 - RNA, 19 nt, Artificial Sequence
  Description of Artificial Sequence: Synthetic oligonucleotide
  Antisense strand to SEQ ID NO: 210414
cugugcaaugaucaauaac

SEQ ID NO: 210416 - RNA, 19 nt, Artificial Sequence
  Description of Artificial Sequence: Synthetic oligonucleotide
  Sense strand starting at position 3811 of SEQ ID NO: 2710
gggccugaagguuguuaga

SEQ ID NO: 210417 - RNA, 19 nt, Artificial Sequence
  Description of Artificial Sequence: Synthetic oligonucleotide
  Antisense strand to SEQ ID NO: 210416
ucuaacaaccuucaggccc

SEQ ID NO: 210418 - RNA, 19 nt, Artificial Sequence
  Description of Artificial Sequence: Synthetic oligonucleotide
  Sense strand starting at position 3813 of SEQ ID NO: 2710
gccugaagguuguuagagu

SEQ ID NO: 210419 - RNA, 19 nt, Artificial Sequence
  Description of Artificial Sequence: Synthetic oligonucleotide
  Antisense strand to SEQ ID NO: 210418
acucuaacaaccuucaggc

SEQ ID NO: 210420 - RNA, 19 nt, Artificial Sequence
  Description of Artificial Sequence: Synthetic oligonucleotide
  Sense strand starting at position 3889 of SEQ ID NO: 2710
gggcauguacugcgagaga

SEQ ID NO: 210421 - RNA, 19 nt, Artificial Sequence
  Description of Artificial Sequence: Synthetic oligonucleotide
  Antisense strand to SEQ ID NO: 210420
ucucucgcaguacaugccc

SEQ ID NO: 210422 - RNA, 19 nt, Artificial Sequence
  Description of Artificial Sequence: Synthetic oligonucleotide
  Sense strand starting at position 3921 of SEQ ID NO: 2710
ucacuuugguauccuaaga

SEQ ID NO: 210423 - RNA, 19 nt, Artificial Sequence
  Description of Artificial Sequence: Synthetic oligonucleotide
  Antisense strand to SEQ ID NO: 210422
ucuuaggauaccaaaguga

SEQ ID NO: 210424 - RNA, 19 nt, Artificial Sequence
  Description of Artificial Sequence: Synthetic oligonucleotide
  Sense strand starting at position 3972 of SEQ ID NO: 2710
guguuuagaccucguauaa

SEQ ID NO: 210425 - RNA, 19 nt, Artificial Sequence
  Description of Artificial Sequence: Synthetic oligonucleotide
  Antisense strand to SEQ ID NO: 210424
uuauacgaggucuaaacac

SEQ ID NO: 210426 - RNA, 19 nt, Artificial Sequence
  Description of Artificial Sequence: Synthetic oligonucleotide
  Sense strand starting at position 3976 of SEQ ID NO: 2710
uuagaccucguauaauaca

SEQ ID NO: 210427 - RNA, 19 nt, Artificial Sequence
  Description of Artificial Sequence: Synthetic oligonucleotide
  Antisense strand to SEQ ID NO: 210426
uguauuauacgaggucuaa

SEQ ID NO: 210428 - RNA, 19 nt, Artificial Sequence
  Description of Artificial Sequence: Synthetic oligonucleotide
  Sense strand starting at position 48 of SEQ ID NO: 2711
uuguuuauuggugauaagu

SEQ ID NO: 210429 - RNA, 19 nt, Artificial Sequence
  Description of Artificial Sequence: Synthetic oligonucleotide
  Antisense strand to SEQ ID NO: 210428
acuuaucaccaauaaacaa

SEQ ID NO: 210430 - RNA, 19 nt, Artificial Sequence
  Description of Artificial Sequence: Synthetic oligonucleotide
  Sense strand starting at position 56 of SEQ ID NO: 2711
uggugauaagugcaaagga

SEQ ID NO: 210431 - RNA, 19 nt, Artificial Sequence
  Description of Artificial Sequence: Synthetic oligonucleotide
  Antisense strand to SEQ ID NO: 210430
uccuuugcacuuaucacca

SEQ ID NO: 210432 - RNA, 19 nt, Artificial Sequence
  Description of Artificial Sequence: Synthetic oligonucleotide
  Sense strand starting at position 266 of SEQ ID NO: 2711
auaauaaagagguggguuu

SEQ ID NO: 210433 - RNA, 19 nt, Artificial Sequence
  Description of Artificial Sequence: Synthetic oligonucleotide
  Antisense strand to SEQ ID NO: 210432
aaacccaccucuuuauuau

SEQ ID NO: 210434 - RNA, 19 nt, Artificial Sequence
  Description of Artificial Sequence: Synthetic oligonucleotide
  Sense strand starting at position 308 of SEQ ID NO: 2711
agagaacauugagagauga

SEQ ID NO: 210435 - RNA, 19 nt, Artificial Sequence
  Description of Artificial Sequence: Synthetic oligonucleotide
  Antisense strand to SEQ ID NO: 210434
ucaucucucaauguucucu

SEQ ID NO: 210436 - RNA, 19 nt, Artificial Sequence
  Description of Artificial Sequence: Synthetic oligonucleotide
  Sense strand starting at position 325 of SEQ ID NO: 2711
gaggucagacgguaauaau

SEQ ID NO: 210437 - RNA, 19 nt, Artificial Sequence
  Description of Artificial Sequence: Synthetic oligonucleotide
  Antisense strand to SEQ ID NO: 210436
auuauuaccgucugaccuc

SEQ ID NO: 210438 - RNA, 19 nt, Artificial Sequence
  Description of Artificial Sequence: Synthetic oligonucleotide
  Sense strand starting at position 733 of SEQ ID NO: 2711
gaggucuauagcugaggaa

SEQ ID NO: 210439 - RNA, 19 nt, Artificial Sequence
  Description of Artificial Sequence: Synthetic oligonucleotide
  Antisense strand to SEQ ID NO: 210438
uuccucagcuauagaccuc

SEQ ID NO: 210440 - RNA, 19 nt, Artificial Sequence
  Description of Artificial Sequence: Synthetic oligonucleotide
  Sense strand starting at position 866 of SEQ ID NO: 2711
guauuccuacuguaagaag

SEQ ID NO: 210441 - RNA, 19 nt, Artificial Sequence
  Description of Artificial Sequence: Synthetic oligonucleotide
  Antisense strand to SEQ ID NO: 210440
cuucuuacaguaggaauac

SEQ ID NO: 210442 - RNA, 19 nt, Artificial Sequence
  Description of Artificial Sequence: Synthetic oligonucleotide
  Sense strand starting at position 877 of SEQ ID NO: 2711
guaagaagugguuaguggu

SEQ ID NO: 210443 - RNA, 19 nt, Artificial Sequence
  Description of Artificial Sequence: Synthetic oligonucleotide
  Antisense strand to SEQ ID NO: 210442
accacuaaccacuucuuac

SEQ ID NO: 210444 - RNA, 19 nt, Artificial Sequence
  Description of Artificial Sequence: Synthetic oligonucleotide
  Sense strand starting at position 884 of SEQ ID NO: 2711
gugguuagugguuagauau

SEQ ID NO: 210445 - RNA, 19 nt, Artificial Sequence
  Description of Artificial Sequence: Synthetic oligonucleotide
  Antisense strand to SEQ ID NO: 210444
auaucuaaccacuaaccac

SEQ ID NO: 210446 - RNA, 19 nt, Artificial Sequence
  Description of Artificial Sequence: Synthetic oligonucleotide
  Sense strand starting at position 991 of SEQ ID NO: 2711
uggugcuaucacugagaca

SEQ ID NO: 210447 - RNA, 19 nt, Artificial Sequence
  Description of Artificial Sequence: Synthetic oligonucleotide
  Antisense strand to SEQ ID NO: 210446
ugucucagugauagcacca

SEQ ID NO: 210448 - RNA, 19 nt, Artificial Sequence
  Description of Artificial Sequence: Synthetic oligonucleotide
  Sense strand starting at position 992 of SEQ ID NO: 2711
ggugcuaucacugagacaa

SEQ ID NO: 210449 - RNA, 19 nt, Artificial Sequence
  Description of Artificial Sequence: Synthetic oligonucleotide
  Antisense strand to SEQ ID NO: 210448
uugucucagugauagcacc

SEQ ID NO: 210450 - RNA, 19 nt, Artificial Sequence
  Description of Artificial Sequence: Synthetic oligonucleotide
  Sense strand starting at position 1148 of SEQ ID NO: 2711
gagacuaauuucugaagag

SEQ ID NO: 210451 - RNA, 19 nt, Artificial Sequence
  Description of Artificial Sequence: Synthetic oligonucleotide
  Antisense strand to SEQ ID NO: 210450
cucuucagaaauuagucuc

SEQ ID NO: 210452 - RNA, 19 nt, Artificial Sequence
  Description of Artificial Sequence: Synthetic oligonucleotide
  Sense strand starting at position 1149 of SEQ ID NO: 2711
agacuaauuucugaagagc

SEQ ID NO: 210453 - RNA, 19 nt, Artificial Sequence
  Description of Artificial Sequence: Synthetic oligonucleotide
  Antisense strand to SEQ ID NO: 210452
gcucuucagaaauuagucu

SEQ ID NO: 210454 - RNA, 19 nt, Artificial Sequence
  Description of Artificial Sequence: Synthetic oligonucleotide
  Sense strand starting at position 1228 of SEQ ID NO: 2711
gcacgccaagauuaacaaa

SEQ ID NO: 210455 - RNA, 19 nt, Artificial Sequence
  Description of Artificial Sequence: Synthetic oligonucleotide
  Antisense strand to SEQ ID NO: 210454
uuuguuaaucuuggcgugc

SEQ ID NO: 210456 - RNA, 19 nt, Artificial Sequence
  Description of Artificial Sequence: Synthetic oligonucleotide
  Sense strand starting at position 1284 of SEQ ID NO: 2711
auacgaacuucucuaaagu

SEQ ID NO: 210457 - RNA, 19 nt, Artificial Sequence
  Description of Artificial Sequence: Synthetic oligonucleotide
  Antisense strand to SEQ ID NO: 210456
acuuuagagaaguucguau

SEQ ID NO: 210458 - RNA, 19 nt, Artificial Sequence
  Description of Artificial Sequence: Synthetic oligonucleotide
  Sense strand starting at position 1285 of SEQ ID NO: 2711
uacgaacuucucuaaagug

SEQ ID NO: 210459 - RNA, 19 nt, Artificial Sequence
  Description of Artificial Sequence: Synthetic oligonucleotide
  Antisense strand to SEQ ID NO: 210458
cacuuuagagaaguucgua

SEQ ID NO: 210460 - RNA, 19 nt, Artificial Sequence
  Description of Artificial Sequence: Synthetic oligonucleotide
  Sense strand starting at position 1339 of SEQ ID NO: 2711
uaauacagugccugggaaa

SEQ ID NO: 210461 - RNA, 19 nt, Artificial Sequence
  Description of Artificial Sequence: Synthetic oligonucleotide
  Antisense strand to SEQ ID NO: 210460
uuucccaggcacuguauua

SEQ ID NO: 210462 - RNA, 19 nt, Artificial Sequence
  Description of Artificial Sequence: Synthetic oligonucleotide
  Sense strand starting at position 1340 of SEQ ID NO: 2711
aauacagugccugggaaau

SEQ ID NO: 210463 - RNA, 19 nt, Artificial Sequence
  Description of Artificial Sequence: Synthetic oligonucleotide
  Antisense strand to SEQ ID NO: 210462
auuucccaggcacuguauu

SEQ ID NO: 210464 - RNA, 19 nt, Artificial Sequence
  Description of Artificial Sequence: Synthetic oligonucleotide
  Sense strand starting at position 1351 of SEQ ID NO: 2711
ugggaaauuauagguggua

SEQ ID NO: 210465 - RNA, 19 nt, Artificial Sequence
  Description of Artificial Sequence: Synthetic oligonucleotide
  Antisense strand to SEQ ID NO: 210464
uaccaccuauaauuuccca

SEQ ID NO: 210466 - RNA, 19 nt, Artificial Sequence
  Description of Artificial Sequence: Synthetic oligonucleotide
  Sense strand starting at position 1354 of SEQ ID NO: 2711
gaaauuauaggugguaaau

SEQ ID NO: 210467 - RNA, 19 nt, Artificial Sequence
  Description of Artificial Sequence: Synthetic oligonucleotide
  Antisense strand to SEQ ID NO: 210466
auuuaccaccuauaauuuc

SEQ ID NO: 210468 - RNA, 19 nt, Artificial Sequence
  Description of Artificial Sequence: Synthetic oligonucleotide
  Sense strand starting at position 1461 of SEQ ID NO: 2711
gugcaaauuccugacaccu

SEQ ID NO: 210469 - RNA, 19 nt, Artificial Sequence
  Description of Artificial Sequence: Synthetic oligonucleotide
  Antisense strand to SEQ ID NO: 210468
aggugucaggaauuugcac

SEQ ID NO: 210470 - RNA, 19 nt, Artificial Sequence
  Description of Artificial Sequence: Synthetic oligonucleotide
  Sense strand starting at position 1501 of SEQ ID NO: 2711
ggaggauuaacugguggca

SEQ ID NO: 210471 - RNA, 19 nt, Artificial Sequence
  Description of Artificial Sequence: Synthetic oligonucleotide
  Antisense strand to SEQ ID NO: 210470
ugccaccaguuaauccucc

SEQ ID NO: 210472 - RNA, 19 nt, Artificial Sequence
  Description of Artificial Sequence: Synthetic oligonucleotide
  Sense strand starting at position 1695 of SEQ ID NO: 2711
cgccaaagcgccuuaaauc

SEQ ID NO: 210473 - RNA, 19 nt, Artificial Sequence
  Description of Artificial Sequence: Synthetic oligonucleotide
  Antisense strand to SEQ ID NO: 210472
gauuuaaggcgcuuuggcg

SEQ ID NO: 210474 - RNA, 19 nt, Artificial Sequence
  Description of Artificial Sequence: Synthetic oligonucleotide
  Sense strand starting at position 1778 of SEQ ID NO: 2711
ggugacuguccuuaucuga

SEQ ID NO: 210475 - RNA, 19 nt, Artificial Sequence
  Description of Artificial Sequence: Synthetic oligonucleotide
  Antisense strand to SEQ ID NO: 210474
ucagauaaggacagucacc

SEQ ID NO: 210476 - RNA, 19 nt, Artificial Sequence
  Description of Artificial Sequence: Synthetic oligonucleotide
  Sense strand starting at position 2217 of SEQ ID NO: 2711
cgcgguguucugcuaaucu

SEQ ID NO: 210477 - RNA, 19 nt, Artificial Sequence
  Description of Artificial Sequence: Synthetic oligonucleotide
  Antisense strand to SEQ ID NO: 210476
agauuagcagaacaccgcg

SEQ ID NO: 210478 - RNA, 19 nt, Artificial Sequence
  Description of Artificial Sequence: Synthetic oligonucleotide
  Sense strand starting at position 2226 of SEQ ID NO: 2711
cugcuaaucuugguaaaua

SEQ ID NO: 210479 - RNA, 19 nt, Artificial Sequence
  Description of Artificial Sequence: Synthetic oligonucleotide
  Antisense strand to SEQ ID NO: 210478
uauuuaccaagauuagcag

SEQ ID NO: 210480 - RNA, 19 nt, Artificial Sequence
  Description of Artificial Sequence: Synthetic oligonucleotide
  Sense strand starting at position 2301 of SEQ ID NO: 2711
cauucuucucguuaaagga

SEQ ID NO: 210481 - RNA, 19 nt, Artificial Sequence
  Description of Artificial Sequence: Synthetic oligonucleotide
  Antisense strand to SEQ ID NO: 210480
uccuuuaacgagaagaaug

SEQ ID NO: 210482 - RNA, 19 nt, Artificial Sequence
  Description of Artificial Sequence: Synthetic oligonucleotide
  Sense strand starting at position 2448 of SEQ ID NO: 2711
uuguaaaucugaguguaag

SEQ ID NO: 210483 - RNA, 19 nt, Artificial Sequence
  Description of Artificial Sequence: Synthetic oligonucleotide
  Antisense strand to SEQ ID NO: 210482
cuuacacucagauuuacaa

SEQ ID NO: 210484 - RNA, 19 nt, Artificial Sequence
  Description of Artificial Sequence: Synthetic oligonucleotide
  Sense strand starting at position 2459 of SEQ ID NO: 2711
aguguaaguagcuaugaaa

SEQ ID NO: 210485 - RNA, 19 nt, Artificial Sequence
  Description of Artificial Sequence: Synthetic oligonucleotide
  Antisense strand to SEQ ID NO: 210484
uuucauagcuacuuacacu

SEQ ID NO: 210486 - RNA, 19 nt, Artificial Sequence
  Description of Artificial Sequence: Synthetic oligonucleotide
  Sense strand starting at position 2701 of SEQ ID NO: 2711
gggucaucaccauauugcu

SEQ ID NO: 210487 - RNA, 19 nt, Artificial Sequence
  Description of Artificial Sequence: Synthetic oligonucleotide
  Antisense strand to SEQ ID NO: 210486
agcaauauggugaugaccc

SEQ ID NO: 210488 - RNA, 19 nt, Artificial Sequence
  Description of Artificial Sequence: Synthetic oligonucleotide
  Sense strand starting at position 2850 of SEQ ID NO: 2711
gaaagccuucuauagugca

SEQ ID NO: 210489 - RNA, 19 nt, Artificial Sequence
  Description of Artificial Sequence: Synthetic oligonucleotide
  Antisense strand to SEQ ID NO: 210488
ugcacuauagaaggcuuuc

SEQ ID NO: 210490 - RNA, 19 nt, Artificial Sequence
  Description of Artificial Sequence: Synthetic oligonucleotide
  Sense strand starting at position 3149 of SEQ ID NO: 2711
augagcacugcauacauua

SEQ ID NO: 210491 - RNA, 19 nt, Artificial Sequence
  Description of Artificial Sequence: Synthetic oligonucleotide
  Antisense strand to SEQ ID NO: 210490
uaauguaugcagugcucau

SEQ ID NO: 210492 - RNA, 19 nt, Artificial Sequence
  Description of Artificial Sequence: Synthetic oligonucleotide
  Sense strand starting at position 3279 of SEQ ID NO: 2711
ucugguuuaucaguggaau

SEQ ID NO: 210493 - RNA, 19 nt, Artificial Sequence
  Description of Artificial Sequence: Synthetic oligonucleotide
  Antisense strand to SEQ ID NO: 210492
auuccacugauaaaccaga

SEQ ID NO: 210494 - RNA, 19 nt, Artificial Sequence
  Description of Artificial Sequence: Synthetic oligonucleotide
  Sense strand starting at position 3280 of SEQ ID NO: 2711
cugguuuaucaguggaauu

SEQ ID NO: 210495 - RNA, 19 nt, Artificial Sequence
  Description of Artificial Sequence: Synthetic oligonucleotide
  Antisense strand to SEQ ID NO: 210494
aauuccacugauaaaccag

SEQ ID NO: 210496 - RNA, 19 nt, Artificial Sequence
  Description of Artificial Sequence: Synthetic oligonucleotide
  Sense strand starting at position 3281 of SEQ ID NO: 2711
ugguuuaucaguggaauua

SEQ ID NO: 210497 - RNA, 19 nt, Artificial Sequence
  Description of Artificial Sequence: Synthetic oligonucleotide
  Antisense strand to SEQ ID NO: 210496
uaauuccacugauaaacca

SEQ ID NO: 210498 - RNA, 19 nt, Artificial Sequence
  Description of Artificial Sequence: Synthetic oligonucleotide
  Sense strand starting at position 3439 of SEQ ID NO: 2711
ucuggcaaaccguauaaga

SEQ ID NO: 210499 - RNA, 19 nt, Artificial Sequence
  Description of Artificial Sequence: Synthetic oligonucleotide
  Antisense strand to SEQ ID NO: 210498
ucuuauacgguuugccaga

SEQ ID NO: 210500 - RNA, 19 nt, Artificial Sequence
  Description of Artificial Sequence: Synthetic oligonucleotide
  Sense strand starting at position 3518 of SEQ ID NO: 2711
ggaguauaguccuccaacu

SEQ ID NO: 210501 - RNA, 19 nt, Artificial Sequence
  Description of Artificial Sequence: Synthetic oligonucleotide
  Antisense strand to SEQ ID NO: 210500
aguuggaggacuauacucc

SEQ ID NO: 210502 - RNA, 19 nt, Artificial Sequence
  Description of Artificial Sequence: Synthetic oligonucleotide
  Sense strand starting at position 3520 of SEQ ID NO: 2711
aguauaguccuccaacuuu

SEQ ID NO: 210503 - RNA, 19 nt, Artificial Sequence
  Description of Artificial Sequence: Synthetic oligonucleotide
  Antisense strand to SEQ ID NO: 210502
aaaguuggaggacuauacu

SEQ ID NO: 210504 - RNA, 19 nt, Artificial Sequence
  Description of Artificial Sequence: Synthetic oligonucleotide
  Sense strand starting at position 3608 of SEQ ID NO: 2711
ugaaucaacuuguugauac

SEQ ID NO: 210505 - RNA, 19 nt, Artificial Sequence
  Description of Artificial Sequence: Synthetic oligonucleotide
  Antisense strand to SEQ ID NO: 210504
guaucaacaaguugauuca

SEQ ID NO: 210506 - RNA, 19 nt, Artificial Sequence
  Description of Artificial Sequence: Synthetic oligonucleotide
  Sense strand starting at position 3948 of SEQ ID NO: 2711
uuccauugagcaggaugaa

SEQ ID NO: 210507 - RNA, 19 nt, Artificial Sequence
  Description of Artificial Sequence: Synthetic oligonucleotide
  Antisense strand to SEQ ID NO: 210506
uucauccugcucaauggaa

SEQ ID NO: 210508 - RNA, 19 nt, Artificial Sequence
  Description of Artificial Sequence: Synthetic oligonucleotide
  Sense strand starting at position 238 of SEQ ID NO: 2712
cucugauagcugugauauu

SEQ ID NO: 210509 - RNA, 19 nt, Artificial Sequence
  Description of Artificial Sequence: Synthetic oligonucleotide
  Antisense strand to SEQ ID NO: 210508
aauaucacagcuaucagag

SEQ ID NO: 210510 - RNA, 19 nt, Artificial Sequence
  Description of Artificial Sequence: Synthetic oligonucleotide
  Sense strand starting at position 280 of SEQ ID NO: 2712
caaacauacuuggugaguu

SEQ ID NO: 210511 - RNA, 19 nt, Artificial Sequence
  Description of Artificial Sequence: Synthetic oligonucleotide
  Antisense strand to SEQ ID NO: 210510
aacucaccaaguauguuug

SEQ ID NO: 210512 - RNA, 19 nt, Artificial Sequence
  Description of Artificial Sequence: Synthetic oligonucleotide
  Sense strand starting at position 284 of SEQ ID NO: 2712
cauacuuggugaguuugaa

SEQ ID NO: 210513 - RNA, 19 nt, Artificial Sequence
  Description of Artificial Sequence: Synthetic oligonucleotide
  Antisense strand to SEQ ID NO: 210512
uucaaacucaccaaguaug

SEQ ID NO: 210514 - RNA, 19 nt, Artificial Sequence
  Description of Artificial Sequence: Synthetic oligonucleotide
  Sense strand starting at position 321 of SEQ ID NO: 2712
aagccucaugagugagauu

SEQ ID NO: 210515 - RNA, 19 nt, Artificial Sequence
  Description of Artificial Sequence: Synthetic oligonucleotide
  Antisense strand to SEQ ID NO: 210514
aaucucacucaugaggcuu

SEQ ID NO: 210516 - RNA, 19 nt, Artificial Sequence
  Description of Artificial Sequence: Synthetic oligonucleotide
  Sense strand starting at position 382 of SEQ ID NO: 2712
ggcuuuggagugggucaaa

SEQ ID NO: 210517 - RNA, 19 nt, Artificial Sequence
  Description of Artificial Sequence: Synthetic oligonucleotide
  Antisense strand to SEQ ID NO: 210516
uuugacccacuccaaagcc

SEQ ID NO: 210518 - RNA, 19 nt, Artificial Sequence
  Description of Artificial Sequence: Synthetic oligonucleotide
  Sense strand starting at position 448 of SEQ ID NO: 2712
ugauuacugugguuaucua

SEQ ID NO: 210519 - RNA, 19 nt, Artificial Sequence
  Description of Artificial Sequence: Synthetic oligonucleotide
  Antisense strand to SEQ ID NO: 210518
uagauaaccacaguaauca

SEQ ID NO: 210520 - RNA, 19 nt, Artificial Sequence
  Description of Artificial Sequence: Synthetic oligonucleotide
  Sense strand starting at position 456 of SEQ ID NO: 2712
gugguuaucuaggcugaca

SEQ ID NO: 210521 - RNA, 19 nt, Artificial Sequence
  Description of Artificial Sequence: Synthetic oligonucleotide
  Antisense strand to SEQ ID NO: 210520
ugucagccuagauaaccac

SEQ ID NO: 210522 - RNA, 19 nt, Artificial Sequence
  Description of Artificial Sequence: Synthetic oligonucleotide
  Sense strand starting at position 662 of SEQ ID NO: 2712
aggagaggauuucaggcau

SEQ ID NO: 210523 - RNA, 19 nt, Artificial Sequence
  Description of Artificial Sequence: Synthetic oligonucleotide
  Antisense strand to SEQ ID NO: 210522
augccugaaauccucuccu

SEQ ID NO: 210524 - RNA, 19 nt, Artificial Sequence
  Description of Artificial Sequence: Synthetic oligonucleotide
  Sense strand starting at position 903 of SEQ ID NO: 2712
aaugcauaugcaggaaagu

SEQ ID NO: 210525 - RNA, 19 nt, Artificial Sequence
  Description of Artificial Sequence: Synthetic oligonucleotide
  Antisense strand to SEQ ID NO: 210524
acuuuccugcauaugcauu

SEQ ID NO: 210526 - RNA, 19 nt, Artificial Sequence
  Description of Artificial Sequence: Synthetic oligonucleotide
  Sense strand starting at position 919 of SEQ ID NO: 2712
agugaaugugugggacuaa

SEQ ID NO: 210527 - RNA, 19 nt, Artificial Sequence
  Description of Artificial Sequence: Synthetic oligonucleotide
  Antisense strand to SEQ ID NO: 210526
uuagucccacacauucacu

SEQ ID NO: 210528 - RNA, 19 nt, Artificial Sequence
  Description of Artificial Sequence: Synthetic oligonucleotide
  Sense strand starting at position 1103 of SEQ ID NO: 2712
cgggcaaugacaugaagau

SEQ ID NO: 210529 - RNA, 19 nt, Artificial Sequence
  Description of Artificial Sequence: Synthetic oligonucleotide
  Antisense strand to SEQ ID NO: 210528
aucuucaugucauugcccg

SEQ ID NO: 210530 - RNA, 19 nt, Artificial Sequence
  Description of Artificial Sequence: Synthetic oligonucleotide
  Sense strand starting at position 1140 of SEQ ID NO: 2712
ucuaguugucaccaugaca

SEQ ID NO: 210531 - RNA, 19 nt, Artificial Sequence
  Description of Artificial Sequence: Synthetic oligonucleotide
  Antisense strand to SEQ ID NO: 210530
ugucauggugacaacuaga

SEQ ID NO: 210532 - RNA, 19 nt, Artificial Sequence
  Description of Artificial Sequence: Synthetic oligonucleotide
  Sense strand starting at position 1143 of SEQ ID NO: 2712
aguugucaccaugacaaca

SEQ ID NO: 210533 - RNA, 19 nt, Artificial Sequence
  Description of Artificial Sequence: Synthetic oligonucleotide
  Antisense strand to SEQ ID NO: 210532
uguugucauggugacaacu

SEQ ID NO: 210534 - RNA, 19 nt, Artificial Sequence
  Description of Artificial Sequence: Synthetic oligonucleotide
  Sense strand starting at position 1179 of SEQ ID NO: 2712
gacguaagaaacuguugua

SEQ ID NO: 210535 - RNA, 19 nt, Artificial Sequence
  Description of Artificial Sequence: Synthetic oligonucleotide
  Antisense strand to SEQ ID NO: 210534
uacaacaguuucuuacguc

SEQ ID NO: 210536 - RNA, 19 nt, Artificial Sequence
  Description of Artificial Sequence: Synthetic oligonucleotide
  Sense strand starting at position 1194 of SEQ ID NO: 2712
uguagcuagaauugauaga

SEQ ID NO: 210537 - RNA, 19 nt, Artificial Sequence
  Description of Artificial Sequence: Synthetic oligonucleotide
  Antisense strand to SEQ ID NO: 210536
ucuaucaauucuagcuaca

SEQ ID NO: 210538 - RNA, 19 nt, Artificial Sequence
  Description of Artificial Sequence: Synthetic oligonucleotide
  Sense strand starting at position 1205 of SEQ ID NO: 2712
uugauagaguucuuuagaa

SEQ ID NO: 210539 - RNA, 19 nt, Artificial Sequence
  Description of Artificial Sequence: Synthetic oligonucleotide
  Antisense strand to SEQ ID NO: 210538
uucuaaagaacucuaucaa

SEQ ID NO: 210540 - RNA, 19 nt, Artificial Sequence
  Description of Artificial Sequence: Synthetic oligonucleotide
  Sense strand starting at position 1338 of SEQ ID NO: 2712
auauuuacuuuagagagga

SEQ ID NO: 210541 - RNA, 19 nt, Artificial Sequence
  Description of Artificial Sequence: Synthetic oligonucleotide
  Antisense strand to SEQ ID NO: 210540
uccucucuaaaguaaauau

SEQ ID NO: 210542 - RNA, 19 nt, Artificial Sequence
  Description of Artificial Sequence: Synthetic oligonucleotide
  Sense strand starting at position 1487 of SEQ ID NO: 2712
uuaagcgugcgggaaauuu

SEQ ID NO: 210543 - RNA, 19 nt, Artificial Sequence
  Description of Artificial Sequence: Synthetic oligonucleotide
  Antisense strand to SEQ ID NO: 210542
aaauuucccgcacgcuuaa

SEQ ID NO: 210544 - RNA, 19 nt, Artificial Sequence
  Description of Artificial Sequence: Synthetic oligonucleotide
  Sense strand starting at position 1693 of SEQ ID NO: 2712
gcccaaagaugcuuauuga

SEQ ID NO: 210545 - RNA, 19 nt, Artificial Sequence
  Description of Artificial Sequence: Synthetic oligonucleotide
  Antisense strand to SEQ ID NO: 210544
ucaauaagcaucuuugggc

SEQ ID NO: 210546 - RNA, 19 nt, Artificial Sequence
  Description of Artificial Sequence: Synthetic oligonucleotide
  Sense strand starting at position 1696 of SEQ ID NO: 2712
caaagaugcuuauugagga

SEQ ID NO: 210547 - RNA, 19 nt, Artificial Sequence
  Description of Artificial Sequence: Synthetic oligonucleotide
  Antisense strand to SEQ ID NO: 210546
uccucaauaagcaucuuug

SEQ ID NO: 210548 - RNA, 19 nt, Artificial Sequence
  Description of Artificial Sequence: Synthetic oligonucleotide
  Sense strand starting at position 1892 of SEQ ID NO: 2712
ugacgagguguccaugaug

SEQ ID NO: 210549 - RNA, 19 nt, Artificial Sequence
  Description of Artificial Sequence: Synthetic oligonucleotide
  Antisense strand to SEQ ID NO: 210548
caucauggacaccucguca

SEQ ID NO: 210550 - RNA, 19 nt, Artificial Sequence
  Description of Artificial Sequence: Synthetic oligonucleotide
  Sense strand starting at position 1900 of SEQ ID NO: 2712
uguccaugaugcuccuaga

SEQ ID NO: 210551 - RNA, 19 nt, Artificial Sequence
  Description of Artificial Sequence: Synthetic oligonucleotide
  Antisense strand to SEQ ID NO: 210550
ucuaggagcaucauggaca

SEQ ID NO: 210552 - RNA, 19 nt, Artificial Sequence
  Description of Artificial Sequence: Synthetic oligonucleotide
  Sense strand starting at position 2520 of SEQ ID NO: 2712
acguaaugauaugcuuaga

SEQ ID NO: 210553 - RNA, 19 nt, Artificial Sequence
  Description of Artificial Sequence: Synthetic oligonucleotide
  Antisense strand to SEQ ID NO: 210552
ucuaagcauaucauuacgu

SEQ ID NO: 210554 - RNA, 19 nt, Artificial Sequence
  Description of Artificial Sequence: Synthetic oligonucleotide
  Sense strand starting at position 2531 of SEQ ID NO: 2712
ugcuuagaauauuuacguu

SEQ ID NO: 210555 - RNA, 19 nt, Artificial Sequence
  Description of Artificial Sequence: Synthetic oligonucleotide
  Antisense strand to SEQ ID NO: 210554
aacguaaauauucuaagca

SEQ ID NO: 210556 - RNA, 19 nt, Artificial Sequence
  Description of Artificial Sequence: Synthetic oligonucleotide
  Sense strand starting at position 2549 of SEQ ID NO: 2712
uaggaccuuugagauauuu

SEQ ID NO: 210557 - RNA, 19 nt, Artificial Sequence
  Description of Artificial Sequence: Synthetic oligonucleotide
  Antisense strand to SEQ ID NO: 210556
aaauaucucaaagguccua

SEQ ID NO: 210558 - RNA, 19 nt, Artificial Sequence
  Description of Artificial Sequence: Synthetic oligonucleotide
  Sense strand starting at position 2684 of SEQ ID NO: 2712
ggcucugacguguacacau

SEQ ID NO: 210559 - RNA, 19 nt, Artificial Sequence
  Description of Artificial Sequence: Synthetic oligonucleotide
  Antisense strand to SEQ ID NO: 210558
auguguacacgucagagcc

SEQ ID NO: 210560 - RNA, 19 nt, Artificial Sequence
  Description of Artificial Sequence: Synthetic oligonucleotide
  Sense strand starting at position 2686 of SEQ ID NO: 2712
cucugacguguacacauaa

SEQ ID NO: 210561 - RNA, 19 nt, Artificial Sequence
  Description of Artificial Sequence: Synthetic oligonucleotide
  Antisense strand to SEQ ID NO: 210560
uuauguguacacgucagag

SEQ ID NO: 210562 - RNA, 19 nt, Artificial Sequence
  Description of Artificial Sequence: Synthetic oligonucleotide
  Sense strand starting at position 2861 of SEQ ID NO: 2712
cagaaauuaguuugugcac

SEQ ID NO: 210563 - RNA, 19 nt, Artificial Sequence
  Description of Artificial Sequence: Synthetic oligonucleotide
  Antisense strand to SEQ ID NO: 210562
gugcacaaacuaauuucug

SEQ ID NO: 210564 - RNA, 19 nt, Artificial Sequence
  Description of Artificial Sequence: Synthetic oligonucleotide
  Sense strand starting at position 2862 of SEQ ID NO: 2712
agaaauuaguuugugcaca

SEQ ID NO: 210565 - RNA, 19 nt, Artificial Sequence
  Description of Artificial Sequence: Synthetic oligonucleotide
  Antisense strand to SEQ ID NO: 210564
ugugcacaaacuaauuucu

SEQ ID NO: 210566 - RNA, 19 nt, Artificial Sequence
  Description of Artificial Sequence: Synthetic oligonucleotide
  Sense strand starting at position 3340 of SEQ ID NO: 2712
agcaguagccaguaaauca

SEQ ID NO: 210567 - RNA, 19 nt, Artificial Sequence
  Description of Artificial Sequence: Synthetic oligonucleotide
  Antisense strand to SEQ ID NO: 210566
ugauuuacuggcuacugcu

SEQ ID NO: 210568 - RNA, 19 nt, Artificial Sequence
  Description of Artificial Sequence: Synthetic oligonucleotide
  Sense strand starting at position 3356 of SEQ ID NO: 2712
ucagcaauuucgccugagu

SEQ ID NO: 210569 - RNA, 19 nt, Artificial Sequence
  Description of Artificial Sequence: Synthetic oligonucleotide
  Antisense strand to SEQ ID NO: 210568
acucaggcgaaauugcuga

SEQ ID NO: 210570 - RNA, 19 nt, Artificial Sequence
  Description of Artificial Sequence: Synthetic oligonucleotide
  Sense strand starting at position 3358 of SEQ ID NO: 2712
agcaauuucgccugaguuc

SEQ ID NO: 210571 - RNA, 19 nt, Artificial Sequence
  Description of Artificial Sequence: Synthetic oligonucleotide
  Antisense strand to SEQ ID NO: 210570
gaacucaggcgaaauugcu

SEQ ID NO: 210572 - RNA, 19 nt, Artificial Sequence
  Description of Artificial Sequence: Synthetic oligonucleotide
  Sense strand starting at position 3529 of SEQ ID NO: 2712
guacaaacauccuugagac

SEQ ID NO: 210573 - RNA, 19 nt, Artificial Sequence
  Description of Artificial Sequence: Synthetic oligonucleotide
  Antisense strand to SEQ ID NO: 210572
gucucaaggauguuuguac

SEQ ID NO: 210574 - RNA, 19 nt, Artificial Sequence
  Description of Artificial Sequence: Synthetic oligonucleotide
  Sense strand starting at position 3569 of SEQ ID NO: 2712
gucaguaagacaugcagaa

SEQ ID NO: 210575 - RNA, 19 nt, Artificial Sequence
  Description of Artificial Sequence: Synthetic oligonucleotide
  Antisense strand to SEQ ID NO: 210574
uucugcaugucuuacugac

SEQ ID NO: 210576 - RNA, 19 nt, Artificial Sequence
  Description of Artificial Sequence: Synthetic oligonucleotide
  Sense strand starting at position 3666 of SEQ ID NO: 2712
aucucaugauuugauguca

SEQ ID NO: 210577 - RNA, 19 nt, Artificial Sequence
  Description of Artificial Sequence: Synthetic oligonucleotide
  Antisense strand to SEQ ID NO: 210576
ugacaucaaaucaugagau

SEQ ID NO: 210578 - RNA, 19 nt, Artificial Sequence
  Description of Artificial Sequence: Synthetic oligonucleotide
  Sense strand starting at position 3671 of SEQ ID NO: 2712
augauuugaugucaguuac

SEQ ID NO: 210579 - RNA, 19 nt, Artificial Sequence
  Description of Artificial Sequence: Synthetic oligonucleotide
  Antisense strand to SEQ ID NO: 210578
guaacugacaucaaaucau

SEQ ID NO: 210580 - RNA, 19 nt, Artificial Sequence
  Description of Artificial Sequence: Synthetic oligonucleotide
  Sense strand starting at position 3681 of SEQ ID NO: 2712
gucaguuacuugccaauuu

SEQ ID NO: 210581 - RNA, 19 nt, Artificial Sequence
  Description of Artificial Sequence: Synthetic oligonucleotide
  Antisense strand to SEQ ID NO: 210580
aaauuggcaaguaacugac

SEQ ID NO: 210582 - RNA, 19 nt, Artificial Sequence
  Description of Artificial Sequence: Synthetic oligonucleotide
  Sense strand starting at position 3692 of SEQ ID NO: 2712
gccaauuugacaugguggu

SEQ ID NO: 210583 - RNA, 19 nt, Artificial Sequence
  Description of Artificial Sequence: Synthetic oligonucleotide
  Antisense strand to SEQ ID NO: 210582
accaccaugucaaauuggc

SEQ ID NO: 210584 - RNA, 19 nt, Artificial Sequence
  Description of Artificial Sequence: Synthetic oligonucleotide
  Sense strand starting at position 3698 of SEQ ID NO: 2712
uugacaugguggucagaua

SEQ ID NO: 210585 - RNA, 19 nt, Artificial Sequence
  Description of Artificial Sequence: Synthetic oligonucleotide
  Antisense strand to SEQ ID NO: 210584
uaucugaccaccaugucaa

SEQ ID NO: 210586 - RNA, 19 nt, Artificial Sequence
  Description of Artificial Sequence: Synthetic oligonucleotide
  Sense strand starting at position 3699 of SEQ ID NO: 2712
ugacaugguggucagauau

SEQ ID NO: 210587 - RNA, 19 nt, Artificial Sequence
  Description of Artificial Sequence: Synthetic oligonucleotide
  Antisense strand to SEQ ID NO: 210586
auaucugaccaccauguca

SEQ ID NO: 210588 - RNA, 19 nt, Artificial Sequence
  Description of Artificial Sequence: Synthetic oligonucleotide
  Sense strand starting at position 103 of SEQ ID NO: 2713
gcaagagcaucccaucagu

SEQ ID NO: 210589 - RNA, 19 nt, Artificial Sequence
  Description of Artificial Sequence: Synthetic oligonucleotide
  Antisense strand to SEQ ID NO: 210588
acugaugggaugcucuugc

SEQ ID NO: 210590 - RNA, 19 nt, Artificial Sequence
  Description of Artificial Sequence: Synthetic oligonucleotide
  Sense strand starting at position 140 of SEQ ID NO: 2713
ucaccuuucuucugugaug

SEQ ID NO: 210591 - RNA, 19 nt, Artificial Sequence
  Description of Artificial Sequence: Synthetic oligonucleotide
  Antisense strand to SEQ ID NO: 210590
caucacagaagaaagguga

SEQ ID NO: 210592 - RNA, 19 nt, Artificial Sequence
  Description of Artificial Sequence: Synthetic oligonucleotide
  Sense strand starting at position 174 of SEQ ID NO: 2713
gcuuguaauggagaucuga

SEQ ID NO: 210593 - RNA, 19 nt, Artificial Sequence
  Description of Artificial Sequence: Synthetic oligonucleotide
  Antisense strand to SEQ ID NO: 210592
ucagaucuccauuacaagc

SEQ ID NO: 210594 - RNA, 19 nt, Artificial Sequence
  Description of Artificial Sequence: Synthetic oligonucleotide
  Sense strand starting at position 230 of SEQ ID NO: 2713
cagcuauucugagagaaga

SEQ ID NO: 210595 - RNA, 19 nt, Artificial Sequence
  Description of Artificial Sequence: Synthetic oligonucleotide
  Antisense strand to SEQ ID NO: 210594
ucuucucucagaauagcug

SEQ ID NO: 210596 - RNA, 19 nt, Artificial Sequence
  Description of Artificial Sequence: Synthetic oligonucleotide
  Sense strand starting at position 405 of SEQ ID NO: 2713
gcauaucggccucauccau

SEQ ID NO: 210597 - RNA, 19 nt, Artificial Sequence
  Description of Artificial Sequence: Synthetic oligonucleotide
  Antisense strand to SEQ ID NO: 210596
auggaugaggccgauaugc

SEQ ID NO: 210598 - RNA, 19 nt, Artificial Sequence
  Description of Artificial Sequence: Synthetic oligonucleotide
  Sense strand starting at position 414 of SEQ ID NO: 2713
ccucauccaucugagauga

SEQ ID NO: 210599 - RNA, 19 nt, Artificial Sequence
  Description of Artificial Sequence: Synthetic oligonucleotide
  Antisense strand to SEQ ID NO: 210598
ucaucucagauggaugagg

SEQ ID NO: 210600 - RNA, 19 nt, Artificial Sequence
  Description of Artificial Sequence: Synthetic oligonucleotide
  Sense strand starting at position 416 of SEQ ID NO: 2713
ucauccaucugagaugacu

SEQ ID NO: 210601 - RNA, 19 nt, Artificial Sequence
  Description of Artificial Sequence: Synthetic oligonucleotide
  Antisense strand to SEQ ID NO: 210600
agucaucucagauggauga

SEQ ID NO: 210602 - RNA, 19 nt, Artificial Sequence
  Description of Artificial Sequence: Synthetic oligonucleotide
  Sense strand starting at position 635 of SEQ ID NO: 2713
augggauacucggcacuca

SEQ ID NO: 210603 - RNA, 19 nt, Artificial Sequence
  Description of Artificial Sequence: Synthetic oligonucleotide
  Antisense strand to SEQ ID NO: 210602
ugagugccgaguaucccau

SEQ ID NO: 210604 - RNA, 19 nt, Artificial Sequence
  Description of Artificial Sequence: Synthetic oligonucleotide
  Sense strand starting at position 917 of SEQ ID NO: 2713
gggaaugccugcuccugau

SEQ ID NO: 210605 - RNA, 19 nt, Artificial Sequence
  Description of Artificial Sequence: Synthetic oligonucleotide
  Antisense strand to SEQ ID NO: 210604
aucaggagcaggcauuccc

SEQ ID NO: 210606 - RNA, 19 nt, Artificial Sequence
  Description of Artificial Sequence: Synthetic oligonucleotide
  Sense strand starting at position 937 of SEQ ID NO: 2713
cgauguguuuagcuggaag

SEQ ID NO: 210607 - RNA, 19 nt, Artificial Sequence
  Description of Artificial Sequence: Synthetic oligonucleotide
  Antisense strand to SEQ ID NO: 210606
cuuccagcuaaacacaucg

SEQ ID NO: 210608 - RNA, 19 nt, Artificial Sequence
  Description of Artificial Sequence: Synthetic oligonucleotide
  Sense strand starting at position 939 of SEQ ID NO: 2713
auguguuuagcuggaagaa

SEQ ID NO: 210609 - RNA, 19 nt, Artificial Sequence
  Description of Artificial Sequence: Synthetic oligonucleotide
  Antisense strand to SEQ ID NO: 210608
uucuuccagcuaaacacau

SEQ ID NO: 210610 - RNA, 19 nt, Artificial Sequence
  Description of Artificial Sequence: Synthetic oligonucleotide
  Sense strand starting at position 940 of SEQ ID NO: 2713
uguguuuagcuggaagaaa

SEQ ID NO: 210611 - RNA, 19 nt, Artificial Sequence
  Description of Artificial Sequence: Synthetic oligonucleotide
  Antisense strand to SEQ ID NO: 210610
uuucuuccagcuaaacaca

SEQ ID NO: 210612 - RNA, 19 nt, Artificial Sequence
  Description of Artificial Sequence: Synthetic oligonucleotide
  Sense strand starting at position 984 of SEQ ID NO: 2713
gggcacguuucccuguaua

SEQ ID NO: 210613 - RNA, 19 nt, Artificial Sequence
  Description of Artificial Sequence: Synthetic oligonucleotide
  Antisense strand to SEQ ID NO: 210612
uauacagggaaacgugccc

SEQ ID NO: 210614 - RNA, 19 nt, Artificial Sequence
  Description of Artificial Sequence: Synthetic oligonucleotide
  Sense strand starting at position 987 of SEQ ID NO: 2713
cacguuucccuguauaaag

SEQ ID NO: 210615 - RNA, 19 nt, Artificial Sequence
  Description of Artificial Sequence: Synthetic oligonucleotide
  Antisense strand to SEQ ID NO: 210614
cuuuauacagggaaacgug

SEQ ID NO: 210616 - RNA, 19 nt, Artificial Sequence
  Description of Artificial Sequence: Synthetic oligonucleotide
  Sense strand starting at position 989 of SEQ ID NO: 2713
cguuucccuguauaaaguu

SEQ ID NO: 210617 - RNA, 19 nt, Artificial Sequence
  Description of Artificial Sequence: Synthetic oligonucleotide
  Antisense strand to SEQ ID NO: 210616
aacuuuauacagggaaacg

SEQ ID NO: 210618 - RNA, 19 nt, Artificial Sequence
  Description of Artificial Sequence: Synthetic oligonucleotide
  Sense strand starting at position 1367 of SEQ ID NO: 2713
ggagucagcaucugaaaug

SEQ ID NO: 210619 - RNA, 19 nt, Artificial Sequence
  Description of Artificial Sequence: Synthetic oligonucleotide
  Antisense strand to SEQ ID NO: 210618
cauuucagaugcugacucc

SEQ ID NO: 210620 - RNA, 19 nt, Artificial Sequence
  Description of Artificial Sequence: Synthetic oligonucleotide
  Sense strand starting at position 1378 of SEQ ID NO: 2713
cugaaaugcugcugcccua

SEQ ID NO: 210621 - RNA, 19 nt, Artificial Sequence
  Description of Artificial Sequence: Synthetic oligonucleotide
  Antisense strand to SEQ ID NO: 210620
uagggcagcagcauuucag

SEQ ID NO: 210622 - RNA, 19 nt, Artificial Sequence
  Description of Artificial Sequence: Synthetic oligonucleotide
  Sense strand starting at position 2001 of SEQ ID NO: 2713
uggcucuuccugggugagu

SEQ ID NO: 210623 - RNA, 19 nt, Artificial Sequence
  Description of Artificial Sequence: Synthetic oligonucleotide
  Antisense strand to SEQ ID NO: 210622
acucacccaggaagagcca

SEQ ID NO: 210624 - RNA, 19 nt, Artificial Sequence
  Description of Artificial Sequence: Synthetic oligonucleotide
  Sense strand starting at position 2002 of SEQ ID NO: 2713
ggcucuuccugggugagua

SEQ ID NO: 210625 - RNA, 19 nt, Artificial Sequence
  Description of Artificial Sequence: Synthetic oligonucleotide
  Antisense strand to SEQ ID NO: 210624
uacucacccaggaagagcc

SEQ ID NO: 210626 - RNA, 19 nt, Artificial Sequence
  Description of Artificial Sequence: Synthetic oligonucleotide
  Sense strand starting at position 2010 of SEQ ID NO: 2713
cugggugaguagugauuua

SEQ ID NO: 210627 - RNA, 19 nt, Artificial Sequence
  Description of Artificial Sequence: Synthetic oligonucleotide
  Antisense strand to SEQ ID NO: 210626
uaaaucacuacucacccag

SEQ ID NO: 210628 - RNA, 19 nt, Artificial Sequence
  Description of Artificial Sequence: Synthetic oligonucleotide
  Sense strand starting at position 2017 of SEQ ID NO: 2713
aguagugauuuacaaggca

SEQ ID NO: 210629 - RNA, 19 nt, Artificial Sequence
  Description of Artificial Sequence: Synthetic oligonucleotide
  Antisense strand to SEQ ID NO: 210628
ugccuuguaaaucacuacu

SEQ ID NO: 210630 - RNA, 19 nt, Artificial Sequence
  Description of Artificial Sequence: Synthetic oligonucleotide
  Sense strand starting at position 2959 of SEQ ID NO: 2713
cugcucaucucagagcuua

SEQ ID NO: 210631 - RNA, 19 nt, Artificial Sequence
  Description of Artificial Sequence: Synthetic oligonucleotide
  Antisense strand to SEQ ID NO: 210630
uaagcucugagaugagcag

SEQ ID NO: 210632 - RNA, 19 nt, Artificial Sequence
  Description of Artificial Sequence: Synthetic oligonucleotide
  Sense strand starting at position 3223 of SEQ ID NO: 2713
acuuaaauauggcagagau

SEQ ID NO: 210633 - RNA, 19 nt, Artificial Sequence
  Description of Artificial Sequence: Synthetic oligonucleotide
  Antisense strand to SEQ ID NO: 210632
aucucugccauauuuaagu

SEQ ID NO: 210634 - RNA, 19 nt, Artificial Sequence
  Description of Artificial Sequence: Synthetic oligonucleotide
  Sense strand starting at position 3330 of SEQ ID NO: 2713
gacugauaaugggaacaga

SEQ ID NO: 210635 - RNA, 19 nt, Artificial Sequence
  Description of Artificial Sequence: Synthetic oligonucleotide
  Antisense strand to SEQ ID NO: 210634
ucuguucccauuaucaguc

SEQ ID NO: 210636 - RNA, 19 nt, Artificial Sequence
  Description of Artificial Sequence: Synthetic oligonucleotide
  Sense strand starting at position 3710 of SEQ ID NO: 2713
gcgagaaguuggccaagca

SEQ ID NO: 210637 - RNA, 19 nt, Artificial Sequence
  Description of Artificial Sequence: Synthetic oligonucleotide
  Antisense strand to SEQ ID NO: 210636
ugcuuggccaacuucucgc

SEQ ID NO: 210638 - RNA, 19 nt, Artificial Sequence
  Description of Artificial Sequence: Synthetic oligonucleotide
  Sense strand starting at position 131 of SEQ ID NO: 2714
ucaccuuucuucugugaug

SEQ ID NO: 210639 - RNA, 19 nt, Artificial Sequence
  Description of Artificial Sequence: Synthetic oligonucleotide
  Antisense strand to SEQ ID NO: 210638
caucacagaagaaagguga

SEQ ID NO: 210640 - RNA, 19 nt, Artificial Sequence
  Description of Artificial Sequence: Synthetic oligonucleotide
  Sense strand starting at position 133 of SEQ ID NO: 2714
accuuucuucugugauguc

SEQ ID NO: 210641 - RNA, 19 nt, Artificial Sequence
  Description of Artificial Sequence: Synthetic oligonucleotide
  Antisense strand to SEQ ID NO: 210640
gacaucacagaagaaaggu

SEQ ID NO: 210642 - RNA, 19 nt, Artificial Sequence
  Description of Artificial Sequence: Synthetic oligonucleotide
  Sense strand starting at position 134 of SEQ ID NO: 2714
ccuuucuucugugaugucu

SEQ ID NO: 210643 - RNA, 19 nt, Artificial Sequence
  Description of Artificial Sequence: Synthetic oligonucleotide
  Antisense strand to SEQ ID NO: 210642
agacaucacagaagaaagg

SEQ ID NO: 210644 - RNA, 19 nt, Artificial Sequence
  Description of Artificial Sequence: Synthetic oligonucleotide
  Sense strand starting at position 156 of SEQ ID NO: 2714
ucauuaugagcuuguaacg

SEQ ID NO: 210645 - RNA, 19 nt, Artificial Sequence
  Description of Artificial Sequence: Synthetic oligonucleotide
  Antisense strand to SEQ ID NO: 210644
cguuacaagcucauaauga

SEQ ID NO: 210646 - RNA, 19 nt, Artificial Sequence
  Description of Artificial Sequence: Synthetic oligonucleotide
  Sense strand starting at position 163 of SEQ ID NO: 2714
gagcuuguaacggagaucu

SEQ ID NO: 210647 - RNA, 19 nt, Artificial Sequence
  Description of Artificial Sequence: Synthetic oligonucleotide
  Antisense strand to SEQ ID NO: 210646
agaucuccguuacaagcuc

SEQ ID NO: 210648 - RNA, 19 nt, Artificial Sequence
  Description of Artificial Sequence: Synthetic oligonucleotide
  Sense strand starting at position 165 of SEQ ID NO: 2714
gcuuguaacggagaucuga

SEQ ID NO: 210649 - RNA, 19 nt, Artificial Sequence
  Description of Artificial Sequence: Synthetic oligonucleotide
  Antisense strand to SEQ ID NO: 210648
ucagaucuccguuacaagc

SEQ ID NO: 210650 - RNA, 19 nt, Artificial Sequence
  Description of Artificial Sequence: Synthetic oligonucleotide
  Sense strand starting at position 334 of SEQ ID NO: 2714
gccuuugucguggguguca

SEQ ID NO: 210651 - RNA, 19 nt, Artificial Sequence
  Description of Artificial Sequence: Synthetic oligonucleotide
  Antisense strand to SEQ ID NO: 210650
ugacacccacgacaaaggc

SEQ ID NO: 210652 - RNA, 19 nt, Artificial Sequence
  Description of Artificial Sequence: Synthetic oligonucleotide
  Sense strand starting at position 406 of SEQ ID NO: 2714
ccucauccaucugagauga

SEQ ID NO: 210653 - RNA, 19 nt, Artificial Sequence
  Description of Artificial Sequence: Synthetic oligonucleotide
  Antisense strand to SEQ ID NO: 210652
ucaucucagauggaugagg

SEQ ID NO: 210654 - RNA, 19 nt, Artificial Sequence
  Description of Artificial Sequence: Synthetic oligonucleotide
  Sense strand starting at position 408 of SEQ ID NO: 2714
ucauccaucugagaugacu

SEQ ID NO: 210655 - RNA, 19 nt, Artificial Sequence
  Description of Artificial Sequence: Synthetic oligonucleotide
  Antisense strand to SEQ ID NO: 210654
agucaucucagauggauga

SEQ ID NO: 210656 - RNA, 19 nt, Artificial Sequence
  Description of Artificial Sequence: Synthetic oligonucleotide
  Sense strand starting at position 625 of SEQ ID NO: 2714
augggauacucggcacuca

SEQ ID NO: 210657 - RNA, 19 nt, Artificial Sequence
  Description of Artificial Sequence: Synthetic oligonucleotide
  Antisense strand to SEQ ID NO: 210656
ugagugccgaguaucccau

SEQ ID NO: 210658 - RNA, 19 nt, Artificial Sequence
  Description of Artificial Sequence: Synthetic oligonucleotide
  Sense strand starting at position 927 of SEQ ID NO: 2714
cgauguguuuagcuggaag

SEQ ID NO: 210659 - RNA, 19 nt, Artificial Sequence
  Description of Artificial Sequence: Synthetic oligonucleotide
  Antisense strand to SEQ ID NO: 210658
cuuccagcuaaacacaucg

SEQ ID NO: 210660 - RNA, 19 nt, Artificial Sequence
  Description of Artificial Sequence: Synthetic oligonucleotide
  Sense strand starting at position 929 of SEQ ID NO: 2714
auguguuuagcuggaagaa

SEQ ID NO: 210661 - RNA, 19 nt, Artificial Sequence
  Description of Artificial Sequence: Synthetic oligonucleotide
  Antisense strand to SEQ ID NO: 210660
uucuuccagcuaaacacau

SEQ ID NO: 210662 - RNA, 19 nt, Artificial Sequence
  Description of Artificial Sequence: Synthetic oligonucleotide
  Sense strand starting at position 974 of SEQ ID NO: 2714
gggcacguuucccugcaua

SEQ ID NO: 210663 - RNA, 19 nt, Artificial Sequence
  Description of Artificial Sequence: Synthetic oligonucleotide
  Antisense strand to SEQ ID NO: 210662
uaugcagggaaacgugccc

SEQ ID NO: 210664 - RNA, 19 nt, Artificial Sequence
  Description of Artificial Sequence: Synthetic oligonucleotide
  Sense strand starting at position 977 of SEQ ID NO: 2714
cacguuucccugcauaaag

SEQ ID NO: 210665 - RNA, 19 nt, Artificial Sequence
  Description of Artificial Sequence: Synthetic oligonucleotide
  Antisense strand to SEQ ID NO: 210664
cuuuaugcagggaaacgug

SEQ ID NO: 210666 - RNA, 19 nt, Artificial Sequence
  Description of Artificial Sequence: Synthetic oligonucleotide
  Sense strand starting at position 979 of SEQ ID NO: 2714
cguuucccugcauaaaguu

SEQ ID NO: 210667 - RNA, 19 nt, Artificial Sequence
  Description of Artificial Sequence: Synthetic oligonucleotide
  Antisense strand to SEQ ID NO: 210666
aacuuuaugcagggaaacg

SEQ ID NO: 210668 - RNA, 19 nt, Artificial Sequence
  Description of Artificial Sequence: Synthetic oligonucleotide
  Sense strand starting at position 1365 of SEQ ID NO: 2714
ggagucagcaucugaaaug

SEQ ID NO: 210669 - RNA, 19 nt, Artificial Sequence
  Description of Artificial Sequence: Synthetic oligonucleotide
  Antisense strand to SEQ ID NO: 210668
cauuucagaugcugacucc

SEQ ID NO: 210670 - RNA, 19 nt, Artificial Sequence
  Description of Artificial Sequence: Synthetic oligonucleotide
  Sense strand starting at position 1376 of SEQ ID NO: 2714
cugaaaugcugcugcccua

SEQ ID NO: 210671 - RNA, 19 nt, Artificial Sequence
  Description of Artificial Sequence: Synthetic oligonucleotide
  Antisense strand to SEQ ID NO: 210670
uagggcagcagcauuucag

SEQ ID NO: 210672 - RNA, 19 nt, Artificial Sequence
  Description of Artificial Sequence: Synthetic oligonucleotide
  Sense strand starting at position 1521 of SEQ ID NO: 2714
ggaguugauggcuguguuu

SEQ ID NO: 210673 - RNA, 19 nt, Artificial Sequence
  Description of Artificial Sequence: Synthetic oligonucleotide
  Antisense strand to SEQ ID NO: 210672
aaacacagccaucaacucc

SEQ ID NO: 210674 - RNA, 19 nt, Artificial Sequence
  Description of Artificial Sequence: Synthetic oligonucleotide
  Sense strand starting at position 2008 of SEQ ID NO: 2714
cugggugaguagugauuua

SEQ ID NO: 210675 - RNA, 19 nt, Artificial Sequence
  Description of Artificial Sequence: Synthetic oligonucleotide
  Antisense strand to SEQ ID NO: 210674
uaaaucacuacucacccag

SEQ ID NO: 210676 - RNA, 19 nt, Artificial Sequence
  Description of Artificial Sequence: Synthetic oligonucleotide
  Sense strand starting at position 2015 of SEQ ID NO: 2714
aguagugauuuacaaggca

SEQ ID NO: 210677 - RNA, 19 nt, Artificial Sequence
  Description of Artificial Sequence: Synthetic oligonucleotide
  Antisense strand to SEQ ID NO: 210676
ugccuuguaaaucacuacu

SEQ ID NO: 210678 - RNA, 19 nt, Artificial Sequence
  Description of Artificial Sequence: Synthetic oligonucleotide
  Sense strand starting at position 2979 of SEQ ID NO: 2714
cugcucaucucagagcuua

SEQ ID NO: 210679 - RNA, 19 nt, Artificial Sequence
  Description of Artificial Sequence: Synthetic oligonucleotide
  Antisense strand to SEQ ID NO: 210678
uaagcucugagaugagcag

SEQ ID NO: 210680 - RNA, 19 nt, Artificial Sequence
  Description of Artificial Sequence: Synthetic oligonucleotide
  Sense strand starting at position 2984 of SEQ ID NO: 2714
caucucagagcuuauucga

SEQ ID NO: 210681 - RNA, 19 nt, Artificial Sequence
  Description of Artificial Sequence: Synthetic oligonucleotide
  Antisense strand to SEQ ID NO: 210680
ucgaauaagcucugagaug

SEQ ID NO: 210682 - RNA, 19 nt, Artificial Sequence
  Description of Artificial Sequence: Synthetic oligonucleotide
  Sense strand starting at position 2987 of SEQ ID NO: 2714
cucagagcuuauucgagaa

SEQ ID NO: 210683 - RNA, 19 nt, Artificial Sequence
  Description of Artificial Sequence: Synthetic oligonucleotide
  Antisense strand to SEQ ID NO: 210682
uucucgaauaagcucugag

SEQ ID NO: 210684 - RNA, 19 nt, Artificial Sequence
  Description of Artificial Sequence: Synthetic oligonucleotide
  Sense strand starting at position 2989 of SEQ ID NO: 2714
cagagcuuauucgagaaau

SEQ ID NO: 210685 - RNA, 19 nt, Artificial Sequence
  Description of Artificial Sequence: Synthetic oligonucleotide
  Antisense strand to SEQ ID NO: 210684
auuucucgaauaagcucug

SEQ ID NO: 210686 - RNA, 19 nt, Artificial Sequence
  Description of Artificial Sequence: Synthetic oligonucleotide
  Sense strand starting at position 2991 of SEQ ID NO: 2714
gagcuuauucgagaaaucu

SEQ ID NO: 210687 - RNA, 19 nt, Artificial Sequence
  Description of Artificial Sequence: Synthetic oligonucleotide
  Antisense strand to SEQ ID NO: 210686
agauuucucgaauaagcuc

SEQ ID NO: 210688 - RNA, 19 nt, Artificial Sequence
  Description of Artificial Sequence: Synthetic oligonucleotide
  Sense strand starting at position 3230 of SEQ ID NO: 2714
gcaucagagccacacuuaa

SEQ ID NO: 210689 - RNA, 19 nt, Artificial Sequence
  Description of Artificial Sequence: Synthetic oligonucleotide
  Antisense strand to SEQ ID NO: 210688
uuaaguguggcucugaugc

SEQ ID NO: 210690 - RNA, 19 nt, Artificial Sequence
  Description of Artificial Sequence: Synthetic oligonucleotide
  Sense strand starting at position 3263 of SEQ ID NO: 2714
uuggaauuaucagaccaag

SEQ ID NO: 210691 - RNA, 19 nt, Artificial Sequence
  Description of Artificial Sequence: Synthetic oligonucleotide
  Antisense strand to SEQ ID NO: 210690
cuuggucugauaauuccaa

SEQ ID NO: 210692 - RNA, 19 nt, Artificial Sequence
  Description of Artificial Sequence: Synthetic oligonucleotide
  Sense strand starting at position 3350 of SEQ ID NO: 2714
gacugauaaugggaacaga

SEQ ID NO: 210693 - RNA, 19 nt, Artificial Sequence
  Description of Artificial Sequence: Synthetic oligonucleotide
  Antisense strand to SEQ ID NO: 210692
ucuguucccauuaucaguc

SEQ ID NO: 210694 - RNA, 19 nt, Artificial Sequence
  Description of Artificial Sequence: Synthetic oligonucleotide
  Sense strand starting at position 3365 of SEQ ID NO: 2714
cagagagguagacguucua

SEQ ID NO: 210695 - RNA, 19 nt, Artificial Sequence
  Description of Artificial Sequence: Synthetic oligonucleotide
  Antisense strand to SEQ ID NO: 210694
uagaacgucuaccucucug

SEQ ID NO: 210696 - RNA, 19 nt, Artificial Sequence
  Description of Artificial Sequence: Synthetic oligonucleotide
  Sense strand starting at position 43 of SEQ ID NO: 2715
auaggugagccuugagcau

SEQ ID NO: 210697 - RNA, 19 nt, Artificial Sequence
  Description of Artificial Sequence: Synthetic oligonucleotide
  Antisense strand to SEQ ID NO: 210696
augcucaaggcucaccuau

SEQ ID NO: 210698 - RNA, 19 nt, Artificial Sequence
  Description of Artificial Sequence: Synthetic oligonucleotide
  Sense strand starting at position 127 of SEQ ID NO: 2715
agcaucuacugucugauau

SEQ ID NO: 210699 - RNA, 19 nt, Artificial Sequence
  Description of Artificial Sequence: Synthetic oligonucleotide
  Antisense strand to SEQ ID NO: 210698
auaucagacaguagaugcu

SEQ ID NO: 210700 - RNA, 19 nt, Artificial Sequence
  Description of Artificial Sequence: Synthetic oligonucleotide
  Sense strand starting at position 128 of SEQ ID NO: 2715
gcaucuacugucugauaug

SEQ ID NO: 210701 - RNA, 19 nt, Artificial Sequence
  Description of Artificial Sequence: Synthetic oligonucleotide
  Antisense strand to SEQ ID NO: 210700
cauaucagacaguagaugc

SEQ ID NO: 210702 - RNA, 19 nt, Artificial Sequence
  Description of Artificial Sequence: Synthetic oligonucleotide
  Sense strand starting at position 216 of SEQ ID NO: 2715
agugauuucguuugugucu

SEQ ID NO: 210703 - RNA, 19 nt, Artificial Sequence
  Description of Artificial Sequence: Synthetic oligonucleotide
  Antisense strand to SEQ ID NO: 210702
agacacaaacgaaaucacu

SEQ ID NO: 210704 - RNA, 19 nt, Artificial Sequence
  Description of Artificial Sequence: Synthetic oligonucleotide
  Sense strand starting at position 229 of SEQ ID NO: 2715
gugucuggcuuccuacaaa

SEQ ID NO: 210705 - RNA, 19 nt, Artificial Sequence
  Description of Artificial Sequence: Synthetic oligonucleotide
  Antisense strand to SEQ ID NO: 210704
uuuguaggaagccagacac

SEQ ID NO: 210706 - RNA, 19 nt, Artificial Sequence
  Description of Artificial Sequence: Synthetic oligonucleotide
  Sense strand starting at position 388 of SEQ ID NO: 2715
ggcgcucuccaaggagaaa

SEQ ID NO: 210707 - RNA, 19 nt, Artificial Sequence
  Description of Artificial Sequence: Synthetic oligonucleotide
  Antisense strand to SEQ ID NO: 210706
uuucuccuuggagagcgcc

SEQ ID NO: 210708 - RNA, 19 nt, Artificial Sequence
  Description of Artificial Sequence: Synthetic oligonucleotide
  Sense strand starting at position 683 of SEQ ID NO: 2715
cuauguacccggugacaca

SEQ ID NO: 210709 - RNA, 19 nt, Artificial Sequence
  Description of Artificial Sequence: Synthetic oligonucleotide
  Antisense strand to SEQ ID NO: 210708
ugugucaccggguacauag

SEQ ID NO: 210710 - RNA, 19 nt, Artificial Sequence
  Description of Artificial Sequence: Synthetic oligonucleotide
  Sense strand starting at position 699 of SEQ ID NO: 2715
acaagacugcucugagggu

SEQ ID NO: 210711 - RNA, 19 nt, Artificial Sequence
  Description of Artificial Sequence: Synthetic oligonucleotide
  Antisense strand to SEQ ID NO: 210710
acccucagagcagucuugu

SEQ ID NO: 210712 - RNA, 19 nt, Artificial Sequence
  Description of Artificial Sequence: Synthetic oligonucleotide
  Sense strand starting at position 870 of SEQ ID NO: 2715
ggccuuuccgccuaacuga

SEQ ID NO: 210713 - RNA, 19 nt, Artificial Sequence
  Description of Artificial Sequence: Synthetic oligonucleotide
  Antisense strand to SEQ ID NO: 210712
ucaguuaggcggaaaggcc

SEQ ID NO: 210714 - RNA, 19 nt, Artificial Sequence
  Description of Artificial Sequence: Synthetic oligonucleotide
  Sense strand starting at position 2098 of SEQ ID NO: 2715
ccggaaagccuucgauuug

SEQ ID NO: 210715 - RNA, 19 nt, Artificial Sequence
  Description of Artificial Sequence: Synthetic oligonucleotide
  Antisense strand to SEQ ID NO: 210714
caaaucgaaggcuuuccgg

SEQ ID NO: 210716 - RNA, 19 nt, Artificial Sequence
  Description of Artificial Sequence: Synthetic oligonucleotide
  Sense strand starting at position 2107 of SEQ ID NO: 2715
cuucgauuugcagagcgga

SEQ ID NO: 210717 - RNA, 19 nt, Artificial Sequence
  Description of Artificial Sequence: Synthetic oligonucleotide
  Antisense strand to SEQ ID NO: 210716
uccgcucugcaaaucgaag

SEQ ID NO: 210718 - RNA, 19 nt, Artificial Sequence
  Description of Artificial Sequence: Synthetic oligonucleotide
  Sense strand starting at position 2465 of SEQ ID NO: 2715
augcgaggugcuucguauu

SEQ ID NO: 210719 - RNA, 19 nt, Artificial Sequence
  Description of Artificial Sequence: Synthetic oligonucleotide
  Antisense strand to SEQ ID NO: 210718
aauacgaagcaccucgcau

SEQ ID NO: 210720 - RNA, 19 nt, Artificial Sequence
  Description of Artificial Sequence: Synthetic oligonucleotide
  Sense strand starting at position 2742 of SEQ ID NO: 2715
gaagcuucgggagaaggua

SEQ ID NO: 210721 - RNA, 19 nt, Artificial Sequence
  Description of Artificial Sequence: Synthetic oligonucleotide
  Antisense strand to SEQ ID NO: 210720
uaccuucucccgaagcuuc

SEQ ID NO: 210722 - RNA, 19 nt, Artificial Sequence
  Description of Artificial Sequence: Synthetic oligonucleotide
  Sense strand starting at position 2751 of SEQ ID NO: 2715
ggagaagguacuggaucuu

SEQ ID NO: 210723 - RNA, 19 nt, Artificial Sequence
  Description of Artificial Sequence: Synthetic oligonucleotide
  Antisense strand to SEQ ID NO: 210722
aagauccaguaccuucucc

SEQ ID NO: 210724 - RNA, 19 nt, Artificial Sequence
  Description of Artificial Sequence: Synthetic oligonucleotide
  Sense strand starting at position 2982 of SEQ ID NO: 2715
gaugguuauuucuggaagg

SEQ ID NO: 210725 - RNA, 19 nt, Artificial Sequence
  Description of Artificial Sequence: Synthetic oligonucleotide
  Antisense strand to SEQ ID NO: 210724
ccuuccagaaauaaccauc

SEQ ID NO: 210726 - RNA, 19 nt, Artificial Sequence
  Description of Artificial Sequence: Synthetic oligonucleotide
  Sense strand starting at position 2983 of SEQ ID NO: 2715
augguuauuucuggaagga

SEQ ID NO: 210727 - RNA, 19 nt, Artificial Sequence
  Description of Artificial Sequence: Synthetic oligonucleotide
  Antisense strand to SEQ ID NO: 210726
uccuuccagaaauaaccau

SEQ ID NO: 210728 - RNA, 19 nt, Artificial Sequence
  Description of Artificial Sequence: Synthetic oligonucleotide
  Sense strand starting at position 3018 of SEQ ID NO: 2715
ggcuucuaucuuugggcua

SEQ ID NO: 210729 - RNA, 19 nt, Artificial Sequence
  Description of Artificial Sequence: Synthetic oligonucleotide
  Antisense strand to SEQ ID NO: 210728
uagcccaaagauagaagcc

SEQ ID NO: 210730 - RNA, 19 nt, Artificial Sequence
  Description of Artificial Sequence: Synthetic oligonucleotide
  Sense strand starting at position 3042 of SEQ ID NO: 2715
uuguaaaguuggguggaau

SEQ ID NO: 210731 - RNA, 19 nt, Artificial Sequence
  Description of Artificial Sequence: Synthetic oligonucleotide
  Antisense strand to SEQ ID NO: 210730
auuccacccaacuuuacaa

SEQ ID NO: 210732 - RNA, 19 nt, Artificial Sequence
  Description of Artificial Sequence: Synthetic oligonucleotide
  Sense strand starting at position 3043 of SEQ ID NO: 2715
uguaaaguuggguggaauc

SEQ ID NO: 210733 - RNA, 19 nt, Artificial Sequence
  Description of Artificial Sequence: Synthetic oligonucleotide
  Antisense strand to SEQ ID NO: 210732
gauuccacccaacuuuaca

SEQ ID NO: 210734 - RNA, 19 nt, Artificial Sequence
  Description of Artificial Sequence: Synthetic oligonucleotide
  Sense strand starting at position 3058 of SEQ ID NO: 2715
aaucgucucugggcugaaa

SEQ ID NO: 210735 - RNA, 19 nt, Artificial Sequence
  Description of Artificial Sequence: Synthetic oligonucleotide
  Antisense strand to SEQ ID NO: 210734
uuucagcccagagacgauu

SEQ ID NO: 210736 - RNA, 19 nt, Artificial Sequence
  Description of Artificial Sequence: Synthetic oligonucleotide
  Sense strand starting at position 3206 of SEQ ID NO: 2715
cucuaucugguaggaugau

SEQ ID NO: 210737 - RNA, 19 nt, Artificial Sequence
  Description of Artificial Sequence: Synthetic oligonucleotide
  Antisense strand to SEQ ID NO: 210736
aucauccuaccagauagag

SEQ ID NO: 210738 - RNA, 19 nt, Artificial Sequence
  Description of Artificial Sequence: Synthetic oligonucleotide
  Sense strand starting at position 3207 of SEQ ID NO: 2715
ucuaucugguaggaugaua

SEQ ID NO: 210739 - RNA, 19 nt, Artificial Sequence
  Description of Artificial Sequence: Synthetic oligonucleotide
  Antisense strand to SEQ ID NO: 210738
uaucauccuaccagauaga

SEQ ID NO: 210740 - RNA, 19 nt, Artificial Sequence
  Description of Artificial Sequence: Synthetic oligonucleotide
  Sense strand starting at position 3212 of SEQ ID NO: 2715
cugguaggaugauaaucaa

SEQ ID NO: 210741 - RNA, 19 nt, Artificial Sequence
  Description of Artificial Sequence: Synthetic oligonucleotide
  Antisense strand to SEQ ID NO: 210740
uugauuaucauccuaccag

SEQ ID NO: 210742 - RNA, 19 nt, Artificial Sequence
  Description of Artificial Sequence: Synthetic oligonucleotide
  Sense strand starting at position 3317 of SEQ ID NO: 2715
acugcuuacggugaccaaa

SEQ ID NO: 210743 - RNA, 19 nt, Artificial Sequence
  Description of Artificial Sequence: Synthetic oligonucleotide
  Antisense strand to SEQ ID NO: 210742
uuuggucaccguaagcagu

SEQ ID NO: 210744 - RNA, 19 nt, Artificial Sequence
  Description of Artificial Sequence: Synthetic oligonucleotide
  Sense strand starting at position 3369 of SEQ ID NO: 2715
uuagacagguuucuuccua

SEQ ID NO: 210745 - RNA, 19 nt, Artificial Sequence
  Description of Artificial Sequence: Synthetic oligonucleotide
  Antisense strand to SEQ ID NO: 210744
uaggaagaaaccugucuaa

SEQ ID NO: 210746 - RNA, 19 nt, Artificial Sequence
  Description of Artificial Sequence: Synthetic oligonucleotide
  Sense strand starting at position 3431 of SEQ ID NO: 2715
gccaacuuccauuggugaa

SEQ ID NO: 210747 - RNA, 19 nt, Artificial Sequence
  Description of Artificial Sequence: Synthetic oligonucleotide
  Antisense strand to SEQ ID NO: 210746
uucaccaauggaaguuggc

SEQ ID NO: 210748 - RNA, 19 nt, Artificial Sequence
  Description of Artificial Sequence: Synthetic oligonucleotide
  Sense strand starting at position 3443 of SEQ ID NO: 2715
uggugaauguuuccucuga

SEQ ID NO: 210749 - RNA, 19 nt, Artificial Sequence
  Description of Artificial Sequence: Synthetic oligonucleotide
  Antisense strand to SEQ ID NO: 210748
ucagaggaaacauucacca

SEQ ID NO: 210750 - RNA, 19 nt, Artificial Sequence
  Description of Artificial Sequence: Synthetic oligonucleotide
  Sense strand starting at position 3444 of SEQ ID NO: 2715
ggugaauguuuccucugac

SEQ ID NO: 210751 - RNA, 19 nt, Artificial Sequence
  Description of Artificial Sequence: Synthetic oligonucleotide
  Antisense strand to SEQ ID NO: 210750
gucagaggaaacauucacc

SEQ ID NO: 210752 - RNA, 19 nt, Artificial Sequence
  Description of Artificial Sequence: Synthetic oligonucleotide
  Sense strand starting at position 3445 of SEQ ID NO: 2715
gugaauguuuccucugacc

SEQ ID NO: 210753 - RNA, 19 nt, Artificial Sequence
  Description of Artificial Sequence: Synthetic oligonucleotide
  Antisense strand to SEQ ID NO: 210752
ggucagaggaaacauucac

SEQ ID NO: 210754 - RNA, 19 nt, Artificial Sequence
  Description of Artificial Sequence: Synthetic oligonucleotide
  Sense strand starting at position 3512 of SEQ ID NO: 2715
gaucuuucucagggaucug

SEQ ID NO: 210755 - RNA, 19 nt, Artificial Sequence
  Description of Artificial Sequence: Synthetic oligonucleotide
  Antisense strand to SEQ ID NO: 210754
cagaucccugagaaagauc

SEQ ID NO: 210756 - RNA, 19 nt, Artificial Sequence
  Description of Artificial Sequence: Synthetic oligonucleotide
  Sense strand starting at position 3532 of SEQ ID NO: 2715
gaggcaucccuuugaaaug

SEQ ID NO: 210757 - RNA, 19 nt, Artificial Sequence
  Description of Artificial Sequence: Synthetic oligonucleotide
  Antisense strand to SEQ ID NO: 210756
cauuucaaagggaugccuc

SEQ ID NO: 210758 - RNA, 19 nt, Artificial Sequence
  Description of Artificial Sequence: Synthetic oligonucleotide
  Sense strand starting at position 3579 of SEQ ID NO: 2715
cuccuaguguuuguggaga

SEQ ID NO: 210759 - RNA, 19 nt, Artificial Sequence
  Description of Artificial Sequence: Synthetic oligonucleotide
  Antisense strand to SEQ ID NO: 210758
ucuccacaaacacuaggag

SEQ ID NO: 210760 - RNA, 19 nt, Artificial Sequence
  Description of Artificial Sequence: Synthetic oligonucleotide
  Sense strand starting at position 3583 of SEQ ID NO: 2715
uaguguuuguggagaggag

SEQ ID NO: 210761 - RNA, 19 nt, Artificial Sequence
  Description of Artificial Sequence: Synthetic oligonucleotide
  Antisense strand to SEQ ID NO: 210760
cuccucuccacaaacacua

SEQ ID NO: 210762 - RNA, 19 nt, Artificial Sequence
  Description of Artificial Sequence: Synthetic oligonucleotide
  Sense strand starting at position 3758 of SEQ ID NO: 2715
ucuguuuaacuauaucgga

SEQ ID NO: 210763 - RNA, 19 nt, Artificial Sequence
  Description of Artificial Sequence: Synthetic oligonucleotide
  Antisense strand to SEQ ID NO: 210762
uccgauauaguuaaacaga

SEQ ID NO: 210764 - RNA, 19 nt, Artificial Sequence
  Description of Artificial Sequence: Synthetic oligonucleotide
  Sense strand starting at position 3893 of SEQ ID NO: 2715
aguccuaucucuguuacuu

SEQ ID NO: 210765 - RNA, 19 nt, Artificial Sequence
  Description of Artificial Sequence: Synthetic oligonucleotide
  Antisense strand to SEQ ID NO: 210764
aaguaacagagauaggacu

SEQ ID NO: 210766 - RNA, 19 nt, Artificial Sequence
  Description of Artificial Sequence: Synthetic oligonucleotide
  Sense strand starting at position 3897 of SEQ ID NO: 2715
cuaucucuguuacuuguua

SEQ ID NO: 210767 - RNA, 19 nt, Artificial Sequence
  Description of Artificial Sequence: Synthetic oligonucleotide
  Antisense strand to SEQ ID NO: 210766
uaacaaguaacagagauag

SEQ ID NO: 210768 - RNA, 19 nt, Artificial Sequence
  Description of Artificial Sequence: Synthetic oligonucleotide
  Sense strand starting at position 3912 of SEQ ID NO: 2715
guuaguucuuguccuugaa

SEQ ID NO: 210769 - RNA, 19 nt, Artificial Sequence
  Description of Artificial Sequence: Synthetic oligonucleotide
  Antisense strand to SEQ ID NO: 210768
uucaaggacaagaacuaac

SEQ ID NO: 210770 - RNA, 19 nt, Artificial Sequence
  Description of Artificial Sequence: Synthetic oligonucleotide
  Sense strand starting at position 3915 of SEQ ID NO: 2715
aguucuuguccuugaacaa

SEQ ID NO: 210771 - RNA, 19 nt, Artificial Sequence
  Description of Artificial Sequence: Synthetic oligonucleotide
  Antisense strand to SEQ ID NO: 210770
uuguucaaggacaagaacu

SEQ ID NO: 210772 - RNA, 19 nt, Artificial Sequence
  Description of Artificial Sequence: Synthetic oligonucleotide
  Sense strand starting at position 3916 of SEQ ID NO: 2715
guucuuguccuugaacaaa

SEQ ID NO: 210773 - RNA, 19 nt, Artificial Sequence
  Description of Artificial Sequence: Synthetic oligonucleotide
  Antisense strand to SEQ ID NO: 210772
uuuguucaaggacaagaac

SEQ ID NO: 210774 - RNA, 19 nt, Artificial Sequence
  Description of Artificial Sequence: Synthetic oligonucleotide
  Sense strand starting at position 3978 of SEQ ID NO: 2715
acaagaagcgcuugaucga

SEQ ID NO: 210775 - RNA, 19 nt, Artificial Sequence
  Description of Artificial Sequence: Synthetic oligonucleotide
  Antisense strand to SEQ ID NO: 210774
ucgaucaagcgcuucuugu

SEQ ID NO: 210776 - RNA, 19 nt, Artificial Sequence
  Description of Artificial Sequence: Synthetic oligonucleotide
  Sense strand starting at position 20 of SEQ ID NO: 2716
uuacuuugagcacaacuga

SEQ ID NO: 210777 - RNA, 19 nt, Artificial Sequence
  Description of Artificial Sequence: Synthetic oligonucleotide
  Antisense strand to SEQ ID NO: 210776
ucaguugugcucaaaguaa

SEQ ID NO: 210778 - RNA, 19 nt, Artificial Sequence
  Description of Artificial Sequence: Synthetic oligonucleotide
  Sense strand starting at position 59 of SEQ ID NO: 2716
acauuagcguacuuagaau

SEQ ID NO: 210779 - RNA, 19 nt, Artificial Sequence
  Description of Artificial Sequence: Synthetic oligonucleotide
  Antisense strand to SEQ ID NO: 210778
auucuaaguacgcuaaugu

SEQ ID NO: 210780 - RNA, 19 nt, Artificial Sequence
  Description of Artificial Sequence: Synthetic oligonucleotide
  Sense strand starting at position 73 of SEQ ID NO: 2716
agaauacacguaugcuaca

SEQ ID NO: 210781 - RNA, 19 nt, Artificial Sequence
  Description of Artificial Sequence: Synthetic oligonucleotide
  Antisense strand to SEQ ID NO: 210780
uguagcauacguguauucu

SEQ ID NO: 210782 - RNA, 19 nt, Artificial Sequence
  Description of Artificial Sequence: Synthetic oligonucleotide
  Sense strand starting at position 87 of SEQ ID NO: 2716
cuacaauagcuguaauuag

SEQ ID NO: 210783 - RNA, 19 nt, Artificial Sequence
  Description of Artificial Sequence: Synthetic oligonucleotide
  Antisense strand to SEQ ID NO: 210782
cuaauuacagcuauuguag

SEQ ID NO: 210784 - RNA, 19 nt, Artificial Sequence
  Description of Artificial Sequence: Synthetic oligonucleotide
  Sense strand starting at position 234 of SEQ ID NO: 2716
cccaauaagucguuaucua

SEQ ID NO: 210785 - RNA, 19 nt, Artificial Sequence
  Description of Artificial Sequence: Synthetic oligonucleotide
  Antisense strand to SEQ ID NO: 210784
uagauaacgacuuauuggg

SEQ ID NO: 210786 - RNA, 19 nt, Artificial Sequence
  Description of Artificial Sequence: Synthetic oligonucleotide
  Sense strand starting at position 235 of SEQ ID NO: 2716
ccaauaagucguuaucuaa

SEQ ID NO: 210787 - RNA, 19 nt, Artificial Sequence
  Description of Artificial Sequence: Synthetic oligonucleotide
  Antisense strand to SEQ ID NO: 210786
uuagauaacgacuuauugg

SEQ ID NO: 210788 - RNA, 19 nt, Artificial Sequence
  Description of Artificial Sequence: Synthetic oligonucleotide
  Sense strand starting at position 354 of SEQ ID NO: 2716
cucaucaggcuuuaguuau

SEQ ID NO: 210789 - RNA, 19 nt, Artificial Sequence
  Description of Artificial Sequence: Synthetic oligonucleotide
  Antisense strand to SEQ ID NO: 210788
auaacuaaagccugaugag

SEQ ID NO: 210790 - RNA, 19 nt, Artificial Sequence
  Description of Artificial Sequence: Synthetic oligonucleotide
  Sense strand starting at position 415 of SEQ ID NO: 2716
aucagaacuguuugaaauu

SEQ ID NO: 210791 - RNA, 19 nt, Artificial Sequence
  Description of Artificial Sequence: Synthetic oligonucleotide
  Antisense strand to SEQ ID NO: 210790
aauuucaaacaguucugau

SEQ ID NO: 210792 - RNA, 19 nt, Artificial Sequence
  Description of Artificial Sequence: Synthetic oligonucleotide
  Sense strand starting at position 416 of SEQ ID NO: 2716
ucagaacuguuugaaauuu

SEQ ID NO: 210793 - RNA, 19 nt, Artificial Sequence
  Description of Artificial Sequence: Synthetic oligonucleotide
  Antisense strand to SEQ ID NO: 210792
aaauuucaaacaguucuga

SEQ ID NO: 210794 - RNA, 19 nt, Artificial Sequence
  Description of Artificial Sequence: Synthetic oligonucleotide
  Sense strand starting at position 446 of SEQ ID NO: 2716
aucugcuauuacuuaacga

SEQ ID NO: 210795 - RNA, 19 nt, Artificial Sequence
  Description of Artificial Sequence: Synthetic oligonucleotide
  Antisense strand to SEQ ID NO: 210794
ucguuaaguaauagcagau

SEQ ID NO: 210796 - RNA, 19 nt, Artificial Sequence
  Description of Artificial Sequence: Synthetic oligonucleotide
  Sense strand starting at position 652 of SEQ ID NO: 2716
agugacaauacaugguuga

SEQ ID NO: 210797 - RNA, 19 nt, Artificial Sequence
  Description of Artificial Sequence: Synthetic oligonucleotide
  Antisense strand to SEQ ID NO: 210796
ucaaccauguauugucacu

SEQ ID NO: 210798 - RNA, 19 nt, Artificial Sequence
  Description of Artificial Sequence: Synthetic oligonucleotide
  Sense strand starting at position 709 of SEQ ID NO: 2716
aaauaucuagguugugaua

SEQ ID NO: 210799 - RNA, 19 nt, Artificial Sequence
  Description of Artificial Sequence: Synthetic oligonucleotide
  Antisense strand to SEQ ID NO: 210798
uaucacaaccuagauauuu

SEQ ID NO: 210800 - RNA, 19 nt, Artificial Sequence
  Description of Artificial Sequence: Synthetic oligonucleotide
  Sense strand starting at position 863 of SEQ ID NO: 2716
aaacguuaccuaggaaaga

SEQ ID NO: 210801 - RNA, 19 nt, Artificial Sequence
  Description of Artificial Sequence: Synthetic oligonucleotide
  Antisense strand to SEQ ID NO: 210800
ucuuuccuagguaacguuu

SEQ ID NO: 210802 - RNA, 19 nt, Artificial Sequence
  Description of Artificial Sequence: Synthetic oligonucleotide
  Sense strand starting at position 899 of SEQ ID NO: 2716
ggagcaugaccugguucaa

SEQ ID NO: 210803 - RNA, 19 nt, Artificial Sequence
  Description of Artificial Sequence: Synthetic oligonucleotide
  Antisense strand to SEQ ID NO: 210802
uugaaccaggucaugcucc

SEQ ID NO: 210804 - RNA, 19 nt, Artificial Sequence
  Description of Artificial Sequence: Synthetic oligonucleotide
  Sense strand starting at position 947 of SEQ ID NO: 2716
caucaagguuggucccauu

SEQ ID NO: 210805 - RNA, 19 nt, Artificial Sequence
  Description of Artificial Sequence: Synthetic oligonucleotide
  Antisense strand to SEQ ID NO: 210804
aaugggaccaaccuugaug

SEQ ID NO: 210806 - RNA, 19 nt, Artificial Sequence
  Description of Artificial Sequence: Synthetic oligonucleotide
  Sense strand starting at position 1208 of SEQ ID NO: 2716
gggaauuggucacuaaacg

SEQ ID NO: 210807 - RNA, 19 nt, Artificial Sequence
  Description of Artificial Sequence: Synthetic oligonucleotide
  Antisense strand to SEQ ID NO: 210806
cguuuagugaccaauuccc

SEQ ID NO: 210808 - RNA, 19 nt, Artificial Sequence
  Description of Artificial Sequence: Synthetic oligonucleotide
  Sense strand starting at position 1209 of SEQ ID NO: 2716
ggaauuggucacuaaacgu

SEQ ID NO: 210809 - RNA, 19 nt, Artificial Sequence
  Description of Artificial Sequence: Synthetic oligonucleotide
  Antisense strand to SEQ ID NO: 210808
acguuuagugaccaauucc

SEQ ID NO: 210810 - RNA, 19 nt, Artificial Sequence
  Description of Artificial Sequence: Synthetic oligonucleotide
  Sense strand starting at position 1215 of SEQ ID NO: 2716
ggucacuaaacguggaagu

SEQ ID NO: 210811 - RNA, 19 nt, Artificial Sequence
  Description of Artificial Sequence: Synthetic oligonucleotide
  Antisense strand to SEQ ID NO: 210810
acuuccacguuuagugacc

SEQ ID NO: 210812 - RNA, 19 nt, Artificial Sequence
  Description of Artificial Sequence: Synthetic oligonucleotide
  Sense strand starting at position 1216 of SEQ ID NO: 2716
gucacuaaacguggaagua

SEQ ID NO: 210813 - RNA, 19 nt, Artificial Sequence
  Description of Artificial Sequence: Synthetic oligonucleotide
  Antisense strand to SEQ ID NO: 210812
uacuuccacguuuagugac

SEQ ID NO: 210814 - RNA, 19 nt, Artificial Sequence
  Description of Artificial Sequence: Synthetic oligonucleotide
  Sense strand starting at position 1217 of SEQ ID NO: 2716
ucacuaaacguggaaguaa

SEQ ID NO: 210815 - RNA, 19 nt, Artificial Sequence
  Description of Artificial Sequence: Synthetic oligonucleotide
  Antisense strand to SEQ ID NO: 210814
uuacuuccacguuuaguga

SEQ ID NO: 210816 - RNA, 19 nt, Artificial Sequence
  Description of Artificial Sequence: Synthetic oligonucleotide
  Sense strand starting at position 1225 of SEQ ID NO: 2716
cguggaaguaaguagaaau

SEQ ID NO: 210817 - RNA, 19 nt, Artificial Sequence
  Description of Artificial Sequence: Synthetic oligonucleotide
  Antisense strand to SEQ ID NO: 210816
auuucuacuuacuuccacg

SEQ ID NO: 210818 - RNA, 19 nt, Artificial Sequence
  Description of Artificial Sequence: Synthetic oligonucleotide
  Sense strand starting at position 1551 of SEQ ID NO: 2716
ggcuaaaugaaauacguua

SEQ ID NO: 210819 - RNA, 19 nt, Artificial Sequence
  Description of Artificial Sequence: Synthetic oligonucleotide
  Antisense strand to SEQ ID NO: 210818
uaacguauuucauuuagcc

SEQ ID NO: 210820 - RNA, 19 nt, Artificial Sequence
  Description of Artificial Sequence: Synthetic oligonucleotide
  Sense strand starting at position 1864 of SEQ ID NO: 2716
cugggaaucccuggcacaa

SEQ ID NO: 210821 - RNA, 19 nt, Artificial Sequence
  Description of Artificial Sequence: Synthetic oligonucleotide
  Antisense strand to SEQ ID NO: 210820
uugugccagggauucccag

SEQ ID NO: 210822 - RNA, 19 nt, Artificial Sequence
  Description of Artificial Sequence: Synthetic oligonucleotide
  Sense strand starting at position 2319 of SEQ ID NO: 2716
gccuaauuaugguuuauuu

SEQ ID NO: 210823 - RNA, 19 nt, Artificial Sequence
  Description of Artificial Sequence: Synthetic oligonucleotide
  Antisense strand to SEQ ID NO: 210822
aaauaaaccauaauuaggc

SEQ ID NO: 210824 - RNA, 19 nt, Artificial Sequence
  Description of Artificial Sequence: Synthetic oligonucleotide
  Sense strand starting at position 2343 of SEQ ID NO: 2716
ccgagugacuucuuugaua

SEQ ID NO: 210825 - RNA, 19 nt, Artificial Sequence
  Description of Artificial Sequence: Synthetic oligonucleotide
  Antisense strand to SEQ ID NO: 210824
uaucaaagaagucacucgg

SEQ ID NO: 210826 - RNA, 19 nt, Artificial Sequence
  Description of Artificial Sequence: Synthetic oligonucleotide
  Sense strand starting at position 2345 of SEQ ID NO: 2716
gagugacuucuuugauacg

SEQ ID NO: 210827 - RNA, 19 nt, Artificial Sequence
  Description of Artificial Sequence: Synthetic oligonucleotide
  Antisense strand to SEQ ID NO: 210826
cguaucaaagaagucacuc

SEQ ID NO: 210828 - RNA, 19 nt, Artificial Sequence
  Description of Artificial Sequence: Synthetic oligonucleotide
  Sense strand starting at position 2350 of SEQ ID NO: 2716
acuucuuugauacgugaag

SEQ ID NO: 210829 - RNA, 19 nt, Artificial Sequence
  Description of Artificial Sequence: Synthetic oligonucleotide
  Antisense strand to SEQ ID NO: 210828
cuucacguaucaaagaagu

SEQ ID NO: 210830 - RNA, 19 nt, Artificial Sequence
  Description of Artificial Sequence: Synthetic oligonucleotide
  Sense strand starting at position 2352 of SEQ ID NO: 2716
uucuuugauacgugaagga

SEQ ID NO: 210831 - RNA, 19 nt, Artificial Sequence
  Description of Artificial Sequence: Synthetic oligonucleotide
  Antisense strand to SEQ ID NO: 210830
uccuucacguaucaaagaa

SEQ ID NO: 210832 - RNA, 19 nt, Artificial Sequence
  Description of Artificial Sequence: Synthetic oligonucleotide
  Sense strand starting at position 2425 of SEQ ID NO: 2716
gacaguuugauguguucug

SEQ ID NO: 210833 - RNA, 19 nt, Artificial Sequence
  Description of Artificial Sequence: Synthetic oligonucleotide
  Antisense strand to SEQ ID NO: 210832
cagaacacaucaaacuguc

SEQ ID NO: 210834 - RNA, 19 nt, Artificial Sequence
  Description of Artificial Sequence: Synthetic oligonucleotide
  Sense strand starting at position 2432 of SEQ ID NO: 2716
ugauguguucuguaaagca

SEQ ID NO: 210835 - RNA, 19 nt, Artificial Sequence
  Description of Artificial Sequence: Synthetic oligonucleotide
  Antisense strand to SEQ ID NO: 210834
ugcuuuacagaacacauca

SEQ ID NO: 210836 - RNA, 19 nt, Artificial Sequence
  Description of Artificial Sequence: Synthetic oligonucleotide
  Sense strand starting at position 2565 of SEQ ID NO: 2716
uccacuaacgcaugaaugu

SEQ ID NO: 210837 - RNA, 19 nt, Artificial Sequence
  Description of Artificial Sequence: Synthetic oligonucleotide
  Antisense strand to SEQ ID NO: 210836
acauucaugcguuagugga

SEQ ID NO: 210838 - RNA, 19 nt, Artificial Sequence
  Description of Artificial Sequence: Synthetic oligonucleotide
  Sense strand starting at position 2566 of SEQ ID NO: 2716
ccacuaacgcaugaauguu

SEQ ID NO: 210839 - RNA, 19 nt, Artificial Sequence
  Description of Artificial Sequence: Synthetic oligonucleotide
  Antisense strand to SEQ ID NO: 210838
aacauucaugcguuagugg

SEQ ID NO: 210840 - RNA, 19 nt, Artificial Sequence
  Description of Artificial Sequence: Synthetic oligonucleotide
  Sense strand starting at position 2647 of SEQ ID NO: 2716
uugguauucccugacugga

SEQ ID NO: 210841 - RNA, 19 nt, Artificial Sequence
  Description of Artificial Sequence: Synthetic oligonucleotide
  Antisense strand to SEQ ID NO: 210840
uccagucagggaauaccaa

SEQ ID NO: 210842 - RNA, 19 nt, Artificial Sequence
  Description of Artificial Sequence: Synthetic oligonucleotide
  Sense strand starting at position 2781 of SEQ ID NO: 2716
auccaaguugggugacaaa

SEQ ID NO: 210843 - RNA, 19 nt, Artificial Sequence
  Description of Artificial Sequence: Synthetic oligonucleotide
  Antisense strand to SEQ ID NO: 210842
uuugucacccaacuuggau

SEQ ID NO: 210844 - RNA, 19 nt, Artificial Sequence
  Description of Artificial Sequence: Synthetic oligonucleotide
  Sense strand starting at position 2992 of SEQ ID NO: 2716
gugugcuauguuuacauua

SEQ ID NO: 210845 - RNA, 19 nt, Artificial Sequence
  Description of Artificial Sequence: Synthetic oligonucleotide
  Antisense strand to SEQ ID NO: 210844
uaauguaaacauagcacac

SEQ ID NO: 210846 - RNA, 19 nt, Artificial Sequence
  Description of Artificial Sequence: Synthetic oligonucleotide
  Sense strand starting at position 3092 of SEQ ID NO: 2716
uucuuaauuggguaguuga

SEQ ID NO: 210847 - RNA, 19 nt, Artificial Sequence
  Description of Artificial Sequence: Synthetic oligonucleotide
  Antisense strand to SEQ ID NO: 210846
ucaacuacccaauuaagaa

SEQ ID NO: 210848 - RNA, 19 nt, Artificial Sequence
  Description of Artificial Sequence: Synthetic oligonucleotide
  Sense strand starting at position 3095 of SEQ ID NO: 2716
uuaauuggguaguugagaa

SEQ ID NO: 210849 - RNA, 19 nt, Artificial Sequence
  Description of Artificial Sequence: Synthetic oligonucleotide
  Antisense strand to SEQ ID NO: 210848
uucucaacuacccaauuaa

SEQ ID NO: 210850 - RNA, 19 nt, Artificial Sequence
  Description of Artificial Sequence: Synthetic oligonucleotide
  Sense strand starting at position 3197 of SEQ ID NO: 2716
cgauuccgucacguguaaa

SEQ ID NO: 210851 - RNA, 19 nt, Artificial Sequence
  Description of Artificial Sequence: Synthetic oligonucleotide
  Antisense strand to SEQ ID NO: 210850
uuuacacgugacggaaucg

SEQ ID NO: 210852 - RNA, 19 nt, Artificial Sequence
  Description of Artificial Sequence: Synthetic oligonucleotide
  Sense strand starting at position 3219 of SEQ ID NO: 2716
gggcuaauaauaggguuaa

SEQ ID NO: 210853 - RNA, 19 nt, Artificial Sequence
  Description of Artificial Sequence: Synthetic oligonucleotide
  Antisense strand to SEQ ID NO: 210852
uuaacccuauuauuagccc

SEQ ID NO: 210854 - RNA, 19 nt, Artificial Sequence
  Description of Artificial Sequence: Synthetic oligonucleotide
  Sense strand starting at position 3530 of SEQ ID NO: 2716
ccaucugcucuugaugacu

SEQ ID NO: 210855 - RNA, 19 nt, Artificial Sequence
  Description of Artificial Sequence: Synthetic oligonucleotide
  Antisense strand to SEQ ID NO: 210854
agucaucaagagcagaugg

SEQ ID NO: 210856 - RNA, 19 nt, Artificial Sequence
  Description of Artificial Sequence: Synthetic oligonucleotide
  Sense strand starting at position 215 of SEQ ID NO: 2717
auaaguuauugcuugaccu

SEQ ID NO: 210857 - RNA, 19 nt, Artificial Sequence
  Description of Artificial Sequence: Synthetic oligonucleotide
  Antisense strand to SEQ ID NO: 210856
aggucaagcaauaacuuau

SEQ ID NO: 210858 - RNA, 19 nt, Artificial Sequence
  Description of Artificial Sequence: Synthetic oligonucleotide
  Sense strand starting at position 249 of SEQ ID NO: 2717
uuagcagucagugaaaguu

SEQ ID NO: 210859 - RNA, 19 nt, Artificial Sequence
  Description of Artificial Sequence: Synthetic oligonucleotide
  Antisense strand to SEQ ID NO: 210858
aacuuucacugacugcuaa

SEQ ID NO: 210860 - RNA, 19 nt, Artificial Sequence
  Description of Artificial Sequence: Synthetic oligonucleotide
  Sense strand starting at position 264 of SEQ ID NO: 2717
aguuuaaacgaaggacaua

SEQ ID NO: 210861 - RNA, 19 nt, Artificial Sequence
  Description of Artificial Sequence: Synthetic oligonucleotide
  Antisense strand to SEQ ID NO: 210860
uauguccuucguuuaaacu

SEQ ID NO: 210862 - RNA, 19 nt, Artificial Sequence
  Description of Artificial Sequence: Synthetic oligonucleotide
  Sense strand starting at position 342 of SEQ ID NO: 2717
cugauaguacuguggaaua

SEQ ID NO: 210863 - RNA, 19 nt, Artificial Sequence
  Description of Artificial Sequence: Synthetic oligonucleotide
  Antisense strand to SEQ ID NO: 210862
uauuccacaguacuaucag

SEQ ID NO: 210864 - RNA, 19 nt, Artificial Sequence
  Description of Artificial Sequence: Synthetic oligonucleotide
  Sense strand starting at position 695 of SEQ ID NO: 2717
aucccucaauuaguggaua

SEQ ID NO: 210865 - RNA, 19 nt, Artificial Sequence
  Description of Artificial Sequence: Synthetic oligonucleotide
  Antisense strand to SEQ ID NO: 210864
uauccacuaauugagggau

SEQ ID NO: 210866 - RNA, 19 nt, Artificial Sequence
  Description of Artificial Sequence: Synthetic oligonucleotide
  Sense strand starting at position 698 of SEQ ID NO: 2717
ccucaauuaguggauacuu

SEQ ID NO: 210867 - RNA, 19 nt, Artificial Sequence
  Description of Artificial Sequence: Synthetic oligonucleotide
  Antisense strand to SEQ ID NO: 210866
aaguauccacuaauugagg

SEQ ID NO: 210868 - RNA, 19 nt, Artificial Sequence
  Description of Artificial Sequence: Synthetic oligonucleotide
  Sense strand starting at position 754 of SEQ ID NO: 2717
aggaguaacauuggucacu

SEQ ID NO: 210869 - RNA, 19 nt, Artificial Sequence
  Description of Artificial Sequence: Synthetic oligonucleotide
  Antisense strand to SEQ ID NO: 210868
agugaccaauguuacuccu

SEQ ID NO: 210870 - RNA, 19 nt, Artificial Sequence
  Description of Artificial Sequence: Synthetic oligonucleotide
  Sense strand starting at position 825 of SEQ ID NO: 2717
cccaaugccugcuccagaa

SEQ ID NO: 210871 - RNA, 19 nt, Artificial Sequence
  Description of Artificial Sequence: Synthetic oligonucleotide
  Antisense strand to SEQ ID NO: 210870
uucuggagcaggcauuggg

SEQ ID NO: 210872 - RNA, 19 nt, Artificial Sequence
  Description of Artificial Sequence: Synthetic oligonucleotide
  Sense strand starting at position 903 of SEQ ID NO: 2717
uagacuagccuuugaguaa

SEQ ID NO: 210873 - RNA, 19 nt, Artificial Sequence
  Description of Artificial Sequence: Synthetic oligonucleotide
  Antisense strand to SEQ ID NO: 210872
uuacucaaaggcuagucua

SEQ ID NO: 210874 - RNA, 19 nt, Artificial Sequence
  Description of Artificial Sequence: Synthetic oligonucleotide
  Sense strand starting at position 946 of SEQ ID NO: 2717
gcaaacuaccuaugagaug

SEQ ID NO: 210875 - RNA, 19 nt, Artificial Sequence
  Description of Artificial Sequence: Synthetic oligonucleotide
  Antisense strand to SEQ ID NO: 210874
caucucauagguaguuugc

SEQ ID NO: 210876 - RNA, 19 nt, Artificial Sequence
  Description of Artificial Sequence: Synthetic oligonucleotide
  Sense strand starting at position 1007 of SEQ ID NO: 2717
cuguauucccagcaaacgu

SEQ ID NO: 210877 - RNA, 19 nt, Artificial Sequence
  Description of Artificial Sequence: Synthetic oligonucleotide
  Antisense strand to SEQ ID NO: 210876
acguuugcugggaauacag

SEQ ID NO: 210878 - RNA, 19 nt, Artificial Sequence
  Description of Artificial Sequence: Synthetic oligonucleotide
  Sense strand starting at position 1023 of SEQ ID NO: 2717
cguggaaauccgcaaacca

SEQ ID NO: 210879 - RNA, 19 nt, Artificial Sequence
  Description of Artificial Sequence: Synthetic oligonucleotide
  Antisense strand to SEQ ID NO: 210878
ugguuugcggauuuccacg

SEQ ID NO: 210880 - RNA, 19 nt, Artificial Sequence
  Description of Artificial Sequence: Synthetic oligonucleotide
  Sense strand starting at position 1059 of SEQ ID NO: 2717
agcacuaagugaguacuua

SEQ ID NO: 210881 - RNA, 19 nt, Artificial Sequence
  Description of Artificial Sequence: Synthetic oligonucleotide
  Antisense strand to SEQ ID NO: 210880
uaaguacucacuuagugcu

SEQ ID NO: 210882 - RNA, 19 nt, Artificial Sequence
  Description of Artificial Sequence: Synthetic oligonucleotide
  Sense strand starting at position 1060 of SEQ ID NO: 2717
gcacuaagugaguacuuaa

SEQ ID NO: 210883 - RNA, 19 nt, Artificial Sequence
  Description of Artificial Sequence: Synthetic oligonucleotide
  Antisense strand to SEQ ID NO: 210882
uuaaguacucacuuagugc

SEQ ID NO: 210884 - RNA, 19 nt, Artificial Sequence
  Description of Artificial Sequence: Synthetic oligonucleotide
  Sense strand starting at position 1063 of SEQ ID NO: 2717
cuaagugaguacuuaacaa

SEQ ID NO: 210885 - RNA, 19 nt, Artificial Sequence
  Description of Artificial Sequence: Synthetic oligonucleotide
  Antisense strand to SEQ ID NO: 210884
uuguuaaguacucacuuag

SEQ ID NO: 210886 - RNA, 19 nt, Artificial Sequence
  Description of Artificial Sequence: Synthetic oligonucleotide
  Sense strand starting at position 1227 of SEQ ID NO: 2717
cgcgcaagucucccaaacu

SEQ ID NO: 210887 - RNA, 19 nt, Artificial Sequence
  Description of Artificial Sequence: Synthetic oligonucleotide
  Antisense strand to SEQ ID NO: 210886
aguuugggagacuugcgcg

SEQ ID NO: 210888 - RNA, 19 nt, Artificial Sequence
  Description of Artificial Sequence: Synthetic oligonucleotide
  Sense strand starting at position 1663 of SEQ ID NO: 2717
gguggauacgccugaggaa

SEQ ID NO: 210889 - RNA, 19 nt, Artificial Sequence
  Description of Artificial Sequence: Synthetic oligonucleotide
  Antisense strand to SEQ ID NO: 210888
uuccucaggcguauccacc

SEQ ID NO: 210890 - RNA, 19 nt, Artificial Sequence
  Description of Artificial Sequence: Synthetic oligonucleotide
  Sense strand starting at position 2233 of SEQ ID NO: 2717
ugaaucagacuucggaaac

SEQ ID NO: 210891 - RNA, 19 nt, Artificial Sequence
  Description of Artificial Sequence: Synthetic oligonucleotide
  Antisense strand to SEQ ID NO: 210890
guuuccgaagucugauuca

SEQ ID NO: 210892 - RNA, 19 nt, Artificial Sequence
  Description of Artificial Sequence: Synthetic oligonucleotide
  Sense strand starting at position 2279 of SEQ ID NO: 2717
uacagaugagcuugaggau

SEQ ID NO: 210893 - RNA, 19 nt, Artificial Sequence
  Description of Artificial Sequence: Synthetic oligonucleotide
  Antisense strand to SEQ ID NO: 210892
auccucaagcucaucugua

SEQ ID NO: 210894 - RNA, 19 nt, Artificial Sequence
  Description of Artificial Sequence: Synthetic oligonucleotide
  Sense strand starting at position 2339 of SEQ ID NO: 2717
uggacagacuucuccauau

SEQ ID NO: 210895 - RNA, 19 nt, Artificial Sequence
  Description of Artificial Sequence: Synthetic oligonucleotide
  Antisense strand to SEQ ID NO: 210894
auauggagaagucugucca

SEQ ID NO: 210896 - RNA, 19 nt, Artificial Sequence
  Description of Artificial Sequence: Synthetic oligonucleotide
  Sense strand starting at position 2492 of SEQ ID NO: 2717
cugggucuuccuggaggaa

SEQ ID NO: 210897 - RNA, 19 nt, Artificial Sequence
  Description of Artificial Sequence: Synthetic oligonucleotide
  Antisense strand to SEQ ID NO: 210896
uuccuccaggaagacccag

SEQ ID NO: 210898 - RNA, 19 nt, Artificial Sequence
  Description of Artificial Sequence: Synthetic oligonucleotide
  Sense strand starting at position 2494 of SEQ ID NO: 2717
gggucuuccuggaggaaug

SEQ ID NO: 210899 - RNA, 19 nt, Artificial Sequence
  Description of Artificial Sequence: Synthetic oligonucleotide
  Antisense strand to SEQ ID NO: 210898
cauuccuccaggaagaccc

SEQ ID NO: 210900 - RNA, 19 nt, Artificial Sequence
  Description of Artificial Sequence: Synthetic oligonucleotide
  Sense strand starting at position 2495 of SEQ ID NO: 2717
ggucuuccuggaggaauga

SEQ ID NO: 210901 - RNA, 19 nt, Artificial Sequence
  Description of Artificial Sequence: Synthetic oligonucleotide
  Antisense strand to SEQ ID NO: 210900
ucauuccuccaggaagacc

SEQ ID NO: 210902 - RNA, 19 nt, Artificial Sequence
  Description of Artificial Sequence: Synthetic oligonucleotide
  Sense strand starting at position 2560 of SEQ ID NO: 2717
gcgucccuuauuugaugua

SEQ ID NO: 210903 - RNA, 19 nt, Artificial Sequence
  Description of Artificial Sequence: Synthetic oligonucleotide
  Antisense strand to SEQ ID NO: 210902
uacaucaaauaagggacgc

SEQ ID NO: 210904 - RNA, 19 nt, Artificial Sequence
  Description of Artificial Sequence: Synthetic oligonucleotide
  Sense strand starting at position 2717 of SEQ ID NO: 2717
agagauccuucccucugua

SEQ ID NO: 210905 - RNA, 19 nt, Artificial Sequence
  Description of Artificial Sequence: Synthetic oligonucleotide
  Antisense strand to SEQ ID NO: 210904
uacagagggaaggaucucu

SEQ ID NO: 210906 - RNA, 19 nt, Artificial Sequence
  Description of Artificial Sequence: Synthetic oligonucleotide
  Sense strand starting at position 2744 of SEQ ID NO: 2717
ugggaugggaagugucaga

SEQ ID NO: 210907 - RNA, 19 nt, Artificial Sequence
  Description of Artificial Sequence: Synthetic oligonucleotide
  Antisense strand to SEQ ID NO: 210906
ucugacacuucccauccca

SEQ ID NO: 210908 - RNA, 19 nt, Artificial Sequence
  Description of Artificial Sequence: Synthetic oligonucleotide
  Sense strand starting at position 2767 of SEQ ID NO: 2717
gaccuuuaguuccuugaga

SEQ ID NO: 210909 - RNA, 19 nt, Artificial Sequence
  Description of Artificial Sequence: Synthetic oligonucleotide
  Antisense strand to SEQ ID NO: 210908
ucucaaggaacuaaagguc

SEQ ID NO: 210910 - RNA, 19 nt, Artificial Sequence
  Description of Artificial Sequence: Synthetic oligonucleotide
  Sense strand starting at position 2768 of SEQ ID NO: 2717
accuuuaguuccuugagau

SEQ ID NO: 210911 - RNA, 19 nt, Artificial Sequence
  Description of Artificial Sequence: Synthetic oligonucleotide
  Antisense strand to SEQ ID NO: 210910
aucucaaggaacuaaaggu

SEQ ID NO: 210912 - RNA, 19 nt, Artificial Sequence
  Description of Artificial Sequence: Synthetic oligonucleotide
  Sense strand starting at position 2769 of SEQ ID NO: 2717
ccuuuaguuccuugagauc

SEQ ID NO: 210913 - RNA, 19 nt, Artificial Sequence
  Description of Artificial Sequence: Synthetic oligonucleotide
  Antisense strand to SEQ ID NO: 210912
gaucucaaggaacuaaagg

SEQ ID NO: 210914 - RNA, 19 nt, Artificial Sequence
  Description of Artificial Sequence: Synthetic oligonucleotide
  Sense strand starting at position 2790 of SEQ ID NO: 2717
aaagguuucguguuugcuu

SEQ ID NO: 210915 - RNA, 19 nt, Artificial Sequence
  Description of Artificial Sequence: Synthetic oligonucleotide
  Antisense strand to SEQ ID NO: 210914
aagcaaacacgaaaccuuu

SEQ ID NO: 210916 - RNA, 19 nt, Artificial Sequence
  Description of Artificial Sequence: Synthetic oligonucleotide
  Sense strand starting at position 3271 of SEQ ID NO: 2717
gacagagguuugucuggag

SEQ ID NO: 210917 - RNA, 19 nt, Artificial Sequence
  Description of Artificial Sequence: Synthetic oligonucleotide
  Antisense strand to SEQ ID NO: 210916
cuccagacaaaccucuguc

SEQ ID NO: 210918 - RNA, 19 nt, Artificial Sequence
  Description of Artificial Sequence: Synthetic oligonucleotide
  Sense strand starting at position 3286 of SEQ ID NO: 2717
ggagccagagcucacaaau

SEQ ID NO: 210919 - RNA, 19 nt, Artificial Sequence
  Description of Artificial Sequence: Synthetic oligonucleotide
  Antisense strand to SEQ ID NO: 210918
auuugugagcucuggcucc

SEQ ID NO: 210920 - RNA, 19 nt, Artificial Sequence
  Description of Artificial Sequence: Synthetic oligonucleotide
  Sense strand starting at position 3441 of SEQ ID NO: 2717
ggaacccuccuguguggua

SEQ ID NO: 210921 - RNA, 19 nt, Artificial Sequence
  Description of Artificial Sequence: Synthetic oligonucleotide
  Antisense strand to SEQ ID NO: 210920
uaccacacaggaggguucc

SEQ ID NO: 210922 - RNA, 19 nt, Artificial Sequence
  Description of Artificial Sequence: Synthetic oligonucleotide
  Sense strand starting at position 3558 of SEQ ID NO: 2717
ugaaaugguauagguugau

SEQ ID NO: 210923 - RNA, 19 nt, Artificial Sequence
  Description of Artificial Sequence: Synthetic oligonucleotide
  Antisense strand to SEQ ID NO: 210922
aucaaccuauaccauuuca

SEQ ID NO: 210924 - RNA, 19 nt, Artificial Sequence
  Description of Artificial Sequence: Synthetic oligonucleotide
  Sense strand starting at position 3581 of SEQ ID NO: 2717
aauggagagugauaauaau

SEQ ID NO: 210925 - RNA, 19 nt, Artificial Sequence
  Description of Artificial Sequence: Synthetic oligonucleotide
  Antisense strand to SEQ ID NO: 210924
auuauuaucacucuccauu

SEQ ID NO: 210926 - RNA, 19 nt, Artificial Sequence
  Description of Artificial Sequence: Synthetic oligonucleotide
  Sense strand starting at position 3627 of SEQ ID NO: 2717
gguacugaugccuaggaac

SEQ ID NO: 210927 - RNA, 19 nt, Artificial Sequence
  Description of Artificial Sequence: Synthetic oligonucleotide
  Antisense strand to SEQ ID NO: 210926
guuccuaggcaucaguacc

SEQ ID NO: 210928 - RNA, 19 nt, Artificial Sequence
  Description of Artificial Sequence: Synthetic oligonucleotide
  Sense strand starting at position 3690 of SEQ ID NO: 2717
auaauagcagccuggagaa

SEQ ID NO: 210929 - RNA, 19 nt, Artificial Sequence
  Description of Artificial Sequence: Synthetic oligonucleotide
  Antisense strand to SEQ ID NO: 210928
uucuccaggcugcuauuau

SEQ ID NO: 210930 - RNA, 19 nt, Artificial Sequence
  Description of Artificial Sequence: Synthetic oligonucleotide
  Sense strand starting at position 3728 of SEQ ID NO: 2717
cccugaguucccuguuaua

SEQ ID NO: 210931 - RNA, 19 nt, Artificial Sequence
  Description of Artificial Sequence: Synthetic oligonucleotide
  Antisense strand to SEQ ID NO: 210930
uauaacagggaacucaggg

SEQ ID NO: 210932 - RNA, 19 nt, Artificial Sequence
  Description of Artificial Sequence: Synthetic oligonucleotide
  Sense strand starting at position 3762 of SEQ ID NO: 2717
uuuaaauaagcaugaguag

SEQ ID NO: 210933 - RNA, 19 nt, Artificial Sequence
  Description of Artificial Sequence: Synthetic oligonucleotide
  Antisense strand to SEQ ID NO: 210932
cuacucaugcuuauuuaaa

SEQ ID NO: 210934 - RNA, 19 nt, Artificial Sequence
  Description of Artificial Sequence: Synthetic oligonucleotide
  Sense strand starting at position 3779 of SEQ ID NO: 2717
agcuaacuuccucaguaag

SEQ ID NO: 210935 - RNA, 19 nt, Artificial Sequence
  Description of Artificial Sequence: Synthetic oligonucleotide
  Antisense strand to SEQ ID NO: 210934
cuuacugaggaaguuagcu

SEQ ID NO: 210936 - RNA, 19 nt, Artificial Sequence
  Description of Artificial Sequence: Synthetic oligonucleotide
  Sense strand starting at position 406 of SEQ ID NO: 2718
gugaaagguauuggaucca

SEQ ID NO: 210937 - RNA, 19 nt, Artificial Sequence
  Description of Artificial Sequence: Synthetic oligonucleotide
  Antisense strand to SEQ ID NO: 210936
uggauccaauaccuuucac

SEQ ID NO: 210938 - RNA, 19 nt, Artificial Sequence
  Description of Artificial Sequence: Synthetic oligonucleotide
  Sense strand starting at position 432 of SEQ ID NO: 2718
aaacuuauccugugauugg

SEQ ID NO: 210939 - RNA, 19 nt, Artificial Sequence
  Description of Artificial Sequence: Synthetic oligonucleotide
  Antisense strand to SEQ ID NO: 210938
ccaaucacaggauaaguuu

SEQ ID NO: 210940 - RNA, 19 nt, Artificial Sequence
  Description of Artificial Sequence: Synthetic oligonucleotide
  Sense strand starting at position 512 of SEQ ID NO: 2718
ccacuuagaggaggaguuu

SEQ ID NO: 210941 - RNA, 19 nt, Artificial Sequence
  Description of Artificial Sequence: Synthetic oligonucleotide
  Antisense strand to SEQ ID NO: 210940
aaacuccuccucuaagugg

SEQ ID NO: 210942 - RNA, 19 nt, Artificial Sequence
  Description of Artificial Sequence: Synthetic oligonucleotide
  Sense strand starting at position 538 of SEQ ID NO: 2718
uuggaaaccuuuguaaggu

SEQ ID NO: 210943 - RNA, 19 nt, Artificial Sequence
  Description of Artificial Sequence: Synthetic oligonucleotide
  Antisense strand to SEQ ID NO: 210942
accuuacaaagguuuccaa

SEQ ID NO: 210944 - RNA, 19 nt, Artificial Sequence
  Description of Artificial Sequence: Synthetic oligonucleotide
  Sense strand starting at position 555 of SEQ ID NO: 2718
gucguugagaaccaaucua

SEQ ID NO: 210945 - RNA, 19 nt, Artificial Sequence
  Description of Artificial Sequence: Synthetic oligonucleotide
  Antisense strand to SEQ ID NO: 210944
uagauugguucucaacgac

SEQ ID NO: 210946 - RNA, 19 nt, Artificial Sequence
  Description of Artificial Sequence: Synthetic oligonucleotide
  Sense strand starting at position 602 of SEQ ID NO: 2718
guuugugugccgagaaguu

SEQ ID NO: 210947 - RNA, 19 nt, Artificial Sequence
  Description of Artificial Sequence: Synthetic oligonucleotide
  Antisense strand to SEQ ID NO: 210946
aacuucucggcacacaaac

SEQ ID NO: 210948 - RNA, 19 nt, Artificial Sequence
  Description of Artificial Sequence: Synthetic oligonucleotide
  Sense strand starting at position 651 of SEQ ID NO: 2718
gacuucucauaagugggau

SEQ ID NO: 210949 - RNA, 19 nt, Artificial Sequence
  Description of Artificial Sequence: Synthetic oligonucleotide
  Antisense strand to SEQ ID NO: 210948
aucccacuuaugagaaguc

SEQ ID NO: 210950 - RNA, 19 nt, Artificial Sequence
  Description of Artificial Sequence: Synthetic oligonucleotide
  Sense strand starting at position 654 of SEQ ID NO: 2718
uucucauaagugggauauc

SEQ ID NO: 210951 - RNA, 19 nt, Artificial Sequence
  Description of Artificial Sequence: Synthetic oligonucleotide
  Antisense strand to SEQ ID NO: 210950
gauaucccacuuaugagaa

SEQ ID NO: 210952 - RNA, 19 nt, Artificial Sequence
  Description of Artificial Sequence: Synthetic oligonucleotide
  Sense strand starting at position 663 of SEQ ID NO: 2718
gugggauaucuucaguaag

SEQ ID NO: 210953 - RNA, 19 nt, Artificial Sequence
  Description of Artificial Sequence: Synthetic oligonucleotide
  Antisense strand to SEQ ID NO: 210952
cuuacugaagauaucccac

SEQ ID NO: 210954 - RNA, 19 nt, Artificial Sequence
  Description of Artificial Sequence: Synthetic oligonucleotide
  Sense strand starting at position 745 of SEQ ID NO: 2718
uucccuacugcuugaagga

SEQ ID NO: 210955 - RNA, 19 nt, Artificial Sequence
  Description of Artificial Sequence: Synthetic oligonucleotide
  Antisense strand to SEQ ID NO: 210954
uccuucaagcaguagggaa

SEQ ID NO: 210956 - RNA, 19 nt, Artificial Sequence
  Description of Artificial Sequence: Synthetic oligonucleotide
  Sense strand starting at position 746 of SEQ ID NO: 2718
ucccuacugcuugaaggaa

SEQ ID NO: 210957 - RNA, 19 nt, Artificial Sequence
  Description of Artificial Sequence: Synthetic oligonucleotide
  Antisense strand to SEQ ID NO: 210956
uuccuucaagcaguaggga

SEQ ID NO: 210958 - RNA, 19 nt, Artificial Sequence
  Description of Artificial Sequence: Synthetic oligonucleotide
  Sense strand starting at position 760 of SEQ ID NO: 2718
aggaacccuuauguagaua

SEQ ID NO: 210959 - RNA, 19 nt, Artificial Sequence
  Description of Artificial Sequence: Synthetic oligonucleotide
  Antisense strand to SEQ ID NO: 210958
uaucuacauaaggguuccu

SEQ ID NO: 210960 - RNA, 19 nt, Artificial Sequence
  Description of Artificial Sequence: Synthetic oligonucleotide
  Sense strand starting at position 798 of SEQ ID NO: 2718
ugaauaaauuggcagauuu

SEQ ID NO: 210961 - RNA, 19 nt, Artificial Sequence
  Description of Artificial Sequence: Synthetic oligonucleotide
  Antisense strand to SEQ ID NO: 210960
aaaucugccaauuuauuca

SEQ ID NO: 210962 - RNA, 19 nt, Artificial Sequence
  Description of Artificial Sequence: Synthetic oligonucleotide
  Sense strand starting at position 821 of SEQ ID NO: 2718
cuauuaucuggcuacuaag

SEQ ID NO: 210963 - RNA, 19 nt, Artificial Sequence
  Description of Artificial Sequence: Synthetic oligonucleotide
  Antisense strand to SEQ ID NO: 210962
cuuaguagccagauaauag

SEQ ID NO: 210964 - RNA, 19 nt, Artificial Sequence
  Description of Artificial Sequence: Synthetic oligonucleotide
  Sense strand starting at position 868 of SEQ ID NO: 2718
uaugauuuauaggagugaa

SEQ ID NO: 210965 - RNA, 19 nt, Artificial Sequence
  Description of Artificial Sequence: Synthetic oligonucleotide
  Antisense strand to SEQ ID NO: 210964
uucacuccuauaaaucaua

SEQ ID NO: 210966 - RNA, 19 nt, Artificial Sequence
  Description of Artificial Sequence: Synthetic oligonucleotide
  Sense strand starting at position 1226 of SEQ ID NO: 2718
gaaguuagacccugccuca

SEQ ID NO: 210967 - RNA, 19 nt, Artificial Sequence
  Description of Artificial Sequence: Synthetic oligonucleotide
  Antisense strand to SEQ ID NO: 210966
ugaggcagggucuaacuuc

SEQ ID NO: 210968 - RNA, 19 nt, Artificial Sequence
  Description of Artificial Sequence: Synthetic oligonucleotide
  Sense strand starting at position 1303 of SEQ ID NO: 2718
ugugacuauugagcaauaa

SEQ ID NO: 210969 - RNA, 19 nt, Artificial Sequence
  Description of Artificial Sequence: Synthetic oligonucleotide
  Antisense strand to SEQ ID NO: 210968
uuauugcucaauagucaca

SEQ ID NO: 210970 - RNA, 19 nt, Artificial Sequence
  Description of Artificial Sequence: Synthetic oligonucleotide
  Sense strand starting at position 1360 of SEQ ID NO: 2718
cuguaagguaagggauuaa

SEQ ID NO: 210971 - RNA, 19 nt, Artificial Sequence
  Description of Artificial Sequence: Synthetic oligonucleotide
  Antisense strand to SEQ ID NO: 210970
uuaaucccuuaccuuacag

SEQ ID NO: 210972 - RNA, 19 nt, Artificial Sequence
  Description of Artificial Sequence: Synthetic oligonucleotide
  Sense strand starting at position 1426 of SEQ ID NO: 2718
guugaugucagguauuaua

SEQ ID NO: 210973 - RNA, 19 nt, Artificial Sequence
  Description of Artificial Sequence: Synthetic oligonucleotide
  Antisense strand to SEQ ID NO: 210972
uauaauaccugacaucaac

SEQ ID NO: 210974 - RNA, 19 nt, Artificial Sequence
  Description of Artificial Sequence: Synthetic oligonucleotide
  Sense strand starting at position 1449 of SEQ ID NO: 2718
acuucuaaaggaugaguuu

SEQ ID NO: 210975 - RNA, 19 nt, Artificial Sequence
  Description of Artificial Sequence: Synthetic oligonucleotide
  Antisense strand to SEQ ID NO: 210974
aaacucauccuuuagaagu

SEQ ID NO: 210976 - RNA, 19 nt, Artificial Sequence
  Description of Artificial Sequence: Synthetic oligonucleotide
  Sense strand starting at position 1597 of SEQ ID NO: 2718
uggcuuuauccugaaguuu

SEQ ID NO: 210977 - RNA, 19 nt, Artificial Sequence
  Description of Artificial Sequence: Synthetic oligonucleotide
  Antisense strand to SEQ ID NO: 210976
aaacuucaggauaaagcca

SEQ ID NO: 210978 - RNA, 19 nt, Artificial Sequence
  Description of Artificial Sequence: Synthetic oligonucleotide
  Sense strand starting at position 1641 of SEQ ID NO: 2718
cccaaaucugcugagauug

SEQ ID NO: 210979 - RNA, 19 nt, Artificial Sequence
  Description of Artificial Sequence: Synthetic oligonucleotide
  Antisense strand to SEQ ID NO: 210978
caaucucagcagauuuggg

SEQ ID NO: 210980 - RNA, 19 nt, Artificial Sequence
  Description of Artificial Sequence: Synthetic oligonucleotide
  Sense strand starting at position 1675 of SEQ ID NO: 2718
gccugauccgcagcaguaa

SEQ ID NO: 210981 - RNA, 19 nt, Artificial Sequence
  Description of Artificial Sequence: Synthetic oligonucleotide
  Antisense strand to SEQ ID NO: 210980
uuacugcugcggaucaggc

SEQ ID NO: 210982 - RNA, 19 nt, Artificial Sequence
  Description of Artificial Sequence: Synthetic oligonucleotide
  Sense strand starting at position 1785 of SEQ ID NO: 2718
aguugagcucaaggcuaaa

SEQ ID NO: 210983 - RNA, 19 nt, Artificial Sequence
  Description of Artificial Sequence: Synthetic oligonucleotide
  Antisense strand to SEQ ID NO: 210982
uuuagccuugagcucaacu

SEQ ID NO: 210984 - RNA, 19 nt, Artificial Sequence
  Description of Artificial Sequence: Synthetic oligonucleotide
  Sense strand starting at position 2312 of SEQ ID NO: 2718
gaggauuaacagcgauaca

SEQ ID NO: 210985 - RNA, 19 nt, Artificial Sequence
  Description of Artificial Sequence: Synthetic oligonucleotide
  Antisense strand to SEQ ID NO: 210984
uguaucgcuguuaauccuc

SEQ ID NO: 210986 - RNA, 19 nt, Artificial Sequence
  Description of Artificial Sequence: Synthetic oligonucleotide
  Sense strand starting at position 2458 of SEQ ID NO: 2718
ccaucacaugguugagguu

SEQ ID NO: 210987 - RNA, 19 nt, Artificial Sequence
  Description of Artificial Sequence: Synthetic oligonucleotide
  Antisense strand to SEQ ID NO: 210986
aaccucaaccaugugaugg

SEQ ID NO: 210988 - RNA, 19 nt, Artificial Sequence
  Description of Artificial Sequence: Synthetic oligonucleotide
  Sense strand starting at position 2489 of SEQ ID NO: 2718
agaagacccugaguugcua

SEQ ID NO: 210989 - RNA, 19 nt, Artificial Sequence
  Description of Artificial Sequence: Synthetic oligonucleotide
  Antisense strand to SEQ ID NO: 210988
uagcaacucagggucuucu

SEQ ID NO: 210990 - RNA, 19 nt, Artificial Sequence
  Description of Artificial Sequence: Synthetic oligonucleotide
  Sense strand starting at position 2526 of SEQ ID NO: 2718
guacuauaacagugcuaca

SEQ ID NO: 210991 - RNA, 19 nt, Artificial Sequence
  Description of Artificial Sequence: Synthetic oligonucleotide
  Antisense strand to SEQ ID NO: 210990
uguagcacuguuauaguac

SEQ ID NO: 210992 - RNA, 19 nt, Artificial Sequence
  Description of Artificial Sequence: Synthetic oligonucleotide
  Sense strand starting at position 2652 of SEQ ID NO: 2718
ggcuuuaaucaauauugca

SEQ ID NO: 210993 - RNA, 19 nt, Artificial Sequence
  Description of Artificial Sequence: Synthetic oligonucleotide
  Antisense strand to SEQ ID NO: 210992
ugcaauauugauuaaagcc

SEQ ID NO: 210994 - RNA, 19 nt, Artificial Sequence
  Description of Artificial Sequence: Synthetic oligonucleotide
  Sense strand starting at position 2738 of SEQ ID NO: 2718
gccucagaauuguugagga

SEQ ID NO: 210995 - RNA, 19 nt, Artificial Sequence
  Description of Artificial Sequence: Synthetic oligonucleotide
  Antisense strand to SEQ ID NO: 210994
uccucaacaauucugaggc

SEQ ID NO: 210996 - RNA, 19 nt, Artificial Sequence
  Description of Artificial Sequence: Synthetic oligonucleotide
  Sense strand starting at position 2939 of SEQ ID NO: 2718
guuggugaugccuauauca

SEQ ID NO: 210997 - RNA, 19 nt, Artificial Sequence
  Description of Artificial Sequence: Synthetic oligonucleotide
  Antisense strand to SEQ ID NO: 210996
ugauauaggcaucaccaac

SEQ ID NO: 210998 - RNA, 19 nt, Artificial Sequence
  Description of Artificial Sequence: Synthetic oligonucleotide
  Sense strand starting at position 2941 of SEQ ID NO: 2718
uggugaugccuauaucaga

SEQ ID NO: 210999 - RNA, 19 nt, Artificial Sequence
  Description of Artificial Sequence: Synthetic oligonucleotide
  Antisense strand to SEQ ID NO: 210998
ucugauauaggcaucacca

SEQ ID NO: 211000 - RNA, 19 nt, Artificial Sequence
  Description of Artificial Sequence: Synthetic oligonucleotide
  Sense strand starting at position 3394 of SEQ ID NO: 2718
ccagcagaauaggaaauuu

SEQ ID NO: 211001 - RNA, 19 nt, Artificial Sequence
  Description of Artificial Sequence: Synthetic oligonucleotide
  Antisense strand to SEQ ID NO: 211000
aaauuuccuauucugcugg

SEQ ID NO: 211002 - RNA, 19 nt, Artificial Sequence
  Description of Artificial Sequence: Synthetic oligonucleotide
  Sense strand starting at position 3519 of SEQ ID NO: 2718
agacuuagcaggcaucgaa

SEQ ID NO: 211003 - RNA, 19 nt, Artificial Sequence
  Description of Artificial Sequence: Synthetic oligonucleotide
  Antisense strand to SEQ ID NO: 211002
uucgaugccugcuaagucu

SEQ ID NO: 211004 - RNA, 19 nt, Artificial Sequence
  Description of Artificial Sequence: Synthetic oligonucleotide
  Sense strand starting at position 3573 of SEQ ID NO: 2718
cauggaauguucucuagga

SEQ ID NO: 211005 - RNA, 19 nt, Artificial Sequence
  Description of Artificial Sequence: Synthetic oligonucleotide
  Antisense strand to SEQ ID NO: 211004
uccuagagaacauuccaug

SEQ ID NO: 211006 - RNA, 19 nt, Artificial Sequence
  Description of Artificial Sequence: Synthetic oligonucleotide
  Sense strand starting at position 3574 of SEQ ID NO: 2718
auggaauguucucuaggau

SEQ ID NO: 211007 - RNA, 19 nt, Artificial Sequence
  Description of Artificial Sequence: Synthetic oligonucleotide
  Antisense strand to SEQ ID NO: 211006
auccuagagaacauuccau

SEQ ID NO: 211008 - RNA, 19 nt, Artificial Sequence
  Description of Artificial Sequence: Synthetic oligonucleotide
  Sense strand starting at position 3577 of SEQ ID NO: 2718
gaauguucucuaggauaaa

SEQ ID NO: 211009 - RNA, 19 nt, Artificial Sequence
  Description of Artificial Sequence: Synthetic oligonucleotide
  Antisense strand to SEQ ID NO: 211008
uuuauccuagagaacauuc

SEQ ID NO: 211010 - RNA, 19 nt, Artificial Sequence
  Description of Artificial Sequence: Synthetic oligonucleotide
  Sense strand starting at position 3580 of SEQ ID NO: 2718
uguucucuaggauaaagca

SEQ ID NO: 211011 - RNA, 19 nt, Artificial Sequence
  Description of Artificial Sequence: Synthetic oligonucleotide
  Antisense strand to SEQ ID NO: 211010
ugcuuuauccuagagaaca

SEQ ID NO: 211012 - RNA, 19 nt, Artificial Sequence
  Description of Artificial Sequence: Synthetic oligonucleotide
  Sense strand starting at position 3613 of SEQ ID NO: 2718
gaacaagucucaguaaaug

SEQ ID NO: 211013 - RNA, 19 nt, Artificial Sequence
  Description of Artificial Sequence: Synthetic oligonucleotide
  Antisense strand to SEQ ID NO: 211012
cauuuacugagacuuguuc

SEQ ID NO: 211014 - RNA, 19 nt, Artificial Sequence
  Description of Artificial Sequence: Synthetic oligonucleotide
  Sense strand starting at position 3629 of SEQ ID NO: 2718
auguaaaccgacugaaauc

SEQ ID NO: 211015 - RNA, 19 nt, Artificial Sequence
  Description of Artificial Sequence: Synthetic oligonucleotide
  Antisense strand to SEQ ID NO: 211014
gauuucagucgguuuacau

SEQ ID NO: 211016 - RNA, 19 nt, Artificial Sequence
  Description of Artificial Sequence: Synthetic oligonucleotide
  Sense strand starting at position 47 of SEQ ID NO: 2719
cagaaagucuucuuugguc

SEQ ID NO: 211017 - RNA, 19 nt, Artificial Sequence
  Description of Artificial Sequence: Synthetic oligonucleotide
  Antisense strand to SEQ ID NO: 211016
gaccaaagaagacuuucug

SEQ ID NO: 211018 - RNA, 19 nt, Artificial Sequence
  Description of Artificial Sequence: Synthetic oligonucleotide
  Sense strand starting at position 49 of SEQ ID NO: 2719
gaaagucuucuuuggucca

SEQ ID NO: 211019 - RNA, 19 nt, Artificial Sequence
  Description of Artificial Sequence: Synthetic oligonucleotide
  Antisense strand to SEQ ID NO: 211018
uggaccaaagaagacuuuc

SEQ ID NO: 211020 - RNA, 19 nt, Artificial Sequence
  Description of Artificial Sequence: Synthetic oligonucleotide
  Sense strand starting at position 199 of SEQ ID NO: 2719
guaugcguguuacucaaca

SEQ ID NO: 211021 - RNA, 19 nt, Artificial Sequence
  Description of Artificial Sequence: Synthetic oligonucleotide
  Antisense strand to SEQ ID NO: 211020
uguugaguaacacgcauac

SEQ ID NO: 211022 - RNA, 19 nt, Artificial Sequence
  Description of Artificial Sequence: Synthetic oligonucleotide
  Sense strand starting at position 378 of SEQ ID NO: 2719
ggacguuugaaucacccaa

SEQ ID NO: 211023 - RNA, 19 nt, Artificial Sequence
  Description of Artificial Sequence: Synthetic oligonucleotide
  Antisense strand to SEQ ID NO: 211022
uugggugauucaaacgucc

SEQ ID NO: 211024 - RNA, 19 nt, Artificial Sequence
  Description of Artificial Sequence: Synthetic oligonucleotide
  Sense strand starting at position 413 of SEQ ID NO: 2719
ugaugcuaacgugauaaac

SEQ ID NO: 211025 - RNA, 19 nt, Artificial Sequence
  Description of Artificial Sequence: Synthetic oligonucleotide
  Antisense strand to SEQ ID NO: 211024
guuuaucacguuagcauca

SEQ ID NO: 211026 - RNA, 19 nt, Artificial Sequence
  Description of Artificial Sequence: Synthetic oligonucleotide
  Sense strand starting at position 421 of SEQ ID NO: 2719
acgugauaaacagaaacgu

SEQ ID NO: 211027 - RNA, 19 nt, Artificial Sequence
  Description of Artificial Sequence: Synthetic oligonucleotide
  Antisense strand to SEQ ID NO: 211026
acguuucuguuuaucacgu

SEQ ID NO: 211028 - RNA, 19 nt, Artificial Sequence
  Description of Artificial Sequence: Synthetic oligonucleotide
  Sense strand starting at position 450 of SEQ ID NO: 2719
agaaauuacuagguuagca

SEQ ID NO: 211029 - RNA, 19 nt, Artificial Sequence
  Description of Artificial Sequence: Synthetic oligonucleotide
  Antisense strand to SEQ ID NO: 211028
ugcuaaccuaguaauuucu

SEQ ID NO: 211030 - RNA, 19 nt, Artificial Sequence
  Description of Artificial Sequence: Synthetic oligonucleotide
  Sense strand starting at position 671 of SEQ ID NO: 2719
uguaauaacucuguaaaga

SEQ ID NO: 211031 - RNA, 19 nt, Artificial Sequence
  Description of Artificial Sequence: Synthetic oligonucleotide
  Antisense strand to SEQ ID NO: 211030
ucuuuacagaguuauuaca

SEQ ID NO: 211032 - RNA, 19 nt, Artificial Sequence
  Description of Artificial Sequence: Synthetic oligonucleotide
  Sense strand starting at position 732 of SEQ ID NO: 2719
uuaacagugccuugcaguu

SEQ ID NO: 211033 - RNA, 19 nt, Artificial Sequence
  Description of Artificial Sequence: Synthetic oligonucleotide
  Antisense strand to SEQ ID NO: 211032
aacugcaaggcacuguuaa

SEQ ID NO: 211034 - RNA, 19 nt, Artificial Sequence
  Description of Artificial Sequence: Synthetic oligonucleotide
  Sense strand starting at position 810 of SEQ ID NO: 2719
cgugauauacguuuaccgu

SEQ ID NO: 211035 - RNA, 19 nt, Artificial Sequence
  Description of Artificial Sequence: Synthetic oligonucleotide
  Antisense strand to SEQ ID NO: 211034
acgguaaacguauaucacg

SEQ ID NO: 211036 - RNA, 19 nt, Artificial Sequence
  Description of Artificial Sequence: Synthetic oligonucleotide
  Sense strand starting at position 811 of SEQ ID NO: 2719
gugauauacguuuaccguu

SEQ ID NO: 211037 - RNA, 19 nt, Artificial Sequence
  Description of Artificial Sequence: Synthetic oligonucleotide
  Antisense strand to SEQ ID NO: 211036
aacgguaaacguauaucac

SEQ ID NO: 211038 - RNA, 19 nt, Artificial Sequence
  Description of Artificial Sequence: Synthetic oligonucleotide
  Sense strand starting at position 813 of SEQ ID NO: 2719
gauauacguuuaccguuaa

SEQ ID NO: 211039 - RNA, 19 nt, Artificial Sequence
  Description of Artificial Sequence: Synthetic oligonucleotide
  Antisense strand to SEQ ID NO: 211038
uuaacgguaaacguauauc

SEQ ID NO: 211040 - RNA, 19 nt, Artificial Sequence
  Description of Artificial Sequence: Synthetic oligonucleotide
  Sense strand starting at position 1010 of SEQ ID NO: 2719
agagcuggaacguaauauu

SEQ ID NO: 211041 - RNA, 19 nt, Artificial Sequence
  Description of Artificial Sequence: Synthetic oligonucleotide
  Antisense strand to SEQ ID NO: 211040
aauauuacguuccagcucu

SEQ ID NO: 211042 - RNA, 19 nt, Artificial Sequence
  Description of Artificial Sequence: Synthetic oligonucleotide
  Sense strand starting at position 1013 of SEQ ID NO: 2719
gcuggaacguaauauuuag

SEQ ID NO: 211043 - RNA, 19 nt, Artificial Sequence
  Description of Artificial Sequence: Synthetic oligonucleotide
  Antisense strand to SEQ ID NO: 211042
cuaaauauuacguuccagc

SEQ ID NO: 211044 - RNA, 19 nt, Artificial Sequence
  Description of Artificial Sequence: Synthetic oligonucleotide
  Sense strand starting at position 1182 of SEQ ID NO: 2719
uaggcuugacgccaaauaa

SEQ ID NO: 211045 - RNA, 19 nt, Artificial Sequence
  Description of Artificial Sequence: Synthetic oligonucleotide
  Antisense strand to SEQ ID NO: 211044
uuauuuggcgucaagccua

SEQ ID NO: 211046 - RNA, 19 nt, Artificial Sequence
  Description of Artificial Sequence: Synthetic oligonucleotide
  Sense strand starting at position 1207 of SEQ ID NO: 2719
auaagaacugcugaucuuu

SEQ ID NO: 211047 - RNA, 19 nt, Artificial Sequence
  Description of Artificial Sequence: Synthetic oligonucleotide
  Antisense strand to SEQ ID NO: 211046
aaagaucagcaguucuuau

SEQ ID NO: 211048 - RNA, 19 nt, Artificial Sequence
  Description of Artificial Sequence: Synthetic oligonucleotide
  Sense strand starting at position 2702 of SEQ ID NO: 2719
cccagaccacuugguuuau

SEQ ID NO: 211049 - RNA, 19 nt, Artificial Sequence
  Description of Artificial Sequence: Synthetic oligonucleotide
  Antisense strand to SEQ ID NO: 211048
auaaaccaaguggucuggg

SEQ ID NO: 211050 - RNA, 19 nt, Artificial Sequence
  Description of Artificial Sequence: Synthetic oligonucleotide
  Sense strand starting at position 2742 of SEQ ID NO: 2719
ggcaaacgcuauccaacua

SEQ ID NO: 211051 - RNA, 19 nt, Artificial Sequence
  Description of Artificial Sequence: Synthetic oligonucleotide
  Antisense strand to SEQ ID NO: 211050
uaguuggauagcguuugcc

SEQ ID NO: 211052 - RNA, 19 nt, Artificial Sequence
  Description of Artificial Sequence: Synthetic oligonucleotide
  Sense strand starting at position 2778 of SEQ ID NO: 2719
uucuaaaugagguguugaa

SEQ ID NO: 211053 - RNA, 19 nt, Artificial Sequence
  Description of Artificial Sequence: Synthetic oligonucleotide
  Antisense strand to SEQ ID NO: 211052
uucaacaccucauuuagaa

SEQ ID NO: 211054 - RNA, 19 nt, Artificial Sequence
  Description of Artificial Sequence: Synthetic oligonucleotide
  Sense strand starting at position 2897 of SEQ ID NO: 2719
aggauuugaugugggaaca

SEQ ID NO: 211055 - RNA, 19 nt, Artificial Sequence
  Description of Artificial Sequence: Synthetic oligonucleotide
  Antisense strand to SEQ ID NO: 211054
uguucccacaucaaauccu

SEQ ID NO: 211056 - RNA, 19 nt, Artificial Sequence
  Description of Artificial Sequence: Synthetic oligonucleotide
  Sense strand starting at position 2938 of SEQ ID NO: 2719
uccuguauuucuuccugua

SEQ ID NO: 211057 - RNA, 19 nt, Artificial Sequence
  Description of Artificial Sequence: Synthetic oligonucleotide
  Antisense strand to SEQ ID NO: 211056
uacaggaagaaauacagga

SEQ ID NO: 211058 - RNA, 19 nt, Artificial Sequence
  Description of Artificial Sequence: Synthetic oligonucleotide
  Sense strand starting at position 2941 of SEQ ID NO: 2719
uguauuucuuccuguaaga

SEQ ID NO: 211059 - RNA, 19 nt, Artificial Sequence
  Description of Artificial Sequence: Synthetic oligonucleotide
  Antisense strand to SEQ ID NO: 211058
ucuuacaggaagaaauaca

SEQ ID NO: 211060 - RNA, 19 nt, Artificial Sequence
  Description of Artificial Sequence: Synthetic oligonucleotide
  Sense strand starting at position 2969 of SEQ ID NO: 2719
ugagcuucacucggaguuu

SEQ ID NO: 211061 - RNA, 19 nt, Artificial Sequence
  Description of Artificial Sequence: Synthetic oligonucleotide
  Antisense strand to SEQ ID NO: 211060
aaacuccgagugaagcuca

SEQ ID NO: 211062 - RNA, 19 nt, Artificial Sequence
  Description of Artificial Sequence: Synthetic oligonucleotide
  Sense strand starting at position 2978 of SEQ ID NO: 2719
cucggaguuuguguuguga

SEQ ID NO: 211063 - RNA, 19 nt, Artificial Sequence
  Description of Artificial Sequence: Synthetic oligonucleotide
  Antisense strand to SEQ ID NO: 211062
ucacaacacaaacuccgag

SEQ ID NO: 211064 - RNA, 19 nt, Artificial Sequence
  Description of Artificial Sequence: Synthetic oligonucleotide
  Sense strand starting at position 2986 of SEQ ID NO: 2719
uuguguugugaauaggguu

SEQ ID NO: 211065 - RNA, 19 nt, Artificial Sequence
  Description of Artificial Sequence: Synthetic oligonucleotide
  Antisense strand to SEQ ID NO: 211064
aacccuauucacaacacaa

SEQ ID NO: 211066 - RNA, 19 nt, Artificial Sequence
  Description of Artificial Sequence: Synthetic oligonucleotide
  Sense strand starting at position 2994 of SEQ ID NO: 2719
ugaauaggguuucuaaguu

SEQ ID NO: 211067 - RNA, 19 nt, Artificial Sequence
  Description of Artificial Sequence: Synthetic oligonucleotide
  Antisense strand to SEQ ID NO: 211066
aacuuagaaacccuauuca

SEQ ID NO: 211068 - RNA, 19 nt, Artificial Sequence
  Description of Artificial Sequence: Synthetic oligonucleotide
  Sense strand starting at position 2998 of SEQ ID NO: 2719
uaggguuucuaaguuuaaa

SEQ ID NO: 211069 - RNA, 19 nt, Artificial Sequence
  Description of Artificial Sequence: Synthetic oligonucleotide
  Antisense strand to SEQ ID NO: 211068
uuuaaacuuagaaacccua

SEQ ID NO: 211070 - RNA, 19 nt, Artificial Sequence
  Description of Artificial Sequence: Synthetic oligonucleotide
  Sense strand starting at position 3349 of SEQ ID NO: 2719
ggaggcaagugauuguuau

SEQ ID NO: 211071 - RNA, 19 nt, Artificial Sequence
  Description of Artificial Sequence: Synthetic oligonucleotide
  Antisense strand to SEQ ID NO: 211070
auaacaaucacuugccucc

SEQ ID NO: 211072 - RNA, 19 nt, Artificial Sequence
  Description of Artificial Sequence: Synthetic oligonucleotide
  Sense strand starting at position 3350 of SEQ ID NO: 2719
gaggcaagugauuguuaug

SEQ ID NO: 211073 - RNA, 19 nt, Artificial Sequence
  Description of Artificial Sequence: Synthetic oligonucleotide
  Antisense strand to SEQ ID NO: 211072
cauaacaaucacuugccuc

SEQ ID NO: 211074 - RNA, 19 nt, Artificial Sequence
  Description of Artificial Sequence: Synthetic oligonucleotide
  Sense strand starting at position 3408 of SEQ ID NO: 2719
ugauuauaguaggcaguuu

SEQ ID NO: 211075 - RNA, 19 nt, Artificial Sequence
  Description of Artificial Sequence: Synthetic oligonucleotide
  Antisense strand to SEQ ID NO: 211074
aaacugccuacuauaauca

SEQ ID NO: 211076 - RNA, 19 nt, Artificial Sequence
  Description of Artificial Sequence: Synthetic oligonucleotide
  Sense strand starting at position 3478 of SEQ ID NO: 2719
gcuuacaauuucuggaaua

SEQ ID NO: 211077 - RNA, 19 nt, Artificial Sequence
  Description of Artificial Sequence: Synthetic oligonucleotide
  Antisense strand to SEQ ID NO: 211076
uauuccagaaauuguaagc

SEQ ID NO: 211078 - RNA, 19 nt, Artificial Sequence
  Description of Artificial Sequence: Synthetic oligonucleotide
  Sense strand starting at position 3479 of SEQ ID NO: 2719
cuuacaauuucuggaauag

SEQ ID NO: 211079 - RNA, 19 nt, Artificial Sequence
  Description of Artificial Sequence: Synthetic oligonucleotide
  Antisense strand to SEQ ID NO: 211078
cuauuccagaaauuguaag

SEQ ID NO: 211080 - RNA, 19 nt, Artificial Sequence
  Description of Artificial Sequence: Synthetic oligonucleotide
  Sense strand starting at position 3544 of SEQ ID NO: 2719
caguguuucccggcuguaa

SEQ ID NO: 211081 - RNA, 19 nt, Artificial Sequence
  Description of Artificial Sequence: Synthetic oligonucleotide
  Antisense strand to SEQ ID NO: 211080
uuacagccgggaaacacug

SEQ ID NO: 211082 - RNA, 19 nt, Artificial Sequence
  Description of Artificial Sequence: Synthetic oligonucleotide
  Sense strand starting at position 3545 of SEQ ID NO: 2719
aguguuucccggcuguaau

SEQ ID NO: 211083 - RNA, 19 nt, Artificial Sequence
  Description of Artificial Sequence: Synthetic oligonucleotide
  Antisense strand to SEQ ID NO: 211082
auuacagccgggaaacacu

SEQ ID NO: 211084 - RNA, 19 nt, Artificial Sequence
  Description of Artificial Sequence: Synthetic oligonucleotide
  Sense strand starting at position 3578 of SEQ ID NO: 2719
aggccaaaguguucuagac

SEQ ID NO: 211085 - RNA, 19 nt, Artificial Sequence
  Description of Artificial Sequence: Synthetic oligonucleotide
  Antisense strand to SEQ ID NO: 211084
gucuagaacacuuuggccu

SEQ ID NO: 211086 - RNA, 19 nt, Artificial Sequence
  Description of Artificial Sequence: Synthetic oligonucleotide
  Sense strand starting at position 3684 of SEQ ID NO: 2719
uugggaguaucgcuucaac

SEQ ID NO: 211087 - RNA, 19 nt, Artificial Sequence
  Description of Artificial Sequence: Synthetic oligonucleotide
  Antisense strand to SEQ ID NO: 211086
guugaagcgauacucccaa

SEQ ID NO: 211088 - RNA, 19 nt, Artificial Sequence
  Description of Artificial Sequence: Synthetic oligonucleotide
  Sense strand starting at position 3879 of SEQ ID NO: 2719
acaauagauuguuucuguu

SEQ ID NO: 211089 - RNA, 19 nt, Artificial Sequence
  Description of Artificial Sequence: Synthetic oligonucleotide
  Antisense strand to SEQ ID NO: 211088
aacagaaacaaucuauugu

SEQ ID NO: 211090 - RNA, 19 nt, Artificial Sequence
  Description of Artificial Sequence: Synthetic oligonucleotide
  Sense strand starting at position 3881 of SEQ ID NO: 2719
aauagauuguuucuguugu

SEQ ID NO: 211091 - RNA, 19 nt, Artificial Sequence
  Description of Artificial Sequence: Synthetic oligonucleotide
  Antisense strand to SEQ ID NO: 211090
acaacagaaacaaucuauu

SEQ ID NO: 211092 - RNA, 19 nt, Artificial Sequence
  Description of Artificial Sequence: Synthetic oligonucleotide
  Sense strand starting at position 3883 of SEQ ID NO: 2719
uagauuguuucuguuguga

SEQ ID NO: 211093 - RNA, 19 nt, Artificial Sequence
  Description of Artificial Sequence: Synthetic oligonucleotide
  Antisense strand to SEQ ID NO: 211092
ucacaacagaaacaaucua

SEQ ID NO: 211094 - RNA, 19 nt, Artificial Sequence
  Description of Artificial Sequence: Synthetic oligonucleotide
  Sense strand starting at position 3979 of SEQ ID NO: 2719
ggguguucuagcuaacaag

SEQ ID NO: 211095 - RNA, 19 nt, Artificial Sequence
  Description of Artificial Sequence: Synthetic oligonucleotide
  Antisense strand to SEQ ID NO: 211094
cuuguuagcuagaacaccc

SEQ ID NO: 211096 - RNA, 19 nt, Artificial Sequence
  Description of Artificial Sequence: Synthetic oligonucleotide
  Sense strand starting at position 96 of SEQ ID NO: 2720
cgguuuagagucugacgaa

SEQ ID NO: 211097 - RNA, 19 nt, Artificial Sequence
  Description of Artificial Sequence: Synthetic oligonucleotide
  Antisense strand to SEQ ID NO: 211096
uucgucagacucuaaaccg

SEQ ID NO: 211098 - RNA, 19 nt, Artificial Sequence
  Description of Artificial Sequence: Synthetic oligonucleotide
  Sense strand starting at position 138 of SEQ ID NO: 2720
aggauucuauuggcaggau

SEQ ID NO: 211099 - RNA, 19 nt, Artificial Sequence
  Description of Artificial Sequence: Synthetic oligonucleotide
  Antisense strand to SEQ ID NO: 211098
auccugccaauagaauccu

SEQ ID NO: 211100 - RNA, 19 nt, Artificial Sequence
  Description of Artificial Sequence: Synthetic oligonucleotide
  Sense strand starting at position 320 of SEQ ID NO: 2720
gguauugaagucuguuaag

SEQ ID NO: 211101 - RNA, 19 nt, Artificial Sequence
  Description of Artificial Sequence: Synthetic oligonucleotide
  Antisense strand to SEQ ID NO: 211100
cuuaacagacuucaauacc

SEQ ID NO: 211102 - RNA, 19 nt, Artificial Sequence
  Description of Artificial Sequence: Synthetic oligonucleotide
  Sense strand starting at position 330 of SEQ ID NO: 2720
ucuguuaagucaccggaga

SEQ ID NO: 211103 - RNA, 19 nt, Artificial Sequence
  Description of Artificial Sequence: Synthetic oligonucleotide
  Antisense strand to SEQ ID NO: 211102
ucuccggugacuuaacaga

SEQ ID NO: 211104 - RNA, 19 nt, Artificial Sequence
  Description of Artificial Sequence: Synthetic oligonucleotide
  Sense strand starting at position 331 of SEQ ID NO: 2720
cuguuaagucaccggagaa

SEQ ID NO: 211105 - RNA, 19 nt, Artificial Sequence
  Description of Artificial Sequence: Synthetic oligonucleotide
  Antisense strand to SEQ ID NO: 211104
uucuccggugacuuaacag

SEQ ID NO: 211106 - RNA, 19 nt, Artificial Sequence
  Description of Artificial Sequence: Synthetic oligonucleotide
  Sense strand starting at position 332 of SEQ ID NO: 2720
uguuaagucaccggagaau

SEQ ID NO: 211107 - RNA, 19 nt, Artificial Sequence
  Description of Artificial Sequence: Synthetic oligonucleotide
  Antisense strand to SEQ ID NO: 211106
auucuccggugacuuaaca

SEQ ID NO: 211108 - RNA, 19 nt, Artificial Sequence
  Description of Artificial Sequence: Synthetic oligonucleotide
  Sense strand starting at position 360 of SEQ ID NO: 2720
uguauuugccaccguggga

SEQ ID NO: 211109 - RNA, 19 nt, Artificial Sequence
  Description of Artificial Sequence: Synthetic oligonucleotide
  Antisense strand to SEQ ID NO: 211108
ucccacgguggcaaauaca

SEQ ID NO: 211110 - RNA, 19 nt, Artificial Sequence
  Description of Artificial Sequence: Synthetic oligonucleotide
  Sense strand starting at position 390 of SEQ ID NO: 2720
aucagaacuccguggcuaa

SEQ ID NO: 211111 - RNA, 19 nt, Artificial Sequence
  Description of Artificial Sequence: Synthetic oligonucleotide
  Antisense strand to SEQ ID NO: 211110
uuagccacggaguucugau

SEQ ID NO: 211112 - RNA, 19 nt, Artificial Sequence
  Description of Artificial Sequence: Synthetic oligonucleotide
  Sense strand starting at position 391 of SEQ ID NO: 2720
ucagaacuccguggcuaaa

SEQ ID NO: 211113 - RNA, 19 nt, Artificial Sequence
  Description of Artificial Sequence: Synthetic oligonucleotide
  Antisense strand to SEQ ID NO: 211112
uuuagccacggaguucuga

SEQ ID NO: 211114 - RNA, 19 nt, Artificial Sequence
  Description of Artificial Sequence: Synthetic oligonucleotide
  Sense strand starting at position 402 of SEQ ID NO: 2720
uggcuaaacuccuuugagu

SEQ ID NO: 211115 - RNA, 19 nt, Artificial Sequence
  Description of Artificial Sequence: Synthetic oligonucleotide
  Antisense strand to SEQ ID NO: 211114
acucaaaggaguuuagcca

SEQ ID NO: 211116 - RNA, 19 nt, Artificial Sequence
  Description of Artificial Sequence: Synthetic oligonucleotide
  Sense strand starting at position 404 of SEQ ID NO: 2720
gcuaaacuccuuugaguua

SEQ ID NO: 211117 - RNA, 19 nt, Artificial Sequence
  Description of Artificial Sequence: Synthetic oligonucleotide
  Antisense strand to SEQ ID NO: 211116
uaacucaaaggaguuuagc

SEQ ID NO: 211118 - RNA, 19 nt, Artificial Sequence
  Description of Artificial Sequence: Synthetic oligonucleotide
  Sense strand starting at position 486 of SEQ ID NO: 2720
gaucaagaacucuggaguu

SEQ ID NO: 211119 - RNA, 19 nt, Artificial Sequence
  Description of Artificial Sequence: Synthetic oligonucleotide
  Antisense strand to SEQ ID NO: 211118
aacuccagaguucuugauc

SEQ ID NO: 211120 - RNA, 19 nt, Artificial Sequence
  Description of Artificial Sequence: Synthetic oligonucleotide
  Sense strand starting at position 806 of SEQ ID NO: 2720
aaauuauaguuggaaggaa

SEQ ID NO: 211121 - RNA, 19 nt, Artificial Sequence
  Description of Artificial Sequence: Synthetic oligonucleotide
  Antisense strand to SEQ ID NO: 211120
uuccuuccaacuauaauuu

SEQ ID NO: 211122 - RNA, 19 nt, Artificial Sequence
  Description of Artificial Sequence: Synthetic oligonucleotide
  Sense strand starting at position 865 of SEQ ID NO: 2720
accauauagugucuccuau

SEQ ID NO: 211123 - RNA, 19 nt, Artificial Sequence
  Description of Artificial Sequence: Synthetic oligonucleotide
  Antisense strand to SEQ ID NO: 211122
auaggagacacuauauggu

SEQ ID NO: 211124 - RNA, 19 nt, Artificial Sequence
  Description of Artificial Sequence: Synthetic oligonucleotide
  Sense strand starting at position 917 of SEQ ID NO: 2720
cucaaacaucugggucuaa

SEQ ID NO: 211125 - RNA, 19 nt, Artificial Sequence
  Description of Artificial Sequence: Synthetic oligonucleotide
  Antisense strand to SEQ ID NO: 211124
uuagacccagauguuugag

SEQ ID NO: 211126 - RNA, 19 nt, Artificial Sequence
  Description of Artificial Sequence: Synthetic oligonucleotide
  Sense strand starting at position 918 of SEQ ID NO: 2720
ucaaacaucugggucuaaa

SEQ ID NO: 211127 - RNA, 19 nt, Artificial Sequence
  Description of Artificial Sequence: Synthetic oligonucleotide
  Antisense strand to SEQ ID NO: 211126
uuuagacccagauguuuga

SEQ ID NO: 211128 - RNA, 19 nt, Artificial Sequence
  Description of Artificial Sequence: Synthetic oligonucleotide
  Sense strand starting at position 1011 of SEQ ID NO: 2720
guaccaucuggauggguua

SEQ ID NO: 211129 - RNA, 19 nt, Artificial Sequence
  Description of Artificial Sequence: Synthetic oligonucleotide
  Antisense strand to SEQ ID NO: 211128
uaacccauccagaugguac

SEQ ID NO: 211130 - RNA, 19 nt, Artificial Sequence
  Description of Artificial Sequence: Synthetic oligonucleotide
  Sense strand starting at position 1042 of SEQ ID NO: 2720
ggaugaguacuccgaaguu

SEQ ID NO: 211131 - RNA, 19 nt, Artificial Sequence
  Description of Artificial Sequence: Synthetic oligonucleotide
  Antisense strand to SEQ ID NO: 211130
aacuucggaguacucaucc

SEQ ID NO: 211132 - RNA, 19 nt, Artificial Sequence
  Description of Artificial Sequence: Synthetic oligonucleotide
  Sense strand starting at position 1068 of SEQ ID NO: 2720
uugaguuuccauugagaaa

SEQ ID NO: 211133 - RNA, 19 nt, Artificial Sequence
  Description of Artificial Sequence: Synthetic oligonucleotide
  Antisense strand to SEQ ID NO: 211132
uuucucaauggaaacucaa

SEQ ID NO: 211134 - RNA, 19 nt, Artificial Sequence
  Description of Artificial Sequence: Synthetic oligonucleotide
  Sense strand starting at position 2093 of SEQ ID NO: 2720
aaccaaucauggucagagu

SEQ ID NO: 211135 - RNA, 19 nt, Artificial Sequence
  Description of Artificial Sequence: Synthetic oligonucleotide
  Antisense strand to SEQ ID NO: 211134
acucugaccaugauugguu

SEQ ID NO: 211136 - RNA, 19 nt, Artificial Sequence
  Description of Artificial Sequence: Synthetic oligonucleotide
  Sense strand starting at position 2094 of SEQ ID NO: 2720
accaaucauggucagaguu

SEQ ID NO: 211137 - RNA, 19 nt, Artificial Sequence
  Description of Artificial Sequence: Synthetic oligonucleotide
  Antisense strand to SEQ ID NO: 211136
aacucugaccaugauuggu

SEQ ID NO: 211138 - RNA, 19 nt, Artificial Sequence
  Description of Artificial Sequence: Synthetic oligonucleotide
  Sense strand starting at position 2265 of SEQ ID NO: 2720
gcauuuguaacuggaagcu

SEQ ID NO: 211139 - RNA, 19 nt, Artificial Sequence
  Description of Artificial Sequence: Synthetic oligonucleotide
  Antisense strand to SEQ ID NO: 211138
agcuuccaguuacaaaugc

SEQ ID NO: 211140 - RNA, 19 nt, Artificial Sequence
  Description of Artificial Sequence: Synthetic oligonucleotide
  Sense strand starting at position 2285 of SEQ ID NO: 2720
ugucaaugaucucuguaga

SEQ ID NO: 211141 - RNA, 19 nt, Artificial Sequence
  Description of Artificial Sequence: Synthetic oligonucleotide
  Antisense strand to SEQ ID NO: 211140
ucuacagagaucauugaca

SEQ ID NO: 211142 - RNA, 19 nt, Artificial Sequence
  Description of Artificial Sequence: Synthetic oligonucleotide
  Sense strand starting at position 2286 of SEQ ID NO: 2720
gucaaugaucucuguagaa

SEQ ID NO: 211143 - RNA, 19 nt, Artificial Sequence
  Description of Artificial Sequence: Synthetic oligonucleotide
  Antisense strand to SEQ ID NO: 211142
uucuacagagaucauugac

SEQ ID NO: 211144 - RNA, 19 nt, Artificial Sequence
  Description of Artificial Sequence: Synthetic oligonucleotide
  Sense strand starting at position 2299 of SEQ ID NO: 2720
guagaaagccguuauuagu

SEQ ID NO: 211145 - RNA, 19 nt, Artificial Sequence
  Description of Artificial Sequence: Synthetic oligonucleotide
  Antisense strand to SEQ ID NO: 211144
acuaauaacggcuuucuac

SEQ ID NO: 211146 - RNA, 19 nt, Artificial Sequence
  Description of Artificial Sequence: Synthetic oligonucleotide
  Sense strand starting at position 2315 of SEQ ID NO: 2720
aguaaagaguucgcuccau

SEQ ID NO: 211147 - RNA, 19 nt, Artificial Sequence
  Description of Artificial Sequence: Synthetic oligonucleotide
  Antisense strand to SEQ ID NO: 211146
auggagcgaacucuuuacu

SEQ ID NO: 211148 - RNA, 19 nt, Artificial Sequence
  Description of Artificial Sequence: Synthetic oligonucleotide
  Sense strand starting at position 2356 of SEQ ID NO: 2720
gacagcuuucguuugcuca

SEQ ID NO: 211149 - RNA, 19 nt, Artificial Sequence
  Description of Artificial Sequence: Synthetic oligonucleotide
  Antisense strand to SEQ ID NO: 211148
ugagcaaacgaaagcuguc

SEQ ID NO: 211150 - RNA, 19 nt, Artificial Sequence
  Description of Artificial Sequence: Synthetic oligonucleotide
  Sense strand starting at position 2364 of SEQ ID NO: 2720
ucguuugcucacuaaacuu

SEQ ID NO: 211151 - RNA, 19 nt, Artificial Sequence
  Description of Artificial Sequence: Synthetic oligonucleotide
  Antisense strand to SEQ ID NO: 211150
aaguuuagugagcaaacga

SEQ ID NO: 211152 - RNA, 19 nt, Artificial Sequence
  Description of Artificial Sequence: Synthetic oligonucleotide
  Sense strand starting at position 2500 of SEQ ID NO: 2720
uccauaaagaguuguggcu

SEQ ID NO: 211153 - RNA, 19 nt, Artificial Sequence
  Description of Artificial Sequence: Synthetic oligonucleotide
  Antisense strand to SEQ ID NO: 211152
agccacaacucuuuaugga

SEQ ID NO: 211154 - RNA, 19 nt, Artificial Sequence
  Description of Artificial Sequence: Synthetic oligonucleotide
  Sense strand starting at position 2666 of SEQ ID NO: 2720
ccagguuucucuucuugua

SEQ ID NO: 211155 - RNA, 19 nt, Artificial Sequence
  Description of Artificial Sequence: Synthetic oligonucleotide
  Antisense strand to SEQ ID NO: 211154
uacaagaagagaaaccugg

SEQ ID NO: 211156 - RNA, 19 nt, Artificial Sequence
  Description of Artificial Sequence: Synthetic oligonucleotide
  Sense strand starting at position 2799 of SEQ ID NO: 2720
gccagacaguguuccaacu

SEQ ID NO: 211157 - RNA, 19 nt, Artificial Sequence
  Description of Artificial Sequence: Synthetic oligonucleotide
  Antisense strand to SEQ ID NO: 211156
aguuggaacacugucuggc

SEQ ID NO: 211158 - RNA, 19 nt, Artificial Sequence
  Description of Artificial Sequence: Synthetic oligonucleotide
  Sense strand starting at position 3254 of SEQ ID NO: 2720
ugagcagucauguaagcuu

SEQ ID NO: 211159 - RNA, 19 nt, Artificial Sequence
  Description of Artificial Sequence: Synthetic oligonucleotide
  Antisense strand to SEQ ID NO: 211158
aagcuuacaugacugcuca

SEQ ID NO: 211160 - RNA, 19 nt, Artificial Sequence
  Description of Artificial Sequence: Synthetic oligonucleotide
  Sense strand starting at position 3674 of SEQ ID NO: 2720
ucugaaacccuaggaaugu

SEQ ID NO: 211161 - RNA, 19 nt, Artificial Sequence
  Description of Artificial Sequence: Synthetic oligonucleotide
  Antisense strand to SEQ ID NO: 211160
acauuccuaggguuucaga

SEQ ID NO: 211162 - RNA, 19 nt, Artificial Sequence
  Description of Artificial Sequence: Synthetic oligonucleotide
  Sense strand starting at position 3683 of SEQ ID NO: 2720
cuaggaaugucauuagaua

SEQ ID NO: 211163 - RNA, 19 nt, Artificial Sequence
  Description of Artificial Sequence: Synthetic oligonucleotide
  Antisense strand to SEQ ID NO: 211162
uaucuaaugacauuccuag

SEQ ID NO: 211164 - RNA, 19 nt, Artificial Sequence
  Description of Artificial Sequence: Synthetic oligonucleotide
  Sense strand starting at position 3760 of SEQ ID NO: 2720
gccugcauuuaacaacaga

SEQ ID NO: 211165 - RNA, 19 nt, Artificial Sequence
  Description of Artificial Sequence: Synthetic oligonucleotide
  Antisense strand to SEQ ID NO: 211164
ucuguuguuaaaugcaggc

SEQ ID NO: 211166 - RNA, 19 nt, Artificial Sequence
  Description of Artificial Sequence: Synthetic oligonucleotide
  Sense strand starting at position 3827 of SEQ ID NO: 2720
acuugcuaaccaggaagau

SEQ ID NO: 211167 - RNA, 19 nt, Artificial Sequence
  Description of Artificial Sequence: Synthetic oligonucleotide
  Antisense strand to SEQ ID NO: 211166
aucuuccugguuagcaagu

SEQ ID NO: 211168 - RNA, 19 nt, Artificial Sequence
  Description of Artificial Sequence: Synthetic oligonucleotide
  Sense strand starting at position 3839 of SEQ ID NO: 2720
ggaagauauugggaagcau

SEQ ID NO: 211169 - RNA, 19 nt, Artificial Sequence
  Description of Artificial Sequence: Synthetic oligonucleotide
  Antisense strand to SEQ ID NO: 211168
augcuucccaauaucuucc

SEQ ID NO: 211170 - RNA, 19 nt, Artificial Sequence
  Description of Artificial Sequence: Synthetic oligonucleotide
  Sense strand starting at position 3853 of SEQ ID NO: 2720
agcauuguuacggaaauag

SEQ ID NO: 211171 - RNA, 19 nt, Artificial Sequence
  Description of Artificial Sequence: Synthetic oligonucleotide
  Antisense strand to SEQ ID NO: 211170
cuauuuccguaacaaugcu

SEQ ID NO: 211172 - RNA, 19 nt, Artificial Sequence
  Description of Artificial Sequence: Synthetic oligonucleotide
  Sense strand starting at position 3892 of SEQ ID NO: 2720
aagggaauauuagagagaa

SEQ ID NO: 211173 - RNA, 19 nt, Artificial Sequence
  Description of Artificial Sequence: Synthetic oligonucleotide
  Antisense strand to SEQ ID NO: 211172
uucucucuaauauucccuu

SEQ ID NO: 211174 - RNA, 19 nt, Artificial Sequence
  Description of Artificial Sequence: Synthetic oligonucleotide
  Sense strand starting at position 3969 of SEQ ID NO: 2720
ggaggaaugugcuuugaau

SEQ ID NO: 211175 - RNA, 19 nt, Artificial Sequence
  Description of Artificial Sequence: Synthetic oligonucleotide
  Antisense strand to SEQ ID NO: 211174
auucaaagcacauuccucc

SEQ ID NO: 211176 - RNA, 19 nt, Artificial Sequence
  Description of Artificial Sequence: Synthetic oligonucleotide
  Sense strand starting at position 42 of SEQ ID NO: 2721
uuguuuguugaauaucaac

SEQ ID NO: 211177 - RNA, 19 nt, Artificial Sequence
  Description of Artificial Sequence: Synthetic oligonucleotide
  Antisense strand to SEQ ID NO: 211176
guugauauucaacaaacaa

SEQ ID NO: 211178 - RNA, 19 nt, Artificial Sequence
  Description of Artificial Sequence: Synthetic oligonucleotide
  Sense strand starting at position 478 of SEQ ID NO: 2721
ccagguguauuaucuccua

SEQ ID NO: 211179 - RNA, 19 nt, Artificial Sequence
  Description of Artificial Sequence: Synthetic oligonucleotide
  Antisense strand to SEQ ID NO: 211178
uaggagauaauacaccugg

SEQ ID NO: 211180 - RNA, 19 nt, Artificial Sequence
  Description of Artificial Sequence: Synthetic oligonucleotide
  Sense strand starting at position 481 of SEQ ID NO: 2721
gguguauuaucuccuaaac

SEQ ID NO: 211181 - RNA, 19 nt, Artificial Sequence
  Description of Artificial Sequence: Synthetic oligonucleotide
  Antisense strand to SEQ ID NO: 211180
guuuaggagauaauacacc

SEQ ID NO: 211182 - RNA, 19 nt, Artificial Sequence
  Description of Artificial Sequence: Synthetic oligonucleotide
  Sense strand starting at position 591 of SEQ ID NO: 2721
cuaucuuagcgccaucaca

SEQ ID NO: 211183 - RNA, 19 nt, Artificial Sequence
  Description of Artificial Sequence: Synthetic oligonucleotide
  Antisense strand to SEQ ID NO: 211182
ugugauggcgcuaagauag

SEQ ID NO: 211184 - RNA, 19 nt, Artificial Sequence
  Description of Artificial Sequence: Synthetic oligonucleotide
  Sense strand starting at position 616 of SEQ ID NO: 2721
guuacuugggcugaugacu

SEQ ID NO: 211185 - RNA, 19 nt, Artificial Sequence
  Description of Artificial Sequence: Synthetic oligonucleotide
  Antisense strand to SEQ ID NO: 211184
agucaucagcccaaguaac

SEQ ID NO: 211186 - RNA, 19 nt, Artificial Sequence
  Description of Artificial Sequence: Synthetic oligonucleotide
  Sense strand starting at position 641 of SEQ ID NO: 2721
acauguaagguguacuuua

SEQ ID NO: 211187 - RNA, 19 nt, Artificial Sequence
  Description of Artificial Sequence: Synthetic oligonucleotide
  Antisense strand to SEQ ID NO: 211186
uaaaguacaccuuacaugu

SEQ ID NO: 211188 - RNA, 19 nt, Artificial Sequence
  Description of Artificial Sequence: Synthetic oligonucleotide
  Sense strand starting at position 657 of SEQ ID NO: 2721
uuauauacgugggucuuua

SEQ ID NO: 211189 - RNA, 19 nt, Artificial Sequence
  Description of Artificial Sequence: Synthetic oligonucleotide
  Antisense strand to SEQ ID NO: 211188
uaaagacccacguauauaa

SEQ ID NO: 211190 - RNA, 19 nt, Artificial Sequence
  Description of Artificial Sequence: Synthetic oligonucleotide
  Sense strand starting at position 661 of SEQ ID NO: 2721
auacgugggucuuuauaug

SEQ ID NO: 211191 - RNA, 19 nt, Artificial Sequence
  Description of Artificial Sequence: Synthetic oligonucleotide
  Antisense strand to SEQ ID NO: 211190
cauauaaagacccacguau

SEQ ID NO: 211192 - RNA, 19 nt, Artificial Sequence
  Description of Artificial Sequence: Synthetic oligonucleotide
  Sense strand starting at position 669 of SEQ ID NO: 2721
gucuuuauaugcuuucuca

SEQ ID NO: 211193 - RNA, 19 nt, Artificial Sequence
  Description of Artificial Sequence: Synthetic oligonucleotide
  Antisense strand to SEQ ID NO: 211192
ugagaaagcauauaaagac

SEQ ID NO: 211194 - RNA, 19 nt, Artificial Sequence
  Description of Artificial Sequence: Synthetic oligonucleotide
  Sense strand starting at position 990 of SEQ ID NO: 2721
agugaaucuuuggcacaga

SEQ ID NO: 211195 - RNA, 19 nt, Artificial Sequence
  Description of Artificial Sequence: Synthetic oligonucleotide
  Antisense strand to SEQ ID NO: 211194
ucugugccaaagauucacu

SEQ ID NO: 211196 - RNA, 19 nt, Artificial Sequence
  Description of Artificial Sequence: Synthetic oligonucleotide
  Sense strand starting at position 993 of SEQ ID NO: 2721
gaaucuuuggcacagaggu

SEQ ID NO: 211197 - RNA, 19 nt, Artificial Sequence
  Description of Artificial Sequence: Synthetic oligonucleotide
  Antisense strand to SEQ ID NO: 211196
accucugugccaaagauuc

SEQ ID NO: 211198 - RNA, 19 nt, Artificial Sequence
  Description of Artificial Sequence: Synthetic oligonucleotide
  Sense strand starting at position 995 of SEQ ID NO: 2721
aucuuuggcacagagguua

SEQ ID NO: 211199 - RNA, 19 nt, Artificial Sequence
  Description of Artificial Sequence: Synthetic oligonucleotide
  Antisense strand to SEQ ID NO: 211198
uaaccucugugccaaagau

SEQ ID NO: 211200 - RNA, 19 nt, Artificial Sequence
  Description of Artificial Sequence: Synthetic oligonucleotide
  Sense strand starting at position 1241 of SEQ ID NO: 2721
aauuuagacucggagaguu

SEQ ID NO: 211201 - RNA, 19 nt, Artificial Sequence
  Description of Artificial Sequence: Synthetic oligonucleotide
  Antisense strand to SEQ ID NO: 211200
aacucuccgagucuaaauu

SEQ ID NO: 211202 - RNA, 19 nt, Artificial Sequence
  Description of Artificial Sequence: Synthetic oligonucleotide
  Sense strand starting at position 1332 of SEQ ID NO: 2721
gaaagauacugugcauucu

SEQ ID NO: 211203 - RNA, 19 nt, Artificial Sequence
  Description of Artificial Sequence: Synthetic oligonucleotide
  Antisense strand to SEQ ID NO: 211202
agaaugcacaguaucuuuc

SEQ ID NO: 211204 - RNA, 19 nt, Artificial Sequence
  Description of Artificial Sequence: Synthetic oligonucleotide
  Sense strand starting at position 1385 of SEQ ID NO: 2721
agcgucagaucccuaguga

SEQ ID NO: 211205 - RNA, 19 nt, Artificial Sequence
  Description of Artificial Sequence: Synthetic oligonucleotide
  Antisense strand to SEQ ID NO: 211204
ucacuagggaucugacgcu

SEQ ID NO: 211206 - RNA, 19 nt, Artificial Sequence
  Description of Artificial Sequence: Synthetic oligonucleotide
  Sense strand starting at position 1386 of SEQ ID NO: 2721
gcgucagaucccuagugaa

SEQ ID NO: 211207 - RNA, 19 nt, Artificial Sequence
  Description of Artificial Sequence: Synthetic oligonucleotide
  Antisense strand to SEQ ID NO: 211206
uucacuagggaucugacgc

SEQ ID NO: 211208 - RNA, 19 nt, Artificial Sequence
  Description of Artificial Sequence: Synthetic oligonucleotide
  Sense strand starting at position 1443 of SEQ ID NO: 2721
cuccaauaugaaugaugca

SEQ ID NO: 211209 - RNA, 19 nt, Artificial Sequence
  Description of Artificial Sequence: Synthetic oligonucleotide
  Antisense strand to SEQ ID NO: 211208
ugcaucauucauauuggag

SEQ ID NO: 211210 - RNA, 19 nt, Artificial Sequence
  Description of Artificial Sequence: Synthetic oligonucleotide
  Sense strand starting at position 1535 of SEQ ID NO: 2721
uggcgaucaucggcagaaa

SEQ ID NO: 211211 - RNA, 19 nt, Artificial Sequence
  Description of Artificial Sequence: Synthetic oligonucleotide
  Antisense strand to SEQ ID NO: 211210
uuucugccgaugaucgcca

SEQ ID NO: 211212 - RNA, 19 nt, Artificial Sequence
  Description of Artificial Sequence: Synthetic oligonucleotide
  Sense strand starting at position 1749 of SEQ ID NO: 2721
gcuugucgcgguccugaua

SEQ ID NO: 211213 - RNA, 19 nt, Artificial Sequence
  Description of Artificial Sequence: Synthetic oligonucleotide
  Antisense strand to SEQ ID NO: 211212
uaucaggaccgcgacaagc

SEQ ID NO: 211214 - RNA, 19 nt, Artificial Sequence
  Description of Artificial Sequence: Synthetic oligonucleotide
  Sense strand starting at position 2911 of SEQ ID NO: 2721
ggauaugacugagucuguu

SEQ ID NO: 211215 - RNA, 19 nt, Artificial Sequence
  Description of Artificial Sequence: Synthetic oligonucleotide
  Antisense strand to SEQ ID NO: 211214
aacagacucagucauaucc

SEQ ID NO: 211216 - RNA, 19 nt, Artificial Sequence
  Description of Artificial Sequence: Synthetic oligonucleotide
  Sense strand starting at position 3003 of SEQ ID NO: 2721
ggaaugaggcgagguuagu

SEQ ID NO: 211217 - RNA, 19 nt, Artificial Sequence
  Description of Artificial Sequence: Synthetic oligonucleotide
  Antisense strand to SEQ ID NO: 211216
acuaaccucgccucauucc

SEQ ID NO: 211218 - RNA, 19 nt, Artificial Sequence
  Description of Artificial Sequence: Synthetic oligonucleotide
  Sense strand starting at position 3013 of SEQ ID NO: 2721
gagguuaguuaucucguau

SEQ ID NO: 211219 - RNA, 19 nt, Artificial Sequence
  Description of Artificial Sequence: Synthetic oligonucleotide
  Antisense strand to SEQ ID NO: 211218
auacgagauaacuaaccuc

SEQ ID NO: 211220 - RNA, 19 nt, Artificial Sequence
  Description of Artificial Sequence: Synthetic oligonucleotide
  Sense strand starting at position 3022 of SEQ ID NO: 2721
uaucucguauugguugaua

SEQ ID NO: 211221 - RNA, 19 nt, Artificial Sequence
  Description of Artificial Sequence: Synthetic oligonucleotide
  Antisense strand to SEQ ID NO: 211220
uaucaaccaauacgagaua

SEQ ID NO: 211222 - RNA, 19 nt, Artificial Sequence
  Description of Artificial Sequence: Synthetic oligonucleotide
  Sense strand starting at position 3024 of SEQ ID NO: 2721
ucucguauugguugauacu

SEQ ID NO: 211223 - RNA, 19 nt, Artificial Sequence
  Description of Artificial Sequence: Synthetic oligonucleotide
  Antisense strand to SEQ ID NO: 211222
aguaucaaccaauacgaga

SEQ ID NO: 211224 - RNA, 19 nt, Artificial Sequence
  Description of Artificial Sequence: Synthetic oligonucleotide
  Sense strand starting at position 3045 of SEQ ID NO: 2721
gugguggagguuugacaga

SEQ ID NO: 211225 - RNA, 19 nt, Artificial Sequence
  Description of Artificial Sequence: Synthetic oligonucleotide
  Antisense strand to SEQ ID NO: 211224
ucugucaaaccuccaccac

SEQ ID NO: 211226 - RNA, 19 nt, Artificial Sequence
  Description of Artificial Sequence: Synthetic oligonucleotide
  Sense strand starting at position 3136 of SEQ ID NO: 2721
cugacucuuagggaacgua

SEQ ID NO: 211227 - RNA, 19 nt, Artificial Sequence
  Description of Artificial Sequence: Synthetic oligonucleotide
  Antisense strand to SEQ ID NO: 211226
uacguucccuaagagucag

SEQ ID NO: 211228 - RNA, 19 nt, Artificial Sequence
  Description of Artificial Sequence: Synthetic oligonucleotide
  Sense strand starting at position 3170 of SEQ ID NO: 2721
aucauuuauuuccguuauc

SEQ ID NO: 211229 - RNA, 19 nt, Artificial Sequence
  Description of Artificial Sequence: Synthetic oligonucleotide
  Antisense strand to SEQ ID NO: 211228
gauaacggaaauaaaugau

SEQ ID NO: 211230 - RNA, 19 nt, Artificial Sequence
  Description of Artificial Sequence: Synthetic oligonucleotide
  Sense strand starting at position 3175 of SEQ ID NO: 2721
uuauuuccguuaucugcua

SEQ ID NO: 211231 - RNA, 19 nt, Artificial Sequence
  Description of Artificial Sequence: Synthetic oligonucleotide
  Antisense strand to SEQ ID NO: 211230
uagcagauaacggaaauaa

SEQ ID NO: 211232 - RNA, 19 nt, Artificial Sequence
  Description of Artificial Sequence: Synthetic oligonucleotide
  Sense strand starting at position 3200 of SEQ ID NO: 2721
gugcuaaaccuuuacacgu

SEQ ID NO: 211233 - RNA, 19 nt, Artificial Sequence
  Description of Artificial Sequence: Synthetic oligonucleotide
  Antisense strand to SEQ ID NO: 211232
acguguaaagguuuagcac

SEQ ID NO: 211234 - RNA, 19 nt, Artificial Sequence
  Description of Artificial Sequence: Synthetic oligonucleotide
  Sense strand starting at position 3227 of SEQ ID NO: 2721
ucguuuaguccucacaaua

SEQ ID NO: 211235 - RNA, 19 nt, Artificial Sequence
  Description of Artificial Sequence: Synthetic oligonucleotide
  Antisense strand to SEQ ID NO: 211234
uauugugaggacuaaacga

SEQ ID NO: 211236 - RNA, 19 nt, Artificial Sequence
  Description of Artificial Sequence: Synthetic oligonucleotide
  Sense strand starting at position 3300 of SEQ ID NO: 2721
ggguaaacgagucaguaga

SEQ ID NO: 211237 - RNA, 19 nt, Artificial Sequence
  Description of Artificial Sequence: Synthetic oligonucleotide
  Antisense strand to SEQ ID NO: 211236
ucuacugacucguuuaccc

SEQ ID NO: 211238 - RNA, 19 nt, Artificial Sequence
  Description of Artificial Sequence: Synthetic oligonucleotide
  Sense strand starting at position 3302 of SEQ ID NO: 2721
guaaacgagucaguagaua

SEQ ID NO: 211239 - RNA, 19 nt, Artificial Sequence
  Description of Artificial Sequence: Synthetic oligonucleotide
  Antisense strand to SEQ ID NO: 211238
uaucuacugacucguuuac

SEQ ID NO: 211240 - RNA, 19 nt, Artificial Sequence
  Description of Artificial Sequence: Synthetic oligonucleotide
  Sense strand starting at position 3313 of SEQ ID NO: 2721
aguagauagaagcaguauu

SEQ ID NO: 211241 - RNA, 19 nt, Artificial Sequence
  Description of Artificial Sequence: Synthetic oligonucleotide
  Antisense strand to SEQ ID NO: 211240
aauacugcuucuaucuacu

SEQ ID NO: 211242 - RNA, 19 nt, Artificial Sequence
  Description of Artificial Sequence: Synthetic oligonucleotide
  Sense strand starting at position 3324 of SEQ ID NO: 2721
gcaguauuccaauacaaag

SEQ ID NO: 211243 - RNA, 19 nt, Artificial Sequence
  Description of Artificial Sequence: Synthetic oligonucleotide
  Antisense strand to SEQ ID NO: 211242
cuuuguauuggaauacugc

SEQ ID NO: 211244 - RNA, 19 nt, Artificial Sequence
  Description of Artificial Sequence: Synthetic oligonucleotide
  Sense strand starting at position 3374 of SEQ ID NO: 2721
gucuccuaugaccacuaua

SEQ ID NO: 211245 - RNA, 19 nt, Artificial Sequence
  Description of Artificial Sequence: Synthetic oligonucleotide
  Antisense strand to SEQ ID NO: 211244
uauaguggucauaggagac

SEQ ID NO: 211246 - RNA, 19 nt, Artificial Sequence
  Description of Artificial Sequence: Synthetic oligonucleotide
  Sense strand starting at position 3400 of SEQ ID NO: 2721
agggaaguuuaugaaauga

SEQ ID NO: 211247 - RNA, 19 nt, Artificial Sequence
  Description of Artificial Sequence: Synthetic oligonucleotide
  Antisense strand to SEQ ID NO: 211246
ucauuucauaaacuucccu

SEQ ID NO: 211248 - RNA, 19 nt, Artificial Sequence
  Description of Artificial Sequence: Synthetic oligonucleotide
  Sense strand starting at position 3413 of SEQ ID NO: 2721
aaaugagguuuguugaaug

SEQ ID NO: 211249 - RNA, 19 nt, Artificial Sequence
  Description of Artificial Sequence: Synthetic oligonucleotide
  Antisense strand to SEQ ID NO: 211248
cauucaacaaaccucauuu

SEQ ID NO: 211250 - RNA, 19 nt, Artificial Sequence
  Description of Artificial Sequence: Synthetic oligonucleotide
  Sense strand starting at position 3515 of SEQ ID NO: 2721
guaauuaugaggugguggu

SEQ ID NO: 211251 - RNA, 19 nt, Artificial Sequence
  Description of Artificial Sequence: Synthetic oligonucleotide
  Antisense strand to SEQ ID NO: 211250
accaccaccucauaauuac

SEQ ID NO: 211252 - RNA, 19 nt, Artificial Sequence
  Description of Artificial Sequence: Synthetic oligonucleotide
  Sense strand starting at position 3846 of SEQ ID NO: 2721
ccaaguuguucuuuaacac

SEQ ID NO: 211253 - RNA, 19 nt, Artificial Sequence
  Description of Artificial Sequence: Synthetic oligonucleotide
  Antisense strand to SEQ ID NO: 211252
guguuaaagaacaacuugg

SEQ ID NO: 211254 - RNA, 19 nt, Artificial Sequence
  Description of Artificial Sequence: Synthetic oligonucleotide
  Sense strand starting at position 3950 of SEQ ID NO: 2721
gcuuuaggucaggaguuua

SEQ ID NO: 211255 - RNA, 19 nt, Artificial Sequence
  Description of Artificial Sequence: Synthetic oligonucleotide
  Antisense strand to SEQ ID NO: 211254
uaaacuccugaccuaaagc

SEQ ID NO: 211256 - RNA, 19 nt, Artificial Sequence
  Description of Artificial Sequence: Synthetic oligonucleotide
  Sense strand starting at position 142 of SEQ ID NO: 2722
cucucuuucgauuacagaa

SEQ ID NO: 211257 - RNA, 19 nt, Artificial Sequence
  Description of Artificial Sequence: Synthetic oligonucleotide
  Antisense strand to SEQ ID NO: 211256
uucuguaaucgaaagagag

SEQ ID NO: 211258 - RNA, 19 nt, Artificial Sequence
  Description of Artificial Sequence: Synthetic oligonucleotide
  Sense strand starting at position 195 of SEQ ID NO: 2722
ggaagacucuuggagauag

SEQ ID NO: 211259 - RNA, 19 nt, Artificial Sequence
  Description of Artificial Sequence: Synthetic oligonucleotide
  Antisense strand to SEQ ID NO: 211258
cuaucuccaagagucuucc

SEQ ID NO: 211260 - RNA, 19 nt, Artificial Sequence
  Description of Artificial Sequence: Synthetic oligonucleotide
  Sense strand starting at position 363 of SEQ ID NO: 2722
gguucugaucccuagcugu

SEQ ID NO: 211261 - RNA, 19 nt, Artificial Sequence
  Description of Artificial Sequence: Synthetic oligonucleotide
  Antisense strand to SEQ ID NO: 211260
acagcuagggaucagaacc

SEQ ID NO: 211262 - RNA, 19 nt, Artificial Sequence
  Description of Artificial Sequence: Synthetic oligonucleotide
  Sense strand starting at position 369 of SEQ ID NO: 2722
gaucccuagcugugugaau

SEQ ID NO: 211263 - RNA, 19 nt, Artificial Sequence
  Description of Artificial Sequence: Synthetic oligonucleotide
  Antisense strand to SEQ ID NO: 211262
auucacacagcuagggauc

SEQ ID NO: 211264 - RNA, 19 nt, Artificial Sequence
  Description of Artificial Sequence: Synthetic oligonucleotide
  Sense strand starting at position 467 of SEQ ID NO: 2722
ccgaguaagagcuaacauu

SEQ ID NO: 211265 - RNA, 19 nt, Artificial Sequence
  Description of Artificial Sequence: Synthetic oligonucleotide
  Antisense strand to SEQ ID NO: 211264
aauguuagcucuuacucgg

SEQ ID NO: 211266 - RNA, 19 nt, Artificial Sequence
  Description of Artificial Sequence: Synthetic oligonucleotide
  Sense strand starting at position 674 of SEQ ID NO: 2722
aagaaugagcaaugcuaga

SEQ ID NO: 211267 - RNA, 19 nt, Artificial Sequence
  Description of Artificial Sequence: Synthetic oligonucleotide
  Antisense strand to SEQ ID NO: 211266
ucuagcauugcucauucuu

SEQ ID NO: 211268 - RNA, 19 nt, Artificial Sequence
  Description of Artificial Sequence: Synthetic oligonucleotide
  Sense strand starting at position 743 of SEQ ID NO: 2722
ggguacaagcgggauucau

SEQ ID NO: 211269 - RNA, 19 nt, Artificial Sequence
  Description of Artificial Sequence: Synthetic oligonucleotide
  Antisense strand to SEQ ID NO: 211268
augaaucccgcuuguaccc

SEQ ID NO: 211270 - RNA, 19 nt, Artificial Sequence
  Description of Artificial Sequence: Synthetic oligonucleotide
  Sense strand starting at position 761 of SEQ ID NO: 2722
uagggcauuugguagaaca

SEQ ID NO: 211271 - RNA, 19 nt, Artificial Sequence
  Description of Artificial Sequence: Synthetic oligonucleotide
  Antisense strand to SEQ ID NO: 211270
uguucuaccaaaugcccua

SEQ ID NO: 211272 - RNA, 19 nt, Artificial Sequence
  Description of Artificial Sequence: Synthetic oligonucleotide
  Sense strand starting at position 787 of SEQ ID NO: 2722
ggugucugcgucccuaaca

SEQ ID NO: 211273 - RNA, 19 nt, Artificial Sequence
  Description of Artificial Sequence: Synthetic oligonucleotide
  Antisense strand to SEQ ID NO: 211272
uguuagggacgcagacacc

SEQ ID NO: 211274 - RNA, 19 nt, Artificial Sequence
  Description of Artificial Sequence: Synthetic oligonucleotide
  Sense strand starting at position 901 of SEQ ID NO: 2722
uaucucagucagggucaaa

SEQ ID NO: 211275 - RNA, 19 nt, Artificial Sequence
  Description of Artificial Sequence: Synthetic oligonucleotide
  Antisense strand to SEQ ID NO: 211274
uuugacccugacugagaua

SEQ ID NO: 211276 - RNA, 19 nt, Artificial Sequence
  Description of Artificial Sequence: Synthetic oligonucleotide
  Sense strand starting at position 958 of SEQ ID NO: 2722
ggagauaccaucgaggcuu

SEQ ID NO: 211277 - RNA, 19 nt, Artificial Sequence
  Description of Artificial Sequence: Synthetic oligonucleotide
  Antisense strand to SEQ ID NO: 211276
aagccucgaugguaucucc

SEQ ID NO: 211278 - RNA, 19 nt, Artificial Sequence
  Description of Artificial Sequence: Synthetic oligonucleotide
  Sense strand starting at position 984 of SEQ ID NO: 2722
acggaaaguaucuaaagcu

SEQ ID NO: 211279 - RNA, 19 nt, Artificial Sequence
  Description of Artificial Sequence: Synthetic oligonucleotide
  Antisense strand to SEQ ID NO: 211278
agcuuuagauacuuuccgu

SEQ ID NO: 211280 - RNA, 19 nt, Artificial Sequence
  Description of Artificial Sequence: Synthetic oligonucleotide
  Sense strand starting at position 992 of SEQ ID NO: 2722
uaucuaaagcuccgagaga

SEQ ID NO: 211281 - RNA, 19 nt, Artificial Sequence
  Description of Artificial Sequence: Synthetic oligonucleotide
  Antisense strand to SEQ ID NO: 211280
ucucucggagcuuuagaua

SEQ ID NO: 211282 - RNA, 19 nt, Artificial Sequence
  Description of Artificial Sequence: Synthetic oligonucleotide
  Sense strand starting at position 1109 of SEQ ID NO: 2722
cccagaguuagguagccaa

SEQ ID NO: 211283 - RNA, 19 nt, Artificial Sequence
  Description of Artificial Sequence: Synthetic oligonucleotide
  Antisense strand to SEQ ID NO: 211282
uuggcuaccuaacucuggg

SEQ ID NO: 211284 - RNA, 19 nt, Artificial Sequence
  Description of Artificial Sequence: Synthetic oligonucleotide
  Sense strand starting at position 1112 of SEQ ID NO: 2722
agaguuagguagccaacua

SEQ ID NO: 211285 - RNA, 19 nt, Artificial Sequence
  Description of Artificial Sequence: Synthetic oligonucleotide
  Antisense strand to SEQ ID NO: 211284
uaguuggcuaccuaacucu

SEQ ID NO: 211286 - RNA, 19 nt, Artificial Sequence
  Description of Artificial Sequence: Synthetic oligonucleotide
  Sense strand starting at position 1139 of SEQ ID NO: 2722
uuucuuaugucaccagagu

SEQ ID NO: 211287 - RNA, 19 nt, Artificial Sequence
  Description of Artificial Sequence: Synthetic oligonucleotide
  Antisense strand to SEQ ID NO: 211286
acucuggugacauaagaaa

SEQ ID NO: 211288 - RNA, 19 nt, Artificial Sequence
  Description of Artificial Sequence: Synthetic oligonucleotide
  Sense strand starting at position 1276 of SEQ ID NO: 2722
agacgcguuuauuuaauga

SEQ ID NO: 211289 - RNA, 19 nt, Artificial Sequence
  Description of Artificial Sequence: Synthetic oligonucleotide
  Antisense strand to SEQ ID NO: 211288
ucauuaaauaaacgcgucu

SEQ ID NO: 211290 - RNA, 19 nt, Artificial Sequence
  Description of Artificial Sequence: Synthetic oligonucleotide
  Sense strand starting at position 1287 of SEQ ID NO: 2722
uuuaaugacugagcgaaug

SEQ ID NO: 211291 - RNA, 19 nt, Artificial Sequence
  Description of Artificial Sequence: Synthetic oligonucleotide
  Antisense strand to SEQ ID NO: 211290
cauucgcucagucauuaaa

SEQ ID NO: 211292 - RNA, 19 nt, Artificial Sequence
  Description of Artificial Sequence: Synthetic oligonucleotide
  Sense strand starting at position 1361 of SEQ ID NO: 2722
agggucagcgagugaacau

SEQ ID NO: 211293 - RNA, 19 nt, Artificial Sequence
  Description of Artificial Sequence: Synthetic oligonucleotide
  Antisense strand to SEQ ID NO: 211292
auguucacucgcugacccu

SEQ ID NO: 211294 - RNA, 19 nt, Artificial Sequence
  Description of Artificial Sequence: Synthetic oligonucleotide
  Sense strand starting at position 1362 of SEQ ID NO: 2722
gggucagcgagugaacaua

SEQ ID NO: 211295 - RNA, 19 nt, Artificial Sequence
  Description of Artificial Sequence: Synthetic oligonucleotide
  Antisense strand to SEQ ID NO: 211294
uauguucacucgcugaccc

SEQ ID NO: 211296 - RNA, 19 nt, Artificial Sequence
  Description of Artificial Sequence: Synthetic oligonucleotide
  Sense strand starting at position 1420 of SEQ ID NO: 2722
gccugugccgguuccaaga

SEQ ID NO: 211297 - RNA, 19 nt, Artificial Sequence
  Description of Artificial Sequence: Synthetic oligonucleotide
  Antisense strand to SEQ ID NO: 211296
ucuuggaaccggcacaggc

SEQ ID NO: 211298 - RNA, 19 nt, Artificial Sequence
  Description of Artificial Sequence: Synthetic oligonucleotide
  Sense strand starting at position 1445 of SEQ ID NO: 2722
cgucuuuacagcccgcaaa

SEQ ID NO: 211299 - RNA, 19 nt, Artificial Sequence
  Description of Artificial Sequence: Synthetic oligonucleotide
  Antisense strand to SEQ ID NO: 211298
uuugcgggcuguaaagacg

SEQ ID NO: 211300 - RNA, 19 nt, Artificial Sequence
  Description of Artificial Sequence: Synthetic oligonucleotide
  Sense strand starting at position 2099 of SEQ ID NO: 2722
uucggucgugcuucuuaga

SEQ ID NO: 211301 - RNA, 19 nt, Artificial Sequence
  Description of Artificial Sequence: Synthetic oligonucleotide
  Antisense strand to SEQ ID NO: 211300
ucuaagaagcacgaccgaa

SEQ ID NO: 211302 - RNA, 19 nt, Artificial Sequence
  Description of Artificial Sequence: Synthetic oligonucleotide
  Sense strand starting at position 2220 of SEQ ID NO: 2722
ggacgcaaagugugggaua

SEQ ID NO: 211303 - RNA, 19 nt, Artificial Sequence
  Description of Artificial Sequence: Synthetic oligonucleotide
  Antisense strand to SEQ ID NO: 211302
uaucccacacuuugcgucc

SEQ ID NO: 211304 - RNA, 19 nt, Artificial Sequence
  Description of Artificial Sequence: Synthetic oligonucleotide
  Sense strand starting at position 2348 of SEQ ID NO: 2722
caagguguccagugucaca

SEQ ID NO: 211305 - RNA, 19 nt, Artificial Sequence
  Description of Artificial Sequence: Synthetic oligonucleotide
  Antisense strand to SEQ ID NO: 211304
ugugacacuggacaccuug

SEQ ID NO: 211306 - RNA, 19 nt, Artificial Sequence
  Description of Artificial Sequence: Synthetic oligonucleotide
  Sense strand starting at position 2367 of SEQ ID NO: 2722
guuacauagucagugucaa

SEQ ID NO: 211307 - RNA, 19 nt, Artificial Sequence
  Description of Artificial Sequence: Synthetic oligonucleotide
  Antisense strand to SEQ ID NO: 211306
uugacacugacuauguaac

SEQ ID NO: 211308 - RNA, 19 nt, Artificial Sequence
  Description of Artificial Sequence: Synthetic oligonucleotide
  Sense strand starting at position 2368 of SEQ ID NO: 2722
uuacauagucagugucaac

SEQ ID NO: 211309 - RNA, 19 nt, Artificial Sequence
  Description of Artificial Sequence: Synthetic oligonucleotide
  Antisense strand to SEQ ID NO: 211308
guugacacugacuauguaa

SEQ ID NO: 211310 - RNA, 19 nt, Artificial Sequence
  Description of Artificial Sequence: Synthetic oligonucleotide
  Sense strand starting at position 2813 of SEQ ID NO: 2722
cuguuaagaguuuaagcca

SEQ ID NO: 211311 - RNA, 19 nt, Artificial Sequence
  Description of Artificial Sequence: Synthetic oligonucleotide
  Antisense strand to SEQ ID NO: 211310
uggcuuaaacucuuaacag

SEQ ID NO: 211312 - RNA, 19 nt, Artificial Sequence
  Description of Artificial Sequence: Synthetic oligonucleotide
  Sense strand starting at position 3241 of SEQ ID NO: 2722
gcgaguucagagcaggaca

SEQ ID NO: 211313 - RNA, 19 nt, Artificial Sequence
  Description of Artificial Sequence: Synthetic oligonucleotide
  Antisense strand to SEQ ID NO: 211312
uguccugcucugaacucgc

SEQ ID NO: 211314 - RNA, 19 nt, Artificial Sequence
  Description of Artificial Sequence: Synthetic oligonucleotide
  Sense strand starting at position 3456 of SEQ ID NO: 2722
gcuggagauauguauguga

SEQ ID NO: 211315 - RNA, 19 nt, Artificial Sequence
  Description of Artificial Sequence: Synthetic oligonucleotide
  Antisense strand to SEQ ID NO: 211314
ucacauacauaucuccagc

SEQ ID NO: 211316 - RNA, 19 nt, Artificial Sequence
  Description of Artificial Sequence: Synthetic oligonucleotide
  Sense strand starting at position 3459 of SEQ ID NO: 2722
ggagauauguaugugagca

SEQ ID NO: 211317 - RNA, 19 nt, Artificial Sequence
  Description of Artificial Sequence: Synthetic oligonucleotide
  Antisense strand to SEQ ID NO: 211316
ugcucacauacauaucucc

SEQ ID NO: 211318 - RNA, 19 nt, Artificial Sequence
  Description of Artificial Sequence: Synthetic oligonucleotide
  Sense strand starting at position 3460 of SEQ ID NO: 2722
gagauauguaugugagcau

SEQ ID NO: 211319 - RNA, 19 nt, Artificial Sequence
  Description of Artificial Sequence: Synthetic oligonucleotide
  Antisense strand to SEQ ID NO: 211318
augcucacauacauaucuc

SEQ ID NO: 211320 - RNA, 19 nt, Artificial Sequence
  Description of Artificial Sequence: Synthetic oligonucleotide
  Sense strand starting at position 3557 of SEQ ID NO: 2722
uguauacaucuaugcacau

SEQ ID NO: 211321 - RNA, 19 nt, Artificial Sequence
  Description of Artificial Sequence: Synthetic oligonucleotide
  Antisense strand to SEQ ID NO: 211320
augugcauagauguauaca

SEQ ID NO: 211322 - RNA, 19 nt, Artificial Sequence
  Description of Artificial Sequence: Synthetic oligonucleotide
  Sense strand starting at position 3558 of SEQ ID NO: 2722
guauacaucuaugcacaua

SEQ ID NO: 211323 - RNA, 19 nt, Artificial Sequence
  Description of Artificial Sequence: Synthetic oligonucleotide
  Antisense strand to SEQ ID NO: 211322
uaugugcauagauguauac

SEQ ID NO: 211324 - RNA, 19 nt, Artificial Sequence
  Description of Artificial Sequence: Synthetic oligonucleotide
  Sense strand starting at position 3570 of SEQ ID NO: 2722
gcacauaagugagcacaua

SEQ ID NO: 211325 - RNA, 19 nt, Artificial Sequence
  Description of Artificial Sequence: Synthetic oligonucleotide
  Antisense strand to SEQ ID NO: 211324
uaugugcucacuuaugugc

SEQ ID NO: 211326 - RNA, 19 nt, Artificial Sequence
  Description of Artificial Sequence: Synthetic oligonucleotide
  Sense strand starting at position 3653 of SEQ ID NO: 2722
ugaguuugacgcuagucca

SEQ ID NO: 211327 - RNA, 19 nt, Artificial Sequence
  Description of Artificial Sequence: Synthetic oligonucleotide
  Antisense strand to SEQ ID NO: 211326
uggacuagcgucaaacuca

SEQ ID NO: 211328 - RNA, 19 nt, Artificial Sequence
  Description of Artificial Sequence: Synthetic oligonucleotide
  Sense strand starting at position 3688 of SEQ ID NO: 2722
guguauuuguauccgagag

SEQ ID NO: 211329 - RNA, 19 nt, Artificial Sequence
  Description of Artificial Sequence: Synthetic oligonucleotide
  Antisense strand to SEQ ID NO: 211328
cucucggauacaaauacac

SEQ ID NO: 211330 - RNA, 19 nt, Artificial Sequence
  Description of Artificial Sequence: Synthetic oligonucleotide
  Sense strand starting at position 3757 of SEQ ID NO: 2722
cuaacugauggcugugauu

SEQ ID NO: 211331 - RNA, 19 nt, Artificial Sequence
  Description of Artificial Sequence: Synthetic oligonucleotide
  Antisense strand to SEQ ID NO: 211330
aaucacagccaucaguuag

SEQ ID NO: 211332 - RNA, 19 nt, Artificial Sequence
  Description of Artificial Sequence: Synthetic oligonucleotide
  Sense strand starting at position 3807 of SEQ ID NO: 2722
augccauccuugguacaca

SEQ ID NO: 211333 - RNA, 19 nt, Artificial Sequence
  Description of Artificial Sequence: Synthetic oligonucleotide
  Antisense strand to SEQ ID NO: 211332
uguguaccaaggauggcau

SEQ ID NO: 211334 - RNA, 19 nt, Artificial Sequence
  Description of Artificial Sequence: Synthetic oligonucleotide
  Sense strand starting at position 3823 of SEQ ID NO: 2722
acaguagugacuugguagu

SEQ ID NO: 211335 - RNA, 19 nt, Artificial Sequence
  Description of Artificial Sequence: Synthetic oligonucleotide
  Antisense strand to SEQ ID NO: 211334
acuaccaagucacuacugu

SEQ ID NO: 211336 - RNA, 19 nt, Artificial Sequence
  Description of Artificial Sequence: Synthetic oligonucleotide
  Sense strand starting at position 153 of SEQ ID NO: 2723
ggacauuggucuuuacauc

SEQ ID NO: 211337 - RNA, 19 nt, Artificial Sequence
  Description of Artificial Sequence: Synthetic oligonucleotide
  Antisense strand to SEQ ID NO: 211336
gauguaaagaccaaugucc

SEQ ID NO: 211338 - RNA, 19 nt, Artificial Sequence
  Description of Artificial Sequence: Synthetic oligonucleotide
  Sense strand starting at position 171 of SEQ ID NO: 2723
cugauauggugcccauaaa

SEQ ID NO: 211339 - RNA, 19 nt, Artificial Sequence
  Description of Artificial Sequence: Synthetic oligonucleotide
  Antisense strand to SEQ ID NO: 211338
uuuaugggcaccauaucag

SEQ ID NO: 211340 - RNA, 19 nt, Artificial Sequence
  Description of Artificial Sequence: Synthetic oligonucleotide
  Sense strand starting at position 172 of SEQ ID NO: 2723
ugauauggugcccauaaac

SEQ ID NO: 211341 - RNA, 19 nt, Artificial Sequence
  Description of Artificial Sequence: Synthetic oligonucleotide
  Antisense strand to SEQ ID NO: 211340
guuuaugggcaccauauca

SEQ ID NO: 211342 - RNA, 19 nt, Artificial Sequence
  Description of Artificial Sequence: Synthetic oligonucleotide
  Sense strand starting at position 256 of SEQ ID NO: 2723
uguugucagguugaucaaa

SEQ ID NO: 211343 - RNA, 19 nt, Artificial Sequence
  Description of Artificial Sequence: Synthetic oligonucleotide
  Antisense strand to SEQ ID NO: 211342
uuugaucaaccugacaaca

SEQ ID NO: 211344 - RNA, 19 nt, Artificial Sequence
  Description of Artificial Sequence: Synthetic oligonucleotide
  Sense strand starting at position 502 of SEQ ID NO: 2723
cugaguguucagggaacau

SEQ ID NO: 211345 - RNA, 19 nt, Artificial Sequence
  Description of Artificial Sequence: Synthetic oligonucleotide
  Antisense strand to SEQ ID NO: 211344
auguucccugaacacucag

SEQ ID NO: 211346 - RNA, 19 nt, Artificial Sequence
  Description of Artificial Sequence: Synthetic oligonucleotide
  Sense strand starting at position 676 of SEQ ID NO: 2723
cucugugaccaugggaaga

SEQ ID NO: 211347 - RNA, 19 nt, Artificial Sequence
  Description of Artificial Sequence: Synthetic oligonucleotide
  Antisense strand to SEQ ID NO: 211346
ucuucccauggucacagag

SEQ ID NO: 211348 - RNA, 19 nt, Artificial Sequence
  Description of Artificial Sequence: Synthetic oligonucleotide
  Sense strand starting at position 714 of SEQ ID NO: 2723
guggcuucuccagagaaca

SEQ ID NO: 211349 - RNA, 19 nt, Artificial Sequence
  Description of Artificial Sequence: Synthetic oligonucleotide
  Antisense strand to SEQ ID NO: 211348
uguucucuggagaagccac

SEQ ID NO: 211350 - RNA, 19 nt, Artificial Sequence
  Description of Artificial Sequence: Synthetic oligonucleotide
  Sense strand starting at position 941 of SEQ ID NO: 2723
caaauaugucccgaggcca

SEQ ID NO: 211351 - RNA, 19 nt, Artificial Sequence
  Description of Artificial Sequence: Synthetic oligonucleotide
  Antisense strand to SEQ ID NO: 211350
uggccucgggacauauuug

SEQ ID NO: 211352 - RNA, 19 nt, Artificial Sequence
  Description of Artificial Sequence: Synthetic oligonucleotide
  Sense strand starting at position 1054 of SEQ ID NO: 2723
ggccaugaagccugacaga

SEQ ID NO: 211353 - RNA, 19 nt, Artificial Sequence
  Description of Artificial Sequence: Synthetic oligonucleotide
  Antisense strand to SEQ ID NO: 211352
ucugucaggcuucauggcc

SEQ ID NO: 211354 - RNA, 19 nt, Artificial Sequence
  Description of Artificial Sequence: Synthetic oligonucleotide
  Sense strand starting at position 1118 of SEQ ID NO: 2723
gaagccucccuagauguga

SEQ ID NO: 211355 - RNA, 19 nt, Artificial Sequence
  Description of Artificial Sequence: Synthetic oligonucleotide
  Antisense strand to SEQ ID NO: 211354
ucacaucuagggaggcuuc

SEQ ID NO: 211356 - RNA, 19 nt, Artificial Sequence
  Description of Artificial Sequence: Synthetic oligonucleotide
  Sense strand starting at position 1286 of SEQ ID NO: 2723
gagacauugcacugucaag

SEQ ID NO: 211357 - RNA, 19 nt, Artificial Sequence
  Description of Artificial Sequence: Synthetic oligonucleotide
  Antisense strand to SEQ ID NO: 211356
cuugacagugcaaugucuc

SEQ ID NO: 211358 - RNA, 19 nt, Artificial Sequence
  Description of Artificial Sequence: Synthetic oligonucleotide
  Sense strand starting at position 1392 of SEQ ID NO: 2723
gaucaauguuuccugagga

SEQ ID NO: 211359 - RNA, 19 nt, Artificial Sequence
  Description of Artificial Sequence: Synthetic oligonucleotide
  Antisense strand to SEQ ID NO: 211358
uccucaggaaacauugauc

SEQ ID NO: 211360 - RNA, 19 nt, Artificial Sequence
  Description of Artificial Sequence: Synthetic oligonucleotide
  Sense strand starting at position 1414 of SEQ ID NO: 2723
aagaauguauccuugagca

SEQ ID NO: 211361 - RNA, 19 nt, Artificial Sequence
  Description of Artificial Sequence: Synthetic oligonucleotide
  Antisense strand to SEQ ID NO: 211360
ugcucaaggauacauucuu

SEQ ID NO: 211362 - RNA, 19 nt, Artificial Sequence
  Description of Artificial Sequence: Synthetic oligonucleotide
  Sense strand starting at position 1590 of SEQ ID NO: 2723
ggaaguggucucgaucuga

SEQ ID NO: 211363 - RNA, 19 nt, Artificial Sequence
  Description of Artificial Sequence: Synthetic oligonucleotide
  Antisense strand to SEQ ID NO: 211362
ucagaucgagaccacuucc

SEQ ID NO: 211364 - RNA, 19 nt, Artificial Sequence
  Description of Artificial Sequence: Synthetic oligonucleotide
  Sense strand starting at position 1775 of SEQ ID NO: 2723
ggaggaggcucuguuggaa

SEQ ID NO: 211365 - RNA, 19 nt, Artificial Sequence
  Description of Artificial Sequence: Synthetic oligonucleotide
  Antisense strand to SEQ ID NO: 211364
uuccaacagagccuccucc

SEQ ID NO: 211366 - RNA, 19 nt, Artificial Sequence
  Description of Artificial Sequence: Synthetic oligonucleotide
  Sense strand starting at position 2164 of SEQ ID NO: 2723
gggucuguuacauggauac

SEQ ID NO: 211367 - RNA, 19 nt, Artificial Sequence
  Description of Artificial Sequence: Synthetic oligonucleotide
  Antisense strand to SEQ ID NO: 211366
guauccauguaacagaccc

SEQ ID NO: 211368 - RNA, 19 nt, Artificial Sequence
  Description of Artificial Sequence: Synthetic oligonucleotide
  Sense strand starting at position 2302 of SEQ ID NO: 2723
ggcauagggccacagugau

SEQ ID NO: 211369 - RNA, 19 nt, Artificial Sequence
  Description of Artificial Sequence: Synthetic oligonucleotide
  Antisense strand to SEQ ID NO: 211368
aucacuguggcccuaugcc

SEQ ID NO: 211370 - RNA, 19 nt, Artificial Sequence
  Description of Artificial Sequence: Synthetic oligonucleotide
  Sense strand starting at position 2352 of SEQ ID NO: 2723
cauagucugguaggaaaga

SEQ ID NO: 211371 - RNA, 19 nt, Artificial Sequence
  Description of Artificial Sequence: Synthetic oligonucleotide
  Antisense strand to SEQ ID NO: 211370
ucuuuccuaccagacuaug

SEQ ID NO: 211372 - RNA, 19 nt, Artificial Sequence
  Description of Artificial Sequence: Synthetic oligonucleotide
  Sense strand starting at position 2383 of SEQ ID NO: 2723
aauaaauugcaaggugaug

SEQ ID NO: 211373 - RNA, 19 nt, Artificial Sequence
  Description of Artificial Sequence: Synthetic oligonucleotide
  Antisense strand to SEQ ID NO: 211372
caucaccuugcaauuuauu

SEQ ID NO: 211374 - RNA, 19 nt, Artificial Sequence
  Description of Artificial Sequence: Synthetic oligonucleotide
  Sense strand starting at position 2434 of SEQ ID NO: 2723
agcauaugaaauggaguaa

SEQ ID NO: 211375 - RNA, 19 nt, Artificial Sequence
  Description of Artificial Sequence: Synthetic oligonucleotide
  Antisense strand to SEQ ID NO: 211374
uuacuccauuucauaugcu

SEQ ID NO: 211376 - RNA, 19 nt, Artificial Sequence
  Description of Artificial Sequence: Synthetic oligonucleotide
  Sense strand starting at position 2544 of SEQ ID NO: 2723
gcaauauugcuggaaugua

SEQ ID NO: 211377 - RNA, 19 nt, Artificial Sequence
  Description of Artificial Sequence: Synthetic oligonucleotide
  Antisense strand to SEQ ID NO: 211376
uacauuccagcaauauugc

SEQ ID NO: 211378 - RNA, 19 nt, Artificial Sequence
  Description of Artificial Sequence: Synthetic oligonucleotide
  Sense strand starting at position 2623 of SEQ ID NO: 2723
ugaugaagauccuucugau

SEQ ID NO: 211379 - RNA, 19 nt, Artificial Sequence
  Description of Artificial Sequence: Synthetic oligonucleotide
  Antisense strand to SEQ ID NO: 211378
aucagaaggaucuucauca

SEQ ID NO: 211380 - RNA, 19 nt, Artificial Sequence
  Description of Artificial Sequence: Synthetic oligonucleotide
  Sense strand starting at position 2729 of SEQ ID NO: 2723
guagaaacaucacucugau

SEQ ID NO: 211381 - RNA, 19 nt, Artificial Sequence
  Description of Artificial Sequence: Synthetic oligonucleotide
  Antisense strand to SEQ ID NO: 211380
aucagagugauguuucuac

SEQ ID NO: 211382 - RNA, 19 nt, Artificial Sequence
  Description of Artificial Sequence: Synthetic oligonucleotide
  Sense strand starting at position 2841 of SEQ ID NO: 2723
ugcaucuuggcugauacaa

SEQ ID NO: 211383 - RNA, 19 nt, Artificial Sequence
  Description of Artificial Sequence: Synthetic oligonucleotide
  Antisense strand to SEQ ID NO: 211382
uuguaucagccaagaugca

SEQ ID NO: 211384 - RNA, 19 nt, Artificial Sequence
  Description of Artificial Sequence: Synthetic oligonucleotide
  Sense strand starting at position 3052 of SEQ ID NO: 2723
uagagaguuccauaugugc

SEQ ID NO: 211385 - RNA, 19 nt, Artificial Sequence
  Description of Artificial Sequence: Synthetic oligonucleotide
  Antisense strand to SEQ ID NO: 211384
gcacauauggaacucucua

SEQ ID NO: 211386 - RNA, 19 nt, Artificial Sequence
  Description of Artificial Sequence: Synthetic oligonucleotide
  Sense strand starting at position 3058 of SEQ ID NO: 2723
guuccauaugugcaagaag

SEQ ID NO: 211387 - RNA, 19 nt, Artificial Sequence
  Description of Artificial Sequence: Synthetic oligonucleotide
  Antisense strand to SEQ ID NO: 211386
cuucuugcacauauggaac

SEQ ID NO: 211388 - RNA, 19 nt, Artificial Sequence
  Description of Artificial Sequence: Synthetic oligonucleotide
  Sense strand starting at position 3132 of SEQ ID NO: 2723
gcggcuucucaugcuuuga

SEQ ID NO: 211389 - RNA, 19 nt, Artificial Sequence
  Description of Artificial Sequence: Synthetic oligonucleotide
  Antisense strand to SEQ ID NO: 211388
ucaaagcaugagaagccgc

SEQ ID NO: 211390 - RNA, 19 nt, Artificial Sequence
  Description of Artificial Sequence: Synthetic oligonucleotide
  Sense strand starting at position 3136 of SEQ ID NO: 2723
cuucucaugcuuugaagaa

SEQ ID NO: 211391 - RNA, 19 nt, Artificial Sequence
  Description of Artificial Sequence: Synthetic oligonucleotide
  Antisense strand to SEQ ID NO: 211390
uucuucaaagcaugagaag

SEQ ID NO: 211392 - RNA, 19 nt, Artificial Sequence
  Description of Artificial Sequence: Synthetic oligonucleotide
  Sense strand starting at position 3140 of SEQ ID NO: 2723
ucaugcuuugaagaagucu

SEQ ID NO: 211393 - RNA, 19 nt, Artificial Sequence
  Description of Artificial Sequence: Synthetic oligonucleotide
  Antisense strand to SEQ ID NO: 211392
agacuucuucaaagcauga

SEQ ID NO: 211394 - RNA, 19 nt, Artificial Sequence
  Description of Artificial Sequence: Synthetic oligonucleotide
  Sense strand starting at position 3146 of SEQ ID NO: 2723
uuugaagaagucugccaaa

SEQ ID NO: 211395 - RNA, 19 nt, Artificial Sequence
  Description of Artificial Sequence: Synthetic oligonucleotide
  Antisense strand to SEQ ID NO: 211394
uuuggcagacuucuucaaa

SEQ ID NO: 211396 - RNA, 19 nt, Artificial Sequence
  Description of Artificial Sequence: Synthetic oligonucleotide
  Sense strand starting at position 3158 of SEQ ID NO: 2723
ugccaaaucugagaaauuu

SEQ ID NO: 211397 - RNA, 19 nt, Artificial Sequence
  Description of Artificial Sequence: Synthetic oligonucleotide
  Antisense strand to SEQ ID NO: 211396
aaauuucucagauuuggca

SEQ ID NO: 211398 - RNA, 19 nt, Artificial Sequence
  Description of Artificial Sequence: Synthetic oligonucleotide
  Sense strand starting at position 3319 of SEQ ID NO: 2723
cauggauggaugugugaau

SEQ ID NO: 211399 - RNA, 19 nt, Artificial Sequence
  Description of Artificial Sequence: Synthetic oligonucleotide
  Antisense strand to SEQ ID NO: 211398
auucacacauccauccaug

SEQ ID NO: 211400 - RNA, 19 nt, Artificial Sequence
  Description of Artificial Sequence: Synthetic oligonucleotide
  Sense strand starting at position 3351 of SEQ ID NO: 2723
gagacuugauagcugauca

SEQ ID NO: 211401 - RNA, 19 nt, Artificial Sequence
  Description of Artificial Sequence: Synthetic oligonucleotide
  Antisense strand to SEQ ID NO: 211400
ugaucagcuaucaagucuc

SEQ ID NO: 211402 - RNA, 19 nt, Artificial Sequence
  Description of Artificial Sequence: Synthetic oligonucleotide
  Sense strand starting at position 3495 of SEQ ID NO: 2723
acuccuuacccaggaauga

SEQ ID NO: 211403 - RNA, 19 nt, Artificial Sequence
  Description of Artificial Sequence: Synthetic oligonucleotide
  Antisense strand to SEQ ID NO: 211402
ucauuccuggguaaggagu

SEQ ID NO: 211404 - RNA, 19 nt, Artificial Sequence
  Description of Artificial Sequence: Synthetic oligonucleotide
  Sense strand starting at position 3606 of SEQ ID NO: 2723
auuagagguuaaguuaaca

SEQ ID NO: 211405 - RNA, 19 nt, Artificial Sequence
  Description of Artificial Sequence: Synthetic oligonucleotide
  Antisense strand to SEQ ID NO: 211404
uguuaacuuaaccucuaau

SEQ ID NO: 211406 - RNA, 19 nt, Artificial Sequence
  Description of Artificial Sequence: Synthetic oligonucleotide
  Sense strand starting at position 3632 of SEQ ID NO: 2723
ggaaauaucuaccuaugcu

SEQ ID NO: 211407 - RNA, 19 nt, Artificial Sequence
  Description of Artificial Sequence: Synthetic oligonucleotide
  Antisense strand to SEQ ID NO: 211406
agcauagguagauauuucc

SEQ ID NO: 211408 - RNA, 19 nt, Artificial Sequence
  Description of Artificial Sequence: Synthetic oligonucleotide
  Sense strand starting at position 3859 of SEQ ID NO: 2723
gauggugucucauuuguuc

SEQ ID NO: 211409 - RNA, 19 nt, Artificial Sequence
  Description of Artificial Sequence: Synthetic oligonucleotide
  Antisense strand to SEQ ID NO: 211408
gaacaaaugagacaccauc

SEQ ID NO: 211410 - RNA, 19 nt, Artificial Sequence
  Description of Artificial Sequence: Synthetic oligonucleotide
  Sense strand starting at position 3867 of SEQ ID NO: 2723
cucauuuguucugucccau

SEQ ID NO: 211411 - RNA, 19 nt, Artificial Sequence
  Description of Artificial Sequence: Synthetic oligonucleotide
  Antisense strand to SEQ ID NO: 211410
augggacagaacaaaugag

SEQ ID NO: 211412 - RNA, 19 nt, Artificial Sequence
  Description of Artificial Sequence: Synthetic oligonucleotide
  Sense strand starting at position 3922 of SEQ ID NO: 2723
ugcugucugcucuaaauuu

SEQ ID NO: 211413 - RNA, 19 nt, Artificial Sequence
  Description of Artificial Sequence: Synthetic oligonucleotide
  Antisense strand to SEQ ID NO: 211412
aaauuuagagcagacagca

SEQ ID NO: 211414 - RNA, 19 nt, Artificial Sequence
  Description of Artificial Sequence: Synthetic oligonucleotide
  Sense strand starting at position 3946 of SEQ ID NO: 2723
uuugauagucccgaauaug

SEQ ID NO: 211415 - RNA, 19 nt, Artificial Sequence
  Description of Artificial Sequence: Synthetic oligonucleotide
  Antisense strand to SEQ ID NO: 211414
cauauucgggacuaucaaa

SEQ ID NO: 211416 - RNA, 19 nt, Artificial Sequence
  Description of Artificial Sequence: Synthetic oligonucleotide
  Sense strand starting at position 71 of SEQ ID NO: 2724
auucuuuaaguuugagaga

SEQ ID NO: 211417 - RNA, 19 nt, Artificial Sequence
  Description of Artificial Sequence: Synthetic oligonucleotide
  Antisense strand to SEQ ID NO: 211416
ucucucaaacuuaaagaau

SEQ ID NO: 211418 - RNA, 19 nt, Artificial Sequence
  Description of Artificial Sequence: Synthetic oligonucleotide
  Sense strand starting at position 126 of SEQ ID NO: 2724
uguuaaagauucuuguaga

SEQ ID NO: 211419 - RNA, 19 nt, Artificial Sequence
  Description of Artificial Sequence: Synthetic oligonucleotide
  Antisense strand to SEQ ID NO: 211418
ucuacaagaaucuuuaaca

SEQ ID NO: 211420 - RNA, 19 nt, Artificial Sequence
  Description of Artificial Sequence: Synthetic oligonucleotide
  Sense strand starting at position 269 of SEQ ID NO: 2724
acggguauauaugcaacua

SEQ ID NO: 211421 - RNA, 19 nt, Artificial Sequence
  Description of Artificial Sequence: Synthetic oligonucleotide
  Antisense strand to SEQ ID NO: 211420
uaguugcauauauacccgu

SEQ ID NO: 211422 - RNA, 19 nt, Artificial Sequence
  Description of Artificial Sequence: Synthetic oligonucleotide
  Sense strand starting at position 513 of SEQ ID NO: 2724
cugagaacacguugaauga

SEQ ID NO: 211423 - RNA, 19 nt, Artificial Sequence
  Description of Artificial Sequence: Synthetic oligonucleotide
  Antisense strand to SEQ ID NO: 211422
ucauucaacguguucucag

SEQ ID NO: 211424 - RNA, 19 nt, Artificial Sequence
  Description of Artificial Sequence: Synthetic oligonucleotide
  Sense strand starting at position 555 of SEQ ID NO: 2724
guaacaaauucuuucuguu

SEQ ID NO: 211425 - RNA, 19 nt, Artificial Sequence
  Description of Artificial Sequence: Synthetic oligonucleotide
  Antisense strand to SEQ ID NO: 211424
aacagaaagaauuuguuac

SEQ ID NO: 211426 - RNA, 19 nt, Artificial Sequence
  Description of Artificial Sequence: Synthetic oligonucleotide
  Sense strand starting at position 573 of SEQ ID NO: 2724
uaggaauugugcuugugau

SEQ ID NO: 211427 - RNA, 19 nt, Artificial Sequence
  Description of Artificial Sequence: Synthetic oligonucleotide
  Antisense strand to SEQ ID NO: 211426
aucacaagcacaauuccua

SEQ ID NO: 211428 - RNA, 19 nt, Artificial Sequence
  Description of Artificial Sequence: Synthetic oligonucleotide
  Sense strand starting at position 574 of SEQ ID NO: 2724
aggaauugugcuugugauu

SEQ ID NO: 211429 - RNA, 19 nt, Artificial Sequence
  Description of Artificial Sequence: Synthetic oligonucleotide
  Antisense strand to SEQ ID NO: 211428
aaucacaagcacaauuccu

SEQ ID NO: 211430 - RNA, 19 nt, Artificial Sequence
  Description of Artificial Sequence: Synthetic oligonucleotide
  Sense strand starting at position 736 of SEQ ID NO: 2724
ccuguacauccuugggcaa

SEQ ID NO: 211431 - RNA, 19 nt, Artificial Sequence
  Description of Artificial Sequence: Synthetic oligonucleotide
  Antisense strand to SEQ ID NO: 211430
uugcccaaggauguacagg

SEQ ID NO: 211432 - RNA, 19 nt, Artificial Sequence
  Description of Artificial Sequence: Synthetic oligonucleotide
  Sense strand starting at position 737 of SEQ ID NO: 2724
cuguacauccuugggcaaa

SEQ ID NO: 211433 - RNA, 19 nt, Artificial Sequence
  Description of Artificial Sequence: Synthetic oligonucleotide
  Antisense strand to SEQ ID NO: 211432
uuugcccaaggauguacag

SEQ ID NO: 211434 - RNA, 19 nt, Artificial Sequence
  Description of Artificial Sequence: Synthetic oligonucleotide
  Sense strand starting at position 749 of SEQ ID NO: 2724
gggcaaaucccuuaaugug

SEQ ID NO: 211435 - RNA, 19 nt, Artificial Sequence
  Description of Artificial Sequence: Synthetic oligonucleotide
  Antisense strand to SEQ ID NO: 211434
cacauuaagggauuugccc

SEQ ID NO: 211436 - RNA, 19 nt, Artificial Sequence
  Description of Artificial Sequence: Synthetic oligonucleotide
  Sense strand starting at position 843 of SEQ ID NO: 2724
cucaaagugcuagauguau

SEQ ID NO: 211437 - RNA, 19 nt, Artificial Sequence
  Description of Artificial Sequence: Synthetic oligonucleotide
  Antisense strand to SEQ ID NO: 211436
auacaucuagcacuuugag

SEQ ID NO: 211438 - RNA, 19 nt, Artificial Sequence
  Description of Artificial Sequence: Synthetic oligonucleotide
  Sense strand starting at position 870 of SEQ ID NO: 2724
ucaucaucgucauugggaa

SEQ ID NO: 211439 - RNA, 19 nt, Artificial Sequence
  Description of Artificial Sequence: Synthetic oligonucleotide
  Antisense strand to SEQ ID NO: 211438
uucccaaugacgaugauga

SEQ ID NO: 211440 - RNA, 19 nt, Artificial Sequence
  Description of Artificial Sequence: Synthetic oligonucleotide
  Sense strand starting at position 1017 of SEQ ID NO: 2724
uagauagaguaauuacagu

SEQ ID NO: 211441 - RNA, 19 nt, Artificial Sequence
  Description of Artificial Sequence: Synthetic oligonucleotide
  Antisense strand to SEQ ID NO: 211440
acuguaauuacucuaucua

SEQ ID NO: 211442 - RNA, 19 nt, Artificial Sequence
  Description of Artificial Sequence: Synthetic oligonucleotide
  Sense strand starting at position 1067 of SEQ ID NO: 2724
gcccuucgcauggauuauu

SEQ ID NO: 211443 - RNA, 19 nt, Artificial Sequence
  Description of Artificial Sequence: Synthetic oligonucleotide
  Antisense strand to SEQ ID NO: 211442
aauaauccaugcgaagggc

SEQ ID NO: 211444 - RNA, 19 nt, Artificial Sequence
  Description of Artificial Sequence: Synthetic oligonucleotide
  Sense strand starting at position 1108 of SEQ ID NO: 2724
ugaggugagguuuauuauu

SEQ ID NO: 211445 - RNA, 19 nt, Artificial Sequence
  Description of Artificial Sequence: Synthetic oligonucleotide
  Antisense strand to SEQ ID NO: 211444
aauaauaaaccucaccuca

SEQ ID NO: 211446 - RNA, 19 nt, Artificial Sequence
  Description of Artificial Sequence: Synthetic oligonucleotide
  Sense strand starting at position 1110 of SEQ ID NO: 2724
aggugagguuuauuauuau

SEQ ID NO: 211447 - RNA, 19 nt, Artificial Sequence
  Description of Artificial Sequence: Synthetic oligonucleotide
  Antisense strand to SEQ ID NO: 211446
auaauaauaaaccucaccu

SEQ ID NO: 211448 - RNA, 19 nt, Artificial Sequence
  Description of Artificial Sequence: Synthetic oligonucleotide
  Sense strand starting at position 1199 of SEQ ID NO: 2724
gagaauuggaccuguguua

SEQ ID NO: 211449 - RNA, 19 nt, Artificial Sequence
  Description of Artificial Sequence: Synthetic oligonucleotide
  Antisense strand to SEQ ID NO: 211448
uaacacagguccaauucuc

SEQ ID NO: 211450 - RNA, 19 nt, Artificial Sequence
  Description of Artificial Sequence: Synthetic oligonucleotide
  Sense strand starting at position 1555 of SEQ ID NO: 2724
acuauauuguagucugaga

SEQ ID NO: 211451 - RNA, 19 nt, Artificial Sequence
  Description of Artificial Sequence: Synthetic oligonucleotide
  Antisense strand to SEQ ID NO: 211450
ucucagacuacaauauagu

SEQ ID NO: 211452 - RNA, 19 nt, Artificial Sequence
  Description of Artificial Sequence: Synthetic oligonucleotide
  Sense strand starting at position 1557 of SEQ ID NO: 2724
uauauuguagucugagaau

SEQ ID NO: 211453 - RNA, 19 nt, Artificial Sequence
  Description of Artificial Sequence: Synthetic oligonucleotide
  Antisense strand to SEQ ID NO: 211452
auucucagacuacaauaua

SEQ ID NO: 211454 - RNA, 19 nt, Artificial Sequence
  Description of Artificial Sequence: Synthetic oligonucleotide
  Sense strand starting at position 2075 of SEQ ID NO: 2724
gggaauuauucuuuauuga

SEQ ID NO: 211455 - RNA, 19 nt, Artificial Sequence
  Description of Artificial Sequence: Synthetic oligonucleotide
  Antisense strand to SEQ ID NO: 211454
ucaauaaagaauaauuccc

SEQ ID NO: 211456 - RNA, 19 nt, Artificial Sequence
  Description of Artificial Sequence: Synthetic oligonucleotide
  Sense strand starting at position 2083 of SEQ ID NO: 2724
uucuuuauugauggauauc

SEQ ID NO: 211457 - RNA, 19 nt, Artificial Sequence
  Description of Artificial Sequence: Synthetic oligonucleotide
  Antisense strand to SEQ ID NO: 211456
gauauccaucaauaaagaa

SEQ ID NO: 211458 - RNA, 19 nt, Artificial Sequence
  Description of Artificial Sequence: Synthetic oligonucleotide
  Sense strand starting at position 2120 of SEQ ID NO: 2724
gugcuugaaauccagcaga

SEQ ID NO: 211459 - RNA, 19 nt, Artificial Sequence
  Description of Artificial Sequence: Synthetic oligonucleotide
  Antisense strand to SEQ ID NO: 211458
ucugcuggauuucaagcac

SEQ ID NO: 211460 - RNA, 19 nt, Artificial Sequence
  Description of Artificial Sequence: Synthetic oligonucleotide
  Sense strand starting at position 2149 of SEQ ID NO: 2724
gagacaaaguguucuuaag

SEQ ID NO: 211461 - RNA, 19 nt, Artificial Sequence
  Description of Artificial Sequence: Synthetic oligonucleotide
  Antisense strand to SEQ ID NO: 211460
cuuaagaacacuuugucuc

SEQ ID NO: 211462 - RNA, 19 nt, Artificial Sequence
  Description of Artificial Sequence: Synthetic oligonucleotide
  Sense strand starting at position 2151 of SEQ ID NO: 2724
gacaaaguguucuuaagaa

SEQ ID NO: 211463 - RNA, 19 nt, Artificial Sequence
  Description of Artificial Sequence: Synthetic oligonucleotide
  Antisense strand to SEQ ID NO: 211462
uucuuaagaacacuuuguc

SEQ ID NO: 211464 - RNA, 19 nt, Artificial Sequence
  Description of Artificial Sequence: Synthetic oligonucleotide
  Sense strand starting at position 2714 of SEQ ID NO: 2724
agaauaaagucucuagcag

SEQ ID NO: 211465 - RNA, 19 nt, Artificial Sequence
  Description of Artificial Sequence: Synthetic oligonucleotide
  Antisense strand to SEQ ID NO: 211464
cugcuagagacuuuauucu

SEQ ID NO: 211466 - RNA, 19 nt, Artificial Sequence
  Description of Artificial Sequence: Synthetic oligonucleotide
  Sense strand starting at position 2805 of SEQ ID NO: 2724
gaaacaucugcauaaacgu

SEQ ID NO: 211467 - RNA, 19 nt, Artificial Sequence
  Description of Artificial Sequence: Synthetic oligonucleotide
  Antisense strand to SEQ ID NO: 211466
acguuuaugcagauguuuc

SEQ ID NO: 211468 - RNA, 19 nt, Artificial Sequence
  Description of Artificial Sequence: Synthetic oligonucleotide
  Sense strand starting at position 2813 of SEQ ID NO: 2724
ugcauaaacguuuaaagga

SEQ ID NO: 211469 - RNA, 19 nt, Artificial Sequence
  Description of Artificial Sequence: Synthetic oligonucleotide
  Antisense strand to SEQ ID NO: 211468
uccuuuaaacguuuaugca

SEQ ID NO: 211470 - RNA, 19 nt, Artificial Sequence
  Description of Artificial Sequence: Synthetic oligonucleotide
  Sense strand starting at position 2853 of SEQ ID NO: 2724
acauuuguguaggacauaa

SEQ ID NO: 211471 - RNA, 19 nt, Artificial Sequence
  Description of Artificial Sequence: Synthetic oligonucleotide
  Antisense strand to SEQ ID NO: 211470
uuauguccuacacaaaugu

SEQ ID NO: 211472 - RNA, 19 nt, Artificial Sequence
  Description of Artificial Sequence: Synthetic oligonucleotide
  Sense strand starting at position 2857 of SEQ ID NO: 2724
uuguguaggacauaaggua

SEQ ID NO: 211473 - RNA, 19 nt, Artificial Sequence
  Description of Artificial Sequence: Synthetic oligonucleotide
  Antisense strand to SEQ ID NO: 211472
uaccuuauguccuacacaa

SEQ ID NO: 211474 - RNA, 19 nt, Artificial Sequence
  Description of Artificial Sequence: Synthetic oligonucleotide
  Sense strand starting at position 2893 of SEQ ID NO: 2724
gcacacagugcuugauuua

SEQ ID NO: 211475 - RNA, 19 nt, Artificial Sequence
  Description of Artificial Sequence: Synthetic oligonucleotide
  Antisense strand to SEQ ID NO: 211474
uaaaucaagcacugugugc

SEQ ID NO: 211476 - RNA, 19 nt, Artificial Sequence
  Description of Artificial Sequence: Synthetic oligonucleotide
  Sense strand starting at position 2896 of SEQ ID NO: 2724
cacagugcuugauuuaugu

SEQ ID NO: 211477 - RNA, 19 nt, Artificial Sequence
  Description of Artificial Sequence: Synthetic oligonucleotide
  Antisense strand to SEQ ID NO: 211476
acauaaaucaagcacugug

SEQ ID NO: 211478 - RNA, 19 nt, Artificial Sequence
  Description of Artificial Sequence: Synthetic oligonucleotide
  Sense strand starting at position 3086 of SEQ ID NO: 2724
cucuaugucccucaagguu

SEQ ID NO: 211479 - RNA, 19 nt, Artificial Sequence
  Description of Artificial Sequence: Synthetic oligonucleotide
  Antisense strand to SEQ ID NO: 211478
aaccuugagggacauagag

SEQ ID NO: 211480 - RNA, 19 nt, Artificial Sequence
  Description of Artificial Sequence: Synthetic oligonucleotide
  Sense strand starting at position 3092 of SEQ ID NO: 2724
gucccucaagguuaaguaa

SEQ ID NO: 211481 - RNA, 19 nt, Artificial Sequence
  Description of Artificial Sequence: Synthetic oligonucleotide
  Antisense strand to SEQ ID NO: 211480
uuacuuaaccuugagggac

SEQ ID NO: 211482 - RNA, 19 nt, Artificial Sequence
  Description of Artificial Sequence: Synthetic oligonucleotide
  Sense strand starting at position 3256 of SEQ ID NO: 2724
aguaucuuguacucaauga

SEQ ID NO: 211483 - RNA, 19 nt, Artificial Sequence
  Description of Artificial Sequence: Synthetic oligonucleotide
  Antisense strand to SEQ ID NO: 211482
ucauugaguacaagauacu

SEQ ID NO: 211484 - RNA, 19 nt, Artificial Sequence
  Description of Artificial Sequence: Synthetic oligonucleotide
  Sense strand starting at position 3312 of SEQ ID NO: 2724
uugauaaucuaagcuuugu

SEQ ID NO: 211485 - RNA, 19 nt, Artificial Sequence
  Description of Artificial Sequence: Synthetic oligonucleotide
  Antisense strand to SEQ ID NO: 211484
acaaagcuuagauuaucaa

SEQ ID NO: 211486 - RNA, 19 nt, Artificial Sequence
  Description of Artificial Sequence: Synthetic oligonucleotide
  Sense strand starting at position 3502 of SEQ ID NO: 2724
cuaauauucugguccacug

SEQ ID NO: 211487 - RNA, 19 nt, Artificial Sequence
  Description of Artificial Sequence: Synthetic oligonucleotide
  Antisense strand to SEQ ID NO: 211486
caguggaccagaauauuag

SEQ ID NO: 211488 - RNA, 19 nt, Artificial Sequence
  Description of Artificial Sequence: Synthetic oligonucleotide
  Sense strand starting at position 3760 of SEQ ID NO: 2724
agucaaacucuuugaugac

SEQ ID NO: 211489 - RNA, 19 nt, Artificial Sequence
  Description of Artificial Sequence: Synthetic oligonucleotide
  Antisense strand to SEQ ID NO: 211488
gucaucaaagaguuugacu

SEQ ID NO: 211490 - RNA, 19 nt, Artificial Sequence
  Description of Artificial Sequence: Synthetic oligonucleotide
  Sense strand starting at position 3772 of SEQ ID NO: 2724
ugaugaccuagcuguaaga

SEQ ID NO: 211491 - RNA, 19 nt, Artificial Sequence
  Description of Artificial Sequence: Synthetic oligonucleotide
  Antisense strand to SEQ ID NO: 211490
ucuuacagcuaggucauca

SEQ ID NO: 211492 - RNA, 19 nt, Artificial Sequence
  Description of Artificial Sequence: Synthetic oligonucleotide
  Sense strand starting at position 3821 of SEQ ID NO: 2724
ucugauaaaugacagauca

SEQ ID NO: 211493 - RNA, 19 nt, Artificial Sequence
  Description of Artificial Sequence: Synthetic oligonucleotide
  Antisense strand to SEQ ID NO: 211492
ugaucugucauuuaucaga

SEQ ID NO: 211494 - RNA, 19 nt, Artificial Sequence
  Description of Artificial Sequence: Synthetic oligonucleotide
  Sense strand starting at position 3842 of SEQ ID NO: 2724
aguauuuccuguccuggua

SEQ ID NO: 211495 - RNA, 19 nt, Artificial Sequence
  Description of Artificial Sequence: Synthetic oligonucleotide
  Antisense strand to SEQ ID NO: 211494
uaccaggacaggaaauacu

SEQ ID NO: 211496 - RNA, 19 nt, Artificial Sequence
  Description of Artificial Sequence: Synthetic oligonucleotide
  Sense strand starting at position 7 of SEQ ID NO: 2725
augggagauuuguaaagua

SEQ ID NO: 211497 - RNA, 19 nt, Artificial Sequence
  Description of Artificial Sequence: Synthetic oligonucleotide
  Antisense strand to SEQ ID NO: 211496
uacuuuacaaaucucccau

SEQ ID NO: 211498 - RNA, 19 nt, Artificial Sequence
  Description of Artificial Sequence: Synthetic oligonucleotide
  Sense strand starting at position 276 of SEQ ID NO: 2725
uacugaagugcagauaagu

SEQ ID NO: 211499 - RNA, 19 nt, Artificial Sequence
  Description of Artificial Sequence: Synthetic oligonucleotide
  Antisense strand to SEQ ID NO: 211498
acuuaucugcacuucagua

SEQ ID NO: 211500 - RNA, 19 nt, Artificial Sequence
  Description of Artificial Sequence: Synthetic oligonucleotide
  Sense strand starting at position 285 of SEQ ID NO: 2725
gcagauaaguugguuaacu

SEQ ID NO: 211501 - RNA, 19 nt, Artificial Sequence
  Description of Artificial Sequence: Synthetic oligonucleotide
  Antisense strand to SEQ ID NO: 211500
aguuaaccaacuuaucugc

SEQ ID NO: 211502 - RNA, 19 nt, Artificial Sequence
  Description of Artificial Sequence: Synthetic oligonucleotide
  Sense strand starting at position 286 of SEQ ID NO: 2725
cagauaaguugguuaacua

SEQ ID NO: 211503 - RNA, 19 nt, Artificial Sequence
  Description of Artificial Sequence: Synthetic oligonucleotide
  Antisense strand to SEQ ID NO: 211502
uaguuaaccaacuuaucug

SEQ ID NO: 211504 - RNA, 19 nt, Artificial Sequence
  Description of Artificial Sequence: Synthetic oligonucleotide
  Sense strand starting at position 297 of SEQ ID NO: 2725
guuaacuagcuaggucaaa

SEQ ID NO: 211505 - RNA, 19 nt, Artificial Sequence
  Description of Artificial Sequence: Synthetic oligonucleotide
  Antisense strand to SEQ ID NO: 211504
uuugaccuagcuaguuaac

SEQ ID NO: 211506 - RNA, 19 nt, Artificial Sequence
  Description of Artificial Sequence: Synthetic oligonucleotide
  Sense strand starting at position 362 of SEQ ID NO: 2725
ggagcugauuaauuaacau

SEQ ID NO: 211507 - RNA, 19 nt, Artificial Sequence
  Description of Artificial Sequence: Synthetic oligonucleotide
  Antisense strand to SEQ ID NO: 211506
auguuaauuaaucagcucc

SEQ ID NO: 211508 - RNA, 19 nt, Artificial Sequence
  Description of Artificial Sequence: Synthetic oligonucleotide
  Sense strand starting at position 587 of SEQ ID NO: 2725
auucgacuagccuaaagua

SEQ ID NO: 211509 - RNA, 19 nt, Artificial Sequence
  Description of Artificial Sequence: Synthetic oligonucleotide
  Antisense strand to SEQ ID NO: 211508
uacuuuaggcuagucgaau

SEQ ID NO: 211510 - RNA, 19 nt, Artificial Sequence
  Description of Artificial Sequence: Synthetic oligonucleotide
  Sense strand starting at position 627 of SEQ ID NO: 2725
ggugguuuacaugagaguu

SEQ ID NO: 211511 - RNA, 19 nt, Artificial Sequence
  Description of Artificial Sequence: Synthetic oligonucleotide
  Antisense strand to SEQ ID NO: 211510
aacucucauguaaaccacc

SEQ ID NO: 211512 - RNA, 19 nt, Artificial Sequence
  Description of Artificial Sequence: Synthetic oligonucleotide
  Sense strand starting at position 894 of SEQ ID NO: 2725
acugaaauauuccugucag

SEQ ID NO: 211513 - RNA, 19 nt, Artificial Sequence
  Description of Artificial Sequence: Synthetic oligonucleotide
  Antisense strand to SEQ ID NO: 211512
cugacaggaauauuucagu

SEQ ID NO: 211514 - RNA, 19 nt, Artificial Sequence
  Description of Artificial Sequence: Synthetic oligonucleotide
  Sense strand starting at position 900 of SEQ ID NO: 2725
auauuccugucaguagacu

SEQ ID NO: 211515 - RNA, 19 nt, Artificial Sequence
  Description of Artificial Sequence: Synthetic oligonucleotide
  Antisense strand to SEQ ID NO: 211514
agucuacugacaggaauau

SEQ ID NO: 211516 - RNA, 19 nt, Artificial Sequence
  Description of Artificial Sequence: Synthetic oligonucleotide
  Sense strand starting at position 1032 of SEQ ID NO: 2725
cucauuuaguucuuguuua

SEQ ID NO: 211517 - RNA, 19 nt, Artificial Sequence
  Description of Artificial Sequence: Synthetic oligonucleotide
  Antisense strand to SEQ ID NO: 211516
uaaacaagaacuaaaugag

SEQ ID NO: 211518 - RNA, 19 nt, Artificial Sequence
  Description of Artificial Sequence: Synthetic oligonucleotide
  Sense strand starting at position 1055 of SEQ ID NO: 2725
gcucuuuaauuccuggaau

SEQ ID NO: 211519 - RNA, 19 nt, Artificial Sequence
  Description of Artificial Sequence: Synthetic oligonucleotide
  Antisense strand to SEQ ID NO: 211518
auuccaggaauuaaagagc

SEQ ID NO: 211520 - RNA, 19 nt, Artificial Sequence
  Description of Artificial Sequence: Synthetic oligonucleotide
  Sense strand starting at position 1222 of SEQ ID NO: 2725
augaucacgugugugauuu

SEQ ID NO: 211521 - RNA, 19 nt, Artificial Sequence
  Description of Artificial Sequence: Synthetic oligonucleotide
  Antisense strand to SEQ ID NO: 211520
aaaucacacacgugaucau

SEQ ID NO: 211522 - RNA, 19 nt, Artificial Sequence
  Description of Artificial Sequence: Synthetic oligonucleotide
  Sense strand starting at position 1628 of SEQ ID NO: 2725
ggauguggacuccgaggaa

SEQ ID NO: 211523 - RNA, 19 nt, Artificial Sequence
  Description of Artificial Sequence: Synthetic oligonucleotide
  Antisense strand to SEQ ID NO: 211522
uuccucggaguccacaucc

SEQ ID NO: 211524 - RNA, 19 nt, Artificial Sequence
  Description of Artificial Sequence: Synthetic oligonucleotide
  Sense strand starting at position 2307 of SEQ ID NO: 2725
ggauaaugcgauuagcuaa

SEQ ID NO: 211525 - RNA, 19 nt, Artificial Sequence
  Description of Artificial Sequence: Synthetic oligonucleotide
  Antisense strand to SEQ ID NO: 211524
uuagcuaaucgcauuaucc

SEQ ID NO: 211526 - RNA, 19 nt, Artificial Sequence
  Description of Artificial Sequence: Synthetic oligonucleotide
  Sense strand starting at position 2596 of SEQ ID NO: 2725
gugauguacgugcucgaga

SEQ ID NO: 211527 - RNA, 19 nt, Artificial Sequence
  Description of Artificial Sequence: Synthetic oligonucleotide
  Antisense strand to SEQ ID NO: 211526
ucucgagcacguacaucac

SEQ ID NO: 211528 - RNA, 19 nt, Artificial Sequence
  Description of Artificial Sequence: Synthetic oligonucleotide
  Sense strand starting at position 2616 of SEQ ID NO: 2725
ggacaagaugucgaugucu

SEQ ID NO: 211529 - RNA, 19 nt, Artificial Sequence
  Description of Artificial Sequence: Synthetic oligonucleotide
  Antisense strand to SEQ ID NO: 211528
agacaucgacaucuugucc

SEQ ID NO: 211530 - RNA, 19 nt, Artificial Sequence
  Description of Artificial Sequence: Synthetic oligonucleotide
  Sense strand starting at position 2618 of SEQ ID NO: 2725
acaagaugucgaugucuca

SEQ ID NO: 211531 - RNA, 19 nt, Artificial Sequence
  Description of Artificial Sequence: Synthetic oligonucleotide
  Antisense strand to SEQ ID NO: 211530
ugagacaucgacaucuugu

SEQ ID NO: 211532 - RNA, 19 nt, Artificial Sequence
  Description of Artificial Sequence: Synthetic oligonucleotide
  Sense strand starting at position 2628 of SEQ ID NO: 2725
gaugucucaucacugaugu

SEQ ID NO: 211533 - RNA, 19 nt, Artificial Sequence
  Description of Artificial Sequence: Synthetic oligonucleotide
  Antisense strand to SEQ ID NO: 211532
acaucagugaugagacauc

SEQ ID NO: 211534 - RNA, 19 nt, Artificial Sequence
  Description of Artificial Sequence: Synthetic oligonucleotide
  Sense strand starting at position 2638 of SEQ ID NO: 2725
cacugauguuaacuuggau

SEQ ID NO: 211535 - RNA, 19 nt, Artificial Sequence
  Description of Artificial Sequence: Synthetic oligonucleotide
  Antisense strand to SEQ ID NO: 211534
auccaaguuaacaucagug

SEQ ID NO: 211536 - RNA, 19 nt, Artificial Sequence
  Description of Artificial Sequence: Synthetic oligonucleotide
  Sense strand starting at position 2650 of SEQ ID NO: 2725
cuuggaucaguugguuaag

SEQ ID NO: 211537 - RNA, 19 nt, Artificial Sequence
  Description of Artificial Sequence: Synthetic oligonucleotide
  Antisense strand to SEQ ID NO: 211536
cuuaaccaacugauccaag

SEQ ID NO: 211538 - RNA, 19 nt, Artificial Sequence
  Description of Artificial Sequence: Synthetic oligonucleotide
  Sense strand starting at position 2691 of SEQ ID NO: 2725
uuuggaucuacuggccaga

SEQ ID NO: 211539 - RNA, 19 nt, Artificial Sequence
  Description of Artificial Sequence: Synthetic oligonucleotide
  Antisense strand to SEQ ID NO: 211538
ucuggccaguagauccaaa

SEQ ID NO: 211540 - RNA, 19 nt, Artificial Sequence
  Description of Artificial Sequence: Synthetic oligonucleotide
  Sense strand starting at position 2693 of SEQ ID NO: 2725
uggaucuacuggccagaau

SEQ ID NO: 211541 - RNA, 19 nt, Artificial Sequence
  Description of Artificial Sequence: Synthetic oligonucleotide
  Antisense strand to SEQ ID NO: 211540
auucuggccaguagaucca

SEQ ID NO: 211542 - RNA, 19 nt, Artificial Sequence
  Description of Artificial Sequence: Synthetic oligonucleotide
  Sense strand starting at position 2737 of SEQ ID NO: 2725
uggacuaugucucuuagac

SEQ ID NO: 211543 - RNA, 19 nt, Artificial Sequence
  Description of Artificial Sequence: Synthetic oligonucleotide
  Antisense strand to SEQ ID NO: 211542
gucuaagagacauagucca

SEQ ID NO: 211544 - RNA, 19 nt, Artificial Sequence
  Description of Artificial Sequence: Synthetic oligonucleotide
  Sense strand starting at position 2781 of SEQ ID NO: 2725
gaugaagagucuuuaagcu

SEQ ID NO: 211545 - RNA, 19 nt, Artificial Sequence
  Description of Artificial Sequence: Synthetic oligonucleotide
  Antisense strand to SEQ ID NO: 211544
agcuuaaagacucuucauc

SEQ ID NO: 211546 - RNA, 19 nt, Artificial Sequence
  Description of Artificial Sequence: Synthetic oligonucleotide
  Sense strand starting at position 2798 of SEQ ID NO: 2725
cuauguuugcuacaaugua

SEQ ID NO: 211547 - RNA, 19 nt, Artificial Sequence
  Description of Artificial Sequence: Synthetic oligonucleotide
  Antisense strand to SEQ ID NO: 211546
uacauuguagcaaacauag

SEQ ID NO: 211548 - RNA, 19 nt, Artificial Sequence
  Description of Artificial Sequence: Synthetic oligonucleotide
  Sense strand starting at position 2818 of SEQ ID NO: 2725
gcauaaacugugcaauuau

SEQ ID NO: 211549 - RNA, 19 nt, Artificial Sequence
  Description of Artificial Sequence: Synthetic oligonucleotide
  Antisense strand to SEQ ID NO: 211548
auaauugcacaguuuaugc

SEQ ID NO: 211550 - RNA, 19 nt, Artificial Sequence
  Description of Artificial Sequence: Synthetic oligonucleotide
  Sense strand starting at position 2979 of SEQ ID NO: 2725
auggucagaugaucugaau

SEQ ID NO: 211551 - RNA, 19 nt, Artificial Sequence
  Description of Artificial Sequence: Synthetic oligonucleotide
  Antisense strand to SEQ ID NO: 211550
auucagaucaucugaccau

SEQ ID NO: 211552 - RNA, 19 nt, Artificial Sequence
  Description of Artificial Sequence: Synthetic oligonucleotide
  Sense strand starting at position 2996 of SEQ ID NO: 2725
auacacacgucaucaaaga

SEQ ID NO: 211553 - RNA, 19 nt, Artificial Sequence
  Description of Artificial Sequence: Synthetic oligonucleotide
  Antisense strand to SEQ ID NO: 211552
ucuuugaugacguguguau

SEQ ID NO: 211554 - RNA, 19 nt, Artificial Sequence
  Description of Artificial Sequence: Synthetic oligonucleotide
  Sense strand starting at position 3052 of SEQ ID NO: 2725
aucauaugucauugcugaa

SEQ ID NO: 211555 - RNA, 19 nt, Artificial Sequence
  Description of Artificial Sequence: Synthetic oligonucleotide
  Antisense strand to SEQ ID NO: 211554
uucagcaaugacauaugau

SEQ ID NO: 211556 - RNA, 19 nt, Artificial Sequence
  Description of Artificial Sequence: Synthetic oligonucleotide
  Sense strand starting at position 3230 of SEQ ID NO: 2725
uuuggaagcuucuuccaaa

SEQ ID NO: 211557 - RNA, 19 nt, Artificial Sequence
  Description of Artificial Sequence: Synthetic oligonucleotide
  Antisense strand to SEQ ID NO: 211556
uuuggaagaagcuuccaaa

SEQ ID NO: 211558 - RNA, 19 nt, Artificial Sequence
  Description of Artificial Sequence: Synthetic oligonucleotide
  Sense strand starting at position 3442 of SEQ ID NO: 2725
augaaauguuacucaguac

SEQ ID NO: 211559 - RNA, 19 nt, Artificial Sequence
  Description of Artificial Sequence: Synthetic oligonucleotide
  Antisense strand to SEQ ID NO: 211558
guacugaguaacauuucau

SEQ ID NO: 211560 - RNA, 19 nt, Artificial Sequence
  Description of Artificial Sequence: Synthetic oligonucleotide
  Sense strand starting at position 3508 of SEQ ID NO: 2725
aaauauguauugcuaagag

SEQ ID NO: 211561 - RNA, 19 nt, Artificial Sequence
  Description of Artificial Sequence: Synthetic oligonucleotide
  Antisense strand to SEQ ID NO: 211560
cucuuagcaauacauauuu

SEQ ID NO: 211562 - RNA, 19 nt, Artificial Sequence
  Description of Artificial Sequence: Synthetic oligonucleotide
  Sense strand starting at position 3687 of SEQ ID NO: 2725
ccaugaaauuauucuguag

SEQ ID NO: 211563 - RNA, 19 nt, Artificial Sequence
  Description of Artificial Sequence: Synthetic oligonucleotide
  Antisense strand to SEQ ID NO: 211562
cuacagaauaauuucaugg

SEQ ID NO: 211564 - RNA, 19 nt, Artificial Sequence
  Description of Artificial Sequence: Synthetic oligonucleotide
  Sense strand starting at position 3690 of SEQ ID NO: 2725
ugaaauuauucuguaggau

SEQ ID NO: 211565 - RNA, 19 nt, Artificial Sequence
  Description of Artificial Sequence: Synthetic oligonucleotide
  Antisense strand to SEQ ID NO: 211564
auccuacagaauaauuuca

SEQ ID NO: 211566 - RNA, 19 nt, Artificial Sequence
  Description of Artificial Sequence: Synthetic oligonucleotide
  Sense strand starting at position 3705 of SEQ ID NO: 2725
ggauacuguaaugguagau

SEQ ID NO: 211567 - RNA, 19 nt, Artificial Sequence
  Description of Artificial Sequence: Synthetic oligonucleotide
  Antisense strand to SEQ ID NO: 211566
aucuaccauuacaguaucc

SEQ ID NO: 211568 - RNA, 19 nt, Artificial Sequence
  Description of Artificial Sequence: Synthetic oligonucleotide
  Sense strand starting at position 3715 of SEQ ID NO: 2725
augguagauguguaucacu

SEQ ID NO: 211569 - RNA, 19 nt, Artificial Sequence
  Description of Artificial Sequence: Synthetic oligonucleotide
  Antisense strand to SEQ ID NO: 211568
agugauacacaucuaccau

SEQ ID NO: 211570 - RNA, 19 nt, Artificial Sequence
  Description of Artificial Sequence: Synthetic oligonucleotide
  Sense strand starting at position 3720 of SEQ ID NO: 2725
agauguguaucacuauaca

SEQ ID NO: 211571 - RNA, 19 nt, Artificial Sequence
  Description of Artificial Sequence: Synthetic oligonucleotide
  Antisense strand to SEQ ID NO: 211570
uguauagugauacacaucu

SEQ ID NO: 211572 - RNA, 19 nt, Artificial Sequence
  Description of Artificial Sequence: Synthetic oligonucleotide
  Sense strand starting at position 3723 of SEQ ID NO: 2725
uguguaucacuauacaugu

SEQ ID NO: 211573 - RNA, 19 nt, Artificial Sequence
  Description of Artificial Sequence: Synthetic oligonucleotide
  Antisense strand to SEQ ID NO: 211572
acauguauagugauacaca

SEQ ID NO: 211574 - RNA, 19 nt, Artificial Sequence
  Description of Artificial Sequence: Synthetic oligonucleotide
  Sense strand starting at position 3846 of SEQ ID NO: 2725
cugcuaaugcaagauguua

SEQ ID NO: 211575 - RNA, 19 nt, Artificial Sequence
  Description of Artificial Sequence: Synthetic oligonucleotide
  Antisense strand to SEQ ID NO: 211574
uaacaucuugcauuagcag

SEQ ID NO: 211576 - RNA, 19 nt, Artificial Sequence
  Description of Artificial Sequence: Synthetic oligonucleotide
  Sense strand starting at position 315 of SEQ ID NO: 2727
gguugauugcuguccgcau

SEQ ID NO: 211577 - RNA, 19 nt, Artificial Sequence
  Description of Artificial Sequence: Synthetic oligonucleotide
  Antisense strand to SEQ ID NO: 211576
augcggacagcaaucaacc

SEQ ID NO: 211578 - RNA, 19 nt, Artificial Sequence
  Description of Artificial Sequence: Synthetic oligonucleotide
  Sense strand starting at position 317 of SEQ ID NO: 2727
uugauugcuguccgcauuu

SEQ ID NO: 211579 - RNA, 19 nt, Artificial Sequence
  Description of Artificial Sequence: Synthetic oligonucleotide
  Antisense strand to SEQ ID NO: 211578
aaaugcggacagcaaucaa

SEQ ID NO: 211580 - RNA, 19 nt, Artificial Sequence
  Description of Artificial Sequence: Synthetic oligonucleotide
  Sense strand starting at position 348 of SEQ ID NO: 2727
aacggaggcgcagauaauu

SEQ ID NO: 211581 - RNA, 19 nt, Artificial Sequence
  Description of Artificial Sequence: Synthetic oligonucleotide
  Antisense strand to SEQ ID NO: 211580
aauuaucugcgccuccguu

SEQ ID NO: 211582 - RNA, 19 nt, Artificial Sequence
  Description of Artificial Sequence: Synthetic oligonucleotide
  Sense strand starting at position 467 of SEQ ID NO: 2727
caguuugcugugucuguga

SEQ ID NO: 211583 - RNA, 19 nt, Artificial Sequence
  Description of Artificial Sequence: Synthetic oligonucleotide
  Antisense strand to SEQ ID NO: 211582
ucacagacacagcaaacug

SEQ ID NO: 211584 - RNA, 19 nt, Artificial Sequence
  Description of Artificial Sequence: Synthetic oligonucleotide
  Sense strand starting at position 476 of SEQ ID NO: 2727
gugucugugaaaugggaac

SEQ ID NO: 211585 - RNA, 19 nt, Artificial Sequence
  Description of Artificial Sequence: Synthetic oligonucleotide
  Antisense strand to SEQ ID NO: 211584
guucccauuucacagacac

SEQ ID NO: 211586 - RNA, 19 nt, Artificial Sequence
  Description of Artificial Sequence: Synthetic oligonucleotide
  Sense strand starting at position 1424 of SEQ ID NO: 2727
uggaaaugguugucuugug

SEQ ID NO: 211587 - RNA, 19 nt, Artificial Sequence
  Description of Artificial Sequence: Synthetic oligonucleotide
  Antisense strand to SEQ ID NO: 211586
cacaagacaaccauuucca

SEQ ID NO: 211588 - RNA, 19 nt, Artificial Sequence
  Description of Artificial Sequence: Synthetic oligonucleotide
  Sense strand starting at position 1425 of SEQ ID NO: 2727
ggaaaugguugucuuguga

SEQ ID NO: 211589 - RNA, 19 nt, Artificial Sequence
  Description of Artificial Sequence: Synthetic oligonucleotide
  Antisense strand to SEQ ID NO: 211588
ucacaagacaaccauuucc

SEQ ID NO: 211590 - RNA, 19 nt, Artificial Sequence
  Description of Artificial Sequence: Synthetic oligonucleotide
  Sense strand starting at position 1635 of SEQ ID NO: 2727
ugaggaacucgcuagagca

SEQ ID NO: 211591 - RNA, 19 nt, Artificial Sequence
  Description of Artificial Sequence: Synthetic oligonucleotide
  Antisense strand to SEQ ID NO: 211590
ugcucuagcgaguuccuca

SEQ ID NO: 211592 - RNA, 19 nt, Artificial Sequence
  Description of Artificial Sequence: Synthetic oligonucleotide
  Sense strand starting at position 1692 of SEQ ID NO: 2727
ccaggagauuuccaugaga

SEQ ID NO: 211593 - RNA, 19 nt, Artificial Sequence
  Description of Artificial Sequence: Synthetic oligonucleotide
  Antisense strand to SEQ ID NO: 211592
ucucauggaaaucuccugg

SEQ ID NO: 211594 - RNA, 19 nt, Artificial Sequence
  Description of Artificial Sequence: Synthetic oligonucleotide
  Sense strand starting at position 1944 of SEQ ID NO: 2727
ccugcauugcuggauggaa

SEQ ID NO: 211595 - RNA, 19 nt, Artificial Sequence
  Description of Artificial Sequence: Synthetic oligonucleotide
  Antisense strand to SEQ ID NO: 211594
uuccauccagcaaugcagg

SEQ ID NO: 211596 - RNA, 19 nt, Artificial Sequence
  Description of Artificial Sequence: Synthetic oligonucleotide
  Sense strand starting at position 1946 of SEQ ID NO: 2727
ugcauugcuggauggaaau

SEQ ID NO: 211597 - RNA, 19 nt, Artificial Sequence
  Description of Artificial Sequence: Synthetic oligonucleotide
  Antisense strand to SEQ ID NO: 211596
auuuccauccagcaaugca

SEQ ID NO: 211598 - RNA, 19 nt, Artificial Sequence
  Description of Artificial Sequence: Synthetic oligonucleotide
  Sense strand starting at position 2166 of SEQ ID NO: 2727
gcuccugugcugucucauu

SEQ ID NO: 211599 - RNA, 19 nt, Artificial Sequence
  Description of Artificial Sequence: Synthetic oligonucleotide
  Antisense strand to SEQ ID NO: 211598
aaugagacagcacaggagc

SEQ ID NO: 211600 - RNA, 19 nt, Artificial Sequence
  Description of Artificial Sequence: Synthetic oligonucleotide
  Sense strand starting at position 2233 of SEQ ID NO: 2727
gugggugaugugggugaau

SEQ ID NO: 211601 - RNA, 19 nt, Artificial Sequence
  Description of Artificial Sequence: Synthetic oligonucleotide
  Antisense strand to SEQ ID NO: 211600
auucacccacaucacccac

SEQ ID NO: 211602 - RNA, 19 nt, Artificial Sequence
  Description of Artificial Sequence: Synthetic oligonucleotide
  Sense strand starting at position 2244 of SEQ ID NO: 2727
gggugaaugcuuggguaga

SEQ ID NO: 211603 - RNA, 19 nt, Artificial Sequence
  Description of Artificial Sequence: Synthetic oligonucleotide
  Antisense strand to SEQ ID NO: 211602
ucuacccaagcauucaccc

SEQ ID NO: 211604 - RNA, 19 nt, Artificial Sequence
  Description of Artificial Sequence: Synthetic oligonucleotide
  Sense strand starting at position 2458 of SEQ ID NO: 2727
uguugcuguccugaaaccu

SEQ ID NO: 211605 - RNA, 19 nt, Artificial Sequence
  Description of Artificial Sequence: Synthetic oligonucleotide
  Antisense strand to SEQ ID NO: 211604
agguuucaggacagcaaca

SEQ ID NO: 211606 - RNA, 19 nt, Artificial Sequence
  Description of Artificial Sequence: Synthetic oligonucleotide
  Sense strand starting at position 2654 of SEQ ID NO: 2727
ccgagacuucaugaugugu

SEQ ID NO: 211607 - RNA, 19 nt, Artificial Sequence
  Description of Artificial Sequence: Synthetic oligonucleotide
  Antisense strand to SEQ ID NO: 211606
acacaucaugaagucucgg

SEQ ID NO: 211608 - RNA, 19 nt, Artificial Sequence
  Description of Artificial Sequence: Synthetic oligonucleotide
  Sense strand starting at position 3160 of SEQ ID NO: 2727
cuuauucuagcauggaaca

SEQ ID NO: 211609 - RNA, 19 nt, Artificial Sequence
  Description of Artificial Sequence: Synthetic oligonucleotide
  Antisense strand to SEQ ID NO: 211608
uguuccaugcuagaauaag

SEQ ID NO: 211610 - RNA, 19 nt, Artificial Sequence
  Description of Artificial Sequence: Synthetic oligonucleotide
  Sense strand starting at position 3161 of SEQ ID NO: 2727
uuauucuagcauggaacau

SEQ ID NO: 211611 - RNA, 19 nt, Artificial Sequence
  Description of Artificial Sequence: Synthetic oligonucleotide
  Antisense strand to SEQ ID NO: 211610
auguuccaugcuagaauaa

SEQ ID NO: 211612 - RNA, 19 nt, Artificial Sequence
  Description of Artificial Sequence: Synthetic oligonucleotide
  Sense strand starting at position 3219 of SEQ ID NO: 2727
aagugacaacagugcaaua

SEQ ID NO: 211613 - RNA, 19 nt, Artificial Sequence
  Description of Artificial Sequence: Synthetic oligonucleotide
  Antisense strand to SEQ ID NO: 211612
uauugcacuguugucacuu

SEQ ID NO: 211614 - RNA, 19 nt, Artificial Sequence
  Description of Artificial Sequence: Synthetic oligonucleotide
  Sense strand starting at position 3221 of SEQ ID NO: 2727
gugacaacagugcaauaua

SEQ ID NO: 211615 - RNA, 19 nt, Artificial Sequence
  Description of Artificial Sequence: Synthetic oligonucleotide
  Antisense strand to SEQ ID NO: 211614
uauauugcacuguugucac

SEQ ID NO: 211616 - RNA, 19 nt, Artificial Sequence
  Description of Artificial Sequence: Synthetic oligonucleotide
  Sense strand starting at position 3323 of SEQ ID NO: 2727
uugaaugugucccuuagau

SEQ ID NO: 211617 - RNA, 19 nt, Artificial Sequence
  Description of Artificial Sequence: Synthetic oligonucleotide
  Antisense strand to SEQ ID NO: 211616
aucuaagggacacauucaa

SEQ ID NO: 211618 - RNA, 19 nt, Artificial Sequence
  Description of Artificial Sequence: Synthetic oligonucleotide
  Sense strand starting at position 3325 of SEQ ID NO: 2727
gaaugugucccuuagauau

SEQ ID NO: 211619 - RNA, 19 nt, Artificial Sequence
  Description of Artificial Sequence: Synthetic oligonucleotide
  Antisense strand to SEQ ID NO: 211618
auaucuaagggacacauuc

SEQ ID NO: 211620 - RNA, 19 nt, Artificial Sequence
  Description of Artificial Sequence: Synthetic oligonucleotide
  Sense strand starting at position 3335 of SEQ ID NO: 2727
cuuagauauuaucuguaca

SEQ ID NO: 211621 - RNA, 19 nt, Artificial Sequence
  Description of Artificial Sequence: Synthetic oligonucleotide
  Antisense strand to SEQ ID NO: 211620
uguacagauaauaucuaag

SEQ ID NO: 211622 - RNA, 19 nt, Artificial Sequence
  Description of Artificial Sequence: Synthetic oligonucleotide
  Sense strand starting at position 3363 of SEQ ID NO: 2727
guuuauacaucaucuuaga

SEQ ID NO: 211623 - RNA, 19 nt, Artificial Sequence
  Description of Artificial Sequence: Synthetic oligonucleotide
  Antisense strand to SEQ ID NO: 211622
ucuaagaugauguauaaac

SEQ ID NO: 211624 - RNA, 19 nt, Artificial Sequence
  Description of Artificial Sequence: Synthetic oligonucleotide
  Sense strand starting at position 3441 of SEQ ID NO: 2727
gagagcguucagcagauga

SEQ ID NO: 211625 - RNA, 19 nt, Artificial Sequence
  Description of Artificial Sequence: Synthetic oligonucleotide
  Antisense strand to SEQ ID NO: 211624
ucaucugcugaacgcucuc

SEQ ID NO: 211626 - RNA, 19 nt, Artificial Sequence
  Description of Artificial Sequence: Synthetic oligonucleotide
  Sense strand starting at position 3443 of SEQ ID NO: 2727
gagcguucagcagaugaag

SEQ ID NO: 211627 - RNA, 19 nt, Artificial Sequence
  Description of Artificial Sequence: Synthetic oligonucleotide
  Antisense strand to SEQ ID NO: 211626
cuucaucugcugaacgcuc

SEQ ID NO: 211628 - RNA, 19 nt, Artificial Sequence
  Description of Artificial Sequence: Synthetic oligonucleotide
  Sense strand starting at position 3474 of SEQ ID NO: 2727
cuuauaaaugggugcauua

SEQ ID NO: 211629 - RNA, 19 nt, Artificial Sequence
  Description of Artificial Sequence: Synthetic oligonucleotide
  Antisense strand to SEQ ID NO: 211628
uaaugcacccauuuauaag

SEQ ID NO: 211630 - RNA, 19 nt, Artificial Sequence
  Description of Artificial Sequence: Synthetic oligonucleotide
  Sense strand starting at position 3476 of SEQ ID NO: 2727
uauaaaugggugcauuaua

SEQ ID NO: 211631 - RNA, 19 nt, Artificial Sequence
  Description of Artificial Sequence: Synthetic oligonucleotide
  Antisense strand to SEQ ID NO: 211630
uauaaugcacccauuuaua

SEQ ID NO: 211632 - RNA, 19 nt, Artificial Sequence
  Description of Artificial Sequence: Synthetic oligonucleotide
  Sense strand starting at position 3489 of SEQ ID NO: 2727
auuauauauggguguucca

SEQ ID NO: 211633 - RNA, 19 nt, Artificial Sequence
  Description of Artificial Sequence: Synthetic oligonucleotide
  Antisense strand to SEQ ID NO: 211632
uggaacacccauauauaau

SEQ ID NO: 211634 - RNA, 19 nt, Artificial Sequence
  Description of Artificial Sequence: Synthetic oligonucleotide
  Sense strand starting at position 3492 of SEQ ID NO: 2727
auauauggguguuccauaa

SEQ ID NO: 211635 - RNA, 19 nt, Artificial Sequence
  Description of Artificial Sequence: Synthetic oligonucleotide
  Antisense strand to SEQ ID NO: 211634
uuauggaacacccauauau

SEQ ID NO: 211636 - RNA, 19 nt, Artificial Sequence
  Description of Artificial Sequence: Synthetic oligonucleotide
  Sense strand starting at position 3535 of SEQ ID NO: 2727
uuaggcgauuucucauuau

SEQ ID NO: 211637 - RNA, 19 nt, Artificial Sequence
  Description of Artificial Sequence: Synthetic oligonucleotide
  Antisense strand to SEQ ID NO: 211636
auaaugagaaaucgccuaa

SEQ ID NO: 211638 - RNA, 19 nt, Artificial Sequence
  Description of Artificial Sequence: Synthetic oligonucleotide
  Sense strand starting at position 3538 of SEQ ID NO: 2727
ggcgauuucucauuauugc

SEQ ID NO: 211639 - RNA, 19 nt, Artificial Sequence
  Description of Artificial Sequence: Synthetic oligonucleotide
  Antisense strand to SEQ ID NO: 211638
gcaauaaugagaaaucgcc

SEQ ID NO: 211640 - RNA, 19 nt, Artificial Sequence
  Description of Artificial Sequence: Synthetic oligonucleotide
  Sense strand starting at position 3539 of SEQ ID NO: 2727
gcgauuucucauuauugca

SEQ ID NO: 211641 - RNA, 19 nt, Artificial Sequence
  Description of Artificial Sequence: Synthetic oligonucleotide
  Antisense strand to SEQ ID NO: 211640
ugcaauaaugagaaaucgc

SEQ ID NO: 211642 - RNA, 19 nt, Artificial Sequence
  Description of Artificial Sequence: Synthetic oligonucleotide
  Sense strand starting at position 3566 of SEQ ID NO: 2727
aaggcugugguagauauaa

SEQ ID NO: 211643 - RNA, 19 nt, Artificial Sequence
  Description of Artificial Sequence: Synthetic oligonucleotide
  Antisense strand to SEQ ID NO: 211642
uuauaucuaccacagccuu

SEQ ID NO: 211644 - RNA, 19 nt, Artificial Sequence
  Description of Artificial Sequence: Synthetic oligonucleotide
  Sense strand starting at position 3568 of SEQ ID NO: 2727
ggcugugguagauauaaug

SEQ ID NO: 211645 - RNA, 19 nt, Artificial Sequence
  Description of Artificial Sequence: Synthetic oligonucleotide
  Antisense strand to SEQ ID NO: 211644
cauuauaucuaccacagcc

SEQ ID NO: 211646 - RNA, 19 nt, Artificial Sequence
  Description of Artificial Sequence: Synthetic oligonucleotide
  Sense strand starting at position 3575 of SEQ ID NO: 2727
guagauauaauguaucugu

SEQ ID NO: 211647 - RNA, 19 nt, Artificial Sequence
  Description of Artificial Sequence: Synthetic oligonucleotide
  Antisense strand to SEQ ID NO: 211646
acagauacauuauaucuac

SEQ ID NO: 211648 - RNA, 19 nt, Artificial Sequence
  Description of Artificial Sequence: Synthetic oligonucleotide
  Sense strand starting at position 3665 of SEQ ID NO: 2727
cuuuacaaugaugguuaua

SEQ ID NO: 211649 - RNA, 19 nt, Artificial Sequence
  Description of Artificial Sequence: Synthetic oligonucleotide
  Antisense strand to SEQ ID NO: 211648
uauaaccaucauuguaaag

SEQ ID NO: 211650 - RNA, 19 nt, Artificial Sequence
  Description of Artificial Sequence: Synthetic oligonucleotide
  Sense strand starting at position 3667 of SEQ ID NO: 2727
uuacaaugaugguuauaac

SEQ ID NO: 211651 - RNA, 19 nt, Artificial Sequence
  Description of Artificial Sequence: Synthetic oligonucleotide
  Antisense strand to SEQ ID NO: 211650
guuauaaccaucauuguaa

SEQ ID NO: 211652 - RNA, 19 nt, Artificial Sequence
  Description of Artificial Sequence: Synthetic oligonucleotide
  Sense strand starting at position 3679 of SEQ ID NO: 2727
uuauaacuggccuaucgau

SEQ ID NO: 211653 - RNA, 19 nt, Artificial Sequence
  Description of Artificial Sequence: Synthetic oligonucleotide
  Antisense strand to SEQ ID NO: 211652
aucgauaggccaguuauaa

SEQ ID NO: 211654 - RNA, 19 nt, Artificial Sequence
  Description of Artificial Sequence: Synthetic oligonucleotide
  Sense strand starting at position 3875 of SEQ ID NO: 2727
cuguaucaggagugucaaa

SEQ ID NO: 211655 - RNA, 19 nt, Artificial Sequence
  Description of Artificial Sequence: Synthetic oligonucleotide
  Antisense strand to SEQ ID NO: 211654
uuugacacuccugauacag

SEQ ID NO: 211656 - RNA, 19 nt, Artificial Sequence
  Description of Artificial Sequence: Synthetic oligonucleotide
  Sense strand starting at position 104 of SEQ ID NO: 2726
aggauuucuuaguaugguu

SEQ ID NO: 211657 - RNA, 19 nt, Artificial Sequence
  Description of Artificial Sequence: Synthetic oligonucleotide
  Antisense strand to SEQ ID NO: 211656
aaccauacuaagaaauccu

SEQ ID NO: 211658 - RNA, 19 nt, Artificial Sequence
  Description of Artificial Sequence: Synthetic oligonucleotide
  Sense strand starting at position 124 of SEQ ID NO: 2726
guaccuucccaguagagca

SEQ ID NO: 211659 - RNA, 19 nt, Artificial Sequence
  Description of Artificial Sequence: Synthetic oligonucleotide
  Antisense strand to SEQ ID NO: 211658
ugcucuacugggaagguac

SEQ ID NO: 211660 - RNA, 19 nt, Artificial Sequence
  Description of Artificial Sequence: Synthetic oligonucleotide
  Sense strand starting at position 332 of SEQ ID NO: 2726
cucaaauucccucguaaag

SEQ ID NO: 211661 - RNA, 19 nt, Artificial Sequence
  Description of Artificial Sequence: Synthetic oligonucleotide
  Antisense strand to SEQ ID NO: 211660
cuuuacgagggaauuugag

SEQ ID NO: 211662 - RNA, 19 nt, Artificial Sequence
  Description of Artificial Sequence: Synthetic oligonucleotide
  Sense strand starting at position 416 of SEQ ID NO: 2726
gguggaguguagguuauuu

SEQ ID NO: 211663 - RNA, 19 nt, Artificial Sequence
  Description of Artificial Sequence: Synthetic oligonucleotide
  Antisense strand to SEQ ID NO: 211662
aaauaaccuacacuccacc

SEQ ID NO: 211664 - RNA, 19 nt, Artificial Sequence
  Description of Artificial Sequence: Synthetic oligonucleotide
  Sense strand starting at position 518 of SEQ ID NO: 2726
uuggguaaaucguuucaag

SEQ ID NO: 211665 - RNA, 19 nt, Artificial Sequence
  Description of Artificial Sequence: Synthetic oligonucleotide
  Antisense strand to SEQ ID NO: 211664
cuugaaacgauuuacccaa

SEQ ID NO: 211666 - RNA, 19 nt, Artificial Sequence
  Description of Artificial Sequence: Synthetic oligonucleotide
  Sense strand starting at position 628 of SEQ ID NO: 2726
gagccuuuacugugaguag

SEQ ID NO: 211667 - RNA, 19 nt, Artificial Sequence
  Description of Artificial Sequence: Synthetic oligonucleotide
  Antisense strand to SEQ ID NO: 211666
cuacucacaguaaaggcuc

SEQ ID NO: 211668 - RNA, 19 nt, Artificial Sequence
  Description of Artificial Sequence: Synthetic oligonucleotide
  Sense strand starting at position 632 of SEQ ID NO: 2726
cuuuacugugaguaggaca

SEQ ID NO: 211669 - RNA, 19 nt, Artificial Sequence
  Description of Artificial Sequence: Synthetic oligonucleotide
  Antisense strand to SEQ ID NO: 211668
uguccuacucacaguaaag

SEQ ID NO: 211670 - RNA, 19 nt, Artificial Sequence
  Description of Artificial Sequence: Synthetic oligonucleotide
  Sense strand starting at position 655 of SEQ ID NO: 2726
ucaggaggccucugaacaa

SEQ ID NO: 211671 - RNA, 19 nt, Artificial Sequence
  Description of Artificial Sequence: Synthetic oligonucleotide
  Antisense strand to SEQ ID NO: 211670
uuguucagaggccuccuga

SEQ ID NO: 211672 - RNA, 19 nt, Artificial Sequence
  Description of Artificial Sequence: Synthetic oligonucleotide
  Sense strand starting at position 688 of SEQ ID NO: 2726
gcuucauuugguuguugga

SEQ ID NO: 211673 - RNA, 19 nt, Artificial Sequence
  Description of Artificial Sequence: Synthetic oligonucleotide
  Antisense strand to SEQ ID NO: 211672
uccaacaaccaaaugaagc

SEQ ID NO: 211674 - RNA, 19 nt, Artificial Sequence
  Description of Artificial Sequence: Synthetic oligonucleotide
  Sense strand starting at position 697 of SEQ ID NO: 2726
gguuguuggaauugggaga

SEQ ID NO: 211675 - RNA, 19 nt, Artificial Sequence
  Description of Artificial Sequence: Synthetic oligonucleotide
  Antisense strand to SEQ ID NO: 211674
ucucccaauuccaacaacc

SEQ ID NO: 211676 - RNA, 19 nt, Artificial Sequence
  Description of Artificial Sequence: Synthetic oligonucleotide
  Sense strand starting at position 716 of SEQ ID NO: 2726
gcacaauugguuggaagga

SEQ ID NO: 211677 - RNA, 19 nt, Artificial Sequence
  Description of Artificial Sequence: Synthetic oligonucleotide
  Antisense strand to SEQ ID NO: 211676
uccuuccaaccaauugugc

SEQ ID NO: 211678 - RNA, 19 nt, Artificial Sequence
  Description of Artificial Sequence: Synthetic oligonucleotide
  Sense strand starting at position 717 of SEQ ID NO: 2726
cacaauugguuggaaggaa

SEQ ID NO: 211679 - RNA, 19 nt, Artificial Sequence
  Description of Artificial Sequence: Synthetic oligonucleotide
  Antisense strand to SEQ ID NO: 211678
uuccuuccaaccaauugug

SEQ ID NO: 211680 - RNA, 19 nt, Artificial Sequence
  Description of Artificial Sequence: Synthetic oligonucleotide
  Sense strand starting at position 1373 of SEQ ID NO: 2726
gugccugaaucagccuaaa

SEQ ID NO: 211681 - RNA, 19 nt, Artificial Sequence
  Description of Artificial Sequence: Synthetic oligonucleotide
  Antisense strand to SEQ ID NO: 211680
uuuaggcugauucaggcac

SEQ ID NO: 211682 - RNA, 19 nt, Artificial Sequence
  Description of Artificial Sequence: Synthetic oligonucleotide
  Sense strand starting at position 1484 of SEQ ID NO: 2726
cgcgaugucagacaagaaa

SEQ ID NO: 211683 - RNA, 19 nt, Artificial Sequence
  Description of Artificial Sequence: Synthetic oligonucleotide
  Antisense strand to SEQ ID NO: 211682
uuucuugucugacaucgcg

SEQ ID NO: 211684 - RNA, 19 nt, Artificial Sequence
  Description of Artificial Sequence: Synthetic oligonucleotide
  Sense strand starting at position 1629 of SEQ ID NO: 2726
gcucauucugcgcaaaucu

SEQ ID NO: 211685 - RNA, 19 nt, Artificial Sequence
  Description of Artificial Sequence: Synthetic oligonucleotide
  Antisense strand to SEQ ID NO: 211684
agauuugcgcagaaugagc

SEQ ID NO: 211686 - RNA, 19 nt, Artificial Sequence
  Description of Artificial Sequence: Synthetic oligonucleotide
  Sense strand starting at position 2024 of SEQ ID NO: 2726
ggguaaguacugcagguaa

SEQ ID NO: 211687 - RNA, 19 nt, Artificial Sequence
  Description of Artificial Sequence: Synthetic oligonucleotide
  Antisense strand to SEQ ID NO: 211686
uuaccugcaguacuuaccc

SEQ ID NO: 211688 - RNA, 19 nt, Artificial Sequence
  Description of Artificial Sequence: Synthetic oligonucleotide
  Sense strand starting at position 2026 of SEQ ID NO: 2726
guaaguacugcagguaacu

SEQ ID NO: 211689 - RNA, 19 nt, Artificial Sequence
  Description of Artificial Sequence: Synthetic oligonucleotide
  Antisense strand to SEQ ID NO: 211688
aguuaccugcaguacuuac

SEQ ID NO: 211690 - RNA, 19 nt, Artificial Sequence
  Description of Artificial Sequence: Synthetic oligonucleotide
  Sense strand starting at position 2213 of SEQ ID NO: 2726
cugacugaccucgagcaaa

SEQ ID NO: 211691 - RNA, 19 nt, Artificial Sequence
  Description of Artificial Sequence: Synthetic oligonucleotide
  Antisense strand to SEQ ID NO: 211690
uuugcucgaggucagucag

SEQ ID NO: 211692 - RNA, 19 nt, Artificial Sequence
  Description of Artificial Sequence: Synthetic oligonucleotide
  Sense strand starting at position 2244 of SEQ ID NO: 2726
gcacguuaccgucuuccau

SEQ ID NO: 211693 - RNA, 19 nt, Artificial Sequence
  Description of Artificial Sequence: Synthetic oligonucleotide
  Antisense strand to SEQ ID NO: 211692
auggaagacgguaacgugc

SEQ ID NO: 211694 - RNA, 19 nt, Artificial Sequence
  Description of Artificial Sequence: Synthetic oligonucleotide
  Sense strand starting at position 2356 of SEQ ID NO: 2726
ggagcuacuuaucuuauca

SEQ ID NO: 211695 - RNA, 19 nt, Artificial Sequence
  Description of Artificial Sequence: Synthetic oligonucleotide
  Antisense strand to SEQ ID NO: 211694
ugauaagauaaguagcucc

SEQ ID NO: 211696 - RNA, 19 nt, Artificial Sequence
  Description of Artificial Sequence: Synthetic oligonucleotide
  Sense strand starting at position 2371 of SEQ ID NO: 2726
aucacaggcucacuuagau

SEQ ID NO: 211697 - RNA, 19 nt, Artificial Sequence
  Description of Artificial Sequence: Synthetic oligonucleotide
  Antisense strand to SEQ ID NO: 211696
aucuaagugagccugugau

SEQ ID NO: 211698 - RNA, 19 nt, Artificial Sequence
  Description of Artificial Sequence: Synthetic oligonucleotide
  Sense strand starting at position 2387 of SEQ ID NO: 2726
gauuaccacuaggagauua

SEQ ID NO: 211699 - RNA, 19 nt, Artificial Sequence
  Description of Artificial Sequence: Synthetic oligonucleotide
  Antisense strand to SEQ ID NO: 211698
uaaucuccuagugguaauc

SEQ ID NO: 211700 - RNA, 19 nt, Artificial Sequence
  Description of Artificial Sequence: Synthetic oligonucleotide
  Sense strand starting at position 2464 of SEQ ID NO: 2726
ggcuaauuauggcauuucu

SEQ ID NO: 211701 - RNA, 19 nt, Artificial Sequence
  Description of Artificial Sequence: Synthetic oligonucleotide
  Antisense strand to SEQ ID NO: 211700
agaaaugccauaauuagcc

SEQ ID NO: 211702 - RNA, 19 nt, Artificial Sequence
  Description of Artificial Sequence: Synthetic oligonucleotide
  Sense strand starting at position 2487 of SEQ ID NO: 2726
caaggcauuggccagagau

SEQ ID NO: 211703 - RNA, 19 nt, Artificial Sequence
  Description of Artificial Sequence: Synthetic oligonucleotide
  Antisense strand to SEQ ID NO: 211702
aucucuggccaaugccuug

SEQ ID NO: 211704 - RNA, 19 nt, Artificial Sequence
  Description of Artificial Sequence: Synthetic oligonucleotide
  Sense strand starting at position 2489 of SEQ ID NO: 2726
aggcauuggccagagauau

SEQ ID NO: 211705 - RNA, 19 nt, Artificial Sequence
  Description of Artificial Sequence: Synthetic oligonucleotide
  Antisense strand to SEQ ID NO: 211704
auaucucuggccaaugccu

SEQ ID NO: 211706 - RNA, 19 nt, Artificial Sequence
  Description of Artificial Sequence: Synthetic oligonucleotide
  Sense strand starting at position 2540 of SEQ ID NO: 2726
gcaguaucuaccgauuagu

SEQ ID NO: 211707 - RNA, 19 nt, Artificial Sequence
  Description of Artificial Sequence: Synthetic oligonucleotide
  Antisense strand to SEQ ID NO: 211706
acuaaucgguagauacugc

SEQ ID NO: 211708 - RNA, 19 nt, Artificial Sequence
  Description of Artificial Sequence: Synthetic oligonucleotide
  Sense strand starting at position 2570 of SEQ ID NO: 2726
ugugcaaugcauccgucua

SEQ ID NO: 211709 - RNA, 19 nt, Artificial Sequence
  Description of Artificial Sequence: Synthetic oligonucleotide
  Antisense strand to SEQ ID NO: 211708
uagacggaugcauugcaca

SEQ ID NO: 211710 - RNA, 19 nt, Artificial Sequence
  Description of Artificial Sequence: Synthetic oligonucleotide
  Sense strand starting at position 2575 of SEQ ID NO: 2726
aaugcauccgucuauagau

SEQ ID NO: 211711 - RNA, 19 nt, Artificial Sequence
  Description of Artificial Sequence: Synthetic oligonucleotide
  Antisense strand to SEQ ID NO: 211710
aucuauagacggaugcauu

SEQ ID NO: 211712 - RNA, 19 nt, Artificial Sequence
  Description of Artificial Sequence: Synthetic oligonucleotide
  Sense strand starting at position 2577 of SEQ ID NO: 2726
ugcauccgucuauagauau

SEQ ID NO: 211713 - RNA, 19 nt, Artificial Sequence
  Description of Artificial Sequence: Synthetic oligonucleotide
  Antisense strand to SEQ ID NO: 211712
auaucuauagacggaugca

SEQ ID NO: 211714 - RNA, 19 nt, Artificial Sequence
  Description of Artificial Sequence: Synthetic oligonucleotide
  Sense strand starting at position 2981 of SEQ ID NO: 2726
agcuuuaaugguggguaga

SEQ ID NO: 211715 - RNA, 19 nt, Artificial Sequence
  Description of Artificial Sequence: Synthetic oligonucleotide
  Antisense strand to SEQ ID NO: 211714
ucuacccaccauuaaagcu

SEQ ID NO: 211716 - RNA, 19 nt, Artificial Sequence
  Description of Artificial Sequence: Synthetic oligonucleotide
  Sense strand starting at position 2982 of SEQ ID NO: 2726
gcuuuaaugguggguagaa

SEQ ID NO: 211717 - RNA, 19 nt, Artificial Sequence
  Description of Artificial Sequence: Synthetic oligonucleotide
  Antisense strand to SEQ ID NO: 211716
uucuacccaccauuaaagc

SEQ ID NO: 211718 - RNA, 19 nt, Artificial Sequence
  Description of Artificial Sequence: Synthetic oligonucleotide
  Sense strand starting at position 2983 of SEQ ID NO: 2726
cuuuaaugguggguagaag

SEQ ID NO: 211719 - RNA, 19 nt, Artificial Sequence
  Description of Artificial Sequence: Synthetic oligonucleotide
  Antisense strand to SEQ ID NO: 211718
cuucuacccaccauuaaag

SEQ ID NO: 211720 - RNA, 19 nt, Artificial Sequence
  Description of Artificial Sequence: Synthetic oligonucleotide
  Sense strand starting at position 2984 of SEQ ID NO: 2726
uuuaaugguggguagaagu

SEQ ID NO: 211721 - RNA, 19 nt, Artificial Sequence
  Description of Artificial Sequence: Synthetic oligonucleotide
  Antisense strand to SEQ ID NO: 211720
acuucuacccaccauuaaa

SEQ ID NO: 211722 - RNA, 19 nt, Artificial Sequence
  Description of Artificial Sequence: Synthetic oligonucleotide
  Sense strand starting at position 3491 of SEQ ID NO: 2726
uuuaguuuaccuggaaggu

SEQ ID NO: 211723 - RNA, 19 nt, Artificial Sequence
  Description of Artificial Sequence: Synthetic oligonucleotide
  Antisense strand to SEQ ID NO: 211722
accuuccagguaaacuaaa

SEQ ID NO: 211724 - RNA, 19 nt, Artificial Sequence
  Description of Artificial Sequence: Synthetic oligonucleotide
  Sense strand starting at position 3645 of SEQ ID NO: 2726
uguuguugucguuuacuga

SEQ ID NO: 211725 - RNA, 19 nt, Artificial Sequence
  Description of Artificial Sequence: Synthetic oligonucleotide
  Antisense strand to SEQ ID NO: 211724
ucaguaaacgacaacaaca

SEQ ID NO: 211726 - RNA, 19 nt, Artificial Sequence
  Description of Artificial Sequence: Synthetic oligonucleotide
  Sense strand starting at position 3646 of SEQ ID NO: 2726
guuguugucguuuacugaa

SEQ ID NO: 211727 - RNA, 19 nt, Artificial Sequence
  Description of Artificial Sequence: Synthetic oligonucleotide
  Antisense strand to SEQ ID NO: 211726
uucaguaaacgacaacaac

SEQ ID NO: 211728 - RNA, 19 nt, Artificial Sequence
  Description of Artificial Sequence: Synthetic oligonucleotide
  Sense strand starting at position 3714 of SEQ ID NO: 2726
gugcauugaauuugugacu

SEQ ID NO: 211729 - RNA, 19 nt, Artificial Sequence
  Description of Artificial Sequence: Synthetic oligonucleotide
  Antisense strand to SEQ ID NO: 211728
agucacaaauucaaugcac

SEQ ID NO: 211730 - RNA, 19 nt, Artificial Sequence
  Description of Artificial Sequence: Synthetic oligonucleotide
  Sense strand starting at position 3886 of SEQ ID NO: 2726
ugcauuugcuuuguuucua

SEQ ID NO: 211731 - RNA, 19 nt, Artificial Sequence
  Description of Artificial Sequence: Synthetic oligonucleotide
  Antisense strand to SEQ ID NO: 211730
uagaaacaaagcaaaugca

SEQ ID NO: 211732 - RNA, 19 nt, Artificial Sequence
  Description of Artificial Sequence: Synthetic oligonucleotide
  Sense strand starting at position 3887 of SEQ ID NO: 2726
gcauuugcuuuguuucuau

SEQ ID NO: 211733 - RNA, 19 nt, Artificial Sequence
  Description of Artificial Sequence: Synthetic oligonucleotide
  Antisense strand to SEQ ID NO: 211732
auagaaacaaagcaaaugc

SEQ ID NO: 211734 - RNA, 19 nt, Artificial Sequence
  Description of Artificial Sequence: Synthetic oligonucleotide
  Sense strand starting at position 3898 of SEQ ID NO: 2726
guuucuauucuaugcuuau

SEQ ID NO: 211735 - RNA, 19 nt, Artificial Sequence
  Description of Artificial Sequence: Synthetic oligonucleotide
  Antisense strand to SEQ ID NO: 211734
auaagcauagaauagaaac

SEQ ID NO: 211736 - RNA, 19 nt, Artificial Sequence
  Description of Artificial Sequence: Synthetic oligonucleotide
  Sense strand starting at position 31 of SEQ ID NO: 2728
uagcuuucgcucgcaucaa

SEQ ID NO: 211737 - RNA, 19 nt, Artificial Sequence
  Description of Artificial Sequence: Synthetic oligonucleotide
  Antisense strand to SEQ ID NO: 211736
uugaugcgagcgaaagcua

SEQ ID NO: 211738 - RNA, 19 nt, Artificial Sequence
  Description of Artificial Sequence: Synthetic oligonucleotide
  Sense strand starting at position 41 of SEQ ID NO: 2728
ucgcaucaagaaugaaaug

SEQ ID NO: 211739 - RNA, 19 nt, Artificial Sequence
  Description of Artificial Sequence: Synthetic oligonucleotide
  Antisense strand to SEQ ID NO: 211738
cauuucauucuugaugcga

SEQ ID NO: 211740 - RNA, 19 nt, Artificial Sequence
  Description of Artificial Sequence: Synthetic oligonucleotide
  Sense strand starting at position 510 of SEQ ID NO: 2728
gggaguuaauaagaaccaa

SEQ ID NO: 211741 - RNA, 19 nt, Artificial Sequence
  Description of Artificial Sequence: Synthetic oligonucleotide
  Antisense strand to SEQ ID NO: 211740
uugguucuuauuaacuccc

SEQ ID NO: 211742 - RNA, 19 nt, Artificial Sequence
  Description of Artificial Sequence: Synthetic oligonucleotide
  Sense strand starting at position 554 of SEQ ID NO: 2728
uggcauggcgcauacauua

SEQ ID NO: 211743 - RNA, 19 nt, Artificial Sequence
  Description of Artificial Sequence: Synthetic oligonucleotide
  Antisense strand to SEQ ID NO: 211742
uaauguaugcgccaugcca

SEQ ID NO: 211744 - RNA, 19 nt, Artificial Sequence
  Description of Artificial Sequence: Synthetic oligonucleotide
  Sense strand starting at position 654 of SEQ ID NO: 2728
ggguuaaagaugugcucaa

SEQ ID NO: 211745 - RNA, 19 nt, Artificial Sequence
  Description of Artificial Sequence: Synthetic oligonucleotide
  Antisense strand to SEQ ID NO: 211744
uugagcacaucuuuaaccc

SEQ ID NO: 211746 - RNA, 19 nt, Artificial Sequence
  Description of Artificial Sequence: Synthetic oligonucleotide
  Sense strand starting at position 655 of SEQ ID NO: 2728
gguuaaagaugugcucaag

SEQ ID NO: 211747 - RNA, 19 nt, Artificial Sequence
  Description of Artificial Sequence: Synthetic oligonucleotide
  Antisense strand to SEQ ID NO: 211746
cuugagcacaucuuuaacc

SEQ ID NO: 211748 - RNA, 19 nt, Artificial Sequence
  Description of Artificial Sequence: Synthetic oligonucleotide
  Sense strand starting at position 658 of SEQ ID NO: 2728
uaaagaugugcucaagguc

SEQ ID NO: 211749 - RNA, 19 nt, Artificial Sequence
  Description of Artificial Sequence: Synthetic oligonucleotide
  Antisense strand to SEQ ID NO: 211748
gaccuugagcacaucuuua

SEQ ID NO: 211750 - RNA, 19 nt, Artificial Sequence
  Description of Artificial Sequence: Synthetic oligonucleotide
  Sense strand starting at position 674 of SEQ ID NO: 2728
gucacacagugauccagau

SEQ ID NO: 211751 - RNA, 19 nt, Artificial Sequence
  Description of Artificial Sequence: Synthetic oligonucleotide
  Antisense strand to SEQ ID NO: 211750
aucuggaucacugugugac

SEQ ID NO: 211752 - RNA, 19 nt, Artificial Sequence
  Description of Artificial Sequence: Synthetic oligonucleotide
  Sense strand starting at position 774 of SEQ ID NO: 2728
uuaugugcucacgagcaca

SEQ ID NO: 211753 - RNA, 19 nt, Artificial Sequence
  Description of Artificial Sequence: Synthetic oligonucleotide
  Antisense strand to SEQ ID NO: 211752
ugugcucgugagcacauaa

SEQ ID NO: 211754 - RNA, 19 nt, Artificial Sequence
  Description of Artificial Sequence: Synthetic oligonucleotide
  Sense strand starting at position 1048 of SEQ ID NO: 2728
cucagagggaccugauguu

SEQ ID NO: 211755 - RNA, 19 nt, Artificial Sequence
  Description of Artificial Sequence: Synthetic oligonucleotide
  Antisense strand to SEQ ID NO: 211754
aacaucaggucccucugag

SEQ ID NO: 211756 - RNA, 19 nt, Artificial Sequence
  Description of Artificial Sequence: Synthetic oligonucleotide
  Sense strand starting at position 1054 of SEQ ID NO: 2728
gggaccugauguuucuaga

SEQ ID NO: 211757 - RNA, 19 nt, Artificial Sequence
  Description of Artificial Sequence: Synthetic oligonucleotide
  Antisense strand to SEQ ID NO: 211756
ucuagaaacaucagguccc

SEQ ID NO: 211758 - RNA, 19 nt, Artificial Sequence
  Description of Artificial Sequence: Synthetic oligonucleotide
  Sense strand starting at position 1068 of SEQ ID NO: 2728
cuagauccaucaguaauga

SEQ ID NO: 211759 - RNA, 19 nt, Artificial Sequence
  Description of Artificial Sequence: Synthetic oligonucleotide
  Antisense strand to SEQ ID NO: 211758
ucauuacugauggaucuag

SEQ ID NO: 211760 - RNA, 19 nt, Artificial Sequence
  Description of Artificial Sequence: Synthetic oligonucleotide
  Sense strand starting at position 1084 of SEQ ID NO: 2728
ugacuuuagugcucugaac

SEQ ID NO: 211761 - RNA, 19 nt, Artificial Sequence
  Description of Artificial Sequence: Synthetic oligonucleotide
  Antisense strand to SEQ ID NO: 211760
guucagagcacuaaaguca

SEQ ID NO: 211762 - RNA, 19 nt, Artificial Sequence
  Description of Artificial Sequence: Synthetic oligonucleotide
  Sense strand starting at position 1109 of SEQ ID NO: 2728
ggcuguuucuauuuaugau

SEQ ID NO: 211763 - RNA, 19 nt, Artificial Sequence
  Description of Artificial Sequence: Synthetic oligonucleotide
  Antisense strand to SEQ ID NO: 211762
aucauaaauagaaacagcc

SEQ ID NO: 211764 - RNA, 19 nt, Artificial Sequence
  Description of Artificial Sequence: Synthetic oligonucleotide
  Sense strand starting at position 1248 of SEQ ID NO: 2728
uguggaggcuucuuccaaa

SEQ ID NO: 211765 - RNA, 19 nt, Artificial Sequence
  Description of Artificial Sequence: Synthetic oligonucleotide
  Antisense strand to SEQ ID NO: 211764
uuuggaagaagccuccaca

SEQ ID NO: 211766 - RNA, 19 nt, Artificial Sequence
  Description of Artificial Sequence: Synthetic oligonucleotide
  Sense strand starting at position 1438 of SEQ ID NO: 2728
cugagaacgcccgauguuu

SEQ ID NO: 211767 - RNA, 19 nt, Artificial Sequence
  Description of Artificial Sequence: Synthetic oligonucleotide
  Antisense strand to SEQ ID NO: 211766
aaacaucgggcguucucag

SEQ ID NO: 211768 - RNA, 19 nt, Artificial Sequence
  Description of Artificial Sequence: Synthetic oligonucleotide
  Sense strand starting at position 2175 of SEQ ID NO: 2728
cuccgcuuuccagaaagga

SEQ ID NO: 211769 - RNA, 19 nt, Artificial Sequence
  Description of Artificial Sequence: Synthetic oligonucleotide
  Antisense strand to SEQ ID NO: 211768
uccuuucuggaaagcggag

SEQ ID NO: 211770 - RNA, 19 nt, Artificial Sequence
  Description of Artificial Sequence: Synthetic oligonucleotide
  Sense strand starting at position 2248 of SEQ ID NO: 2728
ccgggaggugcucaggaaa

SEQ ID NO: 211771 - RNA, 19 nt, Artificial Sequence
  Description of Artificial Sequence: Synthetic oligonucleotide
  Antisense strand to SEQ ID NO: 211770
uuuccugagcaccucccgg

SEQ ID NO: 211772 - RNA, 19 nt, Artificial Sequence
  Description of Artificial Sequence: Synthetic oligonucleotide
  Sense strand starting at position 2553 of SEQ ID NO: 2728
agaccuagaucuuaagaau

SEQ ID NO: 211773 - RNA, 19 nt, Artificial Sequence
  Description of Artificial Sequence: Synthetic oligonucleotide
  Antisense strand to SEQ ID NO: 211772
auucuuaagaucuaggucu

SEQ ID NO: 211774 - RNA, 19 nt, Artificial Sequence
  Description of Artificial Sequence: Synthetic oligonucleotide
  Sense strand starting at position 2562 of SEQ ID NO: 2728
ucuuaagaauuucgaagga

SEQ ID NO: 211775 - RNA, 19 nt, Artificial Sequence
  Description of Artificial Sequence: Synthetic oligonucleotide
  Antisense strand to SEQ ID NO: 211774
uccuucgaaauucuuaaga

SEQ ID NO: 211776 - RNA, 19 nt, Artificial Sequence
  Description of Artificial Sequence: Synthetic oligonucleotide
  Sense strand starting at position 2631 of SEQ ID NO: 2728
cuauuuguugcgcgaucca

SEQ ID NO: 211777 - RNA, 19 nt, Artificial Sequence
  Description of Artificial Sequence: Synthetic oligonucleotide
  Antisense strand to SEQ ID NO: 211776
uggaucgcgcaacaaauag

SEQ ID NO: 211778 - RNA, 19 nt, Artificial Sequence
  Description of Artificial Sequence: Synthetic oligonucleotide
  Sense strand starting at position 2795 of SEQ ID NO: 2728
gggagaggcuccuuguaaa

SEQ ID NO: 211779 - RNA, 19 nt, Artificial Sequence
  Description of Artificial Sequence: Synthetic oligonucleotide
  Antisense strand to SEQ ID NO: 211778
uuuacaaggagccucuccc

SEQ ID NO: 211780 - RNA, 19 nt, Artificial Sequence
  Description of Artificial Sequence: Synthetic oligonucleotide
  Sense strand starting at position 2832 of SEQ ID NO: 2728
caggcagguccauggguua

SEQ ID NO: 211781 - RNA, 19 nt, Artificial Sequence
  Description of Artificial Sequence: Synthetic oligonucleotide
  Antisense strand to SEQ ID NO: 211780
uaacccauggaccugccug

SEQ ID NO: 211782 - RNA, 19 nt, Artificial Sequence
  Description of Artificial Sequence: Synthetic oligonucleotide
  Sense strand starting at position 2850 of SEQ ID NO: 2728
acccuaagagcuuagaguu

SEQ ID NO: 211783 - RNA, 19 nt, Artificial Sequence
  Description of Artificial Sequence: Synthetic oligonucleotide
  Antisense strand to SEQ ID NO: 211782
aacucuaagcucuuagggu

SEQ ID NO: 211784 - RNA, 19 nt, Artificial Sequence
  Description of Artificial Sequence: Synthetic oligonucleotide
  Sense strand starting at position 2857 of SEQ ID NO: 2728
gagcuuagaguuuaucgga

SEQ ID NO: 211785 - RNA, 19 nt, Artificial Sequence
  Description of Artificial Sequence: Synthetic oligonucleotide
  Antisense strand to SEQ ID NO: 211784
uccgauaaacucuaagcuc

SEQ ID NO: 211786 - RNA, 19 nt, Artificial Sequence
  Description of Artificial Sequence: Synthetic oligonucleotide
  Sense strand starting at position 2866 of SEQ ID NO: 2728
guuuaucggagaggaaaug

SEQ ID NO: 211787 - RNA, 19 nt, Artificial Sequence
  Description of Artificial Sequence: Synthetic oligonucleotide
  Antisense strand to SEQ ID NO: 211786
cauuuccucuccgauaaac

SEQ ID NO: 211788 - RNA, 19 nt, Artificial Sequence
  Description of Artificial Sequence: Synthetic oligonucleotide
  Sense strand starting at position 3115 of SEQ ID NO: 2728
uacaauguguggucuuuag

SEQ ID NO: 211789 - RNA, 19 nt, Artificial Sequence
  Description of Artificial Sequence: Synthetic oligonucleotide
  Antisense strand to SEQ ID NO: 211788
cuaaagaccacacauugua

SEQ ID NO: 211790 - RNA, 19 nt, Artificial Sequence
  Description of Artificial Sequence: Synthetic oligonucleotide
  Sense strand starting at position 3193 of SEQ ID NO: 2728
uucuucuuauuguugagua

SEQ ID NO: 211791 - RNA, 19 nt, Artificial Sequence
  Description of Artificial Sequence: Synthetic oligonucleotide
  Antisense strand to SEQ ID NO: 211790
uacucaacaauaagaagaa

SEQ ID NO: 211792 - RNA, 19 nt, Artificial Sequence
  Description of Artificial Sequence: Synthetic oligonucleotide
  Sense strand starting at position 3257 of SEQ ID NO: 2728
ucaucuaaugauggacauu

SEQ ID NO: 211793 - RNA, 19 nt, Artificial Sequence
  Description of Artificial Sequence: Synthetic oligonucleotide
  Antisense strand to SEQ ID NO: 211792
aauguccaucauuagauga

SEQ ID NO: 211794 - RNA, 19 nt, Artificial Sequence
  Description of Artificial Sequence: Synthetic oligonucleotide
  Sense strand starting at position 3281 of SEQ ID NO: 2728
gggcuacuauaucuacuuu

SEQ ID NO: 211795 - RNA, 19 nt, Artificial Sequence
  Description of Artificial Sequence: Synthetic oligonucleotide
  Antisense strand to SEQ ID NO: 211794
aaaguagauauaguagccc

SEQ ID NO: 211796 - RNA, 19 nt, Artificial Sequence
  Description of Artificial Sequence: Synthetic oligonucleotide
  Sense strand starting at position 3373 of SEQ ID NO: 2728
ucagguauguacucaggca

SEQ ID NO: 211797 - RNA, 19 nt, Artificial Sequence
  Description of Artificial Sequence: Synthetic oligonucleotide
  Antisense strand to SEQ ID NO: 211796
ugccugaguacauaccuga

SEQ ID NO: 211798 - RNA, 19 nt, Artificial Sequence
  Description of Artificial Sequence: Synthetic oligonucleotide
  Sense strand starting at position 3598 of SEQ ID NO: 2728
uuuguacuuccugaaugag

SEQ ID NO: 211799 - RNA, 19 nt, Artificial Sequence
  Description of Artificial Sequence: Synthetic oligonucleotide
  Antisense strand to SEQ ID NO: 211798
cucauucaggaaguacaaa

SEQ ID NO: 211800 - RNA, 19 nt, Artificial Sequence
  Description of Artificial Sequence: Synthetic oligonucleotide
  Sense strand starting at position 3601 of SEQ ID NO: 2728
guacuuccugaaugagaaa

SEQ ID NO: 211801 - RNA, 19 nt, Artificial Sequence
  Description of Artificial Sequence: Synthetic oligonucleotide
  Antisense strand to SEQ ID NO: 211800
uuucucauucaggaaguac

SEQ ID NO: 211802 - RNA, 19 nt, Artificial Sequence
  Description of Artificial Sequence: Synthetic oligonucleotide
  Sense strand starting at position 3604 of SEQ ID NO: 2728
cuuccugaaugagaaauga

SEQ ID NO: 211803 - RNA, 19 nt, Artificial Sequence
  Description of Artificial Sequence: Synthetic oligonucleotide
  Antisense strand to SEQ ID NO: 211802
ucauuucucauucaggaag

SEQ ID NO: 211804 - RNA, 19 nt, Artificial Sequence
  Description of Artificial Sequence: Synthetic oligonucleotide
  Sense strand starting at position 3657 of SEQ ID NO: 2728
uguauuucuucuuuguaug

SEQ ID NO: 211805 - RNA, 19 nt, Artificial Sequence
  Description of Artificial Sequence: Synthetic oligonucleotide
  Antisense strand to SEQ ID NO: 211804
cauacaaagaagaaauaca

SEQ ID NO: 211806 - RNA, 19 nt, Artificial Sequence
  Description of Artificial Sequence: Synthetic oligonucleotide
  Sense strand starting at position 3658 of SEQ ID NO: 2728
guauuucuucuuuguaugu

SEQ ID NO: 211807 - RNA, 19 nt, Artificial Sequence
  Description of Artificial Sequence: Synthetic oligonucleotide
  Antisense strand to SEQ ID NO: 211806
acauacaaagaagaaauac

SEQ ID NO: 211808 - RNA, 19 nt, Artificial Sequence
  Description of Artificial Sequence: Synthetic oligonucleotide
  Sense strand starting at position 3757 of SEQ ID NO: 2728
aggaacaacuuucucagua

SEQ ID NO: 211809 - RNA, 19 nt, Artificial Sequence
  Description of Artificial Sequence: Synthetic oligonucleotide
  Antisense strand to SEQ ID NO: 211808
uacugagaaaguuguuccu

SEQ ID NO: 211810 - RNA, 19 nt, Artificial Sequence
  Description of Artificial Sequence: Synthetic oligonucleotide
  Sense strand starting at position 3758 of SEQ ID NO: 2728
ggaacaacuuucucaguaa

SEQ ID NO: 211811 - RNA, 19 nt, Artificial Sequence
  Description of Artificial Sequence: Synthetic oligonucleotide
  Antisense strand to SEQ ID NO: 211810
uuacugagaaaguuguucc

SEQ ID NO: 211812 - RNA, 19 nt, Artificial Sequence
  Description of Artificial Sequence: Synthetic oligonucleotide
  Sense strand starting at position 3889 of SEQ ID NO: 2728
auauuagugguuuaacuca

SEQ ID NO: 211813 - RNA, 19 nt, Artificial Sequence
  Description of Artificial Sequence: Synthetic oligonucleotide
  Antisense strand to SEQ ID NO: 211812
ugaguuaaaccacuaauau

SEQ ID NO: 211814 - RNA, 19 nt, Artificial Sequence
  Description of Artificial Sequence: Synthetic oligonucleotide
  Sense strand starting at position 3943 of SEQ ID NO: 2728
ugcaguugugccagggagu

SEQ ID NO: 211815 - RNA, 19 nt, Artificial Sequence
  Description of Artificial Sequence: Synthetic oligonucleotide
  Antisense strand to SEQ ID NO: 211814
acucccuggcacaacugca

SEQ ID NO: 211816 - RNA, 19 nt, Artificial Sequence
  Description of Artificial Sequence: Synthetic oligonucleotide
  Sense strand starting at position 128 of SEQ ID NO: 2730
uggaaucuuugucucccua

SEQ ID NO: 211817 - RNA, 19 nt, Artificial Sequence
  Description of Artificial Sequence: Synthetic oligonucleotide
  Antisense strand to SEQ ID NO: 211816
uagggagacaaagauucca

SEQ ID NO: 211818 - RNA, 19 nt, Artificial Sequence
  Description of Artificial Sequence: Synthetic oligonucleotide
  Sense strand starting at position 422 of SEQ ID NO: 2730
ccuggcucucaguaaugua

SEQ ID NO: 211819 - RNA, 19 nt, Artificial Sequence
  Description of Artificial Sequence: Synthetic oligonucleotide
  Antisense strand to SEQ ID NO: 211818
uacauuacugagagccagg

SEQ ID NO: 211820 - RNA, 19 nt, Artificial Sequence
  Description of Artificial Sequence: Synthetic oligonucleotide
  Sense strand starting at position 615 of SEQ ID NO: 2730
uccucacaugucugauacu

SEQ ID NO: 211821 - RNA, 19 nt, Artificial Sequence
  Description of Artificial Sequence: Synthetic oligonucleotide
  Antisense strand to SEQ ID NO: 211820
aguaucagacaugugagga

SEQ ID NO: 211822 - RNA, 19 nt, Artificial Sequence
  Description of Artificial Sequence: Synthetic oligonucleotide
  Sense strand starting at position 626 of SEQ ID NO: 2730
cugauacuugucuguguca

SEQ ID NO: 211823 - RNA, 19 nt, Artificial Sequence
  Description of Artificial Sequence: Synthetic oligonucleotide
  Antisense strand to SEQ ID NO: 211822
ugacacagacaaguaucag

SEQ ID NO: 211824 - RNA, 19 nt, Artificial Sequence
  Description of Artificial Sequence: Synthetic oligonucleotide
  Sense strand starting at position 627 of SEQ ID NO: 2730
ugauacuugucugugucaa

SEQ ID NO: 211825 - RNA, 19 nt, Artificial Sequence
  Description of Artificial Sequence: Synthetic oligonucleotide
  Antisense strand to SEQ ID NO: 211824
uugacacagacaaguauca

SEQ ID NO: 211826 - RNA, 19 nt, Artificial Sequence
  Description of Artificial Sequence: Synthetic oligonucleotide
  Sense strand starting at position 628 of SEQ ID NO: 2730
gauacuugucugugucaag

SEQ ID NO: 211827 - RNA, 19 nt, Artificial Sequence
  Description of Artificial Sequence: Synthetic oligonucleotide
  Antisense strand to SEQ ID NO: 211826
cuugacacagacaaguauc

SEQ ID NO: 211828 - RNA, 19 nt, Artificial Sequence
  Description of Artificial Sequence: Synthetic oligonucleotide
  Sense strand starting at position 853 of SEQ ID NO: 2730
guaccaauccaugaugcga

SEQ ID NO: 211829 - RNA, 19 nt, Artificial Sequence
  Description of Artificial Sequence: Synthetic oligonucleotide
  Antisense strand to SEQ ID NO: 211828
ucgcaucauggauugguac

SEQ ID NO: 211830 - RNA, 19 nt, Artificial Sequence
  Description of Artificial Sequence: Synthetic oligonucleotide
  Sense strand starting at position 926 of SEQ ID NO: 2730
ccagaauggcucugccaau

SEQ ID NO: 211831 - RNA, 19 nt, Artificial Sequence
  Description of Artificial Sequence: Synthetic oligonucleotide
  Antisense strand to SEQ ID NO: 211830
auuggcagagccauucugg

SEQ ID NO: 211832 - RNA, 19 nt, Artificial Sequence
  Description of Artificial Sequence: Synthetic oligonucleotide
  Sense strand starting at position 1336 of SEQ ID NO: 2730
cgcauuauccgcuccgaga

SEQ ID NO: 211833 - RNA, 19 nt, Artificial Sequence
  Description of Artificial Sequence: Synthetic oligonucleotide
  Antisense strand to SEQ ID NO: 211832
ucucggagcggauaaugcg

SEQ ID NO: 211834 - RNA, 19 nt, Artificial Sequence
  Description of Artificial Sequence: Synthetic oligonucleotide
  Sense strand starting at position 1697 of SEQ ID NO: 2730
gcgacuucucucggagaag

SEQ ID NO: 211835 - RNA, 19 nt, Artificial Sequence
  Description of Artificial Sequence: Synthetic oligonucleotide
  Antisense strand to SEQ ID NO: 211834
cuucuccgagagaagucgc

SEQ ID NO: 211836 - RNA, 19 nt, Artificial Sequence
  Description of Artificial Sequence: Synthetic oligonucleotide
  Sense strand starting at position 1718 of SEQ ID NO: 2730
gccgcuuucgacucccuaa

SEQ ID NO: 211837 - RNA, 19 nt, Artificial Sequence
  Description of Artificial Sequence: Synthetic oligonucleotide
  Antisense strand to SEQ ID NO: 211836
uuagggagucgaaagcggc

SEQ ID NO: 211838 - RNA, 19 nt, Artificial Sequence
  Description of Artificial Sequence: Synthetic oligonucleotide
  Sense strand starting at position 2010 of SEQ ID NO: 2730
ggucgcguucugucaguuu

SEQ ID NO: 211839 - RNA, 19 nt, Artificial Sequence
  Description of Artificial Sequence: Synthetic oligonucleotide
  Antisense strand to SEQ ID NO: 211838
aaacugacagaacgcgacc

SEQ ID NO: 211840 - RNA, 19 nt, Artificial Sequence
  Description of Artificial Sequence: Synthetic oligonucleotide
  Sense strand starting at position 2072 of SEQ ID NO: 2730
gaauaagcgcccugaagau

SEQ ID NO: 211841 - RNA, 19 nt, Artificial Sequence
  Description of Artificial Sequence: Synthetic oligonucleotide
  Antisense strand to SEQ ID NO: 211840
aucuucagggcgcuuauuc

SEQ ID NO: 211842 - RNA, 19 nt, Artificial Sequence
  Description of Artificial Sequence: Synthetic oligonucleotide
  Sense strand starting at position 2377 of SEQ ID NO: 2730
cgugaaccggguuaaugaa

SEQ ID NO: 211843 - RNA, 19 nt, Artificial Sequence
  Description of Artificial Sequence: Synthetic oligonucleotide
  Antisense strand to SEQ ID NO: 211842
uucauuaacccgguucacg

SEQ ID NO: 211844 - RNA, 19 nt, Artificial Sequence
  Description of Artificial Sequence: Synthetic oligonucleotide
  Sense strand starting at position 2384 of SEQ ID NO: 2730
cggguuaaugaaugcuaau

SEQ ID NO: 211845 - RNA, 19 nt, Artificial Sequence
  Description of Artificial Sequence: Synthetic oligonucleotide
  Antisense strand to SEQ ID NO: 211844
auuagcauucauuaacccg

SEQ ID NO: 211846 - RNA, 19 nt, Artificial Sequence
  Description of Artificial Sequence: Synthetic oligonucleotide
  Sense strand starting at position 2590 of SEQ ID NO: 2730
gauggaaauccuggcacaa

SEQ ID NO: 211847 - RNA, 19 nt, Artificial Sequence
  Description of Artificial Sequence: Synthetic oligonucleotide
  Antisense strand to SEQ ID NO: 211846
uugugccaggauuuccauc

SEQ ID NO: 211848 - RNA, 19 nt, Artificial Sequence
  Description of Artificial Sequence: Synthetic oligonucleotide
  Sense strand starting at position 2630 of SEQ ID NO: 2730
cuuggcuuugccgagagau

SEQ ID NO: 211849 - RNA, 19 nt, Artificial Sequence
  Description of Artificial Sequence: Synthetic oligonucleotide
  Antisense strand to SEQ ID NO: 211848
aucucucggcaaagccaag

SEQ ID NO: 211850 - RNA, 19 nt, Artificial Sequence
  Description of Artificial Sequence: Synthetic oligonucleotide
  Sense strand starting at position 2632 of SEQ ID NO: 2730
uggcuuugccgagagauau

SEQ ID NO: 211851 - RNA, 19 nt, Artificial Sequence
  Description of Artificial Sequence: Synthetic oligonucleotide
  Antisense strand to SEQ ID NO: 211850
auaucucucggcaaagcca

SEQ ID NO: 211852 - RNA, 19 nt, Artificial Sequence
  Description of Artificial Sequence: Synthetic oligonucleotide
  Sense strand starting at position 2832 of SEQ ID NO: 2730
gucaaauggccaugagguu

SEQ ID NO: 211853 - RNA, 19 nt, Artificial Sequence
  Description of Artificial Sequence: Synthetic oligonucleotide
  Antisense strand to SEQ ID NO: 211852
aaccucauggccauuugac

SEQ ID NO: 211854 - RNA, 19 nt, Artificial Sequence
  Description of Artificial Sequence: Synthetic oligonucleotide
  Sense strand starting at position 2881 of SEQ ID NO: 2730
auguuagaaguuugacaag

SEQ ID NO: 211855 - RNA, 19 nt, Artificial Sequence
  Description of Artificial Sequence: Synthetic oligonucleotide
  Antisense strand to SEQ ID NO: 211854
cuugucaaacuucuaacau

SEQ ID NO: 211856 - RNA, 19 nt, Artificial Sequence
  Description of Artificial Sequence: Synthetic oligonucleotide
  Sense strand starting at position 2951 of SEQ ID NO: 2730
agacaacucguccaaaguu

SEQ ID NO: 211857 - RNA, 19 nt, Artificial Sequence
  Description of Artificial Sequence: Synthetic oligonucleotide
  Antisense strand to SEQ ID NO: 211856
aacuuuggacgaguugucu

SEQ ID NO: 211858 - RNA, 19 nt, Artificial Sequence
  Description of Artificial Sequence: Synthetic oligonucleotide
  Sense strand starting at position 2961 of SEQ ID NO: 2730
uccaaaguuuccuuuggca

SEQ ID NO: 211859 - RNA, 19 nt, Artificial Sequence
  Description of Artificial Sequence: Synthetic oligonucleotide
  Antisense strand to SEQ ID NO: 211858
ugccaaaggaaacuuugga

SEQ ID NO: 211860 - RNA, 19 nt, Artificial Sequence
  Description of Artificial Sequence: Synthetic oligonucleotide
  Sense strand starting at position 2963 of SEQ ID NO: 2730
caaaguuuccuuuggcaga

SEQ ID NO: 211861 - RNA, 19 nt, Artificial Sequence
  Description of Artificial Sequence: Synthetic oligonucleotide
  Antisense strand to SEQ ID NO: 211860
ucugccaaaggaaacuuug

SEQ ID NO: 211862 - RNA, 19 nt, Artificial Sequence
  Description of Artificial Sequence: Synthetic oligonucleotide
  Sense strand starting at position 2965 of SEQ ID NO: 2730
aaguuuccuuuggcagaua

SEQ ID NO: 211863 - RNA, 19 nt, Artificial Sequence
  Description of Artificial Sequence: Synthetic oligonucleotide
  Antisense strand to SEQ ID NO: 211862
uaucugccaaaggaaacuu

SEQ ID NO: 211864 - RNA, 19 nt, Artificial Sequence
  Description of Artificial Sequence: Synthetic oligonucleotide
  Sense strand starting at position 2984 of SEQ ID NO: 2730
ccuggauucuacuccagau

SEQ ID NO: 211865 - RNA, 19 nt, Artificial Sequence
  Description of Artificial Sequence: Synthetic oligonucleotide
  Antisense strand to SEQ ID NO: 211864
aucuggaguagaauccagg

SEQ ID NO: 211866 - RNA, 19 nt, Artificial Sequence
  Description of Artificial Sequence: Synthetic oligonucleotide
  Sense strand starting at position 3246 of SEQ ID NO: 2730
cgacacacaugucuuguau

SEQ ID NO: 211867 - RNA, 19 nt, Artificial Sequence
  Description of Artificial Sequence: Synthetic oligonucleotide
  Antisense strand to SEQ ID NO: 211866
auacaagacaugugugucg

SEQ ID NO: 211868 - RNA, 19 nt, Artificial Sequence
  Description of Artificial Sequence: Synthetic oligonucleotide
  Sense strand starting at position 3252 of SEQ ID NO: 2730
acaugucuuguauguaauu

SEQ ID NO: 211869 - RNA, 19 nt, Artificial Sequence
  Description of Artificial Sequence: Synthetic oligonucleotide
  Antisense strand to SEQ ID NO: 211868
aauuacauacaagacaugu

SEQ ID NO: 211870 - RNA, 19 nt, Artificial Sequence
  Description of Artificial Sequence: Synthetic oligonucleotide
  Sense strand starting at position 3354 of SEQ ID NO: 2730
gcaaauauagaguggcagu

SEQ ID NO: 211871 - RNA, 19 nt, Artificial Sequence
  Description of Artificial Sequence: Synthetic oligonucleotide
  Antisense strand to SEQ ID NO: 211870
acugccacucuauauuugc

SEQ ID NO: 211872 - RNA, 19 nt, Artificial Sequence
  Description of Artificial Sequence: Synthetic oligonucleotide
  Sense strand starting at position 3364 of SEQ ID NO: 2730
aguggcaguuugucugaaa

SEQ ID NO: 211873 - RNA, 19 nt, Artificial Sequence
  Description of Artificial Sequence: Synthetic oligonucleotide
  Antisense strand to SEQ ID NO: 211872
uuucagacaaacugccacu

SEQ ID NO: 211874 - RNA, 19 nt, Artificial Sequence
  Description of Artificial Sequence: Synthetic oligonucleotide
  Sense strand starting at position 3365 of SEQ ID NO: 2730
guggcaguuugucugaaac

SEQ ID NO: 211875 - RNA, 19 nt, Artificial Sequence
  Description of Artificial Sequence: Synthetic oligonucleotide
  Antisense strand to SEQ ID NO: 211874
guuucagacaaacugccac

SEQ ID NO: 211876 - RNA, 19 nt, Artificial Sequence
  Description of Artificial Sequence: Synthetic oligonucleotide
  Sense strand starting at position 3533 of SEQ ID NO: 2730
ugauuuaucuuggcuccuu

SEQ ID NO: 211877 - RNA, 19 nt, Artificial Sequence
  Description of Artificial Sequence: Synthetic oligonucleotide
  Antisense strand to SEQ ID NO: 211876
aaggagccaagauaaauca

SEQ ID NO: 211878 - RNA, 19 nt, Artificial Sequence
  Description of Artificial Sequence: Synthetic oligonucleotide
  Sense strand starting at position 3740 of SEQ ID NO: 2730
ucacguuauuucuuuguac

SEQ ID NO: 211879 - RNA, 19 nt, Artificial Sequence
  Description of Artificial Sequence: Synthetic oligonucleotide
  Antisense strand to SEQ ID NO: 211878
guacaaagaaauaacguga

SEQ ID NO: 211880 - RNA, 19 nt, Artificial Sequence
  Description of Artificial Sequence: Synthetic oligonucleotide
  Sense strand starting at position 3742 of SEQ ID NO: 2730
acguuauuucuuuguacug

SEQ ID NO: 211881 - RNA, 19 nt, Artificial Sequence
  Description of Artificial Sequence: Synthetic oligonucleotide
  Antisense strand to SEQ ID NO: 211880
caguacaaagaaauaacgu

SEQ ID NO: 211882 - RNA, 19 nt, Artificial Sequence
  Description of Artificial Sequence: Synthetic oligonucleotide
  Sense strand starting at position 3743 of SEQ ID NO: 2730
cguuauuucuuuguacuga

SEQ ID NO: 211883 - RNA, 19 nt, Artificial Sequence
  Description of Artificial Sequence: Synthetic oligonucleotide
  Antisense strand to SEQ ID NO: 211882
ucaguacaaagaaauaacg

SEQ ID NO: 211884 - RNA, 19 nt, Artificial Sequence
  Description of Artificial Sequence: Synthetic oligonucleotide
  Sense strand starting at position 3744 of SEQ ID NO: 2730
guuauuucuuuguacugaa

SEQ ID NO: 211885 - RNA, 19 nt, Artificial Sequence
  Description of Artificial Sequence: Synthetic oligonucleotide
  Antisense strand to SEQ ID NO: 211884
uucaguacaaagaaauaac

SEQ ID NO: 211886 - RNA, 19 nt, Artificial Sequence
  Description of Artificial Sequence: Synthetic oligonucleotide
  Sense strand starting at position 3771 of SEQ ID NO: 2730
gugaguaacugaucccuca

SEQ ID NO: 211887 - RNA, 19 nt, Artificial Sequence
  Description of Artificial Sequence: Synthetic oligonucleotide
  Antisense strand to SEQ ID NO: 211886
ugagggaucaguuacucac

SEQ ID NO: 211888 - RNA, 19 nt, Artificial Sequence
  Description of Artificial Sequence: Synthetic oligonucleotide
  Sense strand starting at position 3815 of SEQ ID NO: 2730
gugcauuuccugugcuaac

SEQ ID NO: 211889 - RNA, 19 nt, Artificial Sequence
  Description of Artificial Sequence: Synthetic oligonucleotide
  Antisense strand to SEQ ID NO: 211888
guuagcacaggaaaugcac

SEQ ID NO: 211890 - RNA, 19 nt, Artificial Sequence
  Description of Artificial Sequence: Synthetic oligonucleotide
  Sense strand starting at position 3816 of SEQ ID NO: 2730
ugcauuuccugugcuaacu

SEQ ID NO: 211891 - RNA, 19 nt, Artificial Sequence
  Description of Artificial Sequence: Synthetic oligonucleotide
  Antisense strand to SEQ ID NO: 211890
aguuagcacaggaaaugca

SEQ ID NO: 211892 - RNA, 19 nt, Artificial Sequence
  Description of Artificial Sequence: Synthetic oligonucleotide
  Sense strand starting at position 3841 of SEQ ID NO: 2730
gcuuguagaguugauggau

SEQ ID NO: 211893 - RNA, 19 nt, Artificial Sequence
  Description of Artificial Sequence: Synthetic oligonucleotide
  Antisense strand to SEQ ID NO: 211892
auccaucaacucuacaagc

SEQ ID NO: 211894 - RNA, 19 nt, Artificial Sequence
  Description of Artificial Sequence: Synthetic oligonucleotide
  Sense strand starting at position 3957 of SEQ ID NO: 2730
uggaaagguuuagccuuaa

SEQ ID NO: 211895 - RNA, 19 nt, Artificial Sequence
  Description of Artificial Sequence: Synthetic oligonucleotide
  Antisense strand to SEQ ID NO: 211894
uuaaggcuaaaccuuucca

SEQ ID NO: 211896 - RNA, 19 nt, Artificial Sequence
  Description of Artificial Sequence: Synthetic oligonucleotide
  Sense strand starting at position 86 of SEQ ID NO: 2729
ccuggcucucaguaaugua

SEQ ID NO: 211897 - RNA, 19 nt, Artificial Sequence
  Description of Artificial Sequence: Synthetic oligonucleotide
  Antisense strand to SEQ ID NO: 211896
uacauuacugagagccagg

SEQ ID NO: 211898 - RNA, 19 nt, Artificial Sequence
  Description of Artificial Sequence: Synthetic oligonucleotide
  Sense strand starting at position 279 of SEQ ID NO: 2729
uccucacaugucugauacu

SEQ ID NO: 211899 - RNA, 19 nt, Artificial Sequence
  Description of Artificial Sequence: Synthetic oligonucleotide
  Antisense strand to SEQ ID NO: 211898
aguaucagacaugugagga

SEQ ID NO: 211900 - RNA, 19 nt, Artificial Sequence
  Description of Artificial Sequence: Synthetic oligonucleotide
  Sense strand starting at position 292 of SEQ ID NO: 2729
gauacuugucugugucaag

SEQ ID NO: 211901 - RNA, 19 nt, Artificial Sequence
  Description of Artificial Sequence: Synthetic oligonucleotide
  Antisense strand to SEQ ID NO: 211900
cuugacacagacaaguauc

SEQ ID NO: 211902 - RNA, 19 nt, Artificial Sequence
  Description of Artificial Sequence: Synthetic oligonucleotide
  Sense strand starting at position 517 of SEQ ID NO: 2729
guaccaauccaugaugcga

SEQ ID NO: 211903 - RNA, 19 nt, Artificial Sequence
  Description of Artificial Sequence: Synthetic oligonucleotide
  Antisense strand to SEQ ID NO: 211902
ucgcaucauggauugguac

SEQ ID NO: 211904 - RNA, 19 nt, Artificial Sequence
  Description of Artificial Sequence: Synthetic oligonucleotide
  Sense strand starting at position 590 of SEQ ID NO: 2729
ccagaauggcucugccaau

SEQ ID NO: 211905 - RNA, 19 nt, Artificial Sequence
  Description of Artificial Sequence: Synthetic oligonucleotide
  Antisense strand to SEQ ID NO: 211904
auuggcagagccauucugg

SEQ ID NO: 211906 - RNA, 19 nt, Artificial Sequence
  Description of Artificial Sequence: Synthetic oligonucleotide
  Sense strand starting at position 1000 of SEQ ID NO: 2729
cgcauuauccgcuccgaga

SEQ ID NO: 211907 - RNA, 19 nt, Artificial Sequence
  Description of Artificial Sequence: Synthetic oligonucleotide
  Antisense strand to SEQ ID NO: 211906
ucucggagcggauaaugcg

SEQ ID NO: 211908 - RNA, 19 nt, Artificial Sequence
  Description of Artificial Sequence: Synthetic oligonucleotide
  Sense strand starting at position 1361 of SEQ ID NO: 2729
gcgacuucucucggagaag

SEQ ID NO: 211909 - RNA, 19 nt, Artificial Sequence
  Description of Artificial Sequence: Synthetic oligonucleotide
  Antisense strand to SEQ ID NO: 211908
cuucuccgagagaagucgc

SEQ ID NO: 211910 - RNA, 19 nt, Artificial Sequence
  Description of Artificial Sequence: Synthetic oligonucleotide
  Sense strand starting at position 1382 of SEQ ID NO: 2729
gccgcuuucgacucccuaa

SEQ ID NO: 211911 - RNA, 19 nt, Artificial Sequence
  Description of Artificial Sequence: Synthetic oligonucleotide
  Antisense strand to SEQ ID NO: 211910
uuagggagucgaaagcggc

SEQ ID NO: 211912 - RNA, 19 nt, Artificial Sequence
  Description of Artificial Sequence: Synthetic oligonucleotide
  Sense strand starting at position 1674 of SEQ ID NO: 2729
ggucgcguucugucaguuu

SEQ ID NO: 211913 - RNA, 19 nt, Artificial Sequence
  Description of Artificial Sequence: Synthetic oligonucleotide
  Antisense strand to SEQ ID NO: 211912
aaacugacagaacgcgacc

SEQ ID NO: 211914 - RNA, 19 nt, Artificial Sequence
  Description of Artificial Sequence: Synthetic oligonucleotide
  Sense strand starting at position 1736 of SEQ ID NO: 2729
gaauaagcgcccugaagau

SEQ ID NO: 211915 - RNA, 19 nt, Artificial Sequence
  Description of Artificial Sequence: Synthetic oligonucleotide
  Antisense strand to SEQ ID NO: 211914
aucuucagggcgcuuauuc

SEQ ID NO: 211916 - RNA, 19 nt, Artificial Sequence
  Description of Artificial Sequence: Synthetic oligonucleotide
  Sense strand starting at position 2041 of SEQ ID NO: 2729
cgugaaccggguuaaugaa

SEQ ID NO: 211917 - RNA, 19 nt, Artificial Sequence
  Description of Artificial Sequence: Synthetic oligonucleotide
  Antisense strand to SEQ ID NO: 211916
uucauuaacccgguucacg

SEQ ID NO: 211918 - RNA, 19 nt, Artificial Sequence
  Description of Artificial Sequence: Synthetic oligonucleotide
  Sense strand starting at position 2048 of SEQ ID NO: 2729
cggguuaaugaaugcuaau

SEQ ID NO: 211919 - RNA, 19 nt, Artificial Sequence
  Description of Artificial Sequence: Synthetic oligonucleotide
  Antisense strand to SEQ ID NO: 211918
auuagcauucauuaacccg

SEQ ID NO: 211920 - RNA, 19 nt, Artificial Sequence
  Description of Artificial Sequence: Synthetic oligonucleotide
  Sense strand starting at position 2254 of SEQ ID NO: 2729
gauggaaauccuggcacaa

SEQ ID NO: 211921 - RNA, 19 nt, Artificial Sequence
  Description of Artificial Sequence: Synthetic oligonucleotide
  Antisense strand to SEQ ID NO: 211920
uugugccaggauuuccauc

SEQ ID NO: 211922 - RNA, 19 nt, Artificial Sequence
  Description of Artificial Sequence: Synthetic oligonucleotide
  Sense strand starting at position 2294 of SEQ ID NO: 2729
cuuggcuuugccgagagau

SEQ ID NO: 211923 - RNA, 19 nt, Artificial Sequence
  Description of Artificial Sequence: Synthetic oligonucleotide
  Antisense strand to SEQ ID NO: 211922
aucucucggcaaagccaag

SEQ ID NO: 211924 - RNA, 19 nt, Artificial Sequence
  Description of Artificial Sequence: Synthetic oligonucleotide
  Sense strand starting at position 2296 of SEQ ID NO: 2729
uggcuuugccgagagauau

SEQ ID NO: 211925 - RNA, 19 nt, Artificial Sequence
  Description of Artificial Sequence: Synthetic oligonucleotide
  Antisense strand to SEQ ID NO: 211924
auaucucucggcaaagcca

SEQ ID NO: 211926 - RNA, 19 nt, Artificial Sequence
  Description of Artificial Sequence: Synthetic oligonucleotide
  Sense strand starting at position 2496 of SEQ ID NO: 2729
gucaaauggccaugagguu

SEQ ID NO: 211927 - RNA, 19 nt, Artificial Sequence
  Description of Artificial Sequence: Synthetic oligonucleotide
  Antisense strand to SEQ ID NO: 211926
aaccucauggccauuugac

SEQ ID NO: 211928 - RNA, 19 nt, Artificial Sequence
  Description of Artificial Sequence: Synthetic oligonucleotide
  Sense strand starting at position 2545 of SEQ ID NO: 2729
auguuagaaguuugacaag

SEQ ID NO: 211929 - RNA, 19 nt, Artificial Sequence
  Description of Artificial Sequence: Synthetic oligonucleotide
  Antisense strand to SEQ ID NO: 211928
cuugucaaacuucuaacau

SEQ ID NO: 211930 - RNA, 19 nt, Artificial Sequence
  Description of Artificial Sequence: Synthetic oligonucleotide
  Sense strand starting at position 2615 of SEQ ID NO: 2729
agacaacucguccaaaguu

SEQ ID NO: 211931 - RNA, 19 nt, Artificial Sequence
  Description of Artificial Sequence: Synthetic oligonucleotide
  Antisense strand to SEQ ID NO: 211930
aacuuuggacgaguugucu

SEQ ID NO: 211932 - RNA, 19 nt, Artificial Sequence
  Description of Artificial Sequence: Synthetic oligonucleotide
  Sense strand starting at position 2625 of SEQ ID NO: 2729
uccaaaguuuccuuuggca

SEQ ID NO: 211933 - RNA, 19 nt, Artificial Sequence
  Description of Artificial Sequence: Synthetic oligonucleotide
  Antisense strand to SEQ ID NO: 211932
ugccaaaggaaacuuugga

SEQ ID NO: 211934 - RNA, 19 nt, Artificial Sequence
  Description of Artificial Sequence: Synthetic oligonucleotide
  Sense strand starting at position 2627 of SEQ ID NO: 2729
caaaguuuccuuuggcaga

SEQ ID NO: 211935 - RNA, 19 nt, Artificial Sequence
  Description of Artificial Sequence: Synthetic oligonucleotide
  Antisense strand to SEQ ID NO: 211934
ucugccaaaggaaacuuug

SEQ ID NO: 211936 - RNA, 19 nt, Artificial Sequence
  Description of Artificial Sequence: Synthetic oligonucleotide
  Sense strand starting at position 2629 of SEQ ID NO: 2729
aaguuuccuuuggcagaua

SEQ ID NO: 211937 - RNA, 19 nt, Artificial Sequence
  Description of Artificial Sequence: Synthetic oligonucleotide
  Antisense strand to SEQ ID NO: 211936
uaucugccaaaggaaacuu

SEQ ID NO: 211938 - RNA, 19 nt, Artificial Sequence
  Description of Artificial Sequence: Synthetic oligonucleotide
  Sense strand starting at position 2648 of SEQ ID NO: 2729
ccuggauucuacuccagau

SEQ ID NO: 211939 - RNA, 19 nt, Artificial Sequence
  Description of Artificial Sequence: Synthetic oligonucleotide
  Antisense strand to SEQ ID NO: 211938
aucuggaguagaauccagg

SEQ ID NO: 211940 - RNA, 19 nt, Artificial Sequence
  Description of Artificial Sequence: Synthetic oligonucleotide
  Sense strand starting at position 2910 of SEQ ID NO: 2729
cgacacacaugucuuguau

SEQ ID NO: 211941 - RNA, 19 nt, Artificial Sequence
  Description of Artificial Sequence: Synthetic oligonucleotide
  Antisense strand to SEQ ID NO: 211940
auacaagacaugugugucg

SEQ ID NO: 211942 - RNA, 19 nt, Artificial Sequence
  Description of Artificial Sequence: Synthetic oligonucleotide
  Sense strand starting at position 2916 of SEQ ID NO: 2729
acaugucuuguauguaauu

SEQ ID NO: 211943 - RNA, 19 nt, Artificial Sequence
  Description of Artificial Sequence: Synthetic oligonucleotide
  Antisense strand to SEQ ID NO: 211942
aauuacauacaagacaugu

SEQ ID NO: 211944 - RNA, 19 nt, Artificial Sequence
  Description of Artificial Sequence: Synthetic oligonucleotide
  Sense strand starting at position 3018 of SEQ ID NO: 2729
gcaaauauagaguggcagu

SEQ ID NO: 211945 - RNA, 19 nt, Artificial Sequence
  Description of Artificial Sequence: Synthetic oligonucleotide
  Antisense strand to SEQ ID NO: 211944
acugccacucuauauuugc

SEQ ID NO: 211946 - RNA, 19 nt, Artificial Sequence
  Description of Artificial Sequence: Synthetic oligonucleotide
  Sense strand starting at position 3197 of SEQ ID NO: 2729
ugauuuaucuuggcuccuu

SEQ ID NO: 211947 - RNA, 19 nt, Artificial Sequence
  Description of Artificial Sequence: Synthetic oligonucleotide
  Antisense strand to SEQ ID NO: 211946
aaggagccaagauaaauca

SEQ ID NO: 211948 - RNA, 19 nt, Artificial Sequence
  Description of Artificial Sequence: Synthetic oligonucleotide
  Sense strand starting at position 3404 of SEQ ID NO: 2729
ucacguuauuucuuuguac

SEQ ID NO: 211949 - RNA, 19 nt, Artificial Sequence
  Description of Artificial Sequence: Synthetic oligonucleotide
  Antisense strand to SEQ ID NO: 211948
guacaaagaaauaacguga

SEQ ID NO: 211950 - RNA, 19 nt, Artificial Sequence
  Description of Artificial Sequence: Synthetic oligonucleotide
  Sense strand starting at position 3406 of SEQ ID NO: 2729
acguuauuucuuuguacug

SEQ ID NO: 211951 - RNA, 19 nt, Artificial Sequence
  Description of Artificial Sequence: Synthetic oligonucleotide
  Antisense strand to SEQ ID NO: 211950
caguacaaagaaauaacgu

SEQ ID NO: 211952 - RNA, 19 nt, Artificial Sequence
  Description of Artificial Sequence: Synthetic oligonucleotide
  Sense strand starting at position 3407 of SEQ ID NO: 2729
cguuauuucuuuguacuga

SEQ ID NO: 211953 - RNA, 19 nt, Artificial Sequence
  Description of Artificial Sequence: Synthetic oligonucleotide
  Antisense strand to SEQ ID NO: 211952
ucaguacaaagaaauaacg

SEQ ID NO: 211954 - RNA, 19 nt, Artificial Sequence
  Description of Artificial Sequence: Synthetic oligonucleotide
  Sense strand starting at position 3435 of SEQ ID NO: 2729
gugaguaacugaucccuca

SEQ ID NO: 211955 - RNA, 19 nt, Artificial Sequence
  Description of Artificial Sequence: Synthetic oligonucleotide
  Antisense strand to SEQ ID NO: 211954
ugagggaucaguuacucac

SEQ ID NO: 211956 - RNA, 19 nt, Artificial Sequence
  Description of Artificial Sequence: Synthetic oligonucleotide
  Sense strand starting at position 3479 of SEQ ID NO: 2729
gugcauuuccugugcuaac

SEQ ID NO: 211957 - RNA, 19 nt, Artificial Sequence
  Description of Artificial Sequence: Synthetic oligonucleotide
  Antisense strand to SEQ ID NO: 211956
guuagcacaggaaaugcac

SEQ ID NO: 211958 - RNA, 19 nt, Artificial Sequence
  Description of Artificial Sequence: Synthetic oligonucleotide
  Sense strand starting at position 3480 of SEQ ID NO: 2729
ugcauuuccugugcuaacu

SEQ ID NO: 211959 - RNA, 19 nt, Artificial Sequence
  Description of Artificial Sequence: Synthetic oligonucleotide
  Antisense strand to SEQ ID NO: 211958
aguuagcacaggaaaugca

SEQ ID NO: 211960 - RNA, 19 nt, Artificial Sequence
  Description of Artificial Sequence: Synthetic oligonucleotide
  Sense strand starting at position 3505 of SEQ ID NO: 2729
gcuuguagaguugauggau

SEQ ID NO: 211961 - RNA, 19 nt, Artificial Sequence
  Description of Artificial Sequence: Synthetic oligonucleotide
  Antisense strand to SEQ ID NO: 211960
auccaucaacucuacaagc

SEQ ID NO: 211962 - RNA, 19 nt, Artificial Sequence
  Description of Artificial Sequence: Synthetic oligonucleotide
  Sense strand starting at position 3621 of SEQ ID NO: 2729
uggaaagguuuagccuuaa

SEQ ID NO: 211963 - RNA, 19 nt, Artificial Sequence
  Description of Artificial Sequence: Synthetic oligonucleotide
  Antisense strand to SEQ ID NO: 211962
uuaaggcuaaaccuuucca

SEQ ID NO: 211964 - RNA, 19 nt, Artificial Sequence
  Description of Artificial Sequence: Synthetic oligonucleotide
  Sense strand starting at position 3661 of SEQ ID NO: 2729
gaagccugguaucuguaga

SEQ ID NO: 211965 - RNA, 19 nt, Artificial Sequence
  Description of Artificial Sequence: Synthetic oligonucleotide
  Antisense strand to SEQ ID NO: 211964
ucuacagauaccaggcuuc

SEQ ID NO: 211966 - RNA, 19 nt, Artificial Sequence
  Description of Artificial Sequence: Synthetic oligonucleotide
  Sense strand starting at position 3758 of SEQ ID NO: 2729
ccuugcuguccagaaaccu

SEQ ID NO: 211967 - RNA, 19 nt, Artificial Sequence
  Description of Artificial Sequence: Synthetic oligonucleotide
  Antisense strand to SEQ ID NO: 211966
agguuucuggacagcaagg

SEQ ID NO: 211968 - RNA, 19 nt, Artificial Sequence
  Description of Artificial Sequence: Synthetic oligonucleotide
  Sense strand starting at position 3766 of SEQ ID NO: 2729
uccagaaaccugugaucua

SEQ ID NO: 211969 - RNA, 19 nt, Artificial Sequence
  Description of Artificial Sequence: Synthetic oligonucleotide
  Antisense strand to SEQ ID NO: 211968
uagaucacagguuucugga

SEQ ID NO: 211970 - RNA, 19 nt, Artificial Sequence
  Description of Artificial Sequence: Synthetic oligonucleotide
  Sense strand starting at position 3916 of SEQ ID NO: 2729
agucuaaugaaauguggau

SEQ ID NO: 211971 - RNA, 19 nt, Artificial Sequence
  Description of Artificial Sequence: Synthetic oligonucleotide
  Antisense strand to SEQ ID NO: 211970
auccacauuucauuagacu

SEQ ID NO: 211972 - RNA, 19 nt, Artificial Sequence
  Description of Artificial Sequence: Synthetic oligonucleotide
  Sense strand starting at position 3933 of SEQ ID NO: 2729
auaguuugcgugcagauuu

SEQ ID NO: 211973 - RNA, 19 nt, Artificial Sequence
  Description of Artificial Sequence: Synthetic oligonucleotide
  Antisense strand to SEQ ID NO: 211972
aaaucugcacgcaaacuau

SEQ ID NO: 211974 - RNA, 19 nt, Artificial Sequence
  Description of Artificial Sequence: Synthetic oligonucleotide
  Sense strand starting at position 3947 of SEQ ID NO: 2729
gauuuaauguuugagaagc

SEQ ID NO: 211975 - RNA, 19 nt, Artificial Sequence
  Description of Artificial Sequence: Synthetic oligonucleotide
  Antisense strand to SEQ ID NO: 211974
gcuucucaaacauuaaauc

SEQ ID NO: 211976 - RNA, 19 nt, Artificial Sequence
  Description of Artificial Sequence: Synthetic oligonucleotide
  Sense strand starting at position 358 of SEQ ID NO: 2731
gguguaauagacugcaaga

SEQ ID NO: 211977 - RNA, 19 nt, Artificial Sequence
  Description of Artificial Sequence: Synthetic oligonucleotide
  Antisense strand to SEQ ID NO: 211976
ucuugcagucuauuacacc

SEQ ID NO: 211978 - RNA, 19 nt, Artificial Sequence
  Description of Artificial Sequence: Synthetic oligonucleotide
  Sense strand starting at position 360 of SEQ ID NO: 2731
uguaauagacugcaagauc

SEQ ID NO: 211979 - RNA, 19 nt, Artificial Sequence
  Description of Artificial Sequence: Synthetic oligonucleotide
  Antisense strand to SEQ ID NO: 211978
gaucuugcagucuauuaca

SEQ ID NO: 211980 - RNA, 19 nt, Artificial Sequence
  Description of Artificial Sequence: Synthetic oligonucleotide
  Sense strand starting at position 432 of SEQ ID NO: 2731
aucgcauuacugcaggaau

SEQ ID NO: 211981 - RNA, 19 nt, Artificial Sequence
  Description of Artificial Sequence: Synthetic oligonucleotide
  Antisense strand to SEQ ID NO: 211980
auuccugcaguaaugcgau

SEQ ID NO: 211982 - RNA, 19 nt, Artificial Sequence
  Description of Artificial Sequence: Synthetic oligonucleotide
  Sense strand starting at position 435 of SEQ ID NO: 2731
gcauuacugcaggaauuac

SEQ ID NO: 211983 - RNA, 19 nt, Artificial Sequence
  Description of Artificial Sequence: Synthetic oligonucleotide
  Antisense strand to SEQ ID NO: 211982
guaauuccugcaguaaugc

SEQ ID NO: 211984 - RNA, 19 nt, Artificial Sequence
  Description of Artificial Sequence: Synthetic oligonucleotide
  Sense strand starting at position 521 of SEQ ID NO: 2731
auuggaagcuguccgagaa

SEQ ID NO: 211985 - RNA, 19 nt, Artificial Sequence
  Description of Artificial Sequence: Synthetic oligonucleotide
  Antisense strand to SEQ ID NO: 211984
uucucggacagcuuccaau

SEQ ID NO: 211986 - RNA, 19 nt, Artificial Sequence
  Description of Artificial Sequence: Synthetic oligonucleotide
  Sense strand starting at position 522 of SEQ ID NO: 2731
uuggaagcuguccgagaaa

SEQ ID NO: 211987 - RNA, 19 nt, Artificial Sequence
  Description of Artificial Sequence: Synthetic oligonucleotide
  Antisense strand to SEQ ID NO: 211986
uuucucggacagcuuccaa

SEQ ID NO: 211988 - RNA, 19 nt, Artificial Sequence
  Description of Artificial Sequence: Synthetic oligonucleotide
  Sense strand starting at position 525 of SEQ ID NO: 2731
gaagcuguccgagaaauac

SEQ ID NO: 211989 - RNA, 19 nt, Artificial Sequence
  Description of Artificial Sequence: Synthetic oligonucleotide
  Antisense strand to SEQ ID NO: 211988
guauuucucggacagcuuc

SEQ ID NO: 211990 - RNA, 19 nt, Artificial Sequence
  Description of Artificial Sequence: Synthetic oligonucleotide
  Sense strand starting at position 564 of SEQ ID NO: 2731
agcacaagccaagaguuau

SEQ ID NO: 211991 - RNA, 19 nt, Artificial Sequence
  Description of Artificial Sequence: Synthetic oligonucleotide
  Antisense strand to SEQ ID NO: 211990
auaacucuuggcuugugcu

SEQ ID NO: 211992 - RNA, 19 nt, Artificial Sequence
  Description of Artificial Sequence: Synthetic oligonucleotide
  Sense strand starting at position 575 of SEQ ID NO: 2731
agaguuauuuaccaggcaa

SEQ ID NO: 211993 - RNA, 19 nt, Artificial Sequence
  Description of Artificial Sequence: Synthetic oligonucleotide
  Antisense strand to SEQ ID NO: 211992
uugccugguaaauaacucu

SEQ ID NO: 211994 - RNA, 19 nt, Artificial Sequence
  Description of Artificial Sequence: Synthetic oligonucleotide
  Sense strand starting at position 652 of SEQ ID NO: 2731
ugaacuucuuuggcaggua

SEQ ID NO: 211995 - RNA, 19 nt, Artificial Sequence
  Description of Artificial Sequence: Synthetic oligonucleotide
  Antisense strand to SEQ ID NO: 211994
uaccugccaaagaaguuca

SEQ ID NO: 211996 - RNA, 19 nt, Artificial Sequence
  Description of Artificial Sequence: Synthetic oligonucleotide
  Sense strand starting at position 657 of SEQ ID NO: 2731
uucuuuggcagguaaguaa

SEQ ID NO: 211997 - RNA, 19 nt, Artificial Sequence
  Description of Artificial Sequence: Synthetic oligonucleotide
  Antisense strand to SEQ ID NO: 211996
uuacuuaccugccaaagaa

SEQ ID NO: 211998 - RNA, 19 nt, Artificial Sequence
  Description of Artificial Sequence: Synthetic oligonucleotide
  Sense strand starting at position 741 of SEQ ID NO: 2731
agguuuaauucuuugcaac

SEQ ID NO: 211999 - RNA, 19 nt, Artificial Sequence
  Description of Artificial Sequence: Synthetic oligonucleotide
  Antisense strand to SEQ ID NO: 211998
guugcaaagaauuaaaccu

SEQ ID NO: 212000 - RNA, 19 nt, Artificial Sequence
  Description of Artificial Sequence: Synthetic oligonucleotide
  Sense strand starting at position 779 of SEQ ID NO: 2731
ucacuuagccaaugaggaa

SEQ ID NO: 212001 - RNA, 19 nt, Artificial Sequence
  Description of Artificial Sequence: Synthetic oligonucleotide
  Antisense strand to SEQ ID NO: 212000
uuccucauuggcuaaguga

SEQ ID NO: 212002 - RNA, 19 nt, Artificial Sequence
  Description of Artificial Sequence: Synthetic oligonucleotide
  Sense strand starting at position 815 of SEQ ID NO: 2731
cgaaauggauuacucaagu

SEQ ID NO: 212003 - RNA, 19 nt, Artificial Sequence
  Description of Artificial Sequence: Synthetic oligonucleotide
  Antisense strand to SEQ ID NO: 212002
acuugaguaauccauuucg

SEQ ID NO: 212004 - RNA, 19 nt, Artificial Sequence
  Description of Artificial Sequence: Synthetic oligonucleotide
  Sense strand starting at position 1005 of SEQ ID NO: 2731
uuaaacaugucauugucuu

SEQ ID NO: 212005 - RNA, 19 nt, Artificial Sequence
  Description of Artificial Sequence: Synthetic oligonucleotide
  Antisense strand to SEQ ID NO: 212004
aagacaaugacauguuuaa

SEQ ID NO: 212006 - RNA, 19 nt, Artificial Sequence
  Description of Artificial Sequence: Synthetic oligonucleotide
  Sense strand starting at position 2051 of SEQ ID NO: 2731
ugugguaacggccagacau

SEQ ID NO: 212007 - RNA, 19 nt, Artificial Sequence
  Description of Artificial Sequence: Synthetic oligonucleotide
  Antisense strand to SEQ ID NO: 212006
augucuggccguuaccaca

SEQ ID NO: 212008 - RNA, 19 nt, Artificial Sequence
  Description of Artificial Sequence: Synthetic oligonucleotide
  Sense strand starting at position 2257 of SEQ ID NO: 2731
ggguuagcugucugauuug

SEQ ID NO: 212009 - RNA, 19 nt, Artificial Sequence
  Description of Artificial Sequence: Synthetic oligonucleotide
  Antisense strand to SEQ ID NO: 212008
caaaucagacagcuaaccc

SEQ ID NO: 212010 - RNA, 19 nt, Artificial Sequence
  Description of Artificial Sequence: Synthetic oligonucleotide
  Sense strand starting at position 2260 of SEQ ID NO: 2731
uuagcugucugauuugcaa

SEQ ID NO: 212011 - RNA, 19 nt, Artificial Sequence
  Description of Artificial Sequence: Synthetic oligonucleotide
  Antisense strand to SEQ ID NO: 212010
uugcaaaucagacagcuaa

SEQ ID NO: 212012 - RNA, 19 nt, Artificial Sequence
  Description of Artificial Sequence: Synthetic oligonucleotide
  Sense strand starting at position 2262 of SEQ ID NO: 2731
agcugucugauuugcaaga

SEQ ID NO: 212013 - RNA, 19 nt, Artificial Sequence
  Description of Artificial Sequence: Synthetic oligonucleotide
  Antisense strand to SEQ ID NO: 212012
ucuugcaaaucagacagcu

SEQ ID NO: 212014 - RNA, 19 nt, Artificial Sequence
  Description of Artificial Sequence: Synthetic oligonucleotide
  Sense strand starting at position 2263 of SEQ ID NO: 2731
gcugucugauuugcaagaa

SEQ ID NO: 212015 - RNA, 19 nt, Artificial Sequence
  Description of Artificial Sequence: Synthetic oligonucleotide
  Antisense strand to SEQ ID NO: 212014
uucuugcaaaucagacagc

SEQ ID NO: 212016 - RNA, 19 nt, Artificial Sequence
  Description of Artificial Sequence: Synthetic oligonucleotide
  Sense strand starting at position 2468 of SEQ ID NO: 2731
accucuuaucugggaacca

SEQ ID NO: 212017 - RNA, 19 nt, Artificial Sequence
  Description of Artificial Sequence: Synthetic oligonucleotide
  Antisense strand to SEQ ID NO: 212016
ugguucccagauaagaggu

SEQ ID NO: 212018 - RNA, 19 nt, Artificial Sequence
  Description of Artificial Sequence: Synthetic oligonucleotide
  Sense strand starting at position 2602 of SEQ ID NO: 2731
gaugaagacgucuauagua

SEQ ID NO: 212019 - RNA, 19 nt, Artificial Sequence
  Description of Artificial Sequence: Synthetic oligonucleotide
  Antisense strand to SEQ ID NO: 212018
uacuauagacgucuucauc

SEQ ID NO: 212020 - RNA, 19 nt, Artificial Sequence
  Description of Artificial Sequence: Synthetic oligonucleotide
  Sense strand starting at position 2604 of SEQ ID NO: 2731
ugaagacgucuauaguaua

SEQ ID NO: 212021 - RNA, 19 nt, Artificial Sequence
  Description of Artificial Sequence: Synthetic oligonucleotide
  Antisense strand to SEQ ID NO: 212020
uauacuauagacgucuuca

SEQ ID NO: 212022 - RNA, 19 nt, Artificial Sequence
  Description of Artificial Sequence: Synthetic oligonucleotide
  Sense strand starting at position 2609 of SEQ ID NO: 2731
acgucuauaguauaguuaa

SEQ ID NO: 212023 - RNA, 19 nt, Artificial Sequence
  Description of Artificial Sequence: Synthetic oligonucleotide
  Antisense strand to SEQ ID NO: 212022
uuaacuauacuauagacgu

SEQ ID NO: 212024 - RNA, 19 nt, Artificial Sequence
  Description of Artificial Sequence: Synthetic oligonucleotide
  Sense strand starting at position 2620 of SEQ ID NO: 2731
auaguuaaccuuuaacgau

SEQ ID NO: 212025 - RNA, 19 nt, Artificial Sequence
  Description of Artificial Sequence: Synthetic oligonucleotide
  Antisense strand to SEQ ID NO: 212024
aucguuaaagguuaacuau

SEQ ID NO: 212026 - RNA, 19 nt, Artificial Sequence
  Description of Artificial Sequence: Synthetic oligonucleotide
  Sense strand starting at position 2627 of SEQ ID NO: 2731
accuuuaacgauuaucugu

SEQ ID NO: 212027 - RNA, 19 nt, Artificial Sequence
  Description of Artificial Sequence: Synthetic oligonucleotide
  Antisense strand to SEQ ID NO: 212026
acagauaaucguuaaaggu

SEQ ID NO: 212028 - RNA, 19 nt, Artificial Sequence
  Description of Artificial Sequence: Synthetic oligonucleotide
  Sense strand starting at position 2667 of SEQ ID NO: 2731
gaacaauuguggcuugaug

SEQ ID NO: 212029 - RNA, 19 nt, Artificial Sequence
  Description of Artificial Sequence: Synthetic oligonucleotide
  Antisense strand to SEQ ID NO: 212028
caucaagccacaauuguuc

SEQ ID NO: 212030 - RNA, 19 nt, Artificial Sequence
  Description of Artificial Sequence: Synthetic oligonucleotide
  Sense strand starting at position 2669 of SEQ ID NO: 2731
acaauuguggcuugaugau

SEQ ID NO: 212031 - RNA, 19 nt, Artificial Sequence
  Description of Artificial Sequence: Synthetic oligonucleotide
  Antisense strand to SEQ ID NO: 212030
aucaucaagccacaauugu

SEQ ID NO: 212032 - RNA, 19 nt, Artificial Sequence
  Description of Artificial Sequence: Synthetic oligonucleotide
  Sense strand starting at position 2706 of SEQ ID NO: 2731
ugagaacuacccugaguca

SEQ ID NO: 212033 - RNA, 19 nt, Artificial Sequence
  Description of Artificial Sequence: Synthetic oligonucleotide
  Antisense strand to SEQ ID NO: 212032
ugacucaggguaguucuca

SEQ ID NO: 212034 - RNA, 19 nt, Artificial Sequence
  Description of Artificial Sequence: Synthetic oligonucleotide
  Sense strand starting at position 2891 of SEQ ID NO: 2731
aaacaagcgcuugaaauga

SEQ ID NO: 212035 - RNA, 19 nt, Artificial Sequence
  Description of Artificial Sequence: Synthetic oligonucleotide
  Antisense strand to SEQ ID NO: 212034
ucauuucaagcgcuuguuu

SEQ ID NO: 212036 - RNA, 19 nt, Artificial Sequence
  Description of Artificial Sequence: Synthetic oligonucleotide
  Sense strand starting at position 2961 of SEQ ID NO: 2731
auuccuuugcaguaagaga

SEQ ID NO: 212037 - RNA, 19 nt, Artificial Sequence
  Description of Artificial Sequence: Synthetic oligonucleotide
  Antisense strand to SEQ ID NO: 212036
ucucuuacugcaaaggaau

SEQ ID NO: 212038 - RNA, 19 nt, Artificial Sequence
  Description of Artificial Sequence: Synthetic oligonucleotide
  Sense strand starting at position 2974 of SEQ ID NO: 2731
aagagagugcauggacaua

SEQ ID NO: 212039 - RNA, 19 nt, Artificial Sequence
  Description of Artificial Sequence: Synthetic oligonucleotide
  Antisense strand to SEQ ID NO: 212038
uauguccaugcacucucuu

SEQ ID NO: 212040 - RNA, 19 nt, Artificial Sequence
  Description of Artificial Sequence: Synthetic oligonucleotide
  Sense strand starting at position 3000 of SEQ ID NO: 2731
ccucucuugguguacugaa

SEQ ID NO: 212041 - RNA, 19 nt, Artificial Sequence
  Description of Artificial Sequence: Synthetic oligonucleotide
  Antisense strand to SEQ ID NO: 212040
uucaguacaccaagagagg

SEQ ID NO: 212042 - RNA, 19 nt, Artificial Sequence
  Description of Artificial Sequence: Synthetic oligonucleotide
  Sense strand starting at position 3040 of SEQ ID NO: 2731
aauaaugcccgaggacaau

SEQ ID NO: 212043 - RNA, 19 nt, Artificial Sequence
  Description of Artificial Sequence: Synthetic oligonucleotide
  Antisense strand to SEQ ID NO: 212042
auuguccucgggcauuauu

SEQ ID NO: 212044 - RNA, 19 nt, Artificial Sequence
  Description of Artificial Sequence: Synthetic oligonucleotide
  Sense strand starting at position 3175 of SEQ ID NO: 2731
ucgguggguggugaaauua

SEQ ID NO: 212045 - RNA, 19 nt, Artificial Sequence
  Description of Artificial Sequence: Synthetic oligonucleotide
  Antisense strand to SEQ ID NO: 212044
uaauuucaccacccaccga

SEQ ID NO: 212046 - RNA, 19 nt, Artificial Sequence
  Description of Artificial Sequence: Synthetic oligonucleotide
  Sense strand starting at position 3290 of SEQ ID NO: 2731
uuacuagauccaugaagca

SEQ ID NO: 212047 - RNA, 19 nt, Artificial Sequence
  Description of Artificial Sequence: Synthetic oligonucleotide
  Antisense strand to SEQ ID NO: 212046
ugcuucauggaucuaguaa

SEQ ID NO: 212048 - RNA, 19 nt, Artificial Sequence
  Description of Artificial Sequence: Synthetic oligonucleotide
  Sense strand starting at position 3322 of SEQ ID NO: 2731
ucacuuugccugugaaagg

SEQ ID NO: 212049 - RNA, 19 nt, Artificial Sequence
  Description of Artificial Sequence: Synthetic oligonucleotide
  Antisense strand to SEQ ID NO: 212048
ccuuucacaggcaaaguga

SEQ ID NO: 212050 - RNA, 19 nt, Artificial Sequence
  Description of Artificial Sequence: Synthetic oligonucleotide
  Sense strand starting at position 3384 of SEQ ID NO: 2731
uaauuugguguauguguuu

SEQ ID NO: 212051 - RNA, 19 nt, Artificial Sequence
  Description of Artificial Sequence: Synthetic oligonucleotide
  Antisense strand to SEQ ID NO: 212050
aaacacauacaccaaauua

SEQ ID NO: 212052 - RNA, 19 nt, Artificial Sequence
  Description of Artificial Sequence: Synthetic oligonucleotide
  Sense strand starting at position 3407 of SEQ ID NO: 2731
aggauaagaucucuggucu

SEQ ID NO: 212053 - RNA, 19 nt, Artificial Sequence
  Description of Artificial Sequence: Synthetic oligonucleotide
  Antisense strand to SEQ ID NO: 212052
agaccagagaucuuauccu

SEQ ID NO: 212054 - RNA, 19 nt, Artificial Sequence
  Description of Artificial Sequence: Synthetic oligonucleotide
  Sense strand starting at position 3408 of SEQ ID NO: 2731
ggauaagaucucuggucua

SEQ ID NO: 212055 - RNA, 19 nt, Artificial Sequence
  Description of Artificial Sequence: Synthetic oligonucleotide
  Antisense strand to SEQ ID NO: 212054
uagaccagagaucuuaucc

SEQ ID NO: 212056 - RNA, 19 nt, Artificial Sequence
  Description of Artificial Sequence: Synthetic oligonucleotide
  Sense strand starting at position 166 of SEQ ID NO: 2733
aggccugaagagugauaau

SEQ ID NO: 212057 - RNA, 19 nt, Artificial Sequence
  Description of Artificial Sequence: Synthetic oligonucleotide
  Antisense strand to SEQ ID NO: 212056
auuaucacucuucaggccu

SEQ ID NO: 212058 - RNA, 19 nt, Artificial Sequence
  Description of Artificial Sequence: Synthetic oligonucleotide
  Sense strand starting at position 175 of SEQ ID NO: 2733
gagugauaauuguucuuug

SEQ ID NO: 212059 - RNA, 19 nt, Artificial Sequence
  Description of Artificial Sequence: Synthetic oligonucleotide
  Antisense strand to SEQ ID NO: 212058
caaagaacaauuaucacuc

SEQ ID NO: 212060 - RNA, 19 nt, Artificial Sequence
  Description of Artificial Sequence: Synthetic oligonucleotide
  Sense strand starting at position 178 of SEQ ID NO: 2733
ugauaauuguucuuugggu

SEQ ID NO: 212061 - RNA, 19 nt, Artificial Sequence
  Description of Artificial Sequence: Synthetic oligonucleotide
  Antisense strand to SEQ ID NO: 212060
acccaaagaacaauuauca

SEQ ID NO: 212062 - RNA, 19 nt, Artificial Sequence
  Description of Artificial Sequence: Synthetic oligonucleotide
  Sense strand starting at position 180 of SEQ ID NO: 2733
auaauuguucuuuggguca

SEQ ID NO: 212063 - RNA, 19 nt, Artificial Sequence
  Description of Artificial Sequence: Synthetic oligonucleotide
  Antisense strand to SEQ ID NO: 212062
ugacccaaagaacaauuau

SEQ ID NO: 212064 - RNA, 19 nt, Artificial Sequence
  Description of Artificial Sequence: Synthetic oligonucleotide
  Sense strand starting at position 198 of SEQ ID NO: 2733
aguaguagagaaugucuau

SEQ ID NO: 212065 - RNA, 19 nt, Artificial Sequence
  Description of Artificial Sequence: Synthetic oligonucleotide
  Antisense strand to SEQ ID NO: 212064
auagacauucucuacuacu

SEQ ID NO: 212066 - RNA, 19 nt, Artificial Sequence
  Description of Artificial Sequence: Synthetic oligonucleotide
  Sense strand starting at position 220 of SEQ ID NO: 2733
cuuugaauucucugaauug

SEQ ID NO: 212067 - RNA, 19 nt, Artificial Sequence
  Description of Artificial Sequence: Synthetic oligonucleotide
  Antisense strand to SEQ ID NO: 212066
caauucagagaauucaaag

SEQ ID NO: 212068 - RNA, 19 nt, Artificial Sequence
  Description of Artificial Sequence: Synthetic oligonucleotide
  Sense strand starting at position 229 of SEQ ID NO: 2733
cucugaauugaaugcaaga

SEQ ID NO: 212069 - RNA, 19 nt, Artificial Sequence
  Description of Artificial Sequence: Synthetic oligonucleotide
  Antisense strand to SEQ ID NO: 212068
ucuugcauucaauucagag

SEQ ID NO: 212070 - RNA, 19 nt, Artificial Sequence
  Description of Artificial Sequence: Synthetic oligonucleotide
  Sense strand starting at position 318 of SEQ ID NO: 2733
ggcuguuuaaguuaucaug

SEQ ID NO: 212071 - RNA, 19 nt, Artificial Sequence
  Description of Artificial Sequence: Synthetic oligonucleotide
  Antisense strand to SEQ ID NO: 212070
caugauaacuuaaacagcc

SEQ ID NO: 212072 - RNA, 19 nt, Artificial Sequence
  Description of Artificial Sequence: Synthetic oligonucleotide
  Sense strand starting at position 435 of SEQ ID NO: 2733
ggacucucaucucuaaagu

SEQ ID NO: 212073 - RNA, 19 nt, Artificial Sequence
  Description of Artificial Sequence: Synthetic oligonucleotide
  Antisense strand to SEQ ID NO: 212072
acuuuagagaugagagucc

SEQ ID NO: 212074 - RNA, 19 nt, Artificial Sequence
  Description of Artificial Sequence: Synthetic oligonucleotide
  Sense strand starting at position 667 of SEQ ID NO: 2733
acagcauugccagagcaga

SEQ ID NO: 212075 - RNA, 19 nt, Artificial Sequence
  Description of Artificial Sequence: Synthetic oligonucleotide
  Antisense strand to SEQ ID NO: 212074
ucugcucuggcaaugcugu

SEQ ID NO: 212076 - RNA, 19 nt, Artificial Sequence
  Description of Artificial Sequence: Synthetic oligonucleotide
  Sense strand starting at position 700 of SEQ ID NO: 2733
cucaguaauugcccuggaa

SEQ ID NO: 212077 - RNA, 19 nt, Artificial Sequence
  Description of Artificial Sequence: Synthetic oligonucleotide
  Antisense strand to SEQ ID NO: 212076
uuccagggcaauuacugag

SEQ ID NO: 212078 - RNA, 19 nt, Artificial Sequence
  Description of Artificial Sequence: Synthetic oligonucleotide
  Sense strand starting at position 704 of SEQ ID NO: 2733
guaauugcccuggaagcaa

SEQ ID NO: 212079 - RNA, 19 nt, Artificial Sequence
  Description of Artificial Sequence: Synthetic oligonucleotide
  Antisense strand to SEQ ID NO: 212078
uugcuuccagggcaauuac

SEQ ID NO: 212080 - RNA, 19 nt, Artificial Sequence
  Description of Artificial Sequence: Synthetic oligonucleotide
  Sense strand starting at position 734 of SEQ ID NO: 2733
cguagacaagcucacauua

SEQ ID NO: 212081 - RNA, 19 nt, Artificial Sequence
  Description of Artificial Sequence: Synthetic oligonucleotide
  Antisense strand to SEQ ID NO: 212080
uaaugugagcuugucuacg

SEQ ID NO: 212082 - RNA, 19 nt, Artificial Sequence
  Description of Artificial Sequence: Synthetic oligonucleotide
  Sense strand starting at position 926 of SEQ ID NO: 2733
aggucuguuagcuagagaa

SEQ ID NO: 212083 - RNA, 19 nt, Artificial Sequence
  Description of Artificial Sequence: Synthetic oligonucleotide
  Antisense strand to SEQ ID NO: 212082
uucucuagcuaacagaccu

SEQ ID NO: 212084 - RNA, 19 nt, Artificial Sequence
  Description of Artificial Sequence: Synthetic oligonucleotide
  Sense strand starting at position 1172 of SEQ ID NO: 2733
ccuaaaucucuuugaugga

SEQ ID NO: 212085 - RNA, 19 nt, Artificial Sequence
  Description of Artificial Sequence: Synthetic oligonucleotide
  Antisense strand to SEQ ID NO: 212084
uccaucaaagagauuuagg

SEQ ID NO: 212086 - RNA, 19 nt, Artificial Sequence
  Description of Artificial Sequence: Synthetic oligonucleotide
  Sense strand starting at position 1259 of SEQ ID NO: 2733
gggaauaaucuauggcauu

SEQ ID NO: 212087 - RNA, 19 nt, Artificial Sequence
  Description of Artificial Sequence: Synthetic oligonucleotide
  Antisense strand to SEQ ID NO: 212086
aaugccauagauuauuccc

SEQ ID NO: 212088 - RNA, 19 nt, Artificial Sequence
  Description of Artificial Sequence: Synthetic oligonucleotide
  Sense strand starting at position 1360 of SEQ ID NO: 2733
ucuguaauuuaggaccuua

SEQ ID NO: 212089 - RNA, 19 nt, Artificial Sequence
  Description of Artificial Sequence: Synthetic oligonucleotide
  Antisense strand to SEQ ID NO: 212088
uaagguccuaaauuacaga

SEQ ID NO: 212090 - RNA, 19 nt, Artificial Sequence
  Description of Artificial Sequence: Synthetic oligonucleotide
  Sense strand starting at position 1390 of SEQ ID NO: 2733
agaacuacuuucucgacuu

SEQ ID NO: 212091 - RNA, 19 nt, Artificial Sequence
  Description of Artificial Sequence: Synthetic oligonucleotide
  Antisense strand to SEQ ID NO: 212090
aagucgagaaaguaguucu

SEQ ID NO: 212092 - RNA, 19 nt, Artificial Sequence
  Description of Artificial Sequence: Synthetic oligonucleotide
  Sense strand starting at position 1431 of SEQ ID NO: 2733
gcccaaagccaaggauuau

SEQ ID NO: 212093 - RNA, 19 nt, Artificial Sequence
  Description of Artificial Sequence: Synthetic oligonucleotide
  Antisense strand to SEQ ID NO: 212092
auaauccuuggcuuugggc

SEQ ID NO: 212094 - RNA, 19 nt, Artificial Sequence
  Description of Artificial Sequence: Synthetic oligonucleotide
  Sense strand starting at position 1587 of SEQ ID NO: 2733
ucugaacuccuugguuuau

SEQ ID NO: 212095 - RNA, 19 nt, Artificial Sequence
  Description of Artificial Sequence: Synthetic oligonucleotide
  Antisense strand to SEQ ID NO: 212094
auaaaccaaggaguucaga

SEQ ID NO: 212096 - RNA, 19 nt, Artificial Sequence
  Description of Artificial Sequence: Synthetic oligonucleotide
  Sense strand starting at position 1589 of SEQ ID NO: 2733
ugaacuccuugguuuauca

SEQ ID NO: 212097 - RNA, 19 nt, Artificial Sequence
  Description of Artificial Sequence: Synthetic oligonucleotide
  Antisense strand to SEQ ID NO: 212096
ugauaaaccaaggaguuca

SEQ ID NO: 212098 - RNA, 19 nt, Artificial Sequence
  Description of Artificial Sequence: Synthetic oligonucleotide
  Sense strand starting at position 1619 of SEQ ID NO: 2733
ugcucucuccugggauaca

SEQ ID NO: 212099 - RNA, 19 nt, Artificial Sequence
  Description of Artificial Sequence: Synthetic oligonucleotide
  Antisense strand to SEQ ID NO: 212098
uguaucccaggagagagca

SEQ ID NO: 212100 - RNA, 19 nt, Artificial Sequence
  Description of Artificial Sequence: Synthetic oligonucleotide
  Sense strand starting at position 1998 of SEQ ID NO: 2733
gcagcuguuauugaauaga

SEQ ID NO: 212101 - RNA, 19 nt, Artificial Sequence
  Description of Artificial Sequence: Synthetic oligonucleotide
  Antisense strand to SEQ ID NO: 212100
ucuauucaauaacagcugc

SEQ ID NO: 212102 - RNA, 19 nt, Artificial Sequence
  Description of Artificial Sequence: Synthetic oligonucleotide
  Sense strand starting at position 2001 of SEQ ID NO: 2733
gcuguuauugaauagaaua

SEQ ID NO: 212103 - RNA, 19 nt, Artificial Sequence
  Description of Artificial Sequence: Synthetic oligonucleotide
  Antisense strand to SEQ ID NO: 212102
uauucuauucaauaacagc

SEQ ID NO: 212104 - RNA, 19 nt, Artificial Sequence
  Description of Artificial Sequence: Synthetic oligonucleotide
  Sense strand starting at position 2042 of SEQ ID NO: 2733
uuguucuggccacaaguua

SEQ ID NO: 212105 - RNA, 19 nt, Artificial Sequence
  Description of Artificial Sequence: Synthetic oligonucleotide
  Antisense strand to SEQ ID NO: 212104
uaacuuguggccagaacaa

SEQ ID NO: 212106 - RNA, 19 nt, Artificial Sequence
  Description of Artificial Sequence: Synthetic oligonucleotide
  Sense strand starting at position 2061 of SEQ ID NO: 2733
gugcuauugguauacauag

SEQ ID NO: 212107 - RNA, 19 nt, Artificial Sequence
  Description of Artificial Sequence: Synthetic oligonucleotide
  Antisense strand to SEQ ID NO: 212106
cuauguauaccaauagcac

SEQ ID NO: 212108 - RNA, 19 nt, Artificial Sequence
  Description of Artificial Sequence: Synthetic oligonucleotide
  Sense strand starting at position 2085 of SEQ ID NO: 2733
agggauugacauugcuuau

SEQ ID NO: 212109 - RNA, 19 nt, Artificial Sequence
  Description of Artificial Sequence: Synthetic oligonucleotide
  Antisense strand to SEQ ID NO: 212108
auaagcaaugucaaucccu

SEQ ID NO: 212110 - RNA, 19 nt, Artificial Sequence
  Description of Artificial Sequence: Synthetic oligonucleotide
  Sense strand starting at position 2120 of SEQ ID NO: 2733
auaugauaucauugauggu

SEQ ID NO: 212111 - RNA, 19 nt, Artificial Sequence
  Description of Artificial Sequence: Synthetic oligonucleotide
  Antisense strand to SEQ ID NO: 212110
accaucaaugauaucauau

SEQ ID NO: 212112 - RNA, 19 nt, Artificial Sequence
  Description of Artificial Sequence: Synthetic oligonucleotide
  Sense strand starting at position 2124 of SEQ ID NO: 2733
gauaucauugauggugaua

SEQ ID NO: 212113 - RNA, 19 nt, Artificial Sequence
  Description of Artificial Sequence: Synthetic oligonucleotide
  Antisense strand to SEQ ID NO: 212112
uaucaccaucaaugauauc

SEQ ID NO: 212114 - RNA, 19 nt, Artificial Sequence
  Description of Artificial Sequence: Synthetic oligonucleotide
  Sense strand starting at position 2339 of SEQ ID NO: 2733
acaauaguguauccaauag

SEQ ID NO: 212115 - RNA, 19 nt, Artificial Sequence
  Description of Artificial Sequence: Synthetic oligonucleotide
  Antisense strand to SEQ ID NO: 212114
cuauuggauacacuauugu

SEQ ID NO: 212116 - RNA, 19 nt, Artificial Sequence
  Description of Artificial Sequence: Synthetic oligonucleotide
  Sense strand starting at position 2416 of SEQ ID NO: 2733
uguucuuaacuguacaaau

SEQ ID NO: 212117 - RNA, 19 nt, Artificial Sequence
  Description of Artificial Sequence: Synthetic oligonucleotide
  Antisense strand to SEQ ID NO: 212116
auuuguacaguuaagaaca

SEQ ID NO: 212118 - RNA, 19 nt, Artificial Sequence
  Description of Artificial Sequence: Synthetic oligonucleotide
  Sense strand starting at position 2438 of SEQ ID NO: 2733
gauauuagccaauggugau

SEQ ID NO: 212119 - RNA, 19 nt, Artificial Sequence
  Description of Artificial Sequence: Synthetic oligonucleotide
  Antisense strand to SEQ ID NO: 212118
aucaccauuggcuaauauc

SEQ ID NO: 212120 - RNA, 19 nt, Artificial Sequence
  Description of Artificial Sequence: Synthetic oligonucleotide
  Sense strand starting at position 2445 of SEQ ID NO: 2733
gccaauggugauggagaga

SEQ ID NO: 212121 - RNA, 19 nt, Artificial Sequence
  Description of Artificial Sequence: Synthetic oligonucleotide
  Antisense strand to SEQ ID NO: 212120
ucucuccaucaccauuggc

SEQ ID NO: 212122 - RNA, 19 nt, Artificial Sequence
  Description of Artificial Sequence: Synthetic oligonucleotide
  Sense strand starting at position 2567 of SEQ ID NO: 2733
ugucaaggaaucuggcuua

SEQ ID NO: 212123 - RNA, 19 nt, Artificial Sequence
  Description of Artificial Sequence: Synthetic oligonucleotide
  Antisense strand to SEQ ID NO: 212122
uaagccagauuccuugaca

SEQ ID NO: 212124 - RNA, 19 nt, Artificial Sequence
  Description of Artificial Sequence: Synthetic oligonucleotide
  Sense strand starting at position 2627 of SEQ ID NO: 2733
ucuguuagauuccuaagau

SEQ ID NO: 212125 - RNA, 19 nt, Artificial Sequence
  Description of Artificial Sequence: Synthetic oligonucleotide
  Antisense strand to SEQ ID NO: 212124
aucuuaggaaucuaacaga

SEQ ID NO: 212126 - RNA, 19 nt, Artificial Sequence
  Description of Artificial Sequence: Synthetic oligonucleotide
  Sense strand starting at position 2928 of SEQ ID NO: 2733
ggaagacuacuuggcucaa

SEQ ID NO: 212127 - RNA, 19 nt, Artificial Sequence
  Description of Artificial Sequence: Synthetic oligonucleotide
  Antisense strand to SEQ ID NO: 212126
uugagccaaguagucuucc

SEQ ID NO: 212128 - RNA, 19 nt, Artificial Sequence
  Description of Artificial Sequence: Synthetic oligonucleotide
  Sense strand starting at position 3258 of SEQ ID NO: 2733
gccaaagaccauuaaaguu

SEQ ID NO: 212129 - RNA, 19 nt, Artificial Sequence
  Description of Artificial Sequence: Synthetic oligonucleotide
  Antisense strand to SEQ ID NO: 212128
aacuuuaauggucuuuggc

SEQ ID NO: 212130 - RNA, 19 nt, Artificial Sequence
  Description of Artificial Sequence: Synthetic oligonucleotide
  Sense strand starting at position 3299 of SEQ ID NO: 2733
agaagcuaguuucucagaa

SEQ ID NO: 212131 - RNA, 19 nt, Artificial Sequence
  Description of Artificial Sequence: Synthetic oligonucleotide
  Antisense strand to SEQ ID NO: 212130
uucugagaaacuagcuucu

SEQ ID NO: 212132 - RNA, 19 nt, Artificial Sequence
  Description of Artificial Sequence: Synthetic oligonucleotide
  Sense strand starting at position 3300 of SEQ ID NO: 2733
gaagcuaguuucucagaau

SEQ ID NO: 212133 - RNA, 19 nt, Artificial Sequence
  Description of Artificial Sequence: Synthetic oligonucleotide
  Antisense strand to SEQ ID NO: 212132
auucugagaaacuagcuuc

SEQ ID NO: 212134 - RNA, 19 nt, Artificial Sequence
  Description of Artificial Sequence: Synthetic oligonucleotide
  Sense strand starting at position 3876 of SEQ ID NO: 2733
ggccuauagccugauuauu

SEQ ID NO: 212135 - RNA, 19 nt, Artificial Sequence
  Description of Artificial Sequence: Synthetic oligonucleotide
  Antisense strand to SEQ ID NO: 212134
aauaaucaggcuauaggcc

SEQ ID NO: 212136 - RNA, 19 nt, Artificial Sequence
  Description of Artificial Sequence: Synthetic oligonucleotide
  Sense strand starting at position 35 of SEQ ID NO: 2732
uaacaaaguugguuguuua

SEQ ID NO: 212137 - RNA, 19 nt, Artificial Sequence
  Description of Artificial Sequence: Synthetic oligonucleotide
  Antisense strand to SEQ ID NO: 212136
uaaacaaccaacuuuguua

SEQ ID NO: 212138 - RNA, 19 nt, Artificial Sequence
  Description of Artificial Sequence: Synthetic oligonucleotide
  Sense strand starting at position 39 of SEQ ID NO: 2732
aaaguugguuguuuaccaa

SEQ ID NO: 212139 - RNA, 19 nt, Artificial Sequence
  Description of Artificial Sequence: Synthetic oligonucleotide
  Antisense strand to SEQ ID NO: 212138
uugguaaacaaccaacuuu

SEQ ID NO: 212140 - RNA, 19 nt, Artificial Sequence
  Description of Artificial Sequence: Synthetic oligonucleotide
  Sense strand starting at position 316 of SEQ ID NO: 2732
aggccugaagagugauaau

SEQ ID NO: 212141 - RNA, 19 nt, Artificial Sequence
  Description of Artificial Sequence: Synthetic oligonucleotide
  Antisense strand to SEQ ID NO: 212140
auuaucacucuucaggccu

SEQ ID NO: 212142 - RNA, 19 nt, Artificial Sequence
  Description of Artificial Sequence: Synthetic oligonucleotide
  Sense strand starting at position 325 of SEQ ID NO: 2732
gagugauaauuguucuuug

SEQ ID NO: 212143 - RNA, 19 nt, Artificial Sequence
  Description of Artificial Sequence: Synthetic oligonucleotide
  Antisense strand to SEQ ID NO: 212142
caaagaacaauuaucacuc

SEQ ID NO: 212144 - RNA, 19 nt, Artificial Sequence
  Description of Artificial Sequence: Synthetic oligonucleotide
  Sense strand starting at position 330 of SEQ ID NO: 2732
auaauuguucuuuggguca

SEQ ID NO: 212145 - RNA, 19 nt, Artificial Sequence
  Description of Artificial Sequence: Synthetic oligonucleotide
  Antisense strand to SEQ ID NO: 212144
ugacccaaagaacaauuau

SEQ ID NO: 212146 - RNA, 19 nt, Artificial Sequence
  Description of Artificial Sequence: Synthetic oligonucleotide
  Sense strand starting at position 348 of SEQ ID NO: 2732
aguaguagagaaugucuau

SEQ ID NO: 212147 - RNA, 19 nt, Artificial Sequence
  Description of Artificial Sequence: Synthetic oligonucleotide
  Antisense strand to SEQ ID NO: 212146
auagacauucucuacuacu

SEQ ID NO: 212148 - RNA, 19 nt, Artificial Sequence
  Description of Artificial Sequence: Synthetic oligonucleotide
  Sense strand starting at position 370 of SEQ ID NO: 2732
cuuugaauucucugaauug

SEQ ID NO: 212149 - RNA, 19 nt, Artificial Sequence
  Description of Artificial Sequence: Synthetic oligonucleotide
  Antisense strand to SEQ ID NO: 212148
caauucagagaauucaaag

SEQ ID NO: 212150 - RNA, 19 nt, Artificial Sequence
  Description of Artificial Sequence: Synthetic oligonucleotide
  Sense strand starting at position 379 of SEQ ID NO: 2732
cucugaauugaaugcaaga

SEQ ID NO: 212151 - RNA, 19 nt, Artificial Sequence
  Description of Artificial Sequence: Synthetic oligonucleotide
  Antisense strand to SEQ ID NO: 212150
ucuugcauucaauucagag

SEQ ID NO: 212152 - RNA, 19 nt, Artificial Sequence
  Description of Artificial Sequence: Synthetic oligonucleotide
  Sense strand starting at position 468 of SEQ ID NO: 2732
ggcuguuuaaguuaucaug

SEQ ID NO: 212153 - RNA, 19 nt, Artificial Sequence
  Description of Artificial Sequence: Synthetic oligonucleotide
  Antisense strand to SEQ ID NO: 212152
caugauaacuuaaacagcc

SEQ ID NO: 212154 - RNA, 19 nt, Artificial Sequence
  Description of Artificial Sequence: Synthetic oligonucleotide
  Sense strand starting at position 585 of SEQ ID NO: 2732
ggacucucaucucuaaagu

SEQ ID NO: 212155 - RNA, 19 nt, Artificial Sequence
  Description of Artificial Sequence: Synthetic oligonucleotide
  Antisense strand to SEQ ID NO: 212154
acuuuagagaugagagucc

SEQ ID NO: 212156 - RNA, 19 nt, Artificial Sequence
  Description of Artificial Sequence: Synthetic oligonucleotide
  Sense strand starting at position 817 of SEQ ID NO: 2732
acagcauugccagagcaga

SEQ ID NO: 212157 - RNA, 19 nt, Artificial Sequence
  Description of Artificial Sequence: Synthetic oligonucleotide
  Antisense strand to SEQ ID NO: 212156
ucugcucuggcaaugcugu

SEQ ID NO: 212158 - RNA, 19 nt, Artificial Sequence
  Description of Artificial Sequence: Synthetic oligonucleotide
  Sense strand starting at position 850 of SEQ ID NO: 2732
cucaguaauugcccuggaa

SEQ ID NO: 212159 - RNA, 19 nt, Artificial Sequence
  Description of Artificial Sequence: Synthetic oligonucleotide
  Antisense strand to SEQ ID NO: 212158
uuccagggcaauuacugag

SEQ ID NO: 212160 - RNA, 19 nt, Artificial Sequence
  Description of Artificial Sequence: Synthetic oligonucleotide
  Sense strand starting at position 854 of SEQ ID NO: 2732
guaauugcccuggaagcaa

SEQ ID NO: 212161 - RNA, 19 nt, Artificial Sequence
  Description of Artificial Sequence: Synthetic oligonucleotide
  Antisense strand to SEQ ID NO: 212160
uugcuuccagggcaauuac

SEQ ID NO: 212162 - RNA, 19 nt, Artificial Sequence
  Description of Artificial Sequence: Synthetic oligonucleotide
  Sense strand starting at position 884 of SEQ ID NO: 2732
cguagacaagcucacauua

SEQ ID NO: 212163 - RNA, 19 nt, Artificial Sequence
  Description of Artificial Sequence: Synthetic oligonucleotide
  Antisense strand to SEQ ID NO: 212162
uaaugugagcuugucuacg

SEQ ID NO: 212164 - RNA, 19 nt, Artificial Sequence
  Description of Artificial Sequence: Synthetic oligonucleotide
  Sense strand starting at position 1076 of SEQ ID NO: 2732
aggucuguuagcuagagaa

SEQ ID NO: 212165 - RNA, 19 nt, Artificial Sequence
  Description of Artificial Sequence: Synthetic oligonucleotide
  Antisense strand to SEQ ID NO: 212164
uucucuagcuaacagaccu

SEQ ID NO: 212166 - RNA, 19 nt, Artificial Sequence
  Description of Artificial Sequence: Synthetic oligonucleotide
  Sense strand starting at position 1322 of SEQ ID NO: 2732
ccuaaaucucuuugaugga

SEQ ID NO: 212167 - RNA, 19 nt, Artificial Sequence
  Description of Artificial Sequence: Synthetic oligonucleotide
  Antisense strand to SEQ ID NO: 212166
uccaucaaagagauuuagg

SEQ ID NO: 212168 - RNA, 19 nt, Artificial Sequence
  Description of Artificial Sequence: Synthetic oligonucleotide
  Sense strand starting at position 1409 of SEQ ID NO: 2732
gggaauaaucuauggcauu

SEQ ID NO: 212169 - RNA, 19 nt, Artificial Sequence
  Description of Artificial Sequence: Synthetic oligonucleotide
  Antisense strand to SEQ ID NO: 212168
aaugccauagauuauuccc

SEQ ID NO: 212170 - RNA, 19 nt, Artificial Sequence
  Description of Artificial Sequence: Synthetic oligonucleotide
  Sense strand starting at position 1510 of SEQ ID NO: 2732
ucuguaauuuaggaccuua

SEQ ID NO: 212171 - RNA, 19 nt, Artificial Sequence
  Description of Artificial Sequence: Synthetic oligonucleotide
  Antisense strand to SEQ ID NO: 212170
uaagguccuaaauuacaga

SEQ ID NO: 212172 - RNA, 19 nt, Artificial Sequence
  Description of Artificial Sequence: Synthetic oligonucleotide
  Sense strand starting at position 1540 of SEQ ID NO: 2732
agaacuacuuucucgacuu

SEQ ID NO: 212173 - RNA, 19 nt, Artificial Sequence
  Description of Artificial Sequence: Synthetic oligonucleotide
  Antisense strand to SEQ ID NO: 212172
aagucgagaaaguaguucu

SEQ ID NO: 212174 - RNA, 19 nt, Artificial Sequence
  Description of Artificial Sequence: Synthetic oligonucleotide
  Sense strand starting at position 1581 of SEQ ID NO: 2732
gcccaaagccaaggauuau

SEQ ID NO: 212175 - RNA, 19 nt, Artificial Sequence
  Description of Artificial Sequence: Synthetic oligonucleotide
  Antisense strand to SEQ ID NO: 212174
auaauccuuggcuuugggc

SEQ ID NO: 212176 - RNA, 19 nt, Artificial Sequence
  Description of Artificial Sequence: Synthetic oligonucleotide
  Sense strand starting at position 1737 of SEQ ID NO: 2732
ucugaacuccuugguuuau

SEQ ID NO: 212177 - RNA, 19 nt, Artificial Sequence
  Description of Artificial Sequence: Synthetic oligonucleotide
  Antisense strand to SEQ ID NO: 212176
auaaaccaaggaguucaga

SEQ ID NO: 212178 - RNA, 19 nt, Artificial Sequence
  Description of Artificial Sequence: Synthetic oligonucleotide
  Sense strand starting at position 1739 of SEQ ID NO: 2732
ugaacuccuugguuuauca

SEQ ID NO: 212179 - RNA, 19 nt, Artificial Sequence
  Description of Artificial Sequence: Synthetic oligonucleotide
  Antisense strand to SEQ ID NO: 212178
ugauaaaccaaggaguuca

SEQ ID NO: 212180 - RNA, 19 nt, Artificial Sequence
  Description of Artificial Sequence: Synthetic oligonucleotide
  Sense strand starting at position 1769 of SEQ ID NO: 2732
ugcucucuccugggauaca

SEQ ID NO: 212181 - RNA, 19 nt, Artificial Sequence
  Description of Artificial Sequence: Synthetic oligonucleotide
  Antisense strand to SEQ ID NO: 212180
uguaucccaggagagagca

SEQ ID NO: 212182 - RNA, 19 nt, Artificial Sequence
  Description of Artificial Sequence: Synthetic oligonucleotide
  Sense strand starting at position 2148 of SEQ ID NO: 2732
gcagcuguuauugaauaga

SEQ ID NO: 212183 - RNA, 19 nt, Artificial Sequence
  Description of Artificial Sequence: Synthetic oligonucleotide
  Antisense strand to SEQ ID NO: 212182
ucuauucaauaacagcugc

SEQ ID NO: 212184 - RNA, 19 nt, Artificial Sequence
  Description of Artificial Sequence: Synthetic oligonucleotide
  Sense strand starting at position 2151 of SEQ ID NO: 2732
gcuguuauugaauagaaua

SEQ ID NO: 212185 - RNA, 19 nt, Artificial Sequence
  Description of Artificial Sequence: Synthetic oligonucleotide
  Antisense strand to SEQ ID NO: 212184
uauucuauucaauaacagc

SEQ ID NO: 212186 - RNA, 19 nt, Artificial Sequence
  Description of Artificial Sequence: Synthetic oligonucleotide
  Sense strand starting at position 2192 of SEQ ID NO: 2732
uuguucuggccacaaguua

SEQ ID NO: 212187 - RNA, 19 nt, Artificial Sequence
  Description of Artificial Sequence: Synthetic oligonucleotide
  Antisense strand to SEQ ID NO: 212186
uaacuuguggccagaacaa

SEQ ID NO: 212188 - RNA, 19 nt, Artificial Sequence
  Description of Artificial Sequence: Synthetic oligonucleotide
  Sense strand starting at position 2211 of SEQ ID NO: 2732
gugcuauugguauacauag

SEQ ID NO: 212189 - RNA, 19 nt, Artificial Sequence
  Description of Artificial Sequence: Synthetic oligonucleotide
  Antisense strand to SEQ ID NO: 212188
cuauguauaccaauagcac

SEQ ID NO: 212190 - RNA, 19 nt, Artificial Sequence
  Description of Artificial Sequence: Synthetic oligonucleotide
  Sense strand starting at position 2235 of SEQ ID NO: 2732
agggauugacauugcuuau

SEQ ID NO: 212191 - RNA, 19 nt, Artificial Sequence
  Description of Artificial Sequence: Synthetic oligonucleotide
  Antisense strand to SEQ ID NO: 212190
auaagcaaugucaaucccu

SEQ ID NO: 212192 - RNA, 19 nt, Artificial Sequence
  Description of Artificial Sequence: Synthetic oligonucleotide
  Sense strand starting at position 2270 of SEQ ID NO: 2732
auaugauaucauugauggu

SEQ ID NO: 212193 - RNA, 19 nt, Artificial Sequence
  Description of Artificial Sequence: Synthetic oligonucleotide
  Antisense strand to SEQ ID NO: 212192
accaucaaugauaucauau

SEQ ID NO: 212194 - RNA, 19 nt, Artificial Sequence
  Description of Artificial Sequence: Synthetic oligonucleotide
  Sense strand starting at position 2274 of SEQ ID NO: 2732
gauaucauugauggugaua

SEQ ID NO: 212195 - RNA, 19 nt, Artificial Sequence
  Description of Artificial Sequence: Synthetic oligonucleotide
  Antisense strand to SEQ ID NO: 212194
uaucaccaucaaugauauc

SEQ ID NO: 212196 - RNA, 19 nt, Artificial Sequence
  Description of Artificial Sequence: Synthetic oligonucleotide
  Sense strand starting at position 2489 of SEQ ID NO: 2732
acaauaguguauccaauag

SEQ ID NO: 212197 - RNA, 19 nt, Artificial Sequence
  Description of Artificial Sequence: Synthetic oligonucleotide
  Antisense strand to SEQ ID NO: 212196
cuauuggauacacuauugu

SEQ ID NO: 212198 - RNA, 19 nt, Artificial Sequence
  Description of Artificial Sequence: Synthetic oligonucleotide
  Sense strand starting at position 2566 of SEQ ID NO: 2732
uguucuuaacuguacaaau

SEQ ID NO: 212199 - RNA, 19 nt, Artificial Sequence
  Description of Artificial Sequence: Synthetic oligonucleotide
  Antisense strand to SEQ ID NO: 212198
auuuguacaguuaagaaca

SEQ ID NO: 212200 - RNA, 19 nt, Artificial Sequence
  Description of Artificial Sequence: Synthetic oligonucleotide
  Sense strand starting at position 2588 of SEQ ID NO: 2732
gauauuagccaauggugau

SEQ ID NO: 212201 - RNA, 19 nt, Artificial Sequence
  Description of Artificial Sequence: Synthetic oligonucleotide
  Antisense strand to SEQ ID NO: 212200
aucaccauuggcuaauauc

SEQ ID NO: 212202 - RNA, 19 nt, Artificial Sequence
  Description of Artificial Sequence: Synthetic oligonucleotide
  Sense strand starting at position 2595 of SEQ ID NO: 2732
gccaauggugauggagaga

SEQ ID NO: 212203 - RNA, 19 nt, Artificial Sequence
  Description of Artificial Sequence: Synthetic oligonucleotide
  Antisense strand to SEQ ID NO: 212202
ucucuccaucaccauuggc

SEQ ID NO: 212204 - RNA, 19 nt, Artificial Sequence
  Description of Artificial Sequence: Synthetic oligonucleotide
  Sense strand starting at position 2717 of SEQ ID NO: 2732
ugucaaggaaucuggcuua

SEQ ID NO: 212205 - RNA, 19 nt, Artificial Sequence
  Description of Artificial Sequence: Synthetic oligonucleotide
  Antisense strand to SEQ ID NO: 212204
uaagccagauuccuugaca

SEQ ID NO: 212206 - RNA, 19 nt, Artificial Sequence
  Description of Artificial Sequence: Synthetic oligonucleotide
  Sense strand starting at position 2777 of SEQ ID NO: 2732
ucuguuagauuccuaagau

SEQ ID NO: 212207 - RNA, 19 nt, Artificial Sequence
  Description of Artificial Sequence: Synthetic oligonucleotide
  Antisense strand to SEQ ID NO: 212206
aucuuaggaaucuaacaga

SEQ ID NO: 212208 - RNA, 19 nt, Artificial Sequence
  Description of Artificial Sequence: Synthetic oligonucleotide
  Sense strand starting at position 3078 of SEQ ID NO: 2732
ggaagacuacuuggcucaa

SEQ ID NO: 212209 - RNA, 19 nt, Artificial Sequence
  Description of Artificial Sequence: Synthetic oligonucleotide
  Antisense strand to SEQ ID NO: 212208
uugagccaaguagucuucc

SEQ ID NO: 212210 - RNA, 19 nt, Artificial Sequence
  Description of Artificial Sequence: Synthetic oligonucleotide
  Sense strand starting at position 3408 of SEQ ID NO: 2732
gccaaagaccauuaaaguu

SEQ ID NO: 212211 - RNA, 19 nt, Artificial Sequence
  Description of Artificial Sequence: Synthetic oligonucleotide
  Antisense strand to SEQ ID NO: 212210
aacuuuaauggucuuuggc

SEQ ID NO: 212212 - RNA, 19 nt, Artificial Sequence
  Description of Artificial Sequence: Synthetic oligonucleotide
  Sense strand starting at position 3449 of SEQ ID NO: 2732
agaagcuaguuucucagaa

SEQ ID NO: 212213 - RNA, 19 nt, Artificial Sequence
  Description of Artificial Sequence: Synthetic oligonucleotide
  Antisense strand to SEQ ID NO: 212212
uucugagaaacuagcuucu

SEQ ID NO: 212214 - RNA, 19 nt, Artificial Sequence
  Description of Artificial Sequence: Synthetic oligonucleotide
  Sense strand starting at position 3450 of SEQ ID NO: 2732
gaagcuaguuucucagaau

SEQ ID NO: 212215 - RNA, 19 nt, Artificial Sequence
  Description of Artificial Sequence: Synthetic oligonucleotide
  Antisense strand to SEQ ID NO: 212214
auucugagaaacuagcuuc

SEQ ID NO: 212216 - RNA, 19 nt, Artificial Sequence
  Description of Artificial Sequence: Synthetic oligonucleotide
  Sense strand starting at position 2089 of SEQ ID NO: 2734
ccaauagacucucgcacuu

SEQ ID NO: 212217 - RNA, 19 nt, Artificial Sequence
  Description of Artificial Sequence: Synthetic oligonucleotide
  Antisense strand to SEQ ID NO: 212216
aagugcgagagucuauugg

SEQ ID NO: 212218 - RNA, 19 nt, Artificial Sequence
  Description of Artificial Sequence: Synthetic oligonucleotide
  Sense strand starting at position 2272 of SEQ ID NO: 2734
accagcuuguucugaugca

SEQ ID NO: 212219 - RNA, 19 nt, Artificial Sequence
  Description of Artificial Sequence: Synthetic oligonucleotide
  Antisense strand to SEQ ID NO: 212218
ugcaucagaacaagcuggu

SEQ ID NO: 212220 - RNA, 19 nt, Artificial Sequence
  Description of Artificial Sequence: Synthetic oligonucleotide
  Sense strand starting at position 2445 of SEQ ID NO: 2734
gucuguuuccucuucgcga

SEQ ID NO: 212221 - RNA, 19 nt, Artificial Sequence
  Description of Artificial Sequence: Synthetic oligonucleotide
  Antisense strand to SEQ ID NO: 212220
ucgcgaagaggaaacagac

SEQ ID NO: 212222 - RNA, 19 nt, Artificial Sequence
  Description of Artificial Sequence: Synthetic oligonucleotide
  Sense strand starting at position 2609 of SEQ ID NO: 2734
gcagcaaggucucaaauau

SEQ ID NO: 212223 - RNA, 19 nt, Artificial Sequence
  Description of Artificial Sequence: Synthetic oligonucleotide
  Antisense strand to SEQ ID NO: 212222
auauuugagaccuugcugc

SEQ ID NO: 212224 - RNA, 19 nt, Artificial Sequence
  Description of Artificial Sequence: Synthetic oligonucleotide
  Sense strand starting at position 2652 of SEQ ID NO: 2734
ccugauucucugcaacuga

SEQ ID NO: 212225 - RNA, 19 nt, Artificial Sequence
  Description of Artificial Sequence: Synthetic oligonucleotide
  Antisense strand to SEQ ID NO: 212224
ucaguugcagagaaucagg

SEQ ID NO: 212226 - RNA, 19 nt, Artificial Sequence
  Description of Artificial Sequence: Synthetic oligonucleotide
  Sense strand starting at position 2745 of SEQ ID NO: 2734
aucucauacuuggguggau

SEQ ID NO: 212227 - RNA, 19 nt, Artificial Sequence
  Description of Artificial Sequence: Synthetic oligonucleotide
  Antisense strand to SEQ ID NO: 212226
auccacccaaguaugagau

SEQ ID NO: 212228 - RNA, 19 nt, Artificial Sequence
  Description of Artificial Sequence: Synthetic oligonucleotide
  Sense strand starting at position 2817 of SEQ ID NO: 2734
cccagucuuggauagugaa

SEQ ID NO: 212229 - RNA, 19 nt, Artificial Sequence
  Description of Artificial Sequence: Synthetic oligonucleotide
  Antisense strand to SEQ ID NO: 212228
uucacuauccaagacuggg

SEQ ID NO: 212230 - RNA, 19 nt, Artificial Sequence
  Description of Artificial Sequence: Synthetic oligonucleotide
  Sense strand starting at position 2905 of SEQ ID NO: 2734
ugagguggguuucaucauu

SEQ ID NO: 212231 - RNA, 19 nt, Artificial Sequence
  Description of Artificial Sequence: Synthetic oligonucleotide
  Antisense strand to SEQ ID NO: 212230
aaugaugaaacccaccuca

SEQ ID NO: 212232 - RNA, 19 nt, Artificial Sequence
  Description of Artificial Sequence: Synthetic oligonucleotide
  Sense strand starting at position 2924 of SEQ ID NO: 2734
aaaugcuuccugcagguaa

SEQ ID NO: 212233 - RNA, 19 nt, Artificial Sequence
  Description of Artificial Sequence: Synthetic oligonucleotide
  Antisense strand to SEQ ID NO: 212232
uuaccugcaggaagcauuu

SEQ ID NO: 212234 - RNA, 19 nt, Artificial Sequence
  Description of Artificial Sequence: Synthetic oligonucleotide
  Sense strand starting at position 3012 of SEQ ID NO: 2734
ucuguuaccuccugaguac

SEQ ID NO: 212235 - RNA, 19 nt, Artificial Sequence
  Description of Artificial Sequence: Synthetic oligonucleotide
  Antisense strand to SEQ ID NO: 212234
guacucaggagguaacaga

SEQ ID NO: 212236 - RNA, 19 nt, Artificial Sequence
  Description of Artificial Sequence: Synthetic oligonucleotide
  Sense strand starting at position 3089 of SEQ ID NO: 2734
acagcuaguucuggaccua

SEQ ID NO: 212237 - RNA, 19 nt, Artificial Sequence
  Description of Artificial Sequence: Synthetic oligonucleotide
  Antisense strand to SEQ ID NO: 212236
uagguccagaacuagcugu

SEQ ID NO: 212238 - RNA, 19 nt, Artificial Sequence
  Description of Artificial Sequence: Synthetic oligonucleotide
  Sense strand starting at position 3090 of SEQ ID NO: 2734
cagcuaguucuggaccuau

SEQ ID NO: 212239 - RNA, 19 nt, Artificial Sequence
  Description of Artificial Sequence: Synthetic oligonucleotide
  Antisense strand to SEQ ID NO: 212238
auagguccagaacuagcug

SEQ ID NO: 212240 - RNA, 19 nt, Artificial Sequence
  Description of Artificial Sequence: Synthetic oligonucleotide
  Sense strand starting at position 3108 of SEQ ID NO: 2734
uucuaucugccuuguuaga

SEQ ID NO: 212241 - RNA, 19 nt, Artificial Sequence
  Description of Artificial Sequence: Synthetic oligonucleotide
  Antisense strand to SEQ ID NO: 212240
ucuaacaaggcagauagaa

SEQ ID NO: 212242 - RNA, 19 nt, Artificial Sequence
  Description of Artificial Sequence: Synthetic oligonucleotide
  Sense strand starting at position 3110 of SEQ ID NO: 2734
cuaucugccuuguuagauc

SEQ ID NO: 212243 - RNA, 19 nt, Artificial Sequence
  Description of Artificial Sequence: Synthetic oligonucleotide
  Antisense strand to SEQ ID NO: 212242
gaucuaacaaggcagauag

SEQ ID NO: 212244 - RNA, 19 nt, Artificial Sequence
  Description of Artificial Sequence: Synthetic oligonucleotide
  Sense strand starting at position 3118 of SEQ ID NO: 2734
cuuguuagaucauguccac

SEQ ID NO: 212245 - RNA, 19 nt, Artificial Sequence
  Description of Artificial Sequence: Synthetic oligonucleotide
  Antisense strand to SEQ ID NO: 212244
guggacaugaucuaacaag

SEQ ID NO: 212246 - RNA, 19 nt, Artificial Sequence
  Description of Artificial Sequence: Synthetic oligonucleotide
  Sense strand starting at position 3269 of SEQ ID NO: 2734
aggauugcccuuggaguca

SEQ ID NO: 212247 - RNA, 19 nt, Artificial Sequence
  Description of Artificial Sequence: Synthetic oligonucleotide
  Antisense strand to SEQ ID NO: 212246
ugacuccaagggcaauccu

SEQ ID NO: 212248 - RNA, 19 nt, Artificial Sequence
  Description of Artificial Sequence: Synthetic oligonucleotide
  Sense strand starting at position 3339 of SEQ ID NO: 2734
caggguugguuugugcaua

SEQ ID NO: 212249 - RNA, 19 nt, Artificial Sequence
  Description of Artificial Sequence: Synthetic oligonucleotide
  Antisense strand to SEQ ID NO: 212248
uaugcacaaaccaacccug

SEQ ID NO: 212250 - RNA, 19 nt, Artificial Sequence
  Description of Artificial Sequence: Synthetic oligonucleotide
  Sense strand starting at position 3340 of SEQ ID NO: 2734
aggguugguuugugcauau

SEQ ID NO: 212251 - RNA, 19 nt, Artificial Sequence
  Description of Artificial Sequence: Synthetic oligonucleotide
  Antisense strand to SEQ ID NO: 212250
auaugcacaaaccaacccu

SEQ ID NO: 212252 - RNA, 19 nt, Artificial Sequence
  Description of Artificial Sequence: Synthetic oligonucleotide
  Sense strand starting at position 3344 of SEQ ID NO: 2734
uugguuugugcauauaugu

SEQ ID NO: 212253 - RNA, 19 nt, Artificial Sequence
  Description of Artificial Sequence: Synthetic oligonucleotide
  Antisense strand to SEQ ID NO: 212252
acauauaugcacaaaccaa

SEQ ID NO: 212254 - RNA, 19 nt, Artificial Sequence
  Description of Artificial Sequence: Synthetic oligonucleotide
  Sense strand starting at position 3380 of SEQ ID NO: 2734
cagauaggcuguucuagaa

SEQ ID NO: 212255 - RNA, 19 nt, Artificial Sequence
  Description of Artificial Sequence: Synthetic oligonucleotide
  Antisense strand to SEQ ID NO: 212254
uucuagaacagccuaucug

SEQ ID NO: 212256 - RNA, 19 nt, Artificial Sequence
  Description of Artificial Sequence: Synthetic oligonucleotide
  Sense strand starting at position 3384 of SEQ ID NO: 2734
uaggcuguucuagaaucca

SEQ ID NO: 212257 - RNA, 19 nt, Artificial Sequence
  Description of Artificial Sequence: Synthetic oligonucleotide
  Antisense strand to SEQ ID NO: 212256
uggauucuagaacagccua

SEQ ID NO: 212258 - RNA, 19 nt, Artificial Sequence
  Description of Artificial Sequence: Synthetic oligonucleotide
  Sense strand starting at position 3598 of SEQ ID NO: 2734
ucccuaggaucugaucuuu

SEQ ID NO: 212259 - RNA, 19 nt, Artificial Sequence
  Description of Artificial Sequence: Synthetic oligonucleotide
  Antisense strand to SEQ ID NO: 212258
aaagaucagauccuaggga

SEQ ID NO: 212260 - RNA, 19 nt, Artificial Sequence
  Description of Artificial Sequence: Synthetic oligonucleotide
  Sense strand starting at position 3656 of SEQ ID NO: 2734
uccucauaguucuugaaag

SEQ ID NO: 212261 - RNA, 19 nt, Artificial Sequence
  Description of Artificial Sequence: Synthetic oligonucleotide
  Antisense strand to SEQ ID NO: 212260
cuuucaagaacuaugagga

SEQ ID NO: 212262 - RNA, 19 nt, Artificial Sequence
  Description of Artificial Sequence: Synthetic oligonucleotide
  Sense strand starting at position 3657 of SEQ ID NO: 2734
ccucauaguucuugaaagu

SEQ ID NO: 212263 - RNA, 19 nt, Artificial Sequence
  Description of Artificial Sequence: Synthetic oligonucleotide
  Antisense strand to SEQ ID NO: 212262
acuuucaagaacuaugagg

SEQ ID NO: 212264 - RNA, 19 nt, Artificial Sequence
  Description of Artificial Sequence: Synthetic oligonucleotide
  Sense strand starting at position 3658 of SEQ ID NO: 2734
cucauaguucuugaaagug

SEQ ID NO: 212265 - RNA, 19 nt, Artificial Sequence
  Description of Artificial Sequence: Synthetic oligonucleotide
  Antisense strand to SEQ ID NO: 212264
cacuuucaagaacuaugag

SEQ ID NO: 212266 - RNA, 19 nt, Artificial Sequence
  Description of Artificial Sequence: Synthetic oligonucleotide
  Sense strand starting at position 3666 of SEQ ID NO: 2734
ucuugaaaguguucccucu

SEQ ID NO: 212267 - RNA, 19 nt, Artificial Sequence
  Description of Artificial Sequence: Synthetic oligonucleotide
  Antisense strand to SEQ ID NO: 212266
agagggaacacuuucaaga

SEQ ID NO: 212268 - RNA, 19 nt, Artificial Sequence
  Description of Artificial Sequence: Synthetic oligonucleotide
  Sense strand starting at position 3668 of SEQ ID NO: 2734
uugaaaguguucccucuuu

SEQ ID NO: 212269 - RNA, 19 nt, Artificial Sequence
  Description of Artificial Sequence: Synthetic oligonucleotide
  Antisense strand to SEQ ID NO: 212268
aaagagggaacacuuucaa

SEQ ID NO: 212270 - RNA, 19 nt, Artificial Sequence
  Description of Artificial Sequence: Synthetic oligonucleotide
  Sense strand starting at position 3715 of SEQ ID NO: 2734
ccuacaagguguucugagu

SEQ ID NO: 212271 - RNA, 19 nt, Artificial Sequence
  Description of Artificial Sequence: Synthetic oligonucleotide
  Antisense strand to SEQ ID NO: 212270
acucagaacaccuuguagg

SEQ ID NO: 212272 - RNA, 19 nt, Artificial Sequence
  Description of Artificial Sequence: Synthetic oligonucleotide
  Sense strand starting at position 3722 of SEQ ID NO: 2734
gguguucugagucacucuu

SEQ ID NO: 212273 - RNA, 19 nt, Artificial Sequence
  Description of Artificial Sequence: Synthetic oligonucleotide
  Antisense strand to SEQ ID NO: 212272
aagagugacucagaacacc

SEQ ID NO: 212274 - RNA, 19 nt, Artificial Sequence
  Description of Artificial Sequence: Synthetic oligonucleotide
  Sense strand starting at position 3724 of SEQ ID NO: 2734
uguucugagucacucuuua

SEQ ID NO: 212275 - RNA, 19 nt, Artificial Sequence
  Description of Artificial Sequence: Synthetic oligonucleotide
  Antisense strand to SEQ ID NO: 212274
uaaagagugacucagaaca

SEQ ID NO: 212276 - RNA, 19 nt, Artificial Sequence
  Description of Artificial Sequence: Synthetic oligonucleotide
  Sense strand starting at position 3833 of SEQ ID NO: 2734
aucuaaauggcacaugagu

SEQ ID NO: 212277 - RNA, 19 nt, Artificial Sequence
  Description of Artificial Sequence: Synthetic oligonucleotide
  Antisense strand to SEQ ID NO: 212276
acucaugugccauuuagau

SEQ ID NO: 212278 - RNA, 19 nt, Artificial Sequence
  Description of Artificial Sequence: Synthetic oligonucleotide
  Sense strand starting at position 3883 of SEQ ID NO: 2734
uggcauaaggccuauuguu

SEQ ID NO: 212279 - RNA, 19 nt, Artificial Sequence
  Description of Artificial Sequence: Synthetic oligonucleotide
  Antisense strand to SEQ ID NO: 212278
aacaauaggccuuaugcca

SEQ ID NO: 212280 - RNA, 19 nt, Artificial Sequence
  Description of Artificial Sequence: Synthetic oligonucleotide
  Sense strand starting at position 3892 of SEQ ID NO: 2734
gccuauuguuaaggucauu

SEQ ID NO: 212281 - RNA, 19 nt, Artificial Sequence
  Description of Artificial Sequence: Synthetic oligonucleotide
  Antisense strand to SEQ ID NO: 212280
aaugaccuuaacaauaggc

SEQ ID NO: 212282 - RNA, 19 nt, Artificial Sequence
  Description of Artificial Sequence: Synthetic oligonucleotide
  Sense strand starting at position 3941 of SEQ ID NO: 2734
gagugucaccacuguggua

SEQ ID NO: 212283 - RNA, 19 nt, Artificial Sequence
  Description of Artificial Sequence: Synthetic oligonucleotide
  Antisense strand to SEQ ID NO: 212282
uaccacaguggugacacuc

SEQ ID NO: 212284 - RNA, 19 nt, Artificial Sequence
  Description of Artificial Sequence: Synthetic oligonucleotide
  Sense strand starting at position 150 of SEQ ID NO: 2735
uggcuuugugccgcugcaa

SEQ ID NO: 212285 - RNA, 19 nt, Artificial Sequence
  Description of Artificial Sequence: Synthetic oligonucleotide
  Antisense strand to SEQ ID NO: 212284
uugcagcggcacaaagcca

SEQ ID NO: 212286 - RNA, 19 nt, Artificial Sequence
  Description of Artificial Sequence: Synthetic oligonucleotide
  Sense strand starting at position 151 of SEQ ID NO: 2735
ggcuuugugccgcugcaaa

SEQ ID NO: 212287 - RNA, 19 nt, Artificial Sequence
  Description of Artificial Sequence: Synthetic oligonucleotide
  Antisense strand to SEQ ID NO: 212286
uuugcagcggcacaaagcc

SEQ ID NO: 212288 - RNA, 19 nt, Artificial Sequence
  Description of Artificial Sequence: Synthetic oligonucleotide
  Sense strand starting at position 223 of SEQ ID NO: 2735
gauacuacaguuugaugca

SEQ ID NO: 212289 - RNA, 19 nt, Artificial Sequence
  Description of Artificial Sequence: Synthetic oligonucleotide
  Antisense strand to SEQ ID NO: 212288
ugcaucaaacuguaguauc

SEQ ID NO: 212290 - RNA, 19 nt, Artificial Sequence
  Description of Artificial Sequence: Synthetic oligonucleotide
  Sense strand starting at position 237 of SEQ ID NO: 2735
augcaaugucaagguuaaa

SEQ ID NO: 212291 - RNA, 19 nt, Artificial Sequence
  Description of Artificial Sequence: Synthetic oligonucleotide
  Antisense strand to SEQ ID NO: 212290
uuuaaccuugacauugcau

SEQ ID NO: 212292 - RNA, 19 nt, Artificial Sequence
  Description of Artificial Sequence: Synthetic oligonucleotide
  Sense strand starting at position 247 of SEQ ID NO: 2735
aagguuaaaccugguccaa

SEQ ID NO: 212293 - RNA, 19 nt, Artificial Sequence
  Description of Artificial Sequence: Synthetic oligonucleotide
  Antisense strand to SEQ ID NO: 212292
uuggaccagguuuaaccuu

SEQ ID NO: 212294 - RNA, 19 nt, Artificial Sequence
  Description of Artificial Sequence: Synthetic oligonucleotide
  Sense strand starting at position 249 of SEQ ID NO: 2735
gguuaaaccugguccaauc

SEQ ID NO: 212295 - RNA, 19 nt, Artificial Sequence
  Description of Artificial Sequence: Synthetic oligonucleotide
  Antisense strand to SEQ ID NO: 212294
gauuggaccagguuuaacc

SEQ ID NO: 212296 - RNA, 19 nt, Artificial Sequence
  Description of Artificial Sequence: Synthetic oligonucleotide
  Sense strand starting at position 334 of SEQ ID NO: 2735
acaguaacuugccuaaaga

SEQ ID NO: 212297 - RNA, 19 nt, Artificial Sequence
  Description of Artificial Sequence: Synthetic oligonucleotide
  Antisense strand to SEQ ID NO: 212296
ucuuuaggcaaguuacugu

SEQ ID NO: 212298 - RNA, 19 nt, Artificial Sequence
  Description of Artificial Sequence: Synthetic oligonucleotide
  Sense strand starting at position 414 of SEQ ID NO: 2735
aaggucgacugaucacaga

SEQ ID NO: 212299 - RNA, 19 nt, Artificial Sequence
  Description of Artificial Sequence: Synthetic oligonucleotide
  Antisense strand to SEQ ID NO: 212298
ucugugaucagucgaccuu

SEQ ID NO: 212300 - RNA, 19 nt, Artificial Sequence
  Description of Artificial Sequence: Synthetic oligonucleotide
  Sense strand starting at position 515 of SEQ ID NO: 2735
agaccaagcugagucauaa

SEQ ID NO: 212301 - RNA, 19 nt, Artificial Sequence
  Description of Artificial Sequence: Synthetic oligonucleotide
  Antisense strand to SEQ ID NO: 212300
uuaugacucagcuuggucu

SEQ ID NO: 212302 - RNA, 19 nt, Artificial Sequence
  Description of Artificial Sequence: Synthetic oligonucleotide
  Sense strand starting at position 576 of SEQ ID NO: 2735
acuuguaaugcagaaggua

SEQ ID NO: 212303 - RNA, 19 nt, Artificial Sequence
  Description of Artificial Sequence: Synthetic oligonucleotide
  Antisense strand to SEQ ID NO: 212302
uaccuucugcauuacaagu

SEQ ID NO: 212304 - RNA, 19 nt, Artificial Sequence
  Description of Artificial Sequence: Synthetic oligonucleotide
  Sense strand starting at position 589 of SEQ ID NO: 2735
aagguacuaccugagcauu

SEQ ID NO: 212305 - RNA, 19 nt, Artificial Sequence
  Description of Artificial Sequence: Synthetic oligonucleotide
  Antisense strand to SEQ ID NO: 212304
aaugcucagguaguaccuu

SEQ ID NO: 212306 - RNA, 19 nt, Artificial Sequence
  Description of Artificial Sequence: Synthetic oligonucleotide
  Sense strand starting at position 591 of SEQ ID NO: 2735
gguacuaccugagcauuaa

SEQ ID NO: 212307 - RNA, 19 nt, Artificial Sequence
  Description of Artificial Sequence: Synthetic oligonucleotide
  Antisense strand to SEQ ID NO: 212306
uuaaugcucagguaguacc

SEQ ID NO: 212308 - RNA, 19 nt, Artificial Sequence
  Description of Artificial Sequence: Synthetic oligonucleotide
  Sense strand starting at position 592 of SEQ ID NO: 2735
guacuaccugagcauuaac

SEQ ID NO: 212309 - RNA, 19 nt, Artificial Sequence
  Description of Artificial Sequence: Synthetic oligonucleotide
  Antisense strand to SEQ ID NO: 212308
guuaaugcucagguaguac

SEQ ID NO: 212310 - RNA, 19 nt, Artificial Sequence
  Description of Artificial Sequence: Synthetic oligonucleotide
  Sense strand starting at position 603 of SEQ ID NO: 2735
gcauuaacuuuaucugaag

SEQ ID NO: 212311 - RNA, 19 nt, Artificial Sequence
  Description of Artificial Sequence: Synthetic oligonucleotide
  Antisense strand to SEQ ID NO: 212310
cuucagauaaaguuaaugc

SEQ ID NO: 212312 - RNA, 19 nt, Artificial Sequence
  Description of Artificial Sequence: Synthetic oligonucleotide
  Sense strand starting at position 790 of SEQ ID NO: 2735
auggauguguuccugaaga

SEQ ID NO: 212313 - RNA, 19 nt, Artificial Sequence
  Description of Artificial Sequence: Synthetic oligonucleotide
  Antisense strand to SEQ ID NO: 212312
ucuucaggaacacauccau

SEQ ID NO: 212314 - RNA, 19 nt, Artificial Sequence
  Description of Artificial Sequence: Synthetic oligonucleotide
  Sense strand starting at position 792 of SEQ ID NO: 2735
ggauguguuccugaagacu

SEQ ID NO: 212315 - RNA, 19 nt, Artificial Sequence
  Description of Artificial Sequence: Synthetic oligonucleotide
  Antisense strand to SEQ ID NO: 212314
agucuucaggaacacaucc

SEQ ID NO: 212316 - RNA, 19 nt, Artificial Sequence
  Description of Artificial Sequence: Synthetic oligonucleotide
  Sense strand starting at position 795 of SEQ ID NO: 2735
uguguuccugaagacugua

SEQ ID NO: 212317 - RNA, 19 nt, Artificial Sequence
  Description of Artificial Sequence: Synthetic oligonucleotide
  Antisense strand to SEQ ID NO: 212316
uacagucuucaggaacaca

SEQ ID NO: 212318 - RNA, 19 nt, Artificial Sequence
  Description of Artificial Sequence: Synthetic oligonucleotide
  Sense strand starting at position 798 of SEQ ID NO: 2735
guuccugaagacuguauca

SEQ ID NO: 212319 - RNA, 19 nt, Artificial Sequence
  Description of Artificial Sequence: Synthetic oligonucleotide
  Antisense strand to SEQ ID NO: 212318
ugauacagucuucaggaac

SEQ ID NO: 212320 - RNA, 19 nt, Artificial Sequence
  Description of Artificial Sequence: Synthetic oligonucleotide
  Sense strand starting at position 834 of SEQ ID NO: 2735
aacccuaguguguauuagu

SEQ ID NO: 212321 - RNA, 19 nt, Artificial Sequence
  Description of Artificial Sequence: Synthetic oligonucleotide
  Antisense strand to SEQ ID NO: 212320
acuaauacacacuaggguu

SEQ ID NO: 212322 - RNA, 19 nt, Artificial Sequence
  Description of Artificial Sequence: Synthetic oligonucleotide
  Sense strand starting at position 842 of SEQ ID NO: 2735
uguguauuaguugaggaaa

SEQ ID NO: 212323 - RNA, 19 nt, Artificial Sequence
  Description of Artificial Sequence: Synthetic oligonucleotide
  Antisense strand to SEQ ID NO: 212322
uuuccucaacuaauacaca

SEQ ID NO: 212324 - RNA, 19 nt, Artificial Sequence
  Description of Artificial Sequence: Synthetic oligonucleotide
  Sense strand starting at position 990 of SEQ ID NO: 2735
cuguguguccuugaaauca

SEQ ID NO: 212325 - RNA, 19 nt, Artificial Sequence
  Description of Artificial Sequence: Synthetic oligonucleotide
  Antisense strand to SEQ ID NO: 212324
ugauuucaaggacacacag

SEQ ID NO: 212326 - RNA, 19 nt, Artificial Sequence
  Description of Artificial Sequence: Synthetic oligonucleotide
  Sense strand starting at position 1012 of SEQ ID NO: 2735
ggucuugucacauaaugug

SEQ ID NO: 212327 - RNA, 19 nt, Artificial Sequence
  Description of Artificial Sequence: Synthetic oligonucleotide
  Antisense strand to SEQ ID NO: 212326
cacauuaugugacaagacc

SEQ ID NO: 212328 - RNA, 19 nt, Artificial Sequence
  Description of Artificial Sequence: Synthetic oligonucleotide
  Sense strand starting at position 1064 of SEQ ID NO: 2735
cguacucagaaaugcagaa

SEQ ID NO: 212329 - RNA, 19 nt, Artificial Sequence
  Description of Artificial Sequence: Synthetic oligonucleotide
  Antisense strand to SEQ ID NO: 212328
uucugcauuucugaguacg

SEQ ID NO: 212330 - RNA, 19 nt, Artificial Sequence
  Description of Artificial Sequence: Synthetic oligonucleotide
  Sense strand starting at position 1252 of SEQ ID NO: 2735
acuguaagauauuuagcgu

SEQ ID NO: 212331 - RNA, 19 nt, Artificial Sequence
  Description of Artificial Sequence: Synthetic oligonucleotide
  Antisense strand to SEQ ID NO: 212330
acgcuaaauaucuuacagu

SEQ ID NO: 212332 - RNA, 19 nt, Artificial Sequence
  Description of Artificial Sequence: Synthetic oligonucleotide
  Sense strand starting at position 1308 of SEQ ID NO: 2735
ugucaaaucuuaucagagu

SEQ ID NO: 212333 - RNA, 19 nt, Artificial Sequence
  Description of Artificial Sequence: Synthetic oligonucleotide
  Antisense strand to SEQ ID NO: 212332
acucugauaagauuugaca

SEQ ID NO: 212334 - RNA, 19 nt, Artificial Sequence
  Description of Artificial Sequence: Synthetic oligonucleotide
  Sense strand starting at position 1676 of SEQ ID NO: 2735
cgaaguccaaagugauaau

SEQ ID NO: 212335 - RNA, 19 nt, Artificial Sequence
  Description of Artificial Sequence: Synthetic oligonucleotide
  Antisense strand to SEQ ID NO: 212334
auuaucacuuuggacuucg

SEQ ID NO: 212336 - RNA, 19 nt, Artificial Sequence
  Description of Artificial Sequence: Synthetic oligonucleotide
  Sense strand starting at position 1705 of SEQ ID NO: 2735
cccaaaggugcugauacaa

SEQ ID NO: 212337 - RNA, 19 nt, Artificial Sequence
  Description of Artificial Sequence: Synthetic oligonucleotide
  Antisense strand to SEQ ID NO: 212336
uuguaucagcaccuuuggg

SEQ ID NO: 212338 - RNA, 19 nt, Artificial Sequence
  Description of Artificial Sequence: Synthetic oligonucleotide
  Sense strand starting at position 1910 of SEQ ID NO: 2735
cuacuacuuguccagaggu

SEQ ID NO: 212339 - RNA, 19 nt, Artificial Sequence
  Description of Artificial Sequence: Synthetic oligonucleotide
  Antisense strand to SEQ ID NO: 212338
accucuggacaaguaguag

SEQ ID NO: 212340 - RNA, 19 nt, Artificial Sequence
  Description of Artificial Sequence: Synthetic oligonucleotide
  Sense strand starting at position 1912 of SEQ ID NO: 2735
acuacuuguccagagguuu

SEQ ID NO: 212341 - RNA, 19 nt, Artificial Sequence
  Description of Artificial Sequence: Synthetic oligonucleotide
  Antisense strand to SEQ ID NO: 212340
aaaccucuggacaaguagu

SEQ ID NO: 212342 - RNA, 19 nt, Artificial Sequence
  Description of Artificial Sequence: Synthetic oligonucleotide
  Sense strand starting at position 1996 of SEQ ID NO: 2735
uccauuauagcugaaguga

SEQ ID NO: 212343 - RNA, 19 nt, Artificial Sequence
  Description of Artificial Sequence: Synthetic oligonucleotide
  Antisense strand to SEQ ID NO: 212342
ucacuucagcuauaaugga

SEQ ID NO: 212344 - RNA, 19 nt, Artificial Sequence
  Description of Artificial Sequence: Synthetic oligonucleotide
  Sense strand starting at position 2066 of SEQ ID NO: 2735
aagguagacuugccuuaau

SEQ ID NO: 212345 - RNA, 19 nt, Artificial Sequence
  Description of Artificial Sequence: Synthetic oligonucleotide
  Antisense strand to SEQ ID NO: 212344
auuaaggcaagucuaccuu

SEQ ID NO: 212346 - RNA, 19 nt, Artificial Sequence
  Description of Artificial Sequence: Synthetic oligonucleotide
  Sense strand starting at position 2069 of SEQ ID NO: 2735
guagacuugccuuaaucaa

SEQ ID NO: 212347 - RNA, 19 nt, Artificial Sequence
  Description of Artificial Sequence: Synthetic oligonucleotide
  Antisense strand to SEQ ID NO: 212346
uugauuaaggcaagucuac

SEQ ID NO: 212348 - RNA, 19 nt, Artificial Sequence
  Description of Artificial Sequence: Synthetic oligonucleotide
  Sense strand starting at position 2273 of SEQ ID NO: 2735
cuauguugaccucaguuga

SEQ ID NO: 212349 - RNA, 19 nt, Artificial Sequence
  Description of Artificial Sequence: Synthetic oligonucleotide
  Antisense strand to SEQ ID NO: 212348
ucaacugaggucaacauag

SEQ ID NO: 212350 - RNA, 19 nt, Artificial Sequence
  Description of Artificial Sequence: Synthetic oligonucleotide
  Sense strand starting at position 2466 of SEQ ID NO: 2735
uguguaagaagacauggua

SEQ ID NO: 212351 - RNA, 19 nt, Artificial Sequence
  Description of Artificial Sequence: Synthetic oligonucleotide
  Antisense strand to SEQ ID NO: 212350
uaccaugucuucuuacaca

SEQ ID NO: 212352 - RNA, 19 nt, Artificial Sequence
  Description of Artificial Sequence: Synthetic oligonucleotide
  Sense strand starting at position 2961 of SEQ ID NO: 2735
ucuagugauuucuauggaa

SEQ ID NO: 212353 - RNA, 19 nt, Artificial Sequence
  Description of Artificial Sequence: Synthetic oligonucleotide
  Antisense strand to SEQ ID NO: 212352
uuccauagaaaucacuaga

SEQ ID NO: 212354 - RNA, 19 nt, Artificial Sequence
  Description of Artificial Sequence: Synthetic oligonucleotide
  Sense strand starting at position 2964 of SEQ ID NO: 2735
agugauuucuauggaaaua

SEQ ID NO: 212355 - RNA, 19 nt, Artificial Sequence
  Description of Artificial Sequence: Synthetic oligonucleotide
  Antisense strand to SEQ ID NO: 212354
uauuuccauagaaaucacu

SEQ ID NO: 212356 - RNA, 19 nt, Artificial Sequence
  Description of Artificial Sequence: Synthetic oligonucleotide
  Sense strand starting at position 3006 of SEQ ID NO: 2735
uccauucuugaaugaaugu

SEQ ID NO: 212357 - RNA, 19 nt, Artificial Sequence
  Description of Artificial Sequence: Synthetic oligonucleotide
  Antisense strand to SEQ ID NO: 212356
acauucauucaagaaugga

SEQ ID NO: 212358 - RNA, 19 nt, Artificial Sequence
  Description of Artificial Sequence: Synthetic oligonucleotide
  Sense strand starting at position 3144 of SEQ ID NO: 2735
agcagaaucuuguuaauau

SEQ ID NO: 212359 - RNA, 19 nt, Artificial Sequence
  Description of Artificial Sequence: Synthetic oligonucleotide
  Antisense strand to SEQ ID NO: 212358
auauuaacaagauucugcu

SEQ ID NO: 212360 - RNA, 19 nt, Artificial Sequence
  Description of Artificial Sequence: Synthetic oligonucleotide
  Sense strand starting at position 3225 of SEQ ID NO: 2735
gugcacaaauauucuauga

SEQ ID NO: 212361 - RNA, 19 nt, Artificial Sequence
  Description of Artificial Sequence: Synthetic oligonucleotide
  Antisense strand to SEQ ID NO: 212360
ucauagaauauuugugcac

SEQ ID NO: 212362 - RNA, 19 nt, Artificial Sequence
  Description of Artificial Sequence: Synthetic oligonucleotide
  Sense strand starting at position 3742 of SEQ ID NO: 2735
uauccaggucuugguauua

SEQ ID NO: 212363 - RNA, 19 nt, Artificial Sequence
  Description of Artificial Sequence: Synthetic oligonucleotide
  Antisense strand to SEQ ID NO: 212362
uaauaccaagaccuggaua

SEQ ID NO: 212364 - RNA, 19 nt, Artificial Sequence
  Description of Artificial Sequence: Synthetic oligonucleotide
  Sense strand starting at position 7 of SEQ ID NO: 2736
gugaguguaaacugacaca

SEQ ID NO: 212365 - RNA, 19 nt, Artificial Sequence
  Description of Artificial Sequence: Synthetic oligonucleotide
  Antisense strand to SEQ ID NO: 212364
ugugucaguuuacacucac

SEQ ID NO: 212366 - RNA, 19 nt, Artificial Sequence
  Description of Artificial Sequence: Synthetic oligonucleotide
  Sense strand starting at position 447 of SEQ ID NO: 2736
cacgauuaagguuauuaac

SEQ ID NO: 212367 - RNA, 19 nt, Artificial Sequence
  Description of Artificial Sequence: Synthetic oligonucleotide
  Antisense strand to SEQ ID NO: 212366
guuaauaaccuuaaucgug

SEQ ID NO: 212368 - RNA, 19 nt, Artificial Sequence
  Description of Artificial Sequence: Synthetic oligonucleotide
  Sense strand starting at position 449 of SEQ ID NO: 2736
cgauuaagguuauuaacug

SEQ ID NO: 212369 - RNA, 19 nt, Artificial Sequence
  Description of Artificial Sequence: Synthetic oligonucleotide
  Antisense strand to SEQ ID NO: 212368
caguuaauaaccuuaaucg

SEQ ID NO: 212370 - RNA, 19 nt, Artificial Sequence
  Description of Artificial Sequence: Synthetic oligonucleotide
  Sense strand starting at position 456 of SEQ ID NO: 2736
gguuauuaacuguaguauu

SEQ ID NO: 212371 - RNA, 19 nt, Artificial Sequence
  Description of Artificial Sequence: Synthetic oligonucleotide
  Antisense strand to SEQ ID NO: 212370
aauacuacaguuaauaacc

SEQ ID NO: 212372 - RNA, 19 nt, Artificial Sequence
  Description of Artificial Sequence: Synthetic oligonucleotide
  Sense strand starting at position 513 of SEQ ID NO: 2736
cacaauaaauggcugguua

SEQ ID NO: 212373 - RNA, 19 nt, Artificial Sequence
  Description of Artificial Sequence: Synthetic oligonucleotide
  Antisense strand to SEQ ID NO: 212372
uaaccagccauuuauugug

SEQ ID NO: 212374 - RNA, 19 nt, Artificial Sequence
  Description of Artificial Sequence: Synthetic oligonucleotide
  Sense strand starting at position 515 of SEQ ID NO: 2736
caauaaauggcugguuaga

SEQ ID NO: 212375 - RNA, 19 nt, Artificial Sequence
  Description of Artificial Sequence: Synthetic oligonucleotide
  Antisense strand to SEQ ID NO: 212374
ucuaaccagccauuuauug

SEQ ID NO: 212376 - RNA, 19 nt, Artificial Sequence
  Description of Artificial Sequence: Synthetic oligonucleotide
  Sense strand starting at position 517 of SEQ ID NO: 2736
auaaauggcugguuagaua

SEQ ID NO: 212377 - RNA, 19 nt, Artificial Sequence
  Description of Artificial Sequence: Synthetic oligonucleotide
  Antisense strand to SEQ ID NO: 212376
uaucuaaccagccauuuau

SEQ ID NO: 212378 - RNA, 19 nt, Artificial Sequence
  Description of Artificial Sequence: Synthetic oligonucleotide
  Sense strand starting at position 583 of SEQ ID NO: 2736
acguuaugcacugauauag

SEQ ID NO: 212379 - RNA, 19 nt, Artificial Sequence
  Description of Artificial Sequence: Synthetic oligonucleotide
  Antisense strand to SEQ ID NO: 212378
cuauaucagugcauaacgu

SEQ ID NO: 212380 - RNA, 19 nt, Artificial Sequence
  Description of Artificial Sequence: Synthetic oligonucleotide
  Sense strand starting at position 631 of SEQ ID NO: 2736
aauguagagauagguguau

SEQ ID NO: 212381 - RNA, 19 nt, Artificial Sequence
  Description of Artificial Sequence: Synthetic oligonucleotide
  Antisense strand to SEQ ID NO: 212380
auacaccuaucucuacauu

SEQ ID NO: 212382 - RNA, 19 nt, Artificial Sequence
  Description of Artificial Sequence: Synthetic oligonucleotide
  Sense strand starting at position 633 of SEQ ID NO: 2736
uguagagauagguguauau

SEQ ID NO: 212383 - RNA, 19 nt, Artificial Sequence
  Description of Artificial Sequence: Synthetic oligonucleotide
  Antisense strand to SEQ ID NO: 212382
auauacaccuaucucuaca

SEQ ID NO: 212384 - RNA, 19 nt, Artificial Sequence
  Description of Artificial Sequence: Synthetic oligonucleotide
  Sense strand starting at position 694 of SEQ ID NO: 2736
acacauaaaugaguaugua

SEQ ID NO: 212385 - RNA, 19 nt, Artificial Sequence
  Description of Artificial Sequence: Synthetic oligonucleotide
  Antisense strand to SEQ ID NO: 212384
uacauacucauuuaugugu

SEQ ID NO: 212386 - RNA, 19 nt, Artificial Sequence
  Description of Artificial Sequence: Synthetic oligonucleotide
  Sense strand starting at position 704 of SEQ ID NO: 2736
gaguauguauaugcuugaa

SEQ ID NO: 212387 - RNA, 19 nt, Artificial Sequence
  Description of Artificial Sequence: Synthetic oligonucleotide
  Antisense strand to SEQ ID NO: 212386
uucaagcauauacauacuc

SEQ ID NO: 212388 - RNA, 19 nt, Artificial Sequence
  Description of Artificial Sequence: Synthetic oligonucleotide
  Sense strand starting at position 725 of SEQ ID NO: 2736
gguauauaguaucccugaa

SEQ ID NO: 212389 - RNA, 19 nt, Artificial Sequence
  Description of Artificial Sequence: Synthetic oligonucleotide
  Antisense strand to SEQ ID NO: 212388
uucagggauacuauauacc

SEQ ID NO: 212390 - RNA, 19 nt, Artificial Sequence
  Description of Artificial Sequence: Synthetic oligonucleotide
  Sense strand starting at position 778 of SEQ ID NO: 2736
cuaucagggcaaugguuau

SEQ ID NO: 212391 - RNA, 19 nt, Artificial Sequence
  Description of Artificial Sequence: Synthetic oligonucleotide
  Antisense strand to SEQ ID NO: 212390
auaaccauugcccugauag

SEQ ID NO: 212392 - RNA, 19 nt, Artificial Sequence
  Description of Artificial Sequence: Synthetic oligonucleotide
  Sense strand starting at position 788 of SEQ ID NO: 2736
aaugguuauggcugagaua

SEQ ID NO: 212393 - RNA, 19 nt, Artificial Sequence
  Description of Artificial Sequence: Synthetic oligonucleotide
  Antisense strand to SEQ ID NO: 212392
uaucucagccauaaccauu

SEQ ID NO: 212394 - RNA, 19 nt, Artificial Sequence
  Description of Artificial Sequence: Synthetic oligonucleotide
  Sense strand starting at position 917 of SEQ ID NO: 2736
ugugaaucugccuaucucu

SEQ ID NO: 212395 - RNA, 19 nt, Artificial Sequence
  Description of Artificial Sequence: Synthetic oligonucleotide
  Antisense strand to SEQ ID NO: 212394
agagauaggcagauucaca

SEQ ID NO: 212396 - RNA, 19 nt, Artificial Sequence
  Description of Artificial Sequence: Synthetic oligonucleotide
  Sense strand starting at position 1177 of SEQ ID NO: 2736
ugcauuugcuguuccaacu

SEQ ID NO: 212397 - RNA, 19 nt, Artificial Sequence
  Description of Artificial Sequence: Synthetic oligonucleotide
  Antisense strand to SEQ ID NO: 212396
aguuggaacagcaaaugca

SEQ ID NO: 212398 - RNA, 19 nt, Artificial Sequence
  Description of Artificial Sequence: Synthetic oligonucleotide
  Sense strand starting at position 1217 of SEQ ID NO: 2736
cuuccuguccuuuaggauu

SEQ ID NO: 212399 - RNA, 19 nt, Artificial Sequence
  Description of Artificial Sequence: Synthetic oligonucleotide
  Antisense strand to SEQ ID NO: 212398
aauccuaaaggacaggaag

SEQ ID NO: 212400 - RNA, 19 nt, Artificial Sequence
  Description of Artificial Sequence: Synthetic oligonucleotide
  Sense strand starting at position 1228 of SEQ ID NO: 2736
uuaggauucugcucaaaca

SEQ ID NO: 212401 - RNA, 19 nt, Artificial Sequence
  Description of Artificial Sequence: Synthetic oligonucleotide
  Antisense strand to SEQ ID NO: 212400
uguuugagcagaauccuaa

SEQ ID NO: 212402 - RNA, 19 nt, Artificial Sequence
  Description of Artificial Sequence: Synthetic oligonucleotide
  Sense strand starting at position 1238 of SEQ ID NO: 2736
gcucaaacauuuccgugau

SEQ ID NO: 212403 - RNA, 19 nt, Artificial Sequence
  Description of Artificial Sequence: Synthetic oligonucleotide
  Antisense strand to SEQ ID NO: 212402
aucacggaaauguuugagc

SEQ ID NO: 212404 - RNA, 19 nt, Artificial Sequence
  Description of Artificial Sequence: Synthetic oligonucleotide
  Sense strand starting at position 1240 of SEQ ID NO: 2736
ucaaacauuuccgugaugu

SEQ ID NO: 212405 - RNA, 19 nt, Artificial Sequence
  Description of Artificial Sequence: Synthetic oligonucleotide
  Antisense strand to SEQ ID NO: 212404
acaucacggaaauguuuga

SEQ ID NO: 212406 - RNA, 19 nt, Artificial Sequence
  Description of Artificial Sequence: Synthetic oligonucleotide
  Sense strand starting at position 1441 of SEQ ID NO: 2736
gugcauguacucuaugaga

SEQ ID NO: 212407 - RNA, 19 nt, Artificial Sequence
  Description of Artificial Sequence: Synthetic oligonucleotide
  Antisense strand to SEQ ID NO: 212406
ucucauagaguacaugcac

SEQ ID NO: 212408 - RNA, 19 nt, Artificial Sequence
  Description of Artificial Sequence: Synthetic oligonucleotide
  Sense strand starting at position 1443 of SEQ ID NO: 2736
gcauguacucuaugagaac

SEQ ID NO: 212409 - RNA, 19 nt, Artificial Sequence
  Description of Artificial Sequence: Synthetic oligonucleotide
  Antisense strand to SEQ ID NO: 212408
guucucauagaguacaugc

SEQ ID NO: 212410 - RNA, 19 nt, Artificial Sequence
  Description of Artificial Sequence: Synthetic oligonucleotide
  Sense strand starting at position 1545 of SEQ ID NO: 2736
uggugugaugguuauacca

SEQ ID NO: 212411 - RNA, 19 nt, Artificial Sequence
  Description of Artificial Sequence: Synthetic oligonucleotide
  Antisense strand to SEQ ID NO: 212410
ugguauaaccaucacacca

SEQ ID NO: 212412 - RNA, 19 nt, Artificial Sequence
  Description of Artificial Sequence: Synthetic oligonucleotide
  Sense strand starting at position 1555 of SEQ ID NO: 2736
guuauaccacgucaauaaa

SEQ ID NO: 212413 - RNA, 19 nt, Artificial Sequence
  Description of Artificial Sequence: Synthetic oligonucleotide
  Antisense strand to SEQ ID NO: 212412
uuuauugacgugguauaac

SEQ ID NO: 212414 - RNA, 19 nt, Artificial Sequence
  Description of Artificial Sequence: Synthetic oligonucleotide
  Sense strand starting at position 1574 of SEQ ID NO: 2736
aucagaagaucgccuacau

SEQ ID NO: 212415 - RNA, 19 nt, Artificial Sequence
  Description of Artificial Sequence: Synthetic oligonucleotide
  Antisense strand to SEQ ID NO: 212414
auguaggcgaucuucugau

SEQ ID NO: 212416 - RNA, 19 nt, Artificial Sequence
  Description of Artificial Sequence: Synthetic oligonucleotide
  Sense strand starting at position 2483 of SEQ ID NO: 2736
gucuguuuaauuuguguuu

SEQ ID NO: 212417 - RNA, 19 nt, Artificial Sequence
  Description of Artificial Sequence: Synthetic oligonucleotide
  Antisense strand to SEQ ID NO: 212416
aaacacaaauuaaacagac

SEQ ID NO: 212418 - RNA, 19 nt, Artificial Sequence
  Description of Artificial Sequence: Synthetic oligonucleotide
  Sense strand starting at position 2901 of SEQ ID NO: 2736
gaauguagcugauuggauu

SEQ ID NO: 212419 - RNA, 19 nt, Artificial Sequence
  Description of Artificial Sequence: Synthetic oligonucleotide
  Antisense strand to SEQ ID NO: 212418
aauccaaucagcuacauuc

SEQ ID NO: 212420 - RNA, 19 nt, Artificial Sequence
  Description of Artificial Sequence: Synthetic oligonucleotide
  Sense strand starting at position 2958 of SEQ ID NO: 2736
gugggugguguggauucau

SEQ ID NO: 212421 - RNA, 19 nt, Artificial Sequence
  Description of Artificial Sequence: Synthetic oligonucleotide
  Antisense strand to SEQ ID NO: 212420
augaauccacaccacccac

SEQ ID NO: 212422 - RNA, 19 nt, Artificial Sequence
  Description of Artificial Sequence: Synthetic oligonucleotide
  Sense strand starting at position 3085 of SEQ ID NO: 2736
aggaauuacugccuggaaa

SEQ ID NO: 212423 - RNA, 19 nt, Artificial Sequence
  Description of Artificial Sequence: Synthetic oligonucleotide
  Antisense strand to SEQ ID NO: 212422
uuuccaggcaguaauuccu

SEQ ID NO: 212424 - RNA, 19 nt, Artificial Sequence
  Description of Artificial Sequence: Synthetic oligonucleotide
  Sense strand starting at position 3086 of SEQ ID NO: 2736
ggaauuacugccuggaaag

SEQ ID NO: 212425 - RNA, 19 nt, Artificial Sequence
  Description of Artificial Sequence: Synthetic oligonucleotide
  Antisense strand to SEQ ID NO: 212424
cuuuccaggcaguaauucc

SEQ ID NO: 212426 - RNA, 19 nt, Artificial Sequence
  Description of Artificial Sequence: Synthetic oligonucleotide
  Sense strand starting at position 3087 of SEQ ID NO: 2736
gaauuacugccuggaaagu

SEQ ID NO: 212427 - RNA, 19 nt, Artificial Sequence
  Description of Artificial Sequence: Synthetic oligonucleotide
  Antisense strand to SEQ ID NO: 212426
acuuuccaggcaguaauuc

SEQ ID NO: 212428 - RNA, 19 nt, Artificial Sequence
  Description of Artificial Sequence: Synthetic oligonucleotide
  Sense strand starting at position 3266 of SEQ ID NO: 2736
ggugaaagccuauaguccu

SEQ ID NO: 212429 - RNA, 19 nt, Artificial Sequence
  Description of Artificial Sequence: Synthetic oligonucleotide
  Antisense strand to SEQ ID NO: 212428
aggacuauaggcuuucacc

SEQ ID NO: 212430 - RNA, 19 nt, Artificial Sequence
  Description of Artificial Sequence: Synthetic oligonucleotide
  Sense strand starting at position 3272 of SEQ ID NO: 2736
agccuauaguccuuuauuu

SEQ ID NO: 212431 - RNA, 19 nt, Artificial Sequence
  Description of Artificial Sequence: Synthetic oligonucleotide
  Antisense strand to SEQ ID NO: 212430
aaauaaaggacuauaggcu

SEQ ID NO: 212432 - RNA, 19 nt, Artificial Sequence
  Description of Artificial Sequence: Synthetic oligonucleotide
  Sense strand starting at position 3314 of SEQ ID NO: 2736
guugaaauaugaccucugu

SEQ ID NO: 212433 - RNA, 19 nt, Artificial Sequence
  Description of Artificial Sequence: Synthetic oligonucleotide
  Antisense strand to SEQ ID NO: 212432
acagaggucauauuucaac

SEQ ID NO: 212434 - RNA, 19 nt, Artificial Sequence
  Description of Artificial Sequence: Synthetic oligonucleotide
  Sense strand starting at position 3318 of SEQ ID NO: 2736
aaauaugaccucuguggaa

SEQ ID NO: 212435 - RNA, 19 nt, Artificial Sequence
  Description of Artificial Sequence: Synthetic oligonucleotide
  Antisense strand to SEQ ID NO: 212434
uuccacagaggucauauuu

SEQ ID NO: 212436 - RNA, 19 nt, Artificial Sequence
  Description of Artificial Sequence: Synthetic oligonucleotide
  Sense strand starting at position 3320 of SEQ ID NO: 2736
auaugaccucuguggaauu

SEQ ID NO: 212437 - RNA, 19 nt, Artificial Sequence
  Description of Artificial Sequence: Synthetic oligonucleotide
  Antisense strand to SEQ ID NO: 212436
aauuccacagaggucauau

SEQ ID NO: 212438 - RNA, 19 nt, Artificial Sequence
  Description of Artificial Sequence: Synthetic oligonucleotide
  Sense strand starting at position 3356 of SEQ ID NO: 2736
auuguuguuggauauggua

SEQ ID NO: 212439 - RNA, 19 nt, Artificial Sequence
  Description of Artificial Sequence: Synthetic oligonucleotide
  Antisense strand to SEQ ID NO: 212438
uaccauauccaacaacaau

SEQ ID NO: 212440 - RNA, 19 nt, Artificial Sequence
  Description of Artificial Sequence: Synthetic oligonucleotide
  Sense strand starting at position 3518 of SEQ ID NO: 2736
ugccgauggauugagugau

SEQ ID NO: 212441 - RNA, 19 nt, Artificial Sequence
  Description of Artificial Sequence: Synthetic oligonucleotide
  Antisense strand to SEQ ID NO: 212440
aucacucaauccaucggca

SEQ ID NO: 212442 - RNA, 19 nt, Artificial Sequence
  Description of Artificial Sequence: Synthetic oligonucleotide
  Sense strand starting at position 3625 of SEQ ID NO: 2736
ccagguuuggaggaguacu

SEQ ID NO: 212443 - RNA, 19 nt, Artificial Sequence
  Description of Artificial Sequence: Synthetic oligonucleotide
  Antisense strand to SEQ ID NO: 212442
aguacuccuccaaaccugg

SEQ ID NO: 212444 - RNA, 19 nt, Artificial Sequence
  Description of Artificial Sequence: Synthetic oligonucleotide
  Sense strand starting at position 49 of SEQ ID NO: 2738
gggccuuacuaguaccaua

SEQ ID NO: 212445 - RNA, 19 nt, Artificial Sequence
  Description of Artificial Sequence: Synthetic oligonucleotide
  Antisense strand to SEQ ID NO: 212444
uaugguacuaguaaggccc

SEQ ID NO: 212446 - RNA, 19 nt, Artificial Sequence
  Description of Artificial Sequence: Synthetic oligonucleotide
  Sense strand starting at position 201 of SEQ ID NO: 2738
gcuggaagcaaagguuaaa

SEQ ID NO: 212447 - RNA, 19 nt, Artificial Sequence
  Description of Artificial Sequence: Synthetic oligonucleotide
  Antisense strand to SEQ ID NO: 212446
uuuaaccuuugcuuccagc

SEQ ID NO: 212448 - RNA, 19 nt, Artificial Sequence
  Description of Artificial Sequence: Synthetic oligonucleotide
  Sense strand starting at position 211 of SEQ ID NO: 2738
aagguuaaauccucguguu

SEQ ID NO: 212449 - RNA, 19 nt, Artificial Sequence
  Description of Artificial Sequence: Synthetic oligonucleotide
  Antisense strand to SEQ ID NO: 212448
aacacgaggauuuaaccuu

SEQ ID NO: 212450 - RNA, 19 nt, Artificial Sequence
  Description of Artificial Sequence: Synthetic oligonucleotide
  Sense strand starting at position 212 of SEQ ID NO: 2738
agguuaaauccucguguuu

SEQ ID NO: 212451 - RNA, 19 nt, Artificial Sequence
  Description of Artificial Sequence: Synthetic oligonucleotide
  Antisense strand to SEQ ID NO: 212450
aaacacgaggauuuaaccu

SEQ ID NO: 212452 - RNA, 19 nt, Artificial Sequence
  Description of Artificial Sequence: Synthetic oligonucleotide
  Sense strand starting at position 983 of SEQ ID NO: 2738
cguagcaagaguuaagaga

SEQ ID NO: 212453 - RNA, 19 nt, Artificial Sequence
  Description of Artificial Sequence: Synthetic oligonucleotide
  Antisense strand to SEQ ID NO: 212452
ucucuuaacucuugcuacg

SEQ ID NO: 212454 - RNA, 19 nt, Artificial Sequence
  Description of Artificial Sequence: Synthetic oligonucleotide
  Sense strand starting at position 1229 of SEQ ID NO: 2738
gaggacuccuguuugaaau

SEQ ID NO: 212455 - RNA, 19 nt, Artificial Sequence
  Description of Artificial Sequence: Synthetic oligonucleotide
  Antisense strand to SEQ ID NO: 212454
auuucaaacaggaguccuc

SEQ ID NO: 212456 - RNA, 19 nt, Artificial Sequence
  Description of Artificial Sequence: Synthetic oligonucleotide
  Sense strand starting at position 1230 of SEQ ID NO: 2738
aggacuccuguuugaaauc

SEQ ID NO: 212457 - RNA, 19 nt, Artificial Sequence
  Description of Artificial Sequence: Synthetic oligonucleotide
  Antisense strand to SEQ ID NO: 212456
gauuucaaacaggaguccu

SEQ ID NO: 212458 - RNA, 19 nt, Artificial Sequence
  Description of Artificial Sequence: Synthetic oligonucleotide
  Sense strand starting at position 1239 of SEQ ID NO: 2738
guuugaaaucgucaccgaa

SEQ ID NO: 212459 - RNA, 19 nt, Artificial Sequence
  Description of Artificial Sequence: Synthetic oligonucleotide
  Antisense strand to SEQ ID NO: 212458
uucggugacgauuucaaac

SEQ ID NO: 212460 - RNA, 19 nt, Artificial Sequence
  Description of Artificial Sequence: Synthetic oligonucleotide
  Sense strand starting at position 1241 of SEQ ID NO: 2738
uugaaaucgucaccgaaag

SEQ ID NO: 212461 - RNA, 19 nt, Artificial Sequence
  Description of Artificial Sequence: Synthetic oligonucleotide
  Antisense strand to SEQ ID NO: 212460
cuuucggugacgauuucaa

SEQ ID NO: 212462 - RNA, 19 nt, Artificial Sequence
  Description of Artificial Sequence: Synthetic oligonucleotide
  Sense strand starting at position 1327 of SEQ ID NO: 2738
caccaaguugugugacucu

SEQ ID NO: 212463 - RNA, 19 nt, Artificial Sequence
  Description of Artificial Sequence: Synthetic oligonucleotide
  Antisense strand to SEQ ID NO: 212462
agagucacacaacuuggug

SEQ ID NO: 212464 - RNA, 19 nt, Artificial Sequence
  Description of Artificial Sequence: Synthetic oligonucleotide
  Sense strand starting at position 1336 of SEQ ID NO: 2738
gugugacucugcucaagcu

SEQ ID NO: 212465 - RNA, 19 nt, Artificial Sequence
  Description of Artificial Sequence: Synthetic oligonucleotide
  Antisense strand to SEQ ID NO: 212464
agcuugagcagagucacac

SEQ ID NO: 212466 - RNA, 19 nt, Artificial Sequence
  Description of Artificial Sequence: Synthetic oligonucleotide
  Sense strand starting at position 1364 of SEQ ID NO: 2738
gugccucggcuuucucauu

SEQ ID NO: 212467 - RNA, 19 nt, Artificial Sequence
  Description of Artificial Sequence: Synthetic oligonucleotide
  Antisense strand to SEQ ID NO: 212466
aaugagaaagccgaggcac

SEQ ID NO: 212468 - RNA, 19 nt, Artificial Sequence
  Description of Artificial Sequence: Synthetic oligonucleotide
  Sense strand starting at position 1411 of SEQ ID NO: 2738
gagauaacgcacgaacagu

SEQ ID NO: 212469 - RNA, 19 nt, Artificial Sequence
  Description of Artificial Sequence: Synthetic oligonucleotide
  Antisense strand to SEQ ID NO: 212468
acuguucgugcguuaucuc

SEQ ID NO: 212470 - RNA, 19 nt, Artificial Sequence
  Description of Artificial Sequence: Synthetic oligonucleotide
  Sense strand starting at position 2090 of SEQ ID NO: 2738
gagaguaugcaccgagaca

SEQ ID NO: 212471 - RNA, 19 nt, Artificial Sequence
  Description of Artificial Sequence: Synthetic oligonucleotide
  Antisense strand to SEQ ID NO: 212470
ugucucggugcauacucuc

SEQ ID NO: 212472 - RNA, 19 nt, Artificial Sequence
  Description of Artificial Sequence: Synthetic oligonucleotide
  Sense strand starting at position 2109 of SEQ ID NO: 2738
caaauauagcggcgaugau

SEQ ID NO: 212473 - RNA, 19 nt, Artificial Sequence
  Description of Artificial Sequence: Synthetic oligonucleotide
  Antisense strand to SEQ ID NO: 212472
aucaucgccgcuauauuug

SEQ ID NO: 212474 - RNA, 19 nt, Artificial Sequence
  Description of Artificial Sequence: Synthetic oligonucleotide
  Sense strand starting at position 2110 of SEQ ID NO: 2738
aaauauagcggcgaugaua

SEQ ID NO: 212475 - RNA, 19 nt, Artificial Sequence
  Description of Artificial Sequence: Synthetic oligonucleotide
  Antisense strand to SEQ ID NO: 212474
uaucaucgccgcuauauuu

SEQ ID NO: 212476 - RNA, 19 nt, Artificial Sequence
  Description of Artificial Sequence: Synthetic oligonucleotide
  Sense strand starting at position 2293 of SEQ ID NO: 2738
cguggaugguguguuugua

SEQ ID NO: 212477 - RNA, 19 nt, Artificial Sequence
  Description of Artificial Sequence: Synthetic oligonucleotide
  Antisense strand to SEQ ID NO: 212476
uacaaacacaccauccacg

SEQ ID NO: 212478 - RNA, 19 nt, Artificial Sequence
  Description of Artificial Sequence: Synthetic oligonucleotide
  Sense strand starting at position 2297 of SEQ ID NO: 2738
gaugguguguuuguagaac

SEQ ID NO: 212479 - RNA, 19 nt, Artificial Sequence
  Description of Artificial Sequence: Synthetic oligonucleotide
  Antisense strand to SEQ ID NO: 212478
guucuacaaacacaccauc

SEQ ID NO: 212480 - RNA, 19 nt, Artificial Sequence
  Description of Artificial Sequence: Synthetic oligonucleotide
  Sense strand starting at position 2299 of SEQ ID NO: 2738
ugguguguuuguagaacgu

SEQ ID NO: 212481 - RNA, 19 nt, Artificial Sequence
  Description of Artificial Sequence: Synthetic oligonucleotide
  Antisense strand to SEQ ID NO: 212480
acguucuacaaacacacca

SEQ ID NO: 212482 - RNA, 19 nt, Artificial Sequence
  Description of Artificial Sequence: Synthetic oligonucleotide
  Sense strand starting at position 2330 of SEQ ID NO: 2738
agucgcuuuccucaaacau

SEQ ID NO: 212483 - RNA, 19 nt, Artificial Sequence
  Description of Artificial Sequence: Synthetic oligonucleotide
  Antisense strand to SEQ ID NO: 212482
auguuugaggaaagcgacu

SEQ ID NO: 212484 - RNA, 19 nt, Artificial Sequence
  Description of Artificial Sequence: Synthetic oligonucleotide
  Sense strand starting at position 2359 of SEQ ID NO: 2738
gccuuagcaacgcagagau

SEQ ID NO: 212485 - RNA, 19 nt, Artificial Sequence
  Description of Artificial Sequence: Synthetic oligonucleotide
  Antisense strand to SEQ ID NO: 212484
aucucugcguugcuaaggc

SEQ ID NO: 212486 - RNA, 19 nt, Artificial Sequence
  Description of Artificial Sequence: Synthetic oligonucleotide
  Sense strand starting at position 2436 of SEQ ID NO: 2738
gcgacucucccaggaacua

SEQ ID NO: 212487 - RNA, 19 nt, Artificial Sequence
  Description of Artificial Sequence: Synthetic oligonucleotide
  Antisense strand to SEQ ID NO: 212486
uaguuccugggagagucgc

SEQ ID NO: 212488 - RNA, 19 nt, Artificial Sequence
  Description of Artificial Sequence: Synthetic oligonucleotide
  Sense strand starting at position 2437 of SEQ ID NO: 2738
cgacucucccaggaacuau

SEQ ID NO: 212489 - RNA, 19 nt, Artificial Sequence
  Description of Artificial Sequence: Synthetic oligonucleotide
  Antisense strand to SEQ ID NO: 212488
auaguuccugggagagucg

SEQ ID NO: 212490 - RNA, 19 nt, Artificial Sequence
  Description of Artificial Sequence: Synthetic oligonucleotide
  Sense strand starting at position 2637 of SEQ ID NO: 2738
aagucaugucccgguaugu

SEQ ID NO: 212491 - RNA, 19 nt, Artificial Sequence
  Description of Artificial Sequence: Synthetic oligonucleotide
  Antisense strand to SEQ ID NO: 212490
acauaccgggacaugacuu

SEQ ID NO: 212492 - RNA, 19 nt, Artificial Sequence
  Description of Artificial Sequence: Synthetic oligonucleotide
  Sense strand starting at position 2643 of SEQ ID NO: 2738
ugucccgguauguagaaua

SEQ ID NO: 212493 - RNA, 19 nt, Artificial Sequence
  Description of Artificial Sequence: Synthetic oligonucleotide
  Antisense strand to SEQ ID NO: 212492
uauucuacauaccgggaca

SEQ ID NO: 212494 - RNA, 19 nt, Artificial Sequence
  Description of Artificial Sequence: Synthetic oligonucleotide
  Sense strand starting at position 2700 of SEQ ID NO: 2738
uucuaaauguucuacagug

SEQ ID NO: 212495 - RNA, 19 nt, Artificial Sequence
  Description of Artificial Sequence: Synthetic oligonucleotide
  Antisense strand to SEQ ID NO: 212494
cacuguagaacauuuagaa

SEQ ID NO: 212496 - RNA, 19 nt, Artificial Sequence
  Description of Artificial Sequence: Synthetic oligonucleotide
  Sense strand starting at position 2702 of SEQ ID NO: 2738
cuaaauguucuacagugaa

SEQ ID NO: 212497 - RNA, 19 nt, Artificial Sequence
  Description of Artificial Sequence: Synthetic oligonucleotide
  Antisense strand to SEQ ID NO: 212496
uucacuguagaacauuuag

SEQ ID NO: 212498 - RNA, 19 nt, Artificial Sequence
  Description of Artificial Sequence: Synthetic oligonucleotide
  Sense strand starting at position 2716 of SEQ ID NO: 2738
gugaacauguaaucaggaa

SEQ ID NO: 212499 - RNA, 19 nt, Artificial Sequence
  Description of Artificial Sequence: Synthetic oligonucleotide
  Antisense strand to SEQ ID NO: 212498
uuccugauuacauguucac

SEQ ID NO: 212500 - RNA, 19 nt, Artificial Sequence
  Description of Artificial Sequence: Synthetic oligonucleotide
  Sense strand starting at position 2816 of SEQ ID NO: 2738
uaguauuggugguuccuca

SEQ ID NO: 212501 - RNA, 19 nt, Artificial Sequence
  Description of Artificial Sequence: Synthetic oligonucleotide
  Antisense strand to SEQ ID NO: 212500
ugaggaaccaccaauacua

SEQ ID NO: 212502 - RNA, 19 nt, Artificial Sequence
  Description of Artificial Sequence: Synthetic oligonucleotide
  Sense strand starting at position 2930 of SEQ ID NO: 2738
uucucacacccauguugau

SEQ ID NO: 212503 - RNA, 19 nt, Artificial Sequence
  Description of Artificial Sequence: Synthetic oligonucleotide
  Antisense strand to SEQ ID NO: 212502
aucaacaugggugugagaa

SEQ ID NO: 212504 - RNA, 19 nt, Artificial Sequence
  Description of Artificial Sequence: Synthetic oligonucleotide
  Sense strand starting at position 2942 of SEQ ID NO: 2738
uguugauagcggcauucuu

SEQ ID NO: 212505 - RNA, 19 nt, Artificial Sequence
  Description of Artificial Sequence: Synthetic oligonucleotide
  Antisense strand to SEQ ID NO: 212504
aagaaugccgcuaucaaca

SEQ ID NO: 212506 - RNA, 19 nt, Artificial Sequence
  Description of Artificial Sequence: Synthetic oligonucleotide
  Sense strand starting at position 3025 of SEQ ID NO: 2738
ggguguauaccacaauguu

SEQ ID NO: 212507 - RNA, 19 nt, Artificial Sequence
  Description of Artificial Sequence: Synthetic oligonucleotide
  Antisense strand to SEQ ID NO: 212506
aacauugugguauacaccc

SEQ ID NO: 212508 - RNA, 19 nt, Artificial Sequence
  Description of Artificial Sequence: Synthetic oligonucleotide
  Sense strand starting at position 3693 of SEQ ID NO: 2738
gugggagaaucgcucgagu

SEQ ID NO: 212509 - RNA, 19 nt, Artificial Sequence
  Description of Artificial Sequence: Synthetic oligonucleotide
  Antisense strand to SEQ ID NO: 212508
acucgagcgauucucccac

SEQ ID NO: 212510 - RNA, 19 nt, Artificial Sequence
  Description of Artificial Sequence: Synthetic oligonucleotide
  Sense strand starting at position 3696 of SEQ ID NO: 2738
ggagaaucgcucgagucca

SEQ ID NO: 212511 - RNA, 19 nt, Artificial Sequence
  Description of Artificial Sequence: Synthetic oligonucleotide
  Antisense strand to SEQ ID NO: 212510
uggacucgagcgauucucc

SEQ ID NO: 212512 - RNA, 19 nt, Artificial Sequence
  Description of Artificial Sequence: Synthetic oligonucleotide
  Sense strand starting at position 3727 of SEQ ID NO: 2738
ugaacugagccaugauugu

SEQ ID NO: 212513 - RNA, 19 nt, Artificial Sequence
  Description of Artificial Sequence: Synthetic oligonucleotide
  Antisense strand to SEQ ID NO: 212512
acaaucauggcucaguuca

SEQ ID NO: 212514 - RNA, 19 nt, Artificial Sequence
  Description of Artificial Sequence: Synthetic oligonucleotide
  Sense strand starting at position 50 of SEQ ID NO: 2737
gggccuuacuaguaccaua

SEQ ID NO: 212515 - RNA, 19 nt, Artificial Sequence
  Description of Artificial Sequence: Synthetic oligonucleotide
  Antisense strand to SEQ ID NO: 212514
uaugguacuaguaaggccc

SEQ ID NO: 212516 - RNA, 19 nt, Artificial Sequence
  Description of Artificial Sequence: Synthetic oligonucleotide
  Sense strand starting at position 202 of SEQ ID NO: 2737
gcuggaagcaaagguuaaa

SEQ ID NO: 212517 - RNA, 19 nt, Artificial Sequence
  Description of Artificial Sequence: Synthetic oligonucleotide
  Antisense strand to SEQ ID NO: 212516
uuuaaccuuugcuuccagc

SEQ ID NO: 212518 - RNA, 19 nt, Artificial Sequence
  Description of Artificial Sequence: Synthetic oligonucleotide
  Sense strand starting at position 212 of SEQ ID NO: 2737
aagguuaaauccucguguu

SEQ ID NO: 212519 - RNA, 19 nt, Artificial Sequence
  Description of Artificial Sequence: Synthetic oligonucleotide
  Antisense strand to SEQ ID NO: 212518
aacacgaggauuuaaccuu

SEQ ID NO: 212520 - RNA, 19 nt, Artificial Sequence
  Description of Artificial Sequence: Synthetic oligonucleotide
  Sense strand starting at position 213 of SEQ ID NO: 2737
agguuaaauccucguguuu

SEQ ID NO: 212521 - RNA, 19 nt, Artificial Sequence
  Description of Artificial Sequence: Synthetic oligonucleotide
  Antisense strand to SEQ ID NO: 212520
aaacacgaggauuuaaccu

SEQ ID NO: 212522 - RNA, 19 nt, Artificial Sequence
  Description of Artificial Sequence: Synthetic oligonucleotide
  Sense strand starting at position 984 of SEQ ID NO: 2737
cguagcaagaguuaagaga

SEQ ID NO: 212523 - RNA, 19 nt, Artificial Sequence
  Description of Artificial Sequence: Synthetic oligonucleotide
  Antisense strand to SEQ ID NO: 212522
ucucuuaacucuugcuacg

SEQ ID NO: 212524 - RNA, 19 nt, Artificial Sequence
  Description of Artificial Sequence: Synthetic oligonucleotide
  Sense strand starting at position 1230 of SEQ ID NO: 2737
gaggacuccuguuugaaau

SEQ ID NO: 212525 - RNA, 19 nt, Artificial Sequence
  Description of Artificial Sequence: Synthetic oligonucleotide
  Antisense strand to SEQ ID NO: 212524
auuucaaacaggaguccuc

SEQ ID NO: 212526 - RNA, 19 nt, Artificial Sequence
  Description of Artificial Sequence: Synthetic oligonucleotide
  Sense strand starting at position 1231 of SEQ ID NO: 2737
aggacuccuguuugaaauc

SEQ ID NO: 212527 - RNA, 19 nt, Artificial Sequence
  Description of Artificial Sequence: Synthetic oligonucleotide
  Antisense strand to SEQ ID NO: 212526
gauuucaaacaggaguccu

SEQ ID NO: 212528 - RNA, 19 nt, Artificial Sequence
  Description of Artificial Sequence: Synthetic oligonucleotide
  Sense strand starting at position 1240 of SEQ ID NO: 2737
guuugaaaucgucaccgaa

SEQ ID NO: 212529 - RNA, 19 nt, Artificial Sequence
  Description of Artificial Sequence: Synthetic oligonucleotide
  Antisense strand to SEQ ID NO: 212528
uucggugacgauuucaaac

SEQ ID NO: 212530 - RNA, 19 nt, Artificial Sequence
  Description of Artificial Sequence: Synthetic oligonucleotide
  Sense strand starting at position 1242 of SEQ ID NO: 2737
uugaaaucgucaccgaaag

SEQ ID NO: 212531 - RNA, 19 nt, Artificial Sequence
  Description of Artificial Sequence: Synthetic oligonucleotide
  Antisense strand to SEQ ID NO: 212530
cuuucggugacgauuucaa

SEQ ID NO: 212532 - RNA, 19 nt, Artificial Sequence
  Description of Artificial Sequence: Synthetic oligonucleotide
  Sense strand starting at position 1328 of SEQ ID NO: 2737
caccaaguugugugacucu

SEQ ID NO: 212533 - RNA, 19 nt, Artificial Sequence
  Description of Artificial Sequence: Synthetic oligonucleotide
  Antisense strand to SEQ ID NO: 212532
agagucacacaacuuggug

SEQ ID NO: 212534 - RNA, 19 nt, Artificial Sequence
  Description of Artificial Sequence: Synthetic oligonucleotide
  Sense strand starting at position 1337 of SEQ ID NO: 2737
gugugacucugcucaagcu

SEQ ID NO: 212535 - RNA, 19 nt, Artificial Sequence
  Description of Artificial Sequence: Synthetic oligonucleotide
  Antisense strand to SEQ ID NO: 212534
agcuugagcagagucacac

SEQ ID NO: 212536 - RNA, 19 nt, Artificial Sequence
  Description of Artificial Sequence: Synthetic oligonucleotide
  Sense strand starting at position 1365 of SEQ ID NO: 2737
gugccucggcuuucucauu

SEQ ID NO: 212537 - RNA, 19 nt, Artificial Sequence
  Description of Artificial Sequence: Synthetic oligonucleotide
  Antisense strand to SEQ ID NO: 212536
aaugagaaagccgaggcac

SEQ ID NO: 212538 - RNA, 19 nt, Artificial Sequence
  Description of Artificial Sequence: Synthetic oligonucleotide
  Sense strand starting at position 1412 of SEQ ID NO: 2737
gagauaacgcacgaacagu

SEQ ID NO: 212539 - RNA, 19 nt, Artificial Sequence
  Description of Artificial Sequence: Synthetic oligonucleotide
  Antisense strand to SEQ ID NO: 212538
acuguucgugcguuaucuc

SEQ ID NO: 212540 - RNA, 19 nt, Artificial Sequence
  Description of Artificial Sequence: Synthetic oligonucleotide
  Sense strand starting at position 2091 of SEQ ID NO: 2737
gagaguaugcaccgagaca

SEQ ID NO: 212541 - RNA, 19 nt, Artificial Sequence
  Description of Artificial Sequence: Synthetic oligonucleotide
  Antisense strand to SEQ ID NO: 212540
ugucucggugcauacucuc

SEQ ID NO: 212542 - RNA, 19 nt, Artificial Sequence
  Description of Artificial Sequence: Synthetic oligonucleotide
  Sense strand starting at position 2110 of SEQ ID NO: 2737
caaauauagcggcgaugau

SEQ ID NO: 212543 - RNA, 19 nt, Artificial Sequence
  Description of Artificial Sequence: Synthetic oligonucleotide
  Antisense strand to SEQ ID NO: 212542
aucaucgccgcuauauuug

SEQ ID NO: 212544 - RNA, 19 nt, Artificial Sequence
  Description of Artificial Sequence: Synthetic oligonucleotide
  Sense strand starting at position 2111 of SEQ ID NO: 2737
aaauauagcggcgaugaua

SEQ ID NO: 212545 - RNA, 19 nt, Artificial Sequence
  Description of Artificial Sequence: Synthetic oligonucleotide
  Antisense strand to SEQ ID NO: 212544
uaucaucgccgcuauauuu

SEQ ID NO: 212546 - RNA, 19 nt, Artificial Sequence
  Description of Artificial Sequence: Synthetic oligonucleotide
  Sense strand starting at position 2294 of SEQ ID NO: 2737
cguggaugguguguuugua

SEQ ID NO: 212547 - RNA, 19 nt, Artificial Sequence
  Description of Artificial Sequence: Synthetic oligonucleotide
  Antisense strand to SEQ ID NO: 212546
uacaaacacaccauccacg

SEQ ID NO: 212548 - RNA, 19 nt, Artificial Sequence
  Description of Artificial Sequence: Synthetic oligonucleotide
  Sense strand starting at position 2298 of SEQ ID NO: 2737
gaugguguguuuguagaac

SEQ ID NO: 212549 - RNA, 19 nt, Artificial Sequence
  Description of Artificial Sequence: Synthetic oligonucleotide
  Antisense strand to SEQ ID NO: 212548
guucuacaaacacaccauc

SEQ ID NO: 212550 - RNA, 19 nt, Artificial Sequence
  Description of Artificial Sequence: Synthetic oligonucleotide
  Sense strand starting at position 2300 of SEQ ID NO: 2737
ugguguguuuguagaacgu

SEQ ID NO: 212551 - RNA, 19 nt, Artificial Sequence
  Description of Artificial Sequence: Synthetic oligonucleotide
  Antisense strand to SEQ ID NO: 212550
acguucuacaaacacacca

SEQ ID NO: 212552 - RNA, 19 nt, Artificial Sequence
  Description of Artificial Sequence: Synthetic oligonucleotide
  Sense strand starting at position 2331 of SEQ ID NO: 2737
agucgcuuuccucaaacau

SEQ ID NO: 212553 - RNA, 19 nt, Artificial Sequence
  Description of Artificial Sequence: Synthetic oligonucleotide
  Antisense strand to SEQ ID NO: 212552
auguuugaggaaagcgacu

SEQ ID NO: 212554 - RNA, 19 nt, Artificial Sequence
  Description of Artificial Sequence: Synthetic oligonucleotide
  Sense strand starting at position 2360 of SEQ ID NO: 2737
gccuuagcaacgcagagau

SEQ ID NO: 212555 - RNA, 19 nt, Artificial Sequence
  Description of Artificial Sequence: Synthetic oligonucleotide
  Antisense strand to SEQ ID NO: 212554
aucucugcguugcuaaggc

SEQ ID NO: 212556 - RNA, 19 nt, Artificial Sequence
  Description of Artificial Sequence: Synthetic oligonucleotide
  Sense strand starting at position 2437 of SEQ ID NO: 2737
gcgacucucccaggaacua

SEQ ID NO: 212557 - RNA, 19 nt, Artificial Sequence
  Description of Artificial Sequence: Synthetic oligonucleotide
  Antisense strand to SEQ ID NO: 212556
uaguuccugggagagucgc

SEQ ID NO: 212558 - RNA, 19 nt, Artificial Sequence
  Description of Artificial Sequence: Synthetic oligonucleotide
  Sense strand starting at position 2438 of SEQ ID NO: 2737
cgacucucccaggaacuau

SEQ ID NO: 212559 - RNA, 19 nt, Artificial Sequence
  Description of Artificial Sequence: Synthetic oligonucleotide
  Antisense strand to SEQ ID NO: 212558
auaguuccugggagagucg

SEQ ID NO: 212560 - RNA, 19 nt, Artificial Sequence
  Description of Artificial Sequence: Synthetic oligonucleotide
  Sense strand starting at position 2638 of SEQ ID NO: 2737
aagucaugucccgguaugu

SEQ ID NO: 212561 - RNA, 19 nt, Artificial Sequence
  Description of Artificial Sequence: Synthetic oligonucleotide
  Antisense strand to SEQ ID NO: 212560
acauaccgggacaugacuu

SEQ ID NO: 212562 - RNA, 19 nt, Artificial Sequence
  Description of Artificial Sequence: Synthetic oligonucleotide
  Sense strand starting at position 2644 of SEQ ID NO: 2737
ugucccgguauguagaaua

SEQ ID NO: 212563 - RNA, 19 nt, Artificial Sequence
  Description of Artificial Sequence: Synthetic oligonucleotide
  Antisense strand to SEQ ID NO: 212562
uauucuacauaccgggaca

SEQ ID NO: 212564 - RNA, 19 nt, Artificial Sequence
  Description of Artificial Sequence: Synthetic oligonucleotide
  Sense strand starting at position 2701 of SEQ ID NO: 2737
uucuaaauguucuacagug

SEQ ID NO: 212565 - RNA, 19 nt, Artificial Sequence
  Description of Artificial Sequence: Synthetic oligonucleotide
  Antisense strand to SEQ ID NO: 212564
cacuguagaacauuuagaa

SEQ ID NO: 212566 - RNA, 19 nt, Artificial Sequence
  Description of Artificial Sequence: Synthetic oligonucleotide
  Sense strand starting at position 2703 of SEQ ID NO: 2737
cuaaauguucuacagugaa

SEQ ID NO: 212567 - RNA, 19 nt, Artificial Sequence
  Description of Artificial Sequence: Synthetic oligonucleotide
  Antisense strand to SEQ ID NO: 212566
uucacuguagaacauuuag

SEQ ID NO: 212568 - RNA, 19 nt, Artificial Sequence
  Description of Artificial Sequence: Synthetic oligonucleotide
  Sense strand starting at position 2717 of SEQ ID NO: 2737
gugaacauguaaucaggaa

SEQ ID NO: 212569 - RNA, 19 nt, Artificial Sequence
  Description of Artificial Sequence: Synthetic oligonucleotide
  Antisense strand to SEQ ID NO: 212568
uuccugauuacauguucac

SEQ ID NO: 212570 - RNA, 19 nt, Artificial Sequence
  Description of Artificial Sequence: Synthetic oligonucleotide
  Sense strand starting at position 2817 of SEQ ID NO: 2737
uaguauuggugguuccuca

SEQ ID NO: 212571 - RNA, 19 nt, Artificial Sequence
  Description of Artificial Sequence: Synthetic oligonucleotide
  Antisense strand to SEQ ID NO: 212570
ugaggaaccaccaauacua

SEQ ID NO: 212572 - RNA, 19 nt, Artificial Sequence
  Description of Artificial Sequence: Synthetic oligonucleotide
  Sense strand starting at position 2931 of SEQ ID NO: 2737
uucucacacccauguugau

SEQ ID NO: 212573 - RNA, 19 nt, Artificial Sequence
  Description of Artificial Sequence: Synthetic oligonucleotide
  Antisense strand to SEQ ID NO: 212572
aucaacaugggugugagaa

SEQ ID NO: 212574 - RNA, 19 nt, Artificial Sequence
  Description of Artificial Sequence: Synthetic oligonucleotide
  Sense strand starting at position 2943 of SEQ ID NO: 2737
uguugauagcggcauucuu

SEQ ID NO: 212575 - RNA, 19 nt, Artificial Sequence
  Description of Artificial Sequence: Synthetic oligonucleotide
  Antisense strand to SEQ ID NO: 212574
aagaaugccgcuaucaaca

SEQ ID NO: 212576 - RNA, 19 nt, Artificial Sequence
  Description of Artificial Sequence: Synthetic oligonucleotide
  Sense strand starting at position 3026 of SEQ ID NO: 2737
ggguguauaccacaauguu

SEQ ID NO: 212577 - RNA, 19 nt, Artificial Sequence
  Description of Artificial Sequence: Synthetic oligonucleotide
  Antisense strand to SEQ ID NO: 212576
aacauugugguauacaccc

SEQ ID NO: 212578 - RNA, 19 nt, Artificial Sequence
  Description of Artificial Sequence: Synthetic oligonucleotide
  Sense strand starting at position 3694 of SEQ ID NO: 2737
gugggagaaucgcucgagu

SEQ ID NO: 212579 - RNA, 19 nt, Artificial Sequence
  Description of Artificial Sequence: Synthetic oligonucleotide
  Antisense strand to SEQ ID NO: 212578
acucgagcgauucucccac

SEQ ID NO: 212580 - RNA, 19 nt, Artificial Sequence
  Description of Artificial Sequence: Synthetic oligonucleotide
  Sense strand starting at position 3697 of SEQ ID NO: 2737
ggagaaucgcucgagucca

SEQ ID NO: 212581 - RNA, 19 nt, Artificial Sequence
  Description of Artificial Sequence: Synthetic oligonucleotide
  Antisense strand to SEQ ID NO: 212580
uggacucgagcgauucucc

SEQ ID NO: 212582 - RNA, 19 nt, Artificial Sequence
  Description of Artificial Sequence: Synthetic oligonucleotide
  Sense strand starting at position 3728 of SEQ ID NO: 2737
ugaacugagccaugauugu

SEQ ID NO: 212583 - RNA, 19 nt, Artificial Sequence
  Description of Artificial Sequence: Synthetic oligonucleotide
  Antisense strand to SEQ ID NO: 212582
acaaucauggcucaguuca

SEQ ID NO: 212584 - RNA, 19 nt, Artificial Sequence
  Description of Artificial Sequence: Synthetic oligonucleotide
  Sense strand starting at position 63 of SEQ ID NO: 2739
acagcuaaguguuuaaaua

SEQ ID NO: 212585 - RNA, 19 nt, Artificial Sequence
  Description of Artificial Sequence: Synthetic oligonucleotide
  Antisense strand to SEQ ID NO: 212584
uauuuaaacacuuagcugu

SEQ ID NO: 212586 - RNA, 19 nt, Artificial Sequence
  Description of Artificial Sequence: Synthetic oligonucleotide
  Sense strand starting at position 99 of SEQ ID NO: 2739
uaaggagacuggucuaagu

SEQ ID NO: 212587 - RNA, 19 nt, Artificial Sequence
  Description of Artificial Sequence: Synthetic oligonucleotide
  Antisense strand to SEQ ID NO: 212586
acuuagaccagucuccuua

SEQ ID NO: 212588 - RNA, 19 nt, Artificial Sequence
  Description of Artificial Sequence: Synthetic oligonucleotide
  Sense strand starting at position 101 of SEQ ID NO: 2739
aggagacuggucuaagucu

SEQ ID NO: 212589 - RNA, 19 nt, Artificial Sequence
  Description of Artificial Sequence: Synthetic oligonucleotide
  Antisense strand to SEQ ID NO: 212588
agacuuagaccagucuccu

SEQ ID NO: 212590 - RNA, 19 nt, Artificial Sequence
  Description of Artificial Sequence: Synthetic oligonucleotide
  Sense strand starting at position 108 of SEQ ID NO: 2739
uggucuaagucucuugaua

SEQ ID NO: 212591 - RNA, 19 nt, Artificial Sequence
  Description of Artificial Sequence: Synthetic oligonucleotide
  Antisense strand to SEQ ID NO: 212590
uaucaagagacuuagacca

SEQ ID NO: 212592 - RNA, 19 nt, Artificial Sequence
  Description of Artificial Sequence: Synthetic oligonucleotide
  Sense strand starting at position 165 of SEQ ID NO: 2739
ugaaauaaggccuggacua

SEQ ID NO: 212593 - RNA, 19 nt, Artificial Sequence
  Description of Artificial Sequence: Synthetic oligonucleotide
  Antisense strand to SEQ ID NO: 212592
uaguccaggccuuauuuca

SEQ ID NO: 212594 - RNA, 19 nt, Artificial Sequence
  Description of Artificial Sequence: Synthetic oligonucleotide
  Sense strand starting at position 189 of SEQ ID NO: 2739
cagguuacuccugagugua
